United States Patent Application Publication US 2015/0232836 A1 - sequence listing, part 5

SEQ ID NO: 41379 - DNA, 15 bp, Homo sapiens
ttttaccaaattact

SEQ ID NO: 41380 - DNA, 15 bp, Homo sapiens
tttttaccaaattac

SEQ ID NO: 41381 - DNA, 15 bp, Homo sapiens
atttttaccaaatta

SEQ ID NO: 41382 - DNA, 15 bp, Homo sapiens
aatttttaccaaatt

SEQ ID NO: 41383 - DNA, 15 bp, Homo sapiens
aaatttttaccaaat

SEQ ID NO: 41384 - DNA, 15 bp, Homo sapiens
caaatttttaccaaa

SEQ ID NO: 41385 - DNA, 15 bp, Homo sapiens
gcaaatttttaccaa

SEQ ID NO: 41386 - DNA, 15 bp, Homo sapiens
agcaaatttttacca

SEQ ID NO: 41387 - DNA, 15 bp, Homo sapiens
cagcaaatttttacc

SEQ ID NO: 41388 - DNA, 15 bp, Homo sapiens
tcagcaaatttttac

SEQ ID NO: 41389 - DNA, 15 bp, Homo sapiens
gtcagcaaattttta

SEQ ID NO: 41390 - DNA, 15 bp, Homo sapiens
ggtcagcaaattttt

SEQ ID NO: 41391 - DNA, 15 bp, Homo sapiens
aggtcagcaaatttt

SEQ ID NO: 41392 - DNA, 15 bp, Homo sapiens
caggtcagcaaattt

SEQ ID NO: 41393 - DNA, 15 bp, Homo sapiens
gcaggtcagcaaatt

SEQ ID NO: 41394 - DNA, 15 bp, Homo sapiens
agcaggtcagcaaat

SEQ ID NO: 41395 - DNA, 15 bp, Homo sapiens
aagcaggtcagcaaa

SEQ ID NO: 41396 - DNA, 15 bp, Homo sapiens
aaagcaggtcagcaa

SEQ ID NO: 41397 - DNA, 15 bp, Homo sapiens
aaaagcaggtcagca

SEQ ID NO: 41398 - DNA, 15 bp, Homo sapiens
taaaagcaggtcagc

SEQ ID NO: 41399 - DNA, 15 bp, Homo sapiens
ataaaagcaggtcag

SEQ ID NO: 41400 - DNA, 15 bp, Homo sapiens
aataaaagcaggtca

SEQ ID NO: 41401 - DNA, 15 bp, Homo sapiens
gaataaaagcaggtc

SEQ ID NO: 41402 - DNA, 15 bp, Homo sapiens
agaataaaagcaggt

SEQ ID NO: 41403 - DNA, 15 bp, Homo sapiens
aagaataaaagcagg

SEQ ID NO: 41404 - DNA, 15 bp, Homo sapiens
aaagaataaaagcag

SEQ ID NO: 41405 - DNA, 15 bp, Homo sapiens
gaaagaataaaagca

SEQ ID NO: 41406 - DNA, 15 bp, Homo sapiens
ggaaagaataaaagc

SEQ ID NO: 41407 - DNA, 15 bp, Homo sapiens
aggaaagaataaaag

SEQ ID NO: 41408 - DNA, 15 bp, Homo sapiens
gaggaaagaataaaa

SEQ ID NO: 41409 - DNA, 15 bp, Homo sapiens
ggaggaaagaataaa

SEQ ID NO: 41410 - DNA, 15 bp, Homo sapiens
aggaggaaagaataa

SEQ ID NO: 41411 - DNA, 15 bp, Homo sapiens
aaggaggaaagaata

SEQ ID NO: 41412 - DNA, 15 bp, Homo sapiens
aaaggaggaaagaat

SEQ ID NO: 41413 - DNA, 15 bp, Homo sapiens
gaaaggaggaaagaa

SEQ ID NO: 41414 - DNA, 15 bp, Homo sapiens
agaaaggaggaaaga

SEQ ID NO: 41415 - DNA, 15 bp, Homo sapiens
aagaaaggaggaaag

SEQ ID NO: 41416 - DNA, 15 bp, Homo sapiens
aaagaaaggaggaaa

SEQ ID NO: 41417 - DNA, 15 bp, Homo sapiens
gaaagaaaggaggaa

SEQ ID NO: 41418 - DNA, 15 bp, Homo sapiens
agaaagaaaggagga

SEQ ID NO: 41419 - DNA, 15 bp, Homo sapiens
aagaaagaaaggagg

SEQ ID NO: 41420 - DNA, 15 bp, Homo sapiens
gaagaaagaaaggag

SEQ ID NO: 41421 - DNA, 15 bp, Homo sapiens
ggaagaaagaaagga

SEQ ID NO: 41422 - DNA, 15 bp, Homo sapiens
aggaagaaagaaagg

SEQ ID NO: 41423 - DNA, 15 bp, Homo sapiens
aaggaagaaagaaag

SEQ ID NO: 41424 - DNA, 15 bp, Homo sapiens
aaaggaagaaagaaa

SEQ ID NO: 41425 - DNA, 15 bp, Homo sapiens
gaaaggaagaaagaa

SEQ ID NO: 41426 - DNA, 15 bp, Homo sapiens
ggaaaggaagaaaga

SEQ ID NO: 41427 - DNA, 15 bp, Homo sapiens
aggaaaggaagaaag

SEQ ID NO: 41428 - DNA, 15 bp, Homo sapiens
aaggaaaggaagaaa

SEQ ID NO: 41429 - DNA, 15 bp, Homo sapiens
gaaggaaaggaagaa

SEQ ID NO: 41430 - DNA, 15 bp, Homo sapiens
ggaaggaaaggaaga

SEQ ID NO: 41431 - DNA, 15 bp, Homo sapiens
aggaaggaaaggaag

SEQ ID NO: 41432 - DNA, 15 bp, Homo sapiens
aaggaaggaaaggaa

SEQ ID NO: 41433 - DNA, 15 bp, Homo sapiens
gaaggaaggaaagga

SEQ ID NO: 41434 - DNA, 15 bp, Homo sapiens
ggaaggaaggaaagg

SEQ ID NO: 41435 - DNA, 15 bp, Homo sapiens
aggaaggaaggaaag

SEQ ID NO: 41436 - DNA, 15 bp, Homo sapiens
aaggaaggaaggaaa

SEQ ID NO: 41437 - DNA, 15 bp, Homo sapiens
gaaggaaggaaggaa

SEQ ID NO: 41438 - DNA, 15 bp, Homo sapiens
ggaaggaaggaagga

SEQ ID NO: 41439 - DNA, 15 bp, Homo sapiens
aggaaggaaggaagg

SEQ ID NO: 41440 - DNA, 15 bp, Homo sapiens
aaggaaggaaggaag

SEQ ID NO: 41441 - DNA, 15 bp, Homo sapiens
cggaaggaaggaagg

SEQ ID NO: 41442 - DNA, 15 bp, Homo sapiens
acggaaggaaggaag

SEQ ID NO: 41443 - DNA, 15 bp, Homo sapiens
gacggaaggaaggaa

SEQ ID NO: 41444 - DNA, 15 bp, Homo sapiens
ggacggaaggaagga

SEQ ID NO: 41445 - DNA, 15 bp, Homo sapiens
aggacggaaggaagg

SEQ ID NO: 41446 - DNA, 15 bp, Homo sapiens
aaggacggaaggaag

SEQ ID NO: 41447 - DNA, 15 bp, Homo sapiens
aaaggacggaaggaa

SEQ ID NO: 41448 - DNA, 15 bp, Homo sapiens
gaaaggacggaagga

SEQ ID NO: 41449 - DNA, 15 bp, Homo sapiens
ggaaaggacggaagg

SEQ ID NO: 41450 - DNA, 15 bp, Homo sapiens
aggaaaggacggaag

SEQ ID NO: 41451 - DNA, 15 bp, Homo sapiens
aaggaaaggacggaa

SEQ ID NO: 41452 - DNA, 15 bp, Homo sapiens
aaaggaaaggacgga

SEQ ID NO: 41453 - DNA, 15 bp, Homo sapiens
gaaaggaaaggacgg

SEQ ID NO: 41454 - DNA, 15 bp, Homo sapiens
ggaaaggaaaggacg

SEQ ID NO: 41455 - DNA, 15 bp, Homo sapiens
aggaaaggaaaggac

SEQ ID NO: 41456 - DNA, 15 bp, Homo sapiens
aaggaaaggaaagga

SEQ ID NO: 41457 - DNA, 15 bp, Homo sapiens
aaaggaaaggaaagg

SEQ ID NO: 41458 - DNA, 15 bp, Homo sapiens
gaaaggaaaggaaag

SEQ ID NO: 41459 - DNA, 15 bp, Homo sapiens
ggaaaggaaaggaaa

SEQ ID NO: 41460 - DNA, 15 bp, Homo sapiens
gggaaaggaaaggaa

SEQ ID NO: 41461 - DNA, 15 bp, Homo sapiens
agggaaaggaaagga

SEQ ID NO: 41462 - DNA, 15 bp, Homo sapiens
gagggaaaggaaagg

SEQ ID NO: 41463 - DNA, 15 bp, Homo sapiens
ggagggaaaggaaag

SEQ ID NO: 41464 - DNA, 15 bp, Homo sapiens
gggagggaaaggaaa

SEQ ID NO: 41465 - DNA, 15 bp, Homo sapiens
agggagggaaaggaa

SEQ ID NO: 41466 - DNA, 15 bp, Homo sapiens
aagggagggaaagga

SEQ ID NO: 41467 - DNA, 15 bp, Homo sapiens
gaagggagggaaagg

SEQ ID NO: 41468 - DNA, 15 bp, Homo sapiens
ggaagggagggaaag

SEQ ID NO: 41469 - DNA, 15 bp, Homo sapiens
aggaagggagggaaa

SEQ ID NO: 41470 - DNA, 15 bp, Homo sapiens
aaggaagggagggaa

SEQ ID NO: 41471 - DNA, 15 bp, Homo sapiens
gaaggaagggaggga

SEQ ID NO: 41472 - DNA, 15 bp, Homo sapiens
ggaaggaagggaggg

SEQ ID NO: 41473 - DNA, 15 bp, Homo sapiens
aggaaggaagggagg

SEQ ID NO: 41474 - DNA, 15 bp, Homo sapiens
aaggaaggaagggag

SEQ ID NO: 41475 - DNA, 15 bp, Homo sapiens
gaaggaaggaaggga

SEQ ID NO: 41476 - DNA, 15 bp, Homo sapiens
agaaggaaggaaggg

SEQ ID NO: 41477 - DNA, 15 bp, Homo sapiens
aagaaggaaggaagg

SEQ ID NO: 41478 - DNA, 15 bp, Homo sapiens
aaagaaggaaggaag

SEQ ID NO: 41479 - DNA, 15 bp, Homo sapiens
gaaagaaggaaggaa

SEQ ID NO: 41480 - DNA, 15 bp, Homo sapiens
ggaaagaaggaagga

SEQ ID NO: 41481 - DNA, 15 bp, Homo sapiens
aggaaagaaggaagg

SEQ ID NO: 41482 - DNA, 15 bp, Homo sapiens
aaggaaagaaggaag

SEQ ID NO: 41483 - DNA, 15 bp, Homo sapiens
gaaggaaagaaggaa

SEQ ID NO: 41484 - DNA, 15 bp, Homo sapiens
agaaggaaagaagga

SEQ ID NO: 41485 - DNA, 15 bp, Homo sapiens
aagaaggaaagaagg

SEQ ID NO: 41486 - DNA, 15 bp, Homo sapiens
aaagaaggaaagaag

SEQ ID NO: 41487 - DNA, 15 bp, Homo sapiens
gaaagaaggaaagaa

SEQ ID NO: 41488 - DNA, 15 bp, Homo sapiens
agaaagaaggaaaga

SEQ ID NO: 41489 - DNA, 15 bp, Homo sapiens
aagaaagaaggaaag

SEQ ID NO: 41490 - DNA, 15 bp, Homo sapiens
aaagaaagaaggaaa

SEQ ID NO: 41491 - DNA, 15 bp, Homo sapiens
gaaagaaagaaggaa

SEQ ID NO: 41492 - DNA, 15 bp, Homo sapiens
ggaaagaaagaagga

SEQ ID NO: 41493 - DNA, 15 bp, Homo sapiens
aggaaagaaagaagg

SEQ ID NO: 41494 - DNA, 15 bp, Homo sapiens
aaggaaagaaagaag

SEQ ID NO: 41495 - DNA, 15 bp, Homo sapiens
aaaggaaagaaagaa

SEQ ID NO: 41496 - DNA, 15 bp, Homo sapiens
gaaaggaaagaaaga

SEQ ID NO: 41497 - DNA, 15 bp, Homo sapiens
agaaaggaaagaaag

SEQ ID NO: 41498 - DNA, 15 bp, Homo sapiens
aagaaaggaaagaaa

SEQ ID NO: 41499 - DNA, 15 bp, Homo sapiens
aaagaaaggaaagaa

SEQ ID NO: 41500 - DNA, 15 bp, Homo sapiens
gaaagaaaggaaaga

SEQ ID NO: 41501 - DNA, 15 bp, Homo sapiens
ggaaagaaaggaaag

SEQ ID NO: 41502 - DNA, 15 bp, Homo sapiens
aggaaagaaaggaaa

SEQ ID NO: 41503 - DNA, 15 bp, Homo sapiens
aaggaaagaaaggaa

SEQ ID NO: 41504 - DNA, 15 bp, Homo sapiens
aaaggaaagaaagga

SEQ ID NO: 41505 - DNA, 15 bp, Homo sapiens
gaaaggaaagaaagg

SEQ ID NO: 41506 - DNA, 15 bp, Homo sapiens
gaagaaaggaaagaa

SEQ ID NO: 41507 - DNA, 15 bp, Homo sapiens
ggaagaaaggaaaga

SEQ ID NO: 41508 - DNA, 15 bp, Homo sapiens
aggaagaaaggaaag

SEQ ID NO: 41509 - DNA, 15 bp, Homo sapiens
aaggaagaaaggaaa

SEQ ID NO: 41510 - DNA, 15 bp, Homo sapiens
aaaggaagaaaggaa

SEQ ID NO: 41511 - DNA, 15 bp, Homo sapiens
gaaaggaagaaagga

SEQ ID NO: 41512 - DNA, 15 bp, Homo sapiens
agaaaggaagaaagg

SEQ ID NO: 41513 - DNA, 15 bp, Homo sapiens
aagaaaggaagaaag

SEQ ID NO: 41514 - DNA, 15 bp, Homo sapiens
aaagaaaggaagaaa

SEQ ID NO: 41515 - DNA, 15 bp, Homo sapiens
gaaagaaaggaagaa

SEQ ID NO: 41516 - DNA, 15 bp, Homo sapiens
ggaaagaaaggaaga

SEQ ID NO: 41517 - DNA, 15 bp, Homo sapiens
aggaaagaaaggaag

SEQ ID NO: 41518 - DNA, 15 bp, Homo sapiens
gaaggaaagaaagga

SEQ ID NO: 41519 - DNA, 15 bp, Homo sapiens
ggaaggaaagaaagg

SEQ ID NO: 41520 - DNA, 15 bp, Homo sapiens
aggaaggaaagaaag

SEQ ID NO: 41521 - DNA, 15 bp, Homo sapiens
gaggaaggaaagaaa

SEQ ID NO: 41522 - DNA, 15 bp, Homo sapiens
ggaggaaggaaagaa

SEQ ID NO: 41523 - DNA, 15 bp, Homo sapiens
gggaggaaggaaaga

SEQ ID NO: 41524 - DNA, 15 bp, Homo sapiens
agggaggaaggaaag

SEQ ID NO: 41525 - DNA, 15 bp, Homo sapiens
aagggaggaaggaaa

SEQ ID NO: 41526 - DNA, 15 bp, Homo sapiens
gaagggaggaaggaa

SEQ ID NO: 41527 - DNA, 15 bp, Homo sapiens
ggaagggaggaagga

SEQ ID NO: 41528 - DNA, 15 bp, Homo sapiens
aggaagggaggaagg

SEQ ID NO: 41529 - DNA, 15 bp, Homo sapiens
aaggaagggaggaag

SEQ ID NO: 41530 - DNA, 15 bp, Homo sapiens
aaaggaagggaggaa

SEQ ID NO: 41531 - DNA, 15 bp, Homo sapiens
aaaaggaagggagga

SEQ ID NO: 41532 - DNA, 15 bp, Homo sapiens
gaaaaggaagggagg

SEQ ID NO: 41533 - DNA, 15 bp, Homo sapiens
agaaaaggaagggag

SEQ ID NO: 41534 - DNA, 15 bp, Homo sapiens
aagaaaaggaaggga

SEQ ID NO: 41535 - DNA, 15 bp, Homo sapiens
aaagaaaaggaaggg

SEQ ID NO: 41536 - DNA, 15 bp, Homo sapiens
aaaagaaaaggaagg

SEQ ID NO: 41537 - DNA, 15 bp, Homo sapiens
gaaaagaaaaggaag

SEQ ID NO: 41538 - DNA, 15 bp, Homo sapiens
agaaaagaaaaggaa

SEQ ID NO: 41539 - DNA, 15 bp, Homo sapiens
aagaaaagaaaagga

SEQ ID NO: 41540 - DNA, 15 bp, Homo sapiens
aaagaaaagaaaagg

SEQ ID NO: 41541 - DNA, 15 bp, Homo sapiens
gaaagaaaagaaaag

SEQ ID NO: 41542 - DNA, 15 bp, Homo sapiens
agaaagaaaagaaaa

SEQ ID NO: 41543 - DNA, 15 bp, Homo sapiens
aagaaagaaaagaaa

SEQ ID NO: 41544 - DNA, 15 bp, Homo sapiens
aaagaaagaaaagaa

SEQ ID NO: 41545 - DNA, 15 bp, Homo sapiens
gaaagaaagaaaaga

SEQ ID NO: 41546 - DNA, 15 bp, Homo sapiens
ggaaagaaagaaaag

SEQ ID NO: 41547 - DNA, 15 bp, Homo sapiens
aggaaagaaagaaaa

SEQ ID NO: 41548 - DNA, 15 bp, Homo sapiens
aaggaaagaaagaaa

SEQ ID NO: 41549 - DNA, 15 bp, Homo sapiens
ggaaaggaaagaaag

SEQ ID NO: 41550 - DNA, 15 bp, Homo sapiens
aggaaaggaaagaaa

SEQ ID NO: 41551 - DNA, 15 bp, Homo sapiens
aaggaaaggaaagaa

SEQ ID NO: 41552 - DNA, 15 bp, Homo sapiens
aaaggaaaggaaaga

SEQ ID NO: 41553 - DNA, 15 bp, Homo sapiens
aaaaggaaaggaaag

SEQ ID NO: 41554 - DNA, 15 bp, Homo sapiens
gaaaaggaaaggaaa

SEQ ID NO: 41555 - DNA, 15 bp, Homo sapiens
agaaaaggaaaggaa

SEQ ID NO: 41556 - DNA, 15 bp, Homo sapiens
aagaaaaggaaagga

SEQ ID NO: 41557 - DNA, 15 bp, Homo sapiens
aaagaaaaggaaagg

SEQ ID NO: 41558 - DNA, 15 bp, Homo sapiens
gaaagaaaaggaaag

SEQ ID NO: 41559 - DNA, 15 bp, Homo sapiens
ggaaagaaaaggaaa

SEQ ID NO: 41560 - DNA, 15 bp, Homo sapiens
aggaaagaaaaggaa

SEQ ID NO: 41561 - DNA, 15 bp, Homo sapiens
aaggaaagaaaagga

SEQ ID NO: 41562 - DNA, 15 bp, Homo sapiens
aaaggaaagaaaagg

SEQ ID NO: 41563 - DNA, 15 bp, Homo sapiens
gaaaggaaagaaaag

SEQ ID NO: 41564 - DNA, 15 bp, Homo sapiens
agaaaggaaagaaaa

SEQ ID NO: 41565 - DNA, 15 bp, Homo sapiens
agaaaggaaaggaaa

SEQ ID NO: 41566 - DNA, 15 bp, Homo sapiens
aagaaaggaaaggaa

SEQ ID NO: 41567 - DNA, 15 bp, Homo sapiens
aaagaaaggaaagga

SEQ ID NO: 41568 - DNA, 15 bp, Homo sapiens
gaaagaaaggaaagg

SEQ ID NO: 41569 - DNA, 15 bp, Homo sapiens
agaaagaaaggaaag

SEQ ID NO: 41570 - DNA, 15 bp, Homo sapiens
aagaaagaaaggaaa

SEQ ID NO: 41571 - DNA, 15 bp, Homo sapiens
caagaaagaaaggaa

SEQ ID NO: 41572 - DNA, 15 bp, Homo sapiens
tcaagaaagaaagga

SEQ ID NO: 41573 - DNA, 15 bp, Homo sapiens
gtcaagaaagaaagg

SEQ ID NO: 41574 - DNA, 15 bp, Homo sapiens
tgtcaagaaagaaag

SEQ ID NO: 41575 - DNA, 15 bp, Homo sapiens
ctgtcaagaaagaaa

SEQ ID NO: 41576 - DNA, 15 bp, Homo sapiens
tctgtcaagaaagaa

SEQ ID NO: 41577 - DNA, 15 bp, Homo sapiens
ctctgtcaagaaaga

SEQ ID NO: 41578 - DNA, 15 bp, Homo sapiens
actctgtcaagaaag

SEQ ID NO: 41579 - DNA, 15 bp, Homo sapiens
gactctgtcaagaaa

SEQ ID NO: 41580 - DNA, 15 bp, Homo sapiens
agactctgtcaagaa

SEQ ID NO: 41581 - DNA, 15 bp, Homo sapiens
aagactctgtcaaga

SEQ ID NO: 41582 - DNA, 15 bp, Homo sapiens
caagactctgtcaag

SEQ ID NO: 41583 - DNA, 15 bp, Homo sapiens
gcaagactctgtcaa

SEQ ID NO: 41584 - DNA, 15 bp, Homo sapiens
agcaagactctgtca

SEQ ID NO: 41585 - DNA, 15 bp, Homo sapiens
gacagagcaagactc

SEQ ID NO: 41586 - DNA, 15 bp, Homo sapiens
tgacagagcaagact

SEQ ID NO: 41587 - DNA, 15 bp, Homo sapiens
gtgacagagcaagac

SEQ ID NO: 41588 - DNA, 15 bp, Homo sapiens
agtgacagagcaaga

SEQ ID NO: 41589 - DNA, 15 bp, Homo sapiens
gagtgacagagcaag

SEQ ID NO: 41590 - DNA, 15 bp, Homo sapiens
tgagtgacagagcaa

SEQ ID NO: 41591 - DNA, 15 bp, Homo sapiens
ctgagtgacagagca

SEQ ID NO: 41592 - DNA, 15 bp, Homo sapiens
cctgagtgacagagc

SEQ ID NO: 41593 - DNA, 15 bp, Homo sapiens
gcctgagtgacagag

SEQ ID NO: 41594 - DNA, 15 bp, Homo sapiens
agcctgagtgacaga

SEQ ID NO: 41595 - DNA, 15 bp, Homo sapiens
cagcctgagtgacag

SEQ ID NO: 41596 - DNA, 15 bp, Homo sapiens
ccagcctgagtgaca

SEQ ID NO: 41597 - DNA, 15 bp, Homo sapiens
tccagcctgagtgac

SEQ ID NO: 41598 - DNA, 15 bp, Homo sapiens
ctccagcctgagtga

SEQ ID NO: 41599 - DNA, 15 bp, Homo sapiens
actccagcctgagtg

SEQ ID NO: 41600 - DNA, 15 bp, Homo sapiens
cactccagcctgagt

SEQ ID NO: 41601 - DNA, 15 bp, Homo sapiens
gcactccagcctgag

SEQ ID NO: 41602 - DNA, 15 bp, Homo sapiens
tgcactccagcctga

SEQ ID NO: 41603 - DNA, 15 bp, Homo sapiens
agaggttgcagtgag

SEQ ID NO: 41604 - DNA, 15 bp, Homo sapiens
cagaggttgcagtga

SEQ ID NO: 41605 - DNA, 15 bp, Homo sapiens
acagaggttgcagtg

SEQ ID NO: 41606 - DNA, 15 bp, Homo sapiens
gacagaggttgcagt

SEQ ID NO: 41607 - DNA, 15 bp, Homo sapiens
agacagaggttgcag

SEQ ID NO: 41608 - DNA, 15 bp, Homo sapiens
gagacagaggttgca

SEQ ID NO: 41609 - DNA, 15 bp, Homo sapiens
ggagacagaggttgc

SEQ ID NO: 41610 - DNA, 15 bp, Homo sapiens
gggagacagaggttg

SEQ ID NO: 41611 - DNA, 15 bp, Homo sapiens
tgggagacagaggtt

SEQ ID NO: 41612 - DNA, 15 bp, Homo sapiens
ctgggagacagaggt

SEQ ID NO: 41613 - DNA, 15 bp, Homo sapiens
cctgggagacagagg

SEQ ID NO: 41614 - DNA, 15 bp, Homo sapiens
acctgggagacagag

SEQ ID NO: 41615 - DNA, 15 bp, Homo sapiens
aacctgggagacaga

SEQ ID NO: 41616 - DNA, 15 bp, Homo sapiens
gaacctgggagacag

SEQ ID NO: 41617 - DNA, 15 bp, Homo sapiens
tgaacctgggagaca

SEQ ID NO: 41618 - DNA, 15 bp, Homo sapiens
ttgaacctgggagac

SEQ ID NO: 41619 - DNA, 15 bp, Homo sapiens
cttgaacctgggaga

SEQ ID NO: 41620 - DNA, 15 bp, Homo sapiens
gcttgaacctgggag

SEQ ID NO: 41621 - DNA, 15 bp, Homo sapiens
tgcttgaacctggga

SEQ ID NO: 41622 - DNA, 15 bp, Homo sapiens
ttgcttgaacctggg

SEQ ID NO: 41623 - DNA, 15 bp, Homo sapiens
attgcttgaacctgg

SEQ ID NO: 41624 - DNA, 15 bp, Homo sapiens
aattgcttgaacctg

SEQ ID NO: 41625 - DNA, 15 bp, Homo sapiens
aaattgcttgaacct

SEQ ID NO: 41626 - DNA, 15 bp, Homo sapiens
aaaattgcttgaacc

SEQ ID NO: 41627 - DNA, 15 bp, Homo sapiens
gaaaattgcttgaac

SEQ ID NO: 41628 - DNA, 15 bp, Homo sapiens
ggaaaattgcttgaa

SEQ ID NO: 41629 - DNA, 15 bp, Homo sapiens
aggaaaattgcttga

SEQ ID NO: 41630 - DNA, 15 bp, Homo sapiens
caggaaaattgcttg

SEQ ID NO: 41631 - DNA, 15 bp, Homo sapiens
gcaggaaaattgctt

SEQ ID NO: 41632 - DNA, 15 bp, Homo sapiens
ggcaggaaaattgct

SEQ ID NO: 41633 - DNA, 15 bp, Homo sapiens
aggcaggaaaattgc

SEQ ID NO: 41634 - DNA, 15 bp, Homo sapiens
gaggcaggaaaattg

SEQ ID NO: 41635 - DNA, 15 bp, Homo sapiens
tgaggcaggaaaatt

SEQ ID NO: 41636 - DNA, 15 bp, Homo sapiens
ctgaggcaggaaaat

SEQ ID NO: 41637 - DNA, 15 bp, Homo sapiens
gctgaggcaggaaaa

SEQ ID NO: 41638 - DNA, 15 bp, Homo sapiens
ggctgaggcaggaaa

SEQ ID NO: 41639 - DNA, 15 bp, Homo sapiens
aggctgaggcaggaa

SEQ ID NO: 41640 - DNA, 15 bp, Homo sapiens
tcagctactcgggag

SEQ ID NO: 41641 - DNA, 15 bp, Homo sapiens
ctcagctactcggga

SEQ ID NO: 41642 - DNA, 15 bp, Homo sapiens
tctcagctactcggg

SEQ ID NO: 41643 - DNA, 15 bp, Homo sapiens
atctcagctactcgg

SEQ ID NO: 41644 - DNA, 15 bp, Homo sapiens
aatctcagctactcg

SEQ ID NO: 41645 - DNA, 15 bp, Homo sapiens
taatctcagctactc

SEQ ID NO: 41646 - DNA, 15 bp, Homo sapiens
gtaatctcagctact

SEQ ID NO: 41647 - DNA, 15 bp, Homo sapiens
tgtaatctcagctac

SEQ ID NO: 41648 - DNA, 15 bp, Homo sapiens
ctgtaatctcagcta

SEQ ID NO: 41649 - DNA, 15 bp, Homo sapiens
cctgtaatctcagct

SEQ ID NO: 41650 - DNA, 15 bp, Homo sapiens
gcgcctgtaatctca

SEQ ID NO: 41651 - DNA, 15 bp, Homo sapiens
ggcgcctgtaatctc

SEQ ID NO: 41652 - DNA, 15 bp, Homo sapiens
tggcgcctgtaatct

SEQ ID NO: 41653 - DNA, 15 bp, Homo sapiens
ctggcgcctgtaatc

SEQ ID NO: 41654 - DNA, 15 bp, Homo sapiens
gctggcgcctgtaat

SEQ ID NO: 41655 - DNA, 15 bp, Homo sapiens
ggctggcgcctgtaa

SEQ ID NO: 41656 - DNA, 15 bp, Homo sapiens
tggctggcgcctgta

SEQ ID NO: 41657 - DNA, 15 bp, Homo sapiens
gtggctggcgcctgt

SEQ ID NO: 41658 - DNA, 15 bp, Homo sapiens
ggtggctggcgcctg

SEQ ID NO: 41659 - DNA, 15 bp, Homo sapiens
tggtggctggcgcct

SEQ ID NO: 41660 - DNA, 15 bp, Homo sapiens
gtggtggctggcgcc

SEQ ID NO: 41661 - DNA, 15 bp, Homo sapiens
tgtggtggctggcgc

SEQ ID NO: 41662 - DNA, 15 bp, Homo sapiens
gtgtggtggctggcg

SEQ ID NO: 41663 - DNA, 15 bp, Homo sapiens
ggtgtggtggctggc

SEQ ID NO: 41664 - DNA, 15 bp, Homo sapiens
gggtgtggtggctgg

SEQ ID NO: 41665 - DNA, 15 bp, Homo sapiens
tgggtgtggtggctg

SEQ ID NO: 41666 - DNA, 15 bp, Homo sapiens
ctgggtgtggtggct

SEQ ID NO: 41667 - DNA, 15 bp, Homo sapiens
gtagctgggtgtggt

SEQ ID NO: 41668 - DNA, 15 bp, Homo sapiens
agtagctgggtgtgg

SEQ ID NO: 41669 - DNA, 15 bp, Homo sapiens
cagtagctgggtgtg

SEQ ID NO: 41670 - DNA, 15 bp, Homo sapiens
tcagtagctgggtgt

SEQ ID NO: 41671 - DNA, 15 bp, Homo sapiens
gtcagtagctgggtg

SEQ ID NO: 41672 - DNA, 15 bp, Homo sapiens
ggtcagtagctgggt

SEQ ID NO: 41673 - DNA, 15 bp, Homo sapiens
aggtcagtagctggg

SEQ ID NO: 41674 - DNA, 15 bp, Homo sapiens
caggtcagtagctgg

SEQ ID NO: 41675 - DNA, 15 bp, Homo sapiens
gcaggtcagtagctg

SEQ ID NO: 41676 - DNA, 15 bp, Homo sapiens
agcaggtcagtagct

SEQ ID NO: 41677 - DNA, 15 bp, Homo sapiens
aagcaggtcagtagc

SEQ ID NO: 41678 - DNA, 15 bp, Homo sapiens
aaagcaggtcagtag

SEQ ID NO: 41679 - DNA, 15 bp, Homo sapiens
aaaagcaggtcagta

SEQ ID NO: 41680 - DNA, 15 bp, Homo sapiens
taaaagcaggtcagt

SEQ ID NO: 41681 - DNA, 15 bp, Homo sapiens
ttaaaagcaggtcag

SEQ ID NO: 41682 - DNA, 15 bp, Homo sapiens
tttaaaagcaggtca

SEQ ID NO: 41683 - DNA, 15 bp, Homo sapiens
gtttaaaagcaggtc

SEQ ID NO: 41684 - DNA, 15 bp, Homo sapiens
tgtttaaaagcaggt

SEQ ID NO: 41685 - DNA, 15 bp, Homo sapiens
ctgtttaaaagcagg

SEQ ID NO: 41686 - DNA, 15 bp, Homo sapiens
gctgtttaaaagcag

SEQ ID NO: 41687 - DNA, 15 bp, Homo sapiens
agctgtttaaaagca

SEQ ID NO: 41688 - DNA, 15 bp, Homo sapiens
cagctgtttaaaagc

SEQ ID NO: 41689 - DNA, 15 bp, Homo sapiens
ccagctgtttaaaag

SEQ ID NO: 41690 - DNA, 15 bp, Homo sapiens
cccagctgtttaaaa

SEQ ID NO: 41691 - DNA, 15 bp, Homo sapiens
tcccagctgtttaaa

SEQ ID NO: 41692 - DNA, 15 bp, Homo sapiens
ctcccagctgtttaa

SEQ ID NO: 41693 - DNA, 15 bp, Homo sapiens
tctcccagctgttta

SEQ ID NO: 41694 - DNA, 15 bp, Homo sapiens
atctcccagctgttt

SEQ ID NO: 41695 - DNA, 15 bp, Homo sapiens
tatctcccagctgtt

SEQ ID NO: 41696 - DNA, 15 bp, Homo sapiens
atatctcccagctgt

SEQ ID NO: 41697 - DNA, 15 bp, Homo sapiens
catatctcccagctg

SEQ ID NO: 41698 - DNA, 15 bp, Homo sapiens
ccatatctcccagct

SEQ ID NO: 41699 - DNA, 15 bp, Homo sapiens
accatatctcccagc

SEQ ID NO: 41700 - DNA, 15 bp, Homo sapiens
caccatatctcccag

SEQ ID NO: 41701 - DNA, 15 bp, Homo sapiens
gcaccatatctccca

SEQ ID NO: 41702 - DNA, 15 bp, Homo sapiens
ggcaccatatctccc

SEQ ID NO: 41703 - DNA, 15 bp, Homo sapiens
aggcaccatatctcc

SEQ ID NO: 41704 - DNA, 15 bp, Homo sapiens
gaggcaccatatctc

SEQ ID NO: 41705 - DNA, 15 bp, Homo sapiens
tgaggcaccatatct

SEQ ID NO: 41706 - DNA, 15 bp, Homo sapiens
ctgaggcaccatatc

SEQ ID NO: 41707 - DNA, 15 bp, Homo sapiens
tctgaggcaccatat

SEQ ID NO: 41708 - DNA, 15 bp, Homo sapiens
gtctgaggcaccata

SEQ ID NO: 41709 - DNA, 15 bp, Homo sapiens
ggtctgaggcaccat

SEQ ID NO: 41710 - DNA, 15 bp, Homo sapiens
tggtctgaggcacca

SEQ ID NO: 41711 - DNA, 15 bp, Homo sapiens
ttggtctgaggcacc

SEQ ID NO: 41712 - DNA, 15 bp, Homo sapiens
gttggtctgaggcac

SEQ ID NO: 41713 - DNA, 15 bp, Homo sapiens
ggttggtctgaggca

SEQ ID NO: 41714 - DNA, 15 bp, Homo sapiens
gggttggtctgaggc

SEQ ID NO: 41715 - DNA, 15 bp, Homo sapiens
tgggttggtctgagg

SEQ ID NO: 41716 - DNA, 15 bp, Homo sapiens
ttgggttggtctgag

SEQ ID NO: 41717 - DNA, 15 bp, Homo sapiens
gttgggttggtctga

SEQ ID NO: 41718 - DNA, 15 bp, Homo sapiens
ggttgggttggtctg

SEQ ID NO: 41719 - DNA, 15 bp, Homo sapiens
gggttgggttggtct

SEQ ID NO: 41720 - DNA, 15 bp, Homo sapiens
ggggttgggttggtc

SEQ ID NO: 41721 - DNA, 15 bp, Homo sapiens
tggggttgggttggt

SEQ ID NO: 41722 - DNA, 15 bp, Homo sapiens
atggggttgggttgg

SEQ ID NO: 41723 - DNA, 15 bp, Homo sapiens
catggggttgggttg

SEQ ID NO: 41724 - DNA, 15 bp, Homo sapiens
acatggggttgggtt

SEQ ID NO: 41725 - DNA, 15 bp, Homo sapiens
aacatggggttgggt

SEQ ID NO: 41726 - DNA, 15 bp, Homo sapiens
taacatggggttggg

SEQ ID NO: 41727 - DNA, 15 bp, Homo sapiens
ataacatggggttgg

SEQ ID NO: 41728 - DNA, 15 bp, Homo sapiens
tataacatggggttg

SEQ ID NO: 41729 - DNA, 15 bp, Homo sapiens
atataacatggggtt

SEQ ID NO: 41730 - DNA, 15 bp, Homo sapiens
catataacatggggt

SEQ ID NO: 41731 - DNA, 15 bp, Homo sapiens
acatataacatgggg

SEQ ID NO: 41732 - DNA, 15 bp, Homo sapiens
gacatataacatggg

SEQ ID NO: 41733 - DNA, 15 bp, Homo sapiens
tgacatataacatgg

SEQ ID NO: 41734 - DNA, 15 bp, Homo sapiens
ttgacatataacatg

SEQ ID NO: 41735 - DNA, 15 bp, Homo sapiens
gttgacatataacat

SEQ ID NO: 41736 - DNA, 15 bp, Homo sapiens
ggttgacatataaca

SEQ ID NO: 41737 - DNA, 15 bp, Homo sapiens
gggttgacatataac

SEQ ID NO: 41738 - DNA, 15 bp, Homo sapiens
agggttgacatataa

SEQ ID NO: 41739 - DNA, 15 bp, Homo sapiens
cagggttgacatata

SEQ ID NO: 41740 - DNA, 15 bp, Homo sapiens
tcagggttgacatat

SEQ ID NO: 41741 - DNA, 15 bp, Homo sapiens
gtcagggttgacata

SEQ ID NO: 41742 - DNA, 15 bp, Homo sapiens
tgtcagggttgacat

SEQ ID NO: 41743 - DNA, 15 bp, Homo sapiens
atgtcagggttgaca

SEQ ID NO: 41744 - DNA, 15 bp, Homo sapiens
tatgtcagggttgac

SEQ ID NO: 41745 - DNA, 15 bp, Homo sapiens
atatgtcagggttga

SEQ ID NO: 41746 - DNA, 15 bp, Homo sapiens
aatatgtcagggttg

SEQ ID NO: 41747 - DNA, 15 bp, Homo sapiens
caatatgtcagggtt

SEQ ID NO: 41748 - DNA, 15 bp, Homo sapiens
ccaatatgtcagggt

SEQ ID NO: 41749 - DNA, 15 bp, Homo sapiens
gccaatatgtcaggg

SEQ ID NO: 41750 - DNA, 15 bp, Homo sapiens
tgccaatatgtcagg

SEQ ID NO: 41751 - DNA, 15 bp, Homo sapiens
ctgccaatatgtcag

SEQ ID NO: 41752 - DNA, 15 bp, Homo sapiens
cctgccaatatgtca

SEQ ID NO: 41753 - DNA, 15 bp, Homo sapiens
gcctgccaatatgtc

SEQ ID NO: 41754 - DNA, 15 bp, Homo sapiens
tgcctgccaatatgt

SEQ ID NO: 41755 - DNA, 15 bp, Homo sapiens
ttgcctgccaatatg

SEQ ID NO: 41756 - DNA, 15 bp, Homo sapiens
gttgcctgccaatat

SEQ ID NO: 41757 - DNA, 15 bp, Homo sapiens
tgttgcctgccaata

SEQ ID NO: 41758 - DNA, 15 bp, Homo sapiens
atgttgcctgccaat

SEQ ID NO: 41759 - DNA, 15 bp, Homo sapiens
catgttgcctgccaa

SEQ ID NO: 41760 - DNA, 15 bp, Homo sapiens
tcatgttgcctgcca

SEQ ID NO: 41761 - DNA, 15 bp, Homo sapiens
ttcatgttgcctgcc

SEQ ID NO: 41762 - DNA, 15 bp, Homo sapiens
attcatgttgcctgc

SEQ ID NO: 41763 - DNA, 15 bp, Homo sapiens
gattcatgttgcctg

SEQ ID NO: 41764 - DNA, 15 bp, Homo sapiens
ggattcatgttgcct

SEQ ID NO: 41765 - DNA, 15 bp, Homo sapiens
tggattcatgttgcc

SEQ ID NO: 41766 - DNA, 15 bp, Homo sapiens
ctggattcatgttgc

SEQ ID NO: 41767 - DNA, 15 bp, Homo sapiens
tctggattcatgttg

SEQ ID NO: 41768 - DNA, 15 bp, Homo sapiens
gtctggattcatgtt

SEQ ID NO: 41769 - DNA, 15 bp, Homo sapiens
agtctggattcatgt

SEQ ID NO: 41770 - DNA, 15 bp, Homo sapiens
aagtctggattcatg

SEQ ID NO: 41771 - DNA, 15 bp, Homo sapiens
gaagtctggattcat

SEQ ID NO: 41772 - DNA, 15 bp, Homo sapiens
agaagtctggattca

SEQ ID NO: 41773 - DNA, 15 bp, Homo sapiens
tagaagtctggattc

SEQ ID NO: 41774 - DNA, 15 bp, Homo sapiens
ctagaagtctggatt

SEQ ID NO: 41775 - DNA, 15 bp, Homo sapiens
cctagaagtctggat

SEQ ID NO: 41776 - DNA, 15 bp, Homo sapiens
gcctagaagtctgga

SEQ ID NO: 41777 - DNA, 15 bp, Homo sapiens
agcctagaagtctgg

SEQ ID NO: 41778 - DNA, 15 bp, Homo sapiens
cagcctagaagtctg

SEQ ID NO: 41779 - DNA, 15 bp, Homo sapiens
acagcctagaagtct

SEQ ID NO: 41780 - DNA, 15 bp, Homo sapiens
gacagcctagaagtc

SEQ ID NO: 41781 - DNA, 15 bp, Homo sapiens
agacagcctagaagt

SEQ ID NO: 41782 - DNA, 15 bp, Homo sapiens
aagacagcctagaag

SEQ ID NO: 41783 - DNA, 15 bp, Homo sapiens
caagacagcctagaa

SEQ ID NO: 41784 - DNA, 15 bp, Homo sapiens
gcaagacagcctaga

SEQ ID NO: 41785 - DNA, 15 bp, Homo sapiens
cgcaagacagcctag

SEQ ID NO: 41786 - DNA, 15 bp, Homo sapiens
ccgcaagacagccta

SEQ ID NO: 41787 - DNA, 15 bp, Homo sapiens
cccgcaagacagcct

SEQ ID NO: 41788 - DNA, 15 bp, Homo sapiens
gcccgcaagacagcc

SEQ ID NO: 41789 - DNA, 15 bp, Homo sapiens
agcccgcaagacagc

SEQ ID NO: 41790 - DNA, 15 bp, Homo sapiens
gagcccgcaagacag

SEQ ID NO: 41791 - DNA, 15 bp, Homo sapiens
agagcccgcaagaca

SEQ ID NO: 41792 - DNA, 15 bp, Homo sapiens
aagagcccgcaagac

SEQ ID NO: 41793 - DNA, 15 bp, Homo sapiens
aaagagcccgcaaga

SEQ ID NO: 41794 - DNA, 15 bp, Homo sapiens
aaaagagcccgcaag

SEQ ID NO: 41795 - DNA, 15 bp, Homo sapiens
aaaaagagcccgcaa

SEQ ID NO: 41796 - DNA, 15 bp, Homo sapiens
aaaaaagagcccgca

SEQ ID NO: 41797 - DNA, 15 bp, Homo sapiens
caaaaaagagcccgc

SEQ ID NO: 41798 - DNA, 15 bp, Homo sapiens
gcaaaaaagagcccg

SEQ ID NO: 41799 - DNA, 15 bp, Homo sapiens
ggcaaaaaagagccc

SEQ ID NO: 41800 - DNA, 15 bp, Homo sapiens
tggcaaaaaagagcc

SEQ ID NO: 41801 - DNA, 15 bp, Homo sapiens
ctggcaaaaaagagc

SEQ ID NO: 41802 - DNA, 15 bp, Homo sapiens
actggcaaaaaagag

SEQ ID NO: 41803 - DNA, 15 bp, Homo sapiens
gactggcaaaaaaga

SEQ ID NO: 41804 - DNA, 15 bp, Homo sapiens
tgactggcaaaaaag

SEQ ID NO: 41805 - DNA, 15 bp, Homo sapiens
atgactggcaaaaaa

SEQ ID NO: 41806 - DNA, 15 bp, Homo sapiens
aatgactggcaaaaa

SEQ ID NO: 41807 - DNA, 15 bp, Homo sapiens
aaatgactggcaaaa

SEQ ID NO: 41808 - DNA, 15 bp, Homo sapiens
gaaatgactggcaaa

SEQ ID NO: 41809 - DNA, 15 bp, Homo sapiens
agaaatgactggcaa

SEQ ID NO: 41810 - DNA, 15 bp, Homo sapiens
cagaaatgactggca

SEQ ID NO: 41811 - DNA, 15 bp, Homo sapiens
tcagaaatgactggc

SEQ ID NO: 41812 - DNA, 15 bp, Homo sapiens
atcagaaatgactgg

SEQ ID NO: 41813 - DNA, 15 bp, Homo sapiens
gatcagaaatgactg

SEQ ID NO: 41814 - DNA, 15 bp, Homo sapiens
agatcagaaatgact

SEQ ID NO: 41815 - DNA, 15 bp, Homo sapiens
gagatcagaaatgac

SEQ ID NO: 41816 - DNA, 15 bp, Homo sapiens
agagatcagaaatga

SEQ ID NO: 41817 - DNA, 15 bp, Homo sapiens
gagagatcagaaatg

SEQ ID NO: 41818 - DNA, 15 bp, Homo sapiens
agagagatcagaaat

SEQ ID NO: 41819 - DNA, 15 bp, Homo sapiens
cagagagatcagaaa

SEQ ID NO: 41820 - DNA, 15 bp, Homo sapiens
tcagagagatcagaa

SEQ ID NO: 41821 - DNA, 15 bp, Homo sapiens
gtcagagagatcaga

SEQ ID NO: 41822 - DNA, 15 bp, Homo sapiens
tgtcagagagatcag

SEQ ID NO: 41823 - DNA, 15 bp, Homo sapiens
atgtcagagagatca

SEQ ID NO: 41824 - DNA, 15 bp, Homo sapiens
catgtcagagagatc

SEQ ID NO: 41825 - DNA, 15 bp, Homo sapiens
tcatgtcagagagat

SEQ ID NO: 41826 - DNA, 15 bp, Homo sapiens
ctcatgtcagagaga

SEQ ID NO: 41827 - DNA, 15 bp, Homo sapiens
gctcatgtcagagag

SEQ ID NO: 41828 - DNA, 15 bp, Homo sapiens
agctcatgtcagaga

SEQ ID NO: 41829 - DNA, 15 bp, Homo sapiens
cagctcatgtcagag

SEQ ID NO: 41830 - DNA, 15 bp, Homo sapiens
acagctcatgtcaga

SEQ ID NO: 41831 - DNA, 15 bp, Homo sapiens
aacagctcatgtcag

SEQ ID NO: 41832 - DNA, 15 bp, Homo sapiens
aaacagctcatgtca

SEQ ID NO: 41833 - DNA, 15 bp, Homo sapiens
gaaacagctcatgtc

SEQ ID NO: 41834 - DNA, 15 bp, Homo sapiens
tgaaacagctcatgt

SEQ ID NO: 41835 - DNA, 15 bp, Homo sapiens
atgaaacagctcatg

SEQ ID NO: 41836 - DNA, 15 bp, Homo sapiens
aatgaaacagctcat

SEQ ID NO: 41837 - DNA, 15 bp, Homo sapiens
aaatgaaacagctca

SEQ ID NO: 41838 - DNA, 15 bp, Homo sapiens
taaatgaaacagctc

SEQ ID NO: 41839 - DNA, 15 bp, Homo sapiens
ataaatgaaacagct

SEQ ID NO: 41840 - DNA, 15 bp, Homo sapiens
cataaatgaaacagc

SEQ ID NO: 41841 - DNA, 15 bp, Homo sapiens
gcataaatgaaacag

SEQ ID NO: 41842 - DNA, 15 bp, Homo sapiens
agcataaatgaaaca

SEQ ID NO: 41843 - DNA, 15 bp, Homo sapiens
aagcataaatgaaac

SEQ ID NO: 41844 - DNA, 15 bp, Homo sapiens
aaagcataaatgaaa

SEQ ID NO: 41845 - DNA, 15 bp, Homo sapiens
caaagcataaatgaa

SEQ ID NO: 41846 - DNA, 15 bp, Homo sapiens
ccaaagcataaatga

SEQ ID NO: 41847 - DNA, 15 bp, Homo sapiens
gccaaagcataaatg

SEQ ID NO: 41848 - DNA, 15 bp, Homo sapiens
agccaaagcataaat

SEQ ID NO: 41849 - DNA, 15 bp, Homo sapiens
cagccaaagcataaa

SEQ ID NO: 41850 - DNA, 15 bp, Homo sapiens
gcagccaaagcataa

SEQ ID NO: 41851 - DNA, 15 bp, Homo sapiens
ggcagccaaagcata

SEQ ID NO: 41852 - DNA, 15 bp, Homo sapiens
gggcagccaaagcat

SEQ ID NO: 41853 - DNA, 15 bp, Homo sapiens
tgggcagccaaagca

SEQ ID NO: 41854 - DNA, 15 bp, Homo sapiens
ctgggcagccaaagc

SEQ ID NO: 41855 - DNA, 15 bp, Homo sapiens
gctgggcagccaaag

SEQ ID NO: 41856 - DNA, 15 bp, Homo sapiens
tgctgggcagccaaa

SEQ ID NO: 41857 - DNA, 15 bp, Homo sapiens
ttgctgggcagccaa

SEQ ID NO: 41858 - DNA, 15 bp, Homo sapiens
cttgctgggcagcca

SEQ ID NO: 41859 - DNA, 15 bp, Homo sapiens
acttgctgggcagcc

SEQ ID NO: 41860 - DNA, 15 bp, Homo sapiens
tacttgctgggcagc

SEQ ID NO: 41861 - DNA, 15 bp, Homo sapiens
atacttgctgggcag

SEQ ID NO: 41862 - DNA, 15 bp, Homo sapiens
catacttgctgggca

SEQ ID NO: 41863 - DNA, 15 bp, Homo sapiens
tcatacttgctgggc

SEQ ID NO: 41864 - DNA, 15 bp, Homo sapiens
atcatacttgctggg

SEQ ID NO: 41865 - DNA, 15 bp, Homo sapiens
aatcatacttgctgg

SEQ ID NO: 41866 - DNA, 15 bp, Homo sapiens
aaatcatacttgctg

SEQ ID NO: 41867 - DNA, 15 bp, Homo sapiens
caaatcatacttgct

SEQ ID NO: 41868 - DNA, 15 bp, Homo sapiens
acaaatcatacttgc

SEQ ID NO: 41869 - DNA, 15 bp, Homo sapiens
gacaaatcatacttg

SEQ ID NO: 41870 - DNA, 15 bp, Homo sapiens
ggacaaatcatactt

SEQ ID NO: 41871 - DNA, 15 bp, Homo sapiens
aggacaaatcatact

SEQ ID NO: 41872 - DNA, 15 bp, Homo sapiens
aaggacaaatcatac

SEQ ID NO: 41873 - DNA, 15 bp, Homo sapiens
aaaggacaaatcata

SEQ ID NO: 41874 - DNA, 15 bp, Homo sapiens
gaaaggacaaatcat

SEQ ID NO: 41875 - DNA, 15 bp, Homo sapiens
tgaaaggacaaatca

SEQ ID NO: 41876 - DNA, 15 bp, Homo sapiens
gtgaaaggacaaatc

SEQ ID NO: 41877 - DNA, 15 bp, Homo sapiens
tgtgaaaggacaaat

SEQ ID NO: 41878 - DNA, 15 bp, Homo sapiens
ttgtgaaaggacaaa

SEQ ID NO: 41879 - DNA, 15 bp, Homo sapiens
attgtgaaaggacaa

SEQ ID NO: 41880 - DNA, 15 bp, Homo sapiens
aattgtgaaaggaca

SEQ ID NO: 41881 - DNA, 15 bp, Homo sapiens
caattgtgaaaggac

SEQ ID NO: 41882 - DNA, 15 bp, Homo sapiens
ccaattgtgaaagga

SEQ ID NO: 41883 - DNA, 15 bp, Homo sapiens
accaattgtgaaagg

SEQ ID NO: 41884 - DNA, 15 bp, Homo sapiens
caccaattgtgaaag

SEQ ID NO: 41885 - DNA, 15 bp, Homo sapiens
ccaccaattgtgaaa

SEQ ID NO: 41886 - DNA, 15 bp, Homo sapiens
gccaccaattgtgaa

SEQ ID NO: 41887 - DNA, 15 bp, Homo sapiens
cccaaagtactgaga

SEQ ID NO: 41888 - DNA, 15 bp, Homo sapiens
tcccaaagtactgag

SEQ ID NO: 41889 - DNA, 15 bp, Homo sapiens
ctcccaaagtactga

SEQ ID NO: 41890 - DNA, 15 bp, Homo sapiens
tcccaccttggcctc

SEQ ID NO: 41891 - DNA, 15 bp, Homo sapiens
ctcccaccttggcct

SEQ ID NO: 41892 - DNA, 15 bp, Homo sapiens
tctcccaccttggcc

SEQ ID NO: 41893 - DNA, 15 bp, Homo sapiens
ttctcccaccttggc

SEQ ID NO: 41894 - DNA, 15 bp, Homo sapiens
attctcccaccttgg

SEQ ID NO: 41895 - DNA, 15 bp, Homo sapiens
aattctcccaccttg

SEQ ID NO: 41896 - DNA, 15 bp, Homo sapiens
caattctcccacctt

SEQ ID NO: 41897 - DNA, 15 bp, Homo sapiens
gcaattctcccacct

SEQ ID NO: 41898 - DNA, 15 bp, Homo sapiens
agcaattctcccacc

SEQ ID NO: 41899 - DNA, 15 bp, Homo sapiens
gagcaattctcccac

SEQ ID NO: 41900 - DNA, 15 bp, Homo sapiens
cgagcaattctccca

SEQ ID NO: 41901 - DNA, 15 bp, Homo sapiens
tcgagcaattctccc

SEQ ID NO: 41902 - DNA, 15 bp, Homo sapiens
ctcgagcaattctcc

SEQ ID NO: 41903 - DNA, 15 bp, Homo sapiens
cctcgagcaattctc

SEQ ID NO: 41904 - DNA, 15 bp, Homo sapiens
gcctcgagcaattct

SEQ ID NO: 41905 - DNA, 15 bp, Homo sapiens
ggcctcgagcaattc

SEQ ID NO: 41906 - DNA, 15 bp, Homo sapiens
tggcctcgagcaatt

SEQ ID NO: 41907 - DNA, 15 bp, Homo sapiens
ttggcctcgagcaat

SEQ ID NO: 41908 - DNA, 15 bp, Homo sapiens
cttggcctcgagcaa

SEQ ID NO: 41909 - DNA, 15 bp, Homo sapiens
tcttggcctcgagca

SEQ ID NO: 41910 - DNA, 15 bp, Homo sapiens
ctcttggcctcgagc

SEQ ID NO: 41911 - DNA, 15 bp, Homo sapiens
actcttggcctcgag

SEQ ID NO: 41912 - DNA, 15 bp, Homo sapiens
aactcttggcctcga

SEQ ID NO: 41913 - DNA, 15 bp, Homo sapiens
gaactcttggcctcg

SEQ ID NO: 41914 - DNA, 15 bp, Homo sapiens
tgaactcttggcctc

SEQ ID NO: 41915 - DNA, 15 bp, Homo sapiens
ttgaactcttggcct

SEQ ID NO: 41916 - DNA, 15 bp, Homo sapiens
cttgaactcttggcc

SEQ ID NO: 41917 - DNA, 15 bp, Homo sapiens
tcttgaactcttggc

SEQ ID NO: 41918 - DNA, 15 bp, Homo sapiens
gtcttgaactcttgg

SEQ ID NO: 41919 - DNA, 15 bp, Homo sapiens
ggtcttgaactcttg

SEQ ID NO: 41920 - DNA, 15 bp, Homo sapiens
tggtcttgaactctt

SEQ ID NO: 41921 - DNA, 15 bp, Homo sapiens
cattgcccaggctgg

SEQ ID NO: 41922 - DNA, 15 bp, Homo sapiens
acattgcccaggctg

SEQ ID NO: 41923 - DNA, 15 bp, Homo sapiens
tacattgcccaggct

SEQ ID NO: 41924 - DNA, 15 bp, Homo sapiens
ctacattgcccaggc

SEQ ID NO: 41925 - DNA, 15 bp, Homo sapiens
gctacattgcccagg

SEQ ID NO: 41926 - DNA, 15 bp, Homo sapiens
cgctacattgcccag

SEQ ID NO: 41927 - DNA, 15 bp, Homo sapiens
tcgctacattgccca

SEQ ID NO: 41928 - DNA, 15 bp, Homo sapiens
ctcgctacattgccc

SEQ ID NO: 41929 - DNA, 15 bp, Homo sapiens
tctcgctacattgcc

SEQ ID NO: 41930 - DNA, 15 bp, Homo sapiens
gtctcgctacattgc

SEQ ID NO: 41931 - DNA, 15 bp, Homo sapiens
ggtctcgctacattg

SEQ ID NO: 41932 - DNA, 15 bp, Homo sapiens
aggtctcgctacatt

SEQ ID NO: 41933 - DNA, 15 bp, Homo sapiens
caggtctcgctacat

SEQ ID NO: 41934 - DNA, 15 bp, Homo sapiens
tcaggtctcgctaca

SEQ ID NO: 41935 - DNA, 15 bp, Homo sapiens
atcaggtctcgctac

SEQ ID NO: 41936 - DNA, 15 bp, Homo sapiens
gatcaggtctcgcta

SEQ ID NO: 41937 - DNA, 15 bp, Homo sapiens
agatcaggtctcgct

SEQ ID NO: 41938 - DNA, 15 bp, Homo sapiens
gagatcaggtctcgc

SEQ ID NO: 41939 - DNA, 15 bp, Homo sapiens
agagatcaggtctcg

SEQ ID NO: 41940 - DNA, 15 bp, Homo sapiens
tagagatcaggtctc

SEQ ID NO: 41941 - DNA, 15 bp, Homo sapiens
atagagatcaggtct

SEQ ID NO: 41942 - DNA, 15 bp, Homo sapiens
tatagagatcaggtc

SEQ ID NO: 41943 - DNA, 15 bp, Homo sapiens
ttatagagatcaggt

SEQ ID NO: 41944 - DNA, 15 bp, Homo sapiens
tttatagagatcagg

SEQ ID NO: 41945 - DNA, 15 bp, Homo sapiens
ttttatagagatcag

SEQ ID NO: 41946 - DNA, 15 bp, Homo sapiens
tttttatagagatca

SEQ ID NO: 41947 - DNA, 15 bp, Homo sapiens
ctttttatagagatc

SEQ ID NO: 41948 - DNA, 15 bp, Homo sapiens
actttttatagagat

SEQ ID NO: 41949 - DNA, 15 bp, Homo sapiens
tactttttatagaga

SEQ ID NO: 41950 - DNA, 15 bp, Homo sapiens
ttactttttatagag

SEQ ID NO: 41951 - DNA, 15 bp, Homo sapiens
tttactttttataga

SEQ ID NO: 41952 - DNA, 15 bp, Homo sapiens
ttttactttttatag

SEQ ID NO: 41953 - DNA, 15 bp, Homo sapiens
tttttactttttata

SEQ ID NO: 41954 - DNA, 15 bp, Homo sapiens
ttttttactttttat

SEQ ID NO: 41955 - DNA, 15 bp, Homo sapiens
tttttttacttttta

SEQ ID NO: 41956 - DNA, 15 bp, Homo sapiens
ttttttttacttttt

SEQ ID NO: 41957 - DNA, 15 bp, Homo sapiens
tttttttttactttt

SEQ ID NO: 41958 - DNA, 15 bp, Homo sapiens
ttttttttttacttt

SEQ ID NO: 41959 - DNA, 15 bp, Homo sapiens
tttttttttttactt

SEQ ID NO: 41960 - DNA, 15 bp, Homo sapiens
ttttttttttttact

SEQ ID NO: 41961 - DNA, 15 bp, Homo sapiens
tttttttttttttac

SEQ ID NO: 41962 - DNA, 15 bp, Homo sapiens
agttttttttttttt

SEQ ID NO: 41963 - DNA, 15 bp, Homo sapiens
tagtttttttttttt

SEQ ID NO: 41964 - DNA, 15 bp, Homo sapiens
ctagttttttttttt

SEQ ID NO: 41965 - DNA, 15 bp, Homo sapiens
gctagtttttttttt

SEQ ID NO: 41966 - DNA, 15 bp, Homo sapiens
agctagttttttttt

SEQ ID NO: 41967 - DNA, 15 bp, Homo sapiens
cagctagtttttttt

SEQ ID NO: 41968 - DNA, 15 bp, Homo sapiens
ccccagctagttttt

SEQ ID NO: 41969 - DNA, 15 bp, Homo sapiens
gccccagctagtttt

SEQ ID NO: 41970 - DNA, 15 bp, Homo sapiens
ggccccagctagttt

SEQ ID NO: 41971 - DNA, 15 bp, Homo sapiens
tggccccagctagtt

SEQ ID NO: 41972 - DNA, 15 bp, Homo sapiens
ctggccccagctagt

SEQ ID NO: 41973 - DNA, 15 bp, Homo sapiens
cctggccccagctag

SEQ ID NO: 41974 - DNA, 15 bp, Homo sapiens
gcctggccccagcta

SEQ ID NO: 41975 - DNA, 15 bp, Homo sapiens
cgcctggccccagct

SEQ ID NO: 41976 - DNA, 15 bp, Homo sapiens
acgcctggccccagc

SEQ ID NO: 41977 - DNA, 15 bp, Homo sapiens
cacgcctggccccag

SEQ ID NO: 41978 - DNA, 15 bp, Homo sapiens
ccacgcctggcccca

SEQ ID NO: 41979 - DNA, 15 bp, Homo sapiens
accacgcctggcccc

SEQ ID NO: 41980 - DNA, 15 bp, Homo sapiens
cccaccacgcctggc

SEQ ID NO: 41981 - DNA, 15 bp, Homo sapiens
acccaccacgcctgg

SEQ ID NO: 41982 - DNA, 15 bp, Homo sapiens
cacccaccacgcctg

SEQ ID NO: 41983 - DNA, 15 bp, Homo sapiens
ccacccaccacgcct

SEQ ID NO: 41984 - DNA, 15 bp, Homo sapiens
gccacccaccacgcc

SEQ ID NO: 41985 - DNA, 15 bp, Homo sapiens
agccacccaccacgc

SEQ ID NO: 41986 - DNA, 15 bp, Homo sapiens
aagccacccaccacg

SEQ ID NO: 41987 - DNA, 15 bp, Homo sapiens
taagccacccaccac

SEQ ID NO: 41988 - DNA, 15 bp, Homo sapiens
gtaagccacccacca

SEQ ID NO: 41989 - DNA, 15 bp, Homo sapiens
cgtaagccacccacc

SEQ ID NO: 41990 - DNA, 15 bp, Homo sapiens
gcgtaagccacccac

SEQ ID NO: 41991 - DNA, 15 bp, Homo sapiens
ggcgtaagccaccca

SEQ ID NO: 41992 - DNA, 15 bp, Homo sapiens
aggcgtaagccaccc

SEQ ID NO: 41993 - DNA, 15 bp, Homo sapiens
caggcgtaagccacc

SEQ ID NO: 41994 - DNA, 15 bp, Homo sapiens
acaggcgtaagccac

SEQ ID NO: 41995 - DNA, 15 bp, Homo sapiens
tacaggcgtaagcca

SEQ ID NO: 41996 - DNA, 15 bp, Homo sapiens
ttacaggcgtaagcc

SEQ ID NO: 41997 - DNA, 15 bp, Homo sapiens
attacaggcgtaagc

SEQ ID NO: 41998 - DNA, 15 bp, Homo sapiens
gattacaggcgtaag

SEQ ID NO: 41999 - DNA, 15 bp, Homo sapiens
ggattacaggcgtaa

SEQ ID NO: 42000 - DNA, 15 bp, Homo sapiens
gggattacaggcgta

SEQ ID NO: 42001 - DNA, 15 bp, Homo sapiens
ccctcaggtgatctg

SEQ ID NO: 42002 - DNA, 15 bp, Homo sapiens
gccctcaggtgatct

SEQ ID NO: 42003 - DNA, 15 bp, Homo sapiens
tgccctcaggtgatc

SEQ ID NO: 42004 - DNA, 15 bp, Homo sapiens
ctgccctcaggtgat

SEQ ID NO: 42005 - DNA, 15 bp, Homo sapiens
cctgccctcaggtga

SEQ ID NO: 42006 - DNA, 15 bp, Homo sapiens
tcctgccctcaggtg

SEQ ID NO: 42007 - DNA, 15 bp, Homo sapiens
ctcctgccctcaggt

SEQ ID NO: 42008 - DNA, 15 bp, Homo sapiens
actcctgccctcagg

SEQ ID NO: 42009 - DNA, 15 bp, Homo sapiens
aactcctgccctcag

SEQ ID NO: 42010 - DNA, 15 bp, Homo sapiens
gaactcctgccctca

SEQ ID NO: 42011 - DNA, 15 bp, Homo sapiens
tgaactcctgccctc

SEQ ID NO: 42012 - DNA, 15 bp, Homo sapiens
ctgaactcctgccct

SEQ ID NO: 42013 - DNA, 15 bp, Homo sapiens
cctgaactcctgccc

SEQ ID NO: 42014 - DNA, 15 bp, Homo sapiens
tcctgaactcctgcc

SEQ ID NO: 42015 - DNA, 15 bp, Homo sapiens
gtcctgaactcctgc

SEQ ID NO: 42016 - DNA, 15 bp, Homo sapiens
ggtcctgaactcctg

SEQ ID NO: 42017 - DNA, 15 bp, Homo sapiens
tggtcctgaactcct

SEQ ID NO: 42018 - DNA, 15 bp, Homo sapiens
ttggtcctgaactcc

SEQ ID NO: 42019 - DNA, 15 bp, Homo sapiens
gttggtcctgaactc

SEQ ID NO: 42020 - DNA, 15 bp, Homo sapiens
ggttggtcctgaact

SEQ ID NO: 42021 - DNA, 15 bp, Homo sapiens
aggttggtcctgaac

SEQ ID NO: 42022 - DNA, 15 bp, Homo sapiens
caggttggtcctgaa

SEQ ID NO: 42023 - DNA, 15 bp, Homo sapiens
tcaggttggtcctga

SEQ ID NO: 42024 - DNA, 15 bp, Homo sapiens
gtcaggttggtcctg

SEQ ID NO: 42025 - DNA, 15 bp, Homo sapiens
ggtcaggttggtcct

SEQ ID NO: 42026 - DNA, 15 bp, Homo sapiens
tggtcaggttggtcc

SEQ ID NO: 42027 - DNA, 15 bp, Homo sapiens
ttggtcaggttggtc

SEQ ID NO: 42028 - DNA, 15 bp, Homo sapiens
attggtcaggttggt

SEQ ID NO: 42029 - DNA, 15 bp, Homo sapiens
tattggtcaggttgg

SEQ ID NO: 42030 - DNA, 15 bp, Homo sapiens
atattggtcaggttg

SEQ ID NO: 42031 - DNA, 15 bp, Homo sapiens
catattggtcaggtt

SEQ ID NO: 42032 - DNA, 15 bp, Homo sapiens
ccatattggtcaggt

SEQ ID NO: 42033 - DNA, 15 bp, Homo sapiens
tccatattggtcagg

SEQ ID NO: 42034 - DNA, 15 bp, Homo sapiens
ctccatattggtcag

SEQ ID NO: 42035 - DNA, 15 bp, Homo sapiens
tctccatattggtca

SEQ ID NO: 42036 - DNA, 15 bp, Homo sapiens
ttctccatattggtc

SEQ ID NO: 42037 - DNA, 15 bp, Homo sapiens
tttctccatattggt

SEQ ID NO: 42038 - DNA, 15 bp, Homo sapiens
gtttctccatattgg

SEQ ID NO: 42039 - DNA, 15 bp, Homo sapiens
ggtttctccatattg

SEQ ID NO: 42040 - DNA, 15 bp, Homo sapiens
gggtttctccatatt

SEQ ID NO: 42041 - DNA, 15 bp, Homo sapiens
agggtttctccatat

SEQ ID NO: 42042 - DNA, 15 bp, Homo sapiens
cagggtttctccata

SEQ ID NO: 42043 - DNA, 15 bp, Homo sapiens
acagggtttctccat

SEQ ID NO: 42044 - DNA, 15 bp, Homo sapiens
gacagggtttctcca

SEQ ID NO: 42045 - DNA, 15 bp, Homo sapiens
agacagggtttctcc

SEQ ID NO: 42046 - DNA, 15 bp, Homo sapiens
gagacagggtttctc

SEQ ID NO: 42047 - DNA, 15 bp, Homo sapiens
agagacagggtttct

SEQ ID NO: 42048 - DNA, 15 bp, Homo sapiens
gctaattttgtattt

SEQ ID NO: 42049 - DNA, 15 bp, Homo sapiens
ggctaattttgtatt

SEQ ID NO: 42050 - DNA, 15 bp, Homo sapiens
tggctaattttgtat

SEQ ID NO: 42051 - DNA, 15 bp, Homo sapiens
ctggctaattttgta

SEQ ID NO: 42052 - DNA, 15 bp, Homo sapiens
cctggctaattttgt

SEQ ID NO: 42053 - DNA, 15 bp, Homo sapiens
gcctggctaattttg

SEQ ID NO: 42054 - DNA, 15 bp, Homo sapiens
agcctggctaatttt

SEQ ID NO: 42055 - DNA, 15 bp, Homo sapiens
aagcctggctaattt

SEQ ID NO: 42056 - DNA, 15 bp, Homo sapiens
caagcctggctaatt

SEQ ID NO: 42057 - DNA, 15 bp, Homo sapiens
ccaagcctggctaat

SEQ ID NO: 42058 - DNA, 15 bp, Homo sapiens
accaagcctggctaa

SEQ ID NO: 42059 - DNA, 15 bp, Homo sapiens
caccaagcctggcta

SEQ ID NO: 42060 - DNA, 15 bp, Homo sapiens
ccaccaagcctggct

SEQ ID NO: 42061 - DNA, 15 bp, Homo sapiens
gccaccaagcctggc

SEQ ID NO: 42062 - DNA, 15 bp, Homo sapiens
agccaccaagcctgg

SEQ ID NO: 42063 - DNA, 15 bp, Homo sapiens
aagccaccaagcctg

SEQ ID NO: 42064 - DNA, 15 bp, Homo sapiens
taagccaccaagcct

SEQ ID NO: 42065 - DNA, 15 bp, Homo sapiens
ataagccaccaagcc

SEQ ID NO: 42066 - DNA, 15 bp, Homo sapiens
cataagccaccaagc

SEQ ID NO: 42067 - DNA, 15 bp, Homo sapiens
gcataagccaccaag

SEQ ID NO: 42068 - DNA, 15 bp, Homo sapiens
ggcataagccaccaa

SEQ ID NO: 42069 - DNA, 15 bp, Homo sapiens
ctacaggcataagcc

SEQ ID NO: 42070 - DNA, 15 bp, Homo sapiens
actacaggcataagc

SEQ ID NO: 42071 - DNA, 15 bp, Homo sapiens
gactacaggcataag

SEQ ID NO: 42072 - DNA, 15 bp, Homo sapiens
ggactacaggcataa

SEQ ID NO: 42073 - DNA, 15 bp, Homo sapiens
gggactacaggcata

SEQ ID NO: 42074 - DNA, 15 bp, Homo sapiens
aaacctctgcctccc

SEQ ID NO: 42075 - DNA, 15 bp, Homo sapiens
gaaacctctgcctcc

SEQ ID NO: 42076 - DNA, 15 bp, Homo sapiens
tgaaacctctgcctc

SEQ ID NO: 42077 - DNA, 15 bp, Homo sapiens
ctgaaacctctgcct

SEQ ID NO: 42078 - DNA, 15 bp, Homo sapiens
actgaaacctctgcc

SEQ ID NO: 42079 - DNA, 15 bp, Homo sapiens
cactgaaacctctgc

SEQ ID NO: 42080 - DNA, 15 bp, Homo sapiens
tcactgaaacctctg

SEQ ID NO: 42081 - DNA, 15 bp, Homo sapiens
ctcactgaaacctct

SEQ ID NO: 42082 - DNA, 15 bp, Homo sapiens
gctcactgaaacctc

SEQ ID NO: 42083 - DNA, 15 bp, Homo sapiens
agctcactgaaacct

SEQ ID NO: 42084 - DNA, 15 bp, Homo sapiens
cagctcactgaaacc

SEQ ID NO: 42085 - DNA, 15 bp, Homo sapiens
tcagctcactgaaac

SEQ ID NO: 42086 - DNA, 15 bp, Homo sapiens
ctcagctcactgaaa

SEQ ID NO: 42087 - DNA, 15 bp, Homo sapiens
tctcagctcactgaa

SEQ ID NO: 42088 - DNA, 15 bp, Homo sapiens
atctcagctcactga

SEQ ID NO: 42089 - DNA, 15 bp, Homo sapiens
cgatctcagctcact

SEQ ID NO: 42090 - DNA, 15 bp, Homo sapiens
gcgatctcagctcac

SEQ ID NO: 42091 - DNA, 15 bp, Homo sapiens
cgcgatctcagctca

SEQ ID NO: 42092 - DNA, 15 bp, Homo sapiens
gcgcgatctcagctc

SEQ ID NO: 42093 - DNA, 15 bp, Homo sapiens
ggcgcgatctcagct

SEQ ID NO: 42094 - DNA, 15 bp, Homo sapiens
tggcgcgatctcagc

SEQ ID NO: 42095 - DNA, 15 bp, Homo sapiens
atggcgcgatctcag

SEQ ID NO: 42096 - DNA, 15 bp, Homo sapiens
aatggcgcgatctca

SEQ ID NO: 42097 - DNA, 15 bp, Homo sapiens
agagtgcaatggcgc

SEQ ID NO: 42098 - DNA, 15 bp, Homo sapiens
tagagtgcaatggcg

SEQ ID NO: 42099 - DNA, 15 bp, Homo sapiens
ctagagtgcaatggc

SEQ ID NO: 42100 - DNA, 15 bp, Homo sapiens
gctagagtgcaatgg

SEQ ID NO: 42101 - DNA, 15 bp, Homo sapiens
ggctagagtgcaatg

SEQ ID NO: 42102 - DNA, 15 bp, Homo sapiens
aggctagagtgcaat

SEQ ID NO: 42103 - DNA, 15 bp, Homo sapiens
caggctagagtgcaa

SEQ ID NO: 42104 - DNA, 15 bp, Homo sapiens
cccaggctagagtgc

SEQ ID NO: 42105 - DNA, 15 bp, Homo sapiens
gcccaggctagagtg

SEQ ID NO: 42106 - DNA, 15 bp, Homo sapiens
tgcccaggctagagt

SEQ ID NO: 42107 - DNA, 15 bp, Homo sapiens
ttgcccaggctagag

SEQ ID NO: 42108 - DNA, 15 bp, Homo sapiens
gttgcccaggctaga

SEQ ID NO: 42109 - DNA, 15 bp, Homo sapiens
tgttgcccaggctag

SEQ ID NO: 42110 - DNA, 15 bp, Homo sapiens
ttgttgcccaggcta

SEQ ID NO: 42111 - DNA, 15 bp, Homo sapiens
ttcttgttgcccagg

SEQ ID NO: 42112 - DNA, 15 bp, Homo sapiens
attcttgttgcccag

SEQ ID NO: 42113 - DNA, 15 bp, Homo sapiens
cattcttgttgccca

SEQ ID NO: 42114 - DNA, 15 bp, Homo sapiens
tcattcttgttgccc

SEQ ID NO: 42115 - DNA, 15 bp, Homo sapiens
ttcattcttgttgcc

SEQ ID NO: 42116 - DNA, 15 bp, Homo sapiens
tttcattcttgttgc

SEQ ID NO: 42117 - DNA, 15 bp, Homo sapiens
gtttcattcttgttg

SEQ ID NO: 42118 - DNA, 15 bp, Homo sapiens
agtttcattcttgtt

SEQ ID NO: 42119 - DNA, 15 bp, Homo sapiens
gagtttcattcttgt

SEQ ID NO: 42120 - DNA, 15 bp, Homo sapiens
ggagtttcattcttg

SEQ ID NO: 42121 - DNA, 15 bp, Homo sapiens
tggagtttcattctt

SEQ ID NO: 42122 - DNA, 15 bp, Homo sapiens
atggagtttcattct

SEQ ID NO: 42123 - DNA, 15 bp, Homo sapiens
gatggagtttcattc

SEQ ID NO: 42124 - DNA, 15 bp, Homo sapiens
agatggagtttcatt

SEQ ID NO: 42125 - DNA, 15 bp, Homo sapiens
gagatggagtttcat

SEQ ID NO: 42126 - DNA, 15 bp, Homo sapiens
gattttttttttttt

SEQ ID NO: 42127 - DNA, 15 bp, Homo sapiens
tgatttttttttttt

SEQ ID NO: 42128 - DNA, 15 bp, Homo sapiens
ctgattttttttttt

SEQ ID NO: 42129 - DNA, 15 bp, Homo sapiens
gctgatttttttttt

SEQ ID NO: 42130 - DNA, 15 bp, Homo sapiens
agctgattttttttt

SEQ ID NO: 42131 - DNA, 15 bp, Homo sapiens
cagctgatttttttt

SEQ ID NO: 42132 - DNA, 15 bp, Homo sapiens
ccagctgattttttt

SEQ ID NO: 42133 - DNA, 15 bp, Homo sapiens
tccagctgatttttt

SEQ ID NO: 42134 - DNA, 15 bp, Homo sapiens
ttccagctgattttt

SEQ ID NO: 42135 - DNA, 15 bp, Homo sapiens
cttccagctgatttt

SEQ ID NO: 42136 - DNA, 15 bp, Homo sapiens
ccttccagctgattt

SEQ ID NO: 42137 - DNA, 15 bp, Homo sapiens
accttccagctgatt

SEQ ID NO: 42138 - DNA, 15 bp, Homo sapiens
caccttccagctgat

SEQ ID NO: 42139 - DNA, 15 bp, Homo sapiens
ccaccttccagctga

SEQ ID NO: 42140 - DNA, 15 bp, Homo sapiens
gccaccttccagctg

SEQ ID NO: 42141 - DNA, 15 bp, Homo sapiens
tgccaccttccagct

SEQ ID NO: 42142 - DNA, 15 bp, Homo sapiens
ttgccaccttccagc

SEQ ID NO: 42143 - DNA, 15 bp, Homo sapiens
tttgccaccttccag

SEQ ID NO: 42144 - DNA, 15 bp, Homo sapiens
gtttgccaccttcca

SEQ ID NO: 42145 - DNA, 15 bp, Homo sapiens
tgtttgccaccttcc

SEQ ID NO: 42146 - DNA, 15 bp, Homo sapiens
gtgtttgccaccttc

SEQ ID NO: 42147 - DNA, 15 bp, Homo sapiens
ggtgtttgccacctt

SEQ ID NO: 42148 - DNA, 15 bp, Homo sapiens
aggtgtttgccacct

SEQ ID NO: 42149 - DNA, 15 bp, Homo sapiens
caggtgtttgccacc

SEQ ID NO: 42150 - DNA, 15 bp, Homo sapiens
acaggtgtttgccac

SEQ ID NO: 42151 - DNA, 15 bp, Homo sapiens
cacaggtgtttgcca

SEQ ID NO: 42152 - DNA, 15 bp, Homo sapiens
ccacaggtgtttgcc

SEQ ID NO: 42153 - DNA, 15 bp, Homo sapiens
accacaggtgtttgc

SEQ ID NO: 42154 - DNA, 15 bp, Homo sapiens
gaccacaggtgtttg

SEQ ID NO: 42155 - DNA, 15 bp, Homo sapiens
ggaccacaggtgttt

SEQ ID NO: 42156 - DNA, 15 bp, Homo sapiens
gggaccacaggtgtt

SEQ ID NO: 42157 - DNA, 15 bp, Homo sapiens
tgggaccacaggtgt

SEQ ID NO: 42158 - DNA, 15 bp, Homo sapiens
ctgggaccacaggtg

SEQ ID NO: 42159 - DNA, 15 bp, Homo sapiens
gctgggaccacaggt

SEQ ID NO: 42160 - DNA, 15 bp, Homo sapiens
agctgggaccacagg

SEQ ID NO: 42161 - DNA, 15 bp, Homo sapiens
tagctgggaccacag

SEQ ID NO: 42162 - DNA, 15 bp, Homo sapiens
gtagctgggaccaca

SEQ ID NO: 42163 - DNA, 15 bp, Homo sapiens
agtagctgggaccac

SEQ ID NO: 42164 - DNA, 15 bp, Homo sapiens
gagtagctgggacca

SEQ ID NO: 42165 - DNA, 15 bp, Homo sapiens
tgagtagctgggacc

SEQ ID NO: 42166 - DNA, 15 bp, Homo sapiens
tctcagcctcctgag

SEQ ID NO: 42167 - DNA, 15 bp, Homo sapiens
gtctcagcctcctga

SEQ ID NO: 42168 - DNA, 15 bp, Homo sapiens
tgtctcagcctcctg

SEQ ID NO: 42169 - DNA, 15 bp, Homo sapiens
ctgtctcagcctcct

SEQ ID NO: 42170 - DNA, 15 bp, Homo sapiens
ttcctgtctcagcct

SEQ ID NO: 42171 - DNA, 15 bp, Homo sapiens
cttcctgtctcagcc

SEQ ID NO: 42172 - DNA, 15 bp, Homo sapiens
tcttcctgtctcagc

SEQ ID NO: 42173 - DNA, 15 bp, Homo sapiens
atcttcctgtctcag

SEQ ID NO: 42174 - DNA, 15 bp, Homo sapiens
gatcttcctgtctca

SEQ ID NO: 42175 - DNA, 15 bp, Homo sapiens
tgatcttcctgtctc

SEQ ID NO: 42176 - DNA, 15 bp, Homo sapiens
gtgatcttcctgtct

SEQ ID NO: 42177 - DNA, 15 bp, Homo sapiens
agtgatcttcctgtc

SEQ ID NO: 42178 - DNA, 15 bp, Homo sapiens
aagtgatcttcctgt

SEQ ID NO: 42179 - DNA, 15 bp, Homo sapiens
caagtgatcttcctg

SEQ ID NO: 42180 - DNA, 15 bp, Homo sapiens
tcaagtgatcttcct

SEQ ID NO: 42181 - DNA, 15 bp, Homo sapiens
ctcaagtgatcttcc

SEQ ID NO: 42182 - DNA, 15 bp, Homo sapiens
actcaagtgatcttc

SEQ ID NO: 42183 - DNA, 15 bp, Homo sapiens
gactcaagtgatctt

SEQ ID NO: 42184 - DNA, 15 bp, Homo sapiens
ggactcaagtgatct

SEQ ID NO: 42185 - DNA, 15 bp, Homo sapiens
cctcctggactcaag

SEQ ID NO: 42186 - DNA, 15 bp, Homo sapiens
acctcctggactcaa

SEQ ID NO: 42187 - DNA, 15 bp, Homo sapiens
gacctcctggactca

SEQ ID NO: 42188 - DNA, 15 bp, Homo sapiens
tgacctcctggactc

SEQ ID NO: 42189 - DNA, 15 bp, Homo sapiens
ttgacctcctggact

SEQ ID NO: 42190 - DNA, 15 bp, Homo sapiens
cttgacctcctggac

SEQ ID NO: 42191 - DNA, 15 bp, Homo sapiens
ccttgacctcctgga

SEQ ID NO: 42192 - DNA, 15 bp, Homo sapiens
gccttgacctcctgg

SEQ ID NO: 42193 - DNA, 15 bp, Homo sapiens
agccttgacctcctg

SEQ ID NO: 42194 - DNA, 15 bp, Homo sapiens
cagccttgacctcct

SEQ ID NO: 42195 - DNA, 15 bp, Homo sapiens
cctgcagccttgacc

SEQ ID NO: 42196 - DNA, 15 bp, Homo sapiens
acctgcagccttgac

SEQ ID NO: 42197 - DNA, 15 bp, Homo sapiens
cacctgcagccttga

SEQ ID NO: 42198 - DNA, 15 bp, Homo sapiens
tcacctgcagccttg

SEQ ID NO: 42199 - DNA, 15 bp, Homo sapiens
ctcacctgcagcctt

SEQ ID NO: 42200 - DNA, 15 bp, Homo sapiens
gctcacctgcagcct

SEQ ID NO: 42201 - DNA, 15 bp, Homo sapiens
ggctcacctgcagcc

SEQ ID NO: 42202 - DNA, 15 bp, Homo sapiens
tggctcacctgcagc

SEQ ID NO: 42203 - DNA, 15 bp, Homo sapiens
atggctcacctgcag

SEQ ID NO: 42204 - DNA, 15 bp, Homo sapiens
catggctcacctgca

SEQ ID NO: 42205 - DNA, 15 bp, Homo sapiens
acatggctcacctgc

SEQ ID NO: 42206 - DNA, 15 bp, Homo sapiens
aacatggctcacctg

SEQ ID NO: 42207 - DNA, 15 bp, Homo sapiens
aaacatggctcacct

SEQ ID NO: 42208 - DNA, 15 bp, Homo sapiens
caaacatggctcacc

SEQ ID NO: 42209 - DNA, 15 bp, Homo sapiens
acaaacatggctcac

SEQ ID NO: 42210 - DNA, 15 bp, Homo sapiens
cacaaacatggctca

SEQ ID NO: 42211 - DNA, 15 bp, Homo sapiens
gcacaaacatggctc

SEQ ID NO: 42212 - DNA, 15 bp, Homo sapiens
ggcacaaacatggct

SEQ ID NO: 42213 - DNA, 15 bp, Homo sapiens
tggcacaaacatggc

SEQ ID NO: 42214 - DNA, 15 bp, Homo sapiens
gtggcacaaacatgg

SEQ ID NO: 42215 - DNA, 15 bp, Homo sapiens
agtggcacaaacatg

SEQ ID NO: 42216 - DNA, 15 bp, Homo sapiens
cagtggcacaaacat

SEQ ID NO: 42217 - DNA, 15 bp, Homo sapiens
gcagtggcacaaaca

SEQ ID NO: 42218 - DNA, 15 bp, Homo sapiens
tgcagtggcacaaac

SEQ ID NO: 42219 - DNA, 15 bp, Homo sapiens
gtgcagtggcacaaa

SEQ ID NO: 42220 - DNA, 15 bp, Homo sapiens
cagtgcagtggcaca

SEQ ID NO: 42221 - DNA, 15 bp, Homo sapiens
gcagtgcagtggcac

SEQ ID NO: 42222 - DNA, 15 bp, Homo sapiens
tgcagtgcagtggca

SEQ ID NO: 42223 - DNA, 15 bp, Homo sapiens
gtctgtcatccaggc

SEQ ID NO: 42224 - DNA, 15 bp, Homo sapiens
ggtctgtcatccagg

SEQ ID NO: 42225 - DNA, 15 bp, Homo sapiens
cggtctgtcatccag

SEQ ID NO: 42226 - DNA, 15 bp, Homo sapiens
tcggtctgtcatcca

SEQ ID NO: 42227 - DNA, 15 bp, Homo sapiens
ctcggtctgtcatcc

SEQ ID NO: 42228 - DNA, 15 bp, Homo sapiens
tctcggtctgtcatc

SEQ ID NO: 42229 - DNA, 15 bp, Homo sapiens
gtctcggtctgtcat

SEQ ID NO: 42230 - DNA, 15 bp, Homo sapiens
ggtctcggtctgtca

SEQ ID NO: 42231 - DNA, 15 bp, Homo sapiens
gggtctcggtctgtc

SEQ ID NO: 42232 - DNA, 15 bp, Homo sapiens
agggtctcggtctgt

SEQ ID NO: 42233 - DNA, 15 bp, Homo sapiens
aagggtctcggtctg

SEQ ID NO: 42234 - DNA, 15 bp, Homo sapiens
gaagggtctcggtct

SEQ ID NO: 42235 - DNA, 15 bp, Homo sapiens
agaagggtctcggtc

SEQ ID NO: 42236 - DNA, 15 bp, Homo sapiens
gagaagggtctcggt

SEQ ID NO: 42237 - DNA, 15 bp, Homo sapiens
tgagaagggtctcgg

SEQ ID NO: 42238 - DNA, 15 bp, Homo sapiens
ttgagaagggtctcg

SEQ ID NO: 42239 - DNA, 15 bp, Homo sapiens
tttgagaagggtctc

SEQ ID NO: 42240 - DNA, 15 bp, Homo sapiens
ttttgagaagggtct

SEQ ID NO: 42241 - DNA, 15 bp, Homo sapiens
tttttgagaagggtc

SEQ ID NO: 42242 - DNA, 15 bp, Homo sapiens
ttttttgagaagggt

SEQ ID NO: 42243 - DNA, 15 bp, Homo sapiens
tttttttgagaaggg

SEQ ID NO: 42244 - DNA, 15 bp, Homo sapiens
ttttttttgagaagg

SEQ ID NO: 42245 - DNA, 15 bp, Homo sapiens
tttttttttgagaag

SEQ ID NO: 42246 - DNA, 15 bp, Homo sapiens
ttttttttttgagaa

SEQ ID NO: 42247 - DNA, 15 bp, Homo sapiens
atatttttttttttg

SEQ ID NO: 42248 - DNA, 15 bp, Homo sapiens
aatattttttttttt

SEQ ID NO: 42249 - DNA, 15 bp, Homo sapiens
taatatttttttttt

SEQ ID NO: 42250 - DNA, 15 bp, Homo sapiens
gtaatattttttttt

SEQ ID NO: 42251 - DNA, 15 bp, Homo sapiens
ggtaatatttttttt

SEQ ID NO: 42252 - DNA, 15 bp, Homo sapiens
gggtaatattttttt

SEQ ID NO: 42253 - DNA, 15 bp, Homo sapiens
cgggtaatatttttt

SEQ ID NO: 42254 - DNA, 15 bp, Homo sapiens
acgggtaatattttt

SEQ ID NO: 42255 - DNA, 15 bp, Homo sapiens
tacgggtaatatttt

SEQ ID NO: 42256 - DNA, 15 bp, Homo sapiens
gtacgggtaatattt

SEQ ID NO: 42257 - DNA, 15 bp, Homo sapiens
agtacgggtaatatt

SEQ ID NO: 42258 - DNA, 15 bp, Homo sapiens
gagtacgggtaatat

SEQ ID NO: 42259 - DNA, 15 bp, Homo sapiens
agagtacgggtaata

SEQ ID NO: 42260 - DNA, 15 bp, Homo sapiens
aagagtacgggtaat

SEQ ID NO: 42261 - DNA, 15 bp, Homo sapiens
aaagagtacgggtaa

SEQ ID NO: 42262 - DNA, 15 bp, Homo sapiens
aaaagagtacgggta

SEQ ID NO: 42263 - DNA, 15 bp, Homo sapiens
aaaaagagtacgggt

SEQ ID NO: 42264 - DNA, 15 bp, Homo sapiens
aaaaaagagtacggg

SEQ ID NO: 42265 - DNA, 15 bp, Homo sapiens
caaaaaagagtacgg

SEQ ID NO: 42266 - DNA, 15 bp, Homo sapiens
tcaaaaaagagtacg

SEQ ID NO: 42267 - DNA, 15 bp, Homo sapiens
ctcaaaaaagagtac

SEQ ID NO: 42268 - DNA, 15 bp, Homo sapiens
tctcaaaaaagagta

SEQ ID NO: 42269 - DNA, 15 bp, Homo sapiens
gtctcaaaaaagagt

SEQ ID NO: 42270 - DNA, 15 bp, Homo sapiens
cgtctcaaaaaagag

SEQ ID NO: 42271 - DNA, 15 bp, Homo sapiens
ccgtctcaaaaaaga

SEQ ID NO: 42272 - DNA, 15 bp, Homo sapiens
tccgtctcaaaaaag

SEQ ID NO: 42273 - DNA, 15 bp, Homo sapiens
aactccgtctcaaaa

SEQ ID NO: 42274 - DNA, 15 bp, Homo sapiens
aaactccgtctcaaa

SEQ ID NO: 42275 - DNA, 15 bp, Homo sapiens
gaaactccgtctcaa

SEQ ID NO: 42276 - DNA, 15 bp, Homo sapiens
tgaaactccgtctca

SEQ ID NO: 42277 - DNA, 15 bp, Homo sapiens
gtgaaactccgtctc

SEQ ID NO: 42278 - DNA, 15 bp, Homo sapiens
agtgaaactccgtct

SEQ ID NO: 42279 - DNA, 15 bp, Homo sapiens
gagtgaaactccgtc

SEQ ID NO: 42280 - DNA, 15 bp, Homo sapiens
agagtgaaactccgt

SEQ ID NO: 42281 - DNA, 15 bp, Homo sapiens
aagagtgaaactccg

SEQ ID NO: 42282 - DNA, 15 bp, Homo sapiens
tgcgccattgcactc

SEQ ID NO: 42283 - DNA, 15 bp, Homo sapiens
ttgcgccattgcact

SEQ ID NO: 42284 - DNA, 15 bp, Homo sapiens
attgcgccattgcac

SEQ ID NO: 42285 - DNA, 15 bp, Homo sapiens
gattgcgccattgca

SEQ ID NO: 42286 - DNA, 15 bp, Homo sapiens
agattgcgccattgc

SEQ ID NO: 42287 - DNA, 15 bp, Homo sapiens
gagattgcgccattg

SEQ ID NO: 42288 - DNA, 15 bp, Homo sapiens
cgagattgcgccatt

SEQ ID NO: 42289 - DNA, 15 bp, Homo sapiens
ccgagattgcgccat

SEQ ID NO: 42290 - DNA, 15 bp, Homo sapiens
gccgagattgcgcca

SEQ ID NO: 42291 - DNA, 15 bp, Homo sapiens
agccgagattgcgcc

SEQ ID NO: 42292 - DNA, 15 bp, Homo sapiens
gagccgagattgcgc

SEQ ID NO: 42293 - DNA, 15 bp, Homo sapiens
tgagccgagattgcg

SEQ ID NO: 42294 - DNA, 15 bp, Homo sapiens
ctgagccgagattgc

SEQ ID NO: 42295 - DNA, 15 bp, Homo sapiens
gctgagccgagattg

SEQ ID NO: 42296 - DNA, 15 bp, Homo sapiens
cgctgagccgagatt

SEQ ID NO: 42297 - DNA, 15 bp, Homo sapiens
gcgctgagccgagat

SEQ ID NO: 42298 - DNA, 15 bp, Homo sapiens
tgcgctgagccgaga

SEQ ID NO: 42299 - DNA, 15 bp, Homo sapiens
ttgcgctgagccgag

SEQ ID NO: 42300 - DNA, 15 bp, Homo sapiens
gttgcgctgagccga

SEQ ID NO: 42301 - DNA, 15 bp, Homo sapiens
ggttgcgctgagccg

SEQ ID NO: 42302 - DNA, 15 bp, Homo sapiens
aggttgcgctgagcc

SEQ ID NO: 42303 - DNA, 15 bp, Homo sapiens
gaggttgcgctgagc

SEQ ID NO: 42304 - DNA, 15 bp, Homo sapiens
ggaggttgcgctgag

SEQ ID NO: 42305 - DNA, 15 bp, Homo sapiens
cggaggttgcgctga

SEQ ID NO: 42306 - DNA, 15 bp, Homo sapiens
gcggaggttgcgctg

SEQ ID NO: 42307 - DNA, 15 bp, Homo sapiens
ggcggaggttgcgct

SEQ ID NO: 42308 - DNA, 15 bp, Homo sapiens
aggcggaggttgcgc

SEQ ID NO: 42309 - DNA, 15 bp, Homo sapiens
gaggcggaggttgcg

SEQ ID NO: 42310 - DNA, 15 bp, Homo sapiens
aggaggcggaggttg

SEQ ID NO: 42311 - DNA, 15 bp, Homo sapiens
caggaggcggaggtt

SEQ ID NO: 42312 - DNA, 15 bp, Homo sapiens
ccaggaggcggaggt

SEQ ID NO: 42313 - DNA, 15 bp, Homo sapiens
cccaggaggcggagg

SEQ ID NO: 42314 - DNA, 15 bp, Homo sapiens
cgaacccaggaggcg

SEQ ID NO: 42315 - DNA, 15 bp, Homo sapiens
tcgaacccaggaggc

SEQ ID NO: 42316 - DNA, 15 bp, Homo sapiens
ctcgaacccaggagg

SEQ ID NO: 42317 - DNA, 15 bp, Homo sapiens
gctcgaacccaggag

SEQ ID NO: 42318 - DNA, 15 bp, Homo sapiens
cgctcgaacccagga

SEQ ID NO: 42319 - DNA, 15 bp, Homo sapiens
tcgctcgaacccagg

SEQ ID NO: 42320 - DNA, 15 bp, Homo sapiens
atcgctcgaacccag

SEQ ID NO: 42321 - DNA, 15 bp, Homo sapiens
aatcgctcgaaccca

SEQ ID NO: 42322 - DNA, 15 bp, Homo sapiens
gaatcgctcgaaccc

SEQ ID NO: 42323 - DNA, 15 bp, Homo sapiens
agaatcgctcgaacc

SEQ ID NO: 42324 - DNA, 15 bp, Homo sapiens
gagaatcgctcgaac

SEQ ID NO: 42325 - DNA, 15 bp, Homo sapiens
ggagaatcgctcgaa

SEQ ID NO: 42326 - DNA, 15 bp, Homo sapiens
aggagaatcgctcga

SEQ ID NO: 42327 - DNA, 15 bp, Homo sapiens
caggagaatcgctcg

SEQ ID NO: 42328 - DNA, 15 bp, Homo sapiens
gcaggagaatcgctc

SEQ ID NO: 42329 - DNA, 15 bp, Homo sapiens
agcaggagaatcgct

SEQ ID NO: 42330 - DNA, 15 bp, Homo sapiens
aagcaggagaatcgc

SEQ ID NO: 42331 - DNA, 15 bp, Homo sapiens
gaagcaggagaatcg

SEQ ID NO: 42332 - DNA, 15 bp, Homo sapiens
tgaagcaggagaatc

SEQ ID NO: 42333 - DNA, 15 bp, Homo sapiens
ctgaagcaggagaat

SEQ ID NO: 42334 - DNA, 15 bp, Homo sapiens
gctgaagcaggagaa

SEQ ID NO: 42335 - DNA, 15 bp, Homo sapiens
ggctgaagcaggaga

SEQ ID NO: 42336 - DNA, 15 bp, Homo sapiens
aggctgaagcaggag

SEQ ID NO: 42337 - DNA, 15 bp, Homo sapiens
gaggctgaagcagga

SEQ ID NO: 42338 - DNA, 15 bp, Homo sapiens
ggaggctgaagcagg

SEQ ID NO: 42339 - DNA, 15 bp, Homo sapiens
gggaggctgaagcag

SEQ ID NO: 42340 - DNA, 15 bp, Homo sapiens
ggggaggctgaagca

SEQ ID NO: 42341 - DNA, 15 bp, Homo sapiens
tggggaggctgaagc

SEQ ID NO: 42342 - DNA, 15 bp, Homo sapiens
ctggggaggctgaag

SEQ ID NO: 42343 - DNA, 15 bp, Homo sapiens
actggggaggctgaa

SEQ ID NO: 42344 - DNA, 15 bp, Homo sapiens
tactggggaggctga

SEQ ID NO: 42345 - DNA, 15 bp, Homo sapiens
ctactggggaggctg

SEQ ID NO: 42346 - DNA, 15 bp, Homo sapiens
gctactggggaggct

SEQ ID NO: 42347 - DNA, 15 bp, Homo sapiens
agctactggggaggc

SEQ ID NO: 42348 - DNA, 15 bp, Homo sapiens
cagctactggggagg

SEQ ID NO: 42349 - DNA, 15 bp, Homo sapiens
ccagctactggggag

SEQ ID NO: 42350 - DNA, 15 bp, Homo sapiens
cccagctactgggga

SEQ ID NO: 42351 - DNA, 15 bp, Homo sapiens
tcccagctactgggg

SEQ ID NO: 42352 - DNA, 15 bp, Homo sapiens
atcccagctactggg

SEQ ID NO: 42353 - DNA, 15 bp, Homo sapiens
aatcccagctactgg

SEQ ID NO: 42354 - DNA, 15 bp, Homo sapiens
taatcccagctactg

SEQ ID NO: 42355 - DNA, 15 bp, Homo sapiens
gcatgcctgtaatcc

SEQ ID NO: 42356 - DNA, 15 bp, Homo sapiens
tgcatgcctgtaatc

SEQ ID NO: 42357 - DNA, 15 bp, Homo sapiens
gtgcatgcctgtaat

SEQ ID NO: 42358 - DNA, 15 bp, Homo sapiens
ggtgcatgcctgtaa

SEQ ID NO: 42359 - DNA, 15 bp, Homo sapiens
tggtgcatgcctgta

SEQ ID NO: 42360 - DNA, 15 bp, Homo sapiens
gtggtgcatgcctgt

SEQ ID NO: 42361 - DNA, 15 bp, Homo sapiens
ggtggtgcatgcctg

SEQ ID NO: 42362 - DNA, 15 bp, Homo sapiens
tggtggtgcatgcct

SEQ ID NO: 42363 - DNA, 15 bp, Homo sapiens
gtggtggtgcatgcc

SEQ ID NO: 42364 - DNA, 15 bp, Homo sapiens
cgtggtggtgcatgc

SEQ ID NO: 42365 - DNA, 15 bp, Homo sapiens
gcgtggtggtgcatg

SEQ ID NO: 42366 - DNA, 15 bp, Homo sapiens
ggcgtggtggtgcat

SEQ ID NO: 42367 - DNA, 15 bp, Homo sapiens
gggcgtggtggtgca

SEQ ID NO: 42368 - DNA, 15 bp, Homo sapiens
cgggcgtggtggtgc

SEQ ID NO: 42369 - DNA, 15 bp, Homo sapiens
ccaacatggagaaac

SEQ ID NO: 42370 - DNA, 15 bp, Homo sapiens
accaacatggagaaa

SEQ ID NO: 42371 - DNA, 15 bp, Homo sapiens
gaccaacatggagaa

SEQ ID NO: 42372 - DNA, 15 bp, Homo sapiens
tgaccaacatggaga

SEQ ID NO: 42373 - DNA, 15 bp, Homo sapiens
ctgaccaacatggag

SEQ ID NO: 42374 - DNA, 15 bp, Homo sapiens
tctgaccaacatgga

SEQ ID NO: 42375 - DNA, 15 bp, Homo sapiens
gtctgaccaacatgg

SEQ ID NO: 42376 - DNA, 15 bp, Homo sapiens
agtctgaccaacatg

SEQ ID NO: 42377 - DNA, 15 bp, Homo sapiens
cagtctgaccaacat

SEQ ID NO: 42378 - DNA, 15 bp, Homo sapiens
ccagtctgaccaaca

SEQ ID NO: 42379 - DNA, 15 bp, Homo sapiens
accagtctgaccaac

SEQ ID NO: 42380 - DNA, 15 bp, Homo sapiens
gaccagtctgaccaa

SEQ ID NO: 42381 - DNA, 15 bp, Homo sapiens
agaccagtctgacca

SEQ ID NO: 42382 - DNA, 15 bp, Homo sapiens
gagaccagtctgacc

SEQ ID NO: 42383 - DNA, 15 bp, Homo sapiens
cgagaccagtctgac

SEQ ID NO: 42384 - DNA, 15 bp, Homo sapiens
tcgagaccagtctga

SEQ ID NO: 42385 - DNA, 15 bp, Homo sapiens
gtcgagaccagtctg

SEQ ID NO: 42386 - DNA, 15 bp, Homo sapiens
ggtcgagaccagtct

SEQ ID NO: 42387 - DNA, 15 bp, Homo sapiens
aggtcgagaccagtc

SEQ ID NO: 42388 - DNA, 15 bp, Homo sapiens
gaggtcgagaccagt

SEQ ID NO: 42389 - DNA, 15 bp, Homo sapiens
agaggtcgagaccag

SEQ ID NO: 42390 - DNA, 15 bp, Homo sapiens
aagaggtcgagacca

SEQ ID NO: 42391 - DNA, 15 bp, Homo sapiens
caagaggtcgagacc

SEQ ID NO: 42392 - DNA, 15 bp, Homo sapiens
tcaagaggtcgagac

SEQ ID NO: 42393 - DNA, 15 bp, Homo sapiens
gtcaagaggtcgaga

SEQ ID NO: 42394 - DNA, 15 bp, Homo sapiens
ggtcaagaggtcgag

SEQ ID NO: 42395 - DNA, 15 bp, Homo sapiens
aggtcaagaggtcga

SEQ ID NO: 42396 - DNA, 15 bp, Homo sapiens
gaggtcaagaggtcg

SEQ ID NO: 42397 - DNA, 15 bp, Homo sapiens
tgaggtcaagaggtc

SEQ ID NO: 42398 - DNA, 15 bp, Homo sapiens
ctgaggtcaagaggt

SEQ ID NO: 42399 - DNA, 15 bp, Homo sapiens
cctgaggtcaagagg

SEQ ID NO: 42400 - DNA, 15 bp, Homo sapiens
acctgaggtcaagag

SEQ ID NO: 42401 - DNA, 15 bp, Homo sapiens
cacctgaggtcaaga

SEQ ID NO: 42402 - DNA, 15 bp, Homo sapiens
tcacctgaggtcaag

SEQ ID NO: 42403 - DNA, 15 bp, Homo sapiens
atcacctgaggtcaa

SEQ ID NO: 42404 - DNA, 15 bp, Homo sapiens
aaggtgggcggatca

SEQ ID NO: 42405 - DNA, 15 bp, Homo sapiens
caaggtgggcggatc

SEQ ID NO: 42406 - DNA, 15 bp, Homo sapiens
ccaaggtgggcggat

SEQ ID NO: 42407 - DNA, 15 bp, Homo sapiens
gccaaggtgggcgga

SEQ ID NO: 42408 - DNA, 15 bp, Homo sapiens
ggccaaggtgggcgg

SEQ ID NO: 42409 - DNA, 15 bp, Homo sapiens
aggccaaggtgggcg

SEQ ID NO: 42410 - DNA, 15 bp, Homo sapiens
gaggccaaggtgggc

SEQ ID NO: 42411 - DNA, 15 bp, Homo sapiens
ggaggccaaggtggg

SEQ ID NO: 42412 - DNA, 15 bp, Homo sapiens
gggaggccaaggtgg

SEQ ID NO: 42413 - DNA, 15 bp, Homo sapiens
tgggaggccaaggtg

SEQ ID NO: 42414 - DNA, 15 bp, Homo sapiens
gtggctcaggcctgt

SEQ ID NO: 42415 - DNA, 15 bp, Homo sapiens
ggtggctcaggcctg

SEQ ID NO: 42416 - DNA, 15 bp, Homo sapiens
cggtggctcaggcct

SEQ ID NO: 42417 - DNA, 15 bp, Homo sapiens
gcggtggctcaggcc

SEQ ID NO: 42418 - DNA, 15 bp, Homo sapiens
tgcggtggctcaggc

SEQ ID NO: 42419 - DNA, 15 bp, Homo sapiens
gtgcggtggctcagg

SEQ ID NO: 42420 - DNA, 15 bp, Homo sapiens
ggtgcggtggctcag

SEQ ID NO: 42421 - DNA, 15 bp, Homo sapiens
cgggtgcggtggctc

SEQ ID NO: 42422 - DNA, 15 bp, Homo sapiens
ccgggtgcggtggct

SEQ ID NO: 42423 - DNA, 15 bp, Homo sapiens
gccgggtgcggtggc

SEQ ID NO: 42424 - DNA, 15 bp, Homo sapiens
ggccgggtgcggtgg

SEQ ID NO: 42425 - DNA, 15 bp, Homo sapiens
aggccgggtgcggtg

SEQ ID NO: 42426 - DNA, 15 bp, Homo sapiens
caggccgggtgcggt

SEQ ID NO: 42427 - DNA, 15 bp, Homo sapiens
acaggccgggtgcgg

SEQ ID NO: 42428 - DNA, 15 bp, Homo sapiens
tacaggccgggtgcg

SEQ ID NO: 42429 - DNA, 15 bp, Homo sapiens
gtacaggccgggtgc

SEQ ID NO: 42430 - DNA, 15 bp, Homo sapiens
agtacaggccgggtg

SEQ ID NO: 42431 - DNA, 15 bp, Homo sapiens
gagtacaggccgggt

SEQ ID NO: 42432 - DNA, 15 bp, Homo sapiens
agagtacaggccggg

SEQ ID NO: 42433 - DNA, 15 bp, Homo sapiens
aagagtacaggccgg

SEQ ID NO: 42434 - DNA, 15 bp, Homo sapiens
taagagtacaggccg

SEQ ID NO: 42435 - DNA, 15 bp, Homo sapiens
ataagagtacaggcc

SEQ ID NO: 42436 - DNA, 15 bp, Homo sapiens
aataagagtacaggc

SEQ ID NO: 42437 - DNA, 15 bp, Homo sapiens
gaataagagtacagg

SEQ ID NO: 42438 - DNA, 15 bp, Homo sapiens
agaataagagtacag

SEQ ID NO: 42439 - DNA, 15 bp, Homo sapiens
aagaataagagtaca

SEQ ID NO: 42440 - DNA, 15 bp, Homo sapiens
aaagaataagagtac

SEQ ID NO: 42441 - DNA, 15 bp, Homo sapiens
taaagaataagagta

SEQ ID NO: 42442 - DNA, 15 bp, Homo sapiens
ttaaagaataagagt

SEQ ID NO: 42443 - DNA, 15 bp, Homo sapiens
attaaagaataagag

SEQ ID NO: 42444 - DNA, 15 bp, Homo sapiens
tattaaagaataaga

SEQ ID NO: 42445 - DNA, 15 bp, Homo sapiens
ttattaaagaataag

SEQ ID NO: 42446 - DNA, 15 bp, Homo sapiens
attattaaagaataa

SEQ ID NO: 42447 - DNA, 15 bp, Homo sapiens
tattattaaagaata

SEQ ID NO: 42448 - DNA, 15 bp, Homo sapiens
ttattattaaagaat

SEQ ID NO: 42449 - DNA, 15 bp, Homo sapiens
tttattattaaagaa

SEQ ID NO: 42450 - DNA, 15 bp, Homo sapiens
ttttattattaaaga

SEQ ID NO: 42451 - DNA, 15 bp, Homo sapiens
attttattattaaag

SEQ ID NO: 42452 - DNA, 15 bp, Homo sapiens
tattttattattaaa

SEQ ID NO: 42453 - DNA, 15 bp, Homo sapiens
atattttattattaa

SEQ ID NO: 42454 - DNA, 15 bp, Homo sapiens
aatattttattatta

SEQ ID NO: 42455 - DNA, 15 bp, Homo sapiens
aaatattttattatt

SEQ ID NO: 42456 - DNA, 15 bp, Homo sapiens
gaaatattttattat

SEQ ID NO: 42457 - DNA, 15 bp, Homo sapiens
agaaatattttatta

SEQ ID NO: 42458 - DNA, 15 bp, Homo sapiens
cagaaatattttatt

SEQ ID NO: 42459 - DNA, 15 bp, Homo sapiens
acagaaatattttat

SEQ ID NO: 42460 - DNA, 15 bp, Homo sapiens
cacagaaatatttta

SEQ ID NO: 42461 - DNA, 15 bp, Homo sapiens
acacagaaatatttt

SEQ ID NO: 42462 - DNA, 15 bp, Homo sapiens
aacacagaaatattt

SEQ ID NO: 42463 - DNA, 15 bp, Homo sapiens
aaacacagaaatatt

SEQ ID NO: 42464 - DNA, 15 bp, Homo sapiens
gaaacacagaaatat

SEQ ID NO: 42465 - DNA, 15 bp, Homo sapiens
agaaacacagaaata

SEQ ID NO: 42466 - DNA, 15 bp, Homo sapiens
aagaaacacagaaat

SEQ ID NO: 42467 - DNA, 15 bp, Homo sapiens
aaagaaacacagaaa

SEQ ID NO: 42468 - DNA, 15 bp, Homo sapiens
taaagaaacacagaa

SEQ ID NO: 42469 - DNA, 15 bp, Homo sapiens
ctaaagaaacacaga

SEQ ID NO: 42470 - DNA, 15 bp, Homo sapiens
actaaagaaacacag

SEQ ID NO: 42471 - DNA, 15 bp, Homo sapiens
gactaaagaaacaca

SEQ ID NO: 42472 - DNA, 15 bp, Homo sapiens
tgactaaagaaacac

SEQ ID NO: 42473 - DNA, 15 bp, Homo sapiens
atgactaaagaaaca

SEQ ID NO: 42474 - DNA, 15 bp, Homo sapiens
aatgactaaagaaac

SEQ ID NO: 42475 - DNA, 15 bp, Homo sapiens
aaatgactaaagaaa

SEQ ID NO: 42476 - DNA, 15 bp, Homo sapiens
aaaatgactaaagaa

SEQ ID NO: 42477 - DNA, 15 bp, Homo sapiens
taaaatgactaaaga

SEQ ID NO: 42478 - DNA, 15 bp, Homo sapiens
gtaaaatgactaaag

SEQ ID NO: 42479 - DNA, 15 bp, Homo sapiens
tgtaaaatgactaaa

SEQ ID NO: 42480 - DNA, 15 bp, Homo sapiens
atgtaaaatgactaa

SEQ ID NO: 42481 - DNA, 15 bp, Homo sapiens
tatgtaaaatgacta

SEQ ID NO: 42482 - DNA, 15 bp, Homo sapiens
ttatgtaaaatgact

SEQ ID NO: 42483 - DNA, 15 bp, Homo sapiens
tttatgtaaaatgac

SEQ ID NO: 42484 - DNA, 15 bp, Homo sapiens
gtttatgtaaaatga

SEQ ID NO: 42485 - DNA, 15 bp, Homo sapiens
agtttatgtaaaatg

SEQ ID NO: 42486 - DNA, 15 bp, Homo sapiens
aagtttatgtaaaat

SEQ ID NO: 42487 - DNA, 15 bp, Homo sapiens
aaagtttatgtaaaa

SEQ ID NO: 42488 - DNA, 15 bp, Homo sapiens
aaaagtttatgtaaa

SEQ ID NO: 42489 - DNA, 15 bp, Homo sapiens
taaaagtttatgtaa

SEQ ID NO: 42490 - DNA, 15 bp, Homo sapiens
ataaaagtttatgta

SEQ ID NO: 42491 - DNA, 15 bp, Homo sapiens
aataaaagtttatgt

SEQ ID NO: 42492 - DNA, 15 bp, Homo sapiens
aaataaaagtttatg

SEQ ID NO: 42493 - DNA, 15 bp, Homo sapiens
taaataaaagtttat

SEQ ID NO: 42494 - DNA, 15 bp, Homo sapiens
ataaataaaagttta

SEQ ID NO: 42495 - DNA, 15 bp, Homo sapiens
aataaataaaagttt

SEQ ID NO: 42496 - DNA, 15 bp, Homo sapiens
aaataaataaaagtt

SEQ ID NO: 42497 - DNA, 15 bp, Homo sapiens
taaataaataaaagt

SEQ ID NO: 42498 - DNA, 15 bp, Homo sapiens
ataaataaataaaag

SEQ ID NO: 42499 - DNA, 15 bp, Homo sapiens
aataaataaataaaa

SEQ ID NO: 42500 - DNA, 15 bp, Homo sapiens
aaataaataaataaa

SEQ ID NO: 42501 - DNA, 15 bp, Homo sapiens
taaataaataaataa

SEQ ID NO: 42502 - DNA, 15 bp, Homo sapiens
ataaataaataaata

SEQ ID NO: 42503 - DNA, 15 bp, Homo sapiens
aataaataaataaat

SEQ ID NO: 42504 - DNA, 15 bp, Homo sapiens
aaaataaataaataa

SEQ ID NO: 42505 - DNA, 15 bp, Homo sapiens
aaaaataaataaata

SEQ ID NO: 42506 - DNA, 15 bp, Homo sapiens
taaaaataaataaat

SEQ ID NO: 42507 - DNA, 15 bp, Homo sapiens
ataaaaataaataaa

SEQ ID NO: 42508 - DNA, 15 bp, Homo sapiens
aataaaaataaataa

SEQ ID NO: 42509 - DNA, 15 bp, Homo sapiens
aaataaaaataaata

SEQ ID NO: 42510 - DNA, 15 bp, Homo sapiens
taaataaaaataaat

SEQ ID NO: 42511 - DNA, 15 bp, Homo sapiens
ataaataaaaataaa

SEQ ID NO: 42512 - DNA, 15 bp, Homo sapiens
aataaataaaaataa

SEQ ID NO: 42513 - DNA, 15 bp, Homo sapiens
aaataaataaaaata

SEQ ID NO: 42514 - DNA, 15 bp, Homo sapiens
taaataaataaaaat

SEQ ID NO: 42515 - DNA, 15 bp, Homo sapiens
ataaataaataaaaa

SEQ ID NO: 42516 - DNA, 15 bp, Homo sapiens
aaaaaataaataaat

SEQ ID NO: 42517 - DNA, 15 bp, Homo sapiens
aaaaaaataaataaa

SEQ ID NO: 42518 - DNA, 15 bp, Homo sapiens
caaaaaaataaataa

SEQ ID NO: 42519 - DNA, 15 bp, Homo sapiens
tcaaaaaaataaata

SEQ ID NO: 42520 - DNA, 15 bp, Homo sapiens
ctcaaaaaaataaat

SEQ ID NO: 42521 - DNA, 15 bp, Homo sapiens
tctcaaaaaaataaa

SEQ ID NO: 42522 - DNA, 15 bp, Homo sapiens
gtctcaaaaaaataa

SEQ ID NO: 42523 - DNA, 15 bp, Homo sapiens
cgtctcaaaaaaata

SEQ ID NO: 42524 - DNA, 15 bp, Homo sapiens
ccgtctcaaaaaaat

SEQ ID NO: 42525 - DNA, 15 bp, Homo sapiens
aacagagcgagactc

SEQ ID NO: 42526 - DNA, 15 bp, Homo sapiens
caacagagcgagact

SEQ ID NO: 42527 - DNA, 15 bp, Homo sapiens
gcaacagagcgagac

SEQ ID NO: 42528 - DNA, 15 bp, Homo sapiens
ggcaacagagcgaga

SEQ ID NO: 42529 - DNA, 15 bp, Homo sapiens
gggcaacagagcgag

SEQ ID NO: 42530 - DNA, 15 bp, Homo sapiens
tgggcaacagagcga

SEQ ID NO: 42531 - DNA, 15 bp, Homo sapiens
ctgggcaacagagcg

SEQ ID NO: 42532 - DNA, 15 bp, Homo sapiens
gccattgcattccag

SEQ ID NO: 42533 - DNA, 15 bp, Homo sapiens
agccattgcattcca

SEQ ID NO: 42534 - DNA, 15 bp, Homo sapiens
gagccattgcattcc

SEQ ID NO: 42535 - DNA, 15 bp, Homo sapiens
tgagccattgcattc

SEQ ID NO: 42536 - DNA, 15 bp, Homo sapiens
ttgagccattgcatt

SEQ ID NO: 42537 - DNA, 15 bp, Homo sapiens
attgagccattgcat

SEQ ID NO: 42538 - DNA, 15 bp, Homo sapiens
gattgagccattgca

SEQ ID NO: 42539 - DNA, 15 bp, Homo sapiens
agattgagccattgc

SEQ ID NO: 42540 - DNA, 15 bp, Homo sapiens
gagattgagccattg

SEQ ID NO: 42541 - DNA, 15 bp, Homo sapiens
tgagattgagccatt

SEQ ID NO: 42542 - DNA, 15 bp, Homo sapiens
ctgagattgagccat

SEQ ID NO: 42543 - DNA, 15 bp, Homo sapiens
gctgagattgagcca

SEQ ID NO: 42544 - DNA, 15 bp, Homo sapiens
agctgagattgagcc

SEQ ID NO: 42545 - DNA, 15 bp, Homo sapiens
gagctgagattgagc

SEQ ID NO: 42546 - DNA, 15 bp, Homo sapiens
tgagctgagattgag

SEQ ID NO: 42547 - DNA, 15 bp, Homo sapiens
gtgagctgagattga

SEQ ID NO: 42548 - DNA, 15 bp, Homo sapiens
agtgagctgagattg

SEQ ID NO: 42549 - DNA, 15 bp, Homo sapiens
cagtgagctgagatt

SEQ ID NO: 42550 - DNA, 15 bp, Homo sapiens
cttgcagtgagctga

SEQ ID NO: 42551 - DNA, 15 bp, Homo sapiens
gcttgcagtgagctg

SEQ ID NO: 42552 - DNA, 15 bp, Homo sapiens
agcttgcagtgagct

SEQ ID NO: 42553 - DNA, 15 bp, Homo sapiens
agagcttgcagtgag

SEQ ID NO: 42554 - DNA, 15 bp, Homo sapiens
cagagcttgcagtga

SEQ ID NO: 42555 - DNA, 15 bp, Homo sapiens
gcagagcttgcagtg

SEQ ID NO: 42556 - DNA, 15 bp, Homo sapiens
ggcagagcttgcagt

SEQ ID NO: 42557 - DNA, 15 bp, Homo sapiens
aggcagagcttgcag

SEQ ID NO: 42558 - DNA, 15 bp, Homo sapiens
gaggcagagcttgca

SEQ ID NO: 42559 - DNA, 15 bp, Homo sapiens
ggaggcagagcttgc

SEQ ID NO: 42560 - DNA, 15 bp, Homo sapiens
gggaggcagagcttg

SEQ ID NO: 42561 - DNA, 15 bp, Homo sapiens
cgggaggcagagctt

SEQ ID NO: 42562 - DNA, 15 bp, Homo sapiens
ccgggaggcagagct

SEQ ID NO: 42563 - DNA, 15 bp, Homo sapiens
cccgggaggcagagc

SEQ ID NO: 42564 - DNA, 15 bp, Homo sapiens
tacccgggaggcaga

SEQ ID NO: 42565 - DNA, 15 bp, Homo sapiens
gtacccgggaggcag

SEQ ID NO: 42566 - DNA, 15 bp, Homo sapiens
tgtacccgggaggca

SEQ ID NO: 42567 - DNA, 15 bp, Homo sapiens
gtgtacccgggaggc

SEQ ID NO: 42568 - DNA, 15 bp, Homo sapiens
cgtgtacccgggagg

SEQ ID NO: 42569 - DNA, 15 bp, Homo sapiens
gcgtgtacccgggag

SEQ ID NO: 42570 - DNA, 15 bp, Homo sapiens
ggcgtgtacccggga

SEQ ID NO: 42571 - DNA, 15 bp, Homo sapiens
tggcgtgtacccggg

SEQ ID NO: 42572 - DNA, 15 bp, Homo sapiens
atggcgtgtacccgg

SEQ ID NO: 42573 - DNA, 15 bp, Homo sapiens
aatggcgtgtacccg

SEQ ID NO: 42574 - DNA, 15 bp, Homo sapiens
gaatggcgtgtaccc

SEQ ID NO: 42575 - DNA, 15 bp, Homo sapiens
ggaatggcgtgtacc

SEQ ID NO: 42576 - DNA, 15 bp, Homo sapiens
gggaatggcgtgtac

SEQ ID NO: 42577 - DNA, 15 bp, Homo sapiens
ggggaatggcgtgta

SEQ ID NO: 42578 - DNA, 15 bp, Homo sapiens
aggggaatggcgtgt

SEQ ID NO: 42579 - DNA, 15 bp, Homo sapiens
caggggaatggcgtg

SEQ ID NO: 42580 - DNA, 15 bp, Homo sapiens
gcaggggaatggcgt

SEQ ID NO: 42581 - DNA, 15 bp, Homo sapiens
ggcaggggaatggcg

SEQ ID NO: 42582 - DNA, 15 bp, Homo sapiens
aggcaggggaatggc

SEQ ID NO: 42583 - DNA, 15 bp, Homo sapiens
gaggcaggggaatgg

SEQ ID NO: 42584 - DNA, 15 bp, Homo sapiens
tgaggcaggggaatg

SEQ ID NO: 42585 - DNA, 15 bp, Homo sapiens
ctgaggcaggggaat

SEQ ID NO: 42586 - DNA, 15 bp, Homo sapiens
gctgaggcaggggaa

SEQ ID NO: 42587 - DNA, 15 bp, Homo sapiens
ggctgaggcagggga

SEQ ID NO: 42588 - DNA, 15 bp, Homo sapiens
aggctgaggcagggg

SEQ ID NO: 42589 - DNA, 15 bp, Homo sapiens
gaggctgaggcaggg

SEQ ID NO: 42590 - DNA, 15 bp, Homo sapiens
agggaggctgaggca

SEQ ID NO: 42591 - DNA, 15 bp, Homo sapiens
tagggaggctgaggc

SEQ ID NO: 42592 - DNA, 15 bp, Homo sapiens
ctagggaggctgagg

SEQ ID NO: 42593 - DNA, 15 bp, Homo sapiens
actagggaggctgag

SEQ ID NO: 42594 - DNA, 15 bp, Homo sapiens
tactagggaggctga

SEQ ID NO: 42595 - DNA, 15 bp, Homo sapiens
ctactagggaggctg

SEQ ID NO: 42596 - DNA, 15 bp, Homo sapiens
gctactagggaggct

SEQ ID NO: 42597 - DNA, 15 bp, Homo sapiens
ggctactagggaggc

SEQ ID NO: 42598 - DNA, 15 bp, Homo sapiens
cggctactagggagg

SEQ ID NO: 42599 - DNA, 15 bp, Homo sapiens
ccggctactagggag

SEQ ID NO: 42600 - DNA, 15 bp, Homo sapiens
cccggctactaggga

SEQ ID NO: 42601 - DNA, 15 bp, Homo sapiens
tcccggctactaggg

SEQ ID NO: 42602 - DNA, 15 bp, Homo sapiens
gtcccggctactagg

SEQ ID NO: 42603 - DNA, 15 bp, Homo sapiens
agtcccggctactag

SEQ ID NO: 42604 - DNA, 15 bp, Homo sapiens
tagtcccggctacta

SEQ ID NO: 42605 - DNA, 15 bp, Homo sapiens
gtagtcccggctact

SEQ ID NO: 42606 - DNA, 15 bp, Homo sapiens
tgtagtcccggctac

SEQ ID NO: 42607 - DNA, 15 bp, Homo sapiens
ctgtagtcccggcta

SEQ ID NO: 42608 - DNA, 15 bp, Homo sapiens
cctgtagtcccggct

SEQ ID NO: 42609 - DNA, 15 bp, Homo sapiens
gcctgtagtcccggc

SEQ ID NO: 42610 - DNA, 15 bp, Homo sapiens
cgcctgtagtcccgg

SEQ ID NO: 42611 - DNA, 15 bp, Homo sapiens
gcgcctgtagtcccg

SEQ ID NO: 42612 - DNA, 15 bp, Homo sapiens
cgggcgcctgtagtc

SEQ ID NO: 42613 - DNA, 15 bp, Homo sapiens
gcgggcgcctgtagt

SEQ ID NO: 42614 - DNA, 15 bp, Homo sapiens
ggcgggcgcctgtag

SEQ ID NO: 42615 - DNA, 15 bp, Homo sapiens
tggcgggcgcctgta

SEQ ID NO: 42616 - DNA, 15 bp, Homo sapiens
gtggcgggcgcctgt

SEQ ID NO: 42617 - DNA, 15 bp, Homo sapiens
ggtggcgggcgcctg

SEQ ID NO: 42618 - DNA, 15 bp, Homo sapiens
tggtggcgggcgcct

SEQ ID NO: 42619 - DNA, 15 bp, Homo sapiens
gtggtggcgggcgcc

SEQ ID NO: 42620 - DNA, 15 bp, Homo sapiens
cgtggtggcgggcgc

SEQ ID NO: 42621 - DNA, 15 bp, Homo sapiens
gcgtggtggcgggcg

SEQ ID NO: 42622 - DNA, 15 bp, Homo sapiens
ggcgtggtggcgggc

SEQ ID NO: 42623 - DNA, 15 bp, Homo sapiens
acaaaaaaaaaaatt

SEQ ID NO: 42624 - DNA, 15 bp, Homo sapiens
tacaaaaaaaaaaat

SEQ ID NO: 42625 - DNA, 15 bp, Homo sapiens
atacaaaaaaaaaaa

SEQ ID NO: 42626 - DNA, 15 bp, Homo sapiens
aatacaaaaaaaaaa

SEQ ID NO: 42627 - DNA, 15 bp, Homo sapiens
aaatacaaaaaaaaa

SEQ ID NO: 42628 - DNA, 15 bp, Homo sapiens
aaaatacaaaaaaaa

SEQ ID NO: 42629 - DNA, 15 bp, Homo sapiens
gaaaatacaaaaaaa

SEQ ID NO: 42630 - DNA, 15 bp, Homo sapiens
tgaaaatacaaaaaa

SEQ ID NO: 42631 - DNA, 15 bp, Homo sapiens
ctgaaaatacaaaaa

SEQ ID NO: 42632 - DNA, 15 bp, Homo sapiens
actgaaaatacaaaa

SEQ ID NO: 42633 - DNA, 15 bp, Homo sapiens
tactgaaaatacaaa

SEQ ID NO: 42634 - DNA, 15 bp, Homo sapiens
ctactgaaaatacaa

SEQ ID NO: 42635 - DNA, 15 bp, Homo sapiens
tctactgaaaataca

SEQ ID NO: 42636 - DNA, 15 bp, Homo sapiens
ctctactgaaaatac

SEQ ID NO: 42637 - DNA, 15 bp, Homo sapiens
tctctactgaaaata

SEQ ID NO: 42638 - DNA, 15 bp, Homo sapiens
gtctctactgaaaat

SEQ ID NO: 42639 - DNA, 15 bp, Homo sapiens
tgtctctactgaaaa

SEQ ID NO: 42640 - DNA, 15 bp, Homo sapiens
ctgtctctactgaaa

SEQ ID NO: 42641 - DNA, 15 bp, Homo sapiens
cctgtctctactgaa

SEQ ID NO: 42642 - DNA, 15 bp, Homo sapiens
ccctgtctctactga

SEQ ID NO: 42643 - DNA, 15 bp, Homo sapiens
accctgtctctactg

SEQ ID NO: 42644 - DNA, 15 bp, Homo sapiens
agtgaaaccctgtct

SEQ ID NO: 42645 - DNA, 15 bp, Homo sapiens
cagtgaaaccctgtc

SEQ ID NO: 42646 - DNA, 15 bp, Homo sapiens
acagtgaaaccctgt

SEQ ID NO: 42647 - DNA, 15 bp, Homo sapiens
cacagtgaaaccctg

SEQ ID NO: 42648 - DNA, 15 bp, Homo sapiens
acacagtgaaaccct

SEQ ID NO: 42649 - DNA, 15 bp, Homo sapiens
aagaccatcctggct

SEQ ID NO: 42650 - DNA, 15 bp, Homo sapiens
caagaccatcctggc

SEQ ID NO: 42651 - DNA, 15 bp, Homo sapiens
tcaagaccatcctgg

SEQ ID NO: 42652 - DNA, 15 bp, Homo sapiens
atcaagaccatcctg

SEQ ID NO: 42653 - DNA, 15 bp, Homo sapiens
gatcaagaccatcct

SEQ ID NO: 42654 - DNA, 15 bp, Homo sapiens
agatcaagaccatcc

SEQ ID NO: 42655 - DNA, 15 bp, Homo sapiens
gagatcaagaccatc

SEQ ID NO: 42656 - DNA, 15 bp, Homo sapiens
ggagatcaagaccat

SEQ ID NO: 42657 - DNA, 15 bp, Homo sapiens
aggagatcaagacca

SEQ ID NO: 42658 - DNA, 15 bp, Homo sapiens
caggagatcaagacc

SEQ ID NO: 42659 - DNA, 15 bp, Homo sapiens
gaggtcaggagatca

SEQ ID NO: 42660 - DNA, 15 bp, Homo sapiens
acgggtggatcacga

SEQ ID NO: 42661 - DNA, 15 bp, Homo sapiens
gacgggtggatcacg

SEQ ID NO: 42662 - DNA, 15 bp, Homo sapiens
agacgggtggatcac

SEQ ID NO: 42663 - DNA, 15 bp, Homo sapiens
gagacgggtggatca

SEQ ID NO: 42664 - DNA, 15 bp, Homo sapiens
cgagacgggtggatc

SEQ ID NO: 42665 - DNA, 15 bp, Homo sapiens
ccgagacgggtggat

SEQ ID NO: 42666 - DNA, 15 bp, Homo sapiens
gccgagacgggtgga

SEQ ID NO: 42667 - DNA, 15 bp, Homo sapiens
ggccgagacgggtgg

SEQ ID NO: 42668 - DNA, 15 bp, Homo sapiens
aggccgagacgggtg

SEQ ID NO: 42669 - DNA, 15 bp, Homo sapiens
gaggccgagacgggt

SEQ ID NO: 42670 - DNA, 15 bp, Homo sapiens
ggaggccgagacggg

SEQ ID NO: 42671 - DNA, 15 bp, Homo sapiens
gggaggccgagacgg

SEQ ID NO: 42672 - DNA, 15 bp, Homo sapiens
tgggaggccgagacg

SEQ ID NO: 42673 - DNA, 15 bp, Homo sapiens
ttgggaggccgagac

SEQ ID NO: 42674 - DNA, 15 bp, Homo sapiens
tttgggaggccgaga

SEQ ID NO: 42675 - DNA, 15 bp, Homo sapiens
ggtggctcacacctg

SEQ ID NO: 42676 - DNA, 15 bp, Homo sapiens
cggtggctcacacct

SEQ ID NO: 42677 - DNA, 15 bp, Homo sapiens
acggtggctcacacc

SEQ ID NO: 42678 - DNA, 15 bp, Homo sapiens
cacggtggctcacac

SEQ ID NO: 42679 - DNA, 15 bp, Homo sapiens
gcacggtggctcaca

SEQ ID NO: 42680 - DNA, 15 bp, Homo sapiens
agcacggtggctcac

SEQ ID NO: 42681 - DNA, 15 bp, Homo sapiens
gagcacggtggctca

SEQ ID NO: 42682 - DNA, 15 bp, Homo sapiens
cgagcacggtggctc

SEQ ID NO: 42683 - DNA, 15 bp, Homo sapiens
ccgagcacggtggct

SEQ ID NO: 42684 - DNA, 15 bp, Homo sapiens
gccgagcacggtggc

SEQ ID NO: 42685 - DNA, 15 bp, Homo sapiens
ggccgagcacggtgg

SEQ ID NO: 42686 - DNA, 15 bp, Homo sapiens
gggccgagcacggtg

SEQ ID NO: 42687 - DNA, 15 bp, Homo sapiens
tgggccgagcacggt

SEQ ID NO: 42688 - DNA, 15 bp, Homo sapiens
atgggccgagcacgg

SEQ ID NO: 42689 - DNA, 15 bp, Homo sapiens
tatgggccgagcacg

SEQ ID NO: 42690 - DNA, 15 bp, Homo sapiens
ttatgggccgagcac

SEQ ID NO: 42691 - DNA, 15 bp, Homo sapiens
tttatgggccgagca

SEQ ID NO: 42692 - DNA, 15 bp, Homo sapiens
gtttatgggccgagc

SEQ ID NO: 42693 - DNA, 15 bp, Homo sapiens
agtttatgggccgag

SEQ ID NO: 42694 - DNA, 15 bp, Homo sapiens
aagtttatgggccga

SEQ ID NO: 42695 - DNA, 15 bp, Homo sapiens
aaagtttatgggccg

SEQ ID NO: 42696 - DNA, 15 bp, Homo sapiens
aaaagtttatgggcc

SEQ ID NO: 42697 - DNA, 15 bp, Homo sapiens
taaaagtttatgggc

SEQ ID NO: 42698 - DNA, 15 bp, Homo sapiens
ataaaagtttatggg

SEQ ID NO: 42699 - DNA, 15 bp, Homo sapiens
aataaaagtttatgg

SEQ ID NO: 42700 - DNA, 15 bp, Homo sapiens
aaaataaaagtttat

SEQ ID NO: 42701 - DNA, 15 bp, Homo sapiens
aaaaataaaagttta

SEQ ID NO: 42702 - DNA, 15 bp, Homo sapiens
taaaaataaaagttt

SEQ ID NO: 42703 - DNA, 15 bp, Homo sapiens
ttaaaaataaaagtt

SEQ ID NO: 42704 - DNA, 15 bp, Homo sapiens
tttaaaaataaaagt

SEQ ID NO: 42705 - DNA, 15 bp, Homo sapiens
ttttaaaaataaaag

SEQ ID NO: 42706 - DNA, 15 bp, Homo sapiens
attttaaaaataaaa

SEQ ID NO: 42707 - DNA, 15 bp, Homo sapiens
tattttaaaaataaa

SEQ ID NO: 42708 - DNA, 15 bp, Homo sapiens
ttattttaaaaataa

SEQ ID NO: 42709 - DNA, 15 bp, Homo sapiens
cattattttaaaaat

SEQ ID NO: 42710 - DNA, 15 bp, Homo sapiens
acattattttaaaaa

SEQ ID NO: 42711 - DNA, 15 bp, Homo sapiens
gacattattttaaaa

SEQ ID NO: 42712 - DNA, 15 bp, Homo sapiens
tgacattattttaaa

SEQ ID NO: 42713 - DNA, 15 bp, Homo sapiens
atgacattattttaa

SEQ ID NO: 42714 - DNA, 15 bp, Homo sapiens
catgacattatttta

SEQ ID NO: 42715 - DNA, 15 bp, Homo sapiens
tcatgacattatttt

SEQ ID NO: 42716 - DNA, 15 bp, Homo sapiens
atcatgacattattt

SEQ ID NO: 42717 - DNA, 15 bp, Homo sapiens
tatcatgacattatt

SEQ ID NO: 42718 - DNA, 15 bp, Homo sapiens
ttatcatgacattat

SEQ ID NO: 42719 - DNA, 15 bp, Homo sapiens
tttatcatgacatta

SEQ ID NO: 42720 - DNA, 15 bp, Homo sapiens
atttatcatgacatt

SEQ ID NO: 42721 - DNA, 15 bp, Homo sapiens
tatttatcatgacat

SEQ ID NO: 42722 - DNA, 15 bp, Homo sapiens
ttatttatcatgaca

SEQ ID NO: 42723 - DNA, 15 bp, Homo sapiens
attatttatcatgac

SEQ ID NO: 42724 - DNA, 15 bp, Homo sapiens
tattatttatcatga

SEQ ID NO: 42725 - DNA, 15 bp, Homo sapiens
atattatttatcatg

SEQ ID NO: 42726 - DNA, 15 bp, Homo sapiens
aatattatttatcat

SEQ ID NO: 42727 - DNA, 15 bp, Homo sapiens
caatattatttatca

SEQ ID NO: 42728 - DNA, 15 bp, Homo sapiens
gcaatattatttatc

SEQ ID NO: 42729 - DNA, 15 bp, Homo sapiens
agcaatattatttat

SEQ ID NO: 42730 - DNA, 15 bp, Homo sapiens
aagcaatattattta

SEQ ID NO: 42731 - DNA, 15 bp, Homo sapiens
taagcaatattattt

SEQ ID NO: 42732 - DNA, 15 bp, Homo sapiens
ctaagcaatattatt

SEQ ID NO: 42733 - DNA, 15 bp, Homo sapiens
cctaagcaatattat

SEQ ID NO: 42734 - DNA, 15 bp, Homo sapiens
acctaagcaatatta

SEQ ID NO: 42735 - DNA, 15 bp, Homo sapiens
cacctaagcaatatt

SEQ ID NO: 42736 - DNA, 15 bp, Homo sapiens
acacctaagcaatat

SEQ ID NO: 42737 - DNA, 15 bp, Homo sapiens
gacacctaagcaata

SEQ ID NO: 42738 - DNA, 15 bp, Homo sapiens
agacacctaagcaat

SEQ ID NO: 42739 - DNA, 15 bp, Homo sapiens
aagacacctaagcaa

SEQ ID NO: 42740 - DNA, 15 bp, Homo sapiens
aaagacacctaagca

SEQ ID NO: 42741 - DNA, 15 bp, Homo sapiens
taaagacacctaagc

SEQ ID NO: 42742 - DNA, 15 bp, Homo sapiens
ttaaagacacctaag

SEQ ID NO: 42743 - DNA, 15 bp, Homo sapiens
attaaagacacctaa

SEQ ID NO: 42744 - DNA, 15 bp, Homo sapiens
tattaaagacaccta

SEQ ID NO: 42745 - DNA, 15 bp, Homo sapiens
atattaaagacacct

SEQ ID NO: 42746 - DNA, 15 bp, Homo sapiens
tatattaaagacacc

SEQ ID NO: 42747 - DNA, 15 bp, Homo sapiens
atatattaaagacac

SEQ ID NO: 42748 - DNA, 15 bp, Homo sapiens
aatatattaaagaca

SEQ ID NO: 42749 - DNA, 15 bp, Homo sapiens
taatatattaaagac

SEQ ID NO: 42750 - DNA, 15 bp, Homo sapiens
ctaatatattaaaga

SEQ ID NO: 42751 - DNA, 15 bp, Homo sapiens
actaatatattaaag

SEQ ID NO: 42752 - DNA, 15 bp, Homo sapiens
tactaatatattaaa

SEQ ID NO: 42753 - DNA, 15 bp, Homo sapiens
ttactaatatattaa

SEQ ID NO: 42754 - DNA, 15 bp, Homo sapiens
gttactaatatatta

SEQ ID NO: 42755 - DNA, 15 bp, Homo sapiens
tgttactaatatatt

SEQ ID NO: 42756 - DNA, 15 bp, Homo sapiens
atgttactaatatat

SEQ ID NO: 42757 - DNA, 15 bp, Homo sapiens
aatgttactaatata

SEQ ID NO: 42758 - DNA, 15 bp, Homo sapiens
aaatgttactaatat

SEQ ID NO: 42759 - DNA, 15 bp, Homo sapiens
gaaatgttactaata

SEQ ID NO: 42760 - DNA, 15 bp, Homo sapiens
agaaatgttactaat

SEQ ID NO: 42761 - DNA, 15 bp, Homo sapiens
cagaaatgttactaa

SEQ ID NO: 42762 - DNA, 15 bp, Homo sapiens
acagaaatgttacta

SEQ ID NO: 42763 - DNA, 15 bp, Homo sapiens
aacagaaatgttact

SEQ ID NO: 42764 - DNA, 15 bp, Homo sapiens
aaacagaaatgttac

SEQ ID NO: 42765 - DNA, 15 bp, Homo sapiens
aaaacagaaatgtta

SEQ ID NO: 42766 - DNA, 15 bp, Homo sapiens
taaaacagaaatgtt

SEQ ID NO: 42767 - DNA, 15 bp, Homo sapiens
ataaaacagaaatgt

SEQ ID NO: 42768 - DNA, 15 bp, Homo sapiens
aataaaacagaaatg

SEQ ID NO: 42769 - DNA, 15 bp, Homo sapiens
caataaaacagaaat

SEQ ID NO: 42770 - DNA, 15 bp, Homo sapiens
acaataaaacagaaa

SEQ ID NO: 42771 - DNA, 15 bp, Homo sapiens
tacaataaaacagaa

SEQ ID NO: 42772 - DNA, 15 bp, Homo sapiens
gtacaataaaacaga

SEQ ID NO: 42773 - DNA, 15 bp, Homo sapiens
tgtacaataaaacag

SEQ ID NO: 42774 - DNA, 15 bp, Homo sapiens
atgtacaataaaaca

SEQ ID NO: 42775 - DNA, 15 bp, Homo sapiens
gatgtacaataaaac

SEQ ID NO: 42776 - DNA, 15 bp, Homo sapiens
tgatgtacaataaaa

SEQ ID NO: 42777 - DNA, 15 bp, Homo sapiens
ttgatgtacaataaa

SEQ ID NO: 42778 - DNA, 15 bp, Homo sapiens
gttgatgtacaataa

SEQ ID NO: 42779 - DNA, 15 bp, Homo sapiens
tgttgatgtacaata

SEQ ID NO: 42780 - DNA, 15 bp, Homo sapiens
atgttgatgtacaat

SEQ ID NO: 42781 - DNA, 15 bp, Homo sapiens
aatgttgatgtacaa

SEQ ID NO: 42782 - DNA, 15 bp, Homo sapiens
aaatgttgatgtaca

SEQ ID NO: 42783 - DNA, 15 bp, Homo sapiens
taaatgttgatgtac

SEQ ID NO: 42784 - DNA, 15 bp, Homo sapiens
ataaatgttgatgta

SEQ ID NO: 42785 - DNA, 15 bp, Homo sapiens
tataaatgttgatgt

SEQ ID NO: 42786 - DNA, 15 bp, Homo sapiens
atataaatgttgatg

SEQ ID NO: 42787 - DNA, 15 bp, Homo sapiens
aatataaatgttgat

SEQ ID NO: 42788 - DNA, 15 bp, Homo sapiens
gaatataaatgttga

SEQ ID NO: 42789 - DNA, 15 bp, Homo sapiens
tgaatataaatgttg

SEQ ID NO: 42790 - DNA, 15 bp, Homo sapiens
ttgaatataaatgtt

SEQ ID NO: 42791 - DNA, 15 bp, Homo sapiens
tttgaatataaatgt

SEQ ID NO: 42792 - DNA, 15 bp, Homo sapiens
atttgaatataaatg

SEQ ID NO: 42793 - DNA, 15 bp, Homo sapiens
aatttgaatataaat

SEQ ID NO: 42794 - DNA, 15 bp, Homo sapiens
taatttgaatataaa

SEQ ID NO: 42795 - DNA, 15 bp, Homo sapiens
ttaatttgaatataa

SEQ ID NO: 42796 - DNA, 15 bp, Homo sapiens
attaatttgaatata

SEQ ID NO: 42797 - DNA, 15 bp, Homo sapiens
cattaatttgaatat

SEQ ID NO: 42798 - DNA, 15 bp, Homo sapiens
ccattaatttgaata

SEQ ID NO: 42799 - DNA, 15 bp, Homo sapiens
cccattaatttgaat

SEQ ID NO: 42800 - DNA, 15 bp, Homo sapiens
acccattaatttgaa

SEQ ID NO: 42801 - DNA, 15 bp, Homo sapiens
cacccattaatttga

SEQ ID NO: 42802 - DNA, 15 bp, Homo sapiens
tcacccattaatttg

SEQ ID NO: 42803 - DNA, 15 bp, Homo sapiens
ttcacccattaattt

SEQ ID NO: 42804 - DNA, 15 bp, Homo sapiens
cttcacccattaatt

SEQ ID NO: 42805 - DNA, 15 bp, Homo sapiens
tcttcacccattaat

SEQ ID NO: 42806 - DNA, 15 bp, Homo sapiens
ctcttcacccattaa

SEQ ID NO: 42807 - DNA, 15 bp, Homo sapiens
actcttcacccatta

SEQ ID NO: 42808 - DNA, 15 bp, Homo sapiens
tactcttcacccatt

SEQ ID NO: 42809 - DNA, 15 bp, Homo sapiens
gtactcttcacccat

SEQ ID NO: 42810 - DNA, 15 bp, Homo sapiens
agtactcttcaccca

SEQ ID NO: 42811 - DNA, 15 bp, Homo sapiens
gagtactcttcaccc

SEQ ID NO: 42812 - DNA, 15 bp, Homo sapiens
ggagtactcttcacc

SEQ ID NO: 42813 - DNA, 15 bp, Homo sapiens
tggagtactcttcac

SEQ ID NO: 42814 - DNA, 15 bp, Homo sapiens
atggagtactcttca

SEQ ID NO: 42815 - DNA, 15 bp, Homo sapiens
aatggagtactcttc

SEQ ID NO: 42816 - DNA, 15 bp, Homo sapiens
caatggagtactctt

SEQ ID NO: 42817 - DNA, 15 bp, Homo sapiens
ccaatggagtactct

SEQ ID NO: 42818 - DNA, 15 bp, Homo sapiens
tccaatggagtactc

SEQ ID NO: 42819 - DNA, 15 bp, Homo sapiens
gtccaatggagtact

SEQ ID NO: 42820 - DNA, 15 bp, Homo sapiens
agtccaatggagtac

SEQ ID NO: 42821 - DNA, 15 bp, Homo sapiens
tagtccaatggagta

SEQ ID NO: 42822 - DNA, 15 bp, Homo sapiens
ctagtccaatggagt

SEQ ID NO: 42823 - DNA, 15 bp, Homo sapiens
cctagtccaatggag

SEQ ID NO: 42824 - DNA, 15 bp, Homo sapiens
acctagtccaatgga

SEQ ID NO: 42825 - DNA, 15 bp, Homo sapiens
tacctagtccaatgg

SEQ ID NO: 42826 - DNA, 15 bp, Homo sapiens
atacctagtccaatg

SEQ ID NO: 42827 - DNA, 15 bp, Homo sapiens
tatacctagtccaat

SEQ ID NO: 42828 - DNA, 15 bp, Homo sapiens
atatacctagtccaa

SEQ ID NO: 42829 - DNA, 15 bp, Homo sapiens
gatatacctagtcca

SEQ ID NO: 42830 - DNA, 15 bp, Homo sapiens
cgatatacctagtcc

SEQ ID NO: 42831 - DNA, 15 bp, Homo sapiens
acgatatacctagtc

SEQ ID NO: 42832 - DNA, 15 bp, Homo sapiens
tacgatatacctagt

SEQ ID NO: 42833 - DNA, 15 bp, Homo sapiens
ttacgatatacctag

SEQ ID NO: 42834 - DNA, 15 bp, Homo sapiens
attacgatataccta

SEQ ID NO: 42835 - DNA, 15 bp, Homo sapiens
aattacgatatacct

SEQ ID NO: 42836 - DNA, 15 bp, Homo sapiens
aaattacgatatacc

SEQ ID NO: 42837 - DNA, 15 bp, Homo sapiens
taaattacgatatac

SEQ ID NO: 42838 - DNA, 15 bp, Homo sapiens
ttaaattacgatata

SEQ ID NO: 42839 - DNA, 15 bp, Homo sapiens
attaaattacgatat

SEQ ID NO: 42840 - DNA, 15 bp, Homo sapiens
gattaaattacgata

SEQ ID NO: 42841 - DNA, 15 bp, Homo sapiens
agattaaattacgat

SEQ ID NO: 42842 - DNA, 15 bp, Homo sapiens
gagattaaattacga

SEQ ID NO: 42843 - DNA, 15 bp, Homo sapiens
ggagattaaattacg

SEQ ID NO: 42844 - DNA, 15 bp, Homo sapiens
aggagattaaattac

SEQ ID NO: 42845 - DNA, 15 bp, Homo sapiens
taggagattaaatta

SEQ ID NO: 42846 - DNA, 15 bp, Homo sapiens
ataggagattaaatt

SEQ ID NO: 42847 - DNA, 15 bp, Homo sapiens
aataggagattaaat

SEQ ID NO: 42848 - DNA, 15 bp, Homo sapiens
taataggagattaaa

SEQ ID NO: 42849 - DNA, 15 bp, Homo sapiens
ataataggagattaa

SEQ ID NO: 42850 - DNA, 15 bp, Homo sapiens
aataataggagatta

SEQ ID NO: 42851 - DNA, 15 bp, Homo sapiens
caataataggagatt

SEQ ID NO: 42852 - DNA, 15 bp, Homo sapiens
ccaataataggagat

SEQ ID NO: 42853 - DNA, 15 bp, Homo sapiens
tccaataataggaga

SEQ ID NO: 42854 - DNA, 15 bp, Homo sapiens
gtccaataataggag

SEQ ID NO: 42855 - DNA, 15 bp, Homo sapiens
tgtccaataatagga

SEQ ID NO: 42856 - DNA, 15 bp, Homo sapiens
ttgtccaataatagg

SEQ ID NO: 42857 - DNA, 15 bp, Homo sapiens
gttgtccaataatag

SEQ ID NO: 42858 - DNA, 15 bp, Homo sapiens
agttgtccaataata

SEQ ID NO: 42859 - DNA, 15 bp, Homo sapiens
tagttgtccaataat

SEQ ID NO: 42860 - DNA, 15 bp, Homo sapiens
gtagttgtccaataa

SEQ ID NO: 42861 - DNA, 15 bp, Homo sapiens
tgtagttgtccaata

SEQ ID NO: 42862 - DNA, 15 bp, Homo sapiens
atgtagttgtccaat

SEQ ID NO: 42863 - DNA, 15 bp, Homo sapiens
aatgtagttgtccaa

SEQ ID NO: 42864 - DNA, 15 bp, Homo sapiens
caatgtagttgtcca

SEQ ID NO: 42865 - DNA, 15 bp, Homo sapiens
acaatgtagttgtcc

SEQ ID NO: 42866 - DNA, 15 bp, Homo sapiens
aacaatgtagttgtc

SEQ ID NO: 42867 - DNA, 15 bp, Homo sapiens
aaacaatgtagttgt

SEQ ID NO: 42868 - DNA, 15 bp, Homo sapiens
gaaacaatgtagttg

SEQ ID NO: 42869 - DNA, 15 bp, Homo sapiens
agaaacaatgtagtt

SEQ ID NO: 42870 - DNA, 15 bp, Homo sapiens
tagaaacaatgtagt

SEQ ID NO: 42871 - DNA, 15 bp, Homo sapiens
ttagaaacaatgtag

SEQ ID NO: 42872 - DNA, 15 bp, Homo sapiens
tttagaaacaatgta

SEQ ID NO: 42873 - DNA, 15 bp, Homo sapiens
ttttagaaacaatgt

SEQ ID NO: 42874 - DNA, 15 bp, Homo sapiens
attttagaaacaatg

SEQ ID NO: 42875 - DNA, 15 bp, Homo sapiens
aattttagaaacaat

SEQ ID NO: 42876 - DNA, 15 bp, Homo sapiens
taattttagaaacaa

SEQ ID NO: 42877 - DNA, 15 bp, Homo sapiens
ataattttagaaaca

SEQ ID NO: 42878 - DNA, 15 bp, Homo sapiens
tataattttagaaac

SEQ ID NO: 42879 - DNA, 15 bp, Homo sapiens
gtataattttagaaa

SEQ ID NO: 42880 - DNA, 15 bp, Homo sapiens
agtataattttagaa

SEQ ID NO: 42881 - DNA, 15 bp, Homo sapiens
tagtataattttaga

SEQ ID NO: 42882 - DNA, 15 bp, Homo sapiens
atagtataattttag

SEQ ID NO: 42883 - DNA, 15 bp, Homo sapiens
aatagtataatttta

SEQ ID NO: 42884 - DNA, 15 bp, Homo sapiens
gaatagtataatttt

SEQ ID NO: 42885 - DNA, 15 bp, Homo sapiens
ggaatagtataattt

SEQ ID NO: 42886 - DNA, 15 bp, Homo sapiens
aggaatagtataatt

SEQ ID NO: 42887 - DNA, 15 bp, Homo sapiens
taggaatagtataat

SEQ ID NO: 42888 - DNA, 15 bp, Homo sapiens
ataggaatagtataa

SEQ ID NO: 42889 - DNA, 15 bp, Homo sapiens
cataggaatagtata

SEQ ID NO: 42890 - DNA, 15 bp, Homo sapiens
tcataggaatagtat

SEQ ID NO: 42891 - DNA, 15 bp, Homo sapiens
gtcataggaatagta

SEQ ID NO: 42892 - DNA, 15 bp, Homo sapiens
agtcataggaatagt

SEQ ID NO: 42893 - DNA, 15 bp, Homo sapiens
tagtcataggaatag

SEQ ID NO: 42894 - DNA, 15 bp, Homo sapiens
ttagtcataggaata

SEQ ID NO: 42895 - DNA, 15 bp, Homo sapiens
tttagtcataggaat

SEQ ID NO: 42896 - DNA, 15 bp, Homo sapiens
gtttagtcataggaa

SEQ ID NO: 42897 - DNA, 15 bp, Homo sapiens
ggtttagtcatagga

SEQ ID NO: 42898 - DNA, 15 bp, Homo sapiens
aggtttagtcatagg

SEQ ID NO: 42899 - DNA, 15 bp, Homo sapiens
aaggtttagtcatag

SEQ ID NO: 42900 - DNA, 15 bp, Homo sapiens
aaaggtttagtcata

SEQ ID NO: 42901 - DNA, 15 bp, Homo sapiens
caaaggtttagtcat

SEQ ID NO: 42902 - DNA, 15 bp, Homo sapiens
gcaaaggtttagtca

SEQ ID NO: 42903 - DNA, 15 bp, Homo sapiens
tgcaaaggtttagtc

SEQ ID NO: 42904 - DNA, 15 bp, Homo sapiens
atgcaaaggtttagt

SEQ ID NO: 42905 - DNA, 15 bp, Homo sapiens
tatgcaaaggtttag

SEQ ID NO: 42906 - DNA, 15 bp, Homo sapiens
atatgcaaaggttta

SEQ ID NO: 42907 - DNA, 15 bp, Homo sapiens
tatatgcaaaggttt

SEQ ID NO: 42908 - DNA, 15 bp, Homo sapiens
atatatgcaaaggtt

SEQ ID NO: 42909 - DNA, 15 bp, Homo sapiens
gatatatgcaaaggt

SEQ ID NO: 42910 - DNA, 15 bp, Homo sapiens
agatatatgcaaagg

SEQ ID NO: 42911 - DNA, 15 bp, Homo sapiens
aagatatatgcaaag

SEQ ID NO: 42912 - DNA, 15 bp, Homo sapiens
aaagatatatgcaaa

SEQ ID NO: 42913 - DNA, 15 bp, Homo sapiens
aaaagatatatgcaa

SEQ ID NO: 42914 - DNA, 15 bp, Homo sapiens
taaaagatatatgca

SEQ ID NO: 42915 - DNA, 15 bp, Homo sapiens
ataaaagatatatgc

SEQ ID NO: 42916 - DNA, 15 bp, Homo sapiens
gataaaagatatatg

SEQ ID NO: 42917 - DNA, 15 bp, Homo sapiens
agataaaagatatat

SEQ ID NO: 42918 - DNA, 15 bp, Homo sapiens
gagataaaagatata

SEQ ID NO: 42919 - DNA, 15 bp, Homo sapiens
ggagataaaagatat

SEQ ID NO: 42920 - DNA, 15 bp, Homo sapiens
gggagataaaagata

SEQ ID NO: 42921 - DNA, 15 bp, Homo sapiens
agggagataaaagat

SEQ ID NO: 42922 - DNA, 15 bp, Homo sapiens
tagggagataaaaga

SEQ ID NO: 42923 - DNA, 15 bp, Homo sapiens
ctagggagataaaag

SEQ ID NO: 42924 - DNA, 15 bp, Homo sapiens
cctagggagataaaa

SEQ ID NO: 42925 - DNA, 15 bp, Homo sapiens
tcctagggagataaa

SEQ ID NO: 42926 - DNA, 15 bp, Homo sapiens
atcctagggagataa

SEQ ID NO: 42927 - DNA, 15 bp, Homo sapiens
tatcctagggagata

SEQ ID NO: 42928 - DNA, 15 bp, Homo sapiens
atatcctagggagat

SEQ ID NO: 42929 - DNA, 15 bp, Homo sapiens
tatatcctagggaga

SEQ ID NO: 42930 - DNA, 15 bp, Homo sapiens
atatatcctagggag

SEQ ID NO: 42931 - DNA, 15 bp, Homo sapiens
aatatatcctaggga

SEQ ID NO: 42932 - DNA, 15 bp, Homo sapiens
aaatatatcctaggg

SEQ ID NO: 42933 - DNA, 15 bp, Homo sapiens
gaaatatatcctagg

SEQ ID NO: 42934 - DNA, 15 bp, Homo sapiens
agaaatatatcctag

SEQ ID NO: 42935 - DNA, 15 bp, Homo sapiens
tagaaatatatccta

SEQ ID NO: 42936 - DNA, 15 bp, Homo sapiens
ttagaaatatatcct

SEQ ID NO: 42937 - DNA, 15 bp, Homo sapiens
tttagaaatatatcc

SEQ ID NO: 42938 - DNA, 15 bp, Homo sapiens
ttttagaaatatatc

SEQ ID NO: 42939 - DNA, 15 bp, Homo sapiens
gttttagaaatatat

SEQ ID NO: 42940 - DNA, 15 bp, Homo sapiens
agttttagaaatata

SEQ ID NO: 42941 - DNA, 15 bp, Homo sapiens
tagttttagaaatat

SEQ ID NO: 42942 - DNA, 15 bp, Homo sapiens
ctagttttagaaata

SEQ ID NO: 42943 - DNA, 15 bp, Homo sapiens
gctagttttagaaat

SEQ ID NO: 42944 - DNA, 15 bp, Homo sapiens
tgctagttttagaaa

SEQ ID NO: 42945 - DNA, 15 bp, Homo sapiens
atgctagttttagaa

SEQ ID NO: 42946 - DNA, 15 bp, Homo sapiens
aatgctagttttaga

SEQ ID NO: 42947 - DNA, 15 bp, Homo sapiens
caatgctagttttag

SEQ ID NO: 42948 - DNA, 15 bp, Homo sapiens
acaatgctagtttta

SEQ ID NO: 42949 - DNA, 15 bp, Homo sapiens
aacaatgctagtttt

SEQ ID NO: 42950 - DNA, 15 bp, Homo sapiens
caacaatgctagttt

SEQ ID NO: 42951 - DNA, 15 bp, Homo sapiens
tcaacaatgctagtt

SEQ ID NO: 42952 - DNA, 15 bp, Homo sapiens
gtcaacaatgctagt

SEQ ID NO: 42953 - DNA, 15 bp, Homo sapiens
agtcaacaatgctag

SEQ ID NO: 42954 - DNA, 15 bp, Homo sapiens
cagtcaacaatgcta

SEQ ID NO: 42955 - DNA, 15 bp, Homo sapiens
tcagtcaacaatgct

SEQ ID NO: 42956 - DNA, 15 bp, Homo sapiens
ttcagtcaacaatgc

SEQ ID NO: 42957 - DNA, 15 bp, Homo sapiens
tttcagtcaacaatg

SEQ ID NO: 42958 - DNA, 15 bp, Homo sapiens
ctttcagtcaacaat

SEQ ID NO: 42959 - DNA, 15 bp, Homo sapiens
actttcagtcaacaa

SEQ ID NO: 42960 - DNA, 15 bp, Homo sapiens
cactttcagtcaaca

SEQ ID NO: 42961 - DNA, 15 bp, Homo sapiens
acactttcagtcaac

SEQ ID NO: 42962 - DNA, 15 bp, Homo sapiens
tacactttcagtcaa

SEQ ID NO: 42963 - DNA, 15 bp, Homo sapiens
ttacactttcagtca

SEQ ID NO: 42964 - DNA, 15 bp, Homo sapiens
tttacactttcagtc

SEQ ID NO: 42965 - DNA, 15 bp, Homo sapiens
atttacactttcagt

SEQ ID NO: 42966 - DNA, 15 bp, Homo sapiens
tatttacactttcag

SEQ ID NO: 42967 - DNA, 15 bp, Homo sapiens
gtatttacactttca

SEQ ID NO: 42968 - DNA, 15 bp, Homo sapiens
cgtatttacactttc

SEQ ID NO: 42969 - DNA, 15 bp, Homo sapiens
acgtatttacacttt

SEQ ID NO: 42970 - DNA, 15 bp, Homo sapiens
cacgtatttacactt

SEQ ID NO: 42971 - DNA, 15 bp, Homo sapiens
acacgtatttacact

SEQ ID NO: 42972 - DNA, 15 bp, Homo sapiens
aacacgtatttacac

SEQ ID NO: 42973 - DNA, 15 bp, Homo sapiens
taacacgtatttaca

SEQ ID NO: 42974 - DNA, 15 bp, Homo sapiens
ttaacacgtatttac

SEQ ID NO: 42975 - DNA, 15 bp, Homo sapiens
cttaacacgtattta

SEQ ID NO: 42976 - DNA, 15 bp, Homo sapiens
ccttaacacgtattt

SEQ ID NO: 42977 - DNA, 15 bp, Homo sapiens
accttaacacgtatt

SEQ ID NO: 42978 - DNA, 15 bp, Homo sapiens
caccttaacacgtat

SEQ ID NO: 42979 - DNA, 15 bp, Homo sapiens
acaccttaacacgta

SEQ ID NO: 42980 - DNA, 15 bp, Homo sapiens
aacaccttaacacgt

SEQ ID NO: 42981 - DNA, 15 bp, Homo sapiens
aaacaccttaacacg

SEQ ID NO: 42982 - DNA, 15 bp, Homo sapiens
caaacaccttaacac

SEQ ID NO: 42983 - DNA, 15 bp, Homo sapiens
gcaaacaccttaaca

SEQ ID NO: 42984 - DNA, 15 bp, Homo sapiens
agcaaacaccttaac

SEQ ID NO: 42985 - DNA, 15 bp, Homo sapiens
tagcaaacaccttaa

SEQ ID NO: 42986 - DNA, 15 bp, Homo sapiens
gtagcaaacacctta

SEQ ID NO: 42987 - DNA, 15 bp, Homo sapiens
tgtagcaaacacctt

SEQ ID NO: 42988 - DNA, 15 bp, Homo sapiens
atgtagcaaacacct

SEQ ID NO: 42989 - DNA, 15 bp, Homo sapiens
tatgtagcaaacacc

SEQ ID NO: 42990 - DNA, 15 bp, Homo sapiens
ttatgtagcaaacac

SEQ ID NO: 42991 - DNA, 15 bp, Homo sapiens
attatgtagcaaaca

SEQ ID NO: 42992 - DNA, 15 bp, Homo sapiens
cattatgtagcaaac

SEQ ID NO: 42993 - DNA, 15 bp, Homo sapiens
gcattatgtagcaaa

SEQ ID NO: 42994 - DNA, 15 bp, Homo sapiens
ggcattatgtagcaa

SEQ ID NO: 42995 - DNA, 15 bp, Homo sapiens
tggcattatgtagca

SEQ ID NO: 42996 - DNA, 15 bp, Homo sapiens
atggcattatgtagc

SEQ ID NO: 42997 - DNA, 15 bp, Homo sapiens
tatggcattatgtag

SEQ ID NO: 42998 - DNA, 15 bp, Homo sapiens
atatggcattatgta

SEQ ID NO: 42999 - DNA, 15 bp, Homo sapiens
aatatggcattatgt

SEQ ID NO: 43000 - DNA, 15 bp, Homo sapiens
aaatatggcattatg

SEQ ID NO: 43001 - DNA, 15 bp, Homo sapiens
gaaatatggcattat

SEQ ID NO: 43002 - DNA, 15 bp, Homo sapiens
ggaaatatggcatta

SEQ ID NO: 43003 - DNA, 15 bp, Homo sapiens
aggaaatatggcatt

SEQ ID NO: 43004 - DNA, 15 bp, Homo sapiens
aaggaaatatggcat

SEQ ID NO: 43005 - DNA, 15 bp, Homo sapiens
aaaggaaatatggca

SEQ ID NO: 43006 - DNA, 15 bp, Homo sapiens
aaaaggaaatatggc

SEQ ID NO: 43007 - DNA, 15 bp, Homo sapiens
aaaaaggaaatatgg

SEQ ID NO: 43008 - DNA, 15 bp, Homo sapiens
taaaaaggaaatatg

SEQ ID NO: 43009 - DNA, 15 bp, Homo sapiens
ctaaaaaggaaatat

SEQ ID NO: 43010 - DNA, 15 bp, Homo sapiens
cctaaaaaggaaata

SEQ ID NO: 43011 - DNA, 15 bp, Homo sapiens
tcctaaaaaggaaat

SEQ ID NO: 43012 - DNA, 15 bp, Homo sapiens
ttcctaaaaaggaaa

SEQ ID NO: 43013 - DNA, 15 bp, Homo sapiens
tttcctaaaaaggaa

SEQ ID NO: 43014 - DNA, 15 bp, Homo sapiens
gtttcctaaaaagga

SEQ ID NO: 43015 - DNA, 15 bp, Homo sapiens
agtttcctaaaaagg

SEQ ID NO: 43016 - DNA, 15 bp, Homo sapiens
tagtttcctaaaaag

SEQ ID NO: 43017 - DNA, 15 bp, Homo sapiens
ttagtttcctaaaaa

SEQ ID NO: 43018 - DNA, 15 bp, Homo sapiens
cttagtttcctaaaa

SEQ ID NO: 43019 - DNA, 15 bp, Homo sapiens
gcttagtttcctaaa

SEQ ID NO: 43020 - DNA, 15 bp, Homo sapiens
agcttagtttcctaa

SEQ ID NO: 43021 - DNA, 15 bp, Homo sapiens
tagcttagtttccta

SEQ ID NO: 43022 - DNA, 15 bp, Homo sapiens
gtagcttagtttcct

SEQ ID NO: 43023 - DNA, 15 bp, Homo sapiens
agtagcttagtttcc

SEQ ID NO: 43024 - DNA, 15 bp, Homo sapiens
aagtagcttagtttc

SEQ ID NO: 43025 - DNA, 15 bp, Homo sapiens
aaagtagcttagttt

SEQ ID NO: 43026 - DNA, 15 bp, Homo sapiens
caaagtagcttagtt

SEQ ID NO: 43027 - DNA, 15 bp, Homo sapiens
ccaaagtagcttagt

SEQ ID NO: 43028 - DNA, 15 bp, Homo sapiens
tccaaagtagcttag

SEQ ID NO: 43029 - DNA, 15 bp, Homo sapiens
atccaaagtagctta

SEQ ID NO: 43030 - DNA, 15 bp, Homo sapiens
aatccaaagtagctt

SEQ ID NO: 43031 - DNA, 15 bp, Homo sapiens
aaatccaaagtagct

SEQ ID NO: 43032 - DNA, 15 bp, Homo sapiens
gaaatccaaagtagc

SEQ ID NO: 43033 - DNA, 15 bp, Homo sapiens
ggaaatccaaagtag

SEQ ID NO: 43034 - DNA, 15 bp, Homo sapiens
tggaaatccaaagta

SEQ ID NO: 43035 - DNA, 15 bp, Homo sapiens
gtggaaatccaaagt

SEQ ID NO: 43036 - DNA, 15 bp, Homo sapiens
ggtggaaatccaaag

SEQ ID NO: 43037 - DNA, 15 bp, Homo sapiens
tggtggaaatccaaa

SEQ ID NO: 43038 - DNA, 15 bp, Homo sapiens
ttggtggaaatccaa

SEQ ID NO: 43039 - DNA, 15 bp, Homo sapiens
gttggtggaaatcca

SEQ ID NO: 43040 - DNA, 15 bp, Homo sapiens
tgttggtggaaatcc

SEQ ID NO: 43041 - DNA, 15 bp, Homo sapiens
gtgttggtggaaatc

SEQ ID NO: 43042 - DNA, 15 bp, Homo sapiens
agtgttggtggaaat

SEQ ID NO: 43043 - DNA, 15 bp, Homo sapiens
cagtgttggtggaaa

SEQ ID NO: 43044 - DNA, 15 bp, Homo sapiens
acagtgttggtggaa

SEQ ID NO: 43045 - DNA, 15 bp, Homo sapiens
tacagtgttggtgga

SEQ ID NO: 43046 - DNA, 15 bp, Homo sapiens
atacagtgttggtgg

SEQ ID NO: 43047 - DNA, 15 bp, Homo sapiens
aatacagtgttggtg

SEQ ID NO: 43048 - DNA, 15 bp, Homo sapiens
gaatacagtgttggt

SEQ ID NO: 43049 - DNA, 15 bp, Homo sapiens
tgaatacagtgttgg

SEQ ID NO: 43050 - DNA, 15 bp, Homo sapiens
atgaatacagtgttg

SEQ ID NO: 43051 - DNA, 15 bp, Homo sapiens
catgaatacagtgtt

SEQ ID NO: 43052 - DNA, 15 bp, Homo sapiens
acatgaatacagtgt

SEQ ID NO: 43053 - DNA, 15 bp, Homo sapiens
tacatgaatacagtg

SEQ ID NO: 43054 - DNA, 15 bp, Homo sapiens
gtacatgaatacagt

SEQ ID NO: 43055 - DNA, 15 bp, Homo sapiens
ggtacatgaatacag

SEQ ID NO: 43056 - DNA, 15 bp, Homo sapiens
gggtacatgaataca

SEQ ID NO: 43057 - DNA, 15 bp, Homo sapiens
tgggtacatgaatac

SEQ ID NO: 43058 - DNA, 15 bp, Homo sapiens
atgggtacatgaata

SEQ ID NO: 43059 - DNA, 15 bp, Homo sapiens
aatgggtacatgaat

SEQ ID NO: 43060 - DNA, 15 bp, Homo sapiens
aaatgggtacatgaa

SEQ ID NO: 43061 - DNA, 15 bp, Homo sapiens
aaaatgggtacatga

SEQ ID NO: 43062 - DNA, 15 bp, Homo sapiens
aaaaatgggtacatg

SEQ ID NO: 43063 - DNA, 15 bp, Homo sapiens
gaaaaatgggtacat

SEQ ID NO: 43064 - DNA, 15 bp, Homo sapiens
agaaaaatgggtaca

SEQ ID NO: 43065 - DNA, 15 bp, Homo sapiens
gagaaaaatgggtac

SEQ ID NO: 43066 - DNA, 15 bp, Homo sapiens
agagaaaaatgggta

SEQ ID NO: 43067 - DNA, 15 bp, Homo sapiens
aagagaaaaatgggt

SEQ ID NO: 43068 - DNA, 15 bp, Homo sapiens
taagagaaaaatggg

SEQ ID NO: 43069 - DNA, 15 bp, Homo sapiens
ttaagagaaaaatgg

SEQ ID NO: 43070 - DNA, 15 bp, Homo sapiens
gttaagagaaaaatg

SEQ ID NO: 43071 - DNA, 15 bp, Homo sapiens
ggttaagagaaaaat

SEQ ID NO: 43072 - DNA, 15 bp, Homo sapiens
aggttaagagaaaaa

SEQ ID NO: 43073 - DNA, 15 bp, Homo sapiens
taggttaagagaaaa

SEQ ID NO: 43074 - DNA, 15 bp, Homo sapiens
ttaggttaagagaaa

SEQ ID NO: 43075 - DNA, 15 bp, Homo sapiens
gttaggttaagagaa

SEQ ID NO: 43076 - DNA, 15 bp, Homo sapiens
agttaggttaagaga

SEQ ID NO: 43077 - DNA, 15 bp, Homo sapiens
aagttaggttaagag

SEQ ID NO: 43078 - DNA, 15 bp, Homo sapiens
aaagttaggttaaga

SEQ ID NO: 43079 - DNA, 15 bp, Homo sapiens
taaagttaggttaag

SEQ ID NO: 43080 - DNA, 15 bp, Homo sapiens
ataaagttaggttaa

SEQ ID NO: 43081 - DNA, 15 bp, Homo sapiens
aataaagttaggtta

SEQ ID NO: 43082 - DNA, 15 bp, Homo sapiens
caataaagttaggtt

SEQ ID NO: 43083 - DNA, 15 bp, Homo sapiens
ccaataaagttaggt

SEQ ID NO: 43084 - DNA, 15 bp, Homo sapiens
accaataaagttagg

SEQ ID NO: 43085 - DNA, 15 bp, Homo sapiens
gaccaataaagttag

SEQ ID NO: 43086 - DNA, 15 bp, Homo sapiens
agaccaataaagtta

SEQ ID NO: 43087 - DNA, 15 bp, Homo sapiens
aagaccaataaagtt

SEQ ID NO: 43088 - DNA, 15 bp, Homo sapiens
aaagaccaataaagt

SEQ ID NO: 43089 - DNA, 15 bp, Homo sapiens
aaaagaccaataaag

SEQ ID NO: 43090 - DNA, 15 bp, Homo sapiens
aaaaagaccaataaa

SEQ ID NO: 43091 - DNA, 15 bp, Homo sapiens
taaaaagaccaataa

SEQ ID NO: 43092 - DNA, 15 bp, Homo sapiens
ttaaaaagaccaata

SEQ ID NO: 43093 - DNA, 15 bp, Homo sapiens
attaaaaagaccaat

SEQ ID NO: 43094 - DNA, 15 bp, Homo sapiens
aattaaaaagaccaa

SEQ ID NO: 43095 - DNA, 15 bp, Homo sapiens
gaattaaaaagacca

SEQ ID NO: 43096 - DNA, 15 bp, Homo sapiens
agaattaaaaagacc

SEQ ID NO: 43097 - DNA, 15 bp, Homo sapiens
aagaattaaaaagac

SEQ ID NO: 43098 - DNA, 15 bp, Homo sapiens
taagaattaaaaaga

SEQ ID NO: 43099 - DNA, 15 bp, Homo sapiens
ttaagaattaaaaag

SEQ ID NO: 43100 - DNA, 15 bp, Homo sapiens
gttaagaattaaaaa

SEQ ID NO: 43101 - DNA, 15 bp, Homo sapiens
tgttaagaattaaaa

SEQ ID NO: 43102 - DNA, 15 bp, Homo sapiens
ctgttaagaattaaa

SEQ ID NO: 43103 - DNA, 15 bp, Homo sapiens
tctgttaagaattaa

SEQ ID NO: 43104 - DNA, 15 bp, Homo sapiens
ctctgttaagaatta

SEQ ID NO: 43105 - DNA, 15 bp, Homo sapiens
tctctgttaagaatt

SEQ ID NO: 43106 - DNA, 15 bp, Homo sapiens
gtctctgttaagaat

SEQ ID NO: 43107 - DNA, 15 bp, Homo sapiens
ggtctctgttaagaa

SEQ ID NO: 43108 - DNA, 15 bp, Homo sapiens
tggtctctgttaaga

SEQ ID NO: 43109 - DNA, 15 bp, Homo sapiens
ctggtctctgttaag

SEQ ID NO: 43110 - DNA, 15 bp, Homo sapiens
tctggtctctgttaa

SEQ ID NO: 43111 - DNA, 15 bp, Homo sapiens
ttctggtctctgtta

SEQ ID NO: 43112 - DNA, 15 bp, Homo sapiens
gttctggtctctgtt

SEQ ID NO: 43113 - DNA, 15 bp, Homo sapiens
agttctggtctctgt

SEQ ID NO: 43114 - DNA, 15 bp, Homo sapiens
aagttctggtctctg

SEQ ID NO: 43115 - DNA, 15 bp, Homo sapiens
aaagttctggtctct

SEQ ID NO: 43116 - DNA, 15 bp, Homo sapiens
caaagttctggtctc

SEQ ID NO: 43117 - DNA, 15 bp, Homo sapiens
acaaagttctggtct

SEQ ID NO: 43118 - DNA, 15 bp, Homo sapiens
tacaaagttctggtc

SEQ ID NO: 43119 - DNA, 15 bp, Homo sapiens
ttacaaagttctggt

SEQ ID NO: 43120 - DNA, 15 bp, Homo sapiens
attacaaagttctgg

SEQ ID NO: 43121 - DNA, 15 bp, Homo sapiens
aattacaaagttctg

SEQ ID NO: 43122 - DNA, 15 bp, Homo sapiens
gaattacaaagttct

SEQ ID NO: 43123 - DNA, 15 bp, Homo sapiens
tgaattacaaagttc

SEQ ID NO: 43124 - DNA, 15 bp, Homo sapiens
ttgaattacaaagtt

SEQ ID NO: 43125 - DNA, 15 bp, Homo sapiens
gttgaattacaaagt

SEQ ID NO: 43126 - DNA, 15 bp, Homo sapiens
tgttgaattacaaag

SEQ ID NO: 43127 - DNA, 15 bp, Homo sapiens
atgttgaattacaaa

SEQ ID NO: 43128 - DNA, 15 bp, Homo sapiens
aatgttgaattacaa

SEQ ID NO: 43129 - DNA, 15 bp, Homo sapiens
gaatgttgaattaca

SEQ ID NO: 43130 - DNA, 15 bp, Homo sapiens
tgaatgttgaattac

SEQ ID NO: 43131 - DNA, 15 bp, Homo sapiens
atgaatgttgaatta

SEQ ID NO: 43132 - DNA, 15 bp, Homo sapiens
gatgaatgttgaatt

SEQ ID NO: 43133 - DNA, 15 bp, Homo sapiens
cgatgaatgttgaat

SEQ ID NO: 43134 - DNA, 15 bp, Homo sapiens
acgatgaatgttgaa

SEQ ID NO: 43135 - DNA, 15 bp, Homo sapiens
aacgatgaatgttga

SEQ ID NO: 43136 - DNA, 15 bp, Homo sapiens
caacgatgaatgttg

SEQ ID NO: 43137 - DNA, 15 bp, Homo sapiens
acaacgatgaatgtt

SEQ ID NO: 43138 - DNA, 15 bp, Homo sapiens
cacaacgatgaatgt

SEQ ID NO: 43139 - DNA, 15 bp, Homo sapiens
acacaacgatgaatg

SEQ ID NO: 43140 - DNA, 15 bp, Homo sapiens
tacacaacgatgaat

SEQ ID NO: 43141 - DNA, 15 bp, Homo sapiens
ttacacaacgatgaa

SEQ ID NO: 43142 - DNA, 15 bp, Homo sapiens
tttacacaacgatga

SEQ ID NO: 43143 - DNA, 15 bp, Homo sapiens
atttacacaacgatg

SEQ ID NO: 43144 - DNA, 15 bp, Homo sapiens
aatttacacaacgat

SEQ ID NO: 43145 - DNA, 15 bp, Homo sapiens
taatttacacaacga

SEQ ID NO: 43146 - DNA, 15 bp, Homo sapiens
ttaatttacacaacg

SEQ ID NO: 43147 - DNA, 15 bp, Homo sapiens
tttaatttacacaac

SEQ ID NO: 43148 - DNA, 15 bp, Homo sapiens
gtttaatttacacaa

SEQ ID NO: 43149 - DNA, 15 bp, Homo sapiens
agtttaatttacaca

SEQ ID NO: 43150 - DNA, 15 bp, Homo sapiens
aagtttaatttacac

SEQ ID NO: 43151 - DNA, 15 bp, Homo sapiens
gaagtttaatttaca

SEQ ID NO: 43152 - DNA, 15 bp, Homo sapiens
agaagtttaatttac

SEQ ID NO: 43153 - DNA, 15 bp, Homo sapiens
gagaagtttaattta

SEQ ID NO: 43154 - DNA, 15 bp, Homo sapiens
ggagaagtttaattt

SEQ ID NO: 43155 - DNA, 15 bp, Homo sapiens
gggagaagtttaatt

SEQ ID NO: 43156 - DNA, 15 bp, Homo sapiens
tgggagaagtttaat

SEQ ID NO: 43157 - DNA, 15 bp, Homo sapiens
atgggagaagtttaa

SEQ ID NO: 43158 - DNA, 15 bp, Homo sapiens
aatgggagaagttta

SEQ ID NO: 43159 - DNA, 15 bp, Homo sapiens
gaatgggagaagttt

SEQ ID NO: 43160 - DNA, 15 bp, Homo sapiens
ggaatgggagaagtt

SEQ ID NO: 43161 - DNA, 15 bp, Homo sapiens
aggaatgggagaagt

SEQ ID NO: 43162 - DNA, 15 bp, Homo sapiens
aaggaatgggagaag

SEQ ID NO: 43163 - DNA, 15 bp, Homo sapiens
aaaggaatgggagaa

SEQ ID NO: 43164 - DNA, 15 bp, Homo sapiens
gaaaggaatgggaga

SEQ ID NO: 43165 - DNA, 15 bp, Homo sapiens
tgaaaggaatgggag

SEQ ID NO: 43166 - DNA, 15 bp, Homo sapiens
ctgaaaggaatggga

SEQ ID NO: 43167 - DNA, 15 bp, Homo sapiens
tctgaaaggaatggg

SEQ ID NO: 43168 - DNA, 15 bp, Homo sapiens
ctctgaaaggaatgg

SEQ ID NO: 43169 - DNA, 15 bp, Homo sapiens
cctctgaaaggaatg

SEQ ID NO: 43170 - DNA, 15 bp, Homo sapiens
ccctctgaaaggaat

SEQ ID NO: 43171 - DNA, 15 bp, Homo sapiens
tccctctgaaaggaa

SEQ ID NO: 43172 - DNA, 15 bp, Homo sapiens
ttccctctgaaagga

SEQ ID NO: 43173 - DNA, 15 bp, Homo sapiens
gttccctctgaaagg

SEQ ID NO: 43174 - DNA, 15 bp, Homo sapiens
ggttccctctgaaag

SEQ ID NO: 43175 - DNA, 15 bp, Homo sapiens
gggttccctctgaaa

SEQ ID NO: 43176 - DNA, 15 bp, Homo sapiens
ggggttccctctgaa

SEQ ID NO: 43177 - DNA, 15 bp, Homo sapiens
aggggttccctctga

SEQ ID NO: 43178 - DNA, 15 bp, Homo sapiens
aaggggttccctctg

SEQ ID NO: 43179 - DNA, 15 bp, Homo sapiens
taaggggttccctct

SEQ ID NO: 43180 - DNA, 15 bp, Homo sapiens
gtaaggggttccctc

SEQ ID NO: 43181 - DNA, 15 bp, Homo sapiens
ggtaaggggttccct

SEQ ID NO: 43182 - DNA, 15 bp, Homo sapiens
aggtaaggggttccc

SEQ ID NO: 43183 - DNA, 15 bp, Homo sapiens
caggtaaggggttcc

SEQ ID NO: 43184 - DNA, 15 bp, Homo sapiens
ccaggtaaggggttc

SEQ ID NO: 43185 - DNA, 15 bp, Homo sapiens
tccaggtaaggggtt

SEQ ID NO: 43186 - DNA, 15 bp, Homo sapiens
ttccaggtaaggggt

SEQ ID NO: 43187 - DNA, 15 bp, Homo sapiens
attccaggtaagggg

SEQ ID NO: 43188 - DNA, 15 bp, Homo sapiens
gattccaggtaaggg

SEQ ID NO: 43189 - DNA, 15 bp, Homo sapiens
agattccaggtaagg

SEQ ID NO: 43190 - DNA, 15 bp, Homo sapiens
cagattccaggtaag

SEQ ID NO: 43191 - DNA, 15 bp, Homo sapiens
ccagattccaggtaa

SEQ ID NO: 43192 - DNA, 15 bp, Homo sapiens
tccagattccaggta

SEQ ID NO: 43193 - DNA, 15 bp, Homo sapiens
ttccagattccaggt

SEQ ID NO: 43194 - DNA, 15 bp, Homo sapiens
attccagattccagg

SEQ ID NO: 43195 - DNA, 15 bp, Homo sapiens
gattccagattccag

SEQ ID NO: 43196 - DNA, 15 bp, Homo sapiens
tgattccagattcca

SEQ ID NO: 43197 - DNA, 15 bp, Homo sapiens
ctgattccagattcc

SEQ ID NO: 43198 - DNA, 15 bp, Homo sapiens
gctgattccagattc

SEQ ID NO: 43199 - DNA, 15 bp, Homo sapiens
ggctgattccagatt

SEQ ID NO: 43200 - DNA, 15 bp, Homo sapiens
aggctgattccagat

SEQ ID NO: 43201 - DNA, 15 bp, Homo sapiens
gaggctgattccaga

SEQ ID NO: 43202 - DNA, 15 bp, Homo sapiens
agaggctgattccag

SEQ ID NO: 43203 - DNA, 15 bp, Homo sapiens
aagaggctgattcca

SEQ ID NO: 43204 - DNA, 15 bp, Homo sapiens
gaagaggctgattcc

SEQ ID NO: 43205 - DNA, 15 bp, Homo sapiens
agaagaggctgattc

SEQ ID NO: 43206 - DNA, 15 bp, Homo sapiens
gagaagaggctgatt

SEQ ID NO: 43207 - DNA, 15 bp, Homo sapiens
agagaagaggctgat

SEQ ID NO: 43208 - DNA, 15 bp, Homo sapiens
cagagaagaggctga

SEQ ID NO: 43209 - DNA, 15 bp, Homo sapiens
tcagagaagaggctg

SEQ ID NO: 43210 - DNA, 15 bp, Homo sapiens
atcagagaagaggct

SEQ ID NO: 43211 - DNA, 15 bp, Homo sapiens
catcagagaagaggc

SEQ ID NO: 43212 - DNA, 15 bp, Homo sapiens
tcatcagagaagagg

SEQ ID NO: 43213 - DNA, 15 bp, Homo sapiens
gtcatcagagaagag

SEQ ID NO: 43214 - DNA, 15 bp, Homo sapiens
ggtcatcagagaaga

SEQ ID NO: 43215 - DNA, 15 bp, Homo sapiens
gggtcatcagagaag

SEQ ID NO: 43216 - DNA, 15 bp, Homo sapiens
agggtcatcagagaa

SEQ ID NO: 43217 - DNA, 15 bp, Homo sapiens
cagggtcatcagaga

SEQ ID NO: 43218 - DNA, 15 bp, Homo sapiens
tcagggtcatcagag

SEQ ID NO: 43219 - DNA, 15 bp, Homo sapiens
ttcagggtcatcaga

SEQ ID NO: 43220 - DNA, 15 bp, Homo sapiens
attcagggtcatcag

SEQ ID NO: 43221 - DNA, 15 bp, Homo sapiens
gattcagggtcatca

SEQ ID NO: 43222 - DNA, 15 bp, Homo sapiens
agattcagggtcatc

SEQ ID NO: 43223 - DNA, 15 bp, Homo sapiens
cagattcagggtcat

SEQ ID NO: 43224 - DNA, 15 bp, Homo sapiens
tcagattcagggtca

SEQ ID NO: 43225 - DNA, 15 bp, Homo sapiens
atcagattcagggtc

SEQ ID NO: 43226 - DNA, 15 bp, Homo sapiens
gatcagattcagggt

SEQ ID NO: 43227 - DNA, 15 bp, Homo sapiens
ggatcagattcaggg

SEQ ID NO: 43228 - DNA, 15 bp, Homo sapiens
aggatcagattcagg

SEQ ID NO: 43229 - DNA, 15 bp, Homo sapiens
aaggatcagattcag

SEQ ID NO: 43230 - DNA, 15 bp, Homo sapiens
gaaggatcagattca

SEQ ID NO: 43231 - DNA, 15 bp, Homo sapiens
agaaggatcagattc

SEQ ID NO: 43232 - DNA, 15 bp, Homo sapiens
cagaaggatcagatt

SEQ ID NO: 43233 - DNA, 15 bp, Homo sapiens
tcagaaggatcagat

SEQ ID NO: 43234 - DNA, 15 bp, Homo sapiens
ttcagaaggatcaga

SEQ ID NO: 43235 - DNA, 15 bp, Homo sapiens
cttcagaaggatcag

SEQ ID NO: 43236 - DNA, 15 bp, Homo sapiens
tcttcagaaggatca

SEQ ID NO: 43237 - DNA, 15 bp, Homo sapiens
gtcttcagaaggatc

SEQ ID NO: 43238 - DNA, 15 bp, Homo sapiens
tgtcttcagaaggat

SEQ ID NO: 43239 - DNA, 15 bp, Homo sapiens
ctgtcttcagaagga

SEQ ID NO: 43240 - DNA, 15 bp, Homo sapiens
tctgtcttcagaagg

SEQ ID NO: 43241 - DNA, 15 bp, Homo sapiens
ctctgtcttcagaag

SEQ ID NO: 43242 - DNA, 15 bp, Homo sapiens
gctctgtcttcagaa

SEQ ID NO: 43243 - DNA, 15 bp, Homo sapiens
ggctctgtcttcaga

SEQ ID NO: 43244 - DNA, 15 bp, Homo sapiens
gggctctgtcttcag

SEQ ID NO: 43245 - DNA, 15 bp, Homo sapiens
ggggctctgtcttca

SEQ ID NO: 43246 - DNA, 15 bp, Homo sapiens
tggggctctgtcttc

SEQ ID NO: 43247 - DNA, 15 bp, Homo sapiens
ctggggctctgtctt

SEQ ID NO: 43248 - DNA, 15 bp, Homo sapiens
tctggggctctgtct

SEQ ID NO: 43249 - DNA, 15 bp, Homo sapiens
ctctggggctctgtc

SEQ ID NO: 43250 - DNA, 15 bp, Homo sapiens
actctggggctctgt

SEQ ID NO: 43251 - DNA, 15 bp, Homo sapiens
gactctggggctctg

SEQ ID NO: 43252 - DNA, 15 bp, Homo sapiens
tgactctggggctct

SEQ ID NO: 43253 - DNA, 15 bp, Homo sapiens
ctgactctggggctc

SEQ ID NO: 43254 - DNA, 15 bp, Homo sapiens
gctgactctggggct

SEQ ID NO: 43255 - DNA, 15 bp, Homo sapiens
agctgactctggggc

SEQ ID NO: 43256 - DNA, 15 bp, Homo sapiens
gagctgactctgggg

SEQ ID NO: 43257 - DNA, 15 bp, Homo sapiens
cgagctgactctggg

SEQ ID NO: 43258 - DNA, 15 bp, Homo sapiens
acgagctgactctgg

SEQ ID NO: 43259 - DNA, 15 bp, Homo sapiens
cacgagctgactctg

SEQ ID NO: 43260 - DNA, 15 bp, Homo sapiens
acacgagctgactct

SEQ ID NO: 43261 - DNA, 15 bp, Homo sapiens
aacacgagctgactc

SEQ ID NO: 43262 - DNA, 15 bp, Homo sapiens
caacacgagctgact

SEQ ID NO: 43263 - DNA, 15 bp, Homo sapiens
ccaacacgagctgac

SEQ ID NO: 43264 - DNA, 15 bp, Homo sapiens
gccaacacgagctga

SEQ ID NO: 43265 - DNA, 15 bp, Homo sapiens
tgccaacacgagctg

SEQ ID NO: 43266 - DNA, 15 bp, Homo sapiens
ttgccaacacgagct

SEQ ID NO: 43267 - DNA, 15 bp, Homo sapiens
gttgccaacacgagc

SEQ ID NO: 43268 - DNA, 15 bp, Homo sapiens
tgttgccaacacgag

SEQ ID NO: 43269 - DNA, 15 bp, Homo sapiens
atgttgccaacacga

SEQ ID NO: 43270 - DNA, 15 bp, Homo sapiens
tatgttgccaacacg

SEQ ID NO: 43271 - DNA, 15 bp, Homo sapiens
gtatgttgccaacac

SEQ ID NO: 43272 - DNA, 15 bp, Homo sapiens
ggtatgttgccaaca

SEQ ID NO: 43273 - DNA, 15 bp, Homo sapiens
tggtatgttgccaac

SEQ ID NO: 43274 - DNA, 15 bp, Homo sapiens
atggtatgttgccaa

SEQ ID NO: 43275 - DNA, 15 bp, Homo sapiens
gatggtatgttgcca

SEQ ID NO: 43276 - DNA, 15 bp, Homo sapiens
agatggtatgttgcc

SEQ ID NO: 43277 - DNA, 15 bp, Homo sapiens
aagatggtatgttgc

SEQ ID NO: 43278 - DNA, 15 bp, Homo sapiens
gaagatggtatgttg

SEQ ID NO: 43279 - DNA, 15 bp, Homo sapiens
tgaagatggtatgtt

SEQ ID NO: 43280 - DNA, 15 bp, Homo sapiens
ttgaagatggtatgt

SEQ ID NO: 43281 - DNA, 15 bp, Homo sapiens
gttgaagatggtatg

SEQ ID NO: 43282 - DNA, 15 bp, Homo sapiens
ggttgaagatggtat

SEQ ID NO: 43283 - DNA, 15 bp, Homo sapiens
aggttgaagatggta

SEQ ID NO: 43284 - DNA, 15 bp, Homo sapiens
gaggttgaagatggt

SEQ ID NO: 43285 - DNA, 15 bp, Homo sapiens
agaggttgaagatgg

SEQ ID NO: 43286 - DNA, 15 bp, Homo sapiens
cagaggttgaagatg

SEQ ID NO: 43287 - DNA, 15 bp, Homo sapiens
gcagaggttgaagat

SEQ ID NO: 43288 - DNA, 15 bp, Homo sapiens
tgcagaggttgaaga

SEQ ID NO: 43289 - DNA, 15 bp, Homo sapiens
atgcagaggttgaag

SEQ ID NO: 43290 - DNA, 15 bp, Homo sapiens
aatgcagaggttgaa

SEQ ID NO: 43291 - DNA, 15 bp, Homo sapiens
caatgcagaggttga

SEQ ID NO: 43292 - DNA, 15 bp, Homo sapiens
tcaatgcagaggttg

SEQ ID NO: 43293 - DNA, 15 bp, Homo sapiens
ttcaatgcagaggtt

SEQ ID NO: 43294 - DNA, 15 bp, Homo sapiens
tttcaatgcagaggt

SEQ ID NO: 43295 - DNA, 15 bp, Homo sapiens
ctttcaatgcagagg

SEQ ID NO: 43296 - DNA, 15 bp, Homo sapiens
actttcaatgcagag

SEQ ID NO: 43297 - DNA, 15 bp, Homo sapiens
aactttcaatgcaga

SEQ ID NO: 43298 - DNA, 15 bp, Homo sapiens
gaactttcaatgcag

SEQ ID NO: 43299 - DNA, 15 bp, Homo sapiens
ggaactttcaatgca

SEQ ID NO: 43300 - DNA, 15 bp, Homo sapiens
gggaactttcaatgc

SEQ ID NO: 43301 - DNA, 15 bp, Homo sapiens
ggggaactttcaatg

SEQ ID NO: 43302 - DNA, 15 bp, Homo sapiens
tggggaactttcaat

SEQ ID NO: 43303 - DNA, 15 bp, Homo sapiens
ttggggaactttcaa

SEQ ID NO: 43304 - DNA, 15 bp, Homo sapiens
attggggaactttca

SEQ ID NO: 43305 - DNA, 15 bp, Homo sapiens
aattggggaactttc

SEQ ID NO: 43306 - DNA, 15 bp, Homo sapiens
caattggggaacttt

SEQ ID NO: 43307 - DNA, 15 bp, Homo sapiens
tcaattggggaactt

SEQ ID NO: 43308 - DNA, 15 bp, Homo sapiens
ttcaattggggaact

SEQ ID NO: 43309 - DNA, 15 bp, Homo sapiens
tttcaattggggaac

SEQ ID NO: 43310 - DNA, 15 bp, Homo sapiens
ctttcaattggggaa

SEQ ID NO: 43311 - DNA, 15 bp, Homo sapiens
actttcaattgggga

SEQ ID NO: 43312 - DNA, 15 bp, Homo sapiens
aactttcaattgggg

SEQ ID NO: 43313 - DNA, 15 bp, Homo sapiens
caactttcaattggg

SEQ ID NO: 43314 - DNA, 15 bp, Homo sapiens
gcaactttcaattgg

SEQ ID NO: 43315 - DNA, 15 bp, Homo sapiens
tgcaactttcaattg

SEQ ID NO: 43316 - DNA, 15 bp, Homo sapiens
ctgcaactttcaatt

SEQ ID NO: 43317 - DNA, 15 bp, Homo sapiens
tctgcaactttcaat

SEQ ID NO: 43318 - DNA, 15 bp, Homo sapiens
ttctgcaactttcaa

SEQ ID NO: 43319 - DNA, 15 bp, Homo sapiens
attctgcaactttca

SEQ ID NO: 43320 - DNA, 15 bp, Homo sapiens
gattctgcaactttc

SEQ ID NO: 43321 - DNA, 15 bp, Homo sapiens
agattctgcaacttt

SEQ ID NO: 43322 - DNA, 15 bp, Homo sapiens
cagattctgcaactt

SEQ ID NO: 43323 - DNA, 15 bp, Homo sapiens
gcagattctgcaact

SEQ ID NO: 43324 - DNA, 15 bp, Homo sapiens
ggcagattctgcaac

SEQ ID NO: 43325 - DNA, 15 bp, Homo sapiens
gggcagattctgcaa

SEQ ID NO: 43326 - DNA, 15 bp, Homo sapiens
tgggcagattctgca

SEQ ID NO: 43327 - DNA, 15 bp, Homo sapiens
ctgggcagattctgc

SEQ ID NO: 43328 - DNA, 15 bp, Homo sapiens
tctgggcagattctg

SEQ ID NO: 43329 - DNA, 15 bp, Homo sapiens
ctctgggcagattct

SEQ ID NO: 43330 - DNA, 15 bp, Homo sapiens
actctgggcagattc

SEQ ID NO: 43331 - DNA, 15 bp, Homo sapiens
gactctgggcagatt

SEQ ID NO: 43332 - DNA, 15 bp, Homo sapiens
ggactctgggcagat

SEQ ID NO: 43333 - DNA, 15 bp, Homo sapiens
tggactctgggcaga

SEQ ID NO: 43334 - DNA, 15 bp, Homo sapiens
ctggactctgggcag

SEQ ID NO: 43335 - DNA, 15 bp, Homo sapiens
gctggactctgggca

SEQ ID NO: 43336 - DNA, 15 bp, Homo sapiens
agctggactctgggc

SEQ ID NO: 43337 - DNA, 15 bp, Homo sapiens
cagctggactctggg

SEQ ID NO: 43338 - DNA, 15 bp, Homo sapiens
gcagctggactctgg

SEQ ID NO: 43339 - DNA, 15 bp, Homo sapiens
agcagctggactctg

SEQ ID NO: 43340 - DNA, 15 bp, Homo sapiens
cagcagctggactct

SEQ ID NO: 43341 - DNA, 15 bp, Homo sapiens
gcagcagctggactc

SEQ ID NO: 43342 - DNA, 15 bp, Homo sapiens
agcagcagctggact

SEQ ID NO: 43343 - DNA, 15 bp, Homo sapiens
gagcagcagctggac

SEQ ID NO: 43344 - DNA, 15 bp, Homo sapiens
tgagcagcagctgga

SEQ ID NO: 43345 - DNA, 15 bp, Homo sapiens
atgagcagcagctgg

SEQ ID NO: 43346 - DNA, 15 bp, Homo sapiens
tatgagcagcagctg

SEQ ID NO: 43347 - DNA, 15 bp, Homo sapiens
gtatgagcagcagct

SEQ ID NO: 43348 - DNA, 15 bp, Homo sapiens
agtatgagcagcagc

SEQ ID NO: 43349 - DNA, 15 bp, Homo sapiens
tagtatgagcagcag

SEQ ID NO: 43350 - DNA, 15 bp, Homo sapiens
gtagtatgagcagca

SEQ ID NO: 43351 - DNA, 15 bp, Homo sapiens
agtagtatgagcagc

SEQ ID NO: 43352 - DNA, 15 bp, Homo sapiens
cagtagtatgagcag

SEQ ID NO: 43353 - DNA, 15 bp, Homo sapiens
tcagtagtatgagca

SEQ ID NO: 43354 - DNA, 15 bp, Homo sapiens
atcagtagtatgagc

SEQ ID NO: 43355 - DNA, 15 bp, Homo sapiens
tatcagtagtatgag

SEQ ID NO: 43356 - DNA, 15 bp, Homo sapiens
gtatcagtagtatga

SEQ ID NO: 43357 - DNA, 15 bp, Homo sapiens
agtatcagtagtatg

SEQ ID NO: 43358 - DNA, 15 bp, Homo sapiens
cagtatcagtagtat

SEQ ID NO: 43359 - DNA, 15 bp, Homo sapiens
gcagtatcagtagta

SEQ ID NO: 43360 - DNA, 15 bp, Homo sapiens
agcagtatcagtagt

SEQ ID NO: 43361 - DNA, 15 bp, Homo sapiens
cagcagtatcagtag

SEQ ID NO: 43362 - DNA, 15 bp, Homo sapiens
ccagcagtatcagta

SEQ ID NO: 43363 - DNA, 15 bp, Homo sapiens
cccagcagtatcagt

SEQ ID NO: 43364 - DNA, 15 bp, Homo sapiens
acccagcagtatcag

SEQ ID NO: 43365 - DNA, 15 bp, Homo sapiens
tacccagcagtatca

SEQ ID NO: 43366 - DNA, 15 bp, Homo sapiens
atacccagcagtatc

SEQ ID NO: 43367 - DNA, 15 bp, Homo sapiens
tatacccagcagtat

SEQ ID NO: 43368 - DNA, 15 bp, Homo sapiens
ttatacccagcagta

SEQ ID NO: 43369 - DNA, 15 bp, Homo sapiens
attatacccagcagt

SEQ ID NO: 43370 - DNA, 15 bp, Homo sapiens
cattatacccagcag

SEQ ID NO: 43371 - DNA, 15 bp, Homo sapiens
gcattatacccagca

SEQ ID NO: 43372 - DNA, 15 bp, Homo sapiens
tgcattatacccagc

SEQ ID NO: 43373 - DNA, 15 bp, Homo sapiens
ttgcattatacccag

SEQ ID NO: 43374 - DNA, 15 bp, Homo sapiens
attgcattataccca

SEQ ID NO: 43375 - DNA, 15 bp, Homo sapiens
cattgcattataccc

SEQ ID NO: 43376 - DNA, 15 bp, Homo sapiens
ccattgcattatacc

SEQ ID NO: 43377 - DNA, 15 bp, Homo sapiens
tccattgcattatac

SEQ ID NO: 43378 - DNA, 15 bp, Homo sapiens
ttccattgcattata

SEQ ID NO: 43379 - DNA, 15 bp, Homo sapiens
cttccattgcattat

SEQ ID NO: 43380 - DNA, 15 bp, Homo sapiens
tcttccattgcatta

SEQ ID NO: 43381 - DNA, 15 bp, Homo sapiens
ttcttccattgcatt

SEQ ID NO: 43382 - DNA, 15 bp, Homo sapiens
tttcttccattgcat

SEQ ID NO: 43383 - DNA, 15 bp, Homo sapiens
ctttcttccattgca

SEQ ID NO: 43384 - DNA, 15 bp, Homo sapiens
actttcttccattgc

SEQ ID NO: 43385 - DNA, 15 bp, Homo sapiens
cactttcttccattg

SEQ ID NO: 43386 - DNA, 15 bp, Homo sapiens
acactttcttccatt

SEQ ID NO: 43387 - DNA, 15 bp, Homo sapiens
cacactttcttccat

SEQ ID NO: 43388 - DNA, 15 bp, Homo sapiens
tcacactttcttcca

SEQ ID NO: 43389 - DNA, 15 bp, Homo sapiens
ctcacactttcttcc

SEQ ID NO: 43390 - DNA, 15 bp, Homo sapiens
gctcacactttcttc

SEQ ID NO: 43391 - DNA, 15 bp, Homo sapiens
tgctcacactttctt

SEQ ID NO: 43392 - DNA, 15 bp, Homo sapiens
ctgctcacactttct

SEQ ID NO: 43393 - DNA, 15 bp, Homo sapiens
cctgctcacactttc

SEQ ID NO: 43394 - DNA, 15 bp, Homo sapiens
ccctgctcacacttt

SEQ ID NO: 43395 - DNA, 15 bp, Homo sapiens
tccctgctcacactt

SEQ ID NO: 43396 - DNA, 15 bp, Homo sapiens
ctccctgctcacact

SEQ ID NO: 43397 - DNA, 15 bp, Homo sapiens
tctccctgctcacac

SEQ ID NO: 43398 - DNA, 15 bp, Homo sapiens
ttctccctgctcaca

SEQ ID NO: 43399 - DNA, 15 bp, Homo sapiens
cttctccctgctcac

SEQ ID NO: 43400 - DNA, 15 bp, Homo sapiens
gcttctccctgctca

SEQ ID NO: 43401 - DNA, 15 bp, Homo sapiens
ggcttctccctgctc

SEQ ID NO: 43402 - DNA, 15 bp, Homo sapiens
tggcttctccctgct

SEQ ID NO: 43403 - DNA, 15 bp, Homo sapiens
ctggcttctccctgc

SEQ ID NO: 43404 - DNA, 15 bp, Homo sapiens
tctggcttctccctg

SEQ ID NO: 43405 - DNA, 15 bp, Homo sapiens
ttctggcttctccct

SEQ ID NO: 43406 - DNA, 15 bp, Homo sapiens
attctggcttctccc

SEQ ID NO: 43407 - DNA, 15 bp, Homo sapiens
aattctggcttctcc

SEQ ID NO: 43408 - DNA, 15 bp, Homo sapiens
caattctggcttctc

SEQ ID NO: 43409 - DNA, 15 bp, Homo sapiens
tcaattctggcttct

SEQ ID NO: 43410 - DNA, 15 bp, Homo sapiens
gtcaattctggcttc

SEQ ID NO: 43411 - DNA, 15 bp, Homo sapiens
tgtcaattctggctt

SEQ ID NO: 43412 - DNA, 15 bp, Homo sapiens
ctgtcaattctggct

SEQ ID NO: 43413 - DNA, 15 bp, Homo sapiens
gctgtcaattctggc

SEQ ID NO: 43414 - DNA, 15 bp, Homo sapiens
agctgtcaattctgg

SEQ ID NO: 43415 - DNA, 15 bp, Homo sapiens
aagctgtcaattctg

SEQ ID NO: 43416 - DNA, 15 bp, Homo sapiens
gaagctgtcaattct

SEQ ID NO: 43417 - DNA, 15 bp, Homo sapiens
tgaagctgtcaattc

SEQ ID NO: 43418 - DNA, 15 bp, Homo sapiens
ttgaagctgtcaatt

SEQ ID NO: 43419 - DNA, 15 bp, Homo sapiens
gttgaagctgtcaat

SEQ ID NO: 43420 - DNA, 15 bp, Homo sapiens
tgttgaagctgtcaa

SEQ ID NO: 43421 - DNA, 15 bp, Homo sapiens
ctgttgaagctgtca

SEQ ID NO: 43422 - DNA, 15 bp, Homo sapiens
tctgttgaagctgtc

SEQ ID NO: 43423 - DNA, 15 bp, Homo sapiens
ttctgttgaagctgt

SEQ ID NO: 43424 - DNA, 15 bp, Homo sapiens
tttctgttgaagctg

SEQ ID NO: 43425 - DNA, 15 bp, Homo sapiens
ctttctgttgaagct

SEQ ID NO: 43426 - DNA, 15 bp, Homo sapiens
cctttctgttgaagc

SEQ ID NO: 43427 - DNA, 15 bp, Homo sapiens
ccctttctgttgaag

SEQ ID NO: 43428 - DNA, 15 bp, Homo sapiens
accctttctgttgaa

SEQ ID NO: 43429 - DNA, 15 bp, Homo sapiens
gaccctttctgttga

SEQ ID NO: 43430 - DNA, 15 bp, Homo sapiens
tgaccctttctgttg

SEQ ID NO: 43431 - DNA, 15 bp, Homo sapiens
ttgaccctttctgtt

SEQ ID NO: 43432 - DNA, 15 bp, Homo sapiens
gttgaccctttctgt

SEQ ID NO: 43433 - DNA, 15 bp, Homo sapiens
tgttgaccctttctg

SEQ ID NO: 43434 - DNA, 15 bp, Homo sapiens
ttgttgaccctttct

SEQ ID NO: 43435 - DNA, 15 bp, Homo sapiens
tttgttgaccctttc

SEQ ID NO: 43436 - DNA, 15 bp, Homo sapiens
ttttgttgacccttt

SEQ ID NO: 43437 - DNA, 15 bp, Homo sapiens
cttttgttgaccctt

SEQ ID NO: 43438 - DNA, 15 bp, Homo sapiens
tcttttgttgaccct

SEQ ID NO: 43439 - DNA, 15 bp, Homo sapiens
ttcttttgttgaccc

SEQ ID NO: 43440 - DNA, 15 bp, Homo sapiens
attcttttgttgacc

SEQ ID NO: 43441 - DNA, 15 bp, Homo sapiens
cattcttttgttgac

SEQ ID NO: 43442 - DNA, 15 bp, Homo sapiens
acattcttttgttga

SEQ ID NO: 43443 - DNA, 15 bp, Homo sapiens
gacattcttttgttg

SEQ ID NO: 43444 - DNA, 15 bp, Homo sapiens
ggacattcttttgtt

SEQ ID NO: 43445 - DNA, 15 bp, Homo sapiens
tggacattcttttgt

SEQ ID NO: 43446 - DNA, 15 bp, Homo sapiens
atggacattcttttg

SEQ ID NO: 43447 - DNA, 15 bp, Homo sapiens
catggacattctttt

SEQ ID NO: 43448 - DNA, 15 bp, Homo sapiens
ccatggacattcttt

SEQ ID NO: 43449 - DNA, 15 bp, Homo sapiens
accatggacattctt

SEQ ID NO: 43450 - DNA, 15 bp, Homo sapiens
caccatggacattct

SEQ ID NO: 43451 - DNA, 15 bp, Homo sapiens
ccaccatggacattc

SEQ ID NO: 43452 - DNA, 15 bp, Homo sapiens
accaccatggacatt

SEQ ID NO: 43453 - DNA, 15 bp, Homo sapiens
caccaccatggacat

SEQ ID NO: 43454 - DNA, 15 bp, Homo sapiens
acaccaccatggaca

SEQ ID NO: 43455 - DNA, 15 bp, Homo sapiens
gacaccaccatggac

SEQ ID NO: 43456 - DNA, 15 bp, Homo sapiens
agacaccaccatgga

SEQ ID NO: 43457 - DNA, 15 bp, Homo sapiens
cagacaccaccatgg

SEQ ID NO: 43458 - DNA, 15 bp, Homo sapiens
ccagacaccaccatg

SEQ ID NO: 43459 - DNA, 15 bp, Homo sapiens
gccagacaccaccat

SEQ ID NO: 43460 - DNA, 15 bp, Homo sapiens
ggccagacaccacca

SEQ ID NO: 43461 - DNA, 15 bp, Homo sapiens
aggccagacaccacc

SEQ ID NO: 43462 - DNA, 15 bp, Homo sapiens
caggccagacaccac

SEQ ID NO: 43463 - DNA, 15 bp, Homo sapiens
tcaggccagacacca

SEQ ID NO: 43464 - DNA, 15 bp, Homo sapiens
gtcaggccagacacc

SEQ ID NO: 43465 - DNA, 15 bp, Homo sapiens
ggtcaggccagacac

SEQ ID NO: 43466 - DNA, 15 bp, Homo sapiens
gggtcaggccagaca

SEQ ID NO: 43467 - DNA, 15 bp, Homo sapiens
ggggtcaggccagac

SEQ ID NO: 43468 - DNA, 15 bp, Homo sapiens
tggggtcaggccaga

SEQ ID NO: 43469 - DNA, 15 bp, Homo sapiens
ctggggtcaggccag

SEQ ID NO: 43470 - DNA, 15 bp, Homo sapiens
tctggggtcaggcca

SEQ ID NO: 43471 - DNA, 15 bp, Homo sapiens
ttctggggtcaggcc

SEQ ID NO: 43472 - DNA, 15 bp, Homo sapiens
cttctggggtcaggc

SEQ ID NO: 43473 - DNA, 15 bp, Homo sapiens
tcttctggggtcagg

SEQ ID NO: 43474 - DNA, 15 bp, Homo sapiens
ttcttctggggtcag

SEQ ID NO: 43475 - DNA, 15 bp, Homo sapiens
attcttctggggtca

SEQ ID NO: 43476 - DNA, 15 bp, Homo sapiens
aattcttctggggtc

SEQ ID NO: 43477 - DNA, 15 bp, Homo sapiens
aaattcttctggggt

SEQ ID NO: 43478 - DNA, 15 bp, Homo sapiens
caaattcttctgggg

SEQ ID NO: 43479 - DNA, 15 bp, Homo sapiens
acaaattcttctggg

SEQ ID NO: 43480 - DNA, 15 bp, Homo sapiens
cacaaattcttctgg

SEQ ID NO: 43481 - DNA, 15 bp, Homo sapiens
tcacaaattcttctg

SEQ ID NO: 43482 - DNA, 15 bp, Homo sapiens
ctcacaaattcttct

SEQ ID NO: 43483 - DNA, 15 bp, Homo sapiens
actcacaaattcttc

SEQ ID NO: 43484 - DNA, 15 bp, Homo sapiens
cactcacaaattctt

SEQ ID NO: 43485 - DNA, 15 bp, Homo sapiens
acactcacaaattct

SEQ ID NO: 43486 - DNA, 15 bp, Homo sapiens
tacactcacaaattc

SEQ ID NO: 43487 - DNA, 15 bp, Homo sapiens
atacactcacaaatt

SEQ ID NO: 43488 - DNA, 15 bp, Homo sapiens
gatacactcacaaat

SEQ ID NO: 43489 - DNA, 15 bp, Homo sapiens
ggatacactcacaaa

SEQ ID NO: 43490 - DNA, 15 bp, Homo sapiens
tggatacactcacaa

SEQ ID NO: 43491 - DNA, 15 bp, Homo sapiens
atggatacactcaca

SEQ ID NO: 43492 - DNA, 15 bp, Homo sapiens
tatggatacactcac

SEQ ID NO: 43493 - DNA, 15 bp, Homo sapiens
atatggatacactca

SEQ ID NO: 43494 - DNA, 15 bp, Homo sapiens
catatggatacactc

SEQ ID NO: 43495 - DNA, 15 bp, Homo sapiens
acatatggatacact

SEQ ID NO: 43496 - DNA, 15 bp, Homo sapiens
tacatatggatacac

SEQ ID NO: 43497 - DNA, 15 bp, Homo sapiens
atacatatggataca

SEQ ID NO: 43498 - DNA, 15 bp, Homo sapiens
gatacatatggatac

SEQ ID NO: 43499 - DNA, 15 bp, Homo sapiens
agatacatatggata

SEQ ID NO: 43500 - DNA, 15 bp, Homo sapiens
gagatacatatggat

SEQ ID NO: 43501 - DNA, 15 bp, Homo sapiens
ggagatacatatgga

SEQ ID NO: 43502 - DNA, 15 bp, Homo sapiens
gggagatacatatgg

SEQ ID NO: 43503 - DNA, 15 bp, Homo sapiens
agggagatacatatg

SEQ ID NO: 43504 - DNA, 15 bp, Homo sapiens
tagggagatacatat

SEQ ID NO: 43505 - DNA, 15 bp, Homo sapiens
ttagggagatacata

SEQ ID NO: 43506 - DNA, 15 bp, Homo sapiens
attagggagatacat

SEQ ID NO: 43507 - DNA, 15 bp, Homo sapiens
cattagggagataca

SEQ ID NO: 43508 - DNA, 15 bp, Homo sapiens
tcattagggagatac

SEQ ID NO: 43509 - DNA, 15 bp, Homo sapiens
gtcattagggagata

SEQ ID NO: 43510 - DNA, 15 bp, Homo sapiens
agtcattagggagat

SEQ ID NO: 43511 - DNA, 15 bp, Homo sapiens
tagtcattagggaga

SEQ ID NO: 43512 - DNA, 15 bp, Homo sapiens
ttagtcattagggag

SEQ ID NO: 43513 - DNA, 15 bp, Homo sapiens
cttagtcattaggga

SEQ ID NO: 43514 - DNA, 15 bp, Homo sapiens
tcttagtcattaggg

SEQ ID NO: 43515 - DNA, 15 bp, Homo sapiens
gtcttagtcattagg

SEQ ID NO: 43516 - DNA, 15 bp, Homo sapiens
agtcttagtcattag

SEQ ID NO: 43517 - DNA, 15 bp, Homo sapiens
aagtcttagtcatta

SEQ ID NO: 43518 - DNA, 15 bp, Homo sapiens
taagtcttagtcatt

SEQ ID NO: 43519 - DNA, 15 bp, Homo sapiens
ttaagtcttagtcat

SEQ ID NO: 43520 - DNA, 15 bp, Homo sapiens
gttaagtcttagtca

SEQ ID NO: 43521 - DNA, 15 bp, Homo sapiens
tgttaagtcttagtc

SEQ ID NO: 43522 - DNA, 15 bp, Homo sapiens
ttgttaagtcttagt

SEQ ID NO: 43523 - DNA, 15 bp, Homo sapiens
gttgttaagtcttag

SEQ ID NO: 43524 - DNA, 15 bp, Homo sapiens
tgttgttaagtctta

SEQ ID NO: 43525 - DNA, 15 bp, Homo sapiens
atgttgttaagtctt

SEQ ID NO: 43526 - DNA, 15 bp, Homo sapiens
aatgttgttaagtct

SEQ ID NO: 43527 - DNA, 15 bp, Homo sapiens
gaatgttgttaagtc

SEQ ID NO: 43528 - DNA, 15 bp, Homo sapiens
agaatgttgttaagt

SEQ ID NO: 43529 - DNA, 15 bp, Homo sapiens
cagaatgttgttaag

SEQ ID NO: 43530 - DNA, 15 bp, Homo sapiens
ccagaatgttgttaa

SEQ ID NO: 43531 - DNA, 15 bp, Homo sapiens
tccagaatgttgtta

SEQ ID NO: 43532 - DNA, 15 bp, Homo sapiens
ttccagaatgttgtt

SEQ ID NO: 43533 - DNA, 15 bp, Homo sapiens
tttccagaatgttgt

SEQ ID NO: 43534 - DNA, 15 bp, Homo sapiens
ctttccagaatgttg

SEQ ID NO: 43535 - DNA, 15 bp, Homo sapiens
tctttccagaatgtt

SEQ ID NO: 43536 - DNA, 15 bp, Homo sapiens
ctctttccagaatgt

SEQ ID NO: 43537 - DNA, 15 bp, Homo sapiens
actctttccagaatg

SEQ ID NO: 43538 - DNA, 15 bp, Homo sapiens
aactctttccagaat

SEQ ID NO: 43539 - DNA, 15 bp, Homo sapiens
aaactctttccagaa

SEQ ID NO: 43540 - DNA, 15 bp, Homo sapiens
aaaactctttccaga

SEQ ID NO: 43541 - DNA, 15 bp, Homo sapiens
taaaactctttccag

SEQ ID NO: 43542 - DNA, 15 bp, Homo sapiens
ataaaactctttcca

SEQ ID NO: 43543 - DNA, 15 bp, Homo sapiens
cataaaactctttcc

SEQ ID NO: 43544 - DNA, 15 bp, Homo sapiens
acataaaactctttc

SEQ ID NO: 43545 - DNA, 15 bp, Homo sapiens
tacataaaactcttt

SEQ ID NO: 43546 - DNA, 15 bp, Homo sapiens
ctacataaaactctt

SEQ ID NO: 43547 - DNA, 15 bp, Homo sapiens
cctacataaaactct

SEQ ID NO: 43548 - DNA, 15 bp, Homo sapiens
acctacataaaactc

SEQ ID NO: 43549 - DNA, 15 bp, Homo sapiens
tacctacataaaact

SEQ ID NO: 43550 - DNA, 15 bp, Homo sapiens
atacctacataaaac

SEQ ID NO: 43551 - DNA, 15 bp, Homo sapiens
aatacctacataaaa

SEQ ID NO: 43552 - DNA, 15 bp, Homo sapiens
caatacctacataaa

SEQ ID NO: 43553 - DNA, 15 bp, Homo sapiens
acaatacctacataa

SEQ ID NO: 43554 - DNA, 15 bp, Homo sapiens
gacaatacctacata

SEQ ID NO: 43555 - DNA, 15 bp, Homo sapiens
tgacaatacctacat

SEQ ID NO: 43556 - DNA, 15 bp, Homo sapiens
ttgacaatacctaca

SEQ ID NO: 43557 - DNA, 15 bp, Homo sapiens
attgacaatacctac

SEQ ID NO: 43558 - DNA, 15 bp, Homo sapiens
aattgacaataccta

SEQ ID NO: 43559 - DNA, 15 bp, Homo sapiens
taattgacaatacct

SEQ ID NO: 43560 - DNA, 15 bp, Homo sapiens
ttaattgacaatacc

SEQ ID NO: 43561 - DNA, 15 bp, Homo sapiens
attaattgacaatac

SEQ ID NO: 43562 - DNA, 15 bp, Homo sapiens
tattaattgacaata

SEQ ID NO: 43563 - DNA, 15 bp, Homo sapiens
ttattaattgacaat

SEQ ID NO: 43564 - DNA, 15 bp, Homo sapiens
gttattaattgacaa

SEQ ID NO: 43565 - DNA, 15 bp, Homo sapiens
ggttattaattgaca

SEQ ID NO: 43566 - DNA, 15 bp, Homo sapiens
aggttattaattgac

SEQ ID NO: 43567 - DNA, 15 bp, Homo sapiens
taggttattaattga

SEQ ID NO: 43568 - DNA, 15 bp, Homo sapiens
ctaggttattaattg

SEQ ID NO: 43569 - DNA, 15 bp, Homo sapiens
tctaggttattaatt

SEQ ID NO: 43570 - DNA, 15 bp, Homo sapiens
ctctaggttattaat

SEQ ID NO: 43571 - DNA, 15 bp, Homo sapiens
cctctaggttattaa

SEQ ID NO: 43572 - DNA, 15 bp, Homo sapiens
tcctctaggttatta

SEQ ID NO: 43573 - DNA, 15 bp, Homo sapiens
ttcctctaggttatt

SEQ ID NO: 43574 - DNA, 15 bp, Homo sapiens
cttcctctaggttat

SEQ ID NO: 43575 - DNA, 15 bp, Homo sapiens
tcttcctctaggtta

SEQ ID NO: 43576 - DNA, 15 bp, Homo sapiens
ttcttcctctaggtt

SEQ ID NO: 43577 - DNA, 15 bp, Homo sapiens
tttcttcctctaggt

SEQ ID NO: 43578 - DNA, 15 bp, Homo sapiens
atttcttcctctagg

SEQ ID NO: 43579 - DNA, 15 bp, Homo sapiens
gatttcttcctctag

SEQ ID NO: 43580 - DNA, 15 bp, Homo sapiens
agatttcttcctcta

SEQ ID NO: 43581 - DNA, 15 bp, Homo sapiens
tagatttcttcctct

SEQ ID NO: 43582 - DNA, 15 bp, Homo sapiens
ctagatttcttcctc

SEQ ID NO: 43583 - DNA, 15 bp, Homo sapiens
tctagatttcttcct

SEQ ID NO: 43584 - DNA, 15 bp, Homo sapiens
ttctagatttcttcc

SEQ ID NO: 43585 - DNA, 15 bp, Homo sapiens
tttctagatttcttc

SEQ ID NO: 43586 - DNA, 15 bp, Homo sapiens
ttttctagatttctt

SEQ ID NO: 43587 - DNA, 15 bp, Homo sapiens
gttttctagatttct

SEQ ID NO: 43588 - DNA, 15 bp, Homo sapiens
tgttttctagatttc

SEQ ID NO: 43589 - DNA, 15 bp, Homo sapiens
ttgttttctagattt

SEQ ID NO: 43590 - DNA, 15 bp, Homo sapiens
attgttttctagatt

SEQ ID NO: 43591 - DNA, 15 bp, Homo sapiens
gattgttttctagat

SEQ ID NO: 43592 - DNA, 15 bp, Homo sapiens
tgattgttttctaga

SEQ ID NO: 43593 - DNA, 15 bp, Homo sapiens
gtgattgttttctag

SEQ ID NO: 43594 - DNA, 15 bp, Homo sapiens
tgtgattgttttcta

SEQ ID NO: 43595 - DNA, 15 bp, Homo sapiens
ctgtgattgttttct

SEQ ID NO: 43596 - DNA, 15 bp, Homo sapiens
actgtgattgttttc

SEQ ID NO: 43597 - DNA, 15 bp, Homo sapiens
aactgtgattgtttt

SEQ ID NO: 43598 - DNA, 15 bp, Homo sapiens
gaactgtgattgttt

SEQ ID NO: 43599 - DNA, 15 bp, Homo sapiens
agaactgtgattgtt

SEQ ID NO: 43600 - DNA, 15 bp, Homo sapiens
cagaactgtgattgt

SEQ ID NO: 43601 - DNA, 15 bp, Homo sapiens
acagaactgtgattg

SEQ ID NO: 43602 - DNA, 15 bp, Homo sapiens
cacagaactgtgatt

SEQ ID NO: 43603 - DNA, 15 bp, Homo sapiens
acacagaactgtgat

SEQ ID NO: 43604 - DNA, 15 bp, Homo sapiens
tacacagaactgtga

SEQ ID NO: 43605 - DNA, 15 bp, Homo sapiens
ttacacagaactgtg

SEQ ID NO: 43606 - DNA, 15 bp, Homo sapiens
attacacagaactgt

SEQ ID NO: 43607 - DNA, 15 bp, Homo sapiens
aattacacagaactg

SEQ ID NO: 43608 - DNA, 15 bp, Homo sapiens
aaattacacagaact

SEQ ID NO: 43609 - DNA, 15 bp, Homo sapiens
taaattacacagaac

SEQ ID NO: 43610 - DNA, 15 bp, Homo sapiens
ttaaattacacagaa

SEQ ID NO: 43611 - DNA, 15 bp, Homo sapiens
attaaattacacaga

SEQ ID NO: 43612 - DNA, 15 bp, Homo sapiens
aattaaattacacag

SEQ ID NO: 43613 - DNA, 15 bp, Homo sapiens
aaattaaattacaca

SEQ ID NO: 43614 - DNA, 15 bp, Homo sapiens
gaaattaaattacac

SEQ ID NO: 43615 - DNA, 15 bp, Homo sapiens
cgaaattaaattaca

SEQ ID NO: 43616 - DNA, 15 bp, Homo sapiens
tcgaaattaaattac

SEQ ID NO: 43617 - DNA, 15 bp, Homo sapiens
atcgaaattaaatta

SEQ ID NO: 43618 - DNA, 15 bp, Homo sapiens
aatcgaaattaaatt

SEQ ID NO: 43619 - DNA, 15 bp, Homo sapiens
taatcgaaattaaat

SEQ ID NO: 43620 - DNA, 15 bp, Homo sapiens
gtaatcgaaattaaa

SEQ ID NO: 43621 - DNA, 15 bp, Homo sapiens
agtaatcgaaattaa

SEQ ID NO: 43622 - DNA, 15 bp, Homo sapiens
tagtaatcgaaatta

SEQ ID NO: 43623 - DNA, 15 bp, Homo sapiens
ttagtaatcgaaatt

SEQ ID NO: 43624 - DNA, 15 bp, Homo sapiens
attagtaatcgaaat

SEQ ID NO: 43625 - DNA, 15 bp, Homo sapiens
aattagtaatcgaaa

SEQ ID NO: 43626 - DNA, 15 bp, Homo sapiens
aaattagtaatcgaa

SEQ ID NO: 43627 - DNA, 15 bp, Homo sapiens
gaaattagtaatcga

SEQ ID NO: 43628 - DNA, 15 bp, Homo sapiens
agaaattagtaatcg

SEQ ID NO: 43629 - DNA, 15 bp, Homo sapiens
cagaaattagtaatc

SEQ ID NO: 43630 - DNA, 15 bp, Homo sapiens
tcagaaattagtaat

SEQ ID NO: 43631 - DNA, 15 bp, Homo sapiens
ttcagaaattagtaa

SEQ ID NO: 43632 - DNA, 15 bp, Homo sapiens
tttcagaaattagta

SEQ ID NO: 43633 - DNA, 15 bp, Homo sapiens
ttttcagaaattagt

SEQ ID NO: 43634 - DNA, 15 bp, Homo sapiens
attttcagaaattag

SEQ ID NO: 43635 - DNA, 15 bp, Homo sapiens
aattttcagaaatta

SEQ ID NO: 43636 - DNA, 15 bp, Homo sapiens
aaattttcagaaatt

SEQ ID NO: 43637 - DNA, 15 bp, Homo sapiens
taaattttcagaaat

SEQ ID NO: 43638 - DNA, 15 bp, Homo sapiens
ctaaattttcagaaa

SEQ ID NO: 43639 - DNA, 15 bp, Homo sapiens
tctaaattttcagaa

SEQ ID NO: 43640 - DNA, 15 bp, Homo sapiens
atctaaattttcaga

SEQ ID NO: 43641 - DNA, 15 bp, Homo sapiens
gatctaaattttcag

SEQ ID NO: 43642 - DNA, 15 bp, Homo sapiens
agatctaaattttca

SEQ ID NO: 43643 - DNA, 15 bp, Homo sapiens
tagatctaaattttc

SEQ ID NO: 43644 - DNA, 15 bp, Homo sapiens
ctagatctaaatttt

SEQ ID NO: 43645 - DNA, 15 bp, Homo sapiens
tctagatctaaattt

SEQ ID NO: 43646 - DNA, 15 bp, Homo sapiens
atctagatctaaatt

SEQ ID NO: 43647 - DNA, 15 bp, Homo sapiens
tatctagatctaaat

SEQ ID NO: 43648 - DNA, 15 bp, Homo sapiens
ttatctagatctaaa

SEQ ID NO: 43649 - DNA, 15 bp, Homo sapiens
tttatctagatctaa

SEQ ID NO: 43650 - DNA, 15 bp, Homo sapiens
ctttatctagatcta

SEQ ID NO: 43651 - DNA, 15 bp, Homo sapiens
gctttatctagatct

SEQ ID NO: 43652 - DNA, 15 bp, Homo sapiens
agctttatctagatc

SEQ ID NO: 43653 - DNA, 15 bp, Homo sapiens
tagctttatctagat

SEQ ID NO: 43654 - DNA, 15 bp, Homo sapiens
atagctttatctaga

SEQ ID NO: 43655 - DNA, 15 bp, Homo sapiens
tatagctttatctag

SEQ ID NO: 43656 - DNA, 15 bp, Homo sapiens
ctatagctttatcta

SEQ ID NO: 43657 - DNA, 15 bp, Homo sapiens
actatagctttatct

SEQ ID NO: 43658 - DNA, 15 bp, Homo sapiens
cactatagctttatc

SEQ ID NO: 43659 - DNA, 15 bp, Homo sapiens
acactatagctttat

SEQ ID NO: 43660 - DNA, 15 bp, Homo sapiens
cacactatagcttta

SEQ ID NO: 43661 - DNA, 15 bp, Homo sapiens
ccacactatagcttt

SEQ ID NO: 43662 - DNA, 15 bp, Homo sapiens
tccacactatagctt

SEQ ID NO: 43663 - DNA, 15 bp, Homo sapiens
atccacactatagct

SEQ ID NO: 43664 - DNA, 15 bp, Homo sapiens
aatccacactatagc

SEQ ID NO: 43665 - DNA, 15 bp, Homo sapiens
taatccacactatag

SEQ ID NO: 43666 - DNA, 15 bp, Homo sapiens
ataatccacactata

SEQ ID NO: 43667 - DNA, 15 bp, Homo sapiens
aataatccacactat

SEQ ID NO: 43668 - DNA, 15 bp, Homo sapiens
aaataatccacacta

SEQ ID NO: 43669 - DNA, 15 bp, Homo sapiens
aaaataatccacact

SEQ ID NO: 43670 - DNA, 15 bp, Homo sapiens
taaaataatccacac

SEQ ID NO: 43671 - DNA, 15 bp, Homo sapiens
ataaaataatccaca

SEQ ID NO: 43672 - DNA, 15 bp, Homo sapiens
cataaaataatccac

SEQ ID NO: 43673 - DNA, 15 bp, Homo sapiens
acataaaataatcca

SEQ ID NO: 43674 - DNA, 15 bp, Homo sapiens
tacataaaataatcc

SEQ ID NO: 43675 - DNA, 15 bp, Homo sapiens
atacataaaataatc

SEQ ID NO: 43676 - DNA, 15 bp, Homo sapiens
tatacataaaataat

SEQ ID NO: 43677 - DNA, 15 bp, Homo sapiens
atatacataaaataa

SEQ ID NO: 43678 - DNA, 15 bp, Homo sapiens
aatatacataaaata

SEQ ID NO: 43679 - DNA, 15 bp, Homo sapiens
aaatatacataaaat

SEQ ID NO: 43680 - DNA, 15 bp, Homo sapiens
taaatatacataaaa

SEQ ID NO: 43681 - DNA, 15 bp, Homo sapiens
gtaaatatacataaa

SEQ ID NO: 43682 - DNA, 15 bp, Homo sapiens
agtaaatatacataa

SEQ ID NO: 43683 - DNA, 15 bp, Homo sapiens
aagtaaatatacata

SEQ ID NO: 43684 - DNA, 15 bp, Homo sapiens
caagtaaatatacat

SEQ ID NO: 43685 - DNA, 15 bp, Homo sapiens
tcaagtaaatataca

SEQ ID NO: 43686 - DNA, 15 bp, Homo sapiens
ctcaagtaaatatac

SEQ ID NO: 43687 - DNA, 15 bp, Homo sapiens
tctcaagtaaatata

SEQ ID NO: 43688 - DNA, 15 bp, Homo sapiens
ttctcaagtaaatat

SEQ ID NO: 43689 - DNA, 15 bp, Homo sapiens
tttctcaagtaaata

SEQ ID NO: 43690 - DNA, 15 bp, Homo sapiens
ttttctcaagtaaat

SEQ ID NO: 43691 - DNA, 15 bp, Homo sapiens
attttctcaagtaaa

SEQ ID NO: 43692 - DNA, 15 bp, Homo sapiens
tattttctcaagtaa

SEQ ID NO: 43693 - DNA, 15 bp, Homo sapiens
ttattttctcaagta

SEQ ID NO: 43694 - DNA, 15 bp, Homo sapiens
attattttctcaagt

SEQ ID NO: 43695 - DNA, 15 bp, Homo sapiens
aattattttctcaag

SEQ ID NO: 43696 - DNA, 15 bp, Homo sapiens
taattattttctcaa

SEQ ID NO: 43697 - DNA, 15 bp, Homo sapiens
ataattattttctca

SEQ ID NO: 43698 - DNA, 15 bp, Homo sapiens
aataattattttctc

SEQ ID NO: 43699 - DNA, 15 bp, Homo sapiens
taataattattttct

SEQ ID NO: 43700 - DNA, 15 bp, Homo sapiens
ttaataattattttc

SEQ ID NO: 43701 - DNA, 15 bp, Homo sapiens
tttaataattatttt

SEQ ID NO: 43702 - DNA, 15 bp, Homo sapiens
atttaataattattt

SEQ ID NO: 43703 - DNA, 15 bp, Homo sapiens
tatttaataattatt

SEQ ID NO: 43704 - DNA, 15 bp, Homo sapiens
atatttaataattat

SEQ ID NO: 43705 - DNA, 15 bp, Homo sapiens
aatatttaataatta

SEQ ID NO: 43706 - DNA, 15 bp, Homo sapiens
taatatttaataatt

SEQ ID NO: 43707 - DNA, 15 bp, Homo sapiens
ctaatatttaataat

SEQ ID NO: 43708 - DNA, 15 bp, Homo sapiens
actaatatttaataa

SEQ ID NO: 43709 - DNA, 15 bp, Homo sapiens
cactaatatttaata

SEQ ID NO: 43710 - DNA, 15 bp, Homo sapiens
ccactaatatttaat

SEQ ID NO: 43711 - DNA, 15 bp, Homo sapiens
tccactaatatttaa

SEQ ID NO: 43712 - DNA, 15 bp, Homo sapiens
ttccactaatattta

SEQ ID NO: 43713 - DNA, 15 bp, Homo sapiens
tttccactaatattt

SEQ ID NO: 43714 - DNA, 15 bp, Homo sapiens
ttttccactaatatt

SEQ ID NO: 43715 - DNA, 15 bp, Homo sapiens
cttttccactaatat

SEQ ID NO: 43716 - DNA, 15 bp, Homo sapiens
gcttttccactaata

SEQ ID NO: 43717 - DNA, 15 bp, Homo sapiens
agcttttccactaat

SEQ ID NO: 43718 - DNA, 15 bp, Homo sapiens
tagcttttccactaa

SEQ ID NO: 43719 - DNA, 15 bp, Homo sapiens
atagcttttccacta

SEQ ID NO: 43720 - DNA, 15 bp, Homo sapiens
tatagcttttccact

SEQ ID NO: 43721 - DNA, 15 bp, Homo sapiens
gtatagcttttccac

SEQ ID NO: 43722 - DNA, 15 bp, Homo sapiens
agtatagcttttcca

SEQ ID NO: 43723 - DNA, 15 bp, Homo sapiens
aagtatagcttttcc

SEQ ID NO: 43724 - DNA, 15 bp, Homo sapiens
aaagtatagcttttc

SEQ ID NO: 43725 - DNA, 15 bp, Homo sapiens
caaagtatagctttt

SEQ ID NO: 43726 - DNA, 15 bp, Homo sapiens
ccaaagtatagcttt

SEQ ID NO: 43727 - DNA, 15 bp, Homo sapiens
cccaaagtatagctt

SEQ ID NO: 43728 - DNA, 15 bp, Homo sapiens
acccaaagtatagct

SEQ ID NO: 43729 - DNA, 15 bp, Homo sapiens
tacccaaagtatagc

SEQ ID NO: 43730 - DNA, 15 bp, Homo sapiens
atacccaaagtatag

SEQ ID NO: 43731 - DNA, 15 bp, Homo sapiens
catacccaaagtata

SEQ ID NO: 43732 - DNA, 15 bp, Homo sapiens
tcatacccaaagtat

SEQ ID NO: 43733 - DNA, 15 bp, Homo sapiens
atcatacccaaagta

SEQ ID NO: 43734 - DNA, 15 bp, Homo sapiens
tatcatacccaaagt

SEQ ID NO: 43735 - DNA, 15 bp, Homo sapiens
atatcatacccaaag

SEQ ID NO: 43736 - DNA, 15 bp, Homo sapiens
tatatcatacccaaa

SEQ ID NO: 43737 - DNA, 15 bp, Homo sapiens
ctatatcatacccaa

SEQ ID NO: 43738 - DNA, 15 bp, Homo sapiens
cctatatcataccca

SEQ ID NO: 43739 - DNA, 15 bp, Homo sapiens
tcctatatcataccc

SEQ ID NO: 43740 - DNA, 15 bp, Homo sapiens
gtcctatatcatacc

SEQ ID NO: 43741 - DNA, 15 bp, Homo sapiens
agtcctatatcatac

SEQ ID NO: 43742 - DNA, 15 bp, Homo sapiens
aagtcctatatcata

SEQ ID NO: 43743 - DNA, 15 bp, Homo sapiens
aaagtcctatatcat

SEQ ID NO: 43744 - DNA, 15 bp, Homo sapiens
gaaagtcctatatca

SEQ ID NO: 43745 - DNA, 15 bp, Homo sapiens
cgaaagtcctatatc

SEQ ID NO: 43746 - DNA, 15 bp, Homo sapiens
tcgaaagtcctatat

SEQ ID NO: 43747 - DNA, 15 bp, Homo sapiens
ttcgaaagtcctata

SEQ ID NO: 43748 - DNA, 15 bp, Homo sapiens
attcgaaagtcctat

SEQ ID NO: 43749 - DNA, 15 bp, Homo sapiens
aattcgaaagtccta

SEQ ID NO: 43750 - DNA, 15 bp, Homo sapiens
caattcgaaagtcct

SEQ ID NO: 43751 - DNA, 15 bp, Homo sapiens
ccaattcgaaagtcc

SEQ ID NO: 43752 - DNA, 15 bp, Homo sapiens
tccaattcgaaagtc

SEQ ID NO: 43753 - DNA, 15 bp, Homo sapiens
ttccaattcgaaagt

SEQ ID NO: 43754 - DNA, 15 bp, Homo sapiens
attccaattcgaaag

SEQ ID NO: 43755 - DNA, 15 bp, Homo sapiens
aattccaattcgaaa

SEQ ID NO: 43756 - DNA, 15 bp, Homo sapiens
aaattccaattcgaa

SEQ ID NO: 43757 - DNA, 15 bp, Homo sapiens
aaaattccaattcga

SEQ ID NO: 43758 - DNA, 15 bp, Homo sapiens
gaaaattccaattcg

SEQ ID NO: 43759 - DNA, 15 bp, Homo sapiens
ggaaaattccaattc

SEQ ID NO: 43760 - DNA, 15 bp, Homo sapiens
aggaaaattccaatt

SEQ ID NO: 43761 - DNA, 15 bp, Homo sapiens
aaggaaaattccaat

SEQ ID NO: 43762 - DNA, 15 bp, Homo sapiens
aaaggaaaattccaa

SEQ ID NO: 43763 - DNA, 15 bp, Homo sapiens
gaaaggaaaattcca

SEQ ID NO: 43764 - DNA, 15 bp, Homo sapiens
agaaaggaaaattcc

SEQ ID NO: 43765 - DNA, 15 bp, Homo sapiens
tagaaaggaaaattc

SEQ ID NO: 43766 - DNA, 15 bp, Homo sapiens
atagaaaggaaaatt

SEQ ID NO: 43767 - DNA, 15 bp, Homo sapiens
gatagaaaggaaaat

SEQ ID NO: 43768 - DNA, 15 bp, Homo sapiens
agatagaaaggaaaa

SEQ ID NO: 43769 - DNA, 15 bp, Homo sapiens
cagatagaaaggaaa

SEQ ID NO: 43770 - DNA, 15 bp, Homo sapiens
acagatagaaaggaa

SEQ ID NO: 43771 - DNA, 15 bp, Homo sapiens
tacagatagaaagga

SEQ ID NO: 43772 - DNA, 15 bp, Homo sapiens
ttacagatagaaagg

SEQ ID NO: 43773 - DNA, 15 bp, Homo sapiens
tttacagatagaaag

SEQ ID NO: 43774 - DNA, 15 bp, Homo sapiens
ttttacagatagaaa

SEQ ID NO: 43775 - DNA, 15 bp, Homo sapiens
cttttacagatagaa

SEQ ID NO: 43776 - DNA, 15 bp, Homo sapiens
gcttttacagataga

SEQ ID NO: 43777 - DNA, 15 bp, Homo sapiens
tgcttttacagatag

SEQ ID NO: 43778 - DNA, 15 bp, Homo sapiens
ttgcttttacagata

SEQ ID NO: 43779 - DNA, 15 bp, Homo sapiens
cttgcttttacagat

SEQ ID NO: 43780 - DNA, 15 bp, Homo sapiens
acttgcttttacaga

SEQ ID NO: 43781 - DNA, 15 bp, Homo sapiens
tacttgcttttacag

SEQ ID NO: 43782 - DNA, 15 bp, Homo sapiens
ctacttgcttttaca

SEQ ID NO: 43783 - DNA, 15 bp, Homo sapiens
cctacttgcttttac

SEQ ID NO: 43784 - DNA, 15 bp, Homo sapiens
acctacttgctttta

SEQ ID NO: 43785 - DNA, 15 bp, Homo sapiens
tacctacttgctttt

SEQ ID NO: 43786 - DNA, 15 bp, Homo sapiens
atacctacttgcttt

SEQ ID NO: 43787 - DNA, 15 bp, Homo sapiens
tatacctacttgctt

SEQ ID NO: 43788 - DNA, 15 bp, Homo sapiens
ctatacctacttgct

SEQ ID NO: 43789 - DNA, 15 bp, Homo sapiens
actatacctacttgc

SEQ ID NO: 43790 - DNA, 15 bp, Homo sapiens
aactatacctacttg

SEQ ID NO: 43791 - DNA, 15 bp, Homo sapiens
aaactatacctactt

SEQ ID NO: 43792 - DNA, 15 bp, Homo sapiens
aaaactatacctact

SEQ ID NO: 43793 - DNA, 15 bp, Homo sapiens
taaaactatacctac

SEQ ID NO: 43794 - DNA, 15 bp, Homo sapiens
ataaaactataccta

SEQ ID NO: 43795 - DNA, 15 bp, Homo sapiens
aataaaactatacct

SEQ ID NO: 43796 - DNA, 15 bp, Homo sapiens
gaataaaactatacc

SEQ ID NO: 43797 - DNA, 15 bp, Homo sapiens
ggaataaaactatac

SEQ ID NO: 43798 - DNA, 15 bp, Homo sapiens
gggaataaaactata

SEQ ID NO: 43799 - DNA, 15 bp, Homo sapiens
ggggaataaaactat

SEQ ID NO: 43800 - DNA, 15 bp, Homo sapiens
tggggaataaaacta

SEQ ID NO: 43801 - DNA, 15 bp, Homo sapiens
ctggggaataaaact

SEQ ID NO: 43802 - DNA, 15 bp, Homo sapiens
tctggggaataaaac

SEQ ID NO: 43803 - DNA, 15 bp, Homo sapiens
ttctggggaataaaa

SEQ ID NO: 43804 - DNA, 15 bp, Homo sapiens
cttctggggaataaa

SEQ ID NO: 43805 - DNA, 15 bp, Homo sapiens
ccttctggggaataa

SEQ ID NO: 43806 - DNA, 15 bp, Homo sapiens
gccttctggggaata

SEQ ID NO: 43807 - DNA, 15 bp, Homo sapiens
tgccttctggggaat

SEQ ID NO: 43808 - DNA, 15 bp, Homo sapiens
atgccttctggggaa

SEQ ID NO: 43809 - DNA, 15 bp, Homo sapiens
gatgccttctgggga

SEQ ID NO: 43810 - DNA, 15 bp, Homo sapiens
agatgccttctgggg

SEQ ID NO: 43811 - DNA, 15 bp, Homo sapiens
aagatgccttctggg

SEQ ID NO: 43812 - DNA, 15 bp, Homo sapiens
aaagatgccttctgg

SEQ ID NO: 43813 - DNA, 15 bp, Homo sapiens
aaaagatgccttctg

SEQ ID NO: 43814 - DNA, 15 bp, Homo sapiens
aaaaagatgccttct

SEQ ID NO: 43815 - DNA, 15 bp, Homo sapiens
gaaaaagatgccttc

SEQ ID NO: 43816 - DNA, 15 bp, Homo sapiens
agaaaaagatgcctt

SEQ ID NO: 43817 - DNA, 15 bp, Homo sapiens
gagaaaaagatgcct

SEQ ID NO: 43818 - DNA, 15 bp, Homo sapiens
ggagaaaaagatgcc

SEQ ID NO: 43819 - DNA, 15 bp, Homo sapiens
gggagaaaaagatgc

SEQ ID NO: 43820 - DNA, 15 bp, Homo sapiens
ggggagaaaaagatg

SEQ ID NO: 43821 - DNA, 15 bp, Homo sapiens
gggggagaaaaagat

SEQ ID NO: 43822 - DNA, 15 bp, Homo sapiens
agggggagaaaaaga

SEQ ID NO: 43823 - DNA, 15 bp, Homo sapiens
aagggggagaaaaag

SEQ ID NO: 43824 - DNA, 15 bp, Homo sapiens
caagggggagaaaaa

SEQ ID NO: 43825 - DNA, 15 bp, Homo sapiens
acaagggggagaaaa

SEQ ID NO: 43826 - DNA, 15 bp, Homo sapiens
gacaagggggagaaa

SEQ ID NO: 43827 - DNA, 15 bp, Homo sapiens
agacaagggggagaa

SEQ ID NO: 43828 - DNA, 15 bp, Homo sapiens
gagacaagggggaga

SEQ ID NO: 43829 - DNA, 15 bp, Homo sapiens
tgagacaagggggag

SEQ ID NO: 43830 - DNA, 15 bp, Homo sapiens
gtgagacaaggggga

SEQ ID NO: 43831 - DNA, 15 bp, Homo sapiens
tgtgagacaaggggg

SEQ ID NO: 43832 - DNA, 15 bp, Homo sapiens
atgtgagacaagggg

SEQ ID NO: 43833 - DNA, 15 bp, Homo sapiens
catgtgagacaaggg

SEQ ID NO: 43834 - DNA, 15 bp, Homo sapiens
ccatgtgagacaagg

SEQ ID NO: 43835 - DNA, 15 bp, Homo sapiens
cccatgtgagacaag

SEQ ID NO: 43836 - DNA, 15 bp, Homo sapiens
acccatgtgagacaa

SEQ ID NO: 43837 - DNA, 15 bp, Homo sapiens
cacccatgtgagaca

SEQ ID NO: 43838 - DNA, 15 bp, Homo sapiens
tcacccatgtgagac

SEQ ID NO: 43839 - DNA, 15 bp, Homo sapiens
ttcacccatgtgaga

SEQ ID NO: 43840 - DNA, 15 bp, Homo sapiens
attcacccatgtgag

SEQ ID NO: 43841 - DNA, 15 bp, Homo sapiens
aattcacccatgtga

SEQ ID NO: 43842 - DNA, 15 bp, Homo sapiens
aaattcacccatgtg

SEQ ID NO: 43843 - DNA, 15 bp, Homo sapiens
taaattcacccatgt

SEQ ID NO: 43844 - DNA, 15 bp, Homo sapiens
gtaaattcacccatg

SEQ ID NO: 43845 - DNA, 15 bp, Homo sapiens
ggtaaattcacccat

SEQ ID NO: 43846 - DNA, 15 bp, Homo sapiens
tggtaaattcaccca

SEQ ID NO: 43847 - DNA, 15 bp, Homo sapiens
ctggtaaattcaccc

SEQ ID NO: 43848 - DNA, 15 bp, Homo sapiens
gctggtaaattcacc

SEQ ID NO: 43849 - DNA, 15 bp, Homo sapiens
tgctggtaaattcac

SEQ ID NO: 43850 - DNA, 15 bp, Homo sapiens
atgctggtaaattca

SEQ ID NO: 43851 - DNA, 15 bp, Homo sapiens
tatgctggtaaattc

SEQ ID NO: 43852 - DNA, 15 bp, Homo sapiens
atatgctggtaaatt

SEQ ID NO: 43853 - DNA, 15 bp, Homo sapiens
aatatgctggtaaat

SEQ ID NO: 43854 - DNA, 15 bp, Homo sapiens
aaatatgctggtaaa

SEQ ID NO: 43855 - DNA, 15 bp, Homo sapiens
taaatatgctggtaa

SEQ ID NO: 43856 - DNA, 15 bp, Homo sapiens
ttaaatatgctggta

SEQ ID NO: 43857 - DNA, 15 bp, Homo sapiens
gttaaatatgctggt

SEQ ID NO: 43858 - DNA, 15 bp, Homo sapiens
agttaaatatgctgg

SEQ ID NO: 43859 - DNA, 15 bp, Homo sapiens
tagttaaatatgctg

SEQ ID NO: 43860 - DNA, 15 bp, Homo sapiens
ttagttaaatatgct

SEQ ID NO: 43861 - DNA, 15 bp, Homo sapiens
tttagttaaatatgc

SEQ ID NO: 43862 - DNA, 15 bp, Homo sapiens
atttagttaaatatg

SEQ ID NO: 43863 - DNA, 15 bp, Homo sapiens
aatttagttaaatat

SEQ ID NO: 43864 - DNA, 15 bp, Homo sapiens
gaatttagttaaata

SEQ ID NO: 43865 - DNA, 15 bp, Homo sapiens
tgaatttagttaaat

SEQ ID NO: 43866 - DNA, 15 bp, Homo sapiens
ctgaatttagttaaa

SEQ ID NO: 43867 - DNA, 15 bp, Homo sapiens
tctgaatttagttaa

SEQ ID NO: 43868 - DNA, 15 bp, Homo sapiens
gtctgaatttagtta

SEQ ID NO: 43869 - DNA, 15 bp, Homo sapiens
agtctgaatttagtt

SEQ ID NO: 43870 - DNA, 15 bp, Homo sapiens
cagtctgaatttagt

SEQ ID NO: 43871 - DNA, 15 bp, Homo sapiens
ccagtctgaatttag

SEQ ID NO: 43872 - DNA, 15 bp, Homo sapiens
accagtctgaattta

SEQ ID NO: 43873 - DNA, 15 bp, Homo sapiens
aaccagtctgaattt

SEQ ID NO: 43874 - DNA, 15 bp, Homo sapiens
gaaccagtctgaatt

SEQ ID NO: 43875 - DNA, 15 bp, Homo sapiens
ggaaccagtctgaat

SEQ ID NO: 43876 - DNA, 15 bp, Homo sapiens
tggaaccagtctgaa

SEQ ID NO: 43877 - DNA, 15 bp, Homo sapiens
ttggaaccagtctga

SEQ ID NO: 43878 - DNA, 15 bp, Homo sapiens
tttggaaccagtctg

SEQ ID NO: 43879 - DNA, 15 bp, Homo sapiens
atttggaaccagtct

SEQ ID NO: 43880 - DNA, 15 bp, Homo sapiens
catttggaaccagtc

SEQ ID NO: 43881 - DNA, 15 bp, Homo sapiens
acatttggaaccagt

SEQ ID NO: 43882 - DNA, 15 bp, Homo sapiens
tacatttggaaccag

SEQ ID NO: 43883 - DNA, 15 bp, Homo sapiens
gtacatttggaacca

SEQ ID NO: 43884 - DNA, 15 bp, Homo sapiens
agtacatttggaacc

SEQ ID NO: 43885 - DNA, 15 bp, Homo sapiens
cagtacatttggaac

SEQ ID NO: 43886 - DNA, 15 bp, Homo sapiens
gcagtacatttggaa

SEQ ID NO: 43887 - DNA, 15 bp, Homo sapiens
ggcagtacatttgga

SEQ ID NO: 43888 - DNA, 15 bp, Homo sapiens
tggcagtacatttgg

SEQ ID NO: 43889 - DNA, 15 bp, Homo sapiens
ctggcagtacatttg

SEQ ID NO: 43890 - DNA, 15 bp, Homo sapiens
tctggcagtacattt

SEQ ID NO: 43891 - DNA, 15 bp, Homo sapiens
atctggcagtacatt

SEQ ID NO: 43892 - DNA, 15 bp, Homo sapiens
tatctggcagtacat

SEQ ID NO: 43893 - DNA, 15 bp, Homo sapiens
ctatctggcagtaca

SEQ ID NO: 43894 - DNA, 15 bp, Homo sapiens
actatctggcagtac

SEQ ID NO: 43895 - DNA, 15 bp, Homo sapiens
tactatctggcagta

SEQ ID NO: 43896 - DNA, 15 bp, Homo sapiens
ctactatctggcagt

SEQ ID NO: 43897 - DNA, 15 bp, Homo sapiens
gctactatctggcag

SEQ ID NO: 43898 - DNA, 15 bp, Homo sapiens
tgctactatctggca

SEQ ID NO: 43899 - DNA, 15 bp, Homo sapiens
atgctactatctggc

SEQ ID NO: 43900 - DNA, 15 bp, Homo sapiens
aatgctactatctgg

SEQ ID NO: 43901 - DNA, 15 bp, Homo sapiens
aaatgctactatctg

SEQ ID NO: 43902 - DNA, 15 bp, Homo sapiens
gaaatgctactatct

SEQ ID NO: 43903 - DNA, 15 bp, Homo sapiens
agaaatgctactatc

SEQ ID NO: 43904 - DNA, 15 bp, Homo sapiens
gagaaatgctactat

SEQ ID NO: 43905 - DNA, 15 bp, Homo sapiens
agagaaatgctacta

SEQ ID NO: 43906 - DNA, 15 bp, Homo sapiens
tagagaaatgctact

SEQ ID NO: 43907 - DNA, 15 bp, Homo sapiens
ctagagaaatgctac

SEQ ID NO: 43908 - DNA, 15 bp, Homo sapiens
actagagaaatgcta

SEQ ID NO: 43909 - DNA, 15 bp, Homo sapiens
cactagagaaatgct

SEQ ID NO: 43910 - DNA, 15 bp, Homo sapiens
acactagagaaatgc

SEQ ID NO: 43911 - DNA, 15 bp, Homo sapiens
aacactagagaaatg

SEQ ID NO: 43912 - DNA, 15 bp, Homo sapiens
aaacactagagaaat

SEQ ID NO: 43913 - DNA, 15 bp, Homo sapiens
caaacactagagaaa

SEQ ID NO: 43914 - DNA, 15 bp, Homo sapiens
acaaacactagagaa

SEQ ID NO: 43915 - DNA, 15 bp, Homo sapiens
aacaaacactagaga

SEQ ID NO: 43916 - DNA, 15 bp, Homo sapiens
aaacaaacactagag

SEQ ID NO: 43917 - DNA, 15 bp, Homo sapiens
aaaacaaacactaga

SEQ ID NO: 43918 - DNA, 15 bp, Homo sapiens
gaaaacaaacactag

SEQ ID NO: 43919 - DNA, 15 bp, Homo sapiens
tgaaaacaaacacta

SEQ ID NO: 43920 - DNA, 15 bp, Homo sapiens
atgaaaacaaacact

SEQ ID NO: 43921 - DNA, 15 bp, Homo sapiens
gatgaaaacaaacac

SEQ ID NO: 43922 - DNA, 15 bp, Homo sapiens
ggatgaaaacaaaca

SEQ ID NO: 43923 - DNA, 15 bp, Homo sapiens
aggatgaaaacaaac

SEQ ID NO: 43924 - DNA, 15 bp, Homo sapiens
caggatgaaaacaaa

SEQ ID NO: 43925 - DNA, 15 bp, Homo sapiens
ccaggatgaaaacaa

SEQ ID NO: 43926 - DNA, 15 bp, Homo sapiens
gccaggatgaaaaca

SEQ ID NO: 43927 - DNA, 15 bp, Homo sapiens
agccaggatgaaaac

SEQ ID NO: 43928 - DNA, 15 bp, Homo sapiens
aagccaggatgaaaa

SEQ ID NO: 43929 - DNA, 15 bp, Homo sapiens
caagccaggatgaaa

SEQ ID NO: 43930 - DNA, 15 bp, Homo sapiens
acaagccaggatgaa

SEQ ID NO: 43931 - DNA, 15 bp, Homo sapiens
tacaagccaggatga

SEQ ID NO: 43932 - DNA, 15 bp, Homo sapiens
ttacaagccaggatg

SEQ ID NO: 43933 - DNA, 15 bp, Homo sapiens
cttacaagccaggat

SEQ ID NO: 43934 - DNA, 15 bp, Homo sapiens
tcttacaagccagga

SEQ ID NO: 43935 - DNA, 15 bp, Homo sapiens
ttcttacaagccagg

SEQ ID NO: 43936 - DNA, 15 bp, Homo sapiens
attcttacaagccag

SEQ ID NO: 43937 - DNA, 15 bp, Homo sapiens
cattcttacaagcca

SEQ ID NO: 43938 - DNA, 15 bp, Homo sapiens
gcattcttacaagcc

SEQ ID NO: 43939 - DNA, 15 bp, Homo sapiens
ggcattcttacaagc

SEQ ID NO: 43940 - DNA, 15 bp, Homo sapiens
gggcattcttacaag

SEQ ID NO: 43941 - DNA, 15 bp, Homo sapiens
agggcattcttacaa

SEQ ID NO: 43942 - DNA, 15 bp, Homo sapiens
cagggcattcttaca

SEQ ID NO: 43943 - DNA, 15 bp, Homo sapiens
gcagggcattcttac

SEQ ID NO: 43944 - DNA, 15 bp, Homo sapiens
ggcagggcattctta

SEQ ID NO: 43945 - DNA, 15 bp, Homo sapiens
tggcagggcattctt

SEQ ID NO: 43946 - DNA, 15 bp, Homo sapiens
gtggcagggcattct

SEQ ID NO: 43947 - DNA, 15 bp, Homo sapiens
agtggcagggcattc

SEQ ID NO: 43948 - DNA, 15 bp, Homo sapiens
aagtggcagggcatt

SEQ ID NO: 43949 - DNA, 15 bp, Homo sapiens
gaagtggcagggcat

SEQ ID NO: 43950 - DNA, 15 bp, Homo sapiens
agaagtggcagggca

SEQ ID NO: 43951 - DNA, 15 bp, Homo sapiens
cagaagtggcagggc

SEQ ID NO: 43952 - DNA, 15 bp, Homo sapiens
gcagaagtggcaggg

SEQ ID NO: 43953 - DNA, 15 bp, Homo sapiens
ggcagaagtggcagg

SEQ ID NO: 43954 - DNA, 15 bp, Homo sapiens
gggcagaagtggcag

SEQ ID NO: 43955 - DNA, 15 bp, Homo sapiens
agggcagaagtggca

SEQ ID NO: 43956 - DNA, 15 bp, Homo sapiens
cagggcagaagtggc

SEQ ID NO: 43957 - DNA, 15 bp, Homo sapiens
gcagggcagaagtgg

SEQ ID NO: 43958 - DNA, 15 bp, Homo sapiens
tgcagggcagaagtg

SEQ ID NO: 43959 - DNA, 15 bp, Homo sapiens
ttgcagggcagaagt

SEQ ID NO: 43960 - DNA, 15 bp, Homo sapiens
attgcagggcagaag

SEQ ID NO: 43961 - DNA, 15 bp, Homo sapiens
tattgcagggcagaa

SEQ ID NO: 43962 - DNA, 15 bp, Homo sapiens
atattgcagggcaga

SEQ ID NO: 43963 - DNA, 15 bp, Homo sapiens
gatattgcagggcag

SEQ ID NO: 43964 - DNA, 15 bp, Homo sapiens
ggatattgcagggca

SEQ ID NO: 43965 - DNA, 15 bp, Homo sapiens
gggatattgcagggc

SEQ ID NO: 43966 - DNA, 15 bp, Homo sapiens
agggatattgcaggg

SEQ ID NO: 43967 - DNA, 15 bp, Homo sapiens
aagggatattgcagg

SEQ ID NO: 43968 - DNA, 15 bp, Homo sapiens
caagggatattgcag

SEQ ID NO: 43969 - DNA, 15 bp, Homo sapiens
gcaagggatattgca

SEQ ID NO: 43970 - DNA, 15 bp, Homo sapiens
agcaagggatattgc

SEQ ID NO: 43971 - DNA, 15 bp, Homo sapiens
tagcaagggatattg

SEQ ID NO: 43972 - DNA, 15 bp, Homo sapiens
atagcaagggatatt

SEQ ID NO: 43973 - DNA, 15 bp, Homo sapiens
aatagcaagggatat

SEQ ID NO: 43974 - DNA, 15 bp, Homo sapiens
taatagcaagggata

SEQ ID NO: 43975 - DNA, 15 bp, Homo sapiens
ctaatagcaagggat

SEQ ID NO: 43976 - DNA, 15 bp, Homo sapiens
cctaatagcaaggga

SEQ ID NO: 43977 - DNA, 15 bp, Homo sapiens
tcctaatagcaaggg

SEQ ID NO: 43978 - DNA, 15 bp, Homo sapiens
atcctaatagcaagg

SEQ ID NO: 43979 - DNA, 15 bp, Homo sapiens
aatcctaatagcaag

SEQ ID NO: 43980 - DNA, 15 bp, Homo sapiens
aaatcctaatagcaa

SEQ ID NO: 43981 - DNA, 15 bp, Homo sapiens
aaaatcctaatagca

SEQ ID NO: 43982 - DNA, 15 bp, Homo sapiens
caaaatcctaatagc

SEQ ID NO: 43983 - DNA, 15 bp, Homo sapiens
ccaaaatcctaatag

SEQ ID NO: 43984 - DNA, 15 bp, Homo sapiens
gccaaaatcctaata

SEQ ID NO: 43985 - DNA, 15 bp, Homo sapiens
tgccaaaatcctaat

SEQ ID NO: 43986 - DNA, 15 bp, Homo sapiens
atgccaaaatcctaa

SEQ ID NO: 43987 - DNA, 15 bp, Homo sapiens
gatgccaaaatccta

SEQ ID NO: 43988 - DNA, 15 bp, Homo sapiens
tgatgccaaaatcct

SEQ ID NO: 43989 - DNA, 15 bp, Homo sapiens
gtgatgccaaaatcc

SEQ ID NO: 43990 - DNA, 15 bp, Homo sapiens
ggtgatgccaaaatc

SEQ ID NO: 43991 - DNA, 15 bp, Homo sapiens
aggtgatgccaaaat

SEQ ID NO: 43992 - DNA, 15 bp, Homo sapiens
aaggtgatgccaaaa

SEQ ID NO: 43993 - DNA, 15 bp, Homo sapiens
caaggtgatgccaaa

SEQ ID NO: 43994 - DNA, 15 bp, Homo sapiens
ccaaggtgatgccaa

SEQ ID NO: 43995 - DNA, 15 bp, Homo sapiens
cccaaggtgatgcca

SEQ ID NO: 43996 - DNA, 15 bp, Homo sapiens
acccaaggtgatgcc

SEQ ID NO: 43997 - DNA, 15 bp, Homo sapiens
gacccaaggtgatgc

SEQ ID NO: 43998 - DNA, 15 bp, Homo sapiens
ggacccaaggtgatg

SEQ ID NO: 43999 - DNA, 15 bp, Homo sapiens
aggacccaaggtgat

SEQ ID NO: 44000 - DNA, 15 bp, Homo sapiens
aaggacccaaggtga

SEQ ID NO: 44001 - DNA, 15 bp, Homo sapiens
taaggacccaaggtg

SEQ ID NO: 44002 - DNA, 15 bp, Homo sapiens
ttaaggacccaaggt

SEQ ID NO: 44003 - DNA, 15 bp, Homo sapiens
attaaggacccaagg

SEQ ID NO: 44004 - DNA, 15 bp, Homo sapiens
cattaaggacccaag

SEQ ID NO: 44005 - DNA, 15 bp, Homo sapiens
gcattaaggacccaa

SEQ ID NO: 44006 - DNA, 15 bp, Homo sapiens
ggcattaaggaccca

SEQ ID NO: 44007 - DNA, 15 bp, Homo sapiens
tggcattaaggaccc

SEQ ID NO: 44008 - DNA, 15 bp, Homo sapiens
ctggcattaaggacc

SEQ ID NO: 44009 - DNA, 15 bp, Homo sapiens
tctggcattaaggac

SEQ ID NO: 44010 - DNA, 15 bp, Homo sapiens
ttctggcattaagga

SEQ ID NO: 44011 - DNA, 15 bp, Homo sapiens
tttctggcattaagg

SEQ ID NO: 44012 - DNA, 15 bp, Homo sapiens
atttctggcattaag

SEQ ID NO: 44013 - DNA, 15 bp, Homo sapiens
catttctggcattaa

SEQ ID NO: 44014 - DNA, 15 bp, Homo sapiens
ccatttctggcatta

SEQ ID NO: 44015 - DNA, 15 bp, Homo sapiens
cccatttctggcatt

SEQ ID NO: 44016 - DNA, 15 bp, Homo sapiens
tcccatttctggcat

SEQ ID NO: 44017 - DNA, 15 bp, Homo sapiens
ttcccatttctggca

SEQ ID NO: 44018 - DNA, 15 bp, Homo sapiens
attcccatttctggc

SEQ ID NO: 44019 - DNA, 15 bp, Homo sapiens
aattcccatttctgg

SEQ ID NO: 44020 - DNA, 15 bp, Homo sapiens
caattcccatttctg

SEQ ID NO: 44021 - DNA, 15 bp, Homo sapiens
gcaattcccatttct

SEQ ID NO: 44022 - DNA, 15 bp, Homo sapiens
agcaattcccatttc

SEQ ID NO: 44023 - DNA, 15 bp, Homo sapiens
aagcaattcccattt

SEQ ID NO: 44024 - DNA, 15 bp, Homo sapiens
gaagcaattcccatt

SEQ ID NO: 44025 - DNA, 15 bp, Homo sapiens
tgaagcaattcccat

SEQ ID NO: 44026 - DNA, 15 bp, Homo sapiens
atgaagcaattccca

SEQ ID NO: 44027 - DNA, 15 bp, Homo sapiens
tatgaagcaattccc

SEQ ID NO: 44028 - DNA, 15 bp, Homo sapiens
gtatgaagcaattcc

SEQ ID NO: 44029 - DNA, 15 bp, Homo sapiens
agtatgaagcaattc

SEQ ID NO: 44030 - DNA, 15 bp, Homo sapiens
cagtatgaagcaatt

SEQ ID NO: 44031 - DNA, 15 bp, Homo sapiens
acagtatgaagcaat

SEQ ID NO: 44032 - DNA, 15 bp, Homo sapiens
cacagtatgaagcaa

SEQ ID NO: 44033 - DNA, 15 bp, Homo sapiens
ccacagtatgaagca

SEQ ID NO: 44034 - DNA, 15 bp, Homo sapiens
tccacagtatgaagc

SEQ ID NO: 44035 - DNA, 15 bp, Homo sapiens
ttccacagtatgaag

SEQ ID NO: 44036 - DNA, 15 bp, Homo sapiens
tttccacagtatgaa

SEQ ID NO: 44037 - DNA, 15 bp, Homo sapiens
ttttccacagtatga

SEQ ID NO: 44038 - DNA, 15 bp, Homo sapiens
tttttccacagtatg

SEQ ID NO: 44039 - DNA, 15 bp, Homo sapiens
atttttccacagtat

SEQ ID NO: 44040 - DNA, 15 bp, Homo sapiens
tatttttccacagta

SEQ ID NO: 44041 - DNA, 15 bp, Homo sapiens
gtatttttccacagt

SEQ ID NO: 44042 - DNA, 15 bp, Homo sapiens
ggtatttttccacag

SEQ ID NO: 44043 - DNA, 15 bp, Homo sapiens
gggtatttttccaca

SEQ ID NO: 44044 - DNA, 15 bp, Homo sapiens
tgggtatttttccac

SEQ ID NO: 44045 - DNA, 15 bp, Homo sapiens
atgggtatttttcca

SEQ ID NO: 44046 - DNA, 15 bp, Homo sapiens
aatgggtatttttcc

SEQ ID NO: 44047 - DNA, 15 bp, Homo sapiens
taatgggtatttttc

SEQ ID NO: 44048 - DNA, 15 bp, Homo sapiens
ttaatgggtattttt

SEQ ID NO: 44049 - DNA, 15 bp, Homo sapiens
tttaatgggtatttt

SEQ ID NO: 44050 - DNA, 15 bp, Homo sapiens
ttttaatgggtattt

SEQ ID NO: 44051 - DNA, 15 bp, Homo sapiens
attttaatgggtatt

SEQ ID NO: 44052 - DNA, 15 bp, Homo sapiens
tattttaatgggtat

SEQ ID NO: 44053 - DNA, 15 bp, Homo sapiens
atattttaatgggta

SEQ ID NO: 44054 - DNA, 15 bp, Homo sapiens
aatattttaatgggt

SEQ ID NO: 44055 - DNA, 15 bp, Homo sapiens
taatattttaatggg

SEQ ID NO: 44056 - DNA, 15 bp, Homo sapiens
ttaatattttaatgg

SEQ ID NO: 44057 - DNA, 15 bp, Homo sapiens
cttaatattttaatg

SEQ ID NO: 44058 - DNA, 15 bp, Homo sapiens
tcttaatattttaat

SEQ ID NO: 44059 - DNA, 15 bp, Homo sapiens
gtcttaatattttaa

SEQ ID NO: 44060 - DNA, 15 bp, Homo sapiens
ggtcttaatatttta

SEQ ID NO: 44061 - DNA, 15 bp, Homo sapiens
tggtcttaatatttt

SEQ ID NO: 44062 - DNA, 15 bp, Homo sapiens
ctggtcttaatattt

SEQ ID NO: 44063 - DNA, 15 bp, Homo sapiens
actggtcttaatatt

SEQ ID NO: 44064 - DNA, 15 bp, Homo sapiens
tactggtcttaatat

SEQ ID NO: 44065 - DNA, 15 bp, Homo sapiens
ttactggtcttaata

SEQ ID NO: 44066 - DNA, 15 bp, Homo sapiens
tttactggtcttaat

SEQ ID NO: 44067 - DNA, 15 bp, Homo sapiens
ttttactggtcttaa

SEQ ID NO: 44068 - DNA, 15 bp, Homo sapiens
gttttactggtctta

SEQ ID NO: 44069 - DNA, 15 bp, Homo sapiens
ggttttactggtctt

SEQ ID NO: 44070 - DNA, 15 bp, Homo sapiens
aggttttactggtct

SEQ ID NO: 44071 - DNA, 15 bp, Homo sapiens
gaggttttactggtc

SEQ ID NO: 44072 - DNA, 15 bp, Homo sapiens
cgaggttttactggt

SEQ ID NO: 44073 - DNA, 15 bp, Homo sapiens
acgaggttttactgg

SEQ ID NO: 44074 - DNA, 15 bp, Homo sapiens
aacgaggttttactg

SEQ ID NO: 44075 - DNA, 15 bp, Homo sapiens
aaacgaggttttact

SEQ ID NO: 44076 - DNA, 15 bp, Homo sapiens
gaaacgaggttttac

SEQ ID NO: 44077 - DNA, 15 bp, Homo sapiens
agaaacgaggtttta

SEQ ID NO: 44078 - DNA, 15 bp, Homo sapiens
cagaaacgaggtttt

SEQ ID NO: 44079 - DNA, 15 bp, Homo sapiens
gcagaaacgaggttt

SEQ ID NO: 44080 - DNA, 15 bp, Homo sapiens
agcagaaacgaggtt

SEQ ID NO: 44081 - DNA, 15 bp, Homo sapiens
aagcagaaacgaggt

SEQ ID NO: 44082 - DNA, 15 bp, Homo sapiens
caagcagaaacgagg

SEQ ID NO: 44083 - DNA, 15 bp, Homo sapiens
ccaagcagaaacgag

SEQ ID NO: 44084 - DNA, 15 bp, Homo sapiens
cccaagcagaaacga

SEQ ID NO: 44085 - DNA, 15 bp, Homo sapiens
gcccaagcagaaacg

SEQ ID NO: 44086 - DNA, 15 bp, Homo sapiens
agcccaagcagaaac

SEQ ID NO: 44087 - DNA, 15 bp, Homo sapiens
tagcccaagcagaaa

SEQ ID NO: 44088 - DNA, 15 bp, Homo sapiens
atagcccaagcagaa

SEQ ID NO: 44089 - DNA, 15 bp, Homo sapiens
aatagcccaagcaga

SEQ ID NO: 44090 - DNA, 15 bp, Homo sapiens
aaatagcccaagcag

SEQ ID NO: 44091 - DNA, 15 bp, Homo sapiens
caaatagcccaagca

SEQ ID NO: 44092 - DNA, 15 bp, Homo sapiens
acaaatagcccaagc

SEQ ID NO: 44093 - DNA, 15 bp, Homo sapiens
cacaaatagcccaag

SEQ ID NO: 44094 - DNA, 15 bp, Homo sapiens
ccacaaatagcccaa

SEQ ID NO: 44095 - DNA, 15 bp, Homo sapiens
tccacaaatagccca

SEQ ID NO: 44096 - DNA, 15 bp, Homo sapiens
atccacaaatagccc

SEQ ID NO: 44097 - DNA, 15 bp, Homo sapiens
aatccacaaatagcc

SEQ ID NO: 44098 - DNA, 15 bp, Homo sapiens
aaatccacaaatagc

SEQ ID NO: 44099 - DNA, 15 bp, Homo sapiens
gaaatccacaaatag

SEQ ID NO: 44100 - DNA, 15 bp, Homo sapiens
tgaaatccacaaata

SEQ ID NO: 44101 - DNA, 15 bp, Homo sapiens
ctgaaatccacaaat

SEQ ID NO: 44102 - DNA, 15 bp, Homo sapiens
tctgaaatccacaaa

SEQ ID NO: 44103 - DNA, 15 bp, Homo sapiens
gtctgaaatccacaa

SEQ ID NO: 44104 - DNA, 15 bp, Homo sapiens
tgtctgaaatccaca

SEQ ID NO: 44105 - DNA, 15 bp, Homo sapiens
atgtctgaaatccac

SEQ ID NO: 44106 - DNA, 15 bp, Homo sapiens
gatgtctgaaatcca

SEQ ID NO: 44107 - DNA, 15 bp, Homo sapiens
ggatgtctgaaatcc

SEQ ID NO: 44108 - DNA, 15 bp, Homo sapiens
aggatgtctgaaatc

SEQ ID NO: 44109 - DNA, 15 bp, Homo sapiens
caggatgtctgaaat

SEQ ID NO: 44110 - DNA, 15 bp, Homo sapiens
tcaggatgtctgaaa

SEQ ID NO: 44111 - DNA, 15 bp, Homo sapiens
ctcaggatgtctgaa

SEQ ID NO: 44112 - DNA, 15 bp, Homo sapiens
tctcaggatgtctga

SEQ ID NO: 44113 - DNA, 15 bp, Homo sapiens
ttctcaggatgtctg

SEQ ID NO: 44114 - DNA, 15 bp, Homo sapiens
cttctcaggatgtct

SEQ ID NO: 44115 - DNA, 15 bp, Homo sapiens
acttctcaggatgtc

SEQ ID NO: 44116 - DNA, 15 bp, Homo sapiens
aacttctcaggatgt

SEQ ID NO: 44117 - DNA, 15 bp, Homo sapiens
aaacttctcaggatg

SEQ ID NO: 44118 - DNA, 15 bp, Homo sapiens
taaacttctcaggat

SEQ ID NO: 44119 - DNA, 15 bp, Homo sapiens
gtaaacttctcagga

SEQ ID NO: 44120 - DNA, 15 bp, Homo sapiens
ggtaaacttctcagg

SEQ ID NO: 44121 - DNA, 15 bp, Homo sapiens
tggtaaacttctcag

SEQ ID NO: 44122 - DNA, 15 bp, Homo sapiens
gtggtaaacttctca

SEQ ID NO: 44123 - DNA, 15 bp, Homo sapiens
ggtggtaaacttctc

SEQ ID NO: 44124 - DNA, 15 bp, Homo sapiens
gggtggtaaacttct

SEQ ID NO: 44125 - DNA, 15 bp, Homo sapiens
ggggtggtaaacttc

SEQ ID NO: 44126 - DNA, 15 bp, Homo sapiens
aggggtggtaaactt

SEQ ID NO: 44127 - DNA, 15 bp, Homo sapiens
caggggtggtaaact

SEQ ID NO: 44128 - DNA, 15 bp, Homo sapiens
acaggggtggtaaac

SEQ ID NO: 44129 - DNA, 15 bp, Homo sapiens
tacaggggtggtaaa

SEQ ID NO: 44130 - DNA, 15 bp, Homo sapiens
ttacaggggtggtaa

SEQ ID NO: 44131 - DNA, 15 bp, Homo sapiens
attacaggggtggta

SEQ ID NO: 44132 - DNA, 15 bp, Homo sapiens
aattacaggggtggt

SEQ ID NO: 44133 - DNA, 15 bp, Homo sapiens
taattacaggggtgg

SEQ ID NO: 44134 - DNA, 15 bp, Homo sapiens
ttaattacaggggtg

SEQ ID NO: 44135 - DNA, 15 bp, Homo sapiens
attaattacaggggt

SEQ ID NO: 44136 - DNA, 15 bp, Homo sapiens
aattaattacagggg

SEQ ID NO: 44137 - DNA, 15 bp, Homo sapiens
caattaattacaggg

SEQ ID NO: 44138 - DNA, 15 bp, Homo sapiens
acaattaattacagg

SEQ ID NO: 44139 - DNA, 15 bp, Homo sapiens
gacaattaattacag

SEQ ID NO: 44140 - DNA, 15 bp, Homo sapiens
tgacaattaattaca

SEQ ID NO: 44141 - DNA, 15 bp, Homo sapiens
atgacaattaattac

SEQ ID NO: 44142 - DNA, 15 bp, Homo sapiens
aatgacaattaatta

SEQ ID NO: 44143 - DNA, 15 bp, Homo sapiens
caatgacaattaatt

SEQ ID NO: 44144 - DNA, 15 bp, Homo sapiens
acaatgacaattaat

SEQ ID NO: 44145 - DNA, 15 bp, Homo sapiens
gacaatgacaattaa

SEQ ID NO: 44146 - DNA, 15 bp, Homo sapiens
tgacaatgacaatta

SEQ ID NO: 44147 - DNA, 15 bp, Homo sapiens
atgacaatgacaatt

SEQ ID NO: 44148 - DNA, 15 bp, Homo sapiens
gatgacaatgacaat

SEQ ID NO: 44149 - DNA, 15 bp, Homo sapiens
tgatgacaatgacaa

SEQ ID NO: 44150 - DNA, 15 bp, Homo sapiens
gtgatgacaatgaca

SEQ ID NO: 44151 - DNA, 15 bp, Homo sapiens
agtgatgacaatgac

SEQ ID NO: 44152 - DNA, 15 bp, Homo sapiens
aagtgatgacaatga

SEQ ID NO: 44153 - DNA, 15 bp, Homo sapiens
gaagtgatgacaatg

SEQ ID NO: 44154 - DNA, 15 bp, Homo sapiens
tgaagtgatgacaat

SEQ ID NO: 44155 - DNA, 15 bp, Homo sapiens
atgaagtgatgacaa

SEQ ID NO: 44156 - DNA, 15 bp, Homo sapiens
tatgaagtgatgaca

SEQ ID NO: 44157 - DNA, 15 bp, Homo sapiens
ttatgaagtgatgac

SEQ ID NO: 44158 - DNA, 15 bp, Homo sapiens
attatgaagtgatga

SEQ ID NO: 44159 - DNA, 15 bp, Homo sapiens
tattatgaagtgatg

SEQ ID NO: 44160 - DNA, 15 bp, Homo sapiens
ttattatgaagtgat

SEQ ID NO: 44161 - DNA, 15 bp, Homo sapiens
tttattatgaagtga

SEQ ID NO: 44162 - DNA, 15 bp, Homo sapiens
ttttattatgaagtg

SEQ ID NO: 44163 - DNA, 15 bp, Homo sapiens
tttttattatgaagt

SEQ ID NO: 44164 - DNA, 15 bp, Homo sapiens
atttttattatgaag

SEQ ID NO: 44165 - DNA, 15 bp, Homo sapiens
tatttttattatgaa

SEQ ID NO: 44166 - DNA, 15 bp, Homo sapiens
ttatttttattatga

SEQ ID NO: 44167 - DNA, 15 bp, Homo sapiens
attatttttattatg

SEQ ID NO: 44168 - DNA, 15 bp, Homo sapiens
aattatttttattat

SEQ ID NO: 44169 - DNA, 15 bp, Homo sapiens
caattatttttatta

SEQ ID NO: 44170 - DNA, 15 bp, Homo sapiens
gcaattatttttatt

SEQ ID NO: 44171 - DNA, 15 bp, Homo sapiens
tgcaattatttttat

SEQ ID NO: 44172 - DNA, 15 bp, Homo sapiens
atgcaattattttta

SEQ ID NO: 44173 - DNA, 15 bp, Homo sapiens
catgcaattattttt

SEQ ID NO: 44174 - DNA, 15 bp, Homo sapiens
ccatgcaattatttt

SEQ ID NO: 44175 - DNA, 15 bp, Homo sapiens
gccatgcaattattt

SEQ ID NO: 44176 - DNA, 15 bp, Homo sapiens
ggccatgcaattatt

SEQ ID NO: 44177 - DNA, 15 bp, Homo sapiens
cggccatgcaattat

SEQ ID NO: 44178 - DNA, 15 bp, Homo sapiens
ccggccatgcaatta

SEQ ID NO: 44179 - DNA, 15 bp, Homo sapiens
cccggccatgcaatt

SEQ ID NO: 44180 - DNA, 15 bp, Homo sapiens
gcccggccatgcaat

SEQ ID NO: 44181 - DNA, 15 bp, Homo sapiens
tgcccggccatgcaa

SEQ ID NO: 44182 - DNA, 15 bp, Homo sapiens
atgcccggccatgca

SEQ ID NO: 44183 - DNA, 15 bp, Homo sapiens
catgcccggccatgc

SEQ ID NO: 44184 - DNA, 15 bp, Homo sapiens
ccatgcccggccatg

SEQ ID NO: 44185 - DNA, 15 bp, Homo sapiens
accatgcccggccat

SEQ ID NO: 44186 - DNA, 15 bp, Homo sapiens
caccatgcccggcca

SEQ ID NO: 44187 - DNA, 15 bp, Homo sapiens
ccaccatgcccggcc

SEQ ID NO: 44188 - DNA, 15 bp, Homo sapiens
gccaccatgcccggc

SEQ ID NO: 44189 - DNA, 15 bp, Homo sapiens
agccaccatgcccgg

SEQ ID NO: 44190 - DNA, 15 bp, Homo sapiens
gagccaccatgcccg

SEQ ID NO: 44191 - DNA, 15 bp, Homo sapiens
ttgagccaccatgcc

SEQ ID NO: 44192 - DNA, 15 bp, Homo sapiens
cttgagccaccatgc

SEQ ID NO: 44193 - DNA, 15 bp, Homo sapiens
gcttgagccaccatg

SEQ ID NO: 44194 - DNA, 15 bp, Homo sapiens
ggcttgagccaccat

SEQ ID NO: 44195 - DNA, 15 bp, Homo sapiens
aggcttgagccacca

SEQ ID NO: 44196 - DNA, 15 bp, Homo sapiens
caggcttgagccacc

SEQ ID NO: 44197 - DNA, 15 bp, Homo sapiens
acaggcttgagccac

SEQ ID NO: 44198 - DNA, 15 bp, Homo sapiens
tacaggcttgagcca

SEQ ID NO: 44199 - DNA, 15 bp, Homo sapiens
ttacaggcttgagcc

SEQ ID NO: 44200 - DNA, 15 bp, Homo sapiens
attacaggcttgagc

SEQ ID NO: 44201 - DNA, 15 bp, Homo sapiens
gattacaggcttgag

SEQ ID NO: 44202 - DNA, 15 bp, Homo sapiens
ggattacaggcttga

SEQ ID NO: 44203 - DNA, 15 bp, Homo sapiens
gggattacaggcttg

SEQ ID NO: 44204 - DNA, 15 bp, Homo sapiens
tgggattacaggctt

SEQ ID NO: 44205 - DNA, 15 bp, Homo sapiens
ctgggattacaggct

SEQ ID NO: 44206 - DNA, 15 bp, Homo sapiens
accacctcagcctcc

SEQ ID NO: 44207 - DNA, 15 bp, Homo sapiens
gaccacctcagcctc

SEQ ID NO: 44208 - DNA, 15 bp, Homo sapiens
tgaccacctcagcct

SEQ ID NO: 44209 - DNA, 15 bp, Homo sapiens
ctgaccacctcagcc

SEQ ID NO: 44210 - DNA, 15 bp, Homo sapiens
tctgaccacctcagc

SEQ ID NO: 44211 - DNA, 15 bp, Homo sapiens
atctgaccacctcag

SEQ ID NO: 44212 - DNA, 15 bp, Homo sapiens
gatctgaccacctca

SEQ ID NO: 44213 - DNA, 15 bp, Homo sapiens
tgatctgaccacctc

SEQ ID NO: 44214 - DNA, 15 bp, Homo sapiens
gtgatctgaccacct

SEQ ID NO: 44215 - DNA, 15 bp, Homo sapiens
ggtgatctgaccacc

SEQ ID NO: 44216 - DNA, 15 bp, Homo sapiens
aggtgatctgaccac

SEQ ID NO: 44217 - DNA, 15 bp, Homo sapiens
taggtgatctgacca

SEQ ID NO: 44218 - DNA, 15 bp, Homo sapiens
ttaggtgatctgacc

SEQ ID NO: 44219 - DNA, 15 bp, Homo sapiens
cttaggtgatctgac

SEQ ID NO: 44220 - DNA, 15 bp, Homo sapiens
ccttaggtgatctga

SEQ ID NO: 44221 - DNA, 15 bp, Homo sapiens
accttaggtgatctg

SEQ ID NO: 44222 - DNA, 15 bp, Homo sapiens
gaccttaggtgatct

SEQ ID NO: 44223 - DNA, 15 bp, Homo sapiens
tgaccttaggtgatc

SEQ ID NO: 44224 - DNA, 15 bp, Homo sapiens
ctgaccttaggtgat

SEQ ID NO: 44225 - DNA, 15 bp, Homo sapiens
cctgaccttaggtga

SEQ ID NO: 44226 - DNA, 15 bp, Homo sapiens
tcctgaccttaggtg

SEQ ID NO: 44227 - DNA, 15 bp, Homo sapiens
ctcctgaccttaggt

SEQ ID NO: 44228 - DNA, 15 bp, Homo sapiens
tctcctgaccttagg

SEQ ID NO: 44229 - DNA, 15 bp, Homo sapiens
atctcctgaccttag

SEQ ID NO: 44230 - DNA, 15 bp, Homo sapiens
gatctcctgacctta

SEQ ID NO: 44231 - DNA, 15 bp, Homo sapiens
tgatctcctgacctt

SEQ ID NO: 44232 - DNA, 15 bp, Homo sapiens
ttgatctcctgacct

SEQ ID NO: 44233 - DNA, 15 bp, Homo sapiens
cttgatctcctgacc

SEQ ID NO: 44234 - DNA, 15 bp, Homo sapiens
tcttgatctcctgac

SEQ ID NO: 44235 - DNA, 15 bp, Homo sapiens
gtcttgatctcctga

SEQ ID NO: 44236 - DNA, 15 bp, Homo sapiens
ggtcttgatctcctg

SEQ ID NO: 44237 - DNA, 15 bp, Homo sapiens
tggtcttgatctcct

SEQ ID NO: 44238 - DNA, 15 bp, Homo sapiens
ctggtcttgatctcc

SEQ ID NO: 44239 - DNA, 15 bp, Homo sapiens
gctggtcttgatctc

SEQ ID NO: 44240 - DNA, 15 bp, Homo sapiens
ggctggtcttgatct

SEQ ID NO: 44241 - DNA, 15 bp, Homo sapiens
aggctggtcttgatc

SEQ ID NO: 44242 - DNA, 15 bp, Homo sapiens
caggctggtcttgat

SEQ ID NO: 44243 - DNA, 15 bp, Homo sapiens
tcatgttggtcaggc

SEQ ID NO: 44244 - DNA, 15 bp, Homo sapiens
ttcatgttggtcagg

SEQ ID NO: 44245 - DNA, 15 bp, Homo sapiens
cttcatgttggtcag

SEQ ID NO: 44246 - DNA, 15 bp, Homo sapiens
tcttcatgttggtca

SEQ ID NO: 44247 - DNA, 15 bp, Homo sapiens
ttcttcatgttggtc

SEQ ID NO: 44248 - DNA, 15 bp, Homo sapiens
tttcttcatgttggt

SEQ ID NO: 44249 - DNA, 15 bp, Homo sapiens
gtttcttcatgttgg

SEQ ID NO: 44250 - DNA, 15 bp, Homo sapiens
ggtttcttcatgttg

SEQ ID NO: 44251 - DNA, 15 bp, Homo sapiens
gggtttcttcatgtt

SEQ ID NO: 44252 - DNA, 15 bp, Homo sapiens
ggggtttcttcatgt

SEQ ID NO: 44253 - DNA, 15 bp, Homo sapiens
tggggtttcttcatg

SEQ ID NO: 44254 - DNA, 15 bp, Homo sapiens
atggggtttcttcat

SEQ ID NO: 44255 - DNA, 15 bp, Homo sapiens
gatggggtttcttca

SEQ ID NO: 44256 - DNA, 15 bp, Homo sapiens
agatggggtttcttc

SEQ ID NO: 44257 - DNA, 15 bp, Homo sapiens
aagatggggtttctt

SEQ ID NO: 44258 - DNA, 15 bp, Homo sapiens
aaagatggggtttct

SEQ ID NO: 44259 - DNA, 15 bp, Homo sapiens
taaagatggggtttc

SEQ ID NO: 44260 - DNA, 15 bp, Homo sapiens
gtaaagatggggttt

SEQ ID NO: 44261 - DNA, 15 bp, Homo sapiens
agtaaagatggggtt

SEQ ID NO: 44262 - DNA, 15 bp, Homo sapiens
tagtaaagatggggt

SEQ ID NO: 44263 - DNA, 15 bp, Homo sapiens
ttagtaaagatgggg

SEQ ID NO: 44264 - DNA, 15 bp, Homo sapiens
tttagtaaagatggg

SEQ ID NO: 44265 - DNA, 15 bp, Homo sapiens
ttttagtaaagatgg

SEQ ID NO: 44266 - DNA, 15 bp, Homo sapiens
tttttagtaaagatg

SEQ ID NO: 44267 - DNA, 15 bp, Homo sapiens
atttttagtaaagat

SEQ ID NO: 44268 - DNA, 15 bp, Homo sapiens
gtgtatttttagtaa

SEQ ID NO: 44269 - DNA, 15 bp, Homo sapiens
tgtgtatttttagta

SEQ ID NO: 44270 - DNA, 15 bp, Homo sapiens
ttgtgtatttttagt

SEQ ID NO: 44271 - DNA, 15 bp, Homo sapiens
attgtgtatttttag

SEQ ID NO: 44272 - DNA, 15 bp, Homo sapiens
aattgtgtattttta

SEQ ID NO: 44273 - DNA, 15 bp, Homo sapiens
taattgtgtattttt

SEQ ID NO: 44274 - DNA, 15 bp, Homo sapiens
ctaattgtgtatttt

SEQ ID NO: 44275 - DNA, 15 bp, Homo sapiens
gctaattgtgtattt

SEQ ID NO: 44276 - DNA, 15 bp, Homo sapiens
ggctaattgtgtatt

SEQ ID NO: 44277 - DNA, 15 bp, Homo sapiens
cggctaattgtgtat

SEQ ID NO: 44278 - DNA, 15 bp, Homo sapiens
ccggctaattgtgta

SEQ ID NO: 44279 - DNA, 15 bp, Homo sapiens
cccggctaattgtgt

SEQ ID NO: 44280 - DNA, 15 bp, Homo sapiens
gcccggctaattgtg

SEQ ID NO: 44281 - DNA, 15 bp, Homo sapiens
cgcccggctaattgt

SEQ ID NO: 44282 - DNA, 15 bp, Homo sapiens
acgcccggctaattg

SEQ ID NO: 44283 - DNA, 15 bp, Homo sapiens
atgcgccaccacgcc

SEQ ID NO: 44284 - DNA, 15 bp, Homo sapiens
catgcgccaccacgc

SEQ ID NO: 44285 - DNA, 15 bp, Homo sapiens
gcatgcgccaccacg

SEQ ID NO: 44286 - DNA, 15 bp, Homo sapiens
ggcatgcgccaccac

SEQ ID NO: 44287 - DNA, 15 bp, Homo sapiens
aggcatgcgccacca

SEQ ID NO: 44288 - DNA, 15 bp, Homo sapiens
taggcatgcgccacc

SEQ ID NO: 44289 - DNA, 15 bp, Homo sapiens
ataggcatgcgccac

SEQ ID NO: 44290 - DNA, 15 bp, Homo sapiens
tataggcatgcgcca

SEQ ID NO: 44291 - DNA, 15 bp, Homo sapiens
ttataggcatgcgcc

SEQ ID NO: 44292 - DNA, 15 bp, Homo sapiens
attataggcatgcgc

SEQ ID NO: 44293 - DNA, 15 bp, Homo sapiens
gattataggcatgcg

SEQ ID NO: 44294 - DNA, 15 bp, Homo sapiens
ggattataggcatgc

SEQ ID NO: 44295 - DNA, 15 bp, Homo sapiens
cggctcaccgcaacc

SEQ ID NO: 44296 - DNA, 15 bp, Homo sapiens
tcggctcaccgcaac

SEQ ID NO: 44297 - DNA, 15 bp, Homo sapiens
ctcggctcaccgcaa

SEQ ID NO: 44298 - DNA, 15 bp, Homo sapiens
tctcggctcaccgca

SEQ ID NO: 44299 - DNA, 15 bp, Homo sapiens
atctcggctcaccgc

SEQ ID NO: 44300 - DNA, 15 bp, Homo sapiens
aatctcggctcaccg

SEQ ID NO: 44301 - DNA, 15 bp, Homo sapiens
caatctcggctcacc

SEQ ID NO: 44302 - DNA, 15 bp, Homo sapiens
tgcaatctcggctca

SEQ ID NO: 44303 - DNA, 15 bp, Homo sapiens
gtgcaatctcggctc

SEQ ID NO: 44304 - DNA, 15 bp, Homo sapiens
ggtgcaatctcggct

SEQ ID NO: 44305 - DNA, 15 bp, Homo sapiens
tggtgcaatctcggc

SEQ ID NO: 44306 - DNA, 15 bp, Homo sapiens
atggtgcaatctcgg

SEQ ID NO: 44307 - DNA, 15 bp, Homo sapiens
aatggtgcaatctcg

SEQ ID NO: 44308 - DNA, 15 bp, Homo sapiens
caatggtgcaatctc

SEQ ID NO: 44309 - DNA, 15 bp, Homo sapiens
gagtgcaatggtgca

SEQ ID NO: 44310 - DNA, 15 bp, Homo sapiens
cgctcttgttgccca

SEQ ID NO: 44311 - DNA, 15 bp, Homo sapiens
tcgctcttgttgccc

SEQ ID NO: 44312 - DNA, 15 bp, Homo sapiens
ttcgctcttgttgcc

SEQ ID NO: 44313 - DNA, 15 bp, Homo sapiens
tttcgctcttgttgc

SEQ ID NO: 44314 - DNA, 15 bp, Homo sapiens
gtttcgctcttgttg

SEQ ID NO: 44315 - DNA, 15 bp, Homo sapiens
agtttcgctcttgtt

SEQ ID NO: 44316 - DNA, 15 bp, Homo sapiens
gagtttcgctcttgt

SEQ ID NO: 44317 - DNA, 15 bp, Homo sapiens
agagtttcgctcttg

SEQ ID NO: 44318 - DNA, 15 bp, Homo sapiens
cagagtttcgctctt

SEQ ID NO: 44319 - DNA, 15 bp, Homo sapiens
acagagtttcgctct

SEQ ID NO: 44320 - DNA, 15 bp, Homo sapiens
gacagagtttcgctc

SEQ ID NO: 44321 - DNA, 15 bp, Homo sapiens
agacagagtttcgct

SEQ ID NO: 44322 - DNA, 15 bp, Homo sapiens
gagacagagtttcgc

SEQ ID NO: 44323 - DNA, 15 bp, Homo sapiens
tgagacagagtttcg

SEQ ID NO: 44324 - DNA, 15 bp, Homo sapiens
ttgagacagagtttc

SEQ ID NO: 44325 - DNA, 15 bp, Homo sapiens
attgagacagagttt

SEQ ID NO: 44326 - DNA, 15 bp, Homo sapiens
tattgagacagagtt

SEQ ID NO: 44327 - DNA, 15 bp, Homo sapiens
ttattgagacagagt

SEQ ID NO: 44328 - DNA, 15 bp, Homo sapiens
attattgagacagag

SEQ ID NO: 44329 - DNA, 15 bp, Homo sapiens
tattattgagacaga

SEQ ID NO: 44330 - DNA, 15 bp, Homo sapiens
ttattattgagacag

SEQ ID NO: 44331 - DNA, 15 bp, Homo sapiens
cttattattgagaca

SEQ ID NO: 44332 - DNA, 15 bp, Homo sapiens
tcttattattgagac

SEQ ID NO: 44333 - DNA, 15 bp, Homo sapiens
ttcttattattgaga

SEQ ID NO: 44334 - DNA, 15 bp, Homo sapiens
cttcttattattgag

SEQ ID NO: 44335 - DNA, 15 bp, Homo sapiens
tcttcttattattga

SEQ ID NO: 44336 - DNA, 15 bp, Homo sapiens
ttcttcttattattg

SEQ ID NO: 44337 - DNA, 15 bp, Homo sapiens
cttcttcttattatt

SEQ ID NO: 44338 - DNA, 15 bp, Homo sapiens
tcttcttcttattat

SEQ ID NO: 44339 - DNA, 15 bp, Homo sapiens
ttcttcttcttatta

SEQ ID NO: 44340 - DNA, 15 bp, Homo sapiens
attcttcttcttatt

SEQ ID NO: 44341 - DNA, 15 bp, Homo sapiens
aattcttcttcttat

SEQ ID NO: 44342 - DNA, 15 bp, Homo sapiens
caattcttcttctta

SEQ ID NO: 44343 - DNA, 15 bp, Homo sapiens
gcaattcttcttctt

SEQ ID NO: 44344 - DNA, 15 bp, Homo sapiens
cgcaattcttcttct

SEQ ID NO: 44345 - DNA, 15 bp, Homo sapiens
acgcaattcttcttc

SEQ ID NO: 44346 - DNA, 15 bp, Homo sapiens
cacgcaattcttctt

SEQ ID NO: 44347 - DNA, 15 bp, Homo sapiens
tcacgcaattcttct

SEQ ID NO: 44348 - DNA, 15 bp, Homo sapiens
ttcacgcaattcttc

SEQ ID NO: 44349 - DNA, 15 bp, Homo sapiens
attcacgcaattctt

SEQ ID NO: 44350 - DNA, 15 bp, Homo sapiens
tattcacgcaattct

SEQ ID NO: 44351 - DNA, 15 bp, Homo sapiens
atattcacgcaattc

SEQ ID NO: 44352 - DNA, 15 bp, Homo sapiens
aatattcacgcaatt

SEQ ID NO: 44353 - DNA, 15 bp, Homo sapiens
aaatattcacgcaat

SEQ ID NO: 44354 - DNA, 15 bp, Homo sapiens
gaaatattcacgcaa

SEQ ID NO: 44355 - DNA, 15 bp, Homo sapiens
agaaatattcacgca

SEQ ID NO: 44356 - DNA, 15 bp, Homo sapiens
aagaaatattcacgc

SEQ ID NO: 44357 - DNA, 15 bp, Homo sapiens
aaagaaatattcacg

SEQ ID NO: 44358 - DNA, 15 bp, Homo sapiens
taaagaaatattcac

SEQ ID NO: 44359 - DNA, 15 bp, Homo sapiens
ttaaagaaatattca

SEQ ID NO: 44360 - DNA, 15 bp, Homo sapiens
tttaaagaaatattc

SEQ ID NO: 44361 - DNA, 15 bp, Homo sapiens
ttttaaagaaatatt

SEQ ID NO: 44362 - DNA, 15 bp, Homo sapiens
gttttaaagaaatat

SEQ ID NO: 44363 - DNA, 15 bp, Homo sapiens
agttttaaagaaata

SEQ ID NO: 44364 - DNA, 15 bp, Homo sapiens
tagttttaaagaaat

SEQ ID NO: 44365 - DNA, 15 bp, Homo sapiens
atagttttaaagaaa

SEQ ID NO: 44366 - DNA, 15 bp, Homo sapiens
catagttttaaagaa

SEQ ID NO: 44367 - DNA, 15 bp, Homo sapiens
tcatagttttaaaga

SEQ ID NO: 44368 - DNA, 15 bp, Homo sapiens
atcatagttttaaag

SEQ ID NO: 44369 - DNA, 15 bp, Homo sapiens
catcatagttttaaa

SEQ ID NO: 44370 - DNA, 15 bp, Homo sapiens
tcatcatagttttaa

SEQ ID NO: 44371 - DNA, 15 bp, Homo sapiens
ctcatcatagtttta

SEQ ID NO: 44372 - DNA, 15 bp, Homo sapiens
tctcatcatagtttt

SEQ ID NO: 44373 - DNA, 15 bp, Homo sapiens
atctcatcatagttt

SEQ ID NO: 44374 - DNA, 15 bp, Homo sapiens
tatctcatcatagtt

SEQ ID NO: 44375 - DNA, 15 bp, Homo sapiens
ttatctcatcatagt

SEQ ID NO: 44376 - DNA, 15 bp, Homo sapiens
gttatctcatcatag

SEQ ID NO: 44377 - DNA, 15 bp, Homo sapiens
tgttatctcatcata

SEQ ID NO: 44378 - DNA, 15 bp, Homo sapiens
atgttatctcatcat

SEQ ID NO: 44379 - DNA, 15 bp, Homo sapiens
tatgttatctcatca

SEQ ID NO: 44380 - DNA, 15 bp, Homo sapiens
gtatgttatctcatc

SEQ ID NO: 44381 - DNA, 15 bp, Homo sapiens
ggtatgttatctcat

SEQ ID NO: 44382 - DNA, 15 bp, Homo sapiens
tggtatgttatctca

SEQ ID NO: 44383 - DNA, 15 bp, Homo sapiens
ctggtatgttatctc

SEQ ID NO: 44384 - DNA, 15 bp, Homo sapiens
tctggtatgttatct

SEQ ID NO: 44385 - DNA, 15 bp, Homo sapiens
atctggtatgttatc

SEQ ID NO: 44386 - DNA, 15 bp, Homo sapiens
aatctggtatgttat

SEQ ID NO: 44387 - DNA, 15 bp, Homo sapiens
taatctggtatgtta

SEQ ID NO: 44388 - DNA, 15 bp, Homo sapiens
ataatctggtatgtt

SEQ ID NO: 44389 - DNA, 15 bp, Homo sapiens
gataatctggtatgt

SEQ ID NO: 44390 - DNA, 15 bp, Homo sapiens
tgataatctggtatg

SEQ ID NO: 44391 - DNA, 15 bp, Homo sapiens
ttgataatctggtat

SEQ ID NO: 44392 - DNA, 15 bp, Homo sapiens
tttgataatctggta

SEQ ID NO: 44393 - DNA, 15 bp, Homo sapiens
atttgataatctggt

SEQ ID NO: 44394 - DNA, 15 bp, Homo sapiens
catttgataatctgg

SEQ ID NO: 44395 - DNA, 15 bp, Homo sapiens
ccatttgataatctg

SEQ ID NO: 44396 - DNA, 15 bp, Homo sapiens
tccatttgataatct

SEQ ID NO: 44397 - DNA, 15 bp, Homo sapiens
atccatttgataatc

SEQ ID NO: 44398 - DNA, 15 bp, Homo sapiens
aatccatttgataat

SEQ ID NO: 44399 - DNA, 15 bp, Homo sapiens
gaatccatttgataa

SEQ ID NO: 44400 - DNA, 15 bp, Homo sapiens
tgaatccatttgata

SEQ ID NO: 44401 - DNA, 15 bp, Homo sapiens
ctgaatccatttgat

SEQ ID NO: 44402 - DNA, 15 bp, Homo sapiens
actgaatccatttga

SEQ ID NO: 44403 - DNA, 15 bp, Homo sapiens
tactgaatccatttg

SEQ ID NO: 44404 - DNA, 15 bp, Homo sapiens
ctactgaatccattt

SEQ ID NO: 44405 - DNA, 15 bp, Homo sapiens
actactgaatccatt

SEQ ID NO: 44406 - DNA, 15 bp, Homo sapiens
cactactgaatccat

SEQ ID NO: 44407 - DNA, 15 bp, Homo sapiens
ccactactgaatcca

SEQ ID NO: 44408 - DNA, 15 bp, Homo sapiens
cccactactgaatcc

SEQ ID NO: 44409 - DNA, 15 bp, Homo sapiens
acccactactgaatc

SEQ ID NO: 44410 - DNA, 15 bp, Homo sapiens
cacccactactgaat

SEQ ID NO: 44411 - DNA, 15 bp, Homo sapiens
acacccactactgaa

SEQ ID NO: 44412 - DNA, 15 bp, Homo sapiens
cacacccactactga

SEQ ID NO: 44413 - DNA, 15 bp, Homo sapiens
gcacacccactactg

SEQ ID NO: 44414 - DNA, 15 bp, Homo sapiens
ggcacacccactact

SEQ ID NO: 44415 - DNA, 15 bp, Homo sapiens
tggcacacccactac

SEQ ID NO: 44416 - DNA, 15 bp, Homo sapiens
atggcacacccacta

SEQ ID NO: 44417 - DNA, 15 bp, Homo sapiens
aatggcacacccact

SEQ ID NO: 44418 - DNA, 15 bp, Homo sapiens
aaatggcacacccac

SEQ ID NO: 44419 - DNA, 15 bp, Homo sapiens
taaatggcacaccca

SEQ ID NO: 44420 - DNA, 15 bp, Homo sapiens
ataaatggcacaccc

SEQ ID NO: 44421 - DNA, 15 bp, Homo sapiens
aataaatggcacacc

SEQ ID NO: 44422 - DNA, 15 bp, Homo sapiens
caataaatggcacac

SEQ ID NO: 44423 - DNA, 15 bp, Homo sapiens
gcaataaatggcaca

SEQ ID NO: 44424 - DNA, 15 bp, Homo sapiens
tgcaataaatggcac

SEQ ID NO: 44425 - DNA, 15 bp, Homo sapiens
gtgcaataaatggca

SEQ ID NO: 44426 - DNA, 15 bp, Homo sapiens
tgtgcaataaatggc

SEQ ID NO: 44427 - DNA, 15 bp, Homo sapiens
gtgtgcaataaatgg

SEQ ID NO: 44428 - DNA, 15 bp, Homo sapiens
agtgtgcaataaatg

SEQ ID NO: 44429 - DNA, 15 bp, Homo sapiens
cagtgtgcaataaat

SEQ ID NO: 44430 - DNA, 15 bp, Homo sapiens
tcagtgtgcaataaa

SEQ ID NO: 44431 - DNA, 15 bp, Homo sapiens
ctcagtgtgcaataa

SEQ ID NO: 44432 - DNA, 15 bp, Homo sapiens
tctcagtgtgcaata

SEQ ID NO: 44433 - DNA, 15 bp, Homo sapiens
ctctcagtgtgcaat

SEQ ID NO: 44434 - DNA, 15 bp, Homo sapiens
tctctcagtgtgcaa

SEQ ID NO: 44435 - DNA, 15 bp, Homo sapiens
atctctcagtgtgca

SEQ ID NO: 44436 - DNA, 15 bp, Homo sapiens
catctctcagtgtgc

SEQ ID NO: 44437 - DNA, 15 bp, Homo sapiens
tcatctctcagtgtg

SEQ ID NO: 44438 - DNA, 15 bp, Homo sapiens
gtcatctctcagtgt

SEQ ID NO: 44439 - DNA, 15 bp, Homo sapiens
ggtcatctctcagtg

SEQ ID NO: 44440 - DNA, 15 bp, Homo sapiens
tggtcatctctcagt

SEQ ID NO: 44441 - DNA, 15 bp, Homo sapiens
ttggtcatctctcag

SEQ ID NO: 44442 - DNA, 15 bp, Homo sapiens
cttggtcatctctca

SEQ ID NO: 44443 - DNA, 15 bp, Homo sapiens
acttggtcatctctc

SEQ ID NO: 44444 - DNA, 15 bp, Homo sapiens
gacttggtcatctct

SEQ ID NO: 44445 - DNA, 15 bp, Homo sapiens
tgacttggtcatctc

SEQ ID NO: 44446 - DNA, 15 bp, Homo sapiens
atgacttggtcatct

SEQ ID NO: 44447 - DNA, 15 bp, Homo sapiens
aatgacttggtcatc

SEQ ID NO: 44448 - DNA, 15 bp, Homo sapiens
gaatgacttggtcat

SEQ ID NO: 44449 - DNA, 15 bp, Homo sapiens
agaatgacttggtca

SEQ ID NO: 44450 - DNA, 15 bp, Homo sapiens
cagaatgacttggtc

SEQ ID NO: 44451 - DNA, 15 bp, Homo sapiens
tcagaatgacttggt

SEQ ID NO: 44452 - DNA, 15 bp, Homo sapiens
ttcagaatgacttgg

SEQ ID NO: 44453 - DNA, 15 bp, Homo sapiens
tttcagaatgacttg

SEQ ID NO: 44454 - DNA, 15 bp, Homo sapiens
atttcagaatgactt

SEQ ID NO: 44455 - DNA, 15 bp, Homo sapiens
tatttcagaatgact

SEQ ID NO: 44456 - DNA, 15 bp, Homo sapiens
atatttcagaatgac

SEQ ID NO: 44457 - DNA, 15 bp, Homo sapiens
gatatttcagaatga

SEQ ID NO: 44458 - DNA, 15 bp, Homo sapiens
agatatttcagaatg

SEQ ID NO: 44459 - DNA, 15 bp, Homo sapiens
aagatatttcagaat

SEQ ID NO: 44460 - DNA, 15 bp, Homo sapiens
aaagatatttcagaa

SEQ ID NO: 44461 - DNA, 15 bp, Homo sapiens
taaagatatttcaga

SEQ ID NO: 44462 - DNA, 15 bp, Homo sapiens
ataaagatatttcag

SEQ ID NO: 44463 - DNA, 15 bp, Homo sapiens
aataaagatatttca

SEQ ID NO: 44464 - DNA, 15 bp, Homo sapiens
taataaagatatttc

SEQ ID NO: 44465 - DNA, 15 bp, Homo sapiens
ttaataaagatattt

SEQ ID NO: 44466 - DNA, 15 bp, Homo sapiens
attaataaagatatt

SEQ ID NO: 44467 - DNA, 15 bp, Homo sapiens
tattaataaagatat

SEQ ID NO: 44468 - DNA, 15 bp, Homo sapiens
atattaataaagata

SEQ ID NO: 44469 - DNA, 15 bp, Homo sapiens
tatattaataaagat

SEQ ID NO: 44470 - DNA, 15 bp, Homo sapiens
atatattaataaaga

SEQ ID NO: 44471 - DNA, 15 bp, Homo sapiens
gatatattaataaag

SEQ ID NO: 44472 - DNA, 15 bp, Homo sapiens
ggatatattaataaa

SEQ ID NO: 44473 - DNA, 15 bp, Homo sapiens
aggatatattaataa

SEQ ID NO: 44474 - DNA, 15 bp, Homo sapiens
aaggatatattaata

SEQ ID NO: 44475 - DNA, 15 bp, Homo sapiens
gaaggatatattaat

SEQ ID NO: 44476 - DNA, 15 bp, Homo sapiens
ggaaggatatattaa

SEQ ID NO: 44477 - DNA, 15 bp, Homo sapiens
aggaaggatatatta

SEQ ID NO: 44478 - DNA, 15 bp, Homo sapiens
taggaaggatatatt

SEQ ID NO: 44479 - DNA, 15 bp, Homo sapiens
ctaggaaggatatat

SEQ ID NO: 44480 - DNA, 15 bp, Homo sapiens
cctaggaaggatata

SEQ ID NO: 44481 - DNA, 15 bp, Homo sapiens
tcctaggaaggatat

SEQ ID NO: 44482 - DNA, 15 bp, Homo sapiens
atcctaggaaggata

SEQ ID NO: 44483 - DNA, 15 bp, Homo sapiens
aatcctaggaaggat

SEQ ID NO: 44484 - DNA, 15 bp, Homo sapiens
aaatcctaggaagga

SEQ ID NO: 44485 - DNA, 15 bp, Homo sapiens
aaaatcctaggaagg

SEQ ID NO: 44486 - DNA, 15 bp, Homo sapiens
aaaaatcctaggaag

SEQ ID NO: 44487 - DNA, 15 bp, Homo sapiens
gaaaaatcctaggaa

SEQ ID NO: 44488 - DNA, 15 bp, Homo sapiens
tgaaaaatcctagga

SEQ ID NO: 44489 - DNA, 15 bp, Homo sapiens
atgaaaaatcctagg

SEQ ID NO: 44490 - DNA, 15 bp, Homo sapiens
gatgaaaaatcctag

SEQ ID NO: 44491 - DNA, 15 bp, Homo sapiens
ggatgaaaaatccta

SEQ ID NO: 44492 - DNA, 15 bp, Homo sapiens
aggatgaaaaatcct

SEQ ID NO: 44493 - DNA, 15 bp, Homo sapiens
taggatgaaaaatcc

SEQ ID NO: 44494 - DNA, 15 bp, Homo sapiens
ttaggatgaaaaatc

SEQ ID NO: 44495 - DNA, 15 bp, Homo sapiens
gttaggatgaaaaat

SEQ ID NO: 44496 - DNA, 15 bp, Homo sapiens
agttaggatgaaaaa

SEQ ID NO: 44497 - DNA, 15 bp, Homo sapiens
aagttaggatgaaaa

SEQ ID NO: 44498 - DNA, 15 bp, Homo sapiens
gaagttaggatgaaa

SEQ ID NO: 44499 - DNA, 15 bp, Homo sapiens
agaagttaggatgaa

SEQ ID NO: 44500 - DNA, 15 bp, Homo sapiens
gagaagttaggatga

SEQ ID NO: 44501 - DNA, 15 bp, Homo sapiens
ggagaagttaggatg

SEQ ID NO: 44502 - DNA, 15 bp, Homo sapiens
tggagaagttaggat

SEQ ID NO: 44503 - DNA, 15 bp, Homo sapiens
atggagaagttagga

SEQ ID NO: 44504 - DNA, 15 bp, Homo sapiens
tatggagaagttagg

SEQ ID NO: 44505 - DNA, 15 bp, Homo sapiens
ctatggagaagttag

SEQ ID NO: 44506 - DNA, 15 bp, Homo sapiens
cctatggagaagtta

SEQ ID NO: 44507 - DNA, 15 bp, Homo sapiens
acctatggagaagtt

SEQ ID NO: 44508 - DNA, 15 bp, Homo sapiens
tacctatggagaagt

SEQ ID NO: 44509 - DNA, 15 bp, Homo sapiens
ctacctatggagaag

SEQ ID NO: 44510 - DNA, 15 bp, Homo sapiens
actacctatggagaa

SEQ ID NO: 44511 - DNA, 15 bp, Homo sapiens
aactacctatggaga

SEQ ID NO: 44512 - DNA, 15 bp, Homo sapiens
taactacctatggag

SEQ ID NO: 44513 - DNA, 15 bp, Homo sapiens
gtaactacctatgga

SEQ ID NO: 44514 - DNA, 15 bp, Homo sapiens
agtaactacctatgg

SEQ ID NO: 44515 - DNA, 15 bp, Homo sapiens
aagtaactacctatg

SEQ ID NO: 44516 - DNA, 15 bp, Homo sapiens
taagtaactacctat

SEQ ID NO: 44517 - DNA, 15 bp, Homo sapiens
ctaagtaactaccta

SEQ ID NO: 44518 - DNA, 15 bp, Homo sapiens
gctaagtaactacct

SEQ ID NO: 44519 - DNA, 15 bp, Homo sapiens
tgctaagtaactacc

SEQ ID NO: 44520 - DNA, 15 bp, Homo sapiens
atgctaagtaactac

SEQ ID NO: 44521 - DNA, 15 bp, Homo sapiens
tatgctaagtaacta

SEQ ID NO: 44522 - DNA, 15 bp, Homo sapiens
ttatgctaagtaact

SEQ ID NO: 44523 - DNA, 15 bp, Homo sapiens
gttatgctaagtaac

SEQ ID NO: 44524 - DNA, 15 bp, Homo sapiens
tgttatgctaagtaa

SEQ ID NO: 44525 - DNA, 15 bp, Homo sapiens
atgttatgctaagta

SEQ ID NO: 44526 - DNA, 15 bp, Homo sapiens
gatgttatgctaagt

SEQ ID NO: 44527 - DNA, 15 bp, Homo sapiens
agatgttatgctaag

SEQ ID NO: 44528 - DNA, 15 bp, Homo sapiens
gagatgttatgctaa

SEQ ID NO: 44529 - DNA, 15 bp, Homo sapiens
agagatgttatgcta

SEQ ID NO: 44530 - DNA, 15 bp, Homo sapiens
cagagatgttatgct

SEQ ID NO: 44531 - DNA, 15 bp, Homo sapiens
acagagatgttatgc

SEQ ID NO: 44532 - DNA, 15 bp, Homo sapiens
cacagagatgttatg

SEQ ID NO: 44533 - DNA, 15 bp, Homo sapiens
ccacagagatgttat

SEQ ID NO: 44534 - DNA, 15 bp, Homo sapiens
gccacagagatgtta

SEQ ID NO: 44535 - DNA, 15 bp, Homo sapiens
ggccacagagatgtt

SEQ ID NO: 44536 - DNA, 15 bp, Homo sapiens
tggccacagagatgt

SEQ ID NO: 44537 - DNA, 15 bp, Homo sapiens
ctggccacagagatg

SEQ ID NO: 44538 - DNA, 15 bp, Homo sapiens
tctggccacagagat

SEQ ID NO: 44539 - DNA, 15 bp, Homo sapiens
atctggccacagaga

SEQ ID NO: 44540 - DNA, 15 bp, Homo sapiens
catctggccacagag

SEQ ID NO: 44541 - DNA, 15 bp, Homo sapiens
acatctggccacaga

SEQ ID NO: 44542 - DNA, 15 bp, Homo sapiens
tacatctggccacag

SEQ ID NO: 44543 - DNA, 15 bp, Homo sapiens
atacatctggccaca

SEQ ID NO: 44544 - DNA, 15 bp, Homo sapiens
gatacatctggccac

SEQ ID NO: 44545 - DNA, 15 bp, Homo sapiens
ggatacatctggcca

SEQ ID NO: 44546 - DNA, 15 bp, Homo sapiens
gggatacatctggcc

SEQ ID NO: 44547 - DNA, 15 bp, Homo sapiens
tgggatacatctggc

SEQ ID NO: 44548 - DNA, 15 bp, Homo sapiens
gtgggatacatctgg

SEQ ID NO: 44549 - DNA, 15 bp, Homo sapiens
agtgggatacatctg

SEQ ID NO: 44550 - DNA, 15 bp, Homo sapiens
tagtgggatacatct

SEQ ID NO: 44551 - DNA, 15 bp, Homo sapiens
gtagtgggatacatc

SEQ ID NO: 44552 - DNA, 15 bp, Homo sapiens
agtagtgggatacat

SEQ ID NO: 44553 - DNA, 15 bp, Homo sapiens
tagtagtgggataca

SEQ ID NO: 44554 - DNA, 15 bp, Homo sapiens
ttagtagtgggatac

SEQ ID NO: 44555 - DNA, 15 bp, Homo sapiens
tttagtagtgggata

SEQ ID NO: 44556 - DNA, 15 bp, Homo sapiens
ttttagtagtgggat

SEQ ID NO: 44557 - DNA, 15 bp, Homo sapiens
cttttagtagtggga

SEQ ID NO: 44558 - DNA, 15 bp, Homo sapiens
ccttttagtagtggg

SEQ ID NO: 44559 - DNA, 15 bp, Homo sapiens
cccttttagtagtgg

SEQ ID NO: 44560 - DNA, 15 bp, Homo sapiens
gcccttttagtagtg

SEQ ID NO: 44561 - DNA, 15 bp, Homo sapiens
tgcccttttagtagt

SEQ ID NO: 44562 - DNA, 15 bp, Homo sapiens
ttgcccttttagtag

SEQ ID NO: 44563 - DNA, 15 bp, Homo sapiens
tttgcccttttagta

SEQ ID NO: 44564 - DNA, 15 bp, Homo sapiens
ctttgcccttttagt

SEQ ID NO: 44565 - DNA, 15 bp, Homo sapiens
actttgcccttttag

SEQ ID NO: 44566 - DNA, 15 bp, Homo sapiens
tactttgccctttta

SEQ ID NO: 44567 - DNA, 15 bp, Homo sapiens
ttactttgccctttt

SEQ ID NO: 44568 - DNA, 15 bp, Homo sapiens
cttactttgcccttt

SEQ ID NO: 44569 - DNA, 15 bp, Homo sapiens
gcttactttgccctt

SEQ ID NO: 44570 - DNA, 15 bp, Homo sapiens
agcttactttgccct

SEQ ID NO: 44571 - DNA, 15 bp, Homo sapiens
cagcttactttgccc

SEQ ID NO: 44572 - DNA, 15 bp, Homo sapiens
acagcttactttgcc

SEQ ID NO: 44573 - DNA, 15 bp, Homo sapiens
cacagcttactttgc

SEQ ID NO: 44574 - DNA, 15 bp, Homo sapiens
ccacagcttactttg

SEQ ID NO: 44575 - DNA, 15 bp, Homo sapiens
gccacagcttacttt

SEQ ID NO: 44576 - DNA, 15 bp, Homo sapiens
agccacagcttactt

SEQ ID NO: 44577 - DNA, 15 bp, Homo sapiens
cagccacagcttact

SEQ ID NO: 44578 - DNA, 15 bp, Homo sapiens
gcagccacagcttac

SEQ ID NO: 44579 - DNA, 15 bp, Homo sapiens
ggcagccacagctta

SEQ ID NO: 44580 - DNA, 15 bp, Homo sapiens
gggcagccacagctt

SEQ ID NO: 44581 - DNA, 15 bp, Homo sapiens
agggcagccacagct

SEQ ID NO: 44582 - DNA, 15 bp, Homo sapiens
cagggcagccacagc

SEQ ID NO: 44583 - DNA, 15 bp, Homo sapiens
ccagggcagccacag

SEQ ID NO: 44584 - DNA, 15 bp, Homo sapiens
accagggcagccaca

SEQ ID NO: 44585 - DNA, 15 bp, Homo sapiens
taccagggcagccac

SEQ ID NO: 44586 - DNA, 15 bp, Homo sapiens
ctaccagggcagcca

SEQ ID NO: 44587 - DNA, 15 bp, Homo sapiens
tctaccagggcagcc

SEQ ID NO: 44588 - DNA, 15 bp, Homo sapiens
atctaccagggcagc

SEQ ID NO: 44589 - DNA, 15 bp, Homo sapiens
tatctaccagggcag

SEQ ID NO: 44590 - DNA, 15 bp, Homo sapiens
gtatctaccagggca

SEQ ID NO: 44591 - DNA, 15 bp, Homo sapiens
tgtatctaccagggc

SEQ ID NO: 44592 - DNA, 15 bp, Homo sapiens
ttgtatctaccaggg

SEQ ID NO: 44593 - DNA, 15 bp, Homo sapiens
attgtatctaccagg

SEQ ID NO: 44594 - DNA, 15 bp, Homo sapiens
cattgtatctaccag

SEQ ID NO: 44595 - DNA, 15 bp, Homo sapiens
tcattgtatctacca

SEQ ID NO: 44596 - DNA, 15 bp, Homo sapiens
ctcattgtatctacc

SEQ ID NO: 44597 - DNA, 15 bp, Homo sapiens
actcattgtatctac

SEQ ID NO: 44598 - DNA, 15 bp, Homo sapiens
tactcattgtatcta

SEQ ID NO: 44599 - DNA, 15 bp, Homo sapiens
ttactcattgtatct

SEQ ID NO: 44600 - DNA, 15 bp, Homo sapiens
cttactcattgtatc

SEQ ID NO: 44601 - DNA, 15 bp, Homo sapiens
acttactcattgtat

SEQ ID NO: 44602 - DNA, 15 bp, Homo sapiens
cacttactcattgta

SEQ ID NO: 44603 - DNA, 15 bp, Homo sapiens
gcacttactcattgt

SEQ ID NO: 44604 - DNA, 15 bp, Homo sapiens
tgcacttactcattg

SEQ ID NO: 44605 - DNA, 15 bp, Homo sapiens
gtgcacttactcatt

SEQ ID NO: 44606 - DNA, 15 bp, Homo sapiens
tgtgcacttactcat

SEQ ID NO: 44607 - DNA, 15 bp, Homo sapiens
ctgtgcacttactca

SEQ ID NO: 44608 - DNA, 15 bp, Homo sapiens
actgtgcacttactc

SEQ ID NO: 44609 - DNA, 15 bp, Homo sapiens
cactgtgcacttact

SEQ ID NO: 44610 - DNA, 15 bp, Homo sapiens
tcactgtgcacttac

SEQ ID NO: 44611 - DNA, 15 bp, Homo sapiens
atcactgtgcactta

SEQ ID NO: 44612 - DNA, 15 bp, Homo sapiens
catcactgtgcactt

SEQ ID NO: 44613 - DNA, 15 bp, Homo sapiens
ccatcactgtgcact

SEQ ID NO: 44614 - DNA, 15 bp, Homo sapiens
gccatcactgtgcac

SEQ ID NO: 44615 - DNA, 15 bp, Homo sapiens
agccatcactgtgca

SEQ ID NO: 44616 - DNA, 15 bp, Homo sapiens
tagccatcactgtgc

SEQ ID NO: 44617 - DNA, 15 bp, Homo sapiens
atagccatcactgtg

SEQ ID NO: 44618 - DNA, 15 bp, Homo sapiens
tatagccatcactgt

SEQ ID NO: 44619 - DNA, 15 bp, Homo sapiens
ttatagccatcactg

SEQ ID NO: 44620 - DNA, 15 bp, Homo sapiens
tttatagccatcact

SEQ ID NO: 44621 - DNA, 15 bp, Homo sapiens
atttatagccatcac

SEQ ID NO: 44622 - DNA, 15 bp, Homo sapiens
catttatagccatca

SEQ ID NO: 44623 - DNA, 15 bp, Homo sapiens
acatttatagccatc

SEQ ID NO: 44624 - DNA, 15 bp, Homo sapiens
aacatttatagccat

SEQ ID NO: 44625 - DNA, 15 bp, Homo sapiens
aaacatttatagcca

SEQ ID NO: 44626 - DNA, 15 bp, Homo sapiens
aaaacatttatagcc

SEQ ID NO: 44627 - DNA, 15 bp, Homo sapiens
gaaaacatttatagc

SEQ ID NO: 44628 - DNA, 15 bp, Homo sapiens
tgaaaacatttatag

SEQ ID NO: 44629 - DNA, 15 bp, Homo sapiens
atgaaaacatttata

SEQ ID NO: 44630 - DNA, 15 bp, Homo sapiens
gatgaaaacatttat

SEQ ID NO: 44631 - DNA, 15 bp, Homo sapiens
agatgaaaacattta

SEQ ID NO: 44632 - DNA, 15 bp, Homo sapiens
gagatgaaaacattt

SEQ ID NO: 44633 - DNA, 15 bp, Homo sapiens
tgagatgaaaacatt

SEQ ID NO: 44634 - DNA, 15 bp, Homo sapiens
atgagatgaaaacat

SEQ ID NO: 44635 - DNA, 15 bp, Homo sapiens
tatgagatgaaaaca

SEQ ID NO: 44636 - DNA, 15 bp, Homo sapiens
ttatgagatgaaaac

SEQ ID NO: 44637 - DNA, 15 bp, Homo sapiens
attatgagatgaaaa

SEQ ID NO: 44638 - DNA, 15 bp, Homo sapiens
gattatgagatgaaa

SEQ ID NO: 44639 - DNA, 15 bp, Homo sapiens
ggattatgagatgaa

SEQ ID NO: 44640 - DNA, 15 bp, Homo sapiens
gggattatgagatga

SEQ ID NO: 44641 - DNA, 15 bp, Homo sapiens
tgggattatgagatg

SEQ ID NO: 44642 - DNA, 15 bp, Homo sapiens
atgggattatgagat

SEQ ID NO: 44643 - DNA, 15 bp, Homo sapiens
catgggattatgaga

SEQ ID NO: 44644 - DNA, 15 bp, Homo sapiens
acatgggattatgag

SEQ ID NO: 44645 - DNA, 15 bp, Homo sapiens
gacatgggattatga

SEQ ID NO: 44646 - DNA, 15 bp, Homo sapiens
ggacatgggattatg

SEQ ID NO: 44647 - DNA, 15 bp, Homo sapiens
tggacatgggattat

SEQ ID NO: 44648 - DNA, 15 bp, Homo sapiens
ctggacatgggatta

SEQ ID NO: 44649 - DNA, 15 bp, Homo sapiens
tctggacatgggatt

SEQ ID NO: 44650 - DNA, 15 bp, Homo sapiens
gtctggacatgggat

SEQ ID NO: 44651 - DNA, 15 bp, Homo sapiens
ggtctggacatggga

SEQ ID NO: 44652 - DNA, 15 bp, Homo sapiens
tggtctggacatggg

SEQ ID NO: 44653 - DNA, 15 bp, Homo sapiens
ctggtctggacatgg

SEQ ID NO: 44654 - DNA, 15 bp, Homo sapiens
gctggtctggacatg

SEQ ID NO: 44655 - DNA, 15 bp, Homo sapiens
tgctggtctggacat

SEQ ID NO: 44656 - DNA, 15 bp, Homo sapiens
ttgctggtctggaca

SEQ ID NO: 44657 - DNA, 15 bp, Homo sapiens
attgctggtctggac

SEQ ID NO: 44658 - DNA, 15 bp, Homo sapiens
aattgctggtctgga

SEQ ID NO: 44659 - DNA, 15 bp, Homo sapiens
aaattgctggtctgg

SEQ ID NO: 44660 - DNA, 15 bp, Homo sapiens
caaattgctggtctg

SEQ ID NO: 44661 - DNA, 15 bp, Homo sapiens
gcaaattgctggtct

SEQ ID NO: 44662 - DNA, 15 bp, Homo sapiens
agcaaattgctggtc

SEQ ID NO: 44663 - DNA, 15 bp, Homo sapiens
gagcaaattgctggt

SEQ ID NO: 44664 - DNA, 15 bp, Homo sapiens
agagcaaattgctgg

SEQ ID NO: 44665 - DNA, 15 bp, Homo sapiens
cagagcaaattgctg

SEQ ID NO: 44666 - DNA, 15 bp, Homo sapiens
tcagagcaaattgct

SEQ ID NO: 44667 - DNA, 15 bp, Homo sapiens
ttcagagcaaattgc

SEQ ID NO: 44668 - DNA, 15 bp, Homo sapiens
tttcagagcaaattg

SEQ ID NO: 44669 - DNA, 15 bp, Homo sapiens
ctttcagagcaaatt

SEQ ID NO: 44670 - DNA, 15 bp, Homo sapiens
gctttcagagcaaat

SEQ ID NO: 44671 - DNA, 15 bp, Homo sapiens
agctttcagagcaaa

SEQ ID NO: 44672 - DNA, 15 bp, Homo sapiens
gagctttcagagcaa

SEQ ID NO: 44673 - DNA, 15 bp, Homo sapiens
agagctttcagagca

SEQ ID NO: 44674 - DNA, 15 bp, Homo sapiens
aagagctttcagagc

SEQ ID NO: 44675 - DNA, 15 bp, Homo sapiens
taagagctttcagag

SEQ ID NO: 44676 - DNA, 15 bp, Homo sapiens
gtaagagctttcaga

SEQ ID NO: 44677 - DNA, 15 bp, Homo sapiens
ggtaagagctttcag

SEQ ID NO: 44678 - DNA, 15 bp, Homo sapiens
aggtaagagctttca

SEQ ID NO: 44679 - DNA, 15 bp, Homo sapiens
caggtaagagctttc

SEQ ID NO: 44680 - DNA, 15 bp, Homo sapiens
acaggtaagagcttt

SEQ ID NO: 44681 - DNA, 15 bp, Homo sapiens
cacaggtaagagctt

SEQ ID NO: 44682 - DNA, 15 bp, Homo sapiens
acacaggtaagagct

SEQ ID NO: 44683 - DNA, 15 bp, Homo sapiens
gacacaggtaagagc

SEQ ID NO: 44684 - DNA, 15 bp, Homo sapiens
agacacaggtaagag

SEQ ID NO: 44685 - DNA, 15 bp, Homo sapiens
cagacacaggtaaga

SEQ ID NO: 44686 - DNA, 15 bp, Homo sapiens
acagacacaggtaag

SEQ ID NO: 44687 - DNA, 15 bp, Homo sapiens
aacagacacaggtaa

SEQ ID NO: 44688 - DNA, 15 bp, Homo sapiens
aaacagacacaggta

SEQ ID NO: 44689 - DNA, 15 bp, Homo sapiens
gaaacagacacaggt

SEQ ID NO: 44690 - DNA, 15 bp, Homo sapiens
tgaaacagacacagg

SEQ ID NO: 44691 - DNA, 15 bp, Homo sapiens
ttgaaacagacacag

SEQ ID NO: 44692 - DNA, 15 bp, Homo sapiens
attgaaacagacaca

SEQ ID NO: 44693 - DNA, 15 bp, Homo sapiens
cattgaaacagacac

SEQ ID NO: 44694 - DNA, 15 bp, Homo sapiens
ccattgaaacagaca

SEQ ID NO: 44695 - DNA, 15 bp, Homo sapiens
gccattgaaacagac

SEQ ID NO: 44696 - DNA, 15 bp, Homo sapiens
agccattgaaacaga

SEQ ID NO: 44697 - DNA, 15 bp, Homo sapiens
gagccattgaaacag

SEQ ID NO: 44698 - DNA, 15 bp, Homo sapiens
agagccattgaaaca

SEQ ID NO: 44699 - DNA, 15 bp, Homo sapiens
aagagccattgaaac

SEQ ID NO: 44700 - DNA, 15 bp, Homo sapiens
caagagccattgaaa

SEQ ID NO: 44701 - DNA, 15 bp, Homo sapiens
tcaagagccattgaa

SEQ ID NO: 44702 - DNA, 15 bp, Homo sapiens
atcaagagccattga

SEQ ID NO: 44703 - DNA, 15 bp, Homo sapiens
gatcaagagccattg

SEQ ID NO: 44704 - DNA, 15 bp, Homo sapiens
tgatcaagagccatt

SEQ ID NO: 44705 - DNA, 15 bp, Homo sapiens
gtgatcaagagccat

SEQ ID NO: 44706 - DNA, 15 bp, Homo sapiens
agtgatcaagagcca

SEQ ID NO: 44707 - DNA, 15 bp, Homo sapiens
aagtgatcaagagcc

SEQ ID NO: 44708 - DNA, 15 bp, Homo sapiens
caagtgatcaagagc

SEQ ID NO: 44709 - DNA, 15 bp, Homo sapiens
gcaagtgatcaagag

SEQ ID NO: 44710 - DNA, 15 bp, Homo sapiens
ggcaagtgatcaaga

SEQ ID NO: 44711 - DNA, 15 bp, Homo sapiens
aggcaagtgatcaag

SEQ ID NO: 44712 - DNA, 15 bp, Homo sapiens
caggcaagtgatcaa

SEQ ID NO: 44713 - DNA, 15 bp, Homo sapiens
gcaggcaagtgatca

SEQ ID NO: 44714 - DNA, 15 bp, Homo sapiens
tgcaggcaagtgatc

SEQ ID NO: 44715 - DNA, 15 bp, Homo sapiens
gtgcaggcaagtgat

SEQ ID NO: 44716 - DNA, 15 bp, Homo sapiens
cgtgcaggcaagtga

SEQ ID NO: 44717 - DNA, 15 bp, Homo sapiens
acgtgcaggcaagtg

SEQ ID NO: 44718 - DNA, 15 bp, Homo sapiens
gacgtgcaggcaagt

SEQ ID NO: 44719 - DNA, 15 bp, Homo sapiens
ggacgtgcaggcaag

SEQ ID NO: 44720 - DNA, 15 bp, Homo sapiens
tggacgtgcaggcaa

SEQ ID NO: 44721 - DNA, 15 bp, Homo sapiens
ctggacgtgcaggca

SEQ ID NO: 44722 - DNA, 15 bp, Homo sapiens
tctggacgtgcaggc

SEQ ID NO: 44723 - DNA, 15 bp, Homo sapiens
ttctggacgtgcagg

SEQ ID NO: 44724 - DNA, 15 bp, Homo sapiens
attctggacgtgcag

SEQ ID NO: 44725 - DNA, 15 bp, Homo sapiens
aattctggacgtgca

SEQ ID NO: 44726 - DNA, 15 bp, Homo sapiens
gaattctggacgtgc

SEQ ID NO: 44727 - DNA, 15 bp, Homo sapiens
ggaattctggacgtg

SEQ ID NO: 44728 - DNA, 15 bp, Homo sapiens
aggaattctggacgt

SEQ ID NO: 44729 - DNA, 15 bp, Homo sapiens
aaggaattctggacg

SEQ ID NO: 44730 - DNA, 15 bp, Homo sapiens
taaggaattctggac

SEQ ID NO: 44731 - DNA, 15 bp, Homo sapiens
ataaggaattctgga

SEQ ID NO: 44732 - DNA, 15 bp, Homo sapiens
aataaggaattctgg

SEQ ID NO: 44733 - DNA, 15 bp, Homo sapiens
aaataaggaattctg

SEQ ID NO: 44734 - DNA, 15 bp, Homo sapiens
taaataaggaattct

SEQ ID NO: 44735 - DNA, 15 bp, Homo sapiens
ataaataaggaattc

SEQ ID NO: 44736 - DNA, 15 bp, Homo sapiens
aataaataaggaatt

SEQ ID NO: 44737 - DNA, 15 bp, Homo sapiens
gaataaataaggaat

SEQ ID NO: 44738 - DNA, 15 bp, Homo sapiens
tgaataaataaggaa

SEQ ID NO: 44739 - DNA, 15 bp, Homo sapiens
atgaataaataagga

SEQ ID NO: 44740 - DNA, 15 bp, Homo sapiens
aatgaataaataagg

SEQ ID NO: 44741 - DNA, 15 bp, Homo sapiens
caatgaataaataag

SEQ ID NO: 44742 - DNA, 15 bp, Homo sapiens
tcaatgaataaataa

SEQ ID NO: 44743 - DNA, 15 bp, Homo sapiens
ttcaatgaataaata

SEQ ID NO: 44744 - DNA, 15 bp, Homo sapiens
tttcaatgaataaat

SEQ ID NO: 44745 - DNA, 15 bp, Homo sapiens
ttttcaatgaataaa

SEQ ID NO: 44746 - DNA, 15 bp, Homo sapiens
attttcaatgaataa

SEQ ID NO: 44747 - DNA, 15 bp, Homo sapiens
aattttcaatgaata

SEQ ID NO: 44748 - DNA, 15 bp, Homo sapiens
taattttcaatgaat

SEQ ID NO: 44749 - DNA, 15 bp, Homo sapiens
ctaattttcaatgaa

SEQ ID NO: 44750 - DNA, 15 bp, Homo sapiens
gctaattttcaatga

SEQ ID NO: 44751 - DNA, 15 bp, Homo sapiens
cgctaattttcaatg

SEQ ID NO: 44752 - DNA, 15 bp, Homo sapiens
acgctaattttcaat

SEQ ID NO: 44753 - DNA, 15 bp, Homo sapiens
aacgctaattttcaa

SEQ ID NO: 44754 - DNA, 15 bp, Homo sapiens
gaacgctaattttca

SEQ ID NO: 44755 - DNA, 15 bp, Homo sapiens
agaacgctaattttc

SEQ ID NO: 44756 - DNA, 15 bp, Homo sapiens
aagaacgctaatttt

SEQ ID NO: 44757 - DNA, 15 bp, Homo sapiens
aaagaacgctaattt

SEQ ID NO: 44758 - DNA, 15 bp, Homo sapiens
taaagaacgctaatt

SEQ ID NO: 44759 - DNA, 15 bp, Homo sapiens
ataaagaacgctaat

SEQ ID NO: 44760 - DNA, 15 bp, Homo sapiens
gataaagaacgctaa

SEQ ID NO: 44761 - DNA, 15 bp, Homo sapiens
ggataaagaacgcta

SEQ ID NO: 44762 - DNA, 15 bp, Homo sapiens
gggataaagaacgct

SEQ ID NO: 44763 - DNA, 15 bp, Homo sapiens
agggataaagaacgc

SEQ ID NO: 44764 - DNA, 15 bp, Homo sapiens
aagggataaagaacg

SEQ ID NO: 44765 - DNA, 15 bp, Homo sapiens
aaagggataaagaac

SEQ ID NO: 44766 - DNA, 15 bp, Homo sapiens
caaagggataaagaa

SEQ ID NO: 44767 - DNA, 15 bp, Homo sapiens
acaaagggataaaga

SEQ ID NO: 44768 - DNA, 15 bp, Homo sapiens
aacaaagggataaag

SEQ ID NO: 44769 - DNA, 15 bp, Homo sapiens
aaacaaagggataaa

SEQ ID NO: 44770 - DNA, 15 bp, Homo sapiens
aaaacaaagggataa

SEQ ID NO: 44771 - DNA, 15 bp, Homo sapiens
caaaacaaagggata

SEQ ID NO: 44772 - DNA, 15 bp, Homo sapiens
gcaaaacaaagggat

SEQ ID NO: 44773 - DNA, 15 bp, Homo sapiens
tgcaaaacaaaggga

SEQ ID NO: 44774 - DNA, 15 bp, Homo sapiens
ttgcaaaacaaaggg

SEQ ID NO: 44775 - DNA, 15 bp, Homo sapiens
cttgcaaaacaaagg

SEQ ID NO: 44776 - DNA, 15 bp, Homo sapiens
acttgcaaaacaaag

SEQ ID NO: 44777 - DNA, 15 bp, Homo sapiens
aacttgcaaaacaaa

SEQ ID NO: 44778 - DNA, 15 bp, Homo sapiens
gaacttgcaaaacaa

SEQ ID NO: 44779 - DNA, 15 bp, Homo sapiens
tgaacttgcaaaaca

SEQ ID NO: 44780 - DNA, 15 bp, Homo sapiens
ctgaacttgcaaaac

SEQ ID NO: 44781 - DNA, 15 bp, Homo sapiens
gctgaacttgcaaaa

SEQ ID NO: 44782 - DNA, 15 bp, Homo sapiens
agctgaacttgcaaa

SEQ ID NO: 44783 - DNA, 15 bp, Homo sapiens
aagctgaacttgcaa

SEQ ID NO: 44784 - DNA, 15 bp, Homo sapiens
aaagctgaacttgca

SEQ ID NO: 44785 - DNA, 15 bp, Homo sapiens
aaaagctgaacttgc

SEQ ID NO: 44786 - DNA, 15 bp, Homo sapiens
aaaaagctgaacttg

SEQ ID NO: 44787 - DNA, 15 bp, Homo sapiens
taaaaagctgaactt

SEQ ID NO: 44788 - DNA, 15 bp, Homo sapiens
ctaaaaagctgaact

SEQ ID NO: 44789 - DNA, 15 bp, Homo sapiens
tctaaaaagctgaac

SEQ ID NO: 44790 - DNA, 15 bp, Homo sapiens
ctctaaaaagctgaa

SEQ ID NO: 44791 - DNA, 15 bp, Homo sapiens
tctctaaaaagctga

SEQ ID NO: 44792 - DNA, 15 bp, Homo sapiens
atctctaaaaagctg

SEQ ID NO: 44793 - DNA, 15 bp, Homo sapiens
catctctaaaaagct

SEQ ID NO: 44794 - DNA, 15 bp, Homo sapiens
ccatctctaaaaagc

SEQ ID NO: 44795 - DNA, 15 bp, Homo sapiens
gccatctctaaaaag

SEQ ID NO: 44796 - DNA, 15 bp, Homo sapiens
agccatctctaaaaa

SEQ ID NO: 44797 - DNA, 15 bp, Homo sapiens
tagccatctctaaaa

SEQ ID NO: 44798 - DNA, 15 bp, Homo sapiens
ttagccatctctaaa

SEQ ID NO: 44799 - DNA, 15 bp, Homo sapiens
tttagccatctctaa

SEQ ID NO: 44800 - DNA, 15 bp, Homo sapiens
ttttagccatctcta

SEQ ID NO: 44801 - DNA, 15 bp, Homo sapiens
attttagccatctct

SEQ ID NO: 44802 - DNA, 15 bp, Homo sapiens
cattttagccatctc

SEQ ID NO: 44803 - DNA, 15 bp, Homo sapiens
ccattttagccatct

SEQ ID NO: 44804 - DNA, 15 bp, Homo sapiens
accattttagccatc

SEQ ID NO: 44805 - DNA, 15 bp, Homo sapiens
gaccattttagccat

SEQ ID NO: 44806 - DNA, 15 bp, Homo sapiens
agaccattttagcca

SEQ ID NO: 44807 - DNA, 15 bp, Homo sapiens
tagaccattttagcc

SEQ ID NO: 44808 - DNA, 15 bp, Homo sapiens
ttagaccattttagc

SEQ ID NO: 44809 - DNA, 15 bp, Homo sapiens
attagaccattttag

SEQ ID NO: 44810 - DNA, 15 bp, Homo sapiens
gattagaccatttta

SEQ ID NO: 44811 - DNA, 15 bp, Homo sapiens
agattagaccatttt

SEQ ID NO: 44812 - DNA, 15 bp, Homo sapiens
aagattagaccattt

SEQ ID NO: 44813 - DNA, 15 bp, Homo sapiens
aaagattagaccatt

SEQ ID NO: 44814 - DNA, 15 bp, Homo sapiens
gaaagattagaccat

SEQ ID NO: 44815 - DNA, 15 bp, Homo sapiens
agaaagattagacca

SEQ ID NO: 44816 - DNA, 15 bp, Homo sapiens
aagaaagattagacc

SEQ ID NO: 44817 - DNA, 15 bp, Homo sapiens
caagaaagattagac

SEQ ID NO: 44818 - DNA, 15 bp, Homo sapiens
ccaagaaagattaga

SEQ ID NO: 44819 - DNA, 15 bp, Homo sapiens
gccaagaaagattag

SEQ ID NO: 44820 - DNA, 15 bp, Homo sapiens
tgccaagaaagatta

SEQ ID NO: 44821 - DNA, 15 bp, Homo sapiens
ttgccaagaaagatt

SEQ ID NO: 44822 - DNA, 15 bp, Homo sapiens
tttgccaagaaagat

SEQ ID NO: 44823 - DNA, 15 bp, Homo sapiens
ctttgccaagaaaga

SEQ ID NO: 44824 - DNA, 15 bp, Homo sapiens
cctttgccaagaaag

SEQ ID NO: 44825 - DNA, 15 bp, Homo sapiens
gcctttgccaagaaa

SEQ ID NO: 44826 - DNA, 15 bp, Homo sapiens
tgcctttgccaagaa

SEQ ID NO: 44827 - DNA, 15 bp, Homo sapiens
ttgcctttgccaaga

SEQ ID NO: 44828 - DNA, 15 bp, Homo sapiens
attgcctttgccaag

SEQ ID NO: 44829 - DNA, 15 bp, Homo sapiens
aattgcctttgccaa

SEQ ID NO: 44830 - DNA, 15 bp, Homo sapiens
gaattgcctttgcca

SEQ ID NO: 44831 - DNA, 15 bp, Homo sapiens
agaattgcctttgcc

SEQ ID NO: 44832 - DNA, 15 bp, Homo sapiens
cagaattgcctttgc

SEQ ID NO: 44833 - DNA, 15 bp, Homo sapiens
tcagaattgcctttg

SEQ ID NO: 44834 - DNA, 15 bp, Homo sapiens
ctcagaattgccttt

SEQ ID NO: 44835 - DNA, 15 bp, Homo sapiens
gctcagaattgcctt

SEQ ID NO: 44836 - DNA, 15 bp, Homo sapiens
agctcagaattgcct

SEQ ID NO: 44837 - DNA, 15 bp, Homo sapiens
cagctcagaattgcc

SEQ ID NO: 44838 - DNA, 15 bp, Homo sapiens
gcagctcagaattgc

SEQ ID NO: 44839 - DNA, 15 bp, Homo sapiens
tgcagctcagaattg

SEQ ID NO: 44840 - DNA, 15 bp, Homo sapiens
ctgcagctcagaatt

SEQ ID NO: 44841 - DNA, 15 bp, Homo sapiens
tctgcagctcagaat

SEQ ID NO: 44842 - DNA, 15 bp, Homo sapiens
atctgcagctcagaa

SEQ ID NO: 44843 - DNA, 15 bp, Homo sapiens
aatctgcagctcaga

SEQ ID NO: 44844 - DNA, 15 bp, Homo sapiens
taatctgcagctcag

SEQ ID NO: 44845 - DNA, 15 bp, Homo sapiens
ctaatctgcagctca

SEQ ID NO: 44846 - DNA, 15 bp, Homo sapiens
tctaatctgcagctc

SEQ ID NO: 44847 - DNA, 15 bp, Homo sapiens
gtctaatctgcagct

SEQ ID NO: 44848 - DNA, 15 bp, Homo sapiens
agtctaatctgcagc

SEQ ID NO: 44849 - DNA, 15 bp, Homo sapiens
tagtctaatctgcag

SEQ ID NO: 44850 - DNA, 15 bp, Homo sapiens
gtagtctaatctgca

SEQ ID NO: 44851 - DNA, 15 bp, Homo sapiens
tgtagtctaatctgc

SEQ ID NO: 44852 - DNA, 15 bp, Homo sapiens
ttgtagtctaatctg

SEQ ID NO: 44853 - DNA, 15 bp, Homo sapiens
cttgtagtctaatct

SEQ ID NO: 44854 - DNA, 15 bp, Homo sapiens
acttgtagtctaatc

SEQ ID NO: 44855 - DNA, 15 bp, Homo sapiens
cacttgtagtctaat

SEQ ID NO: 44856 - DNA, 15 bp, Homo sapiens
ccacttgtagtctaa

SEQ ID NO: 44857 - DNA, 15 bp, Homo sapiens
gccacttgtagtcta

SEQ ID NO: 44858 - DNA, 15 bp, Homo sapiens
agccacttgtagtct

SEQ ID NO: 44859 - DNA, 15 bp, Homo sapiens
aagccacttgtagtc

SEQ ID NO: 44860 - DNA, 15 bp, Homo sapiens
caagccacttgtagt

SEQ ID NO: 44861 - DNA, 15 bp, Homo sapiens
ccaagccacttgtag

SEQ ID NO: 44862 - DNA, 15 bp, Homo sapiens
cccaagccacttgta

SEQ ID NO: 44863 - DNA, 15 bp, Homo sapiens
acccaagccacttgt

SEQ ID NO: 44864 - DNA, 15 bp, Homo sapiens
tacccaagccacttg

SEQ ID NO: 44865 - DNA, 15 bp, Homo sapiens
gtacccaagccactt

SEQ ID NO: 44866 - DNA, 15 bp, Homo sapiens
tgtacccaagccact

SEQ ID NO: 44867 - DNA, 15 bp, Homo sapiens
atgtacccaagccac

SEQ ID NO: 44868 - DNA, 15 bp, Homo sapiens
catgtacccaagcca

SEQ ID NO: 44869 - DNA, 15 bp, Homo sapiens
acatgtacccaagcc

SEQ ID NO: 44870 - DNA, 15 bp, Homo sapiens
aacatgtacccaagc

SEQ ID NO: 44871 - DNA, 15 bp, Homo sapiens
caacatgtacccaag

SEQ ID NO: 44872 - DNA, 15 bp, Homo sapiens
acaacatgtacccaa

SEQ ID NO: 44873 - DNA, 15 bp, Homo sapiens
gacaacatgtaccca

SEQ ID NO: 44874 - DNA, 15 bp, Homo sapiens
agacaacatgtaccc

SEQ ID NO: 44875 - DNA, 15 bp, Homo sapiens
aagacaacatgtacc

SEQ ID NO: 44876 - DNA, 15 bp, Homo sapiens
aaagacaacatgtac

SEQ ID NO: 44877 - DNA, 15 bp, Homo sapiens
taaagacaacatgta

SEQ ID NO: 44878 - DNA, 15 bp, Homo sapiens
ttaaagacaacatgt

SEQ ID NO: 44879 - DNA, 15 bp, Homo sapiens
tttaaagacaacatg

SEQ ID NO: 44880 - DNA, 15 bp, Homo sapiens
gtttaaagacaacat

SEQ ID NO: 44881 - DNA, 15 bp, Homo sapiens
tgtttaaagacaaca

SEQ ID NO: 44882 - DNA, 15 bp, Homo sapiens
ttgtttaaagacaac

SEQ ID NO: 44883 - DNA, 15 bp, Homo sapiens
cttgtttaaagacaa

SEQ ID NO: 44884 - DNA, 15 bp, Homo sapiens
gcttgtttaaagaca

SEQ ID NO: 44885 - DNA, 15 bp, Homo sapiens
cgcttgtttaaagac

SEQ ID NO: 44886 - DNA, 15 bp, Homo sapiens
tcgcttgtttaaaga

SEQ ID NO: 44887 - DNA, 15 bp, Homo sapiens
ttcgcttgtttaaag

SEQ ID NO: 44888 - DNA, 15 bp, Homo sapiens
cttcgcttgtttaaa

SEQ ID NO: 44889 - DNA, 15 bp, Homo sapiens
tcttcgcttgtttaa

SEQ ID NO: 44890 - DNA, 15 bp, Homo sapiens
ctcttcgcttgttta

SEQ ID NO: 44891 - DNA, 15 bp, Homo sapiens
cctcttcgcttgttt

SEQ ID NO: 44892 - DNA, 15 bp, Homo sapiens
tcctcttcgcttgtt

SEQ ID NO: 44893 - DNA, 15 bp, Homo sapiens
ttcctcttcgcttgt

SEQ ID NO: 44894 - DNA, 15 bp, Homo sapiens
tttcctcttcgcttg

SEQ ID NO: 44895 - DNA, 15 bp, Homo sapiens
ttttcctcttcgctt

SEQ ID NO: 44896 - DNA, 15 bp, Homo sapiens
gttttcctcttcgct

SEQ ID NO: 44897 - DNA, 15 bp, Homo sapiens
agttttcctcttcgc

SEQ ID NO: 44898 - DNA, 15 bp, Homo sapiens
aagttttcctcttcg

SEQ ID NO: 44899 - DNA, 15 bp, Homo sapiens
aaagttttcctcttc

SEQ ID NO: 44900 - DNA, 15 bp, Homo sapiens
caaagttttcctctt

SEQ ID NO: 44901 - DNA, 15 bp, Homo sapiens
gctcaaagttttcct

SEQ ID NO: 44902 - DNA, 15 bp, Homo sapiens
agctcaaagttttcc

SEQ ID NO: 44903 - DNA, 15 bp, Homo sapiens
gagctcaaagttttc

SEQ ID NO: 44904 - DNA, 15 bp, Homo sapiens
agagctcaaagtttt

SEQ ID NO: 44905 - DNA, 15 bp, Homo sapiens
tagagctcaaagttt

SEQ ID NO: 44906 - DNA, 15 bp, Homo sapiens
atagagctcaaagtt

SEQ ID NO: 44907 - DNA, 15 bp, Homo sapiens
aatagagctcaaagt

SEQ ID NO: 44908 - DNA, 15 bp, Homo sapiens
gaatagagctcaaag

SEQ ID NO: 44909 - DNA, 15 bp, Homo sapiens
tgaatagagctcaaa

SEQ ID NO: 44910 - DNA, 15 bp, Homo sapiens
ctgaatagagctcaa

SEQ ID NO: 44911 - DNA, 15 bp, Homo sapiens
tctgaatagagctca

SEQ ID NO: 44912 - DNA, 15 bp, Homo sapiens
gtctgaatagagctc

SEQ ID NO: 44913 - DNA, 15 bp, Homo sapiens
agtctgaatagagct

SEQ ID NO: 44914 - DNA, 15 bp, Homo sapiens
aagtctgaatagagc

SEQ ID NO: 44915 - DNA, 15 bp, Homo sapiens
caagtctgaatagag

SEQ ID NO: 44916 - DNA, 15 bp, Homo sapiens
ccaagtctgaataga

SEQ ID NO: 44917 - DNA, 15 bp, Homo sapiens
accaagtctgaatag

SEQ ID NO: 44918 - DNA, 15 bp, Homo sapiens
caccaagtctgaata

SEQ ID NO: 44919 - DNA, 15 bp, Homo sapiens
tcaccaagtctgaat

SEQ ID NO: 44920 - DNA, 15 bp, Homo sapiens
ttcaccaagtctgaa

SEQ ID NO: 44921 - DNA, 15 bp, Homo sapiens
cttcaccaagtctga

SEQ ID NO: 44922 - DNA, 15 bp, Homo sapiens
acttcaccaagtctg

SEQ ID NO: 44923 - DNA, 15 bp, Homo sapiens
cacttcaccaagtct

SEQ ID NO: 44924 - DNA, 15 bp, Homo sapiens
acacttcaccaagtc

SEQ ID NO: 44925 - DNA, 15 bp, Homo sapiens
cacacttcaccaagt

SEQ ID NO: 44926 - DNA, 15 bp, Homo sapiens
ccacacttcaccaag

SEQ ID NO: 44927 - DNA, 15 bp, Homo sapiens
accacacttcaccaa

SEQ ID NO: 44928 - DNA, 15 bp, Homo sapiens
taccacacttcacca

SEQ ID NO: 44929 - DNA, 15 bp, Homo sapiens
ttaccacacttcacc

SEQ ID NO: 44930 - DNA, 15 bp, Homo sapiens
tttaccacacttcac

SEQ ID NO: 44931 - DNA, 15 bp, Homo sapiens
atttaccacacttca

SEQ ID NO: 44932 - DNA, 15 bp, Homo sapiens
aatttaccacacttc

SEQ ID NO: 44933 - DNA, 15 bp, Homo sapiens
aaatttaccacactt

SEQ ID NO: 44934 - DNA, 15 bp, Homo sapiens
taaatttaccacact

SEQ ID NO: 44935 - DNA, 15 bp, Homo sapiens
ataaatttaccacac

SEQ ID NO: 44936 - DNA, 15 bp, Homo sapiens
cataaatttaccaca

SEQ ID NO: 44937 - DNA, 15 bp, Homo sapiens
tcataaatttaccac

SEQ ID NO: 44938 - DNA, 15 bp, Homo sapiens
atcataaatttacca

SEQ ID NO: 44939 - DNA, 15 bp, Homo sapiens
catcataaatttacc

SEQ ID NO: 44940 - DNA, 15 bp, Homo sapiens
tcatcataaatttac

SEQ ID NO: 44941 - DNA, 15 bp, Homo sapiens
ttcatcataaattta

SEQ ID NO: 44942 - DNA, 15 bp, Homo sapiens
tttcatcataaattt

SEQ ID NO: 44943 - DNA, 15 bp, Homo sapiens
ctttcatcataaatt

SEQ ID NO: 44944 - DNA, 15 bp, Homo sapiens
gctttcatcataaat

SEQ ID NO: 44945 - DNA, 15 bp, Homo sapiens
agctttcatcataaa

SEQ ID NO: 44946 - DNA, 15 bp, Homo sapiens
tagctttcatcataa

SEQ ID NO: 44947 - DNA, 15 bp, Homo sapiens
gtagctttcatcata

SEQ ID NO: 44948 - DNA, 15 bp, Homo sapiens
agtagctttcatcat

SEQ ID NO: 44949 - DNA, 15 bp, Homo sapiens
cagtagctttcatca

SEQ ID NO: 44950 - DNA, 15 bp, Homo sapiens
tcagtagctttcatc

SEQ ID NO: 44951 - DNA, 15 bp, Homo sapiens
gtcagtagctttcat

SEQ ID NO: 44952 - DNA, 15 bp, Homo sapiens
agtcagtagctttca

SEQ ID NO: 44953 - DNA, 15 bp, Homo sapiens
cagtcagtagctttc

SEQ ID NO: 44954 - DNA, 15 bp, Homo sapiens
acagtcagtagcttt

SEQ ID NO: 44955 - DNA, 15 bp, Homo sapiens
tacagtcagtagctt

SEQ ID NO: 44956 - DNA, 15 bp, Homo sapiens
atacagtcagtagct

SEQ ID NO: 44957 - DNA, 15 bp, Homo sapiens
aatacagtcagtagc

SEQ ID NO: 44958 - DNA, 15 bp, Homo sapiens
taatacagtcagtag

SEQ ID NO: 44959 - DNA, 15 bp, Homo sapiens
gtaatacagtcagta

SEQ ID NO: 44960 - DNA, 15 bp, Homo sapiens
tgtaatacagtcagt

SEQ ID NO: 44961 - DNA, 15 bp, Homo sapiens
gtgtaatacagtcag

SEQ ID NO: 44962 - DNA, 15 bp, Homo sapiens
tgtgtaatacagtca

SEQ ID NO: 44963 - DNA, 15 bp, Homo sapiens
atgtgtaatacagtc

SEQ ID NO: 44964 - DNA, 15 bp, Homo sapiens
catgtgtaatacagt

SEQ ID NO: 44965 - DNA, 15 bp, Homo sapiens
tcatgtgtaatacag

SEQ ID NO: 44966 - DNA, 15 bp, Homo sapiens
atcatgtgtaataca

SEQ ID NO: 44967 - DNA, 15 bp, Homo sapiens
aatcatgtgtaatac

SEQ ID NO: 44968 - DNA, 15 bp, Homo sapiens
taatcatgtgtaata

SEQ ID NO: 44969 - DNA, 15 bp, Homo sapiens
ttaatcatgtgtaat

SEQ ID NO: 44970 - DNA, 15 bp, Homo sapiens
attaatcatgtgtaa

SEQ ID NO: 44971 - DNA, 15 bp, Homo sapiens
aattaatcatgtgta

SEQ ID NO: 44972 - DNA, 15 bp, Homo sapiens
gaattaatcatgtgt

SEQ ID NO: 44973 - DNA, 15 bp, Homo sapiens
agaattaatcatgtg

SEQ ID NO: 44974 - DNA, 15 bp, Homo sapiens
cagaattaatcatgt

SEQ ID NO: 44975 - DNA, 15 bp, Homo sapiens
tcagaattaatcatg

SEQ ID NO: 44976 - DNA, 15 bp, Homo sapiens
ttcagaattaatcat

SEQ ID NO: 44977 - DNA, 15 bp, Homo sapiens
cttcagaattaatca

SEQ ID NO: 44978 - DNA, 15 bp, Homo sapiens
gcttcagaattaatc

SEQ ID NO: 44979 - DNA, 15 bp, Homo sapiens
ggcttcagaattaat

SEQ ID NO: 44980 - DNA, 15 bp, Homo sapiens
gggcttcagaattaa

SEQ ID NO: 44981 - DNA, 15 bp, Homo sapiens
tgggcttcagaatta

SEQ ID NO: 44982 - DNA, 15 bp, Homo sapiens
atgggcttcagaatt

SEQ ID NO: 44983 - DNA, 15 bp, Homo sapiens
tatgggcttcagaat

SEQ ID NO: 44984 - DNA, 15 bp, Homo sapiens
atatgggcttcagaa

SEQ ID NO: 44985 - DNA, 15 bp, Homo sapiens
aatatgggcttcaga

SEQ ID NO: 44986 - DNA, 15 bp, Homo sapiens
taatatgggcttcag

SEQ ID NO: 44987 - DNA, 15 bp, Homo sapiens
ttaatatgggcttca

SEQ ID NO: 44988 - DNA, 15 bp, Homo sapiens
cttaatatgggcttc

SEQ ID NO: 44989 - DNA, 15 bp, Homo sapiens
tcttaatatgggctt

SEQ ID NO: 44990 - DNA, 15 bp, Homo sapiens
atcttaatatgggct

SEQ ID NO: 44991 - DNA, 15 bp, Homo sapiens
catcttaatatgggc

SEQ ID NO: 44992 - DNA, 15 bp, Homo sapiens
tcatcttaatatggg

SEQ ID NO: 44993 - DNA, 15 bp, Homo sapiens
atcatcttaatatgg

SEQ ID NO: 44994 - DNA, 15 bp, Homo sapiens
gatcatcttaatatg

SEQ ID NO: 44995 - DNA, 15 bp, Homo sapiens
agatcatcttaatat

SEQ ID NO: 44996 - DNA, 15 bp, Homo sapiens
aagatcatcttaata

SEQ ID NO: 44997 - DNA, 15 bp, Homo sapiens
aaagatcatcttaat

SEQ ID NO: 44998 - DNA, 15 bp, Homo sapiens
aaaagatcatcttaa

SEQ ID NO: 44999 - DNA, 15 bp, Homo sapiens
gaaaagatcatctta

SEQ ID NO: 45000 - DNA, 15 bp, Homo sapiens
tgaaaagatcatctt

SEQ ID NO: 45001 - DNA, 15 bp, Homo sapiens
ctgaaaagatcatct

SEQ ID NO: 45002 - DNA, 15 bp, Homo sapiens
gctgaaaagatcatc

SEQ ID NO: 45003 - DNA, 15 bp, Homo sapiens
tgctgaaaagatcat

SEQ ID NO: 45004 - DNA, 15 bp, Homo sapiens
ctgctgaaaagatca

SEQ ID NO: 45005 - DNA, 15 bp, Homo sapiens
actgctgaaaagatc

SEQ ID NO: 45006 - DNA, 15 bp, Homo sapiens
aactgctgaaaagat

SEQ ID NO: 45007 - DNA, 15 bp, Homo sapiens
gaactgctgaaaaga

SEQ ID NO: 45008 - DNA, 15 bp, Homo sapiens
tgaactgctgaaaag

SEQ ID NO: 45009 - DNA, 15 bp, Homo sapiens
ctgaactgctgaaaa

SEQ ID NO: 45010 - DNA, 15 bp, Homo sapiens
gctgaactgctgaaa

SEQ ID NO: 45011 - DNA, 15 bp, Homo sapiens
tgctgaactgctgaa

SEQ ID NO: 45012 - DNA, 15 bp, Homo sapiens
atgctgaactgctga

SEQ ID NO: 45013 - DNA, 15 bp, Homo sapiens
aatgctgaactgctg

SEQ ID NO: 45014 - DNA, 15 bp, Homo sapiens
caatgctgaactgct

SEQ ID NO: 45015 - DNA, 15 bp, Homo sapiens
gcaatgctgaactgc

SEQ ID NO: 45016 - DNA, 15 bp, Homo sapiens
agcaatgctgaactg

SEQ ID NO: 45017 - DNA, 15 bp, Homo sapiens
gagcaatgctgaact

SEQ ID NO: 45018 - DNA, 15 bp, Homo sapiens
agagcaatgctgaac

SEQ ID NO: 45019 - DNA, 15 bp, Homo sapiens
aagagcaatgctgaa

SEQ ID NO: 45020 - DNA, 15 bp, Homo sapiens
gaagagcaatgctga

SEQ ID NO: 45021 - DNA, 15 bp, Homo sapiens
agaagagcaatgctg

SEQ ID NO: 45022 - DNA, 15 bp, Homo sapiens
tagaagagcaatgct

SEQ ID NO: 45023 - DNA, 15 bp, Homo sapiens
ttagaagagcaatgc

SEQ ID NO: 45024 - DNA, 15 bp, Homo sapiens
gttagaagagcaatg

SEQ ID NO: 45025 - DNA, 15 bp, Homo sapiens
agttagaagagcaat

SEQ ID NO: 45026 - DNA, 15 bp, Homo sapiens
cagttagaagagcaa

SEQ ID NO: 45027 - DNA, 15 bp, Homo sapiens
tcagttagaagagca

SEQ ID NO: 45028 - DNA, 15 bp, Homo sapiens
ttcagttagaagagc

SEQ ID NO: 45029 - DNA, 15 bp, Homo sapiens
gttcagttagaagag

SEQ ID NO: 45030 - DNA, 15 bp, Homo sapiens
tgttcagttagaaga

SEQ ID NO: 45031 - DNA, 15 bp, Homo sapiens
ctgttcagttagaag

SEQ ID NO: 45032 - DNA, 15 bp, Homo sapiens
actgttcagttagaa

SEQ ID NO: 45033 - DNA, 15 bp, Homo sapiens
aactgttcagttaga

SEQ ID NO: 45034 - DNA, 15 bp, Homo sapiens
aaactgttcagttag

SEQ ID NO: 45035 - DNA, 15 bp, Homo sapiens
gaaactgttcagtta

SEQ ID NO: 45036 - DNA, 15 bp, Homo sapiens
tgaaactgttcagtt

SEQ ID NO: 45037 - DNA, 15 bp, Homo sapiens
ttgaaactgttcagt

SEQ ID NO: 45038 - DNA, 15 bp, Homo sapiens
cttgaaactgttcag

SEQ ID NO: 45039 - DNA, 15 bp, Homo sapiens
ccttgaaactgttca

SEQ ID NO: 45040 - DNA, 15 bp, Homo sapiens
gccttgaaactgttc

SEQ ID NO: 45041 - DNA, 15 bp, Homo sapiens
agccttgaaactgtt

SEQ ID NO: 45042 - DNA, 15 bp, Homo sapiens
cagccttgaaactgt

SEQ ID NO: 45043 - DNA, 15 bp, Homo sapiens
ccagccttgaaactg

SEQ ID NO: 45044 - DNA, 15 bp, Homo sapiens
cccagccttgaaact

SEQ ID NO: 45045 - DNA, 15 bp, Homo sapiens
tcccagccttgaaac

SEQ ID NO: 45046 - DNA, 15 bp, Homo sapiens
atcccagccttgaaa

SEQ ID NO: 45047 - DNA, 15 bp, Homo sapiens
aatcccagccttgaa

SEQ ID NO: 45048 - DNA, 15 bp, Homo sapiens
aaatcccagccttga

SEQ ID NO: 45049 - DNA, 15 bp, Homo sapiens
gaaatcccagccttg

SEQ ID NO: 45050 - DNA, 15 bp, Homo sapiens
tgaaatcccagcctt

SEQ ID NO: 45051 - DNA, 15 bp, Homo sapiens
ctgaaatcccagcct

SEQ ID NO: 45052 - DNA, 15 bp, Homo sapiens
gctgaaatcccagcc

SEQ ID NO: 45053 - DNA, 15 bp, Homo sapiens
tgctgaaatcccagc

SEQ ID NO: 45054 - DNA, 15 bp, Homo sapiens
ttgctgaaatcccag

SEQ ID NO: 45055 - DNA, 15 bp, Homo sapiens
attgctgaaatccca

SEQ ID NO: 45056 - DNA, 15 bp, Homo sapiens
aattgctgaaatccc

SEQ ID NO: 45057 - DNA, 15 bp, Homo sapiens
taattgctgaaatcc

SEQ ID NO: 45058 - DNA, 15 bp, Homo sapiens
ttaattgctgaaatc

SEQ ID NO: 45059 - DNA, 15 bp, Homo sapiens
attaattgctgaaat

SEQ ID NO: 45060 - DNA, 15 bp, Homo sapiens
gattaattgctgaaa

SEQ ID NO: 45061 - DNA, 15 bp, Homo sapiens
tgattaattgctgaa

SEQ ID NO: 45062 - DNA, 15 bp, Homo sapiens
ctgattaattgctga

SEQ ID NO: 45063 - DNA, 15 bp, Homo sapiens
actgattaattgctg

SEQ ID NO: 45064 - DNA, 15 bp, Homo sapiens
aactgattaattgct

SEQ ID NO: 45065 - DNA, 15 bp, Homo sapiens
gaactgattaattgc

SEQ ID NO: 45066 - DNA, 15 bp, Homo sapiens
tgaactgattaattg

SEQ ID NO: 45067 - DNA, 15 bp, Homo sapiens
ctgaactgattaatt

SEQ ID NO: 45068 - DNA, 15 bp, Homo sapiens
tctgaactgattaat

SEQ ID NO: 45069 - DNA, 15 bp, Homo sapiens
ttctgaactgattaa

SEQ ID NO: 45070 - DNA, 15 bp, Homo sapiens
attctgaactgatta

SEQ ID NO: 45071 - DNA, 15 bp, Homo sapiens
aattctgaactgatt

SEQ ID NO: 45072 - DNA, 15 bp, Homo sapiens
caattctgaactgat

SEQ ID NO: 45073 - DNA, 15 bp, Homo sapiens
gcaattctgaactga

SEQ ID NO: 45074 - DNA, 15 bp, Homo sapiens
agcaattctgaactg

SEQ ID NO: 45075 - DNA, 15 bp, Homo sapiens
tagcaattctgaact

SEQ ID NO: 45076 - DNA, 15 bp, Homo sapiens
ttagcaattctgaac

SEQ ID NO: 45077 - DNA, 15 bp, Homo sapiens
attagcaattctgaa

SEQ ID NO: 45078 - DNA, 15 bp, Homo sapiens
cattagcaattctga

SEQ ID NO: 45079 - DNA, 15 bp, Homo sapiens
tcattagcaattctg

SEQ ID NO: 45080 - DNA, 15 bp, Homo sapiens
atcattagcaattct

SEQ ID NO: 45081 - DNA, 15 bp, Homo sapiens
gatcattagcaattc

SEQ ID NO: 45082 - DNA, 15 bp, Homo sapiens
ggatcattagcaatt

SEQ ID NO: 45083 - DNA, 15 bp, Homo sapiens
aggatcattagcaat

SEQ ID NO: 45084 - DNA, 15 bp, Homo sapiens
caggatcattagcaa

SEQ ID NO: 45085 - DNA, 15 bp, Homo sapiens
ccaggatcattagca

SEQ ID NO: 45086 - DNA, 15 bp, Homo sapiens
gccaggatcattagc

SEQ ID NO: 45087 - DNA, 15 bp, Homo sapiens
cgccaggatcattag

SEQ ID NO: 45088 - DNA, 15 bp, Homo sapiens
ccgccaggatcatta

SEQ ID NO: 45089 - DNA, 15 bp, Homo sapiens
tccgccaggatcatt

SEQ ID NO: 45090 - DNA, 15 bp, Homo sapiens
ctccgccaggatcat

SEQ ID NO: 45091 - DNA, 15 bp, Homo sapiens
cctccgccaggatca

SEQ ID NO: 45092 - DNA, 15 bp, Homo sapiens
ccctccgccaggatc

SEQ ID NO: 45093 - DNA, 15 bp, Homo sapiens
accctccgccaggat

SEQ ID NO: 45094 - DNA, 15 bp, Homo sapiens
caccctccgccagga

SEQ ID NO: 45095 - DNA, 15 bp, Homo sapiens
ccaccctccgccagg

SEQ ID NO: 45096 - DNA, 15 bp, Homo sapiens
accaccctccgccag

SEQ ID NO: 45097 - DNA, 15 bp, Homo sapiens
taccaccctccgcca

SEQ ID NO: 45098 - DNA, 15 bp, Homo sapiens
ctaccaccctccgcc

SEQ ID NO: 45099 - DNA, 15 bp, Homo sapiens
gctaccaccctccgc

SEQ ID NO: 45100 - DNA, 15 bp, Homo sapiens
tgctaccaccctccg

SEQ ID NO: 45101 - DNA, 15 bp, Homo sapiens
ttgctaccaccctcc

SEQ ID NO: 45102 - DNA, 15 bp, Homo sapiens
tttgctaccaccctc

SEQ ID NO: 45103 - DNA, 15 bp, Homo sapiens
ttttgctaccaccct

SEQ ID NO: 45104 - DNA, 15 bp, Homo sapiens
cttttgctaccaccc

SEQ ID NO: 45105 - DNA, 15 bp, Homo sapiens
ccttttgctaccacc

SEQ ID NO: 45106 - DNA, 15 bp, Homo sapiens
cccttttgctaccac

SEQ ID NO: 45107 - DNA, 15 bp, Homo sapiens
ccccttttgctacca

SEQ ID NO: 45108 - DNA, 15 bp, Homo sapiens
cccccttttgctacc

SEQ ID NO: 45109 - DNA, 15 bp, Homo sapiens
tcccccttttgctac

SEQ ID NO: 45110 - DNA, 15 bp, Homo sapiens
ctcccccttttgcta

SEQ ID NO: 45111 - DNA, 15 bp, Homo sapiens
cctcccccttttgct

SEQ ID NO: 45112 - DNA, 15 bp, Homo sapiens
tcctcccccttttgc

SEQ ID NO: 45113 - DNA, 15 bp, Homo sapiens
atcctcccccttttg

SEQ ID NO: 45114 - DNA, 15 bp, Homo sapiens
catcctccccctttt

SEQ ID NO: 45115 - DNA, 15 bp, Homo sapiens
acatcctcccccttt

SEQ ID NO: 45116 - DNA, 15 bp, Homo sapiens
gacatcctccccctt

SEQ ID NO: 45117 - DNA, 15 bp, Homo sapiens
tgacatcctccccct

SEQ ID NO: 45118 - DNA, 15 bp, Homo sapiens
atgacatcctccccc

SEQ ID NO: 45119 - DNA, 15 bp, Homo sapiens
aatgacatcctcccc

SEQ ID NO: 45120 - DNA, 15 bp, Homo sapiens
taatgacatcctccc

SEQ ID NO: 45121 - DNA, 15 bp, Homo sapiens
ctaatgacatcctcc

SEQ ID NO: 45122 - DNA, 15 bp, Homo sapiens
gctaatgacatcctc

SEQ ID NO: 45123 - DNA, 15 bp, Homo sapiens
agctaatgacatcct

SEQ ID NO: 45124 - DNA, 15 bp, Homo sapiens
aagctaatgacatcc

SEQ ID NO: 45125 - DNA, 15 bp, Homo sapiens
gaagctaatgacatc

SEQ ID NO: 45126 - DNA, 15 bp, Homo sapiens
agaagctaatgacat

SEQ ID NO: 45127 - DNA, 15 bp, Homo sapiens
gagaagctaatgaca

SEQ ID NO: 45128 - DNA, 15 bp, Homo sapiens
agagaagctaatgac

SEQ ID NO: 45129 - DNA, 15 bp, Homo sapiens
tagagaagctaatga

SEQ ID NO: 45130 - DNA, 15 bp, Homo sapiens
ctagagaagctaatg

SEQ ID NO: 45131 - DNA, 15 bp, Homo sapiens
gctagagaagctaat

SEQ ID NO: 45132 - DNA, 15 bp, Homo sapiens
ggctagagaagctaa

SEQ ID NO: 45133 - DNA, 15 bp, Homo sapiens
aggctagagaagcta

SEQ ID NO: 45134 - DNA, 15 bp, Homo sapiens
caggctagagaagct

SEQ ID NO: 45135 - DNA, 15 bp, Homo sapiens
gcaggctagagaagc

SEQ ID NO: 45136 - DNA, 15 bp, Homo sapiens
ggcaggctagagaag

SEQ ID NO: 45137 - DNA, 15 bp, Homo sapiens
aggcaggctagagaa

SEQ ID NO: 45138 - DNA, 15 bp, Homo sapiens
aaggcaggctagaga

SEQ ID NO: 45139 - DNA, 15 bp, Homo sapiens
aaaggcaggctagag

SEQ ID NO: 45140 - DNA, 15 bp, Homo sapiens
aaaaggcaggctaga

SEQ ID NO: 45141 - DNA, 15 bp, Homo sapiens
aaaaaggcaggctag

SEQ ID NO: 45142 - DNA, 15 bp, Homo sapiens
aaaaaaggcaggcta

SEQ ID NO: 45143 - DNA, 15 bp, Homo sapiens
gaaaaaaggcaggct

SEQ ID NO: 45144 - DNA, 15 bp, Homo sapiens
tgaaaaaaggcaggc

SEQ ID NO: 45145 - DNA, 15 bp, Homo sapiens
ctgaaaaaaggcagg

SEQ ID NO: 45146 - DNA, 15 bp, Homo sapiens
actgaaaaaaggcag

SEQ ID NO: 45147 - DNA, 15 bp, Homo sapiens
cactgaaaaaaggca

SEQ ID NO: 45148 - DNA, 15 bp, Homo sapiens
gcactgaaaaaaggc

SEQ ID NO: 45149 - DNA, 15 bp, Homo sapiens
ggcactgaaaaaagg

SEQ ID NO: 45150 - DNA, 15 bp, Homo sapiens
gggcactgaaaaaag

SEQ ID NO: 45151 - DNA, 15 bp, Homo sapiens
agggcactgaaaaaa

SEQ ID NO: 45152 - DNA, 15 bp, Homo sapiens
cagggcactgaaaaa

SEQ ID NO: 45153 - DNA, 15 bp, Homo sapiens
acagggcactgaaaa

SEQ ID NO: 45154 - DNA, 15 bp, Homo sapiens
cacagggcactgaaa

SEQ ID NO: 45155 - DNA, 15 bp, Homo sapiens
ccacagggcactgaa

SEQ ID NO: 45156 - DNA, 15 bp, Homo sapiens
gccacagggcactga

SEQ ID NO: 45157 - DNA, 15 bp, Homo sapiens
tgccacagggcactg

SEQ ID NO: 45158 - DNA, 15 bp, Homo sapiens
ctgccacagggcact

SEQ ID NO: 45159 - DNA, 15 bp, Homo sapiens
actgccacagggcac

SEQ ID NO: 45160 - DNA, 15 bp, Homo sapiens
tactgccacagggca

SEQ ID NO: 45161 - DNA, 15 bp, Homo sapiens
atactgccacagggc

SEQ ID NO: 45162 - DNA, 15 bp, Homo sapiens
catactgccacaggg

SEQ ID NO: 45163 - DNA, 15 bp, Homo sapiens
ccatactgccacagg

SEQ ID NO: 45164 - DNA, 15 bp, Homo sapiens
tccatactgccacag

SEQ ID NO: 45165 - DNA, 15 bp, Homo sapiens
ctccatactgccaca

SEQ ID NO: 45166 - DNA, 15 bp, Homo sapiens
actccatactgccac

SEQ ID NO: 45167 - DNA, 15 bp, Homo sapiens
cactccatactgcca

SEQ ID NO: 45168 - DNA, 15 bp, Homo sapiens
tcactccatactgcc

SEQ ID NO: 45169 - DNA, 15 bp, Homo sapiens
ctcactccatactgc

SEQ ID NO: 45170 - DNA, 15 bp, Homo sapiens
cctcactccatactg

SEQ ID NO: 45171 - DNA, 15 bp, Homo sapiens
gcctcactccatact

SEQ ID NO: 45172 - DNA, 15 bp, Homo sapiens
tgcctcactccatac

SEQ ID NO: 45173 - DNA, 15 bp, Homo sapiens
ttgcctcactccata

SEQ ID NO: 45174 - DNA, 15 bp, Homo sapiens
gttgcctcactccat

SEQ ID NO: 45175 - DNA, 15 bp, Homo sapiens
tgttgcctcactcca

SEQ ID NO: 45176 - DNA, 15 bp, Homo sapiens
atgttgcctcactcc

SEQ ID NO: 45177 - DNA, 15 bp, Homo sapiens
catgttgcctcactc

SEQ ID NO: 45178 - DNA, 15 bp, Homo sapiens
tcatgttgcctcact

SEQ ID NO: 45179 - DNA, 15 bp, Homo sapiens
ttcatgttgcctcac

SEQ ID NO: 45180 - DNA, 15 bp, Homo sapiens
tttcatgttgcctca

SEQ ID NO: 45181 - DNA, 15 bp, Homo sapiens
ctttcatgttgcctc

SEQ ID NO: 45182 - DNA, 15 bp, Homo sapiens
tctttcatgttgcct

SEQ ID NO: 45183 - DNA, 15 bp, Homo sapiens
ttctttcatgttgcc

SEQ ID NO: 45184 - DNA, 15 bp, Homo sapiens
tttctttcatgttgc

SEQ ID NO: 45185 - DNA, 15 bp, Homo sapiens
ctttctttcatgttg

SEQ ID NO: 45186 - DNA, 15 bp, Homo sapiens
tctttctttcatgtt

SEQ ID NO: 45187 - DNA, 15 bp, Homo sapiens
atctttctttcatgt

SEQ ID NO: 45188 - DNA, 15 bp, Homo sapiens
catctttctttcatg

SEQ ID NO: 45189 - DNA, 15 bp, Homo sapiens
ccatctttctttcat

SEQ ID NO: 45190 - DNA, 15 bp, Homo sapiens
gccatctttctttca

SEQ ID NO: 45191 - DNA, 15 bp, Homo sapiens
ggccatctttctttc

SEQ ID NO: 45192 - DNA, 15 bp, Homo sapiens
aggccatctttcttt

SEQ ID NO: 45193 - DNA, 15 bp, Homo sapiens
caggccatctttctt

SEQ ID NO: 45194 - DNA, 15 bp, Homo sapiens
tcaggccatctttct

SEQ ID NO: 45195 - DNA, 15 bp, Homo sapiens
gtcaggccatctttc

SEQ ID NO: 45196 - DNA, 15 bp, Homo sapiens
ggtcaggccatcttt

SEQ ID NO: 45197 - DNA, 15 bp, Homo sapiens
aggtcaggccatctt

SEQ ID NO: 45198 - DNA, 15 bp, Homo sapiens
aaggtcaggccatct

SEQ ID NO: 45199 - DNA, 15 bp, Homo sapiens
gaaggtcaggccatc

SEQ ID NO: 45200 - DNA, 15 bp, Homo sapiens
tgaaggtcaggccat

SEQ ID NO: 45201 - DNA, 15 bp, Homo sapiens
atgaaggtcaggcca

SEQ ID NO: 45202 - DNA, 15 bp, Homo sapiens
catgaaggtcaggcc

SEQ ID NO: 45203 - DNA, 15 bp, Homo sapiens
ccatgaaggtcaggc

SEQ ID NO: 45204 - DNA, 15 bp, Homo sapiens
gccatgaaggtcagg

SEQ ID NO: 45205 - DNA, 15 bp, Homo sapiens
tgccatgaaggtcag

SEQ ID NO: 45206 - DNA, 15 bp, Homo sapiens
ctgccatgaaggtca

SEQ ID NO: 45207 - DNA, 15 bp, Homo sapiens
actgccatgaaggtc

SEQ ID NO: 45208 - DNA, 15 bp, Homo sapiens
tactgccatgaaggt

SEQ ID NO: 45209 - DNA, 15 bp, Homo sapiens
atactgccatgaagg

SEQ ID NO: 45210 - DNA, 15 bp, Homo sapiens
aatactgccatgaag

SEQ ID NO: 45211 - DNA, 15 bp, Homo sapiens
caatactgccatgaa

SEQ ID NO: 45212 - DNA, 15 bp, Homo sapiens
acaatactgccatga

SEQ ID NO: 45213 - DNA, 15 bp, Homo sapiens
cacaatactgccatg

SEQ ID NO: 45214 - DNA, 15 bp, Homo sapiens
gcacaatactgccat

SEQ ID NO: 45215 - DNA, 15 bp, Homo sapiens
tgcacaatactgcca

SEQ ID NO: 45216 - DNA, 15 bp, Homo sapiens
ttgcacaatactgcc

SEQ ID NO: 45217 - DNA, 15 bp, Homo sapiens
gttgcacaatactgc

SEQ ID NO: 45218 - DNA, 15 bp, Homo sapiens
tgttgcacaatactg

SEQ ID NO: 45219 - DNA, 15 bp, Homo sapiens
gtgttgcacaatact

SEQ ID NO: 45220 - DNA, 15 bp, Homo sapiens
cgtgttgcacaatac

SEQ ID NO: 45221 - DNA, 15 bp, Homo sapiens
acgtgttgcacaata

SEQ ID NO: 45222 - DNA, 15 bp, Homo sapiens
tacgtgttgcacaat

SEQ ID NO: 45223 - DNA, 15 bp, Homo sapiens
ttacgtgttgcacaa

SEQ ID NO: 45224 - DNA, 15 bp, Homo sapiens
tttacgtgttgcaca

SEQ ID NO: 45225 - DNA, 15 bp, Homo sapiens
atttacgtgttgcac

SEQ ID NO: 45226 - DNA, 15 bp, Homo sapiens
tatttacgtgttgca

SEQ ID NO: 45227 - DNA, 15 bp, Homo sapiens
gtatttacgtgttgc

SEQ ID NO: 45228 - DNA, 15 bp, Homo sapiens
agtatttacgtgttg

SEQ ID NO: 45229 - DNA, 15 bp, Homo sapiens
cagtatttacgtgtt

SEQ ID NO: 45230 - DNA, 15 bp, Homo sapiens
ccagtatttacgtgt

SEQ ID NO: 45231 - DNA, 15 bp, Homo sapiens
accagtatttacgtg

SEQ ID NO: 45232 - DNA, 15 bp, Homo sapiens
caccagtatttacgt

SEQ ID NO: 45233 - DNA, 15 bp, Homo sapiens
acaccagtatttacg

SEQ ID NO: 45234 - DNA, 15 bp, Homo sapiens
cacaccagtatttac

SEQ ID NO: 45235 - DNA, 15 bp, Homo sapiens
tcacaccagtattta

SEQ ID NO: 45236 - DNA, 15 bp, Homo sapiens
ctcacaccagtattt

SEQ ID NO: 45237 - DNA, 15 bp, Homo sapiens
actcacaccagtatt

SEQ ID NO: 45238 - DNA, 15 bp, Homo sapiens
cactcacaccagtat

SEQ ID NO: 45239 - DNA, 15 bp, Homo sapiens
ccactcacaccagta

SEQ ID NO: 45240 - DNA, 15 bp, Homo sapiens
gccactcacaccagt

SEQ ID NO: 45241 - DNA, 15 bp, Homo sapiens
agccactcacaccag

SEQ ID NO: 45242 - DNA, 15 bp, Homo sapiens
cagccactcacacca

SEQ ID NO: 45243 - DNA, 15 bp, Homo sapiens
acagccactcacacc

SEQ ID NO: 45244 - DNA, 15 bp, Homo sapiens
cacagccactcacac

SEQ ID NO: 45245 - DNA, 15 bp, Homo sapiens
ccacagccactcaca

SEQ ID NO: 45246 - DNA, 15 bp, Homo sapiens
gccacagccactcac

SEQ ID NO: 45247 - DNA, 15 bp, Homo sapiens
agccacagccactca

SEQ ID NO: 45248 - DNA, 15 bp, Homo sapiens
tagccacagccactc

SEQ ID NO: 45249 - DNA, 15 bp, Homo sapiens
atagccacagccact

SEQ ID NO: 45250 - DNA, 15 bp, Homo sapiens
catagccacagccac

SEQ ID NO: 45251 - DNA, 15 bp, Homo sapiens
ccatagccacagcca

SEQ ID NO: 45252 - DNA, 15 bp, Homo sapiens
gccatagccacagcc

SEQ ID NO: 45253 - DNA, 15 bp, Homo sapiens
agccatagccacagc

SEQ ID NO: 45254 - DNA, 15 bp, Homo sapiens
tagccatagccacag

SEQ ID NO: 45255 - DNA, 15 bp, Homo sapiens
ctagccatagccaca

SEQ ID NO: 45256 - DNA, 15 bp, Homo sapiens
actagccatagccac

SEQ ID NO: 45257 - DNA, 15 bp, Homo sapiens
tactagccatagcca

SEQ ID NO: 45258 - DNA, 15 bp, Homo sapiens
ttactagccatagcc

SEQ ID NO: 45259 - DNA, 15 bp, Homo sapiens
tttactagccatagc

SEQ ID NO: 45260 - DNA, 15 bp, Homo sapiens
atttactagccatag

SEQ ID NO: 45261 - DNA, 15 bp, Homo sapiens
catttactagccata

SEQ ID NO: 45262 - DNA, 15 bp, Homo sapiens
tcatttactagccat

SEQ ID NO: 45263 - DNA, 15 bp, Homo sapiens
atcatttactagcca

SEQ ID NO: 45264 - DNA, 15 bp, Homo sapiens
catcatttactagcc

SEQ ID NO: 45265 - DNA, 15 bp, Homo sapiens
ccatcatttactagc

SEQ ID NO: 45266 - DNA, 15 bp, Homo sapiens
gccatcatttactag

SEQ ID NO: 45267 - DNA, 15 bp, Homo sapiens
ggccatcatttacta

SEQ ID NO: 45268 - DNA, 15 bp, Homo sapiens
gggccatcatttact

SEQ ID NO: 45269 - DNA, 15 bp, Homo sapiens
agggccatcatttac

SEQ ID NO: 45270 - DNA, 15 bp, Homo sapiens
aagggccatcattta

SEQ ID NO: 45271 - DNA, 15 bp, Homo sapiens
caagggccatcattt

SEQ ID NO: 45272 - DNA, 15 bp, Homo sapiens
ccaagggccatcatt

SEQ ID NO: 45273 - DNA, 15 bp, Homo sapiens
accaagggccatcat

SEQ ID NO: 45274 - DNA, 15 bp, Homo sapiens
taccaagggccatca

SEQ ID NO: 45275 - DNA, 15 bp, Homo sapiens
ttaccaagggccatc

SEQ ID NO: 45276 - DNA, 15 bp, Homo sapiens
tttaccaagggccat

SEQ ID NO: 45277 - DNA, 15 bp, Homo sapiens
gtttaccaagggcca

SEQ ID NO: 45278 - DNA, 15 bp, Homo sapiens
tgtttaccaagggcc

SEQ ID NO: 45279 - DNA, 15 bp, Homo sapiens
ttgtttaccaagggc

SEQ ID NO: 45280 - DNA, 15 bp, Homo sapiens
tttgtttaccaaggg

SEQ ID NO: 45281 - DNA, 15 bp, Homo sapiens
ctttgtttaccaagg

SEQ ID NO: 45282 - DNA, 15 bp, Homo sapiens
actttgtttaccaag

SEQ ID NO: 45283 - DNA, 15 bp, Homo sapiens
aactttgtttaccaa

SEQ ID NO: 45284 - DNA, 15 bp, Homo sapiens
taactttgtttacca

SEQ ID NO: 45285 - DNA, 15 bp, Homo sapiens
ataactttgtttacc

SEQ ID NO: 45286 - DNA, 15 bp, Homo sapiens
aataactttgtttac

SEQ ID NO: 45287 - DNA, 15 bp, Homo sapiens
aaataactttgttta

SEQ ID NO: 45288 - DNA, 15 bp, Homo sapiens
taaataactttgttt

SEQ ID NO: 45289 - DNA, 15 bp, Homo sapiens
ataaataactttgtt

SEQ ID NO: 45290 - DNA, 15 bp, Homo sapiens
gataaataactttgt

SEQ ID NO: 45291 - DNA, 15 bp, Homo sapiens
tgataaataactttg

SEQ ID NO: 45292 - DNA, 15 bp, Homo sapiens
ctgataaataacttt

SEQ ID NO: 45293 - DNA, 15 bp, Homo sapiens
tctgataaataactt

SEQ ID NO: 45294 - DNA, 15 bp, Homo sapiens
gtctgataaataact

SEQ ID NO: 45295 - DNA, 15 bp, Homo sapiens
tgtctgataaataac

SEQ ID NO: 45296 - DNA, 15 bp, Homo sapiens
ttgtctgataaataa

SEQ ID NO: 45297 - DNA, 15 bp, Homo sapiens
attgtctgataaata

SEQ ID NO: 45298 - DNA, 15 bp, Homo sapiens
tattgtctgataaat

SEQ ID NO: 45299 - DNA, 15 bp, Homo sapiens
gtattgtctgataaa

SEQ ID NO: 45300 - DNA, 15 bp, Homo sapiens
ggtattgtctgataa

SEQ ID NO: 45301 - DNA, 15 bp, Homo sapiens
aggtattgtctgata

SEQ ID NO: 45302 - DNA, 15 bp, Homo sapiens
taggtattgtctgat

SEQ ID NO: 45303 - DNA, 15 bp, Homo sapiens
gtaggtattgtctga

SEQ ID NO: 45304 - DNA, 15 bp, Homo sapiens
ggtaggtattgtctg

SEQ ID NO: 45305 - DNA, 15 bp, Homo sapiens
tggtaggtattgtct

SEQ ID NO: 45306 - DNA, 15 bp, Homo sapiens
ctggtaggtattgtc

SEQ ID NO: 45307 - DNA, 15 bp, Homo sapiens
gctggtaggtattgt

SEQ ID NO: 45308 - DNA, 15 bp, Homo sapiens
agctggtaggtattg

SEQ ID NO: 45309 - DNA, 15 bp, Homo sapiens
tagctggtaggtatt

SEQ ID NO: 45310 - DNA, 15 bp, Homo sapiens
ctagctggtaggtat

SEQ ID NO: 45311 - DNA, 15 bp, Homo sapiens
cctagctggtaggta

SEQ ID NO: 45312 - DNA, 15 bp, Homo sapiens
acctagctggtaggt

SEQ ID NO: 45313 - DNA, 15 bp, Homo sapiens
gacctagctggtagg

SEQ ID NO: 45314 - DNA, 15 bp, Homo sapiens
tgacctagctggtag

SEQ ID NO: 45315 - DNA, 15 bp, Homo sapiens
ttgacctagctggta

SEQ ID NO: 45316 - DNA, 15 bp, Homo sapiens
gttgacctagctggt

SEQ ID NO: 45317 - DNA, 15 bp, Homo sapiens
agttgacctagctgg

SEQ ID NO: 45318 - DNA, 15 bp, Homo sapiens
cagttgacctagctg

SEQ ID NO: 45319 - DNA, 15 bp, Homo sapiens
acagttgacctagct

SEQ ID NO: 45320 - DNA, 15 bp, Homo sapiens
cacagttgacctagc

SEQ ID NO: 45321 - DNA, 15 bp, Homo sapiens
gcacagttgacctag

SEQ ID NO: 45322 - DNA, 15 bp, Homo sapiens
ggcacagttgaccta

SEQ ID NO: 45323 - DNA, 15 bp, Homo sapiens
gggcacagttgacct

SEQ ID NO: 45324 - DNA, 15 bp, Homo sapiens
tgggcacagttgacc

SEQ ID NO: 45325 - DNA, 15 bp, Homo sapiens
atgggcacagttgac

SEQ ID NO: 45326 - DNA, 15 bp, Homo sapiens
tatgggcacagttga

SEQ ID NO: 45327 - DNA, 15 bp, Homo sapiens
ttatgggcacagttg

SEQ ID NO: 45328 - DNA, 15 bp, Homo sapiens
attatgggcacagtt

SEQ ID NO: 45329 - DNA, 15 bp, Homo sapiens
aattatgggcacagt

SEQ ID NO: 45330 - DNA, 15 bp, Homo sapiens
caattatgggcacag

SEQ ID NO: 45331 - DNA, 15 bp, Homo sapiens
tcaattatgggcaca

SEQ ID NO: 45332 - DNA, 15 bp, Homo sapiens
atcaattatgggcac

SEQ ID NO: 45333 - DNA, 15 bp, Homo sapiens
gatcaattatgggca

SEQ ID NO: 45334 - DNA, 15 bp, Homo sapiens
agatcaattatgggc

SEQ ID NO: 45335 - DNA, 15 bp, Homo sapiens
cagatcaattatggg

SEQ ID NO: 45336 - DNA, 15 bp, Homo sapiens
ccagatcaattatgg

SEQ ID NO: 45337 - DNA, 15 bp, Homo sapiens
accagatcaattatg

SEQ ID NO: 45338 - DNA, 15 bp, Homo sapiens
aaccagatcaattat

SEQ ID NO: 45339 - DNA, 15 bp, Homo sapiens
taaccagatcaatta

SEQ ID NO: 45340 - DNA, 15 bp, Homo sapiens
ttaaccagatcaatt

SEQ ID NO: 45341 - DNA, 15 bp, Homo sapiens
attaaccagatcaat

SEQ ID NO: 45342 - DNA, 15 bp, Homo sapiens
aattaaccagatcaa

SEQ ID NO: 45343 - DNA, 15 bp, Homo sapiens
aaattaaccagatca

SEQ ID NO: 45344 - DNA, 15 bp, Homo sapiens
gaaattaaccagatc

SEQ ID NO: 45345 - DNA, 15 bp, Homo sapiens
agaaattaaccagat

SEQ ID NO: 45346 - DNA, 15 bp, Homo sapiens
aagaaattaaccaga

SEQ ID NO: 45347 - DNA, 15 bp, Homo sapiens
aaagaaattaaccag

SEQ ID NO: 45348 - DNA, 15 bp, Homo sapiens
aaaagaaattaacca

SEQ ID NO: 45349 - DNA, 15 bp, Homo sapiens
caaaagaaattaacc

SEQ ID NO: 45350 - DNA, 15 bp, Homo sapiens
gcaaaagaaattaac

SEQ ID NO: 45351 - DNA, 15 bp, Homo sapiens
agcaaaagaaattaa

SEQ ID NO: 45352 - DNA, 15 bp, Homo sapiens
cagcaaaagaaatta

SEQ ID NO: 45353 - DNA, 15 bp, Homo sapiens
gcagcaaaagaaatt

SEQ ID NO: 45354 - DNA, 15 bp, Homo sapiens
ggcagcaaaagaaat

SEQ ID NO: 45355 - DNA, 15 bp, Homo sapiens
aggcagcaaaagaaa

SEQ ID NO: 45356 - DNA, 15 bp, Homo sapiens
taggcagcaaaagaa

SEQ ID NO: 45357 - DNA, 15 bp, Homo sapiens
ataggcagcaaaaga

SEQ ID NO: 45358 - DNA, 15 bp, Homo sapiens
aataggcagcaaaag

SEQ ID NO: 45359 - DNA, 15 bp, Homo sapiens
caataggcagcaaaa

SEQ ID NO: 45360 - DNA, 15 bp, Homo sapiens
tcaataggcagcaaa

SEQ ID NO: 45361 - DNA, 15 bp, Homo sapiens
atcaataggcagcaa

SEQ ID NO: 45362 - DNA, 15 bp, Homo sapiens
aatcaataggcagca

SEQ ID NO: 45363 - DNA, 15 bp, Homo sapiens
aaatcaataggcagc

SEQ ID NO: 45364 - DNA, 15 bp, Homo sapiens
aaaatcaataggcag

SEQ ID NO: 45365 - DNA, 15 bp, Homo sapiens
aaaaatcaataggca

SEQ ID NO: 45366 - DNA, 15 bp, Homo sapiens
taaaaatcaataggc

SEQ ID NO: 45367 - DNA, 15 bp, Homo sapiens
ataaaaatcaatagg

SEQ ID NO: 45368 - DNA, 15 bp, Homo sapiens
aataaaaatcaatag

SEQ ID NO: 45369 - DNA, 15 bp, Homo sapiens
aaataaaaatcaata

SEQ ID NO: 45370 - DNA, 15 bp, Homo sapiens
caaataaaaatcaat

SEQ ID NO: 45371 - DNA, 15 bp, Homo sapiens
ccaaataaaaatcaa

SEQ ID NO: 45372 - DNA, 15 bp, Homo sapiens
accaaataaaaatca

SEQ ID NO: 45373 - DNA, 15 bp, Homo sapiens
aaccaaataaaaatc

SEQ ID NO: 45374 - DNA, 15 bp, Homo sapiens
caaccaaataaaaat

SEQ ID NO: 45375 - DNA, 15 bp, Homo sapiens
tcaaccaaataaaaa

SEQ ID NO: 45376 - DNA, 15 bp, Homo sapiens
atcaaccaaataaaa

SEQ ID NO: 45377 - DNA, 15 bp, Homo sapiens
tatcaaccaaataaa

SEQ ID NO: 45378 - DNA, 15 bp, Homo sapiens
ctatcaaccaaataa

SEQ ID NO: 45379 - DNA, 15 bp, Homo sapiens
tctatcaaccaaata

SEQ ID NO: 45380 - DNA, 15 bp, Homo sapiens
atctatcaaccaaat

SEQ ID NO: 45381 - DNA, 15 bp, Homo sapiens
tatctatcaaccaaa

SEQ ID NO: 45382 - DNA, 15 bp, Homo sapiens
ttatctatcaaccaa

SEQ ID NO: 45383 - DNA, 15 bp, Homo sapiens
attatctatcaacca

SEQ ID NO: 45384 - DNA, 15 bp, Homo sapiens
tattatctatcaacc

SEQ ID NO: 45385 - DNA, 15 bp, Homo sapiens
ctattatctatcaac

SEQ ID NO: 45386 - DNA, 15 bp, Homo sapiens
gctattatctatcaa

SEQ ID NO: 45387 - DNA, 15 bp, Homo sapiens
agctattatctatca

SEQ ID NO: 45388 - DNA, 15 bp, Homo sapiens
tagctattatctatc

SEQ ID NO: 45389 - DNA, 15 bp, Homo sapiens
ctagctattatctat

SEQ ID NO: 45390 - DNA, 15 bp, Homo sapiens
tctagctattatcta

SEQ ID NO: 45391 - DNA, 15 bp, Homo sapiens
ctctagctattatct

SEQ ID NO: 45392 - DNA, 15 bp, Homo sapiens
cctctagctattatc

SEQ ID NO: 45393 - DNA, 15 bp, Homo sapiens
tcctctagctattat

SEQ ID NO: 45394 - DNA, 15 bp, Homo sapiens
gtcctctagctatta

SEQ ID NO: 45395 - DNA, 15 bp, Homo sapiens
agtcctctagctatt

SEQ ID NO: 45396 - DNA, 15 bp, Homo sapiens
gagtcctctagctat

SEQ ID NO: 45397 - DNA, 15 bp, Homo sapiens
agagtcctctagcta

SEQ ID NO: 45398 - DNA, 15 bp, Homo sapiens
tagagtcctctagct

SEQ ID NO: 45399 - DNA, 15 bp, Homo sapiens
ttagagtcctctagc

SEQ ID NO: 45400 - DNA, 15 bp, Homo sapiens
tttagagtcctctag

SEQ ID NO: 45401 - DNA, 15 bp, Homo sapiens
atttagagtcctcta

SEQ ID NO: 45402 - DNA, 15 bp, Homo sapiens
aatttagagtcctct

SEQ ID NO: 45403 - DNA, 15 bp, Homo sapiens
aaatttagagtcctc

SEQ ID NO: 45404 - DNA, 15 bp, Homo sapiens
gaaatttagagtcct

SEQ ID NO: 45405 - DNA, 15 bp, Homo sapiens
agaaatttagagtcc

SEQ ID NO: 45406 - DNA, 15 bp, Homo sapiens
aagaaatttagagtc

SEQ ID NO: 45407 - DNA, 15 bp, Homo sapiens
aaagaaatttagagt

SEQ ID NO: 45408 - DNA, 15 bp, Homo sapiens
caaagaaatttagag

SEQ ID NO: 45409 - DNA, 15 bp, Homo sapiens
ccaaagaaatttaga

SEQ ID NO: 45410 - DNA, 15 bp, Homo sapiens
cccaaagaaatttag

SEQ ID NO: 45411 - DNA, 15 bp, Homo sapiens
ccccaaagaaattta

SEQ ID NO: 45412 - DNA, 15 bp, Homo sapiens
tccccaaagaaattt

SEQ ID NO: 45413 - DNA, 15 bp, Homo sapiens
ttccccaaagaaatt

SEQ ID NO: 45414 - DNA, 15 bp, Homo sapiens
cttccccaaagaaat

SEQ ID NO: 45415 - DNA, 15 bp, Homo sapiens
tcttccccaaagaaa

SEQ ID NO: 45416 - DNA, 15 bp, Homo sapiens
ttcttccccaaagaa

SEQ ID NO: 45417 - DNA, 15 bp, Homo sapiens
gttcttccccaaaga

SEQ ID NO: 45418 - DNA, 15 bp, Homo sapiens
tgttcttccccaaag

SEQ ID NO: 45419 - DNA, 15 bp, Homo sapiens
atgttcttccccaaa

SEQ ID NO: 45420 - DNA, 15 bp, Homo sapiens
catgttcttccccaa

SEQ ID NO: 45421 - DNA, 15 bp, Homo sapiens
tcatgttcttcccca

SEQ ID NO: 45422 - DNA, 15 bp, Homo sapiens
ttcatgttcttcccc

SEQ ID NO: 45423 - DNA, 15 bp, Homo sapiens
gttcatgttcttccc

SEQ ID NO: 45424 - DNA, 15 bp, Homo sapiens
ggttcatgttcttcc

SEQ ID NO: 45425 - DNA, 15 bp, Homo sapiens
gggttcatgttcttc

SEQ ID NO: 45426 - DNA, 15 bp, Homo sapiens
ggggttcatgttctt

SEQ ID NO: 45427 - DNA, 15 bp, Homo sapiens
aggggttcatgttct

SEQ ID NO: 45428 - DNA, 15 bp, Homo sapiens
aaggggttcatgttc

SEQ ID NO: 45429 - DNA, 15 bp, Homo sapiens
gaaggggttcatgtt

SEQ ID NO: 45430 - DNA, 15 bp, Homo sapiens
agaaggggttcatgt

SEQ ID NO: 45431 - DNA, 15 bp, Homo sapiens
tagaaggggttcatg

SEQ ID NO: 45432 - DNA, 15 bp, Homo sapiens
ttagaaggggttcat

SEQ ID NO: 45433 - DNA, 15 bp, Homo sapiens
cttagaaggggttca

SEQ ID NO: 45434 - DNA, 15 bp, Homo sapiens
gcttagaaggggttc

SEQ ID NO: 45435 - DNA, 15 bp, Homo sapiens
ggcttagaaggggtt

SEQ ID NO: 45436 - DNA, 15 bp, Homo sapiens
aggcttagaaggggt

SEQ ID NO: 45437 - DNA, 15 bp, Homo sapiens
aaggcttagaagggg

SEQ ID NO: 45438 - DNA, 15 bp, Homo sapiens
gaaggcttagaaggg

SEQ ID NO: 45439 - DNA, 15 bp, Homo sapiens
agaaggcttagaagg

SEQ ID NO: 45440 - DNA, 15 bp, Homo sapiens
aagaaggcttagaag

SEQ ID NO: 45441 - DNA, 15 bp, Homo sapiens
taagaaggcttagaa

SEQ ID NO: 45442 - DNA, 15 bp, Homo sapiens
gtaagaaggcttaga

SEQ ID NO: 45443 - DNA, 15 bp, Homo sapiens
cgtaagaaggcttag

SEQ ID NO: 45444 - DNA, 15 bp, Homo sapiens
tcgtaagaaggctta

SEQ ID NO: 45445 - DNA, 15 bp, Homo sapiens
ctcgtaagaaggctt

SEQ ID NO: 45446 - DNA, 15 bp, Homo sapiens
tctcgtaagaaggct

SEQ ID NO: 45447 - DNA, 15 bp, Homo sapiens
ctctcgtaagaaggc

SEQ ID NO: 45448 - DNA, 15 bp, Homo sapiens
tctctcgtaagaagg

SEQ ID NO: 45449 - DNA, 15 bp, Homo sapiens
ttctctcgtaagaag

SEQ ID NO: 45450 - DNA, 15 bp, Homo sapiens
attctctcgtaagaa

SEQ ID NO: 45451 - DNA, 15 bp, Homo sapiens
aattctctcgtaaga

SEQ ID NO: 45452 - DNA, 15 bp, Homo sapiens
caattctctcgtaag

SEQ ID NO: 45453 - DNA, 15 bp, Homo sapiens
tcaattctctcgtaa

SEQ ID NO: 45454 - DNA, 15 bp, Homo sapiens
atcaattctctcgta

SEQ ID NO: 45455 - DNA, 15 bp, Homo sapiens
gatcaattctctcgt

SEQ ID NO: 45456 - DNA, 15 bp, Homo sapiens
cgatcaattctctcg

SEQ ID NO: 45457 - DNA, 15 bp, Homo sapiens
gcgatcaattctctc

SEQ ID NO: 45458 - DNA, 15 bp, Homo sapiens
agcgatcaattctct

SEQ ID NO: 45459 - DNA, 15 bp, Homo sapiens
aagcgatcaattctc

SEQ ID NO: 45460 - DNA, 15 bp, Homo sapiens
aaagcgatcaattct

SEQ ID NO: 45461 - DNA, 15 bp, Homo sapiens
aaaagcgatcaattc

SEQ ID NO: 45462 - DNA, 15 bp, Homo sapiens
caaaagcgatcaatt

SEQ ID NO: 45463 - DNA, 15 bp, Homo sapiens
gcaaaagcgatcaat

SEQ ID NO: 45464 - DNA, 15 bp, Homo sapiens
tgcaaaagcgatcaa

SEQ ID NO: 45465 - DNA, 15 bp, Homo sapiens
gtgcaaaagcgatca

SEQ ID NO: 45466 - DNA, 15 bp, Homo sapiens
agtgcaaaagcgatc

SEQ ID NO: 45467 - DNA, 15 bp, Homo sapiens
cagtgcaaaagcgat

SEQ ID NO: 45468 - DNA, 15 bp, Homo sapiens
tcagtgcaaaagcga

SEQ ID NO: 45469 - DNA, 15 bp, Homo sapiens
gtcagtgcaaaagcg

SEQ ID NO: 45470 - DNA, 15 bp, Homo sapiens
ggtcagtgcaaaagc

SEQ ID NO: 45471 - DNA, 15 bp, Homo sapiens
aggtcagtgcaaaag

SEQ ID NO: 45472 - DNA, 15 bp, Homo sapiens
aaggtcagtgcaaaa

SEQ ID NO: 45473 - DNA, 15 bp, Homo sapiens
aaaggtcagtgcaaa

SEQ ID NO: 45474 - DNA, 15 bp, Homo sapiens
taaaggtcagtgcaa

SEQ ID NO: 45475 - DNA, 15 bp, Homo sapiens
ctaaaggtcagtgca

SEQ ID NO: 45476 - DNA, 15 bp, Homo sapiens
actaaaggtcagtgc

SEQ ID NO: 45477 - DNA, 15 bp, Homo sapiens
tactaaaggtcagtg

SEQ ID NO: 45478 - DNA, 15 bp, Homo sapiens
ttactaaaggtcagt

SEQ ID NO: 45479 - DNA, 15 bp, Homo sapiens
gttactaaaggtcag

SEQ ID NO: 45480 - DNA, 15 bp, Homo sapiens
tgttactaaaggtca

SEQ ID NO: 45481 - DNA, 15 bp, Homo sapiens
atgttactaaaggtc

SEQ ID NO: 45482 - DNA, 15 bp, Homo sapiens
gatgttactaaaggt

SEQ ID NO: 45483 - DNA, 15 bp, Homo sapiens
ggatgttactaaagg

SEQ ID NO: 45484 - DNA, 15 bp, Homo sapiens
aggatgttactaaag

SEQ ID NO: 45485 - DNA, 15 bp, Homo sapiens
caggatgttactaaa

SEQ ID NO: 45486 - DNA, 15 bp, Homo sapiens
tcaggatgttactaa

SEQ ID NO: 45487 - DNA, 15 bp, Homo sapiens
atcaggatgttacta

SEQ ID NO: 45488 - DNA, 15 bp, Homo sapiens
aatcaggatgttact

SEQ ID NO: 45489 - DNA, 15 bp, Homo sapiens
aaatcaggatgttac

SEQ ID NO: 45490 - DNA, 15 bp, Homo sapiens
gaaatcaggatgtta

SEQ ID NO: 45491 - DNA, 15 bp, Homo sapiens
tgaaatcaggatgtt

SEQ ID NO: 45492 - DNA, 15 bp, Homo sapiens
ctgaaatcaggatgt

SEQ ID NO: 45493 - DNA, 15 bp, Homo sapiens
actgaaatcaggatg

SEQ ID NO: 45494 - DNA, 15 bp, Homo sapiens
cactgaaatcaggat

SEQ ID NO: 45495 - DNA, 15 bp, Homo sapiens
acactgaaatcagga

SEQ ID NO: 45496 - DNA, 15 bp, Homo sapiens
aacactgaaatcagg

SEQ ID NO: 45497 - DNA, 15 bp, Homo sapiens
aaacactgaaatcag

SEQ ID NO: 45498 - DNA, 15 bp, Homo sapiens
aaaacactgaaatca

SEQ ID NO: 45499 - DNA, 15 bp, Homo sapiens
caaaacactgaaatc

SEQ ID NO: 45500 - DNA, 15 bp, Homo sapiens
acaaaacactgaaat

SEQ ID NO: 45501 - DNA, 15 bp, Homo sapiens
tacaaaacactgaaa

SEQ ID NO: 45502 - DNA, 15 bp, Homo sapiens
ttacaaaacactgaa

SEQ ID NO: 45503 - DNA, 15 bp, Homo sapiens
gttacaaaacactga

SEQ ID NO: 45504 - DNA, 15 bp, Homo sapiens
agttacaaaacactg

SEQ ID NO: 45505 - DNA, 15 bp, Homo sapiens
tagttacaaaacact

SEQ ID NO: 45506 - DNA, 15 bp, Homo sapiens
atagttacaaaacac

SEQ ID NO: 45507 - DNA, 15 bp, Homo sapiens
gatagttacaaaaca

SEQ ID NO: 45508 - DNA, 15 bp, Homo sapiens
tgatagttacaaaac

SEQ ID NO: 45509 - DNA, 15 bp, Homo sapiens
ctgatagttacaaaa

SEQ ID NO: 45510 - DNA, 15 bp, Homo sapiens
tctgatagttacaaa

SEQ ID NO: 45511 - DNA, 15 bp, Homo sapiens
ctctgatagttacaa

SEQ ID NO: 45512 - DNA, 15 bp, Homo sapiens
cctctgatagttaca

SEQ ID NO: 45513 - DNA, 15 bp, Homo sapiens
ccctctgatagttac

SEQ ID NO: 45514 - DNA, 15 bp, Homo sapiens
accctctgatagtta

SEQ ID NO: 45515 - DNA, 15 bp, Homo sapiens
aaccctctgatagtt

SEQ ID NO: 45516 - DNA, 15 bp, Homo sapiens
caaccctctgatagt

SEQ ID NO: 45517 - DNA, 15 bp, Homo sapiens
tcaaccctctgatag

SEQ ID NO: 45518 - DNA, 15 bp, Homo sapiens
ctcaaccctctgata

SEQ ID NO: 45519 - DNA, 15 bp, Homo sapiens
actcaaccctctgat

SEQ ID NO: 45520 - DNA, 15 bp, Homo sapiens
gactcaaccctctga

SEQ ID NO: 45521 - DNA, 15 bp, Homo sapiens
agactcaaccctctg

SEQ ID NO: 45522 - DNA, 15 bp, Homo sapiens
aagactcaaccctct

SEQ ID NO: 45523 - DNA, 15 bp, Homo sapiens
caagactcaaccctc

SEQ ID NO: 45524 - DNA, 15 bp, Homo sapiens
ccaagactcaaccct

SEQ ID NO: 45525 - DNA, 15 bp, Homo sapiens
accaagactcaaccc

SEQ ID NO: 45526 - DNA, 15 bp, Homo sapiens
aaccaagactcaacc

SEQ ID NO: 45527 - DNA, 15 bp, Homo sapiens
aaaccaagactcaac

SEQ ID NO: 45528 - DNA, 15 bp, Homo sapiens
aaaaccaagactcaa

SEQ ID NO: 45529 - DNA, 15 bp, Homo sapiens
taaaaccaagactca

SEQ ID NO: 45530 - DNA, 15 bp, Homo sapiens
ttaaaaccaagactc

SEQ ID NO: 45531 - DNA, 15 bp, Homo sapiens
cttaaaaccaagact

SEQ ID NO: 45532 - DNA, 15 bp, Homo sapiens
gcttaaaaccaagac

SEQ ID NO: 45533 - DNA, 15 bp, Homo sapiens
ggcttaaaaccaaga

SEQ ID NO: 45534 - DNA, 15 bp, Homo sapiens
tggcttaaaaccaag

SEQ ID NO: 45535 - DNA, 15 bp, Homo sapiens
atggcttaaaaccaa

SEQ ID NO: 45536 - DNA, 15 bp, Homo sapiens
catggcttaaaacca

SEQ ID NO: 45537 - DNA, 15 bp, Homo sapiens
acatggcttaaaacc

SEQ ID NO: 45538 - DNA, 15 bp, Homo sapiens
tacatggcttaaaac

SEQ ID NO: 45539 - DNA, 15 bp, Homo sapiens
atacatggcttaaaa

SEQ ID NO: 45540 - DNA, 15 bp, Homo sapiens
tatacatggcttaaa

SEQ ID NO: 45541 - DNA, 15 bp, Homo sapiens
atatacatggcttaa

SEQ ID NO: 45542 - DNA, 15 bp, Homo sapiens
gatatacatggctta

SEQ ID NO: 45543 - DNA, 15 bp, Homo sapiens
agatatacatggctt

SEQ ID NO: 45544 - DNA, 15 bp, Homo sapiens
cagatatacatggct

SEQ ID NO: 45545 - DNA, 15 bp, Homo sapiens
acagatatacatggc

SEQ ID NO: 45546 - DNA, 15 bp, Homo sapiens
tacagatatacatgg

SEQ ID NO: 45547 - DNA, 15 bp, Homo sapiens
ctacagatatacatg

SEQ ID NO: 45548 - DNA, 15 bp, Homo sapiens
gctacagatatacat

SEQ ID NO: 45549 - DNA, 15 bp, Homo sapiens
tgctacagatataca

SEQ ID NO: 45550 - DNA, 15 bp, Homo sapiens
atgctacagatatac

SEQ ID NO: 45551 - DNA, 15 bp, Homo sapiens
tatgctacagatata

SEQ ID NO: 45552 - DNA, 15 bp, Homo sapiens
ttatgctacagatat

SEQ ID NO: 45553 - DNA, 15 bp, Homo sapiens
gttatgctacagata

SEQ ID NO: 45554 - DNA, 15 bp, Homo sapiens
agttatgctacagat

SEQ ID NO: 45555 - DNA, 15 bp, Homo sapiens
aagttatgctacaga

SEQ ID NO: 45556 - DNA, 15 bp, Homo sapiens
aaagttatgctacag

SEQ ID NO: 45557 - DNA, 15 bp, Homo sapiens
gaaagttatgctaca

SEQ ID NO: 45558 - DNA, 15 bp, Homo sapiens
agaaagttatgctac

SEQ ID NO: 45559 - DNA, 15 bp, Homo sapiens
cagaaagttatgcta

SEQ ID NO: 45560 - DNA, 15 bp, Homo sapiens
acagaaagttatgct

SEQ ID NO: 45561 - DNA, 15 bp, Homo sapiens
cacagaaagttatgc

SEQ ID NO: 45562 - DNA, 15 bp, Homo sapiens
acacagaaagttatg

SEQ ID NO: 45563 - DNA, 15 bp, Homo sapiens
tacacagaaagttat

SEQ ID NO: 45564 - DNA, 15 bp, Homo sapiens
ctacacagaaagtta

SEQ ID NO: 45565 - DNA, 15 bp, Homo sapiens
cctacacagaaagtt

SEQ ID NO: 45566 - DNA, 15 bp, Homo sapiens
gcctacacagaaagt

SEQ ID NO: 45567 - DNA, 15 bp, Homo sapiens
agcctacacagaaag

SEQ ID NO: 45568 - DNA, 15 bp, Homo sapiens
tagcctacacagaaa

SEQ ID NO: 45569 - DNA, 15 bp, Homo sapiens
ctagcctacacagaa

SEQ ID NO: 45570 - DNA, 15 bp, Homo sapiens
actagcctacacaga

SEQ ID NO: 45571 - DNA, 15 bp, Homo sapiens
aactagcctacacag

SEQ ID NO: 45572 - DNA, 15 bp, Homo sapiens
taactagcctacaca

SEQ ID NO: 45573 - DNA, 15 bp, Homo sapiens
gtaactagcctacac

SEQ ID NO: 45574 - DNA, 15 bp, Homo sapiens
ggtaactagcctaca

SEQ ID NO: 45575 - DNA, 15 bp, Homo sapiens
aggtaactagcctac

SEQ ID NO: 45576 - DNA, 15 bp, Homo sapiens
gaggtaactagccta

SEQ ID NO: 45577 - DNA, 15 bp, Homo sapiens
agaggtaactagcct

SEQ ID NO: 45578 - DNA, 15 bp, Homo sapiens
gagaggtaactagcc

SEQ ID NO: 45579 - DNA, 15 bp, Homo sapiens
tgagaggtaactagc

SEQ ID NO: 45580 - DNA, 15 bp, Homo sapiens
ctgagaggtaactag

SEQ ID NO: 45581 - DNA, 15 bp, Homo sapiens
gctgagaggtaacta

SEQ ID NO: 45582 - DNA, 15 bp, Homo sapiens
agctgagaggtaact

SEQ ID NO: 45583 - DNA, 15 bp, Homo sapiens
aagctgagaggtaac

SEQ ID NO: 45584 - DNA, 15 bp, Homo sapiens
taagctgagaggtaa

SEQ ID NO: 45585 - DNA, 15 bp, Homo sapiens
ataagctgagaggta

SEQ ID NO: 45586 - DNA, 15 bp, Homo sapiens
tataagctgagaggt

SEQ ID NO: 45587 - DNA, 15 bp, Homo sapiens
ttataagctgagagg

SEQ ID NO: 45588 - DNA, 15 bp, Homo sapiens
tttataagctgagag

SEQ ID NO: 45589 - DNA, 15 bp, Homo sapiens
ctttataagctgaga

SEQ ID NO: 45590 - DNA, 15 bp, Homo sapiens
actttataagctgag

SEQ ID NO: 45591 - DNA, 15 bp, Homo sapiens
cactttataagctga

SEQ ID NO: 45592 - DNA, 15 bp, Homo sapiens
acactttataagctg

SEQ ID NO: 45593 - DNA, 15 bp, Homo sapiens
tacactttataagct

SEQ ID NO: 45594 - DNA, 15 bp, Homo sapiens
ctacactttataagc

SEQ ID NO: 45595 - DNA, 15 bp, Homo sapiens
cctacactttataag

SEQ ID NO: 45596 - DNA, 15 bp, Homo sapiens
gcctacactttataa

SEQ ID NO: 45597 - DNA, 15 bp, Homo sapiens
agcctacactttata

SEQ ID NO: 45598 - DNA, 15 bp, Homo sapiens
cagcctacactttat

SEQ ID NO: 45599 - DNA, 15 bp, Homo sapiens
tcagcctacacttta

SEQ ID NO: 45600 - DNA, 15 bp, Homo sapiens
atcagcctacacttt

SEQ ID NO: 45601 - DNA, 15 bp, Homo sapiens
tatcagcctacactt

SEQ ID NO: 45602 - DNA, 15 bp, Homo sapiens
ttatcagcctacact

SEQ ID NO: 45603 - DNA, 15 bp, Homo sapiens
tttatcagcctacac

SEQ ID NO: 45604 - DNA, 15 bp, Homo sapiens
atttatcagcctaca

SEQ ID NO: 45605 - DNA, 15 bp, Homo sapiens
aatttatcagcctac

SEQ ID NO: 45606 - DNA, 15 bp, Homo sapiens
aaatttatcagccta

SEQ ID NO: 45607 - DNA, 15 bp, Homo sapiens
taaatttatcagcct

SEQ ID NO: 45608 - DNA, 15 bp, Homo sapiens
ataaatttatcagcc

SEQ ID NO: 45609 - DNA, 15 bp, Homo sapiens
tataaatttatcagc

SEQ ID NO: 45610 - DNA, 15 bp, Homo sapiens
ctataaatttatcag

SEQ ID NO: 45611 - DNA, 15 bp, Homo sapiens
actataaatttatca

SEQ ID NO: 45612 - DNA, 15 bp, Homo sapiens
tactataaatttatc

SEQ ID NO: 45613 - DNA, 15 bp, Homo sapiens
gtactataaatttat

SEQ ID NO: 45614 - DNA, 15 bp, Homo sapiens
tgtactataaattta

SEQ ID NO: 45615 - DNA, 15 bp, Homo sapiens
ctgtactataaattt

SEQ ID NO: 45616 - DNA, 15 bp, Homo sapiens
actgtactataaatt

SEQ ID NO: 45617 - DNA, 15 bp, Homo sapiens
tactgtactataaat

SEQ ID NO: 45618 - DNA, 15 bp, Homo sapiens
ctactgtactataaa

SEQ ID NO: 45619 - DNA, 15 bp, Homo sapiens
tctactgtactataa

SEQ ID NO: 45620 - DNA, 15 bp, Homo sapiens
ctctactgtactata

SEQ ID NO: 45621 - DNA, 15 bp, Homo sapiens
actctactgtactat

SEQ ID NO: 45622 - DNA, 15 bp, Homo sapiens
cactctactgtacta

SEQ ID NO: 45623 - DNA, 15 bp, Homo sapiens
acactctactgtact

SEQ ID NO: 45624 - DNA, 15 bp, Homo sapiens
gacactctactgtac

SEQ ID NO: 45625 - DNA, 15 bp, Homo sapiens
tgacactctactgta

SEQ ID NO: 45626 - DNA, 15 bp, Homo sapiens
gtgacactctactgt

SEQ ID NO: 45627 - DNA, 15 bp, Homo sapiens
agtgacactctactg

SEQ ID NO: 45628 - DNA, 15 bp, Homo sapiens
tagtgacactctact

SEQ ID NO: 45629 - DNA, 15 bp, Homo sapiens
atagtgacactctac

SEQ ID NO: 45630 - DNA, 15 bp, Homo sapiens
catagtgacactcta

SEQ ID NO: 45631 - DNA, 15 bp, Homo sapiens
gcatagtgacactct

SEQ ID NO: 45632 - DNA, 15 bp, Homo sapiens
tgcatagtgacactc

SEQ ID NO: 45633 - DNA, 15 bp, Homo sapiens
ttgcatagtgacact

SEQ ID NO: 45634 - DNA, 15 bp, Homo sapiens
tttgcatagtgacac

SEQ ID NO: 45635 - DNA, 15 bp, Homo sapiens
ctttgcatagtgaca

SEQ ID NO: 45636 - DNA, 15 bp, Homo sapiens
tctttgcatagtgac

SEQ ID NO: 45637 - DNA, 15 bp, Homo sapiens
ttctttgcatagtga

SEQ ID NO: 45638 - DNA, 15 bp, Homo sapiens
tttctttgcatagtg

SEQ ID NO: 45639 - DNA, 15 bp, Homo sapiens
gtttctttgcatagt

SEQ ID NO: 45640 - DNA, 15 bp, Homo sapiens
cgtttctttgcatag

SEQ ID NO: 45641 - DNA, 15 bp, Homo sapiens
tcgtttctttgcata

SEQ ID NO: 45642 - DNA, 15 bp, Homo sapiens
atcgtttctttgcat

SEQ ID NO: 45643 - DNA, 15 bp, Homo sapiens
gatcgtttctttgca

SEQ ID NO: 45644 - DNA, 15 bp, Homo sapiens
agatcgtttctttgc

SEQ ID NO: 45645 - DNA, 15 bp, Homo sapiens
aagatcgtttctttg

SEQ ID NO: 45646 - DNA, 15 bp, Homo sapiens
taagatcgtttcttt

SEQ ID NO: 45647 - DNA, 15 bp, Homo sapiens
ctaagatcgtttctt

SEQ ID NO: 45648 - DNA, 15 bp, Homo sapiens
cctaagatcgtttct

SEQ ID NO: 45649 - DNA, 15 bp, Homo sapiens
ccctaagatcgtttc

SEQ ID NO: 45650 - DNA, 15 bp, Homo sapiens
tccctaagatcgttt

SEQ ID NO: 45651 - DNA, 15 bp, Homo sapiens
ttccctaagatcgtt

SEQ ID NO: 45652 - DNA, 15 bp, Homo sapiens
attccctaagatcgt

SEQ ID NO: 45653 - DNA, 15 bp, Homo sapiens
gattccctaagatcg

SEQ ID NO: 45654 - DNA, 15 bp, Homo sapiens
cgattccctaagatc

SEQ ID NO: 45655 - DNA, 15 bp, Homo sapiens
tcgattccctaagat

SEQ ID NO: 45656 - DNA, 15 bp, Homo sapiens
ttcgattccctaaga

SEQ ID NO: 45657 - DNA, 15 bp, Homo sapiens
attcgattccctaag

SEQ ID NO: 45658 - DNA, 15 bp, Homo sapiens
cattcgattccctaa

SEQ ID NO: 45659 - DNA, 15 bp, Homo sapiens
tcattcgattcccta

SEQ ID NO: 45660 - DNA, 15 bp, Homo sapiens
atcattcgattccct

SEQ ID NO: 45661 - DNA, 15 bp, Homo sapiens
tatcattcgattccc

SEQ ID NO: 45662 - DNA, 15 bp, Homo sapiens
atatcattcgattcc

SEQ ID NO: 45663 - DNA, 15 bp, Homo sapiens
gatatcattcgattc

SEQ ID NO: 45664 - DNA, 15 bp, Homo sapiens
agatatcattcgatt

SEQ ID NO: 45665 - DNA, 15 bp, Homo sapiens
cagatatcattcgat

SEQ ID NO: 45666 - DNA, 15 bp, Homo sapiens
gcagatatcattcga

SEQ ID NO: 45667 - DNA, 15 bp, Homo sapiens
agcagatatcattcg

SEQ ID NO: 45668 - DNA, 15 bp, Homo sapiens
tagcagatatcattc

SEQ ID NO: 45669 - DNA, 15 bp, Homo sapiens
atagcagatatcatt

SEQ ID NO: 45670 - DNA, 15 bp, Homo sapiens
aatagcagatatcat

SEQ ID NO: 45671 - DNA, 15 bp, Homo sapiens
taatagcagatatca

SEQ ID NO: 45672 - DNA, 15 bp, Homo sapiens
ttaatagcagatatc

SEQ ID NO: 45673 - DNA, 15 bp, Homo sapiens
tttaatagcagatat

SEQ ID NO: 45674 - DNA, 15 bp, Homo sapiens
ctttaatagcagata

SEQ ID NO: 45675 - DNA, 15 bp, Homo sapiens
gctttaatagcagat

SEQ ID NO: 45676 - DNA, 15 bp, Homo sapiens
tgctttaatagcaga

SEQ ID NO: 45677 - DNA, 15 bp, Homo sapiens
ttgctttaatagcag

SEQ ID NO: 45678 - DNA, 15 bp, Homo sapiens
tttgctttaatagca

SEQ ID NO: 45679 - DNA, 15 bp, Homo sapiens
ttttgctttaatagc

SEQ ID NO: 45680 - DNA, 15 bp, Homo sapiens
attttgctttaatag

SEQ ID NO: 45681 - DNA, 15 bp, Homo sapiens
aattttgctttaata

SEQ ID NO: 45682 - DNA, 15 bp, Homo sapiens
taattttgctttaat

SEQ ID NO: 45683 - DNA, 15 bp, Homo sapiens
ttaattttgctttaa

SEQ ID NO: 45684 - DNA, 15 bp, Homo sapiens
attaattttgcttta

SEQ ID NO: 45685 - DNA, 15 bp, Homo sapiens
tattaattttgcttt

SEQ ID NO: 45686 - DNA, 15 bp, Homo sapiens
atattaattttgctt

SEQ ID NO: 45687 - DNA, 15 bp, Homo sapiens
tatattaattttgct

SEQ ID NO: 45688 - DNA, 15 bp, Homo sapiens
atatattaattttgc

SEQ ID NO: 45689 - DNA, 15 bp, Homo sapiens
tatatattaattttg

SEQ ID NO: 45690 - DNA, 15 bp, Homo sapiens
atatatattaatttt

SEQ ID NO: 45691 - DNA, 15 bp, Homo sapiens
aatatatattaattt

SEQ ID NO: 45692 - DNA, 15 bp, Homo sapiens
aaatatatattaatt

SEQ ID NO: 45693 - DNA, 15 bp, Homo sapiens
aaaatatatattaat

SEQ ID NO: 45694 - DNA, 15 bp, Homo sapiens
aaaaatatatattaa

SEQ ID NO: 45695 - DNA, 15 bp, Homo sapiens
aaaaaatatatatta

SEQ ID NO: 45696 - DNA, 15 bp, Homo sapiens
gaaaaaatatatatt

SEQ ID NO: 45697 - DNA, 15 bp, Homo sapiens
agaaaaaatatatat

SEQ ID NO: 45698 - DNA, 15 bp, Homo sapiens
aagaaaaaatatata

SEQ ID NO: 45699 - DNA, 15 bp, Homo sapiens
aaagaaaaaatatat

SEQ ID NO: 45700 - DNA, 15 bp, Homo sapiens
aaaagaaaaaatata

SEQ ID NO: 45701 - DNA, 15 bp, Homo sapiens
aaaaagaaaaaatat

SEQ ID NO: 45702 - DNA, 15 bp, Homo sapiens
taaaaagaaaaaata

SEQ ID NO: 45703 - DNA, 15 bp, Homo sapiens
gtaaaaagaaaaaat

SEQ ID NO: 45704 - DNA, 15 bp, Homo sapiens
agtaaaaagaaaaaa

SEQ ID NO: 45705 - DNA, 15 bp, Homo sapiens
aagtaaaaagaaaaa

SEQ ID NO: 45706 - DNA, 15 bp, Homo sapiens
aaagtaaaaagaaaa

SEQ ID NO: 45707 - DNA, 15 bp, Homo sapiens
aaaagtaaaaagaaa

SEQ ID NO: 45708 - DNA, 15 bp, Homo sapiens
aaaaagtaaaaagaa

SEQ ID NO: 45709 - DNA, 15 bp, Homo sapiens
aaaaaagtaaaaaga

SEQ ID NO: 45710 - DNA, 15 bp, Homo sapiens
aaaaaaagtaaaaag

SEQ ID NO: 45711 - DNA, 15 bp, Homo sapiens
aaaaaaaagtaaaaa

SEQ ID NO: 45712 - DNA, 15 bp, Homo sapiens
aaaaaaaaagtaaaa

SEQ ID NO: 45713 - DNA, 15 bp, Homo sapiens
aaaaaaaaaagtaaa

SEQ ID NO: 45714 - DNA, 15 bp, Homo sapiens
aaaaaaaaaaagtaa

SEQ ID NO: 45715 - DNA, 15 bp, Homo sapiens
tttaaaaaaaaaaaa

SEQ ID NO: 45716 - DNA, 15 bp, Homo sapiens
ctttaaaaaaaaaaa

SEQ ID NO: 45717 - DNA, 15 bp, Homo sapiens
tctttaaaaaaaaaa

SEQ ID NO: 45718 - DNA, 15 bp, Homo sapiens
gtctttaaaaaaaaa

SEQ ID NO: 45719 - DNA, 15 bp, Homo sapiens
tgtctttaaaaaaaa

SEQ ID NO: 45720 - DNA, 15 bp, Homo sapiens
atgtctttaaaaaaa

SEQ ID NO: 45721 - DNA, 15 bp, Homo sapiens
catgtctttaaaaaa

SEQ ID NO: 45722 - DNA, 15 bp, Homo sapiens
tcatgtctttaaaaa

SEQ ID NO: 45723 - DNA, 15 bp, Homo sapiens
ttcatgtctttaaaa

SEQ ID NO: 45724 - DNA, 15 bp, Homo sapiens
tttcatgtctttaaa

SEQ ID NO: 45725 - DNA, 15 bp, Homo sapiens
atttcatgtctttaa

SEQ ID NO: 45726 - DNA, 15 bp, Homo sapiens
gatttcatgtcttta

SEQ ID NO: 45727 - DNA, 15 bp, Homo sapiens
agatttcatgtcttt

SEQ ID NO: 45728 - DNA, 15 bp, Homo sapiens
gagatttcatgtctt

SEQ ID NO: 45729 - DNA, 15 bp, Homo sapiens
tgagatttcatgtct

SEQ ID NO: 45730 - DNA, 15 bp, Homo sapiens
gtgagatttcatgtc

SEQ ID NO: 45731 - DNA, 15 bp, Homo sapiens
agtgagatttcatgt

SEQ ID NO: 45732 - DNA, 15 bp, Homo sapiens
cagtgagatttcatg

SEQ ID NO: 45733 - DNA, 15 bp, Homo sapiens
acagtgagatttcat

SEQ ID NO: 45734 - DNA, 15 bp, Homo sapiens
tacagtgagatttca

SEQ ID NO: 45735 - DNA, 15 bp, Homo sapiens
atacagtgagatttc

SEQ ID NO: 45736 - DNA, 15 bp, Homo sapiens
aatacagtgagattt

SEQ ID NO: 45737 - DNA, 15 bp, Homo sapiens
caatacagtgagatt

SEQ ID NO: 45738 - DNA, 15 bp, Homo sapiens
gcaatacagtgagat

SEQ ID NO: 45739 - DNA, 15 bp, Homo sapiens
ggcaatacagtgaga

SEQ ID NO: 45740 - DNA, 15 bp, Homo sapiens
gggcaatacagtgag

SEQ ID NO: 45741 - DNA, 15 bp, Homo sapiens
tgggcaatacagtga

SEQ ID NO: 45742 - DNA, 15 bp, Homo sapiens
ctgggcaatacagtg

SEQ ID NO: 45743 - DNA, 15 bp, Homo sapiens
cctgggcaatacagt

SEQ ID NO: 45744 - DNA, 15 bp, Homo sapiens
gcctgggcaatacag

SEQ ID NO: 45745 - DNA, 15 bp, Homo sapiens
agcctgggcaataca

SEQ ID NO: 45746 - DNA, 15 bp, Homo sapiens
cagcctgggcaatac

SEQ ID NO: 45747 - DNA, 15 bp, Homo sapiens
accagcctgggcaat

SEQ ID NO: 45748 - DNA, 15 bp, Homo sapiens
aagaccagcctgggc

SEQ ID NO: 45749 - DNA, 15 bp, Homo sapiens
ccaagaccagcctgg

SEQ ID NO: 45750 - DNA, 15 bp, Homo sapiens
accaagaccagcctg

SEQ ID NO: 45751 - DNA, 15 bp, Homo sapiens
gaccaagaccagcct

SEQ ID NO: 45752 - DNA, 15 bp, Homo sapiens
agaccaagaccagcc

SEQ ID NO: 45753 - DNA, 15 bp, Homo sapiens
gagaccaagaccagc

SEQ ID NO: 45754 - DNA, 15 bp, Homo sapiens
tgagaccaagaccag

SEQ ID NO: 45755 - DNA, 15 bp, Homo sapiens
ctgagaccaagacca

SEQ ID NO: 45756 - DNA, 15 bp, Homo sapiens
tctgagaccaagacc

SEQ ID NO: 45757 - DNA, 15 bp, Homo sapiens
gtctgagaccaagac

SEQ ID NO: 45758 - DNA, 15 bp, Homo sapiens
agtctgagaccaaga

SEQ ID NO: 45759 - DNA, 15 bp, Homo sapiens
gagtctgagaccaag

SEQ ID NO: 45760 - DNA, 15 bp, Homo sapiens
agagtctgagaccaa

SEQ ID NO: 45761 - DNA, 15 bp, Homo sapiens
aagagtctgagacca

SEQ ID NO: 45762 - DNA, 15 bp, Homo sapiens
caagagtctgagacc

SEQ ID NO: 45763 - DNA, 15 bp, Homo sapiens
tcaagagtctgagac

SEQ ID NO: 45764 - DNA, 15 bp, Homo sapiens
ctcaagagtctgaga

SEQ ID NO: 45765 - DNA, 15 bp, Homo sapiens
gctcaagagtctgag

SEQ ID NO: 45766 - DNA, 15 bp, Homo sapiens
agctcaagagtctga

SEQ ID NO: 45767 - DNA, 15 bp, Homo sapiens
gagctcaagagtctg

SEQ ID NO: 45768 - DNA, 15 bp, Homo sapiens
tgagctcaagagtct

SEQ ID NO: 45769 - DNA, 15 bp, Homo sapiens
ttgagctcaagagtc

SEQ ID NO: 45770 - DNA, 15 bp, Homo sapiens
cttgagctcaagagt

SEQ ID NO: 45771 - DNA, 15 bp, Homo sapiens
gcttgagctcaagag

SEQ ID NO: 45772 - DNA, 15 bp, Homo sapiens
tgcttgagctcaaga

SEQ ID NO: 45773 - DNA, 15 bp, Homo sapiens
ctgcttgagctcaag

SEQ ID NO: 45774 - DNA, 15 bp, Homo sapiens
actgcttgagctcaa

SEQ ID NO: 45775 - DNA, 15 bp, Homo sapiens
gactgcttgagctca

SEQ ID NO: 45776 - DNA, 15 bp, Homo sapiens
ggactgcttgagctc

SEQ ID NO: 45777 - DNA, 15 bp, Homo sapiens
aggactgcttgagct

SEQ ID NO: 45778 - DNA, 15 bp, Homo sapiens
gaggactgcttgagc

SEQ ID NO: 45779 - DNA, 15 bp, Homo sapiens
ggaggactgcttgag

SEQ ID NO: 45780 - DNA, 15 bp, Homo sapiens
gggaggactgcttga

SEQ ID NO: 45781 - DNA, 15 bp, Homo sapiens
tgggaggactgcttg

SEQ ID NO: 45782 - DNA, 15 bp, Homo sapiens
gtgggaggactgctt

SEQ ID NO: 45783 - DNA, 15 bp, Homo sapiens
ggtgggaggactgct

SEQ ID NO: 45784 - DNA, 15 bp, Homo sapiens
aggtgggaggactgc

SEQ ID NO: 45785 - DNA, 15 bp, Homo sapiens
gaggtgggaggactg

SEQ ID NO: 45786 - DNA, 15 bp, Homo sapiens
tgaggtgggaggact

SEQ ID NO: 45787 - DNA, 15 bp, Homo sapiens
ctgaggtgggaggac

SEQ ID NO: 45788 - DNA, 15 bp, Homo sapiens
agctgaggtgggagg

SEQ ID NO: 45789 - DNA, 15 bp, Homo sapiens
aagctgaggtgggag

SEQ ID NO: 45790 - DNA, 15 bp, Homo sapiens
gaagctgaggtggga

SEQ ID NO: 45791 - DNA, 15 bp, Homo sapiens
ggaagctgaggtggg

SEQ ID NO: 45792 - DNA, 15 bp, Homo sapiens
gggaagctgaggtgg

SEQ ID NO: 45793 - DNA, 15 bp, Homo sapiens
tgggaagctgaggtg

SEQ ID NO: 45794 - DNA, 15 bp, Homo sapiens
ttgggaagctgaggt

SEQ ID NO: 45795 - DNA, 15 bp, Homo sapiens
tttgggaagctgagg

SEQ ID NO: 45796 - DNA, 15 bp, Homo sapiens
ctttgggaagctgag

SEQ ID NO: 45797 - DNA, 15 bp, Homo sapiens
actttgggaagctga

SEQ ID NO: 45798 - DNA, 15 bp, Homo sapiens
cactttgggaagctg

SEQ ID NO: 45799 - DNA, 15 bp, Homo sapiens
gcactttgggaagct

SEQ ID NO: 45800 - DNA, 15 bp, Homo sapiens
agcactttgggaagc

SEQ ID NO: 45801 - DNA, 15 bp, Homo sapiens
cagcactttgggaag

SEQ ID NO: 45802 - DNA, 15 bp, Homo sapiens
ccagcactttgggaa

SEQ ID NO: 45803 - DNA, 15 bp, Homo sapiens
cagctcatgcctata

SEQ ID NO: 45804 - DNA, 15 bp, Homo sapiens
gcagctcatgcctat

SEQ ID NO: 45805 - DNA, 15 bp, Homo sapiens
ggcagctcatgccta

SEQ ID NO: 45806 - DNA, 15 bp, Homo sapiens
cggcagctcatgcct

SEQ ID NO: 45807 - DNA, 15 bp, Homo sapiens
acggcagctcatgcc

SEQ ID NO: 45808 - DNA, 15 bp, Homo sapiens
cacggcagctcatgc

SEQ ID NO: 45809 - DNA, 15 bp, Homo sapiens
acacggcagctcatg

SEQ ID NO: 45810 - DNA, 15 bp, Homo sapiens
gacacggcagctcat

SEQ ID NO: 45811 - DNA, 15 bp, Homo sapiens
agacacggcagctca

SEQ ID NO: 45812 - DNA, 15 bp, Homo sapiens
cagacacggcagctc

SEQ ID NO: 45813 - DNA, 15 bp, Homo sapiens
ccagacacggcagct

SEQ ID NO: 45814 - DNA, 15 bp, Homo sapiens
gccagacacggcagc

SEQ ID NO: 45815 - DNA, 15 bp, Homo sapiens
ggccagacacggcag

SEQ ID NO: 45816 - DNA, 15 bp, Homo sapiens
gggccagacacggca

SEQ ID NO: 45817 - DNA, 15 bp, Homo sapiens
tgggccagacacggc

SEQ ID NO: 45818 - DNA, 15 bp, Homo sapiens
ctgggccagacacgg

SEQ ID NO: 45819 - DNA, 15 bp, Homo sapiens
actgggccagacacg

SEQ ID NO: 45820 - DNA, 15 bp, Homo sapiens
tactgggccagacac

SEQ ID NO: 45821 - DNA, 15 bp, Homo sapiens
atactgggccagaca

SEQ ID NO: 45822 - DNA, 15 bp, Homo sapiens
tatactgggccagac

SEQ ID NO: 45823 - DNA, 15 bp, Homo sapiens
atatactgggccaga

SEQ ID NO: 45824 - DNA, 15 bp, Homo sapiens
tatatactgggccag

SEQ ID NO: 45825 - DNA, 15 bp, Homo sapiens
atatatactgggcca

SEQ ID NO: 45826 - DNA, 15 bp, Homo sapiens
aatatatactgggcc

SEQ ID NO: 45827 - DNA, 15 bp, Homo sapiens
aaatatatactgggc

SEQ ID NO: 45828 - DNA, 15 bp, Homo sapiens
aaaatatatactggg

SEQ ID NO: 45829 - DNA, 15 bp, Homo sapiens
aaaaatatatactgg

SEQ ID NO: 45830 - DNA, 15 bp, Homo sapiens
aaaaaatatatactg

SEQ ID NO: 45831 - DNA, 15 bp, Homo sapiens
taaaaaatatatact

SEQ ID NO: 45832 - DNA, 15 bp, Homo sapiens
ttaaaaaatatatac

SEQ ID NO: 45833 - DNA, 15 bp, Homo sapiens
cttaaaaaatatata

SEQ ID NO: 45834 - DNA, 15 bp, Homo sapiens
acttaaaaaatatat

SEQ ID NO: 45835 - DNA, 15 bp, Homo sapiens
aacttaaaaaatata

SEQ ID NO: 45836 - DNA, 15 bp, Homo sapiens
aaacttaaaaaatat

SEQ ID NO: 45837 - DNA, 15 bp, Homo sapiens
aaaacttaaaaaata

SEQ ID NO: 45838 - DNA, 15 bp, Homo sapiens
taaaacttaaaaaat

SEQ ID NO: 45839 - DNA, 15 bp, Homo sapiens
ttaaaacttaaaaaa

SEQ ID NO: 45840 - DNA, 15 bp, Homo sapiens
cttaaaacttaaaaa

SEQ ID NO: 45841 - DNA, 15 bp, Homo sapiens
acttaaaacttaaaa

SEQ ID NO: 45842 - DNA, 15 bp, Homo sapiens
aacttaaaacttaaa

SEQ ID NO: 45843 - DNA, 15 bp, Homo sapiens
aaacttaaaacttaa

SEQ ID NO: 45844 - DNA, 15 bp, Homo sapiens
aaaacttaaaactta

SEQ ID NO: 45845 - DNA, 15 bp, Homo sapiens
caaaacttaaaactt

SEQ ID NO: 45846 - DNA, 15 bp, Homo sapiens
acaaaacttaaaact

SEQ ID NO: 45847 - DNA, 15 bp, Homo sapiens
cacaaaacttaaaac

SEQ ID NO: 45848 - DNA, 15 bp, Homo sapiens
ccacaaaacttaaaa

SEQ ID NO: 45849 - DNA, 15 bp, Homo sapiens
accacaaaacttaaa

SEQ ID NO: 45850 - DNA, 15 bp, Homo sapiens
taccacaaaacttaa

SEQ ID NO: 45851 - DNA, 15 bp, Homo sapiens
gtaccacaaaactta

SEQ ID NO: 45852 - DNA, 15 bp, Homo sapiens
cgtaccacaaaactt

SEQ ID NO: 45853 - DNA, 15 bp, Homo sapiens
acgtaccacaaaact

SEQ ID NO: 45854 - DNA, 15 bp, Homo sapiens
tacgtaccacaaaac

SEQ ID NO: 45855 - DNA, 15 bp, Homo sapiens
ctacgtaccacaaaa

SEQ ID NO: 45856 - DNA, 15 bp, Homo sapiens
actacgtaccacaaa

SEQ ID NO: 45857 - DNA, 15 bp, Homo sapiens
tactacgtaccacaa

SEQ ID NO: 45858 - DNA, 15 bp, Homo sapiens
ctactacgtaccaca

SEQ ID NO: 45859 - DNA, 15 bp, Homo sapiens
cctactacgtaccac

SEQ ID NO: 45860 - DNA, 15 bp, Homo sapiens
acctactacgtacca

SEQ ID NO: 45861 - DNA, 15 bp, Homo sapiens
aacctactacgtacc

SEQ ID NO: 45862 - DNA, 15 bp, Homo sapiens
aaacctactacgtac

SEQ ID NO: 45863 - DNA, 15 bp, Homo sapiens
taaacctactacgta

SEQ ID NO: 45864 - DNA, 15 bp, Homo sapiens
ataaacctactacgt

SEQ ID NO: 45865 - DNA, 15 bp, Homo sapiens
tataaacctactacg

SEQ ID NO: 45866 - DNA, 15 bp, Homo sapiens
ttataaacctactac

SEQ ID NO: 45867 - DNA, 15 bp, Homo sapiens
attataaacctacta

SEQ ID NO: 45868 - DNA, 15 bp, Homo sapiens
tattataaacctact

SEQ ID NO: 45869 - DNA, 15 bp, Homo sapiens
atattataaacctac

SEQ ID NO: 45870 - DNA, 15 bp, Homo sapiens
aatattataaaccta

SEQ ID NO: 45871 - DNA, 15 bp, Homo sapiens
taatattataaacct

SEQ ID NO: 45872 - DNA, 15 bp, Homo sapiens
ataatattataaacc

SEQ ID NO: 45873 - DNA, 15 bp, Homo sapiens
aataatattataaac

SEQ ID NO: 45874 - DNA, 15 bp, Homo sapiens
aaataatattataaa

SEQ ID NO: 45875 - DNA, 15 bp, Homo sapiens
aaaataatattataa

SEQ ID NO: 45876 - DNA, 15 bp, Homo sapiens
caaaataatattata

SEQ ID NO: 45877 - DNA, 15 bp, Homo sapiens
tcaaaataatattat

SEQ ID NO: 45878 - DNA, 15 bp, Homo sapiens
ttcaaaataatatta

SEQ ID NO: 45879 - DNA, 15 bp, Homo sapiens
attcaaaataatatt

SEQ ID NO: 45880 - DNA, 15 bp, Homo sapiens
gattcaaaataatat

SEQ ID NO: 45881 - DNA, 15 bp, Homo sapiens
ggattcaaaataata

SEQ ID NO: 45882 - DNA, 15 bp, Homo sapiens
aggattcaaaataat

SEQ ID NO: 45883 - DNA, 15 bp, Homo sapiens
aaggattcaaaataa

SEQ ID NO: 45884 - DNA, 15 bp, Homo sapiens
taaggattcaaaata

SEQ ID NO: 45885 - DNA, 15 bp, Homo sapiens
ctaaggattcaaaat

SEQ ID NO: 45886 - DNA, 15 bp, Homo sapiens
actaaggattcaaaa

SEQ ID NO: 45887 - DNA, 15 bp, Homo sapiens
aactaaggattcaaa

SEQ ID NO: 45888 - DNA, 15 bp, Homo sapiens
caactaaggattcaa

SEQ ID NO: 45889 - DNA, 15 bp, Homo sapiens
acaactaaggattca

SEQ ID NO: 45890 - DNA, 15 bp, Homo sapiens
tacaactaaggattc

SEQ ID NO: 45891 - DNA, 15 bp, Homo sapiens
ttacaactaaggatt

SEQ ID NO: 45892 - DNA, 15 bp, Homo sapiens
attacaactaaggat

SEQ ID NO: 45893 - DNA, 15 bp, Homo sapiens
aattacaactaagga

SEQ ID NO: 45894 - DNA, 15 bp, Homo sapiens
aaattacaactaagg

SEQ ID NO: 45895 - DNA, 15 bp, Homo sapiens
aaaattacaactaag

SEQ ID NO: 45896 - DNA, 15 bp, Homo sapiens
taaaattacaactaa

SEQ ID NO: 45897 - DNA, 15 bp, Homo sapiens
ataaaattacaacta

SEQ ID NO: 45898 - DNA, 15 bp, Homo sapiens
cataaaattacaact

SEQ ID NO: 45899 - DNA, 15 bp, Homo sapiens
acataaaattacaac

SEQ ID NO: 45900 - DNA, 15 bp, Homo sapiens
gacataaaattacaa

SEQ ID NO: 45901 - DNA, 15 bp, Homo sapiens
agacataaaattaca

SEQ ID NO: 45902 - DNA, 15 bp, Homo sapiens
cagacataaaattac

SEQ ID NO: 45903 - DNA, 15 bp, Homo sapiens
gcagacataaaatta

SEQ ID NO: 45904 - DNA, 15 bp, Homo sapiens
agcagacataaaatt

SEQ ID NO: 45905 - DNA, 15 bp, Homo sapiens
cagcagacataaaat

SEQ ID NO: 45906 - DNA, 15 bp, Homo sapiens
tcagcagacataaaa

SEQ ID NO: 45907 - DNA, 15 bp, Homo sapiens
atcagcagacataaa

SEQ ID NO: 45908 - DNA, 15 bp, Homo sapiens
catcagcagacataa

SEQ ID NO: 45909 - DNA, 15 bp, Homo sapiens
acatcagcagacata

SEQ ID NO: 45910 - DNA, 15 bp, Homo sapiens
cacatcagcagacat

SEQ ID NO: 45911 - DNA, 15 bp, Homo sapiens
acacatcagcagaca

SEQ ID NO: 45912 - DNA, 15 bp, Homo sapiens
tacacatcagcagac

SEQ ID NO: 45913 - DNA, 15 bp, Homo sapiens
gtacacatcagcaga

SEQ ID NO: 45914 - DNA, 15 bp, Homo sapiens
tgtacacatcagcag

SEQ ID NO: 45915 - DNA, 15 bp, Homo sapiens
atgtacacatcagca

SEQ ID NO: 45916 - DNA, 15 bp, Homo sapiens
tatgtacacatcagc

SEQ ID NO: 45917 - DNA, 15 bp, Homo sapiens
ttatgtacacatcag

SEQ ID NO: 45918 - DNA, 15 bp, Homo sapiens
attatgtacacatca

SEQ ID NO: 45919 - DNA, 15 bp, Homo sapiens
aattatgtacacatc

SEQ ID NO: 45920 - DNA, 15 bp, Homo sapiens
aaattatgtacacat

SEQ ID NO: 45921 - DNA, 15 bp, Homo sapiens
aaaattatgtacaca

SEQ ID NO: 45922 - DNA, 15 bp, Homo sapiens
aaaaattatgtacac

SEQ ID NO: 45923 - DNA, 15 bp, Homo sapiens
taaaaattatgtaca

SEQ ID NO: 45924 - DNA, 15 bp, Homo sapiens
ataaaaattatgtac

SEQ ID NO: 45925 - DNA, 15 bp, Homo sapiens
aataaaaattatgta

SEQ ID NO: 45926 - DNA, 15 bp, Homo sapiens
taataaaaattatgt

SEQ ID NO: 45927 - DNA, 15 bp, Homo sapiens
ttaataaaaattatg

SEQ ID NO: 45928 - DNA, 15 bp, Homo sapiens
tttaataaaaattat

SEQ ID NO: 45929 - DNA, 15 bp, Homo sapiens
gtttaataaaaatta

SEQ ID NO: 45930 - DNA, 15 bp, Homo sapiens
agtttaataaaaatt

SEQ ID NO: 45931 - DNA, 15 bp, Homo sapiens
tagtttaataaaaat

SEQ ID NO: 45932 - DNA, 15 bp, Homo sapiens
atagtttaataaaaa

SEQ ID NO: 45933 - DNA, 15 bp, Homo sapiens
aatagtttaataaaa

SEQ ID NO: 45934 - DNA, 15 bp, Homo sapiens
aaatagtttaataaa

SEQ ID NO: 45935 - DNA, 15 bp, Homo sapiens
taaatagtttaataa

SEQ ID NO: 45936 - DNA, 15 bp, Homo sapiens
ataaatagtttaata

SEQ ID NO: 45937 - DNA, 15 bp, Homo sapiens
aataaatagtttaat

SEQ ID NO: 45938 - DNA, 15 bp, Homo sapiens
aaataaatagtttaa

SEQ ID NO: 45939 - DNA, 15 bp, Homo sapiens
caaataaatagttta

SEQ ID NO: 45940 - DNA, 15 bp, Homo sapiens
tcaaataaatagttt

SEQ ID NO: 45941 - DNA, 15 bp, Homo sapiens
ctcaaataaatagtt

SEQ ID NO: 45942 - DNA, 15 bp, Homo sapiens
tctcaaataaatagt

SEQ ID NO: 45943 - DNA, 15 bp, Homo sapiens
gtctcaaataaatag

SEQ ID NO: 45944 - DNA, 15 bp, Homo sapiens
agtctcaaataaata

SEQ ID NO: 45945 - DNA, 15 bp, Homo sapiens
aagtctcaaataaat

SEQ ID NO: 45946 - DNA, 15 bp, Homo sapiens
gaagtctcaaataaa

SEQ ID NO: 45947 - DNA, 15 bp, Homo sapiens
tgaagtctcaaataa

SEQ ID NO: 45948 - DNA, 15 bp, Homo sapiens
ctgaagtctcaaata

SEQ ID NO: 45949 - DNA, 15 bp, Homo sapiens
cctgaagtctcaaat

SEQ ID NO: 45950 - DNA, 15 bp, Homo sapiens
acctgaagtctcaaa

SEQ ID NO: 45951 - DNA, 15 bp, Homo sapiens
tacctgaagtctcaa

SEQ ID NO: 45952 - DNA, 15 bp, Homo sapiens
atacctgaagtctca

SEQ ID NO: 45953 - DNA, 15 bp, Homo sapiens
gatacctgaagtctc

SEQ ID NO: 45954 - DNA, 15 bp, Homo sapiens
agatacctgaagtct

SEQ ID NO: 45955 - DNA, 15 bp, Homo sapiens
aagatacctgaagtc

SEQ ID NO: 45956 - DNA, 15 bp, Homo sapiens
aaagatacctgaagt

SEQ ID NO: 45957 - DNA, 15 bp, Homo sapiens
aaaagatacctgaag

SEQ ID NO: 45958 - DNA, 15 bp, Homo sapiens
aaaaagatacctgaa

SEQ ID NO: 45959 - DNA, 15 bp, Homo sapiens
aaaaaagatacctga

SEQ ID NO: 45960 - DNA, 15 bp, Homo sapiens
aaaaaaagatacctg

SEQ ID NO: 45961 - DNA, 15 bp, Homo sapiens
aaaaaaaagatacct

SEQ ID NO: 45962 - DNA, 15 bp, Homo sapiens
aaaaaaaaagatacc

SEQ ID NO: 45963 - DNA, 15 bp, Homo sapiens
aaaaaaaaaagatac

SEQ ID NO: 45964 - DNA, 15 bp, Homo sapiens
tgcgagactccgtct

SEQ ID NO: 45965 - DNA, 15 bp, Homo sapiens
gtgcgagactccgtc

SEQ ID NO: 45966 - DNA, 15 bp, Homo sapiens
agtgcgagactccgt

SEQ ID NO: 45967 - DNA, 15 bp, Homo sapiens
gagtgcgagactccg

SEQ ID NO: 45968 - DNA, 15 bp, Homo sapiens
agagtgcgagactcc

SEQ ID NO: 45969 - DNA, 15 bp, Homo sapiens
gagagtgcgagactc

SEQ ID NO: 45970 - DNA, 15 bp, Homo sapiens
cgagagtgcgagact

SEQ ID NO: 45971 - DNA, 15 bp, Homo sapiens
gcgagagtgcgagac

SEQ ID NO: 45972 - DNA, 15 bp, Homo sapiens
ggcgagagtgcgaga

SEQ ID NO: 45973 - DNA, 15 bp, Homo sapiens
gggcgagagtgcgag

SEQ ID NO: 45974 - DNA, 15 bp, Homo sapiens
tgggcgagagtgcga

SEQ ID NO: 45975 - DNA, 15 bp, Homo sapiens
ctgggcgagagtgcg

SEQ ID NO: 45976 - DNA, 15 bp, Homo sapiens
cctgggcgagagtgc

SEQ ID NO: 45977 - DNA, 15 bp, Homo sapiens
gcctgggcgagagtg

SEQ ID NO: 45978 - DNA, 15 bp, Homo sapiens
agcctgggcgagagt

SEQ ID NO: 45979 - DNA, 15 bp, Homo sapiens
tagcctgggcgagag

SEQ ID NO: 45980 - DNA, 15 bp, Homo sapiens
ctagcctgggcgaga

SEQ ID NO: 45981 - DNA, 15 bp, Homo sapiens
tctagcctgggcgag

SEQ ID NO: 45982 - DNA, 15 bp, Homo sapiens
ctctagcctgggcga

SEQ ID NO: 45983 - DNA, 15 bp, Homo sapiens
actctagcctgggcg

SEQ ID NO: 45984 - DNA, 15 bp, Homo sapiens
cactctagcctgggc

SEQ ID NO: 45985 - DNA, 15 bp, Homo sapiens
gcactctagcctggg

SEQ ID NO: 45986 - DNA, 15 bp, Homo sapiens
tgcactctagcctgg

SEQ ID NO: 45987 - DNA, 15 bp, Homo sapiens
ctgcactctagcctg

SEQ ID NO: 45988 - DNA, 15 bp, Homo sapiens
actgcactctagcct

SEQ ID NO: 45989 - DNA, 15 bp, Homo sapiens
cactgcactctagcc

SEQ ID NO: 45990 - DNA, 15 bp, Homo sapiens
ccactgcactctagc

SEQ ID NO: 45991 - DNA, 15 bp, Homo sapiens
gccactgcactctag

SEQ ID NO: 45992 - DNA, 15 bp, Homo sapiens
cgccactgcactcta

SEQ ID NO: 45993 - DNA, 15 bp, Homo sapiens
gcgccactgcactct

SEQ ID NO: 45994 - DNA, 15 bp, Homo sapiens
aagccgagatggcgc

SEQ ID NO: 45995 - DNA, 15 bp, Homo sapiens
taagccgagatggcg

SEQ ID NO: 45996 - DNA, 15 bp, Homo sapiens
gtaagccgagatggc

SEQ ID NO: 45997 - DNA, 15 bp, Homo sapiens
agtaagccgagatgg

SEQ ID NO: 45998 - DNA, 15 bp, Homo sapiens
cagtaagccgagatg

SEQ ID NO: 45999 - DNA, 15 bp, Homo sapiens
gcagtaagccgagat

SEQ ID NO: 46000 - DNA, 15 bp, Homo sapiens
tgcagtaagccgaga

SEQ ID NO: 46001 - DNA, 15 bp, Homo sapiens
ttgcagtaagccgag

SEQ ID NO: 46002 - DNA, 15 bp, Homo sapiens
cttgcagtaagccga

SEQ ID NO: 46003 - DNA, 15 bp, Homo sapiens
gcttgcagtaagccg

SEQ ID NO: 46004 - DNA, 15 bp, Homo sapiens
agcttgcagtaagcc

SEQ ID NO: 46005 - DNA, 15 bp, Homo sapiens
gagcttgcagtaagc

SEQ ID NO: 46006 - DNA, 15 bp, Homo sapiens
agagcttgcagtaag

SEQ ID NO: 46007 - DNA, 15 bp, Homo sapiens
cagagcttgcagtaa

SEQ ID NO: 46008 - DNA, 15 bp, Homo sapiens
gcagagcttgcagta

SEQ ID NO: 46009 - DNA, 15 bp, Homo sapiens
agcagagcttgcagt

SEQ ID NO: 46010 - DNA, 15 bp, Homo sapiens
aagcagagcttgcag

SEQ ID NO: 46011 - DNA, 15 bp, Homo sapiens
gaagcagagcttgca

SEQ ID NO: 46012 - DNA, 15 bp, Homo sapiens
ggaagcagagcttgc

SEQ ID NO: 46013 - DNA, 15 bp, Homo sapiens
aggaagcagagcttg

SEQ ID NO: 46014 - DNA, 15 bp, Homo sapiens
caggaagcagagctt

SEQ ID NO: 46015 - DNA, 15 bp, Homo sapiens
ccaggaagcagagct

SEQ ID NO: 46016 - DNA, 15 bp, Homo sapiens
cccaggaagcagagc

SEQ ID NO: 46017 - DNA, 15 bp, Homo sapiens
acccaggaagcagag

SEQ ID NO: 46018 - DNA, 15 bp, Homo sapiens
aacccaggaagcaga

SEQ ID NO: 46019 - DNA, 15 bp, Homo sapiens
gaacccaggaagcag

SEQ ID NO: 46020 - DNA, 15 bp, Homo sapiens
tgaacccaggaagca

SEQ ID NO: 46021 - DNA, 15 bp, Homo sapiens
gtgaacccaggaagc

SEQ ID NO: 46022 - DNA, 15 bp, Homo sapiens
cgtgaacccaggaag

SEQ ID NO: 46023 - DNA, 15 bp, Homo sapiens
gcgtgaacccaggaa

SEQ ID NO: 46024 - DNA, 15 bp, Homo sapiens
tcagctactcaggag

SEQ ID NO: 46025 - DNA, 15 bp, Homo sapiens
ctcagctactcagga

SEQ ID NO: 46026 - DNA, 15 bp, Homo sapiens
tctcagctactcagg

SEQ ID NO: 46027 - DNA, 15 bp, Homo sapiens
gtctcagctactcag

SEQ ID NO: 46028 - DNA, 15 bp, Homo sapiens
agtctcagctactca

SEQ ID NO: 46029 - DNA, 15 bp, Homo sapiens
tagtctcagctactc

SEQ ID NO: 46030 - DNA, 15 bp, Homo sapiens
gtagtctcagctact

SEQ ID NO: 46031 - DNA, 15 bp, Homo sapiens
tgtagtctcagctac

SEQ ID NO: 46032 - DNA, 15 bp, Homo sapiens
ctgtagtctcagcta

SEQ ID NO: 46033 - DNA, 15 bp, Homo sapiens
cctgtagtctcagct

SEQ ID NO: 46034 - DNA, 15 bp, Homo sapiens
acctgtagtctcagc

SEQ ID NO: 46035 - DNA, 15 bp, Homo sapiens
cacctgtagtctcag

SEQ ID NO: 46036 - DNA, 15 bp, Homo sapiens
gcacctgtagtctca

SEQ ID NO: 46037 - DNA, 15 bp, Homo sapiens
ggcacctgtagtctc

SEQ ID NO: 46038 - DNA, 15 bp, Homo sapiens
gggcacctgtagtct

SEQ ID NO: 46039 - DNA, 15 bp, Homo sapiens
cgggcacctgtagtc

SEQ ID NO: 46040 - DNA, 15 bp, Homo sapiens
gcgggcacctgtagt

SEQ ID NO: 46041 - DNA, 15 bp, Homo sapiens
ggcgggcacctgtag

SEQ ID NO: 46042 - DNA, 15 bp, Homo sapiens
tggcgggcacctgta

SEQ ID NO: 46043 - DNA, 15 bp, Homo sapiens
gtggcgggcacctgt

SEQ ID NO: 46044 - DNA, 15 bp, Homo sapiens
ggtggcgggcacctg

SEQ ID NO: 46045 - DNA, 15 bp, Homo sapiens
tggtggcgggcacct

SEQ ID NO: 46046 - DNA, 15 bp, Homo sapiens
gtggtggcgggcacc

SEQ ID NO: 46047 - DNA, 15 bp, Homo sapiens
cgtggtggcgggcac

SEQ ID NO: 46048 - DNA, 15 bp, Homo sapiens
gcgtggtggcgggca

SEQ ID NO: 46049 - DNA, 15 bp, Homo sapiens
aggcgtggtggcggg

SEQ ID NO: 46050 - DNA, 15 bp, Homo sapiens
caggcgtggtggcgg

SEQ ID NO: 46051 - DNA, 15 bp, Homo sapiens
ccaggcgtggtggcg

SEQ ID NO: 46052 - DNA, 15 bp, Homo sapiens
gccaggcgtggtggc

SEQ ID NO: 46053 - DNA, 15 bp, Homo sapiens
aaaaattagccaggc

SEQ ID NO: 46054 - DNA, 15 bp, Homo sapiens
aaaaaattagccagg

SEQ ID NO: 46055 - DNA, 15 bp, Homo sapiens
caaaaaattagccag

SEQ ID NO: 46056 - DNA, 15 bp, Homo sapiens
cggtgaaaccctgtc

SEQ ID NO: 46057 - DNA, 15 bp, Homo sapiens
acggtgaaaccctgt

SEQ ID NO: 46058 - DNA, 15 bp, Homo sapiens
cacggtgaaaccctg

SEQ ID NO: 46059 - DNA, 15 bp, Homo sapiens
agatcacaaggtcag

SEQ ID NO: 46060 - DNA, 15 bp, Homo sapiens
cagatcacaaggtca

SEQ ID NO: 46061 - DNA, 15 bp, Homo sapiens
gcagatcacaaggtc

SEQ ID NO: 46062 - DNA, 15 bp, Homo sapiens
ggcagatcacaaggt

SEQ ID NO: 46063 - DNA, 15 bp, Homo sapiens
gggcagatcacaagg

SEQ ID NO: 46064 - DNA, 15 bp, Homo sapiens
cgggcagatcacaag

SEQ ID NO: 46065 - DNA, 15 bp, Homo sapiens
gcgggcagatcacaa

SEQ ID NO: 46066 - DNA, 15 bp, Homo sapiens
ggcgggcagatcaca

SEQ ID NO: 46067 - DNA, 15 bp, Homo sapiens
gaggcgggcagatca

SEQ ID NO: 46068 - DNA, 15 bp, Homo sapiens
tgaggcgggcagatc

SEQ ID NO: 46069 - DNA, 15 bp, Homo sapiens
ctgaggcgggcagat

SEQ ID NO: 46070 - DNA, 15 bp, Homo sapiens
gctgaggcgggcaga

SEQ ID NO: 46071 - DNA, 15 bp, Homo sapiens
ggctgaggcgggcag

SEQ ID NO: 46072 - DNA, 15 bp, Homo sapiens
aggctgaggcgggca

SEQ ID NO: 46073 - DNA, 15 bp, Homo sapiens
gaggctgaggcgggc

SEQ ID NO: 46074 - DNA, 15 bp, Homo sapiens
tgggcgcggtggctc

SEQ ID NO: 46075 - DNA, 15 bp, Homo sapiens
ctgggcgcggtggct

SEQ ID NO: 46076 - DNA, 15 bp, Homo sapiens
gctgggcgcggtggc

SEQ ID NO: 46077 - DNA, 15 bp, Homo sapiens
ggctgggcgcggtgg

SEQ ID NO: 46078 - DNA, 15 bp, Homo sapiens
cggctgggcgcggtg

SEQ ID NO: 46079 - DNA, 15 bp, Homo sapiens
tcggctgggcgcggt

SEQ ID NO: 46080 - DNA, 15 bp, Homo sapiens
ctcggctgggcgcgg

SEQ ID NO: 46081 - DNA, 15 bp, Homo sapiens
tctcggctgggcgcg

SEQ ID NO: 46082 - DNA, 15 bp, Homo sapiens
gtctcggctgggcgc

SEQ ID NO: 46083 - DNA, 15 bp, Homo sapiens
agtctcggctgggcg

SEQ ID NO: 46084 - DNA, 15 bp, Homo sapiens
aagtctcggctgggc

SEQ ID NO: 46085 - DNA, 15 bp, Homo sapiens
gaagtctcggctggg

SEQ ID NO: 46086 - DNA, 15 bp, Homo sapiens
tgaagtctcggctgg

SEQ ID NO: 46087 - DNA, 15 bp, Homo sapiens
ctgaagtctcggctg

SEQ ID NO: 46088 - DNA, 15 bp, Homo sapiens
cctgaagtctcggct

SEQ ID NO: 46089 - DNA, 15 bp, Homo sapiens
acctgaagtctcggc

SEQ ID NO: 46090 - DNA, 15 bp, Homo sapiens
cacctgaagtctcgg

SEQ ID NO: 46091 - DNA, 15 bp, Homo sapiens
acacctgaagtctcg

SEQ ID NO: 46092 - DNA, 15 bp, Homo sapiens
gacacctgaagtctc

SEQ ID NO: 46093 - DNA, 15 bp, Homo sapiens
agacacctgaagtct

SEQ ID NO: 46094 - DNA, 15 bp, Homo sapiens
aagacacctgaagtc

SEQ ID NO: 46095 - DNA, 15 bp, Homo sapiens
taagacacctgaagt

SEQ ID NO: 46096 - DNA, 15 bp, Homo sapiens
ctaagacacctgaag

SEQ ID NO: 46097 - DNA, 15 bp, Homo sapiens
tctaagacacctgaa

SEQ ID NO: 46098 - DNA, 15 bp, Homo sapiens
ttctaagacacctga

SEQ ID NO: 46099 - DNA, 15 bp, Homo sapiens
attctaagacacctg

SEQ ID NO: 46100 - DNA, 15 bp, Homo sapiens
aattctaagacacct

SEQ ID NO: 46101 - DNA, 15 bp, Homo sapiens
aaattctaagacacc

SEQ ID NO: 46102 - DNA, 15 bp, Homo sapiens
aaaattctaagacac

SEQ ID NO: 46103 - DNA, 15 bp, Homo sapiens
aaaaattctaagaca

SEQ ID NO: 46104 - DNA, 15 bp, Homo sapiens
aaaaaattctaagac

SEQ ID NO: 46105 - DNA, 15 bp, Homo sapiens
taaaaaattctaaga

SEQ ID NO: 46106 - DNA, 15 bp, Homo sapiens
ttaaaaaattctaag

SEQ ID NO: 46107 - DNA, 15 bp, Homo sapiens
tttaaaaaattctaa

SEQ ID NO: 46108 - DNA, 15 bp, Homo sapiens
atttaaaaaattcta

SEQ ID NO: 46109 - DNA, 15 bp, Homo sapiens
catttaaaaaattct

SEQ ID NO: 46110 - DNA, 15 bp, Homo sapiens
acatttaaaaaattc

SEQ ID NO: 46111 - DNA, 15 bp, Homo sapiens
tacatttaaaaaatt

SEQ ID NO: 46112 - DNA, 15 bp, Homo sapiens
gtacatttaaaaaat

SEQ ID NO: 46113 - DNA, 15 bp, Homo sapiens
ggtacatttaaaaaa

SEQ ID NO: 46114 - DNA, 15 bp, Homo sapiens
gggtacatttaaaaa

SEQ ID NO: 46115 - DNA, 15 bp, Homo sapiens
agggtacatttaaaa

SEQ ID NO: 46116 - DNA, 15 bp, Homo sapiens
aagggtacatttaaa

SEQ ID NO: 46117 - DNA, 15 bp, Homo sapiens
aaagggtacatttaa

SEQ ID NO: 46118 - DNA, 15 bp, Homo sapiens
gaaagggtacattta

SEQ ID NO: 46119 - DNA, 15 bp, Homo sapiens
agaaagggtacattt

SEQ ID NO: 46120 - DNA, 15 bp, Homo sapiens
cagaaagggtacatt

SEQ ID NO: 46121 - DNA, 15 bp, Homo sapiens
tcagaaagggtacat

SEQ ID NO: 46122 - DNA, 15 bp, Homo sapiens
ctcagaaagggtaca

SEQ ID NO: 46123 - DNA, 15 bp, Homo sapiens
tctcagaaagggtac

SEQ ID NO: 46124 - DNA, 15 bp, Homo sapiens
ttctcagaaagggta

SEQ ID NO: 46125 - DNA, 15 bp, Homo sapiens
tttctcagaaagggt

SEQ ID NO: 46126 - DNA, 15 bp, Homo sapiens
ttttctcagaaaggg

SEQ ID NO: 46127 - DNA, 15 bp, Homo sapiens
tttttctcagaaagg

SEQ ID NO: 46128 - DNA, 15 bp, Homo sapiens
gtttttctcagaaag

SEQ ID NO: 46129 - DNA, 15 bp, Homo sapiens
tgtttttctcagaaa

SEQ ID NO: 46130 - DNA, 15 bp, Homo sapiens
ctgtttttctcagaa

SEQ ID NO: 46131 - DNA, 15 bp, Homo sapiens
tctgtttttctcaga

SEQ ID NO: 46132 - DNA, 15 bp, Homo sapiens
ctctgtttttctcag

SEQ ID NO: 46133 - DNA, 15 bp, Homo sapiens
tctctgtttttctca

SEQ ID NO: 46134 - DNA, 15 bp, Homo sapiens
gtctctgtttttctc

SEQ ID NO: 46135 - DNA, 15 bp, Homo sapiens
agtctctgtttttct

SEQ ID NO: 46136 - DNA, 15 bp, Homo sapiens
aagtctctgtttttc

SEQ ID NO: 46137 - DNA, 15 bp, Homo sapiens
taagtctctgttttt

SEQ ID NO: 46138 - DNA, 15 bp, Homo sapiens
ttaagtctctgtttt

SEQ ID NO: 46139 - DNA, 15 bp, Homo sapiens
tttaagtctctgttt

SEQ ID NO: 46140 - DNA, 15 bp, Homo sapiens
ctttaagtctctgtt

SEQ ID NO: 46141 - DNA, 15 bp, Homo sapiens
gctttaagtctctgt

SEQ ID NO: 46142 - DNA, 15 bp, Homo sapiens
agctttaagtctctg

SEQ ID NO: 46143 - DNA, 15 bp, Homo sapiens
tagctttaagtctct

SEQ ID NO: 46144 - DNA, 15 bp, Homo sapiens
ctagctttaagtctc

SEQ ID NO: 46145 - DNA, 15 bp, Homo sapiens
cctagctttaagtct

SEQ ID NO: 46146 - DNA, 15 bp, Homo sapiens
tcctagctttaagtc

SEQ ID NO: 46147 - DNA, 15 bp, Homo sapiens
atcctagctttaagt

SEQ ID NO: 46148 - DNA, 15 bp, Homo sapiens
tatcctagctttaag

SEQ ID NO: 46149 - DNA, 15 bp, Homo sapiens
ttatcctagctttaa

SEQ ID NO: 46150 - DNA, 15 bp, Homo sapiens
gttatcctagcttta

SEQ ID NO: 46151 - DNA, 15 bp, Homo sapiens
agttatcctagcttt

SEQ ID NO: 46152 - DNA, 15 bp, Homo sapiens
cagttatcctagctt

SEQ ID NO: 46153 - DNA, 15 bp, Homo sapiens
ccagttatcctagct

SEQ ID NO: 46154 - DNA, 15 bp, Homo sapiens
accagttatcctagc

SEQ ID NO: 46155 - DNA, 15 bp, Homo sapiens
taccagttatcctag

SEQ ID NO: 46156 - DNA, 15 bp, Homo sapiens
ataccagttatccta

SEQ ID NO: 46157 - DNA, 15 bp, Homo sapiens
aataccagttatcct

SEQ ID NO: 46158 - DNA, 15 bp, Homo sapiens
gaataccagttatcc

SEQ ID NO: 46159 - DNA, 15 bp, Homo sapiens
agaataccagttatc

SEQ ID NO: 46160 - DNA, 15 bp, Homo sapiens
tagaataccagttat

SEQ ID NO: 46161 - DNA, 15 bp, Homo sapiens
atagaataccagtta

SEQ ID NO: 46162 - DNA, 15 bp, Homo sapiens
aatagaataccagtt

SEQ ID NO: 46163 - DNA, 15 bp, Homo sapiens
aaatagaataccagt

SEQ ID NO: 46164 - DNA, 15 bp, Homo sapiens
aaaatagaataccag

SEQ ID NO: 46165 - DNA, 15 bp, Homo sapiens
aaaaatagaatacca

SEQ ID NO: 46166 - DNA, 15 bp, Homo sapiens
aaaaaatagaatacc

SEQ ID NO: 46167 - DNA, 15 bp, Homo sapiens
aaaaaaatagaatac

SEQ ID NO: 46168 - DNA, 15 bp, Homo sapiens
aaaaaaaatagaata

SEQ ID NO: 46169 - DNA, 15 bp, Homo sapiens
aaaaaaaaatagaat

SEQ ID NO: 46170 - DNA, 15 bp, Homo sapiens
aaaaaaaaaatagaa

SEQ ID NO: 46171 - DNA, 15 bp, Homo sapiens
aaaaaaaaaaataga

SEQ ID NO: 46172 - DNA, 15 bp, Homo sapiens
aaaaaaaaaaaatag

SEQ ID NO: 46173 - DNA, 15 bp, Homo sapiens
aaaaaaaaaaaaata

SEQ ID NO: 46174 - DNA, 15 bp, Homo sapiens
gtaaaaaaaaaaaaa

SEQ ID NO: 46175 - DNA, 15 bp, Homo sapiens
ggtaaaaaaaaaaaa

SEQ ID NO: 46176 - DNA, 15 bp, Homo sapiens
aggtaaaaaaaaaaa

SEQ ID NO: 46177 - DNA, 15 bp, Homo sapiens
gaggtaaaaaaaaaa

SEQ ID NO: 46178 - DNA, 15 bp, Homo sapiens
ggaggtaaaaaaaaa

SEQ ID NO: 46179 - DNA, 15 bp, Homo sapiens
tggaggtaaaaaaaa

SEQ ID NO: 46180 - DNA, 15 bp, Homo sapiens
ctggaggtaaaaaaa

SEQ ID NO: 46181 - DNA, 15 bp, Homo sapiens
gctggaggtaaaaaa

SEQ ID NO: 46182 - DNA, 15 bp, Homo sapiens
ggctggaggtaaaaa

SEQ ID NO: 46183 - DNA, 15 bp, Homo sapiens
aggctggaggtaaaa

SEQ ID NO: 46184 - DNA, 15 bp, Homo sapiens
caggctggaggtaaa

SEQ ID NO: 46185 - DNA, 15 bp, Homo sapiens
ccaggctggaggtaa

SEQ ID NO: 46186 - DNA, 15 bp, Homo sapiens
cccaggctggaggta

SEQ ID NO: 46187 - DNA, 15 bp, Homo sapiens
acccaggctggaggt

SEQ ID NO: 46188 - DNA, 15 bp, Homo sapiens
tagacagagtcttgc

SEQ ID NO: 46189 - DNA, 15 bp, Homo sapiens
ttttttttagacaga

SEQ ID NO: 46190 - DNA, 15 bp, Homo sapiens
tttttttttagacag

SEQ ID NO: 46191 - DNA, 15 bp, Homo sapiens
ttttttttttagaca

SEQ ID NO: 46192 - DNA, 15 bp, Homo sapiens
gaatttttttttttt

SEQ ID NO: 46193 - DNA, 15 bp, Homo sapiens
tgaattttttttttt

SEQ ID NO: 46194 - DNA, 15 bp, Homo sapiens
gtgaatttttttttt

SEQ ID NO: 46195 - DNA, 15 bp, Homo sapiens
agtgaattttttttt

SEQ ID NO: 46196 - DNA, 15 bp, Homo sapiens
aagtgaatttttttt

SEQ ID NO: 46197 - DNA, 15 bp, Homo sapiens
aaagtgaattttttt

SEQ ID NO: 46198 - DNA, 15 bp, Homo sapiens
taaagtgaatttttt

SEQ ID NO: 46199 - DNA, 15 bp, Homo sapiens
ttaaagtgaattttt

SEQ ID NO: 46200 - DNA, 15 bp, Homo sapiens
tttaaagtgaatttt

SEQ ID NO: 46201 - DNA, 15 bp, Homo sapiens
atttaaagtgaattt

SEQ ID NO: 46202 - DNA, 15 bp, Homo sapiens
tatttaaagtgaatt

SEQ ID NO: 46203 - DNA, 15 bp, Homo sapiens
ctatttaaagtgaat

SEQ ID NO: 46204 - DNA, 15 bp, Homo sapiens
actatttaaagtgaa

SEQ ID NO: 46205 - DNA, 15 bp, Homo sapiens
aactatttaaagtga

SEQ ID NO: 46206 - DNA, 15 bp, Homo sapiens
gaactatttaaagtg

SEQ ID NO: 46207 - DNA, 15 bp, Homo sapiens
ggaactatttaaagt

SEQ ID NO: 46208 - DNA, 15 bp, Homo sapiens
tggaactatttaaag

SEQ ID NO: 46209 - DNA, 15 bp, Homo sapiens
ctggaactatttaaa

SEQ ID NO: 46210 - DNA, 15 bp, Homo sapiens
cctggaactatttaa

SEQ ID NO: 46211 - DNA, 15 bp, Homo sapiens
tcctggaactattta

SEQ ID NO: 46212 - DNA, 15 bp, Homo sapiens
gtcctggaactattt

SEQ ID NO: 46213 - DNA, 15 bp, Homo sapiens
tgtcctggaactatt

SEQ ID NO: 46214 - DNA, 15 bp, Homo sapiens
gtgtcctggaactat

SEQ ID NO: 46215 - DNA, 15 bp, Homo sapiens
cgtgtcctggaacta

SEQ ID NO: 46216 - DNA, 15 bp, Homo sapiens
acgtgtcctggaact

SEQ ID NO: 46217 - DNA, 15 bp, Homo sapiens
cacgtgtcctggaac

SEQ ID NO: 46218 - DNA, 15 bp, Homo sapiens
acacgtgtcctggaa

SEQ ID NO: 46219 - DNA, 15 bp, Homo sapiens
tacacgtgtcctgga

SEQ ID NO: 46220 - DNA, 15 bp, Homo sapiens
ctacacgtgtcctgg

SEQ ID NO: 46221 - DNA, 15 bp, Homo sapiens
tctacacgtgtcctg

SEQ ID NO: 46222 - DNA, 15 bp, Homo sapiens
ttctacacgtgtcct

SEQ ID NO: 46223 - DNA, 15 bp, Homo sapiens
gttctacacgtgtcc

SEQ ID NO: 46224 - DNA, 15 bp, Homo sapiens
cgttctacacgtgtc

SEQ ID NO: 46225 - DNA, 15 bp, Homo sapiens
acgttctacacgtgt

SEQ ID NO: 46226 - DNA, 15 bp, Homo sapiens
cacgttctacacgtg

SEQ ID NO: 46227 - DNA, 15 bp, Homo sapiens
gcacgttctacacgt

SEQ ID NO: 46228 - DNA, 15 bp, Homo sapiens
tgcacgttctacacg

SEQ ID NO: 46229 - DNA, 15 bp, Homo sapiens
ctgcacgttctacac

SEQ ID NO: 46230 - DNA, 15 bp, Homo sapiens
cctgcacgttctaca

SEQ ID NO: 46231 - DNA, 15 bp, Homo sapiens
tcctgcacgttctac

SEQ ID NO: 46232 - DNA, 15 bp, Homo sapiens
atcctgcacgttcta

SEQ ID NO: 46233 - DNA, 15 bp, Homo sapiens
aatcctgcacgttct

SEQ ID NO: 46234 - DNA, 15 bp, Homo sapiens
caatcctgcacgttc

SEQ ID NO: 46235 - DNA, 15 bp, Homo sapiens
gcaatcctgcacgtt

SEQ ID NO: 46236 - DNA, 15 bp, Homo sapiens
agcaatcctgcacgt

SEQ ID NO: 46237 - DNA, 15 bp, Homo sapiens
tagcaatcctgcacg

SEQ ID NO: 46238 - DNA, 15 bp, Homo sapiens
gtagcaatcctgcac

SEQ ID NO: 46239 - DNA, 15 bp, Homo sapiens
tgtagcaatcctgca

SEQ ID NO: 46240 - DNA, 15 bp, Homo sapiens
atgtagcaatcctgc

SEQ ID NO: 46241 - DNA, 15 bp, Homo sapiens
tatgtagcaatcctg

SEQ ID NO: 46242 - DNA, 15 bp, Homo sapiens
ctatgtagcaatcct

SEQ ID NO: 46243 - DNA, 15 bp, Homo sapiens
cctatgtagcaatcc

SEQ ID NO: 46244 - DNA, 15 bp, Homo sapiens
acctatgtagcaatc

SEQ ID NO: 46245 - DNA, 15 bp, Homo sapiens
tacctatgtagcaat

SEQ ID NO: 46246 - DNA, 15 bp, Homo sapiens
ttacctatgtagcaa

SEQ ID NO: 46247 - DNA, 15 bp, Homo sapiens
tttacctatgtagca

SEQ ID NO: 46248 - DNA, 15 bp, Homo sapiens
gtttacctatgtagc

SEQ ID NO: 46249 - DNA, 15 bp, Homo sapiens
tgtttacctatgtag

SEQ ID NO: 46250 - DNA, 15 bp, Homo sapiens
atgtttacctatgta

SEQ ID NO: 46251 - DNA, 15 bp, Homo sapiens
tatgtttacctatgt

SEQ ID NO: 46252 - DNA, 15 bp, Homo sapiens
atatgtttacctatg

SEQ ID NO: 46253 - DNA, 15 bp, Homo sapiens
catatgtttacctat

SEQ ID NO: 46254 - DNA, 15 bp, Homo sapiens
gcatatgtttaccta

SEQ ID NO: 46255 - DNA, 15 bp, Homo sapiens
ggcatatgtttacct

SEQ ID NO: 46256 - DNA, 15 bp, Homo sapiens
tggcatatgtttacc

SEQ ID NO: 46257 - DNA, 15 bp, Homo sapiens
atggcatatgtttac

SEQ ID NO: 46258 - DNA, 15 bp, Homo sapiens
catggcatatgttta

SEQ ID NO: 46259 - DNA, 15 bp, Homo sapiens
ccatggcatatgttt

SEQ ID NO: 46260 - DNA, 15 bp, Homo sapiens
accatggcatatgtt

SEQ ID NO: 46261 - DNA, 15 bp, Homo sapiens
caccatggcatatgt

SEQ ID NO: 46262 - DNA, 15 bp, Homo sapiens
ccaccatggcatatg

SEQ ID NO: 46263 - DNA, 15 bp, Homo sapiens
tccaccatggcatat

SEQ ID NO: 46264 - DNA, 15 bp, Homo sapiens
ttccaccatggcata

SEQ ID NO: 46265 - DNA, 15 bp, Homo sapiens
attccaccatggcat

SEQ ID NO: 46266 - DNA, 15 bp, Homo sapiens
tattccaccatggca

SEQ ID NO: 46267 - DNA, 15 bp, Homo sapiens
ttattccaccatggc

SEQ ID NO: 46268 - DNA, 15 bp, Homo sapiens
gttattccaccatgg

SEQ ID NO: 46269 - DNA, 15 bp, Homo sapiens
agttattccaccatg

SEQ ID NO: 46270 - DNA, 15 bp, Homo sapiens
tagttattccaccat

SEQ ID NO: 46271 - DNA, 15 bp, Homo sapiens
ctagttattccacca

SEQ ID NO: 46272 - DNA, 15 bp, Homo sapiens
actagttattccacc

SEQ ID NO: 46273 - DNA, 15 bp, Homo sapiens
tactagttattccac

SEQ ID NO: 46274 - DNA, 15 bp, Homo sapiens
atactagttattcca

SEQ ID NO: 46275 - DNA, 15 bp, Homo sapiens
aatactagttattcc

SEQ ID NO: 46276 - DNA, 15 bp, Homo sapiens
gaatactagttattc

SEQ ID NO: 46277 - DNA, 15 bp, Homo sapiens
agaatactagttatt

SEQ ID NO: 46278 - DNA, 15 bp, Homo sapiens
cagaatactagttat

SEQ ID NO: 46279 - DNA, 15 bp, Homo sapiens
tcagaatactagtta

SEQ ID NO: 46280 - DNA, 15 bp, Homo sapiens
ctcagaatactagtt

SEQ ID NO: 46281 - DNA, 15 bp, Homo sapiens
gctcagaatactagt

SEQ ID NO: 46282 - DNA, 15 bp, Homo sapiens
agctcagaatactag

SEQ ID NO: 46283 - DNA, 15 bp, Homo sapiens
cagctcagaatacta

SEQ ID NO: 46284 - DNA, 15 bp, Homo sapiens
acagctcagaatact

SEQ ID NO: 46285 - DNA, 15 bp, Homo sapiens
cacagctcagaatac

SEQ ID NO: 46286 - DNA, 15 bp, Homo sapiens
acacagctcagaata

SEQ ID NO: 46287 - DNA, 15 bp, Homo sapiens
cacacagctcagaat

SEQ ID NO: 46288 - DNA, 15 bp, Homo sapiens
gcacacagctcagaa

SEQ ID NO: 46289 - DNA, 15 bp, Homo sapiens
agcacacagctcaga

SEQ ID NO: 46290 - DNA, 15 bp, Homo sapiens
tagcacacagctcag

SEQ ID NO: 46291 - DNA, 15 bp, Homo sapiens
ctagcacacagctca

SEQ ID NO: 46292 - DNA, 15 bp, Homo sapiens
tctagcacacagctc

SEQ ID NO: 46293 - DNA, 15 bp, Homo sapiens
ctctagcacacagct

SEQ ID NO: 46294 - DNA, 15 bp, Homo sapiens
cctctagcacacagc

SEQ ID NO: 46295 - DNA, 15 bp, Homo sapiens
acctctagcacacag

SEQ ID NO: 46296 - DNA, 15 bp, Homo sapiens
tacctctagcacaca

SEQ ID NO: 46297 - DNA, 15 bp, Homo sapiens
ttacctctagcacac

SEQ ID NO: 46298 - DNA, 15 bp, Homo sapiens
gttacctctagcaca

SEQ ID NO: 46299 - DNA, 15 bp, Homo sapiens
agttacctctagcac

SEQ ID NO: 46300 - DNA, 15 bp, Homo sapiens
gagttacctctagca

SEQ ID NO: 46301 - DNA, 15 bp, Homo sapiens
tgagttacctctagc

SEQ ID NO: 46302 - DNA, 15 bp, Homo sapiens
atgagttacctctag

SEQ ID NO: 46303 - DNA, 15 bp, Homo sapiens
catgagttacctcta

SEQ ID NO: 46304 - DNA, 15 bp, Homo sapiens
tcatgagttacctct

SEQ ID NO: 46305 - DNA, 15 bp, Homo sapiens
atcatgagttacctc

SEQ ID NO: 46306 - DNA, 15 bp, Homo sapiens
tatcatgagttacct

SEQ ID NO: 46307 - DNA, 15 bp, Homo sapiens
ttatcatgagttacc

SEQ ID NO: 46308 - DNA, 15 bp, Homo sapiens
attatcatgagttac

SEQ ID NO: 46309 - DNA, 15 bp, Homo sapiens
cattatcatgagtta

SEQ ID NO: 46310 - DNA, 15 bp, Homo sapiens
ccattatcatgagtt

SEQ ID NO: 46311 - DNA, 15 bp, Homo sapiens
tccattatcatgagt

SEQ ID NO: 46312 - DNA, 15 bp, Homo sapiens
ttccattatcatgag

SEQ ID NO: 46313 - DNA, 15 bp, Homo sapiens
attccattatcatga

SEQ ID NO: 46314 - DNA, 15 bp, Homo sapiens
tattccattatcatg

SEQ ID NO: 46315 - DNA, 15 bp, Homo sapiens
atattccattatcat

SEQ ID NO: 46316 - DNA, 15 bp, Homo sapiens
aatattccattatca

SEQ ID NO: 46317 - DNA, 15 bp, Homo sapiens
aaatattccattatc

SEQ ID NO: 46318 - DNA, 15 bp, Homo sapiens
caaatattccattat

SEQ ID NO: 46319 - DNA, 15 bp, Homo sapiens
tcaaatattccatta

SEQ ID NO: 46320 - DNA, 15 bp, Homo sapiens
atcaaatattccatt

SEQ ID NO: 46321 - DNA, 15 bp, Homo sapiens
aatcaaatattccat

SEQ ID NO: 46322 - DNA, 15 bp, Homo sapiens
aaatcaaatattcca

SEQ ID NO: 46323 - DNA, 15 bp, Homo sapiens
taaatcaaatattcc

SEQ ID NO: 46324 - DNA, 15 bp, Homo sapiens
ttaaatcaaatattc

SEQ ID NO: 46325 - DNA, 15 bp, Homo sapiens
attaaatcaaatatt

SEQ ID NO: 46326 - DNA, 15 bp, Homo sapiens
aattaaatcaaatat

SEQ ID NO: 46327 - DNA, 15 bp, Homo sapiens
aaattaaatcaaata

SEQ ID NO: 46328 - DNA, 15 bp, Homo sapiens
gaaattaaatcaaat

SEQ ID NO: 46329 - DNA, 15 bp, Homo sapiens
tgaaattaaatcaaa

SEQ ID NO: 46330 - DNA, 15 bp, Homo sapiens
ctgaaattaaatcaa

SEQ ID NO: 46331 - DNA, 15 bp, Homo sapiens
tctgaaattaaatca

SEQ ID NO: 46332 - DNA, 15 bp, Homo sapiens
atctgaaattaaatc

SEQ ID NO: 46333 - DNA, 15 bp, Homo sapiens
catctgaaattaaat

SEQ ID NO: 46334 - DNA, 15 bp, Homo sapiens
gcatctgaaattaaa

SEQ ID NO: 46335 - DNA, 15 bp, Homo sapiens
agcatctgaaattaa

SEQ ID NO: 46336 - DNA, 15 bp, Homo sapiens
gagcatctgaaatta

SEQ ID NO: 46337 - DNA, 15 bp, Homo sapiens
cgagcatctgaaatt

SEQ ID NO: 46338 - DNA, 15 bp, Homo sapiens
acgagcatctgaaat

SEQ ID NO: 46339 - DNA, 15 bp, Homo sapiens
cacgagcatctgaaa

SEQ ID NO: 46340 - DNA, 15 bp, Homo sapiens
acacgagcatctgaa

SEQ ID NO: 46341 - DNA, 15 bp, Homo sapiens
tacacgagcatctga

SEQ ID NO: 46342 - DNA, 15 bp, Homo sapiens
gtacacgagcatctg

SEQ ID NO: 46343 - DNA, 15 bp, Homo sapiens
tgtacacgagcatct

SEQ ID NO: 46344 - DNA, 15 bp, Homo sapiens
ttgtacacgagcatc

SEQ ID NO: 46345 - DNA, 15 bp, Homo sapiens
cttgtacacgagcat

SEQ ID NO: 46346 - DNA, 15 bp, Homo sapiens
acttgtacacgagca

SEQ ID NO: 46347 - DNA, 15 bp, Homo sapiens
aacttgtacacgagc

SEQ ID NO: 46348 - DNA, 15 bp, Homo sapiens
aaacttgtacacgag

SEQ ID NO: 46349 - DNA, 15 bp, Homo sapiens
caaacttgtacacga

SEQ ID NO: 46350 - DNA, 15 bp, Homo sapiens
gcaaacttgtacacg

SEQ ID NO: 46351 - DNA, 15 bp, Homo sapiens
ggcaaacttgtacac

SEQ ID NO: 46352 - DNA, 15 bp, Homo sapiens
tggcaaacttgtaca

SEQ ID NO: 46353 - DNA, 15 bp, Homo sapiens
ctggcaaacttgtac

SEQ ID NO: 46354 - DNA, 15 bp, Homo sapiens
tctggcaaacttgta

SEQ ID NO: 46355 - DNA, 15 bp, Homo sapiens
ttctggcaaacttgt

SEQ ID NO: 46356 - DNA, 15 bp, Homo sapiens
tttctggcaaacttg

SEQ ID NO: 46357 - DNA, 15 bp, Homo sapiens
ttttctggcaaactt

SEQ ID NO: 46358 - DNA, 15 bp, Homo sapiens
gttttctggcaaact

SEQ ID NO: 46359 - DNA, 15 bp, Homo sapiens
tgttttctggcaaac

SEQ ID NO: 46360 - DNA, 15 bp, Homo sapiens
gtgttttctggcaaa

SEQ ID NO: 46361 - DNA, 15 bp, Homo sapiens
ggtgttttctggcaa

SEQ ID NO: 46362 - DNA, 15 bp, Homo sapiens
tggtgttttctggca

SEQ ID NO: 46363 - DNA, 15 bp, Homo sapiens
gtggtgttttctggc

SEQ ID NO: 46364 - DNA, 15 bp, Homo sapiens
tgtggtgttttctgg

SEQ ID NO: 46365 - DNA, 15 bp, Homo sapiens
atgtggtgttttctg

SEQ ID NO: 46366 - DNA, 15 bp, Homo sapiens
gatgtggtgttttct

SEQ ID NO: 46367 - DNA, 15 bp, Homo sapiens
tgatgtggtgttttc

SEQ ID NO: 46368 - DNA, 15 bp, Homo sapiens
gtgatgtggtgtttt

SEQ ID NO: 46369 - DNA, 15 bp, Homo sapiens
agtgatgtggtgttt

SEQ ID NO: 46370 - DNA, 15 bp, Homo sapiens
aagtgatgtggtgtt

SEQ ID NO: 46371 - DNA, 15 bp, Homo sapiens
aaagtgatgtggtgt

SEQ ID NO: 46372 - DNA, 15 bp, Homo sapiens
taaagtgatgtggtg

SEQ ID NO: 46373 - DNA, 15 bp, Homo sapiens
ttaaagtgatgtggt

SEQ ID NO: 46374 - DNA, 15 bp, Homo sapiens
gttaaagtgatgtgg

SEQ ID NO: 46375 - DNA, 15 bp, Homo sapiens
agttaaagtgatgtg

SEQ ID NO: 46376 - DNA, 15 bp, Homo sapiens
tagttaaagtgatgt

SEQ ID NO: 46377 - DNA, 15 bp, Homo sapiens
ttagttaaagtgatg

SEQ ID NO: 46378 - DNA, 15 bp, Homo sapiens
attagttaaagtgat

SEQ ID NO: 46379 - DNA, 15 bp, Homo sapiens
gattagttaaagtga

SEQ ID NO: 46380 - DNA, 15 bp, Homo sapiens
agattagttaaagtg

SEQ ID NO: 46381 - DNA, 15 bp, Homo sapiens
tagattagttaaagt

SEQ ID NO: 46382 - DNA, 15 bp, Homo sapiens
ttagattagttaaag

SEQ ID NO: 46383 - DNA, 15 bp, Homo sapiens
attagattagttaaa

SEQ ID NO: 46384 - DNA, 15 bp, Homo sapiens
aattagattagttaa

SEQ ID NO: 46385 - DNA, 15 bp, Homo sapiens
taattagattagtta

SEQ ID NO: 46386 - DNA, 15 bp, Homo sapiens
gtaattagattagtt

SEQ ID NO: 46387 - DNA, 15 bp, Homo sapiens
agtaattagattagt

SEQ ID NO: 46388 - DNA, 15 bp, Homo sapiens
cagtaattagattag

SEQ ID NO: 46389 - DNA, 15 bp, Homo sapiens
tcagtaattagatta

SEQ ID NO: 46390 - DNA, 15 bp, Homo sapiens
ttcagtaattagatt

SEQ ID NO: 46391 - DNA, 15 bp, Homo sapiens
cttcagtaattagat

SEQ ID NO: 46392 - DNA, 15 bp, Homo sapiens
tcttcagtaattaga

SEQ ID NO: 46393 - DNA, 15 bp, Homo sapiens
ctcttcagtaattag

SEQ ID NO: 46394 - DNA, 15 bp, Homo sapiens
tctcttcagtaatta

SEQ ID NO: 46395 - DNA, 15 bp, Homo sapiens
gtctcttcagtaatt

SEQ ID NO: 46396 - DNA, 15 bp, Homo sapiens
agtctcttcagtaat

SEQ ID NO: 46397 - DNA, 15 bp, Homo sapiens
tagtctcttcagtaa

SEQ ID NO: 46398 - DNA, 15 bp, Homo sapiens
gtagtctcttcagta

SEQ ID NO: 46399 - DNA, 15 bp, Homo sapiens
agtagtctcttcagt

SEQ ID NO: 46400 - DNA, 15 bp, Homo sapiens
gagtagtctcttcag

SEQ ID NO: 46401 - DNA, 15 bp, Homo sapiens
tgagtagtctcttca

SEQ ID NO: 46402 - DNA, 15 bp, Homo sapiens
atgagtagtctcttc

SEQ ID NO: 46403 - DNA, 15 bp, Homo sapiens
catgagtagtctctt

SEQ ID NO: 46404 - DNA, 15 bp, Homo sapiens
acatgagtagtctct

SEQ ID NO: 46405 - DNA, 15 bp, Homo sapiens
aacatgagtagtctc

SEQ ID NO: 46406 - DNA, 15 bp, Homo sapiens
caacatgagtagtct

SEQ ID NO: 46407 - DNA, 15 bp, Homo sapiens
acaacatgagtagtc

SEQ ID NO: 46408 - DNA, 15 bp, Homo sapiens
aacaacatgagtagt

SEQ ID NO: 46409 - DNA, 15 bp, Homo sapiens
taacaacatgagtag

SEQ ID NO: 46410 - DNA, 15 bp, Homo sapiens
ataacaacatgagta

SEQ ID NO: 46411 - DNA, 15 bp, Homo sapiens
cataacaacatgagt

SEQ ID NO: 46412 - DNA, 15 bp, Homo sapiens
tcataacaacatgag

SEQ ID NO: 46413 - DNA, 15 bp, Homo sapiens
ttcataacaacatga

SEQ ID NO: 46414 - DNA, 15 bp, Homo sapiens
tttcataacaacatg

SEQ ID NO: 46415 - DNA, 15 bp, Homo sapiens
ttttcataacaacat

SEQ ID NO: 46416 - DNA, 15 bp, Homo sapiens
gttttcataacaaca

SEQ ID NO: 46417 - DNA, 15 bp, Homo sapiens
tgttttcataacaac

SEQ ID NO: 46418 - DNA, 15 bp, Homo sapiens
ctgttttcataacaa

SEQ ID NO: 46419 - DNA, 15 bp, Homo sapiens
cctgttttcataaca

SEQ ID NO: 46420 - DNA, 15 bp, Homo sapiens
acctgttttcataac

SEQ ID NO: 46421 - DNA, 15 bp, Homo sapiens
tacctgttttcataa

SEQ ID NO: 46422 - DNA, 15 bp, Homo sapiens
atacctgttttcata

SEQ ID NO: 46423 - DNA, 15 bp, Homo sapiens
tatacctgttttcat

SEQ ID NO: 46424 - DNA, 15 bp, Homo sapiens
gtatacctgttttca

SEQ ID NO: 46425 - DNA, 15 bp, Homo sapiens
ggtatacctgttttc

SEQ ID NO: 46426 - DNA, 15 bp, Homo sapiens
tggtatacctgtttt

SEQ ID NO: 46427 - DNA, 15 bp, Homo sapiens
ttggtatacctgttt

SEQ ID NO: 46428 - DNA, 15 bp, Homo sapiens
cttggtatacctgtt

SEQ ID NO: 46429 - DNA, 15 bp, Homo sapiens
tcttggtatacctgt

SEQ ID NO: 46430 - DNA, 15 bp, Homo sapiens
ttcttggtatacctg

SEQ ID NO: 46431 - DNA, 15 bp, Homo sapiens
gttcttggtatacct

SEQ ID NO: 46432 - DNA, 15 bp, Homo sapiens
ggttcttggtatacc

SEQ ID NO: 46433 - DNA, 15 bp, Homo sapiens
aggttcttggtatac

SEQ ID NO: 46434 - DNA, 15 bp, Homo sapiens
aaggttcttggtata

SEQ ID NO: 46435 - DNA, 15 bp, Homo sapiens
aaaggttcttggtat

SEQ ID NO: 46436 - DNA, 15 bp, Homo sapiens
taaaggttcttggta

SEQ ID NO: 46437 - DNA, 15 bp, Homo sapiens
gtaaaggttcttggt

SEQ ID NO: 46438 - DNA, 15 bp, Homo sapiens
tgtaaaggttcttgg

SEQ ID NO: 46439 - DNA, 15 bp, Homo sapiens
ctgtaaaggttcttg

SEQ ID NO: 46440 - DNA, 15 bp, Homo sapiens
tctgtaaaggttctt

SEQ ID NO: 46441 - DNA, 15 bp, Homo sapiens
ttctgtaaaggttct

SEQ ID NO: 46442 - DNA, 15 bp, Homo sapiens
attctgtaaaggttc

SEQ ID NO: 46443 - DNA, 15 bp, Homo sapiens
tattctgtaaaggtt

SEQ ID NO: 46444 - DNA, 15 bp, Homo sapiens
gtattctgtaaaggt

SEQ ID NO: 46445 - DNA, 15 bp, Homo sapiens
ggtattctgtaaagg

SEQ ID NO: 46446 - DNA, 15 bp, Homo sapiens
aggtattctgtaaag

SEQ ID NO: 46447 - DNA, 15 bp, Homo sapiens
aaggtattctgtaaa

SEQ ID NO: 46448 - DNA, 15 bp, Homo sapiens
caaggtattctgtaa

SEQ ID NO: 46449 - DNA, 15 bp, Homo sapiens
gcaaggtattctgta

SEQ ID NO: 46450 - DNA, 15 bp, Homo sapiens
tgcaaggtattctgt

SEQ ID NO: 46451 - DNA, 15 bp, Homo sapiens
atgcaaggtattctg

SEQ ID NO: 46452 - DNA, 15 bp, Homo sapiens
gatgcaaggtattct

SEQ ID NO: 46453 - DNA, 15 bp, Homo sapiens
agatgcaaggtattc

SEQ ID NO: 46454 - DNA, 15 bp, Homo sapiens
cagatgcaaggtatt

SEQ ID NO: 46455 - DNA, 15 bp, Homo sapiens
gcagatgcaaggtat

SEQ ID NO: 46456 - DNA, 15 bp, Homo sapiens
agcagatgcaaggta

SEQ ID NO: 46457 - DNA, 15 bp, Homo sapiens
cagcagatgcaaggt

SEQ ID NO: 46458 - DNA, 15 bp, Homo sapiens
gcagcagatgcaagg

SEQ ID NO: 46459 - DNA, 15 bp, Homo sapiens
tgcagcagatgcaag

SEQ ID NO: 46460 - DNA, 15 bp, Homo sapiens
atgcagcagatgcaa

SEQ ID NO: 46461 - DNA, 15 bp, Homo sapiens
tatgcagcagatgca

SEQ ID NO: 46462 - DNA, 15 bp, Homo sapiens
ttatgcagcagatgc

SEQ ID NO: 46463 - DNA, 15 bp, Homo sapiens
tttatgcagcagatg

SEQ ID NO: 46464 - DNA, 15 bp, Homo sapiens
ttttatgcagcagat

SEQ ID NO: 46465 - DNA, 15 bp, Homo sapiens
gttttatgcagcaga

SEQ ID NO: 46466 - DNA, 15 bp, Homo sapiens
ggttttatgcagcag

SEQ ID NO: 46467 - DNA, 15 bp, Homo sapiens
tggttttatgcagca

SEQ ID NO: 46468 - DNA, 15 bp, Homo sapiens
gtggttttatgcagc

SEQ ID NO: 46469 - DNA, 15 bp, Homo sapiens
tgtggttttatgcag

SEQ ID NO: 46470 - DNA, 15 bp, Homo sapiens
atgtggttttatgca

SEQ ID NO: 46471 - DNA, 15 bp, Homo sapiens
catgtggttttatgc

SEQ ID NO: 46472 - DNA, 15 bp, Homo sapiens
tcatgtggttttatg

SEQ ID NO: 46473 - DNA, 15 bp, Homo sapiens
ctcatgtggttttat

SEQ ID NO: 46474 - DNA, 15 bp, Homo sapiens
cctcatgtggtttta

SEQ ID NO: 46475 - DNA, 15 bp, Homo sapiens
gcctcatgtggtttt

SEQ ID NO: 46476 - DNA, 15 bp, Homo sapiens
cgcctcatgtggttt

SEQ ID NO: 46477 - DNA, 15 bp, Homo sapiens
tcgcctcatgtggtt

SEQ ID NO: 46478 - DNA, 15 bp, Homo sapiens
ctcgcctcatgtggt

SEQ ID NO: 46479 - DNA, 15 bp, Homo sapiens
cctcgcctcatgtgg

SEQ ID NO: 46480 - DNA, 15 bp, Homo sapiens
gcctcgcctcatgtg

SEQ ID NO: 46481 - DNA, 15 bp, Homo sapiens
tgcctcgcctcatgt

SEQ ID NO: 46482 - DNA, 15 bp, Homo sapiens
gtgcctcgcctcatg

SEQ ID NO: 46483 - DNA, 15 bp, Homo sapiens
cgtgcctcgcctcat

SEQ ID NO: 46484 - DNA, 15 bp, Homo sapiens
ccgtgcctcgcctca

SEQ ID NO: 46485 - DNA, 15 bp, Homo sapiens
accgtgcctcgcctc

SEQ ID NO: 46486 - DNA, 15 bp, Homo sapiens
caccgtgcctcgcct

SEQ ID NO: 46487 - DNA, 15 bp, Homo sapiens
ccaccgtgcctcgcc

SEQ ID NO: 46488 - DNA, 15 bp, Homo sapiens
gccaccgtgcctcgc

SEQ ID NO: 46489 - DNA, 15 bp, Homo sapiens
cgccaccgtgcctcg

SEQ ID NO: 46490 - DNA, 15 bp, Homo sapiens
gcgccaccgtgcctc

SEQ ID NO: 46491 - DNA, 15 bp, Homo sapiens
tgcgccaccgtgcct

SEQ ID NO: 46492 - DNA, 15 bp, Homo sapiens
atgcgccaccgtgcc

SEQ ID NO: 46493 - DNA, 15 bp, Homo sapiens
catgcgccaccgtgc

SEQ ID NO: 46494 - DNA, 15 bp, Homo sapiens
gcatgcgccaccgtg

SEQ ID NO: 46495 - DNA, 15 bp, Homo sapiens
ggcatgcgccaccgt

SEQ ID NO: 46496 - DNA, 15 bp, Homo sapiens
aggcatgcgccaccg

SEQ ID NO: 46497 - DNA, 15 bp, Homo sapiens
caggcatgcgccacc

SEQ ID NO: 46498 - DNA, 15 bp, Homo sapiens
acaggcatgcgccac

SEQ ID NO: 46499 - DNA, 15 bp, Homo sapiens
tacaggcatgcgcca

SEQ ID NO: 46500 - DNA, 15 bp, Homo sapiens
cgattacaggcatgc

SEQ ID NO: 46501 - DNA, 15 bp, Homo sapiens
gcgattacaggcatg

SEQ ID NO: 46502 - DNA, 15 bp, Homo sapiens
tgcgattacaggcat

SEQ ID NO: 46503 - DNA, 15 bp, Homo sapiens
ctgcgattacaggca

SEQ ID NO: 46504 - DNA, 15 bp, Homo sapiens
gctgcgattacaggc

SEQ ID NO: 46505 - DNA, 15 bp, Homo sapiens
tgctgcgattacagg

SEQ ID NO: 46506 - DNA, 15 bp, Homo sapiens
gtgctgcgattacag

SEQ ID NO: 46507 - DNA, 15 bp, Homo sapiens
agtgctgcgattaca

SEQ ID NO: 46508 - DNA, 15 bp, Homo sapiens
aagtgctgcgattac

SEQ ID NO: 46509 - DNA, 15 bp, Homo sapiens
aaagtgctgcgatta

SEQ ID NO: 46510 - DNA, 15 bp, Homo sapiens
caaagtgctgcgatt

SEQ ID NO: 46511 - DNA, 15 bp, Homo sapiens
ccaaagtgctgcgat

SEQ ID NO: 46512 - DNA, 15 bp, Homo sapiens
cccaaagtgctgcga

SEQ ID NO: 46513 - DNA, 15 bp, Homo sapiens
tcccaaagtgctgcg

SEQ ID NO: 46514 - DNA, 15 bp, Homo sapiens
ctcccaaagtgctgc

SEQ ID NO: 46515 - DNA, 15 bp, Homo sapiens
tctcgtgatctgccc

SEQ ID NO: 46516 - DNA, 15 bp, Homo sapiens
atctcgtgatctgcc

SEQ ID NO: 46517 - DNA, 15 bp, Homo sapiens
aatctcgtgatctgc

SEQ ID NO: 46518 - DNA, 15 bp, Homo sapiens
taatctcgtgatctg

SEQ ID NO: 46519 - DNA, 15 bp, Homo sapiens
ctaatctcgtgatct

SEQ ID NO: 46520 - DNA, 15 bp, Homo sapiens
cctaatctcgtgatc

SEQ ID NO: 46521 - DNA, 15 bp, Homo sapiens
tcctaatctcgtgat

SEQ ID NO: 46522 - DNA, 15 bp, Homo sapiens
ctcctaatctcgtga

SEQ ID NO: 46523 - DNA, 15 bp, Homo sapiens
tctcctaatctcgtg

SEQ ID NO: 46524 - DNA, 15 bp, Homo sapiens
atctcctaatctcgt

SEQ ID NO: 46525 - DNA, 15 bp, Homo sapiens
gatctcctaatctcg

SEQ ID NO: 46526 - DNA, 15 bp, Homo sapiens
cgatctcctaatctc

SEQ ID NO: 46527 - DNA, 15 bp, Homo sapiens
tcgatctcctaatct

SEQ ID NO: 46528 - DNA, 15 bp, Homo sapiens
ctcgatctcctaatc

SEQ ID NO: 46529 - DNA, 15 bp, Homo sapiens
tctcgatctcctaat

SEQ ID NO: 46530 - DNA, 15 bp, Homo sapiens
gtctcgatctcctaa

SEQ ID NO: 46531 - DNA, 15 bp, Homo sapiens
ggtctcgatctccta

SEQ ID NO: 46532 - DNA, 15 bp, Homo sapiens
ctggccaggatggtc

SEQ ID NO: 46533 - DNA, 15 bp, Homo sapiens
gctggccaggatggt

SEQ ID NO: 46534 - DNA, 15 bp, Homo sapiens
tgctggccaggatgg

SEQ ID NO: 46535 - DNA, 15 bp, Homo sapiens
atgctggccaggatg

SEQ ID NO: 46536 - DNA, 15 bp, Homo sapiens
catgctggccaggat

SEQ ID NO: 46537 - DNA, 15 bp, Homo sapiens
ccatgctggccagga

SEQ ID NO: 46538 - DNA, 15 bp, Homo sapiens
accatgctggccagg

SEQ ID NO: 46539 - DNA, 15 bp, Homo sapiens
caccatgctggccag

SEQ ID NO: 46540 - DNA, 15 bp, Homo sapiens
tcaccatgctggcca

SEQ ID NO: 46541 - DNA, 15 bp, Homo sapiens
ttcaccatgctggcc

SEQ ID NO: 46542 - DNA, 15 bp, Homo sapiens
tttcaccatgctggc

SEQ ID NO: 46543 - DNA, 15 bp, Homo sapiens
gtttcaccatgctgg

SEQ ID NO: 46544 - DNA, 15 bp, Homo sapiens
ggtttcaccatgctg

SEQ ID NO: 46545 - DNA, 15 bp, Homo sapiens
gggtttcaccatgct

SEQ ID NO: 46546 - DNA, 15 bp, Homo sapiens
ggggtttcaccatgc

SEQ ID NO: 46547 - DNA, 15 bp, Homo sapiens
ttttttagtagagac

SEQ ID NO: 46548 - DNA, 15 bp, Homo sapiens
attttttagtagaga

SEQ ID NO: 46549 - DNA, 15 bp, Homo sapiens
tattttttagtagag

SEQ ID NO: 46550 - DNA, 15 bp, Homo sapiens
ttattttttagtaga

SEQ ID NO: 46551 - DNA, 15 bp, Homo sapiens
tttattttttagtag

SEQ ID NO: 46552 - DNA, 15 bp, Homo sapiens
ttttattttttagta

SEQ ID NO: 46553 - DNA, 15 bp, Homo sapiens
tttttattttttagt

SEQ ID NO: 46554 - DNA, 15 bp, Homo sapiens
ttttttattttttag

SEQ ID NO: 46555 - DNA, 15 bp, Homo sapiens
tttttttatttttta

SEQ ID NO: 46556 - DNA, 15 bp, Homo sapiens
atttttttatttttt

SEQ ID NO: 46557 - DNA, 15 bp, Homo sapiens
agctaatttttttat

SEQ ID NO: 46558 - DNA, 15 bp, Homo sapiens
cagctaattttttta

SEQ ID NO: 46559 - DNA, 15 bp, Homo sapiens
gaccacacccagcta

SEQ ID NO: 46560 - DNA, 15 bp, Homo sapiens
cgaccacacccagct

SEQ ID NO: 46561 - DNA, 15 bp, Homo sapiens
gcgaccacacccagc

SEQ ID NO: 46562 - DNA, 15 bp, Homo sapiens
cgcgaccacacccag

SEQ ID NO: 46563 - DNA, 15 bp, Homo sapiens
acgcgaccacaccca

SEQ ID NO: 46564 - DNA, 15 bp, Homo sapiens
cacgcgaccacaccc

SEQ ID NO: 46565 - DNA, 15 bp, Homo sapiens
gcacgcgaccacacc

SEQ ID NO: 46566 - DNA, 15 bp, Homo sapiens
cgcacgcgaccacac

SEQ ID NO: 46567 - DNA, 15 bp, Homo sapiens
gcgcacgcgaccaca

SEQ ID NO: 46568 - DNA, 15 bp, Homo sapiens
ggcgcacgcgaccac

SEQ ID NO: 46569 - DNA, 15 bp, Homo sapiens
aggcgcacgcgacca

SEQ ID NO: 46570 - DNA, 15 bp, Homo sapiens
caggcgcacgcgacc

SEQ ID NO: 46571 - DNA, 15 bp, Homo sapiens
acaggcgcacgcgac

SEQ ID NO: 46572 - DNA, 15 bp, Homo sapiens
tacaggcgcacgcga

SEQ ID NO: 46573 - DNA, 15 bp, Homo sapiens
ctacaggcgcacgcg

SEQ ID NO: 46574 - DNA, 15 bp, Homo sapiens
actacaggcgcacgc

SEQ ID NO: 46575 - DNA, 15 bp, Homo sapiens
gactacaggcgcacg

SEQ ID NO: 46576 - DNA, 15 bp, Homo sapiens
acgagtagctgggac

SEQ ID NO: 46577 - DNA, 15 bp, Homo sapiens
cacgagtagctggga

SEQ ID NO: 46578 - DNA, 15 bp, Homo sapiens
tcacgagtagctggg

SEQ ID NO: 46579 - DNA, 15 bp, Homo sapiens
ctcacgagtagctgg

SEQ ID NO: 46580 - DNA, 15 bp, Homo sapiens
cctcacgagtagctg

SEQ ID NO: 46581 - DNA, 15 bp, Homo sapiens
gcctcacgagtagct

SEQ ID NO: 46582 - DNA, 15 bp, Homo sapiens
agcctcacgagtagc

SEQ ID NO: 46583 - DNA, 15 bp, Homo sapiens
cagcctcacgagtag

SEQ ID NO: 46584 - DNA, 15 bp, Homo sapiens
tcagcctcacgagta

SEQ ID NO: 46585 - DNA, 15 bp, Homo sapiens
ctcagcctcacgagt

SEQ ID NO: 46586 - DNA, 15 bp, Homo sapiens
cctcagcctcacgag

SEQ ID NO: 46587 - DNA, 15 bp, Homo sapiens
gcctcagcctcacga

SEQ ID NO: 46588 - DNA, 15 bp, Homo sapiens
tgcctcagcctcacg

SEQ ID NO: 46589 - DNA, 15 bp, Homo sapiens
ctgcctcagcctcac

SEQ ID NO: 46590 - DNA, 15 bp, Homo sapiens
cctgcctcagcctca

SEQ ID NO: 46591 - DNA, 15 bp, Homo sapiens
cggttcaagtgattc

SEQ ID NO: 46592 - DNA, 15 bp, Homo sapiens
ccggttcaagtgatt

SEQ ID NO: 46593 - DNA, 15 bp, Homo sapiens
cccggttcaagtgat

SEQ ID NO: 46594 - DNA, 15 bp, Homo sapiens
ccccggttcaagtga

SEQ ID NO: 46595 - DNA, 15 bp, Homo sapiens
tccccggttcaagtg

SEQ ID NO: 46596 - DNA, 15 bp, Homo sapiens
ctccccggttcaagt

SEQ ID NO: 46597 - DNA, 15 bp, Homo sapiens
tctccccggttcaag

SEQ ID NO: 46598 - DNA, 15 bp, Homo sapiens
atctccccggttcaa

SEQ ID NO: 46599 - DNA, 15 bp, Homo sapiens
catctccccggttca

SEQ ID NO: 46600 - DNA, 15 bp, Homo sapiens
ccatctccccggttc

SEQ ID NO: 46601 - DNA, 15 bp, Homo sapiens
tccatctccccggtt

SEQ ID NO: 46602 - DNA, 15 bp, Homo sapiens
ctccatctccccggt

SEQ ID NO: 46603 - DNA, 15 bp, Homo sapiens
cctccatctccccgg

SEQ ID NO: 46604 - DNA, 15 bp, Homo sapiens
acctccatctccccg

SEQ ID NO: 46605 - DNA, 15 bp, Homo sapiens
aacctccatctcccc

SEQ ID NO: 46606 - DNA, 15 bp, Homo sapiens
caacctccatctccc

SEQ ID NO: 46607 - DNA, 15 bp, Homo sapiens
gcaacctccatctcc

SEQ ID NO: 46608 - DNA, 15 bp, Homo sapiens
tgcaacctccatctc

SEQ ID NO: 46609 - DNA, 15 bp, Homo sapiens
ctgcaacctccatct

SEQ ID NO: 46610 - DNA, 15 bp, Homo sapiens
actgcaacctccatc

SEQ ID NO: 46611 - DNA, 15 bp, Homo sapiens
cactgcaacctccat

SEQ ID NO: 46612 - DNA, 15 bp, Homo sapiens
gccaggctggaatgc

SEQ ID NO: 46613 - DNA, 15 bp, Homo sapiens
cgccaggctggaatg

SEQ ID NO: 46614 - DNA, 15 bp, Homo sapiens
tcgccaggctggaat

SEQ ID NO: 46615 - DNA, 15 bp, Homo sapiens
gtcgccaggctggaa

SEQ ID NO: 46616 - DNA, 15 bp, Homo sapiens
tgctctgtcgccagg

SEQ ID NO: 46617 - DNA, 15 bp, Homo sapiens
ttgctctgtcgccag

SEQ ID NO: 46618 - DNA, 15 bp, Homo sapiens
cttgctctgtcgcca

SEQ ID NO: 46619 - DNA, 15 bp, Homo sapiens
ccttgctctgtcgcc

SEQ ID NO: 46620 - DNA, 15 bp, Homo sapiens
gccttgctctgtcgc

SEQ ID NO: 46621 - DNA, 15 bp, Homo sapiens
agccttgctctgtcg

SEQ ID NO: 46622 - DNA, 15 bp, Homo sapiens
gagccttgctctgtc

SEQ ID NO: 46623 - DNA, 15 bp, Homo sapiens
ggagccttgctctgt

SEQ ID NO: 46624 - DNA, 15 bp, Homo sapiens
cggagccttgctctg

SEQ ID NO: 46625 - DNA, 15 bp, Homo sapiens
acggagccttgctct

SEQ ID NO: 46626 - DNA, 15 bp, Homo sapiens
gacggagccttgctc

SEQ ID NO: 46627 - DNA, 15 bp, Homo sapiens
agacggagccttgct

SEQ ID NO: 46628 - DNA, 15 bp, Homo sapiens
gagacggagccttgc

SEQ ID NO: 46629 - DNA, 15 bp, Homo sapiens
tgagacggagccttg

SEQ ID NO: 46630 - DNA, 15 bp, Homo sapiens
ttgagacggagcctt

SEQ ID NO: 46631 - DNA, 15 bp, Homo sapiens
tttgagacggagcct

SEQ ID NO: 46632 - DNA, 15 bp, Homo sapiens
ttttgagacggagcc

SEQ ID NO: 46633 - DNA, 15 bp, Homo sapiens
tttttgagacggagc

SEQ ID NO: 46634 - DNA, 15 bp, Homo sapiens
cgttttttttttttt

SEQ ID NO: 46635 - DNA, 15 bp, Homo sapiens
acgtttttttttttt

SEQ ID NO: 46636 - DNA, 15 bp, Homo sapiens
cacgttttttttttt

SEQ ID NO: 46637 - DNA, 15 bp, Homo sapiens
tcacgtttttttttt

SEQ ID NO: 46638 - DNA, 15 bp, Homo sapiens
ttcacgttttttttt

SEQ ID NO: 46639 - DNA, 15 bp, Homo sapiens
tttcacgtttttttt

SEQ ID NO: 46640 - DNA, 15 bp, Homo sapiens
ttttcacgttttttt

SEQ ID NO: 46641 - DNA, 15 bp, Homo sapiens
tttttcacgtttttt

SEQ ID NO: 46642 - DNA, 15 bp, Homo sapiens
ttttttcacgttttt

SEQ ID NO: 46643 - DNA, 15 bp, Homo sapiens
attttttcacgtttt

SEQ ID NO: 46644 - DNA, 15 bp, Homo sapiens
tattttttcacgttt

SEQ ID NO: 46645 - DNA, 15 bp, Homo sapiens
ttattttttcacgtt

SEQ ID NO: 46646 - DNA, 15 bp, Homo sapiens
cttattttttcacgt

SEQ ID NO: 46647 - DNA, 15 bp, Homo sapiens
tcttattttttcacg

SEQ ID NO: 46648 - DNA, 15 bp, Homo sapiens
ttcttattttttcac

SEQ ID NO: 46649 - DNA, 15 bp, Homo sapiens
attcttattttttca

SEQ ID NO: 46650 - DNA, 15 bp, Homo sapiens
tattcttattttttc

SEQ ID NO: 46651 - DNA, 15 bp, Homo sapiens
atattcttatttttt

SEQ ID NO: 46652 - DNA, 15 bp, Homo sapiens
aatattcttattttt

SEQ ID NO: 46653 - DNA, 15 bp, Homo sapiens
aaatattcttatttt

SEQ ID NO: 46654 - DNA, 15 bp, Homo sapiens
caaatattcttattt

SEQ ID NO: 46655 - DNA, 15 bp, Homo sapiens
acaaatattcttatt

SEQ ID NO: 46656 - DNA, 15 bp, Homo sapiens
aacaaatattcttat

SEQ ID NO: 46657 - DNA, 15 bp, Homo sapiens
caacaaatattctta

SEQ ID NO: 46658 - DNA, 15 bp, Homo sapiens
tcaacaaatattctt

SEQ ID NO: 46659 - DNA, 15 bp, Homo sapiens
ctcaacaaatattct

SEQ ID NO: 46660 - DNA, 15 bp, Homo sapiens
gctcaacaaatattc

SEQ ID NO: 46661 - DNA, 15 bp, Homo sapiens
tgctcaacaaatatt

SEQ ID NO: 46662 - DNA, 15 bp, Homo sapiens
atgctcaacaaatat

SEQ ID NO: 46663 - DNA, 15 bp, Homo sapiens
tatgctcaacaaata

SEQ ID NO: 46664 - DNA, 15 bp, Homo sapiens
ctatgctcaacaaat

SEQ ID NO: 46665 - DNA, 15 bp, Homo sapiens
gctatgctcaacaaa

SEQ ID NO: 46666 - DNA, 15 bp, Homo sapiens
tgctatgctcaacaa

SEQ ID NO: 46667 - DNA, 15 bp, Homo sapiens
atgctatgctcaaca

SEQ ID NO: 46668 - DNA, 15 bp, Homo sapiens
catgctatgctcaac

SEQ ID NO: 46669 - DNA, 15 bp, Homo sapiens
ccatgctatgctcaa

SEQ ID NO: 46670 - DNA, 15 bp, Homo sapiens
tccatgctatgctca

SEQ ID NO: 46671 - DNA, 15 bp, Homo sapiens
atccatgctatgctc

SEQ ID NO: 46672 - DNA, 15 bp, Homo sapiens
catccatgctatgct

SEQ ID NO: 46673 - DNA, 15 bp, Homo sapiens
tcatccatgctatgc

SEQ ID NO: 46674 - DNA, 15 bp, Homo sapiens
atcatccatgctatg

SEQ ID NO: 46675 - DNA, 15 bp, Homo sapiens
tatcatccatgctat

SEQ ID NO: 46676 - DNA, 15 bp, Homo sapiens
ctatcatccatgcta

SEQ ID NO: 46677 - DNA, 15 bp, Homo sapiens
actatcatccatgct

SEQ ID NO: 46678 - DNA, 15 bp, Homo sapiens
gactatcatccatgc

SEQ ID NO: 46679 - DNA, 15 bp, Homo sapiens
agactatcatccatg

SEQ ID NO: 46680 - DNA, 15 bp, Homo sapiens
aagactatcatccat

SEQ ID NO: 46681 - DNA, 15 bp, Homo sapiens
gaagactatcatcca

SEQ ID NO: 46682 - DNA, 15 bp, Homo sapiens
agaagactatcatcc

SEQ ID NO: 46683 - DNA, 15 bp, Homo sapiens
tagaagactatcatc

SEQ ID NO: 46684 - DNA, 15 bp, Homo sapiens
ttagaagactatcat

SEQ ID NO: 46685 - DNA, 15 bp, Homo sapiens
attagaagactatca

SEQ ID NO: 46686 - DNA, 15 bp, Homo sapiens
tattagaagactatc

SEQ ID NO: 46687 - DNA, 15 bp, Homo sapiens
ctattagaagactat

SEQ ID NO: 46688 - DNA, 15 bp, Homo sapiens
actattagaagacta

SEQ ID NO: 46689 - DNA, 15 bp, Homo sapiens
gactattagaagact

SEQ ID NO: 46690 - DNA, 15 bp, Homo sapiens
tgactattagaagac

SEQ ID NO: 46691 - DNA, 15 bp, Homo sapiens
ttgactattagaaga

SEQ ID NO: 46692 - DNA, 15 bp, Homo sapiens
attgactattagaag

SEQ ID NO: 46693 - DNA, 15 bp, Homo sapiens
gattgactattagaa

SEQ ID NO: 46694 - DNA, 15 bp, Homo sapiens
tgattgactattaga

SEQ ID NO: 46695 - DNA, 15 bp, Homo sapiens
ttgattgactattag

SEQ ID NO: 46696 - DNA, 15 bp, Homo sapiens
attgattgactatta

SEQ ID NO: 46697 - DNA, 15 bp, Homo sapiens
aattgattgactatt

SEQ ID NO: 46698 - DNA, 15 bp, Homo sapiens
taattgattgactat

SEQ ID NO: 46699 - DNA, 15 bp, Homo sapiens
gtaattgattgacta

SEQ ID NO: 46700 - DNA, 15 bp, Homo sapiens
agtaattgattgact

SEQ ID NO: 46701 - DNA, 15 bp, Homo sapiens
aagtaattgattgac

SEQ ID NO: 46702 - DNA, 15 bp, Homo sapiens
aaagtaattgattga

SEQ ID NO: 46703 - DNA, 15 bp, Homo sapiens
taaagtaattgattg

SEQ ID NO: 46704 - DNA, 15 bp, Homo sapiens
ataaagtaattgatt

SEQ ID NO: 46705 - DNA, 15 bp, Homo sapiens
cataaagtaattgat

SEQ ID NO: 46706 - DNA, 15 bp, Homo sapiens
tcataaagtaattga

SEQ ID NO: 46707 - DNA, 15 bp, Homo sapiens
ttcataaagtaattg

SEQ ID NO: 46708 - DNA, 15 bp, Homo sapiens
tttcataaagtaatt

SEQ ID NO: 46709 - DNA, 15 bp, Homo sapiens
ctttcataaagtaat

SEQ ID NO: 46710 - DNA, 15 bp, Homo sapiens
tctttcataaagtaa

SEQ ID NO: 46711 - DNA, 15 bp, Homo sapiens
gtctttcataaagta

SEQ ID NO: 46712 - DNA, 15 bp, Homo sapiens
tgtctttcataaagt

SEQ ID NO: 46713 - DNA, 15 bp, Homo sapiens
ttgtctttcataaag

SEQ ID NO: 46714 - DNA, 15 bp, Homo sapiens
tttgtctttcataaa

SEQ ID NO: 46715 - DNA, 15 bp, Homo sapiens
atttgtctttcataa

SEQ ID NO: 46716 - DNA, 15 bp, Homo sapiens
tatttgtctttcata

SEQ ID NO: 46717 - DNA, 15 bp, Homo sapiens
ttatttgtctttcat

SEQ ID NO: 46718 - DNA, 15 bp, Homo sapiens
attatttgtctttca

SEQ ID NO: 46719 - DNA, 15 bp, Homo sapiens
tattatttgtctttc

SEQ ID NO: 46720 - DNA, 15 bp, Homo sapiens
ctattatttgtcttt

SEQ ID NO: 46721 - DNA, 15 bp, Homo sapiens
actattatttgtctt

SEQ ID NO: 46722 - DNA, 15 bp, Homo sapiens
aactattatttgtct

SEQ ID NO: 46723 - DNA, 15 bp, Homo sapiens
aaactattatttgtc

SEQ ID NO: 46724 - DNA, 15 bp, Homo sapiens
aaaactattatttgt

SEQ ID NO: 46725 - DNA, 15 bp, Homo sapiens
caaaactattatttg

SEQ ID NO: 46726 - DNA, 15 bp, Homo sapiens
gcaaaactattattt

SEQ ID NO: 46727 - DNA, 15 bp, Homo sapiens
agcaaaactattatt

SEQ ID NO: 46728 - DNA, 15 bp, Homo sapiens
cagcaaaactattat

SEQ ID NO: 46729 - DNA, 15 bp, Homo sapiens
gcagcaaaactatta

SEQ ID NO: 46730 - DNA, 15 bp, Homo sapiens
agcagcaaaactatt

SEQ ID NO: 46731 - DNA, 15 bp, Homo sapiens
aagcagcaaaactat

SEQ ID NO: 46732 - DNA, 15 bp, Homo sapiens
gaagcagcaaaacta

SEQ ID NO: 46733 - DNA, 15 bp, Homo sapiens
ggaagcagcaaaact

SEQ ID NO: 46734 - DNA, 15 bp, Homo sapiens
aggaagcagcaaaac

SEQ ID NO: 46735 - DNA, 15 bp, Homo sapiens
aaggaagcagcaaaa

SEQ ID NO: 46736 - DNA, 15 bp, Homo sapiens
taaggaagcagcaaa

SEQ ID NO: 46737 - DNA, 15 bp, Homo sapiens
gtaaggaagcagcaa

SEQ ID NO: 46738 - DNA, 15 bp, Homo sapiens
ggtaaggaagcagca

SEQ ID NO: 46739 - DNA, 15 bp, Homo sapiens
aggtaaggaagcagc

SEQ ID NO: 46740 - DNA, 15 bp, Homo sapiens
gaggtaaggaagcag

SEQ ID NO: 46741 - DNA, 15 bp, Homo sapiens
ggaggtaaggaagca

SEQ ID NO: 46742 - DNA, 15 bp, Homo sapiens
aggaggtaaggaagc

SEQ ID NO: 46743 - DNA, 15 bp, Homo sapiens
aaggaggtaaggaag

SEQ ID NO: 46744 - DNA, 15 bp, Homo sapiens
aaaggaggtaaggaa

SEQ ID NO: 46745 - DNA, 15 bp, Homo sapiens
aaaaggaggtaagga

SEQ ID NO: 46746 - DNA, 15 bp, Homo sapiens
caaaaggaggtaagg

SEQ ID NO: 46747 - DNA, 15 bp, Homo sapiens
acaaaaggaggtaag

SEQ ID NO: 46748 - DNA, 15 bp, Homo sapiens
aacaaaaggaggtaa

SEQ ID NO: 46749 - DNA, 15 bp, Homo sapiens
aaacaaaaggaggta

SEQ ID NO: 46750 - DNA, 15 bp, Homo sapiens
aaaacaaaaggaggt

SEQ ID NO: 46751 - DNA, 15 bp, Homo sapiens
caaaacaaaaggagg

SEQ ID NO: 46752 - DNA, 15 bp, Homo sapiens
ccaaaacaaaaggag

SEQ ID NO: 46753 - DNA, 15 bp, Homo sapiens
cccaaaacaaaagga

SEQ ID NO: 46754 - DNA, 15 bp, Homo sapiens
acccaaaacaaaagg

SEQ ID NO: 46755 - DNA, 15 bp, Homo sapiens
aacccaaaacaaaag

SEQ ID NO: 46756 - DNA, 15 bp, Homo sapiens
taacccaaaacaaaa

SEQ ID NO: 46757 - DNA, 15 bp, Homo sapiens
ttaacccaaaacaaa

SEQ ID NO: 46758 - DNA, 15 bp, Homo sapiens
cttaacccaaaacaa

SEQ ID NO: 46759 - DNA, 15 bp, Homo sapiens
tcttaacccaaaaca

SEQ ID NO: 46760 - DNA, 15 bp, Homo sapiens
atcttaacccaaaac

SEQ ID NO: 46761 - DNA, 15 bp, Homo sapiens
aatcttaacccaaaa

SEQ ID NO: 46762 - DNA, 15 bp, Homo sapiens
aaatcttaacccaaa

SEQ ID NO: 46763 - DNA, 15 bp, Homo sapiens
caaatcttaacccaa

SEQ ID NO: 46764 - DNA, 15 bp, Homo sapiens
ccaaatcttaaccca

SEQ ID NO: 46765 - DNA, 15 bp, Homo sapiens
tccaaatcttaaccc

SEQ ID NO: 46766 - DNA, 15 bp, Homo sapiens
ctccaaatcttaacc

SEQ ID NO: 46767 - DNA, 15 bp, Homo sapiens
actccaaatcttaac

SEQ ID NO: 46768 - DNA, 15 bp, Homo sapiens
cactccaaatcttaa

SEQ ID NO: 46769 - DNA, 15 bp, Homo sapiens
acactccaaatctta

SEQ ID NO: 46770 - DNA, 15 bp, Homo sapiens
cacactccaaatctt

SEQ ID NO: 46771 - DNA, 15 bp, Homo sapiens
ccacactccaaatct

SEQ ID NO: 46772 - DNA, 15 bp, Homo sapiens
cccacactccaaatc

SEQ ID NO: 46773 - DNA, 15 bp, Homo sapiens
gcccacactccaaat

SEQ ID NO: 46774 - DNA, 15 bp, Homo sapiens
ggcccacactccaaa

SEQ ID NO: 46775 - DNA, 15 bp, Homo sapiens
tggcccacactccaa

SEQ ID NO: 46776 - DNA, 15 bp, Homo sapiens
ctggcccacactcca

SEQ ID NO: 46777 - DNA, 15 bp, Homo sapiens
cctggcccacactcc

SEQ ID NO: 46778 - DNA, 15 bp, Homo sapiens
gcctggcccacactc

SEQ ID NO: 46779 - DNA, 15 bp, Homo sapiens
tgcctggcccacact

SEQ ID NO: 46780 - DNA, 15 bp, Homo sapiens
gtgcctggcccacac

SEQ ID NO: 46781 - DNA, 15 bp, Homo sapiens
cgtgcctggcccaca

SEQ ID NO: 46782 - DNA, 15 bp, Homo sapiens
ccgtgcctggcccac

SEQ ID NO: 46783 - DNA, 15 bp, Homo sapiens
accgtgcctggccca

SEQ ID NO: 46784 - DNA, 15 bp, Homo sapiens
caccgtgcctggccc

SEQ ID NO: 46785 - DNA, 15 bp, Homo sapiens
tgtgagccaccgtgc

SEQ ID NO: 46786 - DNA, 15 bp, Homo sapiens
gtgtgagccaccgtg

SEQ ID NO: 46787 - DNA, 15 bp, Homo sapiens
ggtgtgagccaccgt

SEQ ID NO: 46788 - DNA, 15 bp, Homo sapiens
aggtgtgagccaccg

SEQ ID NO: 46789 - DNA, 15 bp, Homo sapiens
agattacaggtgtga

SEQ ID NO: 46790 - DNA, 15 bp, Homo sapiens
gagattacaggtgtg

SEQ ID NO: 46791 - DNA, 15 bp, Homo sapiens
tgagattacaggtgt

SEQ ID NO: 46792 - DNA, 15 bp, Homo sapiens
ctgagattacaggtg

SEQ ID NO: 46793 - DNA, 15 bp, Homo sapiens
gctgagattacaggt

SEQ ID NO: 46794 - DNA, 15 bp, Homo sapiens
tgctgagattacagg

SEQ ID NO: 46795 - DNA, 15 bp, Homo sapiens
gtgctgagattacag

SEQ ID NO: 46796 - DNA, 15 bp, Homo sapiens
agtgctgagattaca

SEQ ID NO: 46797 - DNA, 15 bp, Homo sapiens
aagtgctgagattac

SEQ ID NO: 46798 - DNA, 15 bp, Homo sapiens
aaagtgctgagatta

SEQ ID NO: 46799 - DNA, 15 bp, Homo sapiens
caaagtgctgagatt

SEQ ID NO: 46800 - DNA, 15 bp, Homo sapiens
ccaaagtgctgagat

SEQ ID NO: 46801 - DNA, 15 bp, Homo sapiens
cccaaagtgctgaga

SEQ ID NO: 46802 - DNA, 15 bp, Homo sapiens
tcccaaagtgctgag

SEQ ID NO: 46803 - DNA, 15 bp, Homo sapiens
ctcccaaagtgctga

SEQ ID NO: 46804 - DNA, 15 bp, Homo sapiens
acccgcctcggcctc

SEQ ID NO: 46805 - DNA, 15 bp, Homo sapiens
cacccgcctcggcct

SEQ ID NO: 46806 - DNA, 15 bp, Homo sapiens
ccacccgcctcggcc

SEQ ID NO: 46807 - DNA, 15 bp, Homo sapiens
tccacccgcctcggc

SEQ ID NO: 46808 - DNA, 15 bp, Homo sapiens
atccacccgcctcgg

SEQ ID NO: 46809 - DNA, 15 bp, Homo sapiens
gatccacccgcctcg

SEQ ID NO: 46810 - DNA, 15 bp, Homo sapiens
tgatccacccgcctc

SEQ ID NO: 46811 - DNA, 15 bp, Homo sapiens
ggtgatccacccgcc

SEQ ID NO: 46812 - DNA, 15 bp, Homo sapiens
aggtgatccacccgc

SEQ ID NO: 46813 - DNA, 15 bp, Homo sapiens
caggtgatccacccg

SEQ ID NO: 46814 - DNA, 15 bp, Homo sapiens
cgttggccaggctgg

SEQ ID NO: 46815 - DNA, 15 bp, Homo sapiens
acgttggccaggctg

SEQ ID NO: 46816 - DNA, 15 bp, Homo sapiens
cacgttggccaggct

SEQ ID NO: 46817 - DNA, 15 bp, Homo sapiens
acacgttggccaggc

SEQ ID NO: 46818 - DNA, 15 bp, Homo sapiens
aacacgttggccagg

SEQ ID NO: 46819 - DNA, 15 bp, Homo sapiens
caacacgttggccag

SEQ ID NO: 46820 - DNA, 15 bp, Homo sapiens
tcaacacgttggcca

SEQ ID NO: 46821 - DNA, 15 bp, Homo sapiens
ttcaacacgttggcc

SEQ ID NO: 46822 - DNA, 15 bp, Homo sapiens
tttcaacacgttggc

SEQ ID NO: 46823 - DNA, 15 bp, Homo sapiens
gtttcaacacgttgg

SEQ ID NO: 46824 - DNA, 15 bp, Homo sapiens
ggtttcaacacgttg

SEQ ID NO: 46825 - DNA, 15 bp, Homo sapiens
gggtttcaacacgtt

SEQ ID NO: 46826 - DNA, 15 bp, Homo sapiens
ggggtttcaacacgt

SEQ ID NO: 46827 - DNA, 15 bp, Homo sapiens
cggggtttcaacacg

SEQ ID NO: 46828 - DNA, 15 bp, Homo sapiens
acggggtttcaacac

SEQ ID NO: 46829 - DNA, 15 bp, Homo sapiens
gacggggtttcaaca

SEQ ID NO: 46830 - DNA, 15 bp, Homo sapiens
agacggggtttcaac

SEQ ID NO: 46831 - DNA, 15 bp, Homo sapiens
gagacggggtttcaa

SEQ ID NO: 46832 - DNA, 15 bp, Homo sapiens
atatttttagtagag

SEQ ID NO: 46833 - DNA, 15 bp, Homo sapiens
tatatttttagtaga

SEQ ID NO: 46834 - DNA, 15 bp, Homo sapiens
ttatatttttagtag

SEQ ID NO: 46835 - DNA, 15 bp, Homo sapiens
tttatatttttagta

SEQ ID NO: 46836 - DNA, 15 bp, Homo sapiens
ttttatatttttagt

SEQ ID NO: 46837 - DNA, 15 bp, Homo sapiens
tttttatatttttag

SEQ ID NO: 46838 - DNA, 15 bp, Homo sapiens
atttttatattttta

SEQ ID NO: 46839 - DNA, 15 bp, Homo sapiens
aatttttatattttt

SEQ ID NO: 46840 - DNA, 15 bp, Homo sapiens
taatttttatatttt

SEQ ID NO: 46841 - DNA, 15 bp, Homo sapiens
ctaatttttatattt

SEQ ID NO: 46842 - DNA, 15 bp, Homo sapiens
cctaatttttatatt

SEQ ID NO: 46843 - DNA, 15 bp, Homo sapiens
acctaatttttatat

SEQ ID NO: 46844 - DNA, 15 bp, Homo sapiens
cacctaatttttata

SEQ ID NO: 46845 - DNA, 15 bp, Homo sapiens
ccacctaatttttat

SEQ ID NO: 46846 - DNA, 15 bp, Homo sapiens
cccacctaattttta

SEQ ID NO: 46847 - DNA, 15 bp, Homo sapiens
gcccacctaattttt

SEQ ID NO: 46848 - DNA, 15 bp, Homo sapiens
cgcccacctaatttt

SEQ ID NO: 46849 - DNA, 15 bp, Homo sapiens
acgcccacctaattt

SEQ ID NO: 46850 - DNA, 15 bp, Homo sapiens
cacgcccacctaatt

SEQ ID NO: 46851 - DNA, 15 bp, Homo sapiens
ccacgcccacctaat

SEQ ID NO: 46852 - DNA, 15 bp, Homo sapiens
accacgcccacctaa

SEQ ID NO: 46853 - DNA, 15 bp, Homo sapiens
caccacgcccaccta

SEQ ID NO: 46854 - DNA, 15 bp, Homo sapiens
ccaccacgcccacct

SEQ ID NO: 46855 - DNA, 15 bp, Homo sapiens
gccaccacgcccacc

SEQ ID NO: 46856 - DNA, 15 bp, Homo sapiens
tgccaccacgcccac

SEQ ID NO: 46857 - DNA, 15 bp, Homo sapiens
gattacaggtgcctg

SEQ ID NO: 46858 - DNA, 15 bp, Homo sapiens
ggattacaggtgcct

SEQ ID NO: 46859 - DNA, 15 bp, Homo sapiens
gggattacaggtgcc

SEQ ID NO: 46860 - DNA, 15 bp, Homo sapiens
cgattctgctgcctc

SEQ ID NO: 46861 - DNA, 15 bp, Homo sapiens
gcgattctgctgcct

SEQ ID NO: 46862 - DNA, 15 bp, Homo sapiens
agcgattctgctgcc

SEQ ID NO: 46863 - DNA, 15 bp, Homo sapiens
aagcgattctgctgc

SEQ ID NO: 46864 - DNA, 15 bp, Homo sapiens
caagcgattctgctg

SEQ ID NO: 46865 - DNA, 15 bp, Homo sapiens
tcaagcgattctgct

SEQ ID NO: 46866 - DNA, 15 bp, Homo sapiens
ttcaagcgattctgc

SEQ ID NO: 46867 - DNA, 15 bp, Homo sapiens
gttcaagcgattctg

SEQ ID NO: 46868 - DNA, 15 bp, Homo sapiens
gtcactgcaacctcc

SEQ ID NO: 46869 - DNA, 15 bp, Homo sapiens
ggtcactgcaacctc

SEQ ID NO: 46870 - DNA, 15 bp, Homo sapiens
gggtcactgcaacct

SEQ ID NO: 46871 - DNA, 15 bp, Homo sapiens
tgggtcactgcaacc

SEQ ID NO: 46872 - DNA, 15 bp, Homo sapiens
ttgggtcactgcaac

SEQ ID NO: 46873 - DNA, 15 bp, Homo sapiens
cttgggtcactgcaa

SEQ ID NO: 46874 - DNA, 15 bp, Homo sapiens
tcttgggtcactgca

SEQ ID NO: 46875 - DNA, 15 bp, Homo sapiens
atcttgggtcactgc

SEQ ID NO: 46876 - DNA, 15 bp, Homo sapiens
gatcttgggtcactg

SEQ ID NO: 46877 - DNA, 15 bp, Homo sapiens
cgatcttgggtcact

SEQ ID NO: 46878 - DNA, 15 bp, Homo sapiens
gcgatcttgggtcac

SEQ ID NO: 46879 - DNA, 15 bp, Homo sapiens
tgcgatcttgggtca

SEQ ID NO: 46880 - DNA, 15 bp, Homo sapiens
gtgcgatcttgggtc

SEQ ID NO: 46881 - DNA, 15 bp, Homo sapiens
ggtgcgatcttgggt

SEQ ID NO: 46882 - DNA, 15 bp, Homo sapiens
tggtgcgatcttggg

SEQ ID NO: 46883 - DNA, 15 bp, Homo sapiens
tccccaggctggagt

SEQ ID NO: 46884 - DNA, 15 bp, Homo sapiens
gtccccaggctggag

SEQ ID NO: 46885 - DNA, 15 bp, Homo sapiens
tgtccccaggctgga

SEQ ID NO: 46886 - DNA, 15 bp, Homo sapiens
ttgtccccaggctgg

SEQ ID NO: 46887 - DNA, 15 bp, Homo sapiens
cttgtccccaggctg

SEQ ID NO: 46888 - DNA, 15 bp, Homo sapiens
tcttgtccccaggct

SEQ ID NO: 46889 - DNA, 15 bp, Homo sapiens
ctcttgtccccaggc

SEQ ID NO: 46890 - DNA, 15 bp, Homo sapiens
gctcttgtccccagg

SEQ ID NO: 46891 - DNA, 15 bp, Homo sapiens
cgctcttgtccccag

SEQ ID NO: 46892 - DNA, 15 bp, Homo sapiens
tcgctcttgtcccca

SEQ ID NO: 46893 - DNA, 15 bp, Homo sapiens
ctcgctcttgtcccc

SEQ ID NO: 46894 - DNA, 15 bp, Homo sapiens
tctcgctcttgtccc

SEQ ID NO: 46895 - DNA, 15 bp, Homo sapiens
atctcgctcttgtcc

SEQ ID NO: 46896 - DNA, 15 bp, Homo sapiens
aatctcgctcttgtc

SEQ ID NO: 46897 - DNA, 15 bp, Homo sapiens
gaatctcgctcttgt

SEQ ID NO: 46898 - DNA, 15 bp, Homo sapiens
agaatctcgctcttg

SEQ ID NO: 46899 - DNA, 15 bp, Homo sapiens
aagaatctcgctctt

SEQ ID NO: 46900 - DNA, 15 bp, Homo sapiens
caagaatctcgctct

SEQ ID NO: 46901 - DNA, 15 bp, Homo sapiens
acaagaatctcgctc

SEQ ID NO: 46902 - DNA, 15 bp, Homo sapiens
gacaagaatctcgct

SEQ ID NO: 46903 - DNA, 15 bp, Homo sapiens
agacaagaatctcgc

SEQ ID NO: 46904 - DNA, 15 bp, Homo sapiens
gagacaagaatctcg

SEQ ID NO: 46905 - DNA, 15 bp, Homo sapiens
tgagacaagaatctc

SEQ ID NO: 46906 - DNA, 15 bp, Homo sapiens
ttgagacaagaatct

SEQ ID NO: 46907 - DNA, 15 bp, Homo sapiens
tttgagacaagaatc

SEQ ID NO: 46908 - DNA, 15 bp, Homo sapiens
ttttgagacaagaat

SEQ ID NO: 46909 - DNA, 15 bp, Homo sapiens
tttttgagacaagaa

SEQ ID NO: 46910 - DNA, 15 bp, Homo sapiens
ttttttgagacaaga

SEQ ID NO: 46911 - DNA, 15 bp, Homo sapiens
tttttttgagacaag

SEQ ID NO: 46912 - DNA, 15 bp, Homo sapiens
ttttttttgagacaa

SEQ ID NO: 46913 - DNA, 15 bp, Homo sapiens
aaacctttttttttt

SEQ ID NO: 46914 - DNA, 15 bp, Homo sapiens
caaaccttttttttt

SEQ ID NO: 46915 - DNA, 15 bp, Homo sapiens
ccaaacctttttttt

SEQ ID NO: 46916 - DNA, 15 bp, Homo sapiens
tccaaaccttttttt

SEQ ID NO: 46917 - DNA, 15 bp, Homo sapiens
ctccaaacctttttt

SEQ ID NO: 46918 - DNA, 15 bp, Homo sapiens
cctccaaaccttttt

SEQ ID NO: 46919 - DNA, 15 bp, Homo sapiens
ccctccaaacctttt

SEQ ID NO: 46920 - DNA, 15 bp, Homo sapiens
accctccaaaccttt

SEQ ID NO: 46921 - DNA, 15 bp, Homo sapiens
caccctccaaacctt

SEQ ID NO: 46922 - DNA, 15 bp, Homo sapiens
ccaccctccaaacct

SEQ ID NO: 46923 - DNA, 15 bp, Homo sapiens
accaccctccaaacc

SEQ ID NO: 46924 - DNA, 15 bp, Homo sapiens
caccaccctccaaac

SEQ ID NO: 46925 - DNA, 15 bp, Homo sapiens
tcaccaccctccaaa

SEQ ID NO: 46926 - DNA, 15 bp, Homo sapiens
ctcaccaccctccaa

SEQ ID NO: 46927 - DNA, 15 bp, Homo sapiens
gctcaccaccctcca

SEQ ID NO: 46928 - DNA, 15 bp, Homo sapiens
agctcaccaccctcc

SEQ ID NO: 46929 - DNA, 15 bp, Homo sapiens
cagctcaccaccctc

SEQ ID NO: 46930 - DNA, 15 bp, Homo sapiens
tcagctcaccaccct

SEQ ID NO: 46931 - DNA, 15 bp, Homo sapiens
ctcagctcaccaccc

SEQ ID NO: 46932 - DNA, 15 bp, Homo sapiens
tctcagctcaccacc

SEQ ID NO: 46933 - DNA, 15 bp, Homo sapiens
atctcagctcaccac

SEQ ID NO: 46934 - DNA, 15 bp, Homo sapiens
tatctcagctcacca

SEQ ID NO: 46935 - DNA, 15 bp, Homo sapiens
ctatctcagctcacc

SEQ ID NO: 46936 - DNA, 15 bp, Homo sapiens
actatctcagctcac

SEQ ID NO: 46937 - DNA, 15 bp, Homo sapiens
gactatctcagctca

SEQ ID NO: 46938 - DNA, 15 bp, Homo sapiens
tgactatctcagctc

SEQ ID NO: 46939 - DNA, 15 bp, Homo sapiens
ttgactatctcagct

SEQ ID NO: 46940 - DNA, 15 bp, Homo sapiens
gttgactatctcagc

SEQ ID NO: 46941 - DNA, 15 bp, Homo sapiens
agttgactatctcag

SEQ ID NO: 46942 - DNA, 15 bp, Homo sapiens
tagttgactatctca

SEQ ID NO: 46943 - DNA, 15 bp, Homo sapiens
atagttgactatctc

SEQ ID NO: 46944 - DNA, 15 bp, Homo sapiens
aatagttgactatct

SEQ ID NO: 46945 - DNA, 15 bp, Homo sapiens
taatagttgactatc

SEQ ID NO: 46946 - DNA, 15 bp, Homo sapiens
ttaatagttgactat

SEQ ID NO: 46947 - DNA, 15 bp, Homo sapiens
gttaatagttgacta

SEQ ID NO: 46948 - DNA, 15 bp, Homo sapiens
agttaatagttgact

SEQ ID NO: 46949 - DNA, 15 bp, Homo sapiens
gagttaatagttgac

SEQ ID NO: 46950 - DNA, 15 bp, Homo sapiens
ggagttaatagttga

SEQ ID NO: 46951 - DNA, 15 bp, Homo sapiens
aggagttaatagttg

SEQ ID NO: 46952 - DNA, 15 bp, Homo sapiens
taggagttaatagtt

SEQ ID NO: 46953 - DNA, 15 bp, Homo sapiens
ataggagttaatagt

SEQ ID NO: 46954 - DNA, 15 bp, Homo sapiens
gataggagttaatag

SEQ ID NO: 46955 - DNA, 15 bp, Homo sapiens
agataggagttaata

SEQ ID NO: 46956 - DNA, 15 bp, Homo sapiens
tagataggagttaat

SEQ ID NO: 46957 - DNA, 15 bp, Homo sapiens
gtagataggagttaa

SEQ ID NO: 46958 - DNA, 15 bp, Homo sapiens
ggtagataggagtta

SEQ ID NO: 46959 - DNA, 15 bp, Homo sapiens
aggtagataggagtt

SEQ ID NO: 46960 - DNA, 15 bp, Homo sapiens
caggtagataggagt

SEQ ID NO: 46961 - DNA, 15 bp, Homo sapiens
gcaggtagataggag

SEQ ID NO: 46962 - DNA, 15 bp, Homo sapiens
agcaggtagatagga

SEQ ID NO: 46963 - DNA, 15 bp, Homo sapiens
cagcaggtagatagg

SEQ ID NO: 46964 - DNA, 15 bp, Homo sapiens
ccagcaggtagatag

SEQ ID NO: 46965 - DNA, 15 bp, Homo sapiens
cccagcaggtagata

SEQ ID NO: 46966 - DNA, 15 bp, Homo sapiens
tcccagcaggtagat

SEQ ID NO: 46967 - DNA, 15 bp, Homo sapiens
gtcccagcaggtaga

SEQ ID NO: 46968 - DNA, 15 bp, Homo sapiens
agtcccagcaggtag

SEQ ID NO: 46969 - DNA, 15 bp, Homo sapiens
tagtcccagcaggta

SEQ ID NO: 46970 - DNA, 15 bp, Homo sapiens
gtagtcccagcaggt

SEQ ID NO: 46971 - DNA, 15 bp, Homo sapiens
tgtagtcccagcagg

SEQ ID NO: 46972 - DNA, 15 bp, Homo sapiens
gtgtagtcccagcag

SEQ ID NO: 46973 - DNA, 15 bp, Homo sapiens
agtgtagtcccagca

SEQ ID NO: 46974 - DNA, 15 bp, Homo sapiens
cagtgtagtcccagc

SEQ ID NO: 46975 - DNA, 15 bp, Homo sapiens
ccagtgtagtcccag

SEQ ID NO: 46976 - DNA, 15 bp, Homo sapiens
accagtgtagtccca

SEQ ID NO: 46977 - DNA, 15 bp, Homo sapiens
caccagtgtagtccc

SEQ ID NO: 46978 - DNA, 15 bp, Homo sapiens
tcaccagtgtagtcc

SEQ ID NO: 46979 - DNA, 15 bp, Homo sapiens
ctcaccagtgtagtc

SEQ ID NO: 46980 - DNA, 15 bp, Homo sapiens
cctcaccagtgtagt

SEQ ID NO: 46981 - DNA, 15 bp, Homo sapiens
acctcaccagtgtag

SEQ ID NO: 46982 - DNA, 15 bp, Homo sapiens
cacctcaccagtgta

SEQ ID NO: 46983 - DNA, 15 bp, Homo sapiens
ccacctcaccagtgt

SEQ ID NO: 46984 - DNA, 15 bp, Homo sapiens
tccacctcaccagtg

SEQ ID NO: 46985 - DNA, 15 bp, Homo sapiens
ctccacctcaccagt

SEQ ID NO: 46986 - DNA, 15 bp, Homo sapiens
gctccacctcaccag

SEQ ID NO: 46987 - DNA, 15 bp, Homo sapiens
ggctccacctcacca

SEQ ID NO: 46988 - DNA, 15 bp, Homo sapiens
aggctccacctcacc

SEQ ID NO: 46989 - DNA, 15 bp, Homo sapiens
taggctccacctcac

SEQ ID NO: 46990 - DNA, 15 bp, Homo sapiens
ttaggctccacctca

SEQ ID NO: 46991 - DNA, 15 bp, Homo sapiens
cttaggctccacctc

SEQ ID NO: 46992 - DNA, 15 bp, Homo sapiens
acttaggctccacct

SEQ ID NO: 46993 - DNA, 15 bp, Homo sapiens
gacttaggctccacc

SEQ ID NO: 46994 - DNA, 15 bp, Homo sapiens
ggacttaggctccac

SEQ ID NO: 46995 - DNA, 15 bp, Homo sapiens
aggacttaggctcca

SEQ ID NO: 46996 - DNA, 15 bp, Homo sapiens
taggacttaggctcc

SEQ ID NO: 46997 - DNA, 15 bp, Homo sapiens
ttaggacttaggctc

SEQ ID NO: 46998 - DNA, 15 bp, Homo sapiens
tttaggacttaggct

SEQ ID NO: 46999 - DNA, 15 bp, Homo sapiens
ttttaggacttaggc

SEQ ID NO: 47000 - DNA, 15 bp, Homo sapiens
gttttaggacttagg

SEQ ID NO: 47001 - DNA, 15 bp, Homo sapiens
tgttttaggacttag

SEQ ID NO: 47002 - DNA, 15 bp, Homo sapiens
ttgttttaggactta

SEQ ID NO: 47003 - DNA, 15 bp, Homo sapiens
gttgttttaggactt

SEQ ID NO: 47004 - DNA, 15 bp, Homo sapiens
tgttgttttaggact

SEQ ID NO: 47005 - DNA, 15 bp, Homo sapiens
ttgttgttttaggac

SEQ ID NO: 47006 - DNA, 15 bp, Homo sapiens
cttgttgttttagga

SEQ ID NO: 47007 - DNA, 15 bp, Homo sapiens
acttgttgttttagg

SEQ ID NO: 47008 - DNA, 15 bp, Homo sapiens
cacttgttgttttag

SEQ ID NO: 47009 - DNA, 15 bp, Homo sapiens
tcacttgttgtttta

SEQ ID NO: 47010 - DNA, 15 bp, Homo sapiens
ctcacttgttgtttt

SEQ ID NO: 47011 - DNA, 15 bp, Homo sapiens
cctcacttgttgttt

SEQ ID NO: 47012 - DNA, 15 bp, Homo sapiens
gcctcacttgttgtt

SEQ ID NO: 47013 - DNA, 15 bp, Homo sapiens
tgcctcacttgttgt

SEQ ID NO: 47014 - DNA, 15 bp, Homo sapiens
ctgcctcacttgttg

SEQ ID NO: 47015 - DNA, 15 bp, Homo sapiens
gctgcctcacttgtt

SEQ ID NO: 47016 - DNA, 15 bp, Homo sapiens
agctgcctcacttgt

SEQ ID NO: 47017 - DNA, 15 bp, Homo sapiens
cagctgcctcacttg

SEQ ID NO: 47018 - DNA, 15 bp, Homo sapiens
ccagctgcctcactt

SEQ ID NO: 47019 - DNA, 15 bp, Homo sapiens
tccagctgcctcact

SEQ ID NO: 47020 - DNA, 15 bp, Homo sapiens
gtccagctgcctcac

SEQ ID NO: 47021 - DNA, 15 bp, Homo sapiens
cgtccagctgcctca

SEQ ID NO: 47022 - DNA, 15 bp, Homo sapiens
gcgtccagctgcctc

SEQ ID NO: 47023 - DNA, 15 bp, Homo sapiens
cgcgtccagctgcct

SEQ ID NO: 47024 - DNA, 15 bp, Homo sapiens
ccgcgtccagctgcc

SEQ ID NO: 47025 - DNA, 15 bp, Homo sapiens
accgcgtccagctgc

SEQ ID NO: 47026 - DNA, 15 bp, Homo sapiens
caccgcgtccagctg

SEQ ID NO: 47027 - DNA, 15 bp, Homo sapiens
ccaccgcgtccagct

SEQ ID NO: 47028 - DNA, 15 bp, Homo sapiens
gccaccgcgtccagc

SEQ ID NO: 47029 - DNA, 15 bp, Homo sapiens
agccaccgcgtccag

SEQ ID NO: 47030 - DNA, 15 bp, Homo sapiens
gagccaccgcgtcca

SEQ ID NO: 47031 - DNA, 15 bp, Homo sapiens
cgagccaccgcgtcc

SEQ ID NO: 47032 - DNA, 15 bp, Homo sapiens
gcgagccaccgcgtc

SEQ ID NO: 47033 - DNA, 15 bp, Homo sapiens
tgcgagccaccgcgt

SEQ ID NO: 47034 - DNA, 15 bp, Homo sapiens
atgcgagccaccgcg

SEQ ID NO: 47035 - DNA, 15 bp, Homo sapiens
gatgcgagccaccgc

SEQ ID NO: 47036 - DNA, 15 bp, Homo sapiens
tgatgcgagccaccg

SEQ ID NO: 47037 - DNA, 15 bp, Homo sapiens
ctgatgcgagccacc

SEQ ID NO: 47038 - DNA, 15 bp, Homo sapiens
actgatgcgagccac

SEQ ID NO: 47039 - DNA, 15 bp, Homo sapiens
tactgatgcgagcca

SEQ ID NO: 47040 - DNA, 15 bp, Homo sapiens
ttactgatgcgagcc

SEQ ID NO: 47041 - DNA, 15 bp, Homo sapiens
attactgatgcgagc

SEQ ID NO: 47042 - DNA, 15 bp, Homo sapiens
gattactgatgcgag

SEQ ID NO: 47043 - DNA, 15 bp, Homo sapiens
ggattactgatgcga

SEQ ID NO: 47044 - DNA, 15 bp, Homo sapiens
gggattactgatgcg

SEQ ID NO: 47045 - DNA, 15 bp, Homo sapiens
tgggattactgatgc

SEQ ID NO: 47046 - DNA, 15 bp, Homo sapiens
ctgggattactgatg

SEQ ID NO: 47047 - DNA, 15 bp, Homo sapiens
gctgggattactgat

SEQ ID NO: 47048 - DNA, 15 bp, Homo sapiens
tgctgggattactga

SEQ ID NO: 47049 - DNA, 15 bp, Homo sapiens
gtgctgggattactg

SEQ ID NO: 47050 - DNA, 15 bp, Homo sapiens
agtgctgggattact

SEQ ID NO: 47051 - DNA, 15 bp, Homo sapiens
gctcccaaagtgctg

SEQ ID NO: 47052 - DNA, 15 bp, Homo sapiens
ggctcccaaagtgct

SEQ ID NO: 47053 - DNA, 15 bp, Homo sapiens
aggctcccaaagtgc

SEQ ID NO: 47054 - DNA, 15 bp, Homo sapiens
caggctcccaaagtg

SEQ ID NO: 47055 - DNA, 15 bp, Homo sapiens
tcaggctcccaaagt

SEQ ID NO: 47056 - DNA, 15 bp, Homo sapiens
ctcaggctcccaaag

SEQ ID NO: 47057 - DNA, 15 bp, Homo sapiens
cctcaggctcccaaa

SEQ ID NO: 47058 - DNA, 15 bp, Homo sapiens
gcctcaggctcccaa

SEQ ID NO: 47059 - DNA, 15 bp, Homo sapiens
cgcctcaggctccca

SEQ ID NO: 47060 - DNA, 15 bp, Homo sapiens
ccgcctcaggctccc

SEQ ID NO: 47061 - DNA, 15 bp, Homo sapiens
cccgcctcaggctcc

SEQ ID NO: 47062 - DNA, 15 bp, Homo sapiens
gcccgcctcaggctc

SEQ ID NO: 47063 - DNA, 15 bp, Homo sapiens
tgcccgcctcaggct

SEQ ID NO: 47064 - DNA, 15 bp, Homo sapiens
ctgcccgcctcaggc

SEQ ID NO: 47065 - DNA, 15 bp, Homo sapiens
tctgcccgcctcagg

SEQ ID NO: 47066 - DNA, 15 bp, Homo sapiens
atctgcccgcctcag

SEQ ID NO: 47067 - DNA, 15 bp, Homo sapiens
gatctgcccgcctca

SEQ ID NO: 47068 - DNA, 15 bp, Homo sapiens
tgtgatctgcccgcc

SEQ ID NO: 47069 - DNA, 15 bp, Homo sapiens
ttgtgatctgcccgc

SEQ ID NO: 47070 - DNA, 15 bp, Homo sapiens
cttgtgatctgcccg

SEQ ID NO: 47071 - DNA, 15 bp, Homo sapiens
ccttgtgatctgccc

SEQ ID NO: 47072 - DNA, 15 bp, Homo sapiens
accttgtgatctgcc

SEQ ID NO: 47073 - DNA, 15 bp, Homo sapiens
gaccttgtgatctgc

SEQ ID NO: 47074 - DNA, 15 bp, Homo sapiens
tgaccttgtgatctg

SEQ ID NO: 47075 - DNA, 15 bp, Homo sapiens
ctgaccttgtgatct

SEQ ID NO: 47076 - DNA, 15 bp, Homo sapiens
cctgaccttgtgatc

SEQ ID NO: 47077 - DNA, 15 bp, Homo sapiens
tcctgaccttgtgat

SEQ ID NO: 47078 - DNA, 15 bp, Homo sapiens
ctcctgaccttgtga

SEQ ID NO: 47079 - DNA, 15 bp, Homo sapiens
actcctgaccttgtg

SEQ ID NO: 47080 - DNA, 15 bp, Homo sapiens
aactcctgaccttgt

SEQ ID NO: 47081 - DNA, 15 bp, Homo sapiens
gaactcctgaccttg

SEQ ID NO: 47082 - DNA, 15 bp, Homo sapiens
cgaactcctgacctt

SEQ ID NO: 47083 - DNA, 15 bp, Homo sapiens
tttaccatattggcc

SEQ ID NO: 47084 - DNA, 15 bp, Homo sapiens
ttttaccatattggc

SEQ ID NO: 47085 - DNA, 15 bp, Homo sapiens
gttttaccatattgg

SEQ ID NO: 47086 - DNA, 15 bp, Homo sapiens
ggttttaccatattg

SEQ ID NO: 47087 - DNA, 15 bp, Homo sapiens
gggttttaccatatt

SEQ ID NO: 47088 - DNA, 15 bp, Homo sapiens
tgggttttaccatat

SEQ ID NO: 47089 - DNA, 15 bp, Homo sapiens
ctgggttttaccata

SEQ ID NO: 47090 - DNA, 15 bp, Homo sapiens
actgggttttaccat

SEQ ID NO: 47091 - DNA, 15 bp, Homo sapiens
gactgggttttacca

SEQ ID NO: 47092 - DNA, 15 bp, Homo sapiens
agactgggttttacc

SEQ ID NO: 47093 - DNA, 15 bp, Homo sapiens
gagactgggttttac

SEQ ID NO: 47094 - DNA, 15 bp, Homo sapiens
agagactgggtttta

SEQ ID NO: 47095 - DNA, 15 bp, Homo sapiens
tagagactgggtttt

SEQ ID NO: 47096 - DNA, 15 bp, Homo sapiens
gtagagactgggttt

SEQ ID NO: 47097 - DNA, 15 bp, Homo sapiens
agtagagactgggtt

SEQ ID NO: 47098 - DNA, 15 bp, Homo sapiens
tagtagagactgggt

SEQ ID NO: 47099 - DNA, 15 bp, Homo sapiens
ttagtagagactggg

SEQ ID NO: 47100 - DNA, 15 bp, Homo sapiens
tttagtagagactgg

SEQ ID NO: 47101 - DNA, 15 bp, Homo sapiens
ttttagtagagactg

SEQ ID NO: 47102 - DNA, 15 bp, Homo sapiens
tttttagtagagact

SEQ ID NO: 47103 - DNA, 15 bp, Homo sapiens
atgtatttttagtag

SEQ ID NO: 47104 - DNA, 15 bp, Homo sapiens
tatgtatttttagta

SEQ ID NO: 47105 - DNA, 15 bp, Homo sapiens
ttatgtatttttagt

SEQ ID NO: 47106 - DNA, 15 bp, Homo sapiens
tttatgtatttttag

SEQ ID NO: 47107 - DNA, 15 bp, Homo sapiens
atttatgtattttta

SEQ ID NO: 47108 - DNA, 15 bp, Homo sapiens
aatttatgtattttt

SEQ ID NO: 47109 - DNA, 15 bp, Homo sapiens
caatttatgtatttt

SEQ ID NO: 47110 - DNA, 15 bp, Homo sapiens
ccaatttatgtattt

SEQ ID NO: 47111 - DNA, 15 bp, Homo sapiens
gccaatttatgtatt

SEQ ID NO: 47112 - DNA, 15 bp, Homo sapiens
agccaatttatgtat

SEQ ID NO: 47113 - DNA, 15 bp, Homo sapiens
cagccaatttatgta

SEQ ID NO: 47114 - DNA, 15 bp, Homo sapiens
ccagccaatttatgt

SEQ ID NO: 47115 - DNA, 15 bp, Homo sapiens
cccagccaatttatg

SEQ ID NO: 47116 - DNA, 15 bp, Homo sapiens
gcccagccaatttat

SEQ ID NO: 47117 - DNA, 15 bp, Homo sapiens
cgcccagccaattta

SEQ ID NO: 47118 - DNA, 15 bp, Homo sapiens
acgcccagccaattt

SEQ ID NO: 47119 - DNA, 15 bp, Homo sapiens
cacgcccagccaatt

SEQ ID NO: 47120 - DNA, 15 bp, Homo sapiens
ccacgcccagccaat

SEQ ID NO: 47121 - DNA, 15 bp, Homo sapiens
accacgcccagccaa

SEQ ID NO: 47122 - DNA, 15 bp, Homo sapiens
caccacgcccagcca

SEQ ID NO: 47123 - DNA, 15 bp, Homo sapiens
caccaccacgcccag

SEQ ID NO: 47124 - DNA, 15 bp, Homo sapiens
acaccaccacgccca

SEQ ID NO: 47125 - DNA, 15 bp, Homo sapiens
cacaccaccacgccc

SEQ ID NO: 47126 - DNA, 15 bp, Homo sapiens
gcacaccaccacgcc

SEQ ID NO: 47127 - DNA, 15 bp, Homo sapiens
tgcacaccaccacgc

SEQ ID NO: 47128 - DNA, 15 bp, Homo sapiens
gtgcacaccaccacg

SEQ ID NO: 47129 - DNA, 15 bp, Homo sapiens
ggtgcacaccaccac

SEQ ID NO: 47130 - DNA, 15 bp, Homo sapiens
aggtgcacaccacca

SEQ ID NO: 47131 - DNA, 15 bp, Homo sapiens
caggtgcacaccacc

SEQ ID NO: 47132 - DNA, 15 bp, Homo sapiens
acaggtgcacaccac

SEQ ID NO: 47133 - DNA, 15 bp, Homo sapiens
tacaggtgcacacca

SEQ ID NO: 47134 - DNA, 15 bp, Homo sapiens
ttacaggtgcacacc

SEQ ID NO: 47135 - DNA, 15 bp, Homo sapiens
attacaggtgcacac

SEQ ID NO: 47136 - DNA, 15 bp, Homo sapiens
gattacaggtgcaca

SEQ ID NO: 47137 - DNA, 15 bp, Homo sapiens
ggattacaggtgcac

SEQ ID NO: 47138 - DNA, 15 bp, Homo sapiens
gtcagcctcccaagt

SEQ ID NO: 47139 - DNA, 15 bp, Homo sapiens
tgtcagcctcccaag

SEQ ID NO: 47140 - DNA, 15 bp, Homo sapiens
gtgtcagcctcccaa

SEQ ID NO: 47141 - DNA, 15 bp, Homo sapiens
tgtgtcagcctccca

SEQ ID NO: 47142 - DNA, 15 bp, Homo sapiens
ctgtgtcagcctccc

SEQ ID NO: 47143 - DNA, 15 bp, Homo sapiens
tctgtgtcagcctcc

SEQ ID NO: 47144 - DNA, 15 bp, Homo sapiens
ttctgtgtcagcctc

SEQ ID NO: 47145 - DNA, 15 bp, Homo sapiens
cttctgtgtcagcct

SEQ ID NO: 47146 - DNA, 15 bp, Homo sapiens
tcttctgtgtcagcc

SEQ ID NO: 47147 - DNA, 15 bp, Homo sapiens
ttcttctgtgtcagc

SEQ ID NO: 47148 - DNA, 15 bp, Homo sapiens
attcttctgtgtcag

SEQ ID NO: 47149 - DNA, 15 bp, Homo sapiens
aattcttctgtgtca

SEQ ID NO: 47150 - DNA, 15 bp, Homo sapiens
caattcttctgtgtc

SEQ ID NO: 47151 - DNA, 15 bp, Homo sapiens
gcaattcttctgtgt

SEQ ID NO: 47152 - DNA, 15 bp, Homo sapiens
agcaattcttctgtg

SEQ ID NO: 47153 - DNA, 15 bp, Homo sapiens
aagcaattcttctgt

SEQ ID NO: 47154 - DNA, 15 bp, Homo sapiens
caagcaattcttctg

SEQ ID NO: 47155 - DNA, 15 bp, Homo sapiens
tcaagcaattcttct

SEQ ID NO: 47156 - DNA, 15 bp, Homo sapiens
ttcaagcaattcttc

SEQ ID NO: 47157 - DNA, 15 bp, Homo sapiens
agttcaagcaattct

SEQ ID NO: 47158 - DNA, 15 bp, Homo sapiens
gagttcaagcaattc

SEQ ID NO: 47159 - DNA, 15 bp, Homo sapiens
agagttcaagcaatt

SEQ ID NO: 47160 - DNA, 15 bp, Homo sapiens
cagagttcaagcaat

SEQ ID NO: 47161 - DNA, 15 bp, Homo sapiens
ccagagttcaagcaa

SEQ ID NO: 47162 - DNA, 15 bp, Homo sapiens
tccagagttcaagca

SEQ ID NO: 47163 - DNA, 15 bp, Homo sapiens
ctccagagttcaagc

SEQ ID NO: 47164 - DNA, 15 bp, Homo sapiens
cctccagagttcaag

SEQ ID NO: 47165 - DNA, 15 bp, Homo sapiens
gcctccagagttcaa

SEQ ID NO: 47166 - DNA, 15 bp, Homo sapiens
agcctccagagttca

SEQ ID NO: 47167 - DNA, 15 bp, Homo sapiens
cagcctccagagttc

SEQ ID NO: 47168 - DNA, 15 bp, Homo sapiens
tcagcctccagagtt

SEQ ID NO: 47169 - DNA, 15 bp, Homo sapiens
acctcagcctccaga

SEQ ID NO: 47170 - DNA, 15 bp, Homo sapiens
aacctcagcctccag

SEQ ID NO: 47171 - DNA, 15 bp, Homo sapiens
caacctcagcctcca

SEQ ID NO: 47172 - DNA, 15 bp, Homo sapiens
gcaacctcagcctcc

SEQ ID NO: 47173 - DNA, 15 bp, Homo sapiens
tgcaacctcagcctc

SEQ ID NO: 47174 - DNA, 15 bp, Homo sapiens
ctgcaacctcagcct

SEQ ID NO: 47175 - DNA, 15 bp, Homo sapiens
actgcaacctcagcc

SEQ ID NO: 47176 - DNA, 15 bp, Homo sapiens
gactgcaacctcagc

SEQ ID NO: 47177 - DNA, 15 bp, Homo sapiens
tgactgcaacctcag

SEQ ID NO: 47178 - DNA, 15 bp, Homo sapiens
ctgactgcaacctca

SEQ ID NO: 47179 - DNA, 15 bp, Homo sapiens
gctgactgcaacctc

SEQ ID NO: 47180 - DNA, 15 bp, Homo sapiens
agctgactgcaacct

SEQ ID NO: 47181 - DNA, 15 bp, Homo sapiens
cagctgactgcaacc

SEQ ID NO: 47182 - DNA, 15 bp, Homo sapiens
tcagctgactgcaac

SEQ ID NO: 47183 - DNA, 15 bp, Homo sapiens
ctcagctgactgcaa

SEQ ID NO: 47184 - DNA, 15 bp, Homo sapiens
tctcagctgactgca

SEQ ID NO: 47185 - DNA, 15 bp, Homo sapiens
atctcagctgactgc

SEQ ID NO: 47186 - DNA, 15 bp, Homo sapiens
gatctcagctgactg

SEQ ID NO: 47187 - DNA, 15 bp, Homo sapiens
ggatctcagctgact

SEQ ID NO: 47188 - DNA, 15 bp, Homo sapiens
aggatctcagctgac

SEQ ID NO: 47189 - DNA, 15 bp, Homo sapiens
caggatctcagctga

SEQ ID NO: 47190 - DNA, 15 bp, Homo sapiens
gcaggatctcagctg

SEQ ID NO: 47191 - DNA, 15 bp, Homo sapiens
ggcaggatctcagct

SEQ ID NO: 47192 - DNA, 15 bp, Homo sapiens
tggcaggatctcagc

SEQ ID NO: 47193 - DNA, 15 bp, Homo sapiens
gtggcaggatctcag

SEQ ID NO: 47194 - DNA, 15 bp, Homo sapiens
agtggcaggatctca

SEQ ID NO: 47195 - DNA, 15 bp, Homo sapiens
cagtggcaggatctc

SEQ ID NO: 47196 - DNA, 15 bp, Homo sapiens
gcagtggcaggatct

SEQ ID NO: 47197 - DNA, 15 bp, Homo sapiens
tgcagtggcaggatc

SEQ ID NO: 47198 - DNA, 15 bp, Homo sapiens
gtgcagtggcaggat

SEQ ID NO: 47199 - DNA, 15 bp, Homo sapiens
agtgcagtggcagga

SEQ ID NO: 47200 - DNA, 15 bp, Homo sapiens
gagtgcagtggcagg

SEQ ID NO: 47201 - DNA, 15 bp, Homo sapiens
ggagtgcagtggcag

SEQ ID NO: 47202 - DNA, 15 bp, Homo sapiens
actctgtcgccaggc

SEQ ID NO: 47203 - DNA, 15 bp, Homo sapiens
cactctgtcgccagg

SEQ ID NO: 47204 - DNA, 15 bp, Homo sapiens
tcactctgtcgccag

SEQ ID NO: 47205 - DNA, 15 bp, Homo sapiens
ctcactctgtcgcca

SEQ ID NO: 47206 - DNA, 15 bp, Homo sapiens
gttgagacagagtct

SEQ ID NO: 47207 - DNA, 15 bp, Homo sapiens
tgttgagacagagtc

SEQ ID NO: 47208 - DNA, 15 bp, Homo sapiens
ttgttgagacagagt

SEQ ID NO: 47209 - DNA, 15 bp, Homo sapiens
gttgttgagacagag

SEQ ID NO: 47210 - DNA, 15 bp, Homo sapiens
tgttgttgagacaga

SEQ ID NO: 47211 - DNA, 15 bp, Homo sapiens
ttgttgttgagacag

SEQ ID NO: 47212 - DNA, 15 bp, Homo sapiens
gttgttgttgagaca

SEQ ID NO: 47213 - DNA, 15 bp, Homo sapiens
tgttgttgttgagac

SEQ ID NO: 47214 - DNA, 15 bp, Homo sapiens
ttgttgttgttgaga

SEQ ID NO: 47215 - DNA, 15 bp, Homo sapiens
tttgttgttgttgag

SEQ ID NO: 47216 - DNA, 15 bp, Homo sapiens
ttttgttgttgttga

SEQ ID NO: 47217 - DNA, 15 bp, Homo sapiens
cttttgttgttgttg

SEQ ID NO: 47218 - DNA, 15 bp, Homo sapiens
tcttttgttgttgtt

SEQ ID NO: 47219 - DNA, 15 bp, Homo sapiens
ttcttttgttgttgt

SEQ ID NO: 47220 - DNA, 15 bp, Homo sapiens
tttcttttgttgttg

SEQ ID NO: 47221 - DNA, 15 bp, Homo sapiens
ctttcttttgttgtt

SEQ ID NO: 47222 - DNA, 15 bp, Homo sapiens
tctttcttttgttgt

SEQ ID NO: 47223 - DNA, 15 bp, Homo sapiens
ttctttcttttgttg

SEQ ID NO: 47224 - DNA, 15 bp, Homo sapiens
gttctttcttttgtt

SEQ ID NO: 47225 - DNA, 15 bp, Homo sapiens
tgttctttcttttgt

SEQ ID NO: 47226 - DNA, 15 bp, Homo sapiens
ttgttctttcttttg

SEQ ID NO: 47227 - DNA, 15 bp, Homo sapiens
cttgttctttctttt

SEQ ID NO: 47228 - DNA, 15 bp, Homo sapiens
acttgttctttcttt

SEQ ID NO: 47229 - DNA, 15 bp, Homo sapiens
cacttgttctttctt

SEQ ID NO: 47230 - DNA, 15 bp, Homo sapiens
tcacttgttctttct

SEQ ID NO: 47231 - DNA, 15 bp, Homo sapiens
ctcacttgttctttc

SEQ ID NO: 47232 - DNA, 15 bp, Homo sapiens
cctcacttgttcttt

SEQ ID NO: 47233 - DNA, 15 bp, Homo sapiens
gcctcacttgttctt

SEQ ID NO: 47234 - DNA, 15 bp, Homo sapiens
tgcctcacttgttct

SEQ ID NO: 47235 - DNA, 15 bp, Homo sapiens
ttgcctcacttgttc

SEQ ID NO: 47236 - DNA, 15 bp, Homo sapiens
tttgcctcacttgtt

SEQ ID NO: 47237 - DNA, 15 bp, Homo sapiens
ttttgcctcacttgt

SEQ ID NO: 47238 - DNA, 15 bp, Homo sapiens
gttttgcctcacttg

SEQ ID NO: 47239 - DNA, 15 bp, Homo sapiens
ggttttgcctcactt

SEQ ID NO: 47240 - DNA, 15 bp, Homo sapiens
aggttttgcctcact

SEQ ID NO: 47241 - DNA, 15 bp, Homo sapiens
caggttttgcctcac

SEQ ID NO: 47242 - DNA, 15 bp, Homo sapiens
ccaggttttgcctca

SEQ ID NO: 47243 - DNA, 15 bp, Homo sapiens
tccaggttttgcctc

SEQ ID NO: 47244 - DNA, 15 bp, Homo sapiens
ctccaggttttgcct

SEQ ID NO: 47245 - DNA, 15 bp, Homo sapiens
tctccaggttttgcc

SEQ ID NO: 47246 - DNA, 15 bp, Homo sapiens
gtctccaggttttgc

SEQ ID NO: 47247 - DNA, 15 bp, Homo sapiens
ggtctccaggttttg

SEQ ID NO: 47248 - DNA, 15 bp, Homo sapiens
gggtctccaggtttt

SEQ ID NO: 47249 - DNA, 15 bp, Homo sapiens
ggggtctccaggttt

SEQ ID NO: 47250 - DNA, 15 bp, Homo sapiens
tggggtctccaggtt

SEQ ID NO: 47251 - DNA, 15 bp, Homo sapiens
ctggggtctccaggt

SEQ ID NO: 47252 - DNA, 15 bp, Homo sapiens
gctggggtctccagg

SEQ ID NO: 47253 - DNA, 15 bp, Homo sapiens
agctggggtctccag

SEQ ID NO: 47254 - DNA, 15 bp, Homo sapiens
aagctggggtctcca

SEQ ID NO: 47255 - DNA, 15 bp, Homo sapiens
gaagctggggtctcc

SEQ ID NO: 47256 - DNA, 15 bp, Homo sapiens
tgaagctggggtctc

SEQ ID NO: 47257 - DNA, 15 bp, Homo sapiens
atgaagctggggtct

SEQ ID NO: 47258 - DNA, 15 bp, Homo sapiens
catgaagctggggtc

SEQ ID NO: 47259 - DNA, 15 bp, Homo sapiens
acatgaagctggggt

SEQ ID NO: 47260 - DNA, 15 bp, Homo sapiens
tacatgaagctgggg

SEQ ID NO: 47261 - DNA, 15 bp, Homo sapiens
ttacatgaagctggg

SEQ ID NO: 47262 - DNA, 15 bp, Homo sapiens
gttacatgaagctgg

SEQ ID NO: 47263 - DNA, 15 bp, Homo sapiens
tgttacatgaagctg

SEQ ID NO: 47264 - DNA, 15 bp, Homo sapiens
gtgttacatgaagct

SEQ ID NO: 47265 - DNA, 15 bp, Homo sapiens
ggtgttacatgaagc

SEQ ID NO: 47266 - DNA, 15 bp, Homo sapiens
aggtgttacatgaag

SEQ ID NO: 47267 - DNA, 15 bp, Homo sapiens
taggtgttacatgaa

SEQ ID NO: 47268 - DNA, 15 bp, Homo sapiens
ctaggtgttacatga

SEQ ID NO: 47269 - DNA, 15 bp, Homo sapiens
actaggtgttacatg

SEQ ID NO: 47270 - DNA, 15 bp, Homo sapiens
aactaggtgttacat

SEQ ID NO: 47271 - DNA, 15 bp, Homo sapiens
aaactaggtgttaca

SEQ ID NO: 47272 - DNA, 15 bp, Homo sapiens
caaactaggtgttac

SEQ ID NO: 47273 - DNA, 15 bp, Homo sapiens
tcaaactaggtgtta

SEQ ID NO: 47274 - DNA, 15 bp, Homo sapiens
ctcaaactaggtgtt

SEQ ID NO: 47275 - DNA, 15 bp, Homo sapiens
actcaaactaggtgt

SEQ ID NO: 47276 - DNA, 15 bp, Homo sapiens
tactcaaactaggtg

SEQ ID NO: 47277 - DNA, 15 bp, Homo sapiens
atactcaaactaggt

SEQ ID NO: 47278 - DNA, 15 bp, Homo sapiens
aatactcaaactagg

SEQ ID NO: 47279 - DNA, 15 bp, Homo sapiens
caatactcaaactag

SEQ ID NO: 47280 - DNA, 15 bp, Homo sapiens
acaatactcaaacta

SEQ ID NO: 47281 - DNA, 15 bp, Homo sapiens
aacaatactcaaact

SEQ ID NO: 47282 - DNA, 15 bp, Homo sapiens
caacaatactcaaac

SEQ ID NO: 47283 - DNA, 15 bp, Homo sapiens
tcaacaatactcaaa

SEQ ID NO: 47284 - DNA, 15 bp, Homo sapiens
ctcaacaatactcaa

SEQ ID NO: 47285 - DNA, 15 bp, Homo sapiens
tctcaacaatactca

SEQ ID NO: 47286 - DNA, 15 bp, Homo sapiens
ctctcaacaatactc

SEQ ID NO: 47287 - DNA, 15 bp, Homo sapiens
actctcaacaatact

SEQ ID NO: 47288 - DNA, 15 bp, Homo sapiens
aactctcaacaatac

SEQ ID NO: 47289 - DNA, 15 bp, Homo sapiens
aaactctcaacaata

SEQ ID NO: 47290 - DNA, 15 bp, Homo sapiens
aaaactctcaacaat

SEQ ID NO: 47291 - DNA, 15 bp, Homo sapiens
aaaaactctcaacaa

SEQ ID NO: 47292 - DNA, 15 bp, Homo sapiens
gaaaaactctcaaca

SEQ ID NO: 47293 - DNA, 15 bp, Homo sapiens
tgaaaaactctcaac

SEQ ID NO: 47294 - DNA, 15 bp, Homo sapiens
ctgaaaaactctcaa

SEQ ID NO: 47295 - DNA, 15 bp, Homo sapiens
cctgaaaaactctca

SEQ ID NO: 47296 - DNA, 15 bp, Homo sapiens
tcctgaaaaactctc

SEQ ID NO: 47297 - DNA, 15 bp, Homo sapiens
ttcctgaaaaactct

SEQ ID NO: 47298 - DNA, 15 bp, Homo sapiens
tttcctgaaaaactc

SEQ ID NO: 47299 - DNA, 15 bp, Homo sapiens
ttttcctgaaaaact

SEQ ID NO: 47300 - DNA, 15 bp, Homo sapiens
tttttcctgaaaaac

SEQ ID NO: 47301 - DNA, 15 bp, Homo sapiens
ttttttcctgaaaaa

SEQ ID NO: 47302 - DNA, 15 bp, Homo sapiens
cttttttcctgaaaa

SEQ ID NO: 47303 - DNA, 15 bp, Homo sapiens
acttttttcctgaaa

SEQ ID NO: 47304 - DNA, 15 bp, Homo sapiens
gacttttttcctgaa

SEQ ID NO: 47305 - DNA, 15 bp, Homo sapiens
agacttttttcctga

SEQ ID NO: 47306 - DNA, 15 bp, Homo sapiens
cagacttttttcctg

SEQ ID NO: 47307 - DNA, 15 bp, Homo sapiens
tcagacttttttcct

SEQ ID NO: 47308 - DNA, 15 bp, Homo sapiens
atcagacttttttcc

SEQ ID NO: 47309 - DNA, 15 bp, Homo sapiens
tatcagacttttttc

SEQ ID NO: 47310 - DNA, 15 bp, Homo sapiens
ttatcagactttttt

SEQ ID NO: 47311 - DNA, 15 bp, Homo sapiens
gttatcagacttttt

SEQ ID NO: 47312 - DNA, 15 bp, Homo sapiens
tgttatcagactttt

SEQ ID NO: 47313 - DNA, 15 bp, Homo sapiens
ctgttatcagacttt

SEQ ID NO: 47314 - DNA, 15 bp, Homo sapiens
gctgttatcagactt

SEQ ID NO: 47315 - DNA, 15 bp, Homo sapiens
agctgttatcagact

SEQ ID NO: 47316 - DNA, 15 bp, Homo sapiens
gagctgttatcagac

SEQ ID NO: 47317 - DNA, 15 bp, Homo sapiens
ggagctgttatcaga

SEQ ID NO: 47318 - DNA, 15 bp, Homo sapiens
cggagctgttatcag

SEQ ID NO: 47319 - DNA, 15 bp, Homo sapiens
tcggagctgttatca

SEQ ID NO: 47320 - DNA, 15 bp, Homo sapiens
ctcggagctgttatc

SEQ ID NO: 47321 - DNA, 15 bp, Homo sapiens
tctcggagctgttat

SEQ ID NO: 47322 - DNA, 15 bp, Homo sapiens
atctcggagctgtta

SEQ ID NO: 47323 - DNA, 15 bp, Homo sapiens
tatctcggagctgtt

SEQ ID NO: 47324 - DNA, 15 bp, Homo sapiens
ctatctcggagctgt

SEQ ID NO: 47325 - DNA, 15 bp, Homo sapiens
actatctcggagctg

SEQ ID NO: 47326 - DNA, 15 bp, Homo sapiens
gactatctcggagct

SEQ ID NO: 47327 - DNA, 15 bp, Homo sapiens
agactatctcggagc

SEQ ID NO: 47328 - DNA, 15 bp, Homo sapiens
aagactatctcggag

SEQ ID NO: 47329 - DNA, 15 bp, Homo sapiens
taagactatctcgga

SEQ ID NO: 47330 - DNA, 15 bp, Homo sapiens
ttaagactatctcgg

SEQ ID NO: 47331 - DNA, 15 bp, Homo sapiens
gttaagactatctcg

SEQ ID NO: 47332 - DNA, 15 bp, Homo sapiens
tgttaagactatctc

SEQ ID NO: 47333 - DNA, 15 bp, Homo sapiens
atgttaagactatct

SEQ ID NO: 47334 - DNA, 15 bp, Homo sapiens
tatgttaagactatc

SEQ ID NO: 47335 - DNA, 15 bp, Homo sapiens
atatgttaagactat

SEQ ID NO: 47336 - DNA, 15 bp, Homo sapiens
catatgttaagacta

SEQ ID NO: 47337 - DNA, 15 bp, Homo sapiens
tcatatgttaagact

SEQ ID NO: 47338 - DNA, 15 bp, Homo sapiens
ttcatatgttaagac

SEQ ID NO: 47339 - DNA, 15 bp, Homo sapiens
tttcatatgttaaga

SEQ ID NO: 47340 - DNA, 15 bp, Homo sapiens
ttttcatatgttaag

SEQ ID NO: 47341 - DNA, 15 bp, Homo sapiens
tttttcatatgttaa

SEQ ID NO: 47342 - DNA, 15 bp, Homo sapiens
ctttttcatatgtta

SEQ ID NO: 47343 - DNA, 15 bp, Homo sapiens
gctttttcatatgtt

SEQ ID NO: 47344 - DNA, 15 bp, Homo sapiens
tgctttttcatatgt

SEQ ID NO: 47345 - DNA, 15 bp, Homo sapiens
ttgctttttcatatg

SEQ ID NO: 47346 - DNA, 15 bp, Homo sapiens
tttgctttttcatat

SEQ ID NO: 47347 - DNA, 15 bp, Homo sapiens
ttttgctttttcata

SEQ ID NO: 47348 - DNA, 15 bp, Homo sapiens
tttttgctttttcat

SEQ ID NO: 47349 - DNA, 15 bp, Homo sapiens
ttttttgctttttca

SEQ ID NO: 47350 - DNA, 15 bp, Homo sapiens
cttttttgctttttc

SEQ ID NO: 47351 - DNA, 15 bp, Homo sapiens
ccttttttgcttttt

SEQ ID NO: 47352 - DNA, 15 bp, Homo sapiens
cccttttttgctttt

SEQ ID NO: 47353 - DNA, 15 bp, Homo sapiens
tcccttttttgcttt

SEQ ID NO: 47354 - DNA, 15 bp, Homo sapiens
ctcccttttttgctt

SEQ ID NO: 47355 - DNA, 15 bp, Homo sapiens
cctcccttttttgct

SEQ ID NO: 47356 - DNA, 15 bp, Homo sapiens
tcctcccttttttgc

SEQ ID NO: 47357 - DNA, 15 bp, Homo sapiens
ctcctcccttttttg

SEQ ID NO: 47358 - DNA, 15 bp, Homo sapiens
tctcctccctttttt

SEQ ID NO: 47359 - DNA, 15 bp, Homo sapiens
gtctcctcccttttt

SEQ ID NO: 47360 - DNA, 15 bp, Homo sapiens
tgtctcctccctttt

SEQ ID NO: 47361 - DNA, 15 bp, Homo sapiens
ctgtctcctcccttt

SEQ ID NO: 47362 - DNA, 15 bp, Homo sapiens
tctgtctcctccctt

SEQ ID NO: 47363 - DNA, 15 bp, Homo sapiens
atctgtctcctccct

SEQ ID NO: 47364 - DNA, 15 bp, Homo sapiens
gatctgtctcctccc

SEQ ID NO: 47365 - DNA, 15 bp, Homo sapiens
tgatctgtctcctcc

SEQ ID NO: 47366 - DNA, 15 bp, Homo sapiens
atgatctgtctcctc

SEQ ID NO: 47367 - DNA, 15 bp, Homo sapiens
aatgatctgtctcct

SEQ ID NO: 47368 - DNA, 15 bp, Homo sapiens
aaatgatctgtctcc

SEQ ID NO: 47369 - DNA, 15 bp, Homo sapiens
caaatgatctgtctc

SEQ ID NO: 47370 - DNA, 15 bp, Homo sapiens
acaaatgatctgtct

SEQ ID NO: 47371 - DNA, 15 bp, Homo sapiens
gacaaatgatctgtc

SEQ ID NO: 47372 - DNA, 15 bp, Homo sapiens
ggacaaatgatctgt

SEQ ID NO: 47373 - DNA, 15 bp, Homo sapiens
aggacaaatgatctg

SEQ ID NO: 47374 - DNA, 15 bp, Homo sapiens
taggacaaatgatct

SEQ ID NO: 47375 - DNA, 15 bp, Homo sapiens
ataggacaaatgatc

SEQ ID NO: 47376 - DNA, 15 bp, Homo sapiens
tataggacaaatgat

SEQ ID NO: 47377 - DNA, 15 bp, Homo sapiens
gtataggacaaatga

SEQ ID NO: 47378 - DNA, 15 bp, Homo sapiens
ggtataggacaaatg

SEQ ID NO: 47379 - DNA, 15 bp, Homo sapiens
aggtataggacaaat

SEQ ID NO: 47380 - DNA, 15 bp, Homo sapiens
aaggtataggacaaa

SEQ ID NO: 47381 - DNA, 15 bp, Homo sapiens
aaaggtataggacaa

SEQ ID NO: 47382 - DNA, 15 bp, Homo sapiens
gaaaggtataggaca

SEQ ID NO: 47383 - DNA, 15 bp, Homo sapiens
agaaaggtataggac

SEQ ID NO: 47384 - DNA, 15 bp, Homo sapiens
gagaaaggtatagga

SEQ ID NO: 47385 - DNA, 15 bp, Homo sapiens
agagaaaggtatagg

SEQ ID NO: 47386 - DNA, 15 bp, Homo sapiens
aagagaaaggtatag

SEQ ID NO: 47387 - DNA, 15 bp, Homo sapiens
aaagagaaaggtata

SEQ ID NO: 47388 - DNA, 15 bp, Homo sapiens
aaaagagaaaggtat

SEQ ID NO: 47389 - DNA, 15 bp, Homo sapiens
taaaagagaaaggta

SEQ ID NO: 47390 - DNA, 15 bp, Homo sapiens
ttaaaagagaaaggt

SEQ ID NO: 47391 - DNA, 15 bp, Homo sapiens
cttaaaagagaaagg

SEQ ID NO: 47392 - DNA, 15 bp, Homo sapiens
ccttaaaagagaaag

SEQ ID NO: 47393 - DNA, 15 bp, Homo sapiens
accttaaaagagaaa

SEQ ID NO: 47394 - DNA, 15 bp, Homo sapiens
aaccttaaaagagaa

SEQ ID NO: 47395 - DNA, 15 bp, Homo sapiens
aaaccttaaaagaga

SEQ ID NO: 47396 - DNA, 15 bp, Homo sapiens
aaaaccttaaaagag

SEQ ID NO: 47397 - DNA, 15 bp, Homo sapiens
taaaaccttaaaaga

SEQ ID NO: 47398 - DNA, 15 bp, Homo sapiens
ttaaaaccttaaaag

SEQ ID NO: 47399 - DNA, 15 bp, Homo sapiens
attaaaaccttaaaa

SEQ ID NO: 47400 - DNA, 15 bp, Homo sapiens
aattaaaaccttaaa

SEQ ID NO: 47401 - DNA, 15 bp, Homo sapiens
taattaaaaccttaa

SEQ ID NO: 47402 - DNA, 15 bp, Homo sapiens
ataattaaaacctta

SEQ ID NO: 47403 - DNA, 15 bp, Homo sapiens
tataattaaaacctt

SEQ ID NO: 47404 - DNA, 15 bp, Homo sapiens
ttataattaaaacct

SEQ ID NO: 47405 - DNA, 15 bp, Homo sapiens
gttataattaaaacc

SEQ ID NO: 47406 - DNA, 15 bp, Homo sapiens
agttataattaaaac

SEQ ID NO: 47407 - DNA, 15 bp, Homo sapiens
aagttataattaaaa

SEQ ID NO: 47408 - DNA, 15 bp, Homo sapiens
caagttataattaaa

SEQ ID NO: 47409 - DNA, 15 bp, Homo sapiens
acaagttataattaa

SEQ ID NO: 47410 - DNA, 15 bp, Homo sapiens
cacaagttataatta

SEQ ID NO: 47411 - DNA, 15 bp, Homo sapiens
acacaagttataatt

SEQ ID NO: 47412 - DNA, 15 bp, Homo sapiens
tacacaagttataat

SEQ ID NO: 47413 - DNA, 15 bp, Homo sapiens
ttacacaagttataa

SEQ ID NO: 47414 - DNA, 15 bp, Homo sapiens
attacacaagttata

SEQ ID NO: 47415 - DNA, 15 bp, Homo sapiens
tattacacaagttat

SEQ ID NO: 47416 - DNA, 15 bp, Homo sapiens
gtattacacaagtta

SEQ ID NO: 47417 - DNA, 15 bp, Homo sapiens
tgtattacacaagtt

SEQ ID NO: 47418 - DNA, 15 bp, Homo sapiens
ctgtattacacaagt

SEQ ID NO: 47419 - DNA, 15 bp, Homo sapiens
cctgtattacacaag

SEQ ID NO: 47420 - DNA, 15 bp, Homo sapiens
tcctgtattacacaa

SEQ ID NO: 47421 - DNA, 15 bp, Homo sapiens
ctcctgtattacaca

SEQ ID NO: 47422 - DNA, 15 bp, Homo sapiens
tctcctgtattacac

SEQ ID NO: 47423 - DNA, 15 bp, Homo sapiens
gtctcctgtattaca

SEQ ID NO: 47424 - DNA, 15 bp, Homo sapiens
ggtctcctgtattac

SEQ ID NO: 47425 - DNA, 15 bp, Homo sapiens
aggtctcctgtatta

SEQ ID NO: 47426 - DNA, 15 bp, Homo sapiens
gaggtctcctgtatt

SEQ ID NO: 47427 - DNA, 15 bp, Homo sapiens
agaggtctcctgtat

SEQ ID NO: 47428 - DNA, 15 bp, Homo sapiens
cagaggtctcctgta

SEQ ID NO: 47429 - DNA, 15 bp, Homo sapiens
ccagaggtctcctgt

SEQ ID NO: 47430 - DNA, 15 bp, Homo sapiens
cccagaggtctcctg

SEQ ID NO: 47431 - DNA, 15 bp, Homo sapiens
acccagaggtctcct

SEQ ID NO: 47432 - DNA, 15 bp, Homo sapiens
cacccagaggtctcc

SEQ ID NO: 47433 - DNA, 15 bp, Homo sapiens
acacccagaggtctc

SEQ ID NO: 47434 - DNA, 15 bp, Homo sapiens
aacacccagaggtct

SEQ ID NO: 47435 - DNA, 15 bp, Homo sapiens
aaacacccagaggtc

SEQ ID NO: 47436 - DNA, 15 bp, Homo sapiens
aaaacacccagaggt

SEQ ID NO: 47437 - DNA, 15 bp, Homo sapiens
aaaaacacccagagg

SEQ ID NO: 47438 - DNA, 15 bp, Homo sapiens
taaaaacacccagag

SEQ ID NO: 47439 - DNA, 15 bp, Homo sapiens
ctaaaaacacccaga

SEQ ID NO: 47440 - DNA, 15 bp, Homo sapiens
actaaaaacacccag

SEQ ID NO: 47441 - DNA, 15 bp, Homo sapiens
aactaaaaacaccca

SEQ ID NO: 47442 - DNA, 15 bp, Homo sapiens
caactaaaaacaccc

SEQ ID NO: 47443 - DNA, 15 bp, Homo sapiens
tcaactaaaaacacc

SEQ ID NO: 47444 - DNA, 15 bp, Homo sapiens
gtcaactaaaaacac

SEQ ID NO: 47445 - DNA, 15 bp, Homo sapiens
agtcaactaaaaaca

SEQ ID NO: 47446 - DNA, 15 bp, Homo sapiens
tagtcaactaaaaac

SEQ ID NO: 47447 - DNA, 15 bp, Homo sapiens
atagtcaactaaaaa

SEQ ID NO: 47448 - DNA, 15 bp, Homo sapiens
tatagtcaactaaaa

SEQ ID NO: 47449 - DNA, 15 bp, Homo sapiens
ttatagtcaactaaa

SEQ ID NO: 47450 - DNA, 15 bp, Homo sapiens
tttatagtcaactaa

SEQ ID NO: 47451 - DNA, 15 bp, Homo sapiens
gtttatagtcaacta

SEQ ID NO: 47452 - DNA, 15 bp, Homo sapiens
agtttatagtcaact

SEQ ID NO: 47453 - DNA, 15 bp, Homo sapiens
tagtttatagtcaac

SEQ ID NO: 47454 - DNA, 15 bp, Homo sapiens
ttagtttatagtcaa

SEQ ID NO: 47455 - DNA, 15 bp, Homo sapiens
tttagtttatagtca

SEQ ID NO: 47456 - DNA, 15 bp, Homo sapiens
atttagtttatagtc

SEQ ID NO: 47457 - DNA, 15 bp, Homo sapiens
gatttagtttatagt

SEQ ID NO: 47458 - DNA, 15 bp, Homo sapiens
agatttagtttatag

SEQ ID NO: 47459 - DNA, 15 bp, Homo sapiens
cagatttagtttata

SEQ ID NO: 47460 - DNA, 15 bp, Homo sapiens
tcagatttagtttat

SEQ ID NO: 47461 - DNA, 15 bp, Homo sapiens
ctcagatttagttta

SEQ ID NO: 47462 - DNA, 15 bp, Homo sapiens
actcagatttagttt

SEQ ID NO: 47463 - DNA, 15 bp, Homo sapiens
tactcagatttagtt

SEQ ID NO: 47464 - DNA, 15 bp, Homo sapiens
gtactcagatttagt

SEQ ID NO: 47465 - DNA, 15 bp, Homo sapiens
tgtactcagatttag

SEQ ID NO: 47466 - DNA, 15 bp, Homo sapiens
gtgtactcagattta

SEQ ID NO: 47467 - DNA, 15 bp, Homo sapiens
tgtgtactcagattt

SEQ ID NO: 47468 - DNA, 15 bp, Homo sapiens
atgtgtactcagatt

SEQ ID NO: 47469 - DNA, 15 bp, Homo sapiens
aatgtgtactcagat

SEQ ID NO: 47470 - DNA, 15 bp, Homo sapiens
aaatgtgtactcaga

SEQ ID NO: 47471 - DNA, 15 bp, Homo sapiens
gaaatgtgtactcag

SEQ ID NO: 47472 - DNA, 15 bp, Homo sapiens
tgaaatgtgtactca

SEQ ID NO: 47473 - DNA, 15 bp, Homo sapiens
ctgaaatgtgtactc

SEQ ID NO: 47474 - DNA, 15 bp, Homo sapiens
cctgaaatgtgtact

SEQ ID NO: 47475 - DNA, 15 bp, Homo sapiens
ccctgaaatgtgtac

SEQ ID NO: 47476 - DNA, 15 bp, Homo sapiens
gccctgaaatgtgta

SEQ ID NO: 47477 - DNA, 15 bp, Homo sapiens
agccctgaaatgtgt

SEQ ID NO: 47478 - DNA, 15 bp, Homo sapiens
cagccctgaaatgtg

SEQ ID NO: 47479 - DNA, 15 bp, Homo sapiens
gcagccctgaaatgt

SEQ ID NO: 47480 - DNA, 15 bp, Homo sapiens
agcagccctgaaatg

SEQ ID NO: 47481 - DNA, 15 bp, Homo sapiens
tagcagccctgaaat

SEQ ID NO: 47482 - DNA, 15 bp, Homo sapiens
ttagcagccctgaaa

SEQ ID NO: 47483 - DNA, 15 bp, Homo sapiens
tttagcagccctgaa

SEQ ID NO: 47484 - DNA, 15 bp, Homo sapiens
ttttagcagccctga

SEQ ID NO: 47485 - DNA, 15 bp, Homo sapiens
tttttagcagccctg

SEQ ID NO: 47486 - DNA, 15 bp, Homo sapiens
atttttagcagccct

SEQ ID NO: 47487 - DNA, 15 bp, Homo sapiens
catttttagcagccc

SEQ ID NO: 47488 - DNA, 15 bp, Homo sapiens
gcatttttagcagcc

SEQ ID NO: 47489 - DNA, 15 bp, Homo sapiens
agcatttttagcagc

SEQ ID NO: 47490 - DNA, 15 bp, Homo sapiens
aagcatttttagcag

SEQ ID NO: 47491 - DNA, 15 bp, Homo sapiens
taagcatttttagca

SEQ ID NO: 47492 - DNA, 15 bp, Homo sapiens
ataagcatttttagc

SEQ ID NO: 47493 - DNA, 15 bp, Homo sapiens
aataagcatttttag

SEQ ID NO: 47494 - DNA, 15 bp, Homo sapiens
aaataagcattttta

SEQ ID NO: 47495 - DNA, 15 bp, Homo sapiens
caaataagcattttt

SEQ ID NO: 47496 - DNA, 15 bp, Homo sapiens
tcaaataagcatttt

SEQ ID NO: 47497 - DNA, 15 bp, Homo sapiens
ttcaaataagcattt

SEQ ID NO: 47498 - DNA, 15 bp, Homo sapiens
tttcaaataagcatt

SEQ ID NO: 47499 - DNA, 15 bp, Homo sapiens
gtttcaaataagcat

SEQ ID NO: 47500 - DNA, 15 bp, Homo sapiens
agtttcaaataagca

SEQ ID NO: 47501 - DNA, 15 bp, Homo sapiens
cagtttcaaataagc

SEQ ID NO: 47502 - DNA, 15 bp, Homo sapiens
ccagtttcaaataag

SEQ ID NO: 47503 - DNA, 15 bp, Homo sapiens
cccagtttcaaataa

SEQ ID NO: 47504 - DNA, 15 bp, Homo sapiens
gcccagtttcaaata

SEQ ID NO: 47505 - DNA, 15 bp, Homo sapiens
ggcccagtttcaaat

SEQ ID NO: 47506 - DNA, 15 bp, Homo sapiens
cggcccagtttcaaa

SEQ ID NO: 47507 - DNA, 15 bp, Homo sapiens
acggcccagtttcaa

SEQ ID NO: 47508 - DNA, 15 bp, Homo sapiens
tacggcccagtttca

SEQ ID NO: 47509 - DNA, 15 bp, Homo sapiens
atacggcccagtttc

SEQ ID NO: 47510 - DNA, 15 bp, Homo sapiens
aatacggcccagttt

SEQ ID NO: 47511 - DNA, 15 bp, Homo sapiens
taatacggcccagtt

SEQ ID NO: 47512 - DNA, 15 bp, Homo sapiens
ttaatacggcccagt

SEQ ID NO: 47513 - DNA, 15 bp, Homo sapiens
gttaatacggcccag

SEQ ID NO: 47514 - DNA, 15 bp, Homo sapiens
tgttaatacggccca

SEQ ID NO: 47515 - DNA, 15 bp, Homo sapiens
gtgttaatacggccc

SEQ ID NO: 47516 - DNA, 15 bp, Homo sapiens
tgtgttaatacggcc

SEQ ID NO: 47517 - DNA, 15 bp, Homo sapiens
ttgtgttaatacggc

SEQ ID NO: 47518 - DNA, 15 bp, Homo sapiens
cttgtgttaatacgg

SEQ ID NO: 47519 - DNA, 15 bp, Homo sapiens
gcttgtgttaatacg

SEQ ID NO: 47520 - DNA, 15 bp, Homo sapiens
tgcttgtgttaatac

SEQ ID NO: 47521 - DNA, 15 bp, Homo sapiens
ctgcttgtgttaata

SEQ ID NO: 47522 - DNA, 15 bp, Homo sapiens
tctgcttgtgttaat

SEQ ID NO: 47523 - DNA, 15 bp, Homo sapiens
ctctgcttgtgttaa

SEQ ID NO: 47524 - DNA, 15 bp, Homo sapiens
cctctgcttgtgtta

SEQ ID NO: 47525 - DNA, 15 bp, Homo sapiens
gcctctgcttgtgtt

SEQ ID NO: 47526 - DNA, 15 bp, Homo sapiens
agcctctgcttgtgt

SEQ ID NO: 47527 - DNA, 15 bp, Homo sapiens
gagcctctgcttgtg

SEQ ID NO: 47528 - DNA, 15 bp, Homo sapiens
agagcctctgcttgt

SEQ ID NO: 47529 - DNA, 15 bp, Homo sapiens
cagagcctctgcttg

SEQ ID NO: 47530 - DNA, 15 bp, Homo sapiens
ccagagcctctgctt

SEQ ID NO: 47531 - DNA, 15 bp, Homo sapiens
tccagagcctctgct

SEQ ID NO: 47532 - DNA, 15 bp, Homo sapiens
ctccagagcctctgc

SEQ ID NO: 47533 - DNA, 15 bp, Homo sapiens
gctccagagcctctg

SEQ ID NO: 47534 - DNA, 15 bp, Homo sapiens
tgctccagagcctct

SEQ ID NO: 47535 - DNA, 15 bp, Homo sapiens
ttgctccagagcctc

SEQ ID NO: 47536 - DNA, 15 bp, Homo sapiens
cttgctccagagcct

SEQ ID NO: 47537 - DNA, 15 bp, Homo sapiens
acttgctccagagcc

SEQ ID NO: 47538 - DNA, 15 bp, Homo sapiens
cacttgctccagagc

SEQ ID NO: 47539 - DNA, 15 bp, Homo sapiens
tcacttgctccagag

SEQ ID NO: 47540 - DNA, 15 bp, Homo sapiens
ttcacttgctccaga

SEQ ID NO: 47541 - DNA, 15 bp, Homo sapiens
cttcacttgctccag

SEQ ID NO: 47542 - DNA, 15 bp, Homo sapiens
acttcacttgctcca

SEQ ID NO: 47543 - DNA, 15 bp, Homo sapiens
tacttcacttgctcc

SEQ ID NO: 47544 - DNA, 15 bp, Homo sapiens
gtacttcacttgctc

SEQ ID NO: 47545 - DNA, 15 bp, Homo sapiens
tgtacttcacttgct

SEQ ID NO: 47546 - DNA, 15 bp, Homo sapiens
ctgtacttcacttgc

SEQ ID NO: 47547 - DNA, 15 bp, Homo sapiens
tctgtacttcacttg

SEQ ID NO: 47548 - DNA, 15 bp, Homo sapiens
atctgtacttcactt

SEQ ID NO: 47549 - DNA, 15 bp, Homo sapiens
gatctgtacttcact

SEQ ID NO: 47550 - DNA, 15 bp, Homo sapiens
ggatctgtacttcac

SEQ ID NO: 47551 - DNA, 15 bp, Homo sapiens
tggatctgtacttca

SEQ ID NO: 47552 - DNA, 15 bp, Homo sapiens
ctggatctgtacttc

SEQ ID NO: 47553 - DNA, 15 bp, Homo sapiens
tctggatctgtactt

SEQ ID NO: 47554 - DNA, 15 bp, Homo sapiens
ctctggatctgtact

SEQ ID NO: 47555 - DNA, 15 bp, Homo sapiens
gctctggatctgtac

SEQ ID NO: 47556 - DNA, 15 bp, Homo sapiens
ggctctggatctgta

SEQ ID NO: 47557 - DNA, 15 bp, Homo sapiens
gggctctggatctgt

SEQ ID NO: 47558 - DNA, 15 bp, Homo sapiens
ggggctctggatctg

SEQ ID NO: 47559 - DNA, 15 bp, Homo sapiens
tggggctctggatct

SEQ ID NO: 47560 - DNA, 15 bp, Homo sapiens
gtggggctctggatc

SEQ ID NO: 47561 - DNA, 15 bp, Homo sapiens
agtggggctctggat

SEQ ID NO: 47562 - DNA, 15 bp, Homo sapiens
cagtggggctctgga

SEQ ID NO: 47563 - DNA, 15 bp, Homo sapiens
acagtggggctctgg

SEQ ID NO: 47564 - DNA, 15 bp, Homo sapiens
tacagtggggctctg

SEQ ID NO: 47565 - DNA, 15 bp, Homo sapiens
atacagtggggctct

SEQ ID NO: 47566 - DNA, 15 bp, Homo sapiens
aatacagtggggctc

SEQ ID NO: 47567 - DNA, 15 bp, Homo sapiens
gaatacagtggggct

SEQ ID NO: 47568 - DNA, 15 bp, Homo sapiens
agaatacagtggggc

SEQ ID NO: 47569 - DNA, 15 bp, Homo sapiens
gagaatacagtgggg

SEQ ID NO: 47570 - DNA, 15 bp, Homo sapiens
ggagaatacagtggg

SEQ ID NO: 47571 - DNA, 15 bp, Homo sapiens
tggagaatacagtgg

SEQ ID NO: 47572 - DNA, 15 bp, Homo sapiens
ttggagaatacagtg

SEQ ID NO: 47573 - DNA, 15 bp, Homo sapiens
attggagaatacagt

SEQ ID NO: 47574 - DNA, 15 bp, Homo sapiens
cattggagaatacag

SEQ ID NO: 47575 - DNA, 15 bp, Homo sapiens
ccattggagaataca

SEQ ID NO: 47576 - DNA, 15 bp, Homo sapiens
tccattggagaatac

SEQ ID NO: 47577 - DNA, 15 bp, Homo sapiens
ctccattggagaata

SEQ ID NO: 47578 - DNA, 15 bp, Homo sapiens
actccattggagaat

SEQ ID NO: 47579 - DNA, 15 bp, Homo sapiens
cactccattggagaa

SEQ ID NO: 47580 - DNA, 15 bp, Homo sapiens
tcactccattggaga

SEQ ID NO: 47581 - DNA, 15 bp, Homo sapiens
atcactccattggag

SEQ ID NO: 47582 - DNA, 15 bp, Homo sapiens
aatcactccattgga

SEQ ID NO: 47583 - DNA, 15 bp, Homo sapiens
caatcactccattgg

SEQ ID NO: 47584 - DNA, 15 bp, Homo sapiens
gcaatcactccattg

SEQ ID NO: 47585 - DNA, 15 bp, Homo sapiens
ggcaatcactccatt

SEQ ID NO: 47586 - DNA, 15 bp, Homo sapiens
aggcaatcactccat

SEQ ID NO: 47587 - DNA, 15 bp, Homo sapiens
caggcaatcactcca

SEQ ID NO: 47588 - DNA, 15 bp, Homo sapiens
tcaggcaatcactcc

SEQ ID NO: 47589 - DNA, 15 bp, Homo sapiens
ttcaggcaatcactc

SEQ ID NO: 47590 - DNA, 15 bp, Homo sapiens
tttcaggcaatcact

SEQ ID NO: 47591 - DNA, 15 bp, Homo sapiens
ctttcaggcaatcac

SEQ ID NO: 47592 - DNA, 15 bp, Homo sapiens
tctttcaggcaatca

SEQ ID NO: 47593 - DNA, 15 bp, Homo sapiens
atctttcaggcaatc

SEQ ID NO: 47594 - DNA, 15 bp, Homo sapiens
catctttcaggcaat

SEQ ID NO: 47595 - DNA, 15 bp, Homo sapiens
tcatctttcaggcaa

SEQ ID NO: 47596 - DNA, 15 bp, Homo sapiens
atcatctttcaggca

SEQ ID NO: 47597 - DNA, 15 bp, Homo sapiens
catcatctttcaggc

SEQ ID NO: 47598 - DNA, 15 bp, Homo sapiens
acatcatctttcagg

SEQ ID NO: 47599 - DNA, 15 bp, Homo sapiens
gacatcatctttcag

SEQ ID NO: 47600 - DNA, 15 bp, Homo sapiens
tgacatcatctttca

SEQ ID NO: 47601 - DNA, 15 bp, Homo sapiens
ctgacatcatctttc

SEQ ID NO: 47602 - DNA, 15 bp, Homo sapiens
actgacatcatcttt

SEQ ID NO: 47603 - DNA, 15 bp, Homo sapiens
aactgacatcatctt

SEQ ID NO: 47604 - DNA, 15 bp, Homo sapiens
aaactgacatcatct

SEQ ID NO: 47605 - DNA, 15 bp, Homo sapiens
aaaactgacatcatc

SEQ ID NO: 47606 - DNA, 15 bp, Homo sapiens
taaaactgacatcat

SEQ ID NO: 47607 - DNA, 15 bp, Homo sapiens
ttaaaactgacatca

SEQ ID NO: 47608 - DNA, 15 bp, Homo sapiens
cttaaaactgacatc

SEQ ID NO: 47609 - DNA, 15 bp, Homo sapiens
gcttaaaactgacat

SEQ ID NO: 47610 - DNA, 15 bp, Homo sapiens
tgcttaaaactgaca

SEQ ID NO: 47611 - DNA, 15 bp, Homo sapiens
gtgcttaaaactgac

SEQ ID NO: 47612 - DNA, 15 bp, Homo sapiens
ggtgcttaaaactga

SEQ ID NO: 47613 - DNA, 15 bp, Homo sapiens
cggtgcttaaaactg

SEQ ID NO: 47614 - DNA, 15 bp, Homo sapiens
acggtgcttaaaact

SEQ ID NO: 47615 - DNA, 15 bp, Homo sapiens
cacggtgcttaaaac

SEQ ID NO: 47616 - DNA, 15 bp, Homo sapiens
gcacggtgcttaaaa

SEQ ID NO: 47617 - DNA, 15 bp, Homo sapiens
agcacggtgcttaaa

SEQ ID NO: 47618 - DNA, 15 bp, Homo sapiens
aagcacggtgcttaa

SEQ ID NO: 47619 - DNA, 15 bp, Homo sapiens
caagcacggtgctta

SEQ ID NO: 47620 - DNA, 15 bp, Homo sapiens
ccaagcacggtgctt

SEQ ID NO: 47621 - DNA, 15 bp, Homo sapiens
accaagcacggtgct

SEQ ID NO: 47622 - DNA, 15 bp, Homo sapiens
aaccaagcacggtgc

SEQ ID NO: 47623 - DNA, 15 bp, Homo sapiens
aaaccaagcacggtg

SEQ ID NO: 47624 - DNA, 15 bp, Homo sapiens
aaaaccaagcacggt

SEQ ID NO: 47625 - DNA, 15 bp, Homo sapiens
aaaaaccaagcacgg

SEQ ID NO: 47626 - DNA, 15 bp, Homo sapiens
taaaaaccaagcacg

SEQ ID NO: 47627 - DNA, 15 bp, Homo sapiens
ttaaaaaccaagcac

SEQ ID NO: 47628 - DNA, 15 bp, Homo sapiens
gttaaaaaccaagca

SEQ ID NO: 47629 - DNA, 15 bp, Homo sapiens
tgttaaaaaccaagc

SEQ ID NO: 47630 - DNA, 15 bp, Homo sapiens
atgttaaaaaccaag

SEQ ID NO: 47631 - DNA, 15 bp, Homo sapiens
catgttaaaaaccaa

SEQ ID NO: 47632 - DNA, 15 bp, Homo sapiens
ccatgttaaaaacca

SEQ ID NO: 47633 - DNA, 15 bp, Homo sapiens
accatgttaaaaacc

SEQ ID NO: 47634 - DNA, 15 bp, Homo sapiens
gaccatgttaaaaac

SEQ ID NO: 47635 - DNA, 15 bp, Homo sapiens
tgaccatgttaaaaa

SEQ ID NO: 47636 - DNA, 15 bp, Homo sapiens
gtgaccatgttaaaa

SEQ ID NO: 47637 - DNA, 15 bp, Homo sapiens
agtgaccatgttaaa

SEQ ID NO: 47638 - DNA, 15 bp, Homo sapiens
cagtgaccatgttaa

SEQ ID NO: 47639 - DNA, 15 bp, Homo sapiens
tcagtgaccatgtta

SEQ ID NO: 47640 - DNA, 15 bp, Homo sapiens
gtcagtgaccatgtt

SEQ ID NO: 47641 - DNA, 15 bp, Homo sapiens
tgtcagtgaccatgt

SEQ ID NO: 47642 - DNA, 15 bp, Homo sapiens
ttgtcagtgaccatg

SEQ ID NO: 47643 - DNA, 15 bp, Homo sapiens
tttgtcagtgaccat

SEQ ID NO: 47644 - DNA, 15 bp, Homo sapiens
atttgtcagtgacca

SEQ ID NO: 47645 - DNA, 15 bp, Homo sapiens
aatttgtcagtgacc

SEQ ID NO: 47646 - DNA, 15 bp, Homo sapiens
caatttgtcagtgac

SEQ ID NO: 47647 - DNA, 15 bp, Homo sapiens
ccaatttgtcagtga

SEQ ID NO: 47648 - DNA, 15 bp, Homo sapiens
tccaatttgtcagtg

SEQ ID NO: 47649 - DNA, 15 bp, Homo sapiens
ctccaatttgtcagt

SEQ ID NO: 47650 - DNA, 15 bp, Homo sapiens
tctccaatttgtcag

SEQ ID NO: 47651 - DNA, 15 bp, Homo sapiens
ctctccaatttgtca

SEQ ID NO: 47652 - DNA, 15 bp, Homo sapiens
actctccaatttgtc

SEQ ID NO: 47653 - DNA, 15 bp, Homo sapiens
cactctccaatttgt

SEQ ID NO: 47654 - DNA, 15 bp, Homo sapiens
acactctccaatttg

SEQ ID NO: 47655 - DNA, 15 bp, Homo sapiens
aacactctccaattt

SEQ ID NO: 47656 - DNA, 15 bp, Homo sapiens
aaacactctccaatt

SEQ ID NO: 47657 - DNA, 15 bp, Homo sapiens
taaacactctccaat

SEQ ID NO: 47658 - DNA, 15 bp, Homo sapiens
ataaacactctccaa

SEQ ID NO: 47659 - DNA, 15 bp, Homo sapiens
gataaacactctcca

SEQ ID NO: 47660 - DNA, 15 bp, Homo sapiens
ggataaacactctcc

SEQ ID NO: 47661 - DNA, 15 bp, Homo sapiens
tggataaacactctc

SEQ ID NO: 47662 - DNA, 15 bp, Homo sapiens
ctggataaacactct

SEQ ID NO: 47663 - DNA, 15 bp, Homo sapiens
tctggataaacactc

SEQ ID NO: 47664 - DNA, 15 bp, Homo sapiens
ctctggataaacact

SEQ ID NO: 47665 - DNA, 15 bp, Homo sapiens
cctctggataaacac

SEQ ID NO: 47666 - DNA, 15 bp, Homo sapiens
acctctggataaaca

SEQ ID NO: 47667 - DNA, 15 bp, Homo sapiens
tacctctggataaac

SEQ ID NO: 47668 - DNA, 15 bp, Homo sapiens
ctacctctggataaa

SEQ ID NO: 47669 - DNA, 15 bp, Homo sapiens
tctacctctggataa

SEQ ID NO: 47670 - DNA, 15 bp, Homo sapiens
atctacctctggata

SEQ ID NO: 47671 - DNA, 15 bp, Homo sapiens
catctacctctggat

SEQ ID NO: 47672 - DNA, 15 bp, Homo sapiens
ccatctacctctgga

SEQ ID NO: 47673 - DNA, 15 bp, Homo sapiens
accatctacctctgg

SEQ ID NO: 47674 - DNA, 15 bp, Homo sapiens
taccatctacctctg

SEQ ID NO: 47675 - DNA, 15 bp, Homo sapiens
ttaccatctacctct

SEQ ID NO: 47676 - DNA, 15 bp, Homo sapiens
tttaccatctacctc

SEQ ID NO: 47677 - DNA, 15 bp, Homo sapiens
ctttaccatctacct

SEQ ID NO: 47678 - DNA, 15 bp, Homo sapiens
tctttaccatctacc

SEQ ID NO: 47679 - DNA, 15 bp, Homo sapiens
atctttaccatctac

SEQ ID NO: 47680 - DNA, 15 bp, Homo sapiens
tatctttaccatcta

SEQ ID NO: 47681 - DNA, 15 bp, Homo sapiens
gtatctttaccatct

SEQ ID NO: 47682 - DNA, 15 bp, Homo sapiens
tgtatctttaccatc

SEQ ID NO: 47683 - DNA, 15 bp, Homo sapiens
atgtatctttaccat

SEQ ID NO: 47684 - DNA, 15 bp, Homo sapiens
tatgtatctttacca

SEQ ID NO: 47685 - DNA, 15 bp, Homo sapiens
ttatgtatctttacc

SEQ ID NO: 47686 - DNA, 15 bp, Homo sapiens
tttatgtatctttac

SEQ ID NO: 47687 - DNA, 15 bp, Homo sapiens
ttttatgtatcttta

SEQ ID NO: 47688 - DNA, 15 bp, Homo sapiens
cttttatgtatcttt

SEQ ID NO: 47689 - DNA, 15 bp, Homo sapiens
acttttatgtatctt

SEQ ID NO: 47690 - DNA, 15 bp, Homo sapiens
tacttttatgtatct

SEQ ID NO: 47691 - DNA, 15 bp, Homo sapiens
ttacttttatgtatc

SEQ ID NO: 47692 - DNA, 15 bp, Homo sapiens
gttacttttatgtat

SEQ ID NO: 47693 - DNA, 15 bp, Homo sapiens
agttacttttatgta

SEQ ID NO: 47694 - DNA, 15 bp, Homo sapiens
aagttacttttatgt

SEQ ID NO: 47695 - DNA, 15 bp, Homo sapiens
caagttacttttatg

SEQ ID NO: 47696 - DNA, 15 bp, Homo sapiens
tcaagttacttttat

SEQ ID NO: 47697 - DNA, 15 bp, Homo sapiens
ttcaagttactttta

SEQ ID NO: 47698 - DNA, 15 bp, Homo sapiens
tttcaagttactttt

SEQ ID NO: 47699 - DNA, 15 bp, Homo sapiens
atttcaagttacttt

SEQ ID NO: 47700 - DNA, 15 bp, Homo sapiens
tatttcaagttactt

SEQ ID NO: 47701 - DNA, 15 bp, Homo sapiens
gtatttcaagttact

SEQ ID NO: 47702 - DNA, 15 bp, Homo sapiens
agtatttcaagttac

SEQ ID NO: 47703 - DNA, 15 bp, Homo sapiens
cagtatttcaagtta

SEQ ID NO: 47704 - DNA, 15 bp, Homo sapiens
acagtatttcaagtt

SEQ ID NO: 47705 - DNA, 15 bp, Homo sapiens
gacagtatttcaagt

SEQ ID NO: 47706 - DNA, 15 bp, Homo sapiens
agacagtatttcaag

SEQ ID NO: 47707 - DNA, 15 bp, Homo sapiens
aagacagtatttcaa

SEQ ID NO: 47708 - DNA, 15 bp, Homo sapiens
aaagacagtatttca

SEQ ID NO: 47709 - DNA, 15 bp, Homo sapiens
aaaagacagtatttc

SEQ ID NO: 47710 - DNA, 15 bp, Homo sapiens
caaaagacagtattt

SEQ ID NO: 47711 - DNA, 15 bp, Homo sapiens
tcaaaagacagtatt

SEQ ID NO: 47712 - DNA, 15 bp, Homo sapiens
ttcaaaagacagtat

SEQ ID NO: 47713 - DNA, 15 bp, Homo sapiens
cttcaaaagacagta

SEQ ID NO: 47714 - DNA, 15 bp, Homo sapiens
tcttcaaaagacagt

SEQ ID NO: 47715 - DNA, 15 bp, Homo sapiens
ttcttcaaaagacag

SEQ ID NO: 47716 - DNA, 15 bp, Homo sapiens
cttcttcaaaagaca

SEQ ID NO: 47717 - DNA, 15 bp, Homo sapiens
tcttcttcaaaagac

SEQ ID NO: 47718 - DNA, 15 bp, Homo sapiens
ttcttcttcaaaaga

SEQ ID NO: 47719 - DNA, 15 bp, Homo sapiens
tttcttcttcaaaag

SEQ ID NO: 47720 - DNA, 15 bp, Homo sapiens
atttcttcttcaaaa

SEQ ID NO: 47721 - DNA, 15 bp, Homo sapiens
catttcttcttcaaa

SEQ ID NO: 47722 - DNA, 15 bp, Homo sapiens
tcatttcttcttcaa

SEQ ID NO: 47723 - DNA, 15 bp, Homo sapiens
ctcatttcttcttca

SEQ ID NO: 47724 - DNA, 15 bp, Homo sapiens
tctcatttcttcttc

SEQ ID NO: 47725 - DNA, 15 bp, Homo sapiens
ttctcatttcttctt

SEQ ID NO: 47726 - DNA, 15 bp, Homo sapiens
cttctcatttcttct

SEQ ID NO: 47727 - DNA, 15 bp, Homo sapiens
tcttctcatttcttc

SEQ ID NO: 47728 - DNA, 15 bp, Homo sapiens
atcttctcatttctt

SEQ ID NO: 47729 - DNA, 15 bp, Homo sapiens
aatcttctcatttct

SEQ ID NO: 47730 - DNA, 15 bp, Homo sapiens
aaatcttctcatttc

SEQ ID NO: 47731 - DNA, 15 bp, Homo sapiens
taaatcttctcattt

SEQ ID NO: 47732 - DNA, 15 bp, Homo sapiens
ttaaatcttctcatt

SEQ ID NO: 47733 - DNA, 15 bp, Homo sapiens
cttaaatcttctcat

SEQ ID NO: 47734 - DNA, 15 bp, Homo sapiens
ccttaaatcttctca

SEQ ID NO: 47735 - DNA, 15 bp, Homo sapiens
tccttaaatcttctc

SEQ ID NO: 47736 - DNA, 15 bp, Homo sapiens
ttccttaaatcttct

SEQ ID NO: 47737 - DNA, 15 bp, Homo sapiens
tttccttaaatcttc

SEQ ID NO: 47738 - DNA, 15 bp, Homo sapiens
atttccttaaatctt

SEQ ID NO: 47739 - DNA, 15 bp, Homo sapiens
tatttccttaaatct

SEQ ID NO: 47740 - DNA, 15 bp, Homo sapiens
ttatttccttaaatc

SEQ ID NO: 47741 - DNA, 15 bp, Homo sapiens
cttatttccttaaat

SEQ ID NO: 47742 - DNA, 15 bp, Homo sapiens
tcttatttccttaaa

SEQ ID NO: 47743 - DNA, 15 bp, Homo sapiens
gtcttatttccttaa

SEQ ID NO: 47744 - DNA, 15 bp, Homo sapiens
tgtcttatttcctta

SEQ ID NO: 47745 - DNA, 15 bp, Homo sapiens
gtgtcttatttcctt

SEQ ID NO: 47746 - DNA, 15 bp, Homo sapiens
agtgtcttatttcct

SEQ ID NO: 47747 - DNA, 15 bp, Homo sapiens
cagtgtcttatttcc

SEQ ID NO: 47748 - DNA, 15 bp, Homo sapiens
acagtgtcttatttc

SEQ ID NO: 47749 - DNA, 15 bp, Homo sapiens
gacagtgtcttattt

SEQ ID NO: 47750 - DNA, 15 bp, Homo sapiens
agacagtgtcttatt

SEQ ID NO: 47751 - DNA, 15 bp, Homo sapiens
aagacagtgtcttat

SEQ ID NO: 47752 - DNA, 15 bp, Homo sapiens
gaagacagtgtctta

SEQ ID NO: 47753 - DNA, 15 bp, Homo sapiens
tgaagacagtgtctt

SEQ ID NO: 47754 - DNA, 15 bp, Homo sapiens
ttgaagacagtgtct

SEQ ID NO: 47755 - DNA, 15 bp, Homo sapiens
cttgaagacagtgtc

SEQ ID NO: 47756 - DNA, 15 bp, Homo sapiens
acttgaagacagtgt

SEQ ID NO: 47757 - DNA, 15 bp, Homo sapiens
tacttgaagacagtg

SEQ ID NO: 47758 - DNA, 15 bp, Homo sapiens
atacttgaagacagt

SEQ ID NO: 47759 - DNA, 15 bp, Homo sapiens
gatacttgaagacag

SEQ ID NO: 47760 - DNA, 15 bp, Homo sapiens
agatacttgaagaca

SEQ ID NO: 47761 - DNA, 15 bp, Homo sapiens
cagatacttgaagac

SEQ ID NO: 47762 - DNA, 15 bp, Homo sapiens
tcagatacttgaaga

SEQ ID NO: 47763 - DNA, 15 bp, Homo sapiens
ttcagatacttgaag

SEQ ID NO: 47764 - DNA, 15 bp, Homo sapiens
cttcagatacttgaa

SEQ ID NO: 47765 - DNA, 15 bp, Homo sapiens
tcttcagatacttga

SEQ ID NO: 47766 - DNA, 15 bp, Homo sapiens
ttcttcagatacttg

SEQ ID NO: 47767 - DNA, 15 bp, Homo sapiens
gttcttcagatactt

SEQ ID NO: 47768 - DNA, 15 bp, Homo sapiens
ggttcttcagatact

SEQ ID NO: 47769 - DNA, 15 bp, Homo sapiens
cggttcttcagatac

SEQ ID NO: 47770 - DNA, 15 bp, Homo sapiens
acggttcttcagata

SEQ ID NO: 47771 - DNA, 15 bp, Homo sapiens
aacggttcttcagat

SEQ ID NO: 47772 - DNA, 15 bp, Homo sapiens
taacggttcttcaga

SEQ ID NO: 47773 - DNA, 15 bp, Homo sapiens
gtaacggttcttcag

SEQ ID NO: 47774 - DNA, 15 bp, Homo sapiens
ggtaacggttcttca

SEQ ID NO: 47775 - DNA, 15 bp, Homo sapiens
gggtaacggttcttc

SEQ ID NO: 47776 - DNA, 15 bp, Homo sapiens
cgggtaacggttctt

SEQ ID NO: 47777 - DNA, 15 bp, Homo sapiens
ccgggtaacggttct

SEQ ID NO: 47778 - DNA, 15 bp, Homo sapiens
tccgggtaacggttc

SEQ ID NO: 47779 - DNA, 15 bp, Homo sapiens
ttccgggtaacggtt

SEQ ID NO: 47780 - DNA, 15 bp, Homo sapiens
cttccgggtaacggt

SEQ ID NO: 47781 - DNA, 15 bp, Homo sapiens
tcttccgggtaacgg

SEQ ID NO: 47782 - DNA, 15 bp, Homo sapiens
ctcttccgggtaacg

SEQ ID NO: 47783 - DNA, 15 bp, Homo sapiens
tctcttccgggtaac

SEQ ID NO: 47784 - DNA, 15 bp, Homo sapiens
ttctcttccgggtaa

SEQ ID NO: 47785 - DNA, 15 bp, Homo sapiens
gttctcttccgggta

SEQ ID NO: 47786 - DNA, 15 bp, Homo sapiens
agttctcttccgggt

SEQ ID NO: 47787 - DNA, 15 bp, Homo sapiens
cagttctcttccggg

SEQ ID NO: 47788 - DNA, 15 bp, Homo sapiens
acagttctcttccgg

SEQ ID NO: 47789 - DNA, 15 bp, Homo sapiens
aacagttctcttccg

SEQ ID NO: 47790 - DNA, 15 bp, Homo sapiens
taacagttctcttcc

SEQ ID NO: 47791 - DNA, 15 bp, Homo sapiens
ataacagttctcttc

SEQ ID NO: 47792 - DNA, 15 bp, Homo sapiens
gataacagttctctt

SEQ ID NO: 47793 - DNA, 15 bp, Homo sapiens
agataacagttctct

SEQ ID NO: 47794 - DNA, 15 bp, Homo sapiens
cagataacagttctc

SEQ ID NO: 47795 - DNA, 15 bp, Homo sapiens
ccagataacagttct

SEQ ID NO: 47796 - DNA, 15 bp, Homo sapiens
tccagataacagttc

SEQ ID NO: 47797 - DNA, 15 bp, Homo sapiens
ttccagataacagtt

SEQ ID NO: 47798 - DNA, 15 bp, Homo sapiens
gttccagataacagt

SEQ ID NO: 47799 - DNA, 15 bp, Homo sapiens
tgttccagataacag

SEQ ID NO: 47800 - DNA, 15 bp, Homo sapiens
ctgttccagataaca

SEQ ID NO: 47801 - DNA, 15 bp, Homo sapiens
cctgttccagataac

SEQ ID NO: 47802 - DNA, 15 bp, Homo sapiens
tcctgttccagataa

SEQ ID NO: 47803 - DNA, 15 bp, Homo sapiens
atcctgttccagata

SEQ ID NO: 47804 - DNA, 15 bp, Homo sapiens
aatcctgttccagat

SEQ ID NO: 47805 - DNA, 15 bp, Homo sapiens
taatcctgttccaga

SEQ ID NO: 47806 - DNA, 15 bp, Homo sapiens
ttaatcctgttccag

SEQ ID NO: 47807 - DNA, 15 bp, Homo sapiens
cttaatcctgttcca

SEQ ID NO: 47808 - DNA, 15 bp, Homo sapiens
tcttaatcctgttcc

SEQ ID NO: 47809 - DNA, 15 bp, Homo sapiens
gtcttaatcctgttc

SEQ ID NO: 47810 - DNA, 15 bp, Homo sapiens
agtcttaatcctgtt

SEQ ID NO: 47811 - DNA, 15 bp, Homo sapiens
gagtcttaatcctgt

SEQ ID NO: 47812 - DNA, 15 bp, Homo sapiens
tgagtcttaatcctg

SEQ ID NO: 47813 - DNA, 15 bp, Homo sapiens
gtgagtcttaatcct

SEQ ID NO: 47814 - DNA, 15 bp, Homo sapiens
agtgagtcttaatcc

SEQ ID NO: 47815 - DNA, 15 bp, Homo sapiens
gagtgagtcttaatc

SEQ ID NO: 47816 - DNA, 15 bp, Homo sapiens
tgagtgagtcttaat

SEQ ID NO: 47817 - DNA, 15 bp, Homo sapiens
atgagtgagtcttaa

SEQ ID NO: 47818 - DNA, 15 bp, Homo sapiens
catgagtgagtctta

SEQ ID NO: 47819 - DNA, 15 bp, Homo sapiens
ccatgagtgagtctt

SEQ ID NO: 47820 - DNA, 15 bp, Homo sapiens
cccatgagtgagtct

SEQ ID NO: 47821 - DNA, 15 bp, Homo sapiens
ccccatgagtgagtc

SEQ ID NO: 47822 - DNA, 15 bp, Homo sapiens
gccccatgagtgagt

SEQ ID NO: 47823 - DNA, 15 bp, Homo sapiens
agccccatgagtgag

SEQ ID NO: 47824 - DNA, 15 bp, Homo sapiens
gagccccatgagtga

SEQ ID NO: 47825 - DNA, 15 bp, Homo sapiens
ggagccccatgagtg

SEQ ID NO: 47826 - DNA, 15 bp, Homo sapiens
tggagccccatgagt

SEQ ID NO: 47827 - DNA, 15 bp, Homo sapiens
ctggagccccatgag

SEQ ID NO: 47828 - DNA, 15 bp, Homo sapiens
tctggagccccatga

SEQ ID NO: 47829 - DNA, 15 bp, Homo sapiens
ttctggagccccatg

SEQ ID NO: 47830 - DNA, 15 bp, Homo sapiens
tttctggagccccat

SEQ ID NO: 47831 - DNA, 15 bp, Homo sapiens
ctttctggagcccca

SEQ ID NO: 47832 - DNA, 15 bp, Homo sapiens
gctttctggagcccc

SEQ ID NO: 47833 - DNA, 15 bp, Homo sapiens
tgctttctggagccc

SEQ ID NO: 47834 - DNA, 15 bp, Homo sapiens
ctgctttctggagcc

SEQ ID NO: 47835 - DNA, 15 bp, Homo sapiens
tctgctttctggagc

SEQ ID NO: 47836 - DNA, 15 bp, Homo sapiens
gtctgctttctggag

SEQ ID NO: 47837 - DNA, 15 bp, Homo sapiens
cgtctgctttctgga

SEQ ID NO: 47838 - DNA, 15 bp, Homo sapiens
tcgtctgctttctgg

SEQ ID NO: 47839 - DNA, 15 bp, Homo sapiens
ctcgtctgctttctg

SEQ ID NO: 47840 - DNA, 15 bp, Homo sapiens
actcgtctgctttct

SEQ ID NO: 47841 - DNA, 15 bp, Homo sapiens
cactcgtctgctttc

SEQ ID NO: 47842 - DNA, 15 bp, Homo sapiens
gcactcgtctgcttt

SEQ ID NO: 47843 - DNA, 15 bp, Homo sapiens
tgcactcgtctgctt

SEQ ID NO: 47844 - DNA, 15 bp, Homo sapiens
atgcactcgtctgct

SEQ ID NO: 47845 - DNA, 15 bp, Homo sapiens
catgcactcgtctgc

SEQ ID NO: 47846 - DNA, 15 bp, Homo sapiens
ccatgcactcgtctg

SEQ ID NO: 47847 - DNA, 15 bp, Homo sapiens
tccatgcactcgtct

SEQ ID NO: 47848 - DNA, 15 bp, Homo sapiens
ctccatgcactcgtc

SEQ ID NO: 47849 - DNA, 15 bp, Homo sapiens
cctccatgcactcgt

SEQ ID NO: 47850 - DNA, 15 bp, Homo sapiens
tcctccatgcactcg

SEQ ID NO: 47851 - DNA, 15 bp, Homo sapiens
gtcctccatgcactc

SEQ ID NO: 47852 - DNA, 15 bp, Homo sapiens
cgtcctccatgcact

SEQ ID NO: 47853 - DNA, 15 bp, Homo sapiens
gcgtcctccatgcac

SEQ ID NO: 47854 - DNA, 15 bp, Homo sapiens
tgcgtcctccatgca

SEQ ID NO: 47855 - DNA, 15 bp, Homo sapiens
ctgcgtcctccatgc

SEQ ID NO: 47856 - DNA, 15 bp, Homo sapiens
tctgcgtcctccatg

SEQ ID NO: 47857 - DNA, 15 bp, Homo sapiens
ttctgcgtcctccat

SEQ ID NO: 47858 - DNA, 15 bp, Homo sapiens
cttctgcgtcctcca

SEQ ID NO: 47859 - DNA, 15 bp, Homo sapiens
tcttctgcgtcctcc

SEQ ID NO: 47860 - DNA, 15 bp, Homo sapiens
atcttctgcgtcctc

SEQ ID NO: 47861 - DNA, 15 bp, Homo sapiens
catcttctgcgtcct

SEQ ID NO: 47862 - DNA, 15 bp, Homo sapiens
gcatcttctgcgtcc

SEQ ID NO: 47863 - DNA, 15 bp, Homo sapiens
tgcatcttctgcgtc

SEQ ID NO: 47864 - DNA, 15 bp, Homo sapiens
ctgcatcttctgcgt

SEQ ID NO: 47865 - DNA, 15 bp, Homo sapiens
tctgcatcttctgcg

SEQ ID NO: 47866 - DNA, 15 bp, Homo sapiens
atctgcatcttctgc

SEQ ID NO: 47867 - DNA, 15 bp, Homo sapiens
aatctgcatcttctg

SEQ ID NO: 47868 - DNA, 15 bp, Homo sapiens
caatctgcatcttct

SEQ ID NO: 47869 - DNA, 15 bp, Homo sapiens
acaatctgcatcttc

SEQ ID NO: 47870 - DNA, 15 bp, Homo sapiens
cacaatctgcatctt

SEQ ID NO: 47871 - DNA, 15 bp, Homo sapiens
acacaatctgcatct

SEQ ID NO: 47872 - DNA, 15 bp, Homo sapiens
cacacaatctgcatc

SEQ ID NO: 47873 - DNA, 15 bp, Homo sapiens
ccacacaatctgcat

SEQ ID NO: 47874 - DNA, 15 bp, Homo sapiens
gccacacaatctgca

SEQ ID NO: 47875 - DNA, 15 bp, Homo sapiens
agccacacaatctgc

SEQ ID NO: 47876 - DNA, 15 bp, Homo sapiens
gagccacacaatctg

SEQ ID NO: 47877 - DNA, 15 bp, Homo sapiens
tgagccacacaatct

SEQ ID NO: 47878 - DNA, 15 bp, Homo sapiens
ttgagccacacaatc

SEQ ID NO: 47879 - DNA, 15 bp, Homo sapiens
gttgagccacacaat

SEQ ID NO: 47880 - DNA, 15 bp, Homo sapiens
agttgagccacacaa

SEQ ID NO: 47881 - DNA, 15 bp, Homo sapiens
gagttgagccacaca

SEQ ID NO: 47882 - DNA, 15 bp, Homo sapiens
agagttgagccacac

SEQ ID NO: 47883 - DNA, 15 bp, Homo sapiens
tagagttgagccaca

SEQ ID NO: 47884 - DNA, 15 bp, Homo sapiens
ttagagttgagccac

SEQ ID NO: 47885 - DNA, 15 bp, Homo sapiens
tttagagttgagcca

SEQ ID NO: 47886 - DNA, 15 bp, Homo sapiens
ttttagagttgagcc

SEQ ID NO: 47887 - DNA, 15 bp, Homo sapiens
attttagagttgagc

SEQ ID NO: 47888 - DNA, 15 bp, Homo sapiens
gattttagagttgag

SEQ ID NO: 47889 - DNA, 15 bp, Homo sapiens
agattttagagttga

SEQ ID NO: 47890 - DNA, 15 bp, Homo sapiens
aagattttagagttg

SEQ ID NO: 47891 - DNA, 15 bp, Homo sapiens
aaagattttagagtt

SEQ ID NO: 47892 - DNA, 15 bp, Homo sapiens
gaaagattttagagt

SEQ ID NO: 47893 - DNA, 15 bp, Homo sapiens
agaaagattttagag

SEQ ID NO: 47894 - DNA, 15 bp, Homo sapiens
tagaaagattttaga

SEQ ID NO: 47895 - DNA, 15 bp, Homo sapiens
ttagaaagattttag

SEQ ID NO: 47896 - DNA, 15 bp, Homo sapiens
gttagaaagatttta

SEQ ID NO: 47897 - DNA, 15 bp, Homo sapiens
tgttagaaagatttt

SEQ ID NO: 47898 - DNA, 15 bp, Homo sapiens
ttgttagaaagattt

SEQ ID NO: 47899 - DNA, 15 bp, Homo sapiens
tttgttagaaagatt

SEQ ID NO: 47900 - DNA, 15 bp, Homo sapiens
ttttgttagaaagat

SEQ ID NO: 47901 - DNA, 15 bp, Homo sapiens
attttgttagaaaga

SEQ ID NO: 47902 - DNA, 15 bp, Homo sapiens
aattttgttagaaag

SEQ ID NO: 47903 - DNA, 15 bp, Homo sapiens
taattttgttagaaa

SEQ ID NO: 47904 - DNA, 15 bp, Homo sapiens
ctaattttgttagaa

SEQ ID NO: 47905 - DNA, 15 bp, Homo sapiens
actaattttgttaga

SEQ ID NO: 47906 - DNA, 15 bp, Homo sapiens
aactaattttgttag

SEQ ID NO: 47907 - DNA, 15 bp, Homo sapiens
gaactaattttgtta

SEQ ID NO: 47908 - DNA, 15 bp, Homo sapiens
agaactaattttgtt

SEQ ID NO: 47909 - DNA, 15 bp, Homo sapiens
gagaactaattttgt

SEQ ID NO: 47910 - DNA, 15 bp, Homo sapiens
agagaactaattttg

SEQ ID NO: 47911 - DNA, 15 bp, Homo sapiens
cagagaactaatttt

SEQ ID NO: 47912 - DNA, 15 bp, Homo sapiens
ccagagaactaattt

SEQ ID NO: 47913 - DNA, 15 bp, Homo sapiens
tccagagaactaatt

SEQ ID NO: 47914 - DNA, 15 bp, Homo sapiens
atccagagaactaat

SEQ ID NO: 47915 - DNA, 15 bp, Homo sapiens
catccagagaactaa

SEQ ID NO: 47916 - DNA, 15 bp, Homo sapiens
acatccagagaacta

SEQ ID NO: 47917 - DNA, 15 bp, Homo sapiens
cacatccagagaact

SEQ ID NO: 47918 - DNA, 15 bp, Homo sapiens
acacatccagagaac

SEQ ID NO: 47919 - DNA, 15 bp, Homo sapiens
aacacatccagagaa

SEQ ID NO: 47920 - DNA, 15 bp, Homo sapiens
gaacacatccagaga

SEQ ID NO: 47921 - DNA, 15 bp, Homo sapiens
ggaacacatccagag

SEQ ID NO: 47922 - DNA, 15 bp, Homo sapiens
tggaacacatccaga

SEQ ID NO: 47923 - DNA, 15 bp, Homo sapiens
ctggaacacatccag

SEQ ID NO: 47924 - DNA, 15 bp, Homo sapiens
actggaacacatcca

SEQ ID NO: 47925 - DNA, 15 bp, Homo sapiens
aactggaacacatcc

SEQ ID NO: 47926 - DNA, 15 bp, Homo sapiens
gaactggaacacatc

SEQ ID NO: 47927 - DNA, 15 bp, Homo sapiens
tgaactggaacacat

SEQ ID NO: 47928 - DNA, 15 bp, Homo sapiens
gtgaactggaacaca

SEQ ID NO: 47929 - DNA, 15 bp, Homo sapiens
agtgaactggaacac

SEQ ID NO: 47930 - DNA, 15 bp, Homo sapiens
aagtgaactggaaca

SEQ ID NO: 47931 - DNA, 15 bp, Homo sapiens
caagtgaactggaac

SEQ ID NO: 47932 - DNA, 15 bp, Homo sapiens
tcaagtgaactggaa

SEQ ID NO: 47933 - DNA, 15 bp, Homo sapiens
atcaagtgaactgga

SEQ ID NO: 47934 - DNA, 15 bp, Homo sapiens
catcaagtgaactgg

SEQ ID NO: 47935 - DNA, 15 bp, Homo sapiens
tcatcaagtgaactg

SEQ ID NO: 47936 - DNA, 15 bp, Homo sapiens
atcatcaagtgaact

SEQ ID NO: 47937 - DNA, 15 bp, Homo sapiens
catcatcaagtgaac

SEQ ID NO: 47938 - DNA, 15 bp, Homo sapiens
tcatcatcaagtgaa

SEQ ID NO: 47939 - DNA, 15 bp, Homo sapiens
atcatcatcaagtga

SEQ ID NO: 47940 - DNA, 15 bp, Homo sapiens
aatcatcatcaagtg

SEQ ID NO: 47941 - DNA, 15 bp, Homo sapiens
gaatcatcatcaagt

SEQ ID NO: 47942 - DNA, 15 bp, Homo sapiens
agaatcatcatcaag

SEQ ID NO: 47943 - DNA, 15 bp, Homo sapiens
aagaatcatcatcaa

SEQ ID NO: 47944 - DNA, 15 bp, Homo sapiens
aaagaatcatcatca

SEQ ID NO: 47945 - DNA, 15 bp, Homo sapiens
aaaagaatcatcatc

SEQ ID NO: 47946 - DNA, 15 bp, Homo sapiens
caaaagaatcatcat

SEQ ID NO: 47947 - DNA, 15 bp, Homo sapiens
acaaaagaatcatca

SEQ ID NO: 47948 - DNA, 15 bp, Homo sapiens
aacaaaagaatcatc

SEQ ID NO: 47949 - DNA, 15 bp, Homo sapiens
aaacaaaagaatcat

SEQ ID NO: 47950 - DNA, 15 bp, Homo sapiens
aaaacaaaagaatca

SEQ ID NO: 47951 - DNA, 15 bp, Homo sapiens
aaaaacaaaagaatc

SEQ ID NO: 47952 - DNA, 15 bp, Homo sapiens
caaaaacaaaagaat

SEQ ID NO: 47953 - DNA, 15 bp, Homo sapiens
acaaaaacaaaagaa

SEQ ID NO: 47954 - DNA, 15 bp, Homo sapiens
aacaaaaacaaaaga

SEQ ID NO: 47955 - DNA, 15 bp, Homo sapiens
aaacaaaaacaaaag

SEQ ID NO: 47956 - DNA, 15 bp, Homo sapiens
tcaaaaacaaaaaca

SEQ ID NO: 47957 - DNA, 15 bp, Homo sapiens
ctcaaaaacaaaaac

SEQ ID NO: 47958 - DNA, 15 bp, Homo sapiens
cctcaaaaacaaaaa

SEQ ID NO: 47959 - DNA, 15 bp, Homo sapiens
acctcaaaaacaaaa

SEQ ID NO: 47960 - DNA, 15 bp, Homo sapiens
cacctcaaaaacaaa

SEQ ID NO: 47961 - DNA, 15 bp, Homo sapiens
acacctcaaaaacaa

SEQ ID NO: 47962 - DNA, 15 bp, Homo sapiens
tacacctcaaaaaca

SEQ ID NO: 47963 - DNA, 15 bp, Homo sapiens
ctacacctcaaaaac

SEQ ID NO: 47964 - DNA, 15 bp, Homo sapiens
actacacctcaaaaa

SEQ ID NO: 47965 - DNA, 15 bp, Homo sapiens
aactacacctcaaaa

SEQ ID NO: 47966 - DNA, 15 bp, Homo sapiens
aaactacacctcaaa

SEQ ID NO: 47967 - DNA, 15 bp, Homo sapiens
aaaactacacctcaa

SEQ ID NO: 47968 - DNA, 15 bp, Homo sapiens
aaaaactacacctca

SEQ ID NO: 47969 - DNA, 15 bp, Homo sapiens
gaaaaactacacctc

SEQ ID NO: 47970 - DNA, 15 bp, Homo sapiens
tgaaaaactacacct

SEQ ID NO: 47971 - DNA, 15 bp, Homo sapiens
gtgaaaaactacacc

SEQ ID NO: 47972 - DNA, 15 bp, Homo sapiens
agtgaaaaactacac

SEQ ID NO: 47973 - DNA, 15 bp, Homo sapiens
gagtgaaaaactaca

SEQ ID NO: 47974 - DNA, 15 bp, Homo sapiens
agagtgaaaaactac

SEQ ID NO: 47975 - DNA, 15 bp, Homo sapiens
aagagtgaaaaacta

SEQ ID NO: 47976 - DNA, 15 bp, Homo sapiens
caagagtgaaaaact

SEQ ID NO: 47977 - DNA, 15 bp, Homo sapiens
acaagagtgaaaaac

SEQ ID NO: 47978 - DNA, 15 bp, Homo sapiens
aacaagagtgaaaaa

SEQ ID NO: 47979 - DNA, 15 bp, Homo sapiens
caacaagagtgaaaa

SEQ ID NO: 47980 - DNA, 15 bp, Homo sapiens
gcagcctgggcaaca

SEQ ID NO: 47981 - DNA, 15 bp, Homo sapiens
agcagcctgggcaac

SEQ ID NO: 47982 - DNA, 15 bp, Homo sapiens
cagcagcctgggcaa

SEQ ID NO: 47983 - DNA, 15 bp, Homo sapiens
ccagcagcctgggca

SEQ ID NO: 47984 - DNA, 15 bp, Homo sapiens
tccagcagcctgggc

SEQ ID NO: 47985 - DNA, 15 bp, Homo sapiens
ctccagcagcctggg

SEQ ID NO: 47986 - DNA, 15 bp, Homo sapiens
actccagcagcctgg

SEQ ID NO: 47987 - DNA, 15 bp, Homo sapiens
cactccagcagcctg

SEQ ID NO: 47988 - DNA, 15 bp, Homo sapiens
gcactccagcagcct

SEQ ID NO: 47989 - DNA, 15 bp, Homo sapiens
tgcactccagcagcc

SEQ ID NO: 47990 - DNA, 15 bp, Homo sapiens
ttgcactccagcagc

SEQ ID NO: 47991 - DNA, 15 bp, Homo sapiens
attgcactccagcag

SEQ ID NO: 47992 - DNA, 15 bp, Homo sapiens
cattgcactccagca

SEQ ID NO: 47993 - DNA, 15 bp, Homo sapiens
tgccattgcactcca

SEQ ID NO: 47994 - DNA, 15 bp, Homo sapiens
gtgccattgcactcc

SEQ ID NO: 47995 - DNA, 15 bp, Homo sapiens
cgtgccattgcactc

SEQ ID NO: 47996 - DNA, 15 bp, Homo sapiens
tcgtgccattgcact

SEQ ID NO: 47997 - DNA, 15 bp, Homo sapiens
atcgtgccattgcac

SEQ ID NO: 47998 - DNA, 15 bp, Homo sapiens
gatcgtgccattgca

SEQ ID NO: 47999 - DNA, 15 bp, Homo sapiens
agatcgtgccattgc

SEQ ID NO: 48000 - DNA, 15 bp, Homo sapiens
aagatcgtgccattg

SEQ ID NO: 48001 - DNA, 15 bp, Homo sapiens
caagatcgtgccatt

SEQ ID NO: 48002 - DNA, 15 bp, Homo sapiens
ccaagatcgtgccat

SEQ ID NO: 48003 - DNA, 15 bp, Homo sapiens
aagccaagatcgtgc

SEQ ID NO: 48004 - DNA, 15 bp, Homo sapiens
caagccaagatcgtg

SEQ ID NO: 48005 - DNA, 15 bp, Homo sapiens
gcaagccaagatcgt

SEQ ID NO: 48006 - DNA, 15 bp, Homo sapiens
agcaagccaagatcg

SEQ ID NO: 48007 - DNA, 15 bp, Homo sapiens
cagcaagccaagatc

SEQ ID NO: 48008 - DNA, 15 bp, Homo sapiens
gcagcaagccaagat

SEQ ID NO: 48009 - DNA, 15 bp, Homo sapiens
tgcagcaagccaaga

SEQ ID NO: 48010 - DNA, 15 bp, Homo sapiens
ttgcagcaagccaag

SEQ ID NO: 48011 - DNA, 15 bp, Homo sapiens
gttgcagcaagccaa

SEQ ID NO: 48012 - DNA, 15 bp, Homo sapiens
ggttgcagcaagcca

SEQ ID NO: 48013 - DNA, 15 bp, Homo sapiens
aggttgcagcaagcc

SEQ ID NO: 48014 - DNA, 15 bp, Homo sapiens
gaggttgcagcaagc

SEQ ID NO: 48015 - DNA, 15 bp, Homo sapiens
ggaggttgcagcaag

SEQ ID NO: 48016 - DNA, 15 bp, Homo sapiens
gggaggttgcagcaa

SEQ ID NO: 48017 - DNA, 15 bp, Homo sapiens
ggggaggttgcagca

SEQ ID NO: 48018 - DNA, 15 bp, Homo sapiens
gggggaggttgcagc

SEQ ID NO: 48019 - DNA, 15 bp, Homo sapiens
agggggaggttgcag

SEQ ID NO: 48020 - DNA, 15 bp, Homo sapiens
gagggggaggttgca

SEQ ID NO: 48021 - DNA, 15 bp, Homo sapiens
ggagggggaggttgc

SEQ ID NO: 48022 - DNA, 15 bp, Homo sapiens
gggagggggaggttg

SEQ ID NO: 48023 - DNA, 15 bp, Homo sapiens
cgggagggggaggtt

SEQ ID NO: 48024 - DNA, 15 bp, Homo sapiens
ccgggagggggaggt

SEQ ID NO: 48025 - DNA, 15 bp, Homo sapiens
cccgggagggggagg

SEQ ID NO: 48026 - DNA, 15 bp, Homo sapiens
acccgggagggggag

SEQ ID NO: 48027 - DNA, 15 bp, Homo sapiens
aacccgggaggggga

SEQ ID NO: 48028 - DNA, 15 bp, Homo sapiens
gaacccgggaggggg

SEQ ID NO: 48029 - DNA, 15 bp, Homo sapiens
tgaacccgggagggg

SEQ ID NO: 48030 - DNA, 15 bp, Homo sapiens
ttgaacccgggaggg

SEQ ID NO: 48031 - DNA, 15 bp, Homo sapiens
cgcttgaacccggga

SEQ ID NO: 48032 - DNA, 15 bp, Homo sapiens
tcgcttgaacccggg

SEQ ID NO: 48033 - DNA, 15 bp, Homo sapiens
atcgcttgaacccgg

SEQ ID NO: 48034 - DNA, 15 bp, Homo sapiens
aatcgcttgaacccg

SEQ ID NO: 48035 - DNA, 15 bp, Homo sapiens
tcctgtaatcccagc

SEQ ID NO: 48036 - DNA, 15 bp, Homo sapiens
ttcctgtaatcccag

SEQ ID NO: 48037 - DNA, 15 bp, Homo sapiens
attcctgtaatccca

SEQ ID NO: 48038 - DNA, 15 bp, Homo sapiens
cattcctgtaatccc

SEQ ID NO: 48039 - DNA, 15 bp, Homo sapiens
gcattcctgtaatcc

SEQ ID NO: 48040 - DNA, 15 bp, Homo sapiens
tgcattcctgtaatc

SEQ ID NO: 48041 - DNA, 15 bp, Homo sapiens
gtgcattcctgtaat

SEQ ID NO: 48042 - DNA, 15 bp, Homo sapiens
ggtgcattcctgtaa

SEQ ID NO: 48043 - DNA, 15 bp, Homo sapiens
tggtgcattcctgta

SEQ ID NO: 48044 - DNA, 15 bp, Homo sapiens
gtggtgcattcctgt

SEQ ID NO: 48045 - DNA, 15 bp, Homo sapiens
ggtggtgcattcctg

SEQ ID NO: 48046 - DNA, 15 bp, Homo sapiens
tggtggtgcattcct

SEQ ID NO: 48047 - DNA, 15 bp, Homo sapiens
atggtggtgcattcc

SEQ ID NO: 48048 - DNA, 15 bp, Homo sapiens
tatggtggtgcattc

SEQ ID NO: 48049 - DNA, 15 bp, Homo sapiens
gtatggtggtgcatt

SEQ ID NO: 48050 - DNA, 15 bp, Homo sapiens
ggtatggtggtgcat

SEQ ID NO: 48051 - DNA, 15 bp, Homo sapiens
aggtatggtggtgca

SEQ ID NO: 48052 - DNA, 15 bp, Homo sapiens
taggtatggtggtgc

SEQ ID NO: 48053 - DNA, 15 bp, Homo sapiens
ttaggtatggtggtg

SEQ ID NO: 48054 - DNA, 15 bp, Homo sapiens
attaggtatggtggt

SEQ ID NO: 48055 - DNA, 15 bp, Homo sapiens
aattaggtatggtgg

SEQ ID NO: 48056 - DNA, 15 bp, Homo sapiens
aaattaggtatggtg

SEQ ID NO: 48057 - DNA, 15 bp, Homo sapiens
aaaattaggtatggt

SEQ ID NO: 48058 - DNA, 15 bp, Homo sapiens
caaaattaggtatgg

SEQ ID NO: 48059 - DNA, 15 bp, Homo sapiens
acaaaattaggtatg

SEQ ID NO: 48060 - DNA, 15 bp, Homo sapiens
tacaaaattaggtat

SEQ ID NO: 48061 - DNA, 15 bp, Homo sapiens
atacaaaattaggta

SEQ ID NO: 48062 - DNA, 15 bp, Homo sapiens
aatacaaaattaggt

SEQ ID NO: 48063 - DNA, 15 bp, Homo sapiens
aaatacaaaattagg

SEQ ID NO: 48064 - DNA, 15 bp, Homo sapiens
aaaaccctgtctcta

SEQ ID NO: 48065 - DNA, 15 bp, Homo sapiens
aaaaaccctgtctct

SEQ ID NO: 48066 - DNA, 15 bp, Homo sapiens
gaaaaaccctgtctc

SEQ ID NO: 48067 - DNA, 15 bp, Homo sapiens
ggaaaaaccctgtct

SEQ ID NO: 48068 - DNA, 15 bp, Homo sapiens
tggaaaaaccctgtc

SEQ ID NO: 48069 - DNA, 15 bp, Homo sapiens
atggaaaaaccctgt

SEQ ID NO: 48070 - DNA, 15 bp, Homo sapiens
catggaaaaaccctg

SEQ ID NO: 48071 - DNA, 15 bp, Homo sapiens
acatggaaaaaccct

SEQ ID NO: 48072 - DNA, 15 bp, Homo sapiens
gacatggaaaaaccc

SEQ ID NO: 48073 - DNA, 15 bp, Homo sapiens
tgacatggaaaaacc

SEQ ID NO: 48074 - DNA, 15 bp, Homo sapiens
ctgacatggaaaaac

SEQ ID NO: 48075 - DNA, 15 bp, Homo sapiens
actgacatggaaaaa

SEQ ID NO: 48076 - DNA, 15 bp, Homo sapiens
gactgacatggaaaa

SEQ ID NO: 48077 - DNA, 15 bp, Homo sapiens
tgactgacatggaaa

SEQ ID NO: 48078 - DNA, 15 bp, Homo sapiens
ctgactgacatggaa

SEQ ID NO: 48079 - DNA, 15 bp, Homo sapiens
cctgactgacatgga

SEQ ID NO: 48080 - DNA, 15 bp, Homo sapiens
gcctgactgacatgg

SEQ ID NO: 48081 - DNA, 15 bp, Homo sapiens
agcctgactgacatg

SEQ ID NO: 48082 - DNA, 15 bp, Homo sapiens
cagcctgactgacat

SEQ ID NO: 48083 - DNA, 15 bp, Homo sapiens
ccagcctgactgaca

SEQ ID NO: 48084 - DNA, 15 bp, Homo sapiens
accagcctgactgac

SEQ ID NO: 48085 - DNA, 15 bp, Homo sapiens
gaccagcctgactga

SEQ ID NO: 48086 - DNA, 15 bp, Homo sapiens
agaccagcctgactg

SEQ ID NO: 48087 - DNA, 15 bp, Homo sapiens
aagaccagcctgact

SEQ ID NO: 48088 - DNA, 15 bp, Homo sapiens
ccaagaccagcctga

SEQ ID NO: 48089 - DNA, 15 bp, Homo sapiens
tccaagaccagcctg

SEQ ID NO: 48090 - DNA, 15 bp, Homo sapiens
gtccaagaccagcct

SEQ ID NO: 48091 - DNA, 15 bp, Homo sapiens
agtccaagaccagcc

SEQ ID NO: 48092 - DNA, 15 bp, Homo sapiens
gagtccaagaccagc

SEQ ID NO: 48093 - DNA, 15 bp, Homo sapiens
ggagtccaagaccag

SEQ ID NO: 48094 - DNA, 15 bp, Homo sapiens
gggagtccaagacca

SEQ ID NO: 48095 - DNA, 15 bp, Homo sapiens
cgggagtccaagacc

SEQ ID NO: 48096 - DNA, 15 bp, Homo sapiens
tcgggagtccaagac

SEQ ID NO: 48097 - DNA, 15 bp, Homo sapiens
gtcgggagtccaaga

SEQ ID NO: 48098 - DNA, 15 bp, Homo sapiens
ggtcgggagtccaag

SEQ ID NO: 48099 - DNA, 15 bp, Homo sapiens
aggtcgggagtccaa

SEQ ID NO: 48100 - DNA, 15 bp, Homo sapiens
gaggtcgggagtcca

SEQ ID NO: 48101 - DNA, 15 bp, Homo sapiens
tgaggtcgggagtcc

SEQ ID NO: 48102 - DNA, 15 bp, Homo sapiens
ctgaggtcgggagtc

SEQ ID NO: 48103 - DNA, 15 bp, Homo sapiens
cctgaggtcgggagt

SEQ ID NO: 48104 - DNA, 15 bp, Homo sapiens
acctgaggtcgggag

SEQ ID NO: 48105 - DNA, 15 bp, Homo sapiens
cacctgaggtcggga

SEQ ID NO: 48106 - DNA, 15 bp, Homo sapiens
tcacctgaggtcggg

SEQ ID NO: 48107 - DNA, 15 bp, Homo sapiens
atcacctgaggtcgg

SEQ ID NO: 48108 - DNA, 15 bp, Homo sapiens
gatcacctgaggtcg

SEQ ID NO: 48109 - DNA, 15 bp, Homo sapiens
aggtggatcacctga

SEQ ID NO: 48110 - DNA, 15 bp, Homo sapiens
taggtggatcacctg

SEQ ID NO: 48111 - DNA, 15 bp, Homo sapiens
gtaggtggatcacct

SEQ ID NO: 48112 - DNA, 15 bp, Homo sapiens
ggtaggtggatcacc

SEQ ID NO: 48113 - DNA, 15 bp, Homo sapiens
aggtaggtggatcac

SEQ ID NO: 48114 - DNA, 15 bp, Homo sapiens
gaggtaggtggatca

SEQ ID NO: 48115 - DNA, 15 bp, Homo sapiens
cgaggtaggtggatc

SEQ ID NO: 48116 - DNA, 15 bp, Homo sapiens
ccgaggtaggtggat

SEQ ID NO: 48117 - DNA, 15 bp, Homo sapiens
gccgaggtaggtgga

SEQ ID NO: 48118 - DNA, 15 bp, Homo sapiens
ggccgaggtaggtgg

SEQ ID NO: 48119 - DNA, 15 bp, Homo sapiens
aggccgaggtaggtg

SEQ ID NO: 48120 - DNA, 15 bp, Homo sapiens
gaggccgaggtaggt

SEQ ID NO: 48121 - DNA, 15 bp, Homo sapiens
ggaggccgaggtagg

SEQ ID NO: 48122 - DNA, 15 bp, Homo sapiens
gggaggccgaggtag

SEQ ID NO: 48123 - DNA, 15 bp, Homo sapiens
tgggaggccgaggta

SEQ ID NO: 48124 - DNA, 15 bp, Homo sapiens
gatggctcacacctg

SEQ ID NO: 48125 - DNA, 15 bp, Homo sapiens
cgatggctcacacct

SEQ ID NO: 48126 - DNA, 15 bp, Homo sapiens
gcgatggctcacacc

SEQ ID NO: 48127 - DNA, 15 bp, Homo sapiens
cgcgatggctcacac

SEQ ID NO: 48128 - DNA, 15 bp, Homo sapiens
gcgcgatggctcaca

SEQ ID NO: 48129 - DNA, 15 bp, Homo sapiens
ggcgcgatggctcac

SEQ ID NO: 48130 - DNA, 15 bp, Homo sapiens
aggcgcgatggctca

SEQ ID NO: 48131 - DNA, 15 bp, Homo sapiens
taggcgcgatggctc

SEQ ID NO: 48132 - DNA, 15 bp, Homo sapiens
ctaggcgcgatggct

SEQ ID NO: 48133 - DNA, 15 bp, Homo sapiens
gctaggcgcgatggc

SEQ ID NO: 48134 - DNA, 15 bp, Homo sapiens
ggctaggcgcgatgg

SEQ ID NO: 48135 - DNA, 15 bp, Homo sapiens
aggctaggcgcgatg

SEQ ID NO: 48136 - DNA, 15 bp, Homo sapiens
taggctaggcgcgat

SEQ ID NO: 48137 - DNA, 15 bp, Homo sapiens
ataggctaggcgcga

SEQ ID NO: 48138 - DNA, 15 bp, Homo sapiens
cataggctaggcgcg

SEQ ID NO: 48139 - DNA, 15 bp, Homo sapiens
tcataggctaggcgc

SEQ ID NO: 48140 - DNA, 15 bp, Homo sapiens
atcataggctaggcg

SEQ ID NO: 48141 - DNA, 15 bp, Homo sapiens
catcataggctaggc

SEQ ID NO: 48142 - DNA, 15 bp, Homo sapiens
tcatcataggctagg

SEQ ID NO: 48143 - DNA, 15 bp, Homo sapiens
atcatcataggctag

SEQ ID NO: 48144 - DNA, 15 bp, Homo sapiens
aatcatcataggcta

SEQ ID NO: 48145 - DNA, 15 bp, Homo sapiens
gaatcatcataggct

SEQ ID NO: 48146 - DNA, 15 bp, Homo sapiens
agaatcatcataggc

SEQ ID NO: 48147 - DNA, 15 bp, Homo sapiens
aagaatcatcatagg

SEQ ID NO: 48148 - DNA, 15 bp, Homo sapiens
aaagaatcatcatag

SEQ ID NO: 48149 - DNA, 15 bp, Homo sapiens
aaaagaatcatcata

SEQ ID NO: 48150 - DNA, 15 bp, Homo sapiens
gaaaagaatcatcat

SEQ ID NO: 48151 - DNA, 15 bp, Homo sapiens
tgaaaagaatcatca

SEQ ID NO: 48152 - DNA, 15 bp, Homo sapiens
gtgaaaagaatcatc

SEQ ID NO: 48153 - DNA, 15 bp, Homo sapiens
tgtgaaaagaatcat

SEQ ID NO: 48154 - DNA, 15 bp, Homo sapiens
ctgtgaaaagaatca

SEQ ID NO: 48155 - DNA, 15 bp, Homo sapiens
tctgtgaaaagaatc

SEQ ID NO: 48156 - DNA, 15 bp, Homo sapiens
ctctgtgaaaagaat

SEQ ID NO: 48157 - DNA, 15 bp, Homo sapiens
tctctgtgaaaagaa

SEQ ID NO: 48158 - DNA, 15 bp, Homo sapiens
atctctgtgaaaaga

SEQ ID NO: 48159 - DNA, 15 bp, Homo sapiens
tatctctgtgaaaag

SEQ ID NO: 48160 - DNA, 15 bp, Homo sapiens
gtatctctgtgaaaa

SEQ ID NO: 48161 - DNA, 15 bp, Homo sapiens
tgtatctctgtgaaa

SEQ ID NO: 48162 - DNA, 15 bp, Homo sapiens
ctgtatctctgtgaa

SEQ ID NO: 48163 - DNA, 15 bp, Homo sapiens
cctgtatctctgtga

SEQ ID NO: 48164 - DNA, 15 bp, Homo sapiens
gcctgtatctctgtg

SEQ ID NO: 48165 - DNA, 15 bp, Homo sapiens
tgcctgtatctctgt

SEQ ID NO: 48166 - DNA, 15 bp, Homo sapiens
gtgcctgtatctctg

SEQ ID NO: 48167 - DNA, 15 bp, Homo sapiens
agtgcctgtatctct

SEQ ID NO: 48168 - DNA, 15 bp, Homo sapiens
aagtgcctgtatctc

SEQ ID NO: 48169 - DNA, 15 bp, Homo sapiens
taagtgcctgtatct

SEQ ID NO: 48170 - DNA, 15 bp, Homo sapiens
ttaagtgcctgtatc

SEQ ID NO: 48171 - DNA, 15 bp, Homo sapiens
cttaagtgcctgtat

SEQ ID NO: 48172 - DNA, 15 bp, Homo sapiens
ccttaagtgcctgta

SEQ ID NO: 48173 - DNA, 15 bp, Homo sapiens
tccttaagtgcctgt

SEQ ID NO: 48174 - DNA, 15 bp, Homo sapiens
ctccttaagtgcctg

SEQ ID NO: 48175 - DNA, 15 bp, Homo sapiens
tctccttaagtgcct

SEQ ID NO: 48176 - DNA, 15 bp, Homo sapiens
ctctccttaagtgcc

SEQ ID NO: 48177 - DNA, 15 bp, Homo sapiens
cctctccttaagtgc

SEQ ID NO: 48178 - DNA, 15 bp, Homo sapiens
tcctctccttaagtg

SEQ ID NO: 48179 - DNA, 15 bp, Homo sapiens
atcctctccttaagt

SEQ ID NO: 48180 - DNA, 15 bp, Homo sapiens
gatcctctccttaag

SEQ ID NO: 48181 - DNA, 15 bp, Homo sapiens
agatcctctccttaa

SEQ ID NO: 48182 - DNA, 15 bp, Homo sapiens
tagatcctctcctta

SEQ ID NO: 48183 - DNA, 15 bp, Homo sapiens
ttagatcctctcctt

SEQ ID NO: 48184 - DNA, 15 bp, Homo sapiens
tttagatcctctcct

SEQ ID NO: 48185 - DNA, 15 bp, Homo sapiens
gtttagatcctctcc

SEQ ID NO: 48186 - DNA, 15 bp, Homo sapiens
ggtttagatcctctc

SEQ ID NO: 48187 - DNA, 15 bp, Homo sapiens
gggtttagatcctct

SEQ ID NO: 48188 - DNA, 15 bp, Homo sapiens
ggggtttagatcctc

SEQ ID NO: 48189 - DNA, 15 bp, Homo sapiens
aggggtttagatcct

SEQ ID NO: 48190 - DNA, 15 bp, Homo sapiens
aaggggtttagatcc

SEQ ID NO: 48191 - DNA, 15 bp, Homo sapiens
caaggggtttagatc

SEQ ID NO: 48192 - DNA, 15 bp, Homo sapiens
ccaaggggtttagat

SEQ ID NO: 48193 - DNA, 15 bp, Homo sapiens
tccaaggggtttaga

SEQ ID NO: 48194 - DNA, 15 bp, Homo sapiens
gtccaaggggtttag

SEQ ID NO: 48195 - DNA, 15 bp, Homo sapiens
tgtccaaggggttta

SEQ ID NO: 48196 - DNA, 15 bp, Homo sapiens
gtgtccaaggggttt

SEQ ID NO: 48197 - DNA, 15 bp, Homo sapiens
tgtgtccaaggggtt

SEQ ID NO: 48198 - DNA, 15 bp, Homo sapiens
atgtgtccaaggggt

SEQ ID NO: 48199 - DNA, 15 bp, Homo sapiens
aatgtgtccaagggg

SEQ ID NO: 48200 - DNA, 15 bp, Homo sapiens
caatgtgtccaaggg

SEQ ID NO: 48201 - DNA, 15 bp, Homo sapiens
gcaatgtgtccaagg

SEQ ID NO: 48202 - DNA, 15 bp, Homo sapiens
ggcaatgtgtccaag

SEQ ID NO: 48203 - DNA, 15 bp, Homo sapiens
cggcaatgtgtccaa

SEQ ID NO: 48204 - DNA, 15 bp, Homo sapiens
acggcaatgtgtcca

SEQ ID NO: 48205 - DNA, 15 bp, Homo sapiens
aacggcaatgtgtcc

SEQ ID NO: 48206 - DNA, 15 bp, Homo sapiens
caacggcaatgtgtc

SEQ ID NO: 48207 - DNA, 15 bp, Homo sapiens
tcaacggcaatgtgt

SEQ ID NO: 48208 - DNA, 15 bp, Homo sapiens
ttcaacggcaatgtg

SEQ ID NO: 48209 - DNA, 15 bp, Homo sapiens
gttcaacggcaatgt

SEQ ID NO: 48210 - DNA, 15 bp, Homo sapiens
agttcaacggcaatg

SEQ ID NO: 48211 - DNA, 15 bp, Homo sapiens
aagttcaacggcaat

SEQ ID NO: 48212 - DNA, 15 bp, Homo sapiens
gaagttcaacggcaa

SEQ ID NO: 48213 - DNA, 15 bp, Homo sapiens
agaagttcaacggca

SEQ ID NO: 48214 - DNA, 15 bp, Homo sapiens
tagaagttcaacggc

SEQ ID NO: 48215 - DNA, 15 bp, Homo sapiens
ttagaagttcaacgg

SEQ ID NO: 48216 - DNA, 15 bp, Homo sapiens
cttagaagttcaacg

SEQ ID NO: 48217 - DNA, 15 bp, Homo sapiens
tcttagaagttcaac

SEQ ID NO: 48218 - DNA, 15 bp, Homo sapiens
atcttagaagttcaa

SEQ ID NO: 48219 - DNA, 15 bp, Homo sapiens
gatcttagaagttca

SEQ ID NO: 48220 - DNA, 15 bp, Homo sapiens
agatcttagaagttc

SEQ ID NO: 48221 - DNA, 15 bp, Homo sapiens
aagatcttagaagtt

SEQ ID NO: 48222 - DNA, 15 bp, Homo sapiens
taagatcttagaagt

SEQ ID NO: 48223 - DNA, 15 bp, Homo sapiens
ctaagatcttagaag

SEQ ID NO: 48224 - DNA, 15 bp, Homo sapiens
cctaagatcttagaa

SEQ ID NO: 48225 - DNA, 15 bp, Homo sapiens
acctaagatcttaga

SEQ ID NO: 48226 - DNA, 15 bp, Homo sapiens
aacctaagatcttag

SEQ ID NO: 48227 - DNA, 15 bp, Homo sapiens
aaacctaagatctta

SEQ ID NO: 48228 - DNA, 15 bp, Homo sapiens
gaaacctaagatctt

SEQ ID NO: 48229 - DNA, 15 bp, Homo sapiens
ggaaacctaagatct

SEQ ID NO: 48230 - DNA, 15 bp, Homo sapiens
tggaaacctaagatc

SEQ ID NO: 48231 - DNA, 15 bp, Homo sapiens
gtggaaacctaagat

SEQ ID NO: 48232 - DNA, 15 bp, Homo sapiens
agtggaaacctaaga

SEQ ID NO: 48233 - DNA, 15 bp, Homo sapiens
aagtggaaacctaag

SEQ ID NO: 48234 - DNA, 15 bp, Homo sapiens
taagtggaaacctaa

SEQ ID NO: 48235 - DNA, 15 bp, Homo sapiens
gtaagtggaaaccta

SEQ ID NO: 48236 - DNA, 15 bp, Homo sapiens
agtaagtggaaacct

SEQ ID NO: 48237 - DNA, 15 bp, Homo sapiens
gagtaagtggaaacc

SEQ ID NO: 48238 - DNA, 15 bp, Homo sapiens
tgagtaagtggaaac

SEQ ID NO: 48239 - DNA, 15 bp, Homo sapiens
atgagtaagtggaaa

SEQ ID NO: 48240 - DNA, 15 bp, Homo sapiens
catgagtaagtggaa

SEQ ID NO: 48241 - DNA, 15 bp, Homo sapiens
tcatgagtaagtgga

SEQ ID NO: 48242 - DNA, 15 bp, Homo sapiens
ttcatgagtaagtgg

SEQ ID NO: 48243 - DNA, 15 bp, Homo sapiens
tttcatgagtaagtg

SEQ ID NO: 48244 - DNA, 15 bp, Homo sapiens
ttttcatgagtaagt

SEQ ID NO: 48245 - DNA, 15 bp, Homo sapiens
attttcatgagtaag

SEQ ID NO: 48246 - DNA, 15 bp, Homo sapiens
aattttcatgagtaa

SEQ ID NO: 48247 - DNA, 15 bp, Homo sapiens
taattttcatgagta

SEQ ID NO: 48248 - DNA, 15 bp, Homo sapiens
ataattttcatgagt

SEQ ID NO: 48249 - DNA, 15 bp, Homo sapiens
tataattttcatgag

SEQ ID NO: 48250 - DNA, 15 bp, Homo sapiens
gtataattttcatga

SEQ ID NO: 48251 - DNA, 15 bp, Homo sapiens
ggtataattttcatg

SEQ ID NO: 48252 - DNA, 15 bp, Homo sapiens
tggtataattttcat

SEQ ID NO: 48253 - DNA, 15 bp, Homo sapiens
gtggtataattttca

SEQ ID NO: 48254 - DNA, 15 bp, Homo sapiens
tgtggtataattttc

SEQ ID NO: 48255 - DNA, 15 bp, Homo sapiens
ctgtggtataatttt

SEQ ID NO: 48256 - DNA, 15 bp, Homo sapiens
cctgtggtataattt

SEQ ID NO: 48257 - DNA, 15 bp, Homo sapiens
ccctgtggtataatt

SEQ ID NO: 48258 - DNA, 15 bp, Homo sapiens
accctgtggtataat

SEQ ID NO: 48259 - DNA, 15 bp, Homo sapiens
gaccctgtggtataa

SEQ ID NO: 48260 - DNA, 15 bp, Homo sapiens
tgaccctgtggtata

SEQ ID NO: 48261 - DNA, 15 bp, Homo sapiens
ctgaccctgtggtat

SEQ ID NO: 48262 - DNA, 15 bp, Homo sapiens
tctgaccctgtggta

SEQ ID NO: 48263 - DNA, 15 bp, Homo sapiens
ctctgaccctgtggt

SEQ ID NO: 48264 - DNA, 15 bp, Homo sapiens
cctctgaccctgtgg

SEQ ID NO: 48265 - DNA, 15 bp, Homo sapiens
ccctctgaccctgtg

SEQ ID NO: 48266 - DNA, 15 bp, Homo sapiens
accctctgaccctgt

SEQ ID NO: 48267 - DNA, 15 bp, Homo sapiens
taccctctgaccctg

SEQ ID NO: 48268 - DNA, 15 bp, Homo sapiens
ctaccctctgaccct

SEQ ID NO: 48269 - DNA, 15 bp, Homo sapiens
actaccctctgaccc

SEQ ID NO: 48270 - DNA, 15 bp, Homo sapiens
cactaccctctgacc

SEQ ID NO: 48271 - DNA, 15 bp, Homo sapiens
acactaccctctgac

SEQ ID NO: 48272 - DNA, 15 bp, Homo sapiens
aacactaccctctga

SEQ ID NO: 48273 - DNA, 15 bp, Homo sapiens
gaacactaccctctg

SEQ ID NO: 48274 - DNA, 15 bp, Homo sapiens
tgaacactaccctct

SEQ ID NO: 48275 - DNA, 15 bp, Homo sapiens
atgaacactaccctc

SEQ ID NO: 48276 - DNA, 15 bp, Homo sapiens
aatgaacactaccct

SEQ ID NO: 48277 - DNA, 15 bp, Homo sapiens
caatgaacactaccc

SEQ ID NO: 48278 - DNA, 15 bp, Homo sapiens
ccaatgaacactacc

SEQ ID NO: 48279 - DNA, 15 bp, Homo sapiens
tccaatgaacactac

SEQ ID NO: 48280 - DNA, 15 bp, Homo sapiens
ctccaatgaacacta

SEQ ID NO: 48281 - DNA, 15 bp, Homo sapiens
gctccaatgaacact

SEQ ID NO: 48282 - DNA, 15 bp, Homo sapiens
ggctccaatgaacac

SEQ ID NO: 48283 - DNA, 15 bp, Homo sapiens
tggctccaatgaaca

SEQ ID NO: 48284 - DNA, 15 bp, Homo sapiens
ctggctccaatgaac

SEQ ID NO: 48285 - DNA, 15 bp, Homo sapiens
cctggctccaatgaa

SEQ ID NO: 48286 - DNA, 15 bp, Homo sapiens
acctggctccaatga

SEQ ID NO: 48287 - DNA, 15 bp, Homo sapiens
cacctggctccaatg

SEQ ID NO: 48288 - DNA, 15 bp, Homo sapiens
gcacctggctccaat

SEQ ID NO: 48289 - DNA, 15 bp, Homo sapiens
ggcacctggctccaa

SEQ ID NO: 48290 - DNA, 15 bp, Homo sapiens
tggcacctggctcca

SEQ ID NO: 48291 - DNA, 15 bp, Homo sapiens
ctggcacctggctcc

SEQ ID NO: 48292 - DNA, 15 bp, Homo sapiens
tctggcacctggctc

SEQ ID NO: 48293 - DNA, 15 bp, Homo sapiens
ttctggcacctggct

SEQ ID NO: 48294 - DNA, 15 bp, Homo sapiens
gttctggcacctggc

SEQ ID NO: 48295 - DNA, 15 bp, Homo sapiens
tgttctggcacctgg

SEQ ID NO: 48296 - DNA, 15 bp, Homo sapiens
ttgttctggcacctg

SEQ ID NO: 48297 - DNA, 15 bp, Homo sapiens
cttgttctggcacct

SEQ ID NO: 48298 - DNA, 15 bp, Homo sapiens
acttgttctggcacc

SEQ ID NO: 48299 - DNA, 15 bp, Homo sapiens
aacttgttctggcac

SEQ ID NO: 48300 - DNA, 15 bp, Homo sapiens
taacttgttctggca

SEQ ID NO: 48301 - DNA, 15 bp, Homo sapiens
ataacttgttctggc

SEQ ID NO: 48302 - DNA, 15 bp, Homo sapiens
aataacttgttctgg

SEQ ID NO: 48303 - DNA, 15 bp, Homo sapiens
taataacttgttctg

SEQ ID NO: 48304 - DNA, 15 bp, Homo sapiens
gtaataacttgttct

SEQ ID NO: 48305 - DNA, 15 bp, Homo sapiens
tgtaataacttgttc

SEQ ID NO: 48306 - DNA, 15 bp, Homo sapiens
ttgtaataacttgtt

SEQ ID NO: 48307 - DNA, 15 bp, Homo sapiens
tttgtaataacttgt

SEQ ID NO: 48308 - DNA, 15 bp, Homo sapiens
gtttgtaataacttg

SEQ ID NO: 48309 - DNA, 15 bp, Homo sapiens
agtttgtaataactt

SEQ ID NO: 48310 - DNA, 15 bp, Homo sapiens
tagtttgtaataact

SEQ ID NO: 48311 - DNA, 15 bp, Homo sapiens
gtagtttgtaataac

SEQ ID NO: 48312 - DNA, 15 bp, Homo sapiens
agtagtttgtaataa

SEQ ID NO: 48313 - DNA, 15 bp, Homo sapiens
tagtagtttgtaata

SEQ ID NO: 48314 - DNA, 15 bp, Homo sapiens
atagtagtttgtaat

SEQ ID NO: 48315 - DNA, 15 bp, Homo sapiens
aatagtagtttgtaa

SEQ ID NO: 48316 - DNA, 15 bp, Homo sapiens
aaatagtagtttgta

SEQ ID NO: 48317 - DNA, 15 bp, Homo sapiens
aaaatagtagtttgt

SEQ ID NO: 48318 - DNA, 15 bp, Homo sapiens
taaaatagtagtttg

SEQ ID NO: 48319 - DNA, 15 bp, Homo sapiens
ctaaaatagtagttt

SEQ ID NO: 48320 - DNA, 15 bp, Homo sapiens
tctaaaatagtagtt

SEQ ID NO: 48321 - DNA, 15 bp, Homo sapiens
ctctaaaatagtagt

SEQ ID NO: 48322 - DNA, 15 bp, Homo sapiens
tctctaaaatagtag

SEQ ID NO: 48323 - DNA, 15 bp, Homo sapiens
ttctctaaaatagta

SEQ ID NO: 48324 - DNA, 15 bp, Homo sapiens
tttctctaaaatagt

SEQ ID NO: 48325 - DNA, 15 bp, Homo sapiens
ttttctctaaaatag

SEQ ID NO: 48326 - DNA, 15 bp, Homo sapiens
tttttctctaaaata

SEQ ID NO: 48327 - DNA, 15 bp, Homo sapiens
atttttctctaaaat

SEQ ID NO: 48328 - DNA, 15 bp, Homo sapiens
catttttctctaaaa

SEQ ID NO: 48329 - DNA, 15 bp, Homo sapiens
acatttttctctaaa

SEQ ID NO: 48330 - DNA, 15 bp, Homo sapiens
gacatttttctctaa

SEQ ID NO: 48331 - DNA, 15 bp, Homo sapiens
tgacatttttctcta

SEQ ID NO: 48332 - DNA, 15 bp, Homo sapiens
atgacatttttctct

SEQ ID NO: 48333 - DNA, 15 bp, Homo sapiens
aatgacatttttctc

SEQ ID NO: 48334 - DNA, 15 bp, Homo sapiens
taatgacatttttct

SEQ ID NO: 48335 - DNA, 15 bp, Homo sapiens
ttaatgacatttttc

SEQ ID NO: 48336 - DNA, 15 bp, Homo sapiens
tttaatgacattttt

SEQ ID NO: 48337 - DNA, 15 bp, Homo sapiens
ctttaatgacatttt

SEQ ID NO: 48338 - DNA, 15 bp, Homo sapiens
actttaatgacattt

SEQ ID NO: 48339 - DNA, 15 bp, Homo sapiens
aactttaatgacatt

SEQ ID NO: 48340 - DNA, 15 bp, Homo sapiens
aaactttaatgacat

SEQ ID NO: 48341 - DNA, 15 bp, Homo sapiens
taaactttaatgaca

SEQ ID NO: 48342 - DNA, 15 bp, Homo sapiens
ttaaactttaatgac

SEQ ID NO: 48343 - DNA, 15 bp, Homo sapiens
cttaaactttaatga

SEQ ID NO: 48344 - DNA, 15 bp, Homo sapiens
tcttaaactttaatg

SEQ ID NO: 48345 - DNA, 15 bp, Homo sapiens
atcttaaactttaat

SEQ ID NO: 48346 - DNA, 15 bp, Homo sapiens
tatcttaaactttaa

SEQ ID NO: 48347 - DNA, 15 bp, Homo sapiens
gtatcttaaacttta

SEQ ID NO: 48348 - DNA, 15 bp, Homo sapiens
ggtatcttaaacttt

SEQ ID NO: 48349 - DNA, 15 bp, Homo sapiens
aggtatcttaaactt

SEQ ID NO: 48350 - DNA, 15 bp, Homo sapiens
aaggtatcttaaact

SEQ ID NO: 48351 - DNA, 15 bp, Homo sapiens
taaggtatcttaaac

SEQ ID NO: 48352 - DNA, 15 bp, Homo sapiens
ttaaggtatcttaaa

SEQ ID NO: 48353 - DNA, 15 bp, Homo sapiens
cttaaggtatcttaa

SEQ ID NO: 48354 - DNA, 15 bp, Homo sapiens
gcttaaggtatctta

SEQ ID NO: 48355 - DNA, 15 bp, Homo sapiens
agcttaaggtatctt

SEQ ID NO: 48356 - DNA, 15 bp, Homo sapiens
tagcttaaggtatct

SEQ ID NO: 48357 - DNA, 15 bp, Homo sapiens
atagcttaaggtatc

SEQ ID NO: 48358 - DNA, 15 bp, Homo sapiens
tatagcttaaggtat

SEQ ID NO: 48359 - DNA, 15 bp, Homo sapiens
ctatagcttaaggta

SEQ ID NO: 48360 - DNA, 15 bp, Homo sapiens
cctatagcttaaggt

SEQ ID NO: 48361 - DNA, 15 bp, Homo sapiens
acctatagcttaagg

SEQ ID NO: 48362 - DNA, 15 bp, Homo sapiens
aacctatagcttaag

SEQ ID NO: 48363 - DNA, 15 bp, Homo sapiens
aaacctatagcttaa

SEQ ID NO: 48364 - DNA, 15 bp, Homo sapiens
caaacctatagctta

SEQ ID NO: 48365 - DNA, 15 bp, Homo sapiens
gcaaacctatagctt

SEQ ID NO: 48366 - DNA, 15 bp, Homo sapiens
tgcaaacctatagct

SEQ ID NO: 48367 - DNA, 15 bp, Homo sapiens
atgcaaacctatagc

SEQ ID NO: 48368 - DNA, 15 bp, Homo sapiens
gatgcaaacctatag

SEQ ID NO: 48369 - DNA, 15 bp, Homo sapiens
tgatgcaaacctata

SEQ ID NO: 48370 - DNA, 15 bp, Homo sapiens
ttgatgcaaacctat

SEQ ID NO: 48371 - DNA, 15 bp, Homo sapiens
tttgatgcaaaccta

SEQ ID NO: 48372 - DNA, 15 bp, Homo sapiens
ctttgatgcaaacct

SEQ ID NO: 48373 - DNA, 15 bp, Homo sapiens
actttgatgcaaacc

SEQ ID NO: 48374 - DNA, 15 bp, Homo sapiens
aactttgatgcaaac

SEQ ID NO: 48375 - DNA, 15 bp, Homo sapiens
taactttgatgcaaa

SEQ ID NO: 48376 - DNA, 15 bp, Homo sapiens
ttaactttgatgcaa

SEQ ID NO: 48377 - DNA, 15 bp, Homo sapiens
attaactttgatgca

SEQ ID NO: 48378 - DNA, 15 bp, Homo sapiens
cattaactttgatgc

SEQ ID NO: 48379 - DNA, 15 bp, Homo sapiens
tcattaactttgatg

SEQ ID NO: 48380 - DNA, 15 bp, Homo sapiens
ttcattaactttgat

SEQ ID NO: 48381 - DNA, 15 bp, Homo sapiens
tttcattaactttga

SEQ ID NO: 48382 - DNA, 15 bp, Homo sapiens
ctttcattaactttg

SEQ ID NO: 48383 - DNA, 15 bp, Homo sapiens
cctttcattaacttt

SEQ ID NO: 48384 - DNA, 15 bp, Homo sapiens
acctttcattaactt

SEQ ID NO: 48385 - DNA, 15 bp, Homo sapiens
tacctttcattaact

SEQ ID NO: 48386 - DNA, 15 bp, Homo sapiens
ttacctttcattaac

SEQ ID NO: 48387 - DNA, 15 bp, Homo sapiens
tttacctttcattaa

SEQ ID NO: 48388 - DNA, 15 bp, Homo sapiens
ttttacctttcatta

SEQ ID NO: 48389 - DNA, 15 bp, Homo sapiens
tttttacctttcatt

SEQ ID NO: 48390 - DNA, 15 bp, Homo sapiens
ctttttacctttcat

SEQ ID NO: 48391 - DNA, 15 bp, Homo sapiens
tctttttacctttca

SEQ ID NO: 48392 - DNA, 15 bp, Homo sapiens
atctttttacctttc

SEQ ID NO: 48393 - DNA, 15 bp, Homo sapiens
catctttttaccttt

SEQ ID NO: 48394 - DNA, 15 bp, Homo sapiens
gcatctttttacctt

SEQ ID NO: 48395 - DNA, 15 bp, Homo sapiens
ggcatctttttacct

SEQ ID NO: 48396 - DNA, 15 bp, Homo sapiens
tggcatctttttacc

SEQ ID NO: 48397 - DNA, 15 bp, Homo sapiens
ttggcatctttttac

SEQ ID NO: 48398 - DNA, 15 bp, Homo sapiens
cttggcatcttttta

SEQ ID NO: 48399 - DNA, 15 bp, Homo sapiens
gcttggcatcttttt

SEQ ID NO: 48400 - DNA, 15 bp, Homo sapiens
cgcttggcatctttt

SEQ ID NO: 48401 - DNA, 15 bp, Homo sapiens
acgcttggcatcttt

SEQ ID NO: 48402 - DNA, 15 bp, Homo sapiens
cacgcttggcatctt

SEQ ID NO: 48403 - DNA, 15 bp, Homo sapiens
ccacgcttggcatct

SEQ ID NO: 48404 - DNA, 15 bp, Homo sapiens
accacgcttggcatc

SEQ ID NO: 48405 - DNA, 15 bp, Homo sapiens
caccacgcttggcat

SEQ ID NO: 48406 - DNA, 15 bp, Homo sapiens
ccaccacgcttggca

SEQ ID NO: 48407 - DNA, 15 bp, Homo sapiens
gccaccacgcttggc

SEQ ID NO: 48408 - DNA, 15 bp, Homo sapiens
agccaccacgcttgg

SEQ ID NO: 48409 - DNA, 15 bp, Homo sapiens
gagccaccacgcttg

SEQ ID NO: 48410 - DNA, 15 bp, Homo sapiens
tgagccaccacgctt

SEQ ID NO: 48411 - DNA, 15 bp, Homo sapiens
ctgagccaccacgct

SEQ ID NO: 48412 - DNA, 15 bp, Homo sapiens
cctgagccaccacgc

SEQ ID NO: 48413 - DNA, 15 bp, Homo sapiens
gcctgagccaccacg

SEQ ID NO: 48414 - DNA, 15 bp, Homo sapiens
ggcctgagccaccac

SEQ ID NO: 48415 - DNA, 15 bp, Homo sapiens
aggcctgagccacca

SEQ ID NO: 48416 - DNA, 15 bp, Homo sapiens
caggcctgagccacc

SEQ ID NO: 48417 - DNA, 15 bp, Homo sapiens
acaggcctgagccac

SEQ ID NO: 48418 - DNA, 15 bp, Homo sapiens
tacaggcctgagcca

SEQ ID NO: 48419 - DNA, 15 bp, Homo sapiens
ttacaggcctgagcc

SEQ ID NO: 48420 - DNA, 15 bp, Homo sapiens
attacaggcctgagc

SEQ ID NO: 48421 - DNA, 15 bp, Homo sapiens
gattacaggcctgag

SEQ ID NO: 48422 - DNA, 15 bp, Homo sapiens
ggattacaggcctga

SEQ ID NO: 48423 - DNA, 15 bp, Homo sapiens
gggattacaggcctg

SEQ ID NO: 48424 - DNA, 15 bp, Homo sapiens
tgggattacaggcct

SEQ ID NO: 48425 - DNA, 15 bp, Homo sapiens
ctgggattacaggcc

SEQ ID NO: 48426 - DNA, 15 bp, Homo sapiens
cgctgggattacagg

SEQ ID NO: 48427 - DNA, 15 bp, Homo sapiens
gcgctgggattacag

SEQ ID NO: 48428 - DNA, 15 bp, Homo sapiens
agcgctgggattaca

SEQ ID NO: 48429 - DNA, 15 bp, Homo sapiens
aagcgctgggattac

SEQ ID NO: 48430 - DNA, 15 bp, Homo sapiens
aaagcgctgggatta

SEQ ID NO: 48431 - DNA, 15 bp, Homo sapiens
caaagcgctgggatt

SEQ ID NO: 48432 - DNA, 15 bp, Homo sapiens
ccaaagcgctgggat

SEQ ID NO: 48433 - DNA, 15 bp, Homo sapiens
cccaaagcgctggga

SEQ ID NO: 48434 - DNA, 15 bp, Homo sapiens
ccccaaagcgctggg

SEQ ID NO: 48435 - DNA, 15 bp, Homo sapiens
cccccaaagcgctgg

SEQ ID NO: 48436 - DNA, 15 bp, Homo sapiens
ccccccaaagcgctg

SEQ ID NO: 48437 - DNA, 15 bp, Homo sapiens
gccccccaaagcgct

SEQ ID NO: 48438 - DNA, 15 bp, Homo sapiens
ggccccccaaagcgc

SEQ ID NO: 48439 - DNA, 15 bp, Homo sapiens
tggccccccaaagcg

SEQ ID NO: 48440 - DNA, 15 bp, Homo sapiens
ttggccccccaaagc

SEQ ID NO: 48441 - DNA, 15 bp, Homo sapiens
cttggccccccaaag

SEQ ID NO: 48442 - DNA, 15 bp, Homo sapiens
ccttggccccccaaa

SEQ ID NO: 48443 - DNA, 15 bp, Homo sapiens
gccttggccccccaa

SEQ ID NO: 48444 - DNA, 15 bp, Homo sapiens
cgccttggcccccca

SEQ ID NO: 48445 - DNA, 15 bp, Homo sapiens
ccgccttggcccccc

SEQ ID NO: 48446 - DNA, 15 bp, Homo sapiens
cccgccttggccccc

SEQ ID NO: 48447 - DNA, 15 bp, Homo sapiens
gcccgccttggcccc

SEQ ID NO: 48448 - DNA, 15 bp, Homo sapiens
tgcccgccttggccc

SEQ ID NO: 48449 - DNA, 15 bp, Homo sapiens
ctgcccgccttggcc

SEQ ID NO: 48450 - DNA, 15 bp, Homo sapiens
tctgcccgccttggc

SEQ ID NO: 48451 - DNA, 15 bp, Homo sapiens
atctgcccgccttgg

SEQ ID NO: 48452 - DNA, 15 bp, Homo sapiens
gatctgcccgccttg

SEQ ID NO: 48453 - DNA, 15 bp, Homo sapiens
tgatctgcccgcctt

SEQ ID NO: 48454 - DNA, 15 bp, Homo sapiens
ggtttcaccgtgtta

SEQ ID NO: 48455 - DNA, 15 bp, Homo sapiens
gggtttcaccgtgtt

SEQ ID NO: 48456 - DNA, 15 bp, Homo sapiens
ggggtttcaccgtgt

SEQ ID NO: 48457 - DNA, 15 bp, Homo sapiens
tggggtttcaccgtg

SEQ ID NO: 48458 - DNA, 15 bp, Homo sapiens
atggggtttcaccgt

SEQ ID NO: 48459 - DNA, 15 bp, Homo sapiens
gatggggtttcaccg

SEQ ID NO: 48460 - DNA, 15 bp, Homo sapiens
ctagagatggggttt

SEQ ID NO: 48461 - DNA, 15 bp, Homo sapiens
actagagatggggtt

SEQ ID NO: 48462 - DNA, 15 bp, Homo sapiens
tactagagatggggt

SEQ ID NO: 48463 - DNA, 15 bp, Homo sapiens
ttactagagatgggg

SEQ ID NO: 48464 - DNA, 15 bp, Homo sapiens
tttactagagatggg

SEQ ID NO: 48465 - DNA, 15 bp, Homo sapiens
ttttactagagatgg

SEQ ID NO: 48466 - DNA, 15 bp, Homo sapiens
tttttactagagatg

SEQ ID NO: 48467 - DNA, 15 bp, Homo sapiens
atttttactagagat

SEQ ID NO: 48468 - DNA, 15 bp, Homo sapiens
tatttttactagaga

SEQ ID NO: 48469 - DNA, 15 bp, Homo sapiens
gtatttttactagag

SEQ ID NO: 48470 - DNA, 15 bp, Homo sapiens
tgtatttttactaga

SEQ ID NO: 48471 - DNA, 15 bp, Homo sapiens
ttgtatttttactag

SEQ ID NO: 48472 - DNA, 15 bp, Homo sapiens
tttgtatttttacta

SEQ ID NO: 48473 - DNA, 15 bp, Homo sapiens
ttttgtatttttact

SEQ ID NO: 48474 - DNA, 15 bp, Homo sapiens
tttttgtatttttac

SEQ ID NO: 48475 - DNA, 15 bp, Homo sapiens
ccaccatgcccggct

SEQ ID NO: 48476 - DNA, 15 bp, Homo sapiens
cgccaccatgcccgg

SEQ ID NO: 48477 - DNA, 15 bp, Homo sapiens
ccgccaccatgcccg

SEQ ID NO: 48478 - DNA, 15 bp, Homo sapiens
tgcccgccaccatgc

SEQ ID NO: 48479 - DNA, 15 bp, Homo sapiens
atgcccgccaccatg

SEQ ID NO: 48480 - DNA, 15 bp, Homo sapiens
gatgcccgccaccat

SEQ ID NO: 48481 - DNA, 15 bp, Homo sapiens
agatgcccgccacca

SEQ ID NO: 48482 - DNA, 15 bp, Homo sapiens
cagatgcccgccacc

SEQ ID NO: 48483 - DNA, 15 bp, Homo sapiens
acagatgcccgccac

SEQ ID NO: 48484 - DNA, 15 bp, Homo sapiens
tacagatgcccgcca

SEQ ID NO: 48485 - DNA, 15 bp, Homo sapiens
ctacagatgcccgcc

SEQ ID NO: 48486 - DNA, 15 bp, Homo sapiens
actacagatgcccgc

SEQ ID NO: 48487 - DNA, 15 bp, Homo sapiens
gactacagatgcccg

SEQ ID NO: 48488 - DNA, 15 bp, Homo sapiens
ggactacagatgccc

SEQ ID NO: 48489 - DNA, 15 bp, Homo sapiens
gggactacagatgcc

SEQ ID NO: 48490 - DNA, 15 bp, Homo sapiens
tgccattctcctgcc

SEQ ID NO: 48491 - DNA, 15 bp, Homo sapiens
atgccattctcctgc

SEQ ID NO: 48492 - DNA, 15 bp, Homo sapiens
catgccattctcctg

SEQ ID NO: 48493 - DNA, 15 bp, Homo sapiens
tcatgccattctcct

SEQ ID NO: 48494 - DNA, 15 bp, Homo sapiens
ttcatgccattctcc

SEQ ID NO: 48495 - DNA, 15 bp, Homo sapiens
gttcatgccattctc

SEQ ID NO: 48496 - DNA, 15 bp, Homo sapiens
ggttcatgccattct

SEQ ID NO: 48497 - DNA, 15 bp, Homo sapiens
gggttcatgccattc

SEQ ID NO: 48498 - DNA, 15 bp, Homo sapiens
tgggttcatgccatt

SEQ ID NO: 48499 - DNA, 15 bp, Homo sapiens
ctgggttcatgccat

SEQ ID NO: 48500 - DNA, 15 bp, Homo sapiens
cctgggttcatgcca

SEQ ID NO: 48501 - DNA, 15 bp, Homo sapiens
tcctgggttcatgcc

SEQ ID NO: 48502 - DNA, 15 bp, Homo sapiens
ctcctgggttcatgc

SEQ ID NO: 48503 - DNA, 15 bp, Homo sapiens
cctcctgggttcatg

SEQ ID NO: 48504 - DNA, 15 bp, Homo sapiens
gcctcctgggttcat

SEQ ID NO: 48505 - DNA, 15 bp, Homo sapiens
ggcaagctctgcctc

SEQ ID NO: 48506 - DNA, 15 bp, Homo sapiens
cggcaagctctgcct

SEQ ID NO: 48507 - DNA, 15 bp, Homo sapiens
acggcaagctctgcc

SEQ ID NO: 48508 - DNA, 15 bp, Homo sapiens
cacggcaagctctgc

SEQ ID NO: 48509 - DNA, 15 bp, Homo sapiens
tcacggcaagctctg

SEQ ID NO: 48510 - DNA, 15 bp, Homo sapiens
ctcacggcaagctct

SEQ ID NO: 48511 - DNA, 15 bp, Homo sapiens
gctcacggcaagctc

SEQ ID NO: 48512 - DNA, 15 bp, Homo sapiens
agctcacggcaagct

SEQ ID NO: 48513 - DNA, 15 bp, Homo sapiens
cagctcacggcaagc

SEQ ID NO: 48514 - DNA, 15 bp, Homo sapiens
tcagctcacggcaag

SEQ ID NO: 48515 - DNA, 15 bp, Homo sapiens
ctcagctcacggcaa

SEQ ID NO: 48516 - DNA, 15 bp, Homo sapiens
tctcagctcacggca

SEQ ID NO: 48517 - DNA, 15 bp, Homo sapiens
atctcagctcacggc

SEQ ID NO: 48518 - DNA, 15 bp, Homo sapiens
gatctcagctcacgg

SEQ ID NO: 48519 - DNA, 15 bp, Homo sapiens
ggatctcagctcacg

SEQ ID NO: 48520 - DNA, 15 bp, Homo sapiens
tggatctcagctcac

SEQ ID NO: 48521 - DNA, 15 bp, Homo sapiens
ctggatctcagctca

SEQ ID NO: 48522 - DNA, 15 bp, Homo sapiens
gctggatctcagctc

SEQ ID NO: 48523 - DNA, 15 bp, Homo sapiens
ggctggatctcagct

SEQ ID NO: 48524 - DNA, 15 bp, Homo sapiens
tggctggatctcagc

SEQ ID NO: 48525 - DNA, 15 bp, Homo sapiens
gtggctggatctcag

SEQ ID NO: 48526 - DNA, 15 bp, Homo sapiens
agtggctggatctca

SEQ ID NO: 48527 - DNA, 15 bp, Homo sapiens
cagtggctggatctc

SEQ ID NO: 48528 - DNA, 15 bp, Homo sapiens
gcagtggctggatct

SEQ ID NO: 48529 - DNA, 15 bp, Homo sapiens
tgcagtggctggatc

SEQ ID NO: 48530 - DNA, 15 bp, Homo sapiens
gtgcagtggctggat

SEQ ID NO: 48531 - DNA, 15 bp, Homo sapiens
agtgcagtggctgga

SEQ ID NO: 48532 - DNA, 15 bp, Homo sapiens
gagtgcagtggctgg

SEQ ID NO: 48533 - DNA, 15 bp, Homo sapiens
ggagtgcagtggctg

SEQ ID NO: 48534 - DNA, 15 bp, Homo sapiens
tggagtgcagtggct

SEQ ID NO: 48535 - DNA, 15 bp, Homo sapiens
agccaggctggagtg

SEQ ID NO: 48536 - DNA, 15 bp, Homo sapiens
cagccaggctggagt

SEQ ID NO: 48537 - DNA, 15 bp, Homo sapiens
tcagccaggctggag

SEQ ID NO: 48538 - DNA, 15 bp, Homo sapiens
gtcagccaggctgga

SEQ ID NO: 48539 - DNA, 15 bp, Homo sapiens
tgtcagccaggctgg

SEQ ID NO: 48540 - DNA, 15 bp, Homo sapiens
ctgtcagccaggctg

SEQ ID NO: 48541 - DNA, 15 bp, Homo sapiens
tctgtcagccaggct

SEQ ID NO: 48542 - DNA, 15 bp, Homo sapiens
ctctgtcagccaggc

SEQ ID NO: 48543 - DNA, 15 bp, Homo sapiens
gctctgtcagccagg

SEQ ID NO: 48544 - DNA, 15 bp, Homo sapiens
tgctctgtcagccag

SEQ ID NO: 48545 - DNA, 15 bp, Homo sapiens
ttgctctgtcagcca

SEQ ID NO: 48546 - DNA, 15 bp, Homo sapiens
cttgctctgtcagcc

SEQ ID NO: 48547 - DNA, 15 bp, Homo sapiens
tcttgctctgtcagc

SEQ ID NO: 48548 - DNA, 15 bp, Homo sapiens
gtcttgctctgtcag

SEQ ID NO: 48549 - DNA, 15 bp, Homo sapiens
cagtcttgctctgtc

SEQ ID NO: 48550 - DNA, 15 bp, Homo sapiens
gcagtcttgctctgt

SEQ ID NO: 48551 - DNA, 15 bp, Homo sapiens
tgcagtcttgctctg

SEQ ID NO: 48552 - DNA, 15 bp, Homo sapiens
atgcagtcttgctct

SEQ ID NO: 48553 - DNA, 15 bp, Homo sapiens
gatgcagtcttgctc

SEQ ID NO: 48554 - DNA, 15 bp, Homo sapiens
agatgcagtcttgct

SEQ ID NO: 48555 - DNA, 15 bp, Homo sapiens
gagatgcagtcttgc

SEQ ID NO: 48556 - DNA, 15 bp, Homo sapiens
tgagatgcagtcttg

SEQ ID NO: 48557 - DNA, 15 bp, Homo sapiens
ttgagatgcagtctt

SEQ ID NO: 48558 - DNA, 15 bp, Homo sapiens
ttttttttgagatgc

SEQ ID NO: 48559 - DNA, 15 bp, Homo sapiens
cattttttttttttt

SEQ ID NO: 48560 - DNA, 15 bp, Homo sapiens
gcatttttttttttt

SEQ ID NO: 48561 - DNA, 15 bp, Homo sapiens
tgcattttttttttt

SEQ ID NO: 48562 - DNA, 15 bp, Homo sapiens
ttgcatttttttttt

SEQ ID NO: 48563 - DNA, 15 bp, Homo sapiens
tttgcattttttttt

SEQ ID NO: 48564 - DNA, 15 bp, Homo sapiens
atttgcatttttttt

SEQ ID NO: 48565 - DNA, 15 bp, Homo sapiens
gatttgcattttttt

SEQ ID NO: 48566 - DNA, 15 bp, Homo sapiens
tgatttgcatttttt

SEQ ID NO: 48567 - DNA, 15 bp, Homo sapiens
ttgatttgcattttt

SEQ ID NO: 48568 - DNA, 15 bp, Homo sapiens
tttgatttgcatttt

SEQ ID NO: 48569 - DNA, 15 bp, Homo sapiens
atttgatttgcattt

SEQ ID NO: 48570 - DNA, 15 bp, Homo sapiens
gatttgatttgcatt

SEQ ID NO: 48571 - DNA, 15 bp, Homo sapiens
agatttgatttgcat

SEQ ID NO: 48572 - DNA, 15 bp, Homo sapiens
tagatttgatttgca

SEQ ID NO: 48573 - DNA, 15 bp, Homo sapiens
ttagatttgatttgc

SEQ ID NO: 48574 - DNA, 15 bp, Homo sapiens
tttagatttgatttg

SEQ ID NO: 48575 - DNA, 15 bp, Homo sapiens
ctttagatttgattt

SEQ ID NO: 48576 - DNA, 15 bp, Homo sapiens
actttagatttgatt

SEQ ID NO: 48577 - DNA, 15 bp, Homo sapiens
tactttagatttgat

SEQ ID NO: 48578 - DNA, 15 bp, Homo sapiens
ctactttagatttga

SEQ ID NO: 48579 - DNA, 15 bp, Homo sapiens
actactttagatttg

SEQ ID NO: 48580 - DNA, 15 bp, Homo sapiens
aactactttagattt

SEQ ID NO: 48581 - DNA, 15 bp, Homo sapiens
gaactactttagatt

SEQ ID NO: 48582 - DNA, 15 bp, Homo sapiens
tgaactactttagat

SEQ ID NO: 48583 - DNA, 15 bp, Homo sapiens
ctgaactactttaga

SEQ ID NO: 48584 - DNA, 15 bp, Homo sapiens
actgaactactttag

SEQ ID NO: 48585 - DNA, 15 bp, Homo sapiens
gactgaactacttta

SEQ ID NO: 48586 - DNA, 15 bp, Homo sapiens
agactgaactacttt

SEQ ID NO: 48587 - DNA, 15 bp, Homo sapiens
aagactgaactactt

SEQ ID NO: 48588 - DNA, 15 bp, Homo sapiens
aaagactgaactact

SEQ ID NO: 48589 - DNA, 15 bp, Homo sapiens
taaagactgaactac

SEQ ID NO: 48590 - DNA, 15 bp, Homo sapiens
ttaaagactgaacta

SEQ ID NO: 48591 - DNA, 15 bp, Homo sapiens
tttaaagactgaact

SEQ ID NO: 48592 - DNA, 15 bp, Homo sapiens
gtttaaagactgaac

SEQ ID NO: 48593 - DNA, 15 bp, Homo sapiens
agtttaaagactgaa

SEQ ID NO: 48594 - DNA, 15 bp, Homo sapiens
gagtttaaagactga

SEQ ID NO: 48595 - DNA, 15 bp, Homo sapiens
tgagtttaaagactg

SEQ ID NO: 48596 - DNA, 15 bp, Homo sapiens
ttgagtttaaagact

SEQ ID NO: 48597 - DNA, 15 bp, Homo sapiens
tttgagtttaaagac

SEQ ID NO: 48598 - DNA, 15 bp, Homo sapiens
ctttgagtttaaaga

SEQ ID NO: 48599 - DNA, 15 bp, Homo sapiens
gctttgagtttaaag

SEQ ID NO: 48600 - DNA, 15 bp, Homo sapiens
ggctttgagtttaaa

SEQ ID NO: 48601 - DNA, 15 bp, Homo sapiens
tggctttgagtttaa

SEQ ID NO: 48602 - DNA, 15 bp, Homo sapiens
ttggctttgagttta

SEQ ID NO: 48603 - DNA, 15 bp, Homo sapiens
attggctttgagttt

SEQ ID NO: 48604 - DNA, 15 bp, Homo sapiens
tattggctttgagtt

SEQ ID NO: 48605 - DNA, 15 bp, Homo sapiens
gtattggctttgagt

SEQ ID NO: 48606 - DNA, 15 bp, Homo sapiens
tgtattggctttgag

SEQ ID NO: 48607 - DNA, 15 bp, Homo sapiens
atgtattggctttga

SEQ ID NO: 48608 - DNA, 15 bp, Homo sapiens
aatgtattggctttg

SEQ ID NO: 48609 - DNA, 15 bp, Homo sapiens
aaatgtattggcttt

SEQ ID NO: 48610 - DNA, 15 bp, Homo sapiens
caaatgtattggctt

SEQ ID NO: 48611 - DNA, 15 bp, Homo sapiens
gcaaatgtattggct

SEQ ID NO: 48612 - DNA, 15 bp, Homo sapiens
agcaaatgtattggc

SEQ ID NO: 48613 - DNA, 15 bp, Homo sapiens
aagcaaatgtattgg

SEQ ID NO: 48614 - DNA, 15 bp, Homo sapiens
aaagcaaatgtattg

SEQ ID NO: 48615 - DNA, 15 bp, Homo sapiens
caaagcaaatgtatt

SEQ ID NO: 48616 - DNA, 15 bp, Homo sapiens
tcaaagcaaatgtat

SEQ ID NO: 48617 - DNA, 15 bp, Homo sapiens
ttcaaagcaaatgta

SEQ ID NO: 48618 - DNA, 15 bp, Homo sapiens
gttcaaagcaaatgt

SEQ ID NO: 48619 - DNA, 15 bp, Homo sapiens
agttcaaagcaaatg

SEQ ID NO: 48620 - DNA, 15 bp, Homo sapiens
tagttcaaagcaaat

SEQ ID NO: 48621 - DNA, 15 bp, Homo sapiens
gtagttcaaagcaaa

SEQ ID NO: 48622 - DNA, 15 bp, Homo sapiens
tgtagttcaaagcaa

SEQ ID NO: 48623 - DNA, 15 bp, Homo sapiens
ttgtagttcaaagca

SEQ ID NO: 48624 - DNA, 15 bp, Homo sapiens
tttgtagttcaaagc

SEQ ID NO: 48625 - DNA, 15 bp, Homo sapiens
atttgtagttcaaag

SEQ ID NO: 48626 - DNA, 15 bp, Homo sapiens
catttgtagttcaaa

SEQ ID NO: 48627 - DNA, 15 bp, Homo sapiens
tcatttgtagttcaa

SEQ ID NO: 48628 - DNA, 15 bp, Homo sapiens
ttcatttgtagttca

SEQ ID NO: 48629 - DNA, 15 bp, Homo sapiens
gttcatttgtagttc

SEQ ID NO: 48630 - DNA, 15 bp, Homo sapiens
agttcatttgtagtt

SEQ ID NO: 48631 - DNA, 15 bp, Homo sapiens
cagttcatttgtagt

SEQ ID NO: 48632 - DNA, 15 bp, Homo sapiens
tcagttcatttgtag

SEQ ID NO: 48633 - DNA, 15 bp, Homo sapiens
ttcagttcatttgta

SEQ ID NO: 48634 - DNA, 15 bp, Homo sapiens
cttcagttcatttgt

SEQ ID NO: 48635 - DNA, 15 bp, Homo sapiens
acttcagttcatttg

SEQ ID NO: 48636 - DNA, 15 bp, Homo sapiens
aacttcagttcattt

SEQ ID NO: 48637 - DNA, 15 bp, Homo sapiens
aaacttcagttcatt

SEQ ID NO: 48638 - DNA, 15 bp, Homo sapiens
aaaacttcagttcat

SEQ ID NO: 48639 - DNA, 15 bp, Homo sapiens
aaaaacttcagttca

SEQ ID NO: 48640 - DNA, 15 bp, Homo sapiens
taaaaacttcagttc

SEQ ID NO: 48641 - DNA, 15 bp, Homo sapiens
ttaaaaacttcagtt

SEQ ID NO: 48642 - DNA, 15 bp, Homo sapiens
cttaaaaacttcagt

SEQ ID NO: 48643 - DNA, 15 bp, Homo sapiens
acttaaaaacttcag

SEQ ID NO: 48644 - DNA, 15 bp, Homo sapiens
cacttaaaaacttca

SEQ ID NO: 48645 - DNA, 15 bp, Homo sapiens
acacttaaaaacttc

SEQ ID NO: 48646 - DNA, 15 bp, Homo sapiens
tacacttaaaaactt

SEQ ID NO: 48647 - DNA, 15 bp, Homo sapiens
ttacacttaaaaact

SEQ ID NO: 48648 - DNA, 15 bp, Homo sapiens
attacacttaaaaac

SEQ ID NO: 48649 - DNA, 15 bp, Homo sapiens
tattacacttaaaaa

SEQ ID NO: 48650 - DNA, 15 bp, Homo sapiens
ttattacacttaaaa

SEQ ID NO: 48651 - DNA, 15 bp, Homo sapiens
tttattacacttaaa

SEQ ID NO: 48652 - DNA, 15 bp, Homo sapiens
atttattacacttaa

SEQ ID NO: 48653 - DNA, 15 bp, Homo sapiens
catttattacactta

SEQ ID NO: 48654 - DNA, 15 bp, Homo sapiens
acatttattacactt

SEQ ID NO: 48655 - DNA, 15 bp, Homo sapiens
aacatttattacact

SEQ ID NO: 48656 - DNA, 15 bp, Homo sapiens
taacatttattacac

SEQ ID NO: 48657 - DNA, 15 bp, Homo sapiens
gtaacatttattaca

SEQ ID NO: 48658 - DNA, 15 bp, Homo sapiens
agtaacatttattac

SEQ ID NO: 48659 - DNA, 15 bp, Homo sapiens
tagtaacatttatta

SEQ ID NO: 48660 - DNA, 15 bp, Homo sapiens
ttagtaacatttatt

SEQ ID NO: 48661 - DNA, 15 bp, Homo sapiens
tttagtaacatttat

SEQ ID NO: 48662 - DNA, 15 bp, Homo sapiens
atttagtaacattta

SEQ ID NO: 48663 - DNA, 15 bp, Homo sapiens
gatttagtaacattt

SEQ ID NO: 48664 - DNA, 15 bp, Homo sapiens
cgatttagtaacatt

SEQ ID NO: 48665 - DNA, 15 bp, Homo sapiens
ccgatttagtaacat

SEQ ID NO: 48666 - DNA, 15 bp, Homo sapiens
gccgatttagtaaca

SEQ ID NO: 48667 - DNA, 15 bp, Homo sapiens
agccgatttagtaac

SEQ ID NO: 48668 - DNA, 15 bp, Homo sapiens
aagccgatttagtaa

SEQ ID NO: 48669 - DNA, 15 bp, Homo sapiens
aaagccgatttagta

SEQ ID NO: 48670 - DNA, 15 bp, Homo sapiens
aaaagccgatttagt

SEQ ID NO: 48671 - DNA, 15 bp, Homo sapiens
caaaagccgatttag

SEQ ID NO: 48672 - DNA, 15 bp, Homo sapiens
acaaaagccgattta

SEQ ID NO: 48673 - DNA, 15 bp, Homo sapiens
tacaaaagccgattt

SEQ ID NO: 48674 - DNA, 15 bp, Homo sapiens
ctacaaaagccgatt

SEQ ID NO: 48675 - DNA, 15 bp, Homo sapiens
gctacaaaagccgat

SEQ ID NO: 48676 - DNA, 15 bp, Homo sapiens
tgctacaaaagccga

SEQ ID NO: 48677 - DNA, 15 bp, Homo sapiens
ctgctacaaaagccg

SEQ ID NO: 48678 - DNA, 15 bp, Homo sapiens
actgctacaaaagcc

SEQ ID NO: 48679 - DNA, 15 bp, Homo sapiens
aactgctacaaaagc

SEQ ID NO: 48680 - DNA, 15 bp, Homo sapiens
taactgctacaaaag

SEQ ID NO: 48681 - DNA, 15 bp, Homo sapiens
ttaactgctacaaaa

SEQ ID NO: 48682 - DNA, 15 bp, Homo sapiens
tttaactgctacaaa

SEQ ID NO: 48683 - DNA, 15 bp, Homo sapiens
gtttaactgctacaa

SEQ ID NO: 48684 - DNA, 15 bp, Homo sapiens
tgtttaactgctaca

SEQ ID NO: 48685 - DNA, 15 bp, Homo sapiens
ttgtttaactgctac

SEQ ID NO: 48686 - DNA, 15 bp, Homo sapiens
tttgtttaactgcta

SEQ ID NO: 48687 - DNA, 15 bp, Homo sapiens
ttttgtttaactgct

SEQ ID NO: 48688 - DNA, 15 bp, Homo sapiens
tttttgtttaactgc

SEQ ID NO: 48689 - DNA, 15 bp, Homo sapiens
ttttttgtttaactg

SEQ ID NO: 48690 - DNA, 15 bp, Homo sapiens
gttttttgtttaact

SEQ ID NO: 48691 - DNA, 15 bp, Homo sapiens
agttttttgtttaac

SEQ ID NO: 48692 - DNA, 15 bp, Homo sapiens
aagttttttgtttaa

SEQ ID NO: 48693 - DNA, 15 bp, Homo sapiens
gaagttttttgttta

SEQ ID NO: 48694 - DNA, 15 bp, Homo sapiens
tgaagttttttgttt

SEQ ID NO: 48695 - DNA, 15 bp, Homo sapiens
ttgaagttttttgtt

SEQ ID NO: 48696 - DNA, 15 bp, Homo sapiens
tttgaagttttttgt

SEQ ID NO: 48697 - DNA, 15 bp, Homo sapiens
ttttgaagttttttg

SEQ ID NO: 48698 - DNA, 15 bp, Homo sapiens
tttttgaagtttttt

SEQ ID NO: 48699 - DNA, 15 bp, Homo sapiens
atttttgaagttttt

SEQ ID NO: 48700 - DNA, 15 bp, Homo sapiens
aatttttgaagtttt

SEQ ID NO: 48701 - DNA, 15 bp, Homo sapiens
caatttttgaagttt

SEQ ID NO: 48702 - DNA, 15 bp, Homo sapiens
acaatttttgaagtt

SEQ ID NO: 48703 - DNA, 15 bp, Homo sapiens
tacaatttttgaagt

SEQ ID NO: 48704 - DNA, 15 bp, Homo sapiens
ttacaatttttgaag

SEQ ID NO: 48705 - DNA, 15 bp, Homo sapiens
cttacaatttttgaa

SEQ ID NO: 48706 - DNA, 15 bp, Homo sapiens
ccttacaatttttga

SEQ ID NO: 48707 - DNA, 15 bp, Homo sapiens
tccttacaatttttg

SEQ ID NO: 48708 - DNA, 15 bp, Homo sapiens
atccttacaattttt

SEQ ID NO: 48709 - DNA, 15 bp, Homo sapiens
aatccttacaatttt

SEQ ID NO: 48710 - DNA, 15 bp, Homo sapiens
gaatccttacaattt

SEQ ID NO: 48711 - DNA, 15 bp, Homo sapiens
agaatccttacaatt

SEQ ID NO: 48712 - DNA, 15 bp, Homo sapiens
cagaatccttacaat

SEQ ID NO: 48713 - DNA, 15 bp, Homo sapiens
acagaatccttacaa

SEQ ID NO: 48714 - DNA, 15 bp, Homo sapiens
cacagaatccttaca

SEQ ID NO: 48715 - DNA, 15 bp, Homo sapiens
tcacagaatccttac

SEQ ID NO: 48716 - DNA, 15 bp, Homo sapiens
ctcacagaatcctta

SEQ ID NO: 48717 - DNA, 15 bp, Homo sapiens
cctcacagaatcctt

SEQ ID NO: 48718 - DNA, 15 bp, Homo sapiens
ccctcacagaatcct

SEQ ID NO: 48719 - DNA, 15 bp, Homo sapiens
tccctcacagaatcc

SEQ ID NO: 48720 - DNA, 15 bp, Homo sapiens
ctccctcacagaatc

SEQ ID NO: 48721 - DNA, 15 bp, Homo sapiens
gctccctcacagaat

SEQ ID NO: 48722 - DNA, 15 bp, Homo sapiens
tgctccctcacagaa

SEQ ID NO: 48723 - DNA, 15 bp, Homo sapiens
atgctccctcacaga

SEQ ID NO: 48724 - DNA, 15 bp, Homo sapiens
catgctccctcacag

SEQ ID NO: 48725 - DNA, 15 bp, Homo sapiens
ccatgctccctcaca

SEQ ID NO: 48726 - DNA, 15 bp, Homo sapiens
gccatgctccctcac

SEQ ID NO: 48727 - DNA, 15 bp, Homo sapiens
agccatgctccctca

SEQ ID NO: 48728 - DNA, 15 bp, Homo sapiens
cagccatgctccctc

SEQ ID NO: 48729 - DNA, 15 bp, Homo sapiens
gcagccatgctccct

SEQ ID NO: 48730 - DNA, 15 bp, Homo sapiens
agcagccatgctccc

SEQ ID NO: 48731 - DNA, 15 bp, Homo sapiens
cagcagccatgctcc

SEQ ID NO: 48732 - DNA, 15 bp, Homo sapiens
gcagcagccatgctc

SEQ ID NO: 48733 - DNA, 15 bp, Homo sapiens
agcagcagccatgct

SEQ ID NO: 48734 - DNA, 15 bp, Homo sapiens
cagcagcagccatgc

SEQ ID NO: 48735 - DNA, 15 bp, Homo sapiens
gcagcagcagccatg

SEQ ID NO: 48736 - DNA, 15 bp, Homo sapiens
agcagcagcagccat

SEQ ID NO: 48737 - DNA, 15 bp, Homo sapiens
cagcagcagcagcca

SEQ ID NO: 48738 - DNA, 15 bp, Homo sapiens
gcagcagcagcagcc

SEQ ID NO: 48739 - DNA, 15 bp, Homo sapiens
agcagcagcagcagc

SEQ ID NO: 48740 - DNA, 15 bp, Homo sapiens
cagcagcagcagcag

SEQ ID NO: 48741 - DNA, 15 bp, Homo sapiens
gcagcagcagcagca

SEQ ID NO: 48742 - DNA, 15 bp, Homo sapiens
aagcagcagcagcag

SEQ ID NO: 48743 - DNA, 15 bp, Homo sapiens
caagcagcagcagca

SEQ ID NO: 48744 - DNA, 15 bp, Homo sapiens
gcaagcagcagcagc

SEQ ID NO: 48745 - DNA, 15 bp, Homo sapiens
tgcaagcagcagcag

SEQ ID NO: 48746 - DNA, 15 bp, Homo sapiens
ctgcaagcagcagca

SEQ ID NO: 48747 - DNA, 15 bp, Homo sapiens
tctgcaagcagcagc

SEQ ID NO: 48748 - DNA, 15 bp, Homo sapiens
atctgcaagcagcag

SEQ ID NO: 48749 - DNA, 15 bp, Homo sapiens
tatctgcaagcagca

SEQ ID NO: 48750 - DNA, 15 bp, Homo sapiens
ctatctgcaagcagc

SEQ ID NO: 48751 - DNA, 15 bp, Homo sapiens
gctatctgcaagcag

SEQ ID NO: 48752 - DNA, 15 bp, Homo sapiens
ggctatctgcaagca

SEQ ID NO: 48753 - DNA, 15 bp, Homo sapiens
aggctatctgcaagc

SEQ ID NO: 48754 - DNA, 15 bp, Homo sapiens
caggctatctgcaag

SEQ ID NO: 48755 - DNA, 15 bp, Homo sapiens
gcaggctatctgcaa

SEQ ID NO: 48756 - DNA, 15 bp, Homo sapiens
agcaggctatctgca

SEQ ID NO: 48757 - DNA, 15 bp, Homo sapiens
cagcaggctatctgc

SEQ ID NO: 48758 - DNA, 15 bp, Homo sapiens
acagcaggctatctg

SEQ ID NO: 48759 - DNA, 15 bp, Homo sapiens
cacagcaggctatct

SEQ ID NO: 48760 - DNA, 15 bp, Homo sapiens
acacagcaggctatc

SEQ ID NO: 48761 - DNA, 15 bp, Homo sapiens
aacacagcaggctat

SEQ ID NO: 48762 - DNA, 15 bp, Homo sapiens
aaacacagcaggcta

SEQ ID NO: 48763 - DNA, 15 bp, Homo sapiens
taaacacagcaggct

SEQ ID NO: 48764 - DNA, 15 bp, Homo sapiens
ctaaacacagcaggc

SEQ ID NO: 48765 - DNA, 15 bp, Homo sapiens
cctaaacacagcagg

SEQ ID NO: 48766 - DNA, 15 bp, Homo sapiens
tcctaaacacagcag

SEQ ID NO: 48767 - DNA, 15 bp, Homo sapiens
atcctaaacacagca

SEQ ID NO: 48768 - DNA, 15 bp, Homo sapiens
aatcctaaacacagc

SEQ ID NO: 48769 - DNA, 15 bp, Homo sapiens
aaatcctaaacacag

SEQ ID NO: 48770 - DNA, 15 bp, Homo sapiens
taaatcctaaacaca

SEQ ID NO: 48771 - DNA, 15 bp, Homo sapiens
ctaaatcctaaacac

SEQ ID NO: 48772 - DNA, 15 bp, Homo sapiens
actaaatcctaaaca

SEQ ID NO: 48773 - DNA, 15 bp, Homo sapiens
aactaaatcctaaac

SEQ ID NO: 48774 - DNA, 15 bp, Homo sapiens
taactaaatcctaaa

SEQ ID NO: 48775 - DNA, 15 bp, Homo sapiens
ttaactaaatcctaa

SEQ ID NO: 48776 - DNA, 15 bp, Homo sapiens
tttaactaaatccta

SEQ ID NO: 48777 - DNA, 15 bp, Homo sapiens
atttaactaaatcct

SEQ ID NO: 48778 - DNA, 15 bp, Homo sapiens
tatttaactaaatcc

SEQ ID NO: 48779 - DNA, 15 bp, Homo sapiens
gtatttaactaaatc

SEQ ID NO: 48780 - DNA, 15 bp, Homo sapiens
tgtatttaactaaat

SEQ ID NO: 48781 - DNA, 15 bp, Homo sapiens
atgtatttaactaaa

SEQ ID NO: 48782 - DNA, 15 bp, Homo sapiens
aatgtatttaactaa

SEQ ID NO: 48783 - DNA, 15 bp, Homo sapiens
aaatgtatttaacta

SEQ ID NO: 48784 - DNA, 15 bp, Homo sapiens
gaaatgtatttaact

SEQ ID NO: 48785 - DNA, 15 bp, Homo sapiens
agaaatgtatttaac

SEQ ID NO: 48786 - DNA, 15 bp, Homo sapiens
gagaaatgtatttaa

SEQ ID NO: 48787 - DNA, 15 bp, Homo sapiens
ggagaaatgtattta

SEQ ID NO: 48788 - DNA, 15 bp, Homo sapiens
aggagaaatgtattt

SEQ ID NO: 48789 - DNA, 15 bp, Homo sapiens
caggagaaatgtatt

SEQ ID NO: 48790 - DNA, 15 bp, Homo sapiens
acaggagaaatgtat

SEQ ID NO: 48791 - DNA, 15 bp, Homo sapiens
aacaggagaaatgta

SEQ ID NO: 48792 - DNA, 15 bp, Homo sapiens
aaacaggagaaatgt

SEQ ID NO: 48793 - DNA, 15 bp, Homo sapiens
taaacaggagaaatg

SEQ ID NO: 48794 - DNA, 15 bp, Homo sapiens
ttaaacaggagaaat

SEQ ID NO: 48795 - DNA, 15 bp, Homo sapiens
tttaaacaggagaaa

SEQ ID NO: 48796 - DNA, 15 bp, Homo sapiens
ttttaaacaggagaa

SEQ ID NO: 48797 - DNA, 15 bp, Homo sapiens
gttttaaacaggaga

SEQ ID NO: 48798 - DNA, 15 bp, Homo sapiens
agttttaaacaggag

SEQ ID NO: 48799 - DNA, 15 bp, Homo sapiens
tagttttaaacagga

SEQ ID NO: 48800 - DNA, 15 bp, Homo sapiens
ttagttttaaacagg

SEQ ID NO: 48801 - DNA, 15 bp, Homo sapiens
tttagttttaaacag

SEQ ID NO: 48802 - DNA, 15 bp, Homo sapiens
atttagttttaaaca

SEQ ID NO: 48803 - DNA, 15 bp, Homo sapiens
catttagttttaaac

SEQ ID NO: 48804 - DNA, 15 bp, Homo sapiens
ccatttagttttaaa

SEQ ID NO: 48805 - DNA, 15 bp, Homo sapiens
accatttagttttaa

SEQ ID NO: 48806 - DNA, 15 bp, Homo sapiens
gaccatttagtttta

SEQ ID NO: 48807 - DNA, 15 bp, Homo sapiens
agaccatttagtttt

SEQ ID NO: 48808 - DNA, 15 bp, Homo sapiens
aagaccatttagttt

SEQ ID NO: 48809 - DNA, 15 bp, Homo sapiens
aaagaccatttagtt

SEQ ID NO: 48810 - DNA, 15 bp, Homo sapiens
gaaagaccatttagt

SEQ ID NO: 48811 - DNA, 15 bp, Homo sapiens
ggaaagaccatttag

SEQ ID NO: 48812 - DNA, 15 bp, Homo sapiens
aggaaagaccattta

SEQ ID NO: 48813 - DNA, 15 bp, Homo sapiens
aaggaaagaccattt

SEQ ID NO: 48814 - DNA, 15 bp, Homo sapiens
taaggaaagaccatt

SEQ ID NO: 48815 - DNA, 15 bp, Homo sapiens
ctaaggaaagaccat

SEQ ID NO: 48816 - DNA, 15 bp, Homo sapiens
actaaggaaagacca

SEQ ID NO: 48817 - DNA, 15 bp, Homo sapiens
aactaaggaaagacc

SEQ ID NO: 48818 - DNA, 15 bp, Homo sapiens
aaactaaggaaagac

SEQ ID NO: 48819 - DNA, 15 bp, Homo sapiens
caaactaaggaaaga

SEQ ID NO: 48820 - DNA, 15 bp, Homo sapiens
gcaaactaaggaaag

SEQ ID NO: 48821 - DNA, 15 bp, Homo sapiens
agcaaactaaggaaa

SEQ ID NO: 48822 - DNA, 15 bp, Homo sapiens
aagcaaactaaggaa

SEQ ID NO: 48823 - DNA, 15 bp, Homo sapiens
taagcaaactaagga

SEQ ID NO: 48824 - DNA, 15 bp, Homo sapiens
ctaagcaaactaagg

SEQ ID NO: 48825 - DNA, 15 bp, Homo sapiens
actaagcaaactaag

SEQ ID NO: 48826 - DNA, 15 bp, Homo sapiens
aactaagcaaactaa

SEQ ID NO: 48827 - DNA, 15 bp, Homo sapiens
gaactaagcaaacta

SEQ ID NO: 48828 - DNA, 15 bp, Homo sapiens
agaactaagcaaact

SEQ ID NO: 48829 - DNA, 15 bp, Homo sapiens
aagaactaagcaaac

SEQ ID NO: 48830 - DNA, 15 bp, Homo sapiens
gaagaactaagcaaa

SEQ ID NO: 48831 - DNA, 15 bp, Homo sapiens
tgaagaactaagcaa

SEQ ID NO: 48832 - DNA, 15 bp, Homo sapiens
ctgaagaactaagca

SEQ ID NO: 48833 - DNA, 15 bp, Homo sapiens
tctgaagaactaagc

SEQ ID NO: 48834 - DNA, 15 bp, Homo sapiens
ttctgaagaactaag

SEQ ID NO: 48835 - DNA, 15 bp, Homo sapiens
cttctgaagaactaa

SEQ ID NO: 48836 - DNA, 15 bp, Homo sapiens
ccttctgaagaacta

SEQ ID NO: 48837 - DNA, 15 bp, Homo sapiens
cccttctgaagaact

SEQ ID NO: 48838 - DNA, 15 bp, Homo sapiens
gcccttctgaagaac

SEQ ID NO: 48839 - DNA, 15 bp, Homo sapiens
ggcccttctgaagaa

SEQ ID NO: 48840 - DNA, 15 bp, Homo sapiens
aggcccttctgaaga

SEQ ID NO: 48841 - DNA, 15 bp, Homo sapiens
aaggcccttctgaag

SEQ ID NO: 48842 - DNA, 15 bp, Homo sapiens
aaaggcccttctgaa

SEQ ID NO: 48843 - DNA, 15 bp, Homo sapiens
caaaggcccttctga

SEQ ID NO: 48844 - DNA, 15 bp, Homo sapiens
tcaaaggcccttctg

SEQ ID NO: 48845 - DNA, 15 bp, Homo sapiens
ttcaaaggcccttct

SEQ ID NO: 48846 - DNA, 15 bp, Homo sapiens
tttcaaaggcccttc

SEQ ID NO: 48847 - DNA, 15 bp, Homo sapiens
gtttcaaaggccctt

SEQ ID NO: 48848 - DNA, 15 bp, Homo sapiens
tgtttcaaaggccct

SEQ ID NO: 48849 - DNA, 15 bp, Homo sapiens
gtgtttcaaaggccc

SEQ ID NO: 48850 - DNA, 15 bp, Homo sapiens
agtgtttcaaaggcc

SEQ ID NO: 48851 - DNA, 15 bp, Homo sapiens
cagtgtttcaaaggc

SEQ ID NO: 48852 - DNA, 15 bp, Homo sapiens
ccagtgtttcaaagg

SEQ ID NO: 48853 - DNA, 15 bp, Homo sapiens
cccagtgtttcaaag

SEQ ID NO: 48854 - DNA, 15 bp, Homo sapiens
tcccagtgtttcaaa

SEQ ID NO: 48855 - DNA, 15 bp, Homo sapiens
ttcccagtgtttcaa

SEQ ID NO: 48856 - DNA, 15 bp, Homo sapiens
tttcccagtgtttca

SEQ ID NO: 48857 - DNA, 15 bp, Homo sapiens
atttcccagtgtttc

SEQ ID NO: 48858 - DNA, 15 bp, Homo sapiens
tatttcccagtgttt

SEQ ID NO: 48859 - DNA, 15 bp, Homo sapiens
ttatttcccagtgtt

SEQ ID NO: 48860 - DNA, 15 bp, Homo sapiens
tttatttcccagtgt

SEQ ID NO: 48861 - DNA, 15 bp, Homo sapiens
gtttatttcccagtg

SEQ ID NO: 48862 - DNA, 15 bp, Homo sapiens
tgtttatttcccagt

SEQ ID NO: 48863 - DNA, 15 bp, Homo sapiens
ttgtttatttcccag

SEQ ID NO: 48864 - DNA, 15 bp, Homo sapiens
cttgtttatttccca

SEQ ID NO: 48865 - DNA, 15 bp, Homo sapiens
acttgtttatttccc

SEQ ID NO: 48866 - DNA, 15 bp, Homo sapiens
cacttgtttatttcc

SEQ ID NO: 48867 - DNA, 15 bp, Homo sapiens
tcacttgtttatttc

SEQ ID NO: 48868 - DNA, 15 bp, Homo sapiens
atcacttgtttattt

SEQ ID NO: 48869 - DNA, 15 bp, Homo sapiens
aatcacttgtttatt

SEQ ID NO: 48870 - DNA, 15 bp, Homo sapiens
gaatcacttgtttat

SEQ ID NO: 48871 - DNA, 15 bp, Homo sapiens
agaatcacttgttta

SEQ ID NO: 48872 - DNA, 15 bp, Homo sapiens
aagaatcacttgttt

SEQ ID NO: 48873 - DNA, 15 bp, Homo sapiens
aaagaatcacttgtt

SEQ ID NO: 48874 - DNA, 15 bp, Homo sapiens
taaagaatcacttgt

SEQ ID NO: 48875 - DNA, 15 bp, Homo sapiens
ctaaagaatcacttg

SEQ ID NO: 48876 - DNA, 15 bp, Homo sapiens
gctaaagaatcactt

SEQ ID NO: 48877 - DNA, 15 bp, Homo sapiens
agctaaagaatcact

SEQ ID NO: 48878 - DNA, 15 bp, Homo sapiens
tagctaaagaatcac

SEQ ID NO: 48879 - DNA, 15 bp, Homo sapiens
gtagctaaagaatca

SEQ ID NO: 48880 - DNA, 15 bp, Homo sapiens
agtagctaaagaatc

SEQ ID NO: 48881 - DNA, 15 bp, Homo sapiens
cagtagctaaagaat

SEQ ID NO: 48882 - DNA, 15 bp, Homo sapiens
gcagtagctaaagaa

SEQ ID NO: 48883 - DNA, 15 bp, Homo sapiens
agcagtagctaaaga

SEQ ID NO: 48884 - DNA, 15 bp, Homo sapiens
aagcagtagctaaag

SEQ ID NO: 48885 - DNA, 15 bp, Homo sapiens
aaagcagtagctaaa

SEQ ID NO: 48886 - DNA, 15 bp, Homo sapiens
gaaagcagtagctaa

SEQ ID NO: 48887 - DNA, 15 bp, Homo sapiens
agaaagcagtagcta

SEQ ID NO: 48888 - DNA, 15 bp, Homo sapiens
cagaaagcagtagct

SEQ ID NO: 48889 - DNA, 15 bp, Homo sapiens
tcagaaagcagtagc

SEQ ID NO: 48890 - DNA, 15 bp, Homo sapiens
ttcagaaagcagtag

SEQ ID NO: 48891 - DNA, 15 bp, Homo sapiens
tttcagaaagcagta

SEQ ID NO: 48892 - DNA, 15 bp, Homo sapiens
atttcagaaagcagt

SEQ ID NO: 48893 - DNA, 15 bp, Homo sapiens
tatttcagaaagcag

SEQ ID NO: 48894 - DNA, 15 bp, Homo sapiens
gtatttcagaaagca

SEQ ID NO: 48895 - DNA, 15 bp, Homo sapiens
agtatttcagaaagc

SEQ ID NO: 48896 - DNA, 15 bp, Homo sapiens
aagtatttcagaaag

SEQ ID NO: 48897 - DNA, 15 bp, Homo sapiens
taagtatttcagaaa

SEQ ID NO: 48898 - DNA, 15 bp, Homo sapiens
ataagtatttcagaa

SEQ ID NO: 48899 - DNA, 15 bp, Homo sapiens
tataagtatttcaga

SEQ ID NO: 48900 - DNA, 15 bp, Homo sapiens
atataagtatttcag

SEQ ID NO: 48901 - DNA, 15 bp, Homo sapiens
tatataagtatttca

SEQ ID NO: 48902 - DNA, 15 bp, Homo sapiens
ttatataagtatttc

SEQ ID NO: 48903 - DNA, 15 bp, Homo sapiens
tttatataagtattt

SEQ ID NO: 48904 - DNA, 15 bp, Homo sapiens
ttttatataagtatt

SEQ ID NO: 48905 - DNA, 15 bp, Homo sapiens
cttttatataagtat

SEQ ID NO: 48906 - DNA, 15 bp, Homo sapiens
gcttttatataagta

SEQ ID NO: 48907 - DNA, 15 bp, Homo sapiens
agcttttatataagt

SEQ ID NO: 48908 - DNA, 15 bp, Homo sapiens
gagcttttatataag

SEQ ID NO: 48909 - DNA, 15 bp, Homo sapiens
agagcttttatataa

SEQ ID NO: 48910 - DNA, 15 bp, Homo sapiens
cagagcttttatata

SEQ ID NO: 48911 - DNA, 15 bp, Homo sapiens
gcagagcttttatat

SEQ ID NO: 48912 - DNA, 15 bp, Homo sapiens
tgcagagcttttata

SEQ ID NO: 48913 - DNA, 15 bp, Homo sapiens
gtgcagagcttttat

SEQ ID NO: 48914 - DNA, 15 bp, Homo sapiens
agtgcagagctttta

SEQ ID NO: 48915 - DNA, 15 bp, Homo sapiens
cagtgcagagctttt

SEQ ID NO: 48916 - DNA, 15 bp, Homo sapiens
acagtgcagagcttt

SEQ ID NO: 48917 - DNA, 15 bp, Homo sapiens
tacagtgcagagctt

SEQ ID NO: 48918 - DNA, 15 bp, Homo sapiens
atacagtgcagagct

SEQ ID NO: 48919 - DNA, 15 bp, Homo sapiens
aatacagtgcagagc

SEQ ID NO: 48920 - DNA, 15 bp, Homo sapiens
gaatacagtgcagag

SEQ ID NO: 48921 - DNA, 15 bp, Homo sapiens
agaatacagtgcaga

SEQ ID NO: 48922 - DNA, 15 bp, Homo sapiens
gagaatacagtgcag

SEQ ID NO: 48923 - DNA, 15 bp, Homo sapiens
ggagaatacagtgca

SEQ ID NO: 48924 - DNA, 15 bp, Homo sapiens
gggagaatacagtgc

SEQ ID NO: 48925 - DNA, 15 bp, Homo sapiens
tgggagaatacagtg

SEQ ID NO: 48926 - DNA, 15 bp, Homo sapiens
atgggagaatacagt

SEQ ID NO: 48927 - DNA, 15 bp, Homo sapiens
gatgggagaatacag

SEQ ID NO: 48928 - DNA, 15 bp, Homo sapiens
ggatgggagaataca

SEQ ID NO: 48929 - DNA, 15 bp, Homo sapiens
gggatgggagaatac

SEQ ID NO: 48930 - DNA, 15 bp, Homo sapiens
agggatgggagaata

SEQ ID NO: 48931 - DNA, 15 bp, Homo sapiens
gagggatgggagaat

SEQ ID NO: 48932 - DNA, 15 bp, Homo sapiens
agagggatgggagaa

SEQ ID NO: 48933 - DNA, 15 bp, Homo sapiens
gagagggatgggaga

SEQ ID NO: 48934 - DNA, 15 bp, Homo sapiens
tgagagggatgggag

SEQ ID NO: 48935 - DNA, 15 bp, Homo sapiens
ctgagagggatggga

SEQ ID NO: 48936 - DNA, 15 bp, Homo sapiens
cctgagagggatggg

SEQ ID NO: 48937 - DNA, 15 bp, Homo sapiens
ccctgagagggatgg

SEQ ID NO: 48938 - DNA, 15 bp, Homo sapiens
cccctgagagggatg

SEQ ID NO: 48939 - DNA, 15 bp, Homo sapiens
tcccctgagagggat

SEQ ID NO: 48940 - DNA, 15 bp, Homo sapiens
ttcccctgagaggga

SEQ ID NO: 48941 - DNA, 15 bp, Homo sapiens
attcccctgagaggg

SEQ ID NO: 48942 - DNA, 15 bp, Homo sapiens
tattcccctgagagg

SEQ ID NO: 48943 - DNA, 15 bp, Homo sapiens
atattcccctgagag

SEQ ID NO: 48944 - DNA, 15 bp, Homo sapiens
aatattcccctgaga

SEQ ID NO: 48945 - DNA, 15 bp, Homo sapiens
taatattcccctgag

SEQ ID NO: 48946 - DNA, 15 bp, Homo sapiens
ctaatattcccctga

SEQ ID NO: 48947 - DNA, 15 bp, Homo sapiens
tctaatattcccctg

SEQ ID NO: 48948 - DNA, 15 bp, Homo sapiens
ctctaatattcccct

SEQ ID NO: 48949 - DNA, 15 bp, Homo sapiens
cctctaatattcccc

SEQ ID NO: 48950 - DNA, 15 bp, Homo sapiens
ccctctaatattccc

SEQ ID NO: 48951 - DNA, 15 bp, Homo sapiens
accctctaatattcc

SEQ ID NO: 48952 - DNA, 15 bp, Homo sapiens
aaccctctaatattc

SEQ ID NO: 48953 - DNA, 15 bp, Homo sapiens
taaccctctaatatt

SEQ ID NO: 48954 - DNA, 15 bp, Homo sapiens
ctaaccctctaatat

SEQ ID NO: 48955 - DNA, 15 bp, Homo sapiens
cctaaccctctaata

SEQ ID NO: 48956 - DNA, 15 bp, Homo sapiens
tcctaaccctctaat

SEQ ID NO: 48957 - DNA, 15 bp, Homo sapiens
gtcctaaccctctaa

SEQ ID NO: 48958 - DNA, 15 bp, Homo sapiens
agtcctaaccctcta

SEQ ID NO: 48959 - DNA, 15 bp, Homo sapiens
gagtcctaaccctct

SEQ ID NO: 48960 - DNA, 15 bp, Homo sapiens
ggagtcctaaccctc

SEQ ID NO: 48961 - DNA, 15 bp, Homo sapiens
gggagtcctaaccct

SEQ ID NO: 48962 - DNA, 15 bp, Homo sapiens
ggggagtcctaaccc

SEQ ID NO: 48963 - DNA, 15 bp, Homo sapiens
tggggagtcctaacc

SEQ ID NO: 48964 - DNA, 15 bp, Homo sapiens
ctggggagtcctaac

SEQ ID NO: 48965 - DNA, 15 bp, Homo sapiens
cctggggagtcctaa

SEQ ID NO: 48966 - DNA, 15 bp, Homo sapiens
acctggggagtccta

SEQ ID NO: 48967 - DNA, 15 bp, Homo sapiens
tacctggggagtcct

SEQ ID NO: 48968 - DNA, 15 bp, Homo sapiens
ctacctggggagtcc

SEQ ID NO: 48969 - DNA, 15 bp, Homo sapiens
tctacctggggagtc

SEQ ID NO: 48970 - DNA, 15 bp, Homo sapiens
gtctacctggggagt

SEQ ID NO: 48971 - DNA, 15 bp, Homo sapiens
tgtctacctggggag

SEQ ID NO: 48972 - DNA, 15 bp, Homo sapiens
atgtctacctgggga

SEQ ID NO: 48973 - DNA, 15 bp, Homo sapiens
aatgtctacctgggg

SEQ ID NO: 48974 - DNA, 15 bp, Homo sapiens
gaatgtctacctggg

SEQ ID NO: 48975 - DNA, 15 bp, Homo sapiens
agaatgtctacctgg

SEQ ID NO: 48976 - DNA, 15 bp, Homo sapiens
tagaatgtctacctg

SEQ ID NO: 48977 - DNA, 15 bp, Homo sapiens
ctagaatgtctacct

SEQ ID NO: 48978 - DNA, 15 bp, Homo sapiens
cctagaatgtctacc

SEQ ID NO: 48979 - DNA, 15 bp, Homo sapiens
ccctagaatgtctac

SEQ ID NO: 48980 - DNA, 15 bp, Homo sapiens
cccctagaatgtcta

SEQ ID NO: 48981 - DNA, 15 bp, Homo sapiens
acccctagaatgtct

SEQ ID NO: 48982 - DNA, 15 bp, Homo sapiens
cacccctagaatgtc

SEQ ID NO: 48983 - DNA, 15 bp, Homo sapiens
tcacccctagaatgt

SEQ ID NO: 48984 - DNA, 15 bp, Homo sapiens
ttcacccctagaatg

SEQ ID NO: 48985 - DNA, 15 bp, Homo sapiens
tttcacccctagaat

SEQ ID NO: 48986 - DNA, 15 bp, Homo sapiens
ttttcacccctagaa

SEQ ID NO: 48987 - DNA, 15 bp, Homo sapiens
attttcacccctaga

SEQ ID NO: 48988 - DNA, 15 bp, Homo sapiens
aattttcacccctag

SEQ ID NO: 48989 - DNA, 15 bp, Homo sapiens
aaattttcaccccta

SEQ ID NO: 48990 - DNA, 15 bp, Homo sapiens
caaattttcacccct

SEQ ID NO: 48991 - DNA, 15 bp, Homo sapiens
acaaattttcacccc

SEQ ID NO: 48992 - DNA, 15 bp, Homo sapiens
gacaaattttcaccc

SEQ ID NO: 48993 - DNA, 15 bp, Homo sapiens
tgacaaattttcacc

SEQ ID NO: 48994 - DNA, 15 bp, Homo sapiens
atgacaaattttcac

SEQ ID NO: 48995 - DNA, 15 bp, Homo sapiens
aatgacaaattttca

SEQ ID NO: 48996 - DNA, 15 bp, Homo sapiens
taatgacaaattttc

SEQ ID NO: 48997 - DNA, 15 bp, Homo sapiens
gtaatgacaaatttt

SEQ ID NO: 48998 - DNA, 15 bp, Homo sapiens
tgtaatgacaaattt

SEQ ID NO: 48999 - DNA, 15 bp, Homo sapiens
atgtaatgacaaatt

SEQ ID NO: 49000 - DNA, 15 bp, Homo sapiens
aatgtaatgacaaat

SEQ ID NO: 49001 - DNA, 15 bp, Homo sapiens
caatgtaatgacaaa

SEQ ID NO: 49002 - DNA, 15 bp, Homo sapiens
tcaatgtaatgacaa

SEQ ID NO: 49003 - DNA, 15 bp, Homo sapiens
gtcaatgtaatgaca

SEQ ID NO: 49004 - DNA, 15 bp, Homo sapiens
tgtcaatgtaatgac

SEQ ID NO: 49005 - DNA, 15 bp, Homo sapiens
atgtcaatgtaatga

SEQ ID NO: 49006 - DNA, 15 bp, Homo sapiens
aatgtcaatgtaatg

SEQ ID NO: 49007 - DNA, 15 bp, Homo sapiens
aaatgtcaatgtaat

SEQ ID NO: 49008 - DNA, 15 bp, Homo sapiens
gaaatgtcaatgtaa

SEQ ID NO: 49009 - DNA, 15 bp, Homo sapiens
tgaaatgtcaatgta

SEQ ID NO: 49010 - DNA, 15 bp, Homo sapiens
ctgaaatgtcaatgt

SEQ ID NO: 49011 - DNA, 15 bp, Homo sapiens
tctgaaatgtcaatg

SEQ ID NO: 49012 - DNA, 15 bp, Homo sapiens
atctgaaatgtcaat

SEQ ID NO: 49013 - DNA, 15 bp, Homo sapiens
aatctgaaatgtcaa

SEQ ID NO: 49014 - DNA, 15 bp, Homo sapiens
aaatctgaaatgtca

SEQ ID NO: 49015 - DNA, 15 bp, Homo sapiens
taaatctgaaatgtc

SEQ ID NO: 49016 - DNA, 15 bp, Homo sapiens
ctaaatctgaaatgt

SEQ ID NO: 49017 - DNA, 15 bp, Homo sapiens
cctaaatctgaaatg

SEQ ID NO: 49018 - DNA, 15 bp, Homo sapiens
acctaaatctgaaat

SEQ ID NO: 49019 - DNA, 15 bp, Homo sapiens
aacctaaatctgaaa

SEQ ID NO: 49020 - DNA, 15 bp, Homo sapiens
aaacctaaatctgaa

SEQ ID NO: 49021 - DNA, 15 bp, Homo sapiens
aaaacctaaatctga

SEQ ID NO: 49022 - DNA, 15 bp, Homo sapiens
gaaaacctaaatctg

SEQ ID NO: 49023 - DNA, 15 bp, Homo sapiens
tgaaaacctaaatct

SEQ ID NO: 49024 - DNA, 15 bp, Homo sapiens
ttgaaaacctaaatc

SEQ ID NO: 49025 - DNA, 15 bp, Homo sapiens
gttgaaaacctaaat

SEQ ID NO: 49026 - DNA, 15 bp, Homo sapiens
tgttgaaaacctaaa

SEQ ID NO: 49027 - DNA, 15 bp, Homo sapiens
ttgttgaaaacctaa

SEQ ID NO: 49028 - DNA, 15 bp, Homo sapiens
attgttgaaaaccta

SEQ ID NO: 49029 - DNA, 15 bp, Homo sapiens
tattgttgaaaacct

SEQ ID NO: 49030 - DNA, 15 bp, Homo sapiens
gtattgttgaaaacc

SEQ ID NO: 49031 - DNA, 15 bp, Homo sapiens
agtattgttgaaaac

SEQ ID NO: 49032 - DNA, 15 bp, Homo sapiens
cagtattgttgaaaa

SEQ ID NO: 49033 - DNA, 15 bp, Homo sapiens
acagtattgttgaaa

SEQ ID NO: 49034 - DNA, 15 bp, Homo sapiens
aacagtattgttgaa

SEQ ID NO: 49035 - DNA, 15 bp, Homo sapiens
aaacagtattgttga

SEQ ID NO: 49036 - DNA, 15 bp, Homo sapiens
aaaacagtattgttg

SEQ ID NO: 49037 - DNA, 15 bp, Homo sapiens
gaaaacagtattgtt

SEQ ID NO: 49038 - DNA, 15 bp, Homo sapiens
agaaaacagtattgt

SEQ ID NO: 49039 - DNA, 15 bp, Homo sapiens
aagaaaacagtattg

SEQ ID NO: 49040 - DNA, 15 bp, Homo sapiens
gaagaaaacagtatt

SEQ ID NO: 49041 - DNA, 15 bp, Homo sapiens
agaagaaaacagtat

SEQ ID NO: 49042 - DNA, 15 bp, Homo sapiens
aagaagaaaacagta

SEQ ID NO: 49043 - DNA, 15 bp, Homo sapiens
aaagaagaaaacagt

SEQ ID NO: 49044 - DNA, 15 bp, Homo sapiens
gaaagaagaaaacag

SEQ ID NO: 49045 - DNA, 15 bp, Homo sapiens
tgaaagaagaaaaca

SEQ ID NO: 49046 - DNA, 15 bp, Homo sapiens
gtgaaagaagaaaac

SEQ ID NO: 49047 - DNA, 15 bp, Homo sapiens
tgtgaaagaagaaaa

SEQ ID NO: 49048 - DNA, 15 bp, Homo sapiens
atgtgaaagaagaaa

SEQ ID NO: 49049 - DNA, 15 bp, Homo sapiens
tatgtgaaagaagaa

SEQ ID NO: 49050 - DNA, 15 bp, Homo sapiens
atatgtgaaagaaga

SEQ ID NO: 49051 - DNA, 15 bp, Homo sapiens
aatatgtgaaagaag

SEQ ID NO: 49052 - DNA, 15 bp, Homo sapiens
caatatgtgaaagaa

SEQ ID NO: 49053 - DNA, 15 bp, Homo sapiens
gcaatatgtgaaaga

SEQ ID NO: 49054 - DNA, 15 bp, Homo sapiens
ggcaatatgtgaaag

SEQ ID NO: 49055 - DNA, 15 bp, Homo sapiens
tggcaatatgtgaaa

SEQ ID NO: 49056 - DNA, 15 bp, Homo sapiens
atggcaatatgtgaa

SEQ ID NO: 49057 - DNA, 15 bp, Homo sapiens
gatggcaatatgtga

SEQ ID NO: 49058 - DNA, 15 bp, Homo sapiens
agatggcaatatgtg

SEQ ID NO: 49059 - DNA, 15 bp, Homo sapiens
tagatggcaatatgt

SEQ ID NO: 49060 - DNA, 15 bp, Homo sapiens
ctagatggcaatatg

SEQ ID NO: 49061 - DNA, 15 bp, Homo sapiens
actagatggcaatat

SEQ ID NO: 49062 - DNA, 15 bp, Homo sapiens
tactagatggcaata

SEQ ID NO: 49063 - DNA, 15 bp, Homo sapiens
ttactagatggcaat

SEQ ID NO: 49064 - DNA, 15 bp, Homo sapiens
attactagatggcaa

SEQ ID NO: 49065 - DNA, 15 bp, Homo sapiens
tattactagatggca

SEQ ID NO: 49066 - DNA, 15 bp, Homo sapiens
atattactagatggc

SEQ ID NO: 49067 - DNA, 15 bp, Homo sapiens
tatattactagatgg

SEQ ID NO: 49068 - DNA, 15 bp, Homo sapiens
ctatattactagatg

SEQ ID NO: 49069 - DNA, 15 bp, Homo sapiens
tctatattactagat

SEQ ID NO: 49070 - DNA, 15 bp, Homo sapiens
atctatattactaga

SEQ ID NO: 49071 - DNA, 15 bp, Homo sapiens
catctatattactag

SEQ ID NO: 49072 - DNA, 15 bp, Homo sapiens
acatctatattacta

SEQ ID NO: 49073 - DNA, 15 bp, Homo sapiens
aacatctatattact

SEQ ID NO: 49074 - DNA, 15 bp, Homo sapiens
gaacatctatattac

SEQ ID NO: 49075 - DNA, 15 bp, Homo sapiens
agaacatctatatta

SEQ ID NO: 49076 - DNA, 15 bp, Homo sapiens
gagaacatctatatt

SEQ ID NO: 49077 - DNA, 15 bp, Homo sapiens
ggagaacatctatat

SEQ ID NO: 49078 - DNA, 15 bp, Homo sapiens
cggagaacatctata

SEQ ID NO: 49079 - DNA, 15 bp, Homo sapiens
acggagaacatctat

SEQ ID NO: 49080 - DNA, 15 bp, Homo sapiens
gacggagaacatcta

SEQ ID NO: 49081 - DNA, 15 bp, Homo sapiens
ggacggagaacatct

SEQ ID NO: 49082 - DNA, 15 bp, Homo sapiens
tggacggagaacatc

SEQ ID NO: 49083 - DNA, 15 bp, Homo sapiens
gtggacggagaacat

SEQ ID NO: 49084 - DNA, 15 bp, Homo sapiens
tgtggacggagaaca

SEQ ID NO: 49085 - DNA, 15 bp, Homo sapiens
atgtggacggagaac

SEQ ID NO: 49086 - DNA, 15 bp, Homo sapiens
aatgtggacggagaa

SEQ ID NO: 49087 - DNA, 15 bp, Homo sapiens
taatgtggacggaga

SEQ ID NO: 49088 - DNA, 15 bp, Homo sapiens
ttaatgtggacggag

SEQ ID NO: 49089 - DNA, 15 bp, Homo sapiens
attaatgtggacgga

SEQ ID NO: 49090 - DNA, 15 bp, Homo sapiens
gattaatgtggacgg

SEQ ID NO: 49091 - DNA, 15 bp, Homo sapiens
tgattaatgtggacg

SEQ ID NO: 49092 - DNA, 15 bp, Homo sapiens
ttgattaatgtggac

SEQ ID NO: 49093 - DNA, 15 bp, Homo sapiens
tttgattaatgtgga

SEQ ID NO: 49094 - DNA, 15 bp, Homo sapiens
ttttgattaatgtgg

SEQ ID NO: 49095 - DNA, 15 bp, Homo sapiens
gttttgattaatgtg

SEQ ID NO: 49096 - DNA, 15 bp, Homo sapiens
agttttgattaatgt

SEQ ID NO: 49097 - DNA, 15 bp, Homo sapiens
tagttttgattaatg

SEQ ID NO: 49098 - DNA, 15 bp, Homo sapiens
atagttttgattaat

SEQ ID NO: 49099 - DNA, 15 bp, Homo sapiens
aatagttttgattaa

SEQ ID NO: 49100 - DNA, 15 bp, Homo sapiens
caatagttttgatta

SEQ ID NO: 49101 - DNA, 15 bp, Homo sapiens
tcaatagttttgatt

SEQ ID NO: 49102 - DNA, 15 bp, Homo sapiens
gtcaatagttttgat

SEQ ID NO: 49103 - DNA, 15 bp, Homo sapiens
tgtcaatagttttga

SEQ ID NO: 49104 - DNA, 15 bp, Homo sapiens
atgtcaatagttttg

SEQ ID NO: 49105 - DNA, 15 bp, Homo sapiens
catgtcaatagtttt

SEQ ID NO: 49106 - DNA, 15 bp, Homo sapiens
ccatgtcaatagttt

SEQ ID NO: 49107 - DNA, 15 bp, Homo sapiens
tccatgtcaatagtt

SEQ ID NO: 49108 - DNA, 15 bp, Homo sapiens
atccatgtcaatagt

SEQ ID NO: 49109 - DNA, 15 bp, Homo sapiens
tatccatgtcaatag

SEQ ID NO: 49110 - DNA, 15 bp, Homo sapiens
ttatccatgtcaata

SEQ ID NO: 49111 - DNA, 15 bp, Homo sapiens
attatccatgtcaat

SEQ ID NO: 49112 - DNA, 15 bp, Homo sapiens
aattatccatgtcaa

SEQ ID NO: 49113 - DNA, 15 bp, Homo sapiens
gaattatccatgtca

SEQ ID NO: 49114 - DNA, 15 bp, Homo sapiens
ggaattatccatgtc

SEQ ID NO: 49115 - DNA, 15 bp, Homo sapiens
aggaattatccatgt

SEQ ID NO: 49116 - DNA, 15 bp, Homo sapiens
taggaattatccatg

SEQ ID NO: 49117 - DNA, 15 bp, Homo sapiens
ttaggaattatccat

SEQ ID NO: 49118 - DNA, 15 bp, Homo sapiens
attaggaattatcca

SEQ ID NO: 49119 - DNA, 15 bp, Homo sapiens
aattaggaattatcc

SEQ ID NO: 49120 - DNA, 15 bp, Homo sapiens
gaattaggaattatc

SEQ ID NO: 49121 - DNA, 15 bp, Homo sapiens
ggaattaggaattat

SEQ ID NO: 49122 - DNA, 15 bp, Homo sapiens
aggaattaggaatta

SEQ ID NO: 49123 - DNA, 15 bp, Homo sapiens
aaggaattaggaatt

SEQ ID NO: 49124 - DNA, 15 bp, Homo sapiens
caaggaattaggaat

SEQ ID NO: 49125 - DNA, 15 bp, Homo sapiens
tcaaggaattaggaa

SEQ ID NO: 49126 - DNA, 15 bp, Homo sapiens
ttcaaggaattagga

SEQ ID NO: 49127 - DNA, 15 bp, Homo sapiens
gttcaaggaattagg

SEQ ID NO: 49128 - DNA, 15 bp, Homo sapiens
tgttcaaggaattag

SEQ ID NO: 49129 - DNA, 15 bp, Homo sapiens
gtgttcaaggaatta

SEQ ID NO: 49130 - DNA, 15 bp, Homo sapiens
agtgttcaaggaatt

SEQ ID NO: 49131 - DNA, 15 bp, Homo sapiens
tagtgttcaaggaat

SEQ ID NO: 49132 - DNA, 15 bp, Homo sapiens
atagtgttcaaggaa

SEQ ID NO: 49133 - DNA, 15 bp, Homo sapiens
tatagtgttcaagga

SEQ ID NO: 49134 - DNA, 15 bp, Homo sapiens
ttatagtgttcaagg

SEQ ID NO: 49135 - DNA, 15 bp, Homo sapiens
attatagtgttcaag

SEQ ID NO: 49136 - DNA, 15 bp, Homo sapiens
cattatagtgttcaa

SEQ ID NO: 49137 - DNA, 15 bp, Homo sapiens
ccattatagtgttca

SEQ ID NO: 49138 - DNA, 15 bp, Homo sapiens
tccattatagtgttc

SEQ ID NO: 49139 - DNA, 15 bp, Homo sapiens
ctccattatagtgtt

SEQ ID NO: 49140 - DNA, 15 bp, Homo sapiens
tctccattatagtgt

SEQ ID NO: 49141 - DNA, 15 bp, Homo sapiens
atctccattatagtg

SEQ ID NO: 49142 - DNA, 15 bp, Homo sapiens
gatctccattatagt

SEQ ID NO: 49143 - DNA, 15 bp, Homo sapiens
agatctccattatag

SEQ ID NO: 49144 - DNA, 15 bp, Homo sapiens
tagatctccattata

SEQ ID NO: 49145 - DNA, 15 bp, Homo sapiens
atagatctccattat

SEQ ID NO: 49146 - DNA, 15 bp, Homo sapiens
tatagatctccatta

SEQ ID NO: 49147 - DNA, 15 bp, Homo sapiens
ctatagatctccatt

SEQ ID NO: 49148 - DNA, 15 bp, Homo sapiens
gctatagatctccat

SEQ ID NO: 49149 - DNA, 15 bp, Homo sapiens
agctatagatctcca

SEQ ID NO: 49150 - DNA, 15 bp, Homo sapiens
tagctatagatctcc

SEQ ID NO: 49151 - DNA, 15 bp, Homo sapiens
ctagctatagatctc

SEQ ID NO: 49152 - DNA, 15 bp, Homo sapiens
gctagctatagatct

SEQ ID NO: 49153 - DNA, 15 bp, Homo sapiens
ggctagctatagatc

SEQ ID NO: 49154 - DNA, 15 bp, Homo sapiens
aggctagctatagat

SEQ ID NO: 49155 - DNA, 15 bp, Homo sapiens
aaggctagctataga

SEQ ID NO: 49156 - DNA, 15 bp, Homo sapiens
caaggctagctatag

SEQ ID NO: 49157 - DNA, 15 bp, Homo sapiens
ccaaggctagctata

SEQ ID NO: 49158 - DNA, 15 bp, Homo sapiens
gccaaggctagctat

SEQ ID NO: 49159 - DNA, 15 bp, Homo sapiens
cgccaaggctagcta

SEQ ID NO: 49160 - DNA, 15 bp, Homo sapiens
acgccaaggctagct

SEQ ID NO: 49161 - DNA, 15 bp, Homo sapiens
gacgccaaggctagc

SEQ ID NO: 49162 - DNA, 15 bp, Homo sapiens
agacgccaaggctag

SEQ ID NO: 49163 - DNA, 15 bp, Homo sapiens
tagacgccaaggcta

SEQ ID NO: 49164 - DNA, 15 bp, Homo sapiens
ctagacgccaaggct

SEQ ID NO: 49165 - DNA, 15 bp, Homo sapiens
tctagacgccaaggc

SEQ ID NO: 49166 - DNA, 15 bp, Homo sapiens
ttctagacgccaagg

SEQ ID NO: 49167 - DNA, 15 bp, Homo sapiens
cttctagacgccaag

SEQ ID NO: 49168 - DNA, 15 bp, Homo sapiens
tcttctagacgccaa

SEQ ID NO: 49169 - DNA, 15 bp, Homo sapiens
atcttctagacgcca

SEQ ID NO: 49170 - DNA, 15 bp, Homo sapiens
catcttctagacgcc

SEQ ID NO: 49171 - DNA, 15 bp, Homo sapiens
ccatcttctagacgc

SEQ ID NO: 49172 - DNA, 15 bp, Homo sapiens
cccatcttctagacg

SEQ ID NO: 49173 - DNA, 15 bp, Homo sapiens
acccatcttctagac

SEQ ID NO: 49174 - DNA, 15 bp, Homo sapiens
cacccatcttctaga

SEQ ID NO: 49175 - DNA, 15 bp, Homo sapiens
acacccatcttctag

SEQ ID NO: 49176 - DNA, 15 bp, Homo sapiens
aacacccatcttcta

SEQ ID NO: 49177 - DNA, 15 bp, Homo sapiens
caacacccatcttct

SEQ ID NO: 49178 - DNA, 15 bp, Homo sapiens
tcaacacccatcttc

SEQ ID NO: 49179 - DNA, 15 bp, Homo sapiens
ctcaacacccatctt

SEQ ID NO: 49180 - DNA, 15 bp, Homo sapiens
tctcaacacccatct

SEQ ID NO: 49181 - DNA, 15 bp, Homo sapiens
ttctcaacacccatc

SEQ ID NO: 49182 - DNA, 15 bp, Homo sapiens
cttctcaacacccat

SEQ ID NO: 49183 - DNA, 15 bp, Homo sapiens
tcttctcaacaccca

SEQ ID NO: 49184 - DNA, 15 bp, Homo sapiens
ctcttctcaacaccc

SEQ ID NO: 49185 - DNA, 15 bp, Homo sapiens
cctcttctcaacacc

SEQ ID NO: 49186 - DNA, 15 bp, Homo sapiens
ccctcttctcaacac

SEQ ID NO: 49187 - DNA, 15 bp, Homo sapiens
tccctcttctcaaca

SEQ ID NO: 49188 - DNA, 15 bp, Homo sapiens
ctccctcttctcaac

SEQ ID NO: 49189 - DNA, 15 bp, Homo sapiens
actccctcttctcaa

SEQ ID NO: 49190 - DNA, 15 bp, Homo sapiens
cactccctcttctca

SEQ ID NO: 49191 - DNA, 15 bp, Homo sapiens
ccactccctcttctc

SEQ ID NO: 49192 - DNA, 15 bp, Homo sapiens
tccactccctcttct

SEQ ID NO: 49193 - DNA, 15 bp, Homo sapiens
gtccactccctcttc

SEQ ID NO: 49194 - DNA, 15 bp, Homo sapiens
tgtccactccctctt

SEQ ID NO: 49195 - DNA, 15 bp, Homo sapiens
ctgtccactccctct

SEQ ID NO: 49196 - DNA, 15 bp, Homo sapiens
tctgtccactccctc

SEQ ID NO: 49197 - DNA, 15 bp, Homo sapiens
atctgtccactccct

SEQ ID NO: 49198 - DNA, 15 bp, Homo sapiens
tatctgtccactccc

SEQ ID NO: 49199 - DNA, 15 bp, Homo sapiens
atatctgtccactcc

SEQ ID NO: 49200 - DNA, 15 bp, Homo sapiens
aatatctgtccactc

SEQ ID NO: 49201 - DNA, 15 bp, Homo sapiens
aaatatctgtccact

SEQ ID NO: 49202 - DNA, 15 bp, Homo sapiens
gaaatatctgtccac

SEQ ID NO: 49203 - DNA, 15 bp, Homo sapiens
ggaaatatctgtcca

SEQ ID NO: 49204 - DNA, 15 bp, Homo sapiens
aggaaatatctgtcc

SEQ ID NO: 49205 - DNA, 15 bp, Homo sapiens
gaggaaatatctgtc

SEQ ID NO: 49206 - DNA, 15 bp, Homo sapiens
agaggaaatatctgt

SEQ ID NO: 49207 - DNA, 15 bp, Homo sapiens
cagaggaaatatctg

SEQ ID NO: 49208 - DNA, 15 bp, Homo sapiens
ccagaggaaatatct

SEQ ID NO: 49209 - DNA, 15 bp, Homo sapiens
accagaggaaatatc

SEQ ID NO: 49210 - DNA, 15 bp, Homo sapiens
gaccagaggaaatat

SEQ ID NO: 49211 - DNA, 15 bp, Homo sapiens
agaccagaggaaata

SEQ ID NO: 49212 - DNA, 15 bp, Homo sapiens
aagaccagaggaaat

SEQ ID NO: 49213 - DNA, 15 bp, Homo sapiens
taagaccagaggaaa

SEQ ID NO: 49214 - DNA, 15 bp, Homo sapiens
ttaagaccagaggaa

SEQ ID NO: 49215 - DNA, 15 bp, Homo sapiens
gttaagaccagagga

SEQ ID NO: 49216 - DNA, 15 bp, Homo sapiens
agttaagaccagagg

SEQ ID NO: 49217 - DNA, 15 bp, Homo sapiens
aagttaagaccagag

SEQ ID NO: 49218 - DNA, 15 bp, Homo sapiens
gaagttaagaccaga

SEQ ID NO: 49219 - DNA, 15 bp, Homo sapiens
tgaagttaagaccag

SEQ ID NO: 49220 - DNA, 15 bp, Homo sapiens
atgaagttaagacca

SEQ ID NO: 49221 - DNA, 15 bp, Homo sapiens
tatgaagttaagacc

SEQ ID NO: 49222 - DNA, 15 bp, Homo sapiens
atatgaagttaagac

SEQ ID NO: 49223 - DNA, 15 bp, Homo sapiens
gatatgaagttaaga

SEQ ID NO: 49224 - DNA, 15 bp, Homo sapiens
tgatatgaagttaag

SEQ ID NO: 49225 - DNA, 15 bp, Homo sapiens
ctgatatgaagttaa

SEQ ID NO: 49226 - DNA, 15 bp, Homo sapiens
gctgatatgaagtta

SEQ ID NO: 49227 - DNA, 15 bp, Homo sapiens
ggctgatatgaagtt

SEQ ID NO: 49228 - DNA, 15 bp, Homo sapiens
aggctgatatgaagt

SEQ ID NO: 49229 - DNA, 15 bp, Homo sapiens
gaggctgatatgaag

SEQ ID NO: 49230 - DNA, 15 bp, Homo sapiens
ggaggctgatatgaa

SEQ ID NO: 49231 - DNA, 15 bp, Homo sapiens
gggaggctgatatga

SEQ ID NO: 49232 - DNA, 15 bp, Homo sapiens
ggggaggctgatatg

SEQ ID NO: 49233 - DNA, 15 bp, Homo sapiens
aggggaggctgatat

SEQ ID NO: 49234 - DNA, 15 bp, Homo sapiens
taggggaggctgata

SEQ ID NO: 49235 - DNA, 15 bp, Homo sapiens
ctaggggaggctgat

SEQ ID NO: 49236 - DNA, 15 bp, Homo sapiens
tctaggggaggctga

SEQ ID NO: 49237 - DNA, 15 bp, Homo sapiens
gtctaggggaggctg

SEQ ID NO: 49238 - DNA, 15 bp, Homo sapiens
agtctaggggaggct

SEQ ID NO: 49239 - DNA, 15 bp, Homo sapiens
aagtctaggggaggc

SEQ ID NO: 49240 - DNA, 15 bp, Homo sapiens
gaagtctaggggagg

SEQ ID NO: 49241 - DNA, 15 bp, Homo sapiens
ggaagtctaggggag

SEQ ID NO: 49242 - DNA, 15 bp, Homo sapiens
tggaagtctagggga

SEQ ID NO: 49243 - DNA, 15 bp, Homo sapiens
ttggaagtctagggg

SEQ ID NO: 49244 - DNA, 15 bp, Homo sapiens
tttggaagtctaggg

SEQ ID NO: 49245 - DNA, 15 bp, Homo sapiens
atttggaagtctagg

SEQ ID NO: 49246 - DNA, 15 bp, Homo sapiens
tatttggaagtctag

SEQ ID NO: 49247 - DNA, 15 bp, Homo sapiens
atatttggaagtcta

SEQ ID NO: 49248 - DNA, 15 bp, Homo sapiens
gatatttggaagtct

SEQ ID NO: 49249 - DNA, 15 bp, Homo sapiens
ggatatttggaagtc

SEQ ID NO: 49250 - DNA, 15 bp, Homo sapiens
tggatatttggaagt

SEQ ID NO: 49251 - DNA, 15 bp, Homo sapiens
atggatatttggaag

SEQ ID NO: 49252 - DNA, 15 bp, Homo sapiens
tatggatatttggaa

SEQ ID NO: 49253 - DNA, 15 bp, Homo sapiens
gtatggatatttgga

SEQ ID NO: 49254 - DNA, 15 bp, Homo sapiens
ggtatggatatttgg

SEQ ID NO: 49255 - DNA, 15 bp, Homo sapiens
aggtatggatatttg

SEQ ID NO: 49256 - DNA, 15 bp, Homo sapiens
caggtatggatattt

SEQ ID NO: 49257 - DNA, 15 bp, Homo sapiens
gcaggtatggatatt

SEQ ID NO: 49258 - DNA, 15 bp, Homo sapiens
agcaggtatggatat

SEQ ID NO: 49259 - DNA, 15 bp, Homo sapiens
cagcaggtatggata

SEQ ID NO: 49260 - DNA, 15 bp, Homo sapiens
ccagcaggtatggat

SEQ ID NO: 49261 - DNA, 15 bp, Homo sapiens
accagcaggtatgga

SEQ ID NO: 49262 - DNA, 15 bp, Homo sapiens
aaccagcaggtatgg

SEQ ID NO: 49263 - DNA, 15 bp, Homo sapiens
taaccagcaggtatg

SEQ ID NO: 49264 - DNA, 15 bp, Homo sapiens
ataaccagcaggtat

SEQ ID NO: 49265 - DNA, 15 bp, Homo sapiens
tataaccagcaggta

SEQ ID NO: 49266 - DNA, 15 bp, Homo sapiens
ttataaccagcaggt

SEQ ID NO: 49267 - DNA, 15 bp, Homo sapiens
attataaccagcagg

SEQ ID NO: 49268 - DNA, 15 bp, Homo sapiens
aattataaccagcag

SEQ ID NO: 49269 - DNA, 15 bp, Homo sapiens
taattataaccagca

SEQ ID NO: 49270 - DNA, 15 bp, Homo sapiens
ctaattataaccagc

SEQ ID NO: 49271 - DNA, 15 bp, Homo sapiens
actaattataaccag

SEQ ID NO: 49272 - DNA, 15 bp, Homo sapiens
cactaattataacca

SEQ ID NO: 49273 - DNA, 15 bp, Homo sapiens
ccactaattataacc

SEQ ID NO: 49274 - DNA, 15 bp, Homo sapiens
accactaattataac

SEQ ID NO: 49275 - DNA, 15 bp, Homo sapiens
caccactaattataa

SEQ ID NO: 49276 - DNA, 15 bp, Homo sapiens
acaccactaattata

SEQ ID NO: 49277 - DNA, 15 bp, Homo sapiens
aacaccactaattat

SEQ ID NO: 49278 - DNA, 15 bp, Homo sapiens
aaacaccactaatta

SEQ ID NO: 49279 - DNA, 15 bp, Homo sapiens
aaaacaccactaatt

SEQ ID NO: 49280 - DNA, 15 bp, Homo sapiens
gaaaacaccactaat

SEQ ID NO: 49281 - DNA, 15 bp, Homo sapiens
tgaaaacaccactaa

SEQ ID NO: 49282 - DNA, 15 bp, Homo sapiens
ctgaaaacaccacta

SEQ ID NO: 49283 - DNA, 15 bp, Homo sapiens
gctgaaaacaccact

SEQ ID NO: 49284 - DNA, 15 bp, Homo sapiens
ggctgaaaacaccac

SEQ ID NO: 49285 - DNA, 15 bp, Homo sapiens
aggctgaaaacacca

SEQ ID NO: 49286 - DNA, 15 bp, Homo sapiens
gaggctgaaaacacc

SEQ ID NO: 49287 - DNA, 15 bp, Homo sapiens
agaggctgaaaacac

SEQ ID NO: 49288 - DNA, 15 bp, Homo sapiens
cagaggctgaaaaca

SEQ ID NO: 49289 - DNA, 15 bp, Homo sapiens
tcagaggctgaaaac

SEQ ID NO: 49290 - DNA, 15 bp, Homo sapiens
atcagaggctgaaaa

SEQ ID NO: 49291 - DNA, 15 bp, Homo sapiens
aatcagaggctgaaa

SEQ ID NO: 49292 - DNA, 15 bp, Homo sapiens
gaatcagaggctgaa

SEQ ID NO: 49293 - DNA, 15 bp, Homo sapiens
agaatcagaggctga

SEQ ID NO: 49294 - DNA, 15 bp, Homo sapiens
cagaatcagaggctg

SEQ ID NO: 49295 - DNA, 15 bp, Homo sapiens
acagaatcagaggct

SEQ ID NO: 49296 - DNA, 15 bp, Homo sapiens
gacagaatcagaggc

SEQ ID NO: 49297 - DNA, 15 bp, Homo sapiens
tgacagaatcagagg

SEQ ID NO: 49298 - DNA, 15 bp, Homo sapiens
gtgacagaatcagag

SEQ ID NO: 49299 - DNA, 15 bp, Homo sapiens
ggtgacagaatcaga

SEQ ID NO: 49300 - DNA, 15 bp, Homo sapiens
tggtgacagaatcag

SEQ ID NO: 49301 - DNA, 15 bp, Homo sapiens
ctggtgacagaatca

SEQ ID NO: 49302 - DNA, 15 bp, Homo sapiens
cctggtgacagaatc

SEQ ID NO: 49303 - DNA, 15 bp, Homo sapiens
ccctggtgacagaat

SEQ ID NO: 49304 - DNA, 15 bp, Homo sapiens
cccctggtgacagaa

SEQ ID NO: 49305 - DNA, 15 bp, Homo sapiens
acccctggtgacaga

SEQ ID NO: 49306 - DNA, 15 bp, Homo sapiens
aacccctggtgacag

SEQ ID NO: 49307 - DNA, 15 bp, Homo sapiens
aaacccctggtgaca

SEQ ID NO: 49308 - DNA, 15 bp, Homo sapiens
aaaacccctggtgac

SEQ ID NO: 49309 - DNA, 15 bp, Homo sapiens
taaaacccctggtga

SEQ ID NO: 49310 - DNA, 15 bp, Homo sapiens
ctaaaacccctggtg

SEQ ID NO: 49311 - DNA, 15 bp, Homo sapiens
tctaaaacccctggt

SEQ ID NO: 49312 - DNA, 15 bp, Homo sapiens
ttctaaaacccctgg

SEQ ID NO: 49313 - DNA, 15 bp, Homo sapiens
attctaaaacccctg

SEQ ID NO: 49314 - DNA, 15 bp, Homo sapiens
gattctaaaacccct

SEQ ID NO: 49315 - DNA, 15 bp, Homo sapiens
tgattctaaaacccc

SEQ ID NO: 49316 - DNA, 15 bp, Homo sapiens
atgattctaaaaccc

SEQ ID NO: 49317 - DNA, 15 bp, Homo sapiens
tatgattctaaaacc

SEQ ID NO: 49318 - DNA, 15 bp, Homo sapiens
ttatgattctaaaac

SEQ ID NO: 49319 - DNA, 15 bp, Homo sapiens
tttatgattctaaaa

SEQ ID NO: 49320 - DNA, 15 bp, Homo sapiens
atttatgattctaaa

SEQ ID NO: 49321 - DNA, 15 bp, Homo sapiens
gatttatgattctaa

SEQ ID NO: 49322 - DNA, 15 bp, Homo sapiens
ggatttatgattcta

SEQ ID NO: 49323 - DNA, 15 bp, Homo sapiens
tggatttatgattct

SEQ ID NO: 49324 - DNA, 15 bp, Homo sapiens
ctggatttatgattc

SEQ ID NO: 49325 - DNA, 15 bp, Homo sapiens
tctggatttatgatt

SEQ ID NO: 49326 - DNA, 15 bp, Homo sapiens
atctggatttatgat

SEQ ID NO: 49327 - DNA, 15 bp, Homo sapiens
aatctggatttatga

SEQ ID NO: 49328 - DNA, 15 bp, Homo sapiens
caatctggatttatg

SEQ ID NO: 49329 - DNA, 15 bp, Homo sapiens
tcaatctggatttat

SEQ ID NO: 49330 - DNA, 15 bp, Homo sapiens
atcaatctggattta

SEQ ID NO: 49331 - DNA, 15 bp, Homo sapiens
gatcaatctggattt

SEQ ID NO: 49332 - DNA, 15 bp, Homo sapiens
agatcaatctggatt

SEQ ID NO: 49333 - DNA, 15 bp, Homo sapiens
aagatcaatctggat

SEQ ID NO: 49334 - DNA, 15 bp, Homo sapiens
caagatcaatctgga

SEQ ID NO: 49335 - DNA, 15 bp, Homo sapiens
ccaagatcaatctgg

SEQ ID NO: 49336 - DNA, 15 bp, Homo sapiens
cccaagatcaatctg

SEQ ID NO: 49337 - DNA, 15 bp, Homo sapiens
tcccaagatcaatct

SEQ ID NO: 49338 - DNA, 15 bp, Homo sapiens
ctcccaagatcaatc

SEQ ID NO: 49339 - DNA, 15 bp, Homo sapiens
actcccaagatcaat

SEQ ID NO: 49340 - DNA, 15 bp, Homo sapiens
cactcccaagatcaa

SEQ ID NO: 49341 - DNA, 15 bp, Homo sapiens
acactcccaagatca

SEQ ID NO: 49342 - DNA, 15 bp, Homo sapiens
tacactcccaagatc

SEQ ID NO: 49343 - DNA, 15 bp, Homo sapiens
ttacactcccaagat

SEQ ID NO: 49344 - DNA, 15 bp, Homo sapiens
tttacactcccaaga

SEQ ID NO: 49345 - DNA, 15 bp, Homo sapiens
ttttacactcccaag

SEQ ID NO: 49346 - DNA, 15 bp, Homo sapiens
tttttacactcccaa

SEQ ID NO: 49347 - DNA, 15 bp, Homo sapiens
ttttttacactccca

SEQ ID NO: 49348 - DNA, 15 bp, Homo sapiens
gttttttacactccc

SEQ ID NO: 49349 - DNA, 15 bp, Homo sapiens
agttttttacactcc

SEQ ID NO: 49350 - DNA, 15 bp, Homo sapiens
cagttttttacactc

SEQ ID NO: 49351 - DNA, 15 bp, Homo sapiens
tcagttttttacact

SEQ ID NO: 49352 - DNA, 15 bp, Homo sapiens
ctcagttttttacac

SEQ ID NO: 49353 - DNA, 15 bp, Homo sapiens
cctcagttttttaca

SEQ ID NO: 49354 - DNA, 15 bp, Homo sapiens
gcctcagttttttac

SEQ ID NO: 49355 - DNA, 15 bp, Homo sapiens
agcctcagtttttta

SEQ ID NO: 49356 - DNA, 15 bp, Homo sapiens
gagcctcagtttttt

SEQ ID NO: 49357 - DNA, 15 bp, Homo sapiens
agagcctcagttttt

SEQ ID NO: 49358 - DNA, 15 bp, Homo sapiens
aagagcctcagtttt

SEQ ID NO: 49359 - DNA, 15 bp, Homo sapiens
aaagagcctcagttt

SEQ ID NO: 49360 - DNA, 15 bp, Homo sapiens
taaagagcctcagtt

SEQ ID NO: 49361 - DNA, 15 bp, Homo sapiens
ctaaagagcctcagt

SEQ ID NO: 49362 - DNA, 15 bp, Homo sapiens
gctaaagagcctcag

SEQ ID NO: 49363 - DNA, 15 bp, Homo sapiens
agctaaagagcctca

SEQ ID NO: 49364 - DNA, 15 bp, Homo sapiens
aagctaaagagcctc

SEQ ID NO: 49365 - DNA, 15 bp, Homo sapiens
gaagctaaagagcct

SEQ ID NO: 49366 - DNA, 15 bp, Homo sapiens
agaagctaaagagcc

SEQ ID NO: 49367 - DNA, 15 bp, Homo sapiens
aagaagctaaagagc

SEQ ID NO: 49368 - DNA, 15 bp, Homo sapiens
taagaagctaaagag

SEQ ID NO: 49369 - DNA, 15 bp, Homo sapiens
ctaagaagctaaaga

SEQ ID NO: 49370 - DNA, 15 bp, Homo sapiens
cctaagaagctaaag

SEQ ID NO: 49371 - DNA, 15 bp, Homo sapiens
tcctaagaagctaaa

SEQ ID NO: 49372 - DNA, 15 bp, Homo sapiens
gtcctaagaagctaa

SEQ ID NO: 49373 - DNA, 15 bp, Homo sapiens
tgtcctaagaagcta

SEQ ID NO: 49374 - DNA, 15 bp, Homo sapiens
ctgtcctaagaagct

SEQ ID NO: 49375 - DNA, 15 bp, Homo sapiens
gctgtcctaagaagc

SEQ ID NO: 49376 - DNA, 15 bp, Homo sapiens
tgctgtcctaagaag

SEQ ID NO: 49377 - DNA, 15 bp, Homo sapiens
gtgctgtcctaagaa

SEQ ID NO: 49378 - DNA, 15 bp, Homo sapiens
agtgctgtcctaaga

SEQ ID NO: 49379 - DNA, 15 bp, Homo sapiens
aagtgctgtcctaag

SEQ ID NO: 49380 - DNA, 15 bp, Homo sapiens
gaagtgctgtcctaa

SEQ ID NO: 49381 - DNA, 15 bp, Homo sapiens
ggaagtgctgtccta

SEQ ID NO: 49382 - DNA, 15 bp, Homo sapiens
aggaagtgctgtcct

SEQ ID NO: 49383 - DNA, 15 bp, Homo sapiens
caggaagtgctgtcc

SEQ ID NO: 49384 - DNA, 15 bp, Homo sapiens
tcaggaagtgctgtc

SEQ ID NO: 49385 - DNA, 15 bp, Homo sapiens
atcaggaagtgctgt

SEQ ID NO: 49386 - DNA, 15 bp, Homo sapiens
aatcaggaagtgctg

SEQ ID NO: 49387 - DNA, 15 bp, Homo sapiens
aaatcaggaagtgct

SEQ ID NO: 49388 - DNA, 15 bp, Homo sapiens
aaaatcaggaagtgc

SEQ ID NO: 49389 - DNA, 15 bp, Homo sapiens
caaaatcaggaagtg

SEQ ID NO: 49390 - DNA, 15 bp, Homo sapiens
acaaaatcaggaagt

SEQ ID NO: 49391 - DNA, 15 bp, Homo sapiens
aacaaaatcaggaag

SEQ ID NO: 49392 - DNA, 15 bp, Homo sapiens
aaacaaaatcaggaa

SEQ ID NO: 49393 - DNA, 15 bp, Homo sapiens
aaaacaaaatcagga

SEQ ID NO: 49394 - DNA, 15 bp, Homo sapiens
gaaaacaaaatcagg

SEQ ID NO: 49395 - DNA, 15 bp, Homo sapiens
tgaaaacaaaatcag

SEQ ID NO: 49396 - DNA, 15 bp, Homo sapiens
ttgaaaacaaaatca

SEQ ID NO: 49397 - DNA, 15 bp, Homo sapiens
gttgaaaacaaaatc

SEQ ID NO: 49398 - DNA, 15 bp, Homo sapiens
agttgaaaacaaaat

SEQ ID NO: 49399 - DNA, 15 bp, Homo sapiens
aagttgaaaacaaaa

SEQ ID NO: 49400 - DNA, 15 bp, Homo sapiens
gaagttgaaaacaaa

SEQ ID NO: 49401 - DNA, 15 bp, Homo sapiens
agaagttgaaaacaa

SEQ ID NO: 49402 - DNA, 15 bp, Homo sapiens
tagaagttgaaaaca

SEQ ID NO: 49403 - DNA, 15 bp, Homo sapiens
ttagaagttgaaaac

SEQ ID NO: 49404 - DNA, 15 bp, Homo sapiens
attagaagttgaaaa

SEQ ID NO: 49405 - DNA, 15 bp, Homo sapiens
gattagaagttgaaa

SEQ ID NO: 49406 - DNA, 15 bp, Homo sapiens
ggattagaagttgaa

SEQ ID NO: 49407 - DNA, 15 bp, Homo sapiens
aggattagaagttga

SEQ ID NO: 49408 - DNA, 15 bp, Homo sapiens
aaggattagaagttg

SEQ ID NO: 49409 - DNA, 15 bp, Homo sapiens
aaaggattagaagtt

SEQ ID NO: 49410 - DNA, 15 bp, Homo sapiens
caaaggattagaagt

SEQ ID NO: 49411 - DNA, 15 bp, Homo sapiens
tcaaaggattagaag

SEQ ID NO: 49412 - DNA, 15 bp, Homo sapiens
ctcaaaggattagaa

SEQ ID NO: 49413 - DNA, 15 bp, Homo sapiens
actcaaaggattaga

SEQ ID NO: 49414 - DNA, 15 bp, Homo sapiens
cactcaaaggattag

SEQ ID NO: 49415 - DNA, 15 bp, Homo sapiens
acactcaaaggatta

SEQ ID NO: 49416 - DNA, 15 bp, Homo sapiens
aacactcaaaggatt

SEQ ID NO: 49417 - DNA, 15 bp, Homo sapiens
aaacactcaaaggat

SEQ ID NO: 49418 - DNA, 15 bp, Homo sapiens
aaaacactcaaagga

SEQ ID NO: 49419 - DNA, 15 bp, Homo sapiens
aaaaacactcaaagg

SEQ ID NO: 49420 - DNA, 15 bp, Homo sapiens
gaaaaacactcaaag

SEQ ID NO: 49421 - DNA, 15 bp, Homo sapiens
tgaaaaacactcaaa

SEQ ID NO: 49422 - DNA, 15 bp, Homo sapiens
atgaaaaacactcaa

SEQ ID NO: 49423 - DNA, 15 bp, Homo sapiens
aatgaaaaacactca

SEQ ID NO: 49424 - DNA, 15 bp, Homo sapiens
gaatgaaaaacactc

SEQ ID NO: 49425 - DNA, 15 bp, Homo sapiens
agaatgaaaaacact

SEQ ID NO: 49426 - DNA, 15 bp, Homo sapiens
cagaatgaaaaacac

SEQ ID NO: 49427 - DNA, 15 bp, Homo sapiens
gcagaatgaaaaaca

SEQ ID NO: 49428 - DNA, 15 bp, Homo sapiens
tgcagaatgaaaaac

SEQ ID NO: 49429 - DNA, 15 bp, Homo sapiens
ctgcagaatgaaaaa

SEQ ID NO: 49430 - DNA, 15 bp, Homo sapiens
tctgcagaatgaaaa

SEQ ID NO: 49431 - DNA, 15 bp, Homo sapiens
atctgcagaatgaaa

SEQ ID NO: 49432 - DNA, 15 bp, Homo sapiens
catctgcagaatgaa

SEQ ID NO: 49433 - DNA, 15 bp, Homo sapiens
gcatctgcagaatga

SEQ ID NO: 49434 - DNA, 15 bp, Homo sapiens
agcatctgcagaatg

SEQ ID NO: 49435 - DNA, 15 bp, Homo sapiens
cagcatctgcagaat

SEQ ID NO: 49436 - DNA, 15 bp, Homo sapiens
tcagcatctgcagaa

SEQ ID NO: 49437 - DNA, 15 bp, Homo sapiens
ctcagcatctgcaga

SEQ ID NO: 49438 - DNA, 15 bp, Homo sapiens
actcagcatctgcag

SEQ ID NO: 49439 - DNA, 15 bp, Homo sapiens
aactcagcatctgca

SEQ ID NO: 49440 - DNA, 15 bp, Homo sapiens
aaactcagcatctgc

SEQ ID NO: 49441 - DNA, 15 bp, Homo sapiens
caaactcagcatctg

SEQ ID NO: 49442 - DNA, 15 bp, Homo sapiens
acaaactcagcatct

SEQ ID NO: 49443 - DNA, 15 bp, Homo sapiens
cacaaactcagcatc

SEQ ID NO: 49444 - DNA, 15 bp, Homo sapiens
acacaaactcagcat

SEQ ID NO: 49445 - DNA, 15 bp, Homo sapiens
cacacaaactcagca

SEQ ID NO: 49446 - DNA, 15 bp, Homo sapiens
acacacaaactcagc

SEQ ID NO: 49447 - DNA, 15 bp, Homo sapiens
cacacacaaactcag

SEQ ID NO: 49448 - DNA, 15 bp, Homo sapiens
tcacacacaaactca

SEQ ID NO: 49449 - DNA, 15 bp, Homo sapiens
ttcacacacaaactc

SEQ ID NO: 49450 - DNA, 15 bp, Homo sapiens
gttcacacacaaact

SEQ ID NO: 49451 - DNA, 15 bp, Homo sapiens
cgttcacacacaaac

SEQ ID NO: 49452 - DNA, 15 bp, Homo sapiens
ccgttcacacacaaa

SEQ ID NO: 49453 - DNA, 15 bp, Homo sapiens
tccgttcacacacaa

SEQ ID NO: 49454 - DNA, 15 bp, Homo sapiens
gtccgttcacacaca

SEQ ID NO: 49455 - DNA, 15 bp, Homo sapiens
tgtccgttcacacac

SEQ ID NO: 49456 - DNA, 15 bp, Homo sapiens
gtgtccgttcacaca

SEQ ID NO: 49457 - DNA, 15 bp, Homo sapiens
agtgtccgttcacac

SEQ ID NO: 49458 - DNA, 15 bp, Homo sapiens
cagtgtccgttcaca

SEQ ID NO: 49459 - DNA, 15 bp, Homo sapiens
tcagtgtccgttcac

SEQ ID NO: 49460 - DNA, 15 bp, Homo sapiens
ttcagtgtccgttca

SEQ ID NO: 49461 - DNA, 15 bp, Homo sapiens
tttcagtgtccgttc

SEQ ID NO: 49462 - DNA, 15 bp, Homo sapiens
atttcagtgtccgtt

SEQ ID NO: 49463 - DNA, 15 bp, Homo sapiens
tatttcagtgtccgt

SEQ ID NO: 49464 - DNA, 15 bp, Homo sapiens
atatttcagtgtccg

SEQ ID NO: 49465 - DNA, 15 bp, Homo sapiens
aatatttcagtgtcc

SEQ ID NO: 49466 - DNA, 15 bp, Homo sapiens
aaatatttcagtgtc

SEQ ID NO: 49467 - DNA, 15 bp, Homo sapiens
aaaatatttcagtgt

SEQ ID NO: 49468 - DNA, 15 bp, Homo sapiens
gaaaatatttcagtg

SEQ ID NO: 49469 - DNA, 15 bp, Homo sapiens
agaaaatatttcagt

SEQ ID NO: 49470 - DNA, 15 bp, Homo sapiens
tagaaaatatttcag

SEQ ID NO: 49471 - DNA, 15 bp, Homo sapiens
ctagaaaatatttca

SEQ ID NO: 49472 - DNA, 15 bp, Homo sapiens
cctagaaaatatttc

SEQ ID NO: 49473 - DNA, 15 bp, Homo sapiens
tcctagaaaatattt

SEQ ID NO: 49474 - DNA, 15 bp, Homo sapiens
ttcctagaaaatatt

SEQ ID NO: 49475 - DNA, 15 bp, Homo sapiens
attcctagaaaatat

SEQ ID NO: 49476 - DNA, 15 bp, Homo sapiens
aattcctagaaaata

SEQ ID NO: 49477 - DNA, 15 bp, Homo sapiens
caattcctagaaaat

SEQ ID NO: 49478 - DNA, 15 bp, Homo sapiens
gcaattcctagaaaa

SEQ ID NO: 49479 - DNA, 15 bp, Homo sapiens
cgcaattcctagaaa

SEQ ID NO: 49480 - DNA, 15 bp, Homo sapiens
ccgcaattcctagaa

SEQ ID NO: 49481 - DNA, 15 bp, Homo sapiens
cccgcaattcctaga

SEQ ID NO: 49482 - DNA, 15 bp, Homo sapiens
tcccgcaattcctag

SEQ ID NO: 49483 - DNA, 15 bp, Homo sapiens
ctcccgcaattccta

SEQ ID NO: 49484 - DNA, 15 bp, Homo sapiens
cctcccgcaattcct

SEQ ID NO: 49485 - DNA, 15 bp, Homo sapiens
tcctcccgcaattcc

SEQ ID NO: 49486 - DNA, 15 bp, Homo sapiens
ttcctcccgcaattc

SEQ ID NO: 49487 - DNA, 15 bp, Homo sapiens
tttcctcccgcaatt

SEQ ID NO: 49488 - DNA, 15 bp, Homo sapiens
ttttcctcccgcaat

SEQ ID NO: 49489 - DNA, 15 bp, Homo sapiens
attttcctcccgcaa

SEQ ID NO: 49490 - DNA, 15 bp, Homo sapiens
cattttcctcccgca

SEQ ID NO: 49491 - DNA, 15 bp, Homo sapiens
ccattttcctcccgc

SEQ ID NO: 49492 - DNA, 15 bp, Homo sapiens
cccattttcctcccg

SEQ ID NO: 49493 - DNA, 15 bp, Homo sapiens
acccattttcctccc

SEQ ID NO: 49494 - DNA, 15 bp, Homo sapiens
tacccattttcctcc

SEQ ID NO: 49495 - DNA, 15 bp, Homo sapiens
ctacccattttcctc

SEQ ID NO: 49496 - DNA, 15 bp, Homo sapiens
actacccattttcct

SEQ ID NO: 49497 - DNA, 15 bp, Homo sapiens
aactacccattttcc

SEQ ID NO: 49498 - DNA, 15 bp, Homo sapiens
taactacccattttc

SEQ ID NO: 49499 - DNA, 15 bp, Homo sapiens
ctaactacccatttt

SEQ ID NO: 49500 - DNA, 15 bp, Homo sapiens
gctaactacccattt

SEQ ID NO: 49501 - DNA, 15 bp, Homo sapiens
agctaactacccatt

SEQ ID NO: 49502 - DNA, 15 bp, Homo sapiens
tagctaactacccat

SEQ ID NO: 49503 - DNA, 15 bp, Homo sapiens
atagctaactaccca

SEQ ID NO: 49504 - DNA, 15 bp, Homo sapiens
aatagctaactaccc

SEQ ID NO: 49505 - DNA, 15 bp, Homo sapiens
aaatagctaactacc

SEQ ID NO: 49506 - DNA, 15 bp, Homo sapiens
gaaatagctaactac

SEQ ID NO: 49507 - DNA, 15 bp, Homo sapiens
agaaatagctaacta

SEQ ID NO: 49508 - DNA, 15 bp, Homo sapiens
cagaaatagctaact

SEQ ID NO: 49509 - DNA, 15 bp, Homo sapiens
acagaaatagctaac

SEQ ID NO: 49510 - DNA, 15 bp, Homo sapiens
tacagaaatagctaa

SEQ ID NO: 49511 - DNA, 15 bp, Homo sapiens
ttacagaaatagcta

SEQ ID NO: 49512 - DNA, 15 bp, Homo sapiens
cttacagaaatagct

SEQ ID NO: 49513 - DNA, 15 bp, Homo sapiens
acttacagaaatagc

SEQ ID NO: 49514 - DNA, 15 bp, Homo sapiens
tacttacagaaatag

SEQ ID NO: 49515 - DNA, 15 bp, Homo sapiens
atacttacagaaata

SEQ ID NO: 49516 - DNA, 15 bp, Homo sapiens
tatacttacagaaat

SEQ ID NO: 49517 - DNA, 15 bp, Homo sapiens
ttatacttacagaaa

SEQ ID NO: 49518 - DNA, 15 bp, Homo sapiens
attatacttacagaa

SEQ ID NO: 49519 - DNA, 15 bp, Homo sapiens
tattatacttacaga

SEQ ID NO: 49520 - DNA, 15 bp, Homo sapiens
gtattatacttacag

SEQ ID NO: 49521 - DNA, 15 bp, Homo sapiens
agtattatacttaca

SEQ ID NO: 49522 - DNA, 15 bp, Homo sapiens
tagtattatacttac

SEQ ID NO: 49523 - DNA, 15 bp, Homo sapiens
atagtattatactta

SEQ ID NO: 49524 - DNA, 15 bp, Homo sapiens
aatagtattatactt

SEQ ID NO: 49525 - DNA, 15 bp, Homo sapiens
aaatagtattatact

SEQ ID NO: 49526 - DNA, 15 bp, Homo sapiens
gaaatagtattatac

SEQ ID NO: 49527 - DNA, 15 bp, Homo sapiens
agaaatagtattata

SEQ ID NO: 49528 - DNA, 15 bp, Homo sapiens
gagaaatagtattat

SEQ ID NO: 49529 - DNA, 15 bp, Homo sapiens
ggagaaatagtatta

SEQ ID NO: 49530 - DNA, 15 bp, Homo sapiens
gggagaaatagtatt

SEQ ID NO: 49531 - DNA, 15 bp, Homo sapiens
ggggagaaatagtat

SEQ ID NO: 49532 - DNA, 15 bp, Homo sapiens
aggggagaaatagta

SEQ ID NO: 49533 - DNA, 15 bp, Homo sapiens
gaggggagaaatagt

SEQ ID NO: 49534 - DNA, 15 bp, Homo sapiens
ggaggggagaaatag

SEQ ID NO: 49535 - DNA, 15 bp, Homo sapiens
aggaggggagaaata

SEQ ID NO: 49536 - DNA, 15 bp, Homo sapiens
gaggaggggagaaat

SEQ ID NO: 49537 - DNA, 15 bp, Homo sapiens
ggaggaggggagaaa

SEQ ID NO: 49538 - DNA, 15 bp, Homo sapiens
gggaggaggggagaa

SEQ ID NO: 49539 - DNA, 15 bp, Homo sapiens
agggaggaggggaga

SEQ ID NO: 49540 - DNA, 15 bp, Homo sapiens
aagggaggaggggag

SEQ ID NO: 49541 - DNA, 15 bp, Homo sapiens
aaagggaggagggga

SEQ ID NO: 49542 - DNA, 15 bp, Homo sapiens
taaagggaggagggg

SEQ ID NO: 49543 - DNA, 15 bp, Homo sapiens
ttaaagggaggaggg

SEQ ID NO: 49544 - DNA, 15 bp, Homo sapiens
gttaaagggaggagg

SEQ ID NO: 49545 - DNA, 15 bp, Homo sapiens
tgttaaagggaggag

SEQ ID NO: 49546 - DNA, 15 bp, Homo sapiens
gtgttaaagggagga

SEQ ID NO: 49547 - DNA, 15 bp, Homo sapiens
ggtgttaaagggagg

SEQ ID NO: 49548 - DNA, 15 bp, Homo sapiens
aggtgttaaagggag

SEQ ID NO: 49549 - DNA, 15 bp, Homo sapiens
gaggtgttaaaggga

SEQ ID NO: 49550 - DNA, 15 bp, Homo sapiens
tgaggtgttaaaggg

SEQ ID NO: 49551 - DNA, 15 bp, Homo sapiens
ctgaggtgttaaagg

SEQ ID NO: 49552 - DNA, 15 bp, Homo sapiens
tctgaggtgttaaag

SEQ ID NO: 49553 - DNA, 15 bp, Homo sapiens
ttctgaggtgttaaa

SEQ ID NO: 49554 - DNA, 15 bp, Homo sapiens
attctgaggtgttaa

SEQ ID NO: 49555 - DNA, 15 bp, Homo sapiens
aattctgaggtgtta

SEQ ID NO: 49556 - DNA, 15 bp, Homo sapiens
caattctgaggtgtt

SEQ ID NO: 49557 - DNA, 15 bp, Homo sapiens
gcaattctgaggtgt

SEQ ID NO: 49558 - DNA, 15 bp, Homo sapiens
tgcaattctgaggtg

SEQ ID NO: 49559 - DNA, 15 bp, Homo sapiens
atgcaattctgaggt

SEQ ID NO: 49560 - DNA, 15 bp, Homo sapiens
aatgcaattctgagg

SEQ ID NO: 49561 - DNA, 15 bp, Homo sapiens
aaatgcaattctgag

SEQ ID NO: 49562 - DNA, 15 bp, Homo sapiens
aaaatgcaattctga

SEQ ID NO: 49563 - DNA, 15 bp, Homo sapiens
aaaaatgcaattctg

SEQ ID NO: 49564 - DNA, 15 bp, Homo sapiens
taaaaatgcaattct

SEQ ID NO: 49565 - DNA, 15 bp, Homo sapiens
gtaaaaatgcaattc

SEQ ID NO: 49566 - DNA, 15 bp, Homo sapiens
tgtaaaaatgcaatt

SEQ ID NO: 49567 - DNA, 15 bp, Homo sapiens
gtgtaaaaatgcaat

SEQ ID NO: 49568 - DNA, 15 bp, Homo sapiens
ggtgtaaaaatgcaa

SEQ ID NO: 49569 - DNA, 15 bp, Homo sapiens
aggtgtaaaaatgca

SEQ ID NO: 49570 - DNA, 15 bp, Homo sapiens
taggtgtaaaaatgc

SEQ ID NO: 49571 - DNA, 15 bp, Homo sapiens
ttaggtgtaaaaatg

SEQ ID NO: 49572 - DNA, 15 bp, Homo sapiens
gttaggtgtaaaaat

SEQ ID NO: 49573 - DNA, 15 bp, Homo sapiens
cgttaggtgtaaaaa

SEQ ID NO: 49574 - DNA, 15 bp, Homo sapiens
acgttaggtgtaaaa

SEQ ID NO: 49575 - DNA, 15 bp, Homo sapiens
aacgttaggtgtaaa

SEQ ID NO: 49576 - DNA, 15 bp, Homo sapiens
aaacgttaggtgtaa

SEQ ID NO: 49577 - DNA, 15 bp, Homo sapiens
taaacgttaggtgta

SEQ ID NO: 49578 - DNA, 15 bp, Homo sapiens
ttaaacgttaggtgt

SEQ ID NO: 49579 - DNA, 15 bp, Homo sapiens
gttaaacgttaggtg

SEQ ID NO: 49580 - DNA, 15 bp, Homo sapiens
tgttaaacgttaggt

SEQ ID NO: 49581 - DNA, 15 bp, Homo sapiens
gtgttaaacgttagg

SEQ ID NO: 49582 - DNA, 15 bp, Homo sapiens
ggtgttaaacgttag

SEQ ID NO: 49583 - DNA, 15 bp, Homo sapiens
aggtgttaaacgtta

SEQ ID NO: 49584 - DNA, 15 bp, Homo sapiens
taggtgttaaacgtt

SEQ ID NO: 49585 - DNA, 15 bp, Homo sapiens
ttaggtgttaaacgt

SEQ ID NO: 49586 - DNA, 15 bp, Homo sapiens
cttaggtgttaaacg

SEQ ID NO: 49587 - DNA, 15 bp, Homo sapiens
ccttaggtgttaaac

SEQ ID NO: 49588 - DNA, 15 bp, Homo sapiens
accttaggtgttaaa

SEQ ID NO: 49589 - DNA, 15 bp, Homo sapiens
aaccttaggtgttaa

SEQ ID NO: 49590 - DNA, 15 bp, Homo sapiens
aaaccttaggtgtta

SEQ ID NO: 49591 - DNA, 15 bp, Homo sapiens
aaaaccttaggtgtt

SEQ ID NO: 49592 - DNA, 15 bp, Homo sapiens
aaaaaccttaggtgt

SEQ ID NO: 49593 - DNA, 15 bp, Homo sapiens
caaaaaccttaggtg

SEQ ID NO: 49594 - DNA, 15 bp, Homo sapiens
gcaaaaaccttaggt

SEQ ID NO: 49595 - DNA, 15 bp, Homo sapiens
agcaaaaaccttagg

SEQ ID NO: 49596 - DNA, 15 bp, Homo sapiens
cagcaaaaaccttag

SEQ ID NO: 49597 - DNA, 15 bp, Homo sapiens
tcagcaaaaacctta

SEQ ID NO: 49598 - DNA, 15 bp, Homo sapiens
atcagcaaaaacctt

SEQ ID NO: 49599 - DNA, 15 bp, Homo sapiens
catcagcaaaaacct

SEQ ID NO: 49600 - DNA, 15 bp, Homo sapiens
gcatcagcaaaaacc

SEQ ID NO: 49601 - DNA, 15 bp, Homo sapiens
agcatcagcaaaaac

SEQ ID NO: 49602 - DNA, 15 bp, Homo sapiens
cagcatcagcaaaaa

SEQ ID NO: 49603 - DNA, 15 bp, Homo sapiens
tcagcatcagcaaaa

SEQ ID NO: 49604 - DNA, 15 bp, Homo sapiens
ctcagcatcagcaaa

SEQ ID NO: 49605 - DNA, 15 bp, Homo sapiens
actcagcatcagcaa

SEQ ID NO: 49606 - DNA, 15 bp, Homo sapiens
gactcagcatcagca

SEQ ID NO: 49607 - DNA, 15 bp, Homo sapiens
agactcagcatcagc

SEQ ID NO: 49608 - DNA, 15 bp, Homo sapiens
cagactcagcatcag

SEQ ID NO: 49609 - DNA, 15 bp, Homo sapiens
tcagactcagcatca

SEQ ID NO: 49610 - DNA, 15 bp, Homo sapiens
ctcagactcagcatc

SEQ ID NO: 49611 - DNA, 15 bp, Homo sapiens
actcagactcagcat

SEQ ID NO: 49612 - DNA, 15 bp, Homo sapiens
aactcagactcagca

SEQ ID NO: 49613 - DNA, 15 bp, Homo sapiens
taactcagactcagc

SEQ ID NO: 49614 - DNA, 15 bp, Homo sapiens
gtaactcagactcag

SEQ ID NO: 49615 - DNA, 15 bp, Homo sapiens
ggtaactcagactca

SEQ ID NO: 49616 - DNA, 15 bp, Homo sapiens
tggtaactcagactc

SEQ ID NO: 49617 - DNA, 15 bp, Homo sapiens
ttggtaactcagact

SEQ ID NO: 49618 - DNA, 15 bp, Homo sapiens
tttggtaactcagac

SEQ ID NO: 49619 - DNA, 15 bp, Homo sapiens
ttttggtaactcaga

SEQ ID NO: 49620 - DNA, 15 bp, Homo sapiens
cttttggtaactcag

SEQ ID NO: 49621 - DNA, 15 bp, Homo sapiens
ccttttggtaactca

SEQ ID NO: 49622 - DNA, 15 bp, Homo sapiens
accttttggtaactc

SEQ ID NO: 49623 - DNA, 15 bp, Homo sapiens
gaccttttggtaact

SEQ ID NO: 49624 - DNA, 15 bp, Homo sapiens
agaccttttggtaac

SEQ ID NO: 49625 - DNA, 15 bp, Homo sapiens
aagaccttttggtaa

SEQ ID NO: 49626 - DNA, 15 bp, Homo sapiens
aaagaccttttggta

SEQ ID NO: 49627 - DNA, 15 bp, Homo sapiens
taaagaccttttggt

SEQ ID NO: 49628 - DNA, 15 bp, Homo sapiens
ttaaagaccttttgg

SEQ ID NO: 49629 - DNA, 15 bp, Homo sapiens
attaaagaccttttg

SEQ ID NO: 49630 - DNA, 15 bp, Homo sapiens
aattaaagacctttt

SEQ ID NO: 49631 - DNA, 15 bp, Homo sapiens
caattaaagaccttt

SEQ ID NO: 49632 - DNA, 15 bp, Homo sapiens
acaattaaagacctt

SEQ ID NO: 49633 - DNA, 15 bp, Homo sapiens
tacaattaaagacct

SEQ ID NO: 49634 - DNA, 15 bp, Homo sapiens
ttacaattaaagacc

SEQ ID NO: 49635 - DNA, 15 bp, Homo sapiens
attacaattaaagac

SEQ ID NO: 49636 - DNA, 15 bp, Homo sapiens
tattacaattaaaga

SEQ ID NO: 49637 - DNA, 15 bp, Homo sapiens
gtattacaattaaag

SEQ ID NO: 49638 - DNA, 15 bp, Homo sapiens
agtattacaattaaa

SEQ ID NO: 49639 - DNA, 15 bp, Homo sapiens
tagtattacaattaa

SEQ ID NO: 49640 - DNA, 15 bp, Homo sapiens
ttagtattacaatta

SEQ ID NO: 49641 - DNA, 15 bp, Homo sapiens
tttagtattacaatt

SEQ ID NO: 49642 - DNA, 15 bp, Homo sapiens
gtttagtattacaat

SEQ ID NO: 49643 - DNA, 15 bp, Homo sapiens
agtttagtattacaa

SEQ ID NO: 49644 - DNA, 15 bp, Homo sapiens
tagtttagtattaca

SEQ ID NO: 49645 - DNA, 15 bp, Homo sapiens
gtagtttagtattac

SEQ ID NO: 49646 - DNA, 15 bp, Homo sapiens
agtagtttagtatta

SEQ ID NO: 49647 - DNA, 15 bp, Homo sapiens
aagtagtttagtatt

SEQ ID NO: 49648 - DNA, 15 bp, Homo sapiens
aaagtagtttagtat

SEQ ID NO: 49649 - DNA, 15 bp, Homo sapiens
aaaagtagtttagta

SEQ ID NO: 49650 - DNA, 15 bp, Homo sapiens
taaaagtagtttagt

SEQ ID NO: 49651 - DNA, 15 bp, Homo sapiens
ataaaagtagtttag

SEQ ID NO: 49652 - DNA, 15 bp, Homo sapiens
gataaaagtagttta

SEQ ID NO: 49653 - DNA, 15 bp, Homo sapiens
agataaaagtagttt

SEQ ID NO: 49654 - DNA, 15 bp, Homo sapiens
aagataaaagtagtt

SEQ ID NO: 49655 - DNA, 15 bp, Homo sapiens
aaagataaaagtagt

SEQ ID NO: 49656 - DNA, 15 bp, Homo sapiens
taaagataaaagtag

SEQ ID NO: 49657 - DNA, 15 bp, Homo sapiens
ttaaagataaaagta

SEQ ID NO: 49658 - DNA, 15 bp, Homo sapiens
attaaagataaaagt

SEQ ID NO: 49659 - DNA, 15 bp, Homo sapiens
tattaaagataaaag

SEQ ID NO: 49660 - DNA, 15 bp, Homo sapiens
atattaaagataaaa

SEQ ID NO: 49661 - DNA, 15 bp, Homo sapiens
gatattaaagataaa

SEQ ID NO: 49662 - DNA, 15 bp, Homo sapiens
tgatattaaagataa

SEQ ID NO: 49663 - DNA, 15 bp, Homo sapiens
gtgatattaaagata

SEQ ID NO: 49664 - DNA, 15 bp, Homo sapiens
agtgatattaaagat

SEQ ID NO: 49665 - DNA, 15 bp, Homo sapiens
aagtgatattaaaga

SEQ ID NO: 49666 - DNA, 15 bp, Homo sapiens
aaagtgatattaaag

SEQ ID NO: 49667 - DNA, 15 bp, Homo sapiens
caaagtgatattaaa

SEQ ID NO: 49668 - DNA, 15 bp, Homo sapiens
acaaagtgatattaa

SEQ ID NO: 49669 - DNA, 15 bp, Homo sapiens
aacaaagtgatatta

SEQ ID NO: 49670 - DNA, 15 bp, Homo sapiens
gaacaaagtgatatt

SEQ ID NO: 49671 - DNA, 15 bp, Homo sapiens
tgaacaaagtgatat

SEQ ID NO: 49672 - DNA, 15 bp, Homo sapiens
ctgaacaaagtgata

SEQ ID NO: 49673 - DNA, 15 bp, Homo sapiens
tctgaacaaagtgat

SEQ ID NO: 49674 - DNA, 15 bp, Homo sapiens
atctgaacaaagtga

SEQ ID NO: 49675 - DNA, 15 bp, Homo sapiens
tatctgaacaaagtg

SEQ ID NO: 49676 - DNA, 15 bp, Homo sapiens
ttatctgaacaaagt

SEQ ID NO: 49677 - DNA, 15 bp, Homo sapiens
cttatctgaacaaag

SEQ ID NO: 49678 - DNA, 15 bp, Homo sapiens
gcttatctgaacaaa

SEQ ID NO: 49679 - DNA, 15 bp, Homo sapiens
agcttatctgaacaa

SEQ ID NO: 49680 - DNA, 15 bp, Homo sapiens
cagcttatctgaaca

SEQ ID NO: 49681 - DNA, 15 bp, Homo sapiens
ccagcttatctgaac

SEQ ID NO: 49682 - DNA, 15 bp, Homo sapiens
accagcttatctgaa

SEQ ID NO: 49683 - DNA, 15 bp, Homo sapiens
caccagcttatctga

SEQ ID NO: 49684 - DNA, 15 bp, Homo sapiens
tcaccagcttatctg

SEQ ID NO: 49685 - DNA, 15 bp, Homo sapiens
atcaccagcttatct

SEQ ID NO: 49686 - DNA, 15 bp, Homo sapiens
catcaccagcttatc

SEQ ID NO: 49687 - DNA, 15 bp, Homo sapiens
gcatcaccagcttat

SEQ ID NO: 49688 - DNA, 15 bp, Homo sapiens
agcatcaccagctta

SEQ ID NO: 49689 - DNA, 15 bp, Homo sapiens
cagcatcaccagctt

SEQ ID NO: 49690 - DNA, 15 bp, Homo sapiens
ccagcatcaccagct

SEQ ID NO: 49691 - DNA, 15 bp, Homo sapiens
cccagcatcaccagc

SEQ ID NO: 49692 - DNA, 15 bp, Homo sapiens
tcccagcatcaccag

SEQ ID NO: 49693 - DNA, 15 bp, Homo sapiens
ttcccagcatcacca

SEQ ID NO: 49694 - DNA, 15 bp, Homo sapiens
tttcccagcatcacc

SEQ ID NO: 49695 - DNA, 15 bp, Homo sapiens
ttttcccagcatcac

SEQ ID NO: 49696 - DNA, 15 bp, Homo sapiens
attttcccagcatca

SEQ ID NO: 49697 - DNA, 15 bp, Homo sapiens
cattttcccagcatc

SEQ ID NO: 49698 - DNA, 15 bp, Homo sapiens
ccattttcccagcat

SEQ ID NO: 49699 - DNA, 15 bp, Homo sapiens
cccattttcccagca

SEQ ID NO: 49700 - DNA, 15 bp, Homo sapiens
acccattttcccagc

SEQ ID NO: 49701 - DNA, 15 bp, Homo sapiens
gacccattttcccag

SEQ ID NO: 49702 - DNA, 15 bp, Homo sapiens
agacccattttccca

SEQ ID NO: 49703 - DNA, 15 bp, Homo sapiens
gagacccattttccc

SEQ ID NO: 49704 - DNA, 15 bp, Homo sapiens
agagacccattttcc

SEQ ID NO: 49705 - DNA, 15 bp, Homo sapiens
aagagacccattttc

SEQ ID NO: 49706 - DNA, 15 bp, Homo sapiens
aaagagacccatttt

SEQ ID NO: 49707 - DNA, 15 bp, Homo sapiens
aaaagagacccattt

SEQ ID NO: 49708 - DNA, 15 bp, Homo sapiens
taaaagagacccatt

SEQ ID NO: 49709 - DNA, 15 bp, Homo sapiens
ataaaagagacccat

SEQ ID NO: 49710 - DNA, 15 bp, Homo sapiens
tataaaagagaccca

SEQ ID NO: 49711 - DNA, 15 bp, Homo sapiens
ttataaaagagaccc

SEQ ID NO: 49712 - DNA, 15 bp, Homo sapiens
gttataaaagagacc

SEQ ID NO: 49713 - DNA, 15 bp, Homo sapiens
agttataaaagagac

SEQ ID NO: 49714 - DNA, 15 bp, Homo sapiens
tagttataaaagaga

SEQ ID NO: 49715 - DNA, 15 bp, Homo sapiens
ttagttataaaagag

SEQ ID NO: 49716 - DNA, 15 bp, Homo sapiens
attagttataaaaga

SEQ ID NO: 49717 - DNA, 15 bp, Homo sapiens
tattagttataaaag

SEQ ID NO: 49718 - DNA, 15 bp, Homo sapiens
ctattagttataaaa

SEQ ID NO: 49719 - DNA, 15 bp, Homo sapiens
cctattagttataaa

SEQ ID NO: 49720 - DNA, 15 bp, Homo sapiens
tcctattagttataa

SEQ ID NO: 49721 - DNA, 15 bp, Homo sapiens
gtcctattagttata

SEQ ID NO: 49722 - DNA, 15 bp, Homo sapiens
ggtcctattagttat

SEQ ID NO: 49723 - DNA, 15 bp, Homo sapiens
aggtcctattagtta

SEQ ID NO: 49724 - DNA, 15 bp, Homo sapiens
taggtcctattagtt

SEQ ID NO: 49725 - DNA, 15 bp, Homo sapiens
ttaggtcctattagt

SEQ ID NO: 49726 - DNA, 15 bp, Homo sapiens
attaggtcctattag

SEQ ID NO: 49727 - DNA, 15 bp, Homo sapiens
gattaggtcctatta

SEQ ID NO: 49728 - DNA, 15 bp, Homo sapiens
agattaggtcctatt

SEQ ID NO: 49729 - DNA, 15 bp, Homo sapiens
cagattaggtcctat

SEQ ID NO: 49730 - DNA, 15 bp, Homo sapiens
gcagattaggtccta

SEQ ID NO: 49731 - DNA, 15 bp, Homo sapiens
agcagattaggtcct

SEQ ID NO: 49732 - DNA, 15 bp, Homo sapiens
gagcagattaggtcc

SEQ ID NO: 49733 - DNA, 15 bp, Homo sapiens
ggagcagattaggtc

SEQ ID NO: 49734 - DNA, 15 bp, Homo sapiens
aggagcagattaggt

SEQ ID NO: 49735 - DNA, 15 bp, Homo sapiens
taggagcagattagg

SEQ ID NO: 49736 - DNA, 15 bp, Homo sapiens
ctaggagcagattag

SEQ ID NO: 49737 - DNA, 15 bp, Homo sapiens
gctaggagcagatta

SEQ ID NO: 49738 - DNA, 15 bp, Homo sapiens
tgctaggagcagatt

SEQ ID NO: 49739 - DNA, 15 bp, Homo sapiens
ttgctaggagcagat

SEQ ID NO: 49740 - DNA, 15 bp, Homo sapiens
attgctaggagcaga

SEQ ID NO: 49741 - DNA, 15 bp, Homo sapiens
cattgctaggagcag

SEQ ID NO: 49742 - DNA, 15 bp, Homo sapiens
acattgctaggagca

SEQ ID NO: 49743 - DNA, 15 bp, Homo sapiens
aacattgctaggagc

SEQ ID NO: 49744 - DNA, 15 bp, Homo sapiens
taacattgctaggag

SEQ ID NO: 49745 - DNA, 15 bp, Homo sapiens
ctaacattgctagga

SEQ ID NO: 49746 - DNA, 15 bp, Homo sapiens
gctaacattgctagg

SEQ ID NO: 49747 - DNA, 15 bp, Homo sapiens
tgctaacattgctag

SEQ ID NO: 49748 - DNA, 15 bp, Homo sapiens
atgctaacattgcta

SEQ ID NO: 49749 - DNA, 15 bp, Homo sapiens
tatgctaacattgct

SEQ ID NO: 49750 - DNA, 15 bp, Homo sapiens
atatgctaacattgc

SEQ ID NO: 49751 - DNA, 15 bp, Homo sapiens
catatgctaacattg

SEQ ID NO: 49752 - DNA, 15 bp, Homo sapiens
tcatatgctaacatt

SEQ ID NO: 49753 - DNA, 15 bp, Homo sapiens
ctcatatgctaacat

SEQ ID NO: 49754 - DNA, 15 bp, Homo sapiens
gctcatatgctaaca

SEQ ID NO: 49755 - DNA, 15 bp, Homo sapiens
agctcatatgctaac

SEQ ID NO: 49756 - DNA, 15 bp, Homo sapiens
tagctcatatgctaa

SEQ ID NO: 49757 - DNA, 15 bp, Homo sapiens
ctagctcatatgcta

SEQ ID NO: 49758 - DNA, 15 bp, Homo sapiens
cctagctcatatgct

SEQ ID NO: 49759 - DNA, 15 bp, Homo sapiens
ccctagctcatatgc

SEQ ID NO: 49760 - DNA, 15 bp, Homo sapiens
tccctagctcatatg

SEQ ID NO: 49761 - DNA, 15 bp, Homo sapiens
atccctagctcatat

SEQ ID NO: 49762 - DNA, 15 bp, Homo sapiens
aatccctagctcata

SEQ ID NO: 49763 - DNA, 15 bp, Homo sapiens
aaatccctagctcat

SEQ ID NO: 49764 - DNA, 15 bp, Homo sapiens
taaatccctagctca

SEQ ID NO: 49765 - DNA, 15 bp, Homo sapiens
ataaatccctagctc

SEQ ID NO: 49766 - DNA, 15 bp, Homo sapiens
aataaatccctagct

SEQ ID NO: 49767 - DNA, 15 bp, Homo sapiens
aaataaatccctagc

SEQ ID NO: 49768 - DNA, 15 bp, Homo sapiens
taaataaatccctag

SEQ ID NO: 49769 - DNA, 15 bp, Homo sapiens
ttaaataaatcccta

SEQ ID NO: 49770 - DNA, 15 bp, Homo sapiens
attaaataaatccct

SEQ ID NO: 49771 - DNA, 15 bp, Homo sapiens
tattaaataaatccc

SEQ ID NO: 49772 - DNA, 15 bp, Homo sapiens
ctattaaataaatcc

SEQ ID NO: 49773 - DNA, 15 bp, Homo sapiens
actattaaataaatc

SEQ ID NO: 49774 - DNA, 15 bp, Homo sapiens
gactattaaataaat

SEQ ID NO: 49775 - DNA, 15 bp, Homo sapiens
cgactattaaataaa

SEQ ID NO: 49776 - DNA, 15 bp, Homo sapiens
ccgactattaaataa

SEQ ID NO: 49777 - DNA, 15 bp, Homo sapiens
gccgactattaaata

SEQ ID NO: 49778 - DNA, 15 bp, Homo sapiens
tgccgactattaaat

SEQ ID NO: 49779 - DNA, 15 bp, Homo sapiens
ctgccgactattaaa

SEQ ID NO: 49780 - DNA, 15 bp, Homo sapiens
cctgccgactattaa

SEQ ID NO: 49781 - DNA, 15 bp, Homo sapiens
tcctgccgactatta

SEQ ID NO: 49782 - DNA, 15 bp, Homo sapiens
ttcctgccgactatt

SEQ ID NO: 49783 - DNA, 15 bp, Homo sapiens
attcctgccgactat

SEQ ID NO: 49784 - DNA, 15 bp, Homo sapiens
gattcctgccgacta

SEQ ID NO: 49785 - DNA, 15 bp, Homo sapiens
ggattcctgccgact

SEQ ID NO: 49786 - DNA, 15 bp, Homo sapiens
tggattcctgccgac

SEQ ID NO: 49787 - DNA, 15 bp, Homo sapiens
atggattcctgccga

SEQ ID NO: 49788 - DNA, 15 bp, Homo sapiens
catggattcctgccg

SEQ ID NO: 49789 - DNA, 15 bp, Homo sapiens
acatggattcctgcc

SEQ ID NO: 49790 - DNA, 15 bp, Homo sapiens
cacatggattcctgc

SEQ ID NO: 49791 - DNA, 15 bp, Homo sapiens
gcacatggattcctg

SEQ ID NO: 49792 - DNA, 15 bp, Homo sapiens
tgcacatggattcct

SEQ ID NO: 49793 - DNA, 15 bp, Homo sapiens
ctgcacatggattcc

SEQ ID NO: 49794 - DNA, 15 bp, Homo sapiens
gctgcacatggattc

SEQ ID NO: 49795 - DNA, 15 bp, Homo sapiens
tgctgcacatggatt

SEQ ID NO: 49796 - DNA, 15 bp, Homo sapiens
ctgctgcacatggat

SEQ ID NO: 49797 - DNA, 15 bp, Homo sapiens
cctgctgcacatgga

SEQ ID NO: 49798 - DNA, 15 bp, Homo sapiens
gcctgctgcacatgg

SEQ ID NO: 49799 - DNA, 15 bp, Homo sapiens
tgcctgctgcacatg

SEQ ID NO: 49800 - DNA, 15 bp, Homo sapiens
ttgcctgctgcacat

SEQ ID NO: 49801 - DNA, 15 bp, Homo sapiens
tttgcctgctgcaca

SEQ ID NO: 49802 - DNA, 15 bp, Homo sapiens
gtttgcctgctgcac

SEQ ID NO: 49803 - DNA, 15 bp, Homo sapiens
agtttgcctgctgca

SEQ ID NO: 49804 - DNA, 15 bp, Homo sapiens
aagtttgcctgctgc

SEQ ID NO: 49805 - DNA, 15 bp, Homo sapiens
taagtttgcctgctg

SEQ ID NO: 49806 - DNA, 15 bp, Homo sapiens
ataagtttgcctgct

SEQ ID NO: 49807 - DNA, 15 bp, Homo sapiens
tataagtttgcctgc

SEQ ID NO: 49808 - DNA, 15 bp, Homo sapiens
ttataagtttgcctg

SEQ ID NO: 49809 - DNA, 15 bp, Homo sapiens
attataagtttgcct

SEQ ID NO: 49810 - DNA, 15 bp, Homo sapiens
cattataagtttgcc

SEQ ID NO: 49811 - DNA, 15 bp, Homo sapiens
acattataagtttgc

SEQ ID NO: 49812 - DNA, 15 bp, Homo sapiens
aacattataagtttg

SEQ ID NO: 49813 - DNA, 15 bp, Homo sapiens
aaacattataagttt

SEQ ID NO: 49814 - DNA, 15 bp, Homo sapiens
taaacattataagtt

SEQ ID NO: 49815 - DNA, 15 bp, Homo sapiens
ttaaacattataagt

SEQ ID NO: 49816 - DNA, 15 bp, Homo sapiens
tttaaacattataag

SEQ ID NO: 49817 - DNA, 15 bp, Homo sapiens
atttaaacattataa

SEQ ID NO: 49818 - DNA, 15 bp, Homo sapiens
aatttaaacattata

SEQ ID NO: 49819 - DNA, 15 bp, Homo sapiens
taatttaaacattat

SEQ ID NO: 49820 - DNA, 15 bp, Homo sapiens
ttaatttaaacatta

SEQ ID NO: 49821 - DNA, 15 bp, Homo sapiens
tttaatttaaacatt

SEQ ID NO: 49822 - DNA, 15 bp, Homo sapiens
gtttaatttaaacat

SEQ ID NO: 49823 - DNA, 15 bp, Homo sapiens
tgtttaatttaaaca

SEQ ID NO: 49824 - DNA, 15 bp, Homo sapiens
atgtttaatttaaac

SEQ ID NO: 49825 - DNA, 15 bp, Homo sapiens
gatgtttaatttaaa

SEQ ID NO: 49826 - DNA, 15 bp, Homo sapiens
tgatgtttaatttaa

SEQ ID NO: 49827 - DNA, 15 bp, Homo sapiens
ttgatgtttaattta

SEQ ID NO: 49828 - DNA, 15 bp, Homo sapiens
gttgatgtttaattt

SEQ ID NO: 49829 - DNA, 15 bp, Homo sapiens
agttgatgtttaatt

SEQ ID NO: 49830 - DNA, 15 bp, Homo sapiens
gagttgatgtttaat

SEQ ID NO: 49831 - DNA, 15 bp, Homo sapiens
agagttgatgtttaa

SEQ ID NO: 49832 - DNA, 15 bp, Homo sapiens
cagagttgatgttta

SEQ ID NO: 49833 - DNA, 15 bp, Homo sapiens
acagagttgatgttt

SEQ ID NO: 49834 - DNA, 15 bp, Homo sapiens
gacagagttgatgtt

SEQ ID NO: 49835 - DNA, 15 bp, Homo sapiens
agacagagttgatgt

SEQ ID NO: 49836 - DNA, 15 bp, Homo sapiens
gagacagagttgatg

SEQ ID NO: 49837 - DNA, 15 bp, Homo sapiens
ggagacagagttgat

SEQ ID NO: 49838 - DNA, 15 bp, Homo sapiens
tggagacagagttga

SEQ ID NO: 49839 - DNA, 15 bp, Homo sapiens
ctggagacagagttg

SEQ ID NO: 49840 - DNA, 15 bp, Homo sapiens
tctggagacagagtt

SEQ ID NO: 49841 - DNA, 15 bp, Homo sapiens
ttctggagacagagt

SEQ ID NO: 49842 - DNA, 15 bp, Homo sapiens
cttctggagacagag

SEQ ID NO: 49843 - DNA, 15 bp, Homo sapiens
ccttctggagacaga

SEQ ID NO: 49844 - DNA, 15 bp, Homo sapiens
tccttctggagacag

SEQ ID NO: 49845 - DNA, 15 bp, Homo sapiens
ttccttctggagaca

SEQ ID NO: 49846 - DNA, 15 bp, Homo sapiens
tttccttctggagac

SEQ ID NO: 49847 - DNA, 15 bp, Homo sapiens
gtttccttctggaga

SEQ ID NO: 49848 - DNA, 15 bp, Homo sapiens
agtttccttctggag

SEQ ID NO: 49849 - DNA, 15 bp, Homo sapiens
cagtttccttctgga

SEQ ID NO: 49850 - DNA, 15 bp, Homo sapiens
gcagtttccttctgg

SEQ ID NO: 49851 - DNA, 15 bp, Homo sapiens
agcagtttccttctg

SEQ ID NO: 49852 - DNA, 15 bp, Homo sapiens
cagcagtttccttct

SEQ ID NO: 49853 - DNA, 15 bp, Homo sapiens
gcagcagtttccttc

SEQ ID NO: 49854 - DNA, 15 bp, Homo sapiens
agcagcagtttcctt

SEQ ID NO: 49855 - DNA, 15 bp, Homo sapiens
tagcagcagtttcct

SEQ ID NO: 49856 - DNA, 15 bp, Homo sapiens
gtagcagcagtttcc

SEQ ID NO: 49857 - DNA, 15 bp, Homo sapiens
tgtagcagcagtttc

SEQ ID NO: 49858 - DNA, 15 bp, Homo sapiens
ttgtagcagcagttt

SEQ ID NO: 49859 - DNA, 15 bp, Homo sapiens
cttgtagcagcagtt

SEQ ID NO: 49860 - DNA, 15 bp, Homo sapiens
gcttgtagcagcagt

SEQ ID NO: 49861 - DNA, 15 bp, Homo sapiens
ggcttgtagcagcag

SEQ ID NO: 49862 - DNA, 15 bp, Homo sapiens
aggcttgtagcagca

SEQ ID NO: 49863 - DNA, 15 bp, Homo sapiens
aaggcttgtagcagc

SEQ ID NO: 49864 - DNA, 15 bp, Homo sapiens
taaggcttgtagcag

SEQ ID NO: 49865 - DNA, 15 bp, Homo sapiens
ataaggcttgtagca

SEQ ID NO: 49866 - DNA, 15 bp, Homo sapiens
aataaggcttgtagc

SEQ ID NO: 49867 - DNA, 15 bp, Homo sapiens
taataaggcttgtag

SEQ ID NO: 49868 - DNA, 15 bp, Homo sapiens
ttaataaggcttgta

SEQ ID NO: 49869 - DNA, 15 bp, Homo sapiens
tttaataaggcttgt

SEQ ID NO: 49870 - DNA, 15 bp, Homo sapiens
ctttaataaggcttg

SEQ ID NO: 49871 - DNA, 15 bp, Homo sapiens
cctttaataaggctt

SEQ ID NO: 49872 - DNA, 15 bp, Homo sapiens
ccctttaataaggct

SEQ ID NO: 49873 - DNA, 15 bp, Homo sapiens
gccctttaataaggc

SEQ ID NO: 49874 - DNA, 15 bp, Homo sapiens
agccctttaataagg

SEQ ID NO: 49875 - DNA, 15 bp, Homo sapiens
cagccctttaataag

SEQ ID NO: 49876 - DNA, 15 bp, Homo sapiens
acagccctttaataa

SEQ ID NO: 49877 - DNA, 15 bp, Homo sapiens
cacagccctttaata

SEQ ID NO: 49878 - DNA, 15 bp, Homo sapiens
ccacagccctttaat

SEQ ID NO: 49879 - DNA, 15 bp, Homo sapiens
gccacagccctttaa

SEQ ID NO: 49880 - DNA, 15 bp, Homo sapiens
agccacagcccttta

SEQ ID NO: 49881 - DNA, 15 bp, Homo sapiens
aagccacagcccttt

SEQ ID NO: 49882 - DNA, 15 bp, Homo sapiens
aaagccacagccctt

SEQ ID NO: 49883 - DNA, 15 bp, Homo sapiens
taaagccacagccct

SEQ ID NO: 49884 - DNA, 15 bp, Homo sapiens
ctaaagccacagccc

SEQ ID NO: 49885 - DNA, 15 bp, Homo sapiens
tctaaagccacagcc

SEQ ID NO: 49886 - DNA, 15 bp, Homo sapiens
ctctaaagccacagc

SEQ ID NO: 49887 - DNA, 15 bp, Homo sapiens
cctctaaagccacag

SEQ ID NO: 49888 - DNA, 15 bp, Homo sapiens
ccctctaaagccaca

SEQ ID NO: 49889 - DNA, 15 bp, Homo sapiens
tccctctaaagccac

SEQ ID NO: 49890 - DNA, 15 bp, Homo sapiens
ttccctctaaagcca

SEQ ID NO: 49891 - DNA, 15 bp, Homo sapiens
cttccctctaaagcc

SEQ ID NO: 49892 - DNA, 15 bp, Homo sapiens
ccttccctctaaagc

SEQ ID NO: 49893 - DNA, 15 bp, Homo sapiens
tccttccctctaaag

SEQ ID NO: 49894 - DNA, 15 bp, Homo sapiens
gtccttccctctaaa

SEQ ID NO: 49895 - DNA, 15 bp, Homo sapiens
ggtccttccctctaa

SEQ ID NO: 49896 - DNA, 15 bp, Homo sapiens
aggtccttccctcta

SEQ ID NO: 49897 - DNA, 15 bp, Homo sapiens
gaggtccttccctct

SEQ ID NO: 49898 - DNA, 15 bp, Homo sapiens
agaggtccttccctc

SEQ ID NO: 49899 - DNA, 15 bp, Homo sapiens
gagaggtccttccct

SEQ ID NO: 49900 - DNA, 15 bp, Homo sapiens
ggagaggtccttccc

SEQ ID NO: 49901 - DNA, 15 bp, Homo sapiens
aggagaggtccttcc

SEQ ID NO: 49902 - DNA, 15 bp, Homo sapiens
gaggagaggtccttc

SEQ ID NO: 49903 - DNA, 15 bp, Homo sapiens
agaggagaggtcctt

SEQ ID NO: 49904 - DNA, 15 bp, Homo sapiens
cagaggagaggtcct

SEQ ID NO: 49905 - DNA, 15 bp, Homo sapiens
acagaggagaggtcc

SEQ ID NO: 49906 - DNA, 15 bp, Homo sapiens
gacagaggagaggtc

SEQ ID NO: 49907 - DNA, 15 bp, Homo sapiens
tgacagaggagaggt

SEQ ID NO: 49908 - DNA, 15 bp, Homo sapiens
atgacagaggagagg

SEQ ID NO: 49909 - DNA, 15 bp, Homo sapiens
aatgacagaggagag

SEQ ID NO: 49910 - DNA, 15 bp, Homo sapiens
gaatgacagaggaga

SEQ ID NO: 49911 - DNA, 15 bp, Homo sapiens
agaatgacagaggag

SEQ ID NO: 49912 - DNA, 15 bp, Homo sapiens
aagaatgacagagga

SEQ ID NO: 49913 - DNA, 15 bp, Homo sapiens
gaagaatgacagagg

SEQ ID NO: 49914 - DNA, 15 bp, Homo sapiens
ggaagaatgacagag

SEQ ID NO: 49915 - DNA, 15 bp, Homo sapiens
aggaagaatgacaga

SEQ ID NO: 49916 - DNA, 15 bp, Homo sapiens
caggaagaatgacag

SEQ ID NO: 49917 - DNA, 15 bp, Homo sapiens
acaggaagaatgaca

SEQ ID NO: 49918 - DNA, 15 bp, Homo sapiens
cacaggaagaatgac

SEQ ID NO: 49919 - DNA, 15 bp, Homo sapiens
gcacaggaagaatga

SEQ ID NO: 49920 - DNA, 15 bp, Homo sapiens
agcacaggaagaatg

SEQ ID NO: 49921 - DNA, 15 bp, Homo sapiens
gagcacaggaagaat

SEQ ID NO: 49922 - DNA, 15 bp, Homo sapiens
agagcacaggaagaa

SEQ ID NO: 49923 - DNA, 15 bp, Homo sapiens
aagagcacaggaaga

SEQ ID NO: 49924 - DNA, 15 bp, Homo sapiens
aaagagcacaggaag

SEQ ID NO: 49925 - DNA, 15 bp, Homo sapiens
aaaagagcacaggaa

SEQ ID NO: 49926 - DNA, 15 bp, Homo sapiens
caaaagagcacagga

SEQ ID NO: 49927 - DNA, 15 bp, Homo sapiens
acaaaagagcacagg

SEQ ID NO: 49928 - DNA, 15 bp, Homo sapiens
cacaaaagagcacag

SEQ ID NO: 49929 - DNA, 15 bp, Homo sapiens
tcacaaaagagcaca

SEQ ID NO: 49930 - DNA, 15 bp, Homo sapiens
ttcacaaaagagcac

SEQ ID NO: 49931 - DNA, 15 bp, Homo sapiens
attcacaaaagagca

SEQ ID NO: 49932 - DNA, 15 bp, Homo sapiens
gattcacaaaagagc

SEQ ID NO: 49933 - DNA, 15 bp, Homo sapiens
cgattcacaaaagag

SEQ ID NO: 49934 - DNA, 15 bp, Homo sapiens
gcgattcacaaaaga

SEQ ID NO: 49935 - DNA, 15 bp, Homo sapiens
agcgattcacaaaag

SEQ ID NO: 49936 - DNA, 15 bp, Homo sapiens
cagcgattcacaaaa

SEQ ID NO: 49937 - DNA, 15 bp, Homo sapiens
tcagcgattcacaaa

SEQ ID NO: 49938 - DNA, 15 bp, Homo sapiens
gtcagcgattcacaa

SEQ ID NO: 49939 - DNA, 15 bp, Homo sapiens
ggtcagcgattcaca

SEQ ID NO: 49940 - DNA, 15 bp, Homo sapiens
aggtcagcgattcac

SEQ ID NO: 49941 - DNA, 15 bp, Homo sapiens
gaggtcagcgattca

SEQ ID NO: 49942 - DNA, 15 bp, Homo sapiens
agaggtcagcgattc

SEQ ID NO: 49943 - DNA, 15 bp, Homo sapiens
gagaggtcagcgatt

SEQ ID NO: 49944 - DNA, 15 bp, Homo sapiens
agagaggtcagcgat

SEQ ID NO: 49945 - DNA, 15 bp, Homo sapiens
tagagaggtcagcga

SEQ ID NO: 49946 - DNA, 15 bp, Homo sapiens
atagagaggtcagcg

SEQ ID NO: 49947 - DNA, 15 bp, Homo sapiens
gatagagaggtcagc

SEQ ID NO: 49948 - DNA, 15 bp, Homo sapiens
agatagagaggtcag

SEQ ID NO: 49949 - DNA, 15 bp, Homo sapiens
gagatagagaggtca

SEQ ID NO: 49950 - DNA, 15 bp, Homo sapiens
ggagatagagaggtc

SEQ ID NO: 49951 - DNA, 15 bp, Homo sapiens
cggagatagagaggt

SEQ ID NO: 49952 - DNA, 15 bp, Homo sapiens
acggagatagagagg

SEQ ID NO: 49953 - DNA, 15 bp, Homo sapiens
cacggagatagagag

SEQ ID NO: 49954 - DNA, 15 bp, Homo sapiens
tcacggagatagaga

SEQ ID NO: 49955 - DNA, 15 bp, Homo sapiens
ttcacggagatagag

SEQ ID NO: 49956 - DNA, 15 bp, Homo sapiens
tttcacggagataga

SEQ ID NO: 49957 - DNA, 15 bp, Homo sapiens
ttttcacggagatag

SEQ ID NO: 49958 - DNA, 15 bp, Homo sapiens
cttttcacggagata

SEQ ID NO: 49959 - DNA, 15 bp, Homo sapiens
tcttttcacggagat

SEQ ID NO: 49960 - DNA, 15 bp, Homo sapiens
ctcttttcacggaga

SEQ ID NO: 49961 - DNA, 15 bp, Homo sapiens
gctcttttcacggag

SEQ ID NO: 49962 - DNA, 15 bp, Homo sapiens
tgctcttttcacgga

SEQ ID NO: 49963 - DNA, 15 bp, Homo sapiens
gtgctcttttcacgg

SEQ ID NO: 49964 - DNA, 15 bp, Homo sapiens
cgtgctcttttcacg

SEQ ID NO: 49965 - DNA, 15 bp, Homo sapiens
acgtgctcttttcac

SEQ ID NO: 49966 - DNA, 15 bp, Homo sapiens
aacgtgctcttttca

SEQ ID NO: 49967 - DNA, 15 bp, Homo sapiens
gaacgtgctcttttc

SEQ ID NO: 49968 - DNA, 15 bp, Homo sapiens
agaacgtgctctttt

SEQ ID NO: 49969 - DNA, 15 bp, Homo sapiens
aagaacgtgctcttt

SEQ ID NO: 49970 - DNA, 15 bp, Homo sapiens
gaagaacgtgctctt

SEQ ID NO: 49971 - DNA, 15 bp, Homo sapiens
agaagaacgtgctct

SEQ ID NO: 49972 - DNA, 15 bp, Homo sapiens
cagaagaacgtgctc

SEQ ID NO: 49973 - DNA, 15 bp, Homo sapiens
gcagaagaacgtgct

SEQ ID NO: 49974 - DNA, 15 bp, Homo sapiens
agcagaagaacgtgc

SEQ ID NO: 49975 - DNA, 15 bp, Homo sapiens
cagcagaagaacgtg

SEQ ID NO: 49976 - DNA, 15 bp, Homo sapiens
acagcagaagaacgt

SEQ ID NO: 49977 - DNA, 15 bp, Homo sapiens
tacagcagaagaacg

SEQ ID NO: 49978 - DNA, 15 bp, Homo sapiens
atacagcagaagaac

SEQ ID NO: 49979 - DNA, 15 bp, Homo sapiens
catacagcagaagaa

SEQ ID NO: 49980 - DNA, 15 bp, Homo sapiens
acatacagcagaaga

SEQ ID NO: 49981 - DNA, 15 bp, Homo sapiens
tacatacagcagaag

SEQ ID NO: 49982 - DNA, 15 bp, Homo sapiens
ttacatacagcagaa

SEQ ID NO: 49983 - DNA, 15 bp, Homo sapiens
gttacatacagcaga

SEQ ID NO: 49984 - DNA, 15 bp, Homo sapiens
ggttacatacagcag

SEQ ID NO: 49985 - DNA, 15 bp, Homo sapiens
aggttacatacagca

SEQ ID NO: 49986 - DNA, 15 bp, Homo sapiens
caggttacatacagc

SEQ ID NO: 49987 - DNA, 15 bp, Homo sapiens
acaggttacatacag

SEQ ID NO: 49988 - DNA, 15 bp, Homo sapiens
gacaggttacataca

SEQ ID NO: 49989 - DNA, 15 bp, Homo sapiens
agacaggttacatac

SEQ ID NO: 49990 - DNA, 15 bp, Homo sapiens
aagacaggttacata

SEQ ID NO: 49991 - DNA, 15 bp, Homo sapiens
aaagacaggttacat

SEQ ID NO: 49992 - DNA, 15 bp, Homo sapiens
aaaagacaggttaca

SEQ ID NO: 49993 - DNA, 15 bp, Homo sapiens
gaaaagacaggttac

SEQ ID NO: 49994 - DNA, 15 bp, Homo sapiens
agaaaagacaggtta

SEQ ID NO: 49995 - DNA, 15 bp, Homo sapiens
tagaaaagacaggtt

SEQ ID NO: 49996 - DNA, 15 bp, Homo sapiens
atagaaaagacaggt

SEQ ID NO: 49997 - DNA, 15 bp, Homo sapiens
catagaaaagacagg

SEQ ID NO: 49998 - DNA, 15 bp, Homo sapiens
tcatagaaaagacag

SEQ ID NO: 49999 - DNA, 15 bp, Homo sapiens
atcatagaaaagaca

SEQ ID NO: 50000 - DNA, 15 bp, Homo sapiens
gatcatagaaaagac

SEQ ID NO: 50001 - DNA, 15 bp, Homo sapiens
agatcatagaaaaga

SEQ ID NO: 50002 - DNA, 15 bp, Homo sapiens
gagatcatagaaaag

SEQ ID NO: 50003 - DNA, 15 bp, Homo sapiens
agagatcatagaaaa

SEQ ID NO: 50004 - DNA, 15 bp, Homo sapiens
aagagatcatagaaa

SEQ ID NO: 50005 - DNA, 15 bp, Homo sapiens
aaagagatcatagaa

SEQ ID NO: 50006 - DNA, 15 bp, Homo sapiens
taaagagatcataga

SEQ ID NO: 50007 - DNA, 15 bp, Homo sapiens
ctaaagagatcatag

SEQ ID NO: 50008 - DNA, 15 bp, Homo sapiens
cctaaagagatcata

SEQ ID NO: 50009 - DNA, 15 bp, Homo sapiens
ccctaaagagatcat

SEQ ID NO: 50010 - DNA, 15 bp, Homo sapiens
cccctaaagagatca

SEQ ID NO: 50011 - DNA, 15 bp, Homo sapiens
acccctaaagagatc

SEQ ID NO: 50012 - DNA, 15 bp, Homo sapiens
cacccctaaagagat

SEQ ID NO: 50013 - DNA, 15 bp, Homo sapiens
tcacccctaaagaga

SEQ ID NO: 50014 - DNA, 15 bp, Homo sapiens
gtcacccctaaagag

SEQ ID NO: 50015 - DNA, 15 bp, Homo sapiens
ggtcacccctaaaga

SEQ ID NO: 50016 - DNA, 15 bp, Homo sapiens
gggtcacccctaaag

SEQ ID NO: 50017 - DNA, 15 bp, Homo sapiens
tgggtcacccctaaa

SEQ ID NO: 50018 - DNA, 15 bp, Homo sapiens
ctgggtcacccctaa

SEQ ID NO: 50019 - DNA, 15 bp, Homo sapiens
actgggtcaccccta

SEQ ID NO: 50020 - DNA, 15 bp, Homo sapiens
gactgggtcacccct

SEQ ID NO: 50021 - DNA, 15 bp, Homo sapiens
agactgggtcacccc

SEQ ID NO: 50022 - DNA, 15 bp, Homo sapiens
tagactgggtcaccc

SEQ ID NO: 50023 - DNA, 15 bp, Homo sapiens
atagactgggtcacc

SEQ ID NO: 50024 - DNA, 15 bp, Homo sapiens
aatagactgggtcac

SEQ ID NO: 50025 - DNA, 15 bp, Homo sapiens
taatagactgggtca

SEQ ID NO: 50026 - DNA, 15 bp, Homo sapiens
ttaatagactgggtc

SEQ ID NO: 50027 - DNA, 15 bp, Homo sapiens
tttaatagactgggt

SEQ ID NO: 50028 - DNA, 15 bp, Homo sapiens
ctttaatagactggg

SEQ ID NO: 50029 - DNA, 15 bp, Homo sapiens
tctttaatagactgg

SEQ ID NO: 50030 - DNA, 15 bp, Homo sapiens
ttctttaatagactg

SEQ ID NO: 50031 - DNA, 15 bp, Homo sapiens
tttctttaatagact

SEQ ID NO: 50032 - DNA, 15 bp, Homo sapiens
ctttctttaatagac

SEQ ID NO: 50033 - DNA, 15 bp, Homo sapiens
tctttctttaataga

SEQ ID NO: 50034 - DNA, 15 bp, Homo sapiens
ttctttctttaatag

SEQ ID NO: 50035 - DNA, 15 bp, Homo sapiens
tttctttctttaata

SEQ ID NO: 50036 - DNA, 15 bp, Homo sapiens
ttttctttctttaat

SEQ ID NO: 50037 - DNA, 15 bp, Homo sapiens
tttttctttctttaa

SEQ ID NO: 50038 - DNA, 15 bp, Homo sapiens
atttttctttcttta

SEQ ID NO: 50039 - DNA, 15 bp, Homo sapiens
catttttctttcttt

SEQ ID NO: 50040 - DNA, 15 bp, Homo sapiens
gcatttttctttctt

SEQ ID NO: 50041 - DNA, 15 bp, Homo sapiens
agcatttttctttct

SEQ ID NO: 50042 - DNA, 15 bp, Homo sapiens
cagcatttttctttc

SEQ ID NO: 50043 - DNA, 15 bp, Homo sapiens
tcagcatttttcttt

SEQ ID NO: 50044 - DNA, 15 bp, Homo sapiens
ttcagcatttttctt

SEQ ID NO: 50045 - DNA, 15 bp, Homo sapiens
attcagcatttttct

SEQ ID NO: 50046 - DNA, 15 bp, Homo sapiens
cattcagcatttttc

SEQ ID NO: 50047 - DNA, 15 bp, Homo sapiens
tcattcagcattttt

SEQ ID NO: 50048 - DNA, 15 bp, Homo sapiens
ctcattcagcatttt

SEQ ID NO: 50049 - DNA, 15 bp, Homo sapiens
cctcattcagcattt

SEQ ID NO: 50050 - DNA, 15 bp, Homo sapiens
acctcattcagcatt

SEQ ID NO: 50051 - DNA, 15 bp, Homo sapiens
tacctcattcagcat

SEQ ID NO: 50052 - DNA, 15 bp, Homo sapiens
ttacctcattcagca

SEQ ID NO: 50053 - DNA, 15 bp, Homo sapiens
cttacctcattcagc

SEQ ID NO: 50054 - DNA, 15 bp, Homo sapiens
acttacctcattcag

SEQ ID NO: 50055 - DNA, 15 bp, Homo sapiens
tacttacctcattca

SEQ ID NO: 50056 - DNA, 15 bp, Homo sapiens
gtacttacctcattc

SEQ ID NO: 50057 - DNA, 15 bp, Homo sapiens
agtacttacctcatt

SEQ ID NO: 50058 - DNA, 15 bp, Homo sapiens
aagtacttacctcat

SEQ ID NO: 50059 - DNA, 15 bp, Homo sapiens
caagtacttacctca

SEQ ID NO: 50060 - DNA, 15 bp, Homo sapiens
tcaagtacttacctc

SEQ ID NO: 50061 - DNA, 15 bp, Homo sapiens
atcaagtacttacct

SEQ ID NO: 50062 - DNA, 15 bp, Homo sapiens
catcaagtacttacc

SEQ ID NO: 50063 - DNA, 15 bp, Homo sapiens
acatcaagtacttac

SEQ ID NO: 50064 - DNA, 15 bp, Homo sapiens
aacatcaagtactta

SEQ ID NO: 50065 - DNA, 15 bp, Homo sapiens
taacatcaagtactt

SEQ ID NO: 50066 - DNA, 15 bp, Homo sapiens
gtaacatcaagtact

SEQ ID NO: 50067 - DNA, 15 bp, Homo sapiens
tgtaacatcaagtac

SEQ ID NO: 50068 - DNA, 15 bp, Homo sapiens
ttgtaacatcaagta

SEQ ID NO: 50069 - DNA, 15 bp, Homo sapiens
tttgtaacatcaagt

SEQ ID NO: 50070 - DNA, 15 bp, Homo sapiens
gtttgtaacatcaag

SEQ ID NO: 50071 - DNA, 15 bp, Homo sapiens
agtttgtaacatcaa

SEQ ID NO: 50072 - DNA, 15 bp, Homo sapiens
tagtttgtaacatca

SEQ ID NO: 50073 - DNA, 15 bp, Homo sapiens
ttagtttgtaacatc

SEQ ID NO: 50074 - DNA, 15 bp, Homo sapiens
gttagtttgtaacat

SEQ ID NO: 50075 - DNA, 15 bp, Homo sapiens
ggttagtttgtaaca

SEQ ID NO: 50076 - DNA, 15 bp, Homo sapiens
tggttagtttgtaac

SEQ ID NO: 50077 - DNA, 15 bp, Homo sapiens
ctggttagtttgtaa

SEQ ID NO: 50078 - DNA, 15 bp, Homo sapiens
tctggttagtttgta

SEQ ID NO: 50079 - DNA, 15 bp, Homo sapiens
ctctggttagtttgt

SEQ ID NO: 50080 - DNA, 15 bp, Homo sapiens
tctctggttagtttg

SEQ ID NO: 50081 - DNA, 15 bp, Homo sapiens
atctctggttagttt

SEQ ID NO: 50082 - DNA, 15 bp, Homo sapiens
tatctctggttagtt

SEQ ID NO: 50083 - DNA, 15 bp, Homo sapiens
atatctctggttagt

SEQ ID NO: 50084 - DNA, 15 bp, Homo sapiens
aatatctctggttag

SEQ ID NO: 50085 - DNA, 15 bp, Homo sapiens
gaatatctctggtta

SEQ ID NO: 50086 - DNA, 15 bp, Homo sapiens
tgaatatctctggtt

SEQ ID NO: 50087 - DNA, 15 bp, Homo sapiens
atgaatatctctggt

SEQ ID NO: 50088 - DNA, 15 bp, Homo sapiens
aatgaatatctctgg

SEQ ID NO: 50089 - DNA, 15 bp, Homo sapiens
gaatgaatatctctg

SEQ ID NO: 50090 - DNA, 15 bp, Homo sapiens
tgaatgaatatctct

SEQ ID NO: 50091 - DNA, 15 bp, Homo sapiens
ctgaatgaatatctc

SEQ ID NO: 50092 - DNA, 15 bp, Homo sapiens
actgaatgaatatct

SEQ ID NO: 50093 - DNA, 15 bp, Homo sapiens
gactgaatgaatatc

SEQ ID NO: 50094 - DNA, 15 bp, Homo sapiens
tgactgaatgaatat

SEQ ID NO: 50095 - DNA, 15 bp, Homo sapiens
atgactgaatgaata

SEQ ID NO: 50096 - DNA, 15 bp, Homo sapiens
tatgactgaatgaat

SEQ ID NO: 50097 - DNA, 15 bp, Homo sapiens
atatgactgaatgaa

SEQ ID NO: 50098 - DNA, 15 bp, Homo sapiens
tatatgactgaatga

SEQ ID NO: 50099 - DNA, 15 bp, Homo sapiens
ctatatgactgaatg

SEQ ID NO: 50100 - DNA, 15 bp, Homo sapiens
actatatgactgaat

SEQ ID NO: 50101 - DNA, 15 bp, Homo sapiens
aactatatgactgaa

SEQ ID NO: 50102 - DNA, 15 bp, Homo sapiens
taactatatgactga

SEQ ID NO: 50103 - DNA, 15 bp, Homo sapiens
ttaactatatgactg

SEQ ID NO: 50104 - DNA, 15 bp, Homo sapiens
tttaactatatgact

SEQ ID NO: 50105 - DNA, 15 bp, Homo sapiens
ttttaactatatgac

SEQ ID NO: 50106 - DNA, 15 bp, Homo sapiens
tttttaactatatga

SEQ ID NO: 50107 - DNA, 15 bp, Homo sapiens
atttttaactatatg

SEQ ID NO: 50108 - DNA, 15 bp, Homo sapiens
catttttaactatat

SEQ ID NO: 50109 - DNA, 15 bp, Homo sapiens
acatttttaactata

SEQ ID NO: 50110 - DNA, 15 bp, Homo sapiens
tacatttttaactat

SEQ ID NO: 50111 - DNA, 15 bp, Homo sapiens
atacatttttaacta

SEQ ID NO: 50112 - DNA, 15 bp, Homo sapiens
aatacatttttaact

SEQ ID NO: 50113 - DNA, 15 bp, Homo sapiens
aaatacatttttaac

SEQ ID NO: 50114 - DNA, 15 bp, Homo sapiens
caaatacatttttaa

SEQ ID NO: 50115 - DNA, 15 bp, Homo sapiens
gcaaatacattttta

SEQ ID NO: 50116 - DNA, 15 bp, Homo sapiens
agcaaatacattttt

SEQ ID NO: 50117 - DNA, 15 bp, Homo sapiens
aagcaaatacatttt

SEQ ID NO: 50118 - DNA, 15 bp, Homo sapiens
gaagcaaatacattt

SEQ ID NO: 50119 - DNA, 15 bp, Homo sapiens
ggaagcaaatacatt

SEQ ID NO: 50120 - DNA, 15 bp, Homo sapiens
aggaagcaaatacat

SEQ ID NO: 50121 - DNA, 15 bp, Homo sapiens
aaggaagcaaataca

SEQ ID NO: 50122 - DNA, 15 bp, Homo sapiens
gaaggaagcaaatac

SEQ ID NO: 50123 - DNA, 15 bp, Homo sapiens
ggaaggaagcaaata

SEQ ID NO: 50124 - DNA, 15 bp, Homo sapiens
tggaaggaagcaaat

SEQ ID NO: 50125 - DNA, 15 bp, Homo sapiens
atggaaggaagcaaa

SEQ ID NO: 50126 - DNA, 15 bp, Homo sapiens
gatggaaggaagcaa

SEQ ID NO: 50127 - DNA, 15 bp, Homo sapiens
tgatggaaggaagca

SEQ ID NO: 50128 - DNA, 15 bp, Homo sapiens
ttgatggaaggaagc

SEQ ID NO: 50129 - DNA, 15 bp, Homo sapiens
attgatggaaggaag

SEQ ID NO: 50130 - DNA, 15 bp, Homo sapiens
cattgatggaaggaa

SEQ ID NO: 50131 - DNA, 15 bp, Homo sapiens
gcattgatggaagga

SEQ ID NO: 50132 - DNA, 15 bp, Homo sapiens
tgcattgatggaagg

SEQ ID NO: 50133 - DNA, 15 bp, Homo sapiens
gtgcattgatggaag

SEQ ID NO: 50134 - DNA, 15 bp, Homo sapiens
ggtgcattgatggaa

SEQ ID NO: 50135 - DNA, 15 bp, Homo sapiens
tggtgcattgatgga

SEQ ID NO: 50136 - DNA, 15 bp, Homo sapiens
gtggtgcattgatgg

SEQ ID NO: 50137 - DNA, 15 bp, Homo sapiens
agtggtgcattgatg

SEQ ID NO: 50138 - DNA, 15 bp, Homo sapiens
aagtggtgcattgat

SEQ ID NO: 50139 - DNA, 15 bp, Homo sapiens
aaagtggtgcattga

SEQ ID NO: 50140 - DNA, 15 bp, Homo sapiens
gaaagtggtgcattg

SEQ ID NO: 50141 - DNA, 15 bp, Homo sapiens
ggaaagtggtgcatt

SEQ ID NO: 50142 - DNA, 15 bp, Homo sapiens
aggaaagtggtgcat

SEQ ID NO: 50143 - DNA, 15 bp, Homo sapiens
aaggaaagtggtgca

SEQ ID NO: 50144 - DNA, 15 bp, Homo sapiens
taaggaaagtggtgc

SEQ ID NO: 50145 - DNA, 15 bp, Homo sapiens
ttaaggaaagtggtg

SEQ ID NO: 50146 - DNA, 15 bp, Homo sapiens
gttaaggaaagtggt

SEQ ID NO: 50147 - DNA, 15 bp, Homo sapiens
tgttaaggaaagtgg

SEQ ID NO: 50148 - DNA, 15 bp, Homo sapiens
ttgttaaggaaagtg

SEQ ID NO: 50149 - DNA, 15 bp, Homo sapiens
attgttaaggaaagt

SEQ ID NO: 50150 - DNA, 15 bp, Homo sapiens
cattgttaaggaaag

SEQ ID NO: 50151 - DNA, 15 bp, Homo sapiens
gcattgttaaggaaa

SEQ ID NO: 50152 - DNA, 15 bp, Homo sapiens
tgcattgttaaggaa

SEQ ID NO: 50153 - DNA, 15 bp, Homo sapiens
gtgcattgttaagga

SEQ ID NO: 50154 - DNA, 15 bp, Homo sapiens
tgtgcattgttaagg

SEQ ID NO: 50155 - DNA, 15 bp, Homo sapiens
ttgtgcattgttaag

SEQ ID NO: 50156 - DNA, 15 bp, Homo sapiens
tttgtgcattgttaa

SEQ ID NO: 50157 - DNA, 15 bp, Homo sapiens
atttgtgcattgtta

SEQ ID NO: 50158 - DNA, 15 bp, Homo sapiens
aatttgtgcattgtt

SEQ ID NO: 50159 - DNA, 15 bp, Homo sapiens
aaatttgtgcattgt

SEQ ID NO: 50160 - DNA, 15 bp, Homo sapiens
aaaatttgtgcattg

SEQ ID NO: 50161 - DNA, 15 bp, Homo sapiens
gaaaatttgtgcatt

SEQ ID NO: 50162 - DNA, 15 bp, Homo sapiens
ggaaaatttgtgcat

SEQ ID NO: 50163 - DNA, 15 bp, Homo sapiens
tggaaaatttgtgca

SEQ ID NO: 50164 - DNA, 15 bp, Homo sapiens
atggaaaatttgtgc

SEQ ID NO: 50165 - DNA, 15 bp, Homo sapiens
catggaaaatttgtg

SEQ ID NO: 50166 - DNA, 15 bp, Homo sapiens
tcatggaaaatttgt

SEQ ID NO: 50167 - DNA, 15 bp, Homo sapiens
atcatggaaaatttg

SEQ ID NO: 50168 - DNA, 15 bp, Homo sapiens
tatcatggaaaattt

SEQ ID NO: 50169 - DNA, 15 bp, Homo sapiens
ttatcatggaaaatt

SEQ ID NO: 50170 - DNA, 15 bp, Homo sapiens
attatcatggaaaat

SEQ ID NO: 50171 - DNA, 15 bp, Homo sapiens
cattatcatggaaaa

SEQ ID NO: 50172 - DNA, 15 bp, Homo sapiens
tcattatcatggaaa

SEQ ID NO: 50173 - DNA, 15 bp, Homo sapiens
ctcattatcatggaa

SEQ ID NO: 50174 - DNA, 15 bp, Homo sapiens
cctcattatcatgga

SEQ ID NO: 50175 - DNA, 15 bp, Homo sapiens
tcctcattatcatgg

SEQ ID NO: 50176 - DNA, 15 bp, Homo sapiens
atcctcattatcatg

SEQ ID NO: 50177 - DNA, 15 bp, Homo sapiens
gatcctcattatcat

SEQ ID NO: 50178 - DNA, 15 bp, Homo sapiens
tgatcctcattatca

SEQ ID NO: 50179 - DNA, 15 bp, Homo sapiens
atgatcctcattatc

SEQ ID NO: 50180 - DNA, 15 bp, Homo sapiens
gatgatcctcattat

SEQ ID NO: 50181 - DNA, 15 bp, Homo sapiens
tgatgatcctcatta

SEQ ID NO: 50182 - DNA, 15 bp, Homo sapiens
ttgatgatcctcatt

SEQ ID NO: 50183 - DNA, 15 bp, Homo sapiens
cttgatgatcctcat

SEQ ID NO: 50184 - DNA, 15 bp, Homo sapiens
tcttgatgatcctca

SEQ ID NO: 50185 - DNA, 15 bp, Homo sapiens
ttcttgatgatcctc

SEQ ID NO: 50186 - DNA, 15 bp, Homo sapiens
attcttgatgatcct

SEQ ID NO: 50187 - DNA, 15 bp, Homo sapiens
aattcttgatgatcc

SEQ ID NO: 50188 - DNA, 15 bp, Homo sapiens
taattcttgatgatc

SEQ ID NO: 50189 - DNA, 15 bp, Homo sapiens
ataattcttgatgat

SEQ ID NO: 50190 - DNA, 15 bp, Homo sapiens
cataattcttgatga

SEQ ID NO: 50191 - DNA, 15 bp, Homo sapiens
gcataattcttgatg

SEQ ID NO: 50192 - DNA, 15 bp, Homo sapiens
tgcataattcttgat

SEQ ID NO: 50193 - DNA, 15 bp, Homo sapiens
ctgcataattcttga

SEQ ID NO: 50194 - DNA, 15 bp, Homo sapiens
cctgcataattcttg

SEQ ID NO: 50195 - DNA, 15 bp, Homo sapiens
gcctgcataattctt

SEQ ID NO: 50196 - DNA, 15 bp, Homo sapiens
ggcctgcataattct

SEQ ID NO: 50197 - DNA, 15 bp, Homo sapiens
aggcctgcataattc

SEQ ID NO: 50198 - DNA, 15 bp, Homo sapiens
caggcctgcataatt

SEQ ID NO: 50199 - DNA, 15 bp, Homo sapiens
gcaggcctgcataat

SEQ ID NO: 50200 - DNA, 15 bp, Homo sapiens
tgcaggcctgcataa

SEQ ID NO: 50201 - DNA, 15 bp, Homo sapiens
gtgcaggcctgcata

SEQ ID NO: 50202 - DNA, 15 bp, Homo sapiens
agtgcaggcctgcat

SEQ ID NO: 50203 - DNA, 15 bp, Homo sapiens
cagtgcaggcctgca

SEQ ID NO: 50204 - DNA, 15 bp, Homo sapiens
acagtgcaggcctgc

SEQ ID NO: 50205 - DNA, 15 bp, Homo sapiens
cacagtgcaggcctg

SEQ ID NO: 50206 - DNA, 15 bp, Homo sapiens
ccacagtgcaggcct

SEQ ID NO: 50207 - DNA, 15 bp, Homo sapiens
gccacagtgcaggcc

SEQ ID NO: 50208 - DNA, 15 bp, Homo sapiens
agccacagtgcaggc

SEQ ID NO: 50209 - DNA, 15 bp, Homo sapiens
gagccacagtgcagg

SEQ ID NO: 50210 - DNA, 15 bp, Homo sapiens
tgagccacagtgcag

SEQ ID NO: 50211 - DNA, 15 bp, Homo sapiens
atgagccacagtgca

SEQ ID NO: 50212 - DNA, 15 bp, Homo sapiens
tatgagccacagtgc

SEQ ID NO: 50213 - DNA, 15 bp, Homo sapiens
gtatgagccacagtg

SEQ ID NO: 50214 - DNA, 15 bp, Homo sapiens
ggtatgagccacagt

SEQ ID NO: 50215 - DNA, 15 bp, Homo sapiens
aggtatgagccacag

SEQ ID NO: 50216 - DNA, 15 bp, Homo sapiens
taggtatgagccaca

SEQ ID NO: 50217 - DNA, 15 bp, Homo sapiens
ataggtatgagccac

SEQ ID NO: 50218 - DNA, 15 bp, Homo sapiens
tataggtatgagcca

SEQ ID NO: 50219 - DNA, 15 bp, Homo sapiens
ttataggtatgagcc

SEQ ID NO: 50220 - DNA, 15 bp, Homo sapiens
attataggtatgagc

SEQ ID NO: 50221 - DNA, 15 bp, Homo sapiens
gattataggtatgag

SEQ ID NO: 50222 - DNA, 15 bp, Homo sapiens
ggattataggtatga

SEQ ID NO: 50223 - DNA, 15 bp, Homo sapiens
gggattataggtatg

SEQ ID NO: 50224 - DNA, 15 bp, Homo sapiens
tgggattataggtat

SEQ ID NO: 50225 - DNA, 15 bp, Homo sapiens
cgctgggattatagg

SEQ ID NO: 50226 - DNA, 15 bp, Homo sapiens
gcgctgggattatag

SEQ ID NO: 50227 - DNA, 15 bp, Homo sapiens
agcgctgggattata

SEQ ID NO: 50228 - DNA, 15 bp, Homo sapiens
aagcgctgggattat

SEQ ID NO: 50229 - DNA, 15 bp, Homo sapiens
tcccaaagcgctggg

SEQ ID NO: 50230 - DNA, 15 bp, Homo sapiens
ctcccaaagcgctgg

SEQ ID NO: 50231 - DNA, 15 bp, Homo sapiens
cctcccaaagcgctg

SEQ ID NO: 50232 - DNA, 15 bp, Homo sapiens
gcctcccaaagcgct

SEQ ID NO: 50233 - DNA, 15 bp, Homo sapiens
agcctcccaaagcgc

SEQ ID NO: 50234 - DNA, 15 bp, Homo sapiens
cagcctcccaaagcg

SEQ ID NO: 50235 - DNA, 15 bp, Homo sapiens
tcagcctcccaaagc

SEQ ID NO: 50236 - DNA, 15 bp, Homo sapiens
cgcctcagcctccca

SEQ ID NO: 50237 - DNA, 15 bp, Homo sapiens
gcgcctcagcctccc

SEQ ID NO: 50238 - DNA, 15 bp, Homo sapiens
agcgcctcagcctcc

SEQ ID NO: 50239 - DNA, 15 bp, Homo sapiens
aagcgcctcagcctc

SEQ ID NO: 50240 - DNA, 15 bp, Homo sapiens
caagcgcctcagcct

SEQ ID NO: 50241 - DNA, 15 bp, Homo sapiens
ccaagcgcctcagcc

SEQ ID NO: 50242 - DNA, 15 bp, Homo sapiens
tccaagcgcctcagc

SEQ ID NO: 50243 - DNA, 15 bp, Homo sapiens
atccaagcgcctcag

SEQ ID NO: 50244 - DNA, 15 bp, Homo sapiens
gatccaagcgcctca

SEQ ID NO: 50245 - DNA, 15 bp, Homo sapiens
tgatccaagcgcctc

SEQ ID NO: 50246 - DNA, 15 bp, Homo sapiens
gtgatccaagcgcct

SEQ ID NO: 50247 - DNA, 15 bp, Homo sapiens
ggtgatccaagcgcc

SEQ ID NO: 50248 - DNA, 15 bp, Homo sapiens
aggtgatccaagcgc

SEQ ID NO: 50249 - DNA, 15 bp, Homo sapiens
caggtgatccaagcg

SEQ ID NO: 50250 - DNA, 15 bp, Homo sapiens
tcaggtgatccaagc

SEQ ID NO: 50251 - DNA, 15 bp, Homo sapiens
atcaggtgatccaag

SEQ ID NO: 50252 - DNA, 15 bp, Homo sapiens
catcaggtgatccaa

SEQ ID NO: 50253 - DNA, 15 bp, Homo sapiens
acatcaggtgatcca

SEQ ID NO: 50254 - DNA, 15 bp, Homo sapiens
gacatcaggtgatcc

SEQ ID NO: 50255 - DNA, 15 bp, Homo sapiens
cgacatcaggtgatc

SEQ ID NO: 50256 - DNA, 15 bp, Homo sapiens
ccgacatcaggtgat

SEQ ID NO: 50257 - DNA, 15 bp, Homo sapiens
cccgacatcaggtga

SEQ ID NO: 50258 - DNA, 15 bp, Homo sapiens
tcccgacatcaggtg

SEQ ID NO: 50259 - DNA, 15 bp, Homo sapiens
ctcccgacatcaggt

SEQ ID NO: 50260 - DNA, 15 bp, Homo sapiens
actcccgacatcagg

SEQ ID NO: 50261 - DNA, 15 bp, Homo sapiens
aactcccgacatcag

SEQ ID NO: 50262 - DNA, 15 bp, Homo sapiens
gaactcccgacatca

SEQ ID NO: 50263 - DNA, 15 bp, Homo sapiens
tgaactcccgacatc

SEQ ID NO: 50264 - DNA, 15 bp, Homo sapiens
ttgaactcccgacat

SEQ ID NO: 50265 - DNA, 15 bp, Homo sapiens
cttgaactcccgaca

SEQ ID NO: 50266 - DNA, 15 bp, Homo sapiens
cggggtttctccatg

SEQ ID NO: 50267 - DNA, 15 bp, Homo sapiens
acggggtttctccat

SEQ ID NO: 50268 - DNA, 15 bp, Homo sapiens
aacggggtttctcca

SEQ ID NO: 50269 - DNA, 15 bp, Homo sapiens
aaacggggtttctcc

SEQ ID NO: 50270 - DNA, 15 bp, Homo sapiens
gaaacggggtttctc

SEQ ID NO: 50271 - DNA, 15 bp, Homo sapiens
agaaacggggtttct

SEQ ID NO: 50272 - DNA, 15 bp, Homo sapiens
tagaaacggggtttc

SEQ ID NO: 50273 - DNA, 15 bp, Homo sapiens
gtagaaacggggttt

SEQ ID NO: 50274 - DNA, 15 bp, Homo sapiens
agtagaaacggggtt

SEQ ID NO: 50275 - DNA, 15 bp, Homo sapiens
tagtagaaacggggt

SEQ ID NO: 50276 - DNA, 15 bp, Homo sapiens
ttagtagaaacgggg

SEQ ID NO: 50277 - DNA, 15 bp, Homo sapiens
tttagtagaaacggg

SEQ ID NO: 50278 - DNA, 15 bp, Homo sapiens
ttttagtagaaacgg

SEQ ID NO: 50279 - DNA, 15 bp, Homo sapiens
tttttagtagaaacg

SEQ ID NO: 50280 - DNA, 15 bp, Homo sapiens
atttttagtagaaac

SEQ ID NO: 50281 - DNA, 15 bp, Homo sapiens
cggctaattttgtat

SEQ ID NO: 50282 - DNA, 15 bp, Homo sapiens
ccggctaattttgta

SEQ ID NO: 50283 - DNA, 15 bp, Homo sapiens
cccggctaattttgt

SEQ ID NO: 50284 - DNA, 15 bp, Homo sapiens
agcccggctaatttt

SEQ ID NO: 50285 - DNA, 15 bp, Homo sapiens
aagcccggctaattt

SEQ ID NO: 50286 - DNA, 15 bp, Homo sapiens
caagcccggctaatt

SEQ ID NO: 50287 - DNA, 15 bp, Homo sapiens
ccaagcccggctaat

SEQ ID NO: 50288 - DNA, 15 bp, Homo sapiens
accaagcccggctaa

SEQ ID NO: 50289 - DNA, 15 bp, Homo sapiens
caccaagcccggcta

SEQ ID NO: 50290 - DNA, 15 bp, Homo sapiens
ccaccaagcccggct

SEQ ID NO: 50291 - DNA, 15 bp, Homo sapiens
gccaccaagcccggc

SEQ ID NO: 50292 - DNA, 15 bp, Homo sapiens
tgccaccaagcccgg

SEQ ID NO: 50293 - DNA, 15 bp, Homo sapiens
gtgccaccaagcccg

SEQ ID NO: 50294 - DNA, 15 bp, Homo sapiens
agtgccaccaagccc

SEQ ID NO: 50295 - DNA, 15 bp, Homo sapiens
aagtgccaccaagcc

SEQ ID NO: 50296 - DNA, 15 bp, Homo sapiens
caagtgccaccaagc

SEQ ID NO: 50297 - DNA, 15 bp, Homo sapiens
gcaagtgccaccaag

SEQ ID NO: 50298 - DNA, 15 bp, Homo sapiens
ggcaagtgccaccaa

SEQ ID NO: 50299 - DNA, 15 bp, Homo sapiens
aggcaagtgccacca

SEQ ID NO: 50300 - DNA, 15 bp, Homo sapiens
caggcaagtgccacc

SEQ ID NO: 50301 - DNA, 15 bp, Homo sapiens
acaggcaagtgccac

SEQ ID NO: 50302 - DNA, 15 bp, Homo sapiens
tacaggcaagtgcca

SEQ ID NO: 50303 - DNA, 15 bp, Homo sapiens
ttacaggcaagtgcc

SEQ ID NO: 50304 - DNA, 15 bp, Homo sapiens
attacaggcaagtgc

SEQ ID NO: 50305 - DNA, 15 bp, Homo sapiens
aattacaggcaagtg

SEQ ID NO: 50306 - DNA, 15 bp, Homo sapiens
gaattacaggcaagt

SEQ ID NO: 50307 - DNA, 15 bp, Homo sapiens
ggaattacaggcaag

SEQ ID NO: 50308 - DNA, 15 bp, Homo sapiens
tggaattacaggcaa

SEQ ID NO: 50309 - DNA, 15 bp, Homo sapiens
ctggaattacaggca

SEQ ID NO: 50310 - DNA, 15 bp, Homo sapiens
agctggaattacagg

SEQ ID NO: 50311 - DNA, 15 bp, Homo sapiens
tagctggaattacag

SEQ ID NO: 50312 - DNA, 15 bp, Homo sapiens
gtagctggaattaca

SEQ ID NO: 50313 - DNA, 15 bp, Homo sapiens
agtagctggaattac

SEQ ID NO: 50314 - DNA, 15 bp, Homo sapiens
gagtagctggaatta

SEQ ID NO: 50315 - DNA, 15 bp, Homo sapiens
cgagtagctggaatt

SEQ ID NO: 50316 - DNA, 15 bp, Homo sapiens
ccgagtagctggaat

SEQ ID NO: 50317 - DNA, 15 bp, Homo sapiens
cccgagtagctggaa

SEQ ID NO: 50318 - DNA, 15 bp, Homo sapiens
tcccgagtagctgga

SEQ ID NO: 50319 - DNA, 15 bp, Homo sapiens
cccgcctcccaggtt

SEQ ID NO: 50320 - DNA, 15 bp, Homo sapiens
ccccgcctcccaggt

SEQ ID NO: 50321 - DNA, 15 bp, Homo sapiens
cccccgcctcccagg

SEQ ID NO: 50322 - DNA, 15 bp, Homo sapiens
acccccgcctcccag

SEQ ID NO: 50323 - DNA, 15 bp, Homo sapiens
aacccccgcctccca

SEQ ID NO: 50324 - DNA, 15 bp, Homo sapiens
caacccccgcctccc

SEQ ID NO: 50325 - DNA, 15 bp, Homo sapiens
gcaacccccgcctcc

SEQ ID NO: 50326 - DNA, 15 bp, Homo sapiens
tgcaacccccgcctc

SEQ ID NO: 50327 - DNA, 15 bp, Homo sapiens
ctgcaacccccgcct

SEQ ID NO: 50328 - DNA, 15 bp, Homo sapiens
actgcaacccccgcc

SEQ ID NO: 50329 - DNA, 15 bp, Homo sapiens
cactgcaacccccgc

SEQ ID NO: 50330 - DNA, 15 bp, Homo sapiens
tcactgcaacccccg

SEQ ID NO: 50331 - DNA, 15 bp, Homo sapiens
ctcactgcaaccccc

SEQ ID NO: 50332 - DNA, 15 bp, Homo sapiens
gctcactgcaacccc

SEQ ID NO: 50333 - DNA, 15 bp, Homo sapiens
agctcactgcaaccc

SEQ ID NO: 50334 - DNA, 15 bp, Homo sapiens
tgcgatctcagctca

SEQ ID NO: 50335 - DNA, 15 bp, Homo sapiens
atgcgatctcagctc

SEQ ID NO: 50336 - DNA, 15 bp, Homo sapiens
gatgcgatctcagct

SEQ ID NO: 50337 - DNA, 15 bp, Homo sapiens
tgatgcgatctcagc

SEQ ID NO: 50338 - DNA, 15 bp, Homo sapiens
atgatgcgatctcag

SEQ ID NO: 50339 - DNA, 15 bp, Homo sapiens
aatgatgcgatctca

SEQ ID NO: 50340 - DNA, 15 bp, Homo sapiens
caatgatgcgatctc

SEQ ID NO: 50341 - DNA, 15 bp, Homo sapiens
gcaatgatgcgatct

SEQ ID NO: 50342 - DNA, 15 bp, Homo sapiens
tgcaatgatgcgatc

SEQ ID NO: 50343 - DNA, 15 bp, Homo sapiens
gtgcaatgatgcgat

SEQ ID NO: 50344 - DNA, 15 bp, Homo sapiens
agtgcaatgatgcga

SEQ ID NO: 50345 - DNA, 15 bp, Homo sapiens
gagtgcaatgatgcg

SEQ ID NO: 50346 - DNA, 15 bp, Homo sapiens
agagtgcaatgatgc

SEQ ID NO: 50347 - DNA, 15 bp, Homo sapiens
tagagtgcaatgatg

SEQ ID NO: 50348 - DNA, 15 bp, Homo sapiens
ttagagtgcaatgat

SEQ ID NO: 50349 - DNA, 15 bp, Homo sapiens
gttagagtgcaatga

SEQ ID NO: 50350 - DNA, 15 bp, Homo sapiens
ggttagagtgcaatg

SEQ ID NO: 50351 - DNA, 15 bp, Homo sapiens
aggttagagtgcaat

SEQ ID NO: 50352 - DNA, 15 bp, Homo sapiens
caggttagagtgcaa

SEQ ID NO: 50353 - DNA, 15 bp, Homo sapiens
ccaggttagagtgca

SEQ ID NO: 50354 - DNA, 15 bp, Homo sapiens
cccaggttagagtgc

SEQ ID NO: 50355 - DNA, 15 bp, Homo sapiens
gcccaggttagagtg

SEQ ID NO: 50356 - DNA, 15 bp, Homo sapiens
tgcccaggttagagt

SEQ ID NO: 50357 - DNA, 15 bp, Homo sapiens
ttgcccaggttagag

SEQ ID NO: 50358 - DNA, 15 bp, Homo sapiens
gttgcccaggttaga

SEQ ID NO: 50359 - DNA, 15 bp, Homo sapiens
tgttgcccaggttag

SEQ ID NO: 50360 - DNA, 15 bp, Homo sapiens
ttgttgcccaggtta

SEQ ID NO: 50361 - DNA, 15 bp, Homo sapiens
cttgttgcccaggtt

SEQ ID NO: 50362 - DNA, 15 bp, Homo sapiens
tcttgttgcccaggt

SEQ ID NO: 50363 - DNA, 15 bp, Homo sapiens
ttttgctcttgttgc

SEQ ID NO: 50364 - DNA, 15 bp, Homo sapiens
gttttgctcttgttg

SEQ ID NO: 50365 - DNA, 15 bp, Homo sapiens
agttttgctcttgtt

SEQ ID NO: 50366 - DNA, 15 bp, Homo sapiens
gagttttgctcttgt

SEQ ID NO: 50367 - DNA, 15 bp, Homo sapiens
ggagttttgctcttg

SEQ ID NO: 50368 - DNA, 15 bp, Homo sapiens
tggagttttgctctt

SEQ ID NO: 50369 - DNA, 15 bp, Homo sapiens
atggagttttgctct

SEQ ID NO: 50370 - DNA, 15 bp, Homo sapiens
gatggagttttgctc

SEQ ID NO: 50371 - DNA, 15 bp, Homo sapiens
tgatggagttttgct

SEQ ID NO: 50372 - DNA, 15 bp, Homo sapiens
ttgatggagttttgc

SEQ ID NO: 50373 - DNA, 15 bp, Homo sapiens
tttgatggagttttg

SEQ ID NO: 50374 - DNA, 15 bp, Homo sapiens
ttttgatggagtttt

SEQ ID NO: 50375 - DNA, 15 bp, Homo sapiens
cttttgatggagttt

SEQ ID NO: 50376 - DNA, 15 bp, Homo sapiens
tcttttgatggagtt

SEQ ID NO: 50377 - DNA, 15 bp, Homo sapiens
ttcttttgatggagt

SEQ ID NO: 50378 - DNA, 15 bp, Homo sapiens
tttcttttgatggag

SEQ ID NO: 50379 - DNA, 15 bp, Homo sapiens
ttttcttttgatgga

SEQ ID NO: 50380 - DNA, 15 bp, Homo sapiens
tttttcttttgatgg

SEQ ID NO: 50381 - DNA, 15 bp, Homo sapiens
ttttttcttttgatg

SEQ ID NO: 50382 - DNA, 15 bp, Homo sapiens
tttttttcttttgat

SEQ ID NO: 50383 - DNA, 15 bp, Homo sapiens
ttttttttcttttga

SEQ ID NO: 50384 - DNA, 15 bp, Homo sapiens
tttttttttcttttg

SEQ ID NO: 50385 - DNA, 15 bp, Homo sapiens
ttttttttttctttt

SEQ ID NO: 50386 - DNA, 15 bp, Homo sapiens
attttttttttcttt

SEQ ID NO: 50387 - DNA, 15 bp, Homo sapiens
gattttttttttctt

SEQ ID NO: 50388 - DNA, 15 bp, Homo sapiens
cgattttttttttct

SEQ ID NO: 50389 - DNA, 15 bp, Homo sapiens
ccgattttttttttc

SEQ ID NO: 50390 - DNA, 15 bp, Homo sapiens
cccgatttttttttt

SEQ ID NO: 50391 - DNA, 15 bp, Homo sapiens
acccgattttttttt

SEQ ID NO: 50392 - DNA, 15 bp, Homo sapiens
cacccgatttttttt

SEQ ID NO: 50393 - DNA, 15 bp, Homo sapiens
gcacccgattttttt

SEQ ID NO: 50394 - DNA, 15 bp, Homo sapiens
tgcacccgatttttt

SEQ ID NO: 50395 - DNA, 15 bp, Homo sapiens
ctgcacccgattttt

SEQ ID NO: 50396 - DNA, 15 bp, Homo sapiens
actgcacccgatttt

SEQ ID NO: 50397 - DNA, 15 bp, Homo sapiens
cactgcacccgattt

SEQ ID NO: 50398 - DNA, 15 bp, Homo sapiens
ccactgcacccgatt

SEQ ID NO: 50399 - DNA, 15 bp, Homo sapiens
gccactgcacccgat

SEQ ID NO: 50400 - DNA, 15 bp, Homo sapiens
agccactgcacccga

SEQ ID NO: 50401 - DNA, 15 bp, Homo sapiens
gagccactgcacccg

SEQ ID NO: 50402 - DNA, 15 bp, Homo sapiens
tgagccactgcaccc

SEQ ID NO: 50403 - DNA, 15 bp, Homo sapiens
atgagccactgcacc

SEQ ID NO: 50404 - DNA, 15 bp, Homo sapiens
catgagccactgcac

SEQ ID NO: 50405 - DNA, 15 bp, Homo sapiens
gcatgagccactgca

SEQ ID NO: 50406 - DNA, 15 bp, Homo sapiens
ggcatgagccactgc

SEQ ID NO: 50407 - DNA, 15 bp, Homo sapiens
aggcatgagccactg

SEQ ID NO: 50408 - DNA, 15 bp, Homo sapiens
caggcatgagccact

SEQ ID NO: 50409 - DNA, 15 bp, Homo sapiens
tgttaggattacagg

SEQ ID NO: 50410 - DNA, 15 bp, Homo sapiens
gtgttaggattacag

SEQ ID NO: 50411 - DNA, 15 bp, Homo sapiens
agtgttaggattaca

SEQ ID NO: 50412 - DNA, 15 bp, Homo sapiens
cagtgttaggattac

SEQ ID NO: 50413 - DNA, 15 bp, Homo sapiens
acagtgttaggatta

SEQ ID NO: 50414 - DNA, 15 bp, Homo sapiens
cacagtgttaggatt

SEQ ID NO: 50415 - DNA, 15 bp, Homo sapiens
ccacagtgttaggat

SEQ ID NO: 50416 - DNA, 15 bp, Homo sapiens
cccacagtgttagga

SEQ ID NO: 50417 - DNA, 15 bp, Homo sapiens
tcccacagtgttagg

SEQ ID NO: 50418 - DNA, 15 bp, Homo sapiens
ctcccacagtgttag

SEQ ID NO: 50419 - DNA, 15 bp, Homo sapiens
cctcccacagtgtta

SEQ ID NO: 50420 - DNA, 15 bp, Homo sapiens
gcctcccacagtgtt

SEQ ID NO: 50421 - DNA, 15 bp, Homo sapiens
ggcctcccacagtgt

SEQ ID NO: 50422 - DNA, 15 bp, Homo sapiens
tggcctcccacagtg

SEQ ID NO: 50423 - DNA, 15 bp, Homo sapiens
ttggcctcccacagt

SEQ ID NO: 50424 - DNA, 15 bp, Homo sapiens
cttggcctcccacag

SEQ ID NO: 50425 - DNA, 15 bp, Homo sapiens
tcttggcctcccaca

SEQ ID NO: 50426 - DNA, 15 bp, Homo sapiens
gtcttggcctcccac

SEQ ID NO: 50427 - DNA, 15 bp, Homo sapiens
tgtcttggcctccca

SEQ ID NO: 50428 - DNA, 15 bp, Homo sapiens
ctgtcttggcctccc

SEQ ID NO: 50429 - DNA, 15 bp, Homo sapiens
cctgtcttggcctcc

SEQ ID NO: 50430 - DNA, 15 bp, Homo sapiens
gcctgtcttggcctc

SEQ ID NO: 50431 - DNA, 15 bp, Homo sapiens
tgcctgtcttggcct

SEQ ID NO: 50432 - DNA, 15 bp, Homo sapiens
ctgcctgtcttggcc

SEQ ID NO: 50433 - DNA, 15 bp, Homo sapiens
tctgcctgtcttggc

SEQ ID NO: 50434 - DNA, 15 bp, Homo sapiens
atctgcctgtcttgg

SEQ ID NO: 50435 - DNA, 15 bp, Homo sapiens
aatctgcctgtcttg

SEQ ID NO: 50436 - DNA, 15 bp, Homo sapiens
caatctgcctgtctt

SEQ ID NO: 50437 - DNA, 15 bp, Homo sapiens
gcaatctgcctgtct

SEQ ID NO: 50438 - DNA, 15 bp, Homo sapiens
ggcaatctgcctgtc

SEQ ID NO: 50439 - DNA, 15 bp, Homo sapiens
aggcaatctgcctgt

SEQ ID NO: 50440 - DNA, 15 bp, Homo sapiens
caggcaatctgcctg

SEQ ID NO: 50441 - DNA, 15 bp, Homo sapiens
tcaggcaatctgcct

SEQ ID NO: 50442 - DNA, 15 bp, Homo sapiens
ctcaggcaatctgcc

SEQ ID NO: 50443 - DNA, 15 bp, Homo sapiens
gctcaggcaatctgc

SEQ ID NO: 50444 - DNA, 15 bp, Homo sapiens
agctcaggcaatctg

SEQ ID NO: 50445 - DNA, 15 bp, Homo sapiens
gagctcaggcaatct

SEQ ID NO: 50446 - DNA, 15 bp, Homo sapiens
cgaactcctgagctc

SEQ ID NO: 50447 - DNA, 15 bp, Homo sapiens
tcgaactcctgagct

SEQ ID NO: 50448 - DNA, 15 bp, Homo sapiens
ctcgaactcctgagc

SEQ ID NO: 50449 - DNA, 15 bp, Homo sapiens
tctcgaactcctgag

SEQ ID NO: 50450 - DNA, 15 bp, Homo sapiens
atctcgaactcctga

SEQ ID NO: 50451 - DNA, 15 bp, Homo sapiens
gatctcgaactcctg

SEQ ID NO: 50452 - DNA, 15 bp, Homo sapiens
tgatctcgaactcct

SEQ ID NO: 50453 - DNA, 15 bp, Homo sapiens
ctgatctcgaactcc

SEQ ID NO: 50454 - DNA, 15 bp, Homo sapiens
gctgatctcgaactc

SEQ ID NO: 50455 - DNA, 15 bp, Homo sapiens
ggctgatctcgaact

SEQ ID NO: 50456 - DNA, 15 bp, Homo sapiens
aggctgatctcgaac

SEQ ID NO: 50457 - DNA, 15 bp, Homo sapiens
caggctgatctcgaa

SEQ ID NO: 50458 - DNA, 15 bp, Homo sapiens
ccaggctgatctcga

SEQ ID NO: 50459 - DNA, 15 bp, Homo sapiens
cccaggctgatctcg

SEQ ID NO: 50460 - DNA, 15 bp, Homo sapiens
gcccaggctgatctc

SEQ ID NO: 50461 - DNA, 15 bp, Homo sapiens
tgcccaggctgatct

SEQ ID NO: 50462 - DNA, 15 bp, Homo sapiens
ttgcccaggctgatc

SEQ ID NO: 50463 - DNA, 15 bp, Homo sapiens
catgttgcccaggct

SEQ ID NO: 50464 - DNA, 15 bp, Homo sapiens
ccatgttgcccaggc

SEQ ID NO: 50465 - DNA, 15 bp, Homo sapiens
accatgttgcccagg

SEQ ID NO: 50466 - DNA, 15 bp, Homo sapiens
caccatgttgcccag

SEQ ID NO: 50467 - DNA, 15 bp, Homo sapiens
tcaccatgttgccca

SEQ ID NO: 50468 - DNA, 15 bp, Homo sapiens
ttcaccatgttgccc

SEQ ID NO: 50469 - DNA, 15 bp, Homo sapiens
tttcaccatgttgcc

SEQ ID NO: 50470 - DNA, 15 bp, Homo sapiens
gtttcaccatgttgc

SEQ ID NO: 50471 - DNA, 15 bp, Homo sapiens
attttagtagagaca

SEQ ID NO: 50472 - DNA, 15 bp, Homo sapiens
tattttagtagagac

SEQ ID NO: 50473 - DNA, 15 bp, Homo sapiens
gtattttagtagaga

SEQ ID NO: 50474 - DNA, 15 bp, Homo sapiens
tgtattttagtagag

SEQ ID NO: 50475 - DNA, 15 bp, Homo sapiens
ttgtattttagtaga

SEQ ID NO: 50476 - DNA, 15 bp, Homo sapiens
tttgtattttagtag

SEQ ID NO: 50477 - DNA, 15 bp, Homo sapiens
ttttgtattttagta

SEQ ID NO: 50478 - DNA, 15 bp, Homo sapiens
tttttgtattttagt

SEQ ID NO: 50479 - DNA, 15 bp, Homo sapiens
ttttttgtattttag

SEQ ID NO: 50480 - DNA, 15 bp, Homo sapiens
attttttgtatttta

SEQ ID NO: 50481 - DNA, 15 bp, Homo sapiens
gtaattttttgtatt

SEQ ID NO: 50482 - DNA, 15 bp, Homo sapiens
agtaattttttgtat

SEQ ID NO: 50483 - DNA, 15 bp, Homo sapiens
gagtaattttttgta

SEQ ID NO: 50484 - DNA, 15 bp, Homo sapiens
tgagtaattttttgt

SEQ ID NO: 50485 - DNA, 15 bp, Homo sapiens
ctgagtaattttttg

SEQ ID NO: 50486 - DNA, 15 bp, Homo sapiens
gctgagtaatttttt

SEQ ID NO: 50487 - DNA, 15 bp, Homo sapiens
cgctgagtaattttt

SEQ ID NO: 50488 - DNA, 15 bp, Homo sapiens
acgctgagtaatttt

SEQ ID NO: 50489 - DNA, 15 bp, Homo sapiens
cacgctgagtaattt

SEQ ID NO: 50490 - DNA, 15 bp, Homo sapiens
ccacgctgagtaatt

SEQ ID NO: 50491 - DNA, 15 bp, Homo sapiens
accacgctgagtaat

SEQ ID NO: 50492 - DNA, 15 bp, Homo sapiens
caccacgctgagtaa

SEQ ID NO: 50493 - DNA, 15 bp, Homo sapiens
ccaccacgctgagta

SEQ ID NO: 50494 - DNA, 15 bp, Homo sapiens
gccaccacgctgagt

SEQ ID NO: 50495 - DNA, 15 bp, Homo sapiens
tgccaccacgctgag

SEQ ID NO: 50496 - DNA, 15 bp, Homo sapiens
atgccaccacgctga

SEQ ID NO: 50497 - DNA, 15 bp, Homo sapiens
catgccaccacgctg

SEQ ID NO: 50498 - DNA, 15 bp, Homo sapiens
gcatgccaccacgct

SEQ ID NO: 50499 - DNA, 15 bp, Homo sapiens
cgcatgccaccacgc

SEQ ID NO: 50500 - DNA, 15 bp, Homo sapiens
gcgcatgccaccacg

SEQ ID NO: 50501 - DNA, 15 bp, Homo sapiens
ggcgcatgccaccac

SEQ ID NO: 50502 - DNA, 15 bp, Homo sapiens
aggcgcatgccacca

SEQ ID NO: 50503 - DNA, 15 bp, Homo sapiens
aaggcgcatgccacc

SEQ ID NO: 50504 - DNA, 15 bp, Homo sapiens
aaaggcgcatgccac

SEQ ID NO: 50505 - DNA, 15 bp, Homo sapiens
taaaggcgcatgcca

SEQ ID NO: 50506 - DNA, 15 bp, Homo sapiens
ctaaaggcgcatgcc

SEQ ID NO: 50507 - DNA, 15 bp, Homo sapiens
actaaaggcgcatgc

SEQ ID NO: 50508 - DNA, 15 bp, Homo sapiens
aactaaaggcgcatg

SEQ ID NO: 50509 - DNA, 15 bp, Homo sapiens
gaactaaaggcgcat

SEQ ID NO: 50510 - DNA, 15 bp, Homo sapiens
ggaactaaaggcgca

SEQ ID NO: 50511 - DNA, 15 bp, Homo sapiens
tggaactaaaggcgc

SEQ ID NO: 50512 - DNA, 15 bp, Homo sapiens
ctggaactaaaggcg

SEQ ID NO: 50513 - DNA, 15 bp, Homo sapiens
gctggaactaaaggc

SEQ ID NO: 50514 - DNA, 15 bp, Homo sapiens
agctggaactaaagg

SEQ ID NO: 50515 - DNA, 15 bp, Homo sapiens
tagctggaactaaag

SEQ ID NO: 50516 - DNA, 15 bp, Homo sapiens
gtagctggaactaaa

SEQ ID NO: 50517 - DNA, 15 bp, Homo sapiens
agtagctggaactaa

SEQ ID NO: 50518 - DNA, 15 bp, Homo sapiens
gagtagctggaacta

SEQ ID NO: 50519 - DNA, 15 bp, Homo sapiens
tgagtagctggaact

SEQ ID NO: 50520 - DNA, 15 bp, Homo sapiens
ctgagtagctggaac

SEQ ID NO: 50521 - DNA, 15 bp, Homo sapiens
cctgagtagctggaa

SEQ ID NO: 50522 - DNA, 15 bp, Homo sapiens
ggttcaagagattct

SEQ ID NO: 50523 - DNA, 15 bp, Homo sapiens
gggttcaagagattc

SEQ ID NO: 50524 - DNA, 15 bp, Homo sapiens
cgggttcaagagatt

SEQ ID NO: 50525 - DNA, 15 bp, Homo sapiens
ccgggttcaagagat

SEQ ID NO: 50526 - DNA, 15 bp, Homo sapiens
cccgggttcaagaga

SEQ ID NO: 50527 - DNA, 15 bp, Homo sapiens
tcccgggttcaagag

SEQ ID NO: 50528 - DNA, 15 bp, Homo sapiens
ctcccgggttcaaga

SEQ ID NO: 50529 - DNA, 15 bp, Homo sapiens
ttgcaacctccacct

SEQ ID NO: 50530 - DNA, 15 bp, Homo sapiens
attgcaacctccacc

SEQ ID NO: 50531 - DNA, 15 bp, Homo sapiens
cattgcaacctccac

SEQ ID NO: 50532 - DNA, 15 bp, Homo sapiens
tcattgcaacctcca

SEQ ID NO: 50533 - DNA, 15 bp, Homo sapiens
ctcattgcaacctcc

SEQ ID NO: 50534 - DNA, 15 bp, Homo sapiens
gctcattgcaacctc

SEQ ID NO: 50535 - DNA, 15 bp, Homo sapiens
ggctcattgcaacct

SEQ ID NO: 50536 - DNA, 15 bp, Homo sapiens
tggctcattgcaacc

SEQ ID NO: 50537 - DNA, 15 bp, Homo sapiens
ttggctcattgcaac

SEQ ID NO: 50538 - DNA, 15 bp, Homo sapiens
cttggctcattgcaa

SEQ ID NO: 50539 - DNA, 15 bp, Homo sapiens
tcttggctcattgca

SEQ ID NO: 50540 - DNA, 15 bp, Homo sapiens
atcttggctcattgc

SEQ ID NO: 50541 - DNA, 15 bp, Homo sapiens
gatcttggctcattg

SEQ ID NO: 50542 - DNA, 15 bp, Homo sapiens
cgatcttggctcatt

SEQ ID NO: 50543 - DNA, 15 bp, Homo sapiens
acgatcttggctcat

SEQ ID NO: 50544 - DNA, 15 bp, Homo sapiens
cacgatcttggctca

SEQ ID NO: 50545 - DNA, 15 bp, Homo sapiens
gcacgatcttggctc

SEQ ID NO: 50546 - DNA, 15 bp, Homo sapiens
ggcacgatcttggct

SEQ ID NO: 50547 - DNA, 15 bp, Homo sapiens
tggcacgatcttggc

SEQ ID NO: 50548 - DNA, 15 bp, Homo sapiens
gtggcacgatcttgg

SEQ ID NO: 50549 - DNA, 15 bp, Homo sapiens
agtggcacgatcttg

SEQ ID NO: 50550 - DNA, 15 bp, Homo sapiens
cagtggcacgatctt

SEQ ID NO: 50551 - DNA, 15 bp, Homo sapiens
gccaggttggagtgc

SEQ ID NO: 50552 - DNA, 15 bp, Homo sapiens
tgccaggttggagtg

SEQ ID NO: 50553 - DNA, 15 bp, Homo sapiens
ttgccaggttggagt

SEQ ID NO: 50554 - DNA, 15 bp, Homo sapiens
gttgccaggttggag

SEQ ID NO: 50555 - DNA, 15 bp, Homo sapiens
tgttgccaggttgga

SEQ ID NO: 50556 - DNA, 15 bp, Homo sapiens
ctgttgccaggttgg

SEQ ID NO: 50557 - DNA, 15 bp, Homo sapiens
tctgttgccaggttg

SEQ ID NO: 50558 - DNA, 15 bp, Homo sapiens
ctctgttgccaggtt

SEQ ID NO: 50559 - DNA, 15 bp, Homo sapiens
gctctgttgccaggt

SEQ ID NO: 50560 - DNA, 15 bp, Homo sapiens
cgctctgttgccagg

SEQ ID NO: 50561 - DNA, 15 bp, Homo sapiens
tcgctctgttgccag

SEQ ID NO: 50562 - DNA, 15 bp, Homo sapiens
ctcgctctgttgcca

SEQ ID NO: 50563 - DNA, 15 bp, Homo sapiens
tctcgctctgttgcc

SEQ ID NO: 50564 - DNA, 15 bp, Homo sapiens
gtctcgctctgttgc

SEQ ID NO: 50565 - DNA, 15 bp, Homo sapiens
agtctcgctctgttg

SEQ ID NO: 50566 - DNA, 15 bp, Homo sapiens
gagtctcgctctgtt

SEQ ID NO: 50567 - DNA, 15 bp, Homo sapiens
aagacggagtctcgc

SEQ ID NO: 50568 - DNA, 15 bp, Homo sapiens
taagacggagtctcg

SEQ ID NO: 50569 - DNA, 15 bp, Homo sapiens
ttaagacggagtctc

SEQ ID NO: 50570 - DNA, 15 bp, Homo sapiens
tttaagacggagtct

SEQ ID NO: 50571 - DNA, 15 bp, Homo sapiens
ttttaagacggagtc

SEQ ID NO: 50572 - DNA, 15 bp, Homo sapiens
tttttaagacggagt

SEQ ID NO: 50573 - DNA, 15 bp, Homo sapiens
ttttttaagacggag

SEQ ID NO: 50574 - DNA, 15 bp, Homo sapiens
tttttttaagacgga

SEQ ID NO: 50575 - DNA, 15 bp, Homo sapiens
ttttttttaagacgg

SEQ ID NO: 50576 - DNA, 15 bp, Homo sapiens
tttttttttaagacg

SEQ ID NO: 50577 - DNA, 15 bp, Homo sapiens
ttttttttttaagac

SEQ ID NO: 50578 - DNA, 15 bp, Homo sapiens
tttttttttttaaga

SEQ ID NO: 50579 - DNA, 15 bp, Homo sapiens
ttttttttttttaag

SEQ ID NO: 50580 - DNA, 15 bp, Homo sapiens
aaatttttttttttt

SEQ ID NO: 50581 - DNA, 15 bp, Homo sapiens
aaaattttttttttt

SEQ ID NO: 50582 - DNA, 15 bp, Homo sapiens
caaaatttttttttt

SEQ ID NO: 50583 - DNA, 15 bp, Homo sapiens
gcaaaattttttttt

SEQ ID NO: 50584 - DNA, 15 bp, Homo sapiens
tgcaaaatttttttt

SEQ ID NO: 50585 - DNA, 15 bp, Homo sapiens
ctgcaaaattttttt

SEQ ID NO: 50586 - DNA, 15 bp, Homo sapiens
gctgcaaaatttttt

SEQ ID NO: 50587 - DNA, 15 bp, Homo sapiens
cgctgcaaaattttt

SEQ ID NO: 50588 - DNA, 15 bp, Homo sapiens
gcgctgcaaaatttt

SEQ ID NO: 50589 - DNA, 15 bp, Homo sapiens
tgcgctgcaaaattt

SEQ ID NO: 50590 - DNA, 15 bp, Homo sapiens
ttgcgctgcaaaatt

SEQ ID NO: 50591 - DNA, 15 bp, Homo sapiens
tttgcgctgcaaaat

SEQ ID NO: 50592 - DNA, 15 bp, Homo sapiens
gtttgcgctgcaaaa

SEQ ID NO: 50593 - DNA, 15 bp, Homo sapiens
ggtttgcgctgcaaa

SEQ ID NO: 50594 - DNA, 15 bp, Homo sapiens
tggtttgcgctgcaa

SEQ ID NO: 50595 - DNA, 15 bp, Homo sapiens
ctggtttgcgctgca

SEQ ID NO: 50596 - DNA, 15 bp, Homo sapiens
cctggtttgcgctgc

SEQ ID NO: 50597 - DNA, 15 bp, Homo sapiens
tcctggtttgcgctg

SEQ ID NO: 50598 - DNA, 15 bp, Homo sapiens
atcctggtttgcgct

SEQ ID NO: 50599 - DNA, 15 bp, Homo sapiens
tatcctggtttgcgc

SEQ ID NO: 50600 - DNA, 15 bp, Homo sapiens
atatcctggtttgcg

SEQ ID NO: 50601 - DNA, 15 bp, Homo sapiens
gatatcctggtttgc

SEQ ID NO: 50602 - DNA, 15 bp, Homo sapiens
ggatatcctggtttg

SEQ ID NO: 50603 - DNA, 15 bp, Homo sapiens
aggatatcctggttt

SEQ ID NO: 50604 - DNA, 15 bp, Homo sapiens
gaggatatcctggtt

SEQ ID NO: 50605 - DNA, 15 bp, Homo sapiens
agaggatatcctggt

SEQ ID NO: 50606 - DNA, 15 bp, Homo sapiens
cagaggatatcctgg

SEQ ID NO: 50607 - DNA, 15 bp, Homo sapiens
acagaggatatcctg

SEQ ID NO: 50608 - DNA, 15 bp, Homo sapiens
aacagaggatatcct

SEQ ID NO: 50609 - DNA, 15 bp, Homo sapiens
gaacagaggatatcc

SEQ ID NO: 50610 - DNA, 15 bp, Homo sapiens
agaacagaggatatc

SEQ ID NO: 50611 - DNA, 15 bp, Homo sapiens
gagaacagaggatat

SEQ ID NO: 50612 - DNA, 15 bp, Homo sapiens
tgagaacagaggata

SEQ ID NO: 50613 - DNA, 15 bp, Homo sapiens
atgagaacagaggat

SEQ ID NO: 50614 - DNA, 15 bp, Homo sapiens
aatgagaacagagga

SEQ ID NO: 50615 - DNA, 15 bp, Homo sapiens
aaatgagaacagagg

SEQ ID NO: 50616 - DNA, 15 bp, Homo sapiens
caaatgagaacagag

SEQ ID NO: 50617 - DNA, 15 bp, Homo sapiens
acaaatgagaacaga

SEQ ID NO: 50618 - DNA, 15 bp, Homo sapiens
aacaaatgagaacag

SEQ ID NO: 50619 - DNA, 15 bp, Homo sapiens
gaacaaatgagaaca

SEQ ID NO: 50620 - DNA, 15 bp, Homo sapiens
agaacaaatgagaac

SEQ ID NO: 50621 - DNA, 15 bp, Homo sapiens
tagaacaaatgagaa

SEQ ID NO: 50622 - DNA, 15 bp, Homo sapiens
ctagaacaaatgaga

SEQ ID NO: 50623 - DNA, 15 bp, Homo sapiens
tctagaacaaatgag

SEQ ID NO: 50624 - DNA, 15 bp, Homo sapiens
atctagaacaaatga

SEQ ID NO: 50625 - DNA, 15 bp, Homo sapiens
aatctagaacaaatg

SEQ ID NO: 50626 - DNA, 15 bp, Homo sapiens
aaatctagaacaaat

SEQ ID NO: 50627 - DNA, 15 bp, Homo sapiens
gaaatctagaacaaa

SEQ ID NO: 50628 - DNA, 15 bp, Homo sapiens
tgaaatctagaacaa

SEQ ID NO: 50629 - DNA, 15 bp, Homo sapiens
ttgaaatctagaaca

SEQ ID NO: 50630 - DNA, 15 bp, Homo sapiens
tttgaaatctagaac

SEQ ID NO: 50631 - DNA, 15 bp, Homo sapiens
ttttgaaatctagaa

SEQ ID NO: 50632 - DNA, 15 bp, Homo sapiens
cttttgaaatctaga

SEQ ID NO: 50633 - DNA, 15 bp, Homo sapiens
tcttttgaaatctag

SEQ ID NO: 50634 - DNA, 15 bp, Homo sapiens
ttcttttgaaatcta

SEQ ID NO: 50635 - DNA, 15 bp, Homo sapiens
tttcttttgaaatct

SEQ ID NO: 50636 - DNA, 15 bp, Homo sapiens
gtttcttttgaaatc

SEQ ID NO: 50637 - DNA, 15 bp, Homo sapiens
tgtttcttttgaaat

SEQ ID NO: 50638 - DNA, 15 bp, Homo sapiens
ctgtttcttttgaaa

SEQ ID NO: 50639 - DNA, 15 bp, Homo sapiens
actgtttcttttgaa

SEQ ID NO: 50640 - DNA, 15 bp, Homo sapiens
gactgtttcttttga

SEQ ID NO: 50641 - DNA, 15 bp, Homo sapiens
ggactgtttcttttg

SEQ ID NO: 50642 - DNA, 15 bp, Homo sapiens
aggactgtttctttt

SEQ ID NO: 50643 - DNA, 15 bp, Homo sapiens
aaggactgtttcttt

SEQ ID NO: 50644 - DNA, 15 bp, Homo sapiens
aaaggactgtttctt

SEQ ID NO: 50645 - DNA, 15 bp, Homo sapiens
gaaaggactgtttct

SEQ ID NO: 50646 - DNA, 15 bp, Homo sapiens
agaaaggactgtttc

SEQ ID NO: 50647 - DNA, 15 bp, Homo sapiens
aagaaaggactgttt

SEQ ID NO: 50648 - DNA, 15 bp, Homo sapiens
aaagaaaggactgtt

SEQ ID NO: 50649 - DNA, 15 bp, Homo sapiens
caaagaaaggactgt

SEQ ID NO: 50650 - DNA, 15 bp, Homo sapiens
ccaaagaaaggactg

SEQ ID NO: 50651 - DNA, 15 bp, Homo sapiens
cccaaagaaaggact

SEQ ID NO: 50652 - DNA, 15 bp, Homo sapiens
ccccaaagaaaggac

SEQ ID NO: 50653 - DNA, 15 bp, Homo sapiens
tccccaaagaaagga

SEQ ID NO: 50654 - DNA, 15 bp, Homo sapiens
ttccccaaagaaagg

SEQ ID NO: 50655 - DNA, 15 bp, Homo sapiens
tttccccaaagaaag

SEQ ID NO: 50656 - DNA, 15 bp, Homo sapiens
ttttccccaaagaaa

SEQ ID NO: 50657 - DNA, 15 bp, Homo sapiens
cttttccccaaagaa

SEQ ID NO: 50658 - DNA, 15 bp, Homo sapiens
tcttttccccaaaga

SEQ ID NO: 50659 - DNA, 15 bp, Homo sapiens
ctcttttccccaaag

SEQ ID NO: 50660 - DNA, 15 bp, Homo sapiens
tctcttttccccaaa

SEQ ID NO: 50661 - DNA, 15 bp, Homo sapiens
ttctcttttccccaa

SEQ ID NO: 50662 - DNA, 15 bp, Homo sapiens
tttctcttttcccca

SEQ ID NO: 50663 - DNA, 15 bp, Homo sapiens
ctttctcttttcccc

SEQ ID NO: 50664 - DNA, 15 bp, Homo sapiens
cctttctcttttccc

SEQ ID NO: 50665 - DNA, 15 bp, Homo sapiens
tcctttctcttttcc

SEQ ID NO: 50666 - DNA, 15 bp, Homo sapiens
ttcctttctcttttc

SEQ ID NO: 50667 - DNA, 15 bp, Homo sapiens
tttcctttctctttt

SEQ ID NO: 50668 - DNA, 15 bp, Homo sapiens
ttttcctttctcttt

SEQ ID NO: 50669 - DNA, 15 bp, Homo sapiens
cttttcctttctctt

SEQ ID NO: 50670 - DNA, 15 bp, Homo sapiens
ccttttcctttctct

SEQ ID NO: 50671 - DNA, 15 bp, Homo sapiens
tccttttcctttctc

SEQ ID NO: 50672 - DNA, 15 bp, Homo sapiens
ctccttttcctttct

SEQ ID NO: 50673 - DNA, 15 bp, Homo sapiens
actccttttcctttc

SEQ ID NO: 50674 - DNA, 15 bp, Homo sapiens
aactccttttccttt

SEQ ID NO: 50675 - DNA, 15 bp, Homo sapiens
aaactccttttcctt

SEQ ID NO: 50676 - DNA, 15 bp, Homo sapiens
aaaactccttttcct

SEQ ID NO: 50677 - DNA, 15 bp, Homo sapiens
taaaactccttttcc

SEQ ID NO: 50678 - DNA, 15 bp, Homo sapiens
ataaaactccttttc

SEQ ID NO: 50679 - DNA, 15 bp, Homo sapiens
tataaaactcctttt

SEQ ID NO: 50680 - DNA, 15 bp, Homo sapiens
ttataaaactccttt

SEQ ID NO: 50681 - DNA, 15 bp, Homo sapiens
tttataaaactcctt

SEQ ID NO: 50682 - DNA, 15 bp, Homo sapiens
ttttataaaactcct

SEQ ID NO: 50683 - DNA, 15 bp, Homo sapiens
cttttataaaactcc

SEQ ID NO: 50684 - DNA, 15 bp, Homo sapiens
ccttttataaaactc

SEQ ID NO: 50685 - DNA, 15 bp, Homo sapiens
tccttttataaaact

SEQ ID NO: 50686 - DNA, 15 bp, Homo sapiens
ttccttttataaaac

SEQ ID NO: 50687 - DNA, 15 bp, Homo sapiens
tttccttttataaaa

SEQ ID NO: 50688 - DNA, 15 bp, Homo sapiens
ctttccttttataaa

SEQ ID NO: 50689 - DNA, 15 bp, Homo sapiens
tctttccttttataa

SEQ ID NO: 50690 - DNA, 15 bp, Homo sapiens
ttctttccttttata

SEQ ID NO: 50691 - DNA, 15 bp, Homo sapiens
tttctttccttttat

SEQ ID NO: 50692 - DNA, 15 bp, Homo sapiens
ttttctttcctttta

SEQ ID NO: 50693 - DNA, 15 bp, Homo sapiens
cttttctttcctttt

SEQ ID NO: 50694 - DNA, 15 bp, Homo sapiens
tcttttctttccttt

SEQ ID NO: 50695 - DNA, 15 bp, Homo sapiens
atcttttctttcctt

SEQ ID NO: 50696 - DNA, 15 bp, Homo sapiens
aatcttttctttcct

SEQ ID NO: 50697 - DNA, 15 bp, Homo sapiens
gaatcttttctttcc

SEQ ID NO: 50698 - DNA, 15 bp, Homo sapiens
tgaatcttttctttc

SEQ ID NO: 50699 - DNA, 15 bp, Homo sapiens
atgaatcttttcttt

SEQ ID NO: 50700 - DNA, 15 bp, Homo sapiens
tatgaatcttttctt

SEQ ID NO: 50701 - DNA, 15 bp, Homo sapiens
ttatgaatcttttct

SEQ ID NO: 50702 - DNA, 15 bp, Homo sapiens
cttatgaatcttttc

SEQ ID NO: 50703 - DNA, 15 bp, Homo sapiens
tcttatgaatctttt

SEQ ID NO: 50704 - DNA, 15 bp, Homo sapiens
ttcttatgaatcttt

SEQ ID NO: 50705 - DNA, 15 bp, Homo sapiens
gttcttatgaatctt

SEQ ID NO: 50706 - DNA, 15 bp, Homo sapiens
tgttcttatgaatct

SEQ ID NO: 50707 - DNA, 15 bp, Homo sapiens
ttgttcttatgaatc

SEQ ID NO: 50708 - DNA, 15 bp, Homo sapiens
cttgttcttatgaat

SEQ ID NO: 50709 - DNA, 15 bp, Homo sapiens
tcttgttcttatgaa

SEQ ID NO: 50710 - DNA, 15 bp, Homo sapiens
ttcttgttcttatga

SEQ ID NO: 50711 - DNA, 15 bp, Homo sapiens
cttcttgttcttatg

SEQ ID NO: 50712 - DNA, 15 bp, Homo sapiens
acttcttgttcttat

SEQ ID NO: 50713 - DNA, 15 bp, Homo sapiens
cacttcttgttctta

SEQ ID NO: 50714 - DNA, 15 bp, Homo sapiens
ccacttcttgttctt

SEQ ID NO: 50715 - DNA, 15 bp, Homo sapiens
cccacttcttgttct

SEQ ID NO: 50716 - DNA, 15 bp, Homo sapiens
gcccacttcttgttc

SEQ ID NO: 50717 - DNA, 15 bp, Homo sapiens
ggcccacttcttgtt

SEQ ID NO: 50718 - DNA, 15 bp, Homo sapiens
gggcccacttcttgt

SEQ ID NO: 50719 - DNA, 15 bp, Homo sapiens
tgggcccacttcttg

SEQ ID NO: 50720 - DNA, 15 bp, Homo sapiens
gtgggcccacttctt

SEQ ID NO: 50721 - DNA, 15 bp, Homo sapiens
agtgggcccacttct

SEQ ID NO: 50722 - DNA, 15 bp, Homo sapiens
aagtgggcccacttc

SEQ ID NO: 50723 - DNA, 15 bp, Homo sapiens
caagtgggcccactt

SEQ ID NO: 50724 - DNA, 15 bp, Homo sapiens
gcaagtgggcccact

SEQ ID NO: 50725 - DNA, 15 bp, Homo sapiens
tgcaagtgggcccac

SEQ ID NO: 50726 - DNA, 15 bp, Homo sapiens
atgcaagtgggccca

SEQ ID NO: 50727 - DNA, 15 bp, Homo sapiens
tatgcaagtgggccc

SEQ ID NO: 50728 - DNA, 15 bp, Homo sapiens
atatgcaagtgggcc

SEQ ID NO: 50729 - DNA, 15 bp, Homo sapiens
tatatgcaagtgggc

SEQ ID NO: 50730 - DNA, 15 bp, Homo sapiens
gtatatgcaagtggg

SEQ ID NO: 50731 - DNA, 15 bp, Homo sapiens
ggtatatgcaagtgg

SEQ ID NO: 50732 - DNA, 15 bp, Homo sapiens
aggtatatgcaagtg

SEQ ID NO: 50733 - DNA, 15 bp, Homo sapiens
aaggtatatgcaagt

SEQ ID NO: 50734 - DNA, 15 bp, Homo sapiens
aaaggtatatgcaag

SEQ ID NO: 50735 - DNA, 15 bp, Homo sapiens
caaaggtatatgcaa

SEQ ID NO: 50736 - DNA, 15 bp, Homo sapiens
acaaaggtatatgca

SEQ ID NO: 50737 - DNA, 15 bp, Homo sapiens
tacaaaggtatatgc

SEQ ID NO: 50738 - DNA, 15 bp, Homo sapiens
ctacaaaggtatatg

SEQ ID NO: 50739 - DNA, 15 bp, Homo sapiens
tctacaaaggtatat

SEQ ID NO: 50740 - DNA, 15 bp, Homo sapiens
ttctacaaaggtata

SEQ ID NO: 50741 - DNA, 15 bp, Homo sapiens
tttctacaaaggtat

SEQ ID NO: 50742 - DNA, 15 bp, Homo sapiens
ttttctacaaaggta

SEQ ID NO: 50743 - DNA, 15 bp, Homo sapiens
gttttctacaaaggt

SEQ ID NO: 50744 - DNA, 15 bp, Homo sapiens
agttttctacaaagg

SEQ ID NO: 50745 - DNA, 15 bp, Homo sapiens
cagttttctacaaag

SEQ ID NO: 50746 - DNA, 15 bp, Homo sapiens
acagttttctacaaa

SEQ ID NO: 50747 - DNA, 15 bp, Homo sapiens
aacagttttctacaa

SEQ ID NO: 50748 - DNA, 15 bp, Homo sapiens
gaacagttttctaca

SEQ ID NO: 50749 - DNA, 15 bp, Homo sapiens
tgaacagttttctac

SEQ ID NO: 50750 - DNA, 15 bp, Homo sapiens
gtgaacagttttcta

SEQ ID NO: 50751 - DNA, 15 bp, Homo sapiens
agtgaacagttttct

SEQ ID NO: 50752 - DNA, 15 bp, Homo sapiens
cagtgaacagttttc

SEQ ID NO: 50753 - DNA, 15 bp, Homo sapiens
acagtgaacagtttt

SEQ ID NO: 50754 - DNA, 15 bp, Homo sapiens
aacagtgaacagttt

SEQ ID NO: 50755 - DNA, 15 bp, Homo sapiens
caacagtgaacagtt

SEQ ID NO: 50756 - DNA, 15 bp, Homo sapiens
acaacagtgaacagt

SEQ ID NO: 50757 - DNA, 15 bp, Homo sapiens
aacaacagtgaacag

SEQ ID NO: 50758 - DNA, 15 bp, Homo sapiens
caacaacagtgaaca

SEQ ID NO: 50759 - DNA, 15 bp, Homo sapiens
tcaacaacagtgaac

SEQ ID NO: 50760 - DNA, 15 bp, Homo sapiens
ttcaacaacagtgaa

SEQ ID NO: 50761 - DNA, 15 bp, Homo sapiens
cttcaacaacagtga

SEQ ID NO: 50762 - DNA, 15 bp, Homo sapiens
tcttcaacaacagtg

SEQ ID NO: 50763 - DNA, 15 bp, Homo sapiens
ttcttcaacaacagt

SEQ ID NO: 50764 - DNA, 15 bp, Homo sapiens
tttcttcaacaacag

SEQ ID NO: 50765 - DNA, 15 bp, Homo sapiens
ttttcttcaacaaca

SEQ ID NO: 50766 - DNA, 15 bp, Homo sapiens
cttttcttcaacaac

SEQ ID NO: 50767 - DNA, 15 bp, Homo sapiens
gcttttcttcaacaa

SEQ ID NO: 50768 - DNA, 15 bp, Homo sapiens
agcttttcttcaaca

SEQ ID NO: 50769 - DNA, 15 bp, Homo sapiens
gagcttttcttcaac

SEQ ID NO: 50770 - DNA, 15 bp, Homo sapiens
agagcttttcttcaa

SEQ ID NO: 50771 - DNA, 15 bp, Homo sapiens
aagagcttttcttca

SEQ ID NO: 50772 - DNA, 15 bp, Homo sapiens
gaagagcttttcttc

SEQ ID NO: 50773 - DNA, 15 bp, Homo sapiens
tgaagagcttttctt

SEQ ID NO: 50774 - DNA, 15 bp, Homo sapiens
atgaagagcttttct

SEQ ID NO: 50775 - DNA, 15 bp, Homo sapiens
tatgaagagcttttc

SEQ ID NO: 50776 - DNA, 15 bp, Homo sapiens
atatgaagagctttt

SEQ ID NO: 50777 - DNA, 15 bp, Homo sapiens
aatatgaagagcttt

SEQ ID NO: 50778 - DNA, 15 bp, Homo sapiens
taatatgaagagctt

SEQ ID NO: 50779 - DNA, 15 bp, Homo sapiens
ttaatatgaagagct

SEQ ID NO: 50780 - DNA, 15 bp, Homo sapiens
attaatatgaagagc

SEQ ID NO: 50781 - DNA, 15 bp, Homo sapiens
tattaatatgaagag

SEQ ID NO: 50782 - DNA, 15 bp, Homo sapiens
atattaatatgaaga

SEQ ID NO: 50783 - DNA, 15 bp, Homo sapiens
catattaatatgaag

SEQ ID NO: 50784 - DNA, 15 bp, Homo sapiens
gcatattaatatgaa

SEQ ID NO: 50785 - DNA, 15 bp, Homo sapiens
tgcatattaatatga

SEQ ID NO: 50786 - DNA, 15 bp, Homo sapiens
ctgcatattaatatg

SEQ ID NO: 50787 - DNA, 15 bp, Homo sapiens
actgcatattaatat

SEQ ID NO: 50788 - DNA, 15 bp, Homo sapiens
gactgcatattaata

SEQ ID NO: 50789 - DNA, 15 bp, Homo sapiens
ggactgcatattaat

SEQ ID NO: 50790 - DNA, 15 bp, Homo sapiens
tggactgcatattaa

SEQ ID NO: 50791 - DNA, 15 bp, Homo sapiens
ctggactgcatatta

SEQ ID NO: 50792 - DNA, 15 bp, Homo sapiens
tctggactgcatatt

SEQ ID NO: 50793 - DNA, 15 bp, Homo sapiens
atctggactgcatat

SEQ ID NO: 50794 - DNA, 15 bp, Homo sapiens
catctggactgcata

SEQ ID NO: 50795 - DNA, 15 bp, Homo sapiens
gcatctggactgcat

SEQ ID NO: 50796 - DNA, 15 bp, Homo sapiens
tgcatctggactgca

SEQ ID NO: 50797 - DNA, 15 bp, Homo sapiens
ctgcatctggactgc

SEQ ID NO: 50798 - DNA, 15 bp, Homo sapiens
actgcatctggactg

SEQ ID NO: 50799 - DNA, 15 bp, Homo sapiens
cactgcatctggact

SEQ ID NO: 50800 - DNA, 15 bp, Homo sapiens
ccactgcatctggac

SEQ ID NO: 50801 - DNA, 15 bp, Homo sapiens
gccactgcatctgga

SEQ ID NO: 50802 - DNA, 15 bp, Homo sapiens
agccactgcatctgg

SEQ ID NO: 50803 - DNA, 15 bp, Homo sapiens
gagccactgcatctg

SEQ ID NO: 50804 - DNA, 15 bp, Homo sapiens
tgagccactgcatct

SEQ ID NO: 50805 - DNA, 15 bp, Homo sapiens
gtgagccactgcatc

SEQ ID NO: 50806 - DNA, 15 bp, Homo sapiens
tgtgagccactgcat

SEQ ID NO: 50807 - DNA, 15 bp, Homo sapiens
gtgtgagccactgca

SEQ ID NO: 50808 - DNA, 15 bp, Homo sapiens
agtgtgagccactgc

SEQ ID NO: 50809 - DNA, 15 bp, Homo sapiens
aagtgtgagccactg

SEQ ID NO: 50810 - DNA, 15 bp, Homo sapiens
taagtgtgagccact

SEQ ID NO: 50811 - DNA, 15 bp, Homo sapiens
ataagtgtgagccac

SEQ ID NO: 50812 - DNA, 15 bp, Homo sapiens
tataagtgtgagcca

SEQ ID NO: 50813 - DNA, 15 bp, Homo sapiens
ttataagtgtgagcc

SEQ ID NO: 50814 - DNA, 15 bp, Homo sapiens
attataagtgtgagc

SEQ ID NO: 50815 - DNA, 15 bp, Homo sapiens
gattataagtgtgag

SEQ ID NO: 50816 - DNA, 15 bp, Homo sapiens
agattataagtgtga

SEQ ID NO: 50817 - DNA, 15 bp, Homo sapiens
gagattataagtgtg

SEQ ID NO: 50818 - DNA, 15 bp, Homo sapiens
tgagattataagtgt

SEQ ID NO: 50819 - DNA, 15 bp, Homo sapiens
ctgagattataagtg

SEQ ID NO: 50820 - DNA, 15 bp, Homo sapiens
gctgagattataagt

SEQ ID NO: 50821 - DNA, 15 bp, Homo sapiens
ggctgagattataag

SEQ ID NO: 50822 - DNA, 15 bp, Homo sapiens
gggctgagattataa

SEQ ID NO: 50823 - DNA, 15 bp, Homo sapiens
agggctgagattata

SEQ ID NO: 50824 - DNA, 15 bp, Homo sapiens
aagggctgagattat

SEQ ID NO: 50825 - DNA, 15 bp, Homo sapiens
aaagggctgagatta

SEQ ID NO: 50826 - DNA, 15 bp, Homo sapiens
caaagggctgagatt

SEQ ID NO: 50827 - DNA, 15 bp, Homo sapiens
ccaaagggctgagat

SEQ ID NO: 50828 - DNA, 15 bp, Homo sapiens
cccaaagggctgaga

SEQ ID NO: 50829 - DNA, 15 bp, Homo sapiens
tcccaaagggctgag

SEQ ID NO: 50830 - DNA, 15 bp, Homo sapiens
ctcccaaagggctga

SEQ ID NO: 50831 - DNA, 15 bp, Homo sapiens
cctcccaaagggctg

SEQ ID NO: 50832 - DNA, 15 bp, Homo sapiens
gcctcccaaagggct

SEQ ID NO: 50833 - DNA, 15 bp, Homo sapiens
agcctcccaaagggc

SEQ ID NO: 50834 - DNA, 15 bp, Homo sapiens
gtctcagcctcccaa

SEQ ID NO: 50835 - DNA, 15 bp, Homo sapiens
tgtctcagcctccca

SEQ ID NO: 50836 - DNA, 15 bp, Homo sapiens
ctgtctcagcctccc

SEQ ID NO: 50837 - DNA, 15 bp, Homo sapiens
aatcttcctgtctca

SEQ ID NO: 50838 - DNA, 15 bp, Homo sapiens
taatcttcctgtctc

SEQ ID NO: 50839 - DNA, 15 bp, Homo sapiens
gtaatcttcctgtct

SEQ ID NO: 50840 - DNA, 15 bp, Homo sapiens
agtaatcttcctgtc

SEQ ID NO: 50841 - DNA, 15 bp, Homo sapiens
aagtaatcttcctgt

SEQ ID NO: 50842 - DNA, 15 bp, Homo sapiens
caagtaatcttcctg

SEQ ID NO: 50843 - DNA, 15 bp, Homo sapiens
tcaagtaatcttcct

SEQ ID NO: 50844 - DNA, 15 bp, Homo sapiens
ctcaagtaatcttcc

SEQ ID NO: 50845 - DNA, 15 bp, Homo sapiens
cctcaagtaatcttc

SEQ ID NO: 50846 - DNA, 15 bp, Homo sapiens
gcctcaagtaatctt

SEQ ID NO: 50847 - DNA, 15 bp, Homo sapiens
ggcctcaagtaatct

SEQ ID NO: 50848 - DNA, 15 bp, Homo sapiens
tggcctcaagtaatc

SEQ ID NO: 50849 - DNA, 15 bp, Homo sapiens
ctggcctcaagtaat

SEQ ID NO: 50850 - DNA, 15 bp, Homo sapiens
cctggcctcaagtaa

SEQ ID NO: 50851 - DNA, 15 bp, Homo sapiens
tcctggcctcaagta

SEQ ID NO: 50852 - DNA, 15 bp, Homo sapiens
ctcctggcctcaagt

SEQ ID NO: 50853 - DNA, 15 bp, Homo sapiens
gtttcaaactcctgg

SEQ ID NO: 50854 - DNA, 15 bp, Homo sapiens
ggtttcaaactcctg

SEQ ID NO: 50855 - DNA, 15 bp, Homo sapiens
tggtttcaaactcct

SEQ ID NO: 50856 - DNA, 15 bp, Homo sapiens
ctggtttcaaactcc

SEQ ID NO: 50857 - DNA, 15 bp, Homo sapiens
gctggtttcaaactc

SEQ ID NO: 50858 - DNA, 15 bp, Homo sapiens
cccaggctggtttca

SEQ ID NO: 50859 - DNA, 15 bp, Homo sapiens
gcccaggctggtttc

SEQ ID NO: 50860 - DNA, 15 bp, Homo sapiens
tgcccaggctggttt

SEQ ID NO: 50861 - DNA, 15 bp, Homo sapiens
ttgcccaggctggtt

SEQ ID NO: 50862 - DNA, 15 bp, Homo sapiens
agtctcactatgttg

SEQ ID NO: 50863 - DNA, 15 bp, Homo sapiens
gagtctcactatgtt

SEQ ID NO: 50864 - DNA, 15 bp, Homo sapiens
agagtctcactatgt

SEQ ID NO: 50865 - DNA, 15 bp, Homo sapiens
cagagtctcactatg

SEQ ID NO: 50866 - DNA, 15 bp, Homo sapiens
acagagtctcactat

SEQ ID NO: 50867 - DNA, 15 bp, Homo sapiens
gacagagtctcacta

SEQ ID NO: 50868 - DNA, 15 bp, Homo sapiens
ggagacagagtctca

SEQ ID NO: 50869 - DNA, 15 bp, Homo sapiens
tggagacagagtctc

SEQ ID NO: 50870 - DNA, 15 bp, Homo sapiens
gtggagacagagtct

SEQ ID NO: 50871 - DNA, 15 bp, Homo sapiens
tgtggagacagagtc

SEQ ID NO: 50872 - DNA, 15 bp, Homo sapiens
ttgtggagacagagt

SEQ ID NO: 50873 - DNA, 15 bp, Homo sapiens
tttgtggagacagag

SEQ ID NO: 50874 - DNA, 15 bp, Homo sapiens
ttttgtggagacaga

SEQ ID NO: 50875 - DNA, 15 bp, Homo sapiens
attttgtggagacag

SEQ ID NO: 50876 - DNA, 15 bp, Homo sapiens
aattttgtggagaca

SEQ ID NO: 50877 - DNA, 15 bp, Homo sapiens
aaattttgtggagac

SEQ ID NO: 50878 - DNA, 15 bp, Homo sapiens
aaaattttgtggaga

SEQ ID NO: 50879 - DNA, 15 bp, Homo sapiens
aaaaattttgtggag

SEQ ID NO: 50880 - DNA, 15 bp, Homo sapiens
aaaaaattttgtgga

SEQ ID NO: 50881 - DNA, 15 bp, Homo sapiens
aaaaaaattttgtgg

SEQ ID NO: 50882 - DNA, 15 bp, Homo sapiens
aaaaaaaattttgtg

SEQ ID NO: 50883 - DNA, 15 bp, Homo sapiens
aaaaaaaaattttgt

SEQ ID NO: 50884 - DNA, 15 bp, Homo sapiens
taaaaaaaaattttg

SEQ ID NO: 50885 - DNA, 15 bp, Homo sapiens
ttaaaaaaaaatttt

SEQ ID NO: 50886 - DNA, 15 bp, Homo sapiens
attaaaaaaaaattt

SEQ ID NO: 50887 - DNA, 15 bp, Homo sapiens
aattaaaaaaaaatt

SEQ ID NO: 50888 - DNA, 15 bp, Homo sapiens
taattaaaaaaaaat

SEQ ID NO: 50889 - DNA, 15 bp, Homo sapiens
ctaattaaaaaaaaa

SEQ ID NO: 50890 - DNA, 15 bp, Homo sapiens
gctaattaaaaaaaa

SEQ ID NO: 50891 - DNA, 15 bp, Homo sapiens
ggctaattaaaaaaa

SEQ ID NO: 50892 - DNA, 15 bp, Homo sapiens
cggctaattaaaaaa

SEQ ID NO: 50893 - DNA, 15 bp, Homo sapiens
ccggctaattaaaaa

SEQ ID NO: 50894 - DNA, 15 bp, Homo sapiens
cccggctaattaaaa

SEQ ID NO: 50895 - DNA, 15 bp, Homo sapiens
gcccggctaattaaa

SEQ ID NO: 50896 - DNA, 15 bp, Homo sapiens
tgcccggctaattaa

SEQ ID NO: 50897 - DNA, 15 bp, Homo sapiens
atgcccggctaatta

SEQ ID NO: 50898 - DNA, 15 bp, Homo sapiens
gccatgcccggctaa

SEQ ID NO: 50899 - DNA, 15 bp, Homo sapiens
tgccatgcccggcta

SEQ ID NO: 50900 - DNA, 15 bp, Homo sapiens
ctgccatgcccggct

SEQ ID NO: 50901 - DNA, 15 bp, Homo sapiens
actgccatgcccggc

SEQ ID NO: 50902 - DNA, 15 bp, Homo sapiens
cactgccatgcccgg

SEQ ID NO: 50903 - DNA, 15 bp, Homo sapiens
acactgccatgcccg

SEQ ID NO: 50904 - DNA, 15 bp, Homo sapiens
cacactgccatgccc

SEQ ID NO: 50905 - DNA, 15 bp, Homo sapiens
gcacactgccatgcc

SEQ ID NO: 50906 - DNA, 15 bp, Homo sapiens
agcacactgccatgc

SEQ ID NO: 50907 - DNA, 15 bp, Homo sapiens
aagcacactgccatg

SEQ ID NO: 50908 - DNA, 15 bp, Homo sapiens
gaagcacactgccat

SEQ ID NO: 50909 - DNA, 15 bp, Homo sapiens
agaagcacactgcca

SEQ ID NO: 50910 - DNA, 15 bp, Homo sapiens
cagaagcacactgcc

SEQ ID NO: 50911 - DNA, 15 bp, Homo sapiens
acagaagcacactgc

SEQ ID NO: 50912 - DNA, 15 bp, Homo sapiens
tacagaagcacactg

SEQ ID NO: 50913 - DNA, 15 bp, Homo sapiens
ctacagaagcacact

SEQ ID NO: 50914 - DNA, 15 bp, Homo sapiens
actacagaagcacac

SEQ ID NO: 50915 - DNA, 15 bp, Homo sapiens
gactacagaagcaca

SEQ ID NO: 50916 - DNA, 15 bp, Homo sapiens
agactacagaagcac

SEQ ID NO: 50917 - DNA, 15 bp, Homo sapiens
aagactacagaagca

SEQ ID NO: 50918 - DNA, 15 bp, Homo sapiens
taagactacagaagc

SEQ ID NO: 50919 - DNA, 15 bp, Homo sapiens
ctaagactacagaag

SEQ ID NO: 50920 - DNA, 15 bp, Homo sapiens
gctaagactacagaa

SEQ ID NO: 50921 - DNA, 15 bp, Homo sapiens
agctaagactacaga

SEQ ID NO: 50922 - DNA, 15 bp, Homo sapiens
tagctaagactacag

SEQ ID NO: 50923 - DNA, 15 bp, Homo sapiens
gtagctaagactaca

SEQ ID NO: 50924 - DNA, 15 bp, Homo sapiens
agtagctaagactac

SEQ ID NO: 50925 - DNA, 15 bp, Homo sapiens
cagtagctaagacta

SEQ ID NO: 50926 - DNA, 15 bp, Homo sapiens
tcagtagctaagact

SEQ ID NO: 50927 - DNA, 15 bp, Homo sapiens
ctcagtagctaagac

SEQ ID NO: 50928 - DNA, 15 bp, Homo sapiens
cctcagtagctaaga

SEQ ID NO: 50929 - DNA, 15 bp, Homo sapiens
tcctcagtagctaag

SEQ ID NO: 50930 - DNA, 15 bp, Homo sapiens
ttcctcagtagctaa

SEQ ID NO: 50931 - DNA, 15 bp, Homo sapiens
cttcctcagtagcta

SEQ ID NO: 50932 - DNA, 15 bp, Homo sapiens
gcttcctcagtagct

SEQ ID NO: 50933 - DNA, 15 bp, Homo sapiens
agcttcctcagtagc

SEQ ID NO: 50934 - DNA, 15 bp, Homo sapiens
tagcttcctcagtag

SEQ ID NO: 50935 - DNA, 15 bp, Homo sapiens
ttagcttcctcagta

SEQ ID NO: 50936 - DNA, 15 bp, Homo sapiens
cttagcttcctcagt

SEQ ID NO: 50937 - DNA, 15 bp, Homo sapiens
gcttagcttcctcag

SEQ ID NO: 50938 - DNA, 15 bp, Homo sapiens
ggcttagcttcctca

SEQ ID NO: 50939 - DNA, 15 bp, Homo sapiens
tggcttagcttcctc

SEQ ID NO: 50940 - DNA, 15 bp, Homo sapiens
ctggcttagcttcct

SEQ ID NO: 50941 - DNA, 15 bp, Homo sapiens
tctggcttagcttcc

SEQ ID NO: 50942 - DNA, 15 bp, Homo sapiens
ttctggcttagcttc

SEQ ID NO: 50943 - DNA, 15 bp, Homo sapiens
cttctggcttagctt

SEQ ID NO: 50944 - DNA, 15 bp, Homo sapiens
tcttctggcttagct

SEQ ID NO: 50945 - DNA, 15 bp, Homo sapiens
ttcttctggcttagc

SEQ ID NO: 50946 - DNA, 15 bp, Homo sapiens
attcttctggcttag

SEQ ID NO: 50947 - DNA, 15 bp, Homo sapiens
gattcttctggctta

SEQ ID NO: 50948 - DNA, 15 bp, Homo sapiens
tgattcttctggctt

SEQ ID NO: 50949 - DNA, 15 bp, Homo sapiens
gtgattcttctggct

SEQ ID NO: 50950 - DNA, 15 bp, Homo sapiens
agtgattcttctggc

SEQ ID NO: 50951 - DNA, 15 bp, Homo sapiens
aagtgattcttctgg

SEQ ID NO: 50952 - DNA, 15 bp, Homo sapiens
caagtgattcttctg

SEQ ID NO: 50953 - DNA, 15 bp, Homo sapiens
tcaagtgattcttct

SEQ ID NO: 50954 - DNA, 15 bp, Homo sapiens
ctcaagtgattcttc

SEQ ID NO: 50955 - DNA, 15 bp, Homo sapiens
gctcaagtgattctt

SEQ ID NO: 50956 - DNA, 15 bp, Homo sapiens
ggctcaagtgattct

SEQ ID NO: 50957 - DNA, 15 bp, Homo sapiens
gggctcaagtgattc

SEQ ID NO: 50958 - DNA, 15 bp, Homo sapiens
tgggctcaagtgatt

SEQ ID NO: 50959 - DNA, 15 bp, Homo sapiens
ctgggctcaagtgat

SEQ ID NO: 50960 - DNA, 15 bp, Homo sapiens
cctgggctcaagtga

SEQ ID NO: 50961 - DNA, 15 bp, Homo sapiens
tcctgggctcaagtg

SEQ ID NO: 50962 - DNA, 15 bp, Homo sapiens
ctcctgggctcaagt

SEQ ID NO: 50963 - DNA, 15 bp, Homo sapiens
gctcactgcagcctt

SEQ ID NO: 50964 - DNA, 15 bp, Homo sapiens
tatgatcatagctca

SEQ ID NO: 50965 - DNA, 15 bp, Homo sapiens
gtatgatcatagctc

SEQ ID NO: 50966 - DNA, 15 bp, Homo sapiens
ggtatgatcatagct

SEQ ID NO: 50967 - DNA, 15 bp, Homo sapiens
tggtatgatcatagc

SEQ ID NO: 50968 - DNA, 15 bp, Homo sapiens
atggtatgatcatag

SEQ ID NO: 50969 - DNA, 15 bp, Homo sapiens
aatggtatgatcata

SEQ ID NO: 50970 - DNA, 15 bp, Homo sapiens
caatggtatgatcat

SEQ ID NO: 50971 - DNA, 15 bp, Homo sapiens
gcaatggtatgatca

SEQ ID NO: 50972 - DNA, 15 bp, Homo sapiens
tgcaatggtatgatc

SEQ ID NO: 50973 - DNA, 15 bp, Homo sapiens
gtgcaatggtatgat

SEQ ID NO: 50974 - DNA, 15 bp, Homo sapiens
agtgcaatggtatga

SEQ ID NO: 50975 - DNA, 15 bp, Homo sapiens
gagtgcaatggtatg

SEQ ID NO: 50976 - DNA, 15 bp, Homo sapiens
agagtgcaatggtat

SEQ ID NO: 50977 - DNA, 15 bp, Homo sapiens
aagagtgcaatggta

SEQ ID NO: 50978 - DNA, 15 bp, Homo sapiens
caagagtgcaatggt

SEQ ID NO: 50979 - DNA, 15 bp, Homo sapiens
gcaagagtgcaatgg

SEQ ID NO: 50980 - DNA, 15 bp, Homo sapiens
tgcaagagtgcaatg

SEQ ID NO: 50981 - DNA, 15 bp, Homo sapiens
gtgcaagagtgcaat

SEQ ID NO: 50982 - DNA, 15 bp, Homo sapiens
agtgcaagagtgcaa

SEQ ID NO: 50983 - DNA, 15 bp, Homo sapiens
aagtgcaagagtgca

SEQ ID NO: 50984 - DNA, 15 bp, Homo sapiens
caagtgcaagagtgc

SEQ ID NO: 50985 - DNA, 15 bp, Homo sapiens
gcaagtgcaagagtg

SEQ ID NO: 50986 - DNA, 15 bp, Homo sapiens
tgcaagtgcaagagt

SEQ ID NO: 50987 - DNA, 15 bp, Homo sapiens
gtgcaagtgcaagag

SEQ ID NO: 50988 - DNA, 15 bp, Homo sapiens
tgtgcaagtgcaaga

SEQ ID NO: 50989 - DNA, 15 bp, Homo sapiens
ctgtgcaagtgcaag

SEQ ID NO: 50990 - DNA, 15 bp, Homo sapiens
tctgtgcaagtgcaa

SEQ ID NO: 50991 - DNA, 15 bp, Homo sapiens
ctctgtgcaagtgca

SEQ ID NO: 50992 - DNA, 15 bp, Homo sapiens
gctctgtgcaagtgc

SEQ ID NO: 50993 - DNA, 15 bp, Homo sapiens
tgctctgtgcaagtg

SEQ ID NO: 50994 - DNA, 15 bp, Homo sapiens
ttgctctgtgcaagt

SEQ ID NO: 50995 - DNA, 15 bp, Homo sapiens
cttgctctgtgcaag

SEQ ID NO: 50996 - DNA, 15 bp, Homo sapiens
tcttgctctgtgcaa

SEQ ID NO: 50997 - DNA, 15 bp, Homo sapiens
gtcttgctctgtgca

SEQ ID NO: 50998 - DNA, 15 bp, Homo sapiens
ggtcttgctctgtgc

SEQ ID NO: 50999 - DNA, 15 bp, Homo sapiens
gggtcttgctctgtg

SEQ ID NO: 51000 - DNA, 15 bp, Homo sapiens
agggtcttgctctgt

SEQ ID NO: 51001 - DNA, 15 bp, Homo sapiens
cagggtcttgctctg

SEQ ID NO: 51002 - DNA, 15 bp, Homo sapiens
aagagacagggtctt

SEQ ID NO: 51003 - DNA, 15 bp, Homo sapiens
taagagacagggtct

SEQ ID NO: 51004 - DNA, 15 bp, Homo sapiens
tttaagagacagggt

SEQ ID NO: 51005 - DNA, 15 bp, Homo sapiens
ttttaagagacaggg

SEQ ID NO: 51006 - DNA, 15 bp, Homo sapiens
tttttaagagacagg

SEQ ID NO: 51007 - DNA, 15 bp, Homo sapiens
ttttttaagagacag

SEQ ID NO: 51008 - DNA, 15 bp, Homo sapiens
tttttttaagagaca

SEQ ID NO: 51009 - DNA, 15 bp, Homo sapiens
ttttttttaagagac

SEQ ID NO: 51010 - DNA, 15 bp, Homo sapiens
tttttttttaagaga

SEQ ID NO: 51011 - DNA, 15 bp, Homo sapiens
ttttttttttaagag

SEQ ID NO: 51012 - DNA, 15 bp, Homo sapiens
cttttttttttttaa

SEQ ID NO: 51013 - DNA, 15 bp, Homo sapiens
actttttttttttta

SEQ ID NO: 51014 - DNA, 15 bp, Homo sapiens
acacacttttttttt

SEQ ID NO: 51015 - DNA, 15 bp, Homo sapiens
cacacactttttttt

SEQ ID NO: 51016 - DNA, 15 bp, Homo sapiens
acacacacttttttt

SEQ ID NO: 51017 - DNA, 15 bp, Homo sapiens
cacacacactttttt

SEQ ID NO: 51018 - DNA, 15 bp, Homo sapiens
acacacacacttttt

SEQ ID NO: 51019 - DNA, 15 bp, Homo sapiens
cacacacacactttt

SEQ ID NO: 51020 - DNA, 15 bp, Homo sapiens
gcacacacacacttt

SEQ ID NO: 51021 - DNA, 15 bp, Homo sapiens
tgcacacacacactt

SEQ ID NO: 51022 - DNA, 15 bp, Homo sapiens
atgcacacacacact

SEQ ID NO: 51023 - DNA, 15 bp, Homo sapiens
tatgcacacacacac

SEQ ID NO: 51024 - DNA, 15 bp, Homo sapiens
atatgcacacacaca

SEQ ID NO: 51025 - DNA, 15 bp, Homo sapiens
catatgcacacacac

SEQ ID NO: 51026 - DNA, 15 bp, Homo sapiens
gcatatgcacacaca

SEQ ID NO: 51027 - DNA, 15 bp, Homo sapiens
tgcatatgcacacac

SEQ ID NO: 51028 - DNA, 15 bp, Homo sapiens
atgcatatgcacaca

SEQ ID NO: 51029 - DNA, 15 bp, Homo sapiens
tatgcatatgcacac

SEQ ID NO: 51030 - DNA, 15 bp, Homo sapiens
atatgcatatgcaca

SEQ ID NO: 51031 - DNA, 15 bp, Homo sapiens
tatatgcatatgcac

SEQ ID NO: 51032 - DNA, 15 bp, Homo sapiens
atatatgcatatgca

SEQ ID NO: 51033 - DNA, 15 bp, Homo sapiens
tatatatgcatatgc

SEQ ID NO: 51034 - DNA, 15 bp, Homo sapiens
gtatatatgcatatg

SEQ ID NO: 51035 - DNA, 15 bp, Homo sapiens
tgtatatatgcatat

SEQ ID NO: 51036 - DNA, 15 bp, Homo sapiens
atgtatatatgcata

SEQ ID NO: 51037 - DNA, 15 bp, Homo sapiens
tatgtatatatgcat

SEQ ID NO: 51038 - DNA, 15 bp, Homo sapiens
atatgtatatatgca

SEQ ID NO: 51039 - DNA, 15 bp, Homo sapiens
tatatgtatatatgc

SEQ ID NO: 51040 - DNA, 15 bp, Homo sapiens
atatatgtatatatg

SEQ ID NO: 51041 - DNA, 15 bp, Homo sapiens
tatatatgtatatat

SEQ ID NO: 51042 - DNA, 15 bp, Homo sapiens
atatatatgtatata

SEQ ID NO: 51043 - DNA, 15 bp, Homo sapiens
tatatatatgtatat

SEQ ID NO: 51044 - DNA, 15 bp, Homo sapiens
gtatatatatgtata

SEQ ID NO: 51045 - DNA, 15 bp, Homo sapiens
tgtatatatatgtat

SEQ ID NO: 51046 - DNA, 15 bp, Homo sapiens
atgtatatatatgta

SEQ ID NO: 51047 - DNA, 15 bp, Homo sapiens
catgtatatatatgt

SEQ ID NO: 51048 - DNA, 15 bp, Homo sapiens
gcatgtatatatatg

SEQ ID NO: 51049 - DNA, 15 bp, Homo sapiens
tgcatgtatatatat

SEQ ID NO: 51050 - DNA, 15 bp, Homo sapiens
ttgcatgtatatata

SEQ ID NO: 51051 - DNA, 15 bp, Homo sapiens
tttgcatgtatatat

SEQ ID NO: 51052 - DNA, 15 bp, Homo sapiens
atttgcatgtatata

SEQ ID NO: 51053 - DNA, 15 bp, Homo sapiens
catttgcatgtatat

SEQ ID NO: 51054 - DNA, 15 bp, Homo sapiens
acatttgcatgtata

SEQ ID NO: 51055 - DNA, 15 bp, Homo sapiens
tacatttgcatgtat

SEQ ID NO: 51056 - DNA, 15 bp, Homo sapiens
atacatttgcatgta

SEQ ID NO: 51057 - DNA, 15 bp, Homo sapiens
gatacatttgcatgt

SEQ ID NO: 51058 - DNA, 15 bp, Homo sapiens
agatacatttgcatg

SEQ ID NO: 51059 - DNA, 15 bp, Homo sapiens
cagatacatttgcat

SEQ ID NO: 51060 - DNA, 15 bp, Homo sapiens
acagatacatttgca

SEQ ID NO: 51061 - DNA, 15 bp, Homo sapiens
aacagatacatttgc

SEQ ID NO: 51062 - DNA, 15 bp, Homo sapiens
aaacagatacatttg

SEQ ID NO: 51063 - DNA, 15 bp, Homo sapiens
taaacagatacattt

SEQ ID NO: 51064 - DNA, 15 bp, Homo sapiens
ataaacagatacatt

SEQ ID NO: 51065 - DNA, 15 bp, Homo sapiens
tataaacagatacat

SEQ ID NO: 51066 - DNA, 15 bp, Homo sapiens
ttataaacagataca

SEQ ID NO: 51067 - DNA, 15 bp, Homo sapiens
attataaacagatac

SEQ ID NO: 51068 - DNA, 15 bp, Homo sapiens
aattataaacagata

SEQ ID NO: 51069 - DNA, 15 bp, Homo sapiens
gaattataaacagat

SEQ ID NO: 51070 - DNA, 15 bp, Homo sapiens
tgaattataaacaga

SEQ ID NO: 51071 - DNA, 15 bp, Homo sapiens
ctgaattataaacag

SEQ ID NO: 51072 - DNA, 15 bp, Homo sapiens
tctgaattataaaca

SEQ ID NO: 51073 - DNA, 15 bp, Homo sapiens
atctgaattataaac

SEQ ID NO: 51074 - DNA, 15 bp, Homo sapiens
aatctgaattataaa

SEQ ID NO: 51075 - DNA, 15 bp, Homo sapiens
caatctgaattataa

SEQ ID NO: 51076 - DNA, 15 bp, Homo sapiens
gcaatctgaattata

SEQ ID NO: 51077 - DNA, 15 bp, Homo sapiens
agcaatctgaattat

SEQ ID NO: 51078 - DNA, 15 bp, Homo sapiens
aagcaatctgaatta

SEQ ID NO: 51079 - DNA, 15 bp, Homo sapiens
gaagcaatctgaatt

SEQ ID NO: 51080 - DNA, 15 bp, Homo sapiens
tgaagcaatctgaat

SEQ ID NO: 51081 - DNA, 15 bp, Homo sapiens
ttgaagcaatctgaa

SEQ ID NO: 51082 - DNA, 15 bp, Homo sapiens
tttgaagcaatctga

SEQ ID NO: 51083 - DNA, 15 bp, Homo sapiens
ttttgaagcaatctg

SEQ ID NO: 51084 - DNA, 15 bp, Homo sapiens
tttttgaagcaatct

SEQ ID NO: 51085 - DNA, 15 bp, Homo sapiens
ctttttgaagcaatc

SEQ ID NO: 51086 - DNA, 15 bp, Homo sapiens
tctttttgaagcaat

SEQ ID NO: 51087 - DNA, 15 bp, Homo sapiens
atctttttgaagcaa

SEQ ID NO: 51088 - DNA, 15 bp, Homo sapiens
catctttttgaagca

SEQ ID NO: 51089 - DNA, 15 bp, Homo sapiens
acatctttttgaagc

SEQ ID NO: 51090 - DNA, 15 bp, Homo sapiens
aacatctttttgaag

SEQ ID NO: 51091 - DNA, 15 bp, Homo sapiens
caacatctttttgaa

SEQ ID NO: 51092 - DNA, 15 bp, Homo sapiens
gcaacatctttttga

SEQ ID NO: 51093 - DNA, 15 bp, Homo sapiens
tgcaacatctttttg

SEQ ID NO: 51094 - DNA, 15 bp, Homo sapiens
gtgcaacatcttttt

SEQ ID NO: 51095 - DNA, 15 bp, Homo sapiens
agtgcaacatctttt

SEQ ID NO: 51096 - DNA, 15 bp, Homo sapiens
aagtgcaacatcttt

SEQ ID NO: 51097 - DNA, 15 bp, Homo sapiens
aaagtgcaacatctt

SEQ ID NO: 51098 - DNA, 15 bp, Homo sapiens
taaagtgcaacatct

SEQ ID NO: 51099 - DNA, 15 bp, Homo sapiens
ataaagtgcaacatc

SEQ ID NO: 51100 - DNA, 15 bp, Homo sapiens
cataaagtgcaacat

SEQ ID NO: 51101 - DNA, 15 bp, Homo sapiens
tcataaagtgcaaca

SEQ ID NO: 51102 - DNA, 15 bp, Homo sapiens
atcataaagtgcaac

SEQ ID NO: 51103 - DNA, 15 bp, Homo sapiens
tatcataaagtgcaa

SEQ ID NO: 51104 - DNA, 15 bp, Homo sapiens
gtatcataaagtgca

SEQ ID NO: 51105 - DNA, 15 bp, Homo sapiens
agtatcataaagtgc

SEQ ID NO: 51106 - DNA, 15 bp, Homo sapiens
cagtatcataaagtg

SEQ ID NO: 51107 - DNA, 15 bp, Homo sapiens
tcagtatcataaagt

SEQ ID NO: 51108 - DNA, 15 bp, Homo sapiens
ctcagtatcataaag

SEQ ID NO: 51109 - DNA, 15 bp, Homo sapiens
tctcagtatcataaa

SEQ ID NO: 51110 - DNA, 15 bp, Homo sapiens
ttctcagtatcataa

SEQ ID NO: 51111 - DNA, 15 bp, Homo sapiens
gttctcagtatcata

SEQ ID NO: 51112 - DNA, 15 bp, Homo sapiens
tgttctcagtatcat

SEQ ID NO: 51113 - DNA, 15 bp, Homo sapiens
ctgttctcagtatca

SEQ ID NO: 51114 - DNA, 15 bp, Homo sapiens
actgttctcagtatc

SEQ ID NO: 51115 - DNA, 15 bp, Homo sapiens
cactgttctcagtat

SEQ ID NO: 51116 - DNA, 15 bp, Homo sapiens
tcactgttctcagta

SEQ ID NO: 51117 - DNA, 15 bp, Homo sapiens
ctcactgttctcagt

SEQ ID NO: 51118 - DNA, 15 bp, Homo sapiens
tctcactgttctcag

SEQ ID NO: 51119 - DNA, 15 bp, Homo sapiens
ttctcactgttctca

SEQ ID NO: 51120 - DNA, 15 bp, Homo sapiens
cttctcactgttctc

SEQ ID NO: 51121 - DNA, 15 bp, Homo sapiens
acttctcactgttct

SEQ ID NO: 51122 - DNA, 15 bp, Homo sapiens
tacttctcactgttc

SEQ ID NO: 51123 - DNA, 15 bp, Homo sapiens
ttacttctcactgtt

SEQ ID NO: 51124 - DNA, 15 bp, Homo sapiens
tttacttctcactgt

SEQ ID NO: 51125 - DNA, 15 bp, Homo sapiens
atttacttctcactg

SEQ ID NO: 51126 - DNA, 15 bp, Homo sapiens
tatttacttctcact

SEQ ID NO: 51127 - DNA, 15 bp, Homo sapiens
ttatttacttctcac

SEQ ID NO: 51128 - DNA, 15 bp, Homo sapiens
cttatttacttctca

SEQ ID NO: 51129 - DNA, 15 bp, Homo sapiens
tcttatttacttctc

SEQ ID NO: 51130 - DNA, 15 bp, Homo sapiens
atcttatttacttct

SEQ ID NO: 51131 - DNA, 15 bp, Homo sapiens
tatcttatttacttc

SEQ ID NO: 51132 - DNA, 15 bp, Homo sapiens
ctatcttatttactt

SEQ ID NO: 51133 - DNA, 15 bp, Homo sapiens
tctatcttatttact

SEQ ID NO: 51134 - DNA, 15 bp, Homo sapiens
ctctatcttatttac

SEQ ID NO: 51135 - DNA, 15 bp, Homo sapiens
actctatcttattta

SEQ ID NO: 51136 - DNA, 15 bp, Homo sapiens
cactctatcttattt

SEQ ID NO: 51137 - DNA, 15 bp, Homo sapiens
acactctatcttatt

SEQ ID NO: 51138 - DNA, 15 bp, Homo sapiens
tacactctatcttat

SEQ ID NO: 51139 - DNA, 15 bp, Homo sapiens
ctacactctatctta

SEQ ID NO: 51140 - DNA, 15 bp, Homo sapiens
cctacactctatctt

SEQ ID NO: 51141 - DNA, 15 bp, Homo sapiens
tcctacactctatct

SEQ ID NO: 51142 - DNA, 15 bp, Homo sapiens
ctcctacactctatc

SEQ ID NO: 51143 - DNA, 15 bp, Homo sapiens
cctcctacactctat

SEQ ID NO: 51144 - DNA, 15 bp, Homo sapiens
tcctcctacactcta

SEQ ID NO: 51145 - DNA, 15 bp, Homo sapiens
ctcctcctacactct

SEQ ID NO: 51146 - DNA, 15 bp, Homo sapiens
cctcctcctacactc

SEQ ID NO: 51147 - DNA, 15 bp, Homo sapiens
tcctcctcctacact

SEQ ID NO: 51148 - DNA, 15 bp, Homo sapiens
ttcctcctcctacac

SEQ ID NO: 51149 - DNA, 15 bp, Homo sapiens
attcctcctcctaca

SEQ ID NO: 51150 - DNA, 15 bp, Homo sapiens
tattcctcctcctac

SEQ ID NO: 51151 - DNA, 15 bp, Homo sapiens
ttattcctcctccta

SEQ ID NO: 51152 - DNA, 15 bp, Homo sapiens
attattcctcctcct

SEQ ID NO: 51153 - DNA, 15 bp, Homo sapiens
aattattcctcctcc

SEQ ID NO: 51154 - DNA, 15 bp, Homo sapiens
aaattattcctcctc

SEQ ID NO: 51155 - DNA, 15 bp, Homo sapiens
gaaattattcctcct

SEQ ID NO: 51156 - DNA, 15 bp, Homo sapiens
tgaaattattcctcc

SEQ ID NO: 51157 - DNA, 15 bp, Homo sapiens
ctgaaattattcctc

SEQ ID NO: 51158 - DNA, 15 bp, Homo sapiens
tctgaaattattcct

SEQ ID NO: 51159 - DNA, 15 bp, Homo sapiens
ttctgaaattattcc

SEQ ID NO: 51160 - DNA, 15 bp, Homo sapiens
gttctgaaattattc

SEQ ID NO: 51161 - DNA, 15 bp, Homo sapiens
tgttctgaaattatt

SEQ ID NO: 51162 - DNA, 15 bp, Homo sapiens
ctgttctgaaattat

SEQ ID NO: 51163 - DNA, 15 bp, Homo sapiens
gctgttctgaaatta

SEQ ID NO: 51164 - DNA, 15 bp, Homo sapiens
ggctgttctgaaatt

SEQ ID NO: 51165 - DNA, 15 bp, Homo sapiens
tggctgttctgaaat

SEQ ID NO: 51166 - DNA, 15 bp, Homo sapiens
atggctgttctgaaa

SEQ ID NO: 51167 - DNA, 15 bp, Homo sapiens
gatggctgttctgaa

SEQ ID NO: 51168 - DNA, 15 bp, Homo sapiens
agatggctgttctga

SEQ ID NO: 51169 - DNA, 15 bp, Homo sapiens
cagatggctgttctg

SEQ ID NO: 51170 - DNA, 15 bp, Homo sapiens
tcagatggctgttct

SEQ ID NO: 51171 - DNA, 15 bp, Homo sapiens
ctcagatggctgttc

SEQ ID NO: 51172 - DNA, 15 bp, Homo sapiens
tctcagatggctgtt

SEQ ID NO: 51173 - DNA, 15 bp, Homo sapiens
ttctcagatggctgt

SEQ ID NO: 51174 - DNA, 15 bp, Homo sapiens
gttctcagatggctg

SEQ ID NO: 51175 - DNA, 15 bp, Homo sapiens
agttctcagatggct

SEQ ID NO: 51176 - DNA, 15 bp, Homo sapiens
aagttctcagatggc

SEQ ID NO: 51177 - DNA, 15 bp, Homo sapiens
gaagttctcagatgg

SEQ ID NO: 51178 - DNA, 15 bp, Homo sapiens
agaagttctcagatg

SEQ ID NO: 51179 - DNA, 15 bp, Homo sapiens
cagaagttctcagat

SEQ ID NO: 51180 - DNA, 15 bp, Homo sapiens
acagaagttctcaga

SEQ ID NO: 51181 - DNA, 15 bp, Homo sapiens
cacagaagttctcag

SEQ ID NO: 51182 - DNA, 15 bp, Homo sapiens
tcacagaagttctca

SEQ ID NO: 51183 - DNA, 15 bp, Homo sapiens
gtcacagaagttctc

SEQ ID NO: 51184 - DNA, 15 bp, Homo sapiens
tgtcacagaagttct

SEQ ID NO: 51185 - DNA, 15 bp, Homo sapiens
ttgtcacagaagttc

SEQ ID NO: 51186 - DNA, 15 bp, Homo sapiens
gttgtcacagaagtt

SEQ ID NO: 51187 - DNA, 15 bp, Homo sapiens
tgttgtcacagaagt

SEQ ID NO: 51188 - DNA, 15 bp, Homo sapiens
ctgttgtcacagaag

SEQ ID NO: 51189 - DNA, 15 bp, Homo sapiens
tctgttgtcacagaa

SEQ ID NO: 51190 - DNA, 15 bp, Homo sapiens
atctgttgtcacaga

SEQ ID NO: 51191 - DNA, 15 bp, Homo sapiens
gatctgttgtcacag

SEQ ID NO: 51192 - DNA, 15 bp, Homo sapiens
tgatctgttgtcaca

SEQ ID NO: 51193 - DNA, 15 bp, Homo sapiens
ctgatctgttgtcac

SEQ ID NO: 51194 - DNA, 15 bp, Homo sapiens
cctgatctgttgtca

SEQ ID NO: 51195 - DNA, 15 bp, Homo sapiens
gcctgatctgttgtc

SEQ ID NO: 51196 - DNA, 15 bp, Homo sapiens
tgcctgatctgttgt

SEQ ID NO: 51197 - DNA, 15 bp, Homo sapiens
ttgcctgatctgttg

SEQ ID NO: 51198 - DNA, 15 bp, Homo sapiens
tttgcctgatctgtt

SEQ ID NO: 51199 - DNA, 15 bp, Homo sapiens
ttttgcctgatctgt

SEQ ID NO: 51200 - DNA, 15 bp, Homo sapiens
attttgcctgatctg

SEQ ID NO: 51201 - DNA, 15 bp, Homo sapiens
cattttgcctgatct

SEQ ID NO: 51202 - DNA, 15 bp, Homo sapiens
tcattttgcctgatc

SEQ ID NO: 51203 - DNA, 15 bp, Homo sapiens
ttcattttgcctgat

SEQ ID NO: 51204 - DNA, 15 bp, Homo sapiens
tttcattttgcctga

SEQ ID NO: 51205 - DNA, 15 bp, Homo sapiens
atttcattttgcctg

SEQ ID NO: 51206 - DNA, 15 bp, Homo sapiens
catttcattttgcct

SEQ ID NO: 51207 - DNA, 15 bp, Homo sapiens
acatttcattttgcc

SEQ ID NO: 51208 - DNA, 15 bp, Homo sapiens
cacatttcattttgc

SEQ ID NO: 51209 - DNA, 15 bp, Homo sapiens
tcacatttcattttg

SEQ ID NO: 51210 - DNA, 15 bp, Homo sapiens
ttcacatttcatttt

SEQ ID NO: 51211 - DNA, 15 bp, Homo sapiens
tttcacatttcattt

SEQ ID NO: 51212 - DNA, 15 bp, Homo sapiens
ctttcacatttcatt

SEQ ID NO: 51213 - DNA, 15 bp, Homo sapiens
actttcacatttcat

SEQ ID NO: 51214 - DNA, 15 bp, Homo sapiens
tactttcacatttca

SEQ ID NO: 51215 - DNA, 15 bp, Homo sapiens
ttactttcacatttc

SEQ ID NO: 51216 - DNA, 15 bp, Homo sapiens
attactttcacattt

SEQ ID NO: 51217 - DNA, 15 bp, Homo sapiens
aattactttcacatt

SEQ ID NO: 51218 - DNA, 15 bp, Homo sapiens
aaattactttcacat

SEQ ID NO: 51219 - DNA, 15 bp, Homo sapiens
aaaattactttcaca

SEQ ID NO: 51220 - DNA, 15 bp, Homo sapiens
taaaattactttcac

SEQ ID NO: 51221 - DNA, 15 bp, Homo sapiens
ataaaattactttca

SEQ ID NO: 51222 - DNA, 15 bp, Homo sapiens
tataaaattactttc

SEQ ID NO: 51223 - DNA, 15 bp, Homo sapiens
ctataaaattacttt

SEQ ID NO: 51224 - DNA, 15 bp, Homo sapiens
cctataaaattactt

SEQ ID NO: 51225 - DNA, 15 bp, Homo sapiens
gcctataaaattact

SEQ ID NO: 51226 - DNA, 15 bp, Homo sapiens
ggcctataaaattac

SEQ ID NO: 51227 - DNA, 15 bp, Homo sapiens
tggcctataaaatta

SEQ ID NO: 51228 - DNA, 15 bp, Homo sapiens
ctggcctataaaatt

SEQ ID NO: 51229 - DNA, 15 bp, Homo sapiens
cctggcctataaaat

SEQ ID NO: 51230 - DNA, 15 bp, Homo sapiens
gcctggcctataaaa

SEQ ID NO: 51231 - DNA, 15 bp, Homo sapiens
cgcctggcctataaa

SEQ ID NO: 51232 - DNA, 15 bp, Homo sapiens
acgcctggcctataa

SEQ ID NO: 51233 - DNA, 15 bp, Homo sapiens
cacgcctggcctata

SEQ ID NO: 51234 - DNA, 15 bp, Homo sapiens
ccacgcctggcctat

SEQ ID NO: 51235 - DNA, 15 bp, Homo sapiens
accacgcctggccta

SEQ ID NO: 51236 - DNA, 15 bp, Homo sapiens
caccacgcctggcct

SEQ ID NO: 51237 - DNA, 15 bp, Homo sapiens
agccaccacgcctgg

SEQ ID NO: 51238 - DNA, 15 bp, Homo sapiens
gagccaccacgcctg

SEQ ID NO: 51239 - DNA, 15 bp, Homo sapiens
tgagccaccacgcct

SEQ ID NO: 51240 - DNA, 15 bp, Homo sapiens
atgagccaccacgcc

SEQ ID NO: 51241 - DNA, 15 bp, Homo sapiens
catgagccaccacgc

SEQ ID NO: 51242 - DNA, 15 bp, Homo sapiens
gcatgagccaccacg

SEQ ID NO: 51243 - DNA, 15 bp, Homo sapiens
tcaaagtgctgggat

SEQ ID NO: 51244 - DNA, 15 bp, Homo sapiens
ctcaaagtgctggga

SEQ ID NO: 51245 - DNA, 15 bp, Homo sapiens
actcaaagtgctggg

SEQ ID NO: 51246 - DNA, 15 bp, Homo sapiens
cactcaaagtgctgg

SEQ ID NO: 51247 - DNA, 15 bp, Homo sapiens
ccactcaaagtgctg

SEQ ID NO: 51248 - DNA, 15 bp, Homo sapiens
gccactcaaagtgct

SEQ ID NO: 51249 - DNA, 15 bp, Homo sapiens
ggccactcaaagtgc

SEQ ID NO: 51250 - DNA, 15 bp, Homo sapiens
tggccactcaaagtg

SEQ ID NO: 51251 - DNA, 15 bp, Homo sapiens
ttggccactcaaagt

SEQ ID NO: 51252 - DNA, 15 bp, Homo sapiens
cttggccactcaaag

SEQ ID NO: 51253 - DNA, 15 bp, Homo sapiens
ccttggccactcaaa

SEQ ID NO: 51254 - DNA, 15 bp, Homo sapiens
gccttggccactcaa

SEQ ID NO: 51255 - DNA, 15 bp, Homo sapiens
tgccttggccactca

SEQ ID NO: 51256 - DNA, 15 bp, Homo sapiens
ctgccttggccactc

SEQ ID NO: 51257 - DNA, 15 bp, Homo sapiens
cctgccttggccact

SEQ ID NO: 51258 - DNA, 15 bp, Homo sapiens
acctgccttggccac

SEQ ID NO: 51259 - DNA, 15 bp, Homo sapiens
cacctgccttggcca

SEQ ID NO: 51260 - DNA, 15 bp, Homo sapiens
ccacctgccttggcc

SEQ ID NO: 51261 - DNA, 15 bp, Homo sapiens
tccacctgccttggc

SEQ ID NO: 51262 - DNA, 15 bp, Homo sapiens
agtgatccacctgcc

SEQ ID NO: 51263 - DNA, 15 bp, Homo sapiens
aagtgatccacctgc

SEQ ID NO: 51264 - DNA, 15 bp, Homo sapiens
caagtgatccacctg

SEQ ID NO: 51265 - DNA, 15 bp, Homo sapiens
tcaagtgatccacct

SEQ ID NO: 51266 - DNA, 15 bp, Homo sapiens
accaggctggtctcg

SEQ ID NO: 51267 - DNA, 15 bp, Homo sapiens
gaccaggctggtctc

SEQ ID NO: 51268 - DNA, 15 bp, Homo sapiens
tgaccaggctggtct

SEQ ID NO: 51269 - DNA, 15 bp, Homo sapiens
ttgaccaggctggtc

SEQ ID NO: 51270 - DNA, 15 bp, Homo sapiens
atgttgaccaggctg

SEQ ID NO: 51271 - DNA, 15 bp, Homo sapiens
catgttgaccaggct

SEQ ID NO: 51272 - DNA, 15 bp, Homo sapiens
ccatgttgaccaggc

SEQ ID NO: 51273 - DNA, 15 bp, Homo sapiens
accatgttgaccagg

SEQ ID NO: 51274 - DNA, 15 bp, Homo sapiens
caccatgttgaccag

SEQ ID NO: 51275 - DNA, 15 bp, Homo sapiens
tcaccatgttgacca

SEQ ID NO: 51276 - DNA, 15 bp, Homo sapiens
ttcaccatgttgacc

SEQ ID NO: 51277 - DNA, 15 bp, Homo sapiens
tttcaccatgttgac

SEQ ID NO: 51278 - DNA, 15 bp, Homo sapiens
gtttcaccatgttga

SEQ ID NO: 51279 - DNA, 15 bp, Homo sapiens
aggtttcaccatgtt

SEQ ID NO: 51280 - DNA, 15 bp, Homo sapiens
aaggtttcaccatgt

SEQ ID NO: 51281 - DNA, 15 bp, Homo sapiens
caaggtttcaccatg

SEQ ID NO: 51282 - DNA, 15 bp, Homo sapiens
acaaggtttcaccat

SEQ ID NO: 51283 - DNA, 15 bp, Homo sapiens
gacaaggtttcacca

SEQ ID NO: 51284 - DNA, 15 bp, Homo sapiens
agacaaggtttcacc

SEQ ID NO: 51285 - DNA, 15 bp, Homo sapiens
gagacaaggtttcac

SEQ ID NO: 51286 - DNA, 15 bp, Homo sapiens
agagacaaggtttca

SEQ ID NO: 51287 - DNA, 15 bp, Homo sapiens
tagagacaaggtttc

SEQ ID NO: 51288 - DNA, 15 bp, Homo sapiens
gtagagacaaggttt

SEQ ID NO: 51289 - DNA, 15 bp, Homo sapiens
agtagagacaaggtt

SEQ ID NO: 51290 - DNA, 15 bp, Homo sapiens
tagtagagacaaggt

SEQ ID NO: 51291 - DNA, 15 bp, Homo sapiens
ttagtagagacaagg

SEQ ID NO: 51292 - DNA, 15 bp, Homo sapiens
tttagtagagacaag

SEQ ID NO: 51293 - DNA, 15 bp, Homo sapiens
ttttagtagagacaa

SEQ ID NO: 51294 - DNA, 15 bp, Homo sapiens
tttttttgtgttttt

SEQ ID NO: 51295 - DNA, 15 bp, Homo sapiens
atttttttgtgtttt

SEQ ID NO: 51296 - DNA, 15 bp, Homo sapiens
aatttttttgtgttt

SEQ ID NO: 51297 - DNA, 15 bp, Homo sapiens
taatttttttgtgtt

SEQ ID NO: 51298 - DNA, 15 bp, Homo sapiens
ctaatttttttgtgt

SEQ ID NO: 51299 - DNA, 15 bp, Homo sapiens
actaatttttttgtg

SEQ ID NO: 51300 - DNA, 15 bp, Homo sapiens
gactaatttttttgt

SEQ ID NO: 51301 - DNA, 15 bp, Homo sapiens
cgactaatttttttg

SEQ ID NO: 51302 - DNA, 15 bp, Homo sapiens
tcgactaattttttt

SEQ ID NO: 51303 - DNA, 15 bp, Homo sapiens
ctcgactaatttttt

SEQ ID NO: 51304 - DNA, 15 bp, Homo sapiens
gctcgactaattttt

SEQ ID NO: 51305 - DNA, 15 bp, Homo sapiens
cgctcgactaatttt

SEQ ID NO: 51306 - DNA, 15 bp, Homo sapiens
acgctcgactaattt

SEQ ID NO: 51307 - DNA, 15 bp, Homo sapiens
cacgctcgactaatt

SEQ ID NO: 51308 - DNA, 15 bp, Homo sapiens
ccacgctcgactaat

SEQ ID NO: 51309 - DNA, 15 bp, Homo sapiens
accacgctcgactaa

SEQ ID NO: 51310 - DNA, 15 bp, Homo sapiens
caccacgctcgacta

SEQ ID NO: 51311 - DNA, 15 bp, Homo sapiens
ccaccacgctcgact

SEQ ID NO: 51312 - DNA, 15 bp, Homo sapiens
gccaccacgctcgac

SEQ ID NO: 51313 - DNA, 15 bp, Homo sapiens
tgccaccacgctcga

SEQ ID NO: 51314 - DNA, 15 bp, Homo sapiens
atgccaccacgctcg

SEQ ID NO: 51315 - DNA, 15 bp, Homo sapiens
catgccaccacgctc

SEQ ID NO: 51316 - DNA, 15 bp, Homo sapiens
acatgccaccacgct

SEQ ID NO: 51317 - DNA, 15 bp, Homo sapiens
cacatgccaccacgc

SEQ ID NO: 51318 - DNA, 15 bp, Homo sapiens
gcacatgccaccacg

SEQ ID NO: 51319 - DNA, 15 bp, Homo sapiens
ggcacatgccaccac

SEQ ID NO: 51320 - DNA, 15 bp, Homo sapiens
aggcacatgccacca

SEQ ID NO: 51321 - DNA, 15 bp, Homo sapiens
caggcacatgccacc

SEQ ID NO: 51322 - DNA, 15 bp, Homo sapiens
aggattacaggcaca

SEQ ID NO: 51323 - DNA, 15 bp, Homo sapiens
agctaggattacagg

SEQ ID NO: 51324 - DNA, 15 bp, Homo sapiens
cagctaggattacag

SEQ ID NO: 51325 - DNA, 15 bp, Homo sapiens
gcagctaggattaca

SEQ ID NO: 51326 - DNA, 15 bp, Homo sapiens
agcagctaggattac

SEQ ID NO: 51327 - DNA, 15 bp, Homo sapiens
cagcagctaggatta

SEQ ID NO: 51328 - DNA, 15 bp, Homo sapiens
ccagcagctaggatt

SEQ ID NO: 51329 - DNA, 15 bp, Homo sapiens
cccagcagctaggat

SEQ ID NO: 51330 - DNA, 15 bp, Homo sapiens
ccccagcagctagga

SEQ ID NO: 51331 - DNA, 15 bp, Homo sapiens
tccccagcagctagg

SEQ ID NO: 51332 - DNA, 15 bp, Homo sapiens
ctccccagcagctag

SEQ ID NO: 51333 - DNA, 15 bp, Homo sapiens
cctccccagcagcta

SEQ ID NO: 51334 - DNA, 15 bp, Homo sapiens
gcctccccagcagct

SEQ ID NO: 51335 - DNA, 15 bp, Homo sapiens
agcctccccagcagc

SEQ ID NO: 51336 - DNA, 15 bp, Homo sapiens
cagcctccccagcag

SEQ ID NO: 51337 - DNA, 15 bp, Homo sapiens
tcagcctccccagca

SEQ ID NO: 51338 - DNA, 15 bp, Homo sapiens
ctcagcctccccagc

SEQ ID NO: 51339 - DNA, 15 bp, Homo sapiens
cctcagcctccccag

SEQ ID NO: 51340 - DNA, 15 bp, Homo sapiens
gcctcagcctcccca

SEQ ID NO: 51341 - DNA, 15 bp, Homo sapiens
tgcctcagcctcccc

SEQ ID NO: 51342 - DNA, 15 bp, Homo sapiens
aggctcactgcaacc

SEQ ID NO: 51343 - DNA, 15 bp, Homo sapiens
taggctcactgcaac

SEQ ID NO: 51344 - DNA, 15 bp, Homo sapiens
ctaggctcactgcaa

SEQ ID NO: 51345 - DNA, 15 bp, Homo sapiens
tctaggctcactgca

SEQ ID NO: 51346 - DNA, 15 bp, Homo sapiens
atctaggctcactgc

SEQ ID NO: 51347 - DNA, 15 bp, Homo sapiens
aatctaggctcactg

SEQ ID NO: 51348 - DNA, 15 bp, Homo sapiens
caatctaggctcact

SEQ ID NO: 51349 - DNA, 15 bp, Homo sapiens
gcaatctaggctcac

SEQ ID NO: 51350 - DNA, 15 bp, Homo sapiens
tgcaatctaggctca

SEQ ID NO: 51351 - DNA, 15 bp, Homo sapiens
gtgcaatctaggctc

SEQ ID NO: 51352 - DNA, 15 bp, Homo sapiens
ggtgcaatctaggct

SEQ ID NO: 51353 - DNA, 15 bp, Homo sapiens
tggtgcaatctaggc

SEQ ID NO: 51354 - DNA, 15 bp, Homo sapiens
gtggtgcaatctagg

SEQ ID NO: 51355 - DNA, 15 bp, Homo sapiens
agtggtgcaatctag

SEQ ID NO: 51356 - DNA, 15 bp, Homo sapiens
cagtggtgcaatcta

SEQ ID NO: 51357 - DNA, 15 bp, Homo sapiens
gcagtggtgcaatct

SEQ ID NO: 51358 - DNA, 15 bp, Homo sapiens
tgcagtggtgcaatc

SEQ ID NO: 51359 - DNA, 15 bp, Homo sapiens
gtgcagtggtgcaat

SEQ ID NO: 51360 - DNA, 15 bp, Homo sapiens
acaggctggagtgca

SEQ ID NO: 51361 - DNA, 15 bp, Homo sapiens
cacaggctggagtgc

SEQ ID NO: 51362 - DNA, 15 bp, Homo sapiens
tcacaggctggagtg

SEQ ID NO: 51363 - DNA, 15 bp, Homo sapiens
ctcacaggctggagt

SEQ ID NO: 51364 - DNA, 15 bp, Homo sapiens
tctcacaggctggag

SEQ ID NO: 51365 - DNA, 15 bp, Homo sapiens
gtctcacaggctgga

SEQ ID NO: 51366 - DNA, 15 bp, Homo sapiens
tgtctcacaggctgg

SEQ ID NO: 51367 - DNA, 15 bp, Homo sapiens
ctgtctcacaggctg

SEQ ID NO: 51368 - DNA, 15 bp, Homo sapiens
tctgtctcacaggct

SEQ ID NO: 51369 - DNA, 15 bp, Homo sapiens
ttctgtctcacaggc

SEQ ID NO: 51370 - DNA, 15 bp, Homo sapiens
attctgtctcacagg

SEQ ID NO: 51371 - DNA, 15 bp, Homo sapiens
cattctgtctcacag

SEQ ID NO: 51372 - DNA, 15 bp, Homo sapiens
tcattctgtctcaca

SEQ ID NO: 51373 - DNA, 15 bp, Homo sapiens
ctcattctgtctcac

SEQ ID NO: 51374 - DNA, 15 bp, Homo sapiens
tctcattctgtctca

SEQ ID NO: 51375 - DNA, 15 bp, Homo sapiens
gtctcattctgtctc

SEQ ID NO: 51376 - DNA, 15 bp, Homo sapiens
ggtctcattctgtct

SEQ ID NO: 51377 - DNA, 15 bp, Homo sapiens
gggtctcattctgtc

SEQ ID NO: 51378 - DNA, 15 bp, Homo sapiens
agggtctcattctgt

SEQ ID NO: 51379 - DNA, 15 bp, Homo sapiens
cagggtctcattctg

SEQ ID NO: 51380 - DNA, 15 bp, Homo sapiens
acagggtctcattct

SEQ ID NO: 51381 - DNA, 15 bp, Homo sapiens
gacagggtctcattc

SEQ ID NO: 51382 - DNA, 15 bp, Homo sapiens
agacagggtctcatt

SEQ ID NO: 51383 - DNA, 15 bp, Homo sapiens
aagacagggtctcat

SEQ ID NO: 51384 - DNA, 15 bp, Homo sapiens
taagacagggtctca

SEQ ID NO: 51385 - DNA, 15 bp, Homo sapiens
ttaagacagggtctc

SEQ ID NO: 51386 - DNA, 15 bp, Homo sapiens
tttaagacagggtct

SEQ ID NO: 51387 - DNA, 15 bp, Homo sapiens
ttttaagacagggtc

SEQ ID NO: 51388 - DNA, 15 bp, Homo sapiens
tttttaagacagggt

SEQ ID NO: 51389 - DNA, 15 bp, Homo sapiens
ttttttaagacaggg

SEQ ID NO: 51390 - DNA, 15 bp, Homo sapiens
tttttttaagacagg

SEQ ID NO: 51391 - DNA, 15 bp, Homo sapiens
ttttttttaagacag

SEQ ID NO: 51392 - DNA, 15 bp, Homo sapiens
tttttttttaagaca

SEQ ID NO: 51393 - DNA, 15 bp, Homo sapiens
ttacttttttttttt

SEQ ID NO: 51394 - DNA, 15 bp, Homo sapiens
attactttttttttt

SEQ ID NO: 51395 - DNA, 15 bp, Homo sapiens
aattacttttttttt

SEQ ID NO: 51396 - DNA, 15 bp, Homo sapiens
aaattactttttttt

SEQ ID NO: 51397 - DNA, 15 bp, Homo sapiens
aaaattacttttttt

SEQ ID NO: 51398 - DNA, 15 bp, Homo sapiens
taaaattactttttt

SEQ ID NO: 51399 - DNA, 15 bp, Homo sapiens
ataaaattacttttt

SEQ ID NO: 51400 - DNA, 15 bp, Homo sapiens
tataaaattactttt

SEQ ID NO: 51401 - DNA, 15 bp, Homo sapiens
ttataaaattacttt

SEQ ID NO: 51402 - DNA, 15 bp, Homo sapiens
tttataaaattactt

SEQ ID NO: 51403 - DNA, 15 bp, Homo sapiens
gtttataaaattact

SEQ ID NO: 51404 - DNA, 15 bp, Homo sapiens
agtttataaaattac

SEQ ID NO: 51405 - DNA, 15 bp, Homo sapiens
tagtttataaaatta

SEQ ID NO: 51406 - DNA, 15 bp, Homo sapiens
atagtttataaaatt

SEQ ID NO: 51407 - DNA, 15 bp, Homo sapiens
aatagtttataaaat

SEQ ID NO: 51408 - DNA, 15 bp, Homo sapiens
caatagtttataaaa

SEQ ID NO: 51409 - DNA, 15 bp, Homo sapiens
acaatagtttataaa

SEQ ID NO: 51410 - DNA, 15 bp, Homo sapiens
cacaatagtttataa

SEQ ID NO: 51411 - DNA, 15 bp, Homo sapiens
gcacaatagtttata

SEQ ID NO: 51412 - DNA, 15 bp, Homo sapiens
tgcacaatagtttat

SEQ ID NO: 51413 - DNA, 15 bp, Homo sapiens
gtgcacaatagttta

SEQ ID NO: 51414 - DNA, 15 bp, Homo sapiens
tgtgcacaatagttt

SEQ ID NO: 51415 - DNA, 15 bp, Homo sapiens
ttgtgcacaatagtt

SEQ ID NO: 51416 - DNA, 15 bp, Homo sapiens
attgtgcacaatagt

SEQ ID NO: 51417 - DNA, 15 bp, Homo sapiens
aattgtgcacaatag

SEQ ID NO: 51418 - DNA, 15 bp, Homo sapiens
gaattgtgcacaata

SEQ ID NO: 51419 - DNA, 15 bp, Homo sapiens
cgaattgtgcacaat

SEQ ID NO: 51420 - DNA, 15 bp, Homo sapiens
tcgaattgtgcacaa

SEQ ID NO: 51421 - DNA, 15 bp, Homo sapiens
atcgaattgtgcaca

SEQ ID NO: 51422 - DNA, 15 bp, Homo sapiens
catcgaattgtgcac

SEQ ID NO: 51423 - DNA, 15 bp, Homo sapiens
acatcgaattgtgca

SEQ ID NO: 51424 - DNA, 15 bp, Homo sapiens
tacatcgaattgtgc

SEQ ID NO: 51425 - DNA, 15 bp, Homo sapiens
atacatcgaattgtg

SEQ ID NO: 51426 - DNA, 15 bp, Homo sapiens
aatacatcgaattgt

SEQ ID NO: 51427 - DNA, 15 bp, Homo sapiens
gaatacatcgaattg

SEQ ID NO: 51428 - DNA, 15 bp, Homo sapiens
tgaatacatcgaatt

SEQ ID NO: 51429 - DNA, 15 bp, Homo sapiens
atgaatacatcgaat

SEQ ID NO: 51430 - DNA, 15 bp, Homo sapiens
tatgaatacatcgaa

SEQ ID NO: 51431 - DNA, 15 bp, Homo sapiens
ttatgaatacatcga

SEQ ID NO: 51432 - DNA, 15 bp, Homo sapiens
attatgaatacatcg

SEQ ID NO: 51433 - DNA, 15 bp, Homo sapiens
aattatgaatacatc

SEQ ID NO: 51434 - DNA, 15 bp, Homo sapiens
taattatgaatacat

SEQ ID NO: 51435 - DNA, 15 bp, Homo sapiens
ttaattatgaataca

SEQ ID NO: 51436 - DNA, 15 bp, Homo sapiens
attaattatgaatac

SEQ ID NO: 51437 - DNA, 15 bp, Homo sapiens
aattaattatgaata

SEQ ID NO: 51438 - DNA, 15 bp, Homo sapiens
taattaattatgaat

SEQ ID NO: 51439 - DNA, 15 bp, Homo sapiens
ttaattaattatgaa

SEQ ID NO: 51440 - DNA, 15 bp, Homo sapiens
tttaattaattatga

SEQ ID NO: 51441 - DNA, 15 bp, Homo sapiens
atttaattaattatg

SEQ ID NO: 51442 - DNA, 15 bp, Homo sapiens
catttaattaattat

SEQ ID NO: 51443 - DNA, 15 bp, Homo sapiens
tcatttaattaatta

SEQ ID NO: 51444 - DNA, 15 bp, Homo sapiens
atcatttaattaatt

SEQ ID NO: 51445 - DNA, 15 bp, Homo sapiens
aatcatttaattaat

SEQ ID NO: 51446 - DNA, 15 bp, Homo sapiens
taatcatttaattaa

SEQ ID NO: 51447 - DNA, 15 bp, Homo sapiens
ataatcatttaatta

SEQ ID NO: 51448 - DNA, 15 bp, Homo sapiens
aataatcatttaatt

SEQ ID NO: 51449 - DNA, 15 bp, Homo sapiens
aaataatcatttaat

SEQ ID NO: 51450 - DNA, 15 bp, Homo sapiens
aaaataatcatttaa

SEQ ID NO: 51451 - DNA, 15 bp, Homo sapiens
aaaaataatcattta

SEQ ID NO: 51452 - DNA, 15 bp, Homo sapiens
caaaaataatcattt

SEQ ID NO: 51453 - DNA, 15 bp, Homo sapiens
acaaaaataatcatt

SEQ ID NO: 51454 - DNA, 15 bp, Homo sapiens
aacaaaaataatcat

SEQ ID NO: 51455 - DNA, 15 bp, Homo sapiens
caacaaaaataatca

SEQ ID NO: 51456 - DNA, 15 bp, Homo sapiens
ccaacaaaaataatc

SEQ ID NO: 51457 - DNA, 15 bp, Homo sapiens
accaacaaaaataat

SEQ ID NO: 51458 - DNA, 15 bp, Homo sapiens
aaccaacaaaaataa

SEQ ID NO: 51459 - DNA, 15 bp, Homo sapiens
aaaccaacaaaaata

SEQ ID NO: 51460 - DNA, 15 bp, Homo sapiens
aaaaccaacaaaaat

SEQ ID NO: 51461 - DNA, 15 bp, Homo sapiens
taaaaccaacaaaaa

SEQ ID NO: 51462 - DNA, 15 bp, Homo sapiens
ttaaaaccaacaaaa

SEQ ID NO: 51463 - DNA, 15 bp, Homo sapiens
gttaaaaccaacaaa

SEQ ID NO: 51464 - DNA, 15 bp, Homo sapiens
agttaaaaccaacaa

SEQ ID NO: 51465 - DNA, 15 bp, Homo sapiens
aagttaaaaccaaca

SEQ ID NO: 51466 - DNA, 15 bp, Homo sapiens
aaagttaaaaccaac

SEQ ID NO: 51467 - DNA, 15 bp, Homo sapiens
aaaagttaaaaccaa

SEQ ID NO: 51468 - DNA, 15 bp, Homo sapiens
taaaagttaaaacca

SEQ ID NO: 51469 - DNA, 15 bp, Homo sapiens
ataaaagttaaaacc

SEQ ID NO: 51470 - DNA, 15 bp, Homo sapiens
aataaaagttaaaac

SEQ ID NO: 51471 - DNA, 15 bp, Homo sapiens
gaataaaagttaaaa

SEQ ID NO: 51472 - DNA, 15 bp, Homo sapiens
tgaataaaagttaaa

SEQ ID NO: 51473 - DNA, 15 bp, Homo sapiens
ctgaataaaagttaa

SEQ ID NO: 51474 - DNA, 15 bp, Homo sapiens
actgaataaaagtta

SEQ ID NO: 51475 - DNA, 15 bp, Homo sapiens
cactgaataaaagtt

SEQ ID NO: 51476 - DNA, 15 bp, Homo sapiens
ccactgaataaaagt

SEQ ID NO: 51477 - DNA, 15 bp, Homo sapiens
gccactgaataaaag

SEQ ID NO: 51478 - DNA, 15 bp, Homo sapiens
agccactgaataaaa

SEQ ID NO: 51479 - DNA, 15 bp, Homo sapiens
tagccactgaataaa

SEQ ID NO: 51480 - DNA, 15 bp, Homo sapiens
atagccactgaataa

SEQ ID NO: 51481 - DNA, 15 bp, Homo sapiens
aatagccactgaata

SEQ ID NO: 51482 - DNA, 15 bp, Homo sapiens
aaatagccactgaat

SEQ ID NO: 51483 - DNA, 15 bp, Homo sapiens
taaatagccactgaa

SEQ ID NO: 51484 - DNA, 15 bp, Homo sapiens
ataaatagccactga

SEQ ID NO: 51485 - DNA, 15 bp, Homo sapiens
aataaatagccactg

SEQ ID NO: 51486 - DNA, 15 bp, Homo sapiens
caataaatagccact

SEQ ID NO: 51487 - DNA, 15 bp, Homo sapiens
ccaataaatagccac

SEQ ID NO: 51488 - DNA, 15 bp, Homo sapiens
cccaataaatagcca

SEQ ID NO: 51489 - DNA, 15 bp, Homo sapiens
tcccaataaatagcc

SEQ ID NO: 51490 - DNA, 15 bp, Homo sapiens
ctcccaataaatagc

SEQ ID NO: 51491 - DNA, 15 bp, Homo sapiens
gctcccaataaatag

SEQ ID NO: 51492 - DNA, 15 bp, Homo sapiens
ggctcccaataaata

SEQ ID NO: 51493 - DNA, 15 bp, Homo sapiens
aggctcccaataaat

SEQ ID NO: 51494 - DNA, 15 bp, Homo sapiens
taggctcccaataaa

SEQ ID NO: 51495 - DNA, 15 bp, Homo sapiens
gtaggctcccaataa

SEQ ID NO: 51496 - DNA, 15 bp, Homo sapiens
agtaggctcccaata

SEQ ID NO: 51497 - DNA, 15 bp, Homo sapiens
cagtaggctcccaat

SEQ ID NO: 51498 - DNA, 15 bp, Homo sapiens
acagtaggctcccaa

SEQ ID NO: 51499 - DNA, 15 bp, Homo sapiens
cacagtaggctccca

SEQ ID NO: 51500 - DNA, 15 bp, Homo sapiens
acacagtaggctccc

SEQ ID NO: 51501 - DNA, 15 bp, Homo sapiens
aacacagtaggctcc

SEQ ID NO: 51502 - DNA, 15 bp, Homo sapiens
gaacacagtaggctc

SEQ ID NO: 51503 - DNA, 15 bp, Homo sapiens
agaacacagtaggct

SEQ ID NO: 51504 - DNA, 15 bp, Homo sapiens
cagaacacagtaggc

SEQ ID NO: 51505 - DNA, 15 bp, Homo sapiens
ccagaacacagtagg

SEQ ID NO: 51506 - DNA, 15 bp, Homo sapiens
cccagaacacagtag

SEQ ID NO: 51507 - DNA, 15 bp, Homo sapiens
gcccagaacacagta

SEQ ID NO: 51508 - DNA, 15 bp, Homo sapiens
tgcccagaacacagt

SEQ ID NO: 51509 - DNA, 15 bp, Homo sapiens
gtgcccagaacacag

SEQ ID NO: 51510 - DNA, 15 bp, Homo sapiens
agtgcccagaacaca

SEQ ID NO: 51511 - DNA, 15 bp, Homo sapiens
tagtgcccagaacac

SEQ ID NO: 51512 - DNA, 15 bp, Homo sapiens
ctagtgcccagaaca

SEQ ID NO: 51513 - DNA, 15 bp, Homo sapiens
cctagtgcccagaac

SEQ ID NO: 51514 - DNA, 15 bp, Homo sapiens
tcctagtgcccagaa

SEQ ID NO: 51515 - DNA, 15 bp, Homo sapiens
ttcctagtgcccaga

SEQ ID NO: 51516 - DNA, 15 bp, Homo sapiens
attcctagtgcccag

SEQ ID NO: 51517 - DNA, 15 bp, Homo sapiens
cattcctagtgccca

SEQ ID NO: 51518 - DNA, 15 bp, Homo sapiens
gcattcctagtgccc

SEQ ID NO: 51519 - DNA, 15 bp, Homo sapiens
tgcattcctagtgcc

SEQ ID NO: 51520 - DNA, 15 bp, Homo sapiens
ttgcattcctagtgc

SEQ ID NO: 51521 - DNA, 15 bp, Homo sapiens
gttgcattcctagtg

SEQ ID NO: 51522 - DNA, 15 bp, Homo sapiens
tgttgcattcctagt

SEQ ID NO: 51523 - DNA, 15 bp, Homo sapiens
ctgttgcattcctag

SEQ ID NO: 51524 - DNA, 15 bp, Homo sapiens
actgttgcattccta

SEQ ID NO: 51525 - DNA, 15 bp, Homo sapiens
tactgttgcattcct

SEQ ID NO: 51526 - DNA, 15 bp, Homo sapiens
ttactgttgcattcc

SEQ ID NO: 51527 - DNA, 15 bp, Homo sapiens
tttactgttgcattc

SEQ ID NO: 51528 - DNA, 15 bp, Homo sapiens
atttactgttgcatt

SEQ ID NO: 51529 - DNA, 15 bp, Homo sapiens
tatttactgttgcat

SEQ ID NO: 51530 - DNA, 15 bp, Homo sapiens
ttatttactgttgca

SEQ ID NO: 51531 - DNA, 15 bp, Homo sapiens
cttatttactgttgc

SEQ ID NO: 51532 - DNA, 15 bp, Homo sapiens
tcttatttactgttg

SEQ ID NO: 51533 - DNA, 15 bp, Homo sapiens
gtcttatttactgtt

SEQ ID NO: 51534 - DNA, 15 bp, Homo sapiens
agtcttatttactgt

SEQ ID NO: 51535 - DNA, 15 bp, Homo sapiens
tagtcttatttactg

SEQ ID NO: 51536 - DNA, 15 bp, Homo sapiens
ttagtcttatttact

SEQ ID NO: 51537 - DNA, 15 bp, Homo sapiens
gttagtcttatttac

SEQ ID NO: 51538 - DNA, 15 bp, Homo sapiens
agttagtcttattta

SEQ ID NO: 51539 - DNA, 15 bp, Homo sapiens
tagttagtcttattt

SEQ ID NO: 51540 - DNA, 15 bp, Homo sapiens
ttagttagtcttatt

SEQ ID NO: 51541 - DNA, 15 bp, Homo sapiens
cttagttagtcttat

SEQ ID NO: 51542 - DNA, 15 bp, Homo sapiens
acttagttagtctta

SEQ ID NO: 51543 - DNA, 15 bp, Homo sapiens
gacttagttagtctt

SEQ ID NO: 51544 - DNA, 15 bp, Homo sapiens
ggacttagttagtct

SEQ ID NO: 51545 - DNA, 15 bp, Homo sapiens
gggacttagttagtc

SEQ ID NO: 51546 - DNA, 15 bp, Homo sapiens
agggacttagttagt

SEQ ID NO: 51547 - DNA, 15 bp, Homo sapiens
cagggacttagttag

SEQ ID NO: 51548 - DNA, 15 bp, Homo sapiens
ccagggacttagtta

SEQ ID NO: 51549 - DNA, 15 bp, Homo sapiens
accagggacttagtt

SEQ ID NO: 51550 - DNA, 15 bp, Homo sapiens
taccagggacttagt

SEQ ID NO: 51551 - DNA, 15 bp, Homo sapiens
ctaccagggacttag

SEQ ID NO: 51552 - DNA, 15 bp, Homo sapiens
cctaccagggactta

SEQ ID NO: 51553 - DNA, 15 bp, Homo sapiens
tcctaccagggactt

SEQ ID NO: 51554 - DNA, 15 bp, Homo sapiens
atcctaccagggact

SEQ ID NO: 51555 - DNA, 15 bp, Homo sapiens
aatcctaccagggac

SEQ ID NO: 51556 - DNA, 15 bp, Homo sapiens
gaatcctaccaggga

SEQ ID NO: 51557 - DNA, 15 bp, Homo sapiens
tgaatcctaccaggg

SEQ ID NO: 51558 - DNA, 15 bp, Homo sapiens
ctgaatcctaccagg

SEQ ID NO: 51559 - DNA, 15 bp, Homo sapiens
cctgaatcctaccag

SEQ ID NO: 51560 - DNA, 15 bp, Homo sapiens
acctgaatcctacca

SEQ ID NO: 51561 - DNA, 15 bp, Homo sapiens
aacctgaatcctacc

SEQ ID NO: 51562 - DNA, 15 bp, Homo sapiens
gaacctgaatcctac

SEQ ID NO: 51563 - DNA, 15 bp, Homo sapiens
agaacctgaatccta

SEQ ID NO: 51564 - DNA, 15 bp, Homo sapiens
cagaacctgaatcct

SEQ ID NO: 51565 - DNA, 15 bp, Homo sapiens
acagaacctgaatcc

SEQ ID NO: 51566 - DNA, 15 bp, Homo sapiens
gacagaacctgaatc

SEQ ID NO: 51567 - DNA, 15 bp, Homo sapiens
cgacagaacctgaat

SEQ ID NO: 51568 - DNA, 15 bp, Homo sapiens
tcgacagaacctgaa

SEQ ID NO: 51569 - DNA, 15 bp, Homo sapiens
ctcgacagaacctga

SEQ ID NO: 51570 - DNA, 15 bp, Homo sapiens
cctcgacagaacctg

SEQ ID NO: 51571 - DNA, 15 bp, Homo sapiens
ccctcgacagaacct

SEQ ID NO: 51572 - DNA, 15 bp, Homo sapiens
cccctcgacagaacc

SEQ ID NO: 51573 - DNA, 15 bp, Homo sapiens
tcccctcgacagaac

SEQ ID NO: 51574 - DNA, 15 bp, Homo sapiens
ctcccctcgacagaa

SEQ ID NO: 51575 - DNA, 15 bp, Homo sapiens
tctcccctcgacaga

SEQ ID NO: 51576 - DNA, 15 bp, Homo sapiens
atctcccctcgacag

SEQ ID NO: 51577 - DNA, 15 bp, Homo sapiens
tatctcccctcgaca

SEQ ID NO: 51578 - DNA, 15 bp, Homo sapiens
gtatctcccctcgac

SEQ ID NO: 51579 - DNA, 15 bp, Homo sapiens
tgtatctcccctcga

SEQ ID NO: 51580 - DNA, 15 bp, Homo sapiens
gtgtatctcccctcg

SEQ ID NO: 51581 - DNA, 15 bp, Homo sapiens
tgtgtatctcccctc

SEQ ID NO: 51582 - DNA, 15 bp, Homo sapiens
ttgtgtatctcccct

SEQ ID NO: 51583 - DNA, 15 bp, Homo sapiens
attgtgtatctcccc

SEQ ID NO: 51584 - DNA, 15 bp, Homo sapiens
tattgtgtatctccc

SEQ ID NO: 51585 - DNA, 15 bp, Homo sapiens
ttattgtgtatctcc

SEQ ID NO: 51586 - DNA, 15 bp, Homo sapiens
tttattgtgtatctc

SEQ ID NO: 51587 - DNA, 15 bp, Homo sapiens
ctttattgtgtatct

SEQ ID NO: 51588 - DNA, 15 bp, Homo sapiens
tctttattgtgtatc

SEQ ID NO: 51589 - DNA, 15 bp, Homo sapiens
atctttattgtgtat

SEQ ID NO: 51590 - DNA, 15 bp, Homo sapiens
catctttattgtgta

SEQ ID NO: 51591 - DNA, 15 bp, Homo sapiens
tcatctttattgtgt

SEQ ID NO: 51592 - DNA, 15 bp, Homo sapiens
ttcatctttattgtg

SEQ ID NO: 51593 - DNA, 15 bp, Homo sapiens
attcatctttattgt

SEQ ID NO: 51594 - DNA, 15 bp, Homo sapiens
aattcatctttattg

SEQ ID NO: 51595 - DNA, 15 bp, Homo sapiens
aaattcatctttatt

SEQ ID NO: 51596 - DNA, 15 bp, Homo sapiens
taaattcatctttat

SEQ ID NO: 51597 - DNA, 15 bp, Homo sapiens
ttaaattcatcttta

SEQ ID NO: 51598 - DNA, 15 bp, Homo sapiens
cttaaattcatcttt

SEQ ID NO: 51599 - DNA, 15 bp, Homo sapiens
tcttaaattcatctt

SEQ ID NO: 51600 - DNA, 15 bp, Homo sapiens
atcttaaattcatct

SEQ ID NO: 51601 - DNA, 15 bp, Homo sapiens
tatcttaaattcatc

SEQ ID NO: 51602 - DNA, 15 bp, Homo sapiens
ttatcttaaattcat

SEQ ID NO: 51603 - DNA, 15 bp, Homo sapiens
gttatcttaaattca

SEQ ID NO: 51604 - DNA, 15 bp, Homo sapiens
tgttatcttaaattc

SEQ ID NO: 51605 - DNA, 15 bp, Homo sapiens
ttgttatcttaaatt

SEQ ID NO: 51606 - DNA, 15 bp, Homo sapiens
attgttatcttaaat

SEQ ID NO: 51607 - DNA, 15 bp, Homo sapiens
tattgttatcttaaa

SEQ ID NO: 51608 - DNA, 15 bp, Homo sapiens
ttattgttatcttaa

SEQ ID NO: 51609 - DNA, 15 bp, Homo sapiens
tttattgttatctta

SEQ ID NO: 51610 - DNA, 15 bp, Homo sapiens
atttattgttatctt

SEQ ID NO: 51611 - DNA, 15 bp, Homo sapiens
catttattgttatct

SEQ ID NO: 51612 - DNA, 15 bp, Homo sapiens
gcatttattgttatc

SEQ ID NO: 51613 - DNA, 15 bp, Homo sapiens
agcatttattgttat

SEQ ID NO: 51614 - DNA, 15 bp, Homo sapiens
tagcatttattgtta

SEQ ID NO: 51615 - DNA, 15 bp, Homo sapiens
atagcatttattgtt

SEQ ID NO: 51616 - DNA, 15 bp, Homo sapiens
catagcatttattgt

SEQ ID NO: 51617 - DNA, 15 bp, Homo sapiens
ccatagcatttattg

SEQ ID NO: 51618 - DNA, 15 bp, Homo sapiens
tccatagcatttatt

SEQ ID NO: 51619 - DNA, 15 bp, Homo sapiens
ctccatagcatttat

SEQ ID NO: 51620 - DNA, 15 bp, Homo sapiens
tctccatagcattta

SEQ ID NO: 51621 - DNA, 15 bp, Homo sapiens
ttctccatagcattt

SEQ ID NO: 51622 - DNA, 15 bp, Homo sapiens
tttctccatagcatt

SEQ ID NO: 51623 - DNA, 15 bp, Homo sapiens
atttctccatagcat

SEQ ID NO: 51624 - DNA, 15 bp, Homo sapiens
tatttctccatagca

SEQ ID NO: 51625 - DNA, 15 bp, Homo sapiens
atatttctccatagc

SEQ ID NO: 51626 - DNA, 15 bp, Homo sapiens
tatatttctccatag

SEQ ID NO: 51627 - DNA, 15 bp, Homo sapiens
gtatatttctccata

SEQ ID NO: 51628 - DNA, 15 bp, Homo sapiens
tgtatatttctccat

SEQ ID NO: 51629 - DNA, 15 bp, Homo sapiens
ctgtatatttctcca

SEQ ID NO: 51630 - DNA, 15 bp, Homo sapiens
tctgtatatttctcc

SEQ ID NO: 51631 - DNA, 15 bp, Homo sapiens
ttctgtatatttctc

SEQ ID NO: 51632 - DNA, 15 bp, Homo sapiens
gttctgtatatttct

SEQ ID NO: 51633 - DNA, 15 bp, Homo sapiens
tgttctgtatatttc

SEQ ID NO: 51634 - DNA, 15 bp, Homo sapiens
ctgttctgtatattt

SEQ ID NO: 51635 - DNA, 15 bp, Homo sapiens
actgttctgtatatt

SEQ ID NO: 51636 - DNA, 15 bp, Homo sapiens
cactgttctgtatat

SEQ ID NO: 51637 - DNA, 15 bp, Homo sapiens
tccactgttctgtat

SEQ ID NO: 51638 - DNA, 15 bp, Homo sapiens
ttccactgttctgta

SEQ ID NO: 51639 - DNA, 15 bp, Homo sapiens
attccactgttctgt

SEQ ID NO: 51640 - DNA, 15 bp, Homo sapiens
tattccactgttctg

SEQ ID NO: 51641 - DNA, 15 bp, Homo sapiens
ctattccactgttct

SEQ ID NO: 51642 - DNA, 15 bp, Homo sapiens
actattccactgttc

SEQ ID NO: 51643 - DNA, 15 bp, Homo sapiens
tactattccactgtt

SEQ ID NO: 51644 - DNA, 15 bp, Homo sapiens
atactattccactgt

SEQ ID NO: 51645 - DNA, 15 bp, Homo sapiens
aatactattccactg

SEQ ID NO: 51646 - DNA, 15 bp, Homo sapiens
taatactattccact

SEQ ID NO: 51647 - DNA, 15 bp, Homo sapiens
ctaatactattccac

SEQ ID NO: 51648 - DNA, 15 bp, Homo sapiens
gctaatactattcca

SEQ ID NO: 51649 - DNA, 15 bp, Homo sapiens
agctaatactattcc

SEQ ID NO: 51650 - DNA, 15 bp, Homo sapiens
cagctaatactattc

SEQ ID NO: 51651 - DNA, 15 bp, Homo sapiens
acagctaatactatt

SEQ ID NO: 51652 - DNA, 15 bp, Homo sapiens
gacagctaatactat

SEQ ID NO: 51653 - DNA, 15 bp, Homo sapiens
tgacagctaatacta

SEQ ID NO: 51654 - DNA, 15 bp, Homo sapiens
ttgacagctaatact

SEQ ID NO: 51655 - DNA, 15 bp, Homo sapiens
tttgacagctaatac

SEQ ID NO: 51656 - DNA, 15 bp, Homo sapiens
ctttgacagctaata

SEQ ID NO: 51657 - DNA, 15 bp, Homo sapiens
cctttgacagctaat

SEQ ID NO: 51658 - DNA, 15 bp, Homo sapiens
acctttgacagctaa

SEQ ID NO: 51659 - DNA, 15 bp, Homo sapiens
aacctttgacagcta

SEQ ID NO: 51660 - DNA, 15 bp, Homo sapiens
caacctttgacagct

SEQ ID NO: 51661 - DNA, 15 bp, Homo sapiens
acaacctttgacagc

SEQ ID NO: 51662 - DNA, 15 bp, Homo sapiens
aacaacctttgacag

SEQ ID NO: 51663 - DNA, 15 bp, Homo sapiens
caacaacctttgaca

SEQ ID NO: 51664 - DNA, 15 bp, Homo sapiens
tcaacaacctttgac

SEQ ID NO: 51665 - DNA, 15 bp, Homo sapiens
atcaacaacctttga

SEQ ID NO: 51666 - DNA, 15 bp, Homo sapiens
aatcaacaacctttg

SEQ ID NO: 51667 - DNA, 15 bp, Homo sapiens
taatcaacaaccttt

SEQ ID NO: 51668 - DNA, 15 bp, Homo sapiens
gtaatcaacaacctt

SEQ ID NO: 51669 - DNA, 15 bp, Homo sapiens
agtaatcaacaacct

SEQ ID NO: 51670 - DNA, 15 bp, Homo sapiens
aagtaatcaacaacc

SEQ ID NO: 51671 - DNA, 15 bp, Homo sapiens
aaagtaatcaacaac

SEQ ID NO: 51672 - DNA, 15 bp, Homo sapiens
gaaagtaatcaacaa

SEQ ID NO: 51673 - DNA, 15 bp, Homo sapiens
cgaaagtaatcaaca

SEQ ID NO: 51674 - DNA, 15 bp, Homo sapiens
acgaaagtaatcaac

SEQ ID NO: 51675 - DNA, 15 bp, Homo sapiens
aacgaaagtaatcaa

SEQ ID NO: 51676 - DNA, 15 bp, Homo sapiens
aaacgaaagtaatca

SEQ ID NO: 51677 - DNA, 15 bp, Homo sapiens
taaacgaaagtaatc

SEQ ID NO: 51678 - DNA, 15 bp, Homo sapiens
ttaaacgaaagtaat

SEQ ID NO: 51679 - DNA, 15 bp, Homo sapiens
cttaaacgaaagtaa

SEQ ID NO: 51680 - DNA, 15 bp, Homo sapiens
ccttaaacgaaagta

SEQ ID NO: 51681 - DNA, 15 bp, Homo sapiens
tccttaaacgaaagt

SEQ ID NO: 51682 - DNA, 15 bp, Homo sapiens
ctccttaaacgaaag

SEQ ID NO: 51683 - DNA, 15 bp, Homo sapiens
cctccttaaacgaaa

SEQ ID NO: 51684 - DNA, 15 bp, Homo sapiens
gcctccttaaacgaa

SEQ ID NO: 51685 - DNA, 15 bp, Homo sapiens
ggcctccttaaacga

SEQ ID NO: 51686 - DNA, 15 bp, Homo sapiens
tggcctccttaaacg

SEQ ID NO: 51687 - DNA, 15 bp, Homo sapiens
ctggcctccttaaac

SEQ ID NO: 51688 - DNA, 15 bp, Homo sapiens
cctggcctccttaaa

SEQ ID NO: 51689 - DNA, 15 bp, Homo sapiens
ccctggcctccttaa

SEQ ID NO: 51690 - DNA, 15 bp, Homo sapiens
tccctggcctcctta

SEQ ID NO: 51691 - DNA, 15 bp, Homo sapiens
ttccctggcctcctt

SEQ ID NO: 51692 - DNA, 15 bp, Homo sapiens
tttccctggcctcct

SEQ ID NO: 51693 - DNA, 15 bp, Homo sapiens
ctttccctggcctcc

SEQ ID NO: 51694 - DNA, 15 bp, Homo sapiens
gctttccctggcctc

SEQ ID NO: 51695 - DNA, 15 bp, Homo sapiens
ggctttccctggcct

SEQ ID NO: 51696 - DNA, 15 bp, Homo sapiens
aggctttccctggcc

SEQ ID NO: 51697 - DNA, 15 bp, Homo sapiens
aaggctttccctggc

SEQ ID NO: 51698 - DNA, 15 bp, Homo sapiens
aaaggctttccctgg

SEQ ID NO: 51699 - DNA, 15 bp, Homo sapiens
gaaaggctttccctg

SEQ ID NO: 51700 - DNA, 15 bp, Homo sapiens
agaaaggctttccct

SEQ ID NO: 51701 - DNA, 15 bp, Homo sapiens
cagaaaggctttccc

SEQ ID NO: 51702 - DNA, 15 bp, Homo sapiens
tcagaaaggctttcc

SEQ ID NO: 51703 - DNA, 15 bp, Homo sapiens
ttcagaaaggctttc

SEQ ID NO: 51704 - DNA, 15 bp, Homo sapiens
tttcagaaaggcttt

SEQ ID NO: 51705 - DNA, 15 bp, Homo sapiens
ttttcagaaaggctt

SEQ ID NO: 51706 - DNA, 15 bp, Homo sapiens
tttttcagaaaggct

SEQ ID NO: 51707 - DNA, 15 bp, Homo sapiens
ttttttcagaaaggc

SEQ ID NO: 51708 - DNA, 15 bp, Homo sapiens
attttttcagaaagg

SEQ ID NO: 51709 - DNA, 15 bp, Homo sapiens
aattttttcagaaag

SEQ ID NO: 51710 - DNA, 15 bp, Homo sapiens
caattttttcagaaa

SEQ ID NO: 51711 - DNA, 15 bp, Homo sapiens
tcaattttttcagaa

SEQ ID NO: 51712 - DNA, 15 bp, Homo sapiens
ctcaattttttcaga

SEQ ID NO: 51713 - DNA, 15 bp, Homo sapiens
gctcaattttttcag

SEQ ID NO: 51714 - DNA, 15 bp, Homo sapiens
agctcaattttttca

SEQ ID NO: 51715 - DNA, 15 bp, Homo sapiens
cagctcaattttttc

SEQ ID NO: 51716 - DNA, 15 bp, Homo sapiens
tcagctcaatttttt

SEQ ID NO: 51717 - DNA, 15 bp, Homo sapiens
ctcagctcaattttt

SEQ ID NO: 51718 - DNA, 15 bp, Homo sapiens
tctcagctcaatttt

SEQ ID NO: 51719 - DNA, 15 bp, Homo sapiens
gtctcagctcaattt

SEQ ID NO: 51720 - DNA, 15 bp, Homo sapiens
ggtctcagctcaatt

SEQ ID NO: 51721 - DNA, 15 bp, Homo sapiens
aggtctcagctcaat

SEQ ID NO: 51722 - DNA, 15 bp, Homo sapiens
taggtctcagctcaa

SEQ ID NO: 51723 - DNA, 15 bp, Homo sapiens
ttaggtctcagctca

SEQ ID NO: 51724 - DNA, 15 bp, Homo sapiens
tttaggtctcagctc

SEQ ID NO: 51725 - DNA, 15 bp, Homo sapiens
atttaggtctcagct

SEQ ID NO: 51726 - DNA, 15 bp, Homo sapiens
tatttaggtctcagc

SEQ ID NO: 51727 - DNA, 15 bp, Homo sapiens
ttatttaggtctcag

SEQ ID NO: 51728 - DNA, 15 bp, Homo sapiens
gttatttaggtctca

SEQ ID NO: 51729 - DNA, 15 bp, Homo sapiens
tgttatttaggtctc

SEQ ID NO: 51730 - DNA, 15 bp, Homo sapiens
ttgttatttaggtct

SEQ ID NO: 51731 - DNA, 15 bp, Homo sapiens
cttgttatttaggtc

SEQ ID NO: 51732 - DNA, 15 bp, Homo sapiens
tcttgttatttaggt

SEQ ID NO: 51733 - DNA, 15 bp, Homo sapiens
ttcttgttatttagg

SEQ ID NO: 51734 - DNA, 15 bp, Homo sapiens
tttcttgttatttag

SEQ ID NO: 51735 - DNA, 15 bp, Homo sapiens
atttcttgttattta

SEQ ID NO: 51736 - DNA, 15 bp, Homo sapiens
tatttcttgttattt

SEQ ID NO: 51737 - DNA, 15 bp, Homo sapiens
ttatttcttgttatt

SEQ ID NO: 51738 - DNA, 15 bp, Homo sapiens
attatttcttgttat

SEQ ID NO: 51739 - DNA, 15 bp, Homo sapiens
aattatttcttgtta

SEQ ID NO: 51740 - DNA, 15 bp, Homo sapiens
caattatttcttgtt

SEQ ID NO: 51741 - DNA, 15 bp, Homo sapiens
acaattatttcttgt

SEQ ID NO: 51742 - DNA, 15 bp, Homo sapiens
gacaattatttcttg

SEQ ID NO: 51743 - DNA, 15 bp, Homo sapiens
ggacaattatttctt

SEQ ID NO: 51744 - DNA, 15 bp, Homo sapiens
aggacaattatttct

SEQ ID NO: 51745 - DNA, 15 bp, Homo sapiens
aaggacaattatttc

SEQ ID NO: 51746 - DNA, 15 bp, Homo sapiens
caaggacaattattt

SEQ ID NO: 51747 - DNA, 15 bp, Homo sapiens
tcaaggacaattatt

SEQ ID NO: 51748 - DNA, 15 bp, Homo sapiens
ttcaaggacaattat

SEQ ID NO: 51749 - DNA, 15 bp, Homo sapiens
tttcaaggacaatta

SEQ ID NO: 51750 - DNA, 15 bp, Homo sapiens
ttttcaaggacaatt

SEQ ID NO: 51751 - DNA, 15 bp, Homo sapiens
tttttcaaggacaat

SEQ ID NO: 51752 - DNA, 15 bp, Homo sapiens
atttttcaaggacaa

SEQ ID NO: 51753 - DNA, 15 bp, Homo sapiens
catttttcaaggaca

SEQ ID NO: 51754 - DNA, 15 bp, Homo sapiens
tcatttttcaaggac

SEQ ID NO: 51755 - DNA, 15 bp, Homo sapiens
ttcatttttcaagga

SEQ ID NO: 51756 - DNA, 15 bp, Homo sapiens
cttcatttttcaagg

SEQ ID NO: 51757 - DNA, 15 bp, Homo sapiens
ccttcatttttcaag

SEQ ID NO: 51758 - DNA, 15 bp, Homo sapiens
cccttcatttttcaa

SEQ ID NO: 51759 - DNA, 15 bp, Homo sapiens
tcccttcatttttca

SEQ ID NO: 51760 - DNA, 15 bp, Homo sapiens
ttcccttcatttttc

SEQ ID NO: 51761 - DNA, 15 bp, Homo sapiens
attcccttcattttt

SEQ ID NO: 51762 - DNA, 15 bp, Homo sapiens
cattcccttcatttt

SEQ ID NO: 51763 - DNA, 15 bp, Homo sapiens
gcattcccttcattt

SEQ ID NO: 51764 - DNA, 15 bp, Homo sapiens
tgcattcccttcatt

SEQ ID NO: 51765 - DNA, 15 bp, Homo sapiens
atgcattcccttcat

SEQ ID NO: 51766 - DNA, 15 bp, Homo sapiens
gatgcattcccttca

SEQ ID NO: 51767 - DNA, 15 bp, Homo sapiens
agatgcattcccttc

SEQ ID NO: 51768 - DNA, 15 bp, Homo sapiens
aagatgcattccctt

SEQ ID NO: 51769 - DNA, 15 bp, Homo sapiens
taagatgcattccct

SEQ ID NO: 51770 - DNA, 15 bp, Homo sapiens
ataagatgcattccc

SEQ ID NO: 51771 - DNA, 15 bp, Homo sapiens
tataagatgcattcc

SEQ ID NO: 51772 - DNA, 15 bp, Homo sapiens
ctataagatgcattc

SEQ ID NO: 51773 - DNA, 15 bp, Homo sapiens
cctataagatgcatt

SEQ ID NO: 51774 - DNA, 15 bp, Homo sapiens
gcctataagatgcat

SEQ ID NO: 51775 - DNA, 15 bp, Homo sapiens
tgcctataagatgca

SEQ ID NO: 51776 - DNA, 15 bp, Homo sapiens
ctgcctataagatgc

SEQ ID NO: 51777 - DNA, 15 bp, Homo sapiens
tctgcctataagatg

SEQ ID NO: 51778 - DNA, 15 bp, Homo sapiens
ctctgcctataagat

SEQ ID NO: 51779 - DNA, 15 bp, Homo sapiens
cctctgcctataaga

SEQ ID NO: 51780 - DNA, 15 bp, Homo sapiens
tcctctgcctataag

SEQ ID NO: 51781 - DNA, 15 bp, Homo sapiens
ttcctctgcctataa

SEQ ID NO: 51782 - DNA, 15 bp, Homo sapiens
attcctctgcctata

SEQ ID NO: 51783 - DNA, 15 bp, Homo sapiens
tattcctctgcctat

SEQ ID NO: 51784 - DNA, 15 bp, Homo sapiens
ctattcctctgccta

SEQ ID NO: 51785 - DNA, 15 bp, Homo sapiens
gctattcctctgcct

SEQ ID NO: 51786 - DNA, 15 bp, Homo sapiens
tgctattcctctgcc

SEQ ID NO: 51787 - DNA, 15 bp, Homo sapiens
ttgctattcctctgc

SEQ ID NO: 51788 - DNA, 15 bp, Homo sapiens
tttgctattcctctg

SEQ ID NO: 51789 - DNA, 15 bp, Homo sapiens
gtttgctattcctct

SEQ ID NO: 51790 - DNA, 15 bp, Homo sapiens
tgtttgctattcctc

SEQ ID NO: 51791 - DNA, 15 bp, Homo sapiens
atgtttgctattcct

SEQ ID NO: 51792 - DNA, 15 bp, Homo sapiens
tatgtttgctattcc

SEQ ID NO: 51793 - DNA, 15 bp, Homo sapiens
ttatgtttgctattc

SEQ ID NO: 51794 - DNA, 15 bp, Homo sapiens
tttatgtttgctatt

SEQ ID NO: 51795 - DNA, 15 bp, Homo sapiens
ctttatgtttgctat

SEQ ID NO: 51796 - DNA, 15 bp, Homo sapiens
cctttatgtttgcta

SEQ ID NO: 51797 - DNA, 15 bp, Homo sapiens
acctttatgtttgct

SEQ ID NO: 51798 - DNA, 15 bp, Homo sapiens
gacctttatgtttgc

SEQ ID NO: 51799 - DNA, 15 bp, Homo sapiens
agacctttatgtttg

SEQ ID NO: 51800 - DNA, 15 bp, Homo sapiens
aagacctttatgttt

SEQ ID NO: 51801 - DNA, 15 bp, Homo sapiens
caagacctttatgtt

SEQ ID NO: 51802 - DNA, 15 bp, Homo sapiens
tcaagacctttatgt

SEQ ID NO: 51803 - DNA, 15 bp, Homo sapiens
ctcaagacctttatg

SEQ ID NO: 51804 - DNA, 15 bp, Homo sapiens
cctcaagacctttat

SEQ ID NO: 51805 - DNA, 15 bp, Homo sapiens
acctcaagaccttta

SEQ ID NO: 51806 - DNA, 15 bp, Homo sapiens
tacctcaagaccttt

SEQ ID NO: 51807 - DNA, 15 bp, Homo sapiens
ttacctcaagacctt

SEQ ID NO: 51808 - DNA, 15 bp, Homo sapiens
attacctcaagacct

SEQ ID NO: 51809 - DNA, 15 bp, Homo sapiens
tattacctcaagacc

SEQ ID NO: 51810 - DNA, 15 bp, Homo sapiens
ttattacctcaagac

SEQ ID NO: 51811 - DNA, 15 bp, Homo sapiens
attattacctcaaga

SEQ ID NO: 51812 - DNA, 15 bp, Homo sapiens
cattattacctcaag

SEQ ID NO: 51813 - DNA, 15 bp, Homo sapiens
tcattattacctcaa

SEQ ID NO: 51814 - DNA, 15 bp, Homo sapiens
ctcattattacctca

SEQ ID NO: 51815 - DNA, 15 bp, Homo sapiens
actcattattacctc

SEQ ID NO: 51816 - DNA, 15 bp, Homo sapiens
cactcattattacct

SEQ ID NO: 51817 - DNA, 15 bp, Homo sapiens
acactcattattacc

SEQ ID NO: 51818 - DNA, 15 bp, Homo sapiens
cacactcattattac

SEQ ID NO: 51819 - DNA, 15 bp, Homo sapiens
ccacactcattatta

SEQ ID NO: 51820 - DNA, 15 bp, Homo sapiens
accacactcattatt

SEQ ID NO: 51821 - DNA, 15 bp, Homo sapiens
aaccacactcattat

SEQ ID NO: 51822 - DNA, 15 bp, Homo sapiens
aaaccacactcatta

SEQ ID NO: 51823 - DNA, 15 bp, Homo sapiens
aaaaccacactcatt

SEQ ID NO: 51824 - DNA, 15 bp, Homo sapiens
aaaaaccacactcat

SEQ ID NO: 51825 - DNA, 15 bp, Homo sapiens
aaaaaaccacactca

SEQ ID NO: 51826 - DNA, 15 bp, Homo sapiens
caaaaaaccacactc

SEQ ID NO: 51827 - DNA, 15 bp, Homo sapiens
tcaaaaaaccacact

SEQ ID NO: 51828 - DNA, 15 bp, Homo sapiens
atcaaaaaaccacac

SEQ ID NO: 51829 - DNA, 15 bp, Homo sapiens
aatcaaaaaaccaca

SEQ ID NO: 51830 - DNA, 15 bp, Homo sapiens
aaatcaaaaaaccac

SEQ ID NO: 51831 - DNA, 15 bp, Homo sapiens
gaaatcaaaaaacca

SEQ ID NO: 51832 - DNA, 15 bp, Homo sapiens
agaaatcaaaaaacc

SEQ ID NO: 51833 - DNA, 15 bp, Homo sapiens
cagaaatcaaaaaac

SEQ ID NO: 51834 - DNA, 15 bp, Homo sapiens
acagaaatcaaaaaa

SEQ ID NO: 51835 - DNA, 15 bp, Homo sapiens
tacagaaatcaaaaa

SEQ ID NO: 51836 - DNA, 15 bp, Homo sapiens
atacagaaatcaaaa

SEQ ID NO: 51837 - DNA, 15 bp, Homo sapiens
aatacagaaatcaaa

SEQ ID NO: 51838 - DNA, 15 bp, Homo sapiens
aaatacagaaatcaa

SEQ ID NO: 51839 - DNA, 15 bp, Homo sapiens
aaaatacagaaatca

SEQ ID NO: 51840 - DNA, 15 bp, Homo sapiens
caaaatacagaaatc

SEQ ID NO: 51841 - DNA, 15 bp, Homo sapiens
ccaaaatacagaaat

SEQ ID NO: 51842 - DNA, 15 bp, Homo sapiens
accaaaatacagaaa

SEQ ID NO: 51843 - DNA, 15 bp, Homo sapiens
aaccaaaatacagaa

SEQ ID NO: 51844 - DNA, 15 bp, Homo sapiens
aaaccaaaatacaga

SEQ ID NO: 51845 - DNA, 15 bp, Homo sapiens
aaaaccaaaatacag

SEQ ID NO: 51846 - DNA, 15 bp, Homo sapiens
aaaaaccaaaataca

SEQ ID NO: 51847 - DNA, 15 bp, Homo sapiens
aaaaaaccaaaatac

SEQ ID NO: 51848 - DNA, 15 bp, Homo sapiens
aaaaaaaccaaaata

SEQ ID NO: 51849 - DNA, 15 bp, Homo sapiens
caaaaaaaccaaaat

SEQ ID NO: 51850 - DNA, 15 bp, Homo sapiens
tcaaaaaaaccaaaa

SEQ ID NO: 51851 - DNA, 15 bp, Homo sapiens
ctcaaaaaaaccaaa

SEQ ID NO: 51852 - DNA, 15 bp, Homo sapiens
tctcaaaaaaaccaa

SEQ ID NO: 51853 - DNA, 15 bp, Homo sapiens
atctcaaaaaaacca

SEQ ID NO: 51854 - DNA, 15 bp, Homo sapiens
catctcaaaaaaacc

SEQ ID NO: 51855 - DNA, 15 bp, Homo sapiens
ccatctcaaaaaaac

SEQ ID NO: 51856 - DNA, 15 bp, Homo sapiens
gacaccatctcaaaa

SEQ ID NO: 51857 - DNA, 15 bp, Homo sapiens
agacaccatctcaaa

SEQ ID NO: 51858 - DNA, 15 bp, Homo sapiens
gagacaccatctcaa

SEQ ID NO: 51859 - DNA, 15 bp, Homo sapiens
ggagacaccatctca

SEQ ID NO: 51860 - DNA, 15 bp, Homo sapiens
gggagacaccatctc

SEQ ID NO: 51861 - DNA, 15 bp, Homo sapiens
agggagacaccatct

SEQ ID NO: 51862 - DNA, 15 bp, Homo sapiens
gagggagacaccatc

SEQ ID NO: 51863 - DNA, 15 bp, Homo sapiens
agagggagacaccat

SEQ ID NO: 51864 - DNA, 15 bp, Homo sapiens
tagagggagacacca

SEQ ID NO: 51865 - DNA, 15 bp, Homo sapiens
atagagggagacacc

SEQ ID NO: 51866 - DNA, 15 bp, Homo sapiens
gatagagggagacac

SEQ ID NO: 51867 - DNA, 15 bp, Homo sapiens
ggatagagggagaca

SEQ ID NO: 51868 - DNA, 15 bp, Homo sapiens
gggatagagggagac

SEQ ID NO: 51869 - DNA, 15 bp, Homo sapiens
ggggatagagggaga

SEQ ID NO: 51870 - DNA, 15 bp, Homo sapiens
gggggatagagggag

SEQ ID NO: 51871 - DNA, 15 bp, Homo sapiens
tgggggatagaggga

SEQ ID NO: 51872 - DNA, 15 bp, Homo sapiens
ctgggggatagaggg

SEQ ID NO: 51873 - DNA, 15 bp, Homo sapiens
cctgggggatagagg

SEQ ID NO: 51874 - DNA, 15 bp, Homo sapiens
gcctgggggatagag

SEQ ID NO: 51875 - DNA, 15 bp, Homo sapiens
agcctgggggataga

SEQ ID NO: 51876 - DNA, 15 bp, Homo sapiens
cagcctgggggatag

SEQ ID NO: 51877 - DNA, 15 bp, Homo sapiens
ccagcctgggggata

SEQ ID NO: 51878 - DNA, 15 bp, Homo sapiens
tccagcctgggggat

SEQ ID NO: 51879 - DNA, 15 bp, Homo sapiens
ctccagcctggggga

SEQ ID NO: 51880 - DNA, 15 bp, Homo sapiens
actccagcctggggg

SEQ ID NO: 51881 - DNA, 15 bp, Homo sapiens
cactccagcctgggg

SEQ ID NO: 51882 - DNA, 15 bp, Homo sapiens
aagattgtgccactg

SEQ ID NO: 51883 - DNA, 15 bp, Homo sapiens
caagattgtgccact

SEQ ID NO: 51884 - DNA, 15 bp, Homo sapiens
ccaagattgtgccac

SEQ ID NO: 51885 - DNA, 15 bp, Homo sapiens
gccaagattgtgcca

SEQ ID NO: 51886 - DNA, 15 bp, Homo sapiens
agccaagattgtgcc

SEQ ID NO: 51887 - DNA, 15 bp, Homo sapiens
gagccaagattgtgc

SEQ ID NO: 51888 - DNA, 15 bp, Homo sapiens
tgagccaagattgtg

SEQ ID NO: 51889 - DNA, 15 bp, Homo sapiens
gtgagccaagattgt

SEQ ID NO: 51890 - DNA, 15 bp, Homo sapiens
tttgcagtgagccaa

SEQ ID NO: 51891 - DNA, 15 bp, Homo sapiens
gtttgcagtgagcca

SEQ ID NO: 51892 - DNA, 15 bp, Homo sapiens
agtttgcagtgagcc

SEQ ID NO: 51893 - DNA, 15 bp, Homo sapiens
acagagtttgcagtg

SEQ ID NO: 51894 - DNA, 15 bp, Homo sapiens
gacagagtttgcagt

SEQ ID NO: 51895 - DNA, 15 bp, Homo sapiens
agacagagtttgcag

SEQ ID NO: 51896 - DNA, 15 bp, Homo sapiens
gagacagagtttgca

SEQ ID NO: 51897 - DNA, 15 bp, Homo sapiens
ggagacagagtttgc

SEQ ID NO: 51898 - DNA, 15 bp, Homo sapiens
aggagacagagtttg

SEQ ID NO: 51899 - DNA, 15 bp, Homo sapiens
caggagacagagttt

SEQ ID NO: 51900 - DNA, 15 bp, Homo sapiens
ccaggagacagagtt

SEQ ID NO: 51901 - DNA, 15 bp, Homo sapiens
cccaggagacagagt

SEQ ID NO: 51902 - DNA, 15 bp, Homo sapiens
acccaggagacagag

SEQ ID NO: 51903 - DNA, 15 bp, Homo sapiens
aacccaggagacaga

SEQ ID NO: 51904 - DNA, 15 bp, Homo sapiens
gaacccaggagacag

SEQ ID NO: 51905 - DNA, 15 bp, Homo sapiens
tgaacccaggagaca

SEQ ID NO: 51906 - DNA, 15 bp, Homo sapiens
ttgaacccaggagac

SEQ ID NO: 51907 - DNA, 15 bp, Homo sapiens
aattgcttgaaccca

SEQ ID NO: 51908 - DNA, 15 bp, Homo sapiens
gagaattgcttgaac

SEQ ID NO: 51909 - DNA, 15 bp, Homo sapiens
ggagaattgcttgaa

SEQ ID NO: 51910 - DNA, 15 bp, Homo sapiens
aggagaattgcttga

SEQ ID NO: 51911 - DNA, 15 bp, Homo sapiens
caggagaattgcttg

SEQ ID NO: 51912 - DNA, 15 bp, Homo sapiens
gcaggagaattgctt

SEQ ID NO: 51913 - DNA, 15 bp, Homo sapiens
ggcaggagaattgct

SEQ ID NO: 51914 - DNA, 15 bp, Homo sapiens
aggcaggagaattgc

SEQ ID NO: 51915 - DNA, 15 bp, Homo sapiens
aaggcaggagaattg

SEQ ID NO: 51916 - DNA, 15 bp, Homo sapiens
caaggcaggagaatt

SEQ ID NO: 51917 - DNA, 15 bp, Homo sapiens
ccaaggcaggagaat

SEQ ID NO: 51918 - DNA, 15 bp, Homo sapiens
gccaaggcaggagaa

SEQ ID NO: 51919 - DNA, 15 bp, Homo sapiens
ggccaaggcaggaga

SEQ ID NO: 51920 - DNA, 15 bp, Homo sapiens
aggaggccaaggcag

SEQ ID NO: 51921 - DNA, 15 bp, Homo sapiens
caggaggccaaggca

SEQ ID NO: 51922 - DNA, 15 bp, Homo sapiens
tcaggaggccaaggc

SEQ ID NO: 51923 - DNA, 15 bp, Homo sapiens
ctcaggaggccaagg

SEQ ID NO: 51924 - DNA, 15 bp, Homo sapiens
actcaggaggccaag

SEQ ID NO: 51925 - DNA, 15 bp, Homo sapiens
tactcaggaggccaa

SEQ ID NO: 51926 - DNA, 15 bp, Homo sapiens
ctactcaggaggcca

SEQ ID NO: 51927 - DNA, 15 bp, Homo sapiens
gctactcaggaggcc

SEQ ID NO: 51928 - DNA, 15 bp, Homo sapiens
accagctactcagga

SEQ ID NO: 51929 - DNA, 15 bp, Homo sapiens
taccagctactcagg

SEQ ID NO: 51930 - DNA, 15 bp, Homo sapiens
ataccagctactcag

SEQ ID NO: 51931 - DNA, 15 bp, Homo sapiens
aataccagctactca

SEQ ID NO: 51932 - DNA, 15 bp, Homo sapiens
taataccagctactc

SEQ ID NO: 51933 - DNA, 15 bp, Homo sapiens
gtaataccagctact

SEQ ID NO: 51934 - DNA, 15 bp, Homo sapiens
tgtaataccagctac

SEQ ID NO: 51935 - DNA, 15 bp, Homo sapiens
ctgtaataccagcta

SEQ ID NO: 51936 - DNA, 15 bp, Homo sapiens
cctgtaataccagct

SEQ ID NO: 51937 - DNA, 15 bp, Homo sapiens
gcctgtaataccagc

SEQ ID NO: 51938 - DNA, 15 bp, Homo sapiens
tgcctgtaataccag

SEQ ID NO: 51939 - DNA, 15 bp, Homo sapiens
gtgcctgtaatacca

SEQ ID NO: 51940 - DNA, 15 bp, Homo sapiens
cgtgcctgtaatacc

SEQ ID NO: 51941 - DNA, 15 bp, Homo sapiens
gcgtgcctgtaatac

SEQ ID NO: 51942 - DNA, 15 bp, Homo sapiens
cgcgtgcctgtaata

SEQ ID NO: 51943 - DNA, 15 bp, Homo sapiens
acgcgtgcctgtaat

SEQ ID NO: 51944 - DNA, 15 bp, Homo sapiens
cacgcgtgcctgtaa

SEQ ID NO: 51945 - DNA, 15 bp, Homo sapiens
gcacgcgtgcctgta

SEQ ID NO: 51946 - DNA, 15 bp, Homo sapiens
agcacgcgtgcctgt

SEQ ID NO: 51947 - DNA, 15 bp, Homo sapiens
tagcacgcgtgcctg

SEQ ID NO: 51948 - DNA, 15 bp, Homo sapiens
gtagcacgcgtgcct

SEQ ID NO: 51949 - DNA, 15 bp, Homo sapiens
ggtagcacgcgtgcc

SEQ ID NO: 51950 - DNA, 15 bp, Homo sapiens
tggtagcacgcgtgc

SEQ ID NO: 51951 - DNA, 15 bp, Homo sapiens
gtggtagcacgcgtg

SEQ ID NO: 51952 - DNA, 15 bp, Homo sapiens
tgtggtagcacgcgt

SEQ ID NO: 51953 - DNA, 15 bp, Homo sapiens
gtgtggtagcacgcg

SEQ ID NO: 51954 - DNA, 15 bp, Homo sapiens
ggtgtggtagcacgc

SEQ ID NO: 51955 - DNA, 15 bp, Homo sapiens
gggtgtggtagcacg

SEQ ID NO: 51956 - DNA, 15 bp, Homo sapiens
cgggtgtggtagcac

SEQ ID NO: 51957 - DNA, 15 bp, Homo sapiens
tcgggtgtggtagca

SEQ ID NO: 51958 - DNA, 15 bp, Homo sapiens
gtcgggtgtggtagc

SEQ ID NO: 51959 - DNA, 15 bp, Homo sapiens
agtcgggtgtggtag

SEQ ID NO: 51960 - DNA, 15 bp, Homo sapiens
tagtcgggtgtggta

SEQ ID NO: 51961 - DNA, 15 bp, Homo sapiens
ctagtcgggtgtggt

SEQ ID NO: 51962 - DNA, 15 bp, Homo sapiens
actagtcgggtgtgg

SEQ ID NO: 51963 - DNA, 15 bp, Homo sapiens
aactagtcgggtgtg

SEQ ID NO: 51964 - DNA, 15 bp, Homo sapiens
aaactagtcgggtgt

SEQ ID NO: 51965 - DNA, 15 bp, Homo sapiens
aaaactagtcgggtg

SEQ ID NO: 51966 - DNA, 15 bp, Homo sapiens
aaaaactagtcgggt

SEQ ID NO: 51967 - DNA, 15 bp, Homo sapiens
taaaaactagtcggg

SEQ ID NO: 51968 - DNA, 15 bp, Homo sapiens
ataaaaactagtcgg

SEQ ID NO: 51969 - DNA, 15 bp, Homo sapiens
aataaaaactagtcg

SEQ ID NO: 51970 - DNA, 15 bp, Homo sapiens
aaataaaaactagtc

SEQ ID NO: 51971 - DNA, 15 bp, Homo sapiens
aaaataaaaactagt

SEQ ID NO: 51972 - DNA, 15 bp, Homo sapiens
aaaaataaaaactag

SEQ ID NO: 51973 - DNA, 15 bp, Homo sapiens
taaaaataaaaacta

SEQ ID NO: 51974 - DNA, 15 bp, Homo sapiens
ctaaaaataaaaact

SEQ ID NO: 51975 - DNA, 15 bp, Homo sapiens
actaaaaataaaaac

SEQ ID NO: 51976 - DNA, 15 bp, Homo sapiens
tactaaaaataaaaa

SEQ ID NO: 51977 - DNA, 15 bp, Homo sapiens
ctactaaaaataaaa

SEQ ID NO: 51978 - DNA, 15 bp, Homo sapiens
tctactaaaaataaa

SEQ ID NO: 51979 - DNA, 15 bp, Homo sapiens
ctctactaaaaataa

SEQ ID NO: 51980 - DNA, 15 bp, Homo sapiens
aaaaccccatctcta

SEQ ID NO: 51981 - DNA, 15 bp, Homo sapiens
taaaaccccatctct

SEQ ID NO: 51982 - DNA, 15 bp, Homo sapiens
gtaaaaccccatctc

SEQ ID NO: 51983 - DNA, 15 bp, Homo sapiens
ggtaaaaccccatct

SEQ ID NO: 51984 - DNA, 15 bp, Homo sapiens
tggtaaaaccccatc

SEQ ID NO: 51985 - DNA, 15 bp, Homo sapiens
gtggtaaaaccccat

SEQ ID NO: 51986 - DNA, 15 bp, Homo sapiens
cgtggtaaaacccca

SEQ ID NO: 51987 - DNA, 15 bp, Homo sapiens
acgtggtaaaacccc

SEQ ID NO: 51988 - DNA, 15 bp, Homo sapiens
aacgtggtaaaaccc

SEQ ID NO: 51989 - DNA, 15 bp, Homo sapiens
caacgtggtaaaacc

SEQ ID NO: 51990 - DNA, 15 bp, Homo sapiens
ccaacgtggtaaaac

SEQ ID NO: 51991 - DNA, 15 bp, Homo sapiens
accaacgtggtaaaa

SEQ ID NO: 51992 - DNA, 15 bp, Homo sapiens
gaccaacgtggtaaa

SEQ ID NO: 51993 - DNA, 15 bp, Homo sapiens
tgaccaacgtggtaa

SEQ ID NO: 51994 - DNA, 15 bp, Homo sapiens
ctgaccaacgtggta

SEQ ID NO: 51995 - DNA, 15 bp, Homo sapiens
cctgaccaacgtggt

SEQ ID NO: 51996 - DNA, 15 bp, Homo sapiens
gcctgaccaacgtgg

SEQ ID NO: 51997 - DNA, 15 bp, Homo sapiens
tgagaccagcctgac

SEQ ID NO: 51998 - DNA, 15 bp, Homo sapiens
ttgagaccagcctga

SEQ ID NO: 51999 - DNA, 15 bp, Homo sapiens
ttcaggagtttgaga

SEQ ID NO: 52000 - DNA, 15 bp, Homo sapiens
gttcaggagtttgag

SEQ ID NO: 52001 - DNA, 15 bp, Homo sapiens
agttcaggagtttga

SEQ ID NO: 52002 - DNA, 15 bp, Homo sapiens
gagttcaggagtttg

SEQ ID NO: 52003 - DNA, 15 bp, Homo sapiens
tgagttcaggagttt

SEQ ID NO: 52004 - DNA, 15 bp, Homo sapiens
ttgagttcaggagtt

SEQ ID NO: 52005 - DNA, 15 bp, Homo sapiens
cttgagttcaggagt

SEQ ID NO: 52006 - DNA, 15 bp, Homo sapiens
acttgagttcaggag

SEQ ID NO: 52007 - DNA, 15 bp, Homo sapiens
cacttgagttcagga

SEQ ID NO: 52008 - DNA, 15 bp, Homo sapiens
tcacttgagttcagg

SEQ ID NO: 52009 - DNA, 15 bp, Homo sapiens
atcacttgagttcag

SEQ ID NO: 52010 - DNA, 15 bp, Homo sapiens
gatcacttgagttca

SEQ ID NO: 52011 - DNA, 15 bp, Homo sapiens
ggatcacttgagttc

SEQ ID NO: 52012 - DNA, 15 bp, Homo sapiens
tggatcacttgagtt

SEQ ID NO: 52013 - DNA, 15 bp, Homo sapiens
ttggatcacttgagt

SEQ ID NO: 52014 - DNA, 15 bp, Homo sapiens
gttggatcacttgag

SEQ ID NO: 52015 - DNA, 15 bp, Homo sapiens
ggttggatcacttga

SEQ ID NO: 52016 - DNA, 15 bp, Homo sapiens
tggttggatcacttg

SEQ ID NO: 52017 - DNA, 15 bp, Homo sapiens
gtggttggatcactt

SEQ ID NO: 52018 - DNA, 15 bp, Homo sapiens
ggtggttggatcact

SEQ ID NO: 52019 - DNA, 15 bp, Homo sapiens
aggtggttggatcac

SEQ ID NO: 52020 - DNA, 15 bp, Homo sapiens
gaggtggttggatca

SEQ ID NO: 52021 - DNA, 15 bp, Homo sapiens
tgaggtggttggatc

SEQ ID NO: 52022 - DNA, 15 bp, Homo sapiens
ttgaggtggttggat

SEQ ID NO: 52023 - DNA, 15 bp, Homo sapiens
gttgaggtggttgga

SEQ ID NO: 52024 - DNA, 15 bp, Homo sapiens
ggttgaggtggttgg

SEQ ID NO: 52025 - DNA, 15 bp, Homo sapiens
aggttgaggtggttg

SEQ ID NO: 52026 - DNA, 15 bp, Homo sapiens
gaggttgaggtggtt

SEQ ID NO: 52027 - DNA, 15 bp, Homo sapiens
ggaggttgaggtggt

SEQ ID NO: 52028 - DNA, 15 bp, Homo sapiens
gggaggttgaggtgg

SEQ ID NO: 52029 - DNA, 15 bp, Homo sapiens
tgggaggttgaggtg

SEQ ID NO: 52030 - DNA, 15 bp, Homo sapiens
ttgggaggttgaggt

SEQ ID NO: 52031 - DNA, 15 bp, Homo sapiens
tttgggaggttgagg

SEQ ID NO: 52032 - DNA, 15 bp, Homo sapiens
ctttgggaggttgag

SEQ ID NO: 52033 - DNA, 15 bp, Homo sapiens
actttgggaggttga

SEQ ID NO: 52034 - DNA, 15 bp, Homo sapiens
cactttgggaggttg

SEQ ID NO: 52035 - DNA, 15 bp, Homo sapiens
gcactttgggaggtt

SEQ ID NO: 52036 - DNA, 15 bp, Homo sapiens
agcactttgggaggt

SEQ ID NO: 52037 - DNA, 15 bp, Homo sapiens
gatcccagcactttg

SEQ ID NO: 52038 - DNA, 15 bp, Homo sapiens
tgatcccagcacttt

SEQ ID NO: 52039 - DNA, 15 bp, Homo sapiens
gtgatcccagcactt

SEQ ID NO: 52040 - DNA, 15 bp, Homo sapiens
tgtgatcccagcact

SEQ ID NO: 52041 - DNA, 15 bp, Homo sapiens
ctgtgatcccagcac

SEQ ID NO: 52042 - DNA, 15 bp, Homo sapiens
cctgtgatcccagca

SEQ ID NO: 52043 - DNA, 15 bp, Homo sapiens
acctgtgatcccagc

SEQ ID NO: 52044 - DNA, 15 bp, Homo sapiens
cacctgtgatcccag

SEQ ID NO: 52045 - DNA, 15 bp, Homo sapiens
acacctgtgatccca

SEQ ID NO: 52046 - DNA, 15 bp, Homo sapiens
cacacctgtgatccc

SEQ ID NO: 52047 - DNA, 15 bp, Homo sapiens
tcacacctgtgatcc

SEQ ID NO: 52048 - DNA, 15 bp, Homo sapiens
ctcacacctgtgatc

SEQ ID NO: 52049 - DNA, 15 bp, Homo sapiens
gctcacacctgtgat

SEQ ID NO: 52050 - DNA, 15 bp, Homo sapiens
ggctcacacctgtga

SEQ ID NO: 52051 - DNA, 15 bp, Homo sapiens
tggctcacacctgtg

SEQ ID NO: 52052 - DNA, 15 bp, Homo sapiens
tggccgggcacagtg

SEQ ID NO: 52053 - DNA, 15 bp, Homo sapiens
ctggccgggcacagt

SEQ ID NO: 52054 - DNA, 15 bp, Homo sapiens
tctggccgggcacag

SEQ ID NO: 52055 - DNA, 15 bp, Homo sapiens
ctctggccgggcaca

SEQ ID NO: 52056 - DNA, 15 bp, Homo sapiens
gctctggccgggcac

SEQ ID NO: 52057 - DNA, 15 bp, Homo sapiens
agctctggccgggca

SEQ ID NO: 52058 - DNA, 15 bp, Homo sapiens
aagctctggccgggc

SEQ ID NO: 52059 - DNA, 15 bp, Homo sapiens
caagctctggccggg

SEQ ID NO: 52060 - DNA, 15 bp, Homo sapiens
ccaagctctggccgg

SEQ ID NO: 52061 - DNA, 15 bp, Homo sapiens
accaagctctggccg

SEQ ID NO: 52062 - DNA, 15 bp, Homo sapiens
aaccaagctctggcc

SEQ ID NO: 52063 - DNA, 15 bp, Homo sapiens
aaaccaagctctggc

SEQ ID NO: 52064 - DNA, 15 bp, Homo sapiens
taaaccaagctctgg

SEQ ID NO: 52065 - DNA, 15 bp, Homo sapiens
ataaaccaagctctg

SEQ ID NO: 52066 - DNA, 15 bp, Homo sapiens
aataaaccaagctct

SEQ ID NO: 52067 - DNA, 15 bp, Homo sapiens
aaataaaccaagctc

SEQ ID NO: 52068 - DNA, 15 bp, Homo sapiens
aaaataaaccaagct

SEQ ID NO: 52069 - DNA, 15 bp, Homo sapiens
aaaaataaaccaagc

SEQ ID NO: 52070 - DNA, 15 bp, Homo sapiens
aaaaaataaaccaag

SEQ ID NO: 52071 - DNA, 15 bp, Homo sapiens
taaaaaataaaccaa

SEQ ID NO: 52072 - DNA, 15 bp, Homo sapiens
ttaaaaaataaacca

SEQ ID NO: 52073 - DNA, 15 bp, Homo sapiens
tttaaaaaataaacc

SEQ ID NO: 52074 - DNA, 15 bp, Homo sapiens
ttttaaaaaataaac

SEQ ID NO: 52075 - DNA, 15 bp, Homo sapiens
cttttaaaaaataaa

SEQ ID NO: 52076 - DNA, 15 bp, Homo sapiens
tcttttaaaaaataa

SEQ ID NO: 52077 - DNA, 15 bp, Homo sapiens
atcttttaaaaaata

SEQ ID NO: 52078 - DNA, 15 bp, Homo sapiens
tatcttttaaaaaat

SEQ ID NO: 52079 - DNA, 15 bp, Homo sapiens
ctatcttttaaaaaa

SEQ ID NO: 52080 - DNA, 15 bp, Homo sapiens
cctatcttttaaaaa

SEQ ID NO: 52081 - DNA, 15 bp, Homo sapiens
gcctatcttttaaaa

SEQ ID NO: 52082 - DNA, 15 bp, Homo sapiens
ggcctatcttttaaa

SEQ ID NO: 52083 - DNA, 15 bp, Homo sapiens
tggcctatcttttaa

SEQ ID NO: 52084 - DNA, 15 bp, Homo sapiens
ttggcctatctttta

SEQ ID NO: 52085 - DNA, 15 bp, Homo sapiens
attggcctatctttt

SEQ ID NO: 52086 - DNA, 15 bp, Homo sapiens
cattggcctatcttt

SEQ ID NO: 52087 - DNA, 15 bp, Homo sapiens
acattggcctatctt

SEQ ID NO: 52088 - DNA, 15 bp, Homo sapiens
aacattggcctatct

SEQ ID NO: 52089 - DNA, 15 bp, Homo sapiens
caacattggcctatc

SEQ ID NO: 52090 - DNA, 15 bp, Homo sapiens
ccaacattggcctat

SEQ ID NO: 52091 - DNA, 15 bp, Homo sapiens
accaacattggccta

SEQ ID NO: 52092 - DNA, 15 bp, Homo sapiens
gaccaacattggcct

SEQ ID NO: 52093 - DNA, 15 bp, Homo sapiens
cgaccaacattggcc

SEQ ID NO: 52094 - DNA, 15 bp, Homo sapiens
acgaccaacattggc

SEQ ID NO: 52095 - DNA, 15 bp, Homo sapiens
cacgaccaacattgg

SEQ ID NO: 52096 - DNA, 15 bp, Homo sapiens
acacgaccaacattg

SEQ ID NO: 52097 - DNA, 15 bp, Homo sapiens
cacacgaccaacatt

SEQ ID NO: 52098 - DNA, 15 bp, Homo sapiens
acacacgaccaacat

SEQ ID NO: 52099 - DNA, 15 bp, Homo sapiens
cacacacgaccaaca

SEQ ID NO: 52100 - DNA, 15 bp, Homo sapiens
ccacacacgaccaac

SEQ ID NO: 52101 - DNA, 15 bp, Homo sapiens
accacacacgaccaa

SEQ ID NO: 52102 - DNA, 15 bp, Homo sapiens
caccacacacgacca

SEQ ID NO: 52103 - DNA, 15 bp, Homo sapiens
ccaccacacacgacc

SEQ ID NO: 52104 - DNA, 15 bp, Homo sapiens
gccaccacacacgac

SEQ ID NO: 52105 - DNA, 15 bp, Homo sapiens
agccaccacacacga

SEQ ID NO: 52106 - DNA, 15 bp, Homo sapiens
gagccaccacacacg

SEQ ID NO: 52107 - DNA, 15 bp, Homo sapiens
cgagccaccacacac

SEQ ID NO: 52108 - DNA, 15 bp, Homo sapiens
acgagccaccacaca

SEQ ID NO: 52109 - DNA, 15 bp, Homo sapiens
cacgagccaccacac

SEQ ID NO: 52110 - DNA, 15 bp, Homo sapiens
gcacgagccaccaca

SEQ ID NO: 52111 - DNA, 15 bp, Homo sapiens
ggcacgagccaccac

SEQ ID NO: 52112 - DNA, 15 bp, Homo sapiens
aggcacgagccacca

SEQ ID NO: 52113 - DNA, 15 bp, Homo sapiens
taggcacgagccacc

SEQ ID NO: 52114 - DNA, 15 bp, Homo sapiens
ataggcacgagccac

SEQ ID NO: 52115 - DNA, 15 bp, Homo sapiens
tataggcacgagcca

SEQ ID NO: 52116 - DNA, 15 bp, Homo sapiens
ttataggcacgagcc

SEQ ID NO: 52117 - DNA, 15 bp, Homo sapiens
attataggcacgagc

SEQ ID NO: 52118 - DNA, 15 bp, Homo sapiens
gattataggcacgag

SEQ ID NO: 52119 - DNA, 15 bp, Homo sapiens
ggattataggcacga

SEQ ID NO: 52120 - DNA, 15 bp, Homo sapiens
gggattataggcacg

SEQ ID NO: 52121 - DNA, 15 bp, Homo sapiens
tgggattataggcac

SEQ ID NO: 52122 - DNA, 15 bp, Homo sapiens
tggcttcccaaagtg

SEQ ID NO: 52123 - DNA, 15 bp, Homo sapiens
ttggcttcccaaagt

SEQ ID NO: 52124 - DNA, 15 bp, Homo sapiens
cttggcttcccaaag

SEQ ID NO: 52125 - DNA, 15 bp, Homo sapiens
ccttggcttcccaaa

SEQ ID NO: 52126 - DNA, 15 bp, Homo sapiens
gccttggcttcccaa

SEQ ID NO: 52127 - DNA, 15 bp, Homo sapiens
tgccttggcttccca

SEQ ID NO: 52128 - DNA, 15 bp, Homo sapiens
ctgccttggcttccc

SEQ ID NO: 52129 - DNA, 15 bp, Homo sapiens
cctgccttggcttcc

SEQ ID NO: 52130 - DNA, 15 bp, Homo sapiens
gcctgccttggcttc

SEQ ID NO: 52131 - DNA, 15 bp, Homo sapiens
tgcctgccttggctt

SEQ ID NO: 52132 - DNA, 15 bp, Homo sapiens
ttgcctgccttggct

SEQ ID NO: 52133 - DNA, 15 bp, Homo sapiens
tttgcctgccttggc

SEQ ID NO: 52134 - DNA, 15 bp, Homo sapiens
atttgcctgccttgg

SEQ ID NO: 52135 - DNA, 15 bp, Homo sapiens
gatttgcctgccttg

SEQ ID NO: 52136 - DNA, 15 bp, Homo sapiens
tgatttgcctgcctt

SEQ ID NO: 52137 - DNA, 15 bp, Homo sapiens
gtgatttgcctgcct

SEQ ID NO: 52138 - DNA, 15 bp, Homo sapiens
agtgatttgcctgcc

SEQ ID NO: 52139 - DNA, 15 bp, Homo sapiens
aagtgatttgcctgc

SEQ ID NO: 52140 - DNA, 15 bp, Homo sapiens
caagtgatttgcctg

SEQ ID NO: 52141 - DNA, 15 bp, Homo sapiens
tcaagtgatttgcct

SEQ ID NO: 52142 - DNA, 15 bp, Homo sapiens
ctcaagtgatttgcc

SEQ ID NO: 52143 - DNA, 15 bp, Homo sapiens
cctcaagtgatttgc

SEQ ID NO: 52144 - DNA, 15 bp, Homo sapiens
acctcaagtgatttg

SEQ ID NO: 52145 - DNA, 15 bp, Homo sapiens
gacctcaagtgattt

SEQ ID NO: 52146 - DNA, 15 bp, Homo sapiens
tgacctcaagtgatt

SEQ ID NO: 52147 - DNA, 15 bp, Homo sapiens
gttttttgtattttt

SEQ ID NO: 52148 - DNA, 15 bp, Homo sapiens
agttttttgtatttt

SEQ ID NO: 52149 - DNA, 15 bp, Homo sapiens
tagttttttgtattt

SEQ ID NO: 52150 - DNA, 15 bp, Homo sapiens
ctagttttttgtatt

SEQ ID NO: 52151 - DNA, 15 bp, Homo sapiens
gctagttttttgtat

SEQ ID NO: 52152 - DNA, 15 bp, Homo sapiens
tgctagttttttgta

SEQ ID NO: 52153 - DNA, 15 bp, Homo sapiens
atgctagttttttgt

SEQ ID NO: 52154 - DNA, 15 bp, Homo sapiens
catgctagttttttg

SEQ ID NO: 52155 - DNA, 15 bp, Homo sapiens
ccatgctagtttttt

SEQ ID NO: 52156 - DNA, 15 bp, Homo sapiens
accatgctagttttt

SEQ ID NO: 52157 - DNA, 15 bp, Homo sapiens
caccatgctagtttt

SEQ ID NO: 52158 - DNA, 15 bp, Homo sapiens
acaccatgctagttt

SEQ ID NO: 52159 - DNA, 15 bp, Homo sapiens
cacaccatgctagtt

SEQ ID NO: 52160 - DNA, 15 bp, Homo sapiens
ccacaccatgctagt

SEQ ID NO: 52161 - DNA, 15 bp, Homo sapiens
accacaccatgctag

SEQ ID NO: 52162 - DNA, 15 bp, Homo sapiens
caccacaccatgcta

SEQ ID NO: 52163 - DNA, 15 bp, Homo sapiens
ccaccacaccatgct

SEQ ID NO: 52164 - DNA, 15 bp, Homo sapiens
accaccacaccatgc

SEQ ID NO: 52165 - DNA, 15 bp, Homo sapiens
caccaccacaccatg

SEQ ID NO: 52166 - DNA, 15 bp, Homo sapiens
acaccaccacaccat

SEQ ID NO: 52167 - DNA, 15 bp, Homo sapiens
cacaccaccacacca

SEQ ID NO: 52168 - DNA, 15 bp, Homo sapiens
acacaccaccacacc

SEQ ID NO: 52169 - DNA, 15 bp, Homo sapiens
cacacaccaccacac

SEQ ID NO: 52170 - DNA, 15 bp, Homo sapiens
gcacacaccaccaca

SEQ ID NO: 52171 - DNA, 15 bp, Homo sapiens
ggcacacaccaccac

SEQ ID NO: 52172 - DNA, 15 bp, Homo sapiens
ttacaggcacacacc

SEQ ID NO: 52173 - DNA, 15 bp, Homo sapiens
attacaggcacacac

SEQ ID NO: 52174 - DNA, 15 bp, Homo sapiens
gattacaggcacaca

SEQ ID NO: 52175 - DNA, 15 bp, Homo sapiens
ggattacaggcacac

SEQ ID NO: 52176 - DNA, 15 bp, Homo sapiens
cactgggattacagg

SEQ ID NO: 52177 - DNA, 15 bp, Homo sapiens
gcactgggattacag

SEQ ID NO: 52178 - DNA, 15 bp, Homo sapiens
ggcactgggattaca

SEQ ID NO: 52179 - DNA, 15 bp, Homo sapiens
aggcactgggattac

SEQ ID NO: 52180 - DNA, 15 bp, Homo sapiens
caggcactgggatta

SEQ ID NO: 52181 - DNA, 15 bp, Homo sapiens
acaggcactgggatt

SEQ ID NO: 52182 - DNA, 15 bp, Homo sapiens
tacaggcactgggat

SEQ ID NO: 52183 - DNA, 15 bp, Homo sapiens
ttacaggcactggga

SEQ ID NO: 52184 - DNA, 15 bp, Homo sapiens
attacaggcactggg

SEQ ID NO: 52185 - DNA, 15 bp, Homo sapiens
gattacaggcactgg

SEQ ID NO: 52186 - DNA, 15 bp, Homo sapiens
ggattacaggcactg

SEQ ID NO: 52187 - DNA, 15 bp, Homo sapiens
gggattacaggcact

SEQ ID NO: 52188 - DNA, 15 bp, Homo sapiens
gcctcagcctctgga

SEQ ID NO: 52189 - DNA, 15 bp, Homo sapiens
tgcctcagcctctgg

SEQ ID NO: 52190 - DNA, 15 bp, Homo sapiens
ctgcctcagcctctg

SEQ ID NO: 52191 - DNA, 15 bp, Homo sapiens
tcggttcaagtgatt

SEQ ID NO: 52192 - DNA, 15 bp, Homo sapiens
ttcggttcaagtgat

SEQ ID NO: 52193 - DNA, 15 bp, Homo sapiens
tttcggttcaagtga

SEQ ID NO: 52194 - DNA, 15 bp, Homo sapiens
ctttcggttcaagtg

SEQ ID NO: 52195 - DNA, 15 bp, Homo sapiens
cctttcggttcaagt

SEQ ID NO: 52196 - DNA, 15 bp, Homo sapiens
acctttcggttcaag

SEQ ID NO: 52197 - DNA, 15 bp, Homo sapiens
tacctttcggttcaa

SEQ ID NO: 52198 - DNA, 15 bp, Homo sapiens
ctacctttcggttca

SEQ ID NO: 52199 - DNA, 15 bp, Homo sapiens
cctacctttcggttc

SEQ ID NO: 52200 - DNA, 15 bp, Homo sapiens
tcctacctttcggtt

SEQ ID NO: 52201 - DNA, 15 bp, Homo sapiens
ctcctacctttcggt

SEQ ID NO: 52202 - DNA, 15 bp, Homo sapiens
actcctacctttcgg

SEQ ID NO: 52203 - DNA, 15 bp, Homo sapiens
aactcctacctttcg

SEQ ID NO: 52204 - DNA, 15 bp, Homo sapiens
taactcctacctttc

SEQ ID NO: 52205 - DNA, 15 bp, Homo sapiens
gtaactcctaccttt

SEQ ID NO: 52206 - DNA, 15 bp, Homo sapiens
tgtaactcctacctt

SEQ ID NO: 52207 - DNA, 15 bp, Homo sapiens
ctgtaactcctacct

SEQ ID NO: 52208 - DNA, 15 bp, Homo sapiens
actgtaactcctacc

SEQ ID NO: 52209 - DNA, 15 bp, Homo sapiens
cactgtaactcctac

SEQ ID NO: 52210 - DNA, 15 bp, Homo sapiens
tcactgtaactccta

SEQ ID NO: 52211 - DNA, 15 bp, Homo sapiens
ctcactgtaactcct

SEQ ID NO: 52212 - DNA, 15 bp, Homo sapiens
gctcactgtaactcc

SEQ ID NO: 52213 - DNA, 15 bp, Homo sapiens
ggctcactgtaactc

SEQ ID NO: 52214 - DNA, 15 bp, Homo sapiens
tggctcactgtaact

SEQ ID NO: 52215 - DNA, 15 bp, Homo sapiens
ttggctcactgtaac

SEQ ID NO: 52216 - DNA, 15 bp, Homo sapiens
cttggctcactgtaa

SEQ ID NO: 52217 - DNA, 15 bp, Homo sapiens
tcttggctcactgta

SEQ ID NO: 52218 - DNA, 15 bp, Homo sapiens
atcttggctcactgt

SEQ ID NO: 52219 - DNA, 15 bp, Homo sapiens
atgcgatcttggctc

SEQ ID NO: 52220 - DNA, 15 bp, Homo sapiens
gatgcgatcttggct

SEQ ID NO: 52221 - DNA, 15 bp, Homo sapiens
tgatgcgatcttggc

SEQ ID NO: 52222 - DNA, 15 bp, Homo sapiens
gtgatgcgatcttgg

SEQ ID NO: 52223 - DNA, 15 bp, Homo sapiens
agtgatgcgatcttg

SEQ ID NO: 52224 - DNA, 15 bp, Homo sapiens
cagtgatgcgatctt

SEQ ID NO: 52225 - DNA, 15 bp, Homo sapiens
gcagtgatgcgatct

SEQ ID NO: 52226 - DNA, 15 bp, Homo sapiens
tgcagtgatgcgatc

SEQ ID NO: 52227 - DNA, 15 bp, Homo sapiens
gtgcagtgatgcgat

SEQ ID NO: 52228 - DNA, 15 bp, Homo sapiens
agtgcagtgatgcga

SEQ ID NO: 52229 - DNA, 15 bp, Homo sapiens
gagtgcagtgatgcg

SEQ ID NO: 52230 - DNA, 15 bp, Homo sapiens
ggagtgcagtgatgc

SEQ ID NO: 52231 - DNA, 15 bp, Homo sapiens
tggagtgcagtgatg

SEQ ID NO: 52232 - DNA, 15 bp, Homo sapiens
ctggagtgcagtgat

SEQ ID NO: 52233 - DNA, 15 bp, Homo sapiens
gctggagtgcagtga

SEQ ID NO: 52234 - DNA, 15 bp, Homo sapiens
ttcaggctggagtgc

SEQ ID NO: 52235 - DNA, 15 bp, Homo sapiens
gttcaggctggagtg

SEQ ID NO: 52236 - DNA, 15 bp, Homo sapiens
cgttcaggctggagt

SEQ ID NO: 52237 - DNA, 15 bp, Homo sapiens
tcgttcaggctggag

SEQ ID NO: 52238 - DNA, 15 bp, Homo sapiens
gtcgttcaggctgga

SEQ ID NO: 52239 - DNA, 15 bp, Homo sapiens
tgtcgttcaggctgg

SEQ ID NO: 52240 - DNA, 15 bp, Homo sapiens
ctgtcgttcaggctg

SEQ ID NO: 52241 - DNA, 15 bp, Homo sapiens
tctgtcgttcaggct

SEQ ID NO: 52242 - DNA, 15 bp, Homo sapiens
ctctgtcgttcaggc

SEQ ID NO: 52243 - DNA, 15 bp, Homo sapiens
gctctgtcgttcagg

SEQ ID NO: 52244 - DNA, 15 bp, Homo sapiens
tgctctgtcgttcag

SEQ ID NO: 52245 - DNA, 15 bp, Homo sapiens
ttgctctgtcgttca

SEQ ID NO: 52246 - DNA, 15 bp, Homo sapiens
cttgctctgtcgttc

SEQ ID NO: 52247 - DNA, 15 bp, Homo sapiens
tcttgctctgtcgtt

SEQ ID NO: 52248 - DNA, 15 bp, Homo sapiens
gtcttgctctgtcgt

SEQ ID NO: 52249 - DNA, 15 bp, Homo sapiens
aggagtcttgctctg

SEQ ID NO: 52250 - DNA, 15 bp, Homo sapiens
caggagtcttgctct

SEQ ID NO: 52251 - DNA, 15 bp, Homo sapiens
acaggagtcttgctc

SEQ ID NO: 52252 - DNA, 15 bp, Homo sapiens
gacaggagtcttgct

SEQ ID NO: 52253 - DNA, 15 bp, Homo sapiens
agacaggagtcttgc

SEQ ID NO: 52254 - DNA, 15 bp, Homo sapiens
gagacaggagtcttg

SEQ ID NO: 52255 - DNA, 15 bp, Homo sapiens
tgagacaggagtctt

SEQ ID NO: 52256 - DNA, 15 bp, Homo sapiens
ttgagacaggagtct

SEQ ID NO: 52257 - DNA, 15 bp, Homo sapiens
cttgagacaggagtc

SEQ ID NO: 52258 - DNA, 15 bp, Homo sapiens
tcttgagacaggagt

SEQ ID NO: 52259 - DNA, 15 bp, Homo sapiens
ttcttgagacaggag

SEQ ID NO: 52260 - DNA, 15 bp, Homo sapiens
tttcttgagacagga

SEQ ID NO: 52261 - DNA, 15 bp, Homo sapiens
atttcttgagacagg

SEQ ID NO: 52262 - DNA, 15 bp, Homo sapiens
tatttcttgagacag

SEQ ID NO: 52263 - DNA, 15 bp, Homo sapiens
ttatttcttgagaca

SEQ ID NO: 52264 - DNA, 15 bp, Homo sapiens
attatttcttgagac

SEQ ID NO: 52265 - DNA, 15 bp, Homo sapiens
tattatttcttgaga

SEQ ID NO: 52266 - DNA, 15 bp, Homo sapiens
ttattatttcttgag

SEQ ID NO: 52267 - DNA, 15 bp, Homo sapiens
attattatttcttga

SEQ ID NO: 52268 - DNA, 15 bp, Homo sapiens
cattattatttcttg

SEQ ID NO: 52269 - DNA, 15 bp, Homo sapiens
tcattattatttctt

SEQ ID NO: 52270 - DNA, 15 bp, Homo sapiens
atcattattatttct

SEQ ID NO: 52271 - DNA, 15 bp, Homo sapiens
tatcattattatttc

SEQ ID NO: 52272 - DNA, 15 bp, Homo sapiens
ttatcattattattt

SEQ ID NO: 52273 - DNA, 15 bp, Homo sapiens
tttatcattattatt

SEQ ID NO: 52274 - DNA, 15 bp, Homo sapiens
ttttatcattattat

SEQ ID NO: 52275 - DNA, 15 bp, Homo sapiens
cttttatcattatta

SEQ ID NO: 52276 - DNA, 15 bp, Homo sapiens
ccttttatcattatt

SEQ ID NO: 52277 - DNA, 15 bp, Homo sapiens
accttttatcattat

SEQ ID NO: 52278 - DNA, 15 bp, Homo sapiens
aaccttttatcatta

SEQ ID NO: 52279 - DNA, 15 bp, Homo sapiens
gaaccttttatcatt

SEQ ID NO: 52280 - DNA, 15 bp, Homo sapiens
cgaaccttttatcat

SEQ ID NO: 52281 - DNA, 15 bp, Homo sapiens
ccgaaccttttatca

SEQ ID NO: 52282 - DNA, 15 bp, Homo sapiens
cccgaaccttttatc

SEQ ID NO: 52283 - DNA, 15 bp, Homo sapiens
gcccgaaccttttat

SEQ ID NO: 52284 - DNA, 15 bp, Homo sapiens
tgcccgaacctttta

SEQ ID NO: 52285 - DNA, 15 bp, Homo sapiens
gtgcccgaacctttt

SEQ ID NO: 52286 - DNA, 15 bp, Homo sapiens
tgtgcccgaaccttt

SEQ ID NO: 52287 - DNA, 15 bp, Homo sapiens
ctgtgcccgaacctt

SEQ ID NO: 52288 - DNA, 15 bp, Homo sapiens
actgtgcccgaacct

SEQ ID NO: 52289 - DNA, 15 bp, Homo sapiens
cactgtgcccgaacc

SEQ ID NO: 52290 - DNA, 15 bp, Homo sapiens
ccactgtgcccgaac

SEQ ID NO: 52291 - DNA, 15 bp, Homo sapiens
gccactgtgcccgaa

SEQ ID NO: 52292 - DNA, 15 bp, Homo sapiens
agccactgtgcccga

SEQ ID NO: 52293 - DNA, 15 bp, Homo sapiens
gagccactgtgcccg

SEQ ID NO: 52294 - DNA, 15 bp, Homo sapiens
tgagccactgtgccc

SEQ ID NO: 52295 - DNA, 15 bp, Homo sapiens
gtgagccactgtgcc

SEQ ID NO: 52296 - DNA, 15 bp, Homo sapiens
tgtgagccactgtgc

SEQ ID NO: 52297 - DNA, 15 bp, Homo sapiens
gtgtgagccactgtg

SEQ ID NO: 52298 - DNA, 15 bp, Homo sapiens
ggtgtgagccactgt

SEQ ID NO: 52299 - DNA, 15 bp, Homo sapiens
aggtgtgagccactg

SEQ ID NO: 52300 - DNA, 15 bp, Homo sapiens
caggtgtgagccact

SEQ ID NO: 52301 - DNA, 15 bp, Homo sapiens
aattacaggtgtgag

SEQ ID NO: 52302 - DNA, 15 bp, Homo sapiens
gaattacaggtgtga

SEQ ID NO: 52303 - DNA, 15 bp, Homo sapiens
ggaattacaggtgtg

SEQ ID NO: 52304 - DNA, 15 bp, Homo sapiens
tggaattacaggtgt

SEQ ID NO: 52305 - DNA, 15 bp, Homo sapiens
ctggaattacaggtg

SEQ ID NO: 52306 - DNA, 15 bp, Homo sapiens
gctggaattacaggt

SEQ ID NO: 52307 - DNA, 15 bp, Homo sapiens
gagtgctggaattac

SEQ ID NO: 52308 - DNA, 15 bp, Homo sapiens
agagtgctggaatta

SEQ ID NO: 52309 - DNA, 15 bp, Homo sapiens
tagagtgctggaatt

SEQ ID NO: 52310 - DNA, 15 bp, Homo sapiens
ctagagtgctggaat

SEQ ID NO: 52311 - DNA, 15 bp, Homo sapiens
cctagagtgctggaa

SEQ ID NO: 52312 - DNA, 15 bp, Homo sapiens
tcctagagtgctgga

SEQ ID NO: 52313 - DNA, 15 bp, Homo sapiens
ctcctagagtgctgg

SEQ ID NO: 52314 - DNA, 15 bp, Homo sapiens
cctcctagagtgctg

SEQ ID NO: 52315 - DNA, 15 bp, Homo sapiens
ggcctcctagagtgc

SEQ ID NO: 52316 - DNA, 15 bp, Homo sapiens
cggcctcctagagtg

SEQ ID NO: 52317 - DNA, 15 bp, Homo sapiens
tcggcctcctagagt

SEQ ID NO: 52318 - DNA, 15 bp, Homo sapiens
ctcggcctcctagag

SEQ ID NO: 52319 - DNA, 15 bp, Homo sapiens
cctcggcctcctaga

SEQ ID NO: 52320 - DNA, 15 bp, Homo sapiens
gcctcggcctcctag

SEQ ID NO: 52321 - DNA, 15 bp, Homo sapiens
tgcctcggcctccta

SEQ ID NO: 52322 - DNA, 15 bp, Homo sapiens
ggatctgcctgcctc

SEQ ID NO: 52323 - DNA, 15 bp, Homo sapiens
gggatctgcctgcct

SEQ ID NO: 52324 - DNA, 15 bp, Homo sapiens
ggggatctgcctgcc

SEQ ID NO: 52325 - DNA, 15 bp, Homo sapiens
aggggatctgcctgc

SEQ ID NO: 52326 - DNA, 15 bp, Homo sapiens
caggggatctgcctg

SEQ ID NO: 52327 - DNA, 15 bp, Homo sapiens
tcaggggatctgcct

SEQ ID NO: 52328 - DNA, 15 bp, Homo sapiens
ctcaggggatctgcc

SEQ ID NO: 52329 - DNA, 15 bp, Homo sapiens
cctcaggggatctgc

SEQ ID NO: 52330 - DNA, 15 bp, Homo sapiens
acctcaggggatctg

SEQ ID NO: 52331 - DNA, 15 bp, Homo sapiens
gacctcaggggatct

SEQ ID NO: 52332 - DNA, 15 bp, Homo sapiens
tgacctcaggggatc

SEQ ID NO: 52333 - DNA, 15 bp, Homo sapiens
ctgacctcaggggat

SEQ ID NO: 52334 - DNA, 15 bp, Homo sapiens
cctgacctcagggga

SEQ ID NO: 52335 - DNA, 15 bp, Homo sapiens
tcctgacctcagggg

SEQ ID NO: 52336 - DNA, 15 bp, Homo sapiens
ctcctgacctcaggg

SEQ ID NO: 52337 - DNA, 15 bp, Homo sapiens
ccacgttggccaggc

SEQ ID NO: 52338 - DNA, 15 bp, Homo sapiens
gccacgttggccagg

SEQ ID NO: 52339 - DNA, 15 bp, Homo sapiens
tgccacgttggccag

SEQ ID NO: 52340 - DNA, 15 bp, Homo sapiens
ttgccacgttggcca

SEQ ID NO: 52341 - DNA, 15 bp, Homo sapiens
tttgccacgttggcc

SEQ ID NO: 52342 - DNA, 15 bp, Homo sapiens
ttttgccacgttggc

SEQ ID NO: 52343 - DNA, 15 bp, Homo sapiens
gttttgccacgttgg

SEQ ID NO: 52344 - DNA, 15 bp, Homo sapiens
ggttttgccacgttg

SEQ ID NO: 52345 - DNA, 15 bp, Homo sapiens
gggttttgccacgtt

SEQ ID NO: 52346 - DNA, 15 bp, Homo sapiens
ggggttttgccacgt

SEQ ID NO: 52347 - DNA, 15 bp, Homo sapiens
tggggttttgccacg

SEQ ID NO: 52348 - DNA, 15 bp, Homo sapiens
atggggttttgccac

SEQ ID NO: 52349 - DNA, 15 bp, Homo sapiens
gatggggttttgcca

SEQ ID NO: 52350 - DNA, 15 bp, Homo sapiens
agatggggttttgcc

SEQ ID NO: 52351 - DNA, 15 bp, Homo sapiens
agagatggggttttg

SEQ ID NO: 52352 - DNA, 15 bp, Homo sapiens
cattttttagtagag

SEQ ID NO: 52353 - DNA, 15 bp, Homo sapiens
gcattttttagtaga

SEQ ID NO: 52354 - DNA, 15 bp, Homo sapiens
tgcattttttagtag

SEQ ID NO: 52355 - DNA, 15 bp, Homo sapiens
ttgcattttttagta

SEQ ID NO: 52356 - DNA, 15 bp, Homo sapiens
tttgcattttttagt

SEQ ID NO: 52357 - DNA, 15 bp, Homo sapiens
ttttgcattttttag

SEQ ID NO: 52358 - DNA, 15 bp, Homo sapiens
tttttgcatttttta

SEQ ID NO: 52359 - DNA, 15 bp, Homo sapiens
atttttgcatttttt

SEQ ID NO: 52360 - DNA, 15 bp, Homo sapiens
aatttttgcattttt

SEQ ID NO: 52361 - DNA, 15 bp, Homo sapiens
taatttttgcatttt

SEQ ID NO: 52362 - DNA, 15 bp, Homo sapiens
ctaatttttgcattt

SEQ ID NO: 52363 - DNA, 15 bp, Homo sapiens
gctaatttttgcatt

SEQ ID NO: 52364 - DNA, 15 bp, Homo sapiens
agctaatttttgcat

SEQ ID NO: 52365 - DNA, 15 bp, Homo sapiens
cagctaatttttgca

SEQ ID NO: 52366 - DNA, 15 bp, Homo sapiens
ccagctaatttttgc

SEQ ID NO: 52367 - DNA, 15 bp, Homo sapiens
gtgcccagctaattt

SEQ ID NO: 52368 - DNA, 15 bp, Homo sapiens
cgtgcccagctaatt

SEQ ID NO: 52369 - DNA, 15 bp, Homo sapiens
ccgtgcccagctaat

SEQ ID NO: 52370 - DNA, 15 bp, Homo sapiens
gccgtgcccagctaa

SEQ ID NO: 52371 - DNA, 15 bp, Homo sapiens
agccgtgcccagcta

SEQ ID NO: 52372 - DNA, 15 bp, Homo sapiens
cagccgtgcccagct

SEQ ID NO: 52373 - DNA, 15 bp, Homo sapiens
ccagccgtgcccagc

SEQ ID NO: 52374 - DNA, 15 bp, Homo sapiens
cccagccgtgcccag

SEQ ID NO: 52375 - DNA, 15 bp, Homo sapiens
acccagccgtgccca

SEQ ID NO: 52376 - DNA, 15 bp, Homo sapiens
cacccagccgtgccc

SEQ ID NO: 52377 - DNA, 15 bp, Homo sapiens
acacccagccgtgcc

SEQ ID NO: 52378 - DNA, 15 bp, Homo sapiens
cacacccagccgtgc

SEQ ID NO: 52379 - DNA, 15 bp, Homo sapiens
ccacacccagccgtg

SEQ ID NO: 52380 - DNA, 15 bp, Homo sapiens
accacacccagccgt

SEQ ID NO: 52381 - DNA, 15 bp, Homo sapiens
caccacacccagccg

SEQ ID NO: 52382 - DNA, 15 bp, Homo sapiens
ccaccacacccagcc

SEQ ID NO: 52383 - DNA, 15 bp, Homo sapiens
agccaccacacccag

SEQ ID NO: 52384 - DNA, 15 bp, Homo sapiens
gagccaccacaccca

SEQ ID NO: 52385 - DNA, 15 bp, Homo sapiens
aatgagccaccacac

SEQ ID NO: 52386 - DNA, 15 bp, Homo sapiens
gaatgagccaccaca

SEQ ID NO: 52387 - DNA, 15 bp, Homo sapiens
ggaatgagccaccac

SEQ ID NO: 52388 - DNA, 15 bp, Homo sapiens
aggaatgagccacca

SEQ ID NO: 52389 - DNA, 15 bp, Homo sapiens
caggaatgagccacc

SEQ ID NO: 52390 - DNA, 15 bp, Homo sapiens
acaggaatgagccac

SEQ ID NO: 52391 - DNA, 15 bp, Homo sapiens
tacaggaatgagcca

SEQ ID NO: 52392 - DNA, 15 bp, Homo sapiens
ttacaggaatgagcc

SEQ ID NO: 52393 - DNA, 15 bp, Homo sapiens
attacaggaatgagc

SEQ ID NO: 52394 - DNA, 15 bp, Homo sapiens
gattacaggaatgag

SEQ ID NO: 52395 - DNA, 15 bp, Homo sapiens
ggattacaggaatga

SEQ ID NO: 52396 - DNA, 15 bp, Homo sapiens
gggattacaggaatg

SEQ ID NO: 52397 - DNA, 15 bp, Homo sapiens
tgggattacaggaat

SEQ ID NO: 52398 - DNA, 15 bp, Homo sapiens
ctgggattacaggaa

SEQ ID NO: 52399 - DNA, 15 bp, Homo sapiens
gctgggattacagga

SEQ ID NO: 52400 - DNA, 15 bp, Homo sapiens
tgacctcccaaagtg

SEQ ID NO: 52401 - DNA, 15 bp, Homo sapiens
ttgacctcccaaagt

SEQ ID NO: 52402 - DNA, 15 bp, Homo sapiens
cttgacctcccaaag

SEQ ID NO: 52403 - DNA, 15 bp, Homo sapiens
ccttgacctcccaaa

SEQ ID NO: 52404 - DNA, 15 bp, Homo sapiens
gccttgacctcccaa

SEQ ID NO: 52405 - DNA, 15 bp, Homo sapiens
cgccttgacctccca

SEQ ID NO: 52406 - DNA, 15 bp, Homo sapiens
ccgccttgacctccc

SEQ ID NO: 52407 - DNA, 15 bp, Homo sapiens
tccgccttgacctcc

SEQ ID NO: 52408 - DNA, 15 bp, Homo sapiens
gtccgccttgacctc

SEQ ID NO: 52409 - DNA, 15 bp, Homo sapiens
tgtccgccttgacct

SEQ ID NO: 52410 - DNA, 15 bp, Homo sapiens
ctgtccgccttgacc

SEQ ID NO: 52411 - DNA, 15 bp, Homo sapiens
tctgtccgccttgac

SEQ ID NO: 52412 - DNA, 15 bp, Homo sapiens
atctgtccgccttga

SEQ ID NO: 52413 - DNA, 15 bp, Homo sapiens
gatctgtccgccttg

SEQ ID NO: 52414 - DNA, 15 bp, Homo sapiens
tgatctgtccgcctt

SEQ ID NO: 52415 - DNA, 15 bp, Homo sapiens
gtgatctgtccgcct

SEQ ID NO: 52416 - DNA, 15 bp, Homo sapiens
agtgatctgtccgcc

SEQ ID NO: 52417 - DNA, 15 bp, Homo sapiens
cagtgatctgtccgc

SEQ ID NO: 52418 - DNA, 15 bp, Homo sapiens
tcagtgatctgtccg

SEQ ID NO: 52419 - DNA, 15 bp, Homo sapiens
ctcagtgatctgtcc

SEQ ID NO: 52420 - DNA, 15 bp, Homo sapiens
cctcagtgatctgtc

SEQ ID NO: 52421 - DNA, 15 bp, Homo sapiens
acctcagtgatctgt

SEQ ID NO: 52422 - DNA, 15 bp, Homo sapiens
tacctcagtgatctg

SEQ ID NO: 52423 - DNA, 15 bp, Homo sapiens
ctacctcagtgatct

SEQ ID NO: 52424 - DNA, 15 bp, Homo sapiens
tctacctcagtgatc

SEQ ID NO: 52425 - DNA, 15 bp, Homo sapiens
ttctacctcagtgat

SEQ ID NO: 52426 - DNA, 15 bp, Homo sapiens
tttctacctcagtga

SEQ ID NO: 52427 - DNA, 15 bp, Homo sapiens
gtttctacctcagtg

SEQ ID NO: 52428 - DNA, 15 bp, Homo sapiens
ggtttctacctcagt

SEQ ID NO: 52429 - DNA, 15 bp, Homo sapiens
gggtttctacctcag

SEQ ID NO: 52430 - DNA, 15 bp, Homo sapiens
agggtttctacctca

SEQ ID NO: 52431 - DNA, 15 bp, Homo sapiens
cagggtttctacctc

SEQ ID NO: 52432 - DNA, 15 bp, Homo sapiens
acagggtttctacct

SEQ ID NO: 52433 - DNA, 15 bp, Homo sapiens
gacagggtttctacc

SEQ ID NO: 52434 - DNA, 15 bp, Homo sapiens
agacagggtttctac

SEQ ID NO: 52435 - DNA, 15 bp, Homo sapiens
gagacagggtttcta

SEQ ID NO: 52436 - DNA, 15 bp, Homo sapiens
aaatttttgtatttt

SEQ ID NO: 52437 - DNA, 15 bp, Homo sapiens
caaatttttgtattt

SEQ ID NO: 52438 - DNA, 15 bp, Homo sapiens
gcaaatttttgtatt

SEQ ID NO: 52439 - DNA, 15 bp, Homo sapiens
ggcaaatttttgtat

SEQ ID NO: 52440 - DNA, 15 bp, Homo sapiens
gggcaaatttttgta

SEQ ID NO: 52441 - DNA, 15 bp, Homo sapiens
tgggcaaatttttgt

SEQ ID NO: 52442 - DNA, 15 bp, Homo sapiens
ctgggcaaatttttg

SEQ ID NO: 52443 - DNA, 15 bp, Homo sapiens
gctgggcaaattttt

SEQ ID NO: 52444 - DNA, 15 bp, Homo sapiens
cgctgggcaaatttt

SEQ ID NO: 52445 - DNA, 15 bp, Homo sapiens
acgctgggcaaattt

SEQ ID NO: 52446 - DNA, 15 bp, Homo sapiens
cacgctgggcaaatt

SEQ ID NO: 52447 - DNA, 15 bp, Homo sapiens
ccacgctgggcaaat

SEQ ID NO: 52448 - DNA, 15 bp, Homo sapiens
accacgctgggcaaa

SEQ ID NO: 52449 - DNA, 15 bp, Homo sapiens
caccacgctgggcaa

SEQ ID NO: 52450 - DNA, 15 bp, Homo sapiens
ccaccacgctgggca

SEQ ID NO: 52451 - DNA, 15 bp, Homo sapiens
gccaccacgctgggc

SEQ ID NO: 52452 - DNA, 15 bp, Homo sapiens
cgccaccacgctggg

SEQ ID NO: 52453 - DNA, 15 bp, Homo sapiens
gcgccaccacgctgg

SEQ ID NO: 52454 - DNA, 15 bp, Homo sapiens
cgcgccaccacgctg

SEQ ID NO: 52455 - DNA, 15 bp, Homo sapiens
acgcgccaccacgct

SEQ ID NO: 52456 - DNA, 15 bp, Homo sapiens
cacgcgccaccacgc

SEQ ID NO: 52457 - DNA, 15 bp, Homo sapiens
gcacgcgccaccacg

SEQ ID NO: 52458 - DNA, 15 bp, Homo sapiens
ggcacgcgccaccac

SEQ ID NO: 52459 - DNA, 15 bp, Homo sapiens
aggcacgcgccacca

SEQ ID NO: 52460 - DNA, 15 bp, Homo sapiens
gaggcacgcgccacc

SEQ ID NO: 52461 - DNA, 15 bp, Homo sapiens
agaggcacgcgccac

SEQ ID NO: 52462 - DNA, 15 bp, Homo sapiens
tagaggcacgcgcca

SEQ ID NO: 52463 - DNA, 15 bp, Homo sapiens
ttagaggcacgcgcc

SEQ ID NO: 52464 - DNA, 15 bp, Homo sapiens
attagaggcacgcgc

SEQ ID NO: 52465 - DNA, 15 bp, Homo sapiens
gattagaggcacgcg

SEQ ID NO: 52466 - DNA, 15 bp, Homo sapiens
ggattagaggcacgc

SEQ ID NO: 52467 - DNA, 15 bp, Homo sapiens
gggattagaggcacg

SEQ ID NO: 52468 - DNA, 15 bp, Homo sapiens
tgggattagaggcac

SEQ ID NO: 52469 - DNA, 15 bp, Homo sapiens
ctgggattagaggca

SEQ ID NO: 52470 - DNA, 15 bp, Homo sapiens
gctgggattagaggc

SEQ ID NO: 52471 - DNA, 15 bp, Homo sapiens
agctgggattagagg

SEQ ID NO: 52472 - DNA, 15 bp, Homo sapiens
tagctgggattagag

SEQ ID NO: 52473 - DNA, 15 bp, Homo sapiens
gtagctgggattaga

SEQ ID NO: 52474 - DNA, 15 bp, Homo sapiens
tgtagctgggattag

SEQ ID NO: 52475 - DNA, 15 bp, Homo sapiens
gtgtagctgggatta

SEQ ID NO: 52476 - DNA, 15 bp, Homo sapiens
cgtgtagctgggatt

SEQ ID NO: 52477 - DNA, 15 bp, Homo sapiens
ccgtgtagctgggat

SEQ ID NO: 52478 - DNA, 15 bp, Homo sapiens
cccgtgtagctggga

SEQ ID NO: 52479 - DNA, 15 bp, Homo sapiens
tcccgtgtagctggg

SEQ ID NO: 52480 - DNA, 15 bp, Homo sapiens
ctcccgtgtagctgg

SEQ ID NO: 52481 - DNA, 15 bp, Homo sapiens
cctcccgtgtagctg

SEQ ID NO: 52482 - DNA, 15 bp, Homo sapiens
gcctcccgtgtagct

SEQ ID NO: 52483 - DNA, 15 bp, Homo sapiens
agcctcccgtgtagc

SEQ ID NO: 52484 - DNA, 15 bp, Homo sapiens
cagcctcccgtgtag

SEQ ID NO: 52485 - DNA, 15 bp, Homo sapiens
tcagcctcccgtgta

SEQ ID NO: 52486 - DNA, 15 bp, Homo sapiens
ctcagcctcccgtgt

SEQ ID NO: 52487 - DNA, 15 bp, Homo sapiens
tctcagcctcccgtg

SEQ ID NO: 52488 - DNA, 15 bp, Homo sapiens
gtctcagcctcccgt

SEQ ID NO: 52489 - DNA, 15 bp, Homo sapiens
tgtctcagcctcccg

SEQ ID NO: 52490 - DNA, 15 bp, Homo sapiens
ttgtctcagcctccc

SEQ ID NO: 52491 - DNA, 15 bp, Homo sapiens
cttgtctcagcctcc

SEQ ID NO: 52492 - DNA, 15 bp, Homo sapiens
tcttgtctcagcctc

SEQ ID NO: 52493 - DNA, 15 bp, Homo sapiens
ctcttgtctcagcct

SEQ ID NO: 52494 - DNA, 15 bp, Homo sapiens
tctcttgtctcagcc

SEQ ID NO: 52495 - DNA, 15 bp, Homo sapiens
ttctcttgtctcagc

SEQ ID NO: 52496 - DNA, 15 bp, Homo sapiens
attctcttgtctcag

SEQ ID NO: 52497 - DNA, 15 bp, Homo sapiens
gattctcttgtctca

SEQ ID NO: 52498 - DNA, 15 bp, Homo sapiens
tgattctcttgtctc

SEQ ID NO: 52499 - DNA, 15 bp, Homo sapiens
gtgattctcttgtct

SEQ ID NO: 52500 - DNA, 15 bp, Homo sapiens
agtgattctcttgtc

SEQ ID NO: 52501 - DNA, 15 bp, Homo sapiens
aagtgattctcttgt

SEQ ID NO: 52502 - DNA, 15 bp, Homo sapiens
gaagtgattctcttg

SEQ ID NO: 52503 - DNA, 15 bp, Homo sapiens
tgaagtgattctctt

SEQ ID NO: 52504 - DNA, 15 bp, Homo sapiens
atgaagtgattctct

SEQ ID NO: 52505 - DNA, 15 bp, Homo sapiens
gatgaagtgattctc

SEQ ID NO: 52506 - DNA, 15 bp, Homo sapiens
tgatgaagtgattct

SEQ ID NO: 52507 - DNA, 15 bp, Homo sapiens
ttgatgaagtgattc

SEQ ID NO: 52508 - DNA, 15 bp, Homo sapiens
gttgatgaagtgatt

SEQ ID NO: 52509 - DNA, 15 bp, Homo sapiens
ggttgatgaagtgat

SEQ ID NO: 52510 - DNA, 15 bp, Homo sapiens
gggttgatgaagtga

SEQ ID NO: 52511 - DNA, 15 bp, Homo sapiens
cgggttgatgaagtg

SEQ ID NO: 52512 - DNA, 15 bp, Homo sapiens
ccgggttgatgaagt

SEQ ID NO: 52513 - DNA, 15 bp, Homo sapiens
cccgggttgatgaag

SEQ ID NO: 52514 - DNA, 15 bp, Homo sapiens
tcccgggttgatgaa

SEQ ID NO: 52515 - DNA, 15 bp, Homo sapiens
ctcccgggttgatga

SEQ ID NO: 52516 - DNA, 15 bp, Homo sapiens
cctcccgggttgatg

SEQ ID NO: 52517 - DNA, 15 bp, Homo sapiens
acctcccgggttgat

SEQ ID NO: 52518 - DNA, 15 bp, Homo sapiens
cacctcccgggttga

SEQ ID NO: 52519 - DNA, 15 bp, Homo sapiens
ccacctcccgggttg

SEQ ID NO: 52520 - DNA, 15 bp, Homo sapiens
cacaacctccacctc

SEQ ID NO: 52521 - DNA, 15 bp, Homo sapiens
ccacaacctccacct

SEQ ID NO: 52522 - DNA, 15 bp, Homo sapiens
accacaacctccacc

SEQ ID NO: 52523 - DNA, 15 bp, Homo sapiens
caccacaacctccac

SEQ ID NO: 52524 - DNA, 15 bp, Homo sapiens
tcaccacaacctcca

SEQ ID NO: 52525 - DNA, 15 bp, Homo sapiens
ctcaccacaacctcc

SEQ ID NO: 52526 - DNA, 15 bp, Homo sapiens
agctcaccacaacct

SEQ ID NO: 52527 - DNA, 15 bp, Homo sapiens
cagctcaccacaacc

SEQ ID NO: 52528 - DNA, 15 bp, Homo sapiens
tcagctcaccacaac

SEQ ID NO: 52529 - DNA, 15 bp, Homo sapiens
ctcagctcaccacaa

SEQ ID NO: 52530 - DNA, 15 bp, Homo sapiens
tctcagctcaccaca

SEQ ID NO: 52531 - DNA, 15 bp, Homo sapiens
gatctcagctcacca

SEQ ID NO: 52532 - DNA, 15 bp, Homo sapiens
cgatctcagctcacc

SEQ ID NO: 52533 - DNA, 15 bp, Homo sapiens
gtgcgatctcagctc

SEQ ID NO: 52534 - DNA, 15 bp, Homo sapiens
ggtgcgatctcagct

SEQ ID NO: 52535 - DNA, 15 bp, Homo sapiens
tggtgcgatctcagc

SEQ ID NO: 52536 - DNA, 15 bp, Homo sapiens
atggtgcgatctcag

SEQ ID NO: 52537 - DNA, 15 bp, Homo sapiens
aatggtgcgatctca

SEQ ID NO: 52538 - DNA, 15 bp, Homo sapiens
ttttgtttttgagat

SEQ ID NO: 52539 - DNA, 15 bp, Homo sapiens
tttttgtttttgaga

SEQ ID NO: 52540 - DNA, 15 bp, Homo sapiens
ttttttgtttttgag

SEQ ID NO: 52541 - DNA, 15 bp, Homo sapiens
tttttttgtttttga

SEQ ID NO: 52542 - DNA, 15 bp, Homo sapiens
ttttttttgtttttg

SEQ ID NO: 52543 - DNA, 15 bp, Homo sapiens
tttttttttgttttt

SEQ ID NO: 52544 - DNA, 15 bp, Homo sapiens
atttttttttgtttt

SEQ ID NO: 52545 - DNA, 15 bp, Homo sapiens
aatttttttttgttt

SEQ ID NO: 52546 - DNA, 15 bp, Homo sapiens
taatttttttttgtt

SEQ ID NO: 52547 - DNA, 15 bp, Homo sapiens
ctaatttttttttgt

SEQ ID NO: 52548 - DNA, 15 bp, Homo sapiens
gctaatttttttttg

SEQ ID NO: 52549 - DNA, 15 bp, Homo sapiens
tcccagctaattttt

SEQ ID NO: 52550 - DNA, 15 bp, Homo sapiens
ttcccagctaatttt

SEQ ID NO: 52551 - DNA, 15 bp, Homo sapiens
attcccagctaattt

SEQ ID NO: 52552 - DNA, 15 bp, Homo sapiens
cattcccagctaatt

SEQ ID NO: 52553 - DNA, 15 bp, Homo sapiens
ccattcccagctaat

SEQ ID NO: 52554 - DNA, 15 bp, Homo sapiens
accattcccagctaa

SEQ ID NO: 52555 - DNA, 15 bp, Homo sapiens
caccattcccagcta

SEQ ID NO: 52556 - DNA, 15 bp, Homo sapiens
ccaccattcccagct

SEQ ID NO: 52557 - DNA, 15 bp, Homo sapiens
gccaccattcccagc

SEQ ID NO: 52558 - DNA, 15 bp, Homo sapiens
tgccaccattcccag

SEQ ID NO: 52559 - DNA, 15 bp, Homo sapiens
atgccaccattccca

SEQ ID NO: 52560 - DNA, 15 bp, Homo sapiens
catgccaccattccc

SEQ ID NO: 52561 - DNA, 15 bp, Homo sapiens
acatgccaccattcc

SEQ ID NO: 52562 - DNA, 15 bp, Homo sapiens
cacatgccaccattc

SEQ ID NO: 52563 - DNA, 15 bp, Homo sapiens
gcacatgccaccatt

SEQ ID NO: 52564 - DNA, 15 bp, Homo sapiens
ggcacatgccaccat

SEQ ID NO: 52565 - DNA, 15 bp, Homo sapiens
tgattacaggcacat

SEQ ID NO: 52566 - DNA, 15 bp, Homo sapiens
gtgattacaggcaca

SEQ ID NO: 52567 - DNA, 15 bp, Homo sapiens
tgtgattacaggcac

SEQ ID NO: 52568 - DNA, 15 bp, Homo sapiens
ctgtgattacaggca

SEQ ID NO: 52569 - DNA, 15 bp, Homo sapiens
gctgtgattacaggc

SEQ ID NO: 52570 - DNA, 15 bp, Homo sapiens
agctgtgattacagg

SEQ ID NO: 52571 - DNA, 15 bp, Homo sapiens
tagctgtgattacag

SEQ ID NO: 52572 - DNA, 15 bp, Homo sapiens
gtagctgtgattaca

SEQ ID NO: 52573 - DNA, 15 bp, Homo sapiens
agtagctgtgattac

SEQ ID NO: 52574 - DNA, 15 bp, Homo sapiens
aagtagctgtgatta

SEQ ID NO: 52575 - DNA, 15 bp, Homo sapiens
caagtagctgtgatt

SEQ ID NO: 52576 - DNA, 15 bp, Homo sapiens
ccaagtagctgtgat

SEQ ID NO: 52577 - DNA, 15 bp, Homo sapiens
cccaagtagctgtga

SEQ ID NO: 52578 - DNA, 15 bp, Homo sapiens
tcccaagtagctgtg

SEQ ID NO: 52579 - DNA, 15 bp, Homo sapiens
ctcccaagtagctgt

SEQ ID NO: 52580 - DNA, 15 bp, Homo sapiens
ccagcctcccaagta

SEQ ID NO: 52581 - DNA, 15 bp, Homo sapiens
cccagcctcccaagt

SEQ ID NO: 52582 - DNA, 15 bp, Homo sapiens
ccccagcctcccaag

SEQ ID NO: 52583 - DNA, 15 bp, Homo sapiens
gccccagcctcccaa

SEQ ID NO: 52584 - DNA, 15 bp, Homo sapiens
tgccccagcctccca

SEQ ID NO: 52585 - DNA, 15 bp, Homo sapiens
ctgccccagcctccc

SEQ ID NO: 52586 - DNA, 15 bp, Homo sapiens
cctgccccagcctcc

SEQ ID NO: 52587 - DNA, 15 bp, Homo sapiens
tcctgccccagcctc

SEQ ID NO: 52588 - DNA, 15 bp, Homo sapiens
ctcctgccccagcct

SEQ ID NO: 52589 - DNA, 15 bp, Homo sapiens
tctcctgccccagcc

SEQ ID NO: 52590 - DNA, 15 bp, Homo sapiens
ttctcctgccccagc

SEQ ID NO: 52591 - DNA, 15 bp, Homo sapiens
attctcctgccccag

SEQ ID NO: 52592 - DNA, 15 bp, Homo sapiens
gattctcctgcccca

SEQ ID NO: 52593 - DNA, 15 bp, Homo sapiens
cgattctcctgcccc

SEQ ID NO: 52594 - DNA, 15 bp, Homo sapiens
gcgattctcctgccc

SEQ ID NO: 52595 - DNA, 15 bp, Homo sapiens
tctccgcctcctggg

SEQ ID NO: 52596 - DNA, 15 bp, Homo sapiens
atctccgcctcctgg

SEQ ID NO: 52597 - DNA, 15 bp, Homo sapiens
aatctccgcctcctg

SEQ ID NO: 52598 - DNA, 15 bp, Homo sapiens
caatctccgcctcct

SEQ ID NO: 52599 - DNA, 15 bp, Homo sapiens
gcaatctccgcctcc

SEQ ID NO: 52600 - DNA, 15 bp, Homo sapiens
tgcaatctccgcctc

SEQ ID NO: 52601 - DNA, 15 bp, Homo sapiens
ctgcaatctccgcct

SEQ ID NO: 52602 - DNA, 15 bp, Homo sapiens
actgcaatctccgcc

SEQ ID NO: 52603 - DNA, 15 bp, Homo sapiens
cactgcaatctccgc

SEQ ID NO: 52604 - DNA, 15 bp, Homo sapiens
tcactgcaatctccg

SEQ ID NO: 52605 - DNA, 15 bp, Homo sapiens
ctcactgcaatctcc

SEQ ID NO: 52606 - DNA, 15 bp, Homo sapiens
gctcactgcaatctc

SEQ ID NO: 52607 - DNA, 15 bp, Homo sapiens
agctcactgcaatct

SEQ ID NO: 52608 - DNA, 15 bp, Homo sapiens
cagctcactgcaatc

SEQ ID NO: 52609 - DNA, 15 bp, Homo sapiens
tcagctcactgcaat

SEQ ID NO: 52610 - DNA, 15 bp, Homo sapiens
cctggagtgcagtgg

SEQ ID NO: 52611 - DNA, 15 bp, Homo sapiens
gcctggagtgcagtg

SEQ ID NO: 52612 - DNA, 15 bp, Homo sapiens
agcctggagtgcagt

SEQ ID NO: 52613 - DNA, 15 bp, Homo sapiens
cagcctggagtgcag

SEQ ID NO: 52614 - DNA, 15 bp, Homo sapiens
ccagcctggagtgca

SEQ ID NO: 52615 - DNA, 15 bp, Homo sapiens
cccagcctggagtgc

SEQ ID NO: 52616 - DNA, 15 bp, Homo sapiens
gcccagcctggagtg

SEQ ID NO: 52617 - DNA, 15 bp, Homo sapiens
cgcccagcctggagt

SEQ ID NO: 52618 - DNA, 15 bp, Homo sapiens
tcgcccagcctggag

SEQ ID NO: 52619 - DNA, 15 bp, Homo sapiens
ttcgcccagcctgga

SEQ ID NO: 52620 - DNA, 15 bp, Homo sapiens
tttcgcccagcctgg

SEQ ID NO: 52621 - DNA, 15 bp, Homo sapiens
ctttcgcccagcctg

SEQ ID NO: 52622 - DNA, 15 bp, Homo sapiens
tctttcgcccagcct

SEQ ID NO: 52623 - DNA, 15 bp, Homo sapiens
ctctttcgcccagcc

SEQ ID NO: 52624 - DNA, 15 bp, Homo sapiens
gctctttcgcccagc

SEQ ID NO: 52625 - DNA, 15 bp, Homo sapiens
tgctctttcgcccag

SEQ ID NO: 52626 - DNA, 15 bp, Homo sapiens
ttgctctttcgccca

SEQ ID NO: 52627 - DNA, 15 bp, Homo sapiens
cttgctctttcgccc

SEQ ID NO: 52628 - DNA, 15 bp, Homo sapiens
tcttgctctttcgcc

SEQ ID NO: 52629 - DNA, 15 bp, Homo sapiens
gtcttgctctttcgc

SEQ ID NO: 52630 - DNA, 15 bp, Homo sapiens
agtcttgctctttcg

SEQ ID NO: 52631 - DNA, 15 bp, Homo sapiens
gagtcttgctctttc

SEQ ID NO: 52632 - DNA, 15 bp, Homo sapiens
ggagtcttgctcttt

SEQ ID NO: 52633 - DNA, 15 bp, Homo sapiens
cggagtcttgctctt

SEQ ID NO: 52634 - DNA, 15 bp, Homo sapiens
atttttgagacggag

SEQ ID NO: 52635 - DNA, 15 bp, Homo sapiens
tatttttgagacgga

SEQ ID NO: 52636 - DNA, 15 bp, Homo sapiens
ttatttttgagacgg

SEQ ID NO: 52637 - DNA, 15 bp, Homo sapiens
attatttttgagacg

SEQ ID NO: 52638 - DNA, 15 bp, Homo sapiens
tattatttttgagac

SEQ ID NO: 52639 - DNA, 15 bp, Homo sapiens
ttattatttttgaga

SEQ ID NO: 52640 - DNA, 15 bp, Homo sapiens
attattatttttgag

SEQ ID NO: 52641 - DNA, 15 bp, Homo sapiens
tattattatttttga

SEQ ID NO: 52642 - DNA, 15 bp, Homo sapiens
ttattattatttttg

SEQ ID NO: 52643 - DNA, 15 bp, Homo sapiens
attattattattttt

SEQ ID NO: 52644 - DNA, 15 bp, Homo sapiens
tattattattattat

SEQ ID NO: 52645 - DNA, 15 bp, Homo sapiens
ttattattattatta

SEQ ID NO: 52646 - DNA, 15 bp, Homo sapiens
ctattattattatta

SEQ ID NO: 52647 - DNA, 15 bp, Homo sapiens
cctattattattatt

SEQ ID NO: 52648 - DNA, 15 bp, Homo sapiens
gcctattattattat

SEQ ID NO: 52649 - DNA, 15 bp, Homo sapiens
ggcctattattatta

SEQ ID NO: 52650 - DNA, 15 bp, Homo sapiens
tggcctattattatt

SEQ ID NO: 52651 - DNA, 15 bp, Homo sapiens
ctggcctattattat

SEQ ID NO: 52652 - DNA, 15 bp, Homo sapiens
actggcctattatta

SEQ ID NO: 52653 - DNA, 15 bp, Homo sapiens
cactggcctattatt

SEQ ID NO: 52654 - DNA, 15 bp, Homo sapiens
acactggcctattat

SEQ ID NO: 52655 - DNA, 15 bp, Homo sapiens
tacactggcctatta

SEQ ID NO: 52656 - DNA, 15 bp, Homo sapiens
ctacactggcctatt

SEQ ID NO: 52657 - DNA, 15 bp, Homo sapiens
gctacactggcctat

SEQ ID NO: 52658 - DNA, 15 bp, Homo sapiens
agctacactggccta

SEQ ID NO: 52659 - DNA, 15 bp, Homo sapiens
cagctacactggcct

SEQ ID NO: 52660 - DNA, 15 bp, Homo sapiens
ccagctacactggcc

SEQ ID NO: 52661 - DNA, 15 bp, Homo sapiens
tccagctacactggc

SEQ ID NO: 52662 - DNA, 15 bp, Homo sapiens
ctccagctacactgg

SEQ ID NO: 52663 - DNA, 15 bp, Homo sapiens
actccagctacactg

SEQ ID NO: 52664 - DNA, 15 bp, Homo sapiens
tactccagctacact

SEQ ID NO: 52665 - DNA, 15 bp, Homo sapiens
ttactccagctacac

SEQ ID NO: 52666 - DNA, 15 bp, Homo sapiens
attactccagctaca

SEQ ID NO: 52667 - DNA, 15 bp, Homo sapiens
aattactccagctac

SEQ ID NO: 52668 - DNA, 15 bp, Homo sapiens
aaattactccagcta

SEQ ID NO: 52669 - DNA, 15 bp, Homo sapiens
caaattactccagct

SEQ ID NO: 52670 - DNA, 15 bp, Homo sapiens
gcaaattactccagc

SEQ ID NO: 52671 - DNA, 15 bp, Homo sapiens
tgcaaattactccag

SEQ ID NO: 52672 - DNA, 15 bp, Homo sapiens
ttgcaaattactcca

SEQ ID NO: 52673 - DNA, 15 bp, Homo sapiens
tttgcaaattactcc

SEQ ID NO: 52674 - DNA, 15 bp, Homo sapiens
atttgcaaattactc

SEQ ID NO: 52675 - DNA, 15 bp, Homo sapiens
aatttgcaaattact

SEQ ID NO: 52676 - DNA, 15 bp, Homo sapiens
taatttgcaaattac

SEQ ID NO: 52677 - DNA, 15 bp, Homo sapiens
ataatttgcaaatta

SEQ ID NO: 52678 - DNA, 15 bp, Homo sapiens
cataatttgcaaatt

SEQ ID NO: 52679 - DNA, 15 bp, Homo sapiens
acataatttgcaaat

SEQ ID NO: 52680 - DNA, 15 bp, Homo sapiens
cacataatttgcaaa

SEQ ID NO: 52681 - DNA, 15 bp, Homo sapiens
acacataatttgcaa

SEQ ID NO: 52682 - DNA, 15 bp, Homo sapiens
cacacataatttgca

SEQ ID NO: 52683 - DNA, 15 bp, Homo sapiens
ccacacataatttgc

SEQ ID NO: 52684 - DNA, 15 bp, Homo sapiens
tccacacataatttg

SEQ ID NO: 52685 - DNA, 15 bp, Homo sapiens
ctccacacataattt

SEQ ID NO: 52686 - DNA, 15 bp, Homo sapiens
cctccacacataatt

SEQ ID NO: 52687 - DNA, 15 bp, Homo sapiens
gcctccacacataat

SEQ ID NO: 52688 - DNA, 15 bp, Homo sapiens
tgcctccacacataa

SEQ ID NO: 52689 - DNA, 15 bp, Homo sapiens
ctgcctccacacata

SEQ ID NO: 52690 - DNA, 15 bp, Homo sapiens
tctgcctccacacat

SEQ ID NO: 52691 - DNA, 15 bp, Homo sapiens
ctctgcctccacaca

SEQ ID NO: 52692 - DNA, 15 bp, Homo sapiens
tctctgcctccacac

SEQ ID NO: 52693 - DNA, 15 bp, Homo sapiens
atctctgcctccaca

SEQ ID NO: 52694 - DNA, 15 bp, Homo sapiens
aatctctgcctccac

SEQ ID NO: 52695 - DNA, 15 bp, Homo sapiens
taatctctgcctcca

SEQ ID NO: 52696 - DNA, 15 bp, Homo sapiens
gtaatctctgcctcc

SEQ ID NO: 52697 - DNA, 15 bp, Homo sapiens
tgtaatctctgcctc

SEQ ID NO: 52698 - DNA, 15 bp, Homo sapiens
gtgtaatctctgcct

SEQ ID NO: 52699 - DNA, 15 bp, Homo sapiens
tgtgtaatctctgcc

SEQ ID NO: 52700 - DNA, 15 bp, Homo sapiens
ttgtgtaatctctgc

SEQ ID NO: 52701 - DNA, 15 bp, Homo sapiens
cttgtgtaatctctg

SEQ ID NO: 52702 - DNA, 15 bp, Homo sapiens
ccttgtgtaatctct

SEQ ID NO: 52703 - DNA, 15 bp, Homo sapiens
tccttgtgtaatctc

SEQ ID NO: 52704 - DNA, 15 bp, Homo sapiens
ttccttgtgtaatct

SEQ ID NO: 52705 - DNA, 15 bp, Homo sapiens
attccttgtgtaatc

SEQ ID NO: 52706 - DNA, 15 bp, Homo sapiens
cattccttgtgtaat

SEQ ID NO: 52707 - DNA, 15 bp, Homo sapiens
ccattccttgtgtaa

SEQ ID NO: 52708 - DNA, 15 bp, Homo sapiens
cccattccttgtgta

SEQ ID NO: 52709 - DNA, 15 bp, Homo sapiens
tcccattccttgtgt

SEQ ID NO: 52710 - DNA, 15 bp, Homo sapiens
ctcccattccttgtg

SEQ ID NO: 52711 - DNA, 15 bp, Homo sapiens
tctcccattccttgt

SEQ ID NO: 52712 - DNA, 15 bp, Homo sapiens
ttctcccattccttg

SEQ ID NO: 52713 - DNA, 15 bp, Homo sapiens
cttctcccattcctt

SEQ ID NO: 52714 - DNA, 15 bp, Homo sapiens
ccttctcccattcct

SEQ ID NO: 52715 - DNA, 15 bp, Homo sapiens
accttctcccattcc

SEQ ID NO: 52716 - DNA, 15 bp, Homo sapiens
gaccttctcccattc

SEQ ID NO: 52717 - DNA, 15 bp, Homo sapiens
tgaccttctcccatt

SEQ ID NO: 52718 - DNA, 15 bp, Homo sapiens
atgaccttctcccat

SEQ ID NO: 52719 - DNA, 15 bp, Homo sapiens
tatgaccttctccca

SEQ ID NO: 52720 - DNA, 15 bp, Homo sapiens
ctatgaccttctccc

SEQ ID NO: 52721 - DNA, 15 bp, Homo sapiens
tctatgaccttctcc

SEQ ID NO: 52722 - DNA, 15 bp, Homo sapiens
atctatgaccttctc

SEQ ID NO: 52723 - DNA, 15 bp, Homo sapiens
catctatgaccttct

SEQ ID NO: 52724 - DNA, 15 bp, Homo sapiens
tcatctatgaccttc

SEQ ID NO: 52725 - DNA, 15 bp, Homo sapiens
ctcatctatgacctt

SEQ ID NO: 52726 - DNA, 15 bp, Homo sapiens
cctcatctatgacct

SEQ ID NO: 52727 - DNA, 15 bp, Homo sapiens
ccctcatctatgacc

SEQ ID NO: 52728 - DNA, 15 bp, Homo sapiens
gccctcatctatgac

SEQ ID NO: 52729 - DNA, 15 bp, Homo sapiens
ggccctcatctatga

SEQ ID NO: 52730 - DNA, 15 bp, Homo sapiens
tggccctcatctatg

SEQ ID NO: 52731 - DNA, 15 bp, Homo sapiens
ctggccctcatctat

SEQ ID NO: 52732 - DNA, 15 bp, Homo sapiens
tctggccctcatcta

SEQ ID NO: 52733 - DNA, 15 bp, Homo sapiens
atctggccctcatct

SEQ ID NO: 52734 - DNA, 15 bp, Homo sapiens
gatctggccctcatc

SEQ ID NO: 52735 - DNA, 15 bp, Homo sapiens
tgatctggccctcat

SEQ ID NO: 52736 - DNA, 15 bp, Homo sapiens
gtgatctggccctca

SEQ ID NO: 52737 - DNA, 15 bp, Homo sapiens
tgtgatctggccctc

SEQ ID NO: 52738 - DNA, 15 bp, Homo sapiens
atgtgatctggccct

SEQ ID NO: 52739 - DNA, 15 bp, Homo sapiens
tatgtgatctggccc

SEQ ID NO: 52740 - DNA, 15 bp, Homo sapiens
ctatgtgatctggcc

SEQ ID NO: 52741 - DNA, 15 bp, Homo sapiens
actatgtgatctggc

SEQ ID NO: 52742 - DNA, 15 bp, Homo sapiens
tactatgtgatctgg

SEQ ID NO: 52743 - DNA, 15 bp, Homo sapiens
atactatgtgatctg

SEQ ID NO: 52744 - DNA, 15 bp, Homo sapiens
aatactatgtgatct

SEQ ID NO: 52745 - DNA, 15 bp, Homo sapiens
aaatactatgtgatc

SEQ ID NO: 52746 - DNA, 15 bp, Homo sapiens
caaatactatgtgat

SEQ ID NO: 52747 - DNA, 15 bp, Homo sapiens
ccaaatactatgtga

SEQ ID NO: 52748 - DNA, 15 bp, Homo sapiens
accaaatactatgtg

SEQ ID NO: 52749 - DNA, 15 bp, Homo sapiens
caccaaatactatgt

SEQ ID NO: 52750 - DNA, 15 bp, Homo sapiens
ccaccaaatactatg

SEQ ID NO: 52751 - DNA, 15 bp, Homo sapiens
accaccaaatactat

SEQ ID NO: 52752 - DNA, 15 bp, Homo sapiens
taccaccaaatacta

SEQ ID NO: 52753 - DNA, 15 bp, Homo sapiens
ttaccaccaaatact

SEQ ID NO: 52754 - DNA, 15 bp, Homo sapiens
cttaccaccaaatac

SEQ ID NO: 52755 - DNA, 15 bp, Homo sapiens
ccttaccaccaaata

SEQ ID NO: 52756 - DNA, 15 bp, Homo sapiens
tccttaccaccaaat

SEQ ID NO: 52757 - DNA, 15 bp, Homo sapiens
ttccttaccaccaaa

SEQ ID NO: 52758 - DNA, 15 bp, Homo sapiens
attccttaccaccaa

SEQ ID NO: 52759 - DNA, 15 bp, Homo sapiens
aattccttaccacca

SEQ ID NO: 52760 - DNA, 15 bp, Homo sapiens
gaattccttaccacc

SEQ ID NO: 52761 - DNA, 15 bp, Homo sapiens
tgaattccttaccac

SEQ ID NO: 52762 - DNA, 15 bp, Homo sapiens
ctgaattccttacca

SEQ ID NO: 52763 - DNA, 15 bp, Homo sapiens
tctgaattccttacc

SEQ ID NO: 52764 - DNA, 15 bp, Homo sapiens
atctgaattccttac

SEQ ID NO: 52765 - DNA, 15 bp, Homo sapiens
aatctgaattcctta

SEQ ID NO: 52766 - DNA, 15 bp, Homo sapiens
aaatctgaattcctt

SEQ ID NO: 52767 - DNA, 15 bp, Homo sapiens
aaaatctgaattcct

SEQ ID NO: 52768 - DNA, 15 bp, Homo sapiens
taaaatctgaattcc

SEQ ID NO: 52769 - DNA, 15 bp, Homo sapiens
ataaaatctgaattc

SEQ ID NO: 52770 - DNA, 15 bp, Homo sapiens
gataaaatctgaatt

SEQ ID NO: 52771 - DNA, 15 bp, Homo sapiens
ggataaaatctgaat

SEQ ID NO: 52772 - DNA, 15 bp, Homo sapiens
aggataaaatctgaa

SEQ ID NO: 52773 - DNA, 15 bp, Homo sapiens
aaggataaaatctga

SEQ ID NO: 52774 - DNA, 15 bp, Homo sapiens
caaggataaaatctg

SEQ ID NO: 52775 - DNA, 15 bp, Homo sapiens
acaaggataaaatct

SEQ ID NO: 52776 - DNA, 15 bp, Homo sapiens
cacaaggataaaatc

SEQ ID NO: 52777 - DNA, 15 bp, Homo sapiens
ccacaaggataaaat

SEQ ID NO: 52778 - DNA, 15 bp, Homo sapiens
accacaaggataaaa

SEQ ID NO: 52779 - DNA, 15 bp, Homo sapiens
taccacaaggataaa

SEQ ID NO: 52780 - DNA, 15 bp, Homo sapiens
ttaccacaaggataa

SEQ ID NO: 52781 - DNA, 15 bp, Homo sapiens
attaccacaaggata

SEQ ID NO: 52782 - DNA, 15 bp, Homo sapiens
aattaccacaaggat

SEQ ID NO: 52783 - DNA, 15 bp, Homo sapiens
caattaccacaagga

SEQ ID NO: 52784 - DNA, 15 bp, Homo sapiens
ccaattaccacaagg

SEQ ID NO: 52785 - DNA, 15 bp, Homo sapiens
accaattaccacaag

SEQ ID NO: 52786 - DNA, 15 bp, Homo sapiens
caccaattaccacaa

SEQ ID NO: 52787 - DNA, 15 bp, Homo sapiens
ccaccaattaccaca

SEQ ID NO: 52788 - DNA, 15 bp, Homo sapiens
accaccaattaccac

SEQ ID NO: 52789 - DNA, 15 bp, Homo sapiens
caccaccaattacca

SEQ ID NO: 52790 - DNA, 15 bp, Homo sapiens
acaccaccaattacc

SEQ ID NO: 52791 - DNA, 15 bp, Homo sapiens
cacaccaccaattac

SEQ ID NO: 52792 - DNA, 15 bp, Homo sapiens
ccacaccaccaatta

SEQ ID NO: 52793 - DNA, 15 bp, Homo sapiens
tccacaccaccaatt

SEQ ID NO: 52794 - DNA, 15 bp, Homo sapiens
ctccacaccaccaat

SEQ ID NO: 52795 - DNA, 15 bp, Homo sapiens
tctccacaccaccaa

SEQ ID NO: 52796 - DNA, 15 bp, Homo sapiens
atctccacaccacca

SEQ ID NO: 52797 - DNA, 15 bp, Homo sapiens
catctccacaccacc

SEQ ID NO: 52798 - DNA, 15 bp, Homo sapiens
ccatctccacaccac

SEQ ID NO: 52799 - DNA, 15 bp, Homo sapiens
accatctccacacca

SEQ ID NO: 52800 - DNA, 15 bp, Homo sapiens
aaccatctccacacc

SEQ ID NO: 52801 - DNA, 15 bp, Homo sapiens
taaccatctccacac

SEQ ID NO: 52802 - DNA, 15 bp, Homo sapiens
ttaaccatctccaca

SEQ ID NO: 52803 - DNA, 15 bp, Homo sapiens
tttaaccatctccac

SEQ ID NO: 52804 - DNA, 15 bp, Homo sapiens
ttttaaccatctcca

SEQ ID NO: 52805 - DNA, 15 bp, Homo sapiens
tttttaaccatctcc

SEQ ID NO: 52806 - DNA, 15 bp, Homo sapiens
gtttttaaccatctc

SEQ ID NO: 52807 - DNA, 15 bp, Homo sapiens
tgtttttaaccatct

SEQ ID NO: 52808 - DNA, 15 bp, Homo sapiens
ttgtttttaaccatc

SEQ ID NO: 52809 - DNA, 15 bp, Homo sapiens
cttgtttttaaccat

SEQ ID NO: 52810 - DNA, 15 bp, Homo sapiens
ccttgtttttaacca

SEQ ID NO: 52811 - DNA, 15 bp, Homo sapiens
accttgtttttaacc

SEQ ID NO: 52812 - DNA, 15 bp, Homo sapiens
aaccttgtttttaac

SEQ ID NO: 52813 - DNA, 15 bp, Homo sapiens
caaccttgtttttaa

SEQ ID NO: 52814 - DNA, 15 bp, Homo sapiens
ccaaccttgttttta

SEQ ID NO: 52815 - DNA, 15 bp, Homo sapiens
accaaccttgttttt

SEQ ID NO: 52816 - DNA, 15 bp, Homo sapiens
aaccaaccttgtttt

SEQ ID NO: 52817 - DNA, 15 bp, Homo sapiens
aaaccaaccttgttt

SEQ ID NO: 52818 - DNA, 15 bp, Homo sapiens
caaaccaaccttgtt

SEQ ID NO: 52819 - DNA, 15 bp, Homo sapiens
ccaaaccaaccttgt

SEQ ID NO: 52820 - DNA, 15 bp, Homo sapiens
cccaaaccaaccttg

SEQ ID NO: 52821 - DNA, 15 bp, Homo sapiens
tcccaaaccaacctt

SEQ ID NO: 52822 - DNA, 15 bp, Homo sapiens
atcccaaaccaacct

SEQ ID NO: 52823 - DNA, 15 bp, Homo sapiens
catcccaaaccaacc

SEQ ID NO: 52824 - DNA, 15 bp, Homo sapiens
ccatcccaaaccaac

SEQ ID NO: 52825 - DNA, 15 bp, Homo sapiens
cccatcccaaaccaa

SEQ ID NO: 52826 - DNA, 15 bp, Homo sapiens
acccatcccaaacca

SEQ ID NO: 52827 - DNA, 15 bp, Homo sapiens
aacccatcccaaacc

SEQ ID NO: 52828 - DNA, 15 bp, Homo sapiens
aaacccatcccaaac

SEQ ID NO: 52829 - DNA, 15 bp, Homo sapiens
caaacccatcccaaa

SEQ ID NO: 52830 - DNA, 15 bp, Homo sapiens
tcaaacccatcccaa

SEQ ID NO: 52831 - DNA, 15 bp, Homo sapiens
ttcaaacccatccca

SEQ ID NO: 52832 - DNA, 15 bp, Homo sapiens
cttcaaacccatccc

SEQ ID NO: 52833 - DNA, 15 bp, Homo sapiens
tcttcaaacccatcc

SEQ ID NO: 52834 - DNA, 15 bp, Homo sapiens
ctcttcaaacccatc

SEQ ID NO: 52835 - DNA, 15 bp, Homo sapiens
tctcttcaaacccat

SEQ ID NO: 52836 - DNA, 15 bp, Homo sapiens
ctctcttcaaaccca

SEQ ID NO: 52837 - DNA, 15 bp, Homo sapiens
cctctcttcaaaccc

SEQ ID NO: 52838 - DNA, 15 bp, Homo sapiens
tcctctcttcaaacc

SEQ ID NO: 52839 - DNA, 15 bp, Homo sapiens
gtcctctcttcaaac

SEQ ID NO: 52840 - DNA, 15 bp, Homo sapiens
agtcctctcttcaaa

SEQ ID NO: 52841 - DNA, 15 bp, Homo sapiens
aagtcctctcttcaa

SEQ ID NO: 52842 - DNA, 15 bp, Homo sapiens
caagtcctctcttca

SEQ ID NO: 52843 - DNA, 15 bp, Homo sapiens
gcaagtcctctcttc

SEQ ID NO: 52844 - DNA, 15 bp, Homo sapiens
agcaagtcctctctt

SEQ ID NO: 52845 - DNA, 15 bp, Homo sapiens
tagcaagtcctctct

SEQ ID NO: 52846 - DNA, 15 bp, Homo sapiens
ttagcaagtcctctc

SEQ ID NO: 52847 - DNA, 15 bp, Homo sapiens
attagcaagtcctct

SEQ ID NO: 52848 - DNA, 15 bp, Homo sapiens
cattagcaagtcctc

SEQ ID NO: 52849 - DNA, 15 bp, Homo sapiens
ccattagcaagtcct

SEQ ID NO: 52850 - DNA, 15 bp, Homo sapiens
tccattagcaagtcc

SEQ ID NO: 52851 - DNA, 15 bp, Homo sapiens
atccattagcaagtc

SEQ ID NO: 52852 - DNA, 15 bp, Homo sapiens
aatccattagcaagt

SEQ ID NO: 52853 - DNA, 15 bp, Homo sapiens
taatccattagcaag

SEQ ID NO: 52854 - DNA, 15 bp, Homo sapiens
ttaatccattagcaa

SEQ ID NO: 52855 - DNA, 15 bp, Homo sapiens
tttaatccattagca

SEQ ID NO: 52856 - DNA, 15 bp, Homo sapiens
atttaatccattagc

SEQ ID NO: 52857 - DNA, 15 bp, Homo sapiens
aatttaatccattag

SEQ ID NO: 52858 - DNA, 15 bp, Homo sapiens
aaatttaatccatta

SEQ ID NO: 52859 - DNA, 15 bp, Homo sapiens
caaatttaatccatt

SEQ ID NO: 52860 - DNA, 15 bp, Homo sapiens
ccaaatttaatccat

SEQ ID NO: 52861 - DNA, 15 bp, Homo sapiens
tccaaatttaatcca

SEQ ID NO: 52862 - DNA, 15 bp, Homo sapiens
ctccaaatttaatcc

SEQ ID NO: 52863 - DNA, 15 bp, Homo sapiens
cctccaaatttaatc

SEQ ID NO: 52864 - DNA, 15 bp, Homo sapiens
tcctccaaatttaat

SEQ ID NO: 52865 - DNA, 15 bp, Homo sapiens
atcctccaaatttaa

SEQ ID NO: 52866 - DNA, 15 bp, Homo sapiens
tatcctccaaattta

SEQ ID NO: 52867 - DNA, 15 bp, Homo sapiens
ttatcctccaaattt

SEQ ID NO: 52868 - DNA, 15 bp, Homo sapiens
cttatcctccaaatt

SEQ ID NO: 52869 - DNA, 15 bp, Homo sapiens
ccttatcctccaaat

SEQ ID NO: 52870 - DNA, 15 bp, Homo sapiens
accttatcctccaaa

SEQ ID NO: 52871 - DNA, 15 bp, Homo sapiens
taccttatcctccaa

SEQ ID NO: 52872 - DNA, 15 bp, Homo sapiens
ttaccttatcctcca

SEQ ID NO: 52873 - DNA, 15 bp, Homo sapiens
tttaccttatcctcc

SEQ ID NO: 52874 - DNA, 15 bp, Homo sapiens
ctttaccttatcctc

SEQ ID NO: 52875 - DNA, 15 bp, Homo sapiens
tctttaccttatcct

SEQ ID NO: 52876 - DNA, 15 bp, Homo sapiens
ctctttaccttatcc

SEQ ID NO: 52877 - DNA, 15 bp, Homo sapiens
tctctttaccttatc

SEQ ID NO: 52878 - DNA, 15 bp, Homo sapiens
ttctctttaccttat

SEQ ID NO: 52879 - DNA, 15 bp, Homo sapiens
tttctctttacctta

SEQ ID NO: 52880 - DNA, 15 bp, Homo sapiens
atttctctttacctt

SEQ ID NO: 52881 - DNA, 15 bp, Homo sapiens
aatttctctttacct

SEQ ID NO: 52882 - DNA, 15 bp, Homo sapiens
caatttctctttacc

SEQ ID NO: 52883 - DNA, 15 bp, Homo sapiens
tcaatttctctttac

SEQ ID NO: 52884 - DNA, 15 bp, Homo sapiens
ttcaatttctcttta

SEQ ID NO: 52885 - DNA, 15 bp, Homo sapiens
cttcaatttctcttt

SEQ ID NO: 52886 - DNA, 15 bp, Homo sapiens
ccttcaatttctctt

SEQ ID NO: 52887 - DNA, 15 bp, Homo sapiens
tccttcaatttctct

SEQ ID NO: 52888 - DNA, 15 bp, Homo sapiens
ctccttcaatttctc

SEQ ID NO: 52889 - DNA, 15 bp, Homo sapiens
actccttcaatttct

SEQ ID NO: 52890 - DNA, 15 bp, Homo sapiens
cactccttcaatttc

SEQ ID NO: 52891 - DNA, 15 bp, Homo sapiens
tcactccttcaattt

SEQ ID NO: 52892 - DNA, 15 bp, Homo sapiens
gtcactccttcaatt

SEQ ID NO: 52893 - DNA, 15 bp, Homo sapiens
tgtcactccttcaat

SEQ ID NO: 52894 - DNA, 15 bp, Homo sapiens
gtgtcactccttcaa

SEQ ID NO: 52895 - DNA, 15 bp, Homo sapiens
agtgtcactccttca

SEQ ID NO: 52896 - DNA, 15 bp, Homo sapiens
aagtgtcactccttc

SEQ ID NO: 52897 - DNA, 15 bp, Homo sapiens
caagtgtcactcctt

SEQ ID NO: 52898 - DNA, 15 bp, Homo sapiens
ccaagtgtcactcct

SEQ ID NO: 52899 - DNA, 15 bp, Homo sapiens
cccaagtgtcactcc

SEQ ID NO: 52900 - DNA, 15 bp, Homo sapiens
acccaagtgtcactc

SEQ ID NO: 52901 - DNA, 15 bp, Homo sapiens
aacccaagtgtcact

SEQ ID NO: 52902 - DNA, 15 bp, Homo sapiens
aaacccaagtgtcac

SEQ ID NO: 52903 - DNA, 15 bp, Homo sapiens
aaaacccaagtgtca

SEQ ID NO: 52904 - DNA, 15 bp, Homo sapiens
caaaacccaagtgtc

SEQ ID NO: 52905 - DNA, 15 bp, Homo sapiens
ccaaaacccaagtgt

SEQ ID NO: 52906 - DNA, 15 bp, Homo sapiens
gccaaaacccaagtg

SEQ ID NO: 52907 - DNA, 15 bp, Homo sapiens
agccaaaacccaagt

SEQ ID NO: 52908 - DNA, 15 bp, Homo sapiens
aagccaaaacccaag

SEQ ID NO: 52909 - DNA, 15 bp, Homo sapiens
caagccaaaacccaa

SEQ ID NO: 52910 - DNA, 15 bp, Homo sapiens
tcaagccaaaaccca

SEQ ID NO: 52911 - DNA, 15 bp, Homo sapiens
ttcaagccaaaaccc

SEQ ID NO: 52912 - DNA, 15 bp, Homo sapiens
gttcaagccaaaacc

SEQ ID NO: 52913 - DNA, 15 bp, Homo sapiens
tgttcaagccaaaac

SEQ ID NO: 52914 - DNA, 15 bp, Homo sapiens
ttgttcaagccaaaa

SEQ ID NO: 52915 - DNA, 15 bp, Homo sapiens
attgttcaagccaaa

SEQ ID NO: 52916 - DNA, 15 bp, Homo sapiens
tattgttcaagccaa

SEQ ID NO: 52917 - DNA, 15 bp, Homo sapiens
ctattgttcaagcca

SEQ ID NO: 52918 - DNA, 15 bp, Homo sapiens
tctattgttcaagcc

SEQ ID NO: 52919 - DNA, 15 bp, Homo sapiens
atctattgttcaagc

SEQ ID NO: 52920 - DNA, 15 bp, Homo sapiens
gatctattgttcaag

SEQ ID NO: 52921 - DNA, 15 bp, Homo sapiens
agatctattgttcaa

SEQ ID NO: 52922 - DNA, 15 bp, Homo sapiens
aagatctattgttca

SEQ ID NO: 52923 - DNA, 15 bp, Homo sapiens
caagatctattgttc

SEQ ID NO: 52924 - DNA, 15 bp, Homo sapiens
acaagatctattgtt

SEQ ID NO: 52925 - DNA, 15 bp, Homo sapiens
aacaagatctattgt

SEQ ID NO: 52926 - DNA, 15 bp, Homo sapiens
taacaagatctattg

SEQ ID NO: 52927 - DNA, 15 bp, Homo sapiens
ctaacaagatctatt

SEQ ID NO: 52928 - DNA, 15 bp, Homo sapiens
actaacaagatctat

SEQ ID NO: 52929 - DNA, 15 bp, Homo sapiens
tactaacaagatcta

SEQ ID NO: 52930 - DNA, 15 bp, Homo sapiens
ttactaacaagatct

SEQ ID NO: 52931 - DNA, 15 bp, Homo sapiens
attactaacaagatc

SEQ ID NO: 52932 - DNA, 15 bp, Homo sapiens
tattactaacaagat

SEQ ID NO: 52933 - DNA, 15 bp, Homo sapiens
atattactaacaaga

SEQ ID NO: 52934 - DNA, 15 bp, Homo sapiens
aatattactaacaag

SEQ ID NO: 52935 - DNA, 15 bp, Homo sapiens
taatattactaacaa

SEQ ID NO: 52936 - DNA, 15 bp, Homo sapiens
ttaatattactaaca

SEQ ID NO: 52937 - DNA, 15 bp, Homo sapiens
tttaatattactaac

SEQ ID NO: 52938 - DNA, 15 bp, Homo sapiens
atttaatattactaa

SEQ ID NO: 52939 - DNA, 15 bp, Homo sapiens
aatttaatattacta

SEQ ID NO: 52940 - DNA, 15 bp, Homo sapiens
taatttaatattact

SEQ ID NO: 52941 - DNA, 15 bp, Homo sapiens
ctaatttaatattac

SEQ ID NO: 52942 - DNA, 15 bp, Homo sapiens
tctaatttaatatta

SEQ ID NO: 52943 - DNA, 15 bp, Homo sapiens
atctaatttaatatt

SEQ ID NO: 52944 - DNA, 15 bp, Homo sapiens
catctaatttaatat

SEQ ID NO: 52945 - DNA, 15 bp, Homo sapiens
tcatctaatttaata

SEQ ID NO: 52946 - DNA, 15 bp, Homo sapiens
ttcatctaatttaat

SEQ ID NO: 52947 - DNA, 15 bp, Homo sapiens
cttcatctaatttaa

SEQ ID NO: 52948 - DNA, 15 bp, Homo sapiens
tcttcatctaattta

SEQ ID NO: 52949 - DNA, 15 bp, Homo sapiens
ttcttcatctaattt

SEQ ID NO: 52950 - DNA, 15 bp, Homo sapiens
cttcttcatctaatt

SEQ ID NO: 52951 - DNA, 15 bp, Homo sapiens
ccttcttcatctaat

SEQ ID NO: 52952 - DNA, 15 bp, Homo sapiens
gccttcttcatctaa

SEQ ID NO: 52953 - DNA, 15 bp, Homo sapiens
tgccttcttcatcta

SEQ ID NO: 52954 - DNA, 15 bp, Homo sapiens
atgccttcttcatct

SEQ ID NO: 52955 - DNA, 15 bp, Homo sapiens
catgccttcttcatc

SEQ ID NO: 52956 - DNA, 15 bp, Homo sapiens
ccatgccttcttcat

SEQ ID NO: 52957 - DNA, 15 bp, Homo sapiens
accatgccttcttca

SEQ ID NO: 52958 - DNA, 15 bp, Homo sapiens
taccatgccttcttc

SEQ ID NO: 52959 - DNA, 15 bp, Homo sapiens
ctaccatgccttctt

SEQ ID NO: 52960 - DNA, 15 bp, Homo sapiens
cctaccatgccttct

SEQ ID NO: 52961 - DNA, 15 bp, Homo sapiens
ccctaccatgccttc

SEQ ID NO: 52962 - DNA, 15 bp, Homo sapiens
tccctaccatgcctt

SEQ ID NO: 52963 - DNA, 15 bp, Homo sapiens
ttccctaccatgcct

SEQ ID NO: 52964 - DNA, 15 bp, Homo sapiens
attccctaccatgcc

SEQ ID NO: 52965 - DNA, 15 bp, Homo sapiens
tattccctaccatgc

SEQ ID NO: 52966 - DNA, 15 bp, Homo sapiens
atattccctaccatg

SEQ ID NO: 52967 - DNA, 15 bp, Homo sapiens
catattccctaccat

SEQ ID NO: 52968 - DNA, 15 bp, Homo sapiens
ccatattccctacca

SEQ ID NO: 52969 - DNA, 15 bp, Homo sapiens
cccatattccctacc

SEQ ID NO: 52970 - DNA, 15 bp, Homo sapiens
ccccatattccctac

SEQ ID NO: 52971 - DNA, 15 bp, Homo sapiens
cccccatattcccta

SEQ ID NO: 52972 - DNA, 15 bp, Homo sapiens
tcccccatattccct

SEQ ID NO: 52973 - DNA, 15 bp, Homo sapiens
ctcccccatattccc

SEQ ID NO: 52974 - DNA, 15 bp, Homo sapiens
actcccccatattcc

SEQ ID NO: 52975 - DNA, 15 bp, Homo sapiens
cactcccccatattc

SEQ ID NO: 52976 - DNA, 15 bp, Homo sapiens
ccactcccccatatt

SEQ ID NO: 52977 - DNA, 15 bp, Homo sapiens
cccactcccccatat

SEQ ID NO: 52978 - DNA, 15 bp, Homo sapiens
tcccactcccccata

SEQ ID NO: 52979 - DNA, 15 bp, Homo sapiens
ttcccactcccccat

SEQ ID NO: 52980 - DNA, 15 bp, Homo sapiens
tttcccactccccca

SEQ ID NO: 52981 - DNA, 15 bp, Homo sapiens
ctttcccactccccc

SEQ ID NO: 52982 - DNA, 15 bp, Homo sapiens
cctttcccactcccc

SEQ ID NO: 52983 - DNA, 15 bp, Homo sapiens
gcctttcccactccc

SEQ ID NO: 52984 - DNA, 15 bp, Homo sapiens
tgcctttcccactcc

SEQ ID NO: 52985 - DNA, 15 bp, Homo sapiens
ctgcctttcccactc

SEQ ID NO: 52986 - DNA, 15 bp, Homo sapiens
cctgcctttcccact

SEQ ID NO: 52987 - DNA, 15 bp, Homo sapiens
tcctgcctttcccac

SEQ ID NO: 52988 - DNA, 15 bp, Homo sapiens
ttcctgcctttccca

SEQ ID NO: 52989 - DNA, 15 bp, Homo sapiens
cttcctgcctttccc

SEQ ID NO: 52990 - DNA, 15 bp, Homo sapiens
gcttcctgcctttcc

SEQ ID NO: 52991 - DNA, 15 bp, Homo sapiens
tgcttcctgcctttc

SEQ ID NO: 52992 - DNA, 15 bp, Homo sapiens
ctgcttcctgccttt

SEQ ID NO: 52993 - DNA, 15 bp, Homo sapiens
cctgcttcctgcctt

SEQ ID NO: 52994 - DNA, 15 bp, Homo sapiens
tcctgcttcctgcct

SEQ ID NO: 52995 - DNA, 15 bp, Homo sapiens
ttcctgcttcctgcc

SEQ ID NO: 52996 - DNA, 15 bp, Homo sapiens
attcctgcttcctgc

SEQ ID NO: 52997 - DNA, 15 bp, Homo sapiens
cattcctgcttcctg

SEQ ID NO: 52998 - DNA, 15 bp, Homo sapiens
ccattcctgcttcct

SEQ ID NO: 52999 - DNA, 15 bp, Homo sapiens
tccattcctgcttcc

SEQ ID NO: 53000 - DNA, 15 bp, Homo sapiens
ttccattcctgcttc

SEQ ID NO: 53001 - DNA, 15 bp, Homo sapiens
gttccattcctgctt

SEQ ID NO: 53002 - DNA, 15 bp, Homo sapiens
ggttccattcctgct

SEQ ID NO: 53003 - DNA, 15 bp, Homo sapiens
tggttccattcctgc

SEQ ID NO: 53004 - DNA, 15 bp, Homo sapiens
ctggttccattcctg

SEQ ID NO: 53005 - DNA, 15 bp, Homo sapiens
cctggttccattcct

SEQ ID NO: 53006 - DNA, 15 bp, Homo sapiens
tcctggttccattcc

SEQ ID NO: 53007 - DNA, 15 bp, Homo sapiens
ttcctggttccattc

SEQ ID NO: 53008 - DNA, 15 bp, Homo sapiens
gttcctggttccatt

SEQ ID NO: 53009 - DNA, 15 bp, Homo sapiens
agttcctggttccat

SEQ ID NO: 53010 - DNA, 15 bp, Homo sapiens
gagttcctggttcca

SEQ ID NO: 53011 - DNA, 15 bp, Homo sapiens
agagttcctggttcc

SEQ ID NO: 53012 - DNA, 15 bp, Homo sapiens
cagagttcctggttc

SEQ ID NO: 53013 - DNA, 15 bp, Homo sapiens
acagagttcctggtt

SEQ ID NO: 53014 - DNA, 15 bp, Homo sapiens
aacagagttcctggt

SEQ ID NO: 53015 - DNA, 15 bp, Homo sapiens
aaacagagttcctgg

SEQ ID NO: 53016 - DNA, 15 bp, Homo sapiens
aaaacagagttcctg

SEQ ID NO: 53017 - DNA, 15 bp, Homo sapiens
taaaacagagttcct

SEQ ID NO: 53018 - DNA, 15 bp, Homo sapiens
ctaaaacagagttcc

SEQ ID NO: 53019 - DNA, 15 bp, Homo sapiens
tctaaaacagagttc

SEQ ID NO: 53020 - DNA, 15 bp, Homo sapiens
atctaaaacagagtt

SEQ ID NO: 53021 - DNA, 15 bp, Homo sapiens
catctaaaacagagt

SEQ ID NO: 53022 - DNA, 15 bp, Homo sapiens
acatctaaaacagag

SEQ ID NO: 53023 - DNA, 15 bp, Homo sapiens
cacatctaaaacaga

SEQ ID NO: 53024 - DNA, 15 bp, Homo sapiens
tcacatctaaaacag

SEQ ID NO: 53025 - DNA, 15 bp, Homo sapiens
ctcacatctaaaaca

SEQ ID NO: 53026 - DNA, 15 bp, Homo sapiens
tctcacatctaaaac

SEQ ID NO: 53027 - DNA, 15 bp, Homo sapiens
ttctcacatctaaaa

SEQ ID NO: 53028 - DNA, 15 bp, Homo sapiens
attctcacatctaaa

SEQ ID NO: 53029 - DNA, 15 bp, Homo sapiens
aattctcacatctaa

SEQ ID NO: 53030 - DNA, 15 bp, Homo sapiens
aaattctcacatcta

SEQ ID NO: 53031 - DNA, 15 bp, Homo sapiens
caaattctcacatct

SEQ ID NO: 53032 - DNA, 15 bp, Homo sapiens
acaaattctcacatc

SEQ ID NO: 53033 - DNA, 15 bp, Homo sapiens
aacaaattctcacat

SEQ ID NO: 53034 - DNA, 15 bp, Homo sapiens
caacaaattctcaca

SEQ ID NO: 53035 - DNA, 15 bp, Homo sapiens
acaacaaattctcac

SEQ ID NO: 53036 - DNA, 15 bp, Homo sapiens
aacaacaaattctca

SEQ ID NO: 53037 - DNA, 15 bp, Homo sapiens
caacaacaaattctc

SEQ ID NO: 53038 - DNA, 15 bp, Homo sapiens
acaacaacaaattct

SEQ ID NO: 53039 - DNA, 15 bp, Homo sapiens
aacaacaacaaattc

SEQ ID NO: 53040 - DNA, 15 bp, Homo sapiens
caacaacaacaaatt

SEQ ID NO: 53041 - DNA, 15 bp, Homo sapiens
acaacaacaacaaat

SEQ ID NO: 53042 - DNA, 15 bp, Homo sapiens
aacaacaacaacaaa

SEQ ID NO: 53043 - DNA, 15 bp, Homo sapiens
caacaacaacaacaa

SEQ ID NO: 53044 - DNA, 15 bp, Homo sapiens
acaacaacaacaaca

SEQ ID NO: 53045 - DNA, 15 bp, Homo sapiens
aacaacaacaacaac

SEQ ID NO: 53046 - DNA, 15 bp, Homo sapiens
cacaacaacaacaac

SEQ ID NO: 53047 - DNA, 15 bp, Homo sapiens
tcacaacaacaacaa

SEQ ID NO: 53048 - DNA, 15 bp, Homo sapiens
gtcacaacaacaaca

SEQ ID NO: 53049 - DNA, 15 bp, Homo sapiens
tgtcacaacaacaac

SEQ ID NO: 53050 - DNA, 15 bp, Homo sapiens
ctgtcacaacaacaa

SEQ ID NO: 53051 - DNA, 15 bp, Homo sapiens
gctgtcacaacaaca

SEQ ID NO: 53052 - DNA, 15 bp, Homo sapiens
tgctgtcacaacaac

SEQ ID NO: 53053 - DNA, 15 bp, Homo sapiens
atgctgtcacaacaa

SEQ ID NO: 53054 - DNA, 15 bp, Homo sapiens
gatgctgtcacaaca

SEQ ID NO: 53055 - DNA, 15 bp, Homo sapiens
agatgctgtcacaac

SEQ ID NO: 53056 - DNA, 15 bp, Homo sapiens
gagatgctgtcacaa

SEQ ID NO: 53057 - DNA, 15 bp, Homo sapiens
cgagatgctgtcaca

SEQ ID NO: 53058 - DNA, 15 bp, Homo sapiens
acgagatgctgtcac

SEQ ID NO: 53059 - DNA, 15 bp, Homo sapiens
aacgagatgctgtca

SEQ ID NO: 53060 - DNA, 15 bp, Homo sapiens
gaacgagatgctgtc

SEQ ID NO: 53061 - DNA, 15 bp, Homo sapiens
agaacgagatgctgt

SEQ ID NO: 53062 - DNA, 15 bp, Homo sapiens
cagaacgagatgctg

SEQ ID NO: 53063 - DNA, 15 bp, Homo sapiens
acagaacgagatgct

SEQ ID NO: 53064 - DNA, 15 bp, Homo sapiens
aacagaacgagatgc

SEQ ID NO: 53065 - DNA, 15 bp, Homo sapiens
caacagaacgagatg

SEQ ID NO: 53066 - DNA, 15 bp, Homo sapiens
gcaacagaacgagat

SEQ ID NO: 53067 - DNA, 15 bp, Homo sapiens
ggcaacagaacgaga

SEQ ID NO: 53068 - DNA, 15 bp, Homo sapiens
gggcaacagaacgag

SEQ ID NO: 53069 - DNA, 15 bp, Homo sapiens
tgggcaacagaacga

SEQ ID NO: 53070 - DNA, 15 bp, Homo sapiens
ctgggcaacagaacg

SEQ ID NO: 53071 - DNA, 15 bp, Homo sapiens
tagcctgggcaacag

SEQ ID NO: 53072 - DNA, 15 bp, Homo sapiens
ctagcctgggcaaca

SEQ ID NO: 53073 - DNA, 15 bp, Homo sapiens
tctagcctgggcaac

SEQ ID NO: 53074 - DNA, 15 bp, Homo sapiens
ctctagcctgggcaa

SEQ ID NO: 53075 - DNA, 15 bp, Homo sapiens
actctagcctgggca

SEQ ID NO: 53076 - DNA, 15 bp, Homo sapiens
atgcactctagcctg

SEQ ID NO: 53077 - DNA, 15 bp, Homo sapiens
catgcactctagcct

SEQ ID NO: 53078 - DNA, 15 bp, Homo sapiens
ccatgcactctagcc

SEQ ID NO: 53079 - DNA, 15 bp, Homo sapiens
tccatgcactctagc

SEQ ID NO: 53080 - DNA, 15 bp, Homo sapiens
ctccatgcactctag

SEQ ID NO: 53081 - DNA, 15 bp, Homo sapiens
actccatgcactcta

SEQ ID NO: 53082 - DNA, 15 bp, Homo sapiens
cactccatgcactct

SEQ ID NO: 53083 - DNA, 15 bp, Homo sapiens
gcactccatgcactc

SEQ ID NO: 53084 - DNA, 15 bp, Homo sapiens
cgcactccatgcact

SEQ ID NO: 53085 - DNA, 15 bp, Homo sapiens
ccgcactccatgcac

SEQ ID NO: 53086 - DNA, 15 bp, Homo sapiens
accgcactccatgca

SEQ ID NO: 53087 - DNA, 15 bp, Homo sapiens
taccgcactccatgc

SEQ ID NO: 53088 - DNA, 15 bp, Homo sapiens
ctaccgcactccatg

SEQ ID NO: 53089 - DNA, 15 bp, Homo sapiens
gctaccgcactccat

SEQ ID NO: 53090 - DNA, 15 bp, Homo sapiens
tgctaccgcactcca

SEQ ID NO: 53091 - DNA, 15 bp, Homo sapiens
gtgctaccgcactcc

SEQ ID NO: 53092 - DNA, 15 bp, Homo sapiens
cgtgctaccgcactc

SEQ ID NO: 53093 - DNA, 15 bp, Homo sapiens
tcgtgctaccgcact

SEQ ID NO: 53094 - DNA, 15 bp, Homo sapiens
atcgtgctaccgcac

SEQ ID NO: 53095 - DNA, 15 bp, Homo sapiens
gatcgtgctaccgca

SEQ ID NO: 53096 - DNA, 15 bp, Homo sapiens
agatcgtgctaccgc

SEQ ID NO: 53097 - DNA, 15 bp, Homo sapiens
gagatcgtgctaccg

SEQ ID NO: 53098 - DNA, 15 bp, Homo sapiens
tgagatcgtgctacc

SEQ ID NO: 53099 - DNA, 15 bp, Homo sapiens
ctgagatcgtgctac

SEQ ID NO: 53100 - DNA, 15 bp, Homo sapiens
gctgagatcgtgcta

SEQ ID NO: 53101 - DNA, 15 bp, Homo sapiens
agctgagatcgtgct

SEQ ID NO: 53102 - DNA, 15 bp, Homo sapiens
gagtgagctgagatc

SEQ ID NO: 53103 - DNA, 15 bp, Homo sapiens
ggagtgagctgagat

SEQ ID NO: 53104 - DNA, 15 bp, Homo sapiens
tggagtgagctgaga

SEQ ID NO: 53105 - DNA, 15 bp, Homo sapiens
ttggagtgagctgag

SEQ ID NO: 53106 - DNA, 15 bp, Homo sapiens
gttggagtgagctga

SEQ ID NO: 53107 - DNA, 15 bp, Homo sapiens
ggttggagtgagctg

SEQ ID NO: 53108 - DNA, 15 bp, Homo sapiens
aggttggagtgagct

SEQ ID NO: 53109 - DNA, 15 bp, Homo sapiens
gaggttggagtgagc

SEQ ID NO: 53110 - DNA, 15 bp, Homo sapiens
ggaggttggagtgag

SEQ ID NO: 53111 - DNA, 15 bp, Homo sapiens
cggaggttggagtga

SEQ ID NO: 53112 - DNA, 15 bp, Homo sapiens
gcggaggttggagtg

SEQ ID NO: 53113 - DNA, 15 bp, Homo sapiens
ggcggaggttggagt

SEQ ID NO: 53114 - DNA, 15 bp, Homo sapiens
aggcggaggttggag

SEQ ID NO: 53115 - DNA, 15 bp, Homo sapiens
gaggcggaggttgga

SEQ ID NO: 53116 - DNA, 15 bp, Homo sapiens
ggaggcggaggttgg

SEQ ID NO: 53117 - DNA, 15 bp, Homo sapiens
accgggaggcggagg

SEQ ID NO: 53118 - DNA, 15 bp, Homo sapiens
aaccgggaggcggag

SEQ ID NO: 53119 - DNA, 15 bp, Homo sapiens
gaaccgggaggcgga

SEQ ID NO: 53120 - DNA, 15 bp, Homo sapiens
tgaaccgggaggcgg

SEQ ID NO: 53121 - DNA, 15 bp, Homo sapiens
ttgaaccgggaggcg

SEQ ID NO: 53122 - DNA, 15 bp, Homo sapiens
cttgaaccgggaggc

SEQ ID NO: 53123 - DNA, 15 bp, Homo sapiens
acttgaaccgggagg

SEQ ID NO: 53124 - DNA, 15 bp, Homo sapiens
cacttgaaccgggag

SEQ ID NO: 53125 - DNA, 15 bp, Homo sapiens
tcacttgaaccggga

SEQ ID NO: 53126 - DNA, 15 bp, Homo sapiens
atcacttgaaccggg

SEQ ID NO: 53127 - DNA, 15 bp, Homo sapiens
aatcacttgaaccgg

SEQ ID NO: 53128 - DNA, 15 bp, Homo sapiens
aaatcacttgaaccg

SEQ ID NO: 53129 - DNA, 15 bp, Homo sapiens
aaaatcacttgaacc

SEQ ID NO: 53130 - DNA, 15 bp, Homo sapiens
gaaaatcacttgaac

SEQ ID NO: 53131 - DNA, 15 bp, Homo sapiens
ggaaaatcacttgaa

SEQ ID NO: 53132 - DNA, 15 bp, Homo sapiens
aggaaaatcacttga

SEQ ID NO: 53133 - DNA, 15 bp, Homo sapiens
caggaaaatcacttg

SEQ ID NO: 53134 - DNA, 15 bp, Homo sapiens
gcaggaaaatcactt

SEQ ID NO: 53135 - DNA, 15 bp, Homo sapiens
ggcaggaaaatcact

SEQ ID NO: 53136 - DNA, 15 bp, Homo sapiens
aggcaggaaaatcac

SEQ ID NO: 53137 - DNA, 15 bp, Homo sapiens
gaggcaggaaaatca

SEQ ID NO: 53138 - DNA, 15 bp, Homo sapiens
tgaggcaggaaaatc

SEQ ID NO: 53139 - DNA, 15 bp, Homo sapiens
aggtgcctgtaatcc

SEQ ID NO: 53140 - DNA, 15 bp, Homo sapiens
caggtgcctgtaatc

SEQ ID NO: 53141 - DNA, 15 bp, Homo sapiens
gcaggtgcctgtaat

SEQ ID NO: 53142 - DNA, 15 bp, Homo sapiens
ggcaggtgcctgtaa

SEQ ID NO: 53143 - DNA, 15 bp, Homo sapiens
tggcaggtgcctgta

SEQ ID NO: 53144 - DNA, 15 bp, Homo sapiens
gtggcaggtgcctgt

SEQ ID NO: 53145 - DNA, 15 bp, Homo sapiens
tgtggcaggtgcctg

SEQ ID NO: 53146 - DNA, 15 bp, Homo sapiens
ttgtggcaggtgcct

SEQ ID NO: 53147 - DNA, 15 bp, Homo sapiens
attgtggcaggtgcc

SEQ ID NO: 53148 - DNA, 15 bp, Homo sapiens
cattgtggcaggtgc

SEQ ID NO: 53149 - DNA, 15 bp, Homo sapiens
gcattgtggcaggtg

SEQ ID NO: 53150 - DNA, 15 bp, Homo sapiens
ggcattgtggcaggt

SEQ ID NO: 53151 - DNA, 15 bp, Homo sapiens
aggcattgtggcagg

SEQ ID NO: 53152 - DNA, 15 bp, Homo sapiens
caggcattgtggcag

SEQ ID NO: 53153 - DNA, 15 bp, Homo sapiens
ccaggcattgtggca

SEQ ID NO: 53154 - DNA, 15 bp, Homo sapiens
gccaggcattgtggc

SEQ ID NO: 53155 - DNA, 15 bp, Homo sapiens
agccaggcattgtgg

SEQ ID NO: 53156 - DNA, 15 bp, Homo sapiens
tagccaggcattgtg

SEQ ID NO: 53157 - DNA, 15 bp, Homo sapiens
ttagccaggcattgt

SEQ ID NO: 53158 - DNA, 15 bp, Homo sapiens
attagccaggcattg

SEQ ID NO: 53159 - DNA, 15 bp, Homo sapiens
tattagccaggcatt

SEQ ID NO: 53160 - DNA, 15 bp, Homo sapiens
gtattagccaggcat

SEQ ID NO: 53161 - DNA, 15 bp, Homo sapiens
agtattagccaggca

SEQ ID NO: 53162 - DNA, 15 bp, Homo sapiens
aagtattagccaggc

SEQ ID NO: 53163 - DNA, 15 bp, Homo sapiens
caagtattagccagg

SEQ ID NO: 53164 - DNA, 15 bp, Homo sapiens
acaagtattagccag

SEQ ID NO: 53165 - DNA, 15 bp, Homo sapiens
tacaagtattagcca

SEQ ID NO: 53166 - DNA, 15 bp, Homo sapiens
atacaagtattagcc

SEQ ID NO: 53167 - DNA, 15 bp, Homo sapiens
aatacaagtattagc

SEQ ID NO: 53168 - DNA, 15 bp, Homo sapiens
aaatacaagtattag

SEQ ID NO: 53169 - DNA, 15 bp, Homo sapiens
aaaatacaagtatta

SEQ ID NO: 53170 - DNA, 15 bp, Homo sapiens
aaaaatacaagtatt

SEQ ID NO: 53171 - DNA, 15 bp, Homo sapiens
taaaaatacaagtat

SEQ ID NO: 53172 - DNA, 15 bp, Homo sapiens
ctaaaaatacaagta

SEQ ID NO: 53173 - DNA, 15 bp, Homo sapiens
actaaaaatacaagt

SEQ ID NO: 53174 - DNA, 15 bp, Homo sapiens
tactaaaaatacaag

SEQ ID NO: 53175 - DNA, 15 bp, Homo sapiens
atggtaaaaccccat

SEQ ID NO: 53176 - DNA, 15 bp, Homo sapiens
catggtaaaacccca

SEQ ID NO: 53177 - DNA, 15 bp, Homo sapiens
acatggtaaaacccc

SEQ ID NO: 53178 - DNA, 15 bp, Homo sapiens
aacatggtaaaaccc

SEQ ID NO: 53179 - DNA, 15 bp, Homo sapiens
ccaacatggtaaaac

SEQ ID NO: 53180 - DNA, 15 bp, Homo sapiens
gccaacatggtaaaa

SEQ ID NO: 53181 - DNA, 15 bp, Homo sapiens
ggccaacatggtaaa

SEQ ID NO: 53182 - DNA, 15 bp, Homo sapiens
tggccaacatggtaa

SEQ ID NO: 53183 - DNA, 15 bp, Homo sapiens
ctggccaacatggta

SEQ ID NO: 53184 - DNA, 15 bp, Homo sapiens
taagaccagcctggc

SEQ ID NO: 53185 - DNA, 15 bp, Homo sapiens
ttaagaccagcctgg

SEQ ID NO: 53186 - DNA, 15 bp, Homo sapiens
tttaagaccagcctg

SEQ ID NO: 53187 - DNA, 15 bp, Homo sapiens
gtttaagaccagcct

SEQ ID NO: 53188 - DNA, 15 bp, Homo sapiens
agtttaagaccagcc

SEQ ID NO: 53189 - DNA, 15 bp, Homo sapiens
gagtttaagaccagc

SEQ ID NO: 53190 - DNA, 15 bp, Homo sapiens
ggagtttaagaccag

SEQ ID NO: 53191 - DNA, 15 bp, Homo sapiens
aggagtttaagacca

SEQ ID NO: 53192 - DNA, 15 bp, Homo sapiens
caggagtttaagacc

SEQ ID NO: 53193 - DNA, 15 bp, Homo sapiens
tcaggagtttaagac

SEQ ID NO: 53194 - DNA, 15 bp, Homo sapiens
gtcaggagtttaaga

SEQ ID NO: 53195 - DNA, 15 bp, Homo sapiens
ggtcaggagtttaag

SEQ ID NO: 53196 - DNA, 15 bp, Homo sapiens
aggtcaggagtttaa

SEQ ID NO: 53197 - DNA, 15 bp, Homo sapiens
gaggtcaggagttta

SEQ ID NO: 53198 - DNA, 15 bp, Homo sapiens
tacctgaggtcagga

SEQ ID NO: 53199 - DNA, 15 bp, Homo sapiens
ttacctgaggtcagg

SEQ ID NO: 53200 - DNA, 15 bp, Homo sapiens
attacctgaggtcag

SEQ ID NO: 53201 - DNA, 15 bp, Homo sapiens
gattacctgaggtca

SEQ ID NO: 53202 - DNA, 15 bp, Homo sapiens
ggattacctgaggtc

SEQ ID NO: 53203 - DNA, 15 bp, Homo sapiens
tggattacctgaggt

SEQ ID NO: 53204 - DNA, 15 bp, Homo sapiens
gtggattacctgagg

SEQ ID NO: 53205 - DNA, 15 bp, Homo sapiens
ggtggattacctgag

SEQ ID NO: 53206 - DNA, 15 bp, Homo sapiens
gggtggattacctga

SEQ ID NO: 53207 - DNA, 15 bp, Homo sapiens
tgggtggattacctg

SEQ ID NO: 53208 - DNA, 15 bp, Homo sapiens
gtgggtggattacct

SEQ ID NO: 53209 - DNA, 15 bp, Homo sapiens
ggtgggtggattacc

SEQ ID NO: 53210 - DNA, 15 bp, Homo sapiens
aggtgggtggattac

SEQ ID NO: 53211 - DNA, 15 bp, Homo sapiens
gaggtgggtggatta

SEQ ID NO: 53212 - DNA, 15 bp, Homo sapiens
cgaggtgggtggatt

SEQ ID NO: 53213 - DNA, 15 bp, Homo sapiens
gcaatcccagcactt

SEQ ID NO: 53214 - DNA, 15 bp, Homo sapiens
tgcaatcccagcact

SEQ ID NO: 53215 - DNA, 15 bp, Homo sapiens
ctgcaatcccagcac

SEQ ID NO: 53216 - DNA, 15 bp, Homo sapiens
cctgcaatcccagca

SEQ ID NO: 53217 - DNA, 15 bp, Homo sapiens
acctgcaatcccagc

SEQ ID NO: 53218 - DNA, 15 bp, Homo sapiens
cacctgcaatcccag

SEQ ID NO: 53219 - DNA, 15 bp, Homo sapiens
acacctgcaatccca

SEQ ID NO: 53220 - DNA, 15 bp, Homo sapiens
cacacctgcaatccc

SEQ ID NO: 53221 - DNA, 15 bp, Homo sapiens
tcacacctgcaatcc

SEQ ID NO: 53222 - DNA, 15 bp, Homo sapiens
ctcacacctgcaatc

SEQ ID NO: 53223 - DNA, 15 bp, Homo sapiens
gctcacacctgcaat

SEQ ID NO: 53224 - DNA, 15 bp, Homo sapiens
ggctcacacctgcaa

SEQ ID NO: 53225 - DNA, 15 bp, Homo sapiens
tggctcacacctgca

SEQ ID NO: 53226 - DNA, 15 bp, Homo sapiens
gtggctcacacctgc

SEQ ID NO: 53227 - DNA, 15 bp, Homo sapiens
atctggccgggcaca

SEQ ID NO: 53228 - DNA, 15 bp, Homo sapiens
catctggccgggcac

SEQ ID NO: 53229 - DNA, 15 bp, Homo sapiens
gcatctggccgggca

SEQ ID NO: 53230 - DNA, 15 bp, Homo sapiens
tgcatctggccgggc

SEQ ID NO: 53231 - DNA, 15 bp, Homo sapiens
atgcatctggccggg

SEQ ID NO: 53232 - DNA, 15 bp, Homo sapiens
catgcatctggccgg

SEQ ID NO: 53233 - DNA, 15 bp, Homo sapiens
tcatgcatctggccg

SEQ ID NO: 53234 - DNA, 15 bp, Homo sapiens
ttcatgcatctggcc

SEQ ID NO: 53235 - DNA, 15 bp, Homo sapiens
attcatgcatctggc

SEQ ID NO: 53236 - DNA, 15 bp, Homo sapiens
aattcatgcatctgg

SEQ ID NO: 53237 - DNA, 15 bp, Homo sapiens
aaattcatgcatctg

SEQ ID NO: 53238 - DNA, 15 bp, Homo sapiens
aaaattcatgcatct

SEQ ID NO: 53239 - DNA, 15 bp, Homo sapiens
caaaattcatgcatc

SEQ ID NO: 53240 - DNA, 15 bp, Homo sapiens
tcaaaattcatgcat

SEQ ID NO: 53241 - DNA, 15 bp, Homo sapiens
ctcaaaattcatgca

SEQ ID NO: 53242 - DNA, 15 bp, Homo sapiens
tctcaaaattcatgc

SEQ ID NO: 53243 - DNA, 15 bp, Homo sapiens
atctcaaaattcatg

SEQ ID NO: 53244 - DNA, 15 bp, Homo sapiens
catctcaaaattcat

SEQ ID NO: 53245 - DNA, 15 bp, Homo sapiens
acatctcaaaattca

SEQ ID NO: 53246 - DNA, 15 bp, Homo sapiens
tacatctcaaaattc

SEQ ID NO: 53247 - DNA, 15 bp, Homo sapiens
atacatctcaaaatt

SEQ ID NO: 53248 - DNA, 15 bp, Homo sapiens
tatacatctcaaaat

SEQ ID NO: 53249 - DNA, 15 bp, Homo sapiens
gtatacatctcaaaa

SEQ ID NO: 53250 - DNA, 15 bp, Homo sapiens
agtatacatctcaaa

SEQ ID NO: 53251 - DNA, 15 bp, Homo sapiens
tagtatacatctcaa

SEQ ID NO: 53252 - DNA, 15 bp, Homo sapiens
ctagtatacatctca

SEQ ID NO: 53253 - DNA, 15 bp, Homo sapiens
tctagtatacatctc

SEQ ID NO: 53254 - DNA, 15 bp, Homo sapiens
gtctagtatacatct

SEQ ID NO: 53255 - DNA, 15 bp, Homo sapiens
agtctagtatacatc

SEQ ID NO: 53256 - DNA, 15 bp, Homo sapiens
aagtctagtatacat

SEQ ID NO: 53257 - DNA, 15 bp, Homo sapiens
gaagtctagtataca

SEQ ID NO: 53258 - DNA, 15 bp, Homo sapiens
agaagtctagtatac

SEQ ID NO: 53259 - DNA, 15 bp, Homo sapiens
cagaagtctagtata

SEQ ID NO: 53260 - DNA, 15 bp, Homo sapiens
ccagaagtctagtat

SEQ ID NO: 53261 - DNA, 15 bp, Homo sapiens
tccagaagtctagta

SEQ ID NO: 53262 - DNA, 15 bp, Homo sapiens
atccagaagtctagt

SEQ ID NO: 53263 - DNA, 15 bp, Homo sapiens
tatccagaagtctag

SEQ ID NO: 53264 - DNA, 15 bp, Homo sapiens
ctatccagaagtcta

SEQ ID NO: 53265 - DNA, 15 bp, Homo sapiens
tctatccagaagtct

SEQ ID NO: 53266 - DNA, 15 bp, Homo sapiens
ctctatccagaagtc

SEQ ID NO: 53267 - DNA, 15 bp, Homo sapiens
tctctatccagaagt

SEQ ID NO: 53268 - DNA, 15 bp, Homo sapiens
ttctctatccagaag

SEQ ID NO: 53269 - DNA, 15 bp, Homo sapiens
cttctctatccagaa

SEQ ID NO: 53270 - DNA, 15 bp, Homo sapiens
acttctctatccaga

SEQ ID NO: 53271 - DNA, 15 bp, Homo sapiens
aacttctctatccag

SEQ ID NO: 53272 - DNA, 15 bp, Homo sapiens
taacttctctatcca

SEQ ID NO: 53273 - DNA, 15 bp, Homo sapiens
ttaacttctctatcc

SEQ ID NO: 53274 - DNA, 15 bp, Homo sapiens
cttaacttctctatc

SEQ ID NO: 53275 - DNA, 15 bp, Homo sapiens
acttaacttctctat

SEQ ID NO: 53276 - DNA, 15 bp, Homo sapiens
tacttaacttctcta

SEQ ID NO: 53277 - DNA, 15 bp, Homo sapiens
ctacttaacttctct

SEQ ID NO: 53278 - DNA, 15 bp, Homo sapiens
cctacttaacttctc

SEQ ID NO: 53279 - DNA, 15 bp, Homo sapiens
gcctacttaacttct

SEQ ID NO: 53280 - DNA, 15 bp, Homo sapiens
tgcctacttaacttc

SEQ ID NO: 53281 - DNA, 15 bp, Homo sapiens
ctgcctacttaactt

SEQ ID NO: 53282 - DNA, 15 bp, Homo sapiens
actgcctacttaact

SEQ ID NO: 53283 - DNA, 15 bp, Homo sapiens
aactgcctacttaac

SEQ ID NO: 53284 - DNA, 15 bp, Homo sapiens
caactgcctacttaa

SEQ ID NO: 53285 - DNA, 15 bp, Homo sapiens
ccaactgcctactta

SEQ ID NO: 53286 - DNA, 15 bp, Homo sapiens
tccaactgcctactt

SEQ ID NO: 53287 - DNA, 15 bp, Homo sapiens
gtccaactgcctact

SEQ ID NO: 53288 - DNA, 15 bp, Homo sapiens
tgtccaactgcctac

SEQ ID NO: 53289 - DNA, 15 bp, Homo sapiens
gtgtccaactgccta

SEQ ID NO: 53290 - DNA, 15 bp, Homo sapiens
tgtgtccaactgcct

SEQ ID NO: 53291 - DNA, 15 bp, Homo sapiens
atgtgtccaactgcc

SEQ ID NO: 53292 - DNA, 15 bp, Homo sapiens
aatgtgtccaactgc

SEQ ID NO: 53293 - DNA, 15 bp, Homo sapiens
caatgtgtccaactg

SEQ ID NO: 53294 - DNA, 15 bp, Homo sapiens
acaatgtgtccaact

SEQ ID NO: 53295 - DNA, 15 bp, Homo sapiens
tacaatgtgtccaac

SEQ ID NO: 53296 - DNA, 15 bp, Homo sapiens
atacaatgtgtccaa

SEQ ID NO: 53297 - DNA, 15 bp, Homo sapiens
catacaatgtgtcca

SEQ ID NO: 53298 - DNA, 15 bp, Homo sapiens
tcatacaatgtgtcc

SEQ ID NO: 53299 - DNA, 15 bp, Homo sapiens
ttcatacaatgtgtc

SEQ ID NO: 53300 - DNA, 15 bp, Homo sapiens
cttcatacaatgtgt

SEQ ID NO: 53301 - DNA, 15 bp, Homo sapiens
gcttcatacaatgtg

SEQ ID NO: 53302 - DNA, 15 bp, Homo sapiens
agcttcatacaatgt

SEQ ID NO: 53303 - DNA, 15 bp, Homo sapiens
gagcttcatacaatg

SEQ ID NO: 53304 - DNA, 15 bp, Homo sapiens
tgagcttcatacaat

SEQ ID NO: 53305 - DNA, 15 bp, Homo sapiens
ctgagcttcatacaa

SEQ ID NO: 53306 - DNA, 15 bp, Homo sapiens
cctgagcttcataca

SEQ ID NO: 53307 - DNA, 15 bp, Homo sapiens
ccctgagcttcatac

SEQ ID NO: 53308 - DNA, 15 bp, Homo sapiens
cccctgagcttcata

SEQ ID NO: 53309 - DNA, 15 bp, Homo sapiens
acccctgagcttcat

SEQ ID NO: 53310 - DNA, 15 bp, Homo sapiens
tacccctgagcttca

SEQ ID NO: 53311 - DNA, 15 bp, Homo sapiens
gtacccctgagcttc

SEQ ID NO: 53312 - DNA, 15 bp, Homo sapiens
tgtacccctgagctt

SEQ ID NO: 53313 - DNA, 15 bp, Homo sapiens
ttgtacccctgagct

SEQ ID NO: 53314 - DNA, 15 bp, Homo sapiens
cttgtacccctgagc

SEQ ID NO: 53315 - DNA, 15 bp, Homo sapiens
ccttgtacccctgag

SEQ ID NO: 53316 - DNA, 15 bp, Homo sapiens
tccttgtacccctga

SEQ ID NO: 53317 - DNA, 15 bp, Homo sapiens
ctccttgtacccctg

SEQ ID NO: 53318 - DNA, 15 bp, Homo sapiens
cctccttgtacccct

SEQ ID NO: 53319 - DNA, 15 bp, Homo sapiens
tcctccttgtacccc

SEQ ID NO: 53320 - DNA, 15 bp, Homo sapiens
gtcctccttgtaccc

SEQ ID NO: 53321 - DNA, 15 bp, Homo sapiens
agtcctccttgtacc

SEQ ID NO: 53322 - DNA, 15 bp, Homo sapiens
tagtcctccttgtac

SEQ ID NO: 53323 - DNA, 15 bp, Homo sapiens
atagtcctccttgta

SEQ ID NO: 53324 - DNA, 15 bp, Homo sapiens
catagtcctccttgt

SEQ ID NO: 53325 - DNA, 15 bp, Homo sapiens
tcatagtcctccttg

SEQ ID NO: 53326 - DNA, 15 bp, Homo sapiens
ttcatagtcctcctt

SEQ ID NO: 53327 - DNA, 15 bp, Homo sapiens
gttcatagtcctcct

SEQ ID NO: 53328 - DNA, 15 bp, Homo sapiens
tgttcatagtcctcc

SEQ ID NO: 53329 - DNA, 15 bp, Homo sapiens
atgttcatagtcctc

SEQ ID NO: 53330 - DNA, 15 bp, Homo sapiens
catgttcatagtcct

SEQ ID NO: 53331 - DNA, 15 bp, Homo sapiens
ccatgttcatagtcc

SEQ ID NO: 53332 - DNA, 15 bp, Homo sapiens
cccatgttcatagtc

SEQ ID NO: 53333 - DNA, 15 bp, Homo sapiens
tcccatgttcatagt

SEQ ID NO: 53334 - DNA, 15 bp, Homo sapiens
ctcccatgttcatag

SEQ ID NO: 53335 - DNA, 15 bp, Homo sapiens
actcccatgttcata

SEQ ID NO: 53336 - DNA, 15 bp, Homo sapiens
gactcccatgttcat

SEQ ID NO: 53337 - DNA, 15 bp, Homo sapiens
agactcccatgttca

SEQ ID NO: 53338 - DNA, 15 bp, Homo sapiens
aagactcccatgttc

SEQ ID NO: 53339 - DNA, 15 bp, Homo sapiens
gaagactcccatgtt

SEQ ID NO: 53340 - DNA, 15 bp, Homo sapiens
agaagactcccatgt

SEQ ID NO: 53341 - DNA, 15 bp, Homo sapiens
cagaagactcccatg

SEQ ID NO: 53342 - DNA, 15 bp, Homo sapiens
tcagaagactcccat

SEQ ID NO: 53343 - DNA, 15 bp, Homo sapiens
gtcagaagactccca

SEQ ID NO: 53344 - DNA, 15 bp, Homo sapiens
tgtcagaagactccc

SEQ ID NO: 53345 - DNA, 15 bp, Homo sapiens
ttgtcagaagactcc

SEQ ID NO: 53346 - DNA, 15 bp, Homo sapiens
tttgtcagaagactc

SEQ ID NO: 53347 - DNA, 15 bp, Homo sapiens
atttgtcagaagact

SEQ ID NO: 53348 - DNA, 15 bp, Homo sapiens
aatttgtcagaagac

SEQ ID NO: 53349 - DNA, 15 bp, Homo sapiens
aaatttgtcagaaga

SEQ ID NO: 53350 - DNA, 15 bp, Homo sapiens
taaatttgtcagaag

SEQ ID NO: 53351 - DNA, 15 bp, Homo sapiens
ataaatttgtcagaa

SEQ ID NO: 53352 - DNA, 15 bp, Homo sapiens
gataaatttgtcaga

SEQ ID NO: 53353 - DNA, 15 bp, Homo sapiens
tgataaatttgtcag

SEQ ID NO: 53354 - DNA, 15 bp, Homo sapiens
gtgataaatttgtca

SEQ ID NO: 53355 - DNA, 15 bp, Homo sapiens
agtgataaatttgtc

SEQ ID NO: 53356 - DNA, 15 bp, Homo sapiens
tagtgataaatttgt

SEQ ID NO: 53357 - DNA, 15 bp, Homo sapiens
ctagtgataaatttg

SEQ ID NO: 53358 - DNA, 15 bp, Homo sapiens
tctagtgataaattt

SEQ ID NO: 53359 - DNA, 15 bp, Homo sapiens
gtctagtgataaatt

SEQ ID NO: 53360 - DNA, 15 bp, Homo sapiens
agtctagtgataaat

SEQ ID NO: 53361 - DNA, 15 bp, Homo sapiens
gagtctagtgataaa

SEQ ID NO: 53362 - DNA, 15 bp, Homo sapiens
ggagtctagtgataa

SEQ ID NO: 53363 - DNA, 15 bp, Homo sapiens
aggagtctagtgata

SEQ ID NO: 53364 - DNA, 15 bp, Homo sapiens
gaggagtctagtgat

SEQ ID NO: 53365 - DNA, 15 bp, Homo sapiens
tgaggagtctagtga

SEQ ID NO: 53366 - DNA, 15 bp, Homo sapiens
atgaggagtctagtg

SEQ ID NO: 53367 - DNA, 15 bp, Homo sapiens
aatgaggagtctagt

SEQ ID NO: 53368 - DNA, 15 bp, Homo sapiens
gaatgaggagtctag

SEQ ID NO: 53369 - DNA, 15 bp, Homo sapiens
tgaatgaggagtcta

SEQ ID NO: 53370 - DNA, 15 bp, Homo sapiens
ttgaatgaggagtct

SEQ ID NO: 53371 - DNA, 15 bp, Homo sapiens
cttgaatgaggagtc

SEQ ID NO: 53372 - DNA, 15 bp, Homo sapiens
acttgaatgaggagt

SEQ ID NO: 53373 - DNA, 15 bp, Homo sapiens
tacttgaatgaggag

SEQ ID NO: 53374 - DNA, 15 bp, Homo sapiens
ttacttgaatgagga

SEQ ID NO: 53375 - DNA, 15 bp, Homo sapiens
gttacttgaatgagg

SEQ ID NO: 53376 - DNA, 15 bp, Homo sapiens
agttacttgaatgag

SEQ ID NO: 53377 - DNA, 15 bp, Homo sapiens
tagttacttgaatga

SEQ ID NO: 53378 - DNA, 15 bp, Homo sapiens
ctagttacttgaatg

SEQ ID NO: 53379 - DNA, 15 bp, Homo sapiens
cctagttacttgaat

SEQ ID NO: 53380 - DNA, 15 bp, Homo sapiens
tcctagttacttgaa

SEQ ID NO: 53381 - DNA, 15 bp, Homo sapiens
ttcctagttacttga

SEQ ID NO: 53382 - DNA, 15 bp, Homo sapiens
tttcctagttacttg

SEQ ID NO: 53383 - DNA, 15 bp, Homo sapiens
atttcctagttactt

SEQ ID NO: 53384 - DNA, 15 bp, Homo sapiens
catttcctagttact

SEQ ID NO: 53385 - DNA, 15 bp, Homo sapiens
acatttcctagttac

SEQ ID NO: 53386 - DNA, 15 bp, Homo sapiens
gacatttcctagtta

SEQ ID NO: 53387 - DNA, 15 bp, Homo sapiens
tgacatttcctagtt

SEQ ID NO: 53388 - DNA, 15 bp, Homo sapiens
ctgacatttcctagt

SEQ ID NO: 53389 - DNA, 15 bp, Homo sapiens
tctgacatttcctag

SEQ ID NO: 53390 - DNA, 15 bp, Homo sapiens
atctgacatttccta

SEQ ID NO: 53391 - DNA, 15 bp, Homo sapiens
tatctgacatttcct

SEQ ID NO: 53392 - DNA, 15 bp, Homo sapiens
atatctgacatttcc

SEQ ID NO: 53393 - DNA, 15 bp, Homo sapiens
aatatctgacatttc

SEQ ID NO: 53394 - DNA, 15 bp, Homo sapiens
gaatatctgacattt

SEQ ID NO: 53395 - DNA, 15 bp, Homo sapiens
agaatatctgacatt

SEQ ID NO: 53396 - DNA, 15 bp, Homo sapiens
aagaatatctgacat

SEQ ID NO: 53397 - DNA, 15 bp, Homo sapiens
gaagaatatctgaca

SEQ ID NO: 53398 - DNA, 15 bp, Homo sapiens
ggaagaatatctgac

SEQ ID NO: 53399 - DNA, 15 bp, Homo sapiens
gggaagaatatctga

SEQ ID NO: 53400 - DNA, 15 bp, Homo sapiens
ggggaagaatatctg

SEQ ID NO: 53401 - DNA, 15 bp, Homo sapiens
aggggaagaatatct

SEQ ID NO: 53402 - DNA, 15 bp, Homo sapiens
taggggaagaatatc

SEQ ID NO: 53403 - DNA, 15 bp, Homo sapiens
ctaggggaagaatat

SEQ ID NO: 53404 - DNA, 15 bp, Homo sapiens
actaggggaagaata

SEQ ID NO: 53405 - DNA, 15 bp, Homo sapiens
tactaggggaagaat

SEQ ID NO: 53406 - DNA, 15 bp, Homo sapiens
ttactaggggaagaa

SEQ ID NO: 53407 - DNA, 15 bp, Homo sapiens
attactaggggaaga

SEQ ID NO: 53408 - DNA, 15 bp, Homo sapiens
tattactaggggaag

SEQ ID NO: 53409 - DNA, 15 bp, Homo sapiens
ctattactaggggaa

SEQ ID NO: 53410 - DNA, 15 bp, Homo sapiens
gctattactagggga

SEQ ID NO: 53411 - DNA, 15 bp, Homo sapiens
ggctattactagggg

SEQ ID NO: 53412 - DNA, 15 bp, Homo sapiens
tggctattactaggg

SEQ ID NO: 53413 - DNA, 15 bp, Homo sapiens
ctggctattactagg

SEQ ID NO: 53414 - DNA, 15 bp, Homo sapiens
actggctattactag

SEQ ID NO: 53415 - DNA, 15 bp, Homo sapiens
cactggctattacta

SEQ ID NO: 53416 - DNA, 15 bp, Homo sapiens
ccactggctattact

SEQ ID NO: 53417 - DNA, 15 bp, Homo sapiens
accactggctattac

SEQ ID NO: 53418 - DNA, 15 bp, Homo sapiens
aaccactggctatta

SEQ ID NO: 53419 - DNA, 15 bp, Homo sapiens
taaccactggctatt

SEQ ID NO: 53420 - DNA, 15 bp, Homo sapiens
ataaccactggctat

SEQ ID NO: 53421 - DNA, 15 bp, Homo sapiens
tataaccactggcta

SEQ ID NO: 53422 - DNA, 15 bp, Homo sapiens
gtataaccactggct

SEQ ID NO: 53423 - DNA, 15 bp, Homo sapiens
agtataaccactggc

SEQ ID NO: 53424 - DNA, 15 bp, Homo sapiens
gagtataaccactgg

SEQ ID NO: 53425 - DNA, 15 bp, Homo sapiens
agagtataaccactg

SEQ ID NO: 53426 - DNA, 15 bp, Homo sapiens
aagagtataaccact

SEQ ID NO: 53427 - DNA, 15 bp, Homo sapiens
caagagtataaccac

SEQ ID NO: 53428 - DNA, 15 bp, Homo sapiens
gcaagagtataacca

SEQ ID NO: 53429 - DNA, 15 bp, Homo sapiens
ggcaagagtataacc

SEQ ID NO: 53430 - DNA, 15 bp, Homo sapiens
aggcaagagtataac

SEQ ID NO: 53431 - DNA, 15 bp, Homo sapiens
aaggcaagagtataa

SEQ ID NO: 53432 - DNA, 15 bp, Homo sapiens
aaaggcaagagtata

SEQ ID NO: 53433 - DNA, 15 bp, Homo sapiens
taaaggcaagagtat

SEQ ID NO: 53434 - DNA, 15 bp, Homo sapiens
ctaaaggcaagagta

SEQ ID NO: 53435 - DNA, 15 bp, Homo sapiens
actaaaggcaagagt

SEQ ID NO: 53436 - DNA, 15 bp, Homo sapiens
aactaaaggcaagag

SEQ ID NO: 53437 - DNA, 15 bp, Homo sapiens
aaactaaaggcaaga

SEQ ID NO: 53438 - DNA, 15 bp, Homo sapiens
aaaactaaaggcaag

SEQ ID NO: 53439 - DNA, 15 bp, Homo sapiens
gaaaactaaaggcaa

SEQ ID NO: 53440 - DNA, 15 bp, Homo sapiens
agaaaactaaaggca

SEQ ID NO: 53441 - DNA, 15 bp, Homo sapiens
aagaaaactaaaggc

SEQ ID NO: 53442 - DNA, 15 bp, Homo sapiens
gaagaaaactaaagg

SEQ ID NO: 53443 - DNA, 15 bp, Homo sapiens
tgaagaaaactaaag

SEQ ID NO: 53444 - DNA, 15 bp, Homo sapiens
gtgaagaaaactaaa

SEQ ID NO: 53445 - DNA, 15 bp, Homo sapiens
tgtgaagaaaactaa

SEQ ID NO: 53446 - DNA, 15 bp, Homo sapiens
ttgtgaagaaaacta

SEQ ID NO: 53447 - DNA, 15 bp, Homo sapiens
attgtgaagaaaact

SEQ ID NO: 53448 - DNA, 15 bp, Homo sapiens
tattgtgaagaaaac

SEQ ID NO: 53449 - DNA, 15 bp, Homo sapiens
gtattgtgaagaaaa

SEQ ID NO: 53450 - DNA, 15 bp, Homo sapiens
agtattgtgaagaaa

SEQ ID NO: 53451 - DNA, 15 bp, Homo sapiens
gagtattgtgaagaa

SEQ ID NO: 53452 - DNA, 15 bp, Homo sapiens
agagtattgtgaaga

SEQ ID NO: 53453 - DNA, 15 bp, Homo sapiens
aagagtattgtgaag

SEQ ID NO: 53454 - DNA, 15 bp, Homo sapiens
caagagtattgtgaa

SEQ ID NO: 53455 - DNA, 15 bp, Homo sapiens
ccaagagtattgtga

SEQ ID NO: 53456 - DNA, 15 bp, Homo sapiens
gccaagagtattgtg

SEQ ID NO: 53457 - DNA, 15 bp, Homo sapiens
tgccaagagtattgt

SEQ ID NO: 53458 - DNA, 15 bp, Homo sapiens
ttgccaagagtattg

SEQ ID NO: 53459 - DNA, 15 bp, Homo sapiens
gttgccaagagtatt

SEQ ID NO: 53460 - DNA, 15 bp, Homo sapiens
tgttgccaagagtat

SEQ ID NO: 53461 - DNA, 15 bp, Homo sapiens
gtgttgccaagagta

SEQ ID NO: 53462 - DNA, 15 bp, Homo sapiens
tgtgttgccaagagt

SEQ ID NO: 53463 - DNA, 15 bp, Homo sapiens
atgtgttgccaagag

SEQ ID NO: 53464 - DNA, 15 bp, Homo sapiens
tatgtgttgccaaga

SEQ ID NO: 53465 - DNA, 15 bp, Homo sapiens
ttatgtgttgccaag

SEQ ID NO: 53466 - DNA, 15 bp, Homo sapiens
cttatgtgttgccaa

SEQ ID NO: 53467 - DNA, 15 bp, Homo sapiens
ccttatgtgttgcca

SEQ ID NO: 53468 - DNA, 15 bp, Homo sapiens
gccttatgtgttgcc

SEQ ID NO: 53469 - DNA, 15 bp, Homo sapiens
ggccttatgtgttgc

SEQ ID NO: 53470 - DNA, 15 bp, Homo sapiens
aggccttatgtgttg

SEQ ID NO: 53471 - DNA, 15 bp, Homo sapiens
aaggccttatgtgtt

SEQ ID NO: 53472 - DNA, 15 bp, Homo sapiens
gaaggccttatgtgt

SEQ ID NO: 53473 - DNA, 15 bp, Homo sapiens
ggaaggccttatgtg

SEQ ID NO: 53474 - DNA, 15 bp, Homo sapiens
gggaaggccttatgt

SEQ ID NO: 53475 - DNA, 15 bp, Homo sapiens
agggaaggccttatg

SEQ ID NO: 53476 - DNA, 15 bp, Homo sapiens
tagggaaggccttat

SEQ ID NO: 53477 - DNA, 15 bp, Homo sapiens
gtagggaaggcctta

SEQ ID NO: 53478 - DNA, 15 bp, Homo sapiens
tgtagggaaggcctt

SEQ ID NO: 53479 - DNA, 15 bp, Homo sapiens
ttgtagggaaggcct

SEQ ID NO: 53480 - DNA, 15 bp, Homo sapiens
attgtagggaaggcc

SEQ ID NO: 53481 - DNA, 15 bp, Homo sapiens
gattgtagggaaggc

SEQ ID NO: 53482 - DNA, 15 bp, Homo sapiens
agattgtagggaagg

SEQ ID NO: 53483 - DNA, 15 bp, Homo sapiens
cagattgtagggaag

SEQ ID NO: 53484 - DNA, 15 bp, Homo sapiens
tcagattgtagggaa

SEQ ID NO: 53485 - DNA, 15 bp, Homo sapiens
ctcagattgtaggga

SEQ ID NO: 53486 - DNA, 15 bp, Homo sapiens
actcagattgtaggg

SEQ ID NO: 53487 - DNA, 15 bp, Homo sapiens
aactcagattgtagg

SEQ ID NO: 53488 - DNA, 15 bp, Homo sapiens
aaactcagattgtag

SEQ ID NO: 53489 - DNA, 15 bp, Homo sapiens
gaaactcagattgta

SEQ ID NO: 53490 - DNA, 15 bp, Homo sapiens
tgaaactcagattgt

SEQ ID NO: 53491 - DNA, 15 bp, Homo sapiens
ctgaaactcagattg

SEQ ID NO: 53492 - DNA, 15 bp, Homo sapiens
actgaaactcagatt

SEQ ID NO: 53493 - DNA, 15 bp, Homo sapiens
gactgaaactcagat

SEQ ID NO: 53494 - DNA, 15 bp, Homo sapiens
tgactgaaactcaga

SEQ ID NO: 53495 - DNA, 15 bp, Homo sapiens
ctgactgaaactcag

SEQ ID NO: 53496 - DNA, 15 bp, Homo sapiens
tctgactgaaactca

SEQ ID NO: 53497 - DNA, 15 bp, Homo sapiens
ttctgactgaaactc

SEQ ID NO: 53498 - DNA, 15 bp, Homo sapiens
attctgactgaaact

SEQ ID NO: 53499 - DNA, 15 bp, Homo sapiens
aattctgactgaaac

SEQ ID NO: 53500 - DNA, 15 bp, Homo sapiens
caattctgactgaaa

SEQ ID NO: 53501 - DNA, 15 bp, Homo sapiens
acaattctgactgaa

SEQ ID NO: 53502 - DNA, 15 bp, Homo sapiens
aacaattctgactga

SEQ ID NO: 53503 - DNA, 15 bp, Homo sapiens
aaacaattctgactg

SEQ ID NO: 53504 - DNA, 15 bp, Homo sapiens
gaaacaattctgact

SEQ ID NO: 53505 - DNA, 15 bp, Homo sapiens
agaaacaattctgac

SEQ ID NO: 53506 - DNA, 15 bp, Homo sapiens
cagaaacaattctga

SEQ ID NO: 53507 - DNA, 15 bp, Homo sapiens
tcagaaacaattctg

SEQ ID NO: 53508 - DNA, 15 bp, Homo sapiens
ctcagaaacaattct

SEQ ID NO: 53509 - DNA, 15 bp, Homo sapiens
gctcagaaacaattc

SEQ ID NO: 53510 - DNA, 15 bp, Homo sapiens
cgctcagaaacaatt

SEQ ID NO: 53511 - DNA, 15 bp, Homo sapiens
acgctcagaaacaat

SEQ ID NO: 53512 - DNA, 15 bp, Homo sapiens
aacgctcagaaacaa

SEQ ID NO: 53513 - DNA, 15 bp, Homo sapiens
gaacgctcagaaaca

SEQ ID NO: 53514 - DNA, 15 bp, Homo sapiens
agaacgctcagaaac

SEQ ID NO: 53515 - DNA, 15 bp, Homo sapiens
aagaacgctcagaaa

SEQ ID NO: 53516 - DNA, 15 bp, Homo sapiens
gaagaacgctcagaa

SEQ ID NO: 53517 - DNA, 15 bp, Homo sapiens
ggaagaacgctcaga

SEQ ID NO: 53518 - DNA, 15 bp, Homo sapiens
aggaagaacgctcag

SEQ ID NO: 53519 - DNA, 15 bp, Homo sapiens
gaggaagaacgctca

SEQ ID NO: 53520 - DNA, 15 bp, Homo sapiens
tgaggaagaacgctc

SEQ ID NO: 53521 - DNA, 15 bp, Homo sapiens
ttgaggaagaacgct

SEQ ID NO: 53522 - DNA, 15 bp, Homo sapiens
tttgaggaagaacgc

SEQ ID NO: 53523 - DNA, 15 bp, Homo sapiens
atttgaggaagaacg

SEQ ID NO: 53524 - DNA, 15 bp, Homo sapiens
aatttgaggaagaac

SEQ ID NO: 53525 - DNA, 15 bp, Homo sapiens
aaatttgaggaagaa

SEQ ID NO: 53526 - DNA, 15 bp, Homo sapiens
gaaatttgaggaaga

SEQ ID NO: 53527 - DNA, 15 bp, Homo sapiens
agaaatttgaggaag

SEQ ID NO: 53528 - DNA, 15 bp, Homo sapiens
gagaaatttgaggaa

SEQ ID NO: 53529 - DNA, 15 bp, Homo sapiens
ggagaaatttgagga

SEQ ID NO: 53530 - DNA, 15 bp, Homo sapiens
gggagaaatttgagg

SEQ ID NO: 53531 - DNA, 15 bp, Homo sapiens
ggggagaaatttgag

SEQ ID NO: 53532 - DNA, 15 bp, Homo sapiens
tggggagaaatttga

SEQ ID NO: 53533 - DNA, 15 bp, Homo sapiens
ctggggagaaatttg

SEQ ID NO: 53534 - DNA, 15 bp, Homo sapiens
actggggagaaattt

SEQ ID NO: 53535 - DNA, 15 bp, Homo sapiens
gactggggagaaatt

SEQ ID NO: 53536 - DNA, 15 bp, Homo sapiens
agactggggagaaat

SEQ ID NO: 53537 - DNA, 15 bp, Homo sapiens
gagactggggagaaa

SEQ ID NO: 53538 - DNA, 15 bp, Homo sapiens
tgagactggggagaa

SEQ ID NO: 53539 - DNA, 15 bp, Homo sapiens
atgagactggggaga

SEQ ID NO: 53540 - DNA, 15 bp, Homo sapiens
aatgagactggggag

SEQ ID NO: 53541 - DNA, 15 bp, Homo sapiens
taatgagactgggga

SEQ ID NO: 53542 - DNA, 15 bp, Homo sapiens
ataatgagactgggg

SEQ ID NO: 53543 - DNA, 15 bp, Homo sapiens
aataatgagactggg

SEQ ID NO: 53544 - DNA, 15 bp, Homo sapiens
gaataatgagactgg

SEQ ID NO: 53545 - DNA, 15 bp, Homo sapiens
agaataatgagactg

SEQ ID NO: 53546 - DNA, 15 bp, Homo sapiens
aagaataatgagact

SEQ ID NO: 53547 - DNA, 15 bp, Homo sapiens
aaagaataatgagac

SEQ ID NO: 53548 - DNA, 15 bp, Homo sapiens
taaagaataatgaga

SEQ ID NO: 53549 - DNA, 15 bp, Homo sapiens
ataaagaataatgag

SEQ ID NO: 53550 - DNA, 15 bp, Homo sapiens
aataaagaataatga

SEQ ID NO: 53551 - DNA, 15 bp, Homo sapiens
gaataaagaataatg

SEQ ID NO: 53552 - DNA, 15 bp, Homo sapiens
agaataaagaataat

SEQ ID NO: 53553 - DNA, 15 bp, Homo sapiens
gagaataaagaataa

SEQ ID NO: 53554 - DNA, 15 bp, Homo sapiens
tgagaataaagaata

SEQ ID NO: 53555 - DNA, 15 bp, Homo sapiens
atgagaataaagaat

SEQ ID NO: 53556 - DNA, 15 bp, Homo sapiens
catgagaataaagaa

SEQ ID NO: 53557 - DNA, 15 bp, Homo sapiens
acatgagaataaaga

SEQ ID NO: 53558 - DNA, 15 bp, Homo sapiens
gacatgagaataaag

SEQ ID NO: 53559 - DNA, 15 bp, Homo sapiens
ggacatgagaataaa

SEQ ID NO: 53560 - DNA, 15 bp, Homo sapiens
tggacatgagaataa

SEQ ID NO: 53561 - DNA, 15 bp, Homo sapiens
atggacatgagaata

SEQ ID NO: 53562 - DNA, 15 bp, Homo sapiens
catggacatgagaat

SEQ ID NO: 53563 - DNA, 15 bp, Homo sapiens
tcatggacatgagaa

SEQ ID NO: 53564 - DNA, 15 bp, Homo sapiens
gtcatggacatgaga

SEQ ID NO: 53565 - DNA, 15 bp, Homo sapiens
ggtcatggacatgag

SEQ ID NO: 53566 - DNA, 15 bp, Homo sapiens
tggtcatggacatga

SEQ ID NO: 53567 - DNA, 15 bp, Homo sapiens
ctggtcatggacatg

SEQ ID NO: 53568 - DNA, 15 bp, Homo sapiens
actggtcatggacat

SEQ ID NO: 53569 - DNA, 15 bp, Homo sapiens
gactggtcatggaca

SEQ ID NO: 53570 - DNA, 15 bp, Homo sapiens
tgactggtcatggac

SEQ ID NO: 53571 - DNA, 15 bp, Homo sapiens
atgactggtcatgga

SEQ ID NO: 53572 - DNA, 15 bp, Homo sapiens
tatgactggtcatgg

SEQ ID NO: 53573 - DNA, 15 bp, Homo sapiens
ttatgactggtcatg

SEQ ID NO: 53574 - DNA, 15 bp, Homo sapiens
attatgactggtcat

SEQ ID NO: 53575 - DNA, 15 bp, Homo sapiens
tattatgactggtca

SEQ ID NO: 53576 - DNA, 15 bp, Homo sapiens
ctattatgactggtc

SEQ ID NO: 53577 - DNA, 15 bp, Homo sapiens
actattatgactggt

SEQ ID NO: 53578 - DNA, 15 bp, Homo sapiens
tactattatgactgg

SEQ ID NO: 53579 - DNA, 15 bp, Homo sapiens
ttactattatgactg

SEQ ID NO: 53580 - DNA, 15 bp, Homo sapiens
attactattatgact

SEQ ID NO: 53581 - DNA, 15 bp, Homo sapiens
aattactattatgac

SEQ ID NO: 53582 - DNA, 15 bp, Homo sapiens
taattactattatga

SEQ ID NO: 53583 - DNA, 15 bp, Homo sapiens
ataattactattatg

SEQ ID NO: 53584 - DNA, 15 bp, Homo sapiens
cataattactattat

SEQ ID NO: 53585 - DNA, 15 bp, Homo sapiens
tcataattactatta

SEQ ID NO: 53586 - DNA, 15 bp, Homo sapiens
ttcataattactatt

SEQ ID NO: 53587 - DNA, 15 bp, Homo sapiens
tttcataattactat

SEQ ID NO: 53588 - DNA, 15 bp, Homo sapiens
ttttcataattacta

SEQ ID NO: 53589 - DNA, 15 bp, Homo sapiens
tttttcataattact

SEQ ID NO: 53590 - DNA, 15 bp, Homo sapiens
gtttttcataattac

SEQ ID NO: 53591 - DNA, 15 bp, Homo sapiens
ggtttttcataatta

SEQ ID NO: 53592 - DNA, 15 bp, Homo sapiens
aggtttttcataatt

SEQ ID NO: 53593 - DNA, 15 bp, Homo sapiens
gaggtttttcataat

SEQ ID NO: 53594 - DNA, 15 bp, Homo sapiens
agaggtttttcataa

SEQ ID NO: 53595 - DNA, 15 bp, Homo sapiens
tagaggtttttcata

SEQ ID NO: 53596 - DNA, 15 bp, Homo sapiens
ttagaggtttttcat

SEQ ID NO: 53597 - DNA, 15 bp, Homo sapiens
gttagaggtttttca

SEQ ID NO: 53598 - DNA, 15 bp, Homo sapiens
agttagaggtttttc

SEQ ID NO: 53599 - DNA, 15 bp, Homo sapiens
aagttagaggttttt

SEQ ID NO: 53600 - DNA, 15 bp, Homo sapiens
aaagttagaggtttt

SEQ ID NO: 53601 - DNA, 15 bp, Homo sapiens
gaaagttagaggttt

SEQ ID NO: 53602 - DNA, 15 bp, Homo sapiens
agaaagttagaggtt

SEQ ID NO: 53603 - DNA, 15 bp, Homo sapiens
aagaaagttagaggt

SEQ ID NO: 53604 - DNA, 15 bp, Homo sapiens
aaagaaagttagagg

SEQ ID NO: 53605 - DNA, 15 bp, Homo sapiens
taaagaaagttagag

SEQ ID NO: 53606 - DNA, 15 bp, Homo sapiens
ctaaagaaagttaga

SEQ ID NO: 53607 - DNA, 15 bp, Homo sapiens
actaaagaaagttag

SEQ ID NO: 53608 - DNA, 15 bp, Homo sapiens
cactaaagaaagtta

SEQ ID NO: 53609 - DNA, 15 bp, Homo sapiens
gcactaaagaaagtt

SEQ ID NO: 53610 - DNA, 15 bp, Homo sapiens
tgcactaaagaaagt

SEQ ID NO: 53611 - DNA, 15 bp, Homo sapiens
atgcactaaagaaag

SEQ ID NO: 53612 - DNA, 15 bp, Homo sapiens
aatgcactaaagaaa

SEQ ID NO: 53613 - DNA, 15 bp, Homo sapiens
caatgcactaaagaa

SEQ ID NO: 53614 - DNA, 15 bp, Homo sapiens
tcaatgcactaaaga

SEQ ID NO: 53615 - DNA, 15 bp, Homo sapiens
ttcaatgcactaaag

SEQ ID NO: 53616 - DNA, 15 bp, Homo sapiens
attcaatgcactaaa

SEQ ID NO: 53617 - DNA, 15 bp, Homo sapiens
cattcaatgcactaa

SEQ ID NO: 53618 - DNA, 15 bp, Homo sapiens
acattcaatgcacta

SEQ ID NO: 53619 - DNA, 15 bp, Homo sapiens
tacattcaatgcact

SEQ ID NO: 53620 - DNA, 15 bp, Homo sapiens
atacattcaatgcac

SEQ ID NO: 53621 - DNA, 15 bp, Homo sapiens
tatacattcaatgca

SEQ ID NO: 53622 - DNA, 15 bp, Homo sapiens
atatacattcaatgc

SEQ ID NO: 53623 - DNA, 15 bp, Homo sapiens
aatatacattcaatg

SEQ ID NO: 53624 - DNA, 15 bp, Homo sapiens
aaatatacattcaat

SEQ ID NO: 53625 - DNA, 15 bp, Homo sapiens
aaaatatacattcaa

SEQ ID NO: 53626 - DNA, 15 bp, Homo sapiens
taaaatatacattca

SEQ ID NO: 53627 - DNA, 15 bp, Homo sapiens
ataaaatatacattc

SEQ ID NO: 53628 - DNA, 15 bp, Homo sapiens
gataaaatatacatt

SEQ ID NO: 53629 - DNA, 15 bp, Homo sapiens
tgataaaatatacat

SEQ ID NO: 53630 - DNA, 15 bp, Homo sapiens
atgataaaatataca

SEQ ID NO: 53631 - DNA, 15 bp, Homo sapiens
aatgataaaatatac

SEQ ID NO: 53632 - DNA, 15 bp, Homo sapiens
aaatgataaaatata

SEQ ID NO: 53633 - DNA, 15 bp, Homo sapiens
aaaatgataaaatat

SEQ ID NO: 53634 - DNA, 15 bp, Homo sapiens
caaaatgataaaata

SEQ ID NO: 53635 - DNA, 15 bp, Homo sapiens
ccaaaatgataaaat

SEQ ID NO: 53636 - DNA, 15 bp, Homo sapiens
accaaaatgataaaa

SEQ ID NO: 53637 - DNA, 15 bp, Homo sapiens
aaccaaaatgataaa

SEQ ID NO: 53638 - DNA, 15 bp, Homo sapiens
caaccaaaatgataa

SEQ ID NO: 53639 - DNA, 15 bp, Homo sapiens
acaaccaaaatgata

SEQ ID NO: 53640 - DNA, 15 bp, Homo sapiens
cacaaccaaaatgat

SEQ ID NO: 53641 - DNA, 15 bp, Homo sapiens
acacaaccaaaatga

SEQ ID NO: 53642 - DNA, 15 bp, Homo sapiens
aacacaaccaaaatg

SEQ ID NO: 53643 - DNA, 15 bp, Homo sapiens
taacacaaccaaaat

SEQ ID NO: 53644 - DNA, 15 bp, Homo sapiens
ttaacacaaccaaaa

SEQ ID NO: 53645 - DNA, 15 bp, Homo sapiens
gttaacacaaccaaa

SEQ ID NO: 53646 - DNA, 15 bp, Homo sapiens
agttaacacaaccaa

SEQ ID NO: 53647 - DNA, 15 bp, Homo sapiens
cagttaacacaacca

SEQ ID NO: 53648 - DNA, 15 bp, Homo sapiens
acagttaacacaacc

SEQ ID NO: 53649 - DNA, 15 bp, Homo sapiens
tacagttaacacaac

SEQ ID NO: 53650 - DNA, 15 bp, Homo sapiens
ttacagttaacacaa

SEQ ID NO: 53651 - DNA, 15 bp, Homo sapiens
tttacagttaacaca

SEQ ID NO: 53652 - DNA, 15 bp, Homo sapiens
atttacagttaacac

SEQ ID NO: 53653 - DNA, 15 bp, Homo sapiens
gatttacagttaaca

SEQ ID NO: 53654 - DNA, 15 bp, Homo sapiens
agatttacagttaac

SEQ ID NO: 53655 - DNA, 15 bp, Homo sapiens
gagatttacagttaa

SEQ ID NO: 53656 - DNA, 15 bp, Homo sapiens
agagatttacagtta

SEQ ID NO: 53657 - DNA, 15 bp, Homo sapiens
gagagatttacagtt

SEQ ID NO: 53658 - DNA, 15 bp, Homo sapiens
tgagagatttacagt

SEQ ID NO: 53659 - DNA, 15 bp, Homo sapiens
ctgagagatttacag

SEQ ID NO: 53660 - DNA, 15 bp, Homo sapiens
actgagagatttaca

SEQ ID NO: 53661 - DNA, 15 bp, Homo sapiens
cactgagagatttac

SEQ ID NO: 53662 - DNA, 15 bp, Homo sapiens
ccactgagagattta

SEQ ID NO: 53663 - DNA, 15 bp, Homo sapiens
tccactgagagattt

SEQ ID NO: 53664 - DNA, 15 bp, Homo sapiens
ttccactgagagatt

SEQ ID NO: 53665 - DNA, 15 bp, Homo sapiens
tttccactgagagat

SEQ ID NO: 53666 - DNA, 15 bp, Homo sapiens
atttccactgagaga

SEQ ID NO: 53667 - DNA, 15 bp, Homo sapiens
gatttccactgagag

SEQ ID NO: 53668 - DNA, 15 bp, Homo sapiens
agatttccactgaga

SEQ ID NO: 53669 - DNA, 15 bp, Homo sapiens
cagatttccactgag

SEQ ID NO: 53670 - DNA, 15 bp, Homo sapiens
tcagatttccactga

SEQ ID NO: 53671 - DNA, 15 bp, Homo sapiens
ttcagatttccactg

SEQ ID NO: 53672 - DNA, 15 bp, Homo sapiens
tttcagatttccact

SEQ ID NO: 53673 - DNA, 15 bp, Homo sapiens
ttttcagatttccac

SEQ ID NO: 53674 - DNA, 15 bp, Homo sapiens
cttttcagatttcca

SEQ ID NO: 53675 - DNA, 15 bp, Homo sapiens
gcttttcagatttcc

SEQ ID NO: 53676 - DNA, 15 bp, Homo sapiens
ggcttttcagatttc

SEQ ID NO: 53677 - DNA, 15 bp, Homo sapiens
aggcttttcagattt

SEQ ID NO: 53678 - DNA, 15 bp, Homo sapiens
aaggcttttcagatt

SEQ ID NO: 53679 - DNA, 15 bp, Homo sapiens
aaaggcttttcagat

SEQ ID NO: 53680 - DNA, 15 bp, Homo sapiens
taaaggcttttcaga

SEQ ID NO: 53681 - DNA, 15 bp, Homo sapiens
ataaaggcttttcag

SEQ ID NO: 53682 - DNA, 15 bp, Homo sapiens
aataaaggcttttca

SEQ ID NO: 53683 - DNA, 15 bp, Homo sapiens
aaataaaggcttttc

SEQ ID NO: 53684 - DNA, 15 bp, Homo sapiens
gaaataaaggctttt

SEQ ID NO: 53685 - DNA, 15 bp, Homo sapiens
ggaaataaaggcttt

SEQ ID NO: 53686 - DNA, 15 bp, Homo sapiens
aggaaataaaggctt

SEQ ID NO: 53687 - DNA, 15 bp, Homo sapiens
aaggaaataaaggct

SEQ ID NO: 53688 - DNA, 15 bp, Homo sapiens
taaggaaataaaggc

SEQ ID NO: 53689 - DNA, 15 bp, Homo sapiens
ctaaggaaataaagg

SEQ ID NO: 53690 - DNA, 15 bp, Homo sapiens
tctaaggaaataaag

SEQ ID NO: 53691 - DNA, 15 bp, Homo sapiens
atctaaggaaataaa

SEQ ID NO: 53692 - DNA, 15 bp, Homo sapiens
catctaaggaaataa

SEQ ID NO: 53693 - DNA, 15 bp, Homo sapiens
tcatctaaggaaata

SEQ ID NO: 53694 - DNA, 15 bp, Homo sapiens
atcatctaaggaaat

SEQ ID NO: 53695 - DNA, 15 bp, Homo sapiens
tatcatctaaggaaa

SEQ ID NO: 53696 - DNA, 15 bp, Homo sapiens
ttatcatctaaggaa

SEQ ID NO: 53697 - DNA, 15 bp, Homo sapiens
attatcatctaagga

SEQ ID NO: 53698 - DNA, 15 bp, Homo sapiens
tattatcatctaagg

SEQ ID NO: 53699 - DNA, 15 bp, Homo sapiens
atattatcatctaag

SEQ ID NO: 53700 - DNA, 15 bp, Homo sapiens
tatattatcatctaa

SEQ ID NO: 53701 - DNA, 15 bp, Homo sapiens
gtatattatcatcta

SEQ ID NO: 53702 - DNA, 15 bp, Homo sapiens
tgtatattatcatct

SEQ ID NO: 53703 - DNA, 15 bp, Homo sapiens
ttgtatattatcatc

SEQ ID NO: 53704 - DNA, 15 bp, Homo sapiens
attgtatattatcat

SEQ ID NO: 53705 - DNA, 15 bp, Homo sapiens
aattgtatattatca

SEQ ID NO: 53706 - DNA, 15 bp, Homo sapiens
caattgtatattatc

SEQ ID NO: 53707 - DNA, 15 bp, Homo sapiens
tcaattgtatattat

SEQ ID NO: 53708 - DNA, 15 bp, Homo sapiens
atcaattgtatatta

SEQ ID NO: 53709 - DNA, 15 bp, Homo sapiens
aatcaattgtatatt

SEQ ID NO: 53710 - DNA, 15 bp, Homo sapiens
aaatcaattgtatat

SEQ ID NO: 53711 - DNA, 15 bp, Homo sapiens
taaatcaattgtata

SEQ ID NO: 53712 - DNA, 15 bp, Homo sapiens
ctaaatcaattgtat

SEQ ID NO: 53713 - DNA, 15 bp, Homo sapiens
cctaaatcaattgta

SEQ ID NO: 53714 - DNA, 15 bp, Homo sapiens
tcctaaatcaattgt

SEQ ID NO: 53715 - DNA, 15 bp, Homo sapiens
ctcctaaatcaattg

SEQ ID NO: 53716 - DNA, 15 bp, Homo sapiens
tctcctaaatcaatt

SEQ ID NO: 53717 - DNA, 15 bp, Homo sapiens
atctcctaaatcaat

SEQ ID NO: 53718 - DNA, 15 bp, Homo sapiens
tatctcctaaatcaa

SEQ ID NO: 53719 - DNA, 15 bp, Homo sapiens
ctatctcctaaatca

SEQ ID NO: 53720 - DNA, 15 bp, Homo sapiens
cctatctcctaaatc

SEQ ID NO: 53721 - DNA, 15 bp, Homo sapiens
ccctatctcctaaat

SEQ ID NO: 53722 - DNA, 15 bp, Homo sapiens
tccctatctcctaaa

SEQ ID NO: 53723 - DNA, 15 bp, Homo sapiens
ttccctatctcctaa

SEQ ID NO: 53724 - DNA, 15 bp, Homo sapiens
attccctatctccta

SEQ ID NO: 53725 - DNA, 15 bp, Homo sapiens
aattccctatctcct

SEQ ID NO: 53726 - DNA, 15 bp, Homo sapiens
aaattccctatctcc

SEQ ID NO: 53727 - DNA, 15 bp, Homo sapiens
aaaattccctatctc

SEQ ID NO: 53728 - DNA, 15 bp, Homo sapiens
aaaaattccctatct

SEQ ID NO: 53729 - DNA, 15 bp, Homo sapiens
gaaaaattccctatc

SEQ ID NO: 53730 - DNA, 15 bp, Homo sapiens
tgaaaaattccctat

SEQ ID NO: 53731 - DNA, 15 bp, Homo sapiens
ctgaaaaattcccta

SEQ ID NO: 53732 - DNA, 15 bp, Homo sapiens
actgaaaaattccct

SEQ ID NO: 53733 - DNA, 15 bp, Homo sapiens
aactgaaaaattccc

SEQ ID NO: 53734 - DNA, 15 bp, Homo sapiens
taactgaaaaattcc

SEQ ID NO: 53735 - DNA, 15 bp, Homo sapiens
gtaactgaaaaattc

SEQ ID NO: 53736 - DNA, 15 bp, Homo sapiens
ggtaactgaaaaatt

SEQ ID NO: 53737 - DNA, 15 bp, Homo sapiens
aggtaactgaaaaat

SEQ ID NO: 53738 - DNA, 15 bp, Homo sapiens
aaggtaactgaaaaa

SEQ ID NO: 53739 - DNA, 15 bp, Homo sapiens
aaaggtaactgaaaa

SEQ ID NO: 53740 - DNA, 15 bp, Homo sapiens
taaaggtaactgaaa

SEQ ID NO: 53741 - DNA, 15 bp, Homo sapiens
ataaaggtaactgaa

SEQ ID NO: 53742 - DNA, 15 bp, Homo sapiens
tataaaggtaactga

SEQ ID NO: 53743 - DNA, 15 bp, Homo sapiens
ttataaaggtaactg

SEQ ID NO: 53744 - DNA, 15 bp, Homo sapiens
gttataaaggtaact

SEQ ID NO: 53745 - DNA, 15 bp, Homo sapiens
tgttataaaggtaac

SEQ ID NO: 53746 - DNA, 15 bp, Homo sapiens
ctgttataaaggtaa

SEQ ID NO: 53747 - DNA, 15 bp, Homo sapiens
gctgttataaaggta

SEQ ID NO: 53748 - DNA, 15 bp, Homo sapiens
tgctgttataaaggt

SEQ ID NO: 53749 - DNA, 15 bp, Homo sapiens
gtgctgttataaagg

SEQ ID NO: 53750 - DNA, 15 bp, Homo sapiens
tgtgctgttataaag

SEQ ID NO: 53751 - DNA, 15 bp, Homo sapiens
ctgtgctgttataaa

SEQ ID NO: 53752 - DNA, 15 bp, Homo sapiens
actgtgctgttataa

SEQ ID NO: 53753 - DNA, 15 bp, Homo sapiens
tactgtgctgttata

SEQ ID NO: 53754 - DNA, 15 bp, Homo sapiens
atactgtgctgttat

SEQ ID NO: 53755 - DNA, 15 bp, Homo sapiens
aatactgtgctgtta

SEQ ID NO: 53756 - DNA, 15 bp, Homo sapiens
taatactgtgctgtt

SEQ ID NO: 53757 - DNA, 15 bp, Homo sapiens
ctaatactgtgctgt

SEQ ID NO: 53758 - DNA, 15 bp, Homo sapiens
gctaatactgtgctg

SEQ ID NO: 53759 - DNA, 15 bp, Homo sapiens
tgctaatactgtgct

SEQ ID NO: 53760 - DNA, 15 bp, Homo sapiens
ctgctaatactgtgc

SEQ ID NO: 53761 - DNA, 15 bp, Homo sapiens
actgctaatactgtg

SEQ ID NO: 53762 - DNA, 15 bp, Homo sapiens
gactgctaatactgt

SEQ ID NO: 53763 - DNA, 15 bp, Homo sapiens
agactgctaatactg

SEQ ID NO: 53764 - DNA, 15 bp, Homo sapiens
tagactgctaatact

SEQ ID NO: 53765 - DNA, 15 bp, Homo sapiens
ttagactgctaatac

SEQ ID NO: 53766 - DNA, 15 bp, Homo sapiens
attagactgctaata

SEQ ID NO: 53767 - DNA, 15 bp, Homo sapiens
gattagactgctaat

SEQ ID NO: 53768 - DNA, 15 bp, Homo sapiens
agattagactgctaa

SEQ ID NO: 53769 - DNA, 15 bp, Homo sapiens
tagattagactgcta

SEQ ID NO: 53770 - DNA, 15 bp, Homo sapiens
ttagattagactgct

SEQ ID NO: 53771 - DNA, 15 bp, Homo sapiens
tttagattagactgc

SEQ ID NO: 53772 - DNA, 15 bp, Homo sapiens
atttagattagactg

SEQ ID NO: 53773 - DNA, 15 bp, Homo sapiens
catttagattagact

SEQ ID NO: 53774 - DNA, 15 bp, Homo sapiens
gcatttagattagac

SEQ ID NO: 53775 - DNA, 15 bp, Homo sapiens
agcatttagattaga

SEQ ID NO: 53776 - DNA, 15 bp, Homo sapiens
tagcatttagattag

SEQ ID NO: 53777 - DNA, 15 bp, Homo sapiens
ttagcatttagatta

SEQ ID NO: 53778 - DNA, 15 bp, Homo sapiens
cttagcatttagatt

SEQ ID NO: 53779 - DNA, 15 bp, Homo sapiens
acttagcatttagat

SEQ ID NO: 53780 - DNA, 15 bp, Homo sapiens
cacttagcatttaga

SEQ ID NO: 53781 - DNA, 15 bp, Homo sapiens
tcacttagcatttag

SEQ ID NO: 53782 - DNA, 15 bp, Homo sapiens
ttcacttagcattta

SEQ ID NO: 53783 - DNA, 15 bp, Homo sapiens
attcacttagcattt

SEQ ID NO: 53784 - DNA, 15 bp, Homo sapiens
cattcacttagcatt

SEQ ID NO: 53785 - DNA, 15 bp, Homo sapiens
acattcacttagcat

SEQ ID NO: 53786 - DNA, 15 bp, Homo sapiens
aacattcacttagca

SEQ ID NO: 53787 - DNA, 15 bp, Homo sapiens
aaacattcacttagc

SEQ ID NO: 53788 - DNA, 15 bp, Homo sapiens
aaaacattcacttag

SEQ ID NO: 53789 - DNA, 15 bp, Homo sapiens
caaaacattcactta

SEQ ID NO: 53790 - DNA, 15 bp, Homo sapiens
tcaaaacattcactt

SEQ ID NO: 53791 - DNA, 15 bp, Homo sapiens
ctcaaaacattcact

SEQ ID NO: 53792 - DNA, 15 bp, Homo sapiens
tctcaaaacattcac

SEQ ID NO: 53793 - DNA, 15 bp, Homo sapiens
ctctcaaaacattca

SEQ ID NO: 53794 - DNA, 15 bp, Homo sapiens
cctctcaaaacattc

SEQ ID NO: 53795 - DNA, 15 bp, Homo sapiens
tcctctcaaaacatt

SEQ ID NO: 53796 - DNA, 15 bp, Homo sapiens
ctcctctcaaaacat

SEQ ID NO: 53797 - DNA, 15 bp, Homo sapiens
tctcctctcaaaaca

SEQ ID NO: 53798 - DNA, 15 bp, Homo sapiens
atctcctctcaaaac

SEQ ID NO: 53799 - DNA, 15 bp, Homo sapiens
tatctcctctcaaaa

SEQ ID NO: 53800 - DNA, 15 bp, Homo sapiens
ctatctcctctcaaa

SEQ ID NO: 53801 - DNA, 15 bp, Homo sapiens
tctatctcctctcaa

SEQ ID NO: 53802 - DNA, 15 bp, Homo sapiens
atctatctcctctca

SEQ ID NO: 53803 - DNA, 15 bp, Homo sapiens
catctatctcctctc

SEQ ID NO: 53804 - DNA, 15 bp, Homo sapiens
acatctatctcctct

SEQ ID NO: 53805 - DNA, 15 bp, Homo sapiens
aacatctatctcctc

SEQ ID NO: 53806 - DNA, 15 bp, Homo sapiens
caacatctatctcct

SEQ ID NO: 53807 - DNA, 15 bp, Homo sapiens
tcaacatctatctcc

SEQ ID NO: 53808 - DNA, 15 bp, Homo sapiens
ttcaacatctatctc

SEQ ID NO: 53809 - DNA, 15 bp, Homo sapiens
tttcaacatctatct

SEQ ID NO: 53810 - DNA, 15 bp, Homo sapiens
ttttcaacatctatc

SEQ ID NO: 53811 - DNA, 15 bp, Homo sapiens
attttcaacatctat

SEQ ID NO: 53812 - DNA, 15 bp, Homo sapiens
aattttcaacatcta

SEQ ID NO: 53813 - DNA, 15 bp, Homo sapiens
taattttcaacatct

SEQ ID NO: 53814 - DNA, 15 bp, Homo sapiens
ttaattttcaacatc

SEQ ID NO: 53815 - DNA, 15 bp, Homo sapiens
tttaattttcaacat

SEQ ID NO: 53816 - DNA, 15 bp, Homo sapiens
ttttaattttcaaca

SEQ ID NO: 53817 - DNA, 15 bp, Homo sapiens
attttaattttcaac

SEQ ID NO: 53818 - DNA, 15 bp, Homo sapiens
tattttaattttcaa

SEQ ID NO: 53819 - DNA, 15 bp, Homo sapiens
gtattttaattttca

SEQ ID NO: 53820 - DNA, 15 bp, Homo sapiens
tgtattttaattttc

SEQ ID NO: 53821 - DNA, 15 bp, Homo sapiens
atgtattttaatttt

SEQ ID NO: 53822 - DNA, 15 bp, Homo sapiens
aatgtattttaattt

SEQ ID NO: 53823 - DNA, 15 bp, Homo sapiens
taatgtattttaatt

SEQ ID NO: 53824 - DNA, 15 bp, Homo sapiens
ttaatgtattttaat

SEQ ID NO: 53825 - DNA, 15 bp, Homo sapiens
cttaatgtattttaa

SEQ ID NO: 53826 - DNA, 15 bp, Homo sapiens
acttaatgtatttta

SEQ ID NO: 53827 - DNA, 15 bp, Homo sapiens
gacttaatgtatttt

SEQ ID NO: 53828 - DNA, 15 bp, Homo sapiens
ggacttaatgtattt

SEQ ID NO: 53829 - DNA, 15 bp, Homo sapiens
gggacttaatgtatt

SEQ ID NO: 53830 - DNA, 15 bp, Homo sapiens
tgggacttaatgtat

SEQ ID NO: 53831 - DNA, 15 bp, Homo sapiens
ctgggacttaatgta

SEQ ID NO: 53832 - DNA, 15 bp, Homo sapiens
actgggacttaatgt

SEQ ID NO: 53833 - DNA, 15 bp, Homo sapiens
cactgggacttaatg

SEQ ID NO: 53834 - DNA, 15 bp, Homo sapiens
tcactgggacttaat

SEQ ID NO: 53835 - DNA, 15 bp, Homo sapiens
ctcactgggacttaa

SEQ ID NO: 53836 - DNA, 15 bp, Homo sapiens
cctcactgggactta

SEQ ID NO: 53837 - DNA, 15 bp, Homo sapiens
acctcactgggactt

SEQ ID NO: 53838 - DNA, 15 bp, Homo sapiens
cacctcactgggact

SEQ ID NO: 53839 - DNA, 15 bp, Homo sapiens
tcacctcactgggac

SEQ ID NO: 53840 - DNA, 15 bp, Homo sapiens
ttcacctcactggga

SEQ ID NO: 53841 - DNA, 15 bp, Homo sapiens
tttcacctcactggg

SEQ ID NO: 53842 - DNA, 15 bp, Homo sapiens
ttttcacctcactgg

SEQ ID NO: 53843 - DNA, 15 bp, Homo sapiens
cttttcacctcactg

SEQ ID NO: 53844 - DNA, 15 bp, Homo sapiens
gcttttcacctcact

SEQ ID NO: 53845 - DNA, 15 bp, Homo sapiens
ggcttttcacctcac

SEQ ID NO: 53846 - DNA, 15 bp, Homo sapiens
cggcttttcacctca

SEQ ID NO: 53847 - DNA, 15 bp, Homo sapiens
tcggcttttcacctc

SEQ ID NO: 53848 - DNA, 15 bp, Homo sapiens
atcggcttttcacct

SEQ ID NO: 53849 - DNA, 15 bp, Homo sapiens
aatcggcttttcacc

SEQ ID NO: 53850 - DNA, 15 bp, Homo sapiens
caatcggcttttcac

SEQ ID NO: 53851 - DNA, 15 bp, Homo sapiens
acaatcggcttttca

SEQ ID NO: 53852 - DNA, 15 bp, Homo sapiens
aacaatcggcttttc

SEQ ID NO: 53853 - DNA, 15 bp, Homo sapiens
taacaatcggctttt

SEQ ID NO: 53854 - DNA, 15 bp, Homo sapiens
ttaacaatcggcttt

SEQ ID NO: 53855 - DNA, 15 bp, Homo sapiens
cttaacaatcggctt

SEQ ID NO: 53856 - DNA, 15 bp, Homo sapiens
acttaacaatcggct

SEQ ID NO: 53857 - DNA, 15 bp, Homo sapiens
aacttaacaatcggc

SEQ ID NO: 53858 - DNA, 15 bp, Homo sapiens
gaacttaacaatcgg

SEQ ID NO: 53859 - DNA, 15 bp, Homo sapiens
agaacttaacaatcg

SEQ ID NO: 53860 - DNA, 15 bp, Homo sapiens
cagaacttaacaatc

SEQ ID NO: 53861 - DNA, 15 bp, Homo sapiens
gcagaacttaacaat

SEQ ID NO: 53862 - DNA, 15 bp, Homo sapiens
tgcagaacttaacaa

SEQ ID NO: 53863 - DNA, 15 bp, Homo sapiens
gtgcagaacttaaca

SEQ ID NO: 53864 - DNA, 15 bp, Homo sapiens
tgtgcagaacttaac

SEQ ID NO: 53865 - DNA, 15 bp, Homo sapiens
gtgtgcagaacttaa

SEQ ID NO: 53866 - DNA, 15 bp, Homo sapiens
tgtgtgcagaactta

SEQ ID NO: 53867 - DNA, 15 bp, Homo sapiens
ttgtgtgcagaactt

SEQ ID NO: 53868 - DNA, 15 bp, Homo sapiens
tttgtgtgcagaact

SEQ ID NO: 53869 - DNA, 15 bp, Homo sapiens
ttttgtgtgcagaac

SEQ ID NO: 53870 - DNA, 15 bp, Homo sapiens
cttttgtgtgcagaa

SEQ ID NO: 53871 - DNA, 15 bp, Homo sapiens
tcttttgtgtgcaga

SEQ ID NO: 53872 - DNA, 15 bp, Homo sapiens
atcttttgtgtgcag

SEQ ID NO: 53873 - DNA, 15 bp, Homo sapiens
aatcttttgtgtgca

SEQ ID NO: 53874 - DNA, 15 bp, Homo sapiens
aaatcttttgtgtgc

SEQ ID NO: 53875 - DNA, 15 bp, Homo sapiens
caaatcttttgtgtg

SEQ ID NO: 53876 - DNA, 15 bp, Homo sapiens
gcaaatcttttgtgt

SEQ ID NO: 53877 - DNA, 15 bp, Homo sapiens
agcaaatcttttgtg

SEQ ID NO: 53878 - DNA, 15 bp, Homo sapiens
aagcaaatcttttgt

SEQ ID NO: 53879 - DNA, 15 bp, Homo sapiens
gaagcaaatcttttg

SEQ ID NO: 53880 - DNA, 15 bp, Homo sapiens
tgaagcaaatctttt

SEQ ID NO: 53881 - DNA, 15 bp, Homo sapiens
ctgaagcaaatcttt

SEQ ID NO: 53882 - DNA, 15 bp, Homo sapiens
actgaagcaaatctt

SEQ ID NO: 53883 - DNA, 15 bp, Homo sapiens
cactgaagcaaatct

SEQ ID NO: 53884 - DNA, 15 bp, Homo sapiens
tcactgaagcaaatc

SEQ ID NO: 53885 - DNA, 15 bp, Homo sapiens
ttcactgaagcaaat

SEQ ID NO: 53886 - DNA, 15 bp, Homo sapiens
attcactgaagcaaa

SEQ ID NO: 53887 - DNA, 15 bp, Homo sapiens
aattcactgaagcaa

SEQ ID NO: 53888 - DNA, 15 bp, Homo sapiens
caattcactgaagca

SEQ ID NO: 53889 - DNA, 15 bp, Homo sapiens
tcaattcactgaagc

SEQ ID NO: 53890 - DNA, 15 bp, Homo sapiens
atcaattcactgaag

SEQ ID NO: 53891 - DNA, 15 bp, Homo sapiens
aatcaattcactgaa

SEQ ID NO: 53892 - DNA, 15 bp, Homo sapiens
aaatcaattcactga

SEQ ID NO: 53893 - DNA, 15 bp, Homo sapiens
gaaatcaattcactg

SEQ ID NO: 53894 - DNA, 15 bp, Homo sapiens
tgaaatcaattcact

SEQ ID NO: 53895 - DNA, 15 bp, Homo sapiens
ttgaaatcaattcac

SEQ ID NO: 53896 - DNA, 15 bp, Homo sapiens
gttgaaatcaattca

SEQ ID NO: 53897 - DNA, 15 bp, Homo sapiens
tgttgaaatcaattc

SEQ ID NO: 53898 - DNA, 15 bp, Homo sapiens
ctgttgaaatcaatt

SEQ ID NO: 53899 - DNA, 15 bp, Homo sapiens
gctgttgaaatcaat

SEQ ID NO: 53900 - DNA, 15 bp, Homo sapiens
agctgttgaaatcaa

SEQ ID NO: 53901 - DNA, 15 bp, Homo sapiens
cagctgttgaaatca

SEQ ID NO: 53902 - DNA, 15 bp, Homo sapiens
tcagctgttgaaatc

SEQ ID NO: 53903 - DNA, 15 bp, Homo sapiens
ctcagctgttgaaat

SEQ ID NO: 53904 - DNA, 15 bp, Homo sapiens
tctcagctgttgaaa

SEQ ID NO: 53905 - DNA, 15 bp, Homo sapiens
atctcagctgttgaa

SEQ ID NO: 53906 - DNA, 15 bp, Homo sapiens
gatctcagctgttga

SEQ ID NO: 53907 - DNA, 15 bp, Homo sapiens
ggatctcagctgttg

SEQ ID NO: 53908 - DNA, 15 bp, Homo sapiens
aggatctcagctgtt

SEQ ID NO: 53909 - DNA, 15 bp, Homo sapiens
taggatctcagctgt

SEQ ID NO: 53910 - DNA, 15 bp, Homo sapiens
ctaggatctcagctg

SEQ ID NO: 53911 - DNA, 15 bp, Homo sapiens
actaggatctcagct

SEQ ID NO: 53912 - DNA, 15 bp, Homo sapiens
gactaggatctcagc

SEQ ID NO: 53913 - DNA, 15 bp, Homo sapiens
tgactaggatctcag

SEQ ID NO: 53914 - DNA, 15 bp, Homo sapiens
atgactaggatctca

SEQ ID NO: 53915 - DNA, 15 bp, Homo sapiens
aatgactaggatctc

SEQ ID NO: 53916 - DNA, 15 bp, Homo sapiens
aaatgactaggatct

SEQ ID NO: 53917 - DNA, 15 bp, Homo sapiens
gaaatgactaggatc

SEQ ID NO: 53918 - DNA, 15 bp, Homo sapiens
tgaaatgactaggat

SEQ ID NO: 53919 - DNA, 15 bp, Homo sapiens
gtgaaatgactagga

SEQ ID NO: 53920 - DNA, 15 bp, Homo sapiens
ggtgaaatgactagg

SEQ ID NO: 53921 - DNA, 15 bp, Homo sapiens
aggtgaaatgactag

SEQ ID NO: 53922 - DNA, 15 bp, Homo sapiens
caggtgaaatgacta

SEQ ID NO: 53923 - DNA, 15 bp, Homo sapiens
ccaggtgaaatgact

SEQ ID NO: 53924 - DNA, 15 bp, Homo sapiens
accaggtgaaatgac

SEQ ID NO: 53925 - DNA, 15 bp, Homo sapiens
gaccaggtgaaatga

SEQ ID NO: 53926 - DNA, 15 bp, Homo sapiens
agaccaggtgaaatg

SEQ ID NO: 53927 - DNA, 15 bp, Homo sapiens
tagaccaggtgaaat

SEQ ID NO: 53928 - DNA, 15 bp, Homo sapiens
gtagaccaggtgaaa

SEQ ID NO: 53929 - DNA, 15 bp, Homo sapiens
ggtagaccaggtgaa

SEQ ID NO: 53930 - DNA, 15 bp, Homo sapiens
tggtagaccaggtga

SEQ ID NO: 53931 - DNA, 15 bp, Homo sapiens
ttggtagaccaggtg

SEQ ID NO: 53932 - DNA, 15 bp, Homo sapiens
tttggtagaccaggt

SEQ ID NO: 53933 - DNA, 15 bp, Homo sapiens
ttttggtagaccagg

SEQ ID NO: 53934 - DNA, 15 bp, Homo sapiens
tttttggtagaccag

SEQ ID NO: 53935 - DNA, 15 bp, Homo sapiens
ctttttggtagacca

SEQ ID NO: 53936 - DNA, 15 bp, Homo sapiens
tctttttggtagacc

SEQ ID NO: 53937 - DNA, 15 bp, Homo sapiens
ttctttttggtagac

SEQ ID NO: 53938 - DNA, 15 bp, Homo sapiens
attctttttggtaga

SEQ ID NO: 53939 - DNA, 15 bp, Homo sapiens
cattctttttggtag

SEQ ID NO: 53940 - DNA, 15 bp, Homo sapiens
tcattctttttggta

SEQ ID NO: 53941 - DNA, 15 bp, Homo sapiens
atcattctttttggt

SEQ ID NO: 53942 - DNA, 15 bp, Homo sapiens
aatcattctttttgg

SEQ ID NO: 53943 - DNA, 15 bp, Homo sapiens
aaatcattctttttg

SEQ ID NO: 53944 - DNA, 15 bp, Homo sapiens
aaaatcattcttttt

SEQ ID NO: 53945 - DNA, 15 bp, Homo sapiens
taaaatcattctttt

SEQ ID NO: 53946 - DNA, 15 bp, Homo sapiens
gtaaaatcattcttt

SEQ ID NO: 53947 - DNA, 15 bp, Homo sapiens
agtaaaatcattctt

SEQ ID NO: 53948 - DNA, 15 bp, Homo sapiens
aagtaaaatcattct

SEQ ID NO: 53949 - DNA, 15 bp, Homo sapiens
caagtaaaatcattc

SEQ ID NO: 53950 - DNA, 15 bp, Homo sapiens
gcaagtaaaatcatt

SEQ ID NO: 53951 - DNA, 15 bp, Homo sapiens
agcaagtaaaatcat

SEQ ID NO: 53952 - DNA, 15 bp, Homo sapiens
aagcaagtaaaatca

SEQ ID NO: 53953 - DNA, 15 bp, Homo sapiens
aaagcaagtaaaatc

SEQ ID NO: 53954 - DNA, 15 bp, Homo sapiens
aaaagcaagtaaaat

SEQ ID NO: 53955 - DNA, 15 bp, Homo sapiens
caaaagcaagtaaaa

SEQ ID NO: 53956 - DNA, 15 bp, Homo sapiens
ccaaaagcaagtaaa

SEQ ID NO: 53957 - DNA, 15 bp, Homo sapiens
accaaaagcaagtaa

SEQ ID NO: 53958 - DNA, 15 bp, Homo sapiens
gaccaaaagcaagta

SEQ ID NO: 53959 - DNA, 15 bp, Homo sapiens
tgaccaaaagcaagt

SEQ ID NO: 53960 - DNA, 15 bp, Homo sapiens
ttgaccaaaagcaag

SEQ ID NO: 53961 - DNA, 15 bp, Homo sapiens
tttgaccaaaagcaa

SEQ ID NO: 53962 - DNA, 15 bp, Homo sapiens
atttgaccaaaagca

SEQ ID NO: 53963 - DNA, 15 bp, Homo sapiens
gatttgaccaaaagc

SEQ ID NO: 53964 - DNA, 15 bp, Homo sapiens
agatttgaccaaaag

SEQ ID NO: 53965 - DNA, 15 bp, Homo sapiens
gagatttgaccaaaa

SEQ ID NO: 53966 - DNA, 15 bp, Homo sapiens
agagatttgaccaaa

SEQ ID NO: 53967 - DNA, 15 bp, Homo sapiens
cagagatttgaccaa

SEQ ID NO: 53968 - DNA, 15 bp, Homo sapiens
gcagagatttgacca

SEQ ID NO: 53969 - DNA, 15 bp, Homo sapiens
ggcagagatttgacc

SEQ ID NO: 53970 - DNA, 15 bp, Homo sapiens
gggcagagatttgac

SEQ ID NO: 53971 - DNA, 15 bp, Homo sapiens
tgggcagagatttga

SEQ ID NO: 53972 - DNA, 15 bp, Homo sapiens
ctgggcagagatttg

SEQ ID NO: 53973 - DNA, 15 bp, Homo sapiens
gctgggcagagattt

SEQ ID NO: 53974 - DNA, 15 bp, Homo sapiens
tgctgggcagagatt

SEQ ID NO: 53975 - DNA, 15 bp, Homo sapiens
ttgctgggcagagat

SEQ ID NO: 53976 - DNA, 15 bp, Homo sapiens
attgctgggcagaga

SEQ ID NO: 53977 - DNA, 15 bp, Homo sapiens
aattgctgggcagag

SEQ ID NO: 53978 - DNA, 15 bp, Homo sapiens
gaattgctgggcaga

SEQ ID NO: 53979 - DNA, 15 bp, Homo sapiens
agaattgctgggcag

SEQ ID NO: 53980 - DNA, 15 bp, Homo sapiens
aagaattgctgggca

SEQ ID NO: 53981 - DNA, 15 bp, Homo sapiens
aaagaattgctgggc

SEQ ID NO: 53982 - DNA, 15 bp, Homo sapiens
aaaagaattgctggg

SEQ ID NO: 53983 - DNA, 15 bp, Homo sapiens
aaaaagaattgctgg

SEQ ID NO: 53984 - DNA, 15 bp, Homo sapiens
gaaaaagaattgctg

SEQ ID NO: 53985 - DNA, 15 bp, Homo sapiens
agaaaaagaattgct

SEQ ID NO: 53986 - DNA, 15 bp, Homo sapiens
aagaaaaagaattgc

SEQ ID NO: 53987 - DNA, 15 bp, Homo sapiens
aaagaaaaagaattg

SEQ ID NO: 53988 - DNA, 15 bp, Homo sapiens
gaaagaaaaagaatt

SEQ ID NO: 53989 - DNA, 15 bp, Homo sapiens
agaaagaaaaagaat

SEQ ID NO: 53990 - DNA, 15 bp, Homo sapiens
aagaaagaaaaagaa

SEQ ID NO: 53991 - DNA, 15 bp, Homo sapiens
aaagaaagaaaaaga

SEQ ID NO: 53992 - DNA, 15 bp, Homo sapiens
gaaagaaagaaaaag

SEQ ID NO: 53993 - DNA, 15 bp, Homo sapiens
agaaagaaagaaaaa

SEQ ID NO: 53994 - DNA, 15 bp, Homo sapiens
aagaaagaaagaaaa

SEQ ID NO: 53995 - DNA, 15 bp, Homo sapiens
aaagaaagaaagaaa

SEQ ID NO: 53996 - DNA, 15 bp, Homo sapiens
aaaagaaagaaagaa

SEQ ID NO: 53997 - DNA, 15 bp, Homo sapiens
aaaaagaaagaaaga

SEQ ID NO: 53998 - DNA, 15 bp, Homo sapiens
aaaaaagaaagaaag

SEQ ID NO: 53999 - DNA, 15 bp, Homo sapiens
aaaaaaagaaagaaa

SEQ ID NO: 54000 - DNA, 15 bp, Homo sapiens
aaaaaaaagaaagaa

SEQ ID NO: 54001 - DNA, 15 bp, Homo sapiens
caaaaaaaagaaaga

SEQ ID NO: 54002 - DNA, 15 bp, Homo sapiens
acaaaaaaaagaaag

SEQ ID NO: 54003 - DNA, 15 bp, Homo sapiens
aacaaaaaaaagaaa

SEQ ID NO: 54004 - DNA, 15 bp, Homo sapiens
aaacaaaaaaaagaa

SEQ ID NO: 54005 - DNA, 15 bp, Homo sapiens
aaaacaaaaaaaaga

SEQ ID NO: 54006 - DNA, 15 bp, Homo sapiens
taaaacaaaaaaaag

SEQ ID NO: 54007 - DNA, 15 bp, Homo sapiens
ataaaacaaaaaaaa

SEQ ID NO: 54008 - DNA, 15 bp, Homo sapiens
cataaaacaaaaaaa

SEQ ID NO: 54009 - DNA, 15 bp, Homo sapiens
acataaaacaaaaaa

SEQ ID NO: 54010 - DNA, 15 bp, Homo sapiens
cacataaaacaaaaa

SEQ ID NO: 54011 - DNA, 15 bp, Homo sapiens
acacataaaacaaaa

SEQ ID NO: 54012 - DNA, 15 bp, Homo sapiens
cacacataaaacaaa

SEQ ID NO: 54013 - DNA, 15 bp, Homo sapiens
acacacataaaacaa

SEQ ID NO: 54014 - DNA, 15 bp, Homo sapiens
cacacacataaaaca

SEQ ID NO: 54015 - DNA, 15 bp, Homo sapiens
acacacacataaaac

SEQ ID NO: 54016 - DNA, 15 bp, Homo sapiens
cacacacacataaaa

SEQ ID NO: 54017 - DNA, 15 bp, Homo sapiens
acacacacacataaa

SEQ ID NO: 54018 - DNA, 15 bp, Homo sapiens
cacacacacacataa

SEQ ID NO: 54019 - DNA, 15 bp, Homo sapiens
acacacacacacata

SEQ ID NO: 54020 - DNA, 15 bp, Homo sapiens
cacacacacacacat

SEQ ID NO: 54021 - DNA, 15 bp, Homo sapiens
aacacacacacacac

SEQ ID NO: 54022 - DNA, 15 bp, Homo sapiens
aaacacacacacaca

SEQ ID NO: 54023 - DNA, 15 bp, Homo sapiens
aaaacacacacacac

SEQ ID NO: 54024 - DNA, 15 bp, Homo sapiens
aaaaacacacacaca

SEQ ID NO: 54025 - DNA, 15 bp, Homo sapiens
aaaaaacacacacac

SEQ ID NO: 54026 - DNA, 15 bp, Homo sapiens
aaaaaaacacacaca

SEQ ID NO: 54027 - DNA, 15 bp, Homo sapiens
aaaaaaaacacacac

SEQ ID NO: 54028 - DNA, 15 bp, Homo sapiens
aaaaaaaaacacaca

SEQ ID NO: 54029 - DNA, 15 bp, Homo sapiens
taaaaaaaaacacac

SEQ ID NO: 54030 - DNA, 15 bp, Homo sapiens
ctaaaaaaaaacaca

SEQ ID NO: 54031 - DNA, 15 bp, Homo sapiens
gctaaaaaaaaacac

SEQ ID NO: 54032 - DNA, 15 bp, Homo sapiens
tgctaaaaaaaaaca

SEQ ID NO: 54033 - DNA, 15 bp, Homo sapiens
ctgctaaaaaaaaac

SEQ ID NO: 54034 - DNA, 15 bp, Homo sapiens
tctgctaaaaaaaaa

SEQ ID NO: 54035 - DNA, 15 bp, Homo sapiens
ctctgctaaaaaaaa

SEQ ID NO: 54036 - DNA, 15 bp, Homo sapiens
actctgctaaaaaaa

SEQ ID NO: 54037 - DNA, 15 bp, Homo sapiens
gactctgctaaaaaa

SEQ ID NO: 54038 - DNA, 15 bp, Homo sapiens
agactctgctaaaaa

SEQ ID NO: 54039 - DNA, 15 bp, Homo sapiens
gagactctgctaaaa

SEQ ID NO: 54040 - DNA, 15 bp, Homo sapiens
tgagactctgctaaa

SEQ ID NO: 54041 - DNA, 15 bp, Homo sapiens
gtgagactctgctaa

SEQ ID NO: 54042 - DNA, 15 bp, Homo sapiens
agtgagactctgcta

SEQ ID NO: 54043 - DNA, 15 bp, Homo sapiens
aagtgagactctgct

SEQ ID NO: 54044 - DNA, 15 bp, Homo sapiens
aaagtgagactctgc

SEQ ID NO: 54045 - DNA, 15 bp, Homo sapiens
caaagtgagactctg

SEQ ID NO: 54046 - DNA, 15 bp, Homo sapiens
acaaagtgagactct

SEQ ID NO: 54047 - DNA, 15 bp, Homo sapiens
gacaaagtgagactc

SEQ ID NO: 54048 - DNA, 15 bp, Homo sapiens
tgacaaagtgagact

SEQ ID NO: 54049 - DNA, 15 bp, Homo sapiens
gtgacaaagtgagac

SEQ ID NO: 54050 - DNA, 15 bp, Homo sapiens
ggtgacaaagtgaga

SEQ ID NO: 54051 - DNA, 15 bp, Homo sapiens
gggtgacaaagtgag

SEQ ID NO: 54052 - DNA, 15 bp, Homo sapiens
tgggtgacaaagtga

SEQ ID NO: 54053 - DNA, 15 bp, Homo sapiens
ctgggtgacaaagtg

SEQ ID NO: 54054 - DNA, 15 bp, Homo sapiens
cctgggtgacaaagt

SEQ ID NO: 54055 - DNA, 15 bp, Homo sapiens
gcctgggtgacaaag

SEQ ID NO: 54056 - DNA, 15 bp, Homo sapiens
cgcctgggtgacaaa

SEQ ID NO: 54057 - DNA, 15 bp, Homo sapiens
ccgcctgggtgacaa

SEQ ID NO: 54058 - DNA, 15 bp, Homo sapiens
cccgcctgggtgaca

SEQ ID NO: 54059 - DNA, 15 bp, Homo sapiens
tcccgcctgggtgac

SEQ ID NO: 54060 - DNA, 15 bp, Homo sapiens
ctcccgcctgggtga

SEQ ID NO: 54061 - DNA, 15 bp, Homo sapiens
actcccgcctgggtg

SEQ ID NO: 54062 - DNA, 15 bp, Homo sapiens
cactcccgcctgggt

SEQ ID NO: 54063 - DNA, 15 bp, Homo sapiens
acactcccgcctggg

SEQ ID NO: 54064 - DNA, 15 bp, Homo sapiens
cacactcccgcctgg

SEQ ID NO: 54065 - DNA, 15 bp, Homo sapiens
ccacactcccgcctg

SEQ ID NO: 54066 - DNA, 15 bp, Homo sapiens
accacactcccgcct

SEQ ID NO: 54067 - DNA, 15 bp, Homo sapiens
caccacactcccgcc

SEQ ID NO: 54068 - DNA, 15 bp, Homo sapiens
ccaccacactcccgc

SEQ ID NO: 54069 - DNA, 15 bp, Homo sapiens
accaccacactcccg

SEQ ID NO: 54070 - DNA, 15 bp, Homo sapiens
taccaccacactccc

SEQ ID NO: 54071 - DNA, 15 bp, Homo sapiens
ataccaccacactcc

SEQ ID NO: 54072 - DNA, 15 bp, Homo sapiens
cataccaccacactc

SEQ ID NO: 54073 - DNA, 15 bp, Homo sapiens
tcataccaccacact

SEQ ID NO: 54074 - DNA, 15 bp, Homo sapiens
atcataccaccacac

SEQ ID NO: 54075 - DNA, 15 bp, Homo sapiens
gatcataccaccaca

SEQ ID NO: 54076 - DNA, 15 bp, Homo sapiens
tgatcataccaccac

SEQ ID NO: 54077 - DNA, 15 bp, Homo sapiens
gtgatcataccacca

SEQ ID NO: 54078 - DNA, 15 bp, Homo sapiens
tgtgatcataccacc

SEQ ID NO: 54079 - DNA, 15 bp, Homo sapiens
ctgtgatcataccac

SEQ ID NO: 54080 - DNA, 15 bp, Homo sapiens
actgtgatcatacca

SEQ ID NO: 54081 - DNA, 15 bp, Homo sapiens
aactgtgatcatacc

SEQ ID NO: 54082 - DNA, 15 bp, Homo sapiens
gaactgtgatcatac

SEQ ID NO: 54083 - DNA, 15 bp, Homo sapiens
tgaactgtgatcata

SEQ ID NO: 54084 - DNA, 15 bp, Homo sapiens
gtgaactgtgatcat

SEQ ID NO: 54085 - DNA, 15 bp, Homo sapiens
agtgaactgtgatca

SEQ ID NO: 54086 - DNA, 15 bp, Homo sapiens
cagtgaactgtgatc

SEQ ID NO: 54087 - DNA, 15 bp, Homo sapiens
gcagtgaactgtgat

SEQ ID NO: 54088 - DNA, 15 bp, Homo sapiens
tgcagtgaactgtga

SEQ ID NO: 54089 - DNA, 15 bp, Homo sapiens
ctgcagtgaactgtg

SEQ ID NO: 54090 - DNA, 15 bp, Homo sapiens
gctgcagtgaactgt

SEQ ID NO: 54091 - DNA, 15 bp, Homo sapiens
ggctgcagtgaactg

SEQ ID NO: 54092 - DNA, 15 bp, Homo sapiens
aggctgcagtgaact

SEQ ID NO: 54093 - DNA, 15 bp, Homo sapiens
gaggctgcagtgaac

SEQ ID NO: 54094 - DNA, 15 bp, Homo sapiens
ggaggctgcagtgaa

SEQ ID NO: 54095 - DNA, 15 bp, Homo sapiens
tggaggctgcagtga

SEQ ID NO: 54096 - DNA, 15 bp, Homo sapiens
ttggaggctgcagtg

SEQ ID NO: 54097 - DNA, 15 bp, Homo sapiens
gttggaggctgcagt

SEQ ID NO: 54098 - DNA, 15 bp, Homo sapiens
agttggaggctgcag

SEQ ID NO: 54099 - DNA, 15 bp, Homo sapiens
gagttggaggctgca

SEQ ID NO: 54100 - DNA, 15 bp, Homo sapiens
ggagttggaggctgc

SEQ ID NO: 54101 - DNA, 15 bp, Homo sapiens
aggagttggaggctg

SEQ ID NO: 54102 - DNA, 15 bp, Homo sapiens
caggagttggaggct

SEQ ID NO: 54103 - DNA, 15 bp, Homo sapiens
ccaggagttggaggc

SEQ ID NO: 54104 - DNA, 15 bp, Homo sapiens
cccaggagttggagg

SEQ ID NO: 54105 - DNA, 15 bp, Homo sapiens
gcccaggagttggag

SEQ ID NO: 54106 - DNA, 15 bp, Homo sapiens
agcccaggagttgga

SEQ ID NO: 54107 - DNA, 15 bp, Homo sapiens
gagcccaggagttgg

SEQ ID NO: 54108 - DNA, 15 bp, Homo sapiens
tgagcccaggagttg

SEQ ID NO: 54109 - DNA, 15 bp, Homo sapiens
ttgagcccaggagtt

SEQ ID NO: 54110 - DNA, 15 bp, Homo sapiens
cttgagcccaggagt

SEQ ID NO: 54111 - DNA, 15 bp, Homo sapiens
acttgagcccaggag

SEQ ID NO: 54112 - DNA, 15 bp, Homo sapiens
aggatcacttgagcc

SEQ ID NO: 54113 - DNA, 15 bp, Homo sapiens
gaggatcacttgagc

SEQ ID NO: 54114 - DNA, 15 bp, Homo sapiens
ggaggatcacttgag

SEQ ID NO: 54115 - DNA, 15 bp, Homo sapiens
tggaggatcacttga

SEQ ID NO: 54116 - DNA, 15 bp, Homo sapiens
ctggaggatcacttg

SEQ ID NO: 54117 - DNA, 15 bp, Homo sapiens
gctggaggatcactt

SEQ ID NO: 54118 - DNA, 15 bp, Homo sapiens
agctggaggatcact

SEQ ID NO: 54119 - DNA, 15 bp, Homo sapiens
aagctggaggatcac

SEQ ID NO: 54120 - DNA, 15 bp, Homo sapiens
gaagctggaggatca

SEQ ID NO: 54121 - DNA, 15 bp, Homo sapiens
tgaagctggaggatc

SEQ ID NO: 54122 - DNA, 15 bp, Homo sapiens
ctgaagctggaggat

SEQ ID NO: 54123 - DNA, 15 bp, Homo sapiens
gctgaagctggagga

SEQ ID NO: 54124 - DNA, 15 bp, Homo sapiens
agctgaagctggagg

SEQ ID NO: 54125 - DNA, 15 bp, Homo sapiens
aagctgaagctggag

SEQ ID NO: 54126 - DNA, 15 bp, Homo sapiens
aaagctgaagctgga

SEQ ID NO: 54127 - DNA, 15 bp, Homo sapiens
aaaagctgaagctgg

SEQ ID NO: 54128 - DNA, 15 bp, Homo sapiens
gaaaagctgaagctg

SEQ ID NO: 54129 - DNA, 15 bp, Homo sapiens
tgaaaagctgaagct

SEQ ID NO: 54130 - DNA, 15 bp, Homo sapiens
ttgaaaagctgaagc

SEQ ID NO: 54131 - DNA, 15 bp, Homo sapiens
cttgaaaagctgaag

SEQ ID NO: 54132 - DNA, 15 bp, Homo sapiens
tcttgaaaagctgaa

SEQ ID NO: 54133 - DNA, 15 bp, Homo sapiens
ttcttgaaaagctga

SEQ ID NO: 54134 - DNA, 15 bp, Homo sapiens
tttcttgaaaagctg

SEQ ID NO: 54135 - DNA, 15 bp, Homo sapiens
atttcttgaaaagct

SEQ ID NO: 54136 - DNA, 15 bp, Homo sapiens
aatttcttgaaaagc

SEQ ID NO: 54137 - DNA, 15 bp, Homo sapiens
caatttcttgaaaag

SEQ ID NO: 54138 - DNA, 15 bp, Homo sapiens
ccaatttcttgaaaa

SEQ ID NO: 54139 - DNA, 15 bp, Homo sapiens
cccaatttcttgaaa

SEQ ID NO: 54140 - DNA, 15 bp, Homo sapiens
tcccaatttcttgaa

SEQ ID NO: 54141 - DNA, 15 bp, Homo sapiens
gtcccaatttcttga

SEQ ID NO: 54142 - DNA, 15 bp, Homo sapiens
agtcccaatttcttg

SEQ ID NO: 54143 - DNA, 15 bp, Homo sapiens
cagtcccaatttctt

SEQ ID NO: 54144 - DNA, 15 bp, Homo sapiens
gcagtcccaatttct

SEQ ID NO: 54145 - DNA, 15 bp, Homo sapiens
tgcagtcccaatttc

SEQ ID NO: 54146 - DNA, 15 bp, Homo sapiens
ctgcagtcccaattt

SEQ ID NO: 54147 - DNA, 15 bp, Homo sapiens
cctgcagtcccaatt

SEQ ID NO: 54148 - DNA, 15 bp, Homo sapiens
gcctgcagtcccaat

SEQ ID NO: 54149 - DNA, 15 bp, Homo sapiens
tgcctgcagtcccaa

SEQ ID NO: 54150 - DNA, 15 bp, Homo sapiens
gtgcctgcagtccca

SEQ ID NO: 54151 - DNA, 15 bp, Homo sapiens
tgtgcctgcagtccc

SEQ ID NO: 54152 - DNA, 15 bp, Homo sapiens
atgtgcctgcagtcc

SEQ ID NO: 54153 - DNA, 15 bp, Homo sapiens
catgtgcctgcagtc

SEQ ID NO: 54154 - DNA, 15 bp, Homo sapiens
gcatgtgcctgcagt

SEQ ID NO: 54155 - DNA, 15 bp, Homo sapiens
tgcatgtgcctgcag

SEQ ID NO: 54156 - DNA, 15 bp, Homo sapiens
ttgcatgtgcctgca

SEQ ID NO: 54157 - DNA, 15 bp, Homo sapiens
gttgcatgtgcctgc

SEQ ID NO: 54158 - DNA, 15 bp, Homo sapiens
agttgcatgtgcctg

SEQ ID NO: 54159 - DNA, 15 bp, Homo sapiens
tagttgcatgtgcct

SEQ ID NO: 54160 - DNA, 15 bp, Homo sapiens
atagttgcatgtgcc

SEQ ID NO: 54161 - DNA, 15 bp, Homo sapiens
catagttgcatgtgc

SEQ ID NO: 54162 - DNA, 15 bp, Homo sapiens
gcatagttgcatgtg

SEQ ID NO: 54163 - DNA, 15 bp, Homo sapiens
ggcatagttgcatgt

SEQ ID NO: 54164 - DNA, 15 bp, Homo sapiens
aggcatagttgcatg

SEQ ID NO: 54165 - DNA, 15 bp, Homo sapiens
caggcatagttgcat

SEQ ID NO: 54166 - DNA, 15 bp, Homo sapiens
ccaggcatagttgca

SEQ ID NO: 54167 - DNA, 15 bp, Homo sapiens
gccaggcatagttgc

SEQ ID NO: 54168 - DNA, 15 bp, Homo sapiens
agccaggcatagttg

SEQ ID NO: 54169 - DNA, 15 bp, Homo sapiens
cagccaggcatagtt

SEQ ID NO: 54170 - DNA, 15 bp, Homo sapiens
tcagccaggcatagt

SEQ ID NO: 54171 - DNA, 15 bp, Homo sapiens
ctcagccaggcatag

SEQ ID NO: 54172 - DNA, 15 bp, Homo sapiens
cctcagccaggcata

SEQ ID NO: 54173 - DNA, 15 bp, Homo sapiens
acctcagccaggcat

SEQ ID NO: 54174 - DNA, 15 bp, Homo sapiens
aacctcagccaggca

SEQ ID NO: 54175 - DNA, 15 bp, Homo sapiens
aaacctcagccaggc

SEQ ID NO: 54176 - DNA, 15 bp, Homo sapiens
aaaacctcagccagg

SEQ ID NO: 54177 - DNA, 15 bp, Homo sapiens
taaaacctcagccag

SEQ ID NO: 54178 - DNA, 15 bp, Homo sapiens
ataaaacctcagcca

SEQ ID NO: 54179 - DNA, 15 bp, Homo sapiens
cataaaacctcagcc

SEQ ID NO: 54180 - DNA, 15 bp, Homo sapiens
acataaaacctcagc

SEQ ID NO: 54181 - DNA, 15 bp, Homo sapiens
tacataaaacctcag

SEQ ID NO: 54182 - DNA, 15 bp, Homo sapiens
atacataaaacctca

SEQ ID NO: 54183 - DNA, 15 bp, Homo sapiens
gatacataaaacctc

SEQ ID NO: 54184 - DNA, 15 bp, Homo sapiens
agatacataaaacct

SEQ ID NO: 54185 - DNA, 15 bp, Homo sapiens
aagatacataaaacc

SEQ ID NO: 54186 - DNA, 15 bp, Homo sapiens
aaagatacataaaac

SEQ ID NO: 54187 - DNA, 15 bp, Homo sapiens
aaaagatacataaaa

SEQ ID NO: 54188 - DNA, 15 bp, Homo sapiens
aaaaagatacataaa

SEQ ID NO: 54189 - DNA, 15 bp, Homo sapiens
aaaaaagatacataa

SEQ ID NO: 54190 - DNA, 15 bp, Homo sapiens
gaaaaaagatacata

SEQ ID NO: 54191 - DNA, 15 bp, Homo sapiens
agaaaaaagatacat

SEQ ID NO: 54192 - DNA, 15 bp, Homo sapiens
tagaaaaaagataca

SEQ ID NO: 54193 - DNA, 15 bp, Homo sapiens
ctagaaaaaagatac

SEQ ID NO: 54194 - DNA, 15 bp, Homo sapiens
tctagaaaaaagata

SEQ ID NO: 54195 - DNA, 15 bp, Homo sapiens
ctctagaaaaaagat

SEQ ID NO: 54196 - DNA, 15 bp, Homo sapiens
tctctagaaaaaaga

SEQ ID NO: 54197 - DNA, 15 bp, Homo sapiens
ttctctagaaaaaag

SEQ ID NO: 54198 - DNA, 15 bp, Homo sapiens
cttctctagaaaaaa

SEQ ID NO: 54199 - DNA, 15 bp, Homo sapiens
ccttctctagaaaaa

SEQ ID NO: 54200 - DNA, 15 bp, Homo sapiens
cccttctctagaaaa

SEQ ID NO: 54201 - DNA, 15 bp, Homo sapiens
ccccttctctagaaa

SEQ ID NO: 54202 - DNA, 15 bp, Homo sapiens
accccttctctagaa

SEQ ID NO: 54203 - DNA, 15 bp, Homo sapiens
gaccccttctctaga

SEQ ID NO: 54204 - DNA, 15 bp, Homo sapiens
agaccccttctctag

SEQ ID NO: 54205 - DNA, 15 bp, Homo sapiens
gagaccccttctcta

SEQ ID NO: 54206 - DNA, 15 bp, Homo sapiens
tgagaccccttctct

SEQ ID NO: 54207 - DNA, 15 bp, Homo sapiens
gtgagaccccttctc

SEQ ID NO: 54208 - DNA, 15 bp, Homo sapiens
agtgagaccccttct

SEQ ID NO: 54209 - DNA, 15 bp, Homo sapiens
cagtgagaccccttc

SEQ ID NO: 54210 - DNA, 15 bp, Homo sapiens
acagtgagacccctt

SEQ ID NO: 54211 - DNA, 15 bp, Homo sapiens
cacagtgagacccct

SEQ ID NO: 54212 - DNA, 15 bp, Homo sapiens
acacagtgagacccc

SEQ ID NO: 54213 - DNA, 15 bp, Homo sapiens
aacacagtgagaccc

SEQ ID NO: 54214 - DNA, 15 bp, Homo sapiens
caacacagtgagacc

SEQ ID NO: 54215 - DNA, 15 bp, Homo sapiens
gctgggcaacacagt

SEQ ID NO: 54216 - DNA, 15 bp, Homo sapiens
agctgggcaacacag

SEQ ID NO: 54217 - DNA, 15 bp, Homo sapiens
cagctgggcaacaca

SEQ ID NO: 54218 - DNA, 15 bp, Homo sapiens
ccagctgggcaacac

SEQ ID NO: 54219 - DNA, 15 bp, Homo sapiens
cccagctgggcaaca

SEQ ID NO: 54220 - DNA, 15 bp, Homo sapiens
acccagctgggcaac

SEQ ID NO: 54221 - DNA, 15 bp, Homo sapiens
gacccagctgggcaa

SEQ ID NO: 54222 - DNA, 15 bp, Homo sapiens
agacccagctgggca

SEQ ID NO: 54223 - DNA, 15 bp, Homo sapiens
gagacccagctgggc

SEQ ID NO: 54224 - DNA, 15 bp, Homo sapiens
ggagacccagctggg

SEQ ID NO: 54225 - DNA, 15 bp, Homo sapiens
tggagacccagctgg

SEQ ID NO: 54226 - DNA, 15 bp, Homo sapiens
ctggagacccagctg

SEQ ID NO: 54227 - DNA, 15 bp, Homo sapiens
gctggagacccagct

SEQ ID NO: 54228 - DNA, 15 bp, Homo sapiens
agctggagacccagc

SEQ ID NO: 54229 - DNA, 15 bp, Homo sapiens
gagctggagacccag

SEQ ID NO: 54230 - DNA, 15 bp, Homo sapiens
ggagctggagaccca

SEQ ID NO: 54231 - DNA, 15 bp, Homo sapiens
aggagctggagaccc

SEQ ID NO: 54232 - DNA, 15 bp, Homo sapiens
caggagctggagacc

SEQ ID NO: 54233 - DNA, 15 bp, Homo sapiens
ccaggagctggagac

SEQ ID NO: 54234 - DNA, 15 bp, Homo sapiens
accaggagctggaga

SEQ ID NO: 54235 - DNA, 15 bp, Homo sapiens
gaccaggagctggag

SEQ ID NO: 54236 - DNA, 15 bp, Homo sapiens
agaccaggagctgga

SEQ ID NO: 54237 - DNA, 15 bp, Homo sapiens
gagaccaggagctgg

SEQ ID NO: 54238 - DNA, 15 bp, Homo sapiens
tgagaccaggagctg

SEQ ID NO: 54239 - DNA, 15 bp, Homo sapiens
ttgagaccaggagct

SEQ ID NO: 54240 - DNA, 15 bp, Homo sapiens
cttgagaccaggagc

SEQ ID NO: 54241 - DNA, 15 bp, Homo sapiens
gcttgagaccaggag

SEQ ID NO: 54242 - DNA, 15 bp, Homo sapiens
agcttgagaccagga

SEQ ID NO: 54243 - DNA, 15 bp, Homo sapiens
cagcttgagaccagg

SEQ ID NO: 54244 - DNA, 15 bp, Homo sapiens
acagcttgagaccag

SEQ ID NO: 54245 - DNA, 15 bp, Homo sapiens
gacagcttgagacca

SEQ ID NO: 54246 - DNA, 15 bp, Homo sapiens
ggacagcttgagacc

SEQ ID NO: 54247 - DNA, 15 bp, Homo sapiens
aggacagcttgagac

SEQ ID NO: 54248 - DNA, 15 bp, Homo sapiens
gaggacagcttgaga

SEQ ID NO: 54249 - DNA, 15 bp, Homo sapiens
ggaggacagcttgag

SEQ ID NO: 54250 - DNA, 15 bp, Homo sapiens
aggaggacagcttga

SEQ ID NO: 54251 - DNA, 15 bp, Homo sapiens
caggaggacagcttg

SEQ ID NO: 54252 - DNA, 15 bp, Homo sapiens
gcaggaggacagctt

SEQ ID NO: 54253 - DNA, 15 bp, Homo sapiens
ggcaggaggacagct

SEQ ID NO: 54254 - DNA, 15 bp, Homo sapiens
aggcaggaggacagc

SEQ ID NO: 54255 - DNA, 15 bp, Homo sapiens
gaggcaggaggacag

SEQ ID NO: 54256 - DNA, 15 bp, Homo sapiens
tgaggcaggaggaca

SEQ ID NO: 54257 - DNA, 15 bp, Homo sapiens
ctgaggcaggaggac

SEQ ID NO: 54258 - DNA, 15 bp, Homo sapiens
gctgaggcaggagga

SEQ ID NO: 54259 - DNA, 15 bp, Homo sapiens
ggctgaggcaggagg

SEQ ID NO: 54260 - DNA, 15 bp, Homo sapiens
ggcactttgggaggc

SEQ ID NO: 54261 - DNA, 15 bp, Homo sapiens
tggcactttgggagg

SEQ ID NO: 54262 - DNA, 15 bp, Homo sapiens
ttggcactttgggag

SEQ ID NO: 54263 - DNA, 15 bp, Homo sapiens
tttggcactttggga

SEQ ID NO: 54264 - DNA, 15 bp, Homo sapiens
ctttggcactttggg

SEQ ID NO: 54265 - DNA, 15 bp, Homo sapiens
actttggcactttgg

SEQ ID NO: 54266 - DNA, 15 bp, Homo sapiens
cactttggcactttg

SEQ ID NO: 54267 - DNA, 15 bp, Homo sapiens
gcactttggcacttt

SEQ ID NO: 54268 - DNA, 15 bp, Homo sapiens
agcactttggcactt

SEQ ID NO: 54269 - DNA, 15 bp, Homo sapiens
tagcactttggcact

SEQ ID NO: 54270 - DNA, 15 bp, Homo sapiens
ctagcactttggcac

SEQ ID NO: 54271 - DNA, 15 bp, Homo sapiens
cctagcactttggca

SEQ ID NO: 54272 - DNA, 15 bp, Homo sapiens
ccctagcactttggc

SEQ ID NO: 54273 - DNA, 15 bp, Homo sapiens
accctagcactttgg

SEQ ID NO: 54274 - DNA, 15 bp, Homo sapiens
aaccctagcactttg

SEQ ID NO: 54275 - DNA, 15 bp, Homo sapiens
taaccctagcacttt

SEQ ID NO: 54276 - DNA, 15 bp, Homo sapiens
ataaccctagcactt

SEQ ID NO: 54277 - DNA, 15 bp, Homo sapiens
tataaccctagcact

SEQ ID NO: 54278 - DNA, 15 bp, Homo sapiens
ctataaccctagcac

SEQ ID NO: 54279 - DNA, 15 bp, Homo sapiens
cctataaccctagca

SEQ ID NO: 54280 - DNA, 15 bp, Homo sapiens
acctataaccctagc

SEQ ID NO: 54281 - DNA, 15 bp, Homo sapiens
cacctataaccctag

SEQ ID NO: 54282 - DNA, 15 bp, Homo sapiens
acacctataacccta

SEQ ID NO: 54283 - DNA, 15 bp, Homo sapiens
cacacctataaccct

SEQ ID NO: 54284 - DNA, 15 bp, Homo sapiens
tcacacctataaccc

SEQ ID NO: 54285 - DNA, 15 bp, Homo sapiens
ctcacacctataacc

SEQ ID NO: 54286 - DNA, 15 bp, Homo sapiens
gctcacacctataac

SEQ ID NO: 54287 - DNA, 15 bp, Homo sapiens
atggctcacacctat

SEQ ID NO: 54288 - DNA, 15 bp, Homo sapiens
aatggctcacaccta

SEQ ID NO: 54289 - DNA, 15 bp, Homo sapiens
caatggctcacacct

SEQ ID NO: 54290 - DNA, 15 bp, Homo sapiens
ccaatggctcacacc

SEQ ID NO: 54291 - DNA, 15 bp, Homo sapiens
accaatggctcacac

SEQ ID NO: 54292 - DNA, 15 bp, Homo sapiens
caccaatggctcaca

SEQ ID NO: 54293 - DNA, 15 bp, Homo sapiens
gcaccaatggctcac

SEQ ID NO: 54294 - DNA, 15 bp, Homo sapiens
ggcaccaatggctca

SEQ ID NO: 54295 - DNA, 15 bp, Homo sapiens
gggcaccaatggctc

SEQ ID NO: 54296 - DNA, 15 bp, Homo sapiens
tgggcaccaatggct

SEQ ID NO: 54297 - DNA, 15 bp, Homo sapiens
ctgggcaccaatggc

SEQ ID NO: 54298 - DNA, 15 bp, Homo sapiens
gctgggcaccaatgg

SEQ ID NO: 54299 - DNA, 15 bp, Homo sapiens
agctgggcaccaatg

SEQ ID NO: 54300 - DNA, 15 bp, Homo sapiens
tagctgggcaccaat

SEQ ID NO: 54301 - DNA, 15 bp, Homo sapiens
gtagctgggcaccaa

SEQ ID NO: 54302 - DNA, 15 bp, Homo sapiens
agtagctgggcacca

SEQ ID NO: 54303 - DNA, 15 bp, Homo sapiens
cagtagctgggcacc

SEQ ID NO: 54304 - DNA, 15 bp, Homo sapiens
gcagtagctgggcac

SEQ ID NO: 54305 - DNA, 15 bp, Homo sapiens
ggcagtagctgggca

SEQ ID NO: 54306 - DNA, 15 bp, Homo sapiens
aggcagtagctgggc

SEQ ID NO: 54307 - DNA, 15 bp, Homo sapiens
caggcagtagctggg

SEQ ID NO: 54308 - DNA, 15 bp, Homo sapiens
gcaggcagtagctgg

SEQ ID NO: 54309 - DNA, 15 bp, Homo sapiens
ggcaggcagtagctg

SEQ ID NO: 54310 - DNA, 15 bp, Homo sapiens
aggcaggcagtagct

SEQ ID NO: 54311 - DNA, 15 bp, Homo sapiens
caggcaggcagtagc

SEQ ID NO: 54312 - DNA, 15 bp, Homo sapiens
ccaggcaggcagtag

SEQ ID NO: 54313 - DNA, 15 bp, Homo sapiens
gccaggcaggcagta

SEQ ID NO: 54314 - DNA, 15 bp, Homo sapiens
tgccaggcaggcagt

SEQ ID NO: 54315 - DNA, 15 bp, Homo sapiens
ttgccaggcaggcag

SEQ ID NO: 54316 - DNA, 15 bp, Homo sapiens
attgccaggcaggca

SEQ ID NO: 54317 - DNA, 15 bp, Homo sapiens
aattgccaggcaggc

SEQ ID NO: 54318 - DNA, 15 bp, Homo sapiens
gaattgccaggcagg

SEQ ID NO: 54319 - DNA, 15 bp, Homo sapiens
agaattgccaggcag

SEQ ID NO: 54320 - DNA, 15 bp, Homo sapiens
cagaattgccaggca

SEQ ID NO: 54321 - DNA, 15 bp, Homo sapiens
tcagaattgccaggc

SEQ ID NO: 54322 - DNA, 15 bp, Homo sapiens
ttcagaattgccagg

SEQ ID NO: 54323 - DNA, 15 bp, Homo sapiens
attcagaattgccag

SEQ ID NO: 54324 - DNA, 15 bp, Homo sapiens
cattcagaattgcca

SEQ ID NO: 54325 - DNA, 15 bp, Homo sapiens
gcattcagaattgcc

SEQ ID NO: 54326 - DNA, 15 bp, Homo sapiens
ggcattcagaattgc

SEQ ID NO: 54327 - DNA, 15 bp, Homo sapiens
aggcattcagaattg

SEQ ID NO: 54328 - DNA, 15 bp, Homo sapiens
aaggcattcagaatt

SEQ ID NO: 54329 - DNA, 15 bp, Homo sapiens
taaggcattcagaat

SEQ ID NO: 54330 - DNA, 15 bp, Homo sapiens
ttaaggcattcagaa

SEQ ID NO: 54331 - DNA, 15 bp, Homo sapiens
tttaaggcattcaga

SEQ ID NO: 54332 - DNA, 15 bp, Homo sapiens
atttaaggcattcag

SEQ ID NO: 54333 - DNA, 15 bp, Homo sapiens
aatttaaggcattca

SEQ ID NO: 54334 - DNA, 15 bp, Homo sapiens
aaatttaaggcattc

SEQ ID NO: 54335 - DNA, 15 bp, Homo sapiens
aaaatttaaggcatt

SEQ ID NO: 54336 - DNA, 15 bp, Homo sapiens
aaaaatttaaggcat

SEQ ID NO: 54337 - DNA, 15 bp, Homo sapiens
aaaaaatttaaggca

SEQ ID NO: 54338 - DNA, 15 bp, Homo sapiens
aaaaaaatttaaggc

SEQ ID NO: 54339 - DNA, 15 bp, Homo sapiens
aaaaaaaatttaagg

SEQ ID NO: 54340 - DNA, 15 bp, Homo sapiens
aaaaaaaaatttaag

SEQ ID NO: 54341 - DNA, 15 bp, Homo sapiens
aaaaaaaaaatttaa

SEQ ID NO: 54342 - DNA, 15 bp, Homo sapiens
aaaaaaaaaaattta

SEQ ID NO: 54343 - DNA, 15 bp, Homo sapiens
aaaaaaaaaaaattt

SEQ ID NO: 54344 - DNA, 15 bp, Homo sapiens
aaaaaaaaaaaaatt

SEQ ID NO: 54345 - DNA, 15 bp, Homo sapiens
gaaactctgtctcaa

SEQ ID NO: 54346 - DNA, 15 bp, Homo sapiens
tgaaactctgtctca

SEQ ID NO: 54347 - DNA, 15 bp, Homo sapiens
gtgaaactctgtctc

SEQ ID NO: 54348 - DNA, 15 bp, Homo sapiens
agtgaaactctgtct

SEQ ID NO: 54349 - DNA, 15 bp, Homo sapiens
gagtgaaactctgtc

SEQ ID NO: 54350 - DNA, 15 bp, Homo sapiens
agagtgaaactctgt

SEQ ID NO: 54351 - DNA, 15 bp, Homo sapiens
cagagtgaaactctg

SEQ ID NO: 54352 - DNA, 15 bp, Homo sapiens
acagagtgaaactct

SEQ ID NO: 54353 - DNA, 15 bp, Homo sapiens
gacagagtgaaactc

SEQ ID NO: 54354 - DNA, 15 bp, Homo sapiens
tgacagagtgaaact

SEQ ID NO: 54355 - DNA, 15 bp, Homo sapiens
gtgacagagtgaaac

SEQ ID NO: 54356 - DNA, 15 bp, Homo sapiens
ggtgacagagtgaaa

SEQ ID NO: 54357 - DNA, 15 bp, Homo sapiens
gggtgacagagtgaa

SEQ ID NO: 54358 - DNA, 15 bp, Homo sapiens
tgggtgacagagtga

SEQ ID NO: 54359 - DNA, 15 bp, Homo sapiens
ctgggtgacagagtg

SEQ ID NO: 54360 - DNA, 15 bp, Homo sapiens
cctgggtgacagagt

SEQ ID NO: 54361 - DNA, 15 bp, Homo sapiens
ctccagcctgggtga

SEQ ID NO: 54362 - DNA, 15 bp, Homo sapiens
cactccagcctgggt

SEQ ID NO: 54363 - DNA, 15 bp, Homo sapiens
cgatcatgccactgc

SEQ ID NO: 54364 - DNA, 15 bp, Homo sapiens
acgatcatgccactg

SEQ ID NO: 54365 - DNA, 15 bp, Homo sapiens
cacgatcatgccact

SEQ ID NO: 54366 - DNA, 15 bp, Homo sapiens
ccacgatcatgccac

SEQ ID NO: 54367 - DNA, 15 bp, Homo sapiens
gccacgatcatgcca

SEQ ID NO: 54368 - DNA, 15 bp, Homo sapiens
agccacgatcatgcc

SEQ ID NO: 54369 - DNA, 15 bp, Homo sapiens
gagccacgatcatgc

SEQ ID NO: 54370 - DNA, 15 bp, Homo sapiens
tgagccacgatcatg

SEQ ID NO: 54371 - DNA, 15 bp, Homo sapiens
gtgagccacgatcat

SEQ ID NO: 54372 - DNA, 15 bp, Homo sapiens
tgtgagccacgatca

SEQ ID NO: 54373 - DNA, 15 bp, Homo sapiens
ctgtgagccacgatc

SEQ ID NO: 54374 - DNA, 15 bp, Homo sapiens
gctgtgagccacgat

SEQ ID NO: 54375 - DNA, 15 bp, Homo sapiens
tgctgtgagccacga

SEQ ID NO: 54376 - DNA, 15 bp, Homo sapiens
ttgctgtgagccacg

SEQ ID NO: 54377 - DNA, 15 bp, Homo sapiens
gttgctgtgagccac

SEQ ID NO: 54378 - DNA, 15 bp, Homo sapiens
ggttgctgtgagcca

SEQ ID NO: 54379 - DNA, 15 bp, Homo sapiens
aggttgctgtgagcc

SEQ ID NO: 54380 - DNA, 15 bp, Homo sapiens
gaggttgctgtgagc

SEQ ID NO: 54381 - DNA, 15 bp, Homo sapiens
agaggttgctgtgag

SEQ ID NO: 54382 - DNA, 15 bp, Homo sapiens
cagaggttgctgtga

SEQ ID NO: 54383 - DNA, 15 bp, Homo sapiens
gcagaggttgctgtg

SEQ ID NO: 54384 - DNA, 15 bp, Homo sapiens
ggcagaggttgctgt

SEQ ID NO: 54385 - DNA, 15 bp, Homo sapiens
aggcagaggttgctg

SEQ ID NO: 54386 - DNA, 15 bp, Homo sapiens
gaggcagaggttgct

SEQ ID NO: 54387 - DNA, 15 bp, Homo sapiens
ggaggcagaggttgc

SEQ ID NO: 54388 - DNA, 15 bp, Homo sapiens
aggaggcagaggttg

SEQ ID NO: 54389 - DNA, 15 bp, Homo sapiens
caggaggcagaggtt

SEQ ID NO: 54390 - DNA, 15 bp, Homo sapiens
ccaggaggcagaggt

SEQ ID NO: 54391 - DNA, 15 bp, Homo sapiens
tccaggaggcagagg

SEQ ID NO: 54392 - DNA, 15 bp, Homo sapiens
atccaggaggcagag

SEQ ID NO: 54393 - DNA, 15 bp, Homo sapiens
aatccaggaggcaga

SEQ ID NO: 54394 - DNA, 15 bp, Homo sapiens
gaatccaggaggcag

SEQ ID NO: 54395 - DNA, 15 bp, Homo sapiens
ggaatccaggaggca

SEQ ID NO: 54396 - DNA, 15 bp, Homo sapiens
tggaatccaggaggc

SEQ ID NO: 54397 - DNA, 15 bp, Homo sapiens
ctggaatccaggagg

SEQ ID NO: 54398 - DNA, 15 bp, Homo sapiens
gctggaatccaggag

SEQ ID NO: 54399 - DNA, 15 bp, Homo sapiens
tgctggaatccagga

SEQ ID NO: 54400 - DNA, 15 bp, Homo sapiens
ttgctggaatccagg

SEQ ID NO: 54401 - DNA, 15 bp, Homo sapiens
attgctggaatccag

SEQ ID NO: 54402 - DNA, 15 bp, Homo sapiens
aattgctggaatcca

SEQ ID NO: 54403 - DNA, 15 bp, Homo sapiens
gaattgctggaatcc

SEQ ID NO: 54404 - DNA, 15 bp, Homo sapiens
agaattgctggaatc

SEQ ID NO: 54405 - DNA, 15 bp, Homo sapiens
gagaattgctggaat

SEQ ID NO: 54406 - DNA, 15 bp, Homo sapiens
tgagaattgctggaa

SEQ ID NO: 54407 - DNA, 15 bp, Homo sapiens
atgagaattgctgga

SEQ ID NO: 54408 - DNA, 15 bp, Homo sapiens
catgagaattgctgg

SEQ ID NO: 54409 - DNA, 15 bp, Homo sapiens
gcatgagaattgctg

SEQ ID NO: 54410 - DNA, 15 bp, Homo sapiens
ggcatgagaattgct

SEQ ID NO: 54411 - DNA, 15 bp, Homo sapiens
aggcatgagaattgc

SEQ ID NO: 54412 - DNA, 15 bp, Homo sapiens
gaggcatgagaattg

SEQ ID NO: 54413 - DNA, 15 bp, Homo sapiens
tgaggcatgagaatt

SEQ ID NO: 54414 - DNA, 15 bp, Homo sapiens
agctgaggcatgaga

SEQ ID NO: 54415 - DNA, 15 bp, Homo sapiens
aagctgaggcatgag

SEQ ID NO: 54416 - DNA, 15 bp, Homo sapiens
gaagctgaggcatga

SEQ ID NO: 54417 - DNA, 15 bp, Homo sapiens
ggaagctgaggcatg

SEQ ID NO: 54418 - DNA, 15 bp, Homo sapiens
gggaagctgaggcat

SEQ ID NO: 54419 - DNA, 15 bp, Homo sapiens
cgggaagctgaggca

SEQ ID NO: 54420 - DNA, 15 bp, Homo sapiens
tcgggaagctgaggc

SEQ ID NO: 54421 - DNA, 15 bp, Homo sapiens
cacctgtagtcccag

SEQ ID NO: 54422 - DNA, 15 bp, Homo sapiens
gcacctgtagtccca

SEQ ID NO: 54423 - DNA, 15 bp, Homo sapiens
tgcacctgtagtccc

SEQ ID NO: 54424 - DNA, 15 bp, Homo sapiens
atgcacctgtagtcc

SEQ ID NO: 54425 - DNA, 15 bp, Homo sapiens
catgcacctgtagtc

SEQ ID NO: 54426 - DNA, 15 bp, Homo sapiens
gcatgcacctgtagt

SEQ ID NO: 54427 - DNA, 15 bp, Homo sapiens
ggcatgcacctgtag

SEQ ID NO: 54428 - DNA, 15 bp, Homo sapiens
tggcatgcacctgta

SEQ ID NO: 54429 - DNA, 15 bp, Homo sapiens
gtggcatgcacctgt

SEQ ID NO: 54430 - DNA, 15 bp, Homo sapiens
ggtggcatgcacctg

SEQ ID NO: 54431 - DNA, 15 bp, Homo sapiens
tggtggcatgcacct

SEQ ID NO: 54432 - DNA, 15 bp, Homo sapiens
gtggtggcatgcacc

SEQ ID NO: 54433 - DNA, 15 bp, Homo sapiens
cgtggtggcatgcac

SEQ ID NO: 54434 - DNA, 15 bp, Homo sapiens
gcgtggtggcatgca

SEQ ID NO: 54435 - DNA, 15 bp, Homo sapiens
ggcgtggtggcatgc

SEQ ID NO: 54436 - DNA, 15 bp, Homo sapiens
gggcgtggtggcatg

SEQ ID NO: 54437 - DNA, 15 bp, Homo sapiens
tgggcgtggtggcat

SEQ ID NO: 54438 - DNA, 15 bp, Homo sapiens
ccaaaaattagctgg

SEQ ID NO: 54439 - DNA, 15 bp, Homo sapiens
accaaaaattagctg

SEQ ID NO: 54440 - DNA, 15 bp, Homo sapiens
aaccaaaaattagct

SEQ ID NO: 54441 - DNA, 15 bp, Homo sapiens
aaaccaaaaattagc

SEQ ID NO: 54442 - DNA, 15 bp, Homo sapiens
aaaaccaaaaattag

SEQ ID NO: 54443 - DNA, 15 bp, Homo sapiens
aaaaaccaaaaatta

SEQ ID NO: 54444 - DNA, 15 bp, Homo sapiens
aaaaaaccaaaaatt

SEQ ID NO: 54445 - DNA, 15 bp, Homo sapiens
aaaaaaaccaaaaat

SEQ ID NO: 54446 - DNA, 15 bp, Homo sapiens
caaaaaaaccaaaaa

SEQ ID NO: 54447 - DNA, 15 bp, Homo sapiens
acaaaaaaaccaaaa

SEQ ID NO: 54448 - DNA, 15 bp, Homo sapiens
aacaaaaaaaccaaa

SEQ ID NO: 54449 - DNA, 15 bp, Homo sapiens
aaacaaaaaaaccaa

SEQ ID NO: 54450 - DNA, 15 bp, Homo sapiens
caaacaaaaaaacca

SEQ ID NO: 54451 - DNA, 15 bp, Homo sapiens
acaaacaaaaaaacc

SEQ ID NO: 54452 - DNA, 15 bp, Homo sapiens
aacaaacaaaaaaac

SEQ ID NO: 54453 - DNA, 15 bp, Homo sapiens
caaaacaaacaaaca

SEQ ID NO: 54454 - DNA, 15 bp, Homo sapiens
tcaaaacaaacaaac

SEQ ID NO: 54455 - DNA, 15 bp, Homo sapiens
ctcaaaacaaacaaa

SEQ ID NO: 54456 - DNA, 15 bp, Homo sapiens
tctcaaaacaaacaa

SEQ ID NO: 54457 - DNA, 15 bp, Homo sapiens
gtctcaaaacaaaca

SEQ ID NO: 54458 - DNA, 15 bp, Homo sapiens
cgtctcaaaacaaac

SEQ ID NO: 54459 - DNA, 15 bp, Homo sapiens
tgagcgagactccgt

SEQ ID NO: 54460 - DNA, 15 bp, Homo sapiens
ctgagcgagactccg

SEQ ID NO: 54461 - DNA, 15 bp, Homo sapiens
actgagcgagactcc

SEQ ID NO: 54462 - DNA, 15 bp, Homo sapiens
aactgagcgagactc

SEQ ID NO: 54463 - DNA, 15 bp, Homo sapiens
caactgagcgagact

SEQ ID NO: 54464 - DNA, 15 bp, Homo sapiens
gcaactgagcgagac

SEQ ID NO: 54465 - DNA, 15 bp, Homo sapiens
ggcaactgagcgaga

SEQ ID NO: 54466 - DNA, 15 bp, Homo sapiens
gggcaactgagcgag

SEQ ID NO: 54467 - DNA, 15 bp, Homo sapiens
tgggcaactgagcga

SEQ ID NO: 54468 - DNA, 15 bp, Homo sapiens
ctgggcaactgagcg

SEQ ID NO: 54469 - DNA, 15 bp, Homo sapiens
cctgggcaactgagc

SEQ ID NO: 54470 - DNA, 15 bp, Homo sapiens
gcctgggcaactgag

SEQ ID NO: 54471 - DNA, 15 bp, Homo sapiens
agcctgggcaactga

SEQ ID NO: 54472 - DNA, 15 bp, Homo sapiens
cagcctgggcaactg

SEQ ID NO: 54473 - DNA, 15 bp, Homo sapiens
ccagcctgggcaact

SEQ ID NO: 54474 - DNA, 15 bp, Homo sapiens
ggagatcacgccact

SEQ ID NO: 54475 - DNA, 15 bp, Homo sapiens
cggagatcacgccac

SEQ ID NO: 54476 - DNA, 15 bp, Homo sapiens
gcggagatcacgcca

SEQ ID NO: 54477 - DNA, 15 bp, Homo sapiens
agcggagatcacgcc

SEQ ID NO: 54478 - DNA, 15 bp, Homo sapiens
gagcggagatcacgc

SEQ ID NO: 54479 - DNA, 15 bp, Homo sapiens
tgagcggagatcacg

SEQ ID NO: 54480 - DNA, 15 bp, Homo sapiens
gtgagcggagatcac

SEQ ID NO: 54481 - DNA, 15 bp, Homo sapiens
agtgagcggagatca

SEQ ID NO: 54482 - DNA, 15 bp, Homo sapiens
cagtgagcggagatc

SEQ ID NO: 54483 - DNA, 15 bp, Homo sapiens
gcagtgagcggagat

SEQ ID NO: 54484 - DNA, 15 bp, Homo sapiens
tgcagtgagcggaga

SEQ ID NO: 54485 - DNA, 15 bp, Homo sapiens
ttgcagtgagcggag

SEQ ID NO: 54486 - DNA, 15 bp, Homo sapiens
cttgcagtgagcgga

SEQ ID NO: 54487 - DNA, 15 bp, Homo sapiens
gcttgcagtgagcgg

SEQ ID NO: 54488 - DNA, 15 bp, Homo sapiens
agcttgcagtgagcg

SEQ ID NO: 54489 - DNA, 15 bp, Homo sapiens
ctggaactctggggt

SEQ ID NO: 54490 - DNA, 15 bp, Homo sapiens
gctggaactctgggg

SEQ ID NO: 54491 - DNA, 15 bp, Homo sapiens
tgctggaactctggg

SEQ ID NO: 54492 - DNA, 15 bp, Homo sapiens
gtgctggaactctgg

SEQ ID NO: 54493 - DNA, 15 bp, Homo sapiens
ggtgctggaactctg

SEQ ID NO: 54494 - DNA, 15 bp, Homo sapiens
tggtgctggaactct

SEQ ID NO: 54495 - DNA, 15 bp, Homo sapiens
ctggtgctggaactc

SEQ ID NO: 54496 - DNA, 15 bp, Homo sapiens
gctggtgctggaact

SEQ ID NO: 54497 - DNA, 15 bp, Homo sapiens
ggctggtgctggaac

SEQ ID NO: 54498 - DNA, 15 bp, Homo sapiens
aggctggtgctggaa

SEQ ID NO: 54499 - DNA, 15 bp, Homo sapiens
aaggctggtgctgga

SEQ ID NO: 54500 - DNA, 15 bp, Homo sapiens
aaaggctggtgctgg

SEQ ID NO: 54501 - DNA, 15 bp, Homo sapiens
caaaggctggtgctg

SEQ ID NO: 54502 - DNA, 15 bp, Homo sapiens
acaaaggctggtgct

SEQ ID NO: 54503 - DNA, 15 bp, Homo sapiens
gacaaaggctggtgc

SEQ ID NO: 54504 - DNA, 15 bp, Homo sapiens
agacaaaggctggtg

SEQ ID NO: 54505 - DNA, 15 bp, Homo sapiens
aagacaaaggctggt

SEQ ID NO: 54506 - DNA, 15 bp, Homo sapiens
taagacaaaggctgg

SEQ ID NO: 54507 - DNA, 15 bp, Homo sapiens
gtaagacaaaggctg

SEQ ID NO: 54508 - DNA, 15 bp, Homo sapiens
tgtaagacaaaggct

SEQ ID NO: 54509 - DNA, 15 bp, Homo sapiens
atgtaagacaaaggc

SEQ ID NO: 54510 - DNA, 15 bp, Homo sapiens
tatgtaagacaaagg

SEQ ID NO: 54511 - DNA, 15 bp, Homo sapiens
ctatgtaagacaaag

SEQ ID NO: 54512 - DNA, 15 bp, Homo sapiens
actatgtaagacaaa

SEQ ID NO: 54513 - DNA, 15 bp, Homo sapiens
cactatgtaagacaa

SEQ ID NO: 54514 - DNA, 15 bp, Homo sapiens
ccactatgtaagaca

SEQ ID NO: 54515 - DNA, 15 bp, Homo sapiens
tccactatgtaagac

SEQ ID NO: 54516 - DNA, 15 bp, Homo sapiens
ctccactatgtaaga

SEQ ID NO: 54517 - DNA, 15 bp, Homo sapiens
actccactatgtaag

SEQ ID NO: 54518 - DNA, 15 bp, Homo sapiens
tactccactatgtaa

SEQ ID NO: 54519 - DNA, 15 bp, Homo sapiens
atactccactatgta

SEQ ID NO: 54520 - DNA, 15 bp, Homo sapiens
aatactccactatgt

SEQ ID NO: 54521 - DNA, 15 bp, Homo sapiens
taatactccactatg

SEQ ID NO: 54522 - DNA, 15 bp, Homo sapiens
ataatactccactat

SEQ ID NO: 54523 - DNA, 15 bp, Homo sapiens
tataatactccacta

SEQ ID NO: 54524 - DNA, 15 bp, Homo sapiens
ttataatactccact

SEQ ID NO: 54525 - DNA, 15 bp, Homo sapiens
cttataatactccac

SEQ ID NO: 54526 - DNA, 15 bp, Homo sapiens
gcttataatactcca

SEQ ID NO: 54527 - DNA, 15 bp, Homo sapiens
tgcttataatactcc

SEQ ID NO: 54528 - DNA, 15 bp, Homo sapiens
ttgcttataatactc

SEQ ID NO: 54529 - DNA, 15 bp, Homo sapiens
cttgcttataatact

SEQ ID NO: 54530 - DNA, 15 bp, Homo sapiens
tcttgcttataatac

SEQ ID NO: 54531 - DNA, 15 bp, Homo sapiens
atcttgcttataata

SEQ ID NO: 54532 - DNA, 15 bp, Homo sapiens
gatcttgcttataat

SEQ ID NO: 54533 - DNA, 15 bp, Homo sapiens
ggatcttgcttataa

SEQ ID NO: 54534 - DNA, 15 bp, Homo sapiens
gggatcttgcttata

SEQ ID NO: 54535 - DNA, 15 bp, Homo sapiens
tgggatcttgcttat

SEQ ID NO: 54536 - DNA, 15 bp, Homo sapiens
gtgggatcttgctta

SEQ ID NO: 54537 - DNA, 15 bp, Homo sapiens
cgtgggatcttgctt

SEQ ID NO: 54538 - DNA, 15 bp, Homo sapiens
tcgtgggatcttgct

SEQ ID NO: 54539 - DNA, 15 bp, Homo sapiens
atcgtgggatcttgc

SEQ ID NO: 54540 - DNA, 15 bp, Homo sapiens
catcgtgggatcttg

SEQ ID NO: 54541 - DNA, 15 bp, Homo sapiens
ccatcgtgggatctt

SEQ ID NO: 54542 - DNA, 15 bp, Homo sapiens
cccatcgtgggatct

SEQ ID NO: 54543 - DNA, 15 bp, Homo sapiens
ccccatcgtgggatc

SEQ ID NO: 54544 - DNA, 15 bp, Homo sapiens
cccccatcgtgggat

SEQ ID NO: 54545 - DNA, 15 bp, Homo sapiens
acccccatcgtggga

SEQ ID NO: 54546 - DNA, 15 bp, Homo sapiens
aacccccatcgtggg

SEQ ID NO: 54547 - DNA, 15 bp, Homo sapiens
gaacccccatcgtgg

SEQ ID NO: 54548 - DNA, 15 bp, Homo sapiens
ggaacccccatcgtg

SEQ ID NO: 54549 - DNA, 15 bp, Homo sapiens
aggaacccccatcgt

SEQ ID NO: 54550 - DNA, 15 bp, Homo sapiens
gaggaacccccatcg

SEQ ID NO: 54551 - DNA, 15 bp, Homo sapiens
tgaggaacccccatc

SEQ ID NO: 54552 - DNA, 15 bp, Homo sapiens
ctgaggaacccccat

SEQ ID NO: 54553 - DNA, 15 bp, Homo sapiens
tctgaggaaccccca

SEQ ID NO: 54554 - DNA, 15 bp, Homo sapiens
atctgaggaaccccc

SEQ ID NO: 54555 - DNA, 15 bp, Homo sapiens
aatctgaggaacccc

SEQ ID NO: 54556 - DNA, 15 bp, Homo sapiens
caatctgaggaaccc

SEQ ID NO: 54557 - DNA, 15 bp, Homo sapiens
gcaatctgaggaacc

SEQ ID NO: 54558 - DNA, 15 bp, Homo sapiens
agcaatctgaggaac

SEQ ID NO: 54559 - DNA, 15 bp, Homo sapiens
cagcaatctgaggaa

SEQ ID NO: 54560 - DNA, 15 bp, Homo sapiens
tcagcaatctgagga

SEQ ID NO: 54561 - DNA, 15 bp, Homo sapiens
ttcagcaatctgagg

SEQ ID NO: 54562 - DNA, 15 bp, Homo sapiens
tttcagcaatctgag

SEQ ID NO: 54563 - DNA, 15 bp, Homo sapiens
atttcagcaatctga

SEQ ID NO: 54564 - DNA, 15 bp, Homo sapiens
catttcagcaatctg

SEQ ID NO: 54565 - DNA, 15 bp, Homo sapiens
acatttcagcaatct

SEQ ID NO: 54566 - DNA, 15 bp, Homo sapiens
aacatttcagcaatc

SEQ ID NO: 54567 - DNA, 15 bp, Homo sapiens
gaacatttcagcaat

SEQ ID NO: 54568 - DNA, 15 bp, Homo sapiens
agaacatttcagcaa

SEQ ID NO: 54569 - DNA, 15 bp, Homo sapiens
tagaacatttcagca

SEQ ID NO: 54570 - DNA, 15 bp, Homo sapiens
ctagaacatttcagc

SEQ ID NO: 54571 - DNA, 15 bp, Homo sapiens
tctagaacatttcag

SEQ ID NO: 54572 - DNA, 15 bp, Homo sapiens
ctctagaacatttca

SEQ ID NO: 54573 - DNA, 15 bp, Homo sapiens
cctctagaacatttc

SEQ ID NO: 54574 - DNA, 15 bp, Homo sapiens
gcctctagaacattt

SEQ ID NO: 54575 - DNA, 15 bp, Homo sapiens
agcctctagaacatt

SEQ ID NO: 54576 - DNA, 15 bp, Homo sapiens
tagcctctagaacat

SEQ ID NO: 54577 - DNA, 15 bp, Homo sapiens
atagcctctagaaca

SEQ ID NO: 54578 - DNA, 15 bp, Homo sapiens
aatagcctctagaac

SEQ ID NO: 54579 - DNA, 15 bp, Homo sapiens
gaatagcctctagaa

SEQ ID NO: 54580 - DNA, 15 bp, Homo sapiens
agaatagcctctaga

SEQ ID NO: 54581 - DNA, 15 bp, Homo sapiens
tagaatagcctctag

SEQ ID NO: 54582 - DNA, 15 bp, Homo sapiens
atagaatagcctcta

SEQ ID NO: 54583 - DNA, 15 bp, Homo sapiens
aatagaatagcctct

SEQ ID NO: 54584 - DNA, 15 bp, Homo sapiens
aaatagaatagcctc

SEQ ID NO: 54585 - DNA, 15 bp, Homo sapiens
gaaatagaatagcct

SEQ ID NO: 54586 - DNA, 15 bp, Homo sapiens
agaaatagaatagcc

SEQ ID NO: 54587 - DNA, 15 bp, Homo sapiens
gagaaatagaatagc

SEQ ID NO: 54588 - DNA, 15 bp, Homo sapiens
agagaaatagaatag

SEQ ID NO: 54589 - DNA, 15 bp, Homo sapiens
tagagaaatagaata

SEQ ID NO: 54590 - DNA, 15 bp, Homo sapiens
gtagagaaatagaat

SEQ ID NO: 54591 - DNA, 15 bp, Homo sapiens
ggtagagaaatagaa

SEQ ID NO: 54592 - DNA, 15 bp, Homo sapiens
tggtagagaaataga

SEQ ID NO: 54593 - DNA, 15 bp, Homo sapiens
gtggtagagaaatag

SEQ ID NO: 54594 - DNA, 15 bp, Homo sapiens
agtggtagagaaata

SEQ ID NO: 54595 - DNA, 15 bp, Homo sapiens
gagtggtagagaaat

SEQ ID NO: 54596 - DNA, 15 bp, Homo sapiens
agagtggtagagaaa

SEQ ID NO: 54597 - DNA, 15 bp, Homo sapiens
gagagtggtagagaa

SEQ ID NO: 54598 - DNA, 15 bp, Homo sapiens
ggagagtggtagaga

SEQ ID NO: 54599 - DNA, 15 bp, Homo sapiens
tggagagtggtagag

SEQ ID NO: 54600 - DNA, 15 bp, Homo sapiens
ttggagagtggtaga

SEQ ID NO: 54601 - DNA, 15 bp, Homo sapiens
tttggagagtggtag

SEQ ID NO: 54602 - DNA, 15 bp, Homo sapiens
gtttggagagtggta

SEQ ID NO: 54603 - DNA, 15 bp, Homo sapiens
tgtttggagagtggt

SEQ ID NO: 54604 - DNA, 15 bp, Homo sapiens
ttgtttggagagtgg

SEQ ID NO: 54605 - DNA, 15 bp, Homo sapiens
tttgtttggagagtg

SEQ ID NO: 54606 - DNA, 15 bp, Homo sapiens
ttttgtttggagagt

SEQ ID NO: 54607 - DNA, 15 bp, Homo sapiens
gttttgtttggagag

SEQ ID NO: 54608 - DNA, 15 bp, Homo sapiens
tgttttgtttggaga

SEQ ID NO: 54609 - DNA, 15 bp, Homo sapiens
ctgttttgtttggag

SEQ ID NO: 54610 - DNA, 15 bp, Homo sapiens
gctgttttgtttgga

SEQ ID NO: 54611 - DNA, 15 bp, Homo sapiens
tgctgttttgtttgg

SEQ ID NO: 54612 - DNA, 15 bp, Homo sapiens
gtgctgttttgtttg

SEQ ID NO: 54613 - DNA, 15 bp, Homo sapiens
ggtgctgttttgttt

SEQ ID NO: 54614 - DNA, 15 bp, Homo sapiens
aggtgctgttttgtt

SEQ ID NO: 54615 - DNA, 15 bp, Homo sapiens
taggtgctgttttgt

SEQ ID NO: 54616 - DNA, 15 bp, Homo sapiens
ttaggtgctgttttg

SEQ ID NO: 54617 - DNA, 15 bp, Homo sapiens
tttaggtgctgtttt

SEQ ID NO: 54618 - DNA, 15 bp, Homo sapiens
atttaggtgctgttt

SEQ ID NO: 54619 - DNA, 15 bp, Homo sapiens
catttaggtgctgtt

SEQ ID NO: 54620 - DNA, 15 bp, Homo sapiens
acatttaggtgctgt

SEQ ID NO: 54621 - DNA, 15 bp, Homo sapiens
aacatttaggtgctg

SEQ ID NO: 54622 - DNA, 15 bp, Homo sapiens
taacatttaggtgct

SEQ ID NO: 54623 - DNA, 15 bp, Homo sapiens
ataacatttaggtgc

SEQ ID NO: 54624 - DNA, 15 bp, Homo sapiens
gataacatttaggtg

SEQ ID NO: 54625 - DNA, 15 bp, Homo sapiens
ggataacatttaggt

SEQ ID NO: 54626 - DNA, 15 bp, Homo sapiens
aggataacatttagg

SEQ ID NO: 54627 - DNA, 15 bp, Homo sapiens
taggataacatttag

SEQ ID NO: 54628 - DNA, 15 bp, Homo sapiens
ataggataacattta

SEQ ID NO: 54629 - DNA, 15 bp, Homo sapiens
cataggataacattt

SEQ ID NO: 54630 - DNA, 15 bp, Homo sapiens
ccataggataacatt

SEQ ID NO: 54631 - DNA, 15 bp, Homo sapiens
gccataggataacat

SEQ ID NO: 54632 - DNA, 15 bp, Homo sapiens
tgccataggataaca

SEQ ID NO: 54633 - DNA, 15 bp, Homo sapiens
ttgccataggataac

SEQ ID NO: 54634 - DNA, 15 bp, Homo sapiens
tttgccataggataa

SEQ ID NO: 54635 - DNA, 15 bp, Homo sapiens
ttttgccataggata

SEQ ID NO: 54636 - DNA, 15 bp, Homo sapiens
tttttgccataggat

SEQ ID NO: 54637 - DNA, 15 bp, Homo sapiens
ttttttgccatagga

SEQ ID NO: 54638 - DNA, 15 bp, Homo sapiens
tttttttgccatagg

SEQ ID NO: 54639 - DNA, 15 bp, Homo sapiens
ttttttttgccatag

SEQ ID NO: 54640 - DNA, 15 bp, Homo sapiens
tttttttttgccata

SEQ ID NO: 54641 - DNA, 15 bp, Homo sapiens
gtttttttttgccat

SEQ ID NO: 54642 - DNA, 15 bp, Homo sapiens
agtttttttttgcca

SEQ ID NO: 54643 - DNA, 15 bp, Homo sapiens
tagtttttttttgcc

SEQ ID NO: 54644 - DNA, 15 bp, Homo sapiens
atagtttttttttgc

SEQ ID NO: 54645 - DNA, 15 bp, Homo sapiens
tatagtttttttttg

SEQ ID NO: 54646 - DNA, 15 bp, Homo sapiens
gtatagttttttttt

SEQ ID NO: 54647 - DNA, 15 bp, Homo sapiens
ggtatagtttttttt

SEQ ID NO: 54648 - DNA, 15 bp, Homo sapiens
aggtatagttttttt

SEQ ID NO: 54649 - DNA, 15 bp, Homo sapiens
aaggtatagtttttt

SEQ ID NO: 54650 - DNA, 15 bp, Homo sapiens
caaggtatagttttt

SEQ ID NO: 54651 - DNA, 15 bp, Homo sapiens
acaaggtatagtttt

SEQ ID NO: 54652 - DNA, 15 bp, Homo sapiens
gacaaggtatagttt

SEQ ID NO: 54653 - DNA, 15 bp, Homo sapiens
ggacaaggtatagtt

SEQ ID NO: 54654 - DNA, 15 bp, Homo sapiens
gggacaaggtatagt

SEQ ID NO: 54655 - DNA, 15 bp, Homo sapiens
ggggacaaggtatag

SEQ ID NO: 54656 - DNA, 15 bp, Homo sapiens
gggggacaaggtata

SEQ ID NO: 54657 - DNA, 15 bp, Homo sapiens
agggggacaaggtat

SEQ ID NO: 54658 - DNA, 15 bp, Homo sapiens
aagggggacaaggta

SEQ ID NO: 54659 - DNA, 15 bp, Homo sapiens
gaagggggacaaggt

SEQ ID NO: 54660 - DNA, 15 bp, Homo sapiens
agaagggggacaagg

SEQ ID NO: 54661 - DNA, 15 bp, Homo sapiens
gagaagggggacaag

SEQ ID NO: 54662 - DNA, 15 bp, Homo sapiens
tgagaagggggacaa

SEQ ID NO: 54663 - DNA, 15 bp, Homo sapiens
ttgagaagggggaca

SEQ ID NO: 54664 - DNA, 15 bp, Homo sapiens
cttgagaagggggac

SEQ ID NO: 54665 - DNA, 15 bp, Homo sapiens
tcttgagaaggggga

SEQ ID NO: 54666 - DNA, 15 bp, Homo sapiens
ctcttgagaaggggg

SEQ ID NO: 54667 - DNA, 15 bp, Homo sapiens
gctcttgagaagggg

SEQ ID NO: 54668 - DNA, 15 bp, Homo sapiens
tgctcttgagaaggg

SEQ ID NO: 54669 - DNA, 15 bp, Homo sapiens
atgctcttgagaagg

SEQ ID NO: 54670 - DNA, 15 bp, Homo sapiens
catgctcttgagaag

SEQ ID NO: 54671 - DNA, 15 bp, Homo sapiens
tcatgctcttgagaa

SEQ ID NO: 54672 - DNA, 15 bp, Homo sapiens
ttcatgctcttgaga

SEQ ID NO: 54673 - DNA, 15 bp, Homo sapiens
cttcatgctcttgag

SEQ ID NO: 54674 - DNA, 15 bp, Homo sapiens
ccttcatgctcttga

SEQ ID NO: 54675 - DNA, 15 bp, Homo sapiens
accttcatgctcttg

SEQ ID NO: 54676 - DNA, 15 bp, Homo sapiens
caccttcatgctctt

SEQ ID NO: 54677 - DNA, 15 bp, Homo sapiens
ccaccttcatgctct

SEQ ID NO: 54678 - DNA, 15 bp, Homo sapiens
accaccttcatgctc

SEQ ID NO: 54679 - DNA, 15 bp, Homo sapiens
aaccaccttcatgct

SEQ ID NO: 54680 - DNA, 15 bp, Homo sapiens
taaccaccttcatgc

SEQ ID NO: 54681 - DNA, 15 bp, Homo sapiens
ttaaccaccttcatg

SEQ ID NO: 54682 - DNA, 15 bp, Homo sapiens
attaaccaccttcat

SEQ ID NO: 54683 - DNA, 15 bp, Homo sapiens
tattaaccaccttca

SEQ ID NO: 54684 - DNA, 15 bp, Homo sapiens
ctattaaccaccttc

SEQ ID NO: 54685 - DNA, 15 bp, Homo sapiens
actattaaccacctt

SEQ ID NO: 54686 - DNA, 15 bp, Homo sapiens
aactattaaccacct

SEQ ID NO: 54687 - DNA, 15 bp, Homo sapiens
taactattaaccacc

SEQ ID NO: 54688 - DNA, 15 bp, Homo sapiens
ctaactattaaccac

SEQ ID NO: 54689 - DNA, 15 bp, Homo sapiens
cctaactattaacca

SEQ ID NO: 54690 - DNA, 15 bp, Homo sapiens
tcctaactattaacc

SEQ ID NO: 54691 - DNA, 15 bp, Homo sapiens
atcctaactattaac

SEQ ID NO: 54692 - DNA, 15 bp, Homo sapiens
aatcctaactattaa

SEQ ID NO: 54693 - DNA, 15 bp, Homo sapiens
gaatcctaactatta

SEQ ID NO: 54694 - DNA, 15 bp, Homo sapiens
tgaatcctaactatt

SEQ ID NO: 54695 - DNA, 15 bp, Homo sapiens
ctgaatcctaactat

SEQ ID NO: 54696 - DNA, 15 bp, Homo sapiens
actgaatcctaacta

SEQ ID NO: 54697 - DNA, 15 bp, Homo sapiens
tactgaatcctaact

SEQ ID NO: 54698 - DNA, 15 bp, Homo sapiens
atactgaatcctaac

SEQ ID NO: 54699 - DNA, 15 bp, Homo sapiens
catactgaatcctaa

SEQ ID NO: 54700 - DNA, 15 bp, Homo sapiens
acatactgaatccta

SEQ ID NO: 54701 - DNA, 15 bp, Homo sapiens
aacatactgaatcct

SEQ ID NO: 54702 - DNA, 15 bp, Homo sapiens
taacatactgaatcc

SEQ ID NO: 54703 - DNA, 15 bp, Homo sapiens
ataacatactgaatc

SEQ ID NO: 54704 - DNA, 15 bp, Homo sapiens
cataacatactgaat

SEQ ID NO: 54705 - DNA, 15 bp, Homo sapiens
acataacatactgaa

SEQ ID NO: 54706 - DNA, 15 bp, Homo sapiens
cacataacatactga

SEQ ID NO: 54707 - DNA, 15 bp, Homo sapiens
acacataacatactg

SEQ ID NO: 54708 - DNA, 15 bp, Homo sapiens
aacacataacatact

SEQ ID NO: 54709 - DNA, 15 bp, Homo sapiens
gaacacataacatac

SEQ ID NO: 54710 - DNA, 15 bp, Homo sapiens
tgaacacataacata

SEQ ID NO: 54711 - DNA, 15 bp, Homo sapiens
ctgaacacataacat

SEQ ID NO: 54712 - DNA, 15 bp, Homo sapiens
tctgaacacataaca

SEQ ID NO: 54713 - DNA, 15 bp, Homo sapiens
atctgaacacataac

SEQ ID NO: 54714 - DNA, 15 bp, Homo sapiens
catctgaacacataa

SEQ ID NO: 54715 - DNA, 15 bp, Homo sapiens
ccatctgaacacata

SEQ ID NO: 54716 - DNA, 15 bp, Homo sapiens
gccatctgaacacat

SEQ ID NO: 54717 - DNA, 15 bp, Homo sapiens
cgccatctgaacaca

SEQ ID NO: 54718 - DNA, 15 bp, Homo sapiens
acgccatctgaacac

SEQ ID NO: 54719 - DNA, 15 bp, Homo sapiens
aacgccatctgaaca

SEQ ID NO: 54720 - DNA, 15 bp, Homo sapiens
caacgccatctgaac

SEQ ID NO: 54721 - DNA, 15 bp, Homo sapiens
tcaacgccatctgaa

SEQ ID NO: 54722 - DNA, 15 bp, Homo sapiens
ctcaacgccatctga

SEQ ID NO: 54723 - DNA, 15 bp, Homo sapiens
gctcaacgccatctg

SEQ ID NO: 54724 - DNA, 15 bp, Homo sapiens
agctcaacgccatct

SEQ ID NO: 54725 - DNA, 15 bp, Homo sapiens
cagctcaacgccatc

SEQ ID NO: 54726 - DNA, 15 bp, Homo sapiens
gcagctcaacgccat

SEQ ID NO: 54727 - DNA, 15 bp, Homo sapiens
agcagctcaacgcca

SEQ ID NO: 54728 - DNA, 15 bp, Homo sapiens
cagcagctcaacgcc

SEQ ID NO: 54729 - DNA, 15 bp, Homo sapiens
acagcagctcaacgc

SEQ ID NO: 54730 - DNA, 15 bp, Homo sapiens
aacagcagctcaacg

SEQ ID NO: 54731 - DNA, 15 bp, Homo sapiens
taacagcagctcaac

SEQ ID NO: 54732 - DNA, 15 bp, Homo sapiens
ctaacagcagctcaa

SEQ ID NO: 54733 - DNA, 15 bp, Homo sapiens
actaacagcagctca

SEQ ID NO: 54734 - DNA, 15 bp, Homo sapiens
cactaacagcagctc

SEQ ID NO: 54735 - DNA, 15 bp, Homo sapiens
gcactaacagcagct

SEQ ID NO: 54736 - DNA, 15 bp, Homo sapiens
ggcactaacagcagc

SEQ ID NO: 54737 - DNA, 15 bp, Homo sapiens
tggcactaacagcag

SEQ ID NO: 54738 - DNA, 15 bp, Homo sapiens
ttggcactaacagca

SEQ ID NO: 54739 - DNA, 15 bp, Homo sapiens
gttggcactaacagc

SEQ ID NO: 54740 - DNA, 15 bp, Homo sapiens
tgttggcactaacag

SEQ ID NO: 54741 - DNA, 15 bp, Homo sapiens
atgttggcactaaca

SEQ ID NO: 54742 - DNA, 15 bp, Homo sapiens
catgttggcactaac

SEQ ID NO: 54743 - DNA, 15 bp, Homo sapiens
acatgttggcactaa

SEQ ID NO: 54744 - DNA, 15 bp, Homo sapiens
aacatgttggcacta

SEQ ID NO: 54745 - DNA, 15 bp, Homo sapiens
taacatgttggcact

SEQ ID NO: 54746 - DNA, 15 bp, Homo sapiens
ctaacatgttggcac

SEQ ID NO: 54747 - DNA, 15 bp, Homo sapiens
actaacatgttggca

SEQ ID NO: 54748 - DNA, 15 bp, Homo sapiens
cactaacatgttggc

SEQ ID NO: 54749 - DNA, 15 bp, Homo sapiens
tcactaacatgttgg

SEQ ID NO: 54750 - DNA, 15 bp, Homo sapiens
ctcactaacatgttg

SEQ ID NO: 54751 - DNA, 15 bp, Homo sapiens
tctcactaacatgtt

SEQ ID NO: 54752 - DNA, 15 bp, Homo sapiens
ttctcactaacatgt

SEQ ID NO: 54753 - DNA, 15 bp, Homo sapiens
tttctcactaacatg

SEQ ID NO: 54754 - DNA, 15 bp, Homo sapiens
ttttctcactaacat

SEQ ID NO: 54755 - DNA, 15 bp, Homo sapiens
attttctcactaaca

SEQ ID NO: 54756 - DNA, 15 bp, Homo sapiens
tattttctcactaac

SEQ ID NO: 54757 - DNA, 15 bp, Homo sapiens
atattttctcactaa

SEQ ID NO: 54758 - DNA, 15 bp, Homo sapiens
gatattttctcacta

SEQ ID NO: 54759 - DNA, 15 bp, Homo sapiens
agatattttctcact

SEQ ID NO: 54760 - DNA, 15 bp, Homo sapiens
aagatattttctcac

SEQ ID NO: 54761 - DNA, 15 bp, Homo sapiens
aaagatattttctca

SEQ ID NO: 54762 - DNA, 15 bp, Homo sapiens
caaagatattttctc

SEQ ID NO: 54763 - DNA, 15 bp, Homo sapiens
ccaaagatattttct

SEQ ID NO: 54764 - DNA, 15 bp, Homo sapiens
tccaaagatattttc

SEQ ID NO: 54765 - DNA, 15 bp, Homo sapiens
atccaaagatatttt

SEQ ID NO: 54766 - DNA, 15 bp, Homo sapiens
tatccaaagatattt

SEQ ID NO: 54767 - DNA, 15 bp, Homo sapiens
ctatccaaagatatt

SEQ ID NO: 54768 - DNA, 15 bp, Homo sapiens
cctatccaaagatat

SEQ ID NO: 54769 - DNA, 15 bp, Homo sapiens
acctatccaaagata

SEQ ID NO: 54770 - DNA, 15 bp, Homo sapiens
tacctatccaaagat

SEQ ID NO: 54771 - DNA, 15 bp, Homo sapiens
ttacctatccaaaga

SEQ ID NO: 54772 - DNA, 15 bp, Homo sapiens
tttacctatccaaag

SEQ ID NO: 54773 - DNA, 15 bp, Homo sapiens
ttttacctatccaaa

SEQ ID NO: 54774 - DNA, 15 bp, Homo sapiens
tttttacctatccaa

SEQ ID NO: 54775 - DNA, 15 bp, Homo sapiens
atttttacctatcca

SEQ ID NO: 54776 - DNA, 15 bp, Homo sapiens
gatttttacctatcc

SEQ ID NO: 54777 - DNA, 15 bp, Homo sapiens
tgatttttacctatc

SEQ ID NO: 54778 - DNA, 15 bp, Homo sapiens
ttgatttttacctat

SEQ ID NO: 54779 - DNA, 15 bp, Homo sapiens
cttgatttttaccta

SEQ ID NO: 54780 - DNA, 15 bp, Homo sapiens
ccttgatttttacct

SEQ ID NO: 54781 - DNA, 15 bp, Homo sapiens
tccttgatttttacc

SEQ ID NO: 54782 - DNA, 15 bp, Homo sapiens
ctccttgatttttac

SEQ ID NO: 54783 - DNA, 15 bp, Homo sapiens
cctccttgattttta

SEQ ID NO: 54784 - DNA, 15 bp, Homo sapiens
tcctccttgattttt

SEQ ID NO: 54785 - DNA, 15 bp, Homo sapiens
ctcctccttgatttt

SEQ ID NO: 54786 - DNA, 15 bp, Homo sapiens
actcctccttgattt

SEQ ID NO: 54787 - DNA, 15 bp, Homo sapiens
aactcctccttgatt

SEQ ID NO: 54788 - DNA, 15 bp, Homo sapiens
gaactcctccttgat

SEQ ID NO: 54789 - DNA, 15 bp, Homo sapiens
agaactcctccttga

SEQ ID NO: 54790 - DNA, 15 bp, Homo sapiens
gagaactcctccttg

SEQ ID NO: 54791 - DNA, 15 bp, Homo sapiens
ggagaactcctcctt

SEQ ID NO: 54792 - DNA, 15 bp, Homo sapiens
aggagaactcctcct

SEQ ID NO: 54793 - DNA, 15 bp, Homo sapiens
gaggagaactcctcc

SEQ ID NO: 54794 - DNA, 15 bp, Homo sapiens
agaggagaactcctc

SEQ ID NO: 54795 - DNA, 15 bp, Homo sapiens
aagaggagaactcct

SEQ ID NO: 54796 - DNA, 15 bp, Homo sapiens
gaagaggagaactcc

SEQ ID NO: 54797 - DNA, 15 bp, Homo sapiens
ggaagaggagaactc

SEQ ID NO: 54798 - DNA, 15 bp, Homo sapiens
aggaagaggagaact

SEQ ID NO: 54799 - DNA, 15 bp, Homo sapiens
taggaagaggagaac

SEQ ID NO: 54800 - DNA, 15 bp, Homo sapiens
ttaggaagaggagaa

SEQ ID NO: 54801 - DNA, 15 bp, Homo sapiens
tttaggaagaggaga

SEQ ID NO: 54802 - DNA, 15 bp, Homo sapiens
gtttaggaagaggag

SEQ ID NO: 54803 - DNA, 15 bp, Homo sapiens
ggtttaggaagagga

SEQ ID NO: 54804 - DNA, 15 bp, Homo sapiens
tggtttaggaagagg

SEQ ID NO: 54805 - DNA, 15 bp, Homo sapiens
atggtttaggaagag

SEQ ID NO: 54806 - DNA, 15 bp, Homo sapiens
gatggtttaggaaga

SEQ ID NO: 54807 - DNA, 15 bp, Homo sapiens
agatggtttaggaag

SEQ ID NO: 54808 - DNA, 15 bp, Homo sapiens
aagatggtttaggaa

SEQ ID NO: 54809 - DNA, 15 bp, Homo sapiens
taagatggtttagga

SEQ ID NO: 54810 - DNA, 15 bp, Homo sapiens
ttaagatggtttagg

SEQ ID NO: 54811 - DNA, 15 bp, Homo sapiens
attaagatggtttag

SEQ ID NO: 54812 - DNA, 15 bp, Homo sapiens
aattaagatggttta

SEQ ID NO: 54813 - DNA, 15 bp, Homo sapiens
aaattaagatggttt

SEQ ID NO: 54814 - DNA, 15 bp, Homo sapiens
taaattaagatggtt

SEQ ID NO: 54815 - DNA, 15 bp, Homo sapiens
gtaaattaagatggt

SEQ ID NO: 54816 - DNA, 15 bp, Homo sapiens
agtaaattaagatgg

SEQ ID NO: 54817 - DNA, 15 bp, Homo sapiens
aagtaaattaagatg

SEQ ID NO: 54818 - DNA, 15 bp, Homo sapiens
taagtaaattaagat

SEQ ID NO: 54819 - DNA, 15 bp, Homo sapiens
gtaagtaaattaaga

SEQ ID NO: 54820 - DNA, 15 bp, Homo sapiens
tgtaagtaaattaag

SEQ ID NO: 54821 - DNA, 15 bp, Homo sapiens
atgtaagtaaattaa

SEQ ID NO: 54822 - DNA, 15 bp, Homo sapiens
tatgtaagtaaatta

SEQ ID NO: 54823 - DNA, 15 bp, Homo sapiens
ctatgtaagtaaatt

SEQ ID NO: 54824 - DNA, 15 bp, Homo sapiens
tctatgtaagtaaat

SEQ ID NO: 54825 - DNA, 15 bp, Homo sapiens
ttctatgtaagtaaa

SEQ ID NO: 54826 - DNA, 15 bp, Homo sapiens
cttctatgtaagtaa

SEQ ID NO: 54827 - DNA, 15 bp, Homo sapiens
tcttctatgtaagta

SEQ ID NO: 54828 - DNA, 15 bp, Homo sapiens
ttcttctatgtaagt

SEQ ID NO: 54829 - DNA, 15 bp, Homo sapiens
tttcttctatgtaag

SEQ ID NO: 54830 - DNA, 15 bp, Homo sapiens
ctttcttctatgtaa

SEQ ID NO: 54831 - DNA, 15 bp, Homo sapiens
gctttcttctatgta

SEQ ID NO: 54832 - DNA, 15 bp, Homo sapiens
tgctttcttctatgt

SEQ ID NO: 54833 - DNA, 15 bp, Homo sapiens
gtgctttcttctatg

SEQ ID NO: 54834 - DNA, 15 bp, Homo sapiens
tgtgctttcttctat

SEQ ID NO: 54835 - DNA, 15 bp, Homo sapiens
ctgtgctttcttcta

SEQ ID NO: 54836 - DNA, 15 bp, Homo sapiens
gctgtgctttcttct

SEQ ID NO: 54837 - DNA, 15 bp, Homo sapiens
tgctgtgctttcttc

SEQ ID NO: 54838 - DNA, 15 bp, Homo sapiens
ctgctgtgctttctt

SEQ ID NO: 54839 - DNA, 15 bp, Homo sapiens
gctgctgtgctttct

SEQ ID NO: 54840 - DNA, 15 bp, Homo sapiens
agctgctgtgctttc

SEQ ID NO: 54841 - DNA, 15 bp, Homo sapiens
cagctgctgtgcttt

SEQ ID NO: 54842 - DNA, 15 bp, Homo sapiens
ccagctgctgtgctt

SEQ ID NO: 54843 - DNA, 15 bp, Homo sapiens
gccagctgctgtgct

SEQ ID NO: 54844 - DNA, 15 bp, Homo sapiens
ggccagctgctgtgc

SEQ ID NO: 54845 - DNA, 15 bp, Homo sapiens
gggccagctgctgtg

SEQ ID NO: 54846 - DNA, 15 bp, Homo sapiens
tgggccagctgctgt

SEQ ID NO: 54847 - DNA, 15 bp, Homo sapiens
gtgggccagctgctg

SEQ ID NO: 54848 - DNA, 15 bp, Homo sapiens
ggtgggccagctgct

SEQ ID NO: 54849 - DNA, 15 bp, Homo sapiens
tggtgggccagctgc

SEQ ID NO: 54850 - DNA, 15 bp, Homo sapiens
gtggtgggccagctg

SEQ ID NO: 54851 - DNA, 15 bp, Homo sapiens
cgtggtgggccagct

SEQ ID NO: 54852 - DNA, 15 bp, Homo sapiens
ccgtggtgggccagc

SEQ ID NO: 54853 - DNA, 15 bp, Homo sapiens
tccgtggtgggccag

SEQ ID NO: 54854 - DNA, 15 bp, Homo sapiens
gtccgtggtgggcca

SEQ ID NO: 54855 - DNA, 15 bp, Homo sapiens
cgtccgtggtgggcc

SEQ ID NO: 54856 - DNA, 15 bp, Homo sapiens
ccgtccgtggtgggc

SEQ ID NO: 54857 - DNA, 15 bp, Homo sapiens
cccgtccgtggtggg

SEQ ID NO: 54858 - DNA, 15 bp, Homo sapiens
gcccgtccgtggtgg

SEQ ID NO: 54859 - DNA, 15 bp, Homo sapiens
ggcccgtccgtggtg

SEQ ID NO: 54860 - DNA, 15 bp, Homo sapiens
gggcccgtccgtggt

SEQ ID NO: 54861 - DNA, 15 bp, Homo sapiens
tgggcccgtccgtgg

SEQ ID NO: 54862 - DNA, 15 bp, Homo sapiens
ctgggcccgtccgtg

SEQ ID NO: 54863 - DNA, 15 bp, Homo sapiens
tctgggcccgtccgt

SEQ ID NO: 54864 - DNA, 15 bp, Homo sapiens
ctctgggcccgtccg

SEQ ID NO: 54865 - DNA, 15 bp, Homo sapiens
gctctgggcccgtcc

SEQ ID NO: 54866 - DNA, 15 bp, Homo sapiens
tgctctgggcccgtc

SEQ ID NO: 54867 - DNA, 15 bp, Homo sapiens
ctgctctgggcccgt

SEQ ID NO: 54868 - DNA, 15 bp, Homo sapiens
cctgctctgggcccg

SEQ ID NO: 54869 - DNA, 15 bp, Homo sapiens
ccctgctctgggccc

SEQ ID NO: 54870 - DNA, 15 bp, Homo sapiens
cccctgctctgggcc

SEQ ID NO: 54871 - DNA, 15 bp, Homo sapiens
tcccctgctctgggc

SEQ ID NO: 54872 - DNA, 15 bp, Homo sapiens
ttcccctgctctggg

SEQ ID NO: 54873 - DNA, 15 bp, Homo sapiens
cttcccctgctctgg

SEQ ID NO: 54874 - DNA, 15 bp, Homo sapiens
tcttcccctgctctg

SEQ ID NO: 54875 - DNA, 15 bp, Homo sapiens
atcttcccctgctct

SEQ ID NO: 54876 - DNA, 15 bp, Homo sapiens
aatcttcccctgctc

SEQ ID NO: 54877 - DNA, 15 bp, Homo sapiens
gaatcttcccctgct

SEQ ID NO: 54878 - DNA, 15 bp, Homo sapiens
agaatcttcccctgc

SEQ ID NO: 54879 - DNA, 15 bp, Homo sapiens
gagaatcttcccctg

SEQ ID NO: 54880 - DNA, 15 bp, Homo sapiens
cgagaatcttcccct

SEQ ID NO: 54881 - DNA, 15 bp, Homo sapiens
ccgagaatcttcccc

SEQ ID NO: 54882 - DNA, 15 bp, Homo sapiens
accgagaatcttccc

SEQ ID NO: 54883 - DNA, 15 bp, Homo sapiens
caccgagaatcttcc

SEQ ID NO: 54884 - DNA, 15 bp, Homo sapiens
tcaccgagaatcttc

SEQ ID NO: 54885 - DNA, 15 bp, Homo sapiens
ttcaccgagaatctt

SEQ ID NO: 54886 - DNA, 15 bp, Homo sapiens
gttcaccgagaatct

SEQ ID NO: 54887 - DNA, 15 bp, Homo sapiens
tgttcaccgagaatc

SEQ ID NO: 54888 - DNA, 15 bp, Homo sapiens
atgttcaccgagaat

SEQ ID NO: 54889 - DNA, 15 bp, Homo sapiens
aatgttcaccgagaa

SEQ ID NO: 54890 - DNA, 15 bp, Homo sapiens
aaatgttcaccgaga

SEQ ID NO: 54891 - DNA, 15 bp, Homo sapiens
gaaatgttcaccgag

SEQ ID NO: 54892 - DNA, 15 bp, Homo sapiens
agaaatgttcaccga

SEQ ID NO: 54893 - DNA, 15 bp, Homo sapiens
aagaaatgttcaccg

SEQ ID NO: 54894 - DNA, 15 bp, Homo sapiens
aaagaaatgttcacc

SEQ ID NO: 54895 - DNA, 15 bp, Homo sapiens
aaaagaaatgttcac

SEQ ID NO: 54896 - DNA, 15 bp, Homo sapiens
aaaaagaaatgttca

SEQ ID NO: 54897 - DNA, 15 bp, Homo sapiens
aaaaaagaaatgttc

SEQ ID NO: 54898 - DNA, 15 bp, Homo sapiens
aaaaaaagaaatgtt

SEQ ID NO: 54899 - DNA, 15 bp, Homo sapiens
aaaaaaaagaaatgt

SEQ ID NO: 54900 - DNA, 15 bp, Homo sapiens
aaaaaaaaagaaatg

SEQ ID NO: 54901 - DNA, 15 bp, Homo sapiens
agaaaaaaaaaaaga

SEQ ID NO: 54902 - DNA, 15 bp, Homo sapiens
aagaaaaaaaaaaag

SEQ ID NO: 54903 - DNA, 15 bp, Homo sapiens
caaaaaaaaagaaaa

SEQ ID NO: 54904 - DNA, 15 bp, Homo sapiens
tcaaaaaaaaagaaa

SEQ ID NO: 54905 - DNA, 15 bp, Homo sapiens
ctcaaaaaaaaagaa

SEQ ID NO: 54906 - DNA, 15 bp, Homo sapiens
cctcaaaaaaaaaga

SEQ ID NO: 54907 - DNA, 15 bp, Homo sapiens
acctcaaaaaaaaag

SEQ ID NO: 54908 - DNA, 15 bp, Homo sapiens
gacctcaaaaaaaaa

SEQ ID NO: 54909 - DNA, 15 bp, Homo sapiens
cgacctcaaaaaaaa

SEQ ID NO: 54910 - DNA, 15 bp, Homo sapiens
tcgacctcaaaaaaa

SEQ ID NO: 54911 - DNA, 15 bp, Homo sapiens
ctcgacctcaaaaaa

SEQ ID NO: 54912 - DNA, 15 bp, Homo sapiens
actcgacctcaaaaa

SEQ ID NO: 54913 - DNA, 15 bp, Homo sapiens
gactcgacctcaaaa

SEQ ID NO: 54914 - DNA, 15 bp, Homo sapiens
agactcgacctcaaa

SEQ ID NO: 54915 - DNA, 15 bp, Homo sapiens
gagactcgacctcaa

SEQ ID NO: 54916 - DNA, 15 bp, Homo sapiens
agagactcgacctca

SEQ ID NO: 54917 - DNA, 15 bp, Homo sapiens
cagagactcgacctc

SEQ ID NO: 54918 - DNA, 15 bp, Homo sapiens
acagagactcgacct

SEQ ID NO: 54919 - DNA, 15 bp, Homo sapiens
aacagagactcgacc

SEQ ID NO: 54920 - DNA, 15 bp, Homo sapiens
caacagagactcgac

SEQ ID NO: 54921 - DNA, 15 bp, Homo sapiens
gcaacagagactcga

SEQ ID NO: 54922 - DNA, 15 bp, Homo sapiens
ggcaacagagactcg

SEQ ID NO: 54923 - DNA, 15 bp, Homo sapiens
gggcaacagagactc

SEQ ID NO: 54924 - DNA, 15 bp, Homo sapiens
tgggcaacagagact

SEQ ID NO: 54925 - DNA, 15 bp, Homo sapiens
ctgggcaacagagac

SEQ ID NO: 54926 - DNA, 15 bp, Homo sapiens
cctgggcaacagaga

SEQ ID NO: 54927 - DNA, 15 bp, Homo sapiens
ggcctgggcaacaga

SEQ ID NO: 54928 - DNA, 15 bp, Homo sapiens
tggcctgggcaacag

SEQ ID NO: 54929 - DNA, 15 bp, Homo sapiens
ctggcctgggcaaca

SEQ ID NO: 54930 - DNA, 15 bp, Homo sapiens
tctggcctgggcaac

SEQ ID NO: 54931 - DNA, 15 bp, Homo sapiens
ttgcactctggcctg

SEQ ID NO: 54932 - DNA, 15 bp, Homo sapiens
attgcactctggcct

SEQ ID NO: 54933 - DNA, 15 bp, Homo sapiens
cattgcactctggcc

SEQ ID NO: 54934 - DNA, 15 bp, Homo sapiens
ccattgcactctggc

SEQ ID NO: 54935 - DNA, 15 bp, Homo sapiens
gccattgcactctgg

SEQ ID NO: 54936 - DNA, 15 bp, Homo sapiens
cgccattgcactctg

SEQ ID NO: 54937 - DNA, 15 bp, Homo sapiens
gcgccattgcactct

SEQ ID NO: 54938 - DNA, 15 bp, Homo sapiens
cgagatcgcgccatt

SEQ ID NO: 54939 - DNA, 15 bp, Homo sapiens
ccgagatcgcgccat

SEQ ID NO: 54940 - DNA, 15 bp, Homo sapiens
gccgagatcgcgcca

SEQ ID NO: 54941 - DNA, 15 bp, Homo sapiens
agccgagatcgcgcc

SEQ ID NO: 54942 - DNA, 15 bp, Homo sapiens
gagccgagatcgcgc

SEQ ID NO: 54943 - DNA, 15 bp, Homo sapiens
tgagccgagatcgcg

SEQ ID NO: 54944 - DNA, 15 bp, Homo sapiens
gtgagccgagatcgc

SEQ ID NO: 54945 - DNA, 15 bp, Homo sapiens
acttgaacccgggag

SEQ ID NO: 54946 - DNA, 15 bp, Homo sapiens
cacttgaacccggga

SEQ ID NO: 54947 - DNA, 15 bp, Homo sapiens
tcacttgaacccggg

SEQ ID NO: 54948 - DNA, 15 bp, Homo sapiens
atcacttgaacccgg

SEQ ID NO: 54949 - DNA, 15 bp, Homo sapiens
aatcacttgaacccg

SEQ ID NO: 54950 - DNA, 15 bp, Homo sapiens
atttgggaggctgag

SEQ ID NO: 54951 - DNA, 15 bp, Homo sapiens
tatttgggaggctga

SEQ ID NO: 54952 - DNA, 15 bp, Homo sapiens
ctatttgggaggctg

SEQ ID NO: 54953 - DNA, 15 bp, Homo sapiens
tcagctatttgggag

SEQ ID NO: 54954 - DNA, 15 bp, Homo sapiens
ctcagctatttggga

SEQ ID NO: 54955 - DNA, 15 bp, Homo sapiens
tctcagctatttggg

SEQ ID NO: 54956 - DNA, 15 bp, Homo sapiens
gtctcagctatttgg

SEQ ID NO: 54957 - DNA, 15 bp, Homo sapiens
agtctcagctatttg

SEQ ID NO: 54958 - DNA, 15 bp, Homo sapiens
tagtctcagctattt

SEQ ID NO: 54959 - DNA, 15 bp, Homo sapiens
gtagtctcagctatt

SEQ ID NO: 54960 - DNA, 15 bp, Homo sapiens
tgtagtctcagctat

SEQ ID NO: 54961 - DNA, 15 bp, Homo sapiens
gcctgtagtctcagc

SEQ ID NO: 54962 - DNA, 15 bp, Homo sapiens
cgcctgtagtctcag

SEQ ID NO: 54963 - DNA, 15 bp, Homo sapiens
acgcctgtagtctca

SEQ ID NO: 54964 - DNA, 15 bp, Homo sapiens
cacgcctgtagtctc

SEQ ID NO: 54965 - DNA, 15 bp, Homo sapiens
acacgcctgtagtct

SEQ ID NO: 54966 - DNA, 15 bp, Homo sapiens
cacacgcctgtagtc

SEQ ID NO: 54967 - DNA, 15 bp, Homo sapiens
gcacacgcctgtagt

SEQ ID NO: 54968 - DNA, 15 bp, Homo sapiens
ggcacacgcctgtag

SEQ ID NO: 54969 - DNA, 15 bp, Homo sapiens
tggcacacgcctgta

SEQ ID NO: 54970 - DNA, 15 bp, Homo sapiens
gtggcacacgcctgt

SEQ ID NO: 54971 - DNA, 15 bp, Homo sapiens
ggtggcacacgcctg

SEQ ID NO: 54972 - DNA, 15 bp, Homo sapiens
tggtggcacacgcct

SEQ ID NO: 54973 - DNA, 15 bp, Homo sapiens
gtggtggcacacgcc

SEQ ID NO: 54974 - DNA, 15 bp, Homo sapiens
cgtggtggcacacgc

SEQ ID NO: 54975 - DNA, 15 bp, Homo sapiens
gcgtggtggcacacg

SEQ ID NO: 54976 - DNA, 15 bp, Homo sapiens
ggcgtggtggcacac

SEQ ID NO: 54977 - DNA, 15 bp, Homo sapiens
cgggcgtggtggcac

SEQ ID NO: 54978 - DNA, 15 bp, Homo sapiens
tcgggcgtggtggca

SEQ ID NO: 54979 - DNA, 15 bp, Homo sapiens
gtcgggcgtggtggc

SEQ ID NO: 54980 - DNA, 15 bp, Homo sapiens
agtcgggcgtggtgg

SEQ ID NO: 54981 - DNA, 15 bp, Homo sapiens
tagtcgggcgtggtg

SEQ ID NO: 54982 - DNA, 15 bp, Homo sapiens
ttagtcgggcgtggt

SEQ ID NO: 54983 - DNA, 15 bp, Homo sapiens
attagtcgggcgtgg

SEQ ID NO: 54984 - DNA, 15 bp, Homo sapiens
aattagtcgggcgtg

SEQ ID NO: 54985 - DNA, 15 bp, Homo sapiens
aaattagtcgggcgt

SEQ ID NO: 54986 - DNA, 15 bp, Homo sapiens
aaaattagtcgggcg

SEQ ID NO: 54987 - DNA, 15 bp, Homo sapiens
aaaaattagtcgggc

SEQ ID NO: 54988 - DNA, 15 bp, Homo sapiens
aaaaaattagtcggg

SEQ ID NO: 54989 - DNA, 15 bp, Homo sapiens
caaaaaattagtcgg

SEQ ID NO: 54990 - DNA, 15 bp, Homo sapiens
acaaaaaattagtcg

SEQ ID NO: 54991 - DNA, 15 bp, Homo sapiens
tacaaaaaattagtc

SEQ ID NO: 54992 - DNA, 15 bp, Homo sapiens
aaaaaaaaaatacaa

SEQ ID NO: 54993 - DNA, 15 bp, Homo sapiens
taaaaaaaaaataca

SEQ ID NO: 54994 - DNA, 15 bp, Homo sapiens
ctaaaaaaaaaatac

SEQ ID NO: 54995 - DNA, 15 bp, Homo sapiens
actaaaaaaaaaata

SEQ ID NO: 54996 - DNA, 15 bp, Homo sapiens
tactaaaaaaaaaat

SEQ ID NO: 54997 - DNA, 15 bp, Homo sapiens
ctactaaaaaaaaaa

SEQ ID NO: 54998 - DNA, 15 bp, Homo sapiens
tctactaaaaaaaaa

SEQ ID NO: 54999 - DNA, 15 bp, Homo sapiens
ctctactaaaaaaaa

SEQ ID NO: 55000 - DNA, 15 bp, Homo sapiens
gtctctactaaaaaa

SEQ ID NO: 55001 - DNA, 15 bp, Homo sapiens
ttggctaacacggtg

SEQ ID NO: 55002 - DNA, 15 bp, Homo sapiens
attggctaacacggt

SEQ ID NO: 55003 - DNA, 15 bp, Homo sapiens
tattggctaacacgg

SEQ ID NO: 55004 - DNA, 15 bp, Homo sapiens
atattggctaacacg

SEQ ID NO: 55005 - DNA, 15 bp, Homo sapiens
catattggctaacac

SEQ ID NO: 55006 - DNA, 15 bp, Homo sapiens
ccatattggctaaca

SEQ ID NO: 55007 - DNA, 15 bp, Homo sapiens
accatattggctaac

SEQ ID NO: 55008 - DNA, 15 bp, Homo sapiens
gaccatattggctaa

SEQ ID NO: 55009 - DNA, 15 bp, Homo sapiens
ggaccatattggcta

SEQ ID NO: 55010 - DNA, 15 bp, Homo sapiens
gggaccatattggct

SEQ ID NO: 55011 - DNA, 15 bp, Homo sapiens
cgggaccatattggc

SEQ ID NO: 55012 - DNA, 15 bp, Homo sapiens
tcgggaccatattgg

SEQ ID NO: 55013 - DNA, 15 bp, Homo sapiens
atcgggaccatattg

SEQ ID NO: 55014 - DNA, 15 bp, Homo sapiens
gatcgggaccatatt

SEQ ID NO: 55015 - DNA, 15 bp, Homo sapiens
agatcgggaccatat

SEQ ID NO: 55016 - DNA, 15 bp, Homo sapiens
gagatcgggaccata

SEQ ID NO: 55017 - DNA, 15 bp, Homo sapiens
ggagatcgggaccat

SEQ ID NO: 55018 - DNA, 15 bp, Homo sapiens
aggagatcgggacca

SEQ ID NO: 55019 - DNA, 15 bp, Homo sapiens
caggagatcgggacc

SEQ ID NO: 55020 - DNA, 15 bp, Homo sapiens
tcaggagatcgggac

SEQ ID NO: 55021 - DNA, 15 bp, Homo sapiens
gtcaggagatcggga

SEQ ID NO: 55022 - DNA, 15 bp, Homo sapiens
ggtcaggagatcggg

SEQ ID NO: 55023 - DNA, 15 bp, Homo sapiens
aggtcaggagatcgg

SEQ ID NO: 55024 - DNA, 15 bp, Homo sapiens
acagtggctcatgcc

SEQ ID NO: 55025 - DNA, 15 bp, Homo sapiens
cacagtggctcatgc

SEQ ID NO: 55026 - DNA, 15 bp, Homo sapiens
gcacagtggctcatg

SEQ ID NO: 55027 - DNA, 15 bp, Homo sapiens
ggcacagtggctcat

SEQ ID NO: 55028 - DNA, 15 bp, Homo sapiens
tgggcacagtggctc

SEQ ID NO: 55029 - DNA, 15 bp, Homo sapiens
ctgggcacagtggct

SEQ ID NO: 55030 - DNA, 15 bp, Homo sapiens
gctgggcacagtggc

SEQ ID NO: 55031 - DNA, 15 bp, Homo sapiens
ggctgggcacagtgg

SEQ ID NO: 55032 - DNA, 15 bp, Homo sapiens
gggctgggcacagtg

SEQ ID NO: 55033 - DNA, 15 bp, Homo sapiens
agggctgggcacagt

SEQ ID NO: 55034 - DNA, 15 bp, Homo sapiens
gagggctgggcacag

SEQ ID NO: 55035 - DNA, 15 bp, Homo sapiens
agagggctgggcaca

SEQ ID NO: 55036 - DNA, 15 bp, Homo sapiens
gagagggctgggcac

SEQ ID NO: 55037 - DNA, 15 bp, Homo sapiens
ggagagggctgggca

SEQ ID NO: 55038 - DNA, 15 bp, Homo sapiens
tggagagggctgggc

SEQ ID NO: 55039 - DNA, 15 bp, Homo sapiens
atggagagggctggg

SEQ ID NO: 55040 - DNA, 15 bp, Homo sapiens
catggagagggctgg

SEQ ID NO: 55041 - DNA, 15 bp, Homo sapiens
tcatggagagggctg

SEQ ID NO: 55042 - DNA, 15 bp, Homo sapiens
ttcatggagagggct

SEQ ID NO: 55043 - DNA, 15 bp, Homo sapiens
gttcatggagagggc

SEQ ID NO: 55044 - DNA, 15 bp, Homo sapiens
tgttcatggagaggg

SEQ ID NO: 55045 - DNA, 15 bp, Homo sapiens
atgttcatggagagg

SEQ ID NO: 55046 - DNA, 15 bp, Homo sapiens
aatgttcatggagag

SEQ ID NO: 55047 - DNA, 15 bp, Homo sapiens
aaatgttcatggaga

SEQ ID NO: 55048 - DNA, 15 bp, Homo sapiens
aaaatgttcatggag

SEQ ID NO: 55049 - DNA, 15 bp, Homo sapiens
gaaaatgttcatgga

SEQ ID NO: 55050 - DNA, 15 bp, Homo sapiens
agaaaatgttcatgg

SEQ ID NO: 55051 - DNA, 15 bp, Homo sapiens
tagaaaatgttcatg

SEQ ID NO: 55052 - DNA, 15 bp, Homo sapiens
ttagaaaatgttcat

SEQ ID NO: 55053 - DNA, 15 bp, Homo sapiens
attagaaaatgttca

SEQ ID NO: 55054 - DNA, 15 bp, Homo sapiens
aattagaaaatgttc

SEQ ID NO: 55055 - DNA, 15 bp, Homo sapiens
taattagaaaatgtt

SEQ ID NO: 55056 - DNA, 15 bp, Homo sapiens
ttaattagaaaatgt

SEQ ID NO: 55057 - DNA, 15 bp, Homo sapiens
tttaattagaaaatg

SEQ ID NO: 55058 - DNA, 15 bp, Homo sapiens
gtttaattagaaaat

SEQ ID NO: 55059 - DNA, 15 bp, Homo sapiens
agtttaattagaaaa

SEQ ID NO: 55060 - DNA, 15 bp, Homo sapiens
aagtttaattagaaa

SEQ ID NO: 55061 - DNA, 15 bp, Homo sapiens
caagtttaattagaa

SEQ ID NO: 55062 - DNA, 15 bp, Homo sapiens
tcaagtttaattaga

SEQ ID NO: 55063 - DNA, 15 bp, Homo sapiens
gtcaagtttaattag

SEQ ID NO: 55064 - DNA, 15 bp, Homo sapiens
tgtcaagtttaatta

SEQ ID NO: 55065 - DNA, 15 bp, Homo sapiens
gtgtcaagtttaatt

SEQ ID NO: 55066 - DNA, 15 bp, Homo sapiens
agtgtcaagtttaat

SEQ ID NO: 55067 - DNA, 15 bp, Homo sapiens
aagtgtcaagtttaa

SEQ ID NO: 55068 - DNA, 15 bp, Homo sapiens
taagtgtcaagttta

SEQ ID NO: 55069 - DNA, 15 bp, Homo sapiens
ttaagtgtcaagttt

SEQ ID NO: 55070 - DNA, 15 bp, Homo sapiens
attaagtgtcaagtt

SEQ ID NO: 55071 - DNA, 15 bp, Homo sapiens
tattaagtgtcaagt

SEQ ID NO: 55072 - DNA, 15 bp, Homo sapiens
gtattaagtgtcaag

SEQ ID NO: 55073 - DNA, 15 bp, Homo sapiens
tgtattaagtgtcaa

SEQ ID NO: 55074 - DNA, 15 bp, Homo sapiens
ttgtattaagtgtca

SEQ ID NO: 55075 - DNA, 15 bp, Homo sapiens
attgtattaagtgtc

SEQ ID NO: 55076 - DNA, 15 bp, Homo sapiens
cattgtattaagtgt

SEQ ID NO: 55077 - DNA, 15 bp, Homo sapiens
acattgtattaagtg

SEQ ID NO: 55078 - DNA, 15 bp, Homo sapiens
aacattgtattaagt

SEQ ID NO: 55079 - DNA, 15 bp, Homo sapiens
taacattgtattaag

SEQ ID NO: 55080 - DNA, 15 bp, Homo sapiens
ataacattgtattaa

SEQ ID NO: 55081 - DNA, 15 bp, Homo sapiens
cataacattgtatta

SEQ ID NO: 55082 - DNA, 15 bp, Homo sapiens
gcataacattgtatt

SEQ ID NO: 55083 - DNA, 15 bp, Homo sapiens
agcataacattgtat

SEQ ID NO: 55084 - DNA, 15 bp, Homo sapiens
aagcataacattgta

SEQ ID NO: 55085 - DNA, 15 bp, Homo sapiens
taagcataacattgt

SEQ ID NO: 55086 - DNA, 15 bp, Homo sapiens
ctaagcataacattg

SEQ ID NO: 55087 - DNA, 15 bp, Homo sapiens
cctaagcataacatt

SEQ ID NO: 55088 - DNA, 15 bp, Homo sapiens
tcctaagcataacat

SEQ ID NO: 55089 - DNA, 15 bp, Homo sapiens
gtcctaagcataaca

SEQ ID NO: 55090 - DNA, 15 bp, Homo sapiens
agtcctaagcataac

SEQ ID NO: 55091 - DNA, 15 bp, Homo sapiens
cagtcctaagcataa

SEQ ID NO: 55092 - DNA, 15 bp, Homo sapiens
gcagtcctaagcata

SEQ ID NO: 55093 - DNA, 15 bp, Homo sapiens
agcagtcctaagcat

SEQ ID NO: 55094 - DNA, 15 bp, Homo sapiens
tagcagtcctaagca

SEQ ID NO: 55095 - DNA, 15 bp, Homo sapiens
atagcagtcctaagc

SEQ ID NO: 55096 - DNA, 15 bp, Homo sapiens
tatagcagtcctaag

SEQ ID NO: 55097 - DNA, 15 bp, Homo sapiens
ttatagcagtcctaa

SEQ ID NO: 55098 - DNA, 15 bp, Homo sapiens
tttatagcagtccta

SEQ ID NO: 55099 - DNA, 15 bp, Homo sapiens
ctttatagcagtcct

SEQ ID NO: 55100 - DNA, 15 bp, Homo sapiens
gctttatagcagtcc

SEQ ID NO: 55101 - DNA, 15 bp, Homo sapiens
agctttatagcagtc

SEQ ID NO: 55102 - DNA, 15 bp, Homo sapiens
aagctttatagcagt

SEQ ID NO: 55103 - DNA, 15 bp, Homo sapiens
taagctttatagcag

SEQ ID NO: 55104 - DNA, 15 bp, Homo sapiens
gtaagctttatagca

SEQ ID NO: 55105 - DNA, 15 bp, Homo sapiens
ggtaagctttatagc

SEQ ID NO: 55106 - DNA, 15 bp, Homo sapiens
aggtaagctttatag

SEQ ID NO: 55107 - DNA, 15 bp, Homo sapiens
gaggtaagctttata

SEQ ID NO: 55108 - DNA, 15 bp, Homo sapiens
agaggtaagctttat

SEQ ID NO: 55109 - DNA, 15 bp, Homo sapiens
cagaggtaagcttta

SEQ ID NO: 55110 - DNA, 15 bp, Homo sapiens
ccagaggtaagcttt

SEQ ID NO: 55111 - DNA, 15 bp, Homo sapiens
tccagaggtaagctt

SEQ ID NO: 55112 - DNA, 15 bp, Homo sapiens
ctccagaggtaagct

SEQ ID NO: 55113 - DNA, 15 bp, Homo sapiens
actccagaggtaagc

SEQ ID NO: 55114 - DNA, 15 bp, Homo sapiens
aactccagaggtaag

SEQ ID NO: 55115 - DNA, 15 bp, Homo sapiens
caactccagaggtaa

SEQ ID NO: 55116 - DNA, 15 bp, Homo sapiens
gcaactccagaggta

SEQ ID NO: 55117 - DNA, 15 bp, Homo sapiens
cgcaactccagaggt

SEQ ID NO: 55118 - DNA, 15 bp, Homo sapiens
gcgcaactccagagg

SEQ ID NO: 55119 - DNA, 15 bp, Homo sapiens
tgcgcaactccagag

SEQ ID NO: 55120 - DNA, 15 bp, Homo sapiens
ctgcgcaactccaga

SEQ ID NO: 55121 - DNA, 15 bp, Homo sapiens
gctgcgcaactccag

SEQ ID NO: 55122 - DNA, 15 bp, Homo sapiens
tgctgcgcaactcca

SEQ ID NO: 55123 - DNA, 15 bp, Homo sapiens
gtgctgcgcaactcc

SEQ ID NO: 55124 - DNA, 15 bp, Homo sapiens
tgtgctgcgcaactc

SEQ ID NO: 55125 - DNA, 15 bp, Homo sapiens
ttgtgctgcgcaact

SEQ ID NO: 55126 - DNA, 15 bp, Homo sapiens
tttgtgctgcgcaac

SEQ ID NO: 55127 - DNA, 15 bp, Homo sapiens
ctttgtgctgcgcaa

SEQ ID NO: 55128 - DNA, 15 bp, Homo sapiens
cctttgtgctgcgca

SEQ ID NO: 55129 - DNA, 15 bp, Homo sapiens
gcctttgtgctgcgc

SEQ ID NO: 55130 - DNA, 15 bp, Homo sapiens
ggcctttgtgctgcg

SEQ ID NO: 55131 - DNA, 15 bp, Homo sapiens
aggcctttgtgctgc

SEQ ID NO: 55132 - DNA, 15 bp, Homo sapiens
aaggcctttgtgctg

SEQ ID NO: 55133 - DNA, 15 bp, Homo sapiens
caaggcctttgtgct

SEQ ID NO: 55134 - DNA, 15 bp, Homo sapiens
ccaaggcctttgtgc

SEQ ID NO: 55135 - DNA, 15 bp, Homo sapiens
accaaggcctttgtg

SEQ ID NO: 55136 - DNA, 15 bp, Homo sapiens
caccaaggcctttgt

SEQ ID NO: 55137 - DNA, 15 bp, Homo sapiens
acaccaaggcctttg

SEQ ID NO: 55138 - DNA, 15 bp, Homo sapiens
cacaccaaggccttt

SEQ ID NO: 55139 - DNA, 15 bp, Homo sapiens
acacaccaaggcctt

SEQ ID NO: 55140 - DNA, 15 bp, Homo sapiens
cacacaccaaggcct

SEQ ID NO: 55141 - DNA, 15 bp, Homo sapiens
acacacaccaaggcc

SEQ ID NO: 55142 - DNA, 15 bp, Homo sapiens
tacacacaccaaggc

SEQ ID NO: 55143 - DNA, 15 bp, Homo sapiens
atacacacaccaagg

SEQ ID NO: 55144 - DNA, 15 bp, Homo sapiens
tatacacacaccaag

SEQ ID NO: 55145 - DNA, 15 bp, Homo sapiens
ttatacacacaccaa

SEQ ID NO: 55146 - DNA, 15 bp, Homo sapiens
tttatacacacacca

SEQ ID NO: 55147 - DNA, 15 bp, Homo sapiens
atttatacacacacc

SEQ ID NO: 55148 - DNA, 15 bp, Homo sapiens
aatttatacacacac

SEQ ID NO: 55149 - DNA, 15 bp, Homo sapiens
aaatttatacacaca

SEQ ID NO: 55150 - DNA, 15 bp, Homo sapiens
caaatttatacacac

SEQ ID NO: 55151 - DNA, 15 bp, Homo sapiens
ccaaatttatacaca

SEQ ID NO: 55152 - DNA, 15 bp, Homo sapiens
accaaatttatacac

SEQ ID NO: 55153 - DNA, 15 bp, Homo sapiens
aaccaaatttataca

SEQ ID NO: 55154 - DNA, 15 bp, Homo sapiens
aaaccaaatttatac

SEQ ID NO: 55155 - DNA, 15 bp, Homo sapiens
caaaccaaatttata

SEQ ID NO: 55156 - DNA, 15 bp, Homo sapiens
acaaaccaaatttat

SEQ ID NO: 55157 - DNA, 15 bp, Homo sapiens
aacaaaccaaattta

SEQ ID NO: 55158 - DNA, 15 bp, Homo sapiens
gaacaaaccaaattt

SEQ ID NO: 55159 - DNA, 15 bp, Homo sapiens
agaacaaaccaaatt

SEQ ID NO: 55160 - DNA, 15 bp, Homo sapiens
aagaacaaaccaaat

SEQ ID NO: 55161 - DNA, 15 bp, Homo sapiens
aaagaacaaaccaaa

SEQ ID NO: 55162 - DNA, 15 bp, Homo sapiens
aaaagaacaaaccaa

SEQ ID NO: 55163 - DNA, 15 bp, Homo sapiens
gaaaagaacaaacca

SEQ ID NO: 55164 - DNA, 15 bp, Homo sapiens
tgaaaagaacaaacc

SEQ ID NO: 55165 - DNA, 15 bp, Homo sapiens
gtgaaaagaacaaac

SEQ ID NO: 55166 - DNA, 15 bp, Homo sapiens
tgtgaaaagaacaaa

SEQ ID NO: 55167 - DNA, 15 bp, Homo sapiens
ctgtgaaaagaacaa

SEQ ID NO: 55168 - DNA, 15 bp, Homo sapiens
gctgtgaaaagaaca

SEQ ID NO: 55169 - DNA, 15 bp, Homo sapiens
tgctgtgaaaagaac

SEQ ID NO: 55170 - DNA, 15 bp, Homo sapiens
ttgctgtgaaaagaa

SEQ ID NO: 55171 - DNA, 15 bp, Homo sapiens
tttgctgtgaaaaga

SEQ ID NO: 55172 - DNA, 15 bp, Homo sapiens
ttttgctgtgaaaag

SEQ ID NO: 55173 - DNA, 15 bp, Homo sapiens
cttttgctgtgaaaa

SEQ ID NO: 55174 - DNA, 15 bp, Homo sapiens
gcttttgctgtgaaa

SEQ ID NO: 55175 - DNA, 15 bp, Homo sapiens
agcttttgctgtgaa

SEQ ID NO: 55176 - DNA, 15 bp, Homo sapiens
tagcttttgctgtga

SEQ ID NO: 55177 - DNA, 15 bp, Homo sapiens
gtagcttttgctgtg

SEQ ID NO: 55178 - DNA, 15 bp, Homo sapiens
ggtagcttttgctgt

SEQ ID NO: 55179 - DNA, 15 bp, Homo sapiens
gggtagcttttgctg

SEQ ID NO: 55180 - DNA, 15 bp, Homo sapiens
tgggtagcttttgct

SEQ ID NO: 55181 - DNA, 15 bp, Homo sapiens
gtgggtagcttttgc

SEQ ID NO: 55182 - DNA, 15 bp, Homo sapiens
ggtgggtagcttttg

SEQ ID NO: 55183 - DNA, 15 bp, Homo sapiens
aggtgggtagctttt

SEQ ID NO: 55184 - DNA, 15 bp, Homo sapiens
aaggtgggtagcttt

SEQ ID NO: 55185 - DNA, 15 bp, Homo sapiens
aaaggtgggtagctt

SEQ ID NO: 55186 - DNA, 15 bp, Homo sapiens
caaaggtgggtagct

SEQ ID NO: 55187 - DNA, 15 bp, Homo sapiens
gcaaaggtgggtagc

SEQ ID NO: 55188 - DNA, 15 bp, Homo sapiens
ggcaaaggtgggtag

SEQ ID NO: 55189 - DNA, 15 bp, Homo sapiens
aggcaaaggtgggta

SEQ ID NO: 55190 - DNA, 15 bp, Homo sapiens
gaggcaaaggtgggt

SEQ ID NO: 55191 - DNA, 15 bp, Homo sapiens
ggaggcaaaggtggg

SEQ ID NO: 55192 - DNA, 15 bp, Homo sapiens
aggaggcaaaggtgg

SEQ ID NO: 55193 - DNA, 15 bp, Homo sapiens
caggaggcaaaggtg

SEQ ID NO: 55194 - DNA, 15 bp, Homo sapiens
acaggaggcaaaggt

SEQ ID NO: 55195 - DNA, 15 bp, Homo sapiens
cacaggaggcaaagg

SEQ ID NO: 55196 - DNA, 15 bp, Homo sapiens
gcacaggaggcaaag

SEQ ID NO: 55197 - DNA, 15 bp, Homo sapiens
ggcacaggaggcaaa

SEQ ID NO: 55198 - DNA, 15 bp, Homo sapiens
aggcacaggaggcaa

SEQ ID NO: 55199 - DNA, 15 bp, Homo sapiens
caggcacaggaggca

SEQ ID NO: 55200 - DNA, 15 bp, Homo sapiens
gcaggcacaggaggc

SEQ ID NO: 55201 - DNA, 15 bp, Homo sapiens
agcaggcacaggagg

SEQ ID NO: 55202 - DNA, 15 bp, Homo sapiens
aagcaggcacaggag

SEQ ID NO: 55203 - DNA, 15 bp, Homo sapiens
gaagcaggcacagga

SEQ ID NO: 55204 - DNA, 15 bp, Homo sapiens
agaagcaggcacagg

SEQ ID NO: 55205 - DNA, 15 bp, Homo sapiens
cagaagcaggcacag

SEQ ID NO: 55206 - DNA, 15 bp, Homo sapiens
gcagaagcaggcaca

SEQ ID NO: 55207 - DNA, 15 bp, Homo sapiens
ggcagaagcaggcac

SEQ ID NO: 55208 - DNA, 15 bp, Homo sapiens
gggcagaagcaggca

SEQ ID NO: 55209 - DNA, 15 bp, Homo sapiens
tgggcagaagcaggc

SEQ ID NO: 55210 - DNA, 15 bp, Homo sapiens
ctgggcagaagcagg

SEQ ID NO: 55211 - DNA, 15 bp, Homo sapiens
cctgggcagaagcag

SEQ ID NO: 55212 - DNA, 15 bp, Homo sapiens
ccctgggcagaagca

SEQ ID NO: 55213 - DNA, 15 bp, Homo sapiens
tccctgggcagaagc

SEQ ID NO: 55214 - DNA, 15 bp, Homo sapiens
gtccctgggcagaag

SEQ ID NO: 55215 - DNA, 15 bp, Homo sapiens
agtccctgggcagaa

SEQ ID NO: 55216 - DNA, 15 bp, Homo sapiens
aagtccctgggcaga

SEQ ID NO: 55217 - DNA, 15 bp, Homo sapiens
taagtccctgggcag

SEQ ID NO: 55218 - DNA, 15 bp, Homo sapiens
ctaagtccctgggca

SEQ ID NO: 55219 - DNA, 15 bp, Homo sapiens
cctaagtccctgggc

SEQ ID NO: 55220 - DNA, 15 bp, Homo sapiens
acctaagtccctggg

SEQ ID NO: 55221 - DNA, 15 bp, Homo sapiens
gacctaagtccctgg

SEQ ID NO: 55222 - DNA, 15 bp, Homo sapiens
ggacctaagtccctg

SEQ ID NO: 55223 - DNA, 15 bp, Homo sapiens
aggacctaagtccct

SEQ ID NO: 55224 - DNA, 15 bp, Homo sapiens
gaggacctaagtccc

SEQ ID NO: 55225 - DNA, 15 bp, Homo sapiens
agaggacctaagtcc

SEQ ID NO: 55226 - DNA, 15 bp, Homo sapiens
aagaggacctaagtc

SEQ ID NO: 55227 - DNA, 15 bp, Homo sapiens
taagaggacctaagt

SEQ ID NO: 55228 - DNA, 15 bp, Homo sapiens
gtaagaggacctaag

SEQ ID NO: 55229 - DNA, 15 bp, Homo sapiens
tgtaagaggacctaa

SEQ ID NO: 55230 - DNA, 15 bp, Homo sapiens
gtgtaagaggaccta

SEQ ID NO: 55231 - DNA, 15 bp, Homo sapiens
ggtgtaagaggacct

SEQ ID NO: 55232 - DNA, 15 bp, Homo sapiens
aggtgtaagaggacc

SEQ ID NO: 55233 - DNA, 15 bp, Homo sapiens
aaggtgtaagaggac

SEQ ID NO: 55234 - DNA, 15 bp, Homo sapiens
taaggtgtaagagga

SEQ ID NO: 55235 - DNA, 15 bp, Homo sapiens
ctaaggtgtaagagg

SEQ ID NO: 55236 - DNA, 15 bp, Homo sapiens
tctaaggtgtaagag

SEQ ID NO: 55237 - DNA, 15 bp, Homo sapiens
ctctaaggtgtaaga

SEQ ID NO: 55238 - DNA, 15 bp, Homo sapiens
tctctaaggtgtaag

SEQ ID NO: 55239 - DNA, 15 bp, Homo sapiens
ttctctaaggtgtaa

SEQ ID NO: 55240 - DNA, 15 bp, Homo sapiens
tttctctaaggtgta

SEQ ID NO: 55241 - DNA, 15 bp, Homo sapiens
ctttctctaaggtgt

SEQ ID NO: 55242 - DNA, 15 bp, Homo sapiens
cctttctctaaggtg

SEQ ID NO: 55243 - DNA, 15 bp, Homo sapiens
gcctttctctaaggt

SEQ ID NO: 55244 - DNA, 15 bp, Homo sapiens
ggcctttctctaagg

SEQ ID NO: 55245 - DNA, 15 bp, Homo sapiens
aggcctttctctaag

SEQ ID NO: 55246 - DNA, 15 bp, Homo sapiens
aaggcctttctctaa

SEQ ID NO: 55247 - DNA, 15 bp, Homo sapiens
taaggcctttctcta

SEQ ID NO: 55248 - DNA, 15 bp, Homo sapiens
ctaaggcctttctct

SEQ ID NO: 55249 - DNA, 15 bp, Homo sapiens
gctaaggcctttctc

SEQ ID NO: 55250 - DNA, 15 bp, Homo sapiens
tgctaaggcctttct

SEQ ID NO: 55251 - DNA, 15 bp, Homo sapiens
atgctaaggcctttc

SEQ ID NO: 55252 - DNA, 15 bp, Homo sapiens
gatgctaaggccttt

SEQ ID NO: 55253 - DNA, 15 bp, Homo sapiens
agatgctaaggcctt

SEQ ID NO: 55254 - DNA, 15 bp, Homo sapiens
cagatgctaaggcct

SEQ ID NO: 55255 - DNA, 15 bp, Homo sapiens
ccagatgctaaggcc

SEQ ID NO: 55256 - DNA, 15 bp, Homo sapiens
accagatgctaaggc

SEQ ID NO: 55257 - DNA, 15 bp, Homo sapiens
gaccagatgctaagg

SEQ ID NO: 55258 - DNA, 15 bp, Homo sapiens
tgaccagatgctaag

SEQ ID NO: 55259 - DNA, 15 bp, Homo sapiens
gtgaccagatgctaa

SEQ ID NO: 55260 - DNA, 15 bp, Homo sapiens
tgtgaccagatgcta

SEQ ID NO: 55261 - DNA, 15 bp, Homo sapiens
ctgtgaccagatgct

SEQ ID NO: 55262 - DNA, 15 bp, Homo sapiens
cctgtgaccagatgc

SEQ ID NO: 55263 - DNA, 15 bp, Homo sapiens
gcctgtgaccagatg

SEQ ID NO: 55264 - DNA, 15 bp, Homo sapiens
tgcctgtgaccagat

SEQ ID NO: 55265 - DNA, 15 bp, Homo sapiens
ctgcctgtgaccaga

SEQ ID NO: 55266 - DNA, 15 bp, Homo sapiens
tctgcctgtgaccag

SEQ ID NO: 55267 - DNA, 15 bp, Homo sapiens
atctgcctgtgacca

SEQ ID NO: 55268 - DNA, 15 bp, Homo sapiens
catctgcctgtgacc

SEQ ID NO: 55269 - DNA, 15 bp, Homo sapiens
tcatctgcctgtgac

SEQ ID NO: 55270 - DNA, 15 bp, Homo sapiens
ctcatctgcctgtga

SEQ ID NO: 55271 - DNA, 15 bp, Homo sapiens
actcatctgcctgtg

SEQ ID NO: 55272 - DNA, 15 bp, Homo sapiens
cactcatctgcctgt

SEQ ID NO: 55273 - DNA, 15 bp, Homo sapiens
tcactcatctgcctg

SEQ ID NO: 55274 - DNA, 15 bp, Homo sapiens
gtcactcatctgcct

SEQ ID NO: 55275 - DNA, 15 bp, Homo sapiens
tgtcactcatctgcc

SEQ ID NO: 55276 - DNA, 15 bp, Homo sapiens
ctgtcactcatctgc

SEQ ID NO: 55277 - DNA, 15 bp, Homo sapiens
gctgtcactcatctg

SEQ ID NO: 55278 - DNA, 15 bp, Homo sapiens
tgctgtcactcatct

SEQ ID NO: 55279 - DNA, 15 bp, Homo sapiens
ttgctgtcactcatc

SEQ ID NO: 55280 - DNA, 15 bp, Homo sapiens
cttgctgtcactcat

SEQ ID NO: 55281 - DNA, 15 bp, Homo sapiens
tcttgctgtcactca

SEQ ID NO: 55282 - DNA, 15 bp, Homo sapiens
ttcttgctgtcactc

SEQ ID NO: 55283 - DNA, 15 bp, Homo sapiens
tttcttgctgtcact

SEQ ID NO: 55284 - DNA, 15 bp, Homo sapiens
ttttcttgctgtcac

SEQ ID NO: 55285 - DNA, 15 bp, Homo sapiens
gttttcttgctgtca

SEQ ID NO: 55286 - DNA, 15 bp, Homo sapiens
ggttttcttgctgtc

SEQ ID NO: 55287 - DNA, 15 bp, Homo sapiens
aggttttcttgctgt

SEQ ID NO: 55288 - DNA, 15 bp, Homo sapiens
caggttttcttgctg

SEQ ID NO: 55289 - DNA, 15 bp, Homo sapiens
ccaggttttcttgct

SEQ ID NO: 55290 - DNA, 15 bp, Homo sapiens
gccaggttttcttgc

SEQ ID NO: 55291 - DNA, 15 bp, Homo sapiens
agccaggttttcttg

SEQ ID NO: 55292 - DNA, 15 bp, Homo sapiens
cagccaggttttctt

SEQ ID NO: 55293 - DNA, 15 bp, Homo sapiens
gcagccaggttttct

SEQ ID NO: 55294 - DNA, 15 bp, Homo sapiens
tgcagccaggttttc

SEQ ID NO: 55295 - DNA, 15 bp, Homo sapiens
ttgcagccaggtttt

SEQ ID NO: 55296 - DNA, 15 bp, Homo sapiens
attgcagccaggttt

SEQ ID NO: 55297 - DNA, 15 bp, Homo sapiens
cattgcagccaggtt

SEQ ID NO: 55298 - DNA, 15 bp, Homo sapiens
acattgcagccaggt

SEQ ID NO: 55299 - DNA, 15 bp, Homo sapiens
tacattgcagccagg

SEQ ID NO: 55300 - DNA, 15 bp, Homo sapiens
ttacattgcagccag

SEQ ID NO: 55301 - DNA, 15 bp, Homo sapiens
attacattgcagcca

SEQ ID NO: 55302 - DNA, 15 bp, Homo sapiens
aattacattgcagcc

SEQ ID NO: 55303 - DNA, 15 bp, Homo sapiens
aaattacattgcagc

SEQ ID NO: 55304 - DNA, 15 bp, Homo sapiens
aaaattacattgcag

SEQ ID NO: 55305 - DNA, 15 bp, Homo sapiens
caaaattacattgca

SEQ ID NO: 55306 - DNA, 15 bp, Homo sapiens
acaaaattacattgc

SEQ ID NO: 55307 - DNA, 15 bp, Homo sapiens
aacaaaattacattg

SEQ ID NO: 55308 - DNA, 15 bp, Homo sapiens
aaacaaaattacatt

SEQ ID NO: 55309 - DNA, 15 bp, Homo sapiens
gaaacaaaattacat

SEQ ID NO: 55310 - DNA, 15 bp, Homo sapiens
ggaaacaaaattaca

SEQ ID NO: 55311 - DNA, 15 bp, Homo sapiens
tggaaacaaaattac

SEQ ID NO: 55312 - DNA, 15 bp, Homo sapiens
atggaaacaaaatta

SEQ ID NO: 55313 - DNA, 15 bp, Homo sapiens
gatggaaacaaaatt

SEQ ID NO: 55314 - DNA, 15 bp, Homo sapiens
ggatggaaacaaaat

SEQ ID NO: 55315 - DNA, 15 bp, Homo sapiens
aggatggaaacaaaa

SEQ ID NO: 55316 - DNA, 15 bp, Homo sapiens
gaggatggaaacaaa

SEQ ID NO: 55317 - DNA, 15 bp, Homo sapiens
agaggatggaaacaa

SEQ ID NO: 55318 - DNA, 15 bp, Homo sapiens
aagaggatggaaaca

SEQ ID NO: 55319 - DNA, 15 bp, Homo sapiens
aaagaggatggaaac

SEQ ID NO: 55320 - DNA, 15 bp, Homo sapiens
taaagaggatggaaa

SEQ ID NO: 55321 - DNA, 15 bp, Homo sapiens
ataaagaggatggaa

SEQ ID NO: 55322 - DNA, 15 bp, Homo sapiens
aataaagaggatgga

SEQ ID NO: 55323 - DNA, 15 bp, Homo sapiens
taataaagaggatgg

SEQ ID NO: 55324 - DNA, 15 bp, Homo sapiens
ctaataaagaggatg

SEQ ID NO: 55325 - DNA, 15 bp, Homo sapiens
actaataaagaggat

SEQ ID NO: 55326 - DNA, 15 bp, Homo sapiens
aactaataaagagga

SEQ ID NO: 55327 - DNA, 15 bp, Homo sapiens
taactaataaagagg

SEQ ID NO: 55328 - DNA, 15 bp, Homo sapiens
ataactaataaagag

SEQ ID NO: 55329 - DNA, 15 bp, Homo sapiens
gataactaataaaga

SEQ ID NO: 55330 - DNA, 15 bp, Homo sapiens
tgataactaataaag

SEQ ID NO: 55331 - DNA, 15 bp, Homo sapiens
ttgataactaataaa

SEQ ID NO: 55332 - DNA, 15 bp, Homo sapiens
attgataactaataa

SEQ ID NO: 55333 - DNA, 15 bp, Homo sapiens
aattgataactaata

SEQ ID NO: 55334 - DNA, 15 bp, Homo sapiens
caattgataactaat

SEQ ID NO: 55335 - DNA, 15 bp, Homo sapiens
ccaattgataactaa

SEQ ID NO: 55336 - DNA, 15 bp, Homo sapiens
tccaattgataacta

SEQ ID NO: 55337 - DNA, 15 bp, Homo sapiens
atccaattgataact

SEQ ID NO: 55338 - DNA, 15 bp, Homo sapiens
aatccaattgataac

SEQ ID NO: 55339 - DNA, 15 bp, Homo sapiens
aaatccaattgataa

SEQ ID NO: 55340 - DNA, 15 bp, Homo sapiens
aaaatccaattgata

SEQ ID NO: 55341 - DNA, 15 bp, Homo sapiens
aaaaatccaattgat

SEQ ID NO: 55342 - DNA, 15 bp, Homo sapiens
taaaaatccaattga

SEQ ID NO: 55343 - DNA, 15 bp, Homo sapiens
ataaaaatccaattg

SEQ ID NO: 55344 - DNA, 15 bp, Homo sapiens
cataaaaatccaatt

SEQ ID NO: 55345 - DNA, 15 bp, Homo sapiens
tcataaaaatccaat

SEQ ID NO: 55346 - DNA, 15 bp, Homo sapiens
ttcataaaaatccaa

SEQ ID NO: 55347 - DNA, 15 bp, Homo sapiens
tttcataaaaatcca

SEQ ID NO: 55348 - DNA, 15 bp, Homo sapiens
atttcataaaaatcc

SEQ ID NO: 55349 - DNA, 15 bp, Homo sapiens
aatttcataaaaatc

SEQ ID NO: 55350 - DNA, 15 bp, Homo sapiens
aaatttcataaaaat

SEQ ID NO: 55351 - DNA, 15 bp, Homo sapiens
gaaatttcataaaaa

SEQ ID NO: 55352 - DNA, 15 bp, Homo sapiens
ggaaatttcataaaa

SEQ ID NO: 55353 - DNA, 15 bp, Homo sapiens
tggaaatttcataaa

SEQ ID NO: 55354 - DNA, 15 bp, Homo sapiens
ttggaaatttcataa

SEQ ID NO: 55355 - DNA, 15 bp, Homo sapiens
cttggaaatttcata

SEQ ID NO: 55356 - DNA, 15 bp, Homo sapiens
acttggaaatttcat

SEQ ID NO: 55357 - DNA, 15 bp, Homo sapiens
aacttggaaatttca

SEQ ID NO: 55358 - DNA, 15 bp, Homo sapiens
gaacttggaaatttc

SEQ ID NO: 55359 - DNA, 15 bp, Homo sapiens
ggaacttggaaattt

SEQ ID NO: 55360 - DNA, 15 bp, Homo sapiens
tggaacttggaaatt

SEQ ID NO: 55361 - DNA, 15 bp, Homo sapiens
gtggaacttggaaat

SEQ ID NO: 55362 - DNA, 15 bp, Homo sapiens
agtggaacttggaaa

SEQ ID NO: 55363 - DNA, 15 bp, Homo sapiens
gagtggaacttggaa

SEQ ID NO: 55364 - DNA, 15 bp, Homo sapiens
tgagtggaacttgga

SEQ ID NO: 55365 - DNA, 15 bp, Homo sapiens
ttgagtggaacttgg

SEQ ID NO: 55366 - DNA, 15 bp, Homo sapiens
cttgagtggaacttg

SEQ ID NO: 55367 - DNA, 15 bp, Homo sapiens
ccttgagtggaactt

SEQ ID NO: 55368 - DNA, 15 bp, Homo sapiens
tccttgagtggaact

SEQ ID NO: 55369 - DNA, 15 bp, Homo sapiens
atccttgagtggaac

SEQ ID NO: 55370 - DNA, 15 bp, Homo sapiens
aatccttgagtggaa

SEQ ID NO: 55371 - DNA, 15 bp, Homo sapiens
aaatccttgagtgga

SEQ ID NO: 55372 - DNA, 15 bp, Homo sapiens
gaaatccttgagtgg

SEQ ID NO: 55373 - DNA, 15 bp, Homo sapiens
agaaatccttgagtg

SEQ ID NO: 55374 - DNA, 15 bp, Homo sapiens
gagaaatccttgagt

SEQ ID NO: 55375 - DNA, 15 bp, Homo sapiens
tgagaaatccttgag

SEQ ID NO: 55376 - DNA, 15 bp, Homo sapiens
ctgagaaatccttga

SEQ ID NO: 55377 - DNA, 15 bp, Homo sapiens
actgagaaatccttg

SEQ ID NO: 55378 - DNA, 15 bp, Homo sapiens
cactgagaaatcctt

SEQ ID NO: 55379 - DNA, 15 bp, Homo sapiens
acactgagaaatcct

SEQ ID NO: 55380 - DNA, 15 bp, Homo sapiens
aacactgagaaatcc

SEQ ID NO: 55381 - DNA, 15 bp, Homo sapiens
aaacactgagaaatc

SEQ ID NO: 55382 - DNA, 15 bp, Homo sapiens
aaaacactgagaaat

SEQ ID NO: 55383 - DNA, 15 bp, Homo sapiens
aaaaacactgagaaa

SEQ ID NO: 55384 - DNA, 15 bp, Homo sapiens
aaaaaacactgagaa

SEQ ID NO: 55385 - DNA, 15 bp, Homo sapiens
aaaaaaacactgaga

SEQ ID NO: 55386 - DNA, 15 bp, Homo sapiens
taaaaaaacactgag

SEQ ID NO: 55387 - DNA, 15 bp, Homo sapiens
gtaaaaaaacactga

SEQ ID NO: 55388 - DNA, 15 bp, Homo sapiens
agtaaaaaaacactg

SEQ ID NO: 55389 - DNA, 15 bp, Homo sapiens
aagtaaaaaaacact

SEQ ID NO: 55390 - DNA, 15 bp, Homo sapiens
aaagtaaaaaaacac

SEQ ID NO: 55391 - DNA, 15 bp, Homo sapiens
caaagtaaaaaaaca

SEQ ID NO: 55392 - DNA, 15 bp, Homo sapiens
ccaaagtaaaaaaac

SEQ ID NO: 55393 - DNA, 15 bp, Homo sapiens
accaaagtaaaaaaa

SEQ ID NO: 55394 - DNA, 15 bp, Homo sapiens
taccaaagtaaaaaa

SEQ ID NO: 55395 - DNA, 15 bp, Homo sapiens
ataccaaagtaaaaa

SEQ ID NO: 55396 - DNA, 15 bp, Homo sapiens
tataccaaagtaaaa

SEQ ID NO: 55397 - DNA, 15 bp, Homo sapiens
ctataccaaagtaaa

SEQ ID NO: 55398 - DNA, 15 bp, Homo sapiens
actataccaaagtaa

SEQ ID NO: 55399 - DNA, 15 bp, Homo sapiens
cactataccaaagta

SEQ ID NO: 55400 - DNA, 15 bp, Homo sapiens
ccactataccaaagt

SEQ ID NO: 55401 - DNA, 15 bp, Homo sapiens
tccactataccaaag

SEQ ID NO: 55402 - DNA, 15 bp, Homo sapiens
ttccactataccaaa

SEQ ID NO: 55403 - DNA, 15 bp, Homo sapiens
tttccactataccaa

SEQ ID NO: 55404 - DNA, 15 bp, Homo sapiens
gtttccactatacca

SEQ ID NO: 55405 - DNA, 15 bp, Homo sapiens
ggtttccactatacc

SEQ ID NO: 55406 - DNA, 15 bp, Homo sapiens
tggtttccactatac

SEQ ID NO: 55407 - DNA, 15 bp, Homo sapiens
ctggtttccactata

SEQ ID NO: 55408 - DNA, 15 bp, Homo sapiens
cctggtttccactat

SEQ ID NO: 55409 - DNA, 15 bp, Homo sapiens
ccctggtttccacta

SEQ ID NO: 55410 - DNA, 15 bp, Homo sapiens
accctggtttccact

SEQ ID NO: 55411 - DNA, 15 bp, Homo sapiens
aaccctggtttccac

SEQ ID NO: 55412 - DNA, 15 bp, Homo sapiens
caaccctggtttcca

SEQ ID NO: 55413 - DNA, 15 bp, Homo sapiens
gcaaccctggtttcc

SEQ ID NO: 55414 - DNA, 15 bp, Homo sapiens
ggcaaccctggtttc

SEQ ID NO: 55415 - DNA, 15 bp, Homo sapiens
tggcaaccctggttt

SEQ ID NO: 55416 - DNA, 15 bp, Homo sapiens
ctggcaaccctggtt

SEQ ID NO: 55417 - DNA, 15 bp, Homo sapiens
tctggcaaccctggt

SEQ ID NO: 55418 - DNA, 15 bp, Homo sapiens
ttctggcaaccctgg

SEQ ID NO: 55419 - DNA, 15 bp, Homo sapiens
tttctggcaaccctg

SEQ ID NO: 55420 - DNA, 15 bp, Homo sapiens
ctttctggcaaccct

SEQ ID NO: 55421 - DNA, 15 bp, Homo sapiens
actttctggcaaccc

SEQ ID NO: 55422 - DNA, 15 bp, Homo sapiens
tactttctggcaacc

SEQ ID NO: 55423 - DNA, 15 bp, Homo sapiens
atactttctggcaac

SEQ ID NO: 55424 - DNA, 15 bp, Homo sapiens
aatactttctggcaa

SEQ ID NO: 55425 - DNA, 15 bp, Homo sapiens
taatactttctggca

SEQ ID NO: 55426 - DNA, 15 bp, Homo sapiens
ataatactttctggc

SEQ ID NO: 55427 - DNA, 15 bp, Homo sapiens
aataatactttctgg

SEQ ID NO: 55428 - DNA, 15 bp, Homo sapiens
aaataatactttctg

SEQ ID NO: 55429 - DNA, 15 bp, Homo sapiens
aaaataatactttct

SEQ ID NO: 55430 - DNA, 15 bp, Homo sapiens
caaaataatactttc

SEQ ID NO: 55431 - DNA, 15 bp, Homo sapiens
ccaaaataatacttt

SEQ ID NO: 55432 - DNA, 15 bp, Homo sapiens
cccaaaataatactt

SEQ ID NO: 55433 - DNA, 15 bp, Homo sapiens
ccccaaaataatact

SEQ ID NO: 55434 - DNA, 15 bp, Homo sapiens
cccccaaaataatac

SEQ ID NO: 55435 - DNA, 15 bp, Homo sapiens
acccccaaaataata

SEQ ID NO: 55436 - DNA, 15 bp, Homo sapiens
cacccccaaaataat

SEQ ID NO: 55437 - DNA, 15 bp, Homo sapiens
tcacccccaaaataa

SEQ ID NO: 55438 - DNA, 15 bp, Homo sapiens
ctcacccccaaaata

SEQ ID NO: 55439 - DNA, 15 bp, Homo sapiens
actcacccccaaaat

SEQ ID NO: 55440 - DNA, 15 bp, Homo sapiens
aactcacccccaaaa

SEQ ID NO: 55441 - DNA, 15 bp, Homo sapiens
taactcacccccaaa

SEQ ID NO: 55442 - DNA, 15 bp, Homo sapiens
ctaactcacccccaa

SEQ ID NO: 55443 - DNA, 15 bp, Homo sapiens
actaactcaccccca

SEQ ID NO: 55444 - DNA, 15 bp, Homo sapiens
gactaactcaccccc

SEQ ID NO: 55445 - DNA, 15 bp, Homo sapiens
tgactaactcacccc

SEQ ID NO: 55446 - DNA, 15 bp, Homo sapiens
ttgactaactcaccc

SEQ ID NO: 55447 - DNA, 15 bp, Homo sapiens
gttgactaactcacc

SEQ ID NO: 55448 - DNA, 15 bp, Homo sapiens
ggttgactaactcac

SEQ ID NO: 55449 - DNA, 15 bp, Homo sapiens
aggttgactaactca

SEQ ID NO: 55450 - DNA, 15 bp, Homo sapiens
aaggttgactaactc

SEQ ID NO: 55451 - DNA, 15 bp, Homo sapiens
gaaggttgactaact

SEQ ID NO: 55452 - DNA, 15 bp, Homo sapiens
cgaaggttgactaac

SEQ ID NO: 55453 - DNA, 15 bp, Homo sapiens
acgaaggttgactaa

SEQ ID NO: 55454 - DNA, 15 bp, Homo sapiens
aacgaaggttgacta

SEQ ID NO: 55455 - DNA, 15 bp, Homo sapiens
gaacgaaggttgact

SEQ ID NO: 55456 - DNA, 15 bp, Homo sapiens
tgaacgaaggttgac

SEQ ID NO: 55457 - DNA, 15 bp, Homo sapiens
ctgaacgaaggttga

SEQ ID NO: 55458 - DNA, 15 bp, Homo sapiens
actgaacgaaggttg

SEQ ID NO: 55459 - DNA, 15 bp, Homo sapiens
gactgaacgaaggtt

SEQ ID NO: 55460 - DNA, 15 bp, Homo sapiens
tgactgaacgaaggt

SEQ ID NO: 55461 - DNA, 15 bp, Homo sapiens
ctgactgaacgaagg

SEQ ID NO: 55462 - DNA, 15 bp, Homo sapiens
tctgactgaacgaag

SEQ ID NO: 55463 - DNA, 15 bp, Homo sapiens
gtctgactgaacgaa

SEQ ID NO: 55464 - DNA, 15 bp, Homo sapiens
tgtctgactgaacga

SEQ ID NO: 55465 - DNA, 15 bp, Homo sapiens
ctgtctgactgaacg

SEQ ID NO: 55466 - DNA, 15 bp, Homo sapiens
tctgtctgactgaac

SEQ ID NO: 55467 - DNA, 15 bp, Homo sapiens
gtctgtctgactgaa

SEQ ID NO: 55468 - DNA, 15 bp, Homo sapiens
tgtctgtctgactga

SEQ ID NO: 55469 - DNA, 15 bp, Homo sapiens
ctgtctgtctgactg

SEQ ID NO: 55470 - DNA, 15 bp, Homo sapiens
cctgtctgtctgact

SEQ ID NO: 55471 - DNA, 15 bp, Homo sapiens
tcctgtctgtctgac

SEQ ID NO: 55472 - DNA, 15 bp, Homo sapiens
ctcctgtctgtctga

SEQ ID NO: 55473 - DNA, 15 bp, Homo sapiens
gctcctgtctgtctg

SEQ ID NO: 55474 - DNA, 15 bp, Homo sapiens
tgctcctgtctgtct

SEQ ID NO: 55475 - DNA, 15 bp, Homo sapiens
gtgctcctgtctgtc

SEQ ID NO: 55476 - DNA, 15 bp, Homo sapiens
ggtgctcctgtctgt

SEQ ID NO: 55477 - DNA, 15 bp, Homo sapiens
aggtgctcctgtctg

SEQ ID NO: 55478 - DNA, 15 bp, Homo sapiens
gaggtgctcctgtct

SEQ ID NO: 55479 - DNA, 15 bp, Homo sapiens
tgaggtgctcctgtc

SEQ ID NO: 55480 - DNA, 15 bp, Homo sapiens
ctgaggtgctcctgt

SEQ ID NO: 55481 - DNA, 15 bp, Homo sapiens
gctgaggtgctcctg

SEQ ID NO: 55482 - DNA, 15 bp, Homo sapiens
tgctgaggtgctcct

SEQ ID NO: 55483 - DNA, 15 bp, Homo sapiens
ttgctgaggtgctcc

SEQ ID NO: 55484 - DNA, 15 bp, Homo sapiens
attgctgaggtgctc

SEQ ID NO: 55485 - DNA, 15 bp, Homo sapiens
aattgctgaggtgct

SEQ ID NO: 55486 - DNA, 15 bp, Homo sapiens
gaattgctgaggtgc

SEQ ID NO: 55487 - DNA, 15 bp, Homo sapiens
ggaattgctgaggtg

SEQ ID NO: 55488 - DNA, 15 bp, Homo sapiens
gggaattgctgaggt

SEQ ID NO: 55489 - DNA, 15 bp, Homo sapiens
tgggaattgctgagg

SEQ ID NO: 55490 - DNA, 15 bp, Homo sapiens
ctgggaattgctgag

SEQ ID NO: 55491 - DNA, 15 bp, Homo sapiens
tctgggaattgctga

SEQ ID NO: 55492 - DNA, 15 bp, Homo sapiens
ttctgggaattgctg

SEQ ID NO: 55493 - DNA, 15 bp, Homo sapiens
tttctgggaattgct

SEQ ID NO: 55494 - DNA, 15 bp, Homo sapiens
gtttctgggaattgc

SEQ ID NO: 55495 - DNA, 15 bp, Homo sapiens
cgtttctgggaattg

SEQ ID NO: 55496 - DNA, 15 bp, Homo sapiens
ccgtttctgggaatt

SEQ ID NO: 55497 - DNA, 15 bp, Homo sapiens
cccgtttctgggaat

SEQ ID NO: 55498 - DNA, 15 bp, Homo sapiens
gcccgtttctgggaa

SEQ ID NO: 55499 - DNA, 15 bp, Homo sapiens
agcccgtttctggga

SEQ ID NO: 55500 - DNA, 15 bp, Homo sapiens
cagcccgtttctggg

SEQ ID NO: 55501 - DNA, 15 bp, Homo sapiens
tcagcccgtttctgg

SEQ ID NO: 55502 - DNA, 15 bp, Homo sapiens
atcagcccgtttctg

SEQ ID NO: 55503 - DNA, 15 bp, Homo sapiens
catcagcccgtttct

SEQ ID NO: 55504 - DNA, 15 bp, Homo sapiens
ccatcagcccgtttc

SEQ ID NO: 55505 - DNA, 15 bp, Homo sapiens
cccatcagcccgttt

SEQ ID NO: 55506 - DNA, 15 bp, Homo sapiens
tcccatcagcccgtt

SEQ ID NO: 55507 - DNA, 15 bp, Homo sapiens
ttcccatcagcccgt

SEQ ID NO: 55508 - DNA, 15 bp, Homo sapiens
tttcccatcagcccg

SEQ ID NO: 55509 - DNA, 15 bp, Homo sapiens
ctttcccatcagccc

SEQ ID NO: 55510 - DNA, 15 bp, Homo sapiens
tctttcccatcagcc

SEQ ID NO: 55511 - DNA, 15 bp, Homo sapiens
ctctttcccatcagc

SEQ ID NO: 55512 - DNA, 15 bp, Homo sapiens
gctctttcccatcag

SEQ ID NO: 55513 - DNA, 15 bp, Homo sapiens
tgctctttcccatca

SEQ ID NO: 55514 - DNA, 15 bp, Homo sapiens
ttgctctttcccatc

SEQ ID NO: 55515 - DNA, 15 bp, Homo sapiens
gttgctctttcccat

SEQ ID NO: 55516 - DNA, 15 bp, Homo sapiens
tgttgctctttccca

SEQ ID NO: 55517 - DNA, 15 bp, Homo sapiens
atgttgctctttccc

SEQ ID NO: 55518 - DNA, 15 bp, Homo sapiens
tatgttgctctttcc

SEQ ID NO: 55519 - DNA, 15 bp, Homo sapiens
gtatgttgctctttc

SEQ ID NO: 55520 - DNA, 15 bp, Homo sapiens
tgtatgttgctcttt

SEQ ID NO: 55521 - DNA, 15 bp, Homo sapiens
atgtatgttgctctt

SEQ ID NO: 55522 - DNA, 15 bp, Homo sapiens
catgtatgttgctct

SEQ ID NO: 55523 - DNA, 15 bp, Homo sapiens
tcatgtatgttgctc

SEQ ID NO: 55524 - DNA, 15 bp, Homo sapiens
ttcatgtatgttgct

SEQ ID NO: 55525 - DNA, 15 bp, Homo sapiens
attcatgtatgttgc

SEQ ID NO: 55526 - DNA, 15 bp, Homo sapiens
cattcatgtatgttg

SEQ ID NO: 55527 - DNA, 15 bp, Homo sapiens
acattcatgtatgtt

SEQ ID NO: 55528 - DNA, 15 bp, Homo sapiens
gacattcatgtatgt

SEQ ID NO: 55529 - DNA, 15 bp, Homo sapiens
agacattcatgtatg

SEQ ID NO: 55530 - DNA, 15 bp, Homo sapiens
aagacattcatgtat

SEQ ID NO: 55531 - DNA, 15 bp, Homo sapiens
caagacattcatgta

SEQ ID NO: 55532 - DNA, 15 bp, Homo sapiens
tcaagacattcatgt

SEQ ID NO: 55533 - DNA, 15 bp, Homo sapiens
ttcaagacattcatg

SEQ ID NO: 55534 - DNA, 15 bp, Homo sapiens
cttcaagacattcat

SEQ ID NO: 55535 - DNA, 15 bp, Homo sapiens
tcttcaagacattca

SEQ ID NO: 55536 - DNA, 15 bp, Homo sapiens
ttcttcaagacattc

SEQ ID NO: 55537 - DNA, 15 bp, Homo sapiens
gttcttcaagacatt

SEQ ID NO: 55538 - DNA, 15 bp, Homo sapiens
tgttcttcaagacat

SEQ ID NO: 55539 - DNA, 15 bp, Homo sapiens
gtgttcttcaagaca

SEQ ID NO: 55540 - DNA, 15 bp, Homo sapiens
tgtgttcttcaagac

SEQ ID NO: 55541 - DNA, 15 bp, Homo sapiens
ctgtgttcttcaaga

SEQ ID NO: 55542 - DNA, 15 bp, Homo sapiens
gctgtgttcttcaag

SEQ ID NO: 55543 - DNA, 15 bp, Homo sapiens
ggctgtgttcttcaa

SEQ ID NO: 55544 - DNA, 15 bp, Homo sapiens
tggctgtgttcttca

SEQ ID NO: 55545 - DNA, 15 bp, Homo sapiens
ttggctgtgttcttc

SEQ ID NO: 55546 - DNA, 15 bp, Homo sapiens
gttggctgtgttctt

SEQ ID NO: 55547 - DNA, 15 bp, Homo sapiens
tgttggctgtgttct

SEQ ID NO: 55548 - DNA, 15 bp, Homo sapiens
ctgttggctgtgttc

SEQ ID NO: 55549 - DNA, 15 bp, Homo sapiens
tctgttggctgtgtt

SEQ ID NO: 55550 - DNA, 15 bp, Homo sapiens
ctctgttggctgtgt

SEQ ID NO: 55551 - DNA, 15 bp, Homo sapiens
gctctgttggctgtg

SEQ ID NO: 55552 - DNA, 15 bp, Homo sapiens
ggctctgttggctgt

SEQ ID NO: 55553 - DNA, 15 bp, Homo sapiens
gggctctgttggctg

SEQ ID NO: 55554 - DNA, 15 bp, Homo sapiens
tgggctctgttggct

SEQ ID NO: 55555 - DNA, 15 bp, Homo sapiens
atgggctctgttggc

SEQ ID NO: 55556 - DNA, 15 bp, Homo sapiens
aatgggctctgttgg

SEQ ID NO: 55557 - DNA, 15 bp, Homo sapiens
caatgggctctgttg

SEQ ID NO: 55558 - DNA, 15 bp, Homo sapiens
ccaatgggctctgtt

SEQ ID NO: 55559 - DNA, 15 bp, Homo sapiens
cccaatgggctctgt

SEQ ID NO: 55560 - DNA, 15 bp, Homo sapiens
gcccaatgggctctg

SEQ ID NO: 55561 - DNA, 15 bp, Homo sapiens
tgcccaatgggctct

SEQ ID NO: 55562 - DNA, 15 bp, Homo sapiens
ctgcccaatgggctc

SEQ ID NO: 55563 - DNA, 15 bp, Homo sapiens
actgcccaatgggct

SEQ ID NO: 55564 - DNA, 15 bp, Homo sapiens
aactgcccaatgggc

SEQ ID NO: 55565 - DNA, 15 bp, Homo sapiens
gaactgcccaatggg

SEQ ID NO: 55566 - DNA, 15 bp, Homo sapiens
agaactgcccaatgg

SEQ ID NO: 55567 - DNA, 15 bp, Homo sapiens
cagaactgcccaatg

SEQ ID NO: 55568 - DNA, 15 bp, Homo sapiens
tcagaactgcccaat

SEQ ID NO: 55569 - DNA, 15 bp, Homo sapiens
atcagaactgcccaa

SEQ ID NO: 55570 - DNA, 15 bp, Homo sapiens
aatcagaactgccca

SEQ ID NO: 55571 - DNA, 15 bp, Homo sapiens
aaatcagaactgccc

SEQ ID NO: 55572 - DNA, 15 bp, Homo sapiens
aaaatcagaactgcc

SEQ ID NO: 55573 - DNA, 15 bp, Homo sapiens
gaaaatcagaactgc

SEQ ID NO: 55574 - DNA, 15 bp, Homo sapiens
ggaaaatcagaactg

SEQ ID NO: 55575 - DNA, 15 bp, Homo sapiens
tggaaaatcagaact

SEQ ID NO: 55576 - DNA, 15 bp, Homo sapiens
ctggaaaatcagaac

SEQ ID NO: 55577 - DNA, 15 bp, Homo sapiens
cctggaaaatcagaa

SEQ ID NO: 55578 - DNA, 15 bp, Homo sapiens
acctggaaaatcaga

SEQ ID NO: 55579 - DNA, 15 bp, Homo sapiens
tacctggaaaatcag

SEQ ID NO: 55580 - DNA, 15 bp, Homo sapiens
gtacctggaaaatca

SEQ ID NO: 55581 - DNA, 15 bp, Homo sapiens
tgtacctggaaaatc

SEQ ID NO: 55582 - DNA, 15 bp, Homo sapiens
gtgtacctggaaaat

SEQ ID NO: 55583 - DNA, 15 bp, Homo sapiens
tgtgtacctggaaaa

SEQ ID NO: 55584 - DNA, 15 bp, Homo sapiens
ctgtgtacctggaaa

SEQ ID NO: 55585 - DNA, 15 bp, Homo sapiens
gctgtgtacctggaa

SEQ ID NO: 55586 - DNA, 15 bp, Homo sapiens
tgctgtgtacctgga

SEQ ID NO: 55587 - DNA, 15 bp, Homo sapiens
atgctgtgtacctgg

SEQ ID NO: 55588 - DNA, 15 bp, Homo sapiens
gatgctgtgtacctg

SEQ ID NO: 55589 - DNA, 15 bp, Homo sapiens
agatgctgtgtacct

SEQ ID NO: 55590 - DNA, 15 bp, Homo sapiens
gagatgctgtgtacc

SEQ ID NO: 55591 - DNA, 15 bp, Homo sapiens
ggagatgctgtgtac

SEQ ID NO: 55592 - DNA, 15 bp, Homo sapiens
tggagatgctgtgta

SEQ ID NO: 55593 - DNA, 15 bp, Homo sapiens
gtggagatgctgtgt

SEQ ID NO: 55594 - DNA, 15 bp, Homo sapiens
tgtggagatgctgtg

SEQ ID NO: 55595 - DNA, 15 bp, Homo sapiens
ctgtggagatgctgt

SEQ ID NO: 55596 - DNA, 15 bp, Homo sapiens
actgtggagatgctg

SEQ ID NO: 55597 - DNA, 15 bp, Homo sapiens
gactgtggagatgct

SEQ ID NO: 55598 - DNA, 15 bp, Homo sapiens
agactgtggagatgc

SEQ ID NO: 55599 - DNA, 15 bp, Homo sapiens
gagactgtggagatg

SEQ ID NO: 55600 - DNA, 15 bp, Homo sapiens
agagactgtggagat

SEQ ID NO: 55601 - DNA, 15 bp, Homo sapiens
aagagactgtggaga

SEQ ID NO: 55602 - DNA, 15 bp, Homo sapiens
gaagagactgtggag

SEQ ID NO: 55603 - DNA, 15 bp, Homo sapiens
agaagagactgtgga

SEQ ID NO: 55604 - DNA, 15 bp, Homo sapiens
cagaagagactgtgg

SEQ ID NO: 55605 - DNA, 15 bp, Homo sapiens
tcagaagagactgtg

SEQ ID NO: 55606 - DNA, 15 bp, Homo sapiens
atcagaagagactgt

SEQ ID NO: 55607 - DNA, 15 bp, Homo sapiens
aatcagaagagactg

SEQ ID NO: 55608 - DNA, 15 bp, Homo sapiens
aaatcagaagagact

SEQ ID NO: 55609 - DNA, 15 bp, Homo sapiens
aaaatcagaagagac

SEQ ID NO: 55610 - DNA, 15 bp, Homo sapiens
aaaaatcagaagaga

SEQ ID NO: 55611 - DNA, 15 bp, Homo sapiens
taaaaatcagaagag

SEQ ID NO: 55612 - DNA, 15 bp, Homo sapiens
ataaaaatcagaaga

SEQ ID NO: 55613 - DNA, 15 bp, Homo sapiens
aataaaaatcagaag

SEQ ID NO: 55614 - DNA, 15 bp, Homo sapiens
gaataaaaatcagaa

SEQ ID NO: 55615 - DNA, 15 bp, Homo sapiens
ggaataaaaatcaga

SEQ ID NO: 55616 - DNA, 15 bp, Homo sapiens
gggaataaaaatcag

SEQ ID NO: 55617 - DNA, 15 bp, Homo sapiens
ggggaataaaaatca

SEQ ID NO: 55618 - DNA, 15 bp, Homo sapiens
aggggaataaaaatc

SEQ ID NO: 55619 - DNA, 15 bp, Homo sapiens
caggggaataaaaat

SEQ ID NO: 55620 - DNA, 15 bp, Homo sapiens
tcaggggaataaaaa

SEQ ID NO: 55621 - DNA, 15 bp, Homo sapiens
ctcaggggaataaaa

SEQ ID NO: 55622 - DNA, 15 bp, Homo sapiens
actcaggggaataaa

SEQ ID NO: 55623 - DNA, 15 bp, Homo sapiens
tactcaggggaataa

SEQ ID NO: 55624 - DNA, 15 bp, Homo sapiens
atactcaggggaata

SEQ ID NO: 55625 - DNA, 15 bp, Homo sapiens
tatactcaggggaat

SEQ ID NO: 55626 - DNA, 15 bp, Homo sapiens
atatactcaggggaa

SEQ ID NO: 55627 - DNA, 15 bp, Homo sapiens
catatactcagggga

SEQ ID NO: 55628 - DNA, 15 bp, Homo sapiens
ccatatactcagggg

SEQ ID NO: 55629 - DNA, 15 bp, Homo sapiens
tccatatactcaggg

SEQ ID NO: 55630 - DNA, 15 bp, Homo sapiens
atccatatactcagg

SEQ ID NO: 55631 - DNA, 15 bp, Homo sapiens
aatccatatactcag

SEQ ID NO: 55632 - DNA, 15 bp, Homo sapiens
gaatccatatactca

SEQ ID NO: 55633 - DNA, 15 bp, Homo sapiens
ggaatccatatactc

SEQ ID NO: 55634 - DNA, 15 bp, Homo sapiens
tggaatccatatact

SEQ ID NO: 55635 - DNA, 15 bp, Homo sapiens
ctggaatccatatac

SEQ ID NO: 55636 - DNA, 15 bp, Homo sapiens
gctggaatccatata

SEQ ID NO: 55637 - DNA, 15 bp, Homo sapiens
agctggaatccatat

SEQ ID NO: 55638 - DNA, 15 bp, Homo sapiens
gagctggaatccata

SEQ ID NO: 55639 - DNA, 15 bp, Homo sapiens
tgagctggaatccat

SEQ ID NO: 55640 - DNA, 15 bp, Homo sapiens
ctgagctggaatcca

SEQ ID NO: 55641 - DNA, 15 bp, Homo sapiens
gctgagctggaatcc

SEQ ID NO: 55642 - DNA, 15 bp, Homo sapiens
tgctgagctggaatc

SEQ ID NO: 55643 - DNA, 15 bp, Homo sapiens
atgctgagctggaat

SEQ ID NO: 55644 - DNA, 15 bp, Homo sapiens
catgctgagctggaa

SEQ ID NO: 55645 - DNA, 15 bp, Homo sapiens
acatgctgagctgga

SEQ ID NO: 55646 - DNA, 15 bp, Homo sapiens
tacatgctgagctgg

SEQ ID NO: 55647 - DNA, 15 bp, Homo sapiens
ctacatgctgagctg

SEQ ID NO: 55648 - DNA, 15 bp, Homo sapiens
gctacatgctgagct

SEQ ID NO: 55649 - DNA, 15 bp, Homo sapiens
ggctacatgctgagc

SEQ ID NO: 55650 - DNA, 15 bp, Homo sapiens
aggctacatgctgag

SEQ ID NO: 55651 - DNA, 15 bp, Homo sapiens
aaggctacatgctga

SEQ ID NO: 55652 - DNA, 15 bp, Homo sapiens
aaaggctacatgctg

SEQ ID NO: 55653 - DNA, 15 bp, Homo sapiens
gaaaggctacatgct

SEQ ID NO: 55654 - DNA, 15 bp, Homo sapiens
ggaaaggctacatgc

SEQ ID NO: 55655 - DNA, 15 bp, Homo sapiens
gggaaaggctacatg

SEQ ID NO: 55656 - DNA, 15 bp, Homo sapiens
agggaaaggctacat

SEQ ID NO: 55657 - DNA, 15 bp, Homo sapiens
cagggaaaggctaca

SEQ ID NO: 55658 - DNA, 15 bp, Homo sapiens
gcagggaaaggctac

SEQ ID NO: 55659 - DNA, 15 bp, Homo sapiens
agcagggaaaggcta

SEQ ID NO: 55660 - DNA, 15 bp, Homo sapiens
cagcagggaaaggct

SEQ ID NO: 55661 - DNA, 15 bp, Homo sapiens
tcagcagggaaaggc

SEQ ID NO: 55662 - DNA, 15 bp, Homo sapiens
ctcagcagggaaagg

SEQ ID NO: 55663 - DNA, 15 bp, Homo sapiens
actcagcagggaaag

SEQ ID NO: 55664 - DNA, 15 bp, Homo sapiens
gactcagcagggaaa

SEQ ID NO: 55665 - DNA, 15 bp, Homo sapiens
agactcagcagggaa

SEQ ID NO: 55666 - DNA, 15 bp, Homo sapiens
gagactcagcaggga

SEQ ID NO: 55667 - DNA, 15 bp, Homo sapiens
agagactcagcaggg

SEQ ID NO: 55668 - DNA, 15 bp, Homo sapiens
tagagactcagcagg

SEQ ID NO: 55669 - DNA, 15 bp, Homo sapiens
ttagagactcagcag

SEQ ID NO: 55670 - DNA, 15 bp, Homo sapiens
gttagagactcagca

SEQ ID NO: 55671 - DNA, 15 bp, Homo sapiens
ggttagagactcagc

SEQ ID NO: 55672 - DNA, 15 bp, Homo sapiens
tggttagagactcag

SEQ ID NO: 55673 - DNA, 15 bp, Homo sapiens
ctggttagagactca

SEQ ID NO: 55674 - DNA, 15 bp, Homo sapiens
cctggttagagactc

SEQ ID NO: 55675 - DNA, 15 bp, Homo sapiens
tcctggttagagact

SEQ ID NO: 55676 - DNA, 15 bp, Homo sapiens
atcctggttagagac

SEQ ID NO: 55677 - DNA, 15 bp, Homo sapiens
tatcctggttagaga

SEQ ID NO: 55678 - DNA, 15 bp, Homo sapiens
ttatcctggttagag

SEQ ID NO: 55679 - DNA, 15 bp, Homo sapiens
gttatcctggttaga

SEQ ID NO: 55680 - DNA, 15 bp, Homo sapiens
tgttatcctggttag

SEQ ID NO: 55681 - DNA, 15 bp, Homo sapiens
atgttatcctggtta

SEQ ID NO: 55682 - DNA, 15 bp, Homo sapiens
catgttatcctggtt

SEQ ID NO: 55683 - DNA, 15 bp, Homo sapiens
acatgttatcctggt

SEQ ID NO: 55684 - DNA, 15 bp, Homo sapiens
tacatgttatcctgg

SEQ ID NO: 55685 - DNA, 15 bp, Homo sapiens
atacatgttatcctg

SEQ ID NO: 55686 - DNA, 15 bp, Homo sapiens
aatacatgttatcct

SEQ ID NO: 55687 - DNA, 15 bp, Homo sapiens
aaatacatgttatcc

SEQ ID NO: 55688 - DNA, 15 bp, Homo sapiens
aaaatacatgttatc

SEQ ID NO: 55689 - DNA, 15 bp, Homo sapiens
aaaaatacatgttat

SEQ ID NO: 55690 - DNA, 15 bp, Homo sapiens
aaaaaatacatgtta

SEQ ID NO: 55691 - DNA, 15 bp, Homo sapiens
aaaaaaatacatgtt

SEQ ID NO: 55692 - DNA, 15 bp, Homo sapiens
caaaaaaatacatgt

SEQ ID NO: 55693 - DNA, 15 bp, Homo sapiens
tcaaaaaaatacatg

SEQ ID NO: 55694 - DNA, 15 bp, Homo sapiens
gtcaaaaaaatacat

SEQ ID NO: 55695 - DNA, 15 bp, Homo sapiens
agtcaaaaaaataca

SEQ ID NO: 55696 - DNA, 15 bp, Homo sapiens
cagtcaaaaaaatac

SEQ ID NO: 55697 - DNA, 15 bp, Homo sapiens
ccagtcaaaaaaata

SEQ ID NO: 55698 - DNA, 15 bp, Homo sapiens
tccagtcaaaaaaat

SEQ ID NO: 55699 - DNA, 15 bp, Homo sapiens
atccagtcaaaaaaa

SEQ ID NO: 55700 - DNA, 15 bp, Homo sapiens
catccagtcaaaaaa

SEQ ID NO: 55701 - DNA, 15 bp, Homo sapiens
tcatccagtcaaaaa

SEQ ID NO: 55702 - DNA, 15 bp, Homo sapiens
ttcatccagtcaaaa

SEQ ID NO: 55703 - DNA, 15 bp, Homo sapiens
attcatccagtcaaa

SEQ ID NO: 55704 - DNA, 15 bp, Homo sapiens
aattcatccagtcaa

SEQ ID NO: 55705 - DNA, 15 bp, Homo sapiens
taattcatccagtca

SEQ ID NO: 55706 - DNA, 15 bp, Homo sapiens
ataattcatccagtc

SEQ ID NO: 55707 - DNA, 15 bp, Homo sapiens
gataattcatccagt

SEQ ID NO: 55708 - DNA, 15 bp, Homo sapiens
agataattcatccag

SEQ ID NO: 55709 - DNA, 15 bp, Homo sapiens
aagataattcatcca

SEQ ID NO: 55710 - DNA, 15 bp, Homo sapiens
gaagataattcatcc

SEQ ID NO: 55711 - DNA, 15 bp, Homo sapiens
ggaagataattcatc

SEQ ID NO: 55712 - DNA, 15 bp, Homo sapiens
gggaagataattcat

SEQ ID NO: 55713 - DNA, 15 bp, Homo sapiens
tgggaagataattca

SEQ ID NO: 55714 - DNA, 15 bp, Homo sapiens
atgggaagataattc

SEQ ID NO: 55715 - DNA, 15 bp, Homo sapiens
gatgggaagataatt

SEQ ID NO: 55716 - DNA, 15 bp, Homo sapiens
agatgggaagataat

SEQ ID NO: 55717 - DNA, 15 bp, Homo sapiens
gagatgggaagataa

SEQ ID NO: 55718 - DNA, 15 bp, Homo sapiens
agagatgggaagata

SEQ ID NO: 55719 - DNA, 15 bp, Homo sapiens
aagagatgggaagat

SEQ ID NO: 55720 - DNA, 15 bp, Homo sapiens
caagagatgggaaga

SEQ ID NO: 55721 - DNA, 15 bp, Homo sapiens
tcaagagatgggaag

SEQ ID NO: 55722 - DNA, 15 bp, Homo sapiens
gtcaagagatgggaa

SEQ ID NO: 55723 - DNA, 15 bp, Homo sapiens
tgtcaagagatggga

SEQ ID NO: 55724 - DNA, 15 bp, Homo sapiens
atgtcaagagatggg

SEQ ID NO: 55725 - DNA, 15 bp, Homo sapiens
aatgtcaagagatgg

SEQ ID NO: 55726 - DNA, 15 bp, Homo sapiens
aaatgtcaagagatg

SEQ ID NO: 55727 - DNA, 15 bp, Homo sapiens
taaatgtcaagagat

SEQ ID NO: 55728 - DNA, 15 bp, Homo sapiens
gtaaatgtcaagaga

SEQ ID NO: 55729 - DNA, 15 bp, Homo sapiens
tgtaaatgtcaagag

SEQ ID NO: 55730 - DNA, 15 bp, Homo sapiens
ctgtaaatgtcaaga

SEQ ID NO: 55731 - DNA, 15 bp, Homo sapiens
actgtaaatgtcaag

SEQ ID NO: 55732 - DNA, 15 bp, Homo sapiens
tactgtaaatgtcaa

SEQ ID NO: 55733 - DNA, 15 bp, Homo sapiens
ttactgtaaatgtca

SEQ ID NO: 55734 - DNA, 15 bp, Homo sapiens
attactgtaaatgtc

SEQ ID NO: 55735 - DNA, 15 bp, Homo sapiens
aattactgtaaatgt

SEQ ID NO: 55736 - DNA, 15 bp, Homo sapiens
taattactgtaaatg

SEQ ID NO: 55737 - DNA, 15 bp, Homo sapiens
gtaattactgtaaat

SEQ ID NO: 55738 - DNA, 15 bp, Homo sapiens
ggtaattactgtaaa

SEQ ID NO: 55739 - DNA, 15 bp, Homo sapiens
tggtaattactgtaa

SEQ ID NO: 55740 - DNA, 15 bp, Homo sapiens
gtggtaattactgta

SEQ ID NO: 55741 - DNA, 15 bp, Homo sapiens
ggtggtaattactgt

SEQ ID NO: 55742 - DNA, 15 bp, Homo sapiens
tggtggtaattactg

SEQ ID NO: 55743 - DNA, 15 bp, Homo sapiens
ttggtggtaattact

SEQ ID NO: 55744 - DNA, 15 bp, Homo sapiens
cttggtggtaattac

SEQ ID NO: 55745 - DNA, 15 bp, Homo sapiens
acttggtggtaatta

SEQ ID NO: 55746 - DNA, 15 bp, Homo sapiens
tacttggtggtaatt

SEQ ID NO: 55747 - DNA, 15 bp, Homo sapiens
atacttggtggtaat

SEQ ID NO: 55748 - DNA, 15 bp, Homo sapiens
catacttggtggtaa

SEQ ID NO: 55749 - DNA, 15 bp, Homo sapiens
ccatacttggtggta

SEQ ID NO: 55750 - DNA, 15 bp, Homo sapiens
accatacttggtggt

SEQ ID NO: 55751 - DNA, 15 bp, Homo sapiens
taccatacttggtgg

SEQ ID NO: 55752 - DNA, 15 bp, Homo sapiens
ataccatacttggtg

SEQ ID NO: 55753 - DNA, 15 bp, Homo sapiens
aataccatacttggt

SEQ ID NO: 55754 - DNA, 15 bp, Homo sapiens
aaataccatacttgg

SEQ ID NO: 55755 - DNA, 15 bp, Homo sapiens
aaaataccatacttg

SEQ ID NO: 55756 - DNA, 15 bp, Homo sapiens
gaaaataccatactt

SEQ ID NO: 55757 - DNA, 15 bp, Homo sapiens
tgaaaataccatact

SEQ ID NO: 55758 - DNA, 15 bp, Homo sapiens
ctgaaaataccatac

SEQ ID NO: 55759 - DNA, 15 bp, Homo sapiens
actgaaaataccata

SEQ ID NO: 55760 - DNA, 15 bp, Homo sapiens
cactgaaaataccat

SEQ ID NO: 55761 - DNA, 15 bp, Homo sapiens
ccactgaaaatacca

SEQ ID NO: 55762 - DNA, 15 bp, Homo sapiens
gccactgaaaatacc

SEQ ID NO: 55763 - DNA, 15 bp, Homo sapiens
ggccactgaaaatac

SEQ ID NO: 55764 - DNA, 15 bp, Homo sapiens
cggccactgaaaata

SEQ ID NO: 55765 - DNA, 15 bp, Homo sapiens
acggccactgaaaat

SEQ ID NO: 55766 - DNA, 15 bp, Homo sapiens
cacggccactgaaaa

SEQ ID NO: 55767 - DNA, 15 bp, Homo sapiens
tcacggccactgaaa

SEQ ID NO: 55768 - DNA, 15 bp, Homo sapiens
atcacggccactgaa

SEQ ID NO: 55769 - DNA, 15 bp, Homo sapiens
aatcacggccactga

SEQ ID NO: 55770 - DNA, 15 bp, Homo sapiens
taatcacggccactg

SEQ ID NO: 55771 - DNA, 15 bp, Homo sapiens
ataatcacggccact

SEQ ID NO: 55772 - DNA, 15 bp, Homo sapiens
gataatcacggccac

SEQ ID NO: 55773 - DNA, 15 bp, Homo sapiens
tgataatcacggcca

SEQ ID NO: 55774 - DNA, 15 bp, Homo sapiens
ctgataatcacggcc

SEQ ID NO: 55775 - DNA, 15 bp, Homo sapiens
actgataatcacggc

SEQ ID NO: 55776 - DNA, 15 bp, Homo sapiens
aactgataatcacgg

SEQ ID NO: 55777 - DNA, 15 bp, Homo sapiens
taactgataatcacg

SEQ ID NO: 55778 - DNA, 15 bp, Homo sapiens
gtaactgataatcac

SEQ ID NO: 55779 - DNA, 15 bp, Homo sapiens
ggtaactgataatca

SEQ ID NO: 55780 - DNA, 15 bp, Homo sapiens
tggtaactgataatc

SEQ ID NO: 55781 - DNA, 15 bp, Homo sapiens
ttggtaactgataat

SEQ ID NO: 55782 - DNA, 15 bp, Homo sapiens
gttggtaactgataa

SEQ ID NO: 55783 - DNA, 15 bp, Homo sapiens
tgttggtaactgata

SEQ ID NO: 55784 - DNA, 15 bp, Homo sapiens
gtgttggtaactgat

SEQ ID NO: 55785 - DNA, 15 bp, Homo sapiens
tgtgttggtaactga

SEQ ID NO: 55786 - DNA, 15 bp, Homo sapiens
ctgtgttggtaactg

SEQ ID NO: 55787 - DNA, 15 bp, Homo sapiens
tctgtgttggtaact

SEQ ID NO: 55788 - DNA, 15 bp, Homo sapiens
ttctgtgttggtaac

SEQ ID NO: 55789 - DNA, 15 bp, Homo sapiens
attctgtgttggtaa

SEQ ID NO: 55790 - DNA, 15 bp, Homo sapiens
aattctgtgttggta

SEQ ID NO: 55791 - DNA, 15 bp, Homo sapiens
taattctgtgttggt

SEQ ID NO: 55792 - DNA, 15 bp, Homo sapiens
ctaattctgtgttgg

SEQ ID NO: 55793 - DNA, 15 bp, Homo sapiens
cctaattctgtgttg

SEQ ID NO: 55794 - DNA, 15 bp, Homo sapiens
tcctaattctgtgtt

SEQ ID NO: 55795 - DNA, 15 bp, Homo sapiens
atcctaattctgtgt

SEQ ID NO: 55796 - DNA, 15 bp, Homo sapiens
catcctaattctgtg

SEQ ID NO: 55797 - DNA, 15 bp, Homo sapiens
tcatcctaattctgt

SEQ ID NO: 55798 - DNA, 15 bp, Homo sapiens
ttcatcctaattctg

SEQ ID NO: 55799 - DNA, 15 bp, Homo sapiens
cttcatcctaattct

SEQ ID NO: 55800 - DNA, 15 bp, Homo sapiens
ccttcatcctaattc

SEQ ID NO: 55801 - DNA, 15 bp, Homo sapiens
cccttcatcctaatt

SEQ ID NO: 55802 - DNA, 15 bp, Homo sapiens
tcccttcatcctaat

SEQ ID NO: 55803 - DNA, 15 bp, Homo sapiens
ctcccttcatcctaa

SEQ ID NO: 55804 - DNA, 15 bp, Homo sapiens
cctcccttcatccta

SEQ ID NO: 55805 - DNA, 15 bp, Homo sapiens
tcctcccttcatcct

SEQ ID NO: 55806 - DNA, 15 bp, Homo sapiens
ttcctcccttcatcc

SEQ ID NO: 55807 - DNA, 15 bp, Homo sapiens
cttcctcccttcatc

SEQ ID NO: 55808 - DNA, 15 bp, Homo sapiens
ccttcctcccttcat

SEQ ID NO: 55809 - DNA, 15 bp, Homo sapiens
cccttcctcccttca

SEQ ID NO: 55810 - DNA, 15 bp, Homo sapiens
tcccttcctcccttc

SEQ ID NO: 55811 - DNA, 15 bp, Homo sapiens
ctcccttcctccctt

SEQ ID NO: 55812 - DNA, 15 bp, Homo sapiens
cctcccttcctccct

SEQ ID NO: 55813 - DNA, 15 bp, Homo sapiens
ccctcccttcctccc

SEQ ID NO: 55814 - DNA, 15 bp, Homo sapiens
tccctcccttcctcc

SEQ ID NO: 55815 - DNA, 15 bp, Homo sapiens
ttccctcccttcctc

SEQ ID NO: 55816 - DNA, 15 bp, Homo sapiens
cttccctcccttcct

SEQ ID NO: 55817 - DNA, 15 bp, Homo sapiens
ccttccctcccttcc

SEQ ID NO: 55818 - DNA, 15 bp, Homo sapiens
tccttccctcccttc

SEQ ID NO: 55819 - DNA, 15 bp, Homo sapiens
ttccttccctccctt

SEQ ID NO: 55820 - DNA, 15 bp, Homo sapiens
cttccttccctccct

SEQ ID NO: 55821 - DNA, 15 bp, Homo sapiens
ccttccttccctccc

SEQ ID NO: 55822 - DNA, 15 bp, Homo sapiens
accttccttccctcc

SEQ ID NO: 55823 - DNA, 15 bp, Homo sapiens
caccttccttccctc

SEQ ID NO: 55824 - DNA, 15 bp, Homo sapiens
ccaccttccttccct

SEQ ID NO: 55825 - DNA, 15 bp, Homo sapiens
cccaccttccttccc

SEQ ID NO: 55826 - DNA, 15 bp, Homo sapiens
acccaccttccttcc

SEQ ID NO: 55827 - DNA, 15 bp, Homo sapiens
cacccaccttccttc

SEQ ID NO: 55828 - DNA, 15 bp, Homo sapiens
acacccaccttcctt

SEQ ID NO: 55829 - DNA, 15 bp, Homo sapiens
aacacccaccttcct

SEQ ID NO: 55830 - DNA, 15 bp, Homo sapiens
aaacacccaccttcc

SEQ ID NO: 55831 - DNA, 15 bp, Homo sapiens
aaaacacccaccttc

SEQ ID NO: 55832 - DNA, 15 bp, Homo sapiens
aaaaacacccacctt

SEQ ID NO: 55833 - DNA, 15 bp, Homo sapiens
aaaaaacacccacct

SEQ ID NO: 55834 - DNA, 15 bp, Homo sapiens
gaaaaaacacccacc

SEQ ID NO: 55835 - DNA, 15 bp, Homo sapiens
tgaaaaaacacccac

SEQ ID NO: 55836 - DNA, 15 bp, Homo sapiens
gtgaaaaaacaccca

SEQ ID NO: 55837 - DNA, 15 bp, Homo sapiens
tgtgaaaaaacaccc

SEQ ID NO: 55838 - DNA, 15 bp, Homo sapiens
gtgtgaaaaaacacc

SEQ ID NO: 55839 - DNA, 15 bp, Homo sapiens
tgtgtgaaaaaacac

SEQ ID NO: 55840 - DNA, 15 bp, Homo sapiens
ctgtgtgaaaaaaca

SEQ ID NO: 55841 - DNA, 15 bp, Homo sapiens
actgtgtgaaaaaac

SEQ ID NO: 55842 - DNA, 15 bp, Homo sapiens
cactgtgtgaaaaaa

SEQ ID NO: 55843 - DNA, 15 bp, Homo sapiens
acactgtgtgaaaaa

SEQ ID NO: 55844 - DNA, 15 bp, Homo sapiens
gacactgtgtgaaaa

SEQ ID NO: 55845 - DNA, 15 bp, Homo sapiens
agacactgtgtgaaa

SEQ ID NO: 55846 - DNA, 15 bp, Homo sapiens
aagacactgtgtgaa

SEQ ID NO: 55847 - DNA, 15 bp, Homo sapiens
taagacactgtgtga

SEQ ID NO: 55848 - DNA, 15 bp, Homo sapiens
ctaagacactgtgtg

SEQ ID NO: 55849 - DNA, 15 bp, Homo sapiens
gctaagacactgtgt

SEQ ID NO: 55850 - DNA, 15 bp, Homo sapiens
ggctaagacactgtg

SEQ ID NO: 55851 - DNA, 15 bp, Homo sapiens
tggctaagacactgt

SEQ ID NO: 55852 - DNA, 15 bp, Homo sapiens
ctggctaagacactg

SEQ ID NO: 55853 - DNA, 15 bp, Homo sapiens
gctggctaagacact

SEQ ID NO: 55854 - DNA, 15 bp, Homo sapiens
tgctggctaagacac

SEQ ID NO: 55855 - DNA, 15 bp, Homo sapiens
ttgctggctaagaca

SEQ ID NO: 55856 - DNA, 15 bp, Homo sapiens
attgctggctaagac

SEQ ID NO: 55857 - DNA, 15 bp, Homo sapiens
aattgctggctaaga

SEQ ID NO: 55858 - DNA, 15 bp, Homo sapiens
aaattgctggctaag

SEQ ID NO: 55859 - DNA, 15 bp, Homo sapiens
taaattgctggctaa

SEQ ID NO: 55860 - DNA, 15 bp, Homo sapiens
ctaaattgctggcta

SEQ ID NO: 55861 - DNA, 15 bp, Homo sapiens
gctaaattgctggct

SEQ ID NO: 55862 - DNA, 15 bp, Homo sapiens
tgctaaattgctggc

SEQ ID NO: 55863 - DNA, 15 bp, Homo sapiens
ttgctaaattgctgg

SEQ ID NO: 55864 - DNA, 15 bp, Homo sapiens
tttgctaaattgctg

SEQ ID NO: 55865 - DNA, 15 bp, Homo sapiens
atttgctaaattgct

SEQ ID NO: 55866 - DNA, 15 bp, Homo sapiens
aatttgctaaattgc

SEQ ID NO: 55867 - DNA, 15 bp, Homo sapiens
taatttgctaaattg

SEQ ID NO: 55868 - DNA, 15 bp, Homo sapiens
ttaatttgctaaatt

SEQ ID NO: 55869 - DNA, 15 bp, Homo sapiens
attaatttgctaaat

SEQ ID NO: 55870 - DNA, 15 bp, Homo sapiens
cattaatttgctaaa

SEQ ID NO: 55871 - DNA, 15 bp, Homo sapiens
ccattaatttgctaa

SEQ ID NO: 55872 - DNA, 15 bp, Homo sapiens
tccattaatttgcta

SEQ ID NO: 55873 - DNA, 15 bp, Homo sapiens
ttccattaatttgct

SEQ ID NO: 55874 - DNA, 15 bp, Homo sapiens
tttccattaatttgc

SEQ ID NO: 55875 - DNA, 15 bp, Homo sapiens
atttccattaatttg

SEQ ID NO: 55876 - DNA, 15 bp, Homo sapiens
aatttccattaattt

SEQ ID NO: 55877 - DNA, 15 bp, Homo sapiens
taatttccattaatt

SEQ ID NO: 55878 - DNA, 15 bp, Homo sapiens
ctaatttccattaat

SEQ ID NO: 55879 - DNA, 15 bp, Homo sapiens
tctaatttccattaa

SEQ ID NO: 55880 - DNA, 15 bp, Homo sapiens
atctaatttccatta

SEQ ID NO: 55881 - DNA, 15 bp, Homo sapiens
gatctaatttccatt

SEQ ID NO: 55882 - DNA, 15 bp, Homo sapiens
agatctaatttccat

SEQ ID NO: 55883 - DNA, 15 bp, Homo sapiens
aagatctaatttcca

SEQ ID NO: 55884 - DNA, 15 bp, Homo sapiens
aaagatctaatttcc

SEQ ID NO: 55885 - DNA, 15 bp, Homo sapiens
caaagatctaatttc

SEQ ID NO: 55886 - DNA, 15 bp, Homo sapiens
tcaaagatctaattt

SEQ ID NO: 55887 - DNA, 15 bp, Homo sapiens
atcaaagatctaatt

SEQ ID NO: 55888 - DNA, 15 bp, Homo sapiens
aatcaaagatctaat

SEQ ID NO: 55889 - DNA, 15 bp, Homo sapiens
aaatcaaagatctaa

SEQ ID NO: 55890 - DNA, 15 bp, Homo sapiens
aaaatcaaagatcta

SEQ ID NO: 55891 - DNA, 15 bp, Homo sapiens
aaaaatcaaagatct

SEQ ID NO: 55892 - DNA, 15 bp, Homo sapiens
aaaaaatcaaagatc

SEQ ID NO: 55893 - DNA, 15 bp, Homo sapiens
aaaaaaatcaaagat

SEQ ID NO: 55894 - DNA, 15 bp, Homo sapiens
aaaaaaaatcaaaga

SEQ ID NO: 55895 - DNA, 15 bp, Homo sapiens
aaaaaaaaatcaaag

SEQ ID NO: 55896 - DNA, 15 bp, Homo sapiens
gaaaaaaaaatcaaa

SEQ ID NO: 55897 - DNA, 15 bp, Homo sapiens
agaaaaaaaaatcaa

SEQ ID NO: 55898 - DNA, 15 bp, Homo sapiens
aagaaaaaaaaatca

SEQ ID NO: 55899 - DNA, 15 bp, Homo sapiens
ttgaaagaaaaaaaa

SEQ ID NO: 55900 - DNA, 15 bp, Homo sapiens
cttgaaagaaaaaaa

SEQ ID NO: 55901 - DNA, 15 bp, Homo sapiens
gcttgaaagaaaaaa

SEQ ID NO: 55902 - DNA, 15 bp, Homo sapiens
tgcttgaaagaaaaa

SEQ ID NO: 55903 - DNA, 15 bp, Homo sapiens
atgcttgaaagaaaa

SEQ ID NO: 55904 - DNA, 15 bp, Homo sapiens
aatgcttgaaagaaa

SEQ ID NO: 55905 - DNA, 15 bp, Homo sapiens
aaatgcttgaaagaa

SEQ ID NO: 55906 - DNA, 15 bp, Homo sapiens
aaaatgcttgaaaga

SEQ ID NO: 55907 - DNA, 15 bp, Homo sapiens
taaaatgcttgaaag

SEQ ID NO: 55908 - DNA, 15 bp, Homo sapiens
ataaaatgcttgaaa

SEQ ID NO: 55909 - DNA, 15 bp, Homo sapiens
aataaaatgcttgaa

SEQ ID NO: 55910 - DNA, 15 bp, Homo sapiens
aaataaaatgcttga

SEQ ID NO: 55911 - DNA, 15 bp, Homo sapiens
caaataaaatgcttg

SEQ ID NO: 55912 - DNA, 15 bp, Homo sapiens
tcaaataaaatgctt

SEQ ID NO: 55913 - DNA, 15 bp, Homo sapiens
ctcaaataaaatgct

SEQ ID NO: 55914 - DNA, 15 bp, Homo sapiens
tctcaaataaaatgc

SEQ ID NO: 55915 - DNA, 15 bp, Homo sapiens
ctctcaaataaaatg

SEQ ID NO: 55916 - DNA, 15 bp, Homo sapiens
tctctcaaataaaat

SEQ ID NO: 55917 - DNA, 15 bp, Homo sapiens
gtctctcaaataaaa

SEQ ID NO: 55918 - DNA, 15 bp, Homo sapiens
agtctctcaaataaa

SEQ ID NO: 55919 - DNA, 15 bp, Homo sapiens
tagtctctcaaataa

SEQ ID NO: 55920 - DNA, 15 bp, Homo sapiens
atagtctctcaaata

SEQ ID NO: 55921 - DNA, 15 bp, Homo sapiens
gatagtctctcaaat

SEQ ID NO: 55922 - DNA, 15 bp, Homo sapiens
tgatagtctctcaaa

SEQ ID NO: 55923 - DNA, 15 bp, Homo sapiens
ttgatagtctctcaa

SEQ ID NO: 55924 - DNA, 15 bp, Homo sapiens
tttgatagtctctca

SEQ ID NO: 55925 - DNA, 15 bp, Homo sapiens
gtttgatagtctctc

SEQ ID NO: 55926 - DNA, 15 bp, Homo sapiens
ggtttgatagtctct

SEQ ID NO: 55927 - DNA, 15 bp, Homo sapiens
aggtttgatagtctc

SEQ ID NO: 55928 - DNA, 15 bp, Homo sapiens
aaggtttgatagtct

SEQ ID NO: 55929 - DNA, 15 bp, Homo sapiens
taaggtttgatagtc

SEQ ID NO: 55930 - DNA, 15 bp, Homo sapiens
ataaggtttgatagt

SEQ ID NO: 55931 - DNA, 15 bp, Homo sapiens
tataaggtttgatag

SEQ ID NO: 55932 - DNA, 15 bp, Homo sapiens
gtataaggtttgata

SEQ ID NO: 55933 - DNA, 15 bp, Homo sapiens
ggtataaggtttgat

SEQ ID NO: 55934 - DNA, 15 bp, Homo sapiens
tggtataaggtttga

SEQ ID NO: 55935 - DNA, 15 bp, Homo sapiens
ttggtataaggtttg

SEQ ID NO: 55936 - DNA, 15 bp, Homo sapiens
cttggtataaggttt

SEQ ID NO: 55937 - DNA, 15 bp, Homo sapiens
acttggtataaggtt

SEQ ID NO: 55938 - DNA, 15 bp, Homo sapiens
cacttggtataaggt

SEQ ID NO: 55939 - DNA, 15 bp, Homo sapiens
ccacttggtataagg

SEQ ID NO: 55940 - DNA, 15 bp, Homo sapiens
gccacttggtataag

SEQ ID NO: 55941 - DNA, 15 bp, Homo sapiens
ggccacttggtataa

SEQ ID NO: 55942 - DNA, 15 bp, Homo sapiens
aggccacttggtata

SEQ ID NO: 55943 - DNA, 15 bp, Homo sapiens
aaggccacttggtat

SEQ ID NO: 55944 - DNA, 15 bp, Homo sapiens
taaggccacttggta

SEQ ID NO: 55945 - DNA, 15 bp, Homo sapiens
ataaggccacttggt

SEQ ID NO: 55946 - DNA, 15 bp, Homo sapiens
cataaggccacttgg

SEQ ID NO: 55947 - DNA, 15 bp, Homo sapiens
ccataaggccacttg

SEQ ID NO: 55948 - DNA, 15 bp, Homo sapiens
tccataaggccactt

SEQ ID NO: 55949 - DNA, 15 bp, Homo sapiens
ctccataaggccact

SEQ ID NO: 55950 - DNA, 15 bp, Homo sapiens
tctccataaggccac

SEQ ID NO: 55951 - DNA, 15 bp, Homo sapiens
gtctccataaggcca

SEQ ID NO: 55952 - DNA, 15 bp, Homo sapiens
agtctccataaggcc

SEQ ID NO: 55953 - DNA, 15 bp, Homo sapiens
cagtctccataaggc

SEQ ID NO: 55954 - DNA, 15 bp, Homo sapiens
tcagtctccataagg

SEQ ID NO: 55955 - DNA, 15 bp, Homo sapiens
atcagtctccataag

SEQ ID NO: 55956 - DNA, 15 bp, Homo sapiens
tatcagtctccataa

SEQ ID NO: 55957 - DNA, 15 bp, Homo sapiens
ttatcagtctccata

SEQ ID NO: 55958 - DNA, 15 bp, Homo sapiens
gttatcagtctccat

SEQ ID NO: 55959 - DNA, 15 bp, Homo sapiens
ggttatcagtctcca

SEQ ID NO: 55960 - DNA, 15 bp, Homo sapiens
tggttatcagtctcc

SEQ ID NO: 55961 - DNA, 15 bp, Homo sapiens
ctggttatcagtctc

SEQ ID NO: 55962 - DNA, 15 bp, Homo sapiens
tctggttatcagtct

SEQ ID NO: 55963 - DNA, 15 bp, Homo sapiens
ctctggttatcagtc

SEQ ID NO: 55964 - DNA, 15 bp, Homo sapiens
actctggttatcagt

SEQ ID NO: 55965 - DNA, 15 bp, Homo sapiens
tactctggttatcag

SEQ ID NO: 55966 - DNA, 15 bp, Homo sapiens
gtactctggttatca

SEQ ID NO: 55967 - DNA, 15 bp, Homo sapiens
tgtactctggttatc

SEQ ID NO: 55968 - DNA, 15 bp, Homo sapiens
atgtactctggttat

SEQ ID NO: 55969 - DNA, 15 bp, Homo sapiens
catgtactctggtta

SEQ ID NO: 55970 - DNA, 15 bp, Homo sapiens
ccatgtactctggtt

SEQ ID NO: 55971 - DNA, 15 bp, Homo sapiens
gccatgtactctggt

SEQ ID NO: 55972 - DNA, 15 bp, Homo sapiens
tgccatgtactctgg

SEQ ID NO: 55973 - DNA, 15 bp, Homo sapiens
atgccatgtactctg

SEQ ID NO: 55974 - DNA, 15 bp, Homo sapiens
tatgccatgtactct

SEQ ID NO: 55975 - DNA, 15 bp, Homo sapiens
atatgccatgtactc

SEQ ID NO: 55976 - DNA, 15 bp, Homo sapiens
gatatgccatgtact

SEQ ID NO: 55977 - DNA, 15 bp, Homo sapiens
tgatatgccatgtac

SEQ ID NO: 55978 - DNA, 15 bp, Homo sapiens
ctgatatgccatgta

SEQ ID NO: 55979 - DNA, 15 bp, Homo sapiens
actgatatgccatgt

SEQ ID NO: 55980 - DNA, 15 bp, Homo sapiens
cactgatatgccatg

SEQ ID NO: 55981 - DNA, 15 bp, Homo sapiens
ccactgatatgccat

SEQ ID NO: 55982 - DNA, 15 bp, Homo sapiens
gccactgatatgcca

SEQ ID NO: 55983 - DNA, 15 bp, Homo sapiens
tgccactgatatgcc

SEQ ID NO: 55984 - DNA, 15 bp, Homo sapiens
ttgccactgatatgc

SEQ ID NO: 55985 - DNA, 15 bp, Homo sapiens
tttgccactgatatg

SEQ ID NO: 55986 - DNA, 15 bp, Homo sapiens
atttgccactgatat

SEQ ID NO: 55987 - DNA, 15 bp, Homo sapiens
aatttgccactgata

SEQ ID NO: 55988 - DNA, 15 bp, Homo sapiens
caatttgccactgat

SEQ ID NO: 55989 - DNA, 15 bp, Homo sapiens
tcaatttgccactga

SEQ ID NO: 55990 - DNA, 15 bp, Homo sapiens
gtcaatttgccactg

SEQ ID NO: 55991 - DNA, 15 bp, Homo sapiens
agtcaatttgccact

SEQ ID NO: 55992 - DNA, 15 bp, Homo sapiens
aagtcaatttgccac

SEQ ID NO: 55993 - DNA, 15 bp, Homo sapiens
taagtcaatttgcca

SEQ ID NO: 55994 - DNA, 15 bp, Homo sapiens
ttaagtcaatttgcc

SEQ ID NO: 55995 - DNA, 15 bp, Homo sapiens
tttaagtcaatttgc

SEQ ID NO: 55996 - DNA, 15 bp, Homo sapiens
ttttaagtcaatttg

SEQ ID NO: 55997 - DNA, 15 bp, Homo sapiens
attttaagtcaattt

SEQ ID NO: 55998 - DNA, 15 bp, Homo sapiens
gattttaagtcaatt

SEQ ID NO: 55999 - DNA, 15 bp, Homo sapiens
ggattttaagtcaat

SEQ ID NO: 56000 - DNA, 15 bp, Homo sapiens
tggattttaagtcaa

SEQ ID NO: 56001 - DNA, 15 bp, Homo sapiens
atggattttaagtca

SEQ ID NO: 56002 - DNA, 15 bp, Homo sapiens
tatggattttaagtc

SEQ ID NO: 56003 - DNA, 15 bp, Homo sapiens
gtatggattttaagt

SEQ ID NO: 56004 - DNA, 15 bp, Homo sapiens
ggtatggattttaag

SEQ ID NO: 56005 - DNA, 15 bp, Homo sapiens
gggtatggattttaa

SEQ ID NO: 56006 - DNA, 15 bp, Homo sapiens
ggggtatggatttta

SEQ ID NO: 56007 - DNA, 15 bp, Homo sapiens
aggggtatggatttt

SEQ ID NO: 56008 - DNA, 15 bp, Homo sapiens
taggggtatggattt

SEQ ID NO: 56009 - DNA, 15 bp, Homo sapiens
gtaggggtatggatt

SEQ ID NO: 56010 - DNA, 15 bp, Homo sapiens
agtaggggtatggat

SEQ ID NO: 56011 - DNA, 15 bp, Homo sapiens
tagtaggggtatgga

SEQ ID NO: 56012 - DNA, 15 bp, Homo sapiens
atagtaggggtatgg

SEQ ID NO: 56013 - DNA, 15 bp, Homo sapiens
aatagtaggggtatg

SEQ ID NO: 56014 - DNA, 15 bp, Homo sapiens
aaatagtaggggtat

SEQ ID NO: 56015 - DNA, 15 bp, Homo sapiens
aaaatagtaggggta

SEQ ID NO: 56016 - DNA, 15 bp, Homo sapiens
taaaatagtaggggt

SEQ ID NO: 56017 - DNA, 15 bp, Homo sapiens
ttaaaatagtagggg

SEQ ID NO: 56018 - DNA, 15 bp, Homo sapiens
cttaaaatagtaggg

SEQ ID NO: 56019 - DNA, 15 bp, Homo sapiens
tcttaaaatagtagg

SEQ ID NO: 56020 - DNA, 15 bp, Homo sapiens
gtcttaaaatagtag

SEQ ID NO: 56021 - DNA, 15 bp, Homo sapiens
ggtcttaaaatagta

SEQ ID NO: 56022 - DNA, 15 bp, Homo sapiens
tggtcttaaaatagt

SEQ ID NO: 56023 - DNA, 15 bp, Homo sapiens
atggtcttaaaatag

SEQ ID NO: 56024 - DNA, 15 bp, Homo sapiens
aatggtcttaaaata

SEQ ID NO: 56025 - DNA, 15 bp, Homo sapiens
caatggtcttaaaat

SEQ ID NO: 56026 - DNA, 15 bp, Homo sapiens
acaatggtcttaaaa

SEQ ID NO: 56027 - DNA, 15 bp, Homo sapiens
gacaatggtcttaaa

SEQ ID NO: 56028 - DNA, 15 bp, Homo sapiens
ggacaatggtcttaa

SEQ ID NO: 56029 - DNA, 15 bp, Homo sapiens
aggacaatggtctta

SEQ ID NO: 56030 - DNA, 15 bp, Homo sapiens
aaggacaatggtctt

SEQ ID NO: 56031 - DNA, 15 bp, Homo sapiens
aaaggacaatggtct

SEQ ID NO: 56032 - DNA, 15 bp, Homo sapiens
caaaggacaatggtc

SEQ ID NO: 56033 - DNA, 15 bp, Homo sapiens
ccaaaggacaatggt

SEQ ID NO: 56034 - DNA, 15 bp, Homo sapiens
tccaaaggacaatgg

SEQ ID NO: 56035 - DNA, 15 bp, Homo sapiens
ctccaaaggacaatg

SEQ ID NO: 56036 - DNA, 15 bp, Homo sapiens
gctccaaaggacaat

SEQ ID NO: 56037 - DNA, 15 bp, Homo sapiens
tgctccaaaggacaa

SEQ ID NO: 56038 - DNA, 15 bp, Homo sapiens
ctgctccaaaggaca

SEQ ID NO: 56039 - DNA, 15 bp, Homo sapiens
tctgctccaaaggac

SEQ ID NO: 56040 - DNA, 15 bp, Homo sapiens
ctctgctccaaagga

SEQ ID NO: 56041 - DNA, 15 bp, Homo sapiens
tctctgctccaaagg

SEQ ID NO: 56042 - DNA, 15 bp, Homo sapiens
ctctctgctccaaag

SEQ ID NO: 56043 - DNA, 15 bp, Homo sapiens
tctctctgctccaaa

SEQ ID NO: 56044 - DNA, 15 bp, Homo sapiens
gtctctctgctccaa

SEQ ID NO: 56045 - DNA, 15 bp, Homo sapiens
tgtctctctgctcca

SEQ ID NO: 56046 - DNA, 15 bp, Homo sapiens
ctgtctctctgctcc

SEQ ID NO: 56047 - DNA, 15 bp, Homo sapiens
tctgtctctctgctc

SEQ ID NO: 56048 - DNA, 15 bp, Homo sapiens
gtctgtctctctgct

SEQ ID NO: 56049 - DNA, 15 bp, Homo sapiens
agtctgtctctctgc

SEQ ID NO: 56050 - DNA, 15 bp, Homo sapiens
gagtctgtctctctg

SEQ ID NO: 56051 - DNA, 15 bp, Homo sapiens
agagtctgtctctct

SEQ ID NO: 56052 - DNA, 15 bp, Homo sapiens
gagagtctgtctctc

SEQ ID NO: 56053 - DNA, 15 bp, Homo sapiens
ggagagtctgtctct

SEQ ID NO: 56054 - DNA, 15 bp, Homo sapiens
gggagagtctgtctc

SEQ ID NO: 56055 - DNA, 15 bp, Homo sapiens
tgggagagtctgtct

SEQ ID NO: 56056 - DNA, 15 bp, Homo sapiens
atgggagagtctgtc

SEQ ID NO: 56057 - DNA, 15 bp, Homo sapiens
aatgggagagtctgt

SEQ ID NO: 56058 - DNA, 15 bp, Homo sapiens
caatgggagagtctg

SEQ ID NO: 56059 - DNA, 15 bp, Homo sapiens
tcaatgggagagtct

SEQ ID NO: 56060 - DNA, 15 bp, Homo sapiens
ctcaatgggagagtc

SEQ ID NO: 56061 - DNA, 15 bp, Homo sapiens
tctcaatgggagagt

SEQ ID NO: 56062 - DNA, 15 bp, Homo sapiens
ctctcaatgggagag

SEQ ID NO: 56063 - DNA, 15 bp, Homo sapiens
cctctcaatgggaga

SEQ ID NO: 56064 - DNA, 15 bp, Homo sapiens
acctctcaatgggag

SEQ ID NO: 56065 - DNA, 15 bp, Homo sapiens
gacctctcaatggga

SEQ ID NO: 56066 - DNA, 15 bp, Homo sapiens
agacctctcaatggg

SEQ ID NO: 56067 - DNA, 15 bp, Homo sapiens
aagacctctcaatgg

SEQ ID NO: 56068 - DNA, 15 bp, Homo sapiens
caagacctctcaatg

SEQ ID NO: 56069 - DNA, 15 bp, Homo sapiens
gcaagacctctcaat

SEQ ID NO: 56070 - DNA, 15 bp, Homo sapiens
agcaagacctctcaa

SEQ ID NO: 56071 - DNA, 15 bp, Homo sapiens
tagcaagacctctca

SEQ ID NO: 56072 - DNA, 15 bp, Homo sapiens
atagcaagacctctc

SEQ ID NO: 56073 - DNA, 15 bp, Homo sapiens
tatagcaagacctct

SEQ ID NO: 56074 - DNA, 15 bp, Homo sapiens
ttatagcaagacctc

SEQ ID NO: 56075 - DNA, 15 bp, Homo sapiens
cttatagcaagacct

SEQ ID NO: 56076 - DNA, 15 bp, Homo sapiens
gcttatagcaagacc

SEQ ID NO: 56077 - DNA, 15 bp, Homo sapiens
ggcttatagcaagac

SEQ ID NO: 56078 - DNA, 15 bp, Homo sapiens
aggcttatagcaaga

SEQ ID NO: 56079 - DNA, 15 bp, Homo sapiens
aaggcttatagcaag

SEQ ID NO: 56080 - DNA, 15 bp, Homo sapiens
gaaggcttatagcaa

SEQ ID NO: 56081 - DNA, 15 bp, Homo sapiens
tgaaggcttatagca

SEQ ID NO: 56082 - DNA, 15 bp, Homo sapiens
atgaaggcttatagc

SEQ ID NO: 56083 - DNA, 15 bp, Homo sapiens
gatgaaggcttatag

SEQ ID NO: 56084 - DNA, 15 bp, Homo sapiens
ggatgaaggcttata

SEQ ID NO: 56085 - DNA, 15 bp, Homo sapiens
cggatgaaggcttat

SEQ ID NO: 56086 - DNA, 15 bp, Homo sapiens
ccggatgaaggctta

SEQ ID NO: 56087 - DNA, 15 bp, Homo sapiens
tccggatgaaggctt

SEQ ID NO: 56088 - DNA, 15 bp, Homo sapiens
ctccggatgaaggct

SEQ ID NO: 56089 - DNA, 15 bp, Homo sapiens
tctccggatgaaggc

SEQ ID NO: 56090 - DNA, 15 bp, Homo sapiens
ctctccggatgaagg

SEQ ID NO: 56091 - DNA, 15 bp, Homo sapiens
actctccggatgaag

SEQ ID NO: 56092 - DNA, 15 bp, Homo sapiens
cactctccggatgaa

SEQ ID NO: 56093 - DNA, 15 bp, Homo sapiens
acactctccggatga

SEQ ID NO: 56094 - DNA, 15 bp, Homo sapiens
tacactctccggatg

SEQ ID NO: 56095 - DNA, 15 bp, Homo sapiens
ctacactctccggat

SEQ ID NO: 56096 - DNA, 15 bp, Homo sapiens
cctacactctccgga

SEQ ID NO: 56097 - DNA, 15 bp, Homo sapiens
ccctacactctccgg

SEQ ID NO: 56098 - DNA, 15 bp, Homo sapiens
accctacactctccg

SEQ ID NO: 56099 - DNA, 15 bp, Homo sapiens
taccctacactctcc

SEQ ID NO: 56100 - DNA, 15 bp, Homo sapiens
ctaccctacactctc

SEQ ID NO: 56101 - DNA, 15 bp, Homo sapiens
tctaccctacactct

SEQ ID NO: 56102 - DNA, 15 bp, Homo sapiens
ctctaccctacactc

SEQ ID NO: 56103 - DNA, 15 bp, Homo sapiens
cctctaccctacact

SEQ ID NO: 56104 - DNA, 15 bp, Homo sapiens
ccctctaccctacac

SEQ ID NO: 56105 - DNA, 15 bp, Homo sapiens
gccctctaccctaca

SEQ ID NO: 56106 - DNA, 15 bp, Homo sapiens
ggccctctaccctac

SEQ ID NO: 56107 - DNA, 15 bp, Homo sapiens
aggccctctacccta

SEQ ID NO: 56108 - DNA, 15 bp, Homo sapiens
caggccctctaccct

SEQ ID NO: 56109 - DNA, 15 bp, Homo sapiens
ccaggccctctaccc

SEQ ID NO: 56110 - DNA, 15 bp, Homo sapiens
cccaggccctctacc

SEQ ID NO: 56111 - DNA, 15 bp, Homo sapiens
acccaggccctctac

SEQ ID NO: 56112 - DNA, 15 bp, Homo sapiens
aacccaggccctcta

SEQ ID NO: 56113 - DNA, 15 bp, Homo sapiens
taacccaggccctct

SEQ ID NO: 56114 - DNA, 15 bp, Homo sapiens
ttaacccaggccctc

SEQ ID NO: 56115 - DNA, 15 bp, Homo sapiens
cttaacccaggccct

SEQ ID NO: 56116 - DNA, 15 bp, Homo sapiens
acttaacccaggccc

SEQ ID NO: 56117 - DNA, 15 bp, Homo sapiens
tacttaacccaggcc

SEQ ID NO: 56118 - DNA, 15 bp, Homo sapiens
atacttaacccaggc

SEQ ID NO: 56119 - DNA, 15 bp, Homo sapiens
catacttaacccagg

SEQ ID NO: 56120 - DNA, 15 bp, Homo sapiens
gcatacttaacccag

SEQ ID NO: 56121 - DNA, 15 bp, Homo sapiens
tgcatacttaaccca

SEQ ID NO: 56122 - DNA, 15 bp, Homo sapiens
ctgcatacttaaccc

SEQ ID NO: 56123 - DNA, 15 bp, Homo sapiens
tctgcatacttaacc

SEQ ID NO: 56124 - DNA, 15 bp, Homo sapiens
atctgcatacttaac

SEQ ID NO: 56125 - DNA, 15 bp, Homo sapiens
aatctgcatacttaa

SEQ ID NO: 56126 - DNA, 15 bp, Homo sapiens
taatctgcatactta

SEQ ID NO: 56127 - DNA, 15 bp, Homo sapiens
gtaatctgcatactt

SEQ ID NO: 56128 - DNA, 15 bp, Homo sapiens
agtaatctgcatact

SEQ ID NO: 56129 - DNA, 15 bp, Homo sapiens
cagtaatctgcatac

SEQ ID NO: 56130 - DNA, 15 bp, Homo sapiens
gcagtaatctgcata

SEQ ID NO: 56131 - DNA, 15 bp, Homo sapiens
tgcagtaatctgcat

SEQ ID NO: 56132 - DNA, 15 bp, Homo sapiens
ctgcagtaatctgca

SEQ ID NO: 56133 - DNA, 15 bp, Homo sapiens
actgcagtaatctgc

SEQ ID NO: 56134 - DNA, 15 bp, Homo sapiens
cactgcagtaatctg

SEQ ID NO: 56135 - DNA, 15 bp, Homo sapiens
tcactgcagtaatct

SEQ ID NO: 56136 - DNA, 15 bp, Homo sapiens
atcactgcagtaatc

SEQ ID NO: 56137 - DNA, 15 bp, Homo sapiens
aatcactgcagtaat

SEQ ID NO: 56138 - DNA, 15 bp, Homo sapiens
aaatcactgcagtaa

SEQ ID NO: 56139 - DNA, 15 bp, Homo sapiens
aaaatcactgcagta

SEQ ID NO: 56140 - DNA, 15 bp, Homo sapiens
taaaatcactgcagt

SEQ ID NO: 56141 - DNA, 15 bp, Homo sapiens
gtaaaatcactgcag

SEQ ID NO: 56142 - DNA, 15 bp, Homo sapiens
tgtaaaatcactgca

SEQ ID NO: 56143 - DNA, 15 bp, Homo sapiens
atgtaaaatcactgc

SEQ ID NO: 56144 - DNA, 15 bp, Homo sapiens
gatgtaaaatcactg

SEQ ID NO: 56145 - DNA, 15 bp, Homo sapiens
agatgtaaaatcact

SEQ ID NO: 56146 - DNA, 15 bp, Homo sapiens
tagatgtaaaatcac

SEQ ID NO: 56147 - DNA, 15 bp, Homo sapiens
ttagatgtaaaatca

SEQ ID NO: 56148 - DNA, 15 bp, Homo sapiens
tttagatgtaaaatc

SEQ ID NO: 56149 - DNA, 15 bp, Homo sapiens
atttagatgtaaaat

SEQ ID NO: 56150 - DNA, 15 bp, Homo sapiens
catttagatgtaaaa

SEQ ID NO: 56151 - DNA, 15 bp, Homo sapiens
acatttagatgtaaa

SEQ ID NO: 56152 - DNA, 15 bp, Homo sapiens
gacatttagatgtaa

SEQ ID NO: 56153 - DNA, 15 bp, Homo sapiens
ggacatttagatgta

SEQ ID NO: 56154 - DNA, 15 bp, Homo sapiens
tggacatttagatgt

SEQ ID NO: 56155 - DNA, 15 bp, Homo sapiens
atggacatttagatg

SEQ ID NO: 56156 - DNA, 15 bp, Homo sapiens
aatggacatttagat

SEQ ID NO: 56157 - DNA, 15 bp, Homo sapiens
aaatggacatttaga

SEQ ID NO: 56158 - DNA, 15 bp, Homo sapiens
aaaatggacatttag

SEQ ID NO: 56159 - DNA, 15 bp, Homo sapiens
taaaatggacattta

SEQ ID NO: 56160 - DNA, 15 bp, Homo sapiens
ctaaaatggacattt

SEQ ID NO: 56161 - DNA, 15 bp, Homo sapiens
tctaaaatggacatt

SEQ ID NO: 56162 - DNA, 15 bp, Homo sapiens
atctaaaatggacat

SEQ ID NO: 56163 - DNA, 15 bp, Homo sapiens
gatctaaaatggaca

SEQ ID NO: 56164 - DNA, 15 bp, Homo sapiens
tgatctaaaatggac

SEQ ID NO: 56165 - DNA, 15 bp, Homo sapiens
ttgatctaaaatgga

SEQ ID NO: 56166 - DNA, 15 bp, Homo sapiens
gttgatctaaaatgg

SEQ ID NO: 56167 - DNA, 15 bp, Homo sapiens
agttgatctaaaatg

SEQ ID NO: 56168 - DNA, 15 bp, Homo sapiens
cagttgatctaaaat

SEQ ID NO: 56169 - DNA, 15 bp, Homo sapiens
ccagttgatctaaaa

SEQ ID NO: 56170 - DNA, 15 bp, Homo sapiens
tccagttgatctaaa

SEQ ID NO: 56171 - DNA, 15 bp, Homo sapiens
ttccagttgatctaa

SEQ ID NO: 56172 - DNA, 15 bp, Homo sapiens
attccagttgatcta

SEQ ID NO: 56173 - DNA, 15 bp, Homo sapiens
cattccagttgatct

SEQ ID NO: 56174 - DNA, 15 bp, Homo sapiens
ccattccagttgatc

SEQ ID NO: 56175 - DNA, 15 bp, Homo sapiens
tccattccagttgat

SEQ ID NO: 56176 - DNA, 15 bp, Homo sapiens
atccattccagttga

SEQ ID NO: 56177 - DNA, 15 bp, Homo sapiens
catccattccagttg

SEQ ID NO: 56178 - DNA, 15 bp, Homo sapiens
ccatccattccagtt

SEQ ID NO: 56179 - DNA, 15 bp, Homo sapiens
accatccattccagt

SEQ ID NO: 56180 - DNA, 15 bp, Homo sapiens
taccatccattccag

SEQ ID NO: 56181 - DNA, 15 bp, Homo sapiens
gtaccatccattcca

SEQ ID NO: 56182 - DNA, 15 bp, Homo sapiens
tgtaccatccattcc

SEQ ID NO: 56183 - DNA, 15 bp, Homo sapiens
ctgtaccatccattc

SEQ ID NO: 56184 - DNA, 15 bp, Homo sapiens
gctgtaccatccatt

SEQ ID NO: 56185 - DNA, 15 bp, Homo sapiens
agctgtaccatccat

SEQ ID NO: 56186 - DNA, 15 bp, Homo sapiens
cagctgtaccatcca

SEQ ID NO: 56187 - DNA, 15 bp, Homo sapiens
acagctgtaccatcc

SEQ ID NO: 56188 - DNA, 15 bp, Homo sapiens
cacagctgtaccatc

SEQ ID NO: 56189 - DNA, 15 bp, Homo sapiens
acacagctgtaccat

SEQ ID NO: 56190 - DNA, 15 bp, Homo sapiens
cacacagctgtacca

SEQ ID NO: 56191 - DNA, 15 bp, Homo sapiens
ccacacagctgtacc

SEQ ID NO: 56192 - DNA, 15 bp, Homo sapiens
accacacagctgtac

SEQ ID NO: 56193 - DNA, 15 bp, Homo sapiens
caccacacagctgta

SEQ ID NO: 56194 - DNA, 15 bp, Homo sapiens
gcaccacacagctgt

SEQ ID NO: 56195 - DNA, 15 bp, Homo sapiens
agcaccacacagctg

SEQ ID NO: 56196 - DNA, 15 bp, Homo sapiens
aagcaccacacagct

SEQ ID NO: 56197 - DNA, 15 bp, Homo sapiens
gaagcaccacacagc

SEQ ID NO: 56198 - DNA, 15 bp, Homo sapiens
agaagcaccacacag

SEQ ID NO: 56199 - DNA, 15 bp, Homo sapiens
cagaagcaccacaca

SEQ ID NO: 56200 - DNA, 15 bp, Homo sapiens
acagaagcaccacac

SEQ ID NO: 56201 - DNA, 15 bp, Homo sapiens
cacagaagcaccaca

SEQ ID NO: 56202 - DNA, 15 bp, Homo sapiens
ccacagaagcaccac

SEQ ID NO: 56203 - DNA, 15 bp, Homo sapiens
accacagaagcacca

SEQ ID NO: 56204 - DNA, 15 bp, Homo sapiens
caccacagaagcacc

SEQ ID NO: 56205 - DNA, 15 bp, Homo sapiens
tcaccacagaagcac

SEQ ID NO: 56206 - DNA, 15 bp, Homo sapiens
ttcaccacagaagca

SEQ ID NO: 56207 - DNA, 15 bp, Homo sapiens
cttcaccacagaagc

SEQ ID NO: 56208 - DNA, 15 bp, Homo sapiens
ccttcaccacagaag

SEQ ID NO: 56209 - DNA, 15 bp, Homo sapiens
tccttcaccacagaa

SEQ ID NO: 56210 - DNA, 15 bp, Homo sapiens
ctccttcaccacaga

SEQ ID NO: 56211 - DNA, 15 bp, Homo sapiens
gctccttcaccacag

SEQ ID NO: 56212 - DNA, 15 bp, Homo sapiens
agctccttcaccaca

SEQ ID NO: 56213 - DNA, 15 bp, Homo sapiens
aagctccttcaccac

SEQ ID NO: 56214 - DNA, 15 bp, Homo sapiens
aaagctccttcacca

SEQ ID NO: 56215 - DNA, 15 bp, Homo sapiens
gaaagctccttcacc

SEQ ID NO: 56216 - DNA, 15 bp, Homo sapiens
tgaaagctccttcac

SEQ ID NO: 56217 - DNA, 15 bp, Homo sapiens
atgaaagctccttca

SEQ ID NO: 56218 - DNA, 15 bp, Homo sapiens
gatgaaagctccttc

SEQ ID NO: 56219 - DNA, 15 bp, Homo sapiens
tgatgaaagctcctt

SEQ ID NO: 56220 - DNA, 15 bp, Homo sapiens
atgatgaaagctcct

SEQ ID NO: 56221 - DNA, 15 bp, Homo sapiens
aatgatgaaagctcc

SEQ ID NO: 56222 - DNA, 15 bp, Homo sapiens
gaatgatgaaagctc

SEQ ID NO: 56223 - DNA, 15 bp, Homo sapiens
tgaatgatgaaagct

SEQ ID NO: 56224 - DNA, 15 bp, Homo sapiens
gtgaatgatgaaagc

SEQ ID NO: 56225 - DNA, 15 bp, Homo sapiens
ggtgaatgatgaaag

SEQ ID NO: 56226 - DNA, 15 bp, Homo sapiens
gggtgaatgatgaaa

SEQ ID NO: 56227 - DNA, 15 bp, Homo sapiens
agggtgaatgatgaa

SEQ ID NO: 56228 - DNA, 15 bp, Homo sapiens
aagggtgaatgatga

SEQ ID NO: 56229 - DNA, 15 bp, Homo sapiens
caagggtgaatgatg

SEQ ID NO: 56230 - DNA, 15 bp, Homo sapiens
ccaagggtgaatgat

SEQ ID NO: 56231 - DNA, 15 bp, Homo sapiens
gccaagggtgaatga

SEQ ID NO: 56232 - DNA, 15 bp, Homo sapiens
tgccaagggtgaatg

SEQ ID NO: 56233 - DNA, 15 bp, Homo sapiens
gtgccaagggtgaat

SEQ ID NO: 56234 - DNA, 15 bp, Homo sapiens
tgtgccaagggtgaa

SEQ ID NO: 56235 - DNA, 15 bp, Homo sapiens
ctgtgccaagggtga

SEQ ID NO: 56236 - DNA, 15 bp, Homo sapiens
actgtgccaagggtg

SEQ ID NO: 56237 - DNA, 15 bp, Homo sapiens
tactgtgccaagggt

SEQ ID NO: 56238 - DNA, 15 bp, Homo sapiens
ttactgtgccaaggg

SEQ ID NO: 56239 - DNA, 15 bp, Homo sapiens
cttactgtgccaagg

SEQ ID NO: 56240 - DNA, 15 bp, Homo sapiens
acttactgtgccaag

SEQ ID NO: 56241 - DNA, 15 bp, Homo sapiens
tacttactgtgccaa

SEQ ID NO: 56242 - DNA, 15 bp, Homo sapiens
atacttactgtgcca

SEQ ID NO: 56243 - DNA, 15 bp, Homo sapiens
aatacttactgtgcc

SEQ ID NO: 56244 - DNA, 15 bp, Homo sapiens
caatacttactgtgc

SEQ ID NO: 56245 - DNA, 15 bp, Homo sapiens
ccaatacttactgtg

SEQ ID NO: 56246 - DNA, 15 bp, Homo sapiens
cccaatacttactgt

SEQ ID NO: 56247 - DNA, 15 bp, Homo sapiens
acccaatacttactg

SEQ ID NO: 56248 - DNA, 15 bp, Homo sapiens
cacccaatacttact

SEQ ID NO: 56249 - DNA, 15 bp, Homo sapiens
gcacccaatacttac

SEQ ID NO: 56250 - DNA, 15 bp, Homo sapiens
ggcacccaatactta

SEQ ID NO: 56251 - DNA, 15 bp, Homo sapiens
gggcacccaatactt

SEQ ID NO: 56252 - DNA, 15 bp, Homo sapiens
agggcacccaatact

SEQ ID NO: 56253 - DNA, 15 bp, Homo sapiens
cagggcacccaatac

SEQ ID NO: 56254 - DNA, 15 bp, Homo sapiens
acagggcacccaata

SEQ ID NO: 56255 - DNA, 15 bp, Homo sapiens
gacagggcacccaat

SEQ ID NO: 56256 - DNA, 15 bp, Homo sapiens
tgacagggcacccaa

SEQ ID NO: 56257 - DNA, 15 bp, Homo sapiens
ctgacagggcaccca

SEQ ID NO: 56258 - DNA, 15 bp, Homo sapiens
tctgacagggcaccc

SEQ ID NO: 56259 - DNA, 15 bp, Homo sapiens
ctctgacagggcacc

SEQ ID NO: 56260 - DNA, 15 bp, Homo sapiens
tctctgacagggcac

SEQ ID NO: 56261 - DNA, 15 bp, Homo sapiens
ctctctgacagggca

SEQ ID NO: 56262 - DNA, 15 bp, Homo sapiens
cctctctgacagggc

SEQ ID NO: 56263 - DNA, 15 bp, Homo sapiens
ccctctctgacaggg

SEQ ID NO: 56264 - DNA, 15 bp, Homo sapiens
tccctctctgacagg

SEQ ID NO: 56265 - DNA, 15 bp, Homo sapiens
ctccctctctgacag

SEQ ID NO: 56266 - DNA, 15 bp, Homo sapiens
cctccctctctgaca

SEQ ID NO: 56267 - DNA, 15 bp, Homo sapiens
tcctccctctctgac

SEQ ID NO: 56268 - DNA, 15 bp, Homo sapiens
gtcctccctctctga

SEQ ID NO: 56269 - DNA, 15 bp, Homo sapiens
tgtcctccctctctg

SEQ ID NO: 56270 - DNA, 15 bp, Homo sapiens
gtgtcctccctctct

SEQ ID NO: 56271 - DNA, 15 bp, Homo sapiens
tgtgtcctccctctc

SEQ ID NO: 56272 - DNA, 15 bp, Homo sapiens
ttgtgtcctccctct

SEQ ID NO: 56273 - DNA, 15 bp, Homo sapiens
attgtgtcctccctc

SEQ ID NO: 56274 - DNA, 15 bp, Homo sapiens
tattgtgtcctccct

SEQ ID NO: 56275 - DNA, 15 bp, Homo sapiens
atattgtgtcctccc

SEQ ID NO: 56276 - DNA, 15 bp, Homo sapiens
aatattgtgtcctcc

SEQ ID NO: 56277 - DNA, 15 bp, Homo sapiens
gaatattgtgtcctc

SEQ ID NO: 56278 - DNA, 15 bp, Homo sapiens
agaatattgtgtcct

SEQ ID NO: 56279 - DNA, 15 bp, Homo sapiens
gagaatattgtgtcc

SEQ ID NO: 56280 - DNA, 15 bp, Homo sapiens
agagaatattgtgtc

SEQ ID NO: 56281 - DNA, 15 bp, Homo sapiens
gagagaatattgtgt

SEQ ID NO: 56282 - DNA, 15 bp, Homo sapiens
ggagagaatattgtg

SEQ ID NO: 56283 - DNA, 15 bp, Homo sapiens
aggagagaatattgt

SEQ ID NO: 56284 - DNA, 15 bp, Homo sapiens
caggagagaatattg

SEQ ID NO: 56285 - DNA, 15 bp, Homo sapiens
acaggagagaatatt

SEQ ID NO: 56286 - DNA, 15 bp, Homo sapiens
cacaggagagaatat

SEQ ID NO: 56287 - DNA, 15 bp, Homo sapiens
tcacaggagagaata

SEQ ID NO: 56288 - DNA, 15 bp, Homo sapiens
ctcacaggagagaat

SEQ ID NO: 56289 - DNA, 15 bp, Homo sapiens
gctcacaggagagaa

SEQ ID NO: 56290 - DNA, 15 bp, Homo sapiens
tgctcacaggagaga

SEQ ID NO: 56291 - DNA, 15 bp, Homo sapiens
ttgctcacaggagag

SEQ ID NO: 56292 - DNA, 15 bp, Homo sapiens
cttgctcacaggaga

SEQ ID NO: 56293 - DNA, 15 bp, Homo sapiens
tcttgctcacaggag

SEQ ID NO: 56294 - DNA, 15 bp, Homo sapiens
gtcttgctcacagga

SEQ ID NO: 56295 - DNA, 15 bp, Homo sapiens
agtcttgctcacagg

SEQ ID NO: 56296 - DNA, 15 bp, Homo sapiens
cagtcttgctcacag

SEQ ID NO: 56297 - DNA, 15 bp, Homo sapiens
ccagtcttgctcaca

SEQ ID NO: 56298 - DNA, 15 bp, Homo sapiens
gccagtcttgctcac

SEQ ID NO: 56299 - DNA, 15 bp, Homo sapiens
tgccagtcttgctca

SEQ ID NO: 56300 - DNA, 15 bp, Homo sapiens
gtgccagtcttgctc

SEQ ID NO: 56301 - DNA, 15 bp, Homo sapiens
ggtgccagtcttgct

SEQ ID NO: 56302 - DNA, 15 bp, Homo sapiens
aggtgccagtcttgc

SEQ ID NO: 56303 - DNA, 15 bp, Homo sapiens
caggtgccagtcttg

SEQ ID NO: 56304 - DNA, 15 bp, Homo sapiens
acaggtgccagtctt

SEQ ID NO: 56305 - DNA, 15 bp, Homo sapiens
gacaggtgccagtct

SEQ ID NO: 56306 - DNA, 15 bp, Homo sapiens
tgacaggtgccagtc

SEQ ID NO: 56307 - DNA, 15 bp, Homo sapiens
ctgacaggtgccagt

SEQ ID NO: 56308 - DNA, 15 bp, Homo sapiens
actgacaggtgccag

SEQ ID NO: 56309 - DNA, 15 bp, Homo sapiens
gactgacaggtgcca

SEQ ID NO: 56310 - DNA, 15 bp, Homo sapiens
ggactgacaggtgcc

SEQ ID NO: 56311 - DNA, 15 bp, Homo sapiens
gggactgacaggtgc

SEQ ID NO: 56312 - DNA, 15 bp, Homo sapiens
agggactgacaggtg

SEQ ID NO: 56313 - DNA, 15 bp, Homo sapiens
tagggactgacaggt

SEQ ID NO: 56314 - DNA, 15 bp, Homo sapiens
atagggactgacagg

SEQ ID NO: 56315 - DNA, 15 bp, Homo sapiens
catagggactgacag

SEQ ID NO: 56316 - DNA, 15 bp, Homo sapiens
ccatagggactgaca

SEQ ID NO: 56317 - DNA, 15 bp, Homo sapiens
tccatagggactgac

SEQ ID NO: 56318 - DNA, 15 bp, Homo sapiens
atccatagggactga

SEQ ID NO: 56319 - DNA, 15 bp, Homo sapiens
catccatagggactg

SEQ ID NO: 56320 - DNA, 15 bp, Homo sapiens
gcatccatagggact

SEQ ID NO: 56321 - DNA, 15 bp, Homo sapiens
ggcatccatagggac

SEQ ID NO: 56322 - DNA, 15 bp, Homo sapiens
gggcatccataggga

SEQ ID NO: 56323 - DNA, 15 bp, Homo sapiens
ggggcatccataggg

SEQ ID NO: 56324 - DNA, 15 bp, Homo sapiens
aggggcatccatagg

SEQ ID NO: 56325 - DNA, 15 bp, Homo sapiens
taggggcatccatag

SEQ ID NO: 56326 - DNA, 15 bp, Homo sapiens
gtaggggcatccata

SEQ ID NO: 56327 - DNA, 15 bp, Homo sapiens
agtaggggcatccat

SEQ ID NO: 56328 - DNA, 15 bp, Homo sapiens
cagtaggggcatcca

SEQ ID NO: 56329 - DNA, 15 bp, Homo sapiens
acagtaggggcatcc

SEQ ID NO: 56330 - DNA, 15 bp, Homo sapiens
tacagtaggggcatc

SEQ ID NO: 56331 - DNA, 15 bp, Homo sapiens
ctacagtaggggcat

SEQ ID NO: 56332 - DNA, 15 bp, Homo sapiens
gctacagtaggggca

SEQ ID NO: 56333 - DNA, 15 bp, Homo sapiens
ggctacagtaggggc

SEQ ID NO: 56334 - DNA, 15 bp, Homo sapiens
aggctacagtagggg

SEQ ID NO: 56335 - DNA, 15 bp, Homo sapiens
gaggctacagtaggg

SEQ ID NO: 56336 - DNA, 15 bp, Homo sapiens
tgaggctacagtagg

SEQ ID NO: 56337 - DNA, 15 bp, Homo sapiens
ctgaggctacagtag

SEQ ID NO: 56338 - DNA, 15 bp, Homo sapiens
tctgaggctacagta

SEQ ID NO: 56339 - DNA, 15 bp, Homo sapiens
ttctgaggctacagt

SEQ ID NO: 56340 - DNA, 15 bp, Homo sapiens
cttctgaggctacag

SEQ ID NO: 56341 - DNA, 15 bp, Homo sapiens
acttctgaggctaca

SEQ ID NO: 56342 - DNA, 15 bp, Homo sapiens
gacttctgaggctac

SEQ ID NO: 56343 - DNA, 15 bp, Homo sapiens
agacttctgaggcta

SEQ ID NO: 56344 - DNA, 15 bp, Homo sapiens
aagacttctgaggct

SEQ ID NO: 56345 - DNA, 15 bp, Homo sapiens
gaagacttctgaggc

SEQ ID NO: 56346 - DNA, 15 bp, Homo sapiens
agaagacttctgagg

SEQ ID NO: 56347 - DNA, 15 bp, Homo sapiens
gagaagacttctgag

SEQ ID NO: 56348 - DNA, 15 bp, Homo sapiens
agagaagacttctga

SEQ ID NO: 56349 - DNA, 15 bp, Homo sapiens
cagagaagacttctg

SEQ ID NO: 56350 - DNA, 15 bp, Homo sapiens
gcagagaagacttct

SEQ ID NO: 56351 - DNA, 15 bp, Homo sapiens
ggcagagaagacttc

SEQ ID NO: 56352 - DNA, 15 bp, Homo sapiens
gggcagagaagactt

SEQ ID NO: 56353 - DNA, 15 bp, Homo sapiens
tgggcagagaagact

SEQ ID NO: 56354 - DNA, 15 bp, Homo sapiens
gtgggcagagaagac

SEQ ID NO: 56355 - DNA, 15 bp, Homo sapiens
tgtgggcagagaaga

SEQ ID NO: 56356 - DNA, 15 bp, Homo sapiens
atgtgggcagagaag

SEQ ID NO: 56357 - DNA, 15 bp, Homo sapiens
tatgtgggcagagaa

SEQ ID NO: 56358 - DNA, 15 bp, Homo sapiens
gtatgtgggcagaga

SEQ ID NO: 56359 - DNA, 15 bp, Homo sapiens
ggtatgtgggcagag

SEQ ID NO: 56360 - DNA, 15 bp, Homo sapiens
aggtatgtgggcaga

SEQ ID NO: 56361 - DNA, 15 bp, Homo sapiens
caggtatgtgggcag

SEQ ID NO: 56362 - DNA, 15 bp, Homo sapiens
acaggtatgtgggca

SEQ ID NO: 56363 - DNA, 15 bp, Homo sapiens
cacaggtatgtgggc

SEQ ID NO: 56364 - DNA, 15 bp, Homo sapiens
gcacaggtatgtggg

SEQ ID NO: 56365 - DNA, 15 bp, Homo sapiens
ggcacaggtatgtgg

SEQ ID NO: 56366 - DNA, 15 bp, Homo sapiens
tggcacaggtatgtg

SEQ ID NO: 56367 - DNA, 15 bp, Homo sapiens
ttggcacaggtatgt

SEQ ID NO: 56368 - DNA, 15 bp, Homo sapiens
tttggcacaggtatg

SEQ ID NO: 56369 - DNA, 15 bp, Homo sapiens
ttttggcacaggtat

SEQ ID NO: 56370 - DNA, 15 bp, Homo sapiens
cttttggcacaggta

SEQ ID NO: 56371 - DNA, 15 bp, Homo sapiens
tcttttggcacaggt

SEQ ID NO: 56372 - DNA, 15 bp, Homo sapiens
gtcttttggcacagg

SEQ ID NO: 56373 - DNA, 15 bp, Homo sapiens
agtcttttggcacag

SEQ ID NO: 56374 - DNA, 15 bp, Homo sapiens
gagtcttttggcaca

SEQ ID NO: 56375 - DNA, 15 bp, Homo sapiens
ggagtcttttggcac

SEQ ID NO: 56376 - DNA, 15 bp, Homo sapiens
tggagtcttttggca

SEQ ID NO: 56377 - DNA, 15 bp, Homo sapiens
atggagtcttttggc

SEQ ID NO: 56378 - DNA, 15 bp, Homo sapiens
gatggagtcttttgg

SEQ ID NO: 56379 - DNA, 15 bp, Homo sapiens
agatggagtcttttg

SEQ ID NO: 56380 - DNA, 15 bp, Homo sapiens
cagatggagtctttt

SEQ ID NO: 56381 - DNA, 15 bp, Homo sapiens
acagatggagtcttt

SEQ ID NO: 56382 - DNA, 15 bp, Homo sapiens
tacagatggagtctt

SEQ ID NO: 56383 - DNA, 15 bp, Homo sapiens
ttacagatggagtct

SEQ ID NO: 56384 - DNA, 15 bp, Homo sapiens
cttacagatggagtc

SEQ ID NO: 56385 - DNA, 15 bp, Homo sapiens
ccttacagatggagt

SEQ ID NO: 56386 - DNA, 15 bp, Homo sapiens
cccttacagatggag

SEQ ID NO: 56387 - DNA, 15 bp, Homo sapiens
tcccttacagatgga

SEQ ID NO: 56388 - DNA, 15 bp, Homo sapiens
atcccttacagatgg

SEQ ID NO: 56389 - DNA, 15 bp, Homo sapiens
catcccttacagatg

SEQ ID NO: 56390 - DNA, 15 bp, Homo sapiens
ccatcccttacagat

SEQ ID NO: 56391 - DNA, 15 bp, Homo sapiens
cccatcccttacaga

SEQ ID NO: 56392 - DNA, 15 bp, Homo sapiens
acccatcccttacag

SEQ ID NO: 56393 - DNA, 15 bp, Homo sapiens
tacccatcccttaca

SEQ ID NO: 56394 - DNA, 15 bp, Homo sapiens
ttacccatcccttac

SEQ ID NO: 56395 - DNA, 15 bp, Homo sapiens
cttacccatccctta

SEQ ID NO: 56396 - DNA, 15 bp, Homo sapiens
ccttacccatccctt

SEQ ID NO: 56397 - DNA, 15 bp, Homo sapiens
tccttacccatccct

SEQ ID NO: 56398 - DNA, 15 bp, Homo sapiens
atccttacccatccc

SEQ ID NO: 56399 - DNA, 15 bp, Homo sapiens
aatccttacccatcc

SEQ ID NO: 56400 - DNA, 15 bp, Homo sapiens
aaatccttacccatc

SEQ ID NO: 56401 - DNA, 15 bp, Homo sapiens
caaatccttacccat

SEQ ID NO: 56402 - DNA, 15 bp, Homo sapiens
tcaaatccttaccca

SEQ ID NO: 56403 - DNA, 15 bp, Homo sapiens
ctcaaatccttaccc

SEQ ID NO: 56404 - DNA, 15 bp, Homo sapiens
tctcaaatccttacc

SEQ ID NO: 56405 - DNA, 15 bp, Homo sapiens
ttctcaaatccttac

SEQ ID NO: 56406 - DNA, 15 bp, Homo sapiens
gttctcaaatcctta

SEQ ID NO: 56407 - DNA, 15 bp, Homo sapiens
agttctcaaatcctt

SEQ ID NO: 56408 - DNA, 15 bp, Homo sapiens
cagttctcaaatcct

SEQ ID NO: 56409 - DNA, 15 bp, Homo sapiens
gcagttctcaaatcc

SEQ ID NO: 56410 - DNA, 15 bp, Homo sapiens
tgcagttctcaaatc

SEQ ID NO: 56411 - DNA, 15 bp, Homo sapiens
gtgcagttctcaaat

SEQ ID NO: 56412 - DNA, 15 bp, Homo sapiens
tgtgcagttctcaaa

SEQ ID NO: 56413 - DNA, 15 bp, Homo sapiens
atgtgcagttctcaa

SEQ ID NO: 56414 - DNA, 15 bp, Homo sapiens
tatgtgcagttctca

SEQ ID NO: 56415 - DNA, 15 bp, Homo sapiens
atatgtgcagttctc

SEQ ID NO: 56416 - DNA, 15 bp, Homo sapiens
aatatgtgcagttct

SEQ ID NO: 56417 - DNA, 15 bp, Homo sapiens
taatatgtgcagttc

SEQ ID NO: 56418 - DNA, 15 bp, Homo sapiens
ttaatatgtgcagtt

SEQ ID NO: 56419 - DNA, 15 bp, Homo sapiens
tttaatatgtgcagt

SEQ ID NO: 56420 - DNA, 15 bp, Homo sapiens
atttaatatgtgcag

SEQ ID NO: 56421 - DNA, 15 bp, Homo sapiens
atgagccaccatgcc

SEQ ID NO: 56422 - DNA, 15 bp, Homo sapiens
catgagccaccatgc

SEQ ID NO: 56423 - DNA, 15 bp, Homo sapiens
acatgagccaccatg

SEQ ID NO: 56424 - DNA, 15 bp, Homo sapiens
gacatgagccaccat

SEQ ID NO: 56425 - DNA, 15 bp, Homo sapiens
agacatgagccacca

SEQ ID NO: 56426 - DNA, 15 bp, Homo sapiens
cagacatgagccacc

SEQ ID NO: 56427 - DNA, 15 bp, Homo sapiens
acaagtgatccacct

SEQ ID NO: 56428 - DNA, 15 bp, Homo sapiens
gacaagtgatccacc

SEQ ID NO: 56429 - DNA, 15 bp, Homo sapiens
tgacaagtgatccac

SEQ ID NO: 56430 - DNA, 15 bp, Homo sapiens
ctgacaagtgatcca

SEQ ID NO: 56431 - DNA, 15 bp, Homo sapiens
cctgacaagtgatcc

SEQ ID NO: 56432 - DNA, 15 bp, Homo sapiens
tcctgacaagtgatc

SEQ ID NO: 56433 - DNA, 15 bp, Homo sapiens
ctcctgacaagtgat

SEQ ID NO: 56434 - DNA, 15 bp, Homo sapiens
actcctgacaagtga

SEQ ID NO: 56435 - DNA, 15 bp, Homo sapiens
aactcctgacaagtg

SEQ ID NO: 56436 - DNA, 15 bp, Homo sapiens
aaactcctgacaagt

SEQ ID NO: 56437 - DNA, 15 bp, Homo sapiens
caaactcctgacaag

SEQ ID NO: 56438 - DNA, 15 bp, Homo sapiens
tcaaactcctgacaa

SEQ ID NO: 56439 - DNA, 15 bp, Homo sapiens
ctcaaactcctgaca

SEQ ID NO: 56440 - DNA, 15 bp, Homo sapiens
cagatggggtttcac

SEQ ID NO: 56441 - DNA, 15 bp, Homo sapiens
acagatggggtttca

SEQ ID NO: 56442 - DNA, 15 bp, Homo sapiens
tacagatggggtttc

SEQ ID NO: 56443 - DNA, 15 bp, Homo sapiens
gtacagatggggttt

SEQ ID NO: 56444 - DNA, 15 bp, Homo sapiens
agtacagatggggtt

SEQ ID NO: 56445 - DNA, 15 bp, Homo sapiens
tagtacagatggggt

SEQ ID NO: 56446 - DNA, 15 bp, Homo sapiens
ttagtacagatgggg

SEQ ID NO: 56447 - DNA, 15 bp, Homo sapiens
tttagtacagatggg

SEQ ID NO: 56448 - DNA, 15 bp, Homo sapiens
ttttagtacagatgg

SEQ ID NO: 56449 - DNA, 15 bp, Homo sapiens
tttttagtacagatg

SEQ ID NO: 56450 - DNA, 15 bp, Homo sapiens
ttttttagtacagat

SEQ ID NO: 56451 - DNA, 15 bp, Homo sapiens
tttttttagtacaga

SEQ ID NO: 56452 - DNA, 15 bp, Homo sapiens
ttttttttagtacag

SEQ ID NO: 56453 - DNA, 15 bp, Homo sapiens
tttttttttagtaca

SEQ ID NO: 56454 - DNA, 15 bp, Homo sapiens
ttttttttttagtac

SEQ ID NO: 56455 - DNA, 15 bp, Homo sapiens
gttttttttttttta

SEQ ID NO: 56456 - DNA, 15 bp, Homo sapiens
tttgttttttttttt

SEQ ID NO: 56457 - DNA, 15 bp, Homo sapiens
ctttttgtttttttt

SEQ ID NO: 56458 - DNA, 15 bp, Homo sapiens
actttttgttttttt

SEQ ID NO: 56459 - DNA, 15 bp, Homo sapiens
tactttttgtttttt

SEQ ID NO: 56460 - DNA, 15 bp, Homo sapiens
ctactttttgttttt

SEQ ID NO: 56461 - DNA, 15 bp, Homo sapiens
gctactttttgtttt

SEQ ID NO: 56462 - DNA, 15 bp, Homo sapiens
ggctactttttgttt

SEQ ID NO: 56463 - DNA, 15 bp, Homo sapiens
tggctactttttgtt

SEQ ID NO: 56464 - DNA, 15 bp, Homo sapiens
ctggctactttttgt

SEQ ID NO: 56465 - DNA, 15 bp, Homo sapiens
cctggctactttttg

SEQ ID NO: 56466 - DNA, 15 bp, Homo sapiens
gcctggctacttttt

SEQ ID NO: 56467 - DNA, 15 bp, Homo sapiens
ggcctggctactttt

SEQ ID NO: 56468 - DNA, 15 bp, Homo sapiens
aggcctggctacttt

SEQ ID NO: 56469 - DNA, 15 bp, Homo sapiens
caggcctggctactt

SEQ ID NO: 56470 - DNA, 15 bp, Homo sapiens
ccaggcctggctact

SEQ ID NO: 56471 - DNA, 15 bp, Homo sapiens
accaggcctggctac

SEQ ID NO: 56472 - DNA, 15 bp, Homo sapiens
caccaggcctggcta

SEQ ID NO: 56473 - DNA, 15 bp, Homo sapiens
ccaccaggcctggct

SEQ ID NO: 56474 - DNA, 15 bp, Homo sapiens
tccaccaggcctggc

SEQ ID NO: 56475 - DNA, 15 bp, Homo sapiens
ctccaccaggcctgg

SEQ ID NO: 56476 - DNA, 15 bp, Homo sapiens
gctccaccaggcctg

SEQ ID NO: 56477 - DNA, 15 bp, Homo sapiens
tgctccaccaggcct

SEQ ID NO: 56478 - DNA, 15 bp, Homo sapiens
atgctccaccaggcc

SEQ ID NO: 56479 - DNA, 15 bp, Homo sapiens
catgctccaccaggc

SEQ ID NO: 56480 - DNA, 15 bp, Homo sapiens
gcatgctccaccagg

SEQ ID NO: 56481 - DNA, 15 bp, Homo sapiens
ggcatgctccaccag

SEQ ID NO: 56482 - DNA, 15 bp, Homo sapiens
aggcatgctccacca

SEQ ID NO: 56483 - DNA, 15 bp, Homo sapiens
caggcatgctccacc

SEQ ID NO: 56484 - DNA, 15 bp, Homo sapiens
acaggcatgctccac

SEQ ID NO: 56485 - DNA, 15 bp, Homo sapiens
tacaggcatgctcca

SEQ ID NO: 56486 - DNA, 15 bp, Homo sapiens
ttacaggcatgctcc

SEQ ID NO: 56487 - DNA, 15 bp, Homo sapiens
attacaggcatgctc

SEQ ID NO: 56488 - DNA, 15 bp, Homo sapiens
cattacaggcatgct

SEQ ID NO: 56489 - DNA, 15 bp, Homo sapiens
gcattacaggcatgc

SEQ ID NO: 56490 - DNA, 15 bp, Homo sapiens
ggcattacaggcatg

SEQ ID NO: 56491 - DNA, 15 bp, Homo sapiens
tggcattacaggcat

SEQ ID NO: 56492 - DNA, 15 bp, Homo sapiens
ctggcattacaggca

SEQ ID NO: 56493 - DNA, 15 bp, Homo sapiens
gctggcattacaggc

SEQ ID NO: 56494 - DNA, 15 bp, Homo sapiens
atagctggcattaca

SEQ ID NO: 56495 - DNA, 15 bp, Homo sapiens
aatagctggcattac

SEQ ID NO: 56496 - DNA, 15 bp, Homo sapiens
aaatagctggcatta

SEQ ID NO: 56497 - DNA, 15 bp, Homo sapiens
caaatagctggcatt

SEQ ID NO: 56498 - DNA, 15 bp, Homo sapiens
ccaaatagctggcat

SEQ ID NO: 56499 - DNA, 15 bp, Homo sapiens
cccaaatagctggca

SEQ ID NO: 56500 - DNA, 15 bp, Homo sapiens
tcccaaatagctggc

SEQ ID NO: 56501 - DNA, 15 bp, Homo sapiens
ttcccaaatagctgg

SEQ ID NO: 56502 - DNA, 15 bp, Homo sapiens
cttcccaaatagctg

SEQ ID NO: 56503 - DNA, 15 bp, Homo sapiens
acttcccaaatagct

SEQ ID NO: 56504 - DNA, 15 bp, Homo sapiens
aacttcccaaatagc

SEQ ID NO: 56505 - DNA, 15 bp, Homo sapiens
caacttcccaaatag

SEQ ID NO: 56506 - DNA, 15 bp, Homo sapiens
tcaacttcccaaata

SEQ ID NO: 56507 - DNA, 15 bp, Homo sapiens
ctcaacttcccaaat

SEQ ID NO: 56508 - DNA, 15 bp, Homo sapiens
cctcaacttcccaaa

SEQ ID NO: 56509 - DNA, 15 bp, Homo sapiens
acctcaacttcccaa

SEQ ID NO: 56510 - DNA, 15 bp, Homo sapiens
cacctcaacttccca

SEQ ID NO: 56511 - DNA, 15 bp, Homo sapiens
acacctcaacttccc

SEQ ID NO: 56512 - DNA, 15 bp, Homo sapiens
cacacctcaacttcc

SEQ ID NO: 56513 - DNA, 15 bp, Homo sapiens
tcacacctcaacttc

SEQ ID NO: 56514 - DNA, 15 bp, Homo sapiens
ctcacacctcaactt

SEQ ID NO: 56515 - DNA, 15 bp, Homo sapiens
gctcacacctcaact

SEQ ID NO: 56516 - DNA, 15 bp, Homo sapiens
tgctcacacctcaac

SEQ ID NO: 56517 - DNA, 15 bp, Homo sapiens
atgctcacacctcaa

SEQ ID NO: 56518 - DNA, 15 bp, Homo sapiens
gatgctcacacctca

SEQ ID NO: 56519 - DNA, 15 bp, Homo sapiens
cgatgctcacacctc

SEQ ID NO: 56520 - DNA, 15 bp, Homo sapiens
gcgatgctcacacct

SEQ ID NO: 56521 - DNA, 15 bp, Homo sapiens
agcgatgctcacacc

SEQ ID NO: 56522 - DNA, 15 bp, Homo sapiens
aagcgatgctcacac

SEQ ID NO: 56523 - DNA, 15 bp, Homo sapiens
caagcgatgctcaca

SEQ ID NO: 56524 - DNA, 15 bp, Homo sapiens
tcaagcgatgctcac

SEQ ID NO: 56525 - DNA, 15 bp, Homo sapiens
ttcaagcgatgctca

SEQ ID NO: 56526 - DNA, 15 bp, Homo sapiens
gttcaagcgatgctc

SEQ ID NO: 56527 - DNA, 15 bp, Homo sapiens
cgttcaagcgatgct

SEQ ID NO: 56528 - DNA, 15 bp, Homo sapiens
acgttcaagcgatgc

SEQ ID NO: 56529 - DNA, 15 bp, Homo sapiens
cacgttcaagcgatg

SEQ ID NO: 56530 - DNA, 15 bp, Homo sapiens
ccacgttcaagcgat

SEQ ID NO: 56531 - DNA, 15 bp, Homo sapiens
cccacgttcaagcga

SEQ ID NO: 56532 - DNA, 15 bp, Homo sapiens
tcccacgttcaagcg

SEQ ID NO: 56533 - DNA, 15 bp, Homo sapiens
ctcccacgttcaagc

SEQ ID NO: 56534 - DNA, 15 bp, Homo sapiens
cctcccacgttcaag

SEQ ID NO: 56535 - DNA, 15 bp, Homo sapiens
gcctcccacgttcaa

SEQ ID NO: 56536 - DNA, 15 bp, Homo sapiens
tgcctcccacgttca

SEQ ID NO: 56537 - DNA, 15 bp, Homo sapiens
ctgcctcccacgttc

SEQ ID NO: 56538 - DNA, 15 bp, Homo sapiens
tctgcctcccacgtt

SEQ ID NO: 56539 - DNA, 15 bp, Homo sapiens
ctctgcctcccacgt

SEQ ID NO: 56540 - DNA, 15 bp, Homo sapiens
cctctgcctcccacg

SEQ ID NO: 56541 - DNA, 15 bp, Homo sapiens
acctctgcctcccac

SEQ ID NO: 56542 - DNA, 15 bp, Homo sapiens
gtggtgcaatcttgg

SEQ ID NO: 56543 - DNA, 15 bp, Homo sapiens
agtggtgcaatcttg

SEQ ID NO: 56544 - DNA, 15 bp, Homo sapiens
cagtggtgcaatctt

SEQ ID NO: 56545 - DNA, 15 bp, Homo sapiens
tctggagtgcagtgg

SEQ ID NO: 56546 - DNA, 15 bp, Homo sapiens
gtctggagtgcagtg

SEQ ID NO: 56547 - DNA, 15 bp, Homo sapiens
agtctggagtgcagt

SEQ ID NO: 56548 - DNA, 15 bp, Homo sapiens
cagtctggagtgcag

SEQ ID NO: 56549 - DNA, 15 bp, Homo sapiens
ccagtctggagtgca

SEQ ID NO: 56550 - DNA, 15 bp, Homo sapiens
cccagtctggagtgc

SEQ ID NO: 56551 - DNA, 15 bp, Homo sapiens
acccagtctggagtg

SEQ ID NO: 56552 - DNA, 15 bp, Homo sapiens
cacccagtctggagt

SEQ ID NO: 56553 - DNA, 15 bp, Homo sapiens
tcacccagtctggag

SEQ ID NO: 56554 - DNA, 15 bp, Homo sapiens
gtcacccagtctgga

SEQ ID NO: 56555 - DNA, 15 bp, Homo sapiens
tgtcacccagtctgg

SEQ ID NO: 56556 - DNA, 15 bp, Homo sapiens
ctgtcacccagtctg

SEQ ID NO: 56557 - DNA, 15 bp, Homo sapiens
tctgtcacccagtct

SEQ ID NO: 56558 - DNA, 15 bp, Homo sapiens
ctctgtcacccagtc

SEQ ID NO: 56559 - DNA, 15 bp, Homo sapiens
actctgtcacccagt

SEQ ID NO: 56560 - DNA, 15 bp, Homo sapiens
cactctgtcacccag

SEQ ID NO: 56561 - DNA, 15 bp, Homo sapiens
tcactctgtcaccca

SEQ ID NO: 56562 - DNA, 15 bp, Homo sapiens
ctcactctgtcaccc

SEQ ID NO: 56563 - DNA, 15 bp, Homo sapiens
tctcactctgtcacc

SEQ ID NO: 56564 - DNA, 15 bp, Homo sapiens
gtctcactctgtcac

SEQ ID NO: 56565 - DNA, 15 bp, Homo sapiens
aagtctcactctgtc

SEQ ID NO: 56566 - DNA, 15 bp, Homo sapiens
aaagtctcactctgt

SEQ ID NO: 56567 - DNA, 15 bp, Homo sapiens
caaagtctcactctg

SEQ ID NO: 56568 - DNA, 15 bp, Homo sapiens
acaaagtctcactct

SEQ ID NO: 56569 - DNA, 15 bp, Homo sapiens
gacaaagtctcactc

SEQ ID NO: 56570 - DNA, 15 bp, Homo sapiens
agacaaagtctcact

SEQ ID NO: 56571 - DNA, 15 bp, Homo sapiens
tagacaaagtctcac

SEQ ID NO: 56572 - DNA, 15 bp, Homo sapiens
ttagacaaagtctca

SEQ ID NO: 56573 - DNA, 15 bp, Homo sapiens
tttagacaaagtctc

SEQ ID NO: 56574 - DNA, 15 bp, Homo sapiens
ttttagacaaagtct

SEQ ID NO: 56575 - DNA, 15 bp, Homo sapiens
tttttagacaaagtc

SEQ ID NO: 56576 - DNA, 15 bp, Homo sapiens
ttttttagacaaagt

SEQ ID NO: 56577 - DNA, 15 bp, Homo sapiens
tttttttagacaaag

SEQ ID NO: 56578 - DNA, 15 bp, Homo sapiens
ttttttttagacaaa

SEQ ID NO: 56579 - DNA, 15 bp, Homo sapiens
tttttttttagacaa

SEQ ID NO: 56580 - DNA, 15 bp, Homo sapiens
tctctctctctcttt

SEQ ID NO: 56581 - DNA, 15 bp, Homo sapiens
ttctctctctctctt

SEQ ID NO: 56582 - DNA, 15 bp, Homo sapiens
tttctctctctctct

SEQ ID NO: 56583 - DNA, 15 bp, Homo sapiens
ttttctctctctctc

SEQ ID NO: 56584 - DNA, 15 bp, Homo sapiens
cttttctctctctct

SEQ ID NO: 56585 - DNA, 15 bp, Homo sapiens
gcttttctctctctc

SEQ ID NO: 56586 - DNA, 15 bp, Homo sapiens
agcttttctctctct

SEQ ID NO: 56587 - DNA, 15 bp, Homo sapiens
tagcttttctctctc

SEQ ID NO: 56588 - DNA, 15 bp, Homo sapiens
ctagcttttctctct

SEQ ID NO: 56589 - DNA, 15 bp, Homo sapiens
cctagcttttctctc

SEQ ID NO: 56590 - DNA, 15 bp, Homo sapiens
acctagcttttctct

SEQ ID NO: 56591 - DNA, 15 bp, Homo sapiens
cacctagcttttctc

SEQ ID NO: 56592 - DNA, 15 bp, Homo sapiens
gcacctagcttttct

SEQ ID NO: 56593 - DNA, 15 bp, Homo sapiens
cgcacctagcttttc

SEQ ID NO: 56594 - DNA, 15 bp, Homo sapiens
ccgcacctagctttt

SEQ ID NO: 56595 - DNA, 15 bp, Homo sapiens
accgcacctagcttt

SEQ ID NO: 56596 - DNA, 15 bp, Homo sapiens
caccgcacctagctt

SEQ ID NO: 56597 - DNA, 15 bp, Homo sapiens
ccaccgcacctagct

SEQ ID NO: 56598 - DNA, 15 bp, Homo sapiens
gccaccgcacctagc

SEQ ID NO: 56599 - DNA, 15 bp, Homo sapiens
agccaccgcacctag

SEQ ID NO: 56600 - DNA, 15 bp, Homo sapiens
gagccaccgcaccta

SEQ ID NO: 56601 - DNA, 15 bp, Homo sapiens
tgcccacctcagcct

SEQ ID NO: 56602 - DNA, 15 bp, Homo sapiens
ctgcccacctcagcc

SEQ ID NO: 56603 - DNA, 15 bp, Homo sapiens
tctgcccacctcagc

SEQ ID NO: 56604 - DNA, 15 bp, Homo sapiens
atctgcccacctcag

SEQ ID NO: 56605 - DNA, 15 bp, Homo sapiens
gatctgcccacctca

SEQ ID NO: 56606 - DNA, 15 bp, Homo sapiens
tgatctgcccacctc

SEQ ID NO: 56607 - DNA, 15 bp, Homo sapiens
gtgatctgcccacct

SEQ ID NO: 56608 - DNA, 15 bp, Homo sapiens
cgtgatctgcccacc

SEQ ID NO: 56609 - DNA, 15 bp, Homo sapiens
tcgtgatctgcccac

SEQ ID NO: 56610 - DNA, 15 bp, Homo sapiens
ctcgtgatctgccca

SEQ ID NO: 56611 - DNA, 15 bp, Homo sapiens
ttgacctcgtgatct

SEQ ID NO: 56612 - DNA, 15 bp, Homo sapiens
cttgacctcgtgatc

SEQ ID NO: 56613 - DNA, 15 bp, Homo sapiens
tcttgacctcgtgat

SEQ ID NO: 56614 - DNA, 15 bp, Homo sapiens
ctcttgacctcgtga

SEQ ID NO: 56615 - DNA, 15 bp, Homo sapiens
tctcttgacctcgtg

SEQ ID NO: 56616 - DNA, 15 bp, Homo sapiens
atctcttgacctcgt

SEQ ID NO: 56617 - DNA, 15 bp, Homo sapiens
gatctcttgacctcg

SEQ ID NO: 56618 - DNA, 15 bp, Homo sapiens
cgatctcttgacctc

SEQ ID NO: 56619 - DNA, 15 bp, Homo sapiens
tcgatctcttgacct

SEQ ID NO: 56620 - DNA, 15 bp, Homo sapiens
ctcgatctcttgacc

SEQ ID NO: 56621 - DNA, 15 bp, Homo sapiens
tctcgatctcttgac

SEQ ID NO: 56622 - DNA, 15 bp, Homo sapiens
gtctcgatctcttga

SEQ ID NO: 56623 - DNA, 15 bp, Homo sapiens
ggtctcgatctcttg

SEQ ID NO: 56624 - DNA, 15 bp, Homo sapiens
tggtctcgatctctt

SEQ ID NO: 56625 - DNA, 15 bp, Homo sapiens
atggtctcgatctct

SEQ ID NO: 56626 - DNA, 15 bp, Homo sapiens
ggttggccaggatgg

SEQ ID NO: 56627 - DNA, 15 bp, Homo sapiens
tggttggccaggatg

SEQ ID NO: 56628 - DNA, 15 bp, Homo sapiens
ttggttggccaggat

SEQ ID NO: 56629 - DNA, 15 bp, Homo sapiens
gttggttggccagga

SEQ ID NO: 56630 - DNA, 15 bp, Homo sapiens
tgttggttggccagg

SEQ ID NO: 56631 - DNA, 15 bp, Homo sapiens
atgttggttggccag

SEQ ID NO: 56632 - DNA, 15 bp, Homo sapiens
catgttggttggcca

SEQ ID NO: 56633 - DNA, 15 bp, Homo sapiens
ccatgttggttggcc

SEQ ID NO: 56634 - DNA, 15 bp, Homo sapiens
gccatgttggttggc

SEQ ID NO: 56635 - DNA, 15 bp, Homo sapiens
cgccatgttggttgg

SEQ ID NO: 56636 - DNA, 15 bp, Homo sapiens
tcgccatgttggttg

SEQ ID NO: 56637 - DNA, 15 bp, Homo sapiens
ttcgccatgttggtt

SEQ ID NO: 56638 - DNA, 15 bp, Homo sapiens
tttcgccatgttggt

SEQ ID NO: 56639 - DNA, 15 bp, Homo sapiens
gggtttcgccatgtt

SEQ ID NO: 56640 - DNA, 15 bp, Homo sapiens
ggggtttcgccatgt

SEQ ID NO: 56641 - DNA, 15 bp, Homo sapiens
cggggtttcgccatg

SEQ ID NO: 56642 - DNA, 15 bp, Homo sapiens
acggggtttcgccat

SEQ ID NO: 56643 - DNA, 15 bp, Homo sapiens
gacggggtttcgcca

SEQ ID NO: 56644 - DNA, 15 bp, Homo sapiens
agacggggtttcgcc

SEQ ID NO: 56645 - DNA, 15 bp, Homo sapiens
gagacggggtttcgc

SEQ ID NO: 56646 - DNA, 15 bp, Homo sapiens
agagacggggtttcg

SEQ ID NO: 56647 - DNA, 15 bp, Homo sapiens
cctacgcccagctaa

SEQ ID NO: 56648 - DNA, 15 bp, Homo sapiens
ccctacgcccagcta

SEQ ID NO: 56649 - DNA, 15 bp, Homo sapiens
cccctacgcccagct

SEQ ID NO: 56650 - DNA, 15 bp, Homo sapiens
gcccctacgcccagc

SEQ ID NO: 56651 - DNA, 15 bp, Homo sapiens
cgcccctacgcccag

SEQ ID NO: 56652 - DNA, 15 bp, Homo sapiens
gcgcccctacgccca

SEQ ID NO: 56653 - DNA, 15 bp, Homo sapiens
tgcgcccctacgccc

SEQ ID NO: 56654 - DNA, 15 bp, Homo sapiens
gtgcgcccctacgcc

SEQ ID NO: 56655 - DNA, 15 bp, Homo sapiens
cgtgcgcccctacgc

SEQ ID NO: 56656 - DNA, 15 bp, Homo sapiens
gcgtgcgcccctacg

SEQ ID NO: 56657 - DNA, 15 bp, Homo sapiens
ggcgtgcgcccctac

SEQ ID NO: 56658 - DNA, 15 bp, Homo sapiens
aggcgtgcgccccta

SEQ ID NO: 56659 - DNA, 15 bp, Homo sapiens
caggcgtgcgcccct

SEQ ID NO: 56660 - DNA, 15 bp, Homo sapiens
acaggcgtgcgcccc

SEQ ID NO: 56661 - DNA, 15 bp, Homo sapiens
tacaggcgtgcgccc

SEQ ID NO: 56662 - DNA, 15 bp, Homo sapiens
gactacaggcgtgcg

SEQ ID NO: 56663 - DNA, 15 bp, Homo sapiens
ggactacaggcgtgc

SEQ ID NO: 56664 - DNA, 15 bp, Homo sapiens
gggactacaggcgtg

SEQ ID NO: 56665 - DNA, 15 bp, Homo sapiens
tcaagtagctgggac

SEQ ID NO: 56666 - DNA, 15 bp, Homo sapiens
cctcaagtagctggg

SEQ ID NO: 56667 - DNA, 15 bp, Homo sapiens
ccctcaagtagctgg

SEQ ID NO: 56668 - DNA, 15 bp, Homo sapiens
cccctcaagtagctg

SEQ ID NO: 56669 - DNA, 15 bp, Homo sapiens
gcccctcaagtagct

SEQ ID NO: 56670 - DNA, 15 bp, Homo sapiens
agcccctcaagtagc

SEQ ID NO: 56671 - DNA, 15 bp, Homo sapiens
cagcccctcaagtag

SEQ ID NO: 56672 - DNA, 15 bp, Homo sapiens
ccagcccctcaagta

SEQ ID NO: 56673 - DNA, 15 bp, Homo sapiens
cccagcccctcaagt

SEQ ID NO: 56674 - DNA, 15 bp, Homo sapiens
ccccagcccctcaag

SEQ ID NO: 56675 - DNA, 15 bp, Homo sapiens
gccccagcccctcaa

SEQ ID NO: 56676 - DNA, 15 bp, Homo sapiens
tgccccagcccctca

SEQ ID NO: 56677 - DNA, 15 bp, Homo sapiens
ctgccccagcccctc

SEQ ID NO: 56678 - DNA, 15 bp, Homo sapiens
cctgccccagcccct

SEQ ID NO: 56679 - DNA, 15 bp, Homo sapiens
tcctgccccagcccc

SEQ ID NO: 56680 - DNA, 15 bp, Homo sapiens
ctcctgccccagccc

SEQ ID NO: 56681 - DNA, 15 bp, Homo sapiens
ggggttcaagcgatt

SEQ ID NO: 56682 - DNA, 15 bp, Homo sapiens
cggggttcaagcgat

SEQ ID NO: 56683 - DNA, 15 bp, Homo sapiens
ccggggttcaagcga

SEQ ID NO: 56684 - DNA, 15 bp, Homo sapiens
tccggggttcaagcg

SEQ ID NO: 56685 - DNA, 15 bp, Homo sapiens
ctccggggttcaagc

SEQ ID NO: 56686 - DNA, 15 bp, Homo sapiens
cctccggggttcaag

SEQ ID NO: 56687 - DNA, 15 bp, Homo sapiens
gcctccggggttcaa

SEQ ID NO: 56688 - DNA, 15 bp, Homo sapiens
cgcctccggggttca

SEQ ID NO: 56689 - DNA, 15 bp, Homo sapiens
ccgcctccggggttc

SEQ ID NO: 56690 - DNA, 15 bp, Homo sapiens
tccgcctccggggtt

SEQ ID NO: 56691 - DNA, 15 bp, Homo sapiens
ctccgcctccggggt

SEQ ID NO: 56692 - DNA, 15 bp, Homo sapiens
cctccgcctccgggg

SEQ ID NO: 56693 - DNA, 15 bp, Homo sapiens
acctccgcctccggg

SEQ ID NO: 56694 - DNA, 15 bp, Homo sapiens
aacctccgcctccgg

SEQ ID NO: 56695 - DNA, 15 bp, Homo sapiens
caacctccgcctccg

SEQ ID NO: 56696 - DNA, 15 bp, Homo sapiens
gggctggagtgcagt

SEQ ID NO: 56697 - DNA, 15 bp, Homo sapiens
cgggctggagtgcag

SEQ ID NO: 56698 - DNA, 15 bp, Homo sapiens
ccgggctggagtgca

SEQ ID NO: 56699 - DNA, 15 bp, Homo sapiens
cccgggctggagtgc

SEQ ID NO: 56700 - DNA, 15 bp, Homo sapiens
gcccgggctggagtg

SEQ ID NO: 56701 - DNA, 15 bp, Homo sapiens
cgcccgggctggagt

SEQ ID NO: 56702 - DNA, 15 bp, Homo sapiens
tcgcccgggctggag

SEQ ID NO: 56703 - DNA, 15 bp, Homo sapiens
gtcgcccgggctgga

SEQ ID NO: 56704 - DNA, 15 bp, Homo sapiens
tgtcgcccgggctgg

SEQ ID NO: 56705 - DNA, 15 bp, Homo sapiens
ctgtcgcccgggctg

SEQ ID NO: 56706 - DNA, 15 bp, Homo sapiens
tctgtcgcccgggct

SEQ ID NO: 56707 - DNA, 15 bp, Homo sapiens
ctctgtcgcccgggc

SEQ ID NO: 56708 - DNA, 15 bp, Homo sapiens
gctctgtcgcccggg

SEQ ID NO: 56709 - DNA, 15 bp, Homo sapiens
cgctctgtcgcccgg

SEQ ID NO: 56710 - DNA, 15 bp, Homo sapiens
tcgctctgtcgcccg

SEQ ID NO: 56711 - DNA, 15 bp, Homo sapiens
ctttttttttgagac

SEQ ID NO: 56712 - DNA, 15 bp, Homo sapiens
tctttttttttgaga

SEQ ID NO: 56713 - DNA, 15 bp, Homo sapiens
ctctttttttttgag

SEQ ID NO: 56714 - DNA, 15 bp, Homo sapiens
tctctttttttttga

SEQ ID NO: 56715 - DNA, 15 bp, Homo sapiens
ctctctttttttttg

SEQ ID NO: 56716 - DNA, 15 bp, Homo sapiens
atttctctctctctc

SEQ ID NO: 56717 - DNA, 15 bp, Homo sapiens
catttctctctctct

SEQ ID NO: 56718 - DNA, 15 bp, Homo sapiens
tcatttctctctctc

SEQ ID NO: 56719 - DNA, 15 bp, Homo sapiens
atcatttctctctct

SEQ ID NO: 56720 - DNA, 15 bp, Homo sapiens
catcatttctctctc

SEQ ID NO: 56721 - DNA, 15 bp, Homo sapiens
ccatcatttctctct

SEQ ID NO: 56722 - DNA, 15 bp, Homo sapiens
cccatcatttctctc

SEQ ID NO: 56723 - DNA, 15 bp, Homo sapiens
gcccatcatttctct

SEQ ID NO: 56724 - DNA, 15 bp, Homo sapiens
agcccatcatttctc

SEQ ID NO: 56725 - DNA, 15 bp, Homo sapiens
cccagcccatcattt

SEQ ID NO: 56726 - DNA, 15 bp, Homo sapiens
gcccagcccatcatt

SEQ ID NO: 56727 - DNA, 15 bp, Homo sapiens
ggcccagcccatcat

SEQ ID NO: 56728 - DNA, 15 bp, Homo sapiens
tggcccagcccatca

SEQ ID NO: 56729 - DNA, 15 bp, Homo sapiens
ctggcccagcccatc

SEQ ID NO: 56730 - DNA, 15 bp, Homo sapiens
actggcccagcccat

SEQ ID NO: 56731 - DNA, 15 bp, Homo sapiens
cactggcccagccca

SEQ ID NO: 56732 - DNA, 15 bp, Homo sapiens
gcactggcccagccc

SEQ ID NO: 56733 - DNA, 15 bp, Homo sapiens
ggcactggcccagcc

SEQ ID NO: 56734 - DNA, 15 bp, Homo sapiens
gggcactggcccagc

SEQ ID NO: 56735 - DNA, 15 bp, Homo sapiens
ggggcactggcccag

SEQ ID NO: 56736 - DNA, 15 bp, Homo sapiens
tggggcactggccca

SEQ ID NO: 56737 - DNA, 15 bp, Homo sapiens
gtggggcactggccc

SEQ ID NO: 56738 - DNA, 15 bp, Homo sapiens
ggtggggcactggcc

SEQ ID NO: 56739 - DNA, 15 bp, Homo sapiens
gggtggggcactggc

SEQ ID NO: 56740 - DNA, 15 bp, Homo sapiens
ggggtggggcactgg

SEQ ID NO: 56741 - DNA, 15 bp, Homo sapiens
aggggtggggcactg

SEQ ID NO: 56742 - DNA, 15 bp, Homo sapiens
caggggtggggcact

SEQ ID NO: 56743 - DNA, 15 bp, Homo sapiens
acaggggtggggcac

SEQ ID NO: 56744 - DNA, 15 bp, Homo sapiens
tacaggggtggggca

SEQ ID NO: 56745 - DNA, 15 bp, Homo sapiens
ttacaggggtggggc

SEQ ID NO: 56746 - DNA, 15 bp, Homo sapiens
attacaggggtgggg

SEQ ID NO: 56747 - DNA, 15 bp, Homo sapiens
gattacaggggtggg

SEQ ID NO: 56748 - DNA, 15 bp, Homo sapiens
tgattacaggggtgg

SEQ ID NO: 56749 - DNA, 15 bp, Homo sapiens
gtgattacaggggtg

SEQ ID NO: 56750 - DNA, 15 bp, Homo sapiens
tgtgattacaggggt

SEQ ID NO: 56751 - DNA, 15 bp, Homo sapiens
ttgtgattacagggg

SEQ ID NO: 56752 - DNA, 15 bp, Homo sapiens
gttgtgattacaggg

SEQ ID NO: 56753 - DNA, 15 bp, Homo sapiens
tgttgtgattacagg

SEQ ID NO: 56754 - DNA, 15 bp, Homo sapiens
gtgttgtgattacag

SEQ ID NO: 56755 - DNA, 15 bp, Homo sapiens
agtgttgtgattaca

SEQ ID NO: 56756 - DNA, 15 bp, Homo sapiens
cagtgttgtgattac

SEQ ID NO: 56757 - DNA, 15 bp, Homo sapiens
ccagtgttgtgatta

SEQ ID NO: 56758 - DNA, 15 bp, Homo sapiens
cccagtgttgtgatt

SEQ ID NO: 56759 - DNA, 15 bp, Homo sapiens
tcccagtgttgtgat

SEQ ID NO: 56760 - DNA, 15 bp, Homo sapiens
ctcccagtgttgtga

SEQ ID NO: 56761 - DNA, 15 bp, Homo sapiens
cctcccagtgttgtg

SEQ ID NO: 56762 - DNA, 15 bp, Homo sapiens
gcctcccagtgttgt

SEQ ID NO: 56763 - DNA, 15 bp, Homo sapiens
ggcctcccagtgttg

SEQ ID NO: 56764 - DNA, 15 bp, Homo sapiens
tggcctcccagtgtt

SEQ ID NO: 56765 - DNA, 15 bp, Homo sapiens
ttggcctcccagtgt

SEQ ID NO: 56766 - DNA, 15 bp, Homo sapiens
cttggcctcccagtg

SEQ ID NO: 56767 - DNA, 15 bp, Homo sapiens
ccttggcctcccagt

SEQ ID NO: 56768 - DNA, 15 bp, Homo sapiens
accttggcctcccag

SEQ ID NO: 56769 - DNA, 15 bp, Homo sapiens
gattctcccaccttg

SEQ ID NO: 56770 - DNA, 15 bp, Homo sapiens
cgattctcccacctt

SEQ ID NO: 56771 - DNA, 15 bp, Homo sapiens
ctcaagcgattctcc

SEQ ID NO: 56772 - DNA, 15 bp, Homo sapiens
gctcaagcgattctc

SEQ ID NO: 56773 - DNA, 15 bp, Homo sapiens
ggctcaagcgattct

SEQ ID NO: 56774 - DNA, 15 bp, Homo sapiens
aggctcaagcgattc

SEQ ID NO: 56775 - DNA, 15 bp, Homo sapiens
caggctcaagcgatt

SEQ ID NO: 56776 - DNA, 15 bp, Homo sapiens
ccaggctcaagcgat

SEQ ID NO: 56777 - DNA, 15 bp, Homo sapiens
cccaggctcaagcga

SEQ ID NO: 56778 - DNA, 15 bp, Homo sapiens
tcccaggctcaagcg

SEQ ID NO: 56779 - DNA, 15 bp, Homo sapiens
ctcccaggctcaagc

SEQ ID NO: 56780 - DNA, 15 bp, Homo sapiens
gctcccaggctcaag

SEQ ID NO: 56781 - DNA, 15 bp, Homo sapiens
agctcccaggctcaa

SEQ ID NO: 56782 - DNA, 15 bp, Homo sapiens
cagctcccaggctca

SEQ ID NO: 56783 - DNA, 15 bp, Homo sapiens
tcagctcccaggctc

SEQ ID NO: 56784 - DNA, 15 bp, Homo sapiens
ttcagctcccaggct

SEQ ID NO: 56785 - DNA, 15 bp, Homo sapiens
cttcagctcccaggc

SEQ ID NO: 56786 - DNA, 15 bp, Homo sapiens
tcttcagctcccagg

SEQ ID NO: 56787 - DNA, 15 bp, Homo sapiens
gtcttcagctcccag

SEQ ID NO: 56788 - DNA, 15 bp, Homo sapiens
ggtcttcagctccca

SEQ ID NO: 56789 - DNA, 15 bp, Homo sapiens
tggtcttcagctccc

SEQ ID NO: 56790 - DNA, 15 bp, Homo sapiens
ctggtcttcagctcc

SEQ ID NO: 56791 - DNA, 15 bp, Homo sapiens
gctggtcttcagctc

SEQ ID NO: 56792 - DNA, 15 bp, Homo sapiens
ggctggtcttcagct

SEQ ID NO: 56793 - DNA, 15 bp, Homo sapiens
aggctggtcttcagc

SEQ ID NO: 56794 - DNA, 15 bp, Homo sapiens
caggctggtcttcag

SEQ ID NO: 56795 - DNA, 15 bp, Homo sapiens
gtattgcccaggctg

SEQ ID NO: 56796 - DNA, 15 bp, Homo sapiens
tgtattgcccaggct

SEQ ID NO: 56797 - DNA, 15 bp, Homo sapiens
ctgtattgcccaggc

SEQ ID NO: 56798 - DNA, 15 bp, Homo sapiens
actgtattgcccagg

SEQ ID NO: 56799 - DNA, 15 bp, Homo sapiens
tactgtattgcccag

SEQ ID NO: 56800 - DNA, 15 bp, Homo sapiens
ctactgtattgccca

SEQ ID NO: 56801 - DNA, 15 bp, Homo sapiens
cctactgtattgccc

SEQ ID NO: 56802 - DNA, 15 bp, Homo sapiens
tcctactgtattgcc

SEQ ID NO: 56803 - DNA, 15 bp, Homo sapiens
gtcctactgtattgc

SEQ ID NO: 56804 - DNA, 15 bp, Homo sapiens
ggtcctactgtattg

SEQ ID NO: 56805 - DNA, 15 bp, Homo sapiens
aggtcctactgtatt

SEQ ID NO: 56806 - DNA, 15 bp, Homo sapiens
gaggtcctactgtat

SEQ ID NO: 56807 - DNA, 15 bp, Homo sapiens
tgaggtcctactgta

SEQ ID NO: 56808 - DNA, 15 bp, Homo sapiens
atgaggtcctactgt

SEQ ID NO: 56809 - DNA, 15 bp, Homo sapiens
catgaggtcctactg

SEQ ID NO: 56810 - DNA, 15 bp, Homo sapiens
acatgaggtcctact

SEQ ID NO: 56811 - DNA, 15 bp, Homo sapiens
gacatgaggtcctac

SEQ ID NO: 56812 - DNA, 15 bp, Homo sapiens
agacatgaggtccta

SEQ ID NO: 56813 - DNA, 15 bp, Homo sapiens
tagacatgaggtcct

SEQ ID NO: 56814 - DNA, 15 bp, Homo sapiens
gtagacatgaggtcc

SEQ ID NO: 56815 - DNA, 15 bp, Homo sapiens
tgtagacatgaggtc

SEQ ID NO: 56816 - DNA, 15 bp, Homo sapiens
ttgtagacatgaggt

SEQ ID NO: 56817 - DNA, 15 bp, Homo sapiens
tttgtagacatgagg

SEQ ID NO: 56818 - DNA, 15 bp, Homo sapiens
ttttgtagacatgag

SEQ ID NO: 56819 - DNA, 15 bp, Homo sapiens
tttttgtagacatga

SEQ ID NO: 56820 - DNA, 15 bp, Homo sapiens
ttttttgtagacatg

SEQ ID NO: 56821 - DNA, 15 bp, Homo sapiens
tttttttgtagacat

SEQ ID NO: 56822 - DNA, 15 bp, Homo sapiens
atttttttgtagaca

SEQ ID NO: 56823 - DNA, 15 bp, Homo sapiens
aatttttttgtagac

SEQ ID NO: 56824 - DNA, 15 bp, Homo sapiens
taatttttttgtaga

SEQ ID NO: 56825 - DNA, 15 bp, Homo sapiens
ataatttttttgtag

SEQ ID NO: 56826 - DNA, 15 bp, Homo sapiens
aataatttttttgta

SEQ ID NO: 56827 - DNA, 15 bp, Homo sapiens
taataatttttttgt

SEQ ID NO: 56828 - DNA, 15 bp, Homo sapiens
ttaataatttttttg

SEQ ID NO: 56829 - DNA, 15 bp, Homo sapiens
tttaataattttttt

SEQ ID NO: 56830 - DNA, 15 bp, Homo sapiens
ttttaataatttttt

SEQ ID NO: 56831 - DNA, 15 bp, Homo sapiens
tttttaataattttt

SEQ ID NO: 56832 - DNA, 15 bp, Homo sapiens
atttttaataatttt

SEQ ID NO: 56833 - DNA, 15 bp, Homo sapiens
aatttttaataattt

SEQ ID NO: 56834 - DNA, 15 bp, Homo sapiens
taatttttaataatt

SEQ ID NO: 56835 - DNA, 15 bp, Homo sapiens
ctaatttttaataat

SEQ ID NO: 56836 - DNA, 15 bp, Homo sapiens
gctaatttttaataa

SEQ ID NO: 56837 - DNA, 15 bp, Homo sapiens
ggctaatttttaata

SEQ ID NO: 56838 - DNA, 15 bp, Homo sapiens
tggctaatttttaat

SEQ ID NO: 56839 - DNA, 15 bp, Homo sapiens
ttggctaatttttaa

SEQ ID NO: 56840 - DNA, 15 bp, Homo sapiens
cttggctaattttta

SEQ ID NO: 56841 - DNA, 15 bp, Homo sapiens
gccttggctaatttt

SEQ ID NO: 56842 - DNA, 15 bp, Homo sapiens
agccttggctaattt

SEQ ID NO: 56843 - DNA, 15 bp, Homo sapiens
cagccttggctaatt

SEQ ID NO: 56844 - DNA, 15 bp, Homo sapiens
ccagccttggctaat

SEQ ID NO: 56845 - DNA, 15 bp, Homo sapiens
cccagccttggctaa

SEQ ID NO: 56846 - DNA, 15 bp, Homo sapiens
acccagccttggcta

SEQ ID NO: 56847 - DNA, 15 bp, Homo sapiens
cacccagccttggct

SEQ ID NO: 56848 - DNA, 15 bp, Homo sapiens
gcacccagccttggc

SEQ ID NO: 56849 - DNA, 15 bp, Homo sapiens
cgcacccagccttgg

SEQ ID NO: 56850 - DNA, 15 bp, Homo sapiens
ccgcacccagccttg

SEQ ID NO: 56851 - DNA, 15 bp, Homo sapiens
accgcacccagcctt

SEQ ID NO: 56852 - DNA, 15 bp, Homo sapiens
caccgcacccagcct

SEQ ID NO: 56853 - DNA, 15 bp, Homo sapiens
ccaccgcacccagcc

SEQ ID NO: 56854 - DNA, 15 bp, Homo sapiens
gccaccgcacccagc

SEQ ID NO: 56855 - DNA, 15 bp, Homo sapiens
agccaccgcacccag

SEQ ID NO: 56856 - DNA, 15 bp, Homo sapiens
gagccaccgcaccca

SEQ ID NO: 56857 - DNA, 15 bp, Homo sapiens
cgggattataggcat

SEQ ID NO: 56858 - DNA, 15 bp, Homo sapiens
ccgggattataggca

SEQ ID NO: 56859 - DNA, 15 bp, Homo sapiens
cccgggattataggc

SEQ ID NO: 56860 - DNA, 15 bp, Homo sapiens
ccccgggattatagg

SEQ ID NO: 56861 - DNA, 15 bp, Homo sapiens
cccccgggattatag

SEQ ID NO: 56862 - DNA, 15 bp, Homo sapiens
acccccgggattata

SEQ ID NO: 56863 - DNA, 15 bp, Homo sapiens
cacccccgggattat

SEQ ID NO: 56864 - DNA, 15 bp, Homo sapiens
tcacccccgggatta

SEQ ID NO: 56865 - DNA, 15 bp, Homo sapiens
ttcacccccgggatt

SEQ ID NO: 56866 - DNA, 15 bp, Homo sapiens
cttcacccccgggat

SEQ ID NO: 56867 - DNA, 15 bp, Homo sapiens
acttcacccccggga

SEQ ID NO: 56868 - DNA, 15 bp, Homo sapiens
aacttcacccccggg

SEQ ID NO: 56869 - DNA, 15 bp, Homo sapiens
caacttcacccccgg

SEQ ID NO: 56870 - DNA, 15 bp, Homo sapiens
tcaacttcacccccg

SEQ ID NO: 56871 - DNA, 15 bp, Homo sapiens
ctcaacttcaccccc

SEQ ID NO: 56872 - DNA, 15 bp, Homo sapiens
gctcaacttcacccc

SEQ ID NO: 56873 - DNA, 15 bp, Homo sapiens
ggctcaacttcaccc

SEQ ID NO: 56874 - DNA, 15 bp, Homo sapiens
gggctcaacttcacc

SEQ ID NO: 56875 - DNA, 15 bp, Homo sapiens
tgggctcaacttcac

SEQ ID NO: 56876 - DNA, 15 bp, Homo sapiens
ctgggctcaacttca

SEQ ID NO: 56877 - DNA, 15 bp, Homo sapiens
cctgggctcaacttc

SEQ ID NO: 56878 - DNA, 15 bp, Homo sapiens
tcctgggctcaactt

SEQ ID NO: 56879 - DNA, 15 bp, Homo sapiens
ctcctgggctcaact

SEQ ID NO: 56880 - DNA, 15 bp, Homo sapiens
actcctgggctcaac

SEQ ID NO: 56881 - DNA, 15 bp, Homo sapiens
aaactcctgggctca

SEQ ID NO: 56882 - DNA, 15 bp, Homo sapiens
caaactcctgggctc

SEQ ID NO: 56883 - DNA, 15 bp, Homo sapiens
tcaaactcctgggct

SEQ ID NO: 56884 - DNA, 15 bp, Homo sapiens
ctcaaactcctgggc

SEQ ID NO: 56885 - DNA, 15 bp, Homo sapiens
tctcaaactcctggg

SEQ ID NO: 56886 - DNA, 15 bp, Homo sapiens
agggttttgccatgt

SEQ ID NO: 56887 - DNA, 15 bp, Homo sapiens
cagggttttgccatg

SEQ ID NO: 56888 - DNA, 15 bp, Homo sapiens
acagggttttgccat

SEQ ID NO: 56889 - DNA, 15 bp, Homo sapiens
gacagggttttgcca

SEQ ID NO: 56890 - DNA, 15 bp, Homo sapiens
agacagggttttgcc

SEQ ID NO: 56891 - DNA, 15 bp, Homo sapiens
gagacagggttttgc

SEQ ID NO: 56892 - DNA, 15 bp, Homo sapiens
agagacagggttttg

SEQ ID NO: 56893 - DNA, 15 bp, Homo sapiens
tagagacagggtttt

SEQ ID NO: 56894 - DNA, 15 bp, Homo sapiens
ggtagagacagggtt

SEQ ID NO: 56895 - DNA, 15 bp, Homo sapiens
tggtagagacagggt

SEQ ID NO: 56896 - DNA, 15 bp, Homo sapiens
ttggtagagacaggg

SEQ ID NO: 56897 - DNA, 15 bp, Homo sapiens
tttggtagagacagg

SEQ ID NO: 56898 - DNA, 15 bp, Homo sapiens
ttttggtagagacag

SEQ ID NO: 56899 - DNA, 15 bp, Homo sapiens
tttttggtagagaca

SEQ ID NO: 56900 - DNA, 15 bp, Homo sapiens
atttttggtagagac

SEQ ID NO: 56901 - DNA, 15 bp, Homo sapiens
tatttttggtagaga

SEQ ID NO: 56902 - DNA, 15 bp, Homo sapiens
gtatttttggtagag

SEQ ID NO: 56903 - DNA, 15 bp, Homo sapiens
tgtatttttggtaga

SEQ ID NO: 56904 - DNA, 15 bp, Homo sapiens
tggctaatttttttg

SEQ ID NO: 56905 - DNA, 15 bp, Homo sapiens
ctggctaattttttt

SEQ ID NO: 56906 - DNA, 15 bp, Homo sapiens
ccctggctaattttt

SEQ ID NO: 56907 - DNA, 15 bp, Homo sapiens
cccctggctaatttt

SEQ ID NO: 56908 - DNA, 15 bp, Homo sapiens
acccctggctaattt

SEQ ID NO: 56909 - DNA, 15 bp, Homo sapiens
cacccctggctaatt

SEQ ID NO: 56910 - DNA, 15 bp, Homo sapiens
ccacccctggctaat

SEQ ID NO: 56911 - DNA, 15 bp, Homo sapiens
accacccctggctaa

SEQ ID NO: 56912 - DNA, 15 bp, Homo sapiens
caccacccctggcta

SEQ ID NO: 56913 - DNA, 15 bp, Homo sapiens
ccaccacccctggct

SEQ ID NO: 56914 - DNA, 15 bp, Homo sapiens
accaccacccctggc

SEQ ID NO: 56915 - DNA, 15 bp, Homo sapiens
taccaccacccctgg

SEQ ID NO: 56916 - DNA, 15 bp, Homo sapiens
gtaccaccacccctg

SEQ ID NO: 56917 - DNA, 15 bp, Homo sapiens
cgtaccaccacccct

SEQ ID NO: 56918 - DNA, 15 bp, Homo sapiens
acgtaccaccacccc

SEQ ID NO: 56919 - DNA, 15 bp, Homo sapiens
cacgtaccaccaccc

SEQ ID NO: 56920 - DNA, 15 bp, Homo sapiens
acacgtaccaccacc

SEQ ID NO: 56921 - DNA, 15 bp, Homo sapiens
gacacgtaccaccac

SEQ ID NO: 56922 - DNA, 15 bp, Homo sapiens
agacacgtaccacca

SEQ ID NO: 56923 - DNA, 15 bp, Homo sapiens
cagacacgtaccacc

SEQ ID NO: 56924 - DNA, 15 bp, Homo sapiens
acagacacgtaccac

SEQ ID NO: 56925 - DNA, 15 bp, Homo sapiens
tacagacacgtacca

SEQ ID NO: 56926 - DNA, 15 bp, Homo sapiens
ctacagacacgtacc

SEQ ID NO: 56927 - DNA, 15 bp, Homo sapiens
actacagacacgtac

SEQ ID NO: 56928 - DNA, 15 bp, Homo sapiens
aactacagacacgta

SEQ ID NO: 56929 - DNA, 15 bp, Homo sapiens
gaactacagacacgt

SEQ ID NO: 56930 - DNA, 15 bp, Homo sapiens
ggaactacagacacg

SEQ ID NO: 56931 - DNA, 15 bp, Homo sapiens
tggaactacagacac

SEQ ID NO: 56932 - DNA, 15 bp, Homo sapiens
ctggaactacagaca

SEQ ID NO: 56933 - DNA, 15 bp, Homo sapiens
gctggaactacagac

SEQ ID NO: 56934 - DNA, 15 bp, Homo sapiens
agctggaactacaga

SEQ ID NO: 56935 - DNA, 15 bp, Homo sapiens
tagctggaactacag

SEQ ID NO: 56936 - DNA, 15 bp, Homo sapiens
aagtagctggaacta

SEQ ID NO: 56937 - DNA, 15 bp, Homo sapiens
taagtagctggaact

SEQ ID NO: 56938 - DNA, 15 bp, Homo sapiens
ctaagtagctggaac

SEQ ID NO: 56939 - DNA, 15 bp, Homo sapiens
cctaagtagctggaa

SEQ ID NO: 56940 - DNA, 15 bp, Homo sapiens
tcctaagtagctgga

SEQ ID NO: 56941 - DNA, 15 bp, Homo sapiens
tctcagcctcctaag

SEQ ID NO: 56942 - DNA, 15 bp, Homo sapiens
atctcagcctcctaa

SEQ ID NO: 56943 - DNA, 15 bp, Homo sapiens
catctcagcctccta

SEQ ID NO: 56944 - DNA, 15 bp, Homo sapiens
ccatctcagcctcct

SEQ ID NO: 56945 - DNA, 15 bp, Homo sapiens
tccatctcagcctcc

SEQ ID NO: 56946 - DNA, 15 bp, Homo sapiens
ttccatctcagcctc

SEQ ID NO: 56947 - DNA, 15 bp, Homo sapiens
cttccatctcagcct

SEQ ID NO: 56948 - DNA, 15 bp, Homo sapiens
ccttccatctcagcc

SEQ ID NO: 56949 - DNA, 15 bp, Homo sapiens
tccttccatctcagc

SEQ ID NO: 56950 - DNA, 15 bp, Homo sapiens
atccttccatctcag

SEQ ID NO: 56951 - DNA, 15 bp, Homo sapiens
aatccttccatctca

SEQ ID NO: 56952 - DNA, 15 bp, Homo sapiens
caatccttccatctc

SEQ ID NO: 56953 - DNA, 15 bp, Homo sapiens
gcaatccttccatct

SEQ ID NO: 56954 - DNA, 15 bp, Homo sapiens
agcaatccttccatc

SEQ ID NO: 56955 - DNA, 15 bp, Homo sapiens
aagcaatccttccat

SEQ ID NO: 56956 - DNA, 15 bp, Homo sapiens
caagcaatccttcca

SEQ ID NO: 56957 - DNA, 15 bp, Homo sapiens
tcaagcaatccttcc

SEQ ID NO: 56958 - DNA, 15 bp, Homo sapiens
ctcaagcaatccttc

SEQ ID NO: 56959 - DNA, 15 bp, Homo sapiens
gctcaagcaatcctt

SEQ ID NO: 56960 - DNA, 15 bp, Homo sapiens
cctcctgggctcaag

SEQ ID NO: 56961 - DNA, 15 bp, Homo sapiens
gcctcctgggctcaa

SEQ ID NO: 56962 - DNA, 15 bp, Homo sapiens
tgcctcctgggctca

SEQ ID NO: 56963 - DNA, 15 bp, Homo sapiens
ctgcctcctgggctc

SEQ ID NO: 56964 - DNA, 15 bp, Homo sapiens
tctgcctcctgggct

SEQ ID NO: 56965 - DNA, 15 bp, Homo sapiens
ctctgcctcctgggc

SEQ ID NO: 56966 - DNA, 15 bp, Homo sapiens
acctctgcctcctgg

SEQ ID NO: 56967 - DNA, 15 bp, Homo sapiens
ccacctctgcctcct

SEQ ID NO: 56968 - DNA, 15 bp, Homo sapiens
gccacctctgcctcc

SEQ ID NO: 56969 - DNA, 15 bp, Homo sapiens
tgccacctctgcctc

SEQ ID NO: 56970 - DNA, 15 bp, Homo sapiens
ctgccacctctgcct

SEQ ID NO: 56971 - DNA, 15 bp, Homo sapiens
actgccacctctgcc

SEQ ID NO: 56972 - DNA, 15 bp, Homo sapiens
cactgccacctctgc

SEQ ID NO: 56973 - DNA, 15 bp, Homo sapiens
tcactgccacctctg

SEQ ID NO: 56974 - DNA, 15 bp, Homo sapiens
ctcactgccacctct

SEQ ID NO: 56975 - DNA, 15 bp, Homo sapiens
gctcactgccacctc

SEQ ID NO: 56976 - DNA, 15 bp, Homo sapiens
agctcactgccacct

SEQ ID NO: 56977 - DNA, 15 bp, Homo sapiens
cagctcactgccacc

SEQ ID NO: 56978 - DNA, 15 bp, Homo sapiens
tcagctcactgccac

SEQ ID NO: 56979 - DNA, 15 bp, Homo sapiens
ctcagctcactgcca

SEQ ID NO: 56980 - DNA, 15 bp, Homo sapiens
tctcagctcactgcc

SEQ ID NO: 56981 - DNA, 15 bp, Homo sapiens
gtgatctcagctcac

SEQ ID NO: 56982 - DNA, 15 bp, Homo sapiens
tgtgatctcagctca

SEQ ID NO: 56983 - DNA, 15 bp, Homo sapiens
gtgtgatctcagctc

SEQ ID NO: 56984 - DNA, 15 bp, Homo sapiens
ggtgtgatctcagct

SEQ ID NO: 56985 - DNA, 15 bp, Homo sapiens
tggtgtgatctcagc

SEQ ID NO: 56986 - DNA, 15 bp, Homo sapiens
gtggtgtgatctcag

SEQ ID NO: 56987 - DNA, 15 bp, Homo sapiens
agtggtgtgatctca

SEQ ID NO: 56988 - DNA, 15 bp, Homo sapiens
cagtggtgtgatctc

SEQ ID NO: 56989 - DNA, 15 bp, Homo sapiens
gggtcttgctctgtc

SEQ ID NO: 56990 - DNA, 15 bp, Homo sapiens
tgagacagggtcttg

SEQ ID NO: 56991 - DNA, 15 bp, Homo sapiens
ttgagacagggtctt

SEQ ID NO: 56992 - DNA, 15 bp, Homo sapiens
tttgtttttgagaca

SEQ ID NO: 56993 - DNA, 15 bp, Homo sapiens
gtttgtttttgagac

SEQ ID NO: 56994 - DNA, 15 bp, Homo sapiens
ttttgtttgtttttg

SEQ ID NO: 56995 - DNA, 15 bp, Homo sapiens
tttttgtttgttttt

SEQ ID NO: 56996 - DNA, 15 bp, Homo sapiens
ttttttgtttgtttt

SEQ ID NO: 56997 - DNA, 15 bp, Homo sapiens
tttttttgtttgttt

SEQ ID NO: 56998 - DNA, 15 bp, Homo sapiens
ttttttttgtttgtt

SEQ ID NO: 56999 - DNA, 15 bp, Homo sapiens
attttttttgtttgt

SEQ ID NO: 57000 - DNA, 15 bp, Homo sapiens
cattttttttgtttg

SEQ ID NO: 57001 - DNA, 15 bp, Homo sapiens
tcattttttttgttt

SEQ ID NO: 57002 - DNA, 15 bp, Homo sapiens
atcattttttttgtt

SEQ ID NO: 57003 - DNA, 15 bp, Homo sapiens
catcattttttttgt

SEQ ID NO: 57004 - DNA, 15 bp, Homo sapiens
tcatcattttttttg

SEQ ID NO: 57005 - DNA, 15 bp, Homo sapiens
ttcatcatttttttt

SEQ ID NO: 57006 - DNA, 15 bp, Homo sapiens
cttcatcattttttt

SEQ ID NO: 57007 - DNA, 15 bp, Homo sapiens
acttcatcatttttt

SEQ ID NO: 57008 - DNA, 15 bp, Homo sapiens
cacttcatcattttt

SEQ ID NO: 57009 - DNA, 15 bp, Homo sapiens
tcacttcatcatttt

SEQ ID NO: 57010 - DNA, 15 bp, Homo sapiens
gtcacttcatcattt

SEQ ID NO: 57011 - DNA, 15 bp, Homo sapiens
tgtcacttcatcatt

SEQ ID NO: 57012 - DNA, 15 bp, Homo sapiens
ctgtcacttcatcat

SEQ ID NO: 57013 - DNA, 15 bp, Homo sapiens
actgtcacttcatca

SEQ ID NO: 57014 - DNA, 15 bp, Homo sapiens
aactgtcacttcatc

SEQ ID NO: 57015 - DNA, 15 bp, Homo sapiens
gaactgtcacttcat

SEQ ID NO: 57016 - DNA, 15 bp, Homo sapiens
ggaactgtcacttca

SEQ ID NO: 57017 - DNA, 15 bp, Homo sapiens
tggaactgtcacttc

SEQ ID NO: 57018 - DNA, 15 bp, Homo sapiens
ctggaactgtcactt

SEQ ID NO: 57019 - DNA, 15 bp, Homo sapiens
actggaactgtcact

SEQ ID NO: 57020 - DNA, 15 bp, Homo sapiens
tactggaactgtcac

SEQ ID NO: 57021 - DNA, 15 bp, Homo sapiens
ctactggaactgtca

SEQ ID NO: 57022 - DNA, 15 bp, Homo sapiens
actactggaactgtc

SEQ ID NO: 57023 - DNA, 15 bp, Homo sapiens
gactactggaactgt

SEQ ID NO: 57024 - DNA, 15 bp, Homo sapiens
ggactactggaactg

SEQ ID NO: 57025 - DNA, 15 bp, Homo sapiens
aggactactggaact

SEQ ID NO: 57026 - DNA, 15 bp, Homo sapiens
taggactactggaac

SEQ ID NO: 57027 - DNA, 15 bp, Homo sapiens
gtaggactactggaa

SEQ ID NO: 57028 - DNA, 15 bp, Homo sapiens
agtaggactactgga

SEQ ID NO: 57029 - DNA, 15 bp, Homo sapiens
aagtaggactactgg

SEQ ID NO: 57030 - DNA, 15 bp, Homo sapiens
aaagtaggactactg

SEQ ID NO: 57031 - DNA, 15 bp, Homo sapiens
caaagtaggactact

SEQ ID NO: 57032 - DNA, 15 bp, Homo sapiens
tcaaagtaggactac

SEQ ID NO: 57033 - DNA, 15 bp, Homo sapiens
gtcaaagtaggacta

SEQ ID NO: 57034 - DNA, 15 bp, Homo sapiens
tgtcaaagtaggact

SEQ ID NO: 57035 - DNA, 15 bp, Homo sapiens
gtgtcaaagtaggac

SEQ ID NO: 57036 - DNA, 15 bp, Homo sapiens
agtgtcaaagtagga

SEQ ID NO: 57037 - DNA, 15 bp, Homo sapiens
aagtgtcaaagtagg

SEQ ID NO: 57038 - DNA, 15 bp, Homo sapiens
aaagtgtcaaagtag

SEQ ID NO: 57039 - DNA, 15 bp, Homo sapiens
caaagtgtcaaagta

SEQ ID NO: 57040 - DNA, 15 bp, Homo sapiens
tcaaagtgtcaaagt

SEQ ID NO: 57041 - DNA, 15 bp, Homo sapiens
ttcaaagtgtcaaag

SEQ ID NO: 57042 - DNA, 15 bp, Homo sapiens
attcaaagtgtcaaa

SEQ ID NO: 57043 - DNA, 15 bp, Homo sapiens
cattcaaagtgtcaa

SEQ ID NO: 57044 - DNA, 15 bp, Homo sapiens
gcattcaaagtgtca

SEQ ID NO: 57045 - DNA, 15 bp, Homo sapiens
agcattcaaagtgtc

SEQ ID NO: 57046 - DNA, 15 bp, Homo sapiens
gagcattcaaagtgt

SEQ ID NO: 57047 - DNA, 15 bp, Homo sapiens
agagcattcaaagtg

SEQ ID NO: 57048 - DNA, 15 bp, Homo sapiens
aagagcattcaaagt

SEQ ID NO: 57049 - DNA, 15 bp, Homo sapiens
aaagagcattcaaag

SEQ ID NO: 57050 - DNA, 15 bp, Homo sapiens
gaaagagcattcaaa

SEQ ID NO: 57051 - DNA, 15 bp, Homo sapiens
ggaaagagcattcaa

SEQ ID NO: 57052 - DNA, 15 bp, Homo sapiens
aggaaagagcattca

SEQ ID NO: 57053 - DNA, 15 bp, Homo sapiens
aaggaaagagcattc

SEQ ID NO: 57054 - DNA, 15 bp, Homo sapiens
gaaggaaagagcatt

SEQ ID NO: 57055 - DNA, 15 bp, Homo sapiens
ggaaggaaagagcat

SEQ ID NO: 57056 - DNA, 15 bp, Homo sapiens
aggaaggaaagagca

SEQ ID NO: 57057 - DNA, 15 bp, Homo sapiens
caggaaggaaagagc

SEQ ID NO: 57058 - DNA, 15 bp, Homo sapiens
ccaggaaggaaagag

SEQ ID NO: 57059 - DNA, 15 bp, Homo sapiens
cccaggaaggaaaga

SEQ ID NO: 57060 - DNA, 15 bp, Homo sapiens
ccccaggaaggaaag

SEQ ID NO: 57061 - DNA, 15 bp, Homo sapiens
tccccaggaaggaaa

SEQ ID NO: 57062 - DNA, 15 bp, Homo sapiens
atccccaggaaggaa

SEQ ID NO: 57063 - DNA, 15 bp, Homo sapiens
gatccccaggaagga

SEQ ID NO: 57064 - DNA, 15 bp, Homo sapiens
ggatccccaggaagg

SEQ ID NO: 57065 - DNA, 15 bp, Homo sapiens
tggatccccaggaag

SEQ ID NO: 57066 - DNA, 15 bp, Homo sapiens
ctggatccccaggaa

SEQ ID NO: 57067 - DNA, 15 bp, Homo sapiens
cctggatccccagga

SEQ ID NO: 57068 - DNA, 15 bp, Homo sapiens
ccctggatccccagg

SEQ ID NO: 57069 - DNA, 15 bp, Homo sapiens
accctggatccccag

SEQ ID NO: 57070 - DNA, 15 bp, Homo sapiens
caccctggatcccca

SEQ ID NO: 57071 - DNA, 15 bp, Homo sapiens
acaccctggatcccc

SEQ ID NO: 57072 - DNA, 15 bp, Homo sapiens
gacaccctggatccc

SEQ ID NO: 57073 - DNA, 15 bp, Homo sapiens
ggacaccctggatcc

SEQ ID NO: 57074 - DNA, 15 bp, Homo sapiens
tggacaccctggatc

SEQ ID NO: 57075 - DNA, 15 bp, Homo sapiens
gtggacaccctggat

SEQ ID NO: 57076 - DNA, 15 bp, Homo sapiens
ggtggacaccctgga

SEQ ID NO: 57077 - DNA, 15 bp, Homo sapiens
gggtggacaccctgg

SEQ ID NO: 57078 - DNA, 15 bp, Homo sapiens
tgggtggacaccctg

SEQ ID NO: 57079 - DNA, 15 bp, Homo sapiens
ttgggtggacaccct

SEQ ID NO: 57080 - DNA, 15 bp, Homo sapiens
attgggtggacaccc

SEQ ID NO: 57081 - DNA, 15 bp, Homo sapiens
aattgggtggacacc

SEQ ID NO: 57082 - DNA, 15 bp, Homo sapiens
caattgggtggacac

SEQ ID NO: 57083 - DNA, 15 bp, Homo sapiens
acaattgggtggaca

SEQ ID NO: 57084 - DNA, 15 bp, Homo sapiens
cacaattgggtggac

SEQ ID NO: 57085 - DNA, 15 bp, Homo sapiens
ccacaattgggtgga

SEQ ID NO: 57086 - DNA, 15 bp, Homo sapiens
accacaattgggtgg

SEQ ID NO: 57087 - DNA, 15 bp, Homo sapiens
aaccacaattgggtg

SEQ ID NO: 57088 - DNA, 15 bp, Homo sapiens
caaccacaattgggt

SEQ ID NO: 57089 - DNA, 15 bp, Homo sapiens
acaaccacaattggg

SEQ ID NO: 57090 - DNA, 15 bp, Homo sapiens
cacaaccacaattgg

SEQ ID NO: 57091 - DNA, 15 bp, Homo sapiens
gcacaaccacaattg

SEQ ID NO: 57092 - DNA, 15 bp, Homo sapiens
tgcacaaccacaatt

SEQ ID NO: 57093 - DNA, 15 bp, Homo sapiens
ctgcacaaccacaat

SEQ ID NO: 57094 - DNA, 15 bp, Homo sapiens
gctgcacaaccacaa

SEQ ID NO: 57095 - DNA, 15 bp, Homo sapiens
ggctgcacaaccaca

SEQ ID NO: 57096 - DNA, 15 bp, Homo sapiens
tggctgcacaaccac

SEQ ID NO: 57097 - DNA, 15 bp, Homo sapiens
ctggctgcacaacca

SEQ ID NO: 57098 - DNA, 15 bp, Homo sapiens
tctggctgcacaacc

SEQ ID NO: 57099 - DNA, 15 bp, Homo sapiens
atctggctgcacaac

SEQ ID NO: 57100 - DNA, 15 bp, Homo sapiens
catctggctgcacaa

SEQ ID NO: 57101 - DNA, 15 bp, Homo sapiens
gcatctggctgcaca

SEQ ID NO: 57102 - DNA, 15 bp, Homo sapiens
ggcatctggctgcac

SEQ ID NO: 57103 - DNA, 15 bp, Homo sapiens
aggcatctggctgca

SEQ ID NO: 57104 - DNA, 15 bp, Homo sapiens
caggcatctggctgc

SEQ ID NO: 57105 - DNA, 15 bp, Homo sapiens
ccaggcatctggctg

SEQ ID NO: 57106 - DNA, 15 bp, Homo sapiens
tccaggcatctggct

SEQ ID NO: 57107 - DNA, 15 bp, Homo sapiens
gtccaggcatctggc

SEQ ID NO: 57108 - DNA, 15 bp, Homo sapiens
tgtccaggcatctgg

SEQ ID NO: 57109 - DNA, 15 bp, Homo sapiens
ctgtccaggcatctg

SEQ ID NO: 57110 - DNA, 15 bp, Homo sapiens
tctgtccaggcatct

SEQ ID NO: 57111 - DNA, 15 bp, Homo sapiens
ctctgtccaggcatc

SEQ ID NO: 57112 - DNA, 15 bp, Homo sapiens
cctctgtccaggcat

SEQ ID NO: 57113 - DNA, 15 bp, Homo sapiens
tcctctgtccaggca

SEQ ID NO: 57114 - DNA, 15 bp, Homo sapiens
gtcctctgtccaggc

SEQ ID NO: 57115 - DNA, 15 bp, Homo sapiens
tgtcctctgtccagg

SEQ ID NO: 57116 - DNA, 15 bp, Homo sapiens
ttgtcctctgtccag

SEQ ID NO: 57117 - DNA, 15 bp, Homo sapiens
attgtcctctgtcca

SEQ ID NO: 57118 - DNA, 15 bp, Homo sapiens
cattgtcctctgtcc

SEQ ID NO: 57119 - DNA, 15 bp, Homo sapiens
ccattgtcctctgtc

SEQ ID NO: 57120 - DNA, 15 bp, Homo sapiens
gccattgtcctctgt

SEQ ID NO: 57121 - DNA, 15 bp, Homo sapiens
agccattgtcctctg

SEQ ID NO: 57122 - DNA, 15 bp, Homo sapiens
aagccattgtcctct

SEQ ID NO: 57123 - DNA, 15 bp, Homo sapiens
gaagccattgtcctc

SEQ ID NO: 57124 - DNA, 15 bp, Homo sapiens
ggaagccattgtcct

SEQ ID NO: 57125 - DNA, 15 bp, Homo sapiens
tggaagccattgtcc

SEQ ID NO: 57126 - DNA, 15 bp, Homo sapiens
atggaagccattgtc

SEQ ID NO: 57127 - DNA, 15 bp, Homo sapiens
catggaagccattgt

SEQ ID NO: 57128 - DNA, 15 bp, Homo sapiens
ccatggaagccattg

SEQ ID NO: 57129 - DNA, 15 bp, Homo sapiens
accatggaagccatt

SEQ ID NO: 57130 - DNA, 15 bp, Homo sapiens
taccatggaagccat

SEQ ID NO: 57131 - DNA, 15 bp, Homo sapiens
ttaccatggaagcca

SEQ ID NO: 57132 - DNA, 15 bp, Homo sapiens
cttaccatggaagcc

SEQ ID NO: 57133 - DNA, 15 bp, Homo sapiens
ccttaccatggaagc

SEQ ID NO: 57134 - DNA, 15 bp, Homo sapiens
accttaccatggaag

SEQ ID NO: 57135 - DNA, 15 bp, Homo sapiens
caccttaccatggaa

SEQ ID NO: 57136 - DNA, 15 bp, Homo sapiens
gcaccttaccatgga

SEQ ID NO: 57137 - DNA, 15 bp, Homo sapiens
ggcaccttaccatgg

SEQ ID NO: 57138 - DNA, 15 bp, Homo sapiens
aggcaccttaccatg

SEQ ID NO: 57139 - DNA, 15 bp, Homo sapiens
caggcaccttaccat

SEQ ID NO: 57140 - DNA, 15 bp, Homo sapiens
gcaggcaccttacca

SEQ ID NO: 57141 - DNA, 15 bp, Homo sapiens
tgcaggcaccttacc

SEQ ID NO: 57142 - DNA, 15 bp, Homo sapiens
atgcaggcaccttac

SEQ ID NO: 57143 - DNA, 15 bp, Homo sapiens
catgcaggcacctta

SEQ ID NO: 57144 - DNA, 15 bp, Homo sapiens
acatgcaggcacctt

SEQ ID NO: 57145 - DNA, 15 bp, Homo sapiens
tacatgcaggcacct

SEQ ID NO: 57146 - DNA, 15 bp, Homo sapiens
gtacatgcaggcacc

SEQ ID NO: 57147 - DNA, 15 bp, Homo sapiens
ggtacatgcaggcac

SEQ ID NO: 57148 - DNA, 15 bp, Homo sapiens
aggtacatgcaggca

SEQ ID NO: 57149 - DNA, 15 bp, Homo sapiens
caggtacatgcaggc

SEQ ID NO: 57150 - DNA, 15 bp, Homo sapiens
acaggtacatgcagg

SEQ ID NO: 57151 - DNA, 15 bp, Homo sapiens
cacaggtacatgcag

SEQ ID NO: 57152 - DNA, 15 bp, Homo sapiens
gcacaggtacatgca

SEQ ID NO: 57153 - DNA, 15 bp, Homo sapiens
agcacaggtacatgc

SEQ ID NO: 57154 - DNA, 15 bp, Homo sapiens
tagcacaggtacatg

SEQ ID NO: 57155 - DNA, 15 bp, Homo sapiens
atagcacaggtacat

SEQ ID NO: 57156 - DNA, 15 bp, Homo sapiens
tatagcacaggtaca

SEQ ID NO: 57157 - DNA, 15 bp, Homo sapiens
atatagcacaggtac

SEQ ID NO: 57158 - DNA, 15 bp, Homo sapiens
catatagcacaggta

SEQ ID NO: 57159 - DNA, 15 bp, Homo sapiens
ccatatagcacaggt

SEQ ID NO: 57160 - DNA, 15 bp, Homo sapiens
cccatatagcacagg

SEQ ID NO: 57161 - DNA, 15 bp, Homo sapiens
ccccatatagcacag

SEQ ID NO: 57162 - DNA, 15 bp, Homo sapiens
accccatatagcaca

SEQ ID NO: 57163 - DNA, 15 bp, Homo sapiens
gaccccatatagcac

SEQ ID NO: 57164 - DNA, 15 bp, Homo sapiens
ggaccccatatagca

SEQ ID NO: 57165 - DNA, 15 bp, Homo sapiens
aggaccccatatagc

SEQ ID NO: 57166 - DNA, 15 bp, Homo sapiens
aaggaccccatatag

SEQ ID NO: 57167 - DNA, 15 bp, Homo sapiens
aaaggaccccatata

SEQ ID NO: 57168 - DNA, 15 bp, Homo sapiens
aaaaggaccccatat

SEQ ID NO: 57169 - DNA, 15 bp, Homo sapiens
caaaaggaccccata

SEQ ID NO: 57170 - DNA, 15 bp, Homo sapiens
gcaaaaggaccccat

SEQ ID NO: 57171 - DNA, 15 bp, Homo sapiens
tgcaaaaggacccca

SEQ ID NO: 57172 - DNA, 15 bp, Homo sapiens
atgcaaaaggacccc

SEQ ID NO: 57173 - DNA, 15 bp, Homo sapiens
catgcaaaaggaccc

SEQ ID NO: 57174 - DNA, 15 bp, Homo sapiens
ccatgcaaaaggacc

SEQ ID NO: 57175 - DNA, 15 bp, Homo sapiens
cccatgcaaaaggac

SEQ ID NO: 57176 - DNA, 15 bp, Homo sapiens
acccatgcaaaagga

SEQ ID NO: 57177 - DNA, 15 bp, Homo sapiens
aacccatgcaaaagg

SEQ ID NO: 57178 - DNA, 15 bp, Homo sapiens
aaacccatgcaaaag

SEQ ID NO: 57179 - DNA, 15 bp, Homo sapiens
caaacccatgcaaaa

SEQ ID NO: 57180 - DNA, 15 bp, Homo sapiens
ccaaacccatgcaaa

SEQ ID NO: 57181 - DNA, 15 bp, Homo sapiens
accaaacccatgcaa

SEQ ID NO: 57182 - DNA, 15 bp, Homo sapiens
aaccaaacccatgca

SEQ ID NO: 57183 - DNA, 15 bp, Homo sapiens
aaaccaaacccatgc

SEQ ID NO: 57184 - DNA, 15 bp, Homo sapiens
taaaccaaacccatg

SEQ ID NO: 57185 - DNA, 15 bp, Homo sapiens
ataaaccaaacccat

SEQ ID NO: 57186 - DNA, 15 bp, Homo sapiens
gataaaccaaaccca

SEQ ID NO: 57187 - DNA, 15 bp, Homo sapiens
tgataaaccaaaccc

SEQ ID NO: 57188 - DNA, 15 bp, Homo sapiens
gtgataaaccaaacc

SEQ ID NO: 57189 - DNA, 15 bp, Homo sapiens
agtgataaaccaaac

SEQ ID NO: 57190 - DNA, 15 bp, Homo sapiens
gagtgataaaccaaa

SEQ ID NO: 57191 - DNA, 15 bp, Homo sapiens
tgagtgataaaccaa

SEQ ID NO: 57192 - DNA, 15 bp, Homo sapiens
atgagtgataaacca

SEQ ID NO: 57193 - DNA, 15 bp, Homo sapiens
aatgagtgataaacc

SEQ ID NO: 57194 - DNA, 15 bp, Homo sapiens
taatgagtgataaac

SEQ ID NO: 57195 - DNA, 15 bp, Homo sapiens
gtaatgagtgataaa

SEQ ID NO: 57196 - DNA, 15 bp, Homo sapiens
ggtaatgagtgataa

SEQ ID NO: 57197 - DNA, 15 bp, Homo sapiens
aggtaatgagtgata

SEQ ID NO: 57198 - DNA, 15 bp, Homo sapiens
caggtaatgagtgat

SEQ ID NO: 57199 - DNA, 15 bp, Homo sapiens
ccaggtaatgagtga

SEQ ID NO: 57200 - DNA, 15 bp, Homo sapiens
accaggtaatgagtg

SEQ ID NO: 57201 - DNA, 15 bp, Homo sapiens
caccaggtaatgagt

SEQ ID NO: 57202 - DNA, 15 bp, Homo sapiens
gcaccaggtaatgag

SEQ ID NO: 57203 - DNA, 15 bp, Homo sapiens
agcaccaggtaatga

SEQ ID NO: 57204 - DNA, 15 bp, Homo sapiens
aagcaccaggtaatg

SEQ ID NO: 57205 - DNA, 15 bp, Homo sapiens
caagcaccaggtaat

SEQ ID NO: 57206 - DNA, 15 bp, Homo sapiens
tcaagcaccaggtaa

SEQ ID NO: 57207 - DNA, 15 bp, Homo sapiens
ctcaagcaccaggta

SEQ ID NO: 57208 - DNA, 15 bp, Homo sapiens
actcaagcaccaggt

SEQ ID NO: 57209 - DNA, 15 bp, Homo sapiens
tactcaagcaccagg

SEQ ID NO: 57210 - DNA, 15 bp, Homo sapiens
ctactcaagcaccag

SEQ ID NO: 57211 - DNA, 15 bp, Homo sapiens
gctactcaagcacca

SEQ ID NO: 57212 - DNA, 15 bp, Homo sapiens
tgctactcaagcacc

SEQ ID NO: 57213 - DNA, 15 bp, Homo sapiens
gtgctactcaagcac

SEQ ID NO: 57214 - DNA, 15 bp, Homo sapiens
tgtgctactcaagca

SEQ ID NO: 57215 - DNA, 15 bp, Homo sapiens
ctgtgctactcaagc

SEQ ID NO: 57216 - DNA, 15 bp, Homo sapiens
actgtgctactcaag

SEQ ID NO: 57217 - DNA, 15 bp, Homo sapiens
aactgtgctactcaa

SEQ ID NO: 57218 - DNA, 15 bp, Homo sapiens
gaactgtgctactca

SEQ ID NO: 57219 - DNA, 15 bp, Homo sapiens
agaactgtgctactc

SEQ ID NO: 57220 - DNA, 15 bp, Homo sapiens
aagaactgtgctact

SEQ ID NO: 57221 - DNA, 15 bp, Homo sapiens
caagaactgtgctac

SEQ ID NO: 57222 - DNA, 15 bp, Homo sapiens
ccaagaactgtgcta

SEQ ID NO: 57223 - DNA, 15 bp, Homo sapiens
gccaagaactgtgct

SEQ ID NO: 57224 - DNA, 15 bp, Homo sapiens
tgccaagaactgtgc

SEQ ID NO: 57225 - DNA, 15 bp, Homo sapiens
gtgccaagaactgtg

SEQ ID NO: 57226 - DNA, 15 bp, Homo sapiens
tgtgccaagaactgt

SEQ ID NO: 57227 - DNA, 15 bp, Homo sapiens
atgtgccaagaactg

SEQ ID NO: 57228 - DNA, 15 bp, Homo sapiens
aatgtgccaagaact

SEQ ID NO: 57229 - DNA, 15 bp, Homo sapiens
aaatgtgccaagaac

SEQ ID NO: 57230 - DNA, 15 bp, Homo sapiens
aaaatgtgccaagaa

SEQ ID NO: 57231 - DNA, 15 bp, Homo sapiens
taaaatgtgccaaga

SEQ ID NO: 57232 - DNA, 15 bp, Homo sapiens
ttaaaatgtgccaag

SEQ ID NO: 57233 - DNA, 15 bp, Homo sapiens
tttaaaatgtgccaa

SEQ ID NO: 57234 - DNA, 15 bp, Homo sapiens
atttaaaatgtgcca

SEQ ID NO: 57235 - DNA, 15 bp, Homo sapiens
tatttaaaatgtgcc

SEQ ID NO: 57236 - DNA, 15 bp, Homo sapiens
atatttaaaatgtgc

SEQ ID NO: 57237 - DNA, 15 bp, Homo sapiens
aatatttaaaatgtg

SEQ ID NO: 57238 - DNA, 15 bp, Homo sapiens
aaatatttaaaatgt

SEQ ID NO: 57239 - DNA, 15 bp, Homo sapiens
caaatatttaaaatg

SEQ ID NO: 57240 - DNA, 15 bp, Homo sapiens
acaaatatttaaaat

SEQ ID NO: 57241 - DNA, 15 bp, Homo sapiens
aacaaatatttaaaa

SEQ ID NO: 57242 - DNA, 15 bp, Homo sapiens
caacaaatatttaaa

SEQ ID NO: 57243 - DNA, 15 bp, Homo sapiens
tcaacaaatatttaa

SEQ ID NO: 57244 - DNA, 15 bp, Homo sapiens
ttcaacaaatattta

SEQ ID NO: 57245 - DNA, 15 bp, Homo sapiens
attcaacaaatattt

SEQ ID NO: 57246 - DNA, 15 bp, Homo sapiens
cattcaacaaatatt

SEQ ID NO: 57247 - DNA, 15 bp, Homo sapiens
tcattcaacaaatat

SEQ ID NO: 57248 - DNA, 15 bp, Homo sapiens
ttcattcaacaaata

SEQ ID NO: 57249 - DNA, 15 bp, Homo sapiens
attcattcaacaaat

SEQ ID NO: 57250 - DNA, 15 bp, Homo sapiens
cattcattcaacaaa

SEQ ID NO: 57251 - DNA, 15 bp, Homo sapiens
ccattcattcaacaa

SEQ ID NO: 57252 - DNA, 15 bp, Homo sapiens
gccattcattcaaca

SEQ ID NO: 57253 - DNA, 15 bp, Homo sapiens
agccattcattcaac

SEQ ID NO: 57254 - DNA, 15 bp, Homo sapiens
tagccattcattcaa

SEQ ID NO: 57255 - DNA, 15 bp, Homo sapiens
ttagccattcattca

SEQ ID NO: 57256 - DNA, 15 bp, Homo sapiens
tttagccattcattc

SEQ ID NO: 57257 - DNA, 15 bp, Homo sapiens
ttttagccattcatt

SEQ ID NO: 57258 - DNA, 15 bp, Homo sapiens
attttagccattcat

SEQ ID NO: 57259 - DNA, 15 bp, Homo sapiens
cattttagccattca

SEQ ID NO: 57260 - DNA, 15 bp, Homo sapiens
acattttagccattc

SEQ ID NO: 57261 - DNA, 15 bp, Homo sapiens
gacattttagccatt

SEQ ID NO: 57262 - DNA, 15 bp, Homo sapiens
agacattttagccat

SEQ ID NO: 57263 - DNA, 15 bp, Homo sapiens
aagacattttagcca

SEQ ID NO: 57264 - DNA, 15 bp, Homo sapiens
aaagacattttagcc

SEQ ID NO: 57265 - DNA, 15 bp, Homo sapiens
aaaagacattttagc

SEQ ID NO: 57266 - DNA, 15 bp, Homo sapiens
aaaaagacattttag

SEQ ID NO: 57267 - DNA, 15 bp, Homo sapiens
caaaaagacatttta

SEQ ID NO: 57268 - DNA, 15 bp, Homo sapiens
tcaaaaagacatttt

SEQ ID NO: 57269 - DNA, 15 bp, Homo sapiens
atcaaaaagacattt

SEQ ID NO: 57270 - DNA, 15 bp, Homo sapiens
catcaaaaagacatt

SEQ ID NO: 57271 - DNA, 15 bp, Homo sapiens
acatcaaaaagacat

SEQ ID NO: 57272 - DNA, 15 bp, Homo sapiens
aacatcaaaaagaca

SEQ ID NO: 57273 - DNA, 15 bp, Homo sapiens
aaacatcaaaaagac

SEQ ID NO: 57274 - DNA, 15 bp, Homo sapiens
aaaacatcaaaaaga

SEQ ID NO: 57275 - DNA, 15 bp, Homo sapiens
aaaaacatcaaaaag

SEQ ID NO: 57276 - DNA, 15 bp, Homo sapiens
taaaaacatcaaaaa

SEQ ID NO: 57277 - DNA, 15 bp, Homo sapiens
ataaaaacatcaaaa

SEQ ID NO: 57278 - DNA, 15 bp, Homo sapiens
aataaaaacatcaaa

SEQ ID NO: 57279 - DNA, 15 bp, Homo sapiens
caataaaaacatcaa

SEQ ID NO: 57280 - DNA, 15 bp, Homo sapiens
acaataaaaacatca

SEQ ID NO: 57281 - DNA, 15 bp, Homo sapiens
aacaataaaaacatc

SEQ ID NO: 57282 - DNA, 15 bp, Homo sapiens
taacaataaaaacat

SEQ ID NO: 57283 - DNA, 15 bp, Homo sapiens
ataacaataaaaaca

SEQ ID NO: 57284 - DNA, 15 bp, Homo sapiens
aataacaataaaaac

SEQ ID NO: 57285 - DNA, 15 bp, Homo sapiens
aaataacaataaaaa

SEQ ID NO: 57286 - DNA, 15 bp, Homo sapiens
caaataacaataaaa

SEQ ID NO: 57287 - DNA, 15 bp, Homo sapiens
acaaataacaataaa

SEQ ID NO: 57288 - DNA, 15 bp, Homo sapiens
aacaaataacaataa

SEQ ID NO: 57289 - DNA, 15 bp, Homo sapiens
aaacaaataacaata

SEQ ID NO: 57290 - DNA, 15 bp, Homo sapiens
aaaacaaataacaat

SEQ ID NO: 57291 - DNA, 15 bp, Homo sapiens
taaaacaaataacaa

SEQ ID NO: 57292 - DNA, 15 bp, Homo sapiens
ataaaacaaataaca

SEQ ID NO: 57293 - DNA, 15 bp, Homo sapiens
tataaaacaaataac

SEQ ID NO: 57294 - DNA, 15 bp, Homo sapiens
atataaaacaaataa

SEQ ID NO: 57295 - DNA, 15 bp, Homo sapiens
aatataaaacaaata

SEQ ID NO: 57296 - DNA, 15 bp, Homo sapiens
caatataaaacaaat

SEQ ID NO: 57297 - DNA, 15 bp, Homo sapiens
acaatataaaacaaa

SEQ ID NO: 57298 - DNA, 15 bp, Homo sapiens
tacaatataaaacaa

SEQ ID NO: 57299 - DNA, 15 bp, Homo sapiens
ttacaatataaaaca

SEQ ID NO: 57300 - DNA, 15 bp, Homo sapiens
tttacaatataaaac

SEQ ID NO: 57301 - DNA, 15 bp, Homo sapiens
ttttacaatataaaa

SEQ ID NO: 57302 - DNA, 15 bp, Homo sapiens
cttttacaatataaa

SEQ ID NO: 57303 - DNA, 15 bp, Homo sapiens
acttttacaatataa

SEQ ID NO: 57304 - DNA, 15 bp, Homo sapiens
tacttttacaatata

SEQ ID NO: 57305 - DNA, 15 bp, Homo sapiens
ttacttttacaatat

SEQ ID NO: 57306 - DNA, 15 bp, Homo sapiens
attacttttacaata

SEQ ID NO: 57307 - DNA, 15 bp, Homo sapiens
tattacttttacaat

SEQ ID NO: 57308 - DNA, 15 bp, Homo sapiens
gtattacttttacaa

SEQ ID NO: 57309 - DNA, 15 bp, Homo sapiens
tgtattacttttaca

SEQ ID NO: 57310 - DNA, 15 bp, Homo sapiens
atgtattacttttac

SEQ ID NO: 57311 - DNA, 15 bp, Homo sapiens
catgtattactttta

SEQ ID NO: 57312 - DNA, 15 bp, Homo sapiens
tcatgtattactttt

SEQ ID NO: 57313 - DNA, 15 bp, Homo sapiens
ttcatgtattacttt

SEQ ID NO: 57314 - DNA, 15 bp, Homo sapiens
gttcatgtattactt

SEQ ID NO: 57315 - DNA, 15 bp, Homo sapiens
agttcatgtattact

SEQ ID NO: 57316 - DNA, 15 bp, Homo sapiens
cagttcatgtattac

SEQ ID NO: 57317 - DNA, 15 bp, Homo sapiens
acagttcatgtatta

SEQ ID NO: 57318 - DNA, 15 bp, Homo sapiens
aacagttcatgtatt

SEQ ID NO: 57319 - DNA, 15 bp, Homo sapiens
aaacagttcatgtat

SEQ ID NO: 57320 - DNA, 15 bp, Homo sapiens
gaaacagttcatgta

SEQ ID NO: 57321 - DNA, 15 bp, Homo sapiens
ggaaacagttcatgt

SEQ ID NO: 57322 - DNA, 15 bp, Homo sapiens
tggaaacagttcatg

SEQ ID NO: 57323 - DNA, 15 bp, Homo sapiens
atggaaacagttcat

SEQ ID NO: 57324 - DNA, 15 bp, Homo sapiens
catggaaacagttca

SEQ ID NO: 57325 - DNA, 15 bp, Homo sapiens
ccatggaaacagttc

SEQ ID NO: 57326 - DNA, 15 bp, Homo sapiens
cccatggaaacagtt

SEQ ID NO: 57327 - DNA, 15 bp, Homo sapiens
ccccatggaaacagt

SEQ ID NO: 57328 - DNA, 15 bp, Homo sapiens
accccatggaaacag

SEQ ID NO: 57329 - DNA, 15 bp, Homo sapiens
caccccatggaaaca

SEQ ID NO: 57330 - DNA, 15 bp, Homo sapiens
ccaccccatggaaac

SEQ ID NO: 57331 - DNA, 15 bp, Homo sapiens
cccaccccatggaaa

SEQ ID NO: 57332 - DNA, 15 bp, Homo sapiens
tcccaccccatggaa

SEQ ID NO: 57333 - DNA, 15 bp, Homo sapiens
ctcccaccccatgga

SEQ ID NO: 57334 - DNA, 15 bp, Homo sapiens
actcccaccccatgg

SEQ ID NO: 57335 - DNA, 15 bp, Homo sapiens
tactcccaccccatg

SEQ ID NO: 57336 - DNA, 15 bp, Homo sapiens
ttactcccaccccat

SEQ ID NO: 57337 - DNA, 15 bp, Homo sapiens
cttactcccacccca

SEQ ID NO: 57338 - DNA, 15 bp, Homo sapiens
tcttactcccacccc

SEQ ID NO: 57339 - DNA, 15 bp, Homo sapiens
atcttactcccaccc

SEQ ID NO: 57340 - DNA, 15 bp, Homo sapiens
tatcttactcccacc

SEQ ID NO: 57341 - DNA, 15 bp, Homo sapiens
atatcttactcccac

SEQ ID NO: 57342 - DNA, 15 bp, Homo sapiens
catatcttactccca

SEQ ID NO: 57343 - DNA, 15 bp, Homo sapiens
tcatatcttactccc

SEQ ID NO: 57344 - DNA, 15 bp, Homo sapiens
ttcatatcttactcc

SEQ ID NO: 57345 - DNA, 15 bp, Homo sapiens
attcatatcttactc

SEQ ID NO: 57346 - DNA, 15 bp, Homo sapiens
cattcatatcttact

SEQ ID NO: 57347 - DNA, 15 bp, Homo sapiens
acattcatatcttac

SEQ ID NO: 57348 - DNA, 15 bp, Homo sapiens
aacattcatatctta

SEQ ID NO: 57349 - DNA, 15 bp, Homo sapiens
gaacattcatatctt

SEQ ID NO: 57350 - DNA, 15 bp, Homo sapiens
tgaacattcatatct

SEQ ID NO: 57351 - DNA, 15 bp, Homo sapiens
atgaacattcatatc

SEQ ID NO: 57352 - DNA, 15 bp, Homo sapiens
gatgaacattcatat

SEQ ID NO: 57353 - DNA, 15 bp, Homo sapiens
tgatgaacattcata

SEQ ID NO: 57354 - DNA, 15 bp, Homo sapiens
gtgatgaacattcat

SEQ ID NO: 57355 - DNA, 15 bp, Homo sapiens
tgtgatgaacattca

SEQ ID NO: 57356 - DNA, 15 bp, Homo sapiens
ttgtgatgaacattc

SEQ ID NO: 57357 - DNA, 15 bp, Homo sapiens
tttgtgatgaacatt

SEQ ID NO: 57358 - DNA, 15 bp, Homo sapiens
ttttgtgatgaacat

SEQ ID NO: 57359 - DNA, 15 bp, Homo sapiens
tttttgtgatgaaca

SEQ ID NO: 57360 - DNA, 15 bp, Homo sapiens
gtttttgtgatgaac

SEQ ID NO: 57361 - DNA, 15 bp, Homo sapiens
tgtttttgtgatgaa

SEQ ID NO: 57362 - DNA, 15 bp, Homo sapiens
atgtttttgtgatga

SEQ ID NO: 57363 - DNA, 15 bp, Homo sapiens
tatgtttttgtgatg

SEQ ID NO: 57364 - DNA, 15 bp, Homo sapiens
ttatgtttttgtgat

SEQ ID NO: 57365 - DNA, 15 bp, Homo sapiens
tttatgtttttgtga

SEQ ID NO: 57366 - DNA, 15 bp, Homo sapiens
atttatgtttttgtg

SEQ ID NO: 57367 - DNA, 15 bp, Homo sapiens
gatttatgtttttgt

SEQ ID NO: 57368 - DNA, 15 bp, Homo sapiens
tgatttatgtttttg

SEQ ID NO: 57369 - DNA, 15 bp, Homo sapiens
ttgatttatgttttt

SEQ ID NO: 57370 - DNA, 15 bp, Homo sapiens
cttgatttatgtttt

SEQ ID NO: 57371 - DNA, 15 bp, Homo sapiens
ccttgatttatgttt

SEQ ID NO: 57372 - DNA, 15 bp, Homo sapiens
gccttgatttatgtt

SEQ ID NO: 57373 - DNA, 15 bp, Homo sapiens
ggccttgatttatgt

SEQ ID NO: 57374 - DNA, 15 bp, Homo sapiens
cggccttgatttatg

SEQ ID NO: 57375 - DNA, 15 bp, Homo sapiens
ccggccttgatttat

SEQ ID NO: 57376 - DNA, 15 bp, Homo sapiens
cccggccttgattta

SEQ ID NO: 57377 - DNA, 15 bp, Homo sapiens
gcccggccttgattt

SEQ ID NO: 57378 - DNA, 15 bp, Homo sapiens
tgcccggccttgatt

SEQ ID NO: 57379 - DNA, 15 bp, Homo sapiens
atgcccggccttgat

SEQ ID NO: 57380 - DNA, 15 bp, Homo sapiens
catgcccggccttga

SEQ ID NO: 57381 - DNA, 15 bp, Homo sapiens
ccatgcccggccttg

SEQ ID NO: 57382 - DNA, 15 bp, Homo sapiens
accatgcccggcctt

SEQ ID NO: 57383 - DNA, 15 bp, Homo sapiens
caccatgcccggcct

SEQ ID NO: 57384 - DNA, 15 bp, Homo sapiens
gcatgagccaccatg

SEQ ID NO: 57385 - DNA, 15 bp, Homo sapiens
aattataggcatgag

SEQ ID NO: 57386 - DNA, 15 bp, Homo sapiens
gaattataggcatga

SEQ ID NO: 57387 - DNA, 15 bp, Homo sapiens
ggaattataggcatg

SEQ ID NO: 57388 - DNA, 15 bp, Homo sapiens
tggaattataggcat

SEQ ID NO: 57389 - DNA, 15 bp, Homo sapiens
ctggaattataggca

SEQ ID NO: 57390 - DNA, 15 bp, Homo sapiens
gctggaattataggc

SEQ ID NO: 57391 - DNA, 15 bp, Homo sapiens
tgctggaattatagg

SEQ ID NO: 57392 - DNA, 15 bp, Homo sapiens
gtgctggaattatag

SEQ ID NO: 57393 - DNA, 15 bp, Homo sapiens
agtgctggaattata

SEQ ID NO: 57394 - DNA, 15 bp, Homo sapiens
aagtgctggaattat

SEQ ID NO: 57395 - DNA, 15 bp, Homo sapiens
aaagtgctggaatta

SEQ ID NO: 57396 - DNA, 15 bp, Homo sapiens
caaagtgctggaatt

SEQ ID NO: 57397 - DNA, 15 bp, Homo sapiens
ccaaagtgctggaat

SEQ ID NO: 57398 - DNA, 15 bp, Homo sapiens
cccaaagtgctggaa

SEQ ID NO: 57399 - DNA, 15 bp, Homo sapiens
tcccaaagtgctgga

SEQ ID NO: 57400 - DNA, 15 bp, Homo sapiens
tcttgacctcccaaa

SEQ ID NO: 57401 - DNA, 15 bp, Homo sapiens
atcttgacctcccaa

SEQ ID NO: 57402 - DNA, 15 bp, Homo sapiens
catcttgacctccca

SEQ ID NO: 57403 - DNA, 15 bp, Homo sapiens
ccatcttgacctccc

SEQ ID NO: 57404 - DNA, 15 bp, Homo sapiens
tccatcttgacctcc

SEQ ID NO: 57405 - DNA, 15 bp, Homo sapiens
ctccatcttgacctc

SEQ ID NO: 57406 - DNA, 15 bp, Homo sapiens
cctccatcttgacct

SEQ ID NO: 57407 - DNA, 15 bp, Homo sapiens
acctccatcttgacc

SEQ ID NO: 57408 - DNA, 15 bp, Homo sapiens
gacctccatcttgac

SEQ ID NO: 57409 - DNA, 15 bp, Homo sapiens
tgacctccatcttga

SEQ ID NO: 57410 - DNA, 15 bp, Homo sapiens
ttgacctccatcttg

SEQ ID NO: 57411 - DNA, 15 bp, Homo sapiens
cttgacctccatctt

SEQ ID NO: 57412 - DNA, 15 bp, Homo sapiens
ccttgacctccatct

SEQ ID NO: 57413 - DNA, 15 bp, Homo sapiens
accttgacctccatc

SEQ ID NO: 57414 - DNA, 15 bp, Homo sapiens
caccttgacctccat

SEQ ID NO: 57415 - DNA, 15 bp, Homo sapiens
ccaccttgacctcca

SEQ ID NO: 57416 - DNA, 15 bp, Homo sapiens
cccaccttgacctcc

SEQ ID NO: 57417 - DNA, 15 bp, Homo sapiens
tcccaccttgacctc

SEQ ID NO: 57418 - DNA, 15 bp, Homo sapiens
ctcccaccttgacct

SEQ ID NO: 57419 - DNA, 15 bp, Homo sapiens
gctcccaccttgacc

SEQ ID NO: 57420 - DNA, 15 bp, Homo sapiens
ggctcccaccttgac

SEQ ID NO: 57421 - DNA, 15 bp, Homo sapiens
aggctcccaccttga

SEQ ID NO: 57422 - DNA, 15 bp, Homo sapiens
taggctcccaccttg

SEQ ID NO: 57423 - DNA, 15 bp, Homo sapiens
ctaggctcccacctt

SEQ ID NO: 57424 - DNA, 15 bp, Homo sapiens
tctaggctcccacct

SEQ ID NO: 57425 - DNA, 15 bp, Homo sapiens
ttctaggctcccacc

SEQ ID NO: 57426 - DNA, 15 bp, Homo sapiens
cttctaggctcccac

SEQ ID NO: 57427 - DNA, 15 bp, Homo sapiens
acttctaggctccca

SEQ ID NO: 57428 - DNA, 15 bp, Homo sapiens
aacttctaggctccc

SEQ ID NO: 57429 - DNA, 15 bp, Homo sapiens
gaacttctaggctcc

SEQ ID NO: 57430 - DNA, 15 bp, Homo sapiens
cgaacttctaggctc

SEQ ID NO: 57431 - DNA, 15 bp, Homo sapiens
tcgaacttctaggct

SEQ ID NO: 57432 - DNA, 15 bp, Homo sapiens
ctcgaacttctaggc

SEQ ID NO: 57433 - DNA, 15 bp, Homo sapiens
tctcgaacttctagg

SEQ ID NO: 57434 - DNA, 15 bp, Homo sapiens
gtctcgaacttctag

SEQ ID NO: 57435 - DNA, 15 bp, Homo sapiens
ggtctcgaacttcta

SEQ ID NO: 57436 - DNA, 15 bp, Homo sapiens
tggtctcgaacttct

SEQ ID NO: 57437 - DNA, 15 bp, Homo sapiens
ctggtctcgaacttc

SEQ ID NO: 57438 - DNA, 15 bp, Homo sapiens
gctggtctcgaactt

SEQ ID NO: 57439 - DNA, 15 bp, Homo sapiens
cccaggctggtctcg

SEQ ID NO: 57440 - DNA, 15 bp, Homo sapiens
ttatgttgcccaggc

SEQ ID NO: 57441 - DNA, 15 bp, Homo sapiens
cttatgttgcccagg

SEQ ID NO: 57442 - DNA, 15 bp, Homo sapiens
ccttatgttgcccag

SEQ ID NO: 57443 - DNA, 15 bp, Homo sapiens
tccttatgttgccca

SEQ ID NO: 57444 - DNA, 15 bp, Homo sapiens
ctccttatgttgccc

SEQ ID NO: 57445 - DNA, 15 bp, Homo sapiens
tctccttatgttgcc

SEQ ID NO: 57446 - DNA, 15 bp, Homo sapiens
gtctccttatgttgc

SEQ ID NO: 57447 - DNA, 15 bp, Homo sapiens
agtctccttatgttg

SEQ ID NO: 57448 - DNA, 15 bp, Homo sapiens
aagtctccttatgtt

SEQ ID NO: 57449 - DNA, 15 bp, Homo sapiens
gaagtctccttatgt

SEQ ID NO: 57450 - DNA, 15 bp, Homo sapiens
tgaagtctccttatg

SEQ ID NO: 57451 - DNA, 15 bp, Homo sapiens
atgaagtctccttat

SEQ ID NO: 57452 - DNA, 15 bp, Homo sapiens
gatgaagtctcctta

SEQ ID NO: 57453 - DNA, 15 bp, Homo sapiens
agatgaagtctcctt

SEQ ID NO: 57454 - DNA, 15 bp, Homo sapiens
cagatgaagtctcct

SEQ ID NO: 57455 - DNA, 15 bp, Homo sapiens
acagatgaagtctcc

SEQ ID NO: 57456 - DNA, 15 bp, Homo sapiens
tacagatgaagtctc

SEQ ID NO: 57457 - DNA, 15 bp, Homo sapiens
gtacagatgaagtct

SEQ ID NO: 57458 - DNA, 15 bp, Homo sapiens
tgtacagatgaagtc

SEQ ID NO: 57459 - DNA, 15 bp, Homo sapiens
ttgtacagatgaagt

SEQ ID NO: 57460 - DNA, 15 bp, Homo sapiens
gttgtacagatgaag

SEQ ID NO: 57461 - DNA, 15 bp, Homo sapiens
tgttgtacagatgaa

SEQ ID NO: 57462 - DNA, 15 bp, Homo sapiens
ttgttgtacagatga

SEQ ID NO: 57463 - DNA, 15 bp, Homo sapiens
tttgttgtacagatg

SEQ ID NO: 57464 - DNA, 15 bp, Homo sapiens
atttgttgtacagat

SEQ ID NO: 57465 - DNA, 15 bp, Homo sapiens
aatttgttgtacaga

SEQ ID NO: 57466 - DNA, 15 bp, Homo sapiens
aaatttgttgtacag

SEQ ID NO: 57467 - DNA, 15 bp, Homo sapiens
taaatttgttgtaca

SEQ ID NO: 57468 - DNA, 15 bp, Homo sapiens
ttaaatttgttgtac

SEQ ID NO: 57469 - DNA, 15 bp, Homo sapiens
tttaaatttgttgta

SEQ ID NO: 57470 - DNA, 15 bp, Homo sapiens
ttttaaatttgttgt

SEQ ID NO: 57471 - DNA, 15 bp, Homo sapiens
tttttaaatttgttg

SEQ ID NO: 57472 - DNA, 15 bp, Homo sapiens
ctttttaaatttgtt

SEQ ID NO: 57473 - DNA, 15 bp, Homo sapiens
actttttaaatttgt

SEQ ID NO: 57474 - DNA, 15 bp, Homo sapiens
tactttttaaatttg

SEQ ID NO: 57475 - DNA, 15 bp, Homo sapiens
ctactttttaaattt

SEQ ID NO: 57476 - DNA, 15 bp, Homo sapiens
gctactttttaaatt

SEQ ID NO: 57477 - DNA, 15 bp, Homo sapiens
agctactttttaaat

SEQ ID NO: 57478 - DNA, 15 bp, Homo sapiens
cagctactttttaaa

SEQ ID NO: 57479 - DNA, 15 bp, Homo sapiens
ccagctactttttaa

SEQ ID NO: 57480 - DNA, 15 bp, Homo sapiens
cccagctacttttta

SEQ ID NO: 57481 - DNA, 15 bp, Homo sapiens
acacccagctacttt

SEQ ID NO: 57482 - DNA, 15 bp, Homo sapiens
cacacccagctactt

SEQ ID NO: 57483 - DNA, 15 bp, Homo sapiens
ccacacccagctact

SEQ ID NO: 57484 - DNA, 15 bp, Homo sapiens
accacacccagctac

SEQ ID NO: 57485 - DNA, 15 bp, Homo sapiens
ctgccaccacaccca

SEQ ID NO: 57486 - DNA, 15 bp, Homo sapiens
tctgccaccacaccc

SEQ ID NO: 57487 - DNA, 15 bp, Homo sapiens
atctgccaccacacc

SEQ ID NO: 57488 - DNA, 15 bp, Homo sapiens
catctgccaccacac

SEQ ID NO: 57489 - DNA, 15 bp, Homo sapiens
gcatctgccaccaca

SEQ ID NO: 57490 - DNA, 15 bp, Homo sapiens
ggcatctgccaccac

SEQ ID NO: 57491 - DNA, 15 bp, Homo sapiens
aggcatctgccacca

SEQ ID NO: 57492 - DNA, 15 bp, Homo sapiens
caggcatctgccacc

SEQ ID NO: 57493 - DNA, 15 bp, Homo sapiens
acaggcatctgccac

SEQ ID NO: 57494 - DNA, 15 bp, Homo sapiens
tacaggcatctgcca

SEQ ID NO: 57495 - DNA, 15 bp, Homo sapiens
ctacaggcatctgcc

SEQ ID NO: 57496 - DNA, 15 bp, Homo sapiens
actacaggcatctgc

SEQ ID NO: 57497 - DNA, 15 bp, Homo sapiens
gactacaggcatctg

SEQ ID NO: 57498 - DNA, 15 bp, Homo sapiens
cgactacaggcatct

SEQ ID NO: 57499 - DNA, 15 bp, Homo sapiens
gcgactacaggcatc

SEQ ID NO: 57500 - DNA, 15 bp, Homo sapiens
tgcgactacaggcat

SEQ ID NO: 57501 - DNA, 15 bp, Homo sapiens
ctgcgactacaggca

SEQ ID NO: 57502 - DNA, 15 bp, Homo sapiens
gctgcgactacaggc

SEQ ID NO: 57503 - DNA, 15 bp, Homo sapiens
agctgcgactacagg

SEQ ID NO: 57504 - DNA, 15 bp, Homo sapiens
tagctgcgactacag

SEQ ID NO: 57505 - DNA, 15 bp, Homo sapiens
gtagctgcgactaca

SEQ ID NO: 57506 - DNA, 15 bp, Homo sapiens
agtagctgcgactac

SEQ ID NO: 57507 - DNA, 15 bp, Homo sapiens
aagtagctgcgacta

SEQ ID NO: 57508 - DNA, 15 bp, Homo sapiens
caagtagctgcgact

SEQ ID NO: 57509 - DNA, 15 bp, Homo sapiens
ccaagtagctgcgac

SEQ ID NO: 57510 - DNA, 15 bp, Homo sapiens
cccaagtagctgcga

SEQ ID NO: 57511 - DNA, 15 bp, Homo sapiens
tcccaagtagctgcg

SEQ ID NO: 57512 - DNA, 15 bp, Homo sapiens
ttcccaagtagctgc

SEQ ID NO: 57513 - DNA, 15 bp, Homo sapiens
cctcagcttcccaag

SEQ ID NO: 57514 - DNA, 15 bp, Homo sapiens
acctcagcttcccaa

SEQ ID NO: 57515 - DNA, 15 bp, Homo sapiens
cacctcagcttccca

SEQ ID NO: 57516 - DNA, 15 bp, Homo sapiens
ccacctcagcttccc

SEQ ID NO: 57517 - DNA, 15 bp, Homo sapiens
cccacctcagcttcc

SEQ ID NO: 57518 - DNA, 15 bp, Homo sapiens
tcccacctcagcttc

SEQ ID NO: 57519 - DNA, 15 bp, Homo sapiens
ctcccacctcagctt

SEQ ID NO: 57520 - DNA, 15 bp, Homo sapiens
cctcccacctcagct

SEQ ID NO: 57521 - DNA, 15 bp, Homo sapiens
agctcaagtgatcct

SEQ ID NO: 57522 - DNA, 15 bp, Homo sapiens
gagctcaagtgatcc

SEQ ID NO: 57523 - DNA, 15 bp, Homo sapiens
tgagctcaagtgatc

SEQ ID NO: 57524 - DNA, 15 bp, Homo sapiens
ctgagctcaagtgat

SEQ ID NO: 57525 - DNA, 15 bp, Homo sapiens
cctgagctcaagtga

SEQ ID NO: 57526 - DNA, 15 bp, Homo sapiens
tcctgagctcaagtg

SEQ ID NO: 57527 - DNA, 15 bp, Homo sapiens
ctcctgagctcaagt

SEQ ID NO: 57528 - DNA, 15 bp, Homo sapiens
cctcctgagctcaag

SEQ ID NO: 57529 - DNA, 15 bp, Homo sapiens
acctcctgagctcaa

SEQ ID NO: 57530 - DNA, 15 bp, Homo sapiens
aacctcctgagctca

SEQ ID NO: 57531 - DNA, 15 bp, Homo sapiens
caacctcctgagctc

SEQ ID NO: 57532 - DNA, 15 bp, Homo sapiens
tcaacctcctgagct

SEQ ID NO: 57533 - DNA, 15 bp, Homo sapiens
atcaacctcctgagc

SEQ ID NO: 57534 - DNA, 15 bp, Homo sapiens
catcaacctcctgag

SEQ ID NO: 57535 - DNA, 15 bp, Homo sapiens
gcatcaacctcctga

SEQ ID NO: 57536 - DNA, 15 bp, Homo sapiens
agcatcaacctcctg

SEQ ID NO: 57537 - DNA, 15 bp, Homo sapiens
aagcatcaacctcct

SEQ ID NO: 57538 - DNA, 15 bp, Homo sapiens
gaagcatcaacctcc

SEQ ID NO: 57539 - DNA, 15 bp, Homo sapiens
tgaagcatcaacctc

SEQ ID NO: 57540 - DNA, 15 bp, Homo sapiens
ctgaagcatcaacct

SEQ ID NO: 57541 - DNA, 15 bp, Homo sapiens
actgaagcatcaacc

SEQ ID NO: 57542 - DNA, 15 bp, Homo sapiens
cactgaagcatcaac

SEQ ID NO: 57543 - DNA, 15 bp, Homo sapiens
tcactgaagcatcaa

SEQ ID NO: 57544 - DNA, 15 bp, Homo sapiens
ctcactgaagcatca

SEQ ID NO: 57545 - DNA, 15 bp, Homo sapiens
gctcactgaagcatc

SEQ ID NO: 57546 - DNA, 15 bp, Homo sapiens
ggctcactgaagcat

SEQ ID NO: 57547 - DNA, 15 bp, Homo sapiens
tggctcactgaagca

SEQ ID NO: 57548 - DNA, 15 bp, Homo sapiens
gtggctcactgaagc

SEQ ID NO: 57549 - DNA, 15 bp, Homo sapiens
cgtggctcactgaag

SEQ ID NO: 57550 - DNA, 15 bp, Homo sapiens
tcgtggctcactgaa

SEQ ID NO: 57551 - DNA, 15 bp, Homo sapiens
atcgtggctcactga

SEQ ID NO: 57552 - DNA, 15 bp, Homo sapiens
gatcgtggctcactg

SEQ ID NO: 57553 - DNA, 15 bp, Homo sapiens
tgatcgtggctcact

SEQ ID NO: 57554 - DNA, 15 bp, Homo sapiens
gtgatcgtggctcac

SEQ ID NO: 57555 - DNA, 15 bp, Homo sapiens
tgtgatcgtggctca

SEQ ID NO: 57556 - DNA, 15 bp, Homo sapiens
gtgtgatcgtggctc

SEQ ID NO: 57557 - DNA, 15 bp, Homo sapiens
ggtgtgatcgtggct

SEQ ID NO: 57558 - DNA, 15 bp, Homo sapiens
tggtgtgatcgtggc

SEQ ID NO: 57559 - DNA, 15 bp, Homo sapiens
gtggtgtgatcgtgg

SEQ ID NO: 57560 - DNA, 15 bp, Homo sapiens
agtggtgtgatcgtg

SEQ ID NO: 57561 - DNA, 15 bp, Homo sapiens
cagtggtgtgatcgt

SEQ ID NO: 57562 - DNA, 15 bp, Homo sapiens
acagtggtgtgatcg

SEQ ID NO: 57563 - DNA, 15 bp, Homo sapiens
tacagtggtgtgatc

SEQ ID NO: 57564 - DNA, 15 bp, Homo sapiens
gtacagtggtgtgat

SEQ ID NO: 57565 - DNA, 15 bp, Homo sapiens
agtacagtggtgtga

SEQ ID NO: 57566 - DNA, 15 bp, Homo sapiens
gagtacagtggtgtg

SEQ ID NO: 57567 - DNA, 15 bp, Homo sapiens
ggagtacagtggtgt

SEQ ID NO: 57568 - DNA, 15 bp, Homo sapiens
tggagtacagtggtg

SEQ ID NO: 57569 - DNA, 15 bp, Homo sapiens
ctggagtacagtggt

SEQ ID NO: 57570 - DNA, 15 bp, Homo sapiens
ccaggctggagtaca

SEQ ID NO: 57571 - DNA, 15 bp, Homo sapiens
cccaggctggagtac

SEQ ID NO: 57572 - DNA, 15 bp, Homo sapiens
gcccaggctggagta

SEQ ID NO: 57573 - DNA, 15 bp, Homo sapiens
ggtctcgctctgtcg

SEQ ID NO: 57574 - DNA, 15 bp, Homo sapiens
cggtctcgctctgtc

SEQ ID NO: 57575 - DNA, 15 bp, Homo sapiens
acggtctcgctctgt

SEQ ID NO: 57576 - DNA, 15 bp, Homo sapiens
cacggtctcgctctg

SEQ ID NO: 57577 - DNA, 15 bp, Homo sapiens
acacggtctcgctct

SEQ ID NO: 57578 - DNA, 15 bp, Homo sapiens
gacacggtctcgctc

SEQ ID NO: 57579 - DNA, 15 bp, Homo sapiens
agacacggtctcgct

SEQ ID NO: 57580 - DNA, 15 bp, Homo sapiens
gagacacggtctcgc

SEQ ID NO: 57581 - DNA, 15 bp, Homo sapiens
tgagacacggtctcg

SEQ ID NO: 57582 - DNA, 15 bp, Homo sapiens
ttgagacacggtctc

SEQ ID NO: 57583 - DNA, 15 bp, Homo sapiens
tttgagacacggtct

SEQ ID NO: 57584 - DNA, 15 bp, Homo sapiens
ttttgagacacggtc

SEQ ID NO: 57585 - DNA, 15 bp, Homo sapiens
tttttgagacacggt

SEQ ID NO: 57586 - DNA, 15 bp, Homo sapiens
ctttttgagacacgg

SEQ ID NO: 57587 - DNA, 15 bp, Homo sapiens
tctttttgagacacg

SEQ ID NO: 57588 - DNA, 15 bp, Homo sapiens
ttctttttgagacac

SEQ ID NO: 57589 - DNA, 15 bp, Homo sapiens
tttctttttgagaca

SEQ ID NO: 57590 - DNA, 15 bp, Homo sapiens
ttttctttttgagac

SEQ ID NO: 57591 - DNA, 15 bp, Homo sapiens
tttttctttttgaga

SEQ ID NO: 57592 - DNA, 15 bp, Homo sapiens
ttttttctttttgag

SEQ ID NO: 57593 - DNA, 15 bp, Homo sapiens
cttttttctttttga

SEQ ID NO: 57594 - DNA, 15 bp, Homo sapiens
tcttttttctttttg

SEQ ID NO: 57595 - DNA, 15 bp, Homo sapiens
ttcttttttcttttt

SEQ ID NO: 57596 - DNA, 15 bp, Homo sapiens
tttcttttttctttt

SEQ ID NO: 57597 - DNA, 15 bp, Homo sapiens
ctttcttttttcttt

SEQ ID NO: 57598 - DNA, 15 bp, Homo sapiens
actttcttttttctt

SEQ ID NO: 57599 - DNA, 15 bp, Homo sapiens
tactttcttttttct

SEQ ID NO: 57600 - DNA, 15 bp, Homo sapiens
atactttcttttttc

SEQ ID NO: 57601 - DNA, 15 bp, Homo sapiens
tatactttctttttt

SEQ ID NO: 57602 - DNA, 15 bp, Homo sapiens
ttatactttcttttt

SEQ ID NO: 57603 - DNA, 15 bp, Homo sapiens
tttatactttctttt

SEQ ID NO: 57604 - DNA, 15 bp, Homo sapiens
atttatactttcttt

SEQ ID NO: 57605 - DNA, 15 bp, Homo sapiens
aatttatactttctt

SEQ ID NO: 57606 - DNA, 15 bp, Homo sapiens
aaatttatactttct

SEQ ID NO: 57607 - DNA, 15 bp, Homo sapiens
taaatttatactttc

SEQ ID NO: 57608 - DNA, 15 bp, Homo sapiens
gtaaatttatacttt

SEQ ID NO: 57609 - DNA, 15 bp, Homo sapiens
tgtaaatttatactt

SEQ ID NO: 57610 - DNA, 15 bp, Homo sapiens
gtgtaaatttatact

SEQ ID NO: 57611 - DNA, 15 bp, Homo sapiens
tgtgtaaatttatac

SEQ ID NO: 57612 - DNA, 15 bp, Homo sapiens
ttgtgtaaatttata

SEQ ID NO: 57613 - DNA, 15 bp, Homo sapiens
tttgtgtaaatttat

SEQ ID NO: 57614 - DNA, 15 bp, Homo sapiens
ttttgtgtaaattta

SEQ ID NO: 57615 - DNA, 15 bp, Homo sapiens
tttttgtgtaaattt

SEQ ID NO: 57616 - DNA, 15 bp, Homo sapiens
gtttttgtgtaaatt

SEQ ID NO: 57617 - DNA, 15 bp, Homo sapiens
tgtttttgtgtaaat

SEQ ID NO: 57618 - DNA, 15 bp, Homo sapiens
ttgtttttgtgtaaa

SEQ ID NO: 57619 - DNA, 15 bp, Homo sapiens
attgtttttgtgtaa

SEQ ID NO: 57620 - DNA, 15 bp, Homo sapiens
tattgtttttgtgta

SEQ ID NO: 57621 - DNA, 15 bp, Homo sapiens
ttattgtttttgtgt

SEQ ID NO: 57622 - DNA, 15 bp, Homo sapiens
tttattgtttttgtg

SEQ ID NO: 57623 - DNA, 15 bp, Homo sapiens
ttttattgtttttgt

SEQ ID NO: 57624 - DNA, 15 bp, Homo sapiens
attttattgtttttg

SEQ ID NO: 57625 - DNA, 15 bp, Homo sapiens
tattttattgttttt

SEQ ID NO: 57626 - DNA, 15 bp, Homo sapiens
ttattttattgtttt

SEQ ID NO: 57627 - DNA, 15 bp, Homo sapiens
attattttattgttt

SEQ ID NO: 57628 - DNA, 15 bp, Homo sapiens
gattattttattgtt

SEQ ID NO: 57629 - DNA, 15 bp, Homo sapiens
ggattattttattgt

SEQ ID NO: 57630 - DNA, 15 bp, Homo sapiens
gggattattttattg

SEQ ID NO: 57631 - DNA, 15 bp, Homo sapiens
tgggattattttatt

SEQ ID NO: 57632 - DNA, 15 bp, Homo sapiens
ctgggattattttat

SEQ ID NO: 57633 - DNA, 15 bp, Homo sapiens
actgggattatttta

SEQ ID NO: 57634 - DNA, 15 bp, Homo sapiens
tactgggattatttt

SEQ ID NO: 57635 - DNA, 15 bp, Homo sapiens
ttactgggattattt

SEQ ID NO: 57636 - DNA, 15 bp, Homo sapiens
attactgggattatt

SEQ ID NO: 57637 - DNA, 15 bp, Homo sapiens
aattactgggattat

SEQ ID NO: 57638 - DNA, 15 bp, Homo sapiens
gaattactgggatta

SEQ ID NO: 57639 - DNA, 15 bp, Homo sapiens
ggaattactgggatt

SEQ ID NO: 57640 - DNA, 15 bp, Homo sapiens
tggaattactgggat

SEQ ID NO: 57641 - DNA, 15 bp, Homo sapiens
gtggaattactggga

SEQ ID NO: 57642 - DNA, 15 bp, Homo sapiens
ggtggaattactggg

SEQ ID NO: 57643 - DNA, 15 bp, Homo sapiens
tggtggaattactgg

SEQ ID NO: 57644 - DNA, 15 bp, Homo sapiens
gtggtggaattactg

SEQ ID NO: 57645 - DNA, 15 bp, Homo sapiens
agtggtggaattact

SEQ ID NO: 57646 - DNA, 15 bp, Homo sapiens
aagtggtggaattac

SEQ ID NO: 57647 - DNA, 15 bp, Homo sapiens
caagtggtggaatta

SEQ ID NO: 57648 - DNA, 15 bp, Homo sapiens
ccaagtggtggaatt

SEQ ID NO: 57649 - DNA, 15 bp, Homo sapiens
tccaagtggtggaat

SEQ ID NO: 57650 - DNA, 15 bp, Homo sapiens
ctccaagtggtggaa

SEQ ID NO: 57651 - DNA, 15 bp, Homo sapiens
tctccaagtggtgga

SEQ ID NO: 57652 - DNA, 15 bp, Homo sapiens
atctccaagtggtgg

SEQ ID NO: 57653 - DNA, 15 bp, Homo sapiens
catctccaagtggtg

SEQ ID NO: 57654 - DNA, 15 bp, Homo sapiens
tcatctccaagtggt

SEQ ID NO: 57655 - DNA, 15 bp, Homo sapiens
atcatctccaagtgg

SEQ ID NO: 57656 - DNA, 15 bp, Homo sapiens
gatcatctccaagtg

SEQ ID NO: 57657 - DNA, 15 bp, Homo sapiens
tgatcatctccaagt

SEQ ID NO: 57658 - DNA, 15 bp, Homo sapiens
gtgatcatctccaag

SEQ ID NO: 57659 - DNA, 15 bp, Homo sapiens
ggtgatcatctccaa

SEQ ID NO: 57660 - DNA, 15 bp, Homo sapiens
tggtgatcatctcca

SEQ ID NO: 57661 - DNA, 15 bp, Homo sapiens
atggtgatcatctcc

SEQ ID NO: 57662 - DNA, 15 bp, Homo sapiens
tatggtgatcatctc

SEQ ID NO: 57663 - DNA, 15 bp, Homo sapiens
ttatggtgatcatct

SEQ ID NO: 57664 - DNA, 15 bp, Homo sapiens
tttatggtgatcatc

SEQ ID NO: 57665 - DNA, 15 bp, Homo sapiens
ttttatggtgatcat

SEQ ID NO: 57666 - DNA, 15 bp, Homo sapiens
gttttatggtgatca

SEQ ID NO: 57667 - DNA, 15 bp, Homo sapiens
agttttatggtgatc

SEQ ID NO: 57668 - DNA, 15 bp, Homo sapiens
gagttttatggtgat

SEQ ID NO: 57669 - DNA, 15 bp, Homo sapiens
ggagttttatggtga

SEQ ID NO: 57670 - DNA, 15 bp, Homo sapiens
tggagttttatggtg

SEQ ID NO: 57671 - DNA, 15 bp, Homo sapiens
gtggagttttatggt

SEQ ID NO: 57672 - DNA, 15 bp, Homo sapiens
ggtggagttttatgg

SEQ ID NO: 57673 - DNA, 15 bp, Homo sapiens
tggtggagttttatg

SEQ ID NO: 57674 - DNA, 15 bp, Homo sapiens
ctggtggagttttat

SEQ ID NO: 57675 - DNA, 15 bp, Homo sapiens
cctggtggagtttta

SEQ ID NO: 57676 - DNA, 15 bp, Homo sapiens
gcctggtggagtttt

SEQ ID NO: 57677 - DNA, 15 bp, Homo sapiens
tgcctggtggagttt

SEQ ID NO: 57678 - DNA, 15 bp, Homo sapiens
atgcctggtggagtt

SEQ ID NO: 57679 - DNA, 15 bp, Homo sapiens
tatgcctggtggagt

SEQ ID NO: 57680 - DNA, 15 bp, Homo sapiens
atatgcctggtggag

SEQ ID NO: 57681 - DNA, 15 bp, Homo sapiens
catatgcctggtgga

SEQ ID NO: 57682 - DNA, 15 bp, Homo sapiens
acatatgcctggtgg

SEQ ID NO: 57683 - DNA, 15 bp, Homo sapiens
cacatatgcctggtg

SEQ ID NO: 57684 - DNA, 15 bp, Homo sapiens
gcacatatgcctggt

SEQ ID NO: 57685 - DNA, 15 bp, Homo sapiens
cgcacatatgcctgg

SEQ ID NO: 57686 - DNA, 15 bp, Homo sapiens
acgcacatatgcctg

SEQ ID NO: 57687 - DNA, 15 bp, Homo sapiens
tacgcacatatgcct

SEQ ID NO: 57688 - DNA, 15 bp, Homo sapiens
atacgcacatatgcc

SEQ ID NO: 57689 - DNA, 15 bp, Homo sapiens
tatacgcacatatgc

SEQ ID NO: 57690 - DNA, 15 bp, Homo sapiens
atatacgcacatatg

SEQ ID NO: 57691 - DNA, 15 bp, Homo sapiens
tatatacgcacatat

SEQ ID NO: 57692 - DNA, 15 bp, Homo sapiens
atatatacgcacata

SEQ ID NO: 57693 - DNA, 15 bp, Homo sapiens
tatatatacgcacat

SEQ ID NO: 57694 - DNA, 15 bp, Homo sapiens
gtatatatacgcaca

SEQ ID NO: 57695 - DNA, 15 bp, Homo sapiens
tgtatatatacgcac

SEQ ID NO: 57696 - DNA, 15 bp, Homo sapiens
gtgtatatatacgca

SEQ ID NO: 57697 - DNA, 15 bp, Homo sapiens
cgtgtatatatacgc

SEQ ID NO: 57698 - DNA, 15 bp, Homo sapiens
acgtgtatatatacg

SEQ ID NO: 57699 - DNA, 15 bp, Homo sapiens
cacgtgtatatatac

SEQ ID NO: 57700 - DNA, 15 bp, Homo sapiens
acacgtgtatatata

SEQ ID NO: 57701 - DNA, 15 bp, Homo sapiens
tacacgtgtatatat

SEQ ID NO: 57702 - DNA, 15 bp, Homo sapiens
atacacgtgtatata

SEQ ID NO: 57703 - DNA, 15 bp, Homo sapiens
aatacacgtgtatat

SEQ ID NO: 57704 - DNA, 15 bp, Homo sapiens
aaatacacgtgtata

SEQ ID NO: 57705 - DNA, 15 bp, Homo sapiens
aaaatacacgtgtat

SEQ ID NO: 57706 - DNA, 15 bp, Homo sapiens
taaaatacacgtgta

SEQ ID NO: 57707 - DNA, 15 bp, Homo sapiens
ataaaatacacgtgt

SEQ ID NO: 57708 - DNA, 15 bp, Homo sapiens
tataaaatacacgtg

SEQ ID NO: 57709 - DNA, 15 bp, Homo sapiens
ttataaaatacacgt

SEQ ID NO: 57710 - DNA, 15 bp, Homo sapiens
tttataaaatacacg

SEQ ID NO: 57711 - DNA, 15 bp, Homo sapiens
ttttataaaatacac

SEQ ID NO: 57712 - DNA, 15 bp, Homo sapiens
attttataaaataca

SEQ ID NO: 57713 - DNA, 15 bp, Homo sapiens
cattttataaaatac

SEQ ID NO: 57714 - DNA, 15 bp, Homo sapiens
acattttataaaata

SEQ ID NO: 57715 - DNA, 15 bp, Homo sapiens
cacattttataaaat

SEQ ID NO: 57716 - DNA, 15 bp, Homo sapiens
tcacattttataaaa

SEQ ID NO: 57717 - DNA, 15 bp, Homo sapiens
atcacattttataaa

SEQ ID NO: 57718 - DNA, 15 bp, Homo sapiens
gatcacattttataa

SEQ ID NO: 57719 - DNA, 15 bp, Homo sapiens
tgatcacattttata

SEQ ID NO: 57720 - DNA, 15 bp, Homo sapiens
atgatcacattttat

SEQ ID NO: 57721 - DNA, 15 bp, Homo sapiens
tatgatcacatttta

SEQ ID NO: 57722 - DNA, 15 bp, Homo sapiens
ttatgatcacatttt

SEQ ID NO: 57723 - DNA, 15 bp, Homo sapiens
attatgatcacattt

SEQ ID NO: 57724 - DNA, 15 bp, Homo sapiens
aattatgatcacatt

SEQ ID NO: 57725 - DNA, 15 bp, Homo sapiens
taattatgatcacat

SEQ ID NO: 57726 - DNA, 15 bp, Homo sapiens
gtaattatgatcaca

SEQ ID NO: 57727 - DNA, 15 bp, Homo sapiens
tgtaattatgatcac

SEQ ID NO: 57728 - DNA, 15 bp, Homo sapiens
gtgtaattatgatca

SEQ ID NO: 57729 - DNA, 15 bp, Homo sapiens
agtgtaattatgatc

SEQ ID NO: 57730 - DNA, 15 bp, Homo sapiens
cagtgtaattatgat

SEQ ID NO: 57731 - DNA, 15 bp, Homo sapiens
acagtgtaattatga

SEQ ID NO: 57732 - DNA, 15 bp, Homo sapiens
aacagtgtaattatg

SEQ ID NO: 57733 - DNA, 15 bp, Homo sapiens
aaacagtgtaattat

SEQ ID NO: 57734 - DNA, 15 bp, Homo sapiens
aaaacagtgtaatta

SEQ ID NO: 57735 - DNA, 15 bp, Homo sapiens
caaaacagtgtaatt

SEQ ID NO: 57736 - DNA, 15 bp, Homo sapiens
gcaaaacagtgtaat

SEQ ID NO: 57737 - DNA, 15 bp, Homo sapiens
agcaaaacagtgtaa

SEQ ID NO: 57738 - DNA, 15 bp, Homo sapiens
aagcaaaacagtgta

SEQ ID NO: 57739 - DNA, 15 bp, Homo sapiens
aaagcaaaacagtgt

SEQ ID NO: 57740 - DNA, 15 bp, Homo sapiens
aaaagcaaaacagtg

SEQ ID NO: 57741 - DNA, 15 bp, Homo sapiens
aaaaagcaaaacagt

SEQ ID NO: 57742 - DNA, 15 bp, Homo sapiens
aaaaaagcaaaacag

SEQ ID NO: 57743 - DNA, 15 bp, Homo sapiens
gaaaaaagcaaaaca

SEQ ID NO: 57744 - DNA, 15 bp, Homo sapiens
ggaaaaaagcaaaac

SEQ ID NO: 57745 - DNA, 15 bp, Homo sapiens
aggaaaaaagcaaaa

SEQ ID NO: 57746 - DNA, 15 bp, Homo sapiens
aaggaaaaaagcaaa

SEQ ID NO: 57747 - DNA, 15 bp, Homo sapiens
taaggaaaaaagcaa

SEQ ID NO: 57748 - DNA, 15 bp, Homo sapiens
ttaaggaaaaaagca

SEQ ID NO: 57749 - DNA, 15 bp, Homo sapiens
cttaaggaaaaaagc

SEQ ID NO: 57750 - DNA, 15 bp, Homo sapiens
tcttaaggaaaaaag

SEQ ID NO: 57751 - DNA, 15 bp, Homo sapiens
atcttaaggaaaaaa

SEQ ID NO: 57752 - DNA, 15 bp, Homo sapiens
tatcttaaggaaaaa

SEQ ID NO: 57753 - DNA, 15 bp, Homo sapiens
atatcttaaggaaaa

SEQ ID NO: 57754 - DNA, 15 bp, Homo sapiens
aatatcttaaggaaa

SEQ ID NO: 57755 - DNA, 15 bp, Homo sapiens
taatatcttaaggaa

SEQ ID NO: 57756 - DNA, 15 bp, Homo sapiens
gtaatatcttaagga

SEQ ID NO: 57757 - DNA, 15 bp, Homo sapiens
tgtaatatcttaagg

SEQ ID NO: 57758 - DNA, 15 bp, Homo sapiens
atgtaatatcttaag

SEQ ID NO: 57759 - DNA, 15 bp, Homo sapiens
tatgtaatatcttaa

SEQ ID NO: 57760 - DNA, 15 bp, Homo sapiens
gtatgtaatatctta

SEQ ID NO: 57761 - DNA, 15 bp, Homo sapiens
tgtatgtaatatctt

SEQ ID NO: 57762 - DNA, 15 bp, Homo sapiens
atgtatgtaatatct

SEQ ID NO: 57763 - DNA, 15 bp, Homo sapiens
aatgtatgtaatatc

SEQ ID NO: 57764 - DNA, 15 bp, Homo sapiens
aaatgtatgtaatat

SEQ ID NO: 57765 - DNA, 15 bp, Homo sapiens
aaaatgtatgtaata

SEQ ID NO: 57766 - DNA, 15 bp, Homo sapiens
aaaaatgtatgtaat

SEQ ID NO: 57767 - DNA, 15 bp, Homo sapiens
gaaaaatgtatgtaa

SEQ ID NO: 57768 - DNA, 15 bp, Homo sapiens
ggaaaaatgtatgta

SEQ ID NO: 57769 - DNA, 15 bp, Homo sapiens
tggaaaaatgtatgt

SEQ ID NO: 57770 - DNA, 15 bp, Homo sapiens
gtggaaaaatgtatg

SEQ ID NO: 57771 - DNA, 15 bp, Homo sapiens
tgtggaaaaatgtat

SEQ ID NO: 57772 - DNA, 15 bp, Homo sapiens
atgtggaaaaatgta

SEQ ID NO: 57773 - DNA, 15 bp, Homo sapiens
gatgtggaaaaatgt

SEQ ID NO: 57774 - DNA, 15 bp, Homo sapiens
cgatgtggaaaaatg

SEQ ID NO: 57775 - DNA, 15 bp, Homo sapiens
acgatgtggaaaaat

SEQ ID NO: 57776 - DNA, 15 bp, Homo sapiens
aacgatgtggaaaaa

SEQ ID NO: 57777 - DNA, 15 bp, Homo sapiens
taacgatgtggaaaa

SEQ ID NO: 57778 - DNA, 15 bp, Homo sapiens
ttaacgatgtggaaa

SEQ ID NO: 57779 - DNA, 15 bp, Homo sapiens
tttaacgatgtggaa

SEQ ID NO: 57780 - DNA, 15 bp, Homo sapiens
atttaacgatgtgga

SEQ ID NO: 57781 - DNA, 15 bp, Homo sapiens
aatttaacgatgtgg

SEQ ID NO: 57782 - DNA, 15 bp, Homo sapiens
taatttaacgatgtg

SEQ ID NO: 57783 - DNA, 15 bp, Homo sapiens
gtaatttaacgatgt

SEQ ID NO: 57784 - DNA, 15 bp, Homo sapiens
tgtaatttaacgatg

SEQ ID NO: 57785 - DNA, 15 bp, Homo sapiens
ctgtaatttaacgat

SEQ ID NO: 57786 - DNA, 15 bp, Homo sapiens
actgtaatttaacga

SEQ ID NO: 57787 - DNA, 15 bp, Homo sapiens
cactgtaatttaacg

SEQ ID NO: 57788 - DNA, 15 bp, Homo sapiens
gcactgtaatttaac

SEQ ID NO: 57789 - DNA, 15 bp, Homo sapiens
agcactgtaatttaa

SEQ ID NO: 57790 - DNA, 15 bp, Homo sapiens
cagcactgtaattta

SEQ ID NO: 57791 - DNA, 15 bp, Homo sapiens
acagcactgtaattt

SEQ ID NO: 57792 - DNA, 15 bp, Homo sapiens
aacagcactgtaatt

SEQ ID NO: 57793 - DNA, 15 bp, Homo sapiens
aaacagcactgtaat

SEQ ID NO: 57794 - DNA, 15 bp, Homo sapiens
aaaacagcactgtaa

SEQ ID NO: 57795 - DNA, 15 bp, Homo sapiens
gaaaacagcactgta

SEQ ID NO: 57796 - DNA, 15 bp, Homo sapiens
ggaaaacagcactgt

SEQ ID NO: 57797 - DNA, 15 bp, Homo sapiens
aggaaaacagcactg

SEQ ID NO: 57798 - DNA, 15 bp, Homo sapiens
caggaaaacagcact

SEQ ID NO: 57799 - DNA, 15 bp, Homo sapiens
ccaggaaaacagcac

SEQ ID NO: 57800 - DNA, 15 bp, Homo sapiens
accaggaaaacagca

SEQ ID NO: 57801 - DNA, 15 bp, Homo sapiens
caccaggaaaacagc

SEQ ID NO: 57802 - DNA, 15 bp, Homo sapiens
ccaccaggaaaacag

SEQ ID NO: 57803 - DNA, 15 bp, Homo sapiens
gccaccaggaaaaca

SEQ ID NO: 57804 - DNA, 15 bp, Homo sapiens
agccaccaggaaaac

SEQ ID NO: 57805 - DNA, 15 bp, Homo sapiens
aagccaccaggaaaa

SEQ ID NO: 57806 - DNA, 15 bp, Homo sapiens
aaagccaccaggaaa

SEQ ID NO: 57807 - DNA, 15 bp, Homo sapiens
gaaagccaccaggaa

SEQ ID NO: 57808 - DNA, 15 bp, Homo sapiens
ggaaagccaccagga

SEQ ID NO: 57809 - DNA, 15 bp, Homo sapiens
aggaaagccaccagg

SEQ ID NO: 57810 - DNA, 15 bp, Homo sapiens
aaggaaagccaccag

SEQ ID NO: 57811 - DNA, 15 bp, Homo sapiens
aaaggaaagccacca

SEQ ID NO: 57812 - DNA, 15 bp, Homo sapiens
taaaggaaagccacc

SEQ ID NO: 57813 - DNA, 15 bp, Homo sapiens
ttaaaggaaagccac

SEQ ID NO: 57814 - DNA, 15 bp, Homo sapiens
gttaaaggaaagcca

SEQ ID NO: 57815 - DNA, 15 bp, Homo sapiens
tgttaaaggaaagcc

SEQ ID NO: 57816 - DNA, 15 bp, Homo sapiens
ctgttaaaggaaagc

SEQ ID NO: 57817 - DNA, 15 bp, Homo sapiens
tctgttaaaggaaag

SEQ ID NO: 57818 - DNA, 15 bp, Homo sapiens
atctgttaaaggaaa

SEQ ID NO: 57819 - DNA, 15 bp, Homo sapiens
aatctgttaaaggaa

SEQ ID NO: 57820 - DNA, 15 bp, Homo sapiens
caatctgttaaagga

SEQ ID NO: 57821 - DNA, 15 bp, Homo sapiens
tcaatctgttaaagg

SEQ ID NO: 57822 - DNA, 15 bp, Homo sapiens
ttcaatctgttaaag

SEQ ID NO: 57823 - DNA, 15 bp, Homo sapiens
cttcaatctgttaaa

SEQ ID NO: 57824 - DNA, 15 bp, Homo sapiens
acttcaatctgttaa

SEQ ID NO: 57825 - DNA, 15 bp, Homo sapiens
aacttcaatctgtta

SEQ ID NO: 57826 - DNA, 15 bp, Homo sapiens
gaacttcaatctgtt

SEQ ID NO: 57827 - DNA, 15 bp, Homo sapiens
tgaacttcaatctgt

SEQ ID NO: 57828 - DNA, 15 bp, Homo sapiens
atgaacttcaatctg

SEQ ID NO: 57829 - DNA, 15 bp, Homo sapiens
catgaacttcaatct

SEQ ID NO: 57830 - DNA, 15 bp, Homo sapiens
acatgaacttcaatc

SEQ ID NO: 57831 - DNA, 15 bp, Homo sapiens
aacatgaacttcaat

SEQ ID NO: 57832 - DNA, 15 bp, Homo sapiens
taacatgaacttcaa

SEQ ID NO: 57833 - DNA, 15 bp, Homo sapiens
ttaacatgaacttca

SEQ ID NO: 57834 - DNA, 15 bp, Homo sapiens
attaacatgaacttc

SEQ ID NO: 57835 - DNA, 15 bp, Homo sapiens
tattaacatgaactt

SEQ ID NO: 57836 - DNA, 15 bp, Homo sapiens
gtattaacatgaact

SEQ ID NO: 57837 - DNA, 15 bp, Homo sapiens
tgtattaacatgaac

SEQ ID NO: 57838 - DNA, 15 bp, Homo sapiens
ctgtattaacatgaa

SEQ ID NO: 57839 - DNA, 15 bp, Homo sapiens
actgtattaacatga

SEQ ID NO: 57840 - DNA, 15 bp, Homo sapiens
aactgtattaacatg

SEQ ID NO: 57841 - DNA, 15 bp, Homo sapiens
caactgtattaacat

SEQ ID NO: 57842 - DNA, 15 bp, Homo sapiens
gcaactgtattaaca

SEQ ID NO: 57843 - DNA, 15 bp, Homo sapiens
ggcaactgtattaac

SEQ ID NO: 57844 - DNA, 15 bp, Homo sapiens
tggcaactgtattaa

SEQ ID NO: 57845 - DNA, 15 bp, Homo sapiens
ctggcaactgtatta

SEQ ID NO: 57846 - DNA, 15 bp, Homo sapiens
tctggcaactgtatt

SEQ ID NO: 57847 - DNA, 15 bp, Homo sapiens
ctctggcaactgtat

SEQ ID NO: 57848 - DNA, 15 bp, Homo sapiens
cctctggcaactgta

SEQ ID NO: 57849 - DNA, 15 bp, Homo sapiens
gcctctggcaactgt

SEQ ID NO: 57850 - DNA, 15 bp, Homo sapiens
agcctctggcaactg

SEQ ID NO: 57851 - DNA, 15 bp, Homo sapiens
cagcctctggcaact

SEQ ID NO: 57852 - DNA, 15 bp, Homo sapiens
acagcctctggcaac

SEQ ID NO: 57853 - DNA, 15 bp, Homo sapiens
cacagcctctggcaa

SEQ ID NO: 57854 - DNA, 15 bp, Homo sapiens
ccacagcctctggca

SEQ ID NO: 57855 - DNA, 15 bp, Homo sapiens
cccacagcctctggc

SEQ ID NO: 57856 - DNA, 15 bp, Homo sapiens
gcccacagcctctgg

SEQ ID NO: 57857 - DNA, 15 bp, Homo sapiens
agcccacagcctctg

SEQ ID NO: 57858 - DNA, 15 bp, Homo sapiens
aagcccacagcctct

SEQ ID NO: 57859 - DNA, 15 bp, Homo sapiens
aaagcccacagcctc

SEQ ID NO: 57860 - DNA, 15 bp, Homo sapiens
gaaagcccacagcct

SEQ ID NO: 57861 - DNA, 15 bp, Homo sapiens
tgaaagcccacagcc

SEQ ID NO: 57862 - DNA, 15 bp, Homo sapiens
gtgaaagcccacagc

SEQ ID NO: 57863 - DNA, 15 bp, Homo sapiens
agtgaaagcccacag

SEQ ID NO: 57864 - DNA, 15 bp, Homo sapiens
cagtgaaagcccaca

SEQ ID NO: 57865 - DNA, 15 bp, Homo sapiens
acagtgaaagcccac

SEQ ID NO: 57866 - DNA, 15 bp, Homo sapiens
gacagtgaaagccca

SEQ ID NO: 57867 - DNA, 15 bp, Homo sapiens
tgacagtgaaagccc

SEQ ID NO: 57868 - DNA, 15 bp, Homo sapiens
gtgacagtgaaagcc

SEQ ID NO: 57869 - DNA, 15 bp, Homo sapiens
ggtgacagtgaaagc

SEQ ID NO: 57870 - DNA, 15 bp, Homo sapiens
tggtgacagtgaaag

SEQ ID NO: 57871 - DNA, 15 bp, Homo sapiens
ctggtgacagtgaaa

SEQ ID NO: 57872 - DNA, 15 bp, Homo sapiens
cctggtgacagtgaa

SEQ ID NO: 57873 - DNA, 15 bp, Homo sapiens
tcctggtgacagtga

SEQ ID NO: 57874 - DNA, 15 bp, Homo sapiens
ctcctggtgacagtg

SEQ ID NO: 57875 - DNA, 15 bp, Homo sapiens
actcctggtgacagt

SEQ ID NO: 57876 - DNA, 15 bp, Homo sapiens
gactcctggtgacag

SEQ ID NO: 57877 - DNA, 15 bp, Homo sapiens
tgactcctggtgaca

SEQ ID NO: 57878 - DNA, 15 bp, Homo sapiens
gtgactcctggtgac

SEQ ID NO: 57879 - DNA, 15 bp, Homo sapiens
agtgactcctggtga

SEQ ID NO: 57880 - DNA, 15 bp, Homo sapiens
gagtgactcctggtg

SEQ ID NO: 57881 - DNA, 15 bp, Homo sapiens
ggagtgactcctggt

SEQ ID NO: 57882 - DNA, 15 bp, Homo sapiens
aggagtgactcctgg

SEQ ID NO: 57883 - DNA, 15 bp, Homo sapiens
taggagtgactcctg

SEQ ID NO: 57884 - DNA, 15 bp, Homo sapiens
ctaggagtgactcct

SEQ ID NO: 57885 - DNA, 15 bp, Homo sapiens
cctaggagtgactcc

SEQ ID NO: 57886 - DNA, 15 bp, Homo sapiens
ccctaggagtgactc

SEQ ID NO: 57887 - DNA, 15 bp, Homo sapiens
gccctaggagtgact

SEQ ID NO: 57888 - DNA, 15 bp, Homo sapiens
ggccctaggagtgac

SEQ ID NO: 57889 - DNA, 15 bp, Homo sapiens
aggccctaggagtga

SEQ ID NO: 57890 - DNA, 15 bp, Homo sapiens
gaggccctaggagtg

SEQ ID NO: 57891 - DNA, 15 bp, Homo sapiens
agaggccctaggagt

SEQ ID NO: 57892 - DNA, 15 bp, Homo sapiens
aagaggccctaggag

SEQ ID NO: 57893 - DNA, 15 bp, Homo sapiens
gaagaggccctagga

SEQ ID NO: 57894 - DNA, 15 bp, Homo sapiens
tgaagaggccctagg

SEQ ID NO: 57895 - DNA, 15 bp, Homo sapiens
ctgaagaggccctag

SEQ ID NO: 57896 - DNA, 15 bp, Homo sapiens
tctgaagaggcccta

SEQ ID NO: 57897 - DNA, 15 bp, Homo sapiens
ctctgaagaggccct

SEQ ID NO: 57898 - DNA, 15 bp, Homo sapiens
gctctgaagaggccc

SEQ ID NO: 57899 - DNA, 15 bp, Homo sapiens
tgctctgaagaggcc

SEQ ID NO: 57900 - DNA, 15 bp, Homo sapiens
ttgctctgaagaggc

SEQ ID NO: 57901 - DNA, 15 bp, Homo sapiens
cttgctctgaagagg

SEQ ID NO: 57902 - DNA, 15 bp, Homo sapiens
ccttgctctgaagag

SEQ ID NO: 57903 - DNA, 15 bp, Homo sapiens
gccttgctctgaaga

SEQ ID NO: 57904 - DNA, 15 bp, Homo sapiens
ggccttgctctgaag

SEQ ID NO: 57905 - DNA, 15 bp, Homo sapiens
aggccttgctctgaa

SEQ ID NO: 57906 - DNA, 15 bp, Homo sapiens
aaggccttgctctga

SEQ ID NO: 57907 - DNA, 15 bp, Homo sapiens
taaggccttgctctg

SEQ ID NO: 57908 - DNA, 15 bp, Homo sapiens
ataaggccttgctct

SEQ ID NO: 57909 - DNA, 15 bp, Homo sapiens
cataaggccttgctc

SEQ ID NO: 57910 - DNA, 15 bp, Homo sapiens
acataaggccttgct

SEQ ID NO: 57911 - DNA, 15 bp, Homo sapiens
gacataaggccttgc

SEQ ID NO: 57912 - DNA, 15 bp, Homo sapiens
ggacataaggccttg

SEQ ID NO: 57913 - DNA, 15 bp, Homo sapiens
aggacataaggcctt

SEQ ID NO: 57914 - DNA, 15 bp, Homo sapiens
caggacataaggcct

SEQ ID NO: 57915 - DNA, 15 bp, Homo sapiens
tcaggacataaggcc

SEQ ID NO: 57916 - DNA, 15 bp, Homo sapiens
ttcaggacataaggc

SEQ ID NO: 57917 - DNA, 15 bp, Homo sapiens
cttcaggacataagg

SEQ ID NO: 57918 - DNA, 15 bp, Homo sapiens
gcttcaggacataag

SEQ ID NO: 57919 - DNA, 15 bp, Homo sapiens
tgcttcaggacataa

SEQ ID NO: 57920 - DNA, 15 bp, Homo sapiens
atgcttcaggacata

SEQ ID NO: 57921 - DNA, 15 bp, Homo sapiens
aatgcttcaggacat

SEQ ID NO: 57922 - DNA, 15 bp, Homo sapiens
caatgcttcaggaca

SEQ ID NO: 57923 - DNA, 15 bp, Homo sapiens
gcaatgcttcaggac

SEQ ID NO: 57924 - DNA, 15 bp, Homo sapiens
ggcaatgcttcagga

SEQ ID NO: 57925 - DNA, 15 bp, Homo sapiens
aggcaatgcttcagg

SEQ ID NO: 57926 - DNA, 15 bp, Homo sapiens
aaggcaatgcttcag

SEQ ID NO: 57927 - DNA, 15 bp, Homo sapiens
aaaggcaatgcttca

SEQ ID NO: 57928 - DNA, 15 bp, Homo sapiens
aaaaggcaatgcttc

SEQ ID NO: 57929 - DNA, 15 bp, Homo sapiens
aaaaaggcaatgctt

SEQ ID NO: 57930 - DNA, 15 bp, Homo sapiens
aaaaaaggcaatgct

SEQ ID NO: 57931 - DNA, 15 bp, Homo sapiens
aaaaaaaggcaatgc

SEQ ID NO: 57932 - DNA, 15 bp, Homo sapiens
aaaaaaaaggcaatg

SEQ ID NO: 57933 - DNA, 15 bp, Homo sapiens
aaaaaaaaaggcaat

SEQ ID NO: 57934 - DNA, 15 bp, Homo sapiens
aaaaaaaaaaggcaa

SEQ ID NO: 57935 - DNA, 15 bp, Homo sapiens
cctcaaaaaaaaaaa

SEQ ID NO: 57936 - DNA, 15 bp, Homo sapiens
acctcaaaaaaaaaa

SEQ ID NO: 57937 - DNA, 15 bp, Homo sapiens
cacctcaaaaaaaaa

SEQ ID NO: 57938 - DNA, 15 bp, Homo sapiens
ccacctcaaaaaaaa

SEQ ID NO: 57939 - DNA, 15 bp, Homo sapiens
tccacctcaaaaaaa

SEQ ID NO: 57940 - DNA, 15 bp, Homo sapiens
ctccacctcaaaaaa

SEQ ID NO: 57941 - DNA, 15 bp, Homo sapiens
actccacctcaaaaa

SEQ ID NO: 57942 - DNA, 15 bp, Homo sapiens
gactccacctcaaaa

SEQ ID NO: 57943 - DNA, 15 bp, Homo sapiens
agactccacctcaaa

SEQ ID NO: 57944 - DNA, 15 bp, Homo sapiens
gagactccacctcaa

SEQ ID NO: 57945 - DNA, 15 bp, Homo sapiens
tgagactccacctca

SEQ ID NO: 57946 - DNA, 15 bp, Homo sapiens
gtgagactccacctc

SEQ ID NO: 57947 - DNA, 15 bp, Homo sapiens
agtgagactccacct

SEQ ID NO: 57948 - DNA, 15 bp, Homo sapiens
gagtgagactccacc

SEQ ID NO: 57949 - DNA, 15 bp, Homo sapiens
agagtgagactccac

SEQ ID NO: 57950 - DNA, 15 bp, Homo sapiens
cagagtgagactcca

SEQ ID NO: 57951 - DNA, 15 bp, Homo sapiens
acagagtgagactcc

SEQ ID NO: 57952 - DNA, 15 bp, Homo sapiens
gacagagtgagactc

SEQ ID NO: 57953 - DNA, 15 bp, Homo sapiens
tgacagagtgagact

SEQ ID NO: 57954 - DNA, 15 bp, Homo sapiens
gtgacagagtgagac

SEQ ID NO: 57955 - DNA, 15 bp, Homo sapiens
agtgacagagtgaga

SEQ ID NO: 57956 - DNA, 15 bp, Homo sapiens
aagtgacagagtgag

SEQ ID NO: 57957 - DNA, 15 bp, Homo sapiens
taagtgacagagtga

SEQ ID NO: 57958 - DNA, 15 bp, Homo sapiens
ctaagtgacagagtg

SEQ ID NO: 57959 - DNA, 15 bp, Homo sapiens
gctaagtgacagagt

SEQ ID NO: 57960 - DNA, 15 bp, Homo sapiens
tgctaagtgacagag

SEQ ID NO: 57961 - DNA, 15 bp, Homo sapiens
ctgctaagtgacaga

SEQ ID NO: 57962 - DNA, 15 bp, Homo sapiens
cctgctaagtgacag

SEQ ID NO: 57963 - DNA, 15 bp, Homo sapiens
gcctgctaagtgaca

SEQ ID NO: 57964 - DNA, 15 bp, Homo sapiens
agcctgctaagtgac

SEQ ID NO: 57965 - DNA, 15 bp, Homo sapiens
cagcctgctaagtga

SEQ ID NO: 57966 - DNA, 15 bp, Homo sapiens
ccagcctgctaagtg

SEQ ID NO: 57967 - DNA, 15 bp, Homo sapiens
tccagcctgctaagt

SEQ ID NO: 57968 - DNA, 15 bp, Homo sapiens
ctccagcctgctaag

SEQ ID NO: 57969 - DNA, 15 bp, Homo sapiens
actccagcctgctaa

SEQ ID NO: 57970 - DNA, 15 bp, Homo sapiens
cactccagcctgcta

SEQ ID NO: 57971 - DNA, 15 bp, Homo sapiens
gcactccagcctgct

SEQ ID NO: 57972 - DNA, 15 bp, Homo sapiens
tgcactccagcctgc

SEQ ID NO: 57973 - DNA, 15 bp, Homo sapiens
ggccactgcactcca

SEQ ID NO: 57974 - DNA, 15 bp, Homo sapiens
gggccactgcactcc

SEQ ID NO: 57975 - DNA, 15 bp, Homo sapiens
tgggccactgcactc

SEQ ID NO: 57976 - DNA, 15 bp, Homo sapiens
ctgggccactgcact

SEQ ID NO: 57977 - DNA, 15 bp, Homo sapiens
actgggccactgcac

SEQ ID NO: 57978 - DNA, 15 bp, Homo sapiens
gactgggccactgca

SEQ ID NO: 57979 - DNA, 15 bp, Homo sapiens
agactgggccactgc

SEQ ID NO: 57980 - DNA, 15 bp, Homo sapiens
aagactgggccactg

SEQ ID NO: 57981 - DNA, 15 bp, Homo sapiens
caagactgggccact

SEQ ID NO: 57982 - DNA, 15 bp, Homo sapiens
ccaagactgggccac

SEQ ID NO: 57983 - DNA, 15 bp, Homo sapiens
gccaagactgggcca

SEQ ID NO: 57984 - DNA, 15 bp, Homo sapiens
agccaagactgggcc

SEQ ID NO: 57985 - DNA, 15 bp, Homo sapiens
gagccaagactgggc

SEQ ID NO: 57986 - DNA, 15 bp, Homo sapiens
tgagccaagactggg

SEQ ID NO: 57987 - DNA, 15 bp, Homo sapiens
gtgagccaagactgg

SEQ ID NO: 57988 - DNA, 15 bp, Homo sapiens
agtgagccaagactg

SEQ ID NO: 57989 - DNA, 15 bp, Homo sapiens
cagtgagccaagact

SEQ ID NO: 57990 - DNA, 15 bp, Homo sapiens
gcagtgagccaagac

SEQ ID NO: 57991 - DNA, 15 bp, Homo sapiens
aaacccaggaggcgg

SEQ ID NO: 57992 - DNA, 15 bp, Homo sapiens
taaacccaggaggcg

SEQ ID NO: 57993 - DNA, 15 bp, Homo sapiens
ttaaacccaggaggc

SEQ ID NO: 57994 - DNA, 15 bp, Homo sapiens
tttaaacccaggagg

SEQ ID NO: 57995 - DNA, 15 bp, Homo sapiens
atttaaacccaggag

SEQ ID NO: 57996 - DNA, 15 bp, Homo sapiens
catttaaacccagga

SEQ ID NO: 57997 - DNA, 15 bp, Homo sapiens
tcatttaaacccagg

SEQ ID NO: 57998 - DNA, 15 bp, Homo sapiens
atcatttaaacccag

SEQ ID NO: 57999 - DNA, 15 bp, Homo sapiens
aatcatttaaaccca

SEQ ID NO: 58000 - DNA, 15 bp, Homo sapiens
gaatcatttaaaccc

SEQ ID NO: 58001 - DNA, 15 bp, Homo sapiens
agaatcatttaaacc

SEQ ID NO: 58002 - DNA, 15 bp, Homo sapiens
gagaatcatttaaac

SEQ ID NO: 58003 - DNA, 15 bp, Homo sapiens
ggagaatcatttaaa

SEQ ID NO: 58004 - DNA, 15 bp, Homo sapiens
aggagaatcatttaa

SEQ ID NO: 58005 - DNA, 15 bp, Homo sapiens
caggagaatcattta

SEQ ID NO: 58006 - DNA, 15 bp, Homo sapiens
gcaggagaatcattt

SEQ ID NO: 58007 - DNA, 15 bp, Homo sapiens
ggcaggagaatcatt

SEQ ID NO: 58008 - DNA, 15 bp, Homo sapiens
aggcaggagaatcat

SEQ ID NO: 58009 - DNA, 15 bp, Homo sapiens
tgaggctgaggcagg

SEQ ID NO: 58010 - DNA, 15 bp, Homo sapiens
ctgaggctgaggcag

SEQ ID NO: 58011 - DNA, 15 bp, Homo sapiens
cctgaggctgaggca

SEQ ID NO: 58012 - DNA, 15 bp, Homo sapiens
ccctgaggctgaggc

SEQ ID NO: 58013 - DNA, 15 bp, Homo sapiens
gccctgaggctgagg

SEQ ID NO: 58014 - DNA, 15 bp, Homo sapiens
cgccctgaggctgag

SEQ ID NO: 58015 - DNA, 15 bp, Homo sapiens
ccgccctgaggctga

SEQ ID NO: 58016 - DNA, 15 bp, Homo sapiens
tccgccctgaggctg

SEQ ID NO: 58017 - DNA, 15 bp, Homo sapiens
atccgccctgaggct

SEQ ID NO: 58018 - DNA, 15 bp, Homo sapiens
gatccgccctgaggc

SEQ ID NO: 58019 - DNA, 15 bp, Homo sapiens
tgatccgccctgagg

SEQ ID NO: 58020 - DNA, 15 bp, Homo sapiens
gtgatccgccctgag

SEQ ID NO: 58021 - DNA, 15 bp, Homo sapiens
ggtgatccgccctga

SEQ ID NO: 58022 - DNA, 15 bp, Homo sapiens
aggtgatccgccctg

SEQ ID NO: 58023 - DNA, 15 bp, Homo sapiens
caggtgatccgccct

SEQ ID NO: 58024 - DNA, 15 bp, Homo sapiens
gtcaggtgatccgcc

SEQ ID NO: 58025 - DNA, 15 bp, Homo sapiens
tgtcaggtgatccgc

SEQ ID NO: 58026 - DNA, 15 bp, Homo sapiens
atgtcaggtgatccg

SEQ ID NO: 58027 - DNA, 15 bp, Homo sapiens
gatgtcaggtgatcc

SEQ ID NO: 58028 - DNA, 15 bp, Homo sapiens
tgatgtcaggtgatc

SEQ ID NO: 58029 - DNA, 15 bp, Homo sapiens
ctgatgtcaggtgat

SEQ ID NO: 58030 - DNA, 15 bp, Homo sapiens
cctgatgtcaggtga

SEQ ID NO: 58031 - DNA, 15 bp, Homo sapiens
tcctgatgtcaggtg

SEQ ID NO: 58032 - DNA, 15 bp, Homo sapiens
ctcctgatgtcaggt

SEQ ID NO: 58033 - DNA, 15 bp, Homo sapiens
actcctgatgtcagg

SEQ ID NO: 58034 - DNA, 15 bp, Homo sapiens
aactcctgatgtcag

SEQ ID NO: 58035 - DNA, 15 bp, Homo sapiens
aaactcctgatgtca

SEQ ID NO: 58036 - DNA, 15 bp, Homo sapiens
caaactcctgatgtc

SEQ ID NO: 58037 - DNA, 15 bp, Homo sapiens
tcaaactcctgatgt

SEQ ID NO: 58038 - DNA, 15 bp, Homo sapiens
ctcaaactcctgatg

SEQ ID NO: 58039 - DNA, 15 bp, Homo sapiens
tctcaaactcctgat

SEQ ID NO: 58040 - DNA, 15 bp, Homo sapiens
gccatattggccagg

SEQ ID NO: 58041 - DNA, 15 bp, Homo sapiens
cgccatattggccag

SEQ ID NO: 58042 - DNA, 15 bp, Homo sapiens
tcgccatattggcca

SEQ ID NO: 58043 - DNA, 15 bp, Homo sapiens
ttcgccatattggcc

SEQ ID NO: 58044 - DNA, 15 bp, Homo sapiens
tttcgccatattggc

SEQ ID NO: 58045 - DNA, 15 bp, Homo sapiens
gtttcgccatattgg

SEQ ID NO: 58046 - DNA, 15 bp, Homo sapiens
ggtttcgccatattg

SEQ ID NO: 58047 - DNA, 15 bp, Homo sapiens
gggtttcgccatatt

SEQ ID NO: 58048 - DNA, 15 bp, Homo sapiens
ggggtttcgccatat

SEQ ID NO: 58049 - DNA, 15 bp, Homo sapiens
tggggtttcgccata

SEQ ID NO: 58050 - DNA, 15 bp, Homo sapiens
atggggtttcgccat

SEQ ID NO: 58051 - DNA, 15 bp, Homo sapiens
gatggggtttcgcca

SEQ ID NO: 58052 - DNA, 15 bp, Homo sapiens
agatggggtttcgcc

SEQ ID NO: 58053 - DNA, 15 bp, Homo sapiens
gagatggggtttcgc

SEQ ID NO: 58054 - DNA, 15 bp, Homo sapiens
agagatggggtttcg

SEQ ID NO: 58055 - DNA, 15 bp, Homo sapiens
agtatttttagtaga

SEQ ID NO: 58056 - DNA, 15 bp, Homo sapiens
tagtatttttagtag

SEQ ID NO: 58057 - DNA, 15 bp, Homo sapiens
ttagtatttttagta

SEQ ID NO: 58058 - DNA, 15 bp, Homo sapiens
tttagtatttttagt

SEQ ID NO: 58059 - DNA, 15 bp, Homo sapiens
ttttagtatttttag

SEQ ID NO: 58060 - DNA, 15 bp, Homo sapiens
tttttagtattttta

SEQ ID NO: 58061 - DNA, 15 bp, Homo sapiens
ttttttagtattttt

SEQ ID NO: 58062 - DNA, 15 bp, Homo sapiens
tttttttagtatttt

SEQ ID NO: 58063 - DNA, 15 bp, Homo sapiens
ttttttttagtattt

SEQ ID NO: 58064 - DNA, 15 bp, Homo sapiens
attttttttagtatt

SEQ ID NO: 58065 - DNA, 15 bp, Homo sapiens
aattttttttagtat

SEQ ID NO: 58066 - DNA, 15 bp, Homo sapiens
taattttttttagta

SEQ ID NO: 58067 - DNA, 15 bp, Homo sapiens
ctaattttttttagt

SEQ ID NO: 58068 - DNA, 15 bp, Homo sapiens
gctaattttttttag

SEQ ID NO: 58069 - DNA, 15 bp, Homo sapiens
ggctaatttttttta

SEQ ID NO: 58070 - DNA, 15 bp, Homo sapiens
tggctaatttttttt

SEQ ID NO: 58071 - DNA, 15 bp, Homo sapiens
tgccaccatgcctgg

SEQ ID NO: 58072 - DNA, 15 bp, Homo sapiens
gtgccaccatgcctg

SEQ ID NO: 58073 - DNA, 15 bp, Homo sapiens
cgtgccaccatgcct

SEQ ID NO: 58074 - DNA, 15 bp, Homo sapiens
gcgtgccaccatgcc

SEQ ID NO: 58075 - DNA, 15 bp, Homo sapiens
tgcgtgccaccatgc

SEQ ID NO: 58076 - DNA, 15 bp, Homo sapiens
gtgcgtgccaccatg

SEQ ID NO: 58077 - DNA, 15 bp, Homo sapiens
agtgcgtgccaccat

SEQ ID NO: 58078 - DNA, 15 bp, Homo sapiens
aagtgcgtgccacca

SEQ ID NO: 58079 - DNA, 15 bp, Homo sapiens
caagtgcgtgccacc

SEQ ID NO: 58080 - DNA, 15 bp, Homo sapiens
acaagtgcgtgccac

SEQ ID NO: 58081 - DNA, 15 bp, Homo sapiens
tacaagtgcgtgcca

SEQ ID NO: 58082 - DNA, 15 bp, Homo sapiens
ctacaagtgcgtgcc

SEQ ID NO: 58083 - DNA, 15 bp, Homo sapiens
actacaagtgcgtgc

SEQ ID NO: 58084 - DNA, 15 bp, Homo sapiens
gactacaagtgcgtg

SEQ ID NO: 58085 - DNA, 15 bp, Homo sapiens
ggactacaagtgcgt

SEQ ID NO: 58086 - DNA, 15 bp, Homo sapiens
gggactacaagtgcg

SEQ ID NO: 58087 - DNA, 15 bp, Homo sapiens
tctcccaagtagctg

SEQ ID NO: 58088 - DNA, 15 bp, Homo sapiens
gtctcccaagtagct

SEQ ID NO: 58089 - DNA, 15 bp, Homo sapiens
agtctcccaagtagc

SEQ ID NO: 58090 - DNA, 15 bp, Homo sapiens
cagtctcccaagtag

SEQ ID NO: 58091 - DNA, 15 bp, Homo sapiens
tcagtctcccaagta

SEQ ID NO: 58092 - DNA, 15 bp, Homo sapiens
ctcagtctcccaagt

SEQ ID NO: 58093 - DNA, 15 bp, Homo sapiens
cctcagtctcccaag

SEQ ID NO: 58094 - DNA, 15 bp, Homo sapiens
gcctcagtctcccaa

SEQ ID NO: 58095 - DNA, 15 bp, Homo sapiens
tgcctcagtctccca

SEQ ID NO: 58096 - DNA, 15 bp, Homo sapiens
ctgcctcagtctccc

SEQ ID NO: 58097 - DNA, 15 bp, Homo sapiens
cctgcctcagtctcc

SEQ ID NO: 58098 - DNA, 15 bp, Homo sapiens
tcctgcctcagtctc

SEQ ID NO: 58099 - DNA, 15 bp, Homo sapiens
ctcctgcctcagtct

SEQ ID NO: 58100 - DNA, 15 bp, Homo sapiens
tctcctgcctcagtc

SEQ ID NO: 58101 - DNA, 15 bp, Homo sapiens
ttctcctgcctcagt

SEQ ID NO: 58102 - DNA, 15 bp, Homo sapiens
atcctgggttcaagc

SEQ ID NO: 58103 - DNA, 15 bp, Homo sapiens
catcctgggttcaag

SEQ ID NO: 58104 - DNA, 15 bp, Homo sapiens
acatcctgggttcaa

SEQ ID NO: 58105 - DNA, 15 bp, Homo sapiens
aacatcctgggttca

SEQ ID NO: 58106 - DNA, 15 bp, Homo sapiens
caacatcctgggttc

SEQ ID NO: 58107 - DNA, 15 bp, Homo sapiens
tcaacatcctgggtt

SEQ ID NO: 58108 - DNA, 15 bp, Homo sapiens
ctcaacatcctgggt

SEQ ID NO: 58109 - DNA, 15 bp, Homo sapiens
cctcaacatcctggg

SEQ ID NO: 58110 - DNA, 15 bp, Homo sapiens
acctcaacatcctgg

SEQ ID NO: 58111 - DNA, 15 bp, Homo sapiens
aacctcaacatcctg

SEQ ID NO: 58112 - DNA, 15 bp, Homo sapiens
caacctcaacatcct

SEQ ID NO: 58113 - DNA, 15 bp, Homo sapiens
gcaacctcaacatcc

SEQ ID NO: 58114 - DNA, 15 bp, Homo sapiens
tgcaacctcaacatc

SEQ ID NO: 58115 - DNA, 15 bp, Homo sapiens
ctgcaacctcaacat

SEQ ID NO: 58116 - DNA, 15 bp, Homo sapiens
actgcaacctcaaca

SEQ ID NO: 58117 - DNA, 15 bp, Homo sapiens
cactgcaacctcaac

SEQ ID NO: 58118 - DNA, 15 bp, Homo sapiens
tcactgcaacctcaa

SEQ ID NO: 58119 - DNA, 15 bp, Homo sapiens
ctcactgcaacctca

SEQ ID NO: 58120 - DNA, 15 bp, Homo sapiens
atggtgtgatctcag

SEQ ID NO: 58121 - DNA, 15 bp, Homo sapiens
gatggtgtgatctca

SEQ ID NO: 58122 - DNA, 15 bp, Homo sapiens
tgatggtgtgatctc

SEQ ID NO: 58123 - DNA, 15 bp, Homo sapiens
gtgatggtgtgatct

SEQ ID NO: 58124 - DNA, 15 bp, Homo sapiens
tgtgatggtgtgatc

SEQ ID NO: 58125 - DNA, 15 bp, Homo sapiens
ttgtgatggtgtgat

SEQ ID NO: 58126 - DNA, 15 bp, Homo sapiens
attgtgatggtgtga

SEQ ID NO: 58127 - DNA, 15 bp, Homo sapiens
gattgtgatggtgtg

SEQ ID NO: 58128 - DNA, 15 bp, Homo sapiens
ggattgtgatggtgt

SEQ ID NO: 58129 - DNA, 15 bp, Homo sapiens
tggattgtgatggtg

SEQ ID NO: 58130 - DNA, 15 bp, Homo sapiens
ctggattgtgatggt

SEQ ID NO: 58131 - DNA, 15 bp, Homo sapiens
gctggattgtgatgg

SEQ ID NO: 58132 - DNA, 15 bp, Homo sapiens
ggctggattgtgatg

SEQ ID NO: 58133 - DNA, 15 bp, Homo sapiens
aggctggattgtgat

SEQ ID NO: 58134 - DNA, 15 bp, Homo sapiens
caggctggattgtga

SEQ ID NO: 58135 - DNA, 15 bp, Homo sapiens
tcaggctggattgtg

SEQ ID NO: 58136 - DNA, 15 bp, Homo sapiens
ctcaggctggattgt

SEQ ID NO: 58137 - DNA, 15 bp, Homo sapiens
actcaggctggattg

SEQ ID NO: 58138 - DNA, 15 bp, Homo sapiens
cactcaggctggatt

SEQ ID NO: 58139 - DNA, 15 bp, Homo sapiens
tcactcaggctggat

SEQ ID NO: 58140 - DNA, 15 bp, Homo sapiens
ctctgtcactcaggc

SEQ ID NO: 58141 - DNA, 15 bp, Homo sapiens
actctgtcactcagg

SEQ ID NO: 58142 - DNA, 15 bp, Homo sapiens
cactctgtcactcag

SEQ ID NO: 58143 - DNA, 15 bp, Homo sapiens
tcactctgtcactca

SEQ ID NO: 58144 - DNA, 15 bp, Homo sapiens
ctcactctgtcactc

SEQ ID NO: 58145 - DNA, 15 bp, Homo sapiens
tctcactctgtcact

SEQ ID NO: 58146 - DNA, 15 bp, Homo sapiens
tggagtctcactctg

SEQ ID NO: 58147 - DNA, 15 bp, Homo sapiens
atggagtctcactct

SEQ ID NO: 58148 - DNA, 15 bp, Homo sapiens
cagatggagtctcac

SEQ ID NO: 58149 - DNA, 15 bp, Homo sapiens
tcagatggagtctca

SEQ ID NO: 58150 - DNA, 15 bp, Homo sapiens
ttcagatggagtctc

SEQ ID NO: 58151 - DNA, 15 bp, Homo sapiens
tttcagatggagtct

SEQ ID NO: 58152 - DNA, 15 bp, Homo sapiens
ttttcagatggagtc

SEQ ID NO: 58153 - DNA, 15 bp, Homo sapiens
tttttcagatggagt

SEQ ID NO: 58154 - DNA, 15 bp, Homo sapiens
ttttttcagatggag

SEQ ID NO: 58155 - DNA, 15 bp, Homo sapiens
tttttttcagatgga

SEQ ID NO: 58156 - DNA, 15 bp, Homo sapiens
ttttttttcagatgg

SEQ ID NO: 58157 - DNA, 15 bp, Homo sapiens
cttttttttcagatg

SEQ ID NO: 58158 - DNA, 15 bp, Homo sapiens
tcttttttttcagat

SEQ ID NO: 58159 - DNA, 15 bp, Homo sapiens
tttttcttttttttc

SEQ ID NO: 58160 - DNA, 15 bp, Homo sapiens
gttttttcttttttt

SEQ ID NO: 58161 - DNA, 15 bp, Homo sapiens
tgttttttctttttt

SEQ ID NO: 58162 - DNA, 15 bp, Homo sapiens
ttgttttttcttttt

SEQ ID NO: 58163 - DNA, 15 bp, Homo sapiens
attgttttttctttt

SEQ ID NO: 58164 - DNA, 15 bp, Homo sapiens
aattgttttttcttt

SEQ ID NO: 58165 - DNA, 15 bp, Homo sapiens
taattgttttttctt

SEQ ID NO: 58166 - DNA, 15 bp, Homo sapiens
ctaattgttttttct

SEQ ID NO: 58167 - DNA, 15 bp, Homo sapiens
gctaattgttttttc

SEQ ID NO: 58168 - DNA, 15 bp, Homo sapiens
ggctaattgtttttt

SEQ ID NO: 58169 - DNA, 15 bp, Homo sapiens
aggctaattgttttt

SEQ ID NO: 58170 - DNA, 15 bp, Homo sapiens
caggctaattgtttt

SEQ ID NO: 58171 - DNA, 15 bp, Homo sapiens
ccaggctaattgttt

SEQ ID NO: 58172 - DNA, 15 bp, Homo sapiens
gccaggctaattgtt

SEQ ID NO: 58173 - DNA, 15 bp, Homo sapiens
tgccaggctaattgt

SEQ ID NO: 58174 - DNA, 15 bp, Homo sapiens
atgccaggctaattg

SEQ ID NO: 58175 - DNA, 15 bp, Homo sapiens
catgccaggctaatt

SEQ ID NO: 58176 - DNA, 15 bp, Homo sapiens
ccatgccaggctaat

SEQ ID NO: 58177 - DNA, 15 bp, Homo sapiens
accatgccaggctaa

SEQ ID NO: 58178 - DNA, 15 bp, Homo sapiens
ctgccaccatgccag

SEQ ID NO: 58179 - DNA, 15 bp, Homo sapiens
cctgccaccatgcca

SEQ ID NO: 58180 - DNA, 15 bp, Homo sapiens
gcctgccaccatgcc

SEQ ID NO: 58181 - DNA, 15 bp, Homo sapiens
tgcctgccaccatgc

SEQ ID NO: 58182 - DNA, 15 bp, Homo sapiens
gtgcctgccaccatg

SEQ ID NO: 58183 - DNA, 15 bp, Homo sapiens
ggtgcctgccaccat

SEQ ID NO: 58184 - DNA, 15 bp, Homo sapiens
agggattacaggtgc

SEQ ID NO: 58185 - DNA, 15 bp, Homo sapiens
cagggattacaggtg

SEQ ID NO: 58186 - DNA, 15 bp, Homo sapiens
gcagggattacaggt

SEQ ID NO: 58187 - DNA, 15 bp, Homo sapiens
agcagggattacagg

SEQ ID NO: 58188 - DNA, 15 bp, Homo sapiens
tagcagggattacag

SEQ ID NO: 58189 - DNA, 15 bp, Homo sapiens
gtagcagggattaca

SEQ ID NO: 58190 - DNA, 15 bp, Homo sapiens
agtagcagggattac

SEQ ID NO: 58191 - DNA, 15 bp, Homo sapiens
aagtagcagggatta

SEQ ID NO: 58192 - DNA, 15 bp, Homo sapiens
caagtagcagggatt

SEQ ID NO: 58193 - DNA, 15 bp, Homo sapiens
ccaagtagcagggat

SEQ ID NO: 58194 - DNA, 15 bp, Homo sapiens
cccaagtagcaggga

SEQ ID NO: 58195 - DNA, 15 bp, Homo sapiens
tcccaagtagcaggg

SEQ ID NO: 58196 - DNA, 15 bp, Homo sapiens
ctcccaagtagcagg

SEQ ID NO: 58197 - DNA, 15 bp, Homo sapiens
cctcccaagtagcag

SEQ ID NO: 58198 - DNA, 15 bp, Homo sapiens
gcctcccaagtagca

SEQ ID NO: 58199 - DNA, 15 bp, Homo sapiens
acgatctcagctcac

SEQ ID NO: 58200 - DNA, 15 bp, Homo sapiens
cacgatctcagctca

SEQ ID NO: 58201 - DNA, 15 bp, Homo sapiens
gcacgatctcagctc

SEQ ID NO: 58202 - DNA, 15 bp, Homo sapiens
ggcacgatctcagct

SEQ ID NO: 58203 - DNA, 15 bp, Homo sapiens
tggcacgatctcagc

SEQ ID NO: 58204 - DNA, 15 bp, Homo sapiens
atggcacgatctcag

SEQ ID NO: 58205 - DNA, 15 bp, Homo sapiens
aatggcacgatctca

SEQ ID NO: 58206 - DNA, 15 bp, Homo sapiens
caatggcacgatctc

SEQ ID NO: 58207 - DNA, 15 bp, Homo sapiens
gcaatggcacgatct

SEQ ID NO: 58208 - DNA, 15 bp, Homo sapiens
tgcaatggcacgatc

SEQ ID NO: 58209 - DNA, 15 bp, Homo sapiens
atgcaatggcacgat

SEQ ID NO: 58210 - DNA, 15 bp, Homo sapiens
aatgcaatggcacga

SEQ ID NO: 58211 - DNA, 15 bp, Homo sapiens
gaatgcaatggcacg

SEQ ID NO: 58212 - DNA, 15 bp, Homo sapiens
ggaatgcaatggcac

SEQ ID NO: 58213 - DNA, 15 bp, Homo sapiens
tggaatgcaatggca

SEQ ID NO: 58214 - DNA, 15 bp, Homo sapiens
ctggaatgcaatggc

SEQ ID NO: 58215 - DNA, 15 bp, Homo sapiens
cctggaatgcaatgg

SEQ ID NO: 58216 - DNA, 15 bp, Homo sapiens
gcctggaatgcaatg

SEQ ID NO: 58217 - DNA, 15 bp, Homo sapiens
agcctggaatgcaat

SEQ ID NO: 58218 - DNA, 15 bp, Homo sapiens
cagcctggaatgcaa

SEQ ID NO: 58219 - DNA, 15 bp, Homo sapiens
tcagcctggaatgca

SEQ ID NO: 58220 - DNA, 15 bp, Homo sapiens
ctcagcctggaatgc

SEQ ID NO: 58221 - DNA, 15 bp, Homo sapiens
gctcagcctggaatg

SEQ ID NO: 58222 - DNA, 15 bp, Homo sapiens
tgctcagcctggaat

SEQ ID NO: 58223 - DNA, 15 bp, Homo sapiens
ttgctcagcctggaa

SEQ ID NO: 58224 - DNA, 15 bp, Homo sapiens
gttgctcagcctgga

SEQ ID NO: 58225 - DNA, 15 bp, Homo sapiens
tgttgctcagcctgg

SEQ ID NO: 58226 - DNA, 15 bp, Homo sapiens
ttgttgctcagcctg

SEQ ID NO: 58227 - DNA, 15 bp, Homo sapiens
cttgttgctcagcct

SEQ ID NO: 58228 - DNA, 15 bp, Homo sapiens
tcttgttgctcagcc

SEQ ID NO: 58229 - DNA, 15 bp, Homo sapiens
ctcttgttgctcagc

SEQ ID NO: 58230 - DNA, 15 bp, Homo sapiens
gctcttgttgctcag

SEQ ID NO: 58231 - DNA, 15 bp, Homo sapiens
tgctcttgttgctca

SEQ ID NO: 58232 - DNA, 15 bp, Homo sapiens
ttgctcttgttgctc

SEQ ID NO: 58233 - DNA, 15 bp, Homo sapiens
cttgctcttgttgct

SEQ ID NO: 58234 - DNA, 15 bp, Homo sapiens
tcttgctcttgttgc

SEQ ID NO: 58235 - DNA, 15 bp, Homo sapiens
gtcttgctcttgttg

SEQ ID NO: 58236 - DNA, 15 bp, Homo sapiens
agtcttgctcttgtt

SEQ ID NO: 58237 - DNA, 15 bp, Homo sapiens
gagtcttgctcttgt

SEQ ID NO: 58238 - DNA, 15 bp, Homo sapiens
ggagtcttgctcttg

SEQ ID NO: 58239 - DNA, 15 bp, Homo sapiens
gcctttttttttttt

SEQ ID NO: 58240 - DNA, 15 bp, Homo sapiens
ggccttttttttttt

SEQ ID NO: 58241 - DNA, 15 bp, Homo sapiens
tggcctttttttttt

SEQ ID NO: 58242 - DNA, 15 bp, Homo sapiens
ctggccttttttttt

SEQ ID NO: 58243 - DNA, 15 bp, Homo sapiens
cctggcctttttttt

SEQ ID NO: 58244 - DNA, 15 bp, Homo sapiens
acctggccttttttt

SEQ ID NO: 58245 - DNA, 15 bp, Homo sapiens
cacctggcctttttt

SEQ ID NO: 58246 - DNA, 15 bp, Homo sapiens
gcacctggccttttt

SEQ ID NO: 58247 - DNA, 15 bp, Homo sapiens
tgcacctggcctttt

SEQ ID NO: 58248 - DNA, 15 bp, Homo sapiens
ctgcacctggccttt

SEQ ID NO: 58249 - DNA, 15 bp, Homo sapiens
actgcacctggcctt

SEQ ID NO: 58250 - DNA, 15 bp, Homo sapiens
cactgcacctggcct

SEQ ID NO: 58251 - DNA, 15 bp, Homo sapiens
ccactgcacctggcc

SEQ ID NO: 58252 - DNA, 15 bp, Homo sapiens
gccactgcacctggc

SEQ ID NO: 58253 - DNA, 15 bp, Homo sapiens
agccactgcacctgg

SEQ ID NO: 58254 - DNA, 15 bp, Homo sapiens
gagccactgcacctg

SEQ ID NO: 58255 - DNA, 15 bp, Homo sapiens
tgagccactgcacct

SEQ ID NO: 58256 - DNA, 15 bp, Homo sapiens
gtgagccactgcacc

SEQ ID NO: 58257 - DNA, 15 bp, Homo sapiens
cgtgagccactgcac

SEQ ID NO: 58258 - DNA, 15 bp, Homo sapiens
gcgtgagccactgca

SEQ ID NO: 58259 - DNA, 15 bp, Homo sapiens
ctctggaactcctga

SEQ ID NO: 58260 - DNA, 15 bp, Homo sapiens
gctctggaactcctg

SEQ ID NO: 58261 - DNA, 15 bp, Homo sapiens
tgctctggaactcct

SEQ ID NO: 58262 - DNA, 15 bp, Homo sapiens
ctgctctggaactcc

SEQ ID NO: 58263 - DNA, 15 bp, Homo sapiens
gctgctctggaactc

SEQ ID NO: 58264 - DNA, 15 bp, Homo sapiens
ggctgctctggaact

SEQ ID NO: 58265 - DNA, 15 bp, Homo sapiens
aggctgctctggaac

SEQ ID NO: 58266 - DNA, 15 bp, Homo sapiens
caggctgctctggaa

SEQ ID NO: 58267 - DNA, 15 bp, Homo sapiens
ccaggctgctctgga

SEQ ID NO: 58268 - DNA, 15 bp, Homo sapiens
gccaggctgctctgg

SEQ ID NO: 58269 - DNA, 15 bp, Homo sapiens
ggccaggctgctctg

SEQ ID NO: 58270 - DNA, 15 bp, Homo sapiens
tggccaggctgctct

SEQ ID NO: 58271 - DNA, 15 bp, Homo sapiens
ttggccaggctgctc

SEQ ID NO: 58272 - DNA, 15 bp, Homo sapiens
gttggccaggctgct

SEQ ID NO: 58273 - DNA, 15 bp, Homo sapiens
tgttggccaggctgc

SEQ ID NO: 58274 - DNA, 15 bp, Homo sapiens
ttcacaatgttggcc

SEQ ID NO: 58275 - DNA, 15 bp, Homo sapiens
tttcacaatgttggc

SEQ ID NO: 58276 - DNA, 15 bp, Homo sapiens
gtttcacaatgttgg

SEQ ID NO: 58277 - DNA, 15 bp, Homo sapiens
ggtttcacaatgttg

SEQ ID NO: 58278 - DNA, 15 bp, Homo sapiens
gggtttcacaatgtt

SEQ ID NO: 58279 - DNA, 15 bp, Homo sapiens
ggggtttcacaatgt

SEQ ID NO: 58280 - DNA, 15 bp, Homo sapiens
gggggtttcacaatg

SEQ ID NO: 58281 - DNA, 15 bp, Homo sapiens
cgggggtttcacaat

SEQ ID NO: 58282 - DNA, 15 bp, Homo sapiens
acgggggtttcacaa

SEQ ID NO: 58283 - DNA, 15 bp, Homo sapiens
gacgggggtttcaca

SEQ ID NO: 58284 - DNA, 15 bp, Homo sapiens
agacgggggtttcac

SEQ ID NO: 58285 - DNA, 15 bp, Homo sapiens
gagacgggggtttca

SEQ ID NO: 58286 - DNA, 15 bp, Homo sapiens
agagacgggggtttc

SEQ ID NO: 58287 - DNA, 15 bp, Homo sapiens
tagagacgggggttt

SEQ ID NO: 58288 - DNA, 15 bp, Homo sapiens
gtagagacgggggtt

SEQ ID NO: 58289 - DNA, 15 bp, Homo sapiens
agtagagacgggggt

SEQ ID NO: 58290 - DNA, 15 bp, Homo sapiens
tagtagagacggggg

SEQ ID NO: 58291 - DNA, 15 bp, Homo sapiens
tcacacccagctaat

SEQ ID NO: 58292 - DNA, 15 bp, Homo sapiens
atcacacccagctaa

SEQ ID NO: 58293 - DNA, 15 bp, Homo sapiens
catcacacccagcta

SEQ ID NO: 58294 - DNA, 15 bp, Homo sapiens
ccatcacacccagct

SEQ ID NO: 58295 - DNA, 15 bp, Homo sapiens
gccatcacacccagc

SEQ ID NO: 58296 - DNA, 15 bp, Homo sapiens
tgccatcacacccag

SEQ ID NO: 58297 - DNA, 15 bp, Homo sapiens
atgccatcacaccca

SEQ ID NO: 58298 - DNA, 15 bp, Homo sapiens
catgccatcacaccc

SEQ ID NO: 58299 - DNA, 15 bp, Homo sapiens
acatgccatcacacc

SEQ ID NO: 58300 - DNA, 15 bp, Homo sapiens
cacatgccatcacac

SEQ ID NO: 58301 - DNA, 15 bp, Homo sapiens
gcacatgccatcaca

SEQ ID NO: 58302 - DNA, 15 bp, Homo sapiens
ggcacatgccatcac

SEQ ID NO: 58303 - DNA, 15 bp, Homo sapiens
aggcacatgccatca

SEQ ID NO: 58304 - DNA, 15 bp, Homo sapiens
caggcacatgccatc

SEQ ID NO: 58305 - DNA, 15 bp, Homo sapiens
acaggcacatgccat

SEQ ID NO: 58306 - DNA, 15 bp, Homo sapiens
aattacaggcacatg

SEQ ID NO: 58307 - DNA, 15 bp, Homo sapiens
gaattacaggcacat

SEQ ID NO: 58308 - DNA, 15 bp, Homo sapiens
ggaattacaggcaca

SEQ ID NO: 58309 - DNA, 15 bp, Homo sapiens
tggaattacaggcac

SEQ ID NO: 58310 - DNA, 15 bp, Homo sapiens
tgagtagctggaatt

SEQ ID NO: 58311 - DNA, 15 bp, Homo sapiens
ctgagtagctggaat

SEQ ID NO: 58312 - DNA, 15 bp, Homo sapiens
tctctgcctcctgag

SEQ ID NO: 58313 - DNA, 15 bp, Homo sapiens
gtctctgcctcctga

SEQ ID NO: 58314 - DNA, 15 bp, Homo sapiens
tgtctctgcctcctg

SEQ ID NO: 58315 - DNA, 15 bp, Homo sapiens
ctgtctctgcctcct

SEQ ID NO: 58316 - DNA, 15 bp, Homo sapiens
cctgtctctgcctcc

SEQ ID NO: 58317 - DNA, 15 bp, Homo sapiens
tcctgtctctgcctc

SEQ ID NO: 58318 - DNA, 15 bp, Homo sapiens
ctcctgtctctgcct

SEQ ID NO: 58319 - DNA, 15 bp, Homo sapiens
tctcctgtctctgcc

SEQ ID NO: 58320 - DNA, 15 bp, Homo sapiens
ttctcctgtctctgc

SEQ ID NO: 58321 - DNA, 15 bp, Homo sapiens
attctcctgtctctg

SEQ ID NO: 58322 - DNA, 15 bp, Homo sapiens
aattctcctgtctct

SEQ ID NO: 58323 - DNA, 15 bp, Homo sapiens
caattctcctgtctc

SEQ ID NO: 58324 - DNA, 15 bp, Homo sapiens
gcaattctcctgtct

SEQ ID NO: 58325 - DNA, 15 bp, Homo sapiens
agcaattctcctgtc

SEQ ID NO: 58326 - DNA, 15 bp, Homo sapiens
aagcaattctcctgt

SEQ ID NO: 58327 - DNA, 15 bp, Homo sapiens
tgggttcaagcaatt

SEQ ID NO: 58328 - DNA, 15 bp, Homo sapiens
ctgggttcaagcaat

SEQ ID NO: 58329 - DNA, 15 bp, Homo sapiens
cctgggttcaagcaa

SEQ ID NO: 58330 - DNA, 15 bp, Homo sapiens
tcctgggttcaagca

SEQ ID NO: 58331 - DNA, 15 bp, Homo sapiens
tcaacctccgcctcc

SEQ ID NO: 58332 - DNA, 15 bp, Homo sapiens
ttcaacctccgcctc

SEQ ID NO: 58333 - DNA, 15 bp, Homo sapiens
attcaacctccgcct

SEQ ID NO: 58334 - DNA, 15 bp, Homo sapiens
cattcaacctccgcc

SEQ ID NO: 58335 - DNA, 15 bp, Homo sapiens
tcattcaacctccgc

SEQ ID NO: 58336 - DNA, 15 bp, Homo sapiens
ctcattcaacctccg

SEQ ID NO: 58337 - DNA, 15 bp, Homo sapiens
gctcattcaacctcc

SEQ ID NO: 58338 - DNA, 15 bp, Homo sapiens
ggctcattcaacctc

SEQ ID NO: 58339 - DNA, 15 bp, Homo sapiens
cggctcattcaacct

SEQ ID NO: 58340 - DNA, 15 bp, Homo sapiens
tcggctcattcaacc

SEQ ID NO: 58341 - DNA, 15 bp, Homo sapiens
ctcggctcattcaac

SEQ ID NO: 58342 - DNA, 15 bp, Homo sapiens
tctcggctcattcaa

SEQ ID NO: 58343 - DNA, 15 bp, Homo sapiens
atctcggctcattca

SEQ ID NO: 58344 - DNA, 15 bp, Homo sapiens
aatctcggctcattc

SEQ ID NO: 58345 - DNA, 15 bp, Homo sapiens
caatctcggctcatt

SEQ ID NO: 58346 - DNA, 15 bp, Homo sapiens
gcaatctcggctcat

SEQ ID NO: 58347 - DNA, 15 bp, Homo sapiens
gatggcgcaatctcg

SEQ ID NO: 58348 - DNA, 15 bp, Homo sapiens
tgatggcgcaatctc

SEQ ID NO: 58349 - DNA, 15 bp, Homo sapiens
gtgatggcgcaatct

SEQ ID NO: 58350 - DNA, 15 bp, Homo sapiens
tgtgatggcgcaatc

SEQ ID NO: 58351 - DNA, 15 bp, Homo sapiens
gtgtgatggcgcaat

SEQ ID NO: 58352 - DNA, 15 bp, Homo sapiens
agtgtgatggcgcaa

SEQ ID NO: 58353 - DNA, 15 bp, Homo sapiens
gagtgtgatggcgca

SEQ ID NO: 58354 - DNA, 15 bp, Homo sapiens
agagtgtgatggcgc

SEQ ID NO: 58355 - DNA, 15 bp, Homo sapiens
tagagtgtgatggcg

SEQ ID NO: 58356 - DNA, 15 bp, Homo sapiens
ctagagtgtgatggc

SEQ ID NO: 58357 - DNA, 15 bp, Homo sapiens
gctagagtgtgatgg

SEQ ID NO: 58358 - DNA, 15 bp, Homo sapiens
ggctagagtgtgatg

SEQ ID NO: 58359 - DNA, 15 bp, Homo sapiens
aggctagagtgtgat

SEQ ID NO: 58360 - DNA, 15 bp, Homo sapiens
gaggctagagtgtga

SEQ ID NO: 58361 - DNA, 15 bp, Homo sapiens
cgaggctagagtgtg

SEQ ID NO: 58362 - DNA, 15 bp, Homo sapiens
ccgaggctagagtgt

SEQ ID NO: 58363 - DNA, 15 bp, Homo sapiens
gccgaggctagagtg

SEQ ID NO: 58364 - DNA, 15 bp, Homo sapiens
cgccgaggctagagt

SEQ ID NO: 58365 - DNA, 15 bp, Homo sapiens
tcgccgaggctagag

SEQ ID NO: 58366 - DNA, 15 bp, Homo sapiens
gtcgccgaggctaga

SEQ ID NO: 58367 - DNA, 15 bp, Homo sapiens
tgtcgccgaggctag

SEQ ID NO: 58368 - DNA, 15 bp, Homo sapiens
ctgtcgccgaggcta

SEQ ID NO: 58369 - DNA, 15 bp, Homo sapiens
tctgtcgccgaggct

SEQ ID NO: 58370 - DNA, 15 bp, Homo sapiens
ctctgtcgccgaggc

SEQ ID NO: 58371 - DNA, 15 bp, Homo sapiens
gctctgtcgccgagg

SEQ ID NO: 58372 - DNA, 15 bp, Homo sapiens
tgctctgtcgccgag

SEQ ID NO: 58373 - DNA, 15 bp, Homo sapiens
ttgctctgtcgccga

SEQ ID NO: 58374 - DNA, 15 bp, Homo sapiens
cttgctctgtcgccg

SEQ ID NO: 58375 - DNA, 15 bp, Homo sapiens
aagctaatttttttt

SEQ ID NO: 58376 - DNA, 15 bp, Homo sapiens
gaagctaattttttt

SEQ ID NO: 58377 - DNA, 15 bp, Homo sapiens
agaagctaatttttt

SEQ ID NO: 58378 - DNA, 15 bp, Homo sapiens
tagaagctaattttt

SEQ ID NO: 58379 - DNA, 15 bp, Homo sapiens
gtagaagctaatttt

SEQ ID NO: 58380 - DNA, 15 bp, Homo sapiens
ggtagaagctaattt

SEQ ID NO: 58381 - DNA, 15 bp, Homo sapiens
aggtagaagctaatt

SEQ ID NO: 58382 - DNA, 15 bp, Homo sapiens
gaggtagaagctaat

SEQ ID NO: 58383 - DNA, 15 bp, Homo sapiens
tgaggtagaagctaa

SEQ ID NO: 58384 - DNA, 15 bp, Homo sapiens
atgaggtagaagcta

SEQ ID NO: 58385 - DNA, 15 bp, Homo sapiens
aatgaggtagaagct

SEQ ID NO: 58386 - DNA, 15 bp, Homo sapiens
taatgaggtagaagc

SEQ ID NO: 58387 - DNA, 15 bp, Homo sapiens
ttaatgaggtagaag

SEQ ID NO: 58388 - DNA, 15 bp, Homo sapiens
attaatgaggtagaa

SEQ ID NO: 58389 - DNA, 15 bp, Homo sapiens
gattaatgaggtaga

SEQ ID NO: 58390 - DNA, 15 bp, Homo sapiens
ggattaatgaggtag

SEQ ID NO: 58391 - DNA, 15 bp, Homo sapiens
aggattaatgaggta

SEQ ID NO: 58392 - DNA, 15 bp, Homo sapiens
taggattaatgaggt

SEQ ID NO: 58393 - DNA, 15 bp, Homo sapiens
ttaggattaatgagg

SEQ ID NO: 58394 - DNA, 15 bp, Homo sapiens
cttaggattaatgag

SEQ ID NO: 58395 - DNA, 15 bp, Homo sapiens
tcttaggattaatga

SEQ ID NO: 58396 - DNA, 15 bp, Homo sapiens
ttcttaggattaatg

SEQ ID NO: 58397 - DNA, 15 bp, Homo sapiens
gttcttaggattaat

SEQ ID NO: 58398 - DNA, 15 bp, Homo sapiens
agttcttaggattaa

SEQ ID NO: 58399 - DNA, 15 bp, Homo sapiens
gagttcttaggatta

SEQ ID NO: 58400 - DNA, 15 bp, Homo sapiens
tgagttcttaggatt

SEQ ID NO: 58401 - DNA, 15 bp, Homo sapiens
atgagttcttaggat

SEQ ID NO: 58402 - DNA, 15 bp, Homo sapiens
tatgagttcttagga

SEQ ID NO: 58403 - DNA, 15 bp, Homo sapiens
gtatgagttcttagg

SEQ ID NO: 58404 - DNA, 15 bp, Homo sapiens
tgtatgagttcttag

SEQ ID NO: 58405 - DNA, 15 bp, Homo sapiens
ttgtatgagttctta

SEQ ID NO: 58406 - DNA, 15 bp, Homo sapiens
gttgtatgagttctt

SEQ ID NO: 58407 - DNA, 15 bp, Homo sapiens
ggttgtatgagttct

SEQ ID NO: 58408 - DNA, 15 bp, Homo sapiens
tggttgtatgagttc

SEQ ID NO: 58409 - DNA, 15 bp, Homo sapiens
ctggttgtatgagtt

SEQ ID NO: 58410 - DNA, 15 bp, Homo sapiens
cctggttgtatgagt

SEQ ID NO: 58411 - DNA, 15 bp, Homo sapiens
tcctggttgtatgag

SEQ ID NO: 58412 - DNA, 15 bp, Homo sapiens
gtcctggttgtatga

SEQ ID NO: 58413 - DNA, 15 bp, Homo sapiens
ggtcctggttgtatg

SEQ ID NO: 58414 - DNA, 15 bp, Homo sapiens
gggtcctggttgtat

SEQ ID NO: 58415 - DNA, 15 bp, Homo sapiens
agggtcctggttgta

SEQ ID NO: 58416 - DNA, 15 bp, Homo sapiens
cagggtcctggttgt

SEQ ID NO: 58417 - DNA, 15 bp, Homo sapiens
ccagggtcctggttg

SEQ ID NO: 58418 - DNA, 15 bp, Homo sapiens
tccagggtcctggtt

SEQ ID NO: 58419 - DNA, 15 bp, Homo sapiens
ctccagggtcctggt

SEQ ID NO: 58420 - DNA, 15 bp, Homo sapiens
actccagggtcctgg

SEQ ID NO: 58421 - DNA, 15 bp, Homo sapiens
gactccagggtcctg

SEQ ID NO: 58422 - DNA, 15 bp, Homo sapiens
cgactccagggtcct

SEQ ID NO: 58423 - DNA, 15 bp, Homo sapiens
tcgactccagggtcc

SEQ ID NO: 58424 - DNA, 15 bp, Homo sapiens
atcgactccagggtc

SEQ ID NO: 58425 - DNA, 15 bp, Homo sapiens
aatcgactccagggt

SEQ ID NO: 58426 - DNA, 15 bp, Homo sapiens
caatcgactccaggg

SEQ ID NO: 58427 - DNA, 15 bp, Homo sapiens
tcaatcgactccagg

SEQ ID NO: 58428 - DNA, 15 bp, Homo sapiens
atcaatcgactccag

SEQ ID NO: 58429 - DNA, 15 bp, Homo sapiens
aatcaatcgactcca

SEQ ID NO: 58430 - DNA, 15 bp, Homo sapiens
taatcaatcgactcc

SEQ ID NO: 58431 - DNA, 15 bp, Homo sapiens
ctaatcaatcgactc

SEQ ID NO: 58432 - DNA, 15 bp, Homo sapiens
tctaatcaatcgact

SEQ ID NO: 58433 - DNA, 15 bp, Homo sapiens
ctctaatcaatcgac

SEQ ID NO: 58434 - DNA, 15 bp, Homo sapiens
gctctaatcaatcga

SEQ ID NO: 58435 - DNA, 15 bp, Homo sapiens
ggctctaatcaatcg

SEQ ID NO: 58436 - DNA, 15 bp, Homo sapiens
aggctctaatcaatc

SEQ ID NO: 58437 - DNA, 15 bp, Homo sapiens
taggctctaatcaat

SEQ ID NO: 58438 - DNA, 15 bp, Homo sapiens
ctaggctctaatcaa

SEQ ID NO: 58439 - DNA, 15 bp, Homo sapiens
actaggctctaatca

SEQ ID NO: 58440 - DNA, 15 bp, Homo sapiens
gactaggctctaatc

SEQ ID NO: 58441 - DNA, 15 bp, Homo sapiens
ggactaggctctaat

SEQ ID NO: 58442 - DNA, 15 bp, Homo sapiens
tggactaggctctaa

SEQ ID NO: 58443 - DNA, 15 bp, Homo sapiens
ctggactaggctcta

SEQ ID NO: 58444 - DNA, 15 bp, Homo sapiens
cctggactaggctct

SEQ ID NO: 58445 - DNA, 15 bp, Homo sapiens
tcctggactaggctc

SEQ ID NO: 58446 - DNA, 15 bp, Homo sapiens
ctcctggactaggct

SEQ ID NO: 58447 - DNA, 15 bp, Homo sapiens
tctcctggactaggc

SEQ ID NO: 58448 - DNA, 15 bp, Homo sapiens
ttctcctggactagg

SEQ ID NO: 58449 - DNA, 15 bp, Homo sapiens
attctcctggactag

SEQ ID NO: 58450 - DNA, 15 bp, Homo sapiens
cattctcctggacta

SEQ ID NO: 58451 - DNA, 15 bp, Homo sapiens
tcattctcctggact

SEQ ID NO: 58452 - DNA, 15 bp, Homo sapiens
ttcattctcctggac

SEQ ID NO: 58453 - DNA, 15 bp, Homo sapiens
attcattctcctgga

SEQ ID NO: 58454 - DNA, 15 bp, Homo sapiens
aattcattctcctgg

SEQ ID NO: 58455 - DNA, 15 bp, Homo sapiens
caattcattctcctg

SEQ ID NO: 58456 - DNA, 15 bp, Homo sapiens
tcaattcattctcct

SEQ ID NO: 58457 - DNA, 15 bp, Homo sapiens
gtcaattcattctcc

SEQ ID NO: 58458 - DNA, 15 bp, Homo sapiens
tgtcaattcattctc

SEQ ID NO: 58459 - DNA, 15 bp, Homo sapiens
gtgtcaattcattct

SEQ ID NO: 58460 - DNA, 15 bp, Homo sapiens
agtgtcaattcattc

SEQ ID NO: 58461 - DNA, 15 bp, Homo sapiens
tagtgtcaattcatt

SEQ ID NO: 58462 - DNA, 15 bp, Homo sapiens
ttagtgtcaattcat

SEQ ID NO: 58463 - DNA, 15 bp, Homo sapiens
attagtgtcaattca

SEQ ID NO: 58464 - DNA, 15 bp, Homo sapiens
gattagtgtcaattc

SEQ ID NO: 58465 - DNA, 15 bp, Homo sapiens
agattagtgtcaatt

SEQ ID NO: 58466 - DNA, 15 bp, Homo sapiens
gagattagtgtcaat

SEQ ID NO: 58467 - DNA, 15 bp, Homo sapiens
agagattagtgtcaa

SEQ ID NO: 58468 - DNA, 15 bp, Homo sapiens
cagagattagtgtca

SEQ ID NO: 58469 - DNA, 15 bp, Homo sapiens
gcagagattagtgtc

SEQ ID NO: 58470 - DNA, 15 bp, Homo sapiens
agcagagattagtgt

SEQ ID NO: 58471 - DNA, 15 bp, Homo sapiens
aagcagagattagtg

SEQ ID NO: 58472 - DNA, 15 bp, Homo sapiens
caagcagagattagt

SEQ ID NO: 58473 - DNA, 15 bp, Homo sapiens
acaagcagagattag

SEQ ID NO: 58474 - DNA, 15 bp, Homo sapiens
cacaagcagagatta

SEQ ID NO: 58475 - DNA, 15 bp, Homo sapiens
acacaagcagagatt

SEQ ID NO: 58476 - DNA, 15 bp, Homo sapiens
aacacaagcagagat

SEQ ID NO: 58477 - DNA, 15 bp, Homo sapiens
gaacacaagcagaga

SEQ ID NO: 58478 - DNA, 15 bp, Homo sapiens
agaacacaagcagag

SEQ ID NO: 58479 - DNA, 15 bp, Homo sapiens
gagaacacaagcaga

SEQ ID NO: 58480 - DNA, 15 bp, Homo sapiens
agagaacacaagcag

SEQ ID NO: 58481 - DNA, 15 bp, Homo sapiens
cagagaacacaagca

SEQ ID NO: 58482 - DNA, 15 bp, Homo sapiens
acagagaacacaagc

SEQ ID NO: 58483 - DNA, 15 bp, Homo sapiens
gacagagaacacaag

SEQ ID NO: 58484 - DNA, 15 bp, Homo sapiens
agacagagaacacaa

SEQ ID NO: 58485 - DNA, 15 bp, Homo sapiens
gagacagagaacaca

SEQ ID NO: 58486 - DNA, 15 bp, Homo sapiens
ggagacagagaacac

SEQ ID NO: 58487 - DNA, 15 bp, Homo sapiens
tggagacagagaaca

SEQ ID NO: 58488 - DNA, 15 bp, Homo sapiens
ctggagacagagaac

SEQ ID NO: 58489 - DNA, 15 bp, Homo sapiens
gctggagacagagaa

SEQ ID NO: 58490 - DNA, 15 bp, Homo sapiens
tgctggagacagaga

SEQ ID NO: 58491 - DNA, 15 bp, Homo sapiens
ttgctggagacagag

SEQ ID NO: 58492 - DNA, 15 bp, Homo sapiens
attgctggagacaga

SEQ ID NO: 58493 - DNA, 15 bp, Homo sapiens
aattgctggagacag

SEQ ID NO: 58494 - DNA, 15 bp, Homo sapiens
caattgctggagaca

SEQ ID NO: 58495 - DNA, 15 bp, Homo sapiens
ccaattgctggagac

SEQ ID NO: 58496 - DNA, 15 bp, Homo sapiens
cccaattgctggaga

SEQ ID NO: 58497 - DNA, 15 bp, Homo sapiens
gcccaattgctggag

SEQ ID NO: 58498 - DNA, 15 bp, Homo sapiens
tgcccaattgctgga

SEQ ID NO: 58499 - DNA, 15 bp, Homo sapiens
ctgcccaattgctgg

SEQ ID NO: 58500 - DNA, 15 bp, Homo sapiens
tctgcccaattgctg

SEQ ID NO: 58501 - DNA, 15 bp, Homo sapiens
atctgcccaattgct

SEQ ID NO: 58502 - DNA, 15 bp, Homo sapiens
catctgcccaattgc

SEQ ID NO: 58503 - DNA, 15 bp, Homo sapiens
acatctgcccaattg

SEQ ID NO: 58504 - DNA, 15 bp, Homo sapiens
cacatctgcccaatt

SEQ ID NO: 58505 - DNA, 15 bp, Homo sapiens
acacatctgcccaat

SEQ ID NO: 58506 - DNA, 15 bp, Homo sapiens
cacacatctgcccaa

SEQ ID NO: 58507 - DNA, 15 bp, Homo sapiens
tcacacatctgccca

SEQ ID NO: 58508 - DNA, 15 bp, Homo sapiens
ctcacacatctgccc

SEQ ID NO: 58509 - DNA, 15 bp, Homo sapiens
cctcacacatctgcc

SEQ ID NO: 58510 - DNA, 15 bp, Homo sapiens
gcctcacacatctgc

SEQ ID NO: 58511 - DNA, 15 bp, Homo sapiens
tgcctcacacatctg

SEQ ID NO: 58512 - DNA, 15 bp, Homo sapiens
gtgcctcacacatct

SEQ ID NO: 58513 - DNA, 15 bp, Homo sapiens
ggtgcctcacacatc

SEQ ID NO: 58514 - DNA, 15 bp, Homo sapiens
aggtgcctcacacat

SEQ ID NO: 58515 - DNA, 15 bp, Homo sapiens
caggtgcctcacaca

SEQ ID NO: 58516 - DNA, 15 bp, Homo sapiens
acaggtgcctcacac

SEQ ID NO: 58517 - DNA, 15 bp, Homo sapiens
cacaggtgcctcaca

SEQ ID NO: 58518 - DNA, 15 bp, Homo sapiens
ccacaggtgcctcac

SEQ ID NO: 58519 - DNA, 15 bp, Homo sapiens
accacaggtgcctca

SEQ ID NO: 58520 - DNA, 15 bp, Homo sapiens
caccacaggtgcctc

SEQ ID NO: 58521 - DNA, 15 bp, Homo sapiens
tcaccacaggtgcct

SEQ ID NO: 58522 - DNA, 15 bp, Homo sapiens
gtcaccacaggtgcc

SEQ ID NO: 58523 - DNA, 15 bp, Homo sapiens
ggtcaccacaggtgc

SEQ ID NO: 58524 - DNA, 15 bp, Homo sapiens
gggtcaccacaggtg

SEQ ID NO: 58525 - DNA, 15 bp, Homo sapiens
cgggtcaccacaggt

SEQ ID NO: 58526 - DNA, 15 bp, Homo sapiens
tcgggtcaccacagg

SEQ ID NO: 58527 - DNA, 15 bp, Homo sapiens
ctcgggtcaccacag

SEQ ID NO: 58528 - DNA, 15 bp, Homo sapiens
tctcgggtcaccaca

SEQ ID NO: 58529 - DNA, 15 bp, Homo sapiens
ctctcgggtcaccac

SEQ ID NO: 58530 - DNA, 15 bp, Homo sapiens
actctcgggtcacca

SEQ ID NO: 58531 - DNA, 15 bp, Homo sapiens
cactctcgggtcacc

SEQ ID NO: 58532 - DNA, 15 bp, Homo sapiens
ccactctcgggtcac

SEQ ID NO: 58533 - DNA, 15 bp, Homo sapiens
cccactctcgggtca

SEQ ID NO: 58534 - DNA, 15 bp, Homo sapiens
acccactctcgggtc

SEQ ID NO: 58535 - DNA, 15 bp, Homo sapiens
cacccactctcgggt

SEQ ID NO: 58536 - DNA, 15 bp, Homo sapiens
acacccactctcggg

SEQ ID NO: 58537 - DNA, 15 bp, Homo sapiens
aacacccactctcgg

SEQ ID NO: 58538 - DNA, 15 bp, Homo sapiens
caacacccactctcg

SEQ ID NO: 58539 - DNA, 15 bp, Homo sapiens
ccaacacccactctc

SEQ ID NO: 58540 - DNA, 15 bp, Homo sapiens
tccaacacccactct

SEQ ID NO: 58541 - DNA, 15 bp, Homo sapiens
gtccaacacccactc

SEQ ID NO: 58542 - DNA, 15 bp, Homo sapiens
tgtccaacacccact

SEQ ID NO: 58543 - DNA, 15 bp, Homo sapiens
ctgtccaacacccac

SEQ ID NO: 58544 - DNA, 15 bp, Homo sapiens
actgtccaacaccca

SEQ ID NO: 58545 - DNA, 15 bp, Homo sapiens
cactgtccaacaccc

SEQ ID NO: 58546 - DNA, 15 bp, Homo sapiens
acactgtccaacacc

SEQ ID NO: 58547 - DNA, 15 bp, Homo sapiens
tacactgtccaacac

SEQ ID NO: 58548 - DNA, 15 bp, Homo sapiens
ctacactgtccaaca

SEQ ID NO: 58549 - DNA, 15 bp, Homo sapiens
gctacactgtccaac

SEQ ID NO: 58550 - DNA, 15 bp, Homo sapiens
tgctacactgtccaa

SEQ ID NO: 58551 - DNA, 15 bp, Homo sapiens
gtgctacactgtcca

SEQ ID NO: 58552 - DNA, 15 bp, Homo sapiens
agtgctacactgtcc

SEQ ID NO: 58553 - DNA, 15 bp, Homo sapiens
gagtgctacactgtc

SEQ ID NO: 58554 - DNA, 15 bp, Homo sapiens
agagtgctacactgt

SEQ ID NO: 58555 - DNA, 15 bp, Homo sapiens
tagagtgctacactg

SEQ ID NO: 58556 - DNA, 15 bp, Homo sapiens
gtagagtgctacact

SEQ ID NO: 58557 - DNA, 15 bp, Homo sapiens
ggtagagtgctacac

SEQ ID NO: 58558 - DNA, 15 bp, Homo sapiens
tggtagagtgctaca

SEQ ID NO: 58559 - DNA, 15 bp, Homo sapiens
ctggtagagtgctac

SEQ ID NO: 58560 - DNA, 15 bp, Homo sapiens
actggtagagtgcta

SEQ ID NO: 58561 - DNA, 15 bp, Homo sapiens
cactggtagagtgct

SEQ ID NO: 58562 - DNA, 15 bp, Homo sapiens
gcactggtagagtgc

SEQ ID NO: 58563 - DNA, 15 bp, Homo sapiens
ggcactggtagagtg

SEQ ID NO: 58564 - DNA, 15 bp, Homo sapiens
tggcactggtagagt

SEQ ID NO: 58565 - DNA, 15 bp, Homo sapiens
ctggcactggtagag

SEQ ID NO: 58566 - DNA, 15 bp, Homo sapiens
cctggcactggtaga

SEQ ID NO: 58567 - DNA, 15 bp, Homo sapiens
tcctggcactggtag

SEQ ID NO: 58568 - DNA, 15 bp, Homo sapiens
ctcctggcactggta

SEQ ID NO: 58569 - DNA, 15 bp, Homo sapiens
gctcctggcactggt

SEQ ID NO: 58570 - DNA, 15 bp, Homo sapiens
agctcctggcactgg

SEQ ID NO: 58571 - DNA, 15 bp, Homo sapiens
cagctcctggcactg

SEQ ID NO: 58572 - DNA, 15 bp, Homo sapiens
ccagctcctggcact

SEQ ID NO: 58573 - DNA, 15 bp, Homo sapiens
tccagctcctggcac

SEQ ID NO: 58574 - DNA, 15 bp, Homo sapiens
gtccagctcctggca

SEQ ID NO: 58575 - DNA, 15 bp, Homo sapiens
tgtccagctcctggc

SEQ ID NO: 58576 - DNA, 15 bp, Homo sapiens
gtgtccagctcctgg

SEQ ID NO: 58577 - DNA, 15 bp, Homo sapiens
ggtgtccagctcctg

SEQ ID NO: 58578 - DNA, 15 bp, Homo sapiens
aggtgtccagctcct

SEQ ID NO: 58579 - DNA, 15 bp, Homo sapiens
taggtgtccagctcc

SEQ ID NO: 58580 - DNA, 15 bp, Homo sapiens
gtaggtgtccagctc

SEQ ID NO: 58581 - DNA, 15 bp, Homo sapiens
ggtaggtgtccagct

SEQ ID NO: 58582 - DNA, 15 bp, Homo sapiens
aggtaggtgtccagc

SEQ ID NO: 58583 - DNA, 15 bp, Homo sapiens
caggtaggtgtccag

SEQ ID NO: 58584 - DNA, 15 bp, Homo sapiens
tcaggtaggtgtcca

SEQ ID NO: 58585 - DNA, 15 bp, Homo sapiens
atcaggtaggtgtcc

SEQ ID NO: 58586 - DNA, 15 bp, Homo sapiens
tatcaggtaggtgtc

SEQ ID NO: 58587 - DNA, 15 bp, Homo sapiens
gtatcaggtaggtgt

SEQ ID NO: 58588 - DNA, 15 bp, Homo sapiens
ggtatcaggtaggtg

SEQ ID NO: 58589 - DNA, 15 bp, Homo sapiens
gggtatcaggtaggt

SEQ ID NO: 58590 - DNA, 15 bp, Homo sapiens
ggggtatcaggtagg

SEQ ID NO: 58591 - DNA, 15 bp, Homo sapiens
tggggtatcaggtag

SEQ ID NO: 58592 - DNA, 15 bp, Homo sapiens
ctggggtatcaggta

SEQ ID NO: 58593 - DNA, 15 bp, Homo sapiens
tctggggtatcaggt

SEQ ID NO: 58594 - DNA, 15 bp, Homo sapiens
atctggggtatcagg

SEQ ID NO: 58595 - DNA, 15 bp, Homo sapiens
gatctggggtatcag

SEQ ID NO: 58596 - DNA, 15 bp, Homo sapiens
ggatctggggtatca

SEQ ID NO: 58597 - DNA, 15 bp, Homo sapiens
gggatctggggtatc

SEQ ID NO: 58598 - DNA, 15 bp, Homo sapiens
ggggatctggggtat

SEQ ID NO: 58599 - DNA, 15 bp, Homo sapiens
gggggatctggggta

SEQ ID NO: 58600 - DNA, 15 bp, Homo sapiens
tgggggatctggggt

SEQ ID NO: 58601 - DNA, 15 bp, Homo sapiens
gtgggggatctgggg

SEQ ID NO: 58602 - DNA, 15 bp, Homo sapiens
tgtgggggatctggg

SEQ ID NO: 58603 - DNA, 15 bp, Homo sapiens
ctgtgggggatctgg

SEQ ID NO: 58604 - DNA, 15 bp, Homo sapiens
gctgtgggggatctg

SEQ ID NO: 58605 - DNA, 15 bp, Homo sapiens
ggctgtgggggatct

SEQ ID NO: 58606 - DNA, 15 bp, Homo sapiens
tggctgtgggggatc

SEQ ID NO: 58607 - DNA, 15 bp, Homo sapiens
gtggctgtgggggat

SEQ ID NO: 58608 - DNA, 15 bp, Homo sapiens
agtggctgtggggga

SEQ ID NO: 58609 - DNA, 15 bp, Homo sapiens
tagtggctgtggggg

SEQ ID NO: 58610 - DNA, 15 bp, Homo sapiens
gtagtggctgtgggg

SEQ ID NO: 58611 - DNA, 15 bp, Homo sapiens
agtagtggctgtggg

SEQ ID NO: 58612 - DNA, 15 bp, Homo sapiens
cagtagtggctgtgg

SEQ ID NO: 58613 - DNA, 15 bp, Homo sapiens
tcagtagtggctgtg

SEQ ID NO: 58614 - DNA, 15 bp, Homo sapiens
gtcagtagtggctgt

SEQ ID NO: 58615 - DNA, 15 bp, Homo sapiens
agtcagtagtggctg

SEQ ID NO: 58616 - DNA, 15 bp, Homo sapiens
cagtcagtagtggct

SEQ ID NO: 58617 - DNA, 15 bp, Homo sapiens
gcagtcagtagtggc

SEQ ID NO: 58618 - DNA, 15 bp, Homo sapiens
tgcagtcagtagtgg

SEQ ID NO: 58619 - DNA, 15 bp, Homo sapiens
ctgcagtcagtagtg

SEQ ID NO: 58620 - DNA, 15 bp, Homo sapiens
gctgcagtcagtagt

SEQ ID NO: 58621 - DNA, 15 bp, Homo sapiens
ggctgcagtcagtag

SEQ ID NO: 58622 - DNA, 15 bp, Homo sapiens
tggctgcagtcagta

SEQ ID NO: 58623 - DNA, 15 bp, Homo sapiens
ctggctgcagtcagt

SEQ ID NO: 58624 - DNA, 15 bp, Homo sapiens
gctggctgcagtcag

SEQ ID NO: 58625 - DNA, 15 bp, Homo sapiens
ggctggctgcagtca

SEQ ID NO: 58626 - DNA, 15 bp, Homo sapiens
tggctggctgcagtc

SEQ ID NO: 58627 - DNA, 15 bp, Homo sapiens
gtggctggctgcagt

SEQ ID NO: 58628 - DNA, 15 bp, Homo sapiens
tgtggctggctgcag

SEQ ID NO: 58629 - DNA, 15 bp, Homo sapiens
ctgtggctggctgca

SEQ ID NO: 58630 - DNA, 15 bp, Homo sapiens
cctgtggctggctgc

SEQ ID NO: 58631 - DNA, 15 bp, Homo sapiens
acctgtggctggctg

SEQ ID NO: 58632 - DNA, 15 bp, Homo sapiens
tacctgtggctggct

SEQ ID NO: 58633 - DNA, 15 bp, Homo sapiens
gtacctgtggctggc

SEQ ID NO: 58634 - DNA, 15 bp, Homo sapiens
tgtacctgtggctgg

SEQ ID NO: 58635 - DNA, 15 bp, Homo sapiens
ctgtacctgtggctg

SEQ ID NO: 58636 - DNA, 15 bp, Homo sapiens
tctgtacctgtggct

SEQ ID NO: 58637 - DNA, 15 bp, Homo sapiens
ctctgtacctgtggc

SEQ ID NO: 58638 - DNA, 15 bp, Homo sapiens
gctctgtacctgtgg

SEQ ID NO: 58639 - DNA, 15 bp, Homo sapiens
ggctctgtacctgtg

SEQ ID NO: 58640 - DNA, 15 bp, Homo sapiens
tggctctgtacctgt

SEQ ID NO: 58641 - DNA, 15 bp, Homo sapiens
gtggctctgtacctg

SEQ ID NO: 58642 - DNA, 15 bp, Homo sapiens
tgtggctctgtacct

SEQ ID NO: 58643 - DNA, 15 bp, Homo sapiens
ctgtggctctgtacc

SEQ ID NO: 58644 - DNA, 15 bp, Homo sapiens
cctgtggctctgtac

SEQ ID NO: 58645 - DNA, 15 bp, Homo sapiens
tcctgtggctctgta

SEQ ID NO: 58646 - DNA, 15 bp, Homo sapiens
gtcctgtggctctgt

SEQ ID NO: 58647 - DNA, 15 bp, Homo sapiens
ggtcctgtggctctg

SEQ ID NO: 58648 - DNA, 15 bp, Homo sapiens
gggtcctgtggctct

SEQ ID NO: 58649 - DNA, 15 bp, Homo sapiens
ggggtcctgtggctc

SEQ ID NO: 58650 - DNA, 15 bp, Homo sapiens
tggggtcctgtggct

SEQ ID NO: 58651 - DNA, 15 bp, Homo sapiens
ttggggtcctgtggc

SEQ ID NO: 58652 - DNA, 15 bp, Homo sapiens
cttggggtcctgtgg

SEQ ID NO: 58653 - DNA, 15 bp, Homo sapiens
tcttggggtcctgtg

SEQ ID NO: 58654 - DNA, 15 bp, Homo sapiens
ttcttggggtcctgt

SEQ ID NO: 58655 - DNA, 15 bp, Homo sapiens
attcttggggtcctg

SEQ ID NO: 58656 - DNA, 15 bp, Homo sapiens
cattcttggggtcct

SEQ ID NO: 58657 - DNA, 15 bp, Homo sapiens
tcattcttggggtcc

SEQ ID NO: 58658 - DNA, 15 bp, Homo sapiens
ctcattcttggggtc

SEQ ID NO: 58659 - DNA, 15 bp, Homo sapiens
gctcattcttggggt

SEQ ID NO: 58660 - DNA, 15 bp, Homo sapiens
agctcattcttgggg

SEQ ID NO: 58661 - DNA, 15 bp, Homo sapiens
aagctcattcttggg

SEQ ID NO: 58662 - DNA, 15 bp, Homo sapiens
taagctcattcttgg

SEQ ID NO: 58663 - DNA, 15 bp, Homo sapiens
gtaagctcattcttg

SEQ ID NO: 58664 - DNA, 15 bp, Homo sapiens
tgtaagctcattctt

SEQ ID NO: 58665 - DNA, 15 bp, Homo sapiens
ttgtaagctcattct

SEQ ID NO: 58666 - DNA, 15 bp, Homo sapiens
tttgtaagctcattc

SEQ ID NO: 58667 - DNA, 15 bp, Homo sapiens
ctttgtaagctcatt

SEQ ID NO: 58668 - DNA, 15 bp, Homo sapiens
actttgtaagctcat

SEQ ID NO: 58669 - DNA, 15 bp, Homo sapiens
cactttgtaagctca

SEQ ID NO: 58670 - DNA, 15 bp, Homo sapiens
ccactttgtaagctc

SEQ ID NO: 58671 - DNA, 15 bp, Homo sapiens
gccactttgtaagct

SEQ ID NO: 58672 - DNA, 15 bp, Homo sapiens
ggccactttgtaagc

SEQ ID NO: 58673 - DNA, 15 bp, Homo sapiens
aggccactttgtaag

SEQ ID NO: 58674 - DNA, 15 bp, Homo sapiens
aaggccactttgtaa

SEQ ID NO: 58675 - DNA, 15 bp, Homo sapiens
aaaggccactttgta

SEQ ID NO: 58676 - DNA, 15 bp, Homo sapiens
gaaaggccactttgt

SEQ ID NO: 58677 - DNA, 15 bp, Homo sapiens
ggaaaggccactttg

SEQ ID NO: 58678 - DNA, 15 bp, Homo sapiens
tggaaaggccacttt

SEQ ID NO: 58679 - DNA, 15 bp, Homo sapiens
ctggaaaggccactt

SEQ ID NO: 58680 - DNA, 15 bp, Homo sapiens
cctggaaaggccact

SEQ ID NO: 58681 - DNA, 15 bp, Homo sapiens
gcctggaaaggccac

SEQ ID NO: 58682 - DNA, 15 bp, Homo sapiens
ggcctggaaaggcca

SEQ ID NO: 58683 - DNA, 15 bp, Homo sapiens
gggcctggaaaggcc

SEQ ID NO: 58684 - DNA, 15 bp, Homo sapiens
agggcctggaaaggc

SEQ ID NO: 58685 - DNA, 15 bp, Homo sapiens
cagggcctggaaagg

SEQ ID NO: 58686 - DNA, 15 bp, Homo sapiens
ccagggcctggaaag

SEQ ID NO: 58687 - DNA, 15 bp, Homo sapiens
cccagggcctggaaa

SEQ ID NO: 58688 - DNA, 15 bp, Homo sapiens
tcccagggcctggaa

SEQ ID NO: 58689 - DNA, 15 bp, Homo sapiens
ctcccagggcctgga

SEQ ID NO: 58690 - DNA, 15 bp, Homo sapiens
gctcccagggcctgg

SEQ ID NO: 58691 - DNA, 15 bp, Homo sapiens
agctcccagggcctg

SEQ ID NO: 58692 - DNA, 15 bp, Homo sapiens
gagctcccagggcct

SEQ ID NO: 58693 - DNA, 15 bp, Homo sapiens
ggagctcccagggcc

SEQ ID NO: 58694 - DNA, 15 bp, Homo sapiens
aggagctcccagggc

SEQ ID NO: 58695 - DNA, 15 bp, Homo sapiens
gaggagctcccaggg

SEQ ID NO: 58696 - DNA, 15 bp, Homo sapiens
agaggagctcccagg

SEQ ID NO: 58697 - DNA, 15 bp, Homo sapiens
gagaggagctcccag

SEQ ID NO: 58698 - DNA, 15 bp, Homo sapiens
tgagaggagctccca

SEQ ID NO: 58699 - DNA, 15 bp, Homo sapiens
gtgagaggagctccc

SEQ ID NO: 58700 - DNA, 15 bp, Homo sapiens
agtgagaggagctcc

SEQ ID NO: 58701 - DNA, 15 bp, Homo sapiens
gagtgagaggagctc

SEQ ID NO: 58702 - DNA, 15 bp, Homo sapiens
agagtgagaggagct

SEQ ID NO: 58703 - DNA, 15 bp, Homo sapiens
aagagtgagaggagc

SEQ ID NO: 58704 - DNA, 15 bp, Homo sapiens
gaagagtgagaggag

SEQ ID NO: 58705 - DNA, 15 bp, Homo sapiens
tgaagagtgagagga

SEQ ID NO: 58706 - DNA, 15 bp, Homo sapiens
ctgaagagtgagagg

SEQ ID NO: 58707 - DNA, 15 bp, Homo sapiens
actgaagagtgagag

SEQ ID NO: 58708 - DNA, 15 bp, Homo sapiens
gactgaagagtgaga

SEQ ID NO: 58709 - DNA, 15 bp, Homo sapiens
ggactgaagagtgag

SEQ ID NO: 58710 - DNA, 15 bp, Homo sapiens
aggactgaagagtga

SEQ ID NO: 58711 - DNA, 15 bp, Homo sapiens
aaggactgaagagtg

SEQ ID NO: 58712 - DNA, 15 bp, Homo sapiens
gaaggactgaagagt

SEQ ID NO: 58713 - DNA, 15 bp, Homo sapiens
agaaggactgaagag

SEQ ID NO: 58714 - DNA, 15 bp, Homo sapiens
tagaaggactgaaga

SEQ ID NO: 58715 - DNA, 15 bp, Homo sapiens
gtagaaggactgaag

SEQ ID NO: 58716 - DNA, 15 bp, Homo sapiens
agtagaaggactgaa

SEQ ID NO: 58717 - DNA, 15 bp, Homo sapiens
cagtagaaggactga

SEQ ID NO: 58718 - DNA, 15 bp, Homo sapiens
acagtagaaggactg

SEQ ID NO: 58719 - DNA, 15 bp, Homo sapiens
gacagtagaaggact

SEQ ID NO: 58720 - DNA, 15 bp, Homo sapiens
ggacagtagaaggac

SEQ ID NO: 58721 - DNA, 15 bp, Homo sapiens
aggacagtagaagga

SEQ ID NO: 58722 - DNA, 15 bp, Homo sapiens
caggacagtagaagg

SEQ ID NO: 58723 - DNA, 15 bp, Homo sapiens
ccaggacagtagaag

SEQ ID NO: 58724 - DNA, 15 bp, Homo sapiens
gccaggacagtagaa

SEQ ID NO: 58725 - DNA, 15 bp, Homo sapiens
agccaggacagtaga

SEQ ID NO: 58726 - DNA, 15 bp, Homo sapiens
tagccaggacagtag

SEQ ID NO: 58727 - DNA, 15 bp, Homo sapiens
gtagccaggacagta

SEQ ID NO: 58728 - DNA, 15 bp, Homo sapiens
agtagccaggacagt

SEQ ID NO: 58729 - DNA, 15 bp, Homo sapiens
tagtagccaggacag

SEQ ID NO: 58730 - DNA, 15 bp, Homo sapiens
ttagtagccaggaca

SEQ ID NO: 58731 - DNA, 15 bp, Homo sapiens
tttagtagccaggac

SEQ ID NO: 58732 - DNA, 15 bp, Homo sapiens
atttagtagccagga

SEQ ID NO: 58733 - DNA, 15 bp, Homo sapiens
tatttagtagccagg

SEQ ID NO: 58734 - DNA, 15 bp, Homo sapiens
atatttagtagccag

SEQ ID NO: 58735 - DNA, 15 bp, Homo sapiens
aatatttagtagcca

SEQ ID NO: 58736 - DNA, 15 bp, Homo sapiens
aaatatttagtagcc

SEQ ID NO: 58737 - DNA, 15 bp, Homo sapiens
aaaatatttagtagc

SEQ ID NO: 58738 - DNA, 15 bp, Homo sapiens
taaaatatttagtag

SEQ ID NO: 58739 - DNA, 15 bp, Homo sapiens
cataaaatatttagt

SEQ ID NO: 58740 - DNA, 15 bp, Homo sapiens
acataaaatatttag

SEQ ID NO: 58741 - DNA, 15 bp, Homo sapiens
tacataaaatattta

SEQ ID NO: 58742 - DNA, 15 bp, Homo sapiens
gtacataaaatattt

SEQ ID NO: 58743 - DNA, 15 bp, Homo sapiens
tgtacataaaatatt

SEQ ID NO: 58744 - DNA, 15 bp, Homo sapiens
atgtacataaaatat

SEQ ID NO: 58745 - DNA, 15 bp, Homo sapiens
gatgtacataaaata

SEQ ID NO: 58746 - DNA, 15 bp, Homo sapiens
tgatgtacataaaat

SEQ ID NO: 58747 - DNA, 15 bp, Homo sapiens
ctgatgtacataaaa

SEQ ID NO: 58748 - DNA, 15 bp, Homo sapiens
gctgatgtacataaa

SEQ ID NO: 58749 - DNA, 15 bp, Homo sapiens
ggctgatgtacataa

SEQ ID NO: 58750 - DNA, 15 bp, Homo sapiens
aggctgatgtacata

SEQ ID NO: 58751 - DNA, 15 bp, Homo sapiens
caggctgatgtacat

SEQ ID NO: 58752 - DNA, 15 bp, Homo sapiens
tcaggctgatgtaca

SEQ ID NO: 58753 - DNA, 15 bp, Homo sapiens
ttcaggctgatgtac

SEQ ID NO: 58754 - DNA, 15 bp, Homo sapiens
tttcaggctgatgta

SEQ ID NO: 58755 - DNA, 15 bp, Homo sapiens
ttttcaggctgatgt

SEQ ID NO: 58756 - DNA, 15 bp, Homo sapiens
cttttcaggctgatg

SEQ ID NO: 58757 - DNA, 15 bp, Homo sapiens
ccttttcaggctgat

SEQ ID NO: 58758 - DNA, 15 bp, Homo sapiens
tccttttcaggctga

SEQ ID NO: 58759 - DNA, 15 bp, Homo sapiens
gtccttttcaggctg

SEQ ID NO: 58760 - DNA, 15 bp, Homo sapiens
agtccttttcaggct

SEQ ID NO: 58761 - DNA, 15 bp, Homo sapiens
aagtccttttcaggc

SEQ ID NO: 58762 - DNA, 15 bp, Homo sapiens
gaagtccttttcagg

SEQ ID NO: 58763 - DNA, 15 bp, Homo sapiens
agaagtccttttcag

SEQ ID NO: 58764 - DNA, 15 bp, Homo sapiens
cagaagtccttttca

SEQ ID NO: 58765 - DNA, 15 bp, Homo sapiens
ccagaagtccttttc

SEQ ID NO: 58766 - DNA, 15 bp, Homo sapiens
gccagaagtcctttt

SEQ ID NO: 58767 - DNA, 15 bp, Homo sapiens
agccagaagtccttt

SEQ ID NO: 58768 - DNA, 15 bp, Homo sapiens
tagccagaagtcctt

SEQ ID NO: 58769 - DNA, 15 bp, Homo sapiens
atagccagaagtcct

SEQ ID NO: 58770 - DNA, 15 bp, Homo sapiens
catagccagaagtcc

SEQ ID NO: 58771 - DNA, 15 bp, Homo sapiens
gcatagccagaagtc

SEQ ID NO: 58772 - DNA, 15 bp, Homo sapiens
tgcatagccagaagt

SEQ ID NO: 58773 - DNA, 15 bp, Homo sapiens
ttgcatagccagaag

SEQ ID NO: 58774 - DNA, 15 bp, Homo sapiens
cttgcatagccagaa

SEQ ID NO: 58775 - DNA, 15 bp, Homo sapiens
ccttgcatagccaga

SEQ ID NO: 58776 - DNA, 15 bp, Homo sapiens
cccttgcatagccag

SEQ ID NO: 58777 - DNA, 15 bp, Homo sapiens
acccttgcatagcca

SEQ ID NO: 58778 - DNA, 15 bp, Homo sapiens
gacccttgcatagcc

SEQ ID NO: 58779 - DNA, 15 bp, Homo sapiens
ggacccttgcatagc

SEQ ID NO: 58780 - DNA, 15 bp, Homo sapiens
gggacccttgcatag

SEQ ID NO: 58781 - DNA, 15 bp, Homo sapiens
agggacccttgcata

SEQ ID NO: 58782 - DNA, 15 bp, Homo sapiens
aagggacccttgcat

SEQ ID NO: 58783 - DNA, 15 bp, Homo sapiens
taagggacccttgca

SEQ ID NO: 58784 - DNA, 15 bp, Homo sapiens
ttaagggacccttgc

SEQ ID NO: 58785 - DNA, 15 bp, Homo sapiens
tttaagggacccttg

SEQ ID NO: 58786 - DNA, 15 bp, Homo sapiens
ctttaagggaccctt

SEQ ID NO: 58787 - DNA, 15 bp, Homo sapiens
tctttaagggaccct

SEQ ID NO: 58788 - DNA, 15 bp, Homo sapiens
atctttaagggaccc

SEQ ID NO: 58789 - DNA, 15 bp, Homo sapiens
aatctttaagggacc

SEQ ID NO: 58790 - DNA, 15 bp, Homo sapiens
aaatctttaagggac

SEQ ID NO: 58791 - DNA, 15 bp, Homo sapiens
aaaatctttaaggga

SEQ ID NO: 58792 - DNA, 15 bp, Homo sapiens
gaaaatctttaaggg

SEQ ID NO: 58793 - DNA, 15 bp, Homo sapiens
agaaaatctttaagg

SEQ ID NO: 58794 - DNA, 15 bp, Homo sapiens
cagaaaatctttaag

SEQ ID NO: 58795 - DNA, 15 bp, Homo sapiens
gcagaaaatctttaa

SEQ ID NO: 58796 - DNA, 15 bp, Homo sapiens
agcagaaaatcttta

SEQ ID NO: 58797 - DNA, 15 bp, Homo sapiens
aagcagaaaatcttt

SEQ ID NO: 58798 - DNA, 15 bp, Homo sapiens
caagcagaaaatctt

SEQ ID NO: 58799 - DNA, 15 bp, Homo sapiens
tcaagcagaaaatct

SEQ ID NO: 58800 - DNA, 15 bp, Homo sapiens
ttcaagcagaaaatc

SEQ ID NO: 58801 - DNA, 15 bp, Homo sapiens
cttcaagcagaaaat

SEQ ID NO: 58802 - DNA, 15 bp, Homo sapiens
acttcaagcagaaaa

SEQ ID NO: 58803 - DNA, 15 bp, Homo sapiens
gacttcaagcagaaa

SEQ ID NO: 58804 - DNA, 15 bp, Homo sapiens
agacttcaagcagaa

SEQ ID NO: 58805 - DNA, 15 bp, Homo sapiens
gagacttcaagcaga

SEQ ID NO: 58806 - DNA, 15 bp, Homo sapiens
ggagacttcaagcag

SEQ ID NO: 58807 - DNA, 15 bp, Homo sapiens
gggagacttcaagca

SEQ ID NO: 58808 - DNA, 15 bp, Homo sapiens
agggagacttcaagc

SEQ ID NO: 58809 - DNA, 15 bp, Homo sapiens
aagggagacttcaag

SEQ ID NO: 58810 - DNA, 15 bp, Homo sapiens
caagggagacttcaa

SEQ ID NO: 58811 - DNA, 15 bp, Homo sapiens
ccaagggagacttca

SEQ ID NO: 58812 - DNA, 15 bp, Homo sapiens
tccaagggagacttc

SEQ ID NO: 58813 - DNA, 15 bp, Homo sapiens
ttccaagggagactt

SEQ ID NO: 58814 - DNA, 15 bp, Homo sapiens
tttccaagggagact

SEQ ID NO: 58815 - DNA, 15 bp, Homo sapiens
atttccaagggagac

SEQ ID NO: 58816 - DNA, 15 bp, Homo sapiens
gatttccaagggaga

SEQ ID NO: 58817 - DNA, 15 bp, Homo sapiens
agatttccaagggag

SEQ ID NO: 58818 - DNA, 15 bp, Homo sapiens
cagatttccaaggga

SEQ ID NO: 58819 - DNA, 15 bp, Homo sapiens
gcagatttccaaggg

SEQ ID NO: 58820 - DNA, 15 bp, Homo sapiens
ggcagatttccaagg

SEQ ID NO: 58821 - DNA, 15 bp, Homo sapiens
tggcagatttccaag

SEQ ID NO: 58822 - DNA, 15 bp, Homo sapiens
atggcagatttccaa

SEQ ID NO: 58823 - DNA, 15 bp, Homo sapiens
catggcagatttcca

SEQ ID NO: 58824 - DNA, 15 bp, Homo sapiens
tcatggcagatttcc

SEQ ID NO: 58825 - DNA, 15 bp, Homo sapiens
ctcatggcagatttc

SEQ ID NO: 58826 - DNA, 15 bp, Homo sapiens
gctcatggcagattt

SEQ ID NO: 58827 - DNA, 15 bp, Homo sapiens
tgctcatggcagatt

SEQ ID NO: 58828 - DNA, 15 bp, Homo sapiens
gtgctcatggcagat

SEQ ID NO: 58829 - DNA, 15 bp, Homo sapiens
tgtgctcatggcaga

SEQ ID NO: 58830 - DNA, 15 bp, Homo sapiens
ttgtgctcatggcag

SEQ ID NO: 58831 - DNA, 15 bp, Homo sapiens
tttgtgctcatggca

SEQ ID NO: 58832 - DNA, 15 bp, Homo sapiens
ttttgtgctcatggc

SEQ ID NO: 58833 - DNA, 15 bp, Homo sapiens
attttgtgctcatgg

SEQ ID NO: 58834 - DNA, 15 bp, Homo sapiens
aattttgtgctcatg

SEQ ID NO: 58835 - DNA, 15 bp, Homo sapiens
taattttgtgctcat

SEQ ID NO: 58836 - DNA, 15 bp, Homo sapiens
ataattttgtgctca

SEQ ID NO: 58837 - DNA, 15 bp, Homo sapiens
cataattttgtgctc

SEQ ID NO: 58838 - DNA, 15 bp, Homo sapiens
ccataattttgtgct

SEQ ID NO: 58839 - DNA, 15 bp, Homo sapiens
accataattttgtgc

SEQ ID NO: 58840 - DNA, 15 bp, Homo sapiens
taccataattttgtg

SEQ ID NO: 58841 - DNA, 15 bp, Homo sapiens
ttaccataattttgt

SEQ ID NO: 58842 - DNA, 15 bp, Homo sapiens
attaccataattttg

SEQ ID NO: 58843 - DNA, 15 bp, Homo sapiens
aattaccataatttt

SEQ ID NO: 58844 - DNA, 15 bp, Homo sapiens
aaattaccataattt

SEQ ID NO: 58845 - DNA, 15 bp, Homo sapiens
aaaattaccataatt

SEQ ID NO: 58846 - DNA, 15 bp, Homo sapiens
aaaaattaccataat

SEQ ID NO: 58847 - DNA, 15 bp, Homo sapiens
gaaaaattaccataa

SEQ ID NO: 58848 - DNA, 15 bp, Homo sapiens
tgaaaaattaccata

SEQ ID NO: 58849 - DNA, 15 bp, Homo sapiens
gtgaaaaattaccat

SEQ ID NO: 58850 - DNA, 15 bp, Homo sapiens
ggtgaaaaattacca

SEQ ID NO: 58851 - DNA, 15 bp, Homo sapiens
aggtgaaaaattacc

SEQ ID NO: 58852 - DNA, 15 bp, Homo sapiens
caggtgaaaaattac

SEQ ID NO: 58853 - DNA, 15 bp, Homo sapiens
tcaggtgaaaaatta

SEQ ID NO: 58854 - DNA, 15 bp, Homo sapiens
ctcaggtgaaaaatt

SEQ ID NO: 58855 - DNA, 15 bp, Homo sapiens
tctcaggtgaaaaat

SEQ ID NO: 58856 - DNA, 15 bp, Homo sapiens
ttctcaggtgaaaaa

SEQ ID NO: 58857 - DNA, 15 bp, Homo sapiens
cttctcaggtgaaaa

SEQ ID NO: 58858 - DNA, 15 bp, Homo sapiens
tcttctcaggtgaaa

SEQ ID NO: 58859 - DNA, 15 bp, Homo sapiens
atcttctcaggtgaa

SEQ ID NO: 58860 - DNA, 15 bp, Homo sapiens
aatcttctcaggtga

SEQ ID NO: 58861 - DNA, 15 bp, Homo sapiens
aaatcttctcaggtg

SEQ ID NO: 58862 - DNA, 15 bp, Homo sapiens
aaaatcttctcaggt

SEQ ID NO: 58863 - DNA, 15 bp, Homo sapiens
taaaatcttctcagg

SEQ ID NO: 58864 - DNA, 15 bp, Homo sapiens
ttaaaatcttctcag

SEQ ID NO: 58865 - DNA, 15 bp, Homo sapiens
tttaaaatcttctca

SEQ ID NO: 58866 - DNA, 15 bp, Homo sapiens
ttttaaaatcttctc

SEQ ID NO: 58867 - DNA, 15 bp, Homo sapiens
gttttaaaatcttct

SEQ ID NO: 58868 - DNA, 15 bp, Homo sapiens
ggttttaaaatcttc

SEQ ID NO: 58869 - DNA, 15 bp, Homo sapiens
tggttttaaaatctt

SEQ ID NO: 58870 - DNA, 15 bp, Homo sapiens
atggttttaaaatct

SEQ ID NO: 58871 - DNA, 15 bp, Homo sapiens
aatggttttaaaatc

SEQ ID NO: 58872 - DNA, 15 bp, Homo sapiens
aaatggttttaaaat

SEQ ID NO: 58873 - DNA, 15 bp, Homo sapiens
taaatggttttaaaa

SEQ ID NO: 58874 - DNA, 15 bp, Homo sapiens
ttaaatggttttaaa

SEQ ID NO: 58875 - DNA, 15 bp, Homo sapiens
tttaaatggttttaa

SEQ ID NO: 58876 - DNA, 15 bp, Homo sapiens
gtttaaatggtttta

SEQ ID NO: 58877 - DNA, 15 bp, Homo sapiens
cgtttaaatggtttt

SEQ ID NO: 58878 - DNA, 15 bp, Homo sapiens
gcgtttaaatggttt

SEQ ID NO: 58879 - DNA, 15 bp, Homo sapiens
ggcgtttaaatggtt

SEQ ID NO: 58880 - DNA, 15 bp, Homo sapiens
tggcgtttaaatggt

SEQ ID NO: 58881 - DNA, 15 bp, Homo sapiens
gtggcgtttaaatgg

SEQ ID NO: 58882 - DNA, 15 bp, Homo sapiens
ggtggcgtttaaatg

SEQ ID NO: 58883 - DNA, 15 bp, Homo sapiens
tggtggcgtttaaat

SEQ ID NO: 58884 - DNA, 15 bp, Homo sapiens
ttggtggcgtttaaa

SEQ ID NO: 58885 - DNA, 15 bp, Homo sapiens
attggtggcgtttaa

SEQ ID NO: 58886 - DNA, 15 bp, Homo sapiens
aattggtggcgttta

SEQ ID NO: 58887 - DNA, 15 bp, Homo sapiens
caattggtggcgttt

SEQ ID NO: 58888 - DNA, 15 bp, Homo sapiens
tcaattggtggcgtt

SEQ ID NO: 58889 - DNA, 15 bp, Homo sapiens
ctcaattggtggcgt

SEQ ID NO: 58890 - DNA, 15 bp, Homo sapiens
gctcaattggtggcg

SEQ ID NO: 58891 - DNA, 15 bp, Homo sapiens
tgctcaattggtggc

SEQ ID NO: 58892 - DNA, 15 bp, Homo sapiens
ttgctcaattggtgg

SEQ ID NO: 58893 - DNA, 15 bp, Homo sapiens
cttgctcaattggtg

SEQ ID NO: 58894 - DNA, 15 bp, Homo sapiens
tcttgctcaattggt

SEQ ID NO: 58895 - DNA, 15 bp, Homo sapiens
atcttgctcaattgg

SEQ ID NO: 58896 - DNA, 15 bp, Homo sapiens
catcttgctcaattg

SEQ ID NO: 58897 - DNA, 15 bp, Homo sapiens
gcatcttgctcaatt

SEQ ID NO: 58898 - DNA, 15 bp, Homo sapiens
agcatcttgctcaat

SEQ ID NO: 58899 - DNA, 15 bp, Homo sapiens
cagcatcttgctcaa

SEQ ID NO: 58900 - DNA, 15 bp, Homo sapiens
tcagcatcttgctca

SEQ ID NO: 58901 - DNA, 15 bp, Homo sapiens
atcagcatcttgctc

SEQ ID NO: 58902 - DNA, 15 bp, Homo sapiens
aatcagcatcttgct

SEQ ID NO: 58903 - DNA, 15 bp, Homo sapiens
gaatcagcatcttgc

SEQ ID NO: 58904 - DNA, 15 bp, Homo sapiens
tgaatcagcatcttg

SEQ ID NO: 58905 - DNA, 15 bp, Homo sapiens
atgaatcagcatctt

SEQ ID NO: 58906 - DNA, 15 bp, Homo sapiens
aatgaatcagcatct

SEQ ID NO: 58907 - DNA, 15 bp, Homo sapiens
taatgaatcagcatc

SEQ ID NO: 58908 - DNA, 15 bp, Homo sapiens
ataatgaatcagcat

SEQ ID NO: 58909 - DNA, 15 bp, Homo sapiens
aataatgaatcagca

SEQ ID NO: 58910 - DNA, 15 bp, Homo sapiens
aaataatgaatcagc

SEQ ID NO: 58911 - DNA, 15 bp, Homo sapiens
taaataatgaatcag

SEQ ID NO: 58912 - DNA, 15 bp, Homo sapiens
ataaataatgaatca

SEQ ID NO: 58913 - DNA, 15 bp, Homo sapiens
gataaataatgaatc

SEQ ID NO: 58914 - DNA, 15 bp, Homo sapiens
tgataaataatgaat

SEQ ID NO: 58915 - DNA, 15 bp, Homo sapiens
ctgataaataatgaa

SEQ ID NO: 58916 - DNA, 15 bp, Homo sapiens
gctgataaataatga

SEQ ID NO: 58917 - DNA, 15 bp, Homo sapiens
ggctgataaataatg

SEQ ID NO: 58918 - DNA, 15 bp, Homo sapiens
gggctgataaataat

SEQ ID NO: 58919 - DNA, 15 bp, Homo sapiens
agggctgataaataa

SEQ ID NO: 58920 - DNA, 15 bp, Homo sapiens
tagggctgataaata

SEQ ID NO: 58921 - DNA, 15 bp, Homo sapiens
atagggctgataaat

SEQ ID NO: 58922 - DNA, 15 bp, Homo sapiens
aatagggctgataaa

SEQ ID NO: 58923 - DNA, 15 bp, Homo sapiens
gaatagggctgataa

SEQ ID NO: 58924 - DNA, 15 bp, Homo sapiens
agaatagggctgata

SEQ ID NO: 58925 - DNA, 15 bp, Homo sapiens
aagaatagggctgat

SEQ ID NO: 58926 - DNA, 15 bp, Homo sapiens
aaagaatagggctga

SEQ ID NO: 58927 - DNA, 15 bp, Homo sapiens
gaaagaatagggctg

SEQ ID NO: 58928 - DNA, 15 bp, Homo sapiens
agaaagaatagggct

SEQ ID NO: 58929 - DNA, 15 bp, Homo sapiens
tagaaagaatagggc

SEQ ID NO: 58930 - DNA, 15 bp, Homo sapiens
atagaaagaataggg

SEQ ID NO: 58931 - DNA, 15 bp, Homo sapiens
aatagaaagaatagg

SEQ ID NO: 58932 - DNA, 15 bp, Homo sapiens
gaatagaaagaatag

SEQ ID NO: 58933 - DNA, 15 bp, Homo sapiens
tgaatagaaagaata

SEQ ID NO: 58934 - DNA, 15 bp, Homo sapiens
ctgaatagaaagaat

SEQ ID NO: 58935 - DNA, 15 bp, Homo sapiens
cctgaatagaaagaa

SEQ ID NO: 58936 - DNA, 15 bp, Homo sapiens
gcctgaatagaaaga

SEQ ID NO: 58937 - DNA, 15 bp, Homo sapiens
agcctgaatagaaag

SEQ ID NO: 58938 - DNA, 15 bp, Homo sapiens
cagcctgaatagaaa

SEQ ID NO: 58939 - DNA, 15 bp, Homo sapiens
acagcctgaatagaa

SEQ ID NO: 58940 - DNA, 15 bp, Homo sapiens
aacagcctgaataga

SEQ ID NO: 58941 - DNA, 15 bp, Homo sapiens
caacagcctgaatag

SEQ ID NO: 58942 - DNA, 15 bp, Homo sapiens
acaacagcctgaata

SEQ ID NO: 58943 - DNA, 15 bp, Homo sapiens
aacaacagcctgaat

SEQ ID NO: 58944 - DNA, 15 bp, Homo sapiens
caacaacagcctgaa

SEQ ID NO: 58945 - DNA, 15 bp, Homo sapiens
ccaacaacagcctga

SEQ ID NO: 58946 - DNA, 15 bp, Homo sapiens
gccaacaacagcctg

SEQ ID NO: 58947 - DNA, 15 bp, Homo sapiens
agccaacaacagcct

SEQ ID NO: 58948 - DNA, 15 bp, Homo sapiens
aagccaacaacagcc

SEQ ID NO: 58949 - DNA, 15 bp, Homo sapiens
taagccaacaacagc

SEQ ID NO: 58950 - DNA, 15 bp, Homo sapiens
ctaagccaacaacag

SEQ ID NO: 58951 - DNA, 15 bp, Homo sapiens
cctaagccaacaaca

SEQ ID NO: 58952 - DNA, 15 bp, Homo sapiens
ccctaagccaacaac

SEQ ID NO: 58953 - DNA, 15 bp, Homo sapiens
gccctaagccaacaa

SEQ ID NO: 58954 - DNA, 15 bp, Homo sapiens
agccctaagccaaca

SEQ ID NO: 58955 - DNA, 15 bp, Homo sapiens
cagccctaagccaac

SEQ ID NO: 58956 - DNA, 15 bp, Homo sapiens
ccagccctaagccaa

SEQ ID NO: 58957 - DNA, 15 bp, Homo sapiens
tccagccctaagcca

SEQ ID NO: 58958 - DNA, 15 bp, Homo sapiens
ttccagccctaagcc

SEQ ID NO: 58959 - DNA, 15 bp, Homo sapiens
cttccagccctaagc

SEQ ID NO: 58960 - DNA, 15 bp, Homo sapiens
gcttccagccctaag

SEQ ID NO: 58961 - DNA, 15 bp, Homo sapiens
tgcttccagccctaa

SEQ ID NO: 58962 - DNA, 15 bp, Homo sapiens
gtgcttccagcccta

SEQ ID NO: 58963 - DNA, 15 bp, Homo sapiens
tgtgcttccagccct

SEQ ID NO: 58964 - DNA, 15 bp, Homo sapiens
ctgtgcttccagccc

SEQ ID NO: 58965 - DNA, 15 bp, Homo sapiens
tctgtgcttccagcc

SEQ ID NO: 58966 - DNA, 15 bp, Homo sapiens
ctctgtgcttccagc

SEQ ID NO: 58967 - DNA, 15 bp, Homo sapiens
actctgtgcttccag

SEQ ID NO: 58968 - DNA, 15 bp, Homo sapiens
cactctgtgcttcca

SEQ ID NO: 58969 - DNA, 15 bp, Homo sapiens
ccactctgtgcttcc

SEQ ID NO: 58970 - DNA, 15 bp, Homo sapiens
gccactctgtgcttc

SEQ ID NO: 58971 - DNA, 15 bp, Homo sapiens
agccactctgtgctt

SEQ ID NO: 58972 - DNA, 15 bp, Homo sapiens
aagccactctgtgct

SEQ ID NO: 58973 - DNA, 15 bp, Homo sapiens
caagccactctgtgc

SEQ ID NO: 58974 - DNA, 15 bp, Homo sapiens
ccaagccactctgtg

SEQ ID NO: 58975 - DNA, 15 bp, Homo sapiens
gccaagccactctgt

SEQ ID NO: 58976 - DNA, 15 bp, Homo sapiens
ggccaagccactctg

SEQ ID NO: 58977 - DNA, 15 bp, Homo sapiens
aggccaagccactct

SEQ ID NO: 58978 - DNA, 15 bp, Homo sapiens
gaggccaagccactc

SEQ ID NO: 58979 - DNA, 15 bp, Homo sapiens
tgaggccaagccact

SEQ ID NO: 58980 - DNA, 15 bp, Homo sapiens
ttgaggccaagccac

SEQ ID NO: 58981 - DNA, 15 bp, Homo sapiens
cttgaggccaagcca

SEQ ID NO: 58982 - DNA, 15 bp, Homo sapiens
tcttgaggccaagcc

SEQ ID NO: 58983 - DNA, 15 bp, Homo sapiens
ctcttgaggccaagc

SEQ ID NO: 58984 - DNA, 15 bp, Homo sapiens
tctcttgaggccaag

SEQ ID NO: 58985 - DNA, 15 bp, Homo sapiens
ttctcttgaggccaa

SEQ ID NO: 58986 - DNA, 15 bp, Homo sapiens
attctcttgaggcca

SEQ ID NO: 58987 - DNA, 15 bp, Homo sapiens
tattctcttgaggcc

SEQ ID NO: 58988 - DNA, 15 bp, Homo sapiens
ctattctcttgaggc

SEQ ID NO: 58989 - DNA, 15 bp, Homo sapiens
gctattctcttgagg

SEQ ID NO: 58990 - DNA, 15 bp, Homo sapiens
agctattctcttgag

SEQ ID NO: 58991 - DNA, 15 bp, Homo sapiens
cagctattctcttga

SEQ ID NO: 58992 - DNA, 15 bp, Homo sapiens
ccagctattctcttg

SEQ ID NO: 58993 - DNA, 15 bp, Homo sapiens
accagctattctctt

SEQ ID NO: 58994 - DNA, 15 bp, Homo sapiens
aaccagctattctct

SEQ ID NO: 58995 - DNA, 15 bp, Homo sapiens
aaaccagctattctc

SEQ ID NO: 58996 - DNA, 15 bp, Homo sapiens
gaaaccagctattct

SEQ ID NO: 58997 - DNA, 15 bp, Homo sapiens
ggaaaccagctattc

SEQ ID NO: 58998 - DNA, 15 bp, Homo sapiens
gggaaaccagctatt

SEQ ID NO: 58999 - DNA, 15 bp, Homo sapiens
agggaaaccagctat

SEQ ID NO: 59000 - DNA, 15 bp, Homo sapiens
tagggaaaccagcta

SEQ ID NO: 59001 - DNA, 15 bp, Homo sapiens
ttagggaaaccagct

SEQ ID NO: 59002 - DNA, 15 bp, Homo sapiens
cttagggaaaccagc

SEQ ID NO: 59003 - DNA, 15 bp, Homo sapiens
acttagggaaaccag

SEQ ID NO: 59004 - DNA, 15 bp, Homo sapiens
aacttagggaaacca

SEQ ID NO: 59005 - DNA, 15 bp, Homo sapiens
aaacttagggaaacc

SEQ ID NO: 59006 - DNA, 15 bp, Homo sapiens
taaacttagggaaac

SEQ ID NO: 59007 - DNA, 15 bp, Homo sapiens
gtaaacttagggaaa

SEQ ID NO: 59008 - DNA, 15 bp, Homo sapiens
agtaaacttagggaa

SEQ ID NO: 59009 - DNA, 15 bp, Homo sapiens
aagtaaacttaggga

SEQ ID NO: 59010 - DNA, 15 bp, Homo sapiens
gaagtaaacttaggg

SEQ ID NO: 59011 - DNA, 15 bp, Homo sapiens
agaagtaaacttagg

SEQ ID NO: 59012 - DNA, 15 bp, Homo sapiens
gagaagtaaacttag

SEQ ID NO: 59013 - DNA, 15 bp, Homo sapiens
agagaagtaaactta

SEQ ID NO: 59014 - DNA, 15 bp, Homo sapiens
tagagaagtaaactt

SEQ ID NO: 59015 - DNA, 15 bp, Homo sapiens
ttagagaagtaaact

SEQ ID NO: 59016 - DNA, 15 bp, Homo sapiens
tttagagaagtaaac

SEQ ID NO: 59017 - DNA, 15 bp, Homo sapiens
ttttagagaagtaaa

SEQ ID NO: 59018 - DNA, 15 bp, Homo sapiens
gttttagagaagtaa

SEQ ID NO: 59019 - DNA, 15 bp, Homo sapiens
ggttttagagaagta

SEQ ID NO: 59020 - DNA, 15 bp, Homo sapiens
gggttttagagaagt

SEQ ID NO: 59021 - DNA, 15 bp, Homo sapiens
agggttttagagaag

SEQ ID NO: 59022 - DNA, 15 bp, Homo sapiens
cagggttttagagaa

SEQ ID NO: 59023 - DNA, 15 bp, Homo sapiens
acagggttttagaga

SEQ ID NO: 59024 - DNA, 15 bp, Homo sapiens
cacagggttttagag

SEQ ID NO: 59025 - DNA, 15 bp, Homo sapiens
acacagggttttaga

SEQ ID NO: 59026 - DNA, 15 bp, Homo sapiens
aacacagggttttag

SEQ ID NO: 59027 - DNA, 15 bp, Homo sapiens
gaacacagggtttta

SEQ ID NO: 59028 - DNA, 15 bp, Homo sapiens
tgaacacagggtttt

SEQ ID NO: 59029 - DNA, 15 bp, Homo sapiens
gtgaacacagggttt

SEQ ID NO: 59030 - DNA, 15 bp, Homo sapiens
tgtgaacacagggtt

SEQ ID NO: 59031 - DNA, 15 bp, Homo sapiens
ttgtgaacacagggt

SEQ ID NO: 59032 - DNA, 15 bp, Homo sapiens
tttgtgaacacaggg

SEQ ID NO: 59033 - DNA, 15 bp, Homo sapiens
ctttgtgaacacagg

SEQ ID NO: 59034 - DNA, 15 bp, Homo sapiens
cctttgtgaacacag

SEQ ID NO: 59035 - DNA, 15 bp, Homo sapiens
gcctttgtgaacaca

SEQ ID NO: 59036 - DNA, 15 bp, Homo sapiens
tgcctttgtgaacac

SEQ ID NO: 59037 - DNA, 15 bp, Homo sapiens
ctgcctttgtgaaca

SEQ ID NO: 59038 - DNA, 15 bp, Homo sapiens
tctgcctttgtgaac

SEQ ID NO: 59039 - DNA, 15 bp, Homo sapiens
ctctgcctttgtgaa

SEQ ID NO: 59040 - DNA, 15 bp, Homo sapiens
tctctgcctttgtga

SEQ ID NO: 59041 - DNA, 15 bp, Homo sapiens
ctctctgcctttgtg

SEQ ID NO: 59042 - DNA, 15 bp, Homo sapiens
actctctgcctttgt

SEQ ID NO: 59043 - DNA, 15 bp, Homo sapiens
gactctctgcctttg

SEQ ID NO: 59044 - DNA, 15 bp, Homo sapiens
tgactctctgccttt

SEQ ID NO: 59045 - DNA, 15 bp, Homo sapiens
ctgactctctgcctt

SEQ ID NO: 59046 - DNA, 15 bp, Homo sapiens
tctgactctctgcct

SEQ ID NO: 59047 - DNA, 15 bp, Homo sapiens
gtctgactctctgcc

SEQ ID NO: 59048 - DNA, 15 bp, Homo sapiens
ggtctgactctctgc

SEQ ID NO: 59049 - DNA, 15 bp, Homo sapiens
gggtctgactctctg

SEQ ID NO: 59050 - DNA, 15 bp, Homo sapiens
agggtctgactctct

SEQ ID NO: 59051 - DNA, 15 bp, Homo sapiens
aagggtctgactctc

SEQ ID NO: 59052 - DNA, 15 bp, Homo sapiens
gaagggtctgactct

SEQ ID NO: 59053 - DNA, 15 bp, Homo sapiens
tgaagggtctgactc

SEQ ID NO: 59054 - DNA, 15 bp, Homo sapiens
ttgaagggtctgact

SEQ ID NO: 59055 - DNA, 15 bp, Homo sapiens
attgaagggtctgac

SEQ ID NO: 59056 - DNA, 15 bp, Homo sapiens
cattgaagggtctga

SEQ ID NO: 59057 - DNA, 15 bp, Homo sapiens
ccattgaagggtctg

SEQ ID NO: 59058 - DNA, 15 bp, Homo sapiens
tccattgaagggtct

SEQ ID NO: 59059 - DNA, 15 bp, Homo sapiens
ttccattgaagggtc

SEQ ID NO: 59060 - DNA, 15 bp, Homo sapiens
cttccattgaagggt

SEQ ID NO: 59061 - DNA, 15 bp, Homo sapiens
ccttccattgaaggg

SEQ ID NO: 59062 - DNA, 15 bp, Homo sapiens
tccttccattgaagg

SEQ ID NO: 59063 - DNA, 15 bp, Homo sapiens
ctccttccattgaag

SEQ ID NO: 59064 - DNA, 15 bp, Homo sapiens
tctccttccattgaa

SEQ ID NO: 59065 - DNA, 15 bp, Homo sapiens
ctctccttccattga

SEQ ID NO: 59066 - DNA, 15 bp, Homo sapiens
actctccttccattg

SEQ ID NO: 59067 - DNA, 15 bp, Homo sapiens
cactctccttccatt

SEQ ID NO: 59068 - DNA, 15 bp, Homo sapiens
gcactctccttccat

SEQ ID NO: 59069 - DNA, 15 bp, Homo sapiens
agcactctccttcca

SEQ ID NO: 59070 - DNA, 15 bp, Homo sapiens
aagcactctccttcc

SEQ ID NO: 59071 - DNA, 15 bp, Homo sapiens
caagcactctccttc

SEQ ID NO: 59072 - DNA, 15 bp, Homo sapiens
ccaagcactctcctt

SEQ ID NO: 59073 - DNA, 15 bp, Homo sapiens
cccaagcactctcct

SEQ ID NO: 59074 - DNA, 15 bp, Homo sapiens
tcccaagcactctcc

SEQ ID NO: 59075 - DNA, 15 bp, Homo sapiens
atcccaagcactctc

SEQ ID NO: 59076 - DNA, 15 bp, Homo sapiens
gatcccaagcactct

SEQ ID NO: 59077 - DNA, 15 bp, Homo sapiens
cgatcccaagcactc

SEQ ID NO: 59078 - DNA, 15 bp, Homo sapiens
tcgatcccaagcact

SEQ ID NO: 59079 - DNA, 15 bp, Homo sapiens
atcgatcccaagcac

SEQ ID NO: 59080 - DNA, 15 bp, Homo sapiens
aatcgatcccaagca

SEQ ID NO: 59081 - DNA, 15 bp, Homo sapiens
taatcgatcccaagc

SEQ ID NO: 59082 - DNA, 15 bp, Homo sapiens
ataatcgatcccaag

SEQ ID NO: 59083 - DNA, 15 bp, Homo sapiens
cataatcgatcccaa

SEQ ID NO: 59084 - DNA, 15 bp, Homo sapiens
acataatcgatccca

SEQ ID NO: 59085 - DNA, 15 bp, Homo sapiens
cacataatcgatccc

SEQ ID NO: 59086 - DNA, 15 bp, Homo sapiens
tcacataatcgatcc

SEQ ID NO: 59087 - DNA, 15 bp, Homo sapiens
gtcacataatcgatc

SEQ ID NO: 59088 - DNA, 15 bp, Homo sapiens
agtcacataatcgat

SEQ ID NO: 59089 - DNA, 15 bp, Homo sapiens
aagtcacataatcga

SEQ ID NO: 59090 - DNA, 15 bp, Homo sapiens
taagtcacataatcg

SEQ ID NO: 59091 - DNA, 15 bp, Homo sapiens
ttaagtcacataatc

SEQ ID NO: 59092 - DNA, 15 bp, Homo sapiens
tttaagtcacataat

SEQ ID NO: 59093 - DNA, 15 bp, Homo sapiens
ctttaagtcacataa

SEQ ID NO: 59094 - DNA, 15 bp, Homo sapiens
actttaagtcacata

SEQ ID NO: 59095 - DNA, 15 bp, Homo sapiens
gactttaagtcacat

SEQ ID NO: 59096 - DNA, 15 bp, Homo sapiens
tgactttaagtcaca

SEQ ID NO: 59097 - DNA, 15 bp, Homo sapiens
ctgactttaagtcac

SEQ ID NO: 59098 - DNA, 15 bp, Homo sapiens
tctgactttaagtca

SEQ ID NO: 59099 - DNA, 15 bp, Homo sapiens
ttctgactttaagtc

SEQ ID NO: 59100 - DNA, 15 bp, Homo sapiens
attctgactttaagt

SEQ ID NO: 59101 - DNA, 15 bp, Homo sapiens
tattctgactttaag

SEQ ID NO: 59102 - DNA, 15 bp, Homo sapiens
ctattctgactttaa

SEQ ID NO: 59103 - DNA, 15 bp, Homo sapiens
actattctgacttta

SEQ ID NO: 59104 - DNA, 15 bp, Homo sapiens
gactattctgacttt

SEQ ID NO: 59105 - DNA, 15 bp, Homo sapiens
ggactattctgactt

SEQ ID NO: 59106 - DNA, 15 bp, Homo sapiens
aggactattctgact

SEQ ID NO: 59107 - DNA, 15 bp, Homo sapiens
aaggactattctgac

SEQ ID NO: 59108 - DNA, 15 bp, Homo sapiens
caaggactattctga

SEQ ID NO: 59109 - DNA, 15 bp, Homo sapiens
ccaaggactattctg

SEQ ID NO: 59110 - DNA, 15 bp, Homo sapiens
cccaaggactattct

SEQ ID NO: 59111 - DNA, 15 bp, Homo sapiens
gcccaaggactattc

SEQ ID NO: 59112 - DNA, 15 bp, Homo sapiens
tgcccaaggactatt

SEQ ID NO: 59113 - DNA, 15 bp, Homo sapiens
ctgcccaaggactat

SEQ ID NO: 59114 - DNA, 15 bp, Homo sapiens
actgcccaaggacta

SEQ ID NO: 59115 - DNA, 15 bp, Homo sapiens
aactgcccaaggact

SEQ ID NO: 59116 - DNA, 15 bp, Homo sapiens
gaactgcccaaggac

SEQ ID NO: 59117 - DNA, 15 bp, Homo sapiens
agaactgcccaagga

SEQ ID NO: 59118 - DNA, 15 bp, Homo sapiens
gagaactgcccaagg

SEQ ID NO: 59119 - DNA, 15 bp, Homo sapiens
tgagaactgcccaag

SEQ ID NO: 59120 - DNA, 15 bp, Homo sapiens
ttgagaactgcccaa

SEQ ID NO: 59121 - DNA, 15 bp, Homo sapiens
tttgagaactgccca

SEQ ID NO: 59122 - DNA, 15 bp, Homo sapiens
atttgagaactgccc

SEQ ID NO: 59123 - DNA, 15 bp, Homo sapiens
catttgagaactgcc

SEQ ID NO: 59124 - DNA, 15 bp, Homo sapiens
acatttgagaactgc

SEQ ID NO: 59125 - DNA, 15 bp, Homo sapiens
aacatttgagaactg

SEQ ID NO: 59126 - DNA, 15 bp, Homo sapiens
caacatttgagaact

SEQ ID NO: 59127 - DNA, 15 bp, Homo sapiens
ccaacatttgagaac

SEQ ID NO: 59128 - DNA, 15 bp, Homo sapiens
tccaacatttgagaa

SEQ ID NO: 59129 - DNA, 15 bp, Homo sapiens
ctccaacatttgaga

SEQ ID NO: 59130 - DNA, 15 bp, Homo sapiens
actccaacatttgag

SEQ ID NO: 59131 - DNA, 15 bp, Homo sapiens
cactccaacatttga

SEQ ID NO: 59132 - DNA, 15 bp, Homo sapiens
ccactccaacatttg

SEQ ID NO: 59133 - DNA, 15 bp, Homo sapiens
tccactccaacattt

SEQ ID NO: 59134 - DNA, 15 bp, Homo sapiens
ttccactccaacatt

SEQ ID NO: 59135 - DNA, 15 bp, Homo sapiens
gttccactccaacat

SEQ ID NO: 59136 - DNA, 15 bp, Homo sapiens
tgttccactccaaca

SEQ ID NO: 59137 - DNA, 15 bp, Homo sapiens
atgttccactccaac

SEQ ID NO: 59138 - DNA, 15 bp, Homo sapiens
aatgttccactccaa

SEQ ID NO: 59139 - DNA, 15 bp, Homo sapiens
caatgttccactcca

SEQ ID NO: 59140 - DNA, 15 bp, Homo sapiens
ccaatgttccactcc

SEQ ID NO: 59141 - DNA, 15 bp, Homo sapiens
cccaatgttccactc

SEQ ID NO: 59142 - DNA, 15 bp, Homo sapiens
ccccaatgttccact

SEQ ID NO: 59143 - DNA, 15 bp, Homo sapiens
tccccaatgttccac

SEQ ID NO: 59144 - DNA, 15 bp, Homo sapiens
ctccccaatgttcca

SEQ ID NO: 59145 - DNA, 15 bp, Homo sapiens
cctccccaatgttcc

SEQ ID NO: 59146 - DNA, 15 bp, Homo sapiens
tcctccccaatgttc

SEQ ID NO: 59147 - DNA, 15 bp, Homo sapiens
ttcctccccaatgtt

SEQ ID NO: 59148 - DNA, 15 bp, Homo sapiens
tttcctccccaatgt

SEQ ID NO: 59149 - DNA, 15 bp, Homo sapiens
atttcctccccaatg

SEQ ID NO: 59150 - DNA, 15 bp, Homo sapiens
aatttcctccccaat

SEQ ID NO: 59151 - DNA, 15 bp, Homo sapiens
gaatttcctccccaa

SEQ ID NO: 59152 - DNA, 15 bp, Homo sapiens
agaatttcctcccca

SEQ ID NO: 59153 - DNA, 15 bp, Homo sapiens
cagaatttcctcccc

SEQ ID NO: 59154 - DNA, 15 bp, Homo sapiens
tcagaatttcctccc

SEQ ID NO: 59155 - DNA, 15 bp, Homo sapiens
ctcagaatttcctcc

SEQ ID NO: 59156 - DNA, 15 bp, Homo sapiens
cctcagaatttcctc

SEQ ID NO: 59157 - DNA, 15 bp, Homo sapiens
gcctcagaatttcct

SEQ ID NO: 59158 - DNA, 15 bp, Homo sapiens
tgcctcagaatttcc

SEQ ID NO: 59159 - DNA, 15 bp, Homo sapiens
ctgcctcagaatttc

SEQ ID NO: 59160 - DNA, 15 bp, Homo sapiens
cctgcctcagaattt

SEQ ID NO: 59161 - DNA, 15 bp, Homo sapiens
acctgcctcagaatt

SEQ ID NO: 59162 - DNA, 15 bp, Homo sapiens
tacctgcctcagaat

SEQ ID NO: 59163 - DNA, 15 bp, Homo sapiens
atacctgcctcagaa

SEQ ID NO: 59164 - DNA, 15 bp, Homo sapiens
aatacctgcctcaga

SEQ ID NO: 59165 - DNA, 15 bp, Homo sapiens
taatacctgcctcag

SEQ ID NO: 59166 - DNA, 15 bp, Homo sapiens
ctaatacctgcctca

SEQ ID NO: 59167 - DNA, 15 bp, Homo sapiens
tctaatacctgcctc

SEQ ID NO: 59168 - DNA, 15 bp, Homo sapiens
ttctaatacctgcct

SEQ ID NO: 59169 - DNA, 15 bp, Homo sapiens
tttctaatacctgcc

SEQ ID NO: 59170 - DNA, 15 bp, Homo sapiens
atttctaatacctgc

SEQ ID NO: 59171 - DNA, 15 bp, Homo sapiens
catttctaatacctg

SEQ ID NO: 59172 - DNA, 15 bp, Homo sapiens
tcatttctaatacct

SEQ ID NO: 59173 - DNA, 15 bp, Homo sapiens
ttcatttctaatacc

SEQ ID NO: 59174 - DNA, 15 bp, Homo sapiens
tttcatttctaatac

SEQ ID NO: 59175 - DNA, 15 bp, Homo sapiens
ttttcatttctaata

SEQ ID NO: 59176 - DNA, 15 bp, Homo sapiens
cttttcatttctaat

SEQ ID NO: 59177 - DNA, 15 bp, Homo sapiens
ccttttcatttctaa

SEQ ID NO: 59178 - DNA, 15 bp, Homo sapiens
tccttttcatttcta

SEQ ID NO: 59179 - DNA, 15 bp, Homo sapiens
ttccttttcatttct

SEQ ID NO: 59180 - DNA, 15 bp, Homo sapiens
tttccttttcatttc

SEQ ID NO: 59181 - DNA, 15 bp, Homo sapiens
gtttccttttcattt

SEQ ID NO: 59182 - DNA, 15 bp, Homo sapiens
agtttccttttcatt

SEQ ID NO: 59183 - DNA, 15 bp, Homo sapiens
aagtttccttttcat

SEQ ID NO: 59184 - DNA, 15 bp, Homo sapiens
caagtttccttttca

SEQ ID NO: 59185 - DNA, 15 bp, Homo sapiens
tcaagtttccttttc

SEQ ID NO: 59186 - DNA, 15 bp, Homo sapiens
ttcaagtttcctttt

SEQ ID NO: 59187 - DNA, 15 bp, Homo sapiens
tttcaagtttccttt

SEQ ID NO: 59188 - DNA, 15 bp, Homo sapiens
gtttcaagtttcctt

SEQ ID NO: 59189 - DNA, 15 bp, Homo sapiens
ggtttcaagtttcct

SEQ ID NO: 59190 - DNA, 15 bp, Homo sapiens
aggtttcaagtttcc

SEQ ID NO: 59191 - DNA, 15 bp, Homo sapiens
caggtttcaagtttc

SEQ ID NO: 59192 - DNA, 15 bp, Homo sapiens
ccaggtttcaagttt

SEQ ID NO: 59193 - DNA, 15 bp, Homo sapiens
cccaggtttcaagtt

SEQ ID NO: 59194 - DNA, 15 bp, Homo sapiens
gcccaggtttcaagt

SEQ ID NO: 59195 - DNA, 15 bp, Homo sapiens
tgcccaggtttcaag

SEQ ID NO: 59196 - DNA, 15 bp, Homo sapiens
atgcccaggtttcaa

SEQ ID NO: 59197 - DNA, 15 bp, Homo sapiens
catgcccaggtttca

SEQ ID NO: 59198 - DNA, 15 bp, Homo sapiens
ccatgcccaggtttc

SEQ ID NO: 59199 - DNA, 15 bp, Homo sapiens
accatgcccaggttt

SEQ ID NO: 59200 - DNA, 15 bp, Homo sapiens
caccatgcccaggtt

SEQ ID NO: 59201 - DNA, 15 bp, Homo sapiens
ccaccatgcccaggt

SEQ ID NO: 59202 - DNA, 15 bp, Homo sapiens
gccaccatgcccagg

SEQ ID NO: 59203 - DNA, 15 bp, Homo sapiens
gcccaccttggcctc

SEQ ID NO: 59204 - DNA, 15 bp, Homo sapiens
tgcccaccttggcct

SEQ ID NO: 59205 - DNA, 15 bp, Homo sapiens
ctgcccaccttggcc

SEQ ID NO: 59206 - DNA, 15 bp, Homo sapiens
tctgcccaccttggc

SEQ ID NO: 59207 - DNA, 15 bp, Homo sapiens
atctgcccaccttgg

SEQ ID NO: 59208 - DNA, 15 bp, Homo sapiens
gatctgcccaccttg

SEQ ID NO: 59209 - DNA, 15 bp, Homo sapiens
tgatctgcccacctt

SEQ ID NO: 59210 - DNA, 15 bp, Homo sapiens
agtgatctgcccacc

SEQ ID NO: 59211 - DNA, 15 bp, Homo sapiens
cagtgatctgcccac

SEQ ID NO: 59212 - DNA, 15 bp, Homo sapiens
ccagtgatctgccca

SEQ ID NO: 59213 - DNA, 15 bp, Homo sapiens
tccagtgatctgccc

SEQ ID NO: 59214 - DNA, 15 bp, Homo sapiens
ctccagtgatctgcc

SEQ ID NO: 59215 - DNA, 15 bp, Homo sapiens
cctccagtgatctgc

SEQ ID NO: 59216 - DNA, 15 bp, Homo sapiens
acctccagtgatctg

SEQ ID NO: 59217 - DNA, 15 bp, Homo sapiens
gacctccagtgatct

SEQ ID NO: 59218 - DNA, 15 bp, Homo sapiens
tgacctccagtgatc

SEQ ID NO: 59219 - DNA, 15 bp, Homo sapiens
ctgacctccagtgat

SEQ ID NO: 59220 - DNA, 15 bp, Homo sapiens
cctgacctccagtga

SEQ ID NO: 59221 - DNA, 15 bp, Homo sapiens
tcctgacctccagtg

SEQ ID NO: 59222 - DNA, 15 bp, Homo sapiens
ctcctgacctccagt

SEQ ID NO: 59223 - DNA, 15 bp, Homo sapiens
actcctgacctccag

SEQ ID NO: 59224 - DNA, 15 bp, Homo sapiens
aactcctgacctcca

SEQ ID NO: 59225 - DNA, 15 bp, Homo sapiens
gaactcctgacctcc

SEQ ID NO: 59226 - DNA, 15 bp, Homo sapiens
ttcgaactcctgacc

SEQ ID NO: 59227 - DNA, 15 bp, Homo sapiens
tttcgaactcctgac

SEQ ID NO: 59228 - DNA, 15 bp, Homo sapiens
gtttcgaactcctga

SEQ ID NO: 59229 - DNA, 15 bp, Homo sapiens
ggtttcgaactcctg

SEQ ID NO: 59230 - DNA, 15 bp, Homo sapiens
tggtttcgaactcct

SEQ ID NO: 59231 - DNA, 15 bp, Homo sapiens
ctggtttcgaactcc

SEQ ID NO: 59232 - DNA, 15 bp, Homo sapiens
gctggtttcgaactc

SEQ ID NO: 59233 - DNA, 15 bp, Homo sapiens
ggctggtttcgaact

SEQ ID NO: 59234 - DNA, 15 bp, Homo sapiens
aggctggtttcgaac

SEQ ID NO: 59235 - DNA, 15 bp, Homo sapiens
caggctggtttcgaa

SEQ ID NO: 59236 - DNA, 15 bp, Homo sapiens
ccaggctggtttcga

SEQ ID NO: 59237 - DNA, 15 bp, Homo sapiens
gccaggctggtttcg

SEQ ID NO: 59238 - DNA, 15 bp, Homo sapiens
ggccaggctggtttc

SEQ ID NO: 59239 - DNA, 15 bp, Homo sapiens
ctgtatttttagtag

SEQ ID NO: 59240 - DNA, 15 bp, Homo sapiens
tctgtatttttagta

SEQ ID NO: 59241 - DNA, 15 bp, Homo sapiens
ttctgtatttttagt

SEQ ID NO: 59242 - DNA, 15 bp, Homo sapiens
tttctgtatttttag

SEQ ID NO: 59243 - DNA, 15 bp, Homo sapiens
atttctgtattttta

SEQ ID NO: 59244 - DNA, 15 bp, Homo sapiens
aatttctgtattttt

SEQ ID NO: 59245 - DNA, 15 bp, Homo sapiens
taatttctgtatttt

SEQ ID NO: 59246 - DNA, 15 bp, Homo sapiens
ctaatttctgtattt

SEQ ID NO: 59247 - DNA, 15 bp, Homo sapiens
gctaatttctgtatt

SEQ ID NO: 59248 - DNA, 15 bp, Homo sapiens
ggctaatttctgtat

SEQ ID NO: 59249 - DNA, 15 bp, Homo sapiens
cggctaatttctgta

SEQ ID NO: 59250 - DNA, 15 bp, Homo sapiens
ccggctaatttctgt

SEQ ID NO: 59251 - DNA, 15 bp, Homo sapiens
accggctaatttctg

SEQ ID NO: 59252 - DNA, 15 bp, Homo sapiens
gaccggctaatttct

SEQ ID NO: 59253 - DNA, 15 bp, Homo sapiens
tgaccggctaatttc

SEQ ID NO: 59254 - DNA, 15 bp, Homo sapiens
atgaccggctaattt

SEQ ID NO: 59255 - DNA, 15 bp, Homo sapiens
catgaccggctaatt

SEQ ID NO: 59256 - DNA, 15 bp, Homo sapiens
ccatgaccggctaat

SEQ ID NO: 59257 - DNA, 15 bp, Homo sapiens
accatgaccggctaa

SEQ ID NO: 59258 - DNA, 15 bp, Homo sapiens
caccatgaccggcta

SEQ ID NO: 59259 - DNA, 15 bp, Homo sapiens
ccaccatgaccggct

SEQ ID NO: 59260 - DNA, 15 bp, Homo sapiens
accaccatgaccggc

SEQ ID NO: 59261 - DNA, 15 bp, Homo sapiens
caccaccatgaccgg

SEQ ID NO: 59262 - DNA, 15 bp, Homo sapiens
ccaccaccatgaccg

SEQ ID NO: 59263 - DNA, 15 bp, Homo sapiens
tccaccaccatgacc

SEQ ID NO: 59264 - DNA, 15 bp, Homo sapiens
gtccaccaccatgac

SEQ ID NO: 59265 - DNA, 15 bp, Homo sapiens
tgtccaccaccatga

SEQ ID NO: 59266 - DNA, 15 bp, Homo sapiens
gtgtccaccaccatg

SEQ ID NO: 59267 - DNA, 15 bp, Homo sapiens
ggtgtccaccaccat

SEQ ID NO: 59268 - DNA, 15 bp, Homo sapiens
aggtgtccaccacca

SEQ ID NO: 59269 - DNA, 15 bp, Homo sapiens
caggtgtccaccacc

SEQ ID NO: 59270 - DNA, 15 bp, Homo sapiens
acaggtgtccaccac

SEQ ID NO: 59271 - DNA, 15 bp, Homo sapiens
tacaggtgtccacca

SEQ ID NO: 59272 - DNA, 15 bp, Homo sapiens
ttacaggtgtccacc

SEQ ID NO: 59273 - DNA, 15 bp, Homo sapiens
attacaggtgtccac

SEQ ID NO: 59274 - DNA, 15 bp, Homo sapiens
gattacaggtgtcca

SEQ ID NO: 59275 - DNA, 15 bp, Homo sapiens
ggattacaggtgtcc

SEQ ID NO: 59276 - DNA, 15 bp, Homo sapiens
gggattacaggtgtc

SEQ ID NO: 59277 - DNA, 15 bp, Homo sapiens
acctgagtagctggg

SEQ ID NO: 59278 - DNA, 15 bp, Homo sapiens
cacctgagtagctgg

SEQ ID NO: 59279 - DNA, 15 bp, Homo sapiens
ccacctgagtagctg

SEQ ID NO: 59280 - DNA, 15 bp, Homo sapiens
gccacctgagtagct

SEQ ID NO: 59281 - DNA, 15 bp, Homo sapiens
agccacctgagtagc

SEQ ID NO: 59282 - DNA, 15 bp, Homo sapiens
tagccacctgagtag

SEQ ID NO: 59283 - DNA, 15 bp, Homo sapiens
ttagccacctgagta

SEQ ID NO: 59284 - DNA, 15 bp, Homo sapiens
cttagccacctgagt

SEQ ID NO: 59285 - DNA, 15 bp, Homo sapiens
ccttagccacctgag

SEQ ID NO: 59286 - DNA, 15 bp, Homo sapiens
gccttagccacctga

SEQ ID NO: 59287 - DNA, 15 bp, Homo sapiens
tgccttagccacctg

SEQ ID NO: 59288 - DNA, 15 bp, Homo sapiens
ctgccttagccacct

SEQ ID NO: 59289 - DNA, 15 bp, Homo sapiens
cctgccttagccacc

SEQ ID NO: 59290 - DNA, 15 bp, Homo sapiens
tcctgccttagccac

SEQ ID NO: 59291 - DNA, 15 bp, Homo sapiens
ctcctgccttagcca

SEQ ID NO: 59292 - DNA, 15 bp, Homo sapiens
tgattctcctgcctt

SEQ ID NO: 59293 - DNA, 15 bp, Homo sapiens
gaagtgattctcctg

SEQ ID NO: 59294 - DNA, 15 bp, Homo sapiens
tgaagtgattctcct

SEQ ID NO: 59295 - DNA, 15 bp, Homo sapiens
ctgaagtgattctcc

SEQ ID NO: 59296 - DNA, 15 bp, Homo sapiens
gctgaagtgattctc

SEQ ID NO: 59297 - DNA, 15 bp, Homo sapiens
ggctgaagtgattct

SEQ ID NO: 59298 - DNA, 15 bp, Homo sapiens
gggctgaagtgattc

SEQ ID NO: 59299 - DNA, 15 bp, Homo sapiens
cgggctgaagtgatt

SEQ ID NO: 59300 - DNA, 15 bp, Homo sapiens
ccgggctgaagtgat

SEQ ID NO: 59301 - DNA, 15 bp, Homo sapiens
cccgggctgaagtga

SEQ ID NO: 59302 - DNA, 15 bp, Homo sapiens
tcccgggctgaagtg

SEQ ID NO: 59303 - DNA, 15 bp, Homo sapiens
ctcccgggctgaagt

SEQ ID NO: 59304 - DNA, 15 bp, Homo sapiens
cctcccgggctgaag

SEQ ID NO: 59305 - DNA, 15 bp, Homo sapiens
acctcccgggctgaa

SEQ ID NO: 59306 - DNA, 15 bp, Homo sapiens
cacctcccgggctga

SEQ ID NO: 59307 - DNA, 15 bp, Homo sapiens
ccacctcccgggctg

SEQ ID NO: 59308 - DNA, 15 bp, Homo sapiens
tccacctcccgggct

SEQ ID NO: 59309 - DNA, 15 bp, Homo sapiens
ctccacctcccgggc

SEQ ID NO: 59310 - DNA, 15 bp, Homo sapiens
tatgatcttggctca

SEQ ID NO: 59311 - DNA, 15 bp, Homo sapiens
gtatgatcttggctc

SEQ ID NO: 59312 - DNA, 15 bp, Homo sapiens
ggtatgatcttggct

SEQ ID NO: 59313 - DNA, 15 bp, Homo sapiens
tggtatgatcttggc

SEQ ID NO: 59314 - DNA, 15 bp, Homo sapiens
gtggtatgatcttgg

SEQ ID NO: 59315 - DNA, 15 bp, Homo sapiens
cgtggtatgatcttg

SEQ ID NO: 59316 - DNA, 15 bp, Homo sapiens
ccgtggtatgatctt

SEQ ID NO: 59317 - DNA, 15 bp, Homo sapiens
gccgtggtatgatct

SEQ ID NO: 59318 - DNA, 15 bp, Homo sapiens
tgccgtggtatgatc

SEQ ID NO: 59319 - DNA, 15 bp, Homo sapiens
gtgccgtggtatgat

SEQ ID NO: 59320 - DNA, 15 bp, Homo sapiens
agtgccgtggtatga

SEQ ID NO: 59321 - DNA, 15 bp, Homo sapiens
gagtgccgtggtatg

SEQ ID NO: 59322 - DNA, 15 bp, Homo sapiens
ggagtgccgtggtat

SEQ ID NO: 59323 - DNA, 15 bp, Homo sapiens
tggagtgccgtggta

SEQ ID NO: 59324 - DNA, 15 bp, Homo sapiens
ctggagtgccgtggt

SEQ ID NO: 59325 - DNA, 15 bp, Homo sapiens
gctggagtgccgtgg

SEQ ID NO: 59326 - DNA, 15 bp, Homo sapiens
ggctggagtgccgtg

SEQ ID NO: 59327 - DNA, 15 bp, Homo sapiens
aggctggagtgccgt

SEQ ID NO: 59328 - DNA, 15 bp, Homo sapiens
caggctggagtgccg

SEQ ID NO: 59329 - DNA, 15 bp, Homo sapiens
ccaggctggagtgcc

SEQ ID NO: 59330 - DNA, 15 bp, Homo sapiens
actgtcacccaggct

SEQ ID NO: 59331 - DNA, 15 bp, Homo sapiens
cactgtcacccaggc

SEQ ID NO: 59332 - DNA, 15 bp, Homo sapiens
tcactgtcacccagg

SEQ ID NO: 59333 - DNA, 15 bp, Homo sapiens
ctcactgtcacccag

SEQ ID NO: 59334 - DNA, 15 bp, Homo sapiens
tctcactgtcaccca

SEQ ID NO: 59335 - DNA, 15 bp, Homo sapiens
gtctcactgtcaccc

SEQ ID NO: 59336 - DNA, 15 bp, Homo sapiens
agtctcactgtcacc

SEQ ID NO: 59337 - DNA, 15 bp, Homo sapiens
cagtctcactgtcac

SEQ ID NO: 59338 - DNA, 15 bp, Homo sapiens
acagtctcactgtca

SEQ ID NO: 59339 - DNA, 15 bp, Homo sapiens
cacagtctcactgtc

SEQ ID NO: 59340 - DNA, 15 bp, Homo sapiens
ccacagtctcactgt

SEQ ID NO: 59341 - DNA, 15 bp, Homo sapiens
gccacagtctcactg

SEQ ID NO: 59342 - DNA, 15 bp, Homo sapiens
agccacagtctcact

SEQ ID NO: 59343 - DNA, 15 bp, Homo sapiens
gagccacagtctcac

SEQ ID NO: 59344 - DNA, 15 bp, Homo sapiens
tgagccacagtctca

SEQ ID NO: 59345 - DNA, 15 bp, Homo sapiens
ttgagccacagtctc

SEQ ID NO: 59346 - DNA, 15 bp, Homo sapiens
tttgagccacagtct

SEQ ID NO: 59347 - DNA, 15 bp, Homo sapiens
ttttgagccacagtc

SEQ ID NO: 59348 - DNA, 15 bp, Homo sapiens
tttttgagccacagt

SEQ ID NO: 59349 - DNA, 15 bp, Homo sapiens
ttttttgagccacag

SEQ ID NO: 59350 - DNA, 15 bp, Homo sapiens
tttttttgagccaca

SEQ ID NO: 59351 - DNA, 15 bp, Homo sapiens
ttttttttgagccac

SEQ ID NO: 59352 - DNA, 15 bp, Homo sapiens
tttttttttgagcca

SEQ ID NO: 59353 - DNA, 15 bp, Homo sapiens
ttttttttttgagcc

SEQ ID NO: 59354 - DNA, 15 bp, Homo sapiens
tttttttttttgagc

SEQ ID NO: 59355 - DNA, 15 bp, Homo sapiens
tttcctttttttttt

SEQ ID NO: 59356 - DNA, 15 bp, Homo sapiens
ttttccttttttttt

SEQ ID NO: 59357 - DNA, 15 bp, Homo sapiens
attttcctttttttt

SEQ ID NO: 59358 - DNA, 15 bp, Homo sapiens
cattttccttttttt

SEQ ID NO: 59359 - DNA, 15 bp, Homo sapiens
tcattttcctttttt

SEQ ID NO: 59360 - DNA, 15 bp, Homo sapiens
ttcattttccttttt

SEQ ID NO: 59361 - DNA, 15 bp, Homo sapiens
tttcattttcctttt

SEQ ID NO: 59362 - DNA, 15 bp, Homo sapiens
gtttcattttccttt

SEQ ID NO: 59363 - DNA, 15 bp, Homo sapiens
agtttcattttcctt

SEQ ID NO: 59364 - DNA, 15 bp, Homo sapiens
tagtttcattttcct

SEQ ID NO: 59365 - DNA, 15 bp, Homo sapiens
ctagtttcattttcc

SEQ ID NO: 59366 - DNA, 15 bp, Homo sapiens
tctagtttcattttc

SEQ ID NO: 59367 - DNA, 15 bp, Homo sapiens
ttctagtttcatttt

SEQ ID NO: 59368 - DNA, 15 bp, Homo sapiens
cttctagtttcattt

SEQ ID NO: 59369 - DNA, 15 bp, Homo sapiens
tcttctagtttcatt

SEQ ID NO: 59370 - DNA, 15 bp, Homo sapiens
ctcttctagtttcat

SEQ ID NO: 59371 - DNA, 15 bp, Homo sapiens
tctcttctagtttca

SEQ ID NO: 59372 - DNA, 15 bp, Homo sapiens
atctcttctagtttc

SEQ ID NO: 59373 - DNA, 15 bp, Homo sapiens
aatctcttctagttt

SEQ ID NO: 59374 - DNA, 15 bp, Homo sapiens
aaatctcttctagtt

SEQ ID NO: 59375 - DNA, 15 bp, Homo sapiens
gaaatctcttctagt

SEQ ID NO: 59376 - DNA, 15 bp, Homo sapiens
agaaatctcttctag

SEQ ID NO: 59377 - DNA, 15 bp, Homo sapiens
tagaaatctcttcta

SEQ ID NO: 59378 - DNA, 15 bp, Homo sapiens
ttagaaatctcttct

SEQ ID NO: 59379 - DNA, 15 bp, Homo sapiens
tttagaaatctcttc

SEQ ID NO: 59380 - DNA, 15 bp, Homo sapiens
ttttagaaatctctt

SEQ ID NO: 59381 - DNA, 15 bp, Homo sapiens
cttttagaaatctct

SEQ ID NO: 59382 - DNA, 15 bp, Homo sapiens
acttttagaaatctc

SEQ ID NO: 59383 - DNA, 15 bp, Homo sapiens
gacttttagaaatct

SEQ ID NO: 59384 - DNA, 15 bp, Homo sapiens
agacttttagaaatc

SEQ ID NO: 59385 - DNA, 15 bp, Homo sapiens
cagacttttagaaat

SEQ ID NO: 59386 - DNA, 15 bp, Homo sapiens
tcagacttttagaaa

SEQ ID NO: 59387 - DNA, 15 bp, Homo sapiens
ctcagacttttagaa

SEQ ID NO: 59388 - DNA, 15 bp, Homo sapiens
tctcagacttttaga

SEQ ID NO: 59389 - DNA, 15 bp, Homo sapiens
atctcagacttttag

SEQ ID NO: 59390 - DNA, 15 bp, Homo sapiens
tatctcagactttta

SEQ ID NO: 59391 - DNA, 15 bp, Homo sapiens
atatctcagactttt

SEQ ID NO: 59392 - DNA, 15 bp, Homo sapiens
tatatctcagacttt

SEQ ID NO: 59393 - DNA, 15 bp, Homo sapiens
atatatctcagactt

SEQ ID NO: 59394 - DNA, 15 bp, Homo sapiens
aatatatctcagact

SEQ ID NO: 59395 - DNA, 15 bp, Homo sapiens
aaatatatctcagac

SEQ ID NO: 59396 - DNA, 15 bp, Homo sapiens
caaatatatctcaga

SEQ ID NO: 59397 - DNA, 15 bp, Homo sapiens
gcaaatatatctcag

SEQ ID NO: 59398 - DNA, 15 bp, Homo sapiens
agcaaatatatctca

SEQ ID NO: 59399 - DNA, 15 bp, Homo sapiens
tagcaaatatatctc

SEQ ID NO: 59400 - DNA, 15 bp, Homo sapiens
ctagcaaatatatct

SEQ ID NO: 59401 - DNA, 15 bp, Homo sapiens
tctagcaaatatatc

SEQ ID NO: 59402 - DNA, 15 bp, Homo sapiens
atctagcaaatatat

SEQ ID NO: 59403 - DNA, 15 bp, Homo sapiens
aatctagcaaatata

SEQ ID NO: 59404 - DNA, 15 bp, Homo sapiens
aaatctagcaaatat

SEQ ID NO: 59405 - DNA, 15 bp, Homo sapiens
gaaatctagcaaata

SEQ ID NO: 59406 - DNA, 15 bp, Homo sapiens
agaaatctagcaaat

SEQ ID NO: 59407 - DNA, 15 bp, Homo sapiens
tagaaatctagcaaa

SEQ ID NO: 59408 - DNA, 15 bp, Homo sapiens
ttagaaatctagcaa

SEQ ID NO: 59409 - DNA, 15 bp, Homo sapiens
tttagaaatctagca

SEQ ID NO: 59410 - DNA, 15 bp, Homo sapiens
ctttagaaatctagc

SEQ ID NO: 59411 - DNA, 15 bp, Homo sapiens
tctttagaaatctag

SEQ ID NO: 59412 - DNA, 15 bp, Homo sapiens
ttctttagaaatcta

SEQ ID NO: 59413 - DNA, 15 bp, Homo sapiens
attctttagaaatct

SEQ ID NO: 59414 - DNA, 15 bp, Homo sapiens
cattctttagaaatc

SEQ ID NO: 59415 - DNA, 15 bp, Homo sapiens
acattctttagaaat

SEQ ID NO: 59416 - DNA, 15 bp, Homo sapiens
cacattctttagaaa

SEQ ID NO: 59417 - DNA, 15 bp, Homo sapiens
acacattctttagaa

SEQ ID NO: 59418 - DNA, 15 bp, Homo sapiens
aacacattctttaga

SEQ ID NO: 59419 - DNA, 15 bp, Homo sapiens
gaacacattctttag

SEQ ID NO: 59420 - DNA, 15 bp, Homo sapiens
agaacacattcttta

SEQ ID NO: 59421 - DNA, 15 bp, Homo sapiens
tagaacacattcttt

SEQ ID NO: 59422 - DNA, 15 bp, Homo sapiens
ttagaacacattctt

SEQ ID NO: 59423 - DNA, 15 bp, Homo sapiens
tttagaacacattct

SEQ ID NO: 59424 - DNA, 15 bp, Homo sapiens
ttttagaacacattc

SEQ ID NO: 59425 - DNA, 15 bp, Homo sapiens
gttttagaacacatt

SEQ ID NO: 59426 - DNA, 15 bp, Homo sapiens
tgttttagaacacat

SEQ ID NO: 59427 - DNA, 15 bp, Homo sapiens
ctgttttagaacaca

SEQ ID NO: 59428 - DNA, 15 bp, Homo sapiens
gctgttttagaacac

SEQ ID NO: 59429 - DNA, 15 bp, Homo sapiens
tgctgttttagaaca

SEQ ID NO: 59430 - DNA, 15 bp, Homo sapiens
ctgctgttttagaac

SEQ ID NO: 59431 - DNA, 15 bp, Homo sapiens
tctgctgttttagaa

SEQ ID NO: 59432 - DNA, 15 bp, Homo sapiens
ttctgctgttttaga

SEQ ID NO: 59433 - DNA, 15 bp, Homo sapiens
cttctgctgttttag

SEQ ID NO: 59434 - DNA, 15 bp, Homo sapiens
tcttctgctgtttta

SEQ ID NO: 59435 - DNA, 15 bp, Homo sapiens
atcttctgctgtttt

SEQ ID NO: 59436 - DNA, 15 bp, Homo sapiens
aatcttctgctgttt

SEQ ID NO: 59437 - DNA, 15 bp, Homo sapiens
aaatcttctgctgtt

SEQ ID NO: 59438 - DNA, 15 bp, Homo sapiens
aaaatcttctgctgt

SEQ ID NO: 59439 - DNA, 15 bp, Homo sapiens
gaaaatcttctgctg

SEQ ID NO: 59440 - DNA, 15 bp, Homo sapiens
tgaaaatcttctgct

SEQ ID NO: 59441 - DNA, 15 bp, Homo sapiens
ttgaaaatcttctgc

SEQ ID NO: 59442 - DNA, 15 bp, Homo sapiens
cttgaaaatcttctg

SEQ ID NO: 59443 - DNA, 15 bp, Homo sapiens
tcttgaaaatcttct

SEQ ID NO: 59444 - DNA, 15 bp, Homo sapiens
ttcttgaaaatcttc

SEQ ID NO: 59445 - DNA, 15 bp, Homo sapiens
gttcttgaaaatctt

SEQ ID NO: 59446 - DNA, 15 bp, Homo sapiens
ggttcttgaaaatct

SEQ ID NO: 59447 - DNA, 15 bp, Homo sapiens
cggttcttgaaaatc

SEQ ID NO: 59448 - DNA, 15 bp, Homo sapiens
ccggttcttgaaaat

SEQ ID NO: 59449 - DNA, 15 bp, Homo sapiens
accggttcttgaaaa

SEQ ID NO: 59450 - DNA, 15 bp, Homo sapiens
aaccggttcttgaaa

SEQ ID NO: 59451 - DNA, 15 bp, Homo sapiens
aaaccggttcttgaa

SEQ ID NO: 59452 - DNA, 15 bp, Homo sapiens
gaaaccggttcttga

SEQ ID NO: 59453 - DNA, 15 bp, Homo sapiens
ggaaaccggttcttg

SEQ ID NO: 59454 - DNA, 15 bp, Homo sapiens
tggaaaccggttctt

SEQ ID NO: 59455 - DNA, 15 bp, Homo sapiens
ttggaaaccggttct

SEQ ID NO: 59456 - DNA, 15 bp, Homo sapiens
tttggaaaccggttc

SEQ ID NO: 59457 - DNA, 15 bp, Homo sapiens
ctttggaaaccggtt

SEQ ID NO: 59458 - DNA, 15 bp, Homo sapiens
tctttggaaaccggt

SEQ ID NO: 59459 - DNA, 15 bp, Homo sapiens
gtctttggaaaccgg

SEQ ID NO: 59460 - DNA, 15 bp, Homo sapiens
tgtctttggaaaccg

SEQ ID NO: 59461 - DNA, 15 bp, Homo sapiens
ctgtctttggaaacc

SEQ ID NO: 59462 - DNA, 15 bp, Homo sapiens
actgtctttggaaac

SEQ ID NO: 59463 - DNA, 15 bp, Homo sapiens
gactgtctttggaaa

SEQ ID NO: 59464 - DNA, 15 bp, Homo sapiens
agactgtctttggaa

SEQ ID NO: 59465 - DNA, 15 bp, Homo sapiens
aagactgtctttgga

SEQ ID NO: 59466 - DNA, 15 bp, Homo sapiens
gaagactgtctttgg

SEQ ID NO: 59467 - DNA, 15 bp, Homo sapiens
agaagactgtctttg

SEQ ID NO: 59468 - DNA, 15 bp, Homo sapiens
tagaagactgtcttt

SEQ ID NO: 59469 - DNA, 15 bp, Homo sapiens
ttagaagactgtctt

SEQ ID NO: 59470 - DNA, 15 bp, Homo sapiens
attagaagactgtct

SEQ ID NO: 59471 - DNA, 15 bp, Homo sapiens
aattagaagactgtc

SEQ ID NO: 59472 - DNA, 15 bp, Homo sapiens
gaattagaagactgt

SEQ ID NO: 59473 - DNA, 15 bp, Homo sapiens
ggaattagaagactg

SEQ ID NO: 59474 - DNA, 15 bp, Homo sapiens
aggaattagaagact

SEQ ID NO: 59475 - DNA, 15 bp, Homo sapiens
gaggaattagaagac

SEQ ID NO: 59476 - DNA, 15 bp, Homo sapiens
tgaggaattagaaga

SEQ ID NO: 59477 - DNA, 15 bp, Homo sapiens
atgaggaattagaag

SEQ ID NO: 59478 - DNA, 15 bp, Homo sapiens
aatgaggaattagaa

SEQ ID NO: 59479 - DNA, 15 bp, Homo sapiens
taatgaggaattaga

SEQ ID NO: 59480 - DNA, 15 bp, Homo sapiens
ctaatgaggaattag

SEQ ID NO: 59481 - DNA, 15 bp, Homo sapiens
actaatgaggaatta

SEQ ID NO: 59482 - DNA, 15 bp, Homo sapiens
tactaatgaggaatt

SEQ ID NO: 59483 - DNA, 15 bp, Homo sapiens
ttactaatgaggaat

SEQ ID NO: 59484 - DNA, 15 bp, Homo sapiens
attactaatgaggaa

SEQ ID NO: 59485 - DNA, 15 bp, Homo sapiens
tattactaatgagga

SEQ ID NO: 59486 - DNA, 15 bp, Homo sapiens
ttattactaatgagg

SEQ ID NO: 59487 - DNA, 15 bp, Homo sapiens
cttattactaatgag

SEQ ID NO: 59488 - DNA, 15 bp, Homo sapiens
acttattactaatga

SEQ ID NO: 59489 - DNA, 15 bp, Homo sapiens
tacttattactaatg

SEQ ID NO: 59490 - DNA, 15 bp, Homo sapiens
ttacttattactaat

SEQ ID NO: 59491 - DNA, 15 bp, Homo sapiens
tttacttattactaa

SEQ ID NO: 59492 - DNA, 15 bp, Homo sapiens
ttttacttattacta

SEQ ID NO: 59493 - DNA, 15 bp, Homo sapiens
attttacttattact

SEQ ID NO: 59494 - DNA, 15 bp, Homo sapiens
cattttacttattac

SEQ ID NO: 59495 - DNA, 15 bp, Homo sapiens
acattttacttatta

SEQ ID NO: 59496 - DNA, 15 bp, Homo sapiens
aacattttacttatt

SEQ ID NO: 59497 - DNA, 15 bp, Homo sapiens
aaacattttacttat

SEQ ID NO: 59498 - DNA, 15 bp, Homo sapiens
taaacattttactta

SEQ ID NO: 59499 - DNA, 15 bp, Homo sapiens
ataaacattttactt

SEQ ID NO: 59500 - DNA, 15 bp, Homo sapiens
aataaacattttact

SEQ ID NO: 59501 - DNA, 15 bp, Homo sapiens
caataaacattttac

SEQ ID NO: 59502 - DNA, 15 bp, Homo sapiens
acaataaacatttta

SEQ ID NO: 59503 - DNA, 15 bp, Homo sapiens
aacaataaacatttt

SEQ ID NO: 59504 - DNA, 15 bp, Homo sapiens
caacaataaacattt

SEQ ID NO: 59505 - DNA, 15 bp, Homo sapiens
acaacaataaacatt

SEQ ID NO: 59506 - DNA, 15 bp, Homo sapiens
tacaacaataaacat

SEQ ID NO: 59507 - DNA, 15 bp, Homo sapiens
ctacaacaataaaca

SEQ ID NO: 59508 - DNA, 15 bp, Homo sapiens
gctacaacaataaac

SEQ ID NO: 59509 - DNA, 15 bp, Homo sapiens
agctacaacaataaa

SEQ ID NO: 59510 - DNA, 15 bp, Homo sapiens
gagctacaacaataa

SEQ ID NO: 59511 - DNA, 15 bp, Homo sapiens
agagctacaacaata

SEQ ID NO: 59512 - DNA, 15 bp, Homo sapiens
cagagctacaacaat

SEQ ID NO: 59513 - DNA, 15 bp, Homo sapiens
ccagagctacaacaa

SEQ ID NO: 59514 - DNA, 15 bp, Homo sapiens
accagagctacaaca

SEQ ID NO: 59515 - DNA, 15 bp, Homo sapiens
taccagagctacaac

SEQ ID NO: 59516 - DNA, 15 bp, Homo sapiens
ataccagagctacaa

SEQ ID NO: 59517 - DNA, 15 bp, Homo sapiens
tataccagagctaca

SEQ ID NO: 59518 - DNA, 15 bp, Homo sapiens
atataccagagctac

SEQ ID NO: 59519 - DNA, 15 bp, Homo sapiens
tatataccagagcta

SEQ ID NO: 59520 - DNA, 15 bp, Homo sapiens
ttatataccagagct

SEQ ID NO: 59521 - DNA, 15 bp, Homo sapiens
attatataccagagc

SEQ ID NO: 59522 - DNA, 15 bp, Homo sapiens
gattatataccagag

SEQ ID NO: 59523 - DNA, 15 bp, Homo sapiens
ggattatataccaga

SEQ ID NO: 59524 - DNA, 15 bp, Homo sapiens
tggattatataccag

SEQ ID NO: 59525 - DNA, 15 bp, Homo sapiens
atggattatatacca

SEQ ID NO: 59526 - DNA, 15 bp, Homo sapiens
aatggattatatacc

SEQ ID NO: 59527 - DNA, 15 bp, Homo sapiens
gaatggattatatac

SEQ ID NO: 59528 - DNA, 15 bp, Homo sapiens
ggaatggattatata

SEQ ID NO: 59529 - DNA, 15 bp, Homo sapiens
aggaatggattatat

SEQ ID NO: 59530 - DNA, 15 bp, Homo sapiens
gaggaatggattata

SEQ ID NO: 59531 - DNA, 15 bp, Homo sapiens
agaggaatggattat

SEQ ID NO: 59532 - DNA, 15 bp, Homo sapiens
aagaggaatggatta

SEQ ID NO: 59533 - DNA, 15 bp, Homo sapiens
taagaggaatggatt

SEQ ID NO: 59534 - DNA, 15 bp, Homo sapiens
ttaagaggaatggat

SEQ ID NO: 59535 - DNA, 15 bp, Homo sapiens
tttaagaggaatgga

SEQ ID NO: 59536 - DNA, 15 bp, Homo sapiens
ttttaagaggaatgg

SEQ ID NO: 59537 - DNA, 15 bp, Homo sapiens
attttaagaggaatg

SEQ ID NO: 59538 - DNA, 15 bp, Homo sapiens
tattttaagaggaat

SEQ ID NO: 59539 - DNA, 15 bp, Homo sapiens
atattttaagaggaa

SEQ ID NO: 59540 - DNA, 15 bp, Homo sapiens
tatattttaagagga

SEQ ID NO: 59541 - DNA, 15 bp, Homo sapiens
ttatattttaagagg

SEQ ID NO: 59542 - DNA, 15 bp, Homo sapiens
cttatattttaagag

SEQ ID NO: 59543 - DNA, 15 bp, Homo sapiens
tcttatattttaaga

SEQ ID NO: 59544 - DNA, 15 bp, Homo sapiens
gtcttatattttaag

SEQ ID NO: 59545 - DNA, 15 bp, Homo sapiens
ggtcttatattttaa

SEQ ID NO: 59546 - DNA, 15 bp, Homo sapiens
aggtcttatatttta

SEQ ID NO: 59547 - DNA, 15 bp, Homo sapiens
gaggtcttatatttt

SEQ ID NO: 59548 - DNA, 15 bp, Homo sapiens
agaggtcttatattt

SEQ ID NO: 59549 - DNA, 15 bp, Homo sapiens
cagaggtcttatatt

SEQ ID NO: 59550 - DNA, 15 bp, Homo sapiens
ccagaggtcttatat

SEQ ID NO: 59551 - DNA, 15 bp, Homo sapiens
gccagaggtcttata

SEQ ID NO: 59552 - DNA, 15 bp, Homo sapiens
tgccagaggtcttat

SEQ ID NO: 59553 - DNA, 15 bp, Homo sapiens
atgccagaggtctta

SEQ ID NO: 59554 - DNA, 15 bp, Homo sapiens
catgccagaggtctt

SEQ ID NO: 59555 - DNA, 15 bp, Homo sapiens
tcatgccagaggtct

SEQ ID NO: 59556 - DNA, 15 bp, Homo sapiens
ttcatgccagaggtc

SEQ ID NO: 59557 - DNA, 15 bp, Homo sapiens
attcatgccagaggt

SEQ ID NO: 59558 - DNA, 15 bp, Homo sapiens
tattcatgccagagg

SEQ ID NO: 59559 - DNA, 15 bp, Homo sapiens
atattcatgccagag

SEQ ID NO: 59560 - DNA, 15 bp, Homo sapiens
aatattcatgccaga

SEQ ID NO: 59561 - DNA, 15 bp, Homo sapiens
aaatattcatgccag

SEQ ID NO: 59562 - DNA, 15 bp, Homo sapiens
gaaatattcatgcca

SEQ ID NO: 59563 - DNA, 15 bp, Homo sapiens
tgaaatattcatgcc

SEQ ID NO: 59564 - DNA, 15 bp, Homo sapiens
atgaaatattcatgc

SEQ ID NO: 59565 - DNA, 15 bp, Homo sapiens
tatgaaatattcatg

SEQ ID NO: 59566 - DNA, 15 bp, Homo sapiens
atatgaaatattcat

SEQ ID NO: 59567 - DNA, 15 bp, Homo sapiens
gatatgaaatattca

SEQ ID NO: 59568 - DNA, 15 bp, Homo sapiens
agatatgaaatattc

SEQ ID NO: 59569 - DNA, 15 bp, Homo sapiens
tagatatgaaatatt

SEQ ID NO: 59570 - DNA, 15 bp, Homo sapiens
atagatatgaaatat

SEQ ID NO: 59571 - DNA, 15 bp, Homo sapiens
tatagatatgaaata

SEQ ID NO: 59572 - DNA, 15 bp, Homo sapiens
ttatagatatgaaat

SEQ ID NO: 59573 - DNA, 15 bp, Homo sapiens
tttatagatatgaaa

SEQ ID NO: 59574 - DNA, 15 bp, Homo sapiens
ttttatagatatgaa

SEQ ID NO: 59575 - DNA, 15 bp, Homo sapiens
attttatagatatga

SEQ ID NO: 59576 - DNA, 15 bp, Homo sapiens
cattttatagatatg

SEQ ID NO: 59577 - DNA, 15 bp, Homo sapiens
tcattttatagatat

SEQ ID NO: 59578 - DNA, 15 bp, Homo sapiens
gtcattttatagata

SEQ ID NO: 59579 - DNA, 15 bp, Homo sapiens
tgtcattttatagat

SEQ ID NO: 59580 - DNA, 15 bp, Homo sapiens
ctgtcattttataga

SEQ ID NO: 59581 - DNA, 15 bp, Homo sapiens
tctgtcattttatag

SEQ ID NO: 59582 - DNA, 15 bp, Homo sapiens
atctgtcattttata

SEQ ID NO: 59583 - DNA, 15 bp, Homo sapiens
gatctgtcattttat

SEQ ID NO: 59584 - DNA, 15 bp, Homo sapiens
ggatctgtcatttta

SEQ ID NO: 59585 - DNA, 15 bp, Homo sapiens
gggatctgtcatttt

SEQ ID NO: 59586 - DNA, 15 bp, Homo sapiens
tgggatctgtcattt

SEQ ID NO: 59587 - DNA, 15 bp, Homo sapiens
gtgggatctgtcatt

SEQ ID NO: 59588 - DNA, 15 bp, Homo sapiens
ggtgggatctgtcat

SEQ ID NO: 59589 - DNA, 15 bp, Homo sapiens
tggtgggatctgtca

SEQ ID NO: 59590 - DNA, 15 bp, Homo sapiens
ctggtgggatctgtc

SEQ ID NO: 59591 - DNA, 15 bp, Homo sapiens
cctggtgggatctgt

SEQ ID NO: 59592 - DNA, 15 bp, Homo sapiens
tcctggtgggatctg

SEQ ID NO: 59593 - DNA, 15 bp, Homo sapiens
ttcctggtgggatct

SEQ ID NO: 59594 - DNA, 15 bp, Homo sapiens
cttcctggtgggatc

SEQ ID NO: 59595 - DNA, 15 bp, Homo sapiens
ccttcctggtgggat

SEQ ID NO: 59596 - DNA, 15 bp, Homo sapiens
tccttcctggtggga

SEQ ID NO: 59597 - DNA, 15 bp, Homo sapiens
ttccttcctggtggg

SEQ ID NO: 59598 - DNA, 15 bp, Homo sapiens
cttccttcctggtgg

SEQ ID NO: 59599 - DNA, 15 bp, Homo sapiens
gcttccttcctggtg

SEQ ID NO: 59600 - DNA, 15 bp, Homo sapiens
agcttccttcctggt

SEQ ID NO: 59601 - DNA, 15 bp, Homo sapiens
cagcttccttcctgg

SEQ ID NO: 59602 - DNA, 15 bp, Homo sapiens
acagcttccttcctg

SEQ ID NO: 59603 - DNA, 15 bp, Homo sapiens
aacagcttccttcct

SEQ ID NO: 59604 - DNA, 15 bp, Homo sapiens
caacagcttccttcc

SEQ ID NO: 59605 - DNA, 15 bp, Homo sapiens
gcaacagcttccttc

SEQ ID NO: 59606 - DNA, 15 bp, Homo sapiens
agcaacagcttcctt

SEQ ID NO: 59607 - DNA, 15 bp, Homo sapiens
aagcaacagcttcct

SEQ ID NO: 59608 - DNA, 15 bp, Homo sapiens
aaagcaacagcttcc

SEQ ID NO: 59609 - DNA, 15 bp, Homo sapiens
gaaagcaacagcttc

SEQ ID NO: 59610 - DNA, 15 bp, Homo sapiens
agaaagcaacagctt

SEQ ID NO: 59611 - DNA, 15 bp, Homo sapiens
aagaaagcaacagct

SEQ ID NO: 59612 - DNA, 15 bp, Homo sapiens
aaagaaagcaacagc

SEQ ID NO: 59613 - DNA, 15 bp, Homo sapiens
caaagaaagcaacag

SEQ ID NO: 59614 - DNA, 15 bp, Homo sapiens
tcaaagaaagcaaca

SEQ ID NO: 59615 - DNA, 15 bp, Homo sapiens
ctcaaagaaagcaac

SEQ ID NO: 59616 - DNA, 15 bp, Homo sapiens
cctcaaagaaagcaa

SEQ ID NO: 59617 - DNA, 15 bp, Homo sapiens
acctcaaagaaagca

SEQ ID NO: 59618 - DNA, 15 bp, Homo sapiens
cacctcaaagaaagc

SEQ ID NO: 59619 - DNA, 15 bp, Homo sapiens
tcacctcaaagaaag

SEQ ID NO: 59620 - DNA, 15 bp, Homo sapiens
atcacctcaaagaaa

SEQ ID NO: 59621 - DNA, 15 bp, Homo sapiens
aatcacctcaaagaa

SEQ ID NO: 59622 - DNA, 15 bp, Homo sapiens
aaatcacctcaaaga

SEQ ID NO: 59623 - DNA, 15 bp, Homo sapiens
aaaatcacctcaaag

SEQ ID NO: 59624 - DNA, 15 bp, Homo sapiens
aaaaatcacctcaaa

SEQ ID NO: 59625 - DNA, 15 bp, Homo sapiens
aaaaaatcacctcaa

SEQ ID NO: 59626 - DNA, 15 bp, Homo sapiens
aaaaaaatcacctca

SEQ ID NO: 59627 - DNA, 15 bp, Homo sapiens
gaaaaaaatcacctc

SEQ ID NO: 59628 - DNA, 15 bp, Homo sapiens
ggaaaaaaatcacct

SEQ ID NO: 59629 - DNA, 15 bp, Homo sapiens
aggaaaaaaatcacc

SEQ ID NO: 59630 - DNA, 15 bp, Homo sapiens
aaggaaaaaaatcac

SEQ ID NO: 59631 - DNA, 15 bp, Homo sapiens
aaaggaaaaaaatca

SEQ ID NO: 59632 - DNA, 15 bp, Homo sapiens
caaaggaaaaaaatc

SEQ ID NO: 59633 - DNA, 15 bp, Homo sapiens
gcaaaggaaaaaaat

SEQ ID NO: 59634 - DNA, 15 bp, Homo sapiens
agcaaaggaaaaaaa

SEQ ID NO: 59635 - DNA, 15 bp, Homo sapiens
gagcaaaggaaaaaa

SEQ ID NO: 59636 - DNA, 15 bp, Homo sapiens
ggagcaaaggaaaaa

SEQ ID NO: 59637 - DNA, 15 bp, Homo sapiens
gggagcaaaggaaaa

SEQ ID NO: 59638 - DNA, 15 bp, Homo sapiens
agggagcaaaggaaa

SEQ ID NO: 59639 - DNA, 15 bp, Homo sapiens
cagggagcaaaggaa

SEQ ID NO: 59640 - DNA, 15 bp, Homo sapiens
acagggagcaaagga

SEQ ID NO: 59641 - DNA, 15 bp, Homo sapiens
aacagggagcaaagg

SEQ ID NO: 59642 - DNA, 15 bp, Homo sapiens
caacagggagcaaag

SEQ ID NO: 59643 - DNA, 15 bp, Homo sapiens
gcaacagggagcaaa

SEQ ID NO: 59644 - DNA, 15 bp, Homo sapiens
agcaacagggagcaa

SEQ ID NO: 59645 - DNA, 15 bp, Homo sapiens
cagcaacagggagca

SEQ ID NO: 59646 - DNA, 15 bp, Homo sapiens
tcagcaacagggagc

SEQ ID NO: 59647 - DNA, 15 bp, Homo sapiens
ttcagcaacagggag

SEQ ID NO: 59648 - DNA, 15 bp, Homo sapiens
tttcagcaacaggga

SEQ ID NO: 59649 - DNA, 15 bp, Homo sapiens
gtttcagcaacaggg

SEQ ID NO: 59650 - DNA, 15 bp, Homo sapiens
ggtttcagcaacagg

SEQ ID NO: 59651 - DNA, 15 bp, Homo sapiens
tggtttcagcaacag

SEQ ID NO: 59652 - DNA, 15 bp, Homo sapiens
atggtttcagcaaca

SEQ ID NO: 59653 - DNA, 15 bp, Homo sapiens
tatggtttcagcaac

SEQ ID NO: 59654 - DNA, 15 bp, Homo sapiens
gtatggtttcagcaa

SEQ ID NO: 59655 - DNA, 15 bp, Homo sapiens
tgtatggtttcagca

SEQ ID NO: 59656 - DNA, 15 bp, Homo sapiens
ctgtatggtttcagc

SEQ ID NO: 59657 - DNA, 15 bp, Homo sapiens
gctgtatggtttcag

SEQ ID NO: 59658 - DNA, 15 bp, Homo sapiens
agctgtatggtttca

SEQ ID NO: 59659 - DNA, 15 bp, Homo sapiens
aagctgtatggtttc

SEQ ID NO: 59660 - DNA, 15 bp, Homo sapiens
gaagctgtatggttt

SEQ ID NO: 59661 - DNA, 15 bp, Homo sapiens
tgaagctgtatggtt

SEQ ID NO: 59662 - DNA, 15 bp, Homo sapiens
atgaagctgtatggt

SEQ ID NO: 59663 - DNA, 15 bp, Homo sapiens
tatgaagctgtatgg

SEQ ID NO: 59664 - DNA, 15 bp, Homo sapiens
ttatgaagctgtatg

SEQ ID NO: 59665 - DNA, 15 bp, Homo sapiens
tttatgaagctgtat

SEQ ID NO: 59666 - DNA, 15 bp, Homo sapiens
atttatgaagctgta

SEQ ID NO: 59667 - DNA, 15 bp, Homo sapiens
tatttatgaagctgt

SEQ ID NO: 59668 - DNA, 15 bp, Homo sapiens
ttatttatgaagctg

SEQ ID NO: 59669 - DNA, 15 bp, Homo sapiens
attatttatgaagct

SEQ ID NO: 59670 - DNA, 15 bp, Homo sapiens
aattatttatgaagc

SEQ ID NO: 59671 - DNA, 15 bp, Homo sapiens
aaattatttatgaag

SEQ ID NO: 59672 - DNA, 15 bp, Homo sapiens
aaaattatttatgaa

SEQ ID NO: 59673 - DNA, 15 bp, Homo sapiens
caaaattatttatga

SEQ ID NO: 59674 - DNA, 15 bp, Homo sapiens
gcaaaattatttatg

SEQ ID NO: 59675 - DNA, 15 bp, Homo sapiens
agcaaaattatttat

SEQ ID NO: 59676 - DNA, 15 bp, Homo sapiens
aagcaaaattattta

SEQ ID NO: 59677 - DNA, 15 bp, Homo sapiens
caagcaaaattattt

SEQ ID NO: 59678 - DNA, 15 bp, Homo sapiens
gcaagcaaaattatt

SEQ ID NO: 59679 - DNA, 15 bp, Homo sapiens
agcaagcaaaattat

SEQ ID NO: 59680 - DNA, 15 bp, Homo sapiens
cagcaagcaaaatta

SEQ ID NO: 59681 - DNA, 15 bp, Homo sapiens
tcagcaagcaaaatt

SEQ ID NO: 59682 - DNA, 15 bp, Homo sapiens
ttcagcaagcaaaat

SEQ ID NO: 59683 - DNA, 15 bp, Homo sapiens
cttcagcaagcaaaa

SEQ ID NO: 59684 - DNA, 15 bp, Homo sapiens
ccttcagcaagcaaa

SEQ ID NO: 59685 - DNA, 15 bp, Homo sapiens
tccttcagcaagcaa

SEQ ID NO: 59686 - DNA, 15 bp, Homo sapiens
ttccttcagcaagca

SEQ ID NO: 59687 - DNA, 15 bp, Homo sapiens
cttccttcagcaagc

SEQ ID NO: 59688 - DNA, 15 bp, Homo sapiens
tcttccttcagcaag

SEQ ID NO: 59689 - DNA, 15 bp, Homo sapiens
ttcttccttcagcaa

SEQ ID NO: 59690 - DNA, 15 bp, Homo sapiens
tttcttccttcagca

SEQ ID NO: 59691 - DNA, 15 bp, Homo sapiens
ttttcttccttcagc

SEQ ID NO: 59692 - DNA, 15 bp, Homo sapiens
tttttcttccttcag

SEQ ID NO: 59693 - DNA, 15 bp, Homo sapiens
ctttttcttccttca

SEQ ID NO: 59694 - DNA, 15 bp, Homo sapiens
actttttcttccttc

SEQ ID NO: 59695 - DNA, 15 bp, Homo sapiens
cactttttcttcctt

SEQ ID NO: 59696 - DNA, 15 bp, Homo sapiens
acactttttcttcct

SEQ ID NO: 59697 - DNA, 15 bp, Homo sapiens
aacactttttcttcc

SEQ ID NO: 59698 - DNA, 15 bp, Homo sapiens
aaacactttttcttc

SEQ ID NO: 59699 - DNA, 15 bp, Homo sapiens
aaaacactttttctt

SEQ ID NO: 59700 - DNA, 15 bp, Homo sapiens
aaaaacactttttct

SEQ ID NO: 59701 - DNA, 15 bp, Homo sapiens
gaaaaacactttttc

SEQ ID NO: 59702 - DNA, 15 bp, Homo sapiens
tgaaaaacacttttt

SEQ ID NO: 59703 - DNA, 15 bp, Homo sapiens
atgaaaaacactttt

SEQ ID NO: 59704 - DNA, 15 bp, Homo sapiens
tatgaaaaacacttt

SEQ ID NO: 59705 - DNA, 15 bp, Homo sapiens
ttatgaaaaacactt

SEQ ID NO: 59706 - DNA, 15 bp, Homo sapiens
tttatgaaaaacact

SEQ ID NO: 59707 - DNA, 15 bp, Homo sapiens
gtttatgaaaaacac

SEQ ID NO: 59708 - DNA, 15 bp, Homo sapiens
ggtttatgaaaaaca

SEQ ID NO: 59709 - DNA, 15 bp, Homo sapiens
gggtttatgaaaaac

SEQ ID NO: 59710 - DNA, 15 bp, Homo sapiens
tgggtttatgaaaaa

SEQ ID NO: 59711 - DNA, 15 bp, Homo sapiens
atgggtttatgaaaa

SEQ ID NO: 59712 - DNA, 15 bp, Homo sapiens
aatgggtttatgaaa

SEQ ID NO: 59713 - DNA, 15 bp, Homo sapiens
taatgggtttatgaa

SEQ ID NO: 59714 - DNA, 15 bp, Homo sapiens
ataatgggtttatga

SEQ ID NO: 59715 - DNA, 15 bp, Homo sapiens
gataatgggtttatg

SEQ ID NO: 59716 - DNA, 15 bp, Homo sapiens
ggataatgggtttat

SEQ ID NO: 59717 - DNA, 15 bp, Homo sapiens
tggataatgggttta

SEQ ID NO: 59718 - DNA, 15 bp, Homo sapiens
ctggataatgggttt

SEQ ID NO: 59719 - DNA, 15 bp, Homo sapiens
cctggataatgggtt

SEQ ID NO: 59720 - DNA, 15 bp, Homo sapiens
tcctggataatgggt

SEQ ID NO: 59721 - DNA, 15 bp, Homo sapiens
gtcctggataatggg

SEQ ID NO: 59722 - DNA, 15 bp, Homo sapiens
agtcctggataatgg

SEQ ID NO: 59723 - DNA, 15 bp, Homo sapiens
cagtcctggataatg

SEQ ID NO: 59724 - DNA, 15 bp, Homo sapiens
acagtcctggataat

SEQ ID NO: 59725 - DNA, 15 bp, Homo sapiens
aacagtcctggataa

SEQ ID NO: 59726 - DNA, 15 bp, Homo sapiens
aaacagtcctggata

SEQ ID NO: 59727 - DNA, 15 bp, Homo sapiens
taaacagtcctggat

SEQ ID NO: 59728 - DNA, 15 bp, Homo sapiens
ataaacagtcctgga

SEQ ID NO: 59729 - DNA, 15 bp, Homo sapiens
tataaacagtcctgg

SEQ ID NO: 59730 - DNA, 15 bp, Homo sapiens
ctataaacagtcctg

SEQ ID NO: 59731 - DNA, 15 bp, Homo sapiens
gctataaacagtcct

SEQ ID NO: 59732 - DNA, 15 bp, Homo sapiens
agctataaacagtcc

SEQ ID NO: 59733 - DNA, 15 bp, Homo sapiens
cagctataaacagtc

SEQ ID NO: 59734 - DNA, 15 bp, Homo sapiens
acagctataaacagt

SEQ ID NO: 59735 - DNA, 15 bp, Homo sapiens
aacagctataaacag

SEQ ID NO: 59736 - DNA, 15 bp, Homo sapiens
caacagctataaaca

SEQ ID NO: 59737 - DNA, 15 bp, Homo sapiens
ccaacagctataaac

SEQ ID NO: 59738 - DNA, 15 bp, Homo sapiens
tccaacagctataaa

SEQ ID NO: 59739 - DNA, 15 bp, Homo sapiens
ttccaacagctataa

SEQ ID NO: 59740 - DNA, 15 bp, Homo sapiens
cttccaacagctata

SEQ ID NO: 59741 - DNA, 15 bp, Homo sapiens
ccttccaacagctat

SEQ ID NO: 59742 - DNA, 15 bp, Homo sapiens
tccttccaacagcta

SEQ ID NO: 59743 - DNA, 15 bp, Homo sapiens
gtccttccaacagct

SEQ ID NO: 59744 - DNA, 15 bp, Homo sapiens
agtccttccaacagc

SEQ ID NO: 59745 - DNA, 15 bp, Homo sapiens
tagtccttccaacag

SEQ ID NO: 59746 - DNA, 15 bp, Homo sapiens
ctagtccttccaaca

SEQ ID NO: 59747 - DNA, 15 bp, Homo sapiens
cctagtccttccaac

SEQ ID NO: 59748 - DNA, 15 bp, Homo sapiens
acctagtccttccaa

SEQ ID NO: 59749 - DNA, 15 bp, Homo sapiens
gacctagtccttcca

SEQ ID NO: 59750 - DNA, 15 bp, Homo sapiens
agacctagtccttcc

SEQ ID NO: 59751 - DNA, 15 bp, Homo sapiens
aagacctagtccttc

SEQ ID NO: 59752 - DNA, 15 bp, Homo sapiens
gaagacctagtcctt

SEQ ID NO: 59753 - DNA, 15 bp, Homo sapiens
ggaagacctagtcct

SEQ ID NO: 59754 - DNA, 15 bp, Homo sapiens
gggaagacctagtcc

SEQ ID NO: 59755 - DNA, 15 bp, Homo sapiens
agggaagacctagtc

SEQ ID NO: 59756 - DNA, 15 bp, Homo sapiens
tagggaagacctagt

SEQ ID NO: 59757 - DNA, 15 bp, Homo sapiens
ctagggaagacctag

SEQ ID NO: 59758 - DNA, 15 bp, Homo sapiens
gctagggaagaccta

SEQ ID NO: 59759 - DNA, 15 bp, Homo sapiens
ggctagggaagacct

SEQ ID NO: 59760 - DNA, 15 bp, Homo sapiens
gggctagggaagacc

SEQ ID NO: 59761 - DNA, 15 bp, Homo sapiens
ggggctagggaagac

SEQ ID NO: 59762 - DNA, 15 bp, Homo sapiens
gggggctagggaaga

SEQ ID NO: 59763 - DNA, 15 bp, Homo sapiens
ggggggctagggaag

SEQ ID NO: 59764 - DNA, 15 bp, Homo sapiens
gggggggctagggaa

SEQ ID NO: 59765 - DNA, 15 bp, Homo sapiens
tgggggggctaggga

SEQ ID NO: 59766 - DNA, 15 bp, Homo sapiens
ctgggggggctaggg

SEQ ID NO: 59767 - DNA, 15 bp, Homo sapiens
actgggggggctagg

SEQ ID NO: 59768 - DNA, 15 bp, Homo sapiens
cactgggggggctag

SEQ ID NO: 59769 - DNA, 15 bp, Homo sapiens
acactgggggggcta

SEQ ID NO: 59770 - DNA, 15 bp, Homo sapiens
cacactgggggggct

SEQ ID NO: 59771 - DNA, 15 bp, Homo sapiens
gcacactgggggggc

SEQ ID NO: 59772 - DNA, 15 bp, Homo sapiens
tgcacactggggggg

SEQ ID NO: 59773 - DNA, 15 bp, Homo sapiens
ttgcacactgggggg

SEQ ID NO: 59774 - DNA, 15 bp, Homo sapiens
cttgcacactggggg

SEQ ID NO: 59775 - DNA, 15 bp, Homo sapiens
ccttgcacactgggg

SEQ ID NO: 59776 - DNA, 15 bp, Homo sapiens
cccttgcacactggg

SEQ ID NO: 59777 - DNA, 15 bp, Homo sapiens
gcccttgcacactgg

SEQ ID NO: 59778 - DNA, 15 bp, Homo sapiens
tgcccttgcacactg

SEQ ID NO: 59779 - DNA, 15 bp, Homo sapiens
ctgcccttgcacact

SEQ ID NO: 59780 - DNA, 15 bp, Homo sapiens
actgcccttgcacac

SEQ ID NO: 59781 - DNA, 15 bp, Homo sapiens
cactgcccttgcaca

SEQ ID NO: 59782 - DNA, 15 bp, Homo sapiens
tcactgcccttgcac

SEQ ID NO: 59783 - DNA, 15 bp, Homo sapiens
ttcactgcccttgca

SEQ ID NO: 59784 - DNA, 15 bp, Homo sapiens
cttcactgcccttgc

SEQ ID NO: 59785 - DNA, 15 bp, Homo sapiens
tcttcactgcccttg

SEQ ID NO: 59786 - DNA, 15 bp, Homo sapiens
gtcttcactgccctt

SEQ ID NO: 59787 - DNA, 15 bp, Homo sapiens
agtcttcactgccct

SEQ ID NO: 59788 - DNA, 15 bp, Homo sapiens
aagtcttcactgccc

SEQ ID NO: 59789 - DNA, 15 bp, Homo sapiens
caagtcttcactgcc

SEQ ID NO: 59790 - DNA, 15 bp, Homo sapiens
tcaagtcttcactgc

SEQ ID NO: 59791 - DNA, 15 bp, Homo sapiens
atcaagtcttcactg

SEQ ID NO: 59792 - DNA, 15 bp, Homo sapiens
aatcaagtcttcact

SEQ ID NO: 59793 - DNA, 15 bp, Homo sapiens
caatcaagtcttcac

SEQ ID NO: 59794 - DNA, 15 bp, Homo sapiens
acaatcaagtcttca

SEQ ID NO: 59795 - DNA, 15 bp, Homo sapiens
tacaatcaagtcttc

SEQ ID NO: 59796 - DNA, 15 bp, Homo sapiens
gtacaatcaagtctt

SEQ ID NO: 59797 - DNA, 15 bp, Homo sapiens
tgtacaatcaagtct

SEQ ID NO: 59798 - DNA, 15 bp, Homo sapiens
ttgtacaatcaagtc

SEQ ID NO: 59799 - DNA, 15 bp, Homo sapiens
tttgtacaatcaagt

SEQ ID NO: 59800 - DNA, 15 bp, Homo sapiens
ttttgtacaatcaag

SEQ ID NO: 59801 - DNA, 15 bp, Homo sapiens
attttgtacaatcaa

SEQ ID NO: 59802 - DNA, 15 bp, Homo sapiens
tattttgtacaatca

SEQ ID NO: 59803 - DNA, 15 bp, Homo sapiens
gtattttgtacaatc

SEQ ID NO: 59804 - DNA, 15 bp, Homo sapiens
cgtattttgtacaat

SEQ ID NO: 59805 - DNA, 15 bp, Homo sapiens
acgtattttgtacaa

SEQ ID NO: 59806 - DNA, 15 bp, Homo sapiens
aacgtattttgtaca

SEQ ID NO: 59807 - DNA, 15 bp, Homo sapiens
aaacgtattttgtac

SEQ ID NO: 59808 - DNA, 15 bp, Homo sapiens
aaaacgtattttgta

SEQ ID NO: 59809 - DNA, 15 bp, Homo sapiens
caaaacgtattttgt

SEQ ID NO: 59810 - DNA, 15 bp, Homo sapiens
acaaaacgtattttg

SEQ ID NO: 59811 - DNA, 15 bp, Homo sapiens
tacaaaacgtatttt

SEQ ID NO: 59812 - DNA, 15 bp, Homo sapiens
ttacaaaacgtattt

SEQ ID NO: 59813 - DNA, 15 bp, Homo sapiens
tttacaaaacgtatt

SEQ ID NO: 59814 - DNA, 15 bp, Homo sapiens
atttacaaaacgtat

SEQ ID NO: 59815 - DNA, 15 bp, Homo sapiens
catttacaaaacgta

SEQ ID NO: 59816 - DNA, 15 bp, Homo sapiens
acatttacaaaacgt

SEQ ID NO: 59817 - DNA, 15 bp, Homo sapiens
aacatttacaaaacg

SEQ ID NO: 59818 - DNA, 15 bp, Homo sapiens
caacatttacaaaac

SEQ ID NO: 59819 - DNA, 15 bp, Homo sapiens
acaacatttacaaaa

SEQ ID NO: 59820 - DNA, 15 bp, Homo sapiens
cacaacatttacaaa

SEQ ID NO: 59821 - DNA, 15 bp, Homo sapiens
gcacaacatttacaa

SEQ ID NO: 59822 - DNA, 15 bp, Homo sapiens
agcacaacatttaca

SEQ ID NO: 59823 - DNA, 15 bp, Homo sapiens
cagcacaacatttac

SEQ ID NO: 59824 - DNA, 15 bp, Homo sapiens
acagcacaacattta

SEQ ID NO: 59825 - DNA, 15 bp, Homo sapiens
aacagcacaacattt

SEQ ID NO: 59826 - DNA, 15 bp, Homo sapiens
taacagcacaacatt

SEQ ID NO: 59827 - DNA, 15 bp, Homo sapiens
ttaacagcacaacat

SEQ ID NO: 59828 - DNA, 15 bp, Homo sapiens
gttaacagcacaaca

SEQ ID NO: 59829 - DNA, 15 bp, Homo sapiens
tgttaacagcacaac

SEQ ID NO: 59830 - DNA, 15 bp, Homo sapiens
gtgttaacagcacaa

SEQ ID NO: 59831 - DNA, 15 bp, Homo sapiens
agtgttaacagcaca

SEQ ID NO: 59832 - DNA, 15 bp, Homo sapiens
cagtgttaacagcac

SEQ ID NO: 59833 - DNA, 15 bp, Homo sapiens
gcagtgttaacagca

SEQ ID NO: 59834 - DNA, 15 bp, Homo sapiens
tgcagtgttaacagc

SEQ ID NO: 59835 - DNA, 15 bp, Homo sapiens
ttgcagtgttaacag

SEQ ID NO: 59836 - DNA, 15 bp, Homo sapiens
tttgcagtgttaaca

SEQ ID NO: 59837 - DNA, 15 bp, Homo sapiens
atttgcagtgttaac

SEQ ID NO: 59838 - DNA, 15 bp, Homo sapiens
tatttgcagtgttaa

SEQ ID NO: 59839 - DNA, 15 bp, Homo sapiens
ttatttgcagtgtta

SEQ ID NO: 59840 - DNA, 15 bp, Homo sapiens
tttatttgcagtgtt

SEQ ID NO: 59841 - DNA, 15 bp, Homo sapiens
gtttatttgcagtgt

SEQ ID NO: 59842 - DNA, 15 bp, Homo sapiens
agtttatttgcagtg

SEQ ID NO: 59843 - DNA, 15 bp, Homo sapiens
aagtttatttgcagt

SEQ ID NO: 59844 - DNA, 15 bp, Homo sapiens
caagtttatttgcag

SEQ ID NO: 59845 - DNA, 15 bp, Homo sapiens
ccaagtttatttgca

SEQ ID NO: 59846 - DNA, 15 bp, Homo sapiens
accaagtttatttgc

SEQ ID NO: 59847 - DNA, 15 bp, Homo sapiens
taccaagtttatttg

SEQ ID NO: 59848 - DNA, 15 bp, Homo sapiens
ctaccaagtttattt

SEQ ID NO: 59849 - DNA, 15 bp, Homo sapiens
gctaccaagtttatt

SEQ ID NO: 59850 - DNA, 15 bp, Homo sapiens
tgctaccaagtttat

SEQ ID NO: 59851 - DNA, 15 bp, Homo sapiens
ttgctaccaagttta

SEQ ID NO: 59852 - DNA, 15 bp, Homo sapiens
tttgctaccaagttt

SEQ ID NO: 59853 - DNA, 15 bp, Homo sapiens
gtttgctaccaagtt

SEQ ID NO: 59854 - DNA, 15 bp, Homo sapiens
tgtttgctaccaagt

SEQ ID NO: 59855 - DNA, 15 bp, Homo sapiens
gtgtttgctaccaag

SEQ ID NO: 59856 - DNA, 15 bp, Homo sapiens
agtgtttgctaccaa

SEQ ID NO: 59857 - DNA, 15 bp, Homo sapiens
aagtgtttgctacca

SEQ ID NO: 59858 - DNA, 15 bp, Homo sapiens
gaagtgtttgctacc

SEQ ID NO: 59859 - DNA, 15 bp, Homo sapiens
ggaagtgtttgctac

SEQ ID NO: 59860 - DNA, 15 bp, Homo sapiens
tggaagtgtttgcta

SEQ ID NO: 59861 - DNA, 15 bp, Homo sapiens
gtggaagtgtttgct

SEQ ID NO: 59862 - DNA, 15 bp, Homo sapiens
ggtggaagtgtttgc

SEQ ID NO: 59863 - DNA, 15 bp, Homo sapiens
tggtggaagtgtttg

SEQ ID NO: 59864 - DNA, 15 bp, Homo sapiens
atggtggaagtgttt

SEQ ID NO: 59865 - DNA, 15 bp, Homo sapiens
catggtggaagtgtt

SEQ ID NO: 59866 - DNA, 15 bp, Homo sapiens
tcatggtggaagtgt

SEQ ID NO: 59867 - DNA, 15 bp, Homo sapiens
ttcatggtggaagtg

SEQ ID NO: 59868 - DNA, 15 bp, Homo sapiens
attcatggtggaagt

SEQ ID NO: 59869 - DNA, 15 bp, Homo sapiens
cattcatggtggaag

SEQ ID NO: 59870 - DNA, 15 bp, Homo sapiens
tcattcatggtggaa

SEQ ID NO: 59871 - DNA, 15 bp, Homo sapiens
gtcattcatggtgga

SEQ ID NO: 59872 - DNA, 15 bp, Homo sapiens
agtcattcatggtgg

SEQ ID NO: 59873 - DNA, 15 bp, Homo sapiens
cagtcattcatggtg

SEQ ID NO: 59874 - DNA, 15 bp, Homo sapiens
acagtcattcatggt

SEQ ID NO: 59875 - DNA, 15 bp, Homo sapiens
aacagtcattcatgg

SEQ ID NO: 59876 - DNA, 15 bp, Homo sapiens
gaacagtcattcatg

SEQ ID NO: 59877 - DNA, 15 bp, Homo sapiens
agaacagtcattcat

SEQ ID NO: 59878 - DNA, 15 bp, Homo sapiens
aagaacagtcattca

SEQ ID NO: 59879 - DNA, 15 bp, Homo sapiens
caagaacagtcattc

SEQ ID NO: 59880 - DNA, 15 bp, Homo sapiens
tcaagaacagtcatt

SEQ ID NO: 59881 - DNA, 15 bp, Homo sapiens
ctcaagaacagtcat

SEQ ID NO: 59882 - DNA, 15 bp, Homo sapiens
tctcaagaacagtca

SEQ ID NO: 59883 - DNA, 15 bp, Homo sapiens
gtctcaagaacagtc

SEQ ID NO: 59884 - DNA, 15 bp, Homo sapiens
agtctcaagaacagt

SEQ ID NO: 59885 - DNA, 15 bp, Homo sapiens
aagtctcaagaacag

SEQ ID NO: 59886 - DNA, 15 bp, Homo sapiens
taagtctcaagaaca

SEQ ID NO: 59887 - DNA, 15 bp, Homo sapiens
ctaagtctcaagaac

SEQ ID NO: 59888 - DNA, 15 bp, Homo sapiens
cctaagtctcaagaa

SEQ ID NO: 59889 - DNA, 15 bp, Homo sapiens
gcctaagtctcaaga

SEQ ID NO: 59890 - DNA, 15 bp, Homo sapiens
ggcctaagtctcaag

SEQ ID NO: 59891 - DNA, 15 bp, Homo sapiens
tggcctaagtctcaa

SEQ ID NO: 59892 - DNA, 15 bp, Homo sapiens
ctggcctaagtctca

SEQ ID NO: 59893 - DNA, 15 bp, Homo sapiens
gctggcctaagtctc

SEQ ID NO: 59894 - DNA, 15 bp, Homo sapiens
ggctggcctaagtct

SEQ ID NO: 59895 - DNA, 15 bp, Homo sapiens
cggctggcctaagtc

SEQ ID NO: 59896 - DNA, 15 bp, Homo sapiens
tcggctggcctaagt

SEQ ID NO: 59897 - DNA, 15 bp, Homo sapiens
gtcggctggcctaag

SEQ ID NO: 59898 - DNA, 15 bp, Homo sapiens
agtcggctggcctaa

SEQ ID NO: 59899 - DNA, 15 bp, Homo sapiens
aagtcggctggccta

SEQ ID NO: 59900 - DNA, 15 bp, Homo sapiens
aaagtcggctggcct

SEQ ID NO: 59901 - DNA, 15 bp, Homo sapiens
gaaagtcggctggcc

SEQ ID NO: 59902 - DNA, 15 bp, Homo sapiens
agaaagtcggctggc

SEQ ID NO: 59903 - DNA, 15 bp, Homo sapiens
gagaaagtcggctgg

SEQ ID NO: 59904 - DNA, 15 bp, Homo sapiens
tgagaaagtcggctg

SEQ ID NO: 59905 - DNA, 15 bp, Homo sapiens
ctgagaaagtcggct

SEQ ID NO: 59906 - DNA, 15 bp, Homo sapiens
tctgagaaagtcggc

SEQ ID NO: 59907 - DNA, 15 bp, Homo sapiens
ctctgagaaagtcgg

SEQ ID NO: 59908 - DNA, 15 bp, Homo sapiens
gctctgagaaagtcg

SEQ ID NO: 59909 - DNA, 15 bp, Homo sapiens
ggctctgagaaagtc

SEQ ID NO: 59910 - DNA, 15 bp, Homo sapiens
aggctctgagaaagt

SEQ ID NO: 59911 - DNA, 15 bp, Homo sapiens
aaggctctgagaaag

SEQ ID NO: 59912 - DNA, 15 bp, Homo sapiens
aaaggctctgagaaa

SEQ ID NO: 59913 - DNA, 15 bp, Homo sapiens
aaaaggctctgagaa

SEQ ID NO: 59914 - DNA, 15 bp, Homo sapiens
gaaaaggctctgaga

SEQ ID NO: 59915 - DNA, 15 bp, Homo sapiens
tgaaaaggctctgag

SEQ ID NO: 59916 - DNA, 15 bp, Homo sapiens
gtgaaaaggctctga

SEQ ID NO: 59917 - DNA, 15 bp, Homo sapiens
agtgaaaaggctctg

SEQ ID NO: 59918 - DNA, 15 bp, Homo sapiens
cagtgaaaaggctct

SEQ ID NO: 59919 - DNA, 15 bp, Homo sapiens
acagtgaaaaggctc

SEQ ID NO: 59920 - DNA, 15 bp, Homo sapiens
cacagtgaaaaggct

SEQ ID NO: 59921 - DNA, 15 bp, Homo sapiens
gcacagtgaaaaggc

SEQ ID NO: 59922 - DNA, 15 bp, Homo sapiens
agcacagtgaaaagg

SEQ ID NO: 59923 - DNA, 15 bp, Homo sapiens
aagcacagtgaaaag

SEQ ID NO: 59924 - DNA, 15 bp, Homo sapiens
gaagcacagtgaaaa

SEQ ID NO: 59925 - DNA, 15 bp, Homo sapiens
tgaagcacagtgaaa

SEQ ID NO: 59926 - DNA, 15 bp, Homo sapiens
ctgaagcacagtgaa

SEQ ID NO: 59927 - DNA, 15 bp, Homo sapiens
actgaagcacagtga

SEQ ID NO: 59928 - DNA, 15 bp, Homo sapiens
gactgaagcacagtg

SEQ ID NO: 59929 - DNA, 15 bp, Homo sapiens
agactgaagcacagt

SEQ ID NO: 59930 - DNA, 15 bp, Homo sapiens
gagactgaagcacag

SEQ ID NO: 59931 - DNA, 15 bp, Homo sapiens
ggagactgaagcaca

SEQ ID NO: 59932 - DNA, 15 bp, Homo sapiens
gggagactgaagcac

SEQ ID NO: 59933 - DNA, 15 bp, Homo sapiens
tgggagactgaagca

SEQ ID NO: 59934 - DNA, 15 bp, Homo sapiens
gtgggagactgaagc

SEQ ID NO: 59935 - DNA, 15 bp, Homo sapiens
agtgggagactgaag

SEQ ID NO: 59936 - DNA, 15 bp, Homo sapiens
gagtgggagactgaa

SEQ ID NO: 59937 - DNA, 15 bp, Homo sapiens
agagtgggagactga

SEQ ID NO: 59938 - DNA, 15 bp, Homo sapiens
cagagtgggagactg

SEQ ID NO: 59939 - DNA, 15 bp, Homo sapiens
acagagtgggagact

SEQ ID NO: 59940 - DNA, 15 bp, Homo sapiens
tacagagtgggagac

SEQ ID NO: 59941 - DNA, 15 bp, Homo sapiens
ttacagagtgggaga

SEQ ID NO: 59942 - DNA, 15 bp, Homo sapiens
tttacagagtgggag

SEQ ID NO: 59943 - DNA, 15 bp, Homo sapiens
ttttacagagtggga

SEQ ID NO: 59944 - DNA, 15 bp, Homo sapiens
attttacagagtggg

SEQ ID NO: 59945 - DNA, 15 bp, Homo sapiens
cattttacagagtgg

SEQ ID NO: 59946 - DNA, 15 bp, Homo sapiens
ccattttacagagtg

SEQ ID NO: 59947 - DNA, 15 bp, Homo sapiens
cccattttacagagt

SEQ ID NO: 59948 - DNA, 15 bp, Homo sapiens
ccccattttacagag

SEQ ID NO: 59949 - DNA, 15 bp, Homo sapiens
cccccattttacaga

SEQ ID NO: 59950 - DNA, 15 bp, Homo sapiens
acccccattttacag

SEQ ID NO: 59951 - DNA, 15 bp, Homo sapiens
tacccccattttaca

SEQ ID NO: 59952 - DNA, 15 bp, Homo sapiens
ttacccccattttac

SEQ ID NO: 59953 - DNA, 15 bp, Homo sapiens
attacccccatttta

SEQ ID NO: 59954 - DNA, 15 bp, Homo sapiens
cattacccccatttt

SEQ ID NO: 59955 - DNA, 15 bp, Homo sapiens
tcattacccccattt

SEQ ID NO: 59956 - DNA, 15 bp, Homo sapiens
atcattacccccatt

SEQ ID NO: 59957 - DNA, 15 bp, Homo sapiens
tatcattacccccat

SEQ ID NO: 59958 - DNA, 15 bp, Homo sapiens
ctatcattaccccca

SEQ ID NO: 59959 - DNA, 15 bp, Homo sapiens
actatcattaccccc

SEQ ID NO: 59960 - DNA, 15 bp, Homo sapiens
tactatcattacccc

SEQ ID NO: 59961 - DNA, 15 bp, Homo sapiens
atactatcattaccc

SEQ ID NO: 59962 - DNA, 15 bp, Homo sapiens
gatactatcattacc

SEQ ID NO: 59963 - DNA, 15 bp, Homo sapiens
agatactatcattac

SEQ ID NO: 59964 - DNA, 15 bp, Homo sapiens
tagatactatcatta

SEQ ID NO: 59965 - DNA, 15 bp, Homo sapiens
gtagatactatcatt

SEQ ID NO: 59966 - DNA, 15 bp, Homo sapiens
ggtagatactatcat

SEQ ID NO: 59967 - DNA, 15 bp, Homo sapiens
aggtagatactatca

SEQ ID NO: 59968 - DNA, 15 bp, Homo sapiens
gaggtagatactatc

SEQ ID NO: 59969 - DNA, 15 bp, Homo sapiens
ggaggtagatactat

SEQ ID NO: 59970 - DNA, 15 bp, Homo sapiens
aggaggtagatacta

SEQ ID NO: 59971 - DNA, 15 bp, Homo sapiens
taggaggtagatact

SEQ ID NO: 59972 - DNA, 15 bp, Homo sapiens
ctaggaggtagatac

SEQ ID NO: 59973 - DNA, 15 bp, Homo sapiens
cctaggaggtagata

SEQ ID NO: 59974 - DNA, 15 bp, Homo sapiens
tcctaggaggtagat

SEQ ID NO: 59975 - DNA, 15 bp, Homo sapiens
atcctaggaggtaga

SEQ ID NO: 59976 - DNA, 15 bp, Homo sapiens
aatcctaggaggtag

SEQ ID NO: 59977 - DNA, 15 bp, Homo sapiens
aaatcctaggaggta

SEQ ID NO: 59978 - DNA, 15 bp, Homo sapiens
taaatcctaggaggt

SEQ ID NO: 59979 - DNA, 15 bp, Homo sapiens
ataaatcctaggagg

SEQ ID NO: 59980 - DNA, 15 bp, Homo sapiens
aataaatcctaggag

SEQ ID NO: 59981 - DNA, 15 bp, Homo sapiens
caataaatcctagga

SEQ ID NO: 59982 - DNA, 15 bp, Homo sapiens
tcaataaatcctagg

SEQ ID NO: 59983 - DNA, 15 bp, Homo sapiens
ctcaataaatcctag

SEQ ID NO: 59984 - DNA, 15 bp, Homo sapiens
cctcaataaatccta

SEQ ID NO: 59985 - DNA, 15 bp, Homo sapiens
gcctcaataaatcct

SEQ ID NO: 59986 - DNA, 15 bp, Homo sapiens
tgcctcaataaatcc

SEQ ID NO: 59987 - DNA, 15 bp, Homo sapiens
ctgcctcaataaatc

SEQ ID NO: 59988 - DNA, 15 bp, Homo sapiens
gctgcctcaataaat

SEQ ID NO: 59989 - DNA, 15 bp, Homo sapiens
agctgcctcaataaa

SEQ ID NO: 59990 - DNA, 15 bp, Homo sapiens
aagctgcctcaataa

SEQ ID NO: 59991 - DNA, 15 bp, Homo sapiens
taagctgcctcaata

SEQ ID NO: 59992 - DNA, 15 bp, Homo sapiens
ttaagctgcctcaat

SEQ ID NO: 59993 - DNA, 15 bp, Homo sapiens
tttaagctgcctcaa

SEQ ID NO: 59994 - DNA, 15 bp, Homo sapiens
atttaagctgcctca

SEQ ID NO: 59995 - DNA, 15 bp, Homo sapiens
tatttaagctgcctc

SEQ ID NO: 59996 - DNA, 15 bp, Homo sapiens
gtatttaagctgcct

SEQ ID NO: 59997 - DNA, 15 bp, Homo sapiens
ggtatttaagctgcc

SEQ ID NO: 59998 - DNA, 15 bp, Homo sapiens
aggtatttaagctgc

SEQ ID NO: 59999 - DNA, 15 bp, Homo sapiens
aaggtatttaagctg

SEQ ID NO: 60000 - DNA, 15 bp, Homo sapiens
aaaggtatttaagct

SEQ ID NO: 60001 - DNA, 15 bp, Homo sapiens
aaaaggtatttaagc

SEQ ID NO: 60002 - DNA, 15 bp, Homo sapiens
caaaaggtatttaag

SEQ ID NO: 60003 - DNA, 15 bp, Homo sapiens
acaaaaggtatttaa

SEQ ID NO: 60004 - DNA, 15 bp, Homo sapiens
tacaaaaggtattta

SEQ ID NO: 60005 - DNA, 15 bp, Homo sapiens
atacaaaaggtattt

SEQ ID NO: 60006 - DNA, 15 bp, Homo sapiens
aatacaaaaggtatt

SEQ ID NO: 60007 - DNA, 15 bp, Homo sapiens
aaatacaaaaggtat

SEQ ID NO: 60008 - DNA, 15 bp, Homo sapiens
gaaatacaaaaggta

SEQ ID NO: 60009 - DNA, 15 bp, Homo sapiens
ggaaatacaaaaggt

SEQ ID NO: 60010 - DNA, 15 bp, Homo sapiens
aggaaatacaaaagg

SEQ ID NO: 60011 - DNA, 15 bp, Homo sapiens
caggaaatacaaaag

SEQ ID NO: 60012 - DNA, 15 bp, Homo sapiens
acaggaaatacaaaa

SEQ ID NO: 60013 - DNA, 15 bp, Homo sapiens
aacaggaaatacaaa

SEQ ID NO: 60014 - DNA, 15 bp, Homo sapiens
caacaggaaatacaa

SEQ ID NO: 60015 - DNA, 15 bp, Homo sapiens
gcaacaggaaataca

SEQ ID NO: 60016 - DNA, 15 bp, Homo sapiens
agcaacaggaaatac

SEQ ID NO: 60017 - DNA, 15 bp, Homo sapiens
cagcaacaggaaata

SEQ ID NO: 60018 - DNA, 15 bp, Homo sapiens
gcagcaacaggaaat

SEQ ID NO: 60019 - DNA, 15 bp, Homo sapiens
ggcagcaacaggaaa

SEQ ID NO: 60020 - DNA, 15 bp, Homo sapiens
tggcagcaacaggaa

SEQ ID NO: 60021 - DNA, 15 bp, Homo sapiens
ttggcagcaacagga

SEQ ID NO: 60022 - DNA, 15 bp, Homo sapiens
tttggcagcaacagg

SEQ ID NO: 60023 - DNA, 15 bp, Homo sapiens
ttttggcagcaacag

SEQ ID NO: 60024 - DNA, 15 bp, Homo sapiens
gttttggcagcaaca

SEQ ID NO: 60025 - DNA, 15 bp, Homo sapiens
tgttttggcagcaac

SEQ ID NO: 60026 - DNA, 15 bp, Homo sapiens
ttgttttggcagcaa

SEQ ID NO: 60027 - DNA, 15 bp, Homo sapiens
tttgttttggcagca

SEQ ID NO: 60028 - DNA, 15 bp, Homo sapiens
atttgttttggcagc

SEQ ID NO: 60029 - DNA, 15 bp, Homo sapiens
aatttgttttggcag

SEQ ID NO: 60030 - DNA, 15 bp, Homo sapiens
caatttgttttggca

SEQ ID NO: 60031 - DNA, 15 bp, Homo sapiens
acaatttgttttggc

SEQ ID NO: 60032 - DNA, 15 bp, Homo sapiens
aacaatttgttttgg

SEQ ID NO: 60033 - DNA, 15 bp, Homo sapiens
caacaatttgttttg

SEQ ID NO: 60034 - DNA, 15 bp, Homo sapiens
gcaacaatttgtttt

SEQ ID NO: 60035 - DNA, 15 bp, Homo sapiens
tgcaacaatttgttt

SEQ ID NO: 60036 - DNA, 15 bp, Homo sapiens
ttgcaacaatttgtt

SEQ ID NO: 60037 - DNA, 15 bp, Homo sapiens
cttgcaacaatttgt

SEQ ID NO: 60038 - DNA, 15 bp, Homo sapiens
ccttgcaacaatttg

SEQ ID NO: 60039 - DNA, 15 bp, Homo sapiens
accttgcaacaattt

SEQ ID NO: 60040 - DNA, 15 bp, Homo sapiens
gaccttgcaacaatt

SEQ ID NO: 60041 - DNA, 15 bp, Homo sapiens
tgaccttgcaacaat

SEQ ID NO: 60042 - DNA, 15 bp, Homo sapiens
ctgaccttgcaacaa

SEQ ID NO: 60043 - DNA, 15 bp, Homo sapiens
tctgaccttgcaaca

SEQ ID NO: 60044 - DNA, 15 bp, Homo sapiens
ttctgaccttgcaac

SEQ ID NO: 60045 - DNA, 15 bp, Homo sapiens
cttctgaccttgcaa

SEQ ID NO: 60046 - DNA, 15 bp, Homo sapiens
acttctgaccttgca

SEQ ID NO: 60047 - DNA, 15 bp, Homo sapiens
gacttctgaccttgc

SEQ ID NO: 60048 - DNA, 15 bp, Homo sapiens
agacttctgaccttg

SEQ ID NO: 60049 - DNA, 15 bp, Homo sapiens
cagacttctgacctt

SEQ ID NO: 60050 - DNA, 15 bp, Homo sapiens
tcagacttctgacct

SEQ ID NO: 60051 - DNA, 15 bp, Homo sapiens
ctcagacttctgacc

SEQ ID NO: 60052 - DNA, 15 bp, Homo sapiens
cctcagacttctgac

SEQ ID NO: 60053 - DNA, 15 bp, Homo sapiens
acctcagacttctga

SEQ ID NO: 60054 - DNA, 15 bp, Homo sapiens
cacctcagacttctg

SEQ ID NO: 60055 - DNA, 15 bp, Homo sapiens
ccacctcagacttct

SEQ ID NO: 60056 - DNA, 15 bp, Homo sapiens
gccacctcagacttc

SEQ ID NO: 60057 - DNA, 15 bp, Homo sapiens
agccacctcagactt

SEQ ID NO: 60058 - DNA, 15 bp, Homo sapiens
gagccacctcagact

SEQ ID NO: 60059 - DNA, 15 bp, Homo sapiens
tgagccacctcagac

SEQ ID NO: 60060 - DNA, 15 bp, Homo sapiens
ttgagccacctcaga

SEQ ID NO: 60061 - DNA, 15 bp, Homo sapiens
gttgagccacctcag

SEQ ID NO: 60062 - DNA, 15 bp, Homo sapiens
agttgagccacctca

SEQ ID NO: 60063 - DNA, 15 bp, Homo sapiens
cagttgagccacctc

SEQ ID NO: 60064 - DNA, 15 bp, Homo sapiens
acagttgagccacct

SEQ ID NO: 60065 - DNA, 15 bp, Homo sapiens
aacagttgagccacc

SEQ ID NO: 60066 - DNA, 15 bp, Homo sapiens
aaacagttgagccac

SEQ ID NO: 60067 - DNA, 15 bp, Homo sapiens
gaaacagttgagcca

SEQ ID NO: 60068 - DNA, 15 bp, Homo sapiens
agaaacagttgagcc

SEQ ID NO: 60069 - DNA, 15 bp, Homo sapiens
aagaaacagttgagc

SEQ ID NO: 60070 - DNA, 15 bp, Homo sapiens
aaagaaacagttgag

SEQ ID NO: 60071 - DNA, 15 bp, Homo sapiens
caaagaaacagttga

SEQ ID NO: 60072 - DNA, 15 bp, Homo sapiens
acaaagaaacagttg

SEQ ID NO: 60073 - DNA, 15 bp, Homo sapiens
aacaaagaaacagtt

SEQ ID NO: 60074 - DNA, 15 bp, Homo sapiens
aaacaaagaaacagt

SEQ ID NO: 60075 - DNA, 15 bp, Homo sapiens
gaaacaaagaaacag

SEQ ID NO: 60076 - DNA, 15 bp, Homo sapiens
tgaaacaaagaaaca

SEQ ID NO: 60077 - DNA, 15 bp, Homo sapiens
ctgaaacaaagaaac

SEQ ID NO: 60078 - DNA, 15 bp, Homo sapiens
cctgaaacaaagaaa

SEQ ID NO: 60079 - DNA, 15 bp, Homo sapiens
acctgaaacaaagaa

SEQ ID NO: 60080 - DNA, 15 bp, Homo sapiens
aacctgaaacaaaga

SEQ ID NO: 60081 - DNA, 15 bp, Homo sapiens
aaacctgaaacaaag

SEQ ID NO: 60082 - DNA, 15 bp, Homo sapiens
gaaacctgaaacaaa

SEQ ID NO: 60083 - DNA, 15 bp, Homo sapiens
tgaaacctgaaacaa

SEQ ID NO: 60084 - DNA, 15 bp, Homo sapiens
atgaaacctgaaaca

SEQ ID NO: 60085 - DNA, 15 bp, Homo sapiens
catgaaacctgaaac

SEQ ID NO: 60086 - DNA, 15 bp, Homo sapiens
tcatgaaacctgaaa

SEQ ID NO: 60087 - DNA, 15 bp, Homo sapiens
ctcatgaaacctgaa

SEQ ID NO: 60088 - DNA, 15 bp, Homo sapiens
cctcatgaaacctga

SEQ ID NO: 60089 - DNA, 15 bp, Homo sapiens
gcctcatgaaacctg

SEQ ID NO: 60090 - DNA, 15 bp, Homo sapiens
ggcctcatgaaacct

SEQ ID NO: 60091 - DNA, 15 bp, Homo sapiens
tggcctcatgaaacc

SEQ ID NO: 60092 - DNA, 15 bp, Homo sapiens
ttggcctcatgaaac

SEQ ID NO: 60093 - DNA, 15 bp, Homo sapiens
tttggcctcatgaaa

SEQ ID NO: 60094 - DNA, 15 bp, Homo sapiens
ttttggcctcatgaa

SEQ ID NO: 60095 - DNA, 15 bp, Homo sapiens
attttggcctcatga

SEQ ID NO: 60096 - DNA, 15 bp, Homo sapiens
tattttggcctcatg

SEQ ID NO: 60097 - DNA, 15 bp, Homo sapiens
ttattttggcctcat

SEQ ID NO: 60098 - DNA, 15 bp, Homo sapiens
tttattttggcctca

SEQ ID NO: 60099 - DNA, 15 bp, Homo sapiens
ctttattttggcctc

SEQ ID NO: 60100 - DNA, 15 bp, Homo sapiens
cctttattttggcct

SEQ ID NO: 60101 - DNA, 15 bp, Homo sapiens
acctttattttggcc

SEQ ID NO: 60102 - DNA, 15 bp, Homo sapiens
cacctttattttggc

SEQ ID NO: 60103 - DNA, 15 bp, Homo sapiens
acacctttattttgg

SEQ ID NO: 60104 - DNA, 15 bp, Homo sapiens
aacacctttattttg

SEQ ID NO: 60105 - DNA, 15 bp, Homo sapiens
gaacacctttatttt

SEQ ID NO: 60106 - DNA, 15 bp, Homo sapiens
cgaacacctttattt

SEQ ID NO: 60107 - DNA, 15 bp, Homo sapiens
gcgaacacctttatt

SEQ ID NO: 60108 - DNA, 15 bp, Homo sapiens
tgcgaacacctttat

SEQ ID NO: 60109 - DNA, 15 bp, Homo sapiens
ctgcgaacaccttta

SEQ ID NO: 60110 - DNA, 15 bp, Homo sapiens
cctgcgaacaccttt

SEQ ID NO: 60111 - DNA, 15 bp, Homo sapiens
ccctgcgaacacctt

SEQ ID NO: 60112 - DNA, 15 bp, Homo sapiens
gccctgcgaacacct

SEQ ID NO: 60113 - DNA, 15 bp, Homo sapiens
cgccctgcgaacacc

SEQ ID NO: 60114 - DNA, 15 bp, Homo sapiens
acgccctgcgaacac

SEQ ID NO: 60115 - DNA, 15 bp, Homo sapiens
cacgccctgcgaaca

SEQ ID NO: 60116 - DNA, 15 bp, Homo sapiens
acacgccctgcgaac

SEQ ID NO: 60117 - DNA, 15 bp, Homo sapiens
aacacgccctgcgaa

SEQ ID NO: 60118 - DNA, 15 bp, Homo sapiens
gaacacgccctgcga

SEQ ID NO: 60119 - DNA, 15 bp, Homo sapiens
ggaacacgccctgcg

SEQ ID NO: 60120 - DNA, 15 bp, Homo sapiens
gggaacacgccctgc

SEQ ID NO: 60121 - DNA, 15 bp, Homo sapiens
agggaacacgccctg

SEQ ID NO: 60122 - DNA, 15 bp, Homo sapiens
aagggaacacgccct

SEQ ID NO: 60123 - DNA, 15 bp, Homo sapiens
gaagggaacacgccc

SEQ ID NO: 60124 - DNA, 15 bp, Homo sapiens
agaagggaacacgcc

SEQ ID NO: 60125 - DNA, 15 bp, Homo sapiens
tagaagggaacacgc

SEQ ID NO: 60126 - DNA, 15 bp, Homo sapiens
ctagaagggaacacg

SEQ ID NO: 60127 - DNA, 15 bp, Homo sapiens
tctagaagggaacac

SEQ ID NO: 60128 - DNA, 15 bp, Homo sapiens
ctctagaagggaaca

SEQ ID NO: 60129 - DNA, 15 bp, Homo sapiens
cctctagaagggaac

SEQ ID NO: 60130 - DNA, 15 bp, Homo sapiens
gcctctagaagggaa

SEQ ID NO: 60131 - DNA, 15 bp, Homo sapiens
agcctctagaaggga

SEQ ID NO: 60132 - DNA, 15 bp, Homo sapiens
gagcctctagaaggg

SEQ ID NO: 60133 - DNA, 15 bp, Homo sapiens
agagcctctagaagg

SEQ ID NO: 60134 - DNA, 15 bp, Homo sapiens
cagagcctctagaag

SEQ ID NO: 60135 - DNA, 15 bp, Homo sapiens
ccagagcctctagaa

SEQ ID NO: 60136 - DNA, 15 bp, Homo sapiens
cccagagcctctaga

SEQ ID NO: 60137 - DNA, 15 bp, Homo sapiens
acccagagcctctag

SEQ ID NO: 60138 - DNA, 15 bp, Homo sapiens
gacccagagcctcta

SEQ ID NO: 60139 - DNA, 15 bp, Homo sapiens
ggacccagagcctct

SEQ ID NO: 60140 - DNA, 15 bp, Homo sapiens
aggacccagagcctc

SEQ ID NO: 60141 - DNA, 15 bp, Homo sapiens
aaggacccagagcct

SEQ ID NO: 60142 - DNA, 15 bp, Homo sapiens
caaggacccagagcc

SEQ ID NO: 60143 - DNA, 15 bp, Homo sapiens
gcaaggacccagagc

SEQ ID NO: 60144 - DNA, 15 bp, Homo sapiens
tgcaaggacccagag

SEQ ID NO: 60145 - DNA, 15 bp, Homo sapiens
ctgcaaggacccaga

SEQ ID NO: 60146 - DNA, 15 bp, Homo sapiens
actgcaaggacccag

SEQ ID NO: 60147 - DNA, 15 bp, Homo sapiens
aactgcaaggaccca

SEQ ID NO: 60148 - DNA, 15 bp, Homo sapiens
gaactgcaaggaccc

SEQ ID NO: 60149 - DNA, 15 bp, Homo sapiens
agaactgcaaggacc

SEQ ID NO: 60150 - DNA, 15 bp, Homo sapiens
tagaactgcaaggac

SEQ ID NO: 60151 - DNA, 15 bp, Homo sapiens
ctagaactgcaagga

SEQ ID NO: 60152 - DNA, 15 bp, Homo sapiens
cctagaactgcaagg

SEQ ID NO: 60153 - DNA, 15 bp, Homo sapiens
tcctagaactgcaag

SEQ ID NO: 60154 - DNA, 15 bp, Homo sapiens
gtcctagaactgcaa

SEQ ID NO: 60155 - DNA, 15 bp, Homo sapiens
agtcctagaactgca

SEQ ID NO: 60156 - DNA, 15 bp, Homo sapiens
tagtcctagaactgc

SEQ ID NO: 60157 - DNA, 15 bp, Homo sapiens
ttagtcctagaactg

SEQ ID NO: 60158 - DNA, 15 bp, Homo sapiens
cttagtcctagaact

SEQ ID NO: 60159 - DNA, 15 bp, Homo sapiens
tcttagtcctagaac

SEQ ID NO: 60160 - DNA, 15 bp, Homo sapiens
atcttagtcctagaa

SEQ ID NO: 60161 - DNA, 15 bp, Homo sapiens
gatcttagtcctaga

SEQ ID NO: 60162 - DNA, 15 bp, Homo sapiens
ggatcttagtcctag

SEQ ID NO: 60163 - DNA, 15 bp, Homo sapiens
gggatcttagtccta

SEQ ID NO: 60164 - DNA, 15 bp, Homo sapiens
agggatcttagtcct

SEQ ID NO: 60165 - DNA, 15 bp, Homo sapiens
cagggatcttagtcc

SEQ ID NO: 60166 - DNA, 15 bp, Homo sapiens
acagggatcttagtc

SEQ ID NO: 60167 - DNA, 15 bp, Homo sapiens
aacagggatcttagt

SEQ ID NO: 60168 - DNA, 15 bp, Homo sapiens
aaacagggatcttag

SEQ ID NO: 60169 - DNA, 15 bp, Homo sapiens
gaaacagggatctta

SEQ ID NO: 60170 - DNA, 15 bp, Homo sapiens
ggaaacagggatctt

SEQ ID NO: 60171 - DNA, 15 bp, Homo sapiens
gggaaacagggatct

SEQ ID NO: 60172 - DNA, 15 bp, Homo sapiens
tgggaaacagggatc

SEQ ID NO: 60173 - DNA, 15 bp, Homo sapiens
gtgggaaacagggat

SEQ ID NO: 60174 - DNA, 15 bp, Homo sapiens
agtgggaaacaggga

SEQ ID NO: 60175 - DNA, 15 bp, Homo sapiens
cagtgggaaacaggg

SEQ ID NO: 60176 - DNA, 15 bp, Homo sapiens
ccagtgggaaacagg

SEQ ID NO: 60177 - DNA, 15 bp, Homo sapiens
gccagtgggaaacag

SEQ ID NO: 60178 - DNA, 15 bp, Homo sapiens
agccagtgggaaaca

SEQ ID NO: 60179 - DNA, 15 bp, Homo sapiens
cagccagtgggaaac

SEQ ID NO: 60180 - DNA, 15 bp, Homo sapiens
acagccagtgggaaa

SEQ ID NO: 60181 - DNA, 15 bp, Homo sapiens
aacagccagtgggaa

SEQ ID NO: 60182 - DNA, 15 bp, Homo sapiens
caacagccagtggga

SEQ ID NO: 60183 - DNA, 15 bp, Homo sapiens
ccaacagccagtggg

SEQ ID NO: 60184 - DNA, 15 bp, Homo sapiens
gccaacagccagtgg

SEQ ID NO: 60185 - DNA, 15 bp, Homo sapiens
agccaacagccagtg

SEQ ID NO: 60186 - DNA, 15 bp, Homo sapiens
cagccaacagccagt

SEQ ID NO: 60187 - DNA, 15 bp, Homo sapiens
ccagccaacagccag

SEQ ID NO: 60188 - DNA, 15 bp, Homo sapiens
cccagccaacagcca

SEQ ID NO: 60189 - DNA, 15 bp, Homo sapiens
gcccagccaacagcc

SEQ ID NO: 60190 - DNA, 15 bp, Homo sapiens
tgcccagccaacagc

SEQ ID NO: 60191 - DNA, 15 bp, Homo sapiens
atgcccagccaacag

SEQ ID NO: 60192 - DNA, 15 bp, Homo sapiens
gatgcccagccaaca

SEQ ID NO: 60193 - DNA, 15 bp, Homo sapiens
tgatgcccagccaac

SEQ ID NO: 60194 - DNA, 15 bp, Homo sapiens
atgatgcccagccaa

SEQ ID NO: 60195 - DNA, 15 bp, Homo sapiens
aatgatgcccagcca

SEQ ID NO: 60196 - DNA, 15 bp, Homo sapiens
gaatgatgcccagcc

SEQ ID NO: 60197 - DNA, 15 bp, Homo sapiens
agaatgatgcccagc

SEQ ID NO: 60198 - DNA, 15 bp, Homo sapiens
gagaatgatgcccag

SEQ ID NO: 60199 - DNA, 15 bp, Homo sapiens
tgagaatgatgccca

SEQ ID NO: 60200 - DNA, 15 bp, Homo sapiens
ctgagaatgatgccc

SEQ ID NO: 60201 - DNA, 15 bp, Homo sapiens
gctgagaatgatgcc

SEQ ID NO: 60202 - DNA, 15 bp, Homo sapiens
agctgagaatgatgc

SEQ ID NO: 60203 - DNA, 15 bp, Homo sapiens
aagctgagaatgatg

SEQ ID NO: 60204 - DNA, 15 bp, Homo sapiens
gaagctgagaatgat

SEQ ID NO: 60205 - DNA, 15 bp, Homo sapiens
agaagctgagaatga

SEQ ID NO: 60206 - DNA, 15 bp, Homo sapiens
aagaagctgagaatg

SEQ ID NO: 60207 - DNA, 15 bp, Homo sapiens
caagaagctgagaat

SEQ ID NO: 60208 - DNA, 15 bp, Homo sapiens
tcaagaagctgagaa

SEQ ID NO: 60209 - DNA, 15 bp, Homo sapiens
ctcaagaagctgaga

SEQ ID NO: 60210 - DNA, 15 bp, Homo sapiens
cctcaagaagctgag

SEQ ID NO: 60211 - DNA, 15 bp, Homo sapiens
gcctcaagaagctga

SEQ ID NO: 60212 - DNA, 15 bp, Homo sapiens
agcctcaagaagctg

SEQ ID NO: 60213 - DNA, 15 bp, Homo sapiens
gagcctcaagaagct

SEQ ID NO: 60214 - DNA, 15 bp, Homo sapiens
ggagcctcaagaagc

SEQ ID NO: 60215 - DNA, 15 bp, Homo sapiens
gggagcctcaagaag

SEQ ID NO: 60216 - DNA, 15 bp, Homo sapiens
ggggagcctcaagaa

SEQ ID NO: 60217 - DNA, 15 bp, Homo sapiens
tggggagcctcaaga

SEQ ID NO: 60218 - DNA, 15 bp, Homo sapiens
gtggggagcctcaag

SEQ ID NO: 60219 - DNA, 15 bp, Homo sapiens
tgtggggagcctcaa

SEQ ID NO: 60220 - DNA, 15 bp, Homo sapiens
atgtggggagcctca

SEQ ID NO: 60221 - DNA, 15 bp, Homo sapiens
aatgtggggagcctc

SEQ ID NO: 60222 - DNA, 15 bp, Homo sapiens
gaatgtggggagcct

SEQ ID NO: 60223 - DNA, 15 bp, Homo sapiens
ggaatgtggggagcc

SEQ ID NO: 60224 - DNA, 15 bp, Homo sapiens
aggaatgtggggagc

SEQ ID NO: 60225 - DNA, 15 bp, Homo sapiens
taggaatgtggggag

SEQ ID NO: 60226 - DNA, 15 bp, Homo sapiens
ctaggaatgtgggga

SEQ ID NO: 60227 - DNA, 15 bp, Homo sapiens
cctaggaatgtgggg

SEQ ID NO: 60228 - DNA, 15 bp, Homo sapiens
gcctaggaatgtggg

SEQ ID NO: 60229 - DNA, 15 bp, Homo sapiens
agcctaggaatgtgg

SEQ ID NO: 60230 - DNA, 15 bp, Homo sapiens
gagcctaggaatgtg

SEQ ID NO: 60231 - DNA, 15 bp, Homo sapiens
ggagcctaggaatgt

SEQ ID NO: 60232 - DNA, 15 bp, Homo sapiens
aggagcctaggaatg

SEQ ID NO: 60233 - DNA, 15 bp, Homo sapiens
caggagcctaggaat

SEQ ID NO: 60234 - DNA, 15 bp, Homo sapiens
ccaggagcctaggaa

SEQ ID NO: 60235 - DNA, 15 bp, Homo sapiens
gccaggagcctagga

SEQ ID NO: 60236 - DNA, 15 bp, Homo sapiens
ggccaggagcctagg

SEQ ID NO: 60237 - DNA, 15 bp, Homo sapiens
aggccaggagcctag

SEQ ID NO: 60238 - DNA, 15 bp, Homo sapiens
caggccaggagccta

SEQ ID NO: 60239 - DNA, 15 bp, Homo sapiens
acaggccaggagcct

SEQ ID NO: 60240 - DNA, 15 bp, Homo sapiens
gacaggccaggagcc

SEQ ID NO: 60241 - DNA, 15 bp, Homo sapiens
agacaggccaggagc

SEQ ID NO: 60242 - DNA, 15 bp, Homo sapiens
cagacaggccaggag

SEQ ID NO: 60243 - DNA, 15 bp, Homo sapiens
gcagacaggccagga

SEQ ID NO: 60244 - DNA, 15 bp, Homo sapiens
ggcagacaggccagg

SEQ ID NO: 60245 - DNA, 15 bp, Homo sapiens
aggcagacaggccag

SEQ ID NO: 60246 - DNA, 15 bp, Homo sapiens
gaggcagacaggcca

SEQ ID NO: 60247 - DNA, 15 bp, Homo sapiens
ggaggcagacaggcc

SEQ ID NO: 60248 - DNA, 15 bp, Homo sapiens
tggaggcagacaggc

SEQ ID NO: 60249 - DNA, 15 bp, Homo sapiens
atggaggcagacagg

SEQ ID NO: 60250 - DNA, 15 bp, Homo sapiens
gatggaggcagacag

SEQ ID NO: 60251 - DNA, 15 bp, Homo sapiens
agatggaggcagaca

SEQ ID NO: 60252 - DNA, 15 bp, Homo sapiens
aagatggaggcagac

SEQ ID NO: 60253 - DNA, 15 bp, Homo sapiens
gaagatggaggcaga

SEQ ID NO: 60254 - DNA, 15 bp, Homo sapiens
tgaagatggaggcag

SEQ ID NO: 60255 - DNA, 15 bp, Homo sapiens
ttgaagatggaggca

SEQ ID NO: 60256 - DNA, 15 bp, Homo sapiens
tttgaagatggaggc

SEQ ID NO: 60257 - DNA, 15 bp, Homo sapiens
ttttgaagatggagg

SEQ ID NO: 60258 - DNA, 15 bp, Homo sapiens
gttttgaagatggag

SEQ ID NO: 60259 - DNA, 15 bp, Homo sapiens
ggttttgaagatgga

SEQ ID NO: 60260 - DNA, 15 bp, Homo sapiens
tggttttgaagatgg

SEQ ID NO: 60261 - DNA, 15 bp, Homo sapiens
ctggttttgaagatg

SEQ ID NO: 60262 - DNA, 15 bp, Homo sapiens
gctggttttgaagat

SEQ ID NO: 60263 - DNA, 15 bp, Homo sapiens
tgctggttttgaaga

SEQ ID NO: 60264 - DNA, 15 bp, Homo sapiens
ttgctggttttgaag

SEQ ID NO: 60265 - DNA, 15 bp, Homo sapiens
attgctggttttgaa

SEQ ID NO: 60266 - DNA, 15 bp, Homo sapiens
cattgctggttttga

SEQ ID NO: 60267 - DNA, 15 bp, Homo sapiens
ccattgctggttttg

SEQ ID NO: 60268 - DNA, 15 bp, Homo sapiens
cccattgctggtttt

SEQ ID NO: 60269 - DNA, 15 bp, Homo sapiens
acccattgctggttt

SEQ ID NO: 60270 - DNA, 15 bp, Homo sapiens
cacccattgctggtt

SEQ ID NO: 60271 - DNA, 15 bp, Homo sapiens
ccacccattgctggt

SEQ ID NO: 60272 - DNA, 15 bp, Homo sapiens
accacccattgctgg

SEQ ID NO: 60273 - DNA, 15 bp, Homo sapiens
gaccacccattgctg

SEQ ID NO: 60274 - DNA, 15 bp, Homo sapiens
tgaccacccattgct

SEQ ID NO: 60275 - DNA, 15 bp, Homo sapiens
ttgaccacccattgc

SEQ ID NO: 60276 - DNA, 15 bp, Homo sapiens
cttgaccacccattg

SEQ ID NO: 60277 - DNA, 15 bp, Homo sapiens
acttgaccacccatt

SEQ ID NO: 60278 - DNA, 15 bp, Homo sapiens
aacttgaccacccat

SEQ ID NO: 60279 - DNA, 15 bp, Homo sapiens
aaacttgaccaccca

SEQ ID NO: 60280 - DNA, 15 bp, Homo sapiens
aaaacttgaccaccc

SEQ ID NO: 60281 - DNA, 15 bp, Homo sapiens
aaaaacttgaccacc

SEQ ID NO: 60282 - DNA, 15 bp, Homo sapiens
gaaaaacttgaccac

SEQ ID NO: 60283 - DNA, 15 bp, Homo sapiens
agaaaaacttgacca

SEQ ID NO: 60284 - DNA, 15 bp, Homo sapiens
gagaaaaacttgacc

SEQ ID NO: 60285 - DNA, 15 bp, Homo sapiens
tgagaaaaacttgac

SEQ ID NO: 60286 - DNA, 15 bp, Homo sapiens
gtgagaaaaacttga

SEQ ID NO: 60287 - DNA, 15 bp, Homo sapiens
tgtgagaaaaacttg

SEQ ID NO: 60288 - DNA, 15 bp, Homo sapiens
gtgtgagaaaaactt

SEQ ID NO: 60289 - DNA, 15 bp, Homo sapiens
agtgtgagaaaaact

SEQ ID NO: 60290 - DNA, 15 bp, Homo sapiens
cagtgtgagaaaaac

SEQ ID NO: 60291 - DNA, 15 bp, Homo sapiens
tcagtgtgagaaaaa

SEQ ID NO: 60292 - DNA, 15 bp, Homo sapiens
ttcagtgtgagaaaa

SEQ ID NO: 60293 - DNA, 15 bp, Homo sapiens
attcagtgtgagaaa

SEQ ID NO: 60294 - DNA, 15 bp, Homo sapiens
gattcagtgtgagaa

SEQ ID NO: 60295 - DNA, 15 bp, Homo sapiens
agattcagtgtgaga

SEQ ID NO: 60296 - DNA, 15 bp, Homo sapiens
aagattcagtgtgag

SEQ ID NO: 60297 - DNA, 15 bp, Homo sapiens
caagattcagtgtga

SEQ ID NO: 60298 - DNA, 15 bp, Homo sapiens
gcaagattcagtgtg

SEQ ID NO: 60299 - DNA, 15 bp, Homo sapiens
agcaagattcagtgt

SEQ ID NO: 60300 - DNA, 15 bp, Homo sapiens
cagcaagattcagtg

SEQ ID NO: 60301 - DNA, 15 bp, Homo sapiens
tcagcaagattcagt

SEQ ID NO: 60302 - DNA, 15 bp, Homo sapiens
gtcagcaagattcag

SEQ ID NO: 60303 - DNA, 15 bp, Homo sapiens
agtcagcaagattca

SEQ ID NO: 60304 - DNA, 15 bp, Homo sapiens
tagtcagcaagattc

SEQ ID NO: 60305 - DNA, 15 bp, Homo sapiens
gtagtcagcaagatt

SEQ ID NO: 60306 - DNA, 15 bp, Homo sapiens
agtagtcagcaagat

SEQ ID NO: 60307 - DNA, 15 bp, Homo sapiens
cagtagtcagcaaga

SEQ ID NO: 60308 - DNA, 15 bp, Homo sapiens
acagtagtcagcaag

SEQ ID NO: 60309 - DNA, 15 bp, Homo sapiens
tacagtagtcagcaa

SEQ ID NO: 60310 - DNA, 15 bp, Homo sapiens
atacagtagtcagca

SEQ ID NO: 60311 - DNA, 15 bp, Homo sapiens
gatacagtagtcagc

SEQ ID NO: 60312 - DNA, 15 bp, Homo sapiens
agatacagtagtcag

SEQ ID NO: 60313 - DNA, 15 bp, Homo sapiens
aagatacagtagtca

SEQ ID NO: 60314 - DNA, 15 bp, Homo sapiens
aaagatacagtagtc

SEQ ID NO: 60315 - DNA, 15 bp, Homo sapiens
gaaagatacagtagt

SEQ ID NO: 60316 - DNA, 15 bp, Homo sapiens
agaaagatacagtag

SEQ ID NO: 60317 - DNA, 15 bp, Homo sapiens
tagaaagatacagta

SEQ ID NO: 60318 - DNA, 15 bp, Homo sapiens
ttagaaagatacagt

SEQ ID NO: 60319 - DNA, 15 bp, Homo sapiens
gttagaaagatacag

SEQ ID NO: 60320 - DNA, 15 bp, Homo sapiens
agttagaaagataca

SEQ ID NO: 60321 - DNA, 15 bp, Homo sapiens
gagttagaaagatac

SEQ ID NO: 60322 - DNA, 15 bp, Homo sapiens
ggagttagaaagata

SEQ ID NO: 60323 - DNA, 15 bp, Homo sapiens
aggagttagaaagat

SEQ ID NO: 60324 - DNA, 15 bp, Homo sapiens
caggagttagaaaga

SEQ ID NO: 60325 - DNA, 15 bp, Homo sapiens
gcaggagttagaaag

SEQ ID NO: 60326 - DNA, 15 bp, Homo sapiens
ggcaggagttagaaa

SEQ ID NO: 60327 - DNA, 15 bp, Homo sapiens
tggcaggagttagaa

SEQ ID NO: 60328 - DNA, 15 bp, Homo sapiens
ctggcaggagttaga

SEQ ID NO: 60329 - DNA, 15 bp, Homo sapiens
tctggcaggagttag

SEQ ID NO: 60330 - DNA, 15 bp, Homo sapiens
ctctggcaggagtta

SEQ ID NO: 60331 - DNA, 15 bp, Homo sapiens
tctctggcaggagtt

SEQ ID NO: 60332 - DNA, 15 bp, Homo sapiens
gtctctggcaggagt

SEQ ID NO: 60333 - DNA, 15 bp, Homo sapiens
tgtctctggcaggag

SEQ ID NO: 60334 - DNA, 15 bp, Homo sapiens
atgtctctggcagga

SEQ ID NO: 60335 - DNA, 15 bp, Homo sapiens
aatgtctctggcagg

SEQ ID NO: 60336 - DNA, 15 bp, Homo sapiens
aaatgtctctggcag

SEQ ID NO: 60337 - DNA, 15 bp, Homo sapiens
gaaatgtctctggca

SEQ ID NO: 60338 - DNA, 15 bp, Homo sapiens
agaaatgtctctggc

SEQ ID NO: 60339 - DNA, 15 bp, Homo sapiens
gagaaatgtctctgg

SEQ ID NO: 60340 - DNA, 15 bp, Homo sapiens
agagaaatgtctctg

SEQ ID NO: 60341 - DNA, 15 bp, Homo sapiens
cagagaaatgtctct

SEQ ID NO: 60342 - DNA, 15 bp, Homo sapiens
acagagaaatgtctc

SEQ ID NO: 60343 - DNA, 15 bp, Homo sapiens
aacagagaaatgtct

SEQ ID NO: 60344 - DNA, 15 bp, Homo sapiens
aaacagagaaatgtc

SEQ ID NO: 60345 - DNA, 15 bp, Homo sapiens
gaaacagagaaatgt

SEQ ID NO: 60346 - DNA, 15 bp, Homo sapiens
agaaacagagaaatg

SEQ ID NO: 60347 - DNA, 15 bp, Homo sapiens
tagaaacagagaaat

SEQ ID NO: 60348 - DNA, 15 bp, Homo sapiens
ttagaaacagagaaa

SEQ ID NO: 60349 - DNA, 15 bp, Homo sapiens
cttagaaacagagaa

SEQ ID NO: 60350 - DNA, 15 bp, Homo sapiens
ccttagaaacagaga

SEQ ID NO: 60351 - DNA, 15 bp, Homo sapiens
cccttagaaacagag

SEQ ID NO: 60352 - DNA, 15 bp, Homo sapiens
gcccttagaaacaga

SEQ ID NO: 60353 - DNA, 15 bp, Homo sapiens
agcccttagaaacag

SEQ ID NO: 60354 - DNA, 15 bp, Homo sapiens
gagcccttagaaaca

SEQ ID NO: 60355 - DNA, 15 bp, Homo sapiens
tgagcccttagaaac

SEQ ID NO: 60356 - DNA, 15 bp, Homo sapiens
ttgagcccttagaaa

SEQ ID NO: 60357 - DNA, 15 bp, Homo sapiens
cttgagcccttagaa

SEQ ID NO: 60358 - DNA, 15 bp, Homo sapiens
acttgagcccttaga

SEQ ID NO: 60359 - DNA, 15 bp, Homo sapiens
cacttgagcccttag

SEQ ID NO: 60360 - DNA, 15 bp, Homo sapiens
tcacttgagccctta

SEQ ID NO: 60361 - DNA, 15 bp, Homo sapiens
atcacttgagccctt

SEQ ID NO: 60362 - DNA, 15 bp, Homo sapiens
aatcacttgagccct

SEQ ID NO: 60363 - DNA, 15 bp, Homo sapiens
taatcacttgagccc

SEQ ID NO: 60364 - DNA, 15 bp, Homo sapiens
ctaatcacttgagcc

SEQ ID NO: 60365 - DNA, 15 bp, Homo sapiens
tctaatcacttgagc

SEQ ID NO: 60366 - DNA, 15 bp, Homo sapiens
atctaatcacttgag

SEQ ID NO: 60367 - DNA, 15 bp, Homo sapiens
aatctaatcacttga

SEQ ID NO: 60368 - DNA, 15 bp, Homo sapiens
caatctaatcacttg

SEQ ID NO: 60369 - DNA, 15 bp, Homo sapiens
gcaatctaatcactt

SEQ ID NO: 60370 - DNA, 15 bp, Homo sapiens
tgcaatctaatcact

SEQ ID NO: 60371 - DNA, 15 bp, Homo sapiens
gtgcaatctaatcac

SEQ ID NO: 60372 - DNA, 15 bp, Homo sapiens
ggtgcaatctaatca

SEQ ID NO: 60373 - DNA, 15 bp, Homo sapiens
gggtgcaatctaatc

SEQ ID NO: 60374 - DNA, 15 bp, Homo sapiens
tgggtgcaatctaat

SEQ ID NO: 60375 - DNA, 15 bp, Homo sapiens
gtgggtgcaatctaa

SEQ ID NO: 60376 - DNA, 15 bp, Homo sapiens
agtgggtgcaatcta

SEQ ID NO: 60377 - DNA, 15 bp, Homo sapiens
aagtgggtgcaatct

SEQ ID NO: 60378 - DNA, 15 bp, Homo sapiens
caagtgggtgcaatc

SEQ ID NO: 60379 - DNA, 15 bp, Homo sapiens
ccaagtgggtgcaat

SEQ ID NO: 60380 - DNA, 15 bp, Homo sapiens
accaagtgggtgcaa

SEQ ID NO: 60381 - DNA, 15 bp, Homo sapiens
taccaagtgggtgca

SEQ ID NO: 60382 - DNA, 15 bp, Homo sapiens
ttaccaagtgggtgc

SEQ ID NO: 60383 - DNA, 15 bp, Homo sapiens
attaccaagtgggtg

SEQ ID NO: 60384 - DNA, 15 bp, Homo sapiens
gattaccaagtgggt

SEQ ID NO: 60385 - DNA, 15 bp, Homo sapiens
ggattaccaagtggg

SEQ ID NO: 60386 - DNA, 15 bp, Homo sapiens
tggattaccaagtgg

SEQ ID NO: 60387 - DNA, 15 bp, Homo sapiens
ttggattaccaagtg

SEQ ID NO: 60388 - DNA, 15 bp, Homo sapiens
tttggattaccaagt

SEQ ID NO: 60389 - DNA, 15 bp, Homo sapiens
ctttggattaccaag

SEQ ID NO: 60390 - DNA, 15 bp, Homo sapiens
actttggattaccaa

SEQ ID NO: 60391 - DNA, 15 bp, Homo sapiens
cactttggattacca

SEQ ID NO: 60392 - DNA, 15 bp, Homo sapiens
tcactttggattacc

SEQ ID NO: 60393 - DNA, 15 bp, Homo sapiens
atcactttggattac

SEQ ID NO: 60394 - DNA, 15 bp, Homo sapiens
gatcactttggatta

SEQ ID NO: 60395 - DNA, 15 bp, Homo sapiens
agatcactttggatt

SEQ ID NO: 60396 - DNA, 15 bp, Homo sapiens
aagatcactttggat

SEQ ID NO: 60397 - DNA, 15 bp, Homo sapiens
gaagatcactttgga

SEQ ID NO: 60398 - DNA, 15 bp, Homo sapiens
tgaagatcactttgg

SEQ ID NO: 60399 - DNA, 15 bp, Homo sapiens
atgaagatcactttg

SEQ ID NO: 60400 - DNA, 15 bp, Homo sapiens
tatgaagatcacttt

SEQ ID NO: 60401 - DNA, 15 bp, Homo sapiens
atatgaagatcactt

SEQ ID NO: 60402 - DNA, 15 bp, Homo sapiens
gatatgaagatcact

SEQ ID NO: 60403 - DNA, 15 bp, Homo sapiens
agatatgaagatcac

SEQ ID NO: 60404 - DNA, 15 bp, Homo sapiens
aagatatgaagatca

SEQ ID NO: 60405 - DNA, 15 bp, Homo sapiens
taagatatgaagatc

SEQ ID NO: 60406 - DNA, 15 bp, Homo sapiens
ttaagatatgaagat

SEQ ID NO: 60407 - DNA, 15 bp, Homo sapiens
cttaagatatgaaga

SEQ ID NO: 60408 - DNA, 15 bp, Homo sapiens
ccttaagatatgaag

SEQ ID NO: 60409 - DNA, 15 bp, Homo sapiens
gccttaagatatgaa

SEQ ID NO: 60410 - DNA, 15 bp, Homo sapiens
ggccttaagatatga

SEQ ID NO: 60411 - DNA, 15 bp, Homo sapiens
gggccttaagatatg

SEQ ID NO: 60412 - DNA, 15 bp, Homo sapiens
tgggccttaagatat

SEQ ID NO: 60413 - DNA, 15 bp, Homo sapiens
atgggccttaagata

SEQ ID NO: 60414 - DNA, 15 bp, Homo sapiens
tatgggccttaagat

SEQ ID NO: 60415 - DNA, 15 bp, Homo sapiens
ctatgggccttaaga

SEQ ID NO: 60416 - DNA, 15 bp, Homo sapiens
gctatgggccttaag

SEQ ID NO: 60417 - DNA, 15 bp, Homo sapiens
ggctatgggccttaa

SEQ ID NO: 60418 - DNA, 15 bp, Homo sapiens
aggctatgggcctta

SEQ ID NO: 60419 - DNA, 15 bp, Homo sapiens
aaggctatgggcctt

SEQ ID NO: 60420 - DNA, 15 bp, Homo sapiens
taaggctatgggcct

SEQ ID NO: 60421 - DNA, 15 bp, Homo sapiens
ttaaggctatgggcc

SEQ ID NO: 60422 - DNA, 15 bp, Homo sapiens
attaaggctatgggc

SEQ ID NO: 60423 - DNA, 15 bp, Homo sapiens
aattaaggctatggg

SEQ ID NO: 60424 - DNA, 15 bp, Homo sapiens
taattaaggctatgg

SEQ ID NO: 60425 - DNA, 15 bp, Homo sapiens
ataattaaggctatg

SEQ ID NO: 60426 - DNA, 15 bp, Homo sapiens
tataattaaggctat

SEQ ID NO: 60427 - DNA, 15 bp, Homo sapiens
ctataattaaggcta

SEQ ID NO: 60428 - DNA, 15 bp, Homo sapiens
gctataattaaggct

SEQ ID NO: 60429 - DNA, 15 bp, Homo sapiens
agctataattaaggc

SEQ ID NO: 60430 - DNA, 15 bp, Homo sapiens
cagctataattaagg

SEQ ID NO: 60431 - DNA, 15 bp, Homo sapiens
gcagctataattaag

SEQ ID NO: 60432 - DNA, 15 bp, Homo sapiens
tgcagctataattaa

SEQ ID NO: 60433 - DNA, 15 bp, Homo sapiens
ttgcagctataatta

SEQ ID NO: 60434 - DNA, 15 bp, Homo sapiens
tttgcagctataatt

SEQ ID NO: 60435 - DNA, 15 bp, Homo sapiens
ctttgcagctataat

SEQ ID NO: 60436 - DNA, 15 bp, Homo sapiens
actttgcagctataa

SEQ ID NO: 60437 - DNA, 15 bp, Homo sapiens
gactttgcagctata

SEQ ID NO: 60438 - DNA, 15 bp, Homo sapiens
ggactttgcagctat

SEQ ID NO: 60439 - DNA, 15 bp, Homo sapiens
gggactttgcagcta

SEQ ID NO: 60440 - DNA, 15 bp, Homo sapiens
agggactttgcagct

SEQ ID NO: 60441 - DNA, 15 bp, Homo sapiens
aagggactttgcagc

SEQ ID NO: 60442 - DNA, 15 bp, Homo sapiens
gaagggactttgcag

SEQ ID NO: 60443 - DNA, 15 bp, Homo sapiens
cgaagggactttgca

SEQ ID NO: 60444 - DNA, 15 bp, Homo sapiens
gcgaagggactttgc

SEQ ID NO: 60445 - DNA, 15 bp, Homo sapiens
tgcgaagggactttg

SEQ ID NO: 60446 - DNA, 15 bp, Homo sapiens
ctgcgaagggacttt

SEQ ID NO: 60447 - DNA, 15 bp, Homo sapiens
gctgcgaagggactt

SEQ ID NO: 60448 - DNA, 15 bp, Homo sapiens
tgctgcgaagggact

SEQ ID NO: 60449 - DNA, 15 bp, Homo sapiens
ctgctgcgaagggac

SEQ ID NO: 60450 - DNA, 15 bp, Homo sapiens
actgctgcgaaggga

SEQ ID NO: 60451 - DNA, 15 bp, Homo sapiens
tactgctgcgaaggg

SEQ ID NO: 60452 - DNA, 15 bp, Homo sapiens
gtactgctgcgaagg

SEQ ID NO: 60453 - DNA, 15 bp, Homo sapiens
ggtactgctgcgaag

SEQ ID NO: 60454 - DNA, 15 bp, Homo sapiens
aggtactgctgcgaa

SEQ ID NO: 60455 - DNA, 15 bp, Homo sapiens
taggtactgctgcga

SEQ ID NO: 60456 - DNA, 15 bp, Homo sapiens
ctaggtactgctgcg

SEQ ID NO: 60457 - DNA, 15 bp, Homo sapiens
tctaggtactgctgc

SEQ ID NO: 60458 - DNA, 15 bp, Homo sapiens
atctaggtactgctg

SEQ ID NO: 60459 - DNA, 15 bp, Homo sapiens
aatctaggtactgct

SEQ ID NO: 60460 - DNA, 15 bp, Homo sapiens
taatctaggtactgc

SEQ ID NO: 60461 - DNA, 15 bp, Homo sapiens
gtaatctaggtactg

SEQ ID NO: 60462 - DNA, 15 bp, Homo sapiens
agtaatctaggtact

SEQ ID NO: 60463 - DNA, 15 bp, Homo sapiens
cagtaatctaggtac

SEQ ID NO: 60464 - DNA, 15 bp, Homo sapiens
acagtaatctaggta

SEQ ID NO: 60465 - DNA, 15 bp, Homo sapiens
aacagtaatctaggt

SEQ ID NO: 60466 - DNA, 15 bp, Homo sapiens
caacagtaatctagg

SEQ ID NO: 60467 - DNA, 15 bp, Homo sapiens
ccaacagtaatctag

SEQ ID NO: 60468 - DNA, 15 bp, Homo sapiens
tccaacagtaatcta

SEQ ID NO: 60469 - DNA, 15 bp, Homo sapiens
ttccaacagtaatct

SEQ ID NO: 60470 - DNA, 15 bp, Homo sapiens
attccaacagtaatc

SEQ ID NO: 60471 - DNA, 15 bp, Homo sapiens
cattccaacagtaat

SEQ ID NO: 60472 - DNA, 15 bp, Homo sapiens
tcattccaacagtaa

SEQ ID NO: 60473 - DNA, 15 bp, Homo sapiens
ttcattccaacagta

SEQ ID NO: 60474 - DNA, 15 bp, Homo sapiens
attcattccaacagt

SEQ ID NO: 60475 - DNA, 15 bp, Homo sapiens
tattcattccaacag

SEQ ID NO: 60476 - DNA, 15 bp, Homo sapiens
ttattcattccaaca

SEQ ID NO: 60477 - DNA, 15 bp, Homo sapiens
gttattcattccaac

SEQ ID NO: 60478 - DNA, 15 bp, Homo sapiens
ggttattcattccaa

SEQ ID NO: 60479 - DNA, 15 bp, Homo sapiens
tggttattcattcca

SEQ ID NO: 60480 - DNA, 15 bp, Homo sapiens
ctggttattcattcc

SEQ ID NO: 60481 - DNA, 15 bp, Homo sapiens
tctggttattcattc

SEQ ID NO: 60482 - DNA, 15 bp, Homo sapiens
ttctggttattcatt

SEQ ID NO: 60483 - DNA, 15 bp, Homo sapiens
cttctggttattcat

SEQ ID NO: 60484 - DNA, 15 bp, Homo sapiens
tcttctggttattca

SEQ ID NO: 60485 - DNA, 15 bp, Homo sapiens
gtcttctggttattc

SEQ ID NO: 60486 - DNA, 15 bp, Homo sapiens
tgtcttctggttatt

SEQ ID NO: 60487 - DNA, 15 bp, Homo sapiens
ctgtcttctggttat

SEQ ID NO: 60488 - DNA, 15 bp, Homo sapiens
gctgtcttctggtta

SEQ ID NO: 60489 - DNA, 15 bp, Homo sapiens
tgctgtcttctggtt

SEQ ID NO: 60490 - DNA, 15 bp, Homo sapiens
ttgctgtcttctggt

SEQ ID NO: 60491 - DNA, 15 bp, Homo sapiens
attgctgtcttctgg

SEQ ID NO: 60492 - DNA, 15 bp, Homo sapiens
gattgctgtcttctg

SEQ ID NO: 60493 - DNA, 15 bp, Homo sapiens
tgattgctgtcttct

SEQ ID NO: 60494 - DNA, 15 bp, Homo sapiens
ttgattgctgtcttc

SEQ ID NO: 60495 - DNA, 15 bp, Homo sapiens
cttgattgctgtctt

SEQ ID NO: 60496 - DNA, 15 bp, Homo sapiens
ccttgattgctgtct

SEQ ID NO: 60497 - DNA, 15 bp, Homo sapiens
cccttgattgctgtc

SEQ ID NO: 60498 - DNA, 15 bp, Homo sapiens
tcccttgattgctgt

SEQ ID NO: 60499 - DNA, 15 bp, Homo sapiens
ctcccttgattgctg

SEQ ID NO: 60500 - DNA, 15 bp, Homo sapiens
cctcccttgattgct

SEQ ID NO: 60501 - DNA, 15 bp, Homo sapiens
tcctcccttgattgc

SEQ ID NO: 60502 - DNA, 15 bp, Homo sapiens
gtcctcccttgattg

SEQ ID NO: 60503 - DNA, 15 bp, Homo sapiens
tgtcctcccttgatt

SEQ ID NO: 60504 - DNA, 15 bp, Homo sapiens
atgtcctcccttgat

SEQ ID NO: 60505 - DNA, 15 bp, Homo sapiens
gatgtcctcccttga

SEQ ID NO: 60506 - DNA, 15 bp, Homo sapiens
agatgtcctcccttg

SEQ ID NO: 60507 - DNA, 15 bp, Homo sapiens
aagatgtcctccctt

SEQ ID NO: 60508 - DNA, 15 bp, Homo sapiens
aaagatgtcctccct

SEQ ID NO: 60509 - DNA, 15 bp, Homo sapiens
taaagatgtcctccc

SEQ ID NO: 60510 - DNA, 15 bp, Homo sapiens
ctaaagatgtcctcc

SEQ ID NO: 60511 - DNA, 15 bp, Homo sapiens
tctaaagatgtcctc

SEQ ID NO: 60512 - DNA, 15 bp, Homo sapiens
ttctaaagatgtcct

SEQ ID NO: 60513 - DNA, 15 bp, Homo sapiens
attctaaagatgtcc

SEQ ID NO: 60514 - DNA, 15 bp, Homo sapiens
aattctaaagatgtc

SEQ ID NO: 60515 - DNA, 15 bp, Homo sapiens
gaattctaaagatgt

SEQ ID NO: 60516 - DNA, 15 bp, Homo sapiens
agaattctaaagatg

SEQ ID NO: 60517 - DNA, 15 bp, Homo sapiens
cagaattctaaagat

SEQ ID NO: 60518 - DNA, 15 bp, Homo sapiens
gcagaattctaaaga

SEQ ID NO: 60519 - DNA, 15 bp, Homo sapiens
ggcagaattctaaag

SEQ ID NO: 60520 - DNA, 15 bp, Homo sapiens
aggcagaattctaaa

SEQ ID NO: 60521 - DNA, 15 bp, Homo sapiens
taggcagaattctaa

SEQ ID NO: 60522 - DNA, 15 bp, Homo sapiens
gtaggcagaattcta

SEQ ID NO: 60523 - DNA, 15 bp, Homo sapiens
ggtaggcagaattct

SEQ ID NO: 60524 - DNA, 15 bp, Homo sapiens
tggtaggcagaattc

SEQ ID NO: 60525 - DNA, 15 bp, Homo sapiens
gtggtaggcagaatt

SEQ ID NO: 60526 - DNA, 15 bp, Homo sapiens
agtggtaggcagaat

SEQ ID NO: 60527 - DNA, 15 bp, Homo sapiens
aagtggtaggcagaa

SEQ ID NO: 60528 - DNA, 15 bp, Homo sapiens
caagtggtaggcaga

SEQ ID NO: 60529 - DNA, 15 bp, Homo sapiens
acaagtggtaggcag

SEQ ID NO: 60530 - DNA, 15 bp, Homo sapiens
tacaagtggtaggca

SEQ ID NO: 60531 - DNA, 15 bp, Homo sapiens
atacaagtggtaggc

SEQ ID NO: 60532 - DNA, 15 bp, Homo sapiens
aatacaagtggtagg

SEQ ID NO: 60533 - DNA, 15 bp, Homo sapiens
aaatacaagtggtag

SEQ ID NO: 60534 - DNA, 15 bp, Homo sapiens
taaatacaagtggta

SEQ ID NO: 60535 - DNA, 15 bp, Homo sapiens
ttaaatacaagtggt

SEQ ID NO: 60536 - DNA, 15 bp, Homo sapiens
gttaaatacaagtgg

SEQ ID NO: 60537 - DNA, 15 bp, Homo sapiens
tgttaaatacaagtg

SEQ ID NO: 60538 - DNA, 15 bp, Homo sapiens
atgttaaatacaagt

SEQ ID NO: 60539 - DNA, 15 bp, Homo sapiens
catgttaaatacaag

SEQ ID NO: 60540 - DNA, 15 bp, Homo sapiens
gcatgttaaatacaa

SEQ ID NO: 60541 - DNA, 15 bp, Homo sapiens
agcatgttaaataca

SEQ ID NO: 60542 - DNA, 15 bp, Homo sapiens
aagcatgttaaatac

SEQ ID NO: 60543 - DNA, 15 bp, Homo sapiens
taagcatgttaaata

SEQ ID NO: 60544 - DNA, 15 bp, Homo sapiens
ttaagcatgttaaat

SEQ ID NO: 60545 - DNA, 15 bp, Homo sapiens
attaagcatgttaaa

SEQ ID NO: 60546 - DNA, 15 bp, Homo sapiens
gattaagcatgttaa

SEQ ID NO: 60547 - DNA, 15 bp, Homo sapiens
ggattaagcatgtta

SEQ ID NO: 60548 - DNA, 15 bp, Homo sapiens
tggattaagcatgtt

SEQ ID NO: 60549 - DNA, 15 bp, Homo sapiens
gtggattaagcatgt

SEQ ID NO: 60550 - DNA, 15 bp, Homo sapiens
tgtggattaagcatg

SEQ ID NO: 60551 - DNA, 15 bp, Homo sapiens
ctgtggattaagcat

SEQ ID NO: 60552 - DNA, 15 bp, Homo sapiens
tctgtggattaagca

SEQ ID NO: 60553 - DNA, 15 bp, Homo sapiens
atctgtggattaagc

SEQ ID NO: 60554 - DNA, 15 bp, Homo sapiens
catctgtggattaag

SEQ ID NO: 60555 - DNA, 15 bp, Homo sapiens
tcatctgtggattaa

SEQ ID NO: 60556 - DNA, 15 bp, Homo sapiens
gtcatctgtggatta

SEQ ID NO: 60557 - DNA, 15 bp, Homo sapiens
tgtcatctgtggatt

SEQ ID NO: 60558 - DNA, 15 bp, Homo sapiens
gtgtcatctgtggat

SEQ ID NO: 60559 - DNA, 15 bp, Homo sapiens
agtgtcatctgtgga

SEQ ID NO: 60560 - DNA, 15 bp, Homo sapiens
gagtgtcatctgtgg

SEQ ID NO: 60561 - DNA, 15 bp, Homo sapiens
agagtgtcatctgtg

SEQ ID NO: 60562 - DNA, 15 bp, Homo sapiens
gagagtgtcatctgt

SEQ ID NO: 60563 - DNA, 15 bp, Homo sapiens
agagagtgtcatctg

SEQ ID NO: 60564 - DNA, 15 bp, Homo sapiens
tagagagtgtcatct

SEQ ID NO: 60565 - DNA, 15 bp, Homo sapiens
gtagagagtgtcatc

SEQ ID NO: 60566 - DNA, 15 bp, Homo sapiens
ggtagagagtgtcat

SEQ ID NO: 60567 - DNA, 15 bp, Homo sapiens
tggtagagagtgtca

SEQ ID NO: 60568 - DNA, 15 bp, Homo sapiens
atggtagagagtgtc

SEQ ID NO: 60569 - DNA, 15 bp, Homo sapiens
aatggtagagagtgt

SEQ ID NO: 60570 - DNA, 15 bp, Homo sapiens
taatggtagagagtg

SEQ ID NO: 60571 - DNA, 15 bp, Homo sapiens
ataatggtagagagt

SEQ ID NO: 60572 - DNA, 15 bp, Homo sapiens
aataatggtagagag

SEQ ID NO: 60573 - DNA, 15 bp, Homo sapiens
aaataatggtagaga

SEQ ID NO: 60574 - DNA, 15 bp, Homo sapiens
gaaataatggtagag

SEQ ID NO: 60575 - DNA, 15 bp, Homo sapiens
ggaaataatggtaga

SEQ ID NO: 60576 - DNA, 15 bp, Homo sapiens
aggaaataatggtag

SEQ ID NO: 60577 - DNA, 15 bp, Homo sapiens
caggaaataatggta

SEQ ID NO: 60578 - DNA, 15 bp, Homo sapiens
ccaggaaataatggt

SEQ ID NO: 60579 - DNA, 15 bp, Homo sapiens
accaggaaataatgg

SEQ ID NO: 60580 - DNA, 15 bp, Homo sapiens
gaccaggaaataatg

SEQ ID NO: 60581 - DNA, 15 bp, Homo sapiens
ggaccaggaaataat

SEQ ID NO: 60582 - DNA, 15 bp, Homo sapiens
aggaccaggaaataa

SEQ ID NO: 60583 - DNA, 15 bp, Homo sapiens
gaggaccaggaaata

SEQ ID NO: 60584 - DNA, 15 bp, Homo sapiens
tgaggaccaggaaat

SEQ ID NO: 60585 - DNA, 15 bp, Homo sapiens
gtgaggaccaggaaa

SEQ ID NO: 60586 - DNA, 15 bp, Homo sapiens
tgtgaggaccaggaa

SEQ ID NO: 60587 - DNA, 15 bp, Homo sapiens
gtgtgaggaccagga

SEQ ID NO: 60588 - DNA, 15 bp, Homo sapiens
agtgtgaggaccagg

SEQ ID NO: 60589 - DNA, 15 bp, Homo sapiens
cagtgtgaggaccag

SEQ ID NO: 60590 - DNA, 15 bp, Homo sapiens
gcagtgtgaggacca

SEQ ID NO: 60591 - DNA, 15 bp, Homo sapiens
agcagtgtgaggacc

SEQ ID NO: 60592 - DNA, 15 bp, Homo sapiens
gagcagtgtgaggac

SEQ ID NO: 60593 - DNA, 15 bp, Homo sapiens
tgagcagtgtgagga

SEQ ID NO: 60594 - DNA, 15 bp, Homo sapiens
ctgagcagtgtgagg

SEQ ID NO: 60595 - DNA, 15 bp, Homo sapiens
tctgagcagtgtgag

SEQ ID NO: 60596 - DNA, 15 bp, Homo sapiens
ctctgagcagtgtga

SEQ ID NO: 60597 - DNA, 15 bp, Homo sapiens
tctctgagcagtgtg

SEQ ID NO: 60598 - DNA, 15 bp, Homo sapiens
atctctgagcagtgt

SEQ ID NO: 60599 - DNA, 15 bp, Homo sapiens
aatctctgagcagtg

SEQ ID NO: 60600 - DNA, 15 bp, Homo sapiens
caatctctgagcagt

SEQ ID NO: 60601 - DNA, 15 bp, Homo sapiens
ccaatctctgagcag

SEQ ID NO: 60602 - DNA, 15 bp, Homo sapiens
tccaatctctgagca

SEQ ID NO: 60603 - DNA, 15 bp, Homo sapiens
ttccaatctctgagc

SEQ ID NO: 60604 - DNA, 15 bp, Homo sapiens
attccaatctctgag

SEQ ID NO: 60605 - DNA, 15 bp, Homo sapiens
gattccaatctctga

SEQ ID NO: 60606 - DNA, 15 bp, Homo sapiens
ggattccaatctctg

SEQ ID NO: 60607 - DNA, 15 bp, Homo sapiens
aggattccaatctct

SEQ ID NO: 60608 - DNA, 15 bp, Homo sapiens
aaggattccaatctc

SEQ ID NO: 60609 - DNA, 15 bp, Homo sapiens
aaaggattccaatct

SEQ ID NO: 60610 - DNA, 15 bp, Homo sapiens
aaaaggattccaatc

SEQ ID NO: 60611 - DNA, 15 bp, Homo sapiens
aaaaaggattccaat

SEQ ID NO: 60612 - DNA, 15 bp, Homo sapiens
caaaaaggattccaa

SEQ ID NO: 60613 - DNA, 15 bp, Homo sapiens
tcaaaaaggattcca

SEQ ID NO: 60614 - DNA, 15 bp, Homo sapiens
ctcaaaaaggattcc

SEQ ID NO: 60615 - DNA, 15 bp, Homo sapiens
gctcaaaaaggattc

SEQ ID NO: 60616 - DNA, 15 bp, Homo sapiens
tgctcaaaaaggatt

SEQ ID NO: 60617 - DNA, 15 bp, Homo sapiens
ttgctcaaaaaggat

SEQ ID NO: 60618 - DNA, 15 bp, Homo sapiens
tttgctcaaaaagga

SEQ ID NO: 60619 - DNA, 15 bp, Homo sapiens
ctttgctcaaaaagg

SEQ ID NO: 60620 - DNA, 15 bp, Homo sapiens
tctttgctcaaaaag

SEQ ID NO: 60621 - DNA, 15 bp, Homo sapiens
ctctttgctcaaaaa

SEQ ID NO: 60622 - DNA, 15 bp, Homo sapiens
tctctttgctcaaaa

SEQ ID NO: 60623 - DNA, 15 bp, Homo sapiens
ttctctttgctcaaa

SEQ ID NO: 60624 - DNA, 15 bp, Homo sapiens
attctctttgctcaa

SEQ ID NO: 60625 - DNA, 15 bp, Homo sapiens
cattctctttgctca

SEQ ID NO: 60626 - DNA, 15 bp, Homo sapiens
tcattctctttgctc

SEQ ID NO: 60627 - DNA, 15 bp, Homo sapiens
ttcattctctttgct

SEQ ID NO: 60628 - DNA, 15 bp, Homo sapiens
cttcattctctttgc

SEQ ID NO: 60629 - DNA, 15 bp, Homo sapiens
acttcattctctttg

SEQ ID NO: 60630 - DNA, 15 bp, Homo sapiens
gacttcattctcttt

SEQ ID NO: 60631 - DNA, 15 bp, Homo sapiens
tgacttcattctctt

SEQ ID NO: 60632 - DNA, 15 bp, Homo sapiens
atgacttcattctct

SEQ ID NO: 60633 - DNA, 15 bp, Homo sapiens
gatgacttcattctc

SEQ ID NO: 60634 - DNA, 15 bp, Homo sapiens
tgatgacttcattct

SEQ ID NO: 60635 - DNA, 15 bp, Homo sapiens
gtgatgacttcattc

SEQ ID NO: 60636 - DNA, 15 bp, Homo sapiens
tgtgatgacttcatt

SEQ ID NO: 60637 - DNA, 15 bp, Homo sapiens
atgtgatgacttcat

SEQ ID NO: 60638 - DNA, 15 bp, Homo sapiens
tatgtgatgacttca

SEQ ID NO: 60639 - DNA, 15 bp, Homo sapiens
ctatgtgatgacttc

SEQ ID NO: 60640 - DNA, 15 bp, Homo sapiens
actatgtgatgactt

SEQ ID NO: 60641 - DNA, 15 bp, Homo sapiens
aactatgtgatgact

SEQ ID NO: 60642 - DNA, 15 bp, Homo sapiens
gaactatgtgatgac

SEQ ID NO: 60643 - DNA, 15 bp, Homo sapiens
tgaactatgtgatga

SEQ ID NO: 60644 - DNA, 15 bp, Homo sapiens
ctgaactatgtgatg

SEQ ID NO: 60645 - DNA, 15 bp, Homo sapiens
actgaactatgtgat

SEQ ID NO: 60646 - DNA, 15 bp, Homo sapiens
gactgaactatgtga

SEQ ID NO: 60647 - DNA, 15 bp, Homo sapiens
ggactgaactatgtg

SEQ ID NO: 60648 - DNA, 15 bp, Homo sapiens
aggactgaactatgt

SEQ ID NO: 60649 - DNA, 15 bp, Homo sapiens
caggactgaactatg

SEQ ID NO: 60650 - DNA, 15 bp, Homo sapiens
gcaggactgaactat

SEQ ID NO: 60651 - DNA, 15 bp, Homo sapiens
agcaggactgaacta

SEQ ID NO: 60652 - DNA, 15 bp, Homo sapiens
cagcaggactgaact

SEQ ID NO: 60653 - DNA, 15 bp, Homo sapiens
acagcaggactgaac

SEQ ID NO: 60654 - DNA, 15 bp, Homo sapiens
tacagcaggactgaa

SEQ ID NO: 60655 - DNA, 15 bp, Homo sapiens
atacagcaggactga

SEQ ID NO: 60656 - DNA, 15 bp, Homo sapiens
aatacagcaggactg

SEQ ID NO: 60657 - DNA, 15 bp, Homo sapiens
aaatacagcaggact

SEQ ID NO: 60658 - DNA, 15 bp, Homo sapiens
caaatacagcaggac

SEQ ID NO: 60659 - DNA, 15 bp, Homo sapiens
gcaaatacagcagga

SEQ ID NO: 60660 - DNA, 15 bp, Homo sapiens
agcaaatacagcagg

SEQ ID NO: 60661 - DNA, 15 bp, Homo sapiens
cagcaaatacagcag

SEQ ID NO: 60662 - DNA, 15 bp, Homo sapiens
ccagcaaatacagca

SEQ ID NO: 60663 - DNA, 15 bp, Homo sapiens
tccagcaaatacagc

SEQ ID NO: 60664 - DNA, 15 bp, Homo sapiens
ttccagcaaatacag

SEQ ID NO: 60665 - DNA, 15 bp, Homo sapiens
tttccagcaaataca

SEQ ID NO: 60666 - DNA, 15 bp, Homo sapiens
gtttccagcaaatac

SEQ ID NO: 60667 - DNA, 15 bp, Homo sapiens
tgtttccagcaaata

SEQ ID NO: 60668 - DNA, 15 bp, Homo sapiens
ctgtttccagcaaat

SEQ ID NO: 60669 - DNA, 15 bp, Homo sapiens
actgtttccagcaaa

SEQ ID NO: 60670 - DNA, 15 bp, Homo sapiens
cactgtttccagcaa

SEQ ID NO: 60671 - DNA, 15 bp, Homo sapiens
tcactgtttccagca

SEQ ID NO: 60672 - DNA, 15 bp, Homo sapiens
ttcactgtttccagc

SEQ ID NO: 60673 - DNA, 15 bp, Homo sapiens
cttcactgtttccag

SEQ ID NO: 60674 - DNA, 15 bp, Homo sapiens
ccttcactgtttcca

SEQ ID NO: 60675 - DNA, 15 bp, Homo sapiens
tccttcactgtttcc

SEQ ID NO: 60676 - DNA, 15 bp, Homo sapiens
ttccttcactgtttc

SEQ ID NO: 60677 - DNA, 15 bp, Homo sapiens
cttccttcactgttt

SEQ ID NO: 60678 - DNA, 15 bp, Homo sapiens
tcttccttcactgtt

SEQ ID NO: 60679 - DNA, 15 bp, Homo sapiens
atcttccttcactgt

SEQ ID NO: 60680 - DNA, 15 bp, Homo sapiens
tatcttccttcactg

SEQ ID NO: 60681 - DNA, 15 bp, Homo sapiens
ctatcttccttcact

SEQ ID NO: 60682 - DNA, 15 bp, Homo sapiens
tctatcttccttcac

SEQ ID NO: 60683 - DNA, 15 bp, Homo sapiens
ctctatcttccttca

SEQ ID NO: 60684 - DNA, 15 bp, Homo sapiens
tctctatcttccttc

SEQ ID NO: 60685 - DNA, 15 bp, Homo sapiens
ttctctatcttcctt

SEQ ID NO: 60686 - DNA, 15 bp, Homo sapiens
tttctctatcttcct

SEQ ID NO: 60687 - DNA, 15 bp, Homo sapiens
ttttctctatcttcc

SEQ ID NO: 60688 - DNA, 15 bp, Homo sapiens
attttctctatcttc

SEQ ID NO: 60689 - DNA, 15 bp, Homo sapiens
cattttctctatctt

SEQ ID NO: 60690 - DNA, 15 bp, Homo sapiens
ccattttctctatct

SEQ ID NO: 60691 - DNA, 15 bp, Homo sapiens
tccattttctctatc

SEQ ID NO: 60692 - DNA, 15 bp, Homo sapiens
ctccattttctctat

SEQ ID NO: 60693 - DNA, 15 bp, Homo sapiens
gctccattttctcta

SEQ ID NO: 60694 - DNA, 15 bp, Homo sapiens
agctccattttctct

SEQ ID NO: 60695 - DNA, 15 bp, Homo sapiens
tagctccattttctc

SEQ ID NO: 60696 - DNA, 15 bp, Homo sapiens
ttagctccattttct

SEQ ID NO: 60697 - DNA, 15 bp, Homo sapiens
gttagctccattttc

SEQ ID NO: 60698 - DNA, 15 bp, Homo sapiens
agttagctccatttt

SEQ ID NO: 60699 - DNA, 15 bp, Homo sapiens
cagttagctccattt

SEQ ID NO: 60700 - DNA, 15 bp, Homo sapiens
gcagttagctccatt

SEQ ID NO: 60701 - DNA, 15 bp, Homo sapiens
ggcagttagctccat

SEQ ID NO: 60702 - DNA, 15 bp, Homo sapiens
tggcagttagctcca

SEQ ID NO: 60703 - DNA, 15 bp, Homo sapiens
ttggcagttagctcc

SEQ ID NO: 60704 - DNA, 15 bp, Homo sapiens
attggcagttagctc

SEQ ID NO: 60705 - DNA, 15 bp, Homo sapiens
tattggcagttagct

SEQ ID NO: 60706 - DNA, 15 bp, Homo sapiens
atattggcagttagc

SEQ ID NO: 60707 - DNA, 15 bp, Homo sapiens
aatattggcagttag

SEQ ID NO: 60708 - DNA, 15 bp, Homo sapiens
taatattggcagtta

SEQ ID NO: 60709 - DNA, 15 bp, Homo sapiens
gtaatattggcagtt

SEQ ID NO: 60710 - DNA, 15 bp, Homo sapiens
tgtaatattggcagt

SEQ ID NO: 60711 - DNA, 15 bp, Homo sapiens
atgtaatattggcag

SEQ ID NO: 60712 - DNA, 15 bp, Homo sapiens
aatgtaatattggca

SEQ ID NO: 60713 - DNA, 15 bp, Homo sapiens
aaatgtaatattggc

SEQ ID NO: 60714 - DNA, 15 bp, Homo sapiens
aaaatgtaatattgg

SEQ ID NO: 60715 - DNA, 15 bp, Homo sapiens
taaaatgtaatattg

SEQ ID NO: 60716 - DNA, 15 bp, Homo sapiens
ataaaatgtaatatt

SEQ ID NO: 60717 - DNA, 15 bp, Homo sapiens
tataaaatgtaatat

SEQ ID NO: 60718 - DNA, 15 bp, Homo sapiens
atataaaatgtaata

SEQ ID NO: 60719 - DNA, 15 bp, Homo sapiens
gatataaaatgtaat

SEQ ID NO: 60720 - DNA, 15 bp, Homo sapiens
tgatataaaatgtaa

SEQ ID NO: 60721 - DNA, 15 bp, Homo sapiens
ctgatataaaatgta

SEQ ID NO: 60722 - DNA, 15 bp, Homo sapiens
actgatataaaatgt

SEQ ID NO: 60723 - DNA, 15 bp, Homo sapiens
gactgatataaaatg

SEQ ID NO: 60724 - DNA, 15 bp, Homo sapiens
agactgatataaaat

SEQ ID NO: 60725 - DNA, 15 bp, Homo sapiens
aagactgatataaaa

SEQ ID NO: 60726 - DNA, 15 bp, Homo sapiens
gaagactgatataaa

SEQ ID NO: 60727 - DNA, 15 bp, Homo sapiens
tgaagactgatataa

SEQ ID NO: 60728 - DNA, 15 bp, Homo sapiens
atgaagactgatata

SEQ ID NO: 60729 - DNA, 15 bp, Homo sapiens
gatgaagactgatat

SEQ ID NO: 60730 - DNA, 15 bp, Homo sapiens
tgatgaagactgata

SEQ ID NO: 60731 - DNA, 15 bp, Homo sapiens
atgatgaagactgat

SEQ ID NO: 60732 - DNA, 15 bp, Homo sapiens
tatgatgaagactga

SEQ ID NO: 60733 - DNA, 15 bp, Homo sapiens
ctatgatgaagactg

SEQ ID NO: 60734 - DNA, 15 bp, Homo sapiens
gctatgatgaagact

SEQ ID NO: 60735 - DNA, 15 bp, Homo sapiens
ggctatgatgaagac

SEQ ID NO: 60736 - DNA, 15 bp, Homo sapiens
gggctatgatgaaga

SEQ ID NO: 60737 - DNA, 15 bp, Homo sapiens
agggctatgatgaag

SEQ ID NO: 60738 - DNA, 15 bp, Homo sapiens
tagggctatgatgaa

SEQ ID NO: 60739 - DNA, 15 bp, Homo sapiens
atagggctatgatga

SEQ ID NO: 60740 - DNA, 15 bp, Homo sapiens
catagggctatgatg

SEQ ID NO: 60741 - DNA, 15 bp, Homo sapiens
tcatagggctatgat

SEQ ID NO: 60742 - DNA, 15 bp, Homo sapiens
ttcatagggctatga

SEQ ID NO: 60743 - DNA, 15 bp, Homo sapiens
cttcatagggctatg

SEQ ID NO: 60744 - DNA, 15 bp, Homo sapiens
acttcatagggctat

SEQ ID NO: 60745 - DNA, 15 bp, Homo sapiens
cacttcatagggcta

SEQ ID NO: 60746 - DNA, 15 bp, Homo sapiens
ccacttcatagggct

SEQ ID NO: 60747 - DNA, 15 bp, Homo sapiens
cccacttcatagggc

SEQ ID NO: 60748 - DNA, 15 bp, Homo sapiens
acccacttcataggg

SEQ ID NO: 60749 - DNA, 15 bp, Homo sapiens
tacccacttcatagg

SEQ ID NO: 60750 - DNA, 15 bp, Homo sapiens
atacccacttcatag

SEQ ID NO: 60751 - DNA, 15 bp, Homo sapiens
aatacccacttcata

SEQ ID NO: 60752 - DNA, 15 bp, Homo sapiens
aaatacccacttcat

SEQ ID NO: 60753 - DNA, 15 bp, Homo sapiens
caaatacccacttca

SEQ ID NO: 60754 - DNA, 15 bp, Homo sapiens
acaaatacccacttc

SEQ ID NO: 60755 - DNA, 15 bp, Homo sapiens
aacaaatacccactt

SEQ ID NO: 60756 - DNA, 15 bp, Homo sapiens
taacaaatacccact

SEQ ID NO: 60757 - DNA, 15 bp, Homo sapiens
gtaacaaatacccac

SEQ ID NO: 60758 - DNA, 15 bp, Homo sapiens
ggtaacaaataccca

SEQ ID NO: 60759 - DNA, 15 bp, Homo sapiens
aggtaacaaataccc

SEQ ID NO: 60760 - DNA, 15 bp, Homo sapiens
gaggtaacaaatacc

SEQ ID NO: 60761 - DNA, 15 bp, Homo sapiens
tgaggtaacaaatac

SEQ ID NO: 60762 - DNA, 15 bp, Homo sapiens
atgaggtaacaaata

SEQ ID NO: 60763 - DNA, 15 bp, Homo sapiens
aatgaggtaacaaat

SEQ ID NO: 60764 - DNA, 15 bp, Homo sapiens
caatgaggtaacaaa

SEQ ID NO: 60765 - DNA, 15 bp, Homo sapiens
ccaatgaggtaacaa

SEQ ID NO: 60766 - DNA, 15 bp, Homo sapiens
tccaatgaggtaaca

SEQ ID NO: 60767 - DNA, 15 bp, Homo sapiens
ttccaatgaggtaac

SEQ ID NO: 60768 - DNA, 15 bp, Homo sapiens
tttccaatgaggtaa

SEQ ID NO: 60769 - DNA, 15 bp, Homo sapiens
ttttccaatgaggta

SEQ ID NO: 60770 - DNA, 15 bp, Homo sapiens
tttttccaatgaggt

SEQ ID NO: 60771 - DNA, 15 bp, Homo sapiens
atttttccaatgagg

SEQ ID NO: 60772 - DNA, 15 bp, Homo sapiens
catttttccaatgag

SEQ ID NO: 60773 - DNA, 15 bp, Homo sapiens
ccatttttccaatga

SEQ ID NO: 60774 - DNA, 15 bp, Homo sapiens
cccatttttccaatg

SEQ ID NO: 60775 - DNA, 15 bp, Homo sapiens
tcccatttttccaat

SEQ ID NO: 60776 - DNA, 15 bp, Homo sapiens
ctcccatttttccaa

SEQ ID NO: 60777 - DNA, 15 bp, Homo sapiens
actcccatttttcca

SEQ ID NO: 60778 - DNA, 15 bp, Homo sapiens
aactcccatttttcc

SEQ ID NO: 60779 - DNA, 15 bp, Homo sapiens
caactcccatttttc

SEQ ID NO: 60780 - DNA, 15 bp, Homo sapiens
tcaactcccattttt

SEQ ID NO: 60781 - DNA, 15 bp, Homo sapiens
ttcaactcccatttt

SEQ ID NO: 60782 - DNA, 15 bp, Homo sapiens
attcaactcccattt

SEQ ID NO: 60783 - DNA, 15 bp, Homo sapiens
gattcaactcccatt

SEQ ID NO: 60784 - DNA, 15 bp, Homo sapiens
agattcaactcccat

SEQ ID NO: 60785 - DNA, 15 bp, Homo sapiens
gagattcaactccca

SEQ ID NO: 60786 - DNA, 15 bp, Homo sapiens
tgagattcaactccc

SEQ ID NO: 60787 - DNA, 15 bp, Homo sapiens
ttgagattcaactcc

SEQ ID NO: 60788 - DNA, 15 bp, Homo sapiens
cttgagattcaactc

SEQ ID NO: 60789 - DNA, 15 bp, Homo sapiens
acttgagattcaact

SEQ ID NO: 60790 - DNA, 15 bp, Homo sapiens
aacttgagattcaac

SEQ ID NO: 60791 - DNA, 15 bp, Homo sapiens
gaacttgagattcaa

SEQ ID NO: 60792 - DNA, 15 bp, Homo sapiens
ggaacttgagattca

SEQ ID NO: 60793 - DNA, 15 bp, Homo sapiens
aggaacttgagattc

SEQ ID NO: 60794 - DNA, 15 bp, Homo sapiens
aaggaacttgagatt

SEQ ID NO: 60795 - DNA, 15 bp, Homo sapiens
caaggaacttgagat

SEQ ID NO: 60796 - DNA, 15 bp, Homo sapiens
acaaggaacttgaga

SEQ ID NO: 60797 - DNA, 15 bp, Homo sapiens
aacaaggaacttgag

SEQ ID NO: 60798 - DNA, 15 bp, Homo sapiens
aaacaaggaacttga

SEQ ID NO: 60799 - DNA, 15 bp, Homo sapiens
caaacaaggaacttg

SEQ ID NO: 60800 - DNA, 15 bp, Homo sapiens
acaaacaaggaactt

SEQ ID NO: 60801 - DNA, 15 bp, Homo sapiens
tacaaacaaggaact

SEQ ID NO: 60802 - DNA, 15 bp, Homo sapiens
ttacaaacaaggaac

SEQ ID NO: 60803 - DNA, 15 bp, Homo sapiens
cttacaaacaaggaa

SEQ ID NO: 60804 - DNA, 15 bp, Homo sapiens
tcttacaaacaagga

SEQ ID NO: 60805 - DNA, 15 bp, Homo sapiens
atcttacaaacaagg

SEQ ID NO: 60806 - DNA, 15 bp, Homo sapiens
aatcttacaaacaag

SEQ ID NO: 60807 - DNA, 15 bp, Homo sapiens
aaatcttacaaacaa

SEQ ID NO: 60808 - DNA, 15 bp, Homo sapiens
aaaatcttacaaaca

SEQ ID NO: 60809 - DNA, 15 bp, Homo sapiens
taaaatcttacaaac

SEQ ID NO: 60810 - DNA, 15 bp, Homo sapiens
gtaaaatcttacaaa

SEQ ID NO: 60811 - DNA, 15 bp, Homo sapiens
agtaaaatcttacaa

SEQ ID NO: 60812 - DNA, 15 bp, Homo sapiens
gagtaaaatcttaca

SEQ ID NO: 60813 - DNA, 15 bp, Homo sapiens
tgagtaaaatcttac

SEQ ID NO: 60814 - DNA, 15 bp, Homo sapiens
ctgagtaaaatctta

SEQ ID NO: 60815 - DNA, 15 bp, Homo sapiens
tctgagtaaaatctt

SEQ ID NO: 60816 - DNA, 15 bp, Homo sapiens
atctgagtaaaatct

SEQ ID NO: 60817 - DNA, 15 bp, Homo sapiens
aatctgagtaaaatc

SEQ ID NO: 60818 - DNA, 15 bp, Homo sapiens
aaatctgagtaaaat

SEQ ID NO: 60819 - DNA, 15 bp, Homo sapiens
caaatctgagtaaaa

SEQ ID NO: 60820 - DNA, 15 bp, Homo sapiens
gcaaatctgagtaaa

SEQ ID NO: 60821 - DNA, 15 bp, Homo sapiens
tgcaaatctgagtaa

SEQ ID NO: 60822 - DNA, 15 bp, Homo sapiens
gtgcaaatctgagta

SEQ ID NO: 60823 - DNA, 15 bp, Homo sapiens
tgtgcaaatctgagt

SEQ ID NO: 60824 - DNA, 15 bp, Homo sapiens
ctgtgcaaatctgag

SEQ ID NO: 60825 - DNA, 15 bp, Homo sapiens
gctgtgcaaatctga

SEQ ID NO: 60826 - DNA, 15 bp, Homo sapiens
agctgtgcaaatctg

SEQ ID NO: 60827 - DNA, 15 bp, Homo sapiens
tagctgtgcaaatct

SEQ ID NO: 60828 - DNA, 15 bp, Homo sapiens
ttagctgtgcaaatc

SEQ ID NO: 60829 - DNA, 15 bp, Homo sapiens
tttagctgtgcaaat

SEQ ID NO: 60830 - DNA, 15 bp, Homo sapiens
ttttagctgtgcaaa

SEQ ID NO: 60831 - DNA, 15 bp, Homo sapiens
tttttagctgtgcaa

SEQ ID NO: 60832 - DNA, 15 bp, Homo sapiens
atttttagctgtgca

SEQ ID NO: 60833 - DNA, 15 bp, Homo sapiens
catttttagctgtgc

SEQ ID NO: 60834 - DNA, 15 bp, Homo sapiens
tcatttttagctgtg

SEQ ID NO: 60835 - DNA, 15 bp, Homo sapiens
gtcatttttagctgt

SEQ ID NO: 60836 - DNA, 15 bp, Homo sapiens
agtcatttttagctg

SEQ ID NO: 60837 - DNA, 15 bp, Homo sapiens
tagtcatttttagct

SEQ ID NO: 60838 - DNA, 15 bp, Homo sapiens
gtagtcatttttagc

SEQ ID NO: 60839 - DNA, 15 bp, Homo sapiens
tgtagtcatttttag

SEQ ID NO: 60840 - DNA, 15 bp, Homo sapiens
atgtagtcattttta

SEQ ID NO: 60841 - DNA, 15 bp, Homo sapiens
catgtagtcattttt

SEQ ID NO: 60842 - DNA, 15 bp, Homo sapiens
ccatgtagtcatttt

SEQ ID NO: 60843 - DNA, 15 bp, Homo sapiens
tccatgtagtcattt

SEQ ID NO: 60844 - DNA, 15 bp, Homo sapiens
ctccatgtagtcatt

SEQ ID NO: 60845 - DNA, 15 bp, Homo sapiens
tctccatgtagtcat

SEQ ID NO: 60846 - DNA, 15 bp, Homo sapiens
gtctccatgtagtca

SEQ ID NO: 60847 - DNA, 15 bp, Homo sapiens
ggtctccatgtagtc

SEQ ID NO: 60848 - DNA, 15 bp, Homo sapiens
gggtctccatgtagt

SEQ ID NO: 60849 - DNA, 15 bp, Homo sapiens
tgggtctccatgtag

SEQ ID NO: 60850 - DNA, 15 bp, Homo sapiens
ttgggtctccatgta

SEQ ID NO: 60851 - DNA, 15 bp, Homo sapiens
tttgggtctccatgt

SEQ ID NO: 60852 - DNA, 15 bp, Homo sapiens
ctttgggtctccatg

SEQ ID NO: 60853 - DNA, 15 bp, Homo sapiens
gctttgggtctccat

SEQ ID NO: 60854 - DNA, 15 bp, Homo sapiens
ggctttgggtctcca

SEQ ID NO: 60855 - DNA, 15 bp, Homo sapiens
tggctttgggtctcc

SEQ ID NO: 60856 - DNA, 15 bp, Homo sapiens
gtggctttgggtctc

SEQ ID NO: 60857 - DNA, 15 bp, Homo sapiens
ggtggctttgggtct

SEQ ID NO: 60858 - DNA, 15 bp, Homo sapiens
aggtggctttgggtc

SEQ ID NO: 60859 - DNA, 15 bp, Homo sapiens
aaggtggctttgggt

SEQ ID NO: 60860 - DNA, 15 bp, Homo sapiens
aaaggtggctttggg

SEQ ID NO: 60861 - DNA, 15 bp, Homo sapiens
gaaaggtggctttgg

SEQ ID NO: 60862 - DNA, 15 bp, Homo sapiens
agaaaggtggctttg

SEQ ID NO: 60863 - DNA, 15 bp, Homo sapiens
cagaaaggtggcttt

SEQ ID NO: 60864 - DNA, 15 bp, Homo sapiens
acagaaaggtggctt

SEQ ID NO: 60865 - DNA, 15 bp, Homo sapiens
aacagaaaggtggct

SEQ ID NO: 60866 - DNA, 15 bp, Homo sapiens
gaacagaaaggtggc

SEQ ID NO: 60867 - DNA, 15 bp, Homo sapiens
ggaacagaaaggtgg

SEQ ID NO: 60868 - DNA, 15 bp, Homo sapiens
gggaacagaaaggtg

SEQ ID NO: 60869 - DNA, 15 bp, Homo sapiens
tgggaacagaaaggt

SEQ ID NO: 60870 - DNA, 15 bp, Homo sapiens
atgggaacagaaagg

SEQ ID NO: 60871 - DNA, 15 bp, Homo sapiens
gatgggaacagaaag

SEQ ID NO: 60872 - DNA, 15 bp, Homo sapiens
tgatgggaacagaaa

SEQ ID NO: 60873 - DNA, 15 bp, Homo sapiens
atgatgggaacagaa

SEQ ID NO: 60874 - DNA, 15 bp, Homo sapiens
gatgatgggaacaga

SEQ ID NO: 60875 - DNA, 15 bp, Homo sapiens
tgatgatgggaacag

SEQ ID NO: 60876 - DNA, 15 bp, Homo sapiens
ctgatgatgggaaca

SEQ ID NO: 60877 - DNA, 15 bp, Homo sapiens
gctgatgatgggaac

SEQ ID NO: 60878 - DNA, 15 bp, Homo sapiens
agctgatgatgggaa

SEQ ID NO: 60879 - DNA, 15 bp, Homo sapiens
aagctgatgatggga

SEQ ID NO: 60880 - DNA, 15 bp, Homo sapiens
aaagctgatgatggg

SEQ ID NO: 60881 - DNA, 15 bp, Homo sapiens
gaaagctgatgatgg

SEQ ID NO: 60882 - DNA, 15 bp, Homo sapiens
ggaaagctgatgatg

SEQ ID NO: 60883 - DNA, 15 bp, Homo sapiens
tggaaagctgatgat

SEQ ID NO: 60884 - DNA, 15 bp, Homo sapiens
atggaaagctgatga

SEQ ID NO: 60885 - DNA, 15 bp, Homo sapiens
gatggaaagctgatg

SEQ ID NO: 60886 - DNA, 15 bp, Homo sapiens
agatggaaagctgat

SEQ ID NO: 60887 - DNA, 15 bp, Homo sapiens
cagatggaaagctga

SEQ ID NO: 60888 - DNA, 15 bp, Homo sapiens
gcagatggaaagctg

SEQ ID NO: 60889 - DNA, 15 bp, Homo sapiens
ggcagatggaaagct

SEQ ID NO: 60890 - DNA, 15 bp, Homo sapiens
aggcagatggaaagc

SEQ ID NO: 60891 - DNA, 15 bp, Homo sapiens
gaggcagatggaaag

SEQ ID NO: 60892 - DNA, 15 bp, Homo sapiens
agaggcagatggaaa

SEQ ID NO: 60893 - DNA, 15 bp, Homo sapiens
cagaggcagatggaa

SEQ ID NO: 60894 - DNA, 15 bp, Homo sapiens
acagaggcagatgga

SEQ ID NO: 60895 - DNA, 15 bp, Homo sapiens
gacagaggcagatgg

SEQ ID NO: 60896 - DNA, 15 bp, Homo sapiens
tgacagaggcagatg

SEQ ID NO: 60897 - DNA, 15 bp, Homo sapiens
gtgacagaggcagat

SEQ ID NO: 60898 - DNA, 15 bp, Homo sapiens
agtgacagaggcaga

SEQ ID NO: 60899 - DNA, 15 bp, Homo sapiens
cagtgacagaggcag

SEQ ID NO: 60900 - DNA, 15 bp, Homo sapiens
tcagtgacagaggca

SEQ ID NO: 60901 - DNA, 15 bp, Homo sapiens
gtcagtgacagaggc

SEQ ID NO: 60902 - DNA, 15 bp, Homo sapiens
ggtcagtgacagagg

SEQ ID NO: 60903 - DNA, 15 bp, Homo sapiens
gggtcagtgacagag

SEQ ID NO: 60904 - DNA, 15 bp, Homo sapiens
ggggtcagtgacaga

SEQ ID NO: 60905 - DNA, 15 bp, Homo sapiens
cggggtcagtgacag

SEQ ID NO: 60906 - DNA, 15 bp, Homo sapiens
ccggggtcagtgaca

SEQ ID NO: 60907 - DNA, 15 bp, Homo sapiens
cccggggtcagtgac

SEQ ID NO: 60908 - DNA, 15 bp, Homo sapiens
tcccggggtcagtga

SEQ ID NO: 60909 - DNA, 15 bp, Homo sapiens
gtcccggggtcagtg

SEQ ID NO: 60910 - DNA, 15 bp, Homo sapiens
tgtcccggggtcagt

SEQ ID NO: 60911 - DNA, 15 bp, Homo sapiens
ctgtcccggggtcag

SEQ ID NO: 60912 - DNA, 15 bp, Homo sapiens
tctgtcccggggtca

SEQ ID NO: 60913 - DNA, 15 bp, Homo sapiens
ttctgtcccggggtc

SEQ ID NO: 60914 - DNA, 15 bp, Homo sapiens
cttctgtcccggggt

SEQ ID NO: 60915 - DNA, 15 bp, Homo sapiens
ccttctgtcccgggg

SEQ ID NO: 60916 - DNA, 15 bp, Homo sapiens
accttctgtcccggg

SEQ ID NO: 60917 - DNA, 15 bp, Homo sapiens
aaccttctgtcccgg

SEQ ID NO: 60918 - DNA, 15 bp, Homo sapiens
gaaccttctgtcccg

SEQ ID NO: 60919 - DNA, 15 bp, Homo sapiens
tgaaccttctgtccc

SEQ ID NO: 60920 - DNA, 15 bp, Homo sapiens
ttgaaccttctgtcc

SEQ ID NO: 60921 - DNA, 15 bp, Homo sapiens
cttgaaccttctgtc

SEQ ID NO: 60922 - DNA, 15 bp, Homo sapiens
gcttgaaccttctgt

SEQ ID NO: 60923 - DNA, 15 bp, Homo sapiens
ggcttgaaccttctg

SEQ ID NO: 60924 - DNA, 15 bp, Homo sapiens
aggcttgaaccttct

SEQ ID NO: 60925 - DNA, 15 bp, Homo sapiens
aaggcttgaaccttc

SEQ ID NO: 60926 - DNA, 15 bp, Homo sapiens
taaggcttgaacctt

SEQ ID NO: 60927 - DNA, 15 bp, Homo sapiens
ttaaggcttgaacct

SEQ ID NO: 60928 - DNA, 15 bp, Homo sapiens
cttaaggcttgaacc

SEQ ID NO: 60929 - DNA, 15 bp, Homo sapiens
ccttaaggcttgaac

SEQ ID NO: 60930 - DNA, 15 bp, Homo sapiens
cccttaaggcttgaa

SEQ ID NO: 60931 - DNA, 15 bp, Homo sapiens
tcccttaaggcttga

SEQ ID NO: 60932 - DNA, 15 bp, Homo sapiens
ttcccttaaggcttg

SEQ ID NO: 60933 - DNA, 15 bp, Homo sapiens
attcccttaaggctt

SEQ ID NO: 60934 - DNA, 15 bp, Homo sapiens
aattcccttaaggct

SEQ ID NO: 60935 - DNA, 15 bp, Homo sapiens
aaattcccttaaggc

SEQ ID NO: 60936 - DNA, 15 bp, Homo sapiens
caaattcccttaagg

SEQ ID NO: 60937 - DNA, 15 bp, Homo sapiens
ccaaattcccttaag

SEQ ID NO: 60938 - DNA, 15 bp, Homo sapiens
tccaaattcccttaa

SEQ ID NO: 60939 - DNA, 15 bp, Homo sapiens
ctccaaattccctta

SEQ ID NO: 60940 - DNA, 15 bp, Homo sapiens
tctccaaattccctt

SEQ ID NO: 60941 - DNA, 15 bp, Homo sapiens
ctctccaaattccct

SEQ ID NO: 60942 - DNA, 15 bp, Homo sapiens
tctctccaaattccc

SEQ ID NO: 60943 - DNA, 15 bp, Homo sapiens
ctctctccaaattcc

SEQ ID NO: 60944 - DNA, 15 bp, Homo sapiens
tctctctccaaattc

SEQ ID NO: 60945 - DNA, 15 bp, Homo sapiens
ttctctctccaaatt

SEQ ID NO: 60946 - DNA, 15 bp, Homo sapiens
gttctctctccaaat

SEQ ID NO: 60947 - DNA, 15 bp, Homo sapiens
agttctctctccaaa

SEQ ID NO: 60948 - DNA, 15 bp, Homo sapiens
tagttctctctccaa

SEQ ID NO: 60949 - DNA, 15 bp, Homo sapiens
ctagttctctctcca

SEQ ID NO: 60950 - DNA, 15 bp, Homo sapiens
tctagttctctctcc

SEQ ID NO: 60951 - DNA, 15 bp, Homo sapiens
atctagttctctctc

SEQ ID NO: 60952 - DNA, 15 bp, Homo sapiens
aatctagttctctct

SEQ ID NO: 60953 - DNA, 15 bp, Homo sapiens
aaatctagttctctc

SEQ ID NO: 60954 - DNA, 15 bp, Homo sapiens
aaaatctagttctct

SEQ ID NO: 60955 - DNA, 15 bp, Homo sapiens
caaaatctagttctc

SEQ ID NO: 60956 - DNA, 15 bp, Homo sapiens
tcaaaatctagttct

SEQ ID NO: 60957 - DNA, 15 bp, Homo sapiens
ctcaaaatctagttc

SEQ ID NO: 60958 - DNA, 15 bp, Homo sapiens
cctcaaaatctagtt

SEQ ID NO: 60959 - DNA, 15 bp, Homo sapiens
ccctcaaaatctagt

SEQ ID NO: 60960 - DNA, 15 bp, Homo sapiens
cccctcaaaatctag

SEQ ID NO: 60961 - DNA, 15 bp, Homo sapiens
tcccctcaaaatcta

SEQ ID NO: 60962 - DNA, 15 bp, Homo sapiens
ttcccctcaaaatct

SEQ ID NO: 60963 - DNA, 15 bp, Homo sapiens
gttcccctcaaaatc

SEQ ID NO: 60964 - DNA, 15 bp, Homo sapiens
agttcccctcaaaat

SEQ ID NO: 60965 - DNA, 15 bp, Homo sapiens
gagttcccctcaaaa

SEQ ID NO: 60966 - DNA, 15 bp, Homo sapiens
tgagttcccctcaaa

SEQ ID NO: 60967 - DNA, 15 bp, Homo sapiens
gtgagttcccctcaa

SEQ ID NO: 60968 - DNA, 15 bp, Homo sapiens
tgtgagttcccctca

SEQ ID NO: 60969 - DNA, 15 bp, Homo sapiens
gtgtgagttcccctc

SEQ ID NO: 60970 - DNA, 15 bp, Homo sapiens
agtgtgagttcccct

SEQ ID NO: 60971 - DNA, 15 bp, Homo sapiens
gagtgtgagttcccc

SEQ ID NO: 60972 - DNA, 15 bp, Homo sapiens
tgagtgtgagttccc

SEQ ID NO: 60973 - DNA, 15 bp, Homo sapiens
gtgagtgtgagttcc

SEQ ID NO: 60974 - DNA, 15 bp, Homo sapiens
agtgagtgtgagttc

SEQ ID NO: 60975 - DNA, 15 bp, Homo sapiens
aagtgagtgtgagtt

SEQ ID NO: 60976 - DNA, 15 bp, Homo sapiens
gaagtgagtgtgagt

SEQ ID NO: 60977 - DNA, 15 bp, Homo sapiens
ggaagtgagtgtgag

SEQ ID NO: 60978 - DNA, 15 bp, Homo sapiens
gggaagtgagtgtga

SEQ ID NO: 60979 - DNA, 15 bp, Homo sapiens
agggaagtgagtgtg

SEQ ID NO: 60980 - DNA, 15 bp, Homo sapiens
aagggaagtgagtgt

SEQ ID NO: 60981 - DNA, 15 bp, Homo sapiens
aaagggaagtgagtg

SEQ ID NO: 60982 - DNA, 15 bp, Homo sapiens
aaaagggaagtgagt

SEQ ID NO: 60983 - DNA, 15 bp, Homo sapiens
caaaagggaagtgag

SEQ ID NO: 60984 - DNA, 15 bp, Homo sapiens
ccaaaagggaagtga

SEQ ID NO: 60985 - DNA, 15 bp, Homo sapiens
cccaaaagggaagtg

SEQ ID NO: 60986 - DNA, 15 bp, Homo sapiens
gcccaaaagggaagt

SEQ ID NO: 60987 - DNA, 15 bp, Homo sapiens
ggcccaaaagggaag

SEQ ID NO: 60988 - DNA, 15 bp, Homo sapiens
tggcccaaaagggaa

SEQ ID NO: 60989 - DNA, 15 bp, Homo sapiens
gtggcccaaaaggga

SEQ ID NO: 60990 - DNA, 15 bp, Homo sapiens
tgtggcccaaaaggg

SEQ ID NO: 60991 - DNA, 15 bp, Homo sapiens
ctgtggcccaaaagg

SEQ ID NO: 60992 - DNA, 15 bp, Homo sapiens
actgtggcccaaaag

SEQ ID NO: 60993 - DNA, 15 bp, Homo sapiens
tactgtggcccaaaa

SEQ ID NO: 60994 - DNA, 15 bp, Homo sapiens
ctactgtggcccaaa

SEQ ID NO: 60995 - DNA, 15 bp, Homo sapiens
cctactgtggcccaa

SEQ ID NO: 60996 - DNA, 15 bp, Homo sapiens
tcctactgtggccca

SEQ ID NO: 60997 - DNA, 15 bp, Homo sapiens
ctcctactgtggccc

SEQ ID NO: 60998 - DNA, 15 bp, Homo sapiens
tctcctactgtggcc

SEQ ID NO: 60999 - DNA, 15 bp, Homo sapiens
gtctcctactgtggc

SEQ ID NO: 61000 - DNA, 15 bp, Homo sapiens
tgtctcctactgtgg

SEQ ID NO: 61001 - DNA, 15 bp, Homo sapiens
ctgtctcctactgtg

SEQ ID NO: 61002 - DNA, 15 bp, Homo sapiens
actgtctcctactgt

SEQ ID NO: 61003 - DNA, 15 bp, Homo sapiens
tactgtctcctactg

SEQ ID NO: 61004 - DNA, 15 bp, Homo sapiens
ttactgtctcctact

SEQ ID NO: 61005 - DNA, 15 bp, Homo sapiens
tttactgtctcctac

SEQ ID NO: 61006 - DNA, 15 bp, Homo sapiens
ttttactgtctccta

SEQ ID NO: 61007 - DNA, 15 bp, Homo sapiens
cttttactgtctcct

SEQ ID NO: 61008 - DNA, 15 bp, Homo sapiens
gcttttactgtctcc

SEQ ID NO: 61009 - DNA, 15 bp, Homo sapiens
tgcttttactgtctc

SEQ ID NO: 61010 - DNA, 15 bp, Homo sapiens
ctgcttttactgtct

SEQ ID NO: 61011 - DNA, 15 bp, Homo sapiens
gctgcttttactgtc

SEQ ID NO: 61012 - DNA, 15 bp, Homo sapiens
ggctgcttttactgt

SEQ ID NO: 61013 - DNA, 15 bp, Homo sapiens
gggctgcttttactg

SEQ ID NO: 61014 - DNA, 15 bp, Homo sapiens
ggggctgcttttact

SEQ ID NO: 61015 - DNA, 15 bp, Homo sapiens
tggggctgcttttac

SEQ ID NO: 61016 - DNA, 15 bp, Homo sapiens
atggggctgctttta

SEQ ID NO: 61017 - DNA, 15 bp, Homo sapiens
catggggctgctttt

SEQ ID NO: 61018 - DNA, 15 bp, Homo sapiens
acatggggctgcttt

SEQ ID NO: 61019 - DNA, 15 bp, Homo sapiens
gacatggggctgctt

SEQ ID NO: 61020 - DNA, 15 bp, Homo sapiens
tgacatggggctgct

SEQ ID NO: 61021 - DNA, 15 bp, Homo sapiens
ctgacatggggctgc

SEQ ID NO: 61022 - DNA, 15 bp, Homo sapiens
cctgacatggggctg

SEQ ID NO: 61023 - DNA, 15 bp, Homo sapiens
gcctgacatggggct

SEQ ID NO: 61024 - DNA, 15 bp, Homo sapiens
tgcctgacatggggc

SEQ ID NO: 61025 - DNA, 15 bp, Homo sapiens
ttgcctgacatgggg

SEQ ID NO: 61026 - DNA, 15 bp, Homo sapiens
tttgcctgacatggg

SEQ ID NO: 61027 - DNA, 15 bp, Homo sapiens
ctttgcctgacatgg

SEQ ID NO: 61028 - DNA, 15 bp, Homo sapiens
cctttgcctgacatg

SEQ ID NO: 61029 - DNA, 15 bp, Homo sapiens
ccctttgcctgacat

SEQ ID NO: 61030 - DNA, 15 bp, Homo sapiens
accctttgcctgaca

SEQ ID NO: 61031 - DNA, 15 bp, Homo sapiens
gaccctttgcctgac

SEQ ID NO: 61032 - DNA, 15 bp, Homo sapiens
agaccctttgcctga

SEQ ID NO: 61033 - DNA, 15 bp, Homo sapiens
aagaccctttgcctg

SEQ ID NO: 61034 - DNA, 15 bp, Homo sapiens
taagaccctttgcct

SEQ ID NO: 61035 - DNA, 15 bp, Homo sapiens
gtaagaccctttgcc

SEQ ID NO: 61036 - DNA, 15 bp, Homo sapiens
tgtaagaccctttgc

SEQ ID NO: 61037 - DNA, 15 bp, Homo sapiens
ctgtaagaccctttg

SEQ ID NO: 61038 - DNA, 15 bp, Homo sapiens
cctgtaagacccttt

SEQ ID NO: 61039 - DNA, 15 bp, Homo sapiens
tcctgtaagaccctt

SEQ ID NO: 61040 - DNA, 15 bp, Homo sapiens
ctcctgtaagaccct

SEQ ID NO: 61041 - DNA, 15 bp, Homo sapiens
actcctgtaagaccc

SEQ ID NO: 61042 - DNA, 15 bp, Homo sapiens
cactcctgtaagacc

SEQ ID NO: 61043 - DNA, 15 bp, Homo sapiens
ccactcctgtaagac

SEQ ID NO: 61044 - DNA, 15 bp, Homo sapiens
tccactcctgtaaga

SEQ ID NO: 61045 - DNA, 15 bp, Homo sapiens
atccactcctgtaag

SEQ ID NO: 61046 - DNA, 15 bp, Homo sapiens
gatccactcctgtaa

SEQ ID NO: 61047 - DNA, 15 bp, Homo sapiens
tgatccactcctgta

SEQ ID NO: 61048 - DNA, 15 bp, Homo sapiens
atgatccactcctgt

SEQ ID NO: 61049 - DNA, 15 bp, Homo sapiens
catgatccactcctg

SEQ ID NO: 61050 - DNA, 15 bp, Homo sapiens
ccatgatccactcct

SEQ ID NO: 61051 - DNA, 15 bp, Homo sapiens
gccatgatccactcc

SEQ ID NO: 61052 - DNA, 15 bp, Homo sapiens
agccatgatccactc

SEQ ID NO: 61053 - DNA, 15 bp, Homo sapiens
cagccatgatccact

SEQ ID NO: 61054 - DNA, 15 bp, Homo sapiens
gcagccatgatccac

SEQ ID NO: 61055 - DNA, 15 bp, Homo sapiens
agcagccatgatcca

SEQ ID NO: 61056 - DNA, 15 bp, Homo sapiens
cagcagccatgatcc

SEQ ID NO: 61057 - DNA, 15 bp, Homo sapiens
acagcagccatgatc

SEQ ID NO: 61058 - DNA, 15 bp, Homo sapiens
aacagcagccatgat

SEQ ID NO: 61059 - DNA, 15 bp, Homo sapiens
aaacagcagccatga

SEQ ID NO: 61060 - DNA, 15 bp, Homo sapiens
gaaacagcagccatg

SEQ ID NO: 61061 - DNA, 15 bp, Homo sapiens
ggaaacagcagccat

SEQ ID NO: 61062 - DNA, 15 bp, Homo sapiens
tggaaacagcagcca

SEQ ID NO: 61063 - DNA, 15 bp, Homo sapiens
gtggaaacagcagcc

SEQ ID NO: 61064 - DNA, 15 bp, Homo sapiens
agtggaaacagcagc

SEQ ID NO: 61065 - DNA, 15 bp, Homo sapiens
aagtggaaacagcag

SEQ ID NO: 61066 - DNA, 15 bp, Homo sapiens
gaagtggaaacagca

SEQ ID NO: 61067 - DNA, 15 bp, Homo sapiens
agaagtggaaacagc

SEQ ID NO: 61068 - DNA, 15 bp, Homo sapiens
gagaagtggaaacag

SEQ ID NO: 61069 - DNA, 15 bp, Homo sapiens
agagaagtggaaaca

SEQ ID NO: 61070 - DNA, 15 bp, Homo sapiens
gagagaagtggaaac

SEQ ID NO: 61071 - DNA, 15 bp, Homo sapiens
agagagaagtggaaa

SEQ ID NO: 61072 - DNA, 15 bp, Homo sapiens
cagagagaagtggaa

SEQ ID NO: 61073 - DNA, 15 bp, Homo sapiens
ccagagagaagtgga

SEQ ID NO: 61074 - DNA, 15 bp, Homo sapiens
gccagagagaagtgg

SEQ ID NO: 61075 - DNA, 15 bp, Homo sapiens
agccagagagaagtg

SEQ ID NO: 61076 - DNA, 15 bp, Homo sapiens
aagccagagagaagt

SEQ ID NO: 61077 - DNA, 15 bp, Homo sapiens
gaagccagagagaag

SEQ ID NO: 61078 - DNA, 15 bp, Homo sapiens
ggaagccagagagaa

SEQ ID NO: 61079 - DNA, 15 bp, Homo sapiens
gggaagccagagaga

SEQ ID NO: 61080 - DNA, 15 bp, Homo sapiens
tgggaagccagagag

SEQ ID NO: 61081 - DNA, 15 bp, Homo sapiens
ctgggaagccagaga

SEQ ID NO: 61082 - DNA, 15 bp, Homo sapiens
gctgggaagccagag

SEQ ID NO: 61083 - DNA, 15 bp, Homo sapiens
agctgggaagccaga

SEQ ID NO: 61084 - DNA, 15 bp, Homo sapiens
aagctgggaagccag

SEQ ID NO: 61085 - DNA, 15 bp, Homo sapiens
taagctgggaagcca

SEQ ID NO: 61086 - DNA, 15 bp, Homo sapiens
ataagctgggaagcc

SEQ ID NO: 61087 - DNA, 15 bp, Homo sapiens
cataagctgggaagc

SEQ ID NO: 61088 - DNA, 15 bp, Homo sapiens
tcataagctgggaag

SEQ ID NO: 61089 - DNA, 15 bp, Homo sapiens
gtcataagctgggaa

SEQ ID NO: 61090 - DNA, 15 bp, Homo sapiens
agtcataagctggga

SEQ ID NO: 61091 - DNA, 15 bp, Homo sapiens
cagtcataagctggg

SEQ ID NO: 61092 - DNA, 15 bp, Homo sapiens
acagtcataagctgg

SEQ ID NO: 61093 - DNA, 15 bp, Homo sapiens
cacagtcataagctg

SEQ ID NO: 61094 - DNA, 15 bp, Homo sapiens
acacagtcataagct

SEQ ID NO: 61095 - DNA, 15 bp, Homo sapiens
tacacagtcataagc

SEQ ID NO: 61096 - DNA, 15 bp, Homo sapiens
atacacagtcataag

SEQ ID NO: 61097 - DNA, 15 bp, Homo sapiens
gatacacagtcataa

SEQ ID NO: 61098 - DNA, 15 bp, Homo sapiens
agatacacagtcata

SEQ ID NO: 61099 - DNA, 15 bp, Homo sapiens
aagatacacagtcat

SEQ ID NO: 61100 - DNA, 15 bp, Homo sapiens
taagatacacagtca

SEQ ID NO: 61101 - DNA, 15 bp, Homo sapiens
ctaagatacacagtc

SEQ ID NO: 61102 - DNA, 15 bp, Homo sapiens
actaagatacacagt

SEQ ID NO: 61103 - DNA, 15 bp, Homo sapiens
aactaagatacacag

SEQ ID NO: 61104 - DNA, 15 bp, Homo sapiens
caactaagatacaca

SEQ ID NO: 61105 - DNA, 15 bp, Homo sapiens
acaactaagatacac

SEQ ID NO: 61106 - DNA, 15 bp, Homo sapiens
gacaactaagataca

SEQ ID NO: 61107 - DNA, 15 bp, Homo sapiens
tgacaactaagatac

SEQ ID NO: 61108 - DNA, 15 bp, Homo sapiens
ttgacaactaagata

SEQ ID NO: 61109 - DNA, 15 bp, Homo sapiens
tttgacaactaagat

SEQ ID NO: 61110 - DNA, 15 bp, Homo sapiens
ctttgacaactaaga

SEQ ID NO: 61111 - DNA, 15 bp, Homo sapiens
gctttgacaactaag

SEQ ID NO: 61112 - DNA, 15 bp, Homo sapiens
ggctttgacaactaa

SEQ ID NO: 61113 - DNA, 15 bp, Homo sapiens
aggctttgacaacta

SEQ ID NO: 61114 - DNA, 15 bp, Homo sapiens
aaggctttgacaact

SEQ ID NO: 61115 - DNA, 15 bp, Homo sapiens
gaaggctttgacaac

SEQ ID NO: 61116 - DNA, 15 bp, Homo sapiens
ggaaggctttgacaa

SEQ ID NO: 61117 - DNA, 15 bp, Homo sapiens
tggaaggctttgaca

SEQ ID NO: 61118 - DNA, 15 bp, Homo sapiens
ctggaaggctttgac

SEQ ID NO: 61119 - DNA, 15 bp, Homo sapiens
actggaaggctttga

SEQ ID NO: 61120 - DNA, 15 bp, Homo sapiens
aactggaaggctttg

SEQ ID NO: 61121 - DNA, 15 bp, Homo sapiens
gaactggaaggcttt

SEQ ID NO: 61122 - DNA, 15 bp, Homo sapiens
tgaactggaaggctt

SEQ ID NO: 61123 - DNA, 15 bp, Homo sapiens
atgaactggaaggct

SEQ ID NO: 61124 - DNA, 15 bp, Homo sapiens
gatgaactggaaggc

SEQ ID NO: 61125 - DNA, 15 bp, Homo sapiens
ggatgaactggaagg

SEQ ID NO: 61126 - DNA, 15 bp, Homo sapiens
aggatgaactggaag

SEQ ID NO: 61127 - DNA, 15 bp, Homo sapiens
gaggatgaactggaa

SEQ ID NO: 61128 - DNA, 15 bp, Homo sapiens
tgaggatgaactgga

SEQ ID NO: 61129 - DNA, 15 bp, Homo sapiens
gtgaggatgaactgg

SEQ ID NO: 61130 - DNA, 15 bp, Homo sapiens
ggtgaggatgaactg

SEQ ID NO: 61131 - DNA, 15 bp, Homo sapiens
aggtgaggatgaact

SEQ ID NO: 61132 - DNA, 15 bp, Homo sapiens
taggtgaggatgaac

SEQ ID NO: 61133 - DNA, 15 bp, Homo sapiens
gtaggtgaggatgaa

SEQ ID NO: 61134 - DNA, 15 bp, Homo sapiens
tgtaggtgaggatga

SEQ ID NO: 61135 - DNA, 15 bp, Homo sapiens
ctgtaggtgaggatg

SEQ ID NO: 61136 - DNA, 15 bp, Homo sapiens
gctgtaggtgaggat

SEQ ID NO: 61137 - DNA, 15 bp, Homo sapiens
agctgtaggtgagga

SEQ ID NO: 61138 - DNA, 15 bp, Homo sapiens
aagctgtaggtgagg

SEQ ID NO: 61139 - DNA, 15 bp, Homo sapiens
caagctgtaggtgag

SEQ ID NO: 61140 - DNA, 15 bp, Homo sapiens
tcaagctgtaggtga

SEQ ID NO: 61141 - DNA, 15 bp, Homo sapiens
gtcaagctgtaggtg

SEQ ID NO: 61142 - DNA, 15 bp, Homo sapiens
agtcaagctgtaggt

SEQ ID NO: 61143 - DNA, 15 bp, Homo sapiens
aagtcaagctgtagg

SEQ ID NO: 61144 - DNA, 15 bp, Homo sapiens
gaagtcaagctgtag

SEQ ID NO: 61145 - DNA, 15 bp, Homo sapiens
ggaagtcaagctgta

SEQ ID NO: 61146 - DNA, 15 bp, Homo sapiens
gggaagtcaagctgt

SEQ ID NO: 61147 - DNA, 15 bp, Homo sapiens
tgggaagtcaagctg

SEQ ID NO: 61148 - DNA, 15 bp, Homo sapiens
ttgggaagtcaagct

SEQ ID NO: 61149 - DNA, 15 bp, Homo sapiens
cttgggaagtcaagc

SEQ ID NO: 61150 - DNA, 15 bp, Homo sapiens
ccttgggaagtcaag

SEQ ID NO: 61151 - DNA, 15 bp, Homo sapiens
cccttgggaagtcaa

SEQ ID NO: 61152 - DNA, 15 bp, Homo sapiens
gcccttgggaagtca

SEQ ID NO: 61153 - DNA, 15 bp, Homo sapiens
ggcccttgggaagtc

SEQ ID NO: 61154 - DNA, 15 bp, Homo sapiens
gggcccttgggaagt

SEQ ID NO: 61155 - DNA, 15 bp, Homo sapiens
tgggcccttgggaag

SEQ ID NO: 61156 - DNA, 15 bp, Homo sapiens
atgggcccttgggaa

SEQ ID NO: 61157 - DNA, 15 bp, Homo sapiens
catgggcccttggga

SEQ ID NO: 61158 - DNA, 15 bp, Homo sapiens
gcatgggcccttggg

SEQ ID NO: 61159 - DNA, 15 bp, Homo sapiens
ggcatgggcccttgg

SEQ ID NO: 61160 - DNA, 15 bp, Homo sapiens
tggcatgggcccttg

SEQ ID NO: 61161 - DNA, 15 bp, Homo sapiens
ctggcatgggccctt

SEQ ID NO: 61162 - DNA, 15 bp, Homo sapiens
gctggcatgggccct

SEQ ID NO: 61163 - DNA, 15 bp, Homo sapiens
agctggcatgggccc

SEQ ID NO: 61164 - DNA, 15 bp, Homo sapiens
gagctggcatgggcc

SEQ ID NO: 61165 - DNA, 15 bp, Homo sapiens
ggagctggcatgggc

SEQ ID NO: 61166 - DNA, 15 bp, Homo sapiens
gggagctggcatggg

SEQ ID NO: 61167 - DNA, 15 bp, Homo sapiens
agggagctggcatgg

SEQ ID NO: 61168 - DNA, 15 bp, Homo sapiens
cagggagctggcatg

SEQ ID NO: 61169 - DNA, 15 bp, Homo sapiens
acagggagctggcat

SEQ ID NO: 61170 - DNA, 15 bp, Homo sapiens
gacagggagctggca

SEQ ID NO: 61171 - DNA, 15 bp, Homo sapiens
agacagggagctggc

SEQ ID NO: 61172 - DNA, 15 bp, Homo sapiens
tagacagggagctgg

SEQ ID NO: 61173 - DNA, 15 bp, Homo sapiens
gtagacagggagctg

SEQ ID NO: 61174 - DNA, 15 bp, Homo sapiens
ggtagacagggagct

SEQ ID NO: 61175 - DNA, 15 bp, Homo sapiens
aggtagacagggagc

SEQ ID NO: 61176 - DNA, 15 bp, Homo sapiens
caggtagacagggag

SEQ ID NO: 61177 - DNA, 15 bp, Homo sapiens
gcaggtagacaggga

SEQ ID NO: 61178 - DNA, 15 bp, Homo sapiens
ggcaggtagacaggg

SEQ ID NO: 61179 - DNA, 15 bp, Homo sapiens
tggcaggtagacagg

SEQ ID NO: 61180 - DNA, 15 bp, Homo sapiens
ctggcaggtagacag

SEQ ID NO: 61181 - DNA, 15 bp, Homo sapiens
actggcaggtagaca

SEQ ID NO: 61182 - DNA, 15 bp, Homo sapiens
cactggcaggtagac

SEQ ID NO: 61183 - DNA, 15 bp, Homo sapiens
tcactggcaggtaga

SEQ ID NO: 61184 - DNA, 15 bp, Homo sapiens
ctcactggcaggtag

SEQ ID NO: 61185 - DNA, 15 bp, Homo sapiens
actcactggcaggta

SEQ ID NO: 61186 - DNA, 15 bp, Homo sapiens
aactcactggcaggt

SEQ ID NO: 61187 - DNA, 15 bp, Homo sapiens
caactcactggcagg

SEQ ID NO: 61188 - DNA, 15 bp, Homo sapiens
tcaactcactggcag

SEQ ID NO: 61189 - DNA, 15 bp, Homo sapiens
atcaactcactggca

SEQ ID NO: 61190 - DNA, 15 bp, Homo sapiens
catcaactcactggc

SEQ ID NO: 61191 - DNA, 15 bp, Homo sapiens
tcatcaactcactgg

SEQ ID NO: 61192 - DNA, 15 bp, Homo sapiens
ctcatcaactcactg

SEQ ID NO: 61193 - DNA, 15 bp, Homo sapiens
actcatcaactcact

SEQ ID NO: 61194 - DNA, 15 bp, Homo sapiens
gactcatcaactcac

SEQ ID NO: 61195 - DNA, 15 bp, Homo sapiens
agactcatcaactca

SEQ ID NO: 61196 - DNA, 15 bp, Homo sapiens
gagactcatcaactc

SEQ ID NO: 61197 - DNA, 15 bp, Homo sapiens
cgagactcatcaact

SEQ ID NO: 61198 - DNA, 15 bp, Homo sapiens
ccgagactcatcaac

SEQ ID NO: 61199 - DNA, 15 bp, Homo sapiens
accgagactcatcaa

SEQ ID NO: 61200 - DNA, 15 bp, Homo sapiens
caccgagactcatca

SEQ ID NO: 61201 - DNA, 15 bp, Homo sapiens
acaccgagactcatc

SEQ ID NO: 61202 - DNA, 15 bp, Homo sapiens
aacaccgagactcat

SEQ ID NO: 61203 - DNA, 15 bp, Homo sapiens
taacaccgagactca

SEQ ID NO: 61204 - DNA, 15 bp, Homo sapiens
ctaacaccgagactc

SEQ ID NO: 61205 - DNA, 15 bp, Homo sapiens
actaacaccgagact

SEQ ID NO: 61206 - DNA, 15 bp, Homo sapiens
tactaacaccgagac

SEQ ID NO: 61207 - DNA, 15 bp, Homo sapiens
ctactaacaccgaga

SEQ ID NO: 61208 - DNA, 15 bp, Homo sapiens
actactaacaccgag

SEQ ID NO: 61209 - DNA, 15 bp, Homo sapiens
tactactaacaccga

SEQ ID NO: 61210 - DNA, 15 bp, Homo sapiens
ttactactaacaccg

SEQ ID NO: 61211 - DNA, 15 bp, Homo sapiens
tttactactaacacc

SEQ ID NO: 61212 - DNA, 15 bp, Homo sapiens
ctttactactaacac

SEQ ID NO: 61213 - DNA, 15 bp, Homo sapiens
cctttactactaaca

SEQ ID NO: 61214 - DNA, 15 bp, Homo sapiens
gcctttactactaac

SEQ ID NO: 61215 - DNA, 15 bp, Homo sapiens
tgcctttactactaa

SEQ ID NO: 61216 - DNA, 15 bp, Homo sapiens
ctgcctttactacta

SEQ ID NO: 61217 - DNA, 15 bp, Homo sapiens
cctgcctttactact

SEQ ID NO: 61218 - DNA, 15 bp, Homo sapiens
gcctgcctttactac

SEQ ID NO: 61219 - DNA, 15 bp, Homo sapiens
cgcctgcctttacta

SEQ ID NO: 61220 - DNA, 15 bp, Homo sapiens
ccgcctgcctttact

SEQ ID NO: 61221 - DNA, 15 bp, Homo sapiens
cccgcctgcctttac

SEQ ID NO: 61222 - DNA, 15 bp, Homo sapiens
tcccgcctgccttta

SEQ ID NO: 61223 - DNA, 15 bp, Homo sapiens
ttcccgcctgccttt

SEQ ID NO: 61224 - DNA, 15 bp, Homo sapiens
cttcccgcctgcctt

SEQ ID NO: 61225 - DNA, 15 bp, Homo sapiens
gcttcccgcctgcct

SEQ ID NO: 61226 - DNA, 15 bp, Homo sapiens
tgcttcccgcctgcc

SEQ ID NO: 61227 - DNA, 15 bp, Homo sapiens
ttgcttcccgcctgc

SEQ ID NO: 61228 - DNA, 15 bp, Homo sapiens
cttgcttcccgcctg

SEQ ID NO: 61229 - DNA, 15 bp, Homo sapiens
gcttgcttcccgcct

SEQ ID NO: 61230 - DNA, 15 bp, Homo sapiens
tgcttgcttcccgcc

SEQ ID NO: 61231 - DNA, 15 bp, Homo sapiens
ctgcttgcttcccgc

SEQ ID NO: 61232 - DNA, 15 bp, Homo sapiens
tctgcttgcttcccg

SEQ ID NO: 61233 - DNA, 15 bp, Homo sapiens
ttctgcttgcttccc

SEQ ID NO: 61234 - DNA, 15 bp, Homo sapiens
cttctgcttgcttcc

SEQ ID NO: 61235 - DNA, 15 bp, Homo sapiens
acttctgcttgcttc

SEQ ID NO: 61236 - DNA, 15 bp, Homo sapiens
cacttctgcttgctt

SEQ ID NO: 61237 - DNA, 15 bp, Homo sapiens
gcacttctgcttgct

SEQ ID NO: 61238 - DNA, 15 bp, Homo sapiens
agcacttctgcttgc

SEQ ID NO: 61239 - DNA, 15 bp, Homo sapiens
tagcacttctgcttg

SEQ ID NO: 61240 - DNA, 15 bp, Homo sapiens
gtagcacttctgctt

SEQ ID NO: 61241 - DNA, 15 bp, Homo sapiens
agtagcacttctgct

SEQ ID NO: 61242 - DNA, 15 bp, Homo sapiens
cagtagcacttctgc

SEQ ID NO: 61243 - DNA, 15 bp, Homo sapiens
ccagtagcacttctg

SEQ ID NO: 61244 - DNA, 15 bp, Homo sapiens
cccagtagcacttct

SEQ ID NO: 61245 - DNA, 15 bp, Homo sapiens
gcccagtagcacttc

SEQ ID NO: 61246 - DNA, 15 bp, Homo sapiens
ggcccagtagcactt

SEQ ID NO: 61247 - DNA, 15 bp, Homo sapiens
aggcccagtagcact

SEQ ID NO: 61248 - DNA, 15 bp, Homo sapiens
aaggcccagtagcac

SEQ ID NO: 61249 - DNA, 15 bp, Homo sapiens
caaggcccagtagca

SEQ ID NO: 61250 - DNA, 15 bp, Homo sapiens
tcaaggcccagtagc

SEQ ID NO: 61251 - DNA, 15 bp, Homo sapiens
ctcaaggcccagtag

SEQ ID NO: 61252 - DNA, 15 bp, Homo sapiens
cctcaaggcccagta

SEQ ID NO: 61253 - DNA, 15 bp, Homo sapiens
ccctcaaggcccagt

SEQ ID NO: 61254 - DNA, 15 bp, Homo sapiens
accctcaaggcccag

SEQ ID NO: 61255 - DNA, 15 bp, Homo sapiens
taccctcaaggccca

SEQ ID NO: 61256 - DNA, 15 bp, Homo sapiens
ttaccctcaaggccc

SEQ ID NO: 61257 - DNA, 15 bp, Homo sapiens
cttaccctcaaggcc

SEQ ID NO: 61258 - DNA, 15 bp, Homo sapiens
gcttaccctcaaggc

SEQ ID NO: 61259 - DNA, 15 bp, Homo sapiens
ggcttaccctcaagg

SEQ ID NO: 61260 - DNA, 15 bp, Homo sapiens
tggcttaccctcaag

SEQ ID NO: 61261 - DNA, 15 bp, Homo sapiens
ctggcttaccctcaa

SEQ ID NO: 61262 - DNA, 15 bp, Homo sapiens
cctggcttaccctca

SEQ ID NO: 61263 - DNA, 15 bp, Homo sapiens
gcctggcttaccctc

SEQ ID NO: 61264 - DNA, 15 bp, Homo sapiens
ggcctggcttaccct

SEQ ID NO: 61265 - DNA, 15 bp, Homo sapiens
aggcctggcttaccc

SEQ ID NO: 61266 - DNA, 15 bp, Homo sapiens
gaggcctggcttacc

SEQ ID NO: 61267 - DNA, 15 bp, Homo sapiens
tgaggcctggcttac

SEQ ID NO: 61268 - DNA, 15 bp, Homo sapiens
ctgaggcctggctta

SEQ ID NO: 61269 - DNA, 15 bp, Homo sapiens
gctgaggcctggctt

SEQ ID NO: 61270 - DNA, 15 bp, Homo sapiens
ggctgaggcctggct

SEQ ID NO: 61271 - DNA, 15 bp, Homo sapiens
aggctgaggcctggc

SEQ ID NO: 61272 - DNA, 15 bp, Homo sapiens
aaggctgaggcctgg

SEQ ID NO: 61273 - DNA, 15 bp, Homo sapiens
gaaggctgaggcctg

SEQ ID NO: 61274 - DNA, 15 bp, Homo sapiens
agaaggctgaggcct

SEQ ID NO: 61275 - DNA, 15 bp, Homo sapiens
cagaaggctgaggcc

SEQ ID NO: 61276 - DNA, 15 bp, Homo sapiens
tcagaaggctgaggc

SEQ ID NO: 61277 - DNA, 15 bp, Homo sapiens
gtcagaaggctgagg

SEQ ID NO: 61278 - DNA, 15 bp, Homo sapiens
ggtcagaaggctgag

SEQ ID NO: 61279 - DNA, 15 bp, Homo sapiens
gggtcagaaggctga

SEQ ID NO: 61280 - DNA, 15 bp, Homo sapiens
ggggtcagaaggctg

SEQ ID NO: 61281 - DNA, 15 bp, Homo sapiens
tggggtcagaaggct

SEQ ID NO: 61282 - DNA, 15 bp, Homo sapiens
atggggtcagaaggc

SEQ ID NO: 61283 - DNA, 15 bp, Homo sapiens
gatggggtcagaagg

SEQ ID NO: 61284 - DNA, 15 bp, Homo sapiens
tgatggggtcagaag

SEQ ID NO: 61285 - DNA, 15 bp, Homo sapiens
gtgatggggtcagaa

SEQ ID NO: 61286 - DNA, 15 bp, Homo sapiens
agtgatggggtcaga

SEQ ID NO: 61287 - DNA, 15 bp, Homo sapiens
tagtgatggggtcag

SEQ ID NO: 61288 - DNA, 15 bp, Homo sapiens
ttagtgatggggtca

SEQ ID NO: 61289 - DNA, 15 bp, Homo sapiens
attagtgatggggtc

SEQ ID NO: 61290 - DNA, 15 bp, Homo sapiens
cattagtgatggggt

SEQ ID NO: 61291 - DNA, 15 bp, Homo sapiens
ccattagtgatgggg

SEQ ID NO: 61292 - DNA, 15 bp, Homo sapiens
cccattagtgatggg

SEQ ID NO: 61293 - DNA, 15 bp, Homo sapiens
acccattagtgatgg

SEQ ID NO: 61294 - DNA, 15 bp, Homo sapiens
aacccattagtgatg

SEQ ID NO: 61295 - DNA, 15 bp, Homo sapiens
taacccattagtgat

SEQ ID NO: 61296 - DNA, 15 bp, Homo sapiens
ttaacccattagtga

SEQ ID NO: 61297 - DNA, 15 bp, Homo sapiens
attaacccattagtg

SEQ ID NO: 61298 - DNA, 15 bp, Homo sapiens
tattaacccattagt

SEQ ID NO: 61299 - DNA, 15 bp, Homo sapiens
ctattaacccattag

SEQ ID NO: 61300 - DNA, 15 bp, Homo sapiens
cctattaacccatta

SEQ ID NO: 61301 - DNA, 15 bp, Homo sapiens
tcctattaacccatt

SEQ ID NO: 61302 - DNA, 15 bp, Homo sapiens
ttcctattaacccat

SEQ ID NO: 61303 - DNA, 15 bp, Homo sapiens
tttcctattaaccca

SEQ ID NO: 61304 - DNA, 15 bp, Homo sapiens
ttttcctattaaccc

SEQ ID NO: 61305 - DNA, 15 bp, Homo sapiens
cttttcctattaacc

SEQ ID NO: 61306 - DNA, 15 bp, Homo sapiens
gcttttcctattaac

SEQ ID NO: 61307 - DNA, 15 bp, Homo sapiens
tgcttttcctattaa

SEQ ID NO: 61308 - DNA, 15 bp, Homo sapiens
ctgcttttcctatta

SEQ ID NO: 61309 - DNA, 15 bp, Homo sapiens
actgcttttcctatt

SEQ ID NO: 61310 - DNA, 15 bp, Homo sapiens
tactgcttttcctat

SEQ ID NO: 61311 - DNA, 15 bp, Homo sapiens
atactgcttttccta

SEQ ID NO: 61312 - DNA, 15 bp, Homo sapiens
gatactgcttttcct

SEQ ID NO: 61313 - DNA, 15 bp, Homo sapiens
ggatactgcttttcc

SEQ ID NO: 61314 - DNA, 15 bp, Homo sapiens
tggatactgcttttc

SEQ ID NO: 61315 - DNA, 15 bp, Homo sapiens
atggatactgctttt

SEQ ID NO: 61316 - DNA, 15 bp, Homo sapiens
gatggatactgcttt

SEQ ID NO: 61317 - DNA, 15 bp, Homo sapiens
agatggatactgctt

SEQ ID NO: 61318 - DNA, 15 bp, Homo sapiens
tagatggatactgct

SEQ ID NO: 61319 - DNA, 15 bp, Homo sapiens
ctagatggatactgc

SEQ ID NO: 61320 - DNA, 15 bp, Homo sapiens
actagatggatactg

SEQ ID NO: 61321 - DNA, 15 bp, Homo sapiens
tactagatggatact

SEQ ID NO: 61322 - DNA, 15 bp, Homo sapiens
gtactagatggatac

SEQ ID NO: 61323 - DNA, 15 bp, Homo sapiens
tgtactagatggata

SEQ ID NO: 61324 - DNA, 15 bp, Homo sapiens
ctgtactagatggat

SEQ ID NO: 61325 - DNA, 15 bp, Homo sapiens
gctgtactagatgga

SEQ ID NO: 61326 - DNA, 15 bp, Homo sapiens
ggctgtactagatgg

SEQ ID NO: 61327 - DNA, 15 bp, Homo sapiens
aggctgtactagatg

SEQ ID NO: 61328 - DNA, 15 bp, Homo sapiens
caggctgtactagat

SEQ ID NO: 61329 - DNA, 15 bp, Homo sapiens
gcaggctgtactaga

SEQ ID NO: 61330 - DNA, 15 bp, Homo sapiens
ggcaggctgtactag

SEQ ID NO: 61331 - DNA, 15 bp, Homo sapiens
aggcaggctgtacta

SEQ ID NO: 61332 - DNA, 15 bp, Homo sapiens
aaggcaggctgtact

SEQ ID NO: 61333 - DNA, 15 bp, Homo sapiens
aaaggcaggctgtac

SEQ ID NO: 61334 - DNA, 15 bp, Homo sapiens
aaaaggcaggctgta

SEQ ID NO: 61335 - DNA, 15 bp, Homo sapiens
gaaaaggcaggctgt

SEQ ID NO: 61336 - DNA, 15 bp, Homo sapiens
tgaaaaggcaggctg

SEQ ID NO: 61337 - DNA, 15 bp, Homo sapiens
ctgaaaaggcaggct

SEQ ID NO: 61338 - DNA, 15 bp, Homo sapiens
cctgaaaaggcaggc

SEQ ID NO: 61339 - DNA, 15 bp, Homo sapiens
tcctgaaaaggcagg

SEQ ID NO: 61340 - DNA, 15 bp, Homo sapiens
ttcctgaaaaggcag

SEQ ID NO: 61341 - DNA, 15 bp, Homo sapiens
attcctgaaaaggca

SEQ ID NO: 61342 - DNA, 15 bp, Homo sapiens
tattcctgaaaaggc

SEQ ID NO: 61343 - DNA, 15 bp, Homo sapiens
ctattcctgaaaagg

SEQ ID NO: 61344 - DNA, 15 bp, Homo sapiens
actattcctgaaaag

SEQ ID NO: 61345 - DNA, 15 bp, Homo sapiens
cactattcctgaaaa

SEQ ID NO: 61346 - DNA, 15 bp, Homo sapiens
tcactattcctgaaa

SEQ ID NO: 61347 - DNA, 15 bp, Homo sapiens
ctcactattcctgaa

SEQ ID NO: 61348 - DNA, 15 bp, Homo sapiens
actcactattcctga

SEQ ID NO: 61349 - DNA, 15 bp, Homo sapiens
tactcactattcctg

SEQ ID NO: 61350 - DNA, 15 bp, Homo sapiens
ttactcactattcct

SEQ ID NO: 61351 - DNA, 15 bp, Homo sapiens
tttactcactattcc

SEQ ID NO: 61352 - DNA, 15 bp, Homo sapiens
ttttactcactattc

SEQ ID NO: 61353 - DNA, 15 bp, Homo sapiens
cttttactcactatt

SEQ ID NO: 61354 - DNA, 15 bp, Homo sapiens
gcttttactcactat

SEQ ID NO: 61355 - DNA, 15 bp, Homo sapiens
tgcttttactcacta

SEQ ID NO: 61356 - DNA, 15 bp, Homo sapiens
ttgcttttactcact

SEQ ID NO: 61357 - DNA, 15 bp, Homo sapiens
tttgcttttactcac

SEQ ID NO: 61358 - DNA, 15 bp, Homo sapiens
ctttgcttttactca

SEQ ID NO: 61359 - DNA, 15 bp, Homo sapiens
tctttgcttttactc

SEQ ID NO: 61360 - DNA, 15 bp, Homo sapiens
atctttgcttttact

SEQ ID NO: 61361 - DNA, 15 bp, Homo sapiens
catctttgcttttac

SEQ ID NO: 61362 - DNA, 15 bp, Homo sapiens
tcatctttgctttta

SEQ ID NO: 61363 - DNA, 15 bp, Homo sapiens
gtcatctttgctttt

SEQ ID NO: 61364 - DNA, 15 bp, Homo sapiens
agtcatctttgcttt

SEQ ID NO: 61365 - DNA, 15 bp, Homo sapiens
tagtcatctttgctt

SEQ ID NO: 61366 - DNA, 15 bp, Homo sapiens
ttagtcatctttgct

SEQ ID NO: 61367 - DNA, 15 bp, Homo sapiens
tttagtcatctttgc

SEQ ID NO: 61368 - DNA, 15 bp, Homo sapiens
ttttagtcatctttg

SEQ ID NO: 61369 - DNA, 15 bp, Homo sapiens
attttagtcatcttt

SEQ ID NO: 61370 - DNA, 15 bp, Homo sapiens
tattttagtcatctt

SEQ ID NO: 61371 - DNA, 15 bp, Homo sapiens
gtattttagtcatct

SEQ ID NO: 61372 - DNA, 15 bp, Homo sapiens
tgtattttagtcatc

SEQ ID NO: 61373 - DNA, 15 bp, Homo sapiens
atgtattttagtcat

SEQ ID NO: 61374 - DNA, 15 bp, Homo sapiens
aatgtattttagtca

SEQ ID NO: 61375 - DNA, 15 bp, Homo sapiens
taatgtattttagtc

SEQ ID NO: 61376 - DNA, 15 bp, Homo sapiens
ttaatgtattttagt

SEQ ID NO: 61377 - DNA, 15 bp, Homo sapiens
tttaatgtattttag

SEQ ID NO: 61378 - DNA, 15 bp, Homo sapiens
ctttaatgtatttta

SEQ ID NO: 61379 - DNA, 15 bp, Homo sapiens
actttaatgtatttt

SEQ ID NO: 61380 - DNA, 15 bp, Homo sapiens
aactttaatgtattt

SEQ ID NO: 61381 - DNA, 15 bp, Homo sapiens
aaactttaatgtatt

SEQ ID NO: 61382 - DNA, 15 bp, Homo sapiens
aaaactttaatgtat

SEQ ID NO: 61383 - DNA, 15 bp, Homo sapiens
gaaaactttaatgta

SEQ ID NO: 61384 - DNA, 15 bp, Homo sapiens
agaaaactttaatgt

SEQ ID NO: 61385 - DNA, 15 bp, Homo sapiens
cagaaaactttaatg

SEQ ID NO: 61386 - DNA, 15 bp, Homo sapiens
acagaaaactttaat

SEQ ID NO: 61387 - DNA, 15 bp, Homo sapiens
tacagaaaactttaa

SEQ ID NO: 61388 - DNA, 15 bp, Homo sapiens
ttacagaaaacttta

SEQ ID NO: 61389 - DNA, 15 bp, Homo sapiens
attacagaaaacttt

SEQ ID NO: 61390 - DNA, 15 bp, Homo sapiens
aattacagaaaactt

SEQ ID NO: 61391 - DNA, 15 bp, Homo sapiens
caattacagaaaact

SEQ ID NO: 61392 - DNA, 15 bp, Homo sapiens
acaattacagaaaac

SEQ ID NO: 61393 - DNA, 15 bp, Homo sapiens
gacaattacagaaaa

SEQ ID NO: 61394 - DNA, 15 bp, Homo sapiens
agacaattacagaaa

SEQ ID NO: 61395 - DNA, 15 bp, Homo sapiens
gagacaattacagaa

SEQ ID NO: 61396 - DNA, 15 bp, Homo sapiens
agagacaattacaga

SEQ ID NO: 61397 - DNA, 15 bp, Homo sapiens
tagagacaattacag

SEQ ID NO: 61398 - DNA, 15 bp, Homo sapiens
ttagagacaattaca

SEQ ID NO: 61399 - DNA, 15 bp, Homo sapiens
cttagagacaattac

SEQ ID NO: 61400 - DNA, 15 bp, Homo sapiens
ccttagagacaatta

SEQ ID NO: 61401 - DNA, 15 bp, Homo sapiens
accttagagacaatt

SEQ ID NO: 61402 - DNA, 15 bp, Homo sapiens
gaccttagagacaat

SEQ ID NO: 61403 - DNA, 15 bp, Homo sapiens
agaccttagagacaa

SEQ ID NO: 61404 - DNA, 15 bp, Homo sapiens
gagaccttagagaca

SEQ ID NO: 61405 - DNA, 15 bp, Homo sapiens
ggagaccttagagac

SEQ ID NO: 61406 - DNA, 15 bp, Homo sapiens
gggagaccttagaga

SEQ ID NO: 61407 - DNA, 15 bp, Homo sapiens
tgggagaccttagag

SEQ ID NO: 61408 - DNA, 15 bp, Homo sapiens
ttgggagaccttaga

SEQ ID NO: 61409 - DNA, 15 bp, Homo sapiens
gttgggagaccttag

SEQ ID NO: 61410 - DNA, 15 bp, Homo sapiens
tgttgggagacctta

SEQ ID NO: 61411 - DNA, 15 bp, Homo sapiens
ttgttgggagacctt

SEQ ID NO: 61412 - DNA, 15 bp, Homo sapiens
tttgttgggagacct

SEQ ID NO: 61413 - DNA, 15 bp, Homo sapiens
gtttgttgggagacc

SEQ ID NO: 61414 - DNA, 15 bp, Homo sapiens
tgtttgttgggagac

SEQ ID NO: 61415 - DNA, 15 bp, Homo sapiens
atgtttgttgggaga

SEQ ID NO: 61416 - DNA, 15 bp, Homo sapiens
tatgtttgttgggag

SEQ ID NO: 61417 - DNA, 15 bp, Homo sapiens
atatgtttgttggga

SEQ ID NO: 61418 - DNA, 15 bp, Homo sapiens
tatatgtttgttggg

SEQ ID NO: 61419 - DNA, 15 bp, Homo sapiens
gtatatgtttgttgg

SEQ ID NO: 61420 - DNA, 15 bp, Homo sapiens
ggtatatgtttgttg

SEQ ID NO: 61421 - DNA, 15 bp, Homo sapiens
gggtatatgtttgtt

SEQ ID NO: 61422 - DNA, 15 bp, Homo sapiens
ggggtatatgtttgt

SEQ ID NO: 61423 - DNA, 15 bp, Homo sapiens
tggggtatatgtttg

SEQ ID NO: 61424 - DNA, 15 bp, Homo sapiens
atggggtatatgttt

SEQ ID NO: 61425 - DNA, 15 bp, Homo sapiens
gatggggtatatgtt

SEQ ID NO: 61426 - DNA, 15 bp, Homo sapiens
agatggggtatatgt

SEQ ID NO: 61427 - DNA, 15 bp, Homo sapiens
cagatggggtatatg

SEQ ID NO: 61428 - DNA, 15 bp, Homo sapiens
acagatggggtatat

SEQ ID NO: 61429 - DNA, 15 bp, Homo sapiens
aacagatggggtata

SEQ ID NO: 61430 - DNA, 15 bp, Homo sapiens
aaacagatggggtat

SEQ ID NO: 61431 - DNA, 15 bp, Homo sapiens
gaaacagatggggta

SEQ ID NO: 61432 - DNA, 15 bp, Homo sapiens
tgaaacagatggggt

SEQ ID NO: 61433 - DNA, 15 bp, Homo sapiens
ttgaaacagatgggg

SEQ ID NO: 61434 - DNA, 15 bp, Homo sapiens
cttgaaacagatggg

SEQ ID NO: 61435 - DNA, 15 bp, Homo sapiens
gcttgaaacagatgg

SEQ ID NO: 61436 - DNA, 15 bp, Homo sapiens
agcttgaaacagatg

SEQ ID NO: 61437 - DNA, 15 bp, Homo sapiens
gagcttgaaacagat

SEQ ID NO: 61438 - DNA, 15 bp, Homo sapiens
agagcttgaaacaga

SEQ ID NO: 61439 - DNA, 15 bp, Homo sapiens
cagagcttgaaacag

SEQ ID NO: 61440 - DNA, 15 bp, Homo sapiens
gcagagcttgaaaca

SEQ ID NO: 61441 - DNA, 15 bp, Homo sapiens
tgcagagcttgaaac

SEQ ID NO: 61442 - DNA, 15 bp, Homo sapiens
atgcagagcttgaaa

SEQ ID NO: 61443 - DNA, 15 bp, Homo sapiens
tatgcagagcttgaa

SEQ ID NO: 61444 - DNA, 15 bp, Homo sapiens
ttatgcagagcttga

SEQ ID NO: 61445 - DNA, 15 bp, Homo sapiens
gttatgcagagcttg

SEQ ID NO: 61446 - DNA, 15 bp, Homo sapiens
ggttatgcagagctt

SEQ ID NO: 61447 - DNA, 15 bp, Homo sapiens
aggttatgcagagct

SEQ ID NO: 61448 - DNA, 15 bp, Homo sapiens
aaggttatgcagagc

SEQ ID NO: 61449 - DNA, 15 bp, Homo sapiens
aaaggttatgcagag

SEQ ID NO: 61450 - DNA, 15 bp, Homo sapiens
gaaaggttatgcaga

SEQ ID NO: 61451 - DNA, 15 bp, Homo sapiens
ggaaaggttatgcag

SEQ ID NO: 61452 - DNA, 15 bp, Homo sapiens
gggaaaggttatgca

SEQ ID NO: 61453 - DNA, 15 bp, Homo sapiens
tgggaaaggttatgc

SEQ ID NO: 61454 - DNA, 15 bp, Homo sapiens
ctgggaaaggttatg

SEQ ID NO: 61455 - DNA, 15 bp, Homo sapiens
tctgggaaaggttat

SEQ ID NO: 61456 - DNA, 15 bp, Homo sapiens
ttctgggaaaggtta

SEQ ID NO: 61457 - DNA, 15 bp, Homo sapiens
cttctgggaaaggtt

SEQ ID NO: 61458 - DNA, 15 bp, Homo sapiens
acttctgggaaaggt

SEQ ID NO: 61459 - DNA, 15 bp, Homo sapiens
gacttctgggaaagg

SEQ ID NO: 61460 - DNA, 15 bp, Homo sapiens
tgacttctgggaaag

SEQ ID NO: 61461 - DNA, 15 bp, Homo sapiens
ttgacttctgggaaa

SEQ ID NO: 61462 - DNA, 15 bp, Homo sapiens
cttgacttctgggaa

SEQ ID NO: 61463 - DNA, 15 bp, Homo sapiens
acttgacttctggga

SEQ ID NO: 61464 - DNA, 15 bp, Homo sapiens
aacttgacttctggg

SEQ ID NO: 61465 - DNA, 15 bp, Homo sapiens
gaacttgacttctgg

SEQ ID NO: 61466 - DNA, 15 bp, Homo sapiens
tgaacttgacttctg

SEQ ID NO: 61467 - DNA, 15 bp, Homo sapiens
ctgaacttgacttct

SEQ ID NO: 61468 - DNA, 15 bp, Homo sapiens
cctgaacttgacttc

SEQ ID NO: 61469 - DNA, 15 bp, Homo sapiens
gcctgaacttgactt

SEQ ID NO: 61470 - DNA, 15 bp, Homo sapiens
ggcctgaacttgact

SEQ ID NO: 61471 - DNA, 15 bp, Homo sapiens
gggcctgaacttgac

SEQ ID NO: 61472 - DNA, 15 bp, Homo sapiens
agggcctgaacttga

SEQ ID NO: 61473 - DNA, 15 bp, Homo sapiens
cagggcctgaacttg

SEQ ID NO: 61474 - DNA, 15 bp, Homo sapiens
ccagggcctgaactt

SEQ ID NO: 61475 - DNA, 15 bp, Homo sapiens
gccagggcctgaact

SEQ ID NO: 61476 - DNA, 15 bp, Homo sapiens
ggccagggcctgaac

SEQ ID NO: 61477 - DNA, 15 bp, Homo sapiens
aggccagggcctgaa

SEQ ID NO: 61478 - DNA, 15 bp, Homo sapiens
gaggccagggcctga

SEQ ID NO: 61479 - DNA, 15 bp, Homo sapiens
tgaggccagggcctg

SEQ ID NO: 61480 - DNA, 15 bp, Homo sapiens
atgaggccagggcct

SEQ ID NO: 61481 - DNA, 15 bp, Homo sapiens
catgaggccagggcc

SEQ ID NO: 61482 - DNA, 15 bp, Homo sapiens
ccatgaggccagggc

SEQ ID NO: 61483 - DNA, 15 bp, Homo sapiens
accatgaggccaggg

SEQ ID NO: 61484 - DNA, 15 bp, Homo sapiens
caccatgaggccagg

SEQ ID NO: 61485 - DNA, 15 bp, Homo sapiens
gcaccatgaggccag

SEQ ID NO: 61486 - DNA, 15 bp, Homo sapiens
ggcaccatgaggcca

SEQ ID NO: 61487 - DNA, 15 bp, Homo sapiens
aggcaccatgaggcc

SEQ ID NO: 61488 - DNA, 15 bp, Homo sapiens
caggcaccatgaggc

SEQ ID NO: 61489 - DNA, 15 bp, Homo sapiens
ccaggcaccatgagg

SEQ ID NO: 61490 - DNA, 15 bp, Homo sapiens
gccaggcaccatgag

SEQ ID NO: 61491 - DNA, 15 bp, Homo sapiens
ggccaggcaccatga

SEQ ID NO: 61492 - DNA, 15 bp, Homo sapiens
gggccaggcaccatg

SEQ ID NO: 61493 - DNA, 15 bp, Homo sapiens
tgggccaggcaccat

SEQ ID NO: 61494 - DNA, 15 bp, Homo sapiens
ctgggccaggcacca

SEQ ID NO: 61495 - DNA, 15 bp, Homo sapiens
cctgggccaggcacc

SEQ ID NO: 61496 - DNA, 15 bp, Homo sapiens
acctgggccaggcac

SEQ ID NO: 61497 - DNA, 15 bp, Homo sapiens
aacctgggccaggca

SEQ ID NO: 61498 - DNA, 15 bp, Homo sapiens
taacctgggccaggc

SEQ ID NO: 61499 - DNA, 15 bp, Homo sapiens
ttaacctgggccagg

SEQ ID NO: 61500 - DNA, 15 bp, Homo sapiens
cttaacctgggccag

SEQ ID NO: 61501 - DNA, 15 bp, Homo sapiens
tcttaacctgggcca

SEQ ID NO: 61502 - DNA, 15 bp, Homo sapiens
ctcttaacctgggcc

SEQ ID NO: 61503 - DNA, 15 bp, Homo sapiens
actcttaacctgggc

SEQ ID NO: 61504 - DNA, 15 bp, Homo sapiens
cactcttaacctggg

SEQ ID NO: 61505 - DNA, 15 bp, Homo sapiens
gcactcttaacctgg

SEQ ID NO: 61506 - DNA, 15 bp, Homo sapiens
agcactcttaacctg

SEQ ID NO: 61507 - DNA, 15 bp, Homo sapiens
tagcactcttaacct

SEQ ID NO: 61508 - DNA, 15 bp, Homo sapiens
gtagcactcttaacc

SEQ ID NO: 61509 - DNA, 15 bp, Homo sapiens
ggtagcactcttaac

SEQ ID NO: 61510 - DNA, 15 bp, Homo sapiens
aggtagcactcttaa

SEQ ID NO: 61511 - DNA, 15 bp, Homo sapiens
caggtagcactctta

SEQ ID NO: 61512 - DNA, 15 bp, Homo sapiens
tcaggtagcactctt

SEQ ID NO: 61513 - DNA, 15 bp, Homo sapiens
atcaggtagcactct

SEQ ID NO: 61514 - DNA, 15 bp, Homo sapiens
catcaggtagcactc

SEQ ID NO: 61515 - DNA, 15 bp, Homo sapiens
tcatcaggtagcact

SEQ ID NO: 61516 - DNA, 15 bp, Homo sapiens
atcatcaggtagcac

SEQ ID NO: 61517 - DNA, 15 bp, Homo sapiens
catcatcaggtagca

SEQ ID NO: 61518 - DNA, 15 bp, Homo sapiens
ccatcatcaggtagc

SEQ ID NO: 61519 - DNA, 15 bp, Homo sapiens
tccatcatcaggtag

SEQ ID NO: 61520 - DNA, 15 bp, Homo sapiens
ctccatcatcaggta

SEQ ID NO: 61521 - DNA, 15 bp, Homo sapiens
actccatcatcaggt

SEQ ID NO: 61522 - DNA, 15 bp, Homo sapiens
aactccatcatcagg

SEQ ID NO: 61523 - DNA, 15 bp, Homo sapiens
taactccatcatcag

SEQ ID NO: 61524 - DNA, 15 bp, Homo sapiens
ttaactccatcatca

SEQ ID NO: 61525 - DNA, 15 bp, Homo sapiens
attaactccatcatc

SEQ ID NO: 61526 - DNA, 15 bp, Homo sapiens
tattaactccatcat

SEQ ID NO: 61527 - DNA, 15 bp, Homo sapiens
gtattaactccatca

SEQ ID NO: 61528 - DNA, 15 bp, Homo sapiens
tgtattaactccatc

SEQ ID NO: 61529 - DNA, 15 bp, Homo sapiens
gtgtattaactccat

SEQ ID NO: 61530 - DNA, 15 bp, Homo sapiens
cgtgtattaactcca

SEQ ID NO: 61531 - DNA, 15 bp, Homo sapiens
acgtgtattaactcc

SEQ ID NO: 61532 - DNA, 15 bp, Homo sapiens
aacgtgtattaactc

SEQ ID NO: 61533 - DNA, 15 bp, Homo sapiens
caacgtgtattaact

SEQ ID NO: 61534 - DNA, 15 bp, Homo sapiens
gcaacgtgtattaac

SEQ ID NO: 61535 - DNA, 15 bp, Homo sapiens
agcaacgtgtattaa

SEQ ID NO: 61536 - DNA, 15 bp, Homo sapiens
aagcaacgtgtatta

SEQ ID NO: 61537 - DNA, 15 bp, Homo sapiens
aaagcaacgtgtatt

SEQ ID NO: 61538 - DNA, 15 bp, Homo sapiens
caaagcaacgtgtat

SEQ ID NO: 61539 - DNA, 15 bp, Homo sapiens
tcaaagcaacgtgta

SEQ ID NO: 61540 - DNA, 15 bp, Homo sapiens
gtcaaagcaacgtgt

SEQ ID NO: 61541 - DNA, 15 bp, Homo sapiens
ggtcaaagcaacgtg

SEQ ID NO: 61542 - DNA, 15 bp, Homo sapiens
aggtcaaagcaacgt

SEQ ID NO: 61543 - DNA, 15 bp, Homo sapiens
gaggtcaaagcaacg

SEQ ID NO: 61544 - DNA, 15 bp, Homo sapiens
agaggtcaaagcaac

SEQ ID NO: 61545 - DNA, 15 bp, Homo sapiens
cagaggtcaaagcaa

SEQ ID NO: 61546 - DNA, 15 bp, Homo sapiens
tcagaggtcaaagca

SEQ ID NO: 61547 - DNA, 15 bp, Homo sapiens
gtcagaggtcaaagc

SEQ ID NO: 61548 - DNA, 15 bp, Homo sapiens
agtcagaggtcaaag

SEQ ID NO: 61549 - DNA, 15 bp, Homo sapiens
aagtcagaggtcaaa

SEQ ID NO: 61550 - DNA, 15 bp, Homo sapiens
aaagtcagaggtcaa

SEQ ID NO: 61551 - DNA, 15 bp, Homo sapiens
taaagtcagaggtca

SEQ ID NO: 61552 - DNA, 15 bp, Homo sapiens
ttaaagtcagaggtc

SEQ ID NO: 61553 - DNA, 15 bp, Homo sapiens
cttaaagtcagaggt

SEQ ID NO: 61554 - DNA, 15 bp, Homo sapiens
tcttaaagtcagagg

SEQ ID NO: 61555 - DNA, 15 bp, Homo sapiens
atcttaaagtcagag

SEQ ID NO: 61556 - DNA, 15 bp, Homo sapiens
catcttaaagtcaga

SEQ ID NO: 61557 - DNA, 15 bp, Homo sapiens
acatcttaaagtcag

SEQ ID NO: 61558 - DNA, 15 bp, Homo sapiens
gacatcttaaagtca

SEQ ID NO: 61559 - DNA, 15 bp, Homo sapiens
ggacatcttaaagtc

SEQ ID NO: 61560 - DNA, 15 bp, Homo sapiens
aggacatcttaaagt

SEQ ID NO: 61561 - DNA, 15 bp, Homo sapiens
gaggacatcttaaag

SEQ ID NO: 61562 - DNA, 15 bp, Homo sapiens
ggaggacatcttaaa

SEQ ID NO: 61563 - DNA, 15 bp, Homo sapiens
gggaggacatcttaa

SEQ ID NO: 61564 - DNA, 15 bp, Homo sapiens
tgggaggacatctta

SEQ ID NO: 61565 - DNA, 15 bp, Homo sapiens
gtgggaggacatctt

SEQ ID NO: 61566 - DNA, 15 bp, Homo sapiens
agtgggaggacatct

SEQ ID NO: 61567 - DNA, 15 bp, Homo sapiens
aagtgggaggacatc

SEQ ID NO: 61568 - DNA, 15 bp, Homo sapiens
aaagtgggaggacat

SEQ ID NO: 61569 - DNA, 15 bp, Homo sapiens
aaaagtgggaggaca

SEQ ID NO: 61570 - DNA, 15 bp, Homo sapiens
gaaaagtgggaggac

SEQ ID NO: 61571 - DNA, 15 bp, Homo sapiens
ggaaaagtgggagga

SEQ ID NO: 61572 - DNA, 15 bp, Homo sapiens
tggaaaagtgggagg

SEQ ID NO: 61573 - DNA, 15 bp, Homo sapiens
gtggaaaagtgggag

SEQ ID NO: 61574 - DNA, 15 bp, Homo sapiens
ggtggaaaagtggga

SEQ ID NO: 61575 - DNA, 15 bp, Homo sapiens
gggtggaaaagtggg

SEQ ID NO: 61576 - DNA, 15 bp, Homo sapiens
ggggtggaaaagtgg

SEQ ID NO: 61577 - DNA, 15 bp, Homo sapiens
cggggtggaaaagtg

SEQ ID NO: 61578 - DNA, 15 bp, Homo sapiens
gcggggtggaaaagt

SEQ ID NO: 61579 - DNA, 15 bp, Homo sapiens
tgcggggtggaaaag

SEQ ID NO: 61580 - DNA, 15 bp, Homo sapiens
ttgcggggtggaaaa

SEQ ID NO: 61581 - DNA, 15 bp, Homo sapiens
attgcggggtggaaa

SEQ ID NO: 61582 - DNA, 15 bp, Homo sapiens
gattgcggggtggaa

SEQ ID NO: 61583 - DNA, 15 bp, Homo sapiens
agattgcggggtgga

SEQ ID NO: 61584 - DNA, 15 bp, Homo sapiens
gagattgcggggtgg

SEQ ID NO: 61585 - DNA, 15 bp, Homo sapiens
agagattgcggggtg

SEQ ID NO: 61586 - DNA, 15 bp, Homo sapiens
tagagattgcggggt

SEQ ID NO: 61587 - DNA, 15 bp, Homo sapiens
ctagagattgcgggg

SEQ ID NO: 61588 - DNA, 15 bp, Homo sapiens
gctagagattgcggg

SEQ ID NO: 61589 - DNA, 15 bp, Homo sapiens
ggctagagattgcgg

SEQ ID NO: 61590 - DNA, 15 bp, Homo sapiens
gggctagagattgcg

SEQ ID NO: 61591 - DNA, 15 bp, Homo sapiens
agggctagagattgc

SEQ ID NO: 61592 - DNA, 15 bp, Homo sapiens
gagggctagagattg

SEQ ID NO: 61593 - DNA, 15 bp, Homo sapiens
agagggctagagatt

SEQ ID NO: 61594 - DNA, 15 bp, Homo sapiens
gagagggctagagat

SEQ ID NO: 61595 - DNA, 15 bp, Homo sapiens
agagagggctagaga

SEQ ID NO: 61596 - DNA, 15 bp, Homo sapiens
cagagagggctagag

SEQ ID NO: 61597 - DNA, 15 bp, Homo sapiens
ccagagagggctaga

SEQ ID NO: 61598 - DNA, 15 bp, Homo sapiens
cccagagagggctag

SEQ ID NO: 61599 - DNA, 15 bp, Homo sapiens
gcccagagagggcta

SEQ ID NO: 61600 - DNA, 15 bp, Homo sapiens
tgcccagagagggct

SEQ ID NO: 61601 - DNA, 15 bp, Homo sapiens
gtgcccagagagggc

SEQ ID NO: 61602 - DNA, 15 bp, Homo sapiens
tgtgcccagagaggg

SEQ ID NO: 61603 - DNA, 15 bp, Homo sapiens
ctgtgcccagagagg

SEQ ID NO: 61604 - DNA, 15 bp, Homo sapiens
gctgtgcccagagag

SEQ ID NO: 61605 - DNA, 15 bp, Homo sapiens
tgctgtgcccagaga

SEQ ID NO: 61606 - DNA, 15 bp, Homo sapiens
ctgctgtgcccagag

SEQ ID NO: 61607 - DNA, 15 bp, Homo sapiens
gctgctgtgcccaga

SEQ ID NO: 61608 - DNA, 15 bp, Homo sapiens
tgctgctgtgcccag

SEQ ID NO: 61609 - DNA, 15 bp, Homo sapiens
ttgctgctgtgccca

SEQ ID NO: 61610 - DNA, 15 bp, Homo sapiens
attgctgctgtgccc

SEQ ID NO: 61611 - DNA, 15 bp, Homo sapiens
aattgctgctgtgcc

SEQ ID NO: 61612 - DNA, 15 bp, Homo sapiens
caattgctgctgtgc

SEQ ID NO: 61613 - DNA, 15 bp, Homo sapiens
ccaattgctgctgtg

SEQ ID NO: 61614 - DNA, 15 bp, Homo sapiens
cccaattgctgctgt

SEQ ID NO: 61615 - DNA, 15 bp, Homo sapiens
tcccaattgctgctg

SEQ ID NO: 61616 - DNA, 15 bp, Homo sapiens
ttcccaattgctgct

SEQ ID NO: 61617 - DNA, 15 bp, Homo sapiens
gttcccaattgctgc

SEQ ID NO: 61618 - DNA, 15 bp, Homo sapiens
agttcccaattgctg

SEQ ID NO: 61619 - DNA, 15 bp, Homo sapiens
tagttcccaattgct

SEQ ID NO: 61620 - DNA, 15 bp, Homo sapiens
ctagttcccaattgc

SEQ ID NO: 61621 - DNA, 15 bp, Homo sapiens
actagttcccaattg

SEQ ID NO: 61622 - DNA, 15 bp, Homo sapiens
aactagttcccaatt

SEQ ID NO: 61623 - DNA, 15 bp, Homo sapiens
gaactagttcccaat

SEQ ID NO: 61624 - DNA, 15 bp, Homo sapiens
ggaactagttcccaa

SEQ ID NO: 61625 - DNA, 15 bp, Homo sapiens
aggaactagttccca

SEQ ID NO: 61626 - DNA, 15 bp, Homo sapiens
caggaactagttccc

SEQ ID NO: 61627 - DNA, 15 bp, Homo sapiens
acaggaactagttcc

SEQ ID NO: 61628 - DNA, 15 bp, Homo sapiens
tacaggaactagttc

SEQ ID NO: 61629 - DNA, 15 bp, Homo sapiens
gtacaggaactagtt

SEQ ID NO: 61630 - DNA, 15 bp, Homo sapiens
agtacaggaactagt

SEQ ID NO: 61631 - DNA, 15 bp, Homo sapiens
cagtacaggaactag

SEQ ID NO: 61632 - DNA, 15 bp, Homo sapiens
gcagtacaggaacta

SEQ ID NO: 61633 - DNA, 15 bp, Homo sapiens
ggcagtacaggaact

SEQ ID NO: 61634 - DNA, 15 bp, Homo sapiens
aggcagtacaggaac

SEQ ID NO: 61635 - DNA, 15 bp, Homo sapiens
aaggcagtacaggaa

SEQ ID NO: 61636 - DNA, 15 bp, Homo sapiens
aaaggcagtacagga

SEQ ID NO: 61637 - DNA, 15 bp, Homo sapiens
taaaggcagtacagg

SEQ ID NO: 61638 - DNA, 15 bp, Homo sapiens
ataaaggcagtacag

SEQ ID NO: 61639 - DNA, 15 bp, Homo sapiens
gataaaggcagtaca

SEQ ID NO: 61640 - DNA, 15 bp, Homo sapiens
agataaaggcagtac

SEQ ID NO: 61641 - DNA, 15 bp, Homo sapiens
gagataaaggcagta

SEQ ID NO: 61642 - DNA, 15 bp, Homo sapiens
tgagataaaggcagt

SEQ ID NO: 61643 - DNA, 15 bp, Homo sapiens
atgagataaaggcag

SEQ ID NO: 61644 - DNA, 15 bp, Homo sapiens
aatgagataaaggca

SEQ ID NO: 61645 - DNA, 15 bp, Homo sapiens
aaatgagataaaggc

SEQ ID NO: 61646 - DNA, 15 bp, Homo sapiens
aaaatgagataaagg

SEQ ID NO: 61647 - DNA, 15 bp, Homo sapiens
taaaatgagataaag

SEQ ID NO: 61648 - DNA, 15 bp, Homo sapiens
gtaaaatgagataaa

SEQ ID NO: 61649 - DNA, 15 bp, Homo sapiens
tgtaaaatgagataa

SEQ ID NO: 61650 - DNA, 15 bp, Homo sapiens
ttgtaaaatgagata

SEQ ID NO: 61651 - DNA, 15 bp, Homo sapiens
tttgtaaaatgagat

SEQ ID NO: 61652 - DNA, 15 bp, Homo sapiens
ttttgtaaaatgaga

SEQ ID NO: 61653 - DNA, 15 bp, Homo sapiens
gttttgtaaaatgag

SEQ ID NO: 61654 - DNA, 15 bp, Homo sapiens
tgttttgtaaaatga

SEQ ID NO: 61655 - DNA, 15 bp, Homo sapiens
ttgttttgtaaaatg

SEQ ID NO: 61656 - DNA, 15 bp, Homo sapiens
tttgttttgtaaaat

SEQ ID NO: 61657 - DNA, 15 bp, Homo sapiens
gtttgttttgtaaaa

SEQ ID NO: 61658 - DNA, 15 bp, Homo sapiens
agtttgttttgtaaa

SEQ ID NO: 61659 - DNA, 15 bp, Homo sapiens
aagtttgttttgtaa

SEQ ID NO: 61660 - DNA, 15 bp, Homo sapiens
gaagtttgttttgta

SEQ ID NO: 61661 - DNA, 15 bp, Homo sapiens
agaagtttgttttgt

SEQ ID NO: 61662 - DNA, 15 bp, Homo sapiens
tagaagtttgttttg

SEQ ID NO: 61663 - DNA, 15 bp, Homo sapiens
gtagaagtttgtttt

SEQ ID NO: 61664 - DNA, 15 bp, Homo sapiens
tgtagaagtttgttt

SEQ ID NO: 61665 - DNA, 15 bp, Homo sapiens
ttgtagaagtttgtt

SEQ ID NO: 61666 - DNA, 15 bp, Homo sapiens
tttgtagaagtttgt

SEQ ID NO: 61667 - DNA, 15 bp, Homo sapiens
ctttgtagaagtttg

SEQ ID NO: 61668 - DNA, 15 bp, Homo sapiens
tctttgtagaagttt

SEQ ID NO: 61669 - DNA, 15 bp, Homo sapiens
ttctttgtagaagtt

SEQ ID NO: 61670 - DNA, 15 bp, Homo sapiens
cttctttgtagaagt

SEQ ID NO: 61671 - DNA, 15 bp, Homo sapiens
gcttctttgtagaag

SEQ ID NO: 61672 - DNA, 15 bp, Homo sapiens
agcttctttgtagaa

SEQ ID NO: 61673 - DNA, 15 bp, Homo sapiens
cagcttctttgtaga

SEQ ID NO: 61674 - DNA, 15 bp, Homo sapiens
ccagcttctttgtag

SEQ ID NO: 61675 - DNA, 15 bp, Homo sapiens
tccagcttctttgta

SEQ ID NO: 61676 - DNA, 15 bp, Homo sapiens
ttccagcttctttgt

SEQ ID NO: 61677 - DNA, 15 bp, Homo sapiens
tttccagcttctttg

SEQ ID NO: 61678 - DNA, 15 bp, Homo sapiens
ctttccagcttcttt

SEQ ID NO: 61679 - DNA, 15 bp, Homo sapiens
cctttccagcttctt

SEQ ID NO: 61680 - DNA, 15 bp, Homo sapiens
tcctttccagcttct

SEQ ID NO: 61681 - DNA, 15 bp, Homo sapiens
ttcctttccagcttc

SEQ ID NO: 61682 - DNA, 15 bp, Homo sapiens
cttcctttccagctt

SEQ ID NO: 61683 - DNA, 15 bp, Homo sapiens
ccttcctttccagct

SEQ ID NO: 61684 - DNA, 15 bp, Homo sapiens
tccttcctttccagc

SEQ ID NO: 61685 - DNA, 15 bp, Homo sapiens
ctccttcctttccag

SEQ ID NO: 61686 - DNA, 15 bp, Homo sapiens
cctccttcctttcca

SEQ ID NO: 61687 - DNA, 15 bp, Homo sapiens
tcctccttcctttcc

SEQ ID NO: 61688 - DNA, 15 bp, Homo sapiens
ctcctccttcctttc

SEQ ID NO: 61689 - DNA, 15 bp, Homo sapiens
tctcctccttccttt

SEQ ID NO: 61690 - DNA, 15 bp, Homo sapiens
ttctcctccttcctt

SEQ ID NO: 61691 - DNA, 15 bp, Homo sapiens
tttctcctccttcct

SEQ ID NO: 61692 - DNA, 15 bp, Homo sapiens
ctttctcctccttcc

SEQ ID NO: 61693 - DNA, 15 bp, Homo sapiens
cctttctcctccttc

SEQ ID NO: 61694 - DNA, 15 bp, Homo sapiens
tcctttctcctcctt

SEQ ID NO: 61695 - DNA, 15 bp, Homo sapiens
atcctttctcctcct

SEQ ID NO: 61696 - DNA, 15 bp, Homo sapiens
aatcctttctcctcc

SEQ ID NO: 61697 - DNA, 15 bp, Homo sapiens
taatcctttctcctc

SEQ ID NO: 61698 - DNA, 15 bp, Homo sapiens
ataatcctttctcct

SEQ ID NO: 61699 - DNA, 15 bp, Homo sapiens
gataatcctttctcc

SEQ ID NO: 61700 - DNA, 15 bp, Homo sapiens
tgataatcctttctc

SEQ ID NO: 61701 - DNA, 15 bp, Homo sapiens
atgataatcctttct

SEQ ID NO: 61702 - DNA, 15 bp, Homo sapiens
catgataatcctttc

SEQ ID NO: 61703 - DNA, 15 bp, Homo sapiens
gcatgataatccttt

SEQ ID NO: 61704 - DNA, 15 bp, Homo sapiens
ttataaagttacgag

SEQ ID NO: 61705 - DNA, 15 bp, Homo sapiens
tttataaagttacga

SEQ ID NO: 61706 - DNA, 15 bp, Homo sapiens
ttttataaagttacg

SEQ ID NO: 61707 - DNA, 15 bp, Homo sapiens
attttataaagttac

SEQ ID NO: 61708 - DNA, 15 bp, Homo sapiens
tattttataaagtta

SEQ ID NO: 61709 - DNA, 15 bp, Homo sapiens
ttattttataaagtt

SEQ ID NO: 61710 - DNA, 15 bp, Homo sapiens
tttattttataaagt

SEQ ID NO: 61711 - DNA, 15 bp, Homo sapiens
gtttattttataaag

SEQ ID NO: 61712 - DNA, 15 bp, Homo sapiens
ggtttattttataaa

SEQ ID NO: 61713 - DNA, 15 bp, Homo sapiens
tggtttattttataa

SEQ ID NO: 61714 - DNA, 15 bp, Homo sapiens
atggtttattttata

SEQ ID NO: 61715 - DNA, 15 bp, Homo sapiens
catggtttattttat

SEQ ID NO: 61716 - DNA, 15 bp, Homo sapiens
ccatggtttatttta

SEQ ID NO: 61717 - DNA, 15 bp, Homo sapiens
tccatggtttatttt

SEQ ID NO: 61718 - DNA, 15 bp, Homo sapiens
ctccatggtttattt

SEQ ID NO: 61719 - DNA, 15 bp, Homo sapiens
tctccatggtttatt

SEQ ID NO: 61720 - DNA, 15 bp, Homo sapiens
atctccatggtttat

SEQ ID NO: 61721 - DNA, 15 bp, Homo sapiens
catctccatggttta

SEQ ID NO: 61722 - DNA, 15 bp, Homo sapiens
ccatctccatggttt

SEQ ID NO: 61723 - DNA, 15 bp, Homo sapiens
tccatctccatggtt

SEQ ID NO: 61724 - DNA, 15 bp, Homo sapiens
ctccatctccatggt

SEQ ID NO: 61725 - DNA, 15 bp, Homo sapiens
actccatctccatgg

SEQ ID NO: 61726 - DNA, 15 bp, Homo sapiens
aactccatctccatg

SEQ ID NO: 61727 - DNA, 15 bp, Homo sapiens
caactccatctccat

SEQ ID NO: 61728 - DNA, 15 bp, Homo sapiens
tcaactccatctcca

SEQ ID NO: 61729 - DNA, 15 bp, Homo sapiens
ttcaactccatctcc

SEQ ID NO: 61730 - DNA, 15 bp, Homo sapiens
tttcaactccatctc

SEQ ID NO: 61731 - DNA, 15 bp, Homo sapiens
ctttcaactccatct

SEQ ID NO: 61732 - DNA, 15 bp, Homo sapiens
cctttcaactccatc

SEQ ID NO: 61733 - DNA, 15 bp, Homo sapiens
ccctttcaactccat

SEQ ID NO: 61734 - DNA, 15 bp, Homo sapiens
cccctttcaactcca

SEQ ID NO: 61735 - DNA, 15 bp, Homo sapiens
ccccctttcaactcc

SEQ ID NO: 61736 - DNA, 15 bp, Homo sapiens
accccctttcaactc

SEQ ID NO: 61737 - DNA, 15 bp, Homo sapiens
caccccctttcaact

SEQ ID NO: 61738 - DNA, 15 bp, Homo sapiens
gcaccccctttcaac

SEQ ID NO: 61739 - DNA, 15 bp, Homo sapiens
agcaccccctttcaa

SEQ ID NO: 61740 - DNA, 15 bp, Homo sapiens
cagcaccccctttca

SEQ ID NO: 61741 - DNA, 15 bp, Homo sapiens
tcagcaccccctttc

SEQ ID NO: 61742 - DNA, 15 bp, Homo sapiens
gtcagcacccccttt

SEQ ID NO: 61743 - DNA, 15 bp, Homo sapiens
tgtcagcaccccctt

SEQ ID NO: 61744 - DNA, 15 bp, Homo sapiens
ttgtcagcaccccct

SEQ ID NO: 61745 - DNA, 15 bp, Homo sapiens
cttgtcagcaccccc

SEQ ID NO: 61746 - DNA, 15 bp, Homo sapiens
ccttgtcagcacccc

SEQ ID NO: 61747 - DNA, 15 bp, Homo sapiens
tccttgtcagcaccc

SEQ ID NO: 61748 - DNA, 15 bp, Homo sapiens
ttccttgtcagcacc

SEQ ID NO: 61749 - DNA, 15 bp, Homo sapiens
cttccttgtcagcac

SEQ ID NO: 61750 - DNA, 15 bp, Homo sapiens
ccttccttgtcagca

SEQ ID NO: 61751 - DNA, 15 bp, Homo sapiens
cccttccttgtcagc

SEQ ID NO: 61752 - DNA, 15 bp, Homo sapiens
tcccttccttgtcag

SEQ ID NO: 61753 - DNA, 15 bp, Homo sapiens
ctcccttccttgtca

SEQ ID NO: 61754 - DNA, 15 bp, Homo sapiens
actcccttccttgtc

SEQ ID NO: 61755 - DNA, 15 bp, Homo sapiens
aactcccttccttgt

SEQ ID NO: 61756 - DNA, 15 bp, Homo sapiens
caactcccttccttg

SEQ ID NO: 61757 - DNA, 15 bp, Homo sapiens
ccaactcccttcctt

SEQ ID NO: 61758 - DNA, 15 bp, Homo sapiens
tccaactcccttcct

SEQ ID NO: 61759 - DNA, 15 bp, Homo sapiens
ctccaactcccttcc

SEQ ID NO: 61760 - DNA, 15 bp, Homo sapiens
tctccaactcccttc

SEQ ID NO: 61761 - DNA, 15 bp, Homo sapiens
ttctccaactccctt

SEQ ID NO: 61762 - DNA, 15 bp, Homo sapiens
cttctccaactccct

SEQ ID NO: 61763 - DNA, 15 bp, Homo sapiens
ccttctccaactccc

SEQ ID NO: 61764 - DNA, 15 bp, Homo sapiens
gccttctccaactcc

SEQ ID NO: 61765 - DNA, 15 bp, Homo sapiens
tgccttctccaactc

SEQ ID NO: 61766 - DNA, 15 bp, Homo sapiens
atgccttctccaact

SEQ ID NO: 61767 - DNA, 15 bp, Homo sapiens
gatgccttctccaac

SEQ ID NO: 61768 - DNA, 15 bp, Homo sapiens
agatgccttctccaa

SEQ ID NO: 61769 - DNA, 15 bp, Homo sapiens
tagatgccttctcca

SEQ ID NO: 61770 - DNA, 15 bp, Homo sapiens
atagatgccttctcc

SEQ ID NO: 61771 - DNA, 15 bp, Homo sapiens
aatagatgccttctc

SEQ ID NO: 61772 - DNA, 15 bp, Homo sapiens
gaatagatgccttct

SEQ ID NO: 61773 - DNA, 15 bp, Homo sapiens
agaatagatgccttc

SEQ ID NO: 61774 - DNA, 15 bp, Homo sapiens
gagaatagatgcctt

SEQ ID NO: 61775 - DNA, 15 bp, Homo sapiens
cgagaatagatgcct

SEQ ID NO: 61776 - DNA, 15 bp, Homo sapiens
acgagaatagatgcc

SEQ ID NO: 61777 - DNA, 15 bp, Homo sapiens
cacgagaatagatgc

SEQ ID NO: 61778 - DNA, 15 bp, Homo sapiens
tcacgagaatagatg

SEQ ID NO: 61779 - DNA, 15 bp, Homo sapiens
ctcacgagaatagat

SEQ ID NO: 61780 - DNA, 15 bp, Homo sapiens
tctcacgagaataga

SEQ ID NO: 61781 - DNA, 15 bp, Homo sapiens
ttctcacgagaatag

SEQ ID NO: 61782 - DNA, 15 bp, Homo sapiens
cttctcacgagaata

SEQ ID NO: 61783 - DNA, 15 bp, Homo sapiens
ccttctcacgagaat

SEQ ID NO: 61784 - DNA, 15 bp, Homo sapiens
gccttctcacgagaa

SEQ ID NO: 61785 - DNA, 15 bp, Homo sapiens
ggccttctcacgaga

SEQ ID NO: 61786 - DNA, 15 bp, Homo sapiens
aggccttctcacgag

SEQ ID NO: 61787 - DNA, 15 bp, Homo sapiens
caggccttctcacga

SEQ ID NO: 61788 - DNA, 15 bp, Homo sapiens
tcaggccttctcacg

SEQ ID NO: 61789 - DNA, 15 bp, Homo sapiens
ttcaggccttctcac

SEQ ID NO: 61790 - DNA, 15 bp, Homo sapiens
cttcaggccttctca

SEQ ID NO: 61791 - DNA, 15 bp, Homo sapiens
tcttcaggccttctc

SEQ ID NO: 61792 - DNA, 15 bp, Homo sapiens
ctcttcaggccttct

SEQ ID NO: 61793 - DNA, 15 bp, Homo sapiens
actcttcaggccttc

SEQ ID NO: 61794 - DNA, 15 bp, Homo sapiens
cactcttcaggcctt

SEQ ID NO: 61795 - DNA, 15 bp, Homo sapiens
gcactcttcaggcct

SEQ ID NO: 61796 - DNA, 15 bp, Homo sapiens
tgcactcttcaggcc

SEQ ID NO: 61797 - DNA, 15 bp, Homo sapiens
gtgcactcttcaggc

SEQ ID NO: 61798 - DNA, 15 bp, Homo sapiens
tgtgcactcttcagg

SEQ ID NO: 61799 - DNA, 15 bp, Homo sapiens
ttgtgcactcttcag

SEQ ID NO: 61800 - DNA, 15 bp, Homo sapiens
gttgtgcactcttca

SEQ ID NO: 61801 - DNA, 15 bp, Homo sapiens
tgttgtgcactcttc

SEQ ID NO: 61802 - DNA, 15 bp, Homo sapiens
ctgttgtgcactctt

SEQ ID NO: 61803 - DNA, 15 bp, Homo sapiens
gctgttgtgcactct

SEQ ID NO: 61804 - DNA, 15 bp, Homo sapiens
ggctgttgtgcactc

SEQ ID NO: 61805 - DNA, 15 bp, Homo sapiens
aggctgttgtgcact

SEQ ID NO: 61806 - DNA, 15 bp, Homo sapiens
caggctgttgtgcac

SEQ ID NO: 61807 - DNA, 15 bp, Homo sapiens
ccaggctgttgtgca

SEQ ID NO: 61808 - DNA, 15 bp, Homo sapiens
gccaggctgttgtgc

SEQ ID NO: 61809 - DNA, 15 bp, Homo sapiens
ggccaggctgttgtg

SEQ ID NO: 61810 - DNA, 15 bp, Homo sapiens
gggccaggctgttgt

SEQ ID NO: 61811 - DNA, 15 bp, Homo sapiens
ggggccaggctgttg

SEQ ID NO: 61812 - DNA, 15 bp, Homo sapiens
tggggccaggctgtt

SEQ ID NO: 61813 - DNA, 15 bp, Homo sapiens
ttggggccaggctgt

SEQ ID NO: 61814 - DNA, 15 bp, Homo sapiens
cttggggccaggctg

SEQ ID NO: 61815 - DNA, 15 bp, Homo sapiens
tcttggggccaggct

SEQ ID NO: 61816 - DNA, 15 bp, Homo sapiens
gtcttggggccaggc

SEQ ID NO: 61817 - DNA, 15 bp, Homo sapiens
tgtcttggggccagg

SEQ ID NO: 61818 - DNA, 15 bp, Homo sapiens
gtgtcttggggccag

SEQ ID NO: 61819 - DNA, 15 bp, Homo sapiens
tgtgtcttggggcca

SEQ ID NO: 61820 - DNA, 15 bp, Homo sapiens
ttgtgtcttggggcc

SEQ ID NO: 61821 - DNA, 15 bp, Homo sapiens
cttgtgtcttggggc

SEQ ID NO: 61822 - DNA, 15 bp, Homo sapiens
tcttgtgtcttgggg

SEQ ID NO: 61823 - DNA, 15 bp, Homo sapiens
ctcttgtgtcttggg

SEQ ID NO: 61824 - DNA, 15 bp, Homo sapiens
gctcttgtgtcttgg

SEQ ID NO: 61825 - DNA, 15 bp, Homo sapiens
tgctcttgtgtcttg

SEQ ID NO: 61826 - DNA, 15 bp, Homo sapiens
gtgctcttgtgtctt

SEQ ID NO: 61827 - DNA, 15 bp, Homo sapiens
agtgctcttgtgtct

SEQ ID NO: 61828 - DNA, 15 bp, Homo sapiens
cagtgctcttgtgtc

SEQ ID NO: 61829 - DNA, 15 bp, Homo sapiens
ccagtgctcttgtgt

SEQ ID NO: 61830 - DNA, 15 bp, Homo sapiens
cccagtgctcttgtg

SEQ ID NO: 61831 - DNA, 15 bp, Homo sapiens
gcccagtgctcttgt

SEQ ID NO: 61832 - DNA, 15 bp, Homo sapiens
agcccagtgctcttg

SEQ ID NO: 61833 - DNA, 15 bp, Homo sapiens
cagcccagtgctctt

SEQ ID NO: 61834 - DNA, 15 bp, Homo sapiens
ccagcccagtgctct

SEQ ID NO: 61835 - DNA, 15 bp, Homo sapiens
gccagcccagtgctc

SEQ ID NO: 61836 - DNA, 15 bp, Homo sapiens
agccagcccagtgct

SEQ ID NO: 61837 - DNA, 15 bp, Homo sapiens
aagccagcccagtgc

SEQ ID NO: 61838 - DNA, 15 bp, Homo sapiens
caagccagcccagtg

SEQ ID NO: 61839 - DNA, 15 bp, Homo sapiens
tcaagccagcccagt

SEQ ID NO: 61840 - DNA, 15 bp, Homo sapiens
ctcaagccagcccag

SEQ ID NO: 61841 - DNA, 15 bp, Homo sapiens
cctcaagccagccca

SEQ ID NO: 61842 - DNA, 15 bp, Homo sapiens
tcctcaagccagccc

SEQ ID NO: 61843 - DNA, 15 bp, Homo sapiens
ctcctcaagccagcc

SEQ ID NO: 61844 - DNA, 15 bp, Homo sapiens
gctcctcaagccagc

SEQ ID NO: 61845 - DNA, 15 bp, Homo sapiens
tgctcctcaagccag

SEQ ID NO: 61846 - DNA, 15 bp, Homo sapiens
gtgctcctcaagcca

SEQ ID NO: 61847 - DNA, 15 bp, Homo sapiens
ggtgctcctcaagcc

SEQ ID NO: 61848 - DNA, 15 bp, Homo sapiens
tggtgctcctcaagc

SEQ ID NO: 61849 - DNA, 15 bp, Homo sapiens
ctggtgctcctcaag

SEQ ID NO: 61850 - DNA, 15 bp, Homo sapiens
cctggtgctcctcaa

SEQ ID NO: 61851 - DNA, 15 bp, Homo sapiens
acctggtgctcctca

SEQ ID NO: 61852 - DNA, 15 bp, Homo sapiens
cacctggtgctcctc

SEQ ID NO: 61853 - DNA, 15 bp, Homo sapiens
tcacctggtgctcct

SEQ ID NO: 61854 - DNA, 15 bp, Homo sapiens
gtcacctggtgctcc

SEQ ID NO: 61855 - DNA, 15 bp, Homo sapiens
ggtcacctggtgctc

SEQ ID NO: 61856 - DNA, 15 bp, Homo sapiens
tggtcacctggtgct

SEQ ID NO: 61857 - DNA, 15 bp, Homo sapiens
ttggtcacctggtgc

SEQ ID NO: 61858 - DNA, 15 bp, Homo sapiens
cttggtcacctggtg

SEQ ID NO: 61859 - DNA, 15 bp, Homo sapiens
tcttggtcacctggt

SEQ ID NO: 61860 - DNA, 15 bp, Homo sapiens
gtcttggtcacctgg

SEQ ID NO: 61861 - DNA, 15 bp, Homo sapiens
ggtcttggtcacctg

SEQ ID NO: 61862 - DNA, 15 bp, Homo sapiens
tggtcttggtcacct

SEQ ID NO: 61863 - DNA, 15 bp, Homo sapiens
ctggtcttggtcacc

SEQ ID NO: 61864 - DNA, 15 bp, Homo sapiens
cctggtcttggtcac

SEQ ID NO: 61865 - DNA, 15 bp, Homo sapiens
gcctggtcttggtca

SEQ ID NO: 61866 - DNA, 15 bp, Homo sapiens
tgcctggtcttggtc

SEQ ID NO: 61867 - DNA, 15 bp, Homo sapiens
ttgcctggtcttggt

SEQ ID NO: 61868 - DNA, 15 bp, Homo sapiens
attgcctggtcttgg

SEQ ID NO: 61869 - DNA, 15 bp, Homo sapiens
cattgcctggtcttg

SEQ ID NO: 61870 - DNA, 15 bp, Homo sapiens
gcattgcctggtctt

SEQ ID NO: 61871 - DNA, 15 bp, Homo sapiens
tgcattgcctggtct

SEQ ID NO: 61872 - DNA, 15 bp, Homo sapiens
gtgcattgcctggtc

SEQ ID NO: 61873 - DNA, 15 bp, Homo sapiens
tgtgcattgcctggt

SEQ ID NO: 61874 - DNA, 15 bp, Homo sapiens
ctgtgcattgcctgg

SEQ ID NO: 61875 - DNA, 15 bp, Homo sapiens
cctgtgcattgcctg

SEQ ID NO: 61876 - DNA, 15 bp, Homo sapiens
ccctgtgcattgcct

SEQ ID NO: 61877 - DNA, 15 bp, Homo sapiens
cccctgtgcattgcc

SEQ ID NO: 61878 - DNA, 15 bp, Homo sapiens
ccccctgtgcattgc

SEQ ID NO: 61879 - DNA, 15 bp, Homo sapiens
tccccctgtgcattg

SEQ ID NO: 61880 - DNA, 15 bp, Homo sapiens
ttccccctgtgcatt

SEQ ID NO: 61881 - DNA, 15 bp, Homo sapiens
cttccccctgtgcat

SEQ ID NO: 61882 - DNA, 15 bp, Homo sapiens
acttccccctgtgca

SEQ ID NO: 61883 - DNA, 15 bp, Homo sapiens
gacttccccctgtgc

SEQ ID NO: 61884 - DNA, 15 bp, Homo sapiens
tgacttccccctgtg

SEQ ID NO: 61885 - DNA, 15 bp, Homo sapiens
ctgacttccccctgt

SEQ ID NO: 61886 - DNA, 15 bp, Homo sapiens
gctgacttccccctg

SEQ ID NO: 61887 - DNA, 15 bp, Homo sapiens
tgctgacttccccct

SEQ ID NO: 61888 - DNA, 15 bp, Homo sapiens
ctgctgacttccccc

SEQ ID NO: 61889 - DNA, 15 bp, Homo sapiens
cctgctgacttcccc

SEQ ID NO: 61890 - DNA, 15 bp, Homo sapiens
gcctgctgacttccc

SEQ ID NO: 61891 - DNA, 15 bp, Homo sapiens
ggcctgctgacttcc

SEQ ID NO: 61892 - DNA, 15 bp, Homo sapiens
gggcctgctgacttc

SEQ ID NO: 61893 - DNA, 15 bp, Homo sapiens
ggggcctgctgactt

SEQ ID NO: 61894 - DNA, 15 bp, Homo sapiens
tggggcctgctgact

SEQ ID NO: 61895 - DNA, 15 bp, Homo sapiens
atggggcctgctgac

SEQ ID NO: 61896 - DNA, 15 bp, Homo sapiens
catggggcctgctga

SEQ ID NO: 61897 - DNA, 15 bp, Homo sapiens
ccatggggcctgctg

SEQ ID NO: 61898 - DNA, 15 bp, Homo sapiens
tccatggggcctgct

SEQ ID NO: 61899 - DNA, 15 bp, Homo sapiens
ctccatggggcctgc

SEQ ID NO: 61900 - DNA, 15 bp, Homo sapiens
tctccatggggcctg

SEQ ID NO: 61901 - DNA, 15 bp, Homo sapiens
atctccatggggcct

SEQ ID NO: 61902 - DNA, 15 bp, Homo sapiens
tatctccatggggcc

SEQ ID NO: 61903 - DNA, 15 bp, Homo sapiens
gtatctccatggggc

SEQ ID NO: 61904 - DNA, 15 bp, Homo sapiens
cgtatctccatgggg

SEQ ID NO: 61905 - DNA, 15 bp, Homo sapiens
gcgtatctccatggg

SEQ ID NO: 61906 - DNA, 15 bp, Homo sapiens
tgcgtatctccatgg

SEQ ID NO: 61907 - DNA, 15 bp, Homo sapiens
ctgcgtatctccatg

SEQ ID NO: 61908 - DNA, 15 bp, Homo sapiens
gctgcgtatctccat

SEQ ID NO: 61909 - DNA, 15 bp, Homo sapiens
agctgcgtatctcca

SEQ ID NO: 61910 - DNA, 15 bp, Homo sapiens
cagctgcgtatctcc

SEQ ID NO: 61911 - DNA, 15 bp, Homo sapiens
gcagctgcgtatctc

SEQ ID NO: 61912 - DNA, 15 bp, Homo sapiens
tgcagctgcgtatct

SEQ ID NO: 61913 - DNA, 15 bp, Homo sapiens
ctgcagctgcgtatc

SEQ ID NO: 61914 - DNA, 15 bp, Homo sapiens
actgcagctgcgtat

SEQ ID NO: 61915 - DNA, 15 bp, Homo sapiens
cactgcagctgcgta

SEQ ID NO: 61916 - DNA, 15 bp, Homo sapiens
acactgcagctgcgt

SEQ ID NO: 61917 - DNA, 15 bp, Homo sapiens
aacactgcagctgcg

SEQ ID NO: 61918 - DNA, 15 bp, Homo sapiens
aaacactgcagctgc

SEQ ID NO: 61919 - DNA, 15 bp, Homo sapiens
caaacactgcagctg

SEQ ID NO: 61920 - DNA, 15 bp, Homo sapiens
acaaacactgcagct

SEQ ID NO: 61921 - DNA, 15 bp, Homo sapiens
tacaaacactgcagc

SEQ ID NO: 61922 - DNA, 15 bp, Homo sapiens
gtacaaacactgcag

SEQ ID NO: 61923 - DNA, 15 bp, Homo sapiens
agtacaaacactgca

SEQ ID NO: 61924 - DNA, 15 bp, Homo sapiens
aagtacaaacactgc

SEQ ID NO: 61925 - DNA, 15 bp, Homo sapiens
aaagtacaaacactg

SEQ ID NO: 61926 - DNA, 15 bp, Homo sapiens
aaaagtacaaacact

SEQ ID NO: 61927 - DNA, 15 bp, Homo sapiens
taaaagtacaaacac

SEQ ID NO: 61928 - DNA, 15 bp, Homo sapiens
ataaaagtacaaaca

SEQ ID NO: 61929 - DNA, 15 bp, Homo sapiens
tataaaagtacaaac

SEQ ID NO: 61930 - DNA, 15 bp, Homo sapiens
gtataaaagtacaaa

SEQ ID NO: 61931 - DNA, 15 bp, Homo sapiens
tgtataaaagtacaa

SEQ ID NO: 61932 - DNA, 15 bp, Homo sapiens
ctgtataaaagtaca

SEQ ID NO: 61933 - DNA, 15 bp, Homo sapiens
actgtataaaagtac

SEQ ID NO: 61934 - DNA, 15 bp, Homo sapiens
cactgtataaaagta

SEQ ID NO: 61935 - DNA, 15 bp, Homo sapiens
tcactgtataaaagt

SEQ ID NO: 61936 - DNA, 15 bp, Homo sapiens
ttcactgtataaaag

SEQ ID NO: 61937 - DNA, 15 bp, Homo sapiens
tttcactgtataaaa

SEQ ID NO: 61938 - DNA, 15 bp, Homo sapiens
gtttcactgtataaa

SEQ ID NO: 61939 - DNA, 15 bp, Homo sapiens
agtttcactgtataa

SEQ ID NO: 61940 - DNA, 15 bp, Homo sapiens
gagtttcactgtata

SEQ ID NO: 61941 - DNA, 15 bp, Homo sapiens
tgagtttcactgtat

SEQ ID NO: 61942 - DNA, 15 bp, Homo sapiens
atgagtttcactgta

SEQ ID NO: 61943 - DNA, 15 bp, Homo sapiens
aatgagtttcactgt

SEQ ID NO: 61944 - DNA, 15 bp, Homo sapiens
taatgagtttcactg

SEQ ID NO: 61945 - DNA, 15 bp, Homo sapiens
gtaatgagtttcact

SEQ ID NO: 61946 - DNA, 15 bp, Homo sapiens
ggtaatgagtttcac

SEQ ID NO: 61947 - DNA, 15 bp, Homo sapiens
tggtaatgagtttca

SEQ ID NO: 61948 - DNA, 15 bp, Homo sapiens
gtggtaatgagtttc

SEQ ID NO: 61949 - DNA, 15 bp, Homo sapiens
ggtggtaatgagttt

SEQ ID NO: 61950 - DNA, 15 bp, Homo sapiens
aggtggtaatgagtt

SEQ ID NO: 61951 - DNA, 15 bp, Homo sapiens
aaggtggtaatgagt

SEQ ID NO: 61952 - DNA, 15 bp, Homo sapiens
caaggtggtaatgag

SEQ ID NO: 61953 - DNA, 15 bp, Homo sapiens
gcaaggtggtaatga

SEQ ID NO: 61954 - DNA, 15 bp, Homo sapiens
agcaaggtggtaatg

SEQ ID NO: 61955 - DNA, 15 bp, Homo sapiens
aagcaaggtggtaat

SEQ ID NO: 61956 - DNA, 15 bp, Homo sapiens
taagcaaggtggtaa

SEQ ID NO: 61957 - DNA, 15 bp, Homo sapiens
gtaagcaaggtggta

SEQ ID NO: 61958 - DNA, 15 bp, Homo sapiens
agtaagcaaggtggt

SEQ ID NO: 61959 - DNA, 15 bp, Homo sapiens
aagtaagcaaggtgg

SEQ ID NO: 61960 - DNA, 15 bp, Homo sapiens
gaagtaagcaaggtg

SEQ ID NO: 61961 - DNA, 15 bp, Homo sapiens
ggaagtaagcaaggt

SEQ ID NO: 61962 - DNA, 15 bp, Homo sapiens
aggaagtaagcaagg

SEQ ID NO: 61963 - DNA, 15 bp, Homo sapiens
taggaagtaagcaag

SEQ ID NO: 61964 - DNA, 15 bp, Homo sapiens
ctaggaagtaagcaa

SEQ ID NO: 61965 - DNA, 15 bp, Homo sapiens
actaggaagtaagca

SEQ ID NO: 61966 - DNA, 15 bp, Homo sapiens
tactaggaagtaagc

SEQ ID NO: 61967 - DNA, 15 bp, Homo sapiens
ctactaggaagtaag

SEQ ID NO: 61968 - DNA, 15 bp, Homo sapiens
tctactaggaagtaa

SEQ ID NO: 61969 - DNA, 15 bp, Homo sapiens
ctctactaggaagta

SEQ ID NO: 61970 - DNA, 15 bp, Homo sapiens
tctctactaggaagt

SEQ ID NO: 61971 - DNA, 15 bp, Homo sapiens
ctctctactaggaag

SEQ ID NO: 61972 - DNA, 15 bp, Homo sapiens
tctctctactaggaa

SEQ ID NO: 61973 - DNA, 15 bp, Homo sapiens
atctctctactagga

SEQ ID NO: 61974 - DNA, 15 bp, Homo sapiens
catctctctactagg

SEQ ID NO: 61975 - DNA, 15 bp, Homo sapiens
acatctctctactag

SEQ ID NO: 61976 - DNA, 15 bp, Homo sapiens
cacatctctctacta

SEQ ID NO: 61977 - DNA, 15 bp, Homo sapiens
acacatctctctact

SEQ ID NO: 61978 - DNA, 15 bp, Homo sapiens
gacacatctctctac

SEQ ID NO: 61979 - DNA, 15 bp, Homo sapiens
agacacatctctcta

SEQ ID NO: 61980 - DNA, 15 bp, Homo sapiens
aagacacatctctct

SEQ ID NO: 61981 - DNA, 15 bp, Homo sapiens
caagacacatctctc

SEQ ID NO: 61982 - DNA, 15 bp, Homo sapiens
acaagacacatctct

SEQ ID NO: 61983 - DNA, 15 bp, Homo sapiens
tacaagacacatctc

SEQ ID NO: 61984 - DNA, 15 bp, Homo sapiens
ctacaagacacatct

SEQ ID NO: 61985 - DNA, 15 bp, Homo sapiens
actacaagacacatc

SEQ ID NO: 61986 - DNA, 15 bp, Homo sapiens
aactacaagacacat

SEQ ID NO: 61987 - DNA, 15 bp, Homo sapiens
taactacaagacaca

SEQ ID NO: 61988 - DNA, 15 bp, Homo sapiens
gtaactacaagacac

SEQ ID NO: 61989 - DNA, 15 bp, Homo sapiens
tgtaactacaagaca

SEQ ID NO: 61990 - DNA, 15 bp, Homo sapiens
gtgtaactacaagac

SEQ ID NO: 61991 - DNA, 15 bp, Homo sapiens
agtgtaactacaaga

SEQ ID NO: 61992 - DNA, 15 bp, Homo sapiens
cagtgtaactacaag

SEQ ID NO: 61993 - DNA, 15 bp, Homo sapiens
tcagtgtaactacaa

SEQ ID NO: 61994 - DNA, 15 bp, Homo sapiens
ttcagtgtaactaca

SEQ ID NO: 61995 - DNA, 15 bp, Homo sapiens
tttcagtgtaactac

SEQ ID NO: 61996 - DNA, 15 bp, Homo sapiens
gtttcagtgtaacta

SEQ ID NO: 61997 - DNA, 15 bp, Homo sapiens
tgtttcagtgtaact

SEQ ID NO: 61998 - DNA, 15 bp, Homo sapiens
gtgtttcagtgtaac

SEQ ID NO: 61999 - DNA, 15 bp, Homo sapiens
ggtgtttcagtgtaa

SEQ ID NO: 62000 - DNA, 15 bp, Homo sapiens
aggtgtttcagtgta

SEQ ID NO: 62001 - DNA, 15 bp, Homo sapiens
caggtgtttcagtgt

SEQ ID NO: 62002 - DNA, 15 bp, Homo sapiens
ccaggtgtttcagtg

SEQ ID NO: 62003 - DNA, 15 bp, Homo sapiens
gccaggtgtttcagt

SEQ ID NO: 62004 - DNA, 15 bp, Homo sapiens
agccaggtgtttcag

SEQ ID NO: 62005 - DNA, 15 bp, Homo sapiens
cagccaggtgtttca

SEQ ID NO: 62006 - DNA, 15 bp, Homo sapiens
ccagccaggtgtttc

SEQ ID NO: 62007 - DNA, 15 bp, Homo sapiens
cccagccaggtgttt

SEQ ID NO: 62008 - DNA, 15 bp, Homo sapiens
gcccagccaggtgtt

SEQ ID NO: 62009 - DNA, 15 bp, Homo sapiens
tgcccagccaggtgt

SEQ ID NO: 62010 - DNA, 15 bp, Homo sapiens
gtgcccagccaggtg

SEQ ID NO: 62011 - DNA, 15 bp, Homo sapiens
tgtgcccagccaggt

SEQ ID NO: 62012 - DNA, 15 bp, Homo sapiens
atgtgcccagccagg

SEQ ID NO: 62013 - DNA, 15 bp, Homo sapiens
tatgtgcccagccag

SEQ ID NO: 62014 - DNA, 15 bp, Homo sapiens
ctatgtgcccagcca

SEQ ID NO: 62015 - DNA, 15 bp, Homo sapiens
cctatgtgcccagcc

SEQ ID NO: 62016 - DNA, 15 bp, Homo sapiens
acctatgtgcccagc

SEQ ID NO: 62017 - DNA, 15 bp, Homo sapiens
cacctatgtgcccag

SEQ ID NO: 62018 - DNA, 15 bp, Homo sapiens
tcacctatgtgccca

SEQ ID NO: 62019 - DNA, 15 bp, Homo sapiens
ttcacctatgtgccc

SEQ ID NO: 62020 - DNA, 15 bp, Homo sapiens
cttcacctatgtgcc

SEQ ID NO: 62021 - DNA, 15 bp, Homo sapiens
gcttcacctatgtgc

SEQ ID NO: 62022 - DNA, 15 bp, Homo sapiens
agcttcacctatgtg

SEQ ID NO: 62023 - DNA, 15 bp, Homo sapiens
cagcttcacctatgt

SEQ ID NO: 62024 - DNA, 15 bp, Homo sapiens
acagcttcacctatg

SEQ ID NO: 62025 - DNA, 15 bp, Homo sapiens
aacagcttcacctat

SEQ ID NO: 62026 - DNA, 15 bp, Homo sapiens
caacagcttcaccta

SEQ ID NO: 62027 - DNA, 15 bp, Homo sapiens
tcaacagcttcacct

SEQ ID NO: 62028 - DNA, 15 bp, Homo sapiens
ctcaacagcttcacc

SEQ ID NO: 62029 - DNA, 15 bp, Homo sapiens
actcaacagcttcac

SEQ ID NO: 62030 - DNA, 15 bp, Homo sapiens
gactcaacagcttca

SEQ ID NO: 62031 - DNA, 15 bp, Homo sapiens
agactcaacagcttc

SEQ ID NO: 62032 - DNA, 15 bp, Homo sapiens
cagactcaacagctt

SEQ ID NO: 62033 - DNA, 15 bp, Homo sapiens
acagactcaacagct

SEQ ID NO: 62034 - DNA, 15 bp, Homo sapiens
tacagactcaacagc

SEQ ID NO: 62035 - DNA, 15 bp, Homo sapiens
ttacagactcaacag

SEQ ID NO: 62036 - DNA, 15 bp, Homo sapiens
attacagactcaaca

SEQ ID NO: 62037 - DNA, 15 bp, Homo sapiens
aattacagactcaac

SEQ ID NO: 62038 - DNA, 15 bp, Homo sapiens
caattacagactcaa

SEQ ID NO: 62039 - DNA, 15 bp, Homo sapiens
acaattacagactca

SEQ ID NO: 62040 - DNA, 15 bp, Homo sapiens
gacaattacagactc

SEQ ID NO: 62041 - DNA, 15 bp, Homo sapiens
tgacaattacagact

SEQ ID NO: 62042 - DNA, 15 bp, Homo sapiens
ttgacaattacagac

SEQ ID NO: 62043 - DNA, 15 bp, Homo sapiens
tttgacaattacaga

SEQ ID NO: 62044 - DNA, 15 bp, Homo sapiens
gtttgacaattacag

SEQ ID NO: 62045 - DNA, 15 bp, Homo sapiens
agtttgacaattaca

SEQ ID NO: 62046 - DNA, 15 bp, Homo sapiens
cagtttgacaattac

SEQ ID NO: 62047 - DNA, 15 bp, Homo sapiens
gcagtttgacaatta

SEQ ID NO: 62048 - DNA, 15 bp, Homo sapiens
agcagtttgacaatt

SEQ ID NO: 62049 - DNA, 15 bp, Homo sapiens
gagcagtttgacaat

SEQ ID NO: 62050 - DNA, 15 bp, Homo sapiens
ggagcagtttgacaa

SEQ ID NO: 62051 - DNA, 15 bp, Homo sapiens
gggagcagtttgaca

SEQ ID NO: 62052 - DNA, 15 bp, Homo sapiens
tgggagcagtttgac

SEQ ID NO: 62053 - DNA, 15 bp, Homo sapiens
ctgggagcagtttga

SEQ ID NO: 62054 - DNA, 15 bp, Homo sapiens
cctgggagcagtttg

SEQ ID NO: 62055 - DNA, 15 bp, Homo sapiens
acctgggagcagttt

SEQ ID NO: 62056 - DNA, 15 bp, Homo sapiens
cacctgggagcagtt

SEQ ID NO: 62057 - DNA, 15 bp, Homo sapiens
gcacctgggagcagt

SEQ ID NO: 62058 - DNA, 15 bp, Homo sapiens
ggcacctgggagcag

SEQ ID NO: 62059 - DNA, 15 bp, Homo sapiens
tggcacctgggagca

SEQ ID NO: 62060 - DNA, 15 bp, Homo sapiens
ttggcacctgggagc

SEQ ID NO: 62061 - DNA, 15 bp, Homo sapiens
attggcacctgggag

SEQ ID NO: 62062 - DNA, 15 bp, Homo sapiens
aattggcacctggga

SEQ ID NO: 62063 - DNA, 15 bp, Homo sapiens
taattggcacctggg

SEQ ID NO: 62064 - DNA, 15 bp, Homo sapiens
ataattggcacctgg

SEQ ID NO: 62065 - DNA, 15 bp, Homo sapiens
tataattggcacctg

SEQ ID NO: 62066 - DNA, 15 bp, Homo sapiens
ttataattggcacct

SEQ ID NO: 62067 - DNA, 15 bp, Homo sapiens
attataattggcacc

SEQ ID NO: 62068 - DNA, 15 bp, Homo sapiens
cattataattggcac

SEQ ID NO: 62069 - DNA, 15 bp, Homo sapiens
acattataattggca

SEQ ID NO: 62070 - DNA, 15 bp, Homo sapiens
tacattataattggc

SEQ ID NO: 62071 - DNA, 15 bp, Homo sapiens
ctacattataattgg

SEQ ID NO: 62072 - DNA, 15 bp, Homo sapiens
tctacattataattg

SEQ ID NO: 62073 - DNA, 15 bp, Homo sapiens
ttctacattataatt

SEQ ID NO: 62074 - DNA, 15 bp, Homo sapiens
cttctacattataat

SEQ ID NO: 62075 - DNA, 15 bp, Homo sapiens
tcttctacattataa

SEQ ID NO: 62076 - DNA, 15 bp, Homo sapiens
ctcttctacattata

SEQ ID NO: 62077 - DNA, 15 bp, Homo sapiens
cctcttctacattat

SEQ ID NO: 62078 - DNA, 15 bp, Homo sapiens
gcctcttctacatta

SEQ ID NO: 62079 - DNA, 15 bp, Homo sapiens
tgcctcttctacatt

SEQ ID NO: 62080 - DNA, 15 bp, Homo sapiens
gtgcctcttctacat

SEQ ID NO: 62081 - DNA, 15 bp, Homo sapiens
tgtgcctcttctaca

SEQ ID NO: 62082 - DNA, 15 bp, Homo sapiens
ttgtgcctcttctac

SEQ ID NO: 62083 - DNA, 15 bp, Homo sapiens
cttgtgcctcttcta

SEQ ID NO: 62084 - DNA, 15 bp, Homo sapiens
tcttgtgcctcttct

SEQ ID NO: 62085 - DNA, 15 bp, Homo sapiens
ttcttgtgcctcttc

SEQ ID NO: 62086 - DNA, 15 bp, Homo sapiens
cttcttgtgcctctt

SEQ ID NO: 62087 - DNA, 15 bp, Homo sapiens
tcttcttgtgcctct

SEQ ID NO: 62088 - DNA, 15 bp, Homo sapiens
atcttcttgtgcctc

SEQ ID NO: 62089 - DNA, 15 bp, Homo sapiens
catcttcttgtgcct

SEQ ID NO: 62090 - DNA, 15 bp, Homo sapiens
tcatcttcttgtgcc

SEQ ID NO: 62091 - DNA, 15 bp, Homo sapiens
ttcatcttcttgtgc

SEQ ID NO: 62092 - DNA, 15 bp, Homo sapiens
cttcatcttcttgtg

SEQ ID NO: 62093 - DNA, 15 bp, Homo sapiens
acttcatcttcttgt

SEQ ID NO: 62094 - DNA, 15 bp, Homo sapiens
cacttcatcttcttg

SEQ ID NO: 62095 - DNA, 15 bp, Homo sapiens
ccacttcatcttctt

SEQ ID NO: 62096 - DNA, 15 bp, Homo sapiens
tccacttcatcttct

SEQ ID NO: 62097 - DNA, 15 bp, Homo sapiens
atccacttcatcttc

SEQ ID NO: 62098 - DNA, 15 bp, Homo sapiens
tatccacttcatctt

SEQ ID NO: 62099 - DNA, 15 bp, Homo sapiens
ttatccacttcatct

SEQ ID NO: 62100 - DNA, 15 bp, Homo sapiens
cttatccacttcatc

SEQ ID NO: 62101 - DNA, 15 bp, Homo sapiens
gcttatccacttcat

SEQ ID NO: 62102 - DNA, 15 bp, Homo sapiens
ggcttatccacttca

SEQ ID NO: 62103 - DNA, 15 bp, Homo sapiens
aggcttatccacttc

SEQ ID NO: 62104 - DNA, 15 bp, Homo sapiens
caggcttatccactt

SEQ ID NO: 62105 - DNA, 15 bp, Homo sapiens
ccaggcttatccact

SEQ ID NO: 62106 - DNA, 15 bp, Homo sapiens
gccaggcttatccac

SEQ ID NO: 62107 - DNA, 15 bp, Homo sapiens
tgccaggcttatcca

SEQ ID NO: 62108 - DNA, 15 bp, Homo sapiens
ctgccaggcttatcc

SEQ ID NO: 62109 - DNA, 15 bp, Homo sapiens
actgccaggcttatc

SEQ ID NO: 62110 - DNA, 15 bp, Homo sapiens
aactgccaggcttat

SEQ ID NO: 62111 - DNA, 15 bp, Homo sapiens
aaactgccaggctta

SEQ ID NO: 62112 - DNA, 15 bp, Homo sapiens
caaactgccaggctt

SEQ ID NO: 62113 - DNA, 15 bp, Homo sapiens
acaaactgccaggct

SEQ ID NO: 62114 - DNA, 15 bp, Homo sapiens
gacaaactgccaggc

SEQ ID NO: 62115 - DNA, 15 bp, Homo sapiens
tgacaaactgccagg

SEQ ID NO: 62116 - DNA, 15 bp, Homo sapiens
ttgacaaactgccag

SEQ ID NO: 62117 - DNA, 15 bp, Homo sapiens
cttgacaaactgcca

SEQ ID NO: 62118 - DNA, 15 bp, Homo sapiens
gcttgacaaactgcc

SEQ ID NO: 62119 - DNA, 15 bp, Homo sapiens
tgcttgacaaactgc

SEQ ID NO: 62120 - DNA, 15 bp, Homo sapiens
atgcttgacaaactg

SEQ ID NO: 62121 - DNA, 15 bp, Homo sapiens
aatgcttgacaaact

SEQ ID NO: 62122 - DNA, 15 bp, Homo sapiens
gaatgcttgacaaac

SEQ ID NO: 62123 - DNA, 15 bp, Homo sapiens
tgaatgcttgacaaa

SEQ ID NO: 62124 - DNA, 15 bp, Homo sapiens
atgaatgcttgacaa

SEQ ID NO: 62125 - DNA, 15 bp, Homo sapiens
gatgaatgcttgaca

SEQ ID NO: 62126 - DNA, 15 bp, Homo sapiens
tgatgaatgcttgac

SEQ ID NO: 62127 - DNA, 15 bp, Homo sapiens
ctgatgaatgcttga

SEQ ID NO: 62128 - DNA, 15 bp, Homo sapiens
actgatgaatgcttg

SEQ ID NO: 62129 - DNA, 15 bp, Homo sapiens
aactgatgaatgctt

SEQ ID NO: 62130 - DNA, 15 bp, Homo sapiens
caactgatgaatgct

SEQ ID NO: 62131 - DNA, 15 bp, Homo sapiens
acaactgatgaatgc

SEQ ID NO: 62132 - DNA, 15 bp, Homo sapiens
gacaactgatgaatg

SEQ ID NO: 62133 - DNA, 15 bp, Homo sapiens
tgacaactgatgaat

SEQ ID NO: 62134 - DNA, 15 bp, Homo sapiens
ttgacaactgatgaa

SEQ ID NO: 62135 - DNA, 15 bp, Homo sapiens
cttgacaactgatga

SEQ ID NO: 62136 - DNA, 15 bp, Homo sapiens
gcttgacaactgatg

SEQ ID NO: 62137 - DNA, 15 bp, Homo sapiens
tgcttgacaactgat

SEQ ID NO: 62138 - DNA, 15 bp, Homo sapiens
atgcttgacaactga

SEQ ID NO: 62139 - DNA, 15 bp, Homo sapiens
aatgcttgacaactg

SEQ ID NO: 62140 - DNA, 15 bp, Homo sapiens
aaatgcttgacaact

SEQ ID NO: 62141 - DNA, 15 bp, Homo sapiens
caaatgcttgacaac

SEQ ID NO: 62142 - DNA, 15 bp, Homo sapiens
acaaatgcttgacaa

SEQ ID NO: 62143 - DNA, 15 bp, Homo sapiens
gacaaatgcttgaca

SEQ ID NO: 62144 - DNA, 15 bp, Homo sapiens
tgacaaatgcttgac

SEQ ID NO: 62145 - DNA, 15 bp, Homo sapiens
ctgacaaatgcttga

SEQ ID NO: 62146 - DNA, 15 bp, Homo sapiens
actgacaaatgcttg

SEQ ID NO: 62147 - DNA, 15 bp, Homo sapiens
aactgacaaatgctt

SEQ ID NO: 62148 - DNA, 15 bp, Homo sapiens
caactgacaaatgct

SEQ ID NO: 62149 - DNA, 15 bp, Homo sapiens
gcaactgacaaatgc

SEQ ID NO: 62150 - DNA, 15 bp, Homo sapiens
tgcaactgacaaatg

SEQ ID NO: 62151 - DNA, 15 bp, Homo sapiens
ctgcaactgacaaat

SEQ ID NO: 62152 - DNA, 15 bp, Homo sapiens
tctgcaactgacaaa

SEQ ID NO: 62153 - DNA, 15 bp, Homo sapiens
ttctgcaactgacaa

SEQ ID NO: 62154 - DNA, 15 bp, Homo sapiens
attctgcaactgaca

SEQ ID NO: 62155 - DNA, 15 bp, Homo sapiens
cattctgcaactgac

SEQ ID NO: 62156 - DNA, 15 bp, Homo sapiens
acattctgcaactga

SEQ ID NO: 62157 - DNA, 15 bp, Homo sapiens
tacattctgcaactg

SEQ ID NO: 62158 - DNA, 15 bp, Homo sapiens
ctacattctgcaact

SEQ ID NO: 62159 - DNA, 15 bp, Homo sapiens
cctacattctgcaac

SEQ ID NO: 62160 - DNA, 15 bp, Homo sapiens
acctacattctgcaa

SEQ ID NO: 62161 - DNA, 15 bp, Homo sapiens
tacctacattctgca

SEQ ID NO: 62162 - DNA, 15 bp, Homo sapiens
ctacctacattctgc

SEQ ID NO: 62163 - DNA, 15 bp, Homo sapiens
cctacctacattctg

SEQ ID NO: 62164 - DNA, 15 bp, Homo sapiens
gcctacctacattct

SEQ ID NO: 62165 - DNA, 15 bp, Homo sapiens
agcctacctacattc

SEQ ID NO: 62166 - DNA, 15 bp, Homo sapiens
cagcctacctacatt

SEQ ID NO: 62167 - DNA, 15 bp, Homo sapiens
gcagcctacctacat

SEQ ID NO: 62168 - DNA, 15 bp, Homo sapiens
ggcagcctacctaca

SEQ ID NO: 62169 - DNA, 15 bp, Homo sapiens
tggcagcctacctac

SEQ ID NO: 62170 - DNA, 15 bp, Homo sapiens
ttggcagcctaccta

SEQ ID NO: 62171 - DNA, 15 bp, Homo sapiens
cttggcagcctacct

SEQ ID NO: 62172 - DNA, 15 bp, Homo sapiens
ccttggcagcctacc

SEQ ID NO: 62173 - DNA, 15 bp, Homo sapiens
gccttggcagcctac

SEQ ID NO: 62174 - DNA, 15 bp, Homo sapiens
agccttggcagccta

SEQ ID NO: 62175 - DNA, 15 bp, Homo sapiens
aagccttggcagcct

SEQ ID NO: 62176 - DNA, 15 bp, Homo sapiens
aaagccttggcagcc

SEQ ID NO: 62177 - DNA, 15 bp, Homo sapiens
taaagccttggcagc

SEQ ID NO: 62178 - DNA, 15 bp, Homo sapiens
ataaagccttggcag

SEQ ID NO: 62179 - DNA, 15 bp, Homo sapiens
aataaagccttggca

SEQ ID NO: 62180 - DNA, 15 bp, Homo sapiens
caataaagccttggc

SEQ ID NO: 62181 - DNA, 15 bp, Homo sapiens
acaataaagccttgg

SEQ ID NO: 62182 - DNA, 15 bp, Homo sapiens
tacaataaagccttg

SEQ ID NO: 62183 - DNA, 15 bp, Homo sapiens
ctacaataaagcctt

SEQ ID NO: 62184 - DNA, 15 bp, Homo sapiens
gctacaataaagcct

SEQ ID NO: 62185 - DNA, 15 bp, Homo sapiens
ggctacaataaagcc

SEQ ID NO: 62186 - DNA, 15 bp, Homo sapiens
aggctacaataaagc

SEQ ID NO: 62187 - DNA, 15 bp, Homo sapiens
caggctacaataaag

SEQ ID NO: 62188 - DNA, 15 bp, Homo sapiens
ccaggctacaataaa

SEQ ID NO: 62189 - DNA, 15 bp, Homo sapiens
accaggctacaataa

SEQ ID NO: 62190 - DNA, 15 bp, Homo sapiens
aaccaggctacaata

SEQ ID NO: 62191 - DNA, 15 bp, Homo sapiens
gaaccaggctacaat

SEQ ID NO: 62192 - DNA, 15 bp, Homo sapiens
agaaccaggctacaa

SEQ ID NO: 62193 - DNA, 15 bp, Homo sapiens
tagaaccaggctaca

SEQ ID NO: 62194 - DNA, 15 bp, Homo sapiens
atagaaccaggctac

SEQ ID NO: 62195 - DNA, 15 bp, Homo sapiens
aatagaaccaggcta

SEQ ID NO: 62196 - DNA, 15 bp, Homo sapiens
caatagaaccaggct

SEQ ID NO: 62197 - DNA, 15 bp, Homo sapiens
gcaatagaaccaggc

SEQ ID NO: 62198 - DNA, 15 bp, Homo sapiens
tgcaatagaaccagg

SEQ ID NO: 62199 - DNA, 15 bp, Homo sapiens
ctgcaatagaaccag

SEQ ID NO: 62200 - DNA, 15 bp, Homo sapiens
gctgcaatagaacca

SEQ ID NO: 62201 - DNA, 15 bp, Homo sapiens
agctgcaatagaacc

SEQ ID NO: 62202 - DNA, 15 bp, Homo sapiens
aagctgcaatagaac

SEQ ID NO: 62203 - DNA, 15 bp, Homo sapiens
aaagctgcaatagaa

SEQ ID NO: 62204 - DNA, 15 bp, Homo sapiens
taaagctgcaataga

SEQ ID NO: 62205 - DNA, 15 bp, Homo sapiens
ataaagctgcaatag

SEQ ID NO: 62206 - DNA, 15 bp, Homo sapiens
aataaagctgcaata

SEQ ID NO: 62207 - DNA, 15 bp, Homo sapiens
gaataaagctgcaat

SEQ ID NO: 62208 - DNA, 15 bp, Homo sapiens
agaataaagctgcaa

SEQ ID NO: 62209 - DNA, 15 bp, Homo sapiens
tagaataaagctgca

SEQ ID NO: 62210 - DNA, 15 bp, Homo sapiens
ctagaataaagctgc

SEQ ID NO: 62211 - DNA, 15 bp, Homo sapiens
gctagaataaagctg

SEQ ID NO: 62212 - DNA, 15 bp, Homo sapiens
tgctagaataaagct

SEQ ID NO: 62213 - DNA, 15 bp, Homo sapiens
ttgctagaataaagc

SEQ ID NO: 62214 - DNA, 15 bp, Homo sapiens
cttgctagaataaag

SEQ ID NO: 62215 - DNA, 15 bp, Homo sapiens
ccttgctagaataaa

SEQ ID NO: 62216 - DNA, 15 bp, Homo sapiens
gccttgctagaataa

SEQ ID NO: 62217 - DNA, 15 bp, Homo sapiens
agccttgctagaata

SEQ ID NO: 62218 - DNA, 15 bp, Homo sapiens
cagccttgctagaat

SEQ ID NO: 62219 - DNA, 15 bp, Homo sapiens
gcagccttgctagaa

SEQ ID NO: 62220 - DNA, 15 bp, Homo sapiens
agcagccttgctaga

SEQ ID NO: 62221 - DNA, 15 bp, Homo sapiens
cagcagccttgctag

SEQ ID NO: 62222 - DNA, 15 bp, Homo sapiens
ccagcagccttgcta

SEQ ID NO: 62223 - DNA, 15 bp, Homo sapiens
tccagcagccttgct

SEQ ID NO: 62224 - DNA, 15 bp, Homo sapiens
ttccagcagccttgc

SEQ ID NO: 62225 - DNA, 15 bp, Homo sapiens
tttccagcagccttg

SEQ ID NO: 62226 - DNA, 15 bp, Homo sapiens
ttttccagcagcctt

SEQ ID NO: 62227 - DNA, 15 bp, Homo sapiens
attttccagcagcct

SEQ ID NO: 62228 - DNA, 15 bp, Homo sapiens
tattttccagcagcc

SEQ ID NO: 62229 - DNA, 15 bp, Homo sapiens
gtattttccagcagc

SEQ ID NO: 62230 - DNA, 15 bp, Homo sapiens
tgtattttccagcag

SEQ ID NO: 62231 - DNA, 15 bp, Homo sapiens
ttgtattttccagca

SEQ ID NO: 62232 - DNA, 15 bp, Homo sapiens
attgtattttccagc

SEQ ID NO: 62233 - DNA, 15 bp, Homo sapiens
tattgtattttccag

SEQ ID NO: 62234 - DNA, 15 bp, Homo sapiens
ttattgtattttcca

SEQ ID NO: 62235 - DNA, 15 bp, Homo sapiens
attattgtattttcc

SEQ ID NO: 62236 - DNA, 15 bp, Homo sapiens
gattattgtattttc

SEQ ID NO: 62237 - DNA, 15 bp, Homo sapiens
tgattattgtatttt

SEQ ID NO: 62238 - DNA, 15 bp, Homo sapiens
gtgattattgtattt

SEQ ID NO: 62239 - DNA, 15 bp, Homo sapiens
agtgattattgtatt

SEQ ID NO: 62240 - DNA, 15 bp, Homo sapiens
cagtgattattgtat

SEQ ID NO: 62241 - DNA, 15 bp, Homo sapiens
ccagtgattattgta

SEQ ID NO: 62242 - DNA, 15 bp, Homo sapiens
accagtgattattgt

SEQ ID NO: 62243 - DNA, 15 bp, Homo sapiens
gaccagtgattattg

SEQ ID NO: 62244 - DNA, 15 bp, Homo sapiens
ggaccagtgattatt

SEQ ID NO: 62245 - DNA, 15 bp, Homo sapiens
tggaccagtgattat

SEQ ID NO: 62246 - DNA, 15 bp, Homo sapiens
ttggaccagtgatta

SEQ ID NO: 62247 - DNA, 15 bp, Homo sapiens
cttggaccagtgatt

SEQ ID NO: 62248 - DNA, 15 bp, Homo sapiens
tcttggaccagtgat

SEQ ID NO: 62249 - DNA, 15 bp, Homo sapiens
ttcttggaccagtga

SEQ ID NO: 62250 - DNA, 15 bp, Homo sapiens
tttcttggaccagtg

SEQ ID NO: 62251 - DNA, 15 bp, Homo sapiens
ctttcttggaccagt

SEQ ID NO: 62252 - DNA, 15 bp, Homo sapiens
tctttcttggaccag

SEQ ID NO: 62253 - DNA, 15 bp, Homo sapiens
ttctttcttggacca

SEQ ID NO: 62254 - DNA, 15 bp, Homo sapiens
gttctttcttggacc

SEQ ID NO: 62255 - DNA, 15 bp, Homo sapiens
agttctttcttggac

SEQ ID NO: 62256 - DNA, 15 bp, Homo sapiens
gagttctttcttgga

SEQ ID NO: 62257 - DNA, 15 bp, Homo sapiens
agagttctttcttgg

SEQ ID NO: 62258 - DNA, 15 bp, Homo sapiens
aagagttctttcttg

SEQ ID NO: 62259 - DNA, 15 bp, Homo sapiens
taagagttctttctt

SEQ ID NO: 62260 - DNA, 15 bp, Homo sapiens
ataagagttctttct

SEQ ID NO: 62261 - DNA, 15 bp, Homo sapiens
tataagagttctttc

SEQ ID NO: 62262 - DNA, 15 bp, Homo sapiens
gtataagagttcttt

SEQ ID NO: 62263 - DNA, 15 bp, Homo sapiens
agtataagagttctt

SEQ ID NO: 62264 - DNA, 15 bp, Homo sapiens
gagtataagagttct

SEQ ID NO: 62265 - DNA, 15 bp, Homo sapiens
agagtataagagttc

SEQ ID NO: 62266 - DNA, 15 bp, Homo sapiens
tagagtataagagtt

SEQ ID NO: 62267 - DNA, 15 bp, Homo sapiens
atagagtataagagt

SEQ ID NO: 62268 - DNA, 15 bp, Homo sapiens
gatagagtataagag

SEQ ID NO: 62269 - DNA, 15 bp, Homo sapiens
agatagagtataaga

SEQ ID NO: 62270 - DNA, 15 bp, Homo sapiens
tagatagagtataag

SEQ ID NO: 62271 - DNA, 15 bp, Homo sapiens
atagatagagtataa

SEQ ID NO: 62272 - DNA, 15 bp, Homo sapiens
tatagatagagtata

SEQ ID NO: 62273 - DNA, 15 bp, Homo sapiens
atatagatagagtat

SEQ ID NO: 62274 - DNA, 15 bp, Homo sapiens
catatagatagagta

SEQ ID NO: 62275 - DNA, 15 bp, Homo sapiens
tcatatagatagagt

SEQ ID NO: 62276 - DNA, 15 bp, Homo sapiens
ttcatatagatagag

SEQ ID NO: 62277 - DNA, 15 bp, Homo sapiens
cttcatatagataga

SEQ ID NO: 62278 - DNA, 15 bp, Homo sapiens
tcttcatatagatag

SEQ ID NO: 62279 - DNA, 15 bp, Homo sapiens
ttcttcatatagata

SEQ ID NO: 62280 - DNA, 15 bp, Homo sapiens
tttcttcatatagat

SEQ ID NO: 62281 - DNA, 15 bp, Homo sapiens
gtttcttcatataga

SEQ ID NO: 62282 - DNA, 15 bp, Homo sapiens
tgtttcttcatatag

SEQ ID NO: 62283 - DNA, 15 bp, Homo sapiens
ctgtttcttcatata

SEQ ID NO: 62284 - DNA, 15 bp, Homo sapiens
actgtttcttcatat

SEQ ID NO: 62285 - DNA, 15 bp, Homo sapiens
tactgtttcttcata

SEQ ID NO: 62286 - DNA, 15 bp, Homo sapiens
ttactgtttcttcat

SEQ ID NO: 62287 - DNA, 15 bp, Homo sapiens
tttactgtttcttca

SEQ ID NO: 62288 - DNA, 15 bp, Homo sapiens
ttttactgtttcttc

SEQ ID NO: 62289 - DNA, 15 bp, Homo sapiens
cttttactgtttctt

SEQ ID NO: 62290 - DNA, 15 bp, Homo sapiens
acttttactgtttct

SEQ ID NO: 62291 - DNA, 15 bp, Homo sapiens
gacttttactgtttc

SEQ ID NO: 62292 - DNA, 15 bp, Homo sapiens
tgacttttactgttt

SEQ ID NO: 62293 - DNA, 15 bp, Homo sapiens
ttgacttttactgtt

SEQ ID NO: 62294 - DNA, 15 bp, Homo sapiens
attgacttttactgt

SEQ ID NO: 62295 - DNA, 15 bp, Homo sapiens
aattgacttttactg

SEQ ID NO: 62296 - DNA, 15 bp, Homo sapiens
gaattgacttttact

SEQ ID NO: 62297 - DNA, 15 bp, Homo sapiens
tgaattgacttttac

SEQ ID NO: 62298 - DNA, 15 bp, Homo sapiens
ctgaattgactttta

SEQ ID NO: 62299 - DNA, 15 bp, Homo sapiens
actgaattgactttt

SEQ ID NO: 62300 - DNA, 15 bp, Homo sapiens
tactgaattgacttt

SEQ ID NO: 62301 - DNA, 15 bp, Homo sapiens
ctactgaattgactt

SEQ ID NO: 62302 - DNA, 15 bp, Homo sapiens
tctactgaattgact

SEQ ID NO: 62303 - DNA, 15 bp, Homo sapiens
ttctactgaattgac

SEQ ID NO: 62304 - DNA, 15 bp, Homo sapiens
tttctactgaattga

SEQ ID NO: 62305 - DNA, 15 bp, Homo sapiens
atttctactgaattg

SEQ ID NO: 62306 - DNA, 15 bp, Homo sapiens
gatttctactgaatt

SEQ ID NO: 62307 - DNA, 15 bp, Homo sapiens
tgatttctactgaat

SEQ ID NO: 62308 - DNA, 15 bp, Homo sapiens
atgatttctactgaa

SEQ ID NO: 62309 - DNA, 15 bp, Homo sapiens
catgatttctactga

SEQ ID NO: 62310 - DNA, 15 bp, Homo sapiens
tcatgatttctactg

SEQ ID NO: 62311 - DNA, 15 bp, Homo sapiens
atcatgatttctact

SEQ ID NO: 62312 - DNA, 15 bp, Homo sapiens
aatcatgatttctac

SEQ ID NO: 62313 - DNA, 15 bp, Homo sapiens
aaatcatgatttcta

SEQ ID NO: 62314 - DNA, 15 bp, Homo sapiens
aaaatcatgatttct

SEQ ID NO: 62315 - DNA, 15 bp, Homo sapiens
aaaaatcatgatttc

SEQ ID NO: 62316 - DNA, 15 bp, Homo sapiens
caaaaatcatgattt

SEQ ID NO: 62317 - DNA, 15 bp, Homo sapiens
acaaaaatcatgatt

SEQ ID NO: 62318 - DNA, 15 bp, Homo sapiens
cacaaaaatcatgat

SEQ ID NO: 62319 - DNA, 15 bp, Homo sapiens
gcacaaaaatcatga

SEQ ID NO: 62320 - DNA, 15 bp, Homo sapiens
ggcacaaaaatcatg

SEQ ID NO: 62321 - DNA, 15 bp, Homo sapiens
aggcacaaaaatcat

SEQ ID NO: 62322 - DNA, 15 bp, Homo sapiens
caggcacaaaaatca

SEQ ID NO: 62323 - DNA, 15 bp, Homo sapiens
ccaggcacaaaaatc

SEQ ID NO: 62324 - DNA, 15 bp, Homo sapiens
accaggcacaaaaat

SEQ ID NO: 62325 - DNA, 15 bp, Homo sapiens
caccaggcacaaaaa

SEQ ID NO: 62326 - DNA, 15 bp, Homo sapiens
gcaccaggcacaaaa

SEQ ID NO: 62327 - DNA, 15 bp, Homo sapiens
agcaccaggcacaaa

SEQ ID NO: 62328 - DNA, 15 bp, Homo sapiens
aagcaccaggcacaa

SEQ ID NO: 62329 - DNA, 15 bp, Homo sapiens
aaagcaccaggcaca

SEQ ID NO: 62330 - DNA, 15 bp, Homo sapiens
gaaagcaccaggcac

SEQ ID NO: 62331 - DNA, 15 bp, Homo sapiens
tgaaagcaccaggca

SEQ ID NO: 62332 - DNA, 15 bp, Homo sapiens
gtgaaagcaccaggc

SEQ ID NO: 62333 - DNA, 15 bp, Homo sapiens
agtgaaagcaccagg

SEQ ID NO: 62334 - DNA, 15 bp, Homo sapiens
aagtgaaagcaccag

SEQ ID NO: 62335 - DNA, 15 bp, Homo sapiens
aaagtgaaagcacca

SEQ ID NO: 62336 - DNA, 15 bp, Homo sapiens
aaaagtgaaagcacc

SEQ ID NO: 62337 - DNA, 15 bp, Homo sapiens
aaaaagtgaaagcac

SEQ ID NO: 62338 - DNA, 15 bp, Homo sapiens
aaaaaagtgaaagca

SEQ ID NO: 62339 - DNA, 15 bp, Homo sapiens
taaaaaagtgaaagc

SEQ ID NO: 62340 - DNA, 15 bp, Homo sapiens
ataaaaaagtgaaag

SEQ ID NO: 62341 - DNA, 15 bp, Homo sapiens
cataaaaaagtgaaa

SEQ ID NO: 62342 - DNA, 15 bp, Homo sapiens
gcataaaaaagtgaa

SEQ ID NO: 62343 - DNA, 15 bp, Homo sapiens
ggcataaaaaagtga

SEQ ID NO: 62344 - DNA, 15 bp, Homo sapiens
tggcataaaaaagtg

SEQ ID NO: 62345 - DNA, 15 bp, Homo sapiens
gtggcataaaaaagt

SEQ ID NO: 62346 - DNA, 15 bp, Homo sapiens
tgtggcataaaaaag

SEQ ID NO: 62347 - DNA, 15 bp, Homo sapiens
ttgtggcataaaaaa

SEQ ID NO: 62348 - DNA, 15 bp, Homo sapiens
attgtggcataaaaa

SEQ ID NO: 62349 - DNA, 15 bp, Homo sapiens
tattgtggcataaaa

SEQ ID NO: 62350 - DNA, 15 bp, Homo sapiens
gtattgtggcataaa

SEQ ID NO: 62351 - DNA, 15 bp, Homo sapiens
ggtattgtggcataa

SEQ ID NO: 62352 - DNA, 15 bp, Homo sapiens
tggtattgtggcata

SEQ ID NO: 62353 - DNA, 15 bp, Homo sapiens
ttggtattgtggcat

SEQ ID NO: 62354 - DNA, 15 bp, Homo sapiens
cttggtattgtggca

SEQ ID NO: 62355 - DNA, 15 bp, Homo sapiens
tcttggtattgtggc

SEQ ID NO: 62356 - DNA, 15 bp, Homo sapiens
ctcttggtattgtgg

SEQ ID NO: 62357 - DNA, 15 bp, Homo sapiens
cctcttggtattgtg

SEQ ID NO: 62358 - DNA, 15 bp, Homo sapiens
acctcttggtattgt

SEQ ID NO: 62359 - DNA, 15 bp, Homo sapiens
aacctcttggtattg

SEQ ID NO: 62360 - DNA, 15 bp, Homo sapiens
taacctcttggtatt

SEQ ID NO: 62361 - DNA, 15 bp, Homo sapiens
ttaacctcttggtat

SEQ ID NO: 62362 - DNA, 15 bp, Homo sapiens
tttaacctcttggta

SEQ ID NO: 62363 - DNA, 15 bp, Homo sapiens
ttttaacctcttggt

SEQ ID NO: 62364 - DNA, 15 bp, Homo sapiens
attttaacctcttgg

SEQ ID NO: 62365 - DNA, 15 bp, Homo sapiens
cattttaacctcttg

SEQ ID NO: 62366 - DNA, 15 bp, Homo sapiens
tcattttaacctctt

SEQ ID NO: 62367 - DNA, 15 bp, Homo sapiens
ttcattttaacctct

SEQ ID NO: 62368 - DNA, 15 bp, Homo sapiens
cttcattttaacctc

SEQ ID NO: 62369 - DNA, 15 bp, Homo sapiens
acttcattttaacct

SEQ ID NO: 62370 - DNA, 15 bp, Homo sapiens
cacttcattttaacc

SEQ ID NO: 62371 - DNA, 15 bp, Homo sapiens
acacttcattttaac

SEQ ID NO: 62372 - DNA, 15 bp, Homo sapiens
gacacttcattttaa

SEQ ID NO: 62373 - DNA, 15 bp, Homo sapiens
agacacttcatttta

SEQ ID NO: 62374 - DNA, 15 bp, Homo sapiens
aagacacttcatttt

SEQ ID NO: 62375 - DNA, 15 bp, Homo sapiens
aaagacacttcattt

SEQ ID NO: 62376 - DNA, 15 bp, Homo sapiens
caaagacacttcatt

SEQ ID NO: 62377 - DNA, 15 bp, Homo sapiens
tcaaagacacttcat

SEQ ID NO: 62378 - DNA, 15 bp, Homo sapiens
atcaaagacacttca

SEQ ID NO: 62379 - DNA, 15 bp, Homo sapiens
aatcaaagacacttc

SEQ ID NO: 62380 - DNA, 15 bp, Homo sapiens
caatcaaagacactt

SEQ ID NO: 62381 - DNA, 15 bp, Homo sapiens
ccaatcaaagacact

SEQ ID NO: 62382 - DNA, 15 bp, Homo sapiens
cccaatcaaagacac

SEQ ID NO: 62383 - DNA, 15 bp, Homo sapiens
tcccaatcaaagaca

SEQ ID NO: 62384 - DNA, 15 bp, Homo sapiens
ttcccaatcaaagac

SEQ ID NO: 62385 - DNA, 15 bp, Homo sapiens
attcccaatcaaaga

SEQ ID NO: 62386 - DNA, 15 bp, Homo sapiens
tattcccaatcaaag

SEQ ID NO: 62387 - DNA, 15 bp, Homo sapiens
gtattcccaatcaaa

SEQ ID NO: 62388 - DNA, 15 bp, Homo sapiens
ggtattcccaatcaa

SEQ ID NO: 62389 - DNA, 15 bp, Homo sapiens
tggtattcccaatca

SEQ ID NO: 62390 - DNA, 15 bp, Homo sapiens
atggtattcccaatc

SEQ ID NO: 62391 - DNA, 15 bp, Homo sapiens
gatggtattcccaat

SEQ ID NO: 62392 - DNA, 15 bp, Homo sapiens
agatggtattcccaa

SEQ ID NO: 62393 - DNA, 15 bp, Homo sapiens
tagatggtattccca

SEQ ID NO: 62394 - DNA, 15 bp, Homo sapiens
atagatggtattccc

SEQ ID NO: 62395 - DNA, 15 bp, Homo sapiens
gatagatggtattcc

SEQ ID NO: 62396 - DNA, 15 bp, Homo sapiens
agatagatggtattc

SEQ ID NO: 62397 - DNA, 15 bp, Homo sapiens
cagatagatggtatt

SEQ ID NO: 62398 - DNA, 15 bp, Homo sapiens
ccagatagatggtat

SEQ ID NO: 62399 - DNA, 15 bp, Homo sapiens
cccagatagatggta

SEQ ID NO: 62400 - DNA, 15 bp, Homo sapiens
tcccagatagatggt

SEQ ID NO: 62401 - DNA, 15 bp, Homo sapiens
ttcccagatagatgg

SEQ ID NO: 62402 - DNA, 15 bp, Homo sapiens
tttcccagatagatg

SEQ ID NO: 62403 - DNA, 15 bp, Homo sapiens
ttttcccagatagat

SEQ ID NO: 62404 - DNA, 15 bp, Homo sapiens
cttttcccagataga

SEQ ID NO: 62405 - DNA, 15 bp, Homo sapiens
tcttttcccagatag

SEQ ID NO: 62406 - DNA, 15 bp, Homo sapiens
gtcttttcccagata

SEQ ID NO: 62407 - DNA, 15 bp, Homo sapiens
tgtcttttcccagat

SEQ ID NO: 62408 - DNA, 15 bp, Homo sapiens
ctgtcttttcccaga

SEQ ID NO: 62409 - DNA, 15 bp, Homo sapiens
cctgtcttttcccag

SEQ ID NO: 62410 - DNA, 15 bp, Homo sapiens
ccctgtcttttccca

SEQ ID NO: 62411 - DNA, 15 bp, Homo sapiens
gccctgtcttttccc

SEQ ID NO: 62412 - DNA, 15 bp, Homo sapiens
agccctgtcttttcc

SEQ ID NO: 62413 - DNA, 15 bp, Homo sapiens
cagccctgtcttttc

SEQ ID NO: 62414 - DNA, 15 bp, Homo sapiens
gcagccctgtctttt

SEQ ID NO: 62415 - DNA, 15 bp, Homo sapiens
tgcagccctgtcttt

SEQ ID NO: 62416 - DNA, 15 bp, Homo sapiens
ttgcagccctgtctt

SEQ ID NO: 62417 - DNA, 15 bp, Homo sapiens
gttgcagccctgtct

SEQ ID NO: 62418 - DNA, 15 bp, Homo sapiens
agttgcagccctgtc

SEQ ID NO: 62419 - DNA, 15 bp, Homo sapiens
aagttgcagccctgt

SEQ ID NO: 62420 - DNA, 15 bp, Homo sapiens
gaagttgcagccctg

SEQ ID NO: 62421 - DNA, 15 bp, Homo sapiens
agaagttgcagccct

SEQ ID NO: 62422 - DNA, 15 bp, Homo sapiens
cagaagttgcagccc

SEQ ID NO: 62423 - DNA, 15 bp, Homo sapiens
tcagaagttgcagcc

SEQ ID NO: 62424 - DNA, 15 bp, Homo sapiens
ttcagaagttgcagc

SEQ ID NO: 62425 - DNA, 15 bp, Homo sapiens
cttcagaagttgcag

SEQ ID NO: 62426 - DNA, 15 bp, Homo sapiens
tcttcagaagttgca

SEQ ID NO: 62427 - DNA, 15 bp, Homo sapiens
gtcttcagaagttgc

SEQ ID NO: 62428 - DNA, 15 bp, Homo sapiens
ggtcttcagaagttg

SEQ ID NO: 62429 - DNA, 15 bp, Homo sapiens
aggtcttcagaagtt

SEQ ID NO: 62430 - DNA, 15 bp, Homo sapiens
aaggtcttcagaagt

SEQ ID NO: 62431 - DNA, 15 bp, Homo sapiens
caaggtcttcagaag

SEQ ID NO: 62432 - DNA, 15 bp, Homo sapiens
tcaaggtcttcagaa

SEQ ID NO: 62433 - DNA, 15 bp, Homo sapiens
gtcaaggtcttcaga

SEQ ID NO: 62434 - DNA, 15 bp, Homo sapiens
tgtcaaggtcttcag

SEQ ID NO: 62435 - DNA, 15 bp, Homo sapiens
gtgtcaaggtcttca

SEQ ID NO: 62436 - DNA, 15 bp, Homo sapiens
agtgtcaaggtcttc

SEQ ID NO: 62437 - DNA, 15 bp, Homo sapiens
gagtgtcaaggtctt

SEQ ID NO: 62438 - DNA, 15 bp, Homo sapiens
agagtgtcaaggtct

SEQ ID NO: 62439 - DNA, 15 bp, Homo sapiens
cagagtgtcaaggtc

SEQ ID NO: 62440 - DNA, 15 bp, Homo sapiens
acagagtgtcaaggt

SEQ ID NO: 62441 - DNA, 15 bp, Homo sapiens
gacagagtgtcaagg

SEQ ID NO: 62442 - DNA, 15 bp, Homo sapiens
ggacagagtgtcaag

SEQ ID NO: 62443 - DNA, 15 bp, Homo sapiens
aggacagagtgtcaa

SEQ ID NO: 62444 - DNA, 15 bp, Homo sapiens
caggacagagtgtca

SEQ ID NO: 62445 - DNA, 15 bp, Homo sapiens
acaggacagagtgtc

SEQ ID NO: 62446 - DNA, 15 bp, Homo sapiens
aacaggacagagtgt

SEQ ID NO: 62447 - DNA, 15 bp, Homo sapiens
taacaggacagagtg

SEQ ID NO: 62448 - DNA, 15 bp, Homo sapiens
gtaacaggacagagt

SEQ ID NO: 62449 - DNA, 15 bp, Homo sapiens
ggtaacaggacagag

SEQ ID NO: 62450 - DNA, 15 bp, Homo sapiens
gggtaacaggacaga

SEQ ID NO: 62451 - DNA, 15 bp, Homo sapiens
agggtaacaggacag

SEQ ID NO: 62452 - DNA, 15 bp, Homo sapiens
cagggtaacaggaca

SEQ ID NO: 62453 - DNA, 15 bp, Homo sapiens
gcagggtaacaggac

SEQ ID NO: 62454 - DNA, 15 bp, Homo sapiens
agcagggtaacagga

SEQ ID NO: 62455 - DNA, 15 bp, Homo sapiens
aagcagggtaacagg

SEQ ID NO: 62456 - DNA, 15 bp, Homo sapiens
gaagcagggtaacag

SEQ ID NO: 62457 - DNA, 15 bp, Homo sapiens
tgaagcagggtaaca

SEQ ID NO: 62458 - DNA, 15 bp, Homo sapiens
atgaagcagggtaac

SEQ ID NO: 62459 - DNA, 15 bp, Homo sapiens
aatgaagcagggtaa

SEQ ID NO: 62460 - DNA, 15 bp, Homo sapiens
aaatgaagcagggta

SEQ ID NO: 62461 - DNA, 15 bp, Homo sapiens
aaaatgaagcagggt

SEQ ID NO: 62462 - DNA, 15 bp, Homo sapiens
aaaaatgaagcaggg

SEQ ID NO: 62463 - DNA, 15 bp, Homo sapiens
gaaaaatgaagcagg

SEQ ID NO: 62464 - DNA, 15 bp, Homo sapiens
agaaaaatgaagcag

SEQ ID NO: 62465 - DNA, 15 bp, Homo sapiens
gagaaaaatgaagca

SEQ ID NO: 62466 - DNA, 15 bp, Homo sapiens
ggagaaaaatgaagc

SEQ ID NO: 62467 - DNA, 15 bp, Homo sapiens
aggagaaaaatgaag

SEQ ID NO: 62468 - DNA, 15 bp, Homo sapiens
caggagaaaaatgaa

SEQ ID NO: 62469 - DNA, 15 bp, Homo sapiens
gcaggagaaaaatga

SEQ ID NO: 62470 - DNA, 15 bp, Homo sapiens
cgcaggagaaaaatg

SEQ ID NO: 62471 - DNA, 15 bp, Homo sapiens
gcgcaggagaaaaat

SEQ ID NO: 62472 - DNA, 15 bp, Homo sapiens
agcgcaggagaaaaa

SEQ ID NO: 62473 - DNA, 15 bp, Homo sapiens
aagcgcaggagaaaa

SEQ ID NO: 62474 - DNA, 15 bp, Homo sapiens
taagcgcaggagaaa

SEQ ID NO: 62475 - DNA, 15 bp, Homo sapiens
ataagcgcaggagaa

SEQ ID NO: 62476 - DNA, 15 bp, Homo sapiens
gataagcgcaggaga

SEQ ID NO: 62477 - DNA, 15 bp, Homo sapiens
tgataagcgcaggag

SEQ ID NO: 62478 - DNA, 15 bp, Homo sapiens
gtgataagcgcagga

SEQ ID NO: 62479 - DNA, 15 bp, Homo sapiens
agtgataagcgcagg

SEQ ID NO: 62480 - DNA, 15 bp, Homo sapiens
tagtgataagcgcag

SEQ ID NO: 62481 - DNA, 15 bp, Homo sapiens
gtagtgataagcgca

SEQ ID NO: 62482 - DNA, 15 bp, Homo sapiens
agtagtgataagcgc

SEQ ID NO: 62483 - DNA, 15 bp, Homo sapiens
aagtagtgataagcg

SEQ ID NO: 62484 - DNA, 15 bp, Homo sapiens
caagtagtgataagc

SEQ ID NO: 62485 - DNA, 15 bp, Homo sapiens
tcaagtagtgataag

SEQ ID NO: 62486 - DNA, 15 bp, Homo sapiens
atcaagtagtgataa

SEQ ID NO: 62487 - DNA, 15 bp, Homo sapiens
catcaagtagtgata

SEQ ID NO: 62488 - DNA, 15 bp, Homo sapiens
gcatcaagtagtgat

SEQ ID NO: 62489 - DNA, 15 bp, Homo sapiens
agcatcaagtagtga

SEQ ID NO: 62490 - DNA, 15 bp, Homo sapiens
tagcatcaagtagtg

SEQ ID NO: 62491 - DNA, 15 bp, Homo sapiens
atagcatcaagtagt

SEQ ID NO: 62492 - DNA, 15 bp, Homo sapiens
tatagcatcaagtag

SEQ ID NO: 62493 - DNA, 15 bp, Homo sapiens
ttatagcatcaagta

SEQ ID NO: 62494 - DNA, 15 bp, Homo sapiens
tttatagcatcaagt

SEQ ID NO: 62495 - DNA, 15 bp, Homo sapiens
gtttatagcatcaag

SEQ ID NO: 62496 - DNA, 15 bp, Homo sapiens
tgtttatagcatcaa

SEQ ID NO: 62497 - DNA, 15 bp, Homo sapiens
ttgtttatagcatca

SEQ ID NO: 62498 - DNA, 15 bp, Homo sapiens
tttgtttatagcatc

SEQ ID NO: 62499 - DNA, 15 bp, Homo sapiens
atttgtttatagcat

SEQ ID NO: 62500 - DNA, 15 bp, Homo sapiens
tatttgtttatagca

SEQ ID NO: 62501 - DNA, 15 bp, Homo sapiens
ttatttgtttatagc

SEQ ID NO: 62502 - DNA, 15 bp, Homo sapiens
tttatttgtttatag

SEQ ID NO: 62503 - DNA, 15 bp, Homo sapiens
ttttatttgtttata

SEQ ID NO: 62504 - DNA, 15 bp, Homo sapiens
tttttatttgtttat

SEQ ID NO: 62505 - DNA, 15 bp, Homo sapiens
gtttttatttgttta

SEQ ID NO: 62506 - DNA, 15 bp, Homo sapiens
tgtttttatttgttt

SEQ ID NO: 62507 - DNA, 15 bp, Homo sapiens
atgtttttatttgtt

SEQ ID NO: 62508 - DNA, 15 bp, Homo sapiens
tatgtttttatttgt

SEQ ID NO: 62509 - DNA, 15 bp, Homo sapiens
atatgtttttatttg

SEQ ID NO: 62510 - DNA, 15 bp, Homo sapiens
tatatgtttttattt

SEQ ID NO: 62511 - DNA, 15 bp, Homo sapiens
atatatgtttttatt

SEQ ID NO: 62512 - DNA, 15 bp, Homo sapiens
catatatgtttttat

SEQ ID NO: 62513 - DNA, 15 bp, Homo sapiens
tcatatatgttttta

SEQ ID NO: 62514 - DNA, 15 bp, Homo sapiens
atcatatatgttttt

SEQ ID NO: 62515 - DNA, 15 bp, Homo sapiens
tatcatatatgtttt

SEQ ID NO: 62516 - DNA, 15 bp, Homo sapiens
atatcatatatgttt

SEQ ID NO: 62517 - DNA, 15 bp, Homo sapiens
tatatcatatatgtt

SEQ ID NO: 62518 - DNA, 15 bp, Homo sapiens
ttatatcatatatgt

SEQ ID NO: 62519 - DNA, 15 bp, Homo sapiens
cttatatcatatatg

SEQ ID NO: 62520 - DNA, 15 bp, Homo sapiens
ccttatatcatatat

SEQ ID NO: 62521 - DNA, 15 bp, Homo sapiens
accttatatcatata

SEQ ID NO: 62522 - DNA, 15 bp, Homo sapiens
gaccttatatcatat

SEQ ID NO: 62523 - DNA, 15 bp, Homo sapiens
agaccttatatcata

SEQ ID NO: 62524 - DNA, 15 bp, Homo sapiens
tagaccttatatcat

SEQ ID NO: 62525 - DNA, 15 bp, Homo sapiens
atagaccttatatca

SEQ ID NO: 62526 - DNA, 15 bp, Homo sapiens
aatagaccttatatc

SEQ ID NO: 62527 - DNA, 15 bp, Homo sapiens
aaatagaccttatat

SEQ ID NO: 62528 - DNA, 15 bp, Homo sapiens
gaaatagaccttata

SEQ ID NO: 62529 - DNA, 15 bp, Homo sapiens
agaaatagaccttat

SEQ ID NO: 62530 - DNA, 15 bp, Homo sapiens
gagaaatagacctta

SEQ ID NO: 62531 - DNA, 15 bp, Homo sapiens
ggagaaatagacctt

SEQ ID NO: 62532 - DNA, 15 bp, Homo sapiens
aggagaaatagacct

SEQ ID NO: 62533 - DNA, 15 bp, Homo sapiens
taggagaaatagacc

SEQ ID NO: 62534 - DNA, 15 bp, Homo sapiens
gtaggagaaatagac

SEQ ID NO: 62535 - DNA, 15 bp, Homo sapiens
agtaggagaaataga

SEQ ID NO: 62536 - DNA, 15 bp, Homo sapiens
gagtaggagaaatag

SEQ ID NO: 62537 - DNA, 15 bp, Homo sapiens
tgagtaggagaaata

SEQ ID NO: 62538 - DNA, 15 bp, Homo sapiens
ttgagtaggagaaat

SEQ ID NO: 62539 - DNA, 15 bp, Homo sapiens
gttgagtaggagaaa

SEQ ID NO: 62540 - DNA, 15 bp, Homo sapiens
agttgagtaggagaa

SEQ ID NO: 62541 - DNA, 15 bp, Homo sapiens
cagttgagtaggaga

SEQ ID NO: 62542 - DNA, 15 bp, Homo sapiens
acagttgagtaggag

SEQ ID NO: 62543 - DNA, 15 bp, Homo sapiens
tacagttgagtagga

SEQ ID NO: 62544 - DNA, 15 bp, Homo sapiens
ttacagttgagtagg

SEQ ID NO: 62545 - DNA, 15 bp, Homo sapiens
cttacagttgagtag

SEQ ID NO: 62546 - DNA, 15 bp, Homo sapiens
acttacagttgagta

SEQ ID NO: 62547 - DNA, 15 bp, Homo sapiens
aacttacagttgagt

SEQ ID NO: 62548 - DNA, 15 bp, Homo sapiens
gaacttacagttgag

SEQ ID NO: 62549 - DNA, 15 bp, Homo sapiens
ggaacttacagttga

SEQ ID NO: 62550 - DNA, 15 bp, Homo sapiens
tggaacttacagttg

SEQ ID NO: 62551 - DNA, 15 bp, Homo sapiens
atggaacttacagtt

SEQ ID NO: 62552 - DNA, 15 bp, Homo sapiens
catggaacttacagt

SEQ ID NO: 62553 - DNA, 15 bp, Homo sapiens
tcatggaacttacag

SEQ ID NO: 62554 - DNA, 15 bp, Homo sapiens
ctcatggaacttaca

SEQ ID NO: 62555 - DNA, 15 bp, Homo sapiens
cctcatggaacttac

SEQ ID NO: 62556 - DNA, 15 bp, Homo sapiens
ccctcatggaactta

SEQ ID NO: 62557 - DNA, 15 bp, Homo sapiens
gccctcatggaactt

SEQ ID NO: 62558 - DNA, 15 bp, Homo sapiens
tgccctcatggaact

SEQ ID NO: 62559 - DNA, 15 bp, Homo sapiens
ctgccctcatggaac

SEQ ID NO: 62560 - DNA, 15 bp, Homo sapiens
cctgccctcatggaa

SEQ ID NO: 62561 - DNA, 15 bp, Homo sapiens
ccctgccctcatgga

SEQ ID NO: 62562 - DNA, 15 bp, Homo sapiens
gccctgccctcatgg

SEQ ID NO: 62563 - DNA, 15 bp, Homo sapiens
agccctgccctcatg

SEQ ID NO: 62564 - DNA, 15 bp, Homo sapiens
aagccctgccctcat

SEQ ID NO: 62565 - DNA, 15 bp, Homo sapiens
aaagccctgccctca

SEQ ID NO: 62566 - DNA, 15 bp, Homo sapiens
gaaagccctgccctc

SEQ ID NO: 62567 - DNA, 15 bp, Homo sapiens
agaaagccctgccct

SEQ ID NO: 62568 - DNA, 15 bp, Homo sapiens
aagaaagccctgccc

SEQ ID NO: 62569 - DNA, 15 bp, Homo sapiens
aaagaaagccctgcc

SEQ ID NO: 62570 - DNA, 15 bp, Homo sapiens
gaaagaaagccctgc

SEQ ID NO: 62571 - DNA, 15 bp, Homo sapiens
agaaagaaagccctg

SEQ ID NO: 62572 - DNA, 15 bp, Homo sapiens
aagaaagaaagccct

SEQ ID NO: 62573 - DNA, 15 bp, Homo sapiens
caagaaagaaagccc

SEQ ID NO: 62574 - DNA, 15 bp, Homo sapiens
acaagaaagaaagcc

SEQ ID NO: 62575 - DNA, 15 bp, Homo sapiens
aacaagaaagaaagc

SEQ ID NO: 62576 - DNA, 15 bp, Homo sapiens
aaacaagaaagaaag

SEQ ID NO: 62577 - DNA, 15 bp, Homo sapiens
taaacaagaaagaaa

SEQ ID NO: 62578 - DNA, 15 bp, Homo sapiens
gtaaacaagaaagaa

SEQ ID NO: 62579 - DNA, 15 bp, Homo sapiens
agtaaacaagaaaga

SEQ ID NO: 62580 - DNA, 15 bp, Homo sapiens
tagtaaacaagaaag

SEQ ID NO: 62581 - DNA, 15 bp, Homo sapiens
gtagtaaacaagaaa

SEQ ID NO: 62582 - DNA, 15 bp, Homo sapiens
agtagtaaacaagaa

SEQ ID NO: 62583 - DNA, 15 bp, Homo sapiens
gagtagtaaacaaga

SEQ ID NO: 62584 - DNA, 15 bp, Homo sapiens
agagtagtaaacaag

SEQ ID NO: 62585 - DNA, 15 bp, Homo sapiens
tagagtagtaaacaa

SEQ ID NO: 62586 - DNA, 15 bp, Homo sapiens
atagagtagtaaaca

SEQ ID NO: 62587 - DNA, 15 bp, Homo sapiens
aatagagtagtaaac

SEQ ID NO: 62588 - DNA, 15 bp, Homo sapiens
gaatagagtagtaaa

SEQ ID NO: 62589 - DNA, 15 bp, Homo sapiens
ggaatagagtagtaa

SEQ ID NO: 62590 - DNA, 15 bp, Homo sapiens
gggaatagagtagta

SEQ ID NO: 62591 - DNA, 15 bp, Homo sapiens
agggaatagagtagt

SEQ ID NO: 62592 - DNA, 15 bp, Homo sapiens
cagggaatagagtag

SEQ ID NO: 62593 - DNA, 15 bp, Homo sapiens
acagggaatagagta

SEQ ID NO: 62594 - DNA, 15 bp, Homo sapiens
tacagggaatagagt

SEQ ID NO: 62595 - DNA, 15 bp, Homo sapiens
atacagggaatagag

SEQ ID NO: 62596 - DNA, 15 bp, Homo sapiens
gatacagggaataga

SEQ ID NO: 62597 - DNA, 15 bp, Homo sapiens
agatacagggaatag

SEQ ID NO: 62598 - DNA, 15 bp, Homo sapiens
tagatacagggaata

SEQ ID NO: 62599 - DNA, 15 bp, Homo sapiens
ttagatacagggaat

SEQ ID NO: 62600 - DNA, 15 bp, Homo sapiens
tttagatacagggaa

SEQ ID NO: 62601 - DNA, 15 bp, Homo sapiens
ttttagatacaggga

SEQ ID NO: 62602 - DNA, 15 bp, Homo sapiens
gttttagatacaggg

SEQ ID NO: 62603 - DNA, 15 bp, Homo sapiens
tgttttagatacagg

SEQ ID NO: 62604 - DNA, 15 bp, Homo sapiens
ctgttttagatacag

SEQ ID NO: 62605 - DNA, 15 bp, Homo sapiens
actgttttagataca

SEQ ID NO: 62606 - DNA, 15 bp, Homo sapiens
cactgttttagatac

SEQ ID NO: 62607 - DNA, 15 bp, Homo sapiens
gcactgttttagata

SEQ ID NO: 62608 - DNA, 15 bp, Homo sapiens
agcactgttttagat

SEQ ID NO: 62609 - DNA, 15 bp, Homo sapiens
aagcactgttttaga

SEQ ID NO: 62610 - DNA, 15 bp, Homo sapiens
caagcactgttttag

SEQ ID NO: 62611 - DNA, 15 bp, Homo sapiens
ccaagcactgtttta

SEQ ID NO: 62612 - DNA, 15 bp, Homo sapiens
gccaagcactgtttt

SEQ ID NO: 62613 - DNA, 15 bp, Homo sapiens
tgccaagcactgttt

SEQ ID NO: 62614 - DNA, 15 bp, Homo sapiens
gtgccaagcactgtt

SEQ ID NO: 62615 - DNA, 15 bp, Homo sapiens
tgtgccaagcactgt

SEQ ID NO: 62616 - DNA, 15 bp, Homo sapiens
atgtgccaagcactg

SEQ ID NO: 62617 - DNA, 15 bp, Homo sapiens
tatgtgccaagcact

SEQ ID NO: 62618 - DNA, 15 bp, Homo sapiens
ctatgtgccaagcac

SEQ ID NO: 62619 - DNA, 15 bp, Homo sapiens
gctatgtgccaagca

SEQ ID NO: 62620 - DNA, 15 bp, Homo sapiens
tgctatgtgccaagc

SEQ ID NO: 62621 - DNA, 15 bp, Homo sapiens
ttgctatgtgccaag

SEQ ID NO: 62622 - DNA, 15 bp, Homo sapiens
cttgctatgtgccaa

SEQ ID NO: 62623 - DNA, 15 bp, Homo sapiens
acttgctatgtgcca

SEQ ID NO: 62624 - DNA, 15 bp, Homo sapiens
cacttgctatgtgcc

SEQ ID NO: 62625 - DNA, 15 bp, Homo sapiens
gcacttgctatgtgc

SEQ ID NO: 62626 - DNA, 15 bp, Homo sapiens
agcacttgctatgtg

SEQ ID NO: 62627 - DNA, 15 bp, Homo sapiens
tagcacttgctatgt

SEQ ID NO: 62628 - DNA, 15 bp, Homo sapiens
ttagcacttgctatg

SEQ ID NO: 62629 - DNA, 15 bp, Homo sapiens
tttagcacttgctat

SEQ ID NO: 62630 - DNA, 15 bp, Homo sapiens
ttttagcacttgcta

SEQ ID NO: 62631 - DNA, 15 bp, Homo sapiens
tttttagcacttgct

SEQ ID NO: 62632 - DNA, 15 bp, Homo sapiens
ttttttagcacttgc

SEQ ID NO: 62633 - DNA, 15 bp, Homo sapiens
attttttagcacttg

SEQ ID NO: 62634 - DNA, 15 bp, Homo sapiens
tattttttagcactt

SEQ ID NO: 62635 - DNA, 15 bp, Homo sapiens
atattttttagcact

SEQ ID NO: 62636 - DNA, 15 bp, Homo sapiens
aatattttttagcac

SEQ ID NO: 62637 - DNA, 15 bp, Homo sapiens
gaatattttttagca

SEQ ID NO: 62638 - DNA, 15 bp, Homo sapiens
agaatattttttagc

SEQ ID NO: 62639 - DNA, 15 bp, Homo sapiens
aagaatattttttag

SEQ ID NO: 62640 - DNA, 15 bp, Homo sapiens
aaagaatatttttta

SEQ ID NO: 62641 - DNA, 15 bp, Homo sapiens
caaagaatatttttt

SEQ ID NO: 62642 - DNA, 15 bp, Homo sapiens
tcaaagaatattttt

SEQ ID NO: 62643 - DNA, 15 bp, Homo sapiens
ttcaaagaatatttt

SEQ ID NO: 62644 - DNA, 15 bp, Homo sapiens
attcaaagaatattt

SEQ ID NO: 62645 - DNA, 15 bp, Homo sapiens
cattcaaagaatatt

SEQ ID NO: 62646 - DNA, 15 bp, Homo sapiens
tcattcaaagaatat

SEQ ID NO: 62647 - DNA, 15 bp, Homo sapiens
ctcattcaaagaata

SEQ ID NO: 62648 - DNA, 15 bp, Homo sapiens
actcattcaaagaat

SEQ ID NO: 62649 - DNA, 15 bp, Homo sapiens
cactcattcaaagaa

SEQ ID NO: 62650 - DNA, 15 bp, Homo sapiens
acactcattcaaaga

SEQ ID NO: 62651 - DNA, 15 bp, Homo sapiens
tacactcattcaaag

SEQ ID NO: 62652 - DNA, 15 bp, Homo sapiens
atacactcattcaaa

SEQ ID NO: 62653 - DNA, 15 bp, Homo sapiens
catacactcattcaa

SEQ ID NO: 62654 - DNA, 15 bp, Homo sapiens
tcatacactcattca

SEQ ID NO: 62655 - DNA, 15 bp, Homo sapiens
ttcatacactcattc

SEQ ID NO: 62656 - DNA, 15 bp, Homo sapiens
attcatacactcatt

SEQ ID NO: 62657 - DNA, 15 bp, Homo sapiens
cattcatacactcat

SEQ ID NO: 62658 - DNA, 15 bp, Homo sapiens
ccattcatacactca

SEQ ID NO: 62659 - DNA, 15 bp, Homo sapiens
tccattcatacactc

SEQ ID NO: 62660 - DNA, 15 bp, Homo sapiens
ttccattcatacact

SEQ ID NO: 62661 - DNA, 15 bp, Homo sapiens
gttccattcatacac

SEQ ID NO: 62662 - DNA, 15 bp, Homo sapiens
agttccattcataca

SEQ ID NO: 62663 - DNA, 15 bp, Homo sapiens
aagttccattcatac

SEQ ID NO: 62664 - DNA, 15 bp, Homo sapiens
taagttccattcata

SEQ ID NO: 62665 - DNA, 15 bp, Homo sapiens
gtaagttccattcat

SEQ ID NO: 62666 - DNA, 15 bp, Homo sapiens
tgtaagttccattca

SEQ ID NO: 62667 - DNA, 15 bp, Homo sapiens
ctgtaagttccattc

SEQ ID NO: 62668 - DNA, 15 bp, Homo sapiens
actgtaagttccatt

SEQ ID NO: 62669 - DNA, 15 bp, Homo sapiens
gactgtaagttccat

SEQ ID NO: 62670 - DNA, 15 bp, Homo sapiens
tgactgtaagttcca

SEQ ID NO: 62671 - DNA, 15 bp, Homo sapiens
ctgactgtaagttcc

SEQ ID NO: 62672 - DNA, 15 bp, Homo sapiens
gctgactgtaagttc

SEQ ID NO: 62673 - DNA, 15 bp, Homo sapiens
agctgactgtaagtt

SEQ ID NO: 62674 - DNA, 15 bp, Homo sapiens
cagctgactgtaagt

SEQ ID NO: 62675 - DNA, 15 bp, Homo sapiens
tcagctgactgtaag

SEQ ID NO: 62676 - DNA, 15 bp, Homo sapiens
ttcagctgactgtaa

SEQ ID NO: 62677 - DNA, 15 bp, Homo sapiens
cttcagctgactgta

SEQ ID NO: 62678 - DNA, 15 bp, Homo sapiens
ccttcagctgactgt

SEQ ID NO: 62679 - DNA, 15 bp, Homo sapiens
tccttcagctgactg

SEQ ID NO: 62680 - DNA, 15 bp, Homo sapiens
ctccttcagctgact

SEQ ID NO: 62681 - DNA, 15 bp, Homo sapiens
tctccttcagctgac

SEQ ID NO: 62682 - DNA, 15 bp, Homo sapiens
gtctccttcagctga

SEQ ID NO: 62683 - DNA, 15 bp, Homo sapiens
tgtctccttcagctg

SEQ ID NO: 62684 - DNA, 15 bp, Homo sapiens
ctgtctccttcagct

SEQ ID NO: 62685 - DNA, 15 bp, Homo sapiens
actgtctccttcagc

SEQ ID NO: 62686 - DNA, 15 bp, Homo sapiens
aactgtctccttcag

SEQ ID NO: 62687 - DNA, 15 bp, Homo sapiens
taactgtctccttca

SEQ ID NO: 62688 - DNA, 15 bp, Homo sapiens
ataactgtctccttc

SEQ ID NO: 62689 - DNA, 15 bp, Homo sapiens
aataactgtctcctt

SEQ ID NO: 62690 - DNA, 15 bp, Homo sapiens
taataactgtctcct

SEQ ID NO: 62691 - DNA, 15 bp, Homo sapiens
ttaataactgtctcc

SEQ ID NO: 62692 - DNA, 15 bp, Homo sapiens
cttaataactgtctc

SEQ ID NO: 62693 - DNA, 15 bp, Homo sapiens
gcttaataactgtct

SEQ ID NO: 62694 - DNA, 15 bp, Homo sapiens
tgcttaataactgtc

SEQ ID NO: 62695 - DNA, 15 bp, Homo sapiens
atgcttaataactgt

SEQ ID NO: 62696 - DNA, 15 bp, Homo sapiens
tatgcttaataactg

SEQ ID NO: 62697 - DNA, 15 bp, Homo sapiens
ttatgcttaataact

SEQ ID NO: 62698 - DNA, 15 bp, Homo sapiens
cttatgcttaataac

SEQ ID NO: 62699 - DNA, 15 bp, Homo sapiens
tcttatgcttaataa

SEQ ID NO: 62700 - DNA, 15 bp, Homo sapiens
ctcttatgcttaata

SEQ ID NO: 62701 - DNA, 15 bp, Homo sapiens
actcttatgcttaat

SEQ ID NO: 62702 - DNA, 15 bp, Homo sapiens
cactcttatgcttaa

SEQ ID NO: 62703 - DNA, 15 bp, Homo sapiens
tcactcttatgctta

SEQ ID NO: 62704 - DNA, 15 bp, Homo sapiens
atcactcttatgctt

SEQ ID NO: 62705 - DNA, 15 bp, Homo sapiens
catcactcttatgct

SEQ ID NO: 62706 - DNA, 15 bp, Homo sapiens
tcatcactcttatgc

SEQ ID NO: 62707 - DNA, 15 bp, Homo sapiens
gtcatcactcttatg

SEQ ID NO: 62708 - DNA, 15 bp, Homo sapiens
ggtcatcactcttat

SEQ ID NO: 62709 - DNA, 15 bp, Homo sapiens
tggtcatcactctta

SEQ ID NO: 62710 - DNA, 15 bp, Homo sapiens
ctggtcatcactctt

SEQ ID NO: 62711 - DNA, 15 bp, Homo sapiens
actggtcatcactct

SEQ ID NO: 62712 - DNA, 15 bp, Homo sapiens
gactggtcatcactc

SEQ ID NO: 62713 - DNA, 15 bp, Homo sapiens
ggactggtcatcact

SEQ ID NO: 62714 - DNA, 15 bp, Homo sapiens
tggactggtcatcac

SEQ ID NO: 62715 - DNA, 15 bp, Homo sapiens
ttggactggtcatca

SEQ ID NO: 62716 - DNA, 15 bp, Homo sapiens
attggactggtcatc

SEQ ID NO: 62717 - DNA, 15 bp, Homo sapiens
aattggactggtcat

SEQ ID NO: 62718 - DNA, 15 bp, Homo sapiens
caattggactggtca

SEQ ID NO: 62719 - DNA, 15 bp, Homo sapiens
acaattggactggtc

SEQ ID NO: 62720 - DNA, 15 bp, Homo sapiens
cacaattggactggt

SEQ ID NO: 62721 - DNA, 15 bp, Homo sapiens
acacaattggactgg

SEQ ID NO: 62722 - DNA, 15 bp, Homo sapiens
cacacaattggactg

SEQ ID NO: 62723 - DNA, 15 bp, Homo sapiens
acacacaattggact

SEQ ID NO: 62724 - DNA, 15 bp, Homo sapiens
cacacacaattggac

SEQ ID NO: 62725 - DNA, 15 bp, Homo sapiens
acacacacaattgga

SEQ ID NO: 62726 - DNA, 15 bp, Homo sapiens
gacacacacaattgg

SEQ ID NO: 62727 - DNA, 15 bp, Homo sapiens
tgacacacacaattg

SEQ ID NO: 62728 - DNA, 15 bp, Homo sapiens
ctgacacacacaatt

SEQ ID NO: 62729 - DNA, 15 bp, Homo sapiens
cctgacacacacaat

SEQ ID NO: 62730 - DNA, 15 bp, Homo sapiens
gcctgacacacacaa

SEQ ID NO: 62731 - DNA, 15 bp, Homo sapiens
tgcctgacacacaca

SEQ ID NO: 62732 - DNA, 15 bp, Homo sapiens
atgcctgacacacac

SEQ ID NO: 62733 - DNA, 15 bp, Homo sapiens
catgcctgacacaca

SEQ ID NO: 62734 - DNA, 15 bp, Homo sapiens
acatgcctgacacac

SEQ ID NO: 62735 - DNA, 15 bp, Homo sapiens
cacatgcctgacaca

SEQ ID NO: 62736 - DNA, 15 bp, Homo sapiens
acacatgcctgacac

SEQ ID NO: 62737 - DNA, 15 bp, Homo sapiens
cacacatgcctgaca

SEQ ID NO: 62738 - DNA, 15 bp, Homo sapiens
tcacacatgcctgac

SEQ ID NO: 62739 - DNA, 15 bp, Homo sapiens
ttcacacatgcctga

SEQ ID NO: 62740 - DNA, 15 bp, Homo sapiens
tttcacacatgcctg

SEQ ID NO: 62741 - DNA, 15 bp, Homo sapiens
ttttcacacatgcct

SEQ ID NO: 62742 - DNA, 15 bp, Homo sapiens
gttttcacacatgcc

SEQ ID NO: 62743 - DNA, 15 bp, Homo sapiens
cgttttcacacatgc

SEQ ID NO: 62744 - DNA, 15 bp, Homo sapiens
acgttttcacacatg

SEQ ID NO: 62745 - DNA, 15 bp, Homo sapiens
cacgttttcacacat

SEQ ID NO: 62746 - DNA, 15 bp, Homo sapiens
gcacgttttcacaca

SEQ ID NO: 62747 - DNA, 15 bp, Homo sapiens
agcacgttttcacac

SEQ ID NO: 62748 - DNA, 15 bp, Homo sapiens
tagcacgttttcaca

SEQ ID NO: 62749 - DNA, 15 bp, Homo sapiens
ttagcacgttttcac

SEQ ID NO: 62750 - DNA, 15 bp, Homo sapiens
tttagcacgttttca

SEQ ID NO: 62751 - DNA, 15 bp, Homo sapiens
atttagcacgttttc

SEQ ID NO: 62752 - DNA, 15 bp, Homo sapiens
aatttagcacgtttt

SEQ ID NO: 62753 - DNA, 15 bp, Homo sapiens
aaatttagcacgttt

SEQ ID NO: 62754 - DNA, 15 bp, Homo sapiens
caaatttagcacgtt

SEQ ID NO: 62755 - DNA, 15 bp, Homo sapiens
tcaaatttagcacgt

SEQ ID NO: 62756 - DNA, 15 bp, Homo sapiens
gtcaaatttagcacg

SEQ ID NO: 62757 - DNA, 15 bp, Homo sapiens
agtcaaatttagcac

SEQ ID NO: 62758 - DNA, 15 bp, Homo sapiens
aagtcaaatttagca

SEQ ID NO: 62759 - DNA, 15 bp, Homo sapiens
caagtcaaatttagc

SEQ ID NO: 62760 - DNA, 15 bp, Homo sapiens
gcaagtcaaatttag

SEQ ID NO: 62761 - DNA, 15 bp, Homo sapiens
agcaagtcaaattta

SEQ ID NO: 62762 - DNA, 15 bp, Homo sapiens
aagcaagtcaaattt

SEQ ID NO: 62763 - DNA, 15 bp, Homo sapiens
taagcaagtcaaatt

SEQ ID NO: 62764 - DNA, 15 bp, Homo sapiens
ataagcaagtcaaat

SEQ ID NO: 62765 - DNA, 15 bp, Homo sapiens
aataagcaagtcaaa

SEQ ID NO: 62766 - DNA, 15 bp, Homo sapiens
taataagcaagtcaa

SEQ ID NO: 62767 - DNA, 15 bp, Homo sapiens
ctaataagcaagtca

SEQ ID NO: 62768 - DNA, 15 bp, Homo sapiens
cctaataagcaagtc

SEQ ID NO: 62769 - DNA, 15 bp, Homo sapiens
tcctaataagcaagt

SEQ ID NO: 62770 - DNA, 15 bp, Homo sapiens
gtcctaataagcaag

SEQ ID NO: 62771 - DNA, 15 bp, Homo sapiens
tgtcctaataagcaa

SEQ ID NO: 62772 - DNA, 15 bp, Homo sapiens
ctgtcctaataagca

SEQ ID NO: 62773 - DNA, 15 bp, Homo sapiens
actgtcctaataagc

SEQ ID NO: 62774 - DNA, 15 bp, Homo sapiens
tactgtcctaataag

SEQ ID NO: 62775 - DNA, 15 bp, Homo sapiens
ttactgtcctaataa

SEQ ID NO: 62776 - DNA, 15 bp, Homo sapiens
gttactgtcctaata

SEQ ID NO: 62777 - DNA, 15 bp, Homo sapiens
agttactgtcctaat

SEQ ID NO: 62778 - DNA, 15 bp, Homo sapiens
cagttactgtcctaa

SEQ ID NO: 62779 - DNA, 15 bp, Homo sapiens
tcagttactgtccta

SEQ ID NO: 62780 - DNA, 15 bp, Homo sapiens
atcagttactgtcct

SEQ ID NO: 62781 - DNA, 15 bp, Homo sapiens
tatcagttactgtcc

SEQ ID NO: 62782 - DNA, 15 bp, Homo sapiens
gtatcagttactgtc

SEQ ID NO: 62783 - DNA, 15 bp, Homo sapiens
agtatcagttactgt

SEQ ID NO: 62784 - DNA, 15 bp, Homo sapiens
aagtatcagttactg

SEQ ID NO: 62785 - DNA, 15 bp, Homo sapiens
gaagtatcagttact

SEQ ID NO: 62786 - DNA, 15 bp, Homo sapiens
agaagtatcagttac

SEQ ID NO: 62787 - DNA, 15 bp, Homo sapiens
tagaagtatcagtta

SEQ ID NO: 62788 - DNA, 15 bp, Homo sapiens
ttagaagtatcagtt

SEQ ID NO: 62789 - DNA, 15 bp, Homo sapiens
attagaagtatcagt

SEQ ID NO: 62790 - DNA, 15 bp, Homo sapiens
cattagaagtatcag

SEQ ID NO: 62791 - DNA, 15 bp, Homo sapiens
acattagaagtatca

SEQ ID NO: 62792 - DNA, 15 bp, Homo sapiens
aacattagaagtatc

SEQ ID NO: 62793 - DNA, 15 bp, Homo sapiens
gaacattagaagtat

SEQ ID NO: 62794 - DNA, 15 bp, Homo sapiens
agaacattagaagta

SEQ ID NO: 62795 - DNA, 15 bp, Homo sapiens
aagaacattagaagt

SEQ ID NO: 62796 - DNA, 15 bp, Homo sapiens
caagaacattagaag

SEQ ID NO: 62797 - DNA, 15 bp, Homo sapiens
gcaagaacattagaa

SEQ ID NO: 62798 - DNA, 15 bp, Homo sapiens
tgcaagaacattaga

SEQ ID NO: 62799 - DNA, 15 bp, Homo sapiens
ctgcaagaacattag

SEQ ID NO: 62800 - DNA, 15 bp, Homo sapiens
gctgcaagaacatta

SEQ ID NO: 62801 - DNA, 15 bp, Homo sapiens
ggctgcaagaacatt

SEQ ID NO: 62802 - DNA, 15 bp, Homo sapiens
gggctgcaagaacat

SEQ ID NO: 62803 - DNA, 15 bp, Homo sapiens
tgggctgcaagaaca

SEQ ID NO: 62804 - DNA, 15 bp, Homo sapiens
atgggctgcaagaac

SEQ ID NO: 62805 - DNA, 15 bp, Homo sapiens
catgggctgcaagaa

SEQ ID NO: 62806 - DNA, 15 bp, Homo sapiens
tcatgggctgcaaga

SEQ ID NO: 62807 - DNA, 15 bp, Homo sapiens
gtcatgggctgcaag

SEQ ID NO: 62808 - DNA, 15 bp, Homo sapiens
ggtcatgggctgcaa

SEQ ID NO: 62809 - DNA, 15 bp, Homo sapiens
aggtcatgggctgca

SEQ ID NO: 62810 - DNA, 15 bp, Homo sapiens
gaggtcatgggctgc

SEQ ID NO: 62811 - DNA, 15 bp, Homo sapiens
agaggtcatgggctg

SEQ ID NO: 62812 - DNA, 15 bp, Homo sapiens
aagaggtcatgggct

SEQ ID NO: 62813 - DNA, 15 bp, Homo sapiens
gaagaggtcatgggc

SEQ ID NO: 62814 - DNA, 15 bp, Homo sapiens
agaagaggtcatggg

SEQ ID NO: 62815 - DNA, 15 bp, Homo sapiens
aagaagaggtcatgg

SEQ ID NO: 62816 - DNA, 15 bp, Homo sapiens
aaagaagaggtcatg

SEQ ID NO: 62817 - DNA, 15 bp, Homo sapiens
taaagaagaggtcat

SEQ ID NO: 62818 - DNA, 15 bp, Homo sapiens
ttaaagaagaggtca

SEQ ID NO: 62819 - DNA, 15 bp, Homo sapiens
cttaaagaagaggtc

SEQ ID NO: 62820 - DNA, 15 bp, Homo sapiens
tcttaaagaagaggt

SEQ ID NO: 62821 - DNA, 15 bp, Homo sapiens
ttcttaaagaagagg

SEQ ID NO: 62822 - DNA, 15 bp, Homo sapiens
cttcttaaagaagag

SEQ ID NO: 62823 - DNA, 15 bp, Homo sapiens
acttcttaaagaaga

SEQ ID NO: 62824 - DNA, 15 bp, Homo sapiens
cacttcttaaagaag

SEQ ID NO: 62825 - DNA, 15 bp, Homo sapiens
acacttcttaaagaa

SEQ ID NO: 62826 - DNA, 15 bp, Homo sapiens
gacacttcttaaaga

SEQ ID NO: 62827 - DNA, 15 bp, Homo sapiens
ggacacttcttaaag

SEQ ID NO: 62828 - DNA, 15 bp, Homo sapiens
tggacacttcttaaa

SEQ ID NO: 62829 - DNA, 15 bp, Homo sapiens
atggacacttcttaa

SEQ ID NO: 62830 - DNA, 15 bp, Homo sapiens
aatggacacttctta

SEQ ID NO: 62831 - DNA, 15 bp, Homo sapiens
gaatggacacttctt

SEQ ID NO: 62832 - DNA, 15 bp, Homo sapiens
agaatggacacttct

SEQ ID NO: 62833 - DNA, 15 bp, Homo sapiens
cagaatggacacttc

SEQ ID NO: 62834 - DNA, 15 bp, Homo sapiens
acagaatggacactt

SEQ ID NO: 62835 - DNA, 15 bp, Homo sapiens
tacagaatggacact

SEQ ID NO: 62836 - DNA, 15 bp, Homo sapiens
gtacagaatggacac

SEQ ID NO: 62837 - DNA, 15 bp, Homo sapiens
agtacagaatggaca

SEQ ID NO: 62838 - DNA, 15 bp, Homo sapiens
tagtacagaatggac

SEQ ID NO: 62839 - DNA, 15 bp, Homo sapiens
gtagtacagaatgga

SEQ ID NO: 62840 - DNA, 15 bp, Homo sapiens
agtagtacagaatgg

SEQ ID NO: 62841 - DNA, 15 bp, Homo sapiens
aagtagtacagaatg

SEQ ID NO: 62842 - DNA, 15 bp, Homo sapiens
aaagtagtacagaat

SEQ ID NO: 62843 - DNA, 15 bp, Homo sapiens
gaaagtagtacagaa

SEQ ID NO: 62844 - DNA, 15 bp, Homo sapiens
ggaaagtagtacaga

SEQ ID NO: 62845 - DNA, 15 bp, Homo sapiens
gggaaagtagtacag

SEQ ID NO: 62846 - DNA, 15 bp, Homo sapiens
tgggaaagtagtaca

SEQ ID NO: 62847 - DNA, 15 bp, Homo sapiens
atgggaaagtagtac

SEQ ID NO: 62848 - DNA, 15 bp, Homo sapiens
aatgggaaagtagta

SEQ ID NO: 62849 - DNA, 15 bp, Homo sapiens
taatgggaaagtagt

SEQ ID NO: 62850 - DNA, 15 bp, Homo sapiens
ataatgggaaagtag

SEQ ID NO: 62851 - DNA, 15 bp, Homo sapiens
aataatgggaaagta

SEQ ID NO: 62852 - DNA, 15 bp, Homo sapiens
gaataatgggaaagt

SEQ ID NO: 62853 - DNA, 15 bp, Homo sapiens
tgaataatgggaaag

SEQ ID NO: 62854 - DNA, 15 bp, Homo sapiens
gtgaataatgggaaa

SEQ ID NO: 62855 - DNA, 15 bp, Homo sapiens
agtgaataatgggaa

SEQ ID NO: 62856 - DNA, 15 bp, Homo sapiens
gagtgaataatggga

SEQ ID NO: 62857 - DNA, 15 bp, Homo sapiens
tgagtgaataatggg

SEQ ID NO: 62858 - DNA, 15 bp, Homo sapiens
atgagtgaataatgg

SEQ ID NO: 62859 - DNA, 15 bp, Homo sapiens
aatgagtgaataatg

SEQ ID NO: 62860 - DNA, 15 bp, Homo sapiens
gaatgagtgaataat

SEQ ID NO: 62861 - DNA, 15 bp, Homo sapiens
tgaatgagtgaataa

SEQ ID NO: 62862 - DNA, 15 bp, Homo sapiens
atgaatgagtgaata

SEQ ID NO: 62863 - DNA, 15 bp, Homo sapiens
aatgaatgagtgaat

SEQ ID NO: 62864 - DNA, 15 bp, Homo sapiens
gaatgaatgagtgaa

SEQ ID NO: 62865 - DNA, 15 bp, Homo sapiens
ggaatgaatgagtga

SEQ ID NO: 62866 - DNA, 15 bp, Homo sapiens
tggaatgaatgagtg

SEQ ID NO: 62867 - DNA, 15 bp, Homo sapiens
ttggaatgaatgagt

SEQ ID NO: 62868 - DNA, 15 bp, Homo sapiens
tttggaatgaatgag

SEQ ID NO: 62869 - DNA, 15 bp, Homo sapiens
ctttggaatgaatga

SEQ ID NO: 62870 - DNA, 15 bp, Homo sapiens
gctttggaatgaatg

SEQ ID NO: 62871 - DNA, 15 bp, Homo sapiens
tgctttggaatgaat

SEQ ID NO: 62872 - DNA, 15 bp, Homo sapiens
atgctttggaatgaa

SEQ ID NO: 62873 - DNA, 15 bp, Homo sapiens
aatgctttggaatga

SEQ ID NO: 62874 - DNA, 15 bp, Homo sapiens
aaatgctttggaatg

SEQ ID NO: 62875 - DNA, 15 bp, Homo sapiens
caaatgctttggaat

SEQ ID NO: 62876 - DNA, 15 bp, Homo sapiens
gcaaatgctttggaa

SEQ ID NO: 62877 - DNA, 15 bp, Homo sapiens
agcaaatgctttgga

SEQ ID NO: 62878 - DNA, 15 bp, Homo sapiens
tagcaaatgctttgg

SEQ ID NO: 62879 - DNA, 15 bp, Homo sapiens
atagcaaatgctttg

SEQ ID NO: 62880 - DNA, 15 bp, Homo sapiens
tatagcaaatgcttt

SEQ ID NO: 62881 - DNA, 15 bp, Homo sapiens
gtatagcaaatgctt

SEQ ID NO: 62882 - DNA, 15 bp, Homo sapiens
tgtatagcaaatgct

SEQ ID NO: 62883 - DNA, 15 bp, Homo sapiens
ctgtatagcaaatgc

SEQ ID NO: 62884 - DNA, 15 bp, Homo sapiens
gctgtatagcaaatg

SEQ ID NO: 62885 - DNA, 15 bp, Homo sapiens
tgctgtatagcaaat

SEQ ID NO: 62886 - DNA, 15 bp, Homo sapiens
ctgctgtatagcaaa

SEQ ID NO: 62887 - DNA, 15 bp, Homo sapiens
actgctgtatagcaa

SEQ ID NO: 62888 - DNA, 15 bp, Homo sapiens
tactgctgtatagca

SEQ ID NO: 62889 - DNA, 15 bp, Homo sapiens
atactgctgtatagc

SEQ ID NO: 62890 - DNA, 15 bp, Homo sapiens
aatactgctgtatag

SEQ ID NO: 62891 - DNA, 15 bp, Homo sapiens
taatactgctgtata

SEQ ID NO: 62892 - DNA, 15 bp, Homo sapiens
ataatactgctgtat

SEQ ID NO: 62893 - DNA, 15 bp, Homo sapiens
tataatactgctgta

SEQ ID NO: 62894 - DNA, 15 bp, Homo sapiens
gtataatactgctgt

SEQ ID NO: 62895 - DNA, 15 bp, Homo sapiens
ggtataatactgctg

SEQ ID NO: 62896 - DNA, 15 bp, Homo sapiens
tggtataatactgct

SEQ ID NO: 62897 - DNA, 15 bp, Homo sapiens
ctggtataatactgc

SEQ ID NO: 62898 - DNA, 15 bp, Homo sapiens
tctggtataatactg

SEQ ID NO: 62899 - DNA, 15 bp, Homo sapiens
atctggtataatact

SEQ ID NO: 62900 - DNA, 15 bp, Homo sapiens
tatctggtataatac

SEQ ID NO: 62901 - DNA, 15 bp, Homo sapiens
gtatctggtataata

SEQ ID NO: 62902 - DNA, 15 bp, Homo sapiens
ggtatctggtataat

SEQ ID NO: 62903 - DNA, 15 bp, Homo sapiens
tggtatctggtataa

SEQ ID NO: 62904 - DNA, 15 bp, Homo sapiens
atggtatctggtata

SEQ ID NO: 62905 - DNA, 15 bp, Homo sapiens
tatggtatctggtat

SEQ ID NO: 62906 - DNA, 15 bp, Homo sapiens
atatggtatctggta

SEQ ID NO: 62907 - DNA, 15 bp, Homo sapiens
aatatggtatctggt

SEQ ID NO: 62908 - DNA, 15 bp, Homo sapiens
taatatggtatctgg

SEQ ID NO: 62909 - DNA, 15 bp, Homo sapiens
ctaatatggtatctg

SEQ ID NO: 62910 - DNA, 15 bp, Homo sapiens
cctaatatggtatct

SEQ ID NO: 62911 - DNA, 15 bp, Homo sapiens
acctaatatggtatc

SEQ ID NO: 62912 - DNA, 15 bp, Homo sapiens
cacctaatatggtat

SEQ ID NO: 62913 - DNA, 15 bp, Homo sapiens
gcacctaatatggta

SEQ ID NO: 62914 - DNA, 15 bp, Homo sapiens
agcacctaatatggt

SEQ ID NO: 62915 - DNA, 15 bp, Homo sapiens
cagcacctaatatgg

SEQ ID NO: 62916 - DNA, 15 bp, Homo sapiens
ccagcacctaatatg

SEQ ID NO: 62917 - DNA, 15 bp, Homo sapiens
cccagcacctaatat

SEQ ID NO: 62918 - DNA, 15 bp, Homo sapiens
ccccagcacctaata

SEQ ID NO: 62919 - DNA, 15 bp, Homo sapiens
gccccagcacctaat

SEQ ID NO: 62920 - DNA, 15 bp, Homo sapiens
agccccagcacctaa

SEQ ID NO: 62921 - DNA, 15 bp, Homo sapiens
tagccccagcaccta

SEQ ID NO: 62922 - DNA, 15 bp, Homo sapiens
ctagccccagcacct

SEQ ID NO: 62923 - DNA, 15 bp, Homo sapiens
tctagccccagcacc

SEQ ID NO: 62924 - DNA, 15 bp, Homo sapiens
ctctagccccagcac

SEQ ID NO: 62925 - DNA, 15 bp, Homo sapiens
tctctagccccagca

SEQ ID NO: 62926 - DNA, 15 bp, Homo sapiens
ctctctagccccagc

SEQ ID NO: 62927 - DNA, 15 bp, Homo sapiens
tctctctagccccag

SEQ ID NO: 62928 - DNA, 15 bp, Homo sapiens
ttctctctagcccca

SEQ ID NO: 62929 - DNA, 15 bp, Homo sapiens
attctctctagcccc

SEQ ID NO: 62930 - DNA, 15 bp, Homo sapiens
tattctctctagccc

SEQ ID NO: 62931 - DNA, 15 bp, Homo sapiens
atattctctctagcc

SEQ ID NO: 62932 - DNA, 15 bp, Homo sapiens
tatattctctctagc

SEQ ID NO: 62933 - DNA, 15 bp, Homo sapiens
ttatattctctctag

SEQ ID NO: 62934 - DNA, 15 bp, Homo sapiens
tttatattctctcta

SEQ ID NO: 62935 - DNA, 15 bp, Homo sapiens
ttttatattctctct

SEQ ID NO: 62936 - DNA, 15 bp, Homo sapiens
cttttatattctctc

SEQ ID NO: 62937 - DNA, 15 bp, Homo sapiens
gcttttatattctct

SEQ ID NO: 62938 - DNA, 15 bp, Homo sapiens
agcttttatattctc

SEQ ID NO: 62939 - DNA, 15 bp, Homo sapiens
tagcttttatattct

SEQ ID NO: 62940 - DNA, 15 bp, Homo sapiens
ttagcttttatattc

SEQ ID NO: 62941 - DNA, 15 bp, Homo sapiens
gttagcttttatatt

SEQ ID NO: 62942 - DNA, 15 bp, Homo sapiens
tgttagcttttatat

SEQ ID NO: 62943 - DNA, 15 bp, Homo sapiens
atgttagcttttata

SEQ ID NO: 62944 - DNA, 15 bp, Homo sapiens
aatgttagcttttat

SEQ ID NO: 62945 - DNA, 15 bp, Homo sapiens
caatgttagctttta

SEQ ID NO: 62946 - DNA, 15 bp, Homo sapiens
tcaatgttagctttt

SEQ ID NO: 62947 - DNA, 15 bp, Homo sapiens
atcaatgttagcttt

SEQ ID NO: 62948 - DNA, 15 bp, Homo sapiens
aatcaatgttagctt

SEQ ID NO: 62949 - DNA, 15 bp, Homo sapiens
caatcaatgttagct

SEQ ID NO: 62950 - DNA, 15 bp, Homo sapiens
tcaatcaatgttagc

SEQ ID NO: 62951 - DNA, 15 bp, Homo sapiens
ctcaatcaatgttag

SEQ ID NO: 62952 - DNA, 15 bp, Homo sapiens
actcaatcaatgtta

SEQ ID NO: 62953 - DNA, 15 bp, Homo sapiens
cactcaatcaatgtt

SEQ ID NO: 62954 - DNA, 15 bp, Homo sapiens
acactcaatcaatgt

SEQ ID NO: 62955 - DNA, 15 bp, Homo sapiens
aacactcaatcaatg

SEQ ID NO: 62956 - DNA, 15 bp, Homo sapiens
aaacactcaatcaat

SEQ ID NO: 62957 - DNA, 15 bp, Homo sapiens
taaacactcaatcaa

SEQ ID NO: 62958 - DNA, 15 bp, Homo sapiens
ctaaacactcaatca

SEQ ID NO: 62959 - DNA, 15 bp, Homo sapiens
actaaacactcaatc

SEQ ID NO: 62960 - DNA, 15 bp, Homo sapiens
tactaaacactcaat

SEQ ID NO: 62961 - DNA, 15 bp, Homo sapiens
atactaaacactcaa

SEQ ID NO: 62962 - DNA, 15 bp, Homo sapiens
catactaaacactca

SEQ ID NO: 62963 - DNA, 15 bp, Homo sapiens
gcatactaaacactc

SEQ ID NO: 62964 - DNA, 15 bp, Homo sapiens
cgcatactaaacact

SEQ ID NO: 62965 - DNA, 15 bp, Homo sapiens
gcgcatactaaacac

SEQ ID NO: 62966 - DNA, 15 bp, Homo sapiens
ggcgcatactaaaca

SEQ ID NO: 62967 - DNA, 15 bp, Homo sapiens
tggcgcatactaaac

SEQ ID NO: 62968 - DNA, 15 bp, Homo sapiens
ctggcgcatactaaa

SEQ ID NO: 62969 - DNA, 15 bp, Homo sapiens
cctggcgcatactaa

SEQ ID NO: 62970 - DNA, 15 bp, Homo sapiens
gcctggcgcatacta

SEQ ID NO: 62971 - DNA, 15 bp, Homo sapiens
ggcctggcgcatact

SEQ ID NO: 62972 - DNA, 15 bp, Homo sapiens
gggcctggcgcatac

SEQ ID NO: 62973 - DNA, 15 bp, Homo sapiens
agggcctggcgcata

SEQ ID NO: 62974 - DNA, 15 bp, Homo sapiens
cagggcctggcgcat

SEQ ID NO: 62975 - DNA, 15 bp, Homo sapiens
tcagggcctggcgca

SEQ ID NO: 62976 - DNA, 15 bp, Homo sapiens
ttcagggcctggcgc

SEQ ID NO: 62977 - DNA, 15 bp, Homo sapiens
gttcagggcctggcg

SEQ ID NO: 62978 - DNA, 15 bp, Homo sapiens
agttcagggcctggc

SEQ ID NO: 62979 - DNA, 15 bp, Homo sapiens
gagttcagggcctgg

SEQ ID NO: 62980 - DNA, 15 bp, Homo sapiens
tgagttcagggcctg

SEQ ID NO: 62981 - DNA, 15 bp, Homo sapiens
ctgagttcagggcct

SEQ ID NO: 62982 - DNA, 15 bp, Homo sapiens
gctgagttcagggcc

SEQ ID NO: 62983 - DNA, 15 bp, Homo sapiens
tgctgagttcagggc

SEQ ID NO: 62984 - DNA, 15 bp, Homo sapiens
gtgctgagttcaggg

SEQ ID NO: 62985 - DNA, 15 bp, Homo sapiens
tgtgctgagttcagg

SEQ ID NO: 62986 - DNA, 15 bp, Homo sapiens
atgtgctgagttcag

SEQ ID NO: 62987 - DNA, 15 bp, Homo sapiens
aatgtgctgagttca

SEQ ID NO: 62988 - DNA, 15 bp, Homo sapiens
taatgtgctgagttc

SEQ ID NO: 62989 - DNA, 15 bp, Homo sapiens
gtaatgtgctgagtt

SEQ ID NO: 62990 - DNA, 15 bp, Homo sapiens
tgtaatgtgctgagt

SEQ ID NO: 62991 - DNA, 15 bp, Homo sapiens
atgtaatgtgctgag

SEQ ID NO: 62992 - DNA, 15 bp, Homo sapiens
catgtaatgtgctga

SEQ ID NO: 62993 - DNA, 15 bp, Homo sapiens
acatgtaatgtgctg

SEQ ID NO: 62994 - DNA, 15 bp, Homo sapiens
tacatgtaatgtgct

SEQ ID NO: 62995 - DNA, 15 bp, Homo sapiens
atacatgtaatgtgc

SEQ ID NO: 62996 - DNA, 15 bp, Homo sapiens
aatacatgtaatgtg

SEQ ID NO: 62997 - DNA, 15 bp, Homo sapiens
taatacatgtaatgt

SEQ ID NO: 62998 - DNA, 15 bp, Homo sapiens
ttaatacatgtaatg

SEQ ID NO: 62999 - DNA, 15 bp, Homo sapiens
gttaatacatgtaat

SEQ ID NO: 63000 - DNA, 15 bp, Homo sapiens
agttaatacatgtaa

SEQ ID NO: 63001 - DNA, 15 bp, Homo sapiens
gagttaatacatgta

SEQ ID NO: 63002 - DNA, 15 bp, Homo sapiens
agagttaatacatgt

SEQ ID NO: 63003 - DNA, 15 bp, Homo sapiens
aagagttaatacatg

SEQ ID NO: 63004 - DNA, 15 bp, Homo sapiens
aaagagttaatacat

SEQ ID NO: 63005 - DNA, 15 bp, Homo sapiens
taaagagttaataca

SEQ ID NO: 63006 - DNA, 15 bp, Homo sapiens
ttaaagagttaatac

SEQ ID NO: 63007 - DNA, 15 bp, Homo sapiens
gttaaagagttaata

SEQ ID NO: 63008 - DNA, 15 bp, Homo sapiens
ggttaaagagttaat

SEQ ID NO: 63009 - DNA, 15 bp, Homo sapiens
gggttaaagagttaa

SEQ ID NO: 63010 - DNA, 15 bp, Homo sapiens
ggggttaaagagtta

SEQ ID NO: 63011 - DNA, 15 bp, Homo sapiens
aggggttaaagagtt

SEQ ID NO: 63012 - DNA, 15 bp, Homo sapiens
taggggttaaagagt

SEQ ID NO: 63013 - DNA, 15 bp, Homo sapiens
ataggggttaaagag

SEQ ID NO: 63014 - DNA, 15 bp, Homo sapiens
cataggggttaaaga

SEQ ID NO: 63015 - DNA, 15 bp, Homo sapiens
ccataggggttaaag

SEQ ID NO: 63016 - DNA, 15 bp, Homo sapiens
gccataggggttaaa

SEQ ID NO: 63017 - DNA, 15 bp, Homo sapiens
tgccataggggttaa

SEQ ID NO: 63018 - DNA, 15 bp, Homo sapiens
ctgccataggggtta

SEQ ID NO: 63019 - DNA, 15 bp, Homo sapiens
gctgccataggggtt

SEQ ID NO: 63020 - DNA, 15 bp, Homo sapiens
ggctgccataggggt

SEQ ID NO: 63021 - DNA, 15 bp, Homo sapiens
gggctgccatagggg

SEQ ID NO: 63022 - DNA, 15 bp, Homo sapiens
agggctgccataggg

SEQ ID NO: 63023 - DNA, 15 bp, Homo sapiens
aagggctgccatagg

SEQ ID NO: 63024 - DNA, 15 bp, Homo sapiens
aaagggctgccatag

SEQ ID NO: 63025 - DNA, 15 bp, Homo sapiens
caaagggctgccata

SEQ ID NO: 63026 - DNA, 15 bp, Homo sapiens
tcaaagggctgccat

SEQ ID NO: 63027 - DNA, 15 bp, Homo sapiens
ctcaaagggctgcca

SEQ ID NO: 63028 - DNA, 15 bp, Homo sapiens
tctcaaagggctgcc

SEQ ID NO: 63029 - DNA, 15 bp, Homo sapiens
atctcaaagggctgc

SEQ ID NO: 63030 - DNA, 15 bp, Homo sapiens
tatctcaaagggctg

SEQ ID NO: 63031 - DNA, 15 bp, Homo sapiens
ttatctcaaagggct

SEQ ID NO: 63032 - DNA, 15 bp, Homo sapiens
tttatctcaaagggc

SEQ ID NO: 63033 - DNA, 15 bp, Homo sapiens
ttttatctcaaaggg

SEQ ID NO: 63034 - DNA, 15 bp, Homo sapiens
tttttatctcaaagg

SEQ ID NO: 63035 - DNA, 15 bp, Homo sapiens
gtttttatctcaaag

SEQ ID NO: 63036 - DNA, 15 bp, Homo sapiens
agtttttatctcaaa

SEQ ID NO: 63037 - DNA, 15 bp, Homo sapiens
tagtttttatctcaa

SEQ ID NO: 63038 - DNA, 15 bp, Homo sapiens
ttagtttttatctca

SEQ ID NO: 63039 - DNA, 15 bp, Homo sapiens
attagtttttatctc

SEQ ID NO: 63040 - DNA, 15 bp, Homo sapiens
tattagtttttatct

SEQ ID NO: 63041 - DNA, 15 bp, Homo sapiens
atattagtttttatc

SEQ ID NO: 63042 - DNA, 15 bp, Homo sapiens
aatattagtttttat

SEQ ID NO: 63043 - DNA, 15 bp, Homo sapiens
taatattagttttta

SEQ ID NO: 63044 - DNA, 15 bp, Homo sapiens
ataatattagttttt

SEQ ID NO: 63045 - DNA, 15 bp, Homo sapiens
gataatattagtttt

SEQ ID NO: 63046 - DNA, 15 bp, Homo sapiens
agataatattagttt

SEQ ID NO: 63047 - DNA, 15 bp, Homo sapiens
aagataatattagtt

SEQ ID NO: 63048 - DNA, 15 bp, Homo sapiens
gaagataatattagt

SEQ ID NO: 63049 - DNA, 15 bp, Homo sapiens
tgaagataatattag

SEQ ID NO: 63050 - DNA, 15 bp, Homo sapiens
gtgaagataatatta

SEQ ID NO: 63051 - DNA, 15 bp, Homo sapiens
agtgaagataatatt

SEQ ID NO: 63052 - DNA, 15 bp, Homo sapiens
aagtgaagataatat

SEQ ID NO: 63053 - DNA, 15 bp, Homo sapiens
aaagtgaagataata

SEQ ID NO: 63054 - DNA, 15 bp, Homo sapiens
taaagtgaagataat

SEQ ID NO: 63055 - DNA, 15 bp, Homo sapiens
gtaaagtgaagataa

SEQ ID NO: 63056 - DNA, 15 bp, Homo sapiens
tgtaaagtgaagata

SEQ ID NO: 63057 - DNA, 15 bp, Homo sapiens
ctgtaaagtgaagat

SEQ ID NO: 63058 - DNA, 15 bp, Homo sapiens
tctgtaaagtgaaga

SEQ ID NO: 63059 - DNA, 15 bp, Homo sapiens
atctgtaaagtgaag

SEQ ID NO: 63060 - DNA, 15 bp, Homo sapiens
tatctgtaaagtgaa

SEQ ID NO: 63061 - DNA, 15 bp, Homo sapiens
ttatctgtaaagtga

SEQ ID NO: 63062 - DNA, 15 bp, Homo sapiens
cttatctgtaaagtg

SEQ ID NO: 63063 - DNA, 15 bp, Homo sapiens
acttatctgtaaagt

SEQ ID NO: 63064 - DNA, 15 bp, Homo sapiens
aacttatctgtaaag

SEQ ID NO: 63065 - DNA, 15 bp, Homo sapiens
caacttatctgtaaa

SEQ ID NO: 63066 - DNA, 15 bp, Homo sapiens
tcaacttatctgtaa

SEQ ID NO: 63067 - DNA, 15 bp, Homo sapiens
ctcaacttatctgta

SEQ ID NO: 63068 - DNA, 15 bp, Homo sapiens
tctcaacttatctgt

SEQ ID NO: 63069 - DNA, 15 bp, Homo sapiens
gtctcaacttatctg

SEQ ID NO: 63070 - DNA, 15 bp, Homo sapiens
tgtctcaacttatct

SEQ ID NO: 63071 - DNA, 15 bp, Homo sapiens
gtgtctcaacttatc

SEQ ID NO: 63072 - DNA, 15 bp, Homo sapiens
tgtgtctcaacttat

SEQ ID NO: 63073 - DNA, 15 bp, Homo sapiens
ctgtgtctcaactta

SEQ ID NO: 63074 - DNA, 15 bp, Homo sapiens
tctgtgtctcaactt

SEQ ID NO: 63075 - DNA, 15 bp, Homo sapiens
ttctgtgtctcaact

SEQ ID NO: 63076 - DNA, 15 bp, Homo sapiens
tttctgtgtctcaac

SEQ ID NO: 63077 - DNA, 15 bp, Homo sapiens
ctttctgtgtctcaa

SEQ ID NO: 63078 - DNA, 15 bp, Homo sapiens
actttctgtgtctca

SEQ ID NO: 63079 - DNA, 15 bp, Homo sapiens
aactttctgtgtctc

SEQ ID NO: 63080 - DNA, 15 bp, Homo sapiens
taactttctgtgtct

SEQ ID NO: 63081 - DNA, 15 bp, Homo sapiens
ctaactttctgtgtc

SEQ ID NO: 63082 - DNA, 15 bp, Homo sapiens
cctaactttctgtgt

SEQ ID NO: 63083 - DNA, 15 bp, Homo sapiens
acctaactttctgtg

SEQ ID NO: 63084 - DNA, 15 bp, Homo sapiens
cacctaactttctgt

SEQ ID NO: 63085 - DNA, 15 bp, Homo sapiens
tcacctaactttctg

SEQ ID NO: 63086 - DNA, 15 bp, Homo sapiens
gtcacctaactttct

SEQ ID NO: 63087 - DNA, 15 bp, Homo sapiens
agtcacctaactttc

SEQ ID NO: 63088 - DNA, 15 bp, Homo sapiens
gagtcacctaacttt

SEQ ID NO: 63089 - DNA, 15 bp, Homo sapiens
tgagtcacctaactt

SEQ ID NO: 63090 - DNA, 15 bp, Homo sapiens
ttgagtcacctaact

SEQ ID NO: 63091 - DNA, 15 bp, Homo sapiens
tttgagtcacctaac

SEQ ID NO: 63092 - DNA, 15 bp, Homo sapiens
atttgagtcacctaa

SEQ ID NO: 63093 - DNA, 15 bp, Homo sapiens
catttgagtcaccta

SEQ ID NO: 63094 - DNA, 15 bp, Homo sapiens
ccatttgagtcacct

SEQ ID NO: 63095 - DNA, 15 bp, Homo sapiens
cccatttgagtcacc

SEQ ID NO: 63096 - DNA, 15 bp, Homo sapiens
acccatttgagtcac

SEQ ID NO: 63097 - DNA, 15 bp, Homo sapiens
aacccatttgagtca

SEQ ID NO: 63098 - DNA, 15 bp, Homo sapiens
gaacccatttgagtc

SEQ ID NO: 63099 - DNA, 15 bp, Homo sapiens
tgaacccatttgagt

SEQ ID NO: 63100 - DNA, 15 bp, Homo sapiens
gtgaacccatttgag

SEQ ID NO: 63101 - DNA, 15 bp, Homo sapiens
agtgaacccatttga

SEQ ID NO: 63102 - DNA, 15 bp, Homo sapiens
cagtgaacccatttg

SEQ ID NO: 63103 - DNA, 15 bp, Homo sapiens
gcagtgaacccattt

SEQ ID NO: 63104 - DNA, 15 bp, Homo sapiens
ggcagtgaacccatt

SEQ ID NO: 63105 - DNA, 15 bp, Homo sapiens
aggcagtgaacccat

SEQ ID NO: 63106 - DNA, 15 bp, Homo sapiens
aaggcagtgaaccca

SEQ ID NO: 63107 - DNA, 15 bp, Homo sapiens
taaggcagtgaaccc

SEQ ID NO: 63108 - DNA, 15 bp, Homo sapiens
ttaaggcagtgaacc

SEQ ID NO: 63109 - DNA, 15 bp, Homo sapiens
cttaaggcagtgaac

SEQ ID NO: 63110 - DNA, 15 bp, Homo sapiens
ccttaaggcagtgaa

SEQ ID NO: 63111 - DNA, 15 bp, Homo sapiens
tccttaaggcagtga

SEQ ID NO: 63112 - DNA, 15 bp, Homo sapiens
atccttaaggcagtg

SEQ ID NO: 63113 - DNA, 15 bp, Homo sapiens
gatccttaaggcagt

SEQ ID NO: 63114 - DNA, 15 bp, Homo sapiens
agatccttaaggcag

SEQ ID NO: 63115 - DNA, 15 bp, Homo sapiens
gagatccttaaggca

SEQ ID NO: 63116 - DNA, 15 bp, Homo sapiens
tgagatccttaaggc

SEQ ID NO: 63117 - DNA, 15 bp, Homo sapiens
ctgagatccttaagg

SEQ ID NO: 63118 - DNA, 15 bp, Homo sapiens
actgagatccttaag

SEQ ID NO: 63119 - DNA, 15 bp, Homo sapiens
gactgagatccttaa

SEQ ID NO: 63120 - DNA, 15 bp, Homo sapiens
agactgagatcctta

SEQ ID NO: 63121 - DNA, 15 bp, Homo sapiens
tagactgagatcctt

SEQ ID NO: 63122 - DNA, 15 bp, Homo sapiens
ttagactgagatcct

SEQ ID NO: 63123 - DNA, 15 bp, Homo sapiens
attagactgagatcc

SEQ ID NO: 63124 - DNA, 15 bp, Homo sapiens
tattagactgagatc

SEQ ID NO: 63125 - DNA, 15 bp, Homo sapiens
ttattagactgagat

SEQ ID NO: 63126 - DNA, 15 bp, Homo sapiens
cttattagactgaga

SEQ ID NO: 63127 - DNA, 15 bp, Homo sapiens
ccttattagactgag

SEQ ID NO: 63128 - DNA, 15 bp, Homo sapiens
tccttattagactga

SEQ ID NO: 63129 - DNA, 15 bp, Homo sapiens
ttccttattagactg

SEQ ID NO: 63130 - DNA, 15 bp, Homo sapiens
tttccttattagact

SEQ ID NO: 63131 - DNA, 15 bp, Homo sapiens
ctttccttattagac

SEQ ID NO: 63132 - DNA, 15 bp, Homo sapiens
gctttccttattaga

SEQ ID NO: 63133 - DNA, 15 bp, Homo sapiens
tgctttccttattag

SEQ ID NO: 63134 - DNA, 15 bp, Homo sapiens
ctgctttccttatta

SEQ ID NO: 63135 - DNA, 15 bp, Homo sapiens
tctgctttccttatt

SEQ ID NO: 63136 - DNA, 15 bp, Homo sapiens
ttctgctttccttat

SEQ ID NO: 63137 - DNA, 15 bp, Homo sapiens
tttctgctttcctta

SEQ ID NO: 63138 - DNA, 15 bp, Homo sapiens
ttttctgctttcctt

SEQ ID NO: 63139 - DNA, 15 bp, Homo sapiens
cttttctgctttcct

SEQ ID NO: 63140 - DNA, 15 bp, Homo sapiens
gcttttctgctttcc

SEQ ID NO: 63141 - DNA, 15 bp, Homo sapiens
tgcttttctgctttc

SEQ ID NO: 63142 - DNA, 15 bp, Homo sapiens
ttgcttttctgcttt

SEQ ID NO: 63143 - DNA, 15 bp, Homo sapiens
tttgcttttctgctt

SEQ ID NO: 63144 - DNA, 15 bp, Homo sapiens
ctttgcttttctgct

SEQ ID NO: 63145 - DNA, 15 bp, Homo sapiens
gctttgcttttctgc

SEQ ID NO: 63146 - DNA, 15 bp, Homo sapiens
tgctttgcttttctg

SEQ ID NO: 63147 - DNA, 15 bp, Homo sapiens
ttgctttgcttttct

SEQ ID NO: 63148 - DNA, 15 bp, Homo sapiens
gttgctttgcttttc

SEQ ID NO: 63149 - DNA, 15 bp, Homo sapiens
ggttgctttgctttt

SEQ ID NO: 63150 - DNA, 15 bp, Homo sapiens
aggttgctttgcttt

SEQ ID NO: 63151 - DNA, 15 bp, Homo sapiens
aaggttgctttgctt

SEQ ID NO: 63152 - DNA, 15 bp, Homo sapiens
taaggttgctttgct

SEQ ID NO: 63153 - DNA, 15 bp, Homo sapiens
ataaggttgctttgc

SEQ ID NO: 63154 - DNA, 15 bp, Homo sapiens
tataaggttgctttg

SEQ ID NO: 63155 - DNA, 15 bp, Homo sapiens
ttataaggttgcttt

SEQ ID NO: 63156 - DNA, 15 bp, Homo sapiens
attataaggttgctt

SEQ ID NO: 63157 - DNA, 15 bp, Homo sapiens
tattataaggttgct

SEQ ID NO: 63158 - DNA, 15 bp, Homo sapiens
atattataaggttgc

SEQ ID NO: 63159 - DNA, 15 bp, Homo sapiens
catattataaggttg

SEQ ID NO: 63160 - DNA, 15 bp, Homo sapiens
ccatattataaggtt

SEQ ID NO: 63161 - DNA, 15 bp, Homo sapiens
accatattataaggt

SEQ ID NO: 63162 - DNA, 15 bp, Homo sapiens
caccatattataagg

SEQ ID NO: 63163 - DNA, 15 bp, Homo sapiens
gcaccatattataag

SEQ ID NO: 63164 - DNA, 15 bp, Homo sapiens
tgcaccatattataa

SEQ ID NO: 63165 - DNA, 15 bp, Homo sapiens
ttgcaccatattata

SEQ ID NO: 63166 - DNA, 15 bp, Homo sapiens
attgcaccatattat

SEQ ID NO: 63167 - DNA, 15 bp, Homo sapiens
tattgcaccatatta

SEQ ID NO: 63168 - DNA, 15 bp, Homo sapiens
ttattgcaccatatt

SEQ ID NO: 63169 - DNA, 15 bp, Homo sapiens
attattgcaccatat

SEQ ID NO: 63170 - DNA, 15 bp, Homo sapiens
aattattgcaccata

SEQ ID NO: 63171 - DNA, 15 bp, Homo sapiens
aaattattgcaccat

SEQ ID NO: 63172 - DNA, 15 bp, Homo sapiens
caaattattgcacca

SEQ ID NO: 63173 - DNA, 15 bp, Homo sapiens
gcaaattattgcacc

SEQ ID NO: 63174 - DNA, 15 bp, Homo sapiens
agcaaattattgcac

SEQ ID NO: 63175 - DNA, 15 bp, Homo sapiens
tagcaaattattgca

SEQ ID NO: 63176 - DNA, 15 bp, Homo sapiens
atagcaaattattgc

SEQ ID NO: 63177 - DNA, 15 bp, Homo sapiens
tatagcaaattattg

SEQ ID NO: 63178 - DNA, 15 bp, Homo sapiens
ttatagcaaattatt

SEQ ID NO: 63179 - DNA, 15 bp, Homo sapiens
attatagcaaattat

SEQ ID NO: 63180 - DNA, 15 bp, Homo sapiens
cattatagcaaatta

SEQ ID NO: 63181 - DNA, 15 bp, Homo sapiens
tcattatagcaaatt

SEQ ID NO: 63182 - DNA, 15 bp, Homo sapiens
ttcattatagcaaat

SEQ ID NO: 63183 - DNA, 15 bp, Homo sapiens
cttcattatagcaaa

SEQ ID NO: 63184 - DNA, 15 bp, Homo sapiens
acttcattatagcaa

SEQ ID NO: 63185 - DNA, 15 bp, Homo sapiens
aacttcattatagca

SEQ ID NO: 63186 - DNA, 15 bp, Homo sapiens
taacttcattatagc

SEQ ID NO: 63187 - DNA, 15 bp, Homo sapiens
ataacttcattatag

SEQ ID NO: 63188 - DNA, 15 bp, Homo sapiens
tataacttcattata

SEQ ID NO: 63189 - DNA, 15 bp, Homo sapiens
atataacttcattat

SEQ ID NO: 63190 - DNA, 15 bp, Homo sapiens
tatataacttcatta

SEQ ID NO: 63191 - DNA, 15 bp, Homo sapiens
gtatataacttcatt

SEQ ID NO: 63192 - DNA, 15 bp, Homo sapiens
tgtatataacttcat

SEQ ID NO: 63193 - DNA, 15 bp, Homo sapiens
ttgtatataacttca

SEQ ID NO: 63194 - DNA, 15 bp, Homo sapiens
tttgtatataacttc

SEQ ID NO: 63195 - DNA, 15 bp, Homo sapiens
ctttgtatataactt

SEQ ID NO: 63196 - DNA, 15 bp, Homo sapiens
actttgtatataact

SEQ ID NO: 63197 - DNA, 15 bp, Homo sapiens
cactttgtatataac

SEQ ID NO: 63198 - DNA, 15 bp, Homo sapiens
tcactttgtatataa

SEQ ID NO: 63199 - DNA, 15 bp, Homo sapiens
ttcactttgtatata

SEQ ID NO: 63200 - DNA, 15 bp, Homo sapiens
cttcactttgtatat

SEQ ID NO: 63201 - DNA, 15 bp, Homo sapiens
acttcactttgtata

SEQ ID NO: 63202 - DNA, 15 bp, Homo sapiens
tacttcactttgtat

SEQ ID NO: 63203 - DNA, 15 bp, Homo sapiens
ctacttcactttgta

SEQ ID NO: 63204 - DNA, 15 bp, Homo sapiens
tctacttcactttgt

SEQ ID NO: 63205 - DNA, 15 bp, Homo sapiens
ttctacttcactttg

SEQ ID NO: 63206 - DNA, 15 bp, Homo sapiens
cttctacttcacttt

SEQ ID NO: 63207 - DNA, 15 bp, Homo sapiens
gcttctacttcactt

SEQ ID NO: 63208 - DNA, 15 bp, Homo sapiens
tgcttctacttcact

SEQ ID NO: 63209 - DNA, 15 bp, Homo sapiens
atgcttctacttcac

SEQ ID NO: 63210 - DNA, 15 bp, Homo sapiens
tatgcttctacttca

SEQ ID NO: 63211 - DNA, 15 bp, Homo sapiens
ctatgcttctacttc

SEQ ID NO: 63212 - DNA, 15 bp, Homo sapiens
tctatgcttctactt

SEQ ID NO: 63213 - DNA, 15 bp, Homo sapiens
ttctatgcttctact

SEQ ID NO: 63214 - DNA, 15 bp, Homo sapiens
cttctatgcttctac

SEQ ID NO: 63215 - DNA, 15 bp, Homo sapiens
tcttctatgcttcta

SEQ ID NO: 63216 - DNA, 15 bp, Homo sapiens
ttcttctatgcttct

SEQ ID NO: 63217 - DNA, 15 bp, Homo sapiens
cttcttctatgcttc

SEQ ID NO: 63218 - DNA, 15 bp, Homo sapiens
gcttcttctatgctt

SEQ ID NO: 63219 - DNA, 15 bp, Homo sapiens
tgcttcttctatgct

SEQ ID NO: 63220 - DNA, 15 bp, Homo sapiens
ctgcttcttctatgc

SEQ ID NO: 63221 - DNA, 15 bp, Homo sapiens
gctgcttcttctatg

SEQ ID NO: 63222 - DNA, 15 bp, Homo sapiens
tgctgcttcttctat

SEQ ID NO: 63223 - DNA, 15 bp, Homo sapiens
gtgctgcttcttcta

SEQ ID NO: 63224 - DNA, 15 bp, Homo sapiens
agtgctgcttcttct

SEQ ID NO: 63225 - DNA, 15 bp, Homo sapiens
tagtgctgcttcttc

SEQ ID NO: 63226 - DNA, 15 bp, Homo sapiens
ttagtgctgcttctt

SEQ ID NO: 63227 - DNA, 15 bp, Homo sapiens
tttagtgctgcttct

SEQ ID NO: 63228 - DNA, 15 bp, Homo sapiens
atttagtgctgcttc

SEQ ID NO: 63229 - DNA, 15 bp, Homo sapiens
aatttagtgctgctt

SEQ ID NO: 63230 - DNA, 15 bp, Homo sapiens
aaatttagtgctgct

SEQ ID NO: 63231 - DNA, 15 bp, Homo sapiens
caaatttagtgctgc

SEQ ID NO: 63232 - DNA, 15 bp, Homo sapiens
acaaatttagtgctg

SEQ ID NO: 63233 - DNA, 15 bp, Homo sapiens
gacaaatttagtgct

SEQ ID NO: 63234 - DNA, 15 bp, Homo sapiens
agacaaatttagtgc

SEQ ID NO: 63235 - DNA, 15 bp, Homo sapiens
cagacaaatttagtg

SEQ ID NO: 63236 - DNA, 15 bp, Homo sapiens
ccagacaaatttagt

SEQ ID NO: 63237 - DNA, 15 bp, Homo sapiens
cccagacaaatttag

SEQ ID NO: 63238 - DNA, 15 bp, Homo sapiens
acccagacaaattta

SEQ ID NO: 63239 - DNA, 15 bp, Homo sapiens
cacccagacaaattt

SEQ ID NO: 63240 - DNA, 15 bp, Homo sapiens
tcacccagacaaatt

SEQ ID NO: 63241 - DNA, 15 bp, Homo sapiens
ctcacccagacaaat

SEQ ID NO: 63242 - DNA, 15 bp, Homo sapiens
actcacccagacaaa

SEQ ID NO: 63243 - DNA, 15 bp, Homo sapiens
gactcacccagacaa

SEQ ID NO: 63244 - DNA, 15 bp, Homo sapiens
tgactcacccagaca

SEQ ID NO: 63245 - DNA, 15 bp, Homo sapiens
ctgactcacccagac

SEQ ID NO: 63246 - DNA, 15 bp, Homo sapiens
tctgactcacccaga

SEQ ID NO: 63247 - DNA, 15 bp, Homo sapiens
ctctgactcacccag

SEQ ID NO: 63248 - DNA, 15 bp, Homo sapiens
tctctgactcaccca

SEQ ID NO: 63249 - DNA, 15 bp, Homo sapiens
ttctctgactcaccc

SEQ ID NO: 63250 - DNA, 15 bp, Homo sapiens
cttctctgactcacc

SEQ ID NO: 63251 - DNA, 15 bp, Homo sapiens
ccttctctgactcac

SEQ ID NO: 63252 - DNA, 15 bp, Homo sapiens
gccttctctgactca

SEQ ID NO: 63253 - DNA, 15 bp, Homo sapiens
agccttctctgactc

SEQ ID NO: 63254 - DNA, 15 bp, Homo sapiens
tagccttctctgact

SEQ ID NO: 63255 - DNA, 15 bp, Homo sapiens
ttagccttctctgac

SEQ ID NO: 63256 - DNA, 15 bp, Homo sapiens
gttagccttctctga

SEQ ID NO: 63257 - DNA, 15 bp, Homo sapiens
ggttagccttctctg

SEQ ID NO: 63258 - DNA, 15 bp, Homo sapiens
tggttagccttctct

SEQ ID NO: 63259 - DNA, 15 bp, Homo sapiens
ctggttagccttctc

SEQ ID NO: 63260 - DNA, 15 bp, Homo sapiens
cctggttagccttct

SEQ ID NO: 63261 - DNA, 15 bp, Homo sapiens
tcctggttagccttc

SEQ ID NO: 63262 - DNA, 15 bp, Homo sapiens
ttcctggttagcctt

SEQ ID NO: 63263 - DNA, 15 bp, Homo sapiens
tttcctggttagcct

SEQ ID NO: 63264 - DNA, 15 bp, Homo sapiens
ttttcctggttagcc

SEQ ID NO: 63265 - DNA, 15 bp, Homo sapiens
tttttcctggttagc

SEQ ID NO: 63266 - DNA, 15 bp, Homo sapiens
atttttcctggttag

SEQ ID NO: 63267 - DNA, 15 bp, Homo sapiens
tatttttcctggtta

SEQ ID NO: 63268 - DNA, 15 bp, Homo sapiens
ctatttttcctggtt

SEQ ID NO: 63269 - DNA, 15 bp, Homo sapiens
actatttttcctggt

SEQ ID NO: 63270 - DNA, 15 bp, Homo sapiens
aactatttttcctgg

SEQ ID NO: 63271 - DNA, 15 bp, Homo sapiens
aaactatttttcctg

SEQ ID NO: 63272 - DNA, 15 bp, Homo sapiens
gaaactatttttcct

SEQ ID NO: 63273 - DNA, 15 bp, Homo sapiens
agaaactatttttcc

SEQ ID NO: 63274 - DNA, 15 bp, Homo sapiens
cagaaactatttttc

SEQ ID NO: 63275 - DNA, 15 bp, Homo sapiens
tcagaaactattttt

SEQ ID NO: 63276 - DNA, 15 bp, Homo sapiens
ttcagaaactatttt

SEQ ID NO: 63277 - DNA, 15 bp, Homo sapiens
gttcagaaactattt

SEQ ID NO: 63278 - DNA, 15 bp, Homo sapiens
agttcagaaactatt

SEQ ID NO: 63279 - DNA, 15 bp, Homo sapiens
tagttcagaaactat

SEQ ID NO: 63280 - DNA, 15 bp, Homo sapiens
ttagttcagaaacta

SEQ ID NO: 63281 - DNA, 15 bp, Homo sapiens
gttagttcagaaact

SEQ ID NO: 63282 - DNA, 15 bp, Homo sapiens
tgttagttcagaaac

SEQ ID NO: 63283 - DNA, 15 bp, Homo sapiens
gtgttagttcagaaa

SEQ ID NO: 63284 - DNA, 15 bp, Homo sapiens
agtgttagttcagaa

SEQ ID NO: 63285 - DNA, 15 bp, Homo sapiens
aagtgttagttcaga

SEQ ID NO: 63286 - DNA, 15 bp, Homo sapiens
caagtgttagttcag

SEQ ID NO: 63287 - DNA, 15 bp, Homo sapiens
tcaagtgttagttca

SEQ ID NO: 63288 - DNA, 15 bp, Homo sapiens
ttcaagtgttagttc

SEQ ID NO: 63289 - DNA, 15 bp, Homo sapiens
cttcaagtgttagtt

SEQ ID NO: 63290 - DNA, 15 bp, Homo sapiens
ccttcaagtgttagt

SEQ ID NO: 63291 - DNA, 15 bp, Homo sapiens
tccttcaagtgttag

SEQ ID NO: 63292 - DNA, 15 bp, Homo sapiens
ctccttcaagtgtta

SEQ ID NO: 63293 - DNA, 15 bp, Homo sapiens
cctccttcaagtgtt

SEQ ID NO: 63294 - DNA, 15 bp, Homo sapiens
acctccttcaagtgt

SEQ ID NO: 63295 - DNA, 15 bp, Homo sapiens
cacctccttcaagtg

SEQ ID NO: 63296 - DNA, 15 bp, Homo sapiens
acacctccttcaagt

SEQ ID NO: 63297 - DNA, 15 bp, Homo sapiens
tacacctccttcaag

SEQ ID NO: 63298 - DNA, 15 bp, Homo sapiens
ctacacctccttcaa

SEQ ID NO: 63299 - DNA, 15 bp, Homo sapiens
gctacacctccttca

SEQ ID NO: 63300 - DNA, 15 bp, Homo sapiens
tgctacacctccttc

SEQ ID NO: 63301 - DNA, 15 bp, Homo sapiens
ctgctacacctcctt

SEQ ID NO: 63302 - DNA, 15 bp, Homo sapiens
actgctacacctcct

SEQ ID NO: 63303 - DNA, 15 bp, Homo sapiens
aactgctacacctcc

SEQ ID NO: 63304 - DNA, 15 bp, Homo sapiens
gaactgctacacctc

SEQ ID NO: 63305 - DNA, 15 bp, Homo sapiens
tgaactgctacacct

SEQ ID NO: 63306 - DNA, 15 bp, Homo sapiens
atgaactgctacacc

SEQ ID NO: 63307 - DNA, 15 bp, Homo sapiens
gatgaactgctacac

SEQ ID NO: 63308 - DNA, 15 bp, Homo sapiens
tgatgaactgctaca

SEQ ID NO: 63309 - DNA, 15 bp, Homo sapiens
gtgatgaactgctac

SEQ ID NO: 63310 - DNA, 15 bp, Homo sapiens
agtgatgaactgcta

SEQ ID NO: 63311 - DNA, 15 bp, Homo sapiens
cagtgatgaactgct

SEQ ID NO: 63312 - DNA, 15 bp, Homo sapiens
tcagtgatgaactgc

SEQ ID NO: 63313 - DNA, 15 bp, Homo sapiens
gtcagtgatgaactg

SEQ ID NO: 63314 - DNA, 15 bp, Homo sapiens
tgtcagtgatgaact

SEQ ID NO: 63315 - DNA, 15 bp, Homo sapiens
ctgtcagtgatgaac

SEQ ID NO: 63316 - DNA, 15 bp, Homo sapiens
actgtcagtgatgaa

SEQ ID NO: 63317 - DNA, 15 bp, Homo sapiens
cactgtcagtgatga

SEQ ID NO: 63318 - DNA, 15 bp, Homo sapiens
tcactgtcagtgatg

SEQ ID NO: 63319 - DNA, 15 bp, Homo sapiens
atcactgtcagtgat

SEQ ID NO: 63320 - DNA, 15 bp, Homo sapiens
catcactgtcagtga

SEQ ID NO: 63321 - DNA, 15 bp, Homo sapiens
acatcactgtcagtg

SEQ ID NO: 63322 - DNA, 15 bp, Homo sapiens
aacatcactgtcagt

SEQ ID NO: 63323 - DNA, 15 bp, Homo sapiens
caacatcactgtcag

SEQ ID NO: 63324 - DNA, 15 bp, Homo sapiens
ccaacatcactgtca

SEQ ID NO: 63325 - DNA, 15 bp, Homo sapiens
cccaacatcactgtc

SEQ ID NO: 63326 - DNA, 15 bp, Homo sapiens
ccccaacatcactgt

SEQ ID NO: 63327 - DNA, 15 bp, Homo sapiens
accccaacatcactg

SEQ ID NO: 63328 - DNA, 15 bp, Homo sapiens
caccccaacatcact

SEQ ID NO: 63329 - DNA, 15 bp, Homo sapiens
ccaccccaacatcac

SEQ ID NO: 63330 - DNA, 15 bp, Homo sapiens
cccaccccaacatca

SEQ ID NO: 63331 - DNA, 15 bp, Homo sapiens
acccaccccaacatc

SEQ ID NO: 63332 - DNA, 15 bp, Homo sapiens
gacccaccccaacat

SEQ ID NO: 63333 - DNA, 15 bp, Homo sapiens
agacccaccccaaca

SEQ ID NO: 63334 - DNA, 15 bp, Homo sapiens
cagacccaccccaac

SEQ ID NO: 63335 - DNA, 15 bp, Homo sapiens
ccagacccaccccaa

SEQ ID NO: 63336 - DNA, 15 bp, Homo sapiens
accagacccacccca

SEQ ID NO: 63337 - DNA, 15 bp, Homo sapiens
aaccagacccacccc

SEQ ID NO: 63338 - DNA, 15 bp, Homo sapiens
aaaccagacccaccc

SEQ ID NO: 63339 - DNA, 15 bp, Homo sapiens
gaaaccagacccacc

SEQ ID NO: 63340 - DNA, 15 bp, Homo sapiens
tgaaaccagacccac

SEQ ID NO: 63341 - DNA, 15 bp, Homo sapiens
ctgaaaccagaccca

SEQ ID NO: 63342 - DNA, 15 bp, Homo sapiens
cctgaaaccagaccc

SEQ ID NO: 63343 - DNA, 15 bp, Homo sapiens
tcctgaaaccagacc

SEQ ID NO: 63344 - DNA, 15 bp, Homo sapiens
ctcctgaaaccagac

SEQ ID NO: 63345 - DNA, 15 bp, Homo sapiens
tctcctgaaaccaga

SEQ ID NO: 63346 - DNA, 15 bp, Homo sapiens
ctctcctgaaaccag

SEQ ID NO: 63347 - DNA, 15 bp, Homo sapiens
cctctcctgaaacca

SEQ ID NO: 63348 - DNA, 15 bp, Homo sapiens
ccctctcctgaaacc

SEQ ID NO: 63349 - DNA, 15 bp, Homo sapiens
cccctctcctgaaac

SEQ ID NO: 63350 - DNA, 15 bp, Homo sapiens
tcccctctcctgaaa

SEQ ID NO: 63351 - DNA, 15 bp, Homo sapiens
ctcccctctcctgaa

SEQ ID NO: 63352 - DNA, 15 bp, Homo sapiens
cctcccctctcctga

SEQ ID NO: 63353 - DNA, 15 bp, Homo sapiens
tcctcccctctcctg

SEQ ID NO: 63354 - DNA, 15 bp, Homo sapiens
ttcctcccctctcct

SEQ ID NO: 63355 - DNA, 15 bp, Homo sapiens
tttcctcccctctcc

SEQ ID NO: 63356 - DNA, 15 bp, Homo sapiens
atttcctcccctctc

SEQ ID NO: 63357 - DNA, 15 bp, Homo sapiens
aatttcctcccctct

SEQ ID NO: 63358 - DNA, 15 bp, Homo sapiens
caatttcctcccctc

SEQ ID NO: 63359 - DNA, 15 bp, Homo sapiens
ccaatttcctcccct

SEQ ID NO: 63360 - DNA, 15 bp, Homo sapiens
gccaatttcctcccc

SEQ ID NO: 63361 - DNA, 15 bp, Homo sapiens
agccaatttcctccc

SEQ ID NO: 63362 - DNA, 15 bp, Homo sapiens
aagccaatttcctcc

SEQ ID NO: 63363 - DNA, 15 bp, Homo sapiens
aaagccaatttcctc

SEQ ID NO: 63364 - DNA, 15 bp, Homo sapiens
caaagccaatttcct

SEQ ID NO: 63365 - DNA, 15 bp, Homo sapiens
ccaaagccaatttcc

SEQ ID NO: 63366 - DNA, 15 bp, Homo sapiens
accaaagccaatttc

SEQ ID NO: 63367 - DNA, 15 bp, Homo sapiens
gaccaaagccaattt

SEQ ID NO: 63368 - DNA, 15 bp, Homo sapiens
agaccaaagccaatt

SEQ ID NO: 63369 - DNA, 15 bp, Homo sapiens
cagaccaaagccaat

SEQ ID NO: 63370 - DNA, 15 bp, Homo sapiens
tcagaccaaagccaa

SEQ ID NO: 63371 - DNA, 15 bp, Homo sapiens
ctcagaccaaagcca

SEQ ID NO: 63372 - DNA, 15 bp, Homo sapiens
cctcagaccaaagcc

SEQ ID NO: 63373 - DNA, 15 bp, Homo sapiens
gcctcagaccaaagc

SEQ ID NO: 63374 - DNA, 15 bp, Homo sapiens
agcctcagaccaaag

SEQ ID NO: 63375 - DNA, 15 bp, Homo sapiens
cagcctcagaccaaa

SEQ ID NO: 63376 - DNA, 15 bp, Homo sapiens
tcagcctcagaccaa

SEQ ID NO: 63377 - DNA, 15 bp, Homo sapiens
ctcagcctcagacca

SEQ ID NO: 63378 - DNA, 15 bp, Homo sapiens
cctcagcctcagacc

SEQ ID NO: 63379 - DNA, 15 bp, Homo sapiens
acctcagcctcagac

SEQ ID NO: 63380 - DNA, 15 bp, Homo sapiens
cacctcagcctcaga

SEQ ID NO: 63381 - DNA, 15 bp, Homo sapiens
acacctcagcctcag

SEQ ID NO: 63382 - DNA, 15 bp, Homo sapiens
cacacctcagcctca

SEQ ID NO: 63383 - DNA, 15 bp, Homo sapiens
ccacacctcagcctc

SEQ ID NO: 63384 - DNA, 15 bp, Homo sapiens
cccacacctcagcct

SEQ ID NO: 63385 - DNA, 15 bp, Homo sapiens
gcccacacctcagcc

SEQ ID NO: 63386 - DNA, 15 bp, Homo sapiens
tgcccacacctcagc

SEQ ID NO: 63387 - DNA, 15 bp, Homo sapiens
ttgcccacacctcag

SEQ ID NO: 63388 - DNA, 15 bp, Homo sapiens
tttgcccacacctca

SEQ ID NO: 63389 - DNA, 15 bp, Homo sapiens
ctttgcccacacctc

SEQ ID NO: 63390 - DNA, 15 bp, Homo sapiens
gctttgcccacacct

SEQ ID NO: 63391 - DNA, 15 bp, Homo sapiens
tgctttgcccacacc

SEQ ID NO: 63392 - DNA, 15 bp, Homo sapiens
atgctttgcccacac

SEQ ID NO: 63393 - DNA, 15 bp, Homo sapiens
aatgctttgcccaca

SEQ ID NO: 63394 - DNA, 15 bp, Homo sapiens
taatgctttgcccac

SEQ ID NO: 63395 - DNA, 15 bp, Homo sapiens
ctaatgctttgccca

SEQ ID NO: 63396 - DNA, 15 bp, Homo sapiens
gctaatgctttgccc

SEQ ID NO: 63397 - DNA, 15 bp, Homo sapiens
agctaatgctttgcc

SEQ ID NO: 63398 - DNA, 15 bp, Homo sapiens
aagctaatgctttgc

SEQ ID NO: 63399 - DNA, 15 bp, Homo sapiens
taagctaatgctttg

SEQ ID NO: 63400 - DNA, 15 bp, Homo sapiens
ataagctaatgcttt

SEQ ID NO: 63401 - DNA, 15 bp, Homo sapiens
cataagctaatgctt

SEQ ID NO: 63402 - DNA, 15 bp, Homo sapiens
acataagctaatgct

SEQ ID NO: 63403 - DNA, 15 bp, Homo sapiens
cacataagctaatgc

SEQ ID NO: 63404 - DNA, 15 bp, Homo sapiens
ccacataagctaatg

SEQ ID NO: 63405 - DNA, 15 bp, Homo sapiens
cccacataagctaat

SEQ ID NO: 63406 - DNA, 15 bp, Homo sapiens
acccacataagctaa

SEQ ID NO: 63407 - DNA, 15 bp, Homo sapiens
gacccacataagcta

SEQ ID NO: 63408 - DNA, 15 bp, Homo sapiens
ggacccacataagct

SEQ ID NO: 63409 - DNA, 15 bp, Homo sapiens
tggacccacataagc

SEQ ID NO: 63410 - DNA, 15 bp, Homo sapiens
atggacccacataag

SEQ ID NO: 63411 - DNA, 15 bp, Homo sapiens
aatggacccacataa

SEQ ID NO: 63412 - DNA, 15 bp, Homo sapiens
taatggacccacata

SEQ ID NO: 63413 - DNA, 15 bp, Homo sapiens
ctaatggacccacat

SEQ ID NO: 63414 - DNA, 15 bp, Homo sapiens
gctaatggacccaca

SEQ ID NO: 63415 - DNA, 15 bp, Homo sapiens
agctaatggacccac

SEQ ID NO: 63416 - DNA, 15 bp, Homo sapiens
aagctaatggaccca

SEQ ID NO: 63417 - DNA, 15 bp, Homo sapiens
taagctaatggaccc

SEQ ID NO: 63418 - DNA, 15 bp, Homo sapiens
ataagctaatggacc

SEQ ID NO: 63419 - DNA, 15 bp, Homo sapiens
cataagctaatggac

SEQ ID NO: 63420 - DNA, 15 bp, Homo sapiens
acataagctaatgga

SEQ ID NO: 63421 - DNA, 15 bp, Homo sapiens
cacataagctaatgg

SEQ ID NO: 63422 - DNA, 15 bp, Homo sapiens
tcacataagctaatg

SEQ ID NO: 63423 - DNA, 15 bp, Homo sapiens
ctcacataagctaat

SEQ ID NO: 63424 - DNA, 15 bp, Homo sapiens
actcacataagctaa

SEQ ID NO: 63425 - DNA, 15 bp, Homo sapiens
gactcacataagcta

SEQ ID NO: 63426 - DNA, 15 bp, Homo sapiens
ggactcacataagct

SEQ ID NO: 63427 - DNA, 15 bp, Homo sapiens
tggactcacataagc

SEQ ID NO: 63428 - DNA, 15 bp, Homo sapiens
gtggactcacataag

SEQ ID NO: 63429 - DNA, 15 bp, Homo sapiens
tgtggactcacataa

SEQ ID NO: 63430 - DNA, 15 bp, Homo sapiens
ttgtggactcacata

SEQ ID NO: 63431 - DNA, 15 bp, Homo sapiens
tttgtggactcacat

SEQ ID NO: 63432 - DNA, 15 bp, Homo sapiens
ttttgtggactcaca

SEQ ID NO: 63433 - DNA, 15 bp, Homo sapiens
cttttgtggactcac

SEQ ID NO: 63434 - DNA, 15 bp, Homo sapiens
ccttttgtggactca

SEQ ID NO: 63435 - DNA, 15 bp, Homo sapiens
accttttgtggactc

SEQ ID NO: 63436 - DNA, 15 bp, Homo sapiens
caccttttgtggact

SEQ ID NO: 63437 - DNA, 15 bp, Homo sapiens
acaccttttgtggac

SEQ ID NO: 63438 - DNA, 15 bp, Homo sapiens
cacaccttttgtgga

SEQ ID NO: 63439 - DNA, 15 bp, Homo sapiens
acacaccttttgtgg

SEQ ID NO: 63440 - DNA, 15 bp, Homo sapiens
cacacaccttttgtg

SEQ ID NO: 63441 - DNA, 15 bp, Homo sapiens
acacacaccttttgt

SEQ ID NO: 63442 - DNA, 15 bp, Homo sapiens
cacacacaccttttg

SEQ ID NO: 63443 - DNA, 15 bp, Homo sapiens
acacacacacctttt

SEQ ID NO: 63444 - DNA, 15 bp, Homo sapiens
cacacacacaccttt

SEQ ID NO: 63445 - DNA, 15 bp, Homo sapiens
acacacacacacctt

SEQ ID NO: 63446 - DNA, 15 bp, Homo sapiens
aacacacacacacct

SEQ ID NO: 63447 - DNA, 15 bp, Homo sapiens
aaacacacacacacc

SEQ ID NO: 63448 - DNA, 15 bp, Homo sapiens
caaacacacacacac

SEQ ID NO: 63449 - DNA, 15 bp, Homo sapiens
acaaacacacacaca

SEQ ID NO: 63450 - DNA, 15 bp, Homo sapiens
cacaaacacacacac

SEQ ID NO: 63451 - DNA, 15 bp, Homo sapiens
acacaaacacacaca

SEQ ID NO: 63452 - DNA, 15 bp, Homo sapiens
cacacaaacacacac

SEQ ID NO: 63453 - DNA, 15 bp, Homo sapiens
acacacaaacacaca

SEQ ID NO: 63454 - DNA, 15 bp, Homo sapiens
tacacacaaacacac

SEQ ID NO: 63455 - DNA, 15 bp, Homo sapiens
atacacacaaacaca

SEQ ID NO: 63456 - DNA, 15 bp, Homo sapiens
catacacacaaacac

SEQ ID NO: 63457 - DNA, 15 bp, Homo sapiens
acatacacacaaaca

SEQ ID NO: 63458 - DNA, 15 bp, Homo sapiens
cacatacacacaaac

SEQ ID NO: 63459 - DNA, 15 bp, Homo sapiens
acacatacacacaaa

SEQ ID NO: 63460 - DNA, 15 bp, Homo sapiens
cacacatacacacaa

SEQ ID NO: 63461 - DNA, 15 bp, Homo sapiens
acacacatacacaca

SEQ ID NO: 63462 - DNA, 15 bp, Homo sapiens
cacacacatacacac

SEQ ID NO: 63463 - DNA, 15 bp, Homo sapiens
acacacacatacaca

SEQ ID NO: 63464 - DNA, 15 bp, Homo sapiens
cacacacacatacac

SEQ ID NO: 63465 - DNA, 15 bp, Homo sapiens
acacacacacataca

SEQ ID NO: 63466 - DNA, 15 bp, Homo sapiens
cacacacacacatac

SEQ ID NO: 63467 - DNA, 15 bp, Homo sapiens
acacacacacacata

SEQ ID NO: 63468 - DNA, 15 bp, Homo sapiens
cacacacacacacat

SEQ ID NO: 63469 - DNA, 15 bp, Homo sapiens
acacacacacacaca

SEQ ID NO: 63470 - DNA, 15 bp, Homo sapiens
cacacacacacacac

SEQ ID NO: 63471 - DNA, 15 bp, Homo sapiens
tacacacacacacac

SEQ ID NO: 63472 - DNA, 15 bp, Homo sapiens
gtacacacacacaca

SEQ ID NO: 63473 - DNA, 15 bp, Homo sapiens
cgtacacacacacac

SEQ ID NO: 63474 - DNA, 15 bp, Homo sapiens
tcgtacacacacaca

SEQ ID NO: 63475 - DNA, 15 bp, Homo sapiens
ttcgtacacacacac

SEQ ID NO: 63476 - DNA, 15 bp, Homo sapiens
tttcgtacacacaca

SEQ ID NO: 63477 - DNA, 15 bp, Homo sapiens
atttcgtacacacac

SEQ ID NO: 63478 - DNA, 15 bp, Homo sapiens
catttcgtacacaca

SEQ ID NO: 63479 - DNA, 15 bp, Homo sapiens
ccatttcgtacacac

SEQ ID NO: 63480 - DNA, 15 bp, Homo sapiens
cccatttcgtacaca

SEQ ID NO: 63481 - DNA, 15 bp, Homo sapiens
ccccatttcgtacac

SEQ ID NO: 63482 - DNA, 15 bp, Homo sapiens
cccccatttcgtaca

SEQ ID NO: 63483 - DNA, 15 bp, Homo sapiens
gcccccatttcgtac

SEQ ID NO: 63484 - DNA, 15 bp, Homo sapiens
agcccccatttcgta

SEQ ID NO: 63485 - DNA, 15 bp, Homo sapiens
gagcccccatttcgt

SEQ ID NO: 63486 - DNA, 15 bp, Homo sapiens
tgagcccccatttcg

SEQ ID NO: 63487 - DNA, 15 bp, Homo sapiens
ttgagcccccatttc

SEQ ID NO: 63488 - DNA, 15 bp, Homo sapiens
attgagcccccattt

SEQ ID NO: 63489 - DNA, 15 bp, Homo sapiens
cattgagcccccatt

SEQ ID NO: 63490 - DNA, 15 bp, Homo sapiens
tcattgagcccccat

SEQ ID NO: 63491 - DNA, 15 bp, Homo sapiens
atcattgagccccca

SEQ ID NO: 63492 - DNA, 15 bp, Homo sapiens
aatcattgagccccc

SEQ ID NO: 63493 - DNA, 15 bp, Homo sapiens
aaatcattgagcccc

SEQ ID NO: 63494 - DNA, 15 bp, Homo sapiens
caaatcattgagccc

SEQ ID NO: 63495 - DNA, 15 bp, Homo sapiens
ccaaatcattgagcc

SEQ ID NO: 63496 - DNA, 15 bp, Homo sapiens
accaaatcattgagc

SEQ ID NO: 63497 - DNA, 15 bp, Homo sapiens
taccaaatcattgag

SEQ ID NO: 63498 - DNA, 15 bp, Homo sapiens
ctaccaaatcattga

SEQ ID NO: 63499 - DNA, 15 bp, Homo sapiens
actaccaaatcattg

SEQ ID NO: 63500 - DNA, 15 bp, Homo sapiens
cactaccaaatcatt

SEQ ID NO: 63501 - DNA, 15 bp, Homo sapiens
ccactaccaaatcat

SEQ ID NO: 63502 - DNA, 15 bp, Homo sapiens
accactaccaaatca

SEQ ID NO: 63503 - DNA, 15 bp, Homo sapiens
aaccactaccaaatc

SEQ ID NO: 63504 - DNA, 15 bp, Homo sapiens
aaaccactaccaaat

SEQ ID NO: 63505 - DNA, 15 bp, Homo sapiens
caaaccactaccaaa

SEQ ID NO: 63506 - DNA, 15 bp, Homo sapiens
ccaaaccactaccaa

SEQ ID NO: 63507 - DNA, 15 bp, Homo sapiens
accaaaccactacca

SEQ ID NO: 63508 - DNA, 15 bp, Homo sapiens
aaccaaaccactacc

SEQ ID NO: 63509 - DNA, 15 bp, Homo sapiens
aaaccaaaccactac

SEQ ID NO: 63510 - DNA, 15 bp, Homo sapiens
caaaccaaaccacta

SEQ ID NO: 63511 - DNA, 15 bp, Homo sapiens
acaaaccaaaccact

SEQ ID NO: 63512 - DNA, 15 bp, Homo sapiens
gacaaaccaaaccac

SEQ ID NO: 63513 - DNA, 15 bp, Homo sapiens
tgacaaaccaaacca

SEQ ID NO: 63514 - DNA, 15 bp, Homo sapiens
ttgacaaaccaaacc

SEQ ID NO: 63515 - DNA, 15 bp, Homo sapiens
cttgacaaaccaaac

SEQ ID NO: 63516 - DNA, 15 bp, Homo sapiens
tcttgacaaaccaaa

SEQ ID NO: 63517 - DNA, 15 bp, Homo sapiens
ttcttgacaaaccaa

SEQ ID NO: 63518 - DNA, 15 bp, Homo sapiens
cttcttgacaaacca

SEQ ID NO: 63519 - DNA, 15 bp, Homo sapiens
gcttcttgacaaacc

SEQ ID NO: 63520 - DNA, 15 bp, Homo sapiens
tgcttcttgacaaac

SEQ ID NO: 63521 - DNA, 15 bp, Homo sapiens
ctgcttcttgacaaa

SEQ ID NO: 63522 - DNA, 15 bp, Homo sapiens
cctgcttcttgacaa

SEQ ID NO: 63523 - DNA, 15 bp, Homo sapiens
gcctgcttcttgaca

SEQ ID NO: 63524 - DNA, 15 bp, Homo sapiens
agcctgcttcttgac

SEQ ID NO: 63525 - DNA, 15 bp, Homo sapiens
cagcctgcttcttga

SEQ ID NO: 63526 - DNA, 15 bp, Homo sapiens
ccagcctgcttcttg

SEQ ID NO: 63527 - DNA, 15 bp, Homo sapiens
cccagcctgcttctt

SEQ ID NO: 63528 - DNA, 15 bp, Homo sapiens
tcccagcctgcttct

SEQ ID NO: 63529 - DNA, 15 bp, Homo sapiens
ttcccagcctgcttc

SEQ ID NO: 63530 - DNA, 15 bp, Homo sapiens
gttcccagcctgctt

SEQ ID NO: 63531 - DNA, 15 bp, Homo sapiens
agttcccagcctgct

SEQ ID NO: 63532 - DNA, 15 bp, Homo sapiens
gagttcccagcctgc

SEQ ID NO: 63533 - DNA, 15 bp, Homo sapiens
tgagttcccagcctg

SEQ ID NO: 63534 - DNA, 15 bp, Homo sapiens
ttgagttcccagcct

SEQ ID NO: 63535 - DNA, 15 bp, Homo sapiens
attgagttcccagcc

SEQ ID NO: 63536 - DNA, 15 bp, Homo sapiens
tattgagttcccagc

SEQ ID NO: 63537 - DNA, 15 bp, Homo sapiens
ttattgagttcccag

SEQ ID NO: 63538 - DNA, 15 bp, Homo sapiens
cttattgagttccca

SEQ ID NO: 63539 - DNA, 15 bp, Homo sapiens
gcttattgagttccc

SEQ ID NO: 63540 - DNA, 15 bp, Homo sapiens
tgcttattgagttcc

SEQ ID NO: 63541 - DNA, 15 bp, Homo sapiens
atgcttattgagttc

SEQ ID NO: 63542 - DNA, 15 bp, Homo sapiens
gatgcttattgagtt

SEQ ID NO: 63543 - DNA, 15 bp, Homo sapiens
agatgcttattgagt

SEQ ID NO: 63544 - DNA, 15 bp, Homo sapiens
aagatgcttattgag

SEQ ID NO: 63545 - DNA, 15 bp, Homo sapiens
aaagatgcttattga

SEQ ID NO: 63546 - DNA, 15 bp, Homo sapiens
gaaagatgcttattg

SEQ ID NO: 63547 - DNA, 15 bp, Homo sapiens
ggaaagatgcttatt

SEQ ID NO: 63548 - DNA, 15 bp, Homo sapiens
tggaaagatgcttat

SEQ ID NO: 63549 - DNA, 15 bp, Homo sapiens
atggaaagatgctta

SEQ ID NO: 63550 - DNA, 15 bp, Homo sapiens
aatggaaagatgctt

SEQ ID NO: 63551 - DNA, 15 bp, Homo sapiens
gaatggaaagatgct

SEQ ID NO: 63552 - DNA, 15 bp, Homo sapiens
tgaatggaaagatgc

SEQ ID NO: 63553 - DNA, 15 bp, Homo sapiens
atgaatggaaagatg

SEQ ID NO: 63554 - DNA, 15 bp, Homo sapiens
aatgaatggaaagat

SEQ ID NO: 63555 - DNA, 15 bp, Homo sapiens
aaatgaatggaaaga

SEQ ID NO: 63556 - DNA, 15 bp, Homo sapiens
gaaatgaatggaaag

SEQ ID NO: 63557 - DNA, 15 bp, Homo sapiens
agaaatgaatggaaa

SEQ ID NO: 63558 - DNA, 15 bp, Homo sapiens
tagaaatgaatggaa

SEQ ID NO: 63559 - DNA, 15 bp, Homo sapiens
gtagaaatgaatgga

SEQ ID NO: 63560 - DNA, 15 bp, Homo sapiens
agtagaaatgaatgg

SEQ ID NO: 63561 - DNA, 15 bp, Homo sapiens
cagtagaaatgaatg

SEQ ID NO: 63562 - DNA, 15 bp, Homo sapiens
acagtagaaatgaat

SEQ ID NO: 63563 - DNA, 15 bp, Homo sapiens
cacagtagaaatgaa

SEQ ID NO: 63564 - DNA, 15 bp, Homo sapiens
acacagtagaaatga

SEQ ID NO: 63565 - DNA, 15 bp, Homo sapiens
tacacagtagaaatg

SEQ ID NO: 63566 - DNA, 15 bp, Homo sapiens
atacacagtagaaat

SEQ ID NO: 63567 - DNA, 15 bp, Homo sapiens
gatacacagtagaaa

SEQ ID NO: 63568 - DNA, 15 bp, Homo sapiens
ggatacacagtagaa

SEQ ID NO: 63569 - DNA, 15 bp, Homo sapiens
gggatacacagtaga

SEQ ID NO: 63570 - DNA, 15 bp, Homo sapiens
tgggatacacagtag

SEQ ID NO: 63571 - DNA, 15 bp, Homo sapiens
gtgggatacacagta

SEQ ID NO: 63572 - DNA, 15 bp, Homo sapiens
tgtgggatacacagt

SEQ ID NO: 63573 - DNA, 15 bp, Homo sapiens
ctgtgggatacacag

SEQ ID NO: 63574 - DNA, 15 bp, Homo sapiens
gctgtgggatacaca

SEQ ID NO: 63575 - DNA, 15 bp, Homo sapiens
agctgtgggatacac

SEQ ID NO: 63576 - DNA, 15 bp, Homo sapiens
aagctgtgggataca

SEQ ID NO: 63577 - DNA, 15 bp, Homo sapiens
gaagctgtgggatac

SEQ ID NO: 63578 - DNA, 15 bp, Homo sapiens
tgaagctgtgggata

SEQ ID NO: 63579 - DNA, 15 bp, Homo sapiens
gtgaagctgtgggat

SEQ ID NO: 63580 - DNA, 15 bp, Homo sapiens
tgtgaagctgtggga

SEQ ID NO: 63581 - DNA, 15 bp, Homo sapiens
gtgtgaagctgtggg

SEQ ID NO: 63582 - DNA, 15 bp, Homo sapiens
tgtgtgaagctgtgg

SEQ ID NO: 63583 - DNA, 15 bp, Homo sapiens
gtgtgtgaagctgtg

SEQ ID NO: 63584 - DNA, 15 bp, Homo sapiens
tgtgtgtgaagctgt

SEQ ID NO: 63585 - DNA, 15 bp, Homo sapiens
gtgtgtgtgaagctg

SEQ ID NO: 63586 - DNA, 15 bp, Homo sapiens
tgtgtgtgtgaagct

SEQ ID NO: 63587 - DNA, 15 bp, Homo sapiens
atgtgtgtgtgaagc

SEQ ID NO: 63588 - DNA, 15 bp, Homo sapiens
catgtgtgtgtgaag

SEQ ID NO: 63589 - DNA, 15 bp, Homo sapiens
gcatgtgtgtgtgaa

SEQ ID NO: 63590 - DNA, 15 bp, Homo sapiens
tgcatgtgtgtgtga

SEQ ID NO: 63591 - DNA, 15 bp, Homo sapiens
gtgcatgtgtgtgtg

SEQ ID NO: 63592 - DNA, 15 bp, Homo sapiens
tgtgcatgtgtgtgt

SEQ ID NO: 63593 - DNA, 15 bp, Homo sapiens
atgtgcatgtgtgtg

SEQ ID NO: 63594 - DNA, 15 bp, Homo sapiens
aatgtgcatgtgtgt

SEQ ID NO: 63595 - DNA, 15 bp, Homo sapiens
aaatgtgcatgtgtg

SEQ ID NO: 63596 - DNA, 15 bp, Homo sapiens
gaaatgtgcatgtgt

SEQ ID NO: 63597 - DNA, 15 bp, Homo sapiens
tgaaatgtgcatgtg

SEQ ID NO: 63598 - DNA, 15 bp, Homo sapiens
ttgaaatgtgcatgt

SEQ ID NO: 63599 - DNA, 15 bp, Homo sapiens
gttgaaatgtgcatg

SEQ ID NO: 63600 - DNA, 15 bp, Homo sapiens
tgttgaaatgtgcat

SEQ ID NO: 63601 - DNA, 15 bp, Homo sapiens
atgttgaaatgtgca

SEQ ID NO: 63602 - DNA, 15 bp, Homo sapiens
aatgttgaaatgtgc

SEQ ID NO: 63603 - DNA, 15 bp, Homo sapiens
caatgttgaaatgtg

SEQ ID NO: 63604 - DNA, 15 bp, Homo sapiens
ccaatgttgaaatgt

SEQ ID NO: 63605 - DNA, 15 bp, Homo sapiens
accaatgttgaaatg

SEQ ID NO: 63606 - DNA, 15 bp, Homo sapiens
caccaatgttgaaat

SEQ ID NO: 63607 - DNA, 15 bp, Homo sapiens
tcaccaatgttgaaa

SEQ ID NO: 63608 - DNA, 15 bp, Homo sapiens
gtcaccaatgttgaa

SEQ ID NO: 63609 - DNA, 15 bp, Homo sapiens
agtcaccaatgttga

SEQ ID NO: 63610 - DNA, 15 bp, Homo sapiens
cagtcaccaatgttg

SEQ ID NO: 63611 - DNA, 15 bp, Homo sapiens
gcagtcaccaatgtt

SEQ ID NO: 63612 - DNA, 15 bp, Homo sapiens
agcagtcaccaatgt

SEQ ID NO: 63613 - DNA, 15 bp, Homo sapiens
aagcagtcaccaatg

SEQ ID NO: 63614 - DNA, 15 bp, Homo sapiens
gaagcagtcaccaat

SEQ ID NO: 63615 - DNA, 15 bp, Homo sapiens
tgaagcagtcaccaa

SEQ ID NO: 63616 - DNA, 15 bp, Homo sapiens
gtgaagcagtcacca

SEQ ID NO: 63617 - DNA, 15 bp, Homo sapiens
agtgaagcagtcacc

SEQ ID NO: 63618 - DNA, 15 bp, Homo sapiens
aagtgaagcagtcac

SEQ ID NO: 63619 - DNA, 15 bp, Homo sapiens
caagtgaagcagtca

SEQ ID NO: 63620 - DNA, 15 bp, Homo sapiens
gcaagtgaagcagtc

SEQ ID NO: 63621 - DNA, 15 bp, Homo sapiens
tgcaagtgaagcagt

SEQ ID NO: 63622 - DNA, 15 bp, Homo sapiens
gtgcaagtgaagcag

SEQ ID NO: 63623 - DNA, 15 bp, Homo sapiens
tgtgcaagtgaagca

SEQ ID NO: 63624 - DNA, 15 bp, Homo sapiens
gtgtgcaagtgaagc

SEQ ID NO: 63625 - DNA, 15 bp, Homo sapiens
ggtgtgcaagtgaag

SEQ ID NO: 63626 - DNA, 15 bp, Homo sapiens
aggtgtgcaagtgaa

SEQ ID NO: 63627 - DNA, 15 bp, Homo sapiens
taggtgtgcaagtga

SEQ ID NO: 63628 - DNA, 15 bp, Homo sapiens
ttaggtgtgcaagtg

SEQ ID NO: 63629 - DNA, 15 bp, Homo sapiens
cttaggtgtgcaagt

SEQ ID NO: 63630 - DNA, 15 bp, Homo sapiens
ccttaggtgtgcaag

SEQ ID NO: 63631 - DNA, 15 bp, Homo sapiens
accttaggtgtgcaa

SEQ ID NO: 63632 - DNA, 15 bp, Homo sapiens
taccttaggtgtgca

SEQ ID NO: 63633 - DNA, 15 bp, Homo sapiens
ttaccttaggtgtgc

SEQ ID NO: 63634 - DNA, 15 bp, Homo sapiens
attaccttaggtgtg

SEQ ID NO: 63635 - DNA, 15 bp, Homo sapiens
cattaccttaggtgt

SEQ ID NO: 63636 - DNA, 15 bp, Homo sapiens
tcattaccttaggtg

SEQ ID NO: 63637 - DNA, 15 bp, Homo sapiens
atcattaccttaggt

SEQ ID NO: 63638 - DNA, 15 bp, Homo sapiens
catcattaccttagg

SEQ ID NO: 63639 - DNA, 15 bp, Homo sapiens
ccatcattaccttag

SEQ ID NO: 63640 - DNA, 15 bp, Homo sapiens
tccatcattacctta

SEQ ID NO: 63641 - DNA, 15 bp, Homo sapiens
gtccatcattacctt

SEQ ID NO: 63642 - DNA, 15 bp, Homo sapiens
tgtccatcattacct

SEQ ID NO: 63643 - DNA, 15 bp, Homo sapiens
gtgtccatcattacc

SEQ ID NO: 63644 - DNA, 15 bp, Homo sapiens
tgtgtccatcattac

SEQ ID NO: 63645 - DNA, 15 bp, Homo sapiens
gtgtgtccatcatta

SEQ ID NO: 63646 - DNA, 15 bp, Homo sapiens
ggtgtgtccatcatt

SEQ ID NO: 63647 - DNA, 15 bp, Homo sapiens
aggtgtgtccatcat

SEQ ID NO: 63648 - DNA, 15 bp, Homo sapiens
caggtgtgtccatca

SEQ ID NO: 63649 - DNA, 15 bp, Homo sapiens
acaggtgtgtccatc

SEQ ID NO: 63650 - DNA, 15 bp, Homo sapiens
tacaggtgtgtccat

SEQ ID NO: 63651 - DNA, 15 bp, Homo sapiens
ctacaggtgtgtcca

SEQ ID NO: 63652 - DNA, 15 bp, Homo sapiens
gctacaggtgtgtcc

SEQ ID NO: 63653 - DNA, 15 bp, Homo sapiens
tgctacaggtgtgtc

SEQ ID NO: 63654 - DNA, 15 bp, Homo sapiens
ttgctacaggtgtgt

SEQ ID NO: 63655 - DNA, 15 bp, Homo sapiens
attgctacaggtgtg

SEQ ID NO: 63656 - DNA, 15 bp, Homo sapiens
cattgctacaggtgt

SEQ ID NO: 63657 - DNA, 15 bp, Homo sapiens
acattgctacaggtg

SEQ ID NO: 63658 - DNA, 15 bp, Homo sapiens
tacattgctacaggt

SEQ ID NO: 63659 - DNA, 15 bp, Homo sapiens
ctacattgctacagg

SEQ ID NO: 63660 - DNA, 15 bp, Homo sapiens
tctacattgctacag

SEQ ID NO: 63661 - DNA, 15 bp, Homo sapiens
atctacattgctaca

SEQ ID NO: 63662 - DNA, 15 bp, Homo sapiens
aatctacattgctac

SEQ ID NO: 63663 - DNA, 15 bp, Homo sapiens
gaatctacattgcta

SEQ ID NO: 63664 - DNA, 15 bp, Homo sapiens
agaatctacattgct

SEQ ID NO: 63665 - DNA, 15 bp, Homo sapiens
aagaatctacattgc

SEQ ID NO: 63666 - DNA, 15 bp, Homo sapiens
gaagaatctacattg

SEQ ID NO: 63667 - DNA, 15 bp, Homo sapiens
ggaagaatctacatt

SEQ ID NO: 63668 - DNA, 15 bp, Homo sapiens
aggaagaatctacat

SEQ ID NO: 63669 - DNA, 15 bp, Homo sapiens
taggaagaatctaca

SEQ ID NO: 63670 - DNA, 15 bp, Homo sapiens
ttaggaagaatctac

SEQ ID NO: 63671 - DNA, 15 bp, Homo sapiens
cttaggaagaatcta

SEQ ID NO: 63672 - DNA, 15 bp, Homo sapiens
gcttaggaagaatct

SEQ ID NO: 63673 - DNA, 15 bp, Homo sapiens
agcttaggaagaatc

SEQ ID NO: 63674 - DNA, 15 bp, Homo sapiens
tagcttaggaagaat

SEQ ID NO: 63675 - DNA, 15 bp, Homo sapiens
ttagcttaggaagaa

SEQ ID NO: 63676 - DNA, 15 bp, Homo sapiens
attagcttaggaaga

SEQ ID NO: 63677 - DNA, 15 bp, Homo sapiens
tattagcttaggaag

SEQ ID NO: 63678 - DNA, 15 bp, Homo sapiens
ttattagcttaggaa

SEQ ID NO: 63679 - DNA, 15 bp, Homo sapiens
attattagcttagga

SEQ ID NO: 63680 - DNA, 15 bp, Homo sapiens
aattattagcttagg

SEQ ID NO: 63681 - DNA, 15 bp, Homo sapiens
taattattagcttag

SEQ ID NO: 63682 - DNA, 15 bp, Homo sapiens
ctaattattagctta

SEQ ID NO: 63683 - DNA, 15 bp, Homo sapiens
actaattattagctt

SEQ ID NO: 63684 - DNA, 15 bp, Homo sapiens
aactaattattagct

SEQ ID NO: 63685 - DNA, 15 bp, Homo sapiens
aaactaattattagc

SEQ ID NO: 63686 - DNA, 15 bp, Homo sapiens
gaaactaattattag

SEQ ID NO: 63687 - DNA, 15 bp, Homo sapiens
tgaaactaattatta

SEQ ID NO: 63688 - DNA, 15 bp, Homo sapiens
ctgaaactaattatt

SEQ ID NO: 63689 - DNA, 15 bp, Homo sapiens
cctgaaactaattat

SEQ ID NO: 63690 - DNA, 15 bp, Homo sapiens
tcctgaaactaatta

SEQ ID NO: 63691 - DNA, 15 bp, Homo sapiens
ctcctgaaactaatt

SEQ ID NO: 63692 - DNA, 15 bp, Homo sapiens
cctcctgaaactaat

SEQ ID NO: 63693 - DNA, 15 bp, Homo sapiens
acctcctgaaactaa

SEQ ID NO: 63694 - DNA, 15 bp, Homo sapiens
tacctcctgaaacta

SEQ ID NO: 63695 - DNA, 15 bp, Homo sapiens
ctacctcctgaaact

SEQ ID NO: 63696 - DNA, 15 bp, Homo sapiens
gctacctcctgaaac

SEQ ID NO: 63697 - DNA, 15 bp, Homo sapiens
tgctacctcctgaaa

SEQ ID NO: 63698 - DNA, 15 bp, Homo sapiens
gtgctacctcctgaa

SEQ ID NO: 63699 - DNA, 15 bp, Homo sapiens
tgtgctacctcctga

SEQ ID NO: 63700 - DNA, 15 bp, Homo sapiens
atgtgctacctcctg

SEQ ID NO: 63701 - DNA, 15 bp, Homo sapiens
tatgtgctacctcct

SEQ ID NO: 63702 - DNA, 15 bp, Homo sapiens
gtatgtgctacctcc

SEQ ID NO: 63703 - DNA, 15 bp, Homo sapiens
tgtatgtgctacctc

SEQ ID NO: 63704 - DNA, 15 bp, Homo sapiens
atgtatgtgctacct

SEQ ID NO: 63705 - DNA, 15 bp, Homo sapiens
aatgtatgtgctacc

SEQ ID NO: 63706 - DNA, 15 bp, Homo sapiens
aaatgtatgtgctac

SEQ ID NO: 63707 - DNA, 15 bp, Homo sapiens
taaatgtatgtgcta

SEQ ID NO: 63708 - DNA, 15 bp, Homo sapiens
ttaaatgtatgtgct

SEQ ID NO: 63709 - DNA, 15 bp, Homo sapiens
tttaaatgtatgtgc

SEQ ID NO: 63710 - DNA, 15 bp, Homo sapiens
ttttaaatgtatgtg

SEQ ID NO: 63711 - DNA, 15 bp, Homo sapiens
tttttaaatgtatgt

SEQ ID NO: 63712 - DNA, 15 bp, Homo sapiens
atttttaaatgtatg

SEQ ID NO: 63713 - DNA, 15 bp, Homo sapiens
tatttttaaatgtat

SEQ ID NO: 63714 - DNA, 15 bp, Homo sapiens
ctatttttaaatgta

SEQ ID NO: 63715 - DNA, 15 bp, Homo sapiens
cctatttttaaatgt

SEQ ID NO: 63716 - DNA, 15 bp, Homo sapiens
acctatttttaaatg

SEQ ID NO: 63717 - DNA, 15 bp, Homo sapiens
aacctatttttaaat

SEQ ID NO: 63718 - DNA, 15 bp, Homo sapiens
taacctatttttaaa

SEQ ID NO: 63719 - DNA, 15 bp, Homo sapiens
ttaacctatttttaa

SEQ ID NO: 63720 - DNA, 15 bp, Homo sapiens
tttaacctattttta

SEQ ID NO: 63721 - DNA, 15 bp, Homo sapiens
ttttaacctattttt

SEQ ID NO: 63722 - DNA, 15 bp, Homo sapiens
attttaacctatttt

SEQ ID NO: 63723 - DNA, 15 bp, Homo sapiens
tattttaacctattt

SEQ ID NO: 63724 - DNA, 15 bp, Homo sapiens
ttattttaacctatt

SEQ ID NO: 63725 - DNA, 15 bp, Homo sapiens
tttattttaacctat

SEQ ID NO: 63726 - DNA, 15 bp, Homo sapiens
ctttattttaaccta

SEQ ID NO: 63727 - DNA, 15 bp, Homo sapiens
actttattttaacct

SEQ ID NO: 63728 - DNA, 15 bp, Homo sapiens
cactttattttaacc

SEQ ID NO: 63729 - DNA, 15 bp, Homo sapiens
acactttattttaac

SEQ ID NO: 63730 - DNA, 15 bp, Homo sapiens
aacactttattttaa

SEQ ID NO: 63731 - DNA, 15 bp, Homo sapiens
taacactttatttta

SEQ ID NO: 63732 - DNA, 15 bp, Homo sapiens
ataacactttatttt

SEQ ID NO: 63733 - DNA, 15 bp, Homo sapiens
aataacactttattt

SEQ ID NO: 63734 - DNA, 15 bp, Homo sapiens
aaataacactttatt

SEQ ID NO: 63735 - DNA, 15 bp, Homo sapiens
aaaataacactttat

SEQ ID NO: 63736 - DNA, 15 bp, Homo sapiens
taaaataacacttta

SEQ ID NO: 63737 - DNA, 15 bp, Homo sapiens
ttaaaataacacttt

SEQ ID NO: 63738 - DNA, 15 bp, Homo sapiens
attaaaataacactt

SEQ ID NO: 63739 - DNA, 15 bp, Homo sapiens
aattaaaataacact

SEQ ID NO: 63740 - DNA, 15 bp, Homo sapiens
caattaaaataacac

SEQ ID NO: 63741 - DNA, 15 bp, Homo sapiens
ccaattaaaataaca

SEQ ID NO: 63742 - DNA, 15 bp, Homo sapiens
accaattaaaataac

SEQ ID NO: 63743 - DNA, 15 bp, Homo sapiens
taccaattaaaataa

SEQ ID NO: 63744 - DNA, 15 bp, Homo sapiens
ctaccaattaaaata

SEQ ID NO: 63745 - DNA, 15 bp, Homo sapiens
cctaccaattaaaat

SEQ ID NO: 63746 - DNA, 15 bp, Homo sapiens
acctaccaattaaaa

SEQ ID NO: 63747 - DNA, 15 bp, Homo sapiens
cacctaccaattaaa

SEQ ID NO: 63748 - DNA, 15 bp, Homo sapiens
ccacctaccaattaa

SEQ ID NO: 63749 - DNA, 15 bp, Homo sapiens
tccacctaccaatta

SEQ ID NO: 63750 - DNA, 15 bp, Homo sapiens
atccacctaccaatt

SEQ ID NO: 63751 - DNA, 15 bp, Homo sapiens
gatccacctaccaat

SEQ ID NO: 63752 - DNA, 15 bp, Homo sapiens
agatccacctaccaa

SEQ ID NO: 63753 - DNA, 15 bp, Homo sapiens
cagatccacctacca

SEQ ID NO: 63754 - DNA, 15 bp, Homo sapiens
acagatccacctacc

SEQ ID NO: 63755 - DNA, 15 bp, Homo sapiens
aacagatccacctac

SEQ ID NO: 63756 - DNA, 15 bp, Homo sapiens
caacagatccaccta

SEQ ID NO: 63757 - DNA, 15 bp, Homo sapiens
ccaacagatccacct

SEQ ID NO: 63758 - DNA, 15 bp, Homo sapiens
gccaacagatccacc

SEQ ID NO: 63759 - DNA, 15 bp, Homo sapiens
tgccaacagatccac

SEQ ID NO: 63760 - DNA, 15 bp, Homo sapiens
gtgccaacagatcca

SEQ ID NO: 63761 - DNA, 15 bp, Homo sapiens
ggtgccaacagatcc

SEQ ID NO: 63762 - DNA, 15 bp, Homo sapiens
tggtgccaacagatc

SEQ ID NO: 63763 - DNA, 15 bp, Homo sapiens
ttggtgccaacagat

SEQ ID NO: 63764 - DNA, 15 bp, Homo sapiens
attggtgccaacaga

SEQ ID NO: 63765 - DNA, 15 bp, Homo sapiens
cattggtgccaacag

SEQ ID NO: 63766 - DNA, 15 bp, Homo sapiens
tcattggtgccaaca

SEQ ID NO: 63767 - DNA, 15 bp, Homo sapiens
atcattggtgccaac

SEQ ID NO: 63768 - DNA, 15 bp, Homo sapiens
aatcattggtgccaa

SEQ ID NO: 63769 - DNA, 15 bp, Homo sapiens
taatcattggtgcca

SEQ ID NO: 63770 - DNA, 15 bp, Homo sapiens
ataatcattggtgcc

SEQ ID NO: 63771 - DNA, 15 bp, Homo sapiens
aataatcattggtgc

SEQ ID NO: 63772 - DNA, 15 bp, Homo sapiens
gaataatcattggtg

SEQ ID NO: 63773 - DNA, 15 bp, Homo sapiens
tgaataatcattggt

SEQ ID NO: 63774 - DNA, 15 bp, Homo sapiens
gtgaataatcattgg

SEQ ID NO: 63775 - DNA, 15 bp, Homo sapiens
cgtgaataatcattg

SEQ ID NO: 63776 - DNA, 15 bp, Homo sapiens
ccgtgaataatcatt

SEQ ID NO: 63777 - DNA, 15 bp, Homo sapiens
gccgtgaataatcat

SEQ ID NO: 63778 - DNA, 15 bp, Homo sapiens
tgccgtgaataatca

SEQ ID NO: 63779 - DNA, 15 bp, Homo sapiens
atgccgtgaataatc

SEQ ID NO: 63780 - DNA, 15 bp, Homo sapiens
gatgccgtgaataat

SEQ ID NO: 63781 - DNA, 15 bp, Homo sapiens
tgatgccgtgaataa

SEQ ID NO: 63782 - DNA, 15 bp, Homo sapiens
ttgatgccgtgaata

SEQ ID NO: 63783 - DNA, 15 bp, Homo sapiens
cttgatgccgtgaat

SEQ ID NO: 63784 - DNA, 15 bp, Homo sapiens
tcttgatgccgtgaa

SEQ ID NO: 63785 - DNA, 15 bp, Homo sapiens
gtcttgatgccgtga

SEQ ID NO: 63786 - DNA, 15 bp, Homo sapiens
ggtcttgatgccgtg

SEQ ID NO: 63787 - DNA, 15 bp, Homo sapiens
gggtcttgatgccgt

SEQ ID NO: 63788 - DNA, 15 bp, Homo sapiens
tgggtcttgatgccg

SEQ ID NO: 63789 - DNA, 15 bp, Homo sapiens
ctgggtcttgatgcc

SEQ ID NO: 63790 - DNA, 15 bp, Homo sapiens
cctgggtcttgatgc

SEQ ID NO: 63791 - DNA, 15 bp, Homo sapiens
ccctgggtcttgatg

SEQ ID NO: 63792 - DNA, 15 bp, Homo sapiens
accctgggtcttgat

SEQ ID NO: 63793 - DNA, 15 bp, Homo sapiens
caccctgggtcttga

SEQ ID NO: 63794 - DNA, 15 bp, Homo sapiens
gcaccctgggtcttg

SEQ ID NO: 63795 - DNA, 15 bp, Homo sapiens
ggcaccctgggtctt

SEQ ID NO: 63796 - DNA, 15 bp, Homo sapiens
gggcaccctgggtct

SEQ ID NO: 63797 - DNA, 15 bp, Homo sapiens
cgggcaccctgggtc

SEQ ID NO: 63798 - DNA, 15 bp, Homo sapiens
acgggcaccctgggt

SEQ ID NO: 63799 - DNA, 15 bp, Homo sapiens
gacgggcaccctggg

SEQ ID NO: 63800 - DNA, 15 bp, Homo sapiens
tgacgggcaccctgg

SEQ ID NO: 63801 - DNA, 15 bp, Homo sapiens
ctgacgggcaccctg

SEQ ID NO: 63802 - DNA, 15 bp, Homo sapiens
tctgacgggcaccct

SEQ ID NO: 63803 - DNA, 15 bp, Homo sapiens
ttctgacgggcaccc

SEQ ID NO: 63804 - DNA, 15 bp, Homo sapiens
cttctgacgggcacc

SEQ ID NO: 63805 - DNA, 15 bp, Homo sapiens
acttctgacgggcac

SEQ ID NO: 63806 - DNA, 15 bp, Homo sapiens
aacttctgacgggca

SEQ ID NO: 63807 - DNA, 15 bp, Homo sapiens
gaacttctgacgggc

SEQ ID NO: 63808 - DNA, 15 bp, Homo sapiens
agaacttctgacggg

SEQ ID NO: 63809 - DNA, 15 bp, Homo sapiens
gagaacttctgacgg

SEQ ID NO: 63810 - DNA, 15 bp, Homo sapiens
ggagaacttctgacg

SEQ ID NO: 63811 - DNA, 15 bp, Homo sapiens
tggagaacttctgac

SEQ ID NO: 63812 - DNA, 15 bp, Homo sapiens
ctggagaacttctga

SEQ ID NO: 63813 - DNA, 15 bp, Homo sapiens
gctggagaacttctg

SEQ ID NO: 63814 - DNA, 15 bp, Homo sapiens
ggctggagaacttct

SEQ ID NO: 63815 - DNA, 15 bp, Homo sapiens
aggctggagaacttc

SEQ ID NO: 63816 - DNA, 15 bp, Homo sapiens
gaggctggagaactt

SEQ ID NO: 63817 - DNA, 15 bp, Homo sapiens
agaggctggagaact

SEQ ID NO: 63818 - DNA, 15 bp, Homo sapiens
tagaggctggagaac

SEQ ID NO: 63819 - DNA, 15 bp, Homo sapiens
gtagaggctggagaa

SEQ ID NO: 63820 - DNA, 15 bp, Homo sapiens
tgtagaggctggaga

SEQ ID NO: 63821 - DNA, 15 bp, Homo sapiens
atgtagaggctggag

SEQ ID NO: 63822 - DNA, 15 bp, Homo sapiens
gatgtagaggctgga

SEQ ID NO: 63823 - DNA, 15 bp, Homo sapiens
agatgtagaggctgg

SEQ ID NO: 63824 - DNA, 15 bp, Homo sapiens
gagatgtagaggctg

SEQ ID NO: 63825 - DNA, 15 bp, Homo sapiens
agagatgtagaggct

SEQ ID NO: 63826 - DNA, 15 bp, Homo sapiens
gagagatgtagaggc

SEQ ID NO: 63827 - DNA, 15 bp, Homo sapiens
tgagagatgtagagg

SEQ ID NO: 63828 - DNA, 15 bp, Homo sapiens
ctgagagatgtagag

SEQ ID NO: 63829 - DNA, 15 bp, Homo sapiens
actgagagatgtaga

SEQ ID NO: 63830 - DNA, 15 bp, Homo sapiens
aactgagagatgtag

SEQ ID NO: 63831 - DNA, 15 bp, Homo sapiens
aaactgagagatgta

SEQ ID NO: 63832 - DNA, 15 bp, Homo sapiens
taaactgagagatgt

SEQ ID NO: 63833 - DNA, 15 bp, Homo sapiens
ataaactgagagatg

SEQ ID NO: 63834 - DNA, 15 bp, Homo sapiens
gataaactgagagat

SEQ ID NO: 63835 - DNA, 15 bp, Homo sapiens
tgataaactgagaga

SEQ ID NO: 63836 - DNA, 15 bp, Homo sapiens
atgataaactgagag

SEQ ID NO: 63837 - DNA, 15 bp, Homo sapiens
gatgataaactgaga

SEQ ID NO: 63838 - DNA, 15 bp, Homo sapiens
tgatgataaactgag

SEQ ID NO: 63839 - DNA, 15 bp, Homo sapiens
atgatgataaactga

SEQ ID NO: 63840 - DNA, 15 bp, Homo sapiens
catgatgataaactg

SEQ ID NO: 63841 - DNA, 15 bp, Homo sapiens
acatgatgataaact

SEQ ID NO: 63842 - DNA, 15 bp, Homo sapiens
tacatgatgataaac

SEQ ID NO: 63843 - DNA, 15 bp, Homo sapiens
atacatgatgataaa

SEQ ID NO: 63844 - DNA, 15 bp, Homo sapiens
tatacatgatgataa

SEQ ID NO: 63845 - DNA, 15 bp, Homo sapiens
ctatacatgatgata

SEQ ID NO: 63846 - DNA, 15 bp, Homo sapiens
actatacatgatgat

SEQ ID NO: 63847 - DNA, 15 bp, Homo sapiens
gactatacatgatga

SEQ ID NO: 63848 - DNA, 15 bp, Homo sapiens
agactatacatgatg

SEQ ID NO: 63849 - DNA, 15 bp, Homo sapiens
aagactatacatgat

SEQ ID NO: 63850 - DNA, 15 bp, Homo sapiens
caagactatacatga

SEQ ID NO: 63851 - DNA, 15 bp, Homo sapiens
tcaagactatacatg

SEQ ID NO: 63852 - DNA, 15 bp, Homo sapiens
atcaagactatacat

SEQ ID NO: 63853 - DNA, 15 bp, Homo sapiens
catcaagactataca

SEQ ID NO: 63854 - DNA, 15 bp, Homo sapiens
ccatcaagactatac

SEQ ID NO: 63855 - DNA, 15 bp, Homo sapiens
cccatcaagactata

SEQ ID NO: 63856 - DNA, 15 bp, Homo sapiens
tcccatcaagactat

SEQ ID NO: 63857 - DNA, 15 bp, Homo sapiens
ttcccatcaagacta

SEQ ID NO: 63858 - DNA, 15 bp, Homo sapiens
cttcccatcaagact

SEQ ID NO: 63859 - DNA, 15 bp, Homo sapiens
tcttcccatcaagac

SEQ ID NO: 63860 - DNA, 15 bp, Homo sapiens
ttcttcccatcaaga

SEQ ID NO: 63861 - DNA, 15 bp, Homo sapiens
cttcttcccatcaag

SEQ ID NO: 63862 - DNA, 15 bp, Homo sapiens
acttcttcccatcaa

SEQ ID NO: 63863 - DNA, 15 bp, Homo sapiens
cacttcttcccatca

SEQ ID NO: 63864 - DNA, 15 bp, Homo sapiens
ccacttcttcccatc

SEQ ID NO: 63865 - DNA, 15 bp, Homo sapiens
gccacttcttcccat

SEQ ID NO: 63866 - DNA, 15 bp, Homo sapiens
tgccacttcttccca

SEQ ID NO: 63867 - DNA, 15 bp, Homo sapiens
ctgccacttcttccc

SEQ ID NO: 63868 - DNA, 15 bp, Homo sapiens
tctgccacttcttcc

SEQ ID NO: 63869 - DNA, 15 bp, Homo sapiens
gtctgccacttcttc

SEQ ID NO: 63870 - DNA, 15 bp, Homo sapiens
agtctgccacttctt

SEQ ID NO: 63871 - DNA, 15 bp, Homo sapiens
aagtctgccacttct

SEQ ID NO: 63872 - DNA, 15 bp, Homo sapiens
taagtctgccacttc

SEQ ID NO: 63873 - DNA, 15 bp, Homo sapiens
ataagtctgccactt

SEQ ID NO: 63874 - DNA, 15 bp, Homo sapiens
gataagtctgccact

SEQ ID NO: 63875 - DNA, 15 bp, Homo sapiens
cgataagtctgccac

SEQ ID NO: 63876 - DNA, 15 bp, Homo sapiens
tcgataagtctgcca

SEQ ID NO: 63877 - DNA, 15 bp, Homo sapiens
ctcgataagtctgcc

SEQ ID NO: 63878 - DNA, 15 bp, Homo sapiens
cctcgataagtctgc

SEQ ID NO: 63879 - DNA, 15 bp, Homo sapiens
tcctcgataagtctg

SEQ ID NO: 63880 - DNA, 15 bp, Homo sapiens
ttcctcgataagtct

SEQ ID NO: 63881 - DNA, 15 bp, Homo sapiens
tttcctcgataagtc

SEQ ID NO: 63882 - DNA, 15 bp, Homo sapiens
atttcctcgataagt

SEQ ID NO: 63883 - DNA, 15 bp, Homo sapiens
aatttcctcgataag

SEQ ID NO: 63884 - DNA, 15 bp, Homo sapiens
gaatttcctcgataa

SEQ ID NO: 63885 - DNA, 15 bp, Homo sapiens
ggaatttcctcgata

SEQ ID NO: 63886 - DNA, 15 bp, Homo sapiens
tggaatttcctcgat

SEQ ID NO: 63887 - DNA, 15 bp, Homo sapiens
gtggaatttcctcga

SEQ ID NO: 63888 - DNA, 15 bp, Homo sapiens
agtggaatttcctcg

SEQ ID NO: 63889 - DNA, 15 bp, Homo sapiens
cagtggaatttcctc

SEQ ID NO: 63890 - DNA, 15 bp, Homo sapiens
ccagtggaatttcct

SEQ ID NO: 63891 - DNA, 15 bp, Homo sapiens
tccagtggaatttcc

SEQ ID NO: 63892 - DNA, 15 bp, Homo sapiens
ttccagtggaatttc

SEQ ID NO: 63893 - DNA, 15 bp, Homo sapiens
gttccagtggaattt

SEQ ID NO: 63894 - DNA, 15 bp, Homo sapiens
ggttccagtggaatt

SEQ ID NO: 63895 - DNA, 15 bp, Homo sapiens
aggttccagtggaat

SEQ ID NO: 63896 - DNA, 15 bp, Homo sapiens
aaggttccagtggaa

SEQ ID NO: 63897 - DNA, 15 bp, Homo sapiens
taaggttccagtgga

SEQ ID NO: 63898 - DNA, 15 bp, Homo sapiens
ttaaggttccagtgg

SEQ ID NO: 63899 - DNA, 15 bp, Homo sapiens
attaaggttccagtg

SEQ ID NO: 63900 - DNA, 15 bp, Homo sapiens
cattaaggttccagt

SEQ ID NO: 63901 - DNA, 15 bp, Homo sapiens
ccattaaggttccag

SEQ ID NO: 63902 - DNA, 15 bp, Homo sapiens
accattaaggttcca

SEQ ID NO: 63903 - DNA, 15 bp, Homo sapiens
taccattaaggttcc

SEQ ID NO: 63904 - DNA, 15 bp, Homo sapiens
ataccattaaggttc

SEQ ID NO: 63905 - DNA, 15 bp, Homo sapiens
cataccattaaggtt

SEQ ID NO: 63906 - DNA, 15 bp, Homo sapiens
acataccattaaggt

SEQ ID NO: 63907 - DNA, 15 bp, Homo sapiens
tacataccattaagg

SEQ ID NO: 63908 - DNA, 15 bp, Homo sapiens
ttacataccattaag

SEQ ID NO: 63909 - DNA, 15 bp, Homo sapiens
attacataccattaa

SEQ ID NO: 63910 - DNA, 15 bp, Homo sapiens
aattacataccatta

SEQ ID NO: 63911 - DNA, 15 bp, Homo sapiens
taattacataccatt

SEQ ID NO: 63912 - DNA, 15 bp, Homo sapiens
ctaattacataccat

SEQ ID NO: 63913 - DNA, 15 bp, Homo sapiens
actaattacatacca

SEQ ID NO: 63914 - DNA, 15 bp, Homo sapiens
gactaattacatacc

SEQ ID NO: 63915 - DNA, 15 bp, Homo sapiens
tgactaattacatac

SEQ ID NO: 63916 - DNA, 15 bp, Homo sapiens
atgactaattacata

SEQ ID NO: 63917 - DNA, 15 bp, Homo sapiens
aatgactaattacat

SEQ ID NO: 63918 - DNA, 15 bp, Homo sapiens
aaatgactaattaca

SEQ ID NO: 63919 - DNA, 15 bp, Homo sapiens
taaatgactaattac

SEQ ID NO: 63920 - DNA, 15 bp, Homo sapiens
ttaaatgactaatta

SEQ ID NO: 63921 - DNA, 15 bp, Homo sapiens
tttaaatgactaatt

SEQ ID NO: 63922 - DNA, 15 bp, Homo sapiens
ctttaaatgactaat

SEQ ID NO: 63923 - DNA, 15 bp, Homo sapiens
cctttaaatgactaa

SEQ ID NO: 63924 - DNA, 15 bp, Homo sapiens
ccctttaaatgacta

SEQ ID NO: 63925 - DNA, 15 bp, Homo sapiens
tccctttaaatgact

SEQ ID NO: 63926 - DNA, 15 bp, Homo sapiens
ttccctttaaatgac

SEQ ID NO: 63927 - DNA, 15 bp, Homo sapiens
attccctttaaatga

SEQ ID NO: 63928 - DNA, 15 bp, Homo sapiens
cattccctttaaatg

SEQ ID NO: 63929 - DNA, 15 bp, Homo sapiens
gcattccctttaaat

SEQ ID NO: 63930 - DNA, 15 bp, Homo sapiens
ggcattccctttaaa

SEQ ID NO: 63931 - DNA, 15 bp, Homo sapiens
aggcattccctttaa

SEQ ID NO: 63932 - DNA, 15 bp, Homo sapiens
caggcattcccttta

SEQ ID NO: 63933 - DNA, 15 bp, Homo sapiens
tcaggcattcccttt

SEQ ID NO: 63934 - DNA, 15 bp, Homo sapiens
ttcaggcattccctt

SEQ ID NO: 63935 - DNA, 15 bp, Homo sapiens
attcaggcattccct

SEQ ID NO: 63936 - DNA, 15 bp, Homo sapiens
tattcaggcattccc

SEQ ID NO: 63937 - DNA, 15 bp, Homo sapiens
gtattcaggcattcc

SEQ ID NO: 63938 - DNA, 15 bp, Homo sapiens
agtattcaggcattc

SEQ ID NO: 63939 - DNA, 15 bp, Homo sapiens
aagtattcaggcatt

SEQ ID NO: 63940 - DNA, 15 bp, Homo sapiens
aaagtattcaggcat

SEQ ID NO: 63941 - DNA, 15 bp, Homo sapiens
taaagtattcaggca

SEQ ID NO: 63942 - DNA, 15 bp, Homo sapiens
ttaaagtattcaggc

SEQ ID NO: 63943 - DNA, 15 bp, Homo sapiens
tttaaagtattcagg

SEQ ID NO: 63944 - DNA, 15 bp, Homo sapiens
ctttaaagtattcag

SEQ ID NO: 63945 - DNA, 15 bp, Homo sapiens
tctttaaagtattca

SEQ ID NO: 63946 - DNA, 15 bp, Homo sapiens
ttctttaaagtattc

SEQ ID NO: 63947 - DNA, 15 bp, Homo sapiens
attctttaaagtatt

SEQ ID NO: 63948 - DNA, 15 bp, Homo sapiens
aattctttaaagtat

SEQ ID NO: 63949 - DNA, 15 bp, Homo sapiens
aaattctttaaagta

SEQ ID NO: 63950 - DNA, 15 bp, Homo sapiens
aaaattctttaaagt

SEQ ID NO: 63951 - DNA, 15 bp, Homo sapiens
caaaattctttaaag

SEQ ID NO: 63952 - DNA, 15 bp, Homo sapiens
ccaaaattctttaaa

SEQ ID NO: 63953 - DNA, 15 bp, Homo sapiens
gccaaaattctttaa

SEQ ID NO: 63954 - DNA, 15 bp, Homo sapiens
tgccaaaattcttta

SEQ ID NO: 63955 - DNA, 15 bp, Homo sapiens
ctgccaaaattcttt

SEQ ID NO: 63956 - DNA, 15 bp, Homo sapiens
tctgccaaaattctt

SEQ ID NO: 63957 - DNA, 15 bp, Homo sapiens
atctgccaaaattct

SEQ ID NO: 63958 - DNA, 15 bp, Homo sapiens
aatctgccaaaattc

SEQ ID NO: 63959 - DNA, 15 bp, Homo sapiens
aaatctgccaaaatt

SEQ ID NO: 63960 - DNA, 15 bp, Homo sapiens
gaaatctgccaaaat

SEQ ID NO: 63961 - DNA, 15 bp, Homo sapiens
tgaaatctgccaaaa

SEQ ID NO: 63962 - DNA, 15 bp, Homo sapiens
ctgaaatctgccaaa

SEQ ID NO: 63963 - DNA, 15 bp, Homo sapiens
tctgaaatctgccaa

SEQ ID NO: 63964 - DNA, 15 bp, Homo sapiens
atctgaaatctgcca

SEQ ID NO: 63965 - DNA, 15 bp, Homo sapiens
tatctgaaatctgcc

SEQ ID NO: 63966 - DNA, 15 bp, Homo sapiens
atatctgaaatctgc

SEQ ID NO: 63967 - DNA, 15 bp, Homo sapiens
aatatctgaaatctg

SEQ ID NO: 63968 - DNA, 15 bp, Homo sapiens
caatatctgaaatct

SEQ ID NO: 63969 - DNA, 15 bp, Homo sapiens
ccaatatctgaaatc

SEQ ID NO: 63970 - DNA, 15 bp, Homo sapiens
tccaatatctgaaat

SEQ ID NO: 63971 - DNA, 15 bp, Homo sapiens
gtccaatatctgaaa

SEQ ID NO: 63972 - DNA, 15 bp, Homo sapiens
tgtccaatatctgaa

SEQ ID NO: 63973 - DNA, 15 bp, Homo sapiens
ttgtccaatatctga

SEQ ID NO: 63974 - DNA, 15 bp, Homo sapiens
tttgtccaatatctg

SEQ ID NO: 63975 - DNA, 15 bp, Homo sapiens
gtttgtccaatatct

SEQ ID NO: 63976 - DNA, 15 bp, Homo sapiens
tgtttgtccaatatc

SEQ ID NO: 63977 - DNA, 15 bp, Homo sapiens
gtgtttgtccaatat

SEQ ID NO: 63978 - DNA, 15 bp, Homo sapiens
agtgtttgtccaata

SEQ ID NO: 63979 - DNA, 15 bp, Homo sapiens
gagtgtttgtccaat

SEQ ID NO: 63980 - DNA, 15 bp, Homo sapiens
agagtgtttgtccaa

SEQ ID NO: 63981 - DNA, 15 bp, Homo sapiens
aagagtgtttgtcca

SEQ ID NO: 63982 - DNA, 15 bp, Homo sapiens
taagagtgtttgtcc

SEQ ID NO: 63983 - DNA, 15 bp, Homo sapiens
ctaagagtgtttgtc

SEQ ID NO: 63984 - DNA, 15 bp, Homo sapiens
gctaagagtgtttgt

SEQ ID NO: 63985 - DNA, 15 bp, Homo sapiens
agctaagagtgtttg

SEQ ID NO: 63986 - DNA, 15 bp, Homo sapiens
aagctaagagtgttt

SEQ ID NO: 63987 - DNA, 15 bp, Homo sapiens
gaagctaagagtgtt

SEQ ID NO: 63988 - DNA, 15 bp, Homo sapiens
ggaagctaagagtgt

SEQ ID NO: 63989 - DNA, 15 bp, Homo sapiens
tggaagctaagagtg

SEQ ID NO: 63990 - DNA, 15 bp, Homo sapiens
gtggaagctaagagt

SEQ ID NO: 63991 - DNA, 15 bp, Homo sapiens
tgtggaagctaagag

SEQ ID NO: 63992 - DNA, 15 bp, Homo sapiens
ttgtggaagctaaga

SEQ ID NO: 63993 - DNA, 15 bp, Homo sapiens
tttgtggaagctaag

SEQ ID NO: 63994 - DNA, 15 bp, Homo sapiens
gtttgtggaagctaa

SEQ ID NO: 63995 - DNA, 15 bp, Homo sapiens
agtttgtggaagcta

SEQ ID NO: 63996 - DNA, 15 bp, Homo sapiens
aagtttgtggaagct

SEQ ID NO: 63997 - DNA, 15 bp, Homo sapiens
taagtttgtggaagc

SEQ ID NO: 63998 - DNA, 15 bp, Homo sapiens
ttaagtttgtggaag

SEQ ID NO: 63999 - DNA, 15 bp, Homo sapiens
attaagtttgtggaa

SEQ ID NO: 64000 - DNA, 15 bp, Homo sapiens
aattaagtttgtgga

SEQ ID NO: 64001 - DNA, 15 bp, Homo sapiens
gaattaagtttgtgg

SEQ ID NO: 64002 - DNA, 15 bp, Homo sapiens
ggaattaagtttgtg

SEQ ID NO: 64003 - DNA, 15 bp, Homo sapiens
tggaattaagtttgt

SEQ ID NO: 64004 - DNA, 15 bp, Homo sapiens
ttggaattaagtttg

SEQ ID NO: 64005 - DNA, 15 bp, Homo sapiens
tttggaattaagttt

SEQ ID NO: 64006 - DNA, 15 bp, Homo sapiens
ttttggaattaagtt

SEQ ID NO: 64007 - DNA, 15 bp, Homo sapiens
tttttggaattaagt

SEQ ID NO: 64008 - DNA, 15 bp, Homo sapiens
ttttttggaattaag

SEQ ID NO: 64009 - DNA, 15 bp, Homo sapiens
attttttggaattaa

SEQ ID NO: 64010 - DNA, 15 bp, Homo sapiens
tattttttggaatta

SEQ ID NO: 64011 - DNA, 15 bp, Homo sapiens
ttattttttggaatt

SEQ ID NO: 64012 - DNA, 15 bp, Homo sapiens
attattttttggaat

SEQ ID NO: 64013 - DNA, 15 bp, Homo sapiens
aattattttttggaa

SEQ ID NO: 64014 - DNA, 15 bp, Homo sapiens
aaattattttttgga

SEQ ID NO: 64015 - DNA, 15 bp, Homo sapiens
aaaattattttttgg

SEQ ID NO: 64016 - DNA, 15 bp, Homo sapiens
aaaaattattttttg

SEQ ID NO: 64017 - DNA, 15 bp, Homo sapiens
gaaaaattatttttt

SEQ ID NO: 64018 - DNA, 15 bp, Homo sapiens
tgaaaaattattttt

SEQ ID NO: 64019 - DNA, 15 bp, Homo sapiens
gtgaaaaattatttt

SEQ ID NO: 64020 - DNA, 15 bp, Homo sapiens
agtgaaaaattattt

SEQ ID NO: 64021 - DNA, 15 bp, Homo sapiens
aagtgaaaaattatt

SEQ ID NO: 64022 - DNA, 15 bp, Homo sapiens
taagtgaaaaattat

SEQ ID NO: 64023 - DNA, 15 bp, Homo sapiens
ataagtgaaaaatta

SEQ ID NO: 64024 - DNA, 15 bp, Homo sapiens
cataagtgaaaaatt

SEQ ID NO: 64025 - DNA, 15 bp, Homo sapiens
tcataagtgaaaaat

SEQ ID NO: 64026 - DNA, 15 bp, Homo sapiens
ctcataagtgaaaaa

SEQ ID NO: 64027 - DNA, 15 bp, Homo sapiens
gctcataagtgaaaa

SEQ ID NO: 64028 - DNA, 15 bp, Homo sapiens
tgctcataagtgaaa

SEQ ID NO: 64029 - DNA, 15 bp, Homo sapiens
ttgctcataagtgaa

SEQ ID NO: 64030 - DNA, 15 bp, Homo sapiens
attgctcataagtga

SEQ ID NO: 64031 - DNA, 15 bp, Homo sapiens
tattgctcataagtg

SEQ ID NO: 64032 - DNA, 15 bp, Homo sapiens
ctattgctcataagt

SEQ ID NO: 64033 - DNA, 15 bp, Homo sapiens
tctattgctcataag

SEQ ID NO: 64034 - DNA, 15 bp, Homo sapiens
ctctattgctcataa

SEQ ID NO: 64035 - DNA, 15 bp, Homo sapiens
actctattgctcata

SEQ ID NO: 64036 - DNA, 15 bp, Homo sapiens
aactctattgctcat

SEQ ID NO: 64037 - DNA, 15 bp, Homo sapiens
taactctattgctca

SEQ ID NO: 64038 - DNA, 15 bp, Homo sapiens
ataactctattgctc

SEQ ID NO: 64039 - DNA, 15 bp, Homo sapiens
aataactctattgct

SEQ ID NO: 64040 - DNA, 15 bp, Homo sapiens
taataactctattgc

SEQ ID NO: 64041 - DNA, 15 bp, Homo sapiens
gtaataactctattg

SEQ ID NO: 64042 - DNA, 15 bp, Homo sapiens
cgtaataactctatt

SEQ ID NO: 64043 - DNA, 15 bp, Homo sapiens
ccgtaataactctat

SEQ ID NO: 64044 - DNA, 15 bp, Homo sapiens
tccgtaataactcta

SEQ ID NO: 64045 - DNA, 15 bp, Homo sapiens
gtccgtaataactct

SEQ ID NO: 64046 - DNA, 15 bp, Homo sapiens
tgtccgtaataactc

SEQ ID NO: 64047 - DNA, 15 bp, Homo sapiens
atgtccgtaataact

SEQ ID NO: 64048 - DNA, 15 bp, Homo sapiens
tatgtccgtaataac

SEQ ID NO: 64049 - DNA, 15 bp, Homo sapiens
atatgtccgtaataa

SEQ ID NO: 64050 - DNA, 15 bp, Homo sapiens
gatatgtccgtaata

SEQ ID NO: 64051 - DNA, 15 bp, Homo sapiens
tgatatgtccgtaat

SEQ ID NO: 64052 - DNA, 15 bp, Homo sapiens
ctgatatgtccgtaa

SEQ ID NO: 64053 - DNA, 15 bp, Homo sapiens
gctgatatgtccgta

SEQ ID NO: 64054 - DNA, 15 bp, Homo sapiens
tgctgatatgtccgt

SEQ ID NO: 64055 - DNA, 15 bp, Homo sapiens
ttgctgatatgtccg

SEQ ID NO: 64056 - DNA, 15 bp, Homo sapiens
tttgctgatatgtcc

SEQ ID NO: 64057 - DNA, 15 bp, Homo sapiens
ttttgctgatatgtc

SEQ ID NO: 64058 - DNA, 15 bp, Homo sapiens
tttttgctgatatgt

SEQ ID NO: 64059 - DNA, 15 bp, Homo sapiens
atttttgctgatatg

SEQ ID NO: 64060 - DNA, 15 bp, Homo sapiens
catttttgctgatat

SEQ ID NO: 64061 - DNA, 15 bp, Homo sapiens
acatttttgctgata

SEQ ID NO: 64062 - DNA, 15 bp, Homo sapiens
tacatttttgctgat

SEQ ID NO: 64063 - DNA, 15 bp, Homo sapiens
ctacatttttgctga

SEQ ID NO: 64064 - DNA, 15 bp, Homo sapiens
actacatttttgctg

SEQ ID NO: 64065 - DNA, 15 bp, Homo sapiens
tactacatttttgct

SEQ ID NO: 64066 - DNA, 15 bp, Homo sapiens
ctactacatttttgc

SEQ ID NO: 64067 - DNA, 15 bp, Homo sapiens
actactacatttttg

SEQ ID NO: 64068 - DNA, 15 bp, Homo sapiens
cactactacattttt

SEQ ID NO: 64069 - DNA, 15 bp, Homo sapiens
acactactacatttt

SEQ ID NO: 64070 - DNA, 15 bp, Homo sapiens
gacactactacattt

SEQ ID NO: 64071 - DNA, 15 bp, Homo sapiens
tgacactactacatt

SEQ ID NO: 64072 - DNA, 15 bp, Homo sapiens
ttgacactactacat

SEQ ID NO: 64073 - DNA, 15 bp, Homo sapiens
cttgacactactaca

SEQ ID NO: 64074 - DNA, 15 bp, Homo sapiens
ccttgacactactac

SEQ ID NO: 64075 - DNA, 15 bp, Homo sapiens
gccttgacactacta

SEQ ID NO: 64076 - DNA, 15 bp, Homo sapiens
agccttgacactact

SEQ ID NO: 64077 - DNA, 15 bp, Homo sapiens
gagccttgacactac

SEQ ID NO: 64078 - DNA, 15 bp, Homo sapiens
tgagccttgacacta

SEQ ID NO: 64079 - DNA, 15 bp, Homo sapiens
atgagccttgacact

SEQ ID NO: 64080 - DNA, 15 bp, Homo sapiens
tatgagccttgacac

SEQ ID NO: 64081 - DNA, 15 bp, Homo sapiens
ctatgagccttgaca

SEQ ID NO: 64082 - DNA, 15 bp, Homo sapiens
tctatgagccttgac

SEQ ID NO: 64083 - DNA, 15 bp, Homo sapiens
atctatgagccttga

SEQ ID NO: 64084 - DNA, 15 bp, Homo sapiens
catctatgagccttg

SEQ ID NO: 64085 - DNA, 15 bp, Homo sapiens
tcatctatgagcctt

SEQ ID NO: 64086 - DNA, 15 bp, Homo sapiens
atcatctatgagcct

SEQ ID NO: 64087 - DNA, 15 bp, Homo sapiens
tatcatctatgagcc

SEQ ID NO: 64088 - DNA, 15 bp, Homo sapiens
ctatcatctatgagc

SEQ ID NO: 64089 - DNA, 15 bp, Homo sapiens
tctatcatctatgag

SEQ ID NO: 64090 - DNA, 15 bp, Homo sapiens
ttctatcatctatga

SEQ ID NO: 64091 - DNA, 15 bp, Homo sapiens
tttctatcatctatg

SEQ ID NO: 64092 - DNA, 15 bp, Homo sapiens
atttctatcatctat

SEQ ID NO: 64093 - DNA, 15 bp, Homo sapiens
catttctatcatcta

SEQ ID NO: 64094 - DNA, 15 bp, Homo sapiens
tcatttctatcatct

SEQ ID NO: 64095 - DNA, 15 bp, Homo sapiens
ttcatttctatcatc

SEQ ID NO: 64096 - DNA, 15 bp, Homo sapiens
cttcatttctatcat

SEQ ID NO: 64097 - DNA, 15 bp, Homo sapiens
tcttcatttctatca

SEQ ID NO: 64098 - DNA, 15 bp, Homo sapiens
ctcttcatttctatc

SEQ ID NO: 64099 - DNA, 15 bp, Homo sapiens
tctcttcatttctat

SEQ ID NO: 64100 - DNA, 15 bp, Homo sapiens
atctcttcatttcta

SEQ ID NO: 64101 - DNA, 15 bp, Homo sapiens
catctcttcatttct

SEQ ID NO: 64102 - DNA, 15 bp, Homo sapiens
gcatctcttcatttc

SEQ ID NO: 64103 - DNA, 15 bp, Homo sapiens
agcatctcttcattt

SEQ ID NO: 64104 - DNA, 15 bp, Homo sapiens
cagcatctcttcatt

SEQ ID NO: 64105 - DNA, 15 bp, Homo sapiens
acagcatctcttcat

SEQ ID NO: 64106 - DNA, 15 bp, Homo sapiens
tacagcatctcttca

SEQ ID NO: 64107 - DNA, 15 bp, Homo sapiens
atacagcatctcttc

SEQ ID NO: 64108 - DNA, 15 bp, Homo sapiens
aatacagcatctctt

SEQ ID NO: 64109 - DNA, 15 bp, Homo sapiens
caatacagcatctct

SEQ ID NO: 64110 - DNA, 15 bp, Homo sapiens
tcaatacagcatctc

SEQ ID NO: 64111 - DNA, 15 bp, Homo sapiens
atcaatacagcatct

SEQ ID NO: 64112 - DNA, 15 bp, Homo sapiens
tatcaatacagcatc

SEQ ID NO: 64113 - DNA, 15 bp, Homo sapiens
ctatcaatacagcat

SEQ ID NO: 64114 - DNA, 15 bp, Homo sapiens
tctatcaatacagca

SEQ ID NO: 64115 - DNA, 15 bp, Homo sapiens
ttctatcaatacagc

SEQ ID NO: 64116 - DNA, 15 bp, Homo sapiens
tttctatcaatacag

SEQ ID NO: 64117 - DNA, 15 bp, Homo sapiens
atttctatcaataca

SEQ ID NO: 64118 - DNA, 15 bp, Homo sapiens
tatttctatcaatac

SEQ ID NO: 64119 - DNA, 15 bp, Homo sapiens
atatttctatcaata

SEQ ID NO: 64120 - DNA, 15 bp, Homo sapiens
catatttctatcaat

SEQ ID NO: 64121 - DNA, 15 bp, Homo sapiens
acatatttctatcaa

SEQ ID NO: 64122 - DNA, 15 bp, Homo sapiens
cacatatttctatca

SEQ ID NO: 64123 - DNA, 15 bp, Homo sapiens
tcacatatttctatc

SEQ ID NO: 64124 - DNA, 15 bp, Homo sapiens
atcacatatttctat

SEQ ID NO: 64125 - DNA, 15 bp, Homo sapiens
aatcacatatttcta

SEQ ID NO: 64126 - DNA, 15 bp, Homo sapiens
gaatcacatatttct

SEQ ID NO: 64127 - DNA, 15 bp, Homo sapiens
tgaatcacatatttc

SEQ ID NO: 64128 - DNA, 15 bp, Homo sapiens
ctgaatcacatattt

SEQ ID NO: 64129 - DNA, 15 bp, Homo sapiens
cctgaatcacatatt

SEQ ID NO: 64130 - DNA, 15 bp, Homo sapiens
tcctgaatcacatat

SEQ ID NO: 64131 - DNA, 15 bp, Homo sapiens
gtcctgaatcacata

SEQ ID NO: 64132 - DNA, 15 bp, Homo sapiens
agtcctgaatcacat

SEQ ID NO: 64133 - DNA, 15 bp, Homo sapiens
cagtcctgaatcaca

SEQ ID NO: 64134 - DNA, 15 bp, Homo sapiens
acagtcctgaatcac

SEQ ID NO: 64135 - DNA, 15 bp, Homo sapiens
cacagtcctgaatca

SEQ ID NO: 64136 - DNA, 15 bp, Homo sapiens
acacagtcctgaatc

SEQ ID NO: 64137 - DNA, 15 bp, Homo sapiens
cacacagtcctgaat

SEQ ID NO: 64138 - DNA, 15 bp, Homo sapiens
ccacacagtcctgaa

SEQ ID NO: 64139 - DNA, 15 bp, Homo sapiens
tccacacagtcctga

SEQ ID NO: 64140 - DNA, 15 bp, Homo sapiens
atccacacagtcctg

SEQ ID NO: 64141 - DNA, 15 bp, Homo sapiens
aatccacacagtcct

SEQ ID NO: 64142 - DNA, 15 bp, Homo sapiens
caatccacacagtcc

SEQ ID NO: 64143 - DNA, 15 bp, Homo sapiens
tcaatccacacagtc

SEQ ID NO: 64144 - DNA, 15 bp, Homo sapiens
atcaatccacacagt

SEQ ID NO: 64145 - DNA, 15 bp, Homo sapiens
catcaatccacacag

SEQ ID NO: 64146 - DNA, 15 bp, Homo sapiens
tcatcaatccacaca

SEQ ID NO: 64147 - DNA, 15 bp, Homo sapiens
atcatcaatccacac

SEQ ID NO: 64148 - DNA, 15 bp, Homo sapiens
aatcatcaatccaca

SEQ ID NO: 64149 - DNA, 15 bp, Homo sapiens
caatcatcaatccac

SEQ ID NO: 64150 - DNA, 15 bp, Homo sapiens
acaatcatcaatcca

SEQ ID NO: 64151 - DNA, 15 bp, Homo sapiens
cacaatcatcaatcc

SEQ ID NO: 64152 - DNA, 15 bp, Homo sapiens
tcacaatcatcaatc

SEQ ID NO: 64153 - DNA, 15 bp, Homo sapiens
ctcacaatcatcaat

SEQ ID NO: 64154 - DNA, 15 bp, Homo sapiens
gctcacaatcatcaa

SEQ ID NO: 64155 - DNA, 15 bp, Homo sapiens
agctcacaatcatca

SEQ ID NO: 64156 - DNA, 15 bp, Homo sapiens
aagctcacaatcatc

SEQ ID NO: 64157 - DNA, 15 bp, Homo sapiens
caagctcacaatcat

SEQ ID NO: 64158 - DNA, 15 bp, Homo sapiens
gcaagctcacaatca

SEQ ID NO: 64159 - DNA, 15 bp, Homo sapiens
agcaagctcacaatc

SEQ ID NO: 64160 - DNA, 15 bp, Homo sapiens
aagcaagctcacaat

SEQ ID NO: 64161 - DNA, 15 bp, Homo sapiens
taagcaagctcacaa

SEQ ID NO: 64162 - DNA, 15 bp, Homo sapiens
ataagcaagctcaca

SEQ ID NO: 64163 - DNA, 15 bp, Homo sapiens
cataagcaagctcac

SEQ ID NO: 64164 - DNA, 15 bp, Homo sapiens
ccataagcaagctca

SEQ ID NO: 64165 - DNA, 15 bp, Homo sapiens
tccataagcaagctc

SEQ ID NO: 64166 - DNA, 15 bp, Homo sapiens
atccataagcaagct

SEQ ID NO: 64167 - DNA, 15 bp, Homo sapiens
tatccataagcaagc

SEQ ID NO: 64168 - DNA, 15 bp, Homo sapiens
atatccataagcaag

SEQ ID NO: 64169 - DNA, 15 bp, Homo sapiens
gatatccataagcaa

SEQ ID NO: 64170 - DNA, 15 bp, Homo sapiens
ggatatccataagca

SEQ ID NO: 64171 - DNA, 15 bp, Homo sapiens
aggatatccataagc

SEQ ID NO: 64172 - DNA, 15 bp, Homo sapiens
taggatatccataag

SEQ ID NO: 64173 - DNA, 15 bp, Homo sapiens
ctaggatatccataa

SEQ ID NO: 64174 - DNA, 15 bp, Homo sapiens
cctaggatatccata

SEQ ID NO: 64175 - DNA, 15 bp, Homo sapiens
acctaggatatccat

SEQ ID NO: 64176 - DNA, 15 bp, Homo sapiens
aacctaggatatcca

SEQ ID NO: 64177 - DNA, 15 bp, Homo sapiens
aaacctaggatatcc

SEQ ID NO: 64178 - DNA, 15 bp, Homo sapiens
caaacctaggatatc

SEQ ID NO: 64179 - DNA, 15 bp, Homo sapiens
tcaaacctaggatat

SEQ ID NO: 64180 - DNA, 15 bp, Homo sapiens
ctcaaacctaggata

SEQ ID NO: 64181 - DNA, 15 bp, Homo sapiens
cctcaaacctaggat

SEQ ID NO: 64182 - DNA, 15 bp, Homo sapiens
acctcaaacctagga

SEQ ID NO: 64183 - DNA, 15 bp, Homo sapiens
aacctcaaacctagg

SEQ ID NO: 64184 - DNA, 15 bp, Homo sapiens
taacctcaaacctag

SEQ ID NO: 64185 - DNA, 15 bp, Homo sapiens
ataacctcaaaccta

SEQ ID NO: 64186 - DNA, 15 bp, Homo sapiens
tataacctcaaacct

SEQ ID NO: 64187 - DNA, 15 bp, Homo sapiens
ctataacctcaaacc

SEQ ID NO: 64188 - DNA, 15 bp, Homo sapiens
actataacctcaaac

SEQ ID NO: 64189 - DNA, 15 bp, Homo sapiens
tactataacctcaaa

SEQ ID NO: 64190 - DNA, 15 bp, Homo sapiens
ctactataacctcaa

SEQ ID NO: 64191 - DNA, 15 bp, Homo sapiens
cctactataacctca

SEQ ID NO: 64192 - DNA, 15 bp, Homo sapiens
tcctactataacctc

SEQ ID NO: 64193 - DNA, 15 bp, Homo sapiens
gtcctactataacct

SEQ ID NO: 64194 - DNA, 15 bp, Homo sapiens
tgtcctactataacc

SEQ ID NO: 64195 - DNA, 15 bp, Homo sapiens
ttgtcctactataac

SEQ ID NO: 64196 - DNA, 15 bp, Homo sapiens
attgtcctactataa

SEQ ID NO: 64197 - DNA, 15 bp, Homo sapiens
gattgtcctactata

SEQ ID NO: 64198 - DNA, 15 bp, Homo sapiens
tgattgtcctactat

SEQ ID NO: 64199 - DNA, 15 bp, Homo sapiens
ctgattgtcctacta

SEQ ID NO: 64200 - DNA, 15 bp, Homo sapiens
cctgattgtcctact

SEQ ID NO: 64201 - DNA, 15 bp, Homo sapiens
acctgattgtcctac

SEQ ID NO: 64202 - DNA, 15 bp, Homo sapiens
aacctgattgtccta

SEQ ID NO: 64203 - DNA, 15 bp, Homo sapiens
caacctgattgtcct

SEQ ID NO: 64204 - DNA, 15 bp, Homo sapiens
tcaacctgattgtcc

SEQ ID NO: 64205 - DNA, 15 bp, Homo sapiens
ttcaacctgattgtc

SEQ ID NO: 64206 - DNA, 15 bp, Homo sapiens
tttcaacctgattgt

SEQ ID NO: 64207 - DNA, 15 bp, Homo sapiens
atttcaacctgattg

SEQ ID NO: 64208 - DNA, 15 bp, Homo sapiens
catttcaacctgatt

SEQ ID NO: 64209 - DNA, 15 bp, Homo sapiens
acatttcaacctgat

SEQ ID NO: 64210 - DNA, 15 bp, Homo sapiens
gacatttcaacctga

SEQ ID NO: 64211 - DNA, 15 bp, Homo sapiens
ggacatttcaacctg

SEQ ID NO: 64212 - DNA, 15 bp, Homo sapiens
tggacatttcaacct

SEQ ID NO: 64213 - DNA, 15 bp, Homo sapiens
ctggacatttcaacc

SEQ ID NO: 64214 - DNA, 15 bp, Homo sapiens
gctggacatttcaac

SEQ ID NO: 64215 - DNA, 15 bp, Homo sapiens
tgctggacatttcaa

SEQ ID NO: 64216 - DNA, 15 bp, Homo sapiens
ctgctggacatttca

SEQ ID NO: 64217 - DNA, 15 bp, Homo sapiens
cctgctggacatttc

SEQ ID NO: 64218 - DNA, 15 bp, Homo sapiens
gcctgctggacattt

SEQ ID NO: 64219 - DNA, 15 bp, Homo sapiens
tgcctgctggacatt

SEQ ID NO: 64220 - DNA, 15 bp, Homo sapiens
ctgcctgctggacat

SEQ ID NO: 64221 - DNA, 15 bp, Homo sapiens
actgcctgctggaca

SEQ ID NO: 64222 - DNA, 15 bp, Homo sapiens
tactgcctgctggac

SEQ ID NO: 64223 - DNA, 15 bp, Homo sapiens
ctactgcctgctgga

SEQ ID NO: 64224 - DNA, 15 bp, Homo sapiens
cctactgcctgctgg

SEQ ID NO: 64225 - DNA, 15 bp, Homo sapiens
acctactgcctgctg

SEQ ID NO: 64226 - DNA, 15 bp, Homo sapiens
cacctactgcctgct

SEQ ID NO: 64227 - DNA, 15 bp, Homo sapiens
tcacctactgcctgc

SEQ ID NO: 64228 - DNA, 15 bp, Homo sapiens
ttcacctactgcctg

SEQ ID NO: 64229 - DNA, 15 bp, Homo sapiens
tttcacctactgcct

SEQ ID NO: 64230 - DNA, 15 bp, Homo sapiens
ctttcacctactgcc

SEQ ID NO: 64231 - DNA, 15 bp, Homo sapiens
tctttcacctactgc

SEQ ID NO: 64232 - DNA, 15 bp, Homo sapiens
gtctttcacctactg

SEQ ID NO: 64233 - DNA, 15 bp, Homo sapiens
tgtctttcacctact

SEQ ID NO: 64234 - DNA, 15 bp, Homo sapiens
ttgtctttcacctac

SEQ ID NO: 64235 - DNA, 15 bp, Homo sapiens
cttgtctttcaccta

SEQ ID NO: 64236 - DNA, 15 bp, Homo sapiens
acttgtctttcacct

SEQ ID NO: 64237 - DNA, 15 bp, Homo sapiens
aacttgtctttcacc

SEQ ID NO: 64238 - DNA, 15 bp, Homo sapiens
aaacttgtctttcac

SEQ ID NO: 64239 - DNA, 15 bp, Homo sapiens
taaacttgtctttca

SEQ ID NO: 64240 - DNA, 15 bp, Homo sapiens
ctaaacttgtctttc

SEQ ID NO: 64241 - DNA, 15 bp, Homo sapiens
cctaaacttgtcttt

SEQ ID NO: 64242 - DNA, 15 bp, Homo sapiens
ccctaaacttgtctt

SEQ ID NO: 64243 - DNA, 15 bp, Homo sapiens
cccctaaacttgtct

SEQ ID NO: 64244 - DNA, 15 bp, Homo sapiens
ccccctaaacttgtc

SEQ ID NO: 64245 - DNA, 15 bp, Homo sapiens
gccccctaaacttgt

SEQ ID NO: 64246 - DNA, 15 bp, Homo sapiens
tgccccctaaacttg

SEQ ID NO: 64247 - DNA, 15 bp, Homo sapiens
ttgccccctaaactt

SEQ ID NO: 64248 - DNA, 15 bp, Homo sapiens
tttgccccctaaact

SEQ ID NO: 64249 - DNA, 15 bp, Homo sapiens
ttttgccccctaaac

SEQ ID NO: 64250 - DNA, 15 bp, Homo sapiens
gttttgccccctaaa

SEQ ID NO: 64251 - DNA, 15 bp, Homo sapiens
ggttttgccccctaa

SEQ ID NO: 64252 - DNA, 15 bp, Homo sapiens
tggttttgcccccta

SEQ ID NO: 64253 - DNA, 15 bp, Homo sapiens
atggttttgccccct

SEQ ID NO: 64254 - DNA, 15 bp, Homo sapiens
catggttttgccccc

SEQ ID NO: 64255 - DNA, 15 bp, Homo sapiens
ccatggttttgcccc

SEQ ID NO: 64256 - DNA, 15 bp, Homo sapiens
tccatggttttgccc

SEQ ID NO: 64257 - DNA, 15 bp, Homo sapiens
atccatggttttgcc

SEQ ID NO: 64258 - DNA, 15 bp, Homo sapiens
catccatggttttgc

SEQ ID NO: 64259 - DNA, 15 bp, Homo sapiens
ccatccatggttttg

SEQ ID NO: 64260 - DNA, 15 bp, Homo sapiens
tccatccatggtttt

SEQ ID NO: 64261 - DNA, 15 bp, Homo sapiens
ctccatccatggttt

SEQ ID NO: 64262 - DNA, 15 bp, Homo sapiens
tctccatccatggtt

SEQ ID NO: 64263 - DNA, 15 bp, Homo sapiens
atctccatccatggt

SEQ ID NO: 64264 - DNA, 15 bp, Homo sapiens
catctccatccatgg

SEQ ID NO: 64265 - DNA, 15 bp, Homo sapiens
tcatctccatccatg

SEQ ID NO: 64266 - DNA, 15 bp, Homo sapiens
ttcatctccatccat

SEQ ID NO: 64267 - DNA, 15 bp, Homo sapiens
cttcatctccatcca

SEQ ID NO: 64268 - DNA, 15 bp, Homo sapiens
tcttcatctccatcc

SEQ ID NO: 64269 - DNA, 15 bp, Homo sapiens
atcttcatctccatc

SEQ ID NO: 64270 - DNA, 15 bp, Homo sapiens
aatcttcatctccat

SEQ ID NO: 64271 - DNA, 15 bp, Homo sapiens
gaatcttcatctcca

SEQ ID NO: 64272 - DNA, 15 bp, Homo sapiens
tgaatcttcatctcc

SEQ ID NO: 64273 - DNA, 15 bp, Homo sapiens
atgaatcttcatctc

SEQ ID NO: 64274 - DNA, 15 bp, Homo sapiens
catgaatcttcatct

SEQ ID NO: 64275 - DNA, 15 bp, Homo sapiens
tcatgaatcttcatc

SEQ ID NO: 64276 - DNA, 15 bp, Homo sapiens
gtcatgaatcttcat

SEQ ID NO: 64277 - DNA, 15 bp, Homo sapiens
agtcatgaatcttca

SEQ ID NO: 64278 - DNA, 15 bp, Homo sapiens
aagtcatgaatcttc

SEQ ID NO: 64279 - DNA, 15 bp, Homo sapiens
gaagtcatgaatctt

SEQ ID NO: 64280 - DNA, 15 bp, Homo sapiens
ggaagtcatgaatct

SEQ ID NO: 64281 - DNA, 15 bp, Homo sapiens
tggaagtcatgaatc

SEQ ID NO: 64282 - DNA, 15 bp, Homo sapiens
gtggaagtcatgaat

SEQ ID NO: 64283 - DNA, 15 bp, Homo sapiens
tgtggaagtcatgaa

SEQ ID NO: 64284 - DNA, 15 bp, Homo sapiens
atgtggaagtcatga

SEQ ID NO: 64285 - DNA, 15 bp, Homo sapiens
tatgtggaagtcatg

SEQ ID NO: 64286 - DNA, 15 bp, Homo sapiens
ttatgtggaagtcat

SEQ ID NO: 64287 - DNA, 15 bp, Homo sapiens
tttatgtggaagtca

SEQ ID NO: 64288 - DNA, 15 bp, Homo sapiens
ttttatgtggaagtc

SEQ ID NO: 64289 - DNA, 15 bp, Homo sapiens
cttttatgtggaagt

SEQ ID NO: 64290 - DNA, 15 bp, Homo sapiens
ccttttatgtggaag

SEQ ID NO: 64291 - DNA, 15 bp, Homo sapiens
tccttttatgtggaa

SEQ ID NO: 64292 - DNA, 15 bp, Homo sapiens
atccttttatgtgga

SEQ ID NO: 64293 - DNA, 15 bp, Homo sapiens
catccttttatgtgg

SEQ ID NO: 64294 - DNA, 15 bp, Homo sapiens
ccatccttttatgtg

SEQ ID NO: 64295 - DNA, 15 bp, Homo sapiens
cccatccttttatgt

SEQ ID NO: 64296 - DNA, 15 bp, Homo sapiens
acccatccttttatg

SEQ ID NO: 64297 - DNA, 15 bp, Homo sapiens
cacccatccttttat

SEQ ID NO: 64298 - DNA, 15 bp, Homo sapiens
tcacccatcctttta

SEQ ID NO: 64299 - DNA, 15 bp, Homo sapiens
ttcacccatcctttt

SEQ ID NO: 64300 - DNA, 15 bp, Homo sapiens
tttcacccatccttt

SEQ ID NO: 64301 - DNA, 15 bp, Homo sapiens
gtttcacccatcctt

SEQ ID NO: 64302 - DNA, 15 bp, Homo sapiens
agtttcacccatcct

SEQ ID NO: 64303 - DNA, 15 bp, Homo sapiens
aagtttcacccatcc

SEQ ID NO: 64304 - DNA, 15 bp, Homo sapiens
aaagtttcacccatc

SEQ ID NO: 64305 - DNA, 15 bp, Homo sapiens
caaagtttcacccat

SEQ ID NO: 64306 - DNA, 15 bp, Homo sapiens
ccaaagtttcaccca

SEQ ID NO: 64307 - DNA, 15 bp, Homo sapiens
cccaaagtttcaccc

SEQ ID NO: 64308 - DNA, 15 bp, Homo sapiens
tcccaaagtttcacc

SEQ ID NO: 64309 - DNA, 15 bp, Homo sapiens
ttcccaaagtttcac

SEQ ID NO: 64310 - DNA, 15 bp, Homo sapiens
attcccaaagtttca

SEQ ID NO: 64311 - DNA, 15 bp, Homo sapiens
aattcccaaagtttc

SEQ ID NO: 64312 - DNA, 15 bp, Homo sapiens
caattcccaaagttt

SEQ ID NO: 64313 - DNA, 15 bp, Homo sapiens
tcaattcccaaagtt

SEQ ID NO: 64314 - DNA, 15 bp, Homo sapiens
atcaattcccaaagt

SEQ ID NO: 64315 - DNA, 15 bp, Homo sapiens
catcaattcccaaag

SEQ ID NO: 64316 - DNA, 15 bp, Homo sapiens
tcatcaattcccaaa

SEQ ID NO: 64317 - DNA, 15 bp, Homo sapiens
ttcatcaattcccaa

SEQ ID NO: 64318 - DNA, 15 bp, Homo sapiens
attcatcaattccca

SEQ ID NO: 64319 - DNA, 15 bp, Homo sapiens
aattcatcaattccc

SEQ ID NO: 64320 - DNA, 15 bp, Homo sapiens
gaattcatcaattcc

SEQ ID NO: 64321 - DNA, 15 bp, Homo sapiens
agaattcatcaattc

SEQ ID NO: 64322 - DNA, 15 bp, Homo sapiens
gagaattcatcaatt

SEQ ID NO: 64323 - DNA, 15 bp, Homo sapiens
agagaattcatcaat

SEQ ID NO: 64324 - DNA, 15 bp, Homo sapiens
tagagaattcatcaa

SEQ ID NO: 64325 - DNA, 15 bp, Homo sapiens
ctagagaattcatca

SEQ ID NO: 64326 - DNA, 15 bp, Homo sapiens
tctagagaattcatc

SEQ ID NO: 64327 - DNA, 15 bp, Homo sapiens
ctctagagaattcat

SEQ ID NO: 64328 - DNA, 15 bp, Homo sapiens
cctctagagaattca

SEQ ID NO: 64329 - DNA, 15 bp, Homo sapiens
acctctagagaattc

SEQ ID NO: 64330 - DNA, 15 bp, Homo sapiens
cacctctagagaatt

SEQ ID NO: 64331 - DNA, 15 bp, Homo sapiens
tcacctctagagaat

SEQ ID NO: 64332 - DNA, 15 bp, Homo sapiens
ctcacctctagagaa

SEQ ID NO: 64333 - DNA, 15 bp, Homo sapiens
gctcacctctagaga

SEQ ID NO: 64334 - DNA, 15 bp, Homo sapiens
agctcacctctagag

SEQ ID NO: 64335 - DNA, 15 bp, Homo sapiens
gagctcacctctaga

SEQ ID NO: 64336 - DNA, 15 bp, Homo sapiens
tgagctcacctctag

SEQ ID NO: 64337 - DNA, 15 bp, Homo sapiens
ttgagctcacctcta

SEQ ID NO: 64338 - DNA, 15 bp, Homo sapiens
cttgagctcacctct

SEQ ID NO: 64339 - DNA, 15 bp, Homo sapiens
tcttgagctcacctc

SEQ ID NO: 64340 - DNA, 15 bp, Homo sapiens
gtcttgagctcacct

SEQ ID NO: 64341 - DNA, 15 bp, Homo sapiens
ggtcttgagctcacc

SEQ ID NO: 64342 - DNA, 15 bp, Homo sapiens
gggtcttgagctcac

SEQ ID NO: 64343 - DNA, 15 bp, Homo sapiens
agggtcttgagctca

SEQ ID NO: 64344 - DNA, 15 bp, Homo sapiens
aagggtcttgagctc

SEQ ID NO: 64345 - DNA, 15 bp, Homo sapiens
taagggtcttgagct

SEQ ID NO: 64346 - DNA, 15 bp, Homo sapiens
ttaagggtcttgagc

SEQ ID NO: 64347 - DNA, 15 bp, Homo sapiens
tttaagggtcttgag

SEQ ID NO: 64348 - DNA, 15 bp, Homo sapiens
ctttaagggtcttga

SEQ ID NO: 64349 - DNA, 15 bp, Homo sapiens
cctttaagggtcttg

SEQ ID NO: 64350 - DNA, 15 bp, Homo sapiens
gcctttaagggtctt

SEQ ID NO: 64351 - DNA, 15 bp, Homo sapiens
agcctttaagggtct

SEQ ID NO: 64352 - DNA, 15 bp, Homo sapiens
aagcctttaagggtc

SEQ ID NO: 64353 - DNA, 15 bp, Homo sapiens
taagcctttaagggt

SEQ ID NO: 64354 - DNA, 15 bp, Homo sapiens
ttaagcctttaaggg

SEQ ID NO: 64355 - DNA, 15 bp, Homo sapiens
tttaagcctttaagg

SEQ ID NO: 64356 - DNA, 15 bp, Homo sapiens
ttttaagcctttaag

SEQ ID NO: 64357 - DNA, 15 bp, Homo sapiens
gttttaagcctttaa

SEQ ID NO: 64358 - DNA, 15 bp, Homo sapiens
ggttttaagccttta

SEQ ID NO: 64359 - DNA, 15 bp, Homo sapiens
aggttttaagccttt

SEQ ID NO: 64360 - DNA, 15 bp, Homo sapiens
gaggttttaagcctt

SEQ ID NO: 64361 - DNA, 15 bp, Homo sapiens
tgaggttttaagcct

SEQ ID NO: 64362 - DNA, 15 bp, Homo sapiens
ctgaggttttaagcc

SEQ ID NO: 64363 - DNA, 15 bp, Homo sapiens
gctgaggttttaagc

SEQ ID NO: 64364 - DNA, 15 bp, Homo sapiens
cgctgaggttttaag

SEQ ID NO: 64365 - DNA, 15 bp, Homo sapiens
acgctgaggttttaa

SEQ ID NO: 64366 - DNA, 15 bp, Homo sapiens
aacgctgaggtttta

SEQ ID NO: 64367 - DNA, 15 bp, Homo sapiens
taacgctgaggtttt

SEQ ID NO: 64368 - DNA, 15 bp, Homo sapiens
ataacgctgaggttt

SEQ ID NO: 64369 - DNA, 15 bp, Homo sapiens
aataacgctgaggtt

SEQ ID NO: 64370 - DNA, 15 bp, Homo sapiens
caataacgctgaggt

SEQ ID NO: 64371 - DNA, 15 bp, Homo sapiens
acaataacgctgagg

SEQ ID NO: 64372 - DNA, 15 bp, Homo sapiens
gacaataacgctgag

SEQ ID NO: 64373 - DNA, 15 bp, Homo sapiens
agacaataacgctga

SEQ ID NO: 64374 - DNA, 15 bp, Homo sapiens
tagacaataacgctg

SEQ ID NO: 64375 - DNA, 15 bp, Homo sapiens
gtagacaataacgct

SEQ ID NO: 64376 - DNA, 15 bp, Homo sapiens
agtagacaataacgc

SEQ ID NO: 64377 - DNA, 15 bp, Homo sapiens
gagtagacaataacg

SEQ ID NO: 64378 - DNA, 15 bp, Homo sapiens
agagtagacaataac

SEQ ID NO: 64379 - DNA, 15 bp, Homo sapiens
aagagtagacaataa

SEQ ID NO: 64380 - DNA, 15 bp, Homo sapiens
gaagagtagacaata

SEQ ID NO: 64381 - DNA, 15 bp, Homo sapiens
ggaagagtagacaat

SEQ ID NO: 64382 - DNA, 15 bp, Homo sapiens
gggaagagtagacaa

SEQ ID NO: 64383 - DNA, 15 bp, Homo sapiens
agggaagagtagaca

SEQ ID NO: 64384 - DNA, 15 bp, Homo sapiens
gagggaagagtagac

SEQ ID NO: 64385 - DNA, 15 bp, Homo sapiens
tgagggaagagtaga

SEQ ID NO: 64386 - DNA, 15 bp, Homo sapiens
atgagggaagagtag

SEQ ID NO: 64387 - DNA, 15 bp, Homo sapiens
aatgagggaagagta

SEQ ID NO: 64388 - DNA, 15 bp, Homo sapiens
aaatgagggaagagt

SEQ ID NO: 64389 - DNA, 15 bp, Homo sapiens
aaaatgagggaagag

SEQ ID NO: 64390 - DNA, 15 bp, Homo sapiens
aaaaatgagggaaga

SEQ ID NO: 64391 - DNA, 15 bp, Homo sapiens
taaaaatgagggaag

SEQ ID NO: 64392 - DNA, 15 bp, Homo sapiens
ataaaaatgagggaa

SEQ ID NO: 64393 - DNA, 15 bp, Homo sapiens
cataaaaatgaggga

SEQ ID NO: 64394 - DNA, 15 bp, Homo sapiens
gcataaaaatgaggg

SEQ ID NO: 64395 - DNA, 15 bp, Homo sapiens
ggcataaaaatgagg

SEQ ID NO: 64396 - DNA, 15 bp, Homo sapiens
gggcataaaaatgag

SEQ ID NO: 64397 - DNA, 15 bp, Homo sapiens
tgggcataaaaatga

SEQ ID NO: 64398 - DNA, 15 bp, Homo sapiens
gtgggcataaaaatg

SEQ ID NO: 64399 - DNA, 15 bp, Homo sapiens
tgtgggcataaaaat

SEQ ID NO: 64400 - DNA, 15 bp, Homo sapiens
ttgtgggcataaaaa

SEQ ID NO: 64401 - DNA, 15 bp, Homo sapiens
tttgtgggcataaaa

SEQ ID NO: 64402 - DNA, 15 bp, Homo sapiens
atttgtgggcataaa

SEQ ID NO: 64403 - DNA, 15 bp, Homo sapiens
gatttgtgggcataa

SEQ ID NO: 64404 - DNA, 15 bp, Homo sapiens
agatttgtgggcata

SEQ ID NO: 64405 - DNA, 15 bp, Homo sapiens
cagatttgtgggcat

SEQ ID NO: 64406 - DNA, 15 bp, Homo sapiens
ccagatttgtgggca

SEQ ID NO: 64407 - DNA, 15 bp, Homo sapiens
accagatttgtgggc

SEQ ID NO: 64408 - DNA, 15 bp, Homo sapiens
gaccagatttgtggg

SEQ ID NO: 64409 - DNA, 15 bp, Homo sapiens
tgaccagatttgtgg

SEQ ID NO: 64410 - DNA, 15 bp, Homo sapiens
ttgaccagatttgtg

SEQ ID NO: 64411 - DNA, 15 bp, Homo sapiens
attgaccagatttgt

SEQ ID NO: 64412 - DNA, 15 bp, Homo sapiens
gattgaccagatttg

SEQ ID NO: 64413 - DNA, 15 bp, Homo sapiens
ggattgaccagattt

SEQ ID NO: 64414 - DNA, 15 bp, Homo sapiens
aggattgaccagatt

SEQ ID NO: 64415 - DNA, 15 bp, Homo sapiens
aaggattgaccagat

SEQ ID NO: 64416 - DNA, 15 bp, Homo sapiens
aaaggattgaccaga

SEQ ID NO: 64417 - DNA, 15 bp, Homo sapiens
taaaggattgaccag

SEQ ID NO: 64418 - DNA, 15 bp, Homo sapiens
ataaaggattgacca

SEQ ID NO: 64419 - DNA, 15 bp, Homo sapiens
aataaaggattgacc

SEQ ID NO: 64420 - DNA, 15 bp, Homo sapiens
aaataaaggattgac

SEQ ID NO: 64421 - DNA, 15 bp, Homo sapiens
caaataaaggattga

SEQ ID NO: 64422 - DNA, 15 bp, Homo sapiens
gcaaataaaggattg

SEQ ID NO: 64423 - DNA, 15 bp, Homo sapiens
tgcaaataaaggatt

SEQ ID NO: 64424 - DNA, 15 bp, Homo sapiens
ttgcaaataaaggat

SEQ ID NO: 64425 - DNA, 15 bp, Homo sapiens
attgcaaataaagga

SEQ ID NO: 64426 - DNA, 15 bp, Homo sapiens
cattgcaaataaagg

SEQ ID NO: 64427 - DNA, 15 bp, Homo sapiens
gcattgcaaataaag

SEQ ID NO: 64428 - DNA, 15 bp, Homo sapiens
ggcattgcaaataaa

SEQ ID NO: 64429 - DNA, 15 bp, Homo sapiens
aggcattgcaaataa

SEQ ID NO: 64430 - DNA, 15 bp, Homo sapiens
gaggcattgcaaata

SEQ ID NO: 64431 - DNA, 15 bp, Homo sapiens
agaggcattgcaaat

SEQ ID NO: 64432 - DNA, 15 bp, Homo sapiens
gagaggcattgcaaa

SEQ ID NO: 64433 - DNA, 15 bp, Homo sapiens
tgagaggcattgcaa

SEQ ID NO: 64434 - DNA, 15 bp, Homo sapiens
gtgagaggcattgca

SEQ ID NO: 64435 - DNA, 15 bp, Homo sapiens
tgtgagaggcattgc

SEQ ID NO: 64436 - DNA, 15 bp, Homo sapiens
atgtgagaggcattg

SEQ ID NO: 64437 - DNA, 15 bp, Homo sapiens
gatgtgagaggcatt

SEQ ID NO: 64438 - DNA, 15 bp, Homo sapiens
agatgtgagaggcat

SEQ ID NO: 64439 - DNA, 15 bp, Homo sapiens
gagatgtgagaggca

SEQ ID NO: 64440 - DNA, 15 bp, Homo sapiens
agagatgtgagaggc

SEQ ID NO: 64441 - DNA, 15 bp, Homo sapiens
aagagatgtgagagg

SEQ ID NO: 64442 - DNA, 15 bp, Homo sapiens
aaagagatgtgagag

SEQ ID NO: 64443 - DNA, 15 bp, Homo sapiens
gaaagagatgtgaga

SEQ ID NO: 64444 - DNA, 15 bp, Homo sapiens
agaaagagatgtgag

SEQ ID NO: 64445 - DNA, 15 bp, Homo sapiens
aagaaagagatgtga

SEQ ID NO: 64446 - DNA, 15 bp, Homo sapiens
gaagaaagagatgtg

SEQ ID NO: 64447 - DNA, 15 bp, Homo sapiens
agaagaaagagatgt

SEQ ID NO: 64448 - DNA, 15 bp, Homo sapiens
cagaagaaagagatg

SEQ ID NO: 64449 - DNA, 15 bp, Homo sapiens
acagaagaaagagat

SEQ ID NO: 64450 - DNA, 15 bp, Homo sapiens
aacagaagaaagaga

SEQ ID NO: 64451 - DNA, 15 bp, Homo sapiens
aaacagaagaaagag

SEQ ID NO: 64452 - DNA, 15 bp, Homo sapiens
gaaacagaagaaaga

SEQ ID NO: 64453 - DNA, 15 bp, Homo sapiens
ggaaacagaagaaag

SEQ ID NO: 64454 - DNA, 15 bp, Homo sapiens
tggaaacagaagaaa

SEQ ID NO: 64455 - DNA, 15 bp, Homo sapiens
atggaaacagaagaa

SEQ ID NO: 64456 - DNA, 15 bp, Homo sapiens
aatggaaacagaaga

SEQ ID NO: 64457 - DNA, 15 bp, Homo sapiens
aaatggaaacagaag

SEQ ID NO: 64458 - DNA, 15 bp, Homo sapiens
taaatggaaacagaa

SEQ ID NO: 64459 - DNA, 15 bp, Homo sapiens
ataaatggaaacaga

SEQ ID NO: 64460 - DNA, 15 bp, Homo sapiens
tataaatggaaacag

SEQ ID NO: 64461 - DNA, 15 bp, Homo sapiens
gtataaatggaaaca

SEQ ID NO: 64462 - DNA, 15 bp, Homo sapiens
ggtataaatggaaac

SEQ ID NO: 64463 - DNA, 15 bp, Homo sapiens
cggtataaatggaaa

SEQ ID NO: 64464 - DNA, 15 bp, Homo sapiens
gcggtataaatggaa

SEQ ID NO: 64465 - DNA, 15 bp, Homo sapiens
agcggtataaatgga

SEQ ID NO: 64466 - DNA, 15 bp, Homo sapiens
cagcggtataaatgg

SEQ ID NO: 64467 - DNA, 15 bp, Homo sapiens
acagcggtataaatg

SEQ ID NO: 64468 - DNA, 15 bp, Homo sapiens
aacagcggtataaat

SEQ ID NO: 64469 - DNA, 15 bp, Homo sapiens
caacagcggtataaa

SEQ ID NO: 64470 - DNA, 15 bp, Homo sapiens
gcaacagcggtataa

SEQ ID NO: 64471 - DNA, 15 bp, Homo sapiens
ggcaacagcggtata

SEQ ID NO: 64472 - DNA, 15 bp, Homo sapiens
tggcaacagcggtat

SEQ ID NO: 64473 - DNA, 15 bp, Homo sapiens
gtggcaacagcggta

SEQ ID NO: 64474 - DNA, 15 bp, Homo sapiens
tgtggcaacagcggt

SEQ ID NO: 64475 - DNA, 15 bp, Homo sapiens
ctgtggcaacagcgg

SEQ ID NO: 64476 - DNA, 15 bp, Homo sapiens
gctgtggcaacagcg

SEQ ID NO: 64477 - DNA, 15 bp, Homo sapiens
ggctgtggcaacagc

SEQ ID NO: 64478 - DNA, 15 bp, Homo sapiens
gggctgtggcaacag

SEQ ID NO: 64479 - DNA, 15 bp, Homo sapiens
tgggctgtggcaaca

SEQ ID NO: 64480 - DNA, 15 bp, Homo sapiens
ctgggctgtggcaac

SEQ ID NO: 64481 - DNA, 15 bp, Homo sapiens
cctgggctgtggcaa

SEQ ID NO: 64482 - DNA, 15 bp, Homo sapiens
ccctgggctgtggca

SEQ ID NO: 64483 - DNA, 15 bp, Homo sapiens
accctgggctgtggc

SEQ ID NO: 64484 - DNA, 15 bp, Homo sapiens
gaccctgggctgtgg

SEQ ID NO: 64485 - DNA, 15 bp, Homo sapiens
ggaccctgggctgtg

SEQ ID NO: 64486 - DNA, 15 bp, Homo sapiens
gggaccctgggctgt

SEQ ID NO: 64487 - DNA, 15 bp, Homo sapiens
tgggaccctgggctg

SEQ ID NO: 64488 - DNA, 15 bp, Homo sapiens
atgggaccctgggct

SEQ ID NO: 64489 - DNA, 15 bp, Homo sapiens
gatgggaccctgggc

SEQ ID NO: 64490 - DNA, 15 bp, Homo sapiens
tgatgggaccctggg

SEQ ID NO: 64491 - DNA, 15 bp, Homo sapiens
gtgatgggaccctgg

SEQ ID NO: 64492 - DNA, 15 bp, Homo sapiens
ggtgatgggaccctg

SEQ ID NO: 64493 - DNA, 15 bp, Homo sapiens
aggtgatgggaccct

SEQ ID NO: 64494 - DNA, 15 bp, Homo sapiens
gaggtgatgggaccc

SEQ ID NO: 64495 - DNA, 15 bp, Homo sapiens
tgaggtgatgggacc

SEQ ID NO: 64496 - DNA, 15 bp, Homo sapiens
gtgaggtgatgggac

SEQ ID NO: 64497 - DNA, 15 bp, Homo sapiens
tgtgaggtgatggga

SEQ ID NO: 64498 - DNA, 15 bp, Homo sapiens
gtgtgaggtgatggg

SEQ ID NO: 64499 - DNA, 15 bp, Homo sapiens
agtgtgaggtgatgg

SEQ ID NO: 64500 - DNA, 15 bp, Homo sapiens
aagtgtgaggtgatg

SEQ ID NO: 64501 - DNA, 15 bp, Homo sapiens
caagtgtgaggtgat

SEQ ID NO: 64502 - DNA, 15 bp, Homo sapiens
tcaagtgtgaggtga

SEQ ID NO: 64503 - DNA, 15 bp, Homo sapiens
atcaagtgtgaggtg

SEQ ID NO: 64504 - DNA, 15 bp, Homo sapiens
gatcaagtgtgaggt

SEQ ID NO: 64505 - DNA, 15 bp, Homo sapiens
agatcaagtgtgagg

SEQ ID NO: 64506 - DNA, 15 bp, Homo sapiens
tagatcaagtgtgag

SEQ ID NO: 64507 - DNA, 15 bp, Homo sapiens
atagatcaagtgtga

SEQ ID NO: 64508 - DNA, 15 bp, Homo sapiens
aatagatcaagtgtg

SEQ ID NO: 64509 - DNA, 15 bp, Homo sapiens
caatagatcaagtgt

SEQ ID NO: 64510 - DNA, 15 bp, Homo sapiens
acaatagatcaagtg

SEQ ID NO: 64511 - DNA, 15 bp, Homo sapiens
tacaatagatcaagt

SEQ ID NO: 64512 - DNA, 15 bp, Homo sapiens
atacaatagatcaag

SEQ ID NO: 64513 - DNA, 15 bp, Homo sapiens
aatacaatagatcaa

SEQ ID NO: 64514 - DNA, 15 bp, Homo sapiens
taatacaatagatca

SEQ ID NO: 64515 - DNA, 15 bp, Homo sapiens
gtaatacaatagatc

SEQ ID NO: 64516 - DNA, 15 bp, Homo sapiens
tgtaatacaatagat

SEQ ID NO: 64517 - DNA, 15 bp, Homo sapiens
atgtaatacaataga

SEQ ID NO: 64518 - DNA, 15 bp, Homo sapiens
aatgtaatacaatag

SEQ ID NO: 64519 - DNA, 15 bp, Homo sapiens
gaatgtaatacaata

SEQ ID NO: 64520 - DNA, 15 bp, Homo sapiens
ggaatgtaatacaat

SEQ ID NO: 64521 - DNA, 15 bp, Homo sapiens
aggaatgtaatacaa

SEQ ID NO: 64522 - DNA, 15 bp, Homo sapiens
taggaatgtaataca

SEQ ID NO: 64523 - DNA, 15 bp, Homo sapiens
ttaggaatgtaatac

SEQ ID NO: 64524 - DNA, 15 bp, Homo sapiens
gttaggaatgtaata

SEQ ID NO: 64525 - DNA, 15 bp, Homo sapiens
agttaggaatgtaat

SEQ ID NO: 64526 - DNA, 15 bp, Homo sapiens
tagttaggaatgtaa

SEQ ID NO: 64527 - DNA, 15 bp, Homo sapiens
ctagttaggaatgta

SEQ ID NO: 64528 - DNA, 15 bp, Homo sapiens
actagttaggaatgt

SEQ ID NO: 64529 - DNA, 15 bp, Homo sapiens
gactagttaggaatg

SEQ ID NO: 64530 - DNA, 15 bp, Homo sapiens
agactagttaggaat

SEQ ID NO: 64531 - DNA, 15 bp, Homo sapiens
aagactagttaggaa

SEQ ID NO: 64532 - DNA, 15 bp, Homo sapiens
gaagactagttagga

SEQ ID NO: 64533 - DNA, 15 bp, Homo sapiens
ggaagactagttagg

SEQ ID NO: 64534 - DNA, 15 bp, Homo sapiens
gggaagactagttag

SEQ ID NO: 64535 - DNA, 15 bp, Homo sapiens
ggggaagactagtta

SEQ ID NO: 64536 - DNA, 15 bp, Homo sapiens
gggggaagactagtt

SEQ ID NO: 64537 - DNA, 15 bp, Homo sapiens
cgggggaagactagt

SEQ ID NO: 64538 - DNA, 15 bp, Homo sapiens
acgggggaagactag

SEQ ID NO: 64539 - DNA, 15 bp, Homo sapiens
aacgggggaagacta

SEQ ID NO: 64540 - DNA, 15 bp, Homo sapiens
aaacgggggaagact

SEQ ID NO: 64541 - DNA, 15 bp, Homo sapiens
gaaacgggggaagac

SEQ ID NO: 64542 - DNA, 15 bp, Homo sapiens
agaaacgggggaaga

SEQ ID NO: 64543 - DNA, 15 bp, Homo sapiens
tagaaacgggggaag

SEQ ID NO: 64544 - DNA, 15 bp, Homo sapiens
ttagaaacgggggaa

SEQ ID NO: 64545 - DNA, 15 bp, Homo sapiens
attagaaacggggga

SEQ ID NO: 64546 - DNA, 15 bp, Homo sapiens
gattagaaacggggg

SEQ ID NO: 64547 - DNA, 15 bp, Homo sapiens
agattagaaacgggg

SEQ ID NO: 64548 - DNA, 15 bp, Homo sapiens
cagattagaaacggg

SEQ ID NO: 64549 - DNA, 15 bp, Homo sapiens
acagattagaaacgg

SEQ ID NO: 64550 - DNA, 15 bp, Homo sapiens
aacagattagaaacg

SEQ ID NO: 64551 - DNA, 15 bp, Homo sapiens
gaacagattagaaac

SEQ ID NO: 64552 - DNA, 15 bp, Homo sapiens
agaacagattagaaa

SEQ ID NO: 64553 - DNA, 15 bp, Homo sapiens
gagaacagattagaa

SEQ ID NO: 64554 - DNA, 15 bp, Homo sapiens
ggagaacagattaga

SEQ ID NO: 64555 - DNA, 15 bp, Homo sapiens
cggagaacagattag

SEQ ID NO: 64556 - DNA, 15 bp, Homo sapiens
tcggagaacagatta

SEQ ID NO: 64557 - DNA, 15 bp, Homo sapiens
atcggagaacagatt

SEQ ID NO: 64558 - DNA, 15 bp, Homo sapiens
tatcggagaacagat

SEQ ID NO: 64559 - DNA, 15 bp, Homo sapiens
ttatcggagaacaga

SEQ ID NO: 64560 - DNA, 15 bp, Homo sapiens
tttatcggagaacag

SEQ ID NO: 64561 - DNA, 15 bp, Homo sapiens
ttttatcggagaaca

SEQ ID NO: 64562 - DNA, 15 bp, Homo sapiens
cttttatcggagaac

SEQ ID NO: 64563 - DNA, 15 bp, Homo sapiens
gcttttatcggagaa

SEQ ID NO: 64564 - DNA, 15 bp, Homo sapiens
agcttttatcggaga

SEQ ID NO: 64565 - DNA, 15 bp, Homo sapiens
cagcttttatcggag

SEQ ID NO: 64566 - DNA, 15 bp, Homo sapiens
gcagcttttatcgga

SEQ ID NO: 64567 - DNA, 15 bp, Homo sapiens
tgcagcttttatcgg

SEQ ID NO: 64568 - DNA, 15 bp, Homo sapiens
gtgcagcttttatcg

SEQ ID NO: 64569 - DNA, 15 bp, Homo sapiens
tgtgcagcttttatc

SEQ ID NO: 64570 - DNA, 15 bp, Homo sapiens
atgtgcagcttttat

SEQ ID NO: 64571 - DNA, 15 bp, Homo sapiens
gatgtgcagctttta

SEQ ID NO: 64572 - DNA, 15 bp, Homo sapiens
tgatgtgcagctttt

SEQ ID NO: 64573 - DNA, 15 bp, Homo sapiens
atgatgtgcagcttt

SEQ ID NO: 64574 - DNA, 15 bp, Homo sapiens
aatgatgtgcagctt

SEQ ID NO: 64575 - DNA, 15 bp, Homo sapiens
aaatgatgtgcagct

SEQ ID NO: 64576 - DNA, 15 bp, Homo sapiens
aaaatgatgtgcagc

SEQ ID NO: 64577 - DNA, 15 bp, Homo sapiens
gaaaatgatgtgcag

SEQ ID NO: 64578 - DNA, 15 bp, Homo sapiens
tgaaaatgatgtgca

SEQ ID NO: 64579 - DNA, 15 bp, Homo sapiens
ctgaaaatgatgtgc

SEQ ID NO: 64580 - DNA, 15 bp, Homo sapiens
cctgaaaatgatgtg

SEQ ID NO: 64581 - DNA, 15 bp, Homo sapiens
tcctgaaaatgatgt

SEQ ID NO: 64582 - DNA, 15 bp, Homo sapiens
atcctgaaaatgatg

SEQ ID NO: 64583 - DNA, 15 bp, Homo sapiens
tatcctgaaaatgat

SEQ ID NO: 64584 - DNA, 15 bp, Homo sapiens
ttatcctgaaaatga

SEQ ID NO: 64585 - DNA, 15 bp, Homo sapiens
attatcctgaaaatg

SEQ ID NO: 64586 - DNA, 15 bp, Homo sapiens
gattatcctgaaaat

SEQ ID NO: 64587 - DNA, 15 bp, Homo sapiens
tgattatcctgaaaa

SEQ ID NO: 64588 - DNA, 15 bp, Homo sapiens
atgattatcctgaaa

SEQ ID NO: 64589 - DNA, 15 bp, Homo sapiens
gatgattatcctgaa

SEQ ID NO: 64590 - DNA, 15 bp, Homo sapiens
tgatgattatcctga

SEQ ID NO: 64591 - DNA, 15 bp, Homo sapiens
ctgatgattatcctg

SEQ ID NO: 64592 - DNA, 15 bp, Homo sapiens
actgatgattatcct

SEQ ID NO: 64593 - DNA, 15 bp, Homo sapiens
gactgatgattatcc

SEQ ID NO: 64594 - DNA, 15 bp, Homo sapiens
cgactgatgattatc

SEQ ID NO: 64595 - DNA, 15 bp, Homo sapiens
gcgactgatgattat

SEQ ID NO: 64596 - DNA, 15 bp, Homo sapiens
ggcgactgatgatta

SEQ ID NO: 64597 - DNA, 15 bp, Homo sapiens
aggcgactgatgatt

SEQ ID NO: 64598 - DNA, 15 bp, Homo sapiens
caggcgactgatgat

SEQ ID NO: 64599 - DNA, 15 bp, Homo sapiens
gcaggcgactgatga

SEQ ID NO: 64600 - DNA, 15 bp, Homo sapiens
ggcaggcgactgatg

SEQ ID NO: 64601 - DNA, 15 bp, Homo sapiens
aggcaggcgactgat

SEQ ID NO: 64602 - DNA, 15 bp, Homo sapiens
taggcaggcgactga

SEQ ID NO: 64603 - DNA, 15 bp, Homo sapiens
ttaggcaggcgactg

SEQ ID NO: 64604 - DNA, 15 bp, Homo sapiens
tttaggcaggcgact

SEQ ID NO: 64605 - DNA, 15 bp, Homo sapiens
ttttaggcaggcgac

SEQ ID NO: 64606 - DNA, 15 bp, Homo sapiens
gttttaggcaggcga

SEQ ID NO: 64607 - DNA, 15 bp, Homo sapiens
agttttaggcaggcg

SEQ ID NO: 64608 - DNA, 15 bp, Homo sapiens
aagttttaggcaggc

SEQ ID NO: 64609 - DNA, 15 bp, Homo sapiens
aaagttttaggcagg

SEQ ID NO: 64610 - DNA, 15 bp, Homo sapiens
aaaagttttaggcag

SEQ ID NO: 64611 - DNA, 15 bp, Homo sapiens
gaaaagttttaggca

SEQ ID NO: 64612 - DNA, 15 bp, Homo sapiens
tgaaaagttttaggc

SEQ ID NO: 64613 - DNA, 15 bp, Homo sapiens
ttgaaaagttttagg

SEQ ID NO: 64614 - DNA, 15 bp, Homo sapiens
attgaaaagttttag

SEQ ID NO: 64615 - DNA, 15 bp, Homo sapiens
cattgaaaagtttta

SEQ ID NO: 64616 - DNA, 15 bp, Homo sapiens
acattgaaaagtttt

SEQ ID NO: 64617 - DNA, 15 bp, Homo sapiens
gacattgaaaagttt

SEQ ID NO: 64618 - DNA, 15 bp, Homo sapiens
agacattgaaaagtt

SEQ ID NO: 64619 - DNA, 15 bp, Homo sapiens
aagacattgaaaagt

SEQ ID NO: 64620 - DNA, 15 bp, Homo sapiens
gaagacattgaaaag

SEQ ID NO: 64621 - DNA, 15 bp, Homo sapiens
ggaagacattgaaaa

SEQ ID NO: 64622 - DNA, 15 bp, Homo sapiens
gggaagacattgaaa

SEQ ID NO: 64623 - DNA, 15 bp, Homo sapiens
tgggaagacattgaa

SEQ ID NO: 64624 - DNA, 15 bp, Homo sapiens
atgggaagacattga

SEQ ID NO: 64625 - DNA, 15 bp, Homo sapiens
aatgggaagacattg

SEQ ID NO: 64626 - DNA, 15 bp, Homo sapiens
caatgggaagacatt

SEQ ID NO: 64627 - DNA, 15 bp, Homo sapiens
acaatgggaagacat

SEQ ID NO: 64628 - DNA, 15 bp, Homo sapiens
gacaatgggaagaca

SEQ ID NO: 64629 - DNA, 15 bp, Homo sapiens
agacaatgggaagac

SEQ ID NO: 64630 - DNA, 15 bp, Homo sapiens
aagacaatgggaaga

SEQ ID NO: 64631 - DNA, 15 bp, Homo sapiens
aaagacaatgggaag

SEQ ID NO: 64632 - DNA, 15 bp, Homo sapiens
taaagacaatgggaa

SEQ ID NO: 64633 - DNA, 15 bp, Homo sapiens
ctaaagacaatggga

SEQ ID NO: 64634 - DNA, 15 bp, Homo sapiens
tctaaagacaatggg

SEQ ID NO: 64635 - DNA, 15 bp, Homo sapiens
ttctaaagacaatgg

SEQ ID NO: 64636 - DNA, 15 bp, Homo sapiens
attctaaagacaatg

SEQ ID NO: 64637 - DNA, 15 bp, Homo sapiens
tattctaaagacaat

SEQ ID NO: 64638 - DNA, 15 bp, Homo sapiens
ttattctaaagacaa

SEQ ID NO: 64639 - DNA, 15 bp, Homo sapiens
tttattctaaagaca

SEQ ID NO: 64640 - DNA, 15 bp, Homo sapiens
ctttattctaaagac

SEQ ID NO: 64641 - DNA, 15 bp, Homo sapiens
actttattctaaaga

SEQ ID NO: 64642 - DNA, 15 bp, Homo sapiens
aactttattctaaag

SEQ ID NO: 64643 - DNA, 15 bp, Homo sapiens
gaactttattctaaa

SEQ ID NO: 64644 - DNA, 15 bp, Homo sapiens
tgaactttattctaa

SEQ ID NO: 64645 - DNA, 15 bp, Homo sapiens
ttgaactttattcta

SEQ ID NO: 64646 - DNA, 15 bp, Homo sapiens
tttgaactttattct

SEQ ID NO: 64647 - DNA, 15 bp, Homo sapiens
ctttgaactttattc

SEQ ID NO: 64648 - DNA, 15 bp, Homo sapiens
actttgaactttatt

SEQ ID NO: 64649 - DNA, 15 bp, Homo sapiens
gactttgaactttat

SEQ ID NO: 64650 - DNA, 15 bp, Homo sapiens
agactttgaacttta

SEQ ID NO: 64651 - DNA, 15 bp, Homo sapiens
aagactttgaacttt

SEQ ID NO: 64652 - DNA, 15 bp, Homo sapiens
gaagactttgaactt

SEQ ID NO: 64653 - DNA, 15 bp, Homo sapiens
tgaagactttgaact

SEQ ID NO: 64654 - DNA, 15 bp, Homo sapiens
ttgaagactttgaac

SEQ ID NO: 64655 - DNA, 15 bp, Homo sapiens
tttgaagactttgaa

SEQ ID NO: 64656 - DNA, 15 bp, Homo sapiens
atttgaagactttga

SEQ ID NO: 64657 - DNA, 15 bp, Homo sapiens
catttgaagactttg

SEQ ID NO: 64658 - DNA, 15 bp, Homo sapiens
tcatttgaagacttt

SEQ ID NO: 64659 - DNA, 15 bp, Homo sapiens
gtcatttgaagactt

SEQ ID NO: 64660 - DNA, 15 bp, Homo sapiens
ggtcatttgaagact

SEQ ID NO: 64661 - DNA, 15 bp, Homo sapiens
gggtcatttgaagac

SEQ ID NO: 64662 - DNA, 15 bp, Homo sapiens
ggggtcatttgaaga

SEQ ID NO: 64663 - DNA, 15 bp, Homo sapiens
tggggtcatttgaag

SEQ ID NO: 64664 - DNA, 15 bp, Homo sapiens
ttggggtcatttgaa

SEQ ID NO: 64665 - DNA, 15 bp, Homo sapiens
cttggggtcatttga

SEQ ID NO: 64666 - DNA, 15 bp, Homo sapiens
gcttggggtcatttg

SEQ ID NO: 64667 - DNA, 15 bp, Homo sapiens
tgcttggggtcattt

SEQ ID NO: 64668 - DNA, 15 bp, Homo sapiens
ttgcttggggtcatt

SEQ ID NO: 64669 - DNA, 15 bp, Homo sapiens
cttgcttggggtcat

SEQ ID NO: 64670 - DNA, 15 bp, Homo sapiens
tcttgcttggggtca

SEQ ID NO: 64671 - DNA, 15 bp, Homo sapiens
atcttgcttggggtc

SEQ ID NO: 64672 - DNA, 15 bp, Homo sapiens
tatcttgcttggggt

SEQ ID NO: 64673 - DNA, 15 bp, Homo sapiens
ttatcttgcttgggg

SEQ ID NO: 64674 - DNA, 15 bp, Homo sapiens
gttatcttgcttggg

SEQ ID NO: 64675 - DNA, 15 bp, Homo sapiens
agttatcttgcttgg

SEQ ID NO: 64676 - DNA, 15 bp, Homo sapiens
aagttatcttgcttg

SEQ ID NO: 64677 - DNA, 15 bp, Homo sapiens
aaagttatcttgctt

SEQ ID NO: 64678 - DNA, 15 bp, Homo sapiens
aaaagttatcttgct

SEQ ID NO: 64679 - DNA, 15 bp, Homo sapiens
caaaagttatcttgc

SEQ ID NO: 64680 - DNA, 15 bp, Homo sapiens
acaaaagttatcttg

SEQ ID NO: 64681 - DNA, 15 bp, Homo sapiens
aacaaaagttatctt

SEQ ID NO: 64682 - DNA, 15 bp, Homo sapiens
aaacaaaagttatct

SEQ ID NO: 64683 - DNA, 15 bp, Homo sapiens
caaacaaaagttatc

SEQ ID NO: 64684 - DNA, 15 bp, Homo sapiens
gcaaacaaaagttat

SEQ ID NO: 64685 - DNA, 15 bp, Homo sapiens
ggcaaacaaaagtta

SEQ ID NO: 64686 - DNA, 15 bp, Homo sapiens
gggcaaacaaaagtt

SEQ ID NO: 64687 - DNA, 15 bp, Homo sapiens
ggggcaaacaaaagt

SEQ ID NO: 64688 - DNA, 15 bp, Homo sapiens
aggggcaaacaaaag

SEQ ID NO: 64689 - DNA, 15 bp, Homo sapiens
aaggggcaaacaaaa

SEQ ID NO: 64690 - DNA, 15 bp, Homo sapiens
aaaggggcaaacaaa

SEQ ID NO: 64691 - DNA, 15 bp, Homo sapiens
taaaggggcaaacaa

SEQ ID NO: 64692 - DNA, 15 bp, Homo sapiens
ctaaaggggcaaaca

SEQ ID NO: 64693 - DNA, 15 bp, Homo sapiens
tctaaaggggcaaac

SEQ ID NO: 64694 - DNA, 15 bp, Homo sapiens
atctaaaggggcaaa

SEQ ID NO: 64695 - DNA, 15 bp, Homo sapiens
gatctaaaggggcaa

SEQ ID NO: 64696 - DNA, 15 bp, Homo sapiens
ggatctaaaggggca

SEQ ID NO: 64697 - DNA, 15 bp, Homo sapiens
tggatctaaaggggc

SEQ ID NO: 64698 - DNA, 15 bp, Homo sapiens
atggatctaaagggg

SEQ ID NO: 64699 - DNA, 15 bp, Homo sapiens
aatggatctaaaggg

SEQ ID NO: 64700 - DNA, 15 bp, Homo sapiens
aaatggatctaaagg

SEQ ID NO: 64701 - DNA, 15 bp, Homo sapiens
aaaatggatctaaag

SEQ ID NO: 64702 - DNA, 15 bp, Homo sapiens
gaaaatggatctaaa

SEQ ID NO: 64703 - DNA, 15 bp, Homo sapiens
ggaaaatggatctaa

SEQ ID NO: 64704 - DNA, 15 bp, Homo sapiens
aggaaaatggatcta

SEQ ID NO: 64705 - DNA, 15 bp, Homo sapiens
caggaaaatggatct

SEQ ID NO: 64706 - DNA, 15 bp, Homo sapiens
gcaggaaaatggatc

SEQ ID NO: 64707 - DNA, 15 bp, Homo sapiens
agcaggaaaatggat

SEQ ID NO: 64708 - DNA, 15 bp, Homo sapiens
aagcaggaaaatgga

SEQ ID NO: 64709 - DNA, 15 bp, Homo sapiens
gaagcaggaaaatgg

SEQ ID NO: 64710 - DNA, 15 bp, Homo sapiens
agaagcaggaaaatg

SEQ ID NO: 64711 - DNA, 15 bp, Homo sapiens
gagaagcaggaaaat

SEQ ID NO: 64712 - DNA, 15 bp, Homo sapiens
agagaagcaggaaaa

SEQ ID NO: 64713 - DNA, 15 bp, Homo sapiens
tagagaagcaggaaa

SEQ ID NO: 64714 - DNA, 15 bp, Homo sapiens
gtagagaagcaggaa

SEQ ID NO: 64715 - DNA, 15 bp, Homo sapiens
ggtagagaagcagga

SEQ ID NO: 64716 - DNA, 15 bp, Homo sapiens
gggtagagaagcagg

SEQ ID NO: 64717 - DNA, 15 bp, Homo sapiens
agggtagagaagcag

SEQ ID NO: 64718 - DNA, 15 bp, Homo sapiens
cagggtagagaagca

SEQ ID NO: 64719 - DNA, 15 bp, Homo sapiens
gcagggtagagaagc

SEQ ID NO: 64720 - DNA, 15 bp, Homo sapiens
agcagggtagagaag

SEQ ID NO: 64721 - DNA, 15 bp, Homo sapiens
aagcagggtagagaa

SEQ ID NO: 64722 - DNA, 15 bp, Homo sapiens
gaagcagggtagaga

SEQ ID NO: 64723 - DNA, 15 bp, Homo sapiens
agaagcagggtagag

SEQ ID NO: 64724 - DNA, 15 bp, Homo sapiens
aagaagcagggtaga

SEQ ID NO: 64725 - DNA, 15 bp, Homo sapiens
caagaagcagggtag

SEQ ID NO: 64726 - DNA, 15 bp, Homo sapiens
acaagaagcagggta

SEQ ID NO: 64727 - DNA, 15 bp, Homo sapiens
aacaagaagcagggt

SEQ ID NO: 64728 - DNA, 15 bp, Homo sapiens
gaacaagaagcaggg

SEQ ID NO: 64729 - DNA, 15 bp, Homo sapiens
agaacaagaagcagg

SEQ ID NO: 64730 - DNA, 15 bp, Homo sapiens
cagaacaagaagcag

SEQ ID NO: 64731 - DNA, 15 bp, Homo sapiens
acagaacaagaagca

SEQ ID NO: 64732 - DNA, 15 bp, Homo sapiens
cacagaacaagaagc

SEQ ID NO: 64733 - DNA, 15 bp, Homo sapiens
tcacagaacaagaag

SEQ ID NO: 64734 - DNA, 15 bp, Homo sapiens
ctcacagaacaagaa

SEQ ID NO: 64735 - DNA, 15 bp, Homo sapiens
cctcacagaacaaga

SEQ ID NO: 64736 - DNA, 15 bp, Homo sapiens
acctcacagaacaag

SEQ ID NO: 64737 - DNA, 15 bp, Homo sapiens
cacctcacagaacaa

SEQ ID NO: 64738 - DNA, 15 bp, Homo sapiens
tcacctcacagaaca

SEQ ID NO: 64739 - DNA, 15 bp, Homo sapiens
ctcacctcacagaac

SEQ ID NO: 64740 - DNA, 15 bp, Homo sapiens
gctcacctcacagaa

SEQ ID NO: 64741 - DNA, 15 bp, Homo sapiens
agctcacctcacaga

SEQ ID NO: 64742 - DNA, 15 bp, Homo sapiens
aagctcacctcacag

SEQ ID NO: 64743 - DNA, 15 bp, Homo sapiens
caagctcacctcaca

SEQ ID NO: 64744 - DNA, 15 bp, Homo sapiens
acaagctcacctcac

SEQ ID NO: 64745 - DNA, 15 bp, Homo sapiens
tacaagctcacctca

SEQ ID NO: 64746 - DNA, 15 bp, Homo sapiens
atacaagctcacctc

SEQ ID NO: 64747 - DNA, 15 bp, Homo sapiens
tatacaagctcacct

SEQ ID NO: 64748 - DNA, 15 bp, Homo sapiens
ctatacaagctcacc

SEQ ID NO: 64749 - DNA, 15 bp, Homo sapiens
tctatacaagctcac

SEQ ID NO: 64750 - DNA, 15 bp, Homo sapiens
ttctatacaagctca

SEQ ID NO: 64751 - DNA, 15 bp, Homo sapiens
attctatacaagctc

SEQ ID NO: 64752 - DNA, 15 bp, Homo sapiens
tattctatacaagct

SEQ ID NO: 64753 - DNA, 15 bp, Homo sapiens
gtattctatacaagc

SEQ ID NO: 64754 - DNA, 15 bp, Homo sapiens
tgtattctatacaag

SEQ ID NO: 64755 - DNA, 15 bp, Homo sapiens
atgtattctatacaa

SEQ ID NO: 64756 - DNA, 15 bp, Homo sapiens
gatgtattctataca

SEQ ID NO: 64757 - DNA, 15 bp, Homo sapiens
tgatgtattctatac

SEQ ID NO: 64758 - DNA, 15 bp, Homo sapiens
ttgatgtattctata

SEQ ID NO: 64759 - DNA, 15 bp, Homo sapiens
gttgatgtattctat

SEQ ID NO: 64760 - DNA, 15 bp, Homo sapiens
tgttgatgtattcta

SEQ ID NO: 64761 - DNA, 15 bp, Homo sapiens
ctgttgatgtattct

SEQ ID NO: 64762 - DNA, 15 bp, Homo sapiens
cctgttgatgtattc

SEQ ID NO: 64763 - DNA, 15 bp, Homo sapiens
acctgttgatgtatt

SEQ ID NO: 64764 - DNA, 15 bp, Homo sapiens
aacctgttgatgtat

SEQ ID NO: 64765 - DNA, 15 bp, Homo sapiens
taacctgttgatgta

SEQ ID NO: 64766 - DNA, 15 bp, Homo sapiens
gtaacctgttgatgt

SEQ ID NO: 64767 - DNA, 15 bp, Homo sapiens
ggtaacctgttgatg

SEQ ID NO: 64768 - DNA, 15 bp, Homo sapiens
aggtaacctgttgat

SEQ ID NO: 64769 - DNA, 15 bp, Homo sapiens
aaggtaacctgttga

SEQ ID NO: 64770 - DNA, 15 bp, Homo sapiens
caaggtaacctgttg

SEQ ID NO: 64771 - DNA, 15 bp, Homo sapiens
acaaggtaacctgtt

SEQ ID NO: 64772 - DNA, 15 bp, Homo sapiens
gacaaggtaacctgt

SEQ ID NO: 64773 - DNA, 15 bp, Homo sapiens
ggacaaggtaacctg

SEQ ID NO: 64774 - DNA, 15 bp, Homo sapiens
aggacaaggtaacct

SEQ ID NO: 64775 - DNA, 15 bp, Homo sapiens
gaggacaaggtaacc

SEQ ID NO: 64776 - DNA, 15 bp, Homo sapiens
ggaggacaaggtaac

SEQ ID NO: 64777 - DNA, 15 bp, Homo sapiens
tggaggacaaggtaa

SEQ ID NO: 64778 - DNA, 15 bp, Homo sapiens
ctggaggacaaggta

SEQ ID NO: 64779 - DNA, 15 bp, Homo sapiens
gctggaggacaaggt

SEQ ID NO: 64780 - DNA, 15 bp, Homo sapiens
agctggaggacaagg

SEQ ID NO: 64781 - DNA, 15 bp, Homo sapiens
aagctggaggacaag

SEQ ID NO: 64782 - DNA, 15 bp, Homo sapiens
aaagctggaggacaa

SEQ ID NO: 64783 - DNA, 15 bp, Homo sapiens
aaaagctggaggaca

SEQ ID NO: 64784 - DNA, 15 bp, Homo sapiens
caaaagctggaggac

SEQ ID NO: 64785 - DNA, 15 bp, Homo sapiens
ccaaaagctggagga

SEQ ID NO: 64786 - DNA, 15 bp, Homo sapiens
accaaaagctggagg

SEQ ID NO: 64787 - DNA, 15 bp, Homo sapiens
aaccaaaagctggag

SEQ ID NO: 64788 - DNA, 15 bp, Homo sapiens
caaccaaaagctgga

SEQ ID NO: 64789 - DNA, 15 bp, Homo sapiens
ccaaccaaaagctgg

SEQ ID NO: 64790 - DNA, 15 bp, Homo sapiens
tccaaccaaaagctg

SEQ ID NO: 64791 - DNA, 15 bp, Homo sapiens
atccaaccaaaagct

SEQ ID NO: 64792 - DNA, 15 bp, Homo sapiens
aatccaaccaaaagc

SEQ ID NO: 64793 - DNA, 15 bp, Homo sapiens
aaatccaaccaaaag

SEQ ID NO: 64794 - DNA, 15 bp, Homo sapiens
gaaatccaaccaaaa

SEQ ID NO: 64795 - DNA, 15 bp, Homo sapiens
tgaaatccaaccaaa

SEQ ID NO: 64796 - DNA, 15 bp, Homo sapiens
gtgaaatccaaccaa

SEQ ID NO: 64797 - DNA, 15 bp, Homo sapiens
ggtgaaatccaacca

SEQ ID NO: 64798 - DNA, 15 bp, Homo sapiens
tggtgaaatccaacc

SEQ ID NO: 64799 - DNA, 15 bp, Homo sapiens
ttggtgaaatccaac

SEQ ID NO: 64800 - DNA, 15 bp, Homo sapiens
gttggtgaaatccaa

SEQ ID NO: 64801 - DNA, 15 bp, Homo sapiens
tgttggtgaaatcca

SEQ ID NO: 64802 - DNA, 15 bp, Homo sapiens
ctgttggtgaaatcc

SEQ ID NO: 64803 - DNA, 15 bp, Homo sapiens
cctgttggtgaaatc

SEQ ID NO: 64804 - DNA, 15 bp, Homo sapiens
ccctgttggtgaaat

SEQ ID NO: 64805 - DNA, 15 bp, Homo sapiens
tccctgttggtgaaa

SEQ ID NO: 64806 - DNA, 15 bp, Homo sapiens
ctccctgttggtgaa

SEQ ID NO: 64807 - DNA, 15 bp, Homo sapiens
gctccctgttggtga

SEQ ID NO: 64808 - DNA, 15 bp, Homo sapiens
tgctccctgttggtg

SEQ ID NO: 64809 - DNA, 15 bp, Homo sapiens
gtgctccctgttggt

SEQ ID NO: 64810 - DNA, 15 bp, Homo sapiens
agtgctccctgttgg

SEQ ID NO: 64811 - DNA, 15 bp, Homo sapiens
cagtgctccctgttg

SEQ ID NO: 64812 - DNA, 15 bp, Homo sapiens
ccagtgctccctgtt

SEQ ID NO: 64813 - DNA, 15 bp, Homo sapiens
gccagtgctccctgt

SEQ ID NO: 64814 - DNA, 15 bp, Homo sapiens
tgccagtgctccctg

SEQ ID NO: 64815 - DNA, 15 bp, Homo sapiens
ttgccagtgctccct

SEQ ID NO: 64816 - DNA, 15 bp, Homo sapiens
tttgccagtgctccc

SEQ ID NO: 64817 - DNA, 15 bp, Homo sapiens
ttttgccagtgctcc

SEQ ID NO: 64818 - DNA, 15 bp, Homo sapiens
cttttgccagtgctc

SEQ ID NO: 64819 - DNA, 15 bp, Homo sapiens
tcttttgccagtgct

SEQ ID NO: 64820 - DNA, 15 bp, Homo sapiens
atcttttgccagtgc

SEQ ID NO: 64821 - DNA, 15 bp, Homo sapiens
aatcttttgccagtg

SEQ ID NO: 64822 - DNA, 15 bp, Homo sapiens
caatcttttgccagt

SEQ ID NO: 64823 - DNA, 15 bp, Homo sapiens
ccaatcttttgccag

SEQ ID NO: 64824 - DNA, 15 bp, Homo sapiens
gccaatcttttgcca

SEQ ID NO: 64825 - DNA, 15 bp, Homo sapiens
tgccaatcttttgcc

SEQ ID NO: 64826 - DNA, 15 bp, Homo sapiens
atgccaatcttttgc

SEQ ID NO: 64827 - DNA, 15 bp, Homo sapiens
tatgccaatcttttg

SEQ ID NO: 64828 - DNA, 15 bp, Homo sapiens
atatgccaatctttt

SEQ ID NO: 64829 - DNA, 15 bp, Homo sapiens
aatatgccaatcttt

SEQ ID NO: 64830 - DNA, 15 bp, Homo sapiens
aaatatgccaatctt

SEQ ID NO: 64831 - DNA, 15 bp, Homo sapiens
taaatatgccaatct

SEQ ID NO: 64832 - DNA, 15 bp, Homo sapiens
ataaatatgccaatc

SEQ ID NO: 64833 - DNA, 15 bp, Homo sapiens
aataaatatgccaat

SEQ ID NO: 64834 - DNA, 15 bp, Homo sapiens
gaataaatatgccaa

SEQ ID NO: 64835 - DNA, 15 bp, Homo sapiens
agaataaatatgcca

SEQ ID NO: 64836 - DNA, 15 bp, Homo sapiens
aagaataaatatgcc

SEQ ID NO: 64837 - DNA, 15 bp, Homo sapiens
gaagaataaatatgc

SEQ ID NO: 64838 - DNA, 15 bp, Homo sapiens
agaagaataaatatg

SEQ ID NO: 64839 - DNA, 15 bp, Homo sapiens
cagaagaataaatat

SEQ ID NO: 64840 - DNA, 15 bp, Homo sapiens
tcagaagaataaata

SEQ ID NO: 64841 - DNA, 15 bp, Homo sapiens
gtcagaagaataaat

SEQ ID NO: 64842 - DNA, 15 bp, Homo sapiens
agtcagaagaataaa

SEQ ID NO: 64843 - DNA, 15 bp, Homo sapiens
aagtcagaagaataa

SEQ ID NO: 64844 - DNA, 15 bp, Homo sapiens
aaagtcagaagaata

SEQ ID NO: 64845 - DNA, 15 bp, Homo sapiens
gaaagtcagaagaat

SEQ ID NO: 64846 - DNA, 15 bp, Homo sapiens
agaaagtcagaagaa

SEQ ID NO: 64847 - DNA, 15 bp, Homo sapiens
gagaaagtcagaaga

SEQ ID NO: 64848 - DNA, 15 bp, Homo sapiens
ggagaaagtcagaag

SEQ ID NO: 64849 - DNA, 15 bp, Homo sapiens
aggagaaagtcagaa

SEQ ID NO: 64850 - DNA, 15 bp, Homo sapiens
aaggagaaagtcaga

SEQ ID NO: 64851 - DNA, 15 bp, Homo sapiens
caaggagaaagtcag

SEQ ID NO: 64852 - DNA, 15 bp, Homo sapiens
gcaaggagaaagtca

SEQ ID NO: 64853 - DNA, 15 bp, Homo sapiens
tgcaaggagaaagtc

SEQ ID NO: 64854 - DNA, 15 bp, Homo sapiens
ctgcaaggagaaagt

SEQ ID NO: 64855 - DNA, 15 bp, Homo sapiens
tctgcaaggagaaag

SEQ ID NO: 64856 - DNA, 15 bp, Homo sapiens
ctctgcaaggagaaa

SEQ ID NO: 64857 - DNA, 15 bp, Homo sapiens
cctctgcaaggagaa

SEQ ID NO: 64858 - DNA, 15 bp, Homo sapiens
tcctctgcaaggaga

SEQ ID NO: 64859 - DNA, 15 bp, Homo sapiens
ctcctctgcaaggag

SEQ ID NO: 64860 - DNA, 15 bp, Homo sapiens
actcctctgcaagga

SEQ ID NO: 64861 - DNA, 15 bp, Homo sapiens
aactcctctgcaagg

SEQ ID NO: 64862 - DNA, 15 bp, Homo sapiens
gaactcctctgcaag

SEQ ID NO: 64863 - DNA, 15 bp, Homo sapiens
tgaactcctctgcaa

SEQ ID NO: 64864 - DNA, 15 bp, Homo sapiens
gtgaactcctctgca

SEQ ID NO: 64865 - DNA, 15 bp, Homo sapiens
agtgaactcctctgc

SEQ ID NO: 64866 - DNA, 15 bp, Homo sapiens
cagtgaactcctctg

SEQ ID NO: 64867 - DNA, 15 bp, Homo sapiens
acagtgaactcctct

SEQ ID NO: 64868 - DNA, 15 bp, Homo sapiens
tacagtgaactcctc

SEQ ID NO: 64869 - DNA, 15 bp, Homo sapiens
atacagtgaactcct

SEQ ID NO: 64870 - DNA, 15 bp, Homo sapiens
gatacagtgaactcc

SEQ ID NO: 64871 - DNA, 15 bp, Homo sapiens
agatacagtgaactc

SEQ ID NO: 64872 - DNA, 15 bp, Homo sapiens
gagatacagtgaact

SEQ ID NO: 64873 - DNA, 15 bp, Homo sapiens
ggagatacagtgaac

SEQ ID NO: 64874 - DNA, 15 bp, Homo sapiens
gggagatacagtgaa

SEQ ID NO: 64875 - DNA, 15 bp, Homo sapiens
ggggagatacagtga

SEQ ID NO: 64876 - DNA, 15 bp, Homo sapiens
tggggagatacagtg

SEQ ID NO: 64877 - DNA, 15 bp, Homo sapiens
gtggggagatacagt

SEQ ID NO: 64878 - DNA, 15 bp, Homo sapiens
agtggggagatacag

SEQ ID NO: 64879 - DNA, 15 bp, Homo sapiens
aagtggggagataca

SEQ ID NO: 64880 - DNA, 15 bp, Homo sapiens
taagtggggagatac

SEQ ID NO: 64881 - DNA, 15 bp, Homo sapiens
ttaagtggggagata

SEQ ID NO: 64882 - DNA, 15 bp, Homo sapiens
cttaagtggggagat

SEQ ID NO: 64883 - DNA, 15 bp, Homo sapiens
ccttaagtggggaga

SEQ ID NO: 64884 - DNA, 15 bp, Homo sapiens
accttaagtggggag

SEQ ID NO: 64885 - DNA, 15 bp, Homo sapiens
gaccttaagtgggga

SEQ ID NO: 64886 - DNA, 15 bp, Homo sapiens
tgaccttaagtgggg

SEQ ID NO: 64887 - DNA, 15 bp, Homo sapiens
gtgaccttaagtggg

SEQ ID NO: 64888 - DNA, 15 bp, Homo sapiens
agtgaccttaagtgg

SEQ ID NO: 64889 - DNA, 15 bp, Homo sapiens
cagtgaccttaagtg

SEQ ID NO: 64890 - DNA, 15 bp, Homo sapiens
acagtgaccttaagt

SEQ ID NO: 64891 - DNA, 15 bp, Homo sapiens
aacagtgaccttaag

SEQ ID NO: 64892 - DNA, 15 bp, Homo sapiens
aaacagtgaccttaa

SEQ ID NO: 64893 - DNA, 15 bp, Homo sapiens
gaaacagtgacctta

SEQ ID NO: 64894 - DNA, 15 bp, Homo sapiens
ggaaacagtgacctt

SEQ ID NO: 64895 - DNA, 15 bp, Homo sapiens
gggaaacagtgacct

SEQ ID NO: 64896 - DNA, 15 bp, Homo sapiens
agggaaacagtgacc

SEQ ID NO: 64897 - DNA, 15 bp, Homo sapiens
gagggaaacagtgac

SEQ ID NO: 64898 - DNA, 15 bp, Homo sapiens
tgagggaaacagtga

SEQ ID NO: 64899 - DNA, 15 bp, Homo sapiens
ctgagggaaacagtg

SEQ ID NO: 64900 - DNA, 15 bp, Homo sapiens
tctgagggaaacagt

SEQ ID NO: 64901 - DNA, 15 bp, Homo sapiens
ctctgagggaaacag

SEQ ID NO: 64902 - DNA, 15 bp, Homo sapiens
actctgagggaaaca

SEQ ID NO: 64903 - DNA, 15 bp, Homo sapiens
cactctgagggaaac

SEQ ID NO: 64904 - DNA, 15 bp, Homo sapiens
ccactctgagggaaa

SEQ ID NO: 64905 - DNA, 15 bp, Homo sapiens
gccactctgagggaa

SEQ ID NO: 64906 - DNA, 15 bp, Homo sapiens
agccactctgaggga

SEQ ID NO: 64907 - DNA, 15 bp, Homo sapiens
aagccactctgaggg

SEQ ID NO: 64908 - DNA, 15 bp, Homo sapiens
aaagccactctgagg

SEQ ID NO: 64909 - DNA, 15 bp, Homo sapiens
aaaagccactctgag

SEQ ID NO: 64910 - DNA, 15 bp, Homo sapiens
aaaaagccactctga

SEQ ID NO: 64911 - DNA, 15 bp, Homo sapiens
gaaaaagccactctg

SEQ ID NO: 64912 - DNA, 15 bp, Homo sapiens
agaaaaagccactct

SEQ ID NO: 64913 - DNA, 15 bp, Homo sapiens
tagaaaaagccactc

SEQ ID NO: 64914 - DNA, 15 bp, Homo sapiens
gtagaaaaagccact

SEQ ID NO: 64915 - DNA, 15 bp, Homo sapiens
ggtagaaaaagccac

SEQ ID NO: 64916 - DNA, 15 bp, Homo sapiens
aggtagaaaaagcca

SEQ ID NO: 64917 - DNA, 15 bp, Homo sapiens
caggtagaaaaagcc

SEQ ID NO: 64918 - DNA, 15 bp, Homo sapiens
acaggtagaaaaagc

SEQ ID NO: 64919 - DNA, 15 bp, Homo sapiens
tacaggtagaaaaag

SEQ ID NO: 64920 - DNA, 15 bp, Homo sapiens
gtacaggtagaaaaa

SEQ ID NO: 64921 - DNA, 15 bp, Homo sapiens
agtacaggtagaaaa

SEQ ID NO: 64922 - DNA, 15 bp, Homo sapiens
tagtacaggtagaaa

SEQ ID NO: 64923 - DNA, 15 bp, Homo sapiens
ctagtacaggtagaa

SEQ ID NO: 64924 - DNA, 15 bp, Homo sapiens
gctagtacaggtaga

SEQ ID NO: 64925 - DNA, 15 bp, Homo sapiens
agctagtacaggtag

SEQ ID NO: 64926 - DNA, 15 bp, Homo sapiens
tagctagtacaggta

SEQ ID NO: 64927 - DNA, 15 bp, Homo sapiens
gtagctagtacaggt

SEQ ID NO: 64928 - DNA, 15 bp, Homo sapiens
agtagctagtacagg

SEQ ID NO: 64929 - DNA, 15 bp, Homo sapiens
tagtagctagtacag

SEQ ID NO: 64930 - DNA, 15 bp, Homo sapiens
atagtagctagtaca

SEQ ID NO: 64931 - DNA, 15 bp, Homo sapiens
aatagtagctagtac

SEQ ID NO: 64932 - DNA, 15 bp, Homo sapiens
caatagtagctagta

SEQ ID NO: 64933 - DNA, 15 bp, Homo sapiens
gcaatagtagctagt

SEQ ID NO: 64934 - DNA, 15 bp, Homo sapiens
agcaatagtagctag

SEQ ID NO: 64935 - DNA, 15 bp, Homo sapiens
cagcaatagtagcta

SEQ ID NO: 64936 - DNA, 15 bp, Homo sapiens
acagcaatagtagct

SEQ ID NO: 64937 - DNA, 15 bp, Homo sapiens
cacagcaatagtagc

SEQ ID NO: 64938 - DNA, 15 bp, Homo sapiens
acacagcaatagtag

SEQ ID NO: 64939 - DNA, 15 bp, Homo sapiens
tacacagcaatagta

SEQ ID NO: 64940 - DNA, 15 bp, Homo sapiens
gtacacagcaatagt

SEQ ID NO: 64941 - DNA, 15 bp, Homo sapiens
ggtacacagcaatag

SEQ ID NO: 64942 - DNA, 15 bp, Homo sapiens
tggtacacagcaata

SEQ ID NO: 64943 - DNA, 15 bp, Homo sapiens
ttggtacacagcaat

SEQ ID NO: 64944 - DNA, 15 bp, Homo sapiens
cttggtacacagcaa

SEQ ID NO: 64945 - DNA, 15 bp, Homo sapiens
gcttggtacacagca

SEQ ID NO: 64946 - DNA, 15 bp, Homo sapiens
ggcttggtacacagc

SEQ ID NO: 64947 - DNA, 15 bp, Homo sapiens
tggcttggtacacag

SEQ ID NO: 64948 - DNA, 15 bp, Homo sapiens
gtggcttggtacaca

SEQ ID NO: 64949 - DNA, 15 bp, Homo sapiens
agtggcttggtacac

SEQ ID NO: 64950 - DNA, 15 bp, Homo sapiens
aagtggcttggtaca

SEQ ID NO: 64951 - DNA, 15 bp, Homo sapiens
gaagtggcttggtac

SEQ ID NO: 64952 - DNA, 15 bp, Homo sapiens
tgaagtggcttggta

SEQ ID NO: 64953 - DNA, 15 bp, Homo sapiens
ttgaagtggcttggt

SEQ ID NO: 64954 - DNA, 15 bp, Homo sapiens
tttgaagtggcttgg

SEQ ID NO: 64955 - DNA, 15 bp, Homo sapiens
ttttgaagtggcttg

SEQ ID NO: 64956 - DNA, 15 bp, Homo sapiens
gttttgaagtggctt

SEQ ID NO: 64957 - DNA, 15 bp, Homo sapiens
agttttgaagtggct

SEQ ID NO: 64958 - DNA, 15 bp, Homo sapiens
aagttttgaagtggc

SEQ ID NO: 64959 - DNA, 15 bp, Homo sapiens
caagttttgaagtgg

SEQ ID NO: 64960 - DNA, 15 bp, Homo sapiens
gcaagttttgaagtg

SEQ ID NO: 64961 - DNA, 15 bp, Homo sapiens
agcaagttttgaagt

SEQ ID NO: 64962 - DNA, 15 bp, Homo sapiens
cagcaagttttgaag

SEQ ID NO: 64963 - DNA, 15 bp, Homo sapiens
acagcaagttttgaa

SEQ ID NO: 64964 - DNA, 15 bp, Homo sapiens
gacagcaagttttga

SEQ ID NO: 64965 - DNA, 15 bp, Homo sapiens
tgacagcaagttttg

SEQ ID NO: 64966 - DNA, 15 bp, Homo sapiens
atgacagcaagtttt

SEQ ID NO: 64967 - DNA, 15 bp, Homo sapiens
tatgacagcaagttt

SEQ ID NO: 64968 - DNA, 15 bp, Homo sapiens
ttatgacagcaagtt

SEQ ID NO: 64969 - DNA, 15 bp, Homo sapiens
gttatgacagcaagt

SEQ ID NO: 64970 - DNA, 15 bp, Homo sapiens
tgttatgacagcaag

SEQ ID NO: 64971 - DNA, 15 bp, Homo sapiens
ttgttatgacagcaa

SEQ ID NO: 64972 - DNA, 15 bp, Homo sapiens
attgttatgacagca

SEQ ID NO: 64973 - DNA, 15 bp, Homo sapiens
tattgttatgacagc

SEQ ID NO: 64974 - DNA, 15 bp, Homo sapiens
ttattgttatgacag

SEQ ID NO: 64975 - DNA, 15 bp, Homo sapiens
gttattgttatgaca

SEQ ID NO: 64976 - DNA, 15 bp, Homo sapiens
ggttattgttatgac

SEQ ID NO: 64977 - DNA, 15 bp, Homo sapiens
tggttattgttatga

SEQ ID NO: 64978 - DNA, 15 bp, Homo sapiens
atggttattgttatg

SEQ ID NO: 64979 - DNA, 15 bp, Homo sapiens
aatggttattgttat

SEQ ID NO: 64980 - DNA, 15 bp, Homo sapiens
taatggttattgtta

SEQ ID NO: 64981 - DNA, 15 bp, Homo sapiens
ataatggttattgtt

SEQ ID NO: 64982 - DNA, 15 bp, Homo sapiens
cataatggttattgt

SEQ ID NO: 64983 - DNA, 15 bp, Homo sapiens
acataatggttattg

SEQ ID NO: 64984 - DNA, 15 bp, Homo sapiens
aacataatggttatt

SEQ ID NO: 64985 - DNA, 15 bp, Homo sapiens
aaacataatggttat

SEQ ID NO: 64986 - DNA, 15 bp, Homo sapiens
aaaacataatggtta

SEQ ID NO: 64987 - DNA, 15 bp, Homo sapiens
caaaacataatggtt

SEQ ID NO: 64988 - DNA, 15 bp, Homo sapiens
gcaaaacataatggt

SEQ ID NO: 64989 - DNA, 15 bp, Homo sapiens
agcaaaacataatgg

SEQ ID NO: 64990 - DNA, 15 bp, Homo sapiens
gagcaaaacataatg

SEQ ID NO: 64991 - DNA, 15 bp, Homo sapiens
tgagcaaaacataat

SEQ ID NO: 64992 - DNA, 15 bp, Homo sapiens
gtgagcaaaacataa

SEQ ID NO: 64993 - DNA, 15 bp, Homo sapiens
tgtgagcaaaacata

SEQ ID NO: 64994 - DNA, 15 bp, Homo sapiens
ctgtgagcaaaacat

SEQ ID NO: 64995 - DNA, 15 bp, Homo sapiens
tctgtgagcaaaaca

SEQ ID NO: 64996 - DNA, 15 bp, Homo sapiens
atctgtgagcaaaac

SEQ ID NO: 64997 - DNA, 15 bp, Homo sapiens
aatctgtgagcaaaa

SEQ ID NO: 64998 - DNA, 15 bp, Homo sapiens
gaatctgtgagcaaa

SEQ ID NO: 64999 - DNA, 15 bp, Homo sapiens
agaatctgtgagcaa

SEQ ID NO: 65000 - DNA, 15 bp, Homo sapiens
cagaatctgtgagca

SEQ ID NO: 65001 - DNA, 15 bp, Homo sapiens
acagaatctgtgagc

SEQ ID NO: 65002 - DNA, 15 bp, Homo sapiens
tacagaatctgtgag

SEQ ID NO: 65003 - DNA, 15 bp, Homo sapiens
ctacagaatctgtga

SEQ ID NO: 65004 - DNA, 15 bp, Homo sapiens
tctacagaatctgtg

SEQ ID NO: 65005 - DNA, 15 bp, Homo sapiens
atctacagaatctgt

SEQ ID NO: 65006 - DNA, 15 bp, Homo sapiens
gatctacagaatctg

SEQ ID NO: 65007 - DNA, 15 bp, Homo sapiens
tgatctacagaatct

SEQ ID NO: 65008 - DNA, 15 bp, Homo sapiens
ttgatctacagaatc

SEQ ID NO: 65009 - DNA, 15 bp, Homo sapiens
cttgatctacagaat

SEQ ID NO: 65010 - DNA, 15 bp, Homo sapiens
tcttgatctacagaa

SEQ ID NO: 65011 - DNA, 15 bp, Homo sapiens
gtcttgatctacaga

SEQ ID NO: 65012 - DNA, 15 bp, Homo sapiens
agtcttgatctacag

SEQ ID NO: 65013 - DNA, 15 bp, Homo sapiens
cagtcttgatctaca

SEQ ID NO: 65014 - DNA, 15 bp, Homo sapiens
ccagtcttgatctac

SEQ ID NO: 65015 - DNA, 15 bp, Homo sapiens
cccagtcttgatcta

SEQ ID NO: 65016 - DNA, 15 bp, Homo sapiens
tcccagtcttgatct

SEQ ID NO: 65017 - DNA, 15 bp, Homo sapiens
gtcccagtcttgatc

SEQ ID NO: 65018 - DNA, 15 bp, Homo sapiens
tgtcccagtcttgat

SEQ ID NO: 65019 - DNA, 15 bp, Homo sapiens
gtgtcccagtcttga

SEQ ID NO: 65020 - DNA, 15 bp, Homo sapiens
tgtgtcccagtcttg

SEQ ID NO: 65021 - DNA, 15 bp, Homo sapiens
ctgtgtcccagtctt

SEQ ID NO: 65022 - DNA, 15 bp, Homo sapiens
actgtgtcccagtct

SEQ ID NO: 65023 - DNA, 15 bp, Homo sapiens
cactgtgtcccagtc

SEQ ID NO: 65024 - DNA, 15 bp, Homo sapiens
ccactgtgtcccagt

SEQ ID NO: 65025 - DNA, 15 bp, Homo sapiens
cccactgtgtcccag

SEQ ID NO: 65026 - DNA, 15 bp, Homo sapiens
ccccactgtgtccca

SEQ ID NO: 65027 - DNA, 15 bp, Homo sapiens
tccccactgtgtccc

SEQ ID NO: 65028 - DNA, 15 bp, Homo sapiens
atccccactgtgtcc

SEQ ID NO: 65029 - DNA, 15 bp, Homo sapiens
catccccactgtgtc

SEQ ID NO: 65030 - DNA, 15 bp, Homo sapiens
ccatccccactgtgt

SEQ ID NO: 65031 - DNA, 15 bp, Homo sapiens
cccatccccactgtg

SEQ ID NO: 65032 - DNA, 15 bp, Homo sapiens
acccatccccactgt

SEQ ID NO: 65033 - DNA, 15 bp, Homo sapiens
cacccatccccactg

SEQ ID NO: 65034 - DNA, 15 bp, Homo sapiens
ccacccatccccact

SEQ ID NO: 65035 - DNA, 15 bp, Homo sapiens
accacccatccccac

SEQ ID NO: 65036 - DNA, 15 bp, Homo sapiens
aaccacccatcccca

SEQ ID NO: 65037 - DNA, 15 bp, Homo sapiens
aaaccacccatcccc

SEQ ID NO: 65038 - DNA, 15 bp, Homo sapiens
gaaaccacccatccc

SEQ ID NO: 65039 - DNA, 15 bp, Homo sapiens
agaaaccacccatcc

SEQ ID NO: 65040 - DNA, 15 bp, Homo sapiens
cagaaaccacccatc

SEQ ID NO: 65041 - DNA, 15 bp, Homo sapiens
ccagaaaccacccat

SEQ ID NO: 65042 - DNA, 15 bp, Homo sapiens
tccagaaaccaccca

SEQ ID NO: 65043 - DNA, 15 bp, Homo sapiens
ctccagaaaccaccc

SEQ ID NO: 65044 - DNA, 15 bp, Homo sapiens
gctccagaaaccacc

SEQ ID NO: 65045 - DNA, 15 bp, Homo sapiens
ggctccagaaaccac

SEQ ID NO: 65046 - DNA, 15 bp, Homo sapiens
aggctccagaaacca

SEQ ID NO: 65047 - DNA, 15 bp, Homo sapiens
gaggctccagaaacc

SEQ ID NO: 65048 - DNA, 15 bp, Homo sapiens
tgaggctccagaaac

SEQ ID NO: 65049 - DNA, 15 bp, Homo sapiens
ctgaggctccagaaa

SEQ ID NO: 65050 - DNA, 15 bp, Homo sapiens
actgaggctccagaa

SEQ ID NO: 65051 - DNA, 15 bp, Homo sapiens
aactgaggctccaga

SEQ ID NO: 65052 - DNA, 15 bp, Homo sapiens
taactgaggctccag

SEQ ID NO: 65053 - DNA, 15 bp, Homo sapiens
ctaactgaggctcca

SEQ ID NO: 65054 - DNA, 15 bp, Homo sapiens
cctaactgaggctcc

SEQ ID NO: 65055 - DNA, 15 bp, Homo sapiens
tcctaactgaggctc

SEQ ID NO: 65056 - DNA, 15 bp, Homo sapiens
atcctaactgaggct

SEQ ID NO: 65057 - DNA, 15 bp, Homo sapiens
aatcctaactgaggc

SEQ ID NO: 65058 - DNA, 15 bp, Homo sapiens
taatcctaactgagg

SEQ ID NO: 65059 - DNA, 15 bp, Homo sapiens
ataatcctaactgag

SEQ ID NO: 65060 - DNA, 15 bp, Homo sapiens
aataatcctaactga

SEQ ID NO: 65061 - DNA, 15 bp, Homo sapiens
aaataatcctaactg

SEQ ID NO: 65062 - DNA, 15 bp, Homo sapiens
taaataatcctaact

SEQ ID NO: 65063 - DNA, 15 bp, Homo sapiens
ttaaataatcctaac

SEQ ID NO: 65064 - DNA, 15 bp, Homo sapiens
gttaaataatcctaa

SEQ ID NO: 65065 - DNA, 15 bp, Homo sapiens
tgttaaataatccta

SEQ ID NO: 65066 - DNA, 15 bp, Homo sapiens
ctgttaaataatcct

SEQ ID NO: 65067 - DNA, 15 bp, Homo sapiens
gctgttaaataatcc

SEQ ID NO: 65068 - DNA, 15 bp, Homo sapiens
agctgttaaataatc

SEQ ID NO: 65069 - DNA, 15 bp, Homo sapiens
cagctgttaaataat

SEQ ID NO: 65070 - DNA, 15 bp, Homo sapiens
ccagctgttaaataa

SEQ ID NO: 65071 - DNA, 15 bp, Homo sapiens
cccagctgttaaata

SEQ ID NO: 65072 - DNA, 15 bp, Homo sapiens
acccagctgttaaat

SEQ ID NO: 65073 - DNA, 15 bp, Homo sapiens
cacccagctgttaaa

SEQ ID NO: 65074 - DNA, 15 bp, Homo sapiens
gcacccagctgttaa

SEQ ID NO: 65075 - DNA, 15 bp, Homo sapiens
agcacccagctgtta

SEQ ID NO: 65076 - DNA, 15 bp, Homo sapiens
cagcacccagctgtt

SEQ ID NO: 65077 - DNA, 15 bp, Homo sapiens
ccagcacccagctgt

SEQ ID NO: 65078 - DNA, 15 bp, Homo sapiens
tccagcacccagctg

SEQ ID NO: 65079 - DNA, 15 bp, Homo sapiens
ttccagcacccagct

SEQ ID NO: 65080 - DNA, 15 bp, Homo sapiens
attccagcacccagc

SEQ ID NO: 65081 - DNA, 15 bp, Homo sapiens
gattccagcacccag

SEQ ID NO: 65082 - DNA, 15 bp, Homo sapiens
tgattccagcaccca

SEQ ID NO: 65083 - DNA, 15 bp, Homo sapiens
atgattccagcaccc

SEQ ID NO: 65084 - DNA, 15 bp, Homo sapiens
gatgattccagcacc

SEQ ID NO: 65085 - DNA, 15 bp, Homo sapiens
agatgattccagcac

SEQ ID NO: 65086 - DNA, 15 bp, Homo sapiens
cagatgattccagca

SEQ ID NO: 65087 - DNA, 15 bp, Homo sapiens
ccagatgattccagc

SEQ ID NO: 65088 - DNA, 15 bp, Homo sapiens
tccagatgattccag

SEQ ID NO: 65089 - DNA, 15 bp, Homo sapiens
ttccagatgattcca

SEQ ID NO: 65090 - DNA, 15 bp, Homo sapiens
cttccagatgattcc

SEQ ID NO: 65091 - DNA, 15 bp, Homo sapiens
acttccagatgattc

SEQ ID NO: 65092 - DNA, 15 bp, Homo sapiens
aacttccagatgatt

SEQ ID NO: 65093 - DNA, 15 bp, Homo sapiens
gaacttccagatgat

SEQ ID NO: 65094 - DNA, 15 bp, Homo sapiens
ggaacttccagatga

SEQ ID NO: 65095 - DNA, 15 bp, Homo sapiens
aggaacttccagatg

SEQ ID NO: 65096 - DNA, 15 bp, Homo sapiens
aaggaacttccagat

SEQ ID NO: 65097 - DNA, 15 bp, Homo sapiens
gaaggaacttccaga

SEQ ID NO: 65098 - DNA, 15 bp, Homo sapiens
agaaggaacttccag

SEQ ID NO: 65099 - DNA, 15 bp, Homo sapiens
gagaaggaacttcca

SEQ ID NO: 65100 - DNA, 15 bp, Homo sapiens
agagaaggaacttcc

SEQ ID NO: 65101 - DNA, 15 bp, Homo sapiens
aagagaaggaacttc

SEQ ID NO: 65102 - DNA, 15 bp, Homo sapiens
caagagaaggaactt

SEQ ID NO: 65103 - DNA, 15 bp, Homo sapiens
gcaagagaaggaact

SEQ ID NO: 65104 - DNA, 15 bp, Homo sapiens
agcaagagaaggaac

SEQ ID NO: 65105 - DNA, 15 bp, Homo sapiens
aagcaagagaaggaa

SEQ ID NO: 65106 - DNA, 15 bp, Homo sapiens
aaagcaagagaagga

SEQ ID NO: 65107 - DNA, 15 bp, Homo sapiens
aaaagcaagagaagg

SEQ ID NO: 65108 - DNA, 15 bp, Homo sapiens
gaaaagcaagagaag

SEQ ID NO: 65109 - DNA, 15 bp, Homo sapiens
agaaaagcaagagaa

SEQ ID NO: 65110 - DNA, 15 bp, Homo sapiens
cagaaaagcaagaga

SEQ ID NO: 65111 - DNA, 15 bp, Homo sapiens
ccagaaaagcaagag

SEQ ID NO: 65112 - DNA, 15 bp, Homo sapiens
accagaaaagcaaga

SEQ ID NO: 65113 - DNA, 15 bp, Homo sapiens
caccagaaaagcaag

SEQ ID NO: 65114 - DNA, 15 bp, Homo sapiens
ccaccagaaaagcaa

SEQ ID NO: 65115 - DNA, 15 bp, Homo sapiens
accaccagaaaagca

SEQ ID NO: 65116 - DNA, 15 bp, Homo sapiens
aaccaccagaaaagc

SEQ ID NO: 65117 - DNA, 15 bp, Homo sapiens
caaccaccagaaaag

SEQ ID NO: 65118 - DNA, 15 bp, Homo sapiens
ccaaccaccagaaaa

SEQ ID NO: 65119 - DNA, 15 bp, Homo sapiens
accaaccaccagaaa

SEQ ID NO: 65120 - DNA, 15 bp, Homo sapiens
taccaaccaccagaa

SEQ ID NO: 65121 - DNA, 15 bp, Homo sapiens
gtaccaaccaccaga

SEQ ID NO: 65122 - DNA, 15 bp, Homo sapiens
agtaccaaccaccag

SEQ ID NO: 65123 - DNA, 15 bp, Homo sapiens
cagtaccaaccacca

SEQ ID NO: 65124 - DNA, 15 bp, Homo sapiens
tcagtaccaaccacc

SEQ ID NO: 65125 - DNA, 15 bp, Homo sapiens
gtcagtaccaaccac

SEQ ID NO: 65126 - DNA, 15 bp, Homo sapiens
agtcagtaccaacca

SEQ ID NO: 65127 - DNA, 15 bp, Homo sapiens
cagtcagtaccaacc

SEQ ID NO: 65128 - DNA, 15 bp, Homo sapiens
acagtcagtaccaac

SEQ ID NO: 65129 - DNA, 15 bp, Homo sapiens
gacagtcagtaccaa

SEQ ID NO: 65130 - DNA, 15 bp, Homo sapiens
tgacagtcagtacca

SEQ ID NO: 65131 - DNA, 15 bp, Homo sapiens
ctgacagtcagtacc

SEQ ID NO: 65132 - DNA, 15 bp, Homo sapiens
gctgacagtcagtac

SEQ ID NO: 65133 - DNA, 15 bp, Homo sapiens
agctgacagtcagta

SEQ ID NO: 65134 - DNA, 15 bp, Homo sapiens
tagctgacagtcagt

SEQ ID NO: 65135 - DNA, 15 bp, Homo sapiens
ctagctgacagtcag

SEQ ID NO: 65136 - DNA, 15 bp, Homo sapiens
cctagctgacagtca

SEQ ID NO: 65137 - DNA, 15 bp, Homo sapiens
tcctagctgacagtc

SEQ ID NO: 65138 - DNA, 15 bp, Homo sapiens
gtcctagctgacagt

SEQ ID NO: 65139 - DNA, 15 bp, Homo sapiens
tgtcctagctgacag

SEQ ID NO: 65140 - DNA, 15 bp, Homo sapiens
ctgtcctagctgaca

SEQ ID NO: 65141 - DNA, 15 bp, Homo sapiens
tctgtcctagctgac

SEQ ID NO: 65142 - DNA, 15 bp, Homo sapiens
ttctgtcctagctga

SEQ ID NO: 65143 - DNA, 15 bp, Homo sapiens
attctgtcctagctg

SEQ ID NO: 65144 - DNA, 15 bp, Homo sapiens
gattctgtcctagct

SEQ ID NO: 65145 - DNA, 15 bp, Homo sapiens
agattctgtcctagc

SEQ ID NO: 65146 - DNA, 15 bp, Homo sapiens
cagattctgtcctag

SEQ ID NO: 65147 - DNA, 15 bp, Homo sapiens
ccagattctgtccta

SEQ ID NO: 65148 - DNA, 15 bp, Homo sapiens
cccagattctgtcct

SEQ ID NO: 65149 - DNA, 15 bp, Homo sapiens
ccccagattctgtcc

SEQ ID NO: 65150 - DNA, 15 bp, Homo sapiens
accccagattctgtc

SEQ ID NO: 65151 - DNA, 15 bp, Homo sapiens
aaccccagattctgt

SEQ ID NO: 65152 - DNA, 15 bp, Homo sapiens
caaccccagattctg

SEQ ID NO: 65153 - DNA, 15 bp, Homo sapiens
acaaccccagattct

SEQ ID NO: 65154 - DNA, 15 bp, Homo sapiens
aacaaccccagattc

SEQ ID NO: 65155 - DNA, 15 bp, Homo sapiens
caacaaccccagatt

SEQ ID NO: 65156 - DNA, 15 bp, Homo sapiens
tcaacaaccccagat

SEQ ID NO: 65157 - DNA, 15 bp, Homo sapiens
gtcaacaaccccaga

SEQ ID NO: 65158 - DNA, 15 bp, Homo sapiens
agtcaacaaccccag

SEQ ID NO: 65159 - DNA, 15 bp, Homo sapiens
cagtcaacaacccca

SEQ ID NO: 65160 - DNA, 15 bp, Homo sapiens
tcagtcaacaacccc

SEQ ID NO: 65161 - DNA, 15 bp, Homo sapiens
atcagtcaacaaccc

SEQ ID NO: 65162 - DNA, 15 bp, Homo sapiens
catcagtcaacaacc

SEQ ID NO: 65163 - DNA, 15 bp, Homo sapiens
acatcagtcaacaac

SEQ ID NO: 65164 - DNA, 15 bp, Homo sapiens
tacatcagtcaacaa

SEQ ID NO: 65165 - DNA, 15 bp, Homo sapiens
ttacatcagtcaaca

SEQ ID NO: 65166 - DNA, 15 bp, Homo sapiens
gttacatcagtcaac

SEQ ID NO: 65167 - DNA, 15 bp, Homo sapiens
agttacatcagtcaa

SEQ ID NO: 65168 - DNA, 15 bp, Homo sapiens
aagttacatcagtca

SEQ ID NO: 65169 - DNA, 15 bp, Homo sapiens
aaagttacatcagtc

SEQ ID NO: 65170 - DNA, 15 bp, Homo sapiens
taaagttacatcagt

SEQ ID NO: 65171 - DNA, 15 bp, Homo sapiens
gtaaagttacatcag

SEQ ID NO: 65172 - DNA, 15 bp, Homo sapiens
tgtaaagttacatca

SEQ ID NO: 65173 - DNA, 15 bp, Homo sapiens
atgtaaagttacatc

SEQ ID NO: 65174 - DNA, 15 bp, Homo sapiens
catgtaaagttacat

SEQ ID NO: 65175 - DNA, 15 bp, Homo sapiens
ccatgtaaagttaca

SEQ ID NO: 65176 - DNA, 15 bp, Homo sapiens
tccatgtaaagttac

SEQ ID NO: 65177 - DNA, 15 bp, Homo sapiens
atccatgtaaagtta

SEQ ID NO: 65178 - DNA, 15 bp, Homo sapiens
aatccatgtaaagtt

SEQ ID NO: 65179 - DNA, 15 bp, Homo sapiens
taatccatgtaaagt

SEQ ID NO: 65180 - DNA, 15 bp, Homo sapiens
ataatccatgtaaag

SEQ ID NO: 65181 - DNA, 15 bp, Homo sapiens
gataatccatgtaaa

SEQ ID NO: 65182 - DNA, 15 bp, Homo sapiens
ggataatccatgtaa

SEQ ID NO: 65183 - DNA, 15 bp, Homo sapiens
gggataatccatgta

SEQ ID NO: 65184 - DNA, 15 bp, Homo sapiens
agggataatccatgt

SEQ ID NO: 65185 - DNA, 15 bp, Homo sapiens
cagggataatccatg

SEQ ID NO: 65186 - DNA, 15 bp, Homo sapiens
tcagggataatccat

SEQ ID NO: 65187 - DNA, 15 bp, Homo sapiens
ctcagggataatcca

SEQ ID NO: 65188 - DNA, 15 bp, Homo sapiens
cctcagggataatcc

SEQ ID NO: 65189 - DNA, 15 bp, Homo sapiens
gcctcagggataatc

SEQ ID NO: 65190 - DNA, 15 bp, Homo sapiens
ggcctcagggataat

SEQ ID NO: 65191 - DNA, 15 bp, Homo sapiens
aggcctcagggataa

SEQ ID NO: 65192 - DNA, 15 bp, Homo sapiens
caggcctcagggata

SEQ ID NO: 65193 - DNA, 15 bp, Homo sapiens
ccaggcctcagggat

SEQ ID NO: 65194 - DNA, 15 bp, Homo sapiens
gccaggcctcaggga

SEQ ID NO: 65195 - DNA, 15 bp, Homo sapiens
ggccaggcctcaggg

SEQ ID NO: 65196 - DNA, 15 bp, Homo sapiens
aggccaggcctcagg

SEQ ID NO: 65197 - DNA, 15 bp, Homo sapiens
aaggccaggcctcag

SEQ ID NO: 65198 - DNA, 15 bp, Homo sapiens
gaaggccaggcctca

SEQ ID NO: 65199 - DNA, 15 bp, Homo sapiens
ggaaggccaggcctc

SEQ ID NO: 65200 - DNA, 15 bp, Homo sapiens
aggaaggccaggcct

SEQ ID NO: 65201 - DNA, 15 bp, Homo sapiens
aaggaaggccaggcc

SEQ ID NO: 65202 - DNA, 15 bp, Homo sapiens
taaggaaggccaggc

SEQ ID NO: 65203 - DNA, 15 bp, Homo sapiens
gtaaggaaggccagg

SEQ ID NO: 65204 - DNA, 15 bp, Homo sapiens
tgtaaggaaggccag

SEQ ID NO: 65205 - DNA, 15 bp, Homo sapiens
ctgtaaggaaggcca

SEQ ID NO: 65206 - DNA, 15 bp, Homo sapiens
gctgtaaggaaggcc

SEQ ID NO: 65207 - DNA, 15 bp, Homo sapiens
tgctgtaaggaaggc

SEQ ID NO: 65208 - DNA, 15 bp, Homo sapiens
atgctgtaaggaagg

SEQ ID NO: 65209 - DNA, 15 bp, Homo sapiens
catgctgtaaggaag

SEQ ID NO: 65210 - DNA, 15 bp, Homo sapiens
acatgctgtaaggaa

SEQ ID NO: 65211 - DNA, 15 bp, Homo sapiens
aacatgctgtaagga

SEQ ID NO: 65212 - DNA, 15 bp, Homo sapiens
aaacatgctgtaagg

SEQ ID NO: 65213 - DNA, 15 bp, Homo sapiens
gaaacatgctgtaag

SEQ ID NO: 65214 - DNA, 15 bp, Homo sapiens
tgaaacatgctgtaa

SEQ ID NO: 65215 - DNA, 15 bp, Homo sapiens
ttgaaacatgctgta

SEQ ID NO: 65216 - DNA, 15 bp, Homo sapiens
cttgaaacatgctgt

SEQ ID NO: 65217 - DNA, 15 bp, Homo sapiens
ccttgaaacatgctg

SEQ ID NO: 65218 - DNA, 15 bp, Homo sapiens
accttgaaacatgct

SEQ ID NO: 65219 - DNA, 15 bp, Homo sapiens
taccttgaaacatgc

SEQ ID NO: 65220 - DNA, 15 bp, Homo sapiens
ctaccttgaaacatg

SEQ ID NO: 65221 - DNA, 15 bp, Homo sapiens
actaccttgaaacat

SEQ ID NO: 65222 - DNA, 15 bp, Homo sapiens
aactaccttgaaaca

SEQ ID NO: 65223 - DNA, 15 bp, Homo sapiens
caactaccttgaaac

SEQ ID NO: 65224 - DNA, 15 bp, Homo sapiens
ccaactaccttgaaa

SEQ ID NO: 65225 - DNA, 15 bp, Homo sapiens
tccaactaccttgaa

SEQ ID NO: 65226 - DNA, 15 bp, Homo sapiens
gtccaactaccttga

SEQ ID NO: 65227 - DNA, 15 bp, Homo sapiens
agtccaactaccttg

SEQ ID NO: 65228 - DNA, 15 bp, Homo sapiens
aagtccaactacctt

SEQ ID NO: 65229 - DNA, 15 bp, Homo sapiens
gaagtccaactacct

SEQ ID NO: 65230 - DNA, 15 bp, Homo sapiens
agaagtccaactacc

SEQ ID NO: 65231 - DNA, 15 bp, Homo sapiens
aagaagtccaactac

SEQ ID NO: 65232 - DNA, 15 bp, Homo sapiens
aaagaagtccaacta

SEQ ID NO: 65233 - DNA, 15 bp, Homo sapiens
aaaagaagtccaact

SEQ ID NO: 65234 - DNA, 15 bp, Homo sapiens
aaaaagaagtccaac

SEQ ID NO: 65235 - DNA, 15 bp, Homo sapiens
caaaaagaagtccaa

SEQ ID NO: 65236 - DNA, 15 bp, Homo sapiens
tcaaaaagaagtcca

SEQ ID NO: 65237 - DNA, 15 bp, Homo sapiens
ctcaaaaagaagtcc

SEQ ID NO: 65238 - DNA, 15 bp, Homo sapiens
cctcaaaaagaagtc

SEQ ID NO: 65239 - DNA, 15 bp, Homo sapiens
ccctcaaaaagaagt

SEQ ID NO: 65240 - DNA, 15 bp, Homo sapiens
cccctcaaaaagaag

SEQ ID NO: 65241 - DNA, 15 bp, Homo sapiens
ccccctcaaaaagaa

SEQ ID NO: 65242 - DNA, 15 bp, Homo sapiens
cccccctcaaaaaga

SEQ ID NO: 65243 - DNA, 15 bp, Homo sapiens
ccccccctcaaaaag

SEQ ID NO: 65244 - DNA, 15 bp, Homo sapiens
accccccctcaaaaa

SEQ ID NO: 65245 - DNA, 15 bp, Homo sapiens
taccccccctcaaaa

SEQ ID NO: 65246 - DNA, 15 bp, Homo sapiens
ctaccccccctcaaa

SEQ ID NO: 65247 - DNA, 15 bp, Homo sapiens
cctaccccccctcaa

SEQ ID NO: 65248 - DNA, 15 bp, Homo sapiens
tcctaccccccctca

SEQ ID NO: 65249 - DNA, 15 bp, Homo sapiens
ttcctaccccccctc

SEQ ID NO: 65250 - DNA, 15 bp, Homo sapiens
cttcctaccccccct

SEQ ID NO: 65251 - DNA, 15 bp, Homo sapiens
ccttcctaccccccc

SEQ ID NO: 65252 - DNA, 15 bp, Homo sapiens
accttcctacccccc

SEQ ID NO: 65253 - DNA, 15 bp, Homo sapiens
caccttcctaccccc

SEQ ID NO: 65254 - DNA, 15 bp, Homo sapiens
ccaccttcctacccc

SEQ ID NO: 65255 - DNA, 15 bp, Homo sapiens
cccaccttcctaccc

SEQ ID NO: 65256 - DNA, 15 bp, Homo sapiens
ccccaccttcctacc

SEQ ID NO: 65257 - DNA, 15 bp, Homo sapiens
cccccaccttcctac

SEQ ID NO: 65258 - DNA, 15 bp, Homo sapiens
ccccccaccttccta

SEQ ID NO: 65259 - DNA, 15 bp, Homo sapiens
tccccccaccttcct

SEQ ID NO: 65260 - DNA, 15 bp, Homo sapiens
ctccccccaccttcc

SEQ ID NO: 65261 - DNA, 15 bp, Homo sapiens
cctccccccaccttc

SEQ ID NO: 65262 - DNA, 15 bp, Homo sapiens
tcctccccccacctt

SEQ ID NO: 65263 - DNA, 15 bp, Homo sapiens
gtcctccccccacct

SEQ ID NO: 65264 - DNA, 15 bp, Homo sapiens
tgtcctccccccacc

SEQ ID NO: 65265 - DNA, 15 bp, Homo sapiens
ctgtcctccccccac

SEQ ID NO: 65266 - DNA, 15 bp, Homo sapiens
tctgtcctcccccca

SEQ ID NO: 65267 - DNA, 15 bp, Homo sapiens
ctctgtcctcccccc

SEQ ID NO: 65268 - DNA, 15 bp, Homo sapiens
actctgtcctccccc

SEQ ID NO: 65269 - DNA, 15 bp, Homo sapiens
gactctgtcctcccc

SEQ ID NO: 65270 - DNA, 15 bp, Homo sapiens
agactctgtcctccc

SEQ ID NO: 65271 - DNA, 15 bp, Homo sapiens
gagactctgtcctcc

SEQ ID NO: 65272 - DNA, 15 bp, Homo sapiens
tgagactctgtcctc

SEQ ID NO: 65273 - DNA, 15 bp, Homo sapiens
gtgagactctgtcct

SEQ ID NO: 65274 - DNA, 15 bp, Homo sapiens
agtgagactctgtcc

SEQ ID NO: 65275 - DNA, 15 bp, Homo sapiens
gagtgagactctgtc

SEQ ID NO: 65276 - DNA, 15 bp, Homo sapiens
agagtgagactctgt

SEQ ID NO: 65277 - DNA, 15 bp, Homo sapiens
cagagtgagactctg

SEQ ID NO: 65278 - DNA, 15 bp, Homo sapiens
acagagtgagactct

SEQ ID NO: 65279 - DNA, 15 bp, Homo sapiens
aacagagtgagactc

SEQ ID NO: 65280 - DNA, 15 bp, Homo sapiens
caacagagtgagact

SEQ ID NO: 65281 - DNA, 15 bp, Homo sapiens
gcaacagagtgagac

SEQ ID NO: 65282 - DNA, 15 bp, Homo sapiens
ggcaacagagtgaga

SEQ ID NO: 65283 - DNA, 15 bp, Homo sapiens
gggcaacagagtgag

SEQ ID NO: 65284 - DNA, 15 bp, Homo sapiens
tgggcaacagagtga

SEQ ID NO: 65285 - DNA, 15 bp, Homo sapiens
ctgggcaacagagtg

SEQ ID NO: 65286 - DNA, 15 bp, Homo sapiens
cctgggcaacagagt

SEQ ID NO: 65287 - DNA, 15 bp, Homo sapiens
gcctgggcaacagag

SEQ ID NO: 65288 - DNA, 15 bp, Homo sapiens
agcctgggcaacaga

SEQ ID NO: 65289 - DNA, 15 bp, Homo sapiens
cagcctgggcaacag

SEQ ID NO: 65290 - DNA, 15 bp, Homo sapiens
ccagcctgggcaaca

SEQ ID NO: 65291 - DNA, 15 bp, Homo sapiens
tccagcctgggcaac

SEQ ID NO: 65292 - DNA, 15 bp, Homo sapiens
ctccagcctgggcaa

SEQ ID NO: 65293 - DNA, 15 bp, Homo sapiens
actccagcctgggca

SEQ ID NO: 65294 - DNA, 15 bp, Homo sapiens
cactccagcctgggc

SEQ ID NO: 65295 - DNA, 15 bp, Homo sapiens
gcactccagcctggg

SEQ ID NO: 65296 - DNA, 15 bp, Homo sapiens
tgcactccagcctgg

SEQ ID NO: 65297 - DNA, 15 bp, Homo sapiens
gtgcactccagcctg

SEQ ID NO: 65298 - DNA, 15 bp, Homo sapiens
agtgcactccagcct

SEQ ID NO: 65299 - DNA, 15 bp, Homo sapiens
cagtgcactccagcc

SEQ ID NO: 65300 - DNA, 15 bp, Homo sapiens
ccagtgcactccagc

SEQ ID NO: 65301 - DNA, 15 bp, Homo sapiens
accagtgcactccag

SEQ ID NO: 65302 - DNA, 15 bp, Homo sapiens
caccagtgcactcca

SEQ ID NO: 65303 - DNA, 15 bp, Homo sapiens
acaccagtgcactcc

SEQ ID NO: 65304 - DNA, 15 bp, Homo sapiens
cacaccagtgcactc

SEQ ID NO: 65305 - DNA, 15 bp, Homo sapiens
tcacaccagtgcact

SEQ ID NO: 65306 - DNA, 15 bp, Homo sapiens
atcacaccagtgcac

SEQ ID NO: 65307 - DNA, 15 bp, Homo sapiens
gatcacaccagtgca

SEQ ID NO: 65308 - DNA, 15 bp, Homo sapiens
agatcacaccagtgc

SEQ ID NO: 65309 - DNA, 15 bp, Homo sapiens
gagatcacaccagtg

SEQ ID NO: 65310 - DNA, 15 bp, Homo sapiens
cgagatcacaccagt

SEQ ID NO: 65311 - DNA, 15 bp, Homo sapiens
ccgagatcacaccag

SEQ ID NO: 65312 - DNA, 15 bp, Homo sapiens
gccgagatcacacca

SEQ ID NO: 65313 - DNA, 15 bp, Homo sapiens
agccgagatcacacc

SEQ ID NO: 65314 - DNA, 15 bp, Homo sapiens
gagccgagatcacac

SEQ ID NO: 65315 - DNA, 15 bp, Homo sapiens
tgagccgagatcaca

SEQ ID NO: 65316 - DNA, 15 bp, Homo sapiens
gtgagccgagatcac

SEQ ID NO: 65317 - DNA, 15 bp, Homo sapiens
agtgagccgagatca

SEQ ID NO: 65318 - DNA, 15 bp, Homo sapiens
cagtgagccgagatc

SEQ ID NO: 65319 - DNA, 15 bp, Homo sapiens
gcagtgagccgagat

SEQ ID NO: 65320 - DNA, 15 bp, Homo sapiens
tgcagtgagccgaga

SEQ ID NO: 65321 - DNA, 15 bp, Homo sapiens
ttgcagtgagccgag

SEQ ID NO: 65322 - DNA, 15 bp, Homo sapiens
gttgcagtgagccga

SEQ ID NO: 65323 - DNA, 15 bp, Homo sapiens
ggttgcagtgagccg

SEQ ID NO: 65324 - DNA, 15 bp, Homo sapiens
aggttgcagtgagcc

SEQ ID NO: 65325 - DNA, 15 bp, Homo sapiens
gaggttgcagtgagc

SEQ ID NO: 65326 - DNA, 15 bp, Homo sapiens
agaggttgcagtgag

SEQ ID NO: 65327 - DNA, 15 bp, Homo sapiens
cagaggttgcagtga

SEQ ID NO: 65328 - DNA, 15 bp, Homo sapiens
gcagaggttgcagtg

SEQ ID NO: 65329 - DNA, 15 bp, Homo sapiens
ggcagaggttgcagt

SEQ ID NO: 65330 - DNA, 15 bp, Homo sapiens
aggcagaggttgcag

SEQ ID NO: 65331 - DNA, 15 bp, Homo sapiens
gaggcagaggttgca

SEQ ID NO: 65332 - DNA, 15 bp, Homo sapiens
ggaggcagaggttgc

SEQ ID NO: 65333 - DNA, 15 bp, Homo sapiens
gggaggcagaggttg

SEQ ID NO: 65334 - DNA, 15 bp, Homo sapiens
cgggaggcagaggtt

SEQ ID NO: 65335 - DNA, 15 bp, Homo sapiens
ccgggaggcagaggt

SEQ ID NO: 65336 - DNA, 15 bp, Homo sapiens
cccgggaggcagagg

SEQ ID NO: 65337 - DNA, 15 bp, Homo sapiens
gcccgggaggcagag

SEQ ID NO: 65338 - DNA, 15 bp, Homo sapiens
agcccgggaggcaga

SEQ ID NO: 65339 - DNA, 15 bp, Homo sapiens
gagcccgggaggcag

SEQ ID NO: 65340 - DNA, 15 bp, Homo sapiens
tgagcccgggaggca

SEQ ID NO: 65341 - DNA, 15 bp, Homo sapiens
ttgagcccgggaggc

SEQ ID NO: 65342 - DNA, 15 bp, Homo sapiens
cttgagcccgggagg

SEQ ID NO: 65343 - DNA, 15 bp, Homo sapiens
acttgagcccgggag

SEQ ID NO: 65344 - DNA, 15 bp, Homo sapiens
cacttgagcccggga

SEQ ID NO: 65345 - DNA, 15 bp, Homo sapiens
tcacttgagcccggg

SEQ ID NO: 65346 - DNA, 15 bp, Homo sapiens
atcacttgagcccgg

SEQ ID NO: 65347 - DNA, 15 bp, Homo sapiens
aatcacttgagcccg

SEQ ID NO: 65348 - DNA, 15 bp, Homo sapiens
gaatcacttgagccc

SEQ ID NO: 65349 - DNA, 15 bp, Homo sapiens
agaatcacttgagcc

SEQ ID NO: 65350 - DNA, 15 bp, Homo sapiens
gagaatcacttgagc

SEQ ID NO: 65351 - DNA, 15 bp, Homo sapiens
ggagaatcacttgag

SEQ ID NO: 65352 - DNA, 15 bp, Homo sapiens
aggagaatcacttga

SEQ ID NO: 65353 - DNA, 15 bp, Homo sapiens
caggagaatcacttg

SEQ ID NO: 65354 - DNA, 15 bp, Homo sapiens
gcaggagaatcactt

SEQ ID NO: 65355 - DNA, 15 bp, Homo sapiens
ggcaggagaatcact

SEQ ID NO: 65356 - DNA, 15 bp, Homo sapiens
aggcaggagaatcac

SEQ ID NO: 65357 - DNA, 15 bp, Homo sapiens
gaggcaggagaatca

SEQ ID NO: 65358 - DNA, 15 bp, Homo sapiens
tgaggcaggagaatc

SEQ ID NO: 65359 - DNA, 15 bp, Homo sapiens
ctgaggcaggagaat

SEQ ID NO: 65360 - DNA, 15 bp, Homo sapiens
gctgaggcaggagaa

SEQ ID NO: 65361 - DNA, 15 bp, Homo sapiens
ggctgaggcaggaga

SEQ ID NO: 65362 - DNA, 15 bp, Homo sapiens
aggctgaggcaggag

SEQ ID NO: 65363 - DNA, 15 bp, Homo sapiens
caggctgaggcagga

SEQ ID NO: 65364 - DNA, 15 bp, Homo sapiens
gcaggctgaggcagg

SEQ ID NO: 65365 - DNA, 15 bp, Homo sapiens
agcaggctgaggcag

SEQ ID NO: 65366 - DNA, 15 bp, Homo sapiens
cagcaggctgaggca

SEQ ID NO: 65367 - DNA, 15 bp, Homo sapiens
tcagcaggctgaggc

SEQ ID NO: 65368 - DNA, 15 bp, Homo sapiens
ctcagcaggctgagg

SEQ ID NO: 65369 - DNA, 15 bp, Homo sapiens
actcagcaggctgag

SEQ ID NO: 65370 - DNA, 15 bp, Homo sapiens
tactcagcaggctga

SEQ ID NO: 65371 - DNA, 15 bp, Homo sapiens
ctactcagcaggctg

SEQ ID NO: 65372 - DNA, 15 bp, Homo sapiens
gctactcagcaggct

SEQ ID NO: 65373 - DNA, 15 bp, Homo sapiens
agctactcagcaggc

SEQ ID NO: 65374 - DNA, 15 bp, Homo sapiens
cagctactcagcagg

SEQ ID NO: 65375 - DNA, 15 bp, Homo sapiens
ccagctactcagcag

SEQ ID NO: 65376 - DNA, 15 bp, Homo sapiens
cccagctactcagca

SEQ ID NO: 65377 - DNA, 15 bp, Homo sapiens
tcccagctactcagc

SEQ ID NO: 65378 - DNA, 15 bp, Homo sapiens
gtcccagctactcag

SEQ ID NO: 65379 - DNA, 15 bp, Homo sapiens
agtcccagctactca

SEQ ID NO: 65380 - DNA, 15 bp, Homo sapiens
tagtcccagctactc

SEQ ID NO: 65381 - DNA, 15 bp, Homo sapiens
gtagtcccagctact

SEQ ID NO: 65382 - DNA, 15 bp, Homo sapiens
cgtagtcccagctac

SEQ ID NO: 65383 - DNA, 15 bp, Homo sapiens
ccgtagtcccagcta

SEQ ID NO: 65384 - DNA, 15 bp, Homo sapiens
cccgtagtcccagct

SEQ ID NO: 65385 - DNA, 15 bp, Homo sapiens
gcccgtagtcccagc

SEQ ID NO: 65386 - DNA, 15 bp, Homo sapiens
agcccgtagtcccag

SEQ ID NO: 65387 - DNA, 15 bp, Homo sapiens
gagcccgtagtccca

SEQ ID NO: 65388 - DNA, 15 bp, Homo sapiens
tgagcccgtagtccc

SEQ ID NO: 65389 - DNA, 15 bp, Homo sapiens
atgagcccgtagtcc

SEQ ID NO: 65390 - DNA, 15 bp, Homo sapiens
catgagcccgtagtc

SEQ ID NO: 65391 - DNA, 15 bp, Homo sapiens
gcatgagcccgtagt

SEQ ID NO: 65392 - DNA, 15 bp, Homo sapiens
ggcatgagcccgtag

SEQ ID NO: 65393 - DNA, 15 bp, Homo sapiens
tggcatgagcccgta

SEQ ID NO: 65394 - DNA, 15 bp, Homo sapiens
gtggcatgagcccgt

SEQ ID NO: 65395 - DNA, 15 bp, Homo sapiens
ggtggcatgagcccg

SEQ ID NO: 65396 - DNA, 15 bp, Homo sapiens
tggtggcatgagccc

SEQ ID NO: 65397 - DNA, 15 bp, Homo sapiens
gtggtggcatgagcc

SEQ ID NO: 65398 - DNA, 15 bp, Homo sapiens
tgtggtggcatgagc

SEQ ID NO: 65399 - DNA, 15 bp, Homo sapiens
gtgtggtggcatgag

SEQ ID NO: 65400 - DNA, 15 bp, Homo sapiens
ggtgtggtggcatga

SEQ ID NO: 65401 - DNA, 15 bp, Homo sapiens
gggtgtggtggcatg

SEQ ID NO: 65402 - DNA, 15 bp, Homo sapiens
tgggtgtggtggcat

SEQ ID NO: 65403 - DNA, 15 bp, Homo sapiens
ctgggtgtggtggca

SEQ ID NO: 65404 - DNA, 15 bp, Homo sapiens
gctgggtgtggtggc

SEQ ID NO: 65405 - DNA, 15 bp, Homo sapiens
agctgggtgtggtgg

SEQ ID NO: 65406 - DNA, 15 bp, Homo sapiens
tagctgggtgtggtg

SEQ ID NO: 65407 - DNA, 15 bp, Homo sapiens
ttagctgggtgtggt

SEQ ID NO: 65408 - DNA, 15 bp, Homo sapiens
attagctgggtgtgg

SEQ ID NO: 65409 - DNA, 15 bp, Homo sapiens
aattagctgggtgtg

SEQ ID NO: 65410 - DNA, 15 bp, Homo sapiens
aaattagctgggtgt

SEQ ID NO: 65411 - DNA, 15 bp, Homo sapiens
aaaattagctgggtg

SEQ ID NO: 65412 - DNA, 15 bp, Homo sapiens
aaaaattagctgggt

SEQ ID NO: 65413 - DNA, 15 bp, Homo sapiens
caaaaattagctggg

SEQ ID NO: 65414 - DNA, 15 bp, Homo sapiens
acaaaaattagctgg

SEQ ID NO: 65415 - DNA, 15 bp, Homo sapiens
tacaaaaattagctg

SEQ ID NO: 65416 - DNA, 15 bp, Homo sapiens
atacaaaaattagct

SEQ ID NO: 65417 - DNA, 15 bp, Homo sapiens
aatacaaaaattagc

SEQ ID NO: 65418 - DNA, 15 bp, Homo sapiens
aaatacaaaaattag

SEQ ID NO: 65419 - DNA, 15 bp, Homo sapiens
aaaatacaaaaatta

SEQ ID NO: 65420 - DNA, 15 bp, Homo sapiens
aaaaatacaaaaatt

SEQ ID NO: 65421 - DNA, 15 bp, Homo sapiens
taaaaatacaaaaat

SEQ ID NO: 65422 - DNA, 15 bp, Homo sapiens
ctaaaaatacaaaaa

SEQ ID NO: 65423 - DNA, 15 bp, Homo sapiens
actaaaaatacaaaa

SEQ ID NO: 65424 - DNA, 15 bp, Homo sapiens
tactaaaaatacaaa

SEQ ID NO: 65425 - DNA, 15 bp, Homo sapiens
ctactaaaaatacaa

SEQ ID NO: 65426 - DNA, 15 bp, Homo sapiens
tctactaaaaataca

SEQ ID NO: 65427 - DNA, 15 bp, Homo sapiens
ctctactaaaaatac

SEQ ID NO: 65428 - DNA, 15 bp, Homo sapiens
tctctactaaaaata

SEQ ID NO: 65429 - DNA, 15 bp, Homo sapiens
gtctctactaaaaat

SEQ ID NO: 65430 - DNA, 15 bp, Homo sapiens
tgtctctactaaaaa

SEQ ID NO: 65431 - DNA, 15 bp, Homo sapiens
ctgtctctactaaaa

SEQ ID NO: 65432 - DNA, 15 bp, Homo sapiens
cctgtctctactaaa

SEQ ID NO: 65433 - DNA, 15 bp, Homo sapiens
ccctgtctctactaa

SEQ ID NO: 65434 - DNA, 15 bp, Homo sapiens
accctgtctctacta

SEQ ID NO: 65435 - DNA, 15 bp, Homo sapiens
aaccctgtctctact

SEQ ID NO: 65436 - DNA, 15 bp, Homo sapiens
aaaccctgtctctac

SEQ ID NO: 65437 - DNA, 15 bp, Homo sapiens
aaaaccctgtctcta

SEQ ID NO: 65438 - DNA, 15 bp, Homo sapiens
caaaaccctgtctct

SEQ ID NO: 65439 - DNA, 15 bp, Homo sapiens
gcaaaaccctgtctc

SEQ ID NO: 65440 - DNA, 15 bp, Homo sapiens
ggcaaaaccctgtct

SEQ ID NO: 65441 - DNA, 15 bp, Homo sapiens
tggcaaaaccctgtc

SEQ ID NO: 65442 - DNA, 15 bp, Homo sapiens
atggcaaaaccctgt

SEQ ID NO: 65443 - DNA, 15 bp, Homo sapiens
catggcaaaaccctg

SEQ ID NO: 65444 - DNA, 15 bp, Homo sapiens
acatggcaaaaccct

SEQ ID NO: 65445 - DNA, 15 bp, Homo sapiens
aacatggcaaaaccc

SEQ ID NO: 65446 - DNA, 15 bp, Homo sapiens
caacatggcaaaacc

SEQ ID NO: 65447 - DNA, 15 bp, Homo sapiens
tcaacatggcaaaac

SEQ ID NO: 65448 - DNA, 15 bp, Homo sapiens
gtcaacatggcaaaa

SEQ ID NO: 65449 - DNA, 15 bp, Homo sapiens
ggtcaacatggcaaa

SEQ ID NO: 65450 - DNA, 15 bp, Homo sapiens
tggtcaacatggcaa

SEQ ID NO: 65451 - DNA, 15 bp, Homo sapiens
ctggtcaacatggca

SEQ ID NO: 65452 - DNA, 15 bp, Homo sapiens
cctggtcaacatggc

SEQ ID NO: 65453 - DNA, 15 bp, Homo sapiens
gcctggtcaacatgg

SEQ ID NO: 65454 - DNA, 15 bp, Homo sapiens
agcctggtcaacatg

SEQ ID NO: 65455 - DNA, 15 bp, Homo sapiens
cagcctggtcaacat

SEQ ID NO: 65456 - DNA, 15 bp, Homo sapiens
ccagcctggtcaaca

SEQ ID NO: 65457 - DNA, 15 bp, Homo sapiens
accagcctggtcaac

SEQ ID NO: 65458 - DNA, 15 bp, Homo sapiens
gaccagcctggtcaa

SEQ ID NO: 65459 - DNA, 15 bp, Homo sapiens
agaccagcctggtca

SEQ ID NO: 65460 - DNA, 15 bp, Homo sapiens
aagaccagcctggtc

SEQ ID NO: 65461 - DNA, 15 bp, Homo sapiens
caagaccagcctggt

SEQ ID NO: 65462 - DNA, 15 bp, Homo sapiens
tcaagaccagcctgg

SEQ ID NO: 65463 - DNA, 15 bp, Homo sapiens
ttcaagaccagcctg

SEQ ID NO: 65464 - DNA, 15 bp, Homo sapiens
gttcaagaccagcct

SEQ ID NO: 65465 - DNA, 15 bp, Homo sapiens
agttcaagaccagcc

SEQ ID NO: 65466 - DNA, 15 bp, Homo sapiens
gagttcaagaccagc

SEQ ID NO: 65467 - DNA, 15 bp, Homo sapiens
ggagttcaagaccag

SEQ ID NO: 65468 - DNA, 15 bp, Homo sapiens
aggagttcaagacca

SEQ ID NO: 65469 - DNA, 15 bp, Homo sapiens
caggagttcaagacc

SEQ ID NO: 65470 - DNA, 15 bp, Homo sapiens
tcaggagttcaagac

SEQ ID NO: 65471 - DNA, 15 bp, Homo sapiens
gtcaggagttcaaga

SEQ ID NO: 65472 - DNA, 15 bp, Homo sapiens
ggtcaggagttcaag

SEQ ID NO: 65473 - DNA, 15 bp, Homo sapiens
aggtcaggagttcaa

SEQ ID NO: 65474 - DNA, 15 bp, Homo sapiens
gaggtcaggagttca

SEQ ID NO: 65475 - DNA, 15 bp, Homo sapiens
tgaggtcaggagttc

SEQ ID NO: 65476 - DNA, 15 bp, Homo sapiens
ctgaggtcaggagtt

SEQ ID NO: 65477 - DNA, 15 bp, Homo sapiens
cctgaggtcaggagt

SEQ ID NO: 65478 - DNA, 15 bp, Homo sapiens
acctgaggtcaggag

SEQ ID NO: 65479 - DNA, 15 bp, Homo sapiens
cacctgaggtcagga

SEQ ID NO: 65480 - DNA, 15 bp, Homo sapiens
tcacctgaggtcagg

SEQ ID NO: 65481 - DNA, 15 bp, Homo sapiens
atcacctgaggtcag

SEQ ID NO: 65482 - DNA, 15 bp, Homo sapiens
gatcacctgaggtca

SEQ ID NO: 65483 - DNA, 15 bp, Homo sapiens
ggatcacctgaggtc

SEQ ID NO: 65484 - DNA, 15 bp, Homo sapiens
cggatcacctgaggt

SEQ ID NO: 65485 - DNA, 15 bp, Homo sapiens
gcggatcacctgagg

SEQ ID NO: 65486 - DNA, 15 bp, Homo sapiens
caaagtggattgcaa

SEQ ID NO: 65487 - DNA, 15 bp, Homo sapiens
gcaaagtggattgca

SEQ ID NO: 65488 - DNA, 15 bp, Homo sapiens
agcaaagtggattgc

SEQ ID NO: 65489 - DNA, 15 bp, Homo sapiens
gagcaaagtggattg

SEQ ID NO: 65490 - DNA, 15 bp, Homo sapiens
agagcaaagtggatt

SEQ ID NO: 65491 - DNA, 15 bp, Homo sapiens
aagagcaaagtggat

SEQ ID NO: 65492 - DNA, 15 bp, Homo sapiens
taagagcaaagtgga

SEQ ID NO: 65493 - DNA, 15 bp, Homo sapiens
ataagagcaaagtgg

SEQ ID NO: 65494 - DNA, 15 bp, Homo sapiens
tataagagcaaagtg

SEQ ID NO: 65495 - DNA, 15 bp, Homo sapiens
ctataagagcaaagt

SEQ ID NO: 65496 - DNA, 15 bp, Homo sapiens
tctataagagcaaag

SEQ ID NO: 65497 - DNA, 15 bp, Homo sapiens
atctataagagcaaa

SEQ ID NO: 65498 - DNA, 15 bp, Homo sapiens
tatctataagagcaa

SEQ ID NO: 65499 - DNA, 15 bp, Homo sapiens
gtatctataagagca

SEQ ID NO: 65500 - DNA, 15 bp, Homo sapiens
agtatctataagagc

SEQ ID NO: 65501 - DNA, 15 bp, Homo sapiens
cagtatctataagag

SEQ ID NO: 65502 - DNA, 15 bp, Homo sapiens
gcagtatctataaga

SEQ ID NO: 65503 - DNA, 15 bp, Homo sapiens
ggcagtatctataag

SEQ ID NO: 65504 - DNA, 15 bp, Homo sapiens
aggcagtatctataa

SEQ ID NO: 65505 - DNA, 15 bp, Homo sapiens
taggcagtatctata

SEQ ID NO: 65506 - DNA, 15 bp, Homo sapiens
ctaggcagtatctat

SEQ ID NO: 65507 - DNA, 15 bp, Homo sapiens
tctaggcagtatcta

SEQ ID NO: 65508 - DNA, 15 bp, Homo sapiens
ttctaggcagtatct

SEQ ID NO: 65509 - DNA, 15 bp, Homo sapiens
tttctaggcagtatc

SEQ ID NO: 65510 - DNA, 15 bp, Homo sapiens
ttttctaggcagtat

SEQ ID NO: 65511 - DNA, 15 bp, Homo sapiens
tttttctaggcagta

SEQ ID NO: 65512 - DNA, 15 bp, Homo sapiens
ctttttctaggcagt

SEQ ID NO: 65513 - DNA, 15 bp, Homo sapiens
actttttctaggcag

SEQ ID NO: 65514 - DNA, 15 bp, Homo sapiens
cactttttctaggca

SEQ ID NO: 65515 - DNA, 15 bp, Homo sapiens
ccactttttctaggc

SEQ ID NO: 65516 - DNA, 15 bp, Homo sapiens
tccactttttctagg

SEQ ID NO: 65517 - DNA, 15 bp, Homo sapiens
atccactttttctag

SEQ ID NO: 65518 - DNA, 15 bp, Homo sapiens
gatccactttttcta

SEQ ID NO: 65519 - DNA, 15 bp, Homo sapiens
tgatccactttttct

SEQ ID NO: 65520 - DNA, 15 bp, Homo sapiens
ttgatccactttttc

SEQ ID NO: 65521 - DNA, 15 bp, Homo sapiens
cttgatccacttttt

SEQ ID NO: 65522 - DNA, 15 bp, Homo sapiens
tcttgatccactttt

SEQ ID NO: 65523 - DNA, 15 bp, Homo sapiens
ttcttgatccacttt

SEQ ID NO: 65524 - DNA, 15 bp, Homo sapiens
cttcttgatccactt

SEQ ID NO: 65525 - DNA, 15 bp, Homo sapiens
tcttcttgatccact

SEQ ID NO: 65526 - DNA, 15 bp, Homo sapiens
ctcttcttgatccac

SEQ ID NO: 65527 - DNA, 15 bp, Homo sapiens
cctcttcttgatcca

SEQ ID NO: 65528 - DNA, 15 bp, Homo sapiens
acctcttcttgatcc

SEQ ID NO: 65529 - DNA, 15 bp, Homo sapiens
cacctcttcttgatc

SEQ ID NO: 65530 - DNA, 15 bp, Homo sapiens
acacctcttcttgat

SEQ ID NO: 65531 - DNA, 15 bp, Homo sapiens
tacacctcttcttga

SEQ ID NO: 65532 - DNA, 15 bp, Homo sapiens
atacacctcttcttg

SEQ ID NO: 65533 - DNA, 15 bp, Homo sapiens
aatacacctcttctt

SEQ ID NO: 65534 - DNA, 15 bp, Homo sapiens
gaatacacctcttct

SEQ ID NO: 65535 - DNA, 15 bp, Homo sapiens
agaatacacctcttc

SEQ ID NO: 65536 - DNA, 15 bp, Homo sapiens
gagaatacacctctt

SEQ ID NO: 65537 - DNA, 15 bp, Homo sapiens
cgagaatacacctct

SEQ ID NO: 65538 - DNA, 15 bp, Homo sapiens
ccgagaatacacctc

SEQ ID NO: 65539 - DNA, 15 bp, Homo sapiens
accgagaatacacct

SEQ ID NO: 65540 - DNA, 15 bp, Homo sapiens
caccgagaatacacc

SEQ ID NO: 65541 - DNA, 15 bp, Homo sapiens
ccaccgagaatacac

SEQ ID NO: 65542 - DNA, 15 bp, Homo sapiens
accaccgagaataca

SEQ ID NO: 65543 - DNA, 15 bp, Homo sapiens
caccaccgagaatac

SEQ ID NO: 65544 - DNA, 15 bp, Homo sapiens
ccaccaccgagaata

SEQ ID NO: 65545 - DNA, 15 bp, Homo sapiens
accaccaccgagaat

SEQ ID NO: 65546 - DNA, 15 bp, Homo sapiens
aaccaccaccgagaa

SEQ ID NO: 65547 - DNA, 15 bp, Homo sapiens
caaccaccaccgaga

SEQ ID NO: 65548 - DNA, 15 bp, Homo sapiens
ccaaccaccaccgag

SEQ ID NO: 65549 - DNA, 15 bp, Homo sapiens
cccaaccaccaccga

SEQ ID NO: 65550 - DNA, 15 bp, Homo sapiens
tcccaaccaccaccg

SEQ ID NO: 65551 - DNA, 15 bp, Homo sapiens
ctcccaaccaccacc

SEQ ID NO: 65552 - DNA, 15 bp, Homo sapiens
cctcccaaccaccac

SEQ ID NO: 65553 - DNA, 15 bp, Homo sapiens
ccctcccaaccacca

SEQ ID NO: 65554 - DNA, 15 bp, Homo sapiens
gccctcccaaccacc

SEQ ID NO: 65555 - DNA, 15 bp, Homo sapiens
cgccctcccaaccac

SEQ ID NO: 65556 - DNA, 15 bp, Homo sapiens
ccgccctcccaacca

SEQ ID NO: 65557 - DNA, 15 bp, Homo sapiens
cccgccctcccaacc

SEQ ID NO: 65558 - DNA, 15 bp, Homo sapiens
gcccgccctcccaac

SEQ ID NO: 65559 - DNA, 15 bp, Homo sapiens
cgcccgccctcccaa

SEQ ID NO: 65560 - DNA, 15 bp, Homo sapiens
gcgcccgccctccca

SEQ ID NO: 65561 - DNA, 15 bp, Homo sapiens
tgcgcccgccctccc

SEQ ID NO: 65562 - DNA, 15 bp, Homo sapiens
ttgcgcccgccctcc

SEQ ID NO: 65563 - DNA, 15 bp, Homo sapiens
attgcgcccgccctc

SEQ ID NO: 65564 - DNA, 15 bp, Homo sapiens
tattgcgcccgccct

SEQ ID NO: 65565 - DNA, 15 bp, Homo sapiens
ctattgcgcccgccc

SEQ ID NO: 65566 - DNA, 15 bp, Homo sapiens
cctattgcgcccgcc

SEQ ID NO: 65567 - DNA, 15 bp, Homo sapiens
tcctattgcgcccgc

SEQ ID NO: 65568 - DNA, 15 bp, Homo sapiens
gtcctattgcgcccg

SEQ ID NO: 65569 - DNA, 15 bp, Homo sapiens
agtcctattgcgccc

SEQ ID NO: 65570 - DNA, 15 bp, Homo sapiens
gagtcctattgcgcc

SEQ ID NO: 65571 - DNA, 15 bp, Homo sapiens
tgagtcctattgcgc

SEQ ID NO: 65572 - DNA, 15 bp, Homo sapiens
ttgagtcctattgcg

SEQ ID NO: 65573 - DNA, 15 bp, Homo sapiens
attgagtcctattgc

SEQ ID NO: 65574 - DNA, 15 bp, Homo sapiens
tattgagtcctattg

SEQ ID NO: 65575 - DNA, 15 bp, Homo sapiens
ttattgagtcctatt

SEQ ID NO: 65576 - DNA, 15 bp, Homo sapiens
cttattgagtcctat

SEQ ID NO: 65577 - DNA, 15 bp, Homo sapiens
ccttattgagtccta

SEQ ID NO: 65578 - DNA, 15 bp, Homo sapiens
cccttattgagtcct

SEQ ID NO: 65579 - DNA, 15 bp, Homo sapiens
ccccttattgagtcc

SEQ ID NO: 65580 - DNA, 15 bp, Homo sapiens
tccccttattgagtc

SEQ ID NO: 65581 - DNA, 15 bp, Homo sapiens
ttccccttattgagt

SEQ ID NO: 65582 - DNA, 15 bp, Homo sapiens
cttccccttattgag

SEQ ID NO: 65583 - DNA, 15 bp, Homo sapiens
ccttccccttattga

SEQ ID NO: 65584 - DNA, 15 bp, Homo sapiens
tccttccccttattg

SEQ ID NO: 65585 - DNA, 15 bp, Homo sapiens
ctccttccccttatt

SEQ ID NO: 65586 - DNA, 15 bp, Homo sapiens
actccttccccttat

SEQ ID NO: 65587 - DNA, 15 bp, Homo sapiens
tactccttcccctta

SEQ ID NO: 65588 - DNA, 15 bp, Homo sapiens
ttactccttcccctt

SEQ ID NO: 65589 - DNA, 15 bp, Homo sapiens
gttactccttcccct

SEQ ID NO: 65590 - DNA, 15 bp, Homo sapiens
ggttactccttcccc

SEQ ID NO: 65591 - DNA, 15 bp, Homo sapiens
gggttactccttccc

SEQ ID NO: 65592 - DNA, 15 bp, Homo sapiens
agggttactccttcc

SEQ ID NO: 65593 - DNA, 15 bp, Homo sapiens
aagggttactccttc

SEQ ID NO: 65594 - DNA, 15 bp, Homo sapiens
taagggttactcctt

SEQ ID NO: 65595 - DNA, 15 bp, Homo sapiens
gtaagggttactcct

SEQ ID NO: 65596 - DNA, 15 bp, Homo sapiens
cgtaagggttactcc

SEQ ID NO: 65597 - DNA, 15 bp, Homo sapiens
tcgtaagggttactc

SEQ ID NO: 65598 - DNA, 15 bp, Homo sapiens
ttcgtaagggttact

SEQ ID NO: 65599 - DNA, 15 bp, Homo sapiens
tttcgtaagggttac

SEQ ID NO: 65600 - DNA, 15 bp, Homo sapiens
ctttcgtaagggtta

SEQ ID NO: 65601 - DNA, 15 bp, Homo sapiens
tctttcgtaagggtt

SEQ ID NO: 65602 - DNA, 15 bp, Homo sapiens
ttctttcgtaagggt

SEQ ID NO: 65603 - DNA, 15 bp, Homo sapiens
tttctttcgtaaggg

SEQ ID NO: 65604 - DNA, 15 bp, Homo sapiens
ttttctttcgtaagg

SEQ ID NO: 65605 - DNA, 15 bp, Homo sapiens
tttttctttcgtaag

SEQ ID NO: 65606 - DNA, 15 bp, Homo sapiens
gtttttctttcgtaa

SEQ ID NO: 65607 - DNA, 15 bp, Homo sapiens
tgtttttctttcgta

SEQ ID NO: 65608 - DNA, 15 bp, Homo sapiens
atgtttttctttcgt

SEQ ID NO: 65609 - DNA, 15 bp, Homo sapiens
tatgtttttctttcg

SEQ ID NO: 65610 - DNA, 15 bp, Homo sapiens
ttatgtttttctttc

SEQ ID NO: 65611 - DNA, 15 bp, Homo sapiens
cttatgtttttcttt

SEQ ID NO: 65612 - DNA, 15 bp, Homo sapiens
ccttatgtttttctt

SEQ ID NO: 65613 - DNA, 15 bp, Homo sapiens
cccttatgtttttct

SEQ ID NO: 65614 - DNA, 15 bp, Homo sapiens
gcccttatgtttttc

SEQ ID NO: 65615 - DNA, 15 bp, Homo sapiens
agcccttatgttttt

SEQ ID NO: 65616 - DNA, 15 bp, Homo sapiens
gagcccttatgtttt

SEQ ID NO: 65617 - DNA, 15 bp, Homo sapiens
tgagcccttatgttt

SEQ ID NO: 65618 - DNA, 15 bp, Homo sapiens
ttgagcccttatgtt

SEQ ID NO: 65619 - DNA, 15 bp, Homo sapiens
tttgagcccttatgt

SEQ ID NO: 65620 - DNA, 15 bp, Homo sapiens
ttttgagcccttatg

SEQ ID NO: 65621 - DNA, 15 bp, Homo sapiens
tttttgagcccttat

SEQ ID NO: 65622 - DNA, 15 bp, Homo sapiens
ctttttgagccctta

SEQ ID NO: 65623 - DNA, 15 bp, Homo sapiens
actttttgagccctt

SEQ ID NO: 65624 - DNA, 15 bp, Homo sapiens
tactttttgagccct

SEQ ID NO: 65625 - DNA, 15 bp, Homo sapiens
ttactttttgagccc

SEQ ID NO: 65626 - DNA, 15 bp, Homo sapiens
tttactttttgagcc

SEQ ID NO: 65627 - DNA, 15 bp, Homo sapiens
ttttactttttgagc

SEQ ID NO: 65628 - DNA, 15 bp, Homo sapiens
cttttactttttgag

SEQ ID NO: 65629 - DNA, 15 bp, Homo sapiens
tcttttactttttga

SEQ ID NO: 65630 - DNA, 15 bp, Homo sapiens
atcttttactttttg

SEQ ID NO: 65631 - DNA, 15 bp, Homo sapiens
tatcttttacttttt

SEQ ID NO: 65632 - DNA, 15 bp, Homo sapiens
ttatcttttactttt

SEQ ID NO: 65633 - DNA, 15 bp, Homo sapiens
gttatcttttacttt

SEQ ID NO: 65634 - DNA, 15 bp, Homo sapiens
agttatcttttactt

SEQ ID NO: 65635 - DNA, 15 bp, Homo sapiens
aagttatcttttact

SEQ ID NO: 65636 - DNA, 15 bp, Homo sapiens
gaagttatcttttac

SEQ ID NO: 65637 - DNA, 15 bp, Homo sapiens
tgaagttatctttta

SEQ ID NO: 65638 - DNA, 15 bp, Homo sapiens
gtgaagttatctttt

SEQ ID NO: 65639 - DNA, 15 bp, Homo sapiens
ggtgaagttatcttt

SEQ ID NO: 65640 - DNA, 15 bp, Homo sapiens
cggtgaagttatctt

SEQ ID NO: 65641 - DNA, 15 bp, Homo sapiens
tcggtgaagttatct

SEQ ID NO: 65642 - DNA, 15 bp, Homo sapiens
atcggtgaagttatc

SEQ ID NO: 65643 - DNA, 15 bp, Homo sapiens
tatcggtgaagttat

SEQ ID NO: 65644 - DNA, 15 bp, Homo sapiens
atatcggtgaagtta

SEQ ID NO: 65645 - DNA, 15 bp, Homo sapiens
gatatcggtgaagtt

SEQ ID NO: 65646 - DNA, 15 bp, Homo sapiens
tgatatcggtgaagt

SEQ ID NO: 65647 - DNA, 15 bp, Homo sapiens
ttgatatcggtgaag

SEQ ID NO: 65648 - DNA, 15 bp, Homo sapiens
cttgatatcggtgaa

SEQ ID NO: 65649 - DNA, 15 bp, Homo sapiens
acttgatatcggtga

SEQ ID NO: 65650 - DNA, 15 bp, Homo sapiens
aacttgatatcggtg

SEQ ID NO: 65651 - DNA, 15 bp, Homo sapiens
aaacttgatatcggt

SEQ ID NO: 65652 - DNA, 15 bp, Homo sapiens
caaacttgatatcgg

SEQ ID NO: 65653 - DNA, 15 bp, Homo sapiens
tcaaacttgatatcg

SEQ ID NO: 65654 - DNA, 15 bp, Homo sapiens
ctcaaacttgatatc

SEQ ID NO: 65655 - DNA, 15 bp, Homo sapiens
cctcaaacttgatat

SEQ ID NO: 65656 - DNA, 15 bp, Homo sapiens
tcctcaaacttgata

SEQ ID NO: 65657 - DNA, 15 bp, Homo sapiens
ttcctcaaacttgat

SEQ ID NO: 65658 - DNA, 15 bp, Homo sapiens
attcctcaaacttga

SEQ ID NO: 65659 - DNA, 15 bp, Homo sapiens
cattcctcaaacttg

SEQ ID NO: 65660 - DNA, 15 bp, Homo sapiens
tcattcctcaaactt

SEQ ID NO: 65661 - DNA, 15 bp, Homo sapiens
atcattcctcaaact

SEQ ID NO: 65662 - DNA, 15 bp, Homo sapiens
aatcattcctcaaac

SEQ ID NO: 65663 - DNA, 15 bp, Homo sapiens
taatcattcctcaaa

SEQ ID NO: 65664 - DNA, 15 bp, Homo sapiens
gtaatcattcctcaa

SEQ ID NO: 65665 - DNA, 15 bp, Homo sapiens
agtaatcattcctca

SEQ ID NO: 65666 - DNA, 15 bp, Homo sapiens
aagtaatcattcctc

SEQ ID NO: 65667 - DNA, 15 bp, Homo sapiens
caagtaatcattcct

SEQ ID NO: 65668 - DNA, 15 bp, Homo sapiens
gcaagtaatcattcc

SEQ ID NO: 65669 - DNA, 15 bp, Homo sapiens
tgcaagtaatcattc

SEQ ID NO: 65670 - DNA, 15 bp, Homo sapiens
atgcaagtaatcatt

SEQ ID NO: 65671 - DNA, 15 bp, Homo sapiens
tatgcaagtaatcat

SEQ ID NO: 65672 - DNA, 15 bp, Homo sapiens
atatgcaagtaatca

SEQ ID NO: 65673 - DNA, 15 bp, Homo sapiens
gatatgcaagtaatc

SEQ ID NO: 65674 - DNA, 15 bp, Homo sapiens
cgatatgcaagtaat

SEQ ID NO: 65675 - DNA, 15 bp, Homo sapiens
tcgatatgcaagtaa

SEQ ID NO: 65676 - DNA, 15 bp, Homo sapiens
atcgatatgcaagta

SEQ ID NO: 65677 - DNA, 15 bp, Homo sapiens
tatcgatatgcaagt

SEQ ID NO: 65678 - DNA, 15 bp, Homo sapiens
ttatcgatatgcaag

SEQ ID NO: 65679 - DNA, 15 bp, Homo sapiens
attatcgatatgcaa

SEQ ID NO: 65680 - DNA, 15 bp, Homo sapiens
aattatcgatatgca

SEQ ID NO: 65681 - DNA, 15 bp, Homo sapiens
aaattatcgatatgc

SEQ ID NO: 65682 - DNA, 15 bp, Homo sapiens
caaattatcgatatg

SEQ ID NO: 65683 - DNA, 15 bp, Homo sapiens
ccaaattatcgatat

SEQ ID NO: 65684 - DNA, 15 bp, Homo sapiens
tccaaattatcgata

SEQ ID NO: 65685 - DNA, 15 bp, Homo sapiens
ttccaaattatcgat

SEQ ID NO: 65686 - DNA, 15 bp, Homo sapiens
gttccaaattatcga

SEQ ID NO: 65687 - DNA, 15 bp, Homo sapiens
agttccaaattatcg

SEQ ID NO: 65688 - DNA, 15 bp, Homo sapiens
aagttccaaattatc

SEQ ID NO: 65689 - DNA, 15 bp, Homo sapiens
aaagttccaaattat

SEQ ID NO: 65690 - DNA, 15 bp, Homo sapiens
gaaagttccaaatta

SEQ ID NO: 65691 - DNA, 15 bp, Homo sapiens
tgaaagttccaaatt

SEQ ID NO: 65692 - DNA, 15 bp, Homo sapiens
ttgaaagttccaaat

SEQ ID NO: 65693 - DNA, 15 bp, Homo sapiens
tttgaaagttccaaa

SEQ ID NO: 65694 - DNA, 15 bp, Homo sapiens
ctttgaaagttccaa

SEQ ID NO: 65695 - DNA, 15 bp, Homo sapiens
tctttgaaagttcca

SEQ ID NO: 65696 - DNA, 15 bp, Homo sapiens
ttctttgaaagttcc

SEQ ID NO: 65697 - DNA, 15 bp, Homo sapiens
attctttgaaagttc

SEQ ID NO: 65698 - DNA, 15 bp, Homo sapiens
tattctttgaaagtt

SEQ ID NO: 65699 - DNA, 15 bp, Homo sapiens
ttattctttgaaagt

SEQ ID NO: 65700 - DNA, 15 bp, Homo sapiens
tttattctttgaaag

SEQ ID NO: 65701 - DNA, 15 bp, Homo sapiens
atttattctttgaaa

SEQ ID NO: 65702 - DNA, 15 bp, Homo sapiens
tatttattctttgaa

SEQ ID NO: 65703 - DNA, 15 bp, Homo sapiens
ttatttattctttga

SEQ ID NO: 65704 - DNA, 15 bp, Homo sapiens
attatttattctttg

SEQ ID NO: 65705 - DNA, 15 bp, Homo sapiens
gattatttattcttt

SEQ ID NO: 65706 - DNA, 15 bp, Homo sapiens
tgattatttattctt

SEQ ID NO: 65707 - DNA, 15 bp, Homo sapiens
ctgattatttattct

SEQ ID NO: 65708 - DNA, 15 bp, Homo sapiens
gctgattatttattc

SEQ ID NO: 65709 - DNA, 15 bp, Homo sapiens
agctgattatttatt

SEQ ID NO: 65710 - DNA, 15 bp, Homo sapiens
gagctgattatttat

SEQ ID NO: 65711 - DNA, 15 bp, Homo sapiens
tgagctgattattta

SEQ ID NO: 65712 - DNA, 15 bp, Homo sapiens
ttgagctgattattt

SEQ ID NO: 65713 - DNA, 15 bp, Homo sapiens
tttgagctgattatt

SEQ ID NO: 65714 - DNA, 15 bp, Homo sapiens
ctttgagctgattat

SEQ ID NO: 65715 - DNA, 15 bp, Homo sapiens
tctttgagctgatta

SEQ ID NO: 65716 - DNA, 15 bp, Homo sapiens
ttctttgagctgatt

SEQ ID NO: 65717 - DNA, 15 bp, Homo sapiens
cttctttgagctgat

SEQ ID NO: 65718 - DNA, 15 bp, Homo sapiens
gcttctttgagctga

SEQ ID NO: 65719 - DNA, 15 bp, Homo sapiens
ggcttctttgagctg

SEQ ID NO: 65720 - DNA, 15 bp, Homo sapiens
aggcttctttgagct

SEQ ID NO: 65721 - DNA, 15 bp, Homo sapiens
caggcttctttgagc

SEQ ID NO: 65722 - DNA, 15 bp, Homo sapiens
ccaggcttctttgag

SEQ ID NO: 65723 - DNA, 15 bp, Homo sapiens
cccaggcttctttga

SEQ ID NO: 65724 - DNA, 15 bp, Homo sapiens
acccaggcttctttg

SEQ ID NO: 65725 - DNA, 15 bp, Homo sapiens
gacccaggcttcttt

SEQ ID NO: 65726 - DNA, 15 bp, Homo sapiens
agacccaggcttctt

SEQ ID NO: 65727 - DNA, 15 bp, Homo sapiens
cagacccaggcttct

SEQ ID NO: 65728 - DNA, 15 bp, Homo sapiens
gcagacccaggcttc

SEQ ID NO: 65729 - DNA, 15 bp, Homo sapiens
tgcagacccaggctt

SEQ ID NO: 65730 - DNA, 15 bp, Homo sapiens
atgcagacccaggct

SEQ ID NO: 65731 - DNA, 15 bp, Homo sapiens
catgcagacccaggc

SEQ ID NO: 65732 - DNA, 15 bp, Homo sapiens
acatgcagacccagg

SEQ ID NO: 65733 - DNA, 15 bp, Homo sapiens
gacatgcagacccag

SEQ ID NO: 65734 - DNA, 15 bp, Homo sapiens
agacatgcagaccca

SEQ ID NO: 65735 - DNA, 15 bp, Homo sapiens
aagacatgcagaccc

SEQ ID NO: 65736 - DNA, 15 bp, Homo sapiens
gaagacatgcagacc

SEQ ID NO: 65737 - DNA, 15 bp, Homo sapiens
agaagacatgcagac

SEQ ID NO: 65738 - DNA, 15 bp, Homo sapiens
aagaagacatgcaga

SEQ ID NO: 65739 - DNA, 15 bp, Homo sapiens
aaagaagacatgcag

SEQ ID NO: 65740 - DNA, 15 bp, Homo sapiens
aaaagaagacatgca

SEQ ID NO: 65741 - DNA, 15 bp, Homo sapiens
caaaagaagacatgc

SEQ ID NO: 65742 - DNA, 15 bp, Homo sapiens
ccaaaagaagacatg

SEQ ID NO: 65743 - DNA, 15 bp, Homo sapiens
gccaaaagaagacat

SEQ ID NO: 65744 - DNA, 15 bp, Homo sapiens
agccaaaagaagaca

SEQ ID NO: 65745 - DNA, 15 bp, Homo sapiens
aagccaaaagaagac

SEQ ID NO: 65746 - DNA, 15 bp, Homo sapiens
gaagccaaaagaaga

SEQ ID NO: 65747 - DNA, 15 bp, Homo sapiens
cgaagccaaaagaag

SEQ ID NO: 65748 - DNA, 15 bp, Homo sapiens
gcgaagccaaaagaa

SEQ ID NO: 65749 - DNA, 15 bp, Homo sapiens
agcgaagccaaaaga

SEQ ID NO: 65750 - DNA, 15 bp, Homo sapiens
aagcgaagccaaaag

SEQ ID NO: 65751 - DNA, 15 bp, Homo sapiens
taagcgaagccaaaa

SEQ ID NO: 65752 - DNA, 15 bp, Homo sapiens
ctaagcgaagccaaa

SEQ ID NO: 65753 - DNA, 15 bp, Homo sapiens
actaagcgaagccaa

SEQ ID NO: 65754 - DNA, 15 bp, Homo sapiens
aactaagcgaagcca

SEQ ID NO: 65755 - DNA, 15 bp, Homo sapiens
caactaagcgaagcc

SEQ ID NO: 65756 - DNA, 15 bp, Homo sapiens
acaactaagcgaagc

SEQ ID NO: 65757 - DNA, 15 bp, Homo sapiens
tacaactaagcgaag

SEQ ID NO: 65758 - DNA, 15 bp, Homo sapiens
atacaactaagcgaa

SEQ ID NO: 65759 - DNA, 15 bp, Homo sapiens
catacaactaagcga

SEQ ID NO: 65760 - DNA, 15 bp, Homo sapiens
acatacaactaagcg

SEQ ID NO: 65761 - DNA, 15 bp, Homo sapiens
gacatacaactaagc

SEQ ID NO: 65762 - DNA, 15 bp, Homo sapiens
agacatacaactaag

SEQ ID NO: 65763 - DNA, 15 bp, Homo sapiens
aagacatacaactaa

SEQ ID NO: 65764 - DNA, 15 bp, Homo sapiens
aaagacatacaacta

SEQ ID NO: 65765 - DNA, 15 bp, Homo sapiens
taaagacatacaact

SEQ ID NO: 65766 - DNA, 15 bp, Homo sapiens
ataaagacatacaac

SEQ ID NO: 65767 - DNA, 15 bp, Homo sapiens
aataaagacatacaa

SEQ ID NO: 65768 - DNA, 15 bp, Homo sapiens
aaataaagacataca

SEQ ID NO: 65769 - DNA, 15 bp, Homo sapiens
taaataaagacatac

SEQ ID NO: 65770 - DNA, 15 bp, Homo sapiens
ataaataaagacata

SEQ ID NO: 65771 - DNA, 15 bp, Homo sapiens
cataaataaagacat

SEQ ID NO: 65772 - DNA, 15 bp, Homo sapiens
tcataaataaagaca

SEQ ID NO: 65773 - DNA, 15 bp, Homo sapiens
atcataaataaagac

SEQ ID NO: 65774 - DNA, 15 bp, Homo sapiens
tatcataaataaaga

SEQ ID NO: 65775 - DNA, 15 bp, Homo sapiens
atatcataaataaag

SEQ ID NO: 65776 - DNA, 15 bp, Homo sapiens
catatcataaataaa

SEQ ID NO: 65777 - DNA, 15 bp, Homo sapiens
gcatatcataaataa

SEQ ID NO: 65778 - DNA, 15 bp, Homo sapiens
cgcatatcataaata

SEQ ID NO: 65779 - DNA, 15 bp, Homo sapiens
acgcatatcataaat

SEQ ID NO: 65780 - DNA, 15 bp, Homo sapiens
aacgcatatcataaa

SEQ ID NO: 65781 - DNA, 15 bp, Homo sapiens
gaacgcatatcataa

SEQ ID NO: 65782 - DNA, 15 bp, Homo sapiens
tgaacgcatatcata

SEQ ID NO: 65783 - DNA, 15 bp, Homo sapiens
atgaacgcatatcat

SEQ ID NO: 65784 - DNA, 15 bp, Homo sapiens
catgaacgcatatca

SEQ ID NO: 65785 - DNA, 15 bp, Homo sapiens
tcatgaacgcatatc

SEQ ID NO: 65786 - DNA, 15 bp, Homo sapiens
atcatgaacgcatat

SEQ ID NO: 65787 - DNA, 15 bp, Homo sapiens
aatcatgaacgcata

SEQ ID NO: 65788 - DNA, 15 bp, Homo sapiens
aaatcatgaacgcat

SEQ ID NO: 65789 - DNA, 15 bp, Homo sapiens
gaaatcatgaacgca

SEQ ID NO: 65790 - DNA, 15 bp, Homo sapiens
agaaatcatgaacgc

SEQ ID NO: 65791 - DNA, 15 bp, Homo sapiens
tagaaatcatgaacg

SEQ ID NO: 65792 - DNA, 15 bp, Homo sapiens
ctagaaatcatgaac

SEQ ID NO: 65793 - DNA, 15 bp, Homo sapiens
gctagaaatcatgaa

SEQ ID NO: 65794 - DNA, 15 bp, Homo sapiens
cgctagaaatcatga

SEQ ID NO: 65795 - DNA, 15 bp, Homo sapiens
acgctagaaatcatg

SEQ ID NO: 65796 - DNA, 15 bp, Homo sapiens
aacgctagaaatcat

SEQ ID NO: 65797 - DNA, 15 bp, Homo sapiens
gaacgctagaaatca

SEQ ID NO: 65798 - DNA, 15 bp, Homo sapiens
agaacgctagaaatc

SEQ ID NO: 65799 - DNA, 15 bp, Homo sapiens
aagaacgctagaaat

SEQ ID NO: 65800 - DNA, 15 bp, Homo sapiens
aaagaacgctagaaa

SEQ ID NO: 65801 - DNA, 15 bp, Homo sapiens
taaagaacgctagaa

SEQ ID NO: 65802 - DNA, 15 bp, Homo sapiens
ttaaagaacgctaga

SEQ ID NO: 65803 - DNA, 15 bp, Homo sapiens
tttaaagaacgctag

SEQ ID NO: 65804 - DNA, 15 bp, Homo sapiens
ctttaaagaacgcta

SEQ ID NO: 65805 - DNA, 15 bp, Homo sapiens
actttaaagaacgct

SEQ ID NO: 65806 - DNA, 15 bp, Homo sapiens
aactttaaagaacgc

SEQ ID NO: 65807 - DNA, 15 bp, Homo sapiens
aaactttaaagaacg

SEQ ID NO: 65808 - DNA, 15 bp, Homo sapiens
gaaactttaaagaac

SEQ ID NO: 65809 - DNA, 15 bp, Homo sapiens
ggaaactttaaagaa

SEQ ID NO: 65810 - DNA, 15 bp, Homo sapiens
aggaaactttaaaga

SEQ ID NO: 65811 - DNA, 15 bp, Homo sapiens
taggaaactttaaag

SEQ ID NO: 65812 - DNA, 15 bp, Homo sapiens
ctaggaaactttaaa

SEQ ID NO: 65813 - DNA, 15 bp, Homo sapiens
actaggaaactttaa

SEQ ID NO: 65814 - DNA, 15 bp, Homo sapiens
tactaggaaacttta

SEQ ID NO: 65815 - DNA, 15 bp, Homo sapiens
ttactaggaaacttt

SEQ ID NO: 65816 - DNA, 15 bp, Homo sapiens
gttactaggaaactt

SEQ ID NO: 65817 - DNA, 15 bp, Homo sapiens
tgttactaggaaact

SEQ ID NO: 65818 - DNA, 15 bp, Homo sapiens
gtgttactaggaaac

SEQ ID NO: 65819 - DNA, 15 bp, Homo sapiens
ggtgttactaggaaa

SEQ ID NO: 65820 - DNA, 15 bp, Homo sapiens
cggtgttactaggaa

SEQ ID NO: 65821 - DNA, 15 bp, Homo sapiens
tcggtgttactagga

SEQ ID NO: 65822 - DNA, 15 bp, Homo sapiens
ctcggtgttactagg

SEQ ID NO: 65823 - DNA, 15 bp, Homo sapiens
actcggtgttactag

SEQ ID NO: 65824 - DNA, 15 bp, Homo sapiens
cactcggtgttacta

SEQ ID NO: 65825 - DNA, 15 bp, Homo sapiens
ccactcggtgttact

SEQ ID NO: 65826 - DNA, 15 bp, Homo sapiens
accactcggtgttac

SEQ ID NO: 65827 - DNA, 15 bp, Homo sapiens
aaccactcggtgtta

SEQ ID NO: 65828 - DNA, 15 bp, Homo sapiens
aaaccactcggtgtt

SEQ ID NO: 65829 - DNA, 15 bp, Homo sapiens
gaaaccactcggtgt

SEQ ID NO: 65830 - DNA, 15 bp, Homo sapiens
agaaaccactcggtg

SEQ ID NO: 65831 - DNA, 15 bp, Homo sapiens
tagaaaccactcggt

SEQ ID NO: 65832 - DNA, 15 bp, Homo sapiens
ctagaaaccactcgg

SEQ ID NO: 65833 - DNA, 15 bp, Homo sapiens
tctagaaaccactcg

SEQ ID NO: 65834 - DNA, 15 bp, Homo sapiens
ttctagaaaccactc

SEQ ID NO: 65835 - DNA, 15 bp, Homo sapiens
tttctagaaaccact

SEQ ID NO: 65836 - DNA, 15 bp, Homo sapiens
ttttctagaaaccac

SEQ ID NO: 65837 - DNA, 15 bp, Homo sapiens
cttttctagaaacca

SEQ ID NO: 65838 - DNA, 15 bp, Homo sapiens
gcttttctagaaacc

SEQ ID NO: 65839 - DNA, 15 bp, Homo sapiens
tgcttttctagaaac

SEQ ID NO: 65840 - DNA, 15 bp, Homo sapiens
ctgcttttctagaaa

SEQ ID NO: 65841 - DNA, 15 bp, Homo sapiens
gctgcttttctagaa

SEQ ID NO: 65842 - DNA, 15 bp, Homo sapiens
agctgcttttctaga

SEQ ID NO: 65843 - DNA, 15 bp, Homo sapiens
cagctgcttttctag

SEQ ID NO: 65844 - DNA, 15 bp, Homo sapiens
ccagctgcttttcta

SEQ ID NO: 65845 - DNA, 15 bp, Homo sapiens
cccagctgcttttct

SEQ ID NO: 65846 - DNA, 15 bp, Homo sapiens
ccccagctgcttttc

SEQ ID NO: 65847 - DNA, 15 bp, Homo sapiens
cccccagctgctttt

SEQ ID NO: 65848 - DNA, 15 bp, Homo sapiens
gcccccagctgcttt

SEQ ID NO: 65849 - DNA, 15 bp, Homo sapiens
tgcccccagctgctt

SEQ ID NO: 65850 - DNA, 15 bp, Homo sapiens
ttgcccccagctgct

SEQ ID NO: 65851 - DNA, 15 bp, Homo sapiens
tttgcccccagctgc

SEQ ID NO: 65852 - DNA, 15 bp, Homo sapiens
gtttgcccccagctg

SEQ ID NO: 65853 - DNA, 15 bp, Homo sapiens
agtttgcccccagct

SEQ ID NO: 65854 - DNA, 15 bp, Homo sapiens
cagtttgcccccagc

SEQ ID NO: 65855 - DNA, 15 bp, Homo sapiens
ccagtttgcccccag

SEQ ID NO: 65856 - DNA, 15 bp, Homo sapiens
accagtttgccccca

SEQ ID NO: 65857 - DNA, 15 bp, Homo sapiens
caccagtttgccccc

SEQ ID NO: 65858 - DNA, 15 bp, Homo sapiens
ccaccagtttgcccc

SEQ ID NO: 65859 - DNA, 15 bp, Homo sapiens
gccaccagtttgccc

SEQ ID NO: 65860 - DNA, 15 bp, Homo sapiens
agccaccagtttgcc

SEQ ID NO: 65861 - DNA, 15 bp, Homo sapiens
cagccaccagtttgc

SEQ ID NO: 65862 - DNA, 15 bp, Homo sapiens
acagccaccagtttg

SEQ ID NO: 65863 - DNA, 15 bp, Homo sapiens
gacagccaccagttt

SEQ ID NO: 65864 - DNA, 15 bp, Homo sapiens
ggacagccaccagtt

SEQ ID NO: 65865 - DNA, 15 bp, Homo sapiens
aggacagccaccagt

SEQ ID NO: 65866 - DNA, 15 bp, Homo sapiens
caggacagccaccag

SEQ ID NO: 65867 - DNA, 15 bp, Homo sapiens
acaggacagccacca

SEQ ID NO: 65868 - DNA, 15 bp, Homo sapiens
tacaggacagccacc

SEQ ID NO: 65869 - DNA, 15 bp, Homo sapiens
ttacaggacagccac

SEQ ID NO: 65870 - DNA, 15 bp, Homo sapiens
cttacaggacagcca

SEQ ID NO: 65871 - DNA, 15 bp, Homo sapiens
tcttacaggacagcc

SEQ ID NO: 65872 - DNA, 15 bp, Homo sapiens
ttcttacaggacagc

SEQ ID NO: 65873 - DNA, 15 bp, Homo sapiens
attcttacaggacag

SEQ ID NO: 65874 - DNA, 15 bp, Homo sapiens
tattcttacaggaca

SEQ ID NO: 65875 - DNA, 15 bp, Homo sapiens
ttattcttacaggac

SEQ ID NO: 65876 - DNA, 15 bp, Homo sapiens
attattcttacagga

SEQ ID NO: 65877 - DNA, 15 bp, Homo sapiens
aattattcttacagg

SEQ ID NO: 65878 - DNA, 15 bp, Homo sapiens
gaattattcttacag

SEQ ID NO: 65879 - DNA, 15 bp, Homo sapiens
tgaattattcttaca

SEQ ID NO: 65880 - DNA, 15 bp, Homo sapiens
atgaattattcttac

SEQ ID NO: 65881 - DNA, 15 bp, Homo sapiens
gatgaattattctta

SEQ ID NO: 65882 - DNA, 15 bp, Homo sapiens
tgatgaattattctt

SEQ ID NO: 65883 - DNA, 15 bp, Homo sapiens
ctgatgaattattct

SEQ ID NO: 65884 - DNA, 15 bp, Homo sapiens
tctgatgaattattc

SEQ ID NO: 65885 - DNA, 15 bp, Homo sapiens
gtctgatgaattatt

SEQ ID NO: 65886 - DNA, 15 bp, Homo sapiens
tgtctgatgaattat

SEQ ID NO: 65887 - DNA, 15 bp, Homo sapiens
ctgtctgatgaatta

SEQ ID NO: 65888 - DNA, 15 bp, Homo sapiens
gctgtctgatgaatt

SEQ ID NO: 65889 - DNA, 15 bp, Homo sapiens
tgctgtctgatgaat

SEQ ID NO: 65890 - DNA, 15 bp, Homo sapiens
ctgctgtctgatgaa

SEQ ID NO: 65891 - DNA, 15 bp, Homo sapiens
actgctgtctgatga

SEQ ID NO: 65892 - DNA, 15 bp, Homo sapiens
aactgctgtctgatg

SEQ ID NO: 65893 - DNA, 15 bp, Homo sapiens
caactgctgtctgat

SEQ ID NO: 65894 - DNA, 15 bp, Homo sapiens
ccaactgctgtctga

SEQ ID NO: 65895 - DNA, 15 bp, Homo sapiens
tccaactgctgtctg

SEQ ID NO: 65896 - DNA, 15 bp, Homo sapiens
ttccaactgctgtct

SEQ ID NO: 65897 - DNA, 15 bp, Homo sapiens
attccaactgctgtc

SEQ ID NO: 65898 - DNA, 15 bp, Homo sapiens
tattccaactgctgt

SEQ ID NO: 65899 - DNA, 15 bp, Homo sapiens
atattccaactgctg

SEQ ID NO: 65900 - DNA, 15 bp, Homo sapiens
aatattccaactgct

SEQ ID NO: 65901 - DNA, 15 bp, Homo sapiens
caatattccaactgc

SEQ ID NO: 65902 - DNA, 15 bp, Homo sapiens
tcaatattccaactg

SEQ ID NO: 65903 - DNA, 15 bp, Homo sapiens
atcaatattccaact

SEQ ID NO: 65904 - DNA, 15 bp, Homo sapiens
tatcaatattccaac

SEQ ID NO: 65905 - DNA, 15 bp, Homo sapiens
ttatcaatattccaa

SEQ ID NO: 65906 - DNA, 15 bp, Homo sapiens
cttatcaatattcca

SEQ ID NO: 65907 - DNA, 15 bp, Homo sapiens
tcttatcaatattcc

SEQ ID NO: 65908 - DNA, 15 bp, Homo sapiens
ttcttatcaatattc

SEQ ID NO: 65909 - DNA, 15 bp, Homo sapiens
tttcttatcaatatt

SEQ ID NO: 65910 - DNA, 15 bp, Homo sapiens
ctttcttatcaatat

SEQ ID NO: 65911 - DNA, 15 bp, Homo sapiens
gctttcttatcaata

SEQ ID NO: 65912 - DNA, 15 bp, Homo sapiens
cgctttcttatcaat

SEQ ID NO: 65913 - DNA, 15 bp, Homo sapiens
ccgctttcttatcaa

SEQ ID NO: 65914 - DNA, 15 bp, Homo sapiens
tccgctttcttatca

SEQ ID NO: 65915 - DNA, 15 bp, Homo sapiens
ttccgctttcttatc

SEQ ID NO: 65916 - DNA, 15 bp, Homo sapiens
tttccgctttcttat

SEQ ID NO: 65917 - DNA, 15 bp, Homo sapiens
atttccgctttctta

SEQ ID NO: 65918 - DNA, 15 bp, Homo sapiens
gatttccgctttctt

SEQ ID NO: 65919 - DNA, 15 bp, Homo sapiens
tgatttccgctttct

SEQ ID NO: 65920 - DNA, 15 bp, Homo sapiens
ttgatttccgctttc

SEQ ID NO: 65921 - DNA, 15 bp, Homo sapiens
tttgatttccgcttt

SEQ ID NO: 65922 - DNA, 15 bp, Homo sapiens
atttgatttccgctt

SEQ ID NO: 65923 - DNA, 15 bp, Homo sapiens
aatttgatttccgct

SEQ ID NO: 65924 - DNA, 15 bp, Homo sapiens
taatttgatttccgc

SEQ ID NO: 65925 - DNA, 15 bp, Homo sapiens
gtaatttgatttccg

SEQ ID NO: 65926 - DNA, 15 bp, Homo sapiens
tgtaatttgatttcc

SEQ ID NO: 65927 - DNA, 15 bp, Homo sapiens
ttgtaatttgatttc

SEQ ID NO: 65928 - DNA, 15 bp, Homo sapiens
cttgtaatttgattt

SEQ ID NO: 65929 - DNA, 15 bp, Homo sapiens
tcttgtaatttgatt

SEQ ID NO: 65930 - DNA, 15 bp, Homo sapiens
ttcttgtaatttgat

SEQ ID NO: 65931 - DNA, 15 bp, Homo sapiens
tttcttgtaatttga

SEQ ID NO: 65932 - DNA, 15 bp, Homo sapiens
ctttcttgtaatttg

SEQ ID NO: 65933 - DNA, 15 bp, Homo sapiens
cctttcttgtaattt

SEQ ID NO: 65934 - DNA, 15 bp, Homo sapiens
ccctttcttgtaatt

SEQ ID NO: 65935 - DNA, 15 bp, Homo sapiens
tccctttcttgtaat

SEQ ID NO: 65936 - DNA, 15 bp, Homo sapiens
ttccctttcttgtaa

SEQ ID NO: 65937 - DNA, 15 bp, Homo sapiens
tttccctttcttgta

SEQ ID NO: 65938 - DNA, 15 bp, Homo sapiens
ctttccctttcttgt

SEQ ID NO: 65939 - DNA, 15 bp, Homo sapiens
tctttccctttcttg

SEQ ID NO: 65940 - DNA, 15 bp, Homo sapiens
ctctttccctttctt

SEQ ID NO: 65941 - DNA, 15 bp, Homo sapiens
tctctttccctttct

SEQ ID NO: 65942 - DNA, 15 bp, Homo sapiens
ttctctttccctttc

SEQ ID NO: 65943 - DNA, 15 bp, Homo sapiens
tttctctttcccttt

SEQ ID NO: 65944 - DNA, 15 bp, Homo sapiens
ctttctctttccctt

SEQ ID NO: 65945 - DNA, 15 bp, Homo sapiens
cctttctctttccct

SEQ ID NO: 65946 - DNA, 15 bp, Homo sapiens
tcctttctctttccc

SEQ ID NO: 65947 - DNA, 15 bp, Homo sapiens
ttcctttctctttcc

SEQ ID NO: 65948 - DNA, 15 bp, Homo sapiens
cttcctttctctttc

SEQ ID NO: 65949 - DNA, 15 bp, Homo sapiens
tcttcctttctcttt

SEQ ID NO: 65950 - DNA, 15 bp, Homo sapiens
ctcttcctttctctt

SEQ ID NO: 65951 - DNA, 15 bp, Homo sapiens
cctcttcctttctct

SEQ ID NO: 65952 - DNA, 15 bp, Homo sapiens
ccctcttcctttctc

SEQ ID NO: 65953 - DNA, 15 bp, Homo sapiens
tccctcttcctttct

SEQ ID NO: 65954 - DNA, 15 bp, Homo sapiens
ctccctcttcctttc

SEQ ID NO: 65955 - DNA, 15 bp, Homo sapiens
actccctcttccttt

SEQ ID NO: 65956 - DNA, 15 bp, Homo sapiens
cactccctcttcctt

SEQ ID NO: 65957 - DNA, 15 bp, Homo sapiens
ccactccctcttcct

SEQ ID NO: 65958 - DNA, 15 bp, Homo sapiens
cccactccctcttcc

SEQ ID NO: 65959 - DNA, 15 bp, Homo sapiens
tcccactccctcttc

SEQ ID NO: 65960 - DNA, 15 bp, Homo sapiens
gtcccactccctctt

SEQ ID NO: 65961 - DNA, 15 bp, Homo sapiens
ggtcccactccctct

SEQ ID NO: 65962 - DNA, 15 bp, Homo sapiens
gggtcccactccctc

SEQ ID NO: 65963 - DNA, 15 bp, Homo sapiens
tgggtcccactccct

SEQ ID NO: 65964 - DNA, 15 bp, Homo sapiens
ctgggtcccactccc

SEQ ID NO: 65965 - DNA, 15 bp, Homo sapiens
tctgggtcccactcc

SEQ ID NO: 65966 - DNA, 15 bp, Homo sapiens
ctctgggtcccactc

SEQ ID NO: 65967 - DNA, 15 bp, Homo sapiens
tctctgggtcccact

SEQ ID NO: 65968 - DNA, 15 bp, Homo sapiens
ctctctgggtcccac

SEQ ID NO: 65969 - DNA, 15 bp, Homo sapiens
gctctctgggtccca

SEQ ID NO: 65970 - DNA, 15 bp, Homo sapiens
agctctctgggtccc

SEQ ID NO: 65971 - DNA, 15 bp, Homo sapiens
cagctctctgggtcc

SEQ ID NO: 65972 - DNA, 15 bp, Homo sapiens
ccagctctctgggtc

SEQ ID NO: 65973 - DNA, 15 bp, Homo sapiens
gccagctctctgggt

SEQ ID NO: 65974 - DNA, 15 bp, Homo sapiens
cgccagctctctggg

SEQ ID NO: 65975 - DNA, 15 bp, Homo sapiens
ccgccagctctctgg

SEQ ID NO: 65976 - DNA, 15 bp, Homo sapiens
cccgccagctctctg

SEQ ID NO: 65977 - DNA, 15 bp, Homo sapiens
tcccgccagctctct

SEQ ID NO: 65978 - DNA, 15 bp, Homo sapiens
ctcccgccagctctc

SEQ ID NO: 65979 - DNA, 15 bp, Homo sapiens
cctcccgccagctct

SEQ ID NO: 65980 - DNA, 15 bp, Homo sapiens
gcctcccgccagctc

SEQ ID NO: 65981 - DNA, 15 bp, Homo sapiens
tgcctcccgccagct

SEQ ID NO: 65982 - DNA, 15 bp, Homo sapiens
ctgcctcccgccagc

SEQ ID NO: 65983 - DNA, 15 bp, Homo sapiens
gctgcctcccgccag

SEQ ID NO: 65984 - DNA, 15 bp, Homo sapiens
cgctgcctcccgcca

SEQ ID NO: 65985 - DNA, 15 bp, Homo sapiens
tcgctgcctcccgcc

SEQ ID NO: 65986 - DNA, 15 bp, Homo sapiens
ttcgctgcctcccgc

SEQ ID NO: 65987 - DNA, 15 bp, Homo sapiens
cttcgctgcctcccg

SEQ ID NO: 65988 - DNA, 15 bp, Homo sapiens
ccttcgctgcctccc

SEQ ID NO: 65989 - DNA, 15 bp, Homo sapiens
cccttcgctgcctcc

SEQ ID NO: 65990 - DNA, 15 bp, Homo sapiens
ccccttcgctgcctc

SEQ ID NO: 65991 - DNA, 15 bp, Homo sapiens
tccccttcgctgcct

SEQ ID NO: 65992 - DNA, 15 bp, Homo sapiens
ttccccttcgctgcc

SEQ ID NO: 65993 - DNA, 15 bp, Homo sapiens
tttccccttcgctgc

SEQ ID NO: 65994 - DNA, 15 bp, Homo sapiens
ctttccccttcgctg

SEQ ID NO: 65995 - DNA, 15 bp, Homo sapiens
gctttccccttcgct

SEQ ID NO: 65996 - DNA, 15 bp, Homo sapiens
agctttccccttcgc

SEQ ID NO: 65997 - DNA, 15 bp, Homo sapiens
aagctttccccttcg

SEQ ID NO: 65998 - DNA, 15 bp, Homo sapiens
gaagctttccccttc

SEQ ID NO: 65999 - DNA, 15 bp, Homo sapiens
tgaagctttcccctt

SEQ ID NO: 66000 - DNA, 15 bp, Homo sapiens
ctgaagctttcccct

SEQ ID NO: 66001 - DNA, 15 bp, Homo sapiens
actgaagctttcccc

SEQ ID NO: 66002 - DNA, 15 bp, Homo sapiens
cactgaagctttccc

SEQ ID NO: 66003 - DNA, 15 bp, Homo sapiens
gcactgaagctttcc

SEQ ID NO: 66004 - DNA, 15 bp, Homo sapiens
tgcactgaagctttc

SEQ ID NO: 66005 - DNA, 15 bp, Homo sapiens
gtgcactgaagcttt

SEQ ID NO: 66006 - DNA, 15 bp, Homo sapiens
cgtgcactgaagctt

SEQ ID NO: 66007 - DNA, 15 bp, Homo sapiens
gcgtgcactgaagct

SEQ ID NO: 66008 - DNA, 15 bp, Homo sapiens
tgcgtgcactgaagc

SEQ ID NO: 66009 - DNA, 15 bp, Homo sapiens
atgcgtgcactgaag

SEQ ID NO: 66010 - DNA, 15 bp, Homo sapiens
tatgcgtgcactgaa

SEQ ID NO: 66011 - DNA, 15 bp, Homo sapiens
ctatgcgtgcactga

SEQ ID NO: 66012 - DNA, 15 bp, Homo sapiens
gctatgcgtgcactg

SEQ ID NO: 66013 - DNA, 15 bp, Homo sapiens
agctatgcgtgcact

SEQ ID NO: 66014 - DNA, 15 bp, Homo sapiens
gagctatgcgtgcac

SEQ ID NO: 66015 - DNA, 15 bp, Homo sapiens
ggagctatgcgtgca

SEQ ID NO: 66016 - DNA, 15 bp, Homo sapiens
aggagctatgcgtgc

SEQ ID NO: 66017 - DNA, 15 bp, Homo sapiens
caggagctatgcgtg

SEQ ID NO: 66018 - DNA, 15 bp, Homo sapiens
gcaggagctatgcgt

SEQ ID NO: 66019 - DNA, 15 bp, Homo sapiens
tgcaggagctatgcg

SEQ ID NO: 66020 - DNA, 15 bp, Homo sapiens
gtgcaggagctatgc

SEQ ID NO: 66021 - DNA, 15 bp, Homo sapiens
tgtgcaggagctatg

SEQ ID NO: 66022 - DNA, 15 bp, Homo sapiens
ctgtgcaggagctat

SEQ ID NO: 66023 - DNA, 15 bp, Homo sapiens
gctgtgcaggagcta

SEQ ID NO: 66024 - DNA, 15 bp, Homo sapiens
cgctgtgcaggagct

SEQ ID NO: 66025 - DNA, 15 bp, Homo sapiens
ccgctgtgcaggagc

SEQ ID NO: 66026 - DNA, 15 bp, Homo sapiens
gccgctgtgcaggag

SEQ ID NO: 66027 - DNA, 15 bp, Homo sapiens
agccgctgtgcagga

SEQ ID NO: 66028 - DNA, 15 bp, Homo sapiens
gagccgctgtgcagg

SEQ ID NO: 66029 - DNA, 15 bp, Homo sapiens
ggagccgctgtgcag

SEQ ID NO: 66030 - DNA, 15 bp, Homo sapiens
aggagccgctgtgca

SEQ ID NO: 66031 - DNA, 15 bp, Homo sapiens
caggagccgctgtgc

SEQ ID NO: 66032 - DNA, 15 bp, Homo sapiens
gcaggagccgctgtg

SEQ ID NO: 66033 - DNA, 15 bp, Homo sapiens
tgcaggagccgctgt

SEQ ID NO: 66034 - DNA, 15 bp, Homo sapiens
ctgcaggagccgctg

SEQ ID NO: 66035 - DNA, 15 bp, Homo sapiens
gctgcaggagccgct

SEQ ID NO: 66036 - DNA, 15 bp, Homo sapiens
ggctgcaggagccgc

SEQ ID NO: 66037 - DNA, 15 bp, Homo sapiens
gggctgcaggagccg

SEQ ID NO: 66038 - DNA, 15 bp, Homo sapiens
ggggctgcaggagcc

SEQ ID NO: 66039 - DNA, 15 bp, Homo sapiens
gggggctgcaggagc

SEQ ID NO: 66040 - DNA, 15 bp, Homo sapiens
ggggggctgcaggag

SEQ ID NO: 66041 - DNA, 15 bp, Homo sapiens
tggggggctgcagga

SEQ ID NO: 66042 - DNA, 15 bp, Homo sapiens
ctggggggctgcagg

SEQ ID NO: 66043 - DNA, 15 bp, Homo sapiens
cctggggggctgcag

SEQ ID NO: 66044 - DNA, 15 bp, Homo sapiens
tcctggggggctgca

SEQ ID NO: 66045 - DNA, 15 bp, Homo sapiens
atcctggggggctgc

SEQ ID NO: 66046 - DNA, 15 bp, Homo sapiens
catcctggggggctg

SEQ ID NO: 66047 - DNA, 15 bp, Homo sapiens
gcatcctggggggct

SEQ ID NO: 66048 - DNA, 15 bp, Homo sapiens
cgcatcctggggggc

SEQ ID NO: 66049 - DNA, 15 bp, Homo sapiens
gcgcatcctgggggg

SEQ ID NO: 66050 - DNA, 15 bp, Homo sapiens
ggcgcatcctggggg

SEQ ID NO: 66051 - DNA, 15 bp, Homo sapiens
aggcgcatcctgggg

SEQ ID NO: 66052 - DNA, 15 bp, Homo sapiens
caggcgcatcctggg

SEQ ID NO: 66053 - DNA, 15 bp, Homo sapiens
tcaggcgcatcctgg

SEQ ID NO: 66054 - DNA, 15 bp, Homo sapiens
ctcaggcgcatcctg

SEQ ID NO: 66055 - DNA, 15 bp, Homo sapiens
gctcaggcgcatcct

SEQ ID NO: 66056 - DNA, 15 bp, Homo sapiens
agctcaggcgcatcc

SEQ ID NO: 66057 - DNA, 15 bp, Homo sapiens
cagctcaggcgcatc

SEQ ID NO: 66058 - DNA, 15 bp, Homo sapiens
tcagctcaggcgcat

SEQ ID NO: 66059 - DNA, 15 bp, Homo sapiens
ctcagctcaggcgca

SEQ ID NO: 66060 - DNA, 15 bp, Homo sapiens
cctcagctcaggcgc

SEQ ID NO: 66061 - DNA, 15 bp, Homo sapiens
gcctcagctcaggcg

SEQ ID NO: 66062 - DNA, 15 bp, Homo sapiens
agcctcagctcaggc

SEQ ID NO: 66063 - DNA, 15 bp, Homo sapiens
cagcctcagctcagg

SEQ ID NO: 66064 - DNA, 15 bp, Homo sapiens
gcagcctcagctcag

SEQ ID NO: 66065 - DNA, 15 bp, Homo sapiens
agcagcctcagctca

SEQ ID NO: 66066 - DNA, 15 bp, Homo sapiens
aagcagcctcagctc

SEQ ID NO: 66067 - DNA, 15 bp, Homo sapiens
caagcagcctcagct

SEQ ID NO: 66068 - DNA, 15 bp, Homo sapiens
acaagcagcctcagc

SEQ ID NO: 66069 - DNA, 15 bp, Homo sapiens
cacaagcagcctcag

SEQ ID NO: 66070 - DNA, 15 bp, Homo sapiens
ccacaagcagcctca

SEQ ID NO: 66071 - DNA, 15 bp, Homo sapiens
cccacaagcagcctc

SEQ ID NO: 66072 - DNA, 15 bp, Homo sapiens
gcccacaagcagcct

SEQ ID NO: 66073 - DNA, 15 bp, Homo sapiens
tgcccacaagcagcc

SEQ ID NO: 66074 - DNA, 15 bp, Homo sapiens
ctgcccacaagcagc

SEQ ID NO: 66075 - DNA, 15 bp, Homo sapiens
cctgcccacaagcag

SEQ ID NO: 66076 - DNA, 15 bp, Homo sapiens
gcctgcccacaagca

SEQ ID NO: 66077 - DNA, 15 bp, Homo sapiens
ggcctgcccacaagc

SEQ ID NO: 66078 - DNA, 15 bp, Homo sapiens
gggcctgcccacaag

SEQ ID NO: 66079 - DNA, 15 bp, Homo sapiens
agggcctgcccacaa

SEQ ID NO: 66080 - DNA, 15 bp, Homo sapiens
tagggcctgcccaca

SEQ ID NO: 66081 - DNA, 15 bp, Homo sapiens
ctagggcctgcccac

SEQ ID NO: 66082 - DNA, 15 bp, Homo sapiens
tctagggcctgccca

SEQ ID NO: 66083 - DNA, 15 bp, Homo sapiens
ctctagggcctgccc

SEQ ID NO: 66084 - DNA, 15 bp, Homo sapiens
tctctagggcctgcc

SEQ ID NO: 66085 - DNA, 15 bp, Homo sapiens
ctctctagggcctgc

SEQ ID NO: 66086 - DNA, 15 bp, Homo sapiens
tctctctagggcctg

SEQ ID NO: 66087 - DNA, 15 bp, Homo sapiens
ctctctctagggcct

SEQ ID NO: 66088 - DNA, 15 bp, Homo sapiens
cctctctctagggcc

SEQ ID NO: 66089 - DNA, 15 bp, Homo sapiens
gcctctctctagggc

SEQ ID NO: 66090 - DNA, 15 bp, Homo sapiens
tgcctctctctaggg

SEQ ID NO: 66091 - DNA, 15 bp, Homo sapiens
ttgcctctctctagg

SEQ ID NO: 66092 - DNA, 15 bp, Homo sapiens
tttgcctctctctag

SEQ ID NO: 66093 - DNA, 15 bp, Homo sapiens
gtttgcctctctcta

SEQ ID NO: 66094 - DNA, 15 bp, Homo sapiens
agtttgcctctctct

SEQ ID NO: 66095 - DNA, 15 bp, Homo sapiens
aagtttgcctctctc

SEQ ID NO: 66096 - DNA, 15 bp, Homo sapiens
aaagtttgcctctct

SEQ ID NO: 66097 - DNA, 15 bp, Homo sapiens
caaagtttgcctctc

SEQ ID NO: 66098 - DNA, 15 bp, Homo sapiens
tcaaagtttgcctct

SEQ ID NO: 66099 - DNA, 15 bp, Homo sapiens
gtcaaagtttgcctc

SEQ ID NO: 66100 - DNA, 15 bp, Homo sapiens
agtcaaagtttgcct

SEQ ID NO: 66101 - DNA, 15 bp, Homo sapiens
gagtcaaagtttgcc

SEQ ID NO: 66102 - DNA, 15 bp, Homo sapiens
ggagtcaaagtttgc

SEQ ID NO: 66103 - DNA, 15 bp, Homo sapiens
tggagtcaaagtttg

SEQ ID NO: 66104 - DNA, 15 bp, Homo sapiens
ctggagtcaaagttt

SEQ ID NO: 66105 - DNA, 15 bp, Homo sapiens
cctggagtcaaagtt

SEQ ID NO: 66106 - DNA, 15 bp, Homo sapiens
gcctggagtcaaagt

SEQ ID NO: 66107 - DNA, 15 bp, Homo sapiens
tgcctggagtcaaag

SEQ ID NO: 66108 - DNA, 15 bp, Homo sapiens
gtgcctggagtcaaa

SEQ ID NO: 66109 - DNA, 15 bp, Homo sapiens
cgtgcctggagtcaa

SEQ ID NO: 66110 - DNA, 15 bp, Homo sapiens
gcgtgcctggagtca

SEQ ID NO: 66111 - DNA, 15 bp, Homo sapiens
tgcgtgcctggagtc

SEQ ID NO: 66112 - DNA, 15 bp, Homo sapiens
ctgcgtgcctggagt

SEQ ID NO: 66113 - DNA, 15 bp, Homo sapiens
gctgcgtgcctggag

SEQ ID NO: 66114 - DNA, 15 bp, Homo sapiens
tgctgcgtgcctgga

SEQ ID NO: 66115 - DNA, 15 bp, Homo sapiens
ctgctgcgtgcctgg

SEQ ID NO: 66116 - DNA, 15 bp, Homo sapiens
cctgctgcgtgcctg

SEQ ID NO: 66117 - DNA, 15 bp, Homo sapiens
acctgctgcgtgcct

SEQ ID NO: 66118 - DNA, 15 bp, Homo sapiens
aacctgctgcgtgcc

SEQ ID NO: 66119 - DNA, 15 bp, Homo sapiens
aaacctgctgcgtgc

SEQ ID NO: 66120 - DNA, 15 bp, Homo sapiens
taaacctgctgcgtg

SEQ ID NO: 66121 - DNA, 15 bp, Homo sapiens
ttaaacctgctgcgt

SEQ ID NO: 66122 - DNA, 15 bp, Homo sapiens
gttaaacctgctgcg

SEQ ID NO: 66123 - DNA, 15 bp, Homo sapiens
agttaaacctgctgc

SEQ ID NO: 66124 - DNA, 15 bp, Homo sapiens
gagttaaacctgctg

SEQ ID NO: 66125 - DNA, 15 bp, Homo sapiens
ggagttaaacctgct

SEQ ID NO: 66126 - DNA, 15 bp, Homo sapiens
aggagttaaacctgc

SEQ ID NO: 66127 - DNA, 15 bp, Homo sapiens
gaggagttaaacctg

SEQ ID NO: 66128 - DNA, 15 bp, Homo sapiens
tgaggagttaaacct

SEQ ID NO: 66129 - DNA, 15 bp, Homo sapiens
gtgaggagttaaacc

SEQ ID NO: 66130 - DNA, 15 bp, Homo sapiens
agtgaggagttaaac

SEQ ID NO: 66131 - DNA, 15 bp, Homo sapiens
cagtgaggagttaaa

SEQ ID NO: 66132 - DNA, 15 bp, Homo sapiens
ccagtgaggagttaa

SEQ ID NO: 66133 - DNA, 15 bp, Homo sapiens
gccagtgaggagtta

SEQ ID NO: 66134 - DNA, 15 bp, Homo sapiens
agccagtgaggagtt

SEQ ID NO: 66135 - DNA, 15 bp, Homo sapiens
cagccagtgaggagt

SEQ ID NO: 66136 - DNA, 15 bp, Homo sapiens
ccagccagtgaggag

SEQ ID NO: 66137 - DNA, 15 bp, Homo sapiens
cccagccagtgagga

SEQ ID NO: 66138 - DNA, 15 bp, Homo sapiens
acccagccagtgagg

SEQ ID NO: 66139 - DNA, 15 bp, Homo sapiens
aacccagccagtgag

SEQ ID NO: 66140 - DNA, 15 bp, Homo sapiens
gaacccagccagtga

SEQ ID NO: 66141 - DNA, 15 bp, Homo sapiens
agaacccagccagtg

SEQ ID NO: 66142 - DNA, 15 bp, Homo sapiens
cagaacccagccagt

SEQ ID NO: 66143 - DNA, 15 bp, Homo sapiens
ccagaacccagccag

SEQ ID NO: 66144 - DNA, 15 bp, Homo sapiens
cccagaacccagcca

SEQ ID NO: 66145 - DNA, 15 bp, Homo sapiens
tcccagaacccagcc

SEQ ID NO: 66146 - DNA, 15 bp, Homo sapiens
ctcccagaacccagc

SEQ ID NO: 66147 - DNA, 15 bp, Homo sapiens
gctcccagaacccag

SEQ ID NO: 66148 - DNA, 15 bp, Homo sapiens
agctcccagaaccca

SEQ ID NO: 66149 - DNA, 15 bp, Homo sapiens
gagctcccagaaccc

SEQ ID NO: 66150 - DNA, 15 bp, Homo sapiens
agagctcccagaacc

SEQ ID NO: 66151 - DNA, 15 bp, Homo sapiens
cagagctcccagaac

SEQ ID NO: 66152 - DNA, 15 bp, Homo sapiens
ccagagctcccagaa

SEQ ID NO: 66153 - DNA, 15 bp, Homo sapiens
cccagagctcccaga

SEQ ID NO: 66154 - DNA, 15 bp, Homo sapiens
gcccagagctcccag

SEQ ID NO: 66155 - DNA, 15 bp, Homo sapiens
tgcccagagctccca

SEQ ID NO: 66156 - DNA, 15 bp, Homo sapiens
gtgcccagagctccc

SEQ ID NO: 66157 - DNA, 15 bp, Homo sapiens
tgtgcccagagctcc

SEQ ID NO: 66158 - DNA, 15 bp, Homo sapiens
gtgtgcccagagctc

SEQ ID NO: 66159 - DNA, 15 bp, Homo sapiens
tgtgtgcccagagct

SEQ ID NO: 66160 - DNA, 15 bp, Homo sapiens
ctgtgtgcccagagc

SEQ ID NO: 66161 - DNA, 15 bp, Homo sapiens
cctgtgtgcccagag

SEQ ID NO: 66162 - DNA, 15 bp, Homo sapiens
tcctgtgtgcccaga

SEQ ID NO: 66163 - DNA, 15 bp, Homo sapiens
atcctgtgtgcccag

SEQ ID NO: 66164 - DNA, 15 bp, Homo sapiens
tatcctgtgtgccca

SEQ ID NO: 66165 - DNA, 15 bp, Homo sapiens
ctatcctgtgtgccc

SEQ ID NO: 66166 - DNA, 15 bp, Homo sapiens
cctatcctgtgtgcc

SEQ ID NO: 66167 - DNA, 15 bp, Homo sapiens
gcctatcctgtgtgc

SEQ ID NO: 66168 - DNA, 15 bp, Homo sapiens
tgcctatcctgtgtg

SEQ ID NO: 66169 - DNA, 15 bp, Homo sapiens
gtgcctatcctgtgt

SEQ ID NO: 66170 - DNA, 15 bp, Homo sapiens
ggtgcctatcctgtg

SEQ ID NO: 66171 - DNA, 15 bp, Homo sapiens
tggtgcctatcctgt

SEQ ID NO: 66172 - DNA, 15 bp, Homo sapiens
ttggtgcctatcctg

SEQ ID NO: 66173 - DNA, 15 bp, Homo sapiens
cttggtgcctatcct

SEQ ID NO: 66174 - DNA, 15 bp, Homo sapiens
tcttggtgcctatcc

SEQ ID NO: 66175 - DNA, 15 bp, Homo sapiens
ttcttggtgcctatc

SEQ ID NO: 66176 - DNA, 15 bp, Homo sapiens
gttcttggtgcctat

SEQ ID NO: 66177 - DNA, 15 bp, Homo sapiens
agttcttggtgccta

SEQ ID NO: 66178 - DNA, 15 bp, Homo sapiens
tagttcttggtgcct

SEQ ID NO: 66179 - DNA, 15 bp, Homo sapiens
ttagttcttggtgcc

SEQ ID NO: 66180 - DNA, 15 bp, Homo sapiens
gttagttcttggtgc

SEQ ID NO: 66181 - DNA, 15 bp, Homo sapiens
tgttagttcttggtg

SEQ ID NO: 66182 - DNA, 15 bp, Homo sapiens
gtgttagttcttggt

SEQ ID NO: 66183 - DNA, 15 bp, Homo sapiens
tgtgttagttcttgg

SEQ ID NO: 66184 - DNA, 15 bp, Homo sapiens
atgtgttagttcttg

SEQ ID NO: 66185 - DNA, 15 bp, Homo sapiens
gatgtgttagttctt

SEQ ID NO: 66186 - DNA, 15 bp, Homo sapiens
ggatgtgttagttct

SEQ ID NO: 66187 - DNA, 15 bp, Homo sapiens
aggatgtgttagttc

SEQ ID NO: 66188 - DNA, 15 bp, Homo sapiens
caggatgtgttagtt

SEQ ID NO: 66189 - DNA, 15 bp, Homo sapiens
ccaggatgtgttagt

SEQ ID NO: 66190 - DNA, 15 bp, Homo sapiens
tccaggatgtgttag

SEQ ID NO: 66191 - DNA, 15 bp, Homo sapiens
ctccaggatgtgtta

SEQ ID NO: 66192 - DNA, 15 bp, Homo sapiens
gctccaggatgtgtt

SEQ ID NO: 66193 - DNA, 15 bp, Homo sapiens
agctccaggatgtgt

SEQ ID NO: 66194 - DNA, 15 bp, Homo sapiens
cagctccaggatgtg

SEQ ID NO: 66195 - DNA, 15 bp, Homo sapiens
gcagctccaggatgt

SEQ ID NO: 66196 - DNA, 15 bp, Homo sapiens
ggcagctccaggatg

SEQ ID NO: 66197 - DNA, 15 bp, Homo sapiens
gggcagctccaggat

SEQ ID NO: 66198 - DNA, 15 bp, Homo sapiens
cgggcagctccagga

SEQ ID NO: 66199 - DNA, 15 bp, Homo sapiens
ccgggcagctccagg

SEQ ID NO: 66200 - DNA, 15 bp, Homo sapiens
tccgggcagctccag

SEQ ID NO: 66201 - DNA, 15 bp, Homo sapiens
ctccgggcagctcca

SEQ ID NO: 66202 - DNA, 15 bp, Homo sapiens
actccgggcagctcc

SEQ ID NO: 66203 - DNA, 15 bp, Homo sapiens
aactccgggcagctc

SEQ ID NO: 66204 - DNA, 15 bp, Homo sapiens
gaactccgggcagct

SEQ ID NO: 66205 - DNA, 15 bp, Homo sapiens
ggaactccgggcagc

SEQ ID NO: 66206 - DNA, 15 bp, Homo sapiens
cggaactccgggcag

SEQ ID NO: 66207 - DNA, 15 bp, Homo sapiens
gcggaactccgggca

SEQ ID NO: 66208 - DNA, 15 bp, Homo sapiens
agcggaactccgggc

SEQ ID NO: 66209 - DNA, 15 bp, Homo sapiens
gagcggaactccggg

SEQ ID NO: 66210 - DNA, 15 bp, Homo sapiens
ggagcggaactccgg

SEQ ID NO: 66211 - DNA, 15 bp, Homo sapiens
aggagcggaactccg

SEQ ID NO: 66212 - DNA, 15 bp, Homo sapiens
caggagcggaactcc

SEQ ID NO: 66213 - DNA, 15 bp, Homo sapiens
gcaggagcggaactc

SEQ ID NO: 66214 - DNA, 15 bp, Homo sapiens
cgcaggagcggaact

SEQ ID NO: 66215 - DNA, 15 bp, Homo sapiens
ccgcaggagcggaac

SEQ ID NO: 66216 - DNA, 15 bp, Homo sapiens
cccgcaggagcggaa

SEQ ID NO: 66217 - DNA, 15 bp, Homo sapiens
gcccgcaggagcgga

SEQ ID NO: 66218 - DNA, 15 bp, Homo sapiens
agcccgcaggagcgg

SEQ ID NO: 66219 - DNA, 15 bp, Homo sapiens
aagcccgcaggagcg

SEQ ID NO: 66220 - DNA, 15 bp, Homo sapiens
taagcccgcaggagc

SEQ ID NO: 66221 - DNA, 15 bp, Homo sapiens
ctaagcccgcaggag

SEQ ID NO: 66222 - DNA, 15 bp, Homo sapiens
gctaagcccgcagga

SEQ ID NO: 66223 - DNA, 15 bp, Homo sapiens
tgctaagcccgcagg

SEQ ID NO: 66224 - DNA, 15 bp, Homo sapiens
ctgctaagcccgcag

SEQ ID NO: 66225 - DNA, 15 bp, Homo sapiens
cctgctaagcccgca

SEQ ID NO: 66226 - DNA, 15 bp, Homo sapiens
tcctgctaagcccgc

SEQ ID NO: 66227 - DNA, 15 bp, Homo sapiens
ttcctgctaagcccg

SEQ ID NO: 66228 - DNA, 15 bp, Homo sapiens
tttcctgctaagccc

SEQ ID NO: 66229 - DNA, 15 bp, Homo sapiens
ctttcctgctaagcc

SEQ ID NO: 66230 - DNA, 15 bp, Homo sapiens
cctttcctgctaagc

SEQ ID NO: 66231 - DNA, 15 bp, Homo sapiens
ccctttcctgctaag

SEQ ID NO: 66232 - DNA, 15 bp, Homo sapiens
accctttcctgctaa

SEQ ID NO: 66233 - DNA, 15 bp, Homo sapiens
caccctttcctgcta

SEQ ID NO: 66234 - DNA, 15 bp, Homo sapiens
gcaccctttcctgct

SEQ ID NO: 66235 - DNA, 15 bp, Homo sapiens
ggcaccctttcctgc

SEQ ID NO: 66236 - DNA, 15 bp, Homo sapiens
aggcaccctttcctg

SEQ ID NO: 66237 - DNA, 15 bp, Homo sapiens
taggcaccctttcct

SEQ ID NO: 66238 - DNA, 15 bp, Homo sapiens
ttaggcaccctttcc

SEQ ID NO: 66239 - DNA, 15 bp, Homo sapiens
cttaggcaccctttc

SEQ ID NO: 66240 - DNA, 15 bp, Homo sapiens
ccttaggcacccttt

SEQ ID NO: 66241 - DNA, 15 bp, Homo sapiens
accttaggcaccctt

SEQ ID NO: 66242 - DNA, 15 bp, Homo sapiens
caccttaggcaccct

SEQ ID NO: 66243 - DNA, 15 bp, Homo sapiens
tcaccttaggcaccc

SEQ ID NO: 66244 - DNA, 15 bp, Homo sapiens
ctcaccttaggcacc

SEQ ID NO: 66245 - DNA, 15 bp, Homo sapiens
actcaccttaggcac

SEQ ID NO: 66246 - DNA, 15 bp, Homo sapiens
cactcaccttaggca

SEQ ID NO: 66247 - DNA, 15 bp, Homo sapiens
gcactcaccttaggc

SEQ ID NO: 66248 - DNA, 15 bp, Homo sapiens
ggcactcaccttagg

SEQ ID NO: 66249 - DNA, 15 bp, Homo sapiens
gggcactcaccttag

SEQ ID NO: 66250 - DNA, 15 bp, Homo sapiens
tgggcactcacctta

SEQ ID NO: 66251 - DNA, 15 bp, Homo sapiens
gtgggcactcacctt

SEQ ID NO: 66252 - DNA, 15 bp, Homo sapiens
agtgggcactcacct

SEQ ID NO: 66253 - DNA, 15 bp, Homo sapiens
aagtgggcactcacc

SEQ ID NO: 66254 - DNA, 15 bp, Homo sapiens
caagtgggcactcac

SEQ ID NO: 66255 - DNA, 15 bp, Homo sapiens
gcaagtgggcactca

SEQ ID NO: 66256 - DNA, 15 bp, Homo sapiens
cgcaagtgggcactc

SEQ ID NO: 66257 - DNA, 15 bp, Homo sapiens
acgcaagtgggcact

SEQ ID NO: 66258 - DNA, 15 bp, Homo sapiens
gacgcaagtgggcac

SEQ ID NO: 66259 - DNA, 15 bp, Homo sapiens
ggacgcaagtgggca

SEQ ID NO: 66260 - DNA, 15 bp, Homo sapiens
cggacgcaagtgggc

SEQ ID NO: 66261 - DNA, 15 bp, Homo sapiens
tcggacgcaagtggg

SEQ ID NO: 66262 - DNA, 15 bp, Homo sapiens
atcggacgcaagtgg

SEQ ID NO: 66263 - DNA, 15 bp, Homo sapiens
gatcggacgcaagtg

SEQ ID NO: 66264 - DNA, 15 bp, Homo sapiens
ggatcggacgcaagt

SEQ ID NO: 66265 - DNA, 15 bp, Homo sapiens
aggatcggacgcaag

SEQ ID NO: 66266 - DNA, 15 bp, Homo sapiens
gaggatcggacgcaa

SEQ ID NO: 66267 - DNA, 15 bp, Homo sapiens
agaggatcggacgca

SEQ ID NO: 66268 - DNA, 15 bp, Homo sapiens
cagaggatcggacgc

SEQ ID NO: 66269 - DNA, 15 bp, Homo sapiens
ccagaggatcggacg

SEQ ID NO: 66270 - DNA, 15 bp, Homo sapiens
cccagaggatcggac

SEQ ID NO: 66271 - DNA, 15 bp, Homo sapiens
ccccagaggatcgga

SEQ ID NO: 66272 - DNA, 15 bp, Homo sapiens
cccccagaggatcgg

SEQ ID NO: 66273 - DNA, 15 bp, Homo sapiens
gcccccagaggatcg

SEQ ID NO: 66274 - DNA, 15 bp, Homo sapiens
cgcccccagaggatc

SEQ ID NO: 66275 - DNA, 15 bp, Homo sapiens
tcgcccccagaggat

SEQ ID NO: 66276 - DNA, 15 bp, Homo sapiens
atcgcccccagagga

SEQ ID NO: 66277 - DNA, 15 bp, Homo sapiens
catcgcccccagagg

SEQ ID NO: 66278 - DNA, 15 bp, Homo sapiens
gcatcgcccccagag

SEQ ID NO: 66279 - DNA, 15 bp, Homo sapiens
tgcatcgcccccaga

SEQ ID NO: 66280 - DNA, 15 bp, Homo sapiens
ctgcatcgcccccag

SEQ ID NO: 66281 - DNA, 15 bp, Homo sapiens
cctgcatcgccccca

SEQ ID NO: 66282 - DNA, 15 bp, Homo sapiens
ccctgcatcgccccc

SEQ ID NO: 66283 - DNA, 15 bp, Homo sapiens
accctgcatcgcccc

SEQ ID NO: 66284 - DNA, 15 bp, Homo sapiens
gaccctgcatcgccc

SEQ ID NO: 66285 - DNA, 15 bp, Homo sapiens
cgaccctgcatcgcc

SEQ ID NO: 66286 - DNA, 15 bp, Homo sapiens
ccgaccctgcatcgc

SEQ ID NO: 66287 - DNA, 15 bp, Homo sapiens
cccgaccctgcatcg

SEQ ID NO: 66288 - DNA, 15 bp, Homo sapiens
ccccgaccctgcatc

SEQ ID NO: 66289 - DNA, 15 bp, Homo sapiens
gccccgaccctgcat

SEQ ID NO: 66290 - DNA, 15 bp, Homo sapiens
cgccccgaccctgca

SEQ ID NO: 66291 - DNA, 15 bp, Homo sapiens
gcgccccgaccctgc

SEQ ID NO: 66292 - DNA, 15 bp, Homo sapiens
ggcgccccgaccctg

SEQ ID NO: 66293 - DNA, 15 bp, Homo sapiens
aggcgccccgaccct

SEQ ID NO: 66294 - DNA, 15 bp, Homo sapiens
gaggcgccccgaccc

SEQ ID NO: 66295 - DNA, 15 bp, Homo sapiens
tgaggcgccccgacc

SEQ ID NO: 66296 - DNA, 15 bp, Homo sapiens
ctgaggcgccccgac

SEQ ID NO: 66297 - DNA, 15 bp, Homo sapiens
actgaggcgccccga

SEQ ID NO: 66298 - DNA, 15 bp, Homo sapiens
cactgaggcgccccg

SEQ ID NO: 66299 - DNA, 15 bp, Homo sapiens
acactgaggcgcccc

SEQ ID NO: 66300 - DNA, 15 bp, Homo sapiens
cacactgaggcgccc

SEQ ID NO: 66301 - DNA, 15 bp, Homo sapiens
acacactgaggcgcc

SEQ ID NO: 66302 - DNA, 15 bp, Homo sapiens
gacacactgaggcgc

SEQ ID NO: 66303 - DNA, 15 bp, Homo sapiens
agacacactgaggcg

SEQ ID NO: 66304 - DNA, 15 bp, Homo sapiens
gagacacactgaggc

SEQ ID NO: 66305 - DNA, 15 bp, Homo sapiens
cgagacacactgagg

SEQ ID NO: 66306 - DNA, 15 bp, Homo sapiens
gcgagacacactgag

SEQ ID NO: 66307 - DNA, 15 bp, Homo sapiens
agcgagacacactga

SEQ ID NO: 66308 - DNA, 15 bp, Homo sapiens
cagcgagacacactg

SEQ ID NO: 66309 - DNA, 15 bp, Homo sapiens
gcagcgagacacact

SEQ ID NO: 66310 - DNA, 15 bp, Homo sapiens
agcagcgagacacac

SEQ ID NO: 66311 - DNA, 15 bp, Homo sapiens
aagcagcgagacaca

SEQ ID NO: 66312 - DNA, 15 bp, Homo sapiens
caagcagcgagacac

SEQ ID NO: 66313 - DNA, 15 bp, Homo sapiens
acaagcagcgagaca

SEQ ID NO: 66314 - DNA, 15 bp, Homo sapiens
aacaagcagcgagac

SEQ ID NO: 66315 - DNA, 15 bp, Homo sapiens
gaacaagcagcgaga

SEQ ID NO: 66316 - DNA, 15 bp, Homo sapiens
agaacaagcagcgag

SEQ ID NO: 66317 - DNA, 15 bp, Homo sapiens
cagaacaagcagcga

SEQ ID NO: 66318 - DNA, 15 bp, Homo sapiens
ccagaacaagcagcg

SEQ ID NO: 66319 - DNA, 15 bp, Homo sapiens
accagaacaagcagc

SEQ ID NO: 66320 - DNA, 15 bp, Homo sapiens
aaccagaacaagcag

SEQ ID NO: 66321 - DNA, 15 bp, Homo sapiens
caaccagaacaagca

SEQ ID NO: 66322 - DNA, 15 bp, Homo sapiens
gcaaccagaacaagc

SEQ ID NO: 66323 - DNA, 15 bp, Homo sapiens
tgcaaccagaacaag

SEQ ID NO: 66324 - DNA, 15 bp, Homo sapiens
ctgcaaccagaacaa

SEQ ID NO: 66325 - DNA, 15 bp, Homo sapiens
actgcaaccagaaca

SEQ ID NO: 66326 - DNA, 15 bp, Homo sapiens
gactgcaaccagaac

SEQ ID NO: 66327 - DNA, 15 bp, Homo sapiens
cgactgcaaccagaa

SEQ ID NO: 66328 - DNA, 15 bp, Homo sapiens
ccgactgcaaccaga

SEQ ID NO: 66329 - DNA, 15 bp, Homo sapiens
cccgactgcaaccag

SEQ ID NO: 66330 - DNA, 15 bp, Homo sapiens
tcccgactgcaacca

SEQ ID NO: 66331 - DNA, 15 bp, Homo sapiens
ttcccgactgcaacc

SEQ ID NO: 66332 - DNA, 15 bp, Homo sapiens
tttcccgactgcaac

SEQ ID NO: 66333 - DNA, 15 bp, Homo sapiens
atttcccgactgcaa

SEQ ID NO: 66334 - DNA, 15 bp, Homo sapiens
catttcccgactgca

SEQ ID NO: 66335 - DNA, 15 bp, Homo sapiens
acatttcccgactgc

SEQ ID NO: 66336 - DNA, 15 bp, Homo sapiens
cacatttcccgactg

SEQ ID NO: 66337 - DNA, 15 bp, Homo sapiens
ccacatttcccgact

SEQ ID NO: 66338 - DNA, 15 bp, Homo sapiens
cccacatttcccgac

SEQ ID NO: 66339 - DNA, 15 bp, Homo sapiens
tcccacatttcccga

SEQ ID NO: 66340 - DNA, 15 bp, Homo sapiens
gtcccacatttcccg

SEQ ID NO: 66341 - DNA, 15 bp, Homo sapiens
agtcccacatttccc

SEQ ID NO: 66342 - DNA, 15 bp, Homo sapiens
aagtcccacatttcc

SEQ ID NO: 66343 - DNA, 15 bp, Homo sapiens
aaagtcccacatttc

SEQ ID NO: 66344 - DNA, 15 bp, Homo sapiens
caaagtcccacattt

SEQ ID NO: 66345 - DNA, 15 bp, Homo sapiens
ccaaagtcccacatt

SEQ ID NO: 66346 - DNA, 15 bp, Homo sapiens
cccaaagtcccacat

SEQ ID NO: 66347 - DNA, 15 bp, Homo sapiens
ccccaaagtcccaca

SEQ ID NO: 66348 - DNA, 15 bp, Homo sapiens
accccaaagtcccac

SEQ ID NO: 66349 - DNA, 15 bp, Homo sapiens
gaccccaaagtccca

SEQ ID NO: 66350 - DNA, 15 bp, Homo sapiens
agaccccaaagtccc

SEQ ID NO: 66351 - DNA, 15 bp, Homo sapiens
aagaccccaaagtcc

SEQ ID NO: 66352 - DNA, 15 bp, Homo sapiens
gaagaccccaaagtc

SEQ ID NO: 66353 - DNA, 15 bp, Homo sapiens
agaagaccccaaagt

SEQ ID NO: 66354 - DNA, 15 bp, Homo sapiens
gagaagaccccaaag

SEQ ID NO: 66355 - DNA, 15 bp, Homo sapiens
ggagaagaccccaaa

SEQ ID NO: 66356 - DNA, 15 bp, Homo sapiens
aggagaagaccccaa

SEQ ID NO: 66357 - DNA, 15 bp, Homo sapiens
aaggagaagacccca

SEQ ID NO: 66358 - DNA, 15 bp, Homo sapiens
aaaggagaagacccc

SEQ ID NO: 66359 - DNA, 15 bp, Homo sapiens
gaaaggagaagaccc

SEQ ID NO: 66360 - DNA, 15 bp, Homo sapiens
agaaaggagaagacc

SEQ ID NO: 66361 - DNA, 15 bp, Homo sapiens
gagaaaggagaagac

SEQ ID NO: 66362 - DNA, 15 bp, Homo sapiens
ggagaaaggagaaga

SEQ ID NO: 66363 - DNA, 15 bp, Homo sapiens
cggagaaaggagaag

SEQ ID NO: 66364 - DNA, 15 bp, Homo sapiens
ccggagaaaggagaa

SEQ ID NO: 66365 - DNA, 15 bp, Homo sapiens
gccggagaaaggaga

SEQ ID NO: 66366 - DNA, 15 bp, Homo sapiens
agccggagaaaggag

SEQ ID NO: 66367 - DNA, 15 bp, Homo sapiens
aagccggagaaagga

SEQ ID NO: 66368 - DNA, 15 bp, Homo sapiens
aaagccggagaaagg

SEQ ID NO: 66369 - DNA, 15 bp, Homo sapiens
gaaagccggagaaag

SEQ ID NO: 66370 - DNA, 15 bp, Homo sapiens
agaaagccggagaaa

SEQ ID NO: 66371 - DNA, 15 bp, Homo sapiens
aagaaagccggagaa

SEQ ID NO: 66372 - DNA, 15 bp, Homo sapiens
aaagaaagccggaga

SEQ ID NO: 66373 - DNA, 15 bp, Homo sapiens
aaaagaaagccggag

SEQ ID NO: 66374 - DNA, 15 bp, Homo sapiens
aaaaagaaagccgga

SEQ ID NO: 66375 - DNA, 15 bp, Homo sapiens
aaaaaagaaagccgg

SEQ ID NO: 66376 - DNA, 15 bp, Homo sapiens
gaaaaaagaaagccg

SEQ ID NO: 66377 - DNA, 15 bp, Homo sapiens
agaaaaaagaaagcc

SEQ ID NO: 66378 - DNA, 15 bp, Homo sapiens
gagaaaaaagaaagc

SEQ ID NO: 66379 - DNA, 15 bp, Homo sapiens
ggagaaaaaagaaag

SEQ ID NO: 66380 - DNA, 15 bp, Homo sapiens
aggagaaaaaagaaa

SEQ ID NO: 66381 - DNA, 15 bp, Homo sapiens
aaggagaaaaaagaa

SEQ ID NO: 66382 - DNA, 15 bp, Homo sapiens
gaaggagaaaaaaga

SEQ ID NO: 66383 - DNA, 15 bp, Homo sapiens
agaaggagaaaaaag

SEQ ID NO: 66384 - DNA, 15 bp, Homo sapiens
aagaaggagaaaaaa

SEQ ID NO: 66385 - DNA, 15 bp, Homo sapiens
aaagaaggagaaaaa

SEQ ID NO: 66386 - DNA, 15 bp, Homo sapiens
gaaagaaggagaaaa

SEQ ID NO: 66387 - DNA, 15 bp, Homo sapiens
ggaaagaaggagaaa

SEQ ID NO: 66388 - DNA, 15 bp, Homo sapiens
aggaaagaaggagaa

SEQ ID NO: 66389 - DNA, 15 bp, Homo sapiens
gaggaaagaaggaga

SEQ ID NO: 66390 - DNA, 15 bp, Homo sapiens
agaggaaagaaggag

SEQ ID NO: 66391 - DNA, 15 bp, Homo sapiens
gagaggaaagaagga

SEQ ID NO: 66392 - DNA, 15 bp, Homo sapiens
agagaggaaagaagg

SEQ ID NO: 66393 - DNA, 15 bp, Homo sapiens
cagagaggaaagaag

SEQ ID NO: 66394 - DNA, 15 bp, Homo sapiens
acagagaggaaagaa

SEQ ID NO: 66395 - DNA, 15 bp, Homo sapiens
aacagagaggaaaga

SEQ ID NO: 66396 - DNA, 15 bp, Homo sapiens
aaacagagaggaaag

SEQ ID NO: 66397 - DNA, 15 bp, Homo sapiens
aaaacagagaggaaa

SEQ ID NO: 66398 - DNA, 15 bp, Homo sapiens
gaaaacagagaggaa

SEQ ID NO: 66399 - DNA, 15 bp, Homo sapiens
agaaaacagagagga

SEQ ID NO: 66400 - DNA, 15 bp, Homo sapiens
aagaaaacagagagg

SEQ ID NO: 66401 - DNA, 15 bp, Homo sapiens
caagaaaacagagag

SEQ ID NO: 66402 - DNA, 15 bp, Homo sapiens
acaagaaaacagaga

SEQ ID NO: 66403 - DNA, 15 bp, Homo sapiens
tacaagaaaacagag

SEQ ID NO: 66404 - DNA, 15 bp, Homo sapiens
ttacaagaaaacaga

SEQ ID NO: 66405 - DNA, 15 bp, Homo sapiens
tttacaagaaaacag

SEQ ID NO: 66406 - DNA, 15 bp, Homo sapiens
atttacaagaaaaca

SEQ ID NO: 66407 - DNA, 15 bp, Homo sapiens
aatttacaagaaaac

SEQ ID NO: 66408 - DNA, 15 bp, Homo sapiens
taatttacaagaaaa

SEQ ID NO: 66409 - DNA, 15 bp, Homo sapiens
gtaatttacaagaaa

SEQ ID NO: 66410 - DNA, 15 bp, Homo sapiens
tgtaatttacaagaa

SEQ ID NO: 66411 - DNA, 15 bp, Homo sapiens
gtgtaatttacaaga

SEQ ID NO: 66412 - DNA, 15 bp, Homo sapiens
agtgtaatttacaag

SEQ ID NO: 66413 - DNA, 15 bp, Homo sapiens
aagtgtaatttacaa

SEQ ID NO: 66414 - DNA, 15 bp, Homo sapiens
gaagtgtaatttaca

SEQ ID NO: 66415 - DNA, 15 bp, Homo sapiens
cgaagtgtaatttac

SEQ ID NO: 66416 - DNA, 15 bp, Homo sapiens
tcgaagtgtaattta

SEQ ID NO: 66417 - DNA, 15 bp, Homo sapiens
gtcgaagtgtaattt

SEQ ID NO: 66418 - DNA, 15 bp, Homo sapiens
agtcgaagtgtaatt

SEQ ID NO: 66419 - DNA, 15 bp, Homo sapiens
aagtcgaagtgtaat

SEQ ID NO: 66420 - DNA, 15 bp, Homo sapiens
aaagtcgaagtgtaa

SEQ ID NO: 66421 - DNA, 15 bp, Homo sapiens
gaaagtcgaagtgta

SEQ ID NO: 66422 - DNA, 15 bp, Homo sapiens
tgaaagtcgaagtgt

SEQ ID NO: 66423 - DNA, 15 bp, Homo sapiens
ttgaaagtcgaagtg

SEQ ID NO: 66424 - DNA, 15 bp, Homo sapiens
tttgaaagtcgaagt

SEQ ID NO: 66425 - DNA, 15 bp, Homo sapiens
ttttgaaagtcgaag

SEQ ID NO: 66426 - DNA, 15 bp, Homo sapiens
tttttgaaagtcgaa

SEQ ID NO: 66427 - DNA, 15 bp, Homo sapiens
ttttttgaaagtcga

SEQ ID NO: 66428 - DNA, 15 bp, Homo sapiens
tttttttgaaagtcg

SEQ ID NO: 66429 - DNA, 15 bp, Homo sapiens
ttttttttgaaagtc

SEQ ID NO: 66430 - DNA, 15 bp, Homo sapiens
tttttttttgaaagt

SEQ ID NO: 66431 - DNA, 15 bp, Homo sapiens
ttttttttttgaaag

SEQ ID NO: 66432 - DNA, 15 bp, Homo sapiens
tttttttttttgaaa

SEQ ID NO: 66433 - DNA, 15 bp, Homo sapiens
atttttttttttgaa

SEQ ID NO: 66434 - DNA, 15 bp, Homo sapiens
catttttttttttga

SEQ ID NO: 66435 - DNA, 15 bp, Homo sapiens
acatttttttttttg

SEQ ID NO: 66436 - DNA, 15 bp, Homo sapiens
tacattttttttttt

SEQ ID NO: 66437 - DNA, 15 bp, Homo sapiens
ctacatttttttttt

SEQ ID NO: 66438 - DNA, 15 bp, Homo sapiens
cctacattttttttt

SEQ ID NO: 66439 - DNA, 15 bp, Homo sapiens
ccctacatttttttt

SEQ ID NO: 66440 - DNA, 15 bp, Homo sapiens
cccctacattttttt

SEQ ID NO: 66441 - DNA, 15 bp, Homo sapiens
tcccctacatttttt

SEQ ID NO: 66442 - DNA, 15 bp, Homo sapiens
gtcccctacattttt

SEQ ID NO: 66443 - DNA, 15 bp, Homo sapiens
ggtcccctacatttt

SEQ ID NO: 66444 - DNA, 15 bp, Homo sapiens
cggtcccctacattt

SEQ ID NO: 66445 - DNA, 15 bp, Homo sapiens
ccggtcccctacatt

SEQ ID NO: 66446 - DNA, 15 bp, Homo sapiens
accggtcccctacat

SEQ ID NO: 66447 - DNA, 15 bp, Homo sapiens
caccggtcccctaca

SEQ ID NO: 66448 - DNA, 15 bp, Homo sapiens
ccaccggtcccctac

SEQ ID NO: 66449 - DNA, 15 bp, Homo sapiens
cccaccggtccccta

SEQ ID NO: 66450 - DNA, 15 bp, Homo sapiens
ccccaccggtcccct

SEQ ID NO: 66451 - DNA, 15 bp, Homo sapiens
accccaccggtcccc

SEQ ID NO: 66452 - DNA, 15 bp, Homo sapiens
gaccccaccggtccc

SEQ ID NO: 66453 - DNA, 15 bp, Homo sapiens
cgaccccaccggtcc

SEQ ID NO: 66454 - DNA, 15 bp, Homo sapiens
gcgaccccaccggtc

SEQ ID NO: 66455 - DNA, 15 bp, Homo sapiens
agcgaccccaccggt

SEQ ID NO: 66456 - DNA, 15 bp, Homo sapiens
cagcgaccccaccgg

SEQ ID NO: 66457 - DNA, 15 bp, Homo sapiens
ccagcgaccccaccg

SEQ ID NO: 66458 - DNA, 15 bp, Homo sapiens
cccagcgaccccacc

SEQ ID NO: 66459 - DNA, 15 bp, Homo sapiens
ccccagcgaccccac

SEQ ID NO: 66460 - DNA, 15 bp, Homo sapiens
accccagcgacccca

SEQ ID NO: 66461 - DNA, 15 bp, Homo sapiens
aaccccagcgacccc

SEQ ID NO: 66462 - DNA, 15 bp, Homo sapiens
caaccccagcgaccc

SEQ ID NO: 66463 - DNA, 15 bp, Homo sapiens
ccaaccccagcgacc

SEQ ID NO: 66464 - DNA, 15 bp, Homo sapiens
cccaaccccagcgac

SEQ ID NO: 66465 - DNA, 15 bp, Homo sapiens
ccccaaccccagcga

SEQ ID NO: 66466 - DNA, 15 bp, Homo sapiens
cccccaaccccagcg

SEQ ID NO: 66467 - DNA, 15 bp, Homo sapiens
tcccccaaccccagc

SEQ ID NO: 66468 - DNA, 15 bp, Homo sapiens
ctcccccaaccccag

SEQ ID NO: 66469 - DNA, 15 bp, Homo sapiens
tctcccccaacccca

SEQ ID NO: 66470 - DNA, 15 bp, Homo sapiens
ctctcccccaacccc

SEQ ID NO: 66471 - DNA, 15 bp, Homo sapiens
tctctcccccaaccc

SEQ ID NO: 66472 - DNA, 15 bp, Homo sapiens
gtctctcccccaacc

SEQ ID NO: 66473 - DNA, 15 bp, Homo sapiens
agtctctcccccaac

SEQ ID NO: 66474 - DNA, 15 bp, Homo sapiens
cagtctctcccccaa

SEQ ID NO: 66475 - DNA, 15 bp, Homo sapiens
tcagtctctccccca

SEQ ID NO: 66476 - DNA, 15 bp, Homo sapiens
ttcagtctctccccc

SEQ ID NO: 66477 - DNA, 15 bp, Homo sapiens
cttcagtctctcccc

SEQ ID NO: 66478 - DNA, 15 bp, Homo sapiens
tcttcagtctctccc

SEQ ID NO: 66479 - DNA, 15 bp, Homo sapiens
ttcttcagtctctcc

SEQ ID NO: 66480 - DNA, 15 bp, Homo sapiens
tttcttcagtctctc

SEQ ID NO: 66481 - DNA, 15 bp, Homo sapiens
ctttcttcagtctct

SEQ ID NO: 66482 - DNA, 15 bp, Homo sapiens
actttcttcagtctc

SEQ ID NO: 66483 - DNA, 15 bp, Homo sapiens
cactttcttcagtct

SEQ ID NO: 66484 - DNA, 15 bp, Homo sapiens
gcactttcttcagtc

SEQ ID NO: 66485 - DNA, 15 bp, Homo sapiens
cgcactttcttcagt

SEQ ID NO: 66486 - DNA, 15 bp, Homo sapiens
gcgcactttcttcag

SEQ ID NO: 66487 - DNA, 15 bp, Homo sapiens
ggcgcactttcttca

SEQ ID NO: 66488 - DNA, 15 bp, Homo sapiens
aggcgcactttcttc

SEQ ID NO: 66489 - DNA, 15 bp, Homo sapiens
caggcgcactttctt

SEQ ID NO: 66490 - DNA, 15 bp, Homo sapiens
ccaggcgcactttct

SEQ ID NO: 66491 - DNA, 15 bp, Homo sapiens
cccaggcgcactttc

SEQ ID NO: 66492 - DNA, 15 bp, Homo sapiens
gcccaggcgcacttt

SEQ ID NO: 66493 - DNA, 15 bp, Homo sapiens
cgcccaggcgcactt

SEQ ID NO: 66494 - DNA, 15 bp, Homo sapiens
ccgcccaggcgcact

SEQ ID NO: 66495 - DNA, 15 bp, Homo sapiens
tccgcccaggcgcac

SEQ ID NO: 66496 - DNA, 15 bp, Homo sapiens
ctccgcccaggcgca

SEQ ID NO: 66497 - DNA, 15 bp, Homo sapiens
cctccgcccaggcgc

SEQ ID NO: 66498 - DNA, 15 bp, Homo sapiens
gcctccgcccaggcg

SEQ ID NO: 66499 - DNA, 15 bp, Homo sapiens
cgcctccgcccaggc

SEQ ID NO: 66500 - DNA, 15 bp, Homo sapiens
ccgcctccgcccagg

SEQ ID NO: 66501 - DNA, 15 bp, Homo sapiens
gccgcctccgcccag

SEQ ID NO: 66502 - DNA, 15 bp, Homo sapiens
cgccgcctccgccca

SEQ ID NO: 66503 - DNA, 15 bp, Homo sapiens
tcgccgcctccgccc

SEQ ID NO: 66504 - DNA, 15 bp, Homo sapiens
ttcgccgcctccgcc

SEQ ID NO: 66505 - DNA, 15 bp, Homo sapiens
cttcgccgcctccgc

SEQ ID NO: 66506 - DNA, 15 bp, Homo sapiens
ccttcgccgcctccg

SEQ ID NO: 66507 - DNA, 15 bp, Homo sapiens
cccttcgccgcctcc

SEQ ID NO: 66508 - DNA, 15 bp, Homo sapiens
tcccttcgccgcctc

SEQ ID NO: 66509 - DNA, 15 bp, Homo sapiens
ttcccttcgccgcct

SEQ ID NO: 66510 - DNA, 15 bp, Homo sapiens
cgcacgcatgcacac

SEQ ID NO: 66511 - DNA, 15 bp, Homo sapiens
gcgcacgcatgcaca

SEQ ID NO: 66512 - DNA, 15 bp, Homo sapiens
ggcgcacgcatgcac

SEQ ID NO: 66513 - DNA, 15 bp, Homo sapiens
aggcgcacgcatgca

SEQ ID NO: 66514 - DNA, 15 bp, Homo sapiens
caggcgcacgcatgc

SEQ ID NO: 66515 - DNA, 15 bp, Homo sapiens
acaggcgcacgcatg

SEQ ID NO: 66516 - DNA, 15 bp, Homo sapiens
aacaggcgcacgcat

SEQ ID NO: 66517 - DNA, 15 bp, Homo sapiens
aaacaggcgcacgca

SEQ ID NO: 66518 - DNA, 15 bp, Homo sapiens
caaacaggcgcacgc

SEQ ID NO: 66519 - DNA, 15 bp, Homo sapiens
gcaaacaggcgcacg

SEQ ID NO: 66520 - DNA, 15 bp, Homo sapiens
tgcaaacaggcgcac

SEQ ID NO: 66521 - DNA, 15 bp, Homo sapiens
atgcaaacaggcgca

SEQ ID NO: 66522 - DNA, 15 bp, Homo sapiens
catgcaaacaggcgc

SEQ ID NO: 66523 - DNA, 15 bp, Homo sapiens
acatgcaaacaggcg

SEQ ID NO: 66524 - DNA, 15 bp, Homo sapiens
cacatgcaaacaggc

SEQ ID NO: 66525 - DNA, 15 bp, Homo sapiens
ccacatgcaaacagg

SEQ ID NO: 66526 - DNA, 15 bp, Homo sapiens
cccacatgcaaacag

SEQ ID NO: 66527 - DNA, 15 bp, Homo sapiens
gcccacatgcaaaca

SEQ ID NO: 66528 - DNA, 15 bp, Homo sapiens
cgcccacatgcaaac

SEQ ID NO: 66529 - DNA, 15 bp, Homo sapiens
acgcccacatgcaaa

SEQ ID NO: 66530 - DNA, 15 bp, Homo sapiens
cacgcccacatgcaa

SEQ ID NO: 66531 - DNA, 15 bp, Homo sapiens
acacgcccacatgca

SEQ ID NO: 66532 - DNA, 15 bp, Homo sapiens
cacacgcccacatgc

SEQ ID NO: 66533 - DNA, 15 bp, Homo sapiens
acacacgcccacatg

SEQ ID NO: 66534 - DNA, 15 bp, Homo sapiens
tacacacgcccacat

SEQ ID NO: 66535 - DNA, 15 bp, Homo sapiens
atacacacgcccaca

SEQ ID NO: 66536 - DNA, 15 bp, Homo sapiens
catacacacgcccac

SEQ ID NO: 66537 - DNA, 15 bp, Homo sapiens
acatacacacgccca

SEQ ID NO: 66538 - DNA, 15 bp, Homo sapiens
cacatacacacgccc

SEQ ID NO: 66539 - DNA, 15 bp, Homo sapiens
ccacatacacacgcc

SEQ ID NO: 66540 - DNA, 15 bp, Homo sapiens
cccacatacacacgc

SEQ ID NO: 66541 - DNA, 15 bp, Homo sapiens
ccccacatacacacg

SEQ ID NO: 66542 - DNA, 15 bp, Homo sapiens
accccacatacacac

SEQ ID NO: 66543 - DNA, 15 bp, Homo sapiens
aaccccacatacaca

SEQ ID NO: 66544 - DNA, 15 bp, Homo sapiens
caaccccacatacac

SEQ ID NO: 66545 - DNA, 15 bp, Homo sapiens
acaaccccacataca

SEQ ID NO: 66546 - DNA, 15 bp, Homo sapiens
cacaaccccacatac

SEQ ID NO: 66547 - DNA, 15 bp, Homo sapiens
acacaaccccacata

SEQ ID NO: 66548 - DNA, 15 bp, Homo sapiens
cacacaaccccacat

SEQ ID NO: 66549 - DNA, 15 bp, Homo sapiens
gcacacaaccccaca

SEQ ID NO: 66550 - DNA, 15 bp, Homo sapiens
cgcacacaaccccac

SEQ ID NO: 66551 - DNA, 15 bp, Homo sapiens
ccgcacacaacccca

SEQ ID NO: 66552 - DNA, 15 bp, Homo sapiens
cccgcacacaacccc

SEQ ID NO: 66553 - DNA, 15 bp, Homo sapiens
acccgcacacaaccc

SEQ ID NO: 66554 - DNA, 15 bp, Homo sapiens
tacccgcacacaacc

SEQ ID NO: 66555 - DNA, 15 bp, Homo sapiens
atacccgcacacaac

SEQ ID NO: 66556 - DNA, 15 bp, Homo sapiens
catacccgcacacaa

SEQ ID NO: 66557 - DNA, 15 bp, Homo sapiens
gcatacccgcacaca

SEQ ID NO: 66558 - DNA, 15 bp, Homo sapiens
cgcatacccgcacac

SEQ ID NO: 66559 - DNA, 15 bp, Homo sapiens
ccgcatacccgcaca

SEQ ID NO: 66560 - DNA, 15 bp, Homo sapiens
cccgcatacccgcac

SEQ ID NO: 66561 - DNA, 15 bp, Homo sapiens
gcccgcatacccgca

SEQ ID NO: 66562 - DNA, 15 bp, Homo sapiens
cgcccgcatacccgc

SEQ ID NO: 66563 - DNA, 15 bp, Homo sapiens
gcgcccgcatacccg

SEQ ID NO: 66564 - DNA, 15 bp, Homo sapiens
ggcgcccgcataccc

SEQ ID NO: 66565 - DNA, 15 bp, Homo sapiens
tggcgcccgcatacc

SEQ ID NO: 66566 - DNA, 15 bp, Homo sapiens
gtggcgcccgcatac

SEQ ID NO: 66567 - DNA, 15 bp, Homo sapiens
cgtggcgcccgcata

SEQ ID NO: 66568 - DNA, 15 bp, Homo sapiens
gcgtggcgcccgcat

SEQ ID NO: 66569 - DNA, 15 bp, Homo sapiens
cgcgtggcgcccgca

SEQ ID NO: 66570 - DNA, 15 bp, Homo sapiens
gcgcgtggcgcccgc

SEQ ID NO: 66571 - DNA, 15 bp, Homo sapiens
agcgcgtggcgcccg

SEQ ID NO: 66572 - DNA, 15 bp, Homo sapiens
aagcgcgtggcgccc

SEQ ID NO: 66573 - DNA, 15 bp, Homo sapiens
gaagcgcgtggcgcc

SEQ ID NO: 66574 - DNA, 15 bp, Homo sapiens
agaagcgcgtggcgc

SEQ ID NO: 66575 - DNA, 15 bp, Homo sapiens
gagaagcgcgtggcg

SEQ ID NO: 66576 - DNA, 15 bp, Homo sapiens
ggagaagcgcgtggc

SEQ ID NO: 66577 - DNA, 15 bp, Homo sapiens
aggagaagcgcgtgg

SEQ ID NO: 66578 - DNA, 15 bp, Homo sapiens
taggagaagcgcgtg

SEQ ID NO: 66579 - DNA, 15 bp, Homo sapiens
gtaggagaagcgcgt

SEQ ID NO: 66580 - DNA, 15 bp, Homo sapiens
tgtaggagaagcgcg

SEQ ID NO: 66581 - DNA, 15 bp, Homo sapiens
ctgtaggagaagcgc

SEQ ID NO: 66582 - DNA, 15 bp, Homo sapiens
cctgtaggagaagcg

SEQ ID NO: 66583 - DNA, 15 bp, Homo sapiens
acctgtaggagaagc

SEQ ID NO: 66584 - DNA, 15 bp, Homo sapiens
cacctgtaggagaag

SEQ ID NO: 66585 - DNA, 15 bp, Homo sapiens
tcacctgtaggagaa

SEQ ID NO: 66586 - DNA, 15 bp, Homo sapiens
ctcacctgtaggaga

SEQ ID NO: 66587 - DNA, 15 bp, Homo sapiens
tctcacctgtaggag

SEQ ID NO: 66588 - DNA, 15 bp, Homo sapiens
gtctcacctgtagga

SEQ ID NO: 66589 - DNA, 15 bp, Homo sapiens
tgtctcacctgtagg

SEQ ID NO: 66590 - DNA, 15 bp, Homo sapiens
gtgtctcacctgtag

SEQ ID NO: 66591 - DNA, 15 bp, Homo sapiens
cgtgtctcacctgta

SEQ ID NO: 66592 - DNA, 15 bp, Homo sapiens
gcgtgtctcacctgt

SEQ ID NO: 66593 - DNA, 15 bp, Homo sapiens
cgcgtgtctcacctg

SEQ ID NO: 66594 - DNA, 15 bp, Homo sapiens
gcgcgtgtctcacct

SEQ ID NO: 66595 - DNA, 15 bp, Homo sapiens
agcgcgtgtctcacc

SEQ ID NO: 66596 - DNA, 15 bp, Homo sapiens
gagcgcgtgtctcac

SEQ ID NO: 66597 - DNA, 15 bp, Homo sapiens
tgagcgcgtgtctca

SEQ ID NO: 66598 - DNA, 15 bp, Homo sapiens
ctgagcgcgtgtctc

SEQ ID NO: 66599 - DNA, 15 bp, Homo sapiens
actgagcgcgtgtct

SEQ ID NO: 66600 - DNA, 15 bp, Homo sapiens
gactgagcgcgtgtc

SEQ ID NO: 66601 - DNA, 15 bp, Homo sapiens
ggactgagcgcgtgt

SEQ ID NO: 66602 - DNA, 15 bp, Homo sapiens
aggactgagcgcgtg

SEQ ID NO: 66603 - DNA, 15 bp, Homo sapiens
gaggactgagcgcgt

SEQ ID NO: 66604 - DNA, 15 bp, Homo sapiens
cgaggactgagcgcg

SEQ ID NO: 66605 - DNA, 15 bp, Homo sapiens
tcgaggactgagcgc

SEQ ID NO: 66606 - DNA, 15 bp, Homo sapiens
ctcgaggactgagcg

SEQ ID NO: 66607 - DNA, 15 bp, Homo sapiens
gctcgaggactgagc

SEQ ID NO: 66608 - DNA, 15 bp, Homo sapiens
ggctcgaggactgag

SEQ ID NO: 66609 - DNA, 15 bp, Homo sapiens
gggctcgaggactga

SEQ ID NO: 66610 - DNA, 15 bp, Homo sapiens
tgggctcgaggactg

SEQ ID NO: 66611 - DNA, 15 bp, Homo sapiens
gtgggctcgaggact

SEQ ID NO: 66612 - DNA, 15 bp, Homo sapiens
ggtgggctcgaggac

SEQ ID NO: 66613 - DNA, 15 bp, Homo sapiens
aggtgggctcgagga

SEQ ID NO: 66614 - DNA, 15 bp, Homo sapiens
aaggtgggctcgagg

SEQ ID NO: 66615 - DNA, 15 bp, Homo sapiens
gaaggtgggctcgag

SEQ ID NO: 66616 - DNA, 15 bp, Homo sapiens
agaaggtgggctcga

SEQ ID NO: 66617 - DNA, 15 bp, Homo sapiens
aagaaggtgggctcg

SEQ ID NO: 66618 - DNA, 15 bp, Homo sapiens
aaagaaggtgggctc

SEQ ID NO: 66619 - DNA, 15 bp, Homo sapiens
caaagaaggtgggct

SEQ ID NO: 66620 - DNA, 15 bp, Homo sapiens
ccaaagaaggtgggc

SEQ ID NO: 66621 - DNA, 15 bp, Homo sapiens
gccaaagaaggtggg

SEQ ID NO: 66622 - DNA, 15 bp, Homo sapiens
ggccaaagaaggtgg

SEQ ID NO: 66623 - DNA, 15 bp, Homo sapiens
gggccaaagaaggtg

SEQ ID NO: 66624 - DNA, 15 bp, Homo sapiens
ggggccaaagaaggt

SEQ ID NO: 66625 - DNA, 15 bp, Homo sapiens
cggggccaaagaagg

SEQ ID NO: 66626 - DNA, 15 bp, Homo sapiens
gcggggccaaagaag

SEQ ID NO: 66627 - DNA, 15 bp, Homo sapiens
ggcggggccaaagaa

SEQ ID NO: 66628 - DNA, 15 bp, Homo sapiens
gggcggggccaaaga

SEQ ID NO: 66629 - DNA, 15 bp, Homo sapiens
cgggcggggccaaag

SEQ ID NO: 66630 - DNA, 15 bp, Homo sapiens
gcgggcggggccaaa

SEQ ID NO: 66631 - DNA, 15 bp, Homo sapiens
ggcgggcggggccaa

SEQ ID NO: 66632 - DNA, 15 bp, Homo sapiens
gggcgggcggggcca

SEQ ID NO: 66633 - DNA, 15 bp, Homo sapiens
agggcgggcggggcc

SEQ ID NO: 66634 - DNA, 15 bp, Homo sapiens
aagggcgggcggggc

SEQ ID NO: 66635 - DNA, 15 bp, Homo sapiens
gaagggcgggcgggg

SEQ ID NO: 66636 - DNA, 15 bp, Homo sapiens
cgaagggcgggcggg

SEQ ID NO: 66637 - DNA, 15 bp, Homo sapiens
ccgaagggcgggcgg

SEQ ID NO: 66638 - DNA, 15 bp, Homo sapiens
tccgaagggcgggcg

SEQ ID NO: 66639 - DNA, 15 bp, Homo sapiens
ttccgaagggcgggc

SEQ ID NO: 66640 - DNA, 15 bp, Homo sapiens
cttccgaagggcggg

SEQ ID NO: 66641 - DNA, 15 bp, Homo sapiens
gcttccgaagggcgg

SEQ ID NO: 66642 - DNA, 15 bp, Homo sapiens
cgcttccgaagggcg

SEQ ID NO: 66643 - DNA, 15 bp, Homo sapiens
gcgcttccgaagggc

SEQ ID NO: 66644 - DNA, 15 bp, Homo sapiens
tgcgcttccgaaggg

SEQ ID NO: 66645 - DNA, 15 bp, Homo sapiens
ctgcgcttccgaagg

SEQ ID NO: 66646 - DNA, 15 bp, Homo sapiens
tctgcgcttccgaag

SEQ ID NO: 66647 - DNA, 15 bp, Homo sapiens
atctgcgcttccgaa

SEQ ID NO: 66648 - DNA, 15 bp, Homo sapiens
aatctgcgcttccga

SEQ ID NO: 66649 - DNA, 15 bp, Homo sapiens
caatctgcgcttccg

SEQ ID NO: 66650 - DNA, 15 bp, Homo sapiens
gcaatctgcgcttcc

SEQ ID NO: 66651 - DNA, 15 bp, Homo sapiens
agcaatctgcgcttc

SEQ ID NO: 66652 - DNA, 15 bp, Homo sapiens
tagcaatctgcgctt

SEQ ID NO: 66653 - DNA, 15 bp, Homo sapiens
atagcaatctgcgct

SEQ ID NO: 66654 - DNA, 15 bp, Homo sapiens
tatagcaatctgcgc

SEQ ID NO: 66655 - DNA, 15 bp, Homo sapiens
atatagcaatctgcg

SEQ ID NO: 66656 - DNA, 15 bp, Homo sapiens
aatatagcaatctgc

SEQ ID NO: 66657 - DNA, 15 bp, Homo sapiens
aaatatagcaatctg

SEQ ID NO: 66658 - DNA, 15 bp, Homo sapiens
caaatatagcaatct

SEQ ID NO: 66659 - DNA, 15 bp, Homo sapiens
tcaaatatagcaatc

SEQ ID NO: 66660 - DNA, 15 bp, Homo sapiens
gtcaaatatagcaat

SEQ ID NO: 66661 - DNA, 15 bp, Homo sapiens
tgtcaaatatagcaa

SEQ ID NO: 66662 - DNA, 15 bp, Homo sapiens
ctgtcaaatatagca

SEQ ID NO: 66663 - DNA, 15 bp, Homo sapiens
gctgtcaaatatagc

SEQ ID NO: 66664 - DNA, 15 bp, Homo sapiens
tgctgtcaaatatag

SEQ ID NO: 66665 - DNA, 15 bp, Homo sapiens
gtgctgtcaaatata

SEQ ID NO: 66666 - DNA, 15 bp, Homo sapiens
tgtgctgtcaaatat

SEQ ID NO: 66667 - DNA, 15 bp, Homo sapiens
atgtgctgtcaaata

SEQ ID NO: 66668 - DNA, 15 bp, Homo sapiens
gatgtgctgtcaaat

SEQ ID NO: 66669 - DNA, 15 bp, Homo sapiens
cgatgtgctgtcaaa

SEQ ID NO: 66670 - DNA, 15 bp, Homo sapiens
tcgatgtgctgtcaa

SEQ ID NO: 66671 - DNA, 15 bp, Homo sapiens
ttcgatgtgctgtca

SEQ ID NO: 66672 - DNA, 15 bp, Homo sapiens
cttcgatgtgctgtc

SEQ ID NO: 66673 - DNA, 15 bp, Homo sapiens
ccttcgatgtgctgt

SEQ ID NO: 66674 - DNA, 15 bp, Homo sapiens
cccttcgatgtgctg

SEQ ID NO: 66675 - DNA, 15 bp, Homo sapiens
acccttcgatgtgct

SEQ ID NO: 66676 - DNA, 15 bp, Homo sapiens
aacccttcgatgtgc

SEQ ID NO: 66677 - DNA, 15 bp, Homo sapiens
aaacccttcgatgtg

SEQ ID NO: 66678 - DNA, 15 bp, Homo sapiens
aaaacccttcgatgt

SEQ ID NO: 66679 - DNA, 15 bp, Homo sapiens
caaaacccttcgatg

SEQ ID NO: 66680 - DNA, 15 bp, Homo sapiens
ccaaaacccttcgat

SEQ ID NO: 66681 - DNA, 15 bp, Homo sapiens
accaaaacccttcga

SEQ ID NO: 66682 - DNA, 15 bp, Homo sapiens
aaccaaaacccttcg

SEQ ID NO: 66683 - DNA, 15 bp, Homo sapiens
aaaccaaaacccttc

SEQ ID NO: 66684 - DNA, 15 bp, Homo sapiens
aaaaccaaaaccctt

SEQ ID NO: 66685 - DNA, 15 bp, Homo sapiens
aaaaaccaaaaccct

SEQ ID NO: 66686 - DNA, 15 bp, Homo sapiens
aaaaaaccaaaaccc

SEQ ID NO: 66687 - DNA, 15 bp, Homo sapiens
aaaaaaaccaaaacc

SEQ ID NO: 66688 - DNA, 15 bp, Homo sapiens
aaaaaaaaccaaaac

SEQ ID NO: 66689 - DNA, 15 bp, Homo sapiens
aaaaaaaaaccaaaa

SEQ ID NO: 66690 - DNA, 15 bp, Homo sapiens
aaaaaaaaaaccaaa

SEQ ID NO: 66691 - DNA, 15 bp, Homo sapiens
aaaaaaaaaaaccaa

SEQ ID NO: 66692 - DNA, 15 bp, Homo sapiens
gaaaaaaaaaaacca

SEQ ID NO: 66693 - DNA, 15 bp, Homo sapiens
agaaaaaaaaaaacc

SEQ ID NO: 66694 - DNA, 15 bp, Homo sapiens
aagaaaaaaaaaaac

SEQ ID NO: 66695 - DNA, 15 bp, Homo sapiens
aaagaaaaaaaaaaa

SEQ ID NO: 66696 - DNA, 15 bp, Homo sapiens
aaaagaaaaaaaaaa

SEQ ID NO: 66697 - DNA, 15 bp, Homo sapiens
gaaaagaaaaaaaaa

SEQ ID NO: 66698 - DNA, 15 bp, Homo sapiens
ggaaaagaaaaaaaa

SEQ ID NO: 66699 - DNA, 15 bp, Homo sapiens
tggaaaagaaaaaaa

SEQ ID NO: 66700 - DNA, 15 bp, Homo sapiens
gtggaaaagaaaaaa

SEQ ID NO: 66701 - DNA, 15 bp, Homo sapiens
tgtggaaaagaaaaa

SEQ ID NO: 66702 - DNA, 15 bp, Homo sapiens
ttgtggaaaagaaaa

SEQ ID NO: 66703 - DNA, 15 bp, Homo sapiens
gttgtggaaaagaaa

SEQ ID NO: 66704 - DNA, 15 bp, Homo sapiens
tgttgtggaaaagaa

SEQ ID NO: 66705 - DNA, 15 bp, Homo sapiens
ctgttgtggaaaaga

SEQ ID NO: 66706 - DNA, 15 bp, Homo sapiens
actgttgtggaaaag

SEQ ID NO: 66707 - DNA, 15 bp, Homo sapiens
aactgttgtggaaaa

SEQ ID NO: 66708 - DNA, 15 bp, Homo sapiens
aaactgttgtggaaa

SEQ ID NO: 66709 - DNA, 15 bp, Homo sapiens
gaaactgttgtggaa

SEQ ID NO: 66710 - DNA, 15 bp, Homo sapiens
ggaaactgttgtgga

SEQ ID NO: 66711 - DNA, 15 bp, Homo sapiens
tggaaactgttgtgg

SEQ ID NO: 66712 - DNA, 15 bp, Homo sapiens
ttggaaactgttgtg

SEQ ID NO: 66713 - DNA, 15 bp, Homo sapiens
cttggaaactgttgt

SEQ ID NO: 66714 - DNA, 15 bp, Homo sapiens
tcttggaaactgttg

SEQ ID NO: 66715 - DNA, 15 bp, Homo sapiens
ttcttggaaactgtt

SEQ ID NO: 66716 - DNA, 15 bp, Homo sapiens
attcttggaaactgt

SEQ ID NO: 66717 - DNA, 15 bp, Homo sapiens
cattcttggaaactg

SEQ ID NO: 66718 - DNA, 15 bp, Homo sapiens
acattcttggaaact

SEQ ID NO: 66719 - DNA, 15 bp, Homo sapiens
tacattcttggaaac

SEQ ID NO: 66720 - DNA, 15 bp, Homo sapiens
ttacattcttggaaa

SEQ ID NO: 66721 - DNA, 15 bp, Homo sapiens
tttacattcttggaa

SEQ ID NO: 66722 - DNA, 15 bp, Homo sapiens
gtttacattcttgga

SEQ ID NO: 66723 - DNA, 15 bp, Homo sapiens
tgtttacattcttgg

SEQ ID NO: 66724 - DNA, 15 bp, Homo sapiens
ttgtttacattcttg

SEQ ID NO: 66725 - DNA, 15 bp, Homo sapiens
tttgtttacattctt

SEQ ID NO: 66726 - DNA, 15 bp, Homo sapiens
gtttgtttacattct

SEQ ID NO: 66727 - DNA, 15 bp, Homo sapiens
agtttgtttacattc

SEQ ID NO: 66728 - DNA, 15 bp, Homo sapiens
cagtttgtttacatt

SEQ ID NO: 66729 - DNA, 15 bp, Homo sapiens
tcagtttgtttacat

SEQ ID NO: 66730 - DNA, 15 bp, Homo sapiens
ttcagtttgtttaca

SEQ ID NO: 66731 - DNA, 15 bp, Homo sapiens
cttcagtttgtttac

SEQ ID NO: 66732 - DNA, 15 bp, Homo sapiens
gcttcagtttgttta

SEQ ID NO: 66733 - DNA, 15 bp, Homo sapiens
agcttcagtttgttt

SEQ ID NO: 66734 - DNA, 15 bp, Homo sapiens
cagcttcagtttgtt

SEQ ID NO: 66735 - DNA, 15 bp, Homo sapiens
ccagcttcagtttgt

SEQ ID NO: 66736 - DNA, 15 bp, Homo sapiens
cccagcttcagtttg

SEQ ID NO: 66737 - DNA, 15 bp, Homo sapiens
tcccagcttcagttt

SEQ ID NO: 66738 - DNA, 15 bp, Homo sapiens
gtcccagcttcagtt

SEQ ID NO: 66739 - DNA, 15 bp, Homo sapiens
tgtcccagcttcagt

SEQ ID NO: 66740 - DNA, 15 bp, Homo sapiens
gtgtcccagcttcag

SEQ ID NO: 66741 - DNA, 15 bp, Homo sapiens
ggtgtcccagcttca

SEQ ID NO: 66742 - DNA, 15 bp, Homo sapiens
aggtgtcccagcttc

SEQ ID NO: 66743 - DNA, 15 bp, Homo sapiens
caggtgtcccagctt

SEQ ID NO: 66744 - DNA, 15 bp, Homo sapiens
ccaggtgtcccagct

SEQ ID NO: 66745 - DNA, 15 bp, Homo sapiens
cccaggtgtcccagc

SEQ ID NO: 66746 - DNA, 15 bp, Homo sapiens
acccaggtgtcccag

SEQ ID NO: 66747 - DNA, 15 bp, Homo sapiens
aacccaggtgtccca

SEQ ID NO: 66748 - DNA, 15 bp, Homo sapiens
taacccaggtgtccc

SEQ ID NO: 66749 - DNA, 15 bp, Homo sapiens
gtaacccaggtgtcc

SEQ ID NO: 66750 - DNA, 15 bp, Homo sapiens
tgtaacccaggtgtc

SEQ ID NO: 66751 - DNA, 15 bp, Homo sapiens
ttgtaacccaggtgt

SEQ ID NO: 66752 - DNA, 15 bp, Homo sapiens
cttgtaacccaggtg

SEQ ID NO: 66753 - DNA, 15 bp, Homo sapiens
acttgtaacccaggt

SEQ ID NO: 66754 - DNA, 15 bp, Homo sapiens
aacttgtaacccagg

SEQ ID NO: 66755 - DNA, 15 bp, Homo sapiens
taacttgtaacccag

SEQ ID NO: 66756 - DNA, 15 bp, Homo sapiens
ttaacttgtaaccca

SEQ ID NO: 66757 - DNA, 15 bp, Homo sapiens
tttaacttgtaaccc

SEQ ID NO: 66758 - DNA, 15 bp, Homo sapiens
atttaacttgtaacc

SEQ ID NO: 66759 - DNA, 15 bp, Homo sapiens
catttaacttgtaac

SEQ ID NO: 66760 - DNA, 15 bp, Homo sapiens
tcatttaacttgtaa

SEQ ID NO: 66761 - DNA, 15 bp, Homo sapiens
ttcatttaacttgta

SEQ ID NO: 66762 - DNA, 15 bp, Homo sapiens
tttcatttaacttgt

SEQ ID NO: 66763 - DNA, 15 bp, Homo sapiens
ttttcatttaacttg

SEQ ID NO: 66764 - DNA, 15 bp, Homo sapiens
attttcatttaactt

SEQ ID NO: 66765 - DNA, 15 bp, Homo sapiens
gattttcatttaact

SEQ ID NO: 66766 - DNA, 15 bp, Homo sapiens
ggattttcatttaac

SEQ ID NO: 66767 - DNA, 15 bp, Homo sapiens
cggattttcatttaa

SEQ ID NO: 66768 - DNA, 15 bp, Homo sapiens
gcggattttcattta

SEQ ID NO: 66769 - DNA, 15 bp, Homo sapiens
agcggattttcattt

SEQ ID NO: 66770 - DNA, 15 bp, Homo sapiens
cagcggattttcatt

SEQ ID NO: 66771 - DNA, 15 bp, Homo sapiens
ccagcggattttcat

SEQ ID NO: 66772 - DNA, 15 bp, Homo sapiens
gccagcggattttca

SEQ ID NO: 66773 - DNA, 15 bp, Homo sapiens
agccagcggattttc

SEQ ID NO: 66774 - DNA, 15 bp, Homo sapiens
cagccagcggatttt

SEQ ID NO: 66775 - DNA, 15 bp, Homo sapiens
ccagccagcggattt

SEQ ID NO: 66776 - DNA, 15 bp, Homo sapiens
cccagccagcggatt

SEQ ID NO: 66777 - DNA, 15 bp, Homo sapiens
acccagccagcggat

SEQ ID NO: 66778 - DNA, 15 bp, Homo sapiens
cacccagccagcgga

SEQ ID NO: 66779 - DNA, 15 bp, Homo sapiens
ccacccagccagcgg

SEQ ID NO: 66780 - DNA, 15 bp, Homo sapiens
cccacccagccagcg

SEQ ID NO: 66781 - DNA, 15 bp, Homo sapiens
ccccacccagccagc

SEQ ID NO: 66782 - DNA, 15 bp, Homo sapiens
gccccacccagccag

SEQ ID NO: 66783 - DNA, 15 bp, Homo sapiens
cgccccacccagcca

SEQ ID NO: 66784 - DNA, 15 bp, Homo sapiens
ccgccccacccagcc

SEQ ID NO: 66785 - DNA, 15 bp, Homo sapiens
cccgccccacccagc

SEQ ID NO: 66786 - DNA, 15 bp, Homo sapiens
ccccgccccacccag

SEQ ID NO: 66787 - DNA, 15 bp, Homo sapiens
tccccgccccaccca

SEQ ID NO: 66788 - DNA, 15 bp, Homo sapiens
ctccccgccccaccc

SEQ ID NO: 66789 - DNA, 15 bp, Homo sapiens
actccccgccccacc

SEQ ID NO: 66790 - DNA, 15 bp, Homo sapiens
cactccccgccccac

SEQ ID NO: 66791 - DNA, 15 bp, Homo sapiens
gcactccccgcccca

SEQ ID NO: 66792 - DNA, 15 bp, Homo sapiens
cgcactccccgcccc

SEQ ID NO: 66793 - DNA, 15 bp, Homo sapiens
gcgcactccccgccc

SEQ ID NO: 66794 - DNA, 15 bp, Homo sapiens
tgcgcactccccgcc

SEQ ID NO: 66795 - DNA, 15 bp, Homo sapiens
gtgcgcactccccgc

SEQ ID NO: 66796 - DNA, 15 bp, Homo sapiens
ggtgcgcactccccg

SEQ ID NO: 66797 - DNA, 15 bp, Homo sapiens
tggtgcgcactcccc

SEQ ID NO: 66798 - DNA, 15 bp, Homo sapiens
ctggtgcgcactccc

SEQ ID NO: 66799 - DNA, 15 bp, Homo sapiens
cctggtgcgcactcc

SEQ ID NO: 66800 - DNA, 15 bp, Homo sapiens
tcctggtgcgcactc

SEQ ID NO: 66801 - DNA, 15 bp, Homo sapiens
ctcctggtgcgcact

SEQ ID NO: 66802 - DNA, 15 bp, Homo sapiens
cctcctggtgcgcac

SEQ ID NO: 66803 - DNA, 15 bp, Homo sapiens
gcctcctggtgcgca

SEQ ID NO: 66804 - DNA, 15 bp, Homo sapiens
ggcctcctggtgcgc

SEQ ID NO: 66805 - DNA, 15 bp, Homo sapiens
gggcctcctggtgcg

SEQ ID NO: 66806 - DNA, 15 bp, Homo sapiens
agggcctcctggtgc

SEQ ID NO: 66807 - DNA, 15 bp, Homo sapiens
cagggcctcctggtg

SEQ ID NO: 66808 - DNA, 15 bp, Homo sapiens
gcagggcctcctggt

SEQ ID NO: 66809 - DNA, 15 bp, Homo sapiens
agcagggcctcctgg

SEQ ID NO: 66810 - DNA, 15 bp, Homo sapiens
gagcagggcctcctg

SEQ ID NO: 66811 - DNA, 15 bp, Homo sapiens
tgagcagggcctcct

SEQ ID NO: 66812 - DNA, 15 bp, Homo sapiens
atgagcagggcctcc

SEQ ID NO: 66813 - DNA, 15 bp, Homo sapiens
catgagcagggcctc

SEQ ID NO: 66814 - DNA, 15 bp, Homo sapiens
ccatgagcagggcct

SEQ ID NO: 66815 - DNA, 15 bp, Homo sapiens
cccatgagcagggcc

SEQ ID NO: 66816 - DNA, 15 bp, Homo sapiens
tcccatgagcagggc

SEQ ID NO: 66817 - DNA, 15 bp, Homo sapiens
ctcccatgagcaggg

SEQ ID NO: 66818 - DNA, 15 bp, Homo sapiens
cctcccatgagcagg

SEQ ID NO: 66819 - DNA, 15 bp, Homo sapiens
ccctcccatgagcag

SEQ ID NO: 66820 - DNA, 15 bp, Homo sapiens
cccctcccatgagca

SEQ ID NO: 66821 - DNA, 15 bp, Homo sapiens
gcccctcccatgagc

SEQ ID NO: 66822 - DNA, 15 bp, Homo sapiens
cgcccctcccatgag

SEQ ID NO: 66823 - DNA, 15 bp, Homo sapiens
ccgcccctcccatga

SEQ ID NO: 66824 - DNA, 15 bp, Homo sapiens
accgcccctcccatg

SEQ ID NO: 66825 - DNA, 15 bp, Homo sapiens
caccgcccctcccat

SEQ ID NO: 66826 - DNA, 15 bp, Homo sapiens
tcaccgcccctccca

SEQ ID NO: 66827 - DNA, 15 bp, Homo sapiens
gtcaccgcccctccc

SEQ ID NO: 66828 - DNA, 15 bp, Homo sapiens
agtcaccgcccctcc

SEQ ID NO: 66829 - DNA, 15 bp, Homo sapiens
cagtcaccgcccctc

SEQ ID NO: 66830 - DNA, 15 bp, Homo sapiens
ccagtcaccgcccct

SEQ ID NO: 66831 - DNA, 15 bp, Homo sapiens
cccagtcaccgcccc

SEQ ID NO: 66832 - DNA, 15 bp, Homo sapiens
acccagtcaccgccc

SEQ ID NO: 66833 - DNA, 15 bp, Homo sapiens
gacccagtcaccgcc

SEQ ID NO: 66834 - DNA, 15 bp, Homo sapiens
ggacccagtcaccgc

SEQ ID NO: 66835 - DNA, 15 bp, Homo sapiens
gggacccagtcaccg

SEQ ID NO: 66836 - DNA, 15 bp, Homo sapiens
ggggacccagtcacc

SEQ ID NO: 66837 - DNA, 15 bp, Homo sapiens
aggggacccagtcac

SEQ ID NO: 66838 - DNA, 15 bp, Homo sapiens
gaggggacccagtca

SEQ ID NO: 66839 - DNA, 15 bp, Homo sapiens
tgaggggacccagtc

SEQ ID NO: 66840 - DNA, 15 bp, Homo sapiens
gtgaggggacccagt

SEQ ID NO: 66841 - DNA, 15 bp, Homo sapiens
cgtgaggggacccag

SEQ ID NO: 66842 - DNA, 15 bp, Homo sapiens
gcgtgaggggaccca

SEQ ID NO: 66843 - DNA, 15 bp, Homo sapiens
ggcgtgaggggaccc

SEQ ID NO: 66844 - DNA, 15 bp, Homo sapiens
tggcgtgaggggacc

SEQ ID NO: 66845 - DNA, 15 bp, Homo sapiens
atggcgtgaggggac

SEQ ID NO: 66846 - DNA, 15 bp, Homo sapiens
catggcgtgagggga

SEQ ID NO: 66847 - DNA, 15 bp, Homo sapiens
gcatggcgtgagggg

SEQ ID NO: 66848 - DNA, 15 bp, Homo sapiens
tgcatggcgtgaggg

SEQ ID NO: 66849 - DNA, 15 bp, Homo sapiens
ctgcatggcgtgagg

SEQ ID NO: 66850 - DNA, 15 bp, Homo sapiens
gctgcatggcgtgag

SEQ ID NO: 66851 - DNA, 15 bp, Homo sapiens
ggctgcatggcgtga

SEQ ID NO: 66852 - DNA, 15 bp, Homo sapiens
cggctgcatggcgtg

SEQ ID NO: 66853 - DNA, 15 bp, Homo sapiens
gcggctgcatggcgt

SEQ ID NO: 66854 - DNA, 15 bp, Homo sapiens
cgcggctgcatggcg

SEQ ID NO: 66855 - DNA, 15 bp, Homo sapiens
tcgcggctgcatggc

SEQ ID NO: 66856 - DNA, 15 bp, Homo sapiens
gtcgcggctgcatgg

SEQ ID NO: 66857 - DNA, 15 bp, Homo sapiens
ggtcgcggctgcatg

SEQ ID NO: 66858 - DNA, 15 bp, Homo sapiens
aggtcgcggctgcat

SEQ ID NO: 66859 - DNA, 15 bp, Homo sapiens
caggtcgcggctgca

SEQ ID NO: 66860 - DNA, 15 bp, Homo sapiens
tcaggtcgcggctgc

SEQ ID NO: 66861 - DNA, 15 bp, Homo sapiens
gtcaggtcgcggctg

SEQ ID NO: 66862 - DNA, 15 bp, Homo sapiens
cgtcaggtcgcggct

SEQ ID NO: 66863 - DNA, 15 bp, Homo sapiens
gcgtcaggtcgcggc

SEQ ID NO: 66864 - DNA, 15 bp, Homo sapiens
ggcgtcaggtcgcgg

SEQ ID NO: 66865 - DNA, 15 bp, Homo sapiens
gggcgtcaggtcgcg

SEQ ID NO: 66866 - DNA, 15 bp, Homo sapiens
agggcgtcaggtcgc

SEQ ID NO: 66867 - DNA, 15 bp, Homo sapiens
gagggcgtcaggtcg

SEQ ID NO: 66868 - DNA, 15 bp, Homo sapiens
ggagggcgtcaggtc

SEQ ID NO: 66869 - DNA, 15 bp, Homo sapiens
cggagggcgtcaggt

SEQ ID NO: 66870 - DNA, 15 bp, Homo sapiens
tcggagggcgtcagg

SEQ ID NO: 66871 - DNA, 15 bp, Homo sapiens
ctcggagggcgtcag

SEQ ID NO: 66872 - DNA, 15 bp, Homo sapiens
actcggagggcgtca

SEQ ID NO: 66873 - DNA, 15 bp, Homo sapiens
tactcggagggcgtc

SEQ ID NO: 66874 - DNA, 15 bp, Homo sapiens
ctactcggagggcgt

SEQ ID NO: 66875 - DNA, 15 bp, Homo sapiens
cctactcggagggcg

SEQ ID NO: 66876 - DNA, 15 bp, Homo sapiens
ccctactcggagggc

SEQ ID NO: 66877 - DNA, 15 bp, Homo sapiens
tccctactcggaggg

SEQ ID NO: 66878 - DNA, 15 bp, Homo sapiens
gtccctactcggagg

SEQ ID NO: 66879 - DNA, 15 bp, Homo sapiens
ggtccctactcggag

SEQ ID NO: 66880 - DNA, 15 bp, Homo sapiens
gggtccctactcgga

SEQ ID NO: 66881 - DNA, 15 bp, Homo sapiens
tgggtccctactcgg

SEQ ID NO: 66882 - DNA, 15 bp, Homo sapiens
ttgggtccctactcg

SEQ ID NO: 66883 - DNA, 15 bp, Homo sapiens
tttgggtccctactc

SEQ ID NO: 66884 - DNA, 15 bp, Homo sapiens
ctttgggtccctact

SEQ ID NO: 66885 - DNA, 15 bp, Homo sapiens
gctttgggtccctac

SEQ ID NO: 66886 - DNA, 15 bp, Homo sapiens
agctttgggtcccta

SEQ ID NO: 66887 - DNA, 15 bp, Homo sapiens
aagctttgggtccct

SEQ ID NO: 66888 - DNA, 15 bp, Homo sapiens
taagctttgggtccc

SEQ ID NO: 66889 - DNA, 15 bp, Homo sapiens
ctaagctttgggtcc

SEQ ID NO: 66890 - DNA, 15 bp, Homo sapiens
cctaagctttgggtc

SEQ ID NO: 66891 - DNA, 15 bp, Homo sapiens
tcctaagctttgggt

SEQ ID NO: 66892 - DNA, 15 bp, Homo sapiens
gtcctaagctttggg

SEQ ID NO: 66893 - DNA, 15 bp, Homo sapiens
ggtcctaagctttgg

SEQ ID NO: 66894 - DNA, 15 bp, Homo sapiens
tggtcctaagctttg

SEQ ID NO: 66895 - DNA, 15 bp, Homo sapiens
atggtcctaagcttt

SEQ ID NO: 66896 - DNA, 15 bp, Homo sapiens
gatggtcctaagctt

SEQ ID NO: 66897 - DNA, 15 bp, Homo sapiens
agatggtcctaagct

SEQ ID NO: 66898 - DNA, 15 bp, Homo sapiens
cagatggtcctaagc

SEQ ID NO: 66899 - DNA, 15 bp, Homo sapiens
tcagatggtcctaag

SEQ ID NO: 66900 - DNA, 15 bp, Homo sapiens
ctcagatggtcctaa

SEQ ID NO: 66901 - DNA, 15 bp, Homo sapiens
actcagatggtccta

SEQ ID NO: 66902 - DNA, 15 bp, Homo sapiens
gactcagatggtcct

SEQ ID NO: 66903 - DNA, 15 bp, Homo sapiens
tgactcagatggtcc

SEQ ID NO: 66904 - DNA, 15 bp, Homo sapiens
ctgactcagatggtc

SEQ ID NO: 66905 - DNA, 15 bp, Homo sapiens
actgactcagatggt

SEQ ID NO: 66906 - DNA, 15 bp, Homo sapiens
gactgactcagatgg

SEQ ID NO: 66907 - DNA, 15 bp, Homo sapiens
ggactgactcagatg

SEQ ID NO: 66908 - DNA, 15 bp, Homo sapiens
cggactgactcagat

SEQ ID NO: 66909 - DNA, 15 bp, Homo sapiens
tcggactgactcaga

SEQ ID NO: 66910 - DNA, 15 bp, Homo sapiens
ctcggactgactcag

SEQ ID NO: 66911 - DNA, 15 bp, Homo sapiens
tctcggactgactca

SEQ ID NO: 66912 - DNA, 15 bp, Homo sapiens
ctctcggactgactc

SEQ ID NO: 66913 - DNA, 15 bp, Homo sapiens
gctctcggactgact

SEQ ID NO: 66914 - DNA, 15 bp, Homo sapiens
cgctctcggactgac

SEQ ID NO: 66915 - DNA, 15 bp, Homo sapiens
ccgctctcggactga

SEQ ID NO: 66916 - DNA, 15 bp, Homo sapiens
tccgctctcggactg

SEQ ID NO: 66917 - DNA, 15 bp, Homo sapiens
ctccgctctcggact

SEQ ID NO: 66918 - DNA, 15 bp, Homo sapiens
cctccgctctcggac

SEQ ID NO: 66919 - DNA, 15 bp, Homo sapiens
tcctccgctctcgga

SEQ ID NO: 66920 - DNA, 15 bp, Homo sapiens
ctcctccgctctcgg

SEQ ID NO: 66921 - DNA, 15 bp, Homo sapiens
cctcctccgctctcg

SEQ ID NO: 66922 - DNA, 15 bp, Homo sapiens
tcctcctccgctctc

SEQ ID NO: 66923 - DNA, 15 bp, Homo sapiens
ttcctcctccgctct

SEQ ID NO: 66924 - DNA, 15 bp, Homo sapiens
cttcctcctccgctc

SEQ ID NO: 66925 - DNA, 15 bp, Homo sapiens
ccttcctcctccgct

SEQ ID NO: 66926 - DNA, 15 bp, Homo sapiens
tccttcctcctccgc

SEQ ID NO: 66927 - DNA, 15 bp, Homo sapiens
gtccttcctcctccg

SEQ ID NO: 66928 - DNA, 15 bp, Homo sapiens
agtccttcctcctcc

SEQ ID NO: 66929 - DNA, 15 bp, Homo sapiens
gagtccttcctcctc

SEQ ID NO: 66930 - DNA, 15 bp, Homo sapiens
agagtccttcctcct

SEQ ID NO: 66931 - DNA, 15 bp, Homo sapiens
gagagtccttcctcc

SEQ ID NO: 66932 - DNA, 15 bp, Homo sapiens
ggagagtccttcctc

SEQ ID NO: 66933 - DNA, 15 bp, Homo sapiens
cggagagtccttcct

SEQ ID NO: 66934 - DNA, 15 bp, Homo sapiens
gcggagagtccttcc

SEQ ID NO: 66935 - DNA, 15 bp, Homo sapiens
tgcggagagtccttc

SEQ ID NO: 66936 - DNA, 15 bp, Homo sapiens
ctgcggagagtcctt

SEQ ID NO: 66937 - DNA, 15 bp, Homo sapiens
actgcggagagtcct

SEQ ID NO: 66938 - DNA, 15 bp, Homo sapiens
cactgcggagagtcc

SEQ ID NO: 66939 - DNA, 15 bp, Homo sapiens
gcactgcggagagtc

SEQ ID NO: 66940 - DNA, 15 bp, Homo sapiens
agcactgcggagagt

SEQ ID NO: 66941 - DNA, 15 bp, Homo sapiens
cagcactgcggagag

SEQ ID NO: 66942 - DNA, 15 bp, Homo sapiens
gcagcactgcggaga

SEQ ID NO: 66943 - DNA, 15 bp, Homo sapiens
tgcagcactgcggag

SEQ ID NO: 66944 - DNA, 15 bp, Homo sapiens
ttgcagcactgcgga

SEQ ID NO: 66945 - DNA, 15 bp, Homo sapiens
tttgcagcactgcgg

SEQ ID NO: 66946 - DNA, 15 bp, Homo sapiens
gtttgcagcactgcg

SEQ ID NO: 66947 - DNA, 15 bp, Homo sapiens
tgtttgcagcactgc

SEQ ID NO: 66948 - DNA, 15 bp, Homo sapiens
gtgtttgcagcactg

SEQ ID NO: 66949 - DNA, 15 bp, Homo sapiens
ggtgtttgcagcact

SEQ ID NO: 66950 - DNA, 15 bp, Homo sapiens
gggtgtttgcagcac

SEQ ID NO: 66951 - DNA, 15 bp, Homo sapiens
cgggtgtttgcagca

SEQ ID NO: 66952 - DNA, 15 bp, Homo sapiens
gcgggtgtttgcagc

SEQ ID NO: 66953 - DNA, 15 bp, Homo sapiens
tgcgggtgtttgcag

SEQ ID NO: 66954 - DNA, 15 bp, Homo sapiens
atgcgggtgtttgca

SEQ ID NO: 66955 - DNA, 15 bp, Homo sapiens
tatgcgggtgtttgc

SEQ ID NO: 66956 - DNA, 15 bp, Homo sapiens
gtatgcgggtgtttg

SEQ ID NO: 66957 - DNA, 15 bp, Homo sapiens
agtatgcgggtgttt

SEQ ID NO: 66958 - DNA, 15 bp, Homo sapiens
aagtatgcgggtgtt

SEQ ID NO: 66959 - DNA, 15 bp, Homo sapiens
aaagtatgcgggtgt

SEQ ID NO: 66960 - DNA, 15 bp, Homo sapiens
aaaagtatgcgggtg

SEQ ID NO: 66961 - DNA, 15 bp, Homo sapiens
gaaaagtatgcgggt

SEQ ID NO: 66962 - DNA, 15 bp, Homo sapiens
ggaaaagtatgcggg

SEQ ID NO: 66963 - DNA, 15 bp, Homo sapiens
gggaaaagtatgcgg

SEQ ID NO: 66964 - DNA, 15 bp, Homo sapiens
tgggaaaagtatgcg

SEQ ID NO: 66965 - DNA, 15 bp, Homo sapiens
ctgggaaaagtatgc

SEQ ID NO: 66966 - DNA, 15 bp, Homo sapiens
tctgggaaaagtatg

SEQ ID NO: 66967 - DNA, 15 bp, Homo sapiens
atctgggaaaagtat

SEQ ID NO: 66968 - DNA, 15 bp, Homo sapiens
gatctgggaaaagta

SEQ ID NO: 66969 - DNA, 15 bp, Homo sapiens
agatctgggaaaagt

SEQ ID NO: 66970 - DNA, 15 bp, Homo sapiens
gagatctgggaaaag

SEQ ID NO: 66971 - DNA, 15 bp, Homo sapiens
agagatctgggaaaa

SEQ ID NO: 66972 - DNA, 15 bp, Homo sapiens
cagagatctgggaaa

SEQ ID NO: 66973 - DNA, 15 bp, Homo sapiens
gcagagatctgggaa

SEQ ID NO: 66974 - DNA, 15 bp, Homo sapiens
ggcagagatctggga

SEQ ID NO: 66975 - DNA, 15 bp, Homo sapiens
gggcagagatctggg

SEQ ID NO: 66976 - DNA, 15 bp, Homo sapiens
ggggcagagatctgg

SEQ ID NO: 66977 - DNA, 15 bp, Homo sapiens
cggggcagagatctg

SEQ ID NO: 66978 - DNA, 15 bp, Homo sapiens
gcggggcagagatct

SEQ ID NO: 66979 - DNA, 15 bp, Homo sapiens
ggcggggcagagatc

SEQ ID NO: 66980 - DNA, 15 bp, Homo sapiens
gggcggggcagagat

SEQ ID NO: 66981 - DNA, 15 bp, Homo sapiens
agggcggggcagaga

SEQ ID NO: 66982 - DNA, 15 bp, Homo sapiens
gagggcggggcagag

SEQ ID NO: 66983 - DNA, 15 bp, Homo sapiens
ggagggcggggcaga

SEQ ID NO: 66984 - DNA, 15 bp, Homo sapiens
gggagggcggggcag

SEQ ID NO: 66985 - DNA, 15 bp, Homo sapiens
ggggagggcggggca

SEQ ID NO: 66986 - DNA, 15 bp, Homo sapiens
tggggagggcggggc

SEQ ID NO: 66987 - DNA, 15 bp, Homo sapiens
atggggagggcgggg

SEQ ID NO: 66988 - DNA, 15 bp, Homo sapiens
gatggggagggcggg

SEQ ID NO: 66989 - DNA, 15 bp, Homo sapiens
ggatggggagggcgg

SEQ ID NO: 66990 - DNA, 15 bp, Homo sapiens
aggatggggagggcg

SEQ ID NO: 66991 - DNA, 15 bp, Homo sapiens
caggatggggagggc

SEQ ID NO: 66992 - DNA, 15 bp, Homo sapiens
tcaggatggggaggg

SEQ ID NO: 66993 - DNA, 15 bp, Homo sapiens
ttcaggatggggagg

SEQ ID NO: 66994 - DNA, 15 bp, Homo sapiens
cttcaggatggggag

SEQ ID NO: 66995 - DNA, 15 bp, Homo sapiens
gcttcaggatgggga

SEQ ID NO: 66996 - DNA, 15 bp, Homo sapiens
ggcttcaggatgggg

SEQ ID NO: 66997 - DNA, 15 bp, Homo sapiens
gggcttcaggatggg

SEQ ID NO: 66998 - DNA, 15 bp, Homo sapiens
ggggcttcaggatgg

SEQ ID NO: 66999 - DNA, 15 bp, Homo sapiens
cggggcttcaggatg

SEQ ID NO: 67000 - DNA, 15 bp, Homo sapiens
gcggggcttcaggat

SEQ ID NO: 67001 - DNA, 15 bp, Homo sapiens
ggcggggcttcagga

SEQ ID NO: 67002 - DNA, 15 bp, Homo sapiens
aggcggggcttcagg

SEQ ID NO: 67003 - DNA, 15 bp, Homo sapiens
gaggcggggcttcag

SEQ ID NO: 67004 - DNA, 15 bp, Homo sapiens
ggaggcggggcttca

SEQ ID NO: 67005 - DNA, 15 bp, Homo sapiens
tggaggcggggcttc

SEQ ID NO: 67006 - DNA, 15 bp, Homo sapiens
ttggaggcggggctt

SEQ ID NO: 67007 - DNA, 15 bp, Homo sapiens
cttggaggcggggct

SEQ ID NO: 67008 - DNA, 15 bp, Homo sapiens
acttggaggcggggc

SEQ ID NO: 67009 - DNA, 15 bp, Homo sapiens
cacttggaggcgggg

SEQ ID NO: 67010 - DNA, 15 bp, Homo sapiens
gcacttggaggcggg

SEQ ID NO: 67011 - DNA, 15 bp, Homo sapiens
agcacttggaggcgg

SEQ ID NO: 67012 - DNA, 15 bp, Homo sapiens
gagcacttggaggcg

SEQ ID NO: 67013 - DNA, 15 bp, Homo sapiens
ggagcacttggaggc

SEQ ID NO: 67014 - DNA, 15 bp, Homo sapiens
gggagcacttggagg

SEQ ID NO: 67015 - DNA, 15 bp, Homo sapiens
ggggagcacttggag

SEQ ID NO: 67016 - DNA, 15 bp, Homo sapiens
tggggagcacttgga

SEQ ID NO: 67017 - DNA, 15 bp, Homo sapiens
ctggggagcacttgg

SEQ ID NO: 67018 - DNA, 15 bp, Homo sapiens
tctggggagcacttg

SEQ ID NO: 67019 - DNA, 15 bp, Homo sapiens
gtctggggagcactt

SEQ ID NO: 67020 - DNA, 15 bp, Homo sapiens
ggtctggggagcact

SEQ ID NO: 67021 - DNA, 15 bp, Homo sapiens
cggtctggggagcac

SEQ ID NO: 67022 - DNA, 15 bp, Homo sapiens
ccggtctggggagca

SEQ ID NO: 67023 - DNA, 15 bp, Homo sapiens
accggtctggggagc

SEQ ID NO: 67024 - DNA, 15 bp, Homo sapiens
gaccggtctggggag

SEQ ID NO: 67025 - DNA, 15 bp, Homo sapiens
tgaccggtctgggga

SEQ ID NO: 67026 - DNA, 15 bp, Homo sapiens
ctgaccggtctgggg

SEQ ID NO: 67027 - DNA, 15 bp, Homo sapiens
actgaccggtctggg

SEQ ID NO: 67028 - DNA, 15 bp, Homo sapiens
cactgaccggtctgg

SEQ ID NO: 67029 - DNA, 15 bp, Homo sapiens
tcactgaccggtctg

SEQ ID NO: 67030 - DNA, 15 bp, Homo sapiens
ctcactgaccggtct

SEQ ID NO: 67031 - DNA, 15 bp, Homo sapiens
cctcactgaccggtc

SEQ ID NO: 67032 - DNA, 15 bp, Homo sapiens
gcctcactgaccggt

SEQ ID NO: 67033 - DNA, 15 bp, Homo sapiens
ggcctcactgaccgg

SEQ ID NO: 67034 - DNA, 15 bp, Homo sapiens
gggcctcactgaccg

SEQ ID NO: 67035 - DNA, 15 bp, Homo sapiens
tgggcctcactgacc

SEQ ID NO: 67036 - DNA, 15 bp, Homo sapiens
ctgggcctcactgac

SEQ ID NO: 67037 - DNA, 15 bp, Homo sapiens
gctgggcctcactga

SEQ ID NO: 67038 - DNA, 15 bp, Homo sapiens
agctgggcctcactg

SEQ ID NO: 67039 - DNA, 15 bp, Homo sapiens
cagctgggcctcact

SEQ ID NO: 67040 - DNA, 15 bp, Homo sapiens
tcagctgggcctcac

SEQ ID NO: 67041 - DNA, 15 bp, Homo sapiens
ctcagctgggcctca

SEQ ID NO: 67042 - DNA, 15 bp, Homo sapiens
gctcagctgggcctc

SEQ ID NO: 67043 - DNA, 15 bp, Homo sapiens
agctcagctgggcct

SEQ ID NO: 67044 - DNA, 15 bp, Homo sapiens
gagctcagctgggcc

SEQ ID NO: 67045 - DNA, 15 bp, Homo sapiens
ggagctcagctgggc

SEQ ID NO: 67046 - DNA, 15 bp, Homo sapiens
gggagctcagctggg

SEQ ID NO: 67047 - DNA, 15 bp, Homo sapiens
agggagctcagctgg

SEQ ID NO: 67048 - DNA, 15 bp, Homo sapiens
gagggagctcagctg

SEQ ID NO: 67049 - DNA, 15 bp, Homo sapiens
cgagggagctcagct

SEQ ID NO: 67050 - DNA, 15 bp, Homo sapiens
tcgagggagctcagc

SEQ ID NO: 67051 - DNA, 15 bp, Homo sapiens
ctcgagggagctcag

SEQ ID NO: 67052 - DNA, 15 bp, Homo sapiens
actcgagggagctca

SEQ ID NO: 67053 - DNA, 15 bp, Homo sapiens
cactcgagggagctc

SEQ ID NO: 67054 - DNA, 15 bp, Homo sapiens
acactcgagggagct

SEQ ID NO: 67055 - DNA, 15 bp, Homo sapiens
gacactcgagggagc

SEQ ID NO: 67056 - DNA, 15 bp, Homo sapiens
cgacactcgagggag

SEQ ID NO: 67057 - DNA, 15 bp, Homo sapiens
ccgacactcgaggga

SEQ ID NO: 67058 - DNA, 15 bp, Homo sapiens
cccgacactcgaggg

SEQ ID NO: 67059 - DNA, 15 bp, Homo sapiens
gcccgacactcgagg

SEQ ID NO: 67060 - DNA, 15 bp, Homo sapiens
tgcccgacactcgag

SEQ ID NO: 67061 - DNA, 15 bp, Homo sapiens
ttgcccgacactcga

SEQ ID NO: 67062 - DNA, 15 bp, Homo sapiens
tttgcccgacactcg

SEQ ID NO: 67063 - DNA, 15 bp, Homo sapiens
atttgcccgacactc

SEQ ID NO: 67064 - DNA, 15 bp, Homo sapiens
catttgcccgacact

SEQ ID NO: 67065 - DNA, 15 bp, Homo sapiens
gcatttgcccgacac

SEQ ID NO: 67066 - DNA, 15 bp, Homo sapiens
ggcatttgcccgaca

SEQ ID NO: 67067 - DNA, 15 bp, Homo sapiens
tggcatttgcccgac

SEQ ID NO: 67068 - DNA, 15 bp, Homo sapiens
ctggcatttgcccga

SEQ ID NO: 67069 - DNA, 15 bp, Homo sapiens
cctggcatttgcccg

SEQ ID NO: 67070 - DNA, 15 bp, Homo sapiens
ccctggcatttgccc

SEQ ID NO: 67071 - DNA, 15 bp, Homo sapiens
gccctggcatttgcc

SEQ ID NO: 67072 - DNA, 15 bp, Homo sapiens
tgccctggcatttgc

SEQ ID NO: 67073 - DNA, 15 bp, Homo sapiens
ctgccctggcatttg

SEQ ID NO: 67074 - DNA, 15 bp, Homo sapiens
actgccctggcattt

SEQ ID NO: 67075 - DNA, 15 bp, Homo sapiens
gactgccctggcatt

SEQ ID NO: 67076 - DNA, 15 bp, Homo sapiens
ggactgccctggcat

SEQ ID NO: 67077 - DNA, 15 bp, Homo sapiens
gggactgccctggca

SEQ ID NO: 67078 - DNA, 15 bp, Homo sapiens
agggactgccctggc

SEQ ID NO: 67079 - DNA, 15 bp, Homo sapiens
cagggactgccctgg

SEQ ID NO: 67080 - DNA, 15 bp, Homo sapiens
ccagggactgccctg

SEQ ID NO: 67081 - DNA, 15 bp, Homo sapiens
gccagggactgccct

SEQ ID NO: 67082 - DNA, 15 bp, Homo sapiens
ggccagggactgccc

SEQ ID NO: 67083 - DNA, 15 bp, Homo sapiens
gggccagggactgcc

SEQ ID NO: 67084 - DNA, 15 bp, Homo sapiens
agggccagggactgc

SEQ ID NO: 67085 - DNA, 15 bp, Homo sapiens
cagggccagggactg

SEQ ID NO: 67086 - DNA, 15 bp, Homo sapiens
acagggccagggact

SEQ ID NO: 67087 - DNA, 15 bp, Homo sapiens
cacagggccagggac

SEQ ID NO: 67088 - DNA, 15 bp, Homo sapiens
acacagggccaggga

SEQ ID NO: 67089 - DNA, 15 bp, Homo sapiens
cacacagggccaggg

SEQ ID NO: 67090 - DNA, 15 bp, Homo sapiens
tcacacagggccagg

SEQ ID NO: 67091 - DNA, 15 bp, Homo sapiens
atcacacagggccag

SEQ ID NO: 67092 - DNA, 15 bp, Homo sapiens
catcacacagggcca

SEQ ID NO: 67093 - DNA, 15 bp, Homo sapiens
ccatcacacagggcc

SEQ ID NO: 67094 - DNA, 15 bp, Homo sapiens
cccatcacacagggc

SEQ ID NO: 67095 - DNA, 15 bp, Homo sapiens
tcccatcacacaggg

SEQ ID NO: 67096 - DNA, 15 bp, Homo sapiens
atcccatcacacagg

SEQ ID NO: 67097 - DNA, 15 bp, Homo sapiens
catcccatcacacag

SEQ ID NO: 67098 - DNA, 15 bp, Homo sapiens
gcatcccatcacaca

SEQ ID NO: 67099 - DNA, 15 bp, Homo sapiens
tgcatcccatcacac

SEQ ID NO: 67100 - DNA, 15 bp, Homo sapiens
ctgcatcccatcaca

SEQ ID NO: 67101 - DNA, 15 bp, Homo sapiens
tctgcatcccatcac

SEQ ID NO: 67102 - DNA, 15 bp, Homo sapiens
gtctgcatcccatca

SEQ ID NO: 67103 - DNA, 15 bp, Homo sapiens
agtctgcatcccatc

SEQ ID NO: 67104 - DNA, 15 bp, Homo sapiens
gagtctgcatcccat

SEQ ID NO: 67105 - DNA, 15 bp, Homo sapiens
agagtctgcatccca

SEQ ID NO: 67106 - DNA, 15 bp, Homo sapiens
gagagtctgcatccc

SEQ ID NO: 67107 - DNA, 15 bp, Homo sapiens
cgagagtctgcatcc

SEQ ID NO: 67108 - DNA, 15 bp, Homo sapiens
ccgagagtctgcatc

SEQ ID NO: 67109 - DNA, 15 bp, Homo sapiens
cccgagagtctgcat

SEQ ID NO: 67110 - DNA, 15 bp, Homo sapiens
acccgagagtctgca

SEQ ID NO: 67111 - DNA, 15 bp, Homo sapiens
gacccgagagtctgc

SEQ ID NO: 67112 - DNA, 15 bp, Homo sapiens
ggacccgagagtctg

SEQ ID NO: 67113 - DNA, 15 bp, Homo sapiens
aggacccgagagtct

SEQ ID NO: 67114 - DNA, 15 bp, Homo sapiens
caggacccgagagtc

SEQ ID NO: 67115 - DNA, 15 bp, Homo sapiens
acaggacccgagagt

SEQ ID NO: 67116 - DNA, 15 bp, Homo sapiens
gacaggacccgagag

SEQ ID NO: 67117 - DNA, 15 bp, Homo sapiens
ggacaggacccgaga

SEQ ID NO: 67118 - DNA, 15 bp, Homo sapiens
tggacaggacccgag

SEQ ID NO: 67119 - DNA, 15 bp, Homo sapiens
ttggacaggacccga

SEQ ID NO: 67120 - DNA, 15 bp, Homo sapiens
cttggacaggacccg

SEQ ID NO: 67121 - DNA, 15 bp, Homo sapiens
ccttggacaggaccc

SEQ ID NO: 67122 - DNA, 15 bp, Homo sapiens
tccttggacaggacc

SEQ ID NO: 67123 - DNA, 15 bp, Homo sapiens
atccttggacaggac

SEQ ID NO: 67124 - DNA, 15 bp, Homo sapiens
aatccttggacagga

SEQ ID NO: 67125 - DNA, 15 bp, Homo sapiens
caatccttggacagg

SEQ ID NO: 67126 - DNA, 15 bp, Homo sapiens
gcaatccttggacag

SEQ ID NO: 67127 - DNA, 15 bp, Homo sapiens
ggcaatccttggaca

SEQ ID NO: 67128 - DNA, 15 bp, Homo sapiens
tggcaatccttggac

SEQ ID NO: 67129 - DNA, 15 bp, Homo sapiens
ttggcaatccttgga

SEQ ID NO: 67130 - DNA, 15 bp, Homo sapiens
attggcaatccttgg

SEQ ID NO: 67131 - DNA, 15 bp, Homo sapiens
aattggcaatccttg

SEQ ID NO: 67132 - DNA, 15 bp, Homo sapiens
taattggcaatcctt

SEQ ID NO: 67133 - DNA, 15 bp, Homo sapiens
ataattggcaatcct

SEQ ID NO: 67134 - DNA, 15 bp, Homo sapiens
cataattggcaatcc

SEQ ID NO: 67135 - DNA, 15 bp, Homo sapiens
gcataattggcaatc

SEQ ID NO: 67136 - DNA, 15 bp, Homo sapiens
cgcataattggcaat

SEQ ID NO: 67137 - DNA, 15 bp, Homo sapiens
acgcataattggcaa

SEQ ID NO: 67138 - DNA, 15 bp, Homo sapiens
gacgcataattggca

SEQ ID NO: 67139 - DNA, 15 bp, Homo sapiens
ggacgcataattggc

SEQ ID NO: 67140 - DNA, 15 bp, Homo sapiens
tggacgcataattgg

SEQ ID NO: 67141 - DNA, 15 bp, Homo sapiens
ttggacgcataattg

SEQ ID NO: 67142 - DNA, 15 bp, Homo sapiens
gttggacgcataatt

SEQ ID NO: 67143 - DNA, 15 bp, Homo sapiens
ggttggacgcataat

SEQ ID NO: 67144 - DNA, 15 bp, Homo sapiens
gggttggacgcataa

SEQ ID NO: 67145 - DNA, 15 bp, Homo sapiens
agggttggacgcata

SEQ ID NO: 67146 - DNA, 15 bp, Homo sapiens
gagggttggacgcat

SEQ ID NO: 67147 - DNA, 15 bp, Homo sapiens
ggagggttggacgca

SEQ ID NO: 67148 - DNA, 15 bp, Homo sapiens
aggagggttggacgc

SEQ ID NO: 67149 - DNA, 15 bp, Homo sapiens
gaggagggttggacg

SEQ ID NO: 67150 - DNA, 15 bp, Homo sapiens
tgaggagggttggac

SEQ ID NO: 67151 - DNA, 15 bp, Homo sapiens
ctgaggagggttgga

SEQ ID NO: 67152 - DNA, 15 bp, Homo sapiens
tctgaggagggttgg

SEQ ID NO: 67153 - DNA, 15 bp, Homo sapiens
atctgaggagggttg

SEQ ID NO: 67154 - DNA, 15 bp, Homo sapiens
gatctgaggagggtt

SEQ ID NO: 67155 - DNA, 15 bp, Homo sapiens
agatctgaggagggt

SEQ ID NO: 67156 - DNA, 15 bp, Homo sapiens
gagatctgaggaggg

SEQ ID NO: 67157 - DNA, 15 bp, Homo sapiens
agagatctgaggagg

SEQ ID NO: 67158 - DNA, 15 bp, Homo sapiens
gagagatctgaggag

SEQ ID NO: 67159 - DNA, 15 bp, Homo sapiens
agagagatctgagga

SEQ ID NO: 67160 - DNA, 15 bp, Homo sapiens
tagagagatctgagg

SEQ ID NO: 67161 - DNA, 15 bp, Homo sapiens
ttagagagatctgag

SEQ ID NO: 67162 - DNA, 15 bp, Homo sapiens
tttagagagatctga

SEQ ID NO: 67163 - DNA, 15 bp, Homo sapiens
ctttagagagatctg

SEQ ID NO: 67164 - DNA, 15 bp, Homo sapiens
cctttagagagatct

SEQ ID NO: 67165 - DNA, 15 bp, Homo sapiens
tcctttagagagatc

SEQ ID NO: 67166 - DNA, 15 bp, Homo sapiens
ttcctttagagagat

SEQ ID NO: 67167 - DNA, 15 bp, Homo sapiens
tttcctttagagaga

SEQ ID NO: 67168 - DNA, 15 bp, Homo sapiens
ttttcctttagagag

SEQ ID NO: 67169 - DNA, 15 bp, Homo sapiens
gttttcctttagaga

SEQ ID NO: 67170 - DNA, 15 bp, Homo sapiens
agttttcctttagag

SEQ ID NO: 67171 - DNA, 15 bp, Homo sapiens
aagttttcctttaga

SEQ ID NO: 67172 - DNA, 15 bp, Homo sapiens
caagttttcctttag

SEQ ID NO: 67173 - DNA, 15 bp, Homo sapiens
acaagttttccttta

SEQ ID NO: 67174 - DNA, 15 bp, Homo sapiens
gacaagttttccttt

SEQ ID NO: 67175 - DNA, 15 bp, Homo sapiens
tgacaagttttcctt

SEQ ID NO: 67176 - DNA, 15 bp, Homo sapiens
gtgacaagttttcct

SEQ ID NO: 67177 - DNA, 15 bp, Homo sapiens
tgtgacaagttttcc

SEQ ID NO: 67178 - DNA, 15 bp, Homo sapiens
gtgtgacaagttttc

SEQ ID NO: 67179 - DNA, 15 bp, Homo sapiens
cgtgtgacaagtttt

SEQ ID NO: 67180 - DNA, 15 bp, Homo sapiens
ccgtgtgacaagttt

SEQ ID NO: 67181 - DNA, 15 bp, Homo sapiens
tccgtgtgacaagtt

SEQ ID NO: 67182 - DNA, 15 bp, Homo sapiens
gtccgtgtgacaagt

SEQ ID NO: 67183 - DNA, 15 bp, Homo sapiens
cgtccgtgtgacaag

SEQ ID NO: 67184 - DNA, 15 bp, Homo sapiens
gcgtccgtgtgacaa

SEQ ID NO: 67185 - DNA, 15 bp, Homo sapiens
tgcgtccgtgtgaca

SEQ ID NO: 67186 - DNA, 15 bp, Homo sapiens
atgcgtccgtgtgac

SEQ ID NO: 67187 - DNA, 15 bp, Homo sapiens
gatgcgtccgtgtga

SEQ ID NO: 67188 - DNA, 15 bp, Homo sapiens
agatgcgtccgtgtg

SEQ ID NO: 67189 - DNA, 15 bp, Homo sapiens
aagatgcgtccgtgt

SEQ ID NO: 67190 - DNA, 15 bp, Homo sapiens
gaagatgcgtccgtg

SEQ ID NO: 67191 - DNA, 15 bp, Homo sapiens
ggaagatgcgtccgt

SEQ ID NO: 67192 - DNA, 15 bp, Homo sapiens
gggaagatgcgtccg

SEQ ID NO: 67193 - DNA, 15 bp, Homo sapiens
cgggaagatgcgtcc

SEQ ID NO: 67194 - DNA, 15 bp, Homo sapiens
acgggaagatgcgtc

SEQ ID NO: 67195 - DNA, 15 bp, Homo sapiens
cacgggaagatgcgt

SEQ ID NO: 67196 - DNA, 15 bp, Homo sapiens
acacgggaagatgcg

SEQ ID NO: 67197 - DNA, 15 bp, Homo sapiens
cacacgggaagatgc

SEQ ID NO: 67198 - DNA, 15 bp, Homo sapiens
tcacacgggaagatg

SEQ ID NO: 67199 - DNA, 15 bp, Homo sapiens
ttcacacgggaagat

SEQ ID NO: 67200 - DNA, 15 bp, Homo sapiens
cttcacacgggaaga

SEQ ID NO: 67201 - DNA, 15 bp, Homo sapiens
gcttcacacgggaag

SEQ ID NO: 67202 - DNA, 15 bp, Homo sapiens
tgcttcacacgggaa

SEQ ID NO: 67203 - DNA, 15 bp, Homo sapiens
ctgcttcacacggga

SEQ ID NO: 67204 - DNA, 15 bp, Homo sapiens
actgcttcacacggg

SEQ ID NO: 67205 - DNA, 15 bp, Homo sapiens
gactgcttcacacgg

SEQ ID NO: 67206 - DNA, 15 bp, Homo sapiens
tgactgcttcacacg

SEQ ID NO: 67207 - DNA, 15 bp, Homo sapiens
gtgactgcttcacac

SEQ ID NO: 67208 - DNA, 15 bp, Homo sapiens
agtgactgcttcaca

SEQ ID NO: 67209 - DNA, 15 bp, Homo sapiens
gagtgactgcttcac

SEQ ID NO: 67210 - DNA, 15 bp, Homo sapiens
cgagtgactgcttca

SEQ ID NO: 67211 - DNA, 15 bp, Homo sapiens
acgagtgactgcttc

SEQ ID NO: 67212 - DNA, 15 bp, Homo sapiens
gacgagtgactgctt

SEQ ID NO: 67213 - DNA, 15 bp, Homo sapiens
tgacgagtgactgct

SEQ ID NO: 67214 - DNA, 15 bp, Homo sapiens
atgacgagtgactgc

SEQ ID NO: 67215 - DNA, 15 bp, Homo sapiens
aatgacgagtgactg

SEQ ID NO: 67216 - DNA, 15 bp, Homo sapiens
aaatgacgagtgact

SEQ ID NO: 67217 - DNA, 15 bp, Homo sapiens
gaaatgacgagtgac

SEQ ID NO: 67218 - DNA, 15 bp, Homo sapiens
tgaaatgacgagtga

SEQ ID NO: 67219 - DNA, 15 bp, Homo sapiens
ctgaaatgacgagtg

SEQ ID NO: 67220 - DNA, 15 bp, Homo sapiens
cctgaaatgacgagt

SEQ ID NO: 67221 - DNA, 15 bp, Homo sapiens
tcctgaaatgacgag

SEQ ID NO: 67222 - DNA, 15 bp, Homo sapiens
ttcctgaaatgacga

SEQ ID NO: 67223 - DNA, 15 bp, Homo sapiens
cttcctgaaatgacg

SEQ ID NO: 67224 - DNA, 15 bp, Homo sapiens
ccttcctgaaatgac

SEQ ID NO: 67225 - DNA, 15 bp, Homo sapiens
cccttcctgaaatga

SEQ ID NO: 67226 - DNA, 15 bp, Homo sapiens
tcccttcctgaaatg

SEQ ID NO: 67227 - DNA, 15 bp, Homo sapiens
ttcccttcctgaaat

SEQ ID NO: 67228 - DNA, 15 bp, Homo sapiens
cttcccttcctgaaa

SEQ ID NO: 67229 - DNA, 15 bp, Homo sapiens
ccttcccttcctgaa

SEQ ID NO: 67230 - DNA, 15 bp, Homo sapiens
gccttcccttcctga

SEQ ID NO: 67231 - DNA, 15 bp, Homo sapiens
ggccttcccttcctg

SEQ ID NO: 67232 - DNA, 15 bp, Homo sapiens
aggccttcccttcct

SEQ ID NO: 67233 - DNA, 15 bp, Homo sapiens
taggccttcccttcc

SEQ ID NO: 67234 - DNA, 15 bp, Homo sapiens
ttaggccttcccttc

SEQ ID NO: 67235 - DNA, 15 bp, Homo sapiens
attaggccttccctt

SEQ ID NO: 67236 - DNA, 15 bp, Homo sapiens
gattaggccttccct

SEQ ID NO: 67237 - DNA, 15 bp, Homo sapiens
ggattaggccttccc

SEQ ID NO: 67238 - DNA, 15 bp, Homo sapiens
aggattaggccttcc

SEQ ID NO: 67239 - DNA, 15 bp, Homo sapiens
taggattaggccttc

SEQ ID NO: 67240 - DNA, 15 bp, Homo sapiens
ctaggattaggcctt

SEQ ID NO: 67241 - DNA, 15 bp, Homo sapiens
tctaggattaggcct

SEQ ID NO: 67242 - DNA, 15 bp, Homo sapiens
ctctaggattaggcc

SEQ ID NO: 67243 - DNA, 15 bp, Homo sapiens
cctctaggattaggc

SEQ ID NO: 67244 - DNA, 15 bp, Homo sapiens
gcctctaggattagg

SEQ ID NO: 67245 - DNA, 15 bp, Homo sapiens
agcctctaggattag

SEQ ID NO: 67246 - DNA, 15 bp, Homo sapiens
aagcctctaggatta

SEQ ID NO: 67247 - DNA, 15 bp, Homo sapiens
caagcctctaggatt

SEQ ID NO: 67248 - DNA, 15 bp, Homo sapiens
ccaagcctctaggat

SEQ ID NO: 67249 - DNA, 15 bp, Homo sapiens
gccaagcctctagga

SEQ ID NO: 67250 - DNA, 15 bp, Homo sapiens
ggccaagcctctagg

SEQ ID NO: 67251 - DNA, 15 bp, Homo sapiens
gggccaagcctctag

SEQ ID NO: 67252 - DNA, 15 bp, Homo sapiens
tgggccaagcctcta

SEQ ID NO: 67253 - DNA, 15 bp, Homo sapiens
ttgggccaagcctct

SEQ ID NO: 67254 - DNA, 15 bp, Homo sapiens
tttgggccaagcctc

SEQ ID NO: 67255 - DNA, 15 bp, Homo sapiens
ttttgggccaagcct

SEQ ID NO: 67256 - DNA, 15 bp, Homo sapiens
tttttgggccaagcc

SEQ ID NO: 67257 - DNA, 15 bp, Homo sapiens
ctttttgggccaagc

SEQ ID NO: 67258 - DNA, 15 bp, Homo sapiens
cctttttgggccaag

SEQ ID NO: 67259 - DNA, 15 bp, Homo sapiens
ccctttttgggccaa

SEQ ID NO: 67260 - DNA, 15 bp, Homo sapiens
cccctttttgggcca

SEQ ID NO: 67261 - DNA, 15 bp, Homo sapiens
acccctttttgggcc

SEQ ID NO: 67262 - DNA, 15 bp, Homo sapiens
cacccctttttgggc

SEQ ID NO: 67263 - DNA, 15 bp, Homo sapiens
acacccctttttggg

SEQ ID NO: 67264 - DNA, 15 bp, Homo sapiens
aacacccctttttgg

SEQ ID NO: 67265 - DNA, 15 bp, Homo sapiens
aaacacccctttttg

SEQ ID NO: 67266 - DNA, 15 bp, Homo sapiens
gaaacaccccttttt

SEQ ID NO: 67267 - DNA, 15 bp, Homo sapiens
tgaaacacccctttt

SEQ ID NO: 67268 - DNA, 15 bp, Homo sapiens
atgaaacaccccttt

SEQ ID NO: 67269 - DNA, 15 bp, Homo sapiens
aatgaaacacccctt

SEQ ID NO: 67270 - DNA, 15 bp, Homo sapiens
caatgaaacacccct

SEQ ID NO: 67271 - DNA, 15 bp, Homo sapiens
tcaatgaaacacccc

SEQ ID NO: 67272 - DNA, 15 bp, Homo sapiens
gtcaatgaaacaccc

SEQ ID NO: 67273 - DNA, 15 bp, Homo sapiens
tgtcaatgaaacacc

SEQ ID NO: 67274 - DNA, 15 bp, Homo sapiens
ttgtcaatgaaacac

SEQ ID NO: 67275 - DNA, 15 bp, Homo sapiens
attgtcaatgaaaca

SEQ ID NO: 67276 - DNA, 15 bp, Homo sapiens
cattgtcaatgaaac

SEQ ID NO: 67277 - DNA, 15 bp, Homo sapiens
gcattgtcaatgaaa

SEQ ID NO: 67278 - DNA, 15 bp, Homo sapiens
ggcattgtcaatgaa

SEQ ID NO: 67279 - DNA, 15 bp, Homo sapiens
aggcattgtcaatga

SEQ ID NO: 67280 - DNA, 15 bp, Homo sapiens
caggcattgtcaatg

SEQ ID NO: 67281 - DNA, 15 bp, Homo sapiens
tcaggcattgtcaat

SEQ ID NO: 67282 - DNA, 15 bp, Homo sapiens
ctcaggcattgtcaa

SEQ ID NO: 67283 - DNA, 15 bp, Homo sapiens
actcaggcattgtca

SEQ ID NO: 67284 - DNA, 15 bp, Homo sapiens
cactcaggcattgtc

SEQ ID NO: 67285 - DNA, 15 bp, Homo sapiens
tcactcaggcattgt

SEQ ID NO: 67286 - DNA, 15 bp, Homo sapiens
ctcactcaggcattg

SEQ ID NO: 67287 - DNA, 15 bp, Homo sapiens
actcactcaggcatt

SEQ ID NO: 67288 - DNA, 15 bp, Homo sapiens
cactcactcaggcat

SEQ ID NO: 67289 - DNA, 15 bp, Homo sapiens
tcactcactcaggca

SEQ ID NO: 67290 - DNA, 15 bp, Homo sapiens
ttcactcactcaggc

SEQ ID NO: 67291 - DNA, 15 bp, Homo sapiens
attcactcactcagg

SEQ ID NO: 67292 - DNA, 15 bp, Homo sapiens
cattcactcactcag

SEQ ID NO: 67293 - DNA, 15 bp, Homo sapiens
tcattcactcactca

SEQ ID NO: 67294 - DNA, 15 bp, Homo sapiens
ttcattcactcactc

SEQ ID NO: 67295 - DNA, 15 bp, Homo sapiens
attcattcactcact

SEQ ID NO: 67296 - DNA, 15 bp, Homo sapiens
cattcattcactcac

SEQ ID NO: 67297 - DNA, 15 bp, Homo sapiens
tcattcattcactca

SEQ ID NO: 67298 - DNA, 15 bp, Homo sapiens
ttcattcattcactc

SEQ ID NO: 67299 - DNA, 15 bp, Homo sapiens
attcattcattcact

SEQ ID NO: 67300 - DNA, 15 bp, Homo sapiens
cattcattcattcac

SEQ ID NO: 67301 - DNA, 15 bp, Homo sapiens
tcattcattcattca

SEQ ID NO: 67302 - DNA, 15 bp, Homo sapiens
ttcattcattcattc

SEQ ID NO: 67303 - DNA, 15 bp, Homo sapiens
tttcattcattcatt

SEQ ID NO: 67304 - DNA, 15 bp, Homo sapiens
atttcattcattcat

SEQ ID NO: 67305 - DNA, 15 bp, Homo sapiens
tatttcattcattca

SEQ ID NO: 67306 - DNA, 15 bp, Homo sapiens
gtatttcattcattc

SEQ ID NO: 67307 - DNA, 15 bp, Homo sapiens
tgtatttcattcatt

SEQ ID NO: 67308 - DNA, 15 bp, Homo sapiens
ctgtatttcattcat

SEQ ID NO: 67309 - DNA, 15 bp, Homo sapiens
actgtatttcattca

SEQ ID NO: 67310 - DNA, 15 bp, Homo sapiens
cactgtatttcattc

SEQ ID NO: 67311 - DNA, 15 bp, Homo sapiens
acactgtatttcatt

SEQ ID NO: 67312 - DNA, 15 bp, Homo sapiens
tacactgtatttcat

SEQ ID NO: 67313 - DNA, 15 bp, Homo sapiens
ttacactgtatttca

SEQ ID NO: 67314 - DNA, 15 bp, Homo sapiens
attacactgtatttc

SEQ ID NO: 67315 - DNA, 15 bp, Homo sapiens
aattacactgtattt

SEQ ID NO: 67316 - DNA, 15 bp, Homo sapiens
gaattacactgtatt

SEQ ID NO: 67317 - DNA, 15 bp, Homo sapiens
tgaattacactgtat

SEQ ID NO: 67318 - DNA, 15 bp, Homo sapiens
atgaattacactgta

SEQ ID NO: 67319 - DNA, 15 bp, Homo sapiens
catgaattacactgt

SEQ ID NO: 67320 - DNA, 15 bp, Homo sapiens
acatgaattacactg

SEQ ID NO: 67321 - DNA, 15 bp, Homo sapiens
tacatgaattacact

SEQ ID NO: 67322 - DNA, 15 bp, Homo sapiens
ctacatgaattacac

SEQ ID NO: 67323 - DNA, 15 bp, Homo sapiens
gctacatgaattaca

SEQ ID NO: 67324 - DNA, 15 bp, Homo sapiens
tgctacatgaattac

SEQ ID NO: 67325 - DNA, 15 bp, Homo sapiens
ttgctacatgaatta

SEQ ID NO: 67326 - DNA, 15 bp, Homo sapiens
attgctacatgaatt

SEQ ID NO: 67327 - DNA, 15 bp, Homo sapiens
tattgctacatgaat

SEQ ID NO: 67328 - DNA, 15 bp, Homo sapiens
ttattgctacatgaa

SEQ ID NO: 67329 - DNA, 15 bp, Homo sapiens
gttattgctacatga

SEQ ID NO: 67330 - DNA, 15 bp, Homo sapiens
ggttattgctacatg

SEQ ID NO: 67331 - DNA, 15 bp, Homo sapiens
tggttattgctacat

SEQ ID NO: 67332 - DNA, 15 bp, Homo sapiens
ctggttattgctaca

SEQ ID NO: 67333 - DNA, 15 bp, Homo sapiens
actggttattgctac

SEQ ID NO: 67334 - DNA, 15 bp, Homo sapiens
cactggttattgcta

SEQ ID NO: 67335 - DNA, 15 bp, Homo sapiens
tcactggttattgct

SEQ ID NO: 67336 - DNA, 15 bp, Homo sapiens
ttcactggttattgc

SEQ ID NO: 67337 - DNA, 15 bp, Homo sapiens
attcactggttattg

SEQ ID NO: 67338 - DNA, 15 bp, Homo sapiens
cattcactggttatt

SEQ ID NO: 67339 - DNA, 15 bp, Homo sapiens
ccattcactggttat

SEQ ID NO: 67340 - DNA, 15 bp, Homo sapiens
tccattcactggtta

SEQ ID NO: 67341 - DNA, 15 bp, Homo sapiens
atccattcactggtt

SEQ ID NO: 67342 - DNA, 15 bp, Homo sapiens
catccattcactggt

SEQ ID NO: 67343 - DNA, 15 bp, Homo sapiens
ccatccattcactgg

SEQ ID NO: 67344 - DNA, 15 bp, Homo sapiens
tccatccattcactg

SEQ ID NO: 67345 - DNA, 15 bp, Homo sapiens
atccatccattcact

SEQ ID NO: 67346 - DNA, 15 bp, Homo sapiens
tatccatccattcac

SEQ ID NO: 67347 - DNA, 15 bp, Homo sapiens
ctatccatccattca

SEQ ID NO: 67348 - DNA, 15 bp, Homo sapiens
gctatccatccattc

SEQ ID NO: 67349 - DNA, 15 bp, Homo sapiens
tgctatccatccatt

SEQ ID NO: 67350 - DNA, 15 bp, Homo sapiens
ttgctatccatccat

SEQ ID NO: 67351 - DNA, 15 bp, Homo sapiens
tttgctatccatcca

SEQ ID NO: 67352 - DNA, 15 bp, Homo sapiens
ttttgctatccatcc

SEQ ID NO: 67353 - DNA, 15 bp, Homo sapiens
attttgctatccatc

SEQ ID NO: 67354 - DNA, 15 bp, Homo sapiens
cattttgctatccat

SEQ ID NO: 67355 - DNA, 15 bp, Homo sapiens
tcattttgctatcca

SEQ ID NO: 67356 - DNA, 15 bp, Homo sapiens
gtcattttgctatcc

SEQ ID NO: 67357 - DNA, 15 bp, Homo sapiens
agtcattttgctatc

SEQ ID NO: 67358 - DNA, 15 bp, Homo sapiens
gagtcattttgctat

SEQ ID NO: 67359 - DNA, 15 bp, Homo sapiens
ggagtcattttgcta

SEQ ID NO: 67360 - DNA, 15 bp, Homo sapiens
gggagtcattttgct

SEQ ID NO: 67361 - DNA, 15 bp, Homo sapiens
tgggagtcattttgc

SEQ ID NO: 67362 - DNA, 15 bp, Homo sapiens
ctgggagtcattttg

SEQ ID NO: 67363 - DNA, 15 bp, Homo sapiens
cctgggagtcatttt

SEQ ID NO: 67364 - DNA, 15 bp, Homo sapiens
tcctgggagtcattt

SEQ ID NO: 67365 - DNA, 15 bp, Homo sapiens
ctcctgggagtcatt

SEQ ID NO: 67366 - DNA, 15 bp, Homo sapiens
cctcctgggagtcat

SEQ ID NO: 67367 - DNA, 15 bp, Homo sapiens
acctcctgggagtca

SEQ ID NO: 67368 - DNA, 15 bp, Homo sapiens
aacctcctgggagtc

SEQ ID NO: 67369 - DNA, 15 bp, Homo sapiens
taacctcctgggagt

SEQ ID NO: 67370 - DNA, 15 bp, Homo sapiens
gtaacctcctgggag

SEQ ID NO: 67371 - DNA, 15 bp, Homo sapiens
tgtaacctcctggga

SEQ ID NO: 67372 - DNA, 15 bp, Homo sapiens
ctgtaacctcctggg

SEQ ID NO: 67373 - DNA, 15 bp, Homo sapiens
tctgtaacctcctgg

SEQ ID NO: 67374 - DNA, 15 bp, Homo sapiens
ctctgtaacctcctg

SEQ ID NO: 67375 - DNA, 15 bp, Homo sapiens
gctctgtaacctcct

SEQ ID NO: 67376 - DNA, 15 bp, Homo sapiens
tgctctgtaacctcc

SEQ ID NO: 67377 - DNA, 15 bp, Homo sapiens
atgctctgtaacctc

SEQ ID NO: 67378 - DNA, 15 bp, Homo sapiens
tatgctctgtaacct

SEQ ID NO: 67379 - DNA, 15 bp, Homo sapiens
gtatgctctgtaacc

SEQ ID NO: 67380 - DNA, 15 bp, Homo sapiens
agtatgctctgtaac

SEQ ID NO: 67381 - DNA, 15 bp, Homo sapiens
aagtatgctctgtaa

SEQ ID NO: 67382 - DNA, 15 bp, Homo sapiens
aaagtatgctctgta

SEQ ID NO: 67383 - DNA, 15 bp, Homo sapiens
taaagtatgctctgt

SEQ ID NO: 67384 - DNA, 15 bp, Homo sapiens
ttaaagtatgctctg

SEQ ID NO: 67385 - DNA, 15 bp, Homo sapiens
cttaaagtatgctct

SEQ ID NO: 67386 - DNA, 15 bp, Homo sapiens
ccttaaagtatgctc

SEQ ID NO: 67387 - DNA, 15 bp, Homo sapiens
accttaaagtatgct

SEQ ID NO: 67388 - DNA, 15 bp, Homo sapiens
aaccttaaagtatgc

SEQ ID NO: 67389 - DNA, 15 bp, Homo sapiens
taaccttaaagtatg

SEQ ID NO: 67390 - DNA, 15 bp, Homo sapiens
ctaaccttaaagtat

SEQ ID NO: 67391 - DNA, 15 bp, Homo sapiens
tctaaccttaaagta

SEQ ID NO: 67392 - DNA, 15 bp, Homo sapiens
gtctaaccttaaagt

SEQ ID NO: 67393 - DNA, 15 bp, Homo sapiens
agtctaaccttaaag

SEQ ID NO: 67394 - DNA, 15 bp, Homo sapiens
tagtctaaccttaaa

SEQ ID NO: 67395 - DNA, 15 bp, Homo sapiens
ttagtctaaccttaa

SEQ ID NO: 67396 - DNA, 15 bp, Homo sapiens
cttagtctaacctta

SEQ ID NO: 67397 - DNA, 15 bp, Homo sapiens
ccttagtctaacctt

SEQ ID NO: 67398 - DNA, 15 bp, Homo sapiens
gccttagtctaacct

SEQ ID NO: 67399 - DNA, 15 bp, Homo sapiens
cgccttagtctaacc

SEQ ID NO: 67400 - DNA, 15 bp, Homo sapiens
gcgccttagtctaac

SEQ ID NO: 67401 - DNA, 15 bp, Homo sapiens
cgcgccttagtctaa

SEQ ID NO: 67402 - DNA, 15 bp, Homo sapiens
gcgcgccttagtcta

SEQ ID NO: 67403 - DNA, 15 bp, Homo sapiens
tgcgcgccttagtct

SEQ ID NO: 67404 - DNA, 15 bp, Homo sapiens
gtgcgcgccttagtc

SEQ ID NO: 67405 - DNA, 15 bp, Homo sapiens
cgtgcgcgccttagt

SEQ ID NO: 67406 - DNA, 15 bp, Homo sapiens
ccgtgcgcgccttag

SEQ ID NO: 67407 - DNA, 15 bp, Homo sapiens
tccgtgcgcgcctta

SEQ ID NO: 67408 - DNA, 15 bp, Homo sapiens
atccgtgcgcgcctt

SEQ ID NO: 67409 - DNA, 15 bp, Homo sapiens
aatccgtgcgcgcct

SEQ ID NO: 67410 - DNA, 15 bp, Homo sapiens
gaatccgtgcgcgcc

SEQ ID NO: 67411 - DNA, 15 bp, Homo sapiens
cgaatccgtgcgcgc

SEQ ID NO: 67412 - DNA, 15 bp, Homo sapiens
gcgaatccgtgcgcg

SEQ ID NO: 67413 - DNA, 15 bp, Homo sapiens
agcgaatccgtgcgc

SEQ ID NO: 67414 - DNA, 15 bp, Homo sapiens
cagcgaatccgtgcg

SEQ ID NO: 67415 - DNA, 15 bp, Homo sapiens
acagcgaatccgtgc

SEQ ID NO: 67416 - DNA, 15 bp, Homo sapiens
gacagcgaatccgtg

SEQ ID NO: 67417 - DNA, 15 bp, Homo sapiens
ggacagcgaatccgt

SEQ ID NO: 67418 - DNA, 15 bp, Homo sapiens
gggacagcgaatccg

SEQ ID NO: 67419 - DNA, 15 bp, Homo sapiens
ggggacagcgaatcc

SEQ ID NO: 67420 - DNA, 15 bp, Homo sapiens
tggggacagcgaatc

SEQ ID NO: 67421 - DNA, 15 bp, Homo sapiens
ctggggacagcgaat

SEQ ID NO: 67422 - DNA, 15 bp, Homo sapiens
actggggacagcgaa

SEQ ID NO: 67423 - DNA, 15 bp, Homo sapiens
aactggggacagcga

SEQ ID NO: 67424 - DNA, 15 bp, Homo sapiens
aaactggggacagcg

SEQ ID NO: 67425 - DNA, 15 bp, Homo sapiens
aaaactggggacagc

SEQ ID NO: 67426 - DNA, 15 bp, Homo sapiens
gaaaactggggacag

SEQ ID NO: 67427 - DNA, 15 bp, Homo sapiens
ggaaaactggggaca

SEQ ID NO: 67428 - DNA, 15 bp, Homo sapiens
aggaaaactggggac

SEQ ID NO: 67429 - DNA, 15 bp, Homo sapiens
caggaaaactgggga

SEQ ID NO: 67430 - DNA, 15 bp, Homo sapiens
tcaggaaaactgggg

SEQ ID NO: 67431 - DNA, 15 bp, Homo sapiens
ctcaggaaaactggg

SEQ ID NO: 67432 - DNA, 15 bp, Homo sapiens
tctcaggaaaactgg

SEQ ID NO: 67433 - DNA, 15 bp, Homo sapiens
ttctcaggaaaactg

SEQ ID NO: 67434 - DNA, 15 bp, Homo sapiens
cttctcaggaaaact

SEQ ID NO: 67435 - DNA, 15 bp, Homo sapiens
acttctcaggaaaac

SEQ ID NO: 67436 - DNA, 15 bp, Homo sapiens
aacttctcaggaaaa

SEQ ID NO: 67437 - DNA, 15 bp, Homo sapiens
aaacttctcaggaaa

SEQ ID NO: 67438 - DNA, 15 bp, Homo sapiens
taaacttctcaggaa

SEQ ID NO: 67439 - DNA, 15 bp, Homo sapiens
ctaaacttctcagga

SEQ ID NO: 67440 - DNA, 15 bp, Homo sapiens
cctaaacttctcagg

SEQ ID NO: 67441 - DNA, 15 bp, Homo sapiens
tcctaaacttctcag

SEQ ID NO: 67442 - DNA, 15 bp, Homo sapiens
ttcctaaacttctca

SEQ ID NO: 67443 - DNA, 15 bp, Homo sapiens
cttcctaaacttctc

SEQ ID NO: 67444 - DNA, 15 bp, Homo sapiens
tcttcctaaacttct

SEQ ID NO: 67445 - DNA, 15 bp, Homo sapiens
ctcttcctaaacttc

SEQ ID NO: 67446 - DNA, 15 bp, Homo sapiens
actcttcctaaactt

SEQ ID NO: 67447 - DNA, 15 bp, Homo sapiens
tactcttcctaaact

SEQ ID NO: 67448 - DNA, 15 bp, Homo sapiens
gtactcttcctaaac

SEQ ID NO: 67449 - DNA, 15 bp, Homo sapiens
agtactcttcctaaa

SEQ ID NO: 67450 - DNA, 15 bp, Homo sapiens
gagtactcttcctaa

SEQ ID NO: 67451 - DNA, 15 bp, Homo sapiens
cgagtactcttccta

SEQ ID NO: 67452 - DNA, 15 bp, Homo sapiens
ccgagtactcttcct

SEQ ID NO: 67453 - DNA, 15 bp, Homo sapiens
cccgagtactcttcc

SEQ ID NO: 67454 - DNA, 15 bp, Homo sapiens
acccgagtactcttc

SEQ ID NO: 67455 - DNA, 15 bp, Homo sapiens
tacccgagtactctt

SEQ ID NO: 67456 - DNA, 15 bp, Homo sapiens
gtacccgagtactct

SEQ ID NO: 67457 - DNA, 15 bp, Homo sapiens
agtacccgagtactc

SEQ ID NO: 67458 - DNA, 15 bp, Homo sapiens
gagtacccgagtact

SEQ ID NO: 67459 - DNA, 15 bp, Homo sapiens
ggagtacccgagtac

SEQ ID NO: 67460 - DNA, 15 bp, Homo sapiens
gggagtacccgagta

SEQ ID NO: 67461 - DNA, 15 bp, Homo sapiens
tgggagtacccgagt

SEQ ID NO: 67462 - DNA, 15 bp, Homo sapiens
gtgggagtacccgag

SEQ ID NO: 67463 - DNA, 15 bp, Homo sapiens
ggtgggagtacccga

SEQ ID NO: 67464 - DNA, 15 bp, Homo sapiens
tggtgggagtacccg

SEQ ID NO: 67465 - DNA, 15 bp, Homo sapiens
gtggtgggagtaccc

SEQ ID NO: 67466 - DNA, 15 bp, Homo sapiens
agtggtgggagtacc

SEQ ID NO: 67467 - DNA, 15 bp, Homo sapiens
gagtggtgggagtac

SEQ ID NO: 67468 - DNA, 15 bp, Homo sapiens
cgagtggtgggagta

SEQ ID NO: 67469 - DNA, 15 bp, Homo sapiens
ccgagtggtgggagt

SEQ ID NO: 67470 - DNA, 15 bp, Homo sapiens
tccgagtggtgggag

SEQ ID NO: 67471 - DNA, 15 bp, Homo sapiens
ctccgagtggtggga

SEQ ID NO: 67472 - DNA, 15 bp, Homo sapiens
actccgagtggtggg

SEQ ID NO: 67473 - DNA, 15 bp, Homo sapiens
tactccgagtggtgg

SEQ ID NO: 67474 - DNA, 15 bp, Homo sapiens
gtactccgagtggtg

SEQ ID NO: 67475 - DNA, 15 bp, Homo sapiens
ggtactccgagtggt

SEQ ID NO: 67476 - DNA, 15 bp, Homo sapiens
gggtactccgagtgg

SEQ ID NO: 67477 - DNA, 15 bp, Homo sapiens
cgggtactccgagtg

SEQ ID NO: 67478 - DNA, 15 bp, Homo sapiens
tcgggtactccgagt

SEQ ID NO: 67479 - DNA, 15 bp, Homo sapiens
ctcgggtactccgag

SEQ ID NO: 67480 - DNA, 15 bp, Homo sapiens
gctcgggtactccga

SEQ ID NO: 67481 - DNA, 15 bp, Homo sapiens
ggctcgggtactccg

SEQ ID NO: 67482 - DNA, 15 bp, Homo sapiens
gggctcgggtactcc

SEQ ID NO: 67483 - DNA, 15 bp, Homo sapiens
cgggctcgggtactc

SEQ ID NO: 67484 - DNA, 15 bp, Homo sapiens
ccgggctcgggtact

SEQ ID NO: 67485 - DNA, 15 bp, Homo sapiens
gccgggctcgggtac

SEQ ID NO: 67486 - DNA, 15 bp, Homo sapiens
tgccgggctcgggta

SEQ ID NO: 67487 - DNA, 15 bp, Homo sapiens
ttgccgggctcgggt

SEQ ID NO: 67488 - DNA, 15 bp, Homo sapiens
cttgccgggctcggg

SEQ ID NO: 67489 - DNA, 15 bp, Homo sapiens
tcttgccgggctcgg

SEQ ID NO: 67490 - DNA, 15 bp, Homo sapiens
ctcttgccgggctcg

SEQ ID NO: 67491 - DNA, 15 bp, Homo sapiens
cctcttgccgggctc

SEQ ID NO: 67492 - DNA, 15 bp, Homo sapiens
tcctcttgccgggct

SEQ ID NO: 67493 - DNA, 15 bp, Homo sapiens
ctcctcttgccgggc

SEQ ID NO: 67494 - DNA, 15 bp, Homo sapiens
gctcctcttgccggg

SEQ ID NO: 67495 - DNA, 15 bp, Homo sapiens
agctcctcttgccgg

SEQ ID NO: 67496 - DNA, 15 bp, Homo sapiens
gagctcctcttgccg

SEQ ID NO: 67497 - DNA, 15 bp, Homo sapiens
agagctcctcttgcc

SEQ ID NO: 67498 - DNA, 15 bp, Homo sapiens
gagagctcctcttgc

SEQ ID NO: 67499 - DNA, 15 bp, Homo sapiens
tgagagctcctcttg

SEQ ID NO: 67500 - DNA, 15 bp, Homo sapiens
gtgagagctcctctt

SEQ ID NO: 67501 - DNA, 15 bp, Homo sapiens
agtgagagctcctct

SEQ ID NO: 67502 - DNA, 15 bp, Homo sapiens
aagtgagagctcctc

SEQ ID NO: 67503 - DNA, 15 bp, Homo sapiens
gaagtgagagctcct

SEQ ID NO: 67504 - DNA, 15 bp, Homo sapiens
agaagtgagagctcc

SEQ ID NO: 67505 - DNA, 15 bp, Homo sapiens
tagaagtgagagctc

SEQ ID NO: 67506 - DNA, 15 bp, Homo sapiens
ctagaagtgagagct

SEQ ID NO: 67507 - DNA, 15 bp, Homo sapiens
gctagaagtgagagc

SEQ ID NO: 67508 - DNA, 15 bp, Homo sapiens
agctagaagtgagag

SEQ ID NO: 67509 - DNA, 15 bp, Homo sapiens
gagctagaagtgaga

SEQ ID NO: 67510 - DNA, 15 bp, Homo sapiens
agagctagaagtgag

SEQ ID NO: 67511 - DNA, 15 bp, Homo sapiens
cagagctagaagtga

SEQ ID NO: 67512 - DNA, 15 bp, Homo sapiens
gcagagctagaagtg

SEQ ID NO: 67513 - DNA, 15 bp, Homo sapiens
tgcagagctagaagt

SEQ ID NO: 67514 - DNA, 15 bp, Homo sapiens
gtgcagagctagaag

SEQ ID NO: 67515 - DNA, 15 bp, Homo sapiens
agtgcagagctagaa

SEQ ID NO: 67516 - DNA, 15 bp, Homo sapiens
cagtgcagagctaga

SEQ ID NO: 67517 - DNA, 15 bp, Homo sapiens
tcagtgcagagctag

SEQ ID NO: 67518 - DNA, 15 bp, Homo sapiens
ctcagtgcagagcta

SEQ ID NO: 67519 - DNA, 15 bp, Homo sapiens
cctcagtgcagagct

SEQ ID NO: 67520 - DNA, 15 bp, Homo sapiens
tcctcagtgcagagc

SEQ ID NO: 67521 - DNA, 15 bp, Homo sapiens
atcctcagtgcagag

SEQ ID NO: 67522 - DNA, 15 bp, Homo sapiens
aatcctcagtgcaga

SEQ ID NO: 67523 - DNA, 15 bp, Homo sapiens
caatcctcagtgcag

SEQ ID NO: 67524 - DNA, 15 bp, Homo sapiens
acaatcctcagtgca

SEQ ID NO: 67525 - DNA, 15 bp, Homo sapiens
tacaatcctcagtgc

SEQ ID NO: 67526 - DNA, 15 bp, Homo sapiens
ttacaatcctcagtg

SEQ ID NO: 67527 - DNA, 15 bp, Homo sapiens
tttacaatcctcagt

SEQ ID NO: 67528 - DNA, 15 bp, Homo sapiens
atttacaatcctcag

SEQ ID NO: 67529 - DNA, 15 bp, Homo sapiens
catttacaatcctca

SEQ ID NO: 67530 - DNA, 15 bp, Homo sapiens
ccatttacaatcctc

SEQ ID NO: 67531 - DNA, 15 bp, Homo sapiens
gccatttacaatcct

SEQ ID NO: 67532 - DNA, 15 bp, Homo sapiens
ggccatttacaatcc

SEQ ID NO: 67533 - DNA, 15 bp, Homo sapiens
gggccatttacaatc

SEQ ID NO: 67534 - DNA, 15 bp, Homo sapiens
ggggccatttacaat

SEQ ID NO: 67535 - DNA, 15 bp, Homo sapiens
cggggccatttacaa

SEQ ID NO: 67536 - DNA, 15 bp, Homo sapiens
ccggggccatttaca

SEQ ID NO: 67537 - DNA, 15 bp, Homo sapiens
cccggggccatttac

SEQ ID NO: 67538 - DNA, 15 bp, Homo sapiens
ccccggggccattta

SEQ ID NO: 67539 - DNA, 15 bp, Homo sapiens
tccccggggccattt

SEQ ID NO: 67540 - DNA, 15 bp, Homo sapiens
ctccccggggccatt

SEQ ID NO: 67541 - DNA, 15 bp, Homo sapiens
cctccccggggccat

SEQ ID NO: 67542 - DNA, 15 bp, Homo sapiens
ccctccccggggcca

SEQ ID NO: 67543 - DNA, 15 bp, Homo sapiens
cccctccccggggcc

SEQ ID NO: 67544 - DNA, 15 bp, Homo sapiens
tcccctccccggggc

SEQ ID NO: 67545 - DNA, 15 bp, Homo sapiens
ctcccctccccgggg

SEQ ID NO: 67546 - DNA, 15 bp, Homo sapiens
gctcccctccccggg

SEQ ID NO: 67547 - DNA, 15 bp, Homo sapiens
agctcccctccccgg

SEQ ID NO: 67548 - DNA, 15 bp, Homo sapiens
cagctcccctccccg

SEQ ID NO: 67549 - DNA, 15 bp, Homo sapiens
gcagctcccctcccc

SEQ ID NO: 67550 - DNA, 15 bp, Homo sapiens
tgcagctcccctccc

SEQ ID NO: 67551 - DNA, 15 bp, Homo sapiens
ctgcagctcccctcc

SEQ ID NO: 67552 - DNA, 15 bp, Homo sapiens
actgcagctcccctc

SEQ ID NO: 67553 - DNA, 15 bp, Homo sapiens
gactgcagctcccct

SEQ ID NO: 67554 - DNA, 15 bp, Homo sapiens
agactgcagctcccc

SEQ ID NO: 67555 - DNA, 15 bp, Homo sapiens
gagactgcagctccc

SEQ ID NO: 67556 - DNA, 15 bp, Homo sapiens
agagactgcagctcc

SEQ ID NO: 67557 - DNA, 15 bp, Homo sapiens
gagagactgcagctc

SEQ ID NO: 67558 - DNA, 15 bp, Homo sapiens
agagagactgcagct

SEQ ID NO: 67559 - DNA, 15 bp, Homo sapiens
gagagagactgcagc

SEQ ID NO: 67560 - DNA, 15 bp, Homo sapiens
ggagagagactgcag

SEQ ID NO: 67561 - DNA, 15 bp, Homo sapiens
gggagagagactgca

SEQ ID NO: 67562 - DNA, 15 bp, Homo sapiens
tgggagagagactgc

SEQ ID NO: 67563 - DNA, 15 bp, Homo sapiens
gtgggagagagactg

SEQ ID NO: 67564 - DNA, 15 bp, Homo sapiens
agtgggagagagact

SEQ ID NO: 67565 - DNA, 15 bp, Homo sapiens
gagtgggagagagac

SEQ ID NO: 67566 - DNA, 15 bp, Homo sapiens
tgagtgggagagaga

SEQ ID NO: 67567 - DNA, 15 bp, Homo sapiens
atgagtgggagagag

SEQ ID NO: 67568 - DNA, 15 bp, Homo sapiens
tatgagtgggagaga

SEQ ID NO: 67569 - DNA, 15 bp, Homo sapiens
ctatgagtgggagag

SEQ ID NO: 67570 - DNA, 15 bp, Homo sapiens
cctatgagtgggaga

SEQ ID NO: 67571 - DNA, 15 bp, Homo sapiens
tcctatgagtgggag

SEQ ID NO: 67572 - DNA, 15 bp, Homo sapiens
ttcctatgagtggga

SEQ ID NO: 67573 - DNA, 15 bp, Homo sapiens
gttcctatgagtggg

SEQ ID NO: 67574 - DNA, 15 bp, Homo sapiens
ggttcctatgagtgg

SEQ ID NO: 67575 - DNA, 15 bp, Homo sapiens
gggttcctatgagtg

SEQ ID NO: 67576 - DNA, 15 bp, Homo sapiens
agggttcctatgagt

SEQ ID NO: 67577 - DNA, 15 bp, Homo sapiens
gagggttcctatgag

SEQ ID NO: 67578 - DNA, 15 bp, Homo sapiens
cgagggttcctatga

SEQ ID NO: 67579 - DNA, 15 bp, Homo sapiens
tcgagggttcctatg

SEQ ID NO: 67580 - DNA, 15 bp, Homo sapiens
ctcgagggttcctat

SEQ ID NO: 67581 - DNA, 15 bp, Homo sapiens
actcgagggttccta

SEQ ID NO: 67582 - DNA, 15 bp, Homo sapiens
gactcgagggttcct

SEQ ID NO: 67583 - DNA, 15 bp, Homo sapiens
ggactcgagggttcc

SEQ ID NO: 67584 - DNA, 15 bp, Homo sapiens
tggactcgagggttc

SEQ ID NO: 67585 - DNA, 15 bp, Homo sapiens
atggactcgagggtt

SEQ ID NO: 67586 - DNA, 15 bp, Homo sapiens
tatggactcgagggt

SEQ ID NO: 67587 - DNA, 15 bp, Homo sapiens
gtatggactcgaggg

SEQ ID NO: 67588 - DNA, 15 bp, Homo sapiens
tgtatggactcgagg

SEQ ID NO: 67589 - DNA, 15 bp, Homo sapiens
gtgtatggactcgag

SEQ ID NO: 67590 - DNA, 15 bp, Homo sapiens
tgtgtatggactcga

SEQ ID NO: 67591 - DNA, 15 bp, Homo sapiens
gtgtgtatggactcg

SEQ ID NO: 67592 - DNA, 15 bp, Homo sapiens
ggtgtgtatggactc

SEQ ID NO: 67593 - DNA, 15 bp, Homo sapiens
gggtgtgtatggact

SEQ ID NO: 67594 - DNA, 15 bp, Homo sapiens
ggggtgtgtatggac

SEQ ID NO: 67595 - DNA, 15 bp, Homo sapiens
cggggtgtgtatgga

SEQ ID NO: 67596 - DNA, 15 bp, Homo sapiens
ccggggtgtgtatgg

SEQ ID NO: 67597 - DNA, 15 bp, Homo sapiens
cccggggtgtgtatg

SEQ ID NO: 67598 - DNA, 15 bp, Homo sapiens
tcccggggtgtgtat

SEQ ID NO: 67599 - DNA, 15 bp, Homo sapiens
gtcccggggtgtgta

SEQ ID NO: 67600 - DNA, 15 bp, Homo sapiens
ggtcccggggtgtgt

SEQ ID NO: 67601 - DNA, 15 bp, Homo sapiens
gggtcccggggtgtg

SEQ ID NO: 67602 - DNA, 15 bp, Homo sapiens
tgggtcccggggtgt

SEQ ID NO: 67603 - DNA, 15 bp, Homo sapiens
ctgggtcccggggtg

SEQ ID NO: 67604 - DNA, 15 bp, Homo sapiens
cctgggtcccggggt

SEQ ID NO: 67605 - DNA, 15 bp, Homo sapiens
tcctgggtcccgggg

SEQ ID NO: 67606 - DNA, 15 bp, Homo sapiens
gtcctgggtcccggg

SEQ ID NO: 67607 - DNA, 15 bp, Homo sapiens
ggtcctgggtcccgg

SEQ ID NO: 67608 - DNA, 15 bp, Homo sapiens
aggtcctgggtcccg

SEQ ID NO: 67609 - DNA, 15 bp, Homo sapiens
gaggtcctgggtccc

SEQ ID NO: 67610 - DNA, 15 bp, Homo sapiens
tgaggtcctgggtcc

SEQ ID NO: 67611 - DNA, 15 bp, Homo sapiens
ctgaggtcctgggtc

SEQ ID NO: 67612 - DNA, 15 bp, Homo sapiens
cctgaggtcctgggt

SEQ ID NO: 67613 - DNA, 15 bp, Homo sapiens
ccctgaggtcctggg

SEQ ID NO: 67614 - DNA, 15 bp, Homo sapiens
tccctgaggtcctgg

SEQ ID NO: 67615 - DNA, 15 bp, Homo sapiens
atccctgaggtcctg

SEQ ID NO: 67616 - DNA, 15 bp, Homo sapiens
catccctgaggtcct

SEQ ID NO: 67617 - DNA, 15 bp, Homo sapiens
tcatccctgaggtcc

SEQ ID NO: 67618 - DNA, 15 bp, Homo sapiens
ctcatccctgaggtc

SEQ ID NO: 67619 - DNA, 15 bp, Homo sapiens
cctcatccctgaggt

SEQ ID NO: 67620 - DNA, 15 bp, Homo sapiens
tcctcatccctgagg

SEQ ID NO: 67621 - DNA, 15 bp, Homo sapiens
ctcctcatccctgag

SEQ ID NO: 67622 - DNA, 15 bp, Homo sapiens
gctcctcatccctga

SEQ ID NO: 67623 - DNA, 15 bp, Homo sapiens
ggctcctcatccctg

SEQ ID NO: 67624 - DNA, 15 bp, Homo sapiens
gggctcctcatccct

SEQ ID NO: 67625 - DNA, 15 bp, Homo sapiens
agggctcctcatccc

SEQ ID NO: 67626 - DNA, 15 bp, Homo sapiens
tagggctcctcatcc

SEQ ID NO: 67627 - DNA, 15 bp, Homo sapiens
ctagggctcctcatc

SEQ ID NO: 67628 - DNA, 15 bp, Homo sapiens
tctagggctcctcat

SEQ ID NO: 67629 - DNA, 15 bp, Homo sapiens
ctctagggctcctca

SEQ ID NO: 67630 - DNA, 15 bp, Homo sapiens
cctctagggctcctc

SEQ ID NO: 67631 - DNA, 15 bp, Homo sapiens
ccctctagggctcct

SEQ ID NO: 67632 - DNA, 15 bp, Homo sapiens
cccctctagggctcc

SEQ ID NO: 67633 - DNA, 15 bp, Homo sapiens
gcccctctagggctc

SEQ ID NO: 67634 - DNA, 15 bp, Homo sapiens
tgcccctctagggct

SEQ ID NO: 67635 - DNA, 15 bp, Homo sapiens
gtgcccctctagggc

SEQ ID NO: 67636 - DNA, 15 bp, Homo sapiens
cgtgcccctctaggg

SEQ ID NO: 67637 - DNA, 15 bp, Homo sapiens
acgtgcccctctagg

SEQ ID NO: 67638 - DNA, 15 bp, Homo sapiens
cacgtgcccctctag

SEQ ID NO: 67639 - DNA, 15 bp, Homo sapiens
ccacgtgcccctcta

SEQ ID NO: 67640 - DNA, 15 bp, Homo sapiens
cccacgtgcccctct

SEQ ID NO: 67641 - DNA, 15 bp, Homo sapiens
tcccacgtgcccctc

SEQ ID NO: 67642 - DNA, 15 bp, Homo sapiens
ctcccacgtgcccct

SEQ ID NO: 67643 - DNA, 15 bp, Homo sapiens
gctcccacgtgcccc

SEQ ID NO: 67644 - DNA, 15 bp, Homo sapiens
ggctcccacgtgccc

SEQ ID NO: 67645 - DNA, 15 bp, Homo sapiens
gggctcccacgtgcc

SEQ ID NO: 67646 - DNA, 15 bp, Homo sapiens
ggggctcccacgtgc

SEQ ID NO: 67647 - DNA, 15 bp, Homo sapiens
cggggctcccacgtg

SEQ ID NO: 67648 - DNA, 15 bp, Homo sapiens
ccggggctcccacgt

SEQ ID NO: 67649 - DNA, 15 bp, Homo sapiens
tccggggctcccacg

SEQ ID NO: 67650 - DNA, 15 bp, Homo sapiens
ttccggggctcccac

SEQ ID NO: 67651 - DNA, 15 bp, Homo sapiens
gttccggggctccca

SEQ ID NO: 67652 - DNA, 15 bp, Homo sapiens
ggttccggggctccc

SEQ ID NO: 67653 - DNA, 15 bp, Homo sapiens
gggttccggggctcc

SEQ ID NO: 67654 - DNA, 15 bp, Homo sapiens
cgggttccggggctc

SEQ ID NO: 67655 - DNA, 15 bp, Homo sapiens
tcgggttccggggct

SEQ ID NO: 67656 - DNA, 15 bp, Homo sapiens
gtcgggttccggggc

SEQ ID NO: 67657 - DNA, 15 bp, Homo sapiens
agtcgggttccgggg

SEQ ID NO: 67658 - DNA, 15 bp, Homo sapiens
gagtcgggttccggg

SEQ ID NO: 67659 - DNA, 15 bp, Homo sapiens
tgagtcgggttccgg

SEQ ID NO: 67660 - DNA, 15 bp, Homo sapiens
ctgagtcgggttccg

SEQ ID NO: 67661 - DNA, 15 bp, Homo sapiens
cctgagtcgggttcc

SEQ ID NO: 67662 - DNA, 15 bp, Homo sapiens
gcctgagtcgggttc

SEQ ID NO: 67663 - DNA, 15 bp, Homo sapiens
ggcctgagtcgggtt

SEQ ID NO: 67664 - DNA, 15 bp, Homo sapiens
tggcctgagtcgggt

SEQ ID NO: 67665 - DNA, 15 bp, Homo sapiens
gtggcctgagtcggg

SEQ ID NO: 67666 - DNA, 15 bp, Homo sapiens
cgtggcctgagtcgg

SEQ ID NO: 67667 - DNA, 15 bp, Homo sapiens
ccgtggcctgagtcg

SEQ ID NO: 67668 - DNA, 15 bp, Homo sapiens
cccgtggcctgagtc

SEQ ID NO: 67669 - DNA, 15 bp, Homo sapiens
acccgtggcctgagt

SEQ ID NO: 67670 - DNA, 15 bp, Homo sapiens
gacccgtggcctgag

SEQ ID NO: 67671 - DNA, 15 bp, Homo sapiens
tgacccgtggcctga

SEQ ID NO: 67672 - DNA, 15 bp, Homo sapiens
ctgacccgtggcctg

SEQ ID NO: 67673 - DNA, 15 bp, Homo sapiens
cctgacccgtggcct

SEQ ID NO: 67674 - DNA, 15 bp, Homo sapiens
ccctgacccgtggcc

SEQ ID NO: 67675 - DNA, 15 bp, Homo sapiens
tccctgacccgtggc

SEQ ID NO: 67676 - DNA, 15 bp, Homo sapiens
gtccctgacccgtgg

SEQ ID NO: 67677 - DNA, 15 bp, Homo sapiens
tgtccctgacccgtg

SEQ ID NO: 67678 - DNA, 15 bp, Homo sapiens
ttgtccctgacccgt

SEQ ID NO: 67679 - DNA, 15 bp, Homo sapiens
tttgtccctgacccg

SEQ ID NO: 67680 - DNA, 15 bp, Homo sapiens
ctttgtccctgaccc

SEQ ID NO: 67681 - DNA, 15 bp, Homo sapiens
gctttgtccctgacc

SEQ ID NO: 67682 - DNA, 15 bp, Homo sapiens
cgctttgtccctgac

SEQ ID NO: 67683 - DNA, 15 bp, Homo sapiens
ccgctttgtccctga

SEQ ID NO: 67684 - DNA, 15 bp, Homo sapiens
tccgctttgtccctg

SEQ ID NO: 67685 - DNA, 15 bp, Homo sapiens
ctccgctttgtccct

SEQ ID NO: 67686 - DNA, 15 bp, Homo sapiens
cctccgctttgtccc

SEQ ID NO: 67687 - DNA, 15 bp, Homo sapiens
gcctccgctttgtcc

SEQ ID NO: 67688 - DNA, 15 bp, Homo sapiens
cgcctccgctttgtc

SEQ ID NO: 67689 - DNA, 15 bp, Homo sapiens
tcgcctccgctttgt

SEQ ID NO: 67690 - DNA, 15 bp, Homo sapiens
ctcgcctccgctttg

SEQ ID NO: 67691 - DNA, 15 bp, Homo sapiens
cctcgcctccgcttt

SEQ ID NO: 67692 - DNA, 15 bp, Homo sapiens
tcctcgcctccgctt

SEQ ID NO: 67693 - DNA, 15 bp, Homo sapiens
ctcctcgcctccgct

SEQ ID NO: 67694 - DNA, 15 bp, Homo sapiens
tctcctcgcctccgc

SEQ ID NO: 67695 - DNA, 15 bp, Homo sapiens
gtctcctcgcctccg

SEQ ID NO: 67696 - DNA, 15 bp, Homo sapiens
cgtctcctcgcctcc

SEQ ID NO: 67697 - DNA, 15 bp, Homo sapiens
ccgtctcctcgcctc

SEQ ID NO: 67698 - DNA, 15 bp, Homo sapiens
gccgtctcctcgcct

SEQ ID NO: 67699 - DNA, 15 bp, Homo sapiens
tgccgtctcctcgcc

SEQ ID NO: 67700 - DNA, 15 bp, Homo sapiens
ctgccgtctcctcgc

SEQ ID NO: 67701 - DNA, 15 bp, Homo sapiens
actgccgtctcctcg

SEQ ID NO: 67702 - DNA, 15 bp, Homo sapiens
gactgccgtctcctc

SEQ ID NO: 67703 - DNA, 15 bp, Homo sapiens
agactgccgtctcct

SEQ ID NO: 67704 - DNA, 15 bp, Homo sapiens
cagactgccgtctcc

SEQ ID NO: 67705 - DNA, 15 bp, Homo sapiens
ccagactgccgtctc

SEQ ID NO: 67706 - DNA, 15 bp, Homo sapiens
cccagactgccgtct

SEQ ID NO: 67707 - DNA, 15 bp, Homo sapiens
tcccagactgccgtc

SEQ ID NO: 67708 - DNA, 15 bp, Homo sapiens
ctcccagactgccgt

SEQ ID NO: 67709 - DNA, 15 bp, Homo sapiens
gctcccagactgccg

SEQ ID NO: 67710 - DNA, 15 bp, Homo sapiens
agctcccagactgcc

SEQ ID NO: 67711 - DNA, 15 bp, Homo sapiens
cagctcccagactgc

SEQ ID NO: 67712 - DNA, 15 bp, Homo sapiens
acagctcccagactg

SEQ ID NO: 67713 - DNA, 15 bp, Homo sapiens
cacagctcccagact

SEQ ID NO: 67714 - DNA, 15 bp, Homo sapiens
ccacagctcccagac

SEQ ID NO: 67715 - DNA, 15 bp, Homo sapiens
cccacagctcccaga

SEQ ID NO: 67716 - DNA, 15 bp, Homo sapiens
gcccacagctcccag

SEQ ID NO: 67717 - DNA, 15 bp, Homo sapiens
ggcccacagctccca

SEQ ID NO: 67718 - DNA, 15 bp, Homo sapiens
cggcccacagctccc

SEQ ID NO: 67719 - DNA, 15 bp, Homo sapiens
gcggcccacagctcc

SEQ ID NO: 67720 - DNA, 15 bp, Homo sapiens
ggcggcccacagctc

SEQ ID NO: 67721 - DNA, 15 bp, Homo sapiens
tggcggcccacagct

SEQ ID NO: 67722 - DNA, 15 bp, Homo sapiens
ctggcggcccacagc

SEQ ID NO: 67723 - DNA, 15 bp, Homo sapiens
tctggcggcccacag

SEQ ID NO: 67724 - DNA, 15 bp, Homo sapiens
ctctggcggcccaca

SEQ ID NO: 67725 - DNA, 15 bp, Homo sapiens
tctctggcggcccac

SEQ ID NO: 67726 - DNA, 15 bp, Homo sapiens
ttctctggcggccca

SEQ ID NO: 67727 - DNA, 15 bp, Homo sapiens
cttctctggcggccc

SEQ ID NO: 67728 - DNA, 15 bp, Homo sapiens
gcttctctggcggcc

SEQ ID NO: 67729 - DNA, 15 bp, Homo sapiens
agcttctctggcggc

SEQ ID NO: 67730 - DNA, 15 bp, Homo sapiens
cagcttctctggcgg

SEQ ID NO: 67731 - DNA, 15 bp, Homo sapiens
gcagcttctctggcg

SEQ ID NO: 67732 - DNA, 15 bp, Homo sapiens
agcagcttctctggc

SEQ ID NO: 67733 - DNA, 15 bp, Homo sapiens
gagcagcttctctgg

SEQ ID NO: 67734 - DNA, 15 bp, Homo sapiens
cgagcagcttctctg

SEQ ID NO: 67735 - DNA, 15 bp, Homo sapiens
gcgagcagcttctct

SEQ ID NO: 67736 - DNA, 15 bp, Homo sapiens
agcgagcagcttctc

SEQ ID NO: 67737 - DNA, 15 bp, Homo sapiens
cagcgagcagcttct

SEQ ID NO: 67738 - DNA, 15 bp, Homo sapiens
gcagcgagcagcttc

SEQ ID NO: 67739 - DNA, 15 bp, Homo sapiens
tgcagcgagcagctt

SEQ ID NO: 67740 - DNA, 15 bp, Homo sapiens
ctgcagcgagcagct

SEQ ID NO: 67741 - DNA, 15 bp, Homo sapiens
cctgcagcgagcagc

SEQ ID NO: 67742 - DNA, 15 bp, Homo sapiens
tcctgcagcgagcag

SEQ ID NO: 67743 - DNA, 15 bp, Homo sapiens
ctcctgcagcgagca

SEQ ID NO: 67744 - DNA, 15 bp, Homo sapiens
gctcctgcagcgagc

SEQ ID NO: 67745 - DNA, 15 bp, Homo sapiens
agctcctgcagcgag

SEQ ID NO: 67746 - DNA, 15 bp, Homo sapiens
gagctcctgcagcga

SEQ ID NO: 67747 - DNA, 15 bp, Homo sapiens
agagctcctgcagcg

SEQ ID NO: 67748 - DNA, 15 bp, Homo sapiens
aagagctcctgcagc

SEQ ID NO: 67749 - DNA, 15 bp, Homo sapiens
aaagagctcctgcag

SEQ ID NO: 67750 - DNA, 15 bp, Homo sapiens
aaaagagctcctgca

SEQ ID NO: 67751 - DNA, 15 bp, Homo sapiens
gaaaagagctcctgc

SEQ ID NO: 67752 - DNA, 15 bp, Homo sapiens
tgaaaagagctcctg

SEQ ID NO: 67753 - DNA, 15 bp, Homo sapiens
ttgaaaagagctcct

SEQ ID NO: 67754 - DNA, 15 bp, Homo sapiens
cttgaaaagagctcc

SEQ ID NO: 67755 - DNA, 15 bp, Homo sapiens
ccttgaaaagagctc

SEQ ID NO: 67756 - DNA, 15 bp, Homo sapiens
accttgaaaagagct

SEQ ID NO: 67757 - DNA, 15 bp, Homo sapiens
caccttgaaaagagc

SEQ ID NO: 67758 - DNA, 15 bp, Homo sapiens
ccaccttgaaaagag

SEQ ID NO: 67759 - DNA, 15 bp, Homo sapiens
tccaccttgaaaaga

SEQ ID NO: 67760 - DNA, 15 bp, Homo sapiens
ttccaccttgaaaag

SEQ ID NO: 67761 - DNA, 15 bp, Homo sapiens
tttccaccttgaaaa

SEQ ID NO: 67762 - DNA, 15 bp, Homo sapiens
ttttccaccttgaaa

SEQ ID NO: 67763 - DNA, 15 bp, Homo sapiens
tttttccaccttgaa

SEQ ID NO: 67764 - DNA, 15 bp, Homo sapiens
atttttccaccttga

SEQ ID NO: 67765 - DNA, 15 bp, Homo sapiens
catttttccaccttg

SEQ ID NO: 67766 - DNA, 15 bp, Homo sapiens
ccatttttccacctt

SEQ ID NO: 67767 - DNA, 15 bp, Homo sapiens
tccatttttccacct

SEQ ID NO: 67768 - DNA, 15 bp, Homo sapiens
atccatttttccacc

SEQ ID NO: 67769 - DNA, 15 bp, Homo sapiens
aatccatttttccac

SEQ ID NO: 67770 - DNA, 15 bp, Homo sapiens
aaatccatttttcca

SEQ ID NO: 67771 - DNA, 15 bp, Homo sapiens
aaaatccatttttcc

SEQ ID NO: 67772 - DNA, 15 bp, Homo sapiens
aaaaatccatttttc

SEQ ID NO: 67773 - DNA, 15 bp, Homo sapiens
gaaaaatccattttt

SEQ ID NO: 67774 - DNA, 15 bp, Homo sapiens
tgaaaaatccatttt

SEQ ID NO: 67775 - DNA, 15 bp, Homo sapiens
ctgaaaaatccattt

SEQ ID NO: 67776 - DNA, 15 bp, Homo sapiens
gctgaaaaatccatt

SEQ ID NO: 67777 - DNA, 15 bp, Homo sapiens
tgctgaaaaatccat

SEQ ID NO: 67778 - DNA, 15 bp, Homo sapiens
ctgctgaaaaatcca

SEQ ID NO: 67779 - DNA, 15 bp, Homo sapiens
gctgctgaaaaatcc

SEQ ID NO: 67780 - DNA, 15 bp, Homo sapiens
ggctgctgaaaaatc

SEQ ID NO: 67781 - DNA, 15 bp, Homo sapiens
tggctgctgaaaaat

SEQ ID NO: 67782 - DNA, 15 bp, Homo sapiens
gtggctgctgaaaaa

SEQ ID NO: 67783 - DNA, 15 bp, Homo sapiens
tgtggctgctgaaaa

SEQ ID NO: 67784 - DNA, 15 bp, Homo sapiens
ttgtggctgctgaaa

SEQ ID NO: 67785 - DNA, 15 bp, Homo sapiens
tttgtggctgctgaa

SEQ ID NO: 67786 - DNA, 15 bp, Homo sapiens
ctttgtggctgctga

SEQ ID NO: 67787 - DNA, 15 bp, Homo sapiens
actttgtggctgctg

SEQ ID NO: 67788 - DNA, 15 bp, Homo sapiens
aactttgtggctgct

SEQ ID NO: 67789 - DNA, 15 bp, Homo sapiens
aaactttgtggctgc

SEQ ID NO: 67790 - DNA, 15 bp, Homo sapiens
caaactttgtggctg

SEQ ID NO: 67791 - DNA, 15 bp, Homo sapiens
acaaactttgtggct

SEQ ID NO: 67792 - DNA, 15 bp, Homo sapiens
tacaaactttgtggc

SEQ ID NO: 67793 - DNA, 15 bp, Homo sapiens
atacaaactttgtgg

SEQ ID NO: 67794 - DNA, 15 bp, Homo sapiens
aatacaaactttgtg

SEQ ID NO: 67795 - DNA, 15 bp, Homo sapiens
caatacaaactttgt

SEQ ID NO: 67796 - DNA, 15 bp, Homo sapiens
acaatacaaactttg

SEQ ID NO: 67797 - DNA, 15 bp, Homo sapiens
aacaatacaaacttt

SEQ ID NO: 67798 - DNA, 15 bp, Homo sapiens
caacaatacaaactt

SEQ ID NO: 67799 - DNA, 15 bp, Homo sapiens
gcaacaatacaaact

SEQ ID NO: 67800 - DNA, 15 bp, Homo sapiens
tgcaacaatacaaac

SEQ ID NO: 67801 - DNA, 15 bp, Homo sapiens
gtgcaacaatacaaa

SEQ ID NO: 67802 - DNA, 15 bp, Homo sapiens
tgtgcaacaatacaa

SEQ ID NO: 67803 - DNA, 15 bp, Homo sapiens
ttgtgcaacaataca

SEQ ID NO: 67804 - DNA, 15 bp, Homo sapiens
tttgtgcaacaatac

SEQ ID NO: 67805 - DNA, 15 bp, Homo sapiens
ctttgtgcaacaata

SEQ ID NO: 67806 - DNA, 15 bp, Homo sapiens
cctttgtgcaacaat

SEQ ID NO: 67807 - DNA, 15 bp, Homo sapiens
ccctttgtgcaacaa

SEQ ID NO: 67808 - DNA, 15 bp, Homo sapiens
cccctttgtgcaaca

SEQ ID NO: 67809 - DNA, 15 bp, Homo sapiens
acccctttgtgcaac

SEQ ID NO: 67810 - DNA, 15 bp, Homo sapiens
cacccctttgtgcaa

SEQ ID NO: 67811 - DNA, 15 bp, Homo sapiens
gcacccctttgtgca

SEQ ID NO: 67812 - DNA, 15 bp, Homo sapiens
tgcacccctttgtgc

SEQ ID NO: 67813 - DNA, 15 bp, Homo sapiens
atgcacccctttgtg

SEQ ID NO: 67814 - DNA, 15 bp, Homo sapiens
aatgcacccctttgt

SEQ ID NO: 67815 - DNA, 15 bp, Homo sapiens
caatgcacccctttg

SEQ ID NO: 67816 - DNA, 15 bp, Homo sapiens
tcaatgcaccccttt

SEQ ID NO: 67817 - DNA, 15 bp, Homo sapiens
atcaatgcacccctt

SEQ ID NO: 67818 - DNA, 15 bp, Homo sapiens
catcaatgcacccct

SEQ ID NO: 67819 - DNA, 15 bp, Homo sapiens
ccatcaatgcacccc

SEQ ID NO: 67820 - DNA, 15 bp, Homo sapiens
gccatcaatgcaccc

SEQ ID NO: 67821 - DNA, 15 bp, Homo sapiens
cgccatcaatgcacc

SEQ ID NO: 67822 - DNA, 15 bp, Homo sapiens
ccgccatcaatgcac

SEQ ID NO: 67823 - DNA, 15 bp, Homo sapiens
gccgccatcaatgca

SEQ ID NO: 67824 - DNA, 15 bp, Homo sapiens
cgccgccatcaatgc

SEQ ID NO: 67825 - DNA, 15 bp, Homo sapiens
tcgccgccatcaatg

SEQ ID NO: 67826 - DNA, 15 bp, Homo sapiens
ttcgccgccatcaat

SEQ ID NO: 67827 - DNA, 15 bp, Homo sapiens
tttcgccgccatcaa

SEQ ID NO: 67828 - DNA, 15 bp, Homo sapiens
ctttcgccgccatca

SEQ ID NO: 67829 - DNA, 15 bp, Homo sapiens
cctttcgccgccatc

SEQ ID NO: 67830 - DNA, 15 bp, Homo sapiens
acctttcgccgccat

SEQ ID NO: 67831 - DNA, 15 bp, Homo sapiens
gacctttcgccgcca

SEQ ID NO: 67832 - DNA, 15 bp, Homo sapiens
agacctttcgccgcc

SEQ ID NO: 67833 - DNA, 15 bp, Homo sapiens
cagacctttcgccgc

SEQ ID NO: 67834 - DNA, 15 bp, Homo sapiens
gcagacctttcgccg

SEQ ID NO: 67835 - DNA, 15 bp, Homo sapiens
cgcagacctttcgcc

SEQ ID NO: 67836 - DNA, 15 bp, Homo sapiens
acgcagacctttcgc

SEQ ID NO: 67837 - DNA, 15 bp, Homo sapiens
cacgcagacctttcg

SEQ ID NO: 67838 - DNA, 15 bp, Homo sapiens
ccacgcagacctttc

SEQ ID NO: 67839 - DNA, 15 bp, Homo sapiens
gccacgcagaccttt

SEQ ID NO: 67840 - DNA, 15 bp, Homo sapiens
tgccacgcagacctt

SEQ ID NO: 67841 - DNA, 15 bp, Homo sapiens
ctgccacgcagacct

SEQ ID NO: 67842 - DNA, 15 bp, Homo sapiens
cctgccacgcagacc

SEQ ID NO: 67843 - DNA, 15 bp, Homo sapiens
ccctgccacgcagac

SEQ ID NO: 67844 - DNA, 15 bp, Homo sapiens
tccctgccacgcaga

SEQ ID NO: 67845 - DNA, 15 bp, Homo sapiens
gtccctgccacgcag

SEQ ID NO: 67846 - DNA, 15 bp, Homo sapiens
tgtccctgccacgca

SEQ ID NO: 67847 - DNA, 15 bp, Homo sapiens
ttgtccctgccacgc

SEQ ID NO: 67848 - DNA, 15 bp, Homo sapiens
attgtccctgccacg

SEQ ID NO: 67849 - DNA, 15 bp, Homo sapiens
gattgtccctgccac

SEQ ID NO: 67850 - DNA, 15 bp, Homo sapiens
agattgtccctgcca

SEQ ID NO: 67851 - DNA, 15 bp, Homo sapiens
aagattgtccctgcc

SEQ ID NO: 67852 - DNA, 15 bp, Homo sapiens
caagattgtccctgc

SEQ ID NO: 67853 - DNA, 15 bp, Homo sapiens
tcaagattgtccctg

SEQ ID NO: 67854 - DNA, 15 bp, Homo sapiens
ctcaagattgtccct

SEQ ID NO: 67855 - DNA, 15 bp, Homo sapiens
actcaagattgtccc

SEQ ID NO: 67856 - DNA, 15 bp, Homo sapiens
gactcaagattgtcc

SEQ ID NO: 67857 - DNA, 15 bp, Homo sapiens
agactcaagattgtc

SEQ ID NO: 67858 - DNA, 15 bp, Homo sapiens
cagactcaagattgt

SEQ ID NO: 67859 - DNA, 15 bp, Homo sapiens
acagactcaagattg

SEQ ID NO: 67860 - DNA, 15 bp, Homo sapiens
aacagactcaagatt

SEQ ID NO: 67861 - DNA, 15 bp, Homo sapiens
gaacagactcaagat

SEQ ID NO: 67862 - DNA, 15 bp, Homo sapiens
ggaacagactcaaga

SEQ ID NO: 67863 - DNA, 15 bp, Homo sapiens
tggaacagactcaag

SEQ ID NO: 67864 - DNA, 15 bp, Homo sapiens
gtggaacagactcaa

SEQ ID NO: 67865 - DNA, 15 bp, Homo sapiens
ggtggaacagactca

SEQ ID NO: 67866 - DNA, 15 bp, Homo sapiens
cggtggaacagactc

SEQ ID NO: 67867 - DNA, 15 bp, Homo sapiens
ccggtggaacagact

SEQ ID NO: 67868 - DNA, 15 bp, Homo sapiens
gccggtggaacagac

SEQ ID NO: 67869 - DNA, 15 bp, Homo sapiens
agccggtggaacaga

SEQ ID NO: 67870 - DNA, 15 bp, Homo sapiens
gagccggtggaacag

SEQ ID NO: 67871 - DNA, 15 bp, Homo sapiens
ggagccggtggaaca

SEQ ID NO: 67872 - DNA, 15 bp, Homo sapiens
gggagccggtggaac

SEQ ID NO: 67873 - DNA, 15 bp, Homo sapiens
agggagccggtggaa

SEQ ID NO: 67874 - DNA, 15 bp, Homo sapiens
gagggagccggtgga

SEQ ID NO: 67875 - DNA, 15 bp, Homo sapiens
ggagggagccggtgg

SEQ ID NO: 67876 - DNA, 15 bp, Homo sapiens
tggagggagccggtg

SEQ ID NO: 67877 - DNA, 15 bp, Homo sapiens
atggagggagccggt

SEQ ID NO: 67878 - DNA, 15 bp, Homo sapiens
gatggagggagccgg

SEQ ID NO: 67879 - DNA, 15 bp, Homo sapiens
cgatggagggagccg

SEQ ID NO: 67880 - DNA, 15 bp, Homo sapiens
tcgatggagggagcc

SEQ ID NO: 67881 - DNA, 15 bp, Homo sapiens
ttcgatggagggagc

SEQ ID NO: 67882 - DNA, 15 bp, Homo sapiens
gttcgatggagggag

SEQ ID NO: 67883 - DNA, 15 bp, Homo sapiens
tgttcgatggaggga

SEQ ID NO: 67884 - DNA, 15 bp, Homo sapiens
atgttcgatggaggg

SEQ ID NO: 67885 - DNA, 15 bp, Homo sapiens
aatgttcgatggagg

SEQ ID NO: 67886 - DNA, 15 bp, Homo sapiens
aaatgttcgatggag

SEQ ID NO: 67887 - DNA, 15 bp, Homo sapiens
caaatgttcgatgga

SEQ ID NO: 67888 - DNA, 15 bp, Homo sapiens
gcaaatgttcgatgg

SEQ ID NO: 67889 - DNA, 15 bp, Homo sapiens
ggcaaatgttcgatg

SEQ ID NO: 67890 - DNA, 15 bp, Homo sapiens
tggcaaatgttcgat

SEQ ID NO: 67891 - DNA, 15 bp, Homo sapiens
ctggcaaatgttcga

SEQ ID NO: 67892 - DNA, 15 bp, Homo sapiens
tctggcaaatgttcg

SEQ ID NO: 67893 - DNA, 15 bp, Homo sapiens
ctctggcaaatgttc

SEQ ID NO: 67894 - DNA, 15 bp, Homo sapiens
cctctggcaaatgtt

SEQ ID NO: 67895 - DNA, 15 bp, Homo sapiens
ccctctggcaaatgt

SEQ ID NO: 67896 - DNA, 15 bp, Homo sapiens
cccctctggcaaatg

SEQ ID NO: 67897 - DNA, 15 bp, Homo sapiens
gcccctctggcaaat

SEQ ID NO: 67898 - DNA, 15 bp, Homo sapiens
tgcccctctggcaaa

SEQ ID NO: 67899 - DNA, 15 bp, Homo sapiens
gtgcccctctggcaa

SEQ ID NO: 67900 - DNA, 15 bp, Homo sapiens
tgtgcccctctggca

SEQ ID NO: 67901 - DNA, 15 bp, Homo sapiens
ttgtgcccctctggc

SEQ ID NO: 67902 - DNA, 15 bp, Homo sapiens
tttgtgcccctctgg

SEQ ID NO: 67903 - DNA, 15 bp, Homo sapiens
gtttgtgcccctctg

SEQ ID NO: 67904 - DNA, 15 bp, Homo sapiens
tgtttgtgcccctct

SEQ ID NO: 67905 - DNA, 15 bp, Homo sapiens
ctgtttgtgcccctc

SEQ ID NO: 67906 - DNA, 15 bp, Homo sapiens
actgtttgtgcccct

SEQ ID NO: 67907 - DNA, 15 bp, Homo sapiens
aactgtttgtgcccc

SEQ ID NO: 67908 - DNA, 15 bp, Homo sapiens
caactgtttgtgccc

SEQ ID NO: 67909 - DNA, 15 bp, Homo sapiens
gcaactgtttgtgcc

SEQ ID NO: 67910 - DNA, 15 bp, Homo sapiens
tgcaactgtttgtgc

SEQ ID NO: 67911 - DNA, 15 bp, Homo sapiens
ctgcaactgtttgtg

SEQ ID NO: 67912 - DNA, 15 bp, Homo sapiens
cctgcaactgtttgt

SEQ ID NO: 67913 - DNA, 15 bp, Homo sapiens
gcctgcaactgtttg

SEQ ID NO: 67914 - DNA, 15 bp, Homo sapiens
agcctgcaactgttt

SEQ ID NO: 67915 - DNA, 15 bp, Homo sapiens
cagcctgcaactgtt

SEQ ID NO: 67916 - DNA, 15 bp, Homo sapiens
gcagcctgcaactgt

SEQ ID NO: 67917 - DNA, 15 bp, Homo sapiens
ggcagcctgcaactg

SEQ ID NO: 67918 - DNA, 15 bp, Homo sapiens
tggcagcctgcaact

SEQ ID NO: 67919 - DNA, 15 bp, Homo sapiens
ttggcagcctgcaac

SEQ ID NO: 67920 - DNA, 15 bp, Homo sapiens
cttggcagcctgcaa

SEQ ID NO: 67921 - DNA, 15 bp, Homo sapiens
gcttggcagcctgca

SEQ ID NO: 67922 - DNA, 15 bp, Homo sapiens
ggcttggcagcctgc

SEQ ID NO: 67923 - DNA, 15 bp, Homo sapiens
gggcttggcagcctg

SEQ ID NO: 67924 - DNA, 15 bp, Homo sapiens
ggggcttggcagcct

SEQ ID NO: 67925 - DNA, 15 bp, Homo sapiens
aggggcttggcagcc

SEQ ID NO: 67926 - DNA, 15 bp, Homo sapiens
caggggcttggcagc

SEQ ID NO: 67927 - DNA, 15 bp, Homo sapiens
gcaggggcttggcag

SEQ ID NO: 67928 - DNA, 15 bp, Homo sapiens
ggcaggggcttggca

SEQ ID NO: 67929 - DNA, 15 bp, Homo sapiens
cggcaggggcttggc

SEQ ID NO: 67930 - DNA, 15 bp, Homo sapiens
acggcaggggcttgg

SEQ ID NO: 67931 - DNA, 15 bp, Homo sapiens
aacggcaggggcttg

SEQ ID NO: 67932 - DNA, 15 bp, Homo sapiens
caacggcaggggctt

SEQ ID NO: 67933 - DNA, 15 bp, Homo sapiens
acaacggcaggggct

SEQ ID NO: 67934 - DNA, 15 bp, Homo sapiens
gacaacggcaggggc

SEQ ID NO: 67935 - DNA, 15 bp, Homo sapiens
ggacaacggcagggg

SEQ ID NO: 67936 - DNA, 15 bp, Homo sapiens
cggacaacggcaggg

SEQ ID NO: 67937 - DNA, 15 bp, Homo sapiens
ccggacaacggcagg

SEQ ID NO: 67938 - DNA, 15 bp, Homo sapiens
gccggacaacggcag

SEQ ID NO: 67939 - DNA, 15 bp, Homo sapiens
tgccggacaacggca

SEQ ID NO: 67940 - DNA, 15 bp, Homo sapiens
ctgccggacaacggc

SEQ ID NO: 67941 - DNA, 15 bp, Homo sapiens
cctgccggacaacgg

SEQ ID NO: 67942 - DNA, 15 bp, Homo sapiens
gcctgccggacaacg

SEQ ID NO: 67943 - DNA, 15 bp, Homo sapiens
tgcctgccggacaac

SEQ ID NO: 67944 - DNA, 15 bp, Homo sapiens
gtgcctgccggacaa

SEQ ID NO: 67945 - DNA, 15 bp, Homo sapiens
ggtgcctgccggaca

SEQ ID NO: 67946 - DNA, 15 bp, Homo sapiens
gggtgcctgccggac

SEQ ID NO: 67947 - DNA, 15 bp, Homo sapiens
cgggtgcctgccgga

SEQ ID NO: 67948 - DNA, 15 bp, Homo sapiens
ccgggtgcctgccgg

SEQ ID NO: 67949 - DNA, 15 bp, Homo sapiens
gccgggtgcctgccg

SEQ ID NO: 67950 - DNA, 15 bp, Homo sapiens
agccgggtgcctgcc

SEQ ID NO: 67951 - DNA, 15 bp, Homo sapiens
gagccgggtgcctgc

SEQ ID NO: 67952 - DNA, 15 bp, Homo sapiens
tgagccgggtgcctg

SEQ ID NO: 67953 - DNA, 15 bp, Homo sapiens
ctgagccgggtgcct

SEQ ID NO: 67954 - DNA, 15 bp, Homo sapiens
cctgagccgggtgcc

SEQ ID NO: 67955 - DNA, 15 bp, Homo sapiens
tcctgagccgggtgc

SEQ ID NO: 67956 - DNA, 15 bp, Homo sapiens
ctcctgagccgggtg

SEQ ID NO: 67957 - DNA, 15 bp, Homo sapiens
actcctgagccgggt

SEQ ID NO: 67958 - DNA, 15 bp, Homo sapiens
aactcctgagccggg

SEQ ID NO: 67959 - DNA, 15 bp, Homo sapiens
caactcctgagccgg

SEQ ID NO: 67960 - DNA, 15 bp, Homo sapiens
acaactcctgagccg

SEQ ID NO: 67961 - DNA, 15 bp, Homo sapiens
aacaactcctgagcc

SEQ ID NO: 67962 - DNA, 15 bp, Homo sapiens
caacaactcctgagc

SEQ ID NO: 67963 - DNA, 15 bp, Homo sapiens
tcaacaactcctgag

SEQ ID NO: 67964 - DNA, 15 bp, Homo sapiens
gtcaacaactcctga

SEQ ID NO: 67965 - DNA, 15 bp, Homo sapiens
tgtcaacaactcctg

SEQ ID NO: 67966 - DNA, 15 bp, Homo sapiens
ttgtcaacaactcct

SEQ ID NO: 67967 - DNA, 15 bp, Homo sapiens
tttgtcaacaactcc

SEQ ID NO: 67968 - DNA, 15 bp, Homo sapiens
gtttgtcaacaactc

SEQ ID NO: 67969 - DNA, 15 bp, Homo sapiens
tgtttgtcaacaact

SEQ ID NO: 67970 - DNA, 15 bp, Homo sapiens
gtgtttgtcaacaac

SEQ ID NO: 67971 - DNA, 15 bp, Homo sapiens
ggtgtttgtcaacaa

SEQ ID NO: 67972 - DNA, 15 bp, Homo sapiens
cggtgtttgtcaaca

SEQ ID NO: 67973 - DNA, 15 bp, Homo sapiens
gcggtgtttgtcaac

SEQ ID NO: 67974 - DNA, 15 bp, Homo sapiens
tgcggtgtttgtcaa

SEQ ID NO: 67975 - DNA, 15 bp, Homo sapiens
ctgcggtgtttgtca

SEQ ID NO: 67976 - DNA, 15 bp, Homo sapiens
cctgcggtgtttgtc

SEQ ID NO: 67977 - DNA, 15 bp, Homo sapiens
gcctgcggtgtttgt

SEQ ID NO: 67978 - DNA, 15 bp, Homo sapiens
ggcctgcggtgtttg

SEQ ID NO: 67979 - DNA, 15 bp, Homo sapiens
gggcctgcggtgttt

SEQ ID NO: 67980 - DNA, 15 bp, Homo sapiens
tgggcctgcggtgtt

SEQ ID NO: 67981 - DNA, 15 bp, Homo sapiens
ctgggcctgcggtgt

SEQ ID NO: 67982 - DNA, 15 bp, Homo sapiens
cctgggcctgcggtg

SEQ ID NO: 67983 - DNA, 15 bp, Homo sapiens
gcctgggcctgcggt

SEQ ID NO: 67984 - DNA, 15 bp, Homo sapiens
cgcctgggcctgcgg

SEQ ID NO: 67985 - DNA, 15 bp, Homo sapiens
gcgcctgggcctgcg

SEQ ID NO: 67986 - DNA, 15 bp, Homo sapiens
ggcgcctgggcctgc

SEQ ID NO: 67987 - DNA, 15 bp, Homo sapiens
gggcgcctgggcctg

SEQ ID NO: 67988 - DNA, 15 bp, Homo sapiens
tgggcgcctgggcct

SEQ ID NO: 67989 - DNA, 15 bp, Homo sapiens
ctgggcgcctgggcc

SEQ ID NO: 67990 - DNA, 15 bp, Homo sapiens
cctgggcgcctgggc

SEQ ID NO: 67991 - DNA, 15 bp, Homo sapiens
gcctgggcgcctggg

SEQ ID NO: 67992 - DNA, 15 bp, Homo sapiens
ggcctgggcgcctgg

SEQ ID NO: 67993 - DNA, 15 bp, Homo sapiens
gggcctgggcgcctg

SEQ ID NO: 67994 - DNA, 15 bp, Homo sapiens
ggggcctgggcgcct

SEQ ID NO: 67995 - DNA, 15 bp, Homo sapiens
tggggcctgggcgcc

SEQ ID NO: 67996 - DNA, 15 bp, Homo sapiens
atggggcctgggcgc

SEQ ID NO: 67997 - DNA, 15 bp, Homo sapiens
catggggcctgggcg

SEQ ID NO: 67998 - DNA, 15 bp, Homo sapiens
tcatggggcctgggc

SEQ ID NO: 67999 - DNA, 15 bp, Homo sapiens
ctcatggggcctggg

SEQ ID NO: 68000 - DNA, 15 bp, Homo sapiens
cctcatggggcctgg

SEQ ID NO: 68001 - DNA, 15 bp, Homo sapiens
ccctcatggggcctg

SEQ ID NO: 68002 - DNA, 15 bp, Homo sapiens
tccctcatggggcct

SEQ ID NO: 68003 - DNA, 15 bp, Homo sapiens
ctccctcatggggcc

SEQ ID NO: 68004 - DNA, 15 bp, Homo sapiens
cctccctcatggggc

SEQ ID NO: 68005 - DNA, 15 bp, Homo sapiens
tcctccctcatgggg

SEQ ID NO: 68006 - DNA, 15 bp, Homo sapiens
ctcctccctcatggg

SEQ ID NO: 68007 - DNA, 15 bp, Homo sapiens
gctcctccctcatgg

SEQ ID NO: 68008 - DNA, 15 bp, Homo sapiens
ggctcctccctcatg

SEQ ID NO: 68009 - DNA, 15 bp, Homo sapiens
gggctcctccctcat

SEQ ID NO: 68010 - DNA, 15 bp, Homo sapiens
tgggctcctccctca

SEQ ID NO: 68011 - DNA, 15 bp, Homo sapiens
ctgggctcctccctc

SEQ ID NO: 68012 - DNA, 15 bp, Homo sapiens
gctgggctcctccct

SEQ ID NO: 68013 - DNA, 15 bp, Homo sapiens
ggctgggctcctccc

SEQ ID NO: 68014 - DNA, 15 bp, Homo sapiens
aggctgggctcctcc

SEQ ID NO: 68015 - DNA, 15 bp, Homo sapiens
caggctgggctcctc

SEQ ID NO: 68016 - DNA, 15 bp, Homo sapiens
ccaggctgggctcct

SEQ ID NO: 68017 - DNA, 15 bp, Homo sapiens
gccaggctgggctcc

SEQ ID NO: 68018 - DNA, 15 bp, Homo sapiens
ggccaggctgggctc

SEQ ID NO: 68019 - DNA, 15 bp, Homo sapiens
gggccaggctgggct

SEQ ID NO: 68020 - DNA, 15 bp, Homo sapiens
ggggccaggctgggc

SEQ ID NO: 68021 - DNA, 15 bp, Homo sapiens
aggggccaggctggg

SEQ ID NO: 68022 - DNA, 15 bp, Homo sapiens
taggggccaggctgg

SEQ ID NO: 68023 - DNA, 15 bp, Homo sapiens
ctaggggccaggctg

SEQ ID NO: 68024 - DNA, 15 bp, Homo sapiens
cctaggggccaggct

SEQ ID NO: 68025 - DNA, 15 bp, Homo sapiens
ccctaggggccaggc

SEQ ID NO: 68026 - DNA, 15 bp, Homo sapiens
cccctaggggccagg

SEQ ID NO: 68027 - DNA, 15 bp, Homo sapiens
gcccctaggggccag

SEQ ID NO: 68028 - DNA, 15 bp, Homo sapiens
ggcccctaggggcca

SEQ ID NO: 68029 - DNA, 15 bp, Homo sapiens
tggcccctaggggcc

SEQ ID NO: 68030 - DNA, 15 bp, Homo sapiens
ttggcccctaggggc

SEQ ID NO: 68031 - DNA, 15 bp, Homo sapiens
cttggcccctagggg

SEQ ID NO: 68032 - DNA, 15 bp, Homo sapiens
ccttggcccctaggg

SEQ ID NO: 68033 - DNA, 15 bp, Homo sapiens
cccttggcccctagg

SEQ ID NO: 68034 - DNA, 15 bp, Homo sapiens
acccttggcccctag

SEQ ID NO: 68035 - DNA, 15 bp, Homo sapiens
cacccttggccccta

SEQ ID NO: 68036 - DNA, 15 bp, Homo sapiens
gcacccttggcccct

SEQ ID NO: 68037 - DNA, 15 bp, Homo sapiens
ggcacccttggcccc

SEQ ID NO: 68038 - DNA, 15 bp, Homo sapiens
cggcacccttggccc

SEQ ID NO: 68039 - DNA, 15 bp, Homo sapiens
ccggcacccttggcc

SEQ ID NO: 68040 - DNA, 15 bp, Homo sapiens
gccggcacccttggc

SEQ ID NO: 68041 - DNA, 15 bp, Homo sapiens
agccggcacccttgg

SEQ ID NO: 68042 - DNA, 15 bp, Homo sapiens
gagccggcacccttg

SEQ ID NO: 68043 - DNA, 15 bp, Homo sapiens
ggagccggcaccctt

SEQ ID NO: 68044 - DNA, 15 bp, Homo sapiens
tggagccggcaccct

SEQ ID NO: 68045 - DNA, 15 bp, Homo sapiens
gtggagccggcaccc

SEQ ID NO: 68046 - DNA, 15 bp, Homo sapiens
ggtggagccggcacc

SEQ ID NO: 68047 - DNA, 15 bp, Homo sapiens
cggtggagccggcac

SEQ ID NO: 68048 - DNA, 15 bp, Homo sapiens
ccggtggagccggca

SEQ ID NO: 68049 - DNA, 15 bp, Homo sapiens
cccggtggagccggc

SEQ ID NO: 68050 - DNA, 15 bp, Homo sapiens
ccccggtggagccgg

SEQ ID NO: 68051 - DNA, 15 bp, Homo sapiens
accccggtggagccg

SEQ ID NO: 68052 - DNA, 15 bp, Homo sapiens
gaccccggtggagcc

SEQ ID NO: 68053 - DNA, 15 bp, Homo sapiens
tgaccccggtggagc

SEQ ID NO: 68054 - DNA, 15 bp, Homo sapiens
gtgaccccggtggag

SEQ ID NO: 68055 - DNA, 15 bp, Homo sapiens
cgtgaccccggtgga

SEQ ID NO: 68056 - DNA, 15 bp, Homo sapiens
tcgtgaccccggtgg

SEQ ID NO: 68057 - DNA, 15 bp, Homo sapiens
atcgtgaccccggtg

SEQ ID NO: 68058 - DNA, 15 bp, Homo sapiens
gatcgtgaccccggt

SEQ ID NO: 68059 - DNA, 15 bp, Homo sapiens
agatcgtgaccccgg

SEQ ID NO: 68060 - DNA, 15 bp, Homo sapiens
cagatcgtgaccccg

SEQ ID NO: 68061 - DNA, 15 bp, Homo sapiens
tcagatcgtgacccc

SEQ ID NO: 68062 - DNA, 15 bp, Homo sapiens
ttcagatcgtgaccc

SEQ ID NO: 68063 - DNA, 15 bp, Homo sapiens
gttcagatcgtgacc

SEQ ID NO: 68064 - DNA, 15 bp, Homo sapiens
tgttcagatcgtgac

SEQ ID NO: 68065 - DNA, 15 bp, Homo sapiens
ctgttcagatcgtga

SEQ ID NO: 68066 - DNA, 15 bp, Homo sapiens
actgttcagatcgtg

SEQ ID NO: 68067 - DNA, 15 bp, Homo sapiens
cactgttcagatcgt

SEQ ID NO: 68068 - DNA, 15 bp, Homo sapiens
ccactgttcagatcg

SEQ ID NO: 68069 - DNA, 15 bp, Homo sapiens
accactgttcagatc

SEQ ID NO: 68070 - DNA, 15 bp, Homo sapiens
gaccactgttcagat

SEQ ID NO: 68071 - DNA, 15 bp, Homo sapiens
agaccactgttcaga

SEQ ID NO: 68072 - DNA, 15 bp, Homo sapiens
cagaccactgttcag

SEQ ID NO: 68073 - DNA, 15 bp, Homo sapiens
ccagaccactgttca

SEQ ID NO: 68074 - DNA, 15 bp, Homo sapiens
cccagaccactgttc

SEQ ID NO: 68075 - DNA, 15 bp, Homo sapiens
gcccagaccactgtt

SEQ ID NO: 68076 - DNA, 15 bp, Homo sapiens
agcccagaccactgt

SEQ ID NO: 68077 - DNA, 15 bp, Homo sapiens
gagcccagaccactg

SEQ ID NO: 68078 - DNA, 15 bp, Homo sapiens
agagcccagaccact

SEQ ID NO: 68079 - DNA, 15 bp, Homo sapiens
cagagcccagaccac

SEQ ID NO: 68080 - DNA, 15 bp, Homo sapiens
tcagagcccagacca

SEQ ID NO: 68081 - DNA, 15 bp, Homo sapiens
ctcagagcccagacc

SEQ ID NO: 68082 - DNA, 15 bp, Homo sapiens
cctcagagcccagac

SEQ ID NO: 68083 - DNA, 15 bp, Homo sapiens
ccctcagagcccaga

SEQ ID NO: 68084 - DNA, 15 bp, Homo sapiens
cccctcagagcccag

SEQ ID NO: 68085 - DNA, 15 bp, Homo sapiens
acccctcagagccca

SEQ ID NO: 68086 - DNA, 15 bp, Homo sapiens
gacccctcagagccc

SEQ ID NO: 68087 - DNA, 15 bp, Homo sapiens
ggacccctcagagcc

SEQ ID NO: 68088 - DNA, 15 bp, Homo sapiens
gggacccctcagagc

SEQ ID NO: 68089 - DNA, 15 bp, Homo sapiens
tgggacccctcagag

SEQ ID NO: 68090 - DNA, 15 bp, Homo sapiens
gtgggacccctcaga

SEQ ID NO: 68091 - DNA, 15 bp, Homo sapiens
tgtgggacccctcag

SEQ ID NO: 68092 - DNA, 15 bp, Homo sapiens
ctgtgggacccctca

SEQ ID NO: 68093 - DNA, 15 bp, Homo sapiens
tctgtgggacccctc

SEQ ID NO: 68094 - DNA, 15 bp, Homo sapiens
ctctgtgggacccct

SEQ ID NO: 68095 - DNA, 15 bp, Homo sapiens
tctctgtgggacccc

SEQ ID NO: 68096 - DNA, 15 bp, Homo sapiens
ctctctgtgggaccc

SEQ ID NO: 68097 - DNA, 15 bp, Homo sapiens
cctctctgtgggacc

SEQ ID NO: 68098 - DNA, 15 bp, Homo sapiens
acctctctgtgggac

SEQ ID NO: 68099 - DNA, 15 bp, Homo sapiens
tacctctctgtggga

SEQ ID NO: 68100 - DNA, 15 bp, Homo sapiens
ttacctctctgtggg

SEQ ID NO: 68101 - DNA, 15 bp, Homo sapiens
tttacctctctgtgg

SEQ ID NO: 68102 - DNA, 15 bp, Homo sapiens
ctttacctctctgtg

SEQ ID NO: 68103 - DNA, 15 bp, Homo sapiens
cctttacctctctgt

SEQ ID NO: 68104 - DNA, 15 bp, Homo sapiens
tcctttacctctctg

SEQ ID NO: 68105 - DNA, 15 bp, Homo sapiens
ctcctttacctctct

SEQ ID NO: 68106 - DNA, 15 bp, Homo sapiens
cctcctttacctctc

SEQ ID NO: 68107 - DNA, 15 bp, Homo sapiens
acctcctttacctct

SEQ ID NO: 68108 - DNA, 15 bp, Homo sapiens
tacctcctttacctc

SEQ ID NO: 68109 - DNA, 15 bp, Homo sapiens
ttacctcctttacct

SEQ ID NO: 68110 - DNA, 15 bp, Homo sapiens
attacctcctttacc

SEQ ID NO: 68111 - DNA, 15 bp, Homo sapiens
aattacctcctttac

SEQ ID NO: 68112 - DNA, 15 bp, Homo sapiens
caattacctccttta

SEQ ID NO: 68113 - DNA, 15 bp, Homo sapiens
gcaattacctccttt

SEQ ID NO: 68114 - DNA, 15 bp, Homo sapiens
ggcaattacctcctt

SEQ ID NO: 68115 - DNA, 15 bp, Homo sapiens
gggcaattacctcct

SEQ ID NO: 68116 - DNA, 15 bp, Homo sapiens
tgggcaattacctcc

SEQ ID NO: 68117 - DNA, 15 bp, Homo sapiens
gtgggcaattacctc

SEQ ID NO: 68118 - DNA, 15 bp, Homo sapiens
tgtgggcaattacct

SEQ ID NO: 68119 - DNA, 15 bp, Homo sapiens
atgtgggcaattacc

SEQ ID NO: 68120 - DNA, 15 bp, Homo sapiens
tatgtgggcaattac

SEQ ID NO: 68121 - DNA, 15 bp, Homo sapiens
ttatgtgggcaatta

SEQ ID NO: 68122 - DNA, 15 bp, Homo sapiens
cttatgtgggcaatt

SEQ ID NO: 68123 - DNA, 15 bp, Homo sapiens
tcttatgtgggcaat

SEQ ID NO: 68124 - DNA, 15 bp, Homo sapiens
ctcttatgtgggcaa

SEQ ID NO: 68125 - DNA, 15 bp, Homo sapiens
gctcttatgtgggca

SEQ ID NO: 68126 - DNA, 15 bp, Homo sapiens
cgctcttatgtgggc

SEQ ID NO: 68127 - DNA, 15 bp, Homo sapiens
gcgctcttatgtggg

SEQ ID NO: 68128 - DNA, 15 bp, Homo sapiens
agcgctcttatgtgg

SEQ ID NO: 68129 - DNA, 15 bp, Homo sapiens
aagcgctcttatgtg

SEQ ID NO: 68130 - DNA, 15 bp, Homo sapiens
aaagcgctcttatgt

SEQ ID NO: 68131 - DNA, 15 bp, Homo sapiens
taaagcgctcttatg

SEQ ID NO: 68132 - DNA, 15 bp, Homo sapiens
ctaaagcgctcttat

SEQ ID NO: 68133 - DNA, 15 bp, Homo sapiens
cctaaagcgctctta

SEQ ID NO: 68134 - DNA, 15 bp, Homo sapiens
acctaaagcgctctt

SEQ ID NO: 68135 - DNA, 15 bp, Homo sapiens
tacctaaagcgctct

SEQ ID NO: 68136 - DNA, 15 bp, Homo sapiens
ctacctaaagcgctc

SEQ ID NO: 68137 - DNA, 15 bp, Homo sapiens
cctacctaaagcgct

SEQ ID NO: 68138 - DNA, 15 bp, Homo sapiens
tcctacctaaagcgc

SEQ ID NO: 68139 - DNA, 15 bp, Homo sapiens
ttcctacctaaagcg

SEQ ID NO: 68140 - DNA, 15 bp, Homo sapiens
tttcctacctaaagc

SEQ ID NO: 68141 - DNA, 15 bp, Homo sapiens
ctttcctacctaaag

SEQ ID NO: 68142 - DNA, 15 bp, Homo sapiens
cctttcctacctaaa

SEQ ID NO: 68143 - DNA, 15 bp, Homo sapiens
ccctttcctacctaa

SEQ ID NO: 68144 - DNA, 15 bp, Homo sapiens
cccctttcctaccta

SEQ ID NO: 68145 - DNA, 15 bp, Homo sapiens
gcccctttcctacct

SEQ ID NO: 68146 - DNA, 15 bp, Homo sapiens
tgcccctttcctacc

SEQ ID NO: 68147 - DNA, 15 bp, Homo sapiens
ctgcccctttcctac

SEQ ID NO: 68148 - DNA, 15 bp, Homo sapiens
cctgcccctttccta

SEQ ID NO: 68149 - DNA, 15 bp, Homo sapiens
ccctgcccctttcct

SEQ ID NO: 68150 - DNA, 15 bp, Homo sapiens
tccctgcccctttcc

SEQ ID NO: 68151 - DNA, 15 bp, Homo sapiens
ttccctgcccctttc

SEQ ID NO: 68152 - DNA, 15 bp, Homo sapiens
cttccctgccccttt

SEQ ID NO: 68153 - DNA, 15 bp, Homo sapiens
tcttccctgcccctt

SEQ ID NO: 68154 - DNA, 15 bp, Homo sapiens
ttcttccctgcccct

SEQ ID NO: 68155 - DNA, 15 bp, Homo sapiens
gttcttccctgcccc

SEQ ID NO: 68156 - DNA, 15 bp, Homo sapiens
tgttcttccctgccc

SEQ ID NO: 68157 - DNA, 15 bp, Homo sapiens
ttgttcttccctgcc

SEQ ID NO: 68158 - DNA, 15 bp, Homo sapiens
cttgttcttccctgc

SEQ ID NO: 68159 - DNA, 15 bp, Homo sapiens
ccttgttcttccctg

SEQ ID NO: 68160 - DNA, 15 bp, Homo sapiens
cccttgttcttccct

SEQ ID NO: 68161 - DNA, 15 bp, Homo sapiens
tcccttgttcttccc

SEQ ID NO: 68162 - DNA, 15 bp, Homo sapiens
ttcccttgttcttcc

SEQ ID NO: 68163 - DNA, 15 bp, Homo sapiens
tttcccttgttcttc

SEQ ID NO: 68164 - DNA, 15 bp, Homo sapiens
ctttcccttgttctt

SEQ ID NO: 68165 - DNA, 15 bp, Homo sapiens
cctttcccttgttct

SEQ ID NO: 68166 - DNA, 15 bp, Homo sapiens
ccctttcccttgttc

SEQ ID NO: 68167 - DNA, 15 bp, Homo sapiens
tccctttcccttgtt

SEQ ID NO: 68168 - DNA, 15 bp, Homo sapiens
ctccctttcccttgt

SEQ ID NO: 68169 - DNA, 15 bp, Homo sapiens
tctccctttcccttg

SEQ ID NO: 68170 - DNA, 15 bp, Homo sapiens
ctctccctttccctt

SEQ ID NO: 68171 - DNA, 15 bp, Homo sapiens
tctctccctttccct

SEQ ID NO: 68172 - DNA, 15 bp, Homo sapiens
ctctctccctttccc

SEQ ID NO: 68173 - DNA, 15 bp, Homo sapiens
cctctctccctttcc

SEQ ID NO: 68174 - DNA, 15 bp, Homo sapiens
ccctctctccctttc

SEQ ID NO: 68175 - DNA, 15 bp, Homo sapiens
tccctctctcccttt

SEQ ID NO: 68176 - DNA, 15 bp, Homo sapiens
ttccctctctccctt

SEQ ID NO: 68177 - DNA, 15 bp, Homo sapiens
cttccctctctccct

SEQ ID NO: 68178 - DNA, 15 bp, Homo sapiens
tcttccctctctccc

SEQ ID NO: 68179 - DNA, 15 bp, Homo sapiens
ctcttccctctctcc

SEQ ID NO: 68180 - DNA, 15 bp, Homo sapiens
cctcttccctctctc

SEQ ID NO: 68181 - DNA, 15 bp, Homo sapiens
ccctcttccctctct

SEQ ID NO: 68182 - DNA, 15 bp, Homo sapiens
accctcttccctctc

SEQ ID NO: 68183 - DNA, 15 bp, Homo sapiens
caccctcttccctct

SEQ ID NO: 68184 - DNA, 15 bp, Homo sapiens
tcaccctcttccctc

SEQ ID NO: 68185 - DNA, 15 bp, Homo sapiens
gtcaccctcttccct

SEQ ID NO: 68186 - DNA, 15 bp, Homo sapiens
tgtcaccctcttccc

SEQ ID NO: 68187 - DNA, 15 bp, Homo sapiens
gtgtcaccctcttcc

SEQ ID NO: 68188 - DNA, 15 bp, Homo sapiens
agtgtcaccctcttc

SEQ ID NO: 68189 - DNA, 15 bp, Homo sapiens
aagtgtcaccctctt

SEQ ID NO: 68190 - DNA, 15 bp, Homo sapiens
caagtgtcaccctct

SEQ ID NO: 68191 - DNA, 15 bp, Homo sapiens
ccaagtgtcaccctc

SEQ ID NO: 68192 - DNA, 15 bp, Homo sapiens
tccaagtgtcaccct

SEQ ID NO: 68193 - DNA, 15 bp, Homo sapiens
ctccaagtgtcaccc

SEQ ID NO: 68194 - DNA, 15 bp, Homo sapiens
tctccaagtgtcacc

SEQ ID NO: 68195 - DNA, 15 bp, Homo sapiens
gtctccaagtgtcac

SEQ ID NO: 68196 - DNA, 15 bp, Homo sapiens
tgtctccaagtgtca

SEQ ID NO: 68197 - DNA, 15 bp, Homo sapiens
gtgtctccaagtgtc

SEQ ID NO: 68198 - DNA, 15 bp, Homo sapiens
agtgtctccaagtgt

SEQ ID NO: 68199 - DNA, 15 bp, Homo sapiens
cagtgtctccaagtg

SEQ ID NO: 68200 - DNA, 15 bp, Homo sapiens
tcagtgtctccaagt

SEQ ID NO: 68201 - DNA, 15 bp, Homo sapiens
gtcagtgtctccaag

SEQ ID NO: 68202 - DNA, 15 bp, Homo sapiens
tgtcagtgtctccaa

SEQ ID NO: 68203 - DNA, 15 bp, Homo sapiens
atgtcagtgtctcca

SEQ ID NO: 68204 - DNA, 15 bp, Homo sapiens
catgtcagtgtctcc

SEQ ID NO: 68205 - DNA, 15 bp, Homo sapiens
gcatgtcagtgtctc

SEQ ID NO: 68206 - DNA, 15 bp, Homo sapiens
tgcatgtcagtgtct

SEQ ID NO: 68207 - DNA, 15 bp, Homo sapiens
ctgcatgtcagtgtc

SEQ ID NO: 68208 - DNA, 15 bp, Homo sapiens
actgcatgtcagtgt

SEQ ID NO: 68209 - DNA, 15 bp, Homo sapiens
tactgcatgtcagtg

SEQ ID NO: 68210 - DNA, 15 bp, Homo sapiens
ctactgcatgtcagt

SEQ ID NO: 68211 - DNA, 15 bp, Homo sapiens
actactgcatgtcag

SEQ ID NO: 68212 - DNA, 15 bp, Homo sapiens
aactactgcatgtca

SEQ ID NO: 68213 - DNA, 15 bp, Homo sapiens
caactactgcatgtc

SEQ ID NO: 68214 - DNA, 15 bp, Homo sapiens
tcaactactgcatgt

SEQ ID NO: 68215 - DNA, 15 bp, Homo sapiens
atcaactactgcatg

SEQ ID NO: 68216 - DNA, 15 bp, Homo sapiens
catcaactactgcat

SEQ ID NO: 68217 - DNA, 15 bp, Homo sapiens
ccatcaactactgca

SEQ ID NO: 68218 - DNA, 15 bp, Homo sapiens
tccatcaactactgc

SEQ ID NO: 68219 - DNA, 15 bp, Homo sapiens
atccatcaactactg

SEQ ID NO: 68220 - DNA, 15 bp, Homo sapiens
tatccatcaactact

SEQ ID NO: 68221 - DNA, 15 bp, Homo sapiens
ttatccatcaactac

SEQ ID NO: 68222 - DNA, 15 bp, Homo sapiens
gttatccatcaacta

SEQ ID NO: 68223 - DNA, 15 bp, Homo sapiens
ggttatccatcaact

SEQ ID NO: 68224 - DNA, 15 bp, Homo sapiens
cggttatccatcaac

SEQ ID NO: 68225 - DNA, 15 bp, Homo sapiens
gcggttatccatcaa

SEQ ID NO: 68226 - DNA, 15 bp, Homo sapiens
tgcggttatccatca

SEQ ID NO: 68227 - DNA, 15 bp, Homo sapiens
ttgcggttatccatc

SEQ ID NO: 68228 - DNA, 15 bp, Homo sapiens
gttgcggttatccat

SEQ ID NO: 68229 - DNA, 15 bp, Homo sapiens
cgttgcggttatcca

SEQ ID NO: 68230 - DNA, 15 bp, Homo sapiens
tcgttgcggttatcc

SEQ ID NO: 68231 - DNA, 15 bp, Homo sapiens
gtcgttgcggttatc

SEQ ID NO: 68232 - DNA, 15 bp, Homo sapiens
tgtcgttgcggttat

SEQ ID NO: 68233 - DNA, 15 bp, Homo sapiens
atgtcgttgcggtta

SEQ ID NO: 68234 - DNA, 15 bp, Homo sapiens
aatgtcgttgcggtt

SEQ ID NO: 68235 - DNA, 15 bp, Homo sapiens
gaatgtcgttgcggt

SEQ ID NO: 68236 - DNA, 15 bp, Homo sapiens
tgaatgtcgttgcgg

SEQ ID NO: 68237 - DNA, 15 bp, Homo sapiens
atgaatgtcgttgcg

SEQ ID NO: 68238 - DNA, 15 bp, Homo sapiens
tatgaatgtcgttgc

SEQ ID NO: 68239 - DNA, 15 bp, Homo sapiens
ctatgaatgtcgttg

SEQ ID NO: 68240 - DNA, 15 bp, Homo sapiens
gctatgaatgtcgtt

SEQ ID NO: 68241 - DNA, 15 bp, Homo sapiens
agctatgaatgtcgt

SEQ ID NO: 68242 - DNA, 15 bp, Homo sapiens
tagctatgaatgtcg

SEQ ID NO: 68243 - DNA, 15 bp, Homo sapiens
gtagctatgaatgtc

SEQ ID NO: 68244 - DNA, 15 bp, Homo sapiens
ggtagctatgaatgt

SEQ ID NO: 68245 - DNA, 15 bp, Homo sapiens
aggtagctatgaatg

SEQ ID NO: 68246 - DNA, 15 bp, Homo sapiens
gaggtagctatgaat

SEQ ID NO: 68247 - DNA, 15 bp, Homo sapiens
agaggtagctatgaa

SEQ ID NO: 68248 - DNA, 15 bp, Homo sapiens
gagaggtagctatga

SEQ ID NO: 68249 - DNA, 15 bp, Homo sapiens
tgagaggtagctatg

SEQ ID NO: 68250 - DNA, 15 bp, Homo sapiens
ctgagaggtagctat

SEQ ID NO: 68251 - DNA, 15 bp, Homo sapiens
tctgagaggtagcta

SEQ ID NO: 68252 - DNA, 15 bp, Homo sapiens
atctgagaggtagct

SEQ ID NO: 68253 - DNA, 15 bp, Homo sapiens
gatctgagaggtagc

SEQ ID NO: 68254 - DNA, 15 bp, Homo sapiens
agatctgagaggtag

SEQ ID NO: 68255 - DNA, 15 bp, Homo sapiens
aagatctgagaggta

SEQ ID NO: 68256 - DNA, 15 bp, Homo sapiens
taagatctgagaggt

SEQ ID NO: 68257 - DNA, 15 bp, Homo sapiens
gtaagatctgagagg

SEQ ID NO: 68258 - DNA, 15 bp, Homo sapiens
ggtaagatctgagag

SEQ ID NO: 68259 - DNA, 15 bp, Homo sapiens
aggtaagatctgaga

SEQ ID NO: 68260 - DNA, 15 bp, Homo sapiens
aaggtaagatctgag

SEQ ID NO: 68261 - DNA, 15 bp, Homo sapiens
gaaggtaagatctga

SEQ ID NO: 68262 - DNA, 15 bp, Homo sapiens
cgaaggtaagatctg

SEQ ID NO: 68263 - DNA, 15 bp, Homo sapiens
gcgaaggtaagatct

SEQ ID NO: 68264 - DNA, 15 bp, Homo sapiens
ggcgaaggtaagatc

SEQ ID NO: 68265 - DNA, 15 bp, Homo sapiens
tggcgaaggtaagat

SEQ ID NO: 68266 - DNA, 15 bp, Homo sapiens
ctggcgaaggtaaga

SEQ ID NO: 68267 - DNA, 15 bp, Homo sapiens
gctggcgaaggtaag

SEQ ID NO: 68268 - DNA, 15 bp, Homo sapiens
ggctggcgaaggtaa

SEQ ID NO: 68269 - DNA, 15 bp, Homo sapiens
cggctggcgaaggta

SEQ ID NO: 68270 - DNA, 15 bp, Homo sapiens
gcggctggcgaaggt

SEQ ID NO: 68271 - DNA, 15 bp, Homo sapiens
agcggctggcgaagg

SEQ ID NO: 68272 - DNA, 15 bp, Homo sapiens
cagcggctggcgaag

SEQ ID NO: 68273 - DNA, 15 bp, Homo sapiens
gcagcggctggcgaa

SEQ ID NO: 68274 - DNA, 15 bp, Homo sapiens
agcagcggctggcga

SEQ ID NO: 68275 - DNA, 15 bp, Homo sapiens
gagcagcggctggcg

SEQ ID NO: 68276 - DNA, 15 bp, Homo sapiens
agagcagcggctggc

SEQ ID NO: 68277 - DNA, 15 bp, Homo sapiens
tagagcagcggctgg

SEQ ID NO: 68278 - DNA, 15 bp, Homo sapiens
ttagagcagcggctg

SEQ ID NO: 68279 - DNA, 15 bp, Homo sapiens
cttagagcagcggct

SEQ ID NO: 68280 - DNA, 15 bp, Homo sapiens
gcttagagcagcggc

SEQ ID NO: 68281 - DNA, 15 bp, Homo sapiens
cgcttagagcagcgg

SEQ ID NO: 68282 - DNA, 15 bp, Homo sapiens
acgcttagagcagcg

SEQ ID NO: 68283 - DNA, 15 bp, Homo sapiens
aacgcttagagcagc

SEQ ID NO: 68284 - DNA, 15 bp, Homo sapiens
caacgcttagagcag

SEQ ID NO: 68285 - DNA, 15 bp, Homo sapiens
acaacgcttagagca

SEQ ID NO: 68286 - DNA, 15 bp, Homo sapiens
cacaacgcttagagc

SEQ ID NO: 68287 - DNA, 15 bp, Homo sapiens
acacaacgcttagag

SEQ ID NO: 68288 - DNA, 15 bp, Homo sapiens
gacacaacgcttaga

SEQ ID NO: 68289 - DNA, 15 bp, Homo sapiens
agacacaacgcttag

SEQ ID NO: 68290 - DNA, 15 bp, Homo sapiens
cagacacaacgctta

SEQ ID NO: 68291 - DNA, 15 bp, Homo sapiens
acagacacaacgctt

SEQ ID NO: 68292 - DNA, 15 bp, Homo sapiens
tacagacacaacgct

SEQ ID NO: 68293 - DNA, 15 bp, Homo sapiens
atacagacacaacgc

SEQ ID NO: 68294 - DNA, 15 bp, Homo sapiens
aatacagacacaacg

SEQ ID NO: 68295 - DNA, 15 bp, Homo sapiens
taatacagacacaac

SEQ ID NO: 68296 - DNA, 15 bp, Homo sapiens
ctaatacagacacaa

SEQ ID NO: 68297 - DNA, 15 bp, Homo sapiens
gctaatacagacaca

SEQ ID NO: 68298 - DNA, 15 bp, Homo sapiens
agctaatacagacac

SEQ ID NO: 68299 - DNA, 15 bp, Homo sapiens
gagctaatacagaca

SEQ ID NO: 68300 - DNA, 15 bp, Homo sapiens
tgagctaatacagac

SEQ ID NO: 68301 - DNA, 15 bp, Homo sapiens
atgagctaatacaga

SEQ ID NO: 68302 - DNA, 15 bp, Homo sapiens
aatgagctaatacag

SEQ ID NO: 68303 - DNA, 15 bp, Homo sapiens
aaatgagctaataca

SEQ ID NO: 68304 - DNA, 15 bp, Homo sapiens
taaatgagctaatac

SEQ ID NO: 68305 - DNA, 15 bp, Homo sapiens
ttaaatgagctaata

SEQ ID NO: 68306 - DNA, 15 bp, Homo sapiens
attaaatgagctaat

SEQ ID NO: 68307 - DNA, 15 bp, Homo sapiens
tattaaatgagctaa

SEQ ID NO: 68308 - DNA, 15 bp, Homo sapiens
atattaaatgagcta

SEQ ID NO: 68309 - DNA, 15 bp, Homo sapiens
aatattaaatgagct

SEQ ID NO: 68310 - DNA, 15 bp, Homo sapiens
taatattaaatgagc

SEQ ID NO: 68311 - DNA, 15 bp, Homo sapiens
ttaatattaaatgag

SEQ ID NO: 68312 - DNA, 15 bp, Homo sapiens
gttaatattaaatga

SEQ ID NO: 68313 - DNA, 15 bp, Homo sapiens
tgttaatattaaatg

SEQ ID NO: 68314 - DNA, 15 bp, Homo sapiens
ttgttaatattaaat

SEQ ID NO: 68315 - DNA, 15 bp, Homo sapiens
gttgttaatattaaa

SEQ ID NO: 68316 - DNA, 15 bp, Homo sapiens
tgttgttaatattaa

SEQ ID NO: 68317 - DNA, 15 bp, Homo sapiens
ttgttgttaatatta

SEQ ID NO: 68318 - DNA, 15 bp, Homo sapiens
attgttgttaatatt

SEQ ID NO: 68319 - DNA, 15 bp, Homo sapiens
gattgttgttaatat

SEQ ID NO: 68320 - DNA, 15 bp, Homo sapiens
agattgttgttaata

SEQ ID NO: 68321 - DNA, 15 bp, Homo sapiens
aagattgttgttaat

SEQ ID NO: 68322 - DNA, 15 bp, Homo sapiens
taagattgttgttaa

SEQ ID NO: 68323 - DNA, 15 bp, Homo sapiens
ctaagattgttgtta

SEQ ID NO: 68324 - DNA, 15 bp, Homo sapiens
cctaagattgttgtt

SEQ ID NO: 68325 - DNA, 15 bp, Homo sapiens
tcctaagattgttgt

SEQ ID NO: 68326 - DNA, 15 bp, Homo sapiens
ctcctaagattgttg

SEQ ID NO: 68327 - DNA, 15 bp, Homo sapiens
cctcctaagattgtt

SEQ ID NO: 68328 - DNA, 15 bp, Homo sapiens
acctcctaagattgt

SEQ ID NO: 68329 - DNA, 15 bp, Homo sapiens
tacctcctaagattg

SEQ ID NO: 68330 - DNA, 15 bp, Homo sapiens
ctacctcctaagatt

SEQ ID NO: 68331 - DNA, 15 bp, Homo sapiens
actacctcctaagat

SEQ ID NO: 68332 - DNA, 15 bp, Homo sapiens
gactacctcctaaga

SEQ ID NO: 68333 - DNA, 15 bp, Homo sapiens
ggactacctcctaag

SEQ ID NO: 68334 - DNA, 15 bp, Homo sapiens
tggactacctcctaa

SEQ ID NO: 68335 - DNA, 15 bp, Homo sapiens
atggactacctccta

SEQ ID NO: 68336 - DNA, 15 bp, Homo sapiens
aatggactacctcct

SEQ ID NO: 68337 - DNA, 15 bp, Homo sapiens
gaatggactacctcc

SEQ ID NO: 68338 - DNA, 15 bp, Homo sapiens
agaatggactacctc

SEQ ID NO: 68339 - DNA, 15 bp, Homo sapiens
cagaatggactacct

SEQ ID NO: 68340 - DNA, 15 bp, Homo sapiens
gcagaatggactacc

SEQ ID NO: 68341 - DNA, 15 bp, Homo sapiens
tgcagaatggactac

SEQ ID NO: 68342 - DNA, 15 bp, Homo sapiens
ctgcagaatggacta

SEQ ID NO: 68343 - DNA, 15 bp, Homo sapiens
cctgcagaatggact

SEQ ID NO: 68344 - DNA, 15 bp, Homo sapiens
gcctgcagaatggac

SEQ ID NO: 68345 - DNA, 15 bp, Homo sapiens
cgcctgcagaatgga

SEQ ID NO: 68346 - DNA, 15 bp, Homo sapiens
tcgcctgcagaatgg

SEQ ID NO: 68347 - DNA, 15 bp, Homo sapiens
ctcgcctgcagaatg

SEQ ID NO: 68348 - DNA, 15 bp, Homo sapiens
tctcgcctgcagaat

SEQ ID NO: 68349 - DNA, 15 bp, Homo sapiens
ttctcgcctgcagaa

SEQ ID NO: 68350 - DNA, 15 bp, Homo sapiens
tttctcgcctgcaga

SEQ ID NO: 68351 - DNA, 15 bp, Homo sapiens
gtttctcgcctgcag

SEQ ID NO: 68352 - DNA, 15 bp, Homo sapiens
agtttctcgcctgca

SEQ ID NO: 68353 - DNA, 15 bp, Homo sapiens
cagtttctcgcctgc

SEQ ID NO: 68354 - DNA, 15 bp, Homo sapiens
tcagtttctcgcctg

SEQ ID NO: 68355 - DNA, 15 bp, Homo sapiens
ctcagtttctcgcct

SEQ ID NO: 68356 - DNA, 15 bp, Homo sapiens
cctcagtttctcgcc

SEQ ID NO: 68357 - DNA, 15 bp, Homo sapiens
gcctcagtttctcgc

SEQ ID NO: 68358 - DNA, 15 bp, Homo sapiens
tgcctcagtttctcg

SEQ ID NO: 68359 - DNA, 15 bp, Homo sapiens
atgcctcagtttctc

SEQ ID NO: 68360 - DNA, 15 bp, Homo sapiens
aatgcctcagtttct

SEQ ID NO: 68361 - DNA, 15 bp, Homo sapiens
caatgcctcagtttc

SEQ ID NO: 68362 - DNA, 15 bp, Homo sapiens
acaatgcctcagttt

SEQ ID NO: 68363 - DNA, 15 bp, Homo sapiens
cacaatgcctcagtt

SEQ ID NO: 68364 - DNA, 15 bp, Homo sapiens
tcacaatgcctcagt

SEQ ID NO: 68365 - DNA, 15 bp, Homo sapiens
ctcacaatgcctcag

SEQ ID NO: 68366 - DNA, 15 bp, Homo sapiens
cctcacaatgcctca

SEQ ID NO: 68367 - DNA, 15 bp, Homo sapiens
acctcacaatgcctc

SEQ ID NO: 68368 - DNA, 15 bp, Homo sapiens
aacctcacaatgcct

SEQ ID NO: 68369 - DNA, 15 bp, Homo sapiens
taacctcacaatgcc

SEQ ID NO: 68370 - DNA, 15 bp, Homo sapiens
ttaacctcacaatgc

SEQ ID NO: 68371 - DNA, 15 bp, Homo sapiens
attaacctcacaatg

SEQ ID NO: 68372 - DNA, 15 bp, Homo sapiens
cattaacctcacaat

SEQ ID NO: 68373 - DNA, 15 bp, Homo sapiens
acattaacctcacaa

SEQ ID NO: 68374 - DNA, 15 bp, Homo sapiens
cacattaacctcaca

SEQ ID NO: 68375 - DNA, 15 bp, Homo sapiens
tcacattaacctcac

SEQ ID NO: 68376 - DNA, 15 bp, Homo sapiens
atcacattaacctca

SEQ ID NO: 68377 - DNA, 15 bp, Homo sapiens
catcacattaacctc

SEQ ID NO: 68378 - DNA, 15 bp, Homo sapiens
acatcacattaacct

SEQ ID NO: 68379 - DNA, 15 bp, Homo sapiens
cacatcacattaacc

SEQ ID NO: 68380 - DNA, 15 bp, Homo sapiens
tcacatcacattaac

SEQ ID NO: 68381 - DNA, 15 bp, Homo sapiens
ctcacatcacattaa

SEQ ID NO: 68382 - DNA, 15 bp, Homo sapiens
cctcacatcacatta

SEQ ID NO: 68383 - DNA, 15 bp, Homo sapiens
ccctcacatcacatt

SEQ ID NO: 68384 - DNA, 15 bp, Homo sapiens
cccctcacatcacat

SEQ ID NO: 68385 - DNA, 15 bp, Homo sapiens
gcccctcacatcaca

SEQ ID NO: 68386 - DNA, 15 bp, Homo sapiens
tgcccctcacatcac

SEQ ID NO: 68387 - DNA, 15 bp, Homo sapiens
ctgcccctcacatca

SEQ ID NO: 68388 - DNA, 15 bp, Homo sapiens
tctgcccctcacatc

SEQ ID NO: 68389 - DNA, 15 bp, Homo sapiens
ctctgcccctcacat

SEQ ID NO: 68390 - DNA, 15 bp, Homo sapiens
gctctgcccctcaca

SEQ ID NO: 68391 - DNA, 15 bp, Homo sapiens
ggctctgcccctcac

SEQ ID NO: 68392 - DNA, 15 bp, Homo sapiens
tggctctgcccctca

SEQ ID NO: 68393 - DNA, 15 bp, Homo sapiens
ttggctctgcccctc

SEQ ID NO: 68394 - DNA, 15 bp, Homo sapiens
cttggctctgcccct

SEQ ID NO: 68395 - DNA, 15 bp, Homo sapiens
tcttggctctgcccc

SEQ ID NO: 68396 - DNA, 15 bp, Homo sapiens
atcttggctctgccc

SEQ ID NO: 68397 - DNA, 15 bp, Homo sapiens
tatcttggctctgcc

SEQ ID NO: 68398 - DNA, 15 bp, Homo sapiens
gtatcttggctctgc

SEQ ID NO: 68399 - DNA, 15 bp, Homo sapiens
tgtatcttggctctg

SEQ ID NO: 68400 - DNA, 15 bp, Homo sapiens
atgtatcttggctct

SEQ ID NO: 68401 - DNA, 15 bp, Homo sapiens
tatgtatcttggctc

SEQ ID NO: 68402 - DNA, 15 bp, Homo sapiens
ctatgtatcttggct

SEQ ID NO: 68403 - DNA, 15 bp, Homo sapiens
tctatgtatcttggc

SEQ ID NO: 68404 - DNA, 15 bp, Homo sapiens
ctctatgtatcttgg

SEQ ID NO: 68405 - DNA, 15 bp, Homo sapiens
actctatgtatcttg

SEQ ID NO: 68406 - DNA, 15 bp, Homo sapiens
tactctatgtatctt

SEQ ID NO: 68407 - DNA, 15 bp, Homo sapiens
ttactctatgtatct

SEQ ID NO: 68408 - DNA, 15 bp, Homo sapiens
attactctatgtatc

SEQ ID NO: 68409 - DNA, 15 bp, Homo sapiens
cattactctatgtat

SEQ ID NO: 68410 - DNA, 15 bp, Homo sapiens
tcattactctatgta

SEQ ID NO: 68411 - DNA, 15 bp, Homo sapiens
gtcattactctatgt

SEQ ID NO: 68412 - DNA, 15 bp, Homo sapiens
tgtcattactctatg

SEQ ID NO: 68413 - DNA, 15 bp, Homo sapiens
ttgtcattactctat

SEQ ID NO: 68414 - DNA, 15 bp, Homo sapiens
tttgtcattactcta

SEQ ID NO: 68415 - DNA, 15 bp, Homo sapiens
ctttgtcattactct

SEQ ID NO: 68416 - DNA, 15 bp, Homo sapiens
actttgtcattactc

SEQ ID NO: 68417 - DNA, 15 bp, Homo sapiens
aactttgtcattact

SEQ ID NO: 68418 - DNA, 15 bp, Homo sapiens
caactttgtcattac

SEQ ID NO: 68419 - DNA, 15 bp, Homo sapiens
acaactttgtcatta

SEQ ID NO: 68420 - DNA, 15 bp, Homo sapiens
cacaactttgtcatt

SEQ ID NO: 68421 - DNA, 15 bp, Homo sapiens
gcacaactttgtcat

SEQ ID NO: 68422 - DNA, 15 bp, Homo sapiens
agcacaactttgtca

SEQ ID NO: 68423 - DNA, 15 bp, Homo sapiens
cagcacaactttgtc

SEQ ID NO: 68424 - DNA, 15 bp, Homo sapiens
ccagcacaactttgt

SEQ ID NO: 68425 - DNA, 15 bp, Homo sapiens
gccagcacaactttg

SEQ ID NO: 68426 - DNA, 15 bp, Homo sapiens
agccagcacaacttt

SEQ ID NO: 68427 - DNA, 15 bp, Homo sapiens
cagccagcacaactt

SEQ ID NO: 68428 - DNA, 15 bp, Homo sapiens
gcagccagcacaact

SEQ ID NO: 68429 - DNA, 15 bp, Homo sapiens
ggcagccagcacaac

SEQ ID NO: 68430 - DNA, 15 bp, Homo sapiens
tggcagccagcacaa

SEQ ID NO: 68431 - DNA, 15 bp, Homo sapiens
ctggcagccagcaca

SEQ ID NO: 68432 - DNA, 15 bp, Homo sapiens
cctggcagccagcac

SEQ ID NO: 68433 - DNA, 15 bp, Homo sapiens
gcctggcagccagca

SEQ ID NO: 68434 - DNA, 15 bp, Homo sapiens
tgcctggcagccagc

SEQ ID NO: 68435 - DNA, 15 bp, Homo sapiens
ttgcctggcagccag

SEQ ID NO: 68436 - DNA, 15 bp, Homo sapiens
cttgcctggcagcca

SEQ ID NO: 68437 - DNA, 15 bp, Homo sapiens
acttgcctggcagcc

SEQ ID NO: 68438 - DNA, 15 bp, Homo sapiens
aacttgcctggcagc

SEQ ID NO: 68439 - DNA, 15 bp, Homo sapiens
gaacttgcctggcag

SEQ ID NO: 68440 - DNA, 15 bp, Homo sapiens
agaacttgcctggca

SEQ ID NO: 68441 - DNA, 15 bp, Homo sapiens
tagaacttgcctggc

SEQ ID NO: 68442 - DNA, 15 bp, Homo sapiens
ttagaacttgcctgg

SEQ ID NO: 68443 - DNA, 15 bp, Homo sapiens
tttagaacttgcctg

SEQ ID NO: 68444 - DNA, 15 bp, Homo sapiens
ctttagaacttgcct

SEQ ID NO: 68445 - DNA, 15 bp, Homo sapiens
cctttagaacttgcc

SEQ ID NO: 68446 - DNA, 15 bp, Homo sapiens
gcctttagaacttgc

SEQ ID NO: 68447 - DNA, 15 bp, Homo sapiens
agcctttagaacttg

SEQ ID NO: 68448 - DNA, 15 bp, Homo sapiens
aagcctttagaactt

SEQ ID NO: 68449 - DNA, 15 bp, Homo sapiens
taagcctttagaact

SEQ ID NO: 68450 - DNA, 15 bp, Homo sapiens
ataagcctttagaac

SEQ ID NO: 68451 - DNA, 15 bp, Homo sapiens
aataagcctttagaa

SEQ ID NO: 68452 - DNA, 15 bp, Homo sapiens
aaataagcctttaga

SEQ ID NO: 68453 - DNA, 15 bp, Homo sapiens
gaaataagcctttag

SEQ ID NO: 68454 - DNA, 15 bp, Homo sapiens
cgaaataagccttta

SEQ ID NO: 68455 - DNA, 15 bp, Homo sapiens
acgaaataagccttt

SEQ ID NO: 68456 - DNA, 15 bp, Homo sapiens
gacgaaataagcctt

SEQ ID NO: 68457 - DNA, 15 bp, Homo sapiens
agacgaaataagcct

SEQ ID NO: 68458 - DNA, 15 bp, Homo sapiens
aagacgaaataagcc

SEQ ID NO: 68459 - DNA, 15 bp, Homo sapiens
aaagacgaaataagc

SEQ ID NO: 68460 - DNA, 15 bp, Homo sapiens
taaagacgaaataag

SEQ ID NO: 68461 - DNA, 15 bp, Homo sapiens
gtaaagacgaaataa

SEQ ID NO: 68462 - DNA, 15 bp, Homo sapiens
tgtaaagacgaaata

SEQ ID NO: 68463 - DNA, 15 bp, Homo sapiens
ttgtaaagacgaaat

SEQ ID NO: 68464 - DNA, 15 bp, Homo sapiens
gttgtaaagacgaaa

SEQ ID NO: 68465 - DNA, 15 bp, Homo sapiens
tgttgtaaagacgaa

SEQ ID NO: 68466 - DNA, 15 bp, Homo sapiens
ctgttgtaaagacga

SEQ ID NO: 68467 - DNA, 15 bp, Homo sapiens
gctgttgtaaagacg

SEQ ID NO: 68468 - DNA, 15 bp, Homo sapiens
ggctgttgtaaagac

SEQ ID NO: 68469 - DNA, 15 bp, Homo sapiens
gggctgttgtaaaga

SEQ ID NO: 68470 - DNA, 15 bp, Homo sapiens
agggctgttgtaaag

SEQ ID NO: 68471 - DNA, 15 bp, Homo sapiens
aagggctgttgtaaa

SEQ ID NO: 68472 - DNA, 15 bp, Homo sapiens
aaagggctgttgtaa

SEQ ID NO: 68473 - DNA, 15 bp, Homo sapiens
caaagggctgttgta

SEQ ID NO: 68474 - DNA, 15 bp, Homo sapiens
tcaaagggctgttgt

SEQ ID NO: 68475 - DNA, 15 bp, Homo sapiens
ctcaaagggctgttg

SEQ ID NO: 68476 - DNA, 15 bp, Homo sapiens
tctcaaagggctgtt

SEQ ID NO: 68477 - DNA, 15 bp, Homo sapiens
atctcaaagggctgt

SEQ ID NO: 68478 - DNA, 15 bp, Homo sapiens
tatctcaaagggctg

SEQ ID NO: 68479 - DNA, 15 bp, Homo sapiens
ttatctcaaagggct

SEQ ID NO: 68480 - DNA, 15 bp, Homo sapiens
cttatctcaaagggc

SEQ ID NO: 68481 - DNA, 15 bp, Homo sapiens
acttatctcaaaggg

SEQ ID NO: 68482 - DNA, 15 bp, Homo sapiens
gacttatctcaaagg

SEQ ID NO: 68483 - DNA, 15 bp, Homo sapiens
ggacttatctcaaag

SEQ ID NO: 68484 - DNA, 15 bp, Homo sapiens
aggacttatctcaaa

SEQ ID NO: 68485 - DNA, 15 bp, Homo sapiens
taggacttatctcaa

SEQ ID NO: 68486 - DNA, 15 bp, Homo sapiens
ataggacttatctca

SEQ ID NO: 68487 - DNA, 15 bp, Homo sapiens
aataggacttatctc

SEQ ID NO: 68488 - DNA, 15 bp, Homo sapiens
taataggacttatct

SEQ ID NO: 68489 - DNA, 15 bp, Homo sapiens
ataataggacttatc

SEQ ID NO: 68490 - DNA, 15 bp, Homo sapiens
tataataggacttat

SEQ ID NO: 68491 - DNA, 15 bp, Homo sapiens
ttataataggactta

SEQ ID NO: 68492 - DNA, 15 bp, Homo sapiens
gttataataggactt

SEQ ID NO: 68493 - DNA, 15 bp, Homo sapiens
ggttataataggact

SEQ ID NO: 68494 - DNA, 15 bp, Homo sapiens
gggttataataggac

SEQ ID NO: 68495 - DNA, 15 bp, Homo sapiens
ggggttataatagga

SEQ ID NO: 68496 - DNA, 15 bp, Homo sapiens
tggggttataatagg

SEQ ID NO: 68497 - DNA, 15 bp, Homo sapiens
atggggttataatag

SEQ ID NO: 68498 - DNA, 15 bp, Homo sapiens
aatggggttataata

SEQ ID NO: 68499 - DNA, 15 bp, Homo sapiens
caatggggttataat

SEQ ID NO: 68500 - DNA, 15 bp, Homo sapiens
acaatggggttataa

SEQ ID NO: 68501 - DNA, 15 bp, Homo sapiens
tacaatggggttata

SEQ ID NO: 68502 - DNA, 15 bp, Homo sapiens
gtacaatggggttat

SEQ ID NO: 68503 - DNA, 15 bp, Homo sapiens
tgtacaatggggtta

SEQ ID NO: 68504 - DNA, 15 bp, Homo sapiens
ctgtacaatggggtt

SEQ ID NO: 68505 - DNA, 15 bp, Homo sapiens
tctgtacaatggggt

SEQ ID NO: 68506 - DNA, 15 bp, Homo sapiens
atctgtacaatgggg

SEQ ID NO: 68507 - DNA, 15 bp, Homo sapiens
catctgtacaatggg

SEQ ID NO: 68508 - DNA, 15 bp, Homo sapiens
tcatctgtacaatgg

SEQ ID NO: 68509 - DNA, 15 bp, Homo sapiens
ctcatctgtacaatg

SEQ ID NO: 68510 - DNA, 15 bp, Homo sapiens
cctcatctgtacaat

SEQ ID NO: 68511 - DNA, 15 bp, Homo sapiens
tcctcatctgtacaa

SEQ ID NO: 68512 - DNA, 15 bp, Homo sapiens
gtcctcatctgtaca

SEQ ID NO: 68513 - DNA, 15 bp, Homo sapiens
tgtcctcatctgtac

SEQ ID NO: 68514 - DNA, 15 bp, Homo sapiens
ctgtcctcatctgta

SEQ ID NO: 68515 - DNA, 15 bp, Homo sapiens
actgtcctcatctgt

SEQ ID NO: 68516 - DNA, 15 bp, Homo sapiens
cactgtcctcatctg

SEQ ID NO: 68517 - DNA, 15 bp, Homo sapiens
tcactgtcctcatct

SEQ ID NO: 68518 - DNA, 15 bp, Homo sapiens
ctcactgtcctcatc

SEQ ID NO: 68519 - DNA, 15 bp, Homo sapiens
cctcactgtcctcat

SEQ ID NO: 68520 - DNA, 15 bp, Homo sapiens
gcctcactgtcctca

SEQ ID NO: 68521 - DNA, 15 bp, Homo sapiens
tgcctcactgtcctc

SEQ ID NO: 68522 - DNA, 15 bp, Homo sapiens
gtgcctcactgtcct

SEQ ID NO: 68523 - DNA, 15 bp, Homo sapiens
tgtgcctcactgtcc

SEQ ID NO: 68524 - DNA, 15 bp, Homo sapiens
ctgtgcctcactgtc

SEQ ID NO: 68525 - DNA, 15 bp, Homo sapiens
cctgtgcctcactgt

SEQ ID NO: 68526 - DNA, 15 bp, Homo sapiens
ccctgtgcctcactg

SEQ ID NO: 68527 - DNA, 15 bp, Homo sapiens
tccctgtgcctcact

SEQ ID NO: 68528 - DNA, 15 bp, Homo sapiens
ctccctgtgcctcac

SEQ ID NO: 68529 - DNA, 15 bp, Homo sapiens
cctccctgtgcctca

SEQ ID NO: 68530 - DNA, 15 bp, Homo sapiens
acctccctgtgcctc

SEQ ID NO: 68531 - DNA, 15 bp, Homo sapiens
aacctccctgtgcct

SEQ ID NO: 68532 - DNA, 15 bp, Homo sapiens
taacctccctgtgcc

SEQ ID NO: 68533 - DNA, 15 bp, Homo sapiens
ttaacctccctgtgc

SEQ ID NO: 68534 - DNA, 15 bp, Homo sapiens
cttaacctccctgtg

SEQ ID NO: 68535 - DNA, 15 bp, Homo sapiens
acttaacctccctgt

SEQ ID NO: 68536 - DNA, 15 bp, Homo sapiens
tacttaacctccctg

SEQ ID NO: 68537 - DNA, 15 bp, Homo sapiens
ttacttaacctccct

SEQ ID NO: 68538 - DNA, 15 bp, Homo sapiens
gttacttaacctccc

SEQ ID NO: 68539 - DNA, 15 bp, Homo sapiens
agttacttaacctcc

SEQ ID NO: 68540 - DNA, 15 bp, Homo sapiens
aagttacttaacctc

SEQ ID NO: 68541 - DNA, 15 bp, Homo sapiens
caagttacttaacct

SEQ ID NO: 68542 - DNA, 15 bp, Homo sapiens
acaagttacttaacc

SEQ ID NO: 68543 - DNA, 15 bp, Homo sapiens
aacaagttacttaac

SEQ ID NO: 68544 - DNA, 15 bp, Homo sapiens
gaacaagttacttaa

SEQ ID NO: 68545 - DNA, 15 bp, Homo sapiens
tgaacaagttactta

SEQ ID NO: 68546 - DNA, 15 bp, Homo sapiens
ttgaacaagttactt

SEQ ID NO: 68547 - DNA, 15 bp, Homo sapiens
cttgaacaagttact

SEQ ID NO: 68548 - DNA, 15 bp, Homo sapiens
gcttgaacaagttac

SEQ ID NO: 68549 - DNA, 15 bp, Homo sapiens
ggcttgaacaagtta

SEQ ID NO: 68550 - DNA, 15 bp, Homo sapiens
gggcttgaacaagtt

SEQ ID NO: 68551 - DNA, 15 bp, Homo sapiens
agggcttgaacaagt

SEQ ID NO: 68552 - DNA, 15 bp, Homo sapiens
gagggcttgaacaag

SEQ ID NO: 68553 - DNA, 15 bp, Homo sapiens
tgagggcttgaacaa

SEQ ID NO: 68554 - DNA, 15 bp, Homo sapiens
ctgagggcttgaaca

SEQ ID NO: 68555 - DNA, 15 bp, Homo sapiens
tctgagggcttgaac

SEQ ID NO: 68556 - DNA, 15 bp, Homo sapiens
ctctgagggcttgaa

SEQ ID NO: 68557 - DNA, 15 bp, Homo sapiens
gctctgagggcttga

SEQ ID NO: 68558 - DNA, 15 bp, Homo sapiens
agctctgagggcttg

SEQ ID NO: 68559 - DNA, 15 bp, Homo sapiens
tagctctgagggctt

SEQ ID NO: 68560 - DNA, 15 bp, Homo sapiens
ctagctctgagggct

SEQ ID NO: 68561 - DNA, 15 bp, Homo sapiens
actagctctgagggc

SEQ ID NO: 68562 - DNA, 15 bp, Homo sapiens
tactagctctgaggg

SEQ ID NO: 68563 - DNA, 15 bp, Homo sapiens
ttactagctctgagg

SEQ ID NO: 68564 - DNA, 15 bp, Homo sapiens
cttactagctctgag

SEQ ID NO: 68565 - DNA, 15 bp, Homo sapiens
acttactagctctga

SEQ ID NO: 68566 - DNA, 15 bp, Homo sapiens
cacttactagctctg

SEQ ID NO: 68567 - DNA, 15 bp, Homo sapiens
acacttactagctct

SEQ ID NO: 68568 - DNA, 15 bp, Homo sapiens
tacacttactagctc

SEQ ID NO: 68569 - DNA, 15 bp, Homo sapiens
ctacacttactagct

SEQ ID NO: 68570 - DNA, 15 bp, Homo sapiens
tctacacttactagc

SEQ ID NO: 68571 - DNA, 15 bp, Homo sapiens
ctctacacttactag

SEQ ID NO: 68572 - DNA, 15 bp, Homo sapiens
gctctacacttacta

SEQ ID NO: 68573 - DNA, 15 bp, Homo sapiens
agctctacacttact

SEQ ID NO: 68574 - DNA, 15 bp, Homo sapiens
tagctctacacttac

SEQ ID NO: 68575 - DNA, 15 bp, Homo sapiens
ctagctctacactta

SEQ ID NO: 68576 - DNA, 15 bp, Homo sapiens
tctagctctacactt

SEQ ID NO: 68577 - DNA, 15 bp, Homo sapiens
ttctagctctacact

SEQ ID NO: 68578 - DNA, 15 bp, Homo sapiens
attctagctctacac

SEQ ID NO: 68579 - DNA, 15 bp, Homo sapiens
aattctagctctaca

SEQ ID NO: 68580 - DNA, 15 bp, Homo sapiens
gaattctagctctac

SEQ ID NO: 68581 - DNA, 15 bp, Homo sapiens
tgaattctagctcta

SEQ ID NO: 68582 - DNA, 15 bp, Homo sapiens
ttgaattctagctct

SEQ ID NO: 68583 - DNA, 15 bp, Homo sapiens
tttgaattctagctc

SEQ ID NO: 68584 - DNA, 15 bp, Homo sapiens
gtttgaattctagct

SEQ ID NO: 68585 - DNA, 15 bp, Homo sapiens
ggtttgaattctagc

SEQ ID NO: 68586 - DNA, 15 bp, Homo sapiens
aggtttgaattctag

SEQ ID NO: 68587 - DNA, 15 bp, Homo sapiens
taggtttgaattcta

SEQ ID NO: 68588 - DNA, 15 bp, Homo sapiens
ctaggtttgaattct

SEQ ID NO: 68589 - DNA, 15 bp, Homo sapiens
cctaggtttgaattc

SEQ ID NO: 68590 - DNA, 15 bp, Homo sapiens
acctaggtttgaatt

SEQ ID NO: 68591 - DNA, 15 bp, Homo sapiens
cacctaggtttgaat

SEQ ID NO: 68592 - DNA, 15 bp, Homo sapiens
gcacctaggtttgaa

SEQ ID NO: 68593 - DNA, 15 bp, Homo sapiens
cgcacctaggtttga

SEQ ID NO: 68594 - DNA, 15 bp, Homo sapiens
gcgcacctaggtttg

SEQ ID NO: 68595 - DNA, 15 bp, Homo sapiens
agcgcacctaggttt

SEQ ID NO: 68596 - DNA, 15 bp, Homo sapiens
tagcgcacctaggtt

SEQ ID NO: 68597 - DNA, 15 bp, Homo sapiens
ctagcgcacctaggt

SEQ ID NO: 68598 - DNA, 15 bp, Homo sapiens
actagcgcacctagg

SEQ ID NO: 68599 - DNA, 15 bp, Homo sapiens
gactagcgcacctag

SEQ ID NO: 68600 - DNA, 15 bp, Homo sapiens
ggactagcgcaccta

SEQ ID NO: 68601 - DNA, 15 bp, Homo sapiens
aggactagcgcacct

SEQ ID NO: 68602 - DNA, 15 bp, Homo sapiens
gaggactagcgcacc

SEQ ID NO: 68603 - DNA, 15 bp, Homo sapiens
tgaggactagcgcac

SEQ ID NO: 68604 - DNA, 15 bp, Homo sapiens
ttgaggactagcgca

SEQ ID NO: 68605 - DNA, 15 bp, Homo sapiens
tttgaggactagcgc

SEQ ID NO: 68606 - DNA, 15 bp, Homo sapiens
gtttgaggactagcg

SEQ ID NO: 68607 - DNA, 15 bp, Homo sapiens
agtttgaggactagc

SEQ ID NO: 68608 - DNA, 15 bp, Homo sapiens
cagtttgaggactag

SEQ ID NO: 68609 - DNA, 15 bp, Homo sapiens
ccagtttgaggacta

SEQ ID NO: 68610 - DNA, 15 bp, Homo sapiens
tccagtttgaggact

SEQ ID NO: 68611 - DNA, 15 bp, Homo sapiens
ttccagtttgaggac

SEQ ID NO: 68612 - DNA, 15 bp, Homo sapiens
gttccagtttgagga

SEQ ID NO: 68613 - DNA, 15 bp, Homo sapiens
agttccagtttgagg

SEQ ID NO: 68614 - DNA, 15 bp, Homo sapiens
aagttccagtttgag

SEQ ID NO: 68615 - DNA, 15 bp, Homo sapiens
gaagttccagtttga

SEQ ID NO: 68616 - DNA, 15 bp, Homo sapiens
ggaagttccagtttg

SEQ ID NO: 68617 - DNA, 15 bp, Homo sapiens
cggaagttccagttt

SEQ ID NO: 68618 - DNA, 15 bp, Homo sapiens
gcggaagttccagtt

SEQ ID NO: 68619 - DNA, 15 bp, Homo sapiens
agcggaagttccagt

SEQ ID NO: 68620 - DNA, 15 bp, Homo sapiens
gagcggaagttccag

SEQ ID NO: 68621 - DNA, 15 bp, Homo sapiens
ggagcggaagttcca

SEQ ID NO: 68622 - DNA, 15 bp, Homo sapiens
aggagcggaagttcc

SEQ ID NO: 68623 - DNA, 15 bp, Homo sapiens
caggagcggaagttc

SEQ ID NO: 68624 - DNA, 15 bp, Homo sapiens
tcaggagcggaagtt

SEQ ID NO: 68625 - DNA, 15 bp, Homo sapiens
atcaggagcggaagt

SEQ ID NO: 68626 - DNA, 15 bp, Homo sapiens
tatcaggagcggaag

SEQ ID NO: 68627 - DNA, 15 bp, Homo sapiens
atatcaggagcggaa

SEQ ID NO: 68628 - DNA, 15 bp, Homo sapiens
aatatcaggagcgga

SEQ ID NO: 68629 - DNA, 15 bp, Homo sapiens
aaatatcaggagcgg

SEQ ID NO: 68630 - DNA, 15 bp, Homo sapiens
aaaatatcaggagcg

SEQ ID NO: 68631 - DNA, 15 bp, Homo sapiens
caaaatatcaggagc

SEQ ID NO: 68632 - DNA, 15 bp, Homo sapiens
acaaaatatcaggag

SEQ ID NO: 68633 - DNA, 15 bp, Homo sapiens
aacaaaatatcagga

SEQ ID NO: 68634 - DNA, 15 bp, Homo sapiens
aaacaaaatatcagg

SEQ ID NO: 68635 - DNA, 15 bp, Homo sapiens
taaacaaaatatcag

SEQ ID NO: 68636 - DNA, 15 bp, Homo sapiens
ttaaacaaaatatca

SEQ ID NO: 68637 - DNA, 15 bp, Homo sapiens
cttaaacaaaatatc

SEQ ID NO: 68638 - DNA, 15 bp, Homo sapiens
ccttaaacaaaatat

SEQ ID NO: 68639 - DNA, 15 bp, Homo sapiens
tccttaaacaaaata

SEQ ID NO: 68640 - DNA, 15 bp, Homo sapiens
atccttaaacaaaat

SEQ ID NO: 68641 - DNA, 15 bp, Homo sapiens
catccttaaacaaaa

SEQ ID NO: 68642 - DNA, 15 bp, Homo sapiens
ccatccttaaacaaa

SEQ ID NO: 68643 - DNA, 15 bp, Homo sapiens
tccatccttaaacaa

SEQ ID NO: 68644 - DNA, 15 bp, Homo sapiens
ctccatccttaaaca

SEQ ID NO: 68645 - DNA, 15 bp, Homo sapiens
cctccatccttaaac

SEQ ID NO: 68646 - DNA, 15 bp, Homo sapiens
gcctccatccttaaa

SEQ ID NO: 68647 - DNA, 15 bp, Homo sapiens
cgcctccatccttaa

SEQ ID NO: 68648 - DNA, 15 bp, Homo sapiens
acgcctccatcctta

SEQ ID NO: 68649 - DNA, 15 bp, Homo sapiens
cacgcctccatcctt

SEQ ID NO: 68650 - DNA, 15 bp, Homo sapiens
ccacgcctccatcct

SEQ ID NO: 68651 - DNA, 15 bp, Homo sapiens
tccacgcctccatcc

SEQ ID NO: 68652 - DNA, 15 bp, Homo sapiens
ctccacgcctccatc

SEQ ID NO: 68653 - DNA, 15 bp, Homo sapiens
cctccacgcctccat

SEQ ID NO: 68654 - DNA, 15 bp, Homo sapiens
ccctccacgcctcca

SEQ ID NO: 68655 - DNA, 15 bp, Homo sapiens
tccctccacgcctcc

SEQ ID NO: 68656 - DNA, 15 bp, Homo sapiens
gtccctccacgcctc

SEQ ID NO: 68657 - DNA, 15 bp, Homo sapiens
ggtccctccacgcct

SEQ ID NO: 68658 - DNA, 15 bp, Homo sapiens
tggtccctccacgcc

SEQ ID NO: 68659 - DNA, 15 bp, Homo sapiens
ctggtccctccacgc

SEQ ID NO: 68660 - DNA, 15 bp, Homo sapiens
cctggtccctccacg

SEQ ID NO: 68661 - DNA, 15 bp, Homo sapiens
tcctggtccctccac

SEQ ID NO: 68662 - DNA, 15 bp, Homo sapiens
ctcctggtccctcca

SEQ ID NO: 68663 - DNA, 15 bp, Homo sapiens
tctcctggtccctcc

SEQ ID NO: 68664 - DNA, 15 bp, Homo sapiens
gtctcctggtccctc

SEQ ID NO: 68665 - DNA, 15 bp, Homo sapiens
ggtctcctggtccct

SEQ ID NO: 68666 - DNA, 15 bp, Homo sapiens
gggtctcctggtccc

SEQ ID NO: 68667 - DNA, 15 bp, Homo sapiens
tgggtctcctggtcc

SEQ ID NO: 68668 - DNA, 15 bp, Homo sapiens
ctgggtctcctggtc

SEQ ID NO: 68669 - DNA, 15 bp, Homo sapiens
actgggtctcctggt

SEQ ID NO: 68670 - DNA, 15 bp, Homo sapiens
cactgggtctcctgg

SEQ ID NO: 68671 - DNA, 15 bp, Homo sapiens
ccactgggtctcctg

SEQ ID NO: 68672 - DNA, 15 bp, Homo sapiens
tccactgggtctcct

SEQ ID NO: 68673 - DNA, 15 bp, Homo sapiens
ctccactgggtctcc

SEQ ID NO: 68674 - DNA, 15 bp, Homo sapiens
actccactgggtctc

SEQ ID NO: 68675 - DNA, 15 bp, Homo sapiens
tactccactgggtct

SEQ ID NO: 68676 - DNA, 15 bp, Homo sapiens
ttactccactgggtc

SEQ ID NO: 68677 - DNA, 15 bp, Homo sapiens
gttactccactgggt

SEQ ID NO: 68678 - DNA, 15 bp, Homo sapiens
ggttactccactggg

SEQ ID NO: 68679 - DNA, 15 bp, Homo sapiens
gggttactccactgg

SEQ ID NO: 68680 - DNA, 15 bp, Homo sapiens
agggttactccactg

SEQ ID NO: 68681 - DNA, 15 bp, Homo sapiens
cagggttactccact

SEQ ID NO: 68682 - DNA, 15 bp, Homo sapiens
tcagggttactccac

SEQ ID NO: 68683 - DNA, 15 bp, Homo sapiens
gtcagggttactcca

SEQ ID NO: 68684 - DNA, 15 bp, Homo sapiens
ggtcagggttactcc

SEQ ID NO: 68685 - DNA, 15 bp, Homo sapiens
gggtcagggttactc

SEQ ID NO: 68686 - DNA, 15 bp, Homo sapiens
cgggtcagggttact

SEQ ID NO: 68687 - DNA, 15 bp, Homo sapiens
gcgggtcagggttac

SEQ ID NO: 68688 - DNA, 15 bp, Homo sapiens
tgcgggtcagggtta

SEQ ID NO: 68689 - DNA, 15 bp, Homo sapiens
gtgcgggtcagggtt

SEQ ID NO: 68690 - DNA, 15 bp, Homo sapiens
ggtgcgggtcagggt

SEQ ID NO: 68691 - DNA, 15 bp, Homo sapiens
aggtgcgggtcaggg

SEQ ID NO: 68692 - DNA, 15 bp, Homo sapiens
caggtgcgggtcagg

SEQ ID NO: 68693 - DNA, 15 bp, Homo sapiens
gcaggtgcgggtcag

SEQ ID NO: 68694 - DNA, 15 bp, Homo sapiens
tgcaggtgcgggtca

SEQ ID NO: 68695 - DNA, 15 bp, Homo sapiens
gtgcaggtgcgggtc

SEQ ID NO: 68696 - DNA, 15 bp, Homo sapiens
cgtgcaggtgcgggt

SEQ ID NO: 68697 - DNA, 15 bp, Homo sapiens
tcgtgcaggtgcggg

SEQ ID NO: 68698 - DNA, 15 bp, Homo sapiens
atcgtgcaggtgcgg

SEQ ID NO: 68699 - DNA, 15 bp, Homo sapiens
catcgtgcaggtgcg

SEQ ID NO: 68700 - DNA, 15 bp, Homo sapiens
gcatcgtgcaggtgc

SEQ ID NO: 68701 - DNA, 15 bp, Homo sapiens
ggcatcgtgcaggtg

SEQ ID NO: 68702 - DNA, 15 bp, Homo sapiens
gggcatcgtgcaggt

SEQ ID NO: 68703 - DNA, 15 bp, Homo sapiens
cgggcatcgtgcagg

SEQ ID NO: 68704 - DNA, 15 bp, Homo sapiens
gcgggcatcgtgcag

SEQ ID NO: 68705 - DNA, 15 bp, Homo sapiens
cgcgggcatcgtgca

SEQ ID NO: 68706 - DNA, 15 bp, Homo sapiens
ccgcgggcatcgtgc

SEQ ID NO: 68707 - DNA, 15 bp, Homo sapiens
tccgcgggcatcgtg

SEQ ID NO: 68708 - DNA, 15 bp, Homo sapiens
ctccgcgggcatcgt

SEQ ID NO: 68709 - DNA, 15 bp, Homo sapiens
actccgcgggcatcg

SEQ ID NO: 68710 - DNA, 15 bp, Homo sapiens
cactccgcgggcatc

SEQ ID NO: 68711 - DNA, 15 bp, Homo sapiens
gcactccgcgggcat

SEQ ID NO: 68712 - DNA, 15 bp, Homo sapiens
tgcactccgcgggca

SEQ ID NO: 68713 - DNA, 15 bp, Homo sapiens
ttgcactccgcgggc

SEQ ID NO: 68714 - DNA, 15 bp, Homo sapiens
tttgcactccgcggg

SEQ ID NO: 68715 - DNA, 15 bp, Homo sapiens
ctttgcactccgcgg

SEQ ID NO: 68716 - DNA, 15 bp, Homo sapiens
gctttgcactccgcg

SEQ ID NO: 68717 - DNA, 15 bp, Homo sapiens
tgctttgcactccgc

SEQ ID NO: 68718 - DNA, 15 bp, Homo sapiens
gtgctttgcactccg

SEQ ID NO: 68719 - DNA, 15 bp, Homo sapiens
agtgctttgcactcc

SEQ ID NO: 68720 - DNA, 15 bp, Homo sapiens
aagtgctttgcactc

SEQ ID NO: 68721 - DNA, 15 bp, Homo sapiens
aaagtgctttgcact

SEQ ID NO: 68722 - DNA, 15 bp, Homo sapiens
gaaagtgctttgcac

SEQ ID NO: 68723 - DNA, 15 bp, Homo sapiens
agaaagtgctttgca

SEQ ID NO: 68724 - DNA, 15 bp, Homo sapiens
gagaaagtgctttgc

SEQ ID NO: 68725 - DNA, 15 bp, Homo sapiens
ggagaaagtgctttg

SEQ ID NO: 68726 - DNA, 15 bp, Homo sapiens
aggagaaagtgcttt

SEQ ID NO: 68727 - DNA, 15 bp, Homo sapiens
taggagaaagtgctt

SEQ ID NO: 68728 - DNA, 15 bp, Homo sapiens
ctaggagaaagtgct

SEQ ID NO: 68729 - DNA, 15 bp, Homo sapiens
gctaggagaaagtgc

SEQ ID NO: 68730 - DNA, 15 bp, Homo sapiens
cgctaggagaaagtg

SEQ ID NO: 68731 - DNA, 15 bp, Homo sapiens
gcgctaggagaaagt

SEQ ID NO: 68732 - DNA, 15 bp, Homo sapiens
cgcgctaggagaaag

SEQ ID NO: 68733 - DNA, 15 bp, Homo sapiens
gcgcgctaggagaaa

SEQ ID NO: 68734 - DNA, 15 bp, Homo sapiens
tgcgcgctaggagaa

SEQ ID NO: 68735 - DNA, 15 bp, Homo sapiens
ctgcgcgctaggaga

SEQ ID NO: 68736 - DNA, 15 bp, Homo sapiens
tctgcgcgctaggag

SEQ ID NO: 68737 - DNA, 15 bp, Homo sapiens
ctctgcgcgctagga

SEQ ID NO: 68738 - DNA, 15 bp, Homo sapiens
gctctgcgcgctagg

SEQ ID NO: 68739 - DNA, 15 bp, Homo sapiens
tgctctgcgcgctag

SEQ ID NO: 68740 - DNA, 15 bp, Homo sapiens
atgctctgcgcgcta

SEQ ID NO: 68741 - DNA, 15 bp, Homo sapiens
tatgctctgcgcgct

SEQ ID NO: 68742 - DNA, 15 bp, Homo sapiens
atatgctctgcgcgc

SEQ ID NO: 68743 - DNA, 15 bp, Homo sapiens
tatatgctctgcgcg

SEQ ID NO: 68744 - DNA, 15 bp, Homo sapiens
atatatgctctgcgc

SEQ ID NO: 68745 - DNA, 15 bp, Homo sapiens
gatatatgctctgcg

SEQ ID NO: 68746 - DNA, 15 bp, Homo sapiens
agatatatgctctgc

SEQ ID NO: 68747 - DNA, 15 bp, Homo sapiens
cagatatatgctctg

SEQ ID NO: 68748 - DNA, 15 bp, Homo sapiens
tcagatatatgctct

SEQ ID NO: 68749 - DNA, 15 bp, Homo sapiens
ttcagatatatgctc

SEQ ID NO: 68750 - DNA, 15 bp, Homo sapiens
tttcagatatatgct

SEQ ID NO: 68751 - DNA, 15 bp, Homo sapiens
ctttcagatatatgc

SEQ ID NO: 68752 - DNA, 15 bp, Homo sapiens
gctttcagatatatg

SEQ ID NO: 68753 - DNA, 15 bp, Homo sapiens
agctttcagatatat

SEQ ID NO: 68754 - DNA, 15 bp, Homo sapiens
aagctttcagatata

SEQ ID NO: 68755 - DNA, 15 bp, Homo sapiens
gaagctttcagatat

SEQ ID NO: 68756 - DNA, 15 bp, Homo sapiens
agaagctttcagata

SEQ ID NO: 68757 - DNA, 15 bp, Homo sapiens
gagaagctttcagat

SEQ ID NO: 68758 - DNA, 15 bp, Homo sapiens
cgagaagctttcaga

SEQ ID NO: 68759 - DNA, 15 bp, Homo sapiens
gcgagaagctttcag

SEQ ID NO: 68760 - DNA, 15 bp, Homo sapiens
ggcgagaagctttca

SEQ ID NO: 68761 - DNA, 15 bp, Homo sapiens
gggcgagaagctttc

SEQ ID NO: 68762 - DNA, 15 bp, Homo sapiens
cgggcgagaagcttt

SEQ ID NO: 68763 - DNA, 15 bp, Homo sapiens
acgggcgagaagctt

SEQ ID NO: 68764 - DNA, 15 bp, Homo sapiens
gacgggcgagaagct

SEQ ID NO: 68765 - DNA, 15 bp, Homo sapiens
ggacgggcgagaagc

SEQ ID NO: 68766 - DNA, 15 bp, Homo sapiens
aggacgggcgagaag

SEQ ID NO: 68767 - DNA, 15 bp, Homo sapiens
gaggacgggcgagaa

SEQ ID NO: 68768 - DNA, 15 bp, Homo sapiens
ggaggacgggcgaga

SEQ ID NO: 68769 - DNA, 15 bp, Homo sapiens
cggaggacgggcgag

SEQ ID NO: 68770 - DNA, 15 bp, Homo sapiens
gcggaggacgggcga

SEQ ID NO: 68771 - DNA, 15 bp, Homo sapiens
ggcggaggacgggcg

SEQ ID NO: 68772 - DNA, 15 bp, Homo sapiens
gggcggaggacgggc

SEQ ID NO: 68773 - DNA, 15 bp, Homo sapiens
tgggcggaggacggg

SEQ ID NO: 68774 - DNA, 15 bp, Homo sapiens
ttgggcggaggacgg

SEQ ID NO: 68775 - DNA, 15 bp, Homo sapiens
gttgggcggaggacg

SEQ ID NO: 68776 - DNA, 15 bp, Homo sapiens
tgttgggcggaggac

SEQ ID NO: 68777 - DNA, 15 bp, Homo sapiens
gtgttgggcggagga

SEQ ID NO: 68778 - DNA, 15 bp, Homo sapiens
ggtgttgggcggagg

SEQ ID NO: 68779 - DNA, 15 bp, Homo sapiens
gggtgttgggcggag

SEQ ID NO: 68780 - DNA, 15 bp, Homo sapiens
ggggtgttgggcgga

SEQ ID NO: 68781 - DNA, 15 bp, Homo sapiens
gggggtgttgggcgg

SEQ ID NO: 68782 - DNA, 15 bp, Homo sapiens
cgggggtgttgggcg

SEQ ID NO: 68783 - DNA, 15 bp, Homo sapiens
gcgggggtgttgggc

SEQ ID NO: 68784 - DNA, 15 bp, Homo sapiens
tgcgggggtgttggg

SEQ ID NO: 68785 - DNA, 15 bp, Homo sapiens
ctgcgggggtgttgg

SEQ ID NO: 68786 - DNA, 15 bp, Homo sapiens
cctgcgggggtgttg

SEQ ID NO: 68787 - DNA, 15 bp, Homo sapiens
tcctgcgggggtgtt

SEQ ID NO: 68788 - DNA, 15 bp, Homo sapiens
gtcctgcgggggtgt

SEQ ID NO: 68789 - DNA, 15 bp, Homo sapiens
agtcctgcgggggtg

SEQ ID NO: 68790 - DNA, 15 bp, Homo sapiens
cagtcctgcgggggt

SEQ ID NO: 68791 - DNA, 15 bp, Homo sapiens
ccagtcctgcggggg

SEQ ID NO: 68792 - DNA, 15 bp, Homo sapiens
gccagtcctgcgggg

SEQ ID NO: 68793 - DNA, 15 bp, Homo sapiens
tgccagtcctgcggg

SEQ ID NO: 68794 - DNA, 15 bp, Homo sapiens
ctgccagtcctgcgg

SEQ ID NO: 68795 - DNA, 15 bp, Homo sapiens
cctgccagtcctgcg

SEQ ID NO: 68796 - DNA, 15 bp, Homo sapiens
ccctgccagtcctgc

SEQ ID NO: 68797 - DNA, 15 bp, Homo sapiens
accctgccagtcctg

SEQ ID NO: 68798 - DNA, 15 bp, Homo sapiens
gaccctgccagtcct

SEQ ID NO: 68799 - DNA, 15 bp, Homo sapiens
ggaccctgccagtcc

SEQ ID NO: 68800 - DNA, 15 bp, Homo sapiens
aggaccctgccagtc

SEQ ID NO: 68801 - DNA, 15 bp, Homo sapiens
gaggaccctgccagt

SEQ ID NO: 68802 - DNA, 15 bp, Homo sapiens
ggaggaccctgccag

SEQ ID NO: 68803 - DNA, 15 bp, Homo sapiens
aggaggaccctgcca

SEQ ID NO: 68804 - DNA, 15 bp, Homo sapiens
aaggaggaccctgcc

SEQ ID NO: 68805 - DNA, 15 bp, Homo sapiens
aaaggaggaccctgc

SEQ ID NO: 68806 - DNA, 15 bp, Homo sapiens
aaaaggaggaccctg

SEQ ID NO: 68807 - DNA, 15 bp, Homo sapiens
aaaaaggaggaccct

SEQ ID NO: 68808 - DNA, 15 bp, Homo sapiens
aaaaaaggaggaccc

SEQ ID NO: 68809 - DNA, 15 bp, Homo sapiens
aaaaaaaggaggacc

SEQ ID NO: 68810 - DNA, 15 bp, Homo sapiens
gaaaaaaaggaggac

SEQ ID NO: 68811 - DNA, 15 bp, Homo sapiens
agaaaaaaaggagga

SEQ ID NO: 68812 - DNA, 15 bp, Homo sapiens
gagaaaaaaaggagg

SEQ ID NO: 68813 - DNA, 15 bp, Homo sapiens
ggagaaaaaaaggag

SEQ ID NO: 68814 - DNA, 15 bp, Homo sapiens
aggagaaaaaaagga

SEQ ID NO: 68815 - DNA, 15 bp, Homo sapiens
aaggagaaaaaaagg

SEQ ID NO: 68816 - DNA, 15 bp, Homo sapiens
caaggagaaaaaaag

SEQ ID NO: 68817 - DNA, 15 bp, Homo sapiens
acaaggagaaaaaaa

SEQ ID NO: 68818 - DNA, 15 bp, Homo sapiens
cacaaggagaaaaaa

SEQ ID NO: 68819 - DNA, 15 bp, Homo sapiens
acacaaggagaaaaa

SEQ ID NO: 68820 - DNA, 15 bp, Homo sapiens
tacacaaggagaaaa

SEQ ID NO: 68821 - DNA, 15 bp, Homo sapiens
gtacacaaggagaaa

SEQ ID NO: 68822 - DNA, 15 bp, Homo sapiens
ggtacacaaggagaa

SEQ ID NO: 68823 - DNA, 15 bp, Homo sapiens
gggtacacaaggaga

SEQ ID NO: 68824 - DNA, 15 bp, Homo sapiens
ggggtacacaaggag

SEQ ID NO: 68825 - DNA, 15 bp, Homo sapiens
gggggtacacaagga

SEQ ID NO: 68826 - DNA, 15 bp, Homo sapiens
ggggggtacacaagg

SEQ ID NO: 68827 - DNA, 15 bp, Homo sapiens
tggggggtacacaag

SEQ ID NO: 68828 - DNA, 15 bp, Homo sapiens
ctggggggtacacaa

SEQ ID NO: 68829 - DNA, 15 bp, Homo sapiens
cctggggggtacaca

SEQ ID NO: 68830 - DNA, 15 bp, Homo sapiens
acctggggggtacac

SEQ ID NO: 68831 - DNA, 15 bp, Homo sapiens
aacctggggggtaca

SEQ ID NO: 68832 - DNA, 15 bp, Homo sapiens
gaacctggggggtac

SEQ ID NO: 68833 - DNA, 15 bp, Homo sapiens
ggaacctggggggta

SEQ ID NO: 68834 - DNA, 15 bp, Homo sapiens
aggaacctggggggt

SEQ ID NO: 68835 - DNA, 15 bp, Homo sapiens
aaggaacctgggggg

SEQ ID NO: 68836 - DNA, 15 bp, Homo sapiens
caaggaacctggggg

SEQ ID NO: 68837 - DNA, 15 bp, Homo sapiens
gcaaggaacctgggg

SEQ ID NO: 68838 - DNA, 15 bp, Homo sapiens
agcaaggaacctggg

SEQ ID NO: 68839 - DNA, 15 bp, Homo sapiens
gagcaaggaacctgg

SEQ ID NO: 68840 - DNA, 15 bp, Homo sapiens
agagcaaggaacctg

SEQ ID NO: 68841 - DNA, 15 bp, Homo sapiens
tagagcaaggaacct

SEQ ID NO: 68842 - DNA, 15 bp, Homo sapiens
ttagagcaaggaacc

SEQ ID NO: 68843 - DNA, 15 bp, Homo sapiens
gttagagcaaggaac

SEQ ID NO: 68844 - DNA, 15 bp, Homo sapiens
agttagagcaaggaa

SEQ ID NO: 68845 - DNA, 15 bp, Homo sapiens
gagttagagcaagga

SEQ ID NO: 68846 - DNA, 15 bp, Homo sapiens
ggagttagagcaagg

SEQ ID NO: 68847 - DNA, 15 bp, Homo sapiens
aggagttagagcaag

SEQ ID NO: 68848 - DNA, 15 bp, Homo sapiens
aaggagttagagcaa

SEQ ID NO: 68849 - DNA, 15 bp, Homo sapiens
gaaggagttagagca

SEQ ID NO: 68850 - DNA, 15 bp, Homo sapiens
tgaaggagttagagc

SEQ ID NO: 68851 - DNA, 15 bp, Homo sapiens
gtgaaggagttagag

SEQ ID NO: 68852 - DNA, 15 bp, Homo sapiens
agtgaaggagttaga

SEQ ID NO: 68853 - DNA, 15 bp, Homo sapiens
aagtgaaggagttag

SEQ ID NO: 68854 - DNA, 15 bp, Homo sapiens
taagtgaaggagtta

SEQ ID NO: 68855 - DNA, 15 bp, Homo sapiens
ataagtgaaggagtt

SEQ ID NO: 68856 - DNA, 15 bp, Homo sapiens
gataagtgaaggagt

SEQ ID NO: 68857 - DNA, 15 bp, Homo sapiens
tgataagtgaaggag

SEQ ID NO: 68858 - DNA, 15 bp, Homo sapiens
ctgataagtgaagga

SEQ ID NO: 68859 - DNA, 15 bp, Homo sapiens
gctgataagtgaagg

SEQ ID NO: 68860 - DNA, 15 bp, Homo sapiens
ggctgataagtgaag

SEQ ID NO: 68861 - DNA, 15 bp, Homo sapiens
aggctgataagtgaa

SEQ ID NO: 68862 - DNA, 15 bp, Homo sapiens
caggctgataagtga

SEQ ID NO: 68863 - DNA, 15 bp, Homo sapiens
tcaggctgataagtg

SEQ ID NO: 68864 - DNA, 15 bp, Homo sapiens
ctcaggctgataagt

SEQ ID NO: 68865 - DNA, 15 bp, Homo sapiens
cctcaggctgataag

SEQ ID NO: 68866 - DNA, 15 bp, Homo sapiens
tcctcaggctgataa

SEQ ID NO: 68867 - DNA, 15 bp, Homo sapiens
atcctcaggctgata

SEQ ID NO: 68868 - DNA, 15 bp, Homo sapiens
aatcctcaggctgat

SEQ ID NO: 68869 - DNA, 15 bp, Homo sapiens
caatcctcaggctga

SEQ ID NO: 68870 - DNA, 15 bp, Homo sapiens
ccaatcctcaggctg

SEQ ID NO: 68871 - DNA, 15 bp, Homo sapiens
cccaatcctcaggct

SEQ ID NO: 68872 - DNA, 15 bp, Homo sapiens
gcccaatcctcaggc

SEQ ID NO: 68873 - DNA, 15 bp, Homo sapiens
ggcccaatcctcagg

SEQ ID NO: 68874 - DNA, 15 bp, Homo sapiens
gggcccaatcctcag

SEQ ID NO: 68875 - DNA, 15 bp, Homo sapiens
tgggcccaatcctca

SEQ ID NO: 68876 - DNA, 15 bp, Homo sapiens
ctgggcccaatcctc

SEQ ID NO: 68877 - DNA, 15 bp, Homo sapiens
cctgggcccaatcct

SEQ ID NO: 68878 - DNA, 15 bp, Homo sapiens
gcctgggcccaatcc

SEQ ID NO: 68879 - DNA, 15 bp, Homo sapiens
agcctgggcccaatc

SEQ ID NO: 68880 - DNA, 15 bp, Homo sapiens
cagcctgggcccaat

SEQ ID NO: 68881 - DNA, 15 bp, Homo sapiens
gcagcctgggcccaa

SEQ ID NO: 68882 - DNA, 15 bp, Homo sapiens
tgcagcctgggccca

SEQ ID NO: 68883 - DNA, 15 bp, Homo sapiens
atgcagcctgggccc

SEQ ID NO: 68884 - DNA, 15 bp, Homo sapiens
aatgcagcctgggcc

SEQ ID NO: 68885 - DNA, 15 bp, Homo sapiens
gaatgcagcctgggc

SEQ ID NO: 68886 - DNA, 15 bp, Homo sapiens
agaatgcagcctggg

SEQ ID NO: 68887 - DNA, 15 bp, Homo sapiens
cagaatgcagcctgg

SEQ ID NO: 68888 - DNA, 15 bp, Homo sapiens
tcagaatgcagcctg

SEQ ID NO: 68889 - DNA, 15 bp, Homo sapiens
ctcagaatgcagcct

SEQ ID NO: 68890 - DNA, 15 bp, Homo sapiens
cctcagaatgcagcc

SEQ ID NO: 68891 - DNA, 15 bp, Homo sapiens
ccctcagaatgcagc

SEQ ID NO: 68892 - DNA, 15 bp, Homo sapiens
tccctcagaatgcag

SEQ ID NO: 68893 - DNA, 15 bp, Homo sapiens
ctccctcagaatgca

SEQ ID NO: 68894 - DNA, 15 bp, Homo sapiens
tctccctcagaatgc

SEQ ID NO: 68895 - DNA, 15 bp, Homo sapiens
atctccctcagaatg

SEQ ID NO: 68896 - DNA, 15 bp, Homo sapiens
catctccctcagaat

SEQ ID NO: 68897 - DNA, 15 bp, Homo sapiens
gcatctccctcagaa

SEQ ID NO: 68898 - DNA, 15 bp, Homo sapiens
ggcatctccctcaga

SEQ ID NO: 68899 - DNA, 15 bp, Homo sapiens
cggcatctccctcag

SEQ ID NO: 68900 - DNA, 15 bp, Homo sapiens
acggcatctccctca

SEQ ID NO: 68901 - DNA, 15 bp, Homo sapiens
gacggcatctccctc

SEQ ID NO: 68902 - DNA, 15 bp, Homo sapiens
agacggcatctccct

SEQ ID NO: 68903 - DNA, 15 bp, Homo sapiens
aagacggcatctccc

SEQ ID NO: 68904 - DNA, 15 bp, Homo sapiens
gaagacggcatctcc

SEQ ID NO: 68905 - DNA, 15 bp, Homo sapiens
ggaagacggcatctc

SEQ ID NO: 68906 - DNA, 15 bp, Homo sapiens
cggaagacggcatct

SEQ ID NO: 68907 - DNA, 15 bp, Homo sapiens
gcggaagacggcatc

SEQ ID NO: 68908 - DNA, 15 bp, Homo sapiens
ggcggaagacggcat

SEQ ID NO: 68909 - DNA, 15 bp, Homo sapiens
aggcggaagacggca

SEQ ID NO: 68910 - DNA, 15 bp, Homo sapiens
caggcggaagacggc

SEQ ID NO: 68911 - DNA, 15 bp, Homo sapiens
acaggcggaagacgg

SEQ ID NO: 68912 - DNA, 15 bp, Homo sapiens
gacaggcggaagacg

SEQ ID NO: 68913 - DNA, 15 bp, Homo sapiens
ggacaggcggaagac

SEQ ID NO: 68914 - DNA, 15 bp, Homo sapiens
gggacaggcggaaga

SEQ ID NO: 68915 - DNA, 15 bp, Homo sapiens
ggggacaggcggaag

SEQ ID NO: 68916 - DNA, 15 bp, Homo sapiens
gggggacaggcggaa

SEQ ID NO: 68917 - DNA, 15 bp, Homo sapiens
cgggggacaggcgga

SEQ ID NO: 68918 - DNA, 15 bp, Homo sapiens
ccgggggacaggcgg

SEQ ID NO: 68919 - DNA, 15 bp, Homo sapiens
tccgggggacaggcg

SEQ ID NO: 68920 - DNA, 15 bp, Homo sapiens
gtccgggggacaggc

SEQ ID NO: 68921 - DNA, 15 bp, Homo sapiens
cgtccgggggacagg

SEQ ID NO: 68922 - DNA, 15 bp, Homo sapiens
tcgtccgggggacag

SEQ ID NO: 68923 - DNA, 15 bp, Homo sapiens
ttcgtccgggggaca

SEQ ID NO: 68924 - DNA, 15 bp, Homo sapiens
tttcgtccgggggac

SEQ ID NO: 68925 - DNA, 15 bp, Homo sapiens
ctttcgtccggggga

SEQ ID NO: 68926 - DNA, 15 bp, Homo sapiens
cctttcgtccggggg

SEQ ID NO: 68927 - DNA, 15 bp, Homo sapiens
tcctttcgtccgggg

SEQ ID NO: 68928 - DNA, 15 bp, Homo sapiens
ctcctttcgtccggg

SEQ ID NO: 68929 - DNA, 15 bp, Homo sapiens
cctcctttcgtccgg

SEQ ID NO: 68930 - DNA, 15 bp, Homo sapiens
acctcctttcgtccg

SEQ ID NO: 68931 - DNA, 15 bp, Homo sapiens
aacctcctttcgtcc

SEQ ID NO: 68932 - DNA, 15 bp, Homo sapiens
caacctcctttcgtc

SEQ ID NO: 68933 - DNA, 15 bp, Homo sapiens
gcaacctcctttcgt

SEQ ID NO: 68934 - DNA, 15 bp, Homo sapiens
agcaacctcctttcg

SEQ ID NO: 68935 - DNA, 15 bp, Homo sapiens
tagcaacctcctttc

SEQ ID NO: 68936 - DNA, 15 bp, Homo sapiens
ctagcaacctccttt

SEQ ID NO: 68937 - DNA, 15 bp, Homo sapiens
gctagcaacctcctt

SEQ ID NO: 68938 - DNA, 15 bp, Homo sapiens
ggctagcaacctcct

SEQ ID NO: 68939 - DNA, 15 bp, Homo sapiens
gggctagcaacctcc

SEQ ID NO: 68940 - DNA, 15 bp, Homo sapiens
ggggctagcaacctc

SEQ ID NO: 68941 - DNA, 15 bp, Homo sapiens
tggggctagcaacct

SEQ ID NO: 68942 - DNA, 15 bp, Homo sapiens
ctggggctagcaacc

SEQ ID NO: 68943 - DNA, 15 bp, Homo sapiens
tctggggctagcaac

SEQ ID NO: 68944 - DNA, 15 bp, Homo sapiens
ttctggggctagcaa

SEQ ID NO: 68945 - DNA, 15 bp, Homo sapiens
attctggggctagca

SEQ ID NO: 68946 - DNA, 15 bp, Homo sapiens
cattctggggctagc

SEQ ID NO: 68947 - DNA, 15 bp, Homo sapiens
acattctggggctag

SEQ ID NO: 68948 - DNA, 15 bp, Homo sapiens
aacattctggggcta

SEQ ID NO: 68949 - DNA, 15 bp, Homo sapiens
gaacattctggggct

SEQ ID NO: 68950 - DNA, 15 bp, Homo sapiens
tgaacattctggggc

SEQ ID NO: 68951 - DNA, 15 bp, Homo sapiens
gtgaacattctgggg

SEQ ID NO: 68952 - DNA, 15 bp, Homo sapiens
tgtgaacattctggg

SEQ ID NO: 68953 - DNA, 15 bp, Homo sapiens
ctgtgaacattctgg

SEQ ID NO: 68954 - DNA, 15 bp, Homo sapiens
actgtgaacattctg

SEQ ID NO: 68955 - DNA, 15 bp, Homo sapiens
cactgtgaacattct

SEQ ID NO: 68956 - DNA, 15 bp, Homo sapiens
tcactgtgaacattc

SEQ ID NO: 68957 - DNA, 15 bp, Homo sapiens
gtcactgtgaacatt

SEQ ID NO: 68958 - DNA, 15 bp, Homo sapiens
ggtcactgtgaacat

SEQ ID NO: 68959 - DNA, 15 bp, Homo sapiens
gggtcactgtgaaca

SEQ ID NO: 68960 - DNA, 15 bp, Homo sapiens
tgggtcactgtgaac

SEQ ID NO: 68961 - DNA, 15 bp, Homo sapiens
gtgggtcactgtgaa

SEQ ID NO: 68962 - DNA, 15 bp, Homo sapiens
ggtgggtcactgtga

SEQ ID NO: 68963 - DNA, 15 bp, Homo sapiens
gggtgggtcactgtg

SEQ ID NO: 68964 - DNA, 15 bp, Homo sapiens
ggggtgggtcactgt

SEQ ID NO: 68965 - DNA, 15 bp, Homo sapiens
aggggtgggtcactg

SEQ ID NO: 68966 - DNA, 15 bp, Homo sapiens
taggggtgggtcact

SEQ ID NO: 68967 - DNA, 15 bp, Homo sapiens
ttaggggtgggtcac

SEQ ID NO: 68968 - DNA, 15 bp, Homo sapiens
cttaggggtgggtca

SEQ ID NO: 68969 - DNA, 15 bp, Homo sapiens
ccttaggggtgggtc

SEQ ID NO: 68970 - DNA, 15 bp, Homo sapiens
accttaggggtgggt

SEQ ID NO: 68971 - DNA, 15 bp, Homo sapiens
caccttaggggtggg

SEQ ID NO: 68972 - DNA, 15 bp, Homo sapiens
ccaccttaggggtgg

SEQ ID NO: 68973 - DNA, 15 bp, Homo sapiens
accaccttaggggtg

SEQ ID NO: 68974 - DNA, 15 bp, Homo sapiens
gaccaccttaggggt

SEQ ID NO: 68975 - DNA, 15 bp, Homo sapiens
agaccaccttagggg

SEQ ID NO: 68976 - DNA, 15 bp, Homo sapiens
aagaccaccttaggg

SEQ ID NO: 68977 - DNA, 15 bp, Homo sapiens
caagaccaccttagg

SEQ ID NO: 68978 - DNA, 15 bp, Homo sapiens
gcaagaccaccttag

SEQ ID NO: 68979 - DNA, 15 bp, Homo sapiens
ggcaagaccacctta

SEQ ID NO: 68980 - DNA, 15 bp, Homo sapiens
cggcaagaccacctt

SEQ ID NO: 68981 - DNA, 15 bp, Homo sapiens
ccggcaagaccacct

SEQ ID NO: 68982 - DNA, 15 bp, Homo sapiens
gccggcaagaccacc

SEQ ID NO: 68983 - DNA, 15 bp, Homo sapiens
cgccggcaagaccac

SEQ ID NO: 68984 - DNA, 15 bp, Homo sapiens
ccgccggcaagacca

SEQ ID NO: 68985 - DNA, 15 bp, Homo sapiens
cccgccggcaagacc

SEQ ID NO: 68986 - DNA, 15 bp, Homo sapiens
acccgccggcaagac

SEQ ID NO: 68987 - DNA, 15 bp, Homo sapiens
gacccgccggcaaga

SEQ ID NO: 68988 - DNA, 15 bp, Homo sapiens
agacccgccggcaag

SEQ ID NO: 68989 - DNA, 15 bp, Homo sapiens
gagacccgccggcaa

SEQ ID NO: 68990 - DNA, 15 bp, Homo sapiens
cgagacccgccggca

SEQ ID NO: 68991 - DNA, 15 bp, Homo sapiens
tcgagacccgccggc

SEQ ID NO: 68992 - DNA, 15 bp, Homo sapiens
ttcgagacccgccgg

SEQ ID NO: 68993 - DNA, 15 bp, Homo sapiens
cttcgagacccgccg

SEQ ID NO: 68994 - DNA, 15 bp, Homo sapiens
gcttcgagacccgcc

SEQ ID NO: 68995 - DNA, 15 bp, Homo sapiens
agcttcgagacccgc

SEQ ID NO: 68996 - DNA, 15 bp, Homo sapiens
cagcttcgagacccg

SEQ ID NO: 68997 - DNA, 15 bp, Homo sapiens
tcagcttcgagaccc

SEQ ID NO: 68998 - DNA, 15 bp, Homo sapiens
ctcagcttcgagacc

SEQ ID NO: 68999 - DNA, 15 bp, Homo sapiens
actcagcttcgagac

SEQ ID NO: 69000 - DNA, 15 bp, Homo sapiens
aactcagcttcgaga

SEQ ID NO: 69001 - DNA, 15 bp, Homo sapiens
aaactcagcttcgag

SEQ ID NO: 69002 - DNA, 15 bp, Homo sapiens
gaaactcagcttcga

SEQ ID NO: 69003 - DNA, 15 bp, Homo sapiens
tgaaactcagcttcg

SEQ ID NO: 69004 - DNA, 15 bp, Homo sapiens
ttgaaactcagcttc

SEQ ID NO: 69005 - DNA, 15 bp, Homo sapiens
cttgaaactcagctt

SEQ ID NO: 69006 - DNA, 15 bp, Homo sapiens
tcttgaaactcagct

SEQ ID NO: 69007 - DNA, 15 bp, Homo sapiens
gtcttgaaactcagc

SEQ ID NO: 69008 - DNA, 15 bp, Homo sapiens
ggtcttgaaactcag

SEQ ID NO: 69009 - DNA, 15 bp, Homo sapiens
tggtcttgaaactca

SEQ ID NO: 69010 - DNA, 15 bp, Homo sapiens
gtggtcttgaaactc

SEQ ID NO: 69011 - DNA, 15 bp, Homo sapiens
cgtggtcttgaaact

SEQ ID NO: 69012 - DNA, 15 bp, Homo sapiens
ccgtggtcttgaaac

SEQ ID NO: 69013 - DNA, 15 bp, Homo sapiens
tccgtggtcttgaaa

SEQ ID NO: 69014 - DNA, 15 bp, Homo sapiens
atccgtggtcttgaa

SEQ ID NO: 69015 - DNA, 15 bp, Homo sapiens
gatccgtggtcttga

SEQ ID NO: 69016 - DNA, 15 bp, Homo sapiens
agatccgtggtcttg

SEQ ID NO: 69017 - DNA, 15 bp, Homo sapiens
cagatccgtggtctt

SEQ ID NO: 69018 - DNA, 15 bp, Homo sapiens
acagatccgtggtct

SEQ ID NO: 69019 - DNA, 15 bp, Homo sapiens
aacagatccgtggtc

SEQ ID NO: 69020 - DNA, 15 bp, Homo sapiens
gaacagatccgtggt

SEQ ID NO: 69021 - DNA, 15 bp, Homo sapiens
agaacagatccgtgg

SEQ ID NO: 69022 - DNA, 15 bp, Homo sapiens
aagaacagatccgtg

SEQ ID NO: 69023 - DNA, 15 bp, Homo sapiens
taagaacagatccgt

SEQ ID NO: 69024 - DNA, 15 bp, Homo sapiens
ctaagaacagatccg

SEQ ID NO: 69025 - DNA, 15 bp, Homo sapiens
tctaagaacagatcc

SEQ ID NO: 69026 - DNA, 15 bp, Homo sapiens
ttctaagaacagatc

SEQ ID NO: 69027 - DNA, 15 bp, Homo sapiens
attctaagaacagat

SEQ ID NO: 69028 - DNA, 15 bp, Homo sapiens
cattctaagaacaga

SEQ ID NO: 69029 - DNA, 15 bp, Homo sapiens
tcattctaagaacag

SEQ ID NO: 69030 - DNA, 15 bp, Homo sapiens
ttcattctaagaaca

SEQ ID NO: 69031 - DNA, 15 bp, Homo sapiens
attcattctaagaac

SEQ ID NO: 69032 - DNA, 15 bp, Homo sapiens
cattcattctaagaa

SEQ ID NO: 69033 - DNA, 15 bp, Homo sapiens
gcattcattctaaga

SEQ ID NO: 69034 - DNA, 15 bp, Homo sapiens
agcattcattctaag

SEQ ID NO: 69035 - DNA, 15 bp, Homo sapiens
cagcattcattctaa

SEQ ID NO: 69036 - DNA, 15 bp, Homo sapiens
acagcattcattcta

SEQ ID NO: 69037 - DNA, 15 bp, Homo sapiens
aacagcattcattct

SEQ ID NO: 69038 - DNA, 15 bp, Homo sapiens
aaacagcattcattc

SEQ ID NO: 69039 - DNA, 15 bp, Homo sapiens
caaacagcattcatt

SEQ ID NO: 69040 - DNA, 15 bp, Homo sapiens
ccaaacagcattcat

SEQ ID NO: 69041 - DNA, 15 bp, Homo sapiens
cccaaacagcattca

SEQ ID NO: 69042 - DNA, 15 bp, Homo sapiens
ccccaaacagcattc

SEQ ID NO: 69043 - DNA, 15 bp, Homo sapiens
gccccaaacagcatt

SEQ ID NO: 69044 - DNA, 15 bp, Homo sapiens
cgccccaaacagcat

SEQ ID NO: 69045 - DNA, 15 bp, Homo sapiens
ccgccccaaacagca

SEQ ID NO: 69046 - DNA, 15 bp, Homo sapiens
gccgccccaaacagc

SEQ ID NO: 69047 - DNA, 15 bp, Homo sapiens
agccgccccaaacag

SEQ ID NO: 69048 - DNA, 15 bp, Homo sapiens
cagccgccccaaaca

SEQ ID NO: 69049 - DNA, 15 bp, Homo sapiens
ccagccgccccaaac

SEQ ID NO: 69050 - DNA, 15 bp, Homo sapiens
cccagccgccccaaa

SEQ ID NO: 69051 - DNA, 15 bp, Homo sapiens
tcccagccgccccaa

SEQ ID NO: 69052 - DNA, 15 bp, Homo sapiens
ctcccagccgcccca

SEQ ID NO: 69053 - DNA, 15 bp, Homo sapiens
cctcccagccgcccc

SEQ ID NO: 69054 - DNA, 15 bp, Homo sapiens
tcctcccagccgccc

SEQ ID NO: 69055 - DNA, 15 bp, Homo sapiens
ctcctcccagccgcc

SEQ ID NO: 69056 - DNA, 15 bp, Homo sapiens
cctcctcccagccgc

SEQ ID NO: 69057 - DNA, 15 bp, Homo sapiens
ccctcctcccagccg

SEQ ID NO: 69058 - DNA, 15 bp, Homo sapiens
cccctcctcccagcc

SEQ ID NO: 69059 - DNA, 15 bp, Homo sapiens
ccccctcctcccagc

SEQ ID NO: 69060 - DNA, 15 bp, Homo sapiens
accccctcctcccag

SEQ ID NO: 69061 - DNA, 15 bp, Homo sapiens
caccccctcctccca

SEQ ID NO: 69062 - DNA, 15 bp, Homo sapiens
acaccccctcctccc

SEQ ID NO: 69063 - DNA, 15 bp, Homo sapiens
cacaccccctcctcc

SEQ ID NO: 69064 - DNA, 15 bp, Homo sapiens
tcacaccccctcctc

SEQ ID NO: 69065 - DNA, 15 bp, Homo sapiens
atcacaccccctcct

SEQ ID NO: 69066 - DNA, 15 bp, Homo sapiens
catcacaccccctcc

SEQ ID NO: 69067 - DNA, 15 bp, Homo sapiens
ccatcacaccccctc

SEQ ID NO: 69068 - DNA, 15 bp, Homo sapiens
tccatcacaccccct

SEQ ID NO: 69069 - DNA, 15 bp, Homo sapiens
ctccatcacaccccc

SEQ ID NO: 69070 - DNA, 15 bp, Homo sapiens
tctccatcacacccc

SEQ ID NO: 69071 - DNA, 15 bp, Homo sapiens
atctccatcacaccc

SEQ ID NO: 69072 - DNA, 15 bp, Homo sapiens
aatctccatcacacc

SEQ ID NO: 69073 - DNA, 15 bp, Homo sapiens
caatctccatcacac

SEQ ID NO: 69074 - DNA, 15 bp, Homo sapiens
ccaatctccatcaca

SEQ ID NO: 69075 - DNA, 15 bp, Homo sapiens
tccaatctccatcac

SEQ ID NO: 69076 - DNA, 15 bp, Homo sapiens
ctccaatctccatca

SEQ ID NO: 69077 - DNA, 15 bp, Homo sapiens
tctccaatctccatc

SEQ ID NO: 69078 - DNA, 15 bp, Homo sapiens
ttctccaatctccat

SEQ ID NO: 69079 - DNA, 15 bp, Homo sapiens
cttctccaatctcca

SEQ ID NO: 69080 - DNA, 15 bp, Homo sapiens
gcttctccaatctcc

SEQ ID NO: 69081 - DNA, 15 bp, Homo sapiens
agcttctccaatctc

SEQ ID NO: 69082 - DNA, 15 bp, Homo sapiens
cagcttctccaatct

SEQ ID NO: 69083 - DNA, 15 bp, Homo sapiens
tcagcttctccaatc

SEQ ID NO: 69084 - DNA, 15 bp, Homo sapiens
ttcagcttctccaat

SEQ ID NO: 69085 - DNA, 15 bp, Homo sapiens
gttcagcttctccaa

SEQ ID NO: 69086 - DNA, 15 bp, Homo sapiens
ggttcagcttctcca

SEQ ID NO: 69087 - DNA, 15 bp, Homo sapiens
gggttcagcttctcc

SEQ ID NO: 69088 - DNA, 15 bp, Homo sapiens
tgggttcagcttctc

SEQ ID NO: 69089 - DNA, 15 bp, Homo sapiens
gtgggttcagcttct

SEQ ID NO: 69090 - DNA, 15 bp, Homo sapiens
ggtgggttcagcttc

SEQ ID NO: 69091 - DNA, 15 bp, Homo sapiens
aggtgggttcagctt

SEQ ID NO: 69092 - DNA, 15 bp, Homo sapiens
aaggtgggttcagct

SEQ ID NO: 69093 - DNA, 15 bp, Homo sapiens
caaggtgggttcagc

SEQ ID NO: 69094 - DNA, 15 bp, Homo sapiens
ccaaggtgggttcag

SEQ ID NO: 69095 - DNA, 15 bp, Homo sapiens
gccaaggtgggttca

SEQ ID NO: 69096 - DNA, 15 bp, Homo sapiens
ggccaaggtgggttc

SEQ ID NO: 69097 - DNA, 15 bp, Homo sapiens
gggccaaggtgggtt

SEQ ID NO: 69098 - DNA, 15 bp, Homo sapiens
ggggccaaggtgggt

SEQ ID NO: 69099 - DNA, 15 bp, Homo sapiens
tggggccaaggtggg

SEQ ID NO: 69100 - DNA, 15 bp, Homo sapiens
atggggccaaggtgg

SEQ ID NO: 69101 - DNA, 15 bp, Homo sapiens
gatggggccaaggtg

SEQ ID NO: 69102 - DNA, 15 bp, Homo sapiens
ggatggggccaaggt

SEQ ID NO: 69103 - DNA, 15 bp, Homo sapiens
gggatggggccaagg

SEQ ID NO: 69104 - DNA, 15 bp, Homo sapiens
tgggatggggccaag

SEQ ID NO: 69105 - DNA, 15 bp, Homo sapiens
ttgggatggggccaa

SEQ ID NO: 69106 - DNA, 15 bp, Homo sapiens
gttgggatggggcca

SEQ ID NO: 69107 - DNA, 15 bp, Homo sapiens
cgttgggatggggcc

SEQ ID NO: 69108 - DNA, 15 bp, Homo sapiens
ccgttgggatggggc

SEQ ID NO: 69109 - DNA, 15 bp, Homo sapiens
gccgttgggatgggg

SEQ ID NO: 69110 - DNA, 15 bp, Homo sapiens
ggccgttgggatggg

SEQ ID NO: 69111 - DNA, 15 bp, Homo sapiens
gggccgttgggatgg

SEQ ID NO: 69112 - DNA, 15 bp, Homo sapiens
ggggccgttgggatg

SEQ ID NO: 69113 - DNA, 15 bp, Homo sapiens
tggggccgttgggat

SEQ ID NO: 69114 - DNA, 15 bp, Homo sapiens
atggggccgttggga

SEQ ID NO: 69115 - DNA, 15 bp, Homo sapiens
gatggggccgttggg

SEQ ID NO: 69116 - DNA, 15 bp, Homo sapiens
agatggggccgttgg

SEQ ID NO: 69117 - DNA, 15 bp, Homo sapiens
aagatggggccgttg

SEQ ID NO: 69118 - DNA, 15 bp, Homo sapiens
caagatggggccgtt

SEQ ID NO: 69119 - DNA, 15 bp, Homo sapiens
ccaagatggggccgt

SEQ ID NO: 69120 - DNA, 15 bp, Homo sapiens
tccaagatggggccg

SEQ ID NO: 69121 - DNA, 15 bp, Homo sapiens
atccaagatggggcc

SEQ ID NO: 69122 - DNA, 15 bp, Homo sapiens
gatccaagatggggc

SEQ ID NO: 69123 - DNA, 15 bp, Homo sapiens
ggatccaagatgggg

SEQ ID NO: 69124 - DNA, 15 bp, Homo sapiens
cggatccaagatggg

SEQ ID NO: 69125 - DNA, 15 bp, Homo sapiens
gcggatccaagatgg

SEQ ID NO: 69126 - DNA, 15 bp, Homo sapiens
ggcggatccaagatg

SEQ ID NO: 69127 - DNA, 15 bp, Homo sapiens
tggcggatccaagat

SEQ ID NO: 69128 - DNA, 15 bp, Homo sapiens
gtggcggatccaaga

SEQ ID NO: 69129 - DNA, 15 bp, Homo sapiens
agtggcggatccaag

SEQ ID NO: 69130 - DNA, 15 bp, Homo sapiens
cagtggcggatccaa

SEQ ID NO: 69131 - DNA, 15 bp, Homo sapiens
ccagtggcggatcca

SEQ ID NO: 69132 - DNA, 15 bp, Homo sapiens
cccagtggcggatcc

SEQ ID NO: 69133 - DNA, 15 bp, Homo sapiens
gcccagtggcggatc

SEQ ID NO: 69134 - DNA, 15 bp, Homo sapiens
cgcccagtggcggat

SEQ ID NO: 69135 - DNA, 15 bp, Homo sapiens
tcgcccagtggcgga

SEQ ID NO: 69136 - DNA, 15 bp, Homo sapiens
ctcgcccagtggcgg

SEQ ID NO: 69137 - DNA, 15 bp, Homo sapiens
cctcgcccagtggcg

SEQ ID NO: 69138 - DNA, 15 bp, Homo sapiens
ccctcgcccagtggc

SEQ ID NO: 69139 - DNA, 15 bp, Homo sapiens
accctcgcccagtgg

SEQ ID NO: 69140 - DNA, 15 bp, Homo sapiens
gaccctcgcccagtg

SEQ ID NO: 69141 - DNA, 15 bp, Homo sapiens
agaccctcgcccagt

SEQ ID NO: 69142 - DNA, 15 bp, Homo sapiens
cagaccctcgcccag

SEQ ID NO: 69143 - DNA, 15 bp, Homo sapiens
ccagaccctcgccca

SEQ ID NO: 69144 - DNA, 15 bp, Homo sapiens
tccagaccctcgccc

SEQ ID NO: 69145 - DNA, 15 bp, Homo sapiens
gtccagaccctcgcc

SEQ ID NO: 69146 - DNA, 15 bp, Homo sapiens
tgtccagaccctcgc

SEQ ID NO: 69147 - DNA, 15 bp, Homo sapiens
gtgtccagaccctcg

SEQ ID NO: 69148 - DNA, 15 bp, Homo sapiens
ggtgtccagaccctc

SEQ ID NO: 69149 - DNA, 15 bp, Homo sapiens
aggtgtccagaccct

SEQ ID NO: 69150 - DNA, 15 bp, Homo sapiens
caggtgtccagaccc

SEQ ID NO: 69151 - DNA, 15 bp, Homo sapiens
ccaggtgtccagacc

SEQ ID NO: 69152 - DNA, 15 bp, Homo sapiens
gccaggtgtccagac

SEQ ID NO: 69153 - DNA, 15 bp, Homo sapiens
agccaggtgtccaga

SEQ ID NO: 69154 - DNA, 15 bp, Homo sapiens
cagccaggtgtccag

SEQ ID NO: 69155 - DNA, 15 bp, Homo sapiens
ccagccaggtgtcca

SEQ ID NO: 69156 - DNA, 15 bp, Homo sapiens
accagccaggtgtcc

SEQ ID NO: 69157 - DNA, 15 bp, Homo sapiens
gaccagccaggtgtc

SEQ ID NO: 69158 - DNA, 15 bp, Homo sapiens
agaccagccaggtgt

SEQ ID NO: 69159 - DNA, 15 bp, Homo sapiens
gagaccagccaggtg

SEQ ID NO: 69160 - DNA, 15 bp, Homo sapiens
ggagaccagccaggt

SEQ ID NO: 69161 - DNA, 15 bp, Homo sapiens
tggagaccagccagg

SEQ ID NO: 69162 - DNA, 15 bp, Homo sapiens
gtggagaccagccag

SEQ ID NO: 69163 - DNA, 15 bp, Homo sapiens
ggtggagaccagcca

SEQ ID NO: 69164 - DNA, 15 bp, Homo sapiens
aggtggagaccagcc

SEQ ID NO: 69165 - DNA, 15 bp, Homo sapiens
gaggtggagaccagc

SEQ ID NO: 69166 - DNA, 15 bp, Homo sapiens
agaggtggagaccag

SEQ ID NO: 69167 - DNA, 15 bp, Homo sapiens
aagaggtggagacca

SEQ ID NO: 69168 - DNA, 15 bp, Homo sapiens
caagaggtggagacc

SEQ ID NO: 69169 - DNA, 15 bp, Homo sapiens
acaagaggtggagac

SEQ ID NO: 69170 - DNA, 15 bp, Homo sapiens
gacaagaggtggaga

SEQ ID NO: 69171 - DNA, 15 bp, Homo sapiens
tgacaagaggtggag

SEQ ID NO: 69172 - DNA, 15 bp, Homo sapiens
ctgacaagaggtgga

SEQ ID NO: 69173 - DNA, 15 bp, Homo sapiens
gctgacaagaggtgg

SEQ ID NO: 69174 - DNA, 15 bp, Homo sapiens
ggctgacaagaggtg

SEQ ID NO: 69175 - DNA, 15 bp, Homo sapiens
aggctgacaagaggt

SEQ ID NO: 69176 - DNA, 15 bp, Homo sapiens
caggctgacaagagg

SEQ ID NO: 69177 - DNA, 15 bp, Homo sapiens
gcaggctgacaagag

SEQ ID NO: 69178 - DNA, 15 bp, Homo sapiens
agcaggctgacaaga

SEQ ID NO: 69179 - DNA, 15 bp, Homo sapiens
gagcaggctgacaag

SEQ ID NO: 69180 - DNA, 15 bp, Homo sapiens
agagcaggctgacaa

SEQ ID NO: 69181 - DNA, 15 bp, Homo sapiens
gagagcaggctgaca

SEQ ID NO: 69182 - DNA, 15 bp, Homo sapiens
agagagcaggctgac

SEQ ID NO: 69183 - DNA, 15 bp, Homo sapiens
gagagagcaggctga

SEQ ID NO: 69184 - DNA, 15 bp, Homo sapiens
agagagagcaggctg

SEQ ID NO: 69185 - DNA, 15 bp, Homo sapiens
cagagagagcaggct

SEQ ID NO: 69186 - DNA, 15 bp, Homo sapiens
ccagagagagcaggc

SEQ ID NO: 69187 - DNA, 15 bp, Homo sapiens
accagagagagcagg

SEQ ID NO: 69188 - DNA, 15 bp, Homo sapiens
gaccagagagagcag

SEQ ID NO: 69189 - DNA, 15 bp, Homo sapiens
tgaccagagagagca

SEQ ID NO: 69190 - DNA, 15 bp, Homo sapiens
ctgaccagagagagc

SEQ ID NO: 69191 - DNA, 15 bp, Homo sapiens
cctgaccagagagag

SEQ ID NO: 69192 - DNA, 15 bp, Homo sapiens
tcctgaccagagaga

SEQ ID NO: 69193 - DNA, 15 bp, Homo sapiens
atcctgaccagagag

SEQ ID NO: 69194 - DNA, 15 bp, Homo sapiens
aatcctgaccagaga

SEQ ID NO: 69195 - DNA, 15 bp, Homo sapiens
caatcctgaccagag

SEQ ID NO: 69196 - DNA, 15 bp, Homo sapiens
ccaatcctgaccaga

SEQ ID NO: 69197 - DNA, 15 bp, Homo sapiens
tccaatcctgaccag

SEQ ID NO: 69198 - DNA, 15 bp, Homo sapiens
gtccaatcctgacca

SEQ ID NO: 69199 - DNA, 15 bp, Homo sapiens
agtccaatcctgacc

SEQ ID NO: 69200 - DNA, 15 bp, Homo sapiens
gagtccaatcctgac

SEQ ID NO: 69201 - DNA, 15 bp, Homo sapiens
ggagtccaatcctga

SEQ ID NO: 69202 - DNA, 15 bp, Homo sapiens
gggagtccaatcctg

SEQ ID NO: 69203 - DNA, 15 bp, Homo sapiens
agggagtccaatcct

SEQ ID NO: 69204 - DNA, 15 bp, Homo sapiens
gagggagtccaatcc

SEQ ID NO: 69205 - DNA, 15 bp, Homo sapiens
cgagggagtccaatc

SEQ ID NO: 69206 - DNA, 15 bp, Homo sapiens
ccgagggagtccaat

SEQ ID NO: 69207 - DNA, 15 bp, Homo sapiens
cccgagggagtccaa

SEQ ID NO: 69208 - DNA, 15 bp, Homo sapiens
ccccgagggagtcca

SEQ ID NO: 69209 - DNA, 15 bp, Homo sapiens
accccgagggagtcc

SEQ ID NO: 69210 - DNA, 15 bp, Homo sapiens
aaccccgagggagtc

SEQ ID NO: 69211 - DNA, 15 bp, Homo sapiens
aaaccccgagggagt

SEQ ID NO: 69212 - DNA, 15 bp, Homo sapiens
gaaaccccgagggag

SEQ ID NO: 69213 - DNA, 15 bp, Homo sapiens
ggaaaccccgaggga

SEQ ID NO: 69214 - DNA, 15 bp, Homo sapiens
aggaaaccccgaggg

SEQ ID NO: 69215 - DNA, 15 bp, Homo sapiens
gaggaaaccccgagg

SEQ ID NO: 69216 - DNA, 15 bp, Homo sapiens
tgaggaaaccccgag

SEQ ID NO: 69217 - DNA, 15 bp, Homo sapiens
ctgaggaaaccccga

SEQ ID NO: 69218 - DNA, 15 bp, Homo sapiens
gctgaggaaaccccg

SEQ ID NO: 69219 - DNA, 15 bp, Homo sapiens
cgctgaggaaacccc

SEQ ID NO: 69220 - DNA, 15 bp, Homo sapiens
tcgctgaggaaaccc

SEQ ID NO: 69221 - DNA, 15 bp, Homo sapiens
gtcgctgaggaaacc

SEQ ID NO: 69222 - DNA, 15 bp, Homo sapiens
cgtcgctgaggaaac

SEQ ID NO: 69223 - DNA, 15 bp, Homo sapiens
gcgtcgctgaggaaa

SEQ ID NO: 69224 - DNA, 15 bp, Homo sapiens
ggcgtcgctgaggaa

SEQ ID NO: 69225 - DNA, 15 bp, Homo sapiens
cggcgtcgctgagga

SEQ ID NO: 69226 - DNA, 15 bp, Homo sapiens
gcggcgtcgctgagg

SEQ ID NO: 69227 - DNA, 15 bp, Homo sapiens
cgcggcgtcgctgag

SEQ ID NO: 69228 - DNA, 15 bp, Homo sapiens
acgcggcgtcgctga

SEQ ID NO: 69229 - DNA, 15 bp, Homo sapiens
cacgcggcgtcgctg

SEQ ID NO: 69230 - DNA, 15 bp, Homo sapiens
ccacgcggcgtcgct

SEQ ID NO: 69231 - DNA, 15 bp, Homo sapiens
accacgcggcgtcgc

SEQ ID NO: 69232 - DNA, 15 bp, Homo sapiens
gaccacgcggcgtcg

SEQ ID NO: 69233 - DNA, 15 bp, Homo sapiens
agaccacgcggcgtc

SEQ ID NO: 69234 - DNA, 15 bp, Homo sapiens
cagaccacgcggcgt

SEQ ID NO: 69235 - DNA, 15 bp, Homo sapiens
ccagaccacgcggcg

SEQ ID NO: 69236 - DNA, 15 bp, Homo sapiens
cccagaccacgcggc

SEQ ID NO: 69237 - DNA, 15 bp, Homo sapiens
ccccagaccacgcgg

SEQ ID NO: 69238 - DNA, 15 bp, Homo sapiens
cccccagaccacgcg

SEQ ID NO: 69239 - DNA, 15 bp, Homo sapiens
gcccccagaccacgc

SEQ ID NO: 69240 - DNA, 15 bp, Homo sapiens
agcccccagaccacg

SEQ ID NO: 69241 - DNA, 15 bp, Homo sapiens
gagcccccagaccac

SEQ ID NO: 69242 - DNA, 15 bp, Homo sapiens
cgagcccccagacca

SEQ ID NO: 69243 - DNA, 15 bp, Homo sapiens
ccgagcccccagacc

SEQ ID NO: 69244 - DNA, 15 bp, Homo sapiens
tccgagcccccagac

SEQ ID NO: 69245 - DNA, 15 bp, Homo sapiens
ctccgagcccccaga

SEQ ID NO: 69246 - DNA, 15 bp, Homo sapiens
tctccgagcccccag

SEQ ID NO: 69247 - DNA, 15 bp, Homo sapiens
gtctccgagccccca

SEQ ID NO: 69248 - DNA, 15 bp, Homo sapiens
ggtctccgagccccc

SEQ ID NO: 69249 - DNA, 15 bp, Homo sapiens
gggtctccgagcccc

SEQ ID NO: 69250 - DNA, 15 bp, Homo sapiens
agggtctccgagccc

SEQ ID NO: 69251 - DNA, 15 bp, Homo sapiens
gagggtctccgagcc

SEQ ID NO: 69252 - DNA, 15 bp, Homo sapiens
ggagggtctccgagc

SEQ ID NO: 69253 - DNA, 15 bp, Homo sapiens
aggagggtctccgag

SEQ ID NO: 69254 - DNA, 15 bp, Homo sapiens
gaggagggtctccga

SEQ ID NO: 69255 - DNA, 15 bp, Homo sapiens
ggaggagggtctccg

SEQ ID NO: 69256 - DNA, 15 bp, Homo sapiens
aggaggagggtctcc

SEQ ID NO: 69257 - DNA, 15 bp, Homo sapiens
gaggaggagggtctc

SEQ ID NO: 69258 - DNA, 15 bp, Homo sapiens
ggaggaggagggtct

SEQ ID NO: 69259 - DNA, 15 bp, Homo sapiens
gggaggaggagggtc

SEQ ID NO: 69260 - DNA, 15 bp, Homo sapiens
ggggaggaggagggt

SEQ ID NO: 69261 - DNA, 15 bp, Homo sapiens
tggggaggaggaggg

SEQ ID NO: 69262 - DNA, 15 bp, Homo sapiens
ttggggaggaggagg

SEQ ID NO: 69263 - DNA, 15 bp, Homo sapiens
gttggggaggaggag

SEQ ID NO: 69264 - DNA, 15 bp, Homo sapiens
ggttggggaggagga

SEQ ID NO: 69265 - DNA, 15 bp, Homo sapiens
gggttggggaggagg

SEQ ID NO: 69266 - DNA, 15 bp, Homo sapiens
cgggttggggaggag

SEQ ID NO: 69267 - DNA, 15 bp, Homo sapiens
gcgggttggggagga

SEQ ID NO: 69268 - DNA, 15 bp, Homo sapiens
ggcgggttggggagg

SEQ ID NO: 69269 - DNA, 15 bp, Homo sapiens
gggcgggttggggag

SEQ ID NO: 69270 - DNA, 15 bp, Homo sapiens
cgggcgggttgggga

SEQ ID NO: 69271 - DNA, 15 bp, Homo sapiens
gcgggcgggttgggg

SEQ ID NO: 69272 - DNA, 15 bp, Homo sapiens
ggcgggcgggttggg

SEQ ID NO: 69273 - DNA, 15 bp, Homo sapiens
gggcgggcgggttgg

SEQ ID NO: 69274 - DNA, 15 bp, Homo sapiens
ggggcgggcgggttg

SEQ ID NO: 69275 - DNA, 15 bp, Homo sapiens
gggggcgggcgggtt

SEQ ID NO: 69276 - DNA, 15 bp, Homo sapiens
cgggggcgggcgggt

SEQ ID NO: 69277 - DNA, 15 bp, Homo sapiens
ccgggggcgggcggg

SEQ ID NO: 69278 - DNA, 15 bp, Homo sapiens
gccgggggcgggcgg

SEQ ID NO: 69279 - DNA, 15 bp, Homo sapiens
ggccgggggcgggcg

SEQ ID NO: 69280 - DNA, 15 bp, Homo sapiens
gggccgggggcgggc

SEQ ID NO: 69281 - DNA, 15 bp, Homo sapiens
agggccgggggcggg

SEQ ID NO: 69282 - DNA, 15 bp, Homo sapiens
gagggccgggggcgg

SEQ ID NO: 69283 - DNA, 15 bp, Homo sapiens
ggagggccgggggcg

SEQ ID NO: 69284 - DNA, 15 bp, Homo sapiens
gggagggccgggggc

SEQ ID NO: 69285 - DNA, 15 bp, Homo sapiens
cgggagggccggggg

SEQ ID NO: 69286 - DNA, 15 bp, Homo sapiens
gcgggagggccgggg

SEQ ID NO: 69287 - DNA, 15 bp, Homo sapiens
ggcgggagggccggg

SEQ ID NO: 69288 - DNA, 15 bp, Homo sapiens
cggcgggagggccgg

SEQ ID NO: 69289 - DNA, 15 bp, Homo sapiens
gcggcgggagggccg

SEQ ID NO: 69290 - DNA, 15 bp, Homo sapiens
ggcggcgggagggcc

SEQ ID NO: 69291 - DNA, 15 bp, Homo sapiens
cggcggcgggagggc

SEQ ID NO: 69292 - DNA, 15 bp, Homo sapiens
gcggcggcgggaggg

SEQ ID NO: 69293 - DNA, 15 bp, Homo sapiens
cgcggcggcgggagg

SEQ ID NO: 69294 - DNA, 15 bp, Homo sapiens
ccgcggcggcgggag

SEQ ID NO: 69295 - DNA, 15 bp, Homo sapiens
gccgcggcggcggga

SEQ ID NO: 69296 - DNA, 15 bp, Homo sapiens
ggccgcggcggcggg

SEQ ID NO: 69297 - DNA, 15 bp, Homo sapiens
aggccgcggcggcgg

SEQ ID NO: 69298 - DNA, 15 bp, Homo sapiens
gaggccgcggcggcg

SEQ ID NO: 69299 - DNA, 15 bp, Homo sapiens
ggaggccgcggcggc

SEQ ID NO: 69300 - DNA, 15 bp, Homo sapiens
gggaggccgcggcgg

SEQ ID NO: 69301 - DNA, 15 bp, Homo sapiens
tgggaggccgcggcg

SEQ ID NO: 69302 - DNA, 15 bp, Homo sapiens
gtgggaggccgcggc

SEQ ID NO: 69303 - DNA, 15 bp, Homo sapiens
cgtgggaggccgcgg

SEQ ID NO: 69304 - DNA, 15 bp, Homo sapiens
acgtgggaggccgcg

SEQ ID NO: 69305 - DNA, 15 bp, Homo sapiens
tacgtgggaggccgc

SEQ ID NO: 69306 - DNA, 15 bp, Homo sapiens
ctacgtgggaggccg

SEQ ID NO: 69307 - DNA, 15 bp, Homo sapiens
gctacgtgggaggcc

SEQ ID NO: 69308 - DNA, 15 bp, Homo sapiens
cgctacgtgggaggc

SEQ ID NO: 69309 - DNA, 15 bp, Homo sapiens
acgctacgtgggagg

SEQ ID NO: 69310 - DNA, 15 bp, Homo sapiens
aacgctacgtgggag

SEQ ID NO: 69311 - DNA, 15 bp, Homo sapiens
gaacgctacgtggga

SEQ ID NO: 69312 - DNA, 15 bp, Homo sapiens
agaacgctacgtggg

SEQ ID NO: 69313 - DNA, 15 bp, Homo sapiens
cagaacgctacgtgg

SEQ ID NO: 69314 - DNA, 15 bp, Homo sapiens
tcagaacgctacgtg

SEQ ID NO: 69315 - DNA, 15 bp, Homo sapiens
ttcagaacgctacgt

SEQ ID NO: 69316 - DNA, 15 bp, Homo sapiens
gttcagaacgctacg

SEQ ID NO: 69317 - DNA, 15 bp, Homo sapiens
ggttcagaacgctac

SEQ ID NO: 69318 - DNA, 15 bp, Homo sapiens
gggttcagaacgcta

SEQ ID NO: 69319 - DNA, 15 bp, Homo sapiens
cgggttcagaacgct

SEQ ID NO: 69320 - DNA, 15 bp, Homo sapiens
gcgggttcagaacgc

SEQ ID NO: 69321 - DNA, 15 bp, Homo sapiens
agcgggttcagaacg

SEQ ID NO: 69322 - DNA, 15 bp, Homo sapiens
gagcgggttcagaac

SEQ ID NO: 69323 - DNA, 15 bp, Homo sapiens
tgagcgggttcagaa

SEQ ID NO: 69324 - DNA, 15 bp, Homo sapiens
ctgagcgggttcaga

SEQ ID NO: 69325 - DNA, 15 bp, Homo sapiens
gctgagcgggttcag

SEQ ID NO: 69326 - DNA, 15 bp, Homo sapiens
cgctgagcgggttca

SEQ ID NO: 69327 - DNA, 15 bp, Homo sapiens
gcgctgagcgggttc

SEQ ID NO: 69328 - DNA, 15 bp, Homo sapiens
agcgctgagcgggtt

SEQ ID NO: 69329 - DNA, 15 bp, Homo sapiens
tagcgctgagcgggt

SEQ ID NO: 69330 - DNA, 15 bp, Homo sapiens
ttagcgctgagcggg

SEQ ID NO: 69331 - DNA, 15 bp, Homo sapiens
cttagcgctgagcgg

SEQ ID NO: 69332 - DNA, 15 bp, Homo sapiens
ccttagcgctgagcg

SEQ ID NO: 69333 - DNA, 15 bp, Homo sapiens
gccttagcgctgagc

SEQ ID NO: 69334 - DNA, 15 bp, Homo sapiens
tgccttagcgctgag

SEQ ID NO: 69335 - DNA, 15 bp, Homo sapiens
ttgccttagcgctga

SEQ ID NO: 69336 - DNA, 15 bp, Homo sapiens
cttgccttagcgctg

SEQ ID NO: 69337 - DNA, 15 bp, Homo sapiens
tcttgccttagcgct

SEQ ID NO: 69338 - DNA, 15 bp, Homo sapiens
ttcttgccttagcgc

SEQ ID NO: 69339 - DNA, 15 bp, Homo sapiens
gttcttgccttagcg

SEQ ID NO: 69340 - DNA, 15 bp, Homo sapiens
ggttcttgccttagc

SEQ ID NO: 69341 - DNA, 15 bp, Homo sapiens
tggttcttgccttag

SEQ ID NO: 69342 - DNA, 15 bp, Homo sapiens
ctggttcttgcctta

SEQ ID NO: 69343 - DNA, 15 bp, Homo sapiens
gctggttcttgcctt

SEQ ID NO: 69344 - DNA, 15 bp, Homo sapiens
cgctggttcttgcct

SEQ ID NO: 69345 - DNA, 15 bp, Homo sapiens
acgctggttcttgcc

SEQ ID NO: 69346 - DNA, 15 bp, Homo sapiens
cacgctggttcttgc

SEQ ID NO: 69347 - DNA, 15 bp, Homo sapiens
ccacgctggttcttg

SEQ ID NO: 69348 - DNA, 15 bp, Homo sapiens
cccacgctggttctt

SEQ ID NO: 69349 - DNA, 15 bp, Homo sapiens
ccccacgctggttct

SEQ ID NO: 69350 - DNA, 15 bp, Homo sapiens
tccccacgctggttc

SEQ ID NO: 69351 - DNA, 15 bp, Homo sapiens
ctccccacgctggtt

SEQ ID NO: 69352 - DNA, 15 bp, Homo sapiens
gctccccacgctggt

SEQ ID NO: 69353 - DNA, 15 bp, Homo sapiens
cgctccccacgctgg

SEQ ID NO: 69354 - DNA, 15 bp, Homo sapiens
ccgctccccacgctg

SEQ ID NO: 69355 - DNA, 15 bp, Homo sapiens
cccgctccccacgct

SEQ ID NO: 69356 - DNA, 15 bp, Homo sapiens
gcccgctccccacgc

SEQ ID NO: 69357 - DNA, 15 bp, Homo sapiens
ggcccgctccccacg

SEQ ID NO: 69358 - DNA, 15 bp, Homo sapiens
tggcccgctccccac

SEQ ID NO: 69359 - DNA, 15 bp, Homo sapiens
ctggcccgctcccca

SEQ ID NO: 69360 - DNA, 15 bp, Homo sapiens
cctggcccgctcccc

SEQ ID NO: 69361 - DNA, 15 bp, Homo sapiens
gcctggcccgctccc

SEQ ID NO: 69362 - DNA, 15 bp, Homo sapiens
cgcctggcccgctcc

SEQ ID NO: 69363 - DNA, 15 bp, Homo sapiens
tcgcctggcccgctc

SEQ ID NO: 69364 - DNA, 15 bp, Homo sapiens
ctcgcctggcccgct

SEQ ID NO: 69365 - DNA, 15 bp, Homo sapiens
gctcgcctggcccgc

SEQ ID NO: 69366 - DNA, 15 bp, Homo sapiens
tgctcgcctggcccg

SEQ ID NO: 69367 - DNA, 15 bp, Homo sapiens
ctgctcgcctggccc

SEQ ID NO: 69368 - DNA, 15 bp, Homo sapiens
tctgctcgcctggcc

SEQ ID NO: 69369 - DNA, 15 bp, Homo sapiens
ctctgctcgcctggc

SEQ ID NO: 69370 - DNA, 15 bp, Homo sapiens
cctctgctcgcctgg

SEQ ID NO: 69371 - DNA, 15 bp, Homo sapiens
gcctctgctcgcctg

SEQ ID NO: 69372 - DNA, 15 bp, Homo sapiens
agcctctgctcgcct

SEQ ID NO: 69373 - DNA, 15 bp, Homo sapiens
gagcctctgctcgcc

SEQ ID NO: 69374 - DNA, 15 bp, Homo sapiens
agagcctctgctcgc

SEQ ID NO: 69375 - DNA, 15 bp, Homo sapiens
tagagcctctgctcg

SEQ ID NO: 69376 - DNA, 15 bp, Homo sapiens
ttagagcctctgctc

SEQ ID NO: 69377 - DNA, 15 bp, Homo sapiens
ttggctcgctcaatg

SEQ ID NO: 69378 - DNA, 15 bp, Homo sapiens
cttggctcgctcaat

SEQ ID NO: 69379 - DNA, 15 bp, Homo sapiens
tcttggctcgctcaa

SEQ ID NO: 69380 - DNA, 15 bp, Homo sapiens
gtcttggctcgctca

SEQ ID NO: 69381 - DNA, 15 bp, Homo sapiens
tgtcttggctcgctc

SEQ ID NO: 69382 - DNA, 15 bp, Homo sapiens
gtgtcttggctcgct

SEQ ID NO: 69383 - DNA, 15 bp, Homo sapiens
cgtgtcttggctcgc

SEQ ID NO: 69384 - DNA, 15 bp, Homo sapiens
acgtgtcttggctcg

SEQ ID NO: 69385 - DNA, 15 bp, Homo sapiens
aacgtgtcttggctc

SEQ ID NO: 69386 - DNA, 15 bp, Homo sapiens
aaacgtgtcttggct

SEQ ID NO: 69387 - DNA, 15 bp, Homo sapiens
gaaacgtgtcttggc

SEQ ID NO: 69388 - DNA, 15 bp, Homo sapiens
cgaaacgtgtcttgg

SEQ ID NO: 69389 - DNA, 15 bp, Homo sapiens
tcgaaacgtgtcttg

SEQ ID NO: 69390 - DNA, 15 bp, Homo sapiens
gtcgaaacgtgtctt

SEQ ID NO: 69391 - DNA, 15 bp, Homo sapiens
ggtcgaaacgtgtct

SEQ ID NO: 69392 - DNA, 15 bp, Homo sapiens
gggtcgaaacgtgtc

SEQ ID NO: 69393 - DNA, 15 bp, Homo sapiens
cgggtcgaaacgtgt

SEQ ID NO: 69394 - DNA, 15 bp, Homo sapiens
gcgggtcgaaacgtg

SEQ ID NO: 69395 - DNA, 15 bp, Homo sapiens
ggcgggtcgaaacgt

SEQ ID NO: 69396 - DNA, 15 bp, Homo sapiens
cggcgggtcgaaacg

SEQ ID NO: 69397 - DNA, 15 bp, Homo sapiens
gcggcgggtcgaaac

SEQ ID NO: 69398 - DNA, 15 bp, Homo sapiens
agcggcgggtcgaaa

SEQ ID NO: 69399 - DNA, 15 bp, Homo sapiens
gagcggcgggtcgaa

SEQ ID NO: 69400 - DNA, 15 bp, Homo sapiens
ggagcggcgggtcga

SEQ ID NO: 69401 - DNA, 15 bp, Homo sapiens
gggagcggcgggtcg

SEQ ID NO: 69402 - DNA, 15 bp, Homo sapiens
ggggagcggcgggtc

SEQ ID NO: 69403 - DNA, 15 bp, Homo sapiens
aggggagcggcgggt

SEQ ID NO: 69404 - DNA, 15 bp, Homo sapiens
gaggggagcggcggg

SEQ ID NO: 69405 - DNA, 15 bp, Homo sapiens
ggaggggagcggcgg

SEQ ID NO: 69406 - DNA, 15 bp, Homo sapiens
gggaggggagcggcg

SEQ ID NO: 69407 - DNA, 15 bp, Homo sapiens
cgggaggggagcggc

SEQ ID NO: 69408 - DNA, 15 bp, Homo sapiens
ccgggaggggagcgg

SEQ ID NO: 69409 - DNA, 15 bp, Homo sapiens
cccgggaggggagcg

SEQ ID NO: 69410 - DNA, 15 bp, Homo sapiens
ccccgggaggggagc

SEQ ID NO: 69411 - DNA, 15 bp, Homo sapiens
cccccgggaggggag

SEQ ID NO: 69412 - DNA, 15 bp, Homo sapiens
tcccccgggagggga

SEQ ID NO: 69413 - DNA, 15 bp, Homo sapiens
ttcccccgggagggg

SEQ ID NO: 69414 - DNA, 15 bp, Homo sapiens
cttcccccgggaggg

SEQ ID NO: 69415 - DNA, 15 bp, Homo sapiens
gcttcccccgggagg

SEQ ID NO: 69416 - DNA, 15 bp, Homo sapiens
tgcttcccccgggag

SEQ ID NO: 69417 - DNA, 15 bp, Homo sapiens
ctgcttcccccggga

SEQ ID NO: 69418 - DNA, 15 bp, Homo sapiens
cctgcttcccccggg

SEQ ID NO: 69419 - DNA, 15 bp, Homo sapiens
tcctgcttcccccgg

SEQ ID NO: 69420 - DNA, 15 bp, Homo sapiens
gtcctgcttcccccg

SEQ ID NO: 69421 - DNA, 15 bp, Homo sapiens
agtcctgcttccccc

SEQ ID NO: 69422 - DNA, 15 bp, Homo sapiens
aagtcctgcttcccc

SEQ ID NO: 69423 - DNA, 15 bp, Homo sapiens
gaagtcctgcttccc

SEQ ID NO: 69424 - DNA, 15 bp, Homo sapiens
ggaagtcctgcttcc

SEQ ID NO: 69425 - DNA, 15 bp, Homo sapiens
cggaagtcctgcttc

SEQ ID NO: 69426 - DNA, 15 bp, Homo sapiens
gcggaagtcctgctt

SEQ ID NO: 69427 - DNA, 15 bp, Homo sapiens
tgcggaagtcctgct

SEQ ID NO: 69428 - DNA, 15 bp, Homo sapiens
atgcggaagtcctgc

SEQ ID NO: 69429 - DNA, 15 bp, Homo sapiens
gatgcggaagtcctg

SEQ ID NO: 69430 - DNA, 15 bp, Homo sapiens
agatgcggaagtcct

SEQ ID NO: 69431 - DNA, 15 bp, Homo sapiens
aagatgcggaagtcc

SEQ ID NO: 69432 - DNA, 15 bp, Homo sapiens
aaagatgcggaagtc

SEQ ID NO: 69433 - DNA, 15 bp, Homo sapiens
caaagatgcggaagt

SEQ ID NO: 69434 - DNA, 15 bp, Homo sapiens
tcaaagatgcggaag

SEQ ID NO: 69435 - DNA, 15 bp, Homo sapiens
ttcaaagatgcggaa

SEQ ID NO: 69436 - DNA, 15 bp, Homo sapiens
tttcaaagatgcgga

SEQ ID NO: 69437 - DNA, 15 bp, Homo sapiens
ttttcaaagatgcgg

SEQ ID NO: 69438 - DNA, 15 bp, Homo sapiens
attttcaaagatgcg

SEQ ID NO: 69439 - DNA, 15 bp, Homo sapiens
tattttcaaagatgc

SEQ ID NO: 69440 - DNA, 15 bp, Homo sapiens
gtattttcaaagatg

SEQ ID NO: 69441 - DNA, 15 bp, Homo sapiens
agtattttcaaagat

SEQ ID NO: 69442 - DNA, 15 bp, Homo sapiens
cagtattttcaaaga

SEQ ID NO: 69443 - DNA, 15 bp, Homo sapiens
acagtattttcaaag

SEQ ID NO: 69444 - DNA, 15 bp, Homo sapiens
gacagtattttcaaa

SEQ ID NO: 69445 - DNA, 15 bp, Homo sapiens
tgacagtattttcaa

SEQ ID NO: 69446 - DNA, 15 bp, Homo sapiens
ttgacagtattttca

SEQ ID NO: 69447 - DNA, 15 bp, Homo sapiens
cttgacagtattttc

SEQ ID NO: 69448 - DNA, 15 bp, Homo sapiens
acttgacagtatttt

SEQ ID NO: 69449 - DNA, 15 bp, Homo sapiens
cacttgacagtattt

SEQ ID NO: 69450 - DNA, 15 bp, Homo sapiens
gcacttgacagtatt

SEQ ID NO: 69451 - DNA, 15 bp, Homo sapiens
cgcacttgacagtat

SEQ ID NO: 69452 - DNA, 15 bp, Homo sapiens
tcgcacttgacagta

SEQ ID NO: 69453 - DNA, 15 bp, Homo sapiens
ttcgcacttgacagt

SEQ ID NO: 69454 - DNA, 15 bp, Homo sapiens
attcgcacttgacag

SEQ ID NO: 69455 - DNA, 15 bp, Homo sapiens
cattcgcacttgaca

SEQ ID NO: 69456 - DNA, 15 bp, Homo sapiens
ccattcgcacttgac

SEQ ID NO: 69457 - DNA, 15 bp, Homo sapiens
accattcgcacttga

SEQ ID NO: 69458 - DNA, 15 bp, Homo sapiens
caccattcgcacttg

SEQ ID NO: 69459 - DNA, 15 bp, Homo sapiens
gcaccattcgcactt

SEQ ID NO: 69460 - DNA, 15 bp, Homo sapiens
cgcaccattcgcact

SEQ ID NO: 69461 - DNA, 15 bp, Homo sapiens
tcgcaccattcgcac

SEQ ID NO: 69462 - DNA, 15 bp, Homo sapiens
ctcgcaccattcgca

SEQ ID NO: 69463 - DNA, 15 bp, Homo sapiens
cctcgcaccattcgc

SEQ ID NO: 69464 - DNA, 15 bp, Homo sapiens
gcctcgcaccattcg

SEQ ID NO: 69465 - DNA, 15 bp, Homo sapiens
tgcctcgcaccattc

SEQ ID NO: 69466 - DNA, 15 bp, Homo sapiens
ttgcctcgcaccatt

SEQ ID NO: 69467 - DNA, 15 bp, Homo sapiens
cttgcctcgcaccat

SEQ ID NO: 69468 - DNA, 15 bp, Homo sapiens
acttgcctcgcacca

SEQ ID NO: 69469 - DNA, 15 bp, Homo sapiens
gacttgcctcgcacc

SEQ ID NO: 69470 - DNA, 15 bp, Homo sapiens
cgacttgcctcgcac

SEQ ID NO: 69471 - DNA, 15 bp, Homo sapiens
acgacttgcctcgca

SEQ ID NO: 69472 - DNA, 15 bp, Homo sapiens
gacgacttgcctcgc

SEQ ID NO: 69473 - DNA, 15 bp, Homo sapiens
agacgacttgcctcg

SEQ ID NO: 69474 - DNA, 15 bp, Homo sapiens
gagacgacttgcctc

SEQ ID NO: 69475 - DNA, 15 bp, Homo sapiens
tgagacgacttgcct

SEQ ID NO: 69476 - DNA, 15 bp, Homo sapiens
gtgagacgacttgcc

SEQ ID NO: 69477 - DNA, 15 bp, Homo sapiens
ggtgagacgacttgc

SEQ ID NO: 69478 - DNA, 15 bp, Homo sapiens
tggtgagacgacttg

SEQ ID NO: 69479 - DNA, 15 bp, Homo sapiens
ctggtgagacgactt

SEQ ID NO: 69480 - DNA, 15 bp, Homo sapiens
gctggtgagacgact

SEQ ID NO: 69481 - DNA, 15 bp, Homo sapiens
cgctggtgagacgac

SEQ ID NO: 69482 - DNA, 15 bp, Homo sapiens
acgctggtgagacga

SEQ ID NO: 69483 - DNA, 15 bp, Homo sapiens
aacgctggtgagacg

SEQ ID NO: 69484 - DNA, 15 bp, Homo sapiens
gaacgctggtgagac

SEQ ID NO: 69485 - DNA, 15 bp, Homo sapiens
ggaacgctggtgaga

SEQ ID NO: 69486 - DNA, 15 bp, Homo sapiens
tggaacgctggtgag

SEQ ID NO: 69487 - DNA, 15 bp, Homo sapiens
ttggaacgctggtga

SEQ ID NO: 69488 - DNA, 15 bp, Homo sapiens
tttggaacgctggtg

SEQ ID NO: 69489 - DNA, 15 bp, Homo sapiens
atttggaacgctggt

SEQ ID NO: 69490 - DNA, 15 bp, Homo sapiens
catttggaacgctgg

SEQ ID NO: 69491 - DNA, 15 bp, Homo sapiens
tcatttggaacgctg

SEQ ID NO: 69492 - DNA, 15 bp, Homo sapiens
ttcatttggaacgct

SEQ ID NO: 69493 - DNA, 15 bp, Homo sapiens
tttcatttggaacgc

SEQ ID NO: 69494 - DNA, 15 bp, Homo sapiens
ttttcatttggaacg

SEQ ID NO: 69495 - DNA, 15 bp, Homo sapiens
attttcatttggaac

SEQ ID NO: 69496 - DNA, 15 bp, Homo sapiens
cattttcatttggaa

SEQ ID NO: 69497 - DNA, 15 bp, Homo sapiens
gcattttcatttgga

SEQ ID NO: 69498 - DNA, 15 bp, Homo sapiens
agcattttcatttgg

SEQ ID NO: 69499 - DNA, 15 bp, Homo sapiens
gagcattttcatttg

SEQ ID NO: 69500 - DNA, 15 bp, Homo sapiens
ggagcattttcattt

SEQ ID NO: 69501 - DNA, 15 bp, Homo sapiens
tggagcattttcatt

SEQ ID NO: 69502 - DNA, 15 bp, Homo sapiens
ttggagcattttcat

SEQ ID NO: 69503 - DNA, 15 bp, Homo sapiens
tttggagcattttca

SEQ ID NO: 69504 - DNA, 15 bp, Homo sapiens
atttggagcattttc

SEQ ID NO: 69505 - DNA, 15 bp, Homo sapiens
gatttggagcatttt

SEQ ID NO: 69506 - DNA, 15 bp, Homo sapiens
ggatttggagcattt

SEQ ID NO: 69507 - DNA, 15 bp, Homo sapiens
tggatttggagcatt

SEQ ID NO: 69508 - DNA, 15 bp, Homo sapiens
ttggatttggagcat

SEQ ID NO: 69509 - DNA, 15 bp, Homo sapiens
tttggatttggagca

SEQ ID NO: 69510 - DNA, 15 bp, Homo sapiens
atttggatttggagc

SEQ ID NO: 69511 - DNA, 15 bp, Homo sapiens
tatttggatttggag

SEQ ID NO: 69512 - DNA, 15 bp, Homo sapiens
atatttggatttgga

SEQ ID NO: 69513 - DNA, 15 bp, Homo sapiens
aatatttggatttgg

SEQ ID NO: 69514 - DNA, 15 bp, Homo sapiens
aaatatttggatttg

SEQ ID NO: 69515 - DNA, 15 bp, Homo sapiens
gaaatatttggattt

SEQ ID NO: 69516 - DNA, 15 bp, Homo sapiens
ggaaatatttggatt

SEQ ID NO: 69517 - DNA, 15 bp, Homo sapiens
aggaaatatttggat

SEQ ID NO: 69518 - DNA, 15 bp, Homo sapiens
caggaaatatttgga

SEQ ID NO: 69519 - DNA, 15 bp, Homo sapiens
tcaggaaatatttgg

SEQ ID NO: 69520 - DNA, 15 bp, Homo sapiens
ctcaggaaatatttg

SEQ ID NO: 69521 - DNA, 15 bp, Homo sapiens
actcaggaaatattt

SEQ ID NO: 69522 - DNA, 15 bp, Homo sapiens
tactcaggaaatatt

SEQ ID NO: 69523 - DNA, 15 bp, Homo sapiens
atactcaggaaatat

SEQ ID NO: 69524 - DNA, 15 bp, Homo sapiens
aatactcaggaaata

SEQ ID NO: 69525 - DNA, 15 bp, Homo sapiens
gaatactcaggaaat

SEQ ID NO: 69526 - DNA, 15 bp, Homo sapiens
tgaatactcaggaaa

SEQ ID NO: 69527 - DNA, 15 bp, Homo sapiens
gtgaatactcaggaa

SEQ ID NO: 69528 - DNA, 15 bp, Homo sapiens
cgtgaatactcagga

SEQ ID NO: 69529 - DNA, 15 bp, Homo sapiens
gcgtgaatactcagg

SEQ ID NO: 69530 - DNA, 15 bp, Homo sapiens
ggcgtgaatactcag

SEQ ID NO: 69531 - DNA, 15 bp, Homo sapiens
gggcgtgaatactca

SEQ ID NO: 69532 - DNA, 15 bp, Homo sapiens
tgggcgtgaatactc

SEQ ID NO: 69533 - DNA, 15 bp, Homo sapiens
atgggcgtgaatact

SEQ ID NO: 69534 - DNA, 15 bp, Homo sapiens
catgggcgtgaatac

SEQ ID NO: 69535 - DNA, 15 bp, Homo sapiens
acatgggcgtgaata

SEQ ID NO: 69536 - DNA, 15 bp, Homo sapiens
cacatgggcgtgaat

SEQ ID NO: 69537 - DNA, 15 bp, Homo sapiens
gcacatgggcgtgaa

SEQ ID NO: 69538 - DNA, 15 bp, Homo sapiens
tgcacatgggcgtga

SEQ ID NO: 69539 - DNA, 15 bp, Homo sapiens
gtgcacatgggcgtg

SEQ ID NO: 69540 - DNA, 15 bp, Homo sapiens
cgtgcacatgggcgt

SEQ ID NO: 69541 - DNA, 15 bp, Homo sapiens
ccgtgcacatgggcg

SEQ ID NO: 69542 - DNA, 15 bp, Homo sapiens
accgtgcacatgggc

SEQ ID NO: 69543 - DNA, 15 bp, Homo sapiens
aaccgtgcacatggg

SEQ ID NO: 69544 - DNA, 15 bp, Homo sapiens
aaaccgtgcacatgg

SEQ ID NO: 69545 - DNA, 15 bp, Homo sapiens
gaaaccgtgcacatg

SEQ ID NO: 69546 - DNA, 15 bp, Homo sapiens
agaaaccgtgcacat

SEQ ID NO: 69547 - DNA, 15 bp, Homo sapiens
cagaaaccgtgcaca

SEQ ID NO: 69548 - DNA, 15 bp, Homo sapiens
acagaaaccgtgcac

SEQ ID NO: 69549 - DNA, 15 bp, Homo sapiens
tacagaaaccgtgca

SEQ ID NO: 69550 - DNA, 15 bp, Homo sapiens
ttacagaaaccgtgc

SEQ ID NO: 69551 - DNA, 15 bp, Homo sapiens
cttacagaaaccgtg

SEQ ID NO: 69552 - DNA, 15 bp, Homo sapiens
acttacagaaaccgt

SEQ ID NO: 69553 - DNA, 15 bp, Homo sapiens
cacttacagaaaccg

SEQ ID NO: 69554 - DNA, 15 bp, Homo sapiens
tcacttacagaaacc

SEQ ID NO: 69555 - DNA, 15 bp, Homo sapiens
gtcacttacagaaac

SEQ ID NO: 69556 - DNA, 15 bp, Homo sapiens
ggtcacttacagaaa

SEQ ID NO: 69557 - DNA, 15 bp, Homo sapiens
gggtcacttacagaa

SEQ ID NO: 69558 - DNA, 15 bp, Homo sapiens
ggggtcacttacaga

SEQ ID NO: 69559 - DNA, 15 bp, Homo sapiens
tggggtcacttacag

SEQ ID NO: 69560 - DNA, 15 bp, Homo sapiens
ctggggtcacttaca

SEQ ID NO: 69561 - DNA, 15 bp, Homo sapiens
tctggggtcacttac

SEQ ID NO: 69562 - DNA, 15 bp, Homo sapiens
gtctggggtcactta

SEQ ID NO: 69563 - DNA, 15 bp, Homo sapiens
agtctggggtcactt

SEQ ID NO: 69564 - DNA, 15 bp, Homo sapiens
aagtctggggtcact

SEQ ID NO: 69565 - DNA, 15 bp, Homo sapiens
caagtctggggtcac

SEQ ID NO: 69566 - DNA, 15 bp, Homo sapiens
ccaagtctggggtca

SEQ ID NO: 69567 - DNA, 15 bp, Homo sapiens
tccaagtctggggtc

SEQ ID NO: 69568 - DNA, 15 bp, Homo sapiens
ttccaagtctggggt

SEQ ID NO: 69569 - DNA, 15 bp, Homo sapiens
tttccaagtctgggg

SEQ ID NO: 69570 - DNA, 15 bp, Homo sapiens
gtttccaagtctggg

SEQ ID NO: 69571 - DNA, 15 bp, Homo sapiens
tgtttccaagtctgg

SEQ ID NO: 69572 - DNA, 15 bp, Homo sapiens
atgtttccaagtctg

SEQ ID NO: 69573 - DNA, 15 bp, Homo sapiens
catgtttccaagtct

SEQ ID NO: 69574 - DNA, 15 bp, Homo sapiens
acatgtttccaagtc

SEQ ID NO: 69575 - DNA, 15 bp, Homo sapiens
cacatgtttccaagt

SEQ ID NO: 69576 - DNA, 15 bp, Homo sapiens
ccacatgtttccaag

SEQ ID NO: 69577 - DNA, 15 bp, Homo sapiens
accacatgtttccaa

SEQ ID NO: 69578 - DNA, 15 bp, Homo sapiens
caccacatgtttcca

SEQ ID NO: 69579 - DNA, 15 bp, Homo sapiens
ccaccacatgtttcc

SEQ ID NO: 69580 - DNA, 15 bp, Homo sapiens
cccaccacatgtttc

SEQ ID NO: 69581 - DNA, 15 bp, Homo sapiens
gcccaccacatgttt

SEQ ID NO: 69582 - DNA, 15 bp, Homo sapiens
agcccaccacatgtt

SEQ ID NO: 69583 - DNA, 15 bp, Homo sapiens
cagcccaccacatgt

SEQ ID NO: 69584 - DNA, 15 bp, Homo sapiens
acagcccaccacatg

SEQ ID NO: 69585 - DNA, 15 bp, Homo sapiens
aacagcccaccacat

SEQ ID NO: 69586 - DNA, 15 bp, Homo sapiens
aaacagcccaccaca

SEQ ID NO: 69587 - DNA, 15 bp, Homo sapiens
aaaacagcccaccac

SEQ ID NO: 69588 - DNA, 15 bp, Homo sapiens
caaaacagcccacca

SEQ ID NO: 69589 - DNA, 15 bp, Homo sapiens
acaaaacagcccacc

SEQ ID NO: 69590 - DNA, 15 bp, Homo sapiens
aacaaaacagcccac

SEQ ID NO: 69591 - DNA, 15 bp, Homo sapiens
caacaaaacagccca

SEQ ID NO: 69592 - DNA, 15 bp, Homo sapiens
acaacaaaacagccc

SEQ ID NO: 69593 - DNA, 15 bp, Homo sapiens
aacaacaaaacagcc

SEQ ID NO: 69594 - DNA, 15 bp, Homo sapiens
caacaacaaaacagc

SEQ ID NO: 69595 - DNA, 15 bp, Homo sapiens
ccaacaacaaaacag

SEQ ID NO: 69596 - DNA, 15 bp, Homo sapiens
cccaacaacaaaaca

SEQ ID NO: 69597 - DNA, 15 bp, Homo sapiens
tcccaacaacaaaac

SEQ ID NO: 69598 - DNA, 15 bp, Homo sapiens
gtcccaacaacaaaa

SEQ ID NO: 69599 - DNA, 15 bp, Homo sapiens
tgtcccaacaacaaa

SEQ ID NO: 69600 - DNA, 15 bp, Homo sapiens
atgtcccaacaacaa

SEQ ID NO: 69601 - DNA, 15 bp, Homo sapiens
aatgtcccaacaaca

SEQ ID NO: 69602 - DNA, 15 bp, Homo sapiens
aaatgtcccaacaac

SEQ ID NO: 69603 - DNA, 15 bp, Homo sapiens
aaaatgtcccaacaa

SEQ ID NO: 69604 - DNA, 15 bp, Homo sapiens
aaaaatgtcccaaca

SEQ ID NO: 69605 - DNA, 15 bp, Homo sapiens
aaaaaatgtcccaac

SEQ ID NO: 69606 - DNA, 15 bp, Homo sapiens
aaaaaaatgtcccaa

SEQ ID NO: 69607 - DNA, 15 bp, Homo sapiens
gaaaaaaatgtccca

SEQ ID NO: 69608 - DNA, 15 bp, Homo sapiens
agaaaaaaatgtccc

SEQ ID NO: 69609 - DNA, 15 bp, Homo sapiens
gagaaaaaaatgtcc

SEQ ID NO: 69610 - DNA, 15 bp, Homo sapiens
ggagaaaaaaatgtc

SEQ ID NO: 69611 - DNA, 15 bp, Homo sapiens
tggagaaaaaaatgt

SEQ ID NO: 69612 - DNA, 15 bp, Homo sapiens
ctggagaaaaaaatg

SEQ ID NO: 69613 - DNA, 15 bp, Homo sapiens
actggagaaaaaaat

SEQ ID NO: 69614 - DNA, 15 bp, Homo sapiens
aactggagaaaaaaa

SEQ ID NO: 69615 - DNA, 15 bp, Homo sapiens
caactggagaaaaaa

SEQ ID NO: 69616 - DNA, 15 bp, Homo sapiens
ccaactggagaaaaa

SEQ ID NO: 69617 - DNA, 15 bp, Homo sapiens
accaactggagaaaa

SEQ ID NO: 69618 - DNA, 15 bp, Homo sapiens
taccaactggagaaa

SEQ ID NO: 69619 - DNA, 15 bp, Homo sapiens
ctaccaactggagaa

SEQ ID NO: 69620 - DNA, 15 bp, Homo sapiens
gctaccaactggaga

SEQ ID NO: 69621 - DNA, 15 bp, Homo sapiens
agctaccaactggag

SEQ ID NO: 69622 - DNA, 15 bp, Homo sapiens
aagctaccaactgga

SEQ ID NO: 69623 - DNA, 15 bp, Homo sapiens
aaagctaccaactgg

SEQ ID NO: 69624 - DNA, 15 bp, Homo sapiens
aaaagctaccaactg

SEQ ID NO: 69625 - DNA, 15 bp, Homo sapiens
caaaagctaccaact

SEQ ID NO: 69626 - DNA, 15 bp, Homo sapiens
acaaaagctaccaac

SEQ ID NO: 69627 - DNA, 15 bp, Homo sapiens
aacaaaagctaccaa

SEQ ID NO: 69628 - DNA, 15 bp, Homo sapiens
aaacaaaagctacca

SEQ ID NO: 69629 - DNA, 15 bp, Homo sapiens
aaaacaaaagctacc

SEQ ID NO: 69630 - DNA, 15 bp, Homo sapiens
taaaacaaaagctac

SEQ ID NO: 69631 - DNA, 15 bp, Homo sapiens
ttaaaacaaaagcta

SEQ ID NO: 69632 - DNA, 15 bp, Homo sapiens
tttaaaacaaaagct

SEQ ID NO: 69633 - DNA, 15 bp, Homo sapiens
atttaaaacaaaagc

SEQ ID NO: 69634 - DNA, 15 bp, Homo sapiens
tatttaaaacaaaag

SEQ ID NO: 69635 - DNA, 15 bp, Homo sapiens
gtatttaaaacaaaa

SEQ ID NO: 69636 - DNA, 15 bp, Homo sapiens
agtatttaaaacaaa

SEQ ID NO: 69637 - DNA, 15 bp, Homo sapiens
cagtatttaaaacaa

SEQ ID NO: 69638 - DNA, 15 bp, Homo sapiens
ccagtatttaaaaca

SEQ ID NO: 69639 - DNA, 15 bp, Homo sapiens
cccagtatttaaaac

SEQ ID NO: 69640 - DNA, 15 bp, Homo sapiens
tcccagtatttaaaa

SEQ ID NO: 69641 - DNA, 15 bp, Homo sapiens
ttcccagtatttaaa

SEQ ID NO: 69642 - DNA, 15 bp, Homo sapiens
cttcccagtatttaa

SEQ ID NO: 69643 - DNA, 15 bp, Homo sapiens
tcttcccagtattta

SEQ ID NO: 69644 - DNA, 15 bp, Homo sapiens
ctcttcccagtattt

SEQ ID NO: 69645 - DNA, 15 bp, Homo sapiens
gctcttcccagtatt

SEQ ID NO: 69646 - DNA, 15 bp, Homo sapiens
agctcttcccagtat

SEQ ID NO: 69647 - DNA, 15 bp, Homo sapiens
aagctcttcccagta

SEQ ID NO: 69648 - DNA, 15 bp, Homo sapiens
gaagctcttcccagt

SEQ ID NO: 69649 - DNA, 15 bp, Homo sapiens
ggaagctcttcccag

SEQ ID NO: 69650 - DNA, 15 bp, Homo sapiens
aggaagctcttccca

SEQ ID NO: 69651 - DNA, 15 bp, Homo sapiens
aaggaagctcttccc

SEQ ID NO: 69652 - DNA, 15 bp, Homo sapiens
caaggaagctcttcc

SEQ ID NO: 69653 - DNA, 15 bp, Homo sapiens
ccaaggaagctcttc

SEQ ID NO: 69654 - DNA, 15 bp, Homo sapiens
gccaaggaagctctt

SEQ ID NO: 69655 - DNA, 15 bp, Homo sapiens
agccaaggaagctct

SEQ ID NO: 69656 - DNA, 15 bp, Homo sapiens
cagccaaggaagctc

SEQ ID NO: 69657 - DNA, 15 bp, Homo sapiens
acagccaaggaagct

SEQ ID NO: 69658 - DNA, 15 bp, Homo sapiens
cacagccaaggaagc

SEQ ID NO: 69659 - DNA, 15 bp, Homo sapiens
tcacagccaaggaag

SEQ ID NO: 69660 - DNA, 15 bp, Homo sapiens
ctcacagccaaggaa

SEQ ID NO: 69661 - DNA, 15 bp, Homo sapiens
gctcacagccaagga

SEQ ID NO: 69662 - DNA, 15 bp, Homo sapiens
agctcacagccaagg

SEQ ID NO: 69663 - DNA, 15 bp, Homo sapiens
cagctcacagccaag

SEQ ID NO: 69664 - DNA, 15 bp, Homo sapiens
gcagctcacagccaa

SEQ ID NO: 69665 - DNA, 15 bp, Homo sapiens
ggcagctcacagcca

SEQ ID NO: 69666 - DNA, 15 bp, Homo sapiens
aggcagctcacagcc

SEQ ID NO: 69667 - DNA, 15 bp, Homo sapiens
gaggcagctcacagc

SEQ ID NO: 69668 - DNA, 15 bp, Homo sapiens
agaggcagctcacag

SEQ ID NO: 69669 - DNA, 15 bp, Homo sapiens
cagaggcagctcaca

SEQ ID NO: 69670 - DNA, 15 bp, Homo sapiens
tcagaggcagctcac

SEQ ID NO: 69671 - DNA, 15 bp, Homo sapiens
gtcagaggcagctca

SEQ ID NO: 69672 - DNA, 15 bp, Homo sapiens
agtcagaggcagctc

SEQ ID NO: 69673 - DNA, 15 bp, Homo sapiens
aagtcagaggcagct

SEQ ID NO: 69674 - DNA, 15 bp, Homo sapiens
caagtcagaggcagc

SEQ ID NO: 69675 - DNA, 15 bp, Homo sapiens
tcaagtcagaggcag

SEQ ID NO: 69676 - DNA, 15 bp, Homo sapiens
ttcaagtcagaggca

SEQ ID NO: 69677 - DNA, 15 bp, Homo sapiens
tttcaagtcagaggc

SEQ ID NO: 69678 - DNA, 15 bp, Homo sapiens
ttttcaagtcagagg

SEQ ID NO: 69679 - DNA, 15 bp, Homo sapiens
gttttcaagtcagag

SEQ ID NO: 69680 - DNA, 15 bp, Homo sapiens
ggttttcaagtcaga

SEQ ID NO: 69681 - DNA, 15 bp, Homo sapiens
tggttttcaagtcag

SEQ ID NO: 69682 - DNA, 15 bp, Homo sapiens
ctggttttcaagtca

SEQ ID NO: 69683 - DNA, 15 bp, Homo sapiens
gctggttttcaagtc

SEQ ID NO: 69684 - DNA, 15 bp, Homo sapiens
ggctggttttcaagt

SEQ ID NO: 69685 - DNA, 15 bp, Homo sapiens
gggctggttttcaag

SEQ ID NO: 69686 - DNA, 15 bp, Homo sapiens
ggggctggttttcaa

SEQ ID NO: 69687 - DNA, 15 bp, Homo sapiens
cggggctggttttca

SEQ ID NO: 69688 - DNA, 15 bp, Homo sapiens
tcggggctggttttc

SEQ ID NO: 69689 - DNA, 15 bp, Homo sapiens
ctcggggctggtttt

SEQ ID NO: 69690 - DNA, 15 bp, Homo sapiens
gctcggggctggttt

SEQ ID NO: 69691 - DNA, 15 bp, Homo sapiens
agctcggggctggtt

SEQ ID NO: 69692 - DNA, 15 bp, Homo sapiens
cagctcggggctggt

SEQ ID NO: 69693 - DNA, 15 bp, Homo sapiens
gcagctcggggctgg

SEQ ID NO: 69694 - DNA, 15 bp, Homo sapiens
agcagctcggggctg

SEQ ID NO: 69695 - DNA, 15 bp, Homo sapiens
cagcagctcggggct

SEQ ID NO: 69696 - DNA, 15 bp, Homo sapiens
ccagcagctcggggc

SEQ ID NO: 69697 - DNA, 15 bp, Homo sapiens
tccagcagctcgggg

SEQ ID NO: 69698 - DNA, 15 bp, Homo sapiens
ttccagcagctcggg

SEQ ID NO: 69699 - DNA, 15 bp, Homo sapiens
tttccagcagctcgg

SEQ ID NO: 69700 - DNA, 15 bp, Homo sapiens
ctttccagcagctcg

SEQ ID NO: 69701 - DNA, 15 bp, Homo sapiens
actttccagcagctc

SEQ ID NO: 69702 - DNA, 15 bp, Homo sapiens
cactttccagcagct

SEQ ID NO: 69703 - DNA, 15 bp, Homo sapiens
tcactttccagcagc

SEQ ID NO: 69704 - DNA, 15 bp, Homo sapiens
ctcactttccagcag

SEQ ID NO: 69705 - DNA, 15 bp, Homo sapiens
gctcactttccagca

SEQ ID NO: 69706 - DNA, 15 bp, Homo sapiens
agctcactttccagc

SEQ ID NO: 69707 - DNA, 15 bp, Homo sapiens
cagctcactttccag

SEQ ID NO: 69708 - DNA, 15 bp, Homo sapiens
acagctcactttcca

SEQ ID NO: 69709 - DNA, 15 bp, Homo sapiens
gacagctcactttcc

SEQ ID NO: 69710 - DNA, 15 bp, Homo sapiens
cgacagctcactttc

SEQ ID NO: 69711 - DNA, 15 bp, Homo sapiens
gcgacagctcacttt

SEQ ID NO: 69712 - DNA, 15 bp, Homo sapiens
ggcgacagctcactt

SEQ ID NO: 69713 - DNA, 15 bp, Homo sapiens
cggcgacagctcact

SEQ ID NO: 69714 - DNA, 15 bp, Homo sapiens
tcggcgacagctcac

SEQ ID NO: 69715 - DNA, 15 bp, Homo sapiens
atcggcgacagctca

SEQ ID NO: 69716 - DNA, 15 bp, Homo sapiens
catcggcgacagctc

SEQ ID NO: 69717 - DNA, 15 bp, Homo sapiens
ccatcggcgacagct

SEQ ID NO: 69718 - DNA, 15 bp, Homo sapiens
gccatcggcgacagc

SEQ ID NO: 69719 - DNA, 15 bp, Homo sapiens
tgccatcggcgacag

SEQ ID NO: 69720 - DNA, 15 bp, Homo sapiens
gtgccatcggcgaca

SEQ ID NO: 69721 - DNA, 15 bp, Homo sapiens
agtgccatcggcgac

SEQ ID NO: 69722 - DNA, 15 bp, Homo sapiens
gagtgccatcggcga

SEQ ID NO: 69723 - DNA, 15 bp, Homo sapiens
tgagtgccatcggcg

SEQ ID NO: 69724 - DNA, 15 bp, Homo sapiens
atgagtgccatcggc

SEQ ID NO: 69725 - DNA, 15 bp, Homo sapiens
tatgagtgccatcgg

SEQ ID NO: 69726 - DNA, 15 bp, Homo sapiens
gtatgagtgccatcg

SEQ ID NO: 69727 - DNA, 15 bp, Homo sapiens
ggtatgagtgccatc

SEQ ID NO: 69728 - DNA, 15 bp, Homo sapiens
tggtatgagtgccat

SEQ ID NO: 69729 - DNA, 15 bp, Homo sapiens
ctggtatgagtgcca

SEQ ID NO: 69730 - DNA, 15 bp, Homo sapiens
gctggtatgagtgcc

SEQ ID NO: 69731 - DNA, 15 bp, Homo sapiens
agctggtatgagtgc

SEQ ID NO: 69732 - DNA, 15 bp, Homo sapiens
gagctggtatgagtg

SEQ ID NO: 69733 - DNA, 15 bp, Homo sapiens
ggagctggtatgagt

SEQ ID NO: 69734 - DNA, 15 bp, Homo sapiens
aggagctggtatgag

SEQ ID NO: 69735 - DNA, 15 bp, Homo sapiens
caggagctggtatga

SEQ ID NO: 69736 - DNA, 15 bp, Homo sapiens
acaggagctggtatg

SEQ ID NO: 69737 - DNA, 15 bp, Homo sapiens
aacaggagctggtat

SEQ ID NO: 69738 - DNA, 15 bp, Homo sapiens
gaacaggagctggta

SEQ ID NO: 69739 - DNA, 15 bp, Homo sapiens
tgaacaggagctggt

SEQ ID NO: 69740 - DNA, 15 bp, Homo sapiens
ctgaacaggagctgg

SEQ ID NO: 69741 - DNA, 15 bp, Homo sapiens
gctgaacaggagctg

SEQ ID NO: 69742 - DNA, 15 bp, Homo sapiens
tgctgaacaggagct

SEQ ID NO: 69743 - DNA, 15 bp, Homo sapiens
ctgctgaacaggagc

SEQ ID NO: 69744 - DNA, 15 bp, Homo sapiens
gctgctgaacaggag

SEQ ID NO: 69745 - DNA, 15 bp, Homo sapiens
agctgctgaacagga

SEQ ID NO: 69746 - DNA, 15 bp, Homo sapiens
gagctgctgaacagg

SEQ ID NO: 69747 - DNA, 15 bp, Homo sapiens
agagctgctgaacag

SEQ ID NO: 69748 - DNA, 15 bp, Homo sapiens
cagagctgctgaaca

SEQ ID NO: 69749 - DNA, 15 bp, Homo sapiens
gcagagctgctgaac

SEQ ID NO: 69750 - DNA, 15 bp, Homo sapiens
ggcagagctgctgaa

SEQ ID NO: 69751 - DNA, 15 bp, Homo sapiens
gggcagagctgctga

SEQ ID NO: 69752 - DNA, 15 bp, Homo sapiens
tgggcagagctgctg

SEQ ID NO: 69753 - DNA, 15 bp, Homo sapiens
ctgggcagagctgct

SEQ ID NO: 69754 - DNA, 15 bp, Homo sapiens
actgggcagagctgc

SEQ ID NO: 69755 - DNA, 15 bp, Homo sapiens
gactgggcagagctg

SEQ ID NO: 69756 - DNA, 15 bp, Homo sapiens
agactgggcagagct

SEQ ID NO: 69757 - DNA, 15 bp, Homo sapiens
cagactgggcagagc

SEQ ID NO: 69758 - DNA, 15 bp, Homo sapiens
ccagactgggcagag

SEQ ID NO: 69759 - DNA, 15 bp, Homo sapiens
cccagactgggcaga

SEQ ID NO: 69760 - DNA, 15 bp, Homo sapiens
tcccagactgggcag

SEQ ID NO: 69761 - DNA, 15 bp, Homo sapiens
ttcccagactgggca

SEQ ID NO: 69762 - DNA, 15 bp, Homo sapiens
tttcccagactgggc

SEQ ID NO: 69763 - DNA, 15 bp, Homo sapiens
ctttcccagactggg

SEQ ID NO: 69764 - DNA, 15 bp, Homo sapiens
cctttcccagactgg

SEQ ID NO: 69765 - DNA, 15 bp, Homo sapiens
ccctttcccagactg

SEQ ID NO: 69766 - DNA, 15 bp, Homo sapiens
gccctttcccagact

SEQ ID NO: 69767 - DNA, 15 bp, Homo sapiens
cgccctttcccagac

SEQ ID NO: 69768 - DNA, 15 bp, Homo sapiens
tcgccctttcccaga

SEQ ID NO: 69769 - DNA, 15 bp, Homo sapiens
ctcgccctttcccag

SEQ ID NO: 69770 - DNA, 15 bp, Homo sapiens
cctcgccctttccca

SEQ ID NO: 69771 - DNA, 15 bp, Homo sapiens
gcctcgccctttccc

SEQ ID NO: 69772 - DNA, 15 bp, Homo sapiens
ggcctcgccctttcc

SEQ ID NO: 69773 - DNA, 15 bp, Homo sapiens
tggcctcgccctttc

SEQ ID NO: 69774 - DNA, 15 bp, Homo sapiens
atggcctcgcccttt

SEQ ID NO: 69775 - DNA, 15 bp, Homo sapiens
aatggcctcgccctt

SEQ ID NO: 69776 - DNA, 15 bp, Homo sapiens
caatggcctcgccct

SEQ ID NO: 69777 - DNA, 15 bp, Homo sapiens
ccaatggcctcgccc

SEQ ID NO: 69778 - DNA, 15 bp, Homo sapiens
tccaatggcctcgcc

SEQ ID NO: 69779 - DNA, 15 bp, Homo sapiens
ctccaatggcctcgc

SEQ ID NO: 69780 - DNA, 15 bp, Homo sapiens
gctccaatggcctcg

SEQ ID NO: 69781 - DNA, 15 bp, Homo sapiens
ggctccaatggcctc

SEQ ID NO: 69782 - DNA, 15 bp, Homo sapiens
tggctccaatggcct

SEQ ID NO: 69783 - DNA, 15 bp, Homo sapiens
atggctccaatggcc

SEQ ID NO: 69784 - DNA, 15 bp, Homo sapiens
catggctccaatggc

SEQ ID NO: 69785 - DNA, 15 bp, Homo sapiens
ccatggctccaatgg

SEQ ID NO: 69786 - DNA, 15 bp, Homo sapiens
accatggctccaatg

SEQ ID NO: 69787 - DNA, 15 bp, Homo sapiens
taccatggctccaat

SEQ ID NO: 69788 - DNA, 15 bp, Homo sapiens
ttaccatggctccaa

SEQ ID NO: 69789 - DNA, 15 bp, Homo sapiens
cttaccatggctcca

SEQ ID NO: 69790 - DNA, 15 bp, Homo sapiens
gcttaccatggctcc

SEQ ID NO: 69791 - DNA, 15 bp, Homo sapiens
ggcttaccatggctc

SEQ ID NO: 69792 - DNA, 15 bp, Homo sapiens
tggcttaccatggct

SEQ ID NO: 69793 - DNA, 15 bp, Homo sapiens
ctggcttaccatggc

SEQ ID NO: 69794 - DNA, 15 bp, Homo sapiens
cctggcttaccatgg

SEQ ID NO: 69795 - DNA, 15 bp, Homo sapiens
tcctggcttaccatg

SEQ ID NO: 69796 - DNA, 15 bp, Homo sapiens
ttcctggcttaccat

SEQ ID NO: 69797 - DNA, 15 bp, Homo sapiens
tttcctggcttacca

SEQ ID NO: 69798 - DNA, 15 bp, Homo sapiens
ctttcctggcttacc

SEQ ID NO: 69799 - DNA, 15 bp, Homo sapiens
tctttcctggcttac

SEQ ID NO: 69800 - DNA, 15 bp, Homo sapiens
ctctttcctggctta

SEQ ID NO: 69801 - DNA, 15 bp, Homo sapiens
cctctttcctggctt

SEQ ID NO: 69802 - DNA, 15 bp, Homo sapiens
ccctctttcctggct

SEQ ID NO: 69803 - DNA, 15 bp, Homo sapiens
accctctttcctggc

SEQ ID NO: 69804 - DNA, 15 bp, Homo sapiens
caccctctttcctgg

SEQ ID NO: 69805 - DNA, 15 bp, Homo sapiens
acaccctctttcctg

SEQ ID NO: 69806 - DNA, 15 bp, Homo sapiens
cacaccctctttcct

SEQ ID NO: 69807 - DNA, 15 bp, Homo sapiens
gcacaccctctttcc

SEQ ID NO: 69808 - DNA, 15 bp, Homo sapiens
tgcacaccctctttc

SEQ ID NO: 69809 - DNA, 15 bp, Homo sapiens
gtgcacaccctcttt

SEQ ID NO: 69810 - DNA, 15 bp, Homo sapiens
tgtgcacaccctctt

SEQ ID NO: 69811 - DNA, 15 bp, Homo sapiens
ttgtgcacaccctct

SEQ ID NO: 69812 - DNA, 15 bp, Homo sapiens
cttgtgcacaccctc

SEQ ID NO: 69813 - DNA, 15 bp, Homo sapiens
acttgtgcacaccct

SEQ ID NO: 69814 - DNA, 15 bp, Homo sapiens
cacttgtgcacaccc

SEQ ID NO: 69815 - DNA, 15 bp, Homo sapiens
acacttgtgcacacc

SEQ ID NO: 69816 - DNA, 15 bp, Homo sapiens
cacacttgtgcacac

SEQ ID NO: 69817 - DNA, 15 bp, Homo sapiens
acacacttgtgcaca

SEQ ID NO: 69818 - DNA, 15 bp, Homo sapiens
cacacacttgtgcac

SEQ ID NO: 69819 - DNA, 15 bp, Homo sapiens
ccacacacttgtgca

SEQ ID NO: 69820 - DNA, 15 bp, Homo sapiens
cccacacacttgtgc

SEQ ID NO: 69821 - DNA, 15 bp, Homo sapiens
gcccacacacttgtg

SEQ ID NO: 69822 - DNA, 15 bp, Homo sapiens
tgcccacacacttgt

SEQ ID NO: 69823 - DNA, 15 bp, Homo sapiens
ctgcccacacacttg

SEQ ID NO: 69824 - DNA, 15 bp, Homo sapiens
cctgcccacacactt

SEQ ID NO: 69825 - DNA, 15 bp, Homo sapiens
ccctgcccacacact

SEQ ID NO: 69826 - DNA, 15 bp, Homo sapiens
cccctgcccacacac

SEQ ID NO: 69827 - DNA, 15 bp, Homo sapiens
gcccctgcccacaca

SEQ ID NO: 69828 - DNA, 15 bp, Homo sapiens
tgcccctgcccacac

SEQ ID NO: 69829 - DNA, 15 bp, Homo sapiens
ctgcccctgcccaca

SEQ ID NO: 69830 - DNA, 15 bp, Homo sapiens
gctgcccctgcccac

SEQ ID NO: 69831 - DNA, 15 bp, Homo sapiens
ggctgcccctgccca

SEQ ID NO: 69832 - DNA, 15 bp, Homo sapiens
aggctgcccctgccc

SEQ ID NO: 69833 - DNA, 15 bp, Homo sapiens
aaggctgcccctgcc

SEQ ID NO: 69834 - DNA, 15 bp, Homo sapiens
gaaggctgcccctgc

SEQ ID NO: 69835 - DNA, 15 bp, Homo sapiens
ggaaggctgcccctg

SEQ ID NO: 69836 - DNA, 15 bp, Homo sapiens
gggaaggctgcccct

SEQ ID NO: 69837 - DNA, 15 bp, Homo sapiens
ggggaaggctgcccc

SEQ ID NO: 69838 - DNA, 15 bp, Homo sapiens
tggggaaggctgccc

SEQ ID NO: 69839 - DNA, 15 bp, Homo sapiens
ttggggaaggctgcc

SEQ ID NO: 69840 - DNA, 15 bp, Homo sapiens
cttggggaaggctgc

SEQ ID NO: 69841 - DNA, 15 bp, Homo sapiens
gcttggggaaggctg

SEQ ID NO: 69842 - DNA, 15 bp, Homo sapiens
agcttggggaaggct

SEQ ID NO: 69843 - DNA, 15 bp, Homo sapiens
cagcttggggaaggc

SEQ ID NO: 69844 - DNA, 15 bp, Homo sapiens
ccagcttggggaagg

SEQ ID NO: 69845 - DNA, 15 bp, Homo sapiens
cccagcttggggaag

SEQ ID NO: 69846 - DNA, 15 bp, Homo sapiens
gcccagcttggggaa

SEQ ID NO: 69847 - DNA, 15 bp, Homo sapiens
ggcccagcttgggga

SEQ ID NO: 69848 - DNA, 15 bp, Homo sapiens
gggcccagcttgggg

SEQ ID NO: 69849 - DNA, 15 bp, Homo sapiens
tgggcccagcttggg

SEQ ID NO: 69850 - DNA, 15 bp, Homo sapiens
ctgggcccagcttgg

SEQ ID NO: 69851 - DNA, 15 bp, Homo sapiens
tctgggcccagcttg

SEQ ID NO: 69852 - DNA, 15 bp, Homo sapiens
ctctgggcccagctt

SEQ ID NO: 69853 - DNA, 15 bp, Homo sapiens
tctctgggcccagct

SEQ ID NO: 69854 - DNA, 15 bp, Homo sapiens
gtctctgggcccagc

SEQ ID NO: 69855 - DNA, 15 bp, Homo sapiens
agtctctgggcccag

SEQ ID NO: 69856 - DNA, 15 bp, Homo sapiens
tagtctctgggccca

SEQ ID NO: 69857 - DNA, 15 bp, Homo sapiens
ttagtctctgggccc

SEQ ID NO: 69858 - DNA, 15 bp, Homo sapiens
cttagtctctgggcc

SEQ ID NO: 69859 - DNA, 15 bp, Homo sapiens
ccttagtctctgggc

SEQ ID NO: 69860 - DNA, 15 bp, Homo sapiens
tccttagtctctggg

SEQ ID NO: 69861 - DNA, 15 bp, Homo sapiens
ttccttagtctctgg

SEQ ID NO: 69862 - DNA, 15 bp, Homo sapiens
tttccttagtctctg

SEQ ID NO: 69863 - DNA, 15 bp, Homo sapiens
ctttccttagtctct

SEQ ID NO: 69864 - DNA, 15 bp, Homo sapiens
tctttccttagtctc

SEQ ID NO: 69865 - DNA, 15 bp, Homo sapiens
ctctttccttagtct

SEQ ID NO: 69866 - DNA, 15 bp, Homo sapiens
cctctttccttagtc

SEQ ID NO: 69867 - DNA, 15 bp, Homo sapiens
tcctctttccttagt

SEQ ID NO: 69868 - DNA, 15 bp, Homo sapiens
ttcctctttccttag

SEQ ID NO: 69869 - DNA, 15 bp, Homo sapiens
cttcctctttcctta

SEQ ID NO: 69870 - DNA, 15 bp, Homo sapiens
ccttcctctttcctt

SEQ ID NO: 69871 - DNA, 15 bp, Homo sapiens
tccttcctctttcct

SEQ ID NO: 69872 - DNA, 15 bp, Homo sapiens
ctccttcctctttcc

SEQ ID NO: 69873 - DNA, 15 bp, Homo sapiens
tctccttcctctttc

SEQ ID NO: 69874 - DNA, 15 bp, Homo sapiens
ctctccttcctcttt

SEQ ID NO: 69875 - DNA, 15 bp, Homo sapiens
tctctccttcctctt

SEQ ID NO: 69876 - DNA, 15 bp, Homo sapiens
ttctctccttcctct

SEQ ID NO: 69877 - DNA, 15 bp, Homo sapiens
cttctctccttcctc

SEQ ID NO: 69878 - DNA, 15 bp, Homo sapiens
tcttctctccttcct

SEQ ID NO: 69879 - DNA, 15 bp, Homo sapiens
ctcttctctccttcc

SEQ ID NO: 69880 - DNA, 15 bp, Homo sapiens
tctcttctctccttc

SEQ ID NO: 69881 - DNA, 15 bp, Homo sapiens
ctctcttctctcctt

SEQ ID NO: 69882 - DNA, 15 bp, Homo sapiens
cctctcttctctcct

SEQ ID NO: 69883 - DNA, 15 bp, Homo sapiens
tcctctcttctctcc

SEQ ID NO: 69884 - DNA, 15 bp, Homo sapiens
ctcctctcttctctc

SEQ ID NO: 69885 - DNA, 15 bp, Homo sapiens
cctcctctcttctct

SEQ ID NO: 69886 - DNA, 15 bp, Homo sapiens
ccctcctctcttctc

SEQ ID NO: 69887 - DNA, 15 bp, Homo sapiens
tccctcctctcttct

SEQ ID NO: 69888 - DNA, 15 bp, Homo sapiens
ctccctcctctcttc

SEQ ID NO: 69889 - DNA, 15 bp, Homo sapiens
tctccctcctctctt

SEQ ID NO: 69890 - DNA, 15 bp, Homo sapiens
ctctccctcctctct

SEQ ID NO: 69891 - DNA, 15 bp, Homo sapiens
cctctccctcctctc

SEQ ID NO: 69892 - DNA, 15 bp, Homo sapiens
tcctctccctcctct

SEQ ID NO: 69893 - DNA, 15 bp, Homo sapiens
ctcctctccctcctc

SEQ ID NO: 69894 - DNA, 15 bp, Homo sapiens
tctcctctccctcct

SEQ ID NO: 69895 - DNA, 15 bp, Homo sapiens
ctctcctctccctcc

SEQ ID NO: 69896 - DNA, 15 bp, Homo sapiens
cctctcctctccctc

SEQ ID NO: 69897 - DNA, 15 bp, Homo sapiens
ccctctcctctccct

SEQ ID NO: 69898 - DNA, 15 bp, Homo sapiens
tccctctcctctccc

SEQ ID NO: 69899 - DNA, 15 bp, Homo sapiens
ttccctctcctctcc

SEQ ID NO: 69900 - DNA, 15 bp, Homo sapiens
cttccctctcctctc

SEQ ID NO: 69901 - DNA, 15 bp, Homo sapiens
ccttccctctcctct

SEQ ID NO: 69902 - DNA, 15 bp, Homo sapiens
cccttccctctcctc

SEQ ID NO: 69903 - DNA, 15 bp, Homo sapiens
ccccttccctctcct

SEQ ID NO: 69904 - DNA, 15 bp, Homo sapiens
tccccttccctctcc

SEQ ID NO: 69905 - DNA, 15 bp, Homo sapiens
ctccccttccctctc

SEQ ID NO: 69906 - DNA, 15 bp, Homo sapiens
cctccccttccctct

SEQ ID NO: 69907 - DNA, 15 bp, Homo sapiens
acctccccttccctc

SEQ ID NO: 69908 - DNA, 15 bp, Homo sapiens
gacctccccttccct

SEQ ID NO: 69909 - DNA, 15 bp, Homo sapiens
agacctccccttccc

SEQ ID NO: 69910 - DNA, 15 bp, Homo sapiens
cagacctccccttcc

SEQ ID NO: 69911 - DNA, 15 bp, Homo sapiens
gcagacctccccttc

SEQ ID NO: 69912 - DNA, 15 bp, Homo sapiens
ggcagacctcccctt

SEQ ID NO: 69913 - DNA, 15 bp, Homo sapiens
gggcagacctcccct

SEQ ID NO: 69914 - DNA, 15 bp, Homo sapiens
ggggcagacctcccc

SEQ ID NO: 69915 - DNA, 15 bp, Homo sapiens
tggggcagacctccc

SEQ ID NO: 69916 - DNA, 15 bp, Homo sapiens
gtggggcagacctcc

SEQ ID NO: 69917 - DNA, 15 bp, Homo sapiens
agtggggcagacctc

SEQ ID NO: 69918 - DNA, 15 bp, Homo sapiens
tagtggggcagacct

SEQ ID NO: 69919 - DNA, 15 bp, Homo sapiens
ttagtggggcagacc

SEQ ID NO: 69920 - DNA, 15 bp, Homo sapiens
gttagtggggcagac

SEQ ID NO: 69921 - DNA, 15 bp, Homo sapiens
tgttagtggggcaga

SEQ ID NO: 69922 - DNA, 15 bp, Homo sapiens
gtgttagtggggcag

SEQ ID NO: 69923 - DNA, 15 bp, Homo sapiens
tgtgttagtggggca

SEQ ID NO: 69924 - DNA, 15 bp, Homo sapiens
ttgtgttagtggggc

SEQ ID NO: 69925 - DNA, 15 bp, Homo sapiens
cttgtgttagtgggg

SEQ ID NO: 69926 - DNA, 15 bp, Homo sapiens
tcttgtgttagtggg

SEQ ID NO: 69927 - DNA, 15 bp, Homo sapiens
gtcttgtgttagtgg

SEQ ID NO: 69928 - DNA, 15 bp, Homo sapiens
tgtcttgtgttagtg

SEQ ID NO: 69929 - DNA, 15 bp, Homo sapiens
ctgtcttgtgttagt

SEQ ID NO: 69930 - DNA, 15 bp, Homo sapiens
actgtcttgtgttag

SEQ ID NO: 69931 - DNA, 15 bp, Homo sapiens
aactgtcttgtgtta

SEQ ID NO: 69932 - DNA, 15 bp, Homo sapiens
aaactgtcttgtgtt

SEQ ID NO: 69933 - DNA, 15 bp, Homo sapiens
aaaactgtcttgtgt

SEQ ID NO: 69934 - DNA, 15 bp, Homo sapiens
gaaaactgtcttgtg

SEQ ID NO: 69935 - DNA, 15 bp, Homo sapiens
tgaaaactgtcttgt

SEQ ID NO: 69936 - DNA, 15 bp, Homo sapiens
atgaaaactgtcttg

SEQ ID NO: 69937 - DNA, 15 bp, Homo sapiens
aatgaaaactgtctt

SEQ ID NO: 69938 - DNA, 15 bp, Homo sapiens
aaatgaaaactgtct

SEQ ID NO: 69939 - DNA, 15 bp, Homo sapiens
caaatgaaaactgtc

SEQ ID NO: 69940 - DNA, 15 bp, Homo sapiens
acaaatgaaaactgt

SEQ ID NO: 69941 - DNA, 15 bp, Homo sapiens
tacaaatgaaaactg

SEQ ID NO: 69942 - DNA, 15 bp, Homo sapiens
ctacaaatgaaaact

SEQ ID NO: 69943 - DNA, 15 bp, Homo sapiens
cctacaaatgaaaac

SEQ ID NO: 69944 - DNA, 15 bp, Homo sapiens
gcctacaaatgaaaa

SEQ ID NO: 69945 - DNA, 15 bp, Homo sapiens
ggcctacaaatgaaa

SEQ ID NO: 69946 - DNA, 15 bp, Homo sapiens
gggcctacaaatgaa

SEQ ID NO: 69947 - DNA, 15 bp, Homo sapiens
agggcctacaaatga

SEQ ID NO: 69948 - DNA, 15 bp, Homo sapiens
gagggcctacaaatg

SEQ ID NO: 69949 - DNA, 15 bp, Homo sapiens
tgagggcctacaaat

SEQ ID NO: 69950 - DNA, 15 bp, Homo sapiens
gtgagggcctacaaa

SEQ ID NO: 69951 - DNA, 15 bp, Homo sapiens
ggtgagggcctacaa

SEQ ID NO: 69952 - DNA, 15 bp, Homo sapiens
cggtgagggcctaca

SEQ ID NO: 69953 - DNA, 15 bp, Homo sapiens
gcggtgagggcctac

SEQ ID NO: 69954 - DNA, 15 bp, Homo sapiens
tgcggtgagggccta

SEQ ID NO: 69955 - DNA, 15 bp, Homo sapiens
ctgcggtgagggcct

SEQ ID NO: 69956 - DNA, 15 bp, Homo sapiens
cctgcggtgagggcc

SEQ ID NO: 69957 - DNA, 15 bp, Homo sapiens
gcctgcggtgagggc

SEQ ID NO: 69958 - DNA, 15 bp, Homo sapiens
agcctgcggtgaggg

SEQ ID NO: 69959 - DNA, 15 bp, Homo sapiens
gagcctgcggtgagg

SEQ ID NO: 69960 - DNA, 15 bp, Homo sapiens
agagcctgcggtgag

SEQ ID NO: 69961 - DNA, 15 bp, Homo sapiens
gagagcctgcggtga

SEQ ID NO: 69962 - DNA, 15 bp, Homo sapiens
agagagcctgcggtg

SEQ ID NO: 69963 - DNA, 15 bp, Homo sapiens
tagagagcctgcggt

SEQ ID NO: 69964 - DNA, 15 bp, Homo sapiens
atagagagcctgcgg

SEQ ID NO: 69965 - DNA, 15 bp, Homo sapiens
gatagagagcctgcg

SEQ ID NO: 69966 - DNA, 15 bp, Homo sapiens
tgatagagagcctgc

SEQ ID NO: 69967 - DNA, 15 bp, Homo sapiens
ttgatagagagcctg

SEQ ID NO: 69968 - DNA, 15 bp, Homo sapiens
attgatagagagcct

SEQ ID NO: 69969 - DNA, 15 bp, Homo sapiens
aattgatagagagcc

SEQ ID NO: 69970 - DNA, 15 bp, Homo sapiens
aaattgatagagagc

SEQ ID NO: 69971 - DNA, 15 bp, Homo sapiens
caaattgatagagag

SEQ ID NO: 69972 - DNA, 15 bp, Homo sapiens
acaaattgatagaga

SEQ ID NO: 69973 - DNA, 15 bp, Homo sapiens
gacaaattgatagag

SEQ ID NO: 69974 - DNA, 15 bp, Homo sapiens
agacaaattgataga

SEQ ID NO: 69975 - DNA, 15 bp, Homo sapiens
gagacaaattgatag

SEQ ID NO: 69976 - DNA, 15 bp, Homo sapiens
tgagacaaattgata

SEQ ID NO: 69977 - DNA, 15 bp, Homo sapiens
ttgagacaaattgat

SEQ ID NO: 69978 - DNA, 15 bp, Homo sapiens
attgagacaaattga

SEQ ID NO: 69979 - DNA, 15 bp, Homo sapiens
cattgagacaaattg

SEQ ID NO: 69980 - DNA, 15 bp, Homo sapiens
gcattgagacaaatt

SEQ ID NO: 69981 - DNA, 15 bp, Homo sapiens
tgcattgagacaaat

SEQ ID NO: 69982 - DNA, 15 bp, Homo sapiens
ttgcattgagacaaa

SEQ ID NO: 69983 - DNA, 15 bp, Homo sapiens
tttgcattgagacaa

SEQ ID NO: 69984 - DNA, 15 bp, Homo sapiens
gtttgcattgagaca

SEQ ID NO: 69985 - DNA, 15 bp, Homo sapiens
tgtttgcattgagac

SEQ ID NO: 69986 - DNA, 15 bp, Homo sapiens
atgtttgcattgaga

SEQ ID NO: 69987 - DNA, 15 bp, Homo sapiens
aatgtttgcattgag

SEQ ID NO: 69988 - DNA, 15 bp, Homo sapiens
gaatgtttgcattga

SEQ ID NO: 69989 - DNA, 15 bp, Homo sapiens
tgaatgtttgcattg

SEQ ID NO: 69990 - DNA, 15 bp, Homo sapiens
ttgaatgtttgcatt

SEQ ID NO: 69991 - DNA, 15 bp, Homo sapiens
tttgaatgtttgcat

SEQ ID NO: 69992 - DNA, 15 bp, Homo sapiens
ttttgaatgtttgca

SEQ ID NO: 69993 - DNA, 15 bp, Homo sapiens
attttgaatgtttgc

SEQ ID NO: 69994 - DNA, 15 bp, Homo sapiens
tattttgaatgtttg

SEQ ID NO: 69995 - DNA, 15 bp, Homo sapiens
atattttgaatgttt

SEQ ID NO: 69996 - DNA, 15 bp, Homo sapiens
gatattttgaatgtt

SEQ ID NO: 69997 - DNA, 15 bp, Homo sapiens
ggatattttgaatgt

SEQ ID NO: 69998 - DNA, 15 bp, Homo sapiens
gggatattttgaatg

SEQ ID NO: 69999 - DNA, 15 bp, Homo sapiens
ggggatattttgaat

SEQ ID NO: 70000 - DNA, 15 bp, Homo sapiens
aggggatattttgaa

SEQ ID NO: 70001 - DNA, 15 bp, Homo sapiens
aaggggatattttga

SEQ ID NO: 70002 - DNA, 15 bp, Homo sapiens
aaaggggatattttg

SEQ ID NO: 70003 - DNA, 15 bp, Homo sapiens
caaaggggatatttt

SEQ ID NO: 70004 - DNA, 15 bp, Homo sapiens
ccaaaggggatattt

SEQ ID NO: 70005 - DNA, 15 bp, Homo sapiens
gccaaaggggatatt

SEQ ID NO: 70006 - DNA, 15 bp, Homo sapiens
agccaaaggggatat

SEQ ID NO: 70007 - DNA, 15 bp, Homo sapiens
cagccaaaggggata

SEQ ID NO: 70008 - DNA, 15 bp, Homo sapiens
gcagccaaaggggat

SEQ ID NO: 70009 - DNA, 15 bp, Homo sapiens
agcagccaaagggga

SEQ ID NO: 70010 - DNA, 15 bp, Homo sapiens
gagcagccaaagggg

SEQ ID NO: 70011 - DNA, 15 bp, Homo sapiens
cgagcagccaaaggg

SEQ ID NO: 70012 - DNA, 15 bp, Homo sapiens
acgagcagccaaagg

SEQ ID NO: 70013 - DNA, 15 bp, Homo sapiens
cacgagcagccaaag

SEQ ID NO: 70014 - DNA, 15 bp, Homo sapiens
tcacgagcagccaaa

SEQ ID NO: 70015 - DNA, 15 bp, Homo sapiens
ttcacgagcagccaa

SEQ ID NO: 70016 - DNA, 15 bp, Homo sapiens
tttcacgagcagcca

SEQ ID NO: 70017 - DNA, 15 bp, Homo sapiens
ttttcacgagcagcc

SEQ ID NO: 70018 - DNA, 15 bp, Homo sapiens
gttttcacgagcagc

SEQ ID NO: 70019 - DNA, 15 bp, Homo sapiens
tgttttcacgagcag

SEQ ID NO: 70020 - DNA, 15 bp, Homo sapiens
ttgttttcacgagca

SEQ ID NO: 70021 - DNA, 15 bp, Homo sapiens
attgttttcacgagc

SEQ ID NO: 70022 - DNA, 15 bp, Homo sapiens
cattgttttcacgag

SEQ ID NO: 70023 - DNA, 15 bp, Homo sapiens
acattgttttcacga

SEQ ID NO: 70024 - DNA, 15 bp, Homo sapiens
cacattgttttcacg

SEQ ID NO: 70025 - DNA, 15 bp, Homo sapiens
tcacattgttttcac

SEQ ID NO: 70026 - DNA, 15 bp, Homo sapiens
ctcacattgttttca

SEQ ID NO: 70027 - DNA, 15 bp, Homo sapiens
gctcacattgttttc

SEQ ID NO: 70028 - DNA, 15 bp, Homo sapiens
agctcacattgtttt

SEQ ID NO: 70029 - DNA, 15 bp, Homo sapiens
cagctcacattgttt

SEQ ID NO: 70030 - DNA, 15 bp, Homo sapiens
gcagctcacattgtt

SEQ ID NO: 70031 - DNA, 15 bp, Homo sapiens
ggcagctcacattgt

SEQ ID NO: 70032 - DNA, 15 bp, Homo sapiens
tggcagctcacattg

SEQ ID NO: 70033 - DNA, 15 bp, Homo sapiens
ctggcagctcacatt

SEQ ID NO: 70034 - DNA, 15 bp, Homo sapiens
cctggcagctcacat

SEQ ID NO: 70035 - DNA, 15 bp, Homo sapiens
tcctggcagctcaca

SEQ ID NO: 70036 - DNA, 15 bp, Homo sapiens
atcctggcagctcac

SEQ ID NO: 70037 - DNA, 15 bp, Homo sapiens
gatcctggcagctca

SEQ ID NO: 70038 - DNA, 15 bp, Homo sapiens
tgatcctggcagctc

SEQ ID NO: 70039 - DNA, 15 bp, Homo sapiens
ttgatcctggcagct

SEQ ID NO: 70040 - DNA, 15 bp, Homo sapiens
tttgatcctggcagc

SEQ ID NO: 70041 - DNA, 15 bp, Homo sapiens
gtttgatcctggcag

SEQ ID NO: 70042 - DNA, 15 bp, Homo sapiens
ggtttgatcctggca

SEQ ID NO: 70043 - DNA, 15 bp, Homo sapiens
tggtttgatcctggc

SEQ ID NO: 70044 - DNA, 15 bp, Homo sapiens
atggtttgatcctgg

SEQ ID NO: 70045 - DNA, 15 bp, Homo sapiens
gatggtttgatcctg

SEQ ID NO: 70046 - DNA, 15 bp, Homo sapiens
agatggtttgatcct

SEQ ID NO: 70047 - DNA, 15 bp, Homo sapiens
aagatggtttgatcc

SEQ ID NO: 70048 - DNA, 15 bp, Homo sapiens
aaagatggtttgatc

SEQ ID NO: 70049 - DNA, 15 bp, Homo sapiens
gaaagatggtttgat

SEQ ID NO: 70050 - DNA, 15 bp, Homo sapiens
ggaaagatggtttga

SEQ ID NO: 70051 - DNA, 15 bp, Homo sapiens
tggaaagatggtttg

SEQ ID NO: 70052 - DNA, 15 bp, Homo sapiens
ctggaaagatggttt

SEQ ID NO: 70053 - DNA, 15 bp, Homo sapiens
tctggaaagatggtt

SEQ ID NO: 70054 - DNA, 15 bp, Homo sapiens
atctggaaagatggt

SEQ ID NO: 70055 - DNA, 15 bp, Homo sapiens
catctggaaagatgg

SEQ ID NO: 70056 - DNA, 15 bp, Homo sapiens
acatctggaaagatg

SEQ ID NO: 70057 - DNA, 15 bp, Homo sapiens
gacatctggaaagat

SEQ ID NO: 70058 - DNA, 15 bp, Homo sapiens
agacatctggaaaga

SEQ ID NO: 70059 - DNA, 15 bp, Homo sapiens
cagacatctggaaag

SEQ ID NO: 70060 - DNA, 15 bp, Homo sapiens
ccagacatctggaaa

SEQ ID NO: 70061 - DNA, 15 bp, Homo sapiens
accagacatctggaa

SEQ ID NO: 70062 - DNA, 15 bp, Homo sapiens
caccagacatctgga

SEQ ID NO: 70063 - DNA, 15 bp, Homo sapiens
ccaccagacatctgg

SEQ ID NO: 70064 - DNA, 15 bp, Homo sapiens
accaccagacatctg

SEQ ID NO: 70065 - DNA, 15 bp, Homo sapiens
taccaccagacatct

SEQ ID NO: 70066 - DNA, 15 bp, Homo sapiens
ttaccaccagacatc

SEQ ID NO: 70067 - DNA, 15 bp, Homo sapiens
gttaccaccagacat

SEQ ID NO: 70068 - DNA, 15 bp, Homo sapiens
ggttaccaccagaca

SEQ ID NO: 70069 - DNA, 15 bp, Homo sapiens
tggttaccaccagac

SEQ ID NO: 70070 - DNA, 15 bp, Homo sapiens
gtggttaccaccaga

SEQ ID NO: 70071 - DNA, 15 bp, Homo sapiens
tgtggttaccaccag

SEQ ID NO: 70072 - DNA, 15 bp, Homo sapiens
atgtggttaccacca

SEQ ID NO: 70073 - DNA, 15 bp, Homo sapiens
aatgtggttaccacc

SEQ ID NO: 70074 - DNA, 15 bp, Homo sapiens
taatgtggttaccac

SEQ ID NO: 70075 - DNA, 15 bp, Homo sapiens
ttaatgtggttacca

SEQ ID NO: 70076 - DNA, 15 bp, Homo sapiens
tttaatgtggttacc

SEQ ID NO: 70077 - DNA, 15 bp, Homo sapiens
gtttaatgtggttac

SEQ ID NO: 70078 - DNA, 15 bp, Homo sapiens
tgtttaatgtggtta

SEQ ID NO: 70079 - DNA, 15 bp, Homo sapiens
ctgtttaatgtggtt

SEQ ID NO: 70080 - DNA, 15 bp, Homo sapiens
cctgtttaatgtggt

SEQ ID NO: 70081 - DNA, 15 bp, Homo sapiens
ccctgtttaatgtgg

SEQ ID NO: 70082 - DNA, 15 bp, Homo sapiens
accctgtttaatgtg

SEQ ID NO: 70083 - DNA, 15 bp, Homo sapiens
taccctgtttaatgt

SEQ ID NO: 70084 - DNA, 15 bp, Homo sapiens
ctaccctgtttaatg

SEQ ID NO: 70085 - DNA, 15 bp, Homo sapiens
tctaccctgtttaat

SEQ ID NO: 70086 - DNA, 15 bp, Homo sapiens
gtctaccctgtttaa

SEQ ID NO: 70087 - DNA, 15 bp, Homo sapiens
agtctaccctgttta

SEQ ID NO: 70088 - DNA, 15 bp, Homo sapiens
aagtctaccctgttt

SEQ ID NO: 70089 - DNA, 15 bp, Homo sapiens
caagtctaccctgtt

SEQ ID NO: 70090 - DNA, 15 bp, Homo sapiens
acaagtctaccctgt

SEQ ID NO: 70091 - DNA, 15 bp, Homo sapiens
aacaagtctaccctg

SEQ ID NO: 70092 - DNA, 15 bp, Homo sapiens
aaacaagtctaccct

SEQ ID NO: 70093 - DNA, 15 bp, Homo sapiens
taaacaagtctaccc

SEQ ID NO: 70094 - DNA, 15 bp, Homo sapiens
gtaaacaagtctacc

SEQ ID NO: 70095 - DNA, 15 bp, Homo sapiens
agtaaacaagtctac

SEQ ID NO: 70096 - DNA, 15 bp, Homo sapiens
tagtaaacaagtcta

SEQ ID NO: 70097 - DNA, 15 bp, Homo sapiens
atagtaaacaagtct

SEQ ID NO: 70098 - DNA, 15 bp, Homo sapiens
aatagtaaacaagtc

SEQ ID NO: 70099 - DNA, 15 bp, Homo sapiens
caatagtaaacaagt

SEQ ID NO: 70100 - DNA, 15 bp, Homo sapiens
acaatagtaaacaag

SEQ ID NO: 70101 - DNA, 15 bp, Homo sapiens
cacaatagtaaacaa

SEQ ID NO: 70102 - DNA, 15 bp, Homo sapiens
gcacaatagtaaaca

SEQ ID NO: 70103 - DNA, 15 bp, Homo sapiens
agcacaatagtaaac

SEQ ID NO: 70104 - DNA, 15 bp, Homo sapiens
aagcacaatagtaaa

SEQ ID NO: 70105 - DNA, 15 bp, Homo sapiens
caagcacaatagtaa

SEQ ID NO: 70106 - DNA, 15 bp, Homo sapiens
ccaagcacaatagta

SEQ ID NO: 70107 - DNA, 15 bp, Homo sapiens
accaagcacaatagt

SEQ ID NO: 70108 - DNA, 15 bp, Homo sapiens
aaccaagcacaatag

SEQ ID NO: 70109 - DNA, 15 bp, Homo sapiens
taaccaagcacaata

SEQ ID NO: 70110 - DNA, 15 bp, Homo sapiens
ctaaccaagcacaat

SEQ ID NO: 70111 - DNA, 15 bp, Homo sapiens
cctaaccaagcacaa

SEQ ID NO: 70112 - DNA, 15 bp, Homo sapiens
ccctaaccaagcaca

SEQ ID NO: 70113 - DNA, 15 bp, Homo sapiens
gccctaaccaagcac

SEQ ID NO: 70114 - DNA, 15 bp, Homo sapiens
cgccctaaccaagca

SEQ ID NO: 70115 - DNA, 15 bp, Homo sapiens
gcgccctaaccaagc

SEQ ID NO: 70116 - DNA, 15 bp, Homo sapiens
agcgccctaaccaag

SEQ ID NO: 70117 - DNA, 15 bp, Homo sapiens
aagcgccctaaccaa

SEQ ID NO: 70118 - DNA, 15 bp, Homo sapiens
gaagcgccctaacca

SEQ ID NO: 70119 - DNA, 15 bp, Homo sapiens
ggaagcgccctaacc

SEQ ID NO: 70120 - DNA, 15 bp, Homo sapiens
gggaagcgccctaac

SEQ ID NO: 70121 - DNA, 15 bp, Homo sapiens
ggggaagcgccctaa

SEQ ID NO: 70122 - DNA, 15 bp, Homo sapiens
gggggaagcgcccta

SEQ ID NO: 70123 - DNA, 15 bp, Homo sapiens
tgggggaagcgccct

SEQ ID NO: 70124 - DNA, 15 bp, Homo sapiens
atgggggaagcgccc

SEQ ID NO: 70125 - DNA, 15 bp, Homo sapiens
gatgggggaagcgcc

SEQ ID NO: 70126 - DNA, 15 bp, Homo sapiens
ggatgggggaagcgc

SEQ ID NO: 70127 - DNA, 15 bp, Homo sapiens
gggatgggggaagcg

SEQ ID NO: 70128 - DNA, 15 bp, Homo sapiens
ggggatgggggaagc

SEQ ID NO: 70129 - DNA, 15 bp, Homo sapiens
aggggatgggggaag

SEQ ID NO: 70130 - DNA, 15 bp, Homo sapiens
aaggggatgggggaa

SEQ ID NO: 70131 - DNA, 15 bp, Homo sapiens
aaaggggatggggga

SEQ ID NO: 70132 - DNA, 15 bp, Homo sapiens
gaaaggggatggggg

SEQ ID NO: 70133 - DNA, 15 bp, Homo sapiens
tgaaaggggatgggg

SEQ ID NO: 70134 - DNA, 15 bp, Homo sapiens
ctgaaaggggatggg

SEQ ID NO: 70135 - DNA, 15 bp, Homo sapiens
cctgaaaggggatgg

SEQ ID NO: 70136 - DNA, 15 bp, Homo sapiens
tcctgaaaggggatg

SEQ ID NO: 70137 - DNA, 15 bp, Homo sapiens
atcctgaaaggggat

SEQ ID NO: 70138 - DNA, 15 bp, Homo sapiens
aatcctgaaagggga

SEQ ID NO: 70139 - DNA, 15 bp, Homo sapiens
aaatcctgaaagggg

SEQ ID NO: 70140 - DNA, 15 bp, Homo sapiens
taaatcctgaaaggg

SEQ ID NO: 70141 - DNA, 15 bp, Homo sapiens
ttaaatcctgaaagg

SEQ ID NO: 70142 - DNA, 15 bp, Homo sapiens
tttaaatcctgaaag

SEQ ID NO: 70143 - DNA, 15 bp, Homo sapiens
ttttaaatcctgaaa

SEQ ID NO: 70144 - DNA, 15 bp, Homo sapiens
tttttaaatcctgaa

SEQ ID NO: 70145 - DNA, 15 bp, Homo sapiens
ttttttaaatcctga

SEQ ID NO: 70146 - DNA, 15 bp, Homo sapiens
cttttttaaatcctg

SEQ ID NO: 70147 - DNA, 15 bp, Homo sapiens
gcttttttaaatcct

SEQ ID NO: 70148 - DNA, 15 bp, Homo sapiens
tgcttttttaaatcc

SEQ ID NO: 70149 - DNA, 15 bp, Homo sapiens
ctgcttttttaaatc

SEQ ID NO: 70150 - DNA, 15 bp, Homo sapiens
gctgcttttttaaat

SEQ ID NO: 70151 - DNA, 15 bp, Homo sapiens
tgctgcttttttaaa

SEQ ID NO: 70152 - DNA, 15 bp, Homo sapiens
ctgctgcttttttaa

SEQ ID NO: 70153 - DNA, 15 bp, Homo sapiens
actgctgctttttta

SEQ ID NO: 70154 - DNA, 15 bp, Homo sapiens
tactgctgctttttt

SEQ ID NO: 70155 - DNA, 15 bp, Homo sapiens
ctactgctgcttttt

SEQ ID NO: 70156 - DNA, 15 bp, Homo sapiens
gctactgctgctttt

SEQ ID NO: 70157 - DNA, 15 bp, Homo sapiens
tgctactgctgcttt

SEQ ID NO: 70158 - DNA, 15 bp, Homo sapiens
ctgctactgctgctt

SEQ ID NO: 70159 - DNA, 15 bp, Homo sapiens
actgctactgctgct

SEQ ID NO: 70160 - DNA, 15 bp, Homo sapiens
cactgctactgctgc

SEQ ID NO: 70161 - DNA, 15 bp, Homo sapiens
ccactgctactgctg

SEQ ID NO: 70162 - DNA, 15 bp, Homo sapiens
tccactgctactgct

SEQ ID NO: 70163 - DNA, 15 bp, Homo sapiens
ctccactgctactgc

SEQ ID NO: 70164 - DNA, 15 bp, Homo sapiens
actccactgctactg

SEQ ID NO: 70165 - DNA, 15 bp, Homo sapiens
aactccactgctact

SEQ ID NO: 70166 - DNA, 15 bp, Homo sapiens
caactccactgctac

SEQ ID NO: 70167 - DNA, 15 bp, Homo sapiens
tcaactccactgcta

SEQ ID NO: 70168 - DNA, 15 bp, Homo sapiens
gtcaactccactgct

SEQ ID NO: 70169 - DNA, 15 bp, Homo sapiens
ggtcaactccactgc

SEQ ID NO: 70170 - DNA, 15 bp, Homo sapiens
tggtcaactccactg

SEQ ID NO: 70171 - DNA, 15 bp, Homo sapiens
atggtcaactccact

SEQ ID NO: 70172 - DNA, 15 bp, Homo sapiens
gatggtcaactccac

SEQ ID NO: 70173 - DNA, 15 bp, Homo sapiens
tgatggtcaactcca

SEQ ID NO: 70174 - DNA, 15 bp, Homo sapiens
ttgatggtcaactcc

SEQ ID NO: 70175 - DNA, 15 bp, Homo sapiens
tttgatggtcaactc

SEQ ID NO: 70176 - DNA, 15 bp, Homo sapiens
gtttgatggtcaact

SEQ ID NO: 70177 - DNA, 15 bp, Homo sapiens
ggtttgatggtcaac

SEQ ID NO: 70178 - DNA, 15 bp, Homo sapiens
gggtttgatggtcaa

SEQ ID NO: 70179 - DNA, 15 bp, Homo sapiens
agggtttgatggtca

SEQ ID NO: 70180 - DNA, 15 bp, Homo sapiens
cagggtttgatggtc

SEQ ID NO: 70181 - DNA, 15 bp, Homo sapiens
tcagggtttgatggt

SEQ ID NO: 70182 - DNA, 15 bp, Homo sapiens
ctcagggtttgatgg

SEQ ID NO: 70183 - DNA, 15 bp, Homo sapiens
actcagggtttgatg

SEQ ID NO: 70184 - DNA, 15 bp, Homo sapiens
aactcagggtttgat

SEQ ID NO: 70185 - DNA, 15 bp, Homo sapiens
taactcagggtttga

SEQ ID NO: 70186 - DNA, 15 bp, Homo sapiens
gtaactcagggtttg

SEQ ID NO: 70187 - DNA, 15 bp, Homo sapiens
tgtaactcagggttt

SEQ ID NO: 70188 - DNA, 15 bp, Homo sapiens
atgtaactcagggtt

SEQ ID NO: 70189 - DNA, 15 bp, Homo sapiens
tatgtaactcagggt

SEQ ID NO: 70190 - DNA, 15 bp, Homo sapiens
ttatgtaactcaggg

SEQ ID NO: 70191 - DNA, 15 bp, Homo sapiens
tttatgtaactcagg

SEQ ID NO: 70192 - DNA, 15 bp, Homo sapiens
ttttatgtaactcag

SEQ ID NO: 70193 - DNA, 15 bp, Homo sapiens
cttttatgtaactca

SEQ ID NO: 70194 - DNA, 15 bp, Homo sapiens
acttttatgtaactc

SEQ ID NO: 70195 - DNA, 15 bp, Homo sapiens
cacttttatgtaact

SEQ ID NO: 70196 - DNA, 15 bp, Homo sapiens
ccacttttatgtaac

SEQ ID NO: 70197 - DNA, 15 bp, Homo sapiens
cccacttttatgtaa

SEQ ID NO: 70198 - DNA, 15 bp, Homo sapiens
ccccacttttatgta

SEQ ID NO: 70199 - DNA, 15 bp, Homo sapiens
gccccacttttatgt

SEQ ID NO: 70200 - DNA, 15 bp, Homo sapiens
tgccccacttttatg

SEQ ID NO: 70201 - DNA, 15 bp, Homo sapiens
ttgccccacttttat

SEQ ID NO: 70202 - DNA, 15 bp, Homo sapiens
tttgccccactttta

SEQ ID NO: 70203 - DNA, 15 bp, Homo sapiens
gtttgccccactttt

SEQ ID NO: 70204 - DNA, 15 bp, Homo sapiens
agtttgccccacttt

SEQ ID NO: 70205 - DNA, 15 bp, Homo sapiens
cagtttgccccactt

SEQ ID NO: 70206 - DNA, 15 bp, Homo sapiens
tcagtttgccccact

SEQ ID NO: 70207 - DNA, 15 bp, Homo sapiens
gtcagtttgccccac

SEQ ID NO: 70208 - DNA, 15 bp, Homo sapiens
ggtcagtttgcccca

SEQ ID NO: 70209 - DNA, 15 bp, Homo sapiens
aggtcagtttgcccc

SEQ ID NO: 70210 - DNA, 15 bp, Homo sapiens
taggtcagtttgccc

SEQ ID NO: 70211 - DNA, 15 bp, Homo sapiens
gtaggtcagtttgcc

SEQ ID NO: 70212 - DNA, 15 bp, Homo sapiens
cgtaggtcagtttgc

SEQ ID NO: 70213 - DNA, 15 bp, Homo sapiens
ccgtaggtcagtttg

SEQ ID NO: 70214 - DNA, 15 bp, Homo sapiens
cccgtaggtcagttt

SEQ ID NO: 70215 - DNA, 15 bp, Homo sapiens
gcccgtaggtcagtt

SEQ ID NO: 70216 - DNA, 15 bp, Homo sapiens
tgcccgtaggtcagt

SEQ ID NO: 70217 - DNA, 15 bp, Homo sapiens
atgcccgtaggtcag

SEQ ID NO: 70218 - DNA, 15 bp, Homo sapiens
catgcccgtaggtca

SEQ ID NO: 70219 - DNA, 15 bp, Homo sapiens
gcatgcccgtaggtc

SEQ ID NO: 70220 - DNA, 15 bp, Homo sapiens
ggcatgcccgtaggt

SEQ ID NO: 70221 - DNA, 15 bp, Homo sapiens
tggcatgcccgtagg

SEQ ID NO: 70222 - DNA, 15 bp, Homo sapiens
ttggcatgcccgtag

SEQ ID NO: 70223 - DNA, 15 bp, Homo sapiens
gttggcatgcccgta

SEQ ID NO: 70224 - DNA, 15 bp, Homo sapiens
tgttggcatgcccgt

SEQ ID NO: 70225 - DNA, 15 bp, Homo sapiens
gtgttggcatgcccg

SEQ ID NO: 70226 - DNA, 15 bp, Homo sapiens
agtgttggcatgccc

SEQ ID NO: 70227 - DNA, 15 bp, Homo sapiens
cagtgttggcatgcc

SEQ ID NO: 70228 - DNA, 15 bp, Homo sapiens
ccagtgttggcatgc

SEQ ID NO: 70229 - DNA, 15 bp, Homo sapiens
tccagtgttggcatg

SEQ ID NO: 70230 - DNA, 15 bp, Homo sapiens
atccagtgttggcat

SEQ ID NO: 70231 - DNA, 15 bp, Homo sapiens
catccagtgttggca

SEQ ID NO: 70232 - DNA, 15 bp, Homo sapiens
ccatccagtgttggc

SEQ ID NO: 70233 - DNA, 15 bp, Homo sapiens
tccatccagtgttgg

SEQ ID NO: 70234 - DNA, 15 bp, Homo sapiens
ctccatccagtgttg

SEQ ID NO: 70235 - DNA, 15 bp, Homo sapiens
cctccatccagtgtt

SEQ ID NO: 70236 - DNA, 15 bp, Homo sapiens
tcctccatccagtgt

SEQ ID NO: 70237 - DNA, 15 bp, Homo sapiens
ttcctccatccagtg

SEQ ID NO: 70238 - DNA, 15 bp, Homo sapiens
tttcctccatccagt

SEQ ID NO: 70239 - DNA, 15 bp, Homo sapiens
atttcctccatccag

SEQ ID NO: 70240 - DNA, 15 bp, Homo sapiens
gatttcctccatcca

SEQ ID NO: 70241 - DNA, 15 bp, Homo sapiens
ggatttcctccatcc

SEQ ID NO: 70242 - DNA, 15 bp, Homo sapiens
cggatttcctccatc

SEQ ID NO: 70243 - DNA, 15 bp, Homo sapiens
tcggatttcctccat

SEQ ID NO: 70244 - DNA, 15 bp, Homo sapiens
ctcggatttcctcca

SEQ ID NO: 70245 - DNA, 15 bp, Homo sapiens
tctcggatttcctcc

SEQ ID NO: 70246 - DNA, 15 bp, Homo sapiens
atctcggatttcctc

SEQ ID NO: 70247 - DNA, 15 bp, Homo sapiens
aatctcggatttcct

SEQ ID NO: 70248 - DNA, 15 bp, Homo sapiens
gaatctcggatttcc

SEQ ID NO: 70249 - DNA, 15 bp, Homo sapiens
ggaatctcggatttc

SEQ ID NO: 70250 - DNA, 15 bp, Homo sapiens
gggaatctcggattt

SEQ ID NO: 70251 - DNA, 15 bp, Homo sapiens
cgggaatctcggatt

SEQ ID NO: 70252 - DNA, 15 bp, Homo sapiens
gcgggaatctcggat

SEQ ID NO: 70253 - DNA, 15 bp, Homo sapiens
tgcgggaatctcgga

SEQ ID NO: 70254 - DNA, 15 bp, Homo sapiens
ctgcgggaatctcgg

SEQ ID NO: 70255 - DNA, 15 bp, Homo sapiens
cctgcgggaatctcg

SEQ ID NO: 70256 - DNA, 15 bp, Homo sapiens
gcctgcgggaatctc

SEQ ID NO: 70257 - DNA, 15 bp, Homo sapiens
tgcctgcgggaatct

SEQ ID NO: 70258 - DNA, 15 bp, Homo sapiens
atgcctgcgggaatc

SEQ ID NO: 70259 - DNA, 15 bp, Homo sapiens
gatgcctgcgggaat

SEQ ID NO: 70260 - DNA, 15 bp, Homo sapiens
agatgcctgcgggaa

SEQ ID NO: 70261 - DNA, 15 bp, Homo sapiens
tagatgcctgcggga

SEQ ID NO: 70262 - DNA, 15 bp, Homo sapiens
ctagatgcctgcggg

SEQ ID NO: 70263 - DNA, 15 bp, Homo sapiens
actagatgcctgcgg

SEQ ID NO: 70264 - DNA, 15 bp, Homo sapiens
gactagatgcctgcg

SEQ ID NO: 70265 - DNA, 15 bp, Homo sapiens
tgactagatgcctgc

SEQ ID NO: 70266 - DNA, 15 bp, Homo sapiens
ctgactagatgcctg

SEQ ID NO: 70267 - DNA, 15 bp, Homo sapiens
tctgactagatgcct

SEQ ID NO: 70268 - DNA, 15 bp, Homo sapiens
ctctgactagatgcc

SEQ ID NO: 70269 - DNA, 15 bp, Homo sapiens
actctgactagatgc

SEQ ID NO: 70270 - DNA, 15 bp, Homo sapiens
aactctgactagatg

SEQ ID NO: 70271 - DNA, 15 bp, Homo sapiens
taactctgactagat

SEQ ID NO: 70272 - DNA, 15 bp, Homo sapiens
ctaactctgactaga

SEQ ID NO: 70273 - DNA, 15 bp, Homo sapiens
cctaactctgactag

SEQ ID NO: 70274 - DNA, 15 bp, Homo sapiens
acctaactctgacta

SEQ ID NO: 70275 - DNA, 15 bp, Homo sapiens
cacctaactctgact

SEQ ID NO: 70276 - DNA, 15 bp, Homo sapiens
ccacctaactctgac

SEQ ID NO: 70277 - DNA, 15 bp, Homo sapiens
cccacctaactctga

SEQ ID NO: 70278 - DNA, 15 bp, Homo sapiens
ccccacctaactctg

SEQ ID NO: 70279 - DNA, 15 bp, Homo sapiens
accccacctaactct

SEQ ID NO: 70280 - DNA, 15 bp, Homo sapiens
gaccccacctaactc

SEQ ID NO: 70281 - DNA, 15 bp, Homo sapiens
agaccccacctaact

SEQ ID NO: 70282 - DNA, 15 bp, Homo sapiens
aagaccccacctaac

SEQ ID NO: 70283 - DNA, 15 bp, Homo sapiens
gaagaccccacctaa

SEQ ID NO: 70284 - DNA, 15 bp, Homo sapiens
agaagaccccaccta

SEQ ID NO: 70285 - DNA, 15 bp, Homo sapiens
aagaagaccccacct

SEQ ID NO: 70286 - DNA, 15 bp, Homo sapiens
aaagaagaccccacc

SEQ ID NO: 70287 - DNA, 15 bp, Homo sapiens
gaaagaagaccccac

SEQ ID NO: 70288 - DNA, 15 bp, Homo sapiens
agaaagaagacccca

SEQ ID NO: 70289 - DNA, 15 bp, Homo sapiens
cagaaagaagacccc

SEQ ID NO: 70290 - DNA, 15 bp, Homo sapiens
ccagaaagaagaccc

SEQ ID NO: 70291 - DNA, 15 bp, Homo sapiens
cccagaaagaagacc

SEQ ID NO: 70292 - DNA, 15 bp, Homo sapiens
acccagaaagaagac

SEQ ID NO: 70293 - DNA, 15 bp, Homo sapiens
cacccagaaagaaga

SEQ ID NO: 70294 - DNA, 15 bp, Homo sapiens
ccacccagaaagaag

SEQ ID NO: 70295 - DNA, 15 bp, Homo sapiens
tccacccagaaagaa

SEQ ID NO: 70296 - DNA, 15 bp, Homo sapiens
ctccacccagaaaga

SEQ ID NO: 70297 - DNA, 15 bp, Homo sapiens
tctccacccagaaag

SEQ ID NO: 70298 - DNA, 15 bp, Homo sapiens
gtctccacccagaaa

SEQ ID NO: 70299 - DNA, 15 bp, Homo sapiens
ggtctccacccagaa

SEQ ID NO: 70300 - DNA, 15 bp, Homo sapiens
aggtctccacccaga

SEQ ID NO: 70301 - DNA, 15 bp, Homo sapiens
gaggtctccacccag

SEQ ID NO: 70302 - DNA, 15 bp, Homo sapiens
agaggtctccaccca

SEQ ID NO: 70303 - DNA, 15 bp, Homo sapiens
cagaggtctccaccc

SEQ ID NO: 70304 - DNA, 15 bp, Homo sapiens
acagaggtctccacc

SEQ ID NO: 70305 - DNA, 15 bp, Homo sapiens
cacagaggtctccac

SEQ ID NO: 70306 - DNA, 15 bp, Homo sapiens
tcacagaggtctcca

SEQ ID NO: 70307 - DNA, 15 bp, Homo sapiens
ttcacagaggtctcc

SEQ ID NO: 70308 - DNA, 15 bp, Homo sapiens
attcacagaggtctc

SEQ ID NO: 70309 - DNA, 15 bp, Homo sapiens
cattcacagaggtct

SEQ ID NO: 70310 - DNA, 15 bp, Homo sapiens
ccattcacagaggtc

SEQ ID NO: 70311 - DNA, 15 bp, Homo sapiens
tccattcacagaggt

SEQ ID NO: 70312 - DNA, 15 bp, Homo sapiens
gtccattcacagagg

SEQ ID NO: 70313 - DNA, 15 bp, Homo sapiens
tgtccattcacagag

SEQ ID NO: 70314 - DNA, 15 bp, Homo sapiens
ctgtccattcacaga

SEQ ID NO: 70315 - DNA, 15 bp, Homo sapiens
cctgtccattcacag

SEQ ID NO: 70316 - DNA, 15 bp, Homo sapiens
tcctgtccattcaca

SEQ ID NO: 70317 - DNA, 15 bp, Homo sapiens
ctcctgtccattcac

SEQ ID NO: 70318 - DNA, 15 bp, Homo sapiens
gctcctgtccattca

SEQ ID NO: 70319 - DNA, 15 bp, Homo sapiens
agctcctgtccattc

SEQ ID NO: 70320 - DNA, 15 bp, Homo sapiens
aagctcctgtccatt

SEQ ID NO: 70321 - DNA, 15 bp, Homo sapiens
gaagctcctgtccat

SEQ ID NO: 70322 - DNA, 15 bp, Homo sapiens
agaagctcctgtcca

SEQ ID NO: 70323 - DNA, 15 bp, Homo sapiens
gagaagctcctgtcc

SEQ ID NO: 70324 - DNA, 15 bp, Homo sapiens
ggagaagctcctgtc

SEQ ID NO: 70325 - DNA, 15 bp, Homo sapiens
gggagaagctcctgt

SEQ ID NO: 70326 - DNA, 15 bp, Homo sapiens
tgggagaagctcctg

SEQ ID NO: 70327 - DNA, 15 bp, Homo sapiens
ctgggagaagctcct

SEQ ID NO: 70328 - DNA, 15 bp, Homo sapiens
cctgggagaagctcc

SEQ ID NO: 70329 - DNA, 15 bp, Homo sapiens
ccctgggagaagctc

SEQ ID NO: 70330 - DNA, 15 bp, Homo sapiens
cccctgggagaagct

SEQ ID NO: 70331 - DNA, 15 bp, Homo sapiens
ccccctgggagaagc

SEQ ID NO: 70332 - DNA, 15 bp, Homo sapiens
gccccctgggagaag

SEQ ID NO: 70333 - DNA, 15 bp, Homo sapiens
agccccctgggagaa

SEQ ID NO: 70334 - DNA, 15 bp, Homo sapiens
cagccccctgggaga

SEQ ID NO: 70335 - DNA, 15 bp, Homo sapiens
tcagccccctgggag

SEQ ID NO: 70336 - DNA, 15 bp, Homo sapiens
ttcagccccctggga

SEQ ID NO: 70337 - DNA, 15 bp, Homo sapiens
tttcagccccctggg

SEQ ID NO: 70338 - DNA, 15 bp, Homo sapiens
ttttcagccccctgg

SEQ ID NO: 70339 - DNA, 15 bp, Homo sapiens
attttcagccccctg

SEQ ID NO: 70340 - DNA, 15 bp, Homo sapiens
gattttcagccccct

SEQ ID NO: 70341 - DNA, 15 bp, Homo sapiens
cgattttcagccccc

SEQ ID NO: 70342 - DNA, 15 bp, Homo sapiens
gcgattttcagcccc

SEQ ID NO: 70343 - DNA, 15 bp, Homo sapiens
ggcgattttcagccc

SEQ ID NO: 70344 - DNA, 15 bp, Homo sapiens
tggcgattttcagcc

SEQ ID NO: 70345 - DNA, 15 bp, Homo sapiens
ttggcgattttcagc

SEQ ID NO: 70346 - DNA, 15 bp, Homo sapiens
gttggcgattttcag

SEQ ID NO: 70347 - DNA, 15 bp, Homo sapiens
tgttggcgattttca

SEQ ID NO: 70348 - DNA, 15 bp, Homo sapiens
ttgttggcgattttc

SEQ ID NO: 70349 - DNA, 15 bp, Homo sapiens
gttgttggcgatttt

SEQ ID NO: 70350 - DNA, 15 bp, Homo sapiens
tgttgttggcgattt

SEQ ID NO: 70351 - DNA, 15 bp, Homo sapiens
ctgttgttggcgatt

SEQ ID NO: 70352 - DNA, 15 bp, Homo sapiens
actgttgttggcgat

SEQ ID NO: 70353 - DNA, 15 bp, Homo sapiens
cactgttgttggcga

SEQ ID NO: 70354 - DNA, 15 bp, Homo sapiens
ccactgttgttggcg

SEQ ID NO: 70355 - DNA, 15 bp, Homo sapiens
gccactgttgttggc

SEQ ID NO: 70356 - DNA, 15 bp, Homo sapiens
tgccactgttgttgg

SEQ ID NO: 70357 - DNA, 15 bp, Homo sapiens
gtgccactgttgttg

SEQ ID NO: 70358 - DNA, 15 bp, Homo sapiens
ggtgccactgttgtt

SEQ ID NO: 70359 - DNA, 15 bp, Homo sapiens
tggtgccactgttgt

SEQ ID NO: 70360 - DNA, 15 bp, Homo sapiens
ctggtgccactgttg

SEQ ID NO: 70361 - DNA, 15 bp, Homo sapiens
actggtgccactgtt

SEQ ID NO: 70362 - DNA, 15 bp, Homo sapiens
cactggtgccactgt

SEQ ID NO: 70363 - DNA, 15 bp, Homo sapiens
gcactggtgccactg

SEQ ID NO: 70364 - DNA, 15 bp, Homo sapiens
ggcactggtgccact

SEQ ID NO: 70365 - DNA, 15 bp, Homo sapiens
tggcactggtgccac

SEQ ID NO: 70366 - DNA, 15 bp, Homo sapiens
ctggcactggtgcca

SEQ ID NO: 70367 - DNA, 15 bp, Homo sapiens
actggcactggtgcc

SEQ ID NO: 70368 - DNA, 15 bp, Homo sapiens
gactggcactggtgc

SEQ ID NO: 70369 - DNA, 15 bp, Homo sapiens
agactggcactggtg

SEQ ID NO: 70370 - DNA, 15 bp, Homo sapiens
cagactggcactggt

SEQ ID NO: 70371 - DNA, 15 bp, Homo sapiens
acagactggcactgg

SEQ ID NO: 70372 - DNA, 15 bp, Homo sapiens
cacagactggcactg

SEQ ID NO: 70373 - DNA, 15 bp, Homo sapiens
tcacagactggcact

SEQ ID NO: 70374 - DNA, 15 bp, Homo sapiens
ctcacagactggcac

SEQ ID NO: 70375 - DNA, 15 bp, Homo sapiens
actcacagactggca

SEQ ID NO: 70376 - DNA, 15 bp, Homo sapiens
gactcacagactggc

SEQ ID NO: 70377 - DNA, 15 bp, Homo sapiens
ggactcacagactgg

SEQ ID NO: 70378 - DNA, 15 bp, Homo sapiens
gggactcacagactg

SEQ ID NO: 70379 - DNA, 15 bp, Homo sapiens
tgggactcacagact

SEQ ID NO: 70380 - DNA, 15 bp, Homo sapiens
ttgggactcacagac

SEQ ID NO: 70381 - DNA, 15 bp, Homo sapiens
tttgggactcacaga

SEQ ID NO: 70382 - DNA, 15 bp, Homo sapiens
ctttgggactcacag

SEQ ID NO: 70383 - DNA, 15 bp, Homo sapiens
cctttgggactcaca

SEQ ID NO: 70384 - DNA, 15 bp, Homo sapiens
ccctttgggactcac

SEQ ID NO: 70385 - DNA, 15 bp, Homo sapiens
gccctttgggactca

SEQ ID NO: 70386 - DNA, 15 bp, Homo sapiens
ggccctttgggactc

SEQ ID NO: 70387 - DNA, 15 bp, Homo sapiens
cggccctttgggact

SEQ ID NO: 70388 - DNA, 15 bp, Homo sapiens
ccggccctttgggac

SEQ ID NO: 70389 - DNA, 15 bp, Homo sapiens
cccggccctttggga

SEQ ID NO: 70390 - DNA, 15 bp, Homo sapiens
ccccggccctttggg

SEQ ID NO: 70391 - DNA, 15 bp, Homo sapiens
accccggccctttgg

SEQ ID NO: 70392 - DNA, 15 bp, Homo sapiens
caccccggccctttg

SEQ ID NO: 70393 - DNA, 15 bp, Homo sapiens
gcaccccggcccttt

SEQ ID NO: 70394 - DNA, 15 bp, Homo sapiens
ggcaccccggccctt

SEQ ID NO: 70395 - DNA, 15 bp, Homo sapiens
aggcaccccggccct

SEQ ID NO: 70396 - DNA, 15 bp, Homo sapiens
caggcaccccggccc

SEQ ID NO: 70397 - DNA, 15 bp, Homo sapiens
acaggcaccccggcc

SEQ ID NO: 70398 - DNA, 15 bp, Homo sapiens
cacaggcaccccggc

SEQ ID NO: 70399 - DNA, 15 bp, Homo sapiens
acacaggcaccccgg

SEQ ID NO: 70400 - DNA, 15 bp, Homo sapiens
gacacaggcaccccg

SEQ ID NO: 70401 - DNA, 15 bp, Homo sapiens
agacacaggcacccc

SEQ ID NO: 70402 - DNA, 15 bp, Homo sapiens
tagacacaggcaccc

SEQ ID NO: 70403 - DNA, 15 bp, Homo sapiens
atagacacaggcacc

SEQ ID NO: 70404 - DNA, 15 bp, Homo sapiens
catagacacaggcac

SEQ ID NO: 70405 - DNA, 15 bp, Homo sapiens
gcatagacacaggca

SEQ ID NO: 70406 - DNA, 15 bp, Homo sapiens
tgcatagacacaggc

SEQ ID NO: 70407 - DNA, 15 bp, Homo sapiens
atgcatagacacagg

SEQ ID NO: 70408 - DNA, 15 bp, Homo sapiens
gatgcatagacacag

SEQ ID NO: 70409 - DNA, 15 bp, Homo sapiens
agatgcatagacaca

SEQ ID NO: 70410 - DNA, 15 bp, Homo sapiens
tagatgcatagacac

SEQ ID NO: 70411 - DNA, 15 bp, Homo sapiens
ctagatgcatagaca

SEQ ID NO: 70412 - DNA, 15 bp, Homo sapiens
actagatgcatagac

SEQ ID NO: 70413 - DNA, 15 bp, Homo sapiens
cactagatgcataga

SEQ ID NO: 70414 - DNA, 15 bp, Homo sapiens
ccactagatgcatag

SEQ ID NO: 70415 - DNA, 15 bp, Homo sapiens
accactagatgcata

SEQ ID NO: 70416 - DNA, 15 bp, Homo sapiens
caccactagatgcat

SEQ ID NO: 70417 - DNA, 15 bp, Homo sapiens
gcaccactagatgca

SEQ ID NO: 70418 - DNA, 15 bp, Homo sapiens
ggcaccactagatgc

SEQ ID NO: 70419 - DNA, 15 bp, Homo sapiens
aggcaccactagatg

SEQ ID NO: 70420 - DNA, 15 bp, Homo sapiens
caggcaccactagat

SEQ ID NO: 70421 - DNA, 15 bp, Homo sapiens
acaggcaccactaga

SEQ ID NO: 70422 - DNA, 15 bp, Homo sapiens
cacaggcaccactag

SEQ ID NO: 70423 - DNA, 15 bp, Homo sapiens
gcacaggcaccacta

SEQ ID NO: 70424 - DNA, 15 bp, Homo sapiens
ggcacaggcaccact

SEQ ID NO: 70425 - DNA, 15 bp, Homo sapiens
tggcacaggcaccac

SEQ ID NO: 70426 - DNA, 15 bp, Homo sapiens
ctggcacaggcacca

SEQ ID NO: 70427 - DNA, 15 bp, Homo sapiens
cctggcacaggcacc

SEQ ID NO: 70428 - DNA, 15 bp, Homo sapiens
gcctggcacaggcac

SEQ ID NO: 70429 - DNA, 15 bp, Homo sapiens
agcctggcacaggca

SEQ ID NO: 70430 - DNA, 15 bp, Homo sapiens
gagcctggcacaggc

SEQ ID NO: 70431 - DNA, 15 bp, Homo sapiens
agagcctggcacagg

SEQ ID NO: 70432 - DNA, 15 bp, Homo sapiens
gagagcctggcacag

SEQ ID NO: 70433 - DNA, 15 bp, Homo sapiens
ggagagcctggcaca

SEQ ID NO: 70434 - DNA, 15 bp, Homo sapiens
tggagagcctggcac

SEQ ID NO: 70435 - DNA, 15 bp, Homo sapiens
gtggagagcctggca

SEQ ID NO: 70436 - DNA, 15 bp, Homo sapiens
agtggagagcctggc

SEQ ID NO: 70437 - DNA, 15 bp, Homo sapiens
tagtggagagcctgg

SEQ ID NO: 70438 - DNA, 15 bp, Homo sapiens
gtagtggagagcctg

SEQ ID NO: 70439 - DNA, 15 bp, Homo sapiens
ggtagtggagagcct

SEQ ID NO: 70440 - DNA, 15 bp, Homo sapiens
gggtagtggagagcc

SEQ ID NO: 70441 - DNA, 15 bp, Homo sapiens
ggggtagtggagagc

SEQ ID NO: 70442 - DNA, 15 bp, Homo sapiens
gggggtagtggagag

SEQ ID NO: 70443 - DNA, 15 bp, Homo sapiens
ggggggtagtggaga

SEQ ID NO: 70444 - DNA, 15 bp, Homo sapiens
cggggggtagtggag

SEQ ID NO: 70445 - DNA, 15 bp, Homo sapiens
gcggggggtagtgga

SEQ ID NO: 70446 - DNA, 15 bp, Homo sapiens
ggcggggggtagtgg

SEQ ID NO: 70447 - DNA, 15 bp, Homo sapiens
gggcggggggtagtg

SEQ ID NO: 70448 - DNA, 15 bp, Homo sapiens
tgggcggggggtagt

SEQ ID NO: 70449 - DNA, 15 bp, Homo sapiens
atgggcggggggtag

SEQ ID NO: 70450 - DNA, 15 bp, Homo sapiens
gatgggcggggggta

SEQ ID NO: 70451 - DNA, 15 bp, Homo sapiens
agatgggcggggggt

SEQ ID NO: 70452 - DNA, 15 bp, Homo sapiens
gagatgggcgggggg

SEQ ID NO: 70453 - DNA, 15 bp, Homo sapiens
ggagatgggcggggg

SEQ ID NO: 70454 - DNA, 15 bp, Homo sapiens
tggagatgggcgggg

SEQ ID NO: 70455 - DNA, 15 bp, Homo sapiens
ttggagatgggcggg

SEQ ID NO: 70456 - DNA, 15 bp, Homo sapiens
tttggagatgggcgg

SEQ ID NO: 70457 - DNA, 15 bp, Homo sapiens
ttttggagatgggcg

SEQ ID NO: 70458 - DNA, 15 bp, Homo sapiens
gttttggagatgggc

SEQ ID NO: 70459 - DNA, 15 bp, Homo sapiens
ggttttggagatggg

SEQ ID NO: 70460 - DNA, 15 bp, Homo sapiens
tggttttggagatgg

SEQ ID NO: 70461 - DNA, 15 bp, Homo sapiens
atggttttggagatg

SEQ ID NO: 70462 - DNA, 15 bp, Homo sapiens
catggttttggagat

SEQ ID NO: 70463 - DNA, 15 bp, Homo sapiens
tcatggttttggaga

SEQ ID NO: 70464 - DNA, 15 bp, Homo sapiens
ttcatggttttggag

SEQ ID NO: 70465 - DNA, 15 bp, Homo sapiens
tttcatggttttgga

SEQ ID NO: 70466 - DNA, 15 bp, Homo sapiens
atttcatggttttgg

SEQ ID NO: 70467 - DNA, 15 bp, Homo sapiens
aatttcatggttttg

SEQ ID NO: 70468 - DNA, 15 bp, Homo sapiens
caatttcatggtttt

SEQ ID NO: 70469 - DNA, 15 bp, Homo sapiens
gcaatttcatggttt

SEQ ID NO: 70470 - DNA, 15 bp, Homo sapiens
ggcaatttcatggtt

SEQ ID NO: 70471 - DNA, 15 bp, Homo sapiens
cggcaatttcatggt

SEQ ID NO: 70472 - DNA, 15 bp, Homo sapiens
acggcaatttcatgg

SEQ ID NO: 70473 - DNA, 15 bp, Homo sapiens
tacggcaatttcatg

SEQ ID NO: 70474 - DNA, 15 bp, Homo sapiens
ctacggcaatttcat

SEQ ID NO: 70475 - DNA, 15 bp, Homo sapiens
gctacggcaatttca

SEQ ID NO: 70476 - DNA, 15 bp, Homo sapiens
agctacggcaatttc

SEQ ID NO: 70477 - DNA, 15 bp, Homo sapiens
aagctacggcaattt

SEQ ID NO: 70478 - DNA, 15 bp, Homo sapiens
aaagctacggcaatt

SEQ ID NO: 70479 - DNA, 15 bp, Homo sapiens
caaagctacggcaat

SEQ ID NO: 70480 - DNA, 15 bp, Homo sapiens
ccaaagctacggcaa

SEQ ID NO: 70481 - DNA, 15 bp, Homo sapiens
tccaaagctacggca

SEQ ID NO: 70482 - DNA, 15 bp, Homo sapiens
ctccaaagctacggc

SEQ ID NO: 70483 - DNA, 15 bp, Homo sapiens
tctccaaagctacgg

SEQ ID NO: 70484 - DNA, 15 bp, Homo sapiens
ttctccaaagctacg

SEQ ID NO: 70485 - DNA, 15 bp, Homo sapiens
tttctccaaagctac

SEQ ID NO: 70486 - DNA, 15 bp, Homo sapiens
gtttctccaaagcta

SEQ ID NO: 70487 - DNA, 15 bp, Homo sapiens
tgtttctccaaagct

SEQ ID NO: 70488 - DNA, 15 bp, Homo sapiens
ctgtttctccaaagc

SEQ ID NO: 70489 - DNA, 15 bp, Homo sapiens
tctgtttctccaaag

SEQ ID NO: 70490 - DNA, 15 bp, Homo sapiens
ttctgtttctccaaa

SEQ ID NO: 70491 - DNA, 15 bp, Homo sapiens
tttctgtttctccaa

SEQ ID NO: 70492 - DNA, 15 bp, Homo sapiens
ctttctgtttctcca

SEQ ID NO: 70493 - DNA, 15 bp, Homo sapiens
actttctgtttctcc

SEQ ID NO: 70494 - DNA, 15 bp, Homo sapiens
cactttctgtttctc

SEQ ID NO: 70495 - DNA, 15 bp, Homo sapiens
gcactttctgtttct

SEQ ID NO: 70496 - DNA, 15 bp, Homo sapiens
cgcactttctgtttc

SEQ ID NO: 70497 - DNA, 15 bp, Homo sapiens
tcgcactttctgttt

SEQ ID NO: 70498 - DNA, 15 bp, Homo sapiens
atcgcactttctgtt

SEQ ID NO: 70499 - DNA, 15 bp, Homo sapiens
catcgcactttctgt

SEQ ID NO: 70500 - DNA, 15 bp, Homo sapiens
ccatcgcactttctg

SEQ ID NO: 70501 - DNA, 15 bp, Homo sapiens
tccatcgcactttct

SEQ ID NO: 70502 - DNA, 15 bp, Homo sapiens
ctccatcgcactttc

SEQ ID NO: 70503 - DNA, 15 bp, Homo sapiens
actccatcgcacttt

SEQ ID NO: 70504 - DNA, 15 bp, Homo sapiens
aactccatcgcactt

SEQ ID NO: 70505 - DNA, 15 bp, Homo sapiens
gaactccatcgcact

SEQ ID NO: 70506 - DNA, 15 bp, Homo sapiens
ggaactccatcgcac

SEQ ID NO: 70507 - DNA, 15 bp, Homo sapiens
tggaactccatcgca

SEQ ID NO: 70508 - DNA, 15 bp, Homo sapiens
gtggaactccatcgc

SEQ ID NO: 70509 - DNA, 15 bp, Homo sapiens
tgtggaactccatcg

SEQ ID NO: 70510 - DNA, 15 bp, Homo sapiens
ctgtggaactccatc

SEQ ID NO: 70511 - DNA, 15 bp, Homo sapiens
actgtggaactccat

SEQ ID NO: 70512 - DNA, 15 bp, Homo sapiens
aactgtggaactcca

SEQ ID NO: 70513 - DNA, 15 bp, Homo sapiens
taactgtggaactcc

SEQ ID NO: 70514 - DNA, 15 bp, Homo sapiens
ttaactgtggaactc

SEQ ID NO: 70515 - DNA, 15 bp, Homo sapiens
tttaactgtggaact

SEQ ID NO: 70516 - DNA, 15 bp, Homo sapiens
ttttaactgtggaac

SEQ ID NO: 70517 - DNA, 15 bp, Homo sapiens
tttttaactgtggaa

SEQ ID NO: 70518 - DNA, 15 bp, Homo sapiens
gtttttaactgtgga

SEQ ID NO: 70519 - DNA, 15 bp, Homo sapiens
agtttttaactgtgg

SEQ ID NO: 70520 - DNA, 15 bp, Homo sapiens
tagtttttaactgtg

SEQ ID NO: 70521 - DNA, 15 bp, Homo sapiens
ttagtttttaactgt

SEQ ID NO: 70522 - DNA, 15 bp, Homo sapiens
tttagtttttaactg

SEQ ID NO: 70523 - DNA, 15 bp, Homo sapiens
ctttagtttttaact

SEQ ID NO: 70524 - DNA, 15 bp, Homo sapiens
cctttagtttttaac

SEQ ID NO: 70525 - DNA, 15 bp, Homo sapiens
ccctttagtttttaa

SEQ ID NO: 70526 - DNA, 15 bp, Homo sapiens
gccctttagttttta

SEQ ID NO: 70527 - DNA, 15 bp, Homo sapiens
tgccctttagttttt

SEQ ID NO: 70528 - DNA, 15 bp, Homo sapiens
ttgccctttagtttt

SEQ ID NO: 70529 - DNA, 15 bp, Homo sapiens
cttgccctttagttt

SEQ ID NO: 70530 - DNA, 15 bp, Homo sapiens
acttgccctttagtt

SEQ ID NO: 70531 - DNA, 15 bp, Homo sapiens
gacttgccctttagt

SEQ ID NO: 70532 - DNA, 15 bp, Homo sapiens
agacttgccctttag

SEQ ID NO: 70533 - DNA, 15 bp, Homo sapiens
aagacttgcccttta

SEQ ID NO: 70534 - DNA, 15 bp, Homo sapiens
gaagacttgcccttt

SEQ ID NO: 70535 - DNA, 15 bp, Homo sapiens
tgaagacttgccctt

SEQ ID NO: 70536 - DNA, 15 bp, Homo sapiens
ttgaagacttgccct

SEQ ID NO: 70537 - DNA, 15 bp, Homo sapiens
attgaagacttgccc

SEQ ID NO: 70538 - DNA, 15 bp, Homo sapiens
aattgaagacttgcc

SEQ ID NO: 70539 - DNA, 15 bp, Homo sapiens
aaattgaagacttgc

SEQ ID NO: 70540 - DNA, 15 bp, Homo sapiens
taaattgaagacttg

SEQ ID NO: 70541 - DNA, 15 bp, Homo sapiens
ttaaattgaagactt

SEQ ID NO: 70542 - DNA, 15 bp, Homo sapiens
attaaattgaagact

SEQ ID NO: 70543 - DNA, 15 bp, Homo sapiens
gattaaattgaagac

SEQ ID NO: 70544 - DNA, 15 bp, Homo sapiens
agattaaattgaaga

SEQ ID NO: 70545 - DNA, 15 bp, Homo sapiens
tagattaaattgaag

SEQ ID NO: 70546 - DNA, 15 bp, Homo sapiens
ctagattaaattgaa

SEQ ID NO: 70547 - DNA, 15 bp, Homo sapiens
actagattaaattga

SEQ ID NO: 70548 - DNA, 15 bp, Homo sapiens
aactagattaaattg

SEQ ID NO: 70549 - DNA, 15 bp, Homo sapiens
gaactagattaaatt

SEQ ID NO: 70550 - DNA, 15 bp, Homo sapiens
ggaactagattaaat

SEQ ID NO: 70551 - DNA, 15 bp, Homo sapiens
tggaactagattaaa

SEQ ID NO: 70552 - DNA, 15 bp, Homo sapiens
atggaactagattaa

SEQ ID NO: 70553 - DNA, 15 bp, Homo sapiens
tatggaactagatta

SEQ ID NO: 70554 - DNA, 15 bp, Homo sapiens
atatggaactagatt

SEQ ID NO: 70555 - DNA, 15 bp, Homo sapiens
aatatggaactagat

SEQ ID NO: 70556 - DNA, 15 bp, Homo sapiens
caatatggaactaga

SEQ ID NO: 70557 - DNA, 15 bp, Homo sapiens
tcaatatggaactag

SEQ ID NO: 70558 - DNA, 15 bp, Homo sapiens
ttcaatatggaacta

SEQ ID NO: 70559 - DNA, 15 bp, Homo sapiens
attcaatatggaact

SEQ ID NO: 70560 - DNA, 15 bp, Homo sapiens
tattcaatatggaac

SEQ ID NO: 70561 - DNA, 15 bp, Homo sapiens
ttattcaatatggaa

SEQ ID NO: 70562 - DNA, 15 bp, Homo sapiens
attattcaatatgga

SEQ ID NO: 70563 - DNA, 15 bp, Homo sapiens
aattattcaatatgg

SEQ ID NO: 70564 - DNA, 15 bp, Homo sapiens
gaattattcaatatg

SEQ ID NO: 70565 - DNA, 15 bp, Homo sapiens
ggaattattcaatat

SEQ ID NO: 70566 - DNA, 15 bp, Homo sapiens
tggaattattcaata

SEQ ID NO: 70567 - DNA, 15 bp, Homo sapiens
ctggaattattcaat

SEQ ID NO: 70568 - DNA, 15 bp, Homo sapiens
actggaattattcaa

SEQ ID NO: 70569 - DNA, 15 bp, Homo sapiens
cactggaattattca

SEQ ID NO: 70570 - DNA, 15 bp, Homo sapiens
ccactggaattattc

SEQ ID NO: 70571 - DNA, 15 bp, Homo sapiens
cccactggaattatt

SEQ ID NO: 70572 - DNA, 15 bp, Homo sapiens
ccccactggaattat

SEQ ID NO: 70573 - DNA, 15 bp, Homo sapiens
cccccactggaatta

SEQ ID NO: 70574 - DNA, 15 bp, Homo sapiens
tcccccactggaatt

SEQ ID NO: 70575 - DNA, 15 bp, Homo sapiens
ctcccccactggaat

SEQ ID NO: 70576 - DNA, 15 bp, Homo sapiens
cctcccccactggaa

SEQ ID NO: 70577 - DNA, 15 bp, Homo sapiens
gcctcccccactgga

SEQ ID NO: 70578 - DNA, 15 bp, Homo sapiens
tgcctcccccactgg

SEQ ID NO: 70579 - DNA, 15 bp, Homo sapiens
ctgcctcccccactg

SEQ ID NO: 70580 - DNA, 15 bp, Homo sapiens
gctgcctcccccact

SEQ ID NO: 70581 - DNA, 15 bp, Homo sapiens
agctgcctcccccac

SEQ ID NO: 70582 - DNA, 15 bp, Homo sapiens
cagctgcctccccca

SEQ ID NO: 70583 - DNA, 15 bp, Homo sapiens
ccagctgcctccccc

SEQ ID NO: 70584 - DNA, 15 bp, Homo sapiens
accagctgcctcccc

SEQ ID NO: 70585 - DNA, 15 bp, Homo sapiens
caccagctgcctccc

SEQ ID NO: 70586 - DNA, 15 bp, Homo sapiens
gcaccagctgcctcc

SEQ ID NO: 70587 - DNA, 15 bp, Homo sapiens
agcaccagctgcctc

SEQ ID NO: 70588 - DNA, 15 bp, Homo sapiens
cagcaccagctgcct

SEQ ID NO: 70589 - DNA, 15 bp, Homo sapiens
tcagcaccagctgcc

SEQ ID NO: 70590 - DNA, 15 bp, Homo sapiens
ttcagcaccagctgc

SEQ ID NO: 70591 - DNA, 15 bp, Homo sapiens
tttcagcaccagctg

SEQ ID NO: 70592 - DNA, 15 bp, Homo sapiens
ctttcagcaccagct

SEQ ID NO: 70593 - DNA, 15 bp, Homo sapiens
cctttcagcaccagc

SEQ ID NO: 70594 - DNA, 15 bp, Homo sapiens
tcctttcagcaccag

SEQ ID NO: 70595 - DNA, 15 bp, Homo sapiens
ttcctttcagcacca

SEQ ID NO: 70596 - DNA, 15 bp, Homo sapiens
attcctttcagcacc

SEQ ID NO: 70597 - DNA, 15 bp, Homo sapiens
aattcctttcagcac

SEQ ID NO: 70598 - DNA, 15 bp, Homo sapiens
caattcctttcagca

SEQ ID NO: 70599 - DNA, 15 bp, Homo sapiens
ccaattcctttcagc

SEQ ID NO: 70600 - DNA, 15 bp, Homo sapiens
cccaattcctttcag

SEQ ID NO: 70601 - DNA, 15 bp, Homo sapiens
ccccaattcctttca

SEQ ID NO: 70602 - DNA, 15 bp, Homo sapiens
cccccaattcctttc

SEQ ID NO: 70603 - DNA, 15 bp, Homo sapiens
tcccccaattccttt

SEQ ID NO: 70604 - DNA, 15 bp, Homo sapiens
gtcccccaattcctt

SEQ ID NO: 70605 - DNA, 15 bp, Homo sapiens
tgtcccccaattcct

SEQ ID NO: 70606 - DNA, 15 bp, Homo sapiens
ctgtcccccaattcc

SEQ ID NO: 70607 - DNA, 15 bp, Homo sapiens
actgtcccccaattc

SEQ ID NO: 70608 - DNA, 15 bp, Homo sapiens
tactgtcccccaatt

SEQ ID NO: 70609 - DNA, 15 bp, Homo sapiens
atactgtcccccaat

SEQ ID NO: 70610 - DNA, 15 bp, Homo sapiens
tatactgtcccccaa

SEQ ID NO: 70611 - DNA, 15 bp, Homo sapiens
ctatactgtccccca

SEQ ID NO: 70612 - DNA, 15 bp, Homo sapiens
cctatactgtccccc

SEQ ID NO: 70613 - DNA, 15 bp, Homo sapiens
tcctatactgtcccc

SEQ ID NO: 70614 - DNA, 15 bp, Homo sapiens
ttcctatactgtccc

SEQ ID NO: 70615 - DNA, 15 bp, Homo sapiens
attcctatactgtcc

SEQ ID NO: 70616 - DNA, 15 bp, Homo sapiens
cattcctatactgtc

SEQ ID NO: 70617 - DNA, 15 bp, Homo sapiens
acattcctatactgt

SEQ ID NO: 70618 - DNA, 15 bp, Homo sapiens
aacattcctatactg

SEQ ID NO: 70619 - DNA, 15 bp, Homo sapiens
gaacattcctatact

SEQ ID NO: 70620 - DNA, 15 bp, Homo sapiens
cgaacattcctatac

SEQ ID NO: 70621 - DNA, 15 bp, Homo sapiens
ccgaacattcctata

SEQ ID NO: 70622 - DNA, 15 bp, Homo sapiens
cccgaacattcctat

SEQ ID NO: 70623 - DNA, 15 bp, Homo sapiens
acccgaacattccta

SEQ ID NO: 70624 - DNA, 15 bp, Homo sapiens
cacccgaacattcct

SEQ ID NO: 70625 - DNA, 15 bp, Homo sapiens
tcacccgaacattcc

SEQ ID NO: 70626 - DNA, 15 bp, Homo sapiens
gtcacccgaacattc

SEQ ID NO: 70627 - DNA, 15 bp, Homo sapiens
agtcacccgaacatt

SEQ ID NO: 70628 - DNA, 15 bp, Homo sapiens
tagtcacccgaacat

SEQ ID NO: 70629 - DNA, 15 bp, Homo sapiens
gtagtcacccgaaca

SEQ ID NO: 70630 - DNA, 15 bp, Homo sapiens
agtagtcacccgaac

SEQ ID NO: 70631 - DNA, 15 bp, Homo sapiens
cagtagtcacccgaa

SEQ ID NO: 70632 - DNA, 15 bp, Homo sapiens
tcagtagtcacccga

SEQ ID NO: 70633 - DNA, 15 bp, Homo sapiens
atcagtagtcacccg

SEQ ID NO: 70634 - DNA, 15 bp, Homo sapiens
aatcagtagtcaccc

SEQ ID NO: 70635 - DNA, 15 bp, Homo sapiens
taatcagtagtcacc

SEQ ID NO: 70636 - DNA, 15 bp, Homo sapiens
ttaatcagtagtcac

SEQ ID NO: 70637 - DNA, 15 bp, Homo sapiens
attaatcagtagtca

SEQ ID NO: 70638 - DNA, 15 bp, Homo sapiens
cattaatcagtagtc

SEQ ID NO: 70639 - DNA, 15 bp, Homo sapiens
acattaatcagtagt

SEQ ID NO: 70640 - DNA, 15 bp, Homo sapiens
tacattaatcagtag

SEQ ID NO: 70641 - DNA, 15 bp, Homo sapiens
ctacattaatcagta

SEQ ID NO: 70642 - DNA, 15 bp, Homo sapiens
actacattaatcagt

SEQ ID NO: 70643 - DNA, 15 bp, Homo sapiens
cactacattaatcag

SEQ ID NO: 70644 - DNA, 15 bp, Homo sapiens
tcactacattaatca

SEQ ID NO: 70645 - DNA, 15 bp, Homo sapiens
ttcactacattaatc

SEQ ID NO: 70646 - DNA, 15 bp, Homo sapiens
cttcactacattaat

SEQ ID NO: 70647 - DNA, 15 bp, Homo sapiens
tcttcactacattaa

SEQ ID NO: 70648 - DNA, 15 bp, Homo sapiens
atcttcactacatta

SEQ ID NO: 70649 - DNA, 15 bp, Homo sapiens
catcttcactacatt

SEQ ID NO: 70650 - DNA, 15 bp, Homo sapiens
tcatcttcactacat

SEQ ID NO: 70651 - DNA, 15 bp, Homo sapiens
atcatcttcactaca

SEQ ID NO: 70652 - DNA, 15 bp, Homo sapiens
gatcatcttcactac

SEQ ID NO: 70653 - DNA, 15 bp, Homo sapiens
agatcatcttcacta

SEQ ID NO: 70654 - DNA, 15 bp, Homo sapiens
cagatcatcttcact

SEQ ID NO: 70655 - DNA, 15 bp, Homo sapiens
acagatcatcttcac

SEQ ID NO: 70656 - DNA, 15 bp, Homo sapiens
gacagatcatcttca

SEQ ID NO: 70657 - DNA, 15 bp, Homo sapiens
tgacagatcatcttc

SEQ ID NO: 70658 - DNA, 15 bp, Homo sapiens
gtgacagatcatctt

SEQ ID NO: 70659 - DNA, 15 bp, Homo sapiens
agtgacagatcatct

SEQ ID NO: 70660 - DNA, 15 bp, Homo sapiens
aagtgacagatcatc

SEQ ID NO: 70661 - DNA, 15 bp, Homo sapiens
caagtgacagatcat

SEQ ID NO: 70662 - DNA, 15 bp, Homo sapiens
gcaagtgacagatca

SEQ ID NO: 70663 - DNA, 15 bp, Homo sapiens
ggcaagtgacagatc

SEQ ID NO: 70664 - DNA, 15 bp, Homo sapiens
tggcaagtgacagat

SEQ ID NO: 70665 - DNA, 15 bp, Homo sapiens
ctggcaagtgacaga

SEQ ID NO: 70666 - DNA, 15 bp, Homo sapiens
tctggcaagtgacag

SEQ ID NO: 70667 - DNA, 15 bp, Homo sapiens
gtctggcaagtgaca

SEQ ID NO: 70668 - DNA, 15 bp, Homo sapiens
ggtctggcaagtgac

SEQ ID NO: 70669 - DNA, 15 bp, Homo sapiens
tggtctggcaagtga

SEQ ID NO: 70670 - DNA, 15 bp, Homo sapiens
ttggtctggcaagtg

SEQ ID NO: 70671 - DNA, 15 bp, Homo sapiens
gttggtctggcaagt

SEQ ID NO: 70672 - DNA, 15 bp, Homo sapiens
tgttggtctggcaag

SEQ ID NO: 70673 - DNA, 15 bp, Homo sapiens
ctgttggtctggcaa

SEQ ID NO: 70674 - DNA, 15 bp, Homo sapiens
cctgttggtctggca

SEQ ID NO: 70675 - DNA, 15 bp, Homo sapiens
tcctgttggtctggc

SEQ ID NO: 70676 - DNA, 15 bp, Homo sapiens
ctcctgttggtctgg

SEQ ID NO: 70677 - DNA, 15 bp, Homo sapiens
actcctgttggtctg

SEQ ID NO: 70678 - DNA, 15 bp, Homo sapiens
aactcctgttggtct

SEQ ID NO: 70679 - DNA, 15 bp, Homo sapiens
caactcctgttggtc

SEQ ID NO: 70680 - DNA, 15 bp, Homo sapiens
ccaactcctgttggt

SEQ ID NO: 70681 - DNA, 15 bp, Homo sapiens
tccaactcctgttgg

SEQ ID NO: 70682 - DNA, 15 bp, Homo sapiens
ttccaactcctgttg

SEQ ID NO: 70683 - DNA, 15 bp, Homo sapiens
tttccaactcctgtt

SEQ ID NO: 70684 - DNA, 15 bp, Homo sapiens
ctttccaactcctgt

SEQ ID NO: 70685 - DNA, 15 bp, Homo sapiens
tctttccaactcctg

SEQ ID NO: 70686 - DNA, 15 bp, Homo sapiens
ctctttccaactcct

SEQ ID NO: 70687 - DNA, 15 bp, Homo sapiens
tctctttccaactcc

SEQ ID NO: 70688 - DNA, 15 bp, Homo sapiens
ttctctttccaactc

SEQ ID NO: 70689 - DNA, 15 bp, Homo sapiens
tttctctttccaact

SEQ ID NO: 70690 - DNA, 15 bp, Homo sapiens
gtttctctttccaac

SEQ ID NO: 70691 - DNA, 15 bp, Homo sapiens
ggtttctctttccaa

SEQ ID NO: 70692 - DNA, 15 bp, Homo sapiens
aggtttctctttcca

SEQ ID NO: 70693 - DNA, 15 bp, Homo sapiens
taggtttctctttcc

SEQ ID NO: 70694 - DNA, 15 bp, Homo sapiens
ctaggtttctctttc

SEQ ID NO: 70695 - DNA, 15 bp, Homo sapiens
gctaggtttctcttt

SEQ ID NO: 70696 - DNA, 15 bp, Homo sapiens
ggctaggtttctctt

SEQ ID NO: 70697 - DNA, 15 bp, Homo sapiens
tggctaggtttctct

SEQ ID NO: 70698 - DNA, 15 bp, Homo sapiens
atggctaggtttctc

SEQ ID NO: 70699 - DNA, 15 bp, Homo sapiens
catggctaggtttct

SEQ ID NO: 70700 - DNA, 15 bp, Homo sapiens
ccatggctaggtttc

SEQ ID NO: 70701 - DNA, 15 bp, Homo sapiens
accatggctaggttt

SEQ ID NO: 70702 - DNA, 15 bp, Homo sapiens
caccatggctaggtt

SEQ ID NO: 70703 - DNA, 15 bp, Homo sapiens
acaccatggctaggt

SEQ ID NO: 70704 - DNA, 15 bp, Homo sapiens
gacaccatggctagg

SEQ ID NO: 70705 - DNA, 15 bp, Homo sapiens
agacaccatggctag

SEQ ID NO: 70706 - DNA, 15 bp, Homo sapiens
cagacaccatggcta

SEQ ID NO: 70707 - DNA, 15 bp, Homo sapiens
gcagacaccatggct

SEQ ID NO: 70708 - DNA, 15 bp, Homo sapiens
ggcagacaccatggc

SEQ ID NO: 70709 - DNA, 15 bp, Homo sapiens
tggcagacaccatgg

SEQ ID NO: 70710 - DNA, 15 bp, Homo sapiens
gtggcagacaccatg

SEQ ID NO: 70711 - DNA, 15 bp, Homo sapiens
tgtggcagacaccat

SEQ ID NO: 70712 - DNA, 15 bp, Homo sapiens
ctgtggcagacacca

SEQ ID NO: 70713 - DNA, 15 bp, Homo sapiens
tctgtggcagacacc

SEQ ID NO: 70714 - DNA, 15 bp, Homo sapiens
ctctgtggcagacac

SEQ ID NO: 70715 - DNA, 15 bp, Homo sapiens
cctctgtggcagaca

SEQ ID NO: 70716 - DNA, 15 bp, Homo sapiens
ccctctgtggcagac

SEQ ID NO: 70717 - DNA, 15 bp, Homo sapiens
tccctctgtggcaga

SEQ ID NO: 70718 - DNA, 15 bp, Homo sapiens
gtccctctgtggcag

SEQ ID NO: 70719 - DNA, 15 bp, Homo sapiens
ggtccctctgtggca

SEQ ID NO: 70720 - DNA, 15 bp, Homo sapiens
gggtccctctgtggc

SEQ ID NO: 70721 - DNA, 15 bp, Homo sapiens
agggtccctctgtgg

SEQ ID NO: 70722 - DNA, 15 bp, Homo sapiens
gagggtccctctgtg

SEQ ID NO: 70723 - DNA, 15 bp, Homo sapiens
agagggtccctctgt

SEQ ID NO: 70724 - DNA, 15 bp, Homo sapiens
tagagggtccctctg

SEQ ID NO: 70725 - DNA, 15 bp, Homo sapiens
ttagagggtccctct

SEQ ID NO: 70726 - DNA, 15 bp, Homo sapiens
tttagagggtccctc

SEQ ID NO: 70727 - DNA, 15 bp, Homo sapiens
ctttagagggtccct

SEQ ID NO: 70728 - DNA, 15 bp, Homo sapiens
actttagagggtccc

SEQ ID NO: 70729 - DNA, 15 bp, Homo sapiens
cactttagagggtcc

SEQ ID NO: 70730 - DNA, 15 bp, Homo sapiens
gcactttagagggtc

SEQ ID NO: 70731 - DNA, 15 bp, Homo sapiens
agcactttagagggt

SEQ ID NO: 70732 - DNA, 15 bp, Homo sapiens
tagcactttagaggg

SEQ ID NO: 70733 - DNA, 15 bp, Homo sapiens
ctagcactttagagg

SEQ ID NO: 70734 - DNA, 15 bp, Homo sapiens
cctagcactttagag

SEQ ID NO: 70735 - DNA, 15 bp, Homo sapiens
tcctagcactttaga

SEQ ID NO: 70736 - DNA, 15 bp, Homo sapiens
ctcctagcactttag

SEQ ID NO: 70737 - DNA, 15 bp, Homo sapiens
cctcctagcacttta

SEQ ID NO: 70738 - DNA, 15 bp, Homo sapiens
tcctcctagcacttt

SEQ ID NO: 70739 - DNA, 15 bp, Homo sapiens
ctcctcctagcactt

SEQ ID NO: 70740 - DNA, 15 bp, Homo sapiens
cctcctcctagcact

SEQ ID NO: 70741 - DNA, 15 bp, Homo sapiens
ccctcctcctagcac

SEQ ID NO: 70742 - DNA, 15 bp, Homo sapiens
accctcctcctagca

SEQ ID NO: 70743 - DNA, 15 bp, Homo sapiens
caccctcctcctagc

SEQ ID NO: 70744 - DNA, 15 bp, Homo sapiens
ccaccctcctcctag

SEQ ID NO: 70745 - DNA, 15 bp, Homo sapiens
cccaccctcctccta

SEQ ID NO: 70746 - DNA, 15 bp, Homo sapiens
ccccaccctcctcct

SEQ ID NO: 70747 - DNA, 15 bp, Homo sapiens
cccccaccctcctcc

SEQ ID NO: 70748 - DNA, 15 bp, Homo sapiens
ccccccaccctcctc

SEQ ID NO: 70749 - DNA, 15 bp, Homo sapiens
gccccccaccctcct

SEQ ID NO: 70750 - DNA, 15 bp, Homo sapiens
tgccccccaccctcc

SEQ ID NO: 70751 - DNA, 15 bp, Homo sapiens
ctgccccccaccctc

SEQ ID NO: 70752 - DNA, 15 bp, Homo sapiens
actgccccccaccct

SEQ ID NO: 70753 - DNA, 15 bp, Homo sapiens
gactgccccccaccc

SEQ ID NO: 70754 - DNA, 15 bp, Homo sapiens
cgactgccccccacc

SEQ ID NO: 70755 - DNA, 15 bp, Homo sapiens
gcgactgccccccac

SEQ ID NO: 70756 - DNA, 15 bp, Homo sapiens
ggcgactgcccccca

SEQ ID NO: 70757 - DNA, 15 bp, Homo sapiens
tggcgactgcccccc

SEQ ID NO: 70758 - DNA, 15 bp, Homo sapiens
gtggcgactgccccc

SEQ ID NO: 70759 - DNA, 15 bp, Homo sapiens
ggtggcgactgcccc

SEQ ID NO: 70760 - DNA, 15 bp, Homo sapiens
aggtggcgactgccc

SEQ ID NO: 70761 - DNA, 15 bp, Homo sapiens
caggtggcgactgcc

SEQ ID NO: 70762 - DNA, 15 bp, Homo sapiens
acaggtggcgactgc

SEQ ID NO: 70763 - DNA, 15 bp, Homo sapiens
cacaggtggcgactg

SEQ ID NO: 70764 - DNA, 15 bp, Homo sapiens
ccacaggtggcgact

SEQ ID NO: 70765 - DNA, 15 bp, Homo sapiens
cccacaggtggcgac

SEQ ID NO: 70766 - DNA, 15 bp, Homo sapiens
tcccacaggtggcga

SEQ ID NO: 70767 - DNA, 15 bp, Homo sapiens
atcccacaggtggcg

SEQ ID NO: 70768 - DNA, 15 bp, Homo sapiens
catcccacaggtggc

SEQ ID NO: 70769 - DNA, 15 bp, Homo sapiens
gcatcccacaggtgg

SEQ ID NO: 70770 - DNA, 15 bp, Homo sapiens
ggcatcccacaggtg

SEQ ID NO: 70771 - DNA, 15 bp, Homo sapiens
tggcatcccacaggt

SEQ ID NO: 70772 - DNA, 15 bp, Homo sapiens
atggcatcccacagg

SEQ ID NO: 70773 - DNA, 15 bp, Homo sapiens
catggcatcccacag

SEQ ID NO: 70774 - DNA, 15 bp, Homo sapiens
tcatggcatcccaca

SEQ ID NO: 70775 - DNA, 15 bp, Homo sapiens
ttcatggcatcccac

SEQ ID NO: 70776 - DNA, 15 bp, Homo sapiens
gttcatggcatccca

SEQ ID NO: 70777 - DNA, 15 bp, Homo sapiens
tgttcatggcatccc

SEQ ID NO: 70778 - DNA, 15 bp, Homo sapiens
ctgttcatggcatcc

SEQ ID NO: 70779 - DNA, 15 bp, Homo sapiens
gctgttcatggcatc

SEQ ID NO: 70780 - DNA, 15 bp, Homo sapiens
ggctgttcatggcat

SEQ ID NO: 70781 - DNA, 15 bp, Homo sapiens
aggctgttcatggca

SEQ ID NO: 70782 - DNA, 15 bp, Homo sapiens
gaggctgttcatggc

SEQ ID NO: 70783 - DNA, 15 bp, Homo sapiens
agaggctgttcatgg

SEQ ID NO: 70784 - DNA, 15 bp, Homo sapiens
cagaggctgttcatg

SEQ ID NO: 70785 - DNA, 15 bp, Homo sapiens
gcagaggctgttcat

SEQ ID NO: 70786 - DNA, 15 bp, Homo sapiens
tgcagaggctgttca

SEQ ID NO: 70787 - DNA, 15 bp, Homo sapiens
ttgcagaggctgttc

SEQ ID NO: 70788 - DNA, 15 bp, Homo sapiens
gttgcagaggctgtt

SEQ ID NO: 70789 - DNA, 15 bp, Homo sapiens
agttgcagaggctgt

SEQ ID NO: 70790 - DNA, 15 bp, Homo sapiens
cagttgcagaggctg

SEQ ID NO: 70791 - DNA, 15 bp, Homo sapiens
ccagttgcagaggct

SEQ ID NO: 70792 - DNA, 15 bp, Homo sapiens
gccagttgcagaggc

SEQ ID NO: 70793 - DNA, 15 bp, Homo sapiens
ggccagttgcagagg

SEQ ID NO: 70794 - DNA, 15 bp, Homo sapiens
tggccagttgcagag

SEQ ID NO: 70795 - DNA, 15 bp, Homo sapiens
ctggccagttgcaga

SEQ ID NO: 70796 - DNA, 15 bp, Homo sapiens
gctggccagttgcag

SEQ ID NO: 70797 - DNA, 15 bp, Homo sapiens
tgctggccagttgca

SEQ ID NO: 70798 - DNA, 15 bp, Homo sapiens
gtgctggccagttgc

SEQ ID NO: 70799 - DNA, 15 bp, Homo sapiens
ggtgctggccagttg

SEQ ID NO: 70800 - DNA, 15 bp, Homo sapiens
tggtgctggccagtt

SEQ ID NO: 70801 - DNA, 15 bp, Homo sapiens
ctggtgctggccagt

SEQ ID NO: 70802 - DNA, 15 bp, Homo sapiens
cctggtgctggccag

SEQ ID NO: 70803 - DNA, 15 bp, Homo sapiens
tcctggtgctggcca

SEQ ID NO: 70804 - DNA, 15 bp, Homo sapiens
ttcctggtgctggcc

SEQ ID NO: 70805 - DNA, 15 bp, Homo sapiens
cttcctggtgctggc

SEQ ID NO: 70806 - DNA, 15 bp, Homo sapiens
ccttcctggtgctgg

SEQ ID NO: 70807 - DNA, 15 bp, Homo sapiens
cccttcctggtgctg

SEQ ID NO: 70808 - DNA, 15 bp, Homo sapiens
ccccttcctggtgct

SEQ ID NO: 70809 - DNA, 15 bp, Homo sapiens
cccccttcctggtgc

SEQ ID NO: 70810 - DNA, 15 bp, Homo sapiens
ccccccttcctggtg

SEQ ID NO: 70811 - DNA, 15 bp, Homo sapiens
gccccccttcctggt

SEQ ID NO: 70812 - DNA, 15 bp, Homo sapiens
ggccccccttcctgg

SEQ ID NO: 70813 - DNA, 15 bp, Homo sapiens
aggccccccttcctg

SEQ ID NO: 70814 - DNA, 15 bp, Homo sapiens
gaggccccccttcct

SEQ ID NO: 70815 - DNA, 15 bp, Homo sapiens
ggaggccccccttcc

SEQ ID NO: 70816 - DNA, 15 bp, Homo sapiens
aggaggccccccttc

SEQ ID NO: 70817 - DNA, 15 bp, Homo sapiens
caggaggcccccctt

SEQ ID NO: 70818 - DNA, 15 bp, Homo sapiens
ccaggaggcccccct

SEQ ID NO: 70819 - DNA, 15 bp, Homo sapiens
accaggaggcccccc

SEQ ID NO: 70820 - DNA, 15 bp, Homo sapiens
caccaggaggccccc

SEQ ID NO: 70821 - DNA, 15 bp, Homo sapiens
ccaccaggaggcccc

SEQ ID NO: 70822 - DNA, 15 bp, Homo sapiens
accaccaggaggccc

SEQ ID NO: 70823 - DNA, 15 bp, Homo sapiens
caccaccaggaggcc

SEQ ID NO: 70824 - DNA, 15 bp, Homo sapiens
ccaccaccaggaggc

SEQ ID NO: 70825 - DNA, 15 bp, Homo sapiens
tccaccaccaggagg

SEQ ID NO: 70826 - DNA, 15 bp, Homo sapiens
ctccaccaccaggag

SEQ ID NO: 70827 - DNA, 15 bp, Homo sapiens
actccaccaccagga

SEQ ID NO: 70828 - DNA, 15 bp, Homo sapiens
aactccaccaccagg

SEQ ID NO: 70829 - DNA, 15 bp, Homo sapiens
caactccaccaccag

SEQ ID NO: 70830 - DNA, 15 bp, Homo sapiens
ccaactccaccacca

SEQ ID NO: 70831 - DNA, 15 bp, Homo sapiens
tccaactccaccacc

SEQ ID NO: 70832 - DNA, 15 bp, Homo sapiens
ctccaactccaccac

SEQ ID NO: 70833 - DNA, 15 bp, Homo sapiens
actccaactccacca

SEQ ID NO: 70834 - DNA, 15 bp, Homo sapiens
gactccaactccacc

SEQ ID NO: 70835 - DNA, 15 bp, Homo sapiens
ggactccaactccac

SEQ ID NO: 70836 - DNA, 15 bp, Homo sapiens
aggactccaactcca

SEQ ID NO: 70837 - DNA, 15 bp, Homo sapiens
aaggactccaactcc

SEQ ID NO: 70838 - DNA, 15 bp, Homo sapiens
aaaggactccaactc

SEQ ID NO: 70839 - DNA, 15 bp, Homo sapiens
gaaaggactccaact

SEQ ID NO: 70840 - DNA, 15 bp, Homo sapiens
agaaaggactccaac

SEQ ID NO: 70841 - DNA, 15 bp, Homo sapiens
cagaaaggactccaa

SEQ ID NO: 70842 - DNA, 15 bp, Homo sapiens
ccagaaaggactcca

SEQ ID NO: 70843 - DNA, 15 bp, Homo sapiens
gccagaaaggactcc

SEQ ID NO: 70844 - DNA, 15 bp, Homo sapiens
agccagaaaggactc

SEQ ID NO: 70845 - DNA, 15 bp, Homo sapiens
cagccagaaaggact

SEQ ID NO: 70846 - DNA, 15 bp, Homo sapiens
tcagccagaaaggac

SEQ ID NO: 70847 - DNA, 15 bp, Homo sapiens
ttcagccagaaagga

SEQ ID NO: 70848 - DNA, 15 bp, Homo sapiens
attcagccagaaagg

SEQ ID NO: 70849 - DNA, 15 bp, Homo sapiens
cattcagccagaaag

SEQ ID NO: 70850 - DNA, 15 bp, Homo sapiens
tcattcagccagaaa

SEQ ID NO: 70851 - DNA, 15 bp, Homo sapiens
ctcattcagccagaa

SEQ ID NO: 70852 - DNA, 15 bp, Homo sapiens
cctcattcagccaga

SEQ ID NO: 70853 - DNA, 15 bp, Homo sapiens
tcctcattcagccag

SEQ ID NO: 70854 - DNA, 15 bp, Homo sapiens
ctcctcattcagcca

SEQ ID NO: 70855 - DNA, 15 bp, Homo sapiens
gctcctcattcagcc

SEQ ID NO: 70856 - DNA, 15 bp, Homo sapiens
tgctcctcattcagc

SEQ ID NO: 70857 - DNA, 15 bp, Homo sapiens
ttgctcctcattcag

SEQ ID NO: 70858 - DNA, 15 bp, Homo sapiens
attgctcctcattca

SEQ ID NO: 70859 - DNA, 15 bp, Homo sapiens
cattgctcctcattc

SEQ ID NO: 70860 - DNA, 15 bp, Homo sapiens
acattgctcctcatt

SEQ ID NO: 70861 - DNA, 15 bp, Homo sapiens
cacattgctcctcat

SEQ ID NO: 70862 - DNA, 15 bp, Homo sapiens
ccacattgctcctca

SEQ ID NO: 70863 - DNA, 15 bp, Homo sapiens
gccacattgctcctc

SEQ ID NO: 70864 - DNA, 15 bp, Homo sapiens
agccacattgctcct

SEQ ID NO: 70865 - DNA, 15 bp, Homo sapiens
cagccacattgctcc

SEQ ID NO: 70866 - DNA, 15 bp, Homo sapiens
ccagccacattgctc

SEQ ID NO: 70867 - DNA, 15 bp, Homo sapiens
cccagccacattgct

SEQ ID NO: 70868 - DNA, 15 bp, Homo sapiens
ccccagccacattgc

SEQ ID NO: 70869 - DNA, 15 bp, Homo sapiens
accccagccacattg

SEQ ID NO: 70870 - DNA, 15 bp, Homo sapiens
caccccagccacatt

SEQ ID NO: 70871 - DNA, 15 bp, Homo sapiens
acaccccagccacat

SEQ ID NO: 70872 - DNA, 15 bp, Homo sapiens
cacaccccagccaca

SEQ ID NO: 70873 - DNA, 15 bp, Homo sapiens
gcacaccccagccac

SEQ ID NO: 70874 - DNA, 15 bp, Homo sapiens
cgcacaccccagcca

SEQ ID NO: 70875 - DNA, 15 bp, Homo sapiens
ccgcacaccccagcc

SEQ ID NO: 70876 - DNA, 15 bp, Homo sapiens
cccgcacaccccagc

SEQ ID NO: 70877 - DNA, 15 bp, Homo sapiens
acccgcacaccccag

SEQ ID NO: 70878 - DNA, 15 bp, Homo sapiens
aacccgcacacccca

SEQ ID NO: 70879 - DNA, 15 bp, Homo sapiens
aaacccgcacacccc

SEQ ID NO: 70880 - DNA, 15 bp, Homo sapiens
gaaacccgcacaccc

SEQ ID NO: 70881 - DNA, 15 bp, Homo sapiens
agaaacccgcacacc

SEQ ID NO: 70882 - DNA, 15 bp, Homo sapiens
cagaaacccgcacac

SEQ ID NO: 70883 - DNA, 15 bp, Homo sapiens
ccagaaacccgcaca

SEQ ID NO: 70884 - DNA, 15 bp, Homo sapiens
accagaaacccgcac

SEQ ID NO: 70885 - DNA, 15 bp, Homo sapiens
caccagaaacccgca

SEQ ID NO: 70886 - DNA, 15 bp, Homo sapiens
tcaccagaaacccgc

SEQ ID NO: 70887 - DNA, 15 bp, Homo sapiens
ctcaccagaaacccg

SEQ ID NO: 70888 - DNA, 15 bp, Homo sapiens
cctcaccagaaaccc

SEQ ID NO: 70889 - DNA, 15 bp, Homo sapiens
acctcaccagaaacc

SEQ ID NO: 70890 - DNA, 15 bp, Homo sapiens
gacctcaccagaaac

SEQ ID NO: 70891 - DNA, 15 bp, Homo sapiens
ggacctcaccagaaa

SEQ ID NO: 70892 - DNA, 15 bp, Homo sapiens
cggacctcaccagaa

SEQ ID NO: 70893 - DNA, 15 bp, Homo sapiens
ccggacctcaccaga

SEQ ID NO: 70894 - DNA, 15 bp, Homo sapiens
cccggacctcaccag

SEQ ID NO: 70895 - DNA, 15 bp, Homo sapiens
acccggacctcacca

SEQ ID NO: 70896 - DNA, 15 bp, Homo sapiens
cacccggacctcacc

SEQ ID NO: 70897 - DNA, 15 bp, Homo sapiens
ccacccggacctcac

SEQ ID NO: 70898 - DNA, 15 bp, Homo sapiens
cccacccggacctca

SEQ ID NO: 70899 - DNA, 15 bp, Homo sapiens
tcccacccggacctc

SEQ ID NO: 70900 - DNA, 15 bp, Homo sapiens
ttcccacccggacct

SEQ ID NO: 70901 - DNA, 15 bp, Homo sapiens
cttcccacccggacc

SEQ ID NO: 70902 - DNA, 15 bp, Homo sapiens
gcttcccacccggac

SEQ ID NO: 70903 - DNA, 15 bp, Homo sapiens
ggcttcccacccgga

SEQ ID NO: 70904 - DNA, 15 bp, Homo sapiens
cggcttcccacccgg

SEQ ID NO: 70905 - DNA, 15 bp, Homo sapiens
acggcttcccacccg

SEQ ID NO: 70906 - DNA, 15 bp, Homo sapiens
gacggcttcccaccc

SEQ ID NO: 70907 - DNA, 15 bp, Homo sapiens
agacggcttcccacc

SEQ ID NO: 70908 - DNA, 15 bp, Homo sapiens
gagacggcttcccac

SEQ ID NO: 70909 - DNA, 15 bp, Homo sapiens
agagacggcttccca

SEQ ID NO: 70910 - DNA, 15 bp, Homo sapiens
gagagacggcttccc

SEQ ID NO: 70911 - DNA, 15 bp, Homo sapiens
ggagagacggcttcc

SEQ ID NO: 70912 - DNA, 15 bp, Homo sapiens
cggagagacggcttc

SEQ ID NO: 70913 - DNA, 15 bp, Homo sapiens
gcggagagacggctt

SEQ ID NO: 70914 - DNA, 15 bp, Homo sapiens
tgcggagagacggct

SEQ ID NO: 70915 - DNA, 15 bp, Homo sapiens
atgcggagagacggc

SEQ ID NO: 70916 - DNA, 15 bp, Homo sapiens
aatgcggagagacgg

SEQ ID NO: 70917 - DNA, 15 bp, Homo sapiens
gaatgcggagagacg

SEQ ID NO: 70918 - DNA, 15 bp, Homo sapiens
agaatgcggagagac

SEQ ID NO: 70919 - DNA, 15 bp, Homo sapiens
gagaatgcggagaga

SEQ ID NO: 70920 - DNA, 15 bp, Homo sapiens
ggagaatgcggagag

SEQ ID NO: 70921 - DNA, 15 bp, Homo sapiens
aggagaatgcggaga

SEQ ID NO: 70922 - DNA, 15 bp, Homo sapiens
caggagaatgcggag

SEQ ID NO: 70923 - DNA, 15 bp, Homo sapiens
tcaggagaatgcgga

SEQ ID NO: 70924 - DNA, 15 bp, Homo sapiens
ttcaggagaatgcgg

SEQ ID NO: 70925 - DNA, 15 bp, Homo sapiens
tttcaggagaatgcg

SEQ ID NO: 70926 - DNA, 15 bp, Homo sapiens
ctttcaggagaatgc

SEQ ID NO: 70927 - DNA, 15 bp, Homo sapiens
gctttcaggagaatg

SEQ ID NO: 70928 - DNA, 15 bp, Homo sapiens
agctttcaggagaat

SEQ ID NO: 70929 - DNA, 15 bp, Homo sapiens
gagctttcaggagaa

SEQ ID NO: 70930 - DNA, 15 bp, Homo sapiens
agagctttcaggaga

SEQ ID NO: 70931 - DNA, 15 bp, Homo sapiens
cagagctttcaggag

SEQ ID NO: 70932 - DNA, 15 bp, Homo sapiens
acagagctttcagga

SEQ ID NO: 70933 - DNA, 15 bp, Homo sapiens
aacagagctttcagg

SEQ ID NO: 70934 - DNA, 15 bp, Homo sapiens
caacagagctttcag

SEQ ID NO: 70935 - DNA, 15 bp, Homo sapiens
acaacagagctttca

SEQ ID NO: 70936 - DNA, 15 bp, Homo sapiens
tacaacagagctttc

SEQ ID NO: 70937 - DNA, 15 bp, Homo sapiens
ctacaacagagcttt

SEQ ID NO: 70938 - DNA, 15 bp, Homo sapiens
actacaacagagctt

SEQ ID NO: 70939 - DNA, 15 bp, Homo sapiens
aactacaacagagct

SEQ ID NO: 70940 - DNA, 15 bp, Homo sapiens
aaactacaacagagc

SEQ ID NO: 70941 - DNA, 15 bp, Homo sapiens
caaactacaacagag

SEQ ID NO: 70942 - DNA, 15 bp, Homo sapiens
tcaaactacaacaga

SEQ ID NO: 70943 - DNA, 15 bp, Homo sapiens
ttcaaactacaacag

SEQ ID NO: 70944 - DNA, 15 bp, Homo sapiens
cttcaaactacaaca

SEQ ID NO: 70945 - DNA, 15 bp, Homo sapiens
ccttcaaactacaac

SEQ ID NO: 70946 - DNA, 15 bp, Homo sapiens
accttcaaactacaa

SEQ ID NO: 70947 - DNA, 15 bp, Homo sapiens
gaccttcaaactaca

SEQ ID NO: 70948 - DNA, 15 bp, Homo sapiens
cgaccttcaaactac

SEQ ID NO: 70949 - DNA, 15 bp, Homo sapiens
ccgaccttcaaacta

SEQ ID NO: 70950 - DNA, 15 bp, Homo sapiens
accgaccttcaaact

SEQ ID NO: 70951 - DNA, 15 bp, Homo sapiens
taccgaccttcaaac

SEQ ID NO: 70952 - DNA, 15 bp, Homo sapiens
ctaccgaccttcaaa

SEQ ID NO: 70953 - DNA, 15 bp, Homo sapiens
tctaccgaccttcaa

SEQ ID NO: 70954 - DNA, 15 bp, Homo sapiens
ctctaccgaccttca

SEQ ID NO: 70955 - DNA, 15 bp, Homo sapiens
gctctaccgaccttc

SEQ ID NO: 70956 - DNA, 15 bp, Homo sapiens
ggctctaccgacctt

SEQ ID NO: 70957 - DNA, 15 bp, Homo sapiens
aggctctaccgacct

SEQ ID NO: 70958 - DNA, 15 bp, Homo sapiens
caggctctaccgacc

SEQ ID NO: 70959 - DNA, 15 bp, Homo sapiens
ccaggctctaccgac

SEQ ID NO: 70960 - DNA, 15 bp, Homo sapiens
cccaggctctaccga

SEQ ID NO: 70961 - DNA, 15 bp, Homo sapiens
gcccaggctctaccg

SEQ ID NO: 70962 - DNA, 15 bp, Homo sapiens
agcccaggctctacc

SEQ ID NO: 70963 - DNA, 15 bp, Homo sapiens
cagcccaggctctac

SEQ ID NO: 70964 - DNA, 15 bp, Homo sapiens
tcagcccaggctcta

SEQ ID NO: 70965 - DNA, 15 bp, Homo sapiens
ttcagcccaggctct

SEQ ID NO: 70966 - DNA, 15 bp, Homo sapiens
tttcagcccaggctc

SEQ ID NO: 70967 - DNA, 15 bp, Homo sapiens
ttttcagcccaggct

SEQ ID NO: 70968 - DNA, 15 bp, Homo sapiens
cttttcagcccaggc

SEQ ID NO: 70969 - DNA, 15 bp, Homo sapiens
ccttttcagcccagg

SEQ ID NO: 70970 - DNA, 15 bp, Homo sapiens
tccttttcagcccag

SEQ ID NO: 70971 - DNA, 15 bp, Homo sapiens
ttccttttcagccca

SEQ ID NO: 70972 - DNA, 15 bp, Homo sapiens
tttccttttcagccc

SEQ ID NO: 70973 - DNA, 15 bp, Homo sapiens
gtttccttttcagcc

SEQ ID NO: 70974 - DNA, 15 bp, Homo sapiens
tgtttccttttcagc

SEQ ID NO: 70975 - DNA, 15 bp, Homo sapiens
ttgtttccttttcag

SEQ ID NO: 70976 - DNA, 15 bp, Homo sapiens
attgtttccttttca

SEQ ID NO: 70977 - DNA, 15 bp, Homo sapiens
aattgtttccttttc

SEQ ID NO: 70978 - DNA, 15 bp, Homo sapiens
aaattgtttcctttt

SEQ ID NO: 70979 - DNA, 15 bp, Homo sapiens
caaattgtttccttt

SEQ ID NO: 70980 - DNA, 15 bp, Homo sapiens
ccaaattgtttcctt

SEQ ID NO: 70981 - DNA, 15 bp, Homo sapiens
cccaaattgtttcct

SEQ ID NO: 70982 - DNA, 15 bp, Homo sapiens
ccccaaattgtttcc

SEQ ID NO: 70983 - DNA, 15 bp, Homo sapiens
accccaaattgtttc

SEQ ID NO: 70984 - DNA, 15 bp, Homo sapiens
aaccccaaattgttt

SEQ ID NO: 70985 - DNA, 15 bp, Homo sapiens
aaaccccaaattgtt

SEQ ID NO: 70986 - DNA, 15 bp, Homo sapiens
caaaccccaaattgt

SEQ ID NO: 70987 - DNA, 15 bp, Homo sapiens
tcaaaccccaaattg

SEQ ID NO: 70988 - DNA, 15 bp, Homo sapiens
ttcaaaccccaaatt

SEQ ID NO: 70989 - DNA, 15 bp, Homo sapiens
tttcaaaccccaaat

SEQ ID NO: 70990 - DNA, 15 bp, Homo sapiens
ctttcaaaccccaaa

SEQ ID NO: 70991 - DNA, 15 bp, Homo sapiens
cctttcaaaccccaa

SEQ ID NO: 70992 - DNA, 15 bp, Homo sapiens
tcctttcaaacccca

SEQ ID NO: 70993 - DNA, 15 bp, Homo sapiens
atcctttcaaacccc

SEQ ID NO: 70994 - DNA, 15 bp, Homo sapiens
catcctttcaaaccc

SEQ ID NO: 70995 - DNA, 15 bp, Homo sapiens
acatcctttcaaacc

SEQ ID NO: 70996 - DNA, 15 bp, Homo sapiens
tacatcctttcaaac

SEQ ID NO: 70997 - DNA, 15 bp, Homo sapiens
ttacatcctttcaaa

SEQ ID NO: 70998 - DNA, 15 bp, Homo sapiens
attacatcctttcaa

SEQ ID NO: 70999 - DNA, 15 bp, Homo sapiens
aattacatcctttca

SEQ ID NO: 71000 - DNA, 15 bp, Homo sapiens
gaattacatcctttc

SEQ ID NO: 71001 - DNA, 15 bp, Homo sapiens
tgaattacatccttt

SEQ ID NO: 71002 - DNA, 15 bp, Homo sapiens
atgaattacatcctt

SEQ ID NO: 71003 - DNA, 15 bp, Homo sapiens
aatgaattacatcct

SEQ ID NO: 71004 - DNA, 15 bp, Homo sapiens
gaatgaattacatcc

SEQ ID NO: 71005 - DNA, 15 bp, Homo sapiens
agaatgaattacatc

SEQ ID NO: 71006 - DNA, 15 bp, Homo sapiens
aagaatgaattacat

SEQ ID NO: 71007 - DNA, 15 bp, Homo sapiens
gaagaatgaattaca

SEQ ID NO: 71008 - DNA, 15 bp, Homo sapiens
ggaagaatgaattac

SEQ ID NO: 71009 - DNA, 15 bp, Homo sapiens
aggaagaatgaatta

SEQ ID NO: 71010 - DNA, 15 bp, Homo sapiens
aaggaagaatgaatt

SEQ ID NO: 71011 - DNA, 15 bp, Homo sapiens
aaaggaagaatgaat

SEQ ID NO: 71012 - DNA, 15 bp, Homo sapiens
gaaaggaagaatgaa

SEQ ID NO: 71013 - DNA, 15 bp, Homo sapiens
ggaaaggaagaatga

SEQ ID NO: 71014 - DNA, 15 bp, Homo sapiens
gggaaaggaagaatg

SEQ ID NO: 71015 - DNA, 15 bp, Homo sapiens
cgggaaaggaagaat

SEQ ID NO: 71016 - DNA, 15 bp, Homo sapiens
acgggaaaggaagaa

SEQ ID NO: 71017 - DNA, 15 bp, Homo sapiens
aacgggaaaggaaga

SEQ ID NO: 71018 - DNA, 15 bp, Homo sapiens
taacgggaaaggaag

SEQ ID NO: 71019 - DNA, 15 bp, Homo sapiens
ttaacgggaaaggaa

SEQ ID NO: 71020 - DNA, 15 bp, Homo sapiens
gttaacgggaaagga

SEQ ID NO: 71021 - DNA, 15 bp, Homo sapiens
ggttaacgggaaagg

SEQ ID NO: 71022 - DNA, 15 bp, Homo sapiens
aggttaacgggaaag

SEQ ID NO: 71023 - DNA, 15 bp, Homo sapiens
gaggttaacgggaaa

SEQ ID NO: 71024 - DNA, 15 bp, Homo sapiens
agaggttaacgggaa

SEQ ID NO: 71025 - DNA, 15 bp, Homo sapiens
aagaggttaacggga

SEQ ID NO: 71026 - DNA, 15 bp, Homo sapiens
aaagaggttaacggg

SEQ ID NO: 71027 - DNA, 15 bp, Homo sapiens
gaaagaggttaacgg

SEQ ID NO: 71028 - DNA, 15 bp, Homo sapiens
ggaaagaggttaacg

SEQ ID NO: 71029 - DNA, 15 bp, Homo sapiens
aggaaagaggttaac

SEQ ID NO: 71030 - DNA, 15 bp, Homo sapiens
gaggaaagaggttaa

SEQ ID NO: 71031 - DNA, 15 bp, Homo sapiens
agaggaaagaggtta

SEQ ID NO: 71032 - DNA, 15 bp, Homo sapiens
gagaggaaagaggtt

SEQ ID NO: 71033 - DNA, 15 bp, Homo sapiens
agagaggaaagaggt

SEQ ID NO: 71034 - DNA, 15 bp, Homo sapiens
cagagaggaaagagg

SEQ ID NO: 71035 - DNA, 15 bp, Homo sapiens
ccagagaggaaagag

SEQ ID NO: 71036 - DNA, 15 bp, Homo sapiens
tccagagaggaaaga

SEQ ID NO: 71037 - DNA, 15 bp, Homo sapiens
ttccagagaggaaag

SEQ ID NO: 71038 - DNA, 15 bp, Homo sapiens
tttccagagaggaaa

SEQ ID NO: 71039 - DNA, 15 bp, Homo sapiens
ctttccagagaggaa

SEQ ID NO: 71040 - DNA, 15 bp, Homo sapiens
gctttccagagagga

SEQ ID NO: 71041 - DNA, 15 bp, Homo sapiens
tgctttccagagagg

SEQ ID NO: 71042 - DNA, 15 bp, Homo sapiens
gtgctttccagagag

SEQ ID NO: 71043 - DNA, 15 bp, Homo sapiens
cgtgctttccagaga

SEQ ID NO: 71044 - DNA, 15 bp, Homo sapiens
acgtgctttccagag

SEQ ID NO: 71045 - DNA, 15 bp, Homo sapiens
cacgtgctttccaga

SEQ ID NO: 71046 - DNA, 15 bp, Homo sapiens
ccacgtgctttccag

SEQ ID NO: 71047 - DNA, 15 bp, Homo sapiens
tccacgtgctttcca

SEQ ID NO: 71048 - DNA, 15 bp, Homo sapiens
ttccacgtgctttcc

SEQ ID NO: 71049 - DNA, 15 bp, Homo sapiens
tttccacgtgctttc

SEQ ID NO: 71050 - DNA, 15 bp, Homo sapiens
gtttccacgtgcttt

SEQ ID NO: 71051 - DNA, 15 bp, Homo sapiens
cgtttccacgtgctt

SEQ ID NO: 71052 - DNA, 15 bp, Homo sapiens
gcgtttccacgtgct

SEQ ID NO: 71053 - DNA, 15 bp, Homo sapiens
agcgtttccacgtgc

SEQ ID NO: 71054 - DNA, 15 bp, Homo sapiens
cagcgtttccacgtg

SEQ ID NO: 71055 - DNA, 15 bp, Homo sapiens
tcagcgtttccacgt

SEQ ID NO: 71056 - DNA, 15 bp, Homo sapiens
ttcagcgtttccacg

SEQ ID NO: 71057 - DNA, 15 bp, Homo sapiens
cttcagcgtttccac

SEQ ID NO: 71058 - DNA, 15 bp, Homo sapiens
ccttcagcgtttcca

SEQ ID NO: 71059 - DNA, 15 bp, Homo sapiens
cccttcagcgtttcc

SEQ ID NO: 71060 - DNA, 15 bp, Homo sapiens
tcccttcagcgtttc

SEQ ID NO: 71061 - DNA, 15 bp, Homo sapiens
ctcccttcagcgttt

SEQ ID NO: 71062 - DNA, 15 bp, Homo sapiens
cctcccttcagcgtt

SEQ ID NO: 71063 - DNA, 15 bp, Homo sapiens
tcctcccttcagcgt

SEQ ID NO: 71064 - DNA, 15 bp, Homo sapiens
ctcctcccttcagcg

SEQ ID NO: 71065 - DNA, 15 bp, Homo sapiens
actcctcccttcagc

SEQ ID NO: 71066 - DNA, 15 bp, Homo sapiens
cactcctcccttcag

SEQ ID NO: 71067 - DNA, 15 bp, Homo sapiens
tcactcctcccttca

SEQ ID NO: 71068 - DNA, 15 bp, Homo sapiens
ctcactcctcccttc

SEQ ID NO: 71069 - DNA, 15 bp, Homo sapiens
tctcactcctccctt

SEQ ID NO: 71070 - DNA, 15 bp, Homo sapiens
ctctcactcctccct

SEQ ID NO: 71071 - DNA, 15 bp, Homo sapiens
cctctcactcctccc

SEQ ID NO: 71072 - DNA, 15 bp, Homo sapiens
ccctctcactcctcc

SEQ ID NO: 71073 - DNA, 15 bp, Homo sapiens
gccctctcactcctc

SEQ ID NO: 71074 - DNA, 15 bp, Homo sapiens
tgccctctcactcct

SEQ ID NO: 71075 - DNA, 15 bp, Homo sapiens
ctgccctctcactcc

SEQ ID NO: 71076 - DNA, 15 bp, Homo sapiens
cctgccctctcactc

SEQ ID NO: 71077 - DNA, 15 bp, Homo sapiens
gcctgccctctcact

SEQ ID NO: 71078 - DNA, 15 bp, Homo sapiens
tgcctgccctctcac

SEQ ID NO: 71079 - DNA, 15 bp, Homo sapiens
ctgcctgccctctca

SEQ ID NO: 71080 - DNA, 15 bp, Homo sapiens
gctgcctgccctctc

SEQ ID NO: 71081 - DNA, 15 bp, Homo sapiens
ggctgcctgccctct

SEQ ID NO: 71082 - DNA, 15 bp, Homo sapiens
aggctgcctgccctc

SEQ ID NO: 71083 - DNA, 15 bp, Homo sapiens
caggctgcctgccct

SEQ ID NO: 71084 - DNA, 15 bp, Homo sapiens
gcaggctgcctgccc

SEQ ID NO: 71085 - DNA, 15 bp, Homo sapiens
ggcaggctgcctgcc

SEQ ID NO: 71086 - DNA, 15 bp, Homo sapiens
cggcaggctgcctgc

SEQ ID NO: 71087 - DNA, 15 bp, Homo sapiens
gcggcaggctgcctg

SEQ ID NO: 71088 - DNA, 15 bp, Homo sapiens
cgcggcaggctgcct

SEQ ID NO: 71089 - DNA, 15 bp, Homo sapiens
ccgcggcaggctgcc

SEQ ID NO: 71090 - DNA, 15 bp, Homo sapiens
cccgcggcaggctgc

SEQ ID NO: 71091 - DNA, 15 bp, Homo sapiens
ccccgcggcaggctg

SEQ ID NO: 71092 - DNA, 15 bp, Homo sapiens
tccccgcggcaggct

SEQ ID NO: 71093 - DNA, 15 bp, Homo sapiens
ctccccgcggcaggc

SEQ ID NO: 71094 - DNA, 15 bp, Homo sapiens
cctccccgcggcagg

SEQ ID NO: 71095 - DNA, 15 bp, Homo sapiens
tcctccccgcggcag

SEQ ID NO: 71096 - DNA, 15 bp, Homo sapiens
ttcctccccgcggca

SEQ ID NO: 71097 - DNA, 15 bp, Homo sapiens
tttcctccccgcggc

SEQ ID NO: 71098 - DNA, 15 bp, Homo sapiens
ctttcctccccgcgg

SEQ ID NO: 71099 - DNA, 15 bp, Homo sapiens
cctttcctccccgcg

SEQ ID NO: 71100 - DNA, 15 bp, Homo sapiens
ccctttcctccccgc

SEQ ID NO: 71101 - DNA, 15 bp, Homo sapiens
accctttcctccccg

SEQ ID NO: 71102 - DNA, 15 bp, Homo sapiens
aaccctttcctcccc

SEQ ID NO: 71103 - DNA, 15 bp, Homo sapiens
taaccctttcctccc

SEQ ID NO: 71104 - DNA, 15 bp, Homo sapiens
ttaaccctttcctcc

SEQ ID NO: 71105 - DNA, 15 bp, Homo sapiens
cttaaccctttcctc

SEQ ID NO: 71106 - DNA, 15 bp, Homo sapiens
gcttaaccctttcct

SEQ ID NO: 71107 - DNA, 15 bp, Homo sapiens
ggcttaaccctttcc

SEQ ID NO: 71108 - DNA, 15 bp, Homo sapiens
aggcttaaccctttc

SEQ ID NO: 71109 - DNA, 15 bp, Homo sapiens
caggcttaacccttt

SEQ ID NO: 71110 - DNA, 15 bp, Homo sapiens
tcaggcttaaccctt

SEQ ID NO: 71111 - DNA, 15 bp, Homo sapiens
atcaggcttaaccct

SEQ ID NO: 71112 - DNA, 15 bp, Homo sapiens
aatcaggcttaaccc

SEQ ID NO: 71113 - DNA, 15 bp, Homo sapiens
aaatcaggcttaacc

SEQ ID NO: 71114 - DNA, 15 bp, Homo sapiens
gaaatcaggcttaac

SEQ ID NO: 71115 - DNA, 15 bp, Homo sapiens
agaaatcaggcttaa

SEQ ID NO: 71116 - DNA, 15 bp, Homo sapiens
aagaaatcaggctta

SEQ ID NO: 71117 - DNA, 15 bp, Homo sapiens
aaagaaatcaggctt

SEQ ID NO: 71118 - DNA, 15 bp, Homo sapiens
aaaagaaatcaggct

SEQ ID NO: 71119 - DNA, 15 bp, Homo sapiens
taaaagaaatcaggc

SEQ ID NO: 71120 - DNA, 15 bp, Homo sapiens
ttaaaagaaatcagg

SEQ ID NO: 71121 - DNA, 15 bp, Homo sapiens
attaaaagaaatcag

SEQ ID NO: 71122 - DNA, 15 bp, Homo sapiens
aattaaaagaaatca

SEQ ID NO: 71123 - DNA, 15 bp, Homo sapiens
caattaaaagaaatc

SEQ ID NO: 71124 - DNA, 15 bp, Homo sapiens
tcaattaaaagaaat

SEQ ID NO: 71125 - DNA, 15 bp, Homo sapiens
ttcaattaaaagaaa

SEQ ID NO: 71126 - DNA, 15 bp, Homo sapiens
gttcaattaaaagaa

SEQ ID NO: 71127 - DNA, 15 bp, Homo sapiens
agttcaattaaaaga

SEQ ID NO: 71128 - DNA, 15 bp, Homo sapiens
gagttcaattaaaag

SEQ ID NO: 71129 - DNA, 15 bp, Homo sapiens
ggagttcaattaaaa

SEQ ID NO: 71130 - DNA, 15 bp, Homo sapiens
tggagttcaattaaa

SEQ ID NO: 71131 - DNA, 15 bp, Homo sapiens
ctggagttcaattaa

SEQ ID NO: 71132 - DNA, 15 bp, Homo sapiens
tctggagttcaatta

SEQ ID NO: 71133 - DNA, 15 bp, Homo sapiens
ttctggagttcaatt

SEQ ID NO: 71134 - DNA, 15 bp, Homo sapiens
gttctggagttcaat

SEQ ID NO: 71135 - DNA, 15 bp, Homo sapiens
agttctggagttcaa

SEQ ID NO: 71136 - DNA, 15 bp, Homo sapiens
cagttctggagttca

SEQ ID NO: 71137 - DNA, 15 bp, Homo sapiens
ccagttctggagttc

SEQ ID NO: 71138 - DNA, 15 bp, Homo sapiens
accagttctggagtt

SEQ ID NO: 71139 - DNA, 15 bp, Homo sapiens
caccagttctggagt

SEQ ID NO: 71140 - DNA, 15 bp, Homo sapiens
ccaccagttctggag

SEQ ID NO: 71141 - DNA, 15 bp, Homo sapiens
gccaccagttctgga

SEQ ID NO: 71142 - DNA, 15 bp, Homo sapiens
ggccaccagttctgg

SEQ ID NO: 71143 - DNA, 15 bp, Homo sapiens
gggccaccagttctg

SEQ ID NO: 71144 - DNA, 15 bp, Homo sapiens
ggggccaccagttct

SEQ ID NO: 71145 - DNA, 15 bp, Homo sapiens
tggggccaccagttc

SEQ ID NO: 71146 - DNA, 15 bp, Homo sapiens
ctggggccaccagtt

SEQ ID NO: 71147 - DNA, 15 bp, Homo sapiens
cctggggccaccagt

SEQ ID NO: 71148 - DNA, 15 bp, Homo sapiens
gcctggggccaccag

SEQ ID NO: 71149 - DNA, 15 bp, Homo sapiens
tgcctggggccacca

SEQ ID NO: 71150 - DNA, 15 bp, Homo sapiens
ttgcctggggccacc

SEQ ID NO: 71151 - DNA, 15 bp, Homo sapiens
tttgcctggggccac

SEQ ID NO: 71152 - DNA, 15 bp, Homo sapiens
ctttgcctggggcca

SEQ ID NO: 71153 - DNA, 15 bp, Homo sapiens
cctttgcctggggcc

SEQ ID NO: 71154 - DNA, 15 bp, Homo sapiens
ccctttgcctggggc

SEQ ID NO: 71155 - DNA, 15 bp, Homo sapiens
cccctttgcctgggg

SEQ ID NO: 71156 - DNA, 15 bp, Homo sapiens
ccccctttgcctggg

SEQ ID NO: 71157 - DNA, 15 bp, Homo sapiens
cccccctttgcctgg

SEQ ID NO: 71158 - DNA, 15 bp, Homo sapiens
ccccccctttgcctg

SEQ ID NO: 71159 - DNA, 15 bp, Homo sapiens
tccccccctttgcct

SEQ ID NO: 71160 - DNA, 15 bp, Homo sapiens
gtccccccctttgcc

SEQ ID NO: 71161 - DNA, 15 bp, Homo sapiens
agtccccccctttgc

SEQ ID NO: 71162 - DNA, 15 bp, Homo sapiens
cagtccccccctttg

SEQ ID NO: 71163 - DNA, 15 bp, Homo sapiens
tcagtcccccccttt

SEQ ID NO: 71164 - DNA, 15 bp, Homo sapiens
gtcagtccccccctt

SEQ ID NO: 71165 - DNA, 15 bp, Homo sapiens
ggtcagtccccccct

SEQ ID NO: 71166 - DNA, 15 bp, Homo sapiens
gggtcagtccccccc

SEQ ID NO: 71167 - DNA, 15 bp, Homo sapiens
ggggtcagtcccccc

SEQ ID NO: 71168 - DNA, 15 bp, Homo sapiens
cggggtcagtccccc

SEQ ID NO: 71169 - DNA, 15 bp, Homo sapiens
gcggggtcagtcccc

SEQ ID NO: 71170 - DNA, 15 bp, Homo sapiens
agcggggtcagtccc

SEQ ID NO: 71171 - DNA, 15 bp, Homo sapiens
tagcggggtcagtcc

SEQ ID NO: 71172 - DNA, 15 bp, Homo sapiens
ctagcggggtcagtc

SEQ ID NO: 71173 - DNA, 15 bp, Homo sapiens
gctagcggggtcagt

SEQ ID NO: 71174 - DNA, 15 bp, Homo sapiens
cgctagcggggtcag

SEQ ID NO: 71175 - DNA, 15 bp, Homo sapiens
ccgctagcggggtca

SEQ ID NO: 71176 - DNA, 15 bp, Homo sapiens
accgctagcggggtc

SEQ ID NO: 71177 - DNA, 15 bp, Homo sapiens
taccgctagcggggt

SEQ ID NO: 71178 - DNA, 15 bp, Homo sapiens
ttaccgctagcgggg

SEQ ID NO: 71179 - DNA, 15 bp, Homo sapiens
gttaccgctagcggg

SEQ ID NO: 71180 - DNA, 15 bp, Homo sapiens
ggttaccgctagcgg

SEQ ID NO: 71181 - DNA, 15 bp, Homo sapiens
tggttaccgctagcg

SEQ ID NO: 71182 - DNA, 15 bp, Homo sapiens
ctggttaccgctagc

SEQ ID NO: 71183 - DNA, 15 bp, Homo sapiens
tctggttaccgctag

SEQ ID NO: 71184 - DNA, 15 bp, Homo sapiens
atctggttaccgcta

SEQ ID NO: 71185 - DNA, 15 bp, Homo sapiens
catctggttaccgct

SEQ ID NO: 71186 - DNA, 15 bp, Homo sapiens
acatctggttaccgc

SEQ ID NO: 71187 - DNA, 15 bp, Homo sapiens
cacatctggttaccg

SEQ ID NO: 71188 - DNA, 15 bp, Homo sapiens
ccacatctggttacc

SEQ ID NO: 71189 - DNA, 15 bp, Homo sapiens
gccacatctggttac

SEQ ID NO: 71190 - DNA, 15 bp, Homo sapiens
cgccacatctggtta

SEQ ID NO: 71191 - DNA, 15 bp, Homo sapiens
ccgccacatctggtt

SEQ ID NO: 71192 - DNA, 15 bp, Homo sapiens
accgccacatctggt

SEQ ID NO: 71193 - DNA, 15 bp, Homo sapiens
gaccgccacatctgg

SEQ ID NO: 71194 - DNA, 15 bp, Homo sapiens
ggaccgccacatctg

SEQ ID NO: 71195 - DNA, 15 bp, Homo sapiens
gggaccgccacatct

SEQ ID NO: 71196 - DNA, 15 bp, Homo sapiens
tgggaccgccacatc

SEQ ID NO: 71197 - DNA, 15 bp, Homo sapiens
ctgggaccgccacat

SEQ ID NO: 71198 - DNA, 15 bp, Homo sapiens
cctgggaccgccaca

SEQ ID NO: 71199 - DNA, 15 bp, Homo sapiens
ccctgggaccgccac

SEQ ID NO: 71200 - DNA, 15 bp, Homo sapiens
cccctgggaccgcca

SEQ ID NO: 71201 - DNA, 15 bp, Homo sapiens
tcccctgggaccgcc

SEQ ID NO: 71202 - DNA, 15 bp, Homo sapiens
ctcccctgggaccgc

SEQ ID NO: 71203 - DNA, 15 bp, Homo sapiens
gctcccctgggaccg

SEQ ID NO: 71204 - DNA, 15 bp, Homo sapiens
ggctcccctgggacc

SEQ ID NO: 71205 - DNA, 15 bp, Homo sapiens
gggctcccctgggac

SEQ ID NO: 71206 - DNA, 15 bp, Homo sapiens
ggggctcccctggga

SEQ ID NO: 71207 - DNA, 15 bp, Homo sapiens
cggggctcccctggg

SEQ ID NO: 71208 - DNA, 15 bp, Homo sapiens
ccggggctcccctgg

SEQ ID NO: 71209 - DNA, 15 bp, Homo sapiens
tccggggctcccctg

SEQ ID NO: 71210 - DNA, 15 bp, Homo sapiens
ctccggggctcccct

SEQ ID NO: 71211 - DNA, 15 bp, Homo sapiens
gctccggggctcccc

SEQ ID NO: 71212 - DNA, 15 bp, Homo sapiens
tgctccggggctccc

SEQ ID NO: 71213 - DNA, 15 bp, Homo sapiens
ctgctccggggctcc

SEQ ID NO: 71214 - DNA, 15 bp, Homo sapiens
tctgctccggggctc

SEQ ID NO: 71215 - DNA, 15 bp, Homo sapiens
gtctgctccggggct

SEQ ID NO: 71216 - DNA, 15 bp, Homo sapiens
ggtctgctccggggc

SEQ ID NO: 71217 - DNA, 15 bp, Homo sapiens
gggtctgctccgggg

SEQ ID NO: 71218 - DNA, 15 bp, Homo sapiens
ggggtctgctccggg

SEQ ID NO: 71219 - DNA, 15 bp, Homo sapiens
aggggtctgctccgg

SEQ ID NO: 71220 - DNA, 15 bp, Homo sapiens
caggggtctgctccg

SEQ ID NO: 71221 - DNA, 15 bp, Homo sapiens
ccaggggtctgctcc

SEQ ID NO: 71222 - DNA, 15 bp, Homo sapiens
tccaggggtctgctc

SEQ ID NO: 71223 - DNA, 15 bp, Homo sapiens
atccaggggtctgct

SEQ ID NO: 71224 - DNA, 15 bp, Homo sapiens
aatccaggggtctgc

SEQ ID NO: 71225 - DNA, 15 bp, Homo sapiens
caatccaggggtctg

SEQ ID NO: 71226 - DNA, 15 bp, Homo sapiens
tcaatccaggggtct

SEQ ID NO: 71227 - DNA, 15 bp, Homo sapiens
ctcaatccaggggtc

SEQ ID NO: 71228 - DNA, 15 bp, Homo sapiens
tctcaatccaggggt

SEQ ID NO: 71229 - DNA, 15 bp, Homo sapiens
ttctcaatccagggg

SEQ ID NO: 71230 - DNA, 15 bp, Homo sapiens
cttctcaatccaggg

SEQ ID NO: 71231 - DNA, 15 bp, Homo sapiens
gcttctcaatccagg

SEQ ID NO: 71232 - DNA, 15 bp, Homo sapiens
tgcttctcaatccag

SEQ ID NO: 71233 - DNA, 15 bp, Homo sapiens
ctgcttctcaatcca

SEQ ID NO: 71234 - DNA, 15 bp, Homo sapiens
tctgcttctcaatcc

SEQ ID NO: 71235 - DNA, 15 bp, Homo sapiens
gtctgcttctcaatc

SEQ ID NO: 71236 - DNA, 15 bp, Homo sapiens
tgtctgcttctcaat

SEQ ID NO: 71237 - DNA, 15 bp, Homo sapiens
ctgtctgcttctcaa

SEQ ID NO: 71238 - DNA, 15 bp, Homo sapiens
cctgtctgcttctca

SEQ ID NO: 71239 - DNA, 15 bp, Homo sapiens
tcctgtctgcttctc

SEQ ID NO: 71240 - DNA, 15 bp, Homo sapiens
ctcctgtctgcttct

SEQ ID NO: 71241 - DNA, 15 bp, Homo sapiens
gctcctgtctgcttc

SEQ ID NO: 71242 - DNA, 15 bp, Homo sapiens
cgctcctgtctgctt

SEQ ID NO: 71243 - DNA, 15 bp, Homo sapiens
ccgctcctgtctgct

SEQ ID NO: 71244 - DNA, 15 bp, Homo sapiens
cccgctcctgtctgc

SEQ ID NO: 71245 - DNA, 15 bp, Homo sapiens
ccccgctcctgtctg

SEQ ID NO: 71246 - DNA, 15 bp, Homo sapiens
cccccgctcctgtct

SEQ ID NO: 71247 - DNA, 15 bp, Homo sapiens
ccccccgctcctgtc

SEQ ID NO: 71248 - DNA, 15 bp, Homo sapiens
tccccccgctcctgt

SEQ ID NO: 71249 - DNA, 15 bp, Homo sapiens
ctccccccgctcctg

SEQ ID NO: 71250 - DNA, 15 bp, Homo sapiens
actccccccgctcct

SEQ ID NO: 71251 - DNA, 15 bp, Homo sapiens
gactccccccgctcc

SEQ ID NO: 71252 - DNA, 15 bp, Homo sapiens
tgactccccccgctc

SEQ ID NO: 71253 - DNA, 15 bp, Homo sapiens
ctgactccccccgct

SEQ ID NO: 71254 - DNA, 15 bp, Homo sapiens
gctgactccccccgc

SEQ ID NO: 71255 - DNA, 15 bp, Homo sapiens
ggctgactccccccg

SEQ ID NO: 71256 - DNA, 15 bp, Homo sapiens
gggctgactcccccc

SEQ ID NO: 71257 - DNA, 15 bp, Homo sapiens
cgggctgactccccc

SEQ ID NO: 71258 - DNA, 15 bp, Homo sapiens
ccgggctgactcccc

SEQ ID NO: 71259 - DNA, 15 bp, Homo sapiens
gccgggctgactccc

SEQ ID NO: 71260 - DNA, 15 bp, Homo sapiens
ggccgggctgactcc

SEQ ID NO: 71261 - DNA, 15 bp, Homo sapiens
gggccgggctgactc

SEQ ID NO: 71262 - DNA, 15 bp, Homo sapiens
ggggccgggctgact

SEQ ID NO: 71263 - DNA, 15 bp, Homo sapiens
gggggccgggctgac

SEQ ID NO: 71264 - DNA, 15 bp, Homo sapiens
tgggggccgggctga

SEQ ID NO: 71265 - DNA, 15 bp, Homo sapiens
atgggggccgggctg

SEQ ID NO: 71266 - DNA, 15 bp, Homo sapiens
gatgggggccgggct

SEQ ID NO: 71267 - DNA, 15 bp, Homo sapiens
ggatgggggccgggc

SEQ ID NO: 71268 - DNA, 15 bp, Homo sapiens
gggatgggggccggg

SEQ ID NO: 71269 - DNA, 15 bp, Homo sapiens
tgggatgggggccgg

SEQ ID NO: 71270 - DNA, 15 bp, Homo sapiens
gtgggatgggggccg

SEQ ID NO: 71271 - DNA, 15 bp, Homo sapiens
ggtgggatgggggcc

SEQ ID NO: 71272 - DNA, 15 bp, Homo sapiens
tggtgggatgggggc

SEQ ID NO: 71273 - DNA, 15 bp, Homo sapiens
atggtgggatggggg

SEQ ID NO: 71274 - DNA, 15 bp, Homo sapiens
gatggtgggatgggg

SEQ ID NO: 71275 - DNA, 15 bp, Homo sapiens
ggatggtgggatggg

SEQ ID NO: 71276 - DNA, 15 bp, Homo sapiens
tggatggtgggatgg

SEQ ID NO: 71277 - DNA, 15 bp, Homo sapiens
gtggatggtgggatg

SEQ ID NO: 71278 - DNA, 15 bp, Homo sapiens
ggtggatggtgggat

SEQ ID NO: 71279 - DNA, 15 bp, Homo sapiens
gggtggatggtggga

SEQ ID NO: 71280 - DNA, 15 bp, Homo sapiens
ggggtggatggtggg

SEQ ID NO: 71281 - DNA, 15 bp, Homo sapiens
tggggtggatggtgg

SEQ ID NO: 71282 - DNA, 15 bp, Homo sapiens
gtggggtggatggtg

SEQ ID NO: 71283 - DNA, 15 bp, Homo sapiens
ggtggggtggatggt

SEQ ID NO: 71284 - DNA, 15 bp, Homo sapiens
gggtggggtggatgg

SEQ ID NO: 71285 - DNA, 15 bp, Homo sapiens
ggggtggggtggatg

SEQ ID NO: 71286 - DNA, 15 bp, Homo sapiens
gggggtggggtggat

SEQ ID NO: 71287 - DNA, 15 bp, Homo sapiens
tgggggtggggtgga

SEQ ID NO: 71288 - DNA, 15 bp, Homo sapiens
gtgggggtggggtgg

SEQ ID NO: 71289 - DNA, 15 bp, Homo sapiens
ggtgggggtggggtg

SEQ ID NO: 71290 - DNA, 15 bp, Homo sapiens
gggtgggggtggggt

SEQ ID NO: 71291 - DNA, 15 bp, Homo sapiens
ggggtgggggtgggg

SEQ ID NO: 71292 - DNA, 15 bp, Homo sapiens
gggggtgggggtggg

SEQ ID NO: 71293 - DNA, 15 bp, Homo sapiens
tgggggtgggggtgg

SEQ ID NO: 71294 - DNA, 15 bp, Homo sapiens
ttgggggtgggggtg

SEQ ID NO: 71295 - DNA, 15 bp, Homo sapiens
gttgggggtgggggt

SEQ ID NO: 71296 - DNA, 15 bp, Homo sapiens
tgttgggggtggggg

SEQ ID NO: 71297 - DNA, 15 bp, Homo sapiens
gtgttgggggtgggg

SEQ ID NO: 71298 - DNA, 15 bp, Homo sapiens
cgtgttgggggtggg

SEQ ID NO: 71299 - DNA, 15 bp, Homo sapiens
gcgtgttgggggtgg

SEQ ID NO: 71300 - DNA, 15 bp, Homo sapiens
tgcgtgttgggggtg

SEQ ID NO: 71301 - DNA, 15 bp, Homo sapiens
gtgcgtgttgggggt

SEQ ID NO: 71302 - DNA, 15 bp, Homo sapiens
tgtgcgtgttggggg

SEQ ID NO: 71303 - DNA, 15 bp, Homo sapiens
gtgtgcgtgttgggg

SEQ ID NO: 71304 - DNA, 15 bp, Homo sapiens
ggtgtgcgtgttggg

SEQ ID NO: 71305 - DNA, 15 bp, Homo sapiens
tggtgtgcgtgttgg

SEQ ID NO: 71306 - DNA, 15 bp, Homo sapiens
ttggtgtgcgtgttg

SEQ ID NO: 71307 - DNA, 15 bp, Homo sapiens
cttggtgtgcgtgtt

SEQ ID NO: 71308 - DNA, 15 bp, Homo sapiens
acttggtgtgcgtgt

SEQ ID NO: 71309 - DNA, 15 bp, Homo sapiens
gacttggtgtgcgtg

SEQ ID NO: 71310 - DNA, 15 bp, Homo sapiens
agacttggtgtgcgt

SEQ ID NO: 71311 - DNA, 15 bp, Homo sapiens
gagacttggtgtgcg

SEQ ID NO: 71312 - DNA, 15 bp, Homo sapiens
tgagacttggtgtgc

SEQ ID NO: 71313 - DNA, 15 bp, Homo sapiens
ttgagacttggtgtg

SEQ ID NO: 71314 - DNA, 15 bp, Homo sapiens
attgagacttggtgt

SEQ ID NO: 71315 - DNA, 15 bp, Homo sapiens
aattgagacttggtg

SEQ ID NO: 71316 - DNA, 15 bp, Homo sapiens
caattgagacttggt

SEQ ID NO: 71317 - DNA, 15 bp, Homo sapiens
gcaattgagacttgg

SEQ ID NO: 71318 - DNA, 15 bp, Homo sapiens
agcaattgagacttg

SEQ ID NO: 71319 - DNA, 15 bp, Homo sapiens
cagcaattgagactt

SEQ ID NO: 71320 - DNA, 15 bp, Homo sapiens
ccagcaattgagact

SEQ ID NO: 71321 - DNA, 15 bp, Homo sapiens
gccagcaattgagac

SEQ ID NO: 71322 - DNA, 15 bp, Homo sapiens
tgccagcaattgaga

SEQ ID NO: 71323 - DNA, 15 bp, Homo sapiens
ctgccagcaattgag

SEQ ID NO: 71324 - DNA, 15 bp, Homo sapiens
cctgccagcaattga

SEQ ID NO: 71325 - DNA, 15 bp, Homo sapiens
gcctgccagcaattg

SEQ ID NO: 71326 - DNA, 15 bp, Homo sapiens
agcctgccagcaatt

SEQ ID NO: 71327 - DNA, 15 bp, Homo sapiens
cagcctgccagcaat

SEQ ID NO: 71328 - DNA, 15 bp, Homo sapiens
gcagcctgccagcaa

SEQ ID NO: 71329 - DNA, 15 bp, Homo sapiens
tgcagcctgccagca

SEQ ID NO: 71330 - DNA, 15 bp, Homo sapiens
gtgcagcctgccagc

SEQ ID NO: 71331 - DNA, 15 bp, Homo sapiens
ggtgcagcctgccag

SEQ ID NO: 71332 - DNA, 15 bp, Homo sapiens
gggtgcagcctgcca

SEQ ID NO: 71333 - DNA, 15 bp, Homo sapiens
cgggtgcagcctgcc

SEQ ID NO: 71334 - DNA, 15 bp, Homo sapiens
gcgggtgcagcctgc

SEQ ID NO: 71335 - DNA, 15 bp, Homo sapiens
ggcgggtgcagcctg

SEQ ID NO: 71336 - DNA, 15 bp, Homo sapiens
tggcgggtgcagcct

SEQ ID NO: 71337 - DNA, 15 bp, Homo sapiens
gtggcgggtgcagcc

SEQ ID NO: 71338 - DNA, 15 bp, Homo sapiens
agtggcgggtgcagc

SEQ ID NO: 71339 - DNA, 15 bp, Homo sapiens
gagtggcgggtgcag

SEQ ID NO: 71340 - DNA, 15 bp, Homo sapiens
ggagtggcgggtgca

SEQ ID NO: 71341 - DNA, 15 bp, Homo sapiens
tggagtggcgggtgc

SEQ ID NO: 71342 - DNA, 15 bp, Homo sapiens
ctggagtggcgggtg

SEQ ID NO: 71343 - DNA, 15 bp, Homo sapiens
cctggagtggcgggt

SEQ ID NO: 71344 - DNA, 15 bp, Homo sapiens
acctggagtggcggg

SEQ ID NO: 71345 - DNA, 15 bp, Homo sapiens
gacctggagtggcgg

SEQ ID NO: 71346 - DNA, 15 bp, Homo sapiens
agacctggagtggcg

SEQ ID NO: 71347 - DNA, 15 bp, Homo sapiens
cagacctggagtggc

SEQ ID NO: 71348 - DNA, 15 bp, Homo sapiens
ccagacctggagtgg

SEQ ID NO: 71349 - DNA, 15 bp, Homo sapiens
accagacctggagtg

SEQ ID NO: 71350 - DNA, 15 bp, Homo sapiens
gaccagacctggagt

SEQ ID NO: 71351 - DNA, 15 bp, Homo sapiens
tgaccagacctggag

SEQ ID NO: 71352 - DNA, 15 bp, Homo sapiens
gtgaccagacctgga

SEQ ID NO: 71353 - DNA, 15 bp, Homo sapiens
cgtgaccagacctgg

SEQ ID NO: 71354 - DNA, 15 bp, Homo sapiens
acgtgaccagacctg

SEQ ID NO: 71355 - DNA, 15 bp, Homo sapiens
aacgtgaccagacct

SEQ ID NO: 71356 - DNA, 15 bp, Homo sapiens
gaacgtgaccagacc

SEQ ID NO: 71357 - DNA, 15 bp, Homo sapiens
tgaacgtgaccagac

SEQ ID NO: 71358 - DNA, 15 bp, Homo sapiens
ctgaacgtgaccaga

SEQ ID NO: 71359 - DNA, 15 bp, Homo sapiens
tctgaacgtgaccag

SEQ ID NO: 71360 - DNA, 15 bp, Homo sapiens
gtctgaacgtgacca

SEQ ID NO: 71361 - DNA, 15 bp, Homo sapiens
ggtctgaacgtgacc

SEQ ID NO: 71362 - DNA, 15 bp, Homo sapiens
gggtctgaacgtgac

SEQ ID NO: 71363 - DNA, 15 bp, Homo sapiens
cgggtctgaacgtga

SEQ ID NO: 71364 - DNA, 15 bp, Homo sapiens
acgggtctgaacgtg

SEQ ID NO: 71365 - DNA, 15 bp, Homo sapiens
cacgggtctgaacgt

SEQ ID NO: 71366 - DNA, 15 bp, Homo sapiens
acacgggtctgaacg

SEQ ID NO: 71367 - DNA, 15 bp, Homo sapiens
gacacgggtctgaac

SEQ ID NO: 71368 - DNA, 15 bp, Homo sapiens
agacacgggtctgaa

SEQ ID NO: 71369 - DNA, 15 bp, Homo sapiens
cagacacgggtctga

SEQ ID NO: 71370 - DNA, 15 bp, Homo sapiens
acagacacgggtctg

SEQ ID NO: 71371 - DNA, 15 bp, Homo sapiens
tacagacacgggtct

SEQ ID NO: 71372 - DNA, 15 bp, Homo sapiens
atacagacacgggtc

SEQ ID NO: 71373 - DNA, 15 bp, Homo sapiens
aatacagacacgggt

SEQ ID NO: 71374 - DNA, 15 bp, Homo sapiens
gaatacagacacggg

SEQ ID NO: 71375 - DNA, 15 bp, Homo sapiens
cgaatacagacacgg

SEQ ID NO: 71376 - DNA, 15 bp, Homo sapiens
tcgaatacagacacg

SEQ ID NO: 71377 - DNA, 15 bp, Homo sapiens
ttcgaatacagacac

SEQ ID NO: 71378 - DNA, 15 bp, Homo sapiens
gttcgaatacagaca

SEQ ID NO: 71379 - DNA, 15 bp, Homo sapiens
ggttcgaatacagac

SEQ ID NO: 71380 - DNA, 15 bp, Homo sapiens
gggttcgaatacaga

SEQ ID NO: 71381 - DNA, 15 bp, Homo sapiens
tgggttcgaatacag

SEQ ID NO: 71382 - DNA, 15 bp, Homo sapiens
ttgggttcgaataca

SEQ ID NO: 71383 - DNA, 15 bp, Homo sapiens
tttgggttcgaatac

SEQ ID NO: 71384 - DNA, 15 bp, Homo sapiens
ttttgggttcgaata

SEQ ID NO: 71385 - DNA, 15 bp, Homo sapiens
attttgggttcgaat

SEQ ID NO: 71386 - DNA, 15 bp, Homo sapiens
aattttgggttcgaa

SEQ ID NO: 71387 - DNA, 15 bp, Homo sapiens
caattttgggttcga

SEQ ID NO: 71388 - DNA, 15 bp, Homo sapiens
ccaattttgggttcg

SEQ ID NO: 71389 - DNA, 15 bp, Homo sapiens
tccaattttgggttc

SEQ ID NO: 71390 - DNA, 15 bp, Homo sapiens
ctccaattttgggtt

SEQ ID NO: 71391 - DNA, 15 bp, Homo sapiens
gctccaattttgggt

SEQ ID NO: 71392 - DNA, 15 bp, Homo sapiens
ggctccaattttggg

SEQ ID NO: 71393 - DNA, 15 bp, Homo sapiens
cggctccaattttgg

SEQ ID NO: 71394 - DNA, 15 bp, Homo sapiens
tcggctccaattttg

SEQ ID NO: 71395 - DNA, 15 bp, Homo sapiens
ttcggctccaatttt

SEQ ID NO: 71396 - DNA, 15 bp, Homo sapiens
attcggctccaattt

SEQ ID NO: 71397 - DNA, 15 bp, Homo sapiens
aattcggctccaatt

SEQ ID NO: 71398 - DNA, 15 bp, Homo sapiens
caattcggctccaat

SEQ ID NO: 71399 - DNA, 15 bp, Homo sapiens
tcaattcggctccaa

SEQ ID NO: 71400 - DNA, 15 bp, Homo sapiens
atcaattcggctcca

SEQ ID NO: 71401 - DNA, 15 bp, Homo sapiens
catcaattcggctcc

SEQ ID NO: 71402 - DNA, 15 bp, Homo sapiens
tcatcaattcggctc

SEQ ID NO: 71403 - DNA, 15 bp, Homo sapiens
ctcatcaattcggct

SEQ ID NO: 71404 - DNA, 15 bp, Homo sapiens
tctcatcaattcggc

SEQ ID NO: 71405 - DNA, 15 bp, Homo sapiens
gtctcatcaattcgg

SEQ ID NO: 71406 - DNA, 15 bp, Homo sapiens
agtctcatcaattcg

SEQ ID NO: 71407 - DNA, 15 bp, Homo sapiens
tagtctcatcaattc

SEQ ID NO: 71408 - DNA, 15 bp, Homo sapiens
ttagtctcatcaatt

SEQ ID NO: 71409 - DNA, 15 bp, Homo sapiens
attagtctcatcaat

SEQ ID NO: 71410 - DNA, 15 bp, Homo sapiens
aattagtctcatcaa

SEQ ID NO: 71411 - DNA, 15 bp, Homo sapiens
aaattagtctcatca

SEQ ID NO: 71412 - DNA, 15 bp, Homo sapiens
gaaattagtctcatc

SEQ ID NO: 71413 - DNA, 15 bp, Homo sapiens
agaaattagtctcat

SEQ ID NO: 71414 - DNA, 15 bp, Homo sapiens
tagaaattagtctca

SEQ ID NO: 71415 - DNA, 15 bp, Homo sapiens
ctagaaattagtctc

SEQ ID NO: 71416 - DNA, 15 bp, Homo sapiens
tctagaaattagtct

SEQ ID NO: 71417 - DNA, 15 bp, Homo sapiens
ctctagaaattagtc

SEQ ID NO: 71418 - DNA, 15 bp, Homo sapiens
tctctagaaattagt

SEQ ID NO: 71419 - DNA, 15 bp, Homo sapiens
ctctctagaaattag

SEQ ID NO: 71420 - DNA, 15 bp, Homo sapiens
cctctctagaaatta

SEQ ID NO: 71421 - DNA, 15 bp, Homo sapiens
ccctctctagaaatt

SEQ ID NO: 71422 - DNA, 15 bp, Homo sapiens
tccctctctagaaat

SEQ ID NO: 71423 - DNA, 15 bp, Homo sapiens
ctccctctctagaaa

SEQ ID NO: 71424 - DNA, 15 bp, Homo sapiens
cctccctctctagaa

SEQ ID NO: 71425 - DNA, 15 bp, Homo sapiens
ccctccctctctaga

SEQ ID NO: 71426 - DNA, 15 bp, Homo sapiens
cccctccctctctag

SEQ ID NO: 71427 - DNA, 15 bp, Homo sapiens
ccccctccctctcta

SEQ ID NO: 71428 - DNA, 15 bp, Homo sapiens
tccccctccctctct

SEQ ID NO: 71429 - DNA, 15 bp, Homo sapiens
ctccccctccctctc

SEQ ID NO: 71430 - DNA, 15 bp, Homo sapiens
cctccccctccctct

SEQ ID NO: 71431 - DNA, 15 bp, Homo sapiens
ccctccccctccctc

SEQ ID NO: 71432 - DNA, 15 bp, Homo sapiens
tccctccccctccct

SEQ ID NO: 71433 - DNA, 15 bp, Homo sapiens
ctccctccccctccc

SEQ ID NO: 71434 - DNA, 15 bp, Homo sapiens
cctccctccccctcc

SEQ ID NO: 71435 - DNA, 15 bp, Homo sapiens
ccctccctccccctc

SEQ ID NO: 71436 - DNA, 15 bp, Homo sapiens
tccctccctccccct

SEQ ID NO: 71437 - DNA, 15 bp, Homo sapiens
ctccctccctccccc

SEQ ID NO: 71438 - DNA, 15 bp, Homo sapiens
tctccctccctcccc

SEQ ID NO: 71439 - DNA, 15 bp, Homo sapiens
gtctccctccctccc

SEQ ID NO: 71440 - DNA, 15 bp, Homo sapiens
cgtctccctccctcc

SEQ ID NO: 71441 - DNA, 15 bp, Homo sapiens
tcgtctccctccctc

SEQ ID NO: 71442 - DNA, 15 bp, Homo sapiens
ctcgtctccctccct

SEQ ID NO: 71443 - DNA, 15 bp, Homo sapiens
actcgtctccctccc

SEQ ID NO: 71444 - DNA, 15 bp, Homo sapiens
cactcgtctccctcc

SEQ ID NO: 71445 - DNA, 15 bp, Homo sapiens
tcactcgtctccctc

SEQ ID NO: 71446 - DNA, 15 bp, Homo sapiens
ctcactcgtctccct

SEQ ID NO: 71447 - DNA, 15 bp, Homo sapiens
gctcactcgtctccc

SEQ ID NO: 71448 - DNA, 15 bp, Homo sapiens
agctcactcgtctcc

SEQ ID NO: 71449 - DNA, 15 bp, Homo sapiens
gagctcactcgtctc

SEQ ID NO: 71450 - DNA, 15 bp, Homo sapiens
agagctcactcgtct

SEQ ID NO: 71451 - DNA, 15 bp, Homo sapiens
gagagctcactcgtc

SEQ ID NO: 71452 - DNA, 15 bp, Homo sapiens
cgagagctcactcgt

SEQ ID NO: 71453 - DNA, 15 bp, Homo sapiens
ccgagagctcactcg

SEQ ID NO: 71454 - DNA, 15 bp, Homo sapiens
cccgagagctcactc

SEQ ID NO: 71455 - DNA, 15 bp, Homo sapiens
gcccgagagctcact

SEQ ID NO: 71456 - DNA, 15 bp, Homo sapiens
agcccgagagctcac

SEQ ID NO: 71457 - DNA, 15 bp, Homo sapiens
gagcccgagagctca

SEQ ID NO: 71458 - DNA, 15 bp, Homo sapiens
tgagcccgagagctc

SEQ ID NO: 71459 - DNA, 15 bp, Homo sapiens
ttgagcccgagagct

SEQ ID NO: 71460 - DNA, 15 bp, Homo sapiens
attgagcccgagagc

SEQ ID NO: 71461 - DNA, 15 bp, Homo sapiens
aattgagcccgagag

SEQ ID NO: 71462 - DNA, 15 bp, Homo sapiens
caattgagcccgaga

SEQ ID NO: 71463 - DNA, 15 bp, Homo sapiens
gcaattgagcccgag

SEQ ID NO: 71464 - DNA, 15 bp, Homo sapiens
agcaattgagcccga

SEQ ID NO: 71465 - DNA, 15 bp, Homo sapiens
gagcaattgagcccg

SEQ ID NO: 71466 - DNA, 15 bp, Homo sapiens
ggagcaattgagccc

SEQ ID NO: 71467 - DNA, 15 bp, Homo sapiens
aggagcaattgagcc

SEQ ID NO: 71468 - DNA, 15 bp, Homo sapiens
caggagcaattgagc

SEQ ID NO: 71469 - DNA, 15 bp, Homo sapiens
tcaggagcaattgag

SEQ ID NO: 71470 - DNA, 15 bp, Homo sapiens
ttcaggagcaattga

SEQ ID NO: 71471 - DNA, 15 bp, Homo sapiens
cttcaggagcaattg

SEQ ID NO: 71472 - DNA, 15 bp, Homo sapiens
tcttcaggagcaatt

SEQ ID NO: 71473 - DNA, 15 bp, Homo sapiens
ttcttcaggagcaat

SEQ ID NO: 71474 - DNA, 15 bp, Homo sapiens
tttcttcaggagcaa

SEQ ID NO: 71475 - DNA, 15 bp, Homo sapiens
atttcttcaggagca

SEQ ID NO: 71476 - DNA, 15 bp, Homo sapiens
tatttcttcaggagc

SEQ ID NO: 71477 - DNA, 15 bp, Homo sapiens
ttatttcttcaggag

SEQ ID NO: 71478 - DNA, 15 bp, Homo sapiens
tttatttcttcagga

SEQ ID NO: 71479 - DNA, 15 bp, Homo sapiens
ctttatttcttcagg

SEQ ID NO: 71480 - DNA, 15 bp, Homo sapiens
tctttatttcttcag

SEQ ID NO: 71481 - DNA, 15 bp, Homo sapiens
ttctttatttcttca

SEQ ID NO: 71482 - DNA, 15 bp, Homo sapiens
attctttatttcttc

SEQ ID NO: 71483 - DNA, 15 bp, Homo sapiens
aattctttatttctt

SEQ ID NO: 71484 - DNA, 15 bp, Homo sapiens
taattctttatttct

SEQ ID NO: 71485 - DNA, 15 bp, Homo sapiens
ttaattctttatttc

SEQ ID NO: 71486 - DNA, 15 bp, Homo sapiens
attaattctttattt

SEQ ID NO: 71487 - DNA, 15 bp, Homo sapiens
tattaattctttatt

SEQ ID NO: 71488 - DNA, 15 bp, Homo sapiens
ttattaattctttat

SEQ ID NO: 71489 - DNA, 15 bp, Homo sapiens
cttattaattcttta

SEQ ID NO: 71490 - DNA, 15 bp, Homo sapiens
acttattaattcttt

SEQ ID NO: 71491 - DNA, 15 bp, Homo sapiens
gacttattaattctt

SEQ ID NO: 71492 - DNA, 15 bp, Homo sapiens
tgacttattaattct

SEQ ID NO: 71493 - DNA, 15 bp, Homo sapiens
gtgacttattaattc

SEQ ID NO: 71494 - DNA, 15 bp, Homo sapiens
ggtgacttattaatt

SEQ ID NO: 71495 - DNA, 15 bp, Homo sapiens
aggtgacttattaat

SEQ ID NO: 71496 - DNA, 15 bp, Homo sapiens
aaggtgacttattaa

SEQ ID NO: 71497 - DNA, 15 bp, Homo sapiens
aaaggtgacttatta

SEQ ID NO: 71498 - DNA, 15 bp, Homo sapiens
aaaaggtgacttatt

SEQ ID NO: 71499 - DNA, 15 bp, Homo sapiens
aaaaaggtgacttat

SEQ ID NO: 71500 - DNA, 15 bp, Homo sapiens
aaaaaaggtgactta

SEQ ID NO: 71501 - DNA, 15 bp, Homo sapiens
gaaaaaaggtgactt

SEQ ID NO: 71502 - DNA, 15 bp, Homo sapiens
cgaaaaaaggtgact

SEQ ID NO: 71503 - DNA, 15 bp, Homo sapiens
gcgaaaaaaggtgac

SEQ ID NO: 71504 - DNA, 15 bp, Homo sapiens
ggcgaaaaaaggtga

SEQ ID NO: 71505 - DNA, 15 bp, Homo sapiens
aggcgaaaaaaggtg

SEQ ID NO: 71506 - DNA, 15 bp, Homo sapiens
gaggcgaaaaaaggt

SEQ ID NO: 71507 - DNA, 15 bp, Homo sapiens
agaggcgaaaaaagg

SEQ ID NO: 71508 - DNA, 15 bp, Homo sapiens
cagaggcgaaaaaag

SEQ ID NO: 71509 - DNA, 15 bp, Homo sapiens
acagaggcgaaaaaa

SEQ ID NO: 71510 - DNA, 15 bp, Homo sapiens
cacagaggcgaaaaa

SEQ ID NO: 71511 - DNA, 15 bp, Homo sapiens
ccacagaggcgaaaa

SEQ ID NO: 71512 - DNA, 15 bp, Homo sapiens
tccacagaggcgaaa

SEQ ID NO: 71513 - DNA, 15 bp, Homo sapiens
gtccacagaggcgaa

SEQ ID NO: 71514 - DNA, 15 bp, Homo sapiens
tgtccacagaggcga

SEQ ID NO: 71515 - DNA, 15 bp, Homo sapiens
gtgtccacagaggcg

SEQ ID NO: 71516 - DNA, 15 bp, Homo sapiens
ggtgtccacagaggc

SEQ ID NO: 71517 - DNA, 15 bp, Homo sapiens
gggtgtccacagagg

SEQ ID NO: 71518 - DNA, 15 bp, Homo sapiens
agggtgtccacagag

SEQ ID NO: 71519 - DNA, 15 bp, Homo sapiens
aagggtgtccacaga

SEQ ID NO: 71520 - DNA, 15 bp, Homo sapiens
aaagggtgtccacag

SEQ ID NO: 71521 - DNA, 15 bp, Homo sapiens
aaaagggtgtccaca

SEQ ID NO: 71522 - DNA, 15 bp, Homo sapiens
caaaagggtgtccac

SEQ ID NO: 71523 - DNA, 15 bp, Homo sapiens
tcaaaagggtgtcca

SEQ ID NO: 71524 - DNA, 15 bp, Homo sapiens
ttcaaaagggtgtcc

SEQ ID NO: 71525 - DNA, 15 bp, Homo sapiens
tttcaaaagggtgtc

SEQ ID NO: 71526 - DNA, 15 bp, Homo sapiens
atttcaaaagggtgt

SEQ ID NO: 71527 - DNA, 15 bp, Homo sapiens
aatttcaaaagggtg

SEQ ID NO: 71528 - DNA, 15 bp, Homo sapiens
aaatttcaaaagggt

SEQ ID NO: 71529 - DNA, 15 bp, Homo sapiens
aaaatttcaaaaggg

SEQ ID NO: 71530 - DNA, 15 bp, Homo sapiens
aaaaatttcaaaagg

SEQ ID NO: 71531 - DNA, 15 bp, Homo sapiens
aaaaaatttcaaaag

SEQ ID NO: 71532 - DNA, 15 bp, Homo sapiens
gaaaaaatttcaaaa

SEQ ID NO: 71533 - DNA, 15 bp, Homo sapiens
agaaaaaatttcaaa

SEQ ID NO: 71534 - DNA, 15 bp, Homo sapiens
aagaaaaaatttcaa

SEQ ID NO: 71535 - DNA, 15 bp, Homo sapiens
gaagaaaaaatttca

SEQ ID NO: 71536 - DNA, 15 bp, Homo sapiens
ggaagaaaaaatttc

SEQ ID NO: 71537 - DNA, 15 bp, Homo sapiens
tggaagaaaaaattt

SEQ ID NO: 71538 - DNA, 15 bp, Homo sapiens
ttggaagaaaaaatt

SEQ ID NO: 71539 - DNA, 15 bp, Homo sapiens
attggaagaaaaaat

SEQ ID NO: 71540 - DNA, 15 bp, Homo sapiens
aattggaagaaaaaa

SEQ ID NO: 71541 - DNA, 15 bp, Homo sapiens
caattggaagaaaaa

SEQ ID NO: 71542 - DNA, 15 bp, Homo sapiens
tcaattggaagaaaa

SEQ ID NO: 71543 - DNA, 15 bp, Homo sapiens
gtcaattggaagaaa

SEQ ID NO: 71544 - DNA, 15 bp, Homo sapiens
agtcaattggaagaa

SEQ ID NO: 71545 - DNA, 15 bp, Homo sapiens
aagtcaattggaaga

SEQ ID NO: 71546 - DNA, 15 bp, Homo sapiens
caagtcaattggaag

SEQ ID NO: 71547 - DNA, 15 bp, Homo sapiens
ccaagtcaattggaa

SEQ ID NO: 71548 - DNA, 15 bp, Homo sapiens
tccaagtcaattgga

SEQ ID NO: 71549 - DNA, 15 bp, Homo sapiens
atccaagtcaattgg

SEQ ID NO: 71550 - DNA, 15 bp, Homo sapiens
gatccaagtcaattg

SEQ ID NO: 71551 - DNA, 15 bp, Homo sapiens
agatccaagtcaatt

SEQ ID NO: 71552 - DNA, 15 bp, Homo sapiens
gagatccaagtcaat

SEQ ID NO: 71553 - DNA, 15 bp, Homo sapiens
ggagatccaagtcaa

SEQ ID NO: 71554 - DNA, 15 bp, Homo sapiens
aggagatccaagtca

SEQ ID NO: 71555 - DNA, 15 bp, Homo sapiens
gaggagatccaagtc

SEQ ID NO: 71556 - DNA, 15 bp, Homo sapiens
agaggagatccaagt

SEQ ID NO: 71557 - DNA, 15 bp, Homo sapiens
cagaggagatccaag

SEQ ID NO: 71558 - DNA, 15 bp, Homo sapiens
ccagaggagatccaa

SEQ ID NO: 71559 - DNA, 15 bp, Homo sapiens
tccagaggagatcca

SEQ ID NO: 71560 - DNA, 15 bp, Homo sapiens
atccagaggagatcc

SEQ ID NO: 71561 - DNA, 15 bp, Homo sapiens
aatccagaggagatc

SEQ ID NO: 71562 - DNA, 15 bp, Homo sapiens
aaatccagaggagat

SEQ ID NO: 71563 - DNA, 15 bp, Homo sapiens
aaaatccagaggaga

SEQ ID NO: 71564 - DNA, 15 bp, Homo sapiens
aaaaatccagaggag

SEQ ID NO: 71565 - DNA, 15 bp, Homo sapiens
aaaaaatccagagga

SEQ ID NO: 71566 - DNA, 15 bp, Homo sapiens
aaaaaaatccagagg

SEQ ID NO: 71567 - DNA, 15 bp, Homo sapiens
aaaaaaaatccagag

SEQ ID NO: 71568 - DNA, 15 bp, Homo sapiens
gaaaaaaaatccaga

SEQ ID NO: 71569 - DNA, 15 bp, Homo sapiens
ggaaaaaaaatccag

SEQ ID NO: 71570 - DNA, 15 bp, Homo sapiens
gggaaaaaaaatcca

SEQ ID NO: 71571 - DNA, 15 bp, Homo sapiens
agggaaaaaaaatcc

SEQ ID NO: 71572 - DNA, 15 bp, Homo sapiens
gagggaaaaaaaatc

SEQ ID NO: 71573 - DNA, 15 bp, Homo sapiens
agagggaaaaaaaat

SEQ ID NO: 71574 - DNA, 15 bp, Homo sapiens
aagagggaaaaaaaa

SEQ ID NO: 71575 - DNA, 15 bp, Homo sapiens
aaagagggaaaaaaa

SEQ ID NO: 71576 - DNA, 15 bp, Homo sapiens
gaaagagggaaaaaa

SEQ ID NO: 71577 - DNA, 15 bp, Homo sapiens
ggaaagagggaaaaa

SEQ ID NO: 71578 - DNA, 15 bp, Homo sapiens
gggaaagagggaaaa

SEQ ID NO: 71579 - DNA, 15 bp, Homo sapiens
ggggaaagagggaaa

SEQ ID NO: 71580 - DNA, 15 bp, Homo sapiens
gggggaaagagggaa

SEQ ID NO: 71581 - DNA, 15 bp, Homo sapiens
cgggggaaagaggga

SEQ ID NO: 71582 - DNA, 15 bp, Homo sapiens
acgggggaaagaggg

SEQ ID NO: 71583 - DNA, 15 bp, Homo sapiens
gacgggggaaagagg

SEQ ID NO: 71584 - DNA, 15 bp, Homo sapiens
cgacgggggaaagag

SEQ ID NO: 71585 - DNA, 15 bp, Homo sapiens
ccgacgggggaaaga

SEQ ID NO: 71586 - DNA, 15 bp, Homo sapiens
tccgacgggggaaag

SEQ ID NO: 71587 - DNA, 15 bp, Homo sapiens
gtccgacgggggaaa

SEQ ID NO: 71588 - DNA, 15 bp, Homo sapiens
agtccgacgggggaa

SEQ ID NO: 71589 - DNA, 15 bp, Homo sapiens
gagtccgacggggga

SEQ ID NO: 71590 - DNA, 15 bp, Homo sapiens
agagtccgacggggg

SEQ ID NO: 71591 - DNA, 15 bp, Homo sapiens
aagagtccgacgggg

SEQ ID NO: 71592 - DNA, 15 bp, Homo sapiens
taagagtccgacggg

SEQ ID NO: 71593 - DNA, 15 bp, Homo sapiens
ttaagagtccgacgg

SEQ ID NO: 71594 - DNA, 15 bp, Homo sapiens
tttaagagtccgacg

SEQ ID NO: 71595 - DNA, 15 bp, Homo sapiens
atttaagagtccgac

SEQ ID NO: 71596 - DNA, 15 bp, Homo sapiens
tatttaagagtccga

SEQ ID NO: 71597 - DNA, 15 bp, Homo sapiens
ttatttaagagtccg

SEQ ID NO: 71598 - DNA, 15 bp, Homo sapiens
tttatttaagagtcc

SEQ ID NO: 71599 - DNA, 15 bp, Homo sapiens
ttttatttaagagtc

SEQ ID NO: 71600 - DNA, 15 bp, Homo sapiens
cttttatttaagagt

SEQ ID NO: 71601 - DNA, 15 bp, Homo sapiens
acttttatttaagag

SEQ ID NO: 71602 - DNA, 15 bp, Homo sapiens
cacttttatttaaga

SEQ ID NO: 71603 - DNA, 15 bp, Homo sapiens
tcacttttatttaag

SEQ ID NO: 71604 - DNA, 15 bp, Homo sapiens
ctcacttttatttaa

SEQ ID NO: 71605 - DNA, 15 bp, Homo sapiens
gctcacttttattta

SEQ ID NO: 71606 - DNA, 15 bp, Homo sapiens
tgctcacttttattt

SEQ ID NO: 71607 - DNA, 15 bp, Homo sapiens
ttgctcacttttatt

SEQ ID NO: 71608 - DNA, 15 bp, Homo sapiens
cttgctcacttttat

SEQ ID NO: 71609 - DNA, 15 bp, Homo sapiens
acttgctcactttta

SEQ ID NO: 71610 - DNA, 15 bp, Homo sapiens
gacttgctcactttt

SEQ ID NO: 71611 - DNA, 15 bp, Homo sapiens
ggacttgctcacttt

SEQ ID NO: 71612 - DNA, 15 bp, Homo sapiens
tggacttgctcactt

SEQ ID NO: 71613 - DNA, 15 bp, Homo sapiens
ttggacttgctcact

SEQ ID NO: 71614 - DNA, 15 bp, Homo sapiens
tttggacttgctcac

SEQ ID NO: 71615 - DNA, 15 bp, Homo sapiens
ctttggacttgctca

SEQ ID NO: 71616 - DNA, 15 bp, Homo sapiens
gctttggacttgctc

SEQ ID NO: 71617 - DNA, 15 bp, Homo sapiens
cgctttggacttgct

SEQ ID NO: 71618 - DNA, 15 bp, Homo sapiens
acgctttggacttgc

SEQ ID NO: 71619 - DNA, 15 bp, Homo sapiens
cacgctttggacttg

SEQ ID NO: 71620 - DNA, 15 bp, Homo sapiens
ccacgctttggactt

SEQ ID NO: 71621 - DNA, 15 bp, Homo sapiens
accacgctttggact

SEQ ID NO: 71622 - DNA, 15 bp, Homo sapiens
gaccacgctttggac

SEQ ID NO: 71623 - DNA, 15 bp, Homo sapiens
ggaccacgctttgga

SEQ ID NO: 71624 - DNA, 15 bp, Homo sapiens
cggaccacgctttgg

SEQ ID NO: 71625 - DNA, 15 bp, Homo sapiens
ccggaccacgctttg

SEQ ID NO: 71626 - DNA, 15 bp, Homo sapiens
tccggaccacgcttt

SEQ ID NO: 71627 - DNA, 15 bp, Homo sapiens
ctccggaccacgctt

SEQ ID NO: 71628 - DNA, 15 bp, Homo sapiens
tctccggaccacgct

SEQ ID NO: 71629 - DNA, 15 bp, Homo sapiens
ctctccggaccacgc

SEQ ID NO: 71630 - DNA, 15 bp, Homo sapiens
gctctccggaccacg

SEQ ID NO: 71631 - DNA, 15 bp, Homo sapiens
cgctctccggaccac

SEQ ID NO: 71632 - DNA, 15 bp, Homo sapiens
acgctctccggacca

SEQ ID NO: 71633 - DNA, 15 bp, Homo sapiens
cacgctctccggacc

SEQ ID NO: 71634 - DNA, 15 bp, Homo sapiens
ccacgctctccggac

SEQ ID NO: 71635 - DNA, 15 bp, Homo sapiens
tccacgctctccgga

SEQ ID NO: 71636 - DNA, 15 bp, Homo sapiens
gtccacgctctccgg

SEQ ID NO: 71637 - DNA, 15 bp, Homo sapiens
tgtccacgctctccg

SEQ ID NO: 71638 - DNA, 15 bp, Homo sapiens
ttgtccacgctctcc

SEQ ID NO: 71639 - DNA, 15 bp, Homo sapiens
cttgtccacgctctc

SEQ ID NO: 71640 - DNA, 15 bp, Homo sapiens
ccttgtccacgctct

SEQ ID NO: 71641 - DNA, 15 bp, Homo sapiens
accttgtccacgctc

SEQ ID NO: 71642 - DNA, 15 bp, Homo sapiens
taccttgtccacgct

SEQ ID NO: 71643 - DNA, 15 bp, Homo sapiens
ttaccttgtccacgc

SEQ ID NO: 71644 - DNA, 15 bp, Homo sapiens
gttaccttgtccacg

SEQ ID NO: 71645 - DNA, 15 bp, Homo sapiens
ggttaccttgtccac

SEQ ID NO: 71646 - DNA, 15 bp, Homo sapiens
aggttaccttgtcca

SEQ ID NO: 71647 - DNA, 15 bp, Homo sapiens
caggttaccttgtcc

SEQ ID NO: 71648 - DNA, 15 bp, Homo sapiens
acaggttaccttgtc

SEQ ID NO: 71649 - DNA, 15 bp, Homo sapiens
aacaggttaccttgt

SEQ ID NO: 71650 - DNA, 15 bp, Homo sapiens
aaacaggttaccttg

SEQ ID NO: 71651 - DNA, 15 bp, Homo sapiens
aaaacaggttacctt

SEQ ID NO: 71652 - DNA, 15 bp, Homo sapiens
caaaacaggttacct

SEQ ID NO: 71653 - DNA, 15 bp, Homo sapiens
ccaaaacaggttacc

SEQ ID NO: 71654 - DNA, 15 bp, Homo sapiens
tccaaaacaggttac

SEQ ID NO: 71655 - DNA, 15 bp, Homo sapiens
atccaaaacaggtta

SEQ ID NO: 71656 - DNA, 15 bp, Homo sapiens
catccaaaacaggtt

SEQ ID NO: 71657 - DNA, 15 bp, Homo sapiens
acatccaaaacaggt

SEQ ID NO: 71658 - DNA, 15 bp, Homo sapiens
gacatccaaaacagg

SEQ ID NO: 71659 - DNA, 15 bp, Homo sapiens
ggacatccaaaacag

SEQ ID NO: 71660 - DNA, 15 bp, Homo sapiens
cggacatccaaaaca

SEQ ID NO: 71661 - DNA, 15 bp, Homo sapiens
ccggacatccaaaac

SEQ ID NO: 71662 - DNA, 15 bp, Homo sapiens
cccggacatccaaaa

SEQ ID NO: 71663 - DNA, 15 bp, Homo sapiens
tcccggacatccaaa

SEQ ID NO: 71664 - DNA, 15 bp, Homo sapiens
ctcccggacatccaa

SEQ ID NO: 71665 - DNA, 15 bp, Homo sapiens
tctcccggacatcca

SEQ ID NO: 71666 - DNA, 15 bp, Homo sapiens
ttctcccggacatcc

SEQ ID NO: 71667 - DNA, 15 bp, Homo sapiens
cttctcccggacatc

SEQ ID NO: 71668 - DNA, 15 bp, Homo sapiens
ccttctcccggacat

SEQ ID NO: 71669 - DNA, 15 bp, Homo sapiens
cccttctcccggaca

SEQ ID NO: 71670 - DNA, 15 bp, Homo sapiens
tcccttctcccggac

SEQ ID NO: 71671 - DNA, 15 bp, Homo sapiens
ctcccttctcccgga

SEQ ID NO: 71672 - DNA, 15 bp, Homo sapiens
actcccttctcccgg

SEQ ID NO: 71673 - DNA, 15 bp, Homo sapiens
gactcccttctcccg

SEQ ID NO: 71674 - DNA, 15 bp, Homo sapiens
ggactcccttctccc

SEQ ID NO: 71675 - DNA, 15 bp, Homo sapiens
cggactcccttctcc

SEQ ID NO: 71676 - DNA, 15 bp, Homo sapiens
ccggactcccttctc

SEQ ID NO: 71677 - DNA, 15 bp, Homo sapiens
gccggactcccttct

SEQ ID NO: 71678 - DNA, 15 bp, Homo sapiens
ggccggactcccttc

SEQ ID NO: 71679 - DNA, 15 bp, Homo sapiens
cggccggactccctt

SEQ ID NO: 71680 - DNA, 15 bp, Homo sapiens
tcggccggactccct

SEQ ID NO: 71681 - DNA, 15 bp, Homo sapiens
ttcggccggactccc

SEQ ID NO: 71682 - DNA, 15 bp, Homo sapiens
tttcggccggactcc

SEQ ID NO: 71683 - DNA, 15 bp, Homo sapiens
ctttcggccggactc

SEQ ID NO: 71684 - DNA, 15 bp, Homo sapiens
cctttcggccggact

SEQ ID NO: 71685 - DNA, 15 bp, Homo sapiens
ccctttcggccggac

SEQ ID NO: 71686 - DNA, 15 bp, Homo sapiens
gccctttcggccgga

SEQ ID NO: 71687 - DNA, 15 bp, Homo sapiens
ggccctttcggccgg

SEQ ID NO: 71688 - DNA, 15 bp, Homo sapiens
gggccctttcggccg

SEQ ID NO: 71689 - DNA, 15 bp, Homo sapiens
tgggccctttcggcc

SEQ ID NO: 71690 - DNA, 15 bp, Homo sapiens
ctgggccctttcggc

SEQ ID NO: 71691 - DNA, 15 bp, Homo sapiens
gctgggccctttcgg

SEQ ID NO: 71692 - DNA, 15 bp, Homo sapiens
ggctgggccctttcg

SEQ ID NO: 71693 - DNA, 15 bp, Homo sapiens
gggctgggccctttc

SEQ ID NO: 71694 - DNA, 15 bp, Homo sapiens
ggggctgggcccttt

SEQ ID NO: 71695 - DNA, 15 bp, Homo sapiens
aggggctgggccctt

SEQ ID NO: 71696 - DNA, 15 bp, Homo sapiens
gaggggctgggccct

SEQ ID NO: 71697 - DNA, 15 bp, Homo sapiens
cgaggggctgggccc

SEQ ID NO: 71698 - DNA, 15 bp, Homo sapiens
tcgaggggctgggcc

SEQ ID NO: 71699 - DNA, 15 bp, Homo sapiens
ctcgaggggctgggc

SEQ ID NO: 71700 - DNA, 15 bp, Homo sapiens
cctcgaggggctggg

SEQ ID NO: 71701 - DNA, 15 bp, Homo sapiens
gcctcgaggggctgg

SEQ ID NO: 71702 - DNA, 15 bp, Homo sapiens
agcctcgaggggctg

SEQ ID NO: 71703 - DNA, 15 bp, Homo sapiens
cagcctcgaggggct

SEQ ID NO: 71704 - DNA, 15 bp, Homo sapiens
gcagcctcgaggggc

SEQ ID NO: 71705 - DNA, 15 bp, Homo sapiens
agcagcctcgagggg

SEQ ID NO: 71706 - DNA, 15 bp, Homo sapiens
gagcagcctcgaggg

SEQ ID NO: 71707 - DNA, 15 bp, Homo sapiens
ggagcagcctcgagg

SEQ ID NO: 71708 - DNA, 15 bp, Homo sapiens
tggagcagcctcgag

SEQ ID NO: 71709 - DNA, 15 bp, Homo sapiens
ttggagcagcctcga

SEQ ID NO: 71710 - DNA, 15 bp, Homo sapiens
gttggagcagcctcg

SEQ ID NO: 71711 - DNA, 15 bp, Homo sapiens
agttggagcagcctc

SEQ ID NO: 71712 - DNA, 15 bp, Homo sapiens
cagttggagcagcct

SEQ ID NO: 71713 - DNA, 15 bp, Homo sapiens
ccagttggagcagcc

SEQ ID NO: 71714 - DNA, 15 bp, Homo sapiens
cccagttggagcagc

SEQ ID NO: 71715 - DNA, 15 bp, Homo sapiens
ccccagttggagcag

SEQ ID NO: 71716 - DNA, 15 bp, Homo sapiens
gccccagttggagca

SEQ ID NO: 71717 - DNA, 15 bp, Homo sapiens
cgccccagttggagc

SEQ ID NO: 71718 - DNA, 15 bp, Homo sapiens
gcgccccagttggag

SEQ ID NO: 71719 - DNA, 15 bp, Homo sapiens
cgcgccccagttgga

SEQ ID NO: 71720 - DNA, 15 bp, Homo sapiens
gcgcgccccagttgg

SEQ ID NO: 71721 - DNA, 15 bp, Homo sapiens
cgcgcgccccagttg

SEQ ID NO: 71722 - DNA, 15 bp, Homo sapiens
ccgcgcgccccagtt

SEQ ID NO: 71723 - DNA, 15 bp, Homo sapiens
gccgcgcgccccagt

SEQ ID NO: 71724 - DNA, 15 bp, Homo sapiens
cgccgcgcgccccag

SEQ ID NO: 71725 - DNA, 15 bp, Homo sapiens
ccgccgcgcgcccca

SEQ ID NO: 71726 - DNA, 15 bp, Homo sapiens
gccgccgcgcgcccc

SEQ ID NO: 71727 - DNA, 15 bp, Homo sapiens
ggccgccgcgcgccc

SEQ ID NO: 71728 - DNA, 15 bp, Homo sapiens
gggccgccgcgcgcc

SEQ ID NO: 71729 - DNA, 15 bp, Homo sapiens
tgggccgccgcgcgc

SEQ ID NO: 71730 - DNA, 15 bp, Homo sapiens
ctgggccgccgcgcg

SEQ ID NO: 71731 - DNA, 15 bp, Homo sapiens
cctgggccgccgcgc

SEQ ID NO: 71732 - DNA, 15 bp, Homo sapiens
tcctgggccgccgcg

SEQ ID NO: 71733 - DNA, 15 bp, Homo sapiens
ctcctgggccgccgc

SEQ ID NO: 71734 - DNA, 15 bp, Homo sapiens
cctcctgggccgccg

SEQ ID NO: 71735 - DNA, 15 bp, Homo sapiens
ccctcctgggccgcc

SEQ ID NO: 71736 - DNA, 15 bp, Homo sapiens
tccctcctgggccgc

SEQ ID NO: 71737 - DNA, 15 bp, Homo sapiens
ctccctcctgggccg

SEQ ID NO: 71738 - DNA, 15 bp, Homo sapiens
cctccctcctgggcc

SEQ ID NO: 71739 - DNA, 15 bp, Homo sapiens
gcctccctcctgggc

SEQ ID NO: 71740 - DNA, 15 bp, Homo sapiens
cgcctccctcctggg

SEQ ID NO: 71741 - DNA, 15 bp, Homo sapiens
ccgcctccctcctgg

SEQ ID NO: 71742 - DNA, 15 bp, Homo sapiens
cccgcctccctcctg

SEQ ID NO: 71743 - DNA, 15 bp, Homo sapiens
ccccgcctccctcct

SEQ ID NO: 71744 - DNA, 15 bp, Homo sapiens
tccccgcctccctcc

SEQ ID NO: 71745 - DNA, 15 bp, Homo sapiens
ctccccgcctccctc

SEQ ID NO: 71746 - DNA, 15 bp, Homo sapiens
cctccccgcctccct

SEQ ID NO: 71747 - DNA, 15 bp, Homo sapiens
acctccccgcctccc

SEQ ID NO: 71748 - DNA, 15 bp, Homo sapiens
gacctccccgcctcc

SEQ ID NO: 71749 - DNA, 15 bp, Homo sapiens
agacctccccgcctc

SEQ ID NO: 71750 - DNA, 15 bp, Homo sapiens
gagacctccccgcct

SEQ ID NO: 71751 - DNA, 15 bp, Homo sapiens
ggagacctccccgcc

SEQ ID NO: 71752 - DNA, 15 bp, Homo sapiens
cggagacctccccgc

SEQ ID NO: 71753 - DNA, 15 bp, Homo sapiens
ccggagacctccccg

SEQ ID NO: 71754 - DNA, 15 bp, Homo sapiens
cccggagacctcccc

SEQ ID NO: 71755 - DNA, 15 bp, Homo sapiens
acccggagacctccc

SEQ ID NO: 71756 - DNA, 15 bp, Homo sapiens
aacccggagacctcc

SEQ ID NO: 71757 - DNA, 15 bp, Homo sapiens
caacccggagacctc

SEQ ID NO: 71758 - DNA, 15 bp, Homo sapiens
ccaacccggagacct

SEQ ID NO: 71759 - DNA, 15 bp, Homo sapiens
cccaacccggagacc

SEQ ID NO: 71760 - DNA, 15 bp, Homo sapiens
gcccaacccggagac

SEQ ID NO: 71761 - DNA, 15 bp, Homo sapiens
ggcccaacccggaga

SEQ ID NO: 71762 - DNA, 15 bp, Homo sapiens
cggcccaacccggag

SEQ ID NO: 71763 - DNA, 15 bp, Homo sapiens
ccggcccaacccgga

SEQ ID NO: 71764 - DNA, 15 bp, Homo sapiens
cccggcccaacccgg

SEQ ID NO: 71765 - DNA, 15 bp, Homo sapiens
ccccggcccaacccg

SEQ ID NO: 71766 - DNA, 15 bp, Homo sapiens
tccccggcccaaccc

SEQ ID NO: 71767 - DNA, 15 bp, Homo sapiens
ttccccggcccaacc

SEQ ID NO: 71768 - DNA, 15 bp, Homo sapiens
gttccccggcccaac

SEQ ID NO: 71769 - DNA, 15 bp, Homo sapiens
cgttccccggcccaa

SEQ ID NO: 71770 - DNA, 15 bp, Homo sapiens
gcgttccccggccca

SEQ ID NO: 71771 - DNA, 15 bp, Homo sapiens
ggcgttccccggccc

SEQ ID NO: 71772 - DNA, 15 bp, Homo sapiens
cggcgttccccggcc

SEQ ID NO: 71773 - DNA, 15 bp, Homo sapiens
ccggcgttccccggc

SEQ ID NO: 71774 - DNA, 15 bp, Homo sapiens
gccggcgttccccgg

SEQ ID NO: 71775 - DNA, 15 bp, Homo sapiens
ggccggcgttccccg

SEQ ID NO: 71776 - DNA, 15 bp, Homo sapiens
aggccggcgttcccc

SEQ ID NO: 71777 - DNA, 15 bp, Homo sapiens
gaggccggcgttccc

SEQ ID NO: 71778 - DNA, 15 bp, Homo sapiens
ggaggccggcgttcc

SEQ ID NO: 71779 - DNA, 15 bp, Homo sapiens
tggaggccggcgttc

SEQ ID NO: 71780 - DNA, 15 bp, Homo sapiens
ctggaggccggcgtt

SEQ ID NO: 71781 - DNA, 15 bp, Homo sapiens
cctggaggccggcgt

SEQ ID NO: 71782 - DNA, 15 bp, Homo sapiens
gcctggaggccggcg

SEQ ID NO: 71783 - DNA, 15 bp, Homo sapiens
agcctggaggccggc

SEQ ID NO: 71784 - DNA, 15 bp, Homo sapiens
cagcctggaggccgg

SEQ ID NO: 71785 - DNA, 15 bp, Homo sapiens
ccagcctggaggccg

SEQ ID NO: 71786 - DNA, 15 bp, Homo sapiens
cccagcctggaggcc

SEQ ID NO: 71787 - DNA, 15 bp, Homo sapiens
acccagcctggaggc

SEQ ID NO: 71788 - DNA, 15 bp, Homo sapiens
tacccagcctggagg

SEQ ID NO: 71789 - DNA, 15 bp, Homo sapiens
ctacccagcctggag

SEQ ID NO: 71790 - DNA, 15 bp, Homo sapiens
cctacccagcctgga

SEQ ID NO: 71791 - DNA, 15 bp, Homo sapiens
ccctacccagcctgg

SEQ ID NO: 71792 - DNA, 15 bp, Homo sapiens
tccctacccagcctg

SEQ ID NO: 71793 - DNA, 15 bp, Homo sapiens
ctccctacccagcct

SEQ ID NO: 71794 - DNA, 15 bp, Homo sapiens
cctccctacccagcc

SEQ ID NO: 71795 - DNA, 15 bp, Homo sapiens
tcctccctacccagc

SEQ ID NO: 71796 - DNA, 15 bp, Homo sapiens
gtcctccctacccag

SEQ ID NO: 71797 - DNA, 15 bp, Homo sapiens
cgtcctccctaccca

SEQ ID NO: 71798 - DNA, 15 bp, Homo sapiens
ccgtcctccctaccc

SEQ ID NO: 71799 - DNA, 15 bp, Homo sapiens
accgtcctccctacc

SEQ ID NO: 71800 - DNA, 15 bp, Homo sapiens
gaccgtcctccctac

SEQ ID NO: 71801 - DNA, 15 bp, Homo sapiens
ggaccgtcctcccta

SEQ ID NO: 71802 - DNA, 15 bp, Homo sapiens
tggaccgtcctccct

SEQ ID NO: 71803 - DNA, 15 bp, Homo sapiens
ctggaccgtcctccc

SEQ ID NO: 71804 - DNA, 15 bp, Homo sapiens
tctggaccgtcctcc

SEQ ID NO: 71805 - DNA, 15 bp, Homo sapiens
ctctggaccgtcctc

SEQ ID NO: 71806 - DNA, 15 bp, Homo sapiens
gctctggaccgtcct

SEQ ID NO: 71807 - DNA, 15 bp, Homo sapiens
cgctctggaccgtcc

SEQ ID NO: 71808 - DNA, 15 bp, Homo sapiens
gcgctctggaccgtc

SEQ ID NO: 71809 - DNA, 15 bp, Homo sapiens
cgcgctctggaccgt

SEQ ID NO: 71810 - DNA, 15 bp, Homo sapiens
ccgcgctctggaccg

SEQ ID NO: 71811 - DNA, 15 bp, Homo sapiens
cccgcgctctggacc

SEQ ID NO: 71812 - DNA, 15 bp, Homo sapiens
gcccgcgctctggac

SEQ ID NO: 71813 - DNA, 15 bp, Homo sapiens
ggcccgcgctctgga

SEQ ID NO: 71814 - DNA, 15 bp, Homo sapiens
aggcccgcgctctgg

SEQ ID NO: 71815 - DNA, 15 bp, Homo sapiens
gaggcccgcgctctg

SEQ ID NO: 71816 - DNA, 15 bp, Homo sapiens
ggaggcccgcgctct

SEQ ID NO: 71817 - DNA, 15 bp, Homo sapiens
cggaggcccgcgctc

SEQ ID NO: 71818 - DNA, 15 bp, Homo sapiens
ccggaggcccgcgct

SEQ ID NO: 71819 - DNA, 15 bp, Homo sapiens
cccggaggcccgcgc

SEQ ID NO: 71820 - DNA, 15 bp, Homo sapiens
acccggaggcccgcg

SEQ ID NO: 71821 - DNA, 15 bp, Homo sapiens
gacccggaggcccgc

SEQ ID NO: 71822 - DNA, 15 bp, Homo sapiens
agacccggaggcccg

SEQ ID NO: 71823 - DNA, 15 bp, Homo sapiens
gagacccggaggccc

SEQ ID NO: 71824 - DNA, 15 bp, Homo sapiens
tgagacccggaggcc

SEQ ID NO: 71825 - DNA, 15 bp, Homo sapiens
gtgagacccggaggc

SEQ ID NO: 71826 - DNA, 15 bp, Homo sapiens
ggtgagacccggagg

SEQ ID NO: 71827 - DNA, 15 bp, Homo sapiens
gggtgagacccggag

SEQ ID NO: 71828 - DNA, 15 bp, Homo sapiens
ggggtgagacccgga

SEQ ID NO: 71829 - DNA, 15 bp, Homo sapiens
cggggtgagacccgg

SEQ ID NO: 71830 - DNA, 15 bp, Homo sapiens
ccggggtgagacccg

SEQ ID NO: 71831 - DNA, 15 bp, Homo sapiens
cccggggtgagaccc

SEQ ID NO: 71832 - DNA, 15 bp, Homo sapiens
tcccggggtgagacc

SEQ ID NO: 71833 - DNA, 15 bp, Homo sapiens
ttcccggggtgagac

SEQ ID NO: 71834 - DNA, 15 bp, Homo sapiens
tttcccggggtgaga

SEQ ID NO: 71835 - DNA, 15 bp, Homo sapiens
ttttcccggggtgag

SEQ ID NO: 71836 - DNA, 15 bp, Homo sapiens
cttttcccggggtga

SEQ ID NO: 71837 - DNA, 15 bp, Homo sapiens
acttttcccggggtg

SEQ ID NO: 71838 - DNA, 15 bp, Homo sapiens
gacttttcccggggt

SEQ ID NO: 71839 - DNA, 15 bp, Homo sapiens
agacttttcccgggg

SEQ ID NO: 71840 - DNA, 15 bp, Homo sapiens
cagacttttcccggg

SEQ ID NO: 71841 - DNA, 15 bp, Homo sapiens
ccagacttttcccgg

SEQ ID NO: 71842 - DNA, 15 bp, Homo sapiens
cccagacttttcccg

SEQ ID NO: 71843 - DNA, 15 bp, Homo sapiens
acccagacttttccc

SEQ ID NO: 71844 - DNA, 15 bp, Homo sapiens
gacccagacttttcc

SEQ ID NO: 71845 - DNA, 15 bp, Homo sapiens
agacccagacttttc

SEQ ID NO: 71846 - DNA, 15 bp, Homo sapiens
cagacccagactttt

SEQ ID NO: 71847 - DNA, 15 bp, Homo sapiens
gcagacccagacttt

SEQ ID NO: 71848 - DNA, 15 bp, Homo sapiens
agcagacccagactt

SEQ ID NO: 71849 - DNA, 15 bp, Homo sapiens
gagcagacccagact

SEQ ID NO: 71850 - DNA, 15 bp, Homo sapiens
agagcagacccagac

SEQ ID NO: 71851 - DNA, 15 bp, Homo sapiens
cagagcagacccaga

SEQ ID NO: 71852 - DNA, 15 bp, Homo sapiens
gcagagcagacccag

SEQ ID NO: 71853 - DNA, 15 bp, Homo sapiens
cgcagagcagaccca

SEQ ID NO: 71854 - DNA, 15 bp, Homo sapiens
gcgcagagcagaccc

SEQ ID NO: 71855 - DNA, 15 bp, Homo sapiens
agcgcagagcagacc

SEQ ID NO: 71856 - DNA, 15 bp, Homo sapiens
cagcgcagagcagac

SEQ ID NO: 71857 - DNA, 15 bp, Homo sapiens
acagcgcagagcaga

SEQ ID NO: 71858 - DNA, 15 bp, Homo sapiens
aacagcgcagagcag

SEQ ID NO: 71859 - DNA, 15 bp, Homo sapiens
caacagcgcagagca

SEQ ID NO: 71860 - DNA, 15 bp, Homo sapiens
gcaacagcgcagagc

SEQ ID NO: 71861 - DNA, 15 bp, Homo sapiens
cgcaacagcgcagag

SEQ ID NO: 71862 - DNA, 15 bp, Homo sapiens
acgcaacagcgcaga

SEQ ID NO: 71863 - DNA, 15 bp, Homo sapiens
cacgcaacagcgcag

SEQ ID NO: 71864 - DNA, 15 bp, Homo sapiens
gcacgcaacagcgca

SEQ ID NO: 71865 - DNA, 15 bp, Homo sapiens
agcacgcaacagcgc

SEQ ID NO: 71866 - DNA, 15 bp, Homo sapiens
cagcacgcaacagcg

SEQ ID NO: 71867 - DNA, 15 bp, Homo sapiens
gcagcacgcaacagc

SEQ ID NO: 71868 - DNA, 15 bp, Homo sapiens
cgcagcacgcaacag

SEQ ID NO: 71869 - DNA, 15 bp, Homo sapiens
gcgcagcacgcaaca

SEQ ID NO: 71870 - DNA, 15 bp, Homo sapiens
agcgcagcacgcaac

SEQ ID NO: 71871 - DNA, 15 bp, Homo sapiens
gagcgcagcacgcaa

SEQ ID NO: 71872 - DNA, 15 bp, Homo sapiens
ggagcgcagcacgca

SEQ ID NO: 71873 - DNA, 15 bp, Homo sapiens
aggagcgcagcacgc

SEQ ID NO: 71874 - DNA, 15 bp, Homo sapiens
caggagcgcagcacg

SEQ ID NO: 71875 - DNA, 15 bp, Homo sapiens
ccaggagcgcagcac

SEQ ID NO: 71876 - DNA, 15 bp, Homo sapiens
cccaggagcgcagca

SEQ ID NO: 71877 - DNA, 15 bp, Homo sapiens
tcccaggagcgcagc

SEQ ID NO: 71878 - DNA, 15 bp, Homo sapiens
gtcccaggagcgcag

SEQ ID NO: 71879 - DNA, 15 bp, Homo sapiens
ggtcccaggagcgca

SEQ ID NO: 71880 - DNA, 15 bp, Homo sapiens
aggtcccaggagcgc

SEQ ID NO: 71881 - DNA, 15 bp, Homo sapiens
caggtcccaggagcg

SEQ ID NO: 71882 - DNA, 15 bp, Homo sapiens
gcaggtcccaggagc

SEQ ID NO: 71883 - DNA, 15 bp, Homo sapiens
agcaggtcccaggag

SEQ ID NO: 71884 - DNA, 15 bp, Homo sapiens
cagcaggtcccagga

SEQ ID NO: 71885 - DNA, 15 bp, Homo sapiens
tcagcaggtcccagg

SEQ ID NO: 71886 - DNA, 15 bp, Homo sapiens
gtcagcaggtcccag

SEQ ID NO: 71887 - DNA, 15 bp, Homo sapiens
agtcagcaggtccca

SEQ ID NO: 71888 - DNA, 15 bp, Homo sapiens
cagtcagcaggtccc

SEQ ID NO: 71889 - DNA, 15 bp, Homo sapiens
acagtcagcaggtcc

SEQ ID NO: 71890 - DNA, 15 bp, Homo sapiens
gacagtcagcaggtc

SEQ ID NO: 71891 - DNA, 15 bp, Homo sapiens
ggacagtcagcaggt

SEQ ID NO: 71892 - DNA, 15 bp, Homo sapiens
aggacagtcagcagg

SEQ ID NO: 71893 - DNA, 15 bp, Homo sapiens
taggacagtcagcag

SEQ ID NO: 71894 - DNA, 15 bp, Homo sapiens
ctaggacagtcagca

SEQ ID NO: 71895 - DNA, 15 bp, Homo sapiens
tctaggacagtcagc

SEQ ID NO: 71896 - DNA, 15 bp, Homo sapiens
ctctaggacagtcag

SEQ ID NO: 71897 - DNA, 15 bp, Homo sapiens
cctctaggacagtca

SEQ ID NO: 71898 - DNA, 15 bp, Homo sapiens
ccctctaggacagtc

SEQ ID NO: 71899 - DNA, 15 bp, Homo sapiens
tccctctaggacagt

SEQ ID NO: 71900 - DNA, 15 bp, Homo sapiens
ttccctctaggacag

SEQ ID NO: 71901 - DNA, 15 bp, Homo sapiens
gttccctctaggaca

SEQ ID NO: 71902 - DNA, 15 bp, Homo sapiens
cgttccctctaggac

SEQ ID NO: 71903 - DNA, 15 bp, Homo sapiens
acgttccctctagga

SEQ ID NO: 71904 - DNA, 15 bp, Homo sapiens
gacgttccctctagg

SEQ ID NO: 71905 - DNA, 15 bp, Homo sapiens
ggacgttccctctag

SEQ ID NO: 71906 - DNA, 15 bp, Homo sapiens
gggacgttccctcta

SEQ ID NO: 71907 - DNA, 15 bp, Homo sapiens
cgggacgttccctct

SEQ ID NO: 71908 - DNA, 15 bp, Homo sapiens
gcgggacgttccctc

SEQ ID NO: 71909 - DNA, 15 bp, Homo sapiens
cgcgggacgttccct

SEQ ID NO: 71910 - DNA, 15 bp, Homo sapiens
ccgcgggacgttccc

SEQ ID NO: 71911 - DNA, 15 bp, Homo sapiens
accgcgggacgttcc

SEQ ID NO: 71912 - DNA, 15 bp, Homo sapiens
taccgcgggacgttc

SEQ ID NO: 71913 - DNA, 15 bp, Homo sapiens
ctaccgcgggacgtt

SEQ ID NO: 71914 - DNA, 15 bp, Homo sapiens
actaccgcgggacgt

SEQ ID NO: 71915 - DNA, 15 bp, Homo sapiens
cactaccgcgggacg

SEQ ID NO: 71916 - DNA, 15 bp, Homo sapiens
acactaccgcgggac

SEQ ID NO: 71917 - DNA, 15 bp, Homo sapiens
gacactaccgcggga

SEQ ID NO: 71918 - DNA, 15 bp, Homo sapiens
tgacactaccgcggg

SEQ ID NO: 71919 - DNA, 15 bp, Homo sapiens
ctgacactaccgcgg

SEQ ID NO: 71920 - DNA, 15 bp, Homo sapiens
actgacactaccgcg

SEQ ID NO: 71921 - DNA, 15 bp, Homo sapiens
aactgacactaccgc

SEQ ID NO: 71922 - DNA, 15 bp, Homo sapiens
gaactgacactaccg

SEQ ID NO: 71923 - DNA, 15 bp, Homo sapiens
ggaactgacactacc

SEQ ID NO: 71924 - DNA, 15 bp, Homo sapiens
gggaactgacactac

SEQ ID NO: 71925 - DNA, 15 bp, Homo sapiens
agggaactgacacta

SEQ ID NO: 71926 - DNA, 15 bp, Homo sapiens
cagggaactgacact

SEQ ID NO: 71927 - DNA, 15 bp, Homo sapiens
ccagggaactgacac

SEQ ID NO: 71928 - DNA, 15 bp, Homo sapiens
cccagggaactgaca

SEQ ID NO: 71929 - DNA, 15 bp, Homo sapiens
ccccagggaactgac

SEQ ID NO: 71930 - DNA, 15 bp, Homo sapiens
tccccagggaactga

SEQ ID NO: 71931 - DNA, 15 bp, Homo sapiens
gtccccagggaactg

SEQ ID NO: 71932 - DNA, 15 bp, Homo sapiens
ggtccccagggaact

SEQ ID NO: 71933 - DNA, 15 bp, Homo sapiens
tggtccccagggaac

SEQ ID NO: 71934 - DNA, 15 bp, Homo sapiens
ctggtccccagggaa

SEQ ID NO: 71935 - DNA, 15 bp, Homo sapiens
cctggtccccaggga

SEQ ID NO: 71936 - DNA, 15 bp, Homo sapiens
tcctggtccccaggg

SEQ ID NO: 71937 - DNA, 15 bp, Homo sapiens
ttcctggtccccagg

SEQ ID NO: 71938 - DNA, 15 bp, Homo sapiens
cttcctggtccccag

SEQ ID NO: 71939 - DNA, 15 bp, Homo sapiens
ccttcctggtcccca

SEQ ID NO: 71940 - DNA, 15 bp, Homo sapiens
cccttcctggtcccc

SEQ ID NO: 71941 - DNA, 15 bp, Homo sapiens
gcccttcctggtccc

SEQ ID NO: 71942 - DNA, 15 bp, Homo sapiens
cgcccttcctggtcc

SEQ ID NO: 71943 - DNA, 15 bp, Homo sapiens
tcgcccttcctggtc

SEQ ID NO: 71944 - DNA, 15 bp, Homo sapiens
gtcgcccttcctggt

SEQ ID NO: 71945 - DNA, 15 bp, Homo sapiens
agtcgcccttcctgg

SEQ ID NO: 71946 - DNA, 15 bp, Homo sapiens
gagtcgcccttcctg

SEQ ID NO: 71947 - DNA, 15 bp, Homo sapiens
agagtcgcccttcct

SEQ ID NO: 71948 - DNA, 15 bp, Homo sapiens
aagagtcgcccttcc

SEQ ID NO: 71949 - DNA, 15 bp, Homo sapiens
caagagtcgcccttc

SEQ ID NO: 71950 - DNA, 15 bp, Homo sapiens
gcaagagtcgccctt

SEQ ID NO: 71951 - DNA, 15 bp, Homo sapiens
ggcaagagtcgccct

SEQ ID NO: 71952 - DNA, 15 bp, Homo sapiens
aggcaagagtcgccc

SEQ ID NO: 71953 - DNA, 15 bp, Homo sapiens
caggcaagagtcgcc

SEQ ID NO: 71954 - DNA, 15 bp, Homo sapiens
ccaggcaagagtcgc

SEQ ID NO: 71955 - DNA, 15 bp, Homo sapiens
cccaggcaagagtcg

SEQ ID NO: 71956 - DNA, 15 bp, Homo sapiens
tcccaggcaagagtc

SEQ ID NO: 71957 - DNA, 15 bp, Homo sapiens
ctcccaggcaagagt

SEQ ID NO: 71958 - DNA, 15 bp, Homo sapiens
actcccaggcaagag

SEQ ID NO: 71959 - DNA, 15 bp, Homo sapiens
gactcccaggcaaga

SEQ ID NO: 71960 - DNA, 15 bp, Homo sapiens
tgactcccaggcaag

SEQ ID NO: 71961 - DNA, 15 bp, Homo sapiens
ctgactcccaggcaa

SEQ ID NO: 71962 - DNA, 15 bp, Homo sapiens
actgactcccaggca

SEQ ID NO: 71963 - DNA, 15 bp, Homo sapiens
cactgactcccaggc

SEQ ID NO: 71964 - DNA, 15 bp, Homo sapiens
gcactgactcccagg

SEQ ID NO: 71965 - DNA, 15 bp, Homo sapiens
agcactgactcccag

SEQ ID NO: 71966 - DNA, 15 bp, Homo sapiens
aagcactgactccca

SEQ ID NO: 71967 - DNA, 15 bp, Homo sapiens
caagcactgactccc

SEQ ID NO: 71968 - DNA, 15 bp, Homo sapiens
ccaagcactgactcc

SEQ ID NO: 71969 - DNA, 15 bp, Homo sapiens
cccaagcactgactc

SEQ ID NO: 71970 - DNA, 15 bp, Homo sapiens
gcccaagcactgact

SEQ ID NO: 71971 - DNA, 15 bp, Homo sapiens
ggcccaagcactgac

SEQ ID NO: 71972 - DNA, 15 bp, Homo sapiens
cggcccaagcactga

SEQ ID NO: 71973 - DNA, 15 bp, Homo sapiens
acggcccaagcactg

SEQ ID NO: 71974 - DNA, 15 bp, Homo sapiens
gacggcccaagcact

SEQ ID NO: 71975 - DNA, 15 bp, Homo sapiens
cgacggcccaagcac

SEQ ID NO: 71976 - DNA, 15 bp, Homo sapiens
ccgacggcccaagca

SEQ ID NO: 71977 - DNA, 15 bp, Homo sapiens
cccgacggcccaagc

SEQ ID NO: 71978 - DNA, 15 bp, Homo sapiens
acccgacggcccaag

SEQ ID NO: 71979 - DNA, 15 bp, Homo sapiens
gacccgacggcccaa

SEQ ID NO: 71980 - DNA, 15 bp, Homo sapiens
ggacccgacggccca

SEQ ID NO: 71981 - DNA, 15 bp, Homo sapiens
cggacccgacggccc

SEQ ID NO: 71982 - DNA, 15 bp, Homo sapiens
ccggacccgacggcc

SEQ ID NO: 71983 - DNA, 15 bp, Homo sapiens
cccggacccgacggc

SEQ ID NO: 71984 - DNA, 15 bp, Homo sapiens
acccggacccgacgg

SEQ ID NO: 71985 - DNA, 15 bp, Homo sapiens
tacccggacccgacg

SEQ ID NO: 71986 - DNA, 15 bp, Homo sapiens
ttacccggacccgac

SEQ ID NO: 71987 - DNA, 15 bp, Homo sapiens
cttacccggacccga

SEQ ID NO: 71988 - DNA, 15 bp, Homo sapiens
gcttacccggacccg

SEQ ID NO: 71989 - DNA, 15 bp, Homo sapiens
cgcttacccggaccc

SEQ ID NO: 71990 - DNA, 15 bp, Homo sapiens
gcgcttacccggacc

SEQ ID NO: 71991 - DNA, 15 bp, Homo sapiens
agcgcttacccggac

SEQ ID NO: 71992 - DNA, 15 bp, Homo sapiens
cagcgcttacccgga

SEQ ID NO: 71993 - DNA, 15 bp, Homo sapiens
ccagcgcttacccgg

SEQ ID NO: 71994 - DNA, 15 bp, Homo sapiens
cccagcgcttacccg

SEQ ID NO: 71995 - DNA, 15 bp, Homo sapiens
ccccagcgcttaccc

SEQ ID NO: 71996 - DNA, 15 bp, Homo sapiens
cccccagcgcttacc

SEQ ID NO: 71997 - DNA, 15 bp, Homo sapiens
acccccagcgcttac

SEQ ID NO: 71998 - DNA, 15 bp, Homo sapiens
aacccccagcgctta

SEQ ID NO: 71999 - DNA, 15 bp, Homo sapiens
aaacccccagcgctt

SEQ ID NO: 72000 - DNA, 15 bp, Homo sapiens
caaacccccagcgct

SEQ ID NO: 72001 - DNA, 15 bp, Homo sapiens
ccaaacccccagcgc

SEQ ID NO: 72002 - DNA, 15 bp, Homo sapiens
gccaaacccccagcg

SEQ ID NO: 72003 - DNA, 15 bp, Homo sapiens
agccaaacccccagc

SEQ ID NO: 72004 - DNA, 15 bp, Homo sapiens
gagccaaacccccag

SEQ ID NO: 72005 - DNA, 15 bp, Homo sapiens
cgagccaaaccccca

SEQ ID NO: 72006 - DNA, 15 bp, Homo sapiens
tcgagccaaaccccc

SEQ ID NO: 72007 - DNA, 15 bp, Homo sapiens
ctcgagccaaacccc

SEQ ID NO: 72008 - DNA, 15 bp, Homo sapiens
tctcgagccaaaccc

SEQ ID NO: 72009 - DNA, 15 bp, Homo sapiens
ttctcgagccaaacc

SEQ ID NO: 72010 - DNA, 15 bp, Homo sapiens
cttctcgagccaaac

SEQ ID NO: 72011 - DNA, 15 bp, Homo sapiens
tcttctcgagccaaa

SEQ ID NO: 72012 - DNA, 15 bp, Homo sapiens
atcttctcgagccaa

SEQ ID NO: 72013 - DNA, 15 bp, Homo sapiens
catcttctcgagcca

SEQ ID NO: 72014 - DNA, 15 bp, Homo sapiens
gcatcttctcgagcc

SEQ ID NO: 72015 - DNA, 15 bp, Homo sapiens
cgcatcttctcgagc

SEQ ID NO: 72016 - DNA, 15 bp, Homo sapiens
ccgcatcttctcgag

SEQ ID NO: 72017 - DNA, 15 bp, Homo sapiens
tccgcatcttctcga

SEQ ID NO: 72018 - DNA, 15 bp, Homo sapiens
atccgcatcttctcg

SEQ ID NO: 72019 - DNA, 15 bp, Homo sapiens
tatccgcatcttctc

SEQ ID NO: 72020 - DNA, 15 bp, Homo sapiens
ctatccgcatcttct

SEQ ID NO: 72021 - DNA, 15 bp, Homo sapiens
cctatccgcatcttc

SEQ ID NO: 72022 - DNA, 15 bp, Homo sapiens
acctatccgcatctt

SEQ ID NO: 72023 - DNA, 15 bp, Homo sapiens
cacctatccgcatct

SEQ ID NO: 72024 - DNA, 15 bp, Homo sapiens
ccacctatccgcatc

SEQ ID NO: 72025 - DNA, 15 bp, Homo sapiens
gccacctatccgcat

SEQ ID NO: 72026 - DNA, 15 bp, Homo sapiens
ggccacctatccgca

SEQ ID NO: 72027 - DNA, 15 bp, Homo sapiens
aggccacctatccgc

SEQ ID NO: 72028 - DNA, 15 bp, Homo sapiens
taggccacctatccg

SEQ ID NO: 72029 - DNA, 15 bp, Homo sapiens
ctaggccacctatcc

SEQ ID NO: 72030 - DNA, 15 bp, Homo sapiens
cctaggccacctatc

SEQ ID NO: 72031 - DNA, 15 bp, Homo sapiens
ccctaggccacctat

SEQ ID NO: 72032 - DNA, 15 bp, Homo sapiens
gccctaggccaccta

SEQ ID NO: 72033 - DNA, 15 bp, Homo sapiens
cgccctaggccacct

SEQ ID NO: 72034 - DNA, 15 bp, Homo sapiens
gcgccctaggccacc

SEQ ID NO: 72035 - DNA, 15 bp, Homo sapiens
ggcgccctaggccac

SEQ ID NO: 72036 - DNA, 15 bp, Homo sapiens
cggcgccctaggcca

SEQ ID NO: 72037 - DNA, 15 bp, Homo sapiens
gcggcgccctaggcc

SEQ ID NO: 72038 - DNA, 15 bp, Homo sapiens
cgcggcgccctaggc

SEQ ID NO: 72039 - DNA, 15 bp, Homo sapiens
ccgcggcgccctagg

SEQ ID NO: 72040 - DNA, 15 bp, Homo sapiens
tccgcggcgccctag

SEQ ID NO: 72041 - DNA, 15 bp, Homo sapiens
atccgcggcgcccta

SEQ ID NO: 72042 - DNA, 15 bp, Homo sapiens
gatccgcggcgccct

SEQ ID NO: 72043 - DNA, 15 bp, Homo sapiens
agatccgcggcgccc

SEQ ID NO: 72044 - DNA, 15 bp, Homo sapiens
gagatccgcggcgcc

SEQ ID NO: 72045 - DNA, 15 bp, Homo sapiens
ggagatccgcggcgc

SEQ ID NO: 72046 - DNA, 15 bp, Homo sapiens
cggagatccgcggcg

SEQ ID NO: 72047 - DNA, 15 bp, Homo sapiens
gcggagatccgcggc

SEQ ID NO: 72048 - DNA, 15 bp, Homo sapiens
ggcggagatccgcgg

SEQ ID NO: 72049 - DNA, 15 bp, Homo sapiens
gggcggagatccgcg

SEQ ID NO: 72050 - DNA, 15 bp, Homo sapiens
agggcggagatccgc

SEQ ID NO: 72051 - DNA, 15 bp, Homo sapiens
gagggcggagatccg

SEQ ID NO: 72052 - DNA, 15 bp, Homo sapiens
agagggcggagatcc

SEQ ID NO: 72053 - DNA, 15 bp, Homo sapiens
cagagggcggagatc

SEQ ID NO: 72054 - DNA, 15 bp, Homo sapiens
gcagagggcggagat

SEQ ID NO: 72055 - DNA, 15 bp, Homo sapiens
cgcagagggcggaga

SEQ ID NO: 72056 - DNA, 15 bp, Homo sapiens
ccgcagagggcggag

SEQ ID NO: 72057 - DNA, 15 bp, Homo sapiens
cccgcagagggcgga

SEQ ID NO: 72058 - DNA, 15 bp, Homo sapiens
gcccgcagagggcgg

SEQ ID NO: 72059 - DNA, 15 bp, Homo sapiens
tgcccgcagagggcg

SEQ ID NO: 72060 - DNA, 15 bp, Homo sapiens
gtgcccgcagagggc

SEQ ID NO: 72061 - DNA, 15 bp, Homo sapiens
ggtgcccgcagaggg

SEQ ID NO: 72062 - DNA, 15 bp, Homo sapiens
cggtgcccgcagagg

SEQ ID NO: 72063 - DNA, 15 bp, Homo sapiens
ccggtgcccgcagag

SEQ ID NO: 72064 - DNA, 15 bp, Homo sapiens
cccggtgcccgcaga

SEQ ID NO: 72065 - DNA, 15 bp, Homo sapiens
tcccggtgcccgcag

SEQ ID NO: 72066 - DNA, 15 bp, Homo sapiens
ctcccggtgcccgca

SEQ ID NO: 72067 - DNA, 15 bp, Homo sapiens
gctcccggtgcccgc

SEQ ID NO: 72068 - DNA, 15 bp, Homo sapiens
ggctcccggtgcccg

SEQ ID NO: 72069 - DNA, 15 bp, Homo sapiens
gggctcccggtgccc

SEQ ID NO: 72070 - DNA, 15 bp, Homo sapiens
tgggctcccggtgcc

SEQ ID NO: 72071 - DNA, 15 bp, Homo sapiens
ctgggctcccggtgc

SEQ ID NO: 72072 - DNA, 15 bp, Homo sapiens
cctgggctcccggtg

SEQ ID NO: 72073 - DNA, 15 bp, Homo sapiens
ccctgggctcccggt

SEQ ID NO: 72074 - DNA, 15 bp, Homo sapiens
accctgggctcccgg

SEQ ID NO: 72075 - DNA, 15 bp, Homo sapiens
gaccctgggctcccg

SEQ ID NO: 72076 - DNA, 15 bp, Homo sapiens
cgaccctgggctccc

SEQ ID NO: 72077 - DNA, 15 bp, Homo sapiens
tcgaccctgggctcc

SEQ ID NO: 72078 - DNA, 15 bp, Homo sapiens
ctcgaccctgggctc

SEQ ID NO: 72079 - DNA, 15 bp, Homo sapiens
cctcgaccctgggct

SEQ ID NO: 72080 - DNA, 15 bp, Homo sapiens
gcctcgaccctgggc

SEQ ID NO: 72081 - DNA, 15 bp, Homo sapiens
cgcctcgaccctggg

SEQ ID NO: 72082 - DNA, 15 bp, Homo sapiens
gcgcctcgaccctgg

SEQ ID NO: 72083 - DNA, 15 bp, Homo sapiens
cgcgcctcgaccctg

SEQ ID NO: 72084 - DNA, 15 bp, Homo sapiens
gcgcgcctcgaccct

SEQ ID NO: 72085 - DNA, 15 bp, Homo sapiens
ggcgcgcctcgaccc

SEQ ID NO: 72086 - DNA, 15 bp, Homo sapiens
cggcgcgcctcgacc

SEQ ID NO: 72087 - DNA, 15 bp, Homo sapiens
gcggcgcgcctcgac

SEQ ID NO: 72088 - DNA, 15 bp, Homo sapiens
ggcggcgcgcctcga

SEQ ID NO: 72089 - DNA, 15 bp, Homo sapiens
gggcggcgcgcctcg

SEQ ID NO: 72090 - DNA, 15 bp, Homo sapiens
ggggcggcgcgcctc

SEQ ID NO: 72091 - DNA, 15 bp, Homo sapiens
cggggcggcgcgcct

SEQ ID NO: 72092 - DNA, 15 bp, Homo sapiens
tcggggcggcgcgcc

SEQ ID NO: 72093 - DNA, 15 bp, Homo sapiens
ctcggggcggcgcgc

SEQ ID NO: 72094 - DNA, 15 bp, Homo sapiens
cctcggggcggcgcg

SEQ ID NO: 72095 - DNA, 15 bp, Homo sapiens
ccctcggggcggcgc

SEQ ID NO: 72096 - DNA, 15 bp, Homo sapiens
cccctcggggcggcg

SEQ ID NO: 72097 - DNA, 15 bp, Homo sapiens
gcccctcggggcggc

SEQ ID NO: 72098 - DNA, 15 bp, Homo sapiens
ggcccctcggggcgg

SEQ ID NO: 72099 - DNA, 15 bp, Homo sapiens
gggcccctcggggcg

SEQ ID NO: 72100 - DNA, 15 bp, Homo sapiens
ggggcccctcggggc

SEQ ID NO: 72101 - DNA, 15 bp, Homo sapiens
aggggcccctcgggg

SEQ ID NO: 72102 - DNA, 15 bp, Homo sapiens
aaggggcccctcggg

SEQ ID NO: 72103 - DNA, 15 bp, Homo sapiens
gaaggggcccctcgg

SEQ ID NO: 72104 - DNA, 15 bp, Homo sapiens
agaaggggcccctcg

SEQ ID NO: 72105 - DNA, 15 bp, Homo sapiens
gagaaggggcccctc

SEQ ID NO: 72106 - DNA, 15 bp, Homo sapiens
ggagaaggggcccct

SEQ ID NO: 72107 - DNA, 15 bp, Homo sapiens
aggagaaggggcccc

SEQ ID NO: 72108 - DNA, 15 bp, Homo sapiens
taggagaaggggccc

SEQ ID NO: 72109 - DNA, 15 bp, Homo sapiens
ttaggagaaggggcc

SEQ ID NO: 72110 - DNA, 15 bp, Homo sapiens
gttaggagaaggggc

SEQ ID NO: 72111 - DNA, 15 bp, Homo sapiens
tgttaggagaagggg

SEQ ID NO: 72112 - DNA, 15 bp, Homo sapiens
ttgttaggagaaggg

SEQ ID NO: 72113 - DNA, 15 bp, Homo sapiens
attgttaggagaagg

SEQ ID NO: 72114 - DNA, 15 bp, Homo sapiens
cattgttaggagaag

SEQ ID NO: 72115 - DNA, 15 bp, Homo sapiens
gcattgttaggagaa

SEQ ID NO: 72116 - DNA, 15 bp, Homo sapiens
cgcattgttaggaga

SEQ ID NO: 72117 - DNA, 15 bp, Homo sapiens
gcgcattgttaggag

SEQ ID NO: 72118 - DNA, 15 bp, Homo sapiens
ggcgcattgttagga

SEQ ID NO: 72119 - DNA, 15 bp, Homo sapiens
gggcgcattgttagg

SEQ ID NO: 72120 - DNA, 15 bp, Homo sapiens
cgggcgcattgttag

SEQ ID NO: 72121 - DNA, 15 bp, Homo sapiens
ccgggcgcattgtta

SEQ ID NO: 72122 - DNA, 15 bp, Homo sapiens
tccgggcgcattgtt

SEQ ID NO: 72123 - DNA, 15 bp, Homo sapiens
ttccgggcgcattgt

SEQ ID NO: 72124 - DNA, 15 bp, Homo sapiens
attccgggcgcattg

SEQ ID NO: 72125 - DNA, 15 bp, Homo sapiens
cattccgggcgcatt

SEQ ID NO: 72126 - DNA, 15 bp, Homo sapiens
ccattccgggcgcat

SEQ ID NO: 72127 - DNA, 15 bp, Homo sapiens
tccattccgggcgca

SEQ ID NO: 72128 - DNA, 15 bp, Homo sapiens
ctccattccgggcgc

SEQ ID NO: 72129 - DNA, 15 bp, Homo sapiens
actccattccgggcg

SEQ ID NO: 72130 - DNA, 15 bp, Homo sapiens
gactccattccgggc

SEQ ID NO: 72131 - DNA, 15 bp, Homo sapiens
ggactccattccggg

SEQ ID NO: 72132 - DNA, 15 bp, Homo sapiens
cggactccattccgg

SEQ ID NO: 72133 - DNA, 15 bp, Homo sapiens
gcggactccattccg

SEQ ID NO: 72134 - DNA, 15 bp, Homo sapiens
cgcggactccattcc

SEQ ID NO: 72135 - DNA, 15 bp, Homo sapiens
gcgcggactccattc

SEQ ID NO: 72136 - DNA, 15 bp, Homo sapiens
ggcgcggactccatt

SEQ ID NO: 72137 - DNA, 15 bp, Homo sapiens
gggcgcggactccat

SEQ ID NO: 72138 - DNA, 15 bp, Homo sapiens
agggcgcggactcca

SEQ ID NO: 72139 - DNA, 15 bp, Homo sapiens
cagggcgcggactcc

SEQ ID NO: 72140 - DNA, 15 bp, Homo sapiens
tcagggcgcggactc

SEQ ID NO: 72141 - DNA, 15 bp, Homo sapiens
gtcagggcgcggact

SEQ ID NO: 72142 - DNA, 15 bp, Homo sapiens
tgtcagggcgcggac

SEQ ID NO: 72143 - DNA, 15 bp, Homo sapiens
ctgtcagggcgcgga

SEQ ID NO: 72144 - DNA, 15 bp, Homo sapiens
gctgtcagggcgcgg

SEQ ID NO: 72145 - DNA, 15 bp, Homo sapiens
cgctgtcagggcgcg

SEQ ID NO: 72146 - DNA, 15 bp, Homo sapiens
gcgctgtcagggcgc

SEQ ID NO: 72147 - DNA, 15 bp, Homo sapiens
cgcgctgtcagggcg

SEQ ID NO: 72148 - DNA, 15 bp, Homo sapiens
ccgcgctgtcagggc

SEQ ID NO: 72149 - DNA, 15 bp, Homo sapiens
cccgcgctgtcaggg

SEQ ID NO: 72150 - DNA, 15 bp, Homo sapiens
acccgcgctgtcagg

SEQ ID NO: 72151 - DNA, 15 bp, Homo sapiens
gacccgcgctgtcag

SEQ ID NO: 72152 - DNA, 15 bp, Homo sapiens
tgacccgcgctgtca

SEQ ID NO: 72153 - DNA, 15 bp, Homo sapiens
ctgacccgcgctgtc

SEQ ID NO: 72154 - DNA, 15 bp, Homo sapiens
gctgacccgcgctgt

SEQ ID NO: 72155 - DNA, 15 bp, Homo sapiens
ggctgacccgcgctg

SEQ ID NO: 72156 - DNA, 15 bp, Homo sapiens
gggctgacccgcgct

SEQ ID NO: 72157 - DNA, 15 bp, Homo sapiens
cgggctgacccgcgc

SEQ ID NO: 72158 - DNA, 15 bp, Homo sapiens
tcgggctgacccgcg

SEQ ID NO: 72159 - DNA, 15 bp, Homo sapiens
ttcgggctgacccgc

SEQ ID NO: 72160 - DNA, 15 bp, Homo sapiens
tttcgggctgacccg

SEQ ID NO: 72161 - DNA, 15 bp, Homo sapiens
gtttcgggctgaccc

SEQ ID NO: 72162 - DNA, 15 bp, Homo sapiens
ggtttcgggctgacc

SEQ ID NO: 72163 - DNA, 15 bp, Homo sapiens
cggtttcgggctgac

SEQ ID NO: 72164 - DNA, 15 bp, Homo sapiens
gcggtttcgggctga

SEQ ID NO: 72165 - DNA, 15 bp, Homo sapiens
ggcggtttcgggctg

SEQ ID NO: 72166 - DNA, 15 bp, Homo sapiens
gggcggtttcgggct

SEQ ID NO: 72167 - DNA, 15 bp, Homo sapiens
tgggcggtttcgggc

SEQ ID NO: 72168 - DNA, 15 bp, Homo sapiens
ctgggcggtttcggg

SEQ ID NO: 72169 - DNA, 15 bp, Homo sapiens
tctgggcggtttcgg

SEQ ID NO: 72170 - DNA, 15 bp, Homo sapiens
ttctgggcggtttcg

SEQ ID NO: 72171 - DNA, 15 bp, Homo sapiens
attctgggcggtttc

SEQ ID NO: 72172 - DNA, 15 bp, Homo sapiens
gattctgggcggttt

SEQ ID NO: 72173 - DNA, 15 bp, Homo sapiens
ggattctgggcggtt

SEQ ID NO: 72174 - DNA, 15 bp, Homo sapiens
cggattctgggcggt

SEQ ID NO: 72175 - DNA, 15 bp, Homo sapiens
gcggattctgggcgg

SEQ ID NO: 72176 - DNA, 15 bp, Homo sapiens
agcggattctgggcg

SEQ ID NO: 72177 - DNA, 15 bp, Homo sapiens
aagcggattctgggc

SEQ ID NO: 72178 - DNA, 15 bp, Homo sapiens
gaagcggattctggg

SEQ ID NO: 72179 - DNA, 15 bp, Homo sapiens
cgaagcggattctgg

SEQ ID NO: 72180 - DNA, 15 bp, Homo sapiens
tcgaagcggattctg

SEQ ID NO: 72181 - DNA, 15 bp, Homo sapiens
atcgaagcggattct

SEQ ID NO: 72182 - DNA, 15 bp, Homo sapiens
catcgaagcggattc

SEQ ID NO: 72183 - DNA, 15 bp, Homo sapiens
tcatcgaagcggatt

SEQ ID NO: 72184 - DNA, 15 bp, Homo sapiens
ctcatcgaagcggat

SEQ ID NO: 72185 - DNA, 15 bp, Homo sapiens
actcatcgaagcgga

SEQ ID NO: 72186 - DNA, 15 bp, Homo sapiens
cactcatcgaagcgg

SEQ ID NO: 72187 - DNA, 15 bp, Homo sapiens
ccactcatcgaagcg

SEQ ID NO: 72188 - DNA, 15 bp, Homo sapiens
cccactcatcgaagc

SEQ ID NO: 72189 - DNA, 15 bp, Homo sapiens
acccactcatcgaag

SEQ ID NO: 72190 - DNA, 15 bp, Homo sapiens
cacccactcatcgaa

SEQ ID NO: 72191 - DNA, 15 bp, Homo sapiens
tcacccactcatcga

SEQ ID NO: 72192 - DNA, 15 bp, Homo sapiens
ctcacccactcatcg

SEQ ID NO: 72193 - DNA, 15 bp, Homo sapiens
gctcacccactcatc

SEQ ID NO: 72194 - DNA, 15 bp, Homo sapiens
ggctcacccactcat

SEQ ID NO: 72195 - DNA, 15 bp, Homo sapiens
cggctcacccactca

SEQ ID NO: 72196 - DNA, 15 bp, Homo sapiens
gcggctcacccactc

SEQ ID NO: 72197 - DNA, 15 bp, Homo sapiens
agcggctcacccact

SEQ ID NO: 72198 - DNA, 15 bp, Homo sapiens
gagcggctcacccac

SEQ ID NO: 72199 - DNA, 15 bp, Homo sapiens
agagcggctcaccca

SEQ ID NO: 72200 - DNA, 15 bp, Homo sapiens
cagagcggctcaccc

SEQ ID NO: 72201 - DNA, 15 bp, Homo sapiens
ccagagcggctcacc

SEQ ID NO: 72202 - DNA, 15 bp, Homo sapiens
cccagagcggctcac

SEQ ID NO: 72203 - DNA, 15 bp, Homo sapiens
tcccagagcggctca

SEQ ID NO: 72204 - DNA, 15 bp, Homo sapiens
ctcccagagcggctc

SEQ ID NO: 72205 - DNA, 15 bp, Homo sapiens
actcccagagcggct

SEQ ID NO: 72206 - DNA, 15 bp, Homo sapiens
gactcccagagcggc

SEQ ID NO: 72207 - DNA, 15 bp, Homo sapiens
agactcccagagcgg

SEQ ID NO: 72208 - DNA, 15 bp, Homo sapiens
cagactcccagagcg

SEQ ID NO: 72209 - DNA, 15 bp, Homo sapiens
gcagactcccagagc

SEQ ID NO: 72210 - DNA, 15 bp, Homo sapiens
ggcagactcccagag

SEQ ID NO: 72211 - DNA, 15 bp, Homo sapiens
cggcagactcccaga

SEQ ID NO: 72212 - DNA, 15 bp, Homo sapiens
gcggcagactcccag

SEQ ID NO: 72213 - DNA, 15 bp, Homo sapiens
cgcggcagactccca

SEQ ID NO: 72214 - DNA, 15 bp, Homo sapiens
acgcggcagactccc

SEQ ID NO: 72215 - DNA, 15 bp, Homo sapiens
gacgcggcagactcc

SEQ ID NO: 72216 - DNA, 15 bp, Homo sapiens
agacgcggcagactc

SEQ ID NO: 72217 - DNA, 15 bp, Homo sapiens
gagacgcggcagact

SEQ ID NO: 72218 - DNA, 15 bp, Homo sapiens
cgagacgcggcagac

SEQ ID NO: 72219 - DNA, 15 bp, Homo sapiens
ccgagacgcggcaga

SEQ ID NO: 72220 - DNA, 15 bp, Homo sapiens
gccgagacgcggcag

SEQ ID NO: 72221 - DNA, 15 bp, Homo sapiens
tgccgagacgcggca

SEQ ID NO: 72222 - DNA, 15 bp, Homo sapiens
ctgccgagacgcggc

SEQ ID NO: 72223 - DNA, 15 bp, Homo sapiens
gctgccgagacgcgg

SEQ ID NO: 72224 - DNA, 15 bp, Homo sapiens
cgctgccgagacgcg

SEQ ID NO: 72225 - DNA, 15 bp, Homo sapiens
ccgctgccgagacgc

SEQ ID NO: 72226 - DNA, 15 bp, Homo sapiens
tccgctgccgagacg

SEQ ID NO: 72227 - DNA, 15 bp, Homo sapiens
ctccgctgccgagac

SEQ ID NO: 72228 - DNA, 15 bp, Homo sapiens
cctccgctgccgaga

SEQ ID NO: 72229 - DNA, 15 bp, Homo sapiens
ccctccgctgccgag

SEQ ID NO: 72230 - DNA, 15 bp, Homo sapiens
gccctccgctgccga

SEQ ID NO: 72231 - DNA, 15 bp, Homo sapiens
ggccctccgctgccg

SEQ ID NO: 72232 - DNA, 15 bp, Homo sapiens
aggccctccgctgcc

SEQ ID NO: 72233 - DNA, 15 bp, Homo sapiens
caggccctccgctgc

SEQ ID NO: 72234 - DNA, 15 bp, Homo sapiens
tcaggccctccgctg

SEQ ID NO: 72235 - DNA, 15 bp, Homo sapiens
ctcaggccctccgct

SEQ ID NO: 72236 - DNA, 15 bp, Homo sapiens
actcaggccctccgc

SEQ ID NO: 72237 - DNA, 15 bp, Homo sapiens
cactcaggccctccg

SEQ ID NO: 72238 - DNA, 15 bp, Homo sapiens
ccactcaggccctcc

SEQ ID NO: 72239 - DNA, 15 bp, Homo sapiens
tccactcaggccctc

SEQ ID NO: 72240 - DNA, 15 bp, Homo sapiens
ttccactcaggccct

SEQ ID NO: 72241 - DNA, 15 bp, Homo sapiens
tttccactcaggccc

SEQ ID NO: 72242 - DNA, 15 bp, Homo sapiens
ttttccactcaggcc

SEQ ID NO: 72243 - DNA, 15 bp, Homo sapiens
tttttccactcaggc

SEQ ID NO: 72244 - DNA, 15 bp, Homo sapiens
atttttccactcagg

SEQ ID NO: 72245 - DNA, 15 bp, Homo sapiens
aatttttccactcag

SEQ ID NO: 72246 - DNA, 15 bp, Homo sapiens
gaatttttccactca

SEQ ID NO: 72247 - DNA, 15 bp, Homo sapiens
agaatttttccactc

SEQ ID NO: 72248 - DNA, 15 bp, Homo sapiens
aagaatttttccact

SEQ ID NO: 72249 - DNA, 15 bp, Homo sapiens
taagaatttttccac

SEQ ID NO: 72250 - DNA, 15 bp, Homo sapiens
ataagaatttttcca

SEQ ID NO: 72251 - DNA, 15 bp, Homo sapiens
aataagaatttttcc

SEQ ID NO: 72252 - DNA, 15 bp, Homo sapiens
caataagaatttttc

SEQ ID NO: 72253 - DNA, 15 bp, Homo sapiens
ccaataagaattttt

SEQ ID NO: 72254 - DNA, 15 bp, Homo sapiens
tccaataagaatttt

SEQ ID NO: 72255 - DNA, 15 bp, Homo sapiens
atccaataagaattt

SEQ ID NO: 72256 - DNA, 15 bp, Homo sapiens
catccaataagaatt

SEQ ID NO: 72257 - DNA, 15 bp, Homo sapiens
gcatccaataagaat

SEQ ID NO: 72258 - DNA, 15 bp, Homo sapiens
tgcatccaataagaa

SEQ ID NO: 72259 - DNA, 15 bp, Homo sapiens
gtgcatccaataaga

SEQ ID NO: 72260 - DNA, 15 bp, Homo sapiens
agtgcatccaataag

SEQ ID NO: 72261 - DNA, 15 bp, Homo sapiens
aagtgcatccaataa

SEQ ID NO: 72262 - DNA, 15 bp, Homo sapiens
aaagtgcatccaata

SEQ ID NO: 72263 - DNA, 15 bp, Homo sapiens
aaaagtgcatccaat

SEQ ID NO: 72264 - DNA, 15 bp, Homo sapiens
aaaaagtgcatccaa

SEQ ID NO: 72265 - DNA, 15 bp, Homo sapiens
taaaaagtgcatcca

SEQ ID NO: 72266 - DNA, 15 bp, Homo sapiens
ttaaaaagtgcatcc

SEQ ID NO: 72267 - DNA, 15 bp, Homo sapiens
attaaaaagtgcatc

SEQ ID NO: 72268 - DNA, 15 bp, Homo sapiens
cattaaaaagtgcat

SEQ ID NO: 72269 - DNA, 15 bp, Homo sapiens
ccattaaaaagtgca

SEQ ID NO: 72270 - DNA, 15 bp, Homo sapiens
accattaaaaagtgc

SEQ ID NO: 72271 - DNA, 15 bp, Homo sapiens
aaccattaaaaagtg

SEQ ID NO: 72272 - DNA, 15 bp, Homo sapiens
caaccattaaaaagt

SEQ ID NO: 72273 - DNA, 15 bp, Homo sapiens
ccaaccattaaaaag

SEQ ID NO: 72274 - DNA, 15 bp, Homo sapiens
accaaccattaaaaa

SEQ ID NO: 72275 - DNA, 15 bp, Homo sapiens
aaccaaccattaaaa

SEQ ID NO: 72276 - DNA, 15 bp, Homo sapiens
aaaccaaccattaaa

SEQ ID NO: 72277 - DNA, 15 bp, Homo sapiens
caaaccaaccattaa

SEQ ID NO: 72278 - DNA, 15 bp, Homo sapiens
gcaaaccaaccatta

SEQ ID NO: 72279 - DNA, 15 bp, Homo sapiens
ggcaaaccaaccatt

SEQ ID NO: 72280 - DNA, 15 bp, Homo sapiens
aggcaaaccaaccat

SEQ ID NO: 72281 - DNA, 15 bp, Homo sapiens
gaggcaaaccaacca

SEQ ID NO: 72282 - DNA, 15 bp, Homo sapiens
cgaggcaaaccaacc

SEQ ID NO: 72283 - DNA, 15 bp, Homo sapiens
ccgaggcaaaccaac

SEQ ID NO: 72284 - DNA, 15 bp, Homo sapiens
accgaggcaaaccaa

SEQ ID NO: 72285 - DNA, 15 bp, Homo sapiens
aaccgaggcaaacca

SEQ ID NO: 72286 - DNA, 15 bp, Homo sapiens
aaaccgaggcaaacc

SEQ ID NO: 72287 - DNA, 15 bp, Homo sapiens
aaaaccgaggcaaac

SEQ ID NO: 72288 - DNA, 15 bp, Homo sapiens
gaaaaccgaggcaaa

SEQ ID NO: 72289 - DNA, 15 bp, Homo sapiens
cgaaaaccgaggcaa

SEQ ID NO: 72290 - DNA, 15 bp, Homo sapiens
acgaaaaccgaggca

SEQ ID NO: 72291 - DNA, 15 bp, Homo sapiens
gacgaaaaccgaggc

SEQ ID NO: 72292 - DNA, 15 bp, Homo sapiens
ggacgaaaaccgagg

SEQ ID NO: 72293 - DNA, 15 bp, Homo sapiens
cggacgaaaaccgag

SEQ ID NO: 72294 - DNA, 15 bp, Homo sapiens
tcggacgaaaaccga

SEQ ID NO: 72295 - DNA, 15 bp, Homo sapiens
ctcggacgaaaaccg

SEQ ID NO: 72296 - DNA, 15 bp, Homo sapiens
actcggacgaaaacc

SEQ ID NO: 72297 - DNA, 15 bp, Homo sapiens
gactcggacgaaaac

SEQ ID NO: 72298 - DNA, 15 bp, Homo sapiens
agactcggacgaaaa

SEQ ID NO: 72299 - DNA, 15 bp, Homo sapiens
aagactcggacgaaa

SEQ ID NO: 72300 - DNA, 15 bp, Homo sapiens
gaagactcggacgaa

SEQ ID NO: 72301 - DNA, 15 bp, Homo sapiens
ggaagactcggacga

SEQ ID NO: 72302 - DNA, 15 bp, Homo sapiens
gggaagactcggacg

SEQ ID NO: 72303 - DNA, 15 bp, Homo sapiens
ggggaagactcggac

SEQ ID NO: 72304 - DNA, 15 bp, Homo sapiens
cggggaagactcgga

SEQ ID NO: 72305 - DNA, 15 bp, Homo sapiens
ccggggaagactcgg

SEQ ID NO: 72306 - DNA, 15 bp, Homo sapiens
gccggggaagactcg

SEQ ID NO: 72307 - DNA, 15 bp, Homo sapiens
tgccggggaagactc

SEQ ID NO: 72308 - DNA, 15 bp, Homo sapiens
ctgccggggaagact

SEQ ID NO: 72309 - DNA, 15 bp, Homo sapiens
actgccggggaagac

SEQ ID NO: 72310 - DNA, 15 bp, Homo sapiens
tactgccggggaaga

SEQ ID NO: 72311 - DNA, 15 bp, Homo sapiens
ctactgccggggaag

SEQ ID NO: 72312 - DNA, 15 bp, Homo sapiens
cctactgccggggaa

SEQ ID NO: 72313 - DNA, 15 bp, Homo sapiens
gcctactgccgggga

SEQ ID NO: 72314 - DNA, 15 bp, Homo sapiens
cgcctactgccgggg

SEQ ID NO: 72315 - DNA, 15 bp, Homo sapiens
gcgcctactgccggg

SEQ ID NO: 72316 - DNA, 15 bp, Homo sapiens
agcgcctactgccgg

SEQ ID NO: 72317 - DNA, 15 bp, Homo sapiens
cagcgcctactgccg

SEQ ID NO: 72318 - DNA, 15 bp, Homo sapiens
ccagcgcctactgcc

SEQ ID NO: 72319 - DNA, 15 bp, Homo sapiens
cccagcgcctactgc

SEQ ID NO: 72320 - DNA, 15 bp, Homo sapiens
acccagcgcctactg

SEQ ID NO: 72321 - DNA, 15 bp, Homo sapiens
aacccagcgcctact

SEQ ID NO: 72322 - DNA, 15 bp, Homo sapiens
taacccagcgcctac

SEQ ID NO: 72323 - DNA, 15 bp, Homo sapiens
gtaacccagcgccta

SEQ ID NO: 72324 - DNA, 15 bp, Homo sapiens
ggtaacccagcgcct

SEQ ID NO: 72325 - DNA, 15 bp, Homo sapiens
gggtaacccagcgcc

SEQ ID NO: 72326 - DNA, 15 bp, Homo sapiens
cgggtaacccagcgc

SEQ ID NO: 72327 - DNA, 15 bp, Homo sapiens
gcgggtaacccagcg

SEQ ID NO: 72328 - DNA, 15 bp, Homo sapiens
tgcgggtaacccagc

SEQ ID NO: 72329 - DNA, 15 bp, Homo sapiens
ctgcgggtaacccag

SEQ ID NO: 72330 - DNA, 15 bp, Homo sapiens
gctgcgggtaaccca

SEQ ID NO: 72331 - DNA, 15 bp, Homo sapiens
ggctgcgggtaaccc

SEQ ID NO: 72332 - DNA, 15 bp, Homo sapiens
gggctgcgggtaacc

SEQ ID NO: 72333 - DNA, 15 bp, Homo sapiens
agggctgcgggtaac

SEQ ID NO: 72334 - DNA, 15 bp, Homo sapiens
tagggctgcgggtaa

SEQ ID NO: 72335 - DNA, 15 bp, Homo sapiens
ctagggctgcgggta

SEQ ID NO: 72336 - DNA, 15 bp, Homo sapiens
gctagggctgcgggt

SEQ ID NO: 72337 - DNA, 15 bp, Homo sapiens
ggctagggctgcggg

SEQ ID NO: 72338 - DNA, 15 bp, Homo sapiens
tggctagggctgcgg

SEQ ID NO: 72339 - DNA, 15 bp, Homo sapiens
ttggctagggctgcg

SEQ ID NO: 72340 - DNA, 15 bp, Homo sapiens
gttggctagggctgc

SEQ ID NO: 72341 - DNA, 15 bp, Homo sapiens
agttggctagggctg

SEQ ID NO: 72342 - DNA, 15 bp, Homo sapiens
gagttggctagggct

SEQ ID NO: 72343 - DNA, 15 bp, Homo sapiens
agagttggctagggc

SEQ ID NO: 72344 - DNA, 15 bp, Homo sapiens
gagagttggctaggg

SEQ ID NO: 72345 - DNA, 15 bp, Homo sapiens
ggagagttggctagg

SEQ ID NO: 72346 - DNA, 15 bp, Homo sapiens
gggagagttggctag

SEQ ID NO: 72347 - DNA, 15 bp, Homo sapiens
agggagagttggcta

SEQ ID NO: 72348 - DNA, 15 bp, Homo sapiens
gagggagagttggct

SEQ ID NO: 72349 - DNA, 15 bp, Homo sapiens
ggagggagagttggc

SEQ ID NO: 72350 - DNA, 15 bp, Homo sapiens
tggagggagagttgg

SEQ ID NO: 72351 - DNA, 15 bp, Homo sapiens
atggagggagagttg

SEQ ID NO: 72352 - DNA, 15 bp, Homo sapiens
tatggagggagagtt

SEQ ID NO: 72353 - DNA, 15 bp, Homo sapiens
gtatggagggagagt

SEQ ID NO: 72354 - DNA, 15 bp, Homo sapiens
ggtatggagggagag

SEQ ID NO: 72355 - DNA, 15 bp, Homo sapiens
gggtatggagggaga

SEQ ID NO: 72356 - DNA, 15 bp, Homo sapiens
ggggtatggagggag

SEQ ID NO: 72357 - DNA, 15 bp, Homo sapiens
gggggtatggaggga

SEQ ID NO: 72358 - DNA, 15 bp, Homo sapiens
ggggggtatggaggg

SEQ ID NO: 72359 - DNA, 15 bp, Homo sapiens
gggggggtatggagg

SEQ ID NO: 72360 - DNA, 15 bp, Homo sapiens
agggggggtatggag

SEQ ID NO: 72361 - DNA, 15 bp, Homo sapiens
tagggggggtatgga

SEQ ID NO: 72362 - DNA, 15 bp, Homo sapiens
gtagggggggtatgg

SEQ ID NO: 72363 - DNA, 15 bp, Homo sapiens
ggtagggggggtatg

SEQ ID NO: 72364 - DNA, 15 bp, Homo sapiens
gggtagggggggtat

SEQ ID NO: 72365 - DNA, 15 bp, Homo sapiens
ggggtagggggggta

SEQ ID NO: 72366 - DNA, 15 bp, Homo sapiens
tggggtagggggggt

SEQ ID NO: 72367 - DNA, 15 bp, Homo sapiens
gtggggtaggggggg

SEQ ID NO: 72368 - DNA, 15 bp, Homo sapiens
ggtggggtagggggg

SEQ ID NO: 72369 - DNA, 15 bp, Homo sapiens
gggtggggtaggggg

SEQ ID NO: 72370 - DNA, 15 bp, Homo sapiens
ggggtggggtagggg

SEQ ID NO: 72371 - DNA, 15 bp, Homo sapiens
gggggtggggtaggg

SEQ ID NO: 72372 - DNA, 15 bp, Homo sapiens
tgggggtggggtagg

SEQ ID NO: 72373 - DNA, 15 bp, Homo sapiens
ttgggggtggggtag

SEQ ID NO: 72374 - DNA, 15 bp, Homo sapiens
tttgggggtggggta

SEQ ID NO: 72375 - DNA, 15 bp, Homo sapiens
ttttgggggtggggt

SEQ ID NO: 72376 - DNA, 15 bp, Homo sapiens
tttttgggggtgggg

SEQ ID NO: 72377 - DNA, 15 bp, Homo sapiens
ctttttgggggtggg

SEQ ID NO: 72378 - DNA, 15 bp, Homo sapiens
actttttgggggtgg

SEQ ID NO: 72379 - DNA, 15 bp, Homo sapiens
aactttttgggggtg

SEQ ID NO: 72380 - DNA, 15 bp, Homo sapiens
aaactttttgggggt

SEQ ID NO: 72381 - DNA, 15 bp, Homo sapiens
caaactttttggggg

SEQ ID NO: 72382 - DNA, 15 bp, Homo sapiens
acaaactttttgggg

SEQ ID NO: 72383 - DNA, 15 bp, Homo sapiens
gacaaactttttggg

SEQ ID NO: 72384 - DNA, 15 bp, Homo sapiens
agacaaactttttgg

SEQ ID NO: 72385 - DNA, 15 bp, Homo sapiens
gagacaaactttttg

SEQ ID NO: 72386 - DNA, 15 bp, Homo sapiens
ggagacaaacttttt

SEQ ID NO: 72387 - DNA, 15 bp, Homo sapiens
cggagacaaactttt

SEQ ID NO: 72388 - DNA, 15 bp, Homo sapiens
ccggagacaaacttt

SEQ ID NO: 72389 - DNA, 15 bp, Homo sapiens
gccggagacaaactt

SEQ ID NO: 72390 - DNA, 15 bp, Homo sapiens
agccggagacaaact

SEQ ID NO: 72391 - DNA, 15 bp, Homo sapiens
cagccggagacaaac

SEQ ID NO: 72392 - DNA, 15 bp, Homo sapiens
ccagccggagacaaa

SEQ ID NO: 72393 - DNA, 15 bp, Homo sapiens
tccagccggagacaa

SEQ ID NO: 72394 - DNA, 15 bp, Homo sapiens
ttccagccggagaca

SEQ ID NO: 72395 - DNA, 15 bp, Homo sapiens
tttccagccggagac

SEQ ID NO: 72396 - DNA, 15 bp, Homo sapiens
ttttccagccggaga

SEQ ID NO: 72397 - DNA, 15 bp, Homo sapiens
tttttccagccggag

SEQ ID NO: 72398 - DNA, 15 bp, Homo sapiens
ctttttccagccgga

SEQ ID NO: 72399 - DNA, 15 bp, Homo sapiens
gctttttccagccgg

SEQ ID NO: 72400 - DNA, 15 bp, Homo sapiens
tgctttttccagccg

SEQ ID NO: 72401 - DNA, 15 bp, Homo sapiens
atgctttttccagcc

SEQ ID NO: 72402 - DNA, 15 bp, Homo sapiens
aatgctttttccagc

SEQ ID NO: 72403 - DNA, 15 bp, Homo sapiens
taatgctttttccag

SEQ ID NO: 72404 - DNA, 15 bp, Homo sapiens
ttaatgctttttcca

SEQ ID NO: 72405 - DNA, 15 bp, Homo sapiens
attaatgctttttcc

SEQ ID NO: 72406 - DNA, 15 bp, Homo sapiens
cattaatgctttttc

SEQ ID NO: 72407 - DNA, 15 bp, Homo sapiens
tcattaatgcttttt

SEQ ID NO: 72408 - DNA, 15 bp, Homo sapiens
ttcattaatgctttt

SEQ ID NO: 72409 - DNA, 15 bp, Homo sapiens
gttcattaatgcttt

SEQ ID NO: 72410 - DNA, 15 bp, Homo sapiens
cgttcattaatgctt

SEQ ID NO: 72411 - DNA, 15 bp, Homo sapiens
acgttcattaatgct

SEQ ID NO: 72412 - DNA, 15 bp, Homo sapiens
tacgttcattaatgc

SEQ ID NO: 72413 - DNA, 15 bp, Homo sapiens
atacgttcattaatg

SEQ ID NO: 72414 - DNA, 15 bp, Homo sapiens
gatacgttcattaat

SEQ ID NO: 72415 - DNA, 15 bp, Homo sapiens
agatacgttcattaa

SEQ ID NO: 72416 - DNA, 15 bp, Homo sapiens
cagatacgttcatta

SEQ ID NO: 72417 - DNA, 15 bp, Homo sapiens
acagatacgttcatt

SEQ ID NO: 72418 - DNA, 15 bp, Homo sapiens
cacagatacgttcat

SEQ ID NO: 72419 - DNA, 15 bp, Homo sapiens
ccacagatacgttca

SEQ ID NO: 72420 - DNA, 15 bp, Homo sapiens
cccacagatacgttc

SEQ ID NO: 72421 - DNA, 15 bp, Homo sapiens
tcccacagatacgtt

SEQ ID NO: 72422 - DNA, 15 bp, Homo sapiens
ttcccacagatacgt

SEQ ID NO: 72423 - DNA, 15 bp, Homo sapiens
cttcccacagatacg

SEQ ID NO: 72424 - DNA, 15 bp, Homo sapiens
tcttcccacagatac

SEQ ID NO: 72425 - DNA, 15 bp, Homo sapiens
ttcttcccacagata

SEQ ID NO: 72426 - DNA, 15 bp, Homo sapiens
tttcttcccacagat

SEQ ID NO: 72427 - DNA, 15 bp, Homo sapiens
gtttcttcccacaga

SEQ ID NO: 72428 - DNA, 15 bp, Homo sapiens
cgtttcttcccacag

SEQ ID NO: 72429 - DNA, 15 bp, Homo sapiens
ccgtttcttcccaca

SEQ ID NO: 72430 - DNA, 15 bp, Homo sapiens
tccgtttcttcccac

SEQ ID NO: 72431 - DNA, 15 bp, Homo sapiens
ttccgtttcttccca

SEQ ID NO: 72432 - DNA, 15 bp, Homo sapiens
tttccgtttcttccc

SEQ ID NO: 72433 - DNA, 15 bp, Homo sapiens
ctttccgtttcttcc

SEQ ID NO: 72434 - DNA, 15 bp, Homo sapiens
actttccgtttcttc

SEQ ID NO: 72435 - DNA, 15 bp, Homo sapiens
cactttccgtttctt

SEQ ID NO: 72436 - DNA, 15 bp, Homo sapiens
tcactttccgtttct

SEQ ID NO: 72437 - DNA, 15 bp, Homo sapiens
ttcactttccgtttc

SEQ ID NO: 72438 - DNA, 15 bp, Homo sapiens
attcactttccgttt

SEQ ID NO: 72439 - DNA, 15 bp, Homo sapiens
cattcactttccgtt

SEQ ID NO: 72440 - DNA, 15 bp, Homo sapiens
tcattcactttccgt

SEQ ID NO: 72441 - DNA, 15 bp, Homo sapiens
ctcattcactttccg

SEQ ID NO: 72442 - DNA, 15 bp, Homo sapiens
actcattcactttcc

SEQ ID NO: 72443 - DNA, 15 bp, Homo sapiens
gactcattcactttc

SEQ ID NO: 72444 - DNA, 15 bp, Homo sapiens
tgactcattcacttt

SEQ ID NO: 72445 - DNA, 15 bp, Homo sapiens
ctgactcattcactt

SEQ ID NO: 72446 - DNA, 15 bp, Homo sapiens
cctgactcattcact

SEQ ID NO: 72447 - DNA, 15 bp, Homo sapiens
tcctgactcattcac

SEQ ID NO: 72448 - DNA, 15 bp, Homo sapiens
ctcctgactcattca

SEQ ID NO: 72449 - DNA, 15 bp, Homo sapiens
cctcctgactcattc

SEQ ID NO: 72450 - DNA, 15 bp, Homo sapiens
ccctcctgactcatt

SEQ ID NO: 72451 - DNA, 15 bp, Homo sapiens
gccctcctgactcat

SEQ ID NO: 72452 - DNA, 15 bp, Homo sapiens
ggccctcctgactca

SEQ ID NO: 72453 - DNA, 15 bp, Homo sapiens
tggccctcctgactc

SEQ ID NO: 72454 - DNA, 15 bp, Homo sapiens
gtggccctcctgact

SEQ ID NO: 72455 - DNA, 15 bp, Homo sapiens
ggtggccctcctgac

SEQ ID NO: 72456 - DNA, 15 bp, Homo sapiens
aggtggccctcctga

SEQ ID NO: 72457 - DNA, 15 bp, Homo sapiens
aaggtggccctcctg

SEQ ID NO: 72458 - DNA, 15 bp, Homo sapiens
gaaggtggccctcct

SEQ ID NO: 72459 - DNA, 15 bp, Homo sapiens
cgaaggtggccctcc

SEQ ID NO: 72460 - DNA, 15 bp, Homo sapiens
ccgaaggtggccctc

SEQ ID NO: 72461 - DNA, 15 bp, Homo sapiens
gccgaaggtggccct

SEQ ID NO: 72462 - DNA, 15 bp, Homo sapiens
ggccgaaggtggccc

SEQ ID NO: 72463 - DNA, 15 bp, Homo sapiens
tggccgaaggtggcc

SEQ ID NO: 72464 - DNA, 15 bp, Homo sapiens
ttggccgaaggtggc

SEQ ID NO: 72465 - DNA, 15 bp, Homo sapiens
gttggccgaaggtgg

SEQ ID NO: 72466 - DNA, 15 bp, Homo sapiens
ggttggccgaaggtg

SEQ ID NO: 72467 - DNA, 15 bp, Homo sapiens
cggttggccgaaggt

SEQ ID NO: 72468 - DNA, 15 bp, Homo sapiens
gcggttggccgaagg

SEQ ID NO: 72469 - DNA, 15 bp, Homo sapiens
ggcggttggccgaag

SEQ ID NO: 72470 - DNA, 15 bp, Homo sapiens
aggcggttggccgaa

SEQ ID NO: 72471 - DNA, 15 bp, Homo sapiens
gaggcggttggccga

SEQ ID NO: 72472 - DNA, 15 bp, Homo sapiens
tgaggcggttggccg

SEQ ID NO: 72473 - DNA, 15 bp, Homo sapiens
ctgaggcggttggcc

SEQ ID NO: 72474 - DNA, 15 bp, Homo sapiens
cctgaggcggttggc

SEQ ID NO: 72475 - DNA, 15 bp, Homo sapiens
tcctgaggcggttgg

SEQ ID NO: 72476 - DNA, 15 bp, Homo sapiens
ttcctgaggcggttg

SEQ ID NO: 72477 - DNA, 15 bp, Homo sapiens
tttcctgaggcggtt

SEQ ID NO: 72478 - DNA, 15 bp, Homo sapiens
ttttcctgaggcggt

SEQ ID NO: 72479 - DNA, 15 bp, Homo sapiens
cttttcctgaggcgg

SEQ ID NO: 72480 - DNA, 15 bp, Homo sapiens
gcttttcctgaggcg

SEQ ID NO: 72481 - DNA, 15 bp, Homo sapiens
tgcttttcctgaggc

SEQ ID NO: 72482 - DNA, 15 bp, Homo sapiens
ttgcttttcctgagg

SEQ ID NO: 72483 - DNA, 15 bp, Homo sapiens
tttgcttttcctgag

SEQ ID NO: 72484 - DNA, 15 bp, Homo sapiens
ctttgcttttcctga

SEQ ID NO: 72485 - DNA, 15 bp, Homo sapiens
tctttgcttttcctg

SEQ ID NO: 72486 - DNA, 15 bp, Homo sapiens
ttctttgcttttcct

SEQ ID NO: 72487 - DNA, 15 bp, Homo sapiens
cttctttgcttttcc

SEQ ID NO: 72488 - DNA, 15 bp, Homo sapiens
gcttctttgcttttc

SEQ ID NO: 72489 - DNA, 15 bp, Homo sapiens
ggcttctttgctttt

SEQ ID NO: 72490 - DNA, 15 bp, Homo sapiens
tggcttctttgcttt

SEQ ID NO: 72491 - DNA, 15 bp, Homo sapiens
ttggcttctttgctt

SEQ ID NO: 72492 - DNA, 15 bp, Homo sapiens
tttggcttctttgct

SEQ ID NO: 72493 - DNA, 15 bp, Homo sapiens
ctttggcttctttgc

SEQ ID NO: 72494 - DNA, 15 bp, Homo sapiens
cctttggcttctttg

SEQ ID NO: 72495 - DNA, 15 bp, Homo sapiens
acctttggcttcttt

SEQ ID NO: 72496 - DNA, 15 bp, Homo sapiens
gacctttggcttctt

SEQ ID NO: 72497 - DNA, 15 bp, Homo sapiens
agacctttggcttct

SEQ ID NO: 72498 - DNA, 15 bp, Homo sapiens
aagacctttggcttc

SEQ ID NO: 72499 - DNA, 15 bp, Homo sapiens
aaagacctttggctt

SEQ ID NO: 72500 - DNA, 15 bp, Homo sapiens
caaagacctttggct

SEQ ID NO: 72501 - DNA, 15 bp, Homo sapiens
ccaaagacctttggc

SEQ ID NO: 72502 - DNA, 15 bp, Homo sapiens
gccaaagacctttgg

SEQ ID NO: 72503 - DNA, 15 bp, Homo sapiens
agccaaagacctttg

SEQ ID NO: 72504 - DNA, 15 bp, Homo sapiens
aagccaaagaccttt

SEQ ID NO: 72505 - DNA, 15 bp, Homo sapiens
aaagccaaagacctt

SEQ ID NO: 72506 - DNA, 15 bp, Homo sapiens
caaagccaaagacct

SEQ ID NO: 72507 - DNA, 15 bp, Homo sapiens
ccaaagccaaagacc

SEQ ID NO: 72508 - DNA, 15 bp, Homo sapiens
tccaaagccaaagac

SEQ ID NO: 72509 - DNA, 15 bp, Homo sapiens
atccaaagccaaaga

SEQ ID NO: 72510 - DNA, 15 bp, Homo sapiens
aatccaaagccaaag

SEQ ID NO: 72511 - DNA, 15 bp, Homo sapiens
aaatccaaagccaaa

SEQ ID NO: 72512 - DNA, 15 bp, Homo sapiens
aaaatccaaagccaa

SEQ ID NO: 72513 - DNA, 15 bp, Homo sapiens
caaaatccaaagcca

SEQ ID NO: 72514 - DNA, 15 bp, Homo sapiens
ccaaaatccaaagcc

SEQ ID NO: 72515 - DNA, 15 bp, Homo sapiens
cccaaaatccaaagc

SEQ ID NO: 72516 - DNA, 15 bp, Homo sapiens
ccccaaaatccaaag

SEQ ID NO: 72517 - DNA, 15 bp, Homo sapiens
cccccaaaatccaaa

SEQ ID NO: 72518 - DNA, 15 bp, Homo sapiens
tcccccaaaatccaa

SEQ ID NO: 72519 - DNA, 15 bp, Homo sapiens
ttcccccaaaatcca

SEQ ID NO: 72520 - DNA, 15 bp, Homo sapiens
cttcccccaaaatcc

SEQ ID NO: 72521 - DNA, 15 bp, Homo sapiens
ccttcccccaaaatc

SEQ ID NO: 72522 - DNA, 15 bp, Homo sapiens
accttcccccaaaat

SEQ ID NO: 72523 - DNA, 15 bp, Homo sapiens
caccttcccccaaaa

SEQ ID NO: 72524 - DNA, 15 bp, Homo sapiens
tcaccttcccccaaa

SEQ ID NO: 72525 - DNA, 15 bp, Homo sapiens
atcaccttcccccaa

SEQ ID NO: 72526 - DNA, 15 bp, Homo sapiens
catcaccttccccca

SEQ ID NO: 72527 - DNA, 15 bp, Homo sapiens
ccatcaccttccccc

SEQ ID NO: 72528 - DNA, 15 bp, Homo sapiens
cccatcaccttcccc

SEQ ID NO: 72529 - DNA, 15 bp, Homo sapiens
ccccatcaccttccc

SEQ ID NO: 72530 - DNA, 15 bp, Homo sapiens
cccccatcaccttcc

SEQ ID NO: 72531 - DNA, 15 bp, Homo sapiens
ccccccatcaccttc

SEQ ID NO: 72532 - DNA, 15 bp, Homo sapiens
tccccccatcacctt

SEQ ID NO: 72533 - DNA, 15 bp, Homo sapiens
ctccccccatcacct

SEQ ID NO: 72534 - DNA, 15 bp, Homo sapiens
cctccccccatcacc

SEQ ID NO: 72535 - DNA, 15 bp, Homo sapiens
acctccccccatcac

SEQ ID NO: 72536 - DNA, 15 bp, Homo sapiens
aacctccccccatca

SEQ ID NO: 72537 - DNA, 15 bp, Homo sapiens
gaacctccccccatc

SEQ ID NO: 72538 - DNA, 15 bp, Homo sapiens
tgaacctccccccat

SEQ ID NO: 72539 - DNA, 15 bp, Homo sapiens
ctgaacctcccccca

SEQ ID NO: 72540 - DNA, 15 bp, Homo sapiens
tctgaacctcccccc

SEQ ID NO: 72541 - DNA, 15 bp, Homo sapiens
gtctgaacctccccc

SEQ ID NO: 72542 - DNA, 15 bp, Homo sapiens
agtctgaacctcccc

SEQ ID NO: 72543 - DNA, 15 bp, Homo sapiens
aagtctgaacctccc

SEQ ID NO: 72544 - DNA, 15 bp, Homo sapiens
gaagtctgaacctcc

SEQ ID NO: 72545 - DNA, 15 bp, Homo sapiens
cgaagtctgaacctc

SEQ ID NO: 72546 - DNA, 15 bp, Homo sapiens
ccgaagtctgaacct

SEQ ID NO: 72547 - DNA, 15 bp, Homo sapiens
cccgaagtctgaacc

SEQ ID NO: 72548 - DNA, 15 bp, Homo sapiens
tcccgaagtctgaac

SEQ ID NO: 72549 - DNA, 15 bp, Homo sapiens
ttcccgaagtctgaa

SEQ ID NO: 72550 - DNA, 15 bp, Homo sapiens
attcccgaagtctga

SEQ ID NO: 72551 - DNA, 15 bp, Homo sapiens
gattcccgaagtctg

SEQ ID NO: 72552 - DNA, 15 bp, Homo sapiens
tgattcccgaagtct

SEQ ID NO: 72553 - DNA, 15 bp, Homo sapiens
ctgattcccgaagtc

SEQ ID NO: 72554 - DNA, 15 bp, Homo sapiens
cctgattcccgaagt

SEQ ID NO: 72555 - DNA, 15 bp, Homo sapiens
ccctgattcccgaag

SEQ ID NO: 72556 - DNA, 15 bp, Homo sapiens
gccctgattcccgaa

SEQ ID NO: 72557 - DNA, 15 bp, Homo sapiens
cgccctgattcccga

SEQ ID NO: 72558 - DNA, 15 bp, Homo sapiens
gcgccctgattcccg

SEQ ID NO: 72559 - DNA, 15 bp, Homo sapiens
cgcgccctgattccc

SEQ ID NO: 72560 - DNA, 15 bp, Homo sapiens
ccgcgccctgattcc

SEQ ID NO: 72561 - DNA, 15 bp, Homo sapiens
tccgcgccctgattc

SEQ ID NO: 72562 - DNA, 15 bp, Homo sapiens
gtccgcgccctgatt

SEQ ID NO: 72563 - DNA, 15 bp, Homo sapiens
cgtccgcgccctgat

SEQ ID NO: 72564 - DNA, 15 bp, Homo sapiens
gcgtccgcgccctga

SEQ ID NO: 72565 - DNA, 15 bp, Homo sapiens
agcgtccgcgccctg

SEQ ID NO: 72566 - DNA, 15 bp, Homo sapiens
cagcgtccgcgccct

SEQ ID NO: 72567 - DNA, 15 bp, Homo sapiens
ccagcgtccgcgccc

SEQ ID NO: 72568 - DNA, 15 bp, Homo sapiens
cccagcgtccgcgcc

SEQ ID NO: 72569 - DNA, 15 bp, Homo sapiens
gcccagcgtccgcgc

SEQ ID NO: 72570 - DNA, 15 bp, Homo sapiens
cgcccagcgtccgcg

SEQ ID NO: 72571 - DNA, 15 bp, Homo sapiens
acgcccagcgtccgc

SEQ ID NO: 72572 - DNA, 15 bp, Homo sapiens
cacgcccagcgtccg

SEQ ID NO: 72573 - DNA, 15 bp, Homo sapiens
ccacgcccagcgtcc

SEQ ID NO: 72574 - DNA, 15 bp, Homo sapiens
tccacgcccagcgtc

SEQ ID NO: 72575 - DNA, 15 bp, Homo sapiens
gtccacgcccagcgt

SEQ ID NO: 72576 - DNA, 15 bp, Homo sapiens
ggtccacgcccagcg

SEQ ID NO: 72577 - DNA, 15 bp, Homo sapiens
gggtccacgcccagc

SEQ ID NO: 72578 - DNA, 15 bp, Homo sapiens
ggggtccacgcccag

SEQ ID NO: 72579 - DNA, 15 bp, Homo sapiens
cggggtccacgccca

SEQ ID NO: 72580 - DNA, 15 bp, Homo sapiens
acggggtccacgccc

SEQ ID NO: 72581 - DNA, 15 bp, Homo sapiens
gacggggtccacgcc

SEQ ID NO: 72582 - DNA, 15 bp, Homo sapiens
tgacggggtccacgc

SEQ ID NO: 72583 - DNA, 15 bp, Homo sapiens
atgacggggtccacg

SEQ ID NO: 72584 - DNA, 15 bp, Homo sapiens
aatgacggggtccac

SEQ ID NO: 72585 - DNA, 15 bp, Homo sapiens
caatgacggggtcca

SEQ ID NO: 72586 - DNA, 15 bp, Homo sapiens
acaatgacggggtcc

SEQ ID NO: 72587 - DNA, 15 bp, Homo sapiens
aacaatgacggggtc

SEQ ID NO: 72588 - DNA, 15 bp, Homo sapiens
gaacaatgacggggt

SEQ ID NO: 72589 - DNA, 15 bp, Homo sapiens
ggaacaatgacgggg

SEQ ID NO: 72590 - DNA, 15 bp, Homo sapiens
gggaacaatgacggg

SEQ ID NO: 72591 - DNA, 15 bp, Homo sapiens
cgggaacaatgacgg

SEQ ID NO: 72592 - DNA, 15 bp, Homo sapiens
ccgggaacaatgacg

SEQ ID NO: 72593 - DNA, 15 bp, Homo sapiens
gccgggaacaatgac

SEQ ID NO: 72594 - DNA, 15 bp, Homo sapiens
agccgggaacaatga

SEQ ID NO: 72595 - DNA, 15 bp, Homo sapiens
tagccgggaacaatg

SEQ ID NO: 72596 - DNA, 15 bp, Homo sapiens
ctagccgggaacaat

SEQ ID NO: 72597 - DNA, 15 bp, Homo sapiens
gctagccgggaacaa

SEQ ID NO: 72598 - DNA, 15 bp, Homo sapiens
agctagccgggaaca

SEQ ID NO: 72599 - DNA, 15 bp, Homo sapiens
gagctagccgggaac

SEQ ID NO: 72600 - DNA, 15 bp, Homo sapiens
agagctagccgggaa

SEQ ID NO: 72601 - DNA, 15 bp, Homo sapiens
aagagctagccggga

SEQ ID NO: 72602 - DNA, 15 bp, Homo sapiens
taagagctagccggg

SEQ ID NO: 72603 - DNA, 15 bp, Homo sapiens
ataagagctagccgg

SEQ ID NO: 72604 - DNA, 15 bp, Homo sapiens
gataagagctagccg

SEQ ID NO: 72605 - DNA, 15 bp, Homo sapiens
agataagagctagcc

SEQ ID NO: 72606 - DNA, 15 bp, Homo sapiens
gagataagagctagc

SEQ ID NO: 72607 - DNA, 15 bp, Homo sapiens
ggagataagagctag

SEQ ID NO: 72608 - DNA, 15 bp, Homo sapiens
gggagataagagcta

SEQ ID NO: 72609 - DNA, 15 bp, Homo sapiens
tgggagataagagct

SEQ ID NO: 72610 - DNA, 15 bp, Homo sapiens
ctgggagataagagc

SEQ ID NO: 72611 - DNA, 15 bp, Homo sapiens
cctgggagataagag

SEQ ID NO: 72612 - DNA, 15 bp, Homo sapiens
tcctgggagataaga

SEQ ID NO: 72613 - DNA, 15 bp, Homo sapiens
ctcctgggagataag

SEQ ID NO: 72614 - DNA, 15 bp, Homo sapiens
gctcctgggagataa

SEQ ID NO: 72615 - DNA, 15 bp, Homo sapiens
tgctcctgggagata

SEQ ID NO: 72616 - DNA, 15 bp, Homo sapiens
ttgctcctgggagat

SEQ ID NO: 72617 - DNA, 15 bp, Homo sapiens
cttgctcctgggaga

SEQ ID NO: 72618 - DNA, 15 bp, Homo sapiens
acttgctcctgggag

SEQ ID NO: 72619 - DNA, 15 bp, Homo sapiens
tacttgctcctggga

SEQ ID NO: 72620 - DNA, 15 bp, Homo sapiens
atacttgctcctggg

SEQ ID NO: 72621 - DNA, 15 bp, Homo sapiens
gatacttgctcctgg

SEQ ID NO: 72622 - DNA, 15 bp, Homo sapiens
ggatacttgctcctg

SEQ ID NO: 72623 - DNA, 15 bp, Homo sapiens
aggatacttgctcct

SEQ ID NO: 72624 - DNA, 15 bp, Homo sapiens
caggatacttgctcc

SEQ ID NO: 72625 - DNA, 15 bp, Homo sapiens
acaggatacttgctc

SEQ ID NO: 72626 - DNA, 15 bp, Homo sapiens
cacaggatacttgct

SEQ ID NO: 72627 - DNA, 15 bp, Homo sapiens
acacaggatacttgc

SEQ ID NO: 72628 - DNA, 15 bp, Homo sapiens
cacacaggatacttg

SEQ ID NO: 72629 - DNA, 15 bp, Homo sapiens
gcacacaggatactt

SEQ ID NO: 72630 - DNA, 15 bp, Homo sapiens
cgcacacaggatact

SEQ ID NO: 72631 - DNA, 15 bp, Homo sapiens
gcgcacacaggatac

SEQ ID NO: 72632 - DNA, 15 bp, Homo sapiens
tgcgcacacaggata

SEQ ID NO: 72633 - DNA, 15 bp, Homo sapiens
ctgcgcacacaggat

SEQ ID NO: 72634 - DNA, 15 bp, Homo sapiens
gctgcgcacacagga

SEQ ID NO: 72635 - DNA, 15 bp, Homo sapiens
cgctgcgcacacagg

SEQ ID NO: 72636 - DNA, 15 bp, Homo sapiens
gcgctgcgcacacag

SEQ ID NO: 72637 - DNA, 15 bp, Homo sapiens
tgcgctgcgcacaca

SEQ ID NO: 72638 - DNA, 15 bp, Homo sapiens
atgcgctgcgcacac

SEQ ID NO: 72639 - DNA, 15 bp, Homo sapiens
catgcgctgcgcaca

SEQ ID NO: 72640 - DNA, 15 bp, Homo sapiens
tcatgcgctgcgcac

SEQ ID NO: 72641 - DNA, 15 bp, Homo sapiens
ttcatgcgctgcgca

SEQ ID NO: 72642 - DNA, 15 bp, Homo sapiens
attcatgcgctgcgc

SEQ ID NO: 72643 - DNA, 15 bp, Homo sapiens
cattcatgcgctgcg

SEQ ID NO: 72644 - DNA, 15 bp, Homo sapiens
acattcatgcgctgc

SEQ ID NO: 72645 - DNA, 15 bp, Homo sapiens
cacattcatgcgctg

SEQ ID NO: 72646 - DNA, 15 bp, Homo sapiens
acacattcatgcgct

SEQ ID NO: 72647 - DNA, 15 bp, Homo sapiens
gacacattcatgcgc

SEQ ID NO: 72648 - DNA, 15 bp, Homo sapiens
agacacattcatgcg

SEQ ID NO: 72649 - DNA, 15 bp, Homo sapiens
cagacacattcatgc

SEQ ID NO: 72650 - DNA, 15 bp, Homo sapiens
ccagacacattcatg

SEQ ID NO: 72651 - DNA, 15 bp, Homo sapiens
cccagacacattcat

SEQ ID NO: 72652 - DNA, 15 bp, Homo sapiens
gcccagacacattca

SEQ ID NO: 72653 - DNA, 15 bp, Homo sapiens
tgcccagacacattc

SEQ ID NO: 72654 - DNA, 15 bp, Homo sapiens
atgcccagacacatt

SEQ ID NO: 72655 - DNA, 15 bp, Homo sapiens
gatgcccagacacat

SEQ ID NO: 72656 - DNA, 15 bp, Homo sapiens
agatgcccagacaca

SEQ ID NO: 72657 - DNA, 15 bp, Homo sapiens
gagatgcccagacac

SEQ ID NO: 72658 - DNA, 15 bp, Homo sapiens
ggagatgcccagaca

SEQ ID NO: 72659 - DNA, 15 bp, Homo sapiens
cggagatgcccagac

SEQ ID NO: 72660 - DNA, 15 bp, Homo sapiens
gcggagatgcccaga

SEQ ID NO: 72661 - DNA, 15 bp, Homo sapiens
cgcggagatgcccag

SEQ ID NO: 72662 - DNA, 15 bp, Homo sapiens
acgcggagatgccca

SEQ ID NO: 72663 - DNA, 15 bp, Homo sapiens
tacgcggagatgccc

SEQ ID NO: 72664 - DNA, 15 bp, Homo sapiens
atacgcggagatgcc

SEQ ID NO: 72665 - DNA, 15 bp, Homo sapiens
tatacgcggagatgc

SEQ ID NO: 72666 - DNA, 15 bp, Homo sapiens
atatacgcggagatg

SEQ ID NO: 72667 - DNA, 15 bp, Homo sapiens
aatatacgcggagat

SEQ ID NO: 72668 - DNA, 15 bp, Homo sapiens
aaatatacgcggaga

SEQ ID NO: 72669 - DNA, 15 bp, Homo sapiens
taaatatacgcggag

SEQ ID NO: 72670 - DNA, 15 bp, Homo sapiens
ataaatatacgcgga

SEQ ID NO: 72671 - DNA, 15 bp, Homo sapiens
tataaatatacgcgg

SEQ ID NO: 72672 - DNA, 15 bp, Homo sapiens
atataaatatacgcg

SEQ ID NO: 72673 - DNA, 15 bp, Homo sapiens
tatataaatatacgc

SEQ ID NO: 72674 - DNA, 15 bp, Homo sapiens
ctatataaatatacg

SEQ ID NO: 72675 - DNA, 15 bp, Homo sapiens
actatataaatatac

SEQ ID NO: 72676 - DNA, 15 bp, Homo sapiens
cactatataaatata

SEQ ID NO: 72677 - DNA, 15 bp, Homo sapiens
acactatataaatat

SEQ ID NO: 72678 - DNA, 15 bp, Homo sapiens
cacactatataaata

SEQ ID NO: 72679 - DNA, 15 bp, Homo sapiens
acacactatataaat

SEQ ID NO: 72680 - DNA, 15 bp, Homo sapiens
cacacactatataaa

SEQ ID NO: 72681 - DNA, 15 bp, Homo sapiens
tcacacactatataa

SEQ ID NO: 72682 - DNA, 15 bp, Homo sapiens
atcacacactatata

SEQ ID NO: 72683 - DNA, 15 bp, Homo sapiens
catcacacactatat

SEQ ID NO: 72684 - DNA, 15 bp, Homo sapiens
gcatcacacactata

SEQ ID NO: 72685 - DNA, 15 bp, Homo sapiens
cgcatcacacactat

SEQ ID NO: 72686 - DNA, 15 bp, Homo sapiens
tcgcatcacacacta

SEQ ID NO: 72687 - DNA, 15 bp, Homo sapiens
ttcgcatcacacact

SEQ ID NO: 72688 - DNA, 15 bp, Homo sapiens
tttcgcatcacacac

SEQ ID NO: 72689 - DNA, 15 bp, Homo sapiens
ttttcgcatcacaca

SEQ ID NO: 72690 - DNA, 15 bp, Homo sapiens
cttttcgcatcacac

SEQ ID NO: 72691 - DNA, 15 bp, Homo sapiens
gcttttcgcatcaca

SEQ ID NO: 72692 - DNA, 15 bp, Homo sapiens
tgcttttcgcatcac

SEQ ID NO: 72693 - DNA, 15 bp, Homo sapiens
ctgcttttcgcatca

SEQ ID NO: 72694 - DNA, 15 bp, Homo sapiens
cctgcttttcgcatc

SEQ ID NO: 72695 - DNA, 15 bp, Homo sapiens
tcctgcttttcgcat

SEQ ID NO: 72696 - DNA, 15 bp, Homo sapiens
gtcctgcttttcgca

SEQ ID NO: 72697 - DNA, 15 bp, Homo sapiens
ggtcctgcttttcgc

SEQ ID NO: 72698 - DNA, 15 bp, Homo sapiens
tggtcctgcttttcg

SEQ ID NO: 72699 - DNA, 15 bp, Homo sapiens
ctggtcctgcttttc

SEQ ID NO: 72700 - DNA, 15 bp, Homo sapiens
gctggtcctgctttt

SEQ ID NO: 72701 - DNA, 15 bp, Homo sapiens
tgctggtcctgcttt

SEQ ID NO: 72702 - DNA, 15 bp, Homo sapiens
ctgctggtcctgctt

SEQ ID NO: 72703 - DNA, 15 bp, Homo sapiens
cctgctggtcctgct

SEQ ID NO: 72704 - DNA, 15 bp, Homo sapiens
ccctgctggtcctgc

SEQ ID NO: 72705 - DNA, 15 bp, Homo sapiens
cccctgctggtcctg

SEQ ID NO: 72706 - DNA, 15 bp, Homo sapiens
tcccctgctggtcct

SEQ ID NO: 72707 - DNA, 15 bp, Homo sapiens
ctcccctgctggtcc

SEQ ID NO: 72708 - DNA, 15 bp, Homo sapiens
cctcccctgctggtc

SEQ ID NO: 72709 - DNA, 15 bp, Homo sapiens
tcctcccctgctggt

SEQ ID NO: 72710 - DNA, 15 bp, Homo sapiens
ttcctcccctgctgg

SEQ ID NO: 72711 - DNA, 15 bp, Homo sapiens
cttcctcccctgctg

SEQ ID NO: 72712 - DNA, 15 bp, Homo sapiens
tcttcctcccctgct

SEQ ID NO: 72713 - DNA, 15 bp, Homo sapiens
ctcttcctcccctgc

SEQ ID NO: 72714 - DNA, 15 bp, Homo sapiens
cctcttcctcccctg

SEQ ID NO: 72715 - DNA, 15 bp, Homo sapiens
ccctcttcctcccct

SEQ ID NO: 72716 - DNA, 15 bp, Homo sapiens
cccctcttcctcccc

SEQ ID NO: 72717 - DNA, 15 bp, Homo sapiens
ccccctcttcctccc

SEQ ID NO: 72718 - DNA, 15 bp, Homo sapiens
accccctcttcctcc

SEQ ID NO: 72719 - DNA, 15 bp, Homo sapiens
caccccctcttcctc

SEQ ID NO: 72720 - DNA, 15 bp, Homo sapiens
acaccccctcttcct

SEQ ID NO: 72721 - DNA, 15 bp, Homo sapiens
cacaccccctcttcc

SEQ ID NO: 72722 - DNA, 15 bp, Homo sapiens
ccacaccccctcttc

SEQ ID NO: 72723 - DNA, 15 bp, Homo sapiens
cccacaccccctctt

SEQ ID NO: 72724 - DNA, 15 bp, Homo sapiens
ccccacaccccctct

SEQ ID NO: 72725 - DNA, 15 bp, Homo sapiens
cccccacaccccctc

SEQ ID NO: 72726 - DNA, 15 bp, Homo sapiens
ccccccacaccccct

SEQ ID NO: 72727 - DNA, 15 bp, Homo sapiens
cccccccacaccccc

SEQ ID NO: 72728 - DNA, 15 bp, Homo sapiens
ccccccccacacccc

SEQ ID NO: 72729 - DNA, 15 bp, Homo sapiens
tccccccccacaccc

SEQ ID NO: 72730 - DNA, 15 bp, Homo sapiens
ctccccccccacacc

SEQ ID NO: 72731 - DNA, 15 bp, Homo sapiens
cctccccccccacac

SEQ ID NO: 72732 - DNA, 15 bp, Homo sapiens
ccctccccccccaca

SEQ ID NO: 72733 - DNA, 15 bp, Homo sapiens
tccctccccccccac

SEQ ID NO: 72734 - DNA, 15 bp, Homo sapiens
ttccctcccccccca

SEQ ID NO: 72735 - DNA, 15 bp, Homo sapiens
cttccctcccccccc

SEQ ID NO: 72736 - DNA, 15 bp, Homo sapiens
tcttccctccccccc

SEQ ID NO: 72737 - DNA, 15 bp, Homo sapiens
gtcttccctcccccc

SEQ ID NO: 72738 - DNA, 15 bp, Homo sapiens
cgtcttccctccccc

SEQ ID NO: 72739 - DNA, 15 bp, Homo sapiens
tcgtcttccctcccc

SEQ ID NO: 72740 - DNA, 15 bp, Homo sapiens
ctcgtcttccctccc

SEQ ID NO: 72741 - DNA, 15 bp, Homo sapiens
cctcgtcttccctcc

SEQ ID NO: 72742 - DNA, 15 bp, Homo sapiens
ccctcgtcttccctc

SEQ ID NO: 72743 - DNA, 15 bp, Homo sapiens
tccctcgtcttccct

SEQ ID NO: 72744 - DNA, 15 bp, Homo sapiens
ctccctcgtcttccc

SEQ ID NO: 72745 - DNA, 15 bp, Homo sapiens
tctccctcgtcttcc

SEQ ID NO: 72746 - DNA, 15 bp, Homo sapiens
ctctccctcgtcttc

SEQ ID NO: 72747 - DNA, 15 bp, Homo sapiens
gctctccctcgtctt

SEQ ID NO: 72748 - DNA, 15 bp, Homo sapiens
tgctctccctcgtct

SEQ ID NO: 72749 - DNA, 15 bp, Homo sapiens
ctgctctccctcgtc

SEQ ID NO: 72750 - DNA, 15 bp, Homo sapiens
tctgctctccctcgt

SEQ ID NO: 72751 - DNA, 15 bp, Homo sapiens
ctctgctctccctcg

SEQ ID NO: 72752 - DNA, 15 bp, Homo sapiens
cctctgctctccctc

SEQ ID NO: 72753 - DNA, 15 bp, Homo sapiens
ccctctgctctccct

SEQ ID NO: 72754 - DNA, 15 bp, Homo sapiens
cccctctgctctccc

SEQ ID NO: 72755 - DNA, 15 bp, Homo sapiens
tcccctctgctctcc

SEQ ID NO: 72756 - DNA, 15 bp, Homo sapiens
ctcccctctgctctc

SEQ ID NO: 72757 - DNA, 15 bp, Homo sapiens
tctcccctctgctct

SEQ ID NO: 72758 - DNA, 15 bp, Homo sapiens
ctctcccctctgctc

SEQ ID NO: 72759 - DNA, 15 bp, Homo sapiens
tctctcccctctgct

SEQ ID NO: 72760 - DNA, 15 bp, Homo sapiens
ttctctcccctctgc

SEQ ID NO: 72761 - DNA, 15 bp, Homo sapiens
cttctctcccctctg

SEQ ID NO: 72762 - DNA, 15 bp, Homo sapiens
tcttctctcccctct

SEQ ID NO: 72763 - DNA, 15 bp, Homo sapiens
ctcttctctcccctc

SEQ ID NO: 72764 - DNA, 15 bp, Homo sapiens
tctcttctctcccct

SEQ ID NO: 72765 - DNA, 15 bp, Homo sapiens
ctctcttctctcccc

SEQ ID NO: 72766 - DNA, 15 bp, Homo sapiens
tctctcttctctccc

SEQ ID NO: 72767 - DNA, 15 bp, Homo sapiens
ctctctcttctctcc

SEQ ID NO: 72768 - DNA, 15 bp, Homo sapiens
cctctctcttctctc

SEQ ID NO: 72769 - DNA, 15 bp, Homo sapiens
tcctctctcttctct

SEQ ID NO: 72770 - DNA, 15 bp, Homo sapiens
ctcctctctcttctc

SEQ ID NO: 72771 - DNA, 15 bp, Homo sapiens
tctcctctctcttct

SEQ ID NO: 72772 - DNA, 15 bp, Homo sapiens
ctctcctctctcttc

SEQ ID NO: 72773 - DNA, 15 bp, Homo sapiens
gctctcctctctctt

SEQ ID NO: 72774 - DNA, 15 bp, Homo sapiens
agctctcctctctct

SEQ ID NO: 72775 - DNA, 15 bp, Homo sapiens
gagctctcctctctc

SEQ ID NO: 72776 - DNA, 15 bp, Homo sapiens
cgagctctcctctct

SEQ ID NO: 72777 - DNA, 15 bp, Homo sapiens
tcgagctctcctctc

SEQ ID NO: 72778 - DNA, 15 bp, Homo sapiens
ctcgagctctcctct

SEQ ID NO: 72779 - DNA, 15 bp, Homo sapiens
cctcgagctctcctc

SEQ ID NO: 72780 - DNA, 15 bp, Homo sapiens
gcctcgagctctcct

SEQ ID NO: 72781 - DNA, 15 bp, Homo sapiens
cgcctcgagctctcc

SEQ ID NO: 72782 - DNA, 15 bp, Homo sapiens
tcgcctcgagctctc

SEQ ID NO: 72783 - DNA, 15 bp, Homo sapiens
ctcgcctcgagctct

SEQ ID NO: 72784 - DNA, 15 bp, Homo sapiens
tctcgcctcgagctc

SEQ ID NO: 72785 - DNA, 15 bp, Homo sapiens
ctctcgcctcgagct

SEQ ID NO: 72786 - DNA, 15 bp, Homo sapiens
tctctcgcctcgagc

SEQ ID NO: 72787 - DNA, 15 bp, Homo sapiens
ctctctcgcctcgag

SEQ ID NO: 72788 - DNA, 15 bp, Homo sapiens
tctctctcgcctcga

SEQ ID NO: 72789 - DNA, 15 bp, Homo sapiens
ctctctctcgcctcg

SEQ ID NO: 72790 - DNA, 15 bp, Homo sapiens
tctctctctcgcctc

SEQ ID NO: 72791 - DNA, 15 bp, Homo sapiens
ctctctctctcgcct

SEQ ID NO: 72792 - DNA, 15 bp, Homo sapiens
tctctctctctcgcc

SEQ ID NO: 72793 - DNA, 15 bp, Homo sapiens
ctctctctctctcgc

SEQ ID NO: 72794 - DNA, 15 bp, Homo sapiens
tctctctctctctcg

SEQ ID NO: 72795 - DNA, 15 bp, Homo sapiens
ctctctctctctctc

SEQ ID NO: 72796 - DNA, 15 bp, Homo sapiens
tctctctctctctct

SEQ ID NO: 72797 - DNA, 15 bp, Homo sapiens
ctccactttgggggc

SEQ ID NO: 72798 - DNA, 15 bp, Homo sapiens
gctccactttggggg

SEQ ID NO: 72799 - DNA, 15 bp, Homo sapiens
ggctccactttgggg

SEQ ID NO: 72800 - DNA, 15 bp, Homo sapiens
gggctccactttggg

SEQ ID NO: 72801 - DNA, 15 bp, Homo sapiens
ggggctccactttgg

SEQ ID NO: 72802 - DNA, 15 bp, Homo sapiens
cggggctccactttg

SEQ ID NO: 72803 - DNA, 15 bp, Homo sapiens
ccggggctccacttt

SEQ ID NO: 72804 - DNA, 15 bp, Homo sapiens
gccggggctccactt

SEQ ID NO: 72805 - DNA, 15 bp, Homo sapiens
ggccggggctccact

SEQ ID NO: 72806 - DNA, 15 bp, Homo sapiens
gggccggggctccac

SEQ ID NO: 72807 - DNA, 15 bp, Homo sapiens
ggggccggggctcca

SEQ ID NO: 72808 - DNA, 15 bp, Homo sapiens
gggggccggggctcc

SEQ ID NO: 72809 - DNA, 15 bp, Homo sapiens
ggggggccggggctc

SEQ ID NO: 72810 - DNA, 15 bp, Homo sapiens
aggggggccggggct

SEQ ID NO: 72811 - DNA, 15 bp, Homo sapiens
gaggggggccggggc

SEQ ID NO: 72812 - DNA, 15 bp, Homo sapiens
ggaggggggccgggg

SEQ ID NO: 72813 - DNA, 15 bp, Homo sapiens
gggaggggggccggg

SEQ ID NO: 72814 - DNA, 15 bp, Homo sapiens
tgggaggggggccgg

SEQ ID NO: 72815 - DNA, 15 bp, Homo sapiens
gtgggaggggggccg

SEQ ID NO: 72816 - DNA, 15 bp, Homo sapiens
ggtgggaggggggcc

SEQ ID NO: 72817 - DNA, 15 bp, Homo sapiens
aggtgggaggggggc

SEQ ID NO: 72818 - DNA, 15 bp, Homo sapiens
gaggtgggagggggg

SEQ ID NO: 72819 - DNA, 15 bp, Homo sapiens
cgaggtgggaggggg

SEQ ID NO: 72820 - DNA, 15 bp, Homo sapiens
gcgaggtgggagggg

SEQ ID NO: 72821 - DNA, 15 bp, Homo sapiens
agcgaggtgggaggg

SEQ ID NO: 72822 - DNA, 15 bp, Homo sapiens
cagcgaggtgggagg

SEQ ID NO: 72823 - DNA, 15 bp, Homo sapiens
gcagcgaggtgggag

SEQ ID NO: 72824 - DNA, 15 bp, Homo sapiens
ggcagcgaggtggga

SEQ ID NO: 72825 - DNA, 15 bp, Homo sapiens
gggcagcgaggtggg

SEQ ID NO: 72826 - DNA, 15 bp, Homo sapiens
cgggcagcgaggtgg

SEQ ID NO: 72827 - DNA, 15 bp, Homo sapiens
gcgggcagcgaggtg

SEQ ID NO: 72828 - DNA, 15 bp, Homo sapiens
ggcgggcagcgaggt

SEQ ID NO: 72829 - DNA, 15 bp, Homo sapiens
cggcgggcagcgagg

SEQ ID NO: 72830 - DNA, 15 bp, Homo sapiens
ccggcgggcagcgag

SEQ ID NO: 72831 - DNA, 15 bp, Homo sapiens
cccggcgggcagcga

SEQ ID NO: 72832 - DNA, 15 bp, Homo sapiens
ccccggcgggcagcg

SEQ ID NO: 72833 - DNA, 15 bp, Homo sapiens
gccccggcgggcagc

SEQ ID NO: 72834 - DNA, 15 bp, Homo sapiens
agccccggcgggcag

SEQ ID NO: 72835 - DNA, 15 bp, Homo sapiens
cagccccggcgggca

SEQ ID NO: 72836 - DNA, 15 bp, Homo sapiens
gcagccccggcgggc

SEQ ID NO: 72837 - DNA, 15 bp, Homo sapiens
tgcagccccggcggg

SEQ ID NO: 72838 - DNA, 15 bp, Homo sapiens
ctgcagccccggcgg

SEQ ID NO: 72839 - DNA, 15 bp, Homo sapiens
cctgcagccccggcg

SEQ ID NO: 72840 - DNA, 15 bp, Homo sapiens
tcctgcagccccggc

SEQ ID NO: 72841 - DNA, 15 bp, Homo sapiens
ctcctgcagccccgg

SEQ ID NO: 72842 - DNA, 15 bp, Homo sapiens
cctcctgcagccccg

SEQ ID NO: 72843 - DNA, 15 bp, Homo sapiens
ccctcctgcagcccc

SEQ ID NO: 72844 - DNA, 15 bp, Homo sapiens
cccctcctgcagccc

SEQ ID NO: 72845 - DNA, 15 bp, Homo sapiens
tcccctcctgcagcc

SEQ ID NO: 72846 - DNA, 15 bp, Homo sapiens
gtcccctcctgcagc

SEQ ID NO: 72847 - DNA, 15 bp, Homo sapiens
cgtcccctcctgcag

SEQ ID NO: 72848 - DNA, 15 bp, Homo sapiens
ccgtcccctcctgca

SEQ ID NO: 72849 - DNA, 15 bp, Homo sapiens
gccgtcccctcctgc

SEQ ID NO: 72850 - DNA, 15 bp, Homo sapiens
cgccgtcccctcctg

SEQ ID NO: 72851 - DNA, 15 bp, Homo sapiens
ccgccgtcccctcct

SEQ ID NO: 72852 - DNA, 15 bp, Homo sapiens
cccgccgtcccctcc

SEQ ID NO: 72853 - DNA, 15 bp, Homo sapiens
tcccgccgtcccctc

SEQ ID NO: 72854 - DNA, 15 bp, Homo sapiens
ttcccgccgtcccct

SEQ ID NO: 72855 - DNA, 15 bp, Homo sapiens
tttcccgccgtcccc

SEQ ID NO: 72856 - DNA, 15 bp, Homo sapiens
gtttcccgccgtccc

SEQ ID NO: 72857 - DNA, 15 bp, Homo sapiens
ggtttcccgccgtcc

SEQ ID NO: 72858 - DNA, 15 bp, Homo sapiens
cggtttcccgccgtc

SEQ ID NO: 72859 - DNA, 15 bp, Homo sapiens
ccggtttcccgccgt

SEQ ID NO: 72860 - DNA, 15 bp, Homo sapiens
cccggtttcccgccg

SEQ ID NO: 72861 - DNA, 15 bp, Homo sapiens
ccccggtttcccgcc

SEQ ID NO: 72862 - DNA, 15 bp, Homo sapiens
cccccggtttcccgc

SEQ ID NO: 72863 - DNA, 15 bp, Homo sapiens
tcccccggtttcccg

SEQ ID NO: 72864 - DNA, 15 bp, Homo sapiens
gtcccccggtttccc

SEQ ID NO: 72865 - DNA, 15 bp, Homo sapiens
ggtcccccggtttcc

SEQ ID NO: 72866 - DNA, 15 bp, Homo sapiens
gggtcccccggtttc

SEQ ID NO: 72867 - DNA, 15 bp, Homo sapiens
ggggtcccccggttt

SEQ ID NO: 72868 - DNA, 15 bp, Homo sapiens
tggggtcccccggtt

SEQ ID NO: 72869 - DNA, 15 bp, Homo sapiens
ctggggtcccccggt

SEQ ID NO: 72870 - DNA, 15 bp, Homo sapiens
cctggggtcccccgg

SEQ ID NO: 72871 - DNA, 15 bp, Homo sapiens
ccctggggtcccccg

SEQ ID NO: 72872 - DNA, 15 bp, Homo sapiens
accctggggtccccc

SEQ ID NO: 72873 - DNA, 15 bp, Homo sapiens
taccctggggtcccc

SEQ ID NO: 72874 - DNA, 15 bp, Homo sapiens
gtaccctggggtccc

SEQ ID NO: 72875 - DNA, 15 bp, Homo sapiens
cgtaccctggggtcc

SEQ ID NO: 72876 - DNA, 15 bp, Homo sapiens
ccgtaccctggggtc

SEQ ID NO: 72877 - DNA, 15 bp, Homo sapiens
tccgtaccctggggt

SEQ ID NO: 72878 - DNA, 15 bp, Homo sapiens
ttccgtaccctgggg

SEQ ID NO: 72879 - DNA, 15 bp, Homo sapiens
gttccgtaccctggg

SEQ ID NO: 72880 - DNA, 15 bp, Homo sapiens
cgttccgtaccctgg

SEQ ID NO: 72881 - DNA, 15 bp, Homo sapiens
ccgttccgtaccctg

SEQ ID NO: 72882 - DNA, 15 bp, Homo sapiens
tccgttccgtaccct

SEQ ID NO: 72883 - DNA, 15 bp, Homo sapiens
ctccgttccgtaccc

SEQ ID NO: 72884 - DNA, 15 bp, Homo sapiens
actccgttccgtacc

SEQ ID NO: 72885 - DNA, 15 bp, Homo sapiens
gactccgttccgtac

SEQ ID NO: 72886 - DNA, 15 bp, Homo sapiens
tgactccgttccgta

SEQ ID NO: 72887 - DNA, 15 bp, Homo sapiens
ttgactccgttccgt

SEQ ID NO: 72888 - DNA, 15 bp, Homo sapiens
cttgactccgttccg

SEQ ID NO: 72889 - DNA, 15 bp, Homo sapiens
ccttgactccgttcc

SEQ ID NO: 72890 - DNA, 15 bp, Homo sapiens
cccttgactccgttc

SEQ ID NO: 72891 - DNA, 15 bp, Homo sapiens
gcccttgactccgtt

SEQ ID NO: 72892 - DNA, 15 bp, Homo sapiens
cgcccttgactccgt

SEQ ID NO: 72893 - DNA, 15 bp, Homo sapiens
tcgcccttgactccg

SEQ ID NO: 72894 - DNA, 15 bp, Homo sapiens
ctcgcccttgactcc

SEQ ID NO: 72895 - DNA, 15 bp, Homo sapiens
tctcgcccttgactc

SEQ ID NO: 72896 - DNA, 15 bp, Homo sapiens
ctctcgcccttgact

SEQ ID NO: 72897 - DNA, 15 bp, Homo sapiens
tctctcgcccttgac

SEQ ID NO: 72898 - DNA, 15 bp, Homo sapiens
gtctctcgcccttga

SEQ ID NO: 72899 - DNA, 15 bp, Homo sapiens
ggtctctcgcccttg

SEQ ID NO: 72900 - DNA, 15 bp, Homo sapiens
aggtctctcgccctt

SEQ ID NO: 72901 - DNA, 15 bp, Homo sapiens
gaggtctctcgccct

SEQ ID NO: 72902 - DNA, 15 bp, Homo sapiens
cgaggtctctcgccc

SEQ ID NO: 72903 - DNA, 15 bp, Homo sapiens
ccgaggtctctcgcc

SEQ ID NO: 72904 - DNA, 15 bp, Homo sapiens
cccgaggtctctcgc

SEQ ID NO: 72905 - DNA, 15 bp, Homo sapiens
ccccgaggtctctcg

SEQ ID NO: 72906 - DNA, 15 bp, Homo sapiens
accccgaggtctctc

SEQ ID NO: 72907 - DNA, 15 bp, Homo sapiens
gaccccgaggtctct

SEQ ID NO: 72908 - DNA, 15 bp, Homo sapiens
ggaccccgaggtctc

SEQ ID NO: 72909 - DNA, 15 bp, Homo sapiens
tggaccccgaggtct

SEQ ID NO: 72910 - DNA, 15 bp, Homo sapiens
gtggaccccgaggtc

SEQ ID NO: 72911 - DNA, 15 bp, Homo sapiens
ggtggaccccgaggt

SEQ ID NO: 72912 - DNA, 15 bp, Homo sapiens
tggtggaccccgagg

SEQ ID NO: 72913 - DNA, 15 bp, Homo sapiens
gtggtggaccccgag

SEQ ID NO: 72914 - DNA, 15 bp, Homo sapiens
agtggtggaccccga

SEQ ID NO: 72915 - DNA, 15 bp, Homo sapiens
gagtggtggaccccg

SEQ ID NO: 72916 - DNA, 15 bp, Homo sapiens
ggagtggtggacccc

SEQ ID NO: 72917 - DNA, 15 bp, Homo sapiens
gggagtggtggaccc

SEQ ID NO: 72918 - DNA, 15 bp, Homo sapiens
tgggagtggtggacc

SEQ ID NO: 72919 - DNA, 15 bp, Homo sapiens
gtgggagtggtggac

SEQ ID NO: 72920 - DNA, 15 bp, Homo sapiens
ggtgggagtggtgga

SEQ ID NO: 72921 - DNA, 15 bp, Homo sapiens
cggtgggagtggtgg

SEQ ID NO: 72922 - DNA, 15 bp, Homo sapiens
tcggtgggagtggtg

SEQ ID NO: 72923 - DNA, 15 bp, Homo sapiens
gtcggtgggagtggt

SEQ ID NO: 72924 - DNA, 15 bp, Homo sapiens
tgtcggtgggagtgg

SEQ ID NO: 72925 - DNA, 15 bp, Homo sapiens
gtgtcggtgggagtg

SEQ ID NO: 72926 - DNA, 15 bp, Homo sapiens
ggtgtcggtgggagt

SEQ ID NO: 72927 - DNA, 15 bp, Homo sapiens
gggtgtcggtgggag

SEQ ID NO: 72928 - DNA, 15 bp, Homo sapiens
cgggtgtcggtggga

SEQ ID NO: 72929 - DNA, 15 bp, Homo sapiens
ccgggtgtcggtggg

SEQ ID NO: 72930 - DNA, 15 bp, Homo sapiens
cccgggtgtcggtgg

SEQ ID NO: 72931 - DNA, 15 bp, Homo sapiens
ccccgggtgtcggtg

SEQ ID NO: 72932 - DNA, 15 bp, Homo sapiens
gccccgggtgtcggt

SEQ ID NO: 72933 - DNA, 15 bp, Homo sapiens
agccccgggtgtcgg

SEQ ID NO: 72934 - DNA, 15 bp, Homo sapiens
gagccccgggtgtcg

SEQ ID NO: 72935 - DNA, 15 bp, Homo sapiens
ggagccccgggtgtc

SEQ ID NO: 72936 - DNA, 15 bp, Homo sapiens
gggagccccgggtgt

SEQ ID NO: 72937 - DNA, 15 bp, Homo sapiens
cgggagccccgggtg

SEQ ID NO: 72938 - DNA, 15 bp, Homo sapiens
acgggagccccgggt

SEQ ID NO: 72939 - DNA, 15 bp, Homo sapiens
cacgggagccccggg

SEQ ID NO: 72940 - DNA, 15 bp, Homo sapiens
ccacgggagccccgg

SEQ ID NO: 72941 - DNA, 15 bp, Homo sapiens
gccacgggagccccg

SEQ ID NO: 72942 - DNA, 15 bp, Homo sapiens
ggccacgggagcccc

SEQ ID NO: 72943 - DNA, 15 bp, Homo sapiens
gggccacgggagccc

SEQ ID NO: 72944 - DNA, 15 bp, Homo sapiens
ggggccacgggagcc

SEQ ID NO: 72945 - DNA, 15 bp, Homo sapiens
tggggccacgggagc

SEQ ID NO: 72946 - DNA, 15 bp, Homo sapiens
ctggggccacgggag

SEQ ID NO: 72947 - DNA, 15 bp, Homo sapiens
gctggggccacggga

SEQ ID NO: 72948 - DNA, 15 bp, Homo sapiens
cgctggggccacggg

SEQ ID NO: 72949 - DNA, 15 bp, Homo sapiens
gcgctggggccacgg

SEQ ID NO: 72950 - DNA, 15 bp, Homo sapiens
agcgctggggccacg

SEQ ID NO: 72951 - DNA, 15 bp, Homo sapiens
tagcgctggggccac

SEQ ID NO: 72952 - DNA, 15 bp, Homo sapiens
ctagcgctggggcca

SEQ ID NO: 72953 - DNA, 15 bp, Homo sapiens
cctagcgctggggcc

SEQ ID NO: 72954 - DNA, 15 bp, Homo sapiens
gcctagcgctggggc

SEQ ID NO: 72955 - DNA, 15 bp, Homo sapiens
tgcctagcgctgggg

SEQ ID NO: 72956 - DNA, 15 bp, Homo sapiens
gtgcctagcgctggg

SEQ ID NO: 72957 - DNA, 15 bp, Homo sapiens
agtgcctagcgctgg

SEQ ID NO: 72958 - DNA, 15 bp, Homo sapiens
cagtgcctagcgctg

SEQ ID NO: 72959 - DNA, 15 bp, Homo sapiens
ccagtgcctagcgct

SEQ ID NO: 72960 - DNA, 15 bp, Homo sapiens
cccagtgcctagcgc

SEQ ID NO: 72961 - DNA, 15 bp, Homo sapiens
gcccagtgcctagcg

SEQ ID NO: 72962 - DNA, 15 bp, Homo sapiens
agcccagtgcctagc

SEQ ID NO: 72963 - DNA, 15 bp, Homo sapiens
aagcccagtgcctag

SEQ ID NO: 72964 - DNA, 15 bp, Homo sapiens
gaagcccagtgccta

SEQ ID NO: 72965 - DNA, 15 bp, Homo sapiens
ggaagcccagtgcct

SEQ ID NO: 72966 - DNA, 15 bp, Homo sapiens
aggaagcccagtgcc

SEQ ID NO: 72967 - DNA, 15 bp, Homo sapiens
gaggaagcccagtgc

SEQ ID NO: 72968 - DNA, 15 bp, Homo sapiens
agaggaagcccagtg

SEQ ID NO: 72969 - DNA, 15 bp, Homo sapiens
gagaggaagcccagt

SEQ ID NO: 72970 - DNA, 15 bp, Homo sapiens
ggagaggaagcccag

SEQ ID NO: 72971 - DNA, 15 bp, Homo sapiens
cggagaggaagccca

SEQ ID NO: 72972 - DNA, 15 bp, Homo sapiens
gcggagaggaagccc

SEQ ID NO: 72973 - DNA, 15 bp, Homo sapiens
tgcggagaggaagcc

SEQ ID NO: 72974 - DNA, 15 bp, Homo sapiens
ctgcggagaggaagc

SEQ ID NO: 72975 - DNA, 15 bp, Homo sapiens
tctgcggagaggaag

SEQ ID NO: 72976 - DNA, 15 bp, Homo sapiens
ctctgcggagaggaa

SEQ ID NO: 72977 - DNA, 15 bp, Homo sapiens
cctctgcggagagga

SEQ ID NO: 72978 - DNA, 15 bp, Homo sapiens
gcctctgcggagagg

SEQ ID NO: 72979 - DNA, 15 bp, Homo sapiens
cgcctctgcggagag

SEQ ID NO: 72980 - DNA, 15 bp, Homo sapiens
ccgcctctgcggaga

SEQ ID NO: 72981 - DNA, 15 bp, Homo sapiens
tccgcctctgcggag

SEQ ID NO: 72982 - DNA, 15 bp, Homo sapiens
ttccgcctctgcgga

SEQ ID NO: 72983 - DNA, 15 bp, Homo sapiens
gttccgcctctgcgg

SEQ ID NO: 72984 - DNA, 15 bp, Homo sapiens
tgttccgcctctgcg

SEQ ID NO: 72985 - DNA, 15 bp, Homo sapiens
gtgttccgcctctgc

SEQ ID NO: 72986 - DNA, 15 bp, Homo sapiens
cgtgttccgcctctg

SEQ ID NO: 72987 - DNA, 15 bp, Homo sapiens
ccgtgttccgcctct

SEQ ID NO: 72988 - DNA, 15 bp, Homo sapiens
gccgtgttccgcctc

SEQ ID NO: 72989 - DNA, 15 bp, Homo sapiens
cgccgtgttccgcct

SEQ ID NO: 72990 - DNA, 15 bp, Homo sapiens
ccgccgtgttccgcc

SEQ ID NO: 72991 - DNA, 15 bp, Homo sapiens
cccgccgtgttccgc

SEQ ID NO: 72992 - DNA, 15 bp, Homo sapiens
ccccgccgtgttccg

SEQ ID NO: 72993 - DNA, 15 bp, Homo sapiens
cccccgccgtgttcc

SEQ ID NO: 72994 - DNA, 15 bp, Homo sapiens
gcccccgccgtgttc

SEQ ID NO: 72995 - DNA, 15 bp, Homo sapiens
cgcccccgccgtgtt

SEQ ID NO: 72996 - DNA, 15 bp, Homo sapiens
ccgcccccgccgtgt

SEQ ID NO: 72997 - DNA, 15 bp, Homo sapiens
cccgcccccgccgtg

SEQ ID NO: 72998 - DNA, 15 bp, Homo sapiens
ccccgcccccgccgt

SEQ ID NO: 72999 - DNA, 15 bp, Homo sapiens
cccccgcccccgccg

SEQ ID NO: 73000 - DNA, 15 bp, Homo sapiens
gcccccgcccccgcc

SEQ ID NO: 73001 - DNA, 15 bp, Homo sapiens
agcccccgcccccgc

SEQ ID NO: 73002 - DNA, 15 bp, Homo sapiens
cagcccccgcccccg

SEQ ID NO: 73003 - DNA, 15 bp, Homo sapiens
gcagcccccgccccc

SEQ ID NO: 73004 - DNA, 15 bp, Homo sapiens
tgcagcccccgcccc

SEQ ID NO: 73005 - DNA, 15 bp, Homo sapiens
ctgcagcccccgccc

SEQ ID NO: 73006 - DNA, 15 bp, Homo sapiens
actgcagcccccgcc

SEQ ID NO: 73007 - DNA, 15 bp, Homo sapiens
gactgcagcccccgc

SEQ ID NO: 73008 - DNA, 15 bp, Homo sapiens
cgactgcagcccccg

SEQ ID NO: 73009 - DNA, 15 bp, Homo sapiens
gcgactgcagccccc

SEQ ID NO: 73010 - DNA, 15 bp, Homo sapiens
ggcgactgcagcccc

SEQ ID NO: 73011 - DNA, 15 bp, Homo sapiens
gggcgactgcagccc

SEQ ID NO: 73012 - DNA, 15 bp, Homo sapiens
cgggcgactgcagcc

SEQ ID NO: 73013 - DNA, 15 bp, Homo sapiens
ccgggcgactgcagc

SEQ ID NO: 73014 - DNA, 15 bp, Homo sapiens
cccgggcgactgcag

SEQ ID NO: 73015 - DNA, 15 bp, Homo sapiens
gcccgggcgactgca

SEQ ID NO: 73016 - DNA, 15 bp, Homo sapiens
agcccgggcgactgc

SEQ ID NO: 73017 - DNA, 15 bp, Homo sapiens
gagcccgggcgactg

SEQ ID NO: 73018 - DNA, 15 bp, Homo sapiens
cgagcccgggcgact

SEQ ID NO: 73019 - DNA, 15 bp, Homo sapiens
ccgagcccgggcgac

SEQ ID NO: 73020 - DNA, 15 bp, Homo sapiens
cccgagcccgggcga

SEQ ID NO: 73021 - DNA, 15 bp, Homo sapiens
acccgagcccgggcg

SEQ ID NO: 73022 - DNA, 15 bp, Homo sapiens
gacccgagcccgggc

SEQ ID NO: 73023 - DNA, 15 bp, Homo sapiens
ggacccgagcccggg

SEQ ID NO: 73024 - DNA, 15 bp, Homo sapiens
gggacccgagcccgg

SEQ ID NO: 73025 - DNA, 15 bp, Homo sapiens
agggacccgagcccg

SEQ ID NO: 73026 - DNA, 15 bp, Homo sapiens
cagggacccgagccc

SEQ ID NO: 73027 - DNA, 15 bp, Homo sapiens
gcagggacccgagcc

SEQ ID NO: 73028 - DNA, 15 bp, Homo sapiens
ggcagggacccgagc

SEQ ID NO: 73029 - DNA, 15 bp, Homo sapiens
aggcagggacccgag

SEQ ID NO: 73030 - DNA, 15 bp, Homo sapiens
caggcagggacccga

SEQ ID NO: 73031 - DNA, 15 bp, Homo sapiens
ccaggcagggacccg

SEQ ID NO: 73032 - DNA, 15 bp, Homo sapiens
accaggcagggaccc

SEQ ID NO: 73033 - DNA, 15 bp, Homo sapiens
caccaggcagggacc

SEQ ID NO: 73034 - DNA, 15 bp, Homo sapiens
ccaccaggcagggac

SEQ ID NO: 73035 - DNA, 15 bp, Homo sapiens
cccaccaggcaggga

SEQ ID NO: 73036 - DNA, 15 bp, Homo sapiens
gcccaccaggcaggg

SEQ ID NO: 73037 - DNA, 15 bp, Homo sapiens
ggcccaccaggcagg

SEQ ID NO: 73038 - DNA, 15 bp, Homo sapiens
gggcccaccaggcag

SEQ ID NO: 73039 - DNA, 15 bp, Homo sapiens
agggcccaccaggca

SEQ ID NO: 73040 - DNA, 15 bp, Homo sapiens
cagggcccaccaggc

SEQ ID NO: 73041 - DNA, 15 bp, Homo sapiens
ccagggcccaccagg

SEQ ID NO: 73042 - DNA, 15 bp, Homo sapiens
cccagggcccaccag

SEQ ID NO: 73043 - DNA, 15 bp, Homo sapiens
ccccagggcccacca

SEQ ID NO: 73044 - DNA, 15 bp, Homo sapiens
accccagggcccacc

SEQ ID NO: 73045 - DNA, 15 bp, Homo sapiens
caccccagggcccac

SEQ ID NO: 73046 - DNA, 15 bp, Homo sapiens
ccaccccagggccca

SEQ ID NO: 73047 - DNA, 15 bp, Homo sapiens
cccaccccagggccc

SEQ ID NO: 73048 - DNA, 15 bp, Homo sapiens
acccaccccagggcc

SEQ ID NO: 73049 - DNA, 15 bp, Homo sapiens
tacccaccccagggc

SEQ ID NO: 73050 - DNA, 15 bp, Homo sapiens
ttacccaccccaggg

SEQ ID NO: 73051 - DNA, 15 bp, Homo sapiens
cttacccaccccagg

SEQ ID NO: 73052 - DNA, 15 bp, Homo sapiens
acttacccaccccag

SEQ ID NO: 73053 - DNA, 15 bp, Homo sapiens
cacttacccacccca

SEQ ID NO: 73054 - DNA, 15 bp, Homo sapiens
ccacttacccacccc

SEQ ID NO: 73055 - DNA, 15 bp, Homo sapiens
gccacttacccaccc

SEQ ID NO: 73056 - DNA, 15 bp, Homo sapiens
ggccacttacccacc

SEQ ID NO: 73057 - DNA, 15 bp, Homo sapiens
aggccacttacccac

SEQ ID NO: 73058 - DNA, 15 bp, Homo sapiens
gaggccacttaccca

SEQ ID NO: 73059 - DNA, 15 bp, Homo sapiens
cgaggccacttaccc

SEQ ID NO: 73060 - DNA, 15 bp, Homo sapiens
acgaggccacttacc

SEQ ID NO: 73061 - DNA, 15 bp, Homo sapiens
aacgaggccacttac

SEQ ID NO: 73062 - DNA, 15 bp, Homo sapiens
caacgaggccactta

SEQ ID NO: 73063 - DNA, 15 bp, Homo sapiens
gcaacgaggccactt

SEQ ID NO: 73064 - DNA, 15 bp, Homo sapiens
tgcaacgaggccact

SEQ ID NO: 73065 - DNA, 15 bp, Homo sapiens
gtgcaacgaggccac

SEQ ID NO: 73066 - DNA, 15 bp, Homo sapiens
cgtgcaacgaggcca

SEQ ID NO: 73067 - DNA, 15 bp, Homo sapiens
tcgtgcaacgaggcc

SEQ ID NO: 73068 - DNA, 15 bp, Homo sapiens
ctcgtgcaacgaggc

SEQ ID NO: 73069 - DNA, 15 bp, Homo sapiens
cctcgtgcaacgagg

SEQ ID NO: 73070 - DNA, 15 bp, Homo sapiens
ccctcgtgcaacgag

SEQ ID NO: 73071 - DNA, 15 bp, Homo sapiens
accctcgtgcaacga

SEQ ID NO: 73072 - DNA, 15 bp, Homo sapiens
taccctcgtgcaacg

SEQ ID NO: 73073 - DNA, 15 bp, Homo sapiens
ctaccctcgtgcaac

SEQ ID NO: 73074 - DNA, 15 bp, Homo sapiens
cctaccctcgtgcaa

SEQ ID NO: 73075 - DNA, 15 bp, Homo sapiens
ccctaccctcgtgca

SEQ ID NO: 73076 - DNA, 15 bp, Homo sapiens
cccctaccctcgtgc

SEQ ID NO: 73077 - DNA, 15 bp, Homo sapiens
acccctaccctcgtg

SEQ ID NO: 73078 - DNA, 15 bp, Homo sapiens
cacccctaccctcgt

SEQ ID NO: 73079 - DNA, 15 bp, Homo sapiens
gcacccctaccctcg

SEQ ID NO: 73080 - DNA, 15 bp, Homo sapiens
tgcacccctaccctc

SEQ ID NO: 73081 - DNA, 15 bp, Homo sapiens
ttgcacccctaccct

SEQ ID NO: 73082 - DNA, 15 bp, Homo sapiens
cttgcacccctaccc

SEQ ID NO: 73083 - DNA, 15 bp, Homo sapiens
acttgcacccctacc

SEQ ID NO: 73084 - DNA, 15 bp, Homo sapiens
cacttgcacccctac

SEQ ID NO: 73085 - DNA, 15 bp, Homo sapiens
tcacttgcaccccta

SEQ ID NO: 73086 - DNA, 15 bp, Homo sapiens
ctcacttgcacccct

SEQ ID NO: 73087 - DNA, 15 bp, Homo sapiens
actcacttgcacccc

SEQ ID NO: 73088 - DNA, 15 bp, Homo sapiens
cactcacttgcaccc

SEQ ID NO: 73089 - DNA, 15 bp, Homo sapiens
acactcacttgcacc

SEQ ID NO: 73090 - DNA, 15 bp, Homo sapiens
cacactcacttgcac

SEQ ID NO: 73091 - DNA, 15 bp, Homo sapiens
acacactcacttgca

SEQ ID NO: 73092 - DNA, 15 bp, Homo sapiens
gacacactcacttgc

SEQ ID NO: 73093 - DNA, 15 bp, Homo sapiens
cgacacactcacttg

SEQ ID NO: 73094 - DNA, 15 bp, Homo sapiens
ccgacacactcactt

SEQ ID NO: 73095 - DNA, 15 bp, Homo sapiens
cccgacacactcact

SEQ ID NO: 73096 - DNA, 15 bp, Homo sapiens
ccccgacacactcac

SEQ ID NO: 73097 - DNA, 15 bp, Homo sapiens
cccccgacacactca

SEQ ID NO: 73098 - DNA, 15 bp, Homo sapiens
tcccccgacacactc

SEQ ID NO: 73099 - DNA, 15 bp, Homo sapiens
atcccccgacacact

SEQ ID NO: 73100 - DNA, 15 bp, Homo sapiens
gatcccccgacacac

SEQ ID NO: 73101 - DNA, 15 bp, Homo sapiens
agatcccccgacaca

SEQ ID NO: 73102 - DNA, 15 bp, Homo sapiens
tagatcccccgacac

SEQ ID NO: 73103 - DNA, 15 bp, Homo sapiens
atagatcccccgaca

SEQ ID NO: 73104 - DNA, 15 bp, Homo sapiens
gatagatcccccgac

SEQ ID NO: 73105 - DNA, 15 bp, Homo sapiens
agatagatcccccga

SEQ ID NO: 73106 - DNA, 15 bp, Homo sapiens
cagatagatcccccg

SEQ ID NO: 73107 - DNA, 15 bp, Homo sapiens
tcagatagatccccc

SEQ ID NO: 73108 - DNA, 15 bp, Homo sapiens
ctcagatagatcccc

SEQ ID NO: 73109 - DNA, 15 bp, Homo sapiens
gctcagatagatccc

SEQ ID NO: 73110 - DNA, 15 bp, Homo sapiens
cgctcagatagatcc

SEQ ID NO: 73111 - DNA, 15 bp, Homo sapiens
ccgctcagatagatc

SEQ ID NO: 73112 - DNA, 15 bp, Homo sapiens
cccgctcagatagat

SEQ ID NO: 73113 - DNA, 15 bp, Homo sapiens
gcccgctcagataga

SEQ ID NO: 73114 - DNA, 15 bp, Homo sapiens
agcccgctcagatag

SEQ ID NO: 73115 - DNA, 15 bp, Homo sapiens
gagcccgctcagata

SEQ ID NO: 73116 - DNA, 15 bp, Homo sapiens
ggagcccgctcagat

SEQ ID NO: 73117 - DNA, 15 bp, Homo sapiens
aggagcccgctcaga

SEQ ID NO: 73118 - DNA, 15 bp, Homo sapiens
gaggagcccgctcag

SEQ ID NO: 73119 - DNA, 15 bp, Homo sapiens
ggaggagcccgctca

SEQ ID NO: 73120 - DNA, 15 bp, Homo sapiens
tggaggagcccgctc

SEQ ID NO: 73121 - DNA, 15 bp, Homo sapiens
ctggaggagcccgct

SEQ ID NO: 73122 - DNA, 15 bp, Homo sapiens
tctggaggagcccgc

SEQ ID NO: 73123 - DNA, 15 bp, Homo sapiens
atctggaggagcccg

SEQ ID NO: 73124 - DNA, 15 bp, Homo sapiens
catctggaggagccc

SEQ ID NO: 73125 - DNA, 15 bp, Homo sapiens
ccatctggaggagcc

SEQ ID NO: 73126 - DNA, 15 bp, Homo sapiens
tccatctggaggagc

SEQ ID NO: 73127 - DNA, 15 bp, Homo sapiens
ttccatctggaggag

SEQ ID NO: 73128 - DNA, 15 bp, Homo sapiens
cttccatctggagga

SEQ ID NO: 73129 - DNA, 15 bp, Homo sapiens
gcttccatctggagg

SEQ ID NO: 73130 - DNA, 15 bp, Homo sapiens
ggcttccatctggag

SEQ ID NO: 73131 - DNA, 15 bp, Homo sapiens
gggcttccatctgga

SEQ ID NO: 73132 - DNA, 15 bp, Homo sapiens
ggggcttccatctgg

SEQ ID NO: 73133 - DNA, 15 bp, Homo sapiens
aggggcttccatctg

SEQ ID NO: 73134 - DNA, 15 bp, Homo sapiens
caggggcttccatct

SEQ ID NO: 73135 - DNA, 15 bp, Homo sapiens
acaggggcttccatc

SEQ ID NO: 73136 - DNA, 15 bp, Homo sapiens
aacaggggcttccat

SEQ ID NO: 73137 - DNA, 15 bp, Homo sapiens
aaacaggggcttcca

SEQ ID NO: 73138 - DNA, 15 bp, Homo sapiens
taaacaggggcttcc

SEQ ID NO: 73139 - DNA, 15 bp, Homo sapiens
gtaaacaggggcttc

SEQ ID NO: 73140 - DNA, 15 bp, Homo sapiens
tgtaaacaggggctt

SEQ ID NO: 73141 - DNA, 15 bp, Homo sapiens
atgtaaacaggggct

SEQ ID NO: 73142 - DNA, 15 bp, Homo sapiens
catgtaaacaggggc

SEQ ID NO: 73143 - DNA, 15 bp, Homo sapiens
acatgtaaacagggg

SEQ ID NO: 73144 - DNA, 15 bp, Homo sapiens
gacatgtaaacaggg

SEQ ID NO: 73145 - DNA, 15 bp, Homo sapiens
tgacatgtaaacagg

SEQ ID NO: 73146 - DNA, 15 bp, Homo sapiens
ctgacatgtaaacag

SEQ ID NO: 73147 - DNA, 15 bp, Homo sapiens
gctgacatgtaaaca

SEQ ID NO: 73148 - DNA, 15 bp, Homo sapiens
cgctgacatgtaaac

SEQ ID NO: 73149 - DNA, 15 bp, Homo sapiens
gcgctgacatgtaaa

SEQ ID NO: 73150 - DNA, 15 bp, Homo sapiens
agcgctgacatgtaa

SEQ ID NO: 73151 - DNA, 15 bp, Homo sapiens
aagcgctgacatgta

SEQ ID NO: 73152 - DNA, 15 bp, Homo sapiens
aaagcgctgacatgt

SEQ ID NO: 73153 - DNA, 15 bp, Homo sapiens
gaaagcgctgacatg

SEQ ID NO: 73154 - DNA, 15 bp, Homo sapiens
ggaaagcgctgacat

SEQ ID NO: 73155 - DNA, 15 bp, Homo sapiens
gggaaagcgctgaca

SEQ ID NO: 73156 - DNA, 15 bp, Homo sapiens
agggaaagcgctgac

SEQ ID NO: 73157 - DNA, 15 bp, Homo sapiens
aagggaaagcgctga

SEQ ID NO: 73158 - DNA, 15 bp, Homo sapiens
gaagggaaagcgctg

SEQ ID NO: 73159 - DNA, 15 bp, Homo sapiens
ggaagggaaagcgct

SEQ ID NO: 73160 - DNA, 15 bp, Homo sapiens
aggaagggaaagcgc

SEQ ID NO: 73161 - DNA, 15 bp, Homo sapiens
gaggaagggaaagcg

SEQ ID NO: 73162 - DNA, 15 bp, Homo sapiens
agaggaagggaaagc

SEQ ID NO: 73163 - DNA, 15 bp, Homo sapiens
gagaggaagggaaag

SEQ ID NO: 73164 - DNA, 15 bp, Homo sapiens
cgagaggaagggaaa

SEQ ID NO: 73165 - DNA, 15 bp, Homo sapiens
ccgagaggaagggaa

SEQ ID NO: 73166 - DNA, 15 bp, Homo sapiens
gccgagaggaaggga

SEQ ID NO: 73167 - DNA, 15 bp, Homo sapiens
tgccgagaggaaggg

SEQ ID NO: 73168 - DNA, 15 bp, Homo sapiens
gtgccgagaggaagg

SEQ ID NO: 73169 - DNA, 15 bp, Homo sapiens
agtgccgagaggaag

SEQ ID NO: 73170 - DNA, 15 bp, Homo sapiens
gagtgccgagaggaa

SEQ ID NO: 73171 - DNA, 15 bp, Homo sapiens
tgagtgccgagagga

SEQ ID NO: 73172 - DNA, 15 bp, Homo sapiens
ctgagtgccgagagg

SEQ ID NO: 73173 - DNA, 15 bp, Homo sapiens
actgagtgccgagag

SEQ ID NO: 73174 - DNA, 15 bp, Homo sapiens
gactgagtgccgaga

SEQ ID NO: 73175 - DNA, 15 bp, Homo sapiens
cgactgagtgccgag

SEQ ID NO: 73176 - DNA, 15 bp, Homo sapiens
gcgactgagtgccga

SEQ ID NO: 73177 - DNA, 15 bp, Homo sapiens
ggcgactgagtgccg

SEQ ID NO: 73178 - DNA, 15 bp, Homo sapiens
gggcgactgagtgcc

SEQ ID NO: 73179 - DNA, 15 bp, Homo sapiens
cgggcgactgagtgc

SEQ ID NO: 73180 - DNA, 15 bp, Homo sapiens
ccgggcgactgagtg

SEQ ID NO: 73181 - DNA, 15 bp, Homo sapiens
gccgggcgactgagt

SEQ ID NO: 73182 - DNA, 15 bp, Homo sapiens
agccgggcgactgag

SEQ ID NO: 73183 - DNA, 15 bp, Homo sapiens
gagccgggcgactga

SEQ ID NO: 73184 - DNA, 15 bp, Homo sapiens
agagccgggcgactg

SEQ ID NO: 73185 - DNA, 15 bp, Homo sapiens
tagagccgggcgact

SEQ ID NO: 73186 - DNA, 15 bp, Homo sapiens
ctagagccgggcgac

SEQ ID NO: 73187 - DNA, 15 bp, Homo sapiens
cctagagccgggcga

SEQ ID NO: 73188 - DNA, 15 bp, Homo sapiens
gcctagagccgggcg

SEQ ID NO: 73189 - DNA, 15 bp, Homo sapiens
cgcctagagccgggc

SEQ ID NO: 73190 - DNA, 15 bp, Homo sapiens
gcgcctagagccggg

SEQ ID NO: 73191 - DNA, 15 bp, Homo sapiens
agcgcctagagccgg

SEQ ID NO: 73192 - DNA, 15 bp, Homo sapiens
cagcgcctagagccg

SEQ ID NO: 73193 - DNA, 15 bp, Homo sapiens
ccagcgcctagagcc

SEQ ID NO: 73194 - DNA, 15 bp, Homo sapiens
tccagcgcctagagc

SEQ ID NO: 73195 - DNA, 15 bp, Homo sapiens
ctccagcgcctagag

SEQ ID NO: 73196 - DNA, 15 bp, Homo sapiens
tctccagcgcctaga

SEQ ID NO: 73197 - DNA, 15 bp, Homo sapiens
ctctccagcgcctag

SEQ ID NO: 73198 - DNA, 15 bp, Homo sapiens
gctctccagcgccta

SEQ ID NO: 73199 - DNA, 15 bp, Homo sapiens
ggctctccagcgcct

SEQ ID NO: 73200 - DNA, 15 bp, Homo sapiens
cggctctccagcgcc

SEQ ID NO: 73201 - DNA, 15 bp, Homo sapiens
gcggctctccagcgc

SEQ ID NO: 73202 - DNA, 15 bp, Homo sapiens
ggcggctctccagcg

SEQ ID NO: 73203 - DNA, 15 bp, Homo sapiens
cggcggctctccagc

SEQ ID NO: 73204 - DNA, 15 bp, Homo sapiens
ccggcggctctccag

SEQ ID NO: 73205 - DNA, 15 bp, Homo sapiens
gccggcggctctcca

SEQ ID NO: 73206 - DNA, 15 bp, Homo sapiens
agccggcggctctcc

SEQ ID NO: 73207 - DNA, 15 bp, Homo sapiens
gagccggcggctctc

SEQ ID NO: 73208 - DNA, 15 bp, Homo sapiens
ggagccggcggctct

SEQ ID NO: 73209 - DNA, 15 bp, Homo sapiens
cggagccggcggctc

SEQ ID NO: 73210 - DNA, 15 bp, Homo sapiens
gcggagccggcggct

SEQ ID NO: 73211 - DNA, 15 bp, Homo sapiens
cgcggagccggcggc

SEQ ID NO: 73212 - DNA, 15 bp, Homo sapiens
ccgcggagccggcgg

SEQ ID NO: 73213 - DNA, 15 bp, Homo sapiens
cccgcggagccggcg

SEQ ID NO: 73214 - DNA, 15 bp, Homo sapiens
tcccgcggagccggc

SEQ ID NO: 73215 - DNA, 15 bp, Homo sapiens
gtcccgcggagccgg

SEQ ID NO: 73216 - DNA, 15 bp, Homo sapiens
agtcccgcggagccg

SEQ ID NO: 73217 - DNA, 15 bp, Homo sapiens
gagtcccgcggagcc

SEQ ID NO: 73218 - DNA, 15 bp, Homo sapiens
ggagtcccgcggagc

SEQ ID NO: 73219 - DNA, 15 bp, Homo sapiens
aggagtcccgcggag

SEQ ID NO: 73220 - DNA, 15 bp, Homo sapiens
caggagtcccgcgga

SEQ ID NO: 73221 - DNA, 15 bp, Homo sapiens
ccaggagtcccgcgg

SEQ ID NO: 73222 - DNA, 15 bp, Homo sapiens
cccaggagtcccgcg

SEQ ID NO: 73223 - DNA, 15 bp, Homo sapiens
gcccaggagtcccgc

SEQ ID NO: 73224 - DNA, 15 bp, Homo sapiens
ggcccaggagtcccg

SEQ ID NO: 73225 - DNA, 15 bp, Homo sapiens
cggcccaggagtccc

SEQ ID NO: 73226 - DNA, 15 bp, Homo sapiens
ccggcccaggagtcc

SEQ ID NO: 73227 - DNA, 15 bp, Homo sapiens
gccggcccaggagtc

SEQ ID NO: 73228 - DNA, 15 bp, Homo sapiens
ggccggcccaggagt

SEQ ID NO: 73229 - DNA, 15 bp, Homo sapiens
aggccggcccaggag

SEQ ID NO: 73230 - DNA, 15 bp, Homo sapiens
gaggccggcccagga

SEQ ID NO: 73231 - DNA, 15 bp, Homo sapiens
cgaggccggcccagg

SEQ ID NO: 73232 - DNA, 15 bp, Homo sapiens
gcgaggccggcccag

SEQ ID NO: 73233 - DNA, 15 bp, Homo sapiens
ggcgaggccggccca

SEQ ID NO: 73234 - DNA, 15 bp, Homo sapiens
cggcgaggccggccc

SEQ ID NO: 73235 - DNA, 15 bp, Homo sapiens
gcggcgaggccggcc

SEQ ID NO: 73236 - DNA, 15 bp, Homo sapiens
ggcggcgaggccggc

SEQ ID NO: 73237 - DNA, 15 bp, Homo sapiens
aggcggcgaggccgg

SEQ ID NO: 73238 - DNA, 15 bp, Homo sapiens
gaggcggcgaggccg

SEQ ID NO: 73239 - DNA, 15 bp, Homo sapiens
agaggcggcgaggcc

SEQ ID NO: 73240 - DNA, 15 bp, Homo sapiens
gagaggcggcgaggc

SEQ ID NO: 73241 - DNA, 15 bp, Homo sapiens
ggagaggcggcgagg

SEQ ID NO: 73242 - DNA, 15 bp, Homo sapiens
cggagaggcggcgag

SEQ ID NO: 73243 - DNA, 15 bp, Homo sapiens
ccggagaggcggcga

SEQ ID NO: 73244 - DNA, 15 bp, Homo sapiens
gccggagaggcggcg

SEQ ID NO: 73245 - DNA, 15 bp, Homo sapiens
cgccggagaggcggc

SEQ ID NO: 73246 - DNA, 15 bp, Homo sapiens
ccgccggagaggcgg

SEQ ID NO: 73247 - DNA, 15 bp, Homo sapiens
cccgccggagaggcg

SEQ ID NO: 73248 - DNA, 15 bp, Homo sapiens
ccccgccggagaggc

SEQ ID NO: 73249 - DNA, 15 bp, Homo sapiens
tccccgccggagagg

SEQ ID NO: 73250 - DNA, 15 bp, Homo sapiens
ttccccgccggagag

SEQ ID NO: 73251 - DNA, 15 bp, Homo sapiens
gttccccgccggaga

SEQ ID NO: 73252 - DNA, 15 bp, Homo sapiens
ggttccccgccggag

SEQ ID NO: 73253 - DNA, 15 bp, Homo sapiens
aggttccccgccgga

SEQ ID NO: 73254 - DNA, 15 bp, Homo sapiens
aaggttccccgccgg

SEQ ID NO: 73255 - DNA, 15 bp, Homo sapiens
gaaggttccccgccg

SEQ ID NO: 73256 - DNA, 15 bp, Homo sapiens
ggaaggttccccgcc

SEQ ID NO: 73257 - DNA, 15 bp, Homo sapiens
gggaaggttccccgc

SEQ ID NO: 73258 - DNA, 15 bp, Homo sapiens
ggggaaggttccccg

SEQ ID NO: 73259 - DNA, 15 bp, Homo sapiens
tggggaaggttcccc

SEQ ID NO: 73260 - DNA, 15 bp, Homo sapiens
ctggggaaggttccc

SEQ ID NO: 73261 - DNA, 15 bp, Homo sapiens
gctggggaaggttcc

SEQ ID NO: 73262 - DNA, 15 bp, Homo sapiens
ggctggggaaggttc

SEQ ID NO: 73263 - DNA, 15 bp, Homo sapiens
gggctggggaaggtt

SEQ ID NO: 73264 - DNA, 15 bp, Homo sapiens
ggggctggggaaggt

SEQ ID NO: 73265 - DNA, 15 bp, Homo sapiens
gggggctggggaagg

SEQ ID NO: 73266 - DNA, 15 bp, Homo sapiens
cgggggctggggaag

SEQ ID NO: 73267 - DNA, 15 bp, Homo sapiens
acgggggctggggaa

SEQ ID NO: 73268 - DNA, 15 bp, Homo sapiens
gacgggggctgggga

SEQ ID NO: 73269 - DNA, 15 bp, Homo sapiens
ggacgggggctgggg

SEQ ID NO: 73270 - DNA, 15 bp, Homo sapiens
cggacgggggctggg

SEQ ID NO: 73271 - DNA, 15 bp, Homo sapiens
gcggacgggggctgg

SEQ ID NO: 73272 - DNA, 15 bp, Homo sapiens
tgcggacgggggctg

SEQ ID NO: 73273 - DNA, 15 bp, Homo sapiens
gtgcggacgggggct

SEQ ID NO: 73274 - DNA, 15 bp, Homo sapiens
tgtgcggacgggggc

SEQ ID NO: 73275 - DNA, 15 bp, Homo sapiens
ctgtgcggacggggg

SEQ ID NO: 73276 - DNA, 15 bp, Homo sapiens
tctgtgcggacgggg

SEQ ID NO: 73277 - DNA, 15 bp, Homo sapiens
atctgtgcggacggg

SEQ ID NO: 73278 - DNA, 15 bp, Homo sapiens
gatctgtgcggacgg

SEQ ID NO: 73279 - DNA, 15 bp, Homo sapiens
ggatctgtgcggacg

SEQ ID NO: 73280 - DNA, 15 bp, Homo sapiens
gggatctgtgcggac

SEQ ID NO: 73281 - DNA, 15 bp, Homo sapiens
agggatctgtgcgga

SEQ ID NO: 73282 - DNA, 15 bp, Homo sapiens
tagggatctgtgcgg

SEQ ID NO: 73283 - DNA, 15 bp, Homo sapiens
ctagggatctgtgcg

SEQ ID NO: 73284 - DNA, 15 bp, Homo sapiens
gctagggatctgtgc

SEQ ID NO: 73285 - DNA, 15 bp, Homo sapiens
cgctagggatctgtg

SEQ ID NO: 73286 - DNA, 15 bp, Homo sapiens
gcgctagggatctgt

SEQ ID NO: 73287 - DNA, 15 bp, Homo sapiens
ggcgctagggatctg

SEQ ID NO: 73288 - DNA, 15 bp, Homo sapiens
gggcgctagggatct

SEQ ID NO: 73289 - DNA, 15 bp, Homo sapiens
ggggcgctagggatc

SEQ ID NO: 73290 - DNA, 15 bp, Homo sapiens
cggggcgctagggat

SEQ ID NO: 73291 - DNA, 15 bp, Homo sapiens
tcggggcgctaggga

SEQ ID NO: 73292 - DNA, 15 bp, Homo sapiens
ctcggggcgctaggg

SEQ ID NO: 73293 - DNA, 15 bp, Homo sapiens
gctcggggcgctagg

SEQ ID NO: 73294 - DNA, 15 bp, Homo sapiens
ggctcggggcgctag

SEQ ID NO: 73295 - DNA, 15 bp, Homo sapiens
gggctcggggcgcta

SEQ ID NO: 73296 - DNA, 15 bp, Homo sapiens
ggggctcggggcgct

SEQ ID NO: 73297 - DNA, 15 bp, Homo sapiens
gggggctcggggcgc

SEQ ID NO: 73298 - DNA, 15 bp, Homo sapiens
cgggggctcggggcg

SEQ ID NO: 73299 - DNA, 15 bp, Homo sapiens
gcgggggctcggggc

SEQ ID NO: 73300 - DNA, 15 bp, Homo sapiens
ggcgggggctcgggg

SEQ ID NO: 73301 - DNA, 15 bp, Homo sapiens
gggcgggggctcggg

SEQ ID NO: 73302 - DNA, 15 bp, Homo sapiens
agggcgggggctcgg

SEQ ID NO: 73303 - DNA, 15 bp, Homo sapiens
aagggcgggggctcg

SEQ ID NO: 73304 - DNA, 15 bp, Homo sapiens
gaagggcgggggctc

SEQ ID NO: 73305 - DNA, 15 bp, Homo sapiens
cgaagggcgggggct

SEQ ID NO: 73306 - DNA, 15 bp, Homo sapiens
gcgaagggcgggggc

SEQ ID NO: 73307 - DNA, 15 bp, Homo sapiens
cgcgaagggcggggg

SEQ ID NO: 73308 - DNA, 15 bp, Homo sapiens
gcgcgaagggcgggg

SEQ ID NO: 73309 - DNA, 15 bp, Homo sapiens
ggcgcgaagggcggg

SEQ ID NO: 73310 - DNA, 15 bp, Homo sapiens
aggcgcgaagggcgg

SEQ ID NO: 73311 - DNA, 15 bp, Homo sapiens
taggcgcgaagggcg

SEQ ID NO: 73312 - DNA, 15 bp, Homo sapiens
ctaggcgcgaagggc

SEQ ID NO: 73313 - DNA, 15 bp, Homo sapiens
cctaggcgcgaaggg

SEQ ID NO: 73314 - DNA, 15 bp, Homo sapiens
gcctaggcgcgaagg

SEQ ID NO: 73315 - DNA, 15 bp, Homo sapiens
cgcctaggcgcgaag

SEQ ID NO: 73316 - DNA, 15 bp, Homo sapiens
acgcctaggcgcgaa

SEQ ID NO: 73317 - DNA, 15 bp, Homo sapiens
cacgcctaggcgcga

SEQ ID NO: 73318 - DNA, 15 bp, Homo sapiens
gcacgcctaggcgcg

SEQ ID NO: 73319 - DNA, 15 bp, Homo sapiens
cgcacgcctaggcgc

SEQ ID NO: 73320 - DNA, 15 bp, Homo sapiens
gcgcacgcctaggcg

SEQ ID NO: 73321 - DNA, 15 bp, Homo sapiens
ggcgcacgcctaggc

SEQ ID NO: 73322 - DNA, 15 bp, Homo sapiens
cggcgcacgcctagg

SEQ ID NO: 73323 - DNA, 15 bp, Homo sapiens
ccggcgcacgcctag

SEQ ID NO: 73324 - DNA, 15 bp, Homo sapiens
gccggcgcacgccta

SEQ ID NO: 73325 - DNA, 15 bp, Homo sapiens
agccggcgcacgcct

SEQ ID NO: 73326 - DNA, 15 bp, Homo sapiens
gagccggcgcacgcc

SEQ ID NO: 73327 - DNA, 15 bp, Homo sapiens
ggagccggcgcacgc

SEQ ID NO: 73328 - DNA, 15 bp, Homo sapiens
tggagccggcgcacg

SEQ ID NO: 73329 - DNA, 15 bp, Homo sapiens
ctggagccggcgcac

SEQ ID NO: 73330 - DNA, 15 bp, Homo sapiens
cctggagccggcgca

SEQ ID NO: 73331 - DNA, 15 bp, Homo sapiens
tcctggagccggcgc

SEQ ID NO: 73332 - DNA, 15 bp, Homo sapiens
gtcctggagccggcg

SEQ ID NO: 73333 - DNA, 15 bp, Homo sapiens
ggtcctggagccggc

SEQ ID NO: 73334 - DNA, 15 bp, Homo sapiens
tggtcctggagccgg

SEQ ID NO: 73335 - DNA, 15 bp, Homo sapiens
ctggtcctggagccg

SEQ ID NO: 73336 - DNA, 15 bp, Homo sapiens
cctggtcctggagcc

SEQ ID NO: 73337 - DNA, 15 bp, Homo sapiens
ccctggtcctggagc

SEQ ID NO: 73338 - DNA, 15 bp, Homo sapiens
gccctggtcctggag

SEQ ID NO: 73339 - DNA, 15 bp, Homo sapiens
agccctggtcctgga

SEQ ID NO: 73340 - DNA, 15 bp, Homo sapiens
gagccctggtcctgg

SEQ ID NO: 73341 - DNA, 15 bp, Homo sapiens
ggagccctggtcctg

SEQ ID NO: 73342 - DNA, 15 bp, Homo sapiens
aggagccctggtcct

SEQ ID NO: 73343 - DNA, 15 bp, Homo sapiens
caggagccctggtcc

SEQ ID NO: 73344 - DNA, 15 bp, Homo sapiens
ccaggagccctggtc

SEQ ID NO: 73345 - DNA, 15 bp, Homo sapiens
tccaggagccctggt

SEQ ID NO: 73346 - DNA, 15 bp, Homo sapiens
ctccaggagccctgg

SEQ ID NO: 73347 - DNA, 15 bp, Homo sapiens
gctccaggagccctg

SEQ ID NO: 73348 - DNA, 15 bp, Homo sapiens
agctccaggagccct

SEQ ID NO: 73349 - DNA, 15 bp, Homo sapiens
cagctccaggagccc

SEQ ID NO: 73350 - DNA, 15 bp, Homo sapiens
acagctccaggagcc

SEQ ID NO: 73351 - DNA, 15 bp, Homo sapiens
gacagctccaggagc

SEQ ID NO: 73352 - DNA, 15 bp, Homo sapiens
cgacagctccaggag

SEQ ID NO: 73353 - DNA, 15 bp, Homo sapiens
gcgacagctccagga

SEQ ID NO: 73354 - DNA, 15 bp, Homo sapiens
ggcgacagctccagg

SEQ ID NO: 73355 - DNA, 15 bp, Homo sapiens
aggcgacagctccag

SEQ ID NO: 73356 - DNA, 15 bp, Homo sapiens
gaggcgacagctcca

SEQ ID NO: 73357 - DNA, 15 bp, Homo sapiens
ggaggcgacagctcc

SEQ ID NO: 73358 - DNA, 15 bp, Homo sapiens
cggaggcgacagctc

SEQ ID NO: 73359 - DNA, 15 bp, Homo sapiens
tcggaggcgacagct

SEQ ID NO: 73360 - DNA, 15 bp, Homo sapiens
ttcggaggcgacagc

SEQ ID NO: 73361 - DNA, 15 bp, Homo sapiens
tttcggaggcgacag

SEQ ID NO: 73362 - DNA, 15 bp, Homo sapiens
ctttcggaggcgaca

SEQ ID NO: 73363 - DNA, 15 bp, Homo sapiens
cctttcggaggcgac

SEQ ID NO: 73364 - DNA, 15 bp, Homo sapiens
ccctttcggaggcga

SEQ ID NO: 73365 - DNA, 15 bp, Homo sapiens
accctttcggaggcg

SEQ ID NO: 73366 - DNA, 15 bp, Homo sapiens
gaccctttcggaggc

SEQ ID NO: 73367 - DNA, 15 bp, Homo sapiens
ggaccctttcggagg

SEQ ID NO: 73368 - DNA, 15 bp, Homo sapiens
aggaccctttcggag

SEQ ID NO: 73369 - DNA, 15 bp, Homo sapiens
caggaccctttcgga

SEQ ID NO: 73370 - DNA, 15 bp, Homo sapiens
gcaggaccctttcgg

SEQ ID NO: 73371 - DNA, 15 bp, Homo sapiens
cgcaggaccctttcg

SEQ ID NO: 73372 - DNA, 15 bp, Homo sapiens
acgcaggaccctttc

SEQ ID NO: 73373 - DNA, 15 bp, Homo sapiens
gacgcaggacccttt

SEQ ID NO: 73374 - DNA, 15 bp, Homo sapiens
ggacgcaggaccctt

SEQ ID NO: 73375 - DNA, 15 bp, Homo sapiens
aggacgcaggaccct

SEQ ID NO: 73376 - DNA, 15 bp, Homo sapiens
aaggacgcaggaccc

SEQ ID NO: 73377 - DNA, 15 bp, Homo sapiens
gaaggacgcaggacc

SEQ ID NO: 73378 - DNA, 15 bp, Homo sapiens
cgaaggacgcaggac

SEQ ID NO: 73379 - DNA, 15 bp, Homo sapiens
ccgaaggacgcagga

SEQ ID NO: 73380 - DNA, 15 bp, Homo sapiens
tccgaaggacgcagg

SEQ ID NO: 73381 - DNA, 15 bp, Homo sapiens
ctccgaaggacgcag

SEQ ID NO: 73382 - DNA, 15 bp, Homo sapiens
gctccgaaggacgca

SEQ ID NO: 73383 - DNA, 15 bp, Homo sapiens
ggctccgaaggacgc

SEQ ID NO: 73384 - DNA, 15 bp, Homo sapiens
cggctccgaaggacg

SEQ ID NO: 73385 - DNA, 15 bp, Homo sapiens
gcggctccgaaggac

SEQ ID NO: 73386 - DNA, 15 bp, Homo sapiens
ggcggctccgaagga

SEQ ID NO: 73387 - DNA, 15 bp, Homo sapiens
aggcggctccgaagg

SEQ ID NO: 73388 - DNA, 15 bp, Homo sapiens
gaggcggctccgaag

SEQ ID NO: 73389 - DNA, 15 bp, Homo sapiens
ggaggcggctccgaa

SEQ ID NO: 73390 - DNA, 15 bp, Homo sapiens
cggaggcggctccga

SEQ ID NO: 73391 - DNA, 15 bp, Homo sapiens
acggaggcggctccg

SEQ ID NO: 73392 - DNA, 15 bp, Homo sapiens
aacggaggcggctcc

SEQ ID NO: 73393 - DNA, 15 bp, Homo sapiens
caacggaggcggctc

SEQ ID NO: 73394 - DNA, 15 bp, Homo sapiens
gcaacggaggcggct

SEQ ID NO: 73395 - DNA, 15 bp, Homo sapiens
tgcaacggaggcggc

SEQ ID NO: 73396 - DNA, 15 bp, Homo sapiens
ctgcaacggaggcgg

SEQ ID NO: 73397 - DNA, 15 bp, Homo sapiens
cctgcaacggaggcg

SEQ ID NO: 73398 - DNA, 15 bp, Homo sapiens
ccctgcaacggaggc

SEQ ID NO: 73399 - DNA, 15 bp, Homo sapiens
cccctgcaacggagg

SEQ ID NO: 73400 - DNA, 15 bp, Homo sapiens
gcccctgcaacggag

SEQ ID NO: 73401 - DNA, 15 bp, Homo sapiens
ggcccctgcaacgga

SEQ ID NO: 73402 - DNA, 15 bp, Homo sapiens
cggcccctgcaacgg

SEQ ID NO: 73403 - DNA, 15 bp, Homo sapiens
ccggcccctgcaacg

SEQ ID NO: 73404 - DNA, 15 bp, Homo sapiens
gccggcccctgcaac

SEQ ID NO: 73405 - DNA, 15 bp, Homo sapiens
agccggcccctgcaa

SEQ ID NO: 73406 - DNA, 15 bp, Homo sapiens
cagccggcccctgca

SEQ ID NO: 73407 - DNA, 15 bp, Homo sapiens
acagccggcccctgc

SEQ ID NO: 73408 - DNA, 15 bp, Homo sapiens
cacagccggcccctg

SEQ ID NO: 73409 - DNA, 15 bp, Homo sapiens
tcacagccggcccct

SEQ ID NO: 73410 - DNA, 15 bp, Homo sapiens
ctcacagccggcccc

SEQ ID NO: 73411 - DNA, 15 bp, Homo sapiens
gctcacagccggccc

SEQ ID NO: 73412 - DNA, 15 bp, Homo sapiens
ggctcacagccggcc

SEQ ID NO: 73413 - DNA, 15 bp, Homo sapiens
gggctcacagccggc

SEQ ID NO: 73414 - DNA, 15 bp, Homo sapiens
cgggctcacagccgg

SEQ ID NO: 73415 - DNA, 15 bp, Homo sapiens
gcgggctcacagccg

SEQ ID NO: 73416 - DNA, 15 bp, Homo sapiens
cgcgggctcacagcc

SEQ ID NO: 73417 - DNA, 15 bp, Homo sapiens
gcgcgggctcacagc

SEQ ID NO: 73418 - DNA, 15 bp, Homo sapiens
ggcgcgggctcacag

SEQ ID NO: 73419 - DNA, 15 bp, Homo sapiens
gggcgcgggctcaca

SEQ ID NO: 73420 - DNA, 15 bp, Homo sapiens
ggggcgcgggctcac

SEQ ID NO: 73421 - DNA, 15 bp, Homo sapiens
cggggcgcgggctca

SEQ ID NO: 73422 - DNA, 15 bp, Homo sapiens
gcggggcgcgggctc

SEQ ID NO: 73423 - DNA, 15 bp, Homo sapiens
cgcggggcgcgggct

SEQ ID NO: 73424 - DNA, 15 bp, Homo sapiens
gcgcggggcgcgggc

SEQ ID NO: 73425 - DNA, 15 bp, Homo sapiens
ggcgcggggcgcggg

SEQ ID NO: 73426 - DNA, 15 bp, Homo sapiens
gggcgcggggcgcgg

SEQ ID NO: 73427 - DNA, 15 bp, Homo sapiens
cgggcgcggggcgcg

SEQ ID NO: 73428 - DNA, 15 bp, Homo sapiens
gcgggcgcggggcgc

SEQ ID NO: 73429 - DNA, 15 bp, Homo sapiens
ggcgggcgcggggcg

SEQ ID NO: 73430 - DNA, 15 bp, Homo sapiens
gggcgggcgcggggc

SEQ ID NO: 73431 - DNA, 15 bp, Homo sapiens
cgggcgggcgcgggg

SEQ ID NO: 73432 - DNA, 15 bp, Homo sapiens
ccgggcgggcgcggg

SEQ ID NO: 73433 - DNA, 15 bp, Homo sapiens
gccgggcgggcgcgg

SEQ ID NO: 73434 - DNA, 15 bp, Homo sapiens
ggccgggcgggcgcg

SEQ ID NO: 73435 - DNA, 15 bp, Homo sapiens
tggccgggcgggcgc

SEQ ID NO: 73436 - DNA, 15 bp, Homo sapiens
atggccgggcgggcg

SEQ ID NO: 73437 - DNA, 15 bp, Homo sapiens
aatggccgggcgggc

SEQ ID NO: 73438 - DNA, 15 bp, Homo sapiens
gaatggccgggcggg

SEQ ID NO: 73439 - DNA, 15 bp, Homo sapiens
ggaatggccgggcgg

SEQ ID NO: 73440 - DNA, 15 bp, Homo sapiens
gggaatggccgggcg

SEQ ID NO: 73441 - DNA, 15 bp, Homo sapiens
tgggaatggccgggc

SEQ ID NO: 73442 - DNA, 15 bp, Homo sapiens
gtgggaatggccggg

SEQ ID NO: 73443 - DNA, 15 bp, Homo sapiens
ggtgggaatggccgg

SEQ ID NO: 73444 - DNA, 15 bp, Homo sapiens
gggtgggaatggccg

SEQ ID NO: 73445 - DNA, 15 bp, Homo sapiens
ggggtgggaatggcc

SEQ ID NO: 73446 - DNA, 15 bp, Homo sapiens
tggggtgggaatggc

SEQ ID NO: 73447 - DNA, 15 bp, Homo sapiens
ctggggtgggaatgg

SEQ ID NO: 73448 - DNA, 15 bp, Homo sapiens
gctggggtgggaatg

SEQ ID NO: 73449 - DNA, 15 bp, Homo sapiens
ggctggggtgggaat

SEQ ID NO: 73450 - DNA, 15 bp, Homo sapiens
cggctggggtgggaa

SEQ ID NO: 73451 - DNA, 15 bp, Homo sapiens
gcggctggggtggga

SEQ ID NO: 73452 - DNA, 15 bp, Homo sapiens
ggcggctggggtggg

SEQ ID NO: 73453 - DNA, 15 bp, Homo sapiens
cggcggctggggtgg

SEQ ID NO: 73454 - DNA, 15 bp, Homo sapiens
gcggcggctggggtg

SEQ ID NO: 73455 - DNA, 15 bp, Homo sapiens
ggcggcggctggggt

SEQ ID NO: 73456 - DNA, 15 bp, Homo sapiens
cggcggcggctgggg

SEQ ID NO: 73457 - DNA, 15 bp, Homo sapiens
gcggcggcggctggg

SEQ ID NO: 73458 - DNA, 15 bp, Homo sapiens
ggcggcggcggctgg

SEQ ID NO: 73459 - DNA, 15 bp, Homo sapiens
tggcggcggcggctg

SEQ ID NO: 73460 - DNA, 15 bp, Homo sapiens
ttggcggcggcggct

SEQ ID NO: 73461 - DNA, 15 bp, Homo sapiens
cttggcggcggcggc

SEQ ID NO: 73462 - DNA, 15 bp, Homo sapiens
gcttggcggcggcgg

SEQ ID NO: 73463 - DNA, 15 bp, Homo sapiens
ggcttggcggcggcg

SEQ ID NO: 73464 - DNA, 15 bp, Homo sapiens
aggcttggcggcggc

SEQ ID NO: 73465 - DNA, 15 bp, Homo sapiens
caggcttggcggcgg

SEQ ID NO: 73466 - DNA, 15 bp, Homo sapiens
ccaggcttggcggcg

SEQ ID NO: 73467 - DNA, 15 bp, Homo sapiens
cccaggcttggcggc

SEQ ID NO: 73468 - DNA, 15 bp, Homo sapiens
acccaggcttggcgg

SEQ ID NO: 73469 - DNA, 15 bp, Homo sapiens
gacccaggcttggcg

SEQ ID NO: 73470 - DNA, 15 bp, Homo sapiens
agacccaggcttggc

SEQ ID NO: 73471 - DNA, 15 bp, Homo sapiens
tagacccaggcttgg

SEQ ID NO: 73472 - DNA, 15 bp, Homo sapiens
ctagacccaggcttg

SEQ ID NO: 73473 - DNA, 15 bp, Homo sapiens
cctagacccaggctt

SEQ ID NO: 73474 - DNA, 15 bp, Homo sapiens
acctagacccaggct

SEQ ID NO: 73475 - DNA, 15 bp, Homo sapiens
aacctagacccaggc

SEQ ID NO: 73476 - DNA, 15 bp, Homo sapiens
caacctagacccagg

SEQ ID NO: 73477 - DNA, 15 bp, Homo sapiens
gcaacctagacccag

SEQ ID NO: 73478 - DNA, 15 bp, Homo sapiens
tgcaacctagaccca

SEQ ID NO: 73479 - DNA, 15 bp, Homo sapiens
ttgcaacctagaccc

SEQ ID NO: 73480 - DNA, 15 bp, Homo sapiens
tttgcaacctagacc

SEQ ID NO: 73481 - DNA, 15 bp, Homo sapiens
ctttgcaacctagac

SEQ ID NO: 73482 - DNA, 15 bp, Homo sapiens
actttgcaacctaga

SEQ ID NO: 73483 - DNA, 15 bp, Homo sapiens
cactttgcaacctag

SEQ ID NO: 73484 - DNA, 15 bp, Homo sapiens
gcactttgcaaccta

SEQ ID NO: 73485 - DNA, 15 bp, Homo sapiens
tgcactttgcaacct

SEQ ID NO: 73486 - DNA, 15 bp, Homo sapiens
ttgcactttgcaacc

SEQ ID NO: 73487 - DNA, 15 bp, Homo sapiens
gttgcactttgcaac

SEQ ID NO: 73488 - DNA, 15 bp, Homo sapiens
ggttgcactttgcaa

SEQ ID NO: 73489 - DNA, 15 bp, Homo sapiens
gggttgcactttgca

SEQ ID NO: 73490 - DNA, 15 bp, Homo sapiens
tgggttgcactttgc

SEQ ID NO: 73491 - DNA, 15 bp, Homo sapiens
ctgggttgcactttg

SEQ ID NO: 73492 - DNA, 15 bp, Homo sapiens
cctgggttgcacttt

SEQ ID NO: 73493 - DNA, 15 bp, Homo sapiens
gcctgggttgcactt

SEQ ID NO: 73494 - DNA, 15 bp, Homo sapiens
cgcctgggttgcact

SEQ ID NO: 73495 - DNA, 15 bp, Homo sapiens
ccgcctgggttgcac

SEQ ID NO: 73496 - DNA, 15 bp, Homo sapiens
tccgcctgggttgca

SEQ ID NO: 73497 - DNA, 15 bp, Homo sapiens
ttccgcctgggttgc

SEQ ID NO: 73498 - DNA, 15 bp, Homo sapiens
tttccgcctgggttg

SEQ ID NO: 73499 - DNA, 15 bp, Homo sapiens
ctttccgcctgggtt

SEQ ID NO: 73500 - DNA, 15 bp, Homo sapiens
cctttccgcctgggt

SEQ ID NO: 73501 - DNA, 15 bp, Homo sapiens
acctttccgcctggg

SEQ ID NO: 73502 - DNA, 15 bp, Homo sapiens
cacctttccgcctgg

SEQ ID NO: 73503 - DNA, 15 bp, Homo sapiens
tcacctttccgcctg

SEQ ID NO: 73504 - DNA, 15 bp, Homo sapiens
ctcacctttccgcct

SEQ ID NO: 73505 - DNA, 15 bp, Homo sapiens
cctcacctttccgcc

SEQ ID NO: 73506 - DNA, 15 bp, Homo sapiens
ccctcacctttccgc

SEQ ID NO: 73507 - DNA, 15 bp, Homo sapiens
accctcacctttccg

SEQ ID NO: 73508 - DNA, 15 bp, Homo sapiens
aaccctcacctttcc

SEQ ID NO: 73509 - DNA, 15 bp, Homo sapiens
aaaccctcacctttc

SEQ ID NO: 73510 - DNA, 15 bp, Homo sapiens
caaaccctcaccttt

SEQ ID NO: 73511 - DNA, 15 bp, Homo sapiens
ccaaaccctcacctt

SEQ ID NO: 73512 - DNA, 15 bp, Homo sapiens
cccaaaccctcacct

SEQ ID NO: 73513 - DNA, 15 bp, Homo sapiens
acccaaaccctcacc

SEQ ID NO: 73514 - DNA, 15 bp, Homo sapiens
aacccaaaccctcac

SEQ ID NO: 73515 - DNA, 15 bp, Homo sapiens
gaacccaaaccctca

SEQ ID NO: 73516 - DNA, 15 bp, Homo sapiens
cgaacccaaaccctc

SEQ ID NO: 73517 - DNA, 15 bp, Homo sapiens
gcgaacccaaaccct

SEQ ID NO: 73518 - DNA, 15 bp, Homo sapiens
cgcgaacccaaaccc

SEQ ID NO: 73519 - DNA, 15 bp, Homo sapiens
acgcgaacccaaacc

SEQ ID NO: 73520 - DNA, 15 bp, Homo sapiens
gacgcgaacccaaac

SEQ ID NO: 73521 - DNA, 15 bp, Homo sapiens
agacgcgaacccaaa

SEQ ID NO: 73522 - DNA, 15 bp, Homo sapiens
gagacgcgaacccaa

SEQ ID NO: 73523 - DNA, 15 bp, Homo sapiens
tgagacgcgaaccca

SEQ ID NO: 73524 - DNA, 15 bp, Homo sapiens
gtgagacgcgaaccc

SEQ ID NO: 73525 - DNA, 15 bp, Homo sapiens
agtgagacgcgaacc

SEQ ID NO: 73526 - DNA, 15 bp, Homo sapiens
aagtgagacgcgaac

SEQ ID NO: 73527 - DNA, 15 bp, Homo sapiens
gaagtgagacgcgaa

SEQ ID NO: 73528 - DNA, 15 bp, Homo sapiens
tgaagtgagacgcga

SEQ ID NO: 73529 - DNA, 15 bp, Homo sapiens
ctgaagtgagacgcg

SEQ ID NO: 73530 - DNA, 15 bp, Homo sapiens
tctgaagtgagacgc

SEQ ID NO: 73531 - DNA, 15 bp, Homo sapiens
ttctgaagtgagacg

SEQ ID NO: 73532 - DNA, 15 bp, Homo sapiens
tttctgaagtgagac

SEQ ID NO: 73533 - DNA, 15 bp, Homo sapiens
ttttctgaagtgaga

SEQ ID NO: 73534 - DNA, 15 bp, Homo sapiens
cttttctgaagtgag

SEQ ID NO: 73535 - DNA, 15 bp, Homo sapiens
acttttctgaagtga

SEQ ID NO: 73536 - DNA, 15 bp, Homo sapiens
aacttttctgaagtg

SEQ ID NO: 73537 - DNA, 15 bp, Homo sapiens
caacttttctgaagt

SEQ ID NO: 73538 - DNA, 15 bp, Homo sapiens
tcaacttttctgaag

SEQ ID NO: 73539 - DNA, 15 bp, Homo sapiens
gtcaacttttctgaa

SEQ ID NO: 73540 - DNA, 15 bp, Homo sapiens
agtcaacttttctga

SEQ ID NO: 73541 - DNA, 15 bp, Homo sapiens
cagtcaacttttctg

SEQ ID NO: 73542 - DNA, 15 bp, Homo sapiens
gcagtcaacttttct

SEQ ID NO: 73543 - DNA, 15 bp, Homo sapiens
agcagtcaacttttc

SEQ ID NO: 73544 - DNA, 15 bp, Homo sapiens
cagcagtcaactttt

SEQ ID NO: 73545 - DNA, 15 bp, Homo sapiens
acagcagtcaacttt

SEQ ID NO: 73546 - DNA, 15 bp, Homo sapiens
gacagcagtcaactt

SEQ ID NO: 73547 - DNA, 15 bp, Homo sapiens
agacagcagtcaact

SEQ ID NO: 73548 - DNA, 15 bp, Homo sapiens
gagacagcagtcaac

SEQ ID NO: 73549 - DNA, 15 bp, Homo sapiens
agagacagcagtcaa

SEQ ID NO: 73550 - DNA, 15 bp, Homo sapiens
cagagacagcagtca

SEQ ID NO: 73551 - DNA, 15 bp, Homo sapiens
tcagagacagcagtc

SEQ ID NO: 73552 - DNA, 15 bp, Homo sapiens
ttcagagacagcagt

SEQ ID NO: 73553 - DNA, 15 bp, Homo sapiens
tttcagagacagcag

SEQ ID NO: 73554 - DNA, 15 bp, Homo sapiens
ctttcagagacagca

SEQ ID NO: 73555 - DNA, 15 bp, Homo sapiens
cctttcagagacagc

SEQ ID NO: 73556 - DNA, 15 bp, Homo sapiens
ccctttcagagacag

SEQ ID NO: 73557 - DNA, 15 bp, Homo sapiens
accctttcagagaca

SEQ ID NO: 73558 - DNA, 15 bp, Homo sapiens
aaccctttcagagac

SEQ ID NO: 73559 - DNA, 15 bp, Homo sapiens
gaaccctttcagaga

SEQ ID NO: 73560 - DNA, 15 bp, Homo sapiens
cgaaccctttcagag

SEQ ID NO: 73561 - DNA, 15 bp, Homo sapiens
gcgaaccctttcaga

SEQ ID NO: 73562 - DNA, 15 bp, Homo sapiens
ggcgaaccctttcag

SEQ ID NO: 73563 - DNA, 15 bp, Homo sapiens
tggcgaaccctttca

SEQ ID NO: 73564 - DNA, 15 bp, Homo sapiens
ttggcgaaccctttc

SEQ ID NO: 73565 - DNA, 15 bp, Homo sapiens
cttggcgaacccttt

SEQ ID NO: 73566 - DNA, 15 bp, Homo sapiens
acttggcgaaccctt

SEQ ID NO: 73567 - DNA, 15 bp, Homo sapiens
tacttggcgaaccct

SEQ ID NO: 73568 - DNA, 15 bp, Homo sapiens
ctacttggcgaaccc

SEQ ID NO: 73569 - DNA, 15 bp, Homo sapiens
cctacttggcgaacc

SEQ ID NO: 73570 - DNA, 15 bp, Homo sapiens
ccctacttggcgaac

SEQ ID NO: 73571 - DNA, 15 bp, Homo sapiens
gccctacttggcgaa

SEQ ID NO: 73572 - DNA, 15 bp, Homo sapiens
ggccctacttggcga

SEQ ID NO: 73573 - DNA, 15 bp, Homo sapiens
tggccctacttggcg

SEQ ID NO: 73574 - DNA, 15 bp, Homo sapiens
ctggccctacttggc

SEQ ID NO: 73575 - DNA, 15 bp, Homo sapiens
cctggccctacttgg

SEQ ID NO: 73576 - DNA, 15 bp, Homo sapiens
tcctggccctacttg

SEQ ID NO: 73577 - DNA, 15 bp, Homo sapiens
ctcctggccctactt

SEQ ID NO: 73578 - DNA, 15 bp, Homo sapiens
gctcctggccctact

SEQ ID NO: 73579 - DNA, 15 bp, Homo sapiens
tgctcctggccctac

SEQ ID NO: 73580 - DNA, 15 bp, Homo sapiens
ctgctcctggcccta

SEQ ID NO: 73581 - DNA, 15 bp, Homo sapiens
tctgctcctggccct

SEQ ID NO: 73582 - DNA, 15 bp, Homo sapiens
ctctgctcctggccc

SEQ ID NO: 73583 - DNA, 15 bp, Homo sapiens
tctctgctcctggcc

SEQ ID NO: 73584 - DNA, 15 bp, Homo sapiens
ctctctgctcctggc

SEQ ID NO: 73585 - DNA, 15 bp, Homo sapiens
cctctctgctcctgg

SEQ ID NO: 73586 - DNA, 15 bp, Homo sapiens
tcctctctgctcctg

SEQ ID NO: 73587 - DNA, 15 bp, Homo sapiens
ctcctctctgctcct

SEQ ID NO: 73588 - DNA, 15 bp, Homo sapiens
cctcctctctgctcc

SEQ ID NO: 73589 - DNA, 15 bp, Homo sapiens
ccctcctctctgctc

SEQ ID NO: 73590 - DNA, 15 bp, Homo sapiens
tccctcctctctgct

SEQ ID NO: 73591 - DNA, 15 bp, Homo sapiens
gtccctcctctctgc

SEQ ID NO: 73592 - DNA, 15 bp, Homo sapiens
tgtccctcctctctg

SEQ ID NO: 73593 - DNA, 15 bp, Homo sapiens
gtgtccctcctctct

SEQ ID NO: 73594 - DNA, 15 bp, Homo sapiens
ggtgtccctcctctc

SEQ ID NO: 73595 - DNA, 15 bp, Homo sapiens
gggtgtccctcctct

SEQ ID NO: 73596 - DNA, 15 bp, Homo sapiens
ggggtgtccctcctc

SEQ ID NO: 73597 - DNA, 15 bp, Homo sapiens
gggggtgtccctcct

SEQ ID NO: 73598 - DNA, 15 bp, Homo sapiens
agggggtgtccctcc

SEQ ID NO: 73599 - DNA, 15 bp, Homo sapiens
tagggggtgtccctc

SEQ ID NO: 73600 - DNA, 15 bp, Homo sapiens
ttagggggtgtccct

SEQ ID NO: 73601 - DNA, 15 bp, Homo sapiens
gttagggggtgtccc

SEQ ID NO: 73602 - DNA, 15 bp, Homo sapiens
cgttagggggtgtcc

SEQ ID NO: 73603 - DNA, 15 bp, Homo sapiens
acgttagggggtgtc

SEQ ID NO: 73604 - DNA, 15 bp, Homo sapiens
cacgttagggggtgt

SEQ ID NO: 73605 - DNA, 15 bp, Homo sapiens
tcacgttagggggtg

SEQ ID NO: 73606 - DNA, 15 bp, Homo sapiens
gtcacgttagggggt

SEQ ID NO: 73607 - DNA, 15 bp, Homo sapiens
cgtcacgttaggggg

SEQ ID NO: 73608 - DNA, 15 bp, Homo sapiens
ccgtcacgttagggg

SEQ ID NO: 73609 - DNA, 15 bp, Homo sapiens
cccgtcacgttaggg

SEQ ID NO: 73610 - DNA, 15 bp, Homo sapiens
gcccgtcacgttagg

SEQ ID NO: 73611 - DNA, 15 bp, Homo sapiens
ggcccgtcacgttag

SEQ ID NO: 73612 - DNA, 15 bp, Homo sapiens
aggcccgtcacgtta

SEQ ID NO: 73613 - DNA, 15 bp, Homo sapiens
aaggcccgtcacgtt

SEQ ID NO: 73614 - DNA, 15 bp, Homo sapiens
taaggcccgtcacgt

SEQ ID NO: 73615 - DNA, 15 bp, Homo sapiens
ctaaggcccgtcacg

SEQ ID NO: 73616 - DNA, 15 bp, Homo sapiens
tctaaggcccgtcac

SEQ ID NO: 73617 - DNA, 15 bp, Homo sapiens
ctctaaggcccgtca

SEQ ID NO: 73618 - DNA, 15 bp, Homo sapiens
cctctaaggcccgtc

SEQ ID NO: 73619 - DNA, 15 bp, Homo sapiens
tcctctaaggcccgt

SEQ ID NO: 73620 - DNA, 15 bp, Homo sapiens
gtcctctaaggcccg

SEQ ID NO: 73621 - DNA, 15 bp, Homo sapiens
ggtcctctaaggccc

SEQ ID NO: 73622 - DNA, 15 bp, Homo sapiens
aggtcctctaaggcc

SEQ ID NO: 73623 - DNA, 15 bp, Homo sapiens
taggtcctctaaggc

SEQ ID NO: 73624 - DNA, 15 bp, Homo sapiens
ctaggtcctctaagg

SEQ ID NO: 73625 - DNA, 15 bp, Homo sapiens
cctaggtcctctaag

SEQ ID NO: 73626 - DNA, 15 bp, Homo sapiens
ccctaggtcctctaa

SEQ ID NO: 73627 - DNA, 15 bp, Homo sapiens
cccctaggtcctcta

SEQ ID NO: 73628 - DNA, 15 bp, Homo sapiens
tcccctaggtcctct

SEQ ID NO: 73629 - DNA, 15 bp, Homo sapiens
ttcccctaggtcctc

SEQ ID NO: 73630 - DNA, 15 bp, Homo sapiens
attcccctaggtcct

SEQ ID NO: 73631 - DNA, 15 bp, Homo sapiens
cattcccctaggtcc

SEQ ID NO: 73632 - DNA, 15 bp, Homo sapiens
tcattcccctaggtc

SEQ ID NO: 73633 - DNA, 15 bp, Homo sapiens
ttcattcccctaggt

SEQ ID NO: 73634 - DNA, 15 bp, Homo sapiens
attcattcccctagg

SEQ ID NO: 73635 - DNA, 15 bp, Homo sapiens
cattcattcccctag

SEQ ID NO: 73636 - DNA, 15 bp, Homo sapiens
ccattcattccccta

SEQ ID NO: 73637 - DNA, 15 bp, Homo sapiens
cccattcattcccct

SEQ ID NO: 73638 - DNA, 15 bp, Homo sapiens
tcccattcattcccc

SEQ ID NO: 73639 - DNA, 15 bp, Homo sapiens
gtcccattcattccc

SEQ ID NO: 73640 - DNA, 15 bp, Homo sapiens
ggtcccattcattcc

SEQ ID NO: 73641 - DNA, 15 bp, Homo sapiens
tggtcccattcattc

SEQ ID NO: 73642 - DNA, 15 bp, Homo sapiens
ctggtcccattcatt

SEQ ID NO: 73643 - DNA, 15 bp, Homo sapiens
cctggtcccattcat

SEQ ID NO: 73644 - DNA, 15 bp, Homo sapiens
ccctggtcccattca

SEQ ID NO: 73645 - DNA, 15 bp, Homo sapiens
cccctggtcccattc

SEQ ID NO: 73646 - DNA, 15 bp, Homo sapiens
acccctggtcccatt

SEQ ID NO: 73647 - DNA, 15 bp, Homo sapiens
aacccctggtcccat

SEQ ID NO: 73648 - DNA, 15 bp, Homo sapiens
taacccctggtccca

SEQ ID NO: 73649 - DNA, 15 bp, Homo sapiens
ctaacccctggtccc

SEQ ID NO: 73650 - DNA, 15 bp, Homo sapiens
gctaacccctggtcc

SEQ ID NO: 73651 - DNA, 15 bp, Homo sapiens
agctaacccctggtc

SEQ ID NO: 73652 - DNA, 15 bp, Homo sapiens
aagctaacccctggt

SEQ ID NO: 73653 - DNA, 15 bp, Homo sapiens
gaagctaacccctgg

SEQ ID NO: 73654 - DNA, 15 bp, Homo sapiens
cgaagctaacccctg

SEQ ID NO: 73655 - DNA, 15 bp, Homo sapiens
tcgaagctaacccct

SEQ ID NO: 73656 - DNA, 15 bp, Homo sapiens
ctcgaagctaacccc

SEQ ID NO: 73657 - DNA, 15 bp, Homo sapiens
cctcgaagctaaccc

SEQ ID NO: 73658 - DNA, 15 bp, Homo sapiens
gcctcgaagctaacc

SEQ ID NO: 73659 - DNA, 15 bp, Homo sapiens
agcctcgaagctaac

SEQ ID NO: 73660 - DNA, 15 bp, Homo sapiens
cagcctcgaagctaa

SEQ ID NO: 73661 - DNA, 15 bp, Homo sapiens
gcagcctcgaagcta

SEQ ID NO: 73662 - DNA, 15 bp, Homo sapiens
ggcagcctcgaagct

SEQ ID NO: 73663 - DNA, 15 bp, Homo sapiens
cggcagcctcgaagc

SEQ ID NO: 73664 - DNA, 15 bp, Homo sapiens
gcggcagcctcgaag

SEQ ID NO: 73665 - DNA, 15 bp, Homo sapiens
cgcggcagcctcgaa

SEQ ID NO: 73666 - DNA, 15 bp, Homo sapiens
gcgcggcagcctcga

SEQ ID NO: 73667 - DNA, 15 bp, Homo sapiens
tgcgcggcagcctcg

SEQ ID NO: 73668 - DNA, 15 bp, Homo sapiens
ttgcgcggcagcctc

SEQ ID NO: 73669 - DNA, 15 bp, Homo sapiens
gttgcgcggcagcct

SEQ ID NO: 73670 - DNA, 15 bp, Homo sapiens
tgttgcgcggcagcc

SEQ ID NO: 73671 - DNA, 15 bp, Homo sapiens
gtgttgcgcggcagc

SEQ ID NO: 73672 - DNA, 15 bp, Homo sapiens
ggtgttgcgcggcag

SEQ ID NO: 73673 - DNA, 15 bp, Homo sapiens
tggtgttgcgcggca

SEQ ID NO: 73674 - DNA, 15 bp, Homo sapiens
ttggtgttgcgcggc

SEQ ID NO: 73675 - DNA, 15 bp, Homo sapiens
cttggtgttgcgcgg

SEQ ID NO: 73676 - DNA, 15 bp, Homo sapiens
gcttggtgttgcgcg

SEQ ID NO: 73677 - DNA, 15 bp, Homo sapiens
cgcttggtgttgcgc

SEQ ID NO: 73678 - DNA, 15 bp, Homo sapiens
ccgcttggtgttgcg

SEQ ID NO: 73679 - DNA, 15 bp, Homo sapiens
cccgcttggtgttgc

SEQ ID NO: 73680 - DNA, 15 bp, Homo sapiens
tcccgcttggtgttg

SEQ ID NO: 73681 - DNA, 15 bp, Homo sapiens
ctcccgcttggtgtt

SEQ ID NO: 73682 - DNA, 15 bp, Homo sapiens
actcccgcttggtgt

SEQ ID NO: 73683 - DNA, 15 bp, Homo sapiens
gactcccgcttggtg

SEQ ID NO: 73684 - DNA, 15 bp, Homo sapiens
agactcccgcttggt

SEQ ID NO: 73685 - DNA, 15 bp, Homo sapiens
cagactcccgcttgg

SEQ ID NO: 73686 - DNA, 15 bp, Homo sapiens
acagactcccgcttg

SEQ ID NO: 73687 - DNA, 15 bp, Homo sapiens
gacagactcccgctt

SEQ ID NO: 73688 - DNA, 15 bp, Homo sapiens
agacagactcccgct

SEQ ID NO: 73689 - DNA, 15 bp, Homo sapiens
cagacagactcccgc

SEQ ID NO: 73690 - DNA, 15 bp, Homo sapiens
ccagacagactcccg

SEQ ID NO: 73691 - DNA, 15 bp, Homo sapiens
tccagacagactccc

SEQ ID NO: 73692 - DNA, 15 bp, Homo sapiens
ttccagacagactcc

SEQ ID NO: 73693 - DNA, 15 bp, Homo sapiens
tttccagacagactc

SEQ ID NO: 73694 - DNA, 15 bp, Homo sapiens
ttttccagacagact

SEQ ID NO: 73695 - DNA, 15 bp, Homo sapiens
tttttccagacagac

SEQ ID NO: 73696 - DNA, 15 bp, Homo sapiens
gtttttccagacaga

SEQ ID NO: 73697 - DNA, 15 bp, Homo sapiens
agtttttccagacag

SEQ ID NO: 73698 - DNA, 15 bp, Homo sapiens
tagtttttccagaca

SEQ ID NO: 73699 - DNA, 15 bp, Homo sapiens
atagtttttccagac

SEQ ID NO: 73700 - DNA, 15 bp, Homo sapiens
aatagtttttccaga

SEQ ID NO: 73701 - DNA, 15 bp, Homo sapiens
taatagtttttccag

SEQ ID NO: 73702 - DNA, 15 bp, Homo sapiens
ctaatagtttttcca

SEQ ID NO: 73703 - DNA, 15 bp, Homo sapiens
cctaatagtttttcc

SEQ ID NO: 73704 - DNA, 15 bp, Homo sapiens
gcctaatagtttttc

SEQ ID NO: 73705 - DNA, 15 bp, Homo sapiens
agcctaatagttttt

SEQ ID NO: 73706 - DNA, 15 bp, Homo sapiens
cagcctaatagtttt

SEQ ID NO: 73707 - DNA, 15 bp, Homo sapiens
ccagcctaatagttt

SEQ ID NO: 73708 - DNA, 15 bp, Homo sapiens
gccagcctaatagtt

SEQ ID NO: 73709 - DNA, 15 bp, Homo sapiens
cgccagcctaatagt

SEQ ID NO: 73710 - DNA, 15 bp, Homo sapiens
tcgccagcctaatag

SEQ ID NO: 73711 - DNA, 15 bp, Homo sapiens
ctcgccagcctaata

SEQ ID NO: 73712 - DNA, 15 bp, Homo sapiens
cctcgccagcctaat

SEQ ID NO: 73713 - DNA, 15 bp, Homo sapiens
acctcgccagcctaa

SEQ ID NO: 73714 - DNA, 15 bp, Homo sapiens
cacctcgccagccta

SEQ ID NO: 73715 - DNA, 15 bp, Homo sapiens
ccacctcgccagcct

SEQ ID NO: 73716 - DNA, 15 bp, Homo sapiens
cccacctcgccagcc

SEQ ID NO: 73717 - DNA, 15 bp, Homo sapiens
ccccacctcgccagc

SEQ ID NO: 73718 - DNA, 15 bp, Homo sapiens
tccccacctcgccag

SEQ ID NO: 73719 - DNA, 15 bp, Homo sapiens
gtccccacctcgcca

SEQ ID NO: 73720 - DNA, 15 bp, Homo sapiens
agtccccacctcgcc

SEQ ID NO: 73721 - DNA, 15 bp, Homo sapiens
cagtccccacctcgc

SEQ ID NO: 73722 - DNA, 15 bp, Homo sapiens
ccagtccccacctcg

SEQ ID NO: 73723 - DNA, 15 bp, Homo sapiens
gccagtccccacctc

SEQ ID NO: 73724 - DNA, 15 bp, Homo sapiens
tgccagtccccacct

SEQ ID NO: 73725 - DNA, 15 bp, Homo sapiens
ctgccagtccccacc

SEQ ID NO: 73726 - DNA, 15 bp, Homo sapiens
tctgccagtccccac

SEQ ID NO: 73727 - DNA, 15 bp, Homo sapiens
ctctgccagtcccca

SEQ ID NO: 73728 - DNA, 15 bp, Homo sapiens
gctctgccagtcccc

SEQ ID NO: 73729 - DNA, 15 bp, Homo sapiens
ggctctgccagtccc

SEQ ID NO: 73730 - DNA, 15 bp, Homo sapiens
gggctctgccagtcc

SEQ ID NO: 73731 - DNA, 15 bp, Homo sapiens
cgggctctgccagtc

SEQ ID NO: 73732 - DNA, 15 bp, Homo sapiens
gcgggctctgccagt

SEQ ID NO: 73733 - DNA, 15 bp, Homo sapiens
ggcgggctctgccag

SEQ ID NO: 73734 - DNA, 15 bp, Homo sapiens
tggcgggctctgcca

SEQ ID NO: 73735 - DNA, 15 bp, Homo sapiens
atggcgggctctgcc

SEQ ID NO: 73736 - DNA, 15 bp, Homo sapiens
aatggcgggctctgc

SEQ ID NO: 73737 - DNA, 15 bp, Homo sapiens
gaatggcgggctctg

SEQ ID NO: 73738 - DNA, 15 bp, Homo sapiens
ggaatggcgggctct

SEQ ID NO: 73739 - DNA, 15 bp, Homo sapiens
gggaatggcgggctc

SEQ ID NO: 73740 - DNA, 15 bp, Homo sapiens
ggggaatggcgggct

SEQ ID NO: 73741 - DNA, 15 bp, Homo sapiens
tggggaatggcgggc

SEQ ID NO: 73742 - DNA, 15 bp, Homo sapiens
ctggggaatggcggg

SEQ ID NO: 73743 - DNA, 15 bp, Homo sapiens
tctggggaatggcgg

SEQ ID NO: 73744 - DNA, 15 bp, Homo sapiens
ttctggggaatggcg

SEQ ID NO: 73745 - DNA, 15 bp, Homo sapiens
gttctggggaatggc

SEQ ID NO: 73746 - DNA, 15 bp, Homo sapiens
ggttctggggaatgg

SEQ ID NO: 73747 - DNA, 15 bp, Homo sapiens
gggttctggggaatg

SEQ ID NO: 73748 - DNA, 15 bp, Homo sapiens
cgggttctggggaat

SEQ ID NO: 73749 - DNA, 15 bp, Homo sapiens
tcgggttctggggaa

SEQ ID NO: 73750 - DNA, 15 bp, Homo sapiens
ttcgggttctgggga

SEQ ID NO: 73751 - DNA, 15 bp, Homo sapiens
tttcgggttctgggg

SEQ ID NO: 73752 - DNA, 15 bp, Homo sapiens
ctttcgggttctggg

SEQ ID NO: 73753 - DNA, 15 bp, Homo sapiens
tctttcgggttctgg

SEQ ID NO: 73754 - DNA, 15 bp, Homo sapiens
ttctttcgggttctg

SEQ ID NO: 73755 - DNA, 15 bp, Homo sapiens
attctttcgggttct

SEQ ID NO: 73756 - DNA, 15 bp, Homo sapiens
gattctttcgggttc

SEQ ID NO: 73757 - DNA, 15 bp, Homo sapiens
cgattctttcgggtt

SEQ ID NO: 73758 - DNA, 15 bp, Homo sapiens
tcgattctttcgggt

SEQ ID NO: 73759 - DNA, 15 bp, Homo sapiens
gtcgattctttcggg

SEQ ID NO: 73760 - DNA, 15 bp, Homo sapiens
agtcgattctttcgg

SEQ ID NO: 73761 - DNA, 15 bp, Homo sapiens
gagtcgattctttcg

SEQ ID NO: 73762 - DNA, 15 bp, Homo sapiens
ggagtcgattctttc

SEQ ID NO: 73763 - DNA, 15 bp, Homo sapiens
gggagtcgattcttt

SEQ ID NO: 73764 - DNA, 15 bp, Homo sapiens
agggagtcgattctt

SEQ ID NO: 73765 - DNA, 15 bp, Homo sapiens
cagggagtcgattct

SEQ ID NO: 73766 - DNA, 15 bp, Homo sapiens
gcagggagtcgattc

SEQ ID NO: 73767 - DNA, 15 bp, Homo sapiens
agcagggagtcgatt

SEQ ID NO: 73768 - DNA, 15 bp, Homo sapiens
gagcagggagtcgat

SEQ ID NO: 73769 - DNA, 15 bp, Homo sapiens
tgagcagggagtcga

SEQ ID NO: 73770 - DNA, 15 bp, Homo sapiens
ctgagcagggagtcg

SEQ ID NO: 73771 - DNA, 15 bp, Homo sapiens
cctgagcagggagtc

SEQ ID NO: 73772 - DNA, 15 bp, Homo sapiens
ccctgagcagggagt

SEQ ID NO: 73773 - DNA, 15 bp, Homo sapiens
gccctgagcagggag

SEQ ID NO: 73774 - DNA, 15 bp, Homo sapiens
agccctgagcaggga

SEQ ID NO: 73775 - DNA, 15 bp, Homo sapiens
gagccctgagcaggg

SEQ ID NO: 73776 - DNA, 15 bp, Homo sapiens
tgagccctgagcagg

SEQ ID NO: 73777 - DNA, 15 bp, Homo sapiens
ctgagccctgagcag

SEQ ID NO: 73778 - DNA, 15 bp, Homo sapiens
gctgagccctgagca

SEQ ID NO: 73779 - DNA, 15 bp, Homo sapiens
tgctgagccctgagc

SEQ ID NO: 73780 - DNA, 15 bp, Homo sapiens
ttgctgagccctgag

SEQ ID NO: 73781 - DNA, 15 bp, Homo sapiens
cttgctgagccctga

SEQ ID NO: 73782 - DNA, 15 bp, Homo sapiens
tcttgctgagccctg

SEQ ID NO: 73783 - DNA, 15 bp, Homo sapiens
ctcttgctgagccct

SEQ ID NO: 73784 - DNA, 15 bp, Homo sapiens
tctcttgctgagccc

SEQ ID NO: 73785 - DNA, 15 bp, Homo sapiens
ttctcttgctgagcc

SEQ ID NO: 73786 - DNA, 15 bp, Homo sapiens
cttctcttgctgagc

SEQ ID NO: 73787 - DNA, 15 bp, Homo sapiens
ccttctcttgctgag

SEQ ID NO: 73788 - DNA, 15 bp, Homo sapiens
gccttctcttgctga

SEQ ID NO: 73789 - DNA, 15 bp, Homo sapiens
agccttctcttgctg

SEQ ID NO: 73790 - DNA, 15 bp, Homo sapiens
tagccttctcttgct

SEQ ID NO: 73791 - DNA, 15 bp, Homo sapiens
ttagccttctcttgc

SEQ ID NO: 73792 - DNA, 15 bp, Homo sapiens
cttagccttctcttg

SEQ ID NO: 73793 - DNA, 15 bp, Homo sapiens
tcttagccttctctt

SEQ ID NO: 73794 - DNA, 15 bp, Homo sapiens
atcttagccttctct

SEQ ID NO: 73795 - DNA, 15 bp, Homo sapiens
catcttagccttctc

SEQ ID NO: 73796 - DNA, 15 bp, Homo sapiens
acatcttagccttct

SEQ ID NO: 73797 - DNA, 15 bp, Homo sapiens
aacatcttagccttc

SEQ ID NO: 73798 - DNA, 15 bp, Homo sapiens
caacatcttagcctt

SEQ ID NO: 73799 - DNA, 15 bp, Homo sapiens
ccaacatcttagcct

SEQ ID NO: 73800 - DNA, 15 bp, Homo sapiens
cccaacatcttagcc

SEQ ID NO: 73801 - DNA, 15 bp, Homo sapiens
gcccaacatcttagc

SEQ ID NO: 73802 - DNA, 15 bp, Homo sapiens
agcccaacatcttag

SEQ ID NO: 73803 - DNA, 15 bp, Homo sapiens
gagcccaacatctta

SEQ ID NO: 73804 - DNA, 15 bp, Homo sapiens
tgagcccaacatctt

SEQ ID NO: 73805 - DNA, 15 bp, Homo sapiens
ctgagcccaacatct

SEQ ID NO: 73806 - DNA, 15 bp, Homo sapiens
tctgagcccaacatc

SEQ ID NO: 73807 - DNA, 15 bp, Homo sapiens
ctctgagcccaacat

SEQ ID NO: 73808 - DNA, 15 bp, Homo sapiens
tctctgagcccaaca

SEQ ID NO: 73809 - DNA, 15 bp, Homo sapiens
ttctctgagcccaac

SEQ ID NO: 73810 - DNA, 15 bp, Homo sapiens
attctctgagcccaa

SEQ ID NO: 73811 - DNA, 15 bp, Homo sapiens
aattctctgagccca

SEQ ID NO: 73812 - DNA, 15 bp, Homo sapiens
gaattctctgagccc

SEQ ID NO: 73813 - DNA, 15 bp, Homo sapiens
tgaattctctgagcc

SEQ ID NO: 73814 - DNA, 15 bp, Homo sapiens
ttgaattctctgagc

SEQ ID NO: 73815 - DNA, 15 bp, Homo sapiens
cttgaattctctgag

SEQ ID NO: 73816 - DNA, 15 bp, Homo sapiens
tcttgaattctctga

SEQ ID NO: 73817 - DNA, 15 bp, Homo sapiens
ctcttgaattctctg

SEQ ID NO: 73818 - DNA, 15 bp, Homo sapiens
tctcttgaattctct

SEQ ID NO: 73819 - DNA, 15 bp, Homo sapiens
atctcttgaattctc

SEQ ID NO: 73820 - DNA, 15 bp, Homo sapiens
aatctcttgaattct

SEQ ID NO: 73821 - DNA, 15 bp, Homo sapiens
aaatctcttgaattc

SEQ ID NO: 73822 - DNA, 15 bp, Homo sapiens
aaaatctcttgaatt

SEQ ID NO: 73823 - DNA, 15 bp, Homo sapiens
aaaaatctcttgaat

SEQ ID NO: 73824 - DNA, 15 bp, Homo sapiens
taaaaatctcttgaa

SEQ ID NO: 73825 - DNA, 15 bp, Homo sapiens
ataaaaatctcttga

SEQ ID NO: 73826 - DNA, 15 bp, Homo sapiens
gataaaaatctcttg

SEQ ID NO: 73827 - DNA, 15 bp, Homo sapiens
agataaaaatctctt

SEQ ID NO: 73828 - DNA, 15 bp, Homo sapiens
aagataaaaatctct

SEQ ID NO: 73829 - DNA, 15 bp, Homo sapiens
gaagataaaaatctc

SEQ ID NO: 73830 - DNA, 15 bp, Homo sapiens
agaagataaaaatct

SEQ ID NO: 73831 - DNA, 15 bp, Homo sapiens
cagaagataaaaatc

SEQ ID NO: 73832 - DNA, 15 bp, Homo sapiens
ccagaagataaaaat

SEQ ID NO: 73833 - DNA, 15 bp, Homo sapiens
cccagaagataaaaa

SEQ ID NO: 73834 - DNA, 15 bp, Homo sapiens
acccagaagataaaa

SEQ ID NO: 73835 - DNA, 15 bp, Homo sapiens
cacccagaagataaa

SEQ ID NO: 73836 - DNA, 15 bp, Homo sapiens
ccacccagaagataa

SEQ ID NO: 73837 - DNA, 15 bp, Homo sapiens
cccacccagaagata

SEQ ID NO: 73838 - DNA, 15 bp, Homo sapiens
ccccacccagaagat

SEQ ID NO: 73839 - DNA, 15 bp, Homo sapiens
accccacccagaaga

SEQ ID NO: 73840 - DNA, 15 bp, Homo sapiens
gaccccacccagaag

SEQ ID NO: 73841 - DNA, 15 bp, Homo sapiens
cgaccccacccagaa

SEQ ID NO: 73842 - DNA, 15 bp, Homo sapiens
acgaccccacccaga

SEQ ID NO: 73843 - DNA, 15 bp, Homo sapiens
cacgaccccacccag

SEQ ID NO: 73844 - DNA, 15 bp, Homo sapiens
ccacgaccccaccca

SEQ ID NO: 73845 - DNA, 15 bp, Homo sapiens
accacgaccccaccc

SEQ ID NO: 73846 - DNA, 15 bp, Homo sapiens
aaccacgaccccacc

SEQ ID NO: 73847 - DNA, 15 bp, Homo sapiens
aaaccacgaccccac

SEQ ID NO: 73848 - DNA, 15 bp, Homo sapiens
aaaaccacgacccca

SEQ ID NO: 73849 - DNA, 15 bp, Homo sapiens
aaaaaccacgacccc

SEQ ID NO: 73850 - DNA, 15 bp, Homo sapiens
taaaaaccacgaccc

SEQ ID NO: 73851 - DNA, 15 bp, Homo sapiens
ataaaaaccacgacc

SEQ ID NO: 73852 - DNA, 15 bp, Homo sapiens
aataaaaaccacgac

SEQ ID NO: 73853 - DNA, 15 bp, Homo sapiens
aaataaaaaccacga

SEQ ID NO: 73854 - DNA, 15 bp, Homo sapiens
aaaataaaaaccacg

SEQ ID NO: 73855 - DNA, 15 bp, Homo sapiens
gaaaataaaaaccac

SEQ ID NO: 73856 - DNA, 15 bp, Homo sapiens
agaaaataaaaacca

SEQ ID NO: 73857 - DNA, 15 bp, Homo sapiens
tagaaaataaaaacc

SEQ ID NO: 73858 - DNA, 15 bp, Homo sapiens
ttagaaaataaaaac

SEQ ID NO: 73859 - DNA, 15 bp, Homo sapiens
cttagaaaataaaaa

SEQ ID NO: 73860 - DNA, 15 bp, Homo sapiens
acttagaaaataaaa

SEQ ID NO: 73861 - DNA, 15 bp, Homo sapiens
aacttagaaaataaa

SEQ ID NO: 73862 - DNA, 15 bp, Homo sapiens
aaacttagaaaataa

SEQ ID NO: 73863 - DNA, 15 bp, Homo sapiens
aaaacttagaaaata

SEQ ID NO: 73864 - DNA, 15 bp, Homo sapiens
aaaaacttagaaaat

SEQ ID NO: 73865 - DNA, 15 bp, Homo sapiens
aaaaaacttagaaaa

SEQ ID NO: 73866 - DNA, 15 bp, Homo sapiens
aaaaaaacttagaaa

SEQ ID NO: 73867 - DNA, 15 bp, Homo sapiens
aaaaaaaacttagaa

SEQ ID NO: 73868 - DNA, 15 bp, Homo sapiens
taaaaaaaacttaga

SEQ ID NO: 73869 - DNA, 15 bp, Homo sapiens
ataaaaaaaacttag

SEQ ID NO: 73870 - DNA, 15 bp, Homo sapiens
cataaaaaaaactta

SEQ ID NO: 73871 - DNA, 15 bp, Homo sapiens
tcataaaaaaaactt

SEQ ID NO: 73872 - DNA, 15 bp, Homo sapiens
ttcataaaaaaaact

SEQ ID NO: 73873 - DNA, 15 bp, Homo sapiens
tttcataaaaaaaac

SEQ ID NO: 73874 - DNA, 15 bp, Homo sapiens
ctttcataaaaaaaa

SEQ ID NO: 73875 - DNA, 15 bp, Homo sapiens
actttcataaaaaaa

SEQ ID NO: 73876 - DNA, 15 bp, Homo sapiens
aactttcataaaaaa

SEQ ID NO: 73877 - DNA, 15 bp, Homo sapiens
aaactttcataaaaa

SEQ ID NO: 73878 - DNA, 15 bp, Homo sapiens
caaactttcataaaa

SEQ ID NO: 73879 - DNA, 15 bp, Homo sapiens
tcaaactttcataaa

SEQ ID NO: 73880 - DNA, 15 bp, Homo sapiens
ttcaaactttcataa

SEQ ID NO: 73881 - DNA, 15 bp, Homo sapiens
tttcaaactttcata

SEQ ID NO: 73882 - DNA, 15 bp, Homo sapiens
atttcaaactttcat

SEQ ID NO: 73883 - DNA, 15 bp, Homo sapiens
tatttcaaactttca

SEQ ID NO: 73884 - DNA, 15 bp, Homo sapiens
atatttcaaactttc

SEQ ID NO: 73885 - DNA, 15 bp, Homo sapiens
catatttcaaacttt

SEQ ID NO: 73886 - DNA, 15 bp, Homo sapiens
gcatatttcaaactt

SEQ ID NO: 73887 - DNA, 15 bp, Homo sapiens
agcatatttcaaact

SEQ ID NO: 73888 - DNA, 15 bp, Homo sapiens
cagcatatttcaaac

SEQ ID NO: 73889 - DNA, 15 bp, Homo sapiens
tcagcatatttcaaa

SEQ ID NO: 73890 - DNA, 15 bp, Homo sapiens
gtcagcatatttcaa

SEQ ID NO: 73891 - DNA, 15 bp, Homo sapiens
agtcagcatatttca

SEQ ID NO: 73892 - DNA, 15 bp, Homo sapiens
aagtcagcatatttc

SEQ ID NO: 73893 - DNA, 15 bp, Homo sapiens
taagtcagcatattt

SEQ ID NO: 73894 - DNA, 15 bp, Homo sapiens
ctaagtcagcatatt

SEQ ID NO: 73895 - DNA, 15 bp, Homo sapiens
cctaagtcagcatat

SEQ ID NO: 73896 - DNA, 15 bp, Homo sapiens
acctaagtcagcata

SEQ ID NO: 73897 - DNA, 15 bp, Homo sapiens
ccttcaagggccggg

SEQ ID NO: 73898 - DNA, 15 bp, Homo sapiens
gccttcaagggccgg

SEQ ID NO: 73899 - DNA, 15 bp, Homo sapiens
tgccttcaagggccg

SEQ ID NO: 73900 - DNA, 15 bp, Homo sapiens
atgccttcaagggcc

SEQ ID NO: 73901 - DNA, 15 bp, Homo sapiens
aatgccttcaagggc

SEQ ID NO: 73902 - DNA, 15 bp, Homo sapiens
aaatgccttcaaggg

SEQ ID NO: 73903 - DNA, 15 bp, Homo sapiens
aaaatgccttcaagg

SEQ ID NO: 73904 - DNA, 15 bp, Homo sapiens
taaaatgccttcaag

SEQ ID NO: 73905 - DNA, 15 bp, Homo sapiens
ctaaaatgccttcaa

SEQ ID NO: 73906 - DNA, 15 bp, Homo sapiens
gctaaaatgccttca

SEQ ID NO: 73907 - DNA, 15 bp, Homo sapiens
tgctaaaatgccttc

SEQ ID NO: 73908 - DNA, 15 bp, Homo sapiens
gtgctaaaatgcctt

SEQ ID NO: 73909 - DNA, 15 bp, Homo sapiens
agtgctaaaatgcct

SEQ ID NO: 73910 - DNA, 15 bp, Homo sapiens
aagtgctaaaatgcc

SEQ ID NO: 73911 - DNA, 15 bp, Homo sapiens
caagtgctaaaatgc

SEQ ID NO: 73912 - DNA, 15 bp, Homo sapiens
tcaagtgctaaaatg

SEQ ID NO: 73913 - DNA, 15 bp, Homo sapiens
gtcaagtgctaaaat

SEQ ID NO: 73914 - DNA, 15 bp, Homo sapiens
agtcaagtgctaaaa

SEQ ID NO: 73915 - DNA, 15 bp, Homo sapiens
aagtcaagtgctaaa

SEQ ID NO: 73916 - DNA, 15 bp, Homo sapiens
gaagtcaagtgctaa

SEQ ID NO: 73917 - DNA, 15 bp, Homo sapiens
ggaagtcaagtgcta

SEQ ID NO: 73918 - DNA, 15 bp, Homo sapiens
tggaagtcaagtgct

SEQ ID NO: 73919 - DNA, 15 bp, Homo sapiens
gtggaagtcaagtgc

SEQ ID NO: 73920 - DNA, 15 bp, Homo sapiens
ggtggaagtcaagtg

SEQ ID NO: 73921 - DNA, 15 bp, Homo sapiens
tggtggaagtcaagt

SEQ ID NO: 73922 - DNA, 15 bp, Homo sapiens
gtggtggaagtcaag

SEQ ID NO: 73923 - DNA, 15 bp, Homo sapiens
tgtggtggaagtcaa

SEQ ID NO: 73924 - DNA, 15 bp, Homo sapiens
ctgtggtggaagtca

SEQ ID NO: 73925 - DNA, 15 bp, Homo sapiens
gctgtggtggaagtc

SEQ ID NO: 73926 - DNA, 15 bp, Homo sapiens
ggctgtggtggaagt

SEQ ID NO: 73927 - DNA, 15 bp, Homo sapiens
gggctgtggtggaag

SEQ ID NO: 73928 - DNA, 15 bp, Homo sapiens
ggggctgtggtggaa

SEQ ID NO: 73929 - DNA, 15 bp, Homo sapiens
tggggctgtggtgga

SEQ ID NO: 73930 - DNA, 15 bp, Homo sapiens
ttggggctgtggtgg

SEQ ID NO: 73931 - DNA, 15 bp, Homo sapiens
cttggggctgtggtg

SEQ ID NO: 73932 - DNA, 15 bp, Homo sapiens
ccttggggctgtggt

SEQ ID NO: 73933 - DNA, 15 bp, Homo sapiens
tccttggggctgtgg

SEQ ID NO: 73934 - DNA, 15 bp, Homo sapiens
ttccttggggctgtg

SEQ ID NO: 73935 - DNA, 15 bp, Homo sapiens
attccttggggctgt

SEQ ID NO: 73936 - DNA, 15 bp, Homo sapiens
gattccttggggctg

SEQ ID NO: 73937 - DNA, 15 bp, Homo sapiens
ggattccttggggct

SEQ ID NO: 73938 - DNA, 15 bp, Homo sapiens
tggattccttggggc

SEQ ID NO: 73939 - DNA, 15 bp, Homo sapiens
atggattccttgggg

SEQ ID NO: 73940 - DNA, 15 bp, Homo sapiens
gatggattccttggg

SEQ ID NO: 73941 - DNA, 15 bp, Homo sapiens
agatggattccttgg

SEQ ID NO: 73942 - DNA, 15 bp, Homo sapiens
tagatggattccttg

SEQ ID NO: 73943 - DNA, 15 bp, Homo sapiens
atagatggattcctt

SEQ ID NO: 73944 - DNA, 15 bp, Homo sapiens
gatagatggattcct

SEQ ID NO: 73945 - DNA, 15 bp, Homo sapiens
tgatagatggattcc

SEQ ID NO: 73946 - DNA, 15 bp, Homo sapiens
atgatagatggattc

SEQ ID NO: 73947 - DNA, 15 bp, Homo sapiens
catgatagatggatt

SEQ ID NO: 73948 - DNA, 15 bp, Homo sapiens
tcatgatagatggat

SEQ ID NO: 73949 - DNA, 15 bp, Homo sapiens
gtcatgatagatgga

SEQ ID NO: 73950 - DNA, 15 bp, Homo sapiens
agtcatgatagatgg

SEQ ID NO: 73951 - DNA, 15 bp, Homo sapiens
gagtcatgatagatg

SEQ ID NO: 73952 - DNA, 15 bp, Homo sapiens
cgagtcatgatagat

SEQ ID NO: 73953 - DNA, 15 bp, Homo sapiens
gcgagtcatgataga

SEQ ID NO: 73954 - DNA, 15 bp, Homo sapiens
tgcgagtcatgatag

SEQ ID NO: 73955 - DNA, 15 bp, Homo sapiens
gtgcgagtcatgata

SEQ ID NO: 73956 - DNA, 15 bp, Homo sapiens
cgtgcgagtcatgat

SEQ ID NO: 73957 - DNA, 15 bp, Homo sapiens
gcgtgcgagtcatga

SEQ ID NO: 73958 - DNA, 15 bp, Homo sapiens
tgcgtgcgagtcatg

SEQ ID NO: 73959 - DNA, 15 bp, Homo sapiens
gtgcgtgcgagtcat

SEQ ID NO: 73960 - DNA, 15 bp, Homo sapiens
ggtgcgtgcgagtca

SEQ ID NO: 73961 - DNA, 15 bp, Homo sapiens
gggtgcgtgcgagtc

SEQ ID NO: 73962 - DNA, 15 bp, Homo sapiens
tgggtgcgtgcgagt

SEQ ID NO: 73963 - DNA, 15 bp, Homo sapiens
ctgggtgcgtgcgag

SEQ ID NO: 73964 - DNA, 15 bp, Homo sapiens
actgggtgcgtgcga

SEQ ID NO: 73965 - DNA, 15 bp, Homo sapiens
cactgggtgcgtgcg

SEQ ID NO: 73966 - DNA, 15 bp, Homo sapiens
tcactgggtgcgtgc

SEQ ID NO: 73967 - DNA, 15 bp, Homo sapiens
ctcactgggtgcgtg

SEQ ID NO: 73968 - DNA, 15 bp, Homo sapiens
tctcactgggtgcgt

SEQ ID NO: 73969 - DNA, 15 bp, Homo sapiens
ttctcactgggtgcg

SEQ ID NO: 73970 - DNA, 15 bp, Homo sapiens
cttctcactgggtgc

SEQ ID NO: 73971 - DNA, 15 bp, Homo sapiens
tcttctcactgggtg

SEQ ID NO: 73972 - DNA, 15 bp, Homo sapiens
ttcttctcactgggt

SEQ ID NO: 73973 - DNA, 15 bp, Homo sapiens
gttcttctcactggg

SEQ ID NO: 73974 - DNA, 15 bp, Homo sapiens
ggttcttctcactgg

SEQ ID NO: 73975 - DNA, 15 bp, Homo sapiens
tggttcttctcactg

SEQ ID NO: 73976 - DNA, 15 bp, Homo sapiens
ttggttcttctcact

SEQ ID NO: 73977 - DNA, 15 bp, Homo sapiens
cttggttcttctcac

SEQ ID NO: 73978 - DNA, 15 bp, Homo sapiens
tcttggttcttctca

SEQ ID NO: 73979 - DNA, 15 bp, Homo sapiens
gtcttggttcttctc

SEQ ID NO: 73980 - DNA, 15 bp, Homo sapiens
tgtcttggttcttct

SEQ ID NO: 73981 - DNA, 15 bp, Homo sapiens
atgtcttggttcttc

SEQ ID NO: 73982 - DNA, 15 bp, Homo sapiens
tatgtcttggttctt

SEQ ID NO: 73983 - DNA, 15 bp, Homo sapiens
gtatgtcttggttct

SEQ ID NO: 73984 - DNA, 15 bp, Homo sapiens
cgtatgtcttggttc

SEQ ID NO: 73985 - DNA, 15 bp, Homo sapiens
tcgtatgtcttggtt

SEQ ID NO: 73986 - DNA, 15 bp, Homo sapiens
ttcgtatgtcttggt

SEQ ID NO: 73987 - DNA, 15 bp, Homo sapiens
tttcgtatgtcttgg

SEQ ID NO: 73988 - DNA, 15 bp, Homo sapiens
gtttcgtatgtcttg

SEQ ID NO: 73989 - DNA, 15 bp, Homo sapiens
agtttcgtatgtctt

SEQ ID NO: 73990 - DNA, 15 bp, Homo sapiens
gagtttcgtatgtct

SEQ ID NO: 73991 - DNA, 15 bp, Homo sapiens
tgagtttcgtatgtc

SEQ ID NO: 73992 - DNA, 15 bp, Homo sapiens
ttgagtttcgtatgt

SEQ ID NO: 73993 - DNA, 15 bp, Homo sapiens
cttgagtttcgtatg

SEQ ID NO: 73994 - DNA, 15 bp, Homo sapiens
acttgagtttcgtat

SEQ ID NO: 73995 - DNA, 15 bp, Homo sapiens
cacttgagtttcgta

SEQ ID NO: 73996 - DNA, 15 bp, Homo sapiens
tcacttgagtttcgt

SEQ ID NO: 73997 - DNA, 15 bp, Homo sapiens
gtcacttgagtttcg

SEQ ID NO: 73998 - DNA, 15 bp, Homo sapiens
agtcacttgagtttc

SEQ ID NO: 73999 - DNA, 15 bp, Homo sapiens
aagtcacttgagttt

SEQ ID NO: 74000 - DNA, 15 bp, Homo sapiens
caagtcacttgagtt

SEQ ID NO: 74001 - DNA, 15 bp, Homo sapiens
gcaagtcacttgagt

SEQ ID NO: 74002 - DNA, 15 bp, Homo sapiens
ggcaagtcacttgag

SEQ ID NO: 74003 - DNA, 15 bp, Homo sapiens
tggcaagtcacttga

SEQ ID NO: 74004 - DNA, 15 bp, Homo sapiens
ttggcaagtcacttg

SEQ ID NO: 74005 - DNA, 15 bp, Homo sapiens
tttggcaagtcactt

SEQ ID NO: 74006 - DNA, 15 bp, Homo sapiens
ttttggcaagtcact

SEQ ID NO: 74007 - DNA, 15 bp, Homo sapiens
cttttggcaagtcac

SEQ ID NO: 74008 - DNA, 15 bp, Homo sapiens
acttttggcaagtca

SEQ ID NO: 74009 - DNA, 15 bp, Homo sapiens
aacttttggcaagtc

SEQ ID NO: 74010 - DNA, 15 bp, Homo sapiens
caacttttggcaagt

SEQ ID NO: 74011 - DNA, 15 bp, Homo sapiens
acaacttttggcaag

SEQ ID NO: 74012 - DNA, 15 bp, Homo sapiens
cacaacttttggcaa

SEQ ID NO: 74013 - DNA, 15 bp, Homo sapiens
gcacaacttttggca

SEQ ID NO: 74014 - DNA, 15 bp, Homo sapiens
tgcacaacttttggc

SEQ ID NO: 74015 - DNA, 15 bp, Homo sapiens
ctgcacaacttttgg

SEQ ID NO: 74016 - DNA, 15 bp, Homo sapiens
gctgcacaacttttg

SEQ ID NO: 74017 - DNA, 15 bp, Homo sapiens
agctgcacaactttt

SEQ ID NO: 74018 - DNA, 15 bp, Homo sapiens
tagctgcacaacttt

SEQ ID NO: 74019 - DNA, 15 bp, Homo sapiens
ctagctgcacaactt

SEQ ID NO: 74020 - DNA, 15 bp, Homo sapiens
gctagctgcacaact

SEQ ID NO: 74021 - DNA, 15 bp, Homo sapiens
tgctagctgcacaac

SEQ ID NO: 74022 - DNA, 15 bp, Homo sapiens
ctgctagctgcacaa

SEQ ID NO: 74023 - DNA, 15 bp, Homo sapiens
cctgctagctgcaca

SEQ ID NO: 74024 - DNA, 15 bp, Homo sapiens
acctgctagctgcac

SEQ ID NO: 74025 - DNA, 15 bp, Homo sapiens
aacctgctagctgca

SEQ ID NO: 74026 - DNA, 15 bp, Homo sapiens
gaacctgctagctgc

SEQ ID NO: 74027 - DNA, 15 bp, Homo sapiens
agaacctgctagctg

SEQ ID NO: 74028 - DNA, 15 bp, Homo sapiens
cagaacctgctagct

SEQ ID NO: 74029 - DNA, 15 bp, Homo sapiens
acagaacctgctagc

SEQ ID NO: 74030 - DNA, 15 bp, Homo sapiens
gacagaacctgctag

SEQ ID NO: 74031 - DNA, 15 bp, Homo sapiens
agacagaacctgcta

SEQ ID NO: 74032 - DNA, 15 bp, Homo sapiens
cagacagaacctgct

SEQ ID NO: 74033 - DNA, 15 bp, Homo sapiens
tcagacagaacctgc

SEQ ID NO: 74034 - DNA, 15 bp, Homo sapiens
atcagacagaacctg

SEQ ID NO: 74035 - DNA, 15 bp, Homo sapiens
tatcagacagaacct

SEQ ID NO: 74036 - DNA, 15 bp, Homo sapiens
gtatcagacagaacc

SEQ ID NO: 74037 - DNA, 15 bp, Homo sapiens
ggtatcagacagaac

SEQ ID NO: 74038 - DNA, 15 bp, Homo sapiens
tggtatcagacagaa

SEQ ID NO: 74039 - DNA, 15 bp, Homo sapiens
ttggtatcagacaga

SEQ ID NO: 74040 - DNA, 15 bp, Homo sapiens
tttggtatcagacag

SEQ ID NO: 74041 - DNA, 15 bp, Homo sapiens
ctttggtatcagaca

SEQ ID NO: 74042 - DNA, 15 bp, Homo sapiens
tctttggtatcagac

SEQ ID NO: 74043 - DNA, 15 bp, Homo sapiens
gtctttggtatcaga

SEQ ID NO: 74044 - DNA, 15 bp, Homo sapiens
agtctttggtatcag

SEQ ID NO: 74045 - DNA, 15 bp, Homo sapiens
aagtctttggtatca

SEQ ID NO: 74046 - DNA, 15 bp, Homo sapiens
aaagtctttggtatc

SEQ ID NO: 74047 - DNA, 15 bp, Homo sapiens
taaagtctttggtat

SEQ ID NO: 74048 - DNA, 15 bp, Homo sapiens
gtaaagtctttggta

SEQ ID NO: 74049 - DNA, 15 bp, Homo sapiens
agtaaagtctttggt

SEQ ID NO: 74050 - DNA, 15 bp, Homo sapiens
gagtaaagtctttgg

SEQ ID NO: 74051 - DNA, 15 bp, Homo sapiens
tgagtaaagtctttg

SEQ ID NO: 74052 - DNA, 15 bp, Homo sapiens
gtgagtaaagtcttt

SEQ ID NO: 74053 - DNA, 15 bp, Homo sapiens
agtgagtaaagtctt

SEQ ID NO: 74054 - DNA, 15 bp, Homo sapiens
cagtgagtaaagtct

SEQ ID NO: 74055 - DNA, 15 bp, Homo sapiens
gcagtgagtaaagtc

SEQ ID NO: 74056 - DNA, 15 bp, Homo sapiens
tgcagtgagtaaagt

SEQ ID NO: 74057 - DNA, 15 bp, Homo sapiens
atgcagtgagtaaag

SEQ ID NO: 74058 - DNA, 15 bp, Homo sapiens
tatgcagtgagtaaa

SEQ ID NO: 74059 - DNA, 15 bp, Homo sapiens
atatgcagtgagtaa

SEQ ID NO: 74060 - DNA, 15 bp, Homo sapiens
catatgcagtgagta

SEQ ID NO: 74061 - DNA, 15 bp, Homo sapiens
acatatgcagtgagt

SEQ ID NO: 74062 - DNA, 15 bp, Homo sapiens
cacatatgcagtgag

SEQ ID NO: 74063 - DNA, 15 bp, Homo sapiens
tcacatatgcagtga

SEQ ID NO: 74064 - DNA, 15 bp, Homo sapiens
ttcacatatgcagtg

SEQ ID NO: 74065 - DNA, 15 bp, Homo sapiens
tttcacatatgcagt

SEQ ID NO: 74066 - DNA, 15 bp, Homo sapiens
atttcacatatgcag

SEQ ID NO: 74067 - DNA, 15 bp, Homo sapiens
tatttcacatatgca

SEQ ID NO: 74068 - DNA, 15 bp, Homo sapiens
atatttcacatatgc

SEQ ID NO: 74069 - DNA, 15 bp, Homo sapiens
aatatttcacatatg

SEQ ID NO: 74070 - DNA, 15 bp, Homo sapiens
aaatatttcacatat

SEQ ID NO: 74071 - DNA, 15 bp, Homo sapiens
aaaatatttcacata

SEQ ID NO: 74072 - DNA, 15 bp, Homo sapiens
caaaatatttcacat

SEQ ID NO: 74073 - DNA, 15 bp, Homo sapiens
tcaaaatatttcaca

SEQ ID NO: 74074 - DNA, 15 bp, Homo sapiens
ctcaaaatatttcac

SEQ ID NO: 74075 - DNA, 15 bp, Homo sapiens
tctcaaaatatttca

SEQ ID NO: 74076 - DNA, 15 bp, Homo sapiens
atctcaaaatatttc

SEQ ID NO: 74077 - DNA, 15 bp, Homo sapiens
aatctcaaaatattt

SEQ ID NO: 74078 - DNA, 15 bp, Homo sapiens
aaatctcaaaatatt

SEQ ID NO: 74079 - DNA, 15 bp, Homo sapiens
aaaatctcaaaatat

SEQ ID NO: 74080 - DNA, 15 bp, Homo sapiens
gaaaatctcaaaata

SEQ ID NO: 74081 - DNA, 15 bp, Homo sapiens
tgaaaatctcaaaat

SEQ ID NO: 74082 - DNA, 15 bp, Homo sapiens
ctgaaaatctcaaaa

SEQ ID NO: 74083 - DNA, 15 bp, Homo sapiens
tctgaaaatctcaaa

SEQ ID NO: 74084 - DNA, 15 bp, Homo sapiens
ttctgaaaatctcaa

SEQ ID NO: 74085 - DNA, 15 bp, Homo sapiens
attctgaaaatctca

SEQ ID NO: 74086 - DNA, 15 bp, Homo sapiens
tattctgaaaatctc

SEQ ID NO: 74087 - DNA, 15 bp, Homo sapiens
ttattctgaaaatct

SEQ ID NO: 74088 - DNA, 15 bp, Homo sapiens
cttattctgaaaatc

SEQ ID NO: 74089 - DNA, 15 bp, Homo sapiens
tcttattctgaaaat

SEQ ID NO: 74090 - DNA, 15 bp, Homo sapiens
ctcttattctgaaaa

SEQ ID NO: 74091 - DNA, 15 bp, Homo sapiens
gctcttattctgaaa

SEQ ID NO: 74092 - DNA, 15 bp, Homo sapiens
agctcttattctgaa

SEQ ID NO: 74093 - DNA, 15 bp, Homo sapiens
gagctcttattctga

SEQ ID NO: 74094 - DNA, 15 bp, Homo sapiens
tgagctcttattctg

SEQ ID NO: 74095 - DNA, 15 bp, Homo sapiens
ctgagctcttattct

SEQ ID NO: 74096 - DNA, 15 bp, Homo sapiens
cctgagctcttattc

SEQ ID NO: 74097 - DNA, 15 bp, Homo sapiens
ccctgagctcttatt

SEQ ID NO: 74098 - DNA, 15 bp, Homo sapiens
accctgagctcttat

SEQ ID NO: 74099 - DNA, 15 bp, Homo sapiens
aaccctgagctctta

SEQ ID NO: 74100 - DNA, 15 bp, Homo sapiens
caaccctgagctctt

SEQ ID NO: 74101 - DNA, 15 bp, Homo sapiens
gcaaccctgagctct

SEQ ID NO: 74102 - DNA, 15 bp, Homo sapiens
agcaaccctgagctc

SEQ ID NO: 74103 - DNA, 15 bp, Homo sapiens
tagcaaccctgagct

SEQ ID NO: 74104 - DNA, 15 bp, Homo sapiens
ttagcaaccctgagc

SEQ ID NO: 74105 - DNA, 15 bp, Homo sapiens
cttagcaaccctgag

SEQ ID NO: 74106 - DNA, 15 bp, Homo sapiens
acttagcaaccctga

SEQ ID NO: 74107 - DNA, 15 bp, Homo sapiens
cacttagcaaccctg

SEQ ID NO: 74108 - DNA, 15 bp, Homo sapiens
tcacttagcaaccct

SEQ ID NO: 74109 - DNA, 15 bp, Homo sapiens
atcacttagcaaccc

SEQ ID NO: 74110 - DNA, 15 bp, Homo sapiens
aatcacttagcaacc

SEQ ID NO: 74111 - DNA, 15 bp, Homo sapiens
taatcacttagcaac

SEQ ID NO: 74112 - DNA, 15 bp, Homo sapiens
ttaatcacttagcaa

SEQ ID NO: 74113 - DNA, 15 bp, Homo sapiens
tttaatcacttagca

SEQ ID NO: 74114 - DNA, 15 bp, Homo sapiens
gtttaatcacttagc

SEQ ID NO: 74115 - DNA, 15 bp, Homo sapiens
tgtttaatcacttag

SEQ ID NO: 74116 - DNA, 15 bp, Homo sapiens
atgtttaatcactta

SEQ ID NO: 74117 - DNA, 15 bp, Homo sapiens
tatgtttaatcactt

SEQ ID NO: 74118 - DNA, 15 bp, Homo sapiens
atatgtttaatcact

SEQ ID NO: 74119 - DNA, 15 bp, Homo sapiens
tatatgtttaatcac

SEQ ID NO: 74120 - DNA, 15 bp, Homo sapiens
gtatatgtttaatca

SEQ ID NO: 74121 - DNA, 15 bp, Homo sapiens
tgtatatgtttaatc

SEQ ID NO: 74122 - DNA, 15 bp, Homo sapiens
ttgtatatgtttaat

SEQ ID NO: 74123 - DNA, 15 bp, Homo sapiens
attgtatatgtttaa

SEQ ID NO: 74124 - DNA, 15 bp, Homo sapiens
aattgtatatgttta

SEQ ID NO: 74125 - DNA, 15 bp, Homo sapiens
taattgtatatgttt

SEQ ID NO: 74126 - DNA, 15 bp, Homo sapiens
ttaattgtatatgtt

SEQ ID NO: 74127 - DNA, 15 bp, Homo sapiens
attaattgtatatgt

SEQ ID NO: 74128 - DNA, 15 bp, Homo sapiens
aattaattgtatatg

SEQ ID NO: 74129 - DNA, 15 bp, Homo sapiens
taattaattgtatat

SEQ ID NO: 74130 - DNA, 15 bp, Homo sapiens
ataattaattgtata

SEQ ID NO: 74131 - DNA, 15 bp, Homo sapiens
aataattaattgtat

SEQ ID NO: 74132 - DNA, 15 bp, Homo sapiens
gaataattaattgta

SEQ ID NO: 74133 - DNA, 15 bp, Homo sapiens
ggaataattaattgt

SEQ ID NO: 74134 - DNA, 15 bp, Homo sapiens
aggaataattaattg

SEQ ID NO: 74135 - DNA, 15 bp, Homo sapiens
caggaataattaatt

SEQ ID NO: 74136 - DNA, 15 bp, Homo sapiens
gcaggaataattaat

SEQ ID NO: 74137 - DNA, 15 bp, Homo sapiens
ggcaggaataattaa

SEQ ID NO: 74138 - DNA, 15 bp, Homo sapiens
gggcaggaataatta

SEQ ID NO: 74139 - DNA, 15 bp, Homo sapiens
agggcaggaataatt

SEQ ID NO: 74140 - DNA, 15 bp, Homo sapiens
cagggcaggaataat

SEQ ID NO: 74141 - DNA, 15 bp, Homo sapiens
ccagggcaggaataa

SEQ ID NO: 74142 - DNA, 15 bp, Homo sapiens
tccagggcaggaata

SEQ ID NO: 74143 - DNA, 15 bp, Homo sapiens
ttccagggcaggaat

SEQ ID NO: 74144 - DNA, 15 bp, Homo sapiens
cttccagggcaggaa

SEQ ID NO: 74145 - DNA, 15 bp, Homo sapiens
tcttccagggcagga

SEQ ID NO: 74146 - DNA, 15 bp, Homo sapiens
gtcttccagggcagg

SEQ ID NO: 74147 - DNA, 15 bp, Homo sapiens
tgtcttccagggcag

SEQ ID NO: 74148 - DNA, 15 bp, Homo sapiens
ttgtcttccagggca

SEQ ID NO: 74149 - DNA, 15 bp, Homo sapiens
cttgtcttccagggc

SEQ ID NO: 74150 - DNA, 15 bp, Homo sapiens
tcttgtcttccaggg

SEQ ID NO: 74151 - DNA, 15 bp, Homo sapiens
ctcttgtcttccagg

SEQ ID NO: 74152 - DNA, 15 bp, Homo sapiens
actcttgtcttccag

SEQ ID NO: 74153 - DNA, 15 bp, Homo sapiens
cactcttgtcttcca

SEQ ID NO: 74154 - DNA, 15 bp, Homo sapiens
acactcttgtcttcc

SEQ ID NO: 74155 - DNA, 15 bp, Homo sapiens
aacactcttgtcttc

SEQ ID NO: 74156 - DNA, 15 bp, Homo sapiens
taacactcttgtctt

SEQ ID NO: 74157 - DNA, 15 bp, Homo sapiens
gtaacactcttgtct

SEQ ID NO: 74158 - DNA, 15 bp, Homo sapiens
ggtaacactcttgtc

SEQ ID NO: 74159 - DNA, 15 bp, Homo sapiens
tggtaacactcttgt

SEQ ID NO: 74160 - DNA, 15 bp, Homo sapiens
atggtaacactcttg

SEQ ID NO: 74161 - DNA, 15 bp, Homo sapiens
aatggtaacactctt

SEQ ID NO: 74162 - DNA, 15 bp, Homo sapiens
taatggtaacactct

SEQ ID NO: 74163 - DNA, 15 bp, Homo sapiens
ctaatggtaacactc

SEQ ID NO: 74164 - DNA, 15 bp, Homo sapiens
gctaatggtaacact

SEQ ID NO: 74165 - DNA, 15 bp, Homo sapiens
tgctaatggtaacac

SEQ ID NO: 74166 - DNA, 15 bp, Homo sapiens
ctgctaatggtaaca

SEQ ID NO: 74167 - DNA, 15 bp, Homo sapiens
tctgctaatggtaac

SEQ ID NO: 74168 - DNA, 15 bp, Homo sapiens
ttctgctaatggtaa

SEQ ID NO: 74169 - DNA, 15 bp, Homo sapiens
cttctgctaatggta

SEQ ID NO: 74170 - DNA, 15 bp, Homo sapiens
acttctgctaatggt

SEQ ID NO: 74171 - DNA, 15 bp, Homo sapiens
aacttctgctaatgg

SEQ ID NO: 74172 - DNA, 15 bp, Homo sapiens
aaacttctgctaatg

SEQ ID NO: 74173 - DNA, 15 bp, Homo sapiens
taaacttctgctaat

SEQ ID NO: 74174 - DNA, 15 bp, Homo sapiens
ataaacttctgctaa

SEQ ID NO: 74175 - DNA, 15 bp, Homo sapiens
aataaacttctgcta

SEQ ID NO: 74176 - DNA, 15 bp, Homo sapiens
aaataaacttctgct

SEQ ID NO: 74177 - DNA, 15 bp, Homo sapiens
aaaataaacttctgc

SEQ ID NO: 74178 - DNA, 15 bp, Homo sapiens
aaaaataaacttctg

SEQ ID NO: 74179 - DNA, 15 bp, Homo sapiens
caaaaataaacttct

SEQ ID NO: 74180 - DNA, 15 bp, Homo sapiens
gcaaaaataaacttc

SEQ ID NO: 74181 - DNA, 15 bp, Homo sapiens
tgcaaaaataaactt

SEQ ID NO: 74182 - DNA, 15 bp, Homo sapiens
ttgcaaaaataaact

SEQ ID NO: 74183 - DNA, 15 bp, Homo sapiens
attgcaaaaataaac

SEQ ID NO: 74184 - DNA, 15 bp, Homo sapiens
aattgcaaaaataaa

SEQ ID NO: 74185 - DNA, 15 bp, Homo sapiens
gaattgcaaaaataa

SEQ ID NO: 74186 - DNA, 15 bp, Homo sapiens
ggaattgcaaaaata

SEQ ID NO: 74187 - DNA, 15 bp, Homo sapiens
aggaattgcaaaaat

SEQ ID NO: 74188 - DNA, 15 bp, Homo sapiens
gaggaattgcaaaaa

SEQ ID NO: 74189 - DNA, 15 bp, Homo sapiens
agaggaattgcaaaa

SEQ ID NO: 74190 - DNA, 15 bp, Homo sapiens
cagaggaattgcaaa

SEQ ID NO: 74191 - DNA, 15 bp, Homo sapiens
ccagaggaattgcaa

SEQ ID NO: 74192 - DNA, 15 bp, Homo sapiens
gccagaggaattgca

SEQ ID NO: 74193 - DNA, 15 bp, Homo sapiens
ggccagaggaattgc

SEQ ID NO: 74194 - DNA, 15 bp, Homo sapiens
aggccagaggaattg

SEQ ID NO: 74195 - DNA, 15 bp, Homo sapiens
aaggccagaggaatt

SEQ ID NO: 74196 - DNA, 15 bp, Homo sapiens
gaaggccagaggaat

SEQ ID NO: 74197 - DNA, 15 bp, Homo sapiens
agaaggccagaggaa

SEQ ID NO: 74198 - DNA, 15 bp, Homo sapiens
cagaaggccagagga

SEQ ID NO: 74199 - DNA, 15 bp, Homo sapiens
ccagaaggccagagg

SEQ ID NO: 74200 - DNA, 15 bp, Homo sapiens
accagaaggccagag

SEQ ID NO: 74201 - DNA, 15 bp, Homo sapiens
caccagaaggccaga

SEQ ID NO: 74202 - DNA, 15 bp, Homo sapiens
acaccagaaggccag

SEQ ID NO: 74203 - DNA, 15 bp, Homo sapiens
aacaccagaaggcca

SEQ ID NO: 74204 - DNA, 15 bp, Homo sapiens
gaacaccagaaggcc

SEQ ID NO: 74205 - DNA, 15 bp, Homo sapiens
ggaacaccagaaggc

SEQ ID NO: 74206 - DNA, 15 bp, Homo sapiens
gggaacaccagaagg

SEQ ID NO: 74207 - DNA, 15 bp, Homo sapiens
tgggaacaccagaag

SEQ ID NO: 74208 - DNA, 15 bp, Homo sapiens
gtgggaacaccagaa

SEQ ID NO: 74209 - DNA, 15 bp, Homo sapiens
tgtgggaacaccaga

SEQ ID NO: 74210 - DNA, 15 bp, Homo sapiens
atgtgggaacaccag

SEQ ID NO: 74211 - DNA, 15 bp, Homo sapiens
catgtgggaacacca

SEQ ID NO: 74212 - DNA, 15 bp, Homo sapiens
gcatgtgggaacacc

SEQ ID NO: 74213 - DNA, 15 bp, Homo sapiens
ggcatgtgggaacac

SEQ ID NO: 74214 - DNA, 15 bp, Homo sapiens
aggcatgtgggaaca

SEQ ID NO: 74215 - DNA, 15 bp, Homo sapiens
gaggcatgtgggaac

SEQ ID NO: 74216 - DNA, 15 bp, Homo sapiens
ggaggcatgtgggaa

SEQ ID NO: 74217 - DNA, 15 bp, Homo sapiens
tggaggcatgtggga

SEQ ID NO: 74218 - DNA, 15 bp, Homo sapiens
gtggaggcatgtggg

SEQ ID NO: 74219 - DNA, 15 bp, Homo sapiens
ggtggaggcatgtgg

SEQ ID NO: 74220 - DNA, 15 bp, Homo sapiens
gggtggaggcatgtg

SEQ ID NO: 74221 - DNA, 15 bp, Homo sapiens
ggggtggaggcatgt

SEQ ID NO: 74222 - DNA, 15 bp, Homo sapiens
aggggtggaggcatg

SEQ ID NO: 74223 - DNA, 15 bp, Homo sapiens
aaggggtggaggcat

SEQ ID NO: 74224 - DNA, 15 bp, Homo sapiens
aaaggggtggaggca

SEQ ID NO: 74225 - DNA, 15 bp, Homo sapiens
aaaaggggtggaggc

SEQ ID NO: 74226 - DNA, 15 bp, Homo sapiens
gaaaaggggtggagg

SEQ ID NO: 74227 - DNA, 15 bp, Homo sapiens
ggaaaaggggtggag

SEQ ID NO: 74228 - DNA, 15 bp, Homo sapiens
aggaaaaggggtgga

SEQ ID NO: 74229 - DNA, 15 bp, Homo sapiens
taggaaaaggggtgg

SEQ ID NO: 74230 - DNA, 15 bp, Homo sapiens
ttaggaaaaggggtg

SEQ ID NO: 74231 - DNA, 15 bp, Homo sapiens
gttaggaaaaggggt

SEQ ID NO: 74232 - DNA, 15 bp, Homo sapiens
cgttaggaaaagggg

SEQ ID NO: 74233 - DNA, 15 bp, Homo sapiens
acgttaggaaaaggg

SEQ ID NO: 74234 - DNA, 15 bp, Homo sapiens
tacgttaggaaaagg

SEQ ID NO: 74235 - DNA, 15 bp, Homo sapiens
atacgttaggaaaag

SEQ ID NO: 74236 - DNA, 15 bp, Homo sapiens
aatacgttaggaaaa

SEQ ID NO: 74237 - DNA, 15 bp, Homo sapiens
caatacgttaggaaa

SEQ ID NO: 74238 - DNA, 15 bp, Homo sapiens
gcaatacgttaggaa

SEQ ID NO: 74239 - DNA, 15 bp, Homo sapiens
agcaatacgttagga

SEQ ID NO: 74240 - DNA, 15 bp, Homo sapiens
aagcaatacgttagg

SEQ ID NO: 74241 - DNA, 15 bp, Homo sapiens
caagcaatacgttag

SEQ ID NO: 74242 - DNA, 15 bp, Homo sapiens
gcaagcaatacgtta

SEQ ID NO: 74243 - DNA, 15 bp, Homo sapiens
ggcaagcaatacgtt

SEQ ID NO: 74244 - DNA, 15 bp, Homo sapiens
aggcaagcaatacgt

SEQ ID NO: 74245 - DNA, 15 bp, Homo sapiens
caggcaagcaatacg

SEQ ID NO: 74246 - DNA, 15 bp, Homo sapiens
acaggcaagcaatac

SEQ ID NO: 74247 - DNA, 15 bp, Homo sapiens
aacaggcaagcaata

SEQ ID NO: 74248 - DNA, 15 bp, Homo sapiens
caacaggcaagcaat

SEQ ID NO: 74249 - DNA, 15 bp, Homo sapiens
acaacaggcaagcaa

SEQ ID NO: 74250 - DNA, 15 bp, Homo sapiens
aacaacaggcaagca

SEQ ID NO: 74251 - DNA, 15 bp, Homo sapiens
aaacaacaggcaagc

SEQ ID NO: 74252 - DNA, 15 bp, Homo sapiens
taaacaacaggcaag

SEQ ID NO: 74253 - DNA, 15 bp, Homo sapiens
ttaaacaacaggcaa

SEQ ID NO: 74254 - DNA, 15 bp, Homo sapiens
tttaaacaacaggca

SEQ ID NO: 74255 - DNA, 15 bp, Homo sapiens
ctttaaacaacaggc

SEQ ID NO: 74256 - DNA, 15 bp, Homo sapiens
tctttaaacaacagg

SEQ ID NO: 74257 - DNA, 15 bp, Homo sapiens
ttctttaaacaacag

SEQ ID NO: 74258 - DNA, 15 bp, Homo sapiens
tttctttaaacaaca

SEQ ID NO: 74259 - DNA, 15 bp, Homo sapiens
ttttctttaaacaac

SEQ ID NO: 74260 - DNA, 15 bp, Homo sapiens
gttttctttaaacaa

SEQ ID NO: 74261 - DNA, 15 bp, Homo sapiens
tgttttctttaaaca

SEQ ID NO: 74262 - DNA, 15 bp, Homo sapiens
ttgttttctttaaac

SEQ ID NO: 74263 - DNA, 15 bp, Homo sapiens
tttgttttctttaaa

SEQ ID NO: 74264 - DNA, 15 bp, Homo sapiens
ttttgttttctttaa

SEQ ID NO: 74265 - DNA, 15 bp, Homo sapiens
tttttgttttcttta

SEQ ID NO: 74266 - DNA, 15 bp, Homo sapiens
atttttgttttcttt

SEQ ID NO: 74267 - DNA, 15 bp, Homo sapiens
aatttttgttttctt

SEQ ID NO: 74268 - DNA, 15 bp, Homo sapiens
aaatttttgttttct

SEQ ID NO: 74269 - DNA, 15 bp, Homo sapiens
taaatttttgttttc

SEQ ID NO: 74270 - DNA, 15 bp, Homo sapiens
ataaatttttgtttt

SEQ ID NO: 74271 - DNA, 15 bp, Homo sapiens
aataaatttttgttt

SEQ ID NO: 74272 - DNA, 15 bp, Homo sapiens
gaataaatttttgtt

SEQ ID NO: 74273 - DNA, 15 bp, Homo sapiens
agaataaatttttgt

SEQ ID NO: 74274 - DNA, 15 bp, Homo sapiens
gagaataaatttttg

SEQ ID NO: 74275 - DNA, 15 bp, Homo sapiens
tgagaataaattttt

SEQ ID NO: 74276 - DNA, 15 bp, Homo sapiens
ttgagaataaatttt

SEQ ID NO: 74277 - DNA, 15 bp, Homo sapiens
tttgagaataaattt

SEQ ID NO: 74278 - DNA, 15 bp, Homo sapiens
gtttgagaataaatt

SEQ ID NO: 74279 - DNA, 15 bp, Homo sapiens
agtttgagaataaat

SEQ ID NO: 74280 - DNA, 15 bp, Homo sapiens
aagtttgagaataaa

SEQ ID NO: 74281 - DNA, 15 bp, Homo sapiens
caagtttgagaataa

SEQ ID NO: 74282 - DNA, 15 bp, Homo sapiens
acaagtttgagaata

SEQ ID NO: 74283 - DNA, 15 bp, Homo sapiens
gacaagtttgagaat

SEQ ID NO: 74284 - DNA, 15 bp, Homo sapiens
ggacaagtttgagaa

SEQ ID NO: 74285 - DNA, 15 bp, Homo sapiens
tggacaagtttgaga

SEQ ID NO: 74286 - DNA, 15 bp, Homo sapiens
ttggacaagtttgag

SEQ ID NO: 74287 - DNA, 15 bp, Homo sapiens
tttggacaagtttga

SEQ ID NO: 74288 - DNA, 15 bp, Homo sapiens
atttggacaagtttg

SEQ ID NO: 74289 - DNA, 15 bp, Homo sapiens
tatttggacaagttt

SEQ ID NO: 74290 - DNA, 15 bp, Homo sapiens
ctatttggacaagtt

SEQ ID NO: 74291 - DNA, 15 bp, Homo sapiens
tctatttggacaagt

SEQ ID NO: 74292 - DNA, 15 bp, Homo sapiens
ttctatttggacaag

SEQ ID NO: 74293 - DNA, 15 bp, Homo sapiens
tttctatttggacaa

SEQ ID NO: 74294 - DNA, 15 bp, Homo sapiens
atttctatttggaca

SEQ ID NO: 74295 - DNA, 15 bp, Homo sapiens
catttctatttggac

SEQ ID NO: 74296 - DNA, 15 bp, Homo sapiens
tcatttctatttgga

SEQ ID NO: 74297 - DNA, 15 bp, Homo sapiens
ttcatttctatttgg

SEQ ID NO: 74298 - DNA, 15 bp, Homo sapiens
attcatttctatttg

SEQ ID NO: 74299 - DNA, 15 bp, Homo sapiens
aattcatttctattt

SEQ ID NO: 74300 - DNA, 15 bp, Homo sapiens
caattcatttctatt

SEQ ID NO: 74301 - DNA, 15 bp, Homo sapiens
gcaattcatttctat

SEQ ID NO: 74302 - DNA, 15 bp, Homo sapiens
tgcaattcatttcta

SEQ ID NO: 74303 - DNA, 15 bp, Homo sapiens
atgcaattcatttct

SEQ ID NO: 74304 - DNA, 15 bp, Homo sapiens
aatgcaattcatttc

SEQ ID NO: 74305 - DNA, 15 bp, Homo sapiens
taatgcaattcattt

SEQ ID NO: 74306 - DNA, 15 bp, Homo sapiens
ttaatgcaattcatt

SEQ ID NO: 74307 - DNA, 15 bp, Homo sapiens
tttaatgcaattcat

SEQ ID NO: 74308 - DNA, 15 bp, Homo sapiens
ttttaatgcaattca

SEQ ID NO: 74309 - DNA, 15 bp, Homo sapiens
tttttaatgcaattc

SEQ ID NO: 74310 - DNA, 15 bp, Homo sapiens
atttttaatgcaatt

SEQ ID NO: 74311 - DNA, 15 bp, Homo sapiens
tatttttaatgcaat

SEQ ID NO: 74312 - DNA, 15 bp, Homo sapiens
ctatttttaatgcaa

SEQ ID NO: 74313 - DNA, 15 bp, Homo sapiens
actatttttaatgca

SEQ ID NO: 74314 - DNA, 15 bp, Homo sapiens
cactatttttaatgc

SEQ ID NO: 74315 - DNA, 15 bp, Homo sapiens
tcactatttttaatg

SEQ ID NO: 74316 - DNA, 15 bp, Homo sapiens
ttcactatttttaat

SEQ ID NO: 74317 - DNA, 15 bp, Homo sapiens
tttcactatttttaa

SEQ ID NO: 74318 - DNA, 15 bp, Homo sapiens
ctttcactattttta

SEQ ID NO: 74319 - DNA, 15 bp, Homo sapiens
gctttcactattttt

SEQ ID NO: 74320 - DNA, 15 bp, Homo sapiens
ggctttcactatttt

SEQ ID NO: 74321 - DNA, 15 bp, Homo sapiens
tggctttcactattt

SEQ ID NO: 74322 - DNA, 15 bp, Homo sapiens
atggctttcactatt

SEQ ID NO: 74323 - DNA, 15 bp, Homo sapiens
catggctttcactat

SEQ ID NO: 74324 - DNA, 15 bp, Homo sapiens
ccatggctttcacta

SEQ ID NO: 74325 - DNA, 15 bp, Homo sapiens
accatggctttcact

SEQ ID NO: 74326 - DNA, 15 bp, Homo sapiens
caccatggctttcac

SEQ ID NO: 74327 - DNA, 15 bp, Homo sapiens
tcaccatggctttca

SEQ ID NO: 74328 - DNA, 15 bp, Homo sapiens
ttcaccatggctttc

SEQ ID NO: 74329 - DNA, 15 bp, Homo sapiens
cttcaccatggcttt

SEQ ID NO: 74330 - DNA, 15 bp, Homo sapiens
ccttcaccatggctt

SEQ ID NO: 74331 - DNA, 15 bp, Homo sapiens
tccttcaccatggct

SEQ ID NO: 74332 - DNA, 15 bp, Homo sapiens
gtccttcaccatggc

SEQ ID NO: 74333 - DNA, 15 bp, Homo sapiens
agtccttcaccatgg

SEQ ID NO: 74334 - DNA, 15 bp, Homo sapiens
cagtccttcaccatg

SEQ ID NO: 74335 - DNA, 15 bp, Homo sapiens
tcagtccttcaccat

SEQ ID NO: 74336 - DNA, 15 bp, Homo sapiens
ttcagtccttcacca

SEQ ID NO: 74337 - DNA, 15 bp, Homo sapiens
tttcagtccttcacc

SEQ ID NO: 74338 - DNA, 15 bp, Homo sapiens
ttttcagtccttcac

SEQ ID NO: 74339 - DNA, 15 bp, Homo sapiens
tttttcagtccttca

SEQ ID NO: 74340 - DNA, 15 bp, Homo sapiens
ctttttcagtccttc

SEQ ID NO: 74341 - DNA, 15 bp, Homo sapiens
actttttcagtcctt

SEQ ID NO: 74342 - DNA, 15 bp, Homo sapiens
aactttttcagtcct

SEQ ID NO: 74343 - DNA, 15 bp, Homo sapiens
caactttttcagtcc

SEQ ID NO: 74344 - DNA, 15 bp, Homo sapiens
tcaactttttcagtc

SEQ ID NO: 74345 - DNA, 15 bp, Homo sapiens
ctcaactttttcagt

SEQ ID NO: 74346 - DNA, 15 bp, Homo sapiens
cctcaactttttcag

SEQ ID NO: 74347 - DNA, 15 bp, Homo sapiens
tcctcaactttttca

SEQ ID NO: 74348 - DNA, 15 bp, Homo sapiens
ctcctcaactttttc

SEQ ID NO: 74349 - DNA, 15 bp, Homo sapiens
actcctcaacttttt

SEQ ID NO: 74350 - DNA, 15 bp, Homo sapiens
gactcctcaactttt

SEQ ID NO: 74351 - DNA, 15 bp, Homo sapiens
tgactcctcaacttt

SEQ ID NO: 74352 - DNA, 15 bp, Homo sapiens
ttgactcctcaactt

SEQ ID NO: 74353 - DNA, 15 bp, Homo sapiens
attgactcctcaact

SEQ ID NO: 74354 - DNA, 15 bp, Homo sapiens
cattgactcctcaac

SEQ ID NO: 74355 - DNA, 15 bp, Homo sapiens
tcattgactcctcaa

SEQ ID NO: 74356 - DNA, 15 bp, Homo sapiens
gtcattgactcctca

SEQ ID NO: 74357 - DNA, 15 bp, Homo sapiens
tgtcattgactcctc

SEQ ID NO: 74358 - DNA, 15 bp, Homo sapiens
atgtcattgactcct

SEQ ID NO: 74359 - DNA, 15 bp, Homo sapiens
aatgtcattgactcc

SEQ ID NO: 74360 - DNA, 15 bp, Homo sapiens
aaatgtcattgactc

SEQ ID NO: 74361 - DNA, 15 bp, Homo sapiens
caaatgtcattgact

SEQ ID NO: 74362 - DNA, 15 bp, Homo sapiens
gcaaatgtcattgac

SEQ ID NO: 74363 - DNA, 15 bp, Homo sapiens
tgcaaatgtcattga

SEQ ID NO: 74364 - DNA, 15 bp, Homo sapiens
ctgcaaatgtcattg

SEQ ID NO: 74365 - DNA, 15 bp, Homo sapiens
tctgcaaatgtcatt

SEQ ID NO: 74366 - DNA, 15 bp, Homo sapiens
ctctgcaaatgtcat

SEQ ID NO: 74367 - DNA, 15 bp, Homo sapiens
gctctgcaaatgtca

SEQ ID NO: 74368 - DNA, 15 bp, Homo sapiens
ggctctgcaaatgtc

SEQ ID NO: 74369 - DNA, 15 bp, Homo sapiens
gggctctgcaaatgt

SEQ ID NO: 74370 - DNA, 15 bp, Homo sapiens
ggggctctgcaaatg

SEQ ID NO: 74371 - DNA, 15 bp, Homo sapiens
aggggctctgcaaat

SEQ ID NO: 74372 - DNA, 15 bp, Homo sapiens
caggggctctgcaaa

SEQ ID NO: 74373 - DNA, 15 bp, Homo sapiens
gcaggggctctgcaa

SEQ ID NO: 74374 - DNA, 15 bp, Homo sapiens
agcaggggctctgca

SEQ ID NO: 74375 - DNA, 15 bp, Homo sapiens
cagcaggggctctgc

SEQ ID NO: 74376 - DNA, 15 bp, Homo sapiens
acagcaggggctctg

SEQ ID NO: 74377 - DNA, 15 bp, Homo sapiens
cacagcaggggctct

SEQ ID NO: 74378 - DNA, 15 bp, Homo sapiens
gcacagcaggggctc

SEQ ID NO: 74379 - DNA, 15 bp, Homo sapiens
tgcacagcaggggct

SEQ ID NO: 74380 - DNA, 15 bp, Homo sapiens
ttgcacagcaggggc

SEQ ID NO: 74381 - DNA, 15 bp, Homo sapiens
gttgcacagcagggg

SEQ ID NO: 74382 - DNA, 15 bp, Homo sapiens
agttgcacagcaggg

SEQ ID NO: 74383 - DNA, 15 bp, Homo sapiens
aagttgcacagcagg

SEQ ID NO: 74384 - DNA, 15 bp, Homo sapiens
gaagttgcacagcag

SEQ ID NO: 74385 - DNA, 15 bp, Homo sapiens
ggaagttgcacagca

SEQ ID NO: 74386 - DNA, 15 bp, Homo sapiens
tggaagttgcacagc

SEQ ID NO: 74387 - DNA, 15 bp, Homo sapiens
atggaagttgcacag

SEQ ID NO: 74388 - DNA, 15 bp, Homo sapiens
catggaagttgcaca

SEQ ID NO: 74389 - DNA, 15 bp, Homo sapiens
ccatggaagttgcac

SEQ ID NO: 74390 - DNA, 15 bp, Homo sapiens
cccatggaagttgca

SEQ ID NO: 74391 - DNA, 15 bp, Homo sapiens
tcccatggaagttgc

SEQ ID NO: 74392 - DNA, 15 bp, Homo sapiens
gtcccatggaagttg

SEQ ID NO: 74393 - DNA, 15 bp, Homo sapiens
agtcccatggaagtt

SEQ ID NO: 74394 - DNA, 15 bp, Homo sapiens
tagtcccatggaagt

SEQ ID NO: 74395 - DNA, 15 bp, Homo sapiens
gtagtcccatggaag

SEQ ID NO: 74396 - DNA, 15 bp, Homo sapiens
ggtagtcccatggaa

SEQ ID NO: 74397 - DNA, 15 bp, Homo sapiens
tggtagtcccatgga

SEQ ID NO: 74398 - DNA, 15 bp, Homo sapiens
ctggtagtcccatgg

SEQ ID NO: 74399 - DNA, 15 bp, Homo sapiens
cctggtagtcccatg

SEQ ID NO: 74400 - DNA, 15 bp, Homo sapiens
tcctggtagtcccat

SEQ ID NO: 74401 - DNA, 15 bp, Homo sapiens
gtcctggtagtccca

SEQ ID NO: 74402 - DNA, 15 bp, Homo sapiens
ggtcctggtagtccc

SEQ ID NO: 74403 - DNA, 15 bp, Homo sapiens
cggtcctggtagtcc

SEQ ID NO: 74404 - DNA, 15 bp, Homo sapiens
tcggtcctggtagtc

SEQ ID NO: 74405 - DNA, 15 bp, Homo sapiens
ctcggtcctggtagt

SEQ ID NO: 74406 - DNA, 15 bp, Homo sapiens
cctcggtcctggtag

SEQ ID NO: 74407 - DNA, 15 bp, Homo sapiens
gcctcggtcctggta

SEQ ID NO: 74408 - DNA, 15 bp, Homo sapiens
agcctcggtcctggt

SEQ ID NO: 74409 - DNA, 15 bp, Homo sapiens
tagcctcggtcctgg

SEQ ID NO: 74410 - DNA, 15 bp, Homo sapiens
atagcctcggtcctg

SEQ ID NO: 74411 - DNA, 15 bp, Homo sapiens
tatagcctcggtcct

SEQ ID NO: 74412 - DNA, 15 bp, Homo sapiens
atatagcctcggtcc

SEQ ID NO: 74413 - DNA, 15 bp, Homo sapiens
aatatagcctcggtc

SEQ ID NO: 74414 - DNA, 15 bp, Homo sapiens
aaatatagcctcggt

SEQ ID NO: 74415 - DNA, 15 bp, Homo sapiens
aaaatatagcctcgg

SEQ ID NO: 74416 - DNA, 15 bp, Homo sapiens
taaaatatagcctcg

SEQ ID NO: 74417 - DNA, 15 bp, Homo sapiens
ataaaatatagcctc

SEQ ID NO: 74418 - DNA, 15 bp, Homo sapiens
aataaaatatagcct

SEQ ID NO: 74419 - DNA, 15 bp, Homo sapiens
taataaaatatagcc

SEQ ID NO: 74420 - DNA, 15 bp, Homo sapiens
ttaataaaatatagc

SEQ ID NO: 74421 - DNA, 15 bp, Homo sapiens
attaataaaatatag

SEQ ID NO: 74422 - DNA, 15 bp, Homo sapiens
tattaataaaatata

SEQ ID NO: 74423 - DNA, 15 bp, Homo sapiens
ttattaataaaatat

SEQ ID NO: 74424 - DNA, 15 bp, Homo sapiens
cttattaataaaata

SEQ ID NO: 74425 - DNA, 15 bp, Homo sapiens
tcttattaataaaat

SEQ ID NO: 74426 - DNA, 15 bp, Homo sapiens
atcttattaataaaa

SEQ ID NO: 74427 - DNA, 15 bp, Homo sapiens
gatcttattaataaa

SEQ ID NO: 74428 - DNA, 15 bp, Homo sapiens
agatcttattaataa

SEQ ID NO: 74429 - DNA, 15 bp, Homo sapiens
gagatcttattaata

SEQ ID NO: 74430 - DNA, 15 bp, Homo sapiens
tgagatcttattaat

SEQ ID NO: 74431 - DNA, 15 bp, Homo sapiens
ttgagatcttattaa

SEQ ID NO: 74432 - DNA, 15 bp, Homo sapiens
attgagatcttatta

SEQ ID NO: 74433 - DNA, 15 bp, Homo sapiens
aattgagatcttatt

SEQ ID NO: 74434 - DNA, 15 bp, Homo sapiens
aaattgagatcttat

SEQ ID NO: 74435 - DNA, 15 bp, Homo sapiens
caaattgagatctta

SEQ ID NO: 74436 - DNA, 15 bp, Homo sapiens
acaaattgagatctt

SEQ ID NO: 74437 - DNA, 15 bp, Homo sapiens
tacaaattgagatct

SEQ ID NO: 74438 - DNA, 15 bp, Homo sapiens
ttacaaattgagatc

SEQ ID NO: 74439 - DNA, 15 bp, Homo sapiens
cttacaaattgagat

SEQ ID NO: 74440 - DNA, 15 bp, Homo sapiens
ccttacaaattgaga

SEQ ID NO: 74441 - DNA, 15 bp, Homo sapiens
cccttacaaattgag

SEQ ID NO: 74442 - DNA, 15 bp, Homo sapiens
acccttacaaattga

SEQ ID NO: 74443 - DNA, 15 bp, Homo sapiens
gacccttacaaattg

SEQ ID NO: 74444 - DNA, 15 bp, Homo sapiens
tgacccttacaaatt

SEQ ID NO: 74445 - DNA, 15 bp, Homo sapiens
atgacccttacaaat

SEQ ID NO: 74446 - DNA, 15 bp, Homo sapiens
aatgacccttacaaa

SEQ ID NO: 74447 - DNA, 15 bp, Homo sapiens
aaatgacccttacaa

SEQ ID NO: 74448 - DNA, 15 bp, Homo sapiens
aaaatgacccttaca

SEQ ID NO: 74449 - DNA, 15 bp, Homo sapiens
taaaatgacccttac

SEQ ID NO: 74450 - DNA, 15 bp, Homo sapiens
ataaaatgaccctta

SEQ ID NO: 74451 - DNA, 15 bp, Homo sapiens
aataaaatgaccctt

SEQ ID NO: 74452 - DNA, 15 bp, Homo sapiens
taataaaatgaccct

SEQ ID NO: 74453 - DNA, 15 bp, Homo sapiens
ataataaaatgaccc

SEQ ID NO: 74454 - DNA, 15 bp, Homo sapiens
gataataaaatgacc

SEQ ID NO: 74455 - DNA, 15 bp, Homo sapiens
agataataaaatgac

SEQ ID NO: 74456 - DNA, 15 bp, Homo sapiens
gagataataaaatga

SEQ ID NO: 74457 - DNA, 15 bp, Homo sapiens
ggagataataaaatg

SEQ ID NO: 74458 - DNA, 15 bp, Homo sapiens
cggagataataaaat

SEQ ID NO: 74459 - DNA, 15 bp, Homo sapiens
acggagataataaaa

SEQ ID NO: 74460 - DNA, 15 bp, Homo sapiens
tacggagataataaa

SEQ ID NO: 74461 - DNA, 15 bp, Homo sapiens
atacggagataataa

SEQ ID NO: 74462 - DNA, 15 bp, Homo sapiens
gatacggagataata

SEQ ID NO: 74463 - DNA, 15 bp, Homo sapiens
ggatacggagataat

SEQ ID NO: 74464 - DNA, 15 bp, Homo sapiens
gggatacggagataa

SEQ ID NO: 74465 - DNA, 15 bp, Homo sapiens
ggggatacggagata

SEQ ID NO: 74466 - DNA, 15 bp, Homo sapiens
gggggatacggagat

SEQ ID NO: 74467 - DNA, 15 bp, Homo sapiens
tgggggatacggaga

SEQ ID NO: 74468 - DNA, 15 bp, Homo sapiens
atgggggatacggag

SEQ ID NO: 74469 - DNA, 15 bp, Homo sapiens
gatgggggatacgga

SEQ ID NO: 74470 - DNA, 15 bp, Homo sapiens
ggatgggggatacgg

SEQ ID NO: 74471 - DNA, 15 bp, Homo sapiens
gggatgggggatacg

SEQ ID NO: 74472 - DNA, 15 bp, Homo sapiens
tgggatgggggatac

SEQ ID NO: 74473 - DNA, 15 bp, Homo sapiens
gtgggatgggggata

SEQ ID NO: 74474 - DNA, 15 bp, Homo sapiens
ggtgggatgggggat

SEQ ID NO: 74475 - DNA, 15 bp, Homo sapiens
aggtgggatggggga

SEQ ID NO: 74476 - DNA, 15 bp, Homo sapiens
gaggtgggatggggg

SEQ ID NO: 74477 - DNA, 15 bp, Homo sapiens
tgaggtgggatgggg

SEQ ID NO: 74478 - DNA, 15 bp, Homo sapiens
atgaggtgggatggg

SEQ ID NO: 74479 - DNA, 15 bp, Homo sapiens
aatgaggtgggatgg

SEQ ID NO: 74480 - DNA, 15 bp, Homo sapiens
aaatgaggtgggatg

SEQ ID NO: 74481 - DNA, 15 bp, Homo sapiens
taaatgaggtgggat

SEQ ID NO: 74482 - DNA, 15 bp, Homo sapiens
ctaaatgaggtggga

SEQ ID NO: 74483 - DNA, 15 bp, Homo sapiens
actaaatgaggtggg

SEQ ID NO: 74484 - DNA, 15 bp, Homo sapiens
aactaaatgaggtgg

SEQ ID NO: 74485 - DNA, 15 bp, Homo sapiens
caactaaatgaggtg

SEQ ID NO: 74486 - DNA, 15 bp, Homo sapiens
ccaactaaatgaggt

SEQ ID NO: 74487 - DNA, 15 bp, Homo sapiens
tccaactaaatgagg

SEQ ID NO: 74488 - DNA, 15 bp, Homo sapiens
atccaactaaatgag

SEQ ID NO: 74489 - DNA, 15 bp, Homo sapiens
catccaactaaatga

SEQ ID NO: 74490 - DNA, 15 bp, Homo sapiens
tcatccaactaaatg

SEQ ID NO: 74491 - DNA, 15 bp, Homo sapiens
atcatccaactaaat

SEQ ID NO: 74492 - DNA, 15 bp, Homo sapiens
gatcatccaactaaa

SEQ ID NO: 74493 - DNA, 15 bp, Homo sapiens
agatcatccaactaa

SEQ ID NO: 74494 - DNA, 15 bp, Homo sapiens
tagatcatccaacta

SEQ ID NO: 74495 - DNA, 15 bp, Homo sapiens
ctagatcatccaact

SEQ ID NO: 74496 - DNA, 15 bp, Homo sapiens
tctagatcatccaac

SEQ ID NO: 74497 - DNA, 15 bp, Homo sapiens
ctctagatcatccaa

SEQ ID NO: 74498 - DNA, 15 bp, Homo sapiens
tctctagatcatcca

SEQ ID NO: 74499 - DNA, 15 bp, Homo sapiens
ctctctagatcatcc

SEQ ID NO: 74500 - DNA, 15 bp, Homo sapiens
tctctctagatcatc

SEQ ID NO: 74501 - DNA, 15 bp, Homo sapiens
ttctctctagatcat

SEQ ID NO: 74502 - DNA, 15 bp, Homo sapiens
tttctctctagatca

SEQ ID NO: 74503 - DNA, 15 bp, Homo sapiens
ttttctctctagatc

SEQ ID NO: 74504 - DNA, 15 bp, Homo sapiens
gttttctctctagat

SEQ ID NO: 74505 - DNA, 15 bp, Homo sapiens
tgttttctctctaga

SEQ ID NO: 74506 - DNA, 15 bp, Homo sapiens
ctgttttctctctag

SEQ ID NO: 74507 - DNA, 15 bp, Homo sapiens
gctgttttctctcta

SEQ ID NO: 74508 - DNA, 15 bp, Homo sapiens
tgctgttttctctct

SEQ ID NO: 74509 - DNA, 15 bp, Homo sapiens
atgctgttttctctc

SEQ ID NO: 74510 - DNA, 15 bp, Homo sapiens
aatgctgttttctct

SEQ ID NO: 74511 - DNA, 15 bp, Homo sapiens
aaatgctgttttctc

SEQ ID NO: 74512 - DNA, 15 bp, Homo sapiens
gaaatgctgttttct

SEQ ID NO: 74513 - DNA, 15 bp, Homo sapiens
agaaatgctgttttc

SEQ ID NO: 74514 - DNA, 15 bp, Homo sapiens
tagaaatgctgtttt

SEQ ID NO: 74515 - DNA, 15 bp, Homo sapiens
gtagaaatgctgttt

SEQ ID NO: 74516 - DNA, 15 bp, Homo sapiens
ggtagaaatgctgtt

SEQ ID NO: 74517 - DNA, 15 bp, Homo sapiens
aggtagaaatgctgt

SEQ ID NO: 74518 - DNA, 15 bp, Homo sapiens
aaggtagaaatgctg

SEQ ID NO: 74519 - DNA, 15 bp, Homo sapiens
gaaggtagaaatgct

SEQ ID NO: 74520 - DNA, 15 bp, Homo sapiens
agaaggtagaaatgc

SEQ ID NO: 74521 - DNA, 15 bp, Homo sapiens
aagaaggtagaaatg

SEQ ID NO: 74522 - DNA, 15 bp, Homo sapiens
caagaaggtagaaat

SEQ ID NO: 74523 - DNA, 15 bp, Homo sapiens
gcaagaaggtagaaa

SEQ ID NO: 74524 - DNA, 15 bp, Homo sapiens
tgcaagaaggtagaa

SEQ ID NO: 74525 - DNA, 15 bp, Homo sapiens
ttgcaagaaggtaga

SEQ ID NO: 74526 - DNA, 15 bp, Homo sapiens
attgcaagaaggtag

SEQ ID NO: 74527 - DNA, 15 bp, Homo sapiens
cattgcaagaaggta

SEQ ID NO: 74528 - DNA, 15 bp, Homo sapiens
ccattgcaagaaggt

SEQ ID NO: 74529 - DNA, 15 bp, Homo sapiens
tccattgcaagaagg

SEQ ID NO: 74530 - DNA, 15 bp, Homo sapiens
ttccattgcaagaag

SEQ ID NO: 74531 - DNA, 15 bp, Homo sapiens
tttccattgcaagaa

SEQ ID NO: 74532 - DNA, 15 bp, Homo sapiens
gtttccattgcaaga

SEQ ID NO: 74533 - DNA, 15 bp, Homo sapiens
tgtttccattgcaag

SEQ ID NO: 74534 - DNA, 15 bp, Homo sapiens
ttgtttccattgcaa

SEQ ID NO: 74535 - DNA, 15 bp, Homo sapiens
attgtttccattgca

SEQ ID NO: 74536 - DNA, 15 bp, Homo sapiens
tattgtttccattgc

SEQ ID NO: 74537 - DNA, 15 bp, Homo sapiens
ctattgtttccattg

SEQ ID NO: 74538 - DNA, 15 bp, Homo sapiens
cctattgtttccatt

SEQ ID NO: 74539 - DNA, 15 bp, Homo sapiens
gcctattgtttccat

SEQ ID NO: 74540 - DNA, 15 bp, Homo sapiens
agcctattgtttcca

SEQ ID NO: 74541 - DNA, 15 bp, Homo sapiens
aagcctattgtttcc

SEQ ID NO: 74542 - DNA, 15 bp, Homo sapiens
aaagcctattgtttc

SEQ ID NO: 74543 - DNA, 15 bp, Homo sapiens
caaagcctattgttt

SEQ ID NO: 74544 - DNA, 15 bp, Homo sapiens
gcaaagcctattgtt

SEQ ID NO: 74545 - DNA, 15 bp, Homo sapiens
agcaaagcctattgt

SEQ ID NO: 74546 - DNA, 15 bp, Homo sapiens
aagcaaagcctattg

SEQ ID NO: 74547 - DNA, 15 bp, Homo sapiens
caagcaaagcctatt

SEQ ID NO: 74548 - DNA, 15 bp, Homo sapiens
acaagcaaagcctat

SEQ ID NO: 74549 - DNA, 15 bp, Homo sapiens
cacaagcaaagccta

SEQ ID NO: 74550 - DNA, 15 bp, Homo sapiens
gcacaagcaaagcct

SEQ ID NO: 74551 - DNA, 15 bp, Homo sapiens
ggcacaagcaaagcc

SEQ ID NO: 74552 - DNA, 15 bp, Homo sapiens
tggcacaagcaaagc

SEQ ID NO: 74553 - DNA, 15 bp, Homo sapiens
gtggcacaagcaaag

SEQ ID NO: 74554 - DNA, 15 bp, Homo sapiens
agtggcacaagcaaa

SEQ ID NO: 74555 - DNA, 15 bp, Homo sapiens
aagtggcacaagcaa

SEQ ID NO: 74556 - DNA, 15 bp, Homo sapiens
aaagtggcacaagca

SEQ ID NO: 74557 - DNA, 15 bp, Homo sapiens
aaaagtggcacaagc

SEQ ID NO: 74558 - DNA, 15 bp, Homo sapiens
taaaagtggcacaag

SEQ ID NO: 74559 - DNA, 15 bp, Homo sapiens
ataaaagtggcacaa

SEQ ID NO: 74560 - DNA, 15 bp, Homo sapiens
aataaaagtggcaca

SEQ ID NO: 74561 - DNA, 15 bp, Homo sapiens
aaataaaagtggcac

SEQ ID NO: 74562 - DNA, 15 bp, Homo sapiens
aaaataaaagtggca

SEQ ID NO: 74563 - DNA, 15 bp, Homo sapiens
gaaaataaaagtggc

SEQ ID NO: 74564 - DNA, 15 bp, Homo sapiens
ggaaaataaaagtgg

SEQ ID NO: 74565 - DNA, 15 bp, Homo sapiens
gggaaaataaaagtg

SEQ ID NO: 74566 - DNA, 15 bp, Homo sapiens
tgggaaaataaaagt

SEQ ID NO: 74567 - DNA, 15 bp, Homo sapiens
gtgggaaaataaaag

SEQ ID NO: 74568 - DNA, 15 bp, Homo sapiens
agtgggaaaataaaa

SEQ ID NO: 74569 - DNA, 15 bp, Homo sapiens
cagtgggaaaataaa

SEQ ID NO: 74570 - DNA, 15 bp, Homo sapiens
ccagtgggaaaataa

SEQ ID NO: 74571 - DNA, 15 bp, Homo sapiens
cccagtgggaaaata

SEQ ID NO: 74572 - DNA, 15 bp, Homo sapiens
ccccagtgggaaaat

SEQ ID NO: 74573 - DNA, 15 bp, Homo sapiens
tccccagtgggaaaa

SEQ ID NO: 74574 - DNA, 15 bp, Homo sapiens
ttccccagtgggaaa

SEQ ID NO: 74575 - DNA, 15 bp, Homo sapiens
attccccagtgggaa

SEQ ID NO: 74576 - DNA, 15 bp, Homo sapiens
gattccccagtggga

SEQ ID NO: 74577 - DNA, 15 bp, Homo sapiens
agattccccagtggg

SEQ ID NO: 74578 - DNA, 15 bp, Homo sapiens
cagattccccagtgg

SEQ ID NO: 74579 - DNA, 15 bp, Homo sapiens
tcagattccccagtg

SEQ ID NO: 74580 - DNA, 15 bp, Homo sapiens
ctcagattccccagt

SEQ ID NO: 74581 - DNA, 15 bp, Homo sapiens
tctcagattccccag

SEQ ID NO: 74582 - DNA, 15 bp, Homo sapiens
ctctcagattcccca

SEQ ID NO: 74583 - DNA, 15 bp, Homo sapiens
tctctcagattcccc

SEQ ID NO: 74584 - DNA, 15 bp, Homo sapiens
atctctcagattccc

SEQ ID NO: 74585 - DNA, 15 bp, Homo sapiens
catctctcagattcc

SEQ ID NO: 74586 - DNA, 15 bp, Homo sapiens
tcatctctcagattc

SEQ ID NO: 74587 - DNA, 15 bp, Homo sapiens
gtcatctctcagatt

SEQ ID NO: 74588 - DNA, 15 bp, Homo sapiens
ggtcatctctcagat

SEQ ID NO: 74589 - DNA, 15 bp, Homo sapiens
aggtcatctctcaga

SEQ ID NO: 74590 - DNA, 15 bp, Homo sapiens
caggtcatctctcag

SEQ ID NO: 74591 - DNA, 15 bp, Homo sapiens
tcaggtcatctctca

SEQ ID NO: 74592 - DNA, 15 bp, Homo sapiens
atcaggtcatctctc

SEQ ID NO: 74593 - DNA, 15 bp, Homo sapiens
aatcaggtcatctct

SEQ ID NO: 74594 - DNA, 15 bp, Homo sapiens
caatcaggtcatctc

SEQ ID NO: 74595 - DNA, 15 bp, Homo sapiens
tcaatcaggtcatct

SEQ ID NO: 74596 - DNA, 15 bp, Homo sapiens
ttcaatcaggtcatc

SEQ ID NO: 74597 - DNA, 15 bp, Homo sapiens
attcaatcaggtcat

SEQ ID NO: 74598 - DNA, 15 bp, Homo sapiens
aattcaatcaggtca

SEQ ID NO: 74599 - DNA, 15 bp, Homo sapiens
gaattcaatcaggtc

SEQ ID NO: 74600 - DNA, 15 bp, Homo sapiens
ggaattcaatcaggt

SEQ ID NO: 74601 - DNA, 15 bp, Homo sapiens
tggaattcaatcagg

SEQ ID NO: 74602 - DNA, 15 bp, Homo sapiens
gtggaattcaatcag

SEQ ID NO: 74603 - DNA, 15 bp, Homo sapiens
ggtggaattcaatca

SEQ ID NO: 74604 - DNA, 15 bp, Homo sapiens
gggtggaattcaatc

SEQ ID NO: 74605 - DNA, 15 bp, Homo sapiens
cgggtggaattcaat

SEQ ID NO: 74606 - DNA, 15 bp, Homo sapiens
acgggtggaattcaa

SEQ ID NO: 74607 - DNA, 15 bp, Homo sapiens
tacgggtggaattca

SEQ ID NO: 74608 - DNA, 15 bp, Homo sapiens
ttacgggtggaattc

SEQ ID NO: 74609 - DNA, 15 bp, Homo sapiens
tttacgggtggaatt

SEQ ID NO: 74610 - DNA, 15 bp, Homo sapiens
ctttacgggtggaat

SEQ ID NO: 74611 - DNA, 15 bp, Homo sapiens
cctttacgggtggaa

SEQ ID NO: 74612 - DNA, 15 bp, Homo sapiens
acctttacgggtgga

SEQ ID NO: 74613 - DNA, 15 bp, Homo sapiens
gacctttacgggtgg

SEQ ID NO: 74614 - DNA, 15 bp, Homo sapiens
tgacctttacgggtg

SEQ ID NO: 74615 - DNA, 15 bp, Homo sapiens
atgacctttacgggt

SEQ ID NO: 74616 - DNA, 15 bp, Homo sapiens
catgacctttacggg

SEQ ID NO: 74617 - DNA, 15 bp, Homo sapiens
gcatgacctttacgg

SEQ ID NO: 74618 - DNA, 15 bp, Homo sapiens
agcatgacctttacg

SEQ ID NO: 74619 - DNA, 15 bp, Homo sapiens
aagcatgacctttac

SEQ ID NO: 74620 - DNA, 15 bp, Homo sapiens
aaagcatgaccttta

SEQ ID NO: 74621 - DNA, 15 bp, Homo sapiens
caaagcatgaccttt

SEQ ID NO: 74622 - DNA, 15 bp, Homo sapiens
tcaaagcatgacctt

SEQ ID NO: 74623 - DNA, 15 bp, Homo sapiens
ttcaaagcatgacct

SEQ ID NO: 74624 - DNA, 15 bp, Homo sapiens
attcaaagcatgacc

SEQ ID NO: 74625 - DNA, 15 bp, Homo sapiens
aattcaaagcatgac

SEQ ID NO: 74626 - DNA, 15 bp, Homo sapiens
gaattcaaagcatga

SEQ ID NO: 74627 - DNA, 15 bp, Homo sapiens
tgaattcaaagcatg

SEQ ID NO: 74628 - DNA, 15 bp, Homo sapiens
ttgaattcaaagcat

SEQ ID NO: 74629 - DNA, 15 bp, Homo sapiens
cttgaattcaaagca

SEQ ID NO: 74630 - DNA, 15 bp, Homo sapiens
ccttgaattcaaagc

SEQ ID NO: 74631 - DNA, 15 bp, Homo sapiens
gccttgaattcaaag

SEQ ID NO: 74632 - DNA, 15 bp, Homo sapiens
tgccttgaattcaaa

SEQ ID NO: 74633 - DNA, 15 bp, Homo sapiens
ctgccttgaattcaa

SEQ ID NO: 74634 - DNA, 15 bp, Homo sapiens
tctgccttgaattca

SEQ ID NO: 74635 - DNA, 15 bp, Homo sapiens
ctctgccttgaattc

SEQ ID NO: 74636 - DNA, 15 bp, Homo sapiens
cctctgccttgaatt

SEQ ID NO: 74637 - DNA, 15 bp, Homo sapiens
tcctctgccttgaat

SEQ ID NO: 74638 - DNA, 15 bp, Homo sapiens
ttcctctgccttgaa

SEQ ID NO: 74639 - DNA, 15 bp, Homo sapiens
tttcctctgccttga

SEQ ID NO: 74640 - DNA, 15 bp, Homo sapiens
ttttcctctgccttg

SEQ ID NO: 74641 - DNA, 15 bp, Homo sapiens
tttttcctctgcctt

SEQ ID NO: 74642 - DNA, 15 bp, Homo sapiens
ttttttcctctgcct

SEQ ID NO: 74643 - DNA, 15 bp, Homo sapiens
tttttttcctctgcc

SEQ ID NO: 74644 - DNA, 15 bp, Homo sapiens
ttttttttcctctgc

SEQ ID NO: 74645 - DNA, 15 bp, Homo sapiens
attttttttcctctg

SEQ ID NO: 74646 - DNA, 15 bp, Homo sapiens
cattttttttcctct

SEQ ID NO: 74647 - DNA, 15 bp, Homo sapiens
tcattttttttcctc

SEQ ID NO: 74648 - DNA, 15 bp, Homo sapiens
ttcattttttttcct

SEQ ID NO: 74649 - DNA, 15 bp, Homo sapiens
cttcattttttttcc

SEQ ID NO: 74650 - DNA, 15 bp, Homo sapiens
tcttcattttttttc

SEQ ID NO: 74651 - DNA, 15 bp, Homo sapiens
ttcttcatttttttt

SEQ ID NO: 74652 - DNA, 15 bp, Homo sapiens
tttcttcattttttt

SEQ ID NO: 74653 - DNA, 15 bp, Homo sapiens
ttttcttcatttttt

SEQ ID NO: 74654 - DNA, 15 bp, Homo sapiens
gttttcttcattttt

SEQ ID NO: 74655 - DNA, 15 bp, Homo sapiens
tgttttcttcatttt

SEQ ID NO: 74656 - DNA, 15 bp, Homo sapiens
atgttttcttcattt

SEQ ID NO: 74657 - DNA, 15 bp, Homo sapiens
aatgttttcttcatt

SEQ ID NO: 74658 - DNA, 15 bp, Homo sapiens
aaatgttttcttcat

SEQ ID NO: 74659 - DNA, 15 bp, Homo sapiens
aaaatgttttcttca

SEQ ID NO: 74660 - DNA, 15 bp, Homo sapiens
caaaatgttttcttc

SEQ ID NO: 74661 - DNA, 15 bp, Homo sapiens
gcaaaatgttttctt

SEQ ID NO: 74662 - DNA, 15 bp, Homo sapiens
tgcaaaatgttttct

SEQ ID NO: 74663 - DNA, 15 bp, Homo sapiens
ttgcaaaatgttttc

SEQ ID NO: 74664 - DNA, 15 bp, Homo sapiens
attgcaaaatgtttt

SEQ ID NO: 74665 - DNA, 15 bp, Homo sapiens
cattgcaaaatgttt

SEQ ID NO: 74666 - DNA, 15 bp, Homo sapiens
tcattgcaaaatgtt

SEQ ID NO: 74667 - DNA, 15 bp, Homo sapiens
atcattgcaaaatgt

SEQ ID NO: 74668 - DNA, 15 bp, Homo sapiens
tatcattgcaaaatg

SEQ ID NO: 74669 - DNA, 15 bp, Homo sapiens
gtatcattgcaaaat

SEQ ID NO: 74670 - DNA, 15 bp, Homo sapiens
ggtatcattgcaaaa

SEQ ID NO: 74671 - DNA, 15 bp, Homo sapiens
gggtatcattgcaaa

SEQ ID NO: 74672 - DNA, 15 bp, Homo sapiens
ggggtatcattgcaa

SEQ ID NO: 74673 - DNA, 15 bp, Homo sapiens
tggggtatcattgca

SEQ ID NO: 74674 - DNA, 15 bp, Homo sapiens
gtggggtatcattgc

SEQ ID NO: 74675 - DNA, 15 bp, Homo sapiens
cgtggggtatcattg

SEQ ID NO: 74676 - DNA, 15 bp, Homo sapiens
tcgtggggtatcatt

SEQ ID NO: 74677 - DNA, 15 bp, Homo sapiens
ctcgtggggtatcat

SEQ ID NO: 74678 - DNA, 15 bp, Homo sapiens
actcgtggggtatca

SEQ ID NO: 74679 - DNA, 15 bp, Homo sapiens
gactcgtggggtatc

SEQ ID NO: 74680 - DNA, 15 bp, Homo sapiens
ggactcgtggggtat

SEQ ID NO: 74681 - DNA, 15 bp, Homo sapiens
aggactcgtggggta

SEQ ID NO: 74682 - DNA, 15 bp, Homo sapiens
caggactcgtggggt

SEQ ID NO: 74683 - DNA, 15 bp, Homo sapiens
tcaggactcgtgggg

SEQ ID NO: 74684 - DNA, 15 bp, Homo sapiens
ctcaggactcgtggg

SEQ ID NO: 74685 - DNA, 15 bp, Homo sapiens
gctcaggactcgtgg

SEQ ID NO: 74686 - DNA, 15 bp, Homo sapiens
tgctcaggactcgtg

SEQ ID NO: 74687 - DNA, 15 bp, Homo sapiens
atgctcaggactcgt

SEQ ID NO: 74688 - DNA, 15 bp, Homo sapiens
catgctcaggactcg

SEQ ID NO: 74689 - DNA, 15 bp, Homo sapiens
gcatgctcaggactc

SEQ ID NO: 74690 - DNA, 15 bp, Homo sapiens
agcatgctcaggact

SEQ ID NO: 74691 - DNA, 15 bp, Homo sapiens
cagcatgctcaggac

SEQ ID NO: 74692 - DNA, 15 bp, Homo sapiens
ccagcatgctcagga

SEQ ID NO: 74693 - DNA, 15 bp, Homo sapiens
cccagcatgctcagg

SEQ ID NO: 74694 - DNA, 15 bp, Homo sapiens
ccccagcatgctcag

SEQ ID NO: 74695 - DNA, 15 bp, Homo sapiens
gccccagcatgctca

SEQ ID NO: 74696 - DNA, 15 bp, Homo sapiens
ggccccagcatgctc

SEQ ID NO: 74697 - DNA, 15 bp, Homo sapiens
aggccccagcatgct

SEQ ID NO: 74698 - DNA, 15 bp, Homo sapiens
gaggccccagcatgc

SEQ ID NO: 74699 - DNA, 15 bp, Homo sapiens
agaggccccagcatg

SEQ ID NO: 74700 - DNA, 15 bp, Homo sapiens
gagaggccccagcat

SEQ ID NO: 74701 - DNA, 15 bp, Homo sapiens
ggagaggccccagca

SEQ ID NO: 74702 - DNA, 15 bp, Homo sapiens
aggagaggccccagc

SEQ ID NO: 74703 - DNA, 15 bp, Homo sapiens
caggagaggccccag

SEQ ID NO: 74704 - DNA, 15 bp, Homo sapiens
ccaggagaggcccca

SEQ ID NO: 74705 - DNA, 15 bp, Homo sapiens
accaggagaggcccc

SEQ ID NO: 74706 - DNA, 15 bp, Homo sapiens
aaccaggagaggccc

SEQ ID NO: 74707 - DNA, 15 bp, Homo sapiens
caaccaggagaggcc

SEQ ID NO: 74708 - DNA, 15 bp, Homo sapiens
gcaaccaggagaggc

SEQ ID NO: 74709 - DNA, 15 bp, Homo sapiens
tgcaaccaggagagg

SEQ ID NO: 74710 - DNA, 15 bp, Homo sapiens
atgcaaccaggagag

SEQ ID NO: 74711 - DNA, 15 bp, Homo sapiens
aatgcaaccaggaga

SEQ ID NO: 74712 - DNA, 15 bp, Homo sapiens
caatgcaaccaggag

SEQ ID NO: 74713 - DNA, 15 bp, Homo sapiens
acaatgcaaccagga

SEQ ID NO: 74714 - DNA, 15 bp, Homo sapiens
cacaatgcaaccagg

SEQ ID NO: 74715 - DNA, 15 bp, Homo sapiens
ccacaatgcaaccag

SEQ ID NO: 74716 - DNA, 15 bp, Homo sapiens
accacaatgcaacca

SEQ ID NO: 74717 - DNA, 15 bp, Homo sapiens
gaccacaatgcaacc

SEQ ID NO: 74718 - DNA, 15 bp, Homo sapiens
agaccacaatgcaac

SEQ ID NO: 74719 - DNA, 15 bp, Homo sapiens
cagaccacaatgcaa

SEQ ID NO: 74720 - DNA, 15 bp, Homo sapiens
gcagaccacaatgca

SEQ ID NO: 74721 - DNA, 15 bp, Homo sapiens
agcagaccacaatgc

SEQ ID NO: 74722 - DNA, 15 bp, Homo sapiens
cagcagaccacaatg

SEQ ID NO: 74723 - DNA, 15 bp, Homo sapiens
tcagcagaccacaat

SEQ ID NO: 74724 - DNA, 15 bp, Homo sapiens
atcagcagaccacaa

SEQ ID NO: 74725 - DNA, 15 bp, Homo sapiens
tatcagcagaccaca

SEQ ID NO: 74726 - DNA, 15 bp, Homo sapiens
ttatcagcagaccac

SEQ ID NO: 74727 - DNA, 15 bp, Homo sapiens
cttatcagcagacca

SEQ ID NO: 74728 - DNA, 15 bp, Homo sapiens
ccttatcagcagacc

SEQ ID NO: 74729 - DNA, 15 bp, Homo sapiens
tccttatcagcagac

SEQ ID NO: 74730 - DNA, 15 bp, Homo sapiens
atccttatcagcaga

SEQ ID NO: 74731 - DNA, 15 bp, Homo sapiens
tatccttatcagcag

SEQ ID NO: 74732 - DNA, 15 bp, Homo sapiens
ttatccttatcagca

SEQ ID NO: 74733 - DNA, 15 bp, Homo sapiens
gttatccttatcagc

SEQ ID NO: 74734 - DNA, 15 bp, Homo sapiens
tgttatccttatcag

SEQ ID NO: 74735 - DNA, 15 bp, Homo sapiens
atgttatccttatca

SEQ ID NO: 74736 - DNA, 15 bp, Homo sapiens
aatgttatccttatc

SEQ ID NO: 74737 - DNA, 15 bp, Homo sapiens
taatgttatccttat

SEQ ID NO: 74738 - DNA, 15 bp, Homo sapiens
ttaatgttatcctta

SEQ ID NO: 74739 - DNA, 15 bp, Homo sapiens
attaatgttatcctt

SEQ ID NO: 74740 - DNA, 15 bp, Homo sapiens
cattaatgttatcct

SEQ ID NO: 74741 - DNA, 15 bp, Homo sapiens
tcattaatgttatcc

SEQ ID NO: 74742 - DNA, 15 bp, Homo sapiens
gtcattaatgttatc

SEQ ID NO: 74743 - DNA, 15 bp, Homo sapiens
tgtcattaatgttat

SEQ ID NO: 74744 - DNA, 15 bp, Homo sapiens
ttgtcattaatgtta

SEQ ID NO: 74745 - DNA, 15 bp, Homo sapiens
cttgtcattaatgtt

SEQ ID NO: 74746 - DNA, 15 bp, Homo sapiens
acttgtcattaatgt

SEQ ID NO: 74747 - DNA, 15 bp, Homo sapiens
cacttgtcattaatg

SEQ ID NO: 74748 - DNA, 15 bp, Homo sapiens
ccacttgtcattaat

SEQ ID NO: 74749 - DNA, 15 bp, Homo sapiens
tccacttgtcattaa

SEQ ID NO: 74750 - DNA, 15 bp, Homo sapiens
ttccacttgtcatta

SEQ ID NO: 74751 - DNA, 15 bp, Homo sapiens
gttccacttgtcatt

SEQ ID NO: 74752 - DNA, 15 bp, Homo sapiens
tgttccacttgtcat

SEQ ID NO: 74753 - DNA, 15 bp, Homo sapiens
atgttccacttgtca

SEQ ID NO: 74754 - DNA, 15 bp, Homo sapiens
aatgttccacttgtc

SEQ ID NO: 74755 - DNA, 15 bp, Homo sapiens
aaatgttccacttgt

SEQ ID NO: 74756 - DNA, 15 bp, Homo sapiens
gaaatgttccacttg

SEQ ID NO: 74757 - DNA, 15 bp, Homo sapiens
ggaaatgttccactt

SEQ ID NO: 74758 - DNA, 15 bp, Homo sapiens
tggaaatgttccact

SEQ ID NO: 74759 - DNA, 15 bp, Homo sapiens
ctggaaatgttccac

SEQ ID NO: 74760 - DNA, 15 bp, Homo sapiens
cctggaaatgttcca

SEQ ID NO: 74761 - DNA, 15 bp, Homo sapiens
tcctggaaatgttcc

SEQ ID NO: 74762 - DNA, 15 bp, Homo sapiens
gtcctggaaatgttc

SEQ ID NO: 74763 - DNA, 15 bp, Homo sapiens
tgtcctggaaatgtt

SEQ ID NO: 74764 - DNA, 15 bp, Homo sapiens
ttgtcctggaaatgt

SEQ ID NO: 74765 - DNA, 15 bp, Homo sapiens
tttgtcctggaaatg

SEQ ID NO: 74766 - DNA, 15 bp, Homo sapiens
ctttgtcctggaaat

SEQ ID NO: 74767 - DNA, 15 bp, Homo sapiens
cctttgtcctggaaa

SEQ ID NO: 74768 - DNA, 15 bp, Homo sapiens
tcctttgtcctggaa

SEQ ID NO: 74769 - DNA, 15 bp, Homo sapiens
ttcctttgtcctgga

SEQ ID NO: 74770 - DNA, 15 bp, Homo sapiens
tttcctttgtcctgg

SEQ ID NO: 74771 - DNA, 15 bp, Homo sapiens
atttcctttgtcctg

SEQ ID NO: 74772 - DNA, 15 bp, Homo sapiens
aatttcctttgtcct

SEQ ID NO: 74773 - DNA, 15 bp, Homo sapiens
gaatttcctttgtcc

SEQ ID NO: 74774 - DNA, 15 bp, Homo sapiens
ggaatttcctttgtc

SEQ ID NO: 74775 - DNA, 15 bp, Homo sapiens
gggaatttcctttgt

SEQ ID NO: 74776 - DNA, 15 bp, Homo sapiens
agggaatttcctttg

SEQ ID NO: 74777 - DNA, 15 bp, Homo sapiens
cagggaatttccttt

SEQ ID NO: 74778 - DNA, 15 bp, Homo sapiens
acagggaatttcctt

SEQ ID NO: 74779 - DNA, 15 bp, Homo sapiens
aacagggaatttcct

SEQ ID NO: 74780 - DNA, 15 bp, Homo sapiens
caacagggaatttcc

SEQ ID NO: 74781 - DNA, 15 bp, Homo sapiens
acaacagggaatttc

SEQ ID NO: 74782 - DNA, 15 bp, Homo sapiens
tacaacagggaattt

SEQ ID NO: 74783 - DNA, 15 bp, Homo sapiens
atacaacagggaatt

SEQ ID NO: 74784 - DNA, 15 bp, Homo sapiens
aatacaacagggaat

SEQ ID NO: 74785 - DNA, 15 bp, Homo sapiens
caatacaacagggaa

SEQ ID NO: 74786 - DNA, 15 bp, Homo sapiens
acaatacaacaggga

SEQ ID NO: 74787 - DNA, 15 bp, Homo sapiens
aacaatacaacaggg

SEQ ID NO: 74788 - DNA, 15 bp, Homo sapiens
aaacaatacaacagg

SEQ ID NO: 74789 - DNA, 15 bp, Homo sapiens
taaacaatacaacag

SEQ ID NO: 74790 - DNA, 15 bp, Homo sapiens
ttaaacaatacaaca

SEQ ID NO: 74791 - DNA, 15 bp, Homo sapiens
tttaaacaatacaac

SEQ ID NO: 74792 - DNA, 15 bp, Homo sapiens
ctttaaacaatacaa

SEQ ID NO: 74793 - DNA, 15 bp, Homo sapiens
cctttaaacaataca

SEQ ID NO: 74794 - DNA, 15 bp, Homo sapiens
tcctttaaacaatac

SEQ ID NO: 74795 - DNA, 15 bp, Homo sapiens
ttcctttaaacaata

SEQ ID NO: 74796 - DNA, 15 bp, Homo sapiens
cttcctttaaacaat

SEQ ID NO: 74797 - DNA, 15 bp, Homo sapiens
gcttcctttaaacaa

SEQ ID NO: 74798 - DNA, 15 bp, Homo sapiens
ggcttcctttaaaca

SEQ ID NO: 74799 - DNA, 15 bp, Homo sapiens
tggcttcctttaaac

SEQ ID NO: 74800 - DNA, 15 bp, Homo sapiens
gtggcttcctttaaa

SEQ ID NO: 74801 - DNA, 15 bp, Homo sapiens
ggtggcttcctttaa

SEQ ID NO: 74802 - DNA, 15 bp, Homo sapiens
tggtggcttccttta

SEQ ID NO: 74803 - DNA, 15 bp, Homo sapiens
atggtggcttccttt

SEQ ID NO: 74804 - DNA, 15 bp, Homo sapiens
gatggtggcttcctt

SEQ ID NO: 74805 - DNA, 15 bp, Homo sapiens
ggatggtggcttcct

SEQ ID NO: 74806 - DNA, 15 bp, Homo sapiens
tggatggtggcttcc

SEQ ID NO: 74807 - DNA, 15 bp, Homo sapiens
gtggatggtggcttc

SEQ ID NO: 74808 - DNA, 15 bp, Homo sapiens
agtggatggtggctt

SEQ ID NO: 74809 - DNA, 15 bp, Homo sapiens
tagtggatggtggct

SEQ ID NO: 74810 - DNA, 15 bp, Homo sapiens
ttagtggatggtggc

SEQ ID NO: 74811 - DNA, 15 bp, Homo sapiens
cttagtggatggtgg

SEQ ID NO: 74812 - DNA, 15 bp, Homo sapiens
ccttagtggatggtg

SEQ ID NO: 74813 - DNA, 15 bp, Homo sapiens
tccttagtggatggt

SEQ ID NO: 74814 - DNA, 15 bp, Homo sapiens
ctccttagtggatgg

SEQ ID NO: 74815 - DNA, 15 bp, Homo sapiens
tctccttagtggatg

SEQ ID NO: 74816 - DNA, 15 bp, Homo sapiens
ctctccttagtggat

SEQ ID NO: 74817 - DNA, 15 bp, Homo sapiens
gctctccttagtgga

SEQ ID NO: 74818 - DNA, 15 bp, Homo sapiens
tgctctccttagtgg

SEQ ID NO: 74819 - DNA, 15 bp, Homo sapiens
ttgctctccttagtg

SEQ ID NO: 74820 - DNA, 15 bp, Homo sapiens
cttgctctccttagt

SEQ ID NO: 74821 - DNA, 15 bp, Homo sapiens
ccttgctctccttag

SEQ ID NO: 74822 - DNA, 15 bp, Homo sapiens
accttgctctcctta

SEQ ID NO: 74823 - DNA, 15 bp, Homo sapiens
aaccttgctctcctt

SEQ ID NO: 74824 - DNA, 15 bp, Homo sapiens
aaaccttgctctcct

SEQ ID NO: 74825 - DNA, 15 bp, Homo sapiens
caaaccttgctctcc

SEQ ID NO: 74826 - DNA, 15 bp, Homo sapiens
acaaaccttgctctc

SEQ ID NO: 74827 - DNA, 15 bp, Homo sapiens
cacaaaccttgctct

SEQ ID NO: 74828 - DNA, 15 bp, Homo sapiens
tcacaaaccttgctc

SEQ ID NO: 74829 - DNA, 15 bp, Homo sapiens
atcacaaaccttgct

SEQ ID NO: 74830 - DNA, 15 bp, Homo sapiens
catcacaaaccttgc

SEQ ID NO: 74831 - DNA, 15 bp, Homo sapiens
acatcacaaaccttg

SEQ ID NO: 74832 - DNA, 15 bp, Homo sapiens
tacatcacaaacctt

SEQ ID NO: 74833 - DNA, 15 bp, Homo sapiens
ctacatcacaaacct

SEQ ID NO: 74834 - DNA, 15 bp, Homo sapiens
cctacatcacaaacc

SEQ ID NO: 74835 - DNA, 15 bp, Homo sapiens
gcctacatcacaaac

SEQ ID NO: 74836 - DNA, 15 bp, Homo sapiens
tgcctacatcacaaa

SEQ ID NO: 74837 - DNA, 15 bp, Homo sapiens
gtgcctacatcacaa

SEQ ID NO: 74838 - DNA, 15 bp, Homo sapiens
tgtgcctacatcaca

SEQ ID NO: 74839 - DNA, 15 bp, Homo sapiens
ctgtgcctacatcac

SEQ ID NO: 74840 - DNA, 15 bp, Homo sapiens
tctgtgcctacatca

SEQ ID NO: 74841 - DNA, 15 bp, Homo sapiens
atctgtgcctacatc

SEQ ID NO: 74842 - DNA, 15 bp, Homo sapiens
aatctgtgcctacat

SEQ ID NO: 74843 - DNA, 15 bp, Homo sapiens
aaatctgtgcctaca

SEQ ID NO: 74844 - DNA, 15 bp, Homo sapiens
gaaatctgtgcctac

SEQ ID NO: 74845 - DNA, 15 bp, Homo sapiens
ggaaatctgtgccta

SEQ ID NO: 74846 - DNA, 15 bp, Homo sapiens
gggaaatctgtgcct

SEQ ID NO: 74847 - DNA, 15 bp, Homo sapiens
agggaaatctgtgcc

SEQ ID NO: 74848 - DNA, 15 bp, Homo sapiens
cagggaaatctgtgc

SEQ ID NO: 74849 - DNA, 15 bp, Homo sapiens
gcagggaaatctgtg

SEQ ID NO: 74850 - DNA, 15 bp, Homo sapiens
tgcagggaaatctgt

SEQ ID NO: 74851 - DNA, 15 bp, Homo sapiens
ctgcagggaaatctg

SEQ ID NO: 74852 - DNA, 15 bp, Homo sapiens
cctgcagggaaatct

SEQ ID NO: 74853 - DNA, 15 bp, Homo sapiens
tcctgcagggaaatc

SEQ ID NO: 74854 - DNA, 15 bp, Homo sapiens
ctcctgcagggaaat

SEQ ID NO: 74855 - DNA, 15 bp, Homo sapiens
tctcctgcagggaaa

SEQ ID NO: 74856 - DNA, 15 bp, Homo sapiens
ctctcctgcagggaa

SEQ ID NO: 74857 - DNA, 15 bp, Homo sapiens
cctctcctgcaggga

SEQ ID NO: 74858 - DNA, 15 bp, Homo sapiens
gcctctcctgcaggg

SEQ ID NO: 74859 - DNA, 15 bp, Homo sapiens
tgcctctcctgcagg

SEQ ID NO: 74860 - DNA, 15 bp, Homo sapiens
ctgcctctcctgcag

SEQ ID NO: 74861 - DNA, 15 bp, Homo sapiens
cctgcctctcctgca

SEQ ID NO: 74862 - DNA, 15 bp, Homo sapiens
ccctgcctctcctgc

SEQ ID NO: 74863 - DNA, 15 bp, Homo sapiens
tccctgcctctcctg

SEQ ID NO: 74864 - DNA, 15 bp, Homo sapiens
ctccctgcctctcct

SEQ ID NO: 74865 - DNA, 15 bp, Homo sapiens
tctccctgcctctcc

SEQ ID NO: 74866 - DNA, 15 bp, Homo sapiens
ctctccctgcctctc

SEQ ID NO: 74867 - DNA, 15 bp, Homo sapiens
gctctccctgcctct

SEQ ID NO: 74868 - DNA, 15 bp, Homo sapiens
agctctccctgcctc

SEQ ID NO: 74869 - DNA, 15 bp, Homo sapiens
cagctctccctgcct

SEQ ID NO: 74870 - DNA, 15 bp, Homo sapiens
gcagctctccctgcc

SEQ ID NO: 74871 - DNA, 15 bp, Homo sapiens
ggcagctctccctgc

SEQ ID NO: 74872 - DNA, 15 bp, Homo sapiens
tggcagctctccctg

SEQ ID NO: 74873 - DNA, 15 bp, Homo sapiens
ttggcagctctccct

SEQ ID NO: 74874 - DNA, 15 bp, Homo sapiens
cttggcagctctccc

SEQ ID NO: 74875 - DNA, 15 bp, Homo sapiens
gcttggcagctctcc

SEQ ID NO: 74876 - DNA, 15 bp, Homo sapiens
agcttggcagctctc

SEQ ID NO: 74877 - DNA, 15 bp, Homo sapiens
cagcttggcagctct

SEQ ID NO: 74878 - DNA, 15 bp, Homo sapiens
gcagcttggcagctc

SEQ ID NO: 74879 - DNA, 15 bp, Homo sapiens
ggcagcttggcagct

SEQ ID NO: 74880 - DNA, 15 bp, Homo sapiens
aggcagcttggcagc

SEQ ID NO: 74881 - DNA, 15 bp, Homo sapiens
caggcagcttggcag

SEQ ID NO: 74882 - DNA, 15 bp, Homo sapiens
acaggcagcttggca

SEQ ID NO: 74883 - DNA, 15 bp, Homo sapiens
cacaggcagcttggc

SEQ ID NO: 74884 - DNA, 15 bp, Homo sapiens
tcacaggcagcttgg

SEQ ID NO: 74885 - DNA, 15 bp, Homo sapiens
ctcacaggcagcttg

SEQ ID NO: 74886 - DNA, 15 bp, Homo sapiens
actcacaggcagctt

SEQ ID NO: 74887 - DNA, 15 bp, Homo sapiens
tactcacaggcagct

SEQ ID NO: 74888 - DNA, 15 bp, Homo sapiens
atactcacaggcagc

SEQ ID NO: 74889 - DNA, 15 bp, Homo sapiens
catactcacaggcag

SEQ ID NO: 74890 - DNA, 15 bp, Homo sapiens
gcatactcacaggca

SEQ ID NO: 74891 - DNA, 15 bp, Homo sapiens
ggcatactcacaggc

SEQ ID NO: 74892 - DNA, 15 bp, Homo sapiens
aggcatactcacagg

SEQ ID NO: 74893 - DNA, 15 bp, Homo sapiens
caggcatactcacag

SEQ ID NO: 74894 - DNA, 15 bp, Homo sapiens
acaggcatactcaca

SEQ ID NO: 74895 - DNA, 15 bp, Homo sapiens
gacaggcatactcac

SEQ ID NO: 74896 - DNA, 15 bp, Homo sapiens
ggacaggcatactca

SEQ ID NO: 74897 - DNA, 15 bp, Homo sapiens
aggacaggcatactc

SEQ ID NO: 74898 - DNA, 15 bp, Homo sapiens
aaggacaggcatact

SEQ ID NO: 74899 - DNA, 15 bp, Homo sapiens
taaggacaggcatac

SEQ ID NO: 74900 - DNA, 15 bp, Homo sapiens
ttaaggacaggcata

SEQ ID NO: 74901 - DNA, 15 bp, Homo sapiens
attaaggacaggcat

SEQ ID NO: 74902 - DNA, 15 bp, Homo sapiens
aattaaggacaggca

SEQ ID NO: 74903 - DNA, 15 bp, Homo sapiens
aaattaaggacaggc

SEQ ID NO: 74904 - DNA, 15 bp, Homo sapiens
gaaattaaggacagg

SEQ ID NO: 74905 - DNA, 15 bp, Homo sapiens
tgaaattaaggacag

SEQ ID NO: 74906 - DNA, 15 bp, Homo sapiens
atgaaattaaggaca

SEQ ID NO: 74907 - DNA, 15 bp, Homo sapiens
gatgaaattaaggac

SEQ ID NO: 74908 - DNA, 15 bp, Homo sapiens
agatgaaattaagga

SEQ ID NO: 74909 - DNA, 15 bp, Homo sapiens
cagatgaaattaagg

SEQ ID NO: 74910 - DNA, 15 bp, Homo sapiens
ccagatgaaattaag

SEQ ID NO: 74911 - DNA, 15 bp, Homo sapiens
cccagatgaaattaa

SEQ ID NO: 74912 - DNA, 15 bp, Homo sapiens
ccccagatgaaatta

SEQ ID NO: 74913 - DNA, 15 bp, Homo sapiens
tccccagatgaaatt

SEQ ID NO: 74914 - DNA, 15 bp, Homo sapiens
ttccccagatgaaat

SEQ ID NO: 74915 - DNA, 15 bp, Homo sapiens
cttccccagatgaaa

SEQ ID NO: 74916 - DNA, 15 bp, Homo sapiens
gcttccccagatgaa

SEQ ID NO: 74917 - DNA, 15 bp, Homo sapiens
tgcttccccagatga

SEQ ID NO: 74918 - DNA, 15 bp, Homo sapiens
atgcttccccagatg

SEQ ID NO: 74919 - DNA, 15 bp, Homo sapiens
aatgcttccccagat

SEQ ID NO: 74920 - DNA, 15 bp, Homo sapiens
aaatgcttccccaga

SEQ ID NO: 74921 - DNA, 15 bp, Homo sapiens
caaatgcttccccag

SEQ ID NO: 74922 - DNA, 15 bp, Homo sapiens
gcaaatgcttcccca

SEQ ID NO: 74923 - DNA, 15 bp, Homo sapiens
tgcaaatgcttcccc

SEQ ID NO: 74924 - DNA, 15 bp, Homo sapiens
atgcaaatgcttccc

SEQ ID NO: 74925 - DNA, 15 bp, Homo sapiens
catgcaaatgcttcc

SEQ ID NO: 74926 - DNA, 15 bp, Homo sapiens
ccatgcaaatgcttc

SEQ ID NO: 74927 - DNA, 15 bp, Homo sapiens
accatgcaaatgctt

SEQ ID NO: 74928 - DNA, 15 bp, Homo sapiens
aaccatgcaaatgct

SEQ ID NO: 74929 - DNA, 15 bp, Homo sapiens
taaccatgcaaatgc

SEQ ID NO: 74930 - DNA, 15 bp, Homo sapiens
ctaaccatgcaaatg

SEQ ID NO: 74931 - DNA, 15 bp, Homo sapiens
tctaaccatgcaaat

SEQ ID NO: 74932 - DNA, 15 bp, Homo sapiens
ttctaaccatgcaaa

SEQ ID NO: 74933 - DNA, 15 bp, Homo sapiens
cttctaaccatgcaa

SEQ ID NO: 74934 - DNA, 15 bp, Homo sapiens
acttctaaccatgca

SEQ ID NO: 74935 - DNA, 15 bp, Homo sapiens
gacttctaaccatgc

SEQ ID NO: 74936 - DNA, 15 bp, Homo sapiens
tgacttctaaccatg

SEQ ID NO: 74937 - DNA, 15 bp, Homo sapiens
ttgacttctaaccat

SEQ ID NO: 74938 - DNA, 15 bp, Homo sapiens
attgacttctaacca

SEQ ID NO: 74939 - DNA, 15 bp, Homo sapiens
tattgacttctaacc

SEQ ID NO: 74940 - DNA, 15 bp, Homo sapiens
ttattgacttctaac

SEQ ID NO: 74941 - DNA, 15 bp, Homo sapiens
cttattgacttctaa

SEQ ID NO: 74942 - DNA, 15 bp, Homo sapiens
ccttattgacttcta

SEQ ID NO: 74943 - DNA, 15 bp, Homo sapiens
cccttattgacttct

SEQ ID NO: 74944 - DNA, 15 bp, Homo sapiens
ccccttattgacttc

SEQ ID NO: 74945 - DNA, 15 bp, Homo sapiens
accccttattgactt

SEQ ID NO: 74946 - DNA, 15 bp, Homo sapiens
gaccccttattgact

SEQ ID NO: 74947 - DNA, 15 bp, Homo sapiens
tgaccccttattgac

SEQ ID NO: 74948 - DNA, 15 bp, Homo sapiens
atgaccccttattga

SEQ ID NO: 74949 - DNA, 15 bp, Homo sapiens
catgaccccttattg

SEQ ID NO: 74950 - DNA, 15 bp, Homo sapiens
ccatgaccccttatt

SEQ ID NO: 74951 - DNA, 15 bp, Homo sapiens
gccatgaccccttat

SEQ ID NO: 74952 - DNA, 15 bp, Homo sapiens
tgccatgacccctta

SEQ ID NO: 74953 - DNA, 15 bp, Homo sapiens
ctgccatgacccctt

SEQ ID NO: 74954 - DNA, 15 bp, Homo sapiens
actgccatgacccct

SEQ ID NO: 74955 - DNA, 15 bp, Homo sapiens
aactgccatgacccc

SEQ ID NO: 74956 - DNA, 15 bp, Homo sapiens
aaactgccatgaccc

SEQ ID NO: 74957 - DNA, 15 bp, Homo sapiens
taaactgccatgacc

SEQ ID NO: 74958 - DNA, 15 bp, Homo sapiens
ataaactgccatgac

SEQ ID NO: 74959 - DNA, 15 bp, Homo sapiens
cataaactgccatga

SEQ ID NO: 74960 - DNA, 15 bp, Homo sapiens
ccataaactgccatg

SEQ ID NO: 74961 - DNA, 15 bp, Homo sapiens
gccataaactgccat

SEQ ID NO: 74962 - DNA, 15 bp, Homo sapiens
tgccataaactgcca

SEQ ID NO: 74963 - DNA, 15 bp, Homo sapiens
atgccataaactgcc

SEQ ID NO: 74964 - DNA, 15 bp, Homo sapiens
aatgccataaactgc

SEQ ID NO: 74965 - DNA, 15 bp, Homo sapiens
caatgccataaactg

SEQ ID NO: 74966 - DNA, 15 bp, Homo sapiens
ccaatgccataaact

SEQ ID NO: 74967 - DNA, 15 bp, Homo sapiens
accaatgccataaac

SEQ ID NO: 74968 - DNA, 15 bp, Homo sapiens
taccaatgccataaa

SEQ ID NO: 74969 - DNA, 15 bp, Homo sapiens
ctaccaatgccataa

SEQ ID NO: 74970 - DNA, 15 bp, Homo sapiens
cctaccaatgccata

SEQ ID NO: 74971 - DNA, 15 bp, Homo sapiens
ccctaccaatgccat

SEQ ID NO: 74972 - DNA, 15 bp, Homo sapiens
accctaccaatgcca

SEQ ID NO: 74973 - DNA, 15 bp, Homo sapiens
aaccctaccaatgcc

SEQ ID NO: 74974 - DNA, 15 bp, Homo sapiens
taaccctaccaatgc

SEQ ID NO: 74975 - DNA, 15 bp, Homo sapiens
ctaaccctaccaatg

SEQ ID NO: 74976 - DNA, 15 bp, Homo sapiens
cctaaccctaccaat

SEQ ID NO: 74977 - DNA, 15 bp, Homo sapiens
tcctaaccctaccaa

SEQ ID NO: 74978 - DNA, 15 bp, Homo sapiens
ctcctaaccctacca

SEQ ID NO: 74979 - DNA, 15 bp, Homo sapiens
gctcctaaccctacc

SEQ ID NO: 74980 - DNA, 15 bp, Homo sapiens
ggctcctaaccctac

SEQ ID NO: 74981 - DNA, 15 bp, Homo sapiens
tggctcctaacccta

SEQ ID NO: 74982 - DNA, 15 bp, Homo sapiens
ctggctcctaaccct

SEQ ID NO: 74983 - DNA, 15 bp, Homo sapiens
tctggctcctaaccc

SEQ ID NO: 74984 - DNA, 15 bp, Homo sapiens
gtctggctcctaacc

SEQ ID NO: 74985 - DNA, 15 bp, Homo sapiens
agtctggctcctaac

SEQ ID NO: 74986 - DNA, 15 bp, Homo sapiens
cagtctggctcctaa

SEQ ID NO: 74987 - DNA, 15 bp, Homo sapiens
acagtctggctccta

SEQ ID NO: 74988 - DNA, 15 bp, Homo sapiens
aacagtctggctcct

SEQ ID NO: 74989 - DNA, 15 bp, Homo sapiens
taacagtctggctcc

SEQ ID NO: 74990 - DNA, 15 bp, Homo sapiens
ctaacagtctggctc

SEQ ID NO: 74991 - DNA, 15 bp, Homo sapiens
tctaacagtctggct

SEQ ID NO: 74992 - DNA, 15 bp, Homo sapiens
ttctaacagtctggc

SEQ ID NO: 74993 - DNA, 15 bp, Homo sapiens
tttctaacagtctgg

SEQ ID NO: 74994 - DNA, 15 bp, Homo sapiens
atttctaacagtctg

SEQ ID NO: 74995 - DNA, 15 bp, Homo sapiens
catttctaacagtct

SEQ ID NO: 74996 - DNA, 15 bp, Homo sapiens
ccatttctaacagtc

SEQ ID NO: 74997 - DNA, 15 bp, Homo sapiens
tccatttctaacagt

SEQ ID NO: 74998 - DNA, 15 bp, Homo sapiens
ctccatttctaacag

SEQ ID NO: 74999 - DNA, 15 bp, Homo sapiens
cctccatttctaaca

SEQ ID NO: 75000 - DNA, 15 bp, Homo sapiens
gcctccatttctaac

SEQ ID NO: 75001 - DNA, 15 bp, Homo sapiens
tgcctccatttctaa

SEQ ID NO: 75002 - DNA, 15 bp, Homo sapiens
gtgcctccatttcta

SEQ ID NO: 75003 - DNA, 15 bp, Homo sapiens
tgtgcctccatttct

SEQ ID NO: 75004 - DNA, 15 bp, Homo sapiens
atgtgcctccatttc

SEQ ID NO: 75005 - DNA, 15 bp, Homo sapiens
aatgtgcctccattt

SEQ ID NO: 75006 - DNA, 15 bp, Homo sapiens
caatgtgcctccatt

SEQ ID NO: 75007 - DNA, 15 bp, Homo sapiens
ccaatgtgcctccat

SEQ ID NO: 75008 - DNA, 15 bp, Homo sapiens
gccaatgtgcctcca

SEQ ID NO: 75009 - DNA, 15 bp, Homo sapiens
agccaatgtgcctcc

SEQ ID NO: 75010 - DNA, 15 bp, Homo sapiens
cagccaatgtgcctc

SEQ ID NO: 75011 - DNA, 15 bp, Homo sapiens
ccagccaatgtgcct

SEQ ID NO: 75012 - DNA, 15 bp, Homo sapiens
cccagccaatgtgcc

SEQ ID NO: 75013 - DNA, 15 bp, Homo sapiens
ccccagccaatgtgc

SEQ ID NO: 75014 - DNA, 15 bp, Homo sapiens
cccccagccaatgtg

SEQ ID NO: 75015 - DNA, 15 bp, Homo sapiens
tcccccagccaatgt

SEQ ID NO: 75016 - DNA, 15 bp, Homo sapiens
ctcccccagccaatg

SEQ ID NO: 75017 - DNA, 15 bp, Homo sapiens
actcccccagccaat

SEQ ID NO: 75018 - DNA, 15 bp, Homo sapiens
tactcccccagccaa

SEQ ID NO: 75019 - DNA, 15 bp, Homo sapiens
ttactcccccagcca

SEQ ID NO: 75020 - DNA, 15 bp, Homo sapiens
tttactcccccagcc

SEQ ID NO: 75021 - DNA, 15 bp, Homo sapiens
ttttactcccccagc

SEQ ID NO: 75022 - DNA, 15 bp, Homo sapiens
tttttactcccccag

SEQ ID NO: 75023 - DNA, 15 bp, Homo sapiens
ctttttactccccca

SEQ ID NO: 75024 - DNA, 15 bp, Homo sapiens
gctttttactccccc

SEQ ID NO: 75025 - DNA, 15 bp, Homo sapiens
ggctttttactcccc

SEQ ID NO: 75026 - DNA, 15 bp, Homo sapiens
aggctttttactccc

SEQ ID NO: 75027 - DNA, 15 bp, Homo sapiens
caggctttttactcc

SEQ ID NO: 75028 - DNA, 15 bp, Homo sapiens
tcaggctttttactc

SEQ ID NO: 75029 - DNA, 15 bp, Homo sapiens
atcaggctttttact

SEQ ID NO: 75030 - DNA, 15 bp, Homo sapiens
aatcaggctttttac

SEQ ID NO: 75031 - DNA, 15 bp, Homo sapiens
gaatcaggcttttta

SEQ ID NO: 75032 - DNA, 15 bp, Homo sapiens
tgaatcaggcttttt

SEQ ID NO: 75033 - DNA, 15 bp, Homo sapiens
atgaatcaggctttt

SEQ ID NO: 75034 - DNA, 15 bp, Homo sapiens
tatgaatcaggcttt

SEQ ID NO: 75035 - DNA, 15 bp, Homo sapiens
gtatgaatcaggctt

SEQ ID NO: 75036 - DNA, 15 bp, Homo sapiens
tgtatgaatcaggct

SEQ ID NO: 75037 - DNA, 15 bp, Homo sapiens
ttgtatgaatcaggc

SEQ ID NO: 75038 - DNA, 15 bp, Homo sapiens
attgtatgaatcagg

SEQ ID NO: 75039 - DNA, 15 bp, Homo sapiens
cattgtatgaatcag

SEQ ID NO: 75040 - DNA, 15 bp, Homo sapiens
gcattgtatgaatca

SEQ ID NO: 75041 - DNA, 15 bp, Homo sapiens
tgcattgtatgaatc

SEQ ID NO: 75042 - DNA, 15 bp, Homo sapiens
ctgcattgtatgaat

SEQ ID NO: 75043 - DNA, 15 bp, Homo sapiens
gctgcattgtatgaa

SEQ ID NO: 75044 - DNA, 15 bp, Homo sapiens
ggctgcattgtatga

SEQ ID NO: 75045 - DNA, 15 bp, Homo sapiens
gggctgcattgtatg

SEQ ID NO: 75046 - DNA, 15 bp, Homo sapiens
tgggctgcattgtat

SEQ ID NO: 75047 - DNA, 15 bp, Homo sapiens
atgggctgcattgta

SEQ ID NO: 75048 - DNA, 15 bp, Homo sapiens
aatgggctgcattgt

SEQ ID NO: 75049 - DNA, 15 bp, Homo sapiens
aaatgggctgcattg

SEQ ID NO: 75050 - DNA, 15 bp, Homo sapiens
taaatgggctgcatt

SEQ ID NO: 75051 - DNA, 15 bp, Homo sapiens
ctaaatgggctgcat

SEQ ID NO: 75052 - DNA, 15 bp, Homo sapiens
cctaaatgggctgca

SEQ ID NO: 75053 - DNA, 15 bp, Homo sapiens
tcctaaatgggctgc

SEQ ID NO: 75054 - DNA, 15 bp, Homo sapiens
ttcctaaatgggctg

SEQ ID NO: 75055 - DNA, 15 bp, Homo sapiens
attcctaaatgggct

SEQ ID NO: 75056 - DNA, 15 bp, Homo sapiens
gattcctaaatgggc

SEQ ID NO: 75057 - DNA, 15 bp, Homo sapiens
tgattcctaaatggg

SEQ ID NO: 75058 - DNA, 15 bp, Homo sapiens
atgattcctaaatgg

SEQ ID NO: 75059 - DNA, 15 bp, Homo sapiens
tatgattcctaaatg

SEQ ID NO: 75060 - DNA, 15 bp, Homo sapiens
ctatgattcctaaat

SEQ ID NO: 75061 - DNA, 15 bp, Homo sapiens
gctatgattcctaaa

SEQ ID NO: 75062 - DNA, 15 bp, Homo sapiens
tgctatgattcctaa

SEQ ID NO: 75063 - DNA, 15 bp, Homo sapiens
ttgctatgattccta

SEQ ID NO: 75064 - DNA, 15 bp, Homo sapiens
tttgctatgattcct

SEQ ID NO: 75065 - DNA, 15 bp, Homo sapiens
ttttgctatgattcc

SEQ ID NO: 75066 - DNA, 15 bp, Homo sapiens
cttttgctatgattc

SEQ ID NO: 75067 - DNA, 15 bp, Homo sapiens
gcttttgctatgatt

SEQ ID NO: 75068 - DNA, 15 bp, Homo sapiens
tgcttttgctatgat

SEQ ID NO: 75069 - DNA, 15 bp, Homo sapiens
gtgcttttgctatga

SEQ ID NO: 75070 - DNA, 15 bp, Homo sapiens
ggtgcttttgctatg

SEQ ID NO: 75071 - DNA, 15 bp, Homo sapiens
tggtgcttttgctat

SEQ ID NO: 75072 - DNA, 15 bp, Homo sapiens
ctggtgcttttgcta

SEQ ID NO: 75073 - DNA, 15 bp, Homo sapiens
cctggtgcttttgct

SEQ ID NO: 75074 - DNA, 15 bp, Homo sapiens
tcctggtgcttttgc

SEQ ID NO: 75075 - DNA, 15 bp, Homo sapiens
ctcctggtgcttttg

SEQ ID NO: 75076 - DNA, 15 bp, Homo sapiens
tctcctggtgctttt

SEQ ID NO: 75077 - DNA, 15 bp, Homo sapiens
atctcctggtgcttt

SEQ ID NO: 75078 - DNA, 15 bp, Homo sapiens
aatctcctggtgctt

SEQ ID NO: 75079 - DNA, 15 bp, Homo sapiens
aaatctcctggtgct

SEQ ID NO: 75080 - DNA, 15 bp, Homo sapiens
taaatctcctggtgc

SEQ ID NO: 75081 - DNA, 15 bp, Homo sapiens
ctaaatctcctggtg

SEQ ID NO: 75082 - DNA, 15 bp, Homo sapiens
tctaaatctcctggt

SEQ ID NO: 75083 - DNA, 15 bp, Homo sapiens
ctctaaatctcctgg

SEQ ID NO: 75084 - DNA, 15 bp, Homo sapiens
tctctaaatctcctg

SEQ ID NO: 75085 - DNA, 15 bp, Homo sapiens
ttctctaaatctcct

SEQ ID NO: 75086 - DNA, 15 bp, Homo sapiens
cttctctaaatctcc

SEQ ID NO: 75087 - DNA, 15 bp, Homo sapiens
acttctctaaatctc

SEQ ID NO: 75088 - DNA, 15 bp, Homo sapiens
aacttctctaaatct

SEQ ID NO: 75089 - DNA, 15 bp, Homo sapiens
caacttctctaaatc

SEQ ID NO: 75090 - DNA, 15 bp, Homo sapiens
tcaacttctctaaat

SEQ ID NO: 75091 - DNA, 15 bp, Homo sapiens
atcaacttctctaaa

SEQ ID NO: 75092 - DNA, 15 bp, Homo sapiens
gatcaacttctctaa

SEQ ID NO: 75093 - DNA, 15 bp, Homo sapiens
agatcaacttctcta

SEQ ID NO: 75094 - DNA, 15 bp, Homo sapiens
cagatcaacttctct

SEQ ID NO: 75095 - DNA, 15 bp, Homo sapiens
ccagatcaacttctc

SEQ ID NO: 75096 - DNA, 15 bp, Homo sapiens
accagatcaacttct

SEQ ID NO: 75097 - DNA, 15 bp, Homo sapiens
aaccagatcaacttc

SEQ ID NO: 75098 - DNA, 15 bp, Homo sapiens
aaaccagatcaactt

SEQ ID NO: 75099 - DNA, 15 bp, Homo sapiens
aaaaccagatcaact

SEQ ID NO: 75100 - DNA, 15 bp, Homo sapiens
caaaaccagatcaac

SEQ ID NO: 75101 - DNA, 15 bp, Homo sapiens
tcaaaaccagatcaa

SEQ ID NO: 75102 - DNA, 15 bp, Homo sapiens
ctcaaaaccagatca

SEQ ID NO: 75103 - DNA, 15 bp, Homo sapiens
actcaaaaccagatc

SEQ ID NO: 75104 - DNA, 15 bp, Homo sapiens
aactcaaaaccagat

SEQ ID NO: 75105 - DNA, 15 bp, Homo sapiens
aaactcaaaaccaga

SEQ ID NO: 75106 - DNA, 15 bp, Homo sapiens
taaactcaaaaccag

SEQ ID NO: 75107 - DNA, 15 bp, Homo sapiens
ttaaactcaaaacca

SEQ ID NO: 75108 - DNA, 15 bp, Homo sapiens
tttaaactcaaaacc

SEQ ID NO: 75109 - DNA, 15 bp, Homo sapiens
atttaaactcaaaac

SEQ ID NO: 75110 - DNA, 15 bp, Homo sapiens
aatttaaactcaaaa

SEQ ID NO: 75111 - DNA, 15 bp, Homo sapiens
gaatttaaactcaaa

SEQ ID NO: 75112 - DNA, 15 bp, Homo sapiens
agaatttaaactcaa

SEQ ID NO: 75113 - DNA, 15 bp, Homo sapiens
cagaatttaaactca

SEQ ID NO: 75114 - DNA, 15 bp, Homo sapiens
ccagaatttaaactc

SEQ ID NO: 75115 - DNA, 15 bp, Homo sapiens
tccagaatttaaact

SEQ ID NO: 75116 - DNA, 15 bp, Homo sapiens
gtccagaatttaaac

SEQ ID NO: 75117 - DNA, 15 bp, Homo sapiens
ggtccagaatttaaa

SEQ ID NO: 75118 - DNA, 15 bp, Homo sapiens
aggtccagaatttaa

SEQ ID NO: 75119 - DNA, 15 bp, Homo sapiens
gaggtccagaattta

SEQ ID NO: 75120 - DNA, 15 bp, Homo sapiens
ggaggtccagaattt

SEQ ID NO: 75121 - DNA, 15 bp, Homo sapiens
aggaggtccagaatt

SEQ ID NO: 75122 - DNA, 15 bp, Homo sapiens
aaggaggtccagaat

SEQ ID NO: 75123 - DNA, 15 bp, Homo sapiens
gaaggaggtccagaa

SEQ ID NO: 75124 - DNA, 15 bp, Homo sapiens
agaaggaggtccaga

SEQ ID NO: 75125 - DNA, 15 bp, Homo sapiens
gagaaggaggtccag

SEQ ID NO: 75126 - DNA, 15 bp, Homo sapiens
agagaaggaggtcca

SEQ ID NO: 75127 - DNA, 15 bp, Homo sapiens
gagagaaggaggtcc

SEQ ID NO: 75128 - DNA, 15 bp, Homo sapiens
ggagagaaggaggtc

SEQ ID NO: 75129 - DNA, 15 bp, Homo sapiens
gggagagaaggaggt

SEQ ID NO: 75130 - DNA, 15 bp, Homo sapiens
ggggagagaaggagg

SEQ ID NO: 75131 - DNA, 15 bp, Homo sapiens
tggggagagaaggag

SEQ ID NO: 75132 - DNA, 15 bp, Homo sapiens
gtggggagagaagga

SEQ ID NO: 75133 - DNA, 15 bp, Homo sapiens
ggtggggagagaagg

SEQ ID NO: 75134 - DNA, 15 bp, Homo sapiens
gggtggggagagaag

SEQ ID NO: 75135 - DNA, 15 bp, Homo sapiens
ggggtggggagagaa

SEQ ID NO: 75136 - DNA, 15 bp, Homo sapiens
gggggtggggagaga

SEQ ID NO: 75137 - DNA, 15 bp, Homo sapiens
agggggtggggagag

SEQ ID NO: 75138 - DNA, 15 bp, Homo sapiens
gagggggtggggaga

SEQ ID NO: 75139 - DNA, 15 bp, Homo sapiens
ggagggggtggggag

SEQ ID NO: 75140 - DNA, 15 bp, Homo sapiens
tggagggggtgggga

SEQ ID NO: 75141 - DNA, 15 bp, Homo sapiens
ttggagggggtgggg

SEQ ID NO: 75142 - DNA, 15 bp, Homo sapiens
cttggagggggtggg

SEQ ID NO: 75143 - DNA, 15 bp, Homo sapiens
gcttggagggggtgg

SEQ ID NO: 75144 - DNA, 15 bp, Homo sapiens
ggcttggagggggtg

SEQ ID NO: 75145 - DNA, 15 bp, Homo sapiens
tggcttggagggggt

SEQ ID NO: 75146 - DNA, 15 bp, Homo sapiens
ttggcttggaggggg

SEQ ID NO: 75147 - DNA, 15 bp, Homo sapiens
tttggcttggagggg

SEQ ID NO: 75148 - DNA, 15 bp, Homo sapiens
ttttggcttggaggg

SEQ ID NO: 75149 - DNA, 15 bp, Homo sapiens
attttggcttggagg

SEQ ID NO: 75150 - DNA, 15 bp, Homo sapiens
cattttggcttggag

SEQ ID NO: 75151 - DNA, 15 bp, Homo sapiens
acattttggcttgga

SEQ ID NO: 75152 - DNA, 15 bp, Homo sapiens
gacattttggcttgg

SEQ ID NO: 75153 - DNA, 15 bp, Homo sapiens
tgacattttggcttg

SEQ ID NO: 75154 - DNA, 15 bp, Homo sapiens
ctgacattttggctt

SEQ ID NO: 75155 - DNA, 15 bp, Homo sapiens
tctgacattttggct

SEQ ID NO: 75156 - DNA, 15 bp, Homo sapiens
ttctgacattttggc

SEQ ID NO: 75157 - DNA, 15 bp, Homo sapiens
tttctgacattttgg

SEQ ID NO: 75158 - DNA, 15 bp, Homo sapiens
ttttctgacattttg

SEQ ID NO: 75159 - DNA, 15 bp, Homo sapiens
cttttctgacatttt

SEQ ID NO: 75160 - DNA, 15 bp, Homo sapiens
ccttttctgacattt

SEQ ID NO: 75161 - DNA, 15 bp, Homo sapiens
cccttttctgacatt

SEQ ID NO: 75162 - DNA, 15 bp, Homo sapiens
gcccttttctgacat

SEQ ID NO: 75163 - DNA, 15 bp, Homo sapiens
ggcccttttctgaca

SEQ ID NO: 75164 - DNA, 15 bp, Homo sapiens
aggcccttttctgac

SEQ ID NO: 75165 - DNA, 15 bp, Homo sapiens
caggcccttttctga

SEQ ID NO: 75166 - DNA, 15 bp, Homo sapiens
ccaggcccttttctg

SEQ ID NO: 75167 - DNA, 15 bp, Homo sapiens
accaggcccttttct

SEQ ID NO: 75168 - DNA, 15 bp, Homo sapiens
aaccaggcccttttc

SEQ ID NO: 75169 - DNA, 15 bp, Homo sapiens
aaaccaggccctttt

SEQ ID NO: 75170 - DNA, 15 bp, Homo sapiens
gaaaccaggcccttt

SEQ ID NO: 75171 - DNA, 15 bp, Homo sapiens
ggaaaccaggccctt

SEQ ID NO: 75172 - DNA, 15 bp, Homo sapiens
gggaaaccaggccct

SEQ ID NO: 75173 - DNA, 15 bp, Homo sapiens
agggaaaccaggccc

SEQ ID NO: 75174 - DNA, 15 bp, Homo sapiens
aagggaaaccaggcc

SEQ ID NO: 75175 - DNA, 15 bp, Homo sapiens
aaagggaaaccaggc

SEQ ID NO: 75176 - DNA, 15 bp, Homo sapiens
taaagggaaaccagg

SEQ ID NO: 75177 - DNA, 15 bp, Homo sapiens
ataaagggaaaccag

SEQ ID NO: 75178 - DNA, 15 bp, Homo sapiens
cataaagggaaacca

SEQ ID NO: 75179 - DNA, 15 bp, Homo sapiens
ccataaagggaaacc

SEQ ID NO: 75180 - DNA, 15 bp, Homo sapiens
tccataaagggaaac

SEQ ID NO: 75181 - DNA, 15 bp, Homo sapiens
ctccataaagggaaa

SEQ ID NO: 75182 - DNA, 15 bp, Homo sapiens
actccataaagggaa

SEQ ID NO: 75183 - DNA, 15 bp, Homo sapiens
cactccataaaggga

SEQ ID NO: 75184 - DNA, 15 bp, Homo sapiens
gcactccataaaggg

SEQ ID NO: 75185 - DNA, 15 bp, Homo sapiens
tgcactccataaagg

SEQ ID NO: 75186 - DNA, 15 bp, Homo sapiens
ttgcactccataaag

SEQ ID NO: 75187 - DNA, 15 bp, Homo sapiens
tttgcactccataaa

SEQ ID NO: 75188 - DNA, 15 bp, Homo sapiens
ttttgcactccataa

SEQ ID NO: 75189 - DNA, 15 bp, Homo sapiens
attttgcactccata

SEQ ID NO: 75190 - DNA, 15 bp, Homo sapiens
tattttgcactccat

SEQ ID NO: 75191 - DNA, 15 bp, Homo sapiens
ttattttgcactcca

SEQ ID NO: 75192 - DNA, 15 bp, Homo sapiens
tttattttgcactcc

SEQ ID NO: 75193 - DNA, 15 bp, Homo sapiens
gtttattttgcactc

SEQ ID NO: 75194 - DNA, 15 bp, Homo sapiens
tgtttattttgcact

SEQ ID NO: 75195 - DNA, 15 bp, Homo sapiens
ctgtttattttgcac

SEQ ID NO: 75196 - DNA, 15 bp, Homo sapiens
tctgtttattttgca

SEQ ID NO: 75197 - DNA, 15 bp, Homo sapiens
atctgtttattttgc

SEQ ID NO: 75198 - DNA, 15 bp, Homo sapiens
gatctgtttattttg

SEQ ID NO: 75199 - DNA, 15 bp, Homo sapiens
ggatctgtttatttt

SEQ ID NO: 75200 - DNA, 15 bp, Homo sapiens
aggatctgtttattt

SEQ ID NO: 75201 - DNA, 15 bp, Homo sapiens
gaggatctgtttatt

SEQ ID NO: 75202 - DNA, 15 bp, Homo sapiens
tgaggatctgtttat

SEQ ID NO: 75203 - DNA, 15 bp, Homo sapiens
ctgaggatctgttta

SEQ ID NO: 75204 - DNA, 15 bp, Homo sapiens
gctgaggatctgttt

SEQ ID NO: 75205 - DNA, 15 bp, Homo sapiens
tgctgaggatctgtt

SEQ ID NO: 75206 - DNA, 15 bp, Homo sapiens
ctgctgaggatctgt

SEQ ID NO: 75207 - DNA, 15 bp, Homo sapiens
gctgctgaggatctg

SEQ ID NO: 75208 - DNA, 15 bp, Homo sapiens
tgctgctgaggatct

SEQ ID NO: 75209 - DNA, 15 bp, Homo sapiens
ctgctgctgaggatc

SEQ ID NO: 75210 - DNA, 15 bp, Homo sapiens
cctgctgctgaggat

SEQ ID NO: 75211 - DNA, 15 bp, Homo sapiens
tcctgctgctgagga

SEQ ID NO: 75212 - DNA, 15 bp, Homo sapiens
ctcctgctgctgagg

SEQ ID NO: 75213 - DNA, 15 bp, Homo sapiens
tctcctgctgctgag

SEQ ID NO: 75214 - DNA, 15 bp, Homo sapiens
ctctcctgctgctga

SEQ ID NO: 75215 - DNA, 15 bp, Homo sapiens
cctctcctgctgctg

SEQ ID NO: 75216 - DNA, 15 bp, Homo sapiens
ccctctcctgctgct

SEQ ID NO: 75217 - DNA, 15 bp, Homo sapiens
cccctctcctgctgc

SEQ ID NO: 75218 - DNA, 15 bp, Homo sapiens
gcccctctcctgctg

SEQ ID NO: 75219 - DNA, 15 bp, Homo sapiens
ggcccctctcctgct

SEQ ID NO: 75220 - DNA, 15 bp, Homo sapiens
gggcccctctcctgc

SEQ ID NO: 75221 - DNA, 15 bp, Homo sapiens
tgggcccctctcctg

SEQ ID NO: 75222 - DNA, 15 bp, Homo sapiens
ctgggcccctctcct

SEQ ID NO: 75223 - DNA, 15 bp, Homo sapiens
actgggcccctctcc

SEQ ID NO: 75224 - DNA, 15 bp, Homo sapiens
aactgggcccctctc

SEQ ID NO: 75225 - DNA, 15 bp, Homo sapiens
gaactgggcccctct

SEQ ID NO: 75226 - DNA, 15 bp, Homo sapiens
ggaactgggcccctc

SEQ ID NO: 75227 - DNA, 15 bp, Homo sapiens
gggaactgggcccct

SEQ ID NO: 75228 - DNA, 15 bp, Homo sapiens
ggggaactgggcccc

SEQ ID NO: 75229 - DNA, 15 bp, Homo sapiens
tggggaactgggccc

SEQ ID NO: 75230 - DNA, 15 bp, Homo sapiens
ctggggaactgggcc

SEQ ID NO: 75231 - DNA, 15 bp, Homo sapiens
gctggggaactgggc

SEQ ID NO: 75232 - DNA, 15 bp, Homo sapiens
ggctggggaactggg

SEQ ID NO: 75233 - DNA, 15 bp, Homo sapiens
gggctggggaactgg

SEQ ID NO: 75234 - DNA, 15 bp, Homo sapiens
tgggctggggaactg

SEQ ID NO: 75235 - DNA, 15 bp, Homo sapiens
atgggctggggaact

SEQ ID NO: 75236 - DNA, 15 bp, Homo sapiens
tatgggctggggaac

SEQ ID NO: 75237 - DNA, 15 bp, Homo sapiens
ttatgggctggggaa

SEQ ID NO: 75238 - DNA, 15 bp, Homo sapiens
attatgggctgggga

SEQ ID NO: 75239 - DNA, 15 bp, Homo sapiens
cattatgggctgggg

SEQ ID NO: 75240 - DNA, 15 bp, Homo sapiens
gcattatgggctggg

SEQ ID NO: 75241 - DNA, 15 bp, Homo sapiens
ggcattatgggctgg

SEQ ID NO: 75242 - DNA, 15 bp, Homo sapiens
tggcattatgggctg

SEQ ID NO: 75243 - DNA, 15 bp, Homo sapiens
ctggcattatgggct

SEQ ID NO: 75244 - DNA, 15 bp, Homo sapiens
tctggcattatgggc

SEQ ID NO: 75245 - DNA, 15 bp, Homo sapiens
ctctggcattatggg

SEQ ID NO: 75246 - DNA, 15 bp, Homo sapiens
gctctggcattatgg

SEQ ID NO: 75247 - DNA, 15 bp, Homo sapiens
agctctggcattatg

SEQ ID NO: 75248 - DNA, 15 bp, Homo sapiens
cagctctggcattat

SEQ ID NO: 75249 - DNA, 15 bp, Homo sapiens
ccagctctggcatta

SEQ ID NO: 75250 - DNA, 15 bp, Homo sapiens
cccagctctggcatt

SEQ ID NO: 75251 - DNA, 15 bp, Homo sapiens
ccccagctctggcat

SEQ ID NO: 75252 - DNA, 15 bp, Homo sapiens
cccccagctctggca

SEQ ID NO: 75253 - DNA, 15 bp, Homo sapiens
acccccagctctggc

SEQ ID NO: 75254 - DNA, 15 bp, Homo sapiens
cacccccagctctgg

SEQ ID NO: 75255 - DNA, 15 bp, Homo sapiens
ccacccccagctctg

SEQ ID NO: 75256 - DNA, 15 bp, Homo sapiens
cccacccccagctct

SEQ ID NO: 75257 - DNA, 15 bp, Homo sapiens
ccccacccccagctc

SEQ ID NO: 75258 - DNA, 15 bp, Homo sapiens
cccccacccccagct

SEQ ID NO: 75259 - DNA, 15 bp, Homo sapiens
acccccacccccagc

SEQ ID NO: 75260 - DNA, 15 bp, Homo sapiens
cacccccacccccag

SEQ ID NO: 75261 - DNA, 15 bp, Homo sapiens
gcacccccaccccca

SEQ ID NO: 75262 - DNA, 15 bp, Homo sapiens
agcacccccaccccc

SEQ ID NO: 75263 - DNA, 15 bp, Homo sapiens
cagcacccccacccc

SEQ ID NO: 75264 - DNA, 15 bp, Homo sapiens
acagcacccccaccc

SEQ ID NO: 75265 - DNA, 15 bp, Homo sapiens
cacagcacccccacc

SEQ ID NO: 75266 - DNA, 15 bp, Homo sapiens
ccacagcacccccac

SEQ ID NO: 75267 - DNA, 15 bp, Homo sapiens
cccacagcaccccca

SEQ ID NO: 75268 - DNA, 15 bp, Homo sapiens
ccccacagcaccccc

SEQ ID NO: 75269 - DNA, 15 bp, Homo sapiens
tccccacagcacccc

SEQ ID NO: 75270 - DNA, 15 bp, Homo sapiens
ttccccacagcaccc

SEQ ID NO: 75271 - DNA, 15 bp, Homo sapiens
tttccccacagcacc

SEQ ID NO: 75272 - DNA, 15 bp, Homo sapiens
ttttccccacagcac

SEQ ID NO: 75273 - DNA, 15 bp, Homo sapiens
cttttccccacagca

SEQ ID NO: 75274 - DNA, 15 bp, Homo sapiens
gcttttccccacagc

SEQ ID NO: 75275 - DNA, 15 bp, Homo sapiens
tgcttttccccacag

SEQ ID NO: 75276 - DNA, 15 bp, Homo sapiens
ctgcttttccccaca

SEQ ID NO: 75277 - DNA, 15 bp, Homo sapiens
actgcttttccccac

SEQ ID NO: 75278 - DNA, 15 bp, Homo sapiens
aactgcttttcccca

SEQ ID NO: 75279 - DNA, 15 bp, Homo sapiens
taactgcttttcccc

SEQ ID NO: 75280 - DNA, 15 bp, Homo sapiens
ataactgcttttccc

SEQ ID NO: 75281 - DNA, 15 bp, Homo sapiens
aataactgcttttcc

SEQ ID NO: 75282 - DNA, 15 bp, Homo sapiens
gaataactgcttttc

SEQ ID NO: 75283 - DNA, 15 bp, Homo sapiens
agaataactgctttt

SEQ ID NO: 75284 - DNA, 15 bp, Homo sapiens
aagaataactgcttt

SEQ ID NO: 75285 - DNA, 15 bp, Homo sapiens
gaagaataactgctt

SEQ ID NO: 75286 - DNA, 15 bp, Homo sapiens
agaagaataactgct

SEQ ID NO: 75287 - DNA, 15 bp, Homo sapiens
cagaagaataactgc

SEQ ID NO: 75288 - DNA, 15 bp, Homo sapiens
acagaagaataactg

SEQ ID NO: 75289 - DNA, 15 bp, Homo sapiens
gacagaagaataact

SEQ ID NO: 75290 - DNA, 15 bp, Homo sapiens
agacagaagaataac

SEQ ID NO: 75291 - DNA, 15 bp, Homo sapiens
cagacagaagaataa

SEQ ID NO: 75292 - DNA, 15 bp, Homo sapiens
ccagacagaagaata

SEQ ID NO: 75293 - DNA, 15 bp, Homo sapiens
accagacagaagaat

SEQ ID NO: 75294 - DNA, 15 bp, Homo sapiens
aaccagacagaagaa

SEQ ID NO: 75295 - DNA, 15 bp, Homo sapiens
taaccagacagaaga

SEQ ID NO: 75296 - DNA, 15 bp, Homo sapiens
ctaaccagacagaag

SEQ ID NO: 75297 - DNA, 15 bp, Homo sapiens
actaaccagacagaa

SEQ ID NO: 75298 - DNA, 15 bp, Homo sapiens
tactaaccagacaga

SEQ ID NO: 75299 - DNA, 15 bp, Homo sapiens
atactaaccagacag

SEQ ID NO: 75300 - DNA, 15 bp, Homo sapiens
aatactaaccagaca

SEQ ID NO: 75301 - DNA, 15 bp, Homo sapiens
aaatactaaccagac

SEQ ID NO: 75302 - DNA, 15 bp, Homo sapiens
caaatactaaccaga

SEQ ID NO: 75303 - DNA, 15 bp, Homo sapiens
ccaaatactaaccag

SEQ ID NO: 75304 - DNA, 15 bp, Homo sapiens
gccaaatactaacca

SEQ ID NO: 75305 - DNA, 15 bp, Homo sapiens
tgccaaatactaacc

SEQ ID NO: 75306 - DNA, 15 bp, Homo sapiens
atgccaaatactaac

SEQ ID NO: 75307 - DNA, 15 bp, Homo sapiens
aatgccaaatactaa

SEQ ID NO: 75308 - DNA, 15 bp, Homo sapiens
caatgccaaatacta

SEQ ID NO: 75309 - DNA, 15 bp, Homo sapiens
tcaatgccaaatact

SEQ ID NO: 75310 - DNA, 15 bp, Homo sapiens
gtcaatgccaaatac

SEQ ID NO: 75311 - DNA, 15 bp, Homo sapiens
agtcaatgccaaata

SEQ ID NO: 75312 - DNA, 15 bp, Homo sapiens
aagtcaatgccaaat

SEQ ID NO: 75313 - DNA, 15 bp, Homo sapiens
aaagtcaatgccaaa

SEQ ID NO: 75314 - DNA, 15 bp, Homo sapiens
gaaagtcaatgccaa

SEQ ID NO: 75315 - DNA, 15 bp, Homo sapiens
tgaaagtcaatgcca

SEQ ID NO: 75316 - DNA, 15 bp, Homo sapiens
atgaaagtcaatgcc

SEQ ID NO: 75317 - DNA, 15 bp, Homo sapiens
aatgaaagtcaatgc

SEQ ID NO: 75318 - DNA, 15 bp, Homo sapiens
aaatgaaagtcaatg

SEQ ID NO: 75319 - DNA, 15 bp, Homo sapiens
aaaatgaaagtcaat

SEQ ID NO: 75320 - DNA, 15 bp, Homo sapiens
gaaaatgaaagtcaa

SEQ ID NO: 75321 - DNA, 15 bp, Homo sapiens
agaaaatgaaagtca

SEQ ID NO: 75322 - DNA, 15 bp, Homo sapiens
gagaaaatgaaagtc

SEQ ID NO: 75323 - DNA, 15 bp, Homo sapiens
ggagaaaatgaaagt

SEQ ID NO: 75324 - DNA, 15 bp, Homo sapiens
tggagaaaatgaaag

SEQ ID NO: 75325 - DNA, 15 bp, Homo sapiens
ttggagaaaatgaaa

SEQ ID NO: 75326 - DNA, 15 bp, Homo sapiens
gttggagaaaatgaa

SEQ ID NO: 75327 - DNA, 15 bp, Homo sapiens
ggttggagaaaatga

SEQ ID NO: 75328 - DNA, 15 bp, Homo sapiens
aggttggagaaaatg

SEQ ID NO: 75329 - DNA, 15 bp, Homo sapiens
gaggttggagaaaat

SEQ ID NO: 75330 - DNA, 15 bp, Homo sapiens
agaggttggagaaaa

SEQ ID NO: 75331 - DNA, 15 bp, Homo sapiens
cagaggttggagaaa

SEQ ID NO: 75332 - DNA, 15 bp, Homo sapiens
acagaggttggagaa

SEQ ID NO: 75333 - DNA, 15 bp, Homo sapiens
aacagaggttggaga

SEQ ID NO: 75334 - DNA, 15 bp, Homo sapiens
aaacagaggttggag

SEQ ID NO: 75335 - DNA, 15 bp, Homo sapiens
aaaacagaggttgga

SEQ ID NO: 75336 - DNA, 15 bp, Homo sapiens
gaaaacagaggttgg

SEQ ID NO: 75337 - DNA, 15 bp, Homo sapiens
agaaaacagaggttg

SEQ ID NO: 75338 - DNA, 15 bp, Homo sapiens
tagaaaacagaggtt

SEQ ID NO: 75339 - DNA, 15 bp, Homo sapiens
ctagaaaacagaggt

SEQ ID NO: 75340 - DNA, 15 bp, Homo sapiens
tctagaaaacagagg

SEQ ID NO: 75341 - DNA, 15 bp, Homo sapiens
ttctagaaaacagag

SEQ ID NO: 75342 - DNA, 15 bp, Homo sapiens
cttctagaaaacaga

SEQ ID NO: 75343 - DNA, 15 bp, Homo sapiens
gcttctagaaaacag

SEQ ID NO: 75344 - DNA, 15 bp, Homo sapiens
ggcttctagaaaaca

SEQ ID NO: 75345 - DNA, 15 bp, Homo sapiens
aggcttctagaaaac

SEQ ID NO: 75346 - DNA, 15 bp, Homo sapiens
caggcttctagaaaa

SEQ ID NO: 75347 - DNA, 15 bp, Homo sapiens
gcaggcttctagaaa

SEQ ID NO: 75348 - DNA, 15 bp, Homo sapiens
ggcaggcttctagaa

SEQ ID NO: 75349 - DNA, 15 bp, Homo sapiens
aggcaggcttctaga

SEQ ID NO: 75350 - DNA, 15 bp, Homo sapiens
caggcaggcttctag

SEQ ID NO: 75351 - DNA, 15 bp, Homo sapiens
acaggcaggcttcta

SEQ ID NO: 75352 - DNA, 15 bp, Homo sapiens
tacaggcaggcttct

SEQ ID NO: 75353 - DNA, 15 bp, Homo sapiens
gtacaggcaggcttc

SEQ ID NO: 75354 - DNA, 15 bp, Homo sapiens
cgtacaggcaggctt

SEQ ID NO: 75355 - DNA, 15 bp, Homo sapiens
ccgtacaggcaggct

SEQ ID NO: 75356 - DNA, 15 bp, Homo sapiens
cccgtacaggcaggc

SEQ ID NO: 75357 - DNA, 15 bp, Homo sapiens
tcccgtacaggcagg

SEQ ID NO: 75358 - DNA, 15 bp, Homo sapiens
ttcccgtacaggcag

SEQ ID NO: 75359 - DNA, 15 bp, Homo sapiens
cttcccgtacaggca

SEQ ID NO: 75360 - DNA, 15 bp, Homo sapiens
acttcccgtacaggc

SEQ ID NO: 75361 - DNA, 15 bp, Homo sapiens
tacttcccgtacagg

SEQ ID NO: 75362 - DNA, 15 bp, Homo sapiens
gtacttcccgtacag

SEQ ID NO: 75363 - DNA, 15 bp, Homo sapiens
tgtacttcccgtaca

SEQ ID NO: 75364 - DNA, 15 bp, Homo sapiens
ctgtacttcccgtac

SEQ ID NO: 75365 - DNA, 15 bp, Homo sapiens
cctgtacttcccgta

SEQ ID NO: 75366 - DNA, 15 bp, Homo sapiens
tcctgtacttcccgt

SEQ ID NO: 75367 - DNA, 15 bp, Homo sapiens
ttcctgtacttcccg

SEQ ID NO: 75368 - DNA, 15 bp, Homo sapiens
attcctgtacttccc

SEQ ID NO: 75369 - DNA, 15 bp, Homo sapiens
tattcctgtacttcc

SEQ ID NO: 75370 - DNA, 15 bp, Homo sapiens
ttattcctgtacttc

SEQ ID NO: 75371 - DNA, 15 bp, Homo sapiens
tttattcctgtactt

SEQ ID NO: 75372 - DNA, 15 bp, Homo sapiens
ctttattcctgtact

SEQ ID NO: 75373 - DNA, 15 bp, Homo sapiens
tctttattcctgtac

SEQ ID NO: 75374 - DNA, 15 bp, Homo sapiens
ctctttattcctgta

SEQ ID NO: 75375 - DNA, 15 bp, Homo sapiens
tctctttattcctgt

SEQ ID NO: 75376 - DNA, 15 bp, Homo sapiens
ttctctttattcctg

SEQ ID NO: 75377 - DNA, 15 bp, Homo sapiens
cttctctttattcct

SEQ ID NO: 75378 - DNA, 15 bp, Homo sapiens
gcttctctttattcc

SEQ ID NO: 75379 - DNA, 15 bp, Homo sapiens
agcttctctttattc

SEQ ID NO: 75380 - DNA, 15 bp, Homo sapiens
cagcttctctttatt

SEQ ID NO: 75381 - DNA, 15 bp, Homo sapiens
tcagcttctctttat

SEQ ID NO: 75382 - DNA, 15 bp, Homo sapiens
atcagcttctcttta

SEQ ID NO: 75383 - DNA, 15 bp, Homo sapiens
gatcagcttctcttt

SEQ ID NO: 75384 - DNA, 15 bp, Homo sapiens
cgatcagcttctctt

SEQ ID NO: 75385 - DNA, 15 bp, Homo sapiens
acgatcagcttctct

SEQ ID NO: 75386 - DNA, 15 bp, Homo sapiens
cacgatcagcttctc

SEQ ID NO: 75387 - DNA, 15 bp, Homo sapiens
ccacgatcagcttct

SEQ ID NO: 75388 - DNA, 15 bp, Homo sapiens
cccacgatcagcttc

SEQ ID NO: 75389 - DNA, 15 bp, Homo sapiens
ccccacgatcagctt

SEQ ID NO: 75390 - DNA, 15 bp, Homo sapiens
cccccacgatcagct

SEQ ID NO: 75391 - DNA, 15 bp, Homo sapiens
acccccacgatcagc

SEQ ID NO: 75392 - DNA, 15 bp, Homo sapiens
aacccccacgatcag

SEQ ID NO: 75393 - DNA, 15 bp, Homo sapiens
aaacccccacgatca

SEQ ID NO: 75394 - DNA, 15 bp, Homo sapiens
aaaacccccacgatc

SEQ ID NO: 75395 - DNA, 15 bp, Homo sapiens
gaaaacccccacgat

SEQ ID NO: 75396 - DNA, 15 bp, Homo sapiens
agaaaacccccacga

SEQ ID NO: 75397 - DNA, 15 bp, Homo sapiens
aagaaaacccccacg

SEQ ID NO: 75398 - DNA, 15 bp, Homo sapiens
caagaaaacccccac

SEQ ID NO: 75399 - DNA, 15 bp, Homo sapiens
gcaagaaaaccccca

SEQ ID NO: 75400 - DNA, 15 bp, Homo sapiens
ggcaagaaaaccccc

SEQ ID NO: 75401 - DNA, 15 bp, Homo sapiens
tggcaagaaaacccc

SEQ ID NO: 75402 - DNA, 15 bp, Homo sapiens
ctggcaagaaaaccc

SEQ ID NO: 75403 - DNA, 15 bp, Homo sapiens
tctggcaagaaaacc

SEQ ID NO: 75404 - DNA, 15 bp, Homo sapiens
gtctggcaagaaaac

SEQ ID NO: 75405 - DNA, 15 bp, Homo sapiens
agtctggcaagaaaa

SEQ ID NO: 75406 - DNA, 15 bp, Homo sapiens
aagtctggcaagaaa

SEQ ID NO: 75407 - DNA, 15 bp, Homo sapiens
gaagtctggcaagaa

SEQ ID NO: 75408 - DNA, 15 bp, Homo sapiens
tgaagtctggcaaga

SEQ ID NO: 75409 - DNA, 15 bp, Homo sapiens
ttgaagtctggcaag

SEQ ID NO: 75410 - DNA, 15 bp, Homo sapiens
tttgaagtctggcaa

SEQ ID NO: 75411 - DNA, 15 bp, Homo sapiens
ctttgaagtctggca

SEQ ID NO: 75412 - DNA, 15 bp, Homo sapiens
cctttgaagtctggc

SEQ ID NO: 75413 - DNA, 15 bp, Homo sapiens
tcctttgaagtctgg

SEQ ID NO: 75414 - DNA, 15 bp, Homo sapiens
ctcctttgaagtctg

SEQ ID NO: 75415 - DNA, 15 bp, Homo sapiens
cctcctttgaagtct

SEQ ID NO: 75416 - DNA, 15 bp, Homo sapiens
acctcctttgaagtc

SEQ ID NO: 75417 - DNA, 15 bp, Homo sapiens
cacctcctttgaagt

SEQ ID NO: 75418 - DNA, 15 bp, Homo sapiens
ccacctcctttgaag

SEQ ID NO: 75419 - DNA, 15 bp, Homo sapiens
tccacctcctttgaa

SEQ ID NO: 75420 - DNA, 15 bp, Homo sapiens
atccacctcctttga

SEQ ID NO: 75421 - DNA, 15 bp, Homo sapiens
aatccacctcctttg

SEQ ID NO: 75422 - DNA, 15 bp, Homo sapiens
aaatccacctccttt

SEQ ID NO: 75423 - DNA, 15 bp, Homo sapiens
aaaatccacctcctt

SEQ ID NO: 75424 - DNA, 15 bp, Homo sapiens
aaaaatccacctcct

SEQ ID NO: 75425 - DNA, 15 bp, Homo sapiens
caaaaatccacctcc

SEQ ID NO: 75426 - DNA, 15 bp, Homo sapiens
tcaaaaatccacctc

SEQ ID NO: 75427 - DNA, 15 bp, Homo sapiens
atcaaaaatccacct

SEQ ID NO: 75428 - DNA, 15 bp, Homo sapiens
aatcaaaaatccacc

SEQ ID NO: 75429 - DNA, 15 bp, Homo sapiens
aaatcaaaaatccac

SEQ ID NO: 75430 - DNA, 15 bp, Homo sapiens
aaaatcaaaaatcca

SEQ ID NO: 75431 - DNA, 15 bp, Homo sapiens
aaaaatcaaaaatcc

SEQ ID NO: 75432 - DNA, 15 bp, Homo sapiens
caaaaatcaaaaatc

SEQ ID NO: 75433 - DNA, 15 bp, Homo sapiens
tcaaaaatcaaaaat

SEQ ID NO: 75434 - DNA, 15 bp, Homo sapiens
atcaaaaatcaaaaa

SEQ ID NO: 75435 - DNA, 15 bp, Homo sapiens
tatcaaaaatcaaaa

SEQ ID NO: 75436 - DNA, 15 bp, Homo sapiens
ctatcaaaaatcaaa

SEQ ID NO: 75437 - DNA, 15 bp, Homo sapiens
actatcaaaaatcaa

SEQ ID NO: 75438 - DNA, 15 bp, Homo sapiens
aactatcaaaaatca

SEQ ID NO: 75439 - DNA, 15 bp, Homo sapiens
aaactatcaaaaatc

SEQ ID NO: 75440 - DNA, 15 bp, Homo sapiens
caaactatcaaaaat

SEQ ID NO: 75441 - DNA, 15 bp, Homo sapiens
ccaaactatcaaaaa

SEQ ID NO: 75442 - DNA, 15 bp, Homo sapiens
tccaaactatcaaaa

SEQ ID NO: 75443 - DNA, 15 bp, Homo sapiens
ctccaaactatcaaa

SEQ ID NO: 75444 - DNA, 15 bp, Homo sapiens
tctccaaactatcaa

SEQ ID NO: 75445 - DNA, 15 bp, Homo sapiens
ctctccaaactatca

SEQ ID NO: 75446 - DNA, 15 bp, Homo sapiens
gctctccaaactatc

SEQ ID NO: 75447 - DNA, 15 bp, Homo sapiens
agctctccaaactat

SEQ ID NO: 75448 - DNA, 15 bp, Homo sapiens
tagctctccaaacta

SEQ ID NO: 75449 - DNA, 15 bp, Homo sapiens
ctagctctccaaact

SEQ ID NO: 75450 - DNA, 15 bp, Homo sapiens
actagctctccaaac

SEQ ID NO: 75451 - DNA, 15 bp, Homo sapiens
aactagctctccaaa

SEQ ID NO: 75452 - DNA, 15 bp, Homo sapiens
gaactagctctccaa

SEQ ID NO: 75453 - DNA, 15 bp, Homo sapiens
ggaactagctctcca

SEQ ID NO: 75454 - DNA, 15 bp, Homo sapiens
tggaactagctctcc

SEQ ID NO: 75455 - DNA, 15 bp, Homo sapiens
ttggaactagctctc

SEQ ID NO: 75456 - DNA, 15 bp, Homo sapiens
tttggaactagctct

SEQ ID NO: 75457 - DNA, 15 bp, Homo sapiens
ttttggaactagctc

SEQ ID NO: 75458 - DNA, 15 bp, Homo sapiens
cttttggaactagct

SEQ ID NO: 75459 - DNA, 15 bp, Homo sapiens
acttttggaactagc

SEQ ID NO: 75460 - DNA, 15 bp, Homo sapiens
tacttttggaactag

SEQ ID NO: 75461 - DNA, 15 bp, Homo sapiens
ttacttttggaacta

SEQ ID NO: 75462 - DNA, 15 bp, Homo sapiens
tttacttttggaact

SEQ ID NO: 75463 - DNA, 15 bp, Homo sapiens
ttttacttttggaac

SEQ ID NO: 75464 - DNA, 15 bp, Homo sapiens
cttttacttttggaa

SEQ ID NO: 75465 - DNA, 15 bp, Homo sapiens
gcttttacttttgga

SEQ ID NO: 75466 - DNA, 15 bp, Homo sapiens
agcttttacttttgg

SEQ ID NO: 75467 - DNA, 15 bp, Homo sapiens
cagcttttacttttg

SEQ ID NO: 75468 - DNA, 15 bp, Homo sapiens
gcagcttttactttt

SEQ ID NO: 75469 - DNA, 15 bp, Homo sapiens
agcagcttttacttt

SEQ ID NO: 75470 - DNA, 15 bp, Homo sapiens
aagcagcttttactt

SEQ ID NO: 75471 - DNA, 15 bp, Homo sapiens
aaagcagcttttact

SEQ ID NO: 75472 - DNA, 15 bp, Homo sapiens
caaagcagcttttac

SEQ ID NO: 75473 - DNA, 15 bp, Homo sapiens
ccaaagcagctttta

SEQ ID NO: 75474 - DNA, 15 bp, Homo sapiens
cccaaagcagctttt

SEQ ID NO: 75475 - DNA, 15 bp, Homo sapiens
ccccaaagcagcttt

SEQ ID NO: 75476 - DNA, 15 bp, Homo sapiens
tccccaaagcagctt

SEQ ID NO: 75477 - DNA, 15 bp, Homo sapiens
gtccccaaagcagct

SEQ ID NO: 75478 - DNA, 15 bp, Homo sapiens
agtccccaaagcagc

SEQ ID NO: 75479 - DNA, 15 bp, Homo sapiens
aagtccccaaagcag

SEQ ID NO: 75480 - DNA, 15 bp, Homo sapiens
caagtccccaaagca

SEQ ID NO: 75481 - DNA, 15 bp, Homo sapiens
tcaagtccccaaagc

SEQ ID NO: 75482 - DNA, 15 bp, Homo sapiens
ttcaagtccccaaag

SEQ ID NO: 75483 - DNA, 15 bp, Homo sapiens
gttcaagtccccaaa

SEQ ID NO: 75484 - DNA, 15 bp, Homo sapiens
ggttcaagtccccaa

SEQ ID NO: 75485 - DNA, 15 bp, Homo sapiens
aggttcaagtcccca

SEQ ID NO: 75486 - DNA, 15 bp, Homo sapiens
taggttcaagtcccc

SEQ ID NO: 75487 - DNA, 15 bp, Homo sapiens
ctaggttcaagtccc

SEQ ID NO: 75488 - DNA, 15 bp, Homo sapiens
tctaggttcaagtcc

SEQ ID NO: 75489 - DNA, 15 bp, Homo sapiens
gtctaggttcaagtc

SEQ ID NO: 75490 - DNA, 15 bp, Homo sapiens
tgtctaggttcaagt

SEQ ID NO: 75491 - DNA, 15 bp, Homo sapiens
gtgtctaggttcaag

SEQ ID NO: 75492 - DNA, 15 bp, Homo sapiens
agtgtctaggttcaa

SEQ ID NO: 75493 - DNA, 15 bp, Homo sapiens
cagtgtctaggttca

SEQ ID NO: 75494 - DNA, 15 bp, Homo sapiens
ccagtgtctaggttc

SEQ ID NO: 75495 - DNA, 15 bp, Homo sapiens
cccagtgtctaggtt

SEQ ID NO: 75496 - DNA, 15 bp, Homo sapiens
tcccagtgtctaggt

SEQ ID NO: 75497 - DNA, 15 bp, Homo sapiens
atcccagtgtctagg

SEQ ID NO: 75498 - DNA, 15 bp, Homo sapiens
gatcccagtgtctag

SEQ ID NO: 75499 - DNA, 15 bp, Homo sapiens
agatcccagtgtcta

SEQ ID NO: 75500 - DNA, 15 bp, Homo sapiens
aagatcccagtgtct

SEQ ID NO: 75501 - DNA, 15 bp, Homo sapiens
taagatcccagtgtc

SEQ ID NO: 75502 - DNA, 15 bp, Homo sapiens
ctaagatcccagtgt

SEQ ID NO: 75503 - DNA, 15 bp, Homo sapiens
gctaagatcccagtg

SEQ ID NO: 75504 - DNA, 15 bp, Homo sapiens
ggctaagatcccagt

SEQ ID NO: 75505 - DNA, 15 bp, Homo sapiens
cggctaagatcccag

SEQ ID NO: 75506 - DNA, 15 bp, Homo sapiens
acggctaagatccca

SEQ ID NO: 75507 - DNA, 15 bp, Homo sapiens
cacggctaagatccc

SEQ ID NO: 75508 - DNA, 15 bp, Homo sapiens
acacggctaagatcc

SEQ ID NO: 75509 - DNA, 15 bp, Homo sapiens
cacacggctaagatc

SEQ ID NO: 75510 - DNA, 15 bp, Homo sapiens
gcacacggctaagat

SEQ ID NO: 75511 - DNA, 15 bp, Homo sapiens
ggcacacggctaaga

SEQ ID NO: 75512 - DNA, 15 bp, Homo sapiens
gggcacacggctaag

SEQ ID NO: 75513 - DNA, 15 bp, Homo sapiens
tgggcacacggctaa

SEQ ID NO: 75514 - DNA, 15 bp, Homo sapiens
atgggcacacggcta

SEQ ID NO: 75515 - DNA, 15 bp, Homo sapiens
gatgggcacacggct

SEQ ID NO: 75516 - DNA, 15 bp, Homo sapiens
tgatgggcacacggc

SEQ ID NO: 75517 - DNA, 15 bp, Homo sapiens
ctgatgggcacacgg

SEQ ID NO: 75518 - DNA, 15 bp, Homo sapiens
tctgatgggcacacg

SEQ ID NO: 75519 - DNA, 15 bp, Homo sapiens
ctctgatgggcacac

SEQ ID NO: 75520 - DNA, 15 bp, Homo sapiens
gctctgatgggcaca

SEQ ID NO: 75521 - DNA, 15 bp, Homo sapiens
ggctctgatgggcac

SEQ ID NO: 75522 - DNA, 15 bp, Homo sapiens
cggctctgatgggca

SEQ ID NO: 75523 - DNA, 15 bp, Homo sapiens
gcggctctgatgggc

SEQ ID NO: 75524 - DNA, 15 bp, Homo sapiens
agcggctctgatggg

SEQ ID NO: 75525 - DNA, 15 bp, Homo sapiens
cagcggctctgatgg

SEQ ID NO: 75526 - DNA, 15 bp, Homo sapiens
gcagcggctctgatg

SEQ ID NO: 75527 - DNA, 15 bp, Homo sapiens
agcagcggctctgat

SEQ ID NO: 75528 - DNA, 15 bp, Homo sapiens
gagcagcggctctga

SEQ ID NO: 75529 - DNA, 15 bp, Homo sapiens
agagcagcggctctg

SEQ ID NO: 75530 - DNA, 15 bp, Homo sapiens
cagagcagcggctct

SEQ ID NO: 75531 - DNA, 15 bp, Homo sapiens
gcagagcagcggctc

SEQ ID NO: 75532 - DNA, 15 bp, Homo sapiens
agcagagcagcggct

SEQ ID NO: 75533 - DNA, 15 bp, Homo sapiens
gagcagagcagcggc

SEQ ID NO: 75534 - DNA, 15 bp, Homo sapiens
ggagcagagcagcgg

SEQ ID NO: 75535 - DNA, 15 bp, Homo sapiens
aggagcagagcagcg

SEQ ID NO: 75536 - DNA, 15 bp, Homo sapiens
caggagcagagcagc

SEQ ID NO: 75537 - DNA, 15 bp, Homo sapiens
tcaggagcagagcag

SEQ ID NO: 75538 - DNA, 15 bp, Homo sapiens
atcaggagcagagca

SEQ ID NO: 75539 - DNA, 15 bp, Homo sapiens
catcaggagcagagc

SEQ ID NO: 75540 - DNA, 15 bp, Homo sapiens
ccatcaggagcagag

SEQ ID NO: 75541 - DNA, 15 bp, Homo sapiens
tccatcaggagcaga

SEQ ID NO: 75542 - DNA, 15 bp, Homo sapiens
ttccatcaggagcag

SEQ ID NO: 75543 - DNA, 15 bp, Homo sapiens
attccatcaggagca

SEQ ID NO: 75544 - DNA, 15 bp, Homo sapiens
cattccatcaggagc

SEQ ID NO: 75545 - DNA, 15 bp, Homo sapiens
ccattccatcaggag

SEQ ID NO: 75546 - DNA, 15 bp, Homo sapiens
tccattccatcagga

SEQ ID NO: 75547 - DNA, 15 bp, Homo sapiens
ctccattccatcagg

SEQ ID NO: 75548 - DNA, 15 bp, Homo sapiens
actccattccatcag

SEQ ID NO: 75549 - DNA, 15 bp, Homo sapiens
cactccattccatca

SEQ ID NO: 75550 - DNA, 15 bp, Homo sapiens
gcactccattccatc

SEQ ID NO: 75551 - DNA, 15 bp, Homo sapiens
agcactccattccat

SEQ ID NO: 75552 - DNA, 15 bp, Homo sapiens
gagcactccattcca

SEQ ID NO: 75553 - DNA, 15 bp, Homo sapiens
agagcactccattcc

SEQ ID NO: 75554 - DNA, 15 bp, Homo sapiens
cagagcactccattc

SEQ ID NO: 75555 - DNA, 15 bp, Homo sapiens
ccagagcactccatt

SEQ ID NO: 75556 - DNA, 15 bp, Homo sapiens
cccagagcactccat

SEQ ID NO: 75557 - DNA, 15 bp, Homo sapiens
gcccagagcactcca

SEQ ID NO: 75558 - DNA, 15 bp, Homo sapiens
agcccagagcactcc

SEQ ID NO: 75559 - DNA, 15 bp, Homo sapiens
aagcccagagcactc

SEQ ID NO: 75560 - DNA, 15 bp, Homo sapiens
gaagcccagagcact

SEQ ID NO: 75561 - DNA, 15 bp, Homo sapiens
ggaagcccagagcac

SEQ ID NO: 75562 - DNA, 15 bp, Homo sapiens
gggaagcccagagca

SEQ ID NO: 75563 - DNA, 15 bp, Homo sapiens
tgggaagcccagagc

SEQ ID NO: 75564 - DNA, 15 bp, Homo sapiens
gtgggaagcccagag

SEQ ID NO: 75565 - DNA, 15 bp, Homo sapiens
agtgggaagcccaga

SEQ ID NO: 75566 - DNA, 15 bp, Homo sapiens
gagtgggaagcccag

SEQ ID NO: 75567 - DNA, 15 bp, Homo sapiens
agagtgggaagccca

SEQ ID NO: 75568 - DNA, 15 bp, Homo sapiens
gagagtgggaagccc

SEQ ID NO: 75569 - DNA, 15 bp, Homo sapiens
ggagagtgggaagcc

SEQ ID NO: 75570 - DNA, 15 bp, Homo sapiens
aggagagtgggaagc

SEQ ID NO: 75571 - DNA, 15 bp, Homo sapiens
gaggagagtgggaag

SEQ ID NO: 75572 - DNA, 15 bp, Homo sapiens
agaggagagtgggaa

SEQ ID NO: 75573 - DNA, 15 bp, Homo sapiens
gagaggagagtggga

SEQ ID NO: 75574 - DNA, 15 bp, Homo sapiens
ggagaggagagtggg

SEQ ID NO: 75575 - DNA, 15 bp, Homo sapiens
gggagaggagagtgg

SEQ ID NO: 75576 - DNA, 15 bp, Homo sapiens
tgggagaggagagtg

SEQ ID NO: 75577 - DNA, 15 bp, Homo sapiens
ctgggagaggagagt

SEQ ID NO: 75578 - DNA, 15 bp, Homo sapiens
actgggagaggagag

SEQ ID NO: 75579 - DNA, 15 bp, Homo sapiens
gactgggagaggaga

SEQ ID NO: 75580 - DNA, 15 bp, Homo sapiens
ggactgggagaggag

SEQ ID NO: 75581 - DNA, 15 bp, Homo sapiens
tggactgggagagga

SEQ ID NO: 75582 - DNA, 15 bp, Homo sapiens
ctggactgggagagg

SEQ ID NO: 75583 - DNA, 15 bp, Homo sapiens
cctggactgggagag

SEQ ID NO: 75584 - DNA, 15 bp, Homo sapiens
tcctggactgggaga

SEQ ID NO: 75585 - DNA, 15 bp, Homo sapiens
ctcctggactgggag

SEQ ID NO: 75586 - DNA, 15 bp, Homo sapiens
cctcctggactggga

SEQ ID NO: 75587 - DNA, 15 bp, Homo sapiens
ccctcctggactggg

SEQ ID NO: 75588 - DNA, 15 bp, Homo sapiens
gccctcctggactgg

SEQ ID NO: 75589 - DNA, 15 bp, Homo sapiens
agccctcctggactg

SEQ ID NO: 75590 - DNA, 15 bp, Homo sapiens
cagccctcctggact

SEQ ID NO: 75591 - DNA, 15 bp, Homo sapiens
ccagccctcctggac

SEQ ID NO: 75592 - DNA, 15 bp, Homo sapiens
tccagccctcctgga

SEQ ID NO: 75593 - DNA, 15 bp, Homo sapiens
ctccagccctcctgg

SEQ ID NO: 75594 - DNA, 15 bp, Homo sapiens
gctccagccctcctg

SEQ ID NO: 75595 - DNA, 15 bp, Homo sapiens
agctccagccctcct

SEQ ID NO: 75596 - DNA, 15 bp, Homo sapiens
gagctccagccctcc

SEQ ID NO: 75597 - DNA, 15 bp, Homo sapiens
agagctccagccctc

SEQ ID NO: 75598 - DNA, 15 bp, Homo sapiens
cagagctccagccct

SEQ ID NO: 75599 - DNA, 15 bp, Homo sapiens
ccagagctccagccc

SEQ ID NO: 75600 - DNA, 15 bp, Homo sapiens
cccagagctccagcc

SEQ ID NO: 75601 - DNA, 15 bp, Homo sapiens
gcccagagctccagc

SEQ ID NO: 75602 - DNA, 15 bp, Homo sapiens
tgcccagagctccag

SEQ ID NO: 75603 - DNA, 15 bp, Homo sapiens
atgcccagagctcca

SEQ ID NO: 75604 - DNA, 15 bp, Homo sapiens
gatgcccagagctcc

SEQ ID NO: 75605 - DNA, 15 bp, Homo sapiens
agatgcccagagctc

SEQ ID NO: 75606 - DNA, 15 bp, Homo sapiens
gagatgcccagagct

SEQ ID NO: 75607 - DNA, 15 bp, Homo sapiens
tgagatgcccagagc

SEQ ID NO: 75608 - DNA, 15 bp, Homo sapiens
ctgagatgcccagag

SEQ ID NO: 75609 - DNA, 15 bp, Homo sapiens
cctgagatgcccaga

SEQ ID NO: 75610 - DNA, 15 bp, Homo sapiens
ccctgagatgcccag

SEQ ID NO: 75611 - DNA, 15 bp, Homo sapiens
accctgagatgccca

SEQ ID NO: 75612 - DNA, 15 bp, Homo sapiens
gaccctgagatgccc

SEQ ID NO: 75613 - DNA, 15 bp, Homo sapiens
tgaccctgagatgcc

SEQ ID NO: 75614 - DNA, 15 bp, Homo sapiens
ctgaccctgagatgc

SEQ ID NO: 75615 - DNA, 15 bp, Homo sapiens
gctgaccctgagatg

SEQ ID NO: 75616 - DNA, 15 bp, Homo sapiens
agctgaccctgagat

SEQ ID NO: 75617 - DNA, 15 bp, Homo sapiens
cagctgaccctgaga

SEQ ID NO: 75618 - DNA, 15 bp, Homo sapiens
gcagctgaccctgag

SEQ ID NO: 75619 - DNA, 15 bp, Homo sapiens
cgcagctgaccctga

SEQ ID NO: 75620 - DNA, 15 bp, Homo sapiens
ccgcagctgaccctg

SEQ ID NO: 75621 - DNA, 15 bp, Homo sapiens
accgcagctgaccct

SEQ ID NO: 75622 - DNA, 15 bp, Homo sapiens
caccgcagctgaccc

SEQ ID NO: 75623 - DNA, 15 bp, Homo sapiens
tcaccgcagctgacc

SEQ ID NO: 75624 - DNA, 15 bp, Homo sapiens
ctcaccgcagctgac

SEQ ID NO: 75625 - DNA, 15 bp, Homo sapiens
gctcaccgcagctga

SEQ ID NO: 75626 - DNA, 15 bp, Homo sapiens
ggctcaccgcagctg

SEQ ID NO: 75627 - DNA, 15 bp, Homo sapiens
aggctcaccgcagct

SEQ ID NO: 75628 - DNA, 15 bp, Homo sapiens
caggctcaccgcagc

SEQ ID NO: 75629 - DNA, 15 bp, Homo sapiens
ccaggctcaccgcag

SEQ ID NO: 75630 - DNA, 15 bp, Homo sapiens
gccaggctcaccgca

SEQ ID NO: 75631 - DNA, 15 bp, Homo sapiens
ggccaggctcaccgc

SEQ ID NO: 75632 - DNA, 15 bp, Homo sapiens
tggccaggctcaccg

SEQ ID NO: 75633 - DNA, 15 bp, Homo sapiens
gtggccaggctcacc

SEQ ID NO: 75634 - DNA, 15 bp, Homo sapiens
tgtggccaggctcac

SEQ ID NO: 75635 - DNA, 15 bp, Homo sapiens
ctgtggccaggctca

SEQ ID NO: 75636 - DNA, 15 bp, Homo sapiens
cctgtggccaggctc

SEQ ID NO: 75637 - DNA, 15 bp, Homo sapiens
ccctgtggccaggct

SEQ ID NO: 75638 - DNA, 15 bp, Homo sapiens
gccctgtggccaggc

SEQ ID NO: 75639 - DNA, 15 bp, Homo sapiens
agccctgtggccagg

SEQ ID NO: 75640 - DNA, 15 bp, Homo sapiens
gagccctgtggccag

SEQ ID NO: 75641 - DNA, 15 bp, Homo sapiens
agagccctgtggcca

SEQ ID NO: 75642 - DNA, 15 bp, Homo sapiens
cagagccctgtggcc

SEQ ID NO: 75643 - DNA, 15 bp, Homo sapiens
gcagagccctgtggc

SEQ ID NO: 75644 - DNA, 15 bp, Homo sapiens
tgcagagccctgtgg

SEQ ID NO: 75645 - DNA, 15 bp, Homo sapiens
atgcagagccctgtg

SEQ ID NO: 75646 - DNA, 15 bp, Homo sapiens
aatgcagagccctgt

SEQ ID NO: 75647 - DNA, 15 bp, Homo sapiens
gaatgcagagccctg

SEQ ID NO: 75648 - DNA, 15 bp, Homo sapiens
ggaatgcagagccct

SEQ ID NO: 75649 - DNA, 15 bp, Homo sapiens
aggaatgcagagccc

SEQ ID NO: 75650 - DNA, 15 bp, Homo sapiens
aaggaatgcagagcc

SEQ ID NO: 75651 - DNA, 15 bp, Homo sapiens
gaaggaatgcagagc

SEQ ID NO: 75652 - DNA, 15 bp, Homo sapiens
agaaggaatgcagag

SEQ ID NO: 75653 - DNA, 15 bp, Homo sapiens
cagaaggaatgcaga

SEQ ID NO: 75654 - DNA, 15 bp, Homo sapiens
ccagaaggaatgcag

SEQ ID NO: 75655 - DNA, 15 bp, Homo sapiens
cccagaaggaatgca

SEQ ID NO: 75656 - DNA, 15 bp, Homo sapiens
gcccagaaggaatgc

SEQ ID NO: 75657 - DNA, 15 bp, Homo sapiens
agcccagaaggaatg

SEQ ID NO: 75658 - DNA, 15 bp, Homo sapiens
aagcccagaaggaat

SEQ ID NO: 75659 - DNA, 15 bp, Homo sapiens
aaagcccagaaggaa

SEQ ID NO: 75660 - DNA, 15 bp, Homo sapiens
caaagcccagaagga

SEQ ID NO: 75661 - DNA, 15 bp, Homo sapiens
gcaaagcccagaagg

SEQ ID NO: 75662 - DNA, 15 bp, Homo sapiens
agcaaagcccagaag

SEQ ID NO: 75663 - DNA, 15 bp, Homo sapiens
aagcaaagcccagaa

SEQ ID NO: 75664 - DNA, 15 bp, Homo sapiens
caagcaaagcccaga

SEQ ID NO: 75665 - DNA, 15 bp, Homo sapiens
ccaagcaaagcccag

SEQ ID NO: 75666 - DNA, 15 bp, Homo sapiens
accaagcaaagccca

SEQ ID NO: 75667 - DNA, 15 bp, Homo sapiens
aaccaagcaaagccc

SEQ ID NO: 75668 - DNA, 15 bp, Homo sapiens
aaaccaagcaaagcc

SEQ ID NO: 75669 - DNA, 15 bp, Homo sapiens
caaaccaagcaaagc

SEQ ID NO: 75670 - DNA, 15 bp, Homo sapiens
tcaaaccaagcaaag

SEQ ID NO: 75671 - DNA, 15 bp, Homo sapiens
ctcaaaccaagcaaa

SEQ ID NO: 75672 - DNA, 15 bp, Homo sapiens
actcaaaccaagcaa

SEQ ID NO: 75673 - DNA, 15 bp, Homo sapiens
cactcaaaccaagca

SEQ ID NO: 75674 - DNA, 15 bp, Homo sapiens
ccactcaaaccaagc

SEQ ID NO: 75675 - DNA, 15 bp, Homo sapiens
cccactcaaaccaag

SEQ ID NO: 75676 - DNA, 15 bp, Homo sapiens
acccactcaaaccaa

SEQ ID NO: 75677 - DNA, 15 bp, Homo sapiens
cacccactcaaacca

SEQ ID NO: 75678 - DNA, 15 bp, Homo sapiens
acacccactcaaacc

SEQ ID NO: 75679 - DNA, 15 bp, Homo sapiens
cacacccactcaaac

SEQ ID NO: 75680 - DNA, 15 bp, Homo sapiens
tcacacccactcaaa

SEQ ID NO: 75681 - DNA, 15 bp, Homo sapiens
gtcacacccactcaa

SEQ ID NO: 75682 - DNA, 15 bp, Homo sapiens
ggtcacacccactca

SEQ ID NO: 75683 - DNA, 15 bp, Homo sapiens
cggtcacacccactc

SEQ ID NO: 75684 - DNA, 15 bp, Homo sapiens
gcggtcacacccact

SEQ ID NO: 75685 - DNA, 15 bp, Homo sapiens
ggcggtcacacccac

SEQ ID NO: 75686 - DNA, 15 bp, Homo sapiens
tggcggtcacaccca

SEQ ID NO: 75687 - DNA, 15 bp, Homo sapiens
ctggcggtcacaccc

SEQ ID NO: 75688 - DNA, 15 bp, Homo sapiens
actggcggtcacacc

SEQ ID NO: 75689 - DNA, 15 bp, Homo sapiens
aactggcggtcacac

SEQ ID NO: 75690 - DNA, 15 bp, Homo sapiens
aaactggcggtcaca

SEQ ID NO: 75691 - DNA, 15 bp, Homo sapiens
taaactggcggtcac

SEQ ID NO: 75692 - DNA, 15 bp, Homo sapiens
gtaaactggcggtca

SEQ ID NO: 75693 - DNA, 15 bp, Homo sapiens
agtaaactggcggtc

SEQ ID NO: 75694 - DNA, 15 bp, Homo sapiens
gagtaaactggcggt

SEQ ID NO: 75695 - DNA, 15 bp, Homo sapiens
agagtaaactggcgg

SEQ ID NO: 75696 - DNA, 15 bp, Homo sapiens
cagagtaaactggcg

SEQ ID NO: 75697 - DNA, 15 bp, Homo sapiens
ccagagtaaactggc

SEQ ID NO: 75698 - DNA, 15 bp, Homo sapiens
tccagagtaaactgg

SEQ ID NO: 75699 - DNA, 15 bp, Homo sapiens
ctccagagtaaactg

SEQ ID NO: 75700 - DNA, 15 bp, Homo sapiens
tctccagagtaaact

SEQ ID NO: 75701 - DNA, 15 bp, Homo sapiens
ttctccagagtaaac

SEQ ID NO: 75702 - DNA, 15 bp, Homo sapiens
tttctccagagtaaa

SEQ ID NO: 75703 - DNA, 15 bp, Homo sapiens
ttttctccagagtaa

SEQ ID NO: 75704 - DNA, 15 bp, Homo sapiens
gttttctccagagta

SEQ ID NO: 75705 - DNA, 15 bp, Homo sapiens
agttttctccagagt

SEQ ID NO: 75706 - DNA, 15 bp, Homo sapiens
cagttttctccagag

SEQ ID NO: 75707 - DNA, 15 bp, Homo sapiens
tcagttttctccaga

SEQ ID NO: 75708 - DNA, 15 bp, Homo sapiens
ctcagttttctccag

SEQ ID NO: 75709 - DNA, 15 bp, Homo sapiens
tctcagttttctcca

SEQ ID NO: 75710 - DNA, 15 bp, Homo sapiens
gtctcagttttctcc

SEQ ID NO: 75711 - DNA, 15 bp, Homo sapiens
tgtctcagttttctc

SEQ ID NO: 75712 - DNA, 15 bp, Homo sapiens
ttgtctcagttttct

SEQ ID NO: 75713 - DNA, 15 bp, Homo sapiens
tttgtctcagttttc

SEQ ID NO: 75714 - DNA, 15 bp, Homo sapiens
ctttgtctcagtttt

SEQ ID NO: 75715 - DNA, 15 bp, Homo sapiens
tctttgtctcagttt

SEQ ID NO: 75716 - DNA, 15 bp, Homo sapiens
ctctttgtctcagtt

SEQ ID NO: 75717 - DNA, 15 bp, Homo sapiens
actctttgtctcagt

SEQ ID NO: 75718 - DNA, 15 bp, Homo sapiens
gactctttgtctcag

SEQ ID NO: 75719 - DNA, 15 bp, Homo sapiens
agactctttgtctca

SEQ ID NO: 75720 - DNA, 15 bp, Homo sapiens
tagactctttgtctc

SEQ ID NO: 75721 - DNA, 15 bp, Homo sapiens
ttagactctttgtct

SEQ ID NO: 75722 - DNA, 15 bp, Homo sapiens
tttagactctttgtc

SEQ ID NO: 75723 - DNA, 15 bp, Homo sapiens
atttagactctttgt

SEQ ID NO: 75724 - DNA, 15 bp, Homo sapiens
aatttagactctttg

SEQ ID NO: 75725 - DNA, 15 bp, Homo sapiens
caatttagactcttt

SEQ ID NO: 75726 - DNA, 15 bp, Homo sapiens
ccaatttagactctt

SEQ ID NO: 75727 - DNA, 15 bp, Homo sapiens
cccaatttagactct

SEQ ID NO: 75728 - DNA, 15 bp, Homo sapiens
gcccaatttagactc

SEQ ID NO: 75729 - DNA, 15 bp, Homo sapiens
tgcccaatttagact

SEQ ID NO: 75730 - DNA, 15 bp, Homo sapiens
ctgcccaatttagac

SEQ ID NO: 75731 - DNA, 15 bp, Homo sapiens
cctgcccaatttaga

SEQ ID NO: 75732 - DNA, 15 bp, Homo sapiens
tcctgcccaatttag

SEQ ID NO: 75733 - DNA, 15 bp, Homo sapiens
atcctgcccaattta

SEQ ID NO: 75734 - DNA, 15 bp, Homo sapiens
gatcctgcccaattt

SEQ ID NO: 75735 - DNA, 15 bp, Homo sapiens
agatcctgcccaatt

SEQ ID NO: 75736 - DNA, 15 bp, Homo sapiens
aagatcctgcccaat

SEQ ID NO: 75737 - DNA, 15 bp, Homo sapiens
caagatcctgcccaa

SEQ ID NO: 75738 - DNA, 15 bp, Homo sapiens
tcaagatcctgccca

SEQ ID NO: 75739 - DNA, 15 bp, Homo sapiens
ttcaagatcctgccc

SEQ ID NO: 75740 - DNA, 15 bp, Homo sapiens
attcaagatcctgcc

SEQ ID NO: 75741 - DNA, 15 bp, Homo sapiens
gattcaagatcctgc

SEQ ID NO: 75742 - DNA, 15 bp, Homo sapiens
agattcaagatcctg

SEQ ID NO: 75743 - DNA, 15 bp, Homo sapiens
tagattcaagatcct

SEQ ID NO: 75744 - DNA, 15 bp, Homo sapiens
ttagattcaagatcc

SEQ ID NO: 75745 - DNA, 15 bp, Homo sapiens
attagattcaagatc

SEQ ID NO: 75746 - DNA, 15 bp, Homo sapiens
cattagattcaagat

SEQ ID NO: 75747 - DNA, 15 bp, Homo sapiens
tcattagattcaaga

SEQ ID NO: 75748 - DNA, 15 bp, Homo sapiens
gtcattagattcaag

SEQ ID NO: 75749 - DNA, 15 bp, Homo sapiens
agtcattagattcaa

SEQ ID NO: 75750 - DNA, 15 bp, Homo sapiens
aagtcattagattca

SEQ ID NO: 75751 - DNA, 15 bp, Homo sapiens
caagtcattagattc

SEQ ID NO: 75752 - DNA, 15 bp, Homo sapiens
acaagtcattagatt

SEQ ID NO: 75753 - DNA, 15 bp, Homo sapiens
aacaagtcattagat

SEQ ID NO: 75754 - DNA, 15 bp, Homo sapiens
aaacaagtcattaga

SEQ ID NO: 75755 - DNA, 15 bp, Homo sapiens
taaacaagtcattag

SEQ ID NO: 75756 - DNA, 15 bp, Homo sapiens
gtaaacaagtcatta

SEQ ID NO: 75757 - DNA, 15 bp, Homo sapiens
tgtaaacaagtcatt

SEQ ID NO: 75758 - DNA, 15 bp, Homo sapiens
ctgtaaacaagtcat

SEQ ID NO: 75759 - DNA, 15 bp, Homo sapiens
tctgtaaacaagtca

SEQ ID NO: 75760 - DNA, 15 bp, Homo sapiens
gtctgtaaacaagtc

SEQ ID NO: 75761 - DNA, 15 bp, Homo sapiens
ggtctgtaaacaagt

SEQ ID NO: 75762 - DNA, 15 bp, Homo sapiens
gggtctgtaaacaag

SEQ ID NO: 75763 - DNA, 15 bp, Homo sapiens
agggtctgtaaacaa

SEQ ID NO: 75764 - DNA, 15 bp, Homo sapiens
cagggtctgtaaaca

SEQ ID NO: 75765 - DNA, 15 bp, Homo sapiens
acagggtctgtaaac

SEQ ID NO: 75766 - DNA, 15 bp, Homo sapiens
tacagggtctgtaaa

SEQ ID NO: 75767 - DNA, 15 bp, Homo sapiens
gtacagggtctgtaa

SEQ ID NO: 75768 - DNA, 15 bp, Homo sapiens
agtacagggtctgta

SEQ ID NO: 75769 - DNA, 15 bp, Homo sapiens
aagtacagggtctgt

SEQ ID NO: 75770 - DNA, 15 bp, Homo sapiens
aaagtacagggtctg

SEQ ID NO: 75771 - DNA, 15 bp, Homo sapiens
aaaagtacagggtct

SEQ ID NO: 75772 - DNA, 15 bp, Homo sapiens
aaaaagtacagggtc

SEQ ID NO: 75773 - DNA, 15 bp, Homo sapiens
gaaaaagtacagggt

SEQ ID NO: 75774 - DNA, 15 bp, Homo sapiens
ggaaaaagtacaggg

SEQ ID NO: 75775 - DNA, 15 bp, Homo sapiens
tggaaaaagtacagg

SEQ ID NO: 75776 - DNA, 15 bp, Homo sapiens
ctggaaaaagtacag

SEQ ID NO: 75777 - DNA, 15 bp, Homo sapiens
actggaaaaagtaca

SEQ ID NO: 75778 - DNA, 15 bp, Homo sapiens
cactggaaaaagtac

SEQ ID NO: 75779 - DNA, 15 bp, Homo sapiens
gcactggaaaaagta

SEQ ID NO: 75780 - DNA, 15 bp, Homo sapiens
tgcactggaaaaagt

SEQ ID NO: 75781 - DNA, 15 bp, Homo sapiens
ctgcactggaaaaag

SEQ ID NO: 75782 - DNA, 15 bp, Homo sapiens
cctgcactggaaaaa

SEQ ID NO: 75783 - DNA, 15 bp, Homo sapiens
ccctgcactggaaaa

SEQ ID NO: 75784 - DNA, 15 bp, Homo sapiens
tccctgcactggaaa

SEQ ID NO: 75785 - DNA, 15 bp, Homo sapiens
ctccctgcactggaa

SEQ ID NO: 75786 - DNA, 15 bp, Homo sapiens
cctccctgcactgga

SEQ ID NO: 75787 - DNA, 15 bp, Homo sapiens
tcctccctgcactgg

SEQ ID NO: 75788 - DNA, 15 bp, Homo sapiens
ctcctccctgcactg

SEQ ID NO: 75789 - DNA, 15 bp, Homo sapiens
cctcctccctgcact

SEQ ID NO: 75790 - DNA, 15 bp, Homo sapiens
tcctcctccctgcac

SEQ ID NO: 75791 - DNA, 15 bp, Homo sapiens
ttcctcctccctgca

SEQ ID NO: 75792 - DNA, 15 bp, Homo sapiens
cttcctcctccctgc

SEQ ID NO: 75793 - DNA, 15 bp, Homo sapiens
tcttcctcctccctg

SEQ ID NO: 75794 - DNA, 15 bp, Homo sapiens
ttcttcctcctccct

SEQ ID NO: 75795 - DNA, 15 bp, Homo sapiens
cttcttcctcctccc

SEQ ID NO: 75796 - DNA, 15 bp, Homo sapiens
ccttcttcctcctcc

SEQ ID NO: 75797 - DNA, 15 bp, Homo sapiens
gccttcttcctcctc

SEQ ID NO: 75798 - DNA, 15 bp, Homo sapiens
tgccttcttcctcct

SEQ ID NO: 75799 - DNA, 15 bp, Homo sapiens
ctgccttcttcctcc

SEQ ID NO: 75800 - DNA, 15 bp, Homo sapiens
cctgccttcttcctc

SEQ ID NO: 75801 - DNA, 15 bp, Homo sapiens
ccctgccttcttcct

SEQ ID NO: 75802 - DNA, 15 bp, Homo sapiens
gccctgccttcttcc

SEQ ID NO: 75803 - DNA, 15 bp, Homo sapiens
tgccctgccttcttc

SEQ ID NO: 75804 - DNA, 15 bp, Homo sapiens
atgccctgccttctt

SEQ ID NO: 75805 - DNA, 15 bp, Homo sapiens
catgccctgccttct

SEQ ID NO: 75806 - DNA, 15 bp, Homo sapiens
gcatgccctgccttc

SEQ ID NO: 75807 - DNA, 15 bp, Homo sapiens
agcatgccctgcctt

SEQ ID NO: 75808 - DNA, 15 bp, Homo sapiens
gagcatgccctgcct

SEQ ID NO: 75809 - DNA, 15 bp, Homo sapiens
cgagcatgccctgcc

SEQ ID NO: 75810 - DNA, 15 bp, Homo sapiens
acgagcatgccctgc

SEQ ID NO: 75811 - DNA, 15 bp, Homo sapiens
gacgagcatgccctg

SEQ ID NO: 75812 - DNA, 15 bp, Homo sapiens
tgacgagcatgccct

SEQ ID NO: 75813 - DNA, 15 bp, Homo sapiens
gtgacgagcatgccc

SEQ ID NO: 75814 - DNA, 15 bp, Homo sapiens
agtgacgagcatgcc

SEQ ID NO: 75815 - DNA, 15 bp, Homo sapiens
cagtgacgagcatgc

SEQ ID NO: 75816 - DNA, 15 bp, Homo sapiens
acagtgacgagcatg

SEQ ID NO: 75817 - DNA, 15 bp, Homo sapiens
cacagtgacgagcat

SEQ ID NO: 75818 - DNA, 15 bp, Homo sapiens
ccacagtgacgagca

SEQ ID NO: 75819 - DNA, 15 bp, Homo sapiens
cccacagtgacgagc

SEQ ID NO: 75820 - DNA, 15 bp, Homo sapiens
gcccacagtgacgag

SEQ ID NO: 75821 - DNA, 15 bp, Homo sapiens
tgcccacagtgacga

SEQ ID NO: 75822 - DNA, 15 bp, Homo sapiens
atgcccacagtgacg

SEQ ID NO: 75823 - DNA, 15 bp, Homo sapiens
catgcccacagtgac

SEQ ID NO: 75824 - DNA, 15 bp, Homo sapiens
ccatgcccacagtga

SEQ ID NO: 75825 - DNA, 15 bp, Homo sapiens
cccatgcccacagtg

SEQ ID NO: 75826 - DNA, 15 bp, Homo sapiens
gcccatgcccacagt

SEQ ID NO: 75827 - DNA, 15 bp, Homo sapiens
tgcccatgcccacag

SEQ ID NO: 75828 - DNA, 15 bp, Homo sapiens
gtgcccatgcccaca

SEQ ID NO: 75829 - DNA, 15 bp, Homo sapiens
tgtgcccatgcccac

SEQ ID NO: 75830 - DNA, 15 bp, Homo sapiens
atgtgcccatgccca

SEQ ID NO: 75831 - DNA, 15 bp, Homo sapiens
aatgtgcccatgccc

SEQ ID NO: 75832 - DNA, 15 bp, Homo sapiens
caatgtgcccatgcc

SEQ ID NO: 75833 - DNA, 15 bp, Homo sapiens
gcaatgtgcccatgc

SEQ ID NO: 75834 - DNA, 15 bp, Homo sapiens
agcaatgtgcccatg

SEQ ID NO: 75835 - DNA, 15 bp, Homo sapiens
cagcaatgtgcccat

SEQ ID NO: 75836 - DNA, 15 bp, Homo sapiens
acagcaatgtgccca

SEQ ID NO: 75837 - DNA, 15 bp, Homo sapiens
aacagcaatgtgccc

SEQ ID NO: 75838 - DNA, 15 bp, Homo sapiens
aaacagcaatgtgcc

SEQ ID NO: 75839 - DNA, 15 bp, Homo sapiens
aaaacagcaatgtgc

SEQ ID NO: 75840 - DNA, 15 bp, Homo sapiens
gaaaacagcaatgtg

SEQ ID NO: 75841 - DNA, 15 bp, Homo sapiens
tgaaaacagcaatgt

SEQ ID NO: 75842 - DNA, 15 bp, Homo sapiens
atgaaaacagcaatg

SEQ ID NO: 75843 - DNA, 15 bp, Homo sapiens
gatgaaaacagcaat

SEQ ID NO: 75844 - DNA, 15 bp, Homo sapiens
ggatgaaaacagcaa

SEQ ID NO: 75845 - DNA, 15 bp, Homo sapiens
aggatgaaaacagca

SEQ ID NO: 75846 - DNA, 15 bp, Homo sapiens
taggatgaaaacagc

SEQ ID NO: 75847 - DNA, 15 bp, Homo sapiens
ttaggatgaaaacag

SEQ ID NO: 75848 - DNA, 15 bp, Homo sapiens
cttaggatgaaaaca

SEQ ID NO: 75849 - DNA, 15 bp, Homo sapiens
ccttaggatgaaaac

SEQ ID NO: 75850 - DNA, 15 bp, Homo sapiens
tccttaggatgaaaa

SEQ ID NO: 75851 - DNA, 15 bp, Homo sapiens
ctccttaggatgaaa

SEQ ID NO: 75852 - DNA, 15 bp, Homo sapiens
cctccttaggatgaa

SEQ ID NO: 75853 - DNA, 15 bp, Homo sapiens
acctccttaggatga

SEQ ID NO: 75854 - DNA, 15 bp, Homo sapiens
tacctccttaggatg

SEQ ID NO: 75855 - DNA, 15 bp, Homo sapiens
ctacctccttaggat

SEQ ID NO: 75856 - DNA, 15 bp, Homo sapiens
cctacctccttagga

SEQ ID NO: 75857 - DNA, 15 bp, Homo sapiens
tcctacctccttagg

SEQ ID NO: 75858 - DNA, 15 bp, Homo sapiens
gtcctacctccttag

SEQ ID NO: 75859 - DNA, 15 bp, Homo sapiens
tgtcctacctcctta

SEQ ID NO: 75860 - DNA, 15 bp, Homo sapiens
ctgtcctacctcctt

SEQ ID NO: 75861 - DNA, 15 bp, Homo sapiens
gctgtcctacctcct

SEQ ID NO: 75862 - DNA, 15 bp, Homo sapiens
agctgtcctacctcc

SEQ ID NO: 75863 - DNA, 15 bp, Homo sapiens
aagctgtcctacctc

SEQ ID NO: 75864 - DNA, 15 bp, Homo sapiens
gaagctgtcctacct

SEQ ID NO: 75865 - DNA, 15 bp, Homo sapiens
tgaagctgtcctacc

SEQ ID NO: 75866 - DNA, 15 bp, Homo sapiens
ctgaagctgtcctac

SEQ ID NO: 75867 - DNA, 15 bp, Homo sapiens
tctgaagctgtccta

SEQ ID NO: 75868 - DNA, 15 bp, Homo sapiens
ttctgaagctgtcct

SEQ ID NO: 75869 - DNA, 15 bp, Homo sapiens
tttctgaagctgtcc

SEQ ID NO: 75870 - DNA, 15 bp, Homo sapiens
ctttctgaagctgtc

SEQ ID NO: 75871 - DNA, 15 bp, Homo sapiens
gctttctgaagctgt

SEQ ID NO: 75872 - DNA, 15 bp, Homo sapiens
tgctttctgaagctg

SEQ ID NO: 75873 - DNA, 15 bp, Homo sapiens
ctgctttctgaagct

SEQ ID NO: 75874 - DNA, 15 bp, Homo sapiens
gctgctttctgaagc

SEQ ID NO: 75875 - DNA, 15 bp, Homo sapiens
tgctgctttctgaag

SEQ ID NO: 75876 - DNA, 15 bp, Homo sapiens
ctgctgctttctgaa

SEQ ID NO: 75877 - DNA, 15 bp, Homo sapiens
cctgctgctttctga

SEQ ID NO: 75878 - DNA, 15 bp, Homo sapiens
ccctgctgctttctg

SEQ ID NO: 75879 - DNA, 15 bp, Homo sapiens
gccctgctgctttct

SEQ ID NO: 75880 - DNA, 15 bp, Homo sapiens
tgccctgctgctttc

SEQ ID NO: 75881 - DNA, 15 bp, Homo sapiens
atgccctgctgcttt

SEQ ID NO: 75882 - DNA, 15 bp, Homo sapiens
gatgccctgctgctt

SEQ ID NO: 75883 - DNA, 15 bp, Homo sapiens
agatgccctgctgct

SEQ ID NO: 75884 - DNA, 15 bp, Homo sapiens
cagatgccctgctgc

SEQ ID NO: 75885 - DNA, 15 bp, Homo sapiens
gcagatgccctgctg

SEQ ID NO: 75886 - DNA, 15 bp, Homo sapiens
ggcagatgccctgct

SEQ ID NO: 75887 - DNA, 15 bp, Homo sapiens
aggcagatgccctgc

SEQ ID NO: 75888 - DNA, 15 bp, Homo sapiens
caggcagatgccctg

SEQ ID NO: 75889 - DNA, 15 bp, Homo sapiens
ccaggcagatgccct

SEQ ID NO: 75890 - DNA, 15 bp, Homo sapiens
gccaggcagatgccc

SEQ ID NO: 75891 - DNA, 15 bp, Homo sapiens
tgccaggcagatgcc

SEQ ID NO: 75892 - DNA, 15 bp, Homo sapiens
ctgccaggcagatgc

SEQ ID NO: 75893 - DNA, 15 bp, Homo sapiens
gctgccaggcagatg

SEQ ID NO: 75894 - DNA, 15 bp, Homo sapiens
ggctgccaggcagat

SEQ ID NO: 75895 - DNA, 15 bp, Homo sapiens
tggctgccaggcaga

SEQ ID NO: 75896 - DNA, 15 bp, Homo sapiens
ctggctgccaggcag

SEQ ID NO: 75897 - DNA, 15 bp, Homo sapiens
gctggctgccaggca

SEQ ID NO: 75898 - DNA, 15 bp, Homo sapiens
tgctggctgccaggc

SEQ ID NO: 75899 - DNA, 15 bp, Homo sapiens
ctgctggctgccagg

SEQ ID NO: 75900 - DNA, 15 bp, Homo sapiens
cctgctggctgccag

SEQ ID NO: 75901 - DNA, 15 bp, Homo sapiens
gcctgctggctgcca

SEQ ID NO: 75902 - DNA, 15 bp, Homo sapiens
tgcctgctggctgcc

SEQ ID NO: 75903 - DNA, 15 bp, Homo sapiens
ttgcctgctggctgc

SEQ ID NO: 75904 - DNA, 15 bp, Homo sapiens
tttgcctgctggctg

SEQ ID NO: 75905 - DNA, 15 bp, Homo sapiens
ctttgcctgctggct

SEQ ID NO: 75906 - DNA, 15 bp, Homo sapiens
actttgcctgctggc

SEQ ID NO: 75907 - DNA, 15 bp, Homo sapiens
cactttgcctgctgg

SEQ ID NO: 75908 - DNA, 15 bp, Homo sapiens
ccactttgcctgctg

SEQ ID NO: 75909 - DNA, 15 bp, Homo sapiens
gccactttgcctgct

SEQ ID NO: 75910 - DNA, 15 bp, Homo sapiens
tgccactttgcctgc

SEQ ID NO: 75911 - DNA, 15 bp, Homo sapiens
atgccactttgcctg

SEQ ID NO: 75912 - DNA, 15 bp, Homo sapiens
catgccactttgcct

SEQ ID NO: 75913 - DNA, 15 bp, Homo sapiens
gcatgccactttgcc

SEQ ID NO: 75914 - DNA, 15 bp, Homo sapiens
agcatgccactttgc

SEQ ID NO: 75915 - DNA, 15 bp, Homo sapiens
cagcatgccactttg

SEQ ID NO: 75916 - DNA, 15 bp, Homo sapiens
acagcatgccacttt

SEQ ID NO: 75917 - DNA, 15 bp, Homo sapiens
cacagcatgccactt

SEQ ID NO: 75918 - DNA, 15 bp, Homo sapiens
acacagcatgccact

SEQ ID NO: 75919 - DNA, 15 bp, Homo sapiens
tacacagcatgccac

SEQ ID NO: 75920 - DNA, 15 bp, Homo sapiens
ttacacagcatgcca

SEQ ID NO: 75921 - DNA, 15 bp, Homo sapiens
attacacagcatgcc

SEQ ID NO: 75922 - DNA, 15 bp, Homo sapiens
aattacacagcatgc

SEQ ID NO: 75923 - DNA, 15 bp, Homo sapiens
aaattacacagcatg

SEQ ID NO: 75924 - DNA, 15 bp, Homo sapiens
aaaattacacagcat

SEQ ID NO: 75925 - DNA, 15 bp, Homo sapiens
gaaaattacacagca

SEQ ID NO: 75926 - DNA, 15 bp, Homo sapiens
ggaaaattacacagc

SEQ ID NO: 75927 - DNA, 15 bp, Homo sapiens
tggaaaattacacag

SEQ ID NO: 75928 - DNA, 15 bp, Homo sapiens
ttggaaaattacaca

SEQ ID NO: 75929 - DNA, 15 bp, Homo sapiens
cttggaaaattacac

SEQ ID NO: 75930 - DNA, 15 bp, Homo sapiens
ccttggaaaattaca

SEQ ID NO: 75931 - DNA, 15 bp, Homo sapiens
accttggaaaattac

SEQ ID NO: 75932 - DNA, 15 bp, Homo sapiens
taccttggaaaatta

SEQ ID NO: 75933 - DNA, 15 bp, Homo sapiens
ctaccttggaaaatt

SEQ ID NO: 75934 - DNA, 15 bp, Homo sapiens
cctaccttggaaaat

SEQ ID NO: 75935 - DNA, 15 bp, Homo sapiens
ccctaccttggaaaa

SEQ ID NO: 75936 - DNA, 15 bp, Homo sapiens
tccctaccttggaaa

SEQ ID NO: 75937 - DNA, 15 bp, Homo sapiens
ctccctaccttggaa

SEQ ID NO: 75938 - DNA, 15 bp, Homo sapiens
cctccctaccttgga

SEQ ID NO: 75939 - DNA, 15 bp, Homo sapiens
tcctccctaccttgg

SEQ ID NO: 75940 - DNA, 15 bp, Homo sapiens
ttcctccctaccttg

SEQ ID NO: 75941 - DNA, 15 bp, Homo sapiens
cttcctccctacctt

SEQ ID NO: 75942 - DNA, 15 bp, Homo sapiens
gcttcctccctacct

SEQ ID NO: 75943 - DNA, 15 bp, Homo sapiens
tgcttcctccctacc

SEQ ID NO: 75944 - DNA, 15 bp, Homo sapiens
ctgcttcctccctac

SEQ ID NO: 75945 - DNA, 15 bp, Homo sapiens
actgcttcctcccta

SEQ ID NO: 75946 - DNA, 15 bp, Homo sapiens
cactgcttcctccct

SEQ ID NO: 75947 - DNA, 15 bp, Homo sapiens
ccactgcttcctccc

SEQ ID NO: 75948 - DNA, 15 bp, Homo sapiens
gccactgcttcctcc

SEQ ID NO: 75949 - DNA, 15 bp, Homo sapiens
cgccactgcttcctc

SEQ ID NO: 75950 - DNA, 15 bp, Homo sapiens
ccgccactgcttcct

SEQ ID NO: 75951 - DNA, 15 bp, Homo sapiens
gccgccactgcttcc

SEQ ID NO: 75952 - DNA, 15 bp, Homo sapiens
agccgccactgcttc

SEQ ID NO: 75953 - DNA, 15 bp, Homo sapiens
aagccgccactgctt

SEQ ID NO: 75954 - DNA, 15 bp, Homo sapiens
gaagccgccactgct

SEQ ID NO: 75955 - DNA, 15 bp, Homo sapiens
agaagccgccactgc

SEQ ID NO: 75956 - DNA, 15 bp, Homo sapiens
cagaagccgccactg

SEQ ID NO: 75957 - DNA, 15 bp, Homo sapiens
gcagaagccgccact

SEQ ID NO: 75958 - DNA, 15 bp, Homo sapiens
agcagaagccgccac

SEQ ID NO: 75959 - DNA, 15 bp, Homo sapiens
aagcagaagccgcca

SEQ ID NO: 75960 - DNA, 15 bp, Homo sapiens
caagcagaagccgcc

SEQ ID NO: 75961 - DNA, 15 bp, Homo sapiens
ccaagcagaagccgc

SEQ ID NO: 75962 - DNA, 15 bp, Homo sapiens
accaagcagaagccg

SEQ ID NO: 75963 - DNA, 15 bp, Homo sapiens
gaccaagcagaagcc

SEQ ID NO: 75964 - DNA, 15 bp, Homo sapiens
ggaccaagcagaagc

SEQ ID NO: 75965 - DNA, 15 bp, Homo sapiens
aggaccaagcagaag

SEQ ID NO: 75966 - DNA, 15 bp, Homo sapiens
taggaccaagcagaa

SEQ ID NO: 75967 - DNA, 15 bp, Homo sapiens
gtaggaccaagcaga

SEQ ID NO: 75968 - DNA, 15 bp, Homo sapiens
ggtaggaccaagcag

SEQ ID NO: 75969 - DNA, 15 bp, Homo sapiens
cggtaggaccaagca

SEQ ID NO: 75970 - DNA, 15 bp, Homo sapiens
ccggtaggaccaagc

SEQ ID NO: 75971 - DNA, 15 bp, Homo sapiens
gccggtaggaccaag

SEQ ID NO: 75972 - DNA, 15 bp, Homo sapiens
agccggtaggaccaa

SEQ ID NO: 75973 - DNA, 15 bp, Homo sapiens
aagccggtaggacca

SEQ ID NO: 75974 - DNA, 15 bp, Homo sapiens
caagccggtaggacc

SEQ ID NO: 75975 - DNA, 15 bp, Homo sapiens
ccaagccggtaggac

SEQ ID NO: 75976 - DNA, 15 bp, Homo sapiens
gccaagccggtagga

SEQ ID NO: 75977 - DNA, 15 bp, Homo sapiens
agccaagccggtagg

SEQ ID NO: 75978 - DNA, 15 bp, Homo sapiens
aagccaagccggtag

SEQ ID NO: 75979 - DNA, 15 bp, Homo sapiens
gaagccaagccggta

SEQ ID NO: 75980 - DNA, 15 bp, Homo sapiens
ggaagccaagccggt

SEQ ID NO: 75981 - DNA, 15 bp, Homo sapiens
cggaagccaagccgg

SEQ ID NO: 75982 - DNA, 15 bp, Homo sapiens
ccggaagccaagccg

SEQ ID NO: 75983 - DNA, 15 bp, Homo sapiens
cccggaagccaagcc

SEQ ID NO: 75984 - DNA, 15 bp, Homo sapiens
ccccggaagccaagc

SEQ ID NO: 75985 - DNA, 15 bp, Homo sapiens
gccccggaagccaag

SEQ ID NO: 75986 - DNA, 15 bp, Homo sapiens
tgccccggaagccaa

SEQ ID NO: 75987 - DNA, 15 bp, Homo sapiens
gtgccccggaagcca

SEQ ID NO: 75988 - DNA, 15 bp, Homo sapiens
tgtgccccggaagcc

SEQ ID NO: 75989 - DNA, 15 bp, Homo sapiens
gtgtgccccggaagc

SEQ ID NO: 75990 - DNA, 15 bp, Homo sapiens
cgtgtgccccggaag

SEQ ID NO: 75991 - DNA, 15 bp, Homo sapiens
gcgtgtgccccggaa

SEQ ID NO: 75992 - DNA, 15 bp, Homo sapiens
agcgtgtgccccgga

SEQ ID NO: 75993 - DNA, 15 bp, Homo sapiens
cagcgtgtgccccgg

SEQ ID NO: 75994 - DNA, 15 bp, Homo sapiens
gcagcgtgtgccccg

SEQ ID NO: 75995 - DNA, 15 bp, Homo sapiens
agcagcgtgtgcccc

SEQ ID NO: 75996 - DNA, 15 bp, Homo sapiens
gagcagcgtgtgccc

SEQ ID NO: 75997 - DNA, 15 bp, Homo sapiens
agagcagcgtgtgcc

SEQ ID NO: 75998 - DNA, 15 bp, Homo sapiens
cagagcagcgtgtgc

SEQ ID NO: 75999 - DNA, 15 bp, Homo sapiens
ccagagcagcgtgtg

SEQ ID NO: 76000 - DNA, 15 bp, Homo sapiens
cccagagcagcgtgt

SEQ ID NO: 76001 - DNA, 15 bp, Homo sapiens
ccccagagcagcgtg

SEQ ID NO: 76002 - DNA, 15 bp, Homo sapiens
tccccagagcagcgt

SEQ ID NO: 76003 - DNA, 15 bp, Homo sapiens
ctccccagagcagcg

SEQ ID NO: 76004 - DNA, 15 bp, Homo sapiens
tctccccagagcagc

SEQ ID NO: 76005 - DNA, 15 bp, Homo sapiens
ttctccccagagcag

SEQ ID NO: 76006 - DNA, 15 bp, Homo sapiens
attctccccagagca

SEQ ID NO: 76007 - DNA, 15 bp, Homo sapiens
cattctccccagagc

SEQ ID NO: 76008 - DNA, 15 bp, Homo sapiens
gcattctccccagag

SEQ ID NO: 76009 - DNA, 15 bp, Homo sapiens
ggcattctccccaga

SEQ ID NO: 76010 - DNA, 15 bp, Homo sapiens
aggcattctccccag

SEQ ID NO: 76011 - DNA, 15 bp, Homo sapiens
caggcattctcccca

SEQ ID NO: 76012 - DNA, 15 bp, Homo sapiens
tcaggcattctcccc

SEQ ID NO: 76013 - DNA, 15 bp, Homo sapiens
gtcaggcattctccc

SEQ ID NO: 76014 - DNA, 15 bp, Homo sapiens
ggtcaggcattctcc

SEQ ID NO: 76015 - DNA, 15 bp, Homo sapiens
gggtcaggcattctc

SEQ ID NO: 76016 - DNA, 15 bp, Homo sapiens
agggtcaggcattct

SEQ ID NO: 76017 - DNA, 15 bp, Homo sapiens
cagggtcaggcattc

SEQ ID NO: 76018 - DNA, 15 bp, Homo sapiens
gcagggtcaggcatt

SEQ ID NO: 76019 - DNA, 15 bp, Homo sapiens
ggcagggtcaggcat

SEQ ID NO: 76020 - DNA, 15 bp, Homo sapiens
tggcagggtcaggca

SEQ ID NO: 76021 - DNA, 15 bp, Homo sapiens
gtggcagggtcaggc

SEQ ID NO: 76022 - DNA, 15 bp, Homo sapiens
tgtggcagggtcagg

SEQ ID NO: 76023 - DNA, 15 bp, Homo sapiens
atgtggcagggtcag

SEQ ID NO: 76024 - DNA, 15 bp, Homo sapiens
catgtggcagggtca

SEQ ID NO: 76025 - DNA, 15 bp, Homo sapiens
tcatgtggcagggtc

SEQ ID NO: 76026 - DNA, 15 bp, Homo sapiens
ttcatgtggcagggt

SEQ ID NO: 76027 - DNA, 15 bp, Homo sapiens
tttcatgtggcaggg

SEQ ID NO: 76028 - DNA, 15 bp, Homo sapiens
ctttcatgtggcagg

SEQ ID NO: 76029 - DNA, 15 bp, Homo sapiens
cctttcatgtggcag

SEQ ID NO: 76030 - DNA, 15 bp, Homo sapiens
gcctttcatgtggca

SEQ ID NO: 76031 - DNA, 15 bp, Homo sapiens
ggcctttcatgtggc

SEQ ID NO: 76032 - DNA, 15 bp, Homo sapiens
aggcctttcatgtgg

SEQ ID NO: 76033 - DNA, 15 bp, Homo sapiens
aaggcctttcatgtg

SEQ ID NO: 76034 - DNA, 15 bp, Homo sapiens
caaggcctttcatgt

SEQ ID NO: 76035 - DNA, 15 bp, Homo sapiens
gcaaggcctttcatg

SEQ ID NO: 76036 - DNA, 15 bp, Homo sapiens
agcaaggcctttcat

SEQ ID NO: 76037 - DNA, 15 bp, Homo sapiens
aagcaaggcctttca

SEQ ID NO: 76038 - DNA, 15 bp, Homo sapiens
gaagcaaggcctttc

SEQ ID NO: 76039 - DNA, 15 bp, Homo sapiens
ggaagcaaggccttt

SEQ ID NO: 76040 - DNA, 15 bp, Homo sapiens
aggaagcaaggcctt

SEQ ID NO: 76041 - DNA, 15 bp, Homo sapiens
gaggaagcaaggcct

SEQ ID NO: 76042 - DNA, 15 bp, Homo sapiens
ggaggaagcaaggcc

SEQ ID NO: 76043 - DNA, 15 bp, Homo sapiens
gggaggaagcaaggc

SEQ ID NO: 76044 - DNA, 15 bp, Homo sapiens
tgggaggaagcaagg

SEQ ID NO: 76045 - DNA, 15 bp, Homo sapiens
gtgggaggaagcaag

SEQ ID NO: 76046 - DNA, 15 bp, Homo sapiens
agtgggaggaagcaa

SEQ ID NO: 76047 - DNA, 15 bp, Homo sapiens
aagtgggaggaagca

SEQ ID NO: 76048 - DNA, 15 bp, Homo sapiens
gaagtgggaggaagc

SEQ ID NO: 76049 - DNA, 15 bp, Homo sapiens
tgaagtgggaggaag

SEQ ID NO: 76050 - DNA, 15 bp, Homo sapiens
ctgaagtgggaggaa

SEQ ID NO: 76051 - DNA, 15 bp, Homo sapiens
gctgaagtgggagga

SEQ ID NO: 76052 - DNA, 15 bp, Homo sapiens
agctgaagtgggagg

SEQ ID NO: 76053 - DNA, 15 bp, Homo sapiens
aagctgaagtgggag

SEQ ID NO: 76054 - DNA, 15 bp, Homo sapiens
gaagctgaagtggga

SEQ ID NO: 76055 - DNA, 15 bp, Homo sapiens
tgaagctgaagtggg

SEQ ID NO: 76056 - DNA, 15 bp, Homo sapiens
ttgaagctgaagtgg

SEQ ID NO: 76057 - DNA, 15 bp, Homo sapiens
cttgaagctgaagtg

SEQ ID NO: 76058 - DNA, 15 bp, Homo sapiens
gcttgaagctgaagt

SEQ ID NO: 76059 - DNA, 15 bp, Homo sapiens
cgcttgaagctgaag

SEQ ID NO: 76060 - DNA, 15 bp, Homo sapiens
tcgcttgaagctgaa

SEQ ID NO: 76061 - DNA, 15 bp, Homo sapiens
atcgcttgaagctga

SEQ ID NO: 76062 - DNA, 15 bp, Homo sapiens
catcgcttgaagctg

SEQ ID NO: 76063 - DNA, 15 bp, Homo sapiens
ccatcgcttgaagct

SEQ ID NO: 76064 - DNA, 15 bp, Homo sapiens
cccatcgcttgaagc

SEQ ID NO: 76065 - DNA, 15 bp, Homo sapiens
ccccatcgcttgaag

SEQ ID NO: 76066 - DNA, 15 bp, Homo sapiens
tccccatcgcttgaa

SEQ ID NO: 76067 - DNA, 15 bp, Homo sapiens
ctccccatcgcttga

SEQ ID NO: 76068 - DNA, 15 bp, Homo sapiens
tctccccatcgcttg

SEQ ID NO: 76069 - DNA, 15 bp, Homo sapiens
atctccccatcgctt

SEQ ID NO: 76070 - DNA, 15 bp, Homo sapiens
aatctccccatcgct

SEQ ID NO: 76071 - DNA, 15 bp, Homo sapiens
taatctccccatcgc

SEQ ID NO: 76072 - DNA, 15 bp, Homo sapiens
gtaatctccccatcg

SEQ ID NO: 76073 - DNA, 15 bp, Homo sapiens
ggtaatctccccatc

SEQ ID NO: 76074 - DNA, 15 bp, Homo sapiens
gggtaatctccccat

SEQ ID NO: 76075 - DNA, 15 bp, Homo sapiens
agggtaatctcccca

SEQ ID NO: 76076 - DNA, 15 bp, Homo sapiens
gagggtaatctcccc

SEQ ID NO: 76077 - DNA, 15 bp, Homo sapiens
ggagggtaatctccc

SEQ ID NO: 76078 - DNA, 15 bp, Homo sapiens
aggagggtaatctcc

SEQ ID NO: 76079 - DNA, 15 bp, Homo sapiens
gaggagggtaatctc

SEQ ID NO: 76080 - DNA, 15 bp, Homo sapiens
tgaggagggtaatct

SEQ ID NO: 76081 - DNA, 15 bp, Homo sapiens
gtgaggagggtaatc

SEQ ID NO: 76082 - DNA, 15 bp, Homo sapiens
ggtgaggagggtaat

SEQ ID NO: 76083 - DNA, 15 bp, Homo sapiens
gggtgaggagggtaa

SEQ ID NO: 76084 - DNA, 15 bp, Homo sapiens
ggggtgaggagggta

SEQ ID NO: 76085 - DNA, 15 bp, Homo sapiens
aggggtgaggagggt

SEQ ID NO: 76086 - DNA, 15 bp, Homo sapiens
caggggtgaggaggg

SEQ ID NO: 76087 - DNA, 15 bp, Homo sapiens
gcaggggtgaggagg

SEQ ID NO: 76088 - DNA, 15 bp, Homo sapiens
agcaggggtgaggag

SEQ ID NO: 76089 - DNA, 15 bp, Homo sapiens
gagcaggggtgagga

SEQ ID NO: 76090 - DNA, 15 bp, Homo sapiens
ggagcaggggtgagg

SEQ ID NO: 76091 - DNA, 15 bp, Homo sapiens
tggagcaggggtgag

SEQ ID NO: 76092 - DNA, 15 bp, Homo sapiens
ttggagcaggggtga

SEQ ID NO: 76093 - DNA, 15 bp, Homo sapiens
cttggagcaggggtg

SEQ ID NO: 76094 - DNA, 15 bp, Homo sapiens
acttggagcaggggt

SEQ ID NO: 76095 - DNA, 15 bp, Homo sapiens
cacttggagcagggg

SEQ ID NO: 76096 - DNA, 15 bp, Homo sapiens
gcacttggagcaggg

SEQ ID NO: 76097 - DNA, 15 bp, Homo sapiens
tgcacttggagcagg

SEQ ID NO: 76098 - DNA, 15 bp, Homo sapiens
atgcacttggagcag

SEQ ID NO: 76099 - DNA, 15 bp, Homo sapiens
gatgcacttggagca

SEQ ID NO: 76100 - DNA, 15 bp, Homo sapiens
tgatgcacttggagc

SEQ ID NO: 76101 - DNA, 15 bp, Homo sapiens
gtgatgcacttggag

SEQ ID NO: 76102 - DNA, 15 bp, Homo sapiens
tgtgatgcacttgga

SEQ ID NO: 76103 - DNA, 15 bp, Homo sapiens
ttgtgatgcacttgg

SEQ ID NO: 76104 - DNA, 15 bp, Homo sapiens
gttgtgatgcacttg

SEQ ID NO: 76105 - DNA, 15 bp, Homo sapiens
ggttgtgatgcactt

SEQ ID NO: 76106 - DNA, 15 bp, Homo sapiens
gggttgtgatgcact

SEQ ID NO: 76107 - DNA, 15 bp, Homo sapiens
tgggttgtgatgcac

SEQ ID NO: 76108 - DNA, 15 bp, Homo sapiens
ctgggttgtgatgca

SEQ ID NO: 76109 - DNA, 15 bp, Homo sapiens
tctgggttgtgatgc

SEQ ID NO: 76110 - DNA, 15 bp, Homo sapiens
ctctgggttgtgatg

SEQ ID NO: 76111 - DNA, 15 bp, Homo sapiens
gctctgggttgtgat

SEQ ID NO: 76112 - DNA, 15 bp, Homo sapiens
tgctctgggttgtga

SEQ ID NO: 76113 - DNA, 15 bp, Homo sapiens
gtgctctgggttgtg

SEQ ID NO: 76114 - DNA, 15 bp, Homo sapiens
ggtgctctgggttgt

SEQ ID NO: 76115 - DNA, 15 bp, Homo sapiens
gggtgctctgggttg

SEQ ID NO: 76116 - DNA, 15 bp, Homo sapiens
tgggtgctctgggtt

SEQ ID NO: 76117 - DNA, 15 bp, Homo sapiens
ctgggtgctctgggt

SEQ ID NO: 76118 - DNA, 15 bp, Homo sapiens
gctgggtgctctggg

SEQ ID NO: 76119 - DNA, 15 bp, Homo sapiens
ggctgggtgctctgg

SEQ ID NO: 76120 - DNA, 15 bp, Homo sapiens
tggctgggtgctctg

SEQ ID NO: 76121 - DNA, 15 bp, Homo sapiens
ttggctgggtgctct

SEQ ID NO: 76122 - DNA, 15 bp, Homo sapiens
cttggctgggtgctc

SEQ ID NO: 76123 - DNA, 15 bp, Homo sapiens
tcttggctgggtgct

SEQ ID NO: 76124 - DNA, 15 bp, Homo sapiens
ttcttggctgggtgc

SEQ ID NO: 76125 - DNA, 15 bp, Homo sapiens
attcttggctgggtg

SEQ ID NO: 76126 - DNA, 15 bp, Homo sapiens
cattcttggctgggt

SEQ ID NO: 76127 - DNA, 15 bp, Homo sapiens
gcattcttggctggg

SEQ ID NO: 76128 - DNA, 15 bp, Homo sapiens
tgcattcttggctgg

SEQ ID NO: 76129 - DNA, 15 bp, Homo sapiens
gtgcattcttggctg

SEQ ID NO: 76130 - DNA, 15 bp, Homo sapiens
tgtgcattcttggct

SEQ ID NO: 76131 - DNA, 15 bp, Homo sapiens
gtgtgcattcttggc

SEQ ID NO: 76132 - DNA, 15 bp, Homo sapiens
ggtgtgcattcttgg

SEQ ID NO: 76133 - DNA, 15 bp, Homo sapiens
aggtgtgcattcttg

SEQ ID NO: 76134 - DNA, 15 bp, Homo sapiens
caggtgtgcattctt

SEQ ID NO: 76135 - DNA, 15 bp, Homo sapiens
acaggtgtgcattct

SEQ ID NO: 76136 - DNA, 15 bp, Homo sapiens
cacaggtgtgcattc

SEQ ID NO: 76137 - DNA, 15 bp, Homo sapiens
tcacaggtgtgcatt

SEQ ID NO: 76138 - DNA, 15 bp, Homo sapiens
atcacaggtgtgcat

SEQ ID NO: 76139 - DNA, 15 bp, Homo sapiens
catcacaggtgtgca

SEQ ID NO: 76140 - DNA, 15 bp, Homo sapiens
ccatcacaggtgtgc

SEQ ID NO: 76141 - DNA, 15 bp, Homo sapiens
cccatcacaggtgtg

SEQ ID NO: 76142 - DNA, 15 bp, Homo sapiens
ccccatcacaggtgt

SEQ ID NO: 76143 - DNA, 15 bp, Homo sapiens
gccccatcacaggtg

SEQ ID NO: 76144 - DNA, 15 bp, Homo sapiens
agccccatcacaggt

SEQ ID NO: 76145 - DNA, 15 bp, Homo sapiens
tagccccatcacagg

SEQ ID NO: 76146 - DNA, 15 bp, Homo sapiens
ttagccccatcacag

SEQ ID NO: 76147 - DNA, 15 bp, Homo sapiens
cttagccccatcaca

SEQ ID NO: 76148 - DNA, 15 bp, Homo sapiens
ccttagccccatcac

SEQ ID NO: 76149 - DNA, 15 bp, Homo sapiens
tccttagccccatca

SEQ ID NO: 76150 - DNA, 15 bp, Homo sapiens
ctccttagccccatc

SEQ ID NO: 76151 - DNA, 15 bp, Homo sapiens
cctccttagccccat

SEQ ID NO: 76152 - DNA, 15 bp, Homo sapiens
gcctccttagcccca

SEQ ID NO: 76153 - DNA, 15 bp, Homo sapiens
ggcctccttagcccc

SEQ ID NO: 76154 - DNA, 15 bp, Homo sapiens
aggcctccttagccc

SEQ ID NO: 76155 - DNA, 15 bp, Homo sapiens
gaggcctccttagcc

SEQ ID NO: 76156 - DNA, 15 bp, Homo sapiens
tgaggcctccttagc

SEQ ID NO: 76157 - DNA, 15 bp, Homo sapiens
gtgaggcctccttag

SEQ ID NO: 76158 - DNA, 15 bp, Homo sapiens
agtgaggcctcctta

SEQ ID NO: 76159 - DNA, 15 bp, Homo sapiens
cagtgaggcctcctt

SEQ ID NO: 76160 - DNA, 15 bp, Homo sapiens
ccagtgaggcctcct

SEQ ID NO: 76161 - DNA, 15 bp, Homo sapiens
tccagtgaggcctcc

SEQ ID NO: 76162 - DNA, 15 bp, Homo sapiens
gtccagtgaggcctc

SEQ ID NO: 76163 - DNA, 15 bp, Homo sapiens
ggtccagtgaggcct

SEQ ID NO: 76164 - DNA, 15 bp, Homo sapiens
aggtccagtgaggcc

SEQ ID NO: 76165 - DNA, 15 bp, Homo sapiens
caggtccagtgaggc

SEQ ID NO: 76166 - DNA, 15 bp, Homo sapiens
acaggtccagtgagg

SEQ ID NO: 76167 - DNA, 15 bp, Homo sapiens
cacaggtccagtgag

SEQ ID NO: 76168 - DNA, 15 bp, Homo sapiens
acacaggtccagtga

SEQ ID NO: 76169 - DNA, 15 bp, Homo sapiens
tacacaggtccagtg

SEQ ID NO: 76170 - DNA, 15 bp, Homo sapiens
ttacacaggtccagt

SEQ ID NO: 76171 - DNA, 15 bp, Homo sapiens
cttacacaggtccag

SEQ ID NO: 76172 - DNA, 15 bp, Homo sapiens
ccttacacaggtcca

SEQ ID NO: 76173 - DNA, 15 bp, Homo sapiens
tccttacacaggtcc

SEQ ID NO: 76174 - DNA, 15 bp, Homo sapiens
ctccttacacaggtc

SEQ ID NO: 76175 - DNA, 15 bp, Homo sapiens
tctccttacacaggt

SEQ ID NO: 76176 - DNA, 15 bp, Homo sapiens
ctctccttacacagg

SEQ ID NO: 76177 - DNA, 15 bp, Homo sapiens
tctctccttacacag

SEQ ID NO: 76178 - DNA, 15 bp, Homo sapiens
ctctctccttacaca

SEQ ID NO: 76179 - DNA, 15 bp, Homo sapiens
cctctctccttacac

SEQ ID NO: 76180 - DNA, 15 bp, Homo sapiens
tcctctctccttaca

SEQ ID NO: 76181 - DNA, 15 bp, Homo sapiens
ctcctctctccttac

SEQ ID NO: 76182 - DNA, 15 bp, Homo sapiens
tctcctctctcctta

SEQ ID NO: 76183 - DNA, 15 bp, Homo sapiens
atctcctctctcctt

SEQ ID NO: 76184 - DNA, 15 bp, Homo sapiens
aatctcctctctcct

SEQ ID NO: 76185 - DNA, 15 bp, Homo sapiens
gaatctcctctctcc

SEQ ID NO: 76186 - DNA, 15 bp, Homo sapiens
ggaatctcctctctc

SEQ ID NO: 76187 - DNA, 15 bp, Homo sapiens
gggaatctcctctct

SEQ ID NO: 76188 - DNA, 15 bp, Homo sapiens
tgggaatctcctctc

SEQ ID NO: 76189 - DNA, 15 bp, Homo sapiens
ctgggaatctcctct

SEQ ID NO: 76190 - DNA, 15 bp, Homo sapiens
cctgggaatctcctc

SEQ ID NO: 76191 - DNA, 15 bp, Homo sapiens
tcctgggaatctcct

SEQ ID NO: 76192 - DNA, 15 bp, Homo sapiens
ctcctgggaatctcc

SEQ ID NO: 76193 - DNA, 15 bp, Homo sapiens
cctcctgggaatctc

SEQ ID NO: 76194 - DNA, 15 bp, Homo sapiens
tcctcctgggaatct

SEQ ID NO: 76195 - DNA, 15 bp, Homo sapiens
gtcctcctgggaatc

SEQ ID NO: 76196 - DNA, 15 bp, Homo sapiens
ggtcctcctgggaat

SEQ ID NO: 76197 - DNA, 15 bp, Homo sapiens
aggtcctcctgggaa

SEQ ID NO: 76198 - DNA, 15 bp, Homo sapiens
gaggtcctcctggga

SEQ ID NO: 76199 - DNA, 15 bp, Homo sapiens
tgaggtcctcctggg

SEQ ID NO: 76200 - DNA, 15 bp, Homo sapiens
gtgaggtcctcctgg

SEQ ID NO: 76201 - DNA, 15 bp, Homo sapiens
agtgaggtcctcctg

SEQ ID NO: 76202 - DNA, 15 bp, Homo sapiens
tagtgaggtcctcct

SEQ ID NO: 76203 - DNA, 15 bp, Homo sapiens
ttagtgaggtcctcc

SEQ ID NO: 76204 - DNA, 15 bp, Homo sapiens
attagtgaggtcctc

SEQ ID NO: 76205 - DNA, 15 bp, Homo sapiens
tattagtgaggtcct

SEQ ID NO: 76206 - DNA, 15 bp, Homo sapiens
ctattagtgaggtcc

SEQ ID NO: 76207 - DNA, 15 bp, Homo sapiens
tctattagtgaggtc

SEQ ID NO: 76208 - DNA, 15 bp, Homo sapiens
ttctattagtgaggt

SEQ ID NO: 76209 - DNA, 15 bp, Homo sapiens
tttctattagtgagg

SEQ ID NO: 76210 - DNA, 15 bp, Homo sapiens
ttttctattagtgag

SEQ ID NO: 76211 - DNA, 15 bp, Homo sapiens
cttttctattagtga

SEQ ID NO: 76212 - DNA, 15 bp, Homo sapiens
gcttttctattagtg

SEQ ID NO: 76213 - DNA, 15 bp, Homo sapiens
tgcttttctattagt

SEQ ID NO: 76214 - DNA, 15 bp, Homo sapiens
gtgcttttctattag

SEQ ID NO: 76215 - DNA, 15 bp, Homo sapiens
tgtgcttttctatta

SEQ ID NO: 76216 - DNA, 15 bp, Homo sapiens
gtgtgcttttctatt

SEQ ID NO: 76217 - DNA, 15 bp, Homo sapiens
cgtgtgcttttctat

SEQ ID NO: 76218 - DNA, 15 bp, Homo sapiens
gcgtgtgcttttcta

SEQ ID NO: 76219 - DNA, 15 bp, Homo sapiens
tgcgtgtgcttttct

SEQ ID NO: 76220 - DNA, 15 bp, Homo sapiens
atgcgtgtgcttttc

SEQ ID NO: 76221 - DNA, 15 bp, Homo sapiens
catgcgtgtgctttt

SEQ ID NO: 76222 - DNA, 15 bp, Homo sapiens
tcatgcgtgtgcttt

SEQ ID NO: 76223 - DNA, 15 bp, Homo sapiens
atcatgcgtgtgctt

SEQ ID NO: 76224 - DNA, 15 bp, Homo sapiens
catcatgcgtgtgct

SEQ ID NO: 76225 - DNA, 15 bp, Homo sapiens
ccatcatgcgtgtgc

SEQ ID NO: 76226 - DNA, 15 bp, Homo sapiens
accatcatgcgtgtg

SEQ ID NO: 76227 - DNA, 15 bp, Homo sapiens
aaccatcatgcgtgt

SEQ ID NO: 76228 - DNA, 15 bp, Homo sapiens
aaaccatcatgcgtg

SEQ ID NO: 76229 - DNA, 15 bp, Homo sapiens
aaaaccatcatgcgt

SEQ ID NO: 76230 - DNA, 15 bp, Homo sapiens
caaaaccatcatgcg

SEQ ID NO: 76231 - DNA, 15 bp, Homo sapiens
gcaaaaccatcatgc

SEQ ID NO: 76232 - DNA, 15 bp, Homo sapiens
agcaaaaccatcatg

SEQ ID NO: 76233 - DNA, 15 bp, Homo sapiens
tagcaaaaccatcat

SEQ ID NO: 76234 - DNA, 15 bp, Homo sapiens
atagcaaaaccatca

SEQ ID NO: 76235 - DNA, 15 bp, Homo sapiens
gatagcaaaaccatc

SEQ ID NO: 76236 - DNA, 15 bp, Homo sapiens
cgatagcaaaaccat

SEQ ID NO: 76237 - DNA, 15 bp, Homo sapiens
acgatagcaaaacca

SEQ ID NO: 76238 - DNA, 15 bp, Homo sapiens
cacgatagcaaaacc

SEQ ID NO: 76239 - DNA, 15 bp, Homo sapiens
acacgatagcaaaac

SEQ ID NO: 76240 - DNA, 15 bp, Homo sapiens
cacacgatagcaaaa

SEQ ID NO: 76241 - DNA, 15 bp, Homo sapiens
tcacacgatagcaaa

SEQ ID NO: 76242 - DNA, 15 bp, Homo sapiens
gtcacacgatagcaa

SEQ ID NO: 76243 - DNA, 15 bp, Homo sapiens
tgtcacacgatagca

SEQ ID NO: 76244 - DNA, 15 bp, Homo sapiens
atgtcacacgatagc

SEQ ID NO: 76245 - DNA, 15 bp, Homo sapiens
aatgtcacacgatag

SEQ ID NO: 76246 - DNA, 15 bp, Homo sapiens
aaatgtcacacgata

SEQ ID NO: 76247 - DNA, 15 bp, Homo sapiens
taaatgtcacacgat

SEQ ID NO: 76248 - DNA, 15 bp, Homo sapiens
ataaatgtcacacga

SEQ ID NO: 76249 - DNA, 15 bp, Homo sapiens
aataaatgtcacacg

SEQ ID NO: 76250 - DNA, 15 bp, Homo sapiens
aaataaatgtcacac

SEQ ID NO: 76251 - DNA, 15 bp, Homo sapiens
gaaataaatgtcaca

SEQ ID NO: 76252 - DNA, 15 bp, Homo sapiens
tgaaataaatgtcac

SEQ ID NO: 76253 - DNA, 15 bp, Homo sapiens
atgaaataaatgtca

SEQ ID NO: 76254 - DNA, 15 bp, Homo sapiens
tatgaaataaatgtc

SEQ ID NO: 76255 - DNA, 15 bp, Homo sapiens
gtatgaaataaatgt

SEQ ID NO: 76256 - DNA, 15 bp, Homo sapiens
agtatgaaataaatg

SEQ ID NO: 76257 - DNA, 15 bp, Homo sapiens
aagtatgaaataaat

SEQ ID NO: 76258 - DNA, 15 bp, Homo sapiens
caagtatgaaataaa

SEQ ID NO: 76259 - DNA, 15 bp, Homo sapiens
gcaagtatgaaataa

SEQ ID NO: 76260 - DNA, 15 bp, Homo sapiens
agcaagtatgaaata

SEQ ID NO: 76261 - DNA, 15 bp, Homo sapiens
tagcaagtatgaaat

SEQ ID NO: 76262 - DNA, 15 bp, Homo sapiens
gtagcaagtatgaaa

SEQ ID NO: 76263 - DNA, 15 bp, Homo sapiens
ggtagcaagtatgaa

SEQ ID NO: 76264 - DNA, 15 bp, Homo sapiens
aggtagcaagtatga

SEQ ID NO: 76265 - DNA, 15 bp, Homo sapiens
caggtagcaagtatg

SEQ ID NO: 76266 - DNA, 15 bp, Homo sapiens
acaggtagcaagtat

SEQ ID NO: 76267 - DNA, 15 bp, Homo sapiens
tacaggtagcaagta

SEQ ID NO: 76268 - DNA, 15 bp, Homo sapiens
ttacaggtagcaagt

SEQ ID NO: 76269 - DNA, 15 bp, Homo sapiens
cttacaggtagcaag

SEQ ID NO: 76270 - DNA, 15 bp, Homo sapiens
tcttacaggtagcaa

SEQ ID NO: 76271 - DNA, 15 bp, Homo sapiens
ttcttacaggtagca

SEQ ID NO: 76272 - DNA, 15 bp, Homo sapiens
tttcttacaggtagc

SEQ ID NO: 76273 - DNA, 15 bp, Homo sapiens
atttcttacaggtag

SEQ ID NO: 76274 - DNA, 15 bp, Homo sapiens
aatttcttacaggta

SEQ ID NO: 76275 - DNA, 15 bp, Homo sapiens
gaatttcttacaggt

SEQ ID NO: 76276 - DNA, 15 bp, Homo sapiens
ggaatttcttacagg

SEQ ID NO: 76277 - DNA, 15 bp, Homo sapiens
aggaatttcttacag

SEQ ID NO: 76278 - DNA, 15 bp, Homo sapiens
aaggaatttcttaca

SEQ ID NO: 76279 - DNA, 15 bp, Homo sapiens
caaggaatttcttac

SEQ ID NO: 76280 - DNA, 15 bp, Homo sapiens
tcaaggaatttctta

SEQ ID NO: 76281 - DNA, 15 bp, Homo sapiens
ttcaaggaatttctt

SEQ ID NO: 76282 - DNA, 15 bp, Homo sapiens
tttcaaggaatttct

SEQ ID NO: 76283 - DNA, 15 bp, Homo sapiens
ttttcaaggaatttc

SEQ ID NO: 76284 - DNA, 15 bp, Homo sapiens
gttttcaaggaattt

SEQ ID NO: 76285 - DNA, 15 bp, Homo sapiens
cgttttcaaggaatt

SEQ ID NO: 76286 - DNA, 15 bp, Homo sapiens
tcgttttcaaggaat

SEQ ID NO: 76287 - DNA, 15 bp, Homo sapiens
ttcgttttcaaggaa

SEQ ID NO: 76288 - DNA, 15 bp, Homo sapiens
tttcgttttcaagga

SEQ ID NO: 76289 - DNA, 15 bp, Homo sapiens
atttcgttttcaagg

SEQ ID NO: 76290 - DNA, 15 bp, Homo sapiens
tatttcgttttcaag

SEQ ID NO: 76291 - DNA, 15 bp, Homo sapiens
ctatttcgttttcaa

SEQ ID NO: 76292 - DNA, 15 bp, Homo sapiens
actatttcgttttca

SEQ ID NO: 76293 - DNA, 15 bp, Homo sapiens
tactatttcgttttc

SEQ ID NO: 76294 - DNA, 15 bp, Homo sapiens
atactatttcgtttt

SEQ ID NO: 76295 - DNA, 15 bp, Homo sapiens
tatactatttcgttt

SEQ ID NO: 76296 - DNA, 15 bp, Homo sapiens
atatactatttcgtt

SEQ ID NO: 76297 - DNA, 15 bp, Homo sapiens
catatactatttcgt

SEQ ID NO: 76298 - DNA, 15 bp, Homo sapiens
ccatatactatttcg

SEQ ID NO: 76299 - DNA, 15 bp, Homo sapiens
gccatatactatttc

SEQ ID NO: 76300 - DNA, 15 bp, Homo sapiens
tgccatatactattt

SEQ ID NO: 76301 - DNA, 15 bp, Homo sapiens
ttgccatatactatt

SEQ ID NO: 76302 - DNA, 15 bp, Homo sapiens
cttgccatatactat

SEQ ID NO: 76303 - DNA, 15 bp, Homo sapiens
tcttgccatatacta

SEQ ID NO: 76304 - DNA, 15 bp, Homo sapiens
atcttgccatatact

SEQ ID NO: 76305 - DNA, 15 bp, Homo sapiens
aatcttgccatatac

SEQ ID NO: 76306 - DNA, 15 bp, Homo sapiens
aaatcttgccatata

SEQ ID NO: 76307 - DNA, 15 bp, Homo sapiens
taaatcttgccatat

SEQ ID NO: 76308 - DNA, 15 bp, Homo sapiens
ttaaatcttgccata

SEQ ID NO: 76309 - DNA, 15 bp, Homo sapiens
cttaaatcttgccat

SEQ ID NO: 76310 - DNA, 15 bp, Homo sapiens
ccttaaatcttgcca

SEQ ID NO: 76311 - DNA, 15 bp, Homo sapiens
tccttaaatcttgcc

SEQ ID NO: 76312 - DNA, 15 bp, Homo sapiens
gtccttaaatcttgc

SEQ ID NO: 76313 - DNA, 15 bp, Homo sapiens
agtccttaaatcttg

SEQ ID NO: 76314 - DNA, 15 bp, Homo sapiens
aagtccttaaatctt

SEQ ID NO: 76315 - DNA, 15 bp, Homo sapiens
caagtccttaaatct

SEQ ID NO: 76316 - DNA, 15 bp, Homo sapiens
gcaagtccttaaatc

SEQ ID NO: 76317 - DNA, 15 bp, Homo sapiens
agcaagtccttaaat

SEQ ID NO: 76318 - DNA, 15 bp, Homo sapiens
gagcaagtccttaaa

SEQ ID NO: 76319 - DNA, 15 bp, Homo sapiens
agagcaagtccttaa

SEQ ID NO: 76320 - DNA, 15 bp, Homo sapiens
aagagcaagtcctta

SEQ ID NO: 76321 - DNA, 15 bp, Homo sapiens
gaagagcaagtcctt

SEQ ID NO: 76322 - DNA, 15 bp, Homo sapiens
ggaagagcaagtcct

SEQ ID NO: 76323 - DNA, 15 bp, Homo sapiens
tggaagagcaagtcc

SEQ ID NO: 76324 - DNA, 15 bp, Homo sapiens
ctggaagagcaagtc

SEQ ID NO: 76325 - DNA, 15 bp, Homo sapiens
tctggaagagcaagt

SEQ ID NO: 76326 - DNA, 15 bp, Homo sapiens
atctggaagagcaag

SEQ ID NO: 76327 - DNA, 15 bp, Homo sapiens
aatctggaagagcaa

SEQ ID NO: 76328 - DNA, 15 bp, Homo sapiens
gaatctggaagagca

SEQ ID NO: 76329 - DNA, 15 bp, Homo sapiens
agaatctggaagagc

SEQ ID NO: 76330 - DNA, 15 bp, Homo sapiens
cagaatctggaagag

SEQ ID NO: 76331 - DNA, 15 bp, Homo sapiens
ccagaatctggaaga

SEQ ID NO: 76332 - DNA, 15 bp, Homo sapiens
tccagaatctggaag

SEQ ID NO: 76333 - DNA, 15 bp, Homo sapiens
ctccagaatctggaa

SEQ ID NO: 76334 - DNA, 15 bp, Homo sapiens
cctccagaatctgga

SEQ ID NO: 76335 - DNA, 15 bp, Homo sapiens
acctccagaatctgg

SEQ ID NO: 76336 - DNA, 15 bp, Homo sapiens
gacctccagaatctg

SEQ ID NO: 76337 - DNA, 15 bp, Homo sapiens
ggacctccagaatct

SEQ ID NO: 76338 - DNA, 15 bp, Homo sapiens
aggacctccagaatc

SEQ ID NO: 76339 - DNA, 15 bp, Homo sapiens
aaggacctccagaat

SEQ ID NO: 76340 - DNA, 15 bp, Homo sapiens
gaaggacctccagaa

SEQ ID NO: 76341 - DNA, 15 bp, Homo sapiens
agaaggacctccaga

SEQ ID NO: 76342 - DNA, 15 bp, Homo sapiens
cagaaggacctccag

SEQ ID NO: 76343 - DNA, 15 bp, Homo sapiens
ccagaaggacctcca

SEQ ID NO: 76344 - DNA, 15 bp, Homo sapiens
tccagaaggacctcc

SEQ ID NO: 76345 - DNA, 15 bp, Homo sapiens
ctccagaaggacctc

SEQ ID NO: 76346 - DNA, 15 bp, Homo sapiens
gctccagaaggacct

SEQ ID NO: 76347 - DNA, 15 bp, Homo sapiens
ggctccagaaggacc

SEQ ID NO: 76348 - DNA, 15 bp, Homo sapiens
gggctccagaaggac

SEQ ID NO: 76349 - DNA, 15 bp, Homo sapiens
tgggctccagaagga

SEQ ID NO: 76350 - DNA, 15 bp, Homo sapiens
ctgggctccagaagg

SEQ ID NO: 76351 - DNA, 15 bp, Homo sapiens
cctgggctccagaag

SEQ ID NO: 76352 - DNA, 15 bp, Homo sapiens
ccctgggctccagaa

SEQ ID NO: 76353 - DNA, 15 bp, Homo sapiens
tccctgggctccaga

SEQ ID NO: 76354 - DNA, 15 bp, Homo sapiens
atccctgggctccag

SEQ ID NO: 76355 - DNA, 15 bp, Homo sapiens
catccctgggctcca

SEQ ID NO: 76356 - DNA, 15 bp, Homo sapiens
gcatccctgggctcc

SEQ ID NO: 76357 - DNA, 15 bp, Homo sapiens
agcatccctgggctc

SEQ ID NO: 76358 - DNA, 15 bp, Homo sapiens
cagcatccctgggct

SEQ ID NO: 76359 - DNA, 15 bp, Homo sapiens
acagcatccctgggc

SEQ ID NO: 76360 - DNA, 15 bp, Homo sapiens
aacagcatccctggg

SEQ ID NO: 76361 - DNA, 15 bp, Homo sapiens
aaacagcatccctgg

SEQ ID NO: 76362 - DNA, 15 bp, Homo sapiens
gaaacagcatccctg

SEQ ID NO: 76363 - DNA, 15 bp, Homo sapiens
agaaacagcatccct

SEQ ID NO: 76364 - DNA, 15 bp, Homo sapiens
tagaaacagcatccc

SEQ ID NO: 76365 - DNA, 15 bp, Homo sapiens
ttagaaacagcatcc

SEQ ID NO: 76366 - DNA, 15 bp, Homo sapiens
cttagaaacagcatc

SEQ ID NO: 76367 - DNA, 15 bp, Homo sapiens
ccttagaaacagcat

SEQ ID NO: 76368 - DNA, 15 bp, Homo sapiens
gccttagaaacagca

SEQ ID NO: 76369 - DNA, 15 bp, Homo sapiens
tgccttagaaacagc

SEQ ID NO: 76370 - DNA, 15 bp, Homo sapiens
atgccttagaaacag

SEQ ID NO: 76371 - DNA, 15 bp, Homo sapiens
catgccttagaaaca

SEQ ID NO: 76372 - DNA, 15 bp, Homo sapiens
acatgccttagaaac

SEQ ID NO: 76373 - DNA, 15 bp, Homo sapiens
tacatgccttagaaa

SEQ ID NO: 76374 - DNA, 15 bp, Homo sapiens
ctacatgccttagaa

SEQ ID NO: 76375 - DNA, 15 bp, Homo sapiens
cctacatgccttaga

SEQ ID NO: 76376 - DNA, 15 bp, Homo sapiens
acctacatgccttag

SEQ ID NO: 76377 - DNA, 15 bp, Homo sapiens
cacctacatgcctta

SEQ ID NO: 76378 - DNA, 15 bp, Homo sapiens
gcacctacatgcctt

SEQ ID NO: 76379 - DNA, 15 bp, Homo sapiens
agcacctacatgcct

SEQ ID NO: 76380 - DNA, 15 bp, Homo sapiens
cagcacctacatgcc

SEQ ID NO: 76381 - DNA, 15 bp, Homo sapiens
tcagcacctacatgc

SEQ ID NO: 76382 - DNA, 15 bp, Homo sapiens
ctcagcacctacatg

SEQ ID NO: 76383 - DNA, 15 bp, Homo sapiens
cctcagcacctacat

SEQ ID NO: 76384 - DNA, 15 bp, Homo sapiens
ccctcagcacctaca

SEQ ID NO: 76385 - DNA, 15 bp, Homo sapiens
accctcagcacctac

SEQ ID NO: 76386 - DNA, 15 bp, Homo sapiens
gaccctcagcaccta

SEQ ID NO: 76387 - DNA, 15 bp, Homo sapiens
agaccctcagcacct

SEQ ID NO: 76388 - DNA, 15 bp, Homo sapiens
tagaccctcagcacc

SEQ ID NO: 76389 - DNA, 15 bp, Homo sapiens
gtagaccctcagcac

SEQ ID NO: 76390 - DNA, 15 bp, Homo sapiens
ggtagaccctcagca

SEQ ID NO: 76391 - DNA, 15 bp, Homo sapiens
gggtagaccctcagc

SEQ ID NO: 76392 - DNA, 15 bp, Homo sapiens
ggggtagaccctcag

SEQ ID NO: 76393 - DNA, 15 bp, Homo sapiens
tggggtagaccctca

SEQ ID NO: 76394 - DNA, 15 bp, Homo sapiens
ttggggtagaccctc

SEQ ID NO: 76395 - DNA, 15 bp, Homo sapiens
tttggggtagaccct

SEQ ID NO: 76396 - DNA, 15 bp, Homo sapiens
ctttggggtagaccc

SEQ ID NO: 76397 - DNA, 15 bp, Homo sapiens
cctttggggtagacc

SEQ ID NO: 76398 - DNA, 15 bp, Homo sapiens
ccctttggggtagac

SEQ ID NO: 76399 - DNA, 15 bp, Homo sapiens
gccctttggggtaga

SEQ ID NO: 76400 - DNA, 15 bp, Homo sapiens
tgccctttggggtag

SEQ ID NO: 76401 - DNA, 15 bp, Homo sapiens
ctgccctttggggta

SEQ ID NO: 76402 - DNA, 15 bp, Homo sapiens
actgccctttggggt

SEQ ID NO: 76403 - DNA, 15 bp, Homo sapiens
aactgccctttgggg

SEQ ID NO: 76404 - DNA, 15 bp, Homo sapiens
aaactgccctttggg

SEQ ID NO: 76405 - DNA, 15 bp, Homo sapiens
caaactgccctttgg

SEQ ID NO: 76406 - DNA, 15 bp, Homo sapiens
ccaaactgccctttg

SEQ ID NO: 76407 - DNA, 15 bp, Homo sapiens
cccaaactgcccttt

SEQ ID NO: 76408 - DNA, 15 bp, Homo sapiens
tcccaaactgccctt

SEQ ID NO: 76409 - DNA, 15 bp, Homo sapiens
gtcccaaactgccct

SEQ ID NO: 76410 - DNA, 15 bp, Homo sapiens
agtcccaaactgccc

SEQ ID NO: 76411 - DNA, 15 bp, Homo sapiens
cagtcccaaactgcc

SEQ ID NO: 76412 - DNA, 15 bp, Homo sapiens
gcagtcccaaactgc

SEQ ID NO: 76413 - DNA, 15 bp, Homo sapiens
tgcagtcccaaactg

SEQ ID NO: 76414 - DNA, 15 bp, Homo sapiens
ctgcagtcccaaact

SEQ ID NO: 76415 - DNA, 15 bp, Homo sapiens
cctgcagtcccaaac

SEQ ID NO: 76416 - DNA, 15 bp, Homo sapiens
ccctgcagtcccaaa

SEQ ID NO: 76417 - DNA, 15 bp, Homo sapiens
gccctgcagtcccaa

SEQ ID NO: 76418 - DNA, 15 bp, Homo sapiens
tgccctgcagtccca

SEQ ID NO: 76419 - DNA, 15 bp, Homo sapiens
ctgccctgcagtccc

SEQ ID NO: 76420 - DNA, 15 bp, Homo sapiens
cctgccctgcagtcc

SEQ ID NO: 76421 - DNA, 15 bp, Homo sapiens
gcctgccctgcagtc

SEQ ID NO: 76422 - DNA, 15 bp, Homo sapiens
tgcctgccctgcagt

SEQ ID NO: 76423 - DNA, 15 bp, Homo sapiens
ctgcctgccctgcag

SEQ ID NO: 76424 - DNA, 15 bp, Homo sapiens
cctgcctgccctgca

SEQ ID NO: 76425 - DNA, 15 bp, Homo sapiens
tcctgcctgccctgc

SEQ ID NO: 76426 - DNA, 15 bp, Homo sapiens
ttcctgcctgccctg

SEQ ID NO: 76427 - DNA, 15 bp, Homo sapiens
cttcctgcctgccct

SEQ ID NO: 76428 - DNA, 15 bp, Homo sapiens
acttcctgcctgccc

SEQ ID NO: 76429 - DNA, 15 bp, Homo sapiens
cacttcctgcctgcc

SEQ ID NO: 76430 - DNA, 15 bp, Homo sapiens
gcacttcctgcctgc

SEQ ID NO: 76431 - DNA, 15 bp, Homo sapiens
ggcacttcctgcctg

SEQ ID NO: 76432 - DNA, 15 bp, Homo sapiens
aggcacttcctgcct

SEQ ID NO: 76433 - DNA, 15 bp, Homo sapiens
aaggcacttcctgcc

SEQ ID NO: 76434 - DNA, 15 bp, Homo sapiens
aaaggcacttcctgc

SEQ ID NO: 76435 - DNA, 15 bp, Homo sapiens
caaaggcacttcctg

SEQ ID NO: 76436 - DNA, 15 bp, Homo sapiens
acaaaggcacttcct

SEQ ID NO: 76437 - DNA, 15 bp, Homo sapiens
aacaaaggcacttcc

SEQ ID NO: 76438 - DNA, 15 bp, Homo sapiens
aaacaaaggcacttc

SEQ ID NO: 76439 - DNA, 15 bp, Homo sapiens
caaacaaaggcactt

SEQ ID NO: 76440 - DNA, 15 bp, Homo sapiens
acaaacaaaggcact

SEQ ID NO: 76441 - DNA, 15 bp, Homo sapiens
cacaaacaaaggcac

SEQ ID NO: 76442 - DNA, 15 bp, Homo sapiens
acacaaacaaaggca

SEQ ID NO: 76443 - DNA, 15 bp, Homo sapiens
cacacaaacaaaggc

SEQ ID NO: 76444 - DNA, 15 bp, Homo sapiens
gcacacaaacaaagg

SEQ ID NO: 76445 - DNA, 15 bp, Homo sapiens
tgcacacaaacaaag

SEQ ID NO: 76446 - DNA, 15 bp, Homo sapiens
atgcacacaaacaaa

SEQ ID NO: 76447 - DNA, 15 bp, Homo sapiens
catgcacacaaacaa

SEQ ID NO: 76448 - DNA, 15 bp, Homo sapiens
gcatgcacacaaaca

SEQ ID NO: 76449 - DNA, 15 bp, Homo sapiens
ggcatgcacacaaac

SEQ ID NO: 76450 - DNA, 15 bp, Homo sapiens
tggcatgcacacaaa

SEQ ID NO: 76451 - DNA, 15 bp, Homo sapiens
ctggcatgcacacaa

SEQ ID NO: 76452 - DNA, 15 bp, Homo sapiens
cctggcatgcacaca

SEQ ID NO: 76453 - DNA, 15 bp, Homo sapiens
gcctggcatgcacac

SEQ ID NO: 76454 - DNA, 15 bp, Homo sapiens
cgcctggcatgcaca

SEQ ID NO: 76455 - DNA, 15 bp, Homo sapiens
ccgcctggcatgcac

SEQ ID NO: 76456 - DNA, 15 bp, Homo sapiens
accgcctggcatgca

SEQ ID NO: 76457 - DNA, 15 bp, Homo sapiens
aaccgcctggcatgc

SEQ ID NO: 76458 - DNA, 15 bp, Homo sapiens
aaaccgcctggcatg

SEQ ID NO: 76459 - DNA, 15 bp, Homo sapiens
taaaccgcctggcat

SEQ ID NO: 76460 - DNA, 15 bp, Homo sapiens
ataaaccgcctggca

SEQ ID NO: 76461 - DNA, 15 bp, Homo sapiens
tataaaccgcctggc

SEQ ID NO: 76462 - DNA, 15 bp, Homo sapiens
ttataaaccgcctgg

SEQ ID NO: 76463 - DNA, 15 bp, Homo sapiens
tttataaaccgcctg

SEQ ID NO: 76464 - DNA, 15 bp, Homo sapiens
gtttataaaccgcct

SEQ ID NO: 76465 - DNA, 15 bp, Homo sapiens
tgtttataaaccgcc

SEQ ID NO: 76466 - DNA, 15 bp, Homo sapiens
atgtttataaaccgc

SEQ ID NO: 76467 - DNA, 15 bp, Homo sapiens
gatgtttataaaccg

SEQ ID NO: 76468 - DNA, 15 bp, Homo sapiens
ggatgtttataaacc

SEQ ID NO: 76469 - DNA, 15 bp, Homo sapiens
gggatgtttataaac

SEQ ID NO: 76470 - DNA, 15 bp, Homo sapiens
ggggatgtttataaa

SEQ ID NO: 76471 - DNA, 15 bp, Homo sapiens
aggggatgtttataa

SEQ ID NO: 76472 - DNA, 15 bp, Homo sapiens
aaggggatgtttata

SEQ ID NO: 76473 - DNA, 15 bp, Homo sapiens
aaaggggatgtttat

SEQ ID NO: 76474 - DNA, 15 bp, Homo sapiens
taaaggggatgttta

SEQ ID NO: 76475 - DNA, 15 bp, Homo sapiens
gtaaaggggatgttt

SEQ ID NO: 76476 - DNA, 15 bp, Homo sapiens
agtaaaggggatgtt

SEQ ID NO: 76477 - DNA, 15 bp, Homo sapiens
aagtaaaggggatgt

SEQ ID NO: 76478 - DNA, 15 bp, Homo sapiens
gaagtaaaggggatg

SEQ ID NO: 76479 - DNA, 15 bp, Homo sapiens
ggaagtaaaggggat

SEQ ID NO: 76480 - DNA, 15 bp, Homo sapiens
gggaagtaaagggga

SEQ ID NO: 76481 - DNA, 15 bp, Homo sapiens
agggaagtaaagggg

SEQ ID NO: 76482 - DNA, 15 bp, Homo sapiens
aagggaagtaaaggg

SEQ ID NO: 76483 - DNA, 15 bp, Homo sapiens
caagggaagtaaagg

SEQ ID NO: 76484 - DNA, 15 bp, Homo sapiens
gcaagggaagtaaag

SEQ ID NO: 76485 - DNA, 15 bp, Homo sapiens
ggcaagggaagtaaa

SEQ ID NO: 76486 - DNA, 15 bp, Homo sapiens
tggcaagggaagtaa

SEQ ID NO: 76487 - DNA, 15 bp, Homo sapiens
ttggcaagggaagta

SEQ ID NO: 76488 - DNA, 15 bp, Homo sapiens
gttggcaagggaagt

SEQ ID NO: 76489 - DNA, 15 bp, Homo sapiens
ggttggcaagggaag

SEQ ID NO: 76490 - DNA, 15 bp, Homo sapiens
gggttggcaagggaa

SEQ ID NO: 76491 - DNA, 15 bp, Homo sapiens
tgggttggcaaggga

SEQ ID NO: 76492 - DNA, 15 bp, Homo sapiens
ctgggttggcaaggg

SEQ ID NO: 76493 - DNA, 15 bp, Homo sapiens
cctgggttggcaagg

SEQ ID NO: 76494 - DNA, 15 bp, Homo sapiens
tcctgggttggcaag

SEQ ID NO: 76495 - DNA, 15 bp, Homo sapiens
ctcctgggttggcaa

SEQ ID NO: 76496 - DNA, 15 bp, Homo sapiens
actcctgggttggca

SEQ ID NO: 76497 - DNA, 15 bp, Homo sapiens
tactcctgggttggc

SEQ ID NO: 76498 - DNA, 15 bp, Homo sapiens
atactcctgggttgg

SEQ ID NO: 76499 - DNA, 15 bp, Homo sapiens
tatactcctgggttg

SEQ ID NO: 76500 - DNA, 15 bp, Homo sapiens
atatactcctgggtt

SEQ ID NO: 76501 - DNA, 15 bp, Homo sapiens
tatatactcctgggt

SEQ ID NO: 76502 - DNA, 15 bp, Homo sapiens
atatatactcctggg

SEQ ID NO: 76503 - DNA, 15 bp, Homo sapiens
aatatatactcctgg

SEQ ID NO: 76504 - DNA, 15 bp, Homo sapiens
caatatatactcctg

SEQ ID NO: 76505 - DNA, 15 bp, Homo sapiens
gcaatatatactcct

SEQ ID NO: 76506 - DNA, 15 bp, Homo sapiens
tgcaatatatactcc

SEQ ID NO: 76507 - DNA, 15 bp, Homo sapiens
ttgcaatatatactc

SEQ ID NO: 76508 - DNA, 15 bp, Homo sapiens
attgcaatatatact

SEQ ID NO: 76509 - DNA, 15 bp, Homo sapiens
aattgcaatatatac

SEQ ID NO: 76510 - DNA, 15 bp, Homo sapiens
taattgcaatatata

SEQ ID NO: 76511 - DNA, 15 bp, Homo sapiens
gtaattgcaatatat

SEQ ID NO: 76512 - DNA, 15 bp, Homo sapiens
ggtaattgcaatata

SEQ ID NO: 76513 - DNA, 15 bp, Homo sapiens
tggtaattgcaatat

SEQ ID NO: 76514 - DNA, 15 bp, Homo sapiens
gtggtaattgcaata

SEQ ID NO: 76515 - DNA, 15 bp, Homo sapiens
tgtggtaattgcaat

SEQ ID NO: 76516 - DNA, 15 bp, Homo sapiens
atgtggtaattgcaa

SEQ ID NO: 76517 - DNA, 15 bp, Homo sapiens
aatgtggtaattgca

SEQ ID NO: 76518 - DNA, 15 bp, Homo sapiens
gaatgtggtaattgc

SEQ ID NO: 76519 - DNA, 15 bp, Homo sapiens
agaatgtggtaattg

SEQ ID NO: 76520 - DNA, 15 bp, Homo sapiens
cagaatgtggtaatt

SEQ ID NO: 76521 - DNA, 15 bp, Homo sapiens
tcagaatgtggtaat

SEQ ID NO: 76522 - DNA, 15 bp, Homo sapiens
atcagaatgtggtaa

SEQ ID NO: 76523 - DNA, 15 bp, Homo sapiens
catcagaatgtggta

SEQ ID NO: 76524 - DNA, 15 bp, Homo sapiens
tcatcagaatgtggt

SEQ ID NO: 76525 - DNA, 15 bp, Homo sapiens
ctcatcagaatgtgg

SEQ ID NO: 76526 - DNA, 15 bp, Homo sapiens
cctcatcagaatgtg

SEQ ID NO: 76527 - DNA, 15 bp, Homo sapiens
tcctcatcagaatgt

SEQ ID NO: 76528 - DNA, 15 bp, Homo sapiens
ttcctcatcagaatg

SEQ ID NO: 76529 - DNA, 15 bp, Homo sapiens
tttcctcatcagaat

SEQ ID NO: 76530 - DNA, 15 bp, Homo sapiens
gtttcctcatcagaa

SEQ ID NO: 76531 - DNA, 15 bp, Homo sapiens
agtttcctcatcaga

SEQ ID NO: 76532 - DNA, 15 bp, Homo sapiens
cagtttcctcatcag

SEQ ID NO: 76533 - DNA, 15 bp, Homo sapiens
tcagtttcctcatca

SEQ ID NO: 76534 - DNA, 15 bp, Homo sapiens
ctcagtttcctcatc

SEQ ID NO: 76535 - DNA, 15 bp, Homo sapiens
cctcagtttcctcat

SEQ ID NO: 76536 - DNA, 15 bp, Homo sapiens
gcctcagtttcctca

SEQ ID NO: 76537 - DNA, 15 bp, Homo sapiens
agcctcagtttcctc

SEQ ID NO: 76538 - DNA, 15 bp, Homo sapiens
gagcctcagtttcct

SEQ ID NO: 76539 - DNA, 15 bp, Homo sapiens
tgagcctcagtttcc

SEQ ID NO: 76540 - DNA, 15 bp, Homo sapiens
ctgagcctcagtttc

SEQ ID NO: 76541 - DNA, 15 bp, Homo sapiens
tctgagcctcagttt

SEQ ID NO: 76542 - DNA, 15 bp, Homo sapiens
ctctgagcctcagtt

SEQ ID NO: 76543 - DNA, 15 bp, Homo sapiens
tctctgagcctcagt

SEQ ID NO: 76544 - DNA, 15 bp, Homo sapiens
ttctctgagcctcag

SEQ ID NO: 76545 - DNA, 15 bp, Homo sapiens
cttctctgagcctca

SEQ ID NO: 76546 - DNA, 15 bp, Homo sapiens
acttctctgagcctc

SEQ ID NO: 76547 - DNA, 15 bp, Homo sapiens
aacttctctgagcct

SEQ ID NO: 76548 - DNA, 15 bp, Homo sapiens
taacttctctgagcc

SEQ ID NO: 76549 - DNA, 15 bp, Homo sapiens
ttaacttctctgagc

SEQ ID NO: 76550 - DNA, 15 bp, Homo sapiens
tttaacttctctgag

SEQ ID NO: 76551 - DNA, 15 bp, Homo sapiens
atttaacttctctga

SEQ ID NO: 76552 - DNA, 15 bp, Homo sapiens
gatttaacttctctg

SEQ ID NO: 76553 - DNA, 15 bp, Homo sapiens
tgatttaacttctct

SEQ ID NO: 76554 - DNA, 15 bp, Homo sapiens
atgatttaacttctc

SEQ ID NO: 76555 - DNA, 15 bp, Homo sapiens
aatgatttaacttct

SEQ ID NO: 76556 - DNA, 15 bp, Homo sapiens
gaatgatttaacttc

SEQ ID NO: 76557 - DNA, 15 bp, Homo sapiens
tgaatgatttaactt

SEQ ID NO: 76558 - DNA, 15 bp, Homo sapiens
gtgaatgatttaact

SEQ ID NO: 76559 - DNA, 15 bp, Homo sapiens
agtgaatgatttaac

SEQ ID NO: 76560 - DNA, 15 bp, Homo sapiens
gagtgaatgatttaa

SEQ ID NO: 76561 - DNA, 15 bp, Homo sapiens
ggagtgaatgattta

SEQ ID NO: 76562 - DNA, 15 bp, Homo sapiens
tggagtgaatgattt

SEQ ID NO: 76563 - DNA, 15 bp, Homo sapiens
ctggagtgaatgatt

SEQ ID NO: 76564 - DNA, 15 bp, Homo sapiens
cctggagtgaatgat

SEQ ID NO: 76565 - DNA, 15 bp, Homo sapiens
gcctggagtgaatga

SEQ ID NO: 76566 - DNA, 15 bp, Homo sapiens
ggcctggagtgaatg

SEQ ID NO: 76567 - DNA, 15 bp, Homo sapiens
tggcctggagtgaat

SEQ ID NO: 76568 - DNA, 15 bp, Homo sapiens
atggcctggagtgaa

SEQ ID NO: 76569 - DNA, 15 bp, Homo sapiens
tatggcctggagtga

SEQ ID NO: 76570 - DNA, 15 bp, Homo sapiens
gtatggcctggagtg

SEQ ID NO: 76571 - DNA, 15 bp, Homo sapiens
tgtatggcctggagt

SEQ ID NO: 76572 - DNA, 15 bp, Homo sapiens
atgtatggcctggag

SEQ ID NO: 76573 - DNA, 15 bp, Homo sapiens
gatgtatggcctgga

SEQ ID NO: 76574 - DNA, 15 bp, Homo sapiens
agatgtatggcctgg

SEQ ID NO: 76575 - DNA, 15 bp, Homo sapiens
cagatgtatggcctg

SEQ ID NO: 76576 - DNA, 15 bp, Homo sapiens
gcagatgtatggcct

SEQ ID NO: 76577 - DNA, 15 bp, Homo sapiens
agcagatgtatggcc

SEQ ID NO: 76578 - DNA, 15 bp, Homo sapiens
tagcagatgtatggc

SEQ ID NO: 76579 - DNA, 15 bp, Homo sapiens
ttagcagatgtatgg

SEQ ID NO: 76580 - DNA, 15 bp, Homo sapiens
tttagcagatgtatg

SEQ ID NO: 76581 - DNA, 15 bp, Homo sapiens
atttagcagatgtat

SEQ ID NO: 76582 - DNA, 15 bp, Homo sapiens
catttagcagatgta

SEQ ID NO: 76583 - DNA, 15 bp, Homo sapiens
acatttagcagatgt

SEQ ID NO: 76584 - DNA, 15 bp, Homo sapiens
cacatttagcagatg

SEQ ID NO: 76585 - DNA, 15 bp, Homo sapiens
acacatttagcagat

SEQ ID NO: 76586 - DNA, 15 bp, Homo sapiens
gacacatttagcaga

SEQ ID NO: 76587 - DNA, 15 bp, Homo sapiens
tgacacatttagcag

SEQ ID NO: 76588 - DNA, 15 bp, Homo sapiens
atgacacatttagca

SEQ ID NO: 76589 - DNA, 15 bp, Homo sapiens
catgacacatttagc

SEQ ID NO: 76590 - DNA, 15 bp, Homo sapiens
gcatgacacatttag

SEQ ID NO: 76591 - DNA, 15 bp, Homo sapiens
agcatgacacattta

SEQ ID NO: 76592 - DNA, 15 bp, Homo sapiens
tagcatgacacattt

SEQ ID NO: 76593 - DNA, 15 bp, Homo sapiens
gtagcatgacacatt

SEQ ID NO: 76594 - DNA, 15 bp, Homo sapiens
tgtagcatgacacat

SEQ ID NO: 76595 - DNA, 15 bp, Homo sapiens
atgtagcatgacaca

SEQ ID NO: 76596 - DNA, 15 bp, Homo sapiens
gatgtagcatgacac

SEQ ID NO: 76597 - DNA, 15 bp, Homo sapiens
ggatgtagcatgaca

SEQ ID NO: 76598 - DNA, 15 bp, Homo sapiens
tggatgtagcatgac

SEQ ID NO: 76599 - DNA, 15 bp, Homo sapiens
gtggatgtagcatga

SEQ ID NO: 76600 - DNA, 15 bp, Homo sapiens
agtggatgtagcatg

SEQ ID NO: 76601 - DNA, 15 bp, Homo sapiens
aagtggatgtagcat

SEQ ID NO: 76602 - DNA, 15 bp, Homo sapiens
aaagtggatgtagca

SEQ ID NO: 76603 - DNA, 15 bp, Homo sapiens
caaagtggatgtagc

SEQ ID NO: 76604 - DNA, 15 bp, Homo sapiens
gcaaagtggatgtag

SEQ ID NO: 76605 - DNA, 15 bp, Homo sapiens
tgcaaagtggatgta

SEQ ID NO: 76606 - DNA, 15 bp, Homo sapiens
gtgcaaagtggatgt

SEQ ID NO: 76607 - DNA, 15 bp, Homo sapiens
ggtgcaaagtggatg

SEQ ID NO: 76608 - DNA, 15 bp, Homo sapiens
aggtgcaaagtggat

SEQ ID NO: 76609 - DNA, 15 bp, Homo sapiens
taggtgcaaagtgga

SEQ ID NO: 76610 - DNA, 15 bp, Homo sapiens
ctaggtgcaaagtgg

SEQ ID NO: 76611 - DNA, 15 bp, Homo sapiens
actaggtgcaaagtg

SEQ ID NO: 76612 - DNA, 15 bp, Homo sapiens
aactaggtgcaaagt

SEQ ID NO: 76613 - DNA, 15 bp, Homo sapiens
aaactaggtgcaaag

SEQ ID NO: 76614 - DNA, 15 bp, Homo sapiens
caaactaggtgcaaa

SEQ ID NO: 76615 - DNA, 15 bp, Homo sapiens
tcaaactaggtgcaa

SEQ ID NO: 76616 - DNA, 15 bp, Homo sapiens
ttcaaactaggtgca

SEQ ID NO: 76617 - DNA, 15 bp, Homo sapiens
gttcaaactaggtgc

SEQ ID NO: 76618 - DNA, 15 bp, Homo sapiens
tgttcaaactaggtg

SEQ ID NO: 76619 - DNA, 15 bp, Homo sapiens
ctgttcaaactaggt

SEQ ID NO: 76620 - DNA, 15 bp, Homo sapiens
cctgttcaaactagg

SEQ ID NO: 76621 - DNA, 15 bp, Homo sapiens
acctgttcaaactag

SEQ ID NO: 76622 - DNA, 15 bp, Homo sapiens
aacctgttcaaacta

SEQ ID NO: 76623 - DNA, 15 bp, Homo sapiens
aaacctgttcaaact

SEQ ID NO: 76624 - DNA, 15 bp, Homo sapiens
taaacctgttcaaac

SEQ ID NO: 76625 - DNA, 15 bp, Homo sapiens
gtaaacctgttcaaa

SEQ ID NO: 76626 - DNA, 15 bp, Homo sapiens
tgtaaacctgttcaa

SEQ ID NO: 76627 - DNA, 15 bp, Homo sapiens
ttgtaaacctgttca

SEQ ID NO: 76628 - DNA, 15 bp, Homo sapiens
tttgtaaacctgttc

SEQ ID NO: 76629 - DNA, 15 bp, Homo sapiens
ctttgtaaacctgtt

SEQ ID NO: 76630 - DNA, 15 bp, Homo sapiens
gctttgtaaacctgt

SEQ ID NO: 76631 - DNA, 15 bp, Homo sapiens
tgctttgtaaacctg

SEQ ID NO: 76632 - DNA, 15 bp, Homo sapiens
ttgctttgtaaacct

SEQ ID NO: 76633 - DNA, 15 bp, Homo sapiens
cttgctttgtaaacc

SEQ ID NO: 76634 - DNA, 15 bp, Homo sapiens
acttgctttgtaaac

SEQ ID NO: 76635 - DNA, 15 bp, Homo sapiens
gacttgctttgtaaa

SEQ ID NO: 76636 - DNA, 15 bp, Homo sapiens
tgacttgctttgtaa

SEQ ID NO: 76637 - DNA, 15 bp, Homo sapiens
ctgacttgctttgta

SEQ ID NO: 76638 - DNA, 15 bp, Homo sapiens
actgacttgctttgt

SEQ ID NO: 76639 - DNA, 15 bp, Homo sapiens
tactgacttgctttg

SEQ ID NO: 76640 - DNA, 15 bp, Homo sapiens
ttactgacttgcttt

SEQ ID NO: 76641 - DNA, 15 bp, Homo sapiens
gttactgacttgctt

SEQ ID NO: 76642 - DNA, 15 bp, Homo sapiens
ggttactgacttgct

SEQ ID NO: 76643 - DNA, 15 bp, Homo sapiens
gggttactgacttgc

SEQ ID NO: 76644 - DNA, 15 bp, Homo sapiens
ggggttactgacttg

SEQ ID NO: 76645 - DNA, 15 bp, Homo sapiens
aggggttactgactt

SEQ ID NO: 76646 - DNA, 15 bp, Homo sapiens
caggggttactgact

SEQ ID NO: 76647 - DNA, 15 bp, Homo sapiens
gcaggggttactgac

SEQ ID NO: 76648 - DNA, 15 bp, Homo sapiens
tgcaggggttactga

SEQ ID NO: 76649 - DNA, 15 bp, Homo sapiens
atgcaggggttactg

SEQ ID NO: 76650 - DNA, 15 bp, Homo sapiens
catgcaggggttact

SEQ ID NO: 76651 - DNA, 15 bp, Homo sapiens
gcatgcaggggttac

SEQ ID NO: 76652 - DNA, 15 bp, Homo sapiens
ggcatgcaggggtta

SEQ ID NO: 76653 - DNA, 15 bp, Homo sapiens
aggcatgcaggggtt

SEQ ID NO: 76654 - DNA, 15 bp, Homo sapiens
caggcatgcaggggt

SEQ ID NO: 76655 - DNA, 15 bp, Homo sapiens
ccaggcatgcagggg

SEQ ID NO: 76656 - DNA, 15 bp, Homo sapiens
cccaggcatgcaggg

SEQ ID NO: 76657 - DNA, 15 bp, Homo sapiens
acccaggcatgcagg

SEQ ID NO: 76658 - DNA, 15 bp, Homo sapiens
cacccaggcatgcag

SEQ ID NO: 76659 - DNA, 15 bp, Homo sapiens
gcacccaggcatgca

SEQ ID NO: 76660 - DNA, 15 bp, Homo sapiens
ggcacccaggcatgc

SEQ ID NO: 76661 - DNA, 15 bp, Homo sapiens
aggcacccaggcatg

SEQ ID NO: 76662 - DNA, 15 bp, Homo sapiens
caggcacccaggcat

SEQ ID NO: 76663 - DNA, 15 bp, Homo sapiens
tcaggcacccaggca

SEQ ID NO: 76664 - DNA, 15 bp, Homo sapiens
ttcaggcacccaggc

SEQ ID NO: 76665 - DNA, 15 bp, Homo sapiens
cttcaggcacccagg

SEQ ID NO: 76666 - DNA, 15 bp, Homo sapiens
acttcaggcacccag

SEQ ID NO: 76667 - DNA, 15 bp, Homo sapiens
aacttcaggcaccca

SEQ ID NO: 76668 - DNA, 15 bp, Homo sapiens
caacttcaggcaccc

SEQ ID NO: 76669 - DNA, 15 bp, Homo sapiens
tcaacttcaggcacc

SEQ ID NO: 76670 - DNA, 15 bp, Homo sapiens
ttcaacttcaggcac

SEQ ID NO: 76671 - DNA, 15 bp, Homo sapiens
tttcaacttcaggca

SEQ ID NO: 76672 - DNA, 15 bp, Homo sapiens
ttttcaacttcaggc

SEQ ID NO: 76673 - DNA, 15 bp, Homo sapiens
cttttcaacttcagg

SEQ ID NO: 76674 - DNA, 15 bp, Homo sapiens
ccttttcaacttcag

SEQ ID NO: 76675 - DNA, 15 bp, Homo sapiens
cccttttcaacttca

SEQ ID NO: 76676 - DNA, 15 bp, Homo sapiens
ccccttttcaacttc

SEQ ID NO: 76677 - DNA, 15 bp, Homo sapiens
accccttttcaactt

SEQ ID NO: 76678 - DNA, 15 bp, Homo sapiens
caccccttttcaact

SEQ ID NO: 76679 - DNA, 15 bp, Homo sapiens
ccaccccttttcaac

SEQ ID NO: 76680 - DNA, 15 bp, Homo sapiens
gccaccccttttcaa

SEQ ID NO: 76681 - DNA, 15 bp, Homo sapiens
agccaccccttttca

SEQ ID NO: 76682 - DNA, 15 bp, Homo sapiens
gagccaccccttttc

SEQ ID NO: 76683 - DNA, 15 bp, Homo sapiens
agagccacccctttt

SEQ ID NO: 76684 - DNA, 15 bp, Homo sapiens
tagagccaccccttt

SEQ ID NO: 76685 - DNA, 15 bp, Homo sapiens
ttagagccacccctt

SEQ ID NO: 76686 - DNA, 15 bp, Homo sapiens
cttagagccacccct

SEQ ID NO: 76687 - DNA, 15 bp, Homo sapiens
tcttagagccacccc

SEQ ID NO: 76688 - DNA, 15 bp, Homo sapiens
atcttagagccaccc

SEQ ID NO: 76689 - DNA, 15 bp, Homo sapiens
catcttagagccacc

SEQ ID NO: 76690 - DNA, 15 bp, Homo sapiens
acatcttagagccac

SEQ ID NO: 76691 - DNA, 15 bp, Homo sapiens
cacatcttagagcca

SEQ ID NO: 76692 - DNA, 15 bp, Homo sapiens
ccacatcttagagcc

SEQ ID NO: 76693 - DNA, 15 bp, Homo sapiens
accacatcttagagc

SEQ ID NO: 76694 - DNA, 15 bp, Homo sapiens
gaccacatcttagag

SEQ ID NO: 76695 - DNA, 15 bp, Homo sapiens
agaccacatcttaga

SEQ ID NO: 76696 - DNA, 15 bp, Homo sapiens
tagaccacatcttag

SEQ ID NO: 76697 - DNA, 15 bp, Homo sapiens
gtagaccacatctta

SEQ ID NO: 76698 - DNA, 15 bp, Homo sapiens
agtagaccacatctt

SEQ ID NO: 76699 - DNA, 15 bp, Homo sapiens
tagtagaccacatct

SEQ ID NO: 76700 - DNA, 15 bp, Homo sapiens
gtagtagaccacatc

SEQ ID NO: 76701 - DNA, 15 bp, Homo sapiens
ggtagtagaccacat

SEQ ID NO: 76702 - DNA, 15 bp, Homo sapiens
aggtagtagaccaca

SEQ ID NO: 76703 - DNA, 15 bp, Homo sapiens
gaggtagtagaccac

SEQ ID NO: 76704 - DNA, 15 bp, Homo sapiens
agaggtagtagacca

SEQ ID NO: 76705 - DNA, 15 bp, Homo sapiens
gagaggtagtagacc

SEQ ID NO: 76706 - DNA, 15 bp, Homo sapiens
ggagaggtagtagac

SEQ ID NO: 76707 - DNA, 15 bp, Homo sapiens
aggagaggtagtaga

SEQ ID NO: 76708 - DNA, 15 bp, Homo sapiens
caggagaggtagtag

SEQ ID NO: 76709 - DNA, 15 bp, Homo sapiens
ccaggagaggtagta

SEQ ID NO: 76710 - DNA, 15 bp, Homo sapiens
tccaggagaggtagt

SEQ ID NO: 76711 - DNA, 15 bp, Homo sapiens
gtccaggagaggtag

SEQ ID NO: 76712 - DNA, 15 bp, Homo sapiens
agtccaggagaggta

SEQ ID NO: 76713 - DNA, 15 bp, Homo sapiens
cagtccaggagaggt

SEQ ID NO: 76714 - DNA, 15 bp, Homo sapiens
acagtccaggagagg

SEQ ID NO: 76715 - DNA, 15 bp, Homo sapiens
aacagtccaggagag

SEQ ID NO: 76716 - DNA, 15 bp, Homo sapiens
caacagtccaggaga

SEQ ID NO: 76717 - DNA, 15 bp, Homo sapiens
gcaacagtccaggag

SEQ ID NO: 76718 - DNA, 15 bp, Homo sapiens
tgcaacagtccagga

SEQ ID NO: 76719 - DNA, 15 bp, Homo sapiens
ctgcaacagtccagg

SEQ ID NO: 76720 - DNA, 15 bp, Homo sapiens
actgcaacagtccag

SEQ ID NO: 76721 - DNA, 15 bp, Homo sapiens
aactgcaacagtcca

SEQ ID NO: 76722 - DNA, 15 bp, Homo sapiens
caactgcaacagtcc

SEQ ID NO: 76723 - DNA, 15 bp, Homo sapiens
ccaactgcaacagtc

SEQ ID NO: 76724 - DNA, 15 bp, Homo sapiens
cccaactgcaacagt

SEQ ID NO: 76725 - DNA, 15 bp, Homo sapiens
acccaactgcaacag

SEQ ID NO: 76726 - DNA, 15 bp, Homo sapiens
cacccaactgcaaca

SEQ ID NO: 76727 - DNA, 15 bp, Homo sapiens
acacccaactgcaac

SEQ ID NO: 76728 - DNA, 15 bp, Homo sapiens
cacacccaactgcaa

SEQ ID NO: 76729 - DNA, 15 bp, Homo sapiens
ccacacccaactgca

SEQ ID NO: 76730 - DNA, 15 bp, Homo sapiens
gccacacccaactgc

SEQ ID NO: 76731 - DNA, 15 bp, Homo sapiens
agccacacccaactg

SEQ ID NO: 76732 - DNA, 15 bp, Homo sapiens
cagccacacccaact

SEQ ID NO: 76733 - DNA, 15 bp, Homo sapiens
tcagccacacccaac

SEQ ID NO: 76734 - DNA, 15 bp, Homo sapiens
atcagccacacccaa

SEQ ID NO: 76735 - DNA, 15 bp, Homo sapiens
aatcagccacaccca

SEQ ID NO: 76736 - DNA, 15 bp, Homo sapiens
aaatcagccacaccc

SEQ ID NO: 76737 - DNA, 15 bp, Homo sapiens
caaatcagccacacc

SEQ ID NO: 76738 - DNA, 15 bp, Homo sapiens
tcaaatcagccacac

SEQ ID NO: 76739 - DNA, 15 bp, Homo sapiens
ttcaaatcagccaca

SEQ ID NO: 76740 - DNA, 15 bp, Homo sapiens
tttcaaatcagccac

SEQ ID NO: 76741 - DNA, 15 bp, Homo sapiens
atttcaaatcagcca

SEQ ID NO: 76742 - DNA, 15 bp, Homo sapiens
aatttcaaatcagcc

SEQ ID NO: 76743 - DNA, 15 bp, Homo sapiens
caatttcaaatcagc

SEQ ID NO: 76744 - DNA, 15 bp, Homo sapiens
acaatttcaaatcag

SEQ ID NO: 76745 - DNA, 15 bp, Homo sapiens
cacaatttcaaatca

SEQ ID NO: 76746 - DNA, 15 bp, Homo sapiens
gcacaatttcaaatc

SEQ ID NO: 76747 - DNA, 15 bp, Homo sapiens
agcacaatttcaaat

SEQ ID NO: 76748 - DNA, 15 bp, Homo sapiens
aagcacaatttcaaa

SEQ ID NO: 76749 - DNA, 15 bp, Homo sapiens
gaagcacaatttcaa

SEQ ID NO: 76750 - DNA, 15 bp, Homo sapiens
tgaagcacaatttca

SEQ ID NO: 76751 - DNA, 15 bp, Homo sapiens
ttgaagcacaatttc

SEQ ID NO: 76752 - DNA, 15 bp, Homo sapiens
tttgaagcacaattt

SEQ ID NO: 76753 - DNA, 15 bp, Homo sapiens
ttttgaagcacaatt

SEQ ID NO: 76754 - DNA, 15 bp, Homo sapiens
cttttgaagcacaat

SEQ ID NO: 76755 - DNA, 15 bp, Homo sapiens
tcttttgaagcacaa

SEQ ID NO: 76756 - DNA, 15 bp, Homo sapiens
ttcttttgaagcaca

SEQ ID NO: 76757 - DNA, 15 bp, Homo sapiens
attcttttgaagcac

SEQ ID NO: 76758 - DNA, 15 bp, Homo sapiens
cattcttttgaagca

SEQ ID NO: 76759 - DNA, 15 bp, Homo sapiens
tcattcttttgaagc

SEQ ID NO: 76760 - DNA, 15 bp, Homo sapiens
ctcattcttttgaag

SEQ ID NO: 76761 - DNA, 15 bp, Homo sapiens
actcattcttttgaa

SEQ ID NO: 76762 - DNA, 15 bp, Homo sapiens
aactcattcttttga

SEQ ID NO: 76763 - DNA, 15 bp, Homo sapiens
gaactcattcttttg

SEQ ID NO: 76764 - DNA, 15 bp, Homo sapiens
agaactcattctttt

SEQ ID NO: 76765 - DNA, 15 bp, Homo sapiens
tagaactcattcttt

SEQ ID NO: 76766 - DNA, 15 bp, Homo sapiens
ctagaactcattctt

SEQ ID NO: 76767 - DNA, 15 bp, Homo sapiens
actagaactcattct

SEQ ID NO: 76768 - DNA, 15 bp, Homo sapiens
gactagaactcattc

SEQ ID NO: 76769 - DNA, 15 bp, Homo sapiens
ggactagaactcatt

SEQ ID NO: 76770 - DNA, 15 bp, Homo sapiens
gggactagaactcat

SEQ ID NO: 76771 - DNA, 15 bp, Homo sapiens
agggactagaactca

SEQ ID NO: 76772 - DNA, 15 bp, Homo sapiens
cagggactagaactc

SEQ ID NO: 76773 - DNA, 15 bp, Homo sapiens
tcagggactagaact

SEQ ID NO: 76774 - DNA, 15 bp, Homo sapiens
ttcagggactagaac

SEQ ID NO: 76775 - DNA, 15 bp, Homo sapiens
attcagggactagaa

SEQ ID NO: 76776 - DNA, 15 bp, Homo sapiens
tattcagggactaga

SEQ ID NO: 76777 - DNA, 15 bp, Homo sapiens
ctattcagggactag

SEQ ID NO: 76778 - DNA, 15 bp, Homo sapiens
tctattcagggacta

SEQ ID NO: 76779 - DNA, 15 bp, Homo sapiens
ctctattcagggact

SEQ ID NO: 76780 - DNA, 15 bp, Homo sapiens
cctctattcagggac

SEQ ID NO: 76781 - DNA, 15 bp, Homo sapiens
tcctctattcaggga

SEQ ID NO: 76782 - DNA, 15 bp, Homo sapiens
ctcctctattcaggg

SEQ ID NO: 76783 - DNA, 15 bp, Homo sapiens
gctcctctattcagg

SEQ ID NO: 76784 - DNA, 15 bp, Homo sapiens
agctcctctattcag

SEQ ID NO: 76785 - DNA, 15 bp, Homo sapiens
gagctcctctattca

SEQ ID NO: 76786 - DNA, 15 bp, Homo sapiens
tgagctcctctattc

SEQ ID NO: 76787 - DNA, 15 bp, Homo sapiens
gtgagctcctctatt

SEQ ID NO: 76788 - DNA, 15 bp, Homo sapiens
tgtgagctcctctat

SEQ ID NO: 76789 - DNA, 15 bp, Homo sapiens
gtgtgagctcctcta

SEQ ID NO: 76790 - DNA, 15 bp, Homo sapiens
ggtgtgagctcctct

SEQ ID NO: 76791 - DNA, 15 bp, Homo sapiens
tggtgtgagctcctc

SEQ ID NO: 76792 - DNA, 15 bp, Homo sapiens
gtggtgtgagctcct

SEQ ID NO: 76793 - DNA, 15 bp, Homo sapiens
tgtggtgtgagctcc

SEQ ID NO: 76794 - DNA, 15 bp, Homo sapiens
ctgtggtgtgagctc

SEQ ID NO: 76795 - DNA, 15 bp, Homo sapiens
actgtggtgtgagct

SEQ ID NO: 76796 - DNA, 15 bp, Homo sapiens
cactgtggtgtgagc

SEQ ID NO: 76797 - DNA, 15 bp, Homo sapiens
gcactgtggtgtgag

SEQ ID NO: 76798 - DNA, 15 bp, Homo sapiens
tgcactgtggtgtga

SEQ ID NO: 76799 - DNA, 15 bp, Homo sapiens
gtgcactgtggtgtg

SEQ ID NO: 76800 - DNA, 15 bp, Homo sapiens
agtgcactgtggtgt

SEQ ID NO: 76801 - DNA, 15 bp, Homo sapiens
cagtgcactgtggtg

SEQ ID NO: 76802 - DNA, 15 bp, Homo sapiens
acagtgcactgtggt

SEQ ID NO: 76803 - DNA, 15 bp, Homo sapiens
tacagtgcactgtgg

SEQ ID NO: 76804 - DNA, 15 bp, Homo sapiens
ctacagtgcactgtg

SEQ ID NO: 76805 - DNA, 15 bp, Homo sapiens
tctacagtgcactgt

SEQ ID NO: 76806 - DNA, 15 bp, Homo sapiens
atctacagtgcactg

SEQ ID NO: 76807 - DNA, 15 bp, Homo sapiens
gatctacagtgcact

SEQ ID NO: 76808 - DNA, 15 bp, Homo sapiens
agatctacagtgcac

SEQ ID NO: 76809 - DNA, 15 bp, Homo sapiens
aagatctacagtgca

SEQ ID NO: 76810 - DNA, 15 bp, Homo sapiens
aaagatctacagtgc

SEQ ID NO: 76811 - DNA, 15 bp, Homo sapiens
caaagatctacagtg

SEQ ID NO: 76812 - DNA, 15 bp, Homo sapiens
acaaagatctacagt

SEQ ID NO: 76813 - DNA, 15 bp, Homo sapiens
cacaaagatctacag

SEQ ID NO: 76814 - DNA, 15 bp, Homo sapiens
tcacaaagatctaca

SEQ ID NO: 76815 - DNA, 15 bp, Homo sapiens
atcacaaagatctac

SEQ ID NO: 76816 - DNA, 15 bp, Homo sapiens
gatcacaaagatcta

SEQ ID NO: 76817 - DNA, 15 bp, Homo sapiens
ggatcacaaagatct

SEQ ID NO: 76818 - DNA, 15 bp, Homo sapiens
tggatcacaaagatc

SEQ ID NO: 76819 - DNA, 15 bp, Homo sapiens
ctggatcacaaagat

SEQ ID NO: 76820 - DNA, 15 bp, Homo sapiens
tctggatcacaaaga

SEQ ID NO: 76821 - DNA, 15 bp, Homo sapiens
ttctggatcacaaag

SEQ ID NO: 76822 - DNA, 15 bp, Homo sapiens
cttctggatcacaaa

SEQ ID NO: 76823 - DNA, 15 bp, Homo sapiens
acttctggatcacaa

SEQ ID NO: 76824 - DNA, 15 bp, Homo sapiens
gacttctggatcaca

SEQ ID NO: 76825 - DNA, 15 bp, Homo sapiens
ggacttctggatcac

SEQ ID NO: 76826 - DNA, 15 bp, Homo sapiens
aggacttctggatca

SEQ ID NO: 76827 - DNA, 15 bp, Homo sapiens
gaggacttctggatc

SEQ ID NO: 76828 - DNA, 15 bp, Homo sapiens
ggaggacttctggat

SEQ ID NO: 76829 - DNA, 15 bp, Homo sapiens
tggaggacttctgga

SEQ ID NO: 76830 - DNA, 15 bp, Homo sapiens
ctggaggacttctgg

SEQ ID NO: 76831 - DNA, 15 bp, Homo sapiens
tctggaggacttctg

SEQ ID NO: 76832 - DNA, 15 bp, Homo sapiens
atctggaggacttct

SEQ ID NO: 76833 - DNA, 15 bp, Homo sapiens
catctggaggacttc

SEQ ID NO: 76834 - DNA, 15 bp, Homo sapiens
acatctggaggactt

SEQ ID NO: 76835 - DNA, 15 bp, Homo sapiens
aacatctggaggact

SEQ ID NO: 76836 - DNA, 15 bp, Homo sapiens
gaacatctggaggac

SEQ ID NO: 76837 - DNA, 15 bp, Homo sapiens
ggaacatctggagga

SEQ ID NO: 76838 - DNA, 15 bp, Homo sapiens
gggaacatctggagg

SEQ ID NO: 76839 - DNA, 15 bp, Homo sapiens
tgggaacatctggag

SEQ ID NO: 76840 - DNA, 15 bp, Homo sapiens
ttgggaacatctgga

SEQ ID NO: 76841 - DNA, 15 bp, Homo sapiens
tttgggaacatctgg

SEQ ID NO: 76842 - DNA, 15 bp, Homo sapiens
ttttgggaacatctg

SEQ ID NO: 76843 - DNA, 15 bp, Homo sapiens
cttttgggaacatct

SEQ ID NO: 76844 - DNA, 15 bp, Homo sapiens
ccttttgggaacatc

SEQ ID NO: 76845 - DNA, 15 bp, Homo sapiens
tccttttgggaacat

SEQ ID NO: 76846 - DNA, 15 bp, Homo sapiens
atccttttgggaaca

SEQ ID NO: 76847 - DNA, 15 bp, Homo sapiens
gatccttttgggaac

SEQ ID NO: 76848 - DNA, 15 bp, Homo sapiens
agatccttttgggaa

SEQ ID NO: 76849 - DNA, 15 bp, Homo sapiens
gagatccttttggga

SEQ ID NO: 76850 - DNA, 15 bp, Homo sapiens
agagatccttttggg

SEQ ID NO: 76851 - DNA, 15 bp, Homo sapiens
tagagatccttttgg

SEQ ID NO: 76852 - DNA, 15 bp, Homo sapiens
ttagagatccttttg

SEQ ID NO: 76853 - DNA, 15 bp, Homo sapiens
cttagagatcctttt

SEQ ID NO: 76854 - DNA, 15 bp, Homo sapiens
ccttagagatccttt

SEQ ID NO: 76855 - DNA, 15 bp, Homo sapiens
accttagagatcctt

SEQ ID NO: 76856 - DNA, 15 bp, Homo sapiens
caccttagagatcct

SEQ ID NO: 76857 - DNA, 15 bp, Homo sapiens
acaccttagagatcc

SEQ ID NO: 76858 - DNA, 15 bp, Homo sapiens
aacaccttagagatc

SEQ ID NO: 76859 - DNA, 15 bp, Homo sapiens
caacaccttagagat

SEQ ID NO: 76860 - DNA, 15 bp, Homo sapiens
gcaacaccttagaga

SEQ ID NO: 76861 - DNA, 15 bp, Homo sapiens
agcaacaccttagag

SEQ ID NO: 76862 - DNA, 15 bp, Homo sapiens
cagcaacaccttaga

SEQ ID NO: 76863 - DNA, 15 bp, Homo sapiens
ccagcaacaccttag

SEQ ID NO: 76864 - DNA, 15 bp, Homo sapiens
cccagcaacacctta

SEQ ID NO: 76865 - DNA, 15 bp, Homo sapiens
ccccagcaacacctt

SEQ ID NO: 76866 - DNA, 15 bp, Homo sapiens
tccccagcaacacct

SEQ ID NO: 76867 - DNA, 15 bp, Homo sapiens
atccccagcaacacc

SEQ ID NO: 76868 - DNA, 15 bp, Homo sapiens
catccccagcaacac

SEQ ID NO: 76869 - DNA, 15 bp, Homo sapiens
acatccccagcaaca

SEQ ID NO: 76870 - DNA, 15 bp, Homo sapiens
aacatccccagcaac

SEQ ID NO: 76871 - DNA, 15 bp, Homo sapiens
caacatccccagcaa

SEQ ID NO: 76872 - DNA, 15 bp, Homo sapiens
acaacatccccagca

SEQ ID NO: 76873 - DNA, 15 bp, Homo sapiens
cacaacatccccagc

SEQ ID NO: 76874 - DNA, 15 bp, Homo sapiens
acacaacatccccag

SEQ ID NO: 76875 - DNA, 15 bp, Homo sapiens
cacacaacatcccca

SEQ ID NO: 76876 - DNA, 15 bp, Homo sapiens
acacacaacatcccc

SEQ ID NO: 76877 - DNA, 15 bp, Homo sapiens
tacacacaacatccc

SEQ ID NO: 76878 - DNA, 15 bp, Homo sapiens
atacacacaacatcc

SEQ ID NO: 76879 - DNA, 15 bp, Homo sapiens
tatacacacaacatc

SEQ ID NO: 76880 - DNA, 15 bp, Homo sapiens
ctatacacacaacat

SEQ ID NO: 76881 - DNA, 15 bp, Homo sapiens
cctatacacacaaca

SEQ ID NO: 76882 - DNA, 15 bp, Homo sapiens
ccctatacacacaac

SEQ ID NO: 76883 - DNA, 15 bp, Homo sapiens
tccctatacacacaa

SEQ ID NO: 76884 - DNA, 15 bp, Homo sapiens
ctccctatacacaca

SEQ ID NO: 76885 - DNA, 15 bp, Homo sapiens
actccctatacacac

SEQ ID NO: 76886 - DNA, 15 bp, Homo sapiens
cactccctatacaca

SEQ ID NO: 76887 - DNA, 15 bp, Homo sapiens
acactccctatacac

SEQ ID NO: 76888 - DNA, 15 bp, Homo sapiens
aacactccctataca

SEQ ID NO: 76889 - DNA, 15 bp, Homo sapiens
gaacactccctatac

SEQ ID NO: 76890 - DNA, 15 bp, Homo sapiens
ggaacactccctata

SEQ ID NO: 76891 - DNA, 15 bp, Homo sapiens
gggaacactccctat

SEQ ID NO: 76892 - DNA, 15 bp, Homo sapiens
agggaacactcccta

SEQ ID NO: 76893 - DNA, 15 bp, Homo sapiens
aagggaacactccct

SEQ ID NO: 76894 - DNA, 15 bp, Homo sapiens
caagggaacactccc

SEQ ID NO: 76895 - DNA, 15 bp, Homo sapiens
ccaagggaacactcc

SEQ ID NO: 76896 - DNA, 15 bp, Homo sapiens
cccaagggaacactc

SEQ ID NO: 76897 - DNA, 15 bp, Homo sapiens
ccccaagggaacact

SEQ ID NO: 76898 - DNA, 15 bp, Homo sapiens
cccccaagggaacac

SEQ ID NO: 76899 - DNA, 15 bp, Homo sapiens
gcccccaagggaaca

SEQ ID NO: 76900 - DNA, 15 bp, Homo sapiens
ggcccccaagggaac

SEQ ID NO: 76901 - DNA, 15 bp, Homo sapiens
aggcccccaagggaa

SEQ ID NO: 76902 - DNA, 15 bp, Homo sapiens
gaggcccccaaggga

SEQ ID NO: 76903 - DNA, 15 bp, Homo sapiens
agaggcccccaaggg

SEQ ID NO: 76904 - DNA, 15 bp, Homo sapiens
cagaggcccccaagg

SEQ ID NO: 76905 - DNA, 15 bp, Homo sapiens
tcagaggcccccaag

SEQ ID NO: 76906 - DNA, 15 bp, Homo sapiens
ctcagaggcccccaa

SEQ ID NO: 76907 - DNA, 15 bp, Homo sapiens
gctcagaggccccca

SEQ ID NO: 76908 - DNA, 15 bp, Homo sapiens
ggctcagaggccccc

SEQ ID NO: 76909 - DNA, 15 bp, Homo sapiens
gggctcagaggcccc

SEQ ID NO: 76910 - DNA, 15 bp, Homo sapiens
agggctcagaggccc

SEQ ID NO: 76911 - DNA, 15 bp, Homo sapiens
gagggctcagaggcc

SEQ ID NO: 76912 - DNA, 15 bp, Homo sapiens
ggagggctcagaggc

SEQ ID NO: 76913 - DNA, 15 bp, Homo sapiens
aggagggctcagagg

SEQ ID NO: 76914 - DNA, 15 bp, Homo sapiens
caggagggctcagag

SEQ ID NO: 76915 - DNA, 15 bp, Homo sapiens
ccaggagggctcaga

SEQ ID NO: 76916 - DNA, 15 bp, Homo sapiens
gccaggagggctcag

SEQ ID NO: 76917 - DNA, 15 bp, Homo sapiens
tgccaggagggctca

SEQ ID NO: 76918 - DNA, 15 bp, Homo sapiens
ctgccaggagggctc

SEQ ID NO: 76919 - DNA, 15 bp, Homo sapiens
tctgccaggagggct

SEQ ID NO: 76920 - DNA, 15 bp, Homo sapiens
ctctgccaggagggc

SEQ ID NO: 76921 - DNA, 15 bp, Homo sapiens
tctctgccaggaggg

SEQ ID NO: 76922 - DNA, 15 bp, Homo sapiens
ttctctgccaggagg

SEQ ID NO: 76923 - DNA, 15 bp, Homo sapiens
cttctctgccaggag

SEQ ID NO: 76924 - DNA, 15 bp, Homo sapiens
gcttctctgccagga

SEQ ID NO: 76925 - DNA, 15 bp, Homo sapiens
ggcttctctgccagg

SEQ ID NO: 76926 - DNA, 15 bp, Homo sapiens
aggcttctctgccag

SEQ ID NO: 76927 - DNA, 15 bp, Homo sapiens
gaggcttctctgcca

SEQ ID NO: 76928 - DNA, 15 bp, Homo sapiens
tgaggcttctctgcc

SEQ ID NO: 76929 - DNA, 15 bp, Homo sapiens
atgaggcttctctgc

SEQ ID NO: 76930 - DNA, 15 bp, Homo sapiens
tatgaggcttctctg

SEQ ID NO: 76931 - DNA, 15 bp, Homo sapiens
ctatgaggcttctct

SEQ ID NO: 76932 - DNA, 15 bp, Homo sapiens
tctatgaggcttctc

SEQ ID NO: 76933 - DNA, 15 bp, Homo sapiens
atctatgaggcttct

SEQ ID NO: 76934 - DNA, 15 bp, Homo sapiens
tatctatgaggcttc

SEQ ID NO: 76935 - DNA, 15 bp, Homo sapiens
ttatctatgaggctt

SEQ ID NO: 76936 - DNA, 15 bp, Homo sapiens
attatctatgaggct

SEQ ID NO: 76937 - DNA, 15 bp, Homo sapiens
cattatctatgaggc

SEQ ID NO: 76938 - DNA, 15 bp, Homo sapiens
ccattatctatgagg

SEQ ID NO: 76939 - DNA, 15 bp, Homo sapiens
gccattatctatgag

SEQ ID NO: 76940 - DNA, 15 bp, Homo sapiens
tgccattatctatga

SEQ ID NO: 76941 - DNA, 15 bp, Homo sapiens
atgccattatctatg

SEQ ID NO: 76942 - DNA, 15 bp, Homo sapiens
gatgccattatctat

SEQ ID NO: 76943 - DNA, 15 bp, Homo sapiens
ggatgccattatcta

SEQ ID NO: 76944 - DNA, 15 bp, Homo sapiens
gggatgccattatct

SEQ ID NO: 76945 - DNA, 15 bp, Homo sapiens
ggggatgccattatc

SEQ ID NO: 76946 - DNA, 15 bp, Homo sapiens
tggggatgccattat

SEQ ID NO: 76947 - DNA, 15 bp, Homo sapiens
ctggggatgccatta

SEQ ID NO: 76948 - DNA, 15 bp, Homo sapiens
tctggggatgccatt

SEQ ID NO: 76949 - DNA, 15 bp, Homo sapiens
ttctggggatgccat

SEQ ID NO: 76950 - DNA, 15 bp, Homo sapiens
tttctggggatgcca

SEQ ID NO: 76951 - DNA, 15 bp, Homo sapiens
ttttctggggatgcc

SEQ ID NO: 76952 - DNA, 15 bp, Homo sapiens
gttttctggggatgc

SEQ ID NO: 76953 - DNA, 15 bp, Homo sapiens
agttttctggggatg

SEQ ID NO: 76954 - DNA, 15 bp, Homo sapiens
gagttttctggggat

SEQ ID NO: 76955 - DNA, 15 bp, Homo sapiens
agagttttctgggga

SEQ ID NO: 76956 - DNA, 15 bp, Homo sapiens
tagagttttctgggg

SEQ ID NO: 76957 - DNA, 15 bp, Homo sapiens
gtagagttttctggg

SEQ ID NO: 76958 - DNA, 15 bp, Homo sapiens
tgtagagttttctgg

SEQ ID NO: 76959 - DNA, 15 bp, Homo sapiens
gtgtagagttttctg

SEQ ID NO: 76960 - DNA, 15 bp, Homo sapiens
agtgtagagttttct

SEQ ID NO: 76961 - DNA, 15 bp, Homo sapiens
aagtgtagagttttc

SEQ ID NO: 76962 - DNA, 15 bp, Homo sapiens
caagtgtagagtttt

SEQ ID NO: 76963 - DNA, 15 bp, Homo sapiens
ccaagtgtagagttt

SEQ ID NO: 76964 - DNA, 15 bp, Homo sapiens
tccaagtgtagagtt

SEQ ID NO: 76965 - DNA, 15 bp, Homo sapiens
ttccaagtgtagagt

SEQ ID NO: 76966 - DNA, 15 bp, Homo sapiens
attccaagtgtagag

SEQ ID NO: 76967 - DNA, 15 bp, Homo sapiens
cattccaagtgtaga

SEQ ID NO: 76968 - DNA, 15 bp, Homo sapiens
ccattccaagtgtag

SEQ ID NO: 76969 - DNA, 15 bp, Homo sapiens
cccattccaagtgta

SEQ ID NO: 76970 - DNA, 15 bp, Homo sapiens
tcccattccaagtgt

SEQ ID NO: 76971 - DNA, 15 bp, Homo sapiens
gtcccattccaagtg

SEQ ID NO: 76972 - DNA, 15 bp, Homo sapiens
ggtcccattccaagt

SEQ ID NO: 76973 - DNA, 15 bp, Homo sapiens
gggtcccattccaag

SEQ ID NO: 76974 - DNA, 15 bp, Homo sapiens
tgggtcccattccaa

SEQ ID NO: 76975 - DNA, 15 bp, Homo sapiens
ttgggtcccattcca

SEQ ID NO: 76976 - DNA, 15 bp, Homo sapiens
tttgggtcccattcc

SEQ ID NO: 76977 - DNA, 15 bp, Homo sapiens
atttgggtcccattc

SEQ ID NO: 76978 - DNA, 15 bp, Homo sapiens
aatttgggtcccatt

SEQ ID NO: 76979 - DNA, 15 bp, Homo sapiens
taatttgggtcccat

SEQ ID NO: 76980 - DNA, 15 bp, Homo sapiens
ttaatttgggtccca

SEQ ID NO: 76981 - DNA, 15 bp, Homo sapiens
tttaatttgggtccc

SEQ ID NO: 76982 - DNA, 15 bp, Homo sapiens
atttaatttgggtcc

SEQ ID NO: 76983 - DNA, 15 bp, Homo sapiens
tatttaatttgggtc

SEQ ID NO: 76984 - DNA, 15 bp, Homo sapiens
gtatttaatttgggt

SEQ ID NO: 76985 - DNA, 15 bp, Homo sapiens
tgtatttaatttggg

SEQ ID NO: 76986 - DNA, 15 bp, Homo sapiens
ctgtatttaatttgg

SEQ ID NO: 76987 - DNA, 15 bp, Homo sapiens
gctgtatttaatttg

SEQ ID NO: 76988 - DNA, 15 bp, Homo sapiens
tgctgtatttaattt

SEQ ID NO: 76989 - DNA, 15 bp, Homo sapiens
gtgctgtatttaatt

SEQ ID NO: 76990 - DNA, 15 bp, Homo sapiens
ggtgctgtatttaat

SEQ ID NO: 76991 - DNA, 15 bp, Homo sapiens
tggtgctgtatttaa

SEQ ID NO: 76992 - DNA, 15 bp, Homo sapiens
ctggtgctgtattta

SEQ ID NO: 76993 - DNA, 15 bp, Homo sapiens
gctggtgctgtattt

SEQ ID NO: 76994 - DNA, 15 bp, Homo sapiens
tgctggtgctgtatt

SEQ ID NO: 76995 - DNA, 15 bp, Homo sapiens
ttgctggtgctgtat

SEQ ID NO: 76996 - DNA, 15 bp, Homo sapiens
cttgctggtgctgta

SEQ ID NO: 76997 - DNA, 15 bp, Homo sapiens
tcttgctggtgctgt

SEQ ID NO: 76998 - DNA, 15 bp, Homo sapiens
gtcttgctggtgctg

SEQ ID NO: 76999 - DNA, 15 bp, Homo sapiens
agtcttgctggtgct

SEQ ID NO: 77000 - DNA, 15 bp, Homo sapiens
tagtcttgctggtgc

SEQ ID NO: 77001 - DNA, 15 bp, Homo sapiens
ttagtcttgctggtg

SEQ ID NO: 77002 - DNA, 15 bp, Homo sapiens
gttagtcttgctggt

SEQ ID NO: 77003 - DNA, 15 bp, Homo sapiens
agttagtcttgctgg

SEQ ID NO: 77004 - DNA, 15 bp, Homo sapiens
cagttagtcttgctg

SEQ ID NO: 77005 - DNA, 15 bp, Homo sapiens
tcagttagtcttgct

SEQ ID NO: 77006 - DNA, 15 bp, Homo sapiens
ctcagttagtcttgc

SEQ ID NO: 77007 - DNA, 15 bp, Homo sapiens
gctcagttagtcttg

SEQ ID NO: 77008 - DNA, 15 bp, Homo sapiens
ggctcagttagtctt

SEQ ID NO: 77009 - DNA, 15 bp, Homo sapiens
tggctcagttagtct

SEQ ID NO: 77010 - DNA, 15 bp, Homo sapiens
gtggctcagttagtc

SEQ ID NO: 77011 - DNA, 15 bp, Homo sapiens
agtggctcagttagt

SEQ ID NO: 77012 - DNA, 15 bp, Homo sapiens
tagtggctcagttag

SEQ ID NO: 77013 - DNA, 15 bp, Homo sapiens
gtagtggctcagtta

SEQ ID NO: 77014 - DNA, 15 bp, Homo sapiens
ggtagtggctcagtt

SEQ ID NO: 77015 - DNA, 15 bp, Homo sapiens
aggtagtggctcagt

SEQ ID NO: 77016 - DNA, 15 bp, Homo sapiens
caggtagtggctcag

SEQ ID NO: 77017 - DNA, 15 bp, Homo sapiens
ccaggtagtggctca

SEQ ID NO: 77018 - DNA, 15 bp, Homo sapiens
tccaggtagtggctc

SEQ ID NO: 77019 - DNA, 15 bp, Homo sapiens
ttccaggtagtggct

SEQ ID NO: 77020 - DNA, 15 bp, Homo sapiens
attccaggtagtggc

SEQ ID NO: 77021 - DNA, 15 bp, Homo sapiens
tattccaggtagtgg

SEQ ID NO: 77022 - DNA, 15 bp, Homo sapiens
atattccaggtagtg

SEQ ID NO: 77023 - DNA, 15 bp, Homo sapiens
catattccaggtagt

SEQ ID NO: 77024 - DNA, 15 bp, Homo sapiens
acatattccaggtag

SEQ ID NO: 77025 - DNA, 15 bp, Homo sapiens
gacatattccaggta

SEQ ID NO: 77026 - DNA, 15 bp, Homo sapiens
tgacatattccaggt

SEQ ID NO: 77027 - DNA, 15 bp, Homo sapiens
ttgacatattccagg

SEQ ID NO: 77028 - DNA, 15 bp, Homo sapiens
cttgacatattccag

SEQ ID NO: 77029 - DNA, 15 bp, Homo sapiens
tcttgacatattcca

SEQ ID NO: 77030 - DNA, 15 bp, Homo sapiens
atcttgacatattcc

SEQ ID NO: 77031 - DNA, 15 bp, Homo sapiens
tatcttgacatattc

SEQ ID NO: 77032 - DNA, 15 bp, Homo sapiens
gtatcttgacatatt

SEQ ID NO: 77033 - DNA, 15 bp, Homo sapiens
tgtatcttgacatat

SEQ ID NO: 77034 - DNA, 15 bp, Homo sapiens
ctgtatcttgacata

SEQ ID NO: 77035 - DNA, 15 bp, Homo sapiens
gctgtatcttgacat

SEQ ID NO: 77036 - DNA, 15 bp, Homo sapiens
tgctgtatcttgaca

SEQ ID NO: 77037 - DNA, 15 bp, Homo sapiens
ttgctgtatcttgac

SEQ ID NO: 77038 - DNA, 15 bp, Homo sapiens
gttgctgtatcttga

SEQ ID NO: 77039 - DNA, 15 bp, Homo sapiens
agttgctgtatcttg

SEQ ID NO: 77040 - DNA, 15 bp, Homo sapiens
tagttgctgtatctt

SEQ ID NO: 77041 - DNA, 15 bp, Homo sapiens
ttagttgctgtatct

SEQ ID NO: 77042 - DNA, 15 bp, Homo sapiens
gttagttgctgtatc

SEQ ID NO: 77043 - DNA, 15 bp, Homo sapiens
tgttagttgctgtat

SEQ ID NO: 77044 - DNA, 15 bp, Homo sapiens
gtgttagttgctgta

SEQ ID NO: 77045 - DNA, 15 bp, Homo sapiens
agtgttagttgctgt

SEQ ID NO: 77046 - DNA, 15 bp, Homo sapiens
aagtgttagttgctg

SEQ ID NO: 77047 - DNA, 15 bp, Homo sapiens
taagtgttagttgct

SEQ ID NO: 77048 - DNA, 15 bp, Homo sapiens
gtaagtgttagttgc

SEQ ID NO: 77049 - DNA, 15 bp, Homo sapiens
agtaagtgttagttg

SEQ ID NO: 77050 - DNA, 15 bp, Homo sapiens
aagtaagtgttagtt

SEQ ID NO: 77051 - DNA, 15 bp, Homo sapiens
aaagtaagtgttagt

SEQ ID NO: 77052 - DNA, 15 bp, Homo sapiens
taaagtaagtgttag

SEQ ID NO: 77053 - DNA, 15 bp, Homo sapiens
ataaagtaagtgtta

SEQ ID NO: 77054 - DNA, 15 bp, Homo sapiens
cataaagtaagtgtt

SEQ ID NO: 77055 - DNA, 15 bp, Homo sapiens
acataaagtaagtgt

SEQ ID NO: 77056 - DNA, 15 bp, Homo sapiens
aacataaagtaagtg

SEQ ID NO: 77057 - DNA, 15 bp, Homo sapiens
aaacataaagtaagt

SEQ ID NO: 77058 - DNA, 15 bp, Homo sapiens
caaacataaagtaag

SEQ ID NO: 77059 - DNA, 15 bp, Homo sapiens
acaaacataaagtaa

SEQ ID NO: 77060 - DNA, 15 bp, Homo sapiens
gacaaacataaagta

SEQ ID NO: 77061 - DNA, 15 bp, Homo sapiens
tgacaaacataaagt

SEQ ID NO: 77062 - DNA, 15 bp, Homo sapiens
atgacaaacataaag

SEQ ID NO: 77063 - DNA, 15 bp, Homo sapiens
aatgacaaacataaa

SEQ ID NO: 77064 - DNA, 15 bp, Homo sapiens
aaatgacaaacataa

SEQ ID NO: 77065 - DNA, 15 bp, Homo sapiens
caaatgacaaacata

SEQ ID NO: 77066 - DNA, 15 bp, Homo sapiens
gcaaatgacaaacat

SEQ ID NO: 77067 - DNA, 15 bp, Homo sapiens
tgcaaatgacaaaca

SEQ ID NO: 77068 - DNA, 15 bp, Homo sapiens
ttgcaaatgacaaac

SEQ ID NO: 77069 - DNA, 15 bp, Homo sapiens
tttgcaaatgacaaa

SEQ ID NO: 77070 - DNA, 15 bp, Homo sapiens
gtttgcaaatgacaa

SEQ ID NO: 77071 - DNA, 15 bp, Homo sapiens
ggtttgcaaatgaca

SEQ ID NO: 77072 - DNA, 15 bp, Homo sapiens
gggtttgcaaatgac

SEQ ID NO: 77073 - DNA, 15 bp, Homo sapiens
agggtttgcaaatga

SEQ ID NO: 77074 - DNA, 15 bp, Homo sapiens
tagggtttgcaaatg

SEQ ID NO: 77075 - DNA, 15 bp, Homo sapiens
atagggtttgcaaat

SEQ ID NO: 77076 - DNA, 15 bp, Homo sapiens
gatagggtttgcaaa

SEQ ID NO: 77077 - DNA, 15 bp, Homo sapiens
tgatagggtttgcaa

SEQ ID NO: 77078 - DNA, 15 bp, Homo sapiens
atgatagggtttgca

SEQ ID NO: 77079 - DNA, 15 bp, Homo sapiens
catgatagggtttgc

SEQ ID NO: 77080 - DNA, 15 bp, Homo sapiens
acatgatagggtttg

SEQ ID NO: 77081 - DNA, 15 bp, Homo sapiens
gacatgatagggttt

SEQ ID NO: 77082 - DNA, 15 bp, Homo sapiens
ggacatgatagggtt

SEQ ID NO: 77083 - DNA, 15 bp, Homo sapiens
cggacatgatagggt

SEQ ID NO: 77084 - DNA, 15 bp, Homo sapiens
acggacatgataggg

SEQ ID NO: 77085 - DNA, 15 bp, Homo sapiens
aacggacatgatagg

SEQ ID NO: 77086 - DNA, 15 bp, Homo sapiens
taacggacatgatag

SEQ ID NO: 77087 - DNA, 15 bp, Homo sapiens
ttaacggacatgata

SEQ ID NO: 77088 - DNA, 15 bp, Homo sapiens
attaacggacatgat

SEQ ID NO: 77089 - DNA, 15 bp, Homo sapiens
gattaacggacatga

SEQ ID NO: 77090 - DNA, 15 bp, Homo sapiens
ggattaacggacatg

SEQ ID NO: 77091 - DNA, 15 bp, Homo sapiens
tggattaacggacat

SEQ ID NO: 77092 - DNA, 15 bp, Homo sapiens
atggattaacggaca

SEQ ID NO: 77093 - DNA, 15 bp, Homo sapiens
aatggattaacggac

SEQ ID NO: 77094 - DNA, 15 bp, Homo sapiens
gaatggattaacgga

SEQ ID NO: 77095 - DNA, 15 bp, Homo sapiens
tgaatggattaacgg

SEQ ID NO: 77096 - DNA, 15 bp, Homo sapiens
ttgaatggattaacg

SEQ ID NO: 77097 - DNA, 15 bp, Homo sapiens
tttgaatggattaac

SEQ ID NO: 77098 - DNA, 15 bp, Homo sapiens
atttgaatggattaa

SEQ ID NO: 77099 - DNA, 15 bp, Homo sapiens
catttgaatggatta

SEQ ID NO: 77100 - DNA, 15 bp, Homo sapiens
gcatttgaatggatt

SEQ ID NO: 77101 - DNA, 15 bp, Homo sapiens
agcatttgaatggat

SEQ ID NO: 77102 - DNA, 15 bp, Homo sapiens
cagcatttgaatgga

SEQ ID NO: 77103 - DNA, 15 bp, Homo sapiens
tcagcatttgaatgg

SEQ ID NO: 77104 - DNA, 15 bp, Homo sapiens
ctcagcatttgaatg

SEQ ID NO: 77105 - DNA, 15 bp, Homo sapiens
tctcagcatttgaat

SEQ ID NO: 77106 - DNA, 15 bp, Homo sapiens
ctctcagcatttgaa

SEQ ID NO: 77107 - DNA, 15 bp, Homo sapiens
cctctcagcatttga

SEQ ID NO: 77108 - DNA, 15 bp, Homo sapiens
acctctcagcatttg

SEQ ID NO: 77109 - DNA, 15 bp, Homo sapiens
tacctctcagcattt

SEQ ID NO: 77110 - DNA, 15 bp, Homo sapiens
ctacctctcagcatt

SEQ ID NO: 77111 - DNA, 15 bp, Homo sapiens
cctacctctcagcat

SEQ ID NO: 77112 - DNA, 15 bp, Homo sapiens
gcctacctctcagca

SEQ ID NO: 77113 - DNA, 15 bp, Homo sapiens
tgcctacctctcagc

SEQ ID NO: 77114 - DNA, 15 bp, Homo sapiens
ctgcctacctctcag

SEQ ID NO: 77115 - DNA, 15 bp, Homo sapiens
cctgcctacctctca

SEQ ID NO: 77116 - DNA, 15 bp, Homo sapiens
ccctgcctacctctc

SEQ ID NO: 77117 - DNA, 15 bp, Homo sapiens
gccctgcctacctct

SEQ ID NO: 77118 - DNA, 15 bp, Homo sapiens
tgccctgcctacctc

SEQ ID NO: 77119 - DNA, 15 bp, Homo sapiens
ctgccctgcctacct

SEQ ID NO: 77120 - DNA, 15 bp, Homo sapiens
gctgccctgcctacc

SEQ ID NO: 77121 - DNA, 15 bp, Homo sapiens
agctgccctgcctac

SEQ ID NO: 77122 - DNA, 15 bp, Homo sapiens
tagctgccctgccta

SEQ ID NO: 77123 - DNA, 15 bp, Homo sapiens
atagctgccctgcct

SEQ ID NO: 77124 - DNA, 15 bp, Homo sapiens
aatagctgccctgcc

SEQ ID NO: 77125 - DNA, 15 bp, Homo sapiens
taatagctgccctgc

SEQ ID NO: 77126 - DNA, 15 bp, Homo sapiens
ataatagctgccctg

SEQ ID NO: 77127 - DNA, 15 bp, Homo sapiens
cataatagctgccct

SEQ ID NO: 77128 - DNA, 15 bp, Homo sapiens
tcataatagctgccc

SEQ ID NO: 77129 - DNA, 15 bp, Homo sapiens
atcataatagctgcc

SEQ ID NO: 77130 - DNA, 15 bp, Homo sapiens
aatcataatagctgc

SEQ ID NO: 77131 - DNA, 15 bp, Homo sapiens
gaatcataatagctg

SEQ ID NO: 77132 - DNA, 15 bp, Homo sapiens
tgaatcataatagct

SEQ ID NO: 77133 - DNA, 15 bp, Homo sapiens
ttgaatcataatagc

SEQ ID NO: 77134 - DNA, 15 bp, Homo sapiens
tttgaatcataatag

SEQ ID NO: 77135 - DNA, 15 bp, Homo sapiens
ttttgaatcataata

SEQ ID NO: 77136 - DNA, 15 bp, Homo sapiens
tttttgaatcataat

SEQ ID NO: 77137 - DNA, 15 bp, Homo sapiens
ttttttgaatcataa

SEQ ID NO: 77138 - DNA, 15 bp, Homo sapiens
cttttttgaatcata

SEQ ID NO: 77139 - DNA, 15 bp, Homo sapiens
tcttttttgaatcat

SEQ ID NO: 77140 - DNA, 15 bp, Homo sapiens
ctcttttttgaatca

SEQ ID NO: 77141 - DNA, 15 bp, Homo sapiens
cctcttttttgaatc

SEQ ID NO: 77142 - DNA, 15 bp, Homo sapiens
gcctcttttttgaat

SEQ ID NO: 77143 - DNA, 15 bp, Homo sapiens
ggcctcttttttgaa

SEQ ID NO: 77144 - DNA, 15 bp, Homo sapiens
tggcctcttttttga

SEQ ID NO: 77145 - DNA, 15 bp, Homo sapiens
gtggcctcttttttg

SEQ ID NO: 77146 - DNA, 15 bp, Homo sapiens
tgtggcctctttttt

SEQ ID NO: 77147 - DNA, 15 bp, Homo sapiens
atgtggcctcttttt

SEQ ID NO: 77148 - DNA, 15 bp, Homo sapiens
gatgtggcctctttt

SEQ ID NO: 77149 - DNA, 15 bp, Homo sapiens
agatgtggcctcttt

SEQ ID NO: 77150 - DNA, 15 bp, Homo sapiens
aagatgtggcctctt

SEQ ID NO: 77151 - DNA, 15 bp, Homo sapiens
aaagatgtggcctct

SEQ ID NO: 77152 - DNA, 15 bp, Homo sapiens
caaagatgtggcctc

SEQ ID NO: 77153 - DNA, 15 bp, Homo sapiens
acaaagatgtggcct

SEQ ID NO: 77154 - DNA, 15 bp, Homo sapiens
cacaaagatgtggcc

SEQ ID NO: 77155 - DNA, 15 bp, Homo sapiens
ccacaaagatgtggc

SEQ ID NO: 77156 - DNA, 15 bp, Homo sapiens
tccacaaagatgtgg

SEQ ID NO: 77157 - DNA, 15 bp, Homo sapiens
atccacaaagatgtg

SEQ ID NO: 77158 - DNA, 15 bp, Homo sapiens
aatccacaaagatgt

SEQ ID NO: 77159 - DNA, 15 bp, Homo sapiens
aaatccacaaagatg

SEQ ID NO: 77160 - DNA, 15 bp, Homo sapiens
caaatccacaaagat

SEQ ID NO: 77161 - DNA, 15 bp, Homo sapiens
ccaaatccacaaaga

SEQ ID NO: 77162 - DNA, 15 bp, Homo sapiens
cccaaatccacaaag

SEQ ID NO: 77163 - DNA, 15 bp, Homo sapiens
acccaaatccacaaa

SEQ ID NO: 77164 - DNA, 15 bp, Homo sapiens
aacccaaatccacaa

SEQ ID NO: 77165 - DNA, 15 bp, Homo sapiens
gaacccaaatccaca

SEQ ID NO: 77166 - DNA, 15 bp, Homo sapiens
agaacccaaatccac

SEQ ID NO: 77167 - DNA, 15 bp, Homo sapiens
tagaacccaaatcca

SEQ ID NO: 77168 - DNA, 15 bp, Homo sapiens
ttagaacccaaatcc

SEQ ID NO: 77169 - DNA, 15 bp, Homo sapiens
attagaacccaaatc

SEQ ID NO: 77170 - DNA, 15 bp, Homo sapiens
gattagaacccaaat

SEQ ID NO: 77171 - DNA, 15 bp, Homo sapiens
ggattagaacccaaa

SEQ ID NO: 77172 - DNA, 15 bp, Homo sapiens
gggattagaacccaa

SEQ ID NO: 77173 - DNA, 15 bp, Homo sapiens
tgggattagaaccca

SEQ ID NO: 77174 - DNA, 15 bp, Homo sapiens
ctgggattagaaccc

SEQ ID NO: 77175 - DNA, 15 bp, Homo sapiens
gctgggattagaacc

SEQ ID NO: 77176 - DNA, 15 bp, Homo sapiens
agctgggattagaac

SEQ ID NO: 77177 - DNA, 15 bp, Homo sapiens
gagctgggattagaa

SEQ ID NO: 77178 - DNA, 15 bp, Homo sapiens
ggagctgggattaga

SEQ ID NO: 77179 - DNA, 15 bp, Homo sapiens
aggagctgggattag

SEQ ID NO: 77180 - DNA, 15 bp, Homo sapiens
caggagctgggatta

SEQ ID NO: 77181 - DNA, 15 bp, Homo sapiens
gcaggagctgggatt

SEQ ID NO: 77182 - DNA, 15 bp, Homo sapiens
ggcaggagctgggat

SEQ ID NO: 77183 - DNA, 15 bp, Homo sapiens
cggcaggagctggga

SEQ ID NO: 77184 - DNA, 15 bp, Homo sapiens
acggcaggagctggg

SEQ ID NO: 77185 - DNA, 15 bp, Homo sapiens
gacggcaggagctgg

SEQ ID NO: 77186 - DNA, 15 bp, Homo sapiens
tgacggcaggagctg

SEQ ID NO: 77187 - DNA, 15 bp, Homo sapiens
gtgacggcaggagct

SEQ ID NO: 77188 - DNA, 15 bp, Homo sapiens
agtgacggcaggagc

SEQ ID NO: 77189 - DNA, 15 bp, Homo sapiens
tagtgacggcaggag

SEQ ID NO: 77190 - DNA, 15 bp, Homo sapiens
ctagtgacggcagga

SEQ ID NO: 77191 - DNA, 15 bp, Homo sapiens
tctagtgacggcagg

SEQ ID NO: 77192 - DNA, 15 bp, Homo sapiens
atctagtgacggcag

SEQ ID NO: 77193 - DNA, 15 bp, Homo sapiens
catctagtgacggca

SEQ ID NO: 77194 - DNA, 15 bp, Homo sapiens
acatctagtgacggc

SEQ ID NO: 77195 - DNA, 15 bp, Homo sapiens
cacatctagtgacgg

SEQ ID NO: 77196 - DNA, 15 bp, Homo sapiens
acacatctagtgacg

SEQ ID NO: 77197 - DNA, 15 bp, Homo sapiens
cacacatctagtgac

SEQ ID NO: 77198 - DNA, 15 bp, Homo sapiens
acacacatctagtga

SEQ ID NO: 77199 - DNA, 15 bp, Homo sapiens
cacacacatctagtg

SEQ ID NO: 77200 - DNA, 15 bp, Homo sapiens
ccacacacatctagt

SEQ ID NO: 77201 - DNA, 15 bp, Homo sapiens
accacacacatctag

SEQ ID NO: 77202 - DNA, 15 bp, Homo sapiens
gaccacacacatcta

SEQ ID NO: 77203 - DNA, 15 bp, Homo sapiens
agaccacacacatct

SEQ ID NO: 77204 - DNA, 15 bp, Homo sapiens
cagaccacacacatc

SEQ ID NO: 77205 - DNA, 15 bp, Homo sapiens
tcagaccacacacat

SEQ ID NO: 77206 - DNA, 15 bp, Homo sapiens
ctcagaccacacaca

SEQ ID NO: 77207 - DNA, 15 bp, Homo sapiens
gctcagaccacacac

SEQ ID NO: 77208 - DNA, 15 bp, Homo sapiens
tgctcagaccacaca

SEQ ID NO: 77209 - DNA, 15 bp, Homo sapiens
ttgctcagaccacac

SEQ ID NO: 77210 - DNA, 15 bp, Homo sapiens
tttgctcagaccaca

SEQ ID NO: 77211 - DNA, 15 bp, Homo sapiens
atttgctcagaccac

SEQ ID NO: 77212 - DNA, 15 bp, Homo sapiens
gatttgctcagacca

SEQ ID NO: 77213 - DNA, 15 bp, Homo sapiens
ggatttgctcagacc

SEQ ID NO: 77214 - DNA, 15 bp, Homo sapiens
aggatttgctcagac

SEQ ID NO: 77215 - DNA, 15 bp, Homo sapiens
aaggatttgctcaga

SEQ ID NO: 77216 - DNA, 15 bp, Homo sapiens
gaaggatttgctcag

SEQ ID NO: 77217 - DNA, 15 bp, Homo sapiens
ggaaggatttgctca

SEQ ID NO: 77218 - DNA, 15 bp, Homo sapiens
tggaaggatttgctc

SEQ ID NO: 77219 - DNA, 15 bp, Homo sapiens
gtggaaggatttgct

SEQ ID NO: 77220 - DNA, 15 bp, Homo sapiens
agtggaaggatttgc

SEQ ID NO: 77221 - DNA, 15 bp, Homo sapiens
aagtggaaggatttg

SEQ ID NO: 77222 - DNA, 15 bp, Homo sapiens
gaagtggaaggattt

SEQ ID NO: 77223 - DNA, 15 bp, Homo sapiens
agaagtggaaggatt

SEQ ID NO: 77224 - DNA, 15 bp, Homo sapiens
gagaagtggaaggat

SEQ ID NO: 77225 - DNA, 15 bp, Homo sapiens
ggagaagtggaagga

SEQ ID NO: 77226 - DNA, 15 bp, Homo sapiens
aggagaagtggaagg

SEQ ID NO: 77227 - DNA, 15 bp, Homo sapiens
taggagaagtggaag

SEQ ID NO: 77228 - DNA, 15 bp, Homo sapiens
ttaggagaagtggaa

SEQ ID NO: 77229 - DNA, 15 bp, Homo sapiens
gttaggagaagtgga

SEQ ID NO: 77230 - DNA, 15 bp, Homo sapiens
ggttaggagaagtgg

SEQ ID NO: 77231 - DNA, 15 bp, Homo sapiens
aggttaggagaagtg

SEQ ID NO: 77232 - DNA, 15 bp, Homo sapiens
aaggttaggagaagt

SEQ ID NO: 77233 - DNA, 15 bp, Homo sapiens
taaggttaggagaag

SEQ ID NO: 77234 - DNA, 15 bp, Homo sapiens
ctaaggttaggagaa

SEQ ID NO: 77235 - DNA, 15 bp, Homo sapiens
actaaggttaggaga

SEQ ID NO: 77236 - DNA, 15 bp, Homo sapiens
aactaaggttaggag

SEQ ID NO: 77237 - DNA, 15 bp, Homo sapiens
aaactaaggttagga

SEQ ID NO: 77238 - DNA, 15 bp, Homo sapiens
gaaactaaggttagg

SEQ ID NO: 77239 - DNA, 15 bp, Homo sapiens
ggaaactaaggttag

SEQ ID NO: 77240 - DNA, 15 bp, Homo sapiens
aggaaactaaggtta

SEQ ID NO: 77241 - DNA, 15 bp, Homo sapiens
gaggaaactaaggtt

SEQ ID NO: 77242 - DNA, 15 bp, Homo sapiens
tgaggaaactaaggt

SEQ ID NO: 77243 - DNA, 15 bp, Homo sapiens
atgaggaaactaagg

SEQ ID NO: 77244 - DNA, 15 bp, Homo sapiens
gatgaggaaactaag

SEQ ID NO: 77245 - DNA, 15 bp, Homo sapiens
agatgaggaaactaa

SEQ ID NO: 77246 - DNA, 15 bp, Homo sapiens
cagatgaggaaacta

SEQ ID NO: 77247 - DNA, 15 bp, Homo sapiens
gcagatgaggaaact

SEQ ID NO: 77248 - DNA, 15 bp, Homo sapiens
tgcagatgaggaaac

SEQ ID NO: 77249 - DNA, 15 bp, Homo sapiens
ttgcagatgaggaaa

SEQ ID NO: 77250 - DNA, 15 bp, Homo sapiens
gttgcagatgaggaa

SEQ ID NO: 77251 - DNA, 15 bp, Homo sapiens
tgttgcagatgagga

SEQ ID NO: 77252 - DNA, 15 bp, Homo sapiens
atgttgcagatgagg

SEQ ID NO: 77253 - DNA, 15 bp, Homo sapiens
catgttgcagatgag

SEQ ID NO: 77254 - DNA, 15 bp, Homo sapiens
tcatgttgcagatga

SEQ ID NO: 77255 - DNA, 15 bp, Homo sapiens
ctcatgttgcagatg

SEQ ID NO: 77256 - DNA, 15 bp, Homo sapiens
tctcatgttgcagat

SEQ ID NO: 77257 - DNA, 15 bp, Homo sapiens
ttctcatgttgcaga

SEQ ID NO: 77258 - DNA, 15 bp, Homo sapiens
tttctcatgttgcag

SEQ ID NO: 77259 - DNA, 15 bp, Homo sapiens
gtttctcatgttgca

SEQ ID NO: 77260 - DNA, 15 bp, Homo sapiens
agtttctcatgttgc

SEQ ID NO: 77261 - DNA, 15 bp, Homo sapiens
aagtttctcatgttg

SEQ ID NO: 77262 - DNA, 15 bp, Homo sapiens
caagtttctcatgtt

SEQ ID NO: 77263 - DNA, 15 bp, Homo sapiens
gcaagtttctcatgt

SEQ ID NO: 77264 - DNA, 15 bp, Homo sapiens
agcaagtttctcatg

SEQ ID NO: 77265 - DNA, 15 bp, Homo sapiens
aagcaagtttctcat

SEQ ID NO: 77266 - DNA, 15 bp, Homo sapiens
aaagcaagtttctca

SEQ ID NO: 77267 - DNA, 15 bp, Homo sapiens
gaaagcaagtttctc

SEQ ID NO: 77268 - DNA, 15 bp, Homo sapiens
ggaaagcaagtttct

SEQ ID NO: 77269 - DNA, 15 bp, Homo sapiens
tggaaagcaagtttc

SEQ ID NO: 77270 - DNA, 15 bp, Homo sapiens
ttggaaagcaagttt

SEQ ID NO: 77271 - DNA, 15 bp, Homo sapiens
tttggaaagcaagtt

SEQ ID NO: 77272 - DNA, 15 bp, Homo sapiens
ctttggaaagcaagt

SEQ ID NO: 77273 - DNA, 15 bp, Homo sapiens
actttggaaagcaag

SEQ ID NO: 77274 - DNA, 15 bp, Homo sapiens
cactttggaaagcaa

SEQ ID NO: 77275 - DNA, 15 bp, Homo sapiens
gcactttggaaagca

SEQ ID NO: 77276 - DNA, 15 bp, Homo sapiens
ggcactttggaaagc

SEQ ID NO: 77277 - DNA, 15 bp, Homo sapiens
aggcactttggaaag

SEQ ID NO: 77278 - DNA, 15 bp, Homo sapiens
gaggcactttggaaa

SEQ ID NO: 77279 - DNA, 15 bp, Homo sapiens
tgaggcactttggaa

SEQ ID NO: 77280 - DNA, 15 bp, Homo sapiens
ttgaggcactttgga

SEQ ID NO: 77281 - DNA, 15 bp, Homo sapiens
cttgaggcactttgg

SEQ ID NO: 77282 - DNA, 15 bp, Homo sapiens
gcttgaggcactttg

SEQ ID NO: 77283 - DNA, 15 bp, Homo sapiens
agcttgaggcacttt

SEQ ID NO: 77284 - DNA, 15 bp, Homo sapiens
tagcttgaggcactt

SEQ ID NO: 77285 - DNA, 15 bp, Homo sapiens
atagcttgaggcact

SEQ ID NO: 77286 - DNA, 15 bp, Homo sapiens
catagcttgaggcac

SEQ ID NO: 77287 - DNA, 15 bp, Homo sapiens
ccatagcttgaggca

SEQ ID NO: 77288 - DNA, 15 bp, Homo sapiens
cccatagcttgaggc

SEQ ID NO: 77289 - DNA, 15 bp, Homo sapiens
tcccatagcttgagg

SEQ ID NO: 77290 - DNA, 15 bp, Homo sapiens
ctcccatagcttgag

SEQ ID NO: 77291 - DNA, 15 bp, Homo sapiens
actcccatagcttga

SEQ ID NO: 77292 - DNA, 15 bp, Homo sapiens
cactcccatagcttg

SEQ ID NO: 77293 - DNA, 15 bp, Homo sapiens
ccactcccatagctt

SEQ ID NO: 77294 - DNA, 15 bp, Homo sapiens
cccactcccatagct

SEQ ID NO: 77295 - DNA, 15 bp, Homo sapiens
ccccactcccatagc

SEQ ID NO: 77296 - DNA, 15 bp, Homo sapiens
tccccactcccatag

SEQ ID NO: 77297 - DNA, 15 bp, Homo sapiens
atccccactcccata

SEQ ID NO: 77298 - DNA, 15 bp, Homo sapiens
tatccccactcccat

SEQ ID NO: 77299 - DNA, 15 bp, Homo sapiens
gtatccccactccca

SEQ ID NO: 77300 - DNA, 15 bp, Homo sapiens
cgtatccccactccc

SEQ ID NO: 77301 - DNA, 15 bp, Homo sapiens
ccgtatccccactcc

SEQ ID NO: 77302 - DNA, 15 bp, Homo sapiens
cccgtatccccactc

SEQ ID NO: 77303 - DNA, 15 bp, Homo sapiens
tcccgtatccccact

SEQ ID NO: 77304 - DNA, 15 bp, Homo sapiens
ttcccgtatccccac

SEQ ID NO: 77305 - DNA, 15 bp, Homo sapiens
attcccgtatcccca

SEQ ID NO: 77306 - DNA, 15 bp, Homo sapiens
cattcccgtatcccc

SEQ ID NO: 77307 - DNA, 15 bp, Homo sapiens
tcattcccgtatccc

SEQ ID NO: 77308 - DNA, 15 bp, Homo sapiens
ctcattcccgtatcc

SEQ ID NO: 77309 - DNA, 15 bp, Homo sapiens
actcattcccgtatc

SEQ ID NO: 77310 - DNA, 15 bp, Homo sapiens
gactcattcccgtat

SEQ ID NO: 77311 - DNA, 15 bp, Homo sapiens
agactcattcccgta

SEQ ID NO: 77312 - DNA, 15 bp, Homo sapiens
gagactcattcccgt

SEQ ID NO: 77313 - DNA, 15 bp, Homo sapiens
ggagactcattcccg

SEQ ID NO: 77314 - DNA, 15 bp, Homo sapiens
gggagactcattccc

SEQ ID NO: 77315 - DNA, 15 bp, Homo sapiens
ggggagactcattcc

SEQ ID NO: 77316 - DNA, 15 bp, Homo sapiens
tggggagactcattc

SEQ ID NO: 77317 - DNA, 15 bp, Homo sapiens
ttggggagactcatt

SEQ ID NO: 77318 - DNA, 15 bp, Homo sapiens
gttggggagactcat

SEQ ID NO: 77319 - DNA, 15 bp, Homo sapiens
tgttggggagactca

SEQ ID NO: 77320 - DNA, 15 bp, Homo sapiens
atgttggggagactc

SEQ ID NO: 77321 - DNA, 15 bp, Homo sapiens
aatgttggggagact

SEQ ID NO: 77322 - DNA, 15 bp, Homo sapiens
gaatgttggggagac

SEQ ID NO: 77323 - DNA, 15 bp, Homo sapiens
tgaatgttggggaga

SEQ ID NO: 77324 - DNA, 15 bp, Homo sapiens
ctgaatgttggggag

SEQ ID NO: 77325 - DNA, 15 bp, Homo sapiens
tctgaatgttgggga

SEQ ID NO: 77326 - DNA, 15 bp, Homo sapiens
ctctgaatgttgggg

SEQ ID NO: 77327 - DNA, 15 bp, Homo sapiens
cctctgaatgttggg

SEQ ID NO: 77328 - DNA, 15 bp, Homo sapiens
gcctctgaatgttgg

SEQ ID NO: 77329 - DNA, 15 bp, Homo sapiens
agcctctgaatgttg

SEQ ID NO: 77330 - DNA, 15 bp, Homo sapiens
gagcctctgaatgtt

SEQ ID NO: 77331 - DNA, 15 bp, Homo sapiens
ggagcctctgaatgt

SEQ ID NO: 77332 - DNA, 15 bp, Homo sapiens
gggagcctctgaatg

SEQ ID NO: 77333 - DNA, 15 bp, Homo sapiens
ggggagcctctgaat

SEQ ID NO: 77334 - DNA, 15 bp, Homo sapiens
gggggagcctctgaa

SEQ ID NO: 77335 - DNA, 15 bp, Homo sapiens
tgggggagcctctga

SEQ ID NO: 77336 - DNA, 15 bp, Homo sapiens
ctgggggagcctctg

SEQ ID NO: 77337 - DNA, 15 bp, Homo sapiens
tctgggggagcctct

SEQ ID NO: 77338 - DNA, 15 bp, Homo sapiens
ctctgggggagcctc

SEQ ID NO: 77339 - DNA, 15 bp, Homo sapiens
gctctgggggagcct

SEQ ID NO: 77340 - DNA, 15 bp, Homo sapiens
agctctgggggagcc

SEQ ID NO: 77341 - DNA, 15 bp, Homo sapiens
cagctctgggggagc

SEQ ID NO: 77342 - DNA, 15 bp, Homo sapiens
ccagctctgggggag

SEQ ID NO: 77343 - DNA, 15 bp, Homo sapiens
gccagctctggggga

SEQ ID NO: 77344 - DNA, 15 bp, Homo sapiens
tgccagctctggggg

SEQ ID NO: 77345 - DNA, 15 bp, Homo sapiens
ctgccagctctgggg

SEQ ID NO: 77346 - DNA, 15 bp, Homo sapiens
gctgccagctctggg

SEQ ID NO: 77347 - DNA, 15 bp, Homo sapiens
ggctgccagctctgg

SEQ ID NO: 77348 - DNA, 15 bp, Homo sapiens
gggctgccagctctg

SEQ ID NO: 77349 - DNA, 15 bp, Homo sapiens
tgggctgccagctct

SEQ ID NO: 77350 - DNA, 15 bp, Homo sapiens
ttgggctgccagctc

SEQ ID NO: 77351 - DNA, 15 bp, Homo sapiens
cttgggctgccagct

SEQ ID NO: 77352 - DNA, 15 bp, Homo sapiens
ccttgggctgccagc

SEQ ID NO: 77353 - DNA, 15 bp, Homo sapiens
gccttgggctgccag

SEQ ID NO: 77354 - DNA, 15 bp, Homo sapiens
tgccttgggctgcca

SEQ ID NO: 77355 - DNA, 15 bp, Homo sapiens
gtgccttgggctgcc

SEQ ID NO: 77356 - DNA, 15 bp, Homo sapiens
tgtgccttgggctgc

SEQ ID NO: 77357 - DNA, 15 bp, Homo sapiens
gtgtgccttgggctg

SEQ ID NO: 77358 - DNA, 15 bp, Homo sapiens
ggtgtgccttgggct

SEQ ID NO: 77359 - DNA, 15 bp, Homo sapiens
tggtgtgccttgggc

SEQ ID NO: 77360 - DNA, 15 bp, Homo sapiens
gtggtgtgccttggg

SEQ ID NO: 77361 - DNA, 15 bp, Homo sapiens
agtggtgtgccttgg

SEQ ID NO: 77362 - DNA, 15 bp, Homo sapiens
tagtggtgtgccttg

SEQ ID NO: 77363 - DNA, 15 bp, Homo sapiens
ttagtggtgtgcctt

SEQ ID NO: 77364 - DNA, 15 bp, Homo sapiens
cttagtggtgtgcct

SEQ ID NO: 77365 - DNA, 15 bp, Homo sapiens
acttagtggtgtgcc

SEQ ID NO: 77366 - DNA, 15 bp, Homo sapiens
cacttagtggtgtgc

SEQ ID NO: 77367 - DNA, 15 bp, Homo sapiens
gcacttagtggtgtg

SEQ ID NO: 77368 - DNA, 15 bp, Homo sapiens
ggcacttagtggtgt

SEQ ID NO: 77369 - DNA, 15 bp, Homo sapiens
tggcacttagtggtg

SEQ ID NO: 77370 - DNA, 15 bp, Homo sapiens
gtggcacttagtggt

SEQ ID NO: 77371 - DNA, 15 bp, Homo sapiens
agtggcacttagtgg

SEQ ID NO: 77372 - DNA, 15 bp, Homo sapiens
cagtggcacttagtg

SEQ ID NO: 77373 - DNA, 15 bp, Homo sapiens
gcagtggcacttagt

SEQ ID NO: 77374 - DNA, 15 bp, Homo sapiens
ggcagtggcacttag

SEQ ID NO: 77375 - DNA, 15 bp, Homo sapiens
aggcagtggcactta

SEQ ID NO: 77376 - DNA, 15 bp, Homo sapiens
aaggcagtggcactt

SEQ ID NO: 77377 - DNA, 15 bp, Homo sapiens
gaaggcagtggcact

SEQ ID NO: 77378 - DNA, 15 bp, Homo sapiens
agaaggcagtggcac

SEQ ID NO: 77379 - DNA, 15 bp, Homo sapiens
gagaaggcagtggca

SEQ ID NO: 77380 - DNA, 15 bp, Homo sapiens
ggagaaggcagtggc

SEQ ID NO: 77381 - DNA, 15 bp, Homo sapiens
aggagaaggcagtgg

SEQ ID NO: 77382 - DNA, 15 bp, Homo sapiens
gaggagaaggcagtg

SEQ ID NO: 77383 - DNA, 15 bp, Homo sapiens
ggaggagaaggcagt

SEQ ID NO: 77384 - DNA, 15 bp, Homo sapiens
gggaggagaaggcag

SEQ ID NO: 77385 - DNA, 15 bp, Homo sapiens
ggggaggagaaggca

SEQ ID NO: 77386 - DNA, 15 bp, Homo sapiens
aggggaggagaaggc

SEQ ID NO: 77387 - DNA, 15 bp, Homo sapiens
gaggggaggagaagg

SEQ ID NO: 77388 - DNA, 15 bp, Homo sapiens
agaggggaggagaag

SEQ ID NO: 77389 - DNA, 15 bp, Homo sapiens
cagaggggaggagaa

SEQ ID NO: 77390 - DNA, 15 bp, Homo sapiens
gcagaggggaggaga

SEQ ID NO: 77391 - DNA, 15 bp, Homo sapiens
agcagaggggaggag

SEQ ID NO: 77392 - DNA, 15 bp, Homo sapiens
cagcagaggggagga

SEQ ID NO: 77393 - DNA, 15 bp, Homo sapiens
ccagcagaggggagg

SEQ ID NO: 77394 - DNA, 15 bp, Homo sapiens
gccagcagaggggag

SEQ ID NO: 77395 - DNA, 15 bp, Homo sapiens
ggccagcagagggga

SEQ ID NO: 77396 - DNA, 15 bp, Homo sapiens
cggccagcagagggg

SEQ ID NO: 77397 - DNA, 15 bp, Homo sapiens
ccggccagcagaggg

SEQ ID NO: 77398 - DNA, 15 bp, Homo sapiens
tccggccagcagagg

SEQ ID NO: 77399 - DNA, 15 bp, Homo sapiens
atccggccagcagag

SEQ ID NO: 77400 - DNA, 15 bp, Homo sapiens
tatccggccagcaga

SEQ ID NO: 77401 - DNA, 15 bp, Homo sapiens
gtatccggccagcag

SEQ ID NO: 77402 - DNA, 15 bp, Homo sapiens
agtatccggccagca

SEQ ID NO: 77403 - DNA, 15 bp, Homo sapiens
cagtatccggccagc

SEQ ID NO: 77404 - DNA, 15 bp, Homo sapiens
tcagtatccggccag

SEQ ID NO: 77405 - DNA, 15 bp, Homo sapiens
gtcagtatccggcca

SEQ ID NO: 77406 - DNA, 15 bp, Homo sapiens
ggtcagtatccggcc

SEQ ID NO: 77407 - DNA, 15 bp, Homo sapiens
tggtcagtatccggc

SEQ ID NO: 77408 - DNA, 15 bp, Homo sapiens
ttggtcagtatccgg

SEQ ID NO: 77409 - DNA, 15 bp, Homo sapiens
attggtcagtatccg

SEQ ID NO: 77410 - DNA, 15 bp, Homo sapiens
cattggtcagtatcc

SEQ ID NO: 77411 - DNA, 15 bp, Homo sapiens
ccattggtcagtatc

SEQ ID NO: 77412 - DNA, 15 bp, Homo sapiens
tccattggtcagtat

SEQ ID NO: 77413 - DNA, 15 bp, Homo sapiens
ctccattggtcagta

SEQ ID NO: 77414 - DNA, 15 bp, Homo sapiens
tctccattggtcagt

SEQ ID NO: 77415 - DNA, 15 bp, Homo sapiens
ttctccattggtcag

SEQ ID NO: 77416 - DNA, 15 bp, Homo sapiens
tttctccattggtca

SEQ ID NO: 77417 - DNA, 15 bp, Homo sapiens
gtttctccattggtc

SEQ ID NO: 77418 - DNA, 15 bp, Homo sapiens
ggtttctccattggt

SEQ ID NO: 77419 - DNA, 15 bp, Homo sapiens
tggtttctccattgg

SEQ ID NO: 77420 - DNA, 15 bp, Homo sapiens
ctggtttctccattg

SEQ ID NO: 77421 - DNA, 15 bp, Homo sapiens
cctggtttctccatt

SEQ ID NO: 77422 - DNA, 15 bp, Homo sapiens
tcctggtttctccat

SEQ ID NO: 77423 - DNA, 15 bp, Homo sapiens
gtcctggtttctcca

SEQ ID NO: 77424 - DNA, 15 bp, Homo sapiens
agtcctggtttctcc

SEQ ID NO: 77425 - DNA, 15 bp, Homo sapiens
cagtcctggtttctc

SEQ ID NO: 77426 - DNA, 15 bp, Homo sapiens
ccagtcctggtttct

SEQ ID NO: 77427 - DNA, 15 bp, Homo sapiens
cccagtcctggtttc

SEQ ID NO: 77428 - DNA, 15 bp, Homo sapiens
ccccagtcctggttt

SEQ ID NO: 77429 - DNA, 15 bp, Homo sapiens
gccccagtcctggtt

SEQ ID NO: 77430 - DNA, 15 bp, Homo sapiens
cgccccagtcctggt

SEQ ID NO: 77431 - DNA, 15 bp, Homo sapiens
ccgccccagtcctgg

SEQ ID NO: 77432 - DNA, 15 bp, Homo sapiens
cccgccccagtcctg

SEQ ID NO: 77433 - DNA, 15 bp, Homo sapiens
tcccgccccagtcct

SEQ ID NO: 77434 - DNA, 15 bp, Homo sapiens
ttcccgccccagtcc

SEQ ID NO: 77435 - DNA, 15 bp, Homo sapiens
cttcccgccccagtc

SEQ ID NO: 77436 - DNA, 15 bp, Homo sapiens
ccttcccgccccagt

SEQ ID NO: 77437 - DNA, 15 bp, Homo sapiens
tccttcccgccccag

SEQ ID NO: 77438 - DNA, 15 bp, Homo sapiens
ctccttcccgcccca

SEQ ID NO: 77439 - DNA, 15 bp, Homo sapiens
actccttcccgcccc

SEQ ID NO: 77440 - DNA, 15 bp, Homo sapiens
tactccttcccgccc

SEQ ID NO: 77441 - DNA, 15 bp, Homo sapiens
ctactccttcccgcc

SEQ ID NO: 77442 - DNA, 15 bp, Homo sapiens
cctactccttcccgc

SEQ ID NO: 77443 - DNA, 15 bp, Homo sapiens
acctactccttcccg

SEQ ID NO: 77444 - DNA, 15 bp, Homo sapiens
cacctactccttccc

SEQ ID NO: 77445 - DNA, 15 bp, Homo sapiens
ccacctactccttcc

SEQ ID NO: 77446 - DNA, 15 bp, Homo sapiens
accacctactccttc

SEQ ID NO: 77447 - DNA, 15 bp, Homo sapiens
taccacctactcctt

SEQ ID NO: 77448 - DNA, 15 bp, Homo sapiens
ttaccacctactcct

SEQ ID NO: 77449 - DNA, 15 bp, Homo sapiens
cttaccacctactcc

SEQ ID NO: 77450 - DNA, 15 bp, Homo sapiens
tcttaccacctactc

SEQ ID NO: 77451 - DNA, 15 bp, Homo sapiens
atcttaccacctact

SEQ ID NO: 77452 - DNA, 15 bp, Homo sapiens
aatcttaccacctac

SEQ ID NO: 77453 - DNA, 15 bp, Homo sapiens
gaatcttaccaccta

SEQ ID NO: 77454 - DNA, 15 bp, Homo sapiens
agaatcttaccacct

SEQ ID NO: 77455 - DNA, 15 bp, Homo sapiens
aagaatcttaccacc

SEQ ID NO: 77456 - DNA, 15 bp, Homo sapiens
aaagaatcttaccac

SEQ ID NO: 77457 - DNA, 15 bp, Homo sapiens
aaaagaatcttacca

SEQ ID NO: 77458 - DNA, 15 bp, Homo sapiens
aaaaagaatcttacc

SEQ ID NO: 77459 - DNA, 15 bp, Homo sapiens
gaaaaagaatcttac

SEQ ID NO: 77460 - DNA, 15 bp, Homo sapiens
tgaaaaagaatctta

SEQ ID NO: 77461 - DNA, 15 bp, Homo sapiens
gtgaaaaagaatctt

SEQ ID NO: 77462 - DNA, 15 bp, Homo sapiens
agtgaaaaagaatct

SEQ ID NO: 77463 - DNA, 15 bp, Homo sapiens
aagtgaaaaagaatc

SEQ ID NO: 77464 - DNA, 15 bp, Homo sapiens
caagtgaaaaagaat

SEQ ID NO: 77465 - DNA, 15 bp, Homo sapiens
acaagtgaaaaagaa

SEQ ID NO: 77466 - DNA, 15 bp, Homo sapiens
aacaagtgaaaaaga

SEQ ID NO: 77467 - DNA, 15 bp, Homo sapiens
aaacaagtgaaaaag

SEQ ID NO: 77468 - DNA, 15 bp, Homo sapiens
gaaacaagtgaaaaa

SEQ ID NO: 77469 - DNA, 15 bp, Homo sapiens
ggaaacaagtgaaaa

SEQ ID NO: 77470 - DNA, 15 bp, Homo sapiens
aggaaacaagtgaaa

SEQ ID NO: 77471 - DNA, 15 bp, Homo sapiens
caggaaacaagtgaa

SEQ ID NO: 77472 - DNA, 15 bp, Homo sapiens
gcaggaaacaagtga

SEQ ID NO: 77473 - DNA, 15 bp, Homo sapiens
tgcaggaaacaagtg

SEQ ID NO: 77474 - DNA, 15 bp, Homo sapiens
gtgcaggaaacaagt

SEQ ID NO: 77475 - DNA, 15 bp, Homo sapiens
ggtgcaggaaacaag

SEQ ID NO: 77476 - DNA, 15 bp, Homo sapiens
aggtgcaggaaacaa

SEQ ID NO: 77477 - DNA, 15 bp, Homo sapiens
caggtgcaggaaaca

SEQ ID NO: 77478 - DNA, 15 bp, Homo sapiens
ccaggtgcaggaaac

SEQ ID NO: 77479 - DNA, 15 bp, Homo sapiens
tccaggtgcaggaaa

SEQ ID NO: 77480 - DNA, 15 bp, Homo sapiens
ctccaggtgcaggaa

SEQ ID NO: 77481 - DNA, 15 bp, Homo sapiens
tctccaggtgcagga

SEQ ID NO: 77482 - DNA, 15 bp, Homo sapiens
gtctccaggtgcagg

SEQ ID NO: 77483 - DNA, 15 bp, Homo sapiens
tgtctccaggtgcag

SEQ ID NO: 77484 - DNA, 15 bp, Homo sapiens
ttgtctccaggtgca

SEQ ID NO: 77485 - DNA, 15 bp, Homo sapiens
gttgtctccaggtgc

SEQ ID NO: 77486 - DNA, 15 bp, Homo sapiens
tgttgtctccaggtg

SEQ ID NO: 77487 - DNA, 15 bp, Homo sapiens
ctgttgtctccaggt

SEQ ID NO: 77488 - DNA, 15 bp, Homo sapiens
gctgttgtctccagg

SEQ ID NO: 77489 - DNA, 15 bp, Homo sapiens
tgctgttgtctccag

SEQ ID NO: 77490 - DNA, 15 bp, Homo sapiens
ttgctgttgtctcca

SEQ ID NO: 77491 - DNA, 15 bp, Homo sapiens
cttgctgttgtctcc

SEQ ID NO: 77492 - DNA, 15 bp, Homo sapiens
tcttgctgttgtctc

SEQ ID NO: 77493 - DNA, 15 bp, Homo sapiens
gtcttgctgttgtct

SEQ ID NO: 77494 - DNA, 15 bp, Homo sapiens
ggtcttgctgttgtc

SEQ ID NO: 77495 - DNA, 15 bp, Homo sapiens
tggtcttgctgttgt

SEQ ID NO: 77496 - DNA, 15 bp, Homo sapiens
atggtcttgctgttg

SEQ ID NO: 77497 - DNA, 15 bp, Homo sapiens
aatggtcttgctgtt

SEQ ID NO: 77498 - DNA, 15 bp, Homo sapiens
taatggtcttgctgt

SEQ ID NO: 77499 - DNA, 15 bp, Homo sapiens
ataatggtcttgctg

SEQ ID NO: 77500 - DNA, 15 bp, Homo sapiens
aataatggtcttgct

SEQ ID NO: 77501 - DNA, 15 bp, Homo sapiens
aaataatggtcttgc

SEQ ID NO: 77502 - DNA, 15 bp, Homo sapiens
caaataatggtcttg

SEQ ID NO: 77503 - DNA, 15 bp, Homo sapiens
ccaaataatggtctt

SEQ ID NO: 77504 - DNA, 15 bp, Homo sapiens
tccaaataatggtct

SEQ ID NO: 77505 - DNA, 15 bp, Homo sapiens
atccaaataatggtc

SEQ ID NO: 77506 - DNA, 15 bp, Homo sapiens
catccaaataatggt

SEQ ID NO: 77507 - DNA, 15 bp, Homo sapiens
tcatccaaataatgg

SEQ ID NO: 77508 - DNA, 15 bp, Homo sapiens
ctcatccaaataatg

SEQ ID NO: 77509 - DNA, 15 bp, Homo sapiens
actcatccaaataat

SEQ ID NO: 77510 - DNA, 15 bp, Homo sapiens
aactcatccaaataa

SEQ ID NO: 77511 - DNA, 15 bp, Homo sapiens
taactcatccaaata

SEQ ID NO: 77512 - DNA, 15 bp, Homo sapiens
ataactcatccaaat

SEQ ID NO: 77513 - DNA, 15 bp, Homo sapiens
aataactcatccaaa

SEQ ID NO: 77514 - DNA, 15 bp, Homo sapiens
caataactcatccaa

SEQ ID NO: 77515 - DNA, 15 bp, Homo sapiens
acaataactcatcca

SEQ ID NO: 77516 - DNA, 15 bp, Homo sapiens
aacaataactcatcc

SEQ ID NO: 77517 - DNA, 15 bp, Homo sapiens
aaacaataactcatc

SEQ ID NO: 77518 - DNA, 15 bp, Homo sapiens
taaacaataactcat

SEQ ID NO: 77519 - DNA, 15 bp, Homo sapiens
ctaaacaataactca

SEQ ID NO: 77520 - DNA, 15 bp, Homo sapiens
tctaaacaataactc

SEQ ID NO: 77521 - DNA, 15 bp, Homo sapiens
ctctaaacaataact

SEQ ID NO: 77522 - DNA, 15 bp, Homo sapiens
actctaaacaataac

SEQ ID NO: 77523 - DNA, 15 bp, Homo sapiens
aactctaaacaataa

SEQ ID NO: 77524 - DNA, 15 bp, Homo sapiens
aaactctaaacaata

SEQ ID NO: 77525 - DNA, 15 bp, Homo sapiens
aaaactctaaacaat

SEQ ID NO: 77526 - DNA, 15 bp, Homo sapiens
caaaactctaaacaa

SEQ ID NO: 77527 - DNA, 15 bp, Homo sapiens
acaaaactctaaaca

SEQ ID NO: 77528 - DNA, 15 bp, Homo sapiens
aacaaaactctaaac

SEQ ID NO: 77529 - DNA, 15 bp, Homo sapiens
aaacaaaactctaaa

SEQ ID NO: 77530 - DNA, 15 bp, Homo sapiens
caaacaaaactctaa

SEQ ID NO: 77531 - DNA, 15 bp, Homo sapiens
acaaacaaaactcta

SEQ ID NO: 77532 - DNA, 15 bp, Homo sapiens
aacaaacaaaactct

SEQ ID NO: 77533 - DNA, 15 bp, Homo sapiens
aaacaaacaaaactc

SEQ ID NO: 77534 - DNA, 15 bp, Homo sapiens
aaaacaaacaaaact

SEQ ID NO: 77535 - DNA, 15 bp, Homo sapiens
caaaacaaacaaaac

SEQ ID NO: 77536 - DNA, 15 bp, Homo sapiens
ccaaaacaaacaaaa

SEQ ID NO: 77537 - DNA, 15 bp, Homo sapiens
accaaaacaaacaaa

SEQ ID NO: 77538 - DNA, 15 bp, Homo sapiens
aaccaaaacaaacaa

SEQ ID NO: 77539 - DNA, 15 bp, Homo sapiens
aaaccaaaacaaaca

SEQ ID NO: 77540 - DNA, 15 bp, Homo sapiens
caaaccaaaacaaac

SEQ ID NO: 77541 - DNA, 15 bp, Homo sapiens
ccaaaccaaaacaaa

SEQ ID NO: 77542 - DNA, 15 bp, Homo sapiens
cccaaaccaaaacaa

SEQ ID NO: 77543 - DNA, 15 bp, Homo sapiens
acccaaaccaaaaca

SEQ ID NO: 77544 - DNA, 15 bp, Homo sapiens
aacccaaaccaaaac

SEQ ID NO: 77545 - DNA, 15 bp, Homo sapiens
aaacccaaaccaaaa

SEQ ID NO: 77546 - DNA, 15 bp, Homo sapiens
aaaacccaaaccaaa

SEQ ID NO: 77547 - DNA, 15 bp, Homo sapiens
aaaaacccaaaccaa

SEQ ID NO: 77548 - DNA, 15 bp, Homo sapiens
aaaaaacccaaacca

SEQ ID NO: 77549 - DNA, 15 bp, Homo sapiens
aaaaaaacccaaacc

SEQ ID NO: 77550 - DNA, 15 bp, Homo sapiens
taaaaaaacccaaac

SEQ ID NO: 77551 - DNA, 15 bp, Homo sapiens
ctaaaaaaacccaaa

SEQ ID NO: 77552 - DNA, 15 bp, Homo sapiens
gctaaaaaaacccaa

SEQ ID NO: 77553 - DNA, 15 bp, Homo sapiens
agctaaaaaaaccca

SEQ ID NO: 77554 - DNA, 15 bp, Homo sapiens
aagctaaaaaaaccc

SEQ ID NO: 77555 - DNA, 15 bp, Homo sapiens
aaagctaaaaaaacc

SEQ ID NO: 77556 - DNA, 15 bp, Homo sapiens
taaagctaaaaaaac

SEQ ID NO: 77557 - DNA, 15 bp, Homo sapiens
ataaagctaaaaaaa

SEQ ID NO: 77558 - DNA, 15 bp, Homo sapiens
cataaagctaaaaaa

SEQ ID NO: 77559 - DNA, 15 bp, Homo sapiens
tcataaagctaaaaa

SEQ ID NO: 77560 - DNA, 15 bp, Homo sapiens
ttcataaagctaaaa

SEQ ID NO: 77561 - DNA, 15 bp, Homo sapiens
tttcataaagctaaa

SEQ ID NO: 77562 - DNA, 15 bp, Homo sapiens
ttttcataaagctaa

SEQ ID NO: 77563 - DNA, 15 bp, Homo sapiens
cttttcataaagcta

SEQ ID NO: 77564 - DNA, 15 bp, Homo sapiens
tcttttcataaagct

SEQ ID NO: 77565 - DNA, 15 bp, Homo sapiens
ttcttttcataaagc

SEQ ID NO: 77566 - DNA, 15 bp, Homo sapiens
tttcttttcataaag

SEQ ID NO: 77567 - DNA, 15 bp, Homo sapiens
atttcttttcataaa

SEQ ID NO: 77568 - DNA, 15 bp, Homo sapiens
catttcttttcataa

SEQ ID NO: 77569 - DNA, 15 bp, Homo sapiens
gcatttcttttcata

SEQ ID NO: 77570 - DNA, 15 bp, Homo sapiens
ggcatttcttttcat

SEQ ID NO: 77571 - DNA, 15 bp, Homo sapiens
aggcatttcttttca

SEQ ID NO: 77572 - DNA, 15 bp, Homo sapiens
taggcatttcttttc

SEQ ID NO: 77573 - DNA, 15 bp, Homo sapiens
ataggcatttctttt

SEQ ID NO: 77574 - DNA, 15 bp, Homo sapiens
aataggcatttcttt

SEQ ID NO: 77575 - DNA, 15 bp, Homo sapiens
aaataggcatttctt

SEQ ID NO: 77576 - DNA, 15 bp, Homo sapiens
aaaataggcatttct

SEQ ID NO: 77577 - DNA, 15 bp, Homo sapiens
aaaaataggcatttc

SEQ ID NO: 77578 - DNA, 15 bp, Homo sapiens
gaaaaataggcattt

SEQ ID NO: 77579 - DNA, 15 bp, Homo sapiens
tgaaaaataggcatt

SEQ ID NO: 77580 - DNA, 15 bp, Homo sapiens
ttgaaaaataggcat

SEQ ID NO: 77581 - DNA, 15 bp, Homo sapiens
tttgaaaaataggca

SEQ ID NO: 77582 - DNA, 15 bp, Homo sapiens
atttgaaaaataggc

SEQ ID NO: 77583 - DNA, 15 bp, Homo sapiens
aatttgaaaaatagg

SEQ ID NO: 77584 - DNA, 15 bp, Homo sapiens
aaatttgaaaaatag

SEQ ID NO: 77585 - DNA, 15 bp, Homo sapiens
gaaatttgaaaaata

SEQ ID NO: 77586 - DNA, 15 bp, Homo sapiens
tgaaatttgaaaaat

SEQ ID NO: 77587 - DNA, 15 bp, Homo sapiens
ttgaaatttgaaaaa

SEQ ID NO: 77588 - DNA, 15 bp, Homo sapiens
attgaaatttgaaaa

SEQ ID NO: 77589 - DNA, 15 bp, Homo sapiens
aattgaaatttgaaa

SEQ ID NO: 77590 - DNA, 15 bp, Homo sapiens
caattgaaatttgaa

SEQ ID NO: 77591 - DNA, 15 bp, Homo sapiens
acaattgaaatttga

SEQ ID NO: 77592 - DNA, 15 bp, Homo sapiens
aacaattgaaatttg

SEQ ID NO: 77593 - DNA, 15 bp, Homo sapiens
gaacaattgaaattt

SEQ ID NO: 77594 - DNA, 15 bp, Homo sapiens
ggaacaattgaaatt

SEQ ID NO: 77595 - DNA, 15 bp, Homo sapiens
aggaacaattgaaat

SEQ ID NO: 77596 - DNA, 15 bp, Homo sapiens
aaggaacaattgaaa

SEQ ID NO: 77597 - DNA, 15 bp, Homo sapiens
aaaggaacaattgaa

SEQ ID NO: 77598 - DNA, 15 bp, Homo sapiens
gaaaggaacaattga

SEQ ID NO: 77599 - DNA, 15 bp, Homo sapiens
agaaaggaacaattg

SEQ ID NO: 77600 - DNA, 15 bp, Homo sapiens
tagaaaggaacaatt

SEQ ID NO: 77601 - DNA, 15 bp, Homo sapiens
gtagaaaggaacaat

SEQ ID NO: 77602 - DNA, 15 bp, Homo sapiens
agtagaaaggaacaa

SEQ ID NO: 77603 - DNA, 15 bp, Homo sapiens
cagtagaaaggaaca

SEQ ID NO: 77604 - DNA, 15 bp, Homo sapiens
gcagtagaaaggaac

SEQ ID NO: 77605 - DNA, 15 bp, Homo sapiens
ggcagtagaaaggaa

SEQ ID NO: 77606 - DNA, 15 bp, Homo sapiens
aggcagtagaaagga

SEQ ID NO: 77607 - DNA, 15 bp, Homo sapiens
caggcagtagaaagg

SEQ ID NO: 77608 - DNA, 15 bp, Homo sapiens
acaggcagtagaaag

SEQ ID NO: 77609 - DNA, 15 bp, Homo sapiens
gacaggcagtagaaa

SEQ ID NO: 77610 - DNA, 15 bp, Homo sapiens
ggacaggcagtagaa

SEQ ID NO: 77611 - DNA, 15 bp, Homo sapiens
tggacaggcagtaga

SEQ ID NO: 77612 - DNA, 15 bp, Homo sapiens
ttggacaggcagtag

SEQ ID NO: 77613 - DNA, 15 bp, Homo sapiens
cttggacaggcagta

SEQ ID NO: 77614 - DNA, 15 bp, Homo sapiens
gcttggacaggcagt

SEQ ID NO: 77615 - DNA, 15 bp, Homo sapiens
agcttggacaggcag

SEQ ID NO: 77616 - DNA, 15 bp, Homo sapiens
gagcttggacaggca

SEQ ID NO: 77617 - DNA, 15 bp, Homo sapiens
tgagcttggacaggc

SEQ ID NO: 77618 - DNA, 15 bp, Homo sapiens
gtgagcttggacagg

SEQ ID NO: 77619 - DNA, 15 bp, Homo sapiens
agtgagcttggacag

SEQ ID NO: 77620 - DNA, 15 bp, Homo sapiens
tagtgagcttggaca

SEQ ID NO: 77621 - DNA, 15 bp, Homo sapiens
gtagtgagcttggac

SEQ ID NO: 77622 - DNA, 15 bp, Homo sapiens
agtagtgagcttgga

SEQ ID NO: 77623 - DNA, 15 bp, Homo sapiens
aagtagtgagcttgg

SEQ ID NO: 77624 - DNA, 15 bp, Homo sapiens
aaagtagtgagcttg

SEQ ID NO: 77625 - DNA, 15 bp, Homo sapiens
aaaagtagtgagctt

SEQ ID NO: 77626 - DNA, 15 bp, Homo sapiens
gaaaagtagtgagct

SEQ ID NO: 77627 - DNA, 15 bp, Homo sapiens
tgaaaagtagtgagc

SEQ ID NO: 77628 - DNA, 15 bp, Homo sapiens
ttgaaaagtagtgag

SEQ ID NO: 77629 - DNA, 15 bp, Homo sapiens
cttgaaaagtagtga

SEQ ID NO: 77630 - DNA, 15 bp, Homo sapiens
tcttgaaaagtagtg

SEQ ID NO: 77631 - DNA, 15 bp, Homo sapiens
ctcttgaaaagtagt

SEQ ID NO: 77632 - DNA, 15 bp, Homo sapiens
cctcttgaaaagtag

SEQ ID NO: 77633 - DNA, 15 bp, Homo sapiens
gcctcttgaaaagta

SEQ ID NO: 77634 - DNA, 15 bp, Homo sapiens
ggcctcttgaaaagt

SEQ ID NO: 77635 - DNA, 15 bp, Homo sapiens
tggcctcttgaaaag

SEQ ID NO: 77636 - DNA, 15 bp, Homo sapiens
ttggcctcttgaaaa

SEQ ID NO: 77637 - DNA, 15 bp, Homo sapiens
attggcctcttgaaa

SEQ ID NO: 77638 - DNA, 15 bp, Homo sapiens
gattggcctcttgaa

SEQ ID NO: 77639 - DNA, 15 bp, Homo sapiens
ggattggcctcttga

SEQ ID NO: 77640 - DNA, 15 bp, Homo sapiens
gggattggcctcttg

SEQ ID NO: 77641 - DNA, 15 bp, Homo sapiens
agggattggcctctt

SEQ ID NO: 77642 - DNA, 15 bp, Homo sapiens
cagggattggcctct

SEQ ID NO: 77643 - DNA, 15 bp, Homo sapiens
ccagggattggcctc

SEQ ID NO: 77644 - DNA, 15 bp, Homo sapiens
cccagggattggcct

SEQ ID NO: 77645 - DNA, 15 bp, Homo sapiens
acccagggattggcc

SEQ ID NO: 77646 - DNA, 15 bp, Homo sapiens
tacccagggattggc

SEQ ID NO: 77647 - DNA, 15 bp, Homo sapiens
ttacccagggattgg

SEQ ID NO: 77648 - DNA, 15 bp, Homo sapiens
tttacccagggattg

SEQ ID NO: 77649 - DNA, 15 bp, Homo sapiens
atttacccagggatt

SEQ ID NO: 77650 - DNA, 15 bp, Homo sapiens
gatttacccagggat

SEQ ID NO: 77651 - DNA, 15 bp, Homo sapiens
agatttacccaggga

SEQ ID NO: 77652 - DNA, 15 bp, Homo sapiens
aagatttacccaggg

SEQ ID NO: 77653 - DNA, 15 bp, Homo sapiens
taagatttacccagg

SEQ ID NO: 77654 - DNA, 15 bp, Homo sapiens
ctaagatttacccag

SEQ ID NO: 77655 - DNA, 15 bp, Homo sapiens
actaagatttaccca

SEQ ID NO: 77656 - DNA, 15 bp, Homo sapiens
cactaagatttaccc

SEQ ID NO: 77657 - DNA, 15 bp, Homo sapiens
tcactaagatttacc

SEQ ID NO: 77658 - DNA, 15 bp, Homo sapiens
ttcactaagatttac

SEQ ID NO: 77659 - DNA, 15 bp, Homo sapiens
attcactaagattta

SEQ ID NO: 77660 - DNA, 15 bp, Homo sapiens
tattcactaagattt

SEQ ID NO: 77661 - DNA, 15 bp, Homo sapiens
ctattcactaagatt

SEQ ID NO: 77662 - DNA, 15 bp, Homo sapiens
gctattcactaagat

SEQ ID NO: 77663 - DNA, 15 bp, Homo sapiens
tgctattcactaaga

SEQ ID NO: 77664 - DNA, 15 bp, Homo sapiens
ctgctattcactaag

SEQ ID NO: 77665 - DNA, 15 bp, Homo sapiens
actgctattcactaa

SEQ ID NO: 77666 - DNA, 15 bp, Homo sapiens
gactgctattcacta

SEQ ID NO: 77667 - DNA, 15 bp, Homo sapiens
cgactgctattcact

SEQ ID NO: 77668 - DNA, 15 bp, Homo sapiens
tcgactgctattcac

SEQ ID NO: 77669 - DNA, 15 bp, Homo sapiens
gtcgactgctattca

SEQ ID NO: 77670 - DNA, 15 bp, Homo sapiens
agtcgactgctattc

SEQ ID NO: 77671 - DNA, 15 bp, Homo sapiens
cagtcgactgctatt

SEQ ID NO: 77672 - DNA, 15 bp, Homo sapiens
acagtcgactgctat

SEQ ID NO: 77673 - DNA, 15 bp, Homo sapiens
cacagtcgactgcta

SEQ ID NO: 77674 - DNA, 15 bp, Homo sapiens
acacagtcgactgct

SEQ ID NO: 77675 - DNA, 15 bp, Homo sapiens
aacacagtcgactgc

SEQ ID NO: 77676 - DNA, 15 bp, Homo sapiens
taacacagtcgactg

SEQ ID NO: 77677 - DNA, 15 bp, Homo sapiens
ataacacagtcgact

SEQ ID NO: 77678 - DNA, 15 bp, Homo sapiens
aataacacagtcgac

SEQ ID NO: 77679 - DNA, 15 bp, Homo sapiens
aaataacacagtcga

SEQ ID NO: 77680 - DNA, 15 bp, Homo sapiens
taaataacacagtcg

SEQ ID NO: 77681 - DNA, 15 bp, Homo sapiens
ataaataacacagtc

SEQ ID NO: 77682 - DNA, 15 bp, Homo sapiens
gataaataacacagt

SEQ ID NO: 77683 - DNA, 15 bp, Homo sapiens
agataaataacacag

SEQ ID NO: 77684 - DNA, 15 bp, Homo sapiens
cagataaataacaca

SEQ ID NO: 77685 - DNA, 15 bp, Homo sapiens
acagataaataacac

SEQ ID NO: 77686 - DNA, 15 bp, Homo sapiens
cacagataaataaca

SEQ ID NO: 77687 - DNA, 15 bp, Homo sapiens
gcacagataaataac

SEQ ID NO: 77688 - DNA, 15 bp, Homo sapiens
ggcacagataaataa

SEQ ID NO: 77689 - DNA, 15 bp, Homo sapiens
gggcacagataaata

SEQ ID NO: 77690 - DNA, 15 bp, Homo sapiens
ggggcacagataaat

SEQ ID NO: 77691 - DNA, 15 bp, Homo sapiens
tggggcacagataaa

SEQ ID NO: 77692 - DNA, 15 bp, Homo sapiens
atggggcacagataa

SEQ ID NO: 77693 - DNA, 15 bp, Homo sapiens
catggggcacagata

SEQ ID NO: 77694 - DNA, 15 bp, Homo sapiens
gcatggggcacagat

SEQ ID NO: 77695 - DNA, 15 bp, Homo sapiens
agcatggggcacaga

SEQ ID NO: 77696 - DNA, 15 bp, Homo sapiens
cagcatggggcacag

SEQ ID NO: 77697 - DNA, 15 bp, Homo sapiens
ccagcatggggcaca

SEQ ID NO: 77698 - DNA, 15 bp, Homo sapiens
tccagcatggggcac

SEQ ID NO: 77699 - DNA, 15 bp, Homo sapiens
ctccagcatggggca

SEQ ID NO: 77700 - DNA, 15 bp, Homo sapiens
cctccagcatggggc

SEQ ID NO: 77701 - DNA, 15 bp, Homo sapiens
acctccagcatgggg

SEQ ID NO: 77702 - DNA, 15 bp, Homo sapiens
cacctccagcatggg

SEQ ID NO: 77703 - DNA, 15 bp, Homo sapiens
gcacctccagcatgg

SEQ ID NO: 77704 - DNA, 15 bp, Homo sapiens
tgcacctccagcatg

SEQ ID NO: 77705 - DNA, 15 bp, Homo sapiens
ctgcacctccagcat

SEQ ID NO: 77706 - DNA, 15 bp, Homo sapiens
tctgcacctccagca

SEQ ID NO: 77707 - DNA, 15 bp, Homo sapiens
gtctgcacctccagc

SEQ ID NO: 77708 - DNA, 15 bp, Homo sapiens
agtctgcacctccag

SEQ ID NO: 77709 - DNA, 15 bp, Homo sapiens
gagtctgcacctcca

SEQ ID NO: 77710 - DNA, 15 bp, Homo sapiens
cgagtctgcacctcc

SEQ ID NO: 77711 - DNA, 15 bp, Homo sapiens
ccgagtctgcacctc

SEQ ID NO: 77712 - DNA, 15 bp, Homo sapiens
accgagtctgcacct

SEQ ID NO: 77713 - DNA, 15 bp, Homo sapiens
caccgagtctgcacc

SEQ ID NO: 77714 - DNA, 15 bp, Homo sapiens
tcaccgagtctgcac

SEQ ID NO: 77715 - DNA, 15 bp, Homo sapiens
ctcaccgagtctgca

SEQ ID NO: 77716 - DNA, 15 bp, Homo sapiens
tctcaccgagtctgc

SEQ ID NO: 77717 - DNA, 15 bp, Homo sapiens
gtctcaccgagtctg

SEQ ID NO: 77718 - DNA, 15 bp, Homo sapiens
ggtctcaccgagtct

SEQ ID NO: 77719 - DNA, 15 bp, Homo sapiens
tggtctcaccgagtc

SEQ ID NO: 77720 - DNA, 15 bp, Homo sapiens
ctggtctcaccgagt

SEQ ID NO: 77721 - DNA, 15 bp, Homo sapiens
gctggtctcaccgag

SEQ ID NO: 77722 - DNA, 15 bp, Homo sapiens
tgctggtctcaccga

SEQ ID NO: 77723 - DNA, 15 bp, Homo sapiens
ctgctggtctcaccg

SEQ ID NO: 77724 - DNA, 15 bp, Homo sapiens
tctgctggtctcacc

SEQ ID NO: 77725 - DNA, 15 bp, Homo sapiens
ctctgctggtctcac

SEQ ID NO: 77726 - DNA, 15 bp, Homo sapiens
gctctgctggtctca

SEQ ID NO: 77727 - DNA, 15 bp, Homo sapiens
tgctctgctggtctc

SEQ ID NO: 77728 - DNA, 15 bp, Homo sapiens
ctgctctgctggtct

SEQ ID NO: 77729 - DNA, 15 bp, Homo sapiens
gctgctctgctggtc

SEQ ID NO: 77730 - DNA, 15 bp, Homo sapiens
agctgctctgctggt

SEQ ID NO: 77731 - DNA, 15 bp, Homo sapiens
cagctgctctgctgg

SEQ ID NO: 77732 - DNA, 15 bp, Homo sapiens
tcagctgctctgctg

SEQ ID NO: 77733 - DNA, 15 bp, Homo sapiens
ctcagctgctctgct

SEQ ID NO: 77734 - DNA, 15 bp, Homo sapiens
cctcagctgctctgc

SEQ ID NO: 77735 - DNA, 15 bp, Homo sapiens
acctcagctgctctg

SEQ ID NO: 77736 - DNA, 15 bp, Homo sapiens
aacctcagctgctct

SEQ ID NO: 77737 - DNA, 15 bp, Homo sapiens
taacctcagctgctc

SEQ ID NO: 77738 - DNA, 15 bp, Homo sapiens
ctaacctcagctgct

SEQ ID NO: 77739 - DNA, 15 bp, Homo sapiens
tctaacctcagctgc

SEQ ID NO: 77740 - DNA, 15 bp, Homo sapiens
gtctaacctcagctg

SEQ ID NO: 77741 - DNA, 15 bp, Homo sapiens
agtctaacctcagct

SEQ ID NO: 77742 - DNA, 15 bp, Homo sapiens
gagtctaacctcagc

SEQ ID NO: 77743 - DNA, 15 bp, Homo sapiens
tgagtctaacctcag

SEQ ID NO: 77744 - DNA, 15 bp, Homo sapiens
ctgagtctaacctca

SEQ ID NO: 77745 - DNA, 15 bp, Homo sapiens
actgagtctaacctc

SEQ ID NO: 77746 - DNA, 15 bp, Homo sapiens
cactgagtctaacct

SEQ ID NO: 77747 - DNA, 15 bp, Homo sapiens
ccactgagtctaacc

SEQ ID NO: 77748 - DNA, 15 bp, Homo sapiens
tccactgagtctaac

SEQ ID NO: 77749 - DNA, 15 bp, Homo sapiens
ttccactgagtctaa

SEQ ID NO: 77750 - DNA, 15 bp, Homo sapiens
tttccactgagtcta

SEQ ID NO: 77751 - DNA, 15 bp, Homo sapiens
ttttccactgagtct

SEQ ID NO: 77752 - DNA, 15 bp, Homo sapiens
attttccactgagtc

SEQ ID NO: 77753 - DNA, 15 bp, Homo sapiens
gattttccactgagt

SEQ ID NO: 77754 - DNA, 15 bp, Homo sapiens
ggattttccactgag

SEQ ID NO: 77755 - DNA, 15 bp, Homo sapiens
tggattttccactga

SEQ ID NO: 77756 - DNA, 15 bp, Homo sapiens
ctggattttccactg

SEQ ID NO: 77757 - DNA, 15 bp, Homo sapiens
tctggattttccact

SEQ ID NO: 77758 - DNA, 15 bp, Homo sapiens
ttctggattttccac

SEQ ID NO: 77759 - DNA, 15 bp, Homo sapiens
cttctggattttcca

SEQ ID NO: 77760 - DNA, 15 bp, Homo sapiens
acttctggattttcc

SEQ ID NO: 77761 - DNA, 15 bp, Homo sapiens
cacttctggattttc

SEQ ID NO: 77762 - DNA, 15 bp, Homo sapiens
gcacttctggatttt

SEQ ID NO: 77763 - DNA, 15 bp, Homo sapiens
tgcacttctggattt

SEQ ID NO: 77764 - DNA, 15 bp, Homo sapiens
ctgcacttctggatt

SEQ ID NO: 77765 - DNA, 15 bp, Homo sapiens
tctgcacttctggat

SEQ ID NO: 77766 - DNA, 15 bp, Homo sapiens
atctgcacttctgga

SEQ ID NO: 77767 - DNA, 15 bp, Homo sapiens
catctgcacttctgg

SEQ ID NO: 77768 - DNA, 15 bp, Homo sapiens
acatctgcacttctg

SEQ ID NO: 77769 - DNA, 15 bp, Homo sapiens
cacatctgcacttct

SEQ ID NO: 77770 - DNA, 15 bp, Homo sapiens
ccacatctgcacttc

SEQ ID NO: 77771 - DNA, 15 bp, Homo sapiens
tccacatctgcactt

SEQ ID NO: 77772 - DNA, 15 bp, Homo sapiens
atccacatctgcact

SEQ ID NO: 77773 - DNA, 15 bp, Homo sapiens
gatccacatctgcac

SEQ ID NO: 77774 - DNA, 15 bp, Homo sapiens
ggatccacatctgca

SEQ ID NO: 77775 - DNA, 15 bp, Homo sapiens
tggatccacatctgc

SEQ ID NO: 77776 - DNA, 15 bp, Homo sapiens
ttggatccacatctg

SEQ ID NO: 77777 - DNA, 15 bp, Homo sapiens
tttggatccacatct

SEQ ID NO: 77778 - DNA, 15 bp, Homo sapiens
atttggatccacatc

SEQ ID NO: 77779 - DNA, 15 bp, Homo sapiens
aatttggatccacat

SEQ ID NO: 77780 - DNA, 15 bp, Homo sapiens
caatttggatccaca

SEQ ID NO: 77781 - DNA, 15 bp, Homo sapiens
ccaatttggatccac

SEQ ID NO: 77782 - DNA, 15 bp, Homo sapiens
cccaatttggatcca

SEQ ID NO: 77783 - DNA, 15 bp, Homo sapiens
gcccaatttggatcc

SEQ ID NO: 77784 - DNA, 15 bp, Homo sapiens
agcccaatttggatc

SEQ ID NO: 77785 - DNA, 15 bp, Homo sapiens
cagcccaatttggat

SEQ ID NO: 77786 - DNA, 15 bp, Homo sapiens
tcagcccaatttgga

SEQ ID NO: 77787 - DNA, 15 bp, Homo sapiens
ttcagcccaatttgg

SEQ ID NO: 77788 - DNA, 15 bp, Homo sapiens
tttcagcccaatttg

SEQ ID NO: 77789 - DNA, 15 bp, Homo sapiens
ttttcagcccaattt

SEQ ID NO: 77790 - DNA, 15 bp, Homo sapiens
tttttcagcccaatt

SEQ ID NO: 77791 - DNA, 15 bp, Homo sapiens
ttttttcagcccaat

SEQ ID NO: 77792 - DNA, 15 bp, Homo sapiens
attttttcagcccaa

SEQ ID NO: 77793 - DNA, 15 bp, Homo sapiens
gattttttcagccca

SEQ ID NO: 77794 - DNA, 15 bp, Homo sapiens
agattttttcagccc

SEQ ID NO: 77795 - DNA, 15 bp, Homo sapiens
gagattttttcagcc

SEQ ID NO: 77796 - DNA, 15 bp, Homo sapiens
tgagattttttcagc

SEQ ID NO: 77797 - DNA, 15 bp, Homo sapiens
atgagattttttcag

SEQ ID NO: 77798 - DNA, 15 bp, Homo sapiens
catgagattttttca

SEQ ID NO: 77799 - DNA, 15 bp, Homo sapiens
tcatgagattttttc

SEQ ID NO: 77800 - DNA, 15 bp, Homo sapiens
ctcatgagatttttt

SEQ ID NO: 77801 - DNA, 15 bp, Homo sapiens
tctcatgagattttt

SEQ ID NO: 77802 - DNA, 15 bp, Homo sapiens
atctcatgagatttt

SEQ ID NO: 77803 - DNA, 15 bp, Homo sapiens
gatctcatgagattt

SEQ ID NO: 77804 - DNA, 15 bp, Homo sapiens
tgatctcatgagatt

SEQ ID NO: 77805 - DNA, 15 bp, Homo sapiens
ctgatctcatgagat

SEQ ID NO: 77806 - DNA, 15 bp, Homo sapiens
cctgatctcatgaga

SEQ ID NO: 77807 - DNA, 15 bp, Homo sapiens
gcctgatctcatgag

SEQ ID NO: 77808 - DNA, 15 bp, Homo sapiens
agcctgatctcatga

SEQ ID NO: 77809 - DNA, 15 bp, Homo sapiens
aagcctgatctcatg

SEQ ID NO: 77810 - DNA, 15 bp, Homo sapiens
aaagcctgatctcat

SEQ ID NO: 77811 - DNA, 15 bp, Homo sapiens
gaaagcctgatctca

SEQ ID NO: 77812 - DNA, 15 bp, Homo sapiens
agaaagcctgatctc

SEQ ID NO: 77813 - DNA, 15 bp, Homo sapiens
aagaaagcctgatct

SEQ ID NO: 77814 - DNA, 15 bp, Homo sapiens
caagaaagcctgatc

SEQ ID NO: 77815 - DNA, 15 bp, Homo sapiens
ccaagaaagcctgat

SEQ ID NO: 77816 - DNA, 15 bp, Homo sapiens
tccaagaaagcctga

SEQ ID NO: 77817 - DNA, 15 bp, Homo sapiens
gtccaagaaagcctg

SEQ ID NO: 77818 - DNA, 15 bp, Homo sapiens
agtccaagaaagcct

SEQ ID NO: 77819 - DNA, 15 bp, Homo sapiens
aagtccaagaaagcc

SEQ ID NO: 77820 - DNA, 15 bp, Homo sapiens
gaagtccaagaaagc

SEQ ID NO: 77821 - DNA, 15 bp, Homo sapiens
ggaagtccaagaaag

SEQ ID NO: 77822 - DNA, 15 bp, Homo sapiens
aggaagtccaagaaa

SEQ ID NO: 77823 - DNA, 15 bp, Homo sapiens
caggaagtccaagaa

SEQ ID NO: 77824 - DNA, 15 bp, Homo sapiens
gcaggaagtccaaga

SEQ ID NO: 77825 - DNA, 15 bp, Homo sapiens
agcaggaagtccaag

SEQ ID NO: 77826 - DNA, 15 bp, Homo sapiens
aagcaggaagtccaa

SEQ ID NO: 77827 - DNA, 15 bp, Homo sapiens
aaagcaggaagtcca

SEQ ID NO: 77828 - DNA, 15 bp, Homo sapiens
aaaagcaggaagtcc

SEQ ID NO: 77829 - DNA, 15 bp, Homo sapiens
taaaagcaggaagtc

SEQ ID NO: 77830 - DNA, 15 bp, Homo sapiens
ctaaaagcaggaagt

SEQ ID NO: 77831 - DNA, 15 bp, Homo sapiens
gctaaaagcaggaag

SEQ ID NO: 77832 - DNA, 15 bp, Homo sapiens
ggctaaaagcaggaa

SEQ ID NO: 77833 - DNA, 15 bp, Homo sapiens
aggctaaaagcagga

SEQ ID NO: 77834 - DNA, 15 bp, Homo sapiens
taggctaaaagcagg

SEQ ID NO: 77835 - DNA, 15 bp, Homo sapiens
ttaggctaaaagcag

SEQ ID NO: 77836 - DNA, 15 bp, Homo sapiens
cttaggctaaaagca

SEQ ID NO: 77837 - DNA, 15 bp, Homo sapiens
gcttaggctaaaagc

SEQ ID NO: 77838 - DNA, 15 bp, Homo sapiens
tgcttaggctaaaag

SEQ ID NO: 77839 - DNA, 15 bp, Homo sapiens
gtgcttaggctaaaa

SEQ ID NO: 77840 - DNA, 15 bp, Homo sapiens
agtgcttaggctaaa

SEQ ID NO: 77841 - DNA, 15 bp, Homo sapiens
tagtgcttaggctaa

SEQ ID NO: 77842 - DNA, 15 bp, Homo sapiens
atagtgcttaggcta

SEQ ID NO: 77843 - DNA, 15 bp, Homo sapiens
catagtgcttaggct

SEQ ID NO: 77844 - DNA, 15 bp, Homo sapiens
acatagtgcttaggc

SEQ ID NO: 77845 - DNA, 15 bp, Homo sapiens
aacatagtgcttagg

SEQ ID NO: 77846 - DNA, 15 bp, Homo sapiens
gaacatagtgcttag

SEQ ID NO: 77847 - DNA, 15 bp, Homo sapiens
tgaacatagtgctta

SEQ ID NO: 77848 - DNA, 15 bp, Homo sapiens
ttgaacatagtgctt

SEQ ID NO: 77849 - DNA, 15 bp, Homo sapiens
gttgaacatagtgct

SEQ ID NO: 77850 - DNA, 15 bp, Homo sapiens
tgttgaacatagtgc

SEQ ID NO: 77851 - DNA, 15 bp, Homo sapiens
atgttgaacatagtg

SEQ ID NO: 77852 - DNA, 15 bp, Homo sapiens
tatgttgaacatagt

SEQ ID NO: 77853 - DNA, 15 bp, Homo sapiens
ttatgttgaacatag

SEQ ID NO: 77854 - DNA, 15 bp, Homo sapiens
tttatgttgaacata

SEQ ID NO: 77855 - DNA, 15 bp, Homo sapiens
gtttatgttgaacat

SEQ ID NO: 77856 - DNA, 15 bp, Homo sapiens
cgtttatgttgaaca

SEQ ID NO: 77857 - DNA, 15 bp, Homo sapiens
tcgtttatgttgaac

SEQ ID NO: 77858 - DNA, 15 bp, Homo sapiens
ttcgtttatgttgaa

SEQ ID NO: 77859 - DNA, 15 bp, Homo sapiens
gttcgtttatgttga

SEQ ID NO: 77860 - DNA, 15 bp, Homo sapiens
agttcgtttatgttg

SEQ ID NO: 77861 - DNA, 15 bp, Homo sapiens
aagttcgtttatgtt

SEQ ID NO: 77862 - DNA, 15 bp, Homo sapiens
aaagttcgtttatgt

SEQ ID NO: 77863 - DNA, 15 bp, Homo sapiens
gaaagttcgtttatg

SEQ ID NO: 77864 - DNA, 15 bp, Homo sapiens
cgaaagttcgtttat

SEQ ID NO: 77865 - DNA, 15 bp, Homo sapiens
ccgaaagttcgttta

SEQ ID NO: 77866 - DNA, 15 bp, Homo sapiens
accgaaagttcgttt

SEQ ID NO: 77867 - DNA, 15 bp, Homo sapiens
taccgaaagttcgtt

SEQ ID NO: 77868 - DNA, 15 bp, Homo sapiens
ataccgaaagttcgt

SEQ ID NO: 77869 - DNA, 15 bp, Homo sapiens
aataccgaaagttcg

SEQ ID NO: 77870 - DNA, 15 bp, Homo sapiens
aaataccgaaagttc

SEQ ID NO: 77871 - DNA, 15 bp, Homo sapiens
aaaataccgaaagtt

SEQ ID NO: 77872 - DNA, 15 bp, Homo sapiens
caaaataccgaaagt

SEQ ID NO: 77873 - DNA, 15 bp, Homo sapiens
tcaaaataccgaaag

SEQ ID NO: 77874 - DNA, 15 bp, Homo sapiens
ttcaaaataccgaaa

SEQ ID NO: 77875 - DNA, 15 bp, Homo sapiens
tttcaaaataccgaa

SEQ ID NO: 77876 - DNA, 15 bp, Homo sapiens
gtttcaaaataccga

SEQ ID NO: 77877 - DNA, 15 bp, Homo sapiens
agtttcaaaataccg

SEQ ID NO: 77878 - DNA, 15 bp, Homo sapiens
aagtttcaaaatacc

SEQ ID NO: 77879 - DNA, 15 bp, Homo sapiens
gaagtttcaaaatac

SEQ ID NO: 77880 - DNA, 15 bp, Homo sapiens
ggaagtttcaaaata

SEQ ID NO: 77881 - DNA, 15 bp, Homo sapiens
cggaagtttcaaaat

SEQ ID NO: 77882 - DNA, 15 bp, Homo sapiens
acggaagtttcaaaa

SEQ ID NO: 77883 - DNA, 15 bp, Homo sapiens
aacggaagtttcaaa

SEQ ID NO: 77884 - DNA, 15 bp, Homo sapiens
aaacggaagtttcaa

SEQ ID NO: 77885 - DNA, 15 bp, Homo sapiens
gaaacggaagtttca

SEQ ID NO: 77886 - DNA, 15 bp, Homo sapiens
agaaacggaagtttc

SEQ ID NO: 77887 - DNA, 15 bp, Homo sapiens
cagaaacggaagttt

SEQ ID NO: 77888 - DNA, 15 bp, Homo sapiens
tcagaaacggaagtt

SEQ ID NO: 77889 - DNA, 15 bp, Homo sapiens
atcagaaacggaagt

SEQ ID NO: 77890 - DNA, 15 bp, Homo sapiens
gatcagaaacggaag

SEQ ID NO: 77891 - DNA, 15 bp, Homo sapiens
agatcagaaacggaa

SEQ ID NO: 77892 - DNA, 15 bp, Homo sapiens
gagatcagaaacgga

SEQ ID NO: 77893 - DNA, 15 bp, Homo sapiens
tgagatcagaaacgg

SEQ ID NO: 77894 - DNA, 15 bp, Homo sapiens
ctgagatcagaaacg

SEQ ID NO: 77895 - DNA, 15 bp, Homo sapiens
tctgagatcagaaac

SEQ ID NO: 77896 - DNA, 15 bp, Homo sapiens
ttctgagatcagaaa

SEQ ID NO: 77897 - DNA, 15 bp, Homo sapiens
gttctgagatcagaa

SEQ ID NO: 77898 - DNA, 15 bp, Homo sapiens
ggttctgagatcaga

SEQ ID NO: 77899 - DNA, 15 bp, Homo sapiens
aggttctgagatcag

SEQ ID NO: 77900 - DNA, 15 bp, Homo sapiens
caggttctgagatca

SEQ ID NO: 77901 - DNA, 15 bp, Homo sapiens
ccaggttctgagatc

SEQ ID NO: 77902 - DNA, 15 bp, Homo sapiens
tccaggttctgagat

SEQ ID NO: 77903 - DNA, 15 bp, Homo sapiens
ttccaggttctgaga

SEQ ID NO: 77904 - DNA, 15 bp, Homo sapiens
cttccaggttctgag

SEQ ID NO: 77905 - DNA, 15 bp, Homo sapiens
acttccaggttctga

SEQ ID NO: 77906 - DNA, 15 bp, Homo sapiens
tacttccaggttctg

SEQ ID NO: 77907 - DNA, 15 bp, Homo sapiens
ttacttccaggttct

SEQ ID NO: 77908 - DNA, 15 bp, Homo sapiens
tttacttccaggttc

SEQ ID NO: 77909 - DNA, 15 bp, Homo sapiens
ctttacttccaggtt

SEQ ID NO: 77910 - DNA, 15 bp, Homo sapiens
tctttacttccaggt

SEQ ID NO: 77911 - DNA, 15 bp, Homo sapiens
ctctttacttccagg

SEQ ID NO: 77912 - DNA, 15 bp, Homo sapiens
gctctttacttccag

SEQ ID NO: 77913 - DNA, 15 bp, Homo sapiens
agctctttacttcca

SEQ ID NO: 77914 - DNA, 15 bp, Homo sapiens
cagctctttacttcc

SEQ ID NO: 77915 - DNA, 15 bp, Homo sapiens
acagctctttacttc

SEQ ID NO: 77916 - DNA, 15 bp, Homo sapiens
aacagctctttactt

SEQ ID NO: 77917 - DNA, 15 bp, Homo sapiens
caacagctctttact

SEQ ID NO: 77918 - DNA, 15 bp, Homo sapiens
acaacagctctttac

SEQ ID NO: 77919 - DNA, 15 bp, Homo sapiens
cacaacagctcttta

SEQ ID NO: 77920 - DNA, 15 bp, Homo sapiens
tcacaacagctcttt

SEQ ID NO: 77921 - DNA, 15 bp, Homo sapiens
ttcacaacagctctt

SEQ ID NO: 77922 - DNA, 15 bp, Homo sapiens
gttcacaacagctct

SEQ ID NO: 77923 - DNA, 15 bp, Homo sapiens
tgttcacaacagctc

SEQ ID NO: 77924 - DNA, 15 bp, Homo sapiens
atgttcacaacagct

SEQ ID NO: 77925 - DNA, 15 bp, Homo sapiens
aatgttcacaacagc

SEQ ID NO: 77926 - DNA, 15 bp, Homo sapiens
aaatgttcacaacag

SEQ ID NO: 77927 - DNA, 15 bp, Homo sapiens
gaaatgttcacaaca

SEQ ID NO: 77928 - DNA, 15 bp, Homo sapiens
ggaaatgttcacaac

SEQ ID NO: 77929 - DNA, 15 bp, Homo sapiens
tggaaatgttcacaa

SEQ ID NO: 77930 - DNA, 15 bp, Homo sapiens
gtggaaatgttcaca

SEQ ID NO: 77931 - DNA, 15 bp, Homo sapiens
tgtggaaatgttcac

SEQ ID NO: 77932 - DNA, 15 bp, Homo sapiens
ttgtggaaatgttca

SEQ ID NO: 77933 - DNA, 15 bp, Homo sapiens
tttgtggaaatgttc

SEQ ID NO: 77934 - DNA, 15 bp, Homo sapiens
atttgtggaaatgtt

SEQ ID NO: 77935 - DNA, 15 bp, Homo sapiens
aatttgtggaaatgt

SEQ ID NO: 77936 - DNA, 15 bp, Homo sapiens
aaatttgtggaaatg

SEQ ID NO: 77937 - DNA, 15 bp, Homo sapiens
aaaatttgtggaaat

SEQ ID NO: 77938 - DNA, 15 bp, Homo sapiens
caaaatttgtggaaa

SEQ ID NO: 77939 - DNA, 15 bp, Homo sapiens
acaaaatttgtggaa

SEQ ID NO: 77940 - DNA, 15 bp, Homo sapiens
gacaaaatttgtgga

SEQ ID NO: 77941 - DNA, 15 bp, Homo sapiens
tgacaaaatttgtgg

SEQ ID NO: 77942 - DNA, 15 bp, Homo sapiens
atgacaaaatttgtg

SEQ ID NO: 77943 - DNA, 15 bp, Homo sapiens
catgacaaaatttgt

SEQ ID NO: 77944 - DNA, 15 bp, Homo sapiens
ccatgacaaaatttg

SEQ ID NO: 77945 - DNA, 15 bp, Homo sapiens
accatgacaaaattt

SEQ ID NO: 77946 - DNA, 15 bp, Homo sapiens
aaccatgacaaaatt

SEQ ID NO: 77947 - DNA, 15 bp, Homo sapiens
taaccatgacaaaat

SEQ ID NO: 77948 - DNA, 15 bp, Homo sapiens
ataaccatgacaaaa

SEQ ID NO: 77949 - DNA, 15 bp, Homo sapiens
aataaccatgacaaa

SEQ ID NO: 77950 - DNA, 15 bp, Homo sapiens
gaataaccatgacaa

SEQ ID NO: 77951 - DNA, 15 bp, Homo sapiens
agaataaccatgaca

SEQ ID NO: 77952 - DNA, 15 bp, Homo sapiens
cagaataaccatgac

SEQ ID NO: 77953 - DNA, 15 bp, Homo sapiens
ccagaataaccatga

SEQ ID NO: 77954 - DNA, 15 bp, Homo sapiens
tccagaataaccatg

SEQ ID NO: 77955 - DNA, 15 bp, Homo sapiens
ctccagaataaccat

SEQ ID NO: 77956 - DNA, 15 bp, Homo sapiens
cctccagaataacca

SEQ ID NO: 77957 - DNA, 15 bp, Homo sapiens
gcctccagaataacc

SEQ ID NO: 77958 - DNA, 15 bp, Homo sapiens
tgcctccagaataac

SEQ ID NO: 77959 - DNA, 15 bp, Homo sapiens
ctgcctccagaataa

SEQ ID NO: 77960 - DNA, 15 bp, Homo sapiens
tctgcctccagaata

SEQ ID NO: 77961 - DNA, 15 bp, Homo sapiens
ctctgcctccagaat

SEQ ID NO: 77962 - DNA, 15 bp, Homo sapiens
actctgcctccagaa

SEQ ID NO: 77963 - DNA, 15 bp, Homo sapiens
aactctgcctccaga

SEQ ID NO: 77964 - DNA, 15 bp, Homo sapiens
caactctgcctccag

SEQ ID NO: 77965 - DNA, 15 bp, Homo sapiens
tcaactctgcctcca

SEQ ID NO: 77966 - DNA, 15 bp, Homo sapiens
ttcaactctgcctcc

SEQ ID NO: 77967 - DNA, 15 bp, Homo sapiens
gttcaactctgcctc

SEQ ID NO: 77968 - DNA, 15 bp, Homo sapiens
ggttcaactctgcct

SEQ ID NO: 77969 - DNA, 15 bp, Homo sapiens
gggttcaactctgcc

SEQ ID NO: 77970 - DNA, 15 bp, Homo sapiens
agggttcaactctgc

SEQ ID NO: 77971 - DNA, 15 bp, Homo sapiens
cagggttcaactctg

SEQ ID NO: 77972 - DNA, 15 bp, Homo sapiens
acagggttcaactct

SEQ ID NO: 77973 - DNA, 15 bp, Homo sapiens
tacagggttcaactc

SEQ ID NO: 77974 - DNA, 15 bp, Homo sapiens
ttacagggttcaact

SEQ ID NO: 77975 - DNA, 15 bp, Homo sapiens
attacagggttcaac

SEQ ID NO: 77976 - DNA, 15 bp, Homo sapiens
aattacagggttcaa

SEQ ID NO: 77977 - DNA, 15 bp, Homo sapiens
taattacagggttca

SEQ ID NO: 77978 - DNA, 15 bp, Homo sapiens
gtaattacagggttc

SEQ ID NO: 77979 - DNA, 15 bp, Homo sapiens
cgtaattacagggtt

SEQ ID NO: 77980 - DNA, 15 bp, Homo sapiens
ccgtaattacagggt

SEQ ID NO: 77981 - DNA, 15 bp, Homo sapiens
tccgtaattacaggg

SEQ ID NO: 77982 - DNA, 15 bp, Homo sapiens
ctccgtaattacagg

SEQ ID NO: 77983 - DNA, 15 bp, Homo sapiens
gctccgtaattacag

SEQ ID NO: 77984 - DNA, 15 bp, Homo sapiens
agctccgtaattaca

SEQ ID NO: 77985 - DNA, 15 bp, Homo sapiens
aagctccgtaattac

SEQ ID NO: 77986 - DNA, 15 bp, Homo sapiens
aaagctccgtaatta

SEQ ID NO: 77987 - DNA, 15 bp, Homo sapiens
caaagctccgtaatt

SEQ ID NO: 77988 - DNA, 15 bp, Homo sapiens
ccaaagctccgtaat

SEQ ID NO: 77989 - DNA, 15 bp, Homo sapiens
cccaaagctccgtaa

SEQ ID NO: 77990 - DNA, 15 bp, Homo sapiens
tcccaaagctccgta

SEQ ID NO: 77991 - DNA, 15 bp, Homo sapiens
gtcccaaagctccgt

SEQ ID NO: 77992 - DNA, 15 bp, Homo sapiens
agtcccaaagctccg

SEQ ID NO: 77993 - DNA, 15 bp, Homo sapiens
gagtcccaaagctcc

SEQ ID NO: 77994 - DNA, 15 bp, Homo sapiens
tgagtcccaaagctc

SEQ ID NO: 77995 - DNA, 15 bp, Homo sapiens
gtgagtcccaaagct

SEQ ID NO: 77996 - DNA, 15 bp, Homo sapiens
agtgagtcccaaagc

SEQ ID NO: 77997 - DNA, 15 bp, Homo sapiens
tagtgagtcccaaag

SEQ ID NO: 77998 - DNA, 15 bp, Homo sapiens
gtagtgagtcccaaa

SEQ ID NO: 77999 - DNA, 15 bp, Homo sapiens
tgtagtgagtcccaa

SEQ ID NO: 78000 - DNA, 15 bp, Homo sapiens
gtgtagtgagtccca

SEQ ID NO: 78001 - DNA, 15 bp, Homo sapiens
ggtgtagtgagtccc

SEQ ID NO: 78002 - DNA, 15 bp, Homo sapiens
gggtgtagtgagtcc

SEQ ID NO: 78003 - DNA, 15 bp, Homo sapiens
tgggtgtagtgagtc

SEQ ID NO: 78004 - DNA, 15 bp, Homo sapiens
gtgggtgtagtgagt

SEQ ID NO: 78005 - DNA, 15 bp, Homo sapiens
tgtgggtgtagtgag

SEQ ID NO: 78006 - DNA, 15 bp, Homo sapiens
ctgtgggtgtagtga

SEQ ID NO: 78007 - DNA, 15 bp, Homo sapiens
actgtgggtgtagtg

SEQ ID NO: 78008 - DNA, 15 bp, Homo sapiens
cactgtgggtgtagt

SEQ ID NO: 78009 - DNA, 15 bp, Homo sapiens
ccactgtgggtgtag

SEQ ID NO: 78010 - DNA, 15 bp, Homo sapiens
gccactgtgggtgta

SEQ ID NO: 78011 - DNA, 15 bp, Homo sapiens
ggccactgtgggtgt

SEQ ID NO: 78012 - DNA, 15 bp, Homo sapiens
aggccactgtgggtg

SEQ ID NO: 78013 - DNA, 15 bp, Homo sapiens
caggccactgtgggt

SEQ ID NO: 78014 - DNA, 15 bp, Homo sapiens
gcaggccactgtggg

SEQ ID NO: 78015 - DNA, 15 bp, Homo sapiens
ggcaggccactgtgg

SEQ ID NO: 78016 - DNA, 15 bp, Homo sapiens
aggcaggccactgtg

SEQ ID NO: 78017 - DNA, 15 bp, Homo sapiens
caggcaggccactgt

SEQ ID NO: 78018 - DNA, 15 bp, Homo sapiens
ccaggcaggccactg

SEQ ID NO: 78019 - DNA, 15 bp, Homo sapiens
tccaggcaggccact

SEQ ID NO: 78020 - DNA, 15 bp, Homo sapiens
atccaggcaggccac

SEQ ID NO: 78021 - DNA, 15 bp, Homo sapiens
aatccaggcaggcca

SEQ ID NO: 78022 - DNA, 15 bp, Homo sapiens
caatccaggcaggcc

SEQ ID NO: 78023 - DNA, 15 bp, Homo sapiens
gcaatccaggcaggc

SEQ ID NO: 78024 - DNA, 15 bp, Homo sapiens
tgcaatccaggcagg

SEQ ID NO: 78025 - DNA, 15 bp, Homo sapiens
ctgcaatccaggcag

SEQ ID NO: 78026 - DNA, 15 bp, Homo sapiens
actgcaatccaggca

SEQ ID NO: 78027 - DNA, 15 bp, Homo sapiens
tactgcaatccaggc

SEQ ID NO: 78028 - DNA, 15 bp, Homo sapiens
atactgcaatccagg

SEQ ID NO: 78029 - DNA, 15 bp, Homo sapiens
catactgcaatccag

SEQ ID NO: 78030 - DNA, 15 bp, Homo sapiens
ccatactgcaatcca

SEQ ID NO: 78031 - DNA, 15 bp, Homo sapiens
cccatactgcaatcc

SEQ ID NO: 78032 - DNA, 15 bp, Homo sapiens
tcccatactgcaatc

SEQ ID NO: 78033 - DNA, 15 bp, Homo sapiens
ctcccatactgcaat

SEQ ID NO: 78034 - DNA, 15 bp, Homo sapiens
tctcccatactgcaa

SEQ ID NO: 78035 - DNA, 15 bp, Homo sapiens
ctctcccatactgca

SEQ ID NO: 78036 - DNA, 15 bp, Homo sapiens
cctctcccatactgc

SEQ ID NO: 78037 - DNA, 15 bp, Homo sapiens
ccctctcccatactg

SEQ ID NO: 78038 - DNA, 15 bp, Homo sapiens
cccctctcccatact

SEQ ID NO: 78039 - DNA, 15 bp, Homo sapiens
tcccctctcccatac

SEQ ID NO: 78040 - DNA, 15 bp, Homo sapiens
ttcccctctcccata

SEQ ID NO: 78041 - DNA, 15 bp, Homo sapiens
cttcccctctcccat

SEQ ID NO: 78042 - DNA, 15 bp, Homo sapiens
ccttcccctctccca

SEQ ID NO: 78043 - DNA, 15 bp, Homo sapiens
gccttcccctctccc

SEQ ID NO: 78044 - DNA, 15 bp, Homo sapiens
tgccttcccctctcc

SEQ ID NO: 78045 - DNA, 15 bp, Homo sapiens
atgccttcccctctc

SEQ ID NO: 78046 - DNA, 15 bp, Homo sapiens
aatgccttcccctct

SEQ ID NO: 78047 - DNA, 15 bp, Homo sapiens
aaatgccttcccctc

SEQ ID NO: 78048 - DNA, 15 bp, Homo sapiens
aaaatgccttcccct

SEQ ID NO: 78049 - DNA, 15 bp, Homo sapiens
caaaatgccttcccc

SEQ ID NO: 78050 - DNA, 15 bp, Homo sapiens
ccaaaatgccttccc

SEQ ID NO: 78051 - DNA, 15 bp, Homo sapiens
accaaaatgccttcc

SEQ ID NO: 78052 - DNA, 15 bp, Homo sapiens
caccaaaatgccttc

SEQ ID NO: 78053 - DNA, 15 bp, Homo sapiens
ccaccaaaatgcctt

SEQ ID NO: 78054 - DNA, 15 bp, Homo sapiens
tccaccaaaatgcct

SEQ ID NO: 78055 - DNA, 15 bp, Homo sapiens
ctccaccaaaatgcc

SEQ ID NO: 78056 - DNA, 15 bp, Homo sapiens
tctccaccaaaatgc

SEQ ID NO: 78057 - DNA, 15 bp, Homo sapiens
ctctccaccaaaatg

SEQ ID NO: 78058 - DNA, 15 bp, Homo sapiens
actctccaccaaaat

SEQ ID NO: 78059 - DNA, 15 bp, Homo sapiens
gactctccaccaaaa

SEQ ID NO: 78060 - DNA, 15 bp, Homo sapiens
ggactctccaccaaa

SEQ ID NO: 78061 - DNA, 15 bp, Homo sapiens
tggactctccaccaa

SEQ ID NO: 78062 - DNA, 15 bp, Homo sapiens
ctggactctccacca

SEQ ID NO: 78063 - DNA, 15 bp, Homo sapiens
cctggactctccacc

SEQ ID NO: 78064 - DNA, 15 bp, Homo sapiens
gcctggactctccac

SEQ ID NO: 78065 - DNA, 15 bp, Homo sapiens
agcctggactctcca

SEQ ID NO: 78066 - DNA, 15 bp, Homo sapiens
aagcctggactctcc

SEQ ID NO: 78067 - DNA, 15 bp, Homo sapiens
aaagcctggactctc

SEQ ID NO: 78068 - DNA, 15 bp, Homo sapiens
caaagcctggactct

SEQ ID NO: 78069 - DNA, 15 bp, Homo sapiens
ccaaagcctggactc

SEQ ID NO: 78070 - DNA, 15 bp, Homo sapiens
tccaaagcctggact

SEQ ID NO: 78071 - DNA, 15 bp, Homo sapiens
ctccaaagcctggac

SEQ ID NO: 78072 - DNA, 15 bp, Homo sapiens
tctccaaagcctgga

SEQ ID NO: 78073 - DNA, 15 bp, Homo sapiens
gtctccaaagcctgg

SEQ ID NO: 78074 - DNA, 15 bp, Homo sapiens
tgtctccaaagcctg

SEQ ID NO: 78075 - DNA, 15 bp, Homo sapiens
ctgtctccaaagcct

SEQ ID NO: 78076 - DNA, 15 bp, Homo sapiens
cctgtctccaaagcc

SEQ ID NO: 78077 - DNA, 15 bp, Homo sapiens
gcctgtctccaaagc

SEQ ID NO: 78078 - DNA, 15 bp, Homo sapiens
tgcctgtctccaaag

SEQ ID NO: 78079 - DNA, 15 bp, Homo sapiens
ctgcctgtctccaaa

SEQ ID NO: 78080 - DNA, 15 bp, Homo sapiens
cctgcctgtctccaa

SEQ ID NO: 78081 - DNA, 15 bp, Homo sapiens
tcctgcctgtctcca

SEQ ID NO: 78082 - DNA, 15 bp, Homo sapiens
gtcctgcctgtctcc

SEQ ID NO: 78083 - DNA, 15 bp, Homo sapiens
ggtcctgcctgtctc

SEQ ID NO: 78084 - DNA, 15 bp, Homo sapiens
gggtcctgcctgtct

SEQ ID NO: 78085 - DNA, 15 bp, Homo sapiens
agggtcctgcctgtc

SEQ ID NO: 78086 - DNA, 15 bp, Homo sapiens
cagggtcctgcctgt

SEQ ID NO: 78087 - DNA, 15 bp, Homo sapiens
acagggtcctgcctg

SEQ ID NO: 78088 - DNA, 15 bp, Homo sapiens
aacagggtcctgcct

SEQ ID NO: 78089 - DNA, 15 bp, Homo sapiens
gaacagggtcctgcc

SEQ ID NO: 78090 - DNA, 15 bp, Homo sapiens
tgaacagggtcctgc

SEQ ID NO: 78091 - DNA, 15 bp, Homo sapiens
ttgaacagggtcctg

SEQ ID NO: 78092 - DNA, 15 bp, Homo sapiens
tttgaacagggtcct

SEQ ID NO: 78093 - DNA, 15 bp, Homo sapiens
atttgaacagggtcc

SEQ ID NO: 78094 - DNA, 15 bp, Homo sapiens
aatttgaacagggtc

SEQ ID NO: 78095 - DNA, 15 bp, Homo sapiens
gaatttgaacagggt

SEQ ID NO: 78096 - DNA, 15 bp, Homo sapiens
agaatttgaacaggg

SEQ ID NO: 78097 - DNA, 15 bp, Homo sapiens
tagaatttgaacagg

SEQ ID NO: 78098 - DNA, 15 bp, Homo sapiens
ctagaatttgaacag

SEQ ID NO: 78099 - DNA, 15 bp, Homo sapiens
gctagaatttgaaca

SEQ ID NO: 78100 - DNA, 15 bp, Homo sapiens
agctagaatttgaac

SEQ ID NO: 78101 - DNA, 15 bp, Homo sapiens
gagctagaatttgaa

SEQ ID NO: 78102 - DNA, 15 bp, Homo sapiens
agagctagaatttga

SEQ ID NO: 78103 - DNA, 15 bp, Homo sapiens
cagagctagaatttg

SEQ ID NO: 78104 - DNA, 15 bp, Homo sapiens
gcagagctagaattt

SEQ ID NO: 78105 - DNA, 15 bp, Homo sapiens
ggcagagctagaatt

SEQ ID NO: 78106 - DNA, 15 bp, Homo sapiens
tggcagagctagaat

SEQ ID NO: 78107 - DNA, 15 bp, Homo sapiens
atggcagagctagaa

SEQ ID NO: 78108 - DNA, 15 bp, Homo sapiens
aatggcagagctaga

SEQ ID NO: 78109 - DNA, 15 bp, Homo sapiens
aaatggcagagctag

SEQ ID NO: 78110 - DNA, 15 bp, Homo sapiens
gaaatggcagagcta

SEQ ID NO: 78111 - DNA, 15 bp, Homo sapiens
ggaaatggcagagct

SEQ ID NO: 78112 - DNA, 15 bp, Homo sapiens
cggaaatggcagagc

SEQ ID NO: 78113 - DNA, 15 bp, Homo sapiens
ccggaaatggcagag

SEQ ID NO: 78114 - DNA, 15 bp, Homo sapiens
gccggaaatggcaga

SEQ ID NO: 78115 - DNA, 15 bp, Homo sapiens
ggccggaaatggcag

SEQ ID NO: 78116 - DNA, 15 bp, Homo sapiens
tggccggaaatggca

SEQ ID NO: 78117 - DNA, 15 bp, Homo sapiens
atggccggaaatggc

SEQ ID NO: 78118 - DNA, 15 bp, Homo sapiens
catggccggaaatgg

SEQ ID NO: 78119 - DNA, 15 bp, Homo sapiens
acatggccggaaatg

SEQ ID NO: 78120 - DNA, 15 bp, Homo sapiens
cacatggccggaaat

SEQ ID NO: 78121 - DNA, 15 bp, Homo sapiens
tcacatggccggaaa

SEQ ID NO: 78122 - DNA, 15 bp, Homo sapiens
gtcacatggccggaa

SEQ ID NO: 78123 - DNA, 15 bp, Homo sapiens
agtcacatggccgga

SEQ ID NO: 78124 - DNA, 15 bp, Homo sapiens
cagtcacatggccgg

SEQ ID NO: 78125 - DNA, 15 bp, Homo sapiens
ccagtcacatggccg

SEQ ID NO: 78126 - DNA, 15 bp, Homo sapiens
tccagtcacatggcc

SEQ ID NO: 78127 - DNA, 15 bp, Homo sapiens
gtccagtcacatggc

SEQ ID NO: 78128 - DNA, 15 bp, Homo sapiens
ggtccagtcacatgg

SEQ ID NO: 78129 - DNA, 15 bp, Homo sapiens
aggtccagtcacatg

SEQ ID NO: 78130 - DNA, 15 bp, Homo sapiens
caggtccagtcacat

SEQ ID NO: 78131 - DNA, 15 bp, Homo sapiens
acaggtccagtcaca

SEQ ID NO: 78132 - DNA, 15 bp, Homo sapiens
gacaggtccagtcac

SEQ ID NO: 78133 - DNA, 15 bp, Homo sapiens
tgacaggtccagtca

SEQ ID NO: 78134 - DNA, 15 bp, Homo sapiens
ctgacaggtccagtc

SEQ ID NO: 78135 - DNA, 15 bp, Homo sapiens
tctgacaggtccagt

SEQ ID NO: 78136 - DNA, 15 bp, Homo sapiens
ctctgacaggtccag

SEQ ID NO: 78137 - DNA, 15 bp, Homo sapiens
actctgacaggtcca

SEQ ID NO: 78138 - DNA, 15 bp, Homo sapiens
gactctgacaggtcc

SEQ ID NO: 78139 - DNA, 15 bp, Homo sapiens
agactctgacaggtc

SEQ ID NO: 78140 - DNA, 15 bp, Homo sapiens
gagactctgacaggt

SEQ ID NO: 78141 - DNA, 15 bp, Homo sapiens
tgagactctgacagg

SEQ ID NO: 78142 - DNA, 15 bp, Homo sapiens
ctgagactctgacag

SEQ ID NO: 78143 - DNA, 15 bp, Homo sapiens
actgagactctgaca

SEQ ID NO: 78144 - DNA, 15 bp, Homo sapiens
aactgagactctgac

SEQ ID NO: 78145 - DNA, 15 bp, Homo sapiens
aaactgagactctga

SEQ ID NO: 78146 - DNA, 15 bp, Homo sapiens
gaaactgagactctg

SEQ ID NO: 78147 - DNA, 15 bp, Homo sapiens
ggaaactgagactct

SEQ ID NO: 78148 - DNA, 15 bp, Homo sapiens
aggaaactgagactc

SEQ ID NO: 78149 - DNA, 15 bp, Homo sapiens
gaggaaactgagact

SEQ ID NO: 78150 - DNA, 15 bp, Homo sapiens
tgaggaaactgagac

SEQ ID NO: 78151 - DNA, 15 bp, Homo sapiens
atgaggaaactgaga

SEQ ID NO: 78152 - DNA, 15 bp, Homo sapiens
gatgaggaaactgag

SEQ ID NO: 78153 - DNA, 15 bp, Homo sapiens
tgatgaggaaactga

SEQ ID NO: 78154 - DNA, 15 bp, Homo sapiens
ctgatgaggaaactg

SEQ ID NO: 78155 - DNA, 15 bp, Homo sapiens
actgatgaggaaact

SEQ ID NO: 78156 - DNA, 15 bp, Homo sapiens
aactgatgaggaaac

SEQ ID NO: 78157 - DNA, 15 bp, Homo sapiens
taactgatgaggaaa

SEQ ID NO: 78158 - DNA, 15 bp, Homo sapiens
ctaactgatgaggaa

SEQ ID NO: 78159 - DNA, 15 bp, Homo sapiens
tctaactgatgagga

SEQ ID NO: 78160 - DNA, 15 bp, Homo sapiens
atctaactgatgagg

SEQ ID NO: 78161 - DNA, 15 bp, Homo sapiens
aatctaactgatgag

SEQ ID NO: 78162 - DNA, 15 bp, Homo sapiens
taatctaactgatga

SEQ ID NO: 78163 - DNA, 15 bp, Homo sapiens
ttaatctaactgatg

SEQ ID NO: 78164 - DNA, 15 bp, Homo sapiens
tttaatctaactgat

SEQ ID NO: 78165 - DNA, 15 bp, Homo sapiens
ttttaatctaactga

SEQ ID NO: 78166 - DNA, 15 bp, Homo sapiens
tttttaatctaactg

SEQ ID NO: 78167 - DNA, 15 bp, Homo sapiens
ttttttaatctaact

SEQ ID NO: 78168 - DNA, 15 bp, Homo sapiens
tttttttaatctaac

SEQ ID NO: 78169 - DNA, 15 bp, Homo sapiens
ttttttttaatctaa

SEQ ID NO: 78170 - DNA, 15 bp, Homo sapiens
tttttttttaatcta

SEQ ID NO: 78171 - DNA, 15 bp, Homo sapiens
ttttttttttaatct

SEQ ID NO: 78172 - DNA, 15 bp, Homo sapiens
tttttttttttaatc

SEQ ID NO: 78173 - DNA, 15 bp, Homo sapiens
ttttttttttttaat

SEQ ID NO: 78174 - DNA, 15 bp, Homo sapiens
tttttttttttttaa

SEQ ID NO: 78175 - DNA, 15 bp, Homo sapiens
tttttttttttttta

SEQ ID NO: 78176 - DNA, 15 bp, Homo sapiens
gaactgttttttttt

SEQ ID NO: 78177 - DNA, 15 bp, Homo sapiens
cgaactgtttttttt

SEQ ID NO: 78178 - DNA, 15 bp, Homo sapiens
acgaactgttttttt

SEQ ID NO: 78179 - DNA, 15 bp, Homo sapiens
tacgaactgtttttt

SEQ ID NO: 78180 - DNA, 15 bp, Homo sapiens
ttacgaactgttttt

SEQ ID NO: 78181 - DNA, 15 bp, Homo sapiens
attacgaactgtttt

SEQ ID NO: 78182 - DNA, 15 bp, Homo sapiens
cattacgaactgttt

SEQ ID NO: 78183 - DNA, 15 bp, Homo sapiens
acattacgaactgtt

SEQ ID NO: 78184 - DNA, 15 bp, Homo sapiens
aacattacgaactgt

SEQ ID NO: 78185 - DNA, 15 bp, Homo sapiens
caacattacgaactg

SEQ ID NO: 78186 - DNA, 15 bp, Homo sapiens
acaacattacgaact

SEQ ID NO: 78187 - DNA, 15 bp, Homo sapiens
cacaacattacgaac

SEQ ID NO: 78188 - DNA, 15 bp, Homo sapiens
tcacaacattacgaa

SEQ ID NO: 78189 - DNA, 15 bp, Homo sapiens
ctcacaacattacga

SEQ ID NO: 78190 - DNA, 15 bp, Homo sapiens
cctcacaacattacg

SEQ ID NO: 78191 - DNA, 15 bp, Homo sapiens
tcctcacaacattac

SEQ ID NO: 78192 - DNA, 15 bp, Homo sapiens
gtcctcacaacatta

SEQ ID NO: 78193 - DNA, 15 bp, Homo sapiens
tgtcctcacaacatt

SEQ ID NO: 78194 - DNA, 15 bp, Homo sapiens
ttgtcctcacaacat

SEQ ID NO: 78195 - DNA, 15 bp, Homo sapiens
tttgtcctcacaaca

SEQ ID NO: 78196 - DNA, 15 bp, Homo sapiens
ttttgtcctcacaac

SEQ ID NO: 78197 - DNA, 15 bp, Homo sapiens
attttgtcctcacaa

SEQ ID NO: 78198 - DNA, 15 bp, Homo sapiens
cattttgtcctcaca

SEQ ID NO: 78199 - DNA, 15 bp, Homo sapiens
ccattttgtcctcac

SEQ ID NO: 78200 - DNA, 15 bp, Homo sapiens
accattttgtcctca

SEQ ID NO: 78201 - DNA, 15 bp, Homo sapiens
gaccattttgtcctc

SEQ ID NO: 78202 - DNA, 15 bp, Homo sapiens
agaccattttgtcct

SEQ ID NO: 78203 - DNA, 15 bp, Homo sapiens
cagaccattttgtcc

SEQ ID NO: 78204 - DNA, 15 bp, Homo sapiens
gcagaccattttgtc

SEQ ID NO: 78205 - DNA, 15 bp, Homo sapiens
cgcagaccattttgt

SEQ ID NO: 78206 - DNA, 15 bp, Homo sapiens
acgcagaccattttg

SEQ ID NO: 78207 - DNA, 15 bp, Homo sapiens
cacgcagaccatttt

SEQ ID NO: 78208 - DNA, 15 bp, Homo sapiens
acacgcagaccattt

SEQ ID NO: 78209 - DNA, 15 bp, Homo sapiens
cacacgcagaccatt

SEQ ID NO: 78210 - DNA, 15 bp, Homo sapiens
acacacgcagaccat

SEQ ID NO: 78211 - DNA, 15 bp, Homo sapiens
cacacacgcagacca

SEQ ID NO: 78212 - DNA, 15 bp, Homo sapiens
acacacacgcagacc

SEQ ID NO: 78213 - DNA, 15 bp, Homo sapiens
cacacacacgcagac

SEQ ID NO: 78214 - DNA, 15 bp, Homo sapiens
acacacacacgcaga

SEQ ID NO: 78215 - DNA, 15 bp, Homo sapiens
tacacacacacgcag

SEQ ID NO: 78216 - DNA, 15 bp, Homo sapiens
gtacacacacacgca

SEQ ID NO: 78217 - DNA, 15 bp, Homo sapiens
agtacacacacacgc

SEQ ID NO: 78218 - DNA, 15 bp, Homo sapiens
gagtacacacacacg

SEQ ID NO: 78219 - DNA, 15 bp, Homo sapiens
agagtacacacacac

SEQ ID NO: 78220 - DNA, 15 bp, Homo sapiens
aagagtacacacaca

SEQ ID NO: 78221 - DNA, 15 bp, Homo sapiens
aaagagtacacacac

SEQ ID NO: 78222 - DNA, 15 bp, Homo sapiens
gaaagagtacacaca

SEQ ID NO: 78223 - DNA, 15 bp, Homo sapiens
agaaagagtacacac

SEQ ID NO: 78224 - DNA, 15 bp, Homo sapiens
gagaaagagtacaca

SEQ ID NO: 78225 - DNA, 15 bp, Homo sapiens
ggagaaagagtacac

SEQ ID NO: 78226 - DNA, 15 bp, Homo sapiens
gggagaaagagtaca

SEQ ID NO: 78227 - DNA, 15 bp, Homo sapiens
ggggagaaagagtac

SEQ ID NO: 78228 - DNA, 15 bp, Homo sapiens
aggggagaaagagta

SEQ ID NO: 78229 - DNA, 15 bp, Homo sapiens
aaggggagaaagagt

SEQ ID NO: 78230 - DNA, 15 bp, Homo sapiens
aaaggggagaaagag

SEQ ID NO: 78231 - DNA, 15 bp, Homo sapiens
aaaaggggagaaaga

SEQ ID NO: 78232 - DNA, 15 bp, Homo sapiens
gaaaaggggagaaag

SEQ ID NO: 78233 - DNA, 15 bp, Homo sapiens
ggaaaaggggagaaa

SEQ ID NO: 78234 - DNA, 15 bp, Homo sapiens
gggaaaaggggagaa

SEQ ID NO: 78235 - DNA, 15 bp, Homo sapiens
cgggaaaaggggaga

SEQ ID NO: 78236 - DNA, 15 bp, Homo sapiens
acgggaaaaggggag

SEQ ID NO: 78237 - DNA, 15 bp, Homo sapiens
cacgggaaaagggga

SEQ ID NO: 78238 - DNA, 15 bp, Homo sapiens
acacgggaaaagggg

SEQ ID NO: 78239 - DNA, 15 bp, Homo sapiens
cacacgggaaaaggg

SEQ ID NO: 78240 - DNA, 15 bp, Homo sapiens
acacacgggaaaagg

SEQ ID NO: 78241 - DNA, 15 bp, Homo sapiens
cacacacgggaaaag

SEQ ID NO: 78242 - DNA, 15 bp, Homo sapiens
acacacacgggaaaa

SEQ ID NO: 78243 - DNA, 15 bp, Homo sapiens
cacacacacgggaaa

SEQ ID NO: 78244 - DNA, 15 bp, Homo sapiens
acacacacacgggaa

SEQ ID NO: 78245 - DNA, 15 bp, Homo sapiens
cacacacacacggga

SEQ ID NO: 78246 - DNA, 15 bp, Homo sapiens
acacacacacacggg

SEQ ID NO: 78247 - DNA, 15 bp, Homo sapiens
cacacacacacacgg

SEQ ID NO: 78248 - DNA, 15 bp, Homo sapiens
tacacacacacacac

SEQ ID NO: 78249 - DNA, 15 bp, Homo sapiens
ttacacacacacaca

SEQ ID NO: 78250 - DNA, 15 bp, Homo sapiens
tttacacacacacac

SEQ ID NO: 78251 - DNA, 15 bp, Homo sapiens
ttttacacacacaca

SEQ ID NO: 78252 - DNA, 15 bp, Homo sapiens
attttacacacacac

SEQ ID NO: 78253 - DNA, 15 bp, Homo sapiens
gattttacacacaca

SEQ ID NO: 78254 - DNA, 15 bp, Homo sapiens
agattttacacacac

SEQ ID NO: 78255 - DNA, 15 bp, Homo sapiens
cagattttacacaca

SEQ ID NO: 78256 - DNA, 15 bp, Homo sapiens
acagattttacacac

SEQ ID NO: 78257 - DNA, 15 bp, Homo sapiens
tacagattttacaca

SEQ ID NO: 78258 - DNA, 15 bp, Homo sapiens
ttacagattttacac

SEQ ID NO: 78259 - DNA, 15 bp, Homo sapiens
attacagattttaca

SEQ ID NO: 78260 - DNA, 15 bp, Homo sapiens
tattacagattttac

SEQ ID NO: 78261 - DNA, 15 bp, Homo sapiens
atattacagatttta

SEQ ID NO: 78262 - DNA, 15 bp, Homo sapiens
aatattacagatttt

SEQ ID NO: 78263 - DNA, 15 bp, Homo sapiens
aaatattacagattt

SEQ ID NO: 78264 - DNA, 15 bp, Homo sapiens
taaatattacagatt

SEQ ID NO: 78265 - DNA, 15 bp, Homo sapiens
ataaatattacagat

SEQ ID NO: 78266 - DNA, 15 bp, Homo sapiens
aataaatattacaga

SEQ ID NO: 78267 - DNA, 15 bp, Homo sapiens
aaataaatattacag

SEQ ID NO: 78268 - DNA, 15 bp, Homo sapiens
taaataaatattaca

SEQ ID NO: 78269 - DNA, 15 bp, Homo sapiens
gtaaataaatattac

SEQ ID NO: 78270 - DNA, 15 bp, Homo sapiens
agtaaataaatatta

SEQ ID NO: 78271 - DNA, 15 bp, Homo sapiens
aagtaaataaatatt

SEQ ID NO: 78272 - DNA, 15 bp, Homo sapiens
taagtaaataaatat

SEQ ID NO: 78273 - DNA, 15 bp, Homo sapiens
ataagtaaataaata

SEQ ID NO: 78274 - DNA, 15 bp, Homo sapiens
tataagtaaataaat

SEQ ID NO: 78275 - DNA, 15 bp, Homo sapiens
ctataagtaaataaa

SEQ ID NO: 78276 - DNA, 15 bp, Homo sapiens
gctataagtaaataa

SEQ ID NO: 78277 - DNA, 15 bp, Homo sapiens
agctataagtaaata

SEQ ID NO: 78278 - DNA, 15 bp, Homo sapiens
aagctataagtaaat

SEQ ID NO: 78279 - DNA, 15 bp, Homo sapiens
caagctataagtaaa

SEQ ID NO: 78280 - DNA, 15 bp, Homo sapiens
tcaagctataagtaa

SEQ ID NO: 78281 - DNA, 15 bp, Homo sapiens
ttcaagctataagta

SEQ ID NO: 78282 - DNA, 15 bp, Homo sapiens
attcaagctataagt

SEQ ID NO: 78283 - DNA, 15 bp, Homo sapiens
tattcaagctataag

SEQ ID NO: 78284 - DNA, 15 bp, Homo sapiens
ttattcaagctataa

SEQ ID NO: 78285 - DNA, 15 bp, Homo sapiens
cttattcaagctata

SEQ ID NO: 78286 - DNA, 15 bp, Homo sapiens
acttattcaagctat

SEQ ID NO: 78287 - DNA, 15 bp, Homo sapiens
aacttattcaagcta

SEQ ID NO: 78288 - DNA, 15 bp, Homo sapiens
gaacttattcaagct

SEQ ID NO: 78289 - DNA, 15 bp, Homo sapiens
ggaacttattcaagc

SEQ ID NO: 78290 - DNA, 15 bp, Homo sapiens
gggaacttattcaag

SEQ ID NO: 78291 - DNA, 15 bp, Homo sapiens
ggggaacttattcaa

SEQ ID NO: 78292 - DNA, 15 bp, Homo sapiens
aggggaacttattca

SEQ ID NO: 78293 - DNA, 15 bp, Homo sapiens
caggggaacttattc

SEQ ID NO: 78294 - DNA, 15 bp, Homo sapiens
ccaggggaacttatt

SEQ ID NO: 78295 - DNA, 15 bp, Homo sapiens
cccaggggaacttat

SEQ ID NO: 78296 - DNA, 15 bp, Homo sapiens
tcccaggggaactta

SEQ ID NO: 78297 - DNA, 15 bp, Homo sapiens
ctcccaggggaactt

SEQ ID NO: 78298 - DNA, 15 bp, Homo sapiens
actcccaggggaact

SEQ ID NO: 78299 - DNA, 15 bp, Homo sapiens
gactcccaggggaac

SEQ ID NO: 78300 - DNA, 15 bp, Homo sapiens
agactcccaggggaa

SEQ ID NO: 78301 - DNA, 15 bp, Homo sapiens
gagactcccagggga

SEQ ID NO: 78302 - DNA, 15 bp, Homo sapiens
tgagactcccagggg

SEQ ID NO: 78303 - DNA, 15 bp, Homo sapiens
ctgagactcccaggg

SEQ ID NO: 78304 - DNA, 15 bp, Homo sapiens
cctgagactcccagg

SEQ ID NO: 78305 - DNA, 15 bp, Homo sapiens
gcctgagactcccag

SEQ ID NO: 78306 - DNA, 15 bp, Homo sapiens
agcctgagactccca

SEQ ID NO: 78307 - DNA, 15 bp, Homo sapiens
cagcctgagactccc

SEQ ID NO: 78308 - DNA, 15 bp, Homo sapiens
gcagcctgagactcc

SEQ ID NO: 78309 - DNA, 15 bp, Homo sapiens
ggcagcctgagactc

SEQ ID NO: 78310 - DNA, 15 bp, Homo sapiens
aggcagcctgagact

SEQ ID NO: 78311 - DNA, 15 bp, Homo sapiens
caggcagcctgagac

SEQ ID NO: 78312 - DNA, 15 bp, Homo sapiens
gcaggcagcctgaga

SEQ ID NO: 78313 - DNA, 15 bp, Homo sapiens
ggcaggcagcctgag

SEQ ID NO: 78314 - DNA, 15 bp, Homo sapiens
aggcaggcagcctga

SEQ ID NO: 78315 - DNA, 15 bp, Homo sapiens
gaggcaggcagcctg

SEQ ID NO: 78316 - DNA, 15 bp, Homo sapiens
agaggcaggcagcct

SEQ ID NO: 78317 - DNA, 15 bp, Homo sapiens
cagaggcaggcagcc

SEQ ID NO: 78318 - DNA, 15 bp, Homo sapiens
tcagaggcaggcagc

SEQ ID NO: 78319 - DNA, 15 bp, Homo sapiens
atcagaggcaggcag

SEQ ID NO: 78320 - DNA, 15 bp, Homo sapiens
tatcagaggcaggca

SEQ ID NO: 78321 - DNA, 15 bp, Homo sapiens
ctatcagaggcaggc

SEQ ID NO: 78322 - DNA, 15 bp, Homo sapiens
tctatcagaggcagg

SEQ ID NO: 78323 - DNA, 15 bp, Homo sapiens
atctatcagaggcag

SEQ ID NO: 78324 - DNA, 15 bp, Homo sapiens
catctatcagaggca

SEQ ID NO: 78325 - DNA, 15 bp, Homo sapiens
acatctatcagaggc

SEQ ID NO: 78326 - DNA, 15 bp, Homo sapiens
cacatctatcagagg

SEQ ID NO: 78327 - DNA, 15 bp, Homo sapiens
tcacatctatcagag

SEQ ID NO: 78328 - DNA, 15 bp, Homo sapiens
gtcacatctatcaga

SEQ ID NO: 78329 - DNA, 15 bp, Homo sapiens
tgtcacatctatcag

SEQ ID NO: 78330 - DNA, 15 bp, Homo sapiens
atgtcacatctatca

SEQ ID NO: 78331 - DNA, 15 bp, Homo sapiens
aatgtcacatctatc

SEQ ID NO: 78332 - DNA, 15 bp, Homo sapiens
caatgtcacatctat

SEQ ID NO: 78333 - DNA, 15 bp, Homo sapiens
acaatgtcacatcta

SEQ ID NO: 78334 - DNA, 15 bp, Homo sapiens
cacaatgtcacatct

SEQ ID NO: 78335 - DNA, 15 bp, Homo sapiens
tcacaatgtcacatc

SEQ ID NO: 78336 - DNA, 15 bp, Homo sapiens
ttcacaatgtcacat

SEQ ID NO: 78337 - DNA, 15 bp, Homo sapiens
cttcacaatgtcaca

SEQ ID NO: 78338 - DNA, 15 bp, Homo sapiens
acttcacaatgtcac

SEQ ID NO: 78339 - DNA, 15 bp, Homo sapiens
aacttcacaatgtca

SEQ ID NO: 78340 - DNA, 15 bp, Homo sapiens
caacttcacaatgtc

SEQ ID NO: 78341 - DNA, 15 bp, Homo sapiens
gcaacttcacaatgt

SEQ ID NO: 78342 - DNA, 15 bp, Homo sapiens
agcaacttcacaatg

SEQ ID NO: 78343 - DNA, 15 bp, Homo sapiens
cagcaacttcacaat

SEQ ID NO: 78344 - DNA, 15 bp, Homo sapiens
tcagcaacttcacaa

SEQ ID NO: 78345 - DNA, 15 bp, Homo sapiens
ttcagcaacttcaca

SEQ ID NO: 78346 - DNA, 15 bp, Homo sapiens
tttcagcaacttcac

SEQ ID NO: 78347 - DNA, 15 bp, Homo sapiens
atttcagcaacttca

SEQ ID NO: 78348 - DNA, 15 bp, Homo sapiens
gatttcagcaacttc

SEQ ID NO: 78349 - DNA, 15 bp, Homo sapiens
ggatttcagcaactt

SEQ ID NO: 78350 - DNA, 15 bp, Homo sapiens
tggatttcagcaact

SEQ ID NO: 78351 - DNA, 15 bp, Homo sapiens
gtggatttcagcaac

SEQ ID NO: 78352 - DNA, 15 bp, Homo sapiens
ggtggatttcagcaa

SEQ ID NO: 78353 - DNA, 15 bp, Homo sapiens
aggtggatttcagca

SEQ ID NO: 78354 - DNA, 15 bp, Homo sapiens
taggtggatttcagc

SEQ ID NO: 78355 - DNA, 15 bp, Homo sapiens
ttaggtggatttcag

SEQ ID NO: 78356 - DNA, 15 bp, Homo sapiens
attaggtggatttca

SEQ ID NO: 78357 - DNA, 15 bp, Homo sapiens
aattaggtggatttc

SEQ ID NO: 78358 - DNA, 15 bp, Homo sapiens
taattaggtggattt

SEQ ID NO: 78359 - DNA, 15 bp, Homo sapiens
ctaattaggtggatt

SEQ ID NO: 78360 - DNA, 15 bp, Homo sapiens
gctaattaggtggat

SEQ ID NO: 78361 - DNA, 15 bp, Homo sapiens
agctaattaggtgga

SEQ ID NO: 78362 - DNA, 15 bp, Homo sapiens
cagctaattaggtgg

SEQ ID NO: 78363 - DNA, 15 bp, Homo sapiens
acagctaattaggtg

SEQ ID NO: 78364 - DNA, 15 bp, Homo sapiens
gacagctaattaggt

SEQ ID NO: 78365 - DNA, 15 bp, Homo sapiens
tgacagctaattagg

SEQ ID NO: 78366 - DNA, 15 bp, Homo sapiens
ttgacagctaattag

SEQ ID NO: 78367 - DNA, 15 bp, Homo sapiens
tttgacagctaatta

SEQ ID NO: 78368 - DNA, 15 bp, Homo sapiens
ctttgacagctaatt

SEQ ID NO: 78369 - DNA, 15 bp, Homo sapiens
tctttgacagctaat

SEQ ID NO: 78370 - DNA, 15 bp, Homo sapiens
ctctttgacagctaa

SEQ ID NO: 78371 - DNA, 15 bp, Homo sapiens
actctttgacagcta

SEQ ID NO: 78372 - DNA, 15 bp, Homo sapiens
cactctttgacagct

SEQ ID NO: 78373 - DNA, 15 bp, Homo sapiens
gcactctttgacagc

SEQ ID NO: 78374 - DNA, 15 bp, Homo sapiens
tgcactctttgacag

SEQ ID NO: 78375 - DNA, 15 bp, Homo sapiens
atgcactctttgaca

SEQ ID NO: 78376 - DNA, 15 bp, Homo sapiens
aatgcactctttgac

SEQ ID NO: 78377 - DNA, 15 bp, Homo sapiens
taatgcactctttga

SEQ ID NO: 78378 - DNA, 15 bp, Homo sapiens
ataatgcactctttg

SEQ ID NO: 78379 - DNA, 15 bp, Homo sapiens
tataatgcactcttt

SEQ ID NO: 78380 - DNA, 15 bp, Homo sapiens
gtataatgcactctt

SEQ ID NO: 78381 - DNA, 15 bp, Homo sapiens
tgtataatgcactct

SEQ ID NO: 78382 - DNA, 15 bp, Homo sapiens
ttgtataatgcactc

SEQ ID NO: 78383 - DNA, 15 bp, Homo sapiens
tttgtataatgcact

SEQ ID NO: 78384 - DNA, 15 bp, Homo sapiens
ctttgtataatgcac

SEQ ID NO: 78385 - DNA, 15 bp, Homo sapiens
tctttgtataatgca

SEQ ID NO: 78386 - DNA, 15 bp, Homo sapiens
gtctttgtataatgc

SEQ ID NO: 78387 - DNA, 15 bp, Homo sapiens
tgtctttgtataatg

SEQ ID NO: 78388 - DNA, 15 bp, Homo sapiens
ctgtctttgtataat

SEQ ID NO: 78389 - DNA, 15 bp, Homo sapiens
gctgtctttgtataa

SEQ ID NO: 78390 - DNA, 15 bp, Homo sapiens
cgctgtctttgtata

SEQ ID NO: 78391 - DNA, 15 bp, Homo sapiens
tcgctgtctttgtat

SEQ ID NO: 78392 - DNA, 15 bp, Homo sapiens
ctcgctgtctttgta

SEQ ID NO: 78393 - DNA, 15 bp, Homo sapiens
cctcgctgtctttgt

SEQ ID NO: 78394 - DNA, 15 bp, Homo sapiens
ccctcgctgtctttg

SEQ ID NO: 78395 - DNA, 15 bp, Homo sapiens
gccctcgctgtcttt

SEQ ID NO: 78396 - DNA, 15 bp, Homo sapiens
agccctcgctgtctt

SEQ ID NO: 78397 - DNA, 15 bp, Homo sapiens
gagccctcgctgtct

SEQ ID NO: 78398 - DNA, 15 bp, Homo sapiens
agagccctcgctgtc

SEQ ID NO: 78399 - DNA, 15 bp, Homo sapiens
cagagccctcgctgt

SEQ ID NO: 78400 - DNA, 15 bp, Homo sapiens
gcagagccctcgctg

SEQ ID NO: 78401 - DNA, 15 bp, Homo sapiens
tgcagagccctcgct

SEQ ID NO: 78402 - DNA, 15 bp, Homo sapiens
atgcagagccctcgc

SEQ ID NO: 78403 - DNA, 15 bp, Homo sapiens
aatgcagagccctcg

SEQ ID NO: 78404 - DNA, 15 bp, Homo sapiens
gaatgcagagccctc

SEQ ID NO: 78405 - DNA, 15 bp, Homo sapiens
tgaatgcagagccct

SEQ ID NO: 78406 - DNA, 15 bp, Homo sapiens
ctgaatgcagagccc

SEQ ID NO: 78407 - DNA, 15 bp, Homo sapiens
actgaatgcagagcc

SEQ ID NO: 78408 - DNA, 15 bp, Homo sapiens
gactgaatgcagagc

SEQ ID NO: 78409 - DNA, 15 bp, Homo sapiens
agactgaatgcagag

SEQ ID NO: 78410 - DNA, 15 bp, Homo sapiens
tagactgaatgcaga

SEQ ID NO: 78411 - DNA, 15 bp, Homo sapiens
ttagactgaatgcag

SEQ ID NO: 78412 - DNA, 15 bp, Homo sapiens
cttagactgaatgca

SEQ ID NO: 78413 - DNA, 15 bp, Homo sapiens
gcttagactgaatgc

SEQ ID NO: 78414 - DNA, 15 bp, Homo sapiens
agcttagactgaatg

SEQ ID NO: 78415 - DNA, 15 bp, Homo sapiens
gagcttagactgaat

SEQ ID NO: 78416 - DNA, 15 bp, Homo sapiens
agagcttagactgaa

SEQ ID NO: 78417 - DNA, 15 bp, Homo sapiens
tagagcttagactga

SEQ ID NO: 78418 - DNA, 15 bp, Homo sapiens
ttagagcttagactg

SEQ ID NO: 78419 - DNA, 15 bp, Homo sapiens
cttagagcttagact

SEQ ID NO: 78420 - DNA, 15 bp, Homo sapiens
ccttagagcttagac

SEQ ID NO: 78421 - DNA, 15 bp, Homo sapiens
tccttagagcttaga

SEQ ID NO: 78422 - DNA, 15 bp, Homo sapiens
gtccttagagcttag

SEQ ID NO: 78423 - DNA, 15 bp, Homo sapiens
agtccttagagctta

SEQ ID NO: 78424 - DNA, 15 bp, Homo sapiens
cagtccttagagctt

SEQ ID NO: 78425 - DNA, 15 bp, Homo sapiens
ccagtccttagagct

SEQ ID NO: 78426 - DNA, 15 bp, Homo sapiens
gccagtccttagagc

SEQ ID NO: 78427 - DNA, 15 bp, Homo sapiens
tgccagtccttagag

SEQ ID NO: 78428 - DNA, 15 bp, Homo sapiens
gtgccagtccttaga

SEQ ID NO: 78429 - DNA, 15 bp, Homo sapiens
cgtgccagtccttag

SEQ ID NO: 78430 - DNA, 15 bp, Homo sapiens
tcgtgccagtcctta

SEQ ID NO: 78431 - DNA, 15 bp, Homo sapiens
atcgtgccagtcctt

SEQ ID NO: 78432 - DNA, 15 bp, Homo sapiens
gatcgtgccagtcct

SEQ ID NO: 78433 - DNA, 15 bp, Homo sapiens
agatcgtgccagtcc

SEQ ID NO: 78434 - DNA, 15 bp, Homo sapiens
gagatcgtgccagtc

SEQ ID NO: 78435 - DNA, 15 bp, Homo sapiens
agagatcgtgccagt

SEQ ID NO: 78436 - DNA, 15 bp, Homo sapiens
cagagatcgtgccag

SEQ ID NO: 78437 - DNA, 15 bp, Homo sapiens
ccagagatcgtgcca

SEQ ID NO: 78438 - DNA, 15 bp, Homo sapiens
accagagatcgtgcc

SEQ ID NO: 78439 - DNA, 15 bp, Homo sapiens
caccagagatcgtgc

SEQ ID NO: 78440 - DNA, 15 bp, Homo sapiens
ccaccagagatcgtg

SEQ ID NO: 78441 - DNA, 15 bp, Homo sapiens
tccaccagagatcgt

SEQ ID NO: 78442 - DNA, 15 bp, Homo sapiens
gtccaccagagatcg

SEQ ID NO: 78443 - DNA, 15 bp, Homo sapiens
agtccaccagagatc

SEQ ID NO: 78444 - DNA, 15 bp, Homo sapiens
aagtccaccagagat

SEQ ID NO: 78445 - DNA, 15 bp, Homo sapiens
caagtccaccagaga

SEQ ID NO: 78446 - DNA, 15 bp, Homo sapiens
tcaagtccaccagag

SEQ ID NO: 78447 - DNA, 15 bp, Homo sapiens
ttcaagtccaccaga

SEQ ID NO: 78448 - DNA, 15 bp, Homo sapiens
cttcaagtccaccag

SEQ ID NO: 78449 - DNA, 15 bp, Homo sapiens
ccttcaagtccacca

SEQ ID NO: 78450 - DNA, 15 bp, Homo sapiens
cccttcaagtccacc

SEQ ID NO: 78451 - DNA, 15 bp, Homo sapiens
gcccttcaagtccac

SEQ ID NO: 78452 - DNA, 15 bp, Homo sapiens
tgcccttcaagtcca

SEQ ID NO: 78453 - DNA, 15 bp, Homo sapiens
ttgcccttcaagtcc

SEQ ID NO: 78454 - DNA, 15 bp, Homo sapiens
gttgcccttcaagtc

SEQ ID NO: 78455 - DNA, 15 bp, Homo sapiens
cgttgcccttcaagt

SEQ ID NO: 78456 - DNA, 15 bp, Homo sapiens
ccgttgcccttcaag

SEQ ID NO: 78457 - DNA, 15 bp, Homo sapiens
tccgttgcccttcaa

SEQ ID NO: 78458 - DNA, 15 bp, Homo sapiens
ctccgttgcccttca

SEQ ID NO: 78459 - DNA, 15 bp, Homo sapiens
tctccgttgcccttc

SEQ ID NO: 78460 - DNA, 15 bp, Homo sapiens
gtctccgttgccctt

SEQ ID NO: 78461 - DNA, 15 bp, Homo sapiens
agtctccgttgccct

SEQ ID NO: 78462 - DNA, 15 bp, Homo sapiens
aagtctccgttgccc

SEQ ID NO: 78463 - DNA, 15 bp, Homo sapiens
taagtctccgttgcc

SEQ ID NO: 78464 - DNA, 15 bp, Homo sapiens
gtaagtctccgttgc

SEQ ID NO: 78465 - DNA, 15 bp, Homo sapiens
agtaagtctccgttg

SEQ ID NO: 78466 - DNA, 15 bp, Homo sapiens
cagtaagtctccgtt

SEQ ID NO: 78467 - DNA, 15 bp, Homo sapiens
gcagtaagtctccgt

SEQ ID NO: 78468 - DNA, 15 bp, Homo sapiens
tgcagtaagtctccg

SEQ ID NO: 78469 - DNA, 15 bp, Homo sapiens
ttgcagtaagtctcc

SEQ ID NO: 78470 - DNA, 15 bp, Homo sapiens
tttgcagtaagtctc

SEQ ID NO: 78471 - DNA, 15 bp, Homo sapiens
atttgcagtaagtct

SEQ ID NO: 78472 - DNA, 15 bp, Homo sapiens
aatttgcagtaagtc

SEQ ID NO: 78473 - DNA, 15 bp, Homo sapiens
aaatttgcagtaagt

SEQ ID NO: 78474 - DNA, 15 bp, Homo sapiens
aaaatttgcagtaag

SEQ ID NO: 78475 - DNA, 15 bp, Homo sapiens
caaaatttgcagtaa

SEQ ID NO: 78476 - DNA, 15 bp, Homo sapiens
ccaaaatttgcagta

SEQ ID NO: 78477 - DNA, 15 bp, Homo sapiens
cccaaaatttgcagt

SEQ ID NO: 78478 - DNA, 15 bp, Homo sapiens
tcccaaaatttgcag

SEQ ID NO: 78479 - DNA, 15 bp, Homo sapiens
ctcccaaaatttgca

SEQ ID NO: 78480 - DNA, 15 bp, Homo sapiens
gctcccaaaatttgc

SEQ ID NO: 78481 - DNA, 15 bp, Homo sapiens
agctcccaaaatttg

SEQ ID NO: 78482 - DNA, 15 bp, Homo sapiens
cagctcccaaaattt

SEQ ID NO: 78483 - DNA, 15 bp, Homo sapiens
tcagctcccaaaatt

SEQ ID NO: 78484 - DNA, 15 bp, Homo sapiens
ttcagctcccaaaat

SEQ ID NO: 78485 - DNA, 15 bp, Homo sapiens
attcagctcccaaaa

SEQ ID NO: 78486 - DNA, 15 bp, Homo sapiens
aattcagctcccaaa

SEQ ID NO: 78487 - DNA, 15 bp, Homo sapiens
taattcagctcccaa

SEQ ID NO: 78488 - DNA, 15 bp, Homo sapiens
gtaattcagctccca

SEQ ID NO: 78489 - DNA, 15 bp, Homo sapiens
tgtaattcagctccc

SEQ ID NO: 78490 - DNA, 15 bp, Homo sapiens
atgtaattcagctcc

SEQ ID NO: 78491 - DNA, 15 bp, Homo sapiens
aatgtaattcagctc

SEQ ID NO: 78492 - DNA, 15 bp, Homo sapiens
gaatgtaattcagct

SEQ ID NO: 78493 - DNA, 15 bp, Homo sapiens
tgaatgtaattcagc

SEQ ID NO: 78494 - DNA, 15 bp, Homo sapiens
atgaatgtaattcag

SEQ ID NO: 78495 - DNA, 15 bp, Homo sapiens
gatgaatgtaattca

SEQ ID NO: 78496 - DNA, 15 bp, Homo sapiens
ggatgaatgtaattc

SEQ ID NO: 78497 - DNA, 15 bp, Homo sapiens
gggatgaatgtaatt

SEQ ID NO: 78498 - DNA, 15 bp, Homo sapiens
cgggatgaatgtaat

SEQ ID NO: 78499 - DNA, 15 bp, Homo sapiens
acgggatgaatgtaa

SEQ ID NO: 78500 - DNA, 15 bp, Homo sapiens
gacgggatgaatgta

SEQ ID NO: 78501 - DNA, 15 bp, Homo sapiens
agacgggatgaatgt

SEQ ID NO: 78502 - DNA, 15 bp, Homo sapiens
tagacgggatgaatg

SEQ ID NO: 78503 - DNA, 15 bp, Homo sapiens
gtagacgggatgaat

SEQ ID NO: 78504 - DNA, 15 bp, Homo sapiens
agtagacgggatgaa

SEQ ID NO: 78505 - DNA, 15 bp, Homo sapiens
gagtagacgggatga

SEQ ID NO: 78506 - DNA, 15 bp, Homo sapiens
tgagtagacgggatg

SEQ ID NO: 78507 - DNA, 15 bp, Homo sapiens
atgagtagacgggat

SEQ ID NO: 78508 - DNA, 15 bp, Homo sapiens
catgagtagacggga

SEQ ID NO: 78509 - DNA, 15 bp, Homo sapiens
acatgagtagacggg

SEQ ID NO: 78510 - DNA, 15 bp, Homo sapiens
aacatgagtagacgg

SEQ ID NO: 78511 - DNA, 15 bp, Homo sapiens
aaacatgagtagacg

SEQ ID NO: 78512 - DNA, 15 bp, Homo sapiens
gaaacatgagtagac

SEQ ID NO: 78513 - DNA, 15 bp, Homo sapiens
agaaacatgagtaga

SEQ ID NO: 78514 - DNA, 15 bp, Homo sapiens
cagaaacatgagtag

SEQ ID NO: 78515 - DNA, 15 bp, Homo sapiens
ccagaaacatgagta

SEQ ID NO: 78516 - DNA, 15 bp, Homo sapiens
cccagaaacatgagt

SEQ ID NO: 78517 - DNA, 15 bp, Homo sapiens
ccccagaaacatgag

SEQ ID NO: 78518 - DNA, 15 bp, Homo sapiens
gccccagaaacatga

SEQ ID NO: 78519 - DNA, 15 bp, Homo sapiens
ggccccagaaacatg

SEQ ID NO: 78520 - DNA, 15 bp, Homo sapiens
aggccccagaaacat

SEQ ID NO: 78521 - DNA, 15 bp, Homo sapiens
gaggccccagaaaca

SEQ ID NO: 78522 - DNA, 15 bp, Homo sapiens
tgaggccccagaaac

SEQ ID NO: 78523 - DNA, 15 bp, Homo sapiens
atgaggccccagaaa

SEQ ID NO: 78524 - DNA, 15 bp, Homo sapiens
aatgaggccccagaa

SEQ ID NO: 78525 - DNA, 15 bp, Homo sapiens
aaatgaggccccaga

SEQ ID NO: 78526 - DNA, 15 bp, Homo sapiens
caaatgaggccccag

SEQ ID NO: 78527 - DNA, 15 bp, Homo sapiens
gcaaatgaggcccca

SEQ ID NO: 78528 - DNA, 15 bp, Homo sapiens
agcaaatgaggcccc

SEQ ID NO: 78529 - DNA, 15 bp, Homo sapiens
aagcaaatgaggccc

SEQ ID NO: 78530 - DNA, 15 bp, Homo sapiens
aaagcaaatgaggcc

SEQ ID NO: 78531 - DNA, 15 bp, Homo sapiens
gaaagcaaatgaggc

SEQ ID NO: 78532 - DNA, 15 bp, Homo sapiens
ggaaagcaaatgagg

SEQ ID NO: 78533 - DNA, 15 bp, Homo sapiens
aggaaagcaaatgag

SEQ ID NO: 78534 - DNA, 15 bp, Homo sapiens
caggaaagcaaatga

SEQ ID NO: 78535 - DNA, 15 bp, Homo sapiens
ccaggaaagcaaatg

SEQ ID NO: 78536 - DNA, 15 bp, Homo sapiens
cccaggaaagcaaat

SEQ ID NO: 78537 - DNA, 15 bp, Homo sapiens
tcccaggaaagcaaa

SEQ ID NO: 78538 - DNA, 15 bp, Homo sapiens
gtcccaggaaagcaa

SEQ ID NO: 78539 - DNA, 15 bp, Homo sapiens
tgtcccaggaaagca

SEQ ID NO: 78540 - DNA, 15 bp, Homo sapiens
ttgtcccaggaaagc

SEQ ID NO: 78541 - DNA, 15 bp, Homo sapiens
cttgtcccaggaaag

SEQ ID NO: 78542 - DNA, 15 bp, Homo sapiens
gcttgtcccaggaaa

SEQ ID NO: 78543 - DNA, 15 bp, Homo sapiens
tgcttgtcccaggaa

SEQ ID NO: 78544 - DNA, 15 bp, Homo sapiens
ttgcttgtcccagga

SEQ ID NO: 78545 - DNA, 15 bp, Homo sapiens
cttgcttgtcccagg

SEQ ID NO: 78546 - DNA, 15 bp, Homo sapiens
ccttgcttgtcccag

SEQ ID NO: 78547 - DNA, 15 bp, Homo sapiens
cccttgcttgtccca

SEQ ID NO: 78548 - DNA, 15 bp, Homo sapiens
gcccttgcttgtccc

SEQ ID NO: 78549 - DNA, 15 bp, Homo sapiens
tgcccttgcttgtcc

SEQ ID NO: 78550 - DNA, 15 bp, Homo sapiens
ttgcccttgcttgtc

SEQ ID NO: 78551 - DNA, 15 bp, Homo sapiens
cttgcccttgcttgt

SEQ ID NO: 78552 - DNA, 15 bp, Homo sapiens
ccttgcccttgcttg

SEQ ID NO: 78553 - DNA, 15 bp, Homo sapiens
gccttgcccttgctt

SEQ ID NO: 78554 - DNA, 15 bp, Homo sapiens
cgccttgcccttgct

SEQ ID NO: 78555 - DNA, 15 bp, Homo sapiens
gcgccttgcccttgc

SEQ ID NO: 78556 - DNA, 15 bp, Homo sapiens
agcgccttgcccttg

SEQ ID NO: 78557 - DNA, 15 bp, Homo sapiens
cagcgccttgccctt

SEQ ID NO: 78558 - DNA, 15 bp, Homo sapiens
ccagcgccttgccct

SEQ ID NO: 78559 - DNA, 15 bp, Homo sapiens
cccagcgccttgccc

SEQ ID NO: 78560 - DNA, 15 bp, Homo sapiens
gcccagcgccttgcc

SEQ ID NO: 78561 - DNA, 15 bp, Homo sapiens
tgcccagcgccttgc

SEQ ID NO: 78562 - DNA, 15 bp, Homo sapiens
ctgcccagcgccttg

SEQ ID NO: 78563 - DNA, 15 bp, Homo sapiens
cctgcccagcgcctt

SEQ ID NO: 78564 - DNA, 15 bp, Homo sapiens
acctgcccagcgcct

SEQ ID NO: 78565 - DNA, 15 bp, Homo sapiens
gacctgcccagcgcc

SEQ ID NO: 78566 - DNA, 15 bp, Homo sapiens
tgacctgcccagcgc

SEQ ID NO: 78567 - DNA, 15 bp, Homo sapiens
ctgacctgcccagcg

SEQ ID NO: 78568 - DNA, 15 bp, Homo sapiens
actgacctgcccagc

SEQ ID NO: 78569 - DNA, 15 bp, Homo sapiens
cactgacctgcccag

SEQ ID NO: 78570 - DNA, 15 bp, Homo sapiens
gcactgacctgccca

SEQ ID NO: 78571 - DNA, 15 bp, Homo sapiens
agcactgacctgccc

SEQ ID NO: 78572 - DNA, 15 bp, Homo sapiens
cagcactgacctgcc

SEQ ID NO: 78573 - DNA, 15 bp, Homo sapiens
acagcactgacctgc

SEQ ID NO: 78574 - DNA, 15 bp, Homo sapiens
cacagcactgacctg

SEQ ID NO: 78575 - DNA, 15 bp, Homo sapiens
tcacagcactgacct

SEQ ID NO: 78576 - DNA, 15 bp, Homo sapiens
ctcacagcactgacc

SEQ ID NO: 78577 - DNA, 15 bp, Homo sapiens
tctcacagcactgac

SEQ ID NO: 78578 - DNA, 15 bp, Homo sapiens
ttctcacagcactga

SEQ ID NO: 78579 - DNA, 15 bp, Homo sapiens
tttctcacagcactg

SEQ ID NO: 78580 - DNA, 15 bp, Homo sapiens
ctttctcacagcact

SEQ ID NO: 78581 - DNA, 15 bp, Homo sapiens
gctttctcacagcac

SEQ ID NO: 78582 - DNA, 15 bp, Homo sapiens
tgctttctcacagca

SEQ ID NO: 78583 - DNA, 15 bp, Homo sapiens
ttgctttctcacagc

SEQ ID NO: 78584 - DNA, 15 bp, Homo sapiens
cttgctttctcacag

SEQ ID NO: 78585 - DNA, 15 bp, Homo sapiens
ccttgctttctcaca

SEQ ID NO: 78586 - DNA, 15 bp, Homo sapiens
accttgctttctcac

SEQ ID NO: 78587 - DNA, 15 bp, Homo sapiens
caccttgctttctca

SEQ ID NO: 78588 - DNA, 15 bp, Homo sapiens
gcaccttgctttctc

SEQ ID NO: 78589 - DNA, 15 bp, Homo sapiens
agcaccttgctttct

SEQ ID NO: 78590 - DNA, 15 bp, Homo sapiens
gagcaccttgctttc

SEQ ID NO: 78591 - DNA, 15 bp, Homo sapiens
ggagcaccttgcttt

SEQ ID NO: 78592 - DNA, 15 bp, Homo sapiens
tggagcaccttgctt

SEQ ID NO: 78593 - DNA, 15 bp, Homo sapiens
ctggagcaccttgct

SEQ ID NO: 78594 - DNA, 15 bp, Homo sapiens
gctggagcaccttgc

SEQ ID NO: 78595 - DNA, 15 bp, Homo sapiens
tgctggagcaccttg

SEQ ID NO: 78596 - DNA, 15 bp, Homo sapiens
ctgctggagcacctt

SEQ ID NO: 78597 - DNA, 15 bp, Homo sapiens
gctgctggagcacct

SEQ ID NO: 78598 - DNA, 15 bp, Homo sapiens
tgctgctggagcacc

SEQ ID NO: 78599 - DNA, 15 bp, Homo sapiens
atgctgctggagcac

SEQ ID NO: 78600 - DNA, 15 bp, Homo sapiens
catgctgctggagca

SEQ ID NO: 78601 - DNA, 15 bp, Homo sapiens
ccatgctgctggagc

SEQ ID NO: 78602 - DNA, 15 bp, Homo sapiens
tccatgctgctggag

SEQ ID NO: 78603 - DNA, 15 bp, Homo sapiens
ctccatgctgctgga

SEQ ID NO: 78604 - DNA, 15 bp, Homo sapiens
actccatgctgctgg

SEQ ID NO: 78605 - DNA, 15 bp, Homo sapiens
gactccatgctgctg

SEQ ID NO: 78606 - DNA, 15 bp, Homo sapiens
tgactccatgctgct

SEQ ID NO: 78607 - DNA, 15 bp, Homo sapiens
gtgactccatgctgc

SEQ ID NO: 78608 - DNA, 15 bp, Homo sapiens
ggtgactccatgctg

SEQ ID NO: 78609 - DNA, 15 bp, Homo sapiens
cggtgactccatgct

SEQ ID NO: 78610 - DNA, 15 bp, Homo sapiens
ccggtgactccatgc

SEQ ID NO: 78611 - DNA, 15 bp, Homo sapiens
gccggtgactccatg

SEQ ID NO: 78612 - DNA, 15 bp, Homo sapiens
agccggtgactccat

SEQ ID NO: 78613 - DNA, 15 bp, Homo sapiens
cagccggtgactcca

SEQ ID NO: 78614 - DNA, 15 bp, Homo sapiens
tcagccggtgactcc

SEQ ID NO: 78615 - DNA, 15 bp, Homo sapiens
ttcagccggtgactc

SEQ ID NO: 78616 - DNA, 15 bp, Homo sapiens
tttcagccggtgact

SEQ ID NO: 78617 - DNA, 15 bp, Homo sapiens
atttcagccggtgac

SEQ ID NO: 78618 - DNA, 15 bp, Homo sapiens
catttcagccggtga

SEQ ID NO: 78619 - DNA, 15 bp, Homo sapiens
ccatttcagccggtg

SEQ ID NO: 78620 - DNA, 15 bp, Homo sapiens
tccatttcagccggt

SEQ ID NO: 78621 - DNA, 15 bp, Homo sapiens
gtccatttcagccgg

SEQ ID NO: 78622 - DNA, 15 bp, Homo sapiens
tgtccatttcagccg

SEQ ID NO: 78623 - DNA, 15 bp, Homo sapiens
ttgtccatttcagcc

SEQ ID NO: 78624 - DNA, 15 bp, Homo sapiens
cttgtccatttcagc

SEQ ID NO: 78625 - DNA, 15 bp, Homo sapiens
tcttgtccatttcag

SEQ ID NO: 78626 - DNA, 15 bp, Homo sapiens
ctcttgtccatttca

SEQ ID NO: 78627 - DNA, 15 bp, Homo sapiens
gctcttgtccatttc

SEQ ID NO: 78628 - DNA, 15 bp, Homo sapiens
agctcttgtccattt

SEQ ID NO: 78629 - DNA, 15 bp, Homo sapiens
tagctcttgtccatt

SEQ ID NO: 78630 - DNA, 15 bp, Homo sapiens
atagctcttgtccat

SEQ ID NO: 78631 - DNA, 15 bp, Homo sapiens
catagctcttgtcca

SEQ ID NO: 78632 - DNA, 15 bp, Homo sapiens
gcatagctcttgtcc

SEQ ID NO: 78633 - DNA, 15 bp, Homo sapiens
tgcatagctcttgtc

SEQ ID NO: 78634 - DNA, 15 bp, Homo sapiens
ctgcatagctcttgt

SEQ ID NO: 78635 - DNA, 15 bp, Homo sapiens
cctgcatagctcttg

SEQ ID NO: 78636 - DNA, 15 bp, Homo sapiens
ccctgcatagctctt

SEQ ID NO: 78637 - DNA, 15 bp, Homo sapiens
gccctgcatagctct

SEQ ID NO: 78638 - DNA, 15 bp, Homo sapiens
tgccctgcatagctc

SEQ ID NO: 78639 - DNA, 15 bp, Homo sapiens
ttgccctgcatagct

SEQ ID NO: 78640 - DNA, 15 bp, Homo sapiens
cttgccctgcatagc

SEQ ID NO: 78641 - DNA, 15 bp, Homo sapiens
ccttgccctgcatag

SEQ ID NO: 78642 - DNA, 15 bp, Homo sapiens
tccttgccctgcata

SEQ ID NO: 78643 - DNA, 15 bp, Homo sapiens
ttccttgccctgcat

SEQ ID NO: 78644 - DNA, 15 bp, Homo sapiens
tttccttgccctgca

SEQ ID NO: 78645 - DNA, 15 bp, Homo sapiens
ttttccttgccctgc

SEQ ID NO: 78646 - DNA, 15 bp, Homo sapiens
tttttccttgccctg

SEQ ID NO: 78647 - DNA, 15 bp, Homo sapiens
ctttttccttgccct

SEQ ID NO: 78648 - DNA, 15 bp, Homo sapiens
cctttttccttgccc

SEQ ID NO: 78649 - DNA, 15 bp, Homo sapiens
ccctttttccttgcc

SEQ ID NO: 78650 - DNA, 15 bp, Homo sapiens
tccctttttccttgc

SEQ ID NO: 78651 - DNA, 15 bp, Homo sapiens
ctccctttttccttg

SEQ ID NO: 78652 - DNA, 15 bp, Homo sapiens
cctccctttttcctt

SEQ ID NO: 78653 - DNA, 15 bp, Homo sapiens
tcctccctttttcct

SEQ ID NO: 78654 - DNA, 15 bp, Homo sapiens
ctcctccctttttcc

SEQ ID NO: 78655 - DNA, 15 bp, Homo sapiens
tctcctccctttttc

SEQ ID NO: 78656 - DNA, 15 bp, Homo sapiens
ctctcctcccttttt

SEQ ID NO: 78657 - DNA, 15 bp, Homo sapiens
cctctcctccctttt

SEQ ID NO: 78658 - DNA, 15 bp, Homo sapiens
ccctctcctcccttt

SEQ ID NO: 78659 - DNA, 15 bp, Homo sapiens
tccctctcctccctt

SEQ ID NO: 78660 - DNA, 15 bp, Homo sapiens
ctccctctcctccct

SEQ ID NO: 78661 - DNA, 15 bp, Homo sapiens
actccctctcctccc

SEQ ID NO: 78662 - DNA, 15 bp, Homo sapiens
gactccctctcctcc

SEQ ID NO: 78663 - DNA, 15 bp, Homo sapiens
tgactccctctcctc

SEQ ID NO: 78664 - DNA, 15 bp, Homo sapiens
ctgactccctctcct

SEQ ID NO: 78665 - DNA, 15 bp, Homo sapiens
cctgactccctctcc

SEQ ID NO: 78666 - DNA, 15 bp, Homo sapiens
ccctgactccctctc

SEQ ID NO: 78667 - DNA, 15 bp, Homo sapiens
gccctgactccctct

SEQ ID NO: 78668 - DNA, 15 bp, Homo sapiens
ggccctgactccctc

SEQ ID NO: 78669 - DNA, 15 bp, Homo sapiens
tggccctgactccct

SEQ ID NO: 78670 - DNA, 15 bp, Homo sapiens
atggccctgactccc

SEQ ID NO: 78671 - DNA, 15 bp, Homo sapiens
catggccctgactcc

SEQ ID NO: 78672 - DNA, 15 bp, Homo sapiens
ccatggccctgactc

SEQ ID NO: 78673 - DNA, 15 bp, Homo sapiens
cccatggccctgact

SEQ ID NO: 78674 - DNA, 15 bp, Homo sapiens
tcccatggccctgac

SEQ ID NO: 78675 - DNA, 15 bp, Homo sapiens
ctcccatggccctga

SEQ ID NO: 78676 - DNA, 15 bp, Homo sapiens
tctcccatggccctg

SEQ ID NO: 78677 - DNA, 15 bp, Homo sapiens
gtctcccatggccct

SEQ ID NO: 78678 - DNA, 15 bp, Homo sapiens
tgtctcccatggccc

SEQ ID NO: 78679 - DNA, 15 bp, Homo sapiens
ttgtctcccatggcc

SEQ ID NO: 78680 - DNA, 15 bp, Homo sapiens
cttgtctcccatggc

SEQ ID NO: 78681 - DNA, 15 bp, Homo sapiens
ccttgtctcccatgg

SEQ ID NO: 78682 - DNA, 15 bp, Homo sapiens
cccttgtctcccatg

SEQ ID NO: 78683 - DNA, 15 bp, Homo sapiens
tcccttgtctcccat

SEQ ID NO: 78684 - DNA, 15 bp, Homo sapiens
gtcccttgtctccca

SEQ ID NO: 78685 - DNA, 15 bp, Homo sapiens
tgtcccttgtctccc

SEQ ID NO: 78686 - DNA, 15 bp, Homo sapiens
atgtcccttgtctcc

SEQ ID NO: 78687 - DNA, 15 bp, Homo sapiens
catgtcccttgtctc

SEQ ID NO: 78688 - DNA, 15 bp, Homo sapiens
ccatgtcccttgtct

SEQ ID NO: 78689 - DNA, 15 bp, Homo sapiens
tccatgtcccttgtc

SEQ ID NO: 78690 - DNA, 15 bp, Homo sapiens
ttccatgtcccttgt

SEQ ID NO: 78691 - DNA, 15 bp, Homo sapiens
tttccatgtcccttg

SEQ ID NO: 78692 - DNA, 15 bp, Homo sapiens
ttttccatgtccctt

SEQ ID NO: 78693 - DNA, 15 bp, Homo sapiens
gttttccatgtccct

SEQ ID NO: 78694 - DNA, 15 bp, Homo sapiens
ggttttccatgtccc

SEQ ID NO: 78695 - DNA, 15 bp, Homo sapiens
gggttttccatgtcc

SEQ ID NO: 78696 - DNA, 15 bp, Homo sapiens
tgggttttccatgtc

SEQ ID NO: 78697 - DNA, 15 bp, Homo sapiens
gtgggttttccatgt

SEQ ID NO: 78698 - DNA, 15 bp, Homo sapiens
ggtgggttttccatg

SEQ ID NO: 78699 - DNA, 15 bp, Homo sapiens
gggtgggttttccat

SEQ ID NO: 78700 - DNA, 15 bp, Homo sapiens
tgggtgggttttcca

SEQ ID NO: 78701 - DNA, 15 bp, Homo sapiens
ttgggtgggttttcc

SEQ ID NO: 78702 - DNA, 15 bp, Homo sapiens
cttgggtgggttttc

SEQ ID NO: 78703 - DNA, 15 bp, Homo sapiens
ccttgggtgggtttt

SEQ ID NO: 78704 - DNA, 15 bp, Homo sapiens
gccttgggtgggttt

SEQ ID NO: 78705 - DNA, 15 bp, Homo sapiens
agccttgggtgggtt

SEQ ID NO: 78706 - DNA, 15 bp, Homo sapiens
cagccttgggtgggt

SEQ ID NO: 78707 - DNA, 15 bp, Homo sapiens
gcagccttgggtggg

SEQ ID NO: 78708 - DNA, 15 bp, Homo sapiens
agcagccttgggtgg

SEQ ID NO: 78709 - DNA, 15 bp, Homo sapiens
cagcagccttgggtg

SEQ ID NO: 78710 - DNA, 15 bp, Homo sapiens
tcagcagccttgggt

SEQ ID NO: 78711 - DNA, 15 bp, Homo sapiens
ctcagcagccttggg

SEQ ID NO: 78712 - DNA, 15 bp, Homo sapiens
tctcagcagccttgg

SEQ ID NO: 78713 - DNA, 15 bp, Homo sapiens
ttctcagcagccttg

SEQ ID NO: 78714 - DNA, 15 bp, Homo sapiens
tttctcagcagcctt

SEQ ID NO: 78715 - DNA, 15 bp, Homo sapiens
gtttctcagcagcct

SEQ ID NO: 78716 - DNA, 15 bp, Homo sapiens
tgtttctcagcagcc

SEQ ID NO: 78717 - DNA, 15 bp, Homo sapiens
ctgtttctcagcagc

SEQ ID NO: 78718 - DNA, 15 bp, Homo sapiens
cctgtttctcagcag

SEQ ID NO: 78719 - DNA, 15 bp, Homo sapiens
tcctgtttctcagca

SEQ ID NO: 78720 - DNA, 15 bp, Homo sapiens
gtcctgtttctcagc

SEQ ID NO: 78721 - DNA, 15 bp, Homo sapiens
agtcctgtttctcag

SEQ ID NO: 78722 - DNA, 15 bp, Homo sapiens
tagtcctgtttctca

SEQ ID NO: 78723 - DNA, 15 bp, Homo sapiens
ttagtcctgtttctc

SEQ ID NO: 78724 - DNA, 15 bp, Homo sapiens
cttagtcctgtttct

SEQ ID NO: 78725 - DNA, 15 bp, Homo sapiens
acttagtcctgtttc

SEQ ID NO: 78726 - DNA, 15 bp, Homo sapiens
aacttagtcctgttt

SEQ ID NO: 78727 - DNA, 15 bp, Homo sapiens
taacttagtcctgtt

SEQ ID NO: 78728 - DNA, 15 bp, Homo sapiens
ctaacttagtcctgt

SEQ ID NO: 78729 - DNA, 15 bp, Homo sapiens
actaacttagtcctg

SEQ ID NO: 78730 - DNA, 15 bp, Homo sapiens
tactaacttagtcct

SEQ ID NO: 78731 - DNA, 15 bp, Homo sapiens
ttactaacttagtcc

SEQ ID NO: 78732 - DNA, 15 bp, Homo sapiens
cttactaacttagtc

SEQ ID NO: 78733 - DNA, 15 bp, Homo sapiens
gcttactaacttagt

SEQ ID NO: 78734 - DNA, 15 bp, Homo sapiens
ggcttactaacttag

SEQ ID NO: 78735 - DNA, 15 bp, Homo sapiens
gggcttactaactta

SEQ ID NO: 78736 - DNA, 15 bp, Homo sapiens
tgggcttactaactt

SEQ ID NO: 78737 - DNA, 15 bp, Homo sapiens
atgggcttactaact

SEQ ID NO: 78738 - DNA, 15 bp, Homo sapiens
gatgggcttactaac

SEQ ID NO: 78739 - DNA, 15 bp, Homo sapiens
ggatgggcttactaa

SEQ ID NO: 78740 - DNA, 15 bp, Homo sapiens
aggatgggcttacta

SEQ ID NO: 78741 - DNA, 15 bp, Homo sapiens
caggatgggcttact

SEQ ID NO: 78742 - DNA, 15 bp, Homo sapiens
gcaggatgggcttac

SEQ ID NO: 78743 - DNA, 15 bp, Homo sapiens
tgcaggatgggctta

SEQ ID NO: 78744 - DNA, 15 bp, Homo sapiens
ctgcaggatgggctt

SEQ ID NO: 78745 - DNA, 15 bp, Homo sapiens
cctgcaggatgggct

SEQ ID NO: 78746 - DNA, 15 bp, Homo sapiens
acctgcaggatgggc

SEQ ID NO: 78747 - DNA, 15 bp, Homo sapiens
cacctgcaggatggg

SEQ ID NO: 78748 - DNA, 15 bp, Homo sapiens
gcacctgcaggatgg

SEQ ID NO: 78749 - DNA, 15 bp, Homo sapiens
agcacctgcaggatg

SEQ ID NO: 78750 - DNA, 15 bp, Homo sapiens
tagcacctgcaggat

SEQ ID NO: 78751 - DNA, 15 bp, Homo sapiens
gtagcacctgcagga

SEQ ID NO: 78752 - DNA, 15 bp, Homo sapiens
agtagcacctgcagg

SEQ ID NO: 78753 - DNA, 15 bp, Homo sapiens
tagtagcacctgcag

SEQ ID NO: 78754 - DNA, 15 bp, Homo sapiens
gtagtagcacctgca

SEQ ID NO: 78755 - DNA, 15 bp, Homo sapiens
agtagtagcacctgc

SEQ ID NO: 78756 - DNA, 15 bp, Homo sapiens
aagtagtagcacctg

SEQ ID NO: 78757 - DNA, 15 bp, Homo sapiens
gaagtagtagcacct

SEQ ID NO: 78758 - DNA, 15 bp, Homo sapiens
agaagtagtagcacc

SEQ ID NO: 78759 - DNA, 15 bp, Homo sapiens
aagaagtagtagcac

SEQ ID NO: 78760 - DNA, 15 bp, Homo sapiens
gaagaagtagtagca

SEQ ID NO: 78761 - DNA, 15 bp, Homo sapiens
agaagaagtagtagc

SEQ ID NO: 78762 - DNA, 15 bp, Homo sapiens
gagaagaagtagtag

SEQ ID NO: 78763 - DNA, 15 bp, Homo sapiens
agagaagaagtagta

SEQ ID NO: 78764 - DNA, 15 bp, Homo sapiens
cagagaagaagtagt

SEQ ID NO: 78765 - DNA, 15 bp, Homo sapiens
acagagaagaagtag

SEQ ID NO: 78766 - DNA, 15 bp, Homo sapiens
aacagagaagaagta

SEQ ID NO: 78767 - DNA, 15 bp, Homo sapiens
aaacagagaagaagt

SEQ ID NO: 78768 - DNA, 15 bp, Homo sapiens
gaaacagagaagaag

SEQ ID NO: 78769 - DNA, 15 bp, Homo sapiens
agaaacagagaagaa

SEQ ID NO: 78770 - DNA, 15 bp, Homo sapiens
aagaaacagagaaga

SEQ ID NO: 78771 - DNA, 15 bp, Homo sapiens
caagaaacagagaag

SEQ ID NO: 78772 - DNA, 15 bp, Homo sapiens
ccaagaaacagagaa

SEQ ID NO: 78773 - DNA, 15 bp, Homo sapiens
gccaagaaacagaga

SEQ ID NO: 78774 - DNA, 15 bp, Homo sapiens
agccaagaaacagag

SEQ ID NO: 78775 - DNA, 15 bp, Homo sapiens
aagccaagaaacaga

SEQ ID NO: 78776 - DNA, 15 bp, Homo sapiens
taagccaagaaacag

SEQ ID NO: 78777 - DNA, 15 bp, Homo sapiens
gtaagccaagaaaca

SEQ ID NO: 78778 - DNA, 15 bp, Homo sapiens
agtaagccaagaaac

SEQ ID NO: 78779 - DNA, 15 bp, Homo sapiens
aagtaagccaagaaa

SEQ ID NO: 78780 - DNA, 15 bp, Homo sapiens
aaagtaagccaagaa

SEQ ID NO: 78781 - DNA, 15 bp, Homo sapiens
aaaagtaagccaaga

SEQ ID NO: 78782 - DNA, 15 bp, Homo sapiens
aaaaagtaagccaag

SEQ ID NO: 78783 - DNA, 15 bp, Homo sapiens
aaaaaagtaagccaa

SEQ ID NO: 78784 - DNA, 15 bp, Homo sapiens
aaaaaaagtaagcca

SEQ ID NO: 78785 - DNA, 15 bp, Homo sapiens
aaaaaaaagtaagcc

SEQ ID NO: 78786 - DNA, 15 bp, Homo sapiens
taaaaaaaagtaagc

SEQ ID NO: 78787 - DNA, 15 bp, Homo sapiens
ttaaaaaaaagtaag

SEQ ID NO: 78788 - DNA, 15 bp, Homo sapiens
tttaaaaaaaagtaa

SEQ ID NO: 78789 - DNA, 15 bp, Homo sapiens
ttttaaaaaaaagta

SEQ ID NO: 78790 - DNA, 15 bp, Homo sapiens
gttttaaaaaaaagt

SEQ ID NO: 78791 - DNA, 15 bp, Homo sapiens
agttttaaaaaaaag

SEQ ID NO: 78792 - DNA, 15 bp, Homo sapiens
gagttttaaaaaaaa

SEQ ID NO: 78793 - DNA, 15 bp, Homo sapiens
tgagttttaaaaaaa

SEQ ID NO: 78794 - DNA, 15 bp, Homo sapiens
atgagttttaaaaaa

SEQ ID NO: 78795 - DNA, 15 bp, Homo sapiens
aatgagttttaaaaa

SEQ ID NO: 78796 - DNA, 15 bp, Homo sapiens
taatgagttttaaaa

SEQ ID NO: 78797 - DNA, 15 bp, Homo sapiens
gtaatgagttttaaa

SEQ ID NO: 78798 - DNA, 15 bp, Homo sapiens
cgtaatgagttttaa

SEQ ID NO: 78799 - DNA, 15 bp, Homo sapiens
acgtaatgagtttta

SEQ ID NO: 78800 - DNA, 15 bp, Homo sapiens
cacgtaatgagtttt

SEQ ID NO: 78801 - DNA, 15 bp, Homo sapiens
gcacgtaatgagttt

SEQ ID NO: 78802 - DNA, 15 bp, Homo sapiens
tgcacgtaatgagtt

SEQ ID NO: 78803 - DNA, 15 bp, Homo sapiens
atgcacgtaatgagt

SEQ ID NO: 78804 - DNA, 15 bp, Homo sapiens
gatgcacgtaatgag

SEQ ID NO: 78805 - DNA, 15 bp, Homo sapiens
cgatgcacgtaatga

SEQ ID NO: 78806 - DNA, 15 bp, Homo sapiens
acgatgcacgtaatg

SEQ ID NO: 78807 - DNA, 15 bp, Homo sapiens
aacgatgcacgtaat

SEQ ID NO: 78808 - DNA, 15 bp, Homo sapiens
aaacgatgcacgtaa

SEQ ID NO: 78809 - DNA, 15 bp, Homo sapiens
taaacgatgcacgta

SEQ ID NO: 78810 - DNA, 15 bp, Homo sapiens
ttaaacgatgcacgt

SEQ ID NO: 78811 - DNA, 15 bp, Homo sapiens
cttaaacgatgcacg

SEQ ID NO: 78812 - DNA, 15 bp, Homo sapiens
acttaaacgatgcac

SEQ ID NO: 78813 - DNA, 15 bp, Homo sapiens
aacttaaacgatgca

SEQ ID NO: 78814 - DNA, 15 bp, Homo sapiens
gaacttaaacgatgc

SEQ ID NO: 78815 - DNA, 15 bp, Homo sapiens
agaacttaaacgatg

SEQ ID NO: 78816 - DNA, 15 bp, Homo sapiens
aagaacttaaacgat

SEQ ID NO: 78817 - DNA, 15 bp, Homo sapiens
aaagaacttaaacga

SEQ ID NO: 78818 - DNA, 15 bp, Homo sapiens
taaagaacttaaacg

SEQ ID NO: 78819 - DNA, 15 bp, Homo sapiens
ttaaagaacttaaac

SEQ ID NO: 78820 - DNA, 15 bp, Homo sapiens
tttaaagaacttaaa

SEQ ID NO: 78821 - DNA, 15 bp, Homo sapiens
ttttaaagaacttaa

SEQ ID NO: 78822 - DNA, 15 bp, Homo sapiens
attttaaagaactta

SEQ ID NO: 78823 - DNA, 15 bp, Homo sapiens
tattttaaagaactt

SEQ ID NO: 78824 - DNA, 15 bp, Homo sapiens
ttattttaaagaact

SEQ ID NO: 78825 - DNA, 15 bp, Homo sapiens
attattttaaagaac

SEQ ID NO: 78826 - DNA, 15 bp, Homo sapiens
cattattttaaagaa

SEQ ID NO: 78827 - DNA, 15 bp, Homo sapiens
tcattattttaaaga

SEQ ID NO: 78828 - DNA, 15 bp, Homo sapiens
atcattattttaaag

SEQ ID NO: 78829 - DNA, 15 bp, Homo sapiens
aatcattattttaaa

SEQ ID NO: 78830 - DNA, 15 bp, Homo sapiens
caatcattattttaa

SEQ ID NO: 78831 - DNA, 15 bp, Homo sapiens
gcaatcattatttta

SEQ ID NO: 78832 - DNA, 15 bp, Homo sapiens
tgcaatcattatttt

SEQ ID NO: 78833 - DNA, 15 bp, Homo sapiens
ctgcaatcattattt

SEQ ID NO: 78834 - DNA, 15 bp, Homo sapiens
tctgcaatcattatt

SEQ ID NO: 78835 - DNA, 15 bp, Homo sapiens
ttctgcaatcattat

SEQ ID NO: 78836 - DNA, 15 bp, Homo sapiens
cttctgcaatcatta

SEQ ID NO: 78837 - DNA, 15 bp, Homo sapiens
acttctgcaatcatt

SEQ ID NO: 78838 - DNA, 15 bp, Homo sapiens
cacttctgcaatcat

SEQ ID NO: 78839 - DNA, 15 bp, Homo sapiens
acacttctgcaatca

SEQ ID NO: 78840 - DNA, 15 bp, Homo sapiens
gacacttctgcaatc

SEQ ID NO: 78841 - DNA, 15 bp, Homo sapiens
tgacacttctgcaat

SEQ ID NO: 78842 - DNA, 15 bp, Homo sapiens
gtgacacttctgcaa

SEQ ID NO: 78843 - DNA, 15 bp, Homo sapiens
agtgacacttctgca

SEQ ID NO: 78844 - DNA, 15 bp, Homo sapiens
aagtgacacttctgc

SEQ ID NO: 78845 - DNA, 15 bp, Homo sapiens
gaagtgacacttctg

SEQ ID NO: 78846 - DNA, 15 bp, Homo sapiens
tgaagtgacacttct

SEQ ID NO: 78847 - DNA, 15 bp, Homo sapiens
atgaagtgacacttc

SEQ ID NO: 78848 - DNA, 15 bp, Homo sapiens
gatgaagtgacactt

SEQ ID NO: 78849 - DNA, 15 bp, Homo sapiens
ggatgaagtgacact

SEQ ID NO: 78850 - DNA, 15 bp, Homo sapiens
aggatgaagtgacac

SEQ ID NO: 78851 - DNA, 15 bp, Homo sapiens
aaggatgaagtgaca

SEQ ID NO: 78852 - DNA, 15 bp, Homo sapiens
caaggatgaagtgac

SEQ ID NO: 78853 - DNA, 15 bp, Homo sapiens
acaaggatgaagtga

SEQ ID NO: 78854 - DNA, 15 bp, Homo sapiens
tacaaggatgaagtg

SEQ ID NO: 78855 - DNA, 15 bp, Homo sapiens
atacaaggatgaagt

SEQ ID NO: 78856 - DNA, 15 bp, Homo sapiens
tatacaaggatgaag

SEQ ID NO: 78857 - DNA, 15 bp, Homo sapiens
ttatacaaggatgaa

SEQ ID NO: 78858 - DNA, 15 bp, Homo sapiens
tttatacaaggatga

SEQ ID NO: 78859 - DNA, 15 bp, Homo sapiens
ttttatacaaggatg

SEQ ID NO: 78860 - DNA, 15 bp, Homo sapiens
attttatacaaggat

SEQ ID NO: 78861 - DNA, 15 bp, Homo sapiens
aattttatacaagga

SEQ ID NO: 78862 - DNA, 15 bp, Homo sapiens
aaattttatacaagg

SEQ ID NO: 78863 - DNA, 15 bp, Homo sapiens
taaattttatacaag

SEQ ID NO: 78864 - DNA, 15 bp, Homo sapiens
ttaaattttatacaa

SEQ ID NO: 78865 - DNA, 15 bp, Homo sapiens
tttaaattttataca

SEQ ID NO: 78866 - DNA, 15 bp, Homo sapiens
ttttaaattttatac

SEQ ID NO: 78867 - DNA, 15 bp, Homo sapiens
gttttaaattttata

SEQ ID NO: 78868 - DNA, 15 bp, Homo sapiens
cgttttaaattttat

SEQ ID NO: 78869 - DNA, 15 bp, Homo sapiens
acgttttaaatttta

SEQ ID NO: 78870 - DNA, 15 bp, Homo sapiens
tacgttttaaatttt

SEQ ID NO: 78871 - DNA, 15 bp, Homo sapiens
atacgttttaaattt

SEQ ID NO: 78872 - DNA, 15 bp, Homo sapiens
tatacgttttaaatt

SEQ ID NO: 78873 - DNA, 15 bp, Homo sapiens
ctatacgttttaaat

SEQ ID NO: 78874 - DNA, 15 bp, Homo sapiens
tctatacgttttaaa

SEQ ID NO: 78875 - DNA, 15 bp, Homo sapiens
ttctatacgttttaa

SEQ ID NO: 78876 - DNA, 15 bp, Homo sapiens
tttctatacgtttta

SEQ ID NO: 78877 - DNA, 15 bp, Homo sapiens
ttttctatacgtttt

SEQ ID NO: 78878 - DNA, 15 bp, Homo sapiens
attttctatacgttt

SEQ ID NO: 78879 - DNA, 15 bp, Homo sapiens
aattttctatacgtt

SEQ ID NO: 78880 - DNA, 15 bp, Homo sapiens
aaattttctatacgt

SEQ ID NO: 78881 - DNA, 15 bp, Homo sapiens
gaaattttctatacg

SEQ ID NO: 78882 - DNA, 15 bp, Homo sapiens
tgaaattttctatac

SEQ ID NO: 78883 - DNA, 15 bp, Homo sapiens
ttgaaattttctata

SEQ ID NO: 78884 - DNA, 15 bp, Homo sapiens
tttgaaattttctat

SEQ ID NO: 78885 - DNA, 15 bp, Homo sapiens
ttttgaaattttcta

SEQ ID NO: 78886 - DNA, 15 bp, Homo sapiens
attttgaaattttct

SEQ ID NO: 78887 - DNA, 15 bp, Homo sapiens
tattttgaaattttc

SEQ ID NO: 78888 - DNA, 15 bp, Homo sapiens
ttattttgaaatttt

SEQ ID NO: 78889 - DNA, 15 bp, Homo sapiens
cttattttgaaattt

SEQ ID NO: 78890 - DNA, 15 bp, Homo sapiens
tcttattttgaaatt

SEQ ID NO: 78891 - DNA, 15 bp, Homo sapiens
ttcttattttgaaat

SEQ ID NO: 78892 - DNA, 15 bp, Homo sapiens
attcttattttgaaa

SEQ ID NO: 78893 - DNA, 15 bp, Homo sapiens
cattcttattttgaa

SEQ ID NO: 78894 - DNA, 15 bp, Homo sapiens
acattcttattttga

SEQ ID NO: 78895 - DNA, 15 bp, Homo sapiens
tacattcttattttg

SEQ ID NO: 78896 - DNA, 15 bp, Homo sapiens
ttacattcttatttt

SEQ ID NO: 78897 - DNA, 15 bp, Homo sapiens
tttacattcttattt

SEQ ID NO: 78898 - DNA, 15 bp, Homo sapiens
ttttacattcttatt

SEQ ID NO: 78899 - DNA, 15 bp, Homo sapiens
cttttacattcttat

SEQ ID NO: 78900 - DNA, 15 bp, Homo sapiens
gcttttacattctta

SEQ ID NO: 78901 - DNA, 15 bp, Homo sapiens
tgcttttacattctt

SEQ ID NO: 78902 - DNA, 15 bp, Homo sapiens
gtgcttttacattct

SEQ ID NO: 78903 - DNA, 15 bp, Homo sapiens
cgtgcttttacattc

SEQ ID NO: 78904 - DNA, 15 bp, Homo sapiens
gcgtgcttttacatt

SEQ ID NO: 78905 - DNA, 15 bp, Homo sapiens
tgcgtgcttttacat

SEQ ID NO: 78906 - DNA, 15 bp, Homo sapiens
atgcgtgcttttaca

SEQ ID NO: 78907 - DNA, 15 bp, Homo sapiens
tatgcgtgcttttac

SEQ ID NO: 78908 - DNA, 15 bp, Homo sapiens
ctatgcgtgctttta

SEQ ID NO: 78909 - DNA, 15 bp, Homo sapiens
actatgcgtgctttt

SEQ ID NO: 78910 - DNA, 15 bp, Homo sapiens
gactatgcgtgcttt

SEQ ID NO: 78911 - DNA, 15 bp, Homo sapiens
agactatgcgtgctt

SEQ ID NO: 78912 - DNA, 15 bp, Homo sapiens
gagactatgcgtgct

SEQ ID NO: 78913 - DNA, 15 bp, Homo sapiens
tgagactatgcgtgc

SEQ ID NO: 78914 - DNA, 15 bp, Homo sapiens
gtgagactatgcgtg

SEQ ID NO: 78915 - DNA, 15 bp, Homo sapiens
tgtgagactatgcgt

SEQ ID NO: 78916 - DNA, 15 bp, Homo sapiens
ttgtgagactatgcg

SEQ ID NO: 78917 - DNA, 15 bp, Homo sapiens
attgtgagactatgc

SEQ ID NO: 78918 - DNA, 15 bp, Homo sapiens
tattgtgagactatg

SEQ ID NO: 78919 - DNA, 15 bp, Homo sapiens
gtattgtgagactat

SEQ ID NO: 78920 - DNA, 15 bp, Homo sapiens
tgtattgtgagacta

SEQ ID NO: 78921 - DNA, 15 bp, Homo sapiens
ctgtattgtgagact

SEQ ID NO: 78922 - DNA, 15 bp, Homo sapiens
tctgtattgtgagac

SEQ ID NO: 78923 - DNA, 15 bp, Homo sapiens
ttctgtattgtgaga

SEQ ID NO: 78924 - DNA, 15 bp, Homo sapiens
tttctgtattgtgag

SEQ ID NO: 78925 - DNA, 15 bp, Homo sapiens
ctttctgtattgtga

SEQ ID NO: 78926 - DNA, 15 bp, Homo sapiens
gctttctgtattgtg

SEQ ID NO: 78927 - DNA, 15 bp, Homo sapiens
tgctttctgtattgt

SEQ ID NO: 78928 - DNA, 15 bp, Homo sapiens
ctgctttctgtattg

SEQ ID NO: 78929 - DNA, 15 bp, Homo sapiens
gctgctttctgtatt

SEQ ID NO: 78930 - DNA, 15 bp, Homo sapiens
ggctgctttctgtat

SEQ ID NO: 78931 - DNA, 15 bp, Homo sapiens
cggctgctttctgta

SEQ ID NO: 78932 - DNA, 15 bp, Homo sapiens
tcggctgctttctgt

SEQ ID NO: 78933 - DNA, 15 bp, Homo sapiens
atcggctgctttctg

SEQ ID NO: 78934 - DNA, 15 bp, Homo sapiens
aatcggctgctttct

SEQ ID NO: 78935 - DNA, 15 bp, Homo sapiens
gaatcggctgctttc

SEQ ID NO: 78936 - DNA, 15 bp, Homo sapiens
tgaatcggctgcttt

SEQ ID NO: 78937 - DNA, 15 bp, Homo sapiens
atgaatcggctgctt

SEQ ID NO: 78938 - DNA, 15 bp, Homo sapiens
tatgaatcggctgct

SEQ ID NO: 78939 - DNA, 15 bp, Homo sapiens
atatgaatcggctgc

SEQ ID NO: 78940 - DNA, 15 bp, Homo sapiens
aatatgaatcggctg

SEQ ID NO: 78941 - DNA, 15 bp, Homo sapiens
aaatatgaatcggct

SEQ ID NO: 78942 - DNA, 15 bp, Homo sapiens
aaaatatgaatcggc

SEQ ID NO: 78943 - DNA, 15 bp, Homo sapiens
caaaatatgaatcgg

SEQ ID NO: 78944 - DNA, 15 bp, Homo sapiens
ccaaaatatgaatcg

SEQ ID NO: 78945 - DNA, 15 bp, Homo sapiens
accaaaatatgaatc

SEQ ID NO: 78946 - DNA, 15 bp, Homo sapiens
caccaaaatatgaat

SEQ ID NO: 78947 - DNA, 15 bp, Homo sapiens
gcaccaaaatatgaa

SEQ ID NO: 78948 - DNA, 15 bp, Homo sapiens
ggcaccaaaatatga

SEQ ID NO: 78949 - DNA, 15 bp, Homo sapiens
gggcaccaaaatatg

SEQ ID NO: 78950 - DNA, 15 bp, Homo sapiens
agggcaccaaaatat

SEQ ID NO: 78951 - DNA, 15 bp, Homo sapiens
aagggcaccaaaata

SEQ ID NO: 78952 - DNA, 15 bp, Homo sapiens
gaagggcaccaaaat

SEQ ID NO: 78953 - DNA, 15 bp, Homo sapiens
ggaagggcaccaaaa

SEQ ID NO: 78954 - DNA, 15 bp, Homo sapiens
aggaagggcaccaaa

SEQ ID NO: 78955 - DNA, 15 bp, Homo sapiens
aaggaagggcaccaa

SEQ ID NO: 78956 - DNA, 15 bp, Homo sapiens
gaaggaagggcacca

SEQ ID NO: 78957 - DNA, 15 bp, Homo sapiens
ggaaggaagggcacc

SEQ ID NO: 78958 - DNA, 15 bp, Homo sapiens
cggaaggaagggcac

SEQ ID NO: 78959 - DNA, 15 bp, Homo sapiens
ccggaaggaagggca

SEQ ID NO: 78960 - DNA, 15 bp, Homo sapiens
accggaaggaagggc

SEQ ID NO: 78961 - DNA, 15 bp, Homo sapiens
gaccggaaggaaggg

SEQ ID NO: 78962 - DNA, 15 bp, Homo sapiens
agaccggaaggaagg

SEQ ID NO: 78963 - DNA, 15 bp, Homo sapiens
aagaccggaaggaag

SEQ ID NO: 78964 - DNA, 15 bp, Homo sapiens
aaagaccggaaggaa

SEQ ID NO: 78965 - DNA, 15 bp, Homo sapiens
taaagaccggaagga

SEQ ID NO: 78966 - DNA, 15 bp, Homo sapiens
ataaagaccggaagg

SEQ ID NO: 78967 - DNA, 15 bp, Homo sapiens
tataaagaccggaag

SEQ ID NO: 78968 - DNA, 15 bp, Homo sapiens
ttataaagaccggaa

SEQ ID NO: 78969 - DNA, 15 bp, Homo sapiens
attataaagaccgga

SEQ ID NO: 78970 - DNA, 15 bp, Homo sapiens
cattataaagaccgg

SEQ ID NO: 78971 - DNA, 15 bp, Homo sapiens
gcattataaagaccg

SEQ ID NO: 78972 - DNA, 15 bp, Homo sapiens
tgcattataaagacc

SEQ ID NO: 78973 - DNA, 15 bp, Homo sapiens
ttgcattataaagac

SEQ ID NO: 78974 - DNA, 15 bp, Homo sapiens
tttgcattataaaga

SEQ ID NO: 78975 - DNA, 15 bp, Homo sapiens
atttgcattataaag

SEQ ID NO: 78976 - DNA, 15 bp, Homo sapiens
tatttgcattataaa

SEQ ID NO: 78977 - DNA, 15 bp, Homo sapiens
atatttgcattataa

SEQ ID NO: 78978 - DNA, 15 bp, Homo sapiens
tatatttgcattata

SEQ ID NO: 78979 - DNA, 15 bp, Homo sapiens
atatatttgcattat

SEQ ID NO: 78980 - DNA, 15 bp, Homo sapiens
tatatatttgcatta

SEQ ID NO: 78981 - DNA, 15 bp, Homo sapiens
ctatatatttgcatt

SEQ ID NO: 78982 - DNA, 15 bp, Homo sapiens
tctatatatttgcat

SEQ ID NO: 78983 - DNA, 15 bp, Homo sapiens
gtctatatatttgca

SEQ ID NO: 78984 - DNA, 15 bp, Homo sapiens
tgtctatatatttgc

SEQ ID NO: 78985 - DNA, 15 bp, Homo sapiens
atgtctatatatttg

SEQ ID NO: 78986 - DNA, 15 bp, Homo sapiens
tatgtctatatattt

SEQ ID NO: 78987 - DNA, 15 bp, Homo sapiens
atatgtctatatatt

SEQ ID NO: 78988 - DNA, 15 bp, Homo sapiens
tatatgtctatatat

SEQ ID NO: 78989 - DNA, 15 bp, Homo sapiens
atatatgtctatata

SEQ ID NO: 78990 - DNA, 15 bp, Homo sapiens
catatatgtctatat

SEQ ID NO: 78991 - DNA, 15 bp, Homo sapiens
acatatatgtctata

SEQ ID NO: 78992 - DNA, 15 bp, Homo sapiens
tacatatatgtctat

SEQ ID NO: 78993 - DNA, 15 bp, Homo sapiens
atacatatatgtcta

SEQ ID NO: 78994 - DNA, 15 bp, Homo sapiens
aatacatatatgtct

SEQ ID NO: 78995 - DNA, 15 bp, Homo sapiens
taatacatatatgtc

SEQ ID NO: 78996 - DNA, 15 bp, Homo sapiens
ataatacatatatgt

SEQ ID NO: 78997 - DNA, 15 bp, Homo sapiens
aataatacatatatg

SEQ ID NO: 78998 - DNA, 15 bp, Homo sapiens
aaataatacatatat

SEQ ID NO: 78999 - DNA, 15 bp, Homo sapiens
aaaataatacatata

SEQ ID NO: 79000 - DNA, 15 bp, Homo sapiens
taaaataatacatat

SEQ ID NO: 79001 - DNA, 15 bp, Homo sapiens
ataaaataatacata

SEQ ID NO: 79002 - DNA, 15 bp, Homo sapiens
gataaaataatacat

SEQ ID NO: 79003 - DNA, 15 bp, Homo sapiens
agataaaataataca

SEQ ID NO: 79004 - DNA, 15 bp, Homo sapiens
tagataaaataatac

SEQ ID NO: 79005 - DNA, 15 bp, Homo sapiens
ctagataaaataata

SEQ ID NO: 79006 - DNA, 15 bp, Homo sapiens
gctagataaaataat

SEQ ID NO: 79007 - DNA, 15 bp, Homo sapiens
ggctagataaaataa

SEQ ID NO: 79008 - DNA, 15 bp, Homo sapiens
tggctagataaaata

SEQ ID NO: 79009 - DNA, 15 bp, Homo sapiens
ctggctagataaaat

SEQ ID NO: 79010 - DNA, 15 bp, Homo sapiens
tctggctagataaaa

SEQ ID NO: 79011 - DNA, 15 bp, Homo sapiens
ttctggctagataaa

SEQ ID NO: 79012 - DNA, 15 bp, Homo sapiens
attctggctagataa

SEQ ID NO: 79013 - DNA, 15 bp, Homo sapiens
gattctggctagata

SEQ ID NO: 79014 - DNA, 15 bp, Homo sapiens
tgattctggctagat

SEQ ID NO: 79015 - DNA, 15 bp, Homo sapiens
atgattctggctaga

SEQ ID NO: 79016 - DNA, 15 bp, Homo sapiens
tatgattctggctag

SEQ ID NO: 79017 - DNA, 15 bp, Homo sapiens
atatgattctggcta

SEQ ID NO: 79018 - DNA, 15 bp, Homo sapiens
aatatgattctggct

SEQ ID NO: 79019 - DNA, 15 bp, Homo sapiens
caatatgattctggc

SEQ ID NO: 79020 - DNA, 15 bp, Homo sapiens
gcaatatgattctgg

SEQ ID NO: 79021 - DNA, 15 bp, Homo sapiens
agcaatatgattctg

SEQ ID NO: 79022 - DNA, 15 bp, Homo sapiens
aagcaatatgattct

SEQ ID NO: 79023 - DNA, 15 bp, Homo sapiens
aaagcaatatgattc

SEQ ID NO: 79024 - DNA, 15 bp, Homo sapiens
caaagcaatatgatt

SEQ ID NO: 79025 - DNA, 15 bp, Homo sapiens
acaaagcaatatgat

SEQ ID NO: 79026 - DNA, 15 bp, Homo sapiens
tacaaagcaatatga

SEQ ID NO: 79027 - DNA, 15 bp, Homo sapiens
ttacaaagcaatatg

SEQ ID NO: 79028 - DNA, 15 bp, Homo sapiens
gttacaaagcaatat

SEQ ID NO: 79029 - DNA, 15 bp, Homo sapiens
ggttacaaagcaata

SEQ ID NO: 79030 - DNA, 15 bp, Homo sapiens
aggttacaaagcaat

SEQ ID NO: 79031 - DNA, 15 bp, Homo sapiens
gaggttacaaagcaa

SEQ ID NO: 79032 - DNA, 15 bp, Homo sapiens
ggaggttacaaagca

SEQ ID NO: 79033 - DNA, 15 bp, Homo sapiens
aggaggttacaaagc

SEQ ID NO: 79034 - DNA, 15 bp, Homo sapiens
aaggaggttacaaag

SEQ ID NO: 79035 - DNA, 15 bp, Homo sapiens
aaaggaggttacaaa

SEQ ID NO: 79036 - DNA, 15 bp, Homo sapiens
aaaaggaggttacaa

SEQ ID NO: 79037 - DNA, 15 bp, Homo sapiens
taaaaggaggttaca

SEQ ID NO: 79038 - DNA, 15 bp, Homo sapiens
ataaaaggaggttac

SEQ ID NO: 79039 - DNA, 15 bp, Homo sapiens
aataaaaggaggtta

SEQ ID NO: 79040 - DNA, 15 bp, Homo sapiens
gaataaaaggaggtt

SEQ ID NO: 79041 - DNA, 15 bp, Homo sapiens
agaataaaaggaggt

SEQ ID NO: 79042 - DNA, 15 bp, Homo sapiens
gagaataaaaggagg

SEQ ID NO: 79043 - DNA, 15 bp, Homo sapiens
agagaataaaaggag

SEQ ID NO: 79044 - DNA, 15 bp, Homo sapiens
aagagaataaaagga

SEQ ID NO: 79045 - DNA, 15 bp, Homo sapiens
aaagagaataaaagg

SEQ ID NO: 79046 - DNA, 15 bp, Homo sapiens
taaagagaataaaag

SEQ ID NO: 79047 - DNA, 15 bp, Homo sapiens
ataaagagaataaaa

SEQ ID NO: 79048 - DNA, 15 bp, Homo sapiens
tataaagagaataaa

SEQ ID NO: 79049 - DNA, 15 bp, Homo sapiens
atataaagagaataa

SEQ ID NO: 79050 - DNA, 15 bp, Homo sapiens
aatataaagagaata

SEQ ID NO: 79051 - DNA, 15 bp, Homo sapiens
taatataaagagaat

SEQ ID NO: 79052 - DNA, 15 bp, Homo sapiens
ttaatataaagagaa

SEQ ID NO: 79053 - DNA, 15 bp, Homo sapiens
tttaatataaagaga

SEQ ID NO: 79054 - DNA, 15 bp, Homo sapiens
atttaatataaagag

SEQ ID NO: 79055 - DNA, 15 bp, Homo sapiens
aatttaatataaaga

SEQ ID NO: 79056 - DNA, 15 bp, Homo sapiens
taatttaatataaag

SEQ ID NO: 79057 - DNA, 15 bp, Homo sapiens
gtaatttaatataaa

SEQ ID NO: 79058 - DNA, 15 bp, Homo sapiens
cgtaatttaatataa

SEQ ID NO: 79059 - DNA, 15 bp, Homo sapiens
ccgtaatttaatata

SEQ ID NO: 79060 - DNA, 15 bp, Homo sapiens
gccgtaatttaatat

SEQ ID NO: 79061 - DNA, 15 bp, Homo sapiens
ggccgtaatttaata

SEQ ID NO: 79062 - DNA, 15 bp, Homo sapiens
tggccgtaatttaat

SEQ ID NO: 79063 - DNA, 15 bp, Homo sapiens
atggccgtaatttaa

SEQ ID NO: 79064 - DNA, 15 bp, Homo sapiens
catggccgtaattta

SEQ ID NO: 79065 - DNA, 15 bp, Homo sapiens
acatggccgtaattt

SEQ ID NO: 79066 - DNA, 15 bp, Homo sapiens
aacatggccgtaatt

SEQ ID NO: 79067 - DNA, 15 bp, Homo sapiens
gaacatggccgtaat

SEQ ID NO: 79068 - DNA, 15 bp, Homo sapiens
ggaacatggccgtaa

SEQ ID NO: 79069 - DNA, 15 bp, Homo sapiens
aggaacatggccgta

SEQ ID NO: 79070 - DNA, 15 bp, Homo sapiens
caggaacatggccgt

SEQ ID NO: 79071 - DNA, 15 bp, Homo sapiens
acaggaacatggccg

SEQ ID NO: 79072 - DNA, 15 bp, Homo sapiens
tacaggaacatggcc

SEQ ID NO: 79073 - DNA, 15 bp, Homo sapiens
atacaggaacatggc

SEQ ID NO: 79074 - DNA, 15 bp, Homo sapiens
gatacaggaacatgg

SEQ ID NO: 79075 - DNA, 15 bp, Homo sapiens
tgatacaggaacatg

SEQ ID NO: 79076 - DNA, 15 bp, Homo sapiens
atgatacaggaacat

SEQ ID NO: 79077 - DNA, 15 bp, Homo sapiens
aatgatacaggaaca

SEQ ID NO: 79078 - DNA, 15 bp, Homo sapiens
taatgatacaggaac

SEQ ID NO: 79079 - DNA, 15 bp, Homo sapiens
ttaatgatacaggaa

SEQ ID NO: 79080 - DNA, 15 bp, Homo sapiens
tttaatgatacagga

SEQ ID NO: 79081 - DNA, 15 bp, Homo sapiens
atttaatgatacagg

SEQ ID NO: 79082 - DNA, 15 bp, Homo sapiens
tatttaatgatacag

SEQ ID NO: 79083 - DNA, 15 bp, Homo sapiens
atatttaatgataca

SEQ ID NO: 79084 - DNA, 15 bp, Homo sapiens
aatatttaatgatac

SEQ ID NO: 79085 - DNA, 15 bp, Homo sapiens
taatatttaatgata

SEQ ID NO: 79086 - DNA, 15 bp, Homo sapiens
gtaatatttaatgat

SEQ ID NO: 79087 - DNA, 15 bp, Homo sapiens
tgtaatatttaatga

SEQ ID NO: 79088 - DNA, 15 bp, Homo sapiens
gtgtaatatttaatg

SEQ ID NO: 79089 - DNA, 15 bp, Homo sapiens
agtgtaatatttaat

SEQ ID NO: 79090 - DNA, 15 bp, Homo sapiens
tagtgtaatatttaa

SEQ ID NO: 79091 - DNA, 15 bp, Homo sapiens
atagtgtaatattta

SEQ ID NO: 79092 - DNA, 15 bp, Homo sapiens
tatagtgtaatattt

SEQ ID NO: 79093 - DNA, 15 bp, Homo sapiens
atatagtgtaatatt

SEQ ID NO: 79094 - DNA, 15 bp, Homo sapiens
gatatagtgtaatat

SEQ ID NO: 79095 - DNA, 15 bp, Homo sapiens
tgatatagtgtaata

SEQ ID NO: 79096 - DNA, 15 bp, Homo sapiens
gtgatatagtgtaat

SEQ ID NO: 79097 - DNA, 15 bp, Homo sapiens
agtgatatagtgtaa

SEQ ID NO: 79098 - DNA, 15 bp, Homo sapiens
tagtgatatagtgta

SEQ ID NO: 79099 - DNA, 15 bp, Homo sapiens
gtagtgatatagtgt

SEQ ID NO: 79100 - DNA, 15 bp, Homo sapiens
agtagtgatatagtg

SEQ ID NO: 79101 - DNA, 15 bp, Homo sapiens
aagtagtgatatagt

SEQ ID NO: 79102 - DNA, 15 bp, Homo sapiens
gaagtagtgatatag

SEQ ID NO: 79103 - DNA, 15 bp, Homo sapiens
agaagtagtgatata

SEQ ID NO: 79104 - DNA, 15 bp, Homo sapiens
cagaagtagtgatat

SEQ ID NO: 79105 - DNA, 15 bp, Homo sapiens
tcagaagtagtgata

SEQ ID NO: 79106 - DNA, 15 bp, Homo sapiens
atcagaagtagtgat

SEQ ID NO: 79107 - DNA, 15 bp, Homo sapiens
catcagaagtagtga

SEQ ID NO: 79108 - DNA, 15 bp, Homo sapiens
ccatcagaagtagtg

SEQ ID NO: 79109 - DNA, 15 bp, Homo sapiens
tccatcagaagtagt

SEQ ID NO: 79110 - DNA, 15 bp, Homo sapiens
ttccatcagaagtag

SEQ ID NO: 79111 - DNA, 15 bp, Homo sapiens
cttccatcagaagta

SEQ ID NO: 79112 - DNA, 15 bp, Homo sapiens
acttccatcagaagt

SEQ ID NO: 79113 - DNA, 15 bp, Homo sapiens
tacttccatcagaag

SEQ ID NO: 79114 - DNA, 15 bp, Homo sapiens
gtacttccatcagaa

SEQ ID NO: 79115 - DNA, 15 bp, Homo sapiens
tgtacttccatcaga

SEQ ID NO: 79116 - DNA, 15 bp, Homo sapiens
ctgtacttccatcag

SEQ ID NO: 79117 - DNA, 15 bp, Homo sapiens
gctgtacttccatca

SEQ ID NO: 79118 - DNA, 15 bp, Homo sapiens
tgctgtacttccatc

SEQ ID NO: 79119 - DNA, 15 bp, Homo sapiens
ttgctgtacttccat

SEQ ID NO: 79120 - DNA, 15 bp, Homo sapiens
tttgctgtacttcca

SEQ ID NO: 79121 - DNA, 15 bp, Homo sapiens
gtttgctgtacttcc

SEQ ID NO: 79122 - DNA, 15 bp, Homo sapiens
ggtttgctgtacttc

SEQ ID NO: 79123 - DNA, 15 bp, Homo sapiens
tggtttgctgtactt

SEQ ID NO: 79124 - DNA, 15 bp, Homo sapiens
gtggtttgctgtact

SEQ ID NO: 79125 - DNA, 15 bp, Homo sapiens
agtggtttgctgtac

SEQ ID NO: 79126 - DNA, 15 bp, Homo sapiens
tagtggtttgctgta

SEQ ID NO: 79127 - DNA, 15 bp, Homo sapiens
ttagtggtttgctgt

SEQ ID NO: 79128 - DNA, 15 bp, Homo sapiens
tttagtggtttgctg

SEQ ID NO: 79129 - DNA, 15 bp, Homo sapiens
gtttagtggtttgct

SEQ ID NO: 79130 - DNA, 15 bp, Homo sapiens
tgtttagtggtttgc

SEQ ID NO: 79131 - DNA, 15 bp, Homo sapiens
gtgtttagtggtttg

SEQ ID NO: 79132 - DNA, 15 bp, Homo sapiens
cgtgtttagtggttt

SEQ ID NO: 79133 - DNA, 15 bp, Homo sapiens
ccgtgtttagtggtt

SEQ ID NO: 79134 - DNA, 15 bp, Homo sapiens
tccgtgtttagtggt

SEQ ID NO: 79135 - DNA, 15 bp, Homo sapiens
ttccgtgtttagtgg

SEQ ID NO: 79136 - DNA, 15 bp, Homo sapiens
cttccgtgtttagtg

SEQ ID NO: 79137 - DNA, 15 bp, Homo sapiens
acttccgtgtttagt

SEQ ID NO: 79138 - DNA, 15 bp, Homo sapiens
gacttccgtgtttag

SEQ ID NO: 79139 - DNA, 15 bp, Homo sapiens
tgacttccgtgttta

SEQ ID NO: 79140 - DNA, 15 bp, Homo sapiens
ttgacttccgtgttt

SEQ ID NO: 79141 - DNA, 15 bp, Homo sapiens
cttgacttccgtgtt

SEQ ID NO: 79142 - DNA, 15 bp, Homo sapiens
acttgacttccgtgt

SEQ ID NO: 79143 - DNA, 15 bp, Homo sapiens
gacttgacttccgtg

SEQ ID NO: 79144 - DNA, 15 bp, Homo sapiens
ggacttgacttccgt

SEQ ID NO: 79145 - DNA, 15 bp, Homo sapiens
aggacttgacttccg

SEQ ID NO: 79146 - DNA, 15 bp, Homo sapiens
caggacttgacttcc

SEQ ID NO: 79147 - DNA, 15 bp, Homo sapiens
ccaggacttgacttc

SEQ ID NO: 79148 - DNA, 15 bp, Homo sapiens
cccaggacttgactt

SEQ ID NO: 79149 - DNA, 15 bp, Homo sapiens
gcccaggacttgact

SEQ ID NO: 79150 - DNA, 15 bp, Homo sapiens
agcccaggacttgac

SEQ ID NO: 79151 - DNA, 15 bp, Homo sapiens
gagcccaggacttga

SEQ ID NO: 79152 - DNA, 15 bp, Homo sapiens
agagcccaggacttg

SEQ ID NO: 79153 - DNA, 15 bp, Homo sapiens
cagagcccaggactt

SEQ ID NO: 79154 - DNA, 15 bp, Homo sapiens
ccagagcccaggact

SEQ ID NO: 79155 - DNA, 15 bp, Homo sapiens
tccagagcccaggac

SEQ ID NO: 79156 - DNA, 15 bp, Homo sapiens
ttccagagcccagga

SEQ ID NO: 79157 - DNA, 15 bp, Homo sapiens
attccagagcccagg

SEQ ID NO: 79158 - DNA, 15 bp, Homo sapiens
tattccagagcccag

SEQ ID NO: 79159 - DNA, 15 bp, Homo sapiens
ctattccagagccca

SEQ ID NO: 79160 - DNA, 15 bp, Homo sapiens
actattccagagccc

SEQ ID NO: 79161 - DNA, 15 bp, Homo sapiens
tactattccagagcc

SEQ ID NO: 79162 - DNA, 15 bp, Homo sapiens
atactattccagagc

SEQ ID NO: 79163 - DNA, 15 bp, Homo sapiens
tatactattccagag

SEQ ID NO: 79164 - DNA, 15 bp, Homo sapiens
atatactattccaga

SEQ ID NO: 79165 - DNA, 15 bp, Homo sapiens
tatatactattccag

SEQ ID NO: 79166 - DNA, 15 bp, Homo sapiens
atatatactattcca

SEQ ID NO: 79167 - DNA, 15 bp, Homo sapiens
aatatatactattcc

SEQ ID NO: 79168 - DNA, 15 bp, Homo sapiens
taatatatactattc

SEQ ID NO: 79169 - DNA, 15 bp, Homo sapiens
ataatatatactatt

SEQ ID NO: 79170 - DNA, 15 bp, Homo sapiens
aataatatatactat

SEQ ID NO: 79171 - DNA, 15 bp, Homo sapiens
aaataatatatacta

SEQ ID NO: 79172 - DNA, 15 bp, Homo sapiens
aaaataatatatact

SEQ ID NO: 79173 - DNA, 15 bp, Homo sapiens
taaaataatatatac

SEQ ID NO: 79174 - DNA, 15 bp, Homo sapiens
ctaaaataatatata

SEQ ID NO: 79175 - DNA, 15 bp, Homo sapiens
actaaaataatatat

SEQ ID NO: 79176 - DNA, 15 bp, Homo sapiens
aactaaaataatata

SEQ ID NO: 79177 - DNA, 15 bp, Homo sapiens
taactaaaataatat

SEQ ID NO: 79178 - DNA, 15 bp, Homo sapiens
ataactaaaataata

SEQ ID NO: 79179 - DNA, 15 bp, Homo sapiens
cataactaaaataat

SEQ ID NO: 79180 - DNA, 15 bp, Homo sapiens
gcataactaaaataa

SEQ ID NO: 79181 - DNA, 15 bp, Homo sapiens
ggcataactaaaata

SEQ ID NO: 79182 - DNA, 15 bp, Homo sapiens
gggcataactaaaat

SEQ ID NO: 79183 - DNA, 15 bp, Homo sapiens
tgggcataactaaaa

SEQ ID NO: 79184 - DNA, 15 bp, Homo sapiens
ctgggcataactaaa

SEQ ID NO: 79185 - DNA, 15 bp, Homo sapiens
gctgggcataactaa

SEQ ID NO: 79186 - DNA, 15 bp, Homo sapiens
agctgggcataacta

SEQ ID NO: 79187 - DNA, 15 bp, Homo sapiens
aagctgggcataact

SEQ ID NO: 79188 - DNA, 15 bp, Homo sapiens
gaagctgggcataac

SEQ ID NO: 79189 - DNA, 15 bp, Homo sapiens
agaagctgggcataa

SEQ ID NO: 79190 - DNA, 15 bp, Homo sapiens
cagaagctgggcata

SEQ ID NO: 79191 - DNA, 15 bp, Homo sapiens
ccagaagctgggcat

SEQ ID NO: 79192 - DNA, 15 bp, Homo sapiens
tccagaagctgggca

SEQ ID NO: 79193 - DNA, 15 bp, Homo sapiens
gtccagaagctgggc

SEQ ID NO: 79194 - DNA, 15 bp, Homo sapiens
ggtccagaagctggg

SEQ ID NO: 79195 - DNA, 15 bp, Homo sapiens
aggtccagaagctgg

SEQ ID NO: 79196 - DNA, 15 bp, Homo sapiens
caggtccagaagctg

SEQ ID NO: 79197 - DNA, 15 bp, Homo sapiens
ccaggtccagaagct

SEQ ID NO: 79198 - DNA, 15 bp, Homo sapiens
cccaggtccagaagc

SEQ ID NO: 79199 - DNA, 15 bp, Homo sapiens
tcccaggtccagaag

SEQ ID NO: 79200 - DNA, 15 bp, Homo sapiens
atcccaggtccagaa

SEQ ID NO: 79201 - DNA, 15 bp, Homo sapiens
catcccaggtccaga

SEQ ID NO: 79202 - DNA, 15 bp, Homo sapiens
ccatcccaggtccag

SEQ ID NO: 79203 - DNA, 15 bp, Homo sapiens
gccatcccaggtcca

SEQ ID NO: 79204 - DNA, 15 bp, Homo sapiens
tgccatcccaggtcc

SEQ ID NO: 79205 - DNA, 15 bp, Homo sapiens
atgccatcccaggtc

SEQ ID NO: 79206 - DNA, 15 bp, Homo sapiens
aatgccatcccaggt

SEQ ID NO: 79207 - DNA, 15 bp, Homo sapiens
aaatgccatcccagg

SEQ ID NO: 79208 - DNA, 15 bp, Homo sapiens
aaaatgccatcccag

SEQ ID NO: 79209 - DNA, 15 bp, Homo sapiens
caaaatgccatccca

SEQ ID NO: 79210 - DNA, 15 bp, Homo sapiens
acaaaatgccatccc

SEQ ID NO: 79211 - DNA, 15 bp, Homo sapiens
tacaaaatgccatcc

SEQ ID NO: 79212 - DNA, 15 bp, Homo sapiens
ttacaaaatgccatc

SEQ ID NO: 79213 - DNA, 15 bp, Homo sapiens
gttacaaaatgccat

SEQ ID NO: 79214 - DNA, 15 bp, Homo sapiens
tgttacaaaatgcca

SEQ ID NO: 79215 - DNA, 15 bp, Homo sapiens
ctgttacaaaatgcc

SEQ ID NO: 79216 - DNA, 15 bp, Homo sapiens
tctgttacaaaatgc

SEQ ID NO: 79217 - DNA, 15 bp, Homo sapiens
gtctgttacaaaatg

SEQ ID NO: 79218 - DNA, 15 bp, Homo sapiens
cgtctgttacaaaat

SEQ ID NO: 79219 - DNA, 15 bp, Homo sapiens
gcgtctgttacaaaa

SEQ ID NO: 79220 - DNA, 15 bp, Homo sapiens
tgcgtctgttacaaa

SEQ ID NO: 79221 - DNA, 15 bp, Homo sapiens
ctgcgtctgttacaa

SEQ ID NO: 79222 - DNA, 15 bp, Homo sapiens
gctgcgtctgttaca

SEQ ID NO: 79223 - DNA, 15 bp, Homo sapiens
ggctgcgtctgttac

SEQ ID NO: 79224 - DNA, 15 bp, Homo sapiens
aggctgcgtctgtta

SEQ ID NO: 79225 - DNA, 15 bp, Homo sapiens
aaggctgcgtctgtt

SEQ ID NO: 79226 - DNA, 15 bp, Homo sapiens
taaggctgcgtctgt

SEQ ID NO: 79227 - DNA, 15 bp, Homo sapiens
ataaggctgcgtctg

SEQ ID NO: 79228 - DNA, 15 bp, Homo sapiens
gataaggctgcgtct

SEQ ID NO: 79229 - DNA, 15 bp, Homo sapiens
agataaggctgcgtc

SEQ ID NO: 79230 - DNA, 15 bp, Homo sapiens
gagataaggctgcgt

SEQ ID NO: 79231 - DNA, 15 bp, Homo sapiens
agagataaggctgcg

SEQ ID NO: 79232 - DNA, 15 bp, Homo sapiens
aagagataaggctgc

SEQ ID NO: 79233 - DNA, 15 bp, Homo sapiens
aaagagataaggctg

SEQ ID NO: 79234 - DNA, 15 bp, Homo sapiens
aaaagagataaggct

SEQ ID NO: 79235 - DNA, 15 bp, Homo sapiens
caaaagagataaggc

SEQ ID NO: 79236 - DNA, 15 bp, Homo sapiens
acaaaagagataagg

SEQ ID NO: 79237 - DNA, 15 bp, Homo sapiens
tacaaaagagataag

SEQ ID NO: 79238 - DNA, 15 bp, Homo sapiens
atacaaaagagataa

SEQ ID NO: 79239 - DNA, 15 bp, Homo sapiens
aatacaaaagagata

SEQ ID NO: 79240 - DNA, 15 bp, Homo sapiens
aaatacaaaagagat

SEQ ID NO: 79241 - DNA, 15 bp, Homo sapiens
aaaatacaaaagaga

SEQ ID NO: 79242 - DNA, 15 bp, Homo sapiens
gaaaatacaaaagag

SEQ ID NO: 79243 - DNA, 15 bp, Homo sapiens
tgaaaatacaaaaga

SEQ ID NO: 79244 - DNA, 15 bp, Homo sapiens
atgaaaatacaaaag

SEQ ID NO: 79245 - DNA, 15 bp, Homo sapiens
tatgaaaatacaaaa

SEQ ID NO: 79246 - DNA, 15 bp, Homo sapiens
ttatgaaaatacaaa

SEQ ID NO: 79247 - DNA, 15 bp, Homo sapiens
tttatgaaaatacaa

SEQ ID NO: 79248 - DNA, 15 bp, Homo sapiens
ttttatgaaaataca

SEQ ID NO: 79249 - DNA, 15 bp, Homo sapiens
attttatgaaaatac

SEQ ID NO: 79250 - DNA, 15 bp, Homo sapiens
gattttatgaaaata

SEQ ID NO: 79251 - DNA, 15 bp, Homo sapiens
agattttatgaaaat

SEQ ID NO: 79252 - DNA, 15 bp, Homo sapiens
aagattttatgaaaa

SEQ ID NO: 79253 - DNA, 15 bp, Homo sapiens
gaagattttatgaaa

SEQ ID NO: 79254 - DNA, 15 bp, Homo sapiens
tgaagattttatgaa

SEQ ID NO: 79255 - DNA, 15 bp, Homo sapiens
ctgaagattttatga

SEQ ID NO: 79256 - DNA, 15 bp, Homo sapiens
actgaagattttatg

SEQ ID NO: 79257 - DNA, 15 bp, Homo sapiens
tactgaagattttat

SEQ ID NO: 79258 - DNA, 15 bp, Homo sapiens
atactgaagatttta

SEQ ID NO: 79259 - DNA, 15 bp, Homo sapiens
tatactgaagatttt

SEQ ID NO: 79260 - DNA, 15 bp, Homo sapiens
ctatactgaagattt

SEQ ID NO: 79261 - DNA, 15 bp, Homo sapiens
cctatactgaagatt

SEQ ID NO: 79262 - DNA, 15 bp, Homo sapiens
gcctatactgaagat

SEQ ID NO: 79263 - DNA, 15 bp, Homo sapiens
agcctatactgaaga

SEQ ID NO: 79264 - DNA, 15 bp, Homo sapiens
gagcctatactgaag

SEQ ID NO: 79265 - DNA, 15 bp, Homo sapiens
agagcctatactgaa

SEQ ID NO: 79266 - DNA, 15 bp, Homo sapiens
tagagcctatactga

SEQ ID NO: 79267 - DNA, 15 bp, Homo sapiens
ttagagcctatactg

SEQ ID NO: 79268 - DNA, 15 bp, Homo sapiens
tttagagcctatact

SEQ ID NO: 79269 - DNA, 15 bp, Homo sapiens
ttttagagcctatac

SEQ ID NO: 79270 - DNA, 15 bp, Homo sapiens
tttttagagcctata

SEQ ID NO: 79271 - DNA, 15 bp, Homo sapiens
ctttttagagcctat

SEQ ID NO: 79272 - DNA, 15 bp, Homo sapiens
cctttttagagccta

SEQ ID NO: 79273 - DNA, 15 bp, Homo sapiens
tcctttttagagcct

SEQ ID NO: 79274 - DNA, 15 bp, Homo sapiens
ctcctttttagagcc

SEQ ID NO: 79275 - DNA, 15 bp, Homo sapiens
gctcctttttagagc

SEQ ID NO: 79276 - DNA, 15 bp, Homo sapiens
ggctcctttttagag

SEQ ID NO: 79277 - DNA, 15 bp, Homo sapiens
gggctcctttttaga

SEQ ID NO: 79278 - DNA, 15 bp, Homo sapiens
tgggctcctttttag

SEQ ID NO: 79279 - DNA, 15 bp, Homo sapiens
gtgggctccttttta

SEQ ID NO: 79280 - DNA, 15 bp, Homo sapiens
cgtgggctccttttt

SEQ ID NO: 79281 - DNA, 15 bp, Homo sapiens
acgtgggctcctttt

SEQ ID NO: 79282 - DNA, 15 bp, Homo sapiens
cacgtgggctccttt

SEQ ID NO: 79283 - DNA, 15 bp, Homo sapiens
tcacgtgggctcctt

SEQ ID NO: 79284 - DNA, 15 bp, Homo sapiens
ttcacgtgggctcct

SEQ ID NO: 79285 - DNA, 15 bp, Homo sapiens
tttcacgtgggctcc

SEQ ID NO: 79286 - DNA, 15 bp, Homo sapiens
atttcacgtgggctc

SEQ ID NO: 79287 - DNA, 15 bp, Homo sapiens
catttcacgtgggct

SEQ ID NO: 79288 - DNA, 15 bp, Homo sapiens
gcatttcacgtgggc

SEQ ID NO: 79289 - DNA, 15 bp, Homo sapiens
agcatttcacgtggg

SEQ ID NO: 79290 - DNA, 15 bp, Homo sapiens
cagcatttcacgtgg

SEQ ID NO: 79291 - DNA, 15 bp, Homo sapiens
tcagcatttcacgtg

SEQ ID NO: 79292 - DNA, 15 bp, Homo sapiens
ttcagcatttcacgt

SEQ ID NO: 79293 - DNA, 15 bp, Homo sapiens
tttcagcatttcacg

SEQ ID NO: 79294 - DNA, 15 bp, Homo sapiens
ttttcagcatttcac

SEQ ID NO: 79295 - DNA, 15 bp, Homo sapiens
cttttcagcatttca

SEQ ID NO: 79296 - DNA, 15 bp, Homo sapiens
tcttttcagcatttc

SEQ ID NO: 79297 - DNA, 15 bp, Homo sapiens
gtcttttcagcattt

SEQ ID NO: 79298 - DNA, 15 bp, Homo sapiens
cgtcttttcagcatt

SEQ ID NO: 79299 - DNA, 15 bp, Homo sapiens
tcgtcttttcagcat

SEQ ID NO: 79300 - DNA, 15 bp, Homo sapiens
atcgtcttttcagca

SEQ ID NO: 79301 - DNA, 15 bp, Homo sapiens
catcgtcttttcagc

SEQ ID NO: 79302 - DNA, 15 bp, Homo sapiens
acatcgtcttttcag

SEQ ID NO: 79303 - DNA, 15 bp, Homo sapiens
aacatcgtcttttca

SEQ ID NO: 79304 - DNA, 15 bp, Homo sapiens
aaacatcgtcttttc

SEQ ID NO: 79305 - DNA, 15 bp, Homo sapiens
taaacatcgtctttt

SEQ ID NO: 79306 - DNA, 15 bp, Homo sapiens
ttaaacatcgtcttt

SEQ ID NO: 79307 - DNA, 15 bp, Homo sapiens
tttaaacatcgtctt

SEQ ID NO: 79308 - DNA, 15 bp, Homo sapiens
ttttaaacatcgtct

SEQ ID NO: 79309 - DNA, 15 bp, Homo sapiens
tttttaaacatcgtc

SEQ ID NO: 79310 - DNA, 15 bp, Homo sapiens
ctttttaaacatcgt

SEQ ID NO: 79311 - DNA, 15 bp, Homo sapiens
actttttaaacatcg

SEQ ID NO: 79312 - DNA, 15 bp, Homo sapiens
gactttttaaacatc

SEQ ID NO: 79313 - DNA, 15 bp, Homo sapiens
tgactttttaaacat

SEQ ID NO: 79314 - DNA, 15 bp, Homo sapiens
gtgactttttaaaca

SEQ ID NO: 79315 - DNA, 15 bp, Homo sapiens
tgtgactttttaaac

SEQ ID NO: 79316 - DNA, 15 bp, Homo sapiens
ttgtgactttttaaa

SEQ ID NO: 79317 - DNA, 15 bp, Homo sapiens
tttgtgactttttaa

SEQ ID NO: 79318 - DNA, 15 bp, Homo sapiens
ctttgtgacttttta

SEQ ID NO: 79319 - DNA, 15 bp, Homo sapiens
actttgtgacttttt

SEQ ID NO: 79320 - DNA, 15 bp, Homo sapiens
gactttgtgactttt

SEQ ID NO: 79321 - DNA, 15 bp, Homo sapiens
ggactttgtgacttt

SEQ ID NO: 79322 - DNA, 15 bp, Homo sapiens
gggactttgtgactt

SEQ ID NO: 79323 - DNA, 15 bp, Homo sapiens
ggggactttgtgact

SEQ ID NO: 79324 - DNA, 15 bp, Homo sapiens
gggggactttgtgac

SEQ ID NO: 79325 - DNA, 15 bp, Homo sapiens
agggggactttgtga

SEQ ID NO: 79326 - DNA, 15 bp, Homo sapiens
tagggggactttgtg

SEQ ID NO: 79327 - DNA, 15 bp, Homo sapiens
ctagggggactttgt

SEQ ID NO: 79328 - DNA, 15 bp, Homo sapiens
tctagggggactttg

SEQ ID NO: 79329 - DNA, 15 bp, Homo sapiens
ctctagggggacttt

SEQ ID NO: 79330 - DNA, 15 bp, Homo sapiens
actctagggggactt

SEQ ID NO: 79331 - DNA, 15 bp, Homo sapiens
gactctagggggact

SEQ ID NO: 79332 - DNA, 15 bp, Homo sapiens
tgactctagggggac

SEQ ID NO: 79333 - DNA, 15 bp, Homo sapiens
atgactctaggggga

SEQ ID NO: 79334 - DNA, 15 bp, Homo sapiens
tatgactctaggggg

SEQ ID NO: 79335 - DNA, 15 bp, Homo sapiens
ttatgactctagggg

SEQ ID NO: 79336 - DNA, 15 bp, Homo sapiens
tttatgactctaggg

SEQ ID NO: 79337 - DNA, 15 bp, Homo sapiens
ttttatgactctagg

SEQ ID NO: 79338 - DNA, 15 bp, Homo sapiens
gttttatgactctag

SEQ ID NO: 79339 - DNA, 15 bp, Homo sapiens
ggttttatgactcta

SEQ ID NO: 79340 - DNA, 15 bp, Homo sapiens
tggttttatgactct

SEQ ID NO: 79341 - DNA, 15 bp, Homo sapiens
ctggttttatgactc

SEQ ID NO: 79342 - DNA, 15 bp, Homo sapiens
tctggttttatgact

SEQ ID NO: 79343 - DNA, 15 bp, Homo sapiens
ttctggttttatgac

SEQ ID NO: 79344 - DNA, 15 bp, Homo sapiens
tttctggttttatga

SEQ ID NO: 79345 - DNA, 15 bp, Homo sapiens
gtttctggttttatg

SEQ ID NO: 79346 - DNA, 15 bp, Homo sapiens
tgtttctggttttat

SEQ ID NO: 79347 - DNA, 15 bp, Homo sapiens
gtgtttctggtttta

SEQ ID NO: 79348 - DNA, 15 bp, Homo sapiens
agtgtttctggtttt

SEQ ID NO: 79349 - DNA, 15 bp, Homo sapiens
cagtgtttctggttt

SEQ ID NO: 79350 - DNA, 15 bp, Homo sapiens
ccagtgtttctggtt

SEQ ID NO: 79351 - DNA, 15 bp, Homo sapiens
cccagtgtttctggt

SEQ ID NO: 79352 - DNA, 15 bp, Homo sapiens
ccccagtgtttctgg

SEQ ID NO: 79353 - DNA, 15 bp, Homo sapiens
cccccagtgtttctg

SEQ ID NO: 79354 - DNA, 15 bp, Homo sapiens
ccccccagtgtttct

SEQ ID NO: 79355 - DNA, 15 bp, Homo sapiens
accccccagtgtttc

SEQ ID NO: 79356 - DNA, 15 bp, Homo sapiens
caccccccagtgttt

SEQ ID NO: 79357 - DNA, 15 bp, Homo sapiens
ccaccccccagtgtt

SEQ ID NO: 79358 - DNA, 15 bp, Homo sapiens
cccaccccccagtgt

SEQ ID NO: 79359 - DNA, 15 bp, Homo sapiens
ccccaccccccagtg

SEQ ID NO: 79360 - DNA, 15 bp, Homo sapiens
tccccaccccccagt

SEQ ID NO: 79361 - DNA, 15 bp, Homo sapiens
ctccccaccccccag

SEQ ID NO: 79362 - DNA, 15 bp, Homo sapiens
cctccccacccccca

SEQ ID NO: 79363 - DNA, 15 bp, Homo sapiens
gcctccccacccccc

SEQ ID NO: 79364 - DNA, 15 bp, Homo sapiens
ggcctccccaccccc

SEQ ID NO: 79365 - DNA, 15 bp, Homo sapiens
tggcctccccacccc

SEQ ID NO: 79366 - DNA, 15 bp, Homo sapiens
ttggcctccccaccc

SEQ ID NO: 79367 - DNA, 15 bp, Homo sapiens
cttggcctccccacc

SEQ ID NO: 79368 - DNA, 15 bp, Homo sapiens
gcttggcctccccac

SEQ ID NO: 79369 - DNA, 15 bp, Homo sapiens
ggcttggcctcccca

SEQ ID NO: 79370 - DNA, 15 bp, Homo sapiens
cggcttggcctcccc

SEQ ID NO: 79371 - DNA, 15 bp, Homo sapiens
ccggcttggcctccc

SEQ ID NO: 79372 - DNA, 15 bp, Homo sapiens
cccggcttggcctcc

SEQ ID NO: 79373 - DNA, 15 bp, Homo sapiens
gcccggcttggcctc

SEQ ID NO: 79374 - DNA, 15 bp, Homo sapiens
ggcccggcttggcct

SEQ ID NO: 79375 - DNA, 15 bp, Homo sapiens
aggcccggcttggcc

SEQ ID NO: 79376 - DNA, 15 bp, Homo sapiens
aaggcccggcttggc

SEQ ID NO: 79377 - DNA, 15 bp, Homo sapiens
gaaggcccggcttgg

SEQ ID NO: 79378 - DNA, 15 bp, Homo sapiens
cgaaggcccggcttg

SEQ ID NO: 79379 - DNA, 15 bp, Homo sapiens
gcgaaggcccggctt

SEQ ID NO: 79380 - DNA, 15 bp, Homo sapiens
agcgaaggcccggct

SEQ ID NO: 79381 - DNA, 15 bp, Homo sapiens
gagcgaaggcccggc

SEQ ID NO: 79382 - DNA, 15 bp, Homo sapiens
tgagcgaaggcccgg

SEQ ID NO: 79383 - DNA, 15 bp, Homo sapiens
gtgagcgaaggcccg

SEQ ID NO: 79384 - DNA, 15 bp, Homo sapiens
ggtgagcgaaggccc

SEQ ID NO: 79385 - DNA, 15 bp, Homo sapiens
aggtgagcgaaggcc

SEQ ID NO: 79386 - DNA, 15 bp, Homo sapiens
gaggtgagcgaaggc

SEQ ID NO: 79387 - DNA, 15 bp, Homo sapiens
ggaggtgagcgaagg

SEQ ID NO: 79388 - DNA, 15 bp, Homo sapiens
aggaggtgagcgaag

SEQ ID NO: 79389 - DNA, 15 bp, Homo sapiens
aaggaggtgagcgaa

SEQ ID NO: 79390 - DNA, 15 bp, Homo sapiens
caaggaggtgagcga

SEQ ID NO: 79391 - DNA, 15 bp, Homo sapiens
acaaggaggtgagcg

SEQ ID NO: 79392 - DNA, 15 bp, Homo sapiens
cacaaggaggtgagc

SEQ ID NO: 79393 - DNA, 15 bp, Homo sapiens
gcacaaggaggtgag

SEQ ID NO: 79394 - DNA, 15 bp, Homo sapiens
ggcacaaggaggtga

SEQ ID NO: 79395 - DNA, 15 bp, Homo sapiens
aggcacaaggaggtg

SEQ ID NO: 79396 - DNA, 15 bp, Homo sapiens
gaggcacaaggaggt

SEQ ID NO: 79397 - DNA, 15 bp, Homo sapiens
agaggcacaaggagg

SEQ ID NO: 79398 - DNA, 15 bp, Homo sapiens
aagaggcacaaggag

SEQ ID NO: 79399 - DNA, 15 bp, Homo sapiens
taagaggcacaagga

SEQ ID NO: 79400 - DNA, 15 bp, Homo sapiens
ttaagaggcacaagg

SEQ ID NO: 79401 - DNA, 15 bp, Homo sapiens
attaagaggcacaag

SEQ ID NO: 79402 - DNA, 15 bp, Homo sapiens
cattaagaggcacaa

SEQ ID NO: 79403 - DNA, 15 bp, Homo sapiens
gcattaagaggcaca

SEQ ID NO: 79404 - DNA, 15 bp, Homo sapiens
tgcattaagaggcac

SEQ ID NO: 79405 - DNA, 15 bp, Homo sapiens
ctgcattaagaggca

SEQ ID NO: 79406 - DNA, 15 bp, Homo sapiens
gctgcattaagaggc

SEQ ID NO: 79407 - DNA, 15 bp, Homo sapiens
ggctgcattaagagg

SEQ ID NO: 79408 - DNA, 15 bp, Homo sapiens
gggctgcattaagag

SEQ ID NO: 79409 - DNA, 15 bp, Homo sapiens
tgggctgcattaaga

SEQ ID NO: 79410 - DNA, 15 bp, Homo sapiens
ctgggctgcattaag

SEQ ID NO: 79411 - DNA, 15 bp, Homo sapiens
tctgggctgcattaa

SEQ ID NO: 79412 - DNA, 15 bp, Homo sapiens
atctgggctgcatta

SEQ ID NO: 79413 - DNA, 15 bp, Homo sapiens
catctgggctgcatt

SEQ ID NO: 79414 - DNA, 15 bp, Homo sapiens
ccatctgggctgcat

SEQ ID NO: 79415 - DNA, 15 bp, Homo sapiens
tccatctgggctgca

SEQ ID NO: 79416 - DNA, 15 bp, Homo sapiens
ttccatctgggctgc

SEQ ID NO: 79417 - DNA, 15 bp, Homo sapiens
cttccatctgggctg

SEQ ID NO: 79418 - DNA, 15 bp, Homo sapiens
gcttccatctgggct

SEQ ID NO: 79419 - DNA, 15 bp, Homo sapiens
ggcttccatctgggc

SEQ ID NO: 79420 - DNA, 15 bp, Homo sapiens
gggcttccatctggg

SEQ ID NO: 79421 - DNA, 15 bp, Homo sapiens
cgggcttccatctgg

SEQ ID NO: 79422 - DNA, 15 bp, Homo sapiens
acgggcttccatctg

SEQ ID NO: 79423 - DNA, 15 bp, Homo sapiens
gacgggcttccatct

SEQ ID NO: 79424 - DNA, 15 bp, Homo sapiens
ggacgggcttccatc

SEQ ID NO: 79425 - DNA, 15 bp, Homo sapiens
tggacgggcttccat

SEQ ID NO: 79426 - DNA, 15 bp, Homo sapiens
ttggacgggcttcca

SEQ ID NO: 79427 - DNA, 15 bp, Homo sapiens
cttggacgggcttcc

SEQ ID NO: 79428 - DNA, 15 bp, Homo sapiens
tcttggacgggcttc

SEQ ID NO: 79429 - DNA, 15 bp, Homo sapiens
gtcttggacgggctt

SEQ ID NO: 79430 - DNA, 15 bp, Homo sapiens
ggtcttggacgggct

SEQ ID NO: 79431 - DNA, 15 bp, Homo sapiens
cggtcttggacgggc

SEQ ID NO: 79432 - DNA, 15 bp, Homo sapiens
ccggtcttggacggg

SEQ ID NO: 79433 - DNA, 15 bp, Homo sapiens
tccggtcttggacgg

SEQ ID NO: 79434 - DNA, 15 bp, Homo sapiens
atccggtcttggacg

SEQ ID NO: 79435 - DNA, 15 bp, Homo sapiens
aatccggtcttggac

SEQ ID NO: 79436 - DNA, 15 bp, Homo sapiens
caatccggtcttgga

SEQ ID NO: 79437 - DNA, 15 bp, Homo sapiens
gcaatccggtcttgg

SEQ ID NO: 79438 - DNA, 15 bp, Homo sapiens
tgcaatccggtcttg

SEQ ID NO: 79439 - DNA, 15 bp, Homo sapiens
ctgcaatccggtctt

SEQ ID NO: 79440 - DNA, 15 bp, Homo sapiens
cctgcaatccggtct

SEQ ID NO: 79441 - DNA, 15 bp, Homo sapiens
gcctgcaatccggtc

SEQ ID NO: 79442 - DNA, 15 bp, Homo sapiens
tgcctgcaatccggt

SEQ ID NO: 79443 - DNA, 15 bp, Homo sapiens
ttgcctgcaatccgg

SEQ ID NO: 79444 - DNA, 15 bp, Homo sapiens
cttgcctgcaatccg

SEQ ID NO: 79445 - DNA, 15 bp, Homo sapiens
gcttgcctgcaatcc

SEQ ID NO: 79446 - DNA, 15 bp, Homo sapiens
ggcttgcctgcaatc

SEQ ID NO: 79447 - DNA, 15 bp, Homo sapiens
gggcttgcctgcaat

SEQ ID NO: 79448 - DNA, 15 bp, Homo sapiens
tgggcttgcctgcaa

SEQ ID NO: 79449 - DNA, 15 bp, Homo sapiens
ctgggcttgcctgca

SEQ ID NO: 79450 - DNA, 15 bp, Homo sapiens
cctgggcttgcctgc

SEQ ID NO: 79451 - DNA, 15 bp, Homo sapiens
ccctgggcttgcctg

SEQ ID NO: 79452 - DNA, 15 bp, Homo sapiens
gccctgggcttgcct

SEQ ID NO: 79453 - DNA, 15 bp, Homo sapiens
ggccctgggcttgcc

SEQ ID NO: 79454 - DNA, 15 bp, Homo sapiens
gggccctgggcttgc

SEQ ID NO: 79455 - DNA, 15 bp, Homo sapiens
cgggccctgggcttg

SEQ ID NO: 79456 - DNA, 15 bp, Homo sapiens
tcgggccctgggctt

SEQ ID NO: 79457 - DNA, 15 bp, Homo sapiens
atcgggccctgggct

SEQ ID NO: 79458 - DNA, 15 bp, Homo sapiens
gatcgggccctgggc

SEQ ID NO: 79459 - DNA, 15 bp, Homo sapiens
agatcgggccctggg

SEQ ID NO: 79460 - DNA, 15 bp, Homo sapiens
cagatcgggccctgg

SEQ ID NO: 79461 - DNA, 15 bp, Homo sapiens
tcagatcgggccctg

SEQ ID NO: 79462 - DNA, 15 bp, Homo sapiens
atcagatcgggccct

SEQ ID NO: 79463 - DNA, 15 bp, Homo sapiens
tatcagatcgggccc

SEQ ID NO: 79464 - DNA, 15 bp, Homo sapiens
ctatcagatcgggcc

SEQ ID NO: 79465 - DNA, 15 bp, Homo sapiens
gctatcagatcgggc

SEQ ID NO: 79466 - DNA, 15 bp, Homo sapiens
tgctatcagatcggg

SEQ ID NO: 79467 - DNA, 15 bp, Homo sapiens
gtgctatcagatcgg

SEQ ID NO: 79468 - DNA, 15 bp, Homo sapiens
tgtgctatcagatcg

SEQ ID NO: 79469 - DNA, 15 bp, Homo sapiens
ttgtgctatcagatc

SEQ ID NO: 79470 - DNA, 15 bp, Homo sapiens
tttgtgctatcagat

SEQ ID NO: 79471 - DNA, 15 bp, Homo sapiens
ctttgtgctatcaga

SEQ ID NO: 79472 - DNA, 15 bp, Homo sapiens
tctttgtgctatcag

SEQ ID NO: 79473 - DNA, 15 bp, Homo sapiens
gtctttgtgctatca

SEQ ID NO: 79474 - DNA, 15 bp, Homo sapiens
tgtctttgtgctatc

SEQ ID NO: 79475 - DNA, 15 bp, Homo sapiens
gtgtctttgtgctat

SEQ ID NO: 79476 - DNA, 15 bp, Homo sapiens
ggtgtctttgtgcta

SEQ ID NO: 79477 - DNA, 15 bp, Homo sapiens
gggtgtctttgtgct

SEQ ID NO: 79478 - DNA, 15 bp, Homo sapiens
tgggtgtctttgtgc

SEQ ID NO: 79479 - DNA, 15 bp, Homo sapiens
gtgggtgtctttgtg

SEQ ID NO: 79480 - DNA, 15 bp, Homo sapiens
tgtgggtgtctttgt

SEQ ID NO: 79481 - DNA, 15 bp, Homo sapiens
ttgtgggtgtctttg

SEQ ID NO: 79482 - DNA, 15 bp, Homo sapiens
gttgtgggtgtcttt

SEQ ID NO: 79483 - DNA, 15 bp, Homo sapiens
agttgtgggtgtctt

SEQ ID NO: 79484 - DNA, 15 bp, Homo sapiens
gagttgtgggtgtct

SEQ ID NO: 79485 - DNA, 15 bp, Homo sapiens
agagttgtgggtgtc

SEQ ID NO: 79486 - DNA, 15 bp, Homo sapiens
cagagttgtgggtgt

SEQ ID NO: 79487 - DNA, 15 bp, Homo sapiens
tcagagttgtgggtg

SEQ ID NO: 79488 - DNA, 15 bp, Homo sapiens
ttcagagttgtgggt

SEQ ID NO: 79489 - DNA, 15 bp, Homo sapiens
attcagagttgtggg

SEQ ID NO: 79490 - DNA, 15 bp, Homo sapiens
aattcagagttgtgg

SEQ ID NO: 79491 - DNA, 15 bp, Homo sapiens
aaattcagagttgtg

SEQ ID NO: 79492 - DNA, 15 bp, Homo sapiens
gaaattcagagttgt

SEQ ID NO: 79493 - DNA, 15 bp, Homo sapiens
ggaaattcagagttg

SEQ ID NO: 79494 - DNA, 15 bp, Homo sapiens
aggaaattcagagtt

SEQ ID NO: 79495 - DNA, 15 bp, Homo sapiens
caggaaattcagagt

SEQ ID NO: 79496 - DNA, 15 bp, Homo sapiens
gcaggaaattcagag

SEQ ID NO: 79497 - DNA, 15 bp, Homo sapiens
agcaggaaattcaga

SEQ ID NO: 79498 - DNA, 15 bp, Homo sapiens
tagcaggaaattcag

SEQ ID NO: 79499 - DNA, 15 bp, Homo sapiens
gtagcaggaaattca

SEQ ID NO: 79500 - DNA, 15 bp, Homo sapiens
ggtagcaggaaattc

SEQ ID NO: 79501 - DNA, 15 bp, Homo sapiens
tggtagcaggaaatt

SEQ ID NO: 79502 - DNA, 15 bp, Homo sapiens
ctggtagcaggaaat

SEQ ID NO: 79503 - DNA, 15 bp, Homo sapiens
cctggtagcaggaaa

SEQ ID NO: 79504 - DNA, 15 bp, Homo sapiens
tcctggtagcaggaa

SEQ ID NO: 79505 - DNA, 15 bp, Homo sapiens
ctcctggtagcagga

SEQ ID NO: 79506 - DNA, 15 bp, Homo sapiens
cctcctggtagcagg

SEQ ID NO: 79507 - DNA, 15 bp, Homo sapiens
gcctcctggtagcag

SEQ ID NO: 79508 - DNA, 15 bp, Homo sapiens
ggcctcctggtagca

SEQ ID NO: 79509 - DNA, 15 bp, Homo sapiens
aggcctcctggtagc

SEQ ID NO: 79510 - DNA, 15 bp, Homo sapiens
gaggcctcctggtag

SEQ ID NO: 79511 - DNA, 15 bp, Homo sapiens
agaggcctcctggta

SEQ ID NO: 79512 - DNA, 15 bp, Homo sapiens
aagaggcctcctggt

SEQ ID NO: 79513 - DNA, 15 bp, Homo sapiens
aaagaggcctcctgg

SEQ ID NO: 79514 - DNA, 15 bp, Homo sapiens
aaaagaggcctcctg

SEQ ID NO: 79515 - DNA, 15 bp, Homo sapiens
aaaaagaggcctcct

SEQ ID NO: 79516 - DNA, 15 bp, Homo sapiens
caaaaagaggcctcc

SEQ ID NO: 79517 - DNA, 15 bp, Homo sapiens
gcaaaaagaggcctc

SEQ ID NO: 79518 - DNA, 15 bp, Homo sapiens
tgcaaaaagaggcct

SEQ ID NO: 79519 - DNA, 15 bp, Homo sapiens
atgcaaaaagaggcc

SEQ ID NO: 79520 - DNA, 15 bp, Homo sapiens
tatgcaaaaagaggc

SEQ ID NO: 79521 - DNA, 15 bp, Homo sapiens
ctatgcaaaaagagg

SEQ ID NO: 79522 - DNA, 15 bp, Homo sapiens
cctatgcaaaaagag

SEQ ID NO: 79523 - DNA, 15 bp, Homo sapiens
gcctatgcaaaaaga

SEQ ID NO: 79524 - DNA, 15 bp, Homo sapiens
agcctatgcaaaaag

SEQ ID NO: 79525 - DNA, 15 bp, Homo sapiens
cagcctatgcaaaaa

SEQ ID NO: 79526 - DNA, 15 bp, Homo sapiens
acagcctatgcaaaa

SEQ ID NO: 79527 - DNA, 15 bp, Homo sapiens
gacagcctatgcaaa

SEQ ID NO: 79528 - DNA, 15 bp, Homo sapiens
agacagcctatgcaa

SEQ ID NO: 79529 - DNA, 15 bp, Homo sapiens
cagacagcctatgca

SEQ ID NO: 79530 - DNA, 15 bp, Homo sapiens
tcagacagcctatgc

SEQ ID NO: 79531 - DNA, 15 bp, Homo sapiens
atcagacagcctatg

SEQ ID NO: 79532 - DNA, 15 bp, Homo sapiens
aatcagacagcctat

SEQ ID NO: 79533 - DNA, 15 bp, Homo sapiens
aaatcagacagccta

SEQ ID NO: 79534 - DNA, 15 bp, Homo sapiens
taaatcagacagcct

SEQ ID NO: 79535 - DNA, 15 bp, Homo sapiens
gtaaatcagacagcc

SEQ ID NO: 79536 - DNA, 15 bp, Homo sapiens
tgtaaatcagacagc

SEQ ID NO: 79537 - DNA, 15 bp, Homo sapiens
gtgtaaatcagacag

SEQ ID NO: 79538 - DNA, 15 bp, Homo sapiens
tgtgtaaatcagaca

SEQ ID NO: 79539 - DNA, 15 bp, Homo sapiens
atgtgtaaatcagac

SEQ ID NO: 79540 - DNA, 15 bp, Homo sapiens
tatgtgtaaatcaga

SEQ ID NO: 79541 - DNA, 15 bp, Homo sapiens
gtatgtgtaaatcag

SEQ ID NO: 79542 - DNA, 15 bp, Homo sapiens
cgtatgtgtaaatca

SEQ ID NO: 79543 - DNA, 15 bp, Homo sapiens
acgtatgtgtaaatc

SEQ ID NO: 79544 - DNA, 15 bp, Homo sapiens
cacgtatgtgtaaat

SEQ ID NO: 79545 - DNA, 15 bp, Homo sapiens
ccacgtatgtgtaaa

SEQ ID NO: 79546 - DNA, 15 bp, Homo sapiens
tccacgtatgtgtaa

SEQ ID NO: 79547 - DNA, 15 bp, Homo sapiens
ttccacgtatgtgta

SEQ ID NO: 79548 - DNA, 15 bp, Homo sapiens
tttccacgtatgtgt

SEQ ID NO: 79549 - DNA, 15 bp, Homo sapiens
ctttccacgtatgtg

SEQ ID NO: 79550 - DNA, 15 bp, Homo sapiens
gctttccacgtatgt

SEQ ID NO: 79551 - DNA, 15 bp, Homo sapiens
tgctttccacgtatg

SEQ ID NO: 79552 - DNA, 15 bp, Homo sapiens
ctgctttccacgtat

SEQ ID NO: 79553 - DNA, 15 bp, Homo sapiens
gctgctttccacgta

SEQ ID NO: 79554 - DNA, 15 bp, Homo sapiens
ggctgctttccacgt

SEQ ID NO: 79555 - DNA, 15 bp, Homo sapiens
tggctgctttccacg

SEQ ID NO: 79556 - DNA, 15 bp, Homo sapiens
gtggctgctttccac

SEQ ID NO: 79557 - DNA, 15 bp, Homo sapiens
agtggctgctttcca

SEQ ID NO: 79558 - DNA, 15 bp, Homo sapiens
tagtggctgctttcc

SEQ ID NO: 79559 - DNA, 15 bp, Homo sapiens
ttagtggctgctttc

SEQ ID NO: 79560 - DNA, 15 bp, Homo sapiens
attagtggctgcttt

SEQ ID NO: 79561 - DNA, 15 bp, Homo sapiens
tattagtggctgctt

SEQ ID NO: 79562 - DNA, 15 bp, Homo sapiens
ttattagtggctgct

SEQ ID NO: 79563 - DNA, 15 bp, Homo sapiens
attattagtggctgc

SEQ ID NO: 79564 - DNA, 15 bp, Homo sapiens
tattattagtggctg

SEQ ID NO: 79565 - DNA, 15 bp, Homo sapiens
ctattattagtggct

SEQ ID NO: 79566 - DNA, 15 bp, Homo sapiens
tctattattagtggc

SEQ ID NO: 79567 - DNA, 15 bp, Homo sapiens
ttctattattagtgg

SEQ ID NO: 79568 - DNA, 15 bp, Homo sapiens
cttctattattagtg

SEQ ID NO: 79569 - DNA, 15 bp, Homo sapiens
ccttctattattagt

SEQ ID NO: 79570 - DNA, 15 bp, Homo sapiens
cccttctattattag

SEQ ID NO: 79571 - DNA, 15 bp, Homo sapiens
acccttctattatta

SEQ ID NO: 79572 - DNA, 15 bp, Homo sapiens
aacccttctattatt

SEQ ID NO: 79573 - DNA, 15 bp, Homo sapiens
caacccttctattat

SEQ ID NO: 79574 - DNA, 15 bp, Homo sapiens
gcaacccttctatta

SEQ ID NO: 79575 - DNA, 15 bp, Homo sapiens
ggcaacccttctatt

SEQ ID NO: 79576 - DNA, 15 bp, Homo sapiens
aggcaacccttctat

SEQ ID NO: 79577 - DNA, 15 bp, Homo sapiens
gaggcaacccttcta

SEQ ID NO: 79578 - DNA, 15 bp, Homo sapiens
agaggcaacccttct

SEQ ID NO: 79579 - DNA, 15 bp, Homo sapiens
aagaggcaacccttc

SEQ ID NO: 79580 - DNA, 15 bp, Homo sapiens
aaagaggcaaccctt

SEQ ID NO: 79581 - DNA, 15 bp, Homo sapiens
aaaagaggcaaccct

SEQ ID NO: 79582 - DNA, 15 bp, Homo sapiens
gaaaagaggcaaccc

SEQ ID NO: 79583 - DNA, 15 bp, Homo sapiens
agaaaagaggcaacc

SEQ ID NO: 79584 - DNA, 15 bp, Homo sapiens
aagaaaagaggcaac

SEQ ID NO: 79585 - DNA, 15 bp, Homo sapiens
gaagaaaagaggcaa

SEQ ID NO: 79586 - DNA, 15 bp, Homo sapiens
ggaagaaaagaggca

SEQ ID NO: 79587 - DNA, 15 bp, Homo sapiens
cggaagaaaagaggc

SEQ ID NO: 79588 - DNA, 15 bp, Homo sapiens
acggaagaaaagagg

SEQ ID NO: 79589 - DNA, 15 bp, Homo sapiens
aacggaagaaaagag

SEQ ID NO: 79590 - DNA, 15 bp, Homo sapiens
caacggaagaaaaga

SEQ ID NO: 79591 - DNA, 15 bp, Homo sapiens
acaacggaagaaaag

SEQ ID NO: 79592 - DNA, 15 bp, Homo sapiens
gacaacggaagaaaa

SEQ ID NO: 79593 - DNA, 15 bp, Homo sapiens
tgacaacggaagaaa

SEQ ID NO: 79594 - DNA, 15 bp, Homo sapiens
ctgacaacggaagaa

SEQ ID NO: 79595 - DNA, 15 bp, Homo sapiens
tctgacaacggaaga

SEQ ID NO: 79596 - DNA, 15 bp, Homo sapiens
gtctgacaacggaag

SEQ ID NO: 79597 - DNA, 15 bp, Homo sapiens
agtctgacaacggaa

SEQ ID NO: 79598 - DNA, 15 bp, Homo sapiens
gagtctgacaacgga

SEQ ID NO: 79599 - DNA, 15 bp, Homo sapiens
ggagtctgacaacgg

SEQ ID NO: 79600 - DNA, 15 bp, Homo sapiens
cggagtctgacaacg

SEQ ID NO: 79601 - DNA, 15 bp, Homo sapiens
gcggagtctgacaac

SEQ ID NO: 79602 - DNA, 15 bp, Homo sapiens
cgcggagtctgacaa

SEQ ID NO: 79603 - DNA, 15 bp, Homo sapiens
ccgcggagtctgaca

SEQ ID NO: 79604 - DNA, 15 bp, Homo sapiens
cccgcggagtctgac

SEQ ID NO: 79605 - DNA, 15 bp, Homo sapiens
gcccgcggagtctga

SEQ ID NO: 79606 - DNA, 15 bp, Homo sapiens
ggcccgcggagtctg

SEQ ID NO: 79607 - DNA, 15 bp, Homo sapiens
gggcccgcggagtct

SEQ ID NO: 79608 - DNA, 15 bp, Homo sapiens
agggcccgcggagtc

SEQ ID NO: 79609 - DNA, 15 bp, Homo sapiens
cagggcccgcggagt

SEQ ID NO: 79610 - DNA, 15 bp, Homo sapiens
gcagggcccgcggag

SEQ ID NO: 79611 - DNA, 15 bp, Homo sapiens
agcagggcccgcgga

SEQ ID NO: 79612 - DNA, 15 bp, Homo sapiens
gagcagggcccgcgg

SEQ ID NO: 79613 - DNA, 15 bp, Homo sapiens
tgagcagggcccgcg

SEQ ID NO: 79614 - DNA, 15 bp, Homo sapiens
ctgagcagggcccgc

SEQ ID NO: 79615 - DNA, 15 bp, Homo sapiens
actgagcagggcccg

SEQ ID NO: 79616 - DNA, 15 bp, Homo sapiens
cactgagcagggccc

SEQ ID NO: 79617 - DNA, 15 bp, Homo sapiens
tcactgagcagggcc

SEQ ID NO: 79618 - DNA, 15 bp, Homo sapiens
gtcactgagcagggc

SEQ ID NO: 79619 - DNA, 15 bp, Homo sapiens
agtcactgagcaggg

SEQ ID NO: 79620 - DNA, 15 bp, Homo sapiens
gagtcactgagcagg

SEQ ID NO: 79621 - DNA, 15 bp, Homo sapiens
ggagtcactgagcag

SEQ ID NO: 79622 - DNA, 15 bp, Homo sapiens
gggagtcactgagca

SEQ ID NO: 79623 - DNA, 15 bp, Homo sapiens
cgggagtcactgagc

SEQ ID NO: 79624 - DNA, 15 bp, Homo sapiens
gcgggagtcactgag

SEQ ID NO: 79625 - DNA, 15 bp, Homo sapiens
cgcgggagtcactga

SEQ ID NO: 79626 - DNA, 15 bp, Homo sapiens
acgcgggagtcactg

SEQ ID NO: 79627 - DNA, 15 bp, Homo sapiens
gacgcgggagtcact

SEQ ID NO: 79628 - DNA, 15 bp, Homo sapiens
agacgcgggagtcac

SEQ ID NO: 79629 - DNA, 15 bp, Homo sapiens
gagacgcgggagtca

SEQ ID NO: 79630 - DNA, 15 bp, Homo sapiens
ggagacgcgggagtc

SEQ ID NO: 79631 - DNA, 15 bp, Homo sapiens
tggagacgcgggagt

SEQ ID NO: 79632 - DNA, 15 bp, Homo sapiens
ttggagacgcgggag

SEQ ID NO: 79633 - DNA, 15 bp, Homo sapiens
cttggagacgcggga

SEQ ID NO: 79634 - DNA, 15 bp, Homo sapiens
gcttggagacgcggg

SEQ ID NO: 79635 - DNA, 15 bp, Homo sapiens
tgcttggagacgcgg

SEQ ID NO: 79636 - DNA, 15 bp, Homo sapiens
ctgcttggagacgcg

SEQ ID NO: 79637 - DNA, 15 bp, Homo sapiens
gctgcttggagacgc

SEQ ID NO: 79638 - DNA, 15 bp, Homo sapiens
agctgcttggagacg

SEQ ID NO: 79639 - DNA, 15 bp, Homo sapiens
cagctgcttggagac

SEQ ID NO: 79640 - DNA, 15 bp, Homo sapiens
gcagctgcttggaga

SEQ ID NO: 79641 - DNA, 15 bp, Homo sapiens
ggcagctgcttggag

SEQ ID NO: 79642 - DNA, 15 bp, Homo sapiens
aggcagctgcttgga

SEQ ID NO: 79643 - DNA, 15 bp, Homo sapiens
caggcagctgcttgg

SEQ ID NO: 79644 - DNA, 15 bp, Homo sapiens
gcaggcagctgcttg

SEQ ID NO: 79645 - DNA, 15 bp, Homo sapiens
ggcaggcagctgctt

SEQ ID NO: 79646 - DNA, 15 bp, Homo sapiens
aggcaggcagctgct

SEQ ID NO: 79647 - DNA, 15 bp, Homo sapiens
gaggcaggcagctgc

SEQ ID NO: 79648 - DNA, 15 bp, Homo sapiens
agaggcaggcagctg

SEQ ID NO: 79649 - DNA, 15 bp, Homo sapiens
gagaggcaggcagct

SEQ ID NO: 79650 - DNA, 15 bp, Homo sapiens
agagaggcaggcagc

SEQ ID NO: 79651 - DNA, 15 bp, Homo sapiens
aagagaggcaggcag

SEQ ID NO: 79652 - DNA, 15 bp, Homo sapiens
aaagagaggcaggca

SEQ ID NO: 79653 - DNA, 15 bp, Homo sapiens
gaaagagaggcaggc

SEQ ID NO: 79654 - DNA, 15 bp, Homo sapiens
agaaagagaggcagg

SEQ ID NO: 79655 - DNA, 15 bp, Homo sapiens
cagaaagagaggcag

SEQ ID NO: 79656 - DNA, 15 bp, Homo sapiens
gcagaaagagaggca

SEQ ID NO: 79657 - DNA, 15 bp, Homo sapiens
ggcagaaagagaggc

SEQ ID NO: 79658 - DNA, 15 bp, Homo sapiens
gggcagaaagagagg

SEQ ID NO: 79659 - DNA, 15 bp, Homo sapiens
ggggcagaaagagag

SEQ ID NO: 79660 - DNA, 15 bp, Homo sapiens
aggggcagaaagaga

SEQ ID NO: 79661 - DNA, 15 bp, Homo sapiens
gaggggcagaaagag

SEQ ID NO: 79662 - DNA, 15 bp, Homo sapiens
tgaggggcagaaaga

SEQ ID NO: 79663 - DNA, 15 bp, Homo sapiens
gtgaggggcagaaag

SEQ ID NO: 79664 - DNA, 15 bp, Homo sapiens
tgtgaggggcagaaa

SEQ ID NO: 79665 - DNA, 15 bp, Homo sapiens
ctgtgaggggcagaa

SEQ ID NO: 79666 - DNA, 15 bp, Homo sapiens
gctgtgaggggcaga

SEQ ID NO: 79667 - DNA, 15 bp, Homo sapiens
tgctgtgaggggcag

SEQ ID NO: 79668 - DNA, 15 bp, Homo sapiens
ttgctgtgaggggca

SEQ ID NO: 79669 - DNA, 15 bp, Homo sapiens
gttgctgtgaggggc

SEQ ID NO: 79670 - DNA, 15 bp, Homo sapiens
tgttgctgtgagggg

SEQ ID NO: 79671 - DNA, 15 bp, Homo sapiens
ctgttgctgtgaggg

SEQ ID NO: 79672 - DNA, 15 bp, Homo sapiens
cctgttgctgtgagg

SEQ ID NO: 79673 - DNA, 15 bp, Homo sapiens
ccctgttgctgtgag

SEQ ID NO: 79674 - DNA, 15 bp, Homo sapiens
accctgttgctgtga

SEQ ID NO: 79675 - DNA, 15 bp, Homo sapiens
gaccctgttgctgtg

SEQ ID NO: 79676 - DNA, 15 bp, Homo sapiens
tgaccctgttgctgt

SEQ ID NO: 79677 - DNA, 15 bp, Homo sapiens
ctgaccctgttgctg

SEQ ID NO: 79678 - DNA, 15 bp, Homo sapiens
gctgaccctgttgct

SEQ ID NO: 79679 - DNA, 15 bp, Homo sapiens
ggctgaccctgttgc

SEQ ID NO: 79680 - DNA, 15 bp, Homo sapiens
cggctgaccctgttg

SEQ ID NO: 79681 - DNA, 15 bp, Homo sapiens
ccggctgaccctgtt

SEQ ID NO: 79682 - DNA, 15 bp, Homo sapiens
cccggctgaccctgt

SEQ ID NO: 79683 - DNA, 15 bp, Homo sapiens
gcccggctgaccctg

SEQ ID NO: 79684 - DNA, 15 bp, Homo sapiens
agcccggctgaccct

SEQ ID NO: 79685 - DNA, 15 bp, Homo sapiens
gagcccggctgaccc

SEQ ID NO: 79686 - DNA, 15 bp, Homo sapiens
ggagcccggctgacc

SEQ ID NO: 79687 - DNA, 15 bp, Homo sapiens
aggagcccggctgac

SEQ ID NO: 79688 - DNA, 15 bp, Homo sapiens
aaggagcccggctga

SEQ ID NO: 79689 - DNA, 15 bp, Homo sapiens
caaggagcccggctg

SEQ ID NO: 79690 - DNA, 15 bp, Homo sapiens
acaaggagcccggct

SEQ ID NO: 79691 - DNA, 15 bp, Homo sapiens
tacaaggagcccggc

SEQ ID NO: 79692 - DNA, 15 bp, Homo sapiens
ttacaaggagcccgg

SEQ ID NO: 79693 - DNA, 15 bp, Homo sapiens
cttacaaggagcccg

SEQ ID NO: 79694 - DNA, 15 bp, Homo sapiens
tcttacaaggagccc

SEQ ID NO: 79695 - DNA, 15 bp, Homo sapiens
ttcttacaaggagcc

SEQ ID NO: 79696 - DNA, 15 bp, Homo sapiens
tttcttacaaggagc

SEQ ID NO: 79697 - DNA, 15 bp, Homo sapiens
ctttcttacaaggag

SEQ ID NO: 79698 - DNA, 15 bp, Homo sapiens
tctttcttacaagga

SEQ ID NO: 79699 - DNA, 15 bp, Homo sapiens
ctctttcttacaagg

SEQ ID NO: 79700 - DNA, 15 bp, Homo sapiens
cctctttcttacaag

SEQ ID NO: 79701 - DNA, 15 bp, Homo sapiens
gcctctttcttacaa

SEQ ID NO: 79702 - DNA, 15 bp, Homo sapiens
ggcctctttcttaca

SEQ ID NO: 79703 - DNA, 15 bp, Homo sapiens
tggcctctttcttac

SEQ ID NO: 79704 - DNA, 15 bp, Homo sapiens
ctggcctctttctta

SEQ ID NO: 79705 - DNA, 15 bp, Homo sapiens
cctggcctctttctt

SEQ ID NO: 79706 - DNA, 15 bp, Homo sapiens
gcctggcctctttct

SEQ ID NO: 79707 - DNA, 15 bp, Homo sapiens
ggcctggcctctttc

SEQ ID NO: 79708 - DNA, 15 bp, Homo sapiens
gggcctggcctcttt

SEQ ID NO: 79709 - DNA, 15 bp, Homo sapiens
agggcctggcctctt

SEQ ID NO: 79710 - DNA, 15 bp, Homo sapiens
gagggcctggcctct

SEQ ID NO: 79711 - DNA, 15 bp, Homo sapiens
agagggcctggcctc

SEQ ID NO: 79712 - DNA, 15 bp, Homo sapiens
cagagggcctggcct

SEQ ID NO: 79713 - DNA, 15 bp, Homo sapiens
gcagagggcctggcc

SEQ ID NO: 79714 - DNA, 15 bp, Homo sapiens
cgcagagggcctggc

SEQ ID NO: 79715 - DNA, 15 bp, Homo sapiens
gcgcagagggcctgg

SEQ ID NO: 79716 - DNA, 15 bp, Homo sapiens
ggcgcagagggcctg

SEQ ID NO: 79717 - DNA, 15 bp, Homo sapiens
aggcgcagagggcct

SEQ ID NO: 79718 - DNA, 15 bp, Homo sapiens
aaggcgcagagggcc

SEQ ID NO: 79719 - DNA, 15 bp, Homo sapiens
gaaggcgcagagggc

SEQ ID NO: 79720 - DNA, 15 bp, Homo sapiens
agaaggcgcagaggg

SEQ ID NO: 79721 - DNA, 15 bp, Homo sapiens
gagaaggcgcagagg

SEQ ID NO: 79722 - DNA, 15 bp, Homo sapiens
agagaaggcgcagag

SEQ ID NO: 79723 - DNA, 15 bp, Homo sapiens
cagagaaggcgcaga

SEQ ID NO: 79724 - DNA, 15 bp, Homo sapiens
acagagaaggcgcag

SEQ ID NO: 79725 - DNA, 15 bp, Homo sapiens
cacagagaaggcgca

SEQ ID NO: 79726 - DNA, 15 bp, Homo sapiens
acacagagaaggcgc

SEQ ID NO: 79727 - DNA, 15 bp, Homo sapiens
cacacagagaaggcg

SEQ ID NO: 79728 - DNA, 15 bp, Homo sapiens
acacacagagaaggc

SEQ ID NO: 79729 - DNA, 15 bp, Homo sapiens
cacacacagagaagg

SEQ ID NO: 79730 - DNA, 15 bp, Homo sapiens
ccacacacagagaag

SEQ ID NO: 79731 - DNA, 15 bp, Homo sapiens
gccacacacagagaa

SEQ ID NO: 79732 - DNA, 15 bp, Homo sapiens
cgccacacacagaga

SEQ ID NO: 79733 - DNA, 15 bp, Homo sapiens
ccgccacacacagag

SEQ ID NO: 79734 - DNA, 15 bp, Homo sapiens
tccgccacacacaga

SEQ ID NO: 79735 - DNA, 15 bp, Homo sapiens
ctccgccacacacag

SEQ ID NO: 79736 - DNA, 15 bp, Homo sapiens
cctccgccacacaca

SEQ ID NO: 79737 - DNA, 15 bp, Homo sapiens
acctccgccacacac

SEQ ID NO: 79738 - DNA, 15 bp, Homo sapiens
cacctccgccacaca

SEQ ID NO: 79739 - DNA, 15 bp, Homo sapiens
ccacctccgccacac

SEQ ID NO: 79740 - DNA, 15 bp, Homo sapiens
cccacctccgccaca

SEQ ID NO: 79741 - DNA, 15 bp, Homo sapiens
ccccacctccgccac

SEQ ID NO: 79742 - DNA, 15 bp, Homo sapiens
tccccacctccgcca

SEQ ID NO: 79743 - DNA, 15 bp, Homo sapiens
ttccccacctccgcc

SEQ ID NO: 79744 - DNA, 15 bp, Homo sapiens
cttccccacctccgc

SEQ ID NO: 79745 - DNA, 15 bp, Homo sapiens
ccttccccacctccg

SEQ ID NO: 79746 - DNA, 15 bp, Homo sapiens
accttccccacctcc

SEQ ID NO: 79747 - DNA, 15 bp, Homo sapiens
caccttccccacctc

SEQ ID NO: 79748 - DNA, 15 bp, Homo sapiens
gcaccttccccacct

SEQ ID NO: 79749 - DNA, 15 bp, Homo sapiens
agcaccttccccacc

SEQ ID NO: 79750 - DNA, 15 bp, Homo sapiens
aagcaccttccccac

SEQ ID NO: 79751 - DNA, 15 bp, Homo sapiens
aaagcaccttcccca

SEQ ID NO: 79752 - DNA, 15 bp, Homo sapiens
gaaagcaccttcccc

SEQ ID NO: 79753 - DNA, 15 bp, Homo sapiens
agaaagcaccttccc

SEQ ID NO: 79754 - DNA, 15 bp, Homo sapiens
cagaaagcaccttcc

SEQ ID NO: 79755 - DNA, 15 bp, Homo sapiens
tcagaaagcaccttc

SEQ ID NO: 79756 - DNA, 15 bp, Homo sapiens
ctcagaaagcacctt

SEQ ID NO: 79757 - DNA, 15 bp, Homo sapiens
cctcagaaagcacct

SEQ ID NO: 79758 - DNA, 15 bp, Homo sapiens
ccctcagaaagcacc

SEQ ID NO: 79759 - DNA, 15 bp, Homo sapiens
gccctcagaaagcac

SEQ ID NO: 79760 - DNA, 15 bp, Homo sapiens
agccctcagaaagca

SEQ ID NO: 79761 - DNA, 15 bp, Homo sapiens
gagccctcagaaagc

SEQ ID NO: 79762 - DNA, 15 bp, Homo sapiens
agagccctcagaaag

SEQ ID NO: 79763 - DNA, 15 bp, Homo sapiens
aagagccctcagaaa

SEQ ID NO: 79764 - DNA, 15 bp, Homo sapiens
aaagagccctcagaa

SEQ ID NO: 79765 - DNA, 15 bp, Homo sapiens
caaagagccctcaga

SEQ ID NO: 79766 - DNA, 15 bp, Homo sapiens
acaaagagccctcag

SEQ ID NO: 79767 - DNA, 15 bp, Homo sapiens
gacaaagagccctca

SEQ ID NO: 79768 - DNA, 15 bp, Homo sapiens
agacaaagagccctc

SEQ ID NO: 79769 - DNA, 15 bp, Homo sapiens
cagacaaagagccct

SEQ ID NO: 79770 - DNA, 15 bp, Homo sapiens
ccagacaaagagccc

SEQ ID NO: 79771 - DNA, 15 bp, Homo sapiens
gccagacaaagagcc

SEQ ID NO: 79772 - DNA, 15 bp, Homo sapiens
cgccagacaaagagc

SEQ ID NO: 79773 - DNA, 15 bp, Homo sapiens
tcgccagacaaagag

SEQ ID NO: 79774 - DNA, 15 bp, Homo sapiens
ctcgccagacaaaga

SEQ ID NO: 79775 - DNA, 15 bp, Homo sapiens
gctcgccagacaaag

SEQ ID NO: 79776 - DNA, 15 bp, Homo sapiens
tgctcgccagacaaa

SEQ ID NO: 79777 - DNA, 15 bp, Homo sapiens
ttgctcgccagacaa

SEQ ID NO: 79778 - DNA, 15 bp, Homo sapiens
cttgctcgccagaca

SEQ ID NO: 79779 - DNA, 15 bp, Homo sapiens
gcttgctcgccagac

SEQ ID NO: 79780 - DNA, 15 bp, Homo sapiens
ggcttgctcgccaga

SEQ ID NO: 79781 - DNA, 15 bp, Homo sapiens
cggcttgctcgccag

SEQ ID NO: 79782 - DNA, 15 bp, Homo sapiens
ccggcttgctcgcca

SEQ ID NO: 79783 - DNA, 15 bp, Homo sapiens
tccggcttgctcgcc

SEQ ID NO: 79784 - DNA, 15 bp, Homo sapiens
gtccggcttgctcgc

SEQ ID NO: 79785 - DNA, 15 bp, Homo sapiens
ggtccggcttgctcg

SEQ ID NO: 79786 - DNA, 15 bp, Homo sapiens
aggtccggcttgctc

SEQ ID NO: 79787 - DNA, 15 bp, Homo sapiens
gaggtccggcttgct

SEQ ID NO: 79788 - DNA, 15 bp, Homo sapiens
agaggtccggcttgc

SEQ ID NO: 79789 - DNA, 15 bp, Homo sapiens
cagaggtccggcttg

SEQ ID NO: 79790 - DNA, 15 bp, Homo sapiens
acagaggtccggctt

SEQ ID NO: 79791 - DNA, 15 bp, Homo sapiens
cacagaggtccggct

SEQ ID NO: 79792 - DNA, 15 bp, Homo sapiens
gcacagaggtccggc

SEQ ID NO: 79793 - DNA, 15 bp, Homo sapiens
tgcacagaggtccgg

SEQ ID NO: 79794 - DNA, 15 bp, Homo sapiens
ttgcacagaggtccg

SEQ ID NO: 79795 - DNA, 15 bp, Homo sapiens
gttgcacagaggtcc

SEQ ID NO: 79796 - DNA, 15 bp, Homo sapiens
tgttgcacagaggtc

SEQ ID NO: 79797 - DNA, 15 bp, Homo sapiens
ctgttgcacagaggt

SEQ ID NO: 79798 - DNA, 15 bp, Homo sapiens
tctgttgcacagagg

SEQ ID NO: 79799 - DNA, 15 bp, Homo sapiens
ttctgttgcacagag

SEQ ID NO: 79800 - DNA, 15 bp, Homo sapiens
cttctgttgcacaga

SEQ ID NO: 79801 - DNA, 15 bp, Homo sapiens
gcttctgttgcacag

SEQ ID NO: 79802 - DNA, 15 bp, Homo sapiens
ggcttctgttgcaca

SEQ ID NO: 79803 - DNA, 15 bp, Homo sapiens
cggcttctgttgcac

SEQ ID NO: 79804 - DNA, 15 bp, Homo sapiens
gcggcttctgttgca

SEQ ID NO: 79805 - DNA, 15 bp, Homo sapiens
ggcggcttctgttgc

SEQ ID NO: 79806 - DNA, 15 bp, Homo sapiens
aggcggcttctgttg

SEQ ID NO: 79807 - DNA, 15 bp, Homo sapiens
gaggcggcttctgtt

SEQ ID NO: 79808 - DNA, 15 bp, Homo sapiens
agaggcggcttctgt

SEQ ID NO: 79809 - DNA, 15 bp, Homo sapiens
cagaggcggcttctg

SEQ ID NO: 79810 - DNA, 15 bp, Homo sapiens
ccagaggcggcttct

SEQ ID NO: 79811 - DNA, 15 bp, Homo sapiens
gccagaggcggcttc

SEQ ID NO: 79812 - DNA, 15 bp, Homo sapiens
ggccagaggcggctt

SEQ ID NO: 79813 - DNA, 15 bp, Homo sapiens
tggccagaggcggct

SEQ ID NO: 79814 - DNA, 15 bp, Homo sapiens
gtggccagaggcggc

SEQ ID NO: 79815 - DNA, 15 bp, Homo sapiens
ggtggccagaggcgg

SEQ ID NO: 79816 - DNA, 15 bp, Homo sapiens
gggtggccagaggcg

SEQ ID NO: 79817 - DNA, 15 bp, Homo sapiens
ggggtggccagaggc

SEQ ID NO: 79818 - DNA, 15 bp, Homo sapiens
gggggtggccagagg

SEQ ID NO: 79819 - DNA, 15 bp, Homo sapiens
cgggggtggccagag

SEQ ID NO: 79820 - DNA, 15 bp, Homo sapiens
ccgggggtggccaga

SEQ ID NO: 79821 - DNA, 15 bp, Homo sapiens
gccgggggtggccag

SEQ ID NO: 79822 - DNA, 15 bp, Homo sapiens
ggccgggggtggcca

SEQ ID NO: 79823 - DNA, 15 bp, Homo sapiens
gggccgggggtggcc

SEQ ID NO: 79824 - DNA, 15 bp, Homo sapiens
agggccgggggtggc

SEQ ID NO: 79825 - DNA, 15 bp, Homo sapiens
aagggccgggggtgg

SEQ ID NO: 79826 - DNA, 15 bp, Homo sapiens
gaagggccgggggtg

SEQ ID NO: 79827 - DNA, 15 bp, Homo sapiens
ggaagggccgggggt

SEQ ID NO: 79828 - DNA, 15 bp, Homo sapiens
gggaagggccggggg

SEQ ID NO: 79829 - DNA, 15 bp, Homo sapiens
ggggaagggccgggg

SEQ ID NO: 79830 - DNA, 15 bp, Homo sapiens
gggggaagggccggg

SEQ ID NO: 79831 - DNA, 15 bp, Homo sapiens
agggggaagggccgg

SEQ ID NO: 79832 - DNA, 15 bp, Homo sapiens
gagggggaagggccg

SEQ ID NO: 79833 - DNA, 15 bp, Homo sapiens
ggagggggaagggcc

SEQ ID NO: 79834 - DNA, 15 bp, Homo sapiens
tggagggggaagggc

SEQ ID NO: 79835 - DNA, 15 bp, Homo sapiens
gtggagggggaaggg

SEQ ID NO: 79836 - DNA, 15 bp, Homo sapiens
ggtggagggggaagg

SEQ ID NO: 79837 - DNA, 15 bp, Homo sapiens
gggtggagggggaag

SEQ ID NO: 79838 - DNA, 15 bp, Homo sapiens
tgggtggagggggaa

SEQ ID NO: 79839 - DNA, 15 bp, Homo sapiens
ctgggtggaggggga

SEQ ID NO: 79840 - DNA, 15 bp, Homo sapiens
actgggtggaggggg

SEQ ID NO: 79841 - DNA, 15 bp, Homo sapiens
gactgggtggagggg

SEQ ID NO: 79842 - DNA, 15 bp, Homo sapiens
tgactgggtggaggg

SEQ ID NO: 79843 - DNA, 15 bp, Homo sapiens
ttgactgggtggagg

SEQ ID NO: 79844 - DNA, 15 bp, Homo sapiens
cttgactgggtggag

SEQ ID NO: 79845 - DNA, 15 bp, Homo sapiens
acttgactgggtgga

SEQ ID NO: 79846 - DNA, 15 bp, Homo sapiens
aacttgactgggtgg

SEQ ID NO: 79847 - DNA, 15 bp, Homo sapiens
gaacttgactgggtg

SEQ ID NO: 79848 - DNA, 15 bp, Homo sapiens
agaacttgactgggt

SEQ ID NO: 79849 - DNA, 15 bp, Homo sapiens
cagaacttgactggg

SEQ ID NO: 79850 - DNA, 15 bp, Homo sapiens
gcagaacttgactgg

SEQ ID NO: 79851 - DNA, 15 bp, Homo sapiens
tgcagaacttgactg

SEQ ID NO: 79852 - DNA, 15 bp, Homo sapiens
gtgcagaacttgact

SEQ ID NO: 79853 - DNA, 15 bp, Homo sapiens
tgtgcagaacttgac

SEQ ID NO: 79854 - DNA, 15 bp, Homo sapiens
ctgtgcagaacttga

SEQ ID NO: 79855 - DNA, 15 bp, Homo sapiens
gctgtgcagaacttg

SEQ ID NO: 79856 - DNA, 15 bp, Homo sapiens
ggctgtgcagaactt

SEQ ID NO: 79857 - DNA, 15 bp, Homo sapiens
tggctgtgcagaact

SEQ ID NO: 79858 - DNA, 15 bp, Homo sapiens
ctggctgtgcagaac

SEQ ID NO: 79859 - DNA, 15 bp, Homo sapiens
actggctgtgcagaa

SEQ ID NO: 79860 - DNA, 15 bp, Homo sapiens
cactggctgtgcaga

SEQ ID NO: 79861 - DNA, 15 bp, Homo sapiens
acactggctgtgcag

SEQ ID NO: 79862 - DNA, 15 bp, Homo sapiens
aacactggctgtgca

SEQ ID NO: 79863 - DNA, 15 bp, Homo sapiens
aaacactggctgtgc

SEQ ID NO: 79864 - DNA, 15 bp, Homo sapiens
aaaacactggctgtg

SEQ ID NO: 79865 - DNA, 15 bp, Homo sapiens
gaaaacactggctgt

SEQ ID NO: 79866 - DNA, 15 bp, Homo sapiens
agaaaacactggctg

SEQ ID NO: 79867 - DNA, 15 bp, Homo sapiens
gagaaaacactggct

SEQ ID NO: 79868 - DNA, 15 bp, Homo sapiens
ggagaaaacactggc

SEQ ID NO: 79869 - DNA, 15 bp, Homo sapiens
aggagaaaacactgg

SEQ ID NO: 79870 - DNA, 15 bp, Homo sapiens
gaggagaaaacactg

SEQ ID NO: 79871 - DNA, 15 bp, Homo sapiens
ggaggagaaaacact

SEQ ID NO: 79872 - DNA, 15 bp, Homo sapiens
tggaggagaaaacac

SEQ ID NO: 79873 - DNA, 15 bp, Homo sapiens
ctggaggagaaaaca

SEQ ID NO: 79874 - DNA, 15 bp, Homo sapiens
gctggaggagaaaac

SEQ ID NO: 79875 - DNA, 15 bp, Homo sapiens
ggctggaggagaaaa

SEQ ID NO: 79876 - DNA, 15 bp, Homo sapiens
gggctggaggagaaa

SEQ ID NO: 79877 - DNA, 15 bp, Homo sapiens
ggggctggaggagaa

SEQ ID NO: 79878 - DNA, 15 bp, Homo sapiens
tggggctggaggaga

SEQ ID NO: 79879 - DNA, 15 bp, Homo sapiens
ctggggctggaggag

SEQ ID NO: 79880 - DNA, 15 bp, Homo sapiens
gctggggctggagga

SEQ ID NO: 79881 - DNA, 15 bp, Homo sapiens
agctggggctggagg

SEQ ID NO: 79882 - DNA, 15 bp, Homo sapiens
tagctggggctggag

SEQ ID NO: 79883 - DNA, 15 bp, Homo sapiens
ttagctggggctgga

SEQ ID NO: 79884 - DNA, 15 bp, Homo sapiens
gttagctggggctgg

SEQ ID NO: 79885 - DNA, 15 bp, Homo sapiens
ggttagctggggctg

SEQ ID NO: 79886 - DNA, 15 bp, Homo sapiens
aggttagctggggct

SEQ ID NO: 79887 - DNA, 15 bp, Homo sapiens
caggttagctggggc

SEQ ID NO: 79888 - DNA, 15 bp, Homo sapiens
tcaggttagctgggg

SEQ ID NO: 79889 - DNA, 15 bp, Homo sapiens
ctcaggttagctggg

SEQ ID NO: 79890 - DNA, 15 bp, Homo sapiens
gctcaggttagctgg

SEQ ID NO: 79891 - DNA, 15 bp, Homo sapiens
agctcaggttagctg

SEQ ID NO: 79892 - DNA, 15 bp, Homo sapiens
gagctcaggttagct

SEQ ID NO: 79893 - DNA, 15 bp, Homo sapiens
agagctcaggttagc

SEQ ID NO: 79894 - DNA, 15 bp, Homo sapiens
gagagctcaggttag

SEQ ID NO: 79895 - DNA, 15 bp, Homo sapiens
agagagctcaggtta

SEQ ID NO: 79896 - DNA, 15 bp, Homo sapiens
gagagagctcaggtt

SEQ ID NO: 79897 - DNA, 15 bp, Homo sapiens
tgagagagctcaggt

SEQ ID NO: 79898 - DNA, 15 bp, Homo sapiens
ttgagagagctcagg

SEQ ID NO: 79899 - DNA, 15 bp, Homo sapiens
gttgagagagctcag

SEQ ID NO: 79900 - DNA, 15 bp, Homo sapiens
agttgagagagctca

SEQ ID NO: 79901 - DNA, 15 bp, Homo sapiens
tagttgagagagctc

SEQ ID NO: 79902 - DNA, 15 bp, Homo sapiens
ttagttgagagagct

SEQ ID NO: 79903 - DNA, 15 bp, Homo sapiens
attagttgagagagc

SEQ ID NO: 79904 - DNA, 15 bp, Homo sapiens
gattagttgagagag

SEQ ID NO: 79905 - DNA, 15 bp, Homo sapiens
ggattagttgagaga

SEQ ID NO: 79906 - DNA, 15 bp, Homo sapiens
tggattagttgagag

SEQ ID NO: 79907 - DNA, 15 bp, Homo sapiens
ctggattagttgaga

SEQ ID NO: 79908 - DNA, 15 bp, Homo sapiens
tctggattagttgag

SEQ ID NO: 79909 - DNA, 15 bp, Homo sapiens
ctctggattagttga

SEQ ID NO: 79910 - DNA, 15 bp, Homo sapiens
tctctggattagttg

SEQ ID NO: 79911 - DNA, 15 bp, Homo sapiens
ttctctggattagtt

SEQ ID NO: 79912 - DNA, 15 bp, Homo sapiens
cttctctggattagt

SEQ ID NO: 79913 - DNA, 15 bp, Homo sapiens
gcttctctggattag

SEQ ID NO: 79914 - DNA, 15 bp, Homo sapiens
agcttctctggatta

SEQ ID NO: 79915 - DNA, 15 bp, Homo sapiens
aagcttctctggatt

SEQ ID NO: 79916 - DNA, 15 bp, Homo sapiens
gaagcttctctggat

SEQ ID NO: 79917 - DNA, 15 bp, Homo sapiens
agaagcttctctgga

SEQ ID NO: 79918 - DNA, 15 bp, Homo sapiens
cagaagcttctctgg

SEQ ID NO: 79919 - DNA, 15 bp, Homo sapiens
ccagaagcttctctg

SEQ ID NO: 79920 - DNA, 15 bp, Homo sapiens
tccagaagcttctct

SEQ ID NO: 79921 - DNA, 15 bp, Homo sapiens
ctccagaagcttctc

SEQ ID NO: 79922 - DNA, 15 bp, Homo sapiens
tctccagaagcttct

SEQ ID NO: 79923 - DNA, 15 bp, Homo sapiens
ttctccagaagcttc

SEQ ID NO: 79924 - DNA, 15 bp, Homo sapiens
attctccagaagctt

SEQ ID NO: 79925 - DNA, 15 bp, Homo sapiens
gattctccagaagct

SEQ ID NO: 79926 - DNA, 15 bp, Homo sapiens
agattctccagaagc

SEQ ID NO: 79927 - DNA, 15 bp, Homo sapiens
cagattctccagaag

SEQ ID NO: 79928 - DNA, 15 bp, Homo sapiens
acagattctccagaa

SEQ ID NO: 79929 - DNA, 15 bp, Homo sapiens
gacagattctccaga

SEQ ID NO: 79930 - DNA, 15 bp, Homo sapiens
ggacagattctccag

SEQ ID NO: 79931 - DNA, 15 bp, Homo sapiens
aggacagattctcca

SEQ ID NO: 79932 - DNA, 15 bp, Homo sapiens
aaggacagattctcc

SEQ ID NO: 79933 - DNA, 15 bp, Homo sapiens
caaggacagattctc

SEQ ID NO: 79934 - DNA, 15 bp, Homo sapiens
gcaaggacagattct

SEQ ID NO: 79935 - DNA, 15 bp, Homo sapiens
ggcaaggacagattc

SEQ ID NO: 79936 - DNA, 15 bp, Homo sapiens
tggcaaggacagatt

SEQ ID NO: 79937 - DNA, 15 bp, Homo sapiens
ttggcaaggacagat

SEQ ID NO: 79938 - DNA, 15 bp, Homo sapiens
gttggcaaggacaga

SEQ ID NO: 79939 - DNA, 15 bp, Homo sapiens
agttggcaaggacag

SEQ ID NO: 79940 - DNA, 15 bp, Homo sapiens
tagttggcaaggaca

SEQ ID NO: 79941 - DNA, 15 bp, Homo sapiens
ctagttggcaaggac

SEQ ID NO: 79942 - DNA, 15 bp, Homo sapiens
cctagttggcaagga

SEQ ID NO: 79943 - DNA, 15 bp, Homo sapiens
ccctagttggcaagg

SEQ ID NO: 79944 - DNA, 15 bp, Homo sapiens
cccctagttggcaag

SEQ ID NO: 79945 - DNA, 15 bp, Homo sapiens
gcccctagttggcaa

SEQ ID NO: 79946 - DNA, 15 bp, Homo sapiens
agcccctagttggca

SEQ ID NO: 79947 - DNA, 15 bp, Homo sapiens
cagcccctagttggc

SEQ ID NO: 79948 - DNA, 15 bp, Homo sapiens
ccagcccctagttgg

SEQ ID NO: 79949 - DNA, 15 bp, Homo sapiens
gccagcccctagttg

SEQ ID NO: 79950 - DNA, 15 bp, Homo sapiens
tgccagcccctagtt

SEQ ID NO: 79951 - DNA, 15 bp, Homo sapiens
ttgccagcccctagt

SEQ ID NO: 79952 - DNA, 15 bp, Homo sapiens
cttgccagcccctag

SEQ ID NO: 79953 - DNA, 15 bp, Homo sapiens
acttgccagccccta

SEQ ID NO: 79954 - DNA, 15 bp, Homo sapiens
aacttgccagcccct

SEQ ID NO: 79955 - DNA, 15 bp, Homo sapiens
gaacttgccagcccc

SEQ ID NO: 79956 - DNA, 15 bp, Homo sapiens
cgaacttgccagccc

SEQ ID NO: 79957 - DNA, 15 bp, Homo sapiens
acgaacttgccagcc

SEQ ID NO: 79958 - DNA, 15 bp, Homo sapiens
cacgaacttgccagc

SEQ ID NO: 79959 - DNA, 15 bp, Homo sapiens
tcacgaacttgccag

SEQ ID NO: 79960 - DNA, 15 bp, Homo sapiens
ctcacgaacttgcca

SEQ ID NO: 79961 - DNA, 15 bp, Homo sapiens
tctcacgaacttgcc

SEQ ID NO: 79962 - DNA, 15 bp, Homo sapiens
ctctcacgaacttgc

SEQ ID NO: 79963 - DNA, 15 bp, Homo sapiens
tctctcacgaacttg

SEQ ID NO: 79964 - DNA, 15 bp, Homo sapiens
ctctctcacgaactt

SEQ ID NO: 79965 - DNA, 15 bp, Homo sapiens
tctctctcacgaact

SEQ ID NO: 79966 - DNA, 15 bp, Homo sapiens
ttctctctcacgaac

SEQ ID NO: 79967 - DNA, 15 bp, Homo sapiens
attctctctcacgaa

SEQ ID NO: 79968 - DNA, 15 bp, Homo sapiens
aattctctctcacga

SEQ ID NO: 79969 - DNA, 15 bp, Homo sapiens
taattctctctcacg

SEQ ID NO: 79970 - DNA, 15 bp, Homo sapiens
ttaattctctctcac

SEQ ID NO: 79971 - DNA, 15 bp, Homo sapiens
attaattctctctca

SEQ ID NO: 79972 - DNA, 15 bp, Homo sapiens
aattaattctctctc

SEQ ID NO: 79973 - DNA, 15 bp, Homo sapiens
gaattaattctctct

SEQ ID NO: 79974 - DNA, 15 bp, Homo sapiens
agaattaattctctc

SEQ ID NO: 79975 - DNA, 15 bp, Homo sapiens
gagaattaattctct

SEQ ID NO: 79976 - DNA, 15 bp, Homo sapiens
agagaattaattctc

SEQ ID NO: 79977 - DNA, 15 bp, Homo sapiens
cagagaattaattct

SEQ ID NO: 79978 - DNA, 15 bp, Homo sapiens
acagagaattaattc

SEQ ID NO: 79979 - DNA, 15 bp, Homo sapiens
cacagagaattaatt

SEQ ID NO: 79980 - DNA, 15 bp, Homo sapiens
tcacagagaattaat

SEQ ID NO: 79981 - DNA, 15 bp, Homo sapiens
ctcacagagaattaa

SEQ ID NO: 79982 - DNA, 15 bp, Homo sapiens
gctcacagagaatta

SEQ ID NO: 79983 - DNA, 15 bp, Homo sapiens
ggctcacagagaatt

SEQ ID NO: 79984 - DNA, 15 bp, Homo sapiens
gggctcacagagaat

SEQ ID NO: 79985 - DNA, 15 bp, Homo sapiens
ggggctcacagagaa

SEQ ID NO: 79986 - DNA, 15 bp, Homo sapiens
aggggctcacagaga

SEQ ID NO: 79987 - DNA, 15 bp, Homo sapiens
aaggggctcacagag

SEQ ID NO: 79988 - DNA, 15 bp, Homo sapiens
taaggggctcacaga

SEQ ID NO: 79989 - DNA, 15 bp, Homo sapiens
ttaaggggctcacag

SEQ ID NO: 79990 - DNA, 15 bp, Homo sapiens
cttaaggggctcaca

SEQ ID NO: 79991 - DNA, 15 bp, Homo sapiens
tcttaaggggctcac

SEQ ID NO: 79992 - DNA, 15 bp, Homo sapiens
gtcttaaggggctca

SEQ ID NO: 79993 - DNA, 15 bp, Homo sapiens
agtcttaaggggctc

SEQ ID NO: 79994 - DNA, 15 bp, Homo sapiens
tagtcttaaggggct

SEQ ID NO: 79995 - DNA, 15 bp, Homo sapiens
ctagtcttaaggggc

SEQ ID NO: 79996 - DNA, 15 bp, Homo sapiens
actagtcttaagggg

SEQ ID NO: 79997 - DNA, 15 bp, Homo sapiens
tactagtcttaaggg

SEQ ID NO: 79998 - DNA, 15 bp, Homo sapiens
ttactagtcttaagg

SEQ ID NO: 79999 - DNA, 15 bp, Homo sapiens
gttactagtcttaag

SEQ ID NO: 80000 - DNA, 15 bp, Homo sapiens
agttactagtcttaa

SEQ ID NO: 80001 - DNA, 15 bp, Homo sapiens
tagttactagtctta

SEQ ID NO: 80002 - DNA, 15 bp, Homo sapiens
atagttactagtctt

SEQ ID NO: 80003 - DNA, 15 bp, Homo sapiens
catagttactagtct

SEQ ID NO: 80004 - DNA, 15 bp, Homo sapiens
acatagttactagtc

SEQ ID NO: 80005 - DNA, 15 bp, Homo sapiens
cacatagttactagt

SEQ ID NO: 80006 - DNA, 15 bp, Homo sapiens
ccacatagttactag

SEQ ID NO: 80007 - DNA, 15 bp, Homo sapiens
tccacatagttacta

SEQ ID NO: 80008 - DNA, 15 bp, Homo sapiens
ctccacatagttact

SEQ ID NO: 80009 - DNA, 15 bp, Homo sapiens
gctccacatagttac

SEQ ID NO: 80010 - DNA, 15 bp, Homo sapiens
agctccacatagtta

SEQ ID NO: 80011 - DNA, 15 bp, Homo sapiens
gagctccacatagtt

SEQ ID NO: 80012 - DNA, 15 bp, Homo sapiens
tgagctccacatagt

SEQ ID NO: 80013 - DNA, 15 bp, Homo sapiens
gtgagctccacatag

SEQ ID NO: 80014 - DNA, 15 bp, Homo sapiens
ggtgagctccacata

SEQ ID NO: 80015 - DNA, 15 bp, Homo sapiens
gggtgagctccacat

SEQ ID NO: 80016 - DNA, 15 bp, Homo sapiens
ggggtgagctccaca

SEQ ID NO: 80017 - DNA, 15 bp, Homo sapiens
aggggtgagctccac

SEQ ID NO: 80018 - DNA, 15 bp, Homo sapiens
caggggtgagctcca

SEQ ID NO: 80019 - DNA, 15 bp, Homo sapiens
acaggggtgagctcc

SEQ ID NO: 80020 - DNA, 15 bp, Homo sapiens
tacaggggtgagctc

SEQ ID NO: 80021 - DNA, 15 bp, Homo sapiens
ctacaggggtgagct

SEQ ID NO: 80022 - DNA, 15 bp, Homo sapiens
cctacaggggtgagc

SEQ ID NO: 80023 - DNA, 15 bp, Homo sapiens
tcctacaggggtgag

SEQ ID NO: 80024 - DNA, 15 bp, Homo sapiens
atcctacaggggtga

SEQ ID NO: 80025 - DNA, 15 bp, Homo sapiens
catcctacaggggtg

SEQ ID NO: 80026 - DNA, 15 bp, Homo sapiens
gcatcctacaggggt

SEQ ID NO: 80027 - DNA, 15 bp, Homo sapiens
tgcatcctacagggg

SEQ ID NO: 80028 - DNA, 15 bp, Homo sapiens
gtgcatcctacaggg

SEQ ID NO: 80029 - DNA, 15 bp, Homo sapiens
ggtgcatcctacagg

SEQ ID NO: 80030 - DNA, 15 bp, Homo sapiens
tggtgcatcctacag

SEQ ID NO: 80031 - DNA, 15 bp, Homo sapiens
gtggtgcatcctaca

SEQ ID NO: 80032 - DNA, 15 bp, Homo sapiens
tgtggtgcatcctac

SEQ ID NO: 80033 - DNA, 15 bp, Homo sapiens
ctgtggtgcatccta

SEQ ID NO: 80034 - DNA, 15 bp, Homo sapiens
tctgtggtgcatcct

SEQ ID NO: 80035 - DNA, 15 bp, Homo sapiens
gtctgtggtgcatcc

SEQ ID NO: 80036 - DNA, 15 bp, Homo sapiens
tgtctgtggtgcatc

SEQ ID NO: 80037 - DNA, 15 bp, Homo sapiens
ctgtctgtggtgcat

SEQ ID NO: 80038 - DNA, 15 bp, Homo sapiens
gctgtctgtggtgca

SEQ ID NO: 80039 - DNA, 15 bp, Homo sapiens
agctgtctgtggtgc

SEQ ID NO: 80040 - DNA, 15 bp, Homo sapiens
cagctgtctgtggtg

SEQ ID NO: 80041 - DNA, 15 bp, Homo sapiens
ccagctgtctgtggt

SEQ ID NO: 80042 - DNA, 15 bp, Homo sapiens
tccagctgtctgtgg

SEQ ID NO: 80043 - DNA, 15 bp, Homo sapiens
ttccagctgtctgtg

SEQ ID NO: 80044 - DNA, 15 bp, Homo sapiens
attccagctgtctgt

SEQ ID NO: 80045 - DNA, 15 bp, Homo sapiens
cattccagctgtctg

SEQ ID NO: 80046 - DNA, 15 bp, Homo sapiens
ccattccagctgtct

SEQ ID NO: 80047 - DNA, 15 bp, Homo sapiens
accattccagctgtc

SEQ ID NO: 80048 - DNA, 15 bp, Homo sapiens
gaccattccagctgt

SEQ ID NO: 80049 - DNA, 15 bp, Homo sapiens
tgaccattccagctg

SEQ ID NO: 80050 - DNA, 15 bp, Homo sapiens
ttgaccattccagct

SEQ ID NO: 80051 - DNA, 15 bp, Homo sapiens
cttgaccattccagc

SEQ ID NO: 80052 - DNA, 15 bp, Homo sapiens
gcttgaccattccag

SEQ ID NO: 80053 - DNA, 15 bp, Homo sapiens
ggcttgaccattcca

SEQ ID NO: 80054 - DNA, 15 bp, Homo sapiens
gggcttgaccattcc

SEQ ID NO: 80055 - DNA, 15 bp, Homo sapiens
agggcttgaccattc

SEQ ID NO: 80056 - DNA, 15 bp, Homo sapiens
aagggcttgaccatt

SEQ ID NO: 80057 - DNA, 15 bp, Homo sapiens
gaagggcttgaccat

SEQ ID NO: 80058 - DNA, 15 bp, Homo sapiens
tgaagggcttgacca

SEQ ID NO: 80059 - DNA, 15 bp, Homo sapiens
ctgaagggcttgacc

SEQ ID NO: 80060 - DNA, 15 bp, Homo sapiens
cctgaagggcttgac

SEQ ID NO: 80061 - DNA, 15 bp, Homo sapiens
ccctgaagggcttga

SEQ ID NO: 80062 - DNA, 15 bp, Homo sapiens
tccctgaagggcttg

SEQ ID NO: 80063 - DNA, 15 bp, Homo sapiens
atccctgaagggctt

SEQ ID NO: 80064 - DNA, 15 bp, Homo sapiens
catccctgaagggct

SEQ ID NO: 80065 - DNA, 15 bp, Homo sapiens
gcatccctgaagggc

SEQ ID NO: 80066 - DNA, 15 bp, Homo sapiens
ggcatccctgaaggg

SEQ ID NO: 80067 - DNA, 15 bp, Homo sapiens
aggcatccctgaagg

SEQ ID NO: 80068 - DNA, 15 bp, Homo sapiens
aaggcatccctgaag

SEQ ID NO: 80069 - DNA, 15 bp, Homo sapiens
gaaggcatccctgaa

SEQ ID NO: 80070 - DNA, 15 bp, Homo sapiens
agaaggcatccctga

SEQ ID NO: 80071 - DNA, 15 bp, Homo sapiens
aagaaggcatccctg

SEQ ID NO: 80072 - DNA, 15 bp, Homo sapiens
gaagaaggcatccct

SEQ ID NO: 80073 - DNA, 15 bp, Homo sapiens
agaagaaggcatccc

SEQ ID NO: 80074 - DNA, 15 bp, Homo sapiens
cagaagaaggcatcc

SEQ ID NO: 80075 - DNA, 15 bp, Homo sapiens
gcagaagaaggcatc

SEQ ID NO: 80076 - DNA, 15 bp, Homo sapiens
agcagaagaaggcat

SEQ ID NO: 80077 - DNA, 15 bp, Homo sapiens
cagcagaagaaggca

SEQ ID NO: 80078 - DNA, 15 bp, Homo sapiens
gcagcagaagaaggc

SEQ ID NO: 80079 - DNA, 15 bp, Homo sapiens
ggcagcagaagaagg

SEQ ID NO: 80080 - DNA, 15 bp, Homo sapiens
aggcagcagaagaag

SEQ ID NO: 80081 - DNA, 15 bp, Homo sapiens
aaggcagcagaagaa

SEQ ID NO: 80082 - DNA, 15 bp, Homo sapiens
caaggcagcagaaga

SEQ ID NO: 80083 - DNA, 15 bp, Homo sapiens
tcaaggcagcagaag

SEQ ID NO: 80084 - DNA, 15 bp, Homo sapiens
atcaaggcagcagaa

SEQ ID NO: 80085 - DNA, 15 bp, Homo sapiens
aatcaaggcagcaga

SEQ ID NO: 80086 - DNA, 15 bp, Homo sapiens
gaatcaaggcagcag

SEQ ID NO: 80087 - DNA, 15 bp, Homo sapiens
tgaatcaaggcagca

SEQ ID NO: 80088 - DNA, 15 bp, Homo sapiens
gtgaatcaaggcagc

SEQ ID NO: 80089 - DNA, 15 bp, Homo sapiens
tgtgaatcaaggcag

SEQ ID NO: 80090 - DNA, 15 bp, Homo sapiens
atgtgaatcaaggca

SEQ ID NO: 80091 - DNA, 15 bp, Homo sapiens
catgtgaatcaaggc

SEQ ID NO: 80092 - DNA, 15 bp, Homo sapiens
ccatgtgaatcaagg

SEQ ID NO: 80093 - DNA, 15 bp, Homo sapiens
accatgtgaatcaag

SEQ ID NO: 80094 - DNA, 15 bp, Homo sapiens
caccatgtgaatcaa

SEQ ID NO: 80095 - DNA, 15 bp, Homo sapiens
gcaccatgtgaatca

SEQ ID NO: 80096 - DNA, 15 bp, Homo sapiens
ggcaccatgtgaatc

SEQ ID NO: 80097 - DNA, 15 bp, Homo sapiens
tggcaccatgtgaat

SEQ ID NO: 80098 - DNA, 15 bp, Homo sapiens
atggcaccatgtgaa

SEQ ID NO: 80099 - DNA, 15 bp, Homo sapiens
gatggcaccatgtga

SEQ ID NO: 80100 - DNA, 15 bp, Homo sapiens
ggatggcaccatgtg

SEQ ID NO: 80101 - DNA, 15 bp, Homo sapiens
tggatggcaccatgt

SEQ ID NO: 80102 - DNA, 15 bp, Homo sapiens
gtggatggcaccatg

SEQ ID NO: 80103 - DNA, 15 bp, Homo sapiens
agtggatggcaccat

SEQ ID NO: 80104 - DNA, 15 bp, Homo sapiens
gagtggatggcacca

SEQ ID NO: 80105 - DNA, 15 bp, Homo sapiens
tgagtggatggcacc

SEQ ID NO: 80106 - DNA, 15 bp, Homo sapiens
ttgagtggatggcac

SEQ ID NO: 80107 - DNA, 15 bp, Homo sapiens
attgagtggatggca

SEQ ID NO: 80108 - DNA, 15 bp, Homo sapiens
gattgagtggatggc

SEQ ID NO: 80109 - DNA, 15 bp, Homo sapiens
tgattgagtggatgg

SEQ ID NO: 80110 - DNA, 15 bp, Homo sapiens
atgattgagtggatg

SEQ ID NO: 80111 - DNA, 15 bp, Homo sapiens
aatgattgagtggat

SEQ ID NO: 80112 - DNA, 15 bp, Homo sapiens
gaatgattgagtgga

SEQ ID NO: 80113 - DNA, 15 bp, Homo sapiens
tgaatgattgagtgg

SEQ ID NO: 80114 - DNA, 15 bp, Homo sapiens
atgaatgattgagtg

SEQ ID NO: 80115 - DNA, 15 bp, Homo sapiens
aatgaatgattgagt

SEQ ID NO: 80116 - DNA, 15 bp, Homo sapiens
gaatgaatgattgag

SEQ ID NO: 80117 - DNA, 15 bp, Homo sapiens
tgaatgaatgattga

SEQ ID NO: 80118 - DNA, 15 bp, Homo sapiens
atgaatgaatgattg

SEQ ID NO: 80119 - DNA, 15 bp, Homo sapiens
aatgaatgaatgatt

SEQ ID NO: 80120 - DNA, 15 bp, Homo sapiens
gaatgaatgaatgat

SEQ ID NO: 80121 - DNA, 15 bp, Homo sapiens
ggaatgaatgaatga

SEQ ID NO: 80122 - DNA, 15 bp, Homo sapiens
cggaatgaatgaatg

SEQ ID NO: 80123 - DNA, 15 bp, Homo sapiens
gcggaatgaatgaat

SEQ ID NO: 80124 - DNA, 15 bp, Homo sapiens
ggcggaatgaatgaa

SEQ ID NO: 80125 - DNA, 15 bp, Homo sapiens
tggcggaatgaatga

SEQ ID NO: 80126 - DNA, 15 bp, Homo sapiens
ctggcggaatgaatg

SEQ ID NO: 80127 - DNA, 15 bp, Homo sapiens
gctggcggaatgaat

SEQ ID NO: 80128 - DNA, 15 bp, Homo sapiens
ggctggcggaatgaa

SEQ ID NO: 80129 - DNA, 15 bp, Homo sapiens
aggctggcggaatga

SEQ ID NO: 80130 - DNA, 15 bp, Homo sapiens
caggctggcggaatg

SEQ ID NO: 80131 - DNA, 15 bp, Homo sapiens
acaggctggcggaat

SEQ ID NO: 80132 - DNA, 15 bp, Homo sapiens
tacaggctggcggaa

SEQ ID NO: 80133 - DNA, 15 bp, Homo sapiens
gtacaggctggcgga

SEQ ID NO: 80134 - DNA, 15 bp, Homo sapiens
agtacaggctggcgg

SEQ ID NO: 80135 - DNA, 15 bp, Homo sapiens
aagtacaggctggcg

SEQ ID NO: 80136 - DNA, 15 bp, Homo sapiens
caagtacaggctggc

SEQ ID NO: 80137 - DNA, 15 bp, Homo sapiens
ccaagtacaggctgg

SEQ ID NO: 80138 - DNA, 15 bp, Homo sapiens
gccaagtacaggctg

SEQ ID NO: 80139 - DNA, 15 bp, Homo sapiens
tgccaagtacaggct

SEQ ID NO: 80140 - DNA, 15 bp, Homo sapiens
gtgccaagtacaggc

SEQ ID NO: 80141 - DNA, 15 bp, Homo sapiens
ggtgccaagtacagg

SEQ ID NO: 80142 - DNA, 15 bp, Homo sapiens
aggtgccaagtacag

SEQ ID NO: 80143 - DNA, 15 bp, Homo sapiens
gaggtgccaagtaca

SEQ ID NO: 80144 - DNA, 15 bp, Homo sapiens
ggaggtgccaagtac

SEQ ID NO: 80145 - DNA, 15 bp, Homo sapiens
aggaggtgccaagta

SEQ ID NO: 80146 - DNA, 15 bp, Homo sapiens
taggaggtgccaagt

SEQ ID NO: 80147 - DNA, 15 bp, Homo sapiens
ataggaggtgccaag

SEQ ID NO: 80148 - DNA, 15 bp, Homo sapiens
aataggaggtgccaa

SEQ ID NO: 80149 - DNA, 15 bp, Homo sapiens
gaataggaggtgcca

SEQ ID NO: 80150 - DNA, 15 bp, Homo sapiens
agaataggaggtgcc

SEQ ID NO: 80151 - DNA, 15 bp, Homo sapiens
gagaataggaggtgc

SEQ ID NO: 80152 - DNA, 15 bp, Homo sapiens
tgagaataggaggtg

SEQ ID NO: 80153 - DNA, 15 bp, Homo sapiens
ctgagaataggaggt

SEQ ID NO: 80154 - DNA, 15 bp, Homo sapiens
gctgagaataggagg

SEQ ID NO: 80155 - DNA, 15 bp, Homo sapiens
tgctgagaataggag

SEQ ID NO: 80156 - DNA, 15 bp, Homo sapiens
gtgctgagaatagga

SEQ ID NO: 80157 - DNA, 15 bp, Homo sapiens
cgtgctgagaatagg

SEQ ID NO: 80158 - DNA, 15 bp, Homo sapiens
ccgtgctgagaatag

SEQ ID NO: 80159 - DNA, 15 bp, Homo sapiens
accgtgctgagaata

SEQ ID NO: 80160 - DNA, 15 bp, Homo sapiens
caccgtgctgagaat

SEQ ID NO: 80161 - DNA, 15 bp, Homo sapiens
acaccgtgctgagaa

SEQ ID NO: 80162 - DNA, 15 bp, Homo sapiens
tacaccgtgctgaga

SEQ ID NO: 80163 - DNA, 15 bp, Homo sapiens
ctacaccgtgctgag

SEQ ID NO: 80164 - DNA, 15 bp, Homo sapiens
tctacaccgtgctga

SEQ ID NO: 80165 - DNA, 15 bp, Homo sapiens
ttctacaccgtgctg

SEQ ID NO: 80166 - DNA, 15 bp, Homo sapiens
attctacaccgtgct

SEQ ID NO: 80167 - DNA, 15 bp, Homo sapiens
tattctacaccgtgc

SEQ ID NO: 80168 - DNA, 15 bp, Homo sapiens
atattctacaccgtg

SEQ ID NO: 80169 - DNA, 15 bp, Homo sapiens
tatattctacaccgt

SEQ ID NO: 80170 - DNA, 15 bp, Homo sapiens
ctatattctacaccg

SEQ ID NO: 80171 - DNA, 15 bp, Homo sapiens
cctatattctacacc

SEQ ID NO: 80172 - DNA, 15 bp, Homo sapiens
ccctatattctacac

SEQ ID NO: 80173 - DNA, 15 bp, Homo sapiens
tccctatattctaca

SEQ ID NO: 80174 - DNA, 15 bp, Homo sapiens
atccctatattctac

SEQ ID NO: 80175 - DNA, 15 bp, Homo sapiens
catccctatattcta

SEQ ID NO: 80176 - DNA, 15 bp, Homo sapiens
ccatccctatattct

SEQ ID NO: 80177 - DNA, 15 bp, Homo sapiens
tccatccctatattc

SEQ ID NO: 80178 - DNA, 15 bp, Homo sapiens
ttccatccctatatt

SEQ ID NO: 80179 - DNA, 15 bp, Homo sapiens
cttccatccctatat

SEQ ID NO: 80180 - DNA, 15 bp, Homo sapiens
tcttccatccctata

SEQ ID NO: 80181 - DNA, 15 bp, Homo sapiens
ttcttccatccctat

SEQ ID NO: 80182 - DNA, 15 bp, Homo sapiens
attcttccatcccta

SEQ ID NO: 80183 - DNA, 15 bp, Homo sapiens
cattcttccatccct

SEQ ID NO: 80184 - DNA, 15 bp, Homo sapiens
ccattcttccatccc

SEQ ID NO: 80185 - DNA, 15 bp, Homo sapiens
tccattcttccatcc

SEQ ID NO: 80186 - DNA, 15 bp, Homo sapiens
ctccattcttccatc

SEQ ID NO: 80187 - DNA, 15 bp, Homo sapiens
cctccattcttccat

SEQ ID NO: 80188 - DNA, 15 bp, Homo sapiens
gcctccattcttcca

SEQ ID NO: 80189 - DNA, 15 bp, Homo sapiens
cgcctccattcttcc

SEQ ID NO: 80190 - DNA, 15 bp, Homo sapiens
tcgcctccattcttc

SEQ ID NO: 80191 - DNA, 15 bp, Homo sapiens
ttcgcctccattctt

SEQ ID NO: 80192 - DNA, 15 bp, Homo sapiens
cttcgcctccattct

SEQ ID NO: 80193 - DNA, 15 bp, Homo sapiens
tcttcgcctccattc

SEQ ID NO: 80194 - DNA, 15 bp, Homo sapiens
gtcttcgcctccatt

SEQ ID NO: 80195 - DNA, 15 bp, Homo sapiens
tgtcttcgcctccat

SEQ ID NO: 80196 - DNA, 15 bp, Homo sapiens
ctgtcttcgcctcca

SEQ ID NO: 80197 - DNA, 15 bp, Homo sapiens
tctgtcttcgcctcc

SEQ ID NO: 80198 - DNA, 15 bp, Homo sapiens
gtctgtcttcgcctc

SEQ ID NO: 80199 - DNA, 15 bp, Homo sapiens
cgtctgtcttcgcct

SEQ ID NO: 80200 - DNA, 15 bp, Homo sapiens
tcgtctgtcttcgcc

SEQ ID NO: 80201 - DNA, 15 bp, Homo sapiens
ctcgtctgtcttcgc

SEQ ID NO: 80202 - DNA, 15 bp, Homo sapiens
cctcgtctgtcttcg

SEQ ID NO: 80203 - DNA, 15 bp, Homo sapiens
acctcgtctgtcttc

SEQ ID NO: 80204 - DNA, 15 bp, Homo sapiens
gacctcgtctgtctt

SEQ ID NO: 80205 - DNA, 15 bp, Homo sapiens
ggacctcgtctgtct

SEQ ID NO: 80206 - DNA, 15 bp, Homo sapiens
gggacctcgtctgtc

SEQ ID NO: 80207 - DNA, 15 bp, Homo sapiens
agggacctcgtctgt

SEQ ID NO: 80208 - DNA, 15 bp, Homo sapiens
cagggacctcgtctg

SEQ ID NO: 80209 - DNA, 15 bp, Homo sapiens
gcagggacctcgtct

SEQ ID NO: 80210 - DNA, 15 bp, Homo sapiens
agcagggacctcgtc

SEQ ID NO: 80211 - DNA, 15 bp, Homo sapiens
cagcagggacctcgt

SEQ ID NO: 80212 - DNA, 15 bp, Homo sapiens
acagcagggacctcg

SEQ ID NO: 80213 - DNA, 15 bp, Homo sapiens
gacagcagggacctc

SEQ ID NO: 80214 - DNA, 15 bp, Homo sapiens
tgacagcagggacct

SEQ ID NO: 80215 - DNA, 15 bp, Homo sapiens
gtgacagcagggacc

SEQ ID NO: 80216 - DNA, 15 bp, Homo sapiens
tgtgacagcagggac

SEQ ID NO: 80217 - DNA, 15 bp, Homo sapiens
ctgtgacagcaggga

SEQ ID NO: 80218 - DNA, 15 bp, Homo sapiens
tctgtgacagcaggg

SEQ ID NO: 80219 - DNA, 15 bp, Homo sapiens
ttctgtgacagcagg

SEQ ID NO: 80220 - DNA, 15 bp, Homo sapiens
cttctgtgacagcag

SEQ ID NO: 80221 - DNA, 15 bp, Homo sapiens
tcttctgtgacagca

SEQ ID NO: 80222 - DNA, 15 bp, Homo sapiens
ttcttctgtgacagc

SEQ ID NO: 80223 - DNA, 15 bp, Homo sapiens
tttcttctgtgacag

SEQ ID NO: 80224 - DNA, 15 bp, Homo sapiens
gtttcttctgtgaca

SEQ ID NO: 80225 - DNA, 15 bp, Homo sapiens
tgtttcttctgtgac

SEQ ID NO: 80226 - DNA, 15 bp, Homo sapiens
ttgtttcttctgtga

SEQ ID NO: 80227 - DNA, 15 bp, Homo sapiens
tttgtttcttctgtg

SEQ ID NO: 80228 - DNA, 15 bp, Homo sapiens
ctttgtttcttctgt

SEQ ID NO: 80229 - DNA, 15 bp, Homo sapiens
tctttgtttcttctg

SEQ ID NO: 80230 - DNA, 15 bp, Homo sapiens
ttctttgtttcttct

SEQ ID NO: 80231 - DNA, 15 bp, Homo sapiens
attctttgtttcttc

SEQ ID NO: 80232 - DNA, 15 bp, Homo sapiens
tattctttgtttctt

SEQ ID NO: 80233 - DNA, 15 bp, Homo sapiens
ttattctttgtttct

SEQ ID NO: 80234 - DNA, 15 bp, Homo sapiens
tttattctttgtttc

SEQ ID NO: 80235 - DNA, 15 bp, Homo sapiens
ttttattctttgttt

SEQ ID NO: 80236 - DNA, 15 bp, Homo sapiens
tttttattctttgtt

SEQ ID NO: 80237 - DNA, 15 bp, Homo sapiens
ctttttattctttgt

SEQ ID NO: 80238 - DNA, 15 bp, Homo sapiens
tctttttattctttg

SEQ ID NO: 80239 - DNA, 15 bp, Homo sapiens
ctctttttattcttt

SEQ ID NO: 80240 - DNA, 15 bp, Homo sapiens
tctctttttattctt

SEQ ID NO: 80241 - DNA, 15 bp, Homo sapiens
ttctctttttattct

SEQ ID NO: 80242 - DNA, 15 bp, Homo sapiens
cttctctttttattc

SEQ ID NO: 80243 - DNA, 15 bp, Homo sapiens
tcttctctttttatt

SEQ ID NO: 80244 - DNA, 15 bp, Homo sapiens
ttcttctctttttat

SEQ ID NO: 80245 - DNA, 15 bp, Homo sapiens
tttcttctcttttta

SEQ ID NO: 80246 - DNA, 15 bp, Homo sapiens
gtttcttctcttttt

SEQ ID NO: 80247 - DNA, 15 bp, Homo sapiens
agtttcttctctttt

SEQ ID NO: 80248 - DNA, 15 bp, Homo sapiens
tagtttcttctcttt

SEQ ID NO: 80249 - DNA, 15 bp, Homo sapiens
ctagtttcttctctt

SEQ ID NO: 80250 - DNA, 15 bp, Homo sapiens
tctagtttcttctct

SEQ ID NO: 80251 - DNA, 15 bp, Homo sapiens
ttctagtttcttctc

SEQ ID NO: 80252 - DNA, 15 bp, Homo sapiens
attctagtttcttct

SEQ ID NO: 80253 - DNA, 15 bp, Homo sapiens
aattctagtttcttc

SEQ ID NO: 80254 - DNA, 15 bp, Homo sapiens
caattctagtttctt

SEQ ID NO: 80255 - DNA, 15 bp, Homo sapiens
tcaattctagtttct

SEQ ID NO: 80256 - DNA, 15 bp, Homo sapiens
ttcaattctagtttc

SEQ ID NO: 80257 - DNA, 15 bp, Homo sapiens
cttcaattctagttt

SEQ ID NO: 80258 - DNA, 15 bp, Homo sapiens
tcttcaattctagtt

SEQ ID NO: 80259 - DNA, 15 bp, Homo sapiens
ctcttcaattctagt

SEQ ID NO: 80260 - DNA, 15 bp, Homo sapiens
actcttcaattctag

SEQ ID NO: 80261 - DNA, 15 bp, Homo sapiens
gactcttcaattcta

SEQ ID NO: 80262 - DNA, 15 bp, Homo sapiens
agactcttcaattct

SEQ ID NO: 80263 - DNA, 15 bp, Homo sapiens
cagactcttcaattc

SEQ ID NO: 80264 - DNA, 15 bp, Homo sapiens
acagactcttcaatt

SEQ ID NO: 80265 - DNA, 15 bp, Homo sapiens
cacagactcttcaat

SEQ ID NO: 80266 - DNA, 15 bp, Homo sapiens
ccacagactcttcaa

SEQ ID NO: 80267 - DNA, 15 bp, Homo sapiens
accacagactcttca

SEQ ID NO: 80268 - DNA, 15 bp, Homo sapiens
caccacagactcttc

SEQ ID NO: 80269 - DNA, 15 bp, Homo sapiens
ccaccacagactctt

SEQ ID NO: 80270 - DNA, 15 bp, Homo sapiens
cccaccacagactct

SEQ ID NO: 80271 - DNA, 15 bp, Homo sapiens
ccccaccacagactc

SEQ ID NO: 80272 - DNA, 15 bp, Homo sapiens
tccccaccacagact

SEQ ID NO: 80273 - DNA, 15 bp, Homo sapiens
atccccaccacagac

SEQ ID NO: 80274 - DNA, 15 bp, Homo sapiens
aatccccaccacaga

SEQ ID NO: 80275 - DNA, 15 bp, Homo sapiens
caatccccaccacag

SEQ ID NO: 80276 - DNA, 15 bp, Homo sapiens
gcaatccccaccaca

SEQ ID NO: 80277 - DNA, 15 bp, Homo sapiens
tgcaatccccaccac

SEQ ID NO: 80278 - DNA, 15 bp, Homo sapiens
ctgcaatccccacca

SEQ ID NO: 80279 - DNA, 15 bp, Homo sapiens
cctgcaatccccacc

SEQ ID NO: 80280 - DNA, 15 bp, Homo sapiens
ccctgcaatccccac

SEQ ID NO: 80281 - DNA, 15 bp, Homo sapiens
cccctgcaatcccca

SEQ ID NO: 80282 - DNA, 15 bp, Homo sapiens
tcccctgcaatcccc

SEQ ID NO: 80283 - DNA, 15 bp, Homo sapiens
ctcccctgcaatccc

SEQ ID NO: 80284 - DNA, 15 bp, Homo sapiens
tctcccctgcaatcc

SEQ ID NO: 80285 - DNA, 15 bp, Homo sapiens
atctcccctgcaatc

SEQ ID NO: 80286 - DNA, 15 bp, Homo sapiens
catctcccctgcaat

SEQ ID NO: 80287 - DNA, 15 bp, Homo sapiens
gcatctcccctgcaa

SEQ ID NO: 80288 - DNA, 15 bp, Homo sapiens
ggcatctcccctgca

SEQ ID NO: 80289 - DNA, 15 bp, Homo sapiens
aggcatctcccctgc

SEQ ID NO: 80290 - DNA, 15 bp, Homo sapiens
caggcatctcccctg

SEQ ID NO: 80291 - DNA, 15 bp, Homo sapiens
acaggcatctcccct

SEQ ID NO: 80292 - DNA, 15 bp, Homo sapiens
gacaggcatctcccc

SEQ ID NO: 80293 - DNA, 15 bp, Homo sapiens
tgacaggcatctccc

SEQ ID NO: 80294 - DNA, 15 bp, Homo sapiens
ttgacaggcatctcc

SEQ ID NO: 80295 - DNA, 15 bp, Homo sapiens
cttgacaggcatctc

SEQ ID NO: 80296 - DNA, 15 bp, Homo sapiens
acttgacaggcatct

SEQ ID NO: 80297 - DNA, 15 bp, Homo sapiens
aacttgacaggcatc

SEQ ID NO: 80298 - DNA, 15 bp, Homo sapiens
taacttgacaggcat

SEQ ID NO: 80299 - DNA, 15 bp, Homo sapiens
ataacttgacaggca

SEQ ID NO: 80300 - DNA, 15 bp, Homo sapiens
tataacttgacaggc

SEQ ID NO: 80301 - DNA, 15 bp, Homo sapiens
ttataacttgacagg

SEQ ID NO: 80302 - DNA, 15 bp, Homo sapiens
tttataacttgacag

SEQ ID NO: 80303 - DNA, 15 bp, Homo sapiens
ttttataacttgaca

SEQ ID NO: 80304 - DNA, 15 bp, Homo sapiens
cttttataacttgac

SEQ ID NO: 80305 - DNA, 15 bp, Homo sapiens
ccttttataacttga

SEQ ID NO: 80306 - DNA, 15 bp, Homo sapiens
gccttttataacttg

SEQ ID NO: 80307 - DNA, 15 bp, Homo sapiens
ggccttttataactt

SEQ ID NO: 80308 - DNA, 15 bp, Homo sapiens
gggccttttataact

SEQ ID NO: 80309 - DNA, 15 bp, Homo sapiens
agggccttttataac

SEQ ID NO: 80310 - DNA, 15 bp, Homo sapiens
tagggccttttataa

SEQ ID NO: 80311 - DNA, 15 bp, Homo sapiens
ttagggccttttata

SEQ ID NO: 80312 - DNA, 15 bp, Homo sapiens
attagggccttttat

SEQ ID NO: 80313 - DNA, 15 bp, Homo sapiens
tattagggcctttta

SEQ ID NO: 80314 - DNA, 15 bp, Homo sapiens
gtattagggcctttt

SEQ ID NO: 80315 - DNA, 15 bp, Homo sapiens
tgtattagggccttt

SEQ ID NO: 80316 - DNA, 15 bp, Homo sapiens
atgtattagggcctt

SEQ ID NO: 80317 - DNA, 15 bp, Homo sapiens
aatgtattagggcct

SEQ ID NO: 80318 - DNA, 15 bp, Homo sapiens
aaatgtattagggcc

SEQ ID NO: 80319 - DNA, 15 bp, Homo sapiens
aaaatgtattagggc

SEQ ID NO: 80320 - DNA, 15 bp, Homo sapiens
aaaaatgtattaggg

SEQ ID NO: 80321 - DNA, 15 bp, Homo sapiens
caaaaatgtattagg

SEQ ID NO: 80322 - DNA, 15 bp, Homo sapiens
gcaaaaatgtattag

SEQ ID NO: 80323 - DNA, 15 bp, Homo sapiens
agcaaaaatgtatta

SEQ ID NO: 80324 - DNA, 15 bp, Homo sapiens
aagcaaaaatgtatt

SEQ ID NO: 80325 - DNA, 15 bp, Homo sapiens
aaagcaaaaatgtat

SEQ ID NO: 80326 - DNA, 15 bp, Homo sapiens
taaagcaaaaatgta

SEQ ID NO: 80327 - DNA, 15 bp, Homo sapiens
ataaagcaaaaatgt

SEQ ID NO: 80328 - DNA, 15 bp, Homo sapiens
cataaagcaaaaatg

SEQ ID NO: 80329 - DNA, 15 bp, Homo sapiens
acataaagcaaaaat

SEQ ID NO: 80330 - DNA, 15 bp, Homo sapiens
aacataaagcaaaaa

SEQ ID NO: 80331 - DNA, 15 bp, Homo sapiens
aaacataaagcaaaa

SEQ ID NO: 80332 - DNA, 15 bp, Homo sapiens
caaacataaagcaaa

SEQ ID NO: 80333 - DNA, 15 bp, Homo sapiens
tcaaacataaagcaa

SEQ ID NO: 80334 - DNA, 15 bp, Homo sapiens
ttcaaacataaagca

SEQ ID NO: 80335 - DNA, 15 bp, Homo sapiens
tttcaaacataaagc

SEQ ID NO: 80336 - DNA, 15 bp, Homo sapiens
atttcaaacataaag

SEQ ID NO: 80337 - DNA, 15 bp, Homo sapiens
aatttcaaacataaa

SEQ ID NO: 80338 - DNA, 15 bp, Homo sapiens
caatttcaaacataa

SEQ ID NO: 80339 - DNA, 15 bp, Homo sapiens
acaatttcaaacata

SEQ ID NO: 80340 - DNA, 15 bp, Homo sapiens
cacaatttcaaacat

SEQ ID NO: 80341 - DNA, 15 bp, Homo sapiens
tcacaatttcaaaca

SEQ ID NO: 80342 - DNA, 15 bp, Homo sapiens
gtcacaatttcaaac

SEQ ID NO: 80343 - DNA, 15 bp, Homo sapiens
ggtcacaatttcaaa

SEQ ID NO: 80344 - DNA, 15 bp, Homo sapiens
gggtcacaatttcaa

SEQ ID NO: 80345 - DNA, 15 bp, Homo sapiens
agggtcacaatttca

SEQ ID NO: 80346 - DNA, 15 bp, Homo sapiens
cagggtcacaatttc

SEQ ID NO: 80347 - DNA, 15 bp, Homo sapiens
acagggtcacaattt

SEQ ID NO: 80348 - DNA, 15 bp, Homo sapiens
gacagggtcacaatt

SEQ ID NO: 80349 - DNA, 15 bp, Homo sapiens
ggacagggtcacaat

SEQ ID NO: 80350 - DNA, 15 bp, Homo sapiens
aggacagggtcacaa

SEQ ID NO: 80351 - DNA, 15 bp, Homo sapiens
aaggacagggtcaca

SEQ ID NO: 80352 - DNA, 15 bp, Homo sapiens
taaggacagggtcac

SEQ ID NO: 80353 - DNA, 15 bp, Homo sapiens
ctaaggacagggtca

SEQ ID NO: 80354 - DNA, 15 bp, Homo sapiens
gctaaggacagggtc

SEQ ID NO: 80355 - DNA, 15 bp, Homo sapiens
ggctaaggacagggt

SEQ ID NO: 80356 - DNA, 15 bp, Homo sapiens
aggctaaggacaggg

SEQ ID NO: 80357 - DNA, 15 bp, Homo sapiens
taggctaaggacagg

SEQ ID NO: 80358 - DNA, 15 bp, Homo sapiens
ataggctaaggacag

SEQ ID NO: 80359 - DNA, 15 bp, Homo sapiens
aataggctaaggaca

SEQ ID NO: 80360 - DNA, 15 bp, Homo sapiens
gaataggctaaggac

SEQ ID NO: 80361 - DNA, 15 bp, Homo sapiens
ggaataggctaagga

SEQ ID NO: 80362 - DNA, 15 bp, Homo sapiens
gggaataggctaagg

SEQ ID NO: 80363 - DNA, 15 bp, Homo sapiens
tgggaataggctaag

SEQ ID NO: 80364 - DNA, 15 bp, Homo sapiens
ttgggaataggctaa

SEQ ID NO: 80365 - DNA, 15 bp, Homo sapiens
gttgggaataggcta

SEQ ID NO: 80366 - DNA, 15 bp, Homo sapiens
ggttgggaataggct

SEQ ID NO: 80367 - DNA, 15 bp, Homo sapiens
tggttgggaataggc

SEQ ID NO: 80368 - DNA, 15 bp, Homo sapiens
ctggttgggaatagg

SEQ ID NO: 80369 - DNA, 15 bp, Homo sapiens
gctggttgggaatag

SEQ ID NO: 80370 - DNA, 15 bp, Homo sapiens
ggctggttgggaata

SEQ ID NO: 80371 - DNA, 15 bp, Homo sapiens
aggctggttgggaat

SEQ ID NO: 80372 - DNA, 15 bp, Homo sapiens
gaggctggttgggaa

SEQ ID NO: 80373 - DNA, 15 bp, Homo sapiens
tgaggctggttggga

SEQ ID NO: 80374 - DNA, 15 bp, Homo sapiens
ttgaggctggttggg

SEQ ID NO: 80375 - DNA, 15 bp, Homo sapiens
cttgaggctggttgg

SEQ ID NO: 80376 - DNA, 15 bp, Homo sapiens
gcttgaggctggttg

SEQ ID NO: 80377 - DNA, 15 bp, Homo sapiens
tgcttgaggctggtt

SEQ ID NO: 80378 - DNA, 15 bp, Homo sapiens
atgcttgaggctggt

SEQ ID NO: 80379 - DNA, 15 bp, Homo sapiens
catgcttgaggctgg

SEQ ID NO: 80380 - DNA, 15 bp, Homo sapiens
ccatgcttgaggctg

SEQ ID NO: 80381 - DNA, 15 bp, Homo sapiens
accatgcttgaggct

SEQ ID NO: 80382 - DNA, 15 bp, Homo sapiens
aaccatgcttgaggc

SEQ ID NO: 80383 - DNA, 15 bp, Homo sapiens
gaaccatgcttgagg

SEQ ID NO: 80384 - DNA, 15 bp, Homo sapiens
tgaaccatgcttgag

SEQ ID NO: 80385 - DNA, 15 bp, Homo sapiens
ctgaaccatgcttga

SEQ ID NO: 80386 - DNA, 15 bp, Homo sapiens
actgaaccatgcttg

SEQ ID NO: 80387 - DNA, 15 bp, Homo sapiens
gactgaaccatgctt

SEQ ID NO: 80388 - DNA, 15 bp, Homo sapiens
agactgaaccatgct

SEQ ID NO: 80389 - DNA, 15 bp, Homo sapiens
gagactgaaccatgc

SEQ ID NO: 80390 - DNA, 15 bp, Homo sapiens
tgagactgaaccatg

SEQ ID NO: 80391 - DNA, 15 bp, Homo sapiens
gtgagactgaaccat

SEQ ID NO: 80392 - DNA, 15 bp, Homo sapiens
tgtgagactgaacca

SEQ ID NO: 80393 - DNA, 15 bp, Homo sapiens
ctgtgagactgaacc

SEQ ID NO: 80394 - DNA, 15 bp, Homo sapiens
actgtgagactgaac

SEQ ID NO: 80395 - DNA, 15 bp, Homo sapiens
gactgtgagactgaa

SEQ ID NO: 80396 - DNA, 15 bp, Homo sapiens
ggactgtgagactga

SEQ ID NO: 80397 - DNA, 15 bp, Homo sapiens
tggactgtgagactg

SEQ ID NO: 80398 - DNA, 15 bp, Homo sapiens
ctggactgtgagact

SEQ ID NO: 80399 - DNA, 15 bp, Homo sapiens
gctggactgtgagac

SEQ ID NO: 80400 - DNA, 15 bp, Homo sapiens
agctggactgtgaga

SEQ ID NO: 80401 - DNA, 15 bp, Homo sapiens
cagctggactgtgag

SEQ ID NO: 80402 - DNA, 15 bp, Homo sapiens
gcagctggactgtga

SEQ ID NO: 80403 - DNA, 15 bp, Homo sapiens
agcagctggactgtg

SEQ ID NO: 80404 - DNA, 15 bp, Homo sapiens
cagcagctggactgt

SEQ ID NO: 80405 - DNA, 15 bp, Homo sapiens
tcagcagctggactg

SEQ ID NO: 80406 - DNA, 15 bp, Homo sapiens
ctcagcagctggact

SEQ ID NO: 80407 - DNA, 15 bp, Homo sapiens
gctcagcagctggac

SEQ ID NO: 80408 - DNA, 15 bp, Homo sapiens
agctcagcagctgga

SEQ ID NO: 80409 - DNA, 15 bp, Homo sapiens
cagctcagcagctgg

SEQ ID NO: 80410 - DNA, 15 bp, Homo sapiens
acagctcagcagctg

SEQ ID NO: 80411 - DNA, 15 bp, Homo sapiens
tacagctcagcagct

SEQ ID NO: 80412 - DNA, 15 bp, Homo sapiens
ctacagctcagcagc

SEQ ID NO: 80413 - DNA, 15 bp, Homo sapiens
tctacagctcagcag

SEQ ID NO: 80414 - DNA, 15 bp, Homo sapiens
ctctacagctcagca

SEQ ID NO: 80415 - DNA, 15 bp, Homo sapiens
tctctacagctcagc

SEQ ID NO: 80416 - DNA, 15 bp, Homo sapiens
ctctctacagctcag

SEQ ID NO: 80417 - DNA, 15 bp, Homo sapiens
tctctctacagctca

SEQ ID NO: 80418 - DNA, 15 bp, Homo sapiens
gtctctctacagctc

SEQ ID NO: 80419 - DNA, 15 bp, Homo sapiens
ggtctctctacagct

SEQ ID NO: 80420 - DNA, 15 bp, Homo sapiens
tggtctctctacagc

SEQ ID NO: 80421 - DNA, 15 bp, Homo sapiens
atggtctctctacag

SEQ ID NO: 80422 - DNA, 15 bp, Homo sapiens
gatggtctctctaca

SEQ ID NO: 80423 - DNA, 15 bp, Homo sapiens
agatggtctctctac

SEQ ID NO: 80424 - DNA, 15 bp, Homo sapiens
gagatggtctctcta

SEQ ID NO: 80425 - DNA, 15 bp, Homo sapiens
agagatggtctctct

SEQ ID NO: 80426 - DNA, 15 bp, Homo sapiens
aagagatggtctctc

SEQ ID NO: 80427 - DNA, 15 bp, Homo sapiens
aaagagatggtctct

SEQ ID NO: 80428 - DNA, 15 bp, Homo sapiens
taaagagatggtctc

SEQ ID NO: 80429 - DNA, 15 bp, Homo sapiens
ataaagagatggtct

SEQ ID NO: 80430 - DNA, 15 bp, Homo sapiens
tataaagagatggtc

SEQ ID NO: 80431 - DNA, 15 bp, Homo sapiens
gtataaagagatggt

SEQ ID NO: 80432 - DNA, 15 bp, Homo sapiens
tgtataaagagatgg

SEQ ID NO: 80433 - DNA, 15 bp, Homo sapiens
ttgtataaagagatg

SEQ ID NO: 80434 - DNA, 15 bp, Homo sapiens
cttgtataaagagat

SEQ ID NO: 80435 - DNA, 15 bp, Homo sapiens
tcttgtataaagaga

SEQ ID NO: 80436 - DNA, 15 bp, Homo sapiens
atcttgtataaagag

SEQ ID NO: 80437 - DNA, 15 bp, Homo sapiens
gatcttgtataaaga

SEQ ID NO: 80438 - DNA, 15 bp, Homo sapiens
tgatcttgtataaag

SEQ ID NO: 80439 - DNA, 15 bp, Homo sapiens
ttgatcttgtataaa

SEQ ID NO: 80440 - DNA, 15 bp, Homo sapiens
attgatcttgtataa

SEQ ID NO: 80441 - DNA, 15 bp, Homo sapiens
aattgatcttgtata

SEQ ID NO: 80442 - DNA, 15 bp, Homo sapiens
taattgatcttgtat

SEQ ID NO: 80443 - DNA, 15 bp, Homo sapiens
ataattgatcttgta

SEQ ID NO: 80444 - DNA, 15 bp, Homo sapiens
cataattgatcttgt

SEQ ID NO: 80445 - DNA, 15 bp, Homo sapiens
ccataattgatcttg

SEQ ID NO: 80446 - DNA, 15 bp, Homo sapiens
cccataattgatctt

SEQ ID NO: 80447 - DNA, 15 bp, Homo sapiens
acccataattgatct

SEQ ID NO: 80448 - DNA, 15 bp, Homo sapiens
cacccataattgatc

SEQ ID NO: 80449 - DNA, 15 bp, Homo sapiens
gcacccataattgat

SEQ ID NO: 80450 - DNA, 15 bp, Homo sapiens
tgcacccataattga

SEQ ID NO: 80451 - DNA, 15 bp, Homo sapiens
ttgcacccataattg

SEQ ID NO: 80452 - DNA, 15 bp, Homo sapiens
cttgcacccataatt

SEQ ID NO: 80453 - DNA, 15 bp, Homo sapiens
tcttgcacccataat

SEQ ID NO: 80454 - DNA, 15 bp, Homo sapiens
ctcttgcacccataa

SEQ ID NO: 80455 - DNA, 15 bp, Homo sapiens
gctcttgcacccata

SEQ ID NO: 80456 - DNA, 15 bp, Homo sapiens
tgctcttgcacccat

SEQ ID NO: 80457 - DNA, 15 bp, Homo sapiens
atgctcttgcaccca

SEQ ID NO: 80458 - DNA, 15 bp, Homo sapiens
catgctcttgcaccc

SEQ ID NO: 80459 - DNA, 15 bp, Homo sapiens
gcatgctcttgcacc

SEQ ID NO: 80460 - DNA, 15 bp, Homo sapiens
ggcatgctcttgcac

SEQ ID NO: 80461 - DNA, 15 bp, Homo sapiens
aggcatgctcttgca

SEQ ID NO: 80462 - DNA, 15 bp, Homo sapiens
caggcatgctcttgc

SEQ ID NO: 80463 - DNA, 15 bp, Homo sapiens
ccaggcatgctcttg

SEQ ID NO: 80464 - DNA, 15 bp, Homo sapiens
gccaggcatgctctt

SEQ ID NO: 80465 - DNA, 15 bp, Homo sapiens
agccaggcatgctct

SEQ ID NO: 80466 - DNA, 15 bp, Homo sapiens
gagccaggcatgctc

SEQ ID NO: 80467 - DNA, 15 bp, Homo sapiens
tgagccaggcatgct

SEQ ID NO: 80468 - DNA, 15 bp, Homo sapiens
ttgagccaggcatgc

SEQ ID NO: 80469 - DNA, 15 bp, Homo sapiens
cttgagccaggcatg

SEQ ID NO: 80470 - DNA, 15 bp, Homo sapiens
gcttgagccaggcat

SEQ ID NO: 80471 - DNA, 15 bp, Homo sapiens
tgcttgagccaggca

SEQ ID NO: 80472 - DNA, 15 bp, Homo sapiens
gtgcttgagccaggc

SEQ ID NO: 80473 - DNA, 15 bp, Homo sapiens
tgtgcttgagccagg

SEQ ID NO: 80474 - DNA, 15 bp, Homo sapiens
gtgtgcttgagccag

SEQ ID NO: 80475 - DNA, 15 bp, Homo sapiens
tgtgtgcttgagcca

SEQ ID NO: 80476 - DNA, 15 bp, Homo sapiens
ctgtgtgcttgagcc

SEQ ID NO: 80477 - DNA, 15 bp, Homo sapiens
tctgtgtgcttgagc

SEQ ID NO: 80478 - DNA, 15 bp, Homo sapiens
gtctgtgtgcttgag

SEQ ID NO: 80479 - DNA, 15 bp, Homo sapiens
ggtctgtgtgcttga

SEQ ID NO: 80480 - DNA, 15 bp, Homo sapiens
gggtctgtgtgcttg

SEQ ID NO: 80481 - DNA, 15 bp, Homo sapiens
tgggtctgtgtgctt

SEQ ID NO: 80482 - DNA, 15 bp, Homo sapiens
gtgggtctgtgtgct

SEQ ID NO: 80483 - DNA, 15 bp, Homo sapiens
tgtgggtctgtgtgc

SEQ ID NO: 80484 - DNA, 15 bp, Homo sapiens
ctgtgggtctgtgtg

SEQ ID NO: 80485 - DNA, 15 bp, Homo sapiens
tctgtgggtctgtgt

SEQ ID NO: 80486 - DNA, 15 bp, Homo sapiens
gtctgtgggtctgtg

SEQ ID NO: 80487 - DNA, 15 bp, Homo sapiens
ggtctgtgggtctgt

SEQ ID NO: 80488 - DNA, 15 bp, Homo sapiens
gggtctgtgggtctg

SEQ ID NO: 80489 - DNA, 15 bp, Homo sapiens
agggtctgtgggtct

SEQ ID NO: 80490 - DNA, 15 bp, Homo sapiens
aagggtctgtgggtc

SEQ ID NO: 80491 - DNA, 15 bp, Homo sapiens
caagggtctgtgggt

SEQ ID NO: 80492 - DNA, 15 bp, Homo sapiens
acaagggtctgtggg

SEQ ID NO: 80493 - DNA, 15 bp, Homo sapiens
cacaagggtctgtgg

SEQ ID NO: 80494 - DNA, 15 bp, Homo sapiens
ccacaagggtctgtg

SEQ ID NO: 80495 - DNA, 15 bp, Homo sapiens
accacaagggtctgt

SEQ ID NO: 80496 - DNA, 15 bp, Homo sapiens
gaccacaagggtctg

SEQ ID NO: 80497 - DNA, 15 bp, Homo sapiens
tgaccacaagggtct

SEQ ID NO: 80498 - DNA, 15 bp, Homo sapiens
ctgaccacaagggtc

SEQ ID NO: 80499 - DNA, 15 bp, Homo sapiens
cctgaccacaagggt

SEQ ID NO: 80500 - DNA, 15 bp, Homo sapiens
ccctgaccacaaggg

SEQ ID NO: 80501 - DNA, 15 bp, Homo sapiens
tccctgaccacaagg

SEQ ID NO: 80502 - DNA, 15 bp, Homo sapiens
ctccctgaccacaag

SEQ ID NO: 80503 - DNA, 15 bp, Homo sapiens
actccctgaccacaa

SEQ ID NO: 80504 - DNA, 15 bp, Homo sapiens
aactccctgaccaca

SEQ ID NO: 80505 - DNA, 15 bp, Homo sapiens
gaactccctgaccac

SEQ ID NO: 80506 - DNA, 15 bp, Homo sapiens
ggaactccctgacca

SEQ ID NO: 80507 - DNA, 15 bp, Homo sapiens
aggaactccctgacc

SEQ ID NO: 80508 - DNA, 15 bp, Homo sapiens
taggaactccctgac

SEQ ID NO: 80509 - DNA, 15 bp, Homo sapiens
gtaggaactccctga

SEQ ID NO: 80510 - DNA, 15 bp, Homo sapiens
tgtaggaactccctg

SEQ ID NO: 80511 - DNA, 15 bp, Homo sapiens
atgtaggaactccct

SEQ ID NO: 80512 - DNA, 15 bp, Homo sapiens
catgtaggaactccc

SEQ ID NO: 80513 - DNA, 15 bp, Homo sapiens
tcatgtaggaactcc

SEQ ID NO: 80514 - DNA, 15 bp, Homo sapiens
ttcatgtaggaactc

SEQ ID NO: 80515 - DNA, 15 bp, Homo sapiens
gttcatgtaggaact

SEQ ID NO: 80516 - DNA, 15 bp, Homo sapiens
ggttcatgtaggaac

SEQ ID NO: 80517 - DNA, 15 bp, Homo sapiens
gggttcatgtaggaa

SEQ ID NO: 80518 - DNA, 15 bp, Homo sapiens
tgggttcatgtagga

SEQ ID NO: 80519 - DNA, 15 bp, Homo sapiens
ttgggttcatgtagg

SEQ ID NO: 80520 - DNA, 15 bp, Homo sapiens
tttgggttcatgtag

SEQ ID NO: 80521 - DNA, 15 bp, Homo sapiens
gtttgggttcatgta

SEQ ID NO: 80522 - DNA, 15 bp, Homo sapiens
ggtttgggttcatgt

SEQ ID NO: 80523 - DNA, 15 bp, Homo sapiens
aggtttgggttcatg

SEQ ID NO: 80524 - DNA, 15 bp, Homo sapiens
aaggtttgggttcat

SEQ ID NO: 80525 - DNA, 15 bp, Homo sapiens
aaaggtttgggttca

SEQ ID NO: 80526 - DNA, 15 bp, Homo sapiens
caaaggtttgggttc

SEQ ID NO: 80527 - DNA, 15 bp, Homo sapiens
ccaaaggtttgggtt

SEQ ID NO: 80528 - DNA, 15 bp, Homo sapiens
cccaaaggtttgggt

SEQ ID NO: 80529 - DNA, 15 bp, Homo sapiens
ccccaaaggtttggg

SEQ ID NO: 80530 - DNA, 15 bp, Homo sapiens
cccccaaaggtttgg

SEQ ID NO: 80531 - DNA, 15 bp, Homo sapiens
gcccccaaaggtttg

SEQ ID NO: 80532 - DNA, 15 bp, Homo sapiens
agcccccaaaggttt

SEQ ID NO: 80533 - DNA, 15 bp, Homo sapiens
cagcccccaaaggtt

SEQ ID NO: 80534 - DNA, 15 bp, Homo sapiens
ccagcccccaaaggt

SEQ ID NO: 80535 - DNA, 15 bp, Homo sapiens
cccagcccccaaagg

SEQ ID NO: 80536 - DNA, 15 bp, Homo sapiens
tcccagcccccaaag

SEQ ID NO: 80537 - DNA, 15 bp, Homo sapiens
atcccagcccccaaa

SEQ ID NO: 80538 - DNA, 15 bp, Homo sapiens
catcccagcccccaa

SEQ ID NO: 80539 - DNA, 15 bp, Homo sapiens
acatcccagccccca

SEQ ID NO: 80540 - DNA, 15 bp, Homo sapiens
aacatcccagccccc

SEQ ID NO: 80541 - DNA, 15 bp, Homo sapiens
aaacatcccagcccc

SEQ ID NO: 80542 - DNA, 15 bp, Homo sapiens
taaacatcccagccc

SEQ ID NO: 80543 - DNA, 15 bp, Homo sapiens
gtaaacatcccagcc

SEQ ID NO: 80544 - DNA, 15 bp, Homo sapiens
agtaaacatcccagc

SEQ ID NO: 80545 - DNA, 15 bp, Homo sapiens
gagtaaacatcccag

SEQ ID NO: 80546 - DNA, 15 bp, Homo sapiens
agagtaaacatccca

SEQ ID NO: 80547 - DNA, 15 bp, Homo sapiens
aagagtaaacatccc

SEQ ID NO: 80548 - DNA, 15 bp, Homo sapiens
caagagtaaacatcc

SEQ ID NO: 80549 - DNA, 15 bp, Homo sapiens
ccaagagtaaacatc

SEQ ID NO: 80550 - DNA, 15 bp, Homo sapiens
gccaagagtaaacat

SEQ ID NO: 80551 - DNA, 15 bp, Homo sapiens
tgccaagagtaaaca

SEQ ID NO: 80552 - DNA, 15 bp, Homo sapiens
gtgccaagagtaaac

SEQ ID NO: 80553 - DNA, 15 bp, Homo sapiens
agtgccaagagtaaa

SEQ ID NO: 80554 - DNA, 15 bp, Homo sapiens
gagtgccaagagtaa

SEQ ID NO: 80555 - DNA, 15 bp, Homo sapiens
agagtgccaagagta

SEQ ID NO: 80556 - DNA, 15 bp, Homo sapiens
cagagtgccaagagt

SEQ ID NO: 80557 - DNA, 15 bp, Homo sapiens
ccagagtgccaagag

SEQ ID NO: 80558 - DNA, 15 bp, Homo sapiens
cccagagtgccaaga

SEQ ID NO: 80559 - DNA, 15 bp, Homo sapiens
tcccagagtgccaag

SEQ ID NO: 80560 - DNA, 15 bp, Homo sapiens
atcccagagtgccaa

SEQ ID NO: 80561 - DNA, 15 bp, Homo sapiens
aatcccagagtgcca

SEQ ID NO: 80562 - DNA, 15 bp, Homo sapiens
aaatcccagagtgcc

SEQ ID NO: 80563 - DNA, 15 bp, Homo sapiens
gaaatcccagagtgc

SEQ ID NO: 80564 - DNA, 15 bp, Homo sapiens
ggaaatcccagagtg

SEQ ID NO: 80565 - DNA, 15 bp, Homo sapiens
aggaaatcccagagt

SEQ ID NO: 80566 - DNA, 15 bp, Homo sapiens
caggaaatcccagag

SEQ ID NO: 80567 - DNA, 15 bp, Homo sapiens
acaggaaatcccaga

SEQ ID NO: 80568 - DNA, 15 bp, Homo sapiens
aacaggaaatcccag

SEQ ID NO: 80569 - DNA, 15 bp, Homo sapiens
aaacaggaaatccca

SEQ ID NO: 80570 - DNA, 15 bp, Homo sapiens
gaaacaggaaatccc

SEQ ID NO: 80571 - DNA, 15 bp, Homo sapiens
agaaacaggaaatcc

SEQ ID NO: 80572 - DNA, 15 bp, Homo sapiens
tagaaacaggaaatc

SEQ ID NO: 80573 - DNA, 15 bp, Homo sapiens
ttagaaacaggaaat

SEQ ID NO: 80574 - DNA, 15 bp, Homo sapiens
cttagaaacaggaaa

SEQ ID NO: 80575 - DNA, 15 bp, Homo sapiens
tcttagaaacaggaa

SEQ ID NO: 80576 - DNA, 15 bp, Homo sapiens
ttcttagaaacagga

SEQ ID NO: 80577 - DNA, 15 bp, Homo sapiens
tttcttagaaacagg

SEQ ID NO: 80578 - DNA, 15 bp, Homo sapiens
ttttcttagaaacag

SEQ ID NO: 80579 - DNA, 15 bp, Homo sapiens
attttcttagaaaca

SEQ ID NO: 80580 - DNA, 15 bp, Homo sapiens
cattttcttagaaac

SEQ ID NO: 80581 - DNA, 15 bp, Homo sapiens
ccattttcttagaaa

SEQ ID NO: 80582 - DNA, 15 bp, Homo sapiens
cccattttcttagaa

SEQ ID NO: 80583 - DNA, 15 bp, Homo sapiens
gcccattttcttaga

SEQ ID NO: 80584 - DNA, 15 bp, Homo sapiens
ggcccattttcttag

SEQ ID NO: 80585 - DNA, 15 bp, Homo sapiens
aggcccattttctta

SEQ ID NO: 80586 - DNA, 15 bp, Homo sapiens
taggcccattttctt

SEQ ID NO: 80587 - DNA, 15 bp, Homo sapiens
ctaggcccattttct

SEQ ID NO: 80588 - DNA, 15 bp, Homo sapiens
tctaggcccattttc

SEQ ID NO: 80589 - DNA, 15 bp, Homo sapiens
atctaggcccatttt

SEQ ID NO: 80590 - DNA, 15 bp, Homo sapiens
catctaggcccattt

SEQ ID NO: 80591 - DNA, 15 bp, Homo sapiens
gcatctaggcccatt

SEQ ID NO: 80592 - DNA, 15 bp, Homo sapiens
agcatctaggcccat

SEQ ID NO: 80593 - DNA, 15 bp, Homo sapiens
gagcatctaggccca

SEQ ID NO: 80594 - DNA, 15 bp, Homo sapiens
tgagcatctaggccc

SEQ ID NO: 80595 - DNA, 15 bp, Homo sapiens
ctgagcatctaggcc

SEQ ID NO: 80596 - DNA, 15 bp, Homo sapiens
gctgagcatctaggc

SEQ ID NO: 80597 - DNA, 15 bp, Homo sapiens
agctgagcatctagg

SEQ ID NO: 80598 - DNA, 15 bp, Homo sapiens
tagctgagcatctag

SEQ ID NO: 80599 - DNA, 15 bp, Homo sapiens
gtagctgagcatcta

SEQ ID NO: 80600 - DNA, 15 bp, Homo sapiens
tgtagctgagcatct

SEQ ID NO: 80601 - DNA, 15 bp, Homo sapiens
atgtagctgagcatc

SEQ ID NO: 80602 - DNA, 15 bp, Homo sapiens
aatgtagctgagcat

SEQ ID NO: 80603 - DNA, 15 bp, Homo sapiens
taatgtagctgagca

SEQ ID NO: 80604 - DNA, 15 bp, Homo sapiens
ttaatgtagctgagc

SEQ ID NO: 80605 - DNA, 15 bp, Homo sapiens
gttaatgtagctgag

SEQ ID NO: 80606 - DNA, 15 bp, Homo sapiens
ggttaatgtagctga

SEQ ID NO: 80607 - DNA, 15 bp, Homo sapiens
tggttaatgtagctg

SEQ ID NO: 80608 - DNA, 15 bp, Homo sapiens
ttggttaatgtagct

SEQ ID NO: 80609 - DNA, 15 bp, Homo sapiens
tttggttaatgtagc

SEQ ID NO: 80610 - DNA, 15 bp, Homo sapiens
gtttggttaatgtag

SEQ ID NO: 80611 - DNA, 15 bp, Homo sapiens
tgtttggttaatgta

SEQ ID NO: 80612 - DNA, 15 bp, Homo sapiens
ttgtttggttaatgt

SEQ ID NO: 80613 - DNA, 15 bp, Homo sapiens
gttgtttggttaatg

SEQ ID NO: 80614 - DNA, 15 bp, Homo sapiens
tgttgtttggttaat

SEQ ID NO: 80615 - DNA, 15 bp, Homo sapiens
atgttgtttggttaa

SEQ ID NO: 80616 - DNA, 15 bp, Homo sapiens
catgttgtttggtta

SEQ ID NO: 80617 - DNA, 15 bp, Homo sapiens
acatgttgtttggtt

SEQ ID NO: 80618 - DNA, 15 bp, Homo sapiens
aacatgttgtttggt

SEQ ID NO: 80619 - DNA, 15 bp, Homo sapiens
caacatgttgtttgg

SEQ ID NO: 80620 - DNA, 15 bp, Homo sapiens
tcaacatgttgtttg

SEQ ID NO: 80621 - DNA, 15 bp, Homo sapiens
gtcaacatgttgttt

SEQ ID NO: 80622 - DNA, 15 bp, Homo sapiens
tgtcaacatgttgtt

SEQ ID NO: 80623 - DNA, 15 bp, Homo sapiens
gtgtcaacatgttgt

SEQ ID NO: 80624 - DNA, 15 bp, Homo sapiens
tgtgtcaacatgttg

SEQ ID NO: 80625 - DNA, 15 bp, Homo sapiens
ttgtgtcaacatgtt

SEQ ID NO: 80626 - DNA, 15 bp, Homo sapiens
tttgtgtcaacatgt

SEQ ID NO: 80627 - DNA, 15 bp, Homo sapiens
atttgtgtcaacatg

SEQ ID NO: 80628 - DNA, 15 bp, Homo sapiens
catttgtgtcaacat

SEQ ID NO: 80629 - DNA, 15 bp, Homo sapiens
tcatttgtgtcaaca

SEQ ID NO: 80630 - DNA, 15 bp, Homo sapiens
ttcatttgtgtcaac

SEQ ID NO: 80631 - DNA, 15 bp, Homo sapiens
attcatttgtgtcaa

SEQ ID NO: 80632 - DNA, 15 bp, Homo sapiens
gattcatttgtgtca

SEQ ID NO: 80633 - DNA, 15 bp, Homo sapiens
agattcatttgtgtc

SEQ ID NO: 80634 - DNA, 15 bp, Homo sapiens
cagattcatttgtgt

SEQ ID NO: 80635 - DNA, 15 bp, Homo sapiens
tcagattcatttgtg

SEQ ID NO: 80636 - DNA, 15 bp, Homo sapiens
ttcagattcatttgt

SEQ ID NO: 80637 - DNA, 15 bp, Homo sapiens
cttcagattcatttg

SEQ ID NO: 80638 - DNA, 15 bp, Homo sapiens
gcttcagattcattt

SEQ ID NO: 80639 - DNA, 15 bp, Homo sapiens
agcttcagattcatt

SEQ ID NO: 80640 - DNA, 15 bp, Homo sapiens
aagcttcagattcat

SEQ ID NO: 80641 - DNA, 15 bp, Homo sapiens
caagcttcagattca

SEQ ID NO: 80642 - DNA, 15 bp, Homo sapiens
gcaagcttcagattc

SEQ ID NO: 80643 - DNA, 15 bp, Homo sapiens
ggcaagcttcagatt

SEQ ID NO: 80644 - DNA, 15 bp, Homo sapiens
gggcaagcttcagat

SEQ ID NO: 80645 - DNA, 15 bp, Homo sapiens
cgggcaagcttcaga

SEQ ID NO: 80646 - DNA, 15 bp, Homo sapiens
gcgggcaagcttcag

SEQ ID NO: 80647 - DNA, 15 bp, Homo sapiens
agcgggcaagcttca

SEQ ID NO: 80648 - DNA, 15 bp, Homo sapiens
gagcgggcaagcttc

SEQ ID NO: 80649 - DNA, 15 bp, Homo sapiens
ggagcgggcaagctt

SEQ ID NO: 80650 - DNA, 15 bp, Homo sapiens
tggagcgggcaagct

SEQ ID NO: 80651 - DNA, 15 bp, Homo sapiens
ctggagcgggcaagc

SEQ ID NO: 80652 - DNA, 15 bp, Homo sapiens
cctggagcgggcaag

SEQ ID NO: 80653 - DNA, 15 bp, Homo sapiens
gcctggagcgggcaa

SEQ ID NO: 80654 - DNA, 15 bp, Homo sapiens
agcctggagcgggca

SEQ ID NO: 80655 - DNA, 15 bp, Homo sapiens
gagcctggagcgggc

SEQ ID NO: 80656 - DNA, 15 bp, Homo sapiens
agagcctggagcggg

SEQ ID NO: 80657 - DNA, 15 bp, Homo sapiens
gagagcctggagcgg

SEQ ID NO: 80658 - DNA, 15 bp, Homo sapiens
agagagcctggagcg

SEQ ID NO: 80659 - DNA, 15 bp, Homo sapiens
tagagagcctggagc

SEQ ID NO: 80660 - DNA, 15 bp, Homo sapiens
ctagagagcctggag

SEQ ID NO: 80661 - DNA, 15 bp, Homo sapiens
tctagagagcctgga

SEQ ID NO: 80662 - DNA, 15 bp, Homo sapiens
ttctagagagcctgg

SEQ ID NO: 80663 - DNA, 15 bp, Homo sapiens
cttctagagagcctg

SEQ ID NO: 80664 - DNA, 15 bp, Homo sapiens
ccttctagagagcct

SEQ ID NO: 80665 - DNA, 15 bp, Homo sapiens
accttctagagagcc

SEQ ID NO: 80666 - DNA, 15 bp, Homo sapiens
gaccttctagagagc

SEQ ID NO: 80667 - DNA, 15 bp, Homo sapiens
tgaccttctagagag

SEQ ID NO: 80668 - DNA, 15 bp, Homo sapiens
ctgaccttctagaga

SEQ ID NO: 80669 - DNA, 15 bp, Homo sapiens
cctgaccttctagag

SEQ ID NO: 80670 - DNA, 15 bp, Homo sapiens
acctgaccttctaga

SEQ ID NO: 80671 - DNA, 15 bp, Homo sapiens
aacctgaccttctag

SEQ ID NO: 80672 - DNA, 15 bp, Homo sapiens
aaacctgaccttcta

SEQ ID NO: 80673 - DNA, 15 bp, Homo sapiens
caaacctgaccttct

SEQ ID NO: 80674 - DNA, 15 bp, Homo sapiens
ccaaacctgaccttc

SEQ ID NO: 80675 - DNA, 15 bp, Homo sapiens
cccaaacctgacctt

SEQ ID NO: 80676 - DNA, 15 bp, Homo sapiens
tcccaaacctgacct

SEQ ID NO: 80677 - DNA, 15 bp, Homo sapiens
ttcccaaacctgacc

SEQ ID NO: 80678 - DNA, 15 bp, Homo sapiens
attcccaaacctgac

SEQ ID NO: 80679 - DNA, 15 bp, Homo sapiens
cattcccaaacctga

SEQ ID NO: 80680 - DNA, 15 bp, Homo sapiens
tcattcccaaacctg

SEQ ID NO: 80681 - DNA, 15 bp, Homo sapiens
ttcattcccaaacct

SEQ ID NO: 80682 - DNA, 15 bp, Homo sapiens
cttcattcccaaacc

SEQ ID NO: 80683 - DNA, 15 bp, Homo sapiens
ccttcattcccaaac

SEQ ID NO: 80684 - DNA, 15 bp, Homo sapiens
gccttcattcccaaa

SEQ ID NO: 80685 - DNA, 15 bp, Homo sapiens
tgccttcattcccaa

SEQ ID NO: 80686 - DNA, 15 bp, Homo sapiens
atgccttcattccca

SEQ ID NO: 80687 - DNA, 15 bp, Homo sapiens
aatgccttcattccc

SEQ ID NO: 80688 - DNA, 15 bp, Homo sapiens
aaatgccttcattcc

SEQ ID NO: 80689 - DNA, 15 bp, Homo sapiens
caaatgccttcattc

SEQ ID NO: 80690 - DNA, 15 bp, Homo sapiens
ccaaatgccttcatt

SEQ ID NO: 80691 - DNA, 15 bp, Homo sapiens
cccaaatgccttcat

SEQ ID NO: 80692 - DNA, 15 bp, Homo sapiens
acccaaatgccttca

SEQ ID NO: 80693 - DNA, 15 bp, Homo sapiens
cacccaaatgccttc

SEQ ID NO: 80694 - DNA, 15 bp, Homo sapiens
tcacccaaatgcctt

SEQ ID NO: 80695 - DNA, 15 bp, Homo sapiens
gtcacccaaatgcct

SEQ ID NO: 80696 - DNA, 15 bp, Homo sapiens
agtcacccaaatgcc

SEQ ID NO: 80697 - DNA, 15 bp, Homo sapiens
aagtcacccaaatgc

SEQ ID NO: 80698 - DNA, 15 bp, Homo sapiens
aaagtcacccaaatg

SEQ ID NO: 80699 - DNA, 15 bp, Homo sapiens
gaaagtcacccaaat

SEQ ID NO: 80700 - DNA, 15 bp, Homo sapiens
ggaaagtcacccaaa

SEQ ID NO: 80701 - DNA, 15 bp, Homo sapiens
tggaaagtcacccaa

SEQ ID NO: 80702 - DNA, 15 bp, Homo sapiens
ttggaaagtcaccca

SEQ ID NO: 80703 - DNA, 15 bp, Homo sapiens
tttggaaagtcaccc

SEQ ID NO: 80704 - DNA, 15 bp, Homo sapiens
gtttggaaagtcacc

SEQ ID NO: 80705 - DNA, 15 bp, Homo sapiens
agtttggaaagtcac

SEQ ID NO: 80706 - DNA, 15 bp, Homo sapiens
gagtttggaaagtca

SEQ ID NO: 80707 - DNA, 15 bp, Homo sapiens
agagtttggaaagtc

SEQ ID NO: 80708 - DNA, 15 bp, Homo sapiens
cagagtttggaaagt

SEQ ID NO: 80709 - DNA, 15 bp, Homo sapiens
tcagagtttggaaag

SEQ ID NO: 80710 - DNA, 15 bp, Homo sapiens
ttcagagtttggaaa

SEQ ID NO: 80711 - DNA, 15 bp, Homo sapiens
attcagagtttggaa

SEQ ID NO: 80712 - DNA, 15 bp, Homo sapiens
gattcagagtttgga

SEQ ID NO: 80713 - DNA, 15 bp, Homo sapiens
ggattcagagtttgg

SEQ ID NO: 80714 - DNA, 15 bp, Homo sapiens
gggattcagagtttg

SEQ ID NO: 80715 - DNA, 15 bp, Homo sapiens
tgggattcagagttt

SEQ ID NO: 80716 - DNA, 15 bp, Homo sapiens
ttgggattcagagtt

SEQ ID NO: 80717 - DNA, 15 bp, Homo sapiens
cttgggattcagagt

SEQ ID NO: 80718 - DNA, 15 bp, Homo sapiens
gcttgggattcagag

SEQ ID NO: 80719 - DNA, 15 bp, Homo sapiens
ggcttgggattcaga

SEQ ID NO: 80720 - DNA, 15 bp, Homo sapiens
gggcttgggattcag

SEQ ID NO: 80721 - DNA, 15 bp, Homo sapiens
tgggcttgggattca

SEQ ID NO: 80722 - DNA, 15 bp, Homo sapiens
ctgggcttgggattc

SEQ ID NO: 80723 - DNA, 15 bp, Homo sapiens
actgggcttgggatt

SEQ ID NO: 80724 - DNA, 15 bp, Homo sapiens
cactgggcttgggat

SEQ ID NO: 80725 - DNA, 15 bp, Homo sapiens
tcactgggcttggga

SEQ ID NO: 80726 - DNA, 15 bp, Homo sapiens
gtcactgggcttggg

SEQ ID NO: 80727 - DNA, 15 bp, Homo sapiens
agtcactgggcttgg

SEQ ID NO: 80728 - DNA, 15 bp, Homo sapiens
gagtcactgggcttg

SEQ ID NO: 80729 - DNA, 15 bp, Homo sapiens
tgagtcactgggctt

SEQ ID NO: 80730 - DNA, 15 bp, Homo sapiens
ctgagtcactgggct

SEQ ID NO: 80731 - DNA, 15 bp, Homo sapiens
cctgagtcactgggc

SEQ ID NO: 80732 - DNA, 15 bp, Homo sapiens
gcctgagtcactggg

SEQ ID NO: 80733 - DNA, 15 bp, Homo sapiens
ggcctgagtcactgg

SEQ ID NO: 80734 - DNA, 15 bp, Homo sapiens
tggcctgagtcactg

SEQ ID NO: 80735 - DNA, 15 bp, Homo sapiens
ctggcctgagtcact

SEQ ID NO: 80736 - DNA, 15 bp, Homo sapiens
cctggcctgagtcac

SEQ ID NO: 80737 - DNA, 15 bp, Homo sapiens
acctggcctgagtca

SEQ ID NO: 80738 - DNA, 15 bp, Homo sapiens
tacctggcctgagtc

SEQ ID NO: 80739 - DNA, 15 bp, Homo sapiens
atacctggcctgagt

SEQ ID NO: 80740 - DNA, 15 bp, Homo sapiens
aatacctggcctgag

SEQ ID NO: 80741 - DNA, 15 bp, Homo sapiens
taatacctggcctga

SEQ ID NO: 80742 - DNA, 15 bp, Homo sapiens
ttaatacctggcctg

SEQ ID NO: 80743 - DNA, 15 bp, Homo sapiens
attaatacctggcct

SEQ ID NO: 80744 - DNA, 15 bp, Homo sapiens
aattaatacctggcc

SEQ ID NO: 80745 - DNA, 15 bp, Homo sapiens
aaattaatacctggc

SEQ ID NO: 80746 - DNA, 15 bp, Homo sapiens
caaattaatacctgg

SEQ ID NO: 80747 - DNA, 15 bp, Homo sapiens
tcaaattaatacctg

SEQ ID NO: 80748 - DNA, 15 bp, Homo sapiens
ctcaaattaatacct

SEQ ID NO: 80749 - DNA, 15 bp, Homo sapiens
cctcaaattaatacc

SEQ ID NO: 80750 - DNA, 15 bp, Homo sapiens
ccctcaaattaatac

SEQ ID NO: 80751 - DNA, 15 bp, Homo sapiens
tccctcaaattaata

SEQ ID NO: 80752 - DNA, 15 bp, Homo sapiens
atccctcaaattaat

SEQ ID NO: 80753 - DNA, 15 bp, Homo sapiens
gatccctcaaattaa

SEQ ID NO: 80754 - DNA, 15 bp, Homo sapiens
agatccctcaaatta

SEQ ID NO: 80755 - DNA, 15 bp, Homo sapiens
cagatccctcaaatt

SEQ ID NO: 80756 - DNA, 15 bp, Homo sapiens
gcagatccctcaaat

SEQ ID NO: 80757 - DNA, 15 bp, Homo sapiens
agcagatccctcaaa

SEQ ID NO: 80758 - DNA, 15 bp, Homo sapiens
aagcagatccctcaa

SEQ ID NO: 80759 - DNA, 15 bp, Homo sapiens
gaagcagatccctca

SEQ ID NO: 80760 - DNA, 15 bp, Homo sapiens
ggaagcagatccctc

SEQ ID NO: 80761 - DNA, 15 bp, Homo sapiens
gggaagcagatccct

SEQ ID NO: 80762 - DNA, 15 bp, Homo sapiens
agggaagcagatccc

SEQ ID NO: 80763 - DNA, 15 bp, Homo sapiens
gagggaagcagatcc

SEQ ID NO: 80764 - DNA, 15 bp, Homo sapiens
ggagggaagcagatc

SEQ ID NO: 80765 - DNA, 15 bp, Homo sapiens
aggagggaagcagat

SEQ ID NO: 80766 - DNA, 15 bp, Homo sapiens
gaggagggaagcaga

SEQ ID NO: 80767 - DNA, 15 bp, Homo sapiens
agaggagggaagcag

SEQ ID NO: 80768 - DNA, 15 bp, Homo sapiens
aagaggagggaagca

SEQ ID NO: 80769 - DNA, 15 bp, Homo sapiens
gaagaggagggaagc

SEQ ID NO: 80770 - DNA, 15 bp, Homo sapiens
ggaagaggagggaag

SEQ ID NO: 80771 - DNA, 15 bp, Homo sapiens
aggaagaggagggaa

SEQ ID NO: 80772 - DNA, 15 bp, Homo sapiens
caggaagaggaggga

SEQ ID NO: 80773 - DNA, 15 bp, Homo sapiens
gcaggaagaggaggg

SEQ ID NO: 80774 - DNA, 15 bp, Homo sapiens
ggcaggaagaggagg

SEQ ID NO: 80775 - DNA, 15 bp, Homo sapiens
aggcaggaagaggag

SEQ ID NO: 80776 - DNA, 15 bp, Homo sapiens
taggcaggaagagga

SEQ ID NO: 80777 - DNA, 15 bp, Homo sapiens
ttaggcaggaagagg

SEQ ID NO: 80778 - DNA, 15 bp, Homo sapiens
cttaggcaggaagag

SEQ ID NO: 80779 - DNA, 15 bp, Homo sapiens
tcttaggcaggaaga

SEQ ID NO: 80780 - DNA, 15 bp, Homo sapiens
ttcttaggcaggaag

SEQ ID NO: 80781 - DNA, 15 bp, Homo sapiens
cttcttaggcaggaa

SEQ ID NO: 80782 - DNA, 15 bp, Homo sapiens
ccttcttaggcagga

SEQ ID NO: 80783 - DNA, 15 bp, Homo sapiens
gccttcttaggcagg

SEQ ID NO: 80784 - DNA, 15 bp, Homo sapiens
ggccttcttaggcag

SEQ ID NO: 80785 - DNA, 15 bp, Homo sapiens
gggccttcttaggca

SEQ ID NO: 80786 - DNA, 15 bp, Homo sapiens
ggggccttcttaggc

SEQ ID NO: 80787 - DNA, 15 bp, Homo sapiens
tggggccttcttagg

SEQ ID NO: 80788 - DNA, 15 bp, Homo sapiens
gtggggccttcttag

SEQ ID NO: 80789 - DNA, 15 bp, Homo sapiens
agtggggccttctta

SEQ ID NO: 80790 - DNA, 15 bp, Homo sapiens
tagtggggccttctt

SEQ ID NO: 80791 - DNA, 15 bp, Homo sapiens
ttagtggggccttct

SEQ ID NO: 80792 - DNA, 15 bp, Homo sapiens
cttagtggggccttc

SEQ ID NO: 80793 - DNA, 15 bp, Homo sapiens
acttagtggggcctt

SEQ ID NO: 80794 - DNA, 15 bp, Homo sapiens
cacttagtggggcct

SEQ ID NO: 80795 - DNA, 15 bp, Homo sapiens
ccacttagtggggcc

SEQ ID NO: 80796 - DNA, 15 bp, Homo sapiens
gccacttagtggggc

SEQ ID NO: 80797 - DNA, 15 bp, Homo sapiens
agccacttagtgggg

SEQ ID NO: 80798 - DNA, 15 bp, Homo sapiens
tagccacttagtggg

SEQ ID NO: 80799 - DNA, 15 bp, Homo sapiens
ctagccacttagtgg

SEQ ID NO: 80800 - DNA, 15 bp, Homo sapiens
tctagccacttagtg

SEQ ID NO: 80801 - DNA, 15 bp, Homo sapiens
ctctagccacttagt

SEQ ID NO: 80802 - DNA, 15 bp, Homo sapiens
actctagccacttag

SEQ ID NO: 80803 - DNA, 15 bp, Homo sapiens
gactctagccactta

SEQ ID NO: 80804 - DNA, 15 bp, Homo sapiens
tgactctagccactt

SEQ ID NO: 80805 - DNA, 15 bp, Homo sapiens
ctgactctagccact

SEQ ID NO: 80806 - DNA, 15 bp, Homo sapiens
tctgactctagccac

SEQ ID NO: 80807 - DNA, 15 bp, Homo sapiens
ctctgactctagcca

SEQ ID NO: 80808 - DNA, 15 bp, Homo sapiens
cctctgactctagcc

SEQ ID NO: 80809 - DNA, 15 bp, Homo sapiens
gcctctgactctagc

SEQ ID NO: 80810 - DNA, 15 bp, Homo sapiens
agcctctgactctag

SEQ ID NO: 80811 - DNA, 15 bp, Homo sapiens
gagcctctgactcta

SEQ ID NO: 80812 - DNA, 15 bp, Homo sapiens
ggagcctctgactct

SEQ ID NO: 80813 - DNA, 15 bp, Homo sapiens
gggagcctctgactc

SEQ ID NO: 80814 - DNA, 15 bp, Homo sapiens
agggagcctctgact

SEQ ID NO: 80815 - DNA, 15 bp, Homo sapiens
cagggagcctctgac

SEQ ID NO: 80816 - DNA, 15 bp, Homo sapiens
ccagggagcctctga

SEQ ID NO: 80817 - DNA, 15 bp, Homo sapiens
accagggagcctctg

SEQ ID NO: 80818 - DNA, 15 bp, Homo sapiens
gaccagggagcctct

SEQ ID NO: 80819 - DNA, 15 bp, Homo sapiens
tgaccagggagcctc

SEQ ID NO: 80820 - DNA, 15 bp, Homo sapiens
atgaccagggagcct

SEQ ID NO: 80821 - DNA, 15 bp, Homo sapiens
gatgaccagggagcc

SEQ ID NO: 80822 - DNA, 15 bp, Homo sapiens
agatgaccagggagc

SEQ ID NO: 80823 - DNA, 15 bp, Homo sapiens
aagatgaccagggag

SEQ ID NO: 80824 - DNA, 15 bp, Homo sapiens
caagatgaccaggga

SEQ ID NO: 80825 - DNA, 15 bp, Homo sapiens
tcaagatgaccaggg

SEQ ID NO: 80826 - DNA, 15 bp, Homo sapiens
ctcaagatgaccagg

SEQ ID NO: 80827 - DNA, 15 bp, Homo sapiens
actcaagatgaccag

SEQ ID NO: 80828 - DNA, 15 bp, Homo sapiens
tactcaagatgacca

SEQ ID NO: 80829 - DNA, 15 bp, Homo sapiens
ctactcaagatgacc

SEQ ID NO: 80830 - DNA, 15 bp, Homo sapiens
actactcaagatgac

SEQ ID NO: 80831 - DNA, 15 bp, Homo sapiens
cactactcaagatga

SEQ ID NO: 80832 - DNA, 15 bp, Homo sapiens
ccactactcaagatg

SEQ ID NO: 80833 - DNA, 15 bp, Homo sapiens
cccactactcaagat

SEQ ID NO: 80834 - DNA, 15 bp, Homo sapiens
tcccactactcaaga

SEQ ID NO: 80835 - DNA, 15 bp, Homo sapiens
ttcccactactcaag

SEQ ID NO: 80836 - DNA, 15 bp, Homo sapiens
attcccactactcaa

SEQ ID NO: 80837 - DNA, 15 bp, Homo sapiens
cattcccactactca

SEQ ID NO: 80838 - DNA, 15 bp, Homo sapiens
gcattcccactactc

SEQ ID NO: 80839 - DNA, 15 bp, Homo sapiens
agcattcccactact

SEQ ID NO: 80840 - DNA, 15 bp, Homo sapiens
aagcattcccactac

SEQ ID NO: 80841 - DNA, 15 bp, Homo sapiens
gaagcattcccacta

SEQ ID NO: 80842 - DNA, 15 bp, Homo sapiens
agaagcattcccact

SEQ ID NO: 80843 - DNA, 15 bp, Homo sapiens
gagaagcattcccac

SEQ ID NO: 80844 - DNA, 15 bp, Homo sapiens
ggagaagcattccca

SEQ ID NO: 80845 - DNA, 15 bp, Homo sapiens
aggagaagcattccc

SEQ ID NO: 80846 - DNA, 15 bp, Homo sapiens
caggagaagcattcc

SEQ ID NO: 80847 - DNA, 15 bp, Homo sapiens
acaggagaagcattc

SEQ ID NO: 80848 - DNA, 15 bp, Homo sapiens
gacaggagaagcatt

SEQ ID NO: 80849 - DNA, 15 bp, Homo sapiens
agacaggagaagcat

SEQ ID NO: 80850 - DNA, 15 bp, Homo sapiens
cagacaggagaagca

SEQ ID NO: 80851 - DNA, 15 bp, Homo sapiens
acagacaggagaagc

SEQ ID NO: 80852 - DNA, 15 bp, Homo sapiens
gacagacaggagaag

SEQ ID NO: 80853 - DNA, 15 bp, Homo sapiens
agacagacaggagaa

SEQ ID NO: 80854 - DNA, 15 bp, Homo sapiens
cagacagacaggaga

SEQ ID NO: 80855 - DNA, 15 bp, Homo sapiens
gcagacagacaggag

SEQ ID NO: 80856 - DNA, 15 bp, Homo sapiens
tgcagacagacagga

SEQ ID NO: 80857 - DNA, 15 bp, Homo sapiens
ctgcagacagacagg

SEQ ID NO: 80858 - DNA, 15 bp, Homo sapiens
gctgcagacagacag

SEQ ID NO: 80859 - DNA, 15 bp, Homo sapiens
agctgcagacagaca

SEQ ID NO: 80860 - DNA, 15 bp, Homo sapiens
cagctgcagacagac

SEQ ID NO: 80861 - DNA, 15 bp, Homo sapiens
ccagctgcagacaga

SEQ ID NO: 80862 - DNA, 15 bp, Homo sapiens
accagctgcagacag

SEQ ID NO: 80863 - DNA, 15 bp, Homo sapiens
gaccagctgcagaca

SEQ ID NO: 80864 - DNA, 15 bp, Homo sapiens
agaccagctgcagac

SEQ ID NO: 80865 - DNA, 15 bp, Homo sapiens
aagaccagctgcaga

SEQ ID NO: 80866 - DNA, 15 bp, Homo sapiens
taagaccagctgcag

SEQ ID NO: 80867 - DNA, 15 bp, Homo sapiens
ctaagaccagctgca

SEQ ID NO: 80868 - DNA, 15 bp, Homo sapiens
tctaagaccagctgc

SEQ ID NO: 80869 - DNA, 15 bp, Homo sapiens
ctctaagaccagctg

SEQ ID NO: 80870 - DNA, 15 bp, Homo sapiens
cctctaagaccagct

SEQ ID NO: 80871 - DNA, 15 bp, Homo sapiens
ccctctaagaccagc

SEQ ID NO: 80872 - DNA, 15 bp, Homo sapiens
tccctctaagaccag

SEQ ID NO: 80873 - DNA, 15 bp, Homo sapiens
ctccctctaagacca

SEQ ID NO: 80874 - DNA, 15 bp, Homo sapiens
cctccctctaagacc

SEQ ID NO: 80875 - DNA, 15 bp, Homo sapiens
gcctccctctaagac

SEQ ID NO: 80876 - DNA, 15 bp, Homo sapiens
tgcctccctctaaga

SEQ ID NO: 80877 - DNA, 15 bp, Homo sapiens
ctgcctccctctaag

SEQ ID NO: 80878 - DNA, 15 bp, Homo sapiens
gctgcctccctctaa

SEQ ID NO: 80879 - DNA, 15 bp, Homo sapiens
ggctgcctccctcta

SEQ ID NO: 80880 - DNA, 15 bp, Homo sapiens
gggctgcctccctct

SEQ ID NO: 80881 - DNA, 15 bp, Homo sapiens
tgggctgcctccctc

SEQ ID NO: 80882 - DNA, 15 bp, Homo sapiens
ctgggctgcctccct

SEQ ID NO: 80883 - DNA, 15 bp, Homo sapiens
cctgggctgcctccc

SEQ ID NO: 80884 - DNA, 15 bp, Homo sapiens
acctgggctgcctcc

SEQ ID NO: 80885 - DNA, 15 bp, Homo sapiens
tacctgggctgcctc

SEQ ID NO: 80886 - DNA, 15 bp, Homo sapiens
ctacctgggctgcct

SEQ ID NO: 80887 - DNA, 15 bp, Homo sapiens
actacctgggctgcc

SEQ ID NO: 80888 - DNA, 15 bp, Homo sapiens
tactacctgggctgc

SEQ ID NO: 80889 - DNA, 15 bp, Homo sapiens
atactacctgggctg

SEQ ID NO: 80890 - DNA, 15 bp, Homo sapiens
catactacctgggct

SEQ ID NO: 80891 - DNA, 15 bp, Homo sapiens
ccatactacctgggc

SEQ ID NO: 80892 - DNA, 15 bp, Homo sapiens
accatactacctggg

SEQ ID NO: 80893 - DNA, 15 bp, Homo sapiens
taccatactacctgg

SEQ ID NO: 80894 - DNA, 15 bp, Homo sapiens
ctaccatactacctg

SEQ ID NO: 80895 - DNA, 15 bp, Homo sapiens
cctaccatactacct

SEQ ID NO: 80896 - DNA, 15 bp, Homo sapiens
tcctaccatactacc

SEQ ID NO: 80897 - DNA, 15 bp, Homo sapiens
atcctaccatactac

SEQ ID NO: 80898 - DNA, 15 bp, Homo sapiens
catcctaccatacta

SEQ ID NO: 80899 - DNA, 15 bp, Homo sapiens
gcatcctaccatact

SEQ ID NO: 80900 - DNA, 15 bp, Homo sapiens
agcatcctaccatac

SEQ ID NO: 80901 - DNA, 15 bp, Homo sapiens
gagcatcctaccata

SEQ ID NO: 80902 - DNA, 15 bp, Homo sapiens
ggagcatcctaccat

SEQ ID NO: 80903 - DNA, 15 bp, Homo sapiens
tggagcatcctacca

SEQ ID NO: 80904 - DNA, 15 bp, Homo sapiens
ttggagcatcctacc

SEQ ID NO: 80905 - DNA, 15 bp, Homo sapiens
tttggagcatcctac

SEQ ID NO: 80906 - DNA, 15 bp, Homo sapiens
ttttggagcatccta

SEQ ID NO: 80907 - DNA, 15 bp, Homo sapiens
cttttggagcatcct

SEQ ID NO: 80908 - DNA, 15 bp, Homo sapiens
tcttttggagcatcc

SEQ ID NO: 80909 - DNA, 15 bp, Homo sapiens
gtcttttggagcatc

SEQ ID NO: 80910 - DNA, 15 bp, Homo sapiens
ggtcttttggagcat

SEQ ID NO: 80911 - DNA, 15 bp, Homo sapiens
gggtcttttggagca

SEQ ID NO: 80912 - DNA, 15 bp, Homo sapiens
tgggtcttttggagc

SEQ ID NO: 80913 - DNA, 15 bp, Homo sapiens
gtgggtcttttggag

SEQ ID NO: 80914 - DNA, 15 bp, Homo sapiens
ggtgggtcttttgga

SEQ ID NO: 80915 - DNA, 15 bp, Homo sapiens
gggtgggtcttttgg

SEQ ID NO: 80916 - DNA, 15 bp, Homo sapiens
ggggtgggtcttttg

SEQ ID NO: 80917 - DNA, 15 bp, Homo sapiens
cggggtgggtctttt

SEQ ID NO: 80918 - DNA, 15 bp, Homo sapiens
gcggggtgggtcttt

SEQ ID NO: 80919 - DNA, 15 bp, Homo sapiens
tgcggggtgggtctt

SEQ ID NO: 80920 - DNA, 15 bp, Homo sapiens
ctgcggggtgggtct

SEQ ID NO: 80921 - DNA, 15 bp, Homo sapiens
tctgcggggtgggtc

SEQ ID NO: 80922 - DNA, 15 bp, Homo sapiens
ttctgcggggtgggt

SEQ ID NO: 80923 - DNA, 15 bp, Homo sapiens
tttctgcggggtggg

SEQ ID NO: 80924 - DNA, 15 bp, Homo sapiens
gtttctgcggggtgg

SEQ ID NO: 80925 - DNA, 15 bp, Homo sapiens
ggtttctgcggggtg

SEQ ID NO: 80926 - DNA, 15 bp, Homo sapiens
aggtttctgcggggt

SEQ ID NO: 80927 - DNA, 15 bp, Homo sapiens
gaggtttctgcgggg

SEQ ID NO: 80928 - DNA, 15 bp, Homo sapiens
ggaggtttctgcggg

SEQ ID NO: 80929 - DNA, 15 bp, Homo sapiens
tggaggtttctgcgg

SEQ ID NO: 80930 - DNA, 15 bp, Homo sapiens
atggaggtttctgcg

SEQ ID NO: 80931 - DNA, 15 bp, Homo sapiens
gatggaggtttctgc

SEQ ID NO: 80932 - DNA, 15 bp, Homo sapiens
tgatggaggtttctg

SEQ ID NO: 80933 - DNA, 15 bp, Homo sapiens
gtgatggaggtttct

SEQ ID NO: 80934 - DNA, 15 bp, Homo sapiens
cgtgatggaggtttc

SEQ ID NO: 80935 - DNA, 15 bp, Homo sapiens
acgtgatggaggttt

SEQ ID NO: 80936 - DNA, 15 bp, Homo sapiens
aacgtgatggaggtt

SEQ ID NO: 80937 - DNA, 15 bp, Homo sapiens
aaacgtgatggaggt

SEQ ID NO: 80938 - DNA, 15 bp, Homo sapiens
gaaacgtgatggagg

SEQ ID NO: 80939 - DNA, 15 bp, Homo sapiens
agaaacgtgatggag

SEQ ID NO: 80940 - DNA, 15 bp, Homo sapiens
cagaaacgtgatgga

SEQ ID NO: 80941 - DNA, 15 bp, Homo sapiens
acagaaacgtgatgg

SEQ ID NO: 80942 - DNA, 15 bp, Homo sapiens
gacagaaacgtgatg

SEQ ID NO: 80943 - DNA, 15 bp, Homo sapiens
agacagaaacgtgat

SEQ ID NO: 80944 - DNA, 15 bp, Homo sapiens
cagacagaaacgtga

SEQ ID NO: 80945 - DNA, 15 bp, Homo sapiens
gcagacagaaacgtg

SEQ ID NO: 80946 - DNA, 15 bp, Homo sapiens
ggcagacagaaacgt

SEQ ID NO: 80947 - DNA, 15 bp, Homo sapiens
aggcagacagaaacg

SEQ ID NO: 80948 - DNA, 15 bp, Homo sapiens
caggcagacagaaac

SEQ ID NO: 80949 - DNA, 15 bp, Homo sapiens
tcaggcagacagaaa

SEQ ID NO: 80950 - DNA, 15 bp, Homo sapiens
ttcaggcagacagaa

SEQ ID NO: 80951 - DNA, 15 bp, Homo sapiens
tttcaggcagacaga

SEQ ID NO: 80952 - DNA, 15 bp, Homo sapiens
atttcaggcagacag

SEQ ID NO: 80953 - DNA, 15 bp, Homo sapiens
gatttcaggcagaca

SEQ ID NO: 80954 - DNA, 15 bp, Homo sapiens
ggatttcaggcagac

SEQ ID NO: 80955 - DNA, 15 bp, Homo sapiens
aggatttcaggcaga

SEQ ID NO: 80956 - DNA, 15 bp, Homo sapiens
aaggatttcaggcag

SEQ ID NO: 80957 - DNA, 15 bp, Homo sapiens
caaggatttcaggca

SEQ ID NO: 80958 - DNA, 15 bp, Homo sapiens
gcaaggatttcaggc

SEQ ID NO: 80959 - DNA, 15 bp, Homo sapiens
ggcaaggatttcagg

SEQ ID NO: 80960 - DNA, 15 bp, Homo sapiens
tggcaaggatttcag

SEQ ID NO: 80961 - DNA, 15 bp, Homo sapiens
atggcaaggatttca

SEQ ID NO: 80962 - DNA, 15 bp, Homo sapiens
catggcaaggatttc

SEQ ID NO: 80963 - DNA, 15 bp, Homo sapiens
ccatggcaaggattt

SEQ ID NO: 80964 - DNA, 15 bp, Homo sapiens
cccatggcaaggatt

SEQ ID NO: 80965 - DNA, 15 bp, Homo sapiens
acccatggcaaggat

SEQ ID NO: 80966 - DNA, 15 bp, Homo sapiens
aacccatggcaagga

SEQ ID NO: 80967 - DNA, 15 bp, Homo sapiens
gaacccatggcaagg

SEQ ID NO: 80968 - DNA, 15 bp, Homo sapiens
tgaacccatggcaag

SEQ ID NO: 80969 - DNA, 15 bp, Homo sapiens
gtgaacccatggcaa

SEQ ID NO: 80970 - DNA, 15 bp, Homo sapiens
agtgaacccatggca

SEQ ID NO: 80971 - DNA, 15 bp, Homo sapiens
gagtgaacccatggc

SEQ ID NO: 80972 - DNA, 15 bp, Homo sapiens
ggagtgaacccatgg

SEQ ID NO: 80973 - DNA, 15 bp, Homo sapiens
aggagtgaacccatg

SEQ ID NO: 80974 - DNA, 15 bp, Homo sapiens
aaggagtgaacccat

SEQ ID NO: 80975 - DNA, 15 bp, Homo sapiens
aaaggagtgaaccca

SEQ ID NO: 80976 - DNA, 15 bp, Homo sapiens
caaaggagtgaaccc

SEQ ID NO: 80977 - DNA, 15 bp, Homo sapiens
tcaaaggagtgaacc

SEQ ID NO: 80978 - DNA, 15 bp, Homo sapiens
ttcaaaggagtgaac

SEQ ID NO: 80979 - DNA, 15 bp, Homo sapiens
gttcaaaggagtgaa

SEQ ID NO: 80980 - DNA, 15 bp, Homo sapiens
cgttcaaaggagtga

SEQ ID NO: 80981 - DNA, 15 bp, Homo sapiens
acgttcaaaggagtg

SEQ ID NO: 80982 - DNA, 15 bp, Homo sapiens
gacgttcaaaggagt

SEQ ID NO: 80983 - DNA, 15 bp, Homo sapiens
ggacgttcaaaggag

SEQ ID NO: 80984 - DNA, 15 bp, Homo sapiens
tggacgttcaaagga

SEQ ID NO: 80985 - DNA, 15 bp, Homo sapiens
ctggacgttcaaagg

SEQ ID NO: 80986 - DNA, 15 bp, Homo sapiens
cctggacgttcaaag

SEQ ID NO: 80987 - DNA, 15 bp, Homo sapiens
tcctggacgttcaaa

SEQ ID NO: 80988 - DNA, 15 bp, Homo sapiens
ctcctggacgttcaa

SEQ ID NO: 80989 - DNA, 15 bp, Homo sapiens
cctcctggacgttca

SEQ ID NO: 80990 - DNA, 15 bp, Homo sapiens
acctcctggacgttc

SEQ ID NO: 80991 - DNA, 15 bp, Homo sapiens
aacctcctggacgtt

SEQ ID NO: 80992 - DNA, 15 bp, Homo sapiens
gaacctcctggacgt

SEQ ID NO: 80993 - DNA, 15 bp, Homo sapiens
tgaacctcctggacg

SEQ ID NO: 80994 - DNA, 15 bp, Homo sapiens
atgaacctcctggac

SEQ ID NO: 80995 - DNA, 15 bp, Homo sapiens
catgaacctcctgga

SEQ ID NO: 80996 - DNA, 15 bp, Homo sapiens
acatgaacctcctgg

SEQ ID NO: 80997 - DNA, 15 bp, Homo sapiens
tacatgaacctcctg

SEQ ID NO: 80998 - DNA, 15 bp, Homo sapiens
ttacatgaacctcct

SEQ ID NO: 80999 - DNA, 15 bp, Homo sapiens
tttacatgaacctcc

SEQ ID NO: 81000 - DNA, 15 bp, Homo sapiens
ttttacatgaacctc

SEQ ID NO: 81001 - DNA, 15 bp, Homo sapiens
tttttacatgaacct

SEQ ID NO: 81002 - DNA, 15 bp, Homo sapiens
atttttacatgaacc

SEQ ID NO: 81003 - DNA, 15 bp, Homo sapiens
catttttacatgaac

SEQ ID NO: 81004 - DNA, 15 bp, Homo sapiens
acatttttacatgaa

SEQ ID NO: 81005 - DNA, 15 bp, Homo sapiens
tacatttttacatga

SEQ ID NO: 81006 - DNA, 15 bp, Homo sapiens
ttacatttttacatg

SEQ ID NO: 81007 - DNA, 15 bp, Homo sapiens
tttacatttttacat

SEQ ID NO: 81008 - DNA, 15 bp, Homo sapiens
ttttacatttttaca

SEQ ID NO: 81009 - DNA, 15 bp, Homo sapiens
cttttacatttttac

SEQ ID NO: 81010 - DNA, 15 bp, Homo sapiens
acttttacattttta

SEQ ID NO: 81011 - DNA, 15 bp, Homo sapiens
aacttttacattttt

SEQ ID NO: 81012 - DNA, 15 bp, Homo sapiens
taacttttacatttt

SEQ ID NO: 81013 - DNA, 15 bp, Homo sapiens
gtaacttttacattt

SEQ ID NO: 81014 - DNA, 15 bp, Homo sapiens
ggtaacttttacatt

SEQ ID NO: 81015 - DNA, 15 bp, Homo sapiens
gggtaacttttacat

SEQ ID NO: 81016 - DNA, 15 bp, Homo sapiens
ggggtaacttttaca

SEQ ID NO: 81017 - DNA, 15 bp, Homo sapiens
gggggtaacttttac

SEQ ID NO: 81018 - DNA, 15 bp, Homo sapiens
agggggtaactttta

SEQ ID NO: 81019 - DNA, 15 bp, Homo sapiens
cagggggtaactttt

SEQ ID NO: 81020 - DNA, 15 bp, Homo sapiens
tcagggggtaacttt

SEQ ID NO: 81021 - DNA, 15 bp, Homo sapiens
gtcagggggtaactt

SEQ ID NO: 81022 - DNA, 15 bp, Homo sapiens
cgtcagggggtaact

SEQ ID NO: 81023 - DNA, 15 bp, Homo sapiens
acgtcagggggtaac

SEQ ID NO: 81024 - DNA, 15 bp, Homo sapiens
cacgtcagggggtaa

SEQ ID NO: 81025 - DNA, 15 bp, Homo sapiens
tcacgtcagggggta

SEQ ID NO: 81026 - DNA, 15 bp, Homo sapiens
gtcacgtcagggggt

SEQ ID NO: 81027 - DNA, 15 bp, Homo sapiens
agtcacgtcaggggg

SEQ ID NO: 81028 - DNA, 15 bp, Homo sapiens
aagtcacgtcagggg

SEQ ID NO: 81029 - DNA, 15 bp, Homo sapiens
taagtcacgtcaggg

SEQ ID NO: 81030 - DNA, 15 bp, Homo sapiens
ttaagtcacgtcagg

SEQ ID NO: 81031 - DNA, 15 bp, Homo sapiens
gttaagtcacgtcag

SEQ ID NO: 81032 - DNA, 15 bp, Homo sapiens
ggttaagtcacgtca

SEQ ID NO: 81033 - DNA, 15 bp, Homo sapiens
tggttaagtcacgtc

SEQ ID NO: 81034 - DNA, 15 bp, Homo sapiens
atggttaagtcacgt

SEQ ID NO: 81035 - DNA, 15 bp, Homo sapiens
tatggttaagtcacg

SEQ ID NO: 81036 - DNA, 15 bp, Homo sapiens
atatggttaagtcac

SEQ ID NO: 81037 - DNA, 15 bp, Homo sapiens
catatggttaagtca

SEQ ID NO: 81038 - DNA, 15 bp, Homo sapiens
tcatatggttaagtc

SEQ ID NO: 81039 - DNA, 15 bp, Homo sapiens
gtcatatggttaagt

SEQ ID NO: 81040 - DNA, 15 bp, Homo sapiens
tgtcatatggttaag

SEQ ID NO: 81041 - DNA, 15 bp, Homo sapiens
atgtcatatggttaa

SEQ ID NO: 81042 - DNA, 15 bp, Homo sapiens
aatgtcatatggtta

SEQ ID NO: 81043 - DNA, 15 bp, Homo sapiens
aaatgtcatatggtt

SEQ ID NO: 81044 - DNA, 15 bp, Homo sapiens
caaatgtcatatggt

SEQ ID NO: 81045 - DNA, 15 bp, Homo sapiens
tcaaatgtcatatgg

SEQ ID NO: 81046 - DNA, 15 bp, Homo sapiens
gtcaaatgtcatatg

SEQ ID NO: 81047 - DNA, 15 bp, Homo sapiens
tgtcaaatgtcatat

SEQ ID NO: 81048 - DNA, 15 bp, Homo sapiens
gtgtcaaatgtcata

SEQ ID NO: 81049 - DNA, 15 bp, Homo sapiens
tgtgtcaaatgtcat

SEQ ID NO: 81050 - DNA, 15 bp, Homo sapiens
gtgtgtcaaatgtca

SEQ ID NO: 81051 - DNA, 15 bp, Homo sapiens
cgtgtgtcaaatgtc

SEQ ID NO: 81052 - DNA, 15 bp, Homo sapiens
tcgtgtgtcaaatgt

SEQ ID NO: 81053 - DNA, 15 bp, Homo sapiens
gtcgtgtgtcaaatg

SEQ ID NO: 81054 - DNA, 15 bp, Homo sapiens
agtcgtgtgtcaaat

SEQ ID NO: 81055 - DNA, 15 bp, Homo sapiens
tagtcgtgtgtcaaa

SEQ ID NO: 81056 - DNA, 15 bp, Homo sapiens
atagtcgtgtgtcaa

SEQ ID NO: 81057 - DNA, 15 bp, Homo sapiens
tatagtcgtgtgtca

SEQ ID NO: 81058 - DNA, 15 bp, Homo sapiens
atatagtcgtgtgtc

SEQ ID NO: 81059 - DNA, 15 bp, Homo sapiens
catatagtcgtgtgt

SEQ ID NO: 81060 - DNA, 15 bp, Homo sapiens
tcatatagtcgtgtg

SEQ ID NO: 81061 - DNA, 15 bp, Homo sapiens
gtcatatagtcgtgt

SEQ ID NO: 81062 - DNA, 15 bp, Homo sapiens
tgtcatatagtcgtg

SEQ ID NO: 81063 - DNA, 15 bp, Homo sapiens
atgtcatatagtcgt

SEQ ID NO: 81064 - DNA, 15 bp, Homo sapiens
aatgtcatatagtcg

SEQ ID NO: 81065 - DNA, 15 bp, Homo sapiens
aaatgtcatatagtc

SEQ ID NO: 81066 - DNA, 15 bp, Homo sapiens
taaatgtcatatagt

SEQ ID NO: 81067 - DNA, 15 bp, Homo sapiens
gtaaatgtcatatag

SEQ ID NO: 81068 - DNA, 15 bp, Homo sapiens
agtaaatgtcatata

SEQ ID NO: 81069 - DNA, 15 bp, Homo sapiens
tagtaaatgtcatat

SEQ ID NO: 81070 - DNA, 15 bp, Homo sapiens
atagtaaatgtcata

SEQ ID NO: 81071 - DNA, 15 bp, Homo sapiens
tatagtaaatgtcat

SEQ ID NO: 81072 - DNA, 15 bp, Homo sapiens
atatagtaaatgtca

SEQ ID NO: 81073 - DNA, 15 bp, Homo sapiens
catatagtaaatgtc

SEQ ID NO: 81074 - DNA, 15 bp, Homo sapiens
ccatatagtaaatgt

SEQ ID NO: 81075 - DNA, 15 bp, Homo sapiens
gccatatagtaaatg

SEQ ID NO: 81076 - DNA, 15 bp, Homo sapiens
agccatatagtaaat

SEQ ID NO: 81077 - DNA, 15 bp, Homo sapiens
cagccatatagtaaa

SEQ ID NO: 81078 - DNA, 15 bp, Homo sapiens
tcagccatatagtaa

SEQ ID NO: 81079 - DNA, 15 bp, Homo sapiens
ctcagccatatagta

SEQ ID NO: 81080 - DNA, 15 bp, Homo sapiens
gctcagccatatagt

SEQ ID NO: 81081 - DNA, 15 bp, Homo sapiens
ggctcagccatatag

SEQ ID NO: 81082 - DNA, 15 bp, Homo sapiens
aggctcagccatata

SEQ ID NO: 81083 - DNA, 15 bp, Homo sapiens
taggctcagccatat

SEQ ID NO: 81084 - DNA, 15 bp, Homo sapiens
ctaggctcagccata

SEQ ID NO: 81085 - DNA, 15 bp, Homo sapiens
gctaggctcagccat

SEQ ID NO: 81086 - DNA, 15 bp, Homo sapiens
tgctaggctcagcca

SEQ ID NO: 81087 - DNA, 15 bp, Homo sapiens
ttgctaggctcagcc

SEQ ID NO: 81088 - DNA, 15 bp, Homo sapiens
cttgctaggctcagc

SEQ ID NO: 81089 - DNA, 15 bp, Homo sapiens
ccttgctaggctcag

SEQ ID NO: 81090 - DNA, 15 bp, Homo sapiens
accttgctaggctca

SEQ ID NO: 81091 - DNA, 15 bp, Homo sapiens
gaccttgctaggctc

SEQ ID NO: 81092 - DNA, 15 bp, Homo sapiens
ggaccttgctaggct

SEQ ID NO: 81093 - DNA, 15 bp, Homo sapiens
aggaccttgctaggc

SEQ ID NO: 81094 - DNA, 15 bp, Homo sapiens
caggaccttgctagg

SEQ ID NO: 81095 - DNA, 15 bp, Homo sapiens
ccaggaccttgctag

SEQ ID NO: 81096 - DNA, 15 bp, Homo sapiens
cccaggaccttgcta

SEQ ID NO: 81097 - DNA, 15 bp, Homo sapiens
tcccaggaccttgct

SEQ ID NO: 81098 - DNA, 15 bp, Homo sapiens
ttcccaggaccttgc

SEQ ID NO: 81099 - DNA, 15 bp, Homo sapiens
attcccaggaccttg

SEQ ID NO: 81100 - DNA, 15 bp, Homo sapiens
tattcccaggacctt

SEQ ID NO: 81101 - DNA, 15 bp, Homo sapiens
atattcccaggacct

SEQ ID NO: 81102 - DNA, 15 bp, Homo sapiens
catattcccaggacc

SEQ ID NO: 81103 - DNA, 15 bp, Homo sapiens
ccatattcccaggac

SEQ ID NO: 81104 - DNA, 15 bp, Homo sapiens
tccatattcccagga

SEQ ID NO: 81105 - DNA, 15 bp, Homo sapiens
ttccatattcccagg

SEQ ID NO: 81106 - DNA, 15 bp, Homo sapiens
tttccatattcccag

SEQ ID NO: 81107 - DNA, 15 bp, Homo sapiens
ttttccatattccca

SEQ ID NO: 81108 - DNA, 15 bp, Homo sapiens
gttttccatattccc

SEQ ID NO: 81109 - DNA, 15 bp, Homo sapiens
ggttttccatattcc

SEQ ID NO: 81110 - DNA, 15 bp, Homo sapiens
aggttttccatattc

SEQ ID NO: 81111 - DNA, 15 bp, Homo sapiens
caggttttccatatt

SEQ ID NO: 81112 - DNA, 15 bp, Homo sapiens
tcaggttttccatat

SEQ ID NO: 81113 - DNA, 15 bp, Homo sapiens
ttcaggttttccata

SEQ ID NO: 81114 - DNA, 15 bp, Homo sapiens
tttcaggttttccat

SEQ ID NO: 81115 - DNA, 15 bp, Homo sapiens
gtttcaggttttcca

SEQ ID NO: 81116 - DNA, 15 bp, Homo sapiens
tgtttcaggttttcc

SEQ ID NO: 81117 - DNA, 15 bp, Homo sapiens
atgtttcaggttttc

SEQ ID NO: 81118 - DNA, 15 bp, Homo sapiens
aatgtttcaggtttt

SEQ ID NO: 81119 - DNA, 15 bp, Homo sapiens
aaatgtttcaggttt

SEQ ID NO: 81120 - DNA, 15 bp, Homo sapiens
aaaatgtttcaggtt

SEQ ID NO: 81121 - DNA, 15 bp, Homo sapiens
caaaatgtttcaggt

SEQ ID NO: 81122 - DNA, 15 bp, Homo sapiens
tcaaaatgtttcagg

SEQ ID NO: 81123 - DNA, 15 bp, Homo sapiens
gtcaaaatgtttcag

SEQ ID NO: 81124 - DNA, 15 bp, Homo sapiens
tgtcaaaatgtttca

SEQ ID NO: 81125 - DNA, 15 bp, Homo sapiens
ctgtcaaaatgtttc

SEQ ID NO: 81126 - DNA, 15 bp, Homo sapiens
cctgtcaaaatgttt

SEQ ID NO: 81127 - DNA, 15 bp, Homo sapiens
ccctgtcaaaatgtt

SEQ ID NO: 81128 - DNA, 15 bp, Homo sapiens
accctgtcaaaatgt

SEQ ID NO: 81129 - DNA, 15 bp, Homo sapiens
taccctgtcaaaatg

SEQ ID NO: 81130 - DNA, 15 bp, Homo sapiens
ataccctgtcaaaat

SEQ ID NO: 81131 - DNA, 15 bp, Homo sapiens
cataccctgtcaaaa

SEQ ID NO: 81132 - DNA, 15 bp, Homo sapiens
ccataccctgtcaaa

SEQ ID NO: 81133 - DNA, 15 bp, Homo sapiens
tccataccctgtcaa

SEQ ID NO: 81134 - DNA, 15 bp, Homo sapiens
ctccataccctgtca

SEQ ID NO: 81135 - DNA, 15 bp, Homo sapiens
cctccataccctgtc

SEQ ID NO: 81136 - DNA, 15 bp, Homo sapiens
tcctccataccctgt

SEQ ID NO: 81137 - DNA, 15 bp, Homo sapiens
ctcctccataccctg

SEQ ID NO: 81138 - DNA, 15 bp, Homo sapiens
tctcctccataccct

SEQ ID NO: 81139 - DNA, 15 bp, Homo sapiens
ctctcctccataccc

SEQ ID NO: 81140 - DNA, 15 bp, Homo sapiens
cctctcctccatacc

SEQ ID NO: 81141 - DNA, 15 bp, Homo sapiens
tcctctcctccatac

SEQ ID NO: 81142 - DNA, 15 bp, Homo sapiens
ttcctctcctccata

SEQ ID NO: 81143 - DNA, 15 bp, Homo sapiens
cttcctctcctccat

SEQ ID NO: 81144 - DNA, 15 bp, Homo sapiens
ccttcctctcctcca

SEQ ID NO: 81145 - DNA, 15 bp, Homo sapiens
cccttcctctcctcc

SEQ ID NO: 81146 - DNA, 15 bp, Homo sapiens
ccccttcctctcctc

SEQ ID NO: 81147 - DNA, 15 bp, Homo sapiens
tccccttcctctcct

SEQ ID NO: 81148 - DNA, 15 bp, Homo sapiens
ctccccttcctctcc

SEQ ID NO: 81149 - DNA, 15 bp, Homo sapiens
tctccccttcctctc

SEQ ID NO: 81150 - DNA, 15 bp, Homo sapiens
ttctccccttcctct

SEQ ID NO: 81151 - DNA, 15 bp, Homo sapiens
tttctccccttcctc

SEQ ID NO: 81152 - DNA, 15 bp, Homo sapiens
ctttctccccttcct

SEQ ID NO: 81153 - DNA, 15 bp, Homo sapiens
gctttctccccttcc

SEQ ID NO: 81154 - DNA, 15 bp, Homo sapiens
tgctttctccccttc

SEQ ID NO: 81155 - DNA, 15 bp, Homo sapiens
ctgctttctcccctt

SEQ ID NO: 81156 - DNA, 15 bp, Homo sapiens
tctgctttctcccct

SEQ ID NO: 81157 - DNA, 15 bp, Homo sapiens
ctctgctttctcccc

SEQ ID NO: 81158 - DNA, 15 bp, Homo sapiens
cctctgctttctccc

SEQ ID NO: 81159 - DNA, 15 bp, Homo sapiens
tcctctgctttctcc

SEQ ID NO: 81160 - DNA, 15 bp, Homo sapiens
ttcctctgctttctc

SEQ ID NO: 81161 - DNA, 15 bp, Homo sapiens
tttcctctgctttct

SEQ ID NO: 81162 - DNA, 15 bp, Homo sapiens
ttttcctctgctttc

SEQ ID NO: 81163 - DNA, 15 bp, Homo sapiens
cttttcctctgcttt

SEQ ID NO: 81164 - DNA, 15 bp, Homo sapiens
gcttttcctctgctt

SEQ ID NO: 81165 - DNA, 15 bp, Homo sapiens
agcttttcctctgct

SEQ ID NO: 81166 - DNA, 15 bp, Homo sapiens
cagcttttcctctgc

SEQ ID NO: 81167 - DNA, 15 bp, Homo sapiens
tcagcttttcctctg

SEQ ID NO: 81168 - DNA, 15 bp, Homo sapiens
gtcagcttttcctct

SEQ ID NO: 81169 - DNA, 15 bp, Homo sapiens
tgtcagcttttcctc

SEQ ID NO: 81170 - DNA, 15 bp, Homo sapiens
ttgtcagcttttcct

SEQ ID NO: 81171 - DNA, 15 bp, Homo sapiens
cttgtcagcttttcc

SEQ ID NO: 81172 - DNA, 15 bp, Homo sapiens
ccttgtcagcttttc

SEQ ID NO: 81173 - DNA, 15 bp, Homo sapiens
accttgtcagctttt

SEQ ID NO: 81174 - DNA, 15 bp, Homo sapiens
gaccttgtcagcttt

SEQ ID NO: 81175 - DNA, 15 bp, Homo sapiens
tgaccttgtcagctt

SEQ ID NO: 81176 - DNA, 15 bp, Homo sapiens
ttgaccttgtcagct

SEQ ID NO: 81177 - DNA, 15 bp, Homo sapiens
cttgaccttgtcagc

SEQ ID NO: 81178 - DNA, 15 bp, Homo sapiens
ccttgaccttgtcag

SEQ ID NO: 81179 - DNA, 15 bp, Homo sapiens
cccttgaccttgtca

SEQ ID NO: 81180 - DNA, 15 bp, Homo sapiens
tcccttgaccttgtc

SEQ ID NO: 81181 - DNA, 15 bp, Homo sapiens
atcccttgaccttgt

SEQ ID NO: 81182 - DNA, 15 bp, Homo sapiens
catcccttgaccttg

SEQ ID NO: 81183 - DNA, 15 bp, Homo sapiens
gcatcccttgacctt

SEQ ID NO: 81184 - DNA, 15 bp, Homo sapiens
agcatcccttgacct

SEQ ID NO: 81185 - DNA, 15 bp, Homo sapiens
aagcatcccttgacc

SEQ ID NO: 81186 - DNA, 15 bp, Homo sapiens
gaagcatcccttgac

SEQ ID NO: 81187 - DNA, 15 bp, Homo sapiens
agaagcatcccttga

SEQ ID NO: 81188 - DNA, 15 bp, Homo sapiens
gagaagcatcccttg

SEQ ID NO: 81189 - DNA, 15 bp, Homo sapiens
cgagaagcatccctt

SEQ ID NO: 81190 - DNA, 15 bp, Homo sapiens
ccgagaagcatccct

SEQ ID NO: 81191 - DNA, 15 bp, Homo sapiens
tccgagaagcatccc

SEQ ID NO: 81192 - DNA, 15 bp, Homo sapiens
ctccgagaagcatcc

SEQ ID NO: 81193 - DNA, 15 bp, Homo sapiens
tctccgagaagcatc

SEQ ID NO: 81194 - DNA, 15 bp, Homo sapiens
ttctccgagaagcat

SEQ ID NO: 81195 - DNA, 15 bp, Homo sapiens
cttctccgagaagca

SEQ ID NO: 81196 - DNA, 15 bp, Homo sapiens
ccttctccgagaagc

SEQ ID NO: 81197 - DNA, 15 bp, Homo sapiens
cccttctccgagaag

SEQ ID NO: 81198 - DNA, 15 bp, Homo sapiens
tcccttctccgagaa

SEQ ID NO: 81199 - DNA, 15 bp, Homo sapiens
ctcccttctccgaga

SEQ ID NO: 81200 - DNA, 15 bp, Homo sapiens
tctcccttctccgag

SEQ ID NO: 81201 - DNA, 15 bp, Homo sapiens
ttctcccttctccga

SEQ ID NO: 81202 - DNA, 15 bp, Homo sapiens
cttctcccttctccg

SEQ ID NO: 81203 - DNA, 15 bp, Homo sapiens
ccttctcccttctcc

SEQ ID NO: 81204 - DNA, 15 bp, Homo sapiens
cccttctcccttctc

SEQ ID NO: 81205 - DNA, 15 bp, Homo sapiens
gcccttctcccttct

SEQ ID NO: 81206 - DNA, 15 bp, Homo sapiens
tgcccttctcccttc

SEQ ID NO: 81207 - DNA, 15 bp, Homo sapiens
ctgcccttctccctt

SEQ ID NO: 81208 - DNA, 15 bp, Homo sapiens
cctgcccttctccct

SEQ ID NO: 81209 - DNA, 15 bp, Homo sapiens
tcctgcccttctccc

SEQ ID NO: 81210 - DNA, 15 bp, Homo sapiens
ctcctgcccttctcc

SEQ ID NO: 81211 - DNA, 15 bp, Homo sapiens
cctcctgcccttctc

SEQ ID NO: 81212 - DNA, 15 bp, Homo sapiens
tcctcctgcccttct

SEQ ID NO: 81213 - DNA, 15 bp, Homo sapiens
ctcctcctgcccttc

SEQ ID NO: 81214 - DNA, 15 bp, Homo sapiens
cctcctcctgccctt

SEQ ID NO: 81215 - DNA, 15 bp, Homo sapiens
tcctcctcctgccct

SEQ ID NO: 81216 - DNA, 15 bp, Homo sapiens
atcctcctcctgccc

SEQ ID NO: 81217 - DNA, 15 bp, Homo sapiens
catcctcctcctgcc

SEQ ID NO: 81218 - DNA, 15 bp, Homo sapiens
acatcctcctcctgc

SEQ ID NO: 81219 - DNA, 15 bp, Homo sapiens
aacatcctcctcctg

SEQ ID NO: 81220 - DNA, 15 bp, Homo sapiens
gaacatcctcctcct

SEQ ID NO: 81221 - DNA, 15 bp, Homo sapiens
tgaacatcctcctcc

SEQ ID NO: 81222 - DNA, 15 bp, Homo sapiens
ctgaacatcctcctc

SEQ ID NO: 81223 - DNA, 15 bp, Homo sapiens
cctgaacatcctcct

SEQ ID NO: 81224 - DNA, 15 bp, Homo sapiens
gcctgaacatcctcc

SEQ ID NO: 81225 - DNA, 15 bp, Homo sapiens
tgcctgaacatcctc

SEQ ID NO: 81226 - DNA, 15 bp, Homo sapiens
ttgcctgaacatcct

SEQ ID NO: 81227 - DNA, 15 bp, Homo sapiens
cttgcctgaacatcc

SEQ ID NO: 81228 - DNA, 15 bp, Homo sapiens
ccttgcctgaacatc

SEQ ID NO: 81229 - DNA, 15 bp, Homo sapiens
tccttgcctgaacat

SEQ ID NO: 81230 - DNA, 15 bp, Homo sapiens
ctccttgcctgaaca

SEQ ID NO: 81231 - DNA, 15 bp, Homo sapiens
gctccttgcctgaac

SEQ ID NO: 81232 - DNA, 15 bp, Homo sapiens
tgctccttgcctgaa

SEQ ID NO: 81233 - DNA, 15 bp, Homo sapiens
ctgctccttgcctga

SEQ ID NO: 81234 - DNA, 15 bp, Homo sapiens
tctgctccttgcctg

SEQ ID NO: 81235 - DNA, 15 bp, Homo sapiens
ctctgctccttgcct

SEQ ID NO: 81236 - DNA, 15 bp, Homo sapiens
gctctgctccttgcc

SEQ ID NO: 81237 - DNA, 15 bp, Homo sapiens
tgctctgctccttgc

SEQ ID NO: 81238 - DNA, 15 bp, Homo sapiens
ctgctctgctccttg

SEQ ID NO: 81239 - DNA, 15 bp, Homo sapiens
gctgctctgctcctt

SEQ ID NO: 81240 - DNA, 15 bp, Homo sapiens
ggctgctctgctcct

SEQ ID NO: 81241 - DNA, 15 bp, Homo sapiens
aggctgctctgctcc

SEQ ID NO: 81242 - DNA, 15 bp, Homo sapiens
caggctgctctgctc

SEQ ID NO: 81243 - DNA, 15 bp, Homo sapiens
ccaggctgctctgct

SEQ ID NO: 81244 - DNA, 15 bp, Homo sapiens
tccaggctgctctgc

SEQ ID NO: 81245 - DNA, 15 bp, Homo sapiens
ctccaggctgctctg

SEQ ID NO: 81246 - DNA, 15 bp, Homo sapiens
tctccaggctgctct

SEQ ID NO: 81247 - DNA, 15 bp, Homo sapiens
atctccaggctgctc

SEQ ID NO: 81248 - DNA, 15 bp, Homo sapiens
catctccaggctgct

SEQ ID NO: 81249 - DNA, 15 bp, Homo sapiens
gcatctccaggctgc

SEQ ID NO: 81250 - DNA, 15 bp, Homo sapiens
ggcatctccaggctg

SEQ ID NO: 81251 - DNA, 15 bp, Homo sapiens
tggcatctccaggct

SEQ ID NO: 81252 - DNA, 15 bp, Homo sapiens
ctggcatctccaggc

SEQ ID NO: 81253 - DNA, 15 bp, Homo sapiens
actggcatctccagg

SEQ ID NO: 81254 - DNA, 15 bp, Homo sapiens
aactggcatctccag

SEQ ID NO: 81255 - DNA, 15 bp, Homo sapiens
aaactggcatctcca

SEQ ID NO: 81256 - DNA, 15 bp, Homo sapiens
caaactggcatctcc

SEQ ID NO: 81257 - DNA, 15 bp, Homo sapiens
ccaaactggcatctc

SEQ ID NO: 81258 - DNA, 15 bp, Homo sapiens
accaaactggcatct

SEQ ID NO: 81259 - DNA, 15 bp, Homo sapiens
caccaaactggcatc

SEQ ID NO: 81260 - DNA, 15 bp, Homo sapiens
tcaccaaactggcat

SEQ ID NO: 81261 - DNA, 15 bp, Homo sapiens
atcaccaaactggca

SEQ ID NO: 81262 - DNA, 15 bp, Homo sapiens
aatcaccaaactggc

SEQ ID NO: 81263 - DNA, 15 bp, Homo sapiens
taatcaccaaactgg

SEQ ID NO: 81264 - DNA, 15 bp, Homo sapiens
ataatcaccaaactg

SEQ ID NO: 81265 - DNA, 15 bp, Homo sapiens
cataatcaccaaact

SEQ ID NO: 81266 - DNA, 15 bp, Homo sapiens
ccataatcaccaaac

SEQ ID NO: 81267 - DNA, 15 bp, Homo sapiens
tccataatcaccaaa

SEQ ID NO: 81268 - DNA, 15 bp, Homo sapiens
gtccataatcaccaa

SEQ ID NO: 81269 - DNA, 15 bp, Homo sapiens
tgtccataatcacca

SEQ ID NO: 81270 - DNA, 15 bp, Homo sapiens
gtgtccataatcacc

SEQ ID NO: 81271 - DNA, 15 bp, Homo sapiens
ggtgtccataatcac

SEQ ID NO: 81272 - DNA, 15 bp, Homo sapiens
aggtgtccataatca

SEQ ID NO: 81273 - DNA, 15 bp, Homo sapiens
aaggtgtccataatc

SEQ ID NO: 81274 - DNA, 15 bp, Homo sapiens
caaggtgtccataat

SEQ ID NO: 81275 - DNA, 15 bp, Homo sapiens
ccaaggtgtccataa

SEQ ID NO: 81276 - DNA, 15 bp, Homo sapiens
gccaaggtgtccata

SEQ ID NO: 81277 - DNA, 15 bp, Homo sapiens
agccaaggtgtccat

SEQ ID NO: 81278 - DNA, 15 bp, Homo sapiens
cagccaaggtgtcca

SEQ ID NO: 81279 - DNA, 15 bp, Homo sapiens
gcagccaaggtgtcc

SEQ ID NO: 81280 - DNA, 15 bp, Homo sapiens
agcagccaaggtgtc

SEQ ID NO: 81281 - DNA, 15 bp, Homo sapiens
aagcagccaaggtgt

SEQ ID NO: 81282 - DNA, 15 bp, Homo sapiens
taagcagccaaggtg

SEQ ID NO: 81283 - DNA, 15 bp, Homo sapiens
ctaagcagccaaggt

SEQ ID NO: 81284 - DNA, 15 bp, Homo sapiens
gctaagcagccaagg

SEQ ID NO: 81285 - DNA, 15 bp, Homo sapiens
ggctaagcagccaag

SEQ ID NO: 81286 - DNA, 15 bp, Homo sapiens
tggctaagcagccaa

SEQ ID NO: 81287 - DNA, 15 bp, Homo sapiens
ctggctaagcagcca

SEQ ID NO: 81288 - DNA, 15 bp, Homo sapiens
tctggctaagcagcc

SEQ ID NO: 81289 - DNA, 15 bp, Homo sapiens
ctctggctaagcagc

SEQ ID NO: 81290 - DNA, 15 bp, Homo sapiens
cctctggctaagcag

SEQ ID NO: 81291 - DNA, 15 bp, Homo sapiens
acctctggctaagca

SEQ ID NO: 81292 - DNA, 15 bp, Homo sapiens
cacctctggctaagc

SEQ ID NO: 81293 - DNA, 15 bp, Homo sapiens
ccacctctggctaag

SEQ ID NO: 81294 - DNA, 15 bp, Homo sapiens
gccacctctggctaa

SEQ ID NO: 81295 - DNA, 15 bp, Homo sapiens
ggccacctctggcta

SEQ ID NO: 81296 - DNA, 15 bp, Homo sapiens
gggccacctctggct

SEQ ID NO: 81297 - DNA, 15 bp, Homo sapiens
agggccacctctggc

SEQ ID NO: 81298 - DNA, 15 bp, Homo sapiens
gagggccacctctgg

SEQ ID NO: 81299 - DNA, 15 bp, Homo sapiens
tgagggccacctctg

SEQ ID NO: 81300 - DNA, 15 bp, Homo sapiens
gtgagggccacctct

SEQ ID NO: 81301 - DNA, 15 bp, Homo sapiens
tgtgagggccacctc

SEQ ID NO: 81302 - DNA, 15 bp, Homo sapiens
ttgtgagggccacct

SEQ ID NO: 81303 - DNA, 15 bp, Homo sapiens
attgtgagggccacc

SEQ ID NO: 81304 - DNA, 15 bp, Homo sapiens
cattgtgagggccac

SEQ ID NO: 81305 - DNA, 15 bp, Homo sapiens
gcattgtgagggcca

SEQ ID NO: 81306 - DNA, 15 bp, Homo sapiens
ggcattgtgagggcc

SEQ ID NO: 81307 - DNA, 15 bp, Homo sapiens
tggcattgtgagggc

SEQ ID NO: 81308 - DNA, 15 bp, Homo sapiens
atggcattgtgaggg

SEQ ID NO: 81309 - DNA, 15 bp, Homo sapiens
aatggcattgtgagg

SEQ ID NO: 81310 - DNA, 15 bp, Homo sapiens
gaatggcattgtgag

SEQ ID NO: 81311 - DNA, 15 bp, Homo sapiens
ggaatggcattgtga

SEQ ID NO: 81312 - DNA, 15 bp, Homo sapiens
aggaatggcattgtg

SEQ ID NO: 81313 - DNA, 15 bp, Homo sapiens
caggaatggcattgt

SEQ ID NO: 81314 - DNA, 15 bp, Homo sapiens
gcaggaatggcattg

SEQ ID NO: 81315 - DNA, 15 bp, Homo sapiens
agcaggaatggcatt

SEQ ID NO: 81316 - DNA, 15 bp, Homo sapiens
cagcaggaatggcat

SEQ ID NO: 81317 - DNA, 15 bp, Homo sapiens
acagcaggaatggca

SEQ ID NO: 81318 - DNA, 15 bp, Homo sapiens
cacagcaggaatggc

SEQ ID NO: 81319 - DNA, 15 bp, Homo sapiens
gcacagcaggaatgg

SEQ ID NO: 81320 - DNA, 15 bp, Homo sapiens
ggcacagcaggaatg

SEQ ID NO: 81321 - DNA, 15 bp, Homo sapiens
gggcacagcaggaat

SEQ ID NO: 81322 - DNA, 15 bp, Homo sapiens
tgggcacagcaggaa

SEQ ID NO: 81323 - DNA, 15 bp, Homo sapiens
gtgggcacagcagga

SEQ ID NO: 81324 - DNA, 15 bp, Homo sapiens
agtgggcacagcagg

SEQ ID NO: 81325 - DNA, 15 bp, Homo sapiens
cagtgggcacagcag

SEQ ID NO: 81326 - DNA, 15 bp, Homo sapiens
gcagtgggcacagca

SEQ ID NO: 81327 - DNA, 15 bp, Homo sapiens
ggcagtgggcacagc

SEQ ID NO: 81328 - DNA, 15 bp, Homo sapiens
gggcagtgggcacag

SEQ ID NO: 81329 - DNA, 15 bp, Homo sapiens
tgggcagtgggcaca

SEQ ID NO: 81330 - DNA, 15 bp, Homo sapiens
ctgggcagtgggcac

SEQ ID NO: 81331 - DNA, 15 bp, Homo sapiens
tctgggcagtgggca

SEQ ID NO: 81332 - DNA, 15 bp, Homo sapiens
ctctgggcagtgggc

SEQ ID NO: 81333 - DNA, 15 bp, Homo sapiens
actctgggcagtggg

SEQ ID NO: 81334 - DNA, 15 bp, Homo sapiens
cactctgggcagtgg

SEQ ID NO: 81335 - DNA, 15 bp, Homo sapiens
gcactctgggcagtg

SEQ ID NO: 81336 - DNA, 15 bp, Homo sapiens
ggcactctgggcagt

SEQ ID NO: 81337 - DNA, 15 bp, Homo sapiens
tggcactctgggcag

SEQ ID NO: 81338 - DNA, 15 bp, Homo sapiens
ctggcactctgggca

SEQ ID NO: 81339 - DNA, 15 bp, Homo sapiens
gctggcactctgggc

SEQ ID NO: 81340 - DNA, 15 bp, Homo sapiens
tgctggcactctggg

SEQ ID NO: 81341 - DNA, 15 bp, Homo sapiens
ttgctggcactctgg

SEQ ID NO: 81342 - DNA, 15 bp, Homo sapiens
tttgctggcactctg

SEQ ID NO: 81343 - DNA, 15 bp, Homo sapiens
gtttgctggcactct

SEQ ID NO: 81344 - DNA, 15 bp, Homo sapiens
tgtttgctggcactc

SEQ ID NO: 81345 - DNA, 15 bp, Homo sapiens
gtgtttgctggcact

SEQ ID NO: 81346 - DNA, 15 bp, Homo sapiens
agtgtttgctggcac

SEQ ID NO: 81347 - DNA, 15 bp, Homo sapiens
cagtgtttgctggca

SEQ ID NO: 81348 - DNA, 15 bp, Homo sapiens
gcagtgtttgctggc

SEQ ID NO: 81349 - DNA, 15 bp, Homo sapiens
tgcagtgtttgctgg

SEQ ID NO: 81350 - DNA, 15 bp, Homo sapiens
ctgcagtgtttgctg

SEQ ID NO: 81351 - DNA, 15 bp, Homo sapiens
cctgcagtgtttgct

SEQ ID NO: 81352 - DNA, 15 bp, Homo sapiens
tcctgcagtgtttgc

SEQ ID NO: 81353 - DNA, 15 bp, Homo sapiens
atcctgcagtgtttg

SEQ ID NO: 81354 - DNA, 15 bp, Homo sapiens
aatcctgcagtgttt

SEQ ID NO: 81355 - DNA, 15 bp, Homo sapiens
aaatcctgcagtgtt

SEQ ID NO: 81356 - DNA, 15 bp, Homo sapiens
caaatcctgcagtgt

SEQ ID NO: 81357 - DNA, 15 bp, Homo sapiens
gcaaatcctgcagtg

SEQ ID NO: 81358 - DNA, 15 bp, Homo sapiens
agcaaatcctgcagt

SEQ ID NO: 81359 - DNA, 15 bp, Homo sapiens
aagcaaatcctgcag

SEQ ID NO: 81360 - DNA, 15 bp, Homo sapiens
caagcaaatcctgca

SEQ ID NO: 81361 - DNA, 15 bp, Homo sapiens
gcaagcaaatcctgc

SEQ ID NO: 81362 - DNA, 15 bp, Homo sapiens
agcaagcaaatcctg

SEQ ID NO: 81363 - DNA, 15 bp, Homo sapiens
gagcaagcaaatcct

SEQ ID NO: 81364 - DNA, 15 bp, Homo sapiens
tgagcaagcaaatcc

SEQ ID NO: 81365 - DNA, 15 bp, Homo sapiens
ctgagcaagcaaatc

SEQ ID NO: 81366 - DNA, 15 bp, Homo sapiens
tctgagcaagcaaat

SEQ ID NO: 81367 - DNA, 15 bp, Homo sapiens
gtctgagcaagcaaa

SEQ ID NO: 81368 - DNA, 15 bp, Homo sapiens
agtctgagcaagcaa

SEQ ID NO: 81369 - DNA, 15 bp, Homo sapiens
aagtctgagcaagca

SEQ ID NO: 81370 - DNA, 15 bp, Homo sapiens
gaagtctgagcaagc

SEQ ID NO: 81371 - DNA, 15 bp, Homo sapiens
tgaagtctgagcaag

SEQ ID NO: 81372 - DNA, 15 bp, Homo sapiens
ctgaagtctgagcaa

SEQ ID NO: 81373 - DNA, 15 bp, Homo sapiens
cctgaagtctgagca

SEQ ID NO: 81374 - DNA, 15 bp, Homo sapiens
gcctgaagtctgagc

SEQ ID NO: 81375 - DNA, 15 bp, Homo sapiens
tgcctgaagtctgag

SEQ ID NO: 81376 - DNA, 15 bp, Homo sapiens
ttgcctgaagtctga

SEQ ID NO: 81377 - DNA, 15 bp, Homo sapiens
attgcctgaagtctg

SEQ ID NO: 81378 - DNA, 15 bp, Homo sapiens
cattgcctgaagtct

SEQ ID NO: 81379 - DNA, 15 bp, Homo sapiens
gcattgcctgaagtc

SEQ ID NO: 81380 - DNA, 15 bp, Homo sapiens
tgcattgcctgaagt

SEQ ID NO: 81381 - DNA, 15 bp, Homo sapiens
ctgcattgcctgaag

SEQ ID NO: 81382 - DNA, 15 bp, Homo sapiens
gctgcattgcctgaa

SEQ ID NO: 81383 - DNA, 15 bp, Homo sapiens
agctgcattgcctga

SEQ ID NO: 81384 - DNA, 15 bp, Homo sapiens
aagctgcattgcctg

SEQ ID NO: 81385 - DNA, 15 bp, Homo sapiens
aaagctgcattgcct

SEQ ID NO: 81386 - DNA, 15 bp, Homo sapiens
caaagctgcattgcc

SEQ ID NO: 81387 - DNA, 15 bp, Homo sapiens
acaaagctgcattgc

SEQ ID NO: 81388 - DNA, 15 bp, Homo sapiens
gacaaagctgcattg

SEQ ID NO: 81389 - DNA, 15 bp, Homo sapiens
agacaaagctgcatt

SEQ ID NO: 81390 - DNA, 15 bp, Homo sapiens
cagacaaagctgcat

SEQ ID NO: 81391 - DNA, 15 bp, Homo sapiens
gcagacaaagctgca

SEQ ID NO: 81392 - DNA, 15 bp, Homo sapiens
agcagacaaagctgc

SEQ ID NO: 81393 - DNA, 15 bp, Homo sapiens
cagcagacaaagctg

SEQ ID NO: 81394 - DNA, 15 bp, Homo sapiens
ccagcagacaaagct

SEQ ID NO: 81395 - DNA, 15 bp, Homo sapiens
cccagcagacaaagc

SEQ ID NO: 81396 - DNA, 15 bp, Homo sapiens
ccccagcagacaaag

SEQ ID NO: 81397 - DNA, 15 bp, Homo sapiens
tccccagcagacaaa

SEQ ID NO: 81398 - DNA, 15 bp, Homo sapiens
ctccccagcagacaa

SEQ ID NO: 81399 - DNA, 15 bp, Homo sapiens
tctccccagcagaca

SEQ ID NO: 81400 - DNA, 15 bp, Homo sapiens
ttctccccagcagac

SEQ ID NO: 81401 - DNA, 15 bp, Homo sapiens
attctccccagcaga

SEQ ID NO: 81402 - DNA, 15 bp, Homo sapiens
gattctccccagcag

SEQ ID NO: 81403 - DNA, 15 bp, Homo sapiens
agattctccccagca

SEQ ID NO: 81404 - DNA, 15 bp, Homo sapiens
aagattctccccagc

SEQ ID NO: 81405 - DNA, 15 bp, Homo sapiens
taagattctccccag

SEQ ID NO: 81406 - DNA, 15 bp, Homo sapiens
gtaagattctcccca

SEQ ID NO: 81407 - DNA, 15 bp, Homo sapiens
ggtaagattctcccc

SEQ ID NO: 81408 - DNA, 15 bp, Homo sapiens
tggtaagattctccc

SEQ ID NO: 81409 - DNA, 15 bp, Homo sapiens
atggtaagattctcc

SEQ ID NO: 81410 - DNA, 15 bp, Homo sapiens
aatggtaagattctc

SEQ ID NO: 81411 - DNA, 15 bp, Homo sapiens
aaatggtaagattct

SEQ ID NO: 81412 - DNA, 15 bp, Homo sapiens
aaaatggtaagattc

SEQ ID NO: 81413 - DNA, 15 bp, Homo sapiens
aaaaatggtaagatt

SEQ ID NO: 81414 - DNA, 15 bp, Homo sapiens
taaaaatggtaagat

SEQ ID NO: 81415 - DNA, 15 bp, Homo sapiens
ttaaaaatggtaaga

SEQ ID NO: 81416 - DNA, 15 bp, Homo sapiens
gttaaaaatggtaag

SEQ ID NO: 81417 - DNA, 15 bp, Homo sapiens
ggttaaaaatggtaa

SEQ ID NO: 81418 - DNA, 15 bp, Homo sapiens
aggttaaaaatggta

SEQ ID NO: 81419 - DNA, 15 bp, Homo sapiens
caggttaaaaatggt

SEQ ID NO: 81420 - DNA, 15 bp, Homo sapiens
acaggttaaaaatgg

SEQ ID NO: 81421 - DNA, 15 bp, Homo sapiens
tacaggttaaaaatg

SEQ ID NO: 81422 - DNA, 15 bp, Homo sapiens
atacaggttaaaaat

SEQ ID NO: 81423 - DNA, 15 bp, Homo sapiens
aatacaggttaaaaa

SEQ ID NO: 81424 - DNA, 15 bp, Homo sapiens
aaatacaggttaaaa

SEQ ID NO: 81425 - DNA, 15 bp, Homo sapiens
caaatacaggttaaa

SEQ ID NO: 81426 - DNA, 15 bp, Homo sapiens
tcaaatacaggttaa

SEQ ID NO: 81427 - DNA, 15 bp, Homo sapiens
ttcaaatacaggtta

SEQ ID NO: 81428 - DNA, 15 bp, Homo sapiens
gttcaaatacaggtt

SEQ ID NO: 81429 - DNA, 15 bp, Homo sapiens
ggttcaaatacaggt

SEQ ID NO: 81430 - DNA, 15 bp, Homo sapiens
tggttcaaatacagg

SEQ ID NO: 81431 - DNA, 15 bp, Homo sapiens
ttggttcaaatacag

SEQ ID NO: 81432 - DNA, 15 bp, Homo sapiens
cttggttcaaataca

SEQ ID NO: 81433 - DNA, 15 bp, Homo sapiens
tcttggttcaaatac

SEQ ID NO: 81434 - DNA, 15 bp, Homo sapiens
ctcttggttcaaata

SEQ ID NO: 81435 - DNA, 15 bp, Homo sapiens
tctcttggttcaaat

SEQ ID NO: 81436 - DNA, 15 bp, Homo sapiens
atctcttggttcaaa

SEQ ID NO: 81437 - DNA, 15 bp, Homo sapiens
aatctcttggttcaa

SEQ ID NO: 81438 - DNA, 15 bp, Homo sapiens
aaatctcttggttca

SEQ ID NO: 81439 - DNA, 15 bp, Homo sapiens
caaatctcttggttc

SEQ ID NO: 81440 - DNA, 15 bp, Homo sapiens
gcaaatctcttggtt

SEQ ID NO: 81441 - DNA, 15 bp, Homo sapiens
cgcaaatctcttggt

SEQ ID NO: 81442 - DNA, 15 bp, Homo sapiens
acgcaaatctcttgg

SEQ ID NO: 81443 - DNA, 15 bp, Homo sapiens
cacgcaaatctcttg

SEQ ID NO: 81444 - DNA, 15 bp, Homo sapiens
tcacgcaaatctctt

SEQ ID NO: 81445 - DNA, 15 bp, Homo sapiens
gtcacgcaaatctct

SEQ ID NO: 81446 - DNA, 15 bp, Homo sapiens
ggtcacgcaaatctc

SEQ ID NO: 81447 - DNA, 15 bp, Homo sapiens
aggtcacgcaaatct

SEQ ID NO: 81448 - DNA, 15 bp, Homo sapiens
gaggtcacgcaaatc

SEQ ID NO: 81449 - DNA, 15 bp, Homo sapiens
ggaggtcacgcaaat

SEQ ID NO: 81450 - DNA, 15 bp, Homo sapiens
tggaggtcacgcaaa

SEQ ID NO: 81451 - DNA, 15 bp, Homo sapiens
gtggaggtcacgcaa

SEQ ID NO: 81452 - DNA, 15 bp, Homo sapiens
tgtggaggtcacgca

SEQ ID NO: 81453 - DNA, 15 bp, Homo sapiens
ctgtggaggtcacgc

SEQ ID NO: 81454 - DNA, 15 bp, Homo sapiens
cctgtggaggtcacg

SEQ ID NO: 81455 - DNA, 15 bp, Homo sapiens
tcctgtggaggtcac

SEQ ID NO: 81456 - DNA, 15 bp, Homo sapiens
ttcctgtggaggtca

SEQ ID NO: 81457 - DNA, 15 bp, Homo sapiens
tttcctgtggaggtc

SEQ ID NO: 81458 - DNA, 15 bp, Homo sapiens
ctttcctgtggaggt

SEQ ID NO: 81459 - DNA, 15 bp, Homo sapiens
actttcctgtggagg

SEQ ID NO: 81460 - DNA, 15 bp, Homo sapiens
cactttcctgtggag

SEQ ID NO: 81461 - DNA, 15 bp, Homo sapiens
gcactttcctgtgga

SEQ ID NO: 81462 - DNA, 15 bp, Homo sapiens
tgcactttcctgtgg

SEQ ID NO: 81463 - DNA, 15 bp, Homo sapiens
ttgcactttcctgtg

SEQ ID NO: 81464 - DNA, 15 bp, Homo sapiens
gttgcactttcctgt

SEQ ID NO: 81465 - DNA, 15 bp, Homo sapiens
agttgcactttcctg

SEQ ID NO: 81466 - DNA, 15 bp, Homo sapiens
tagttgcactttcct

SEQ ID NO: 81467 - DNA, 15 bp, Homo sapiens
atagttgcactttcc

SEQ ID NO: 81468 - DNA, 15 bp, Homo sapiens
gatagttgcactttc

SEQ ID NO: 81469 - DNA, 15 bp, Homo sapiens
agatagttgcacttt

SEQ ID NO: 81470 - DNA, 15 bp, Homo sapiens
aagatagttgcactt

SEQ ID NO: 81471 - DNA, 15 bp, Homo sapiens
gaagatagttgcact

SEQ ID NO: 81472 - DNA, 15 bp, Homo sapiens
ggaagatagttgcac

SEQ ID NO: 81473 - DNA, 15 bp, Homo sapiens
tggaagatagttgca

SEQ ID NO: 81474 - DNA, 15 bp, Homo sapiens
ttggaagatagttgc

SEQ ID NO: 81475 - DNA, 15 bp, Homo sapiens
tttggaagatagttg

SEQ ID NO: 81476 - DNA, 15 bp, Homo sapiens
ttttggaagatagtt

SEQ ID NO: 81477 - DNA, 15 bp, Homo sapiens
tttttggaagatagt

SEQ ID NO: 81478 - DNA, 15 bp, Homo sapiens
atttttggaagatag

SEQ ID NO: 81479 - DNA, 15 bp, Homo sapiens
catttttggaagata

SEQ ID NO: 81480 - DNA, 15 bp, Homo sapiens
acatttttggaagat

SEQ ID NO: 81481 - DNA, 15 bp, Homo sapiens
tacatttttggaaga

SEQ ID NO: 81482 - DNA, 15 bp, Homo sapiens
atacatttttggaag

SEQ ID NO: 81483 - DNA, 15 bp, Homo sapiens
tatacatttttggaa

SEQ ID NO: 81484 - DNA, 15 bp, Homo sapiens
ttatacatttttgga

SEQ ID NO: 81485 - DNA, 15 bp, Homo sapiens
tttatacatttttgg

SEQ ID NO: 81486 - DNA, 15 bp, Homo sapiens
atttatacatttttg

SEQ ID NO: 81487 - DNA, 15 bp, Homo sapiens
aatttatacattttt

SEQ ID NO: 81488 - DNA, 15 bp, Homo sapiens
taatttatacatttt

SEQ ID NO: 81489 - DNA, 15 bp, Homo sapiens
ataatttatacattt

SEQ ID NO: 81490 - DNA, 15 bp, Homo sapiens
gataatttatacatt

SEQ ID NO: 81491 - DNA, 15 bp, Homo sapiens
tgataatttatacat

SEQ ID NO: 81492 - DNA, 15 bp, Homo sapiens
ttgataatttataca

SEQ ID NO: 81493 - DNA, 15 bp, Homo sapiens
tttgataatttatac

SEQ ID NO: 81494 - DNA, 15 bp, Homo sapiens
ctttgataatttata

SEQ ID NO: 81495 - DNA, 15 bp, Homo sapiens
tctttgataatttat

SEQ ID NO: 81496 - DNA, 15 bp, Homo sapiens
atctttgataattta

SEQ ID NO: 81497 - DNA, 15 bp, Homo sapiens
catctttgataattt

SEQ ID NO: 81498 - DNA, 15 bp, Homo sapiens
acatctttgataatt

SEQ ID NO: 81499 - DNA, 15 bp, Homo sapiens
tacatctttgataat

SEQ ID NO: 81500 - DNA, 15 bp, Homo sapiens
atacatctttgataa

SEQ ID NO: 81501 - DNA, 15 bp, Homo sapiens
aatacatctttgata

SEQ ID NO: 81502 - DNA, 15 bp, Homo sapiens
gaatacatctttgat

SEQ ID NO: 81503 - DNA, 15 bp, Homo sapiens
agaatacatctttga

SEQ ID NO: 81504 - DNA, 15 bp, Homo sapiens
tagaatacatctttg

SEQ ID NO: 81505 - DNA, 15 bp, Homo sapiens
atagaatacatcttt

SEQ ID NO: 81506 - DNA, 15 bp, Homo sapiens
tatagaatacatctt

SEQ ID NO: 81507 - DNA, 15 bp, Homo sapiens
ttatagaatacatct

SEQ ID NO: 81508 - DNA, 15 bp, Homo sapiens
gttatagaatacatc

SEQ ID NO: 81509 - DNA, 15 bp, Homo sapiens
tgttatagaatacat

SEQ ID NO: 81510 - DNA, 15 bp, Homo sapiens
ttgttatagaataca

SEQ ID NO: 81511 - DNA, 15 bp, Homo sapiens
tttgttatagaatac

SEQ ID NO: 81512 - DNA, 15 bp, Homo sapiens
ttttgttatagaata

SEQ ID NO: 81513 - DNA, 15 bp, Homo sapiens
tttttgttatagaat

SEQ ID NO: 81514 - DNA, 15 bp, Homo sapiens
atttttgttatagaa

SEQ ID NO: 81515 - DNA, 15 bp, Homo sapiens
catttttgttataga

SEQ ID NO: 81516 - DNA, 15 bp, Homo sapiens
tcatttttgttatag

SEQ ID NO: 81517 - DNA, 15 bp, Homo sapiens
gtcatttttgttata

SEQ ID NO: 81518 - DNA, 15 bp, Homo sapiens
tgtcatttttgttat

SEQ ID NO: 81519 - DNA, 15 bp, Homo sapiens
ctgtcatttttgtta

SEQ ID NO: 81520 - DNA, 15 bp, Homo sapiens
actgtcatttttgtt

SEQ ID NO: 81521 - DNA, 15 bp, Homo sapiens
gactgtcatttttgt

SEQ ID NO: 81522 - DNA, 15 bp, Homo sapiens
ggactgtcatttttg

SEQ ID NO: 81523 - DNA, 15 bp, Homo sapiens
aggactgtcattttt

SEQ ID NO: 81524 - DNA, 15 bp, Homo sapiens
aaggactgtcatttt

SEQ ID NO: 81525 - DNA, 15 bp, Homo sapiens
caaggactgtcattt

SEQ ID NO: 81526 - DNA, 15 bp, Homo sapiens
tcaaggactgtcatt

SEQ ID NO: 81527 - DNA, 15 bp, Homo sapiens
ctcaaggactgtcat

SEQ ID NO: 81528 - DNA, 15 bp, Homo sapiens
tctcaaggactgtca

SEQ ID NO: 81529 - DNA, 15 bp, Homo sapiens
atctcaaggactgtc

SEQ ID NO: 81530 - DNA, 15 bp, Homo sapiens
catctcaaggactgt

SEQ ID NO: 81531 - DNA, 15 bp, Homo sapiens
acatctcaaggactg

SEQ ID NO: 81532 - DNA, 15 bp, Homo sapiens
cacatctcaaggact

SEQ ID NO: 81533 - DNA, 15 bp, Homo sapiens
ccacatctcaaggac

SEQ ID NO: 81534 - DNA, 15 bp, Homo sapiens
accacatctcaagga

SEQ ID NO: 81535 - DNA, 15 bp, Homo sapiens
caccacatctcaagg

SEQ ID NO: 81536 - DNA, 15 bp, Homo sapiens
ccaccacatctcaag

SEQ ID NO: 81537 - DNA, 15 bp, Homo sapiens
tccaccacatctcaa

SEQ ID NO: 81538 - DNA, 15 bp, Homo sapiens
atccaccacatctca

SEQ ID NO: 81539 - DNA, 15 bp, Homo sapiens
aatccaccacatctc

SEQ ID NO: 81540 - DNA, 15 bp, Homo sapiens
taatccaccacatct

SEQ ID NO: 81541 - DNA, 15 bp, Homo sapiens
ttaatccaccacatc

SEQ ID NO: 81542 - DNA, 15 bp, Homo sapiens
attaatccaccacat

SEQ ID NO: 81543 - DNA, 15 bp, Homo sapiens
tattaatccaccaca

SEQ ID NO: 81544 - DNA, 15 bp, Homo sapiens
atattaatccaccac

SEQ ID NO: 81545 - DNA, 15 bp, Homo sapiens
aatattaatccacca

SEQ ID NO: 81546 - DNA, 15 bp, Homo sapiens
caatattaatccacc

SEQ ID NO: 81547 - DNA, 15 bp, Homo sapiens
gcaatattaatccac

SEQ ID NO: 81548 - DNA, 15 bp, Homo sapiens
agcaatattaatcca

SEQ ID NO: 81549 - DNA, 15 bp, Homo sapiens
tagcaatattaatcc

SEQ ID NO: 81550 - DNA, 15 bp, Homo sapiens
ctagcaatattaatc

SEQ ID NO: 81551 - DNA, 15 bp, Homo sapiens
tctagcaatattaat

SEQ ID NO: 81552 - DNA, 15 bp, Homo sapiens
atctagcaatattaa

SEQ ID NO: 81553 - DNA, 15 bp, Homo sapiens
gatctagcaatatta

SEQ ID NO: 81554 - DNA, 15 bp, Homo sapiens
tgatctagcaatatt

SEQ ID NO: 81555 - DNA, 15 bp, Homo sapiens
ctgatctagcaatat

SEQ ID NO: 81556 - DNA, 15 bp, Homo sapiens
cctgatctagcaata

SEQ ID NO: 81557 - DNA, 15 bp, Homo sapiens
tcctgatctagcaat

SEQ ID NO: 81558 - DNA, 15 bp, Homo sapiens
ctcctgatctagcaa

SEQ ID NO: 81559 - DNA, 15 bp, Homo sapiens
gctcctgatctagca

SEQ ID NO: 81560 - DNA, 15 bp, Homo sapiens
agctcctgatctagc

SEQ ID NO: 81561 - DNA, 15 bp, Homo sapiens
tagctcctgatctag

SEQ ID NO: 81562 - DNA, 15 bp, Homo sapiens
gtagctcctgatcta

SEQ ID NO: 81563 - DNA, 15 bp, Homo sapiens
agtagctcctgatct

SEQ ID NO: 81564 - DNA, 15 bp, Homo sapiens
gagtagctcctgatc

SEQ ID NO: 81565 - DNA, 15 bp, Homo sapiens
tgagtagctcctgat

SEQ ID NO: 81566 - DNA, 15 bp, Homo sapiens
ctgagtagctcctga

SEQ ID NO: 81567 - DNA, 15 bp, Homo sapiens
tctgagtagctcctg

SEQ ID NO: 81568 - DNA, 15 bp, Homo sapiens
atctgagtagctcct

SEQ ID NO: 81569 - DNA, 15 bp, Homo sapiens
catctgagtagctcc

SEQ ID NO: 81570 - DNA, 15 bp, Homo sapiens
tcatctgagtagctc

SEQ ID NO: 81571 - DNA, 15 bp, Homo sapiens
ctcatctgagtagct

SEQ ID NO: 81572 - DNA, 15 bp, Homo sapiens
cctcatctgagtagc

SEQ ID NO: 81573 - DNA, 15 bp, Homo sapiens
acctcatctgagtag

SEQ ID NO: 81574 - DNA, 15 bp, Homo sapiens
tacctcatctgagta

SEQ ID NO: 81575 - DNA, 15 bp, Homo sapiens
ttacctcatctgagt

SEQ ID NO: 81576 - DNA, 15 bp, Homo sapiens
tttacctcatctgag

SEQ ID NO: 81577 - DNA, 15 bp, Homo sapiens
ctttacctcatctga

SEQ ID NO: 81578 - DNA, 15 bp, Homo sapiens
actttacctcatctg

SEQ ID NO: 81579 - DNA, 15 bp, Homo sapiens
gactttacctcatct

SEQ ID NO: 81580 - DNA, 15 bp, Homo sapiens
ggactttacctcatc

SEQ ID NO: 81581 - DNA, 15 bp, Homo sapiens
gggactttacctcat

SEQ ID NO: 81582 - DNA, 15 bp, Homo sapiens
agggactttacctca

SEQ ID NO: 81583 - DNA, 15 bp, Homo sapiens
aagggactttacctc

SEQ ID NO: 81584 - DNA, 15 bp, Homo sapiens
aaagggactttacct

SEQ ID NO: 81585 - DNA, 15 bp, Homo sapiens
caaagggactttacc

SEQ ID NO: 81586 - DNA, 15 bp, Homo sapiens
ccaaagggactttac

SEQ ID NO: 81587 - DNA, 15 bp, Homo sapiens
cccaaagggacttta

SEQ ID NO: 81588 - DNA, 15 bp, Homo sapiens
tcccaaagggacttt

SEQ ID NO: 81589 - DNA, 15 bp, Homo sapiens
ttcccaaagggactt

SEQ ID NO: 81590 - DNA, 15 bp, Homo sapiens
tttcccaaagggact

SEQ ID NO: 81591 - DNA, 15 bp, Homo sapiens
ctttcccaaagggac

SEQ ID NO: 81592 - DNA, 15 bp, Homo sapiens
gctttcccaaaggga

SEQ ID NO: 81593 - DNA, 15 bp, Homo sapiens
tgctttcccaaaggg

SEQ ID NO: 81594 - DNA, 15 bp, Homo sapiens
gtgctttcccaaagg

SEQ ID NO: 81595 - DNA, 15 bp, Homo sapiens
tgtgctttcccaaag

SEQ ID NO: 81596 - DNA, 15 bp, Homo sapiens
ctgtgctttcccaaa

SEQ ID NO: 81597 - DNA, 15 bp, Homo sapiens
tctgtgctttcccaa

SEQ ID NO: 81598 - DNA, 15 bp, Homo sapiens
ctctgtgctttccca

SEQ ID NO: 81599 - DNA, 15 bp, Homo sapiens
gctctgtgctttccc

SEQ ID NO: 81600 - DNA, 15 bp, Homo sapiens
ggctctgtgctttcc

SEQ ID NO: 81601 - DNA, 15 bp, Homo sapiens
aggctctgtgctttc

SEQ ID NO: 81602 - DNA, 15 bp, Homo sapiens
caggctctgtgcttt

SEQ ID NO: 81603 - DNA, 15 bp, Homo sapiens
ccaggctctgtgctt

SEQ ID NO: 81604 - DNA, 15 bp, Homo sapiens
cccaggctctgtgct

SEQ ID NO: 81605 - DNA, 15 bp, Homo sapiens
ccccaggctctgtgc

SEQ ID NO: 81606 - DNA, 15 bp, Homo sapiens
tccccaggctctgtg

SEQ ID NO: 81607 - DNA, 15 bp, Homo sapiens
ttccccaggctctgt

SEQ ID NO: 81608 - DNA, 15 bp, Homo sapiens
attccccaggctctg

SEQ ID NO: 81609 - DNA, 15 bp, Homo sapiens
cattccccaggctct

SEQ ID NO: 81610 - DNA, 15 bp, Homo sapiens
tcattccccaggctc

SEQ ID NO: 81611 - DNA, 15 bp, Homo sapiens
ctcattccccaggct

SEQ ID NO: 81612 - DNA, 15 bp, Homo sapiens
cctcattccccaggc

SEQ ID NO: 81613 - DNA, 15 bp, Homo sapiens
ccctcattccccagg

SEQ ID NO: 81614 - DNA, 15 bp, Homo sapiens
tccctcattccccag

SEQ ID NO: 81615 - DNA, 15 bp, Homo sapiens
atccctcattcccca

SEQ ID NO: 81616 - DNA, 15 bp, Homo sapiens
catccctcattcccc

SEQ ID NO: 81617 - DNA, 15 bp, Homo sapiens
ccatccctcattccc

SEQ ID NO: 81618 - DNA, 15 bp, Homo sapiens
tccatccctcattcc

SEQ ID NO: 81619 - DNA, 15 bp, Homo sapiens
ctccatccctcattc

SEQ ID NO: 81620 - DNA, 15 bp, Homo sapiens
cctccatccctcatt

SEQ ID NO: 81621 - DNA, 15 bp, Homo sapiens
gcctccatccctcat

SEQ ID NO: 81622 - DNA, 15 bp, Homo sapiens
ggcctccatccctca

SEQ ID NO: 81623 - DNA, 15 bp, Homo sapiens
tggcctccatccctc

SEQ ID NO: 81624 - DNA, 15 bp, Homo sapiens
ctggcctccatccct

SEQ ID NO: 81625 - DNA, 15 bp, Homo sapiens
actggcctccatccc

SEQ ID NO: 81626 - DNA, 15 bp, Homo sapiens
cactggcctccatcc

SEQ ID NO: 81627 - DNA, 15 bp, Homo sapiens
acactggcctccatc

SEQ ID NO: 81628 - DNA, 15 bp, Homo sapiens
cacactggcctccat

SEQ ID NO: 81629 - DNA, 15 bp, Homo sapiens
gcacactggcctcca

SEQ ID NO: 81630 - DNA, 15 bp, Homo sapiens
tgcacactggcctcc

SEQ ID NO: 81631 - DNA, 15 bp, Homo sapiens
ctgcacactggcctc

SEQ ID NO: 81632 - DNA, 15 bp, Homo sapiens
tctgcacactggcct

SEQ ID NO: 81633 - DNA, 15 bp, Homo sapiens
ttctgcacactggcc

SEQ ID NO: 81634 - DNA, 15 bp, Homo sapiens
tttctgcacactggc

SEQ ID NO: 81635 - DNA, 15 bp, Homo sapiens
ttttctgcacactgg

SEQ ID NO: 81636 - DNA, 15 bp, Homo sapiens
cttttctgcacactg

SEQ ID NO: 81637 - DNA, 15 bp, Homo sapiens
gcttttctgcacact

SEQ ID NO: 81638 - DNA, 15 bp, Homo sapiens
ggcttttctgcacac

SEQ ID NO: 81639 - DNA, 15 bp, Homo sapiens
cggcttttctgcaca

SEQ ID NO: 81640 - DNA, 15 bp, Homo sapiens
acggcttttctgcac

SEQ ID NO: 81641 - DNA, 15 bp, Homo sapiens
cacggcttttctgca

SEQ ID NO: 81642 - DNA, 15 bp, Homo sapiens
gcacggcttttctgc

SEQ ID NO: 81643 - DNA, 15 bp, Homo sapiens
cgcacggcttttctg

SEQ ID NO: 81644 - DNA, 15 bp, Homo sapiens
ccgcacggcttttct

SEQ ID NO: 81645 - DNA, 15 bp, Homo sapiens
tccgcacggcttttc

SEQ ID NO: 81646 - DNA, 15 bp, Homo sapiens
ttccgcacggctttt

SEQ ID NO: 81647 - DNA, 15 bp, Homo sapiens
tttccgcacggcttt

SEQ ID NO: 81648 - DNA, 15 bp, Homo sapiens
gtttccgcacggctt

SEQ ID NO: 81649 - DNA, 15 bp, Homo sapiens
tgtttccgcacggct

SEQ ID NO: 81650 - DNA, 15 bp, Homo sapiens
gtgtttccgcacggc

SEQ ID NO: 81651 - DNA, 15 bp, Homo sapiens
ggtgtttccgcacgg

SEQ ID NO: 81652 - DNA, 15 bp, Homo sapiens
aggtgtttccgcacg

SEQ ID NO: 81653 - DNA, 15 bp, Homo sapiens
gaggtgtttccgcac

SEQ ID NO: 81654 - DNA, 15 bp, Homo sapiens
cgaggtgtttccgca

SEQ ID NO: 81655 - DNA, 15 bp, Homo sapiens
acgaggtgtttccgc

SEQ ID NO: 81656 - DNA, 15 bp, Homo sapiens
cacgaggtgtttccg

SEQ ID NO: 81657 - DNA, 15 bp, Homo sapiens
gcacgaggtgtttcc

SEQ ID NO: 81658 - DNA, 15 bp, Homo sapiens
tgcacgaggtgtttc

SEQ ID NO: 81659 - DNA, 15 bp, Homo sapiens
ctgcacgaggtgttt

SEQ ID NO: 81660 - DNA, 15 bp, Homo sapiens
actgcacgaggtgtt

SEQ ID NO: 81661 - DNA, 15 bp, Homo sapiens
gactgcacgaggtgt

SEQ ID NO: 81662 - DNA, 15 bp, Homo sapiens
tgactgcacgaggtg

SEQ ID NO: 81663 - DNA, 15 bp, Homo sapiens
atgactgcacgaggt

SEQ ID NO: 81664 - DNA, 15 bp, Homo sapiens
aatgactgcacgagg

SEQ ID NO: 81665 - DNA, 15 bp, Homo sapiens
gaatgactgcacgag

SEQ ID NO: 81666 - DNA, 15 bp, Homo sapiens
agaatgactgcacga

SEQ ID NO: 81667 - DNA, 15 bp, Homo sapiens
gagaatgactgcacg

SEQ ID NO: 81668 - DNA, 15 bp, Homo sapiens
ggagaatgactgcac

SEQ ID NO: 81669 - DNA, 15 bp, Homo sapiens
aggagaatgactgca

SEQ ID NO: 81670 - DNA, 15 bp, Homo sapiens
taggagaatgactgc

SEQ ID NO: 81671 - DNA, 15 bp, Homo sapiens
ataggagaatgactg

SEQ ID NO: 81672 - DNA, 15 bp, Homo sapiens
gataggagaatgact

SEQ ID NO: 81673 - DNA, 15 bp, Homo sapiens
cgataggagaatgac

SEQ ID NO: 81674 - DNA, 15 bp, Homo sapiens
tcgataggagaatga

SEQ ID NO: 81675 - DNA, 15 bp, Homo sapiens
ctcgataggagaatg

SEQ ID NO: 81676 - DNA, 15 bp, Homo sapiens
gctcgataggagaat

SEQ ID NO: 81677 - DNA, 15 bp, Homo sapiens
agctcgataggagaa

SEQ ID NO: 81678 - DNA, 15 bp, Homo sapiens
gagctcgataggaga

SEQ ID NO: 81679 - DNA, 15 bp, Homo sapiens
agagctcgataggag

SEQ ID NO: 81680 - DNA, 15 bp, Homo sapiens
cagagctcgatagga

SEQ ID NO: 81681 - DNA, 15 bp, Homo sapiens
ccagagctcgatagg

SEQ ID NO: 81682 - DNA, 15 bp, Homo sapiens
cccagagctcgatag

SEQ ID NO: 81683 - DNA, 15 bp, Homo sapiens
tcccagagctcgata

SEQ ID NO: 81684 - DNA, 15 bp, Homo sapiens
ttcccagagctcgat

SEQ ID NO: 81685 - DNA, 15 bp, Homo sapiens
gttcccagagctcga

SEQ ID NO: 81686 - DNA, 15 bp, Homo sapiens
ggttcccagagctcg

SEQ ID NO: 81687 - DNA, 15 bp, Homo sapiens
cggttcccagagctc

SEQ ID NO: 81688 - DNA, 15 bp, Homo sapiens
gcggttcccagagct

SEQ ID NO: 81689 - DNA, 15 bp, Homo sapiens
cgcggttcccagagc

SEQ ID NO: 81690 - DNA, 15 bp, Homo sapiens
ccgcggttcccagag

SEQ ID NO: 81691 - DNA, 15 bp, Homo sapiens
cccgcggttcccaga

SEQ ID NO: 81692 - DNA, 15 bp, Homo sapiens
ccccgcggttcccag

SEQ ID NO: 81693 - DNA, 15 bp, Homo sapiens
accccgcggttccca

SEQ ID NO: 81694 - DNA, 15 bp, Homo sapiens
caccccgcggttccc

SEQ ID NO: 81695 - DNA, 15 bp, Homo sapiens
ccaccccgcggttcc

SEQ ID NO: 81696 - DNA, 15 bp, Homo sapiens
cccaccccgcggttc

SEQ ID NO: 81697 - DNA, 15 bp, Homo sapiens
ccccaccccgcggtt

SEQ ID NO: 81698 - DNA, 15 bp, Homo sapiens
cccccaccccgcggt

SEQ ID NO: 81699 - DNA, 15 bp, Homo sapiens
tcccccaccccgcgg

SEQ ID NO: 81700 - DNA, 15 bp, Homo sapiens
ctcccccaccccgcg

SEQ ID NO: 81701 - DNA, 15 bp, Homo sapiens
tctcccccaccccgc

SEQ ID NO: 81702 - DNA, 15 bp, Homo sapiens
ttctcccccaccccg

SEQ ID NO: 81703 - DNA, 15 bp, Homo sapiens
attctcccccacccc

SEQ ID NO: 81704 - DNA, 15 bp, Homo sapiens
gattctcccccaccc

SEQ ID NO: 81705 - DNA, 15 bp, Homo sapiens
ggattctcccccacc

SEQ ID NO: 81706 - DNA, 15 bp, Homo sapiens
tggattctcccccac

SEQ ID NO: 81707 - DNA, 15 bp, Homo sapiens
ttggattctccccca

SEQ ID NO: 81708 - DNA, 15 bp, Homo sapiens
tttggattctccccc

SEQ ID NO: 81709 - DNA, 15 bp, Homo sapiens
gtttggattctcccc

SEQ ID NO: 81710 - DNA, 15 bp, Homo sapiens
tgtttggattctccc

SEQ ID NO: 81711 - DNA, 15 bp, Homo sapiens
ttgtttggattctcc

SEQ ID NO: 81712 - DNA, 15 bp, Homo sapiens
attgtttggattctc

SEQ ID NO: 81713 - DNA, 15 bp, Homo sapiens
gattgtttggattct

SEQ ID NO: 81714 - DNA, 15 bp, Homo sapiens
cgattgtttggattc

SEQ ID NO: 81715 - DNA, 15 bp, Homo sapiens
ccgattgtttggatt

SEQ ID NO: 81716 - DNA, 15 bp, Homo sapiens
cccgattgtttggat

SEQ ID NO: 81717 - DNA, 15 bp, Homo sapiens
tcccgattgtttgga

SEQ ID NO: 81718 - DNA, 15 bp, Homo sapiens
ctcccgattgtttgg

SEQ ID NO: 81719 - DNA, 15 bp, Homo sapiens
cctcccgattgtttg

SEQ ID NO: 81720 - DNA, 15 bp, Homo sapiens
tcctcccgattgttt

SEQ ID NO: 81721 - DNA, 15 bp, Homo sapiens
ttcctcccgattgtt

SEQ ID NO: 81722 - DNA, 15 bp, Homo sapiens
tttcctcccgattgt

SEQ ID NO: 81723 - DNA, 15 bp, Homo sapiens
ttttcctcccgattg

SEQ ID NO: 81724 - DNA, 15 bp, Homo sapiens
tttttcctcccgatt

SEQ ID NO: 81725 - DNA, 15 bp, Homo sapiens
atttttcctcccgat

SEQ ID NO: 81726 - DNA, 15 bp, Homo sapiens
tatttttcctcccga

SEQ ID NO: 81727 - DNA, 15 bp, Homo sapiens
atatttttcctcccg

SEQ ID NO: 81728 - DNA, 15 bp, Homo sapiens
gatatttttcctccc

SEQ ID NO: 81729 - DNA, 15 bp, Homo sapiens
ggatatttttcctcc

SEQ ID NO: 81730 - DNA, 15 bp, Homo sapiens
gggatatttttcctc

SEQ ID NO: 81731 - DNA, 15 bp, Homo sapiens
agggatatttttcct

SEQ ID NO: 81732 - DNA, 15 bp, Homo sapiens
cagggatatttttcc

SEQ ID NO: 81733 - DNA, 15 bp, Homo sapiens
acagggatatttttc

SEQ ID NO: 81734 - DNA, 15 bp, Homo sapiens
aacagggatattttt

SEQ ID NO: 81735 - DNA, 15 bp, Homo sapiens
gaacagggatatttt

SEQ ID NO: 81736 - DNA, 15 bp, Homo sapiens
agaacagggatattt

SEQ ID NO: 81737 - DNA, 15 bp, Homo sapiens
tagaacagggatatt

SEQ ID NO: 81738 - DNA, 15 bp, Homo sapiens
ctagaacagggatat

SEQ ID NO: 81739 - DNA, 15 bp, Homo sapiens
gctagaacagggata

SEQ ID NO: 81740 - DNA, 15 bp, Homo sapiens
agctagaacagggat

SEQ ID NO: 81741 - DNA, 15 bp, Homo sapiens
cagctagaacaggga

SEQ ID NO: 81742 - DNA, 15 bp, Homo sapiens
acagctagaacaggg

SEQ ID NO: 81743 - DNA, 15 bp, Homo sapiens
aacagctagaacagg

SEQ ID NO: 81744 - DNA, 15 bp, Homo sapiens
gaacagctagaacag

SEQ ID NO: 81745 - DNA, 15 bp, Homo sapiens
tgaacagctagaaca

SEQ ID NO: 81746 - DNA, 15 bp, Homo sapiens
ctgaacagctagaac

SEQ ID NO: 81747 - DNA, 15 bp, Homo sapiens
cctgaacagctagaa

SEQ ID NO: 81748 - DNA, 15 bp, Homo sapiens
gcctgaacagctaga

SEQ ID NO: 81749 - DNA, 15 bp, Homo sapiens
agcctgaacagctag

SEQ ID NO: 81750 - DNA, 15 bp, Homo sapiens
cagcctgaacagcta

SEQ ID NO: 81751 - DNA, 15 bp, Homo sapiens
gcagcctgaacagct

SEQ ID NO: 81752 - DNA, 15 bp, Homo sapiens
agcagcctgaacagc

SEQ ID NO: 81753 - DNA, 15 bp, Homo sapiens
cagcagcctgaacag

SEQ ID NO: 81754 - DNA, 15 bp, Homo sapiens
acagcagcctgaaca

SEQ ID NO: 81755 - DNA, 15 bp, Homo sapiens
tacagcagcctgaac

SEQ ID NO: 81756 - DNA, 15 bp, Homo sapiens
ttacagcagcctgaa

SEQ ID NO: 81757 - DNA, 15 bp, Homo sapiens
attacagcagcctga

SEQ ID NO: 81758 - DNA, 15 bp, Homo sapiens
cattacagcagcctg

SEQ ID NO: 81759 - DNA, 15 bp, Homo sapiens
ccattacagcagcct

SEQ ID NO: 81760 - DNA, 15 bp, Homo sapiens
tccattacagcagcc

SEQ ID NO: 81761 - DNA, 15 bp, Homo sapiens
ctccattacagcagc

SEQ ID NO: 81762 - DNA, 15 bp, Homo sapiens
actccattacagcag

SEQ ID NO: 81763 - DNA, 15 bp, Homo sapiens
gactccattacagca

SEQ ID NO: 81764 - DNA, 15 bp, Homo sapiens
ggactccattacagc

SEQ ID NO: 81765 - DNA, 15 bp, Homo sapiens
gggactccattacag

SEQ ID NO: 81766 - DNA, 15 bp, Homo sapiens
tgggactccattaca

SEQ ID NO: 81767 - DNA, 15 bp, Homo sapiens
atgggactccattac

SEQ ID NO: 81768 - DNA, 15 bp, Homo sapiens
tatgggactccatta

SEQ ID NO: 81769 - DNA, 15 bp, Homo sapiens
ttatgggactccatt

SEQ ID NO: 81770 - DNA, 15 bp, Homo sapiens
gttatgggactccat

SEQ ID NO: 81771 - DNA, 15 bp, Homo sapiens
agttatgggactcca

SEQ ID NO: 81772 - DNA, 15 bp, Homo sapiens
cagttatgggactcc

SEQ ID NO: 81773 - DNA, 15 bp, Homo sapiens
ccagttatgggactc

SEQ ID NO: 81774 - DNA, 15 bp, Homo sapiens
cccagttatgggact

SEQ ID NO: 81775 - DNA, 15 bp, Homo sapiens
acccagttatgggac

SEQ ID NO: 81776 - DNA, 15 bp, Homo sapiens
cacccagttatggga

SEQ ID NO: 81777 - DNA, 15 bp, Homo sapiens
ccacccagttatggg

SEQ ID NO: 81778 - DNA, 15 bp, Homo sapiens
gccacccagttatgg

SEQ ID NO: 81779 - DNA, 15 bp, Homo sapiens
agccacccagttatg

SEQ ID NO: 81780 - DNA, 15 bp, Homo sapiens
gagccacccagttat

SEQ ID NO: 81781 - DNA, 15 bp, Homo sapiens
tgagccacccagtta

SEQ ID NO: 81782 - DNA, 15 bp, Homo sapiens
atgagccacccagtt

SEQ ID NO: 81783 - DNA, 15 bp, Homo sapiens
gatgagccacccagt

SEQ ID NO: 81784 - DNA, 15 bp, Homo sapiens
tgatgagccacccag

SEQ ID NO: 81785 - DNA, 15 bp, Homo sapiens
ttgatgagccaccca

SEQ ID NO: 81786 - DNA, 15 bp, Homo sapiens
gttgatgagccaccc

SEQ ID NO: 81787 - DNA, 15 bp, Homo sapiens
tgttgatgagccacc

SEQ ID NO: 81788 - DNA, 15 bp, Homo sapiens
ctgttgatgagccac

SEQ ID NO: 81789 - DNA, 15 bp, Homo sapiens
actgttgatgagcca

SEQ ID NO: 81790 - DNA, 15 bp, Homo sapiens
cactgttgatgagcc

SEQ ID NO: 81791 - DNA, 15 bp, Homo sapiens
tcactgttgatgagc

SEQ ID NO: 81792 - DNA, 15 bp, Homo sapiens
ttcactgttgatgag

SEQ ID NO: 81793 - DNA, 15 bp, Homo sapiens
attcactgttgatga

SEQ ID NO: 81794 - DNA, 15 bp, Homo sapiens
cattcactgttgatg

SEQ ID NO: 81795 - DNA, 15 bp, Homo sapiens
gcattcactgttgat

SEQ ID NO: 81796 - DNA, 15 bp, Homo sapiens
agcattcactgttga

SEQ ID NO: 81797 - DNA, 15 bp, Homo sapiens
aagcattcactgttg

SEQ ID NO: 81798 - DNA, 15 bp, Homo sapiens
ttctcaaacctttct

SEQ ID NO: 81799 - DNA, 15 bp, Homo sapiens
cttctcaaacctttc

SEQ ID NO: 81800 - DNA, 15 bp, Homo sapiens
ccttctcaaaccttt

SEQ ID NO: 81801 - DNA, 15 bp, Homo sapiens
accttctcaaacctt

SEQ ID NO: 81802 - DNA, 15 bp, Homo sapiens
aaccttctcaaacct

SEQ ID NO: 81803 - DNA, 15 bp, Homo sapiens
caaccttctcaaacc

SEQ ID NO: 81804 - DNA, 15 bp, Homo sapiens
ccaaccttctcaaac

SEQ ID NO: 81805 - DNA, 15 bp, Homo sapiens
gccaaccttctcaaa

SEQ ID NO: 81806 - DNA, 15 bp, Homo sapiens
agccaaccttctcaa

SEQ ID NO: 81807 - DNA, 15 bp, Homo sapiens
aagccaaccttctca

SEQ ID NO: 81808 - DNA, 15 bp, Homo sapiens
gaagccaaccttctc

SEQ ID NO: 81809 - DNA, 15 bp, Homo sapiens
tgaagccaaccttct

SEQ ID NO: 81810 - DNA, 15 bp, Homo sapiens
gtgaagccaaccttc

SEQ ID NO: 81811 - DNA, 15 bp, Homo sapiens
agtgaagccaacctt

SEQ ID NO: 81812 - DNA, 15 bp, Homo sapiens
cagtgaagccaacct

SEQ ID NO: 81813 - DNA, 15 bp, Homo sapiens
ccagtgaagccaacc

SEQ ID NO: 81814 - DNA, 15 bp, Homo sapiens
gccagtgaagccaac

SEQ ID NO: 81815 - DNA, 15 bp, Homo sapiens
agccagtgaagccaa

SEQ ID NO: 81816 - DNA, 15 bp, Homo sapiens
aagccagtgaagcca

SEQ ID NO: 81817 - DNA, 15 bp, Homo sapiens
gaagccagtgaagcc

SEQ ID NO: 81818 - DNA, 15 bp, Homo sapiens
tgaagccagtgaagc

SEQ ID NO: 81819 - DNA, 15 bp, Homo sapiens
atgaagccagtgaag

SEQ ID NO: 81820 - DNA, 15 bp, Homo sapiens
aatgaagccagtgaa

SEQ ID NO: 81821 - DNA, 15 bp, Homo sapiens
caatgaagccagtga

SEQ ID NO: 81822 - DNA, 15 bp, Homo sapiens
tcaatgaagccagtg

SEQ ID NO: 81823 - DNA, 15 bp, Homo sapiens
gtcaatgaagccagt

SEQ ID NO: 81824 - DNA, 15 bp, Homo sapiens
agtcaatgaagccag

SEQ ID NO: 81825 - DNA, 15 bp, Homo sapiens
aagtcaatgaagcca

SEQ ID NO: 81826 - DNA, 15 bp, Homo sapiens
aaagtcaatgaagcc

SEQ ID NO: 81827 - DNA, 15 bp, Homo sapiens
caaagtcaatgaagc

SEQ ID NO: 81828 - DNA, 15 bp, Homo sapiens
ccaaagtcaatgaag

SEQ ID NO: 81829 - DNA, 15 bp, Homo sapiens
cccaaagtcaatgaa

SEQ ID NO: 81830 - DNA, 15 bp, Homo sapiens
acccaaagtcaatga

SEQ ID NO: 81831 - DNA, 15 bp, Homo sapiens
aacccaaagtcaatg

SEQ ID NO: 81832 - DNA, 15 bp, Homo sapiens
aaacccaaagtcaat

SEQ ID NO: 81833 - DNA, 15 bp, Homo sapiens
gaaacccaaagtcaa

SEQ ID NO: 81834 - DNA, 15 bp, Homo sapiens
agaaacccaaagtca

SEQ ID NO: 81835 - DNA, 15 bp, Homo sapiens
gagaaacccaaagtc

SEQ ID NO: 81836 - DNA, 15 bp, Homo sapiens
tgagaaacccaaagt

SEQ ID NO: 81837 - DNA, 15 bp, Homo sapiens
atgagaaacccaaag

SEQ ID NO: 81838 - DNA, 15 bp, Homo sapiens
catgagaaacccaaa

SEQ ID NO: 81839 - DNA, 15 bp, Homo sapiens
tcatgagaaacccaa

SEQ ID NO: 81840 - DNA, 15 bp, Homo sapiens
ttcatgagaaaccca

SEQ ID NO: 81841 - DNA, 15 bp, Homo sapiens
gttcatgagaaaccc

SEQ ID NO: 81842 - DNA, 15 bp, Homo sapiens
tgttcatgagaaacc

SEQ ID NO: 81843 - DNA, 15 bp, Homo sapiens
atgttcatgagaaac

SEQ ID NO: 81844 - DNA, 15 bp, Homo sapiens
gatgttcatgagaaa

SEQ ID NO: 81845 - DNA, 15 bp, Homo sapiens
tgatgttcatgagaa

SEQ ID NO: 81846 - DNA, 15 bp, Homo sapiens
gtgatgttcatgaga

SEQ ID NO: 81847 - DNA, 15 bp, Homo sapiens
ggtgatgttcatgag

SEQ ID NO: 81848 - DNA, 15 bp, Homo sapiens
tggtgatgttcatga

SEQ ID NO: 81849 - DNA, 15 bp, Homo sapiens
ttggtgatgttcatg

SEQ ID NO: 81850 - DNA, 15 bp, Homo sapiens
gttggtgatgttcat

SEQ ID NO: 81851 - DNA, 15 bp, Homo sapiens
ggttggtgatgttca

SEQ ID NO: 81852 - DNA, 15 bp, Homo sapiens
aggttggtgatgttc

SEQ ID NO: 81853 - DNA, 15 bp, Homo sapiens
taggttggtgatgtt

SEQ ID NO: 81854 - DNA, 15 bp, Homo sapiens
ataggttggtgatgt

SEQ ID NO: 81855 - DNA, 15 bp, Homo sapiens
tataggttggtgatg

SEQ ID NO: 81856 - DNA, 15 bp, Homo sapiens
ttataggttggtgat

SEQ ID NO: 81857 - DNA, 15 bp, Homo sapiens
attataggttggtga

SEQ ID NO: 81858 - DNA, 15 bp, Homo sapiens
cattataggttggtg

SEQ ID NO: 81859 - DNA, 15 bp, Homo sapiens
tcattataggttggt

SEQ ID NO: 81860 - DNA, 15 bp, Homo sapiens
ttcattataggttgg

SEQ ID NO: 81861 - DNA, 15 bp, Homo sapiens
gttcattataggttg

SEQ ID NO: 81862 - DNA, 15 bp, Homo sapiens
tgttcattataggtt

SEQ ID NO: 81863 - DNA, 15 bp, Homo sapiens
atgttcattataggt

SEQ ID NO: 81864 - DNA, 15 bp, Homo sapiens
catgttcattatagg

SEQ ID NO: 81865 - DNA, 15 bp, Homo sapiens
ccatgttcattatag

SEQ ID NO: 81866 - DNA, 15 bp, Homo sapiens
cccatgttcattata

SEQ ID NO: 81867 - DNA, 15 bp, Homo sapiens
tcccatgttcattat

SEQ ID NO: 81868 - DNA, 15 bp, Homo sapiens
ctcccatgttcatta

SEQ ID NO: 81869 - DNA, 15 bp, Homo sapiens
tctcccatgttcatt

SEQ ID NO: 81870 - DNA, 15 bp, Homo sapiens
atctcccatgttcat

SEQ ID NO: 81871 - DNA, 15 bp, Homo sapiens
gatctcccatgttca

SEQ ID NO: 81872 - DNA, 15 bp, Homo sapiens
agatctcccatgttc

SEQ ID NO: 81873 - DNA, 15 bp, Homo sapiens
gagatctcccatgtt

SEQ ID NO: 81874 - DNA, 15 bp, Homo sapiens
tgagatctcccatgt

SEQ ID NO: 81875 - DNA, 15 bp, Homo sapiens
ttgagatctcccatg

SEQ ID NO: 81876 - DNA, 15 bp, Homo sapiens
attgagatctcccat

SEQ ID NO: 81877 - DNA, 15 bp, Homo sapiens
gattgagatctccca

SEQ ID NO: 81878 - DNA, 15 bp, Homo sapiens
tgattgagatctccc

SEQ ID NO: 81879 - DNA, 15 bp, Homo sapiens
gtgattgagatctcc

SEQ ID NO: 81880 - DNA, 15 bp, Homo sapiens
tgtgattgagatctc

SEQ ID NO: 81881 - DNA, 15 bp, Homo sapiens
gtgtgattgagatct

SEQ ID NO: 81882 - DNA, 15 bp, Homo sapiens
tgtgtgattgagatc

SEQ ID NO: 81883 - DNA, 15 bp, Homo sapiens
ctgtgtgattgagat

SEQ ID NO: 81884 - DNA, 15 bp, Homo sapiens
tctgtgtgattgaga

SEQ ID NO: 81885 - DNA, 15 bp, Homo sapiens
ttctgtgtgattgag

SEQ ID NO: 81886 - DNA, 15 bp, Homo sapiens
tttctgtgtgattga

SEQ ID NO: 81887 - DNA, 15 bp, Homo sapiens
ttttctgtgtgattg

SEQ ID NO: 81888 - DNA, 15 bp, Homo sapiens
gttttctgtgtgatt

SEQ ID NO: 81889 - DNA, 15 bp, Homo sapiens
ggttttctgtgtgat

SEQ ID NO: 81890 - DNA, 15 bp, Homo sapiens
tggttttctgtgtga

SEQ ID NO: 81891 - DNA, 15 bp, Homo sapiens
ctggttttctgtgtg

SEQ ID NO: 81892 - DNA, 15 bp, Homo sapiens
cctggttttctgtgt

SEQ ID NO: 81893 - DNA, 15 bp, Homo sapiens
acctggttttctgtg

SEQ ID NO: 81894 - DNA, 15 bp, Homo sapiens
cacctggttttctgt

SEQ ID NO: 81895 - DNA, 15 bp, Homo sapiens
ccacctggttttctg

SEQ ID NO: 81896 - DNA, 15 bp, Homo sapiens
tccacctggttttct

SEQ ID NO: 81897 - DNA, 15 bp, Homo sapiens
ttccacctggttttc

SEQ ID NO: 81898 - DNA, 15 bp, Homo sapiens
cttccacctggtttt

SEQ ID NO: 81899 - DNA, 15 bp, Homo sapiens
acttccacctggttt

SEQ ID NO: 81900 - DNA, 15 bp, Homo sapiens
tacttccacctggtt

SEQ ID NO: 81901 - DNA, 15 bp, Homo sapiens
ctacttccacctggt

SEQ ID NO: 81902 - DNA, 15 bp, Homo sapiens
gctacttccacctgg

SEQ ID NO: 81903 - DNA, 15 bp, Homo sapiens
tgctacttccacctg

SEQ ID NO: 81904 - DNA, 15 bp, Homo sapiens
ctgctacttccacct

SEQ ID NO: 81905 - DNA, 15 bp, Homo sapiens
actgctacttccacc

SEQ ID NO: 81906 - DNA, 15 bp, Homo sapiens
cactgctacttccac

SEQ ID NO: 81907 - DNA, 15 bp, Homo sapiens
gcactgctacttcca

SEQ ID NO: 81908 - DNA, 15 bp, Homo sapiens
cgcactgctacttcc

SEQ ID NO: 81909 - DNA, 15 bp, Homo sapiens
tcgcactgctacttc

SEQ ID NO: 81910 - DNA, 15 bp, Homo sapiens
ctcgcactgctactt

SEQ ID NO: 81911 - DNA, 15 bp, Homo sapiens
tctcgcactgctact

SEQ ID NO: 81912 - DNA, 15 bp, Homo sapiens
ttctcgcactgctac

SEQ ID NO: 81913 - DNA, 15 bp, Homo sapiens
gttctcgcactgcta

SEQ ID NO: 81914 - DNA, 15 bp, Homo sapiens
agttctcgcactgct

SEQ ID NO: 81915 - DNA, 15 bp, Homo sapiens
cagttctcgcactgc

SEQ ID NO: 81916 - DNA, 15 bp, Homo sapiens
ccagttctcgcactg

SEQ ID NO: 81917 - DNA, 15 bp, Homo sapiens
cccagttctcgcact

SEQ ID NO: 81918 - DNA, 15 bp, Homo sapiens
tcccagttctcgcac

SEQ ID NO: 81919 - DNA, 15 bp, Homo sapiens
ctcccagttctcgca

SEQ ID NO: 81920 - DNA, 15 bp, Homo sapiens
gctcccagttctcgc

SEQ ID NO: 81921 - DNA, 15 bp, Homo sapiens
ggctcccagttctcg

SEQ ID NO: 81922 - DNA, 15 bp, Homo sapiens
tggctcccagttctc

SEQ ID NO: 81923 - DNA, 15 bp, Homo sapiens
atggctcccagttct

SEQ ID NO: 81924 - DNA, 15 bp, Homo sapiens
gatggctcccagttc

SEQ ID NO: 81925 - DNA, 15 bp, Homo sapiens
agatggctcccagtt

SEQ ID NO: 81926 - DNA, 15 bp, Homo sapiens
cagatggctcccagt

SEQ ID NO: 81927 - DNA, 15 bp, Homo sapiens
ccagatggctcccag

SEQ ID NO: 81928 - DNA, 15 bp, Homo sapiens
tccagatggctccca

SEQ ID NO: 81929 - DNA, 15 bp, Homo sapiens
gtccagatggctccc

SEQ ID NO: 81930 - DNA, 15 bp, Homo sapiens
tgtccagatggctcc

SEQ ID NO: 81931 - DNA, 15 bp, Homo sapiens
atgtccagatggctc

SEQ ID NO: 81932 - DNA, 15 bp, Homo sapiens
catgtccagatggct

SEQ ID NO: 81933 - DNA, 15 bp, Homo sapiens
ccatgtccagatggc

SEQ ID NO: 81934 - DNA, 15 bp, Homo sapiens
accatgtccagatgg

SEQ ID NO: 81935 - DNA, 15 bp, Homo sapiens
caccatgtccagatg

SEQ ID NO: 81936 - DNA, 15 bp, Homo sapiens
ccaccatgtccagat

SEQ ID NO: 81937 - DNA, 15 bp, Homo sapiens
gccaccatgtccaga

SEQ ID NO: 81938 - DNA, 15 bp, Homo sapiens
agccaccatgtccag

SEQ ID NO: 81939 - DNA, 15 bp, Homo sapiens
gagccaccatgtcca

SEQ ID NO: 81940 - DNA, 15 bp, Homo sapiens
tgagccaccatgtcc

SEQ ID NO: 81941 - DNA, 15 bp, Homo sapiens
atgagccaccatgtc

SEQ ID NO: 81942 - DNA, 15 bp, Homo sapiens
catgagccaccatgt

SEQ ID NO: 81943 - DNA, 15 bp, Homo sapiens
gggcatgagccacca

SEQ ID NO: 81944 - DNA, 15 bp, Homo sapiens
cgggcatgagccacc

SEQ ID NO: 81945 - DNA, 15 bp, Homo sapiens
acgggcatgagccac

SEQ ID NO: 81946 - DNA, 15 bp, Homo sapiens
tacgggcatgagcca

SEQ ID NO: 81947 - DNA, 15 bp, Homo sapiens
ttacgggcatgagcc

SEQ ID NO: 81948 - DNA, 15 bp, Homo sapiens
attacgggcatgagc

SEQ ID NO: 81949 - DNA, 15 bp, Homo sapiens
gattacgggcatgag

SEQ ID NO: 81950 - DNA, 15 bp, Homo sapiens
ggattacgggcatga

SEQ ID NO: 81951 - DNA, 15 bp, Homo sapiens
aggattacgggcatg

SEQ ID NO: 81952 - DNA, 15 bp, Homo sapiens
taggattacgggcat

SEQ ID NO: 81953 - DNA, 15 bp, Homo sapiens
ataggattacgggca

SEQ ID NO: 81954 - DNA, 15 bp, Homo sapiens
gataggattacgggc

SEQ ID NO: 81955 - DNA, 15 bp, Homo sapiens
tgataggattacggg

SEQ ID NO: 81956 - DNA, 15 bp, Homo sapiens
gtgataggattacgg

SEQ ID NO: 81957 - DNA, 15 bp, Homo sapiens
agtgataggattacg

SEQ ID NO: 81958 - DNA, 15 bp, Homo sapiens
aagtgataggattac

SEQ ID NO: 81959 - DNA, 15 bp, Homo sapiens
aaagtgataggatta

SEQ ID NO: 81960 - DNA, 15 bp, Homo sapiens
caaagtgataggatt

SEQ ID NO: 81961 - DNA, 15 bp, Homo sapiens
ccaaagtgataggat

SEQ ID NO: 81962 - DNA, 15 bp, Homo sapiens
cccaaagtgatagga

SEQ ID NO: 81963 - DNA, 15 bp, Homo sapiens
tcccaaagtgatagg

SEQ ID NO: 81964 - DNA, 15 bp, Homo sapiens
ctcccaaagtgatag

SEQ ID NO: 81965 - DNA, 15 bp, Homo sapiens
cctcccaaagtgata

SEQ ID NO: 81966 - DNA, 15 bp, Homo sapiens
gcctcccaaagtgat

SEQ ID NO: 81967 - DNA, 15 bp, Homo sapiens
ggcctcccaaagtga

SEQ ID NO: 81968 - DNA, 15 bp, Homo sapiens
tggcctcccaaagtg

SEQ ID NO: 81969 - DNA, 15 bp, Homo sapiens
ttggcctcccaaagt

SEQ ID NO: 81970 - DNA, 15 bp, Homo sapiens
cttggcctcccaaag

SEQ ID NO: 81971 - DNA, 15 bp, Homo sapiens
tgccttggcctccca

SEQ ID NO: 81972 - DNA, 15 bp, Homo sapiens
ttgccttggcctccc

SEQ ID NO: 81973 - DNA, 15 bp, Homo sapiens
cttgccttggcctcc

SEQ ID NO: 81974 - DNA, 15 bp, Homo sapiens
tcttgccttggcctc

SEQ ID NO: 81975 - DNA, 15 bp, Homo sapiens
ctcttgccttggcct

SEQ ID NO: 81976 - DNA, 15 bp, Homo sapiens
cctcttgccttggcc

SEQ ID NO: 81977 - DNA, 15 bp, Homo sapiens
tcctcttgccttggc

SEQ ID NO: 81978 - DNA, 15 bp, Homo sapiens
gtcctcttgccttgg

SEQ ID NO: 81979 - DNA, 15 bp, Homo sapiens
ggtcctcttgccttg

SEQ ID NO: 81980 - DNA, 15 bp, Homo sapiens
tggtcctcttgcctt

SEQ ID NO: 81981 - DNA, 15 bp, Homo sapiens
gtggtcctcttgcct

SEQ ID NO: 81982 - DNA, 15 bp, Homo sapiens
ggtggtcctcttgcc

SEQ ID NO: 81983 - DNA, 15 bp, Homo sapiens
aggtggtcctcttgc

SEQ ID NO: 81984 - DNA, 15 bp, Homo sapiens
caggtggtcctcttg

SEQ ID NO: 81985 - DNA, 15 bp, Homo sapiens
tcaggtggtcctctt

SEQ ID NO: 81986 - DNA, 15 bp, Homo sapiens
ttcaggtggtcctct

SEQ ID NO: 81987 - DNA, 15 bp, Homo sapiens
cttcaggtggtcctc

SEQ ID NO: 81988 - DNA, 15 bp, Homo sapiens
gcttcaggtggtcct

SEQ ID NO: 81989 - DNA, 15 bp, Homo sapiens
tgcttcaggtggtcc

SEQ ID NO: 81990 - DNA, 15 bp, Homo sapiens
ttgcttcaggtggtc

SEQ ID NO: 81991 - DNA, 15 bp, Homo sapiens
cttgcttcaggtggt

SEQ ID NO: 81992 - DNA, 15 bp, Homo sapiens
ccttgcttcaggtgg

SEQ ID NO: 81993 - DNA, 15 bp, Homo sapiens
tccttgcttcaggtg

SEQ ID NO: 81994 - DNA, 15 bp, Homo sapiens
ctccttgcttcaggt

SEQ ID NO: 81995 - DNA, 15 bp, Homo sapiens
actccttgcttcagg

SEQ ID NO: 81996 - DNA, 15 bp, Homo sapiens
aactccttgcttcag

SEQ ID NO: 81997 - DNA, 15 bp, Homo sapiens
gaactccttgcttca

SEQ ID NO: 81998 - DNA, 15 bp, Homo sapiens
tgaactccttgcttc

SEQ ID NO: 81999 - DNA, 15 bp, Homo sapiens
ttgaactccttgctt

SEQ ID NO: 82000 - DNA, 15 bp, Homo sapiens
cttgaactccttgct

SEQ ID NO: 82001 - DNA, 15 bp, Homo sapiens
tcttgaactccttgc

SEQ ID NO: 82002 - DNA, 15 bp, Homo sapiens
gtcttgaactccttg

SEQ ID NO: 82003 - DNA, 15 bp, Homo sapiens
ggtcttgaactcctt

SEQ ID NO: 82004 - DNA, 15 bp, Homo sapiens
taggctggtcttgaa

SEQ ID NO: 82005 - DNA, 15 bp, Homo sapiens
ctaggctggtcttga

SEQ ID NO: 82006 - DNA, 15 bp, Homo sapiens
cctaggctggtcttg

SEQ ID NO: 82007 - DNA, 15 bp, Homo sapiens
gcctaggctggtctt

SEQ ID NO: 82008 - DNA, 15 bp, Homo sapiens
tgcctaggctggtct

SEQ ID NO: 82009 - DNA, 15 bp, Homo sapiens
ttgcctaggctggtc

SEQ ID NO: 82010 - DNA, 15 bp, Homo sapiens
gttgcctaggctggt

SEQ ID NO: 82011 - DNA, 15 bp, Homo sapiens
tgttgcctaggctgg

SEQ ID NO: 82012 - DNA, 15 bp, Homo sapiens
atgttgcctaggctg

SEQ ID NO: 82013 - DNA, 15 bp, Homo sapiens
tatgttgcctaggct

SEQ ID NO: 82014 - DNA, 15 bp, Homo sapiens
ctatgttgcctaggc

SEQ ID NO: 82015 - DNA, 15 bp, Homo sapiens
actatgttgcctagg

SEQ ID NO: 82016 - DNA, 15 bp, Homo sapiens
tactatgttgcctag

SEQ ID NO: 82017 - DNA, 15 bp, Homo sapiens
ttactatgttgccta

SEQ ID NO: 82018 - DNA, 15 bp, Homo sapiens
cttactatgttgcct

SEQ ID NO: 82019 - DNA, 15 bp, Homo sapiens
tcttactatgttgcc

SEQ ID NO: 82020 - DNA, 15 bp, Homo sapiens
gtcttactatgttgc

SEQ ID NO: 82021 - DNA, 15 bp, Homo sapiens
ggtcttactatgttg

SEQ ID NO: 82022 - DNA, 15 bp, Homo sapiens
gggtcttactatgtt

SEQ ID NO: 82023 - DNA, 15 bp, Homo sapiens
agggtcttactatgt

SEQ ID NO: 82024 - DNA, 15 bp, Homo sapiens
cagggtcttactatg

SEQ ID NO: 82025 - DNA, 15 bp, Homo sapiens
acagggtcttactat

SEQ ID NO: 82026 - DNA, 15 bp, Homo sapiens
gacagggtcttacta

SEQ ID NO: 82027 - DNA, 15 bp, Homo sapiens
agacagggtcttact

SEQ ID NO: 82028 - DNA, 15 bp, Homo sapiens
gagacagggtcttac

SEQ ID NO: 82029 - DNA, 15 bp, Homo sapiens
agagacagggtctta

SEQ ID NO: 82030 - DNA, 15 bp, Homo sapiens
tagagacagggtctt

SEQ ID NO: 82031 - DNA, 15 bp, Homo sapiens
gtagagacagggtct

SEQ ID NO: 82032 - DNA, 15 bp, Homo sapiens
tgtagagacagggtc

SEQ ID NO: 82033 - DNA, 15 bp, Homo sapiens
ttgtagagacagggt

SEQ ID NO: 82034 - DNA, 15 bp, Homo sapiens
tttgtagagacaggg

SEQ ID NO: 82035 - DNA, 15 bp, Homo sapiens
ttttgtagagacagg

SEQ ID NO: 82036 - DNA, 15 bp, Homo sapiens
tttttgtagagacag

SEQ ID NO: 82037 - DNA, 15 bp, Homo sapiens
ttttttgtagagaca

SEQ ID NO: 82038 - DNA, 15 bp, Homo sapiens
attttttgtagagac

SEQ ID NO: 82039 - DNA, 15 bp, Homo sapiens
tattttttgtagaga

SEQ ID NO: 82040 - DNA, 15 bp, Homo sapiens
ttattttttgtagag

SEQ ID NO: 82041 - DNA, 15 bp, Homo sapiens
tttattttttgtaga

SEQ ID NO: 82042 - DNA, 15 bp, Homo sapiens
ctttattttttgtag

SEQ ID NO: 82043 - DNA, 15 bp, Homo sapiens
tctttattttttgta

SEQ ID NO: 82044 - DNA, 15 bp, Homo sapiens
ttctttattttttgt

SEQ ID NO: 82045 - DNA, 15 bp, Homo sapiens
attctttattttttg

SEQ ID NO: 82046 - DNA, 15 bp, Homo sapiens
tattctttatttttt

SEQ ID NO: 82047 - DNA, 15 bp, Homo sapiens
ttattctttattttt

SEQ ID NO: 82048 - DNA, 15 bp, Homo sapiens
tttattctttatttt

SEQ ID NO: 82049 - DNA, 15 bp, Homo sapiens
ttttattctttattt

SEQ ID NO: 82050 - DNA, 15 bp, Homo sapiens
tttttattctttatt

SEQ ID NO: 82051 - DNA, 15 bp, Homo sapiens
ttttttattctttat

SEQ ID NO: 82052 - DNA, 15 bp, Homo sapiens
tttttttattcttta

SEQ ID NO: 82053 - DNA, 15 bp, Homo sapiens
atttttttattcttt

SEQ ID NO: 82054 - DNA, 15 bp, Homo sapiens
tatttttttattctt

SEQ ID NO: 82055 - DNA, 15 bp, Homo sapiens
ttatttttttattct

SEQ ID NO: 82056 - DNA, 15 bp, Homo sapiens
tttatttttttattc

SEQ ID NO: 82057 - DNA, 15 bp, Homo sapiens
atttatttttttatt

SEQ ID NO: 82058 - DNA, 15 bp, Homo sapiens
aatttatttttttat

SEQ ID NO: 82059 - DNA, 15 bp, Homo sapiens
taatttattttttta

SEQ ID NO: 82060 - DNA, 15 bp, Homo sapiens
ctaatttattttttt

SEQ ID NO: 82061 - DNA, 15 bp, Homo sapiens
gctaatttatttttt

SEQ ID NO: 82062 - DNA, 15 bp, Homo sapiens
agctaatttattttt

SEQ ID NO: 82063 - DNA, 15 bp, Homo sapiens
cagctaatttatttt

SEQ ID NO: 82064 - DNA, 15 bp, Homo sapiens
ccagctaatttattt

SEQ ID NO: 82065 - DNA, 15 bp, Homo sapiens
gccagctaatttatt

SEQ ID NO: 82066 - DNA, 15 bp, Homo sapiens
tgccagctaatttat

SEQ ID NO: 82067 - DNA, 15 bp, Homo sapiens
atgccagctaattta

SEQ ID NO: 82068 - DNA, 15 bp, Homo sapiens
catgccagctaattt

SEQ ID NO: 82069 - DNA, 15 bp, Homo sapiens
ccatgccagctaatt

SEQ ID NO: 82070 - DNA, 15 bp, Homo sapiens
accatgccagctaat

SEQ ID NO: 82071 - DNA, 15 bp, Homo sapiens
caccatgccagctaa

SEQ ID NO: 82072 - DNA, 15 bp, Homo sapiens
ccaccatgccagcta

SEQ ID NO: 82073 - DNA, 15 bp, Homo sapiens
accaccatgccagct

SEQ ID NO: 82074 - DNA, 15 bp, Homo sapiens
caccaccatgccagc

SEQ ID NO: 82075 - DNA, 15 bp, Homo sapiens
acaccaccatgccag

SEQ ID NO: 82076 - DNA, 15 bp, Homo sapiens
cacaccaccatgcca

SEQ ID NO: 82077 - DNA, 15 bp, Homo sapiens
acacaccaccatgcc

SEQ ID NO: 82078 - DNA, 15 bp, Homo sapiens
cacacaccaccatgc

SEQ ID NO: 82079 - DNA, 15 bp, Homo sapiens
gcacacaccaccatg

SEQ ID NO: 82080 - DNA, 15 bp, Homo sapiens
ggcacacaccaccat

SEQ ID NO: 82081 - DNA, 15 bp, Homo sapiens
aggcacacaccacca

SEQ ID NO: 82082 - DNA, 15 bp, Homo sapiens
caggcacacaccacc

SEQ ID NO: 82083 - DNA, 15 bp, Homo sapiens
acaggcacacaccac

SEQ ID NO: 82084 - DNA, 15 bp, Homo sapiens
tacaggcacacacca

SEQ ID NO: 82085 - DNA, 15 bp, Homo sapiens
ctacaggcacacacc

SEQ ID NO: 82086 - DNA, 15 bp, Homo sapiens
actacaggcacacac

SEQ ID NO: 82087 - DNA, 15 bp, Homo sapiens
gactacaggcacaca

SEQ ID NO: 82088 - DNA, 15 bp, Homo sapiens
agactacaggcacac

SEQ ID NO: 82089 - DNA, 15 bp, Homo sapiens
gagactacaggcaca

SEQ ID NO: 82090 - DNA, 15 bp, Homo sapiens
tgagactacaggcac

SEQ ID NO: 82091 - DNA, 15 bp, Homo sapiens
ctgagactacaggca

SEQ ID NO: 82092 - DNA, 15 bp, Homo sapiens
gctgagactacaggc

SEQ ID NO: 82093 - DNA, 15 bp, Homo sapiens
agctgagactacagg

SEQ ID NO: 82094 - DNA, 15 bp, Homo sapiens
tagctgagactacag

SEQ ID NO: 82095 - DNA, 15 bp, Homo sapiens
gtagctgagactaca

SEQ ID NO: 82096 - DNA, 15 bp, Homo sapiens
agtagctgagactac

SEQ ID NO: 82097 - DNA, 15 bp, Homo sapiens
aagtagctgagacta

SEQ ID NO: 82098 - DNA, 15 bp, Homo sapiens
caagtagctgagact

SEQ ID NO: 82099 - DNA, 15 bp, Homo sapiens
ccaagtagctgagac

SEQ ID NO: 82100 - DNA, 15 bp, Homo sapiens
accaagtagctgaga

SEQ ID NO: 82101 - DNA, 15 bp, Homo sapiens
taccaagtagctgag

SEQ ID NO: 82102 - DNA, 15 bp, Homo sapiens
gtaccaagtagctga

SEQ ID NO: 82103 - DNA, 15 bp, Homo sapiens
agtaccaagtagctg

SEQ ID NO: 82104 - DNA, 15 bp, Homo sapiens
aagtaccaagtagct

SEQ ID NO: 82105 - DNA, 15 bp, Homo sapiens
taagtaccaagtagc

SEQ ID NO: 82106 - DNA, 15 bp, Homo sapiens
ctaagtaccaagtag

SEQ ID NO: 82107 - DNA, 15 bp, Homo sapiens
cctaagtaccaagta

SEQ ID NO: 82108 - DNA, 15 bp, Homo sapiens
tcctaagtaccaagt

SEQ ID NO: 82109 - DNA, 15 bp, Homo sapiens
ctcctaagtaccaag

SEQ ID NO: 82110 - DNA, 15 bp, Homo sapiens
cctcctaagtaccaa

SEQ ID NO: 82111 - DNA, 15 bp, Homo sapiens
gcctcctaagtacca

SEQ ID NO: 82112 - DNA, 15 bp, Homo sapiens
agcctcctaagtacc

SEQ ID NO: 82113 - DNA, 15 bp, Homo sapiens
cagcctcctaagtac

SEQ ID NO: 82114 - DNA, 15 bp, Homo sapiens
tcagcctcctaagta

SEQ ID NO: 82115 - DNA, 15 bp, Homo sapiens
ctcagcctcctaagt

SEQ ID NO: 82116 - DNA, 15 bp, Homo sapiens
cctcagcctcctaag

SEQ ID NO: 82117 - DNA, 15 bp, Homo sapiens
acctcagcctcctaa

SEQ ID NO: 82118 - DNA, 15 bp, Homo sapiens
tacctcagcctccta

SEQ ID NO: 82119 - DNA, 15 bp, Homo sapiens
ctacctcagcctcct

SEQ ID NO: 82120 - DNA, 15 bp, Homo sapiens
cctacctcagcctcc

SEQ ID NO: 82121 - DNA, 15 bp, Homo sapiens
tcctacctcagcctc

SEQ ID NO: 82122 - DNA, 15 bp, Homo sapiens
ctcctacctcagcct

SEQ ID NO: 82123 - DNA, 15 bp, Homo sapiens
cctcctacctcagcc

SEQ ID NO: 82124 - DNA, 15 bp, Homo sapiens
tcctcctacctcagc

SEQ ID NO: 82125 - DNA, 15 bp, Homo sapiens
atcctcctacctcag

SEQ ID NO: 82126 - DNA, 15 bp, Homo sapiens
aatcctcctacctca

SEQ ID NO: 82127 - DNA, 15 bp, Homo sapiens
gaatcctcctacctc

SEQ ID NO: 82128 - DNA, 15 bp, Homo sapiens
ggaatcctcctacct

SEQ ID NO: 82129 - DNA, 15 bp, Homo sapiens
aggaatcctcctacc

SEQ ID NO: 82130 - DNA, 15 bp, Homo sapiens
aaggaatcctcctac

SEQ ID NO: 82131 - DNA, 15 bp, Homo sapiens
caaggaatcctccta

SEQ ID NO: 82132 - DNA, 15 bp, Homo sapiens
ccaaggaatcctcct

SEQ ID NO: 82133 - DNA, 15 bp, Homo sapiens
cccaaggaatcctcc

SEQ ID NO: 82134 - DNA, 15 bp, Homo sapiens
gcccaaggaatcctc

SEQ ID NO: 82135 - DNA, 15 bp, Homo sapiens
ggcccaaggaatcct

SEQ ID NO: 82136 - DNA, 15 bp, Homo sapiens
gggcccaaggaatcc

SEQ ID NO: 82137 - DNA, 15 bp, Homo sapiens
tgggcccaaggaatc

SEQ ID NO: 82138 - DNA, 15 bp, Homo sapiens
ttgggcccaaggaat

SEQ ID NO: 82139 - DNA, 15 bp, Homo sapiens
tttgggcccaaggaa

SEQ ID NO: 82140 - DNA, 15 bp, Homo sapiens
ttttgggcccaagga

SEQ ID NO: 82141 - DNA, 15 bp, Homo sapiens
cttttgggcccaagg

SEQ ID NO: 82142 - DNA, 15 bp, Homo sapiens
acttttgggcccaag

SEQ ID NO: 82143 - DNA, 15 bp, Homo sapiens
aacttttgggcccaa

SEQ ID NO: 82144 - DNA, 15 bp, Homo sapiens
aaacttttgggccca

SEQ ID NO: 82145 - DNA, 15 bp, Homo sapiens
caaacttttgggccc

SEQ ID NO: 82146 - DNA, 15 bp, Homo sapiens
tcaaacttttgggcc

SEQ ID NO: 82147 - DNA, 15 bp, Homo sapiens
ctcaaacttttgggc

SEQ ID NO: 82148 - DNA, 15 bp, Homo sapiens
cctcaaacttttggg

SEQ ID NO: 82149 - DNA, 15 bp, Homo sapiens
gcctcaaacttttgg

SEQ ID NO: 82150 - DNA, 15 bp, Homo sapiens
agcctcaaacttttg

SEQ ID NO: 82151 - DNA, 15 bp, Homo sapiens
cagcctcaaactttt

SEQ ID NO: 82152 - DNA, 15 bp, Homo sapiens
gcagcctcaaacttt

SEQ ID NO: 82153 - DNA, 15 bp, Homo sapiens
tgcagcctcaaactt

SEQ ID NO: 82154 - DNA, 15 bp, Homo sapiens
ctgcagcctcaaact

SEQ ID NO: 82155 - DNA, 15 bp, Homo sapiens
actgcagcctcaaac

SEQ ID NO: 82156 - DNA, 15 bp, Homo sapiens
cactgcagcctcaaa

SEQ ID NO: 82157 - DNA, 15 bp, Homo sapiens
tcactgcagcctcaa

SEQ ID NO: 82158 - DNA, 15 bp, Homo sapiens
ctcactgcagcctca

SEQ ID NO: 82159 - DNA, 15 bp, Homo sapiens
gctcactgcagcctc

SEQ ID NO: 82160 - DNA, 15 bp, Homo sapiens
ggctcactgcagcct

SEQ ID NO: 82161 - DNA, 15 bp, Homo sapiens
cggctcactgcagcc

SEQ ID NO: 82162 - DNA, 15 bp, Homo sapiens
acggctcactgcagc

SEQ ID NO: 82163 - DNA, 15 bp, Homo sapiens
cacggctcactgcag

SEQ ID NO: 82164 - DNA, 15 bp, Homo sapiens
tcacggctcactgca

SEQ ID NO: 82165 - DNA, 15 bp, Homo sapiens
atcacggctcactgc

SEQ ID NO: 82166 - DNA, 15 bp, Homo sapiens
gatcacggctcactg

SEQ ID NO: 82167 - DNA, 15 bp, Homo sapiens
tgatcacggctcact

SEQ ID NO: 82168 - DNA, 15 bp, Homo sapiens
atgatcacggctcac

SEQ ID NO: 82169 - DNA, 15 bp, Homo sapiens
catgatcacggctca

SEQ ID NO: 82170 - DNA, 15 bp, Homo sapiens
gcatgatcacggctc

SEQ ID NO: 82171 - DNA, 15 bp, Homo sapiens
ggcatgatcacggct

SEQ ID NO: 82172 - DNA, 15 bp, Homo sapiens
tggcatgatcacggc

SEQ ID NO: 82173 - DNA, 15 bp, Homo sapiens
gtggcatgatcacgg

SEQ ID NO: 82174 - DNA, 15 bp, Homo sapiens
agtggcatgatcacg

SEQ ID NO: 82175 - DNA, 15 bp, Homo sapiens
cagtggcatgatcac

SEQ ID NO: 82176 - DNA, 15 bp, Homo sapiens
gcagtggcatgatca

SEQ ID NO: 82177 - DNA, 15 bp, Homo sapiens
tgcagtggcatgatc

SEQ ID NO: 82178 - DNA, 15 bp, Homo sapiens
gtgcagtggcatgat

SEQ ID NO: 82179 - DNA, 15 bp, Homo sapiens
agtgcagtggcatga

SEQ ID NO: 82180 - DNA, 15 bp, Homo sapiens
aagtgcagtggcatg

SEQ ID NO: 82181 - DNA, 15 bp, Homo sapiens
gaagtgcagtggcat

SEQ ID NO: 82182 - DNA, 15 bp, Homo sapiens
tgaagtgcagtggca

SEQ ID NO: 82183 - DNA, 15 bp, Homo sapiens
ctgaagtgcagtggc

SEQ ID NO: 82184 - DNA, 15 bp, Homo sapiens
gctgaagtgcagtgg

SEQ ID NO: 82185 - DNA, 15 bp, Homo sapiens
ggctgaagtgcagtg

SEQ ID NO: 82186 - DNA, 15 bp, Homo sapiens
aggctgaagtgcagt

SEQ ID NO: 82187 - DNA, 15 bp, Homo sapiens
caggctgaagtgcag

SEQ ID NO: 82188 - DNA, 15 bp, Homo sapiens
ccaggctgaagtgca

SEQ ID NO: 82189 - DNA, 15 bp, Homo sapiens
cccaggctgaagtgc

SEQ ID NO: 82190 - DNA, 15 bp, Homo sapiens
gcccaggctgaagtg

SEQ ID NO: 82191 - DNA, 15 bp, Homo sapiens
tgcccaggctgaagt

SEQ ID NO: 82192 - DNA, 15 bp, Homo sapiens
ttgcccaggctgaag

SEQ ID NO: 82193 - DNA, 15 bp, Homo sapiens
gttgcccaggctgaa

SEQ ID NO: 82194 - DNA, 15 bp, Homo sapiens
tgttgcccaggctga

SEQ ID NO: 82195 - DNA, 15 bp, Homo sapiens
atgttgcccaggctg

SEQ ID NO: 82196 - DNA, 15 bp, Homo sapiens
catgttgcccaggct

SEQ ID NO: 82197 - DNA, 15 bp, Homo sapiens
ccatgttgcccaggc

SEQ ID NO: 82198 - DNA, 15 bp, Homo sapiens
gccatgttgcccagg

SEQ ID NO: 82199 - DNA, 15 bp, Homo sapiens
tgccatgttgcccag

SEQ ID NO: 82200 - DNA, 15 bp, Homo sapiens
ttgccatgttgccca

SEQ ID NO: 82201 - DNA, 15 bp, Homo sapiens
cttgccatgttgccc

SEQ ID NO: 82202 - DNA, 15 bp, Homo sapiens
tcttgccatgttgcc

SEQ ID NO: 82203 - DNA, 15 bp, Homo sapiens
gtcttgccatgttgc

SEQ ID NO: 82204 - DNA, 15 bp, Homo sapiens
ggtcttgccatgttg

SEQ ID NO: 82205 - DNA, 15 bp, Homo sapiens
tggtcttgccatgtt

SEQ ID NO: 82206 - DNA, 15 bp, Homo sapiens
atggtcttgccatgt

SEQ ID NO: 82207 - DNA, 15 bp, Homo sapiens
catggtcttgccatg

SEQ ID NO: 82208 - DNA, 15 bp, Homo sapiens
acatggtcttgccat

SEQ ID NO: 82209 - DNA, 15 bp, Homo sapiens
gacatggtcttgcca

SEQ ID NO: 82210 - DNA, 15 bp, Homo sapiens
agacatggtcttgcc

SEQ ID NO: 82211 - DNA, 15 bp, Homo sapiens
gagacatggtcttgc

SEQ ID NO: 82212 - DNA, 15 bp, Homo sapiens
agagacatggtcttg

SEQ ID NO: 82213 - DNA, 15 bp, Homo sapiens
tagagacatggtctt

SEQ ID NO: 82214 - DNA, 15 bp, Homo sapiens
ttagagacatggtct

SEQ ID NO: 82215 - DNA, 15 bp, Homo sapiens
tttagagacatggtc

SEQ ID NO: 82216 - DNA, 15 bp, Homo sapiens
ttttagagacatggt

SEQ ID NO: 82217 - DNA, 15 bp, Homo sapiens
tttttagagacatgg

SEQ ID NO: 82218 - DNA, 15 bp, Homo sapiens
ttttttagagacatg

SEQ ID NO: 82219 - DNA, 15 bp, Homo sapiens
tttttttagagacat

SEQ ID NO: 82220 - DNA, 15 bp, Homo sapiens
ttttttttagagaca

SEQ ID NO: 82221 - DNA, 15 bp, Homo sapiens
tttttttttagagac

SEQ ID NO: 82222 - DNA, 15 bp, Homo sapiens
ttttttttttagaga

SEQ ID NO: 82223 - DNA, 15 bp, Homo sapiens
tttttttttttagag

SEQ ID NO: 82224 - DNA, 15 bp, Homo sapiens
ttttttttttttaga

SEQ ID NO: 82225 - DNA, 15 bp, Homo sapiens
tttttttttttttag

SEQ ID NO: 82226 - DNA, 15 bp, Homo sapiens
tcttttttttttttt

SEQ ID NO: 82227 - DNA, 15 bp, Homo sapiens
ttctttttttttttt

SEQ ID NO: 82228 - DNA, 15 bp, Homo sapiens
gttcttttttttttt

SEQ ID NO: 82229 - DNA, 15 bp, Homo sapiens
agttctttttttttt

SEQ ID NO: 82230 - DNA, 15 bp, Homo sapiens
aagttcttttttttt

SEQ ID NO: 82231 - DNA, 15 bp, Homo sapiens
caagttctttttttt

SEQ ID NO: 82232 - DNA, 15 bp, Homo sapiens
tcaagttcttttttt

SEQ ID NO: 82233 - DNA, 15 bp, Homo sapiens
gtcaagttctttttt

SEQ ID NO: 82234 - DNA, 15 bp, Homo sapiens
ggtcaagttcttttt

SEQ ID NO: 82235 - DNA, 15 bp, Homo sapiens
tggtcaagttctttt

SEQ ID NO: 82236 - DNA, 15 bp, Homo sapiens
gtggtcaagttcttt

SEQ ID NO: 82237 - DNA, 15 bp, Homo sapiens
agtggtcaagttctt

SEQ ID NO: 82238 - DNA, 15 bp, Homo sapiens
aagtggtcaagttct

SEQ ID NO: 82239 - DNA, 15 bp, Homo sapiens
caagtggtcaagttc

SEQ ID NO: 82240 - DNA, 15 bp, Homo sapiens
ccaagtggtcaagtt

SEQ ID NO: 82241 - DNA, 15 bp, Homo sapiens
gccaagtggtcaagt

SEQ ID NO: 82242 - DNA, 15 bp, Homo sapiens
tgccaagtggtcaag

SEQ ID NO: 82243 - DNA, 15 bp, Homo sapiens
ctgccaagtggtcaa

SEQ ID NO: 82244 - DNA, 15 bp, Homo sapiens
cctgccaagtggtca

SEQ ID NO: 82245 - DNA, 15 bp, Homo sapiens
gcctgccaagtggtc

SEQ ID NO: 82246 - DNA, 15 bp, Homo sapiens
agcctgccaagtggt

SEQ ID NO: 82247 - DNA, 15 bp, Homo sapiens
aagcctgccaagtgg

SEQ ID NO: 82248 - DNA, 15 bp, Homo sapiens
aaagcctgccaagtg

SEQ ID NO: 82249 - DNA, 15 bp, Homo sapiens
caaagcctgccaagt

SEQ ID NO: 82250 - DNA, 15 bp, Homo sapiens
tcaaagcctgccaag

SEQ ID NO: 82251 - DNA, 15 bp, Homo sapiens
gtcaaagcctgccaa

SEQ ID NO: 82252 - DNA, 15 bp, Homo sapiens
tgtcaaagcctgcca

SEQ ID NO: 82253 - DNA, 15 bp, Homo sapiens
ttgtcaaagcctgcc

SEQ ID NO: 82254 - DNA, 15 bp, Homo sapiens
attgtcaaagcctgc

SEQ ID NO: 82255 - DNA, 15 bp, Homo sapiens
cattgtcaaagcctg

SEQ ID NO: 82256 - DNA, 15 bp, Homo sapiens
ccattgtcaaagcct

SEQ ID NO: 82257 - DNA, 15 bp, Homo sapiens
tccattgtcaaagcc

SEQ ID NO: 82258 - DNA, 15 bp, Homo sapiens
atccattgtcaaagc

SEQ ID NO: 82259 - DNA, 15 bp, Homo sapiens
gatccattgtcaaag

SEQ ID NO: 82260 - DNA, 15 bp, Homo sapiens
ggatccattgtcaaa

SEQ ID NO: 82261 - DNA, 15 bp, Homo sapiens
aggatccattgtcaa

SEQ ID NO: 82262 - DNA, 15 bp, Homo sapiens
caggatccattgtca

SEQ ID NO: 82263 - DNA, 15 bp, Homo sapiens
tcaggatccattgtc

SEQ ID NO: 82264 - DNA, 15 bp, Homo sapiens
ctcaggatccattgt

SEQ ID NO: 82265 - DNA, 15 bp, Homo sapiens
cctcaggatccattg

SEQ ID NO: 82266 - DNA, 15 bp, Homo sapiens
tcctcaggatccatt

SEQ ID NO: 82267 - DNA, 15 bp, Homo sapiens
ttcctcaggatccat

SEQ ID NO: 82268 - DNA, 15 bp, Homo sapiens
tttcctcaggatcca

SEQ ID NO: 82269 - DNA, 15 bp, Homo sapiens
ttttcctcaggatcc

SEQ ID NO: 82270 - DNA, 15 bp, Homo sapiens
attttcctcaggatc

SEQ ID NO: 82271 - DNA, 15 bp, Homo sapiens
cattttcctcaggat

SEQ ID NO: 82272 - DNA, 15 bp, Homo sapiens
ccattttcctcagga

SEQ ID NO: 82273 - DNA, 15 bp, Homo sapiens
tccattttcctcagg

SEQ ID NO: 82274 - DNA, 15 bp, Homo sapiens
ttccattttcctcag

SEQ ID NO: 82275 - DNA, 15 bp, Homo sapiens
gttccattttcctca

SEQ ID NO: 82276 - DNA, 15 bp, Homo sapiens
agttccattttcctc

SEQ ID NO: 82277 - DNA, 15 bp, Homo sapiens
cagttccattttcct

SEQ ID NO: 82278 - DNA, 15 bp, Homo sapiens
tcagttccattttcc

SEQ ID NO: 82279 - DNA, 15 bp, Homo sapiens
ttcagttccattttc

SEQ ID NO: 82280 - DNA, 15 bp, Homo sapiens
gttcagttccatttt

SEQ ID NO: 82281 - DNA, 15 bp, Homo sapiens
cgttcagttccattt

SEQ ID NO: 82282 - DNA, 15 bp, Homo sapiens
ccgttcagttccatt

SEQ ID NO: 82283 - DNA, 15 bp, Homo sapiens
cccgttcagttccat

SEQ ID NO: 82284 - DNA, 15 bp, Homo sapiens
tcccgttcagttcca

SEQ ID NO: 82285 - DNA, 15 bp, Homo sapiens
gtcccgttcagttcc

SEQ ID NO: 82286 - DNA, 15 bp, Homo sapiens
tgtcccgttcagttc

SEQ ID NO: 82287 - DNA, 15 bp, Homo sapiens
ttgtcccgttcagtt

SEQ ID NO: 82288 - DNA, 15 bp, Homo sapiens
tttgtcccgttcagt

SEQ ID NO: 82289 - DNA, 15 bp, Homo sapiens
ctttgtcccgttcag

SEQ ID NO: 82290 - DNA, 15 bp, Homo sapiens
cctttgtcccgttca

SEQ ID NO: 82291 - DNA, 15 bp, Homo sapiens
tcctttgtcccgttc

SEQ ID NO: 82292 - DNA, 15 bp, Homo sapiens
ctcctttgtcccgtt

SEQ ID NO: 82293 - DNA, 15 bp, Homo sapiens
gctcctttgtcccgt

SEQ ID NO: 82294 - DNA, 15 bp, Homo sapiens
agctcctttgtcccg

SEQ ID NO: 82295 - DNA, 15 bp, Homo sapiens
gagctcctttgtccc

SEQ ID NO: 82296 - DNA, 15 bp, Homo sapiens
tgagctcctttgtcc

SEQ ID NO: 82297 - DNA, 15 bp, Homo sapiens
ctgagctcctttgtc

SEQ ID NO: 82298 - DNA, 15 bp, Homo sapiens
tctgagctcctttgt

SEQ ID NO: 82299 - DNA, 15 bp, Homo sapiens
ttctgagctcctttg

SEQ ID NO: 82300 - DNA, 15 bp, Homo sapiens
tttctgagctccttt

SEQ ID NO: 82301 - DNA, 15 bp, Homo sapiens
atttctgagctcctt

SEQ ID NO: 82302 - DNA, 15 bp, Homo sapiens
aatttctgagctcct

SEQ ID NO: 82303 - DNA, 15 bp, Homo sapiens
aaatttctgagctcc

SEQ ID NO: 82304 - DNA, 15 bp, Homo sapiens
aaaatttctgagctc

SEQ ID NO: 82305 - DNA, 15 bp, Homo sapiens
aaaaatttctgagct

SEQ ID NO: 82306 - DNA, 15 bp, Homo sapiens
caaaaatttctgagc

SEQ ID NO: 82307 - DNA, 15 bp, Homo sapiens
tcaaaaatttctgag

SEQ ID NO: 82308 - DNA, 15 bp, Homo sapiens
ctcaaaaatttctga

SEQ ID NO: 82309 - DNA, 15 bp, Homo sapiens
cctcaaaaatttctg

SEQ ID NO: 82310 - DNA, 15 bp, Homo sapiens
gcctcaaaaatttct

SEQ ID NO: 82311 - DNA, 15 bp, Homo sapiens
cgcctcaaaaatttc

SEQ ID NO: 82312 - DNA, 15 bp, Homo sapiens
ccgcctcaaaaattt

SEQ ID NO: 82313 - DNA, 15 bp, Homo sapiens
accgcctcaaaaatt

SEQ ID NO: 82314 - DNA, 15 bp, Homo sapiens
aaccgcctcaaaaat

SEQ ID NO: 82315 - DNA, 15 bp, Homo sapiens
aaaccgcctcaaaaa

SEQ ID NO: 82316 - DNA, 15 bp, Homo sapiens
caaaccgcctcaaaa

SEQ ID NO: 82317 - DNA, 15 bp, Homo sapiens
ccaaaccgcctcaaa

SEQ ID NO: 82318 - DNA, 15 bp, Homo sapiens
cccaaaccgcctcaa

SEQ ID NO: 82319 - DNA, 15 bp, Homo sapiens
tcccaaaccgcctca

SEQ ID NO: 82320 - DNA, 15 bp, Homo sapiens
gtcccaaaccgcctc

SEQ ID NO: 82321 - DNA, 15 bp, Homo sapiens
tgtcccaaaccgcct

SEQ ID NO: 82322 - DNA, 15 bp, Homo sapiens
atgtcccaaaccgcc

SEQ ID NO: 82323 - DNA, 15 bp, Homo sapiens
gatgtcccaaaccgc

SEQ ID NO: 82324 - DNA, 15 bp, Homo sapiens
agatgtcccaaaccg

SEQ ID NO: 82325 - DNA, 15 bp, Homo sapiens
gagatgtcccaaacc

SEQ ID NO: 82326 - DNA, 15 bp, Homo sapiens
tgagatgtcccaaac

SEQ ID NO: 82327 - DNA, 15 bp, Homo sapiens
ctgagatgtcccaaa

SEQ ID NO: 82328 - DNA, 15 bp, Homo sapiens
cctgagatgtcccaa

SEQ ID NO: 82329 - DNA, 15 bp, Homo sapiens
ccctgagatgtccca

SEQ ID NO: 82330 - DNA, 15 bp, Homo sapiens
gccctgagatgtccc

SEQ ID NO: 82331 - DNA, 15 bp, Homo sapiens
tgccctgagatgtcc

SEQ ID NO: 82332 - DNA, 15 bp, Homo sapiens
atgccctgagatgtc

SEQ ID NO: 82333 - DNA, 15 bp, Homo sapiens
catgccctgagatgt

SEQ ID NO: 82334 - DNA, 15 bp, Homo sapiens
acatgccctgagatg

SEQ ID NO: 82335 - DNA, 15 bp, Homo sapiens
gacatgccctgagat

SEQ ID NO: 82336 - DNA, 15 bp, Homo sapiens
ggacatgccctgaga

SEQ ID NO: 82337 - DNA, 15 bp, Homo sapiens
tggacatgccctgag

SEQ ID NO: 82338 - DNA, 15 bp, Homo sapiens
gtggacatgccctga

SEQ ID NO: 82339 - DNA, 15 bp, Homo sapiens
ggtggacatgccctg

SEQ ID NO: 82340 - DNA, 15 bp, Homo sapiens
aggtggacatgccct

SEQ ID NO: 82341 - DNA, 15 bp, Homo sapiens
caggtggacatgccc

SEQ ID NO: 82342 - DNA, 15 bp, Homo sapiens
ccaggtggacatgcc

SEQ ID NO: 82343 - DNA, 15 bp, Homo sapiens
accaggtggacatgc

SEQ ID NO: 82344 - DNA, 15 bp, Homo sapiens
taccaggtggacatg

SEQ ID NO: 82345 - DNA, 15 bp, Homo sapiens
ctaccaggtggacat

SEQ ID NO: 82346 - DNA, 15 bp, Homo sapiens
cctaccaggtggaca

SEQ ID NO: 82347 - DNA, 15 bp, Homo sapiens
acctaccaggtggac

SEQ ID NO: 82348 - DNA, 15 bp, Homo sapiens
aacctaccaggtgga

SEQ ID NO: 82349 - DNA, 15 bp, Homo sapiens
taacctaccaggtgg

SEQ ID NO: 82350 - DNA, 15 bp, Homo sapiens
ttaacctaccaggtg

SEQ ID NO: 82351 - DNA, 15 bp, Homo sapiens
attaacctaccaggt

SEQ ID NO: 82352 - DNA, 15 bp, Homo sapiens
aattaacctaccagg

SEQ ID NO: 82353 - DNA, 15 bp, Homo sapiens
taattaacctaccag

SEQ ID NO: 82354 - DNA, 15 bp, Homo sapiens
ataattaacctacca

SEQ ID NO: 82355 - DNA, 15 bp, Homo sapiens
gataattaacctacc

SEQ ID NO: 82356 - DNA, 15 bp, Homo sapiens
ggataattaacctac

SEQ ID NO: 82357 - DNA, 15 bp, Homo sapiens
tggataattaaccta

SEQ ID NO: 82358 - DNA, 15 bp, Homo sapiens
atggataattaacct

SEQ ID NO: 82359 - DNA, 15 bp, Homo sapiens
aatggataattaacc

SEQ ID NO: 82360 - DNA, 15 bp, Homo sapiens
aaatggataattaac

SEQ ID NO: 82361 - DNA, 15 bp, Homo sapiens
gaaatggataattaa

SEQ ID NO: 82362 - DNA, 15 bp, Homo sapiens
ggaaatggataatta

SEQ ID NO: 82363 - DNA, 15 bp, Homo sapiens
gggaaatggataatt

SEQ ID NO: 82364 - DNA, 15 bp, Homo sapiens
tgggaaatggataat

SEQ ID NO: 82365 - DNA, 15 bp, Homo sapiens
gtgggaaatggataa

SEQ ID NO: 82366 - DNA, 15 bp, Homo sapiens
tgtgggaaatggata

SEQ ID NO: 82367 - DNA, 15 bp, Homo sapiens
ttgtgggaaatggat

SEQ ID NO: 82368 - DNA, 15 bp, Homo sapiens
cttgtgggaaatgga

SEQ ID NO: 82369 - DNA, 15 bp, Homo sapiens
acttgtgggaaatgg

SEQ ID NO: 82370 - DNA, 15 bp, Homo sapiens
aacttgtgggaaatg

SEQ ID NO: 82371 - DNA, 15 bp, Homo sapiens
aaacttgtgggaaat

SEQ ID NO: 82372 - DNA, 15 bp, Homo sapiens
aaaacttgtgggaaa

SEQ ID NO: 82373 - DNA, 15 bp, Homo sapiens
aaaaacttgtgggaa

SEQ ID NO: 82374 - DNA, 15 bp, Homo sapiens
taaaaacttgtggga

SEQ ID NO: 82375 - DNA, 15 bp, Homo sapiens
ataaaaacttgtggg

SEQ ID NO: 82376 - DNA, 15 bp, Homo sapiens
tataaaaacttgtgg

SEQ ID NO: 82377 - DNA, 15 bp, Homo sapiens
ttataaaaacttgtg

SEQ ID NO: 82378 - DNA, 15 bp, Homo sapiens
attataaaaacttgt

SEQ ID NO: 82379 - DNA, 15 bp, Homo sapiens
cattataaaaacttg

SEQ ID NO: 82380 - DNA, 15 bp, Homo sapiens
acattataaaaactt

SEQ ID NO: 82381 - DNA, 15 bp, Homo sapiens
cacattataaaaact

SEQ ID NO: 82382 - DNA, 15 bp, Homo sapiens
ccacattataaaaac

SEQ ID NO: 82383 - DNA, 15 bp, Homo sapiens
tccacattataaaaa

SEQ ID NO: 82384 - DNA, 15 bp, Homo sapiens
ctccacattataaaa

SEQ ID NO: 82385 - DNA, 15 bp, Homo sapiens
tctccacattataaa

SEQ ID NO: 82386 - DNA, 15 bp, Homo sapiens
atctccacattataa

SEQ ID NO: 82387 - DNA, 15 bp, Homo sapiens
aatctccacattata

SEQ ID NO: 82388 - DNA, 15 bp, Homo sapiens
caatctccacattat

SEQ ID NO: 82389 - DNA, 15 bp, Homo sapiens
tcaatctccacatta

SEQ ID NO: 82390 - DNA, 15 bp, Homo sapiens
ctcaatctccacatt

SEQ ID NO: 82391 - DNA, 15 bp, Homo sapiens
gctcaatctccacat

SEQ ID NO: 82392 - DNA, 15 bp, Homo sapiens
ggctcaatctccaca

SEQ ID NO: 82393 - DNA, 15 bp, Homo sapiens
aggctcaatctccac

SEQ ID NO: 82394 - DNA, 15 bp, Homo sapiens
gaggctcaatctcca

SEQ ID NO: 82395 - DNA, 15 bp, Homo sapiens
ggaggctcaatctcc

SEQ ID NO: 82396 - DNA, 15 bp, Homo sapiens
gggaggctcaatctc

SEQ ID NO: 82397 - DNA, 15 bp, Homo sapiens
agggaggctcaatct

SEQ ID NO: 82398 - DNA, 15 bp, Homo sapiens
cagggaggctcaatc

SEQ ID NO: 82399 - DNA, 15 bp, Homo sapiens
gcagggaggctcaat

SEQ ID NO: 82400 - DNA, 15 bp, Homo sapiens
ggcagggaggctcaa

SEQ ID NO: 82401 - DNA, 15 bp, Homo sapiens
gggcagggaggctca

SEQ ID NO: 82402 - DNA, 15 bp, Homo sapiens
agggcagggaggctc

SEQ ID NO: 82403 - DNA, 15 bp, Homo sapiens
cagggcagggaggct

SEQ ID NO: 82404 - DNA, 15 bp, Homo sapiens
tcagggcagggaggc

SEQ ID NO: 82405 - DNA, 15 bp, Homo sapiens
ttcagggcagggagg

SEQ ID NO: 82406 - DNA, 15 bp, Homo sapiens
cttcagggcagggag

SEQ ID NO: 82407 - DNA, 15 bp, Homo sapiens
tcttcagggcaggga

SEQ ID NO: 82408 - DNA, 15 bp, Homo sapiens
gtcttcagggcaggg

SEQ ID NO: 82409 - DNA, 15 bp, Homo sapiens
tgtcttcagggcagg

SEQ ID NO: 82410 - DNA, 15 bp, Homo sapiens
gtgtcttcagggcag

SEQ ID NO: 82411 - DNA, 15 bp, Homo sapiens
tgtgtcttcagggca

SEQ ID NO: 82412 - DNA, 15 bp, Homo sapiens
atgtgtcttcagggc

SEQ ID NO: 82413 - DNA, 15 bp, Homo sapiens
catgtgtcttcaggg

SEQ ID NO: 82414 - DNA, 15 bp, Homo sapiens
acatgtgtcttcagg

SEQ ID NO: 82415 - DNA, 15 bp, Homo sapiens
gacatgtgtcttcag

SEQ ID NO: 82416 - DNA, 15 bp, Homo sapiens
ggacatgtgtcttca

SEQ ID NO: 82417 - DNA, 15 bp, Homo sapiens
aggacatgtgtcttc

SEQ ID NO: 82418 - DNA, 15 bp, Homo sapiens
aaggacatgtgtctt

SEQ ID NO: 82419 - DNA, 15 bp, Homo sapiens
caaggacatgtgtct

SEQ ID NO: 82420 - DNA, 15 bp, Homo sapiens
tcaaggacatgtgtc

SEQ ID NO: 82421 - DNA, 15 bp, Homo sapiens
ctcaaggacatgtgt

SEQ ID NO: 82422 - DNA, 15 bp, Homo sapiens
tctcaaggacatgtg

SEQ ID NO: 82423 - DNA, 15 bp, Homo sapiens
gtctcaaggacatgt

SEQ ID NO: 82424 - DNA, 15 bp, Homo sapiens
tgtctcaaggacatg

SEQ ID NO: 82425 - DNA, 15 bp, Homo sapiens
ctgtctcaaggacat

SEQ ID NO: 82426 - DNA, 15 bp, Homo sapiens
tctgtctcaaggaca

SEQ ID NO: 82427 - DNA, 15 bp, Homo sapiens
gtctgtctcaaggac

SEQ ID NO: 82428 - DNA, 15 bp, Homo sapiens
tgtctgtctcaagga

SEQ ID NO: 82429 - DNA, 15 bp, Homo sapiens
ctgtctgtctcaagg

SEQ ID NO: 82430 - DNA, 15 bp, Homo sapiens
tctgtctgtctcaag

SEQ ID NO: 82431 - DNA, 15 bp, Homo sapiens
gtctgtctgtctcaa

SEQ ID NO: 82432 - DNA, 15 bp, Homo sapiens
tgtctgtctgtctca

SEQ ID NO: 82433 - DNA, 15 bp, Homo sapiens
ctgtctgtctgtctc

SEQ ID NO: 82434 - DNA, 15 bp, Homo sapiens
cctgtctgtctgtct

SEQ ID NO: 82435 - DNA, 15 bp, Homo sapiens
gcctgtctgtctgtc

SEQ ID NO: 82436 - DNA, 15 bp, Homo sapiens
tgcctgtctgtctgt

SEQ ID NO: 82437 - DNA, 15 bp, Homo sapiens
atgcctgtctgtctg

SEQ ID NO: 82438 - DNA, 15 bp, Homo sapiens
catgcctgtctgtct

SEQ ID NO: 82439 - DNA, 15 bp, Homo sapiens
ccatgcctgtctgtc

SEQ ID NO: 82440 - DNA, 15 bp, Homo sapiens
gccatgcctgtctgt

SEQ ID NO: 82441 - DNA, 15 bp, Homo sapiens
agccatgcctgtctg

SEQ ID NO: 82442 - DNA, 15 bp, Homo sapiens
gagccatgcctgtct

SEQ ID NO: 82443 - DNA, 15 bp, Homo sapiens
agagccatgcctgtc

SEQ ID NO: 82444 - DNA, 15 bp, Homo sapiens
cagagccatgcctgt

SEQ ID NO: 82445 - DNA, 15 bp, Homo sapiens
acagagccatgcctg

SEQ ID NO: 82446 - DNA, 15 bp, Homo sapiens
aacagagccatgcct

SEQ ID NO: 82447 - DNA, 15 bp, Homo sapiens
caacagagccatgcc

SEQ ID NO: 82448 - DNA, 15 bp, Homo sapiens
ccaacagagccatgc

SEQ ID NO: 82449 - DNA, 15 bp, Homo sapiens
cccaacagagccatg

SEQ ID NO: 82450 - DNA, 15 bp, Homo sapiens
gcccaacagagccat

SEQ ID NO: 82451 - DNA, 15 bp, Homo sapiens
tgcccaacagagcca

SEQ ID NO: 82452 - DNA, 15 bp, Homo sapiens
ttgcccaacagagcc

SEQ ID NO: 82453 - DNA, 15 bp, Homo sapiens
cttgcccaacagagc

SEQ ID NO: 82454 - DNA, 15 bp, Homo sapiens
ccttgcccaacagag

SEQ ID NO: 82455 - DNA, 15 bp, Homo sapiens
accttgcccaacaga

SEQ ID NO: 82456 - DNA, 15 bp, Homo sapiens
aaccttgcccaacag

SEQ ID NO: 82457 - DNA, 15 bp, Homo sapiens
caaccttgcccaaca

SEQ ID NO: 82458 - DNA, 15 bp, Homo sapiens
ccaaccttgcccaac

SEQ ID NO: 82459 - DNA, 15 bp, Homo sapiens
gccaaccttgcccaa

SEQ ID NO: 82460 - DNA, 15 bp, Homo sapiens
tgccaaccttgccca

SEQ ID NO: 82461 - DNA, 15 bp, Homo sapiens
gtgccaaccttgccc

SEQ ID NO: 82462 - DNA, 15 bp, Homo sapiens
ggtgccaaccttgcc

SEQ ID NO: 82463 - DNA, 15 bp, Homo sapiens
aggtgccaaccttgc

SEQ ID NO: 82464 - DNA, 15 bp, Homo sapiens
gaggtgccaaccttg

SEQ ID NO: 82465 - DNA, 15 bp, Homo sapiens
ggaggtgccaacctt

SEQ ID NO: 82466 - DNA, 15 bp, Homo sapiens
tggaggtgccaacct

SEQ ID NO: 82467 - DNA, 15 bp, Homo sapiens
ctggaggtgccaacc

SEQ ID NO: 82468 - DNA, 15 bp, Homo sapiens
tctggaggtgccaac

SEQ ID NO: 82469 - DNA, 15 bp, Homo sapiens
ttctggaggtgccaa

SEQ ID NO: 82470 - DNA, 15 bp, Homo sapiens
cttctggaggtgcca

SEQ ID NO: 82471 - DNA, 15 bp, Homo sapiens
gcttctggaggtgcc

SEQ ID NO: 82472 - DNA, 15 bp, Homo sapiens
agcttctggaggtgc

SEQ ID NO: 82473 - DNA, 15 bp, Homo sapiens
aagcttctggaggtg

SEQ ID NO: 82474 - DNA, 15 bp, Homo sapiens
gaagcttctggaggt

SEQ ID NO: 82475 - DNA, 15 bp, Homo sapiens
ggaagcttctggagg

SEQ ID NO: 82476 - DNA, 15 bp, Homo sapiens
tggaagcttctggag

SEQ ID NO: 82477 - DNA, 15 bp, Homo sapiens
ttggaagcttctgga

SEQ ID NO: 82478 - DNA, 15 bp, Homo sapiens
cttggaagcttctgg

SEQ ID NO: 82479 - DNA, 15 bp, Homo sapiens
tcttggaagcttctg

SEQ ID NO: 82480 - DNA, 15 bp, Homo sapiens
ttcttggaagcttct

SEQ ID NO: 82481 - DNA, 15 bp, Homo sapiens
attcttggaagcttc

SEQ ID NO: 82482 - DNA, 15 bp, Homo sapiens
tattcttggaagctt

SEQ ID NO: 82483 - DNA, 15 bp, Homo sapiens
ctattcttggaagct

SEQ ID NO: 82484 - DNA, 15 bp, Homo sapiens
tctattcttggaagc

SEQ ID NO: 82485 - DNA, 15 bp, Homo sapiens
ttctattcttggaag

SEQ ID NO: 82486 - DNA, 15 bp, Homo sapiens
gttctattcttggaa

SEQ ID NO: 82487 - DNA, 15 bp, Homo sapiens
tgttctattcttgga

SEQ ID NO: 82488 - DNA, 15 bp, Homo sapiens
gtgttctattcttgg

SEQ ID NO: 82489 - DNA, 15 bp, Homo sapiens
agtgttctattcttg

SEQ ID NO: 82490 - DNA, 15 bp, Homo sapiens
tagtgttctattctt

SEQ ID NO: 82491 - DNA, 15 bp, Homo sapiens
ttagtgttctattct

SEQ ID NO: 82492 - DNA, 15 bp, Homo sapiens
gttagtgttctattc

SEQ ID NO: 82493 - DNA, 15 bp, Homo sapiens
agttagtgttctatt

SEQ ID NO: 82494 - DNA, 15 bp, Homo sapiens
cagttagtgttctat

SEQ ID NO: 82495 - DNA, 15 bp, Homo sapiens
acagttagtgttcta

SEQ ID NO: 82496 - DNA, 15 bp, Homo sapiens
gacagttagtgttct

SEQ ID NO: 82497 - DNA, 15 bp, Homo sapiens
ggacagttagtgttc

SEQ ID NO: 82498 - DNA, 15 bp, Homo sapiens
gggacagttagtgtt

SEQ ID NO: 82499 - DNA, 15 bp, Homo sapiens
agggacagttagtgt

SEQ ID NO: 82500 - DNA, 15 bp, Homo sapiens
aagggacagttagtg

SEQ ID NO: 82501 - DNA, 15 bp, Homo sapiens
taagggacagttagt

SEQ ID NO: 82502 - DNA, 15 bp, Homo sapiens
ataagggacagttag

SEQ ID NO: 82503 - DNA, 15 bp, Homo sapiens
cataagggacagtta

SEQ ID NO: 82504 - DNA, 15 bp, Homo sapiens
ccataagggacagtt

SEQ ID NO: 82505 - DNA, 15 bp, Homo sapiens
tccataagggacagt

SEQ ID NO: 82506 - DNA, 15 bp, Homo sapiens
ctccataagggacag

SEQ ID NO: 82507 - DNA, 15 bp, Homo sapiens
actccataagggaca

SEQ ID NO: 82508 - DNA, 15 bp, Homo sapiens
tactccataagggac

SEQ ID NO: 82509 - DNA, 15 bp, Homo sapiens
ttactccataaggga

SEQ ID NO: 82510 - DNA, 15 bp, Homo sapiens
gttactccataaggg

SEQ ID NO: 82511 - DNA, 15 bp, Homo sapiens
agttactccataagg

SEQ ID NO: 82512 - DNA, 15 bp, Homo sapiens
tagttactccataag

SEQ ID NO: 82513 - DNA, 15 bp, Homo sapiens
ttagttactccataa

SEQ ID NO: 82514 - DNA, 15 bp, Homo sapiens
tttagttactccata

SEQ ID NO: 82515 - DNA, 15 bp, Homo sapiens
gtttagttactccat

SEQ ID NO: 82516 - DNA, 15 bp, Homo sapiens
ggtttagttactcca

SEQ ID NO: 82517 - DNA, 15 bp, Homo sapiens
tggtttagttactcc

SEQ ID NO: 82518 - DNA, 15 bp, Homo sapiens
ctggtttagttactc

SEQ ID NO: 82519 - DNA, 15 bp, Homo sapiens
actggtttagttact

SEQ ID NO: 82520 - DNA, 15 bp, Homo sapiens
gactggtttagttac

SEQ ID NO: 82521 - DNA, 15 bp, Homo sapiens
ggactggtttagtta

SEQ ID NO: 82522 - DNA, 15 bp, Homo sapiens
gggactggtttagtt

SEQ ID NO: 82523 - DNA, 15 bp, Homo sapiens
tgggactggtttagt

SEQ ID NO: 82524 - DNA, 15 bp, Homo sapiens
ttgggactggtttag

SEQ ID NO: 82525 - DNA, 15 bp, Homo sapiens
cttgggactggttta

SEQ ID NO: 82526 - DNA, 15 bp, Homo sapiens
gcttgggactggttt

SEQ ID NO: 82527 - DNA, 15 bp, Homo sapiens
ggcttgggactggtt

SEQ ID NO: 82528 - DNA, 15 bp, Homo sapiens
gggcttgggactggt

SEQ ID NO: 82529 - DNA, 15 bp, Homo sapiens
ggggcttgggactgg

SEQ ID NO: 82530 - DNA, 15 bp, Homo sapiens
gggggcttgggactg

SEQ ID NO: 82531 - DNA, 15 bp, Homo sapiens
tgggggcttgggact

SEQ ID NO: 82532 - DNA, 15 bp, Homo sapiens
ctgggggcttgggac

SEQ ID NO: 82533 - DNA, 15 bp, Homo sapiens
cctgggggcttggga

SEQ ID NO: 82534 - DNA, 15 bp, Homo sapiens
tcctgggggcttggg

SEQ ID NO: 82535 - DNA, 15 bp, Homo sapiens
ttcctgggggcttgg

SEQ ID NO: 82536 - DNA, 15 bp, Homo sapiens
gttcctgggggcttg

SEQ ID NO: 82537 - DNA, 15 bp, Homo sapiens
agttcctgggggctt

SEQ ID NO: 82538 - DNA, 15 bp, Homo sapiens
cagttcctgggggct

SEQ ID NO: 82539 - DNA, 15 bp, Homo sapiens
acagttcctgggggc

SEQ ID NO: 82540 - DNA, 15 bp, Homo sapiens
gacagttcctggggg

SEQ ID NO: 82541 - DNA, 15 bp, Homo sapiens
ggacagttcctgggg

SEQ ID NO: 82542 - DNA, 15 bp, Homo sapiens
cggacagttcctggg

SEQ ID NO: 82543 - DNA, 15 bp, Homo sapiens
acggacagttcctgg

SEQ ID NO: 82544 - DNA, 15 bp, Homo sapiens
cacggacagttcctg

SEQ ID NO: 82545 - DNA, 15 bp, Homo sapiens
ccacggacagttcct

SEQ ID NO: 82546 - DNA, 15 bp, Homo sapiens
cccacggacagttcc

SEQ ID NO: 82547 - DNA, 15 bp, Homo sapiens
acccacggacagttc

SEQ ID NO: 82548 - DNA, 15 bp, Homo sapiens
aacccacggacagtt

SEQ ID NO: 82549 - DNA, 15 bp, Homo sapiens
aaacccacggacagt

SEQ ID NO: 82550 - DNA, 15 bp, Homo sapiens
aaaacccacggacag

SEQ ID NO: 82551 - DNA, 15 bp, Homo sapiens
taaaacccacggaca

SEQ ID NO: 82552 - DNA, 15 bp, Homo sapiens
ctaaaacccacggac

SEQ ID NO: 82553 - DNA, 15 bp, Homo sapiens
gctaaaacccacgga

SEQ ID NO: 82554 - DNA, 15 bp, Homo sapiens
agctaaaacccacgg

SEQ ID NO: 82555 - DNA, 15 bp, Homo sapiens
cagctaaaacccacg

SEQ ID NO: 82556 - DNA, 15 bp, Homo sapiens
ccagctaaaacccac

SEQ ID NO: 82557 - DNA, 15 bp, Homo sapiens
cccagctaaaaccca

SEQ ID NO: 82558 - DNA, 15 bp, Homo sapiens
acccagctaaaaccc

SEQ ID NO: 82559 - DNA, 15 bp, Homo sapiens
aacccagctaaaacc

SEQ ID NO: 82560 - DNA, 15 bp, Homo sapiens
aaacccagctaaaac

SEQ ID NO: 82561 - DNA, 15 bp, Homo sapiens
aaaacccagctaaaa

SEQ ID NO: 82562 - DNA, 15 bp, Homo sapiens
gaaaacccagctaaa

SEQ ID NO: 82563 - DNA, 15 bp, Homo sapiens
agaaaacccagctaa

SEQ ID NO: 82564 - DNA, 15 bp, Homo sapiens
cagaaaacccagcta

SEQ ID NO: 82565 - DNA, 15 bp, Homo sapiens
gcagaaaacccagct

SEQ ID NO: 82566 - DNA, 15 bp, Homo sapiens
agcagaaaacccagc

SEQ ID NO: 82567 - DNA, 15 bp, Homo sapiens
gagcagaaaacccag

SEQ ID NO: 82568 - DNA, 15 bp, Homo sapiens
tgagcagaaaaccca

SEQ ID NO: 82569 - DNA, 15 bp, Homo sapiens
ctgagcagaaaaccc

SEQ ID NO: 82570 - DNA, 15 bp, Homo sapiens
gctgagcagaaaacc

SEQ ID NO: 82571 - DNA, 15 bp, Homo sapiens
agctgagcagaaaac

SEQ ID NO: 82572 - DNA, 15 bp, Homo sapiens
tagctgagcagaaaa

SEQ ID NO: 82573 - DNA, 15 bp, Homo sapiens
ctagctgagcagaaa

SEQ ID NO: 82574 - DNA, 15 bp, Homo sapiens
gctagctgagcagaa

SEQ ID NO: 82575 - DNA, 15 bp, Homo sapiens
agctagctgagcaga

SEQ ID NO: 82576 - DNA, 15 bp, Homo sapiens
aagctagctgagcag

SEQ ID NO: 82577 - DNA, 15 bp, Homo sapiens
aaagctagctgagca

SEQ ID NO: 82578 - DNA, 15 bp, Homo sapiens
taaagctagctgagc

SEQ ID NO: 82579 - DNA, 15 bp, Homo sapiens
gtaaagctagctgag

SEQ ID NO: 82580 - DNA, 15 bp, Homo sapiens
agtaaagctagctga

SEQ ID NO: 82581 - DNA, 15 bp, Homo sapiens
cagtaaagctagctg

SEQ ID NO: 82582 - DNA, 15 bp, Homo sapiens
tcagtaaagctagct

SEQ ID NO: 82583 - DNA, 15 bp, Homo sapiens
ctcagtaaagctagc

SEQ ID NO: 82584 - DNA, 15 bp, Homo sapiens
gctcagtaaagctag

SEQ ID NO: 82585 - DNA, 15 bp, Homo sapiens
agctcagtaaagcta

SEQ ID NO: 82586 - DNA, 15 bp, Homo sapiens
aagctcagtaaagct

SEQ ID NO: 82587 - DNA, 15 bp, Homo sapiens
caagctcagtaaagc

SEQ ID NO: 82588 - DNA, 15 bp, Homo sapiens
tcaagctcagtaaag

SEQ ID NO: 82589 - DNA, 15 bp, Homo sapiens
gtcaagctcagtaaa

SEQ ID NO: 82590 - DNA, 15 bp, Homo sapiens
tgtcaagctcagtaa

SEQ ID NO: 82591 - DNA, 15 bp, Homo sapiens
ttgtcaagctcagta

SEQ ID NO: 82592 - DNA, 15 bp, Homo sapiens
tttgtcaagctcagt

SEQ ID NO: 82593 - DNA, 15 bp, Homo sapiens
ctttgtcaagctcag

SEQ ID NO: 82594 - DNA, 15 bp, Homo sapiens
tctttgtcaagctca

SEQ ID NO: 82595 - DNA, 15 bp, Homo sapiens
ttctttgtcaagctc

SEQ ID NO: 82596 - DNA, 15 bp, Homo sapiens
tttctttgtcaagct

SEQ ID NO: 82597 - DNA, 15 bp, Homo sapiens
ttttctttgtcaagc

SEQ ID NO: 82598 - DNA, 15 bp, Homo sapiens
gttttctttgtcaag

SEQ ID NO: 82599 - DNA, 15 bp, Homo sapiens
tgttttctttgtcaa

SEQ ID NO: 82600 - DNA, 15 bp, Homo sapiens
atgttttctttgtca

SEQ ID NO: 82601 - DNA, 15 bp, Homo sapiens
gatgttttctttgtc

SEQ ID NO: 82602 - DNA, 15 bp, Homo sapiens
agatgttttctttgt

SEQ ID NO: 82603 - DNA, 15 bp, Homo sapiens
gagatgttttctttg

SEQ ID NO: 82604 - DNA, 15 bp, Homo sapiens
ggagatgttttcttt

SEQ ID NO: 82605 - DNA, 15 bp, Homo sapiens
tggagatgttttctt

SEQ ID NO: 82606 - DNA, 15 bp, Homo sapiens
ctggagatgttttct

SEQ ID NO: 82607 - DNA, 15 bp, Homo sapiens
cctggagatgttttc

SEQ ID NO: 82608 - DNA, 15 bp, Homo sapiens
acctggagatgtttt

SEQ ID NO: 82609 - DNA, 15 bp, Homo sapiens
tacctggagatgttt

SEQ ID NO: 82610 - DNA, 15 bp, Homo sapiens
ttacctggagatgtt

SEQ ID NO: 82611 - DNA, 15 bp, Homo sapiens
tttacctggagatgt

SEQ ID NO: 82612 - DNA, 15 bp, Homo sapiens
gtttacctggagatg

SEQ ID NO: 82613 - DNA, 15 bp, Homo sapiens
ggtttacctggagat

SEQ ID NO: 82614 - DNA, 15 bp, Homo sapiens
gggtttacctggaga

SEQ ID NO: 82615 - DNA, 15 bp, Homo sapiens
tgggtttacctggag

SEQ ID NO: 82616 - DNA, 15 bp, Homo sapiens
ttgggtttacctgga

SEQ ID NO: 82617 - DNA, 15 bp, Homo sapiens
attgggtttacctgg

SEQ ID NO: 82618 - DNA, 15 bp, Homo sapiens
cattgggtttacctg

SEQ ID NO: 82619 - DNA, 15 bp, Homo sapiens
tcattgggtttacct

SEQ ID NO: 82620 - DNA, 15 bp, Homo sapiens
ttcattgggtttacc

SEQ ID NO: 82621 - DNA, 15 bp, Homo sapiens
tttcattgggtttac

SEQ ID NO: 82622 - DNA, 15 bp, Homo sapiens
atttcattgggttta

SEQ ID NO: 82623 - DNA, 15 bp, Homo sapiens
catttcattgggttt

SEQ ID NO: 82624 - DNA, 15 bp, Homo sapiens
acatttcattgggtt

SEQ ID NO: 82625 - DNA, 15 bp, Homo sapiens
aacatttcattgggt

SEQ ID NO: 82626 - DNA, 15 bp, Homo sapiens
aaacatttcattggg

SEQ ID NO: 82627 - DNA, 15 bp, Homo sapiens
aaaacatttcattgg

SEQ ID NO: 82628 - DNA, 15 bp, Homo sapiens
gaaaacatttcattg

SEQ ID NO: 82629 - DNA, 15 bp, Homo sapiens
agaaaacatttcatt

SEQ ID NO: 82630 - DNA, 15 bp, Homo sapiens
aagaaaacatttcat

SEQ ID NO: 82631 - DNA, 15 bp, Homo sapiens
aaagaaaacatttca

SEQ ID NO: 82632 - DNA, 15 bp, Homo sapiens
caaagaaaacatttc

SEQ ID NO: 82633 - DNA, 15 bp, Homo sapiens
ccaaagaaaacattt

SEQ ID NO: 82634 - DNA, 15 bp, Homo sapiens
tccaaagaaaacatt

SEQ ID NO: 82635 - DNA, 15 bp, Homo sapiens
ctccaaagaaaacat

SEQ ID NO: 82636 - DNA, 15 bp, Homo sapiens
cctccaaagaaaaca

SEQ ID NO: 82637 - DNA, 15 bp, Homo sapiens
tcctccaaagaaaac

SEQ ID NO: 82638 - DNA, 15 bp, Homo sapiens
gtcctccaaagaaaa

SEQ ID NO: 82639 - DNA, 15 bp, Homo sapiens
ggtcctccaaagaaa

SEQ ID NO: 82640 - DNA, 15 bp, Homo sapiens
tggtcctccaaagaa

SEQ ID NO: 82641 - DNA, 15 bp, Homo sapiens
gtggtcctccaaaga

SEQ ID NO: 82642 - DNA, 15 bp, Homo sapiens
tgtggtcctccaaag

SEQ ID NO: 82643 - DNA, 15 bp, Homo sapiens
ctgtggtcctccaaa

SEQ ID NO: 82644 - DNA, 15 bp, Homo sapiens
gctgtggtcctccaa

SEQ ID NO: 82645 - DNA, 15 bp, Homo sapiens
tgctgtggtcctcca

SEQ ID NO: 82646 - DNA, 15 bp, Homo sapiens
ctgctgtggtcctcc

SEQ ID NO: 82647 - DNA, 15 bp, Homo sapiens
cctgctgtggtcctc

SEQ ID NO: 82648 - DNA, 15 bp, Homo sapiens
tcctgctgtggtcct

SEQ ID NO: 82649 - DNA, 15 bp, Homo sapiens
gtcctgctgtggtcc

SEQ ID NO: 82650 - DNA, 15 bp, Homo sapiens
agtcctgctgtggtc

SEQ ID NO: 82651 - DNA, 15 bp, Homo sapiens
aagtcctgctgtggt

SEQ ID NO: 82652 - DNA, 15 bp, Homo sapiens
caagtcctgctgtgg

SEQ ID NO: 82653 - DNA, 15 bp, Homo sapiens
acaagtcctgctgtg

SEQ ID NO: 82654 - DNA, 15 bp, Homo sapiens
aacaagtcctgctgt

SEQ ID NO: 82655 - DNA, 15 bp, Homo sapiens
gaacaagtcctgctg

SEQ ID NO: 82656 - DNA, 15 bp, Homo sapiens
tgaacaagtcctgct

SEQ ID NO: 82657 - DNA, 15 bp, Homo sapiens
gtgaacaagtcctgc

SEQ ID NO: 82658 - DNA, 15 bp, Homo sapiens
tgtgaacaagtcctg

SEQ ID NO: 82659 - DNA, 15 bp, Homo sapiens
ttgtgaacaagtcct

SEQ ID NO: 82660 - DNA, 15 bp, Homo sapiens
tttgtgaacaagtcc

SEQ ID NO: 82661 - DNA, 15 bp, Homo sapiens
ttttgtgaacaagtc

SEQ ID NO: 82662 - DNA, 15 bp, Homo sapiens
attttgtgaacaagt

SEQ ID NO: 82663 - DNA, 15 bp, Homo sapiens
tattttgtgaacaag

SEQ ID NO: 82664 - DNA, 15 bp, Homo sapiens
atattttgtgaacaa

SEQ ID NO: 82665 - DNA, 15 bp, Homo sapiens
gatattttgtgaaca

SEQ ID NO: 82666 - DNA, 15 bp, Homo sapiens
agatattttgtgaac

SEQ ID NO: 82667 - DNA, 15 bp, Homo sapiens
tagatattttgtgaa

SEQ ID NO: 82668 - DNA, 15 bp, Homo sapiens
gtagatattttgtga

SEQ ID NO: 82669 - DNA, 15 bp, Homo sapiens
agtagatattttgtg

SEQ ID NO: 82670 - DNA, 15 bp, Homo sapiens
aagtagatattttgt

SEQ ID NO: 82671 - DNA, 15 bp, Homo sapiens
aaagtagatattttg

SEQ ID NO: 82672 - DNA, 15 bp, Homo sapiens
aaaagtagatatttt

SEQ ID NO: 82673 - DNA, 15 bp, Homo sapiens
gaaaagtagatattt

SEQ ID NO: 82674 - DNA, 15 bp, Homo sapiens
ggaaaagtagatatt

SEQ ID NO: 82675 - DNA, 15 bp, Homo sapiens
aggaaaagtagatat

SEQ ID NO: 82676 - DNA, 15 bp, Homo sapiens
caggaaaagtagata

SEQ ID NO: 82677 - DNA, 15 bp, Homo sapiens
acaggaaaagtagat

SEQ ID NO: 82678 - DNA, 15 bp, Homo sapiens
tacaggaaaagtaga

SEQ ID NO: 82679 - DNA, 15 bp, Homo sapiens
ctacaggaaaagtag

SEQ ID NO: 82680 - DNA, 15 bp, Homo sapiens
tctacaggaaaagta

SEQ ID NO: 82681 - DNA, 15 bp, Homo sapiens
atctacaggaaaagt

SEQ ID NO: 82682 - DNA, 15 bp, Homo sapiens
catctacaggaaaag

SEQ ID NO: 82683 - DNA, 15 bp, Homo sapiens
ccatctacaggaaaa

SEQ ID NO: 82684 - DNA, 15 bp, Homo sapiens
tccatctacaggaaa

SEQ ID NO: 82685 - DNA, 15 bp, Homo sapiens
atccatctacaggaa

SEQ ID NO: 82686 - DNA, 15 bp, Homo sapiens
catccatctacagga

SEQ ID NO: 82687 - DNA, 15 bp, Homo sapiens
gcatccatctacagg

SEQ ID NO: 82688 - DNA, 15 bp, Homo sapiens
ggcatccatctacag

SEQ ID NO: 82689 - DNA, 15 bp, Homo sapiens
cggcatccatctaca

SEQ ID NO: 82690 - DNA, 15 bp, Homo sapiens
ccggcatccatctac

SEQ ID NO: 82691 - DNA, 15 bp, Homo sapiens
cccggcatccatcta

SEQ ID NO: 82692 - DNA, 15 bp, Homo sapiens
tcccggcatccatct

SEQ ID NO: 82693 - DNA, 15 bp, Homo sapiens
ctcccggcatccatc

SEQ ID NO: 82694 - DNA, 15 bp, Homo sapiens
tctcccggcatccat

SEQ ID NO: 82695 - DNA, 15 bp, Homo sapiens
gtctcccggcatcca

SEQ ID NO: 82696 - DNA, 15 bp, Homo sapiens
tgtctcccggcatcc

SEQ ID NO: 82697 - DNA, 15 bp, Homo sapiens
ctgtctcccggcatc

SEQ ID NO: 82698 - DNA, 15 bp, Homo sapiens
cctgtctcccggcat

SEQ ID NO: 82699 - DNA, 15 bp, Homo sapiens
tcctgtctcccggca

SEQ ID NO: 82700 - DNA, 15 bp, Homo sapiens
ctcctgtctcccggc

SEQ ID NO: 82701 - DNA, 15 bp, Homo sapiens
tctcctgtctcccgg

SEQ ID NO: 82702 - DNA, 15 bp, Homo sapiens
gtctcctgtctcccg

SEQ ID NO: 82703 - DNA, 15 bp, Homo sapiens
ggtctcctgtctccc

SEQ ID NO: 82704 - DNA, 15 bp, Homo sapiens
gggtctcctgtctcc

SEQ ID NO: 82705 - DNA, 15 bp, Homo sapiens
ggggtctcctgtctc

SEQ ID NO: 82706 - DNA, 15 bp, Homo sapiens
aggggtctcctgtct

SEQ ID NO: 82707 - DNA, 15 bp, Homo sapiens
caggggtctcctgtc

SEQ ID NO: 82708 - DNA, 15 bp, Homo sapiens
acaggggtctcctgt

SEQ ID NO: 82709 - DNA, 15 bp, Homo sapiens
cacaggggtctcctg

SEQ ID NO: 82710 - DNA, 15 bp, Homo sapiens
gcacaggggtctcct

SEQ ID NO: 82711 - DNA, 15 bp, Homo sapiens
agcacaggggtctcc

SEQ ID NO: 82712 - DNA, 15 bp, Homo sapiens
cagcacaggggtctc

SEQ ID NO: 82713 - DNA, 15 bp, Homo sapiens
ccagcacaggggtct

SEQ ID NO: 82714 - DNA, 15 bp, Homo sapiens
tccagcacaggggtc

SEQ ID NO: 82715 - DNA, 15 bp, Homo sapiens
gtccagcacaggggt

SEQ ID NO: 82716 - DNA, 15 bp, Homo sapiens
agtccagcacagggg

SEQ ID NO: 82717 - DNA, 15 bp, Homo sapiens
cagtccagcacaggg

SEQ ID NO: 82718 - DNA, 15 bp, Homo sapiens
acagtccagcacagg

SEQ ID NO: 82719 - DNA, 15 bp, Homo sapiens
gacagtccagcacag

SEQ ID NO: 82720 - DNA, 15 bp, Homo sapiens
ggacagtccagcaca

SEQ ID NO: 82721 - DNA, 15 bp, Homo sapiens
tggacagtccagcac

SEQ ID NO: 82722 - DNA, 15 bp, Homo sapiens
ctggacagtccagca

SEQ ID NO: 82723 - DNA, 15 bp, Homo sapiens
cctggacagtccagc

SEQ ID NO: 82724 - DNA, 15 bp, Homo sapiens
gcctggacagtccag

SEQ ID NO: 82725 - DNA, 15 bp, Homo sapiens
agcctggacagtcca

SEQ ID NO: 82726 - DNA, 15 bp, Homo sapiens
aagcctggacagtcc

SEQ ID NO: 82727 - DNA, 15 bp, Homo sapiens
taagcctggacagtc

SEQ ID NO: 82728 - DNA, 15 bp, Homo sapiens
ctaagcctggacagt

SEQ ID NO: 82729 - DNA, 15 bp, Homo sapiens
gctaagcctggacag

SEQ ID NO: 82730 - DNA, 15 bp, Homo sapiens
tgctaagcctggaca

SEQ ID NO: 82731 - DNA, 15 bp, Homo sapiens
gtgctaagcctggac

SEQ ID NO: 82732 - DNA, 15 bp, Homo sapiens
agtgctaagcctgga

SEQ ID NO: 82733 - DNA, 15 bp, Homo sapiens
gagtgctaagcctgg

SEQ ID NO: 82734 - DNA, 15 bp, Homo sapiens
ggagtgctaagcctg

SEQ ID NO: 82735 - DNA, 15 bp, Homo sapiens
tggagtgctaagcct

SEQ ID NO: 82736 - DNA, 15 bp, Homo sapiens
ctggagtgctaagcc

SEQ ID NO: 82737 - DNA, 15 bp, Homo sapiens
actggagtgctaagc

SEQ ID NO: 82738 - DNA, 15 bp, Homo sapiens
gactggagtgctaag

SEQ ID NO: 82739 - DNA, 15 bp, Homo sapiens
tgactggagtgctaa

SEQ ID NO: 82740 - DNA, 15 bp, Homo sapiens
ttgactggagtgcta

SEQ ID NO: 82741 - DNA, 15 bp, Homo sapiens
cttgactggagtgct

SEQ ID NO: 82742 - DNA, 15 bp, Homo sapiens
gcttgactggagtgc

SEQ ID NO: 82743 - DNA, 15 bp, Homo sapiens
tgcttgactggagtg

SEQ ID NO: 82744 - DNA, 15 bp, Homo sapiens
ctgcttgactggagt

SEQ ID NO: 82745 - DNA, 15 bp, Homo sapiens
cctgcttgactggag

SEQ ID NO: 82746 - DNA, 15 bp, Homo sapiens
tcctgcttgactgga

SEQ ID NO: 82747 - DNA, 15 bp, Homo sapiens
atcctgcttgactgg

SEQ ID NO: 82748 - DNA, 15 bp, Homo sapiens
catcctgcttgactg

SEQ ID NO: 82749 - DNA, 15 bp, Homo sapiens
acatcctgcttgact

SEQ ID NO: 82750 - DNA, 15 bp, Homo sapiens
tacatcctgcttgac

SEQ ID NO: 82751 - DNA, 15 bp, Homo sapiens
ctacatcctgcttga

SEQ ID NO: 82752 - DNA, 15 bp, Homo sapiens
cctacatcctgcttg

SEQ ID NO: 82753 - DNA, 15 bp, Homo sapiens
gcctacatcctgctt

SEQ ID NO: 82754 - DNA, 15 bp, Homo sapiens
ggcctacatcctgct

SEQ ID NO: 82755 - DNA, 15 bp, Homo sapiens
tggcctacatcctgc

SEQ ID NO: 82756 - DNA, 15 bp, Homo sapiens
ctggcctacatcctg

SEQ ID NO: 82757 - DNA, 15 bp, Homo sapiens
gctggcctacatcct

SEQ ID NO: 82758 - DNA, 15 bp, Homo sapiens
ggctggcctacatcc

SEQ ID NO: 82759 - DNA, 15 bp, Homo sapiens
gggctggcctacatc

SEQ ID NO: 82760 - DNA, 15 bp, Homo sapiens
agggctggcctacat

SEQ ID NO: 82761 - DNA, 15 bp, Homo sapiens
cagggctggcctaca

SEQ ID NO: 82762 - DNA, 15 bp, Homo sapiens
acagggctggcctac

SEQ ID NO: 82763 - DNA, 15 bp, Homo sapiens
gacagggctggccta

SEQ ID NO: 82764 - DNA, 15 bp, Homo sapiens
tgacagggctggcct

SEQ ID NO: 82765 - DNA, 15 bp, Homo sapiens
ctgacagggctggcc

SEQ ID NO: 82766 - DNA, 15 bp, Homo sapiens
actgacagggctggc

SEQ ID NO: 82767 - DNA, 15 bp, Homo sapiens
cactgacagggctgg

SEQ ID NO: 82768 - DNA, 15 bp, Homo sapiens
tcactgacagggctg

SEQ ID NO: 82769 - DNA, 15 bp, Homo sapiens
gtcactgacagggct

SEQ ID NO: 82770 - DNA, 15 bp, Homo sapiens
agtcactgacagggc

SEQ ID NO: 82771 - DNA, 15 bp, Homo sapiens
cagtcactgacaggg

SEQ ID NO: 82772 - DNA, 15 bp, Homo sapiens
acagtcactgacagg

SEQ ID NO: 82773 - DNA, 15 bp, Homo sapiens
gacagtcactgacag

SEQ ID NO: 82774 - DNA, 15 bp, Homo sapiens
agacagtcactgaca

SEQ ID NO: 82775 - DNA, 15 bp, Homo sapiens
gagacagtcactgac

SEQ ID NO: 82776 - DNA, 15 bp, Homo sapiens
ggagacagtcactga

SEQ ID NO: 82777 - DNA, 15 bp, Homo sapiens
tggagacagtcactg

SEQ ID NO: 82778 - DNA, 15 bp, Homo sapiens
ctggagacagtcact

SEQ ID NO: 82779 - DNA, 15 bp, Homo sapiens
cctggagacagtcac

SEQ ID NO: 82780 - DNA, 15 bp, Homo sapiens
ccctggagacagtca

SEQ ID NO: 82781 - DNA, 15 bp, Homo sapiens
accctggagacagtc

SEQ ID NO: 82782 - DNA, 15 bp, Homo sapiens
taccctggagacagt

SEQ ID NO: 82783 - DNA, 15 bp, Homo sapiens
ctaccctggagacag

SEQ ID NO: 82784 - DNA, 15 bp, Homo sapiens
gctaccctggagaca

SEQ ID NO: 82785 - DNA, 15 bp, Homo sapiens
agctaccctggagac

SEQ ID NO: 82786 - DNA, 15 bp, Homo sapiens
cagctaccctggaga

SEQ ID NO: 82787 - DNA, 15 bp, Homo sapiens
gcagctaccctggag

SEQ ID NO: 82788 - DNA, 15 bp, Homo sapiens
ggcagctaccctgga

SEQ ID NO: 82789 - DNA, 15 bp, Homo sapiens
tggcagctaccctgg

SEQ ID NO: 82790 - DNA, 15 bp, Homo sapiens
ttggcagctaccctg

SEQ ID NO: 82791 - DNA, 15 bp, Homo sapiens
attggcagctaccct

SEQ ID NO: 82792 - DNA, 15 bp, Homo sapiens
cattggcagctaccc

SEQ ID NO: 82793 - DNA, 15 bp, Homo sapiens
ccattggcagctacc

SEQ ID NO: 82794 - DNA, 15 bp, Homo sapiens
tccattggcagctac

SEQ ID NO: 82795 - DNA, 15 bp, Homo sapiens
ctccattggcagcta

SEQ ID NO: 82796 - DNA, 15 bp, Homo sapiens
cctccattggcagct

SEQ ID NO: 82797 - DNA, 15 bp, Homo sapiens
ccctccattggcagc

SEQ ID NO: 82798 - DNA, 15 bp, Homo sapiens
tccctccattggcag

SEQ ID NO: 82799 - DNA, 15 bp, Homo sapiens
gtccctccattggca

SEQ ID NO: 82800 - DNA, 15 bp, Homo sapiens
ggtccctccattggc

SEQ ID NO: 82801 - DNA, 15 bp, Homo sapiens
tggtccctccattgg

SEQ ID NO: 82802 - DNA, 15 bp, Homo sapiens
ctggtccctccattg

SEQ ID NO: 82803 - DNA, 15 bp, Homo sapiens
gctggtccctccatt

SEQ ID NO: 82804 - DNA, 15 bp, Homo sapiens
agctggtccctccat

SEQ ID NO: 82805 - DNA, 15 bp, Homo sapiens
cagctggtccctcca

SEQ ID NO: 82806 - DNA, 15 bp, Homo sapiens
acagctggtccctcc

SEQ ID NO: 82807 - DNA, 15 bp, Homo sapiens
cacagctggtccctc

SEQ ID NO: 82808 - DNA, 15 bp, Homo sapiens
gcacagctggtccct

SEQ ID NO: 82809 - DNA, 15 bp, Homo sapiens
tgcacagctggtccc

SEQ ID NO: 82810 - DNA, 15 bp, Homo sapiens
gtgcacagctggtcc

SEQ ID NO: 82811 - DNA, 15 bp, Homo sapiens
ggtgcacagctggtc

SEQ ID NO: 82812 - DNA, 15 bp, Homo sapiens
tggtgcacagctggt

SEQ ID NO: 82813 - DNA, 15 bp, Homo sapiens
ctggtgcacagctgg

SEQ ID NO: 82814 - DNA, 15 bp, Homo sapiens
tctggtgcacagctg

SEQ ID NO: 82815 - DNA, 15 bp, Homo sapiens
ctctggtgcacagct

SEQ ID NO: 82816 - DNA, 15 bp, Homo sapiens
tctctggtgcacagc

SEQ ID NO: 82817 - DNA, 15 bp, Homo sapiens
ctctctggtgcacag

SEQ ID NO: 82818 - DNA, 15 bp, Homo sapiens
cctctctggtgcaca

SEQ ID NO: 82819 - DNA, 15 bp, Homo sapiens
ccctctctggtgcac

SEQ ID NO: 82820 - DNA, 15 bp, Homo sapiens
tccctctctggtgca

SEQ ID NO: 82821 - DNA, 15 bp, Homo sapiens
ctccctctctggtgc

SEQ ID NO: 82822 - DNA, 15 bp, Homo sapiens
actccctctctggtg

SEQ ID NO: 82823 - DNA, 15 bp, Homo sapiens
gactccctctctggt

SEQ ID NO: 82824 - DNA, 15 bp, Homo sapiens
agactccctctctgg

SEQ ID NO: 82825 - DNA, 15 bp, Homo sapiens
cagactccctctctg

SEQ ID NO: 82826 - DNA, 15 bp, Homo sapiens
tcagactccctctct

SEQ ID NO: 82827 - DNA, 15 bp, Homo sapiens
ctcagactccctctc

SEQ ID NO: 82828 - DNA, 15 bp, Homo sapiens
gctcagactccctct

SEQ ID NO: 82829 - DNA, 15 bp, Homo sapiens
agctcagactccctc

SEQ ID NO: 82830 - DNA, 15 bp, Homo sapiens
gagctcagactccct

SEQ ID NO: 82831 - DNA, 15 bp, Homo sapiens
agagctcagactccc

SEQ ID NO: 82832 - DNA, 15 bp, Homo sapiens
cagagctcagactcc

SEQ ID NO: 82833 - DNA, 15 bp, Homo sapiens
acagagctcagactc

SEQ ID NO: 82834 - DNA, 15 bp, Homo sapiens
cacagagctcagact

SEQ ID NO: 82835 - DNA, 15 bp, Homo sapiens
tcacagagctcagac

SEQ ID NO: 82836 - DNA, 15 bp, Homo sapiens
atcacagagctcaga

SEQ ID NO: 82837 - DNA, 15 bp, Homo sapiens
catcacagagctcag

SEQ ID NO: 82838 - DNA, 15 bp, Homo sapiens
tcatcacagagctca

SEQ ID NO: 82839 - DNA, 15 bp, Homo sapiens
ctcatcacagagctc

SEQ ID NO: 82840 - DNA, 15 bp, Homo sapiens
tctcatcacagagct

SEQ ID NO: 82841 - DNA, 15 bp, Homo sapiens
ctctcatcacagagc

SEQ ID NO: 82842 - DNA, 15 bp, Homo sapiens
cctctcatcacagag

SEQ ID NO: 82843 - DNA, 15 bp, Homo sapiens
tcctctcatcacaga

SEQ ID NO: 82844 - DNA, 15 bp, Homo sapiens
atcctctcatcacag

SEQ ID NO: 82845 - DNA, 15 bp, Homo sapiens
catcctctcatcaca

SEQ ID NO: 82846 - DNA, 15 bp, Homo sapiens
gcatcctctcatcac

SEQ ID NO: 82847 - DNA, 15 bp, Homo sapiens
agcatcctctcatca

SEQ ID NO: 82848 - DNA, 15 bp, Homo sapiens
aagcatcctctcatc

SEQ ID NO: 82849 - DNA, 15 bp, Homo sapiens
caagcatcctctcat

SEQ ID NO: 82850 - DNA, 15 bp, Homo sapiens
ccaagcatcctctca

SEQ ID NO: 82851 - DNA, 15 bp, Homo sapiens
gccaagcatcctctc

SEQ ID NO: 82852 - DNA, 15 bp, Homo sapiens
agccaagcatcctct

SEQ ID NO: 82853 - DNA, 15 bp, Homo sapiens
gagccaagcatcctc

SEQ ID NO: 82854 - DNA, 15 bp, Homo sapiens
ggagccaagcatcct

SEQ ID NO: 82855 - DNA, 15 bp, Homo sapiens
aggagccaagcatcc

SEQ ID NO: 82856 - DNA, 15 bp, Homo sapiens
gaggagccaagcatc

SEQ ID NO: 82857 - DNA, 15 bp, Homo sapiens
cgaggagccaagcat

SEQ ID NO: 82858 - DNA, 15 bp, Homo sapiens
acgaggagccaagca

SEQ ID NO: 82859 - DNA, 15 bp, Homo sapiens
cacgaggagccaagc

SEQ ID NO: 82860 - DNA, 15 bp, Homo sapiens
acacgaggagccaag

SEQ ID NO: 82861 - DNA, 15 bp, Homo sapiens
tacacgaggagccaa

SEQ ID NO: 82862 - DNA, 15 bp, Homo sapiens
ctacacgaggagcca

SEQ ID NO: 82863 - DNA, 15 bp, Homo sapiens
tctacacgaggagcc

SEQ ID NO: 82864 - DNA, 15 bp, Homo sapiens
ctctacacgaggagc

SEQ ID NO: 82865 - DNA, 15 bp, Homo sapiens
tctctacacgaggag

SEQ ID NO: 82866 - DNA, 15 bp, Homo sapiens
gtctctacacgagga

SEQ ID NO: 82867 - DNA, 15 bp, Homo sapiens
ggtctctacacgagg

SEQ ID NO: 82868 - DNA, 15 bp, Homo sapiens
tggtctctacacgag

SEQ ID NO: 82869 - DNA, 15 bp, Homo sapiens
ctggtctctacacga

SEQ ID NO: 82870 - DNA, 15 bp, Homo sapiens
cctggtctctacacg

SEQ ID NO: 82871 - DNA, 15 bp, Homo sapiens
gcctggtctctacac

SEQ ID NO: 82872 - DNA, 15 bp, Homo sapiens
agcctggtctctaca

SEQ ID NO: 82873 - DNA, 15 bp, Homo sapiens
cagcctggtctctac

SEQ ID NO: 82874 - DNA, 15 bp, Homo sapiens
acagcctggtctcta

SEQ ID NO: 82875 - DNA, 15 bp, Homo sapiens
gacagcctggtctct

SEQ ID NO: 82876 - DNA, 15 bp, Homo sapiens
ggacagcctggtctc

SEQ ID NO: 82877 - DNA, 15 bp, Homo sapiens
aggacagcctggtct

SEQ ID NO: 82878 - DNA, 15 bp, Homo sapiens
gaggacagcctggtc

SEQ ID NO: 82879 - DNA, 15 bp, Homo sapiens
tgaggacagcctggt

SEQ ID NO: 82880 - DNA, 15 bp, Homo sapiens
ctgaggacagcctgg

SEQ ID NO: 82881 - DNA, 15 bp, Homo sapiens
actgaggacagcctg

SEQ ID NO: 82882 - DNA, 15 bp, Homo sapiens
aactgaggacagcct

SEQ ID NO: 82883 - DNA, 15 bp, Homo sapiens
gaactgaggacagcc

SEQ ID NO: 82884 - DNA, 15 bp, Homo sapiens
ggaactgaggacagc

SEQ ID NO: 82885 - DNA, 15 bp, Homo sapiens
gggaactgaggacag

SEQ ID NO: 82886 - DNA, 15 bp, Homo sapiens
ggggaactgaggaca

SEQ ID NO: 82887 - DNA, 15 bp, Homo sapiens
aggggaactgaggac

SEQ ID NO: 82888 - DNA, 15 bp, Homo sapiens
caggggaactgagga

SEQ ID NO: 82889 - DNA, 15 bp, Homo sapiens
tcaggggaactgagg

SEQ ID NO: 82890 - DNA, 15 bp, Homo sapiens
atcaggggaactgag

SEQ ID NO: 82891 - DNA, 15 bp, Homo sapiens
aatcaggggaactga

SEQ ID NO: 82892 - DNA, 15 bp, Homo sapiens
gaatcaggggaactg

SEQ ID NO: 82893 - DNA, 15 bp, Homo sapiens
ggaatcaggggaact

SEQ ID NO: 82894 - DNA, 15 bp, Homo sapiens
gggaatcaggggaac

SEQ ID NO: 82895 - DNA, 15 bp, Homo sapiens
agggaatcaggggaa

SEQ ID NO: 82896 - DNA, 15 bp, Homo sapiens
aagggaatcagggga

SEQ ID NO: 82897 - DNA, 15 bp, Homo sapiens
aaagggaatcagggg

SEQ ID NO: 82898 - DNA, 15 bp, Homo sapiens
taaagggaatcaggg

SEQ ID NO: 82899 - DNA, 15 bp, Homo sapiens
ctaaagggaatcagg

SEQ ID NO: 82900 - DNA, 15 bp, Homo sapiens
tctaaagggaatcag

SEQ ID NO: 82901 - DNA, 15 bp, Homo sapiens
ttctaaagggaatca

SEQ ID NO: 82902 - DNA, 15 bp, Homo sapiens
cttctaaagggaatc

SEQ ID NO: 82903 - DNA, 15 bp, Homo sapiens
ccttctaaagggaat

SEQ ID NO: 82904 - DNA, 15 bp, Homo sapiens
cccttctaaagggaa

SEQ ID NO: 82905 - DNA, 15 bp, Homo sapiens
tcccttctaaaggga

SEQ ID NO: 82906 - DNA, 15 bp, Homo sapiens
ctcccttctaaaggg

SEQ ID NO: 82907 - DNA, 15 bp, Homo sapiens
tctcccttctaaagg

SEQ ID NO: 82908 - DNA, 15 bp, Homo sapiens
ctctcccttctaaag

SEQ ID NO: 82909 - DNA, 15 bp, Homo sapiens
gctctcccttctaaa

SEQ ID NO: 82910 - DNA, 15 bp, Homo sapiens
tgctctcccttctaa

SEQ ID NO: 82911 - DNA, 15 bp, Homo sapiens
ttgctctcccttcta

SEQ ID NO: 82912 - DNA, 15 bp, Homo sapiens
tttgctctcccttct

SEQ ID NO: 82913 - DNA, 15 bp, Homo sapiens
ctttgctctcccttc

SEQ ID NO: 82914 - DNA, 15 bp, Homo sapiens
tctttgctctccctt

SEQ ID NO: 82915 - DNA, 15 bp, Homo sapiens
atctttgctctccct

SEQ ID NO: 82916 - DNA, 15 bp, Homo sapiens
catctttgctctccc

SEQ ID NO: 82917 - DNA, 15 bp, Homo sapiens
tcatctttgctctcc

SEQ ID NO: 82918 - DNA, 15 bp, Homo sapiens
gtcatctttgctctc

SEQ ID NO: 82919 - DNA, 15 bp, Homo sapiens
tgtcatctttgctct

SEQ ID NO: 82920 - DNA, 15 bp, Homo sapiens
ttgtcatctttgctc

SEQ ID NO: 82921 - DNA, 15 bp, Homo sapiens
attgtcatctttgct

SEQ ID NO: 82922 - DNA, 15 bp, Homo sapiens
gattgtcatctttgc

SEQ ID NO: 82923 - DNA, 15 bp, Homo sapiens
tgattgtcatctttg

SEQ ID NO: 82924 - DNA, 15 bp, Homo sapiens
ttgattgtcatcttt

SEQ ID NO: 82925 - DNA, 15 bp, Homo sapiens
attgattgtcatctt

SEQ ID NO: 82926 - DNA, 15 bp, Homo sapiens
cattgattgtcatct

SEQ ID NO: 82927 - DNA, 15 bp, Homo sapiens
ccattgattgtcatc

SEQ ID NO: 82928 - DNA, 15 bp, Homo sapiens
cccattgattgtcat

SEQ ID NO: 82929 - DNA, 15 bp, Homo sapiens
ccccattgattgtca

SEQ ID NO: 82930 - DNA, 15 bp, Homo sapiens
gccccattgattgtc

SEQ ID NO: 82931 - DNA, 15 bp, Homo sapiens
ggccccattgattgt

SEQ ID NO: 82932 - DNA, 15 bp, Homo sapiens
tggccccattgattg

SEQ ID NO: 82933 - DNA, 15 bp, Homo sapiens
atggccccattgatt

SEQ ID NO: 82934 - DNA, 15 bp, Homo sapiens
catggccccattgat

SEQ ID NO: 82935 - DNA, 15 bp, Homo sapiens
tcatggccccattga

SEQ ID NO: 82936 - DNA, 15 bp, Homo sapiens
ttcatggccccattg

SEQ ID NO: 82937 - DNA, 15 bp, Homo sapiens
cttcatggccccatt

SEQ ID NO: 82938 - DNA, 15 bp, Homo sapiens
gcttcatggccccat

SEQ ID NO: 82939 - DNA, 15 bp, Homo sapiens
agcttcatggcccca

SEQ ID NO: 82940 - DNA, 15 bp, Homo sapiens
gagcttcatggcccc

SEQ ID NO: 82941 - DNA, 15 bp, Homo sapiens
tgagcttcatggccc

SEQ ID NO: 82942 - DNA, 15 bp, Homo sapiens
atgagcttcatggcc

SEQ ID NO: 82943 - DNA, 15 bp, Homo sapiens
catgagcttcatggc

SEQ ID NO: 82944 - DNA, 15 bp, Homo sapiens
tcatgagcttcatgg

SEQ ID NO: 82945 - DNA, 15 bp, Homo sapiens
ttcatgagcttcatg

SEQ ID NO: 82946 - DNA, 15 bp, Homo sapiens
gttcatgagcttcat

SEQ ID NO: 82947 - DNA, 15 bp, Homo sapiens
tgttcatgagcttca

SEQ ID NO: 82948 - DNA, 15 bp, Homo sapiens
gtgttcatgagcttc

SEQ ID NO: 82949 - DNA, 15 bp, Homo sapiens
agtgttcatgagctt

SEQ ID NO: 82950 - DNA, 15 bp, Homo sapiens
cagtgttcatgagct

SEQ ID NO: 82951 - DNA, 15 bp, Homo sapiens
tcagtgttcatgagc

SEQ ID NO: 82952 - DNA, 15 bp, Homo sapiens
ctcagtgttcatgag

SEQ ID NO: 82953 - DNA, 15 bp, Homo sapiens
actcagtgttcatga

SEQ ID NO: 82954 - DNA, 15 bp, Homo sapiens
aactcagtgttcatg

SEQ ID NO: 82955 - DNA, 15 bp, Homo sapiens
taactcagtgttcat

SEQ ID NO: 82956 - DNA, 15 bp, Homo sapiens
ataactcagtgttca

SEQ ID NO: 82957 - DNA, 15 bp, Homo sapiens
gataactcagtgttc

SEQ ID NO: 82958 - DNA, 15 bp, Homo sapiens
agataactcagtgtt

SEQ ID NO: 82959 - DNA, 15 bp, Homo sapiens
cagataactcagtgt

SEQ ID NO: 82960 - DNA, 15 bp, Homo sapiens
tcagataactcagtg

SEQ ID NO: 82961 - DNA, 15 bp, Homo sapiens
ctcagataactcagt

SEQ ID NO: 82962 - DNA, 15 bp, Homo sapiens
gctcagataactcag

SEQ ID NO: 82963 - DNA, 15 bp, Homo sapiens
agctcagataactca

SEQ ID NO: 82964 - DNA, 15 bp, Homo sapiens
aagctcagataactc

SEQ ID NO: 82965 - DNA, 15 bp, Homo sapiens
taagctcagataact

SEQ ID NO: 82966 - DNA, 15 bp, Homo sapiens
gtaagctcagataac

SEQ ID NO: 82967 - DNA, 15 bp, Homo sapiens
agtaagctcagataa

SEQ ID NO: 82968 - DNA, 15 bp, Homo sapiens
gagtaagctcagata

SEQ ID NO: 82969 - DNA, 15 bp, Homo sapiens
cgagtaagctcagat

SEQ ID NO: 82970 - DNA, 15 bp, Homo sapiens
acgagtaagctcaga

SEQ ID NO: 82971 - DNA, 15 bp, Homo sapiens
tacgagtaagctcag

SEQ ID NO: 82972 - DNA, 15 bp, Homo sapiens
ctacgagtaagctca

SEQ ID NO: 82973 - DNA, 15 bp, Homo sapiens
tctacgagtaagctc

SEQ ID NO: 82974 - DNA, 15 bp, Homo sapiens
gtctacgagtaagct

SEQ ID NO: 82975 - DNA, 15 bp, Homo sapiens
tgtctacgagtaagc

SEQ ID NO: 82976 - DNA, 15 bp, Homo sapiens
ctgtctacgagtaag

SEQ ID NO: 82977 - DNA, 15 bp, Homo sapiens
tctgtctacgagtaa

SEQ ID NO: 82978 - DNA, 15 bp, Homo sapiens
ctctgtctacgagta

SEQ ID NO: 82979 - DNA, 15 bp, Homo sapiens
actctgtctacgagt

SEQ ID NO: 82980 - DNA, 15 bp, Homo sapiens
cactctgtctacgag

SEQ ID NO: 82981 - DNA, 15 bp, Homo sapiens
ccactctgtctacga

SEQ ID NO: 82982 - DNA, 15 bp, Homo sapiens
gccactctgtctacg

SEQ ID NO: 82983 - DNA, 15 bp, Homo sapiens
ggccactctgtctac

SEQ ID NO: 82984 - DNA, 15 bp, Homo sapiens
tggccactctgtcta

SEQ ID NO: 82985 - DNA, 15 bp, Homo sapiens
atggccactctgtct

SEQ ID NO: 82986 - DNA, 15 bp, Homo sapiens
tatggccactctgtc

SEQ ID NO: 82987 - DNA, 15 bp, Homo sapiens
atatggccactctgt

SEQ ID NO: 82988 - DNA, 15 bp, Homo sapiens
tatatggccactctg

SEQ ID NO: 82989 - DNA, 15 bp, Homo sapiens
ttatatggccactct

SEQ ID NO: 82990 - DNA, 15 bp, Homo sapiens
attatatggccactc

SEQ ID NO: 82991 - DNA, 15 bp, Homo sapiens
cattatatggccact

SEQ ID NO: 82992 - DNA, 15 bp, Homo sapiens
gcattatatggccac

SEQ ID NO: 82993 - DNA, 15 bp, Homo sapiens
tgcattatatggcca

SEQ ID NO: 82994 - DNA, 15 bp, Homo sapiens
atgcattatatggcc

SEQ ID NO: 82995 - DNA, 15 bp, Homo sapiens
gatgcattatatggc

SEQ ID NO: 82996 - DNA, 15 bp, Homo sapiens
tgatgcattatatgg

SEQ ID NO: 82997 - DNA, 15 bp, Homo sapiens
ttgatgcattatatg

SEQ ID NO: 82998 - DNA, 15 bp, Homo sapiens
gttgatgcattatat

SEQ ID NO: 82999 - DNA, 15 bp, Homo sapiens
tgttgatgcattata

SEQ ID NO: 83000 - DNA, 15 bp, Homo sapiens
ttgttgatgcattat

SEQ ID NO: 83001 - DNA, 15 bp, Homo sapiens
tttgttgatgcatta

SEQ ID NO: 83002 - DNA, 15 bp, Homo sapiens
ttttgttgatgcatt

SEQ ID NO: 83003 - DNA, 15 bp, Homo sapiens
cttttgttgatgcat

SEQ ID NO: 83004 - DNA, 15 bp, Homo sapiens
acttttgttgatgca

SEQ ID NO: 83005 - DNA, 15 bp, Homo sapiens
cacttttgttgatgc

SEQ ID NO: 83006 - DNA, 15 bp, Homo sapiens
ccacttttgttgatg

SEQ ID NO: 83007 - DNA, 15 bp, Homo sapiens
cccacttttgttgat

SEQ ID NO: 83008 - DNA, 15 bp, Homo sapiens
tcccacttttgttga

SEQ ID NO: 83009 - DNA, 15 bp, Homo sapiens
atcccacttttgttg

SEQ ID NO: 83010 - DNA, 15 bp, Homo sapiens
tatcccacttttgtt

SEQ ID NO: 83011 - DNA, 15 bp, Homo sapiens
ttatcccacttttgt

SEQ ID NO: 83012 - DNA, 15 bp, Homo sapiens
attatcccacttttg

SEQ ID NO: 83013 - DNA, 15 bp, Homo sapiens
aattatcccactttt

SEQ ID NO: 83014 - DNA, 15 bp, Homo sapiens
aaattatcccacttt

SEQ ID NO: 83015 - DNA, 15 bp, Homo sapiens
aaaattatcccactt

SEQ ID NO: 83016 - DNA, 15 bp, Homo sapiens
caaaattatcccact

SEQ ID NO: 83017 - DNA, 15 bp, Homo sapiens
tcaaaattatcccac

SEQ ID NO: 83018 - DNA, 15 bp, Homo sapiens
ctcaaaattatccca

SEQ ID NO: 83019 - DNA, 15 bp, Homo sapiens
gctcaaaattatccc

SEQ ID NO: 83020 - DNA, 15 bp, Homo sapiens
cgctcaaaattatcc

SEQ ID NO: 83021 - DNA, 15 bp, Homo sapiens
ccgctcaaaattatc

SEQ ID NO: 83022 - DNA, 15 bp, Homo sapiens
cccgctcaaaattat

SEQ ID NO: 83023 - DNA, 15 bp, Homo sapiens
tcccgctcaaaatta

SEQ ID NO: 83024 - DNA, 15 bp, Homo sapiens
atcccgctcaaaatt

SEQ ID NO: 83025 - DNA, 15 bp, Homo sapiens
tatcccgctcaaaat

SEQ ID NO: 83026 - DNA, 15 bp, Homo sapiens
ttatcccgctcaaaa

SEQ ID NO: 83027 - DNA, 15 bp, Homo sapiens
cttatcccgctcaaa

SEQ ID NO: 83028 - DNA, 15 bp, Homo sapiens
gcttatcccgctcaa

SEQ ID NO: 83029 - DNA, 15 bp, Homo sapiens
tgcttatcccgctca

SEQ ID NO: 83030 - DNA, 15 bp, Homo sapiens
atgcttatcccgctc

SEQ ID NO: 83031 - DNA, 15 bp, Homo sapiens
aatgcttatcccgct

SEQ ID NO: 83032 - DNA, 15 bp, Homo sapiens
aaatgcttatcccgc

SEQ ID NO: 83033 - DNA, 15 bp, Homo sapiens
gaaatgcttatcccg

SEQ ID NO: 83034 - DNA, 15 bp, Homo sapiens
ggaaatgcttatccc

SEQ ID NO: 83035 - DNA, 15 bp, Homo sapiens
aggaaatgcttatcc

SEQ ID NO: 83036 - DNA, 15 bp, Homo sapiens
caggaaatgcttatc

SEQ ID NO: 83037 - DNA, 15 bp, Homo sapiens
ccaggaaatgcttat

SEQ ID NO: 83038 - DNA, 15 bp, Homo sapiens
tccaggaaatgctta

SEQ ID NO: 83039 - DNA, 15 bp, Homo sapiens
ttccaggaaatgctt

SEQ ID NO: 83040 - DNA, 15 bp, Homo sapiens
gttccaggaaatgct

SEQ ID NO: 83041 - DNA, 15 bp, Homo sapiens
tgttccaggaaatgc

SEQ ID NO: 83042 - DNA, 15 bp, Homo sapiens
ttgttccaggaaatg

SEQ ID NO: 83043 - DNA, 15 bp, Homo sapiens
gttgttccaggaaat

SEQ ID NO: 83044 - DNA, 15 bp, Homo sapiens
tgttgttccaggaaa

SEQ ID NO: 83045 - DNA, 15 bp, Homo sapiens
ctgttgttccaggaa

SEQ ID NO: 83046 - DNA, 15 bp, Homo sapiens
gctgttgttccagga

SEQ ID NO: 83047 - DNA, 15 bp, Homo sapiens
tgctgttgttccagg

SEQ ID NO: 83048 - DNA, 15 bp, Homo sapiens
atgctgttgttccag

SEQ ID NO: 83049 - DNA, 15 bp, Homo sapiens
tatgctgttgttcca

SEQ ID NO: 83050 - DNA, 15 bp, Homo sapiens
ttatgctgttgttcc

SEQ ID NO: 83051 - DNA, 15 bp, Homo sapiens
tttatgctgttgttc

SEQ ID NO: 83052 - DNA, 15 bp, Homo sapiens
ctttatgctgttgtt

SEQ ID NO: 83053 - DNA, 15 bp, Homo sapiens
gctttatgctgttgt

SEQ ID NO: 83054 - DNA, 15 bp, Homo sapiens
cgctttatgctgttg

SEQ ID NO: 83055 - DNA, 15 bp, Homo sapiens
ccgctttatgctgtt

SEQ ID NO: 83056 - DNA, 15 bp, Homo sapiens
tccgctttatgctgt

SEQ ID NO: 83057 - DNA, 15 bp, Homo sapiens
ttccgctttatgctg

SEQ ID NO: 83058 - DNA, 15 bp, Homo sapiens
gttccgctttatgct

SEQ ID NO: 83059 - DNA, 15 bp, Homo sapiens
agttccgctttatgc

SEQ ID NO: 83060 - DNA, 15 bp, Homo sapiens
cagttccgctttatg

SEQ ID NO: 83061 - DNA, 15 bp, Homo sapiens
acagttccgctttat

SEQ ID NO: 83062 - DNA, 15 bp, Homo sapiens
aacagttccgcttta

SEQ ID NO: 83063 - DNA, 15 bp, Homo sapiens
gaacagttccgcttt

SEQ ID NO: 83064 - DNA, 15 bp, Homo sapiens
ggaacagttccgctt

SEQ ID NO: 83065 - DNA, 15 bp, Homo sapiens
tggaacagttccgct

SEQ ID NO: 83066 - DNA, 15 bp, Homo sapiens
ctggaacagttccgc

SEQ ID NO: 83067 - DNA, 15 bp, Homo sapiens
cctggaacagttccg

SEQ ID NO: 83068 - DNA, 15 bp, Homo sapiens
acctggaacagttcc

SEQ ID NO: 83069 - DNA, 15 bp, Homo sapiens
tacctggaacagttc

SEQ ID NO: 83070 - DNA, 15 bp, Homo sapiens
ttacctggaacagtt

SEQ ID NO: 83071 - DNA, 15 bp, Homo sapiens
tttacctggaacagt

SEQ ID NO: 83072 - DNA, 15 bp, Homo sapiens
ctttacctggaacag

SEQ ID NO: 83073 - DNA, 15 bp, Homo sapiens
cctttacctggaaca

SEQ ID NO: 83074 - DNA, 15 bp, Homo sapiens
ccctttacctggaac

SEQ ID NO: 83075 - DNA, 15 bp, Homo sapiens
cccctttacctggaa

SEQ ID NO: 83076 - DNA, 15 bp, Homo sapiens
gcccctttacctgga

SEQ ID NO: 83077 - DNA, 15 bp, Homo sapiens
agcccctttacctgg

SEQ ID NO: 83078 - DNA, 15 bp, Homo sapiens
cagcccctttacctg

SEQ ID NO: 83079 - DNA, 15 bp, Homo sapiens
acagcccctttacct

SEQ ID NO: 83080 - DNA, 15 bp, Homo sapiens
tacagcccctttacc

SEQ ID NO: 83081 - DNA, 15 bp, Homo sapiens
ctacagcccctttac

SEQ ID NO: 83082 - DNA, 15 bp, Homo sapiens
tctacagccccttta

SEQ ID NO: 83083 - DNA, 15 bp, Homo sapiens
ttctacagccccttt

SEQ ID NO: 83084 - DNA, 15 bp, Homo sapiens
attctacagcccctt

SEQ ID NO: 83085 - DNA, 15 bp, Homo sapiens
gattctacagcccct

SEQ ID NO: 83086 - DNA, 15 bp, Homo sapiens
tgattctacagcccc

SEQ ID NO: 83087 - DNA, 15 bp, Homo sapiens
gtgattctacagccc

SEQ ID NO: 83088 - DNA, 15 bp, Homo sapiens
agtgattctacagcc

SEQ ID NO: 83089 - DNA, 15 bp, Homo sapiens
gagtgattctacagc

SEQ ID NO: 83090 - DNA, 15 bp, Homo sapiens
ggagtgattctacag

SEQ ID NO: 83091 - DNA, 15 bp, Homo sapiens
tggagtgattctaca

SEQ ID NO: 83092 - DNA, 15 bp, Homo sapiens
gtggagtgattctac

SEQ ID NO: 83093 - DNA, 15 bp, Homo sapiens
agtggagtgattcta

SEQ ID NO: 83094 - DNA, 15 bp, Homo sapiens
tagtggagtgattct

SEQ ID NO: 83095 - DNA, 15 bp, Homo sapiens
ttagtggagtgattc

SEQ ID NO: 83096 - DNA, 15 bp, Homo sapiens
attagtggagtgatt

SEQ ID NO: 83097 - DNA, 15 bp, Homo sapiens
tattagtggagtgat

SEQ ID NO: 83098 - DNA, 15 bp, Homo sapiens
ctattagtggagtga

SEQ ID NO: 83099 - DNA, 15 bp, Homo sapiens
tctattagtggagtg

SEQ ID NO: 83100 - DNA, 15 bp, Homo sapiens
atctattagtggagt

SEQ ID NO: 83101 - DNA, 15 bp, Homo sapiens
aatctattagtggag

SEQ ID NO: 83102 - DNA, 15 bp, Homo sapiens
aaatctattagtgga

SEQ ID NO: 83103 - DNA, 15 bp, Homo sapiens
aaaatctattagtgg

SEQ ID NO: 83104 - DNA, 15 bp, Homo sapiens
taaaatctattagtg

SEQ ID NO: 83105 - DNA, 15 bp, Homo sapiens
ctaaaatctattagt

SEQ ID NO: 83106 - DNA, 15 bp, Homo sapiens
cctaaaatctattag

SEQ ID NO: 83107 - DNA, 15 bp, Homo sapiens
ccctaaaatctatta

SEQ ID NO: 83108 - DNA, 15 bp, Homo sapiens
accctaaaatctatt

SEQ ID NO: 83109 - DNA, 15 bp, Homo sapiens
aaccctaaaatctat

SEQ ID NO: 83110 - DNA, 15 bp, Homo sapiens
caaccctaaaatcta

SEQ ID NO: 83111 - DNA, 15 bp, Homo sapiens
tcaaccctaaaatct

SEQ ID NO: 83112 - DNA, 15 bp, Homo sapiens
ttcaaccctaaaatc

SEQ ID NO: 83113 - DNA, 15 bp, Homo sapiens
cttcaaccctaaaat

SEQ ID NO: 83114 - DNA, 15 bp, Homo sapiens
tcttcaaccctaaaa

SEQ ID NO: 83115 - DNA, 15 bp, Homo sapiens
gtcttcaaccctaaa

SEQ ID NO: 83116 - DNA, 15 bp, Homo sapiens
ggtcttcaaccctaa

SEQ ID NO: 83117 - DNA, 15 bp, Homo sapiens
aggtcttcaacccta

SEQ ID NO: 83118 - DNA, 15 bp, Homo sapiens
caggtcttcaaccct

SEQ ID NO: 83119 - DNA, 15 bp, Homo sapiens
ccaggtcttcaaccc

SEQ ID NO: 83120 - DNA, 15 bp, Homo sapiens
tccaggtcttcaacc

SEQ ID NO: 83121 - DNA, 15 bp, Homo sapiens
ttccaggtcttcaac

SEQ ID NO: 83122 - DNA, 15 bp, Homo sapiens
cttccaggtcttcaa

SEQ ID NO: 83123 - DNA, 15 bp, Homo sapiens
ccttccaggtcttca

SEQ ID NO: 83124 - DNA, 15 bp, Homo sapiens
cccttccaggtcttc

SEQ ID NO: 83125 - DNA, 15 bp, Homo sapiens
tcccttccaggtctt

SEQ ID NO: 83126 - DNA, 15 bp, Homo sapiens
atcccttccaggtct

SEQ ID NO: 83127 - DNA, 15 bp, Homo sapiens
gatcccttccaggtc

SEQ ID NO: 83128 - DNA, 15 bp, Homo sapiens
agatcccttccaggt

SEQ ID NO: 83129 - DNA, 15 bp, Homo sapiens
aagatcccttccagg

SEQ ID NO: 83130 - DNA, 15 bp, Homo sapiens
taagatcccttccag

SEQ ID NO: 83131 - DNA, 15 bp, Homo sapiens
gtaagatcccttcca

SEQ ID NO: 83132 - DNA, 15 bp, Homo sapiens
cgtaagatcccttcc

SEQ ID NO: 83133 - DNA, 15 bp, Homo sapiens
ccgtaagatcccttc

SEQ ID NO: 83134 - DNA, 15 bp, Homo sapiens
tccgtaagatccctt

SEQ ID NO: 83135 - DNA, 15 bp, Homo sapiens
atccgtaagatccct

SEQ ID NO: 83136 - DNA, 15 bp, Homo sapiens
gatccgtaagatccc

SEQ ID NO: 83137 - DNA, 15 bp, Homo sapiens
tgatccgtaagatcc

SEQ ID NO: 83138 - DNA, 15 bp, Homo sapiens
atgatccgtaagatc

SEQ ID NO: 83139 - DNA, 15 bp, Homo sapiens
catgatccgtaagat

SEQ ID NO: 83140 - DNA, 15 bp, Homo sapiens
acatgatccgtaaga

SEQ ID NO: 83141 - DNA, 15 bp, Homo sapiens
tacatgatccgtaag

SEQ ID NO: 83142 - DNA, 15 bp, Homo sapiens
ctacatgatccgtaa

SEQ ID NO: 83143 - DNA, 15 bp, Homo sapiens
gctacatgatccgta

SEQ ID NO: 83144 - DNA, 15 bp, Homo sapiens
agctacatgatccgt

SEQ ID NO: 83145 - DNA, 15 bp, Homo sapiens
gagctacatgatccg

SEQ ID NO: 83146 - DNA, 15 bp, Homo sapiens
tgagctacatgatcc

SEQ ID NO: 83147 - DNA, 15 bp, Homo sapiens
ctgagctacatgatc

SEQ ID NO: 83148 - DNA, 15 bp, Homo sapiens
actgagctacatgat

SEQ ID NO: 83149 - DNA, 15 bp, Homo sapiens
gactgagctacatga

SEQ ID NO: 83150 - DNA, 15 bp, Homo sapiens
ggactgagctacatg

SEQ ID NO: 83151 - DNA, 15 bp, Homo sapiens
aggactgagctacat

SEQ ID NO: 83152 - DNA, 15 bp, Homo sapiens
aaggactgagctaca

SEQ ID NO: 83153 - DNA, 15 bp, Homo sapiens
aaaggactgagctac

SEQ ID NO: 83154 - DNA, 15 bp, Homo sapiens
aaaaggactgagcta

SEQ ID NO: 83155 - DNA, 15 bp, Homo sapiens
taaaaggactgagct

SEQ ID NO: 83156 - DNA, 15 bp, Homo sapiens
ataaaaggactgagc

SEQ ID NO: 83157 - DNA, 15 bp, Homo sapiens
cataaaaggactgag

SEQ ID NO: 83158 - DNA, 15 bp, Homo sapiens
acataaaaggactga

SEQ ID NO: 83159 - DNA, 15 bp, Homo sapiens
tacataaaaggactg

SEQ ID NO: 83160 - DNA, 15 bp, Homo sapiens
ctacataaaaggact

SEQ ID NO: 83161 - DNA, 15 bp, Homo sapiens
actacataaaaggac

SEQ ID NO: 83162 - DNA, 15 bp, Homo sapiens
tactacataaaagga

SEQ ID NO: 83163 - DNA, 15 bp, Homo sapiens
ctactacataaaagg

SEQ ID NO: 83164 - DNA, 15 bp, Homo sapiens
cctactacataaaag

SEQ ID NO: 83165 - DNA, 15 bp, Homo sapiens
acctactacataaaa

SEQ ID NO: 83166 - DNA, 15 bp, Homo sapiens
tacctactacataaa

SEQ ID NO: 83167 - DNA, 15 bp, Homo sapiens
ttacctactacataa

SEQ ID NO: 83168 - DNA, 15 bp, Homo sapiens
tttacctactacata

SEQ ID NO: 83169 - DNA, 15 bp, Homo sapiens
ctttacctactacat

SEQ ID NO: 83170 - DNA, 15 bp, Homo sapiens
tctttacctactaca

SEQ ID NO: 83171 - DNA, 15 bp, Homo sapiens
ttctttacctactac

SEQ ID NO: 83172 - DNA, 15 bp, Homo sapiens
tttctttacctacta

SEQ ID NO: 83173 - DNA, 15 bp, Homo sapiens
atttctttacctact

SEQ ID NO: 83174 - DNA, 15 bp, Homo sapiens
tatttctttacctac

SEQ ID NO: 83175 - DNA, 15 bp, Homo sapiens
ttatttctttaccta

SEQ ID NO: 83176 - DNA, 15 bp, Homo sapiens
cttatttctttacct

SEQ ID NO: 83177 - DNA, 15 bp, Homo sapiens
gcttatttctttacc

SEQ ID NO: 83178 - DNA, 15 bp, Homo sapiens
ggcttatttctttac

SEQ ID NO: 83179 - DNA, 15 bp, Homo sapiens
gggcttatttcttta

SEQ ID NO: 83180 - DNA, 15 bp, Homo sapiens
tgggcttatttcttt

SEQ ID NO: 83181 - DNA, 15 bp, Homo sapiens
ctgggcttatttctt

SEQ ID NO: 83182 - DNA, 15 bp, Homo sapiens
tctgggcttatttct

SEQ ID NO: 83183 - DNA, 15 bp, Homo sapiens
ctctgggcttatttc

SEQ ID NO: 83184 - DNA, 15 bp, Homo sapiens
tctctgggcttattt

SEQ ID NO: 83185 - DNA, 15 bp, Homo sapiens
ctctctgggcttatt

SEQ ID NO: 83186 - DNA, 15 bp, Homo sapiens
tctctctgggcttat

SEQ ID NO: 83187 - DNA, 15 bp, Homo sapiens
atctctctgggctta

SEQ ID NO: 83188 - DNA, 15 bp, Homo sapiens
tatctctctgggctt

SEQ ID NO: 83189 - DNA, 15 bp, Homo sapiens
ttatctctctgggct

SEQ ID NO: 83190 - DNA, 15 bp, Homo sapiens
tttatctctctgggc

SEQ ID NO: 83191 - DNA, 15 bp, Homo sapiens
ctttatctctctggg

SEQ ID NO: 83192 - DNA, 15 bp, Homo sapiens
actttatctctctgg

SEQ ID NO: 83193 - DNA, 15 bp, Homo sapiens
cactttatctctctg

SEQ ID NO: 83194 - DNA, 15 bp, Homo sapiens
gcactttatctctct

SEQ ID NO: 83195 - DNA, 15 bp, Homo sapiens
ggcactttatctctc

SEQ ID NO: 83196 - DNA, 15 bp, Homo sapiens
aggcactttatctct

SEQ ID NO: 83197 - DNA, 15 bp, Homo sapiens
aaggcactttatctc

SEQ ID NO: 83198 - DNA, 15 bp, Homo sapiens
aaaggcactttatct

SEQ ID NO: 83199 - DNA, 15 bp, Homo sapiens
aaaaggcactttatc

SEQ ID NO: 83200 - DNA, 15 bp, Homo sapiens
gaaaaggcactttat

SEQ ID NO: 83201 - DNA, 15 bp, Homo sapiens
agaaaaggcacttta

SEQ ID NO: 83202 - DNA, 15 bp, Homo sapiens
cagaaaaggcacttt

SEQ ID NO: 83203 - DNA, 15 bp, Homo sapiens
acagaaaaggcactt

SEQ ID NO: 83204 - DNA, 15 bp, Homo sapiens
tacagaaaaggcact

SEQ ID NO: 83205 - DNA, 15 bp, Homo sapiens
gtacagaaaaggcac

SEQ ID NO: 83206 - DNA, 15 bp, Homo sapiens
agtacagaaaaggca

SEQ ID NO: 83207 - DNA, 15 bp, Homo sapiens
tagtacagaaaaggc

SEQ ID NO: 83208 - DNA, 15 bp, Homo sapiens
atagtacagaaaagg

SEQ ID NO: 83209 - DNA, 15 bp, Homo sapiens
tatagtacagaaaag

SEQ ID NO: 83210 - DNA, 15 bp, Homo sapiens
ttatagtacagaaaa

SEQ ID NO: 83211 - DNA, 15 bp, Homo sapiens
attatagtacagaaa

SEQ ID NO: 83212 - DNA, 15 bp, Homo sapiens
aattatagtacagaa

SEQ ID NO: 83213 - DNA, 15 bp, Homo sapiens
aaattatagtacaga

SEQ ID NO: 83214 - DNA, 15 bp, Homo sapiens
caaattatagtacag

SEQ ID NO: 83215 - DNA, 15 bp, Homo sapiens
acaaattatagtaca

SEQ ID NO: 83216 - DNA, 15 bp, Homo sapiens
cacaaattatagtac

SEQ ID NO: 83217 - DNA, 15 bp, Homo sapiens
tcacaaattatagta

SEQ ID NO: 83218 - DNA, 15 bp, Homo sapiens
ttcacaaattatagt

SEQ ID NO: 83219 - DNA, 15 bp, Homo sapiens
attcacaaattatag

SEQ ID NO: 83220 - DNA, 15 bp, Homo sapiens
aattcacaaattata

SEQ ID NO: 83221 - DNA, 15 bp, Homo sapiens
taattcacaaattat

SEQ ID NO: 83222 - DNA, 15 bp, Homo sapiens
ataattcacaaatta

SEQ ID NO: 83223 - DNA, 15 bp, Homo sapiens
tataattcacaaatt

SEQ ID NO: 83224 - DNA, 15 bp, Homo sapiens
ttataattcacaaat

SEQ ID NO: 83225 - DNA, 15 bp, Homo sapiens
attataattcacaaa

SEQ ID NO: 83226 - DNA, 15 bp, Homo sapiens
tattataattcacaa

SEQ ID NO: 83227 - DNA, 15 bp, Homo sapiens
ttattataattcaca

SEQ ID NO: 83228 - DNA, 15 bp, Homo sapiens
cttattataattcac

SEQ ID NO: 83229 - DNA, 15 bp, Homo sapiens
tcttattataattca

SEQ ID NO: 83230 - DNA, 15 bp, Homo sapiens
atcttattataattc

SEQ ID NO: 83231 - DNA, 15 bp, Homo sapiens
catcttattataatt

SEQ ID NO: 83232 - DNA, 15 bp, Homo sapiens
tcatcttattataat

SEQ ID NO: 83233 - DNA, 15 bp, Homo sapiens
atcatcttattataa

SEQ ID NO: 83234 - DNA, 15 bp, Homo sapiens
aatcatcttattata

SEQ ID NO: 83235 - DNA, 15 bp, Homo sapiens
taatcatcttattat

SEQ ID NO: 83236 - DNA, 15 bp, Homo sapiens
gtaatcatcttatta

SEQ ID NO: 83237 - DNA, 15 bp, Homo sapiens
tgtaatcatcttatt

SEQ ID NO: 83238 - DNA, 15 bp, Homo sapiens
atgtaatcatcttat

SEQ ID NO: 83239 - DNA, 15 bp, Homo sapiens
aatgtaatcatctta

SEQ ID NO: 83240 - DNA, 15 bp, Homo sapiens
aaatgtaatcatctt

SEQ ID NO: 83241 - DNA, 15 bp, Homo sapiens
taaatgtaatcatct

SEQ ID NO: 83242 - DNA, 15 bp, Homo sapiens
ctaaatgtaatcatc

SEQ ID NO: 83243 - DNA, 15 bp, Homo sapiens
cctaaatgtaatcat

SEQ ID NO: 83244 - DNA, 15 bp, Homo sapiens
ccctaaatgtaatca

SEQ ID NO: 83245 - DNA, 15 bp, Homo sapiens
tccctaaatgtaatc

SEQ ID NO: 83246 - DNA, 15 bp, Homo sapiens
ctccctaaatgtaat

SEQ ID NO: 83247 - DNA, 15 bp, Homo sapiens
cctccctaaatgtaa

SEQ ID NO: 83248 - DNA, 15 bp, Homo sapiens
ccctccctaaatgta

SEQ ID NO: 83249 - DNA, 15 bp, Homo sapiens
gccctccctaaatgt

SEQ ID NO: 83250 - DNA, 15 bp, Homo sapiens
agccctccctaaatg

SEQ ID NO: 83251 - DNA, 15 bp, Homo sapiens
aagccctccctaaat

SEQ ID NO: 83252 - DNA, 15 bp, Homo sapiens
taagccctccctaaa

SEQ ID NO: 83253 - DNA, 15 bp, Homo sapiens
gtaagccctccctaa

SEQ ID NO: 83254 - DNA, 15 bp, Homo sapiens
agtaagccctcccta

SEQ ID NO: 83255 - DNA, 15 bp, Homo sapiens
tagtaagccctccct

SEQ ID NO: 83256 - DNA, 15 bp, Homo sapiens
atagtaagccctccc

SEQ ID NO: 83257 - DNA, 15 bp, Homo sapiens
catagtaagccctcc

SEQ ID NO: 83258 - DNA, 15 bp, Homo sapiens
acatagtaagccctc

SEQ ID NO: 83259 - DNA, 15 bp, Homo sapiens
cacatagtaagccct

SEQ ID NO: 83260 - DNA, 15 bp, Homo sapiens
tcacatagtaagccc

SEQ ID NO: 83261 - DNA, 15 bp, Homo sapiens
atcacatagtaagcc

SEQ ID NO: 83262 - DNA, 15 bp, Homo sapiens
tatcacatagtaagc

SEQ ID NO: 83263 - DNA, 15 bp, Homo sapiens
ctatcacatagtaag

SEQ ID NO: 83264 - DNA, 15 bp, Homo sapiens
cctatcacatagtaa

SEQ ID NO: 83265 - DNA, 15 bp, Homo sapiens
gcctatcacatagta

SEQ ID NO: 83266 - DNA, 15 bp, Homo sapiens
tgcctatcacatagt

SEQ ID NO: 83267 - DNA, 15 bp, Homo sapiens
atgcctatcacatag

SEQ ID NO: 83268 - DNA, 15 bp, Homo sapiens
catgcctatcacata

SEQ ID NO: 83269 - DNA, 15 bp, Homo sapiens
tcatgcctatcacat

SEQ ID NO: 83270 - DNA, 15 bp, Homo sapiens
ctcatgcctatcaca

SEQ ID NO: 83271 - DNA, 15 bp, Homo sapiens
actcatgcctatcac

SEQ ID NO: 83272 - DNA, 15 bp, Homo sapiens
aactcatgcctatca

SEQ ID NO: 83273 - DNA, 15 bp, Homo sapiens
taactcatgcctatc

SEQ ID NO: 83274 - DNA, 15 bp, Homo sapiens
ctaactcatgcctat

SEQ ID NO: 83275 - DNA, 15 bp, Homo sapiens
tctaactcatgccta

SEQ ID NO: 83276 - DNA, 15 bp, Homo sapiens
ttctaactcatgcct

SEQ ID NO: 83277 - DNA, 15 bp, Homo sapiens
gttctaactcatgcc

SEQ ID NO: 83278 - DNA, 15 bp, Homo sapiens
tgttctaactcatgc

SEQ ID NO: 83279 - DNA, 15 bp, Homo sapiens
gtgttctaactcatg

SEQ ID NO: 83280 - DNA, 15 bp, Homo sapiens
agtgttctaactcat

SEQ ID NO: 83281 - DNA, 15 bp, Homo sapiens
tagtgttctaactca

SEQ ID NO: 83282 - DNA, 15 bp, Homo sapiens
atagtgttctaactc

SEQ ID NO: 83283 - DNA, 15 bp, Homo sapiens
aatagtgttctaact

SEQ ID NO: 83284 - DNA, 15 bp, Homo sapiens
taatagtgttctaac

SEQ ID NO: 83285 - DNA, 15 bp, Homo sapiens
ataatagtgttctaa

SEQ ID NO: 83286 - DNA, 15 bp, Homo sapiens
aataatagtgttcta

SEQ ID NO: 83287 - DNA, 15 bp, Homo sapiens
taataatagtgttct

SEQ ID NO: 83288 - DNA, 15 bp, Homo sapiens
ataataatagtgttc

SEQ ID NO: 83289 - DNA, 15 bp, Homo sapiens
gataataatagtgtt

SEQ ID NO: 83290 - DNA, 15 bp, Homo sapiens
cgataataatagtgt

SEQ ID NO: 83291 - DNA, 15 bp, Homo sapiens
gcgataataatagtg

SEQ ID NO: 83292 - DNA, 15 bp, Homo sapiens
agcgataataatagt

SEQ ID NO: 83293 - DNA, 15 bp, Homo sapiens
tagcgataataatag

SEQ ID NO: 83294 - DNA, 15 bp, Homo sapiens
ctagcgataataata

SEQ ID NO: 83295 - DNA, 15 bp, Homo sapiens
actagcgataataat

SEQ ID NO: 83296 - DNA, 15 bp, Homo sapiens
aactagcgataataa

SEQ ID NO: 83297 - DNA, 15 bp, Homo sapiens
aaactagcgataata

SEQ ID NO: 83298 - DNA, 15 bp, Homo sapiens
aaaactagcgataat

SEQ ID NO: 83299 - DNA, 15 bp, Homo sapiens
gaaaactagcgataa

SEQ ID NO: 83300 - DNA, 15 bp, Homo sapiens
ggaaaactagcgata

SEQ ID NO: 83301 - DNA, 15 bp, Homo sapiens
tggaaaactagcgat

SEQ ID NO: 83302 - DNA, 15 bp, Homo sapiens
ttggaaaactagcga

SEQ ID NO: 83303 - DNA, 15 bp, Homo sapiens
tttggaaaactagcg

SEQ ID NO: 83304 - DNA, 15 bp, Homo sapiens
ttttggaaaactagc

SEQ ID NO: 83305 - DNA, 15 bp, Homo sapiens
tttttggaaaactag

SEQ ID NO: 83306 - DNA, 15 bp, Homo sapiens
ctttttggaaaacta

SEQ ID NO: 83307 - DNA, 15 bp, Homo sapiens
cctttttggaaaact

SEQ ID NO: 83308 - DNA, 15 bp, Homo sapiens
tcctttttggaaaac

SEQ ID NO: 83309 - DNA, 15 bp, Homo sapiens
ttcctttttggaaaa

SEQ ID NO: 83310 - DNA, 15 bp, Homo sapiens
tttcctttttggaaa

SEQ ID NO: 83311 - DNA, 15 bp, Homo sapiens
gtttcctttttggaa

SEQ ID NO: 83312 - DNA, 15 bp, Homo sapiens
agtttcctttttgga

SEQ ID NO: 83313 - DNA, 15 bp, Homo sapiens
cagtttcctttttgg

SEQ ID NO: 83314 - DNA, 15 bp, Homo sapiens
tcagtttcctttttg

SEQ ID NO: 83315 - DNA, 15 bp, Homo sapiens
ctcagtttccttttt

SEQ ID NO: 83316 - DNA, 15 bp, Homo sapiens
cctcagtttcctttt

SEQ ID NO: 83317 - DNA, 15 bp, Homo sapiens
gcctcagtttccttt

SEQ ID NO: 83318 - DNA, 15 bp, Homo sapiens
tgcctcagtttcctt

SEQ ID NO: 83319 - DNA, 15 bp, Homo sapiens
atgcctcagtttcct

SEQ ID NO: 83320 - DNA, 15 bp, Homo sapiens
catgcctcagtttcc

SEQ ID NO: 83321 - DNA, 15 bp, Homo sapiens
ccatgcctcagtttc

SEQ ID NO: 83322 - DNA, 15 bp, Homo sapiens
tccatgcctcagttt

SEQ ID NO: 83323 - DNA, 15 bp, Homo sapiens
ctccatgcctcagtt

SEQ ID NO: 83324 - DNA, 15 bp, Homo sapiens
tctccatgcctcagt

SEQ ID NO: 83325 - DNA, 15 bp, Homo sapiens
ctctccatgcctcag

SEQ ID NO: 83326 - DNA, 15 bp, Homo sapiens
tctctccatgcctca

SEQ ID NO: 83327 - DNA, 15 bp, Homo sapiens
atctctccatgcctc

SEQ ID NO: 83328 - DNA, 15 bp, Homo sapiens
aatctctccatgcct

SEQ ID NO: 83329 - DNA, 15 bp, Homo sapiens
taatctctccatgcc

SEQ ID NO: 83330 - DNA, 15 bp, Homo sapiens
ttaatctctccatgc

SEQ ID NO: 83331 - DNA, 15 bp, Homo sapiens
tttaatctctccatg

SEQ ID NO: 83332 - DNA, 15 bp, Homo sapiens
ctttaatctctccat

SEQ ID NO: 83333 - DNA, 15 bp, Homo sapiens
tctttaatctctcca

SEQ ID NO: 83334 - DNA, 15 bp, Homo sapiens
ttctttaatctctcc

SEQ ID NO: 83335 - DNA, 15 bp, Homo sapiens
gttctttaatctctc

SEQ ID NO: 83336 - DNA, 15 bp, Homo sapiens
agttctttaatctct

SEQ ID NO: 83337 - DNA, 15 bp, Homo sapiens
aagttctttaatctc

SEQ ID NO: 83338 - DNA, 15 bp, Homo sapiens
caagttctttaatct

SEQ ID NO: 83339 - DNA, 15 bp, Homo sapiens
acaagttctttaatc

SEQ ID NO: 83340 - DNA, 15 bp, Homo sapiens
gacaagttctttaat

SEQ ID NO: 83341 - DNA, 15 bp, Homo sapiens
ggacaagttctttaa

SEQ ID NO: 83342 - DNA, 15 bp, Homo sapiens
tggacaagttcttta

SEQ ID NO: 83343 - DNA, 15 bp, Homo sapiens
ttggacaagttcttt

SEQ ID NO: 83344 - DNA, 15 bp, Homo sapiens
cttggacaagttctt

SEQ ID NO: 83345 - DNA, 15 bp, Homo sapiens
ccttggacaagttct

SEQ ID NO: 83346 - DNA, 15 bp, Homo sapiens
accttggacaagttc

SEQ ID NO: 83347 - DNA, 15 bp, Homo sapiens
gaccttggacaagtt

SEQ ID NO: 83348 - DNA, 15 bp, Homo sapiens
tgaccttggacaagt

SEQ ID NO: 83349 - DNA, 15 bp, Homo sapiens
gtgaccttggacaag

SEQ ID NO: 83350 - DNA, 15 bp, Homo sapiens
tgtgaccttggacaa

SEQ ID NO: 83351 - DNA, 15 bp, Homo sapiens
ttgtgaccttggaca

SEQ ID NO: 83352 - DNA, 15 bp, Homo sapiens
cttgtgaccttggac

SEQ ID NO: 83353 - DNA, 15 bp, Homo sapiens
tcttgtgaccttgga

SEQ ID NO: 83354 - DNA, 15 bp, Homo sapiens
gtcttgtgaccttgg

SEQ ID NO: 83355 - DNA, 15 bp, Homo sapiens
agtcttgtgaccttg

SEQ ID NO: 83356 - DNA, 15 bp, Homo sapiens
cagtcttgtgacctt

SEQ ID NO: 83357 - DNA, 15 bp, Homo sapiens
ccagtcttgtgacct

SEQ ID NO: 83358 - DNA, 15 bp, Homo sapiens
gccagtcttgtgacc

SEQ ID NO: 83359 - DNA, 15 bp, Homo sapiens
tgccagtcttgtgac

SEQ ID NO: 83360 - DNA, 15 bp, Homo sapiens
ttgccagtcttgtga

SEQ ID NO: 83361 - DNA, 15 bp, Homo sapiens
cttgccagtcttgtg

SEQ ID NO: 83362 - DNA, 15 bp, Homo sapiens
acttgccagtcttgt

SEQ ID NO: 83363 - DNA, 15 bp, Homo sapiens
cacttgccagtcttg

SEQ ID NO: 83364 - DNA, 15 bp, Homo sapiens
ccacttgccagtctt

SEQ ID NO: 83365 - DNA, 15 bp, Homo sapiens
accacttgccagtct

SEQ ID NO: 83366 - DNA, 15 bp, Homo sapiens
taccacttgccagtc

SEQ ID NO: 83367 - DNA, 15 bp, Homo sapiens
ctaccacttgccagt

SEQ ID NO: 83368 - DNA, 15 bp, Homo sapiens
tctaccacttgccag

SEQ ID NO: 83369 - DNA, 15 bp, Homo sapiens
atctaccacttgcca

SEQ ID NO: 83370 - DNA, 15 bp, Homo sapiens
catctaccacttgcc

SEQ ID NO: 83371 - DNA, 15 bp, Homo sapiens
acatctaccacttgc

SEQ ID NO: 83372 - DNA, 15 bp, Homo sapiens
tacatctaccacttg

SEQ ID NO: 83373 - DNA, 15 bp, Homo sapiens
ctacatctaccactt

SEQ ID NO: 83374 - DNA, 15 bp, Homo sapiens
tctacatctaccact

SEQ ID NO: 83375 - DNA, 15 bp, Homo sapiens
ttctacatctaccac

SEQ ID NO: 83376 - DNA, 15 bp, Homo sapiens
attctacatctacca

SEQ ID NO: 83377 - DNA, 15 bp, Homo sapiens
aattctacatctacc

SEQ ID NO: 83378 - DNA, 15 bp, Homo sapiens
gaattctacatctac

SEQ ID NO: 83379 - DNA, 15 bp, Homo sapiens
tgaattctacatcta

SEQ ID NO: 83380 - DNA, 15 bp, Homo sapiens
ctgaattctacatct

SEQ ID NO: 83381 - DNA, 15 bp, Homo sapiens
tctgaattctacatc

SEQ ID NO: 83382 - DNA, 15 bp, Homo sapiens
atctgaattctacat

SEQ ID NO: 83383 - DNA, 15 bp, Homo sapiens
gatctgaattctaca

SEQ ID NO: 83384 - DNA, 15 bp, Homo sapiens
ggatctgaattctac

SEQ ID NO: 83385 - DNA, 15 bp, Homo sapiens
aggatctgaattcta

SEQ ID NO: 83386 - DNA, 15 bp, Homo sapiens
caggatctgaattct

SEQ ID NO: 83387 - DNA, 15 bp, Homo sapiens
tcaggatctgaattc

SEQ ID NO: 83388 - DNA, 15 bp, Homo sapiens
gtcaggatctgaatt

SEQ ID NO: 83389 - DNA, 15 bp, Homo sapiens
tgtcaggatctgaat

SEQ ID NO: 83390 - DNA, 15 bp, Homo sapiens
ctgtcaggatctgaa

SEQ ID NO: 83391 - DNA, 15 bp, Homo sapiens
actgtcaggatctga

SEQ ID NO: 83392 - DNA, 15 bp, Homo sapiens
gactgtcaggatctg

SEQ ID NO: 83393 - DNA, 15 bp, Homo sapiens
agactgtcaggatct

SEQ ID NO: 83394 - DNA, 15 bp, Homo sapiens
cagactgtcaggatc

SEQ ID NO: 83395 - DNA, 15 bp, Homo sapiens
ccagactgtcaggat

SEQ ID NO: 83396 - DNA, 15 bp, Homo sapiens
gccagactgtcagga

SEQ ID NO: 83397 - DNA, 15 bp, Homo sapiens
agccagactgtcagg

SEQ ID NO: 83398 - DNA, 15 bp, Homo sapiens
gagccagactgtcag

SEQ ID NO: 83399 - DNA, 15 bp, Homo sapiens
agagccagactgtca

SEQ ID NO: 83400 - DNA, 15 bp, Homo sapiens
cagagccagactgtc

SEQ ID NO: 83401 - DNA, 15 bp, Homo sapiens
gcagagccagactgt

SEQ ID NO: 83402 - DNA, 15 bp, Homo sapiens
cgcagagccagactg

SEQ ID NO: 83403 - DNA, 15 bp, Homo sapiens
ccgcagagccagact

SEQ ID NO: 83404 - DNA, 15 bp, Homo sapiens
cccgcagagccagac

SEQ ID NO: 83405 - DNA, 15 bp, Homo sapiens
acccgcagagccaga

SEQ ID NO: 83406 - DNA, 15 bp, Homo sapiens
tacccgcagagccag

SEQ ID NO: 83407 - DNA, 15 bp, Homo sapiens
ttacccgcagagcca

SEQ ID NO: 83408 - DNA, 15 bp, Homo sapiens
gttacccgcagagcc

SEQ ID NO: 83409 - DNA, 15 bp, Homo sapiens
tgttacccgcagagc

SEQ ID NO: 83410 - DNA, 15 bp, Homo sapiens
atgttacccgcagag

SEQ ID NO: 83411 - DNA, 15 bp, Homo sapiens
catgttacccgcaga

SEQ ID NO: 83412 - DNA, 15 bp, Homo sapiens
acatgttacccgcag

SEQ ID NO: 83413 - DNA, 15 bp, Homo sapiens
gacatgttacccgca

SEQ ID NO: 83414 - DNA, 15 bp, Homo sapiens
tgacatgttacccgc

SEQ ID NO: 83415 - DNA, 15 bp, Homo sapiens
ttgacatgttacccg

SEQ ID NO: 83416 - DNA, 15 bp, Homo sapiens
tttgacatgttaccc

SEQ ID NO: 83417 - DNA, 15 bp, Homo sapiens
ctttgacatgttacc

SEQ ID NO: 83418 - DNA, 15 bp, Homo sapiens
tctttgacatgttac

SEQ ID NO: 83419 - DNA, 15 bp, Homo sapiens
atctttgacatgtta

SEQ ID NO: 83420 - DNA, 15 bp, Homo sapiens
catctttgacatgtt

SEQ ID NO: 83421 - DNA, 15 bp, Homo sapiens
tcatctttgacatgt

SEQ ID NO: 83422 - DNA, 15 bp, Homo sapiens
gtcatctttgacatg

SEQ ID NO: 83423 - DNA, 15 bp, Homo sapiens
tgtcatctttgacat

SEQ ID NO: 83424 - DNA, 15 bp, Homo sapiens
ctgtcatctttgaca

SEQ ID NO: 83425 - DNA, 15 bp, Homo sapiens
tctgtcatctttgac

SEQ ID NO: 83426 - DNA, 15 bp, Homo sapiens
gtctgtcatctttga

SEQ ID NO: 83427 - DNA, 15 bp, Homo sapiens
agtctgtcatctttg

SEQ ID NO: 83428 - DNA, 15 bp, Homo sapiens
cagtctgtcatcttt

SEQ ID NO: 83429 - DNA, 15 bp, Homo sapiens
acagtctgtcatctt

SEQ ID NO: 83430 - DNA, 15 bp, Homo sapiens
tacagtctgtcatct

SEQ ID NO: 83431 - DNA, 15 bp, Homo sapiens
gtacagtctgtcatc

SEQ ID NO: 83432 - DNA, 15 bp, Homo sapiens
ggtacagtctgtcat

SEQ ID NO: 83433 - DNA, 15 bp, Homo sapiens
aggtacagtctgtca

SEQ ID NO: 83434 - DNA, 15 bp, Homo sapiens
gaggtacagtctgtc

SEQ ID NO: 83435 - DNA, 15 bp, Homo sapiens
agaggtacagtctgt

SEQ ID NO: 83436 - DNA, 15 bp, Homo sapiens
gagaggtacagtctg

SEQ ID NO: 83437 - DNA, 15 bp, Homo sapiens
tgagaggtacagtct

SEQ ID NO: 83438 - DNA, 15 bp, Homo sapiens
gtgagaggtacagtc

SEQ ID NO: 83439 - DNA, 15 bp, Homo sapiens
tgtgagaggtacagt

SEQ ID NO: 83440 - DNA, 15 bp, Homo sapiens
ttgtgagaggtacag

SEQ ID NO: 83441 - DNA, 15 bp, Homo sapiens
tttgtgagaggtaca

SEQ ID NO: 83442 - DNA, 15 bp, Homo sapiens
gtttgtgagaggtac

SEQ ID NO: 83443 - DNA, 15 bp, Homo sapiens
ggtttgtgagaggta

SEQ ID NO: 83444 - DNA, 15 bp, Homo sapiens
tggtttgtgagaggt

SEQ ID NO: 83445 - DNA, 15 bp, Homo sapiens
ctggtttgtgagagg

SEQ ID NO: 83446 - DNA, 15 bp, Homo sapiens
gctggtttgtgagag

SEQ ID NO: 83447 - DNA, 15 bp, Homo sapiens
tgctggtttgtgaga

SEQ ID NO: 83448 - DNA, 15 bp, Homo sapiens
ctgctggtttgtgag

SEQ ID NO: 83449 - DNA, 15 bp, Homo sapiens
tctgctggtttgtga

SEQ ID NO: 83450 - DNA, 15 bp, Homo sapiens
ttctgctggtttgtg

SEQ ID NO: 83451 - DNA, 15 bp, Homo sapiens
attctgctggtttgt

SEQ ID NO: 83452 - DNA, 15 bp, Homo sapiens
cattctgctggtttg

SEQ ID NO: 83453 - DNA, 15 bp, Homo sapiens
ccattctgctggttt

SEQ ID NO: 83454 - DNA, 15 bp, Homo sapiens
tccattctgctggtt

SEQ ID NO: 83455 - DNA, 15 bp, Homo sapiens
ctccattctgctggt

SEQ ID NO: 83456 - DNA, 15 bp, Homo sapiens
tctccattctgctgg

SEQ ID NO: 83457 - DNA, 15 bp, Homo sapiens
ctctccattctgctg

SEQ ID NO: 83458 - DNA, 15 bp, Homo sapiens
gctctccattctgct

SEQ ID NO: 83459 - DNA, 15 bp, Homo sapiens
ggctctccattctgc

SEQ ID NO: 83460 - DNA, 15 bp, Homo sapiens
gggctctccattctg

SEQ ID NO: 83461 - DNA, 15 bp, Homo sapiens
ggggctctccattct

SEQ ID NO: 83462 - DNA, 15 bp, Homo sapiens
gggggctctccattc

SEQ ID NO: 83463 - DNA, 15 bp, Homo sapiens
agggggctctccatt

SEQ ID NO: 83464 - DNA, 15 bp, Homo sapiens
gagggggctctccat

SEQ ID NO: 83465 - DNA, 15 bp, Homo sapiens
tgagggggctctcca

SEQ ID NO: 83466 - DNA, 15 bp, Homo sapiens
ttgagggggctctcc

SEQ ID NO: 83467 - DNA, 15 bp, Homo sapiens
gttgagggggctctc

SEQ ID NO: 83468 - DNA, 15 bp, Homo sapiens
ggttgagggggctct

SEQ ID NO: 83469 - DNA, 15 bp, Homo sapiens
gggttgagggggctc

SEQ ID NO: 83470 - DNA, 15 bp, Homo sapiens
agggttgagggggct

SEQ ID NO: 83471 - DNA, 15 bp, Homo sapiens
gagggttgagggggc

SEQ ID NO: 83472 - DNA, 15 bp, Homo sapiens
tgagggttgaggggg

SEQ ID NO: 83473 - DNA, 15 bp, Homo sapiens
gtgagggttgagggg

SEQ ID NO: 83474 - DNA, 15 bp, Homo sapiens
tgtgagggttgaggg

SEQ ID NO: 83475 - DNA, 15 bp, Homo sapiens
atgtgagggttgagg

SEQ ID NO: 83476 - DNA, 15 bp, Homo sapiens
gatgtgagggttgag

SEQ ID NO: 83477 - DNA, 15 bp, Homo sapiens
tgatgtgagggttga

SEQ ID NO: 83478 - DNA, 15 bp, Homo sapiens
ttgatgtgagggttg

SEQ ID NO: 83479 - DNA, 15 bp, Homo sapiens
tttgatgtgagggtt

SEQ ID NO: 83480 - DNA, 15 bp, Homo sapiens
ttttgatgtgagggt

SEQ ID NO: 83481 - DNA, 15 bp, Homo sapiens
gttttgatgtgaggg

SEQ ID NO: 83482 - DNA, 15 bp, Homo sapiens
ggttttgatgtgagg

SEQ ID NO: 83483 - DNA, 15 bp, Homo sapiens
gggttttgatgtgag

SEQ ID NO: 83484 - DNA, 15 bp, Homo sapiens
agggttttgatgtga

SEQ ID NO: 83485 - DNA, 15 bp, Homo sapiens
cagggttttgatgtg

SEQ ID NO: 83486 - DNA, 15 bp, Homo sapiens
acagggttttgatgt

SEQ ID NO: 83487 - DNA, 15 bp, Homo sapiens
cacagggttttgatg

SEQ ID NO: 83488 - DNA, 15 bp, Homo sapiens
ccacagggttttgat

SEQ ID NO: 83489 - DNA, 15 bp, Homo sapiens
cccacagggttttga

SEQ ID NO: 83490 - DNA, 15 bp, Homo sapiens
acccacagggttttg

SEQ ID NO: 83491 - DNA, 15 bp, Homo sapiens
cacccacagggtttt

SEQ ID NO: 83492 - DNA, 15 bp, Homo sapiens
gcacccacagggttt

SEQ ID NO: 83493 - DNA, 15 bp, Homo sapiens
agcacccacagggtt

SEQ ID NO: 83494 - DNA, 15 bp, Homo sapiens
cagcacccacagggt

SEQ ID NO: 83495 - DNA, 15 bp, Homo sapiens
acagcacccacaggg

SEQ ID NO: 83496 - DNA, 15 bp, Homo sapiens
gacagcacccacagg

SEQ ID NO: 83497 - DNA, 15 bp, Homo sapiens
tgacagcacccacag

SEQ ID NO: 83498 - DNA, 15 bp, Homo sapiens
atgacagcacccaca

SEQ ID NO: 83499 - DNA, 15 bp, Homo sapiens
aatgacagcacccac

SEQ ID NO: 83500 - DNA, 15 bp, Homo sapiens
caatgacagcaccca

SEQ ID NO: 83501 - DNA, 15 bp, Homo sapiens
acaatgacagcaccc

SEQ ID NO: 83502 - DNA, 15 bp, Homo sapiens
cacaatgacagcacc

SEQ ID NO: 83503 - DNA, 15 bp, Homo sapiens
gcacaatgacagcac

SEQ ID NO: 83504 - DNA, 15 bp, Homo sapiens
ggcacaatgacagca

SEQ ID NO: 83505 - DNA, 15 bp, Homo sapiens
gggcacaatgacagc

SEQ ID NO: 83506 - DNA, 15 bp, Homo sapiens
tgggcacaatgacag

SEQ ID NO: 83507 - DNA, 15 bp, Homo sapiens
atgggcacaatgaca

SEQ ID NO: 83508 - DNA, 15 bp, Homo sapiens
aatgggcacaatgac

SEQ ID NO: 83509 - DNA, 15 bp, Homo sapiens
aaatgggcacaatga

SEQ ID NO: 83510 - DNA, 15 bp, Homo sapiens
aaaatgggcacaatg

SEQ ID NO: 83511 - DNA, 15 bp, Homo sapiens
taaaatgggcacaat

SEQ ID NO: 83512 - DNA, 15 bp, Homo sapiens
ataaaatgggcacaa

SEQ ID NO: 83513 - DNA, 15 bp, Homo sapiens
cataaaatgggcaca

SEQ ID NO: 83514 - DNA, 15 bp, Homo sapiens
ccataaaatgggcac

SEQ ID NO: 83515 - DNA, 15 bp, Homo sapiens
tccataaaatgggca

SEQ ID NO: 83516 - DNA, 15 bp, Homo sapiens
atccataaaatgggc

SEQ ID NO: 83517 - DNA, 15 bp, Homo sapiens
tatccataaaatggg

SEQ ID NO: 83518 - DNA, 15 bp, Homo sapiens
ttatccataaaatgg

SEQ ID NO: 83519 - DNA, 15 bp, Homo sapiens
cttatccataaaatg

SEQ ID NO: 83520 - DNA, 15 bp, Homo sapiens
ccttatccataaaat

SEQ ID NO: 83521 - DNA, 15 bp, Homo sapiens
cccttatccataaaa

SEQ ID NO: 83522 - DNA, 15 bp, Homo sapiens
ccccttatccataaa

SEQ ID NO: 83523 - DNA, 15 bp, Homo sapiens
tccccttatccataa

SEQ ID NO: 83524 - DNA, 15 bp, Homo sapiens
ctccccttatccata

SEQ ID NO: 83525 - DNA, 15 bp, Homo sapiens
tctccccttatccat

SEQ ID NO: 83526 - DNA, 15 bp, Homo sapiens
ttctccccttatcca

SEQ ID NO: 83527 - DNA, 15 bp, Homo sapiens
gttctccccttatcc

SEQ ID NO: 83528 - DNA, 15 bp, Homo sapiens
ggttctccccttatc

SEQ ID NO: 83529 - DNA, 15 bp, Homo sapiens
tggttctccccttat

SEQ ID NO: 83530 - DNA, 15 bp, Homo sapiens
ttggttctcccctta

SEQ ID NO: 83531 - DNA, 15 bp, Homo sapiens
attggttctcccctt

SEQ ID NO: 83532 - DNA, 15 bp, Homo sapiens
aattggttctcccct

SEQ ID NO: 83533 - DNA, 15 bp, Homo sapiens
gaattggttctcccc

SEQ ID NO: 83534 - DNA, 15 bp, Homo sapiens
tgaattggttctccc

SEQ ID NO: 83535 - DNA, 15 bp, Homo sapiens
gtgaattggttctcc

SEQ ID NO: 83536 - DNA, 15 bp, Homo sapiens
agtgaattggttctc

SEQ ID NO: 83537 - DNA, 15 bp, Homo sapiens
gagtgaattggttct

SEQ ID NO: 83538 - DNA, 15 bp, Homo sapiens
tgagtgaattggttc

SEQ ID NO: 83539 - DNA, 15 bp, Homo sapiens
ctgagtgaattggtt

SEQ ID NO: 83540 - DNA, 15 bp, Homo sapiens
gctgagtgaattggt

SEQ ID NO: 83541 - DNA, 15 bp, Homo sapiens
agctgagtgaattgg

SEQ ID NO: 83542 - DNA, 15 bp, Homo sapiens
tagctgagtgaattg

SEQ ID NO: 83543 - DNA, 15 bp, Homo sapiens
ctagctgagtgaatt

SEQ ID NO: 83544 - DNA, 15 bp, Homo sapiens
actagctgagtgaat

SEQ ID NO: 83545 - DNA, 15 bp, Homo sapiens
tactagctgagtgaa

SEQ ID NO: 83546 - DNA, 15 bp, Homo sapiens
ttactagctgagtga

SEQ ID NO: 83547 - DNA, 15 bp, Homo sapiens
cttactagctgagtg

SEQ ID NO: 83548 - DNA, 15 bp, Homo sapiens
acttactagctgagt

SEQ ID NO: 83549 - DNA, 15 bp, Homo sapiens
cacttactagctgag

SEQ ID NO: 83550 - DNA, 15 bp, Homo sapiens
ccacttactagctga

SEQ ID NO: 83551 - DNA, 15 bp, Homo sapiens
gccacttactagctg

SEQ ID NO: 83552 - DNA, 15 bp, Homo sapiens
tgccacttactagct

SEQ ID NO: 83553 - DNA, 15 bp, Homo sapiens
ttgccacttactagc

SEQ ID NO: 83554 - DNA, 15 bp, Homo sapiens
attgccacttactag

SEQ ID NO: 83555 - DNA, 15 bp, Homo sapiens
gattgccacttacta

SEQ ID NO: 83556 - DNA, 15 bp, Homo sapiens
tgattgccacttact

SEQ ID NO: 83557 - DNA, 15 bp, Homo sapiens
atgattgccacttac

SEQ ID NO: 83558 - DNA, 15 bp, Homo sapiens
catgattgccactta

SEQ ID NO: 83559 - DNA, 15 bp, Homo sapiens
acatgattgccactt

SEQ ID NO: 83560 - DNA, 15 bp, Homo sapiens
gacatgattgccact

SEQ ID NO: 83561 - DNA, 15 bp, Homo sapiens
agacatgattgccac

SEQ ID NO: 83562 - DNA, 15 bp, Homo sapiens
tagacatgattgcca

SEQ ID NO: 83563 - DNA, 15 bp, Homo sapiens
gtagacatgattgcc

SEQ ID NO: 83564 - DNA, 15 bp, Homo sapiens
tgtagacatgattgc

SEQ ID NO: 83565 - DNA, 15 bp, Homo sapiens
ctgtagacatgattg

SEQ ID NO: 83566 - DNA, 15 bp, Homo sapiens
tctgtagacatgatt

SEQ ID NO: 83567 - DNA, 15 bp, Homo sapiens
ttctgtagacatgat

SEQ ID NO: 83568 - DNA, 15 bp, Homo sapiens
tttctgtagacatga

SEQ ID NO: 83569 - DNA, 15 bp, Homo sapiens
ttttctgtagacatg

SEQ ID NO: 83570 - DNA, 15 bp, Homo sapiens
cttttctgtagacat

SEQ ID NO: 83571 - DNA, 15 bp, Homo sapiens
gcttttctgtagaca

SEQ ID NO: 83572 - DNA, 15 bp, Homo sapiens
tgcttttctgtagac

SEQ ID NO: 83573 - DNA, 15 bp, Homo sapiens
gtgcttttctgtaga

SEQ ID NO: 83574 - DNA, 15 bp, Homo sapiens
tgtgcttttctgtag

SEQ ID NO: 83575 - DNA, 15 bp, Homo sapiens
ttgtgcttttctgta

SEQ ID NO: 83576 - DNA, 15 bp, Homo sapiens
tttgtgcttttctgt

SEQ ID NO: 83577 - DNA, 15 bp, Homo sapiens
ctttgtgcttttctg

SEQ ID NO: 83578 - DNA, 15 bp, Homo sapiens
tctttgtgcttttct

SEQ ID NO: 83579 - DNA, 15 bp, Homo sapiens
ttctttgtgcttttc

SEQ ID NO: 83580 - DNA, 15 bp, Homo sapiens
tttctttgtgctttt

SEQ ID NO: 83581 - DNA, 15 bp, Homo sapiens
ttttctttgtgcttt

SEQ ID NO: 83582 - DNA, 15 bp, Homo sapiens
attttctttgtgctt

SEQ ID NO: 83583 - DNA, 15 bp, Homo sapiens
aattttctttgtgct

SEQ ID NO: 83584 - DNA, 15 bp, Homo sapiens
taattttctttgtgc

SEQ ID NO: 83585 - DNA, 15 bp, Homo sapiens
ataattttctttgtg

SEQ ID NO: 83586 - DNA, 15 bp, Homo sapiens
gataattttctttgt

SEQ ID NO: 83587 - DNA, 15 bp, Homo sapiens
cgataattttctttg

SEQ ID NO: 83588 - DNA, 15 bp, Homo sapiens
acgataattttcttt

SEQ ID NO: 83589 - DNA, 15 bp, Homo sapiens
cacgataattttctt

SEQ ID NO: 83590 - DNA, 15 bp, Homo sapiens
ccacgataattttct

SEQ ID NO: 83591 - DNA, 15 bp, Homo sapiens
cccacgataattttc

SEQ ID NO: 83592 - DNA, 15 bp, Homo sapiens
ccccacgataatttt

SEQ ID NO: 83593 - DNA, 15 bp, Homo sapiens
tccccacgataattt

SEQ ID NO: 83594 - DNA, 15 bp, Homo sapiens
ttccccacgataatt

SEQ ID NO: 83595 - DNA, 15 bp, Homo sapiens
attccccacgataat

SEQ ID NO: 83596 - DNA, 15 bp, Homo sapiens
aattccccacgataa

SEQ ID NO: 83597 - DNA, 15 bp, Homo sapiens
gaattccccacgata

SEQ ID NO: 83598 - DNA, 15 bp, Homo sapiens
agaattccccacgat

SEQ ID NO: 83599 - DNA, 15 bp, Homo sapiens
gagaattccccacga

SEQ ID NO: 83600 - DNA, 15 bp, Homo sapiens
tgagaattccccacg

SEQ ID NO: 83601 - DNA, 15 bp, Homo sapiens
ttgagaattccccac

SEQ ID NO: 83602 - DNA, 15 bp, Homo sapiens
attgagaattcccca

SEQ ID NO: 83603 - DNA, 15 bp, Homo sapiens
gattgagaattcccc

SEQ ID NO: 83604 - DNA, 15 bp, Homo sapiens
agattgagaattccc

SEQ ID NO: 83605 - DNA, 15 bp, Homo sapiens
tagattgagaattcc

SEQ ID NO: 83606 - DNA, 15 bp, Homo sapiens
ctagattgagaattc

SEQ ID NO: 83607 - DNA, 15 bp, Homo sapiens
actagattgagaatt

SEQ ID NO: 83608 - DNA, 15 bp, Homo sapiens
tactagattgagaat

SEQ ID NO: 83609 - DNA, 15 bp, Homo sapiens
ctactagattgagaa

SEQ ID NO: 83610 - DNA, 15 bp, Homo sapiens
cctactagattgaga

SEQ ID NO: 83611 - DNA, 15 bp, Homo sapiens
tcctactagattgag

SEQ ID NO: 83612 - DNA, 15 bp, Homo sapiens
ctcctactagattga

SEQ ID NO: 83613 - DNA, 15 bp, Homo sapiens
tctcctactagattg

SEQ ID NO: 83614 - DNA, 15 bp, Homo sapiens
ctctcctactagatt

SEQ ID NO: 83615 - DNA, 15 bp, Homo sapiens
tctctcctactagat

SEQ ID NO: 83616 - DNA, 15 bp, Homo sapiens
atctctcctactaga

SEQ ID NO: 83617 - DNA, 15 bp, Homo sapiens
tatctctcctactag

SEQ ID NO: 83618 - DNA, 15 bp, Homo sapiens
ctatctctcctacta

SEQ ID NO: 83619 - DNA, 15 bp, Homo sapiens
tctatctctcctact

SEQ ID NO: 83620 - DNA, 15 bp, Homo sapiens
ttctatctctcctac

SEQ ID NO: 83621 - DNA, 15 bp, Homo sapiens
gttctatctctccta

SEQ ID NO: 83622 - DNA, 15 bp, Homo sapiens
tgttctatctctcct

SEQ ID NO: 83623 - DNA, 15 bp, Homo sapiens
atgttctatctctcc

SEQ ID NO: 83624 - DNA, 15 bp, Homo sapiens
tatgttctatctctc

SEQ ID NO: 83625 - DNA, 15 bp, Homo sapiens
ttatgttctatctct

SEQ ID NO: 83626 - DNA, 15 bp, Homo sapiens
tttatgttctatctc

SEQ ID NO: 83627 - DNA, 15 bp, Homo sapiens
gtttatgttctatct

SEQ ID NO: 83628 - DNA, 15 bp, Homo sapiens
agtttatgttctatc

SEQ ID NO: 83629 - DNA, 15 bp, Homo sapiens
tagtttatgttctat

SEQ ID NO: 83630 - DNA, 15 bp, Homo sapiens
atagtttatgttcta

SEQ ID NO: 83631 - DNA, 15 bp, Homo sapiens
catagtttatgttct

SEQ ID NO: 83632 - DNA, 15 bp, Homo sapiens
tcatagtttatgttc

SEQ ID NO: 83633 - DNA, 15 bp, Homo sapiens
ttcatagtttatgtt

SEQ ID NO: 83634 - DNA, 15 bp, Homo sapiens
tttcatagtttatgt

SEQ ID NO: 83635 - DNA, 15 bp, Homo sapiens
ttttcatagtttatg

SEQ ID NO: 83636 - DNA, 15 bp, Homo sapiens
tttttcatagtttat

SEQ ID NO: 83637 - DNA, 15 bp, Homo sapiens
gtttttcatagttta

SEQ ID NO: 83638 - DNA, 15 bp, Homo sapiens
tgtttttcatagttt

SEQ ID NO: 83639 - DNA, 15 bp, Homo sapiens
ttgtttttcatagtt

SEQ ID NO: 83640 - DNA, 15 bp, Homo sapiens
gttgtttttcatagt

SEQ ID NO: 83641 - DNA, 15 bp, Homo sapiens
tgttgtttttcatag

SEQ ID NO: 83642 - DNA, 15 bp, Homo sapiens
ttgttgtttttcata

SEQ ID NO: 83643 - DNA, 15 bp, Homo sapiens
attgttgtttttcat

SEQ ID NO: 83644 - DNA, 15 bp, Homo sapiens
cattgttgtttttca

SEQ ID NO: 83645 - DNA, 15 bp, Homo sapiens
ccattgttgtttttc

SEQ ID NO: 83646 - DNA, 15 bp, Homo sapiens
tccattgttgttttt

SEQ ID NO: 83647 - DNA, 15 bp, Homo sapiens
ttccattgttgtttt

SEQ ID NO: 83648 - DNA, 15 bp, Homo sapiens
cttccattgttgttt

SEQ ID NO: 83649 - DNA, 15 bp, Homo sapiens
ccttccattgttgtt

SEQ ID NO: 83650 - DNA, 15 bp, Homo sapiens
gccttccattgttgt

SEQ ID NO: 83651 - DNA, 15 bp, Homo sapiens
tgccttccattgttg

SEQ ID NO: 83652 - DNA, 15 bp, Homo sapiens
ttgccttccattgtt

SEQ ID NO: 83653 - DNA, 15 bp, Homo sapiens
attgccttccattgt

SEQ ID NO: 83654 - DNA, 15 bp, Homo sapiens
cattgccttccattg

SEQ ID NO: 83655 - DNA, 15 bp, Homo sapiens
ccattgccttccatt

SEQ ID NO: 83656 - DNA, 15 bp, Homo sapiens
accattgccttccat

SEQ ID NO: 83657 - DNA, 15 bp, Homo sapiens
aaccattgccttcca

SEQ ID NO: 83658 - DNA, 15 bp, Homo sapiens
taaccattgccttcc

SEQ ID NO: 83659 - DNA, 15 bp, Homo sapiens
ttaaccattgccttc

SEQ ID NO: 83660 - DNA, 15 bp, Homo sapiens
tttaaccattgcctt

SEQ ID NO: 83661 - DNA, 15 bp, Homo sapiens
atttaaccattgcct

SEQ ID NO: 83662 - DNA, 15 bp, Homo sapiens
tatttaaccattgcc

SEQ ID NO: 83663 - DNA, 15 bp, Homo sapiens
ttatttaaccattgc

SEQ ID NO: 83664 - DNA, 15 bp, Homo sapiens
tttatttaaccattg

SEQ ID NO: 83665 - DNA, 15 bp, Homo sapiens
atttatttaaccatt

SEQ ID NO: 83666 - DNA, 15 bp, Homo sapiens
tatttatttaaccat

SEQ ID NO: 83667 - DNA, 15 bp, Homo sapiens
atatttatttaacca

SEQ ID NO: 83668 - DNA, 15 bp, Homo sapiens
tatatttatttaacc

SEQ ID NO: 83669 - DNA, 15 bp, Homo sapiens
ttatatttatttaac

SEQ ID NO: 83670 - DNA, 15 bp, Homo sapiens
tttatatttatttaa

SEQ ID NO: 83671 - DNA, 15 bp, Homo sapiens
ttttatatttattta

SEQ ID NO: 83672 - DNA, 15 bp, Homo sapiens
cttttatatttattt

SEQ ID NO: 83673 - DNA, 15 bp, Homo sapiens
gcttttatatttatt

SEQ ID NO: 83674 - DNA, 15 bp, Homo sapiens
tgcttttatatttat

SEQ ID NO: 83675 - DNA, 15 bp, Homo sapiens
ttgcttttatattta

SEQ ID NO: 83676 - DNA, 15 bp, Homo sapiens
gttgcttttatattt

SEQ ID NO: 83677 - DNA, 15 bp, Homo sapiens
tgttgcttttatatt

SEQ ID NO: 83678 - DNA, 15 bp, Homo sapiens
atgttgcttttatat

SEQ ID NO: 83679 - DNA, 15 bp, Homo sapiens
catgttgcttttata

SEQ ID NO: 83680 - DNA, 15 bp, Homo sapiens
tcatgttgcttttat

SEQ ID NO: 83681 - DNA, 15 bp, Homo sapiens
gtcatgttgctttta

SEQ ID NO: 83682 - DNA, 15 bp, Homo sapiens
tgtcatgttgctttt

SEQ ID NO: 83683 - DNA, 15 bp, Homo sapiens
ttgtcatgttgcttt

SEQ ID NO: 83684 - DNA, 15 bp, Homo sapiens
cttgtcatgttgctt

SEQ ID NO: 83685 - DNA, 15 bp, Homo sapiens
ccttgtcatgttgct

SEQ ID NO: 83686 - DNA, 15 bp, Homo sapiens
gccttgtcatgttgc

SEQ ID NO: 83687 - DNA, 15 bp, Homo sapiens
tgccttgtcatgttg

SEQ ID NO: 83688 - DNA, 15 bp, Homo sapiens
ctgccttgtcatgtt

SEQ ID NO: 83689 - DNA, 15 bp, Homo sapiens
actgccttgtcatgt

SEQ ID NO: 83690 - DNA, 15 bp, Homo sapiens
gactgccttgtcatg

SEQ ID NO: 83691 - DNA, 15 bp, Homo sapiens
agactgccttgtcat

SEQ ID NO: 83692 - DNA, 15 bp, Homo sapiens
tagactgccttgtca

SEQ ID NO: 83693 - DNA, 15 bp, Homo sapiens
ttagactgccttgtc

SEQ ID NO: 83694 - DNA, 15 bp, Homo sapiens
cttagactgccttgt

SEQ ID NO: 83695 - DNA, 15 bp, Homo sapiens
tcttagactgccttg

SEQ ID NO: 83696 - DNA, 15 bp, Homo sapiens
atcttagactgcctt

SEQ ID NO: 83697 - DNA, 15 bp, Homo sapiens
tatcttagactgcct

SEQ ID NO: 83698 - DNA, 15 bp, Homo sapiens
ttatcttagactgcc

SEQ ID NO: 83699 - DNA, 15 bp, Homo sapiens
tttatcttagactgc

SEQ ID NO: 83700 - DNA, 15 bp, Homo sapiens
ctttatcttagactg

SEQ ID NO: 83701 - DNA, 15 bp, Homo sapiens
actttatcttagact

SEQ ID NO: 83702 - DNA, 15 bp, Homo sapiens
cactttatcttagac

SEQ ID NO: 83703 - DNA, 15 bp, Homo sapiens
gcactttatcttaga

SEQ ID NO: 83704 - DNA, 15 bp, Homo sapiens
ggcactttatcttag

SEQ ID NO: 83705 - DNA, 15 bp, Homo sapiens
tggcactttatctta

SEQ ID NO: 83706 - DNA, 15 bp, Homo sapiens
ttggcactttatctt

SEQ ID NO: 83707 - DNA, 15 bp, Homo sapiens
tttggcactttatct

SEQ ID NO: 83708 - DNA, 15 bp, Homo sapiens
atttggcactttatc

SEQ ID NO: 83709 - DNA, 15 bp, Homo sapiens
aatttggcactttat

SEQ ID NO: 83710 - DNA, 15 bp, Homo sapiens
caatttggcacttta

SEQ ID NO: 83711 - DNA, 15 bp, Homo sapiens
ccaatttggcacttt

SEQ ID NO: 83712 - DNA, 15 bp, Homo sapiens
accaatttggcactt

SEQ ID NO: 83713 - DNA, 15 bp, Homo sapiens
caccaatttggcact

SEQ ID NO: 83714 - DNA, 15 bp, Homo sapiens
gcaccaatttggcac

SEQ ID NO: 83715 - DNA, 15 bp, Homo sapiens
ggcaccaatttggca

SEQ ID NO: 83716 - DNA, 15 bp, Homo sapiens
tggcaccaatttggc

SEQ ID NO: 83717 - DNA, 15 bp, Homo sapiens
ttggcaccaatttgg

SEQ ID NO: 83718 - DNA, 15 bp, Homo sapiens
gttggcaccaatttg

SEQ ID NO: 83719 - DNA, 15 bp, Homo sapiens
tgttggcaccaattt

SEQ ID NO: 83720 - DNA, 15 bp, Homo sapiens
ctgttggcaccaatt

SEQ ID NO: 83721 - DNA, 15 bp, Homo sapiens
tctgttggcaccaat

SEQ ID NO: 83722 - DNA, 15 bp, Homo sapiens
gtctgttggcaccaa

SEQ ID NO: 83723 - DNA, 15 bp, Homo sapiens
agtctgttggcacca

SEQ ID NO: 83724 - DNA, 15 bp, Homo sapiens
aagtctgttggcacc

SEQ ID NO: 83725 - DNA, 15 bp, Homo sapiens
gaagtctgttggcac

SEQ ID NO: 83726 - DNA, 15 bp, Homo sapiens
tgaagtctgttggca

SEQ ID NO: 83727 - DNA, 15 bp, Homo sapiens
ctgaagtctgttggc

SEQ ID NO: 83728 - DNA, 15 bp, Homo sapiens
gctgaagtctgttgg

SEQ ID NO: 83729 - DNA, 15 bp, Homo sapiens
tgctgaagtctgttg

SEQ ID NO: 83730 - DNA, 15 bp, Homo sapiens
ctgctgaagtctgtt

SEQ ID NO: 83731 - DNA, 15 bp, Homo sapiens
tctgctgaagtctgt

SEQ ID NO: 83732 - DNA, 15 bp, Homo sapiens
ttctgctgaagtctg

SEQ ID NO: 83733 - DNA, 15 bp, Homo sapiens
attctgctgaagtct

SEQ ID NO: 83734 - DNA, 15 bp, Homo sapiens
cattctgctgaagtc

SEQ ID NO: 83735 - DNA, 15 bp, Homo sapiens
ccattctgctgaagt

SEQ ID NO: 83736 - DNA, 15 bp, Homo sapiens
tccattctgctgaag

SEQ ID NO: 83737 - DNA, 15 bp, Homo sapiens
ctccattctgctgaa

SEQ ID NO: 83738 - DNA, 15 bp, Homo sapiens
cctccattctgctga

SEQ ID NO: 83739 - DNA, 15 bp, Homo sapiens
acctccattctgctg

SEQ ID NO: 83740 - DNA, 15 bp, Homo sapiens
aacctccattctgct

SEQ ID NO: 83741 - DNA, 15 bp, Homo sapiens
gaacctccattctgc

SEQ ID NO: 83742 - DNA, 15 bp, Homo sapiens
agaacctccattctg

SEQ ID NO: 83743 - DNA, 15 bp, Homo sapiens
aagaacctccattct

SEQ ID NO: 83744 - DNA, 15 bp, Homo sapiens
taagaacctccattc

SEQ ID NO: 83745 - DNA, 15 bp, Homo sapiens
ataagaacctccatt

SEQ ID NO: 83746 - DNA, 15 bp, Homo sapiens
cataagaacctccat

SEQ ID NO: 83747 - DNA, 15 bp, Homo sapiens
gcataagaacctcca

SEQ ID NO: 83748 - DNA, 15 bp, Homo sapiens
agcataagaacctcc

SEQ ID NO: 83749 - DNA, 15 bp, Homo sapiens
cagcataagaacctc

SEQ ID NO: 83750 - DNA, 15 bp, Homo sapiens
ccagcataagaacct

SEQ ID NO: 83751 - DNA, 15 bp, Homo sapiens
cccagcataagaacc

SEQ ID NO: 83752 - DNA, 15 bp, Homo sapiens
gcccagcataagaac

SEQ ID NO: 83753 - DNA, 15 bp, Homo sapiens
agcccagcataagaa

SEQ ID NO: 83754 - DNA, 15 bp, Homo sapiens
cagcccagcataaga

SEQ ID NO: 83755 - DNA, 15 bp, Homo sapiens
ccagcccagcataag

SEQ ID NO: 83756 - DNA, 15 bp, Homo sapiens
tccagcccagcataa

SEQ ID NO: 83757 - DNA, 15 bp, Homo sapiens
ctccagcccagcata

SEQ ID NO: 83758 - DNA, 15 bp, Homo sapiens
actccagcccagcat

SEQ ID NO: 83759 - DNA, 15 bp, Homo sapiens
cactccagcccagca

SEQ ID NO: 83760 - DNA, 15 bp, Homo sapiens
tcactccagcccagc

SEQ ID NO: 83761 - DNA, 15 bp, Homo sapiens
ctcactccagcccag

SEQ ID NO: 83762 - DNA, 15 bp, Homo sapiens
gctcactccagccca

SEQ ID NO: 83763 - DNA, 15 bp, Homo sapiens
tgctcactccagccc

SEQ ID NO: 83764 - DNA, 15 bp, Homo sapiens
ctgctcactccagcc

SEQ ID NO: 83765 - DNA, 15 bp, Homo sapiens
cctgctcactccagc

SEQ ID NO: 83766 - DNA, 15 bp, Homo sapiens
ccctgctcactccag

SEQ ID NO: 83767 - DNA, 15 bp, Homo sapiens
tccctgctcactcca

SEQ ID NO: 83768 - DNA, 15 bp, Homo sapiens
ctccctgctcactcc

SEQ ID NO: 83769 - DNA, 15 bp, Homo sapiens
tctccctgctcactc

SEQ ID NO: 83770 - DNA, 15 bp, Homo sapiens
gtctccctgctcact

SEQ ID NO: 83771 - DNA, 15 bp, Homo sapiens
agtctccctgctcac

SEQ ID NO: 83772 - DNA, 15 bp, Homo sapiens
aagtctccctgctca

SEQ ID NO: 83773 - DNA, 15 bp, Homo sapiens
gaagtctccctgctc

SEQ ID NO: 83774 - DNA, 15 bp, Homo sapiens
ggaagtctccctgct

SEQ ID NO: 83775 - DNA, 15 bp, Homo sapiens
aggaagtctccctgc

SEQ ID NO: 83776 - DNA, 15 bp, Homo sapiens
caggaagtctccctg

SEQ ID NO: 83777 - DNA, 15 bp, Homo sapiens
ccaggaagtctccct

SEQ ID NO: 83778 - DNA, 15 bp, Homo sapiens
tccaggaagtctccc

SEQ ID NO: 83779 - DNA, 15 bp, Homo sapiens
ctccaggaagtctcc

SEQ ID NO: 83780 - DNA, 15 bp, Homo sapiens
cctccaggaagtctc

SEQ ID NO: 83781 - DNA, 15 bp, Homo sapiens
tcctccaggaagtct

SEQ ID NO: 83782 - DNA, 15 bp, Homo sapiens
ctcctccaggaagtc

SEQ ID NO: 83783 - DNA, 15 bp, Homo sapiens
cctcctccaggaagt

SEQ ID NO: 83784 - DNA, 15 bp, Homo sapiens
gcctcctccaggaag

SEQ ID NO: 83785 - DNA, 15 bp, Homo sapiens
tgcctcctccaggaa

SEQ ID NO: 83786 - DNA, 15 bp, Homo sapiens
ctgcctcctccagga

SEQ ID NO: 83787 - DNA, 15 bp, Homo sapiens
tctgcctcctccagg

SEQ ID NO: 83788 - DNA, 15 bp, Homo sapiens
ttctgcctcctccag

SEQ ID NO: 83789 - DNA, 15 bp, Homo sapiens
attctgcctcctcca

SEQ ID NO: 83790 - DNA, 15 bp, Homo sapiens
cattctgcctcctcc

SEQ ID NO: 83791 - DNA, 15 bp, Homo sapiens
acattctgcctcctc

SEQ ID NO: 83792 - DNA, 15 bp, Homo sapiens
cacattctgcctcct

SEQ ID NO: 83793 - DNA, 15 bp, Homo sapiens
tcacattctgcctcc

SEQ ID NO: 83794 - DNA, 15 bp, Homo sapiens
ctcacattctgcctc

SEQ ID NO: 83795 - DNA, 15 bp, Homo sapiens
cctcacattctgcct

SEQ ID NO: 83796 - DNA, 15 bp, Homo sapiens
acctcacattctgcc

SEQ ID NO: 83797 - DNA, 15 bp, Homo sapiens
cacctcacattctgc

SEQ ID NO: 83798 - DNA, 15 bp, Homo sapiens
acacctcacattctg

SEQ ID NO: 83799 - DNA, 15 bp, Homo sapiens
aacacctcacattct

SEQ ID NO: 83800 - DNA, 15 bp, Homo sapiens
gaacacctcacattc

SEQ ID NO: 83801 - DNA, 15 bp, Homo sapiens
tgaacacctcacatt

SEQ ID NO: 83802 - DNA, 15 bp, Homo sapiens
ttgaacacctcacat

SEQ ID NO: 83803 - DNA, 15 bp, Homo sapiens
gttgaacacctcaca

SEQ ID NO: 83804 - DNA, 15 bp, Homo sapiens
tgttgaacacctcac

SEQ ID NO: 83805 - DNA, 15 bp, Homo sapiens
ctgttgaacacctca

SEQ ID NO: 83806 - DNA, 15 bp, Homo sapiens
actgttgaacacctc

SEQ ID NO: 83807 - DNA, 15 bp, Homo sapiens
aactgttgaacacct

SEQ ID NO: 83808 - DNA, 15 bp, Homo sapiens
aaactgttgaacacc

SEQ ID NO: 83809 - DNA, 15 bp, Homo sapiens
caaactgttgaacac

SEQ ID NO: 83810 - DNA, 15 bp, Homo sapiens
ccaaactgttgaaca

SEQ ID NO: 83811 - DNA, 15 bp, Homo sapiens
accaaactgttgaac

SEQ ID NO: 83812 - DNA, 15 bp, Homo sapiens
caccaaactgttgaa

SEQ ID NO: 83813 - DNA, 15 bp, Homo sapiens
tcaccaaactgttga

SEQ ID NO: 83814 - DNA, 15 bp, Homo sapiens
ttcaccaaactgttg

SEQ ID NO: 83815 - DNA, 15 bp, Homo sapiens
attcaccaaactgtt

SEQ ID NO: 83816 - DNA, 15 bp, Homo sapiens
cattcaccaaactgt

SEQ ID NO: 83817 - DNA, 15 bp, Homo sapiens
tcattcaccaaactg

SEQ ID NO: 83818 - DNA, 15 bp, Homo sapiens
ttcattcaccaaact

SEQ ID NO: 83819 - DNA, 15 bp, Homo sapiens
attcattcaccaaac

SEQ ID NO: 83820 - DNA, 15 bp, Homo sapiens
cattcattcaccaaa

SEQ ID NO: 83821 - DNA, 15 bp, Homo sapiens
tcattcattcaccaa

SEQ ID NO: 83822 - DNA, 15 bp, Homo sapiens
ctcattcattcacca

SEQ ID NO: 83823 - DNA, 15 bp, Homo sapiens
tctcattcattcacc

SEQ ID NO: 83824 - DNA, 15 bp, Homo sapiens
atctcattcattcac

SEQ ID NO: 83825 - DNA, 15 bp, Homo sapiens
tatctcattcattca

SEQ ID NO: 83826 - DNA, 15 bp, Homo sapiens
atatctcattcattc

SEQ ID NO: 83827 - DNA, 15 bp, Homo sapiens
catatctcattcatt

SEQ ID NO: 83828 - DNA, 15 bp, Homo sapiens
tcatatctcattcat

SEQ ID NO: 83829 - DNA, 15 bp, Homo sapiens
atcatatctcattca

SEQ ID NO: 83830 - DNA, 15 bp, Homo sapiens
aatcatatctcattc

SEQ ID NO: 83831 - DNA, 15 bp, Homo sapiens
taatcatatctcatt

SEQ ID NO: 83832 - DNA, 15 bp, Homo sapiens
ctaatcatatctcat

SEQ ID NO: 83833 - DNA, 15 bp, Homo sapiens
cctaatcatatctca

SEQ ID NO: 83834 - DNA, 15 bp, Homo sapiens
gcctaatcatatctc

SEQ ID NO: 83835 - DNA, 15 bp, Homo sapiens
tgcctaatcatatct

SEQ ID NO: 83836 - DNA, 15 bp, Homo sapiens
ctgcctaatcatatc

SEQ ID NO: 83837 - DNA, 15 bp, Homo sapiens
tctgcctaatcatat

SEQ ID NO: 83838 - DNA, 15 bp, Homo sapiens
ctctgcctaatcata

SEQ ID NO: 83839 - DNA, 15 bp, Homo sapiens
tctctgcctaatcat

SEQ ID NO: 83840 - DNA, 15 bp, Homo sapiens
ttctctgcctaatca

SEQ ID NO: 83841 - DNA, 15 bp, Homo sapiens
cttctctgcctaatc

SEQ ID NO: 83842 - DNA, 15 bp, Homo sapiens
tcttctctgcctaat

SEQ ID NO: 83843 - DNA, 15 bp, Homo sapiens
gtcttctctgcctaa

SEQ ID NO: 83844 - DNA, 15 bp, Homo sapiens
tgtcttctctgccta

SEQ ID NO: 83845 - DNA, 15 bp, Homo sapiens
ctgtcttctctgcct

SEQ ID NO: 83846 - DNA, 15 bp, Homo sapiens
cctgtcttctctgcc

SEQ ID NO: 83847 - DNA, 15 bp, Homo sapiens
ccctgtcttctctgc

SEQ ID NO: 83848 - DNA, 15 bp, Homo sapiens
tccctgtcttctctg

SEQ ID NO: 83849 - DNA, 15 bp, Homo sapiens
ctccctgtcttctct

SEQ ID NO: 83850 - DNA, 15 bp, Homo sapiens
cctccctgtcttctc

SEQ ID NO: 83851 - DNA, 15 bp, Homo sapiens
gcctccctgtcttct

SEQ ID NO: 83852 - DNA, 15 bp, Homo sapiens
tgcctccctgtcttc

SEQ ID NO: 83853 - DNA, 15 bp, Homo sapiens
ttgcctccctgtctt

SEQ ID NO: 83854 - DNA, 15 bp, Homo sapiens
attgcctccctgtct

SEQ ID NO: 83855 - DNA, 15 bp, Homo sapiens
aattgcctccctgtc

SEQ ID NO: 83856 - DNA, 15 bp, Homo sapiens
gaattgcctccctgt

SEQ ID NO: 83857 - DNA, 15 bp, Homo sapiens
agaattgcctccctg

SEQ ID NO: 83858 - DNA, 15 bp, Homo sapiens
tagaattgcctccct

SEQ ID NO: 83859 - DNA, 15 bp, Homo sapiens
atagaattgcctccc

SEQ ID NO: 83860 - DNA, 15 bp, Homo sapiens
catagaattgcctcc

SEQ ID NO: 83861 - DNA, 15 bp, Homo sapiens
gcatagaattgcctc

SEQ ID NO: 83862 - DNA, 15 bp, Homo sapiens
tgcatagaattgcct

SEQ ID NO: 83863 - DNA, 15 bp, Homo sapiens
ctgcatagaattgcc

SEQ ID NO: 83864 - DNA, 15 bp, Homo sapiens
cctgcatagaattgc

SEQ ID NO: 83865 - DNA, 15 bp, Homo sapiens
acctgcatagaattg

SEQ ID NO: 83866 - DNA, 15 bp, Homo sapiens
cacctgcatagaatt

SEQ ID NO: 83867 - DNA, 15 bp, Homo sapiens
tcacctgcatagaat

SEQ ID NO: 83868 - DNA, 15 bp, Homo sapiens
ttcacctgcatagaa

SEQ ID NO: 83869 - DNA, 15 bp, Homo sapiens
cttcacctgcataga

SEQ ID NO: 83870 - DNA, 15 bp, Homo sapiens
gcttcacctgcatag

SEQ ID NO: 83871 - DNA, 15 bp, Homo sapiens
agcttcacctgcata

SEQ ID NO: 83872 - DNA, 15 bp, Homo sapiens
cagcttcacctgcat

SEQ ID NO: 83873 - DNA, 15 bp, Homo sapiens
gcagcttcacctgca

SEQ ID NO: 83874 - DNA, 15 bp, Homo sapiens
tgcagcttcacctgc

SEQ ID NO: 83875 - DNA, 15 bp, Homo sapiens
atgcagcttcacctg

SEQ ID NO: 83876 - DNA, 15 bp, Homo sapiens
tatgcagcttcacct

SEQ ID NO: 83877 - DNA, 15 bp, Homo sapiens
atatgcagcttcacc

SEQ ID NO: 83878 - DNA, 15 bp, Homo sapiens
catatgcagcttcac

SEQ ID NO: 83879 - DNA, 15 bp, Homo sapiens
acatatgcagcttca

SEQ ID NO: 83880 - DNA, 15 bp, Homo sapiens
tacatatgcagcttc

SEQ ID NO: 83881 - DNA, 15 bp, Homo sapiens
atacatatgcagctt

SEQ ID NO: 83882 - DNA, 15 bp, Homo sapiens
tatacatatgcagct

SEQ ID NO: 83883 - DNA, 15 bp, Homo sapiens
atatacatatgcagc

SEQ ID NO: 83884 - DNA, 15 bp, Homo sapiens
aatatacatatgcag

SEQ ID NO: 83885 - DNA, 15 bp, Homo sapiens
taatatacatatgca

SEQ ID NO: 83886 - DNA, 15 bp, Homo sapiens
ttaatatacatatgc

SEQ ID NO: 83887 - DNA, 15 bp, Homo sapiens
tttaatatacatatg

SEQ ID NO: 83888 - DNA, 15 bp, Homo sapiens
atttaatatacatat

SEQ ID NO: 83889 - DNA, 15 bp, Homo sapiens
catttaatatacata

SEQ ID NO: 83890 - DNA, 15 bp, Homo sapiens
acatttaatatacat

SEQ ID NO: 83891 - DNA, 15 bp, Homo sapiens
tacatttaatataca

SEQ ID NO: 83892 - DNA, 15 bp, Homo sapiens
gtacatttaatatac

SEQ ID NO: 83893 - DNA, 15 bp, Homo sapiens
tgtacatttaatata

SEQ ID NO: 83894 - DNA, 15 bp, Homo sapiens
atgtacatttaatat

SEQ ID NO: 83895 - DNA, 15 bp, Homo sapiens
aatgtacatttaata

SEQ ID NO: 83896 - DNA, 15 bp, Homo sapiens
taatgtacatttaat

SEQ ID NO: 83897 - DNA, 15 bp, Homo sapiens
ttaatgtacatttaa

SEQ ID NO: 83898 - DNA, 15 bp, Homo sapiens
tttaatgtacattta

SEQ ID NO: 83899 - DNA, 15 bp, Homo sapiens
atttaatgtacattt

SEQ ID NO: 83900 - DNA, 15 bp, Homo sapiens
tatttaatgtacatt

SEQ ID NO: 83901 - DNA, 15 bp, Homo sapiens
atatttaatgtacat

SEQ ID NO: 83902 - DNA, 15 bp, Homo sapiens
catatttaatgtaca

SEQ ID NO: 83903 - DNA, 15 bp, Homo sapiens
gcatatttaatgtac

SEQ ID NO: 83904 - DNA, 15 bp, Homo sapiens
ggcatatttaatgta

SEQ ID NO: 83905 - DNA, 15 bp, Homo sapiens
aggcatatttaatgt

SEQ ID NO: 83906 - DNA, 15 bp, Homo sapiens
gaggcatatttaatg

SEQ ID NO: 83907 - DNA, 15 bp, Homo sapiens
ggaggcatatttaat

SEQ ID NO: 83908 - DNA, 15 bp, Homo sapiens
tggaggcatatttaa

SEQ ID NO: 83909 - DNA, 15 bp, Homo sapiens
ttggaggcatattta

SEQ ID NO: 83910 - DNA, 15 bp, Homo sapiens
tttggaggcatattt

SEQ ID NO: 83911 - DNA, 15 bp, Homo sapiens
ctttggaggcatatt

SEQ ID NO: 83912 - DNA, 15 bp, Homo sapiens
cctttggaggcatat

SEQ ID NO: 83913 - DNA, 15 bp, Homo sapiens
acctttggaggcata

SEQ ID NO: 83914 - DNA, 15 bp, Homo sapiens
aacctttggaggcat

SEQ ID NO: 83915 - DNA, 15 bp, Homo sapiens
taacctttggaggca

SEQ ID NO: 83916 - DNA, 15 bp, Homo sapiens
ttaacctttggaggc

SEQ ID NO: 83917 - DNA, 15 bp, Homo sapiens
cttaacctttggagg

SEQ ID NO: 83918 - DNA, 15 bp, Homo sapiens
tcttaacctttggag

SEQ ID NO: 83919 - DNA, 15 bp, Homo sapiens
ctcttaacctttgga

SEQ ID NO: 83920 - DNA, 15 bp, Homo sapiens
actcttaacctttgg

SEQ ID NO: 83921 - DNA, 15 bp, Homo sapiens
cactcttaacctttg

SEQ ID NO: 83922 - DNA, 15 bp, Homo sapiens
gcactcttaaccttt

SEQ ID NO: 83923 - DNA, 15 bp, Homo sapiens
tgcactcttaacctt

SEQ ID NO: 83924 - DNA, 15 bp, Homo sapiens
ctgcactcttaacct

SEQ ID NO: 83925 - DNA, 15 bp, Homo sapiens
cctgcactcttaacc

SEQ ID NO: 83926 - DNA, 15 bp, Homo sapiens
gcctgcactcttaac

SEQ ID NO: 83927 - DNA, 15 bp, Homo sapiens
cgcctgcactcttaa

SEQ ID NO: 83928 - DNA, 15 bp, Homo sapiens
tcgcctgcactctta

SEQ ID NO: 83929 - DNA, 15 bp, Homo sapiens
ctcgcctgcactctt

SEQ ID NO: 83930 - DNA, 15 bp, Homo sapiens
tctcgcctgcactct

SEQ ID NO: 83931 - DNA, 15 bp, Homo sapiens
ttctcgcctgcactc

SEQ ID NO: 83932 - DNA, 15 bp, Homo sapiens
tttctcgcctgcact

SEQ ID NO: 83933 - DNA, 15 bp, Homo sapiens
ctttctcgcctgcac

SEQ ID NO: 83934 - DNA, 15 bp, Homo sapiens
tctttctcgcctgca

SEQ ID NO: 83935 - DNA, 15 bp, Homo sapiens
ctctttctcgcctgc

SEQ ID NO: 83936 - DNA, 15 bp, Homo sapiens
cctctttctcgcctg

SEQ ID NO: 83937 - DNA, 15 bp, Homo sapiens
acctctttctcgcct

SEQ ID NO: 83938 - DNA, 15 bp, Homo sapiens
cacctctttctcgcc

SEQ ID NO: 83939 - DNA, 15 bp, Homo sapiens
ccacctctttctcgc

SEQ ID NO: 83940 - DNA, 15 bp, Homo sapiens
cccacctctttctcg

SEQ ID NO: 83941 - DNA, 15 bp, Homo sapiens
ccccacctctttctc

SEQ ID NO: 83942 - DNA, 15 bp, Homo sapiens
cccccacctctttct

SEQ ID NO: 83943 - DNA, 15 bp, Homo sapiens
tcccccacctctttc

SEQ ID NO: 83944 - DNA, 15 bp, Homo sapiens
ctcccccacctcttt

SEQ ID NO: 83945 - DNA, 15 bp, Homo sapiens
actcccccacctctt

SEQ ID NO: 83946 - DNA, 15 bp, Homo sapiens
gactcccccacctct

SEQ ID NO: 83947 - DNA, 15 bp, Homo sapiens
agactcccccacctc

SEQ ID NO: 83948 - DNA, 15 bp, Homo sapiens
aagactcccccacct

SEQ ID NO: 83949 - DNA, 15 bp, Homo sapiens
taagactcccccacc

SEQ ID NO: 83950 - DNA, 15 bp, Homo sapiens
gtaagactcccccac

SEQ ID NO: 83951 - DNA, 15 bp, Homo sapiens
tgtaagactccccca

SEQ ID NO: 83952 - DNA, 15 bp, Homo sapiens
atgtaagactccccc

SEQ ID NO: 83953 - DNA, 15 bp, Homo sapiens
tatgtaagactcccc

SEQ ID NO: 83954 - DNA, 15 bp, Homo sapiens
ttatgtaagactccc

SEQ ID NO: 83955 - DNA, 15 bp, Homo sapiens
gttatgtaagactcc

SEQ ID NO: 83956 - DNA, 15 bp, Homo sapiens
tgttatgtaagactc

SEQ ID NO: 83957 - DNA, 15 bp, Homo sapiens
ttgttatgtaagact

SEQ ID NO: 83958 - DNA, 15 bp, Homo sapiens
cttgttatgtaagac

SEQ ID NO: 83959 - DNA, 15 bp, Homo sapiens
tcttgttatgtaaga

SEQ ID NO: 83960 - DNA, 15 bp, Homo sapiens
ttcttgttatgtaag

SEQ ID NO: 83961 - DNA, 15 bp, Homo sapiens
cttcttgttatgtaa

SEQ ID NO: 83962 - DNA, 15 bp, Homo sapiens
tcttcttgttatgta

SEQ ID NO: 83963 - DNA, 15 bp, Homo sapiens
ttcttcttgttatgt

SEQ ID NO: 83964 - DNA, 15 bp, Homo sapiens
tttcttcttgttatg

SEQ ID NO: 83965 - DNA, 15 bp, Homo sapiens
ttttcttcttgttat

SEQ ID NO: 83966 - DNA, 15 bp, Homo sapiens
tttttcttcttgtta

SEQ ID NO: 83967 - DNA, 15 bp, Homo sapiens
gtttttcttcttgtt

SEQ ID NO: 83968 - DNA, 15 bp, Homo sapiens
agtttttcttcttgt

SEQ ID NO: 83969 - DNA, 15 bp, Homo sapiens
tagtttttcttcttg

SEQ ID NO: 83970 - DNA, 15 bp, Homo sapiens
atagtttttcttctt

SEQ ID NO: 83971 - DNA, 15 bp, Homo sapiens
aatagtttttcttct

SEQ ID NO: 83972 - DNA, 15 bp, Homo sapiens
aaatagtttttcttc

SEQ ID NO: 83973 - DNA, 15 bp, Homo sapiens
caaatagtttttctt

SEQ ID NO: 83974 - DNA, 15 bp, Homo sapiens
tcaaatagtttttct

SEQ ID NO: 83975 - DNA, 15 bp, Homo sapiens
ttcaaatagtttttc

SEQ ID NO: 83976 - DNA, 15 bp, Homo sapiens
tttcaaatagttttt

SEQ ID NO: 83977 - DNA, 15 bp, Homo sapiens
atttcaaatagtttt

SEQ ID NO: 83978 - DNA, 15 bp, Homo sapiens
tatttcaaatagttt

SEQ ID NO: 83979 - DNA, 15 bp, Homo sapiens
ctatttcaaatagtt

SEQ ID NO: 83980 - DNA, 15 bp, Homo sapiens
cctatttcaaatagt

SEQ ID NO: 83981 - DNA, 15 bp, Homo sapiens
tcctatttcaaatag

SEQ ID NO: 83982 - DNA, 15 bp, Homo sapiens
gtcctatttcaaata

SEQ ID NO: 83983 - DNA, 15 bp, Homo sapiens
ggtcctatttcaaat

SEQ ID NO: 83984 - DNA, 15 bp, Homo sapiens
aggtcctatttcaaa

SEQ ID NO: 83985 - DNA, 15 bp, Homo sapiens
aaggtcctatttcaa

SEQ ID NO: 83986 - DNA, 15 bp, Homo sapiens
taaggtcctatttca

SEQ ID NO: 83987 - DNA, 15 bp, Homo sapiens
ttaaggtcctatttc

SEQ ID NO: 83988 - DNA, 15 bp, Homo sapiens
tttaaggtcctattt

SEQ ID NO: 83989 - DNA, 15 bp, Homo sapiens
ttttaaggtcctatt

SEQ ID NO: 83990 - DNA, 15 bp, Homo sapiens
attttaaggtcctat

SEQ ID NO: 83991 - DNA, 15 bp, Homo sapiens
cattttaaggtccta

SEQ ID NO: 83992 - DNA, 15 bp, Homo sapiens
gcattttaaggtcct

SEQ ID NO: 83993 - DNA, 15 bp, Homo sapiens
tgcattttaaggtcc

SEQ ID NO: 83994 - DNA, 15 bp, Homo sapiens
ctgcattttaaggtc

SEQ ID NO: 83995 - DNA, 15 bp, Homo sapiens
cctgcattttaaggt

SEQ ID NO: 83996 - DNA, 15 bp, Homo sapiens
tcctgcattttaagg

SEQ ID NO: 83997 - DNA, 15 bp, Homo sapiens
ctcctgcattttaag

SEQ ID NO: 83998 - DNA, 15 bp, Homo sapiens
cctcctgcattttaa

SEQ ID NO: 83999 - DNA, 15 bp, Homo sapiens
acctcctgcatttta

SEQ ID NO: 84000 - DNA, 15 bp, Homo sapiens
aacctcctgcatttt

SEQ ID NO: 84001 - DNA, 15 bp, Homo sapiens
caacctcctgcattt

SEQ ID NO: 84002 - DNA, 15 bp, Homo sapiens
tcaacctcctgcatt

SEQ ID NO: 84003 - DNA, 15 bp, Homo sapiens
ctcaacctcctgcat

SEQ ID NO: 84004 - DNA, 15 bp, Homo sapiens
gctcaacctcctgca

SEQ ID NO: 84005 - DNA, 15 bp, Homo sapiens
tgctcaacctcctgc

SEQ ID NO: 84006 - DNA, 15 bp, Homo sapiens
ttgctcaacctcctg

SEQ ID NO: 84007 - DNA, 15 bp, Homo sapiens
cttgctcaacctcct

SEQ ID NO: 84008 - DNA, 15 bp, Homo sapiens
tcttgctcaacctcc

SEQ ID NO: 84009 - DNA, 15 bp, Homo sapiens
ttcttgctcaacctc

SEQ ID NO: 84010 - DNA, 15 bp, Homo sapiens
tttcttgctcaacct

SEQ ID NO: 84011 - DNA, 15 bp, Homo sapiens
ctttcttgctcaacc

SEQ ID NO: 84012 - DNA, 15 bp, Homo sapiens
tctttcttgctcaac

SEQ ID NO: 84013 - DNA, 15 bp, Homo sapiens
ctctttcttgctcaa

SEQ ID NO: 84014 - DNA, 15 bp, Homo sapiens
tctctttcttgctca

SEQ ID NO: 84015 - DNA, 15 bp, Homo sapiens
ttctctttcttgctc

SEQ ID NO: 84016 - DNA, 15 bp, Homo sapiens
cttctctttcttgct

SEQ ID NO: 84017 - DNA, 15 bp, Homo sapiens
ccttctctttcttgc

SEQ ID NO: 84018 - DNA, 15 bp, Homo sapiens
gccttctctttcttg

SEQ ID NO: 84019 - DNA, 15 bp, Homo sapiens
tgccttctctttctt

SEQ ID NO: 84020 - DNA, 15 bp, Homo sapiens
atgccttctctttct

SEQ ID NO: 84021 - DNA, 15 bp, Homo sapiens
catgccttctctttc

SEQ ID NO: 84022 - DNA, 15 bp, Homo sapiens
ccatgccttctcttt

SEQ ID NO: 84023 - DNA, 15 bp, Homo sapiens
cccatgccttctctt

SEQ ID NO: 84024 - DNA, 15 bp, Homo sapiens
tcccatgccttctct

SEQ ID NO: 84025 - DNA, 15 bp, Homo sapiens
ctcccatgccttctc

SEQ ID NO: 84026 - DNA, 15 bp, Homo sapiens
gctcccatgccttct

SEQ ID NO: 84027 - DNA, 15 bp, Homo sapiens
tgctcccatgccttc

SEQ ID NO: 84028 - DNA, 15 bp, Homo sapiens
gtgctcccatgcctt

SEQ ID NO: 84029 - DNA, 15 bp, Homo sapiens
tgtgctcccatgcct

SEQ ID NO: 84030 - DNA, 15 bp, Homo sapiens
ctgtgctcccatgcc

SEQ ID NO: 84031 - DNA, 15 bp, Homo sapiens
cctgtgctcccatgc

SEQ ID NO: 84032 - DNA, 15 bp, Homo sapiens
ccctgtgctcccatg

SEQ ID NO: 84033 - DNA, 15 bp, Homo sapiens
gccctgtgctcccat

SEQ ID NO: 84034 - DNA, 15 bp, Homo sapiens
tgccctgtgctccca

SEQ ID NO: 84035 - DNA, 15 bp, Homo sapiens
ctgccctgtgctccc

SEQ ID NO: 84036 - DNA, 15 bp, Homo sapiens
tctgccctgtgctcc

SEQ ID NO: 84037 - DNA, 15 bp, Homo sapiens
ttctgccctgtgctc

SEQ ID NO: 84038 - DNA, 15 bp, Homo sapiens
gttctgccctgtgct

SEQ ID NO: 84039 - DNA, 15 bp, Homo sapiens
tgttctgccctgtgc

SEQ ID NO: 84040 - DNA, 15 bp, Homo sapiens
ttgttctgccctgtg

SEQ ID NO: 84041 - DNA, 15 bp, Homo sapiens
attgttctgccctgt

SEQ ID NO: 84042 - DNA, 15 bp, Homo sapiens
aattgttctgccctg

SEQ ID NO: 84043 - DNA, 15 bp, Homo sapiens
caattgttctgccct

SEQ ID NO: 84044 - DNA, 15 bp, Homo sapiens
tcaattgttctgccc

SEQ ID NO: 84045 - DNA, 15 bp, Homo sapiens
ttcaattgttctgcc

SEQ ID NO: 84046 - DNA, 15 bp, Homo sapiens
cttcaattgttctgc

SEQ ID NO: 84047 - DNA, 15 bp, Homo sapiens
ccttcaattgttctg

SEQ ID NO: 84048 - DNA, 15 bp, Homo sapiens
accttcaattgttct

SEQ ID NO: 84049 - DNA, 15 bp, Homo sapiens
caccttcaattgttc

SEQ ID NO: 84050 - DNA, 15 bp, Homo sapiens
tcaccttcaattgtt

SEQ ID NO: 84051 - DNA, 15 bp, Homo sapiens
gtcaccttcaattgt

SEQ ID NO: 84052 - DNA, 15 bp, Homo sapiens
tgtcaccttcaattg

SEQ ID NO: 84053 - DNA, 15 bp, Homo sapiens
ctgtcaccttcaatt

SEQ ID NO: 84054 - DNA, 15 bp, Homo sapiens
tctgtcaccttcaat

SEQ ID NO: 84055 - DNA, 15 bp, Homo sapiens
ctctgtcaccttcaa

SEQ ID NO: 84056 - DNA, 15 bp, Homo sapiens
cctctgtcaccttca

SEQ ID NO: 84057 - DNA, 15 bp, Homo sapiens
ccctctgtcaccttc

SEQ ID NO: 84058 - DNA, 15 bp, Homo sapiens
tccctctgtcacctt

SEQ ID NO: 84059 - DNA, 15 bp, Homo sapiens
ttccctctgtcacct

SEQ ID NO: 84060 - DNA, 15 bp, Homo sapiens
tttccctctgtcacc

SEQ ID NO: 84061 - DNA, 15 bp, Homo sapiens
ttttccctctgtcac

SEQ ID NO: 84062 - DNA, 15 bp, Homo sapiens
attttccctctgtca

SEQ ID NO: 84063 - DNA, 15 bp, Homo sapiens
cattttccctctgtc

SEQ ID NO: 84064 - DNA, 15 bp, Homo sapiens
tcattttccctctgt

SEQ ID NO: 84065 - DNA, 15 bp, Homo sapiens
ttcattttccctctg

SEQ ID NO: 84066 - DNA, 15 bp, Homo sapiens
gttcattttccctct

SEQ ID NO: 84067 - DNA, 15 bp, Homo sapiens
tgttcattttccctc

SEQ ID NO: 84068 - DNA, 15 bp, Homo sapiens
ctgttcattttccct

SEQ ID NO: 84069 - DNA, 15 bp, Homo sapiens
tctgttcattttccc

SEQ ID NO: 84070 - DNA, 15 bp, Homo sapiens
ctctgttcattttcc

SEQ ID NO: 84071 - DNA, 15 bp, Homo sapiens
tctctgttcattttc

SEQ ID NO: 84072 - DNA, 15 bp, Homo sapiens
ttctctgttcatttt

SEQ ID NO: 84073 - DNA, 15 bp, Homo sapiens
gttctctgttcattt

SEQ ID NO: 84074 - DNA, 15 bp, Homo sapiens
tgttctctgttcatt

SEQ ID NO: 84075 - DNA, 15 bp, Homo sapiens
gtgttctctgttcat

SEQ ID NO: 84076 - DNA, 15 bp, Homo sapiens
tgtgttctctgttca

SEQ ID NO: 84077 - DNA, 15 bp, Homo sapiens
ttgtgttctctgttc

SEQ ID NO: 84078 - DNA, 15 bp, Homo sapiens
tttgtgttctctgtt

SEQ ID NO: 84079 - DNA, 15 bp, Homo sapiens
ttttgtgttctctgt

SEQ ID NO: 84080 - DNA, 15 bp, Homo sapiens
cttttgtgttctctg

SEQ ID NO: 84081 - DNA, 15 bp, Homo sapiens
ccttttgtgttctct

SEQ ID NO: 84082 - DNA, 15 bp, Homo sapiens
tccttttgtgttctc

SEQ ID NO: 84083 - DNA, 15 bp, Homo sapiens
ttccttttgtgttct

SEQ ID NO: 84084 - DNA, 15 bp, Homo sapiens
tttccttttgtgttc

SEQ ID NO: 84085 - DNA, 15 bp, Homo sapiens
ctttccttttgtgtt

SEQ ID NO: 84086 - DNA, 15 bp, Homo sapiens
cctttccttttgtgt

SEQ ID NO: 84087 - DNA, 15 bp, Homo sapiens
tcctttccttttgtg

SEQ ID NO: 84088 - DNA, 15 bp, Homo sapiens
ctcctttccttttgt

SEQ ID NO: 84089 - DNA, 15 bp, Homo sapiens
cctcctttccttttg

SEQ ID NO: 84090 - DNA, 15 bp, Homo sapiens
tcctcctttcctttt

SEQ ID NO: 84091 - DNA, 15 bp, Homo sapiens
ctcctcctttccttt

SEQ ID NO: 84092 - DNA, 15 bp, Homo sapiens
gctcctcctttcctt

SEQ ID NO: 84093 - DNA, 15 bp, Homo sapiens
tgctcctcctttcct

SEQ ID NO: 84094 - DNA, 15 bp, Homo sapiens
ctgctcctcctttcc

SEQ ID NO: 84095 - DNA, 15 bp, Homo sapiens
tctgctcctcctttc

SEQ ID NO: 84096 - DNA, 15 bp, Homo sapiens
ttctgctcctccttt

SEQ ID NO: 84097 - DNA, 15 bp, Homo sapiens
attctgctcctcctt

SEQ ID NO: 84098 - DNA, 15 bp, Homo sapiens
cattctgctcctcct

SEQ ID NO: 84099 - DNA, 15 bp, Homo sapiens
tcattctgctcctcc

SEQ ID NO: 84100 - DNA, 15 bp, Homo sapiens
ttcattctgctcctc

SEQ ID NO: 84101 - DNA, 15 bp, Homo sapiens
tttcattctgctcct

SEQ ID NO: 84102 - DNA, 15 bp, Homo sapiens
atttcattctgctcc

SEQ ID NO: 84103 - DNA, 15 bp, Homo sapiens
tatttcattctgctc

SEQ ID NO: 84104 - DNA, 15 bp, Homo sapiens
ctatttcattctgct

SEQ ID NO: 84105 - DNA, 15 bp, Homo sapiens
tctatttcattctgc

SEQ ID NO: 84106 - DNA, 15 bp, Homo sapiens
ctctatttcattctg

SEQ ID NO: 84107 - DNA, 15 bp, Homo sapiens
gctctatttcattct

SEQ ID NO: 84108 - DNA, 15 bp, Homo sapiens
tgctctatttcattc

SEQ ID NO: 84109 - DNA, 15 bp, Homo sapiens
gtgctctatttcatt

SEQ ID NO: 84110 - DNA, 15 bp, Homo sapiens
tgtgctctatttcat

SEQ ID NO: 84111 - DNA, 15 bp, Homo sapiens
ctgtgctctatttca

SEQ ID NO: 84112 - DNA, 15 bp, Homo sapiens
cctgtgctctatttc

SEQ ID NO: 84113 - DNA, 15 bp, Homo sapiens
tcctgtgctctattt

SEQ ID NO: 84114 - DNA, 15 bp, Homo sapiens
ttcctgtgctctatt

SEQ ID NO: 84115 - DNA, 15 bp, Homo sapiens
gttcctgtgctctat

SEQ ID NO: 84116 - DNA, 15 bp, Homo sapiens
agttcctgtgctcta

SEQ ID NO: 84117 - DNA, 15 bp, Homo sapiens
cagttcctgtgctct

SEQ ID NO: 84118 - DNA, 15 bp, Homo sapiens
gcagttcctgtgctc

SEQ ID NO: 84119 - DNA, 15 bp, Homo sapiens
cgcagttcctgtgct

SEQ ID NO: 84120 - DNA, 15 bp, Homo sapiens
gcgcagttcctgtgc

SEQ ID NO: 84121 - DNA, 15 bp, Homo sapiens
tgcgcagttcctgtg

SEQ ID NO: 84122 - DNA, 15 bp, Homo sapiens
ctgcgcagttcctgt

SEQ ID NO: 84123 - DNA, 15 bp, Homo sapiens
tctgcgcagttcctg

SEQ ID NO: 84124 - DNA, 15 bp, Homo sapiens
ctctgcgcagttcct

SEQ ID NO: 84125 - DNA, 15 bp, Homo sapiens
tctctgcgcagttcc

SEQ ID NO: 84126 - DNA, 15 bp, Homo sapiens
gtctctgcgcagttc

SEQ ID NO: 84127 - DNA, 15 bp, Homo sapiens
cgtctctgcgcagtt

SEQ ID NO: 84128 - DNA, 15 bp, Homo sapiens
ccgtctctgcgcagt

SEQ ID NO: 84129 - DNA, 15 bp, Homo sapiens
gccgtctctgcgcag

SEQ ID NO: 84130 - DNA, 15 bp, Homo sapiens
ggccgtctctgcgca

SEQ ID NO: 84131 - DNA, 15 bp, Homo sapiens
gggccgtctctgcgc

SEQ ID NO: 84132 - DNA, 15 bp, Homo sapiens
agggccgtctctgcg

SEQ ID NO: 84133 - DNA, 15 bp, Homo sapiens
cagggccgtctctgc

SEQ ID NO: 84134 - DNA, 15 bp, Homo sapiens
ccagggccgtctctg

SEQ ID NO: 84135 - DNA, 15 bp, Homo sapiens
gccagggccgtctct

SEQ ID NO: 84136 - DNA, 15 bp, Homo sapiens
agccagggccgtctc

SEQ ID NO: 84137 - DNA, 15 bp, Homo sapiens
cagccagggccgtct

SEQ ID NO: 84138 - DNA, 15 bp, Homo sapiens
gcagccagggccgtc

SEQ ID NO: 84139 - DNA, 15 bp, Homo sapiens
ggcagccagggccgt

SEQ ID NO: 84140 - DNA, 15 bp, Homo sapiens
cggcagccagggccg

SEQ ID NO: 84141 - DNA, 15 bp, Homo sapiens
tcggcagccagggcc

SEQ ID NO: 84142 - DNA, 15 bp, Homo sapiens
ctcggcagccagggc

SEQ ID NO: 84143 - DNA, 15 bp, Homo sapiens
gctcggcagccaggg

SEQ ID NO: 84144 - DNA, 15 bp, Homo sapiens
agctcggcagccagg

SEQ ID NO: 84145 - DNA, 15 bp, Homo sapiens
gagctcggcagccag

SEQ ID NO: 84146 - DNA, 15 bp, Homo sapiens
agagctcggcagcca

SEQ ID NO: 84147 - DNA, 15 bp, Homo sapiens
gagagctcggcagcc

SEQ ID NO: 84148 - DNA, 15 bp, Homo sapiens
ggagagctcggcagc

SEQ ID NO: 84149 - DNA, 15 bp, Homo sapiens
gggagagctcggcag

SEQ ID NO: 84150 - DNA, 15 bp, Homo sapiens
tgggagagctcggca

SEQ ID NO: 84151 - DNA, 15 bp, Homo sapiens
ctgggagagctcggc

SEQ ID NO: 84152 - DNA, 15 bp, Homo sapiens
tctgggagagctcgg

SEQ ID NO: 84153 - DNA, 15 bp, Homo sapiens
ttctgggagagctcg

SEQ ID NO: 84154 - DNA, 15 bp, Homo sapiens
tttctgggagagctc

SEQ ID NO: 84155 - DNA, 15 bp, Homo sapiens
ttttctgggagagct

SEQ ID NO: 84156 - DNA, 15 bp, Homo sapiens
attttctgggagagc

SEQ ID NO: 84157 - DNA, 15 bp, Homo sapiens
cattttctgggagag

SEQ ID NO: 84158 - DNA, 15 bp, Homo sapiens
ccattttctgggaga

SEQ ID NO: 84159 - DNA, 15 bp, Homo sapiens
tccattttctgggag

SEQ ID NO: 84160 - DNA, 15 bp, Homo sapiens
gtccattttctggga

SEQ ID NO: 84161 - DNA, 15 bp, Homo sapiens
ggtccattttctggg

SEQ ID NO: 84162 - DNA, 15 bp, Homo sapiens
aggtccattttctgg

SEQ ID NO: 84163 - DNA, 15 bp, Homo sapiens
gaggtccattttctg

SEQ ID NO: 84164 - DNA, 15 bp, Homo sapiens
ggaggtccattttct

SEQ ID NO: 84165 - DNA, 15 bp, Homo sapiens
gggaggtccattttc

SEQ ID NO: 84166 - DNA, 15 bp, Homo sapiens
ggggaggtccatttt

SEQ ID NO: 84167 - DNA, 15 bp, Homo sapiens
tggggaggtccattt

SEQ ID NO: 84168 - DNA, 15 bp, Homo sapiens
ctggggaggtccatt

SEQ ID NO: 84169 - DNA, 15 bp, Homo sapiens
cctggggaggtccat

SEQ ID NO: 84170 - DNA, 15 bp, Homo sapiens
gcctggggaggtcca

SEQ ID NO: 84171 - DNA, 15 bp, Homo sapiens
ggcctggggaggtcc

SEQ ID NO: 84172 - DNA, 15 bp, Homo sapiens
gggcctggggaggtc

SEQ ID NO: 84173 - DNA, 15 bp, Homo sapiens
ggggcctggggaggt

SEQ ID NO: 84174 - DNA, 15 bp, Homo sapiens
tggggcctggggagg

SEQ ID NO: 84175 - DNA, 15 bp, Homo sapiens
gtggggcctggggag

SEQ ID NO: 84176 - DNA, 15 bp, Homo sapiens
ggtggggcctgggga

SEQ ID NO: 84177 - DNA, 15 bp, Homo sapiens
aggtggggcctgggg

SEQ ID NO: 84178 - DNA, 15 bp, Homo sapiens
gaggtggggcctggg

SEQ ID NO: 84179 - DNA, 15 bp, Homo sapiens
ggaggtggggcctgg

SEQ ID NO: 84180 - DNA, 15 bp, Homo sapiens
gggaggtggggcctg

SEQ ID NO: 84181 - DNA, 15 bp, Homo sapiens
agggaggtggggcct

SEQ ID NO: 84182 - DNA, 15 bp, Homo sapiens
gagggaggtggggcc

SEQ ID NO: 84183 - DNA, 15 bp, Homo sapiens
ggagggaggtggggc

SEQ ID NO: 84184 - DNA, 15 bp, Homo sapiens
tggagggaggtgggg

SEQ ID NO: 84185 - DNA, 15 bp, Homo sapiens
atggagggaggtggg

SEQ ID NO: 84186 - DNA, 15 bp, Homo sapiens
gatggagggaggtgg

SEQ ID NO: 84187 - DNA, 15 bp, Homo sapiens
tgatggagggaggtg

SEQ ID NO: 84188 - DNA, 15 bp, Homo sapiens
gtgatggagggaggt

SEQ ID NO: 84189 - DNA, 15 bp, Homo sapiens
agtgatggagggagg

SEQ ID NO: 84190 - DNA, 15 bp, Homo sapiens
gagtgatggagggag

SEQ ID NO: 84191 - DNA, 15 bp, Homo sapiens
ggagtgatggaggga

SEQ ID NO: 84192 - DNA, 15 bp, Homo sapiens
gggagtgatggaggg

SEQ ID NO: 84193 - DNA, 15 bp, Homo sapiens
tgggagtgatggagg

SEQ ID NO: 84194 - DNA, 15 bp, Homo sapiens
atgggagtgatggag

SEQ ID NO: 84195 - DNA, 15 bp, Homo sapiens
gatgggagtgatgga

SEQ ID NO: 84196 - DNA, 15 bp, Homo sapiens
ggatgggagtgatgg

SEQ ID NO: 84197 - DNA, 15 bp, Homo sapiens
tggatgggagtgatg

SEQ ID NO: 84198 - DNA, 15 bp, Homo sapiens
gtggatgggagtgat

SEQ ID NO: 84199 - DNA, 15 bp, Homo sapiens
tgtggatgggagtga

SEQ ID NO: 84200 - DNA, 15 bp, Homo sapiens
ttgtggatgggagtg

SEQ ID NO: 84201 - DNA, 15 bp, Homo sapiens
cttgtggatgggagt

SEQ ID NO: 84202 - DNA, 15 bp, Homo sapiens
ccttgtggatgggag

SEQ ID NO: 84203 - DNA, 15 bp, Homo sapiens
accttgtggatggga

SEQ ID NO: 84204 - DNA, 15 bp, Homo sapiens
aaccttgtggatggg

SEQ ID NO: 84205 - DNA, 15 bp, Homo sapiens
aaaccttgtggatgg

SEQ ID NO: 84206 - DNA, 15 bp, Homo sapiens
gaaaccttgtggatg

SEQ ID NO: 84207 - DNA, 15 bp, Homo sapiens
agaaaccttgtggat

SEQ ID NO: 84208 - DNA, 15 bp, Homo sapiens
cagaaaccttgtgga

SEQ ID NO: 84209 - DNA, 15 bp, Homo sapiens
gcagaaaccttgtgg

SEQ ID NO: 84210 - DNA, 15 bp, Homo sapiens
ggcagaaaccttgtg

SEQ ID NO: 84211 - DNA, 15 bp, Homo sapiens
tggcagaaaccttgt

SEQ ID NO: 84212 - DNA, 15 bp, Homo sapiens
gtggcagaaaccttg

SEQ ID NO: 84213 - DNA, 15 bp, Homo sapiens
tgtggcagaaacctt

SEQ ID NO: 84214 - DNA, 15 bp, Homo sapiens
atgtggcagaaacct

SEQ ID NO: 84215 - DNA, 15 bp, Homo sapiens
catgtggcagaaacc

SEQ ID NO: 84216 - DNA, 15 bp, Homo sapiens
acatgtggcagaaac

SEQ ID NO: 84217 - DNA, 15 bp, Homo sapiens
gacatgtggcagaaa

SEQ ID NO: 84218 - DNA, 15 bp, Homo sapiens
tgacatgtggcagaa

SEQ ID NO: 84219 - DNA, 15 bp, Homo sapiens
gtgacatgtggcaga

SEQ ID NO: 84220 - DNA, 15 bp, Homo sapiens
tgtgacatgtggcag

SEQ ID NO: 84221 - DNA, 15 bp, Homo sapiens
ctgtgacatgtggca

SEQ ID NO: 84222 - DNA, 15 bp, Homo sapiens
gctgtgacatgtggc

SEQ ID NO: 84223 - DNA, 15 bp, Homo sapiens
tgctgtgacatgtgg

SEQ ID NO: 84224 - DNA, 15 bp, Homo sapiens
ttgctgtgacatgtg

SEQ ID NO: 84225 - DNA, 15 bp, Homo sapiens
gttgctgtgacatgt

SEQ ID NO: 84226 - DNA, 15 bp, Homo sapiens
tgttgctgtgacatg

SEQ ID NO: 84227 - DNA, 15 bp, Homo sapiens
ttgttgctgtgacat

SEQ ID NO: 84228 - DNA, 15 bp, Homo sapiens
attgttgctgtgaca

SEQ ID NO: 84229 - DNA, 15 bp, Homo sapiens
tattgttgctgtgac

SEQ ID NO: 84230 - DNA, 15 bp, Homo sapiens
atattgttgctgtga

SEQ ID NO: 84231 - DNA, 15 bp, Homo sapiens
catattgttgctgtg

SEQ ID NO: 84232 - DNA, 15 bp, Homo sapiens
ccatattgttgctgt

SEQ ID NO: 84233 - DNA, 15 bp, Homo sapiens
accatattgttgctg

SEQ ID NO: 84234 - DNA, 15 bp, Homo sapiens
taccatattgttgct

SEQ ID NO: 84235 - DNA, 15 bp, Homo sapiens
ttaccatattgttgc

SEQ ID NO: 84236 - DNA, 15 bp, Homo sapiens
gttaccatattgttg

SEQ ID NO: 84237 - DNA, 15 bp, Homo sapiens
ggttaccatattgtt

SEQ ID NO: 84238 - DNA, 15 bp, Homo sapiens
tggttaccatattgt

SEQ ID NO: 84239 - DNA, 15 bp, Homo sapiens
atggttaccatattg

SEQ ID NO: 84240 - DNA, 15 bp, Homo sapiens
tatggttaccatatt

SEQ ID NO: 84241 - DNA, 15 bp, Homo sapiens
atatggttaccatat

SEQ ID NO: 84242 - DNA, 15 bp, Homo sapiens
catatggttaccata

SEQ ID NO: 84243 - DNA, 15 bp, Homo sapiens
gcatatggttaccat

SEQ ID NO: 84244 - DNA, 15 bp, Homo sapiens
ggcatatggttacca

SEQ ID NO: 84245 - DNA, 15 bp, Homo sapiens
gggcatatggttacc

SEQ ID NO: 84246 - DNA, 15 bp, Homo sapiens
ggggcatatggttac

SEQ ID NO: 84247 - DNA, 15 bp, Homo sapiens
cggggcatatggtta

SEQ ID NO: 84248 - DNA, 15 bp, Homo sapiens
tcggggcatatggtt

SEQ ID NO: 84249 - DNA, 15 bp, Homo sapiens
ctcggggcatatggt

SEQ ID NO: 84250 - DNA, 15 bp, Homo sapiens
gctcggggcatatgg

SEQ ID NO: 84251 - DNA, 15 bp, Homo sapiens
ggctcggggcatatg

SEQ ID NO: 84252 - DNA, 15 bp, Homo sapiens
tggctcggggcatat

SEQ ID NO: 84253 - DNA, 15 bp, Homo sapiens
gtggctcggggcata

SEQ ID NO: 84254 - DNA, 15 bp, Homo sapiens
tgtggctcggggcat

SEQ ID NO: 84255 - DNA, 15 bp, Homo sapiens
ttgtggctcggggca

SEQ ID NO: 84256 - DNA, 15 bp, Homo sapiens
tttgtggctcggggc

SEQ ID NO: 84257 - DNA, 15 bp, Homo sapiens
ttttgtggctcgggg

SEQ ID NO: 84258 - DNA, 15 bp, Homo sapiens
cttttgtggctcggg

SEQ ID NO: 84259 - DNA, 15 bp, Homo sapiens
tcttttgtggctcgg

SEQ ID NO: 84260 - DNA, 15 bp, Homo sapiens
ttcttttgtggctcg

SEQ ID NO: 84261 - DNA, 15 bp, Homo sapiens
gttcttttgtggctc

SEQ ID NO: 84262 - DNA, 15 bp, Homo sapiens
agttcttttgtggct

SEQ ID NO: 84263 - DNA, 15 bp, Homo sapiens
tagttcttttgtggc

SEQ ID NO: 84264 - DNA, 15 bp, Homo sapiens
ttagttcttttgtgg

SEQ ID NO: 84265 - DNA, 15 bp, Homo sapiens
tttagttcttttgtg

SEQ ID NO: 84266 - DNA, 15 bp, Homo sapiens
gtttagttcttttgt

SEQ ID NO: 84267 - DNA, 15 bp, Homo sapiens
tgtttagttcttttg

SEQ ID NO: 84268 - DNA, 15 bp, Homo sapiens
gtgtttagttctttt

SEQ ID NO: 84269 - DNA, 15 bp, Homo sapiens
ggtgtttagttcttt

SEQ ID NO: 84270 - DNA, 15 bp, Homo sapiens
aggtgtttagttctt

SEQ ID NO: 84271 - DNA, 15 bp, Homo sapiens
aaggtgtttagttct

SEQ ID NO: 84272 - DNA, 15 bp, Homo sapiens
caaggtgtttagttc

SEQ ID NO: 84273 - DNA, 15 bp, Homo sapiens
ccaaggtgtttagtt

SEQ ID NO: 84274 - DNA, 15 bp, Homo sapiens
tccaaggtgtttagt

SEQ ID NO: 84275 - DNA, 15 bp, Homo sapiens
gtccaaggtgtttag

SEQ ID NO: 84276 - DNA, 15 bp, Homo sapiens
tgtccaaggtgttta

SEQ ID NO: 84277 - DNA, 15 bp, Homo sapiens
ctgtccaaggtgttt

SEQ ID NO: 84278 - DNA, 15 bp, Homo sapiens
tctgtccaaggtgtt

SEQ ID NO: 84279 - DNA, 15 bp, Homo sapiens
ctctgtccaaggtgt

SEQ ID NO: 84280 - DNA, 15 bp, Homo sapiens
gctctgtccaaggtg

SEQ ID NO: 84281 - DNA, 15 bp, Homo sapiens
tgctctgtccaaggt

SEQ ID NO: 84282 - DNA, 15 bp, Homo sapiens
ctgctctgtccaagg

SEQ ID NO: 84283 - DNA, 15 bp, Homo sapiens
actgctctgtccaag

SEQ ID NO: 84284 - DNA, 15 bp, Homo sapiens
aactgctctgtccaa

SEQ ID NO: 84285 - DNA, 15 bp, Homo sapiens
gaactgctctgtcca

SEQ ID NO: 84286 - DNA, 15 bp, Homo sapiens
tgaactgctctgtcc

SEQ ID NO: 84287 - DNA, 15 bp, Homo sapiens
gtgaactgctctgtc

SEQ ID NO: 84288 - DNA, 15 bp, Homo sapiens
ggtgaactgctctgt

SEQ ID NO: 84289 - DNA, 15 bp, Homo sapiens
gggtgaactgctctg

SEQ ID NO: 84290 - DNA, 15 bp, Homo sapiens
tgggtgaactgctct

SEQ ID NO: 84291 - DNA, 15 bp, Homo sapiens
ctgggtgaactgctc

SEQ ID NO: 84292 - DNA, 15 bp, Homo sapiens
tctgggtgaactgct

SEQ ID NO: 84293 - DNA, 15 bp, Homo sapiens
atctgggtgaactgc

SEQ ID NO: 84294 - DNA, 15 bp, Homo sapiens
catctgggtgaactg

SEQ ID NO: 84295 - DNA, 15 bp, Homo sapiens
acatctgggtgaact

SEQ ID NO: 84296 - DNA, 15 bp, Homo sapiens
cacatctgggtgaac

SEQ ID NO: 84297 - DNA, 15 bp, Homo sapiens
gcacatctgggtgaa

SEQ ID NO: 84298 - DNA, 15 bp, Homo sapiens
agcacatctgggtga

SEQ ID NO: 84299 - DNA, 15 bp, Homo sapiens
tagcacatctgggtg

SEQ ID NO: 84300 - DNA, 15 bp, Homo sapiens
ctagcacatctgggt

SEQ ID NO: 84301 - DNA, 15 bp, Homo sapiens
actagcacatctggg

SEQ ID NO: 84302 - DNA, 15 bp, Homo sapiens
aactagcacatctgg

SEQ ID NO: 84303 - DNA, 15 bp, Homo sapiens
caactagcacatctg

SEQ ID NO: 84304 - DNA, 15 bp, Homo sapiens
ccaactagcacatct

SEQ ID NO: 84305 - DNA, 15 bp, Homo sapiens
tccaactagcacatc

SEQ ID NO: 84306 - DNA, 15 bp, Homo sapiens
ttccaactagcacat

SEQ ID NO: 84307 - DNA, 15 bp, Homo sapiens
tttccaactagcaca

SEQ ID NO: 84308 - DNA, 15 bp, Homo sapiens
atttccaactagcac

SEQ ID NO: 84309 - DNA, 15 bp, Homo sapiens
tatttccaactagca

SEQ ID NO: 84310 - DNA, 15 bp, Homo sapiens
gtatttccaactagc

SEQ ID NO: 84311 - DNA, 15 bp, Homo sapiens
agtatttccaactag

SEQ ID NO: 84312 - DNA, 15 bp, Homo sapiens
cagtatttccaacta

SEQ ID NO: 84313 - DNA, 15 bp, Homo sapiens
gcagtatttccaact

SEQ ID NO: 84314 - DNA, 15 bp, Homo sapiens
tgcagtatttccaac

SEQ ID NO: 84315 - DNA, 15 bp, Homo sapiens
gtgcagtatttccaa

SEQ ID NO: 84316 - DNA, 15 bp, Homo sapiens
ggtgcagtatttcca

SEQ ID NO: 84317 - DNA, 15 bp, Homo sapiens
gggtgcagtatttcc

SEQ ID NO: 84318 - DNA, 15 bp, Homo sapiens
agggtgcagtatttc

SEQ ID NO: 84319 - DNA, 15 bp, Homo sapiens
gagggtgcagtattt

SEQ ID NO: 84320 - DNA, 15 bp, Homo sapiens
tgagggtgcagtatt

SEQ ID NO: 84321 - DNA, 15 bp, Homo sapiens
ctgagggtgcagtat

SEQ ID NO: 84322 - DNA, 15 bp, Homo sapiens
cctgagggtgcagta

SEQ ID NO: 84323 - DNA, 15 bp, Homo sapiens
tcctgagggtgcagt

SEQ ID NO: 84324 - DNA, 15 bp, Homo sapiens
gtcctgagggtgcag

SEQ ID NO: 84325 - DNA, 15 bp, Homo sapiens
ggtcctgagggtgca

SEQ ID NO: 84326 - DNA, 15 bp, Homo sapiens
aggtcctgagggtgc

SEQ ID NO: 84327 - DNA, 15 bp, Homo sapiens
caggtcctgagggtg

SEQ ID NO: 84328 - DNA, 15 bp, Homo sapiens
gcaggtcctgagggt

SEQ ID NO: 84329 - DNA, 15 bp, Homo sapiens
agcaggtcctgaggg

SEQ ID NO: 84330 - DNA, 15 bp, Homo sapiens
aagcaggtcctgagg

SEQ ID NO: 84331 - DNA, 15 bp, Homo sapiens
gaagcaggtcctgag

SEQ ID NO: 84332 - DNA, 15 bp, Homo sapiens
ggaagcaggtcctga

SEQ ID NO: 84333 - DNA, 15 bp, Homo sapiens
aggaagcaggtcctg

SEQ ID NO: 84334 - DNA, 15 bp, Homo sapiens
caggaagcaggtcct

SEQ ID NO: 84335 - DNA, 15 bp, Homo sapiens
tcaggaagcaggtcc

SEQ ID NO: 84336 - DNA, 15 bp, Homo sapiens
gtcaggaagcaggtc

SEQ ID NO: 84337 - DNA, 15 bp, Homo sapiens
agtcaggaagcaggt

SEQ ID NO: 84338 - DNA, 15 bp, Homo sapiens
aagtcaggaagcagg

SEQ ID NO: 84339 - DNA, 15 bp, Homo sapiens
caagtcaggaagcag

SEQ ID NO: 84340 - DNA, 15 bp, Homo sapiens
tcaagtcaggaagca

SEQ ID NO: 84341 - DNA, 15 bp, Homo sapiens
atcaagtcaggaagc

SEQ ID NO: 84342 - DNA, 15 bp, Homo sapiens
catcaagtcaggaag

SEQ ID NO: 84343 - DNA, 15 bp, Homo sapiens
ccatcaagtcaggaa

SEQ ID NO: 84344 - DNA, 15 bp, Homo sapiens
cccatcaagtcagga

SEQ ID NO: 84345 - DNA, 15 bp, Homo sapiens
gcccatcaagtcagg

SEQ ID NO: 84346 - DNA, 15 bp, Homo sapiens
ggcccatcaagtcag

SEQ ID NO: 84347 - DNA, 15 bp, Homo sapiens
aggcccatcaagtca

SEQ ID NO: 84348 - DNA, 15 bp, Homo sapiens
caggcccatcaagtc

SEQ ID NO: 84349 - DNA, 15 bp, Homo sapiens
tcaggcccatcaagt

SEQ ID NO: 84350 - DNA, 15 bp, Homo sapiens
ctcaggcccatcaag

SEQ ID NO: 84351 - DNA, 15 bp, Homo sapiens
cctcaggcccatcaa

SEQ ID NO: 84352 - DNA, 15 bp, Homo sapiens
acctcaggcccatca

SEQ ID NO: 84353 - DNA, 15 bp, Homo sapiens
gacctcaggcccatc

SEQ ID NO: 84354 - DNA, 15 bp, Homo sapiens
tgacctcaggcccat

SEQ ID NO: 84355 - DNA, 15 bp, Homo sapiens
gtgacctcaggccca

SEQ ID NO: 84356 - DNA, 15 bp, Homo sapiens
ggtgacctcaggccc

SEQ ID NO: 84357 - DNA, 15 bp, Homo sapiens
tggtgacctcaggcc

SEQ ID NO: 84358 - DNA, 15 bp, Homo sapiens
ttggtgacctcaggc

SEQ ID NO: 84359 - DNA, 15 bp, Homo sapiens
cttggtgacctcagg

SEQ ID NO: 84360 - DNA, 15 bp, Homo sapiens
gcttggtgacctcag

SEQ ID NO: 84361 - DNA, 15 bp, Homo sapiens
tgcttggtgacctca

SEQ ID NO: 84362 - DNA, 15 bp, Homo sapiens
atgcttggtgacctc

SEQ ID NO: 84363 - DNA, 15 bp, Homo sapiens
catgcttggtgacct

SEQ ID NO: 84364 - DNA, 15 bp, Homo sapiens
ccatgcttggtgacc

SEQ ID NO: 84365 - DNA, 15 bp, Homo sapiens
gccatgcttggtgac

SEQ ID NO: 84366 - DNA, 15 bp, Homo sapiens
agccatgcttggtga

SEQ ID NO: 84367 - DNA, 15 bp, Homo sapiens
gagccatgcttggtg

SEQ ID NO: 84368 - DNA, 15 bp, Homo sapiens
tgagccatgcttggt

SEQ ID NO: 84369 - DNA, 15 bp, Homo sapiens
ctgagccatgcttgg

SEQ ID NO: 84370 - DNA, 15 bp, Homo sapiens
gctgagccatgcttg

SEQ ID NO: 84371 - DNA, 15 bp, Homo sapiens
ggctgagccatgctt

SEQ ID NO: 84372 - DNA, 15 bp, Homo sapiens
cggctgagccatgct

SEQ ID NO: 84373 - DNA, 15 bp, Homo sapiens
acggctgagccatgc

SEQ ID NO: 84374 - DNA, 15 bp, Homo sapiens
cacggctgagccatg

SEQ ID NO: 84375 - DNA, 15 bp, Homo sapiens
tcacggctgagccat

SEQ ID NO: 84376 - DNA, 15 bp, Homo sapiens
ttcacggctgagcca

SEQ ID NO: 84377 - DNA, 15 bp, Homo sapiens
attcacggctgagcc

SEQ ID NO: 84378 - DNA, 15 bp, Homo sapiens
gattcacggctgagc

SEQ ID NO: 84379 - DNA, 15 bp, Homo sapiens
tgattcacggctgag

SEQ ID NO: 84380 - DNA, 15 bp, Homo sapiens
gtgattcacggctga

SEQ ID NO: 84381 - DNA, 15 bp, Homo sapiens
cgtgattcacggctg

SEQ ID NO: 84382 - DNA, 15 bp, Homo sapiens
ccgtgattcacggct

SEQ ID NO: 84383 - DNA, 15 bp, Homo sapiens
tccgtgattcacggc

SEQ ID NO: 84384 - DNA, 15 bp, Homo sapiens
ttccgtgattcacgg

SEQ ID NO: 84385 - DNA, 15 bp, Homo sapiens
tttccgtgattcacg

SEQ ID NO: 84386 - DNA, 15 bp, Homo sapiens
ttttccgtgattcac

SEQ ID NO: 84387 - DNA, 15 bp, Homo sapiens
cttttccgtgattca

SEQ ID NO: 84388 - DNA, 15 bp, Homo sapiens
tcttttccgtgattc

SEQ ID NO: 84389 - DNA, 15 bp, Homo sapiens
ttcttttccgtgatt

SEQ ID NO: 84390 - DNA, 15 bp, Homo sapiens
cttcttttccgtgat

SEQ ID NO: 84391 - DNA, 15 bp, Homo sapiens
gcttcttttccgtga

SEQ ID NO: 84392 - DNA, 15 bp, Homo sapiens
cgcttcttttccgtg

SEQ ID NO: 84393 - DNA, 15 bp, Homo sapiens
ccgcttcttttccgt

SEQ ID NO: 84394 - DNA, 15 bp, Homo sapiens
gccgcttcttttccg

SEQ ID NO: 84395 - DNA, 15 bp, Homo sapiens
ggccgcttcttttcc

SEQ ID NO: 84396 - DNA, 15 bp, Homo sapiens
tggccgcttcttttc

SEQ ID NO: 84397 - DNA, 15 bp, Homo sapiens
atggccgcttctttt

SEQ ID NO: 84398 - DNA, 15 bp, Homo sapiens
aatggccgcttcttt

SEQ ID NO: 84399 - DNA, 15 bp, Homo sapiens
taatggccgcttctt

SEQ ID NO: 84400 - DNA, 15 bp, Homo sapiens
ttaatggccgcttct

SEQ ID NO: 84401 - DNA, 15 bp, Homo sapiens
cttaatggccgcttc

SEQ ID NO: 84402 - DNA, 15 bp, Homo sapiens
tcttaatggccgctt

SEQ ID NO: 84403 - DNA, 15 bp, Homo sapiens
ctcttaatggccgct

SEQ ID NO: 84404 - DNA, 15 bp, Homo sapiens
gctcttaatggccgc

SEQ ID NO: 84405 - DNA, 15 bp, Homo sapiens
agctcttaatggccg

SEQ ID NO: 84406 - DNA, 15 bp, Homo sapiens
cagctcttaatggcc

SEQ ID NO: 84407 - DNA, 15 bp, Homo sapiens
ccagctcttaatggc

SEQ ID NO: 84408 - DNA, 15 bp, Homo sapiens
tccagctcttaatgg

SEQ ID NO: 84409 - DNA, 15 bp, Homo sapiens
ttccagctcttaatg

SEQ ID NO: 84410 - DNA, 15 bp, Homo sapiens
tttccagctcttaat

SEQ ID NO: 84411 - DNA, 15 bp, Homo sapiens
ttttccagctcttaa

SEQ ID NO: 84412 - DNA, 15 bp, Homo sapiens
gttttccagctctta

SEQ ID NO: 84413 - DNA, 15 bp, Homo sapiens
cgttttccagctctt

SEQ ID NO: 84414 - DNA, 15 bp, Homo sapiens
ccgttttccagctct

SEQ ID NO: 84415 - DNA, 15 bp, Homo sapiens
tccgttttccagctc

SEQ ID NO: 84416 - DNA, 15 bp, Homo sapiens
atccgttttccagct

SEQ ID NO: 84417 - DNA, 15 bp, Homo sapiens
aatccgttttccagc

SEQ ID NO: 84418 - DNA, 15 bp, Homo sapiens
gaatccgttttccag

SEQ ID NO: 84419 - DNA, 15 bp, Homo sapiens
tgaatccgttttcca

SEQ ID NO: 84420 - DNA, 15 bp, Homo sapiens
ctgaatccgttttcc

SEQ ID NO: 84421 - DNA, 15 bp, Homo sapiens
cctgaatccgttttc

SEQ ID NO: 84422 - DNA, 15 bp, Homo sapiens
ccctgaatccgtttt

SEQ ID NO: 84423 - DNA, 15 bp, Homo sapiens
accctgaatccgttt

SEQ ID NO: 84424 - DNA, 15 bp, Homo sapiens
gaccctgaatccgtt

SEQ ID NO: 84425 - DNA, 15 bp, Homo sapiens
agaccctgaatccgt

SEQ ID NO: 84426 - DNA, 15 bp, Homo sapiens
gagaccctgaatccg

SEQ ID NO: 84427 - DNA, 15 bp, Homo sapiens
ggagaccctgaatcc

SEQ ID NO: 84428 - DNA, 15 bp, Homo sapiens
gggagaccctgaatc

SEQ ID NO: 84429 - DNA, 15 bp, Homo sapiens
ggggagaccctgaat

SEQ ID NO: 84430 - DNA, 15 bp, Homo sapiens
aggggagaccctgaa

SEQ ID NO: 84431 - DNA, 15 bp, Homo sapiens
caggggagaccctga

SEQ ID NO: 84432 - DNA, 15 bp, Homo sapiens
acaggggagaccctg

SEQ ID NO: 84433 - DNA, 15 bp, Homo sapiens
gacaggggagaccct

SEQ ID NO: 84434 - DNA, 15 bp, Homo sapiens
ggacaggggagaccc

SEQ ID NO: 84435 - DNA, 15 bp, Homo sapiens
gggacaggggagacc

SEQ ID NO: 84436 - DNA, 15 bp, Homo sapiens
ggggacaggggagac

SEQ ID NO: 84437 - DNA, 15 bp, Homo sapiens
tggggacaggggaga

SEQ ID NO: 84438 - DNA, 15 bp, Homo sapiens
atggggacaggggag

SEQ ID NO: 84439 - DNA, 15 bp, Homo sapiens
catggggacagggga

SEQ ID NO: 84440 - DNA, 15 bp, Homo sapiens
gcatggggacagggg

SEQ ID NO: 84441 - DNA, 15 bp, Homo sapiens
ggcatggggacaggg

SEQ ID NO: 84442 - DNA, 15 bp, Homo sapiens
gggcatggggacagg

SEQ ID NO: 84443 - DNA, 15 bp, Homo sapiens
agggcatggggacag

SEQ ID NO: 84444 - DNA, 15 bp, Homo sapiens
cagggcatggggaca

SEQ ID NO: 84445 - DNA, 15 bp, Homo sapiens
tcagggcatggggac

SEQ ID NO: 84446 - DNA, 15 bp, Homo sapiens
ctcagggcatgggga

SEQ ID NO: 84447 - DNA, 15 bp, Homo sapiens
tctcagggcatgggg

SEQ ID NO: 84448 - DNA, 15 bp, Homo sapiens
ctctcagggcatggg

SEQ ID NO: 84449 - DNA, 15 bp, Homo sapiens
cctctcagggcatgg

SEQ ID NO: 84450 - DNA, 15 bp, Homo sapiens
tcctctcagggcatg

SEQ ID NO: 84451 - DNA, 15 bp, Homo sapiens
ttcctctcagggcat

SEQ ID NO: 84452 - DNA, 15 bp, Homo sapiens
tttcctctcagggca

SEQ ID NO: 84453 - DNA, 15 bp, Homo sapiens
gtttcctctcagggc

SEQ ID NO: 84454 - DNA, 15 bp, Homo sapiens
cgtttcctctcaggg

SEQ ID NO: 84455 - DNA, 15 bp, Homo sapiens
tcgtttcctctcagg

SEQ ID NO: 84456 - DNA, 15 bp, Homo sapiens
ttcgtttcctctcag

SEQ ID NO: 84457 - DNA, 15 bp, Homo sapiens
tttcgtttcctctca

SEQ ID NO: 84458 - DNA, 15 bp, Homo sapiens
atttcgtttcctctc

SEQ ID NO: 84459 - DNA, 15 bp, Homo sapiens
tatttcgtttcctct

SEQ ID NO: 84460 - DNA, 15 bp, Homo sapiens
ttatttcgtttcctc

SEQ ID NO: 84461 - DNA, 15 bp, Homo sapiens
tttatttcgtttcct

SEQ ID NO: 84462 - DNA, 15 bp, Homo sapiens
ttttatttcgtttcc

SEQ ID NO: 84463 - DNA, 15 bp, Homo sapiens
attttatttcgtttc

SEQ ID NO: 84464 - DNA, 15 bp, Homo sapiens
cattttatttcgttt

SEQ ID NO: 84465 - DNA, 15 bp, Homo sapiens
ccattttatttcgtt

SEQ ID NO: 84466 - DNA, 15 bp, Homo sapiens
tccattttatttcgt

SEQ ID NO: 84467 - DNA, 15 bp, Homo sapiens
atccattttatttcg

SEQ ID NO: 84468 - DNA, 15 bp, Homo sapiens
catccattttatttc

SEQ ID NO: 84469 - DNA, 15 bp, Homo sapiens
gcatccattttattt

SEQ ID NO: 84470 - DNA, 15 bp, Homo sapiens
tgcatccattttatt

SEQ ID NO: 84471 - DNA, 15 bp, Homo sapiens
gtgcatccattttat

SEQ ID NO: 84472 - DNA, 15 bp, Homo sapiens
cgtgcatccatttta

SEQ ID NO: 84473 - DNA, 15 bp, Homo sapiens
gcgtgcatccatttt

SEQ ID NO: 84474 - DNA, 15 bp, Homo sapiens
ggcgtgcatccattt

SEQ ID NO: 84475 - DNA, 15 bp, Homo sapiens
aggcgtgcatccatt

SEQ ID NO: 84476 - DNA, 15 bp, Homo sapiens
gaggcgtgcatccat

SEQ ID NO: 84477 - DNA, 15 bp, Homo sapiens
tgaggcgtgcatcca

SEQ ID NO: 84478 - DNA, 15 bp, Homo sapiens
atgaggcgtgcatcc

SEQ ID NO: 84479 - DNA, 15 bp, Homo sapiens
gatgaggcgtgcatc

SEQ ID NO: 84480 - DNA, 15 bp, Homo sapiens
agatgaggcgtgcat

SEQ ID NO: 84481 - DNA, 15 bp, Homo sapiens
cagatgaggcgtgca

SEQ ID NO: 84482 - DNA, 15 bp, Homo sapiens
acagatgaggcgtgc

SEQ ID NO: 84483 - DNA, 15 bp, Homo sapiens
cacagatgaggcgtg

SEQ ID NO: 84484 - DNA, 15 bp, Homo sapiens
gcacagatgaggcgt

SEQ ID NO: 84485 - DNA, 15 bp, Homo sapiens
cgcacagatgaggcg

SEQ ID NO: 84486 - DNA, 15 bp, Homo sapiens
acgcacagatgaggc

SEQ ID NO: 84487 - DNA, 15 bp, Homo sapiens
gacgcacagatgagg

SEQ ID NO: 84488 - DNA, 15 bp, Homo sapiens
cgacgcacagatgag

SEQ ID NO: 84489 - DNA, 15 bp, Homo sapiens
tcgacgcacagatga

SEQ ID NO: 84490 - DNA, 15 bp, Homo sapiens
ctcgacgcacagatg

SEQ ID NO: 84491 - DNA, 15 bp, Homo sapiens
actcgacgcacagat

SEQ ID NO: 84492 - DNA, 15 bp, Homo sapiens
aactcgacgcacaga

SEQ ID NO: 84493 - DNA, 15 bp, Homo sapiens
caactcgacgcacag

SEQ ID NO: 84494 - DNA, 15 bp, Homo sapiens
tcaactcgacgcaca

SEQ ID NO: 84495 - DNA, 15 bp, Homo sapiens
ttcaactcgacgcac

SEQ ID NO: 84496 - DNA, 15 bp, Homo sapiens
cttcaactcgacgca

SEQ ID NO: 84497 - DNA, 15 bp, Homo sapiens
gcttcaactcgacgc

SEQ ID NO: 84498 - DNA, 15 bp, Homo sapiens
cgcttcaactcgacg

SEQ ID NO: 84499 - DNA, 15 bp, Homo sapiens
ccgcttcaactcgac

SEQ ID NO: 84500 - DNA, 15 bp, Homo sapiens
gccgcttcaactcga

SEQ ID NO: 84501 - DNA, 15 bp, Homo sapiens
tgccgcttcaactcg

SEQ ID NO: 84502 - DNA, 15 bp, Homo sapiens
atgccgcttcaactc

SEQ ID NO: 84503 - DNA, 15 bp, Homo sapiens
aatgccgcttcaact

SEQ ID NO: 84504 - DNA, 15 bp, Homo sapiens
gaatgccgcttcaac

SEQ ID NO: 84505 - DNA, 15 bp, Homo sapiens
agaatgccgcttcaa

SEQ ID NO: 84506 - DNA, 15 bp, Homo sapiens
aagaatgccgcttca

SEQ ID NO: 84507 - DNA, 15 bp, Homo sapiens
aaagaatgccgcttc

SEQ ID NO: 84508 - DNA, 15 bp, Homo sapiens
aaaagaatgccgctt

SEQ ID NO: 84509 - DNA, 15 bp, Homo sapiens
gaaaagaatgccgct

SEQ ID NO: 84510 - DNA, 15 bp, Homo sapiens
agaaaagaatgccgc

SEQ ID NO: 84511 - DNA, 15 bp, Homo sapiens
cagaaaagaatgccg

SEQ ID NO: 84512 - DNA, 15 bp, Homo sapiens
ccagaaaagaatgcc

SEQ ID NO: 84513 - DNA, 15 bp, Homo sapiens
gccagaaaagaatgc

SEQ ID NO: 84514 - DNA, 15 bp, Homo sapiens
agccagaaaagaatg

SEQ ID NO: 84515 - DNA, 15 bp, Homo sapiens
cagccagaaaagaat

SEQ ID NO: 84516 - DNA, 15 bp, Homo sapiens
gcagccagaaaagaa

SEQ ID NO: 84517 - DNA, 15 bp, Homo sapiens
agcagccagaaaaga

SEQ ID NO: 84518 - DNA, 15 bp, Homo sapiens
cagcagccagaaaag

SEQ ID NO: 84519 - DNA, 15 bp, Homo sapiens
gcagcagccagaaaa

SEQ ID NO: 84520 - DNA, 15 bp, Homo sapiens
ggcagcagccagaaa

SEQ ID NO: 84521 - DNA, 15 bp, Homo sapiens
tggcagcagccagaa

SEQ ID NO: 84522 - DNA, 15 bp, Homo sapiens
ctggcagcagccaga

SEQ ID NO: 84523 - DNA, 15 bp, Homo sapiens
actggcagcagccag

SEQ ID NO: 84524 - DNA, 15 bp, Homo sapiens
gactggcagcagcca

SEQ ID NO: 84525 - DNA, 15 bp, Homo sapiens
tgactggcagcagcc

SEQ ID NO: 84526 - DNA, 15 bp, Homo sapiens
gtgactggcagcagc

SEQ ID NO: 84527 - DNA, 15 bp, Homo sapiens
tgtgactggcagcag

SEQ ID NO: 84528 - DNA, 15 bp, Homo sapiens
gtgtgactggcagca

SEQ ID NO: 84529 - DNA, 15 bp, Homo sapiens
tgtgtgactggcagc

SEQ ID NO: 84530 - DNA, 15 bp, Homo sapiens
ttgtgtgactggcag

SEQ ID NO: 84531 - DNA, 15 bp, Homo sapiens
tttgtgtgactggca

SEQ ID NO: 84532 - DNA, 15 bp, Homo sapiens
ctttgtgtgactggc

SEQ ID NO: 84533 - DNA, 15 bp, Homo sapiens
gctttgtgtgactgg

SEQ ID NO: 84534 - DNA, 15 bp, Homo sapiens
cgctttgtgtgactg

SEQ ID NO: 84535 - DNA, 15 bp, Homo sapiens
acgctttgtgtgact

SEQ ID NO: 84536 - DNA, 15 bp, Homo sapiens
gacgctttgtgtgac

SEQ ID NO: 84537 - DNA, 15 bp, Homo sapiens
ggacgctttgtgtga

SEQ ID NO: 84538 - DNA, 15 bp, Homo sapiens
gggacgctttgtgtg

SEQ ID NO: 84539 - DNA, 15 bp, Homo sapiens
cgggacgctttgtgt

SEQ ID NO: 84540 - DNA, 15 bp, Homo sapiens
ccgggacgctttgtg

SEQ ID NO: 84541 - DNA, 15 bp, Homo sapiens
gccgggacgctttgt

SEQ ID NO: 84542 - DNA, 15 bp, Homo sapiens
agccgggacgctttg

SEQ ID NO: 84543 - DNA, 15 bp, Homo sapiens
aagccgggacgcttt

SEQ ID NO: 84544 - DNA, 15 bp, Homo sapiens
caagccgggacgctt

SEQ ID NO: 84545 - DNA, 15 bp, Homo sapiens
acaagccgggacgct

SEQ ID NO: 84546 - DNA, 15 bp, Homo sapiens
cacaagccgggacgc

SEQ ID NO: 84547 - DNA, 15 bp, Homo sapiens
acacaagccgggacg

SEQ ID NO: 84548 - DNA, 15 bp, Homo sapiens
cacacaagccgggac

SEQ ID NO: 84549 - DNA, 15 bp, Homo sapiens
gcacacaagccggga

SEQ ID NO: 84550 - DNA, 15 bp, Homo sapiens
cgcacacaagccggg

SEQ ID NO: 84551 - DNA, 15 bp, Homo sapiens
acgcacacaagccgg

SEQ ID NO: 84552 - DNA, 15 bp, Homo sapiens
cacgcacacaagccg

SEQ ID NO: 84553 - DNA, 15 bp, Homo sapiens
tcacgcacacaagcc

SEQ ID NO: 84554 - DNA, 15 bp, Homo sapiens
ctcacgcacacaagc

SEQ ID NO: 84555 - DNA, 15 bp, Homo sapiens
cctcacgcacacaag

SEQ ID NO: 84556 - DNA, 15 bp, Homo sapiens
gcctcacgcacacaa

SEQ ID NO: 84557 - DNA, 15 bp, Homo sapiens
tgcctcacgcacaca

SEQ ID NO: 84558 - DNA, 15 bp, Homo sapiens
ctgcctcacgcacac

SEQ ID NO: 84559 - DNA, 15 bp, Homo sapiens
cctgcctcacgcaca

SEQ ID NO: 84560 - DNA, 15 bp, Homo sapiens
tcctgcctcacgcac

SEQ ID NO: 84561 - DNA, 15 bp, Homo sapiens
gtcctgcctcacgca

SEQ ID NO: 84562 - DNA, 15 bp, Homo sapiens
cgtcctgcctcacgc

SEQ ID NO: 84563 - DNA, 15 bp, Homo sapiens
acgtcctgcctcacg

SEQ ID NO: 84564 - DNA, 15 bp, Homo sapiens
gacgtcctgcctcac

SEQ ID NO: 84565 - DNA, 15 bp, Homo sapiens
ggacgtcctgcctca

SEQ ID NO: 84566 - DNA, 15 bp, Homo sapiens
aggacgtcctgcctc

SEQ ID NO: 84567 - DNA, 15 bp, Homo sapiens
aaggacgtcctgcct

SEQ ID NO: 84568 - DNA, 15 bp, Homo sapiens
caaggacgtcctgcc

SEQ ID NO: 84569 - DNA, 15 bp, Homo sapiens
gcaaggacgtcctgc

SEQ ID NO: 84570 - DNA, 15 bp, Homo sapiens
agcaaggacgtcctg

SEQ ID NO: 84571 - DNA, 15 bp, Homo sapiens
aagcaaggacgtcct

SEQ ID NO: 84572 - DNA, 15 bp, Homo sapiens
gaagcaaggacgtcc

SEQ ID NO: 84573 - DNA, 15 bp, Homo sapiens
cgaagcaaggacgtc

SEQ ID NO: 84574 - DNA, 15 bp, Homo sapiens
gcgaagcaaggacgt

SEQ ID NO: 84575 - DNA, 15 bp, Homo sapiens
tgcgaagcaaggacg

SEQ ID NO: 84576 - DNA, 15 bp, Homo sapiens
ttgcgaagcaaggac

SEQ ID NO: 84577 - DNA, 15 bp, Homo sapiens
cttgcgaagcaagga

SEQ ID NO: 84578 - DNA, 15 bp, Homo sapiens
ccttgcgaagcaagg

SEQ ID NO: 84579 - DNA, 15 bp, Homo sapiens
gccttgcgaagcaag

SEQ ID NO: 84580 - DNA, 15 bp, Homo sapiens
agccttgcgaagcaa

SEQ ID NO: 84581 - DNA, 15 bp, Homo sapiens
cagccttgcgaagca

SEQ ID NO: 84582 - DNA, 15 bp, Homo sapiens
tcagccttgcgaagc

SEQ ID NO: 84583 - DNA, 15 bp, Homo sapiens
atcagccttgcgaag

SEQ ID NO: 84584 - DNA, 15 bp, Homo sapiens
aatcagccttgcgaa

SEQ ID NO: 84585 - DNA, 15 bp, Homo sapiens
aaatcagccttgcga

SEQ ID NO: 84586 - DNA, 15 bp, Homo sapiens
aaaatcagccttgcg

SEQ ID NO: 84587 - DNA, 15 bp, Homo sapiens
caaaatcagccttgc

SEQ ID NO: 84588 - DNA, 15 bp, Homo sapiens
gcaaaatcagccttg

SEQ ID NO: 84589 - DNA, 15 bp, Homo sapiens
ggcaaaatcagcctt

SEQ ID NO: 84590 - DNA, 15 bp, Homo sapiens
aggcaaaatcagcct

SEQ ID NO: 84591 - DNA, 15 bp, Homo sapiens
aaggcaaaatcagcc

SEQ ID NO: 84592 - DNA, 15 bp, Homo sapiens
gaaggcaaaatcagc

SEQ ID NO: 84593 - DNA, 15 bp, Homo sapiens
cgaaggcaaaatcag

SEQ ID NO: 84594 - DNA, 15 bp, Homo sapiens
acgaaggcaaaatca

SEQ ID NO: 84595 - DNA, 15 bp, Homo sapiens
gacgaaggcaaaatc

SEQ ID NO: 84596 - DNA, 15 bp, Homo sapiens
ggacgaaggcaaaat

SEQ ID NO: 84597 - DNA, 15 bp, Homo sapiens
gggacgaaggcaaaa

SEQ ID NO: 84598 - DNA, 15 bp, Homo sapiens
ggggacgaaggcaaa

SEQ ID NO: 84599 - DNA, 15 bp, Homo sapiens
gggggacgaaggcaa

SEQ ID NO: 84600 - DNA, 15 bp, Homo sapiens
agggggacgaaggca

SEQ ID NO: 84601 - DNA, 15 bp, Homo sapiens
cagggggacgaaggc

SEQ ID NO: 84602 - DNA, 15 bp, Homo sapiens
gcagggggacgaagg

SEQ ID NO: 84603 - DNA, 15 bp, Homo sapiens
ggcagggggacgaag

SEQ ID NO: 84604 - DNA, 15 bp, Homo sapiens
tggcagggggacgaa

SEQ ID NO: 84605 - DNA, 15 bp, Homo sapiens
ctggcagggggacga

SEQ ID NO: 84606 - DNA, 15 bp, Homo sapiens
cctggcagggggacg

SEQ ID NO: 84607 - DNA, 15 bp, Homo sapiens
gcctggcagggggac

SEQ ID NO: 84608 - DNA, 15 bp, Homo sapiens
agcctggcaggggga

SEQ ID NO: 84609 - DNA, 15 bp, Homo sapiens
cagcctggcaggggg

SEQ ID NO: 84610 - DNA, 15 bp, Homo sapiens
gcagcctggcagggg

SEQ ID NO: 84611 - DNA, 15 bp, Homo sapiens
agcagcctggcaggg

SEQ ID NO: 84612 - DNA, 15 bp, Homo sapiens
gagcagcctggcagg

SEQ ID NO: 84613 - DNA, 15 bp, Homo sapiens
agagcagcctggcag

SEQ ID NO: 84614 - DNA, 15 bp, Homo sapiens
gagagcagcctggca

SEQ ID NO: 84615 - DNA, 15 bp, Homo sapiens
agagagcagcctggc

SEQ ID NO: 84616 - DNA, 15 bp, Homo sapiens
cagagagcagcctgg

SEQ ID NO: 84617 - DNA, 15 bp, Homo sapiens
ccagagagcagcctg

SEQ ID NO: 84618 - DNA, 15 bp, Homo sapiens
cccagagagcagcct

SEQ ID NO: 84619 - DNA, 15 bp, Homo sapiens
acccagagagcagcc

SEQ ID NO: 84620 - DNA, 15 bp, Homo sapiens
cacccagagagcagc

SEQ ID NO: 84621 - DNA, 15 bp, Homo sapiens
acacccagagagcag

SEQ ID NO: 84622 - DNA, 15 bp, Homo sapiens
aacacccagagagca

SEQ ID NO: 84623 - DNA, 15 bp, Homo sapiens
caacacccagagagc

SEQ ID NO: 84624 - DNA, 15 bp, Homo sapiens
gcaacacccagagag

SEQ ID NO: 84625 - DNA, 15 bp, Homo sapiens
agcaacacccagaga

SEQ ID NO: 84626 - DNA, 15 bp, Homo sapiens
cagcaacacccagag

SEQ ID NO: 84627 - DNA, 15 bp, Homo sapiens
ccagcaacacccaga

SEQ ID NO: 84628 - DNA, 15 bp, Homo sapiens
tccagcaacacccag

SEQ ID NO: 84629 - DNA, 15 bp, Homo sapiens
ttccagcaacaccca

SEQ ID NO: 84630 - DNA, 15 bp, Homo sapiens
cttccagcaacaccc

SEQ ID NO: 84631 - DNA, 15 bp, Homo sapiens
ccttccagcaacacc

SEQ ID NO: 84632 - DNA, 15 bp, Homo sapiens
cccttccagcaacac

SEQ ID NO: 84633 - DNA, 15 bp, Homo sapiens
tcccttccagcaaca

SEQ ID NO: 84634 - DNA, 15 bp, Homo sapiens
ctcccttccagcaac

SEQ ID NO: 84635 - DNA, 15 bp, Homo sapiens
actcccttccagcaa

SEQ ID NO: 84636 - DNA, 15 bp, Homo sapiens
cactcccttccagca

SEQ ID NO: 84637 - DNA, 15 bp, Homo sapiens
tcactcccttccagc

SEQ ID NO: 84638 - DNA, 15 bp, Homo sapiens
ttcactcccttccag

SEQ ID NO: 84639 - DNA, 15 bp, Homo sapiens
cttcactcccttcca

SEQ ID NO: 84640 - DNA, 15 bp, Homo sapiens
gcttcactcccttcc

SEQ ID NO: 84641 - DNA, 15 bp, Homo sapiens
ggcttcactcccttc

SEQ ID NO: 84642 - DNA, 15 bp, Homo sapiens
gggcttcactccctt

SEQ ID NO: 84643 - DNA, 15 bp, Homo sapiens
ggggcttcactccct

SEQ ID NO: 84644 - DNA, 15 bp, Homo sapiens
gggggcttcactccc

SEQ ID NO: 84645 - DNA, 15 bp, Homo sapiens
ggggggcttcactcc

SEQ ID NO: 84646 - DNA, 15 bp, Homo sapiens
gggggggcttcactc

SEQ ID NO: 84647 - DNA, 15 bp, Homo sapiens
tgggggggcttcact

SEQ ID NO: 84648 - DNA, 15 bp, Homo sapiens
atgggggggcttcac

SEQ ID NO: 84649 - DNA, 15 bp, Homo sapiens
tatgggggggcttca

SEQ ID NO: 84650 - DNA, 15 bp, Homo sapiens
atatgggggggcttc

SEQ ID NO: 84651 - DNA, 15 bp, Homo sapiens
catatgggggggctt

SEQ ID NO: 84652 - DNA, 15 bp, Homo sapiens
gcatatgggggggct

SEQ ID NO: 84653 - DNA, 15 bp, Homo sapiens
tgcatatgggggggc

SEQ ID NO: 84654 - DNA, 15 bp, Homo sapiens
atgcatatggggggg

SEQ ID NO: 84655 - DNA, 15 bp, Homo sapiens
catgcatatgggggg

SEQ ID NO: 84656 - DNA, 15 bp, Homo sapiens
acatgcatatggggg

SEQ ID NO: 84657 - DNA, 15 bp, Homo sapiens
aacatgcatatgggg

SEQ ID NO: 84658 - DNA, 15 bp, Homo sapiens
aaacatgcatatggg

SEQ ID NO: 84659 - DNA, 15 bp, Homo sapiens
gaaacatgcatatgg

SEQ ID NO: 84660 - DNA, 15 bp, Homo sapiens
ggaaacatgcatatg

SEQ ID NO: 84661 - DNA, 15 bp, Homo sapiens
aggaaacatgcatat

SEQ ID NO: 84662 - DNA, 15 bp, Homo sapiens
gaggaaacatgcata

SEQ ID NO: 84663 - DNA, 15 bp, Homo sapiens
cgaggaaacatgcat

SEQ ID NO: 84664 - DNA, 15 bp, Homo sapiens
acgaggaaacatgca

SEQ ID NO: 84665 - DNA, 15 bp, Homo sapiens
cacgaggaaacatgc

SEQ ID NO: 84666 - DNA, 15 bp, Homo sapiens
ccacgaggaaacatg

SEQ ID NO: 84667 - DNA, 15 bp, Homo sapiens
cccacgaggaaacat

SEQ ID NO: 84668 - DNA, 15 bp, Homo sapiens
gcccacgaggaaaca

SEQ ID NO: 84669 - DNA, 15 bp, Homo sapiens
agcccacgaggaaac

SEQ ID NO: 84670 - DNA, 15 bp, Homo sapiens
gagcccacgaggaaa

SEQ ID NO: 84671 - DNA, 15 bp, Homo sapiens
ggagcccacgaggaa

SEQ ID NO: 84672 - DNA, 15 bp, Homo sapiens
gggagcccacgagga

SEQ ID NO: 84673 - DNA, 15 bp, Homo sapiens
agggagcccacgagg

SEQ ID NO: 84674 - DNA, 15 bp, Homo sapiens
cagggagcccacgag

SEQ ID NO: 84675 - DNA, 15 bp, Homo sapiens
acagggagcccacga

SEQ ID NO: 84676 - DNA, 15 bp, Homo sapiens
cacagggagcccacg

SEQ ID NO: 84677 - DNA, 15 bp, Homo sapiens
tcacagggagcccac

SEQ ID NO: 84678 - DNA, 15 bp, Homo sapiens
atcacagggagccca

SEQ ID NO: 84679 - DNA, 15 bp, Homo sapiens
aatcacagggagccc

SEQ ID NO: 84680 - DNA, 15 bp, Homo sapiens
caatcacagggagcc

SEQ ID NO: 84681 - DNA, 15 bp, Homo sapiens
acaatcacagggagc

SEQ ID NO: 84682 - DNA, 15 bp, Homo sapiens
tacaatcacagggag

SEQ ID NO: 84683 - DNA, 15 bp, Homo sapiens
ttacaatcacaggga

SEQ ID NO: 84684 - DNA, 15 bp, Homo sapiens
cttacaatcacaggg

SEQ ID NO: 84685 - DNA, 15 bp, Homo sapiens
ccttacaatcacagg

SEQ ID NO: 84686 - DNA, 15 bp, Homo sapiens
cccttacaatcacag

SEQ ID NO: 84687 - DNA, 15 bp, Homo sapiens
gcccttacaatcaca

SEQ ID NO: 84688 - DNA, 15 bp, Homo sapiens
ggcccttacaatcac

SEQ ID NO: 84689 - DNA, 15 bp, Homo sapiens
gggcccttacaatca

SEQ ID NO: 84690 - DNA, 15 bp, Homo sapiens
ggggcccttacaatc

SEQ ID NO: 84691 - DNA, 15 bp, Homo sapiens
cggggcccttacaat

SEQ ID NO: 84692 - DNA, 15 bp, Homo sapiens
ccggggcccttacaa

SEQ ID NO: 84693 - DNA, 15 bp, Homo sapiens
accggggcccttaca

SEQ ID NO: 84694 - DNA, 15 bp, Homo sapiens
aaccggggcccttac

SEQ ID NO: 84695 - DNA, 15 bp, Homo sapiens
taaccggggccctta

SEQ ID NO: 84696 - DNA, 15 bp, Homo sapiens
gtaaccggggccctt

SEQ ID NO: 84697 - DNA, 15 bp, Homo sapiens
ggtaaccggggccct

SEQ ID NO: 84698 - DNA, 15 bp, Homo sapiens
tggtaaccggggccc

SEQ ID NO: 84699 - DNA, 15 bp, Homo sapiens
atggtaaccggggcc

SEQ ID NO: 84700 - DNA, 15 bp, Homo sapiens
catggtaaccggggc

SEQ ID NO: 84701 - DNA, 15 bp, Homo sapiens
ccatggtaaccgggg

SEQ ID NO: 84702 - DNA, 15 bp, Homo sapiens
gccatggtaaccggg

SEQ ID NO: 84703 - DNA, 15 bp, Homo sapiens
tgccatggtaaccgg

SEQ ID NO: 84704 - DNA, 15 bp, Homo sapiens
ttgccatggtaaccg

SEQ ID NO: 84705 - DNA, 15 bp, Homo sapiens
gttgccatggtaacc

SEQ ID NO: 84706 - DNA, 15 bp, Homo sapiens
agttgccatggtaac

SEQ ID NO: 84707 - DNA, 15 bp, Homo sapiens
cagttgccatggtaa

SEQ ID NO: 84708 - DNA, 15 bp, Homo sapiens
gcagttgccatggta

SEQ ID NO: 84709 - DNA, 15 bp, Homo sapiens
ggcagttgccatggt

SEQ ID NO: 84710 - DNA, 15 bp, Homo sapiens
tggcagttgccatgg

SEQ ID NO: 84711 - DNA, 15 bp, Homo sapiens
gtggcagttgccatg

SEQ ID NO: 84712 - DNA, 15 bp, Homo sapiens
cgtggcagttgccat

SEQ ID NO: 84713 - DNA, 15 bp, Homo sapiens
acgtggcagttgcca

SEQ ID NO: 84714 - DNA, 15 bp, Homo sapiens
cacgtggcagttgcc

SEQ ID NO: 84715 - DNA, 15 bp, Homo sapiens
tcacgtggcagttgc

SEQ ID NO: 84716 - DNA, 15 bp, Homo sapiens
ctcacgtggcagttg

SEQ ID NO: 84717 - DNA, 15 bp, Homo sapiens
cctcacgtggcagtt

SEQ ID NO: 84718 - DNA, 15 bp, Homo sapiens
tcctcacgtggcagt

SEQ ID NO: 84719 - DNA, 15 bp, Homo sapiens
ttcctcacgtggcag

SEQ ID NO: 84720 - DNA, 15 bp, Homo sapiens
tttcctcacgtggca

SEQ ID NO: 84721 - DNA, 15 bp, Homo sapiens
atttcctcacgtggc

SEQ ID NO: 84722 - DNA, 15 bp, Homo sapiens
aatttcctcacgtgg

SEQ ID NO: 84723 - DNA, 15 bp, Homo sapiens
caatttcctcacgtg

SEQ ID NO: 84724 - DNA, 15 bp, Homo sapiens
acaatttcctcacgt

SEQ ID NO: 84725 - DNA, 15 bp, Homo sapiens
gacaatttcctcacg

SEQ ID NO: 84726 - DNA, 15 bp, Homo sapiens
cgacaatttcctcac

SEQ ID NO: 84727 - DNA, 15 bp, Homo sapiens
ccgacaatttcctca

SEQ ID NO: 84728 - DNA, 15 bp, Homo sapiens
tccgacaatttcctc

SEQ ID NO: 84729 - DNA, 15 bp, Homo sapiens
atccgacaatttcct

SEQ ID NO: 84730 - DNA, 15 bp, Homo sapiens
tatccgacaatttcc

SEQ ID NO: 84731 - DNA, 15 bp, Homo sapiens
ttatccgacaatttc

SEQ ID NO: 84732 - DNA, 15 bp, Homo sapiens
cttatccgacaattt

SEQ ID NO: 84733 - DNA, 15 bp, Homo sapiens
tcttatccgacaatt

SEQ ID NO: 84734 - DNA, 15 bp, Homo sapiens
atcttatccgacaat

SEQ ID NO: 84735 - DNA, 15 bp, Homo sapiens
gatcttatccgacaa

SEQ ID NO: 84736 - DNA, 15 bp, Homo sapiens
tgatcttatccgaca

SEQ ID NO: 84737 - DNA, 15 bp, Homo sapiens
atgatcttatccgac

SEQ ID NO: 84738 - DNA, 15 bp, Homo sapiens
tatgatcttatccga

SEQ ID NO: 84739 - DNA, 15 bp, Homo sapiens
ctatgatcttatccg

SEQ ID NO: 84740 - DNA, 15 bp, Homo sapiens
gctatgatcttatcc

SEQ ID NO: 84741 - DNA, 15 bp, Homo sapiens
agctatgatcttatc

SEQ ID NO: 84742 - DNA, 15 bp, Homo sapiens
aagctatgatcttat

SEQ ID NO: 84743 - DNA, 15 bp, Homo sapiens
gaagctatgatctta

SEQ ID NO: 84744 - DNA, 15 bp, Homo sapiens
agaagctatgatctt

SEQ ID NO: 84745 - DNA, 15 bp, Homo sapiens
tagaagctatgatct

SEQ ID NO: 84746 - DNA, 15 bp, Homo sapiens
ctagaagctatgatc

SEQ ID NO: 84747 - DNA, 15 bp, Homo sapiens
cctagaagctatgat

SEQ ID NO: 84748 - DNA, 15 bp, Homo sapiens
tcctagaagctatga

SEQ ID NO: 84749 - DNA, 15 bp, Homo sapiens
ttcctagaagctatg

SEQ ID NO: 84750 - DNA, 15 bp, Homo sapiens
attcctagaagctat

SEQ ID NO: 84751 - DNA, 15 bp, Homo sapiens
tattcctagaagcta

SEQ ID NO: 84752 - DNA, 15 bp, Homo sapiens
ctattcctagaagct

SEQ ID NO: 84753 - DNA, 15 bp, Homo sapiens
cctattcctagaagc

SEQ ID NO: 84754 - DNA, 15 bp, Homo sapiens
tcctattcctagaag

SEQ ID NO: 84755 - DNA, 15 bp, Homo sapiens
gtcctattcctagaa

SEQ ID NO: 84756 - DNA, 15 bp, Homo sapiens
ggtcctattcctaga

SEQ ID NO: 84757 - DNA, 15 bp, Homo sapiens
aggtcctattcctag

SEQ ID NO: 84758 - DNA, 15 bp, Homo sapiens
gaggtcctattccta

SEQ ID NO: 84759 - DNA, 15 bp, Homo sapiens
tgaggtcctattcct

SEQ ID NO: 84760 - DNA, 15 bp, Homo sapiens
ttgaggtcctattcc

SEQ ID NO: 84761 - DNA, 15 bp, Homo sapiens
cttgaggtcctattc

SEQ ID NO: 84762 - DNA, 15 bp, Homo sapiens
acttgaggtcctatt

SEQ ID NO: 84763 - DNA, 15 bp, Homo sapiens
cacttgaggtcctat

SEQ ID NO: 84764 - DNA, 15 bp, Homo sapiens
ccacttgaggtccta

SEQ ID NO: 84765 - DNA, 15 bp, Homo sapiens
accacttgaggtcct

SEQ ID NO: 84766 - DNA, 15 bp, Homo sapiens
aaccacttgaggtcc

SEQ ID NO: 84767 - DNA, 15 bp, Homo sapiens
caaccacttgaggtc

SEQ ID NO: 84768 - DNA, 15 bp, Homo sapiens
acaaccacttgaggt

SEQ ID NO: 84769 - DNA, 15 bp, Homo sapiens
aacaaccacttgagg

SEQ ID NO: 84770 - DNA, 15 bp, Homo sapiens
aaacaaccacttgag

SEQ ID NO: 84771 - DNA, 15 bp, Homo sapiens
caaacaaccacttga

SEQ ID NO: 84772 - DNA, 15 bp, Homo sapiens
ccaaacaaccacttg

SEQ ID NO: 84773 - DNA, 15 bp, Homo sapiens
cccaaacaaccactt

SEQ ID NO: 84774 - DNA, 15 bp, Homo sapiens
ccccaaacaaccact

SEQ ID NO: 84775 - DNA, 15 bp, Homo sapiens
tccccaaacaaccac

SEQ ID NO: 84776 - DNA, 15 bp, Homo sapiens
ttccccaaacaacca

SEQ ID NO: 84777 - DNA, 15 bp, Homo sapiens
tttccccaaacaacc

SEQ ID NO: 84778 - DNA, 15 bp, Homo sapiens
ctttccccaaacaac

SEQ ID NO: 84779 - DNA, 15 bp, Homo sapiens
actttccccaaacaa

SEQ ID NO: 84780 - DNA, 15 bp, Homo sapiens
cactttccccaaaca

SEQ ID NO: 84781 - DNA, 15 bp, Homo sapiens
ccactttccccaaac

SEQ ID NO: 84782 - DNA, 15 bp, Homo sapiens
accactttccccaaa

SEQ ID NO: 84783 - DNA, 15 bp, Homo sapiens
gaccactttccccaa

SEQ ID NO: 84784 - DNA, 15 bp, Homo sapiens
tgaccactttcccca

SEQ ID NO: 84785 - DNA, 15 bp, Homo sapiens
ctgaccactttcccc

SEQ ID NO: 84786 - DNA, 15 bp, Homo sapiens
actgaccactttccc

SEQ ID NO: 84787 - DNA, 15 bp, Homo sapiens
cactgaccactttcc

SEQ ID NO: 84788 - DNA, 15 bp, Homo sapiens
ccactgaccactttc

SEQ ID NO: 84789 - DNA, 15 bp, Homo sapiens
gccactgaccacttt

SEQ ID NO: 84790 - DNA, 15 bp, Homo sapiens
agccactgaccactt

SEQ ID NO: 84791 - DNA, 15 bp, Homo sapiens
aagccactgaccact

SEQ ID NO: 84792 - DNA, 15 bp, Homo sapiens
gaagccactgaccac

SEQ ID NO: 84793 - DNA, 15 bp, Homo sapiens
tgaagccactgacca

SEQ ID NO: 84794 - DNA, 15 bp, Homo sapiens
atgaagccactgacc

SEQ ID NO: 84795 - DNA, 15 bp, Homo sapiens
catgaagccactgac

SEQ ID NO: 84796 - DNA, 15 bp, Homo sapiens
acatgaagccactga

SEQ ID NO: 84797 - DNA, 15 bp, Homo sapiens
aacatgaagccactg

SEQ ID NO: 84798 - DNA, 15 bp, Homo sapiens
aaacatgaagccact

SEQ ID NO: 84799 - DNA, 15 bp, Homo sapiens
taaacatgaagccac

SEQ ID NO: 84800 - DNA, 15 bp, Homo sapiens
ttaaacatgaagcca

SEQ ID NO: 84801 - DNA, 15 bp, Homo sapiens
tttaaacatgaagcc

SEQ ID NO: 84802 - DNA, 15 bp, Homo sapiens
atttaaacatgaagc

SEQ ID NO: 84803 - DNA, 15 bp, Homo sapiens
aatttaaacatgaag

SEQ ID NO: 84804 - DNA, 15 bp, Homo sapiens
aaatttaaacatgaa

SEQ ID NO: 84805 - DNA, 15 bp, Homo sapiens
caaatttaaacatga

SEQ ID NO: 84806 - DNA, 15 bp, Homo sapiens
tcaaatttaaacatg

SEQ ID NO: 84807 - DNA, 15 bp, Homo sapiens
ttcaaatttaaacat

SEQ ID NO: 84808 - DNA, 15 bp, Homo sapiens
gttcaaatttaaaca

SEQ ID NO: 84809 - DNA, 15 bp, Homo sapiens
tgttcaaatttaaac

SEQ ID NO: 84810 - DNA, 15 bp, Homo sapiens
ttgttcaaatttaaa

SEQ ID NO: 84811 - DNA, 15 bp, Homo sapiens
cttgttcaaatttaa

SEQ ID NO: 84812 - DNA, 15 bp, Homo sapiens
tcttgttcaaattta

SEQ ID NO: 84813 - DNA, 15 bp, Homo sapiens
ttcttgttcaaattt

SEQ ID NO: 84814 - DNA, 15 bp, Homo sapiens
tttcttgttcaaatt

SEQ ID NO: 84815 - DNA, 15 bp, Homo sapiens
gtttcttgttcaaat

SEQ ID NO: 84816 - DNA, 15 bp, Homo sapiens
tgtttcttgttcaaa

SEQ ID NO: 84817 - DNA, 15 bp, Homo sapiens
ctgtttcttgttcaa

SEQ ID NO: 84818 - DNA, 15 bp, Homo sapiens
actgtttcttgttca

SEQ ID NO: 84819 - DNA, 15 bp, Homo sapiens
gactgtttcttgttc

SEQ ID NO: 84820 - DNA, 15 bp, Homo sapiens
tgactgtttcttgtt

SEQ ID NO: 84821 - DNA, 15 bp, Homo sapiens
gtgactgtttcttgt

SEQ ID NO: 84822 - DNA, 15 bp, Homo sapiens
agtgactgtttcttg

SEQ ID NO: 84823 - DNA, 15 bp, Homo sapiens
cagtgactgtttctt

SEQ ID NO: 84824 - DNA, 15 bp, Homo sapiens
ccagtgactgtttct

SEQ ID NO: 84825 - DNA, 15 bp, Homo sapiens
cccagtgactgtttc

SEQ ID NO: 84826 - DNA, 15 bp, Homo sapiens
acccagtgactgttt

SEQ ID NO: 84827 - DNA, 15 bp, Homo sapiens
cacccagtgactgtt

SEQ ID NO: 84828 - DNA, 15 bp, Homo sapiens
acacccagtgactgt

SEQ ID NO: 84829 - DNA, 15 bp, Homo sapiens
cacacccagtgactg

SEQ ID NO: 84830 - DNA, 15 bp, Homo sapiens
ccacacccagtgact

SEQ ID NO: 84831 - DNA, 15 bp, Homo sapiens
gccacacccagtgac

SEQ ID NO: 84832 - DNA, 15 bp, Homo sapiens
agccacacccagtga

SEQ ID NO: 84833 - DNA, 15 bp, Homo sapiens
cagccacacccagtg

SEQ ID NO: 84834 - DNA, 15 bp, Homo sapiens
gcagccacacccagt

SEQ ID NO: 84835 - DNA, 15 bp, Homo sapiens
agcagccacacccag

SEQ ID NO: 84836 - DNA, 15 bp, Homo sapiens
aagcagccacaccca

SEQ ID NO: 84837 - DNA, 15 bp, Homo sapiens
aaagcagccacaccc

SEQ ID NO: 84838 - DNA, 15 bp, Homo sapiens
taaagcagccacacc

SEQ ID NO: 84839 - DNA, 15 bp, Homo sapiens
ttaaagcagccacac

SEQ ID NO: 84840 - DNA, 15 bp, Homo sapiens
tttaaagcagccaca

SEQ ID NO: 84841 - DNA, 15 bp, Homo sapiens
ttttaaagcagccac

SEQ ID NO: 84842 - DNA, 15 bp, Homo sapiens
cttttaaagcagcca

SEQ ID NO: 84843 - DNA, 15 bp, Homo sapiens
tcttttaaagcagcc

SEQ ID NO: 84844 - DNA, 15 bp, Homo sapiens
ttcttttaaagcagc

SEQ ID NO: 84845 - DNA, 15 bp, Homo sapiens
tttcttttaaagcag

SEQ ID NO: 84846 - DNA, 15 bp, Homo sapiens
ttttcttttaaagca

SEQ ID NO: 84847 - DNA, 15 bp, Homo sapiens
attttcttttaaagc

SEQ ID NO: 84848 - DNA, 15 bp, Homo sapiens
aattttcttttaaag

SEQ ID NO: 84849 - DNA, 15 bp, Homo sapiens
taattttcttttaaa

SEQ ID NO: 84850 - DNA, 15 bp, Homo sapiens
ctaattttcttttaa

SEQ ID NO: 84851 - DNA, 15 bp, Homo sapiens
cctaattttctttta

SEQ ID NO: 84852 - DNA, 15 bp, Homo sapiens
gcctaattttctttt

SEQ ID NO: 84853 - DNA, 15 bp, Homo sapiens
tgcctaattttcttt

SEQ ID NO: 84854 - DNA, 15 bp, Homo sapiens
ttgcctaattttctt

SEQ ID NO: 84855 - DNA, 15 bp, Homo sapiens
cttgcctaattttct

SEQ ID NO: 84856 - DNA, 15 bp, Homo sapiens
gcttgcctaattttc

SEQ ID NO: 84857 - DNA, 15 bp, Homo sapiens
ggcttgcctaatttt

SEQ ID NO: 84858 - DNA, 15 bp, Homo sapiens
aggcttgcctaattt

SEQ ID NO: 84859 - DNA, 15 bp, Homo sapiens
aaggcttgcctaatt

SEQ ID NO: 84860 - DNA, 15 bp, Homo sapiens
caaggcttgcctaat

SEQ ID NO: 84861 - DNA, 15 bp, Homo sapiens
ccaaggcttgcctaa

SEQ ID NO: 84862 - DNA, 15 bp, Homo sapiens
cccaaggcttgccta

SEQ ID NO: 84863 - DNA, 15 bp, Homo sapiens
ccccaaggcttgcct

SEQ ID NO: 84864 - DNA, 15 bp, Homo sapiens
cccccaaggcttgcc

SEQ ID NO: 84865 - DNA, 15 bp, Homo sapiens
tcccccaaggcttgc

SEQ ID NO: 84866 - DNA, 15 bp, Homo sapiens
ttcccccaaggcttg

SEQ ID NO: 84867 - DNA, 15 bp, Homo sapiens
cttcccccaaggctt

SEQ ID NO: 84868 - DNA, 15 bp, Homo sapiens
ccttcccccaaggct

SEQ ID NO: 84869 - DNA, 15 bp, Homo sapiens
gccttcccccaaggc

SEQ ID NO: 84870 - DNA, 15 bp, Homo sapiens
agccttcccccaagg

SEQ ID NO: 84871 - DNA, 15 bp, Homo sapiens
aagccttcccccaag

SEQ ID NO: 84872 - DNA, 15 bp, Homo sapiens
gaagccttcccccaa

SEQ ID NO: 84873 - DNA, 15 bp, Homo sapiens
tgaagccttccccca

SEQ ID NO: 84874 - DNA, 15 bp, Homo sapiens
atgaagccttccccc

SEQ ID NO: 84875 - DNA, 15 bp, Homo sapiens
gatgaagccttcccc

SEQ ID NO: 84876 - DNA, 15 bp, Homo sapiens
tgatgaagccttccc

SEQ ID NO: 84877 - DNA, 15 bp, Homo sapiens
ttgatgaagccttcc

SEQ ID NO: 84878 - DNA, 15 bp, Homo sapiens
tttgatgaagccttc

SEQ ID NO: 84879 - DNA, 15 bp, Homo sapiens
ttttgatgaagcctt

SEQ ID NO: 84880 - DNA, 15 bp, Homo sapiens
attttgatgaagcct

SEQ ID NO: 84881 - DNA, 15 bp, Homo sapiens
aattttgatgaagcc

SEQ ID NO: 84882 - DNA, 15 bp, Homo sapiens
taattttgatgaagc

SEQ ID NO: 84883 - DNA, 15 bp, Homo sapiens
gtaattttgatgaag

SEQ ID NO: 84884 - DNA, 15 bp, Homo sapiens
agtaattttgatgaa

SEQ ID NO: 84885 - DNA, 15 bp, Homo sapiens
gagtaattttgatga

SEQ ID NO: 84886 - DNA, 15 bp, Homo sapiens
tgagtaattttgatg

SEQ ID NO: 84887 - DNA, 15 bp, Homo sapiens
ttgagtaattttgat

SEQ ID NO: 84888 - DNA, 15 bp, Homo sapiens
tttgagtaattttga

SEQ ID NO: 84889 - DNA, 15 bp, Homo sapiens
ctttgagtaattttg

SEQ ID NO: 84890 - DNA, 15 bp, Homo sapiens
gctttgagtaatttt

SEQ ID NO: 84891 - DNA, 15 bp, Homo sapiens
cgctttgagtaattt

SEQ ID NO: 84892 - DNA, 15 bp, Homo sapiens
gcgctttgagtaatt

SEQ ID NO: 84893 - DNA, 15 bp, Homo sapiens
tgcgctttgagtaat

SEQ ID NO: 84894 - DNA, 15 bp, Homo sapiens
ttgcgctttgagtaa

SEQ ID NO: 84895 - DNA, 15 bp, Homo sapiens
tttgcgctttgagta

SEQ ID NO: 84896 - DNA, 15 bp, Homo sapiens
ctttgcgctttgagt

SEQ ID NO: 84897 - DNA, 15 bp, Homo sapiens
tctttgcgctttgag

SEQ ID NO: 84898 - DNA, 15 bp, Homo sapiens
atctttgcgctttga

SEQ ID NO: 84899 - DNA, 15 bp, Homo sapiens
tatctttgcgctttg

SEQ ID NO: 84900 - DNA, 15 bp, Homo sapiens
ctatctttgcgcttt

SEQ ID NO: 84901 - DNA, 15 bp, Homo sapiens
tctatctttgcgctt

SEQ ID NO: 84902 - DNA, 15 bp, Homo sapiens
ttctatctttgcgct

SEQ ID NO: 84903 - DNA, 15 bp, Homo sapiens
cttctatctttgcgc

SEQ ID NO: 84904 - DNA, 15 bp, Homo sapiens
ccttctatctttgcg

SEQ ID NO: 84905 - DNA, 15 bp, Homo sapiens
cccttctatctttgc

SEQ ID NO: 84906 - DNA, 15 bp, Homo sapiens
ccccttctatctttg

SEQ ID NO: 84907 - DNA, 15 bp, Homo sapiens
accccttctatcttt

SEQ ID NO: 84908 - DNA, 15 bp, Homo sapiens
taccccttctatctt

SEQ ID NO: 84909 - DNA, 15 bp, Homo sapiens
ctaccccttctatct

SEQ ID NO: 84910 - DNA, 15 bp, Homo sapiens
actaccccttctatc

SEQ ID NO: 84911 - DNA, 15 bp, Homo sapiens
gactaccccttctat

SEQ ID NO: 84912 - DNA, 15 bp, Homo sapiens
agactaccccttcta

SEQ ID NO: 84913 - DNA, 15 bp, Homo sapiens
cagactaccccttct

SEQ ID NO: 84914 - DNA, 15 bp, Homo sapiens
ccagactaccccttc

SEQ ID NO: 84915 - DNA, 15 bp, Homo sapiens
gccagactacccctt

SEQ ID NO: 84916 - DNA, 15 bp, Homo sapiens
agccagactacccct

SEQ ID NO: 84917 - DNA, 15 bp, Homo sapiens
cagccagactacccc

SEQ ID NO: 84918 - DNA, 15 bp, Homo sapiens
ccagccagactaccc

SEQ ID NO: 84919 - DNA, 15 bp, Homo sapiens
accagccagactacc

SEQ ID NO: 84920 - DNA, 15 bp, Homo sapiens
caccagccagactac

SEQ ID NO: 84921 - DNA, 15 bp, Homo sapiens
acaccagccagacta

SEQ ID NO: 84922 - DNA, 15 bp, Homo sapiens
cacaccagccagact

SEQ ID NO: 84923 - DNA, 15 bp, Homo sapiens
ccacaccagccagac

SEQ ID NO: 84924 - DNA, 15 bp, Homo sapiens
tccacaccagccaga

SEQ ID NO: 84925 - DNA, 15 bp, Homo sapiens
ctccacaccagccag

SEQ ID NO: 84926 - DNA, 15 bp, Homo sapiens
cctccacaccagcca

SEQ ID NO: 84927 - DNA, 15 bp, Homo sapiens
acctccacaccagcc

SEQ ID NO: 84928 - DNA, 15 bp, Homo sapiens
cacctccacaccagc

SEQ ID NO: 84929 - DNA, 15 bp, Homo sapiens
acacctccacaccag

SEQ ID NO: 84930 - DNA, 15 bp, Homo sapiens
cacacctccacacca

SEQ ID NO: 84931 - DNA, 15 bp, Homo sapiens
ccacacctccacacc

SEQ ID NO: 84932 - DNA, 15 bp, Homo sapiens
cccacacctccacac

SEQ ID NO: 84933 - DNA, 15 bp, Homo sapiens
gcccacacctccaca

SEQ ID NO: 84934 - DNA, 15 bp, Homo sapiens
tgcccacacctccac

SEQ ID NO: 84935 - DNA, 15 bp, Homo sapiens
ctgcccacacctcca

SEQ ID NO: 84936 - DNA, 15 bp, Homo sapiens
cctgcccacacctcc

SEQ ID NO: 84937 - DNA, 15 bp, Homo sapiens
gcctgcccacacctc

SEQ ID NO: 84938 - DNA, 15 bp, Homo sapiens
tgcctgcccacacct

SEQ ID NO: 84939 - DNA, 15 bp, Homo sapiens
ctgcctgcccacacc

SEQ ID NO: 84940 - DNA, 15 bp, Homo sapiens
cctgcctgcccacac

SEQ ID NO: 84941 - DNA, 15 bp, Homo sapiens
ccctgcctgcccaca

SEQ ID NO: 84942 - DNA, 15 bp, Homo sapiens
tccctgcctgcccac

SEQ ID NO: 84943 - DNA, 15 bp, Homo sapiens
ctccctgcctgccca

SEQ ID NO: 84944 - DNA, 15 bp, Homo sapiens
cctccctgcctgccc

SEQ ID NO: 84945 - DNA, 15 bp, Homo sapiens
ccctccctgcctgcc

SEQ ID NO: 84946 - DNA, 15 bp, Homo sapiens
accctccctgcctgc

SEQ ID NO: 84947 - DNA, 15 bp, Homo sapiens
aaccctccctgcctg

SEQ ID NO: 84948 - DNA, 15 bp, Homo sapiens
aaaccctccctgcct

SEQ ID NO: 84949 - DNA, 15 bp, Homo sapiens
caaaccctccctgcc

SEQ ID NO: 84950 - DNA, 15 bp, Homo sapiens
gcaaaccctccctgc

SEQ ID NO: 84951 - DNA, 15 bp, Homo sapiens
tgcaaaccctccctg

SEQ ID NO: 84952 - DNA, 15 bp, Homo sapiens
atgcaaaccctccct

SEQ ID NO: 84953 - DNA, 15 bp, Homo sapiens
aatgcaaaccctccc

SEQ ID NO: 84954 - DNA, 15 bp, Homo sapiens
aaatgcaaaccctcc

SEQ ID NO: 84955 - DNA, 15 bp, Homo sapiens
gaaatgcaaaccctc

SEQ ID NO: 84956 - DNA, 15 bp, Homo sapiens
ggaaatgcaaaccct

SEQ ID NO: 84957 - DNA, 15 bp, Homo sapiens
gggaaatgcaaaccc

SEQ ID NO: 84958 - DNA, 15 bp, Homo sapiens
tgggaaatgcaaacc

SEQ ID NO: 84959 - DNA, 15 bp, Homo sapiens
atgggaaatgcaaac

SEQ ID NO: 84960 - DNA, 15 bp, Homo sapiens
gatgggaaatgcaaa

SEQ ID NO: 84961 - DNA, 15 bp, Homo sapiens
cgatgggaaatgcaa

SEQ ID NO: 84962 - DNA, 15 bp, Homo sapiens
ccgatgggaaatgca

SEQ ID NO: 84963 - DNA, 15 bp, Homo sapiens
cccgatgggaaatgc

SEQ ID NO: 84964 - DNA, 15 bp, Homo sapiens
gcccgatgggaaatg

SEQ ID NO: 84965 - DNA, 15 bp, Homo sapiens
cgcccgatgggaaat

SEQ ID NO: 84966 - DNA, 15 bp, Homo sapiens
gcgcccgatgggaaa

SEQ ID NO: 84967 - DNA, 15 bp, Homo sapiens
agcgcccgatgggaa

SEQ ID NO: 84968 - DNA, 15 bp, Homo sapiens
cagcgcccgatggga

SEQ ID NO: 84969 - DNA, 15 bp, Homo sapiens
tcagcgcccgatggg

SEQ ID NO: 84970 - DNA, 15 bp, Homo sapiens
ctcagcgcccgatgg

SEQ ID NO: 84971 - DNA, 15 bp, Homo sapiens
cctcagcgcccgatg

SEQ ID NO: 84972 - DNA, 15 bp, Homo sapiens
acctcagcgcccgat

SEQ ID NO: 84973 - DNA, 15 bp, Homo sapiens
aacctcagcgcccga

SEQ ID NO: 84974 - DNA, 15 bp, Homo sapiens
aaacctcagcgcccg

SEQ ID NO: 84975 - DNA, 15 bp, Homo sapiens
aaaacctcagcgccc

SEQ ID NO: 84976 - DNA, 15 bp, Homo sapiens
aaaaacctcagcgcc

SEQ ID NO: 84977 - DNA, 15 bp, Homo sapiens
taaaaacctcagcgc

SEQ ID NO: 84978 - DNA, 15 bp, Homo sapiens
ataaaaacctcagcg

SEQ ID NO: 84979 - DNA, 15 bp, Homo sapiens
aataaaaacctcagc

SEQ ID NO: 84980 - DNA, 15 bp, Homo sapiens
aaataaaaacctcag

SEQ ID NO: 84981 - DNA, 15 bp, Homo sapiens
taaataaaaacctca

SEQ ID NO: 84982 - DNA, 15 bp, Homo sapiens
ttaaataaaaacctc

SEQ ID NO: 84983 - DNA, 15 bp, Homo sapiens
gttaaataaaaacct

SEQ ID NO: 84984 - DNA, 15 bp, Homo sapiens
agttaaataaaaacc

SEQ ID NO: 84985 - DNA, 15 bp, Homo sapiens
aagttaaataaaaac

SEQ ID NO: 84986 - DNA, 15 bp, Homo sapiens
taagttaaataaaaa

SEQ ID NO: 84987 - DNA, 15 bp, Homo sapiens
ttaagttaaataaaa

SEQ ID NO: 84988 - DNA, 15 bp, Homo sapiens
attaagttaaataaa

SEQ ID NO: 84989 - DNA, 15 bp, Homo sapiens
aattaagttaaataa

SEQ ID NO: 84990 - DNA, 15 bp, Homo sapiens
gaattaagttaaata

SEQ ID NO: 84991 - DNA, 15 bp, Homo sapiens
tgaattaagttaaat

SEQ ID NO: 84992 - DNA, 15 bp, Homo sapiens
atgaattaagttaaa

SEQ ID NO: 84993 - DNA, 15 bp, Homo sapiens
aatgaattaagttaa

SEQ ID NO: 84994 - DNA, 15 bp, Homo sapiens
caatgaattaagtta

SEQ ID NO: 84995 - DNA, 15 bp, Homo sapiens
gcaatgaattaagtt

SEQ ID NO: 84996 - DNA, 15 bp, Homo sapiens
tgcaatgaattaagt

SEQ ID NO: 84997 - DNA, 15 bp, Homo sapiens
gtgcaatgaattaag

SEQ ID NO: 84998 - DNA, 15 bp, Homo sapiens
tgtgcaatgaattaa

SEQ ID NO: 84999 - DNA, 15 bp, Homo sapiens
gtgtgcaatgaatta

SEQ ID NO: 85000 - DNA, 15 bp, Homo sapiens
agtgtgcaatgaatt

SEQ ID NO: 85001 - DNA, 15 bp, Homo sapiens
aagtgtgcaatgaat

SEQ ID NO: 85002 - DNA, 15 bp, Homo sapiens
gaagtgtgcaatgaa

SEQ ID NO: 85003 - DNA, 15 bp, Homo sapiens
agaagtgtgcaatga

SEQ ID NO: 85004 - DNA, 15 bp, Homo sapiens
aagaagtgtgcaatg

SEQ ID NO: 85005 - DNA, 15 bp, Homo sapiens
taagaagtgtgcaat

SEQ ID NO: 85006 - DNA, 15 bp, Homo sapiens
ctaagaagtgtgcaa

SEQ ID NO: 85007 - DNA, 15 bp, Homo sapiens
cctaagaagtgtgca

SEQ ID NO: 85008 - DNA, 15 bp, Homo sapiens
acctaagaagtgtgc

SEQ ID NO: 85009 - DNA, 15 bp, Homo sapiens
cacctaagaagtgtg

SEQ ID NO: 85010 - DNA, 15 bp, Homo sapiens
gcacctaagaagtgt

SEQ ID NO: 85011 - DNA, 15 bp, Homo sapiens
ggcacctaagaagtg

SEQ ID NO: 85012 - DNA, 15 bp, Homo sapiens
tggcacctaagaagt

SEQ ID NO: 85013 - DNA, 15 bp, Homo sapiens
ctggcacctaagaag

SEQ ID NO: 85014 - DNA, 15 bp, Homo sapiens
cctggcacctaagaa

SEQ ID NO: 85015 - DNA, 15 bp, Homo sapiens
tcctggcacctaaga

SEQ ID NO: 85016 - DNA, 15 bp, Homo sapiens
ttcctggcacctaag

SEQ ID NO: 85017 - DNA, 15 bp, Homo sapiens
cttcctggcacctaa

SEQ ID NO: 85018 - DNA, 15 bp, Homo sapiens
acttcctggcaccta

SEQ ID NO: 85019 - DNA, 15 bp, Homo sapiens
cacttcctggcacct

SEQ ID NO: 85020 - DNA, 15 bp, Homo sapiens
acacttcctggcacc

SEQ ID NO: 85021 - DNA, 15 bp, Homo sapiens
cacacttcctggcac

SEQ ID NO: 85022 - DNA, 15 bp, Homo sapiens
gcacacttcctggca

SEQ ID NO: 85023 - DNA, 15 bp, Homo sapiens
ggcacacttcctggc

SEQ ID NO: 85024 - DNA, 15 bp, Homo sapiens
tggcacacttcctgg

SEQ ID NO: 85025 - DNA, 15 bp, Homo sapiens
ttggcacacttcctg

SEQ ID NO: 85026 - DNA, 15 bp, Homo sapiens
gttggcacacttcct

SEQ ID NO: 85027 - DNA, 15 bp, Homo sapiens
tgttggcacacttcc

SEQ ID NO: 85028 - DNA, 15 bp, Homo sapiens
ttgttggcacacttc

SEQ ID NO: 85029 - DNA, 15 bp, Homo sapiens
gttgttggcacactt

SEQ ID NO: 85030 - DNA, 15 bp, Homo sapiens
agttgttggcacact

SEQ ID NO: 85031 - DNA, 15 bp, Homo sapiens
cagttgttggcacac

SEQ ID NO: 85032 - DNA, 15 bp, Homo sapiens
ccagttgttggcaca

SEQ ID NO: 85033 - DNA, 15 bp, Homo sapiens
cccagttgttggcac

SEQ ID NO: 85034 - DNA, 15 bp, Homo sapiens
ccccagttgttggca

SEQ ID NO: 85035 - DNA, 15 bp, Homo sapiens
tccccagttgttggc

SEQ ID NO: 85036 - DNA, 15 bp, Homo sapiens
atccccagttgttgg

SEQ ID NO: 85037 - DNA, 15 bp, Homo sapiens
catccccagttgttg

SEQ ID NO: 85038 - DNA, 15 bp, Homo sapiens
tcatccccagttgtt

SEQ ID NO: 85039 - DNA, 15 bp, Homo sapiens
ttcatccccagttgt

SEQ ID NO: 85040 - DNA, 15 bp, Homo sapiens
tttcatccccagttg

SEQ ID NO: 85041 - DNA, 15 bp, Homo sapiens
ttttcatccccagtt

SEQ ID NO: 85042 - DNA, 15 bp, Homo sapiens
gttttcatccccagt

SEQ ID NO: 85043 - DNA, 15 bp, Homo sapiens
ggttttcatccccag

SEQ ID NO: 85044 - DNA, 15 bp, Homo sapiens
tggttttcatcccca

SEQ ID NO: 85045 - DNA, 15 bp, Homo sapiens
ctggttttcatcccc

SEQ ID NO: 85046 - DNA, 15 bp, Homo sapiens
cctggttttcatccc

SEQ ID NO: 85047 - DNA, 15 bp, Homo sapiens
tcctggttttcatcc

SEQ ID NO: 85048 - DNA, 15 bp, Homo sapiens
ttcctggttttcatc

SEQ ID NO: 85049 - DNA, 15 bp, Homo sapiens
attcctggttttcat

SEQ ID NO: 85050 - DNA, 15 bp, Homo sapiens
gattcctggttttca

SEQ ID NO: 85051 - DNA, 15 bp, Homo sapiens
tgattcctggttttc

SEQ ID NO: 85052 - DNA, 15 bp, Homo sapiens
ctgattcctggtttt

SEQ ID NO: 85053 - DNA, 15 bp, Homo sapiens
tctgattcctggttt

SEQ ID NO: 85054 - DNA, 15 bp, Homo sapiens
gtctgattcctggtt

SEQ ID NO: 85055 - DNA, 15 bp, Homo sapiens
agtctgattcctggt

SEQ ID NO: 85056 - DNA, 15 bp, Homo sapiens
cagtctgattcctgg

SEQ ID NO: 85057 - DNA, 15 bp, Homo sapiens
tcagtctgattcctg

SEQ ID NO: 85058 - DNA, 15 bp, Homo sapiens
atcagtctgattcct

SEQ ID NO: 85059 - DNA, 15 bp, Homo sapiens
catcagtctgattcc

SEQ ID NO: 85060 - DNA, 15 bp, Homo sapiens
tcatcagtctgattc

SEQ ID NO: 85061 - DNA, 15 bp, Homo sapiens
ctcatcagtctgatt

SEQ ID NO: 85062 - DNA, 15 bp, Homo sapiens
cctcatcagtctgat

SEQ ID NO: 85063 - DNA, 15 bp, Homo sapiens
acctcatcagtctga

SEQ ID NO: 85064 - DNA, 15 bp, Homo sapiens
aacctcatcagtctg

SEQ ID NO: 85065 - DNA, 15 bp, Homo sapiens
gaacctcatcagtct

SEQ ID NO: 85066 - DNA, 15 bp, Homo sapiens
agaacctcatcagtc

SEQ ID NO: 85067 - DNA, 15 bp, Homo sapiens
aagaacctcatcagt

SEQ ID NO: 85068 - DNA, 15 bp, Homo sapiens
gaagaacctcatcag

SEQ ID NO: 85069 - DNA, 15 bp, Homo sapiens
agaagaacctcatca

SEQ ID NO: 85070 - DNA, 15 bp, Homo sapiens
gagaagaacctcatc

SEQ ID NO: 85071 - DNA, 15 bp, Homo sapiens
agagaagaacctcat

SEQ ID NO: 85072 - DNA, 15 bp, Homo sapiens
aagagaagaacctca

SEQ ID NO: 85073 - DNA, 15 bp, Homo sapiens
gaagagaagaacctc

SEQ ID NO: 85074 - DNA, 15 bp, Homo sapiens
tgaagagaagaacct

SEQ ID NO: 85075 - DNA, 15 bp, Homo sapiens
ctgaagagaagaacc

SEQ ID NO: 85076 - DNA, 15 bp, Homo sapiens
cctgaagagaagaac

SEQ ID NO: 85077 - DNA, 15 bp, Homo sapiens
ccctgaagagaagaa

SEQ ID NO: 85078 - DNA, 15 bp, Homo sapiens
accctgaagagaaga

SEQ ID NO: 85079 - DNA, 15 bp, Homo sapiens
caccctgaagagaag

SEQ ID NO: 85080 - DNA, 15 bp, Homo sapiens
gcaccctgaagagaa

SEQ ID NO: 85081 - DNA, 15 bp, Homo sapiens
ggcaccctgaagaga

SEQ ID NO: 85082 - DNA, 15 bp, Homo sapiens
aggcaccctgaagag

SEQ ID NO: 85083 - DNA, 15 bp, Homo sapiens
taggcaccctgaaga

SEQ ID NO: 85084 - DNA, 15 bp, Homo sapiens
ttaggcaccctgaag

SEQ ID NO: 85085 - DNA, 15 bp, Homo sapiens
gttaggcaccctgaa

SEQ ID NO: 85086 - DNA, 15 bp, Homo sapiens
agttaggcaccctga

SEQ ID NO: 85087 - DNA, 15 bp, Homo sapiens
tagttaggcaccctg

SEQ ID NO: 85088 - DNA, 15 bp, Homo sapiens
ctagttaggcaccct

SEQ ID NO: 85089 - DNA, 15 bp, Homo sapiens
tctagttaggcaccc

SEQ ID NO: 85090 - DNA, 15 bp, Homo sapiens
ttctagttaggcacc

SEQ ID NO: 85091 - DNA, 15 bp, Homo sapiens
attctagttaggcac

SEQ ID NO: 85092 - DNA, 15 bp, Homo sapiens
aattctagttaggca

SEQ ID NO: 85093 - DNA, 15 bp, Homo sapiens
aaattctagttaggc

SEQ ID NO: 85094 - DNA, 15 bp, Homo sapiens
caaattctagttagg

SEQ ID NO: 85095 - DNA, 15 bp, Homo sapiens
acaaattctagttag

SEQ ID NO: 85096 - DNA, 15 bp, Homo sapiens
gacaaattctagtta

SEQ ID NO: 85097 - DNA, 15 bp, Homo sapiens
ggacaaattctagtt

SEQ ID NO: 85098 - DNA, 15 bp, Homo sapiens
aggacaaattctagt

SEQ ID NO: 85099 - DNA, 15 bp, Homo sapiens
gaggacaaattctag

SEQ ID NO: 85100 - DNA, 15 bp, Homo sapiens
cgaggacaaattcta

SEQ ID NO: 85101 - DNA, 15 bp, Homo sapiens
tcgaggacaaattct

SEQ ID NO: 85102 - DNA, 15 bp, Homo sapiens
ctcgaggacaaattc

SEQ ID NO: 85103 - DNA, 15 bp, Homo sapiens
tctcgaggacaaatt

SEQ ID NO: 85104 - DNA, 15 bp, Homo sapiens
ttctcgaggacaaat

SEQ ID NO: 85105 - DNA, 15 bp, Homo sapiens
tttctcgaggacaaa

SEQ ID NO: 85106 - DNA, 15 bp, Homo sapiens
ttttctcgaggacaa

SEQ ID NO: 85107 - DNA, 15 bp, Homo sapiens
tttttctcgaggaca

SEQ ID NO: 85108 - DNA, 15 bp, Homo sapiens
ctttttctcgaggac

SEQ ID NO: 85109 - DNA, 15 bp, Homo sapiens
tctttttctcgagga

SEQ ID NO: 85110 - DNA, 15 bp, Homo sapiens
ttctttttctcgagg

SEQ ID NO: 85111 - DNA, 15 bp, Homo sapiens
attctttttctcgag

SEQ ID NO: 85112 - DNA, 15 bp, Homo sapiens
tattctttttctcga

SEQ ID NO: 85113 - DNA, 15 bp, Homo sapiens
ctattctttttctcg

SEQ ID NO: 85114 - DNA, 15 bp, Homo sapiens
cctattctttttctc

SEQ ID NO: 85115 - DNA, 15 bp, Homo sapiens
tcctattctttttct

SEQ ID NO: 85116 - DNA, 15 bp, Homo sapiens
ttcctattctttttc

SEQ ID NO: 85117 - DNA, 15 bp, Homo sapiens
tttcctattcttttt

SEQ ID NO: 85118 - DNA, 15 bp, Homo sapiens
ctttcctattctttt

SEQ ID NO: 85119 - DNA, 15 bp, Homo sapiens
actttcctattcttt

SEQ ID NO: 85120 - DNA, 15 bp, Homo sapiens
aactttcctattctt

SEQ ID NO: 85121 - DNA, 15 bp, Homo sapiens
gaactttcctattct

SEQ ID NO: 85122 - DNA, 15 bp, Homo sapiens
ggaactttcctattc

SEQ ID NO: 85123 - DNA, 15 bp, Homo sapiens
gggaactttcctatt

SEQ ID NO: 85124 - DNA, 15 bp, Homo sapiens
tgggaactttcctat

SEQ ID NO: 85125 - DNA, 15 bp, Homo sapiens
atgggaactttccta

SEQ ID NO: 85126 - DNA, 15 bp, Homo sapiens
catgggaactttcct

SEQ ID NO: 85127 - DNA, 15 bp, Homo sapiens
tcatgggaactttcc

SEQ ID NO: 85128 - DNA, 15 bp, Homo sapiens
gtcatgggaactttc

SEQ ID NO: 85129 - DNA, 15 bp, Homo sapiens
ggtcatgggaacttt

SEQ ID NO: 85130 - DNA, 15 bp, Homo sapiens
gggtcatgggaactt

SEQ ID NO: 85131 - DNA, 15 bp, Homo sapiens
ggggtcatgggaact

SEQ ID NO: 85132 - DNA, 15 bp, Homo sapiens
tggggtcatgggaac

SEQ ID NO: 85133 - DNA, 15 bp, Homo sapiens
ctggggtcatgggaa

SEQ ID NO: 85134 - DNA, 15 bp, Homo sapiens
cctggggtcatggga

SEQ ID NO: 85135 - DNA, 15 bp, Homo sapiens
tcctggggtcatggg

SEQ ID NO: 85136 - DNA, 15 bp, Homo sapiens
ttcctggggtcatgg

SEQ ID NO: 85137 - DNA, 15 bp, Homo sapiens
attcctggggtcatg

SEQ ID NO: 85138 - DNA, 15 bp, Homo sapiens
gattcctggggtcat

SEQ ID NO: 85139 - DNA, 15 bp, Homo sapiens
cgattcctggggtca

SEQ ID NO: 85140 - DNA, 15 bp, Homo sapiens
tcgattcctggggtc

SEQ ID NO: 85141 - DNA, 15 bp, Homo sapiens
ttcgattcctggggt

SEQ ID NO: 85142 - DNA, 15 bp, Homo sapiens
cttcgattcctgggg

SEQ ID NO: 85143 - DNA, 15 bp, Homo sapiens
tcttcgattcctggg

SEQ ID NO: 85144 - DNA, 15 bp, Homo sapiens
ctcttcgattcctgg

SEQ ID NO: 85145 - DNA, 15 bp, Homo sapiens
tctcttcgattcctg

SEQ ID NO: 85146 - DNA, 15 bp, Homo sapiens
gtctcttcgattcct

SEQ ID NO: 85147 - DNA, 15 bp, Homo sapiens
tgtctcttcgattcc

SEQ ID NO: 85148 - DNA, 15 bp, Homo sapiens
ttgtctcttcgattc

SEQ ID NO: 85149 - DNA, 15 bp, Homo sapiens
gttgtctcttcgatt

SEQ ID NO: 85150 - DNA, 15 bp, Homo sapiens
ggttgtctcttcgat

SEQ ID NO: 85151 - DNA, 15 bp, Homo sapiens
tggttgtctcttcga

SEQ ID NO: 85152 - DNA, 15 bp, Homo sapiens
ttggttgtctcttcg

SEQ ID NO: 85153 - DNA, 15 bp, Homo sapiens
cttggttgtctcttc

SEQ ID NO: 85154 - DNA, 15 bp, Homo sapiens
ccttggttgtctctt

SEQ ID NO: 85155 - DNA, 15 bp, Homo sapiens
cccttggttgtctct

SEQ ID NO: 85156 - DNA, 15 bp, Homo sapiens
gcccttggttgtctc

SEQ ID NO: 85157 - DNA, 15 bp, Homo sapiens
tgcccttggttgtct

SEQ ID NO: 85158 - DNA, 15 bp, Homo sapiens
gtgcccttggttgtc

SEQ ID NO: 85159 - DNA, 15 bp, Homo sapiens
tgtgcccttggttgt

SEQ ID NO: 85160 - DNA, 15 bp, Homo sapiens
atgtgcccttggttg

SEQ ID NO: 85161 - DNA, 15 bp, Homo sapiens
catgtgcccttggtt

SEQ ID NO: 85162 - DNA, 15 bp, Homo sapiens
gcatgtgcccttggt

SEQ ID NO: 85163 - DNA, 15 bp, Homo sapiens
ggcatgtgcccttgg

SEQ ID NO: 85164 - DNA, 15 bp, Homo sapiens
tggcatgtgcccttg

SEQ ID NO: 85165 - DNA, 15 bp, Homo sapiens
atggcatgtgccctt

SEQ ID NO: 85166 - DNA, 15 bp, Homo sapiens
gatggcatgtgccct

SEQ ID NO: 85167 - DNA, 15 bp, Homo sapiens
ggatggcatgtgccc

SEQ ID NO: 85168 - DNA, 15 bp, Homo sapiens
tggatggcatgtgcc

SEQ ID NO: 85169 - DNA, 15 bp, Homo sapiens
gtggatggcatgtgc

SEQ ID NO: 85170 - DNA, 15 bp, Homo sapiens
tgtggatggcatgtg

SEQ ID NO: 85171 - DNA, 15 bp, Homo sapiens
gtgtggatggcatgt

SEQ ID NO: 85172 - DNA, 15 bp, Homo sapiens
agtgtggatggcatg

SEQ ID NO: 85173 - DNA, 15 bp, Homo sapiens
gagtgtggatggcat

SEQ ID NO: 85174 - DNA, 15 bp, Homo sapiens
agagtgtggatggca

SEQ ID NO: 85175 - DNA, 15 bp, Homo sapiens
aagagtgtggatggc

SEQ ID NO: 85176 - DNA, 15 bp, Homo sapiens
aaagagtgtggatgg

SEQ ID NO: 85177 - DNA, 15 bp, Homo sapiens
gaaagagtgtggatg

SEQ ID NO: 85178 - DNA, 15 bp, Homo sapiens
ggaaagagtgtggat

SEQ ID NO: 85179 - DNA, 15 bp, Homo sapiens
aggaaagagtgtgga

SEQ ID NO: 85180 - DNA, 15 bp, Homo sapiens
gaggaaagagtgtgg

SEQ ID NO: 85181 - DNA, 15 bp, Homo sapiens
agaggaaagagtgtg

SEQ ID NO: 85182 - DNA, 15 bp, Homo sapiens
gagaggaaagagtgt

SEQ ID NO: 85183 - DNA, 15 bp, Homo sapiens
ggagaggaaagagtg

SEQ ID NO: 85184 - DNA, 15 bp, Homo sapiens
aggagaggaaagagt

SEQ ID NO: 85185 - DNA, 15 bp, Homo sapiens
gaggagaggaaagag

SEQ ID NO: 85186 - DNA, 15 bp, Homo sapiens
tgaggagaggaaaga

SEQ ID NO: 85187 - DNA, 15 bp, Homo sapiens
ttgaggagaggaaag

SEQ ID NO: 85188 - DNA, 15 bp, Homo sapiens
cttgaggagaggaaa

SEQ ID NO: 85189 - DNA, 15 bp, Homo sapiens
ccttgaggagaggaa

SEQ ID NO: 85190 - DNA, 15 bp, Homo sapiens
gccttgaggagagga

SEQ ID NO: 85191 - DNA, 15 bp, Homo sapiens
agccttgaggagagg

SEQ ID NO: 85192 - DNA, 15 bp, Homo sapiens
aagccttgaggagag

SEQ ID NO: 85193 - DNA, 15 bp, Homo sapiens
taagccttgaggaga

SEQ ID NO: 85194 - DNA, 15 bp, Homo sapiens
ctaagccttgaggag

SEQ ID NO: 85195 - DNA, 15 bp, Homo sapiens
tctaagccttgagga

SEQ ID NO: 85196 - DNA, 15 bp, Homo sapiens
ttctaagccttgagg

SEQ ID NO: 85197 - DNA, 15 bp, Homo sapiens
tttctaagccttgag

SEQ ID NO: 85198 - DNA, 15 bp, Homo sapiens
ttttctaagccttga

SEQ ID NO: 85199 - DNA, 15 bp, Homo sapiens
tttttctaagccttg

SEQ ID NO: 85200 - DNA, 15 bp, Homo sapiens
gtttttctaagcctt

SEQ ID NO: 85201 - DNA, 15 bp, Homo sapiens
agtttttctaagcct

SEQ ID NO: 85202 - DNA, 15 bp, Homo sapiens
cagtttttctaagcc

SEQ ID NO: 85203 - DNA, 15 bp, Homo sapiens
gcagtttttctaagc

SEQ ID NO: 85204 - DNA, 15 bp, Homo sapiens
tgcagtttttctaag

SEQ ID NO: 85205 - DNA, 15 bp, Homo sapiens
ctgcagtttttctaa

SEQ ID NO: 85206 - DNA, 15 bp, Homo sapiens
tctgcagtttttcta

SEQ ID NO: 85207 - DNA, 15 bp, Homo sapiens
ttctgcagtttttct

SEQ ID NO: 85208 - DNA, 15 bp, Homo sapiens
gttctgcagtttttc

SEQ ID NO: 85209 - DNA, 15 bp, Homo sapiens
ggttctgcagttttt

SEQ ID NO: 85210 - DNA, 15 bp, Homo sapiens
aggttctgcagtttt

SEQ ID NO: 85211 - DNA, 15 bp, Homo sapiens
caggttctgcagttt

SEQ ID NO: 85212 - DNA, 15 bp, Homo sapiens
gcaggttctgcagtt

SEQ ID NO: 85213 - DNA, 15 bp, Homo sapiens
ggcaggttctgcagt

SEQ ID NO: 85214 - DNA, 15 bp, Homo sapiens
cggcaggttctgcag

SEQ ID NO: 85215 - DNA, 15 bp, Homo sapiens
gcggcaggttctgca

SEQ ID NO: 85216 - DNA, 15 bp, Homo sapiens
ggcggcaggttctgc

SEQ ID NO: 85217 - DNA, 15 bp, Homo sapiens
aggcggcaggttctg

SEQ ID NO: 85218 - DNA, 15 bp, Homo sapiens
gaggcggcaggttct

SEQ ID NO: 85219 - DNA, 15 bp, Homo sapiens
ggaggcggcaggttc

SEQ ID NO: 85220 - DNA, 15 bp, Homo sapiens
tggaggcggcaggtt

SEQ ID NO: 85221 - DNA, 15 bp, Homo sapiens
gtggaggcggcaggt

SEQ ID NO: 85222 - DNA, 15 bp, Homo sapiens
ggtggaggcggcagg

SEQ ID NO: 85223 - DNA, 15 bp, Homo sapiens
gggtggaggcggcag

SEQ ID NO: 85224 - DNA, 15 bp, Homo sapiens
ggggtggaggcggca

SEQ ID NO: 85225 - DNA, 15 bp, Homo sapiens
aggggtggaggcggc

SEQ ID NO: 85226 - DNA, 15 bp, Homo sapiens
caggggtggaggcgg

SEQ ID NO: 85227 - DNA, 15 bp, Homo sapiens
ccaggggtggaggcg

SEQ ID NO: 85228 - DNA, 15 bp, Homo sapiens
accaggggtggaggc

SEQ ID NO: 85229 - DNA, 15 bp, Homo sapiens
caccaggggtggagg

SEQ ID NO: 85230 - DNA, 15 bp, Homo sapiens
ccaccaggggtggag

SEQ ID NO: 85231 - DNA, 15 bp, Homo sapiens
tccaccaggggtgga

SEQ ID NO: 85232 - DNA, 15 bp, Homo sapiens
gtccaccaggggtgg

SEQ ID NO: 85233 - DNA, 15 bp, Homo sapiens
tgtccaccaggggtg

SEQ ID NO: 85234 - DNA, 15 bp, Homo sapiens
ttgtccaccaggggt

SEQ ID NO: 85235 - DNA, 15 bp, Homo sapiens
cttgtccaccagggg

SEQ ID NO: 85236 - DNA, 15 bp, Homo sapiens
gcttgtccaccaggg

SEQ ID NO: 85237 - DNA, 15 bp, Homo sapiens
ggcttgtccaccagg

SEQ ID NO: 85238 - DNA, 15 bp, Homo sapiens
aggcttgtccaccag

SEQ ID NO: 85239 - DNA, 15 bp, Homo sapiens
gaggcttgtccacca

SEQ ID NO: 85240 - DNA, 15 bp, Homo sapiens
agaggcttgtccacc

SEQ ID NO: 85241 - DNA, 15 bp, Homo sapiens
cagaggcttgtccac

SEQ ID NO: 85242 - DNA, 15 bp, Homo sapiens
gcagaggcttgtcca

SEQ ID NO: 85243 - DNA, 15 bp, Homo sapiens
agcagaggcttgtcc

SEQ ID NO: 85244 - DNA, 15 bp, Homo sapiens
aagcagaggcttgtc

SEQ ID NO: 85245 - DNA, 15 bp, Homo sapiens
gaagcagaggcttgt

SEQ ID NO: 85246 - DNA, 15 bp, Homo sapiens
ggaagcagaggcttg

SEQ ID NO: 85247 - DNA, 15 bp, Homo sapiens
gggaagcagaggctt

SEQ ID NO: 85248 - DNA, 15 bp, Homo sapiens
ggggaagcagaggct

SEQ ID NO: 85249 - DNA, 15 bp, Homo sapiens
aggggaagcagaggc

SEQ ID NO: 85250 - DNA, 15 bp, Homo sapiens
caggggaagcagagg

SEQ ID NO: 85251 - DNA, 15 bp, Homo sapiens
acaggggaagcagag

SEQ ID NO: 85252 - DNA, 15 bp, Homo sapiens
cacaggggaagcaga

SEQ ID NO: 85253 - DNA, 15 bp, Homo sapiens
ccacaggggaagcag

SEQ ID NO: 85254 - DNA, 15 bp, Homo sapiens
cccacaggggaagca

SEQ ID NO: 85255 - DNA, 15 bp, Homo sapiens
tcccacaggggaagc

SEQ ID NO: 85256 - DNA, 15 bp, Homo sapiens
ctcccacaggggaag

SEQ ID NO: 85257 - DNA, 15 bp, Homo sapiens
gctcccacaggggaa

SEQ ID NO: 85258 - DNA, 15 bp, Homo sapiens
ggctcccacagggga

SEQ ID NO: 85259 - DNA, 15 bp, Homo sapiens
gggctcccacagggg

SEQ ID NO: 85260 - DNA, 15 bp, Homo sapiens
tgggctcccacaggg

SEQ ID NO: 85261 - DNA, 15 bp, Homo sapiens
atgggctcccacagg

SEQ ID NO: 85262 - DNA, 15 bp, Homo sapiens
gatgggctcccacag

SEQ ID NO: 85263 - DNA, 15 bp, Homo sapiens
ggatgggctcccaca

SEQ ID NO: 85264 - DNA, 15 bp, Homo sapiens
aggatgggctcccac

SEQ ID NO: 85265 - DNA, 15 bp, Homo sapiens
aaggatgggctccca

SEQ ID NO: 85266 - DNA, 15 bp, Homo sapiens
aaaggatgggctccc

SEQ ID NO: 85267 - DNA, 15 bp, Homo sapiens
taaaggatgggctcc

SEQ ID NO: 85268 - DNA, 15 bp, Homo sapiens
ctaaaggatgggctc

SEQ ID NO: 85269 - DNA, 15 bp, Homo sapiens
cctaaaggatgggct

SEQ ID NO: 85270 - DNA, 15 bp, Homo sapiens
tcctaaaggatgggc

SEQ ID NO: 85271 - DNA, 15 bp, Homo sapiens
atcctaaaggatggg

SEQ ID NO: 85272 - DNA, 15 bp, Homo sapiens
gatcctaaaggatgg

SEQ ID NO: 85273 - DNA, 15 bp, Homo sapiens
agatcctaaaggatg

SEQ ID NO: 85274 - DNA, 15 bp, Homo sapiens
cagatcctaaaggat

SEQ ID NO: 85275 - DNA, 15 bp, Homo sapiens
tcagatcctaaagga

SEQ ID NO: 85276 - DNA, 15 bp, Homo sapiens
ttcagatcctaaagg

SEQ ID NO: 85277 - DNA, 15 bp, Homo sapiens
attcagatcctaaag

SEQ ID NO: 85278 - DNA, 15 bp, Homo sapiens
cattcagatcctaaa

SEQ ID NO: 85279 - DNA, 15 bp, Homo sapiens
acattcagatcctaa

SEQ ID NO: 85280 - DNA, 15 bp, Homo sapiens
aacattcagatccta

SEQ ID NO: 85281 - DNA, 15 bp, Homo sapiens
gaacattcagatcct

SEQ ID NO: 85282 - DNA, 15 bp, Homo sapiens
agaacattcagatcc

SEQ ID NO: 85283 - DNA, 15 bp, Homo sapiens
cagaacattcagatc

SEQ ID NO: 85284 - DNA, 15 bp, Homo sapiens
tcagaacattcagat

SEQ ID NO: 85285 - DNA, 15 bp, Homo sapiens
gtcagaacattcaga

SEQ ID NO: 85286 - DNA, 15 bp, Homo sapiens
agtcagaacattcag

SEQ ID NO: 85287 - DNA, 15 bp, Homo sapiens
gagtcagaacattca

SEQ ID NO: 85288 - DNA, 15 bp, Homo sapiens
ggagtcagaacattc

SEQ ID NO: 85289 - DNA, 15 bp, Homo sapiens
gggagtcagaacatt

SEQ ID NO: 85290 - DNA, 15 bp, Homo sapiens
tgggagtcagaacat

SEQ ID NO: 85291 - DNA, 15 bp, Homo sapiens
gtgggagtcagaaca

SEQ ID NO: 85292 - DNA, 15 bp, Homo sapiens
ggtgggagtcagaac

SEQ ID NO: 85293 - DNA, 15 bp, Homo sapiens
aggtgggagtcagaa

SEQ ID NO: 85294 - DNA, 15 bp, Homo sapiens
aaggtgggagtcaga

SEQ ID NO: 85295 - DNA, 15 bp, Homo sapiens
gaaggtgggagtcag

SEQ ID NO: 85296 - DNA, 15 bp, Homo sapiens
ggaaggtgggagtca

SEQ ID NO: 85297 - DNA, 15 bp, Homo sapiens
gggaaggtgggagtc

SEQ ID NO: 85298 - DNA, 15 bp, Homo sapiens
agggaaggtgggagt

SEQ ID NO: 85299 - DNA, 15 bp, Homo sapiens
aagggaaggtgggag

SEQ ID NO: 85300 - DNA, 15 bp, Homo sapiens
aaagggaaggtggga

SEQ ID NO: 85301 - DNA, 15 bp, Homo sapiens
caaagggaaggtggg

SEQ ID NO: 85302 - DNA, 15 bp, Homo sapiens
acaaagggaaggtgg

SEQ ID NO: 85303 - DNA, 15 bp, Homo sapiens
gacaaagggaaggtg

SEQ ID NO: 85304 - DNA, 15 bp, Homo sapiens
tgacaaagggaaggt

SEQ ID NO: 85305 - DNA, 15 bp, Homo sapiens
gtgacaaagggaagg

SEQ ID NO: 85306 - DNA, 15 bp, Homo sapiens
cgtgacaaagggaag

SEQ ID NO: 85307 - DNA, 15 bp, Homo sapiens
gcgtgacaaagggaa

SEQ ID NO: 85308 - DNA, 15 bp, Homo sapiens
tgcgtgacaaaggga

SEQ ID NO: 85309 - DNA, 15 bp, Homo sapiens
ctgcgtgacaaaggg

SEQ ID NO: 85310 - DNA, 15 bp, Homo sapiens
tctgcgtgacaaagg

SEQ ID NO: 85311 - DNA, 15 bp, Homo sapiens
ctctgcgtgacaaag

SEQ ID NO: 85312 - DNA, 15 bp, Homo sapiens
actctgcgtgacaaa

SEQ ID NO: 85313 - DNA, 15 bp, Homo sapiens
gactctgcgtgacaa

SEQ ID NO: 85314 - DNA, 15 bp, Homo sapiens
ggactctgcgtgaca

SEQ ID NO: 85315 - DNA, 15 bp, Homo sapiens
aggactctgcgtgac

SEQ ID NO: 85316 - DNA, 15 bp, Homo sapiens
gaggactctgcgtga

SEQ ID NO: 85317 - DNA, 15 bp, Homo sapiens
agaggactctgcgtg

SEQ ID NO: 85318 - DNA, 15 bp, Homo sapiens
gagaggactctgcgt

SEQ ID NO: 85319 - DNA, 15 bp, Homo sapiens
agagaggactctgcg

SEQ ID NO: 85320 - DNA, 15 bp, Homo sapiens
aagagaggactctgc

SEQ ID NO: 85321 - DNA, 15 bp, Homo sapiens
caagagaggactctg

SEQ ID NO: 85322 - DNA, 15 bp, Homo sapiens
acaagagaggactct

SEQ ID NO: 85323 - DNA, 15 bp, Homo sapiens
gacaagagaggactc

SEQ ID NO: 85324 - DNA, 15 bp, Homo sapiens
ggacaagagaggact

SEQ ID NO: 85325 - DNA, 15 bp, Homo sapiens
gggacaagagaggac

SEQ ID NO: 85326 - DNA, 15 bp, Homo sapiens
agggacaagagagga

SEQ ID NO: 85327 - DNA, 15 bp, Homo sapiens
cagggacaagagagg

SEQ ID NO: 85328 - DNA, 15 bp, Homo sapiens
gcagggacaagagag

SEQ ID NO: 85329 - DNA, 15 bp, Homo sapiens
tgcagggacaagaga

SEQ ID NO: 85330 - DNA, 15 bp, Homo sapiens
ctgcagggacaagag

SEQ ID NO: 85331 - DNA, 15 bp, Homo sapiens
tctgcagggacaaga

SEQ ID NO: 85332 - DNA, 15 bp, Homo sapiens
gtctgcagggacaag

SEQ ID NO: 85333 - DNA, 15 bp, Homo sapiens
ggtctgcagggacaa

SEQ ID NO: 85334 - DNA, 15 bp, Homo sapiens
gggtctgcagggaca

SEQ ID NO: 85335 - DNA, 15 bp, Homo sapiens
tgggtctgcagggac

SEQ ID NO: 85336 - DNA, 15 bp, Homo sapiens
ctgggtctgcaggga

SEQ ID NO: 85337 - DNA, 15 bp, Homo sapiens
tctgggtctgcaggg

SEQ ID NO: 85338 - DNA, 15 bp, Homo sapiens
atctgggtctgcagg

SEQ ID NO: 85339 - DNA, 15 bp, Homo sapiens
aatctgggtctgcag

SEQ ID NO: 85340 - DNA, 15 bp, Homo sapiens
caatctgggtctgca

SEQ ID NO: 85341 - DNA, 15 bp, Homo sapiens
tcaatctgggtctgc

SEQ ID NO: 85342 - DNA, 15 bp, Homo sapiens
ctcaatctgggtctg

SEQ ID NO: 85343 - DNA, 15 bp, Homo sapiens
tctcaatctgggtct

SEQ ID NO: 85344 - DNA, 15 bp, Homo sapiens
atctcaatctgggtc

SEQ ID NO: 85345 - DNA, 15 bp, Homo sapiens
gatctcaatctgggt

SEQ ID NO: 85346 - DNA, 15 bp, Homo sapiens
ggatctcaatctggg

SEQ ID NO: 85347 - DNA, 15 bp, Homo sapiens
aggatctcaatctgg

SEQ ID NO: 85348 - DNA, 15 bp, Homo sapiens
gaggatctcaatctg

SEQ ID NO: 85349 - DNA, 15 bp, Homo sapiens
agaggatctcaatct

SEQ ID NO: 85350 - DNA, 15 bp, Homo sapiens
aagaggatctcaatc

SEQ ID NO: 85351 - DNA, 15 bp, Homo sapiens
caagaggatctcaat

SEQ ID NO: 85352 - DNA, 15 bp, Homo sapiens
ccaagaggatctcaa

SEQ ID NO: 85353 - DNA, 15 bp, Homo sapiens
accaagaggatctca

SEQ ID NO: 85354 - DNA, 15 bp, Homo sapiens
gaccaagaggatctc

SEQ ID NO: 85355 - DNA, 15 bp, Homo sapiens
agaccaagaggatct

SEQ ID NO: 85356 - DNA, 15 bp, Homo sapiens
tagaccaagaggatc

SEQ ID NO: 85357 - DNA, 15 bp, Homo sapiens
ctagaccaagaggat

SEQ ID NO: 85358 - DNA, 15 bp, Homo sapiens
gctagaccaagagga

SEQ ID NO: 85359 - DNA, 15 bp, Homo sapiens
agctagaccaagagg

SEQ ID NO: 85360 - DNA, 15 bp, Homo sapiens
cagctagaccaagag

SEQ ID NO: 85361 - DNA, 15 bp, Homo sapiens
gcagctagaccaaga

SEQ ID NO: 85362 - DNA, 15 bp, Homo sapiens
ggcagctagaccaag

SEQ ID NO: 85363 - DNA, 15 bp, Homo sapiens
tggcagctagaccaa

SEQ ID NO: 85364 - DNA, 15 bp, Homo sapiens
ctggcagctagacca

SEQ ID NO: 85365 - DNA, 15 bp, Homo sapiens
cctggcagctagacc

SEQ ID NO: 85366 - DNA, 15 bp, Homo sapiens
acctggcagctagac

SEQ ID NO: 85367 - DNA, 15 bp, Homo sapiens
gacctggcagctaga

SEQ ID NO: 85368 - DNA, 15 bp, Homo sapiens
tgacctggcagctag

SEQ ID NO: 85369 - DNA, 15 bp, Homo sapiens
ctgacctggcagcta

SEQ ID NO: 85370 - DNA, 15 bp, Homo sapiens
tctgacctggcagct

SEQ ID NO: 85371 - DNA, 15 bp, Homo sapiens
gtctgacctggcagc

SEQ ID NO: 85372 - DNA, 15 bp, Homo sapiens
ggtctgacctggcag

SEQ ID NO: 85373 - DNA, 15 bp, Homo sapiens
gggtctgacctggca

SEQ ID NO: 85374 - DNA, 15 bp, Homo sapiens
tgggtctgacctggc

SEQ ID NO: 85375 - DNA, 15 bp, Homo sapiens
atgggtctgacctgg

SEQ ID NO: 85376 - DNA, 15 bp, Homo sapiens
tatgggtctgacctg

SEQ ID NO: 85377 - DNA, 15 bp, Homo sapiens
ttatgggtctgacct

SEQ ID NO: 85378 - DNA, 15 bp, Homo sapiens
tttatgggtctgacc

SEQ ID NO: 85379 - DNA, 15 bp, Homo sapiens
ctttatgggtctgac

SEQ ID NO: 85380 - DNA, 15 bp, Homo sapiens
tctttatgggtctga

SEQ ID NO: 85381 - DNA, 15 bp, Homo sapiens
gtctttatgggtctg

SEQ ID NO: 85382 - DNA, 15 bp, Homo sapiens
ggtctttatgggtct

SEQ ID NO: 85383 - DNA, 15 bp, Homo sapiens
tggtctttatgggtc

SEQ ID NO: 85384 - DNA, 15 bp, Homo sapiens
ctggtctttatgggt

SEQ ID NO: 85385 - DNA, 15 bp, Homo sapiens
cctggtctttatggg

SEQ ID NO: 85386 - DNA, 15 bp, Homo sapiens
gcctggtctttatgg

SEQ ID NO: 85387 - DNA, 15 bp, Homo sapiens
ggcctggtctttatg

SEQ ID NO: 85388 - DNA, 15 bp, Homo sapiens
aggcctggtctttat

SEQ ID NO: 85389 - DNA, 15 bp, Homo sapiens
gaggcctggtcttta

SEQ ID NO: 85390 - DNA, 15 bp, Homo sapiens
tgaggcctggtcttt

SEQ ID NO: 85391 - DNA, 15 bp, Homo sapiens
ttgaggcctggtctt

SEQ ID NO: 85392 - DNA, 15 bp, Homo sapiens
cttgaggcctggtct

SEQ ID NO: 85393 - DNA, 15 bp, Homo sapiens
ccttgaggcctggtc

SEQ ID NO: 85394 - DNA, 15 bp, Homo sapiens
cccttgaggcctggt

SEQ ID NO: 85395 - DNA, 15 bp, Homo sapiens
tcccttgaggcctgg

SEQ ID NO: 85396 - DNA, 15 bp, Homo sapiens
gtcccttgaggcctg

SEQ ID NO: 85397 - DNA, 15 bp, Homo sapiens
tgtcccttgaggcct

SEQ ID NO: 85398 - DNA, 15 bp, Homo sapiens
atgtcccttgaggcc

SEQ ID NO: 85399 - DNA, 15 bp, Homo sapiens
aatgtcccttgaggc

SEQ ID NO: 85400 - DNA, 15 bp, Homo sapiens
gaatgtcccttgagg

SEQ ID NO: 85401 - DNA, 15 bp, Homo sapiens
agaatgtcccttgag

SEQ ID NO: 85402 - DNA, 15 bp, Homo sapiens
aagaatgtcccttga

SEQ ID NO: 85403 - DNA, 15 bp, Homo sapiens
taagaatgtcccttg

SEQ ID NO: 85404 - DNA, 15 bp, Homo sapiens
ctaagaatgtccctt

SEQ ID NO: 85405 - DNA, 15 bp, Homo sapiens
tctaagaatgtccct

SEQ ID NO: 85406 - DNA, 15 bp, Homo sapiens
ttctaagaatgtccc

SEQ ID NO: 85407 - DNA, 15 bp, Homo sapiens
cttctaagaatgtcc

SEQ ID NO: 85408 - DNA, 15 bp, Homo sapiens
gcttctaagaatgtc

SEQ ID NO: 85409 - DNA, 15 bp, Homo sapiens
ggcttctaagaatgt

SEQ ID NO: 85410 - DNA, 15 bp, Homo sapiens
aggcttctaagaatg

SEQ ID NO: 85411 - DNA, 15 bp, Homo sapiens
gaggcttctaagaat

SEQ ID NO: 85412 - DNA, 15 bp, Homo sapiens
agaggcttctaagaa

SEQ ID NO: 85413 - DNA, 15 bp, Homo sapiens
aagaggcttctaaga

SEQ ID NO: 85414 - DNA, 15 bp, Homo sapiens
aaagaggcttctaag

SEQ ID NO: 85415 - DNA, 15 bp, Homo sapiens
gaaagaggcttctaa

SEQ ID NO: 85416 - DNA, 15 bp, Homo sapiens
agaaagaggcttcta

SEQ ID NO: 85417 - DNA, 15 bp, Homo sapiens
gagaaagaggcttct

SEQ ID NO: 85418 - DNA, 15 bp, Homo sapiens
tgagaaagaggcttc

SEQ ID NO: 85419 - DNA, 15 bp, Homo sapiens
ttgagaaagaggctt

SEQ ID NO: 85420 - DNA, 15 bp, Homo sapiens
cttgagaaagaggct

SEQ ID NO: 85421 - DNA, 15 bp, Homo sapiens
gcttgagaaagaggc

SEQ ID NO: 85422 - DNA, 15 bp, Homo sapiens
tgcttgagaaagagg

SEQ ID NO: 85423 - DNA, 15 bp, Homo sapiens
ttgcttgagaaagag

SEQ ID NO: 85424 - DNA, 15 bp, Homo sapiens
attgcttgagaaaga

SEQ ID NO: 85425 - DNA, 15 bp, Homo sapiens
tattgcttgagaaag

SEQ ID NO: 85426 - DNA, 15 bp, Homo sapiens
ctattgcttgagaaa

SEQ ID NO: 85427 - DNA, 15 bp, Homo sapiens
cctattgcttgagaa

SEQ ID NO: 85428 - DNA, 15 bp, Homo sapiens
tcctattgcttgaga

SEQ ID NO: 85429 - DNA, 15 bp, Homo sapiens
ttcctattgcttgag

SEQ ID NO: 85430 - DNA, 15 bp, Homo sapiens
tttcctattgcttga

SEQ ID NO: 85431 - DNA, 15 bp, Homo sapiens
ctttcctattgcttg

SEQ ID NO: 85432 - DNA, 15 bp, Homo sapiens
gctttcctattgctt

SEQ ID NO: 85433 - DNA, 15 bp, Homo sapiens
agctttcctattgct

SEQ ID NO: 85434 - DNA, 15 bp, Homo sapiens
gagctttcctattgc

SEQ ID NO: 85435 - DNA, 15 bp, Homo sapiens
ggagctttcctattg

SEQ ID NO: 85436 - DNA, 15 bp, Homo sapiens
cggagctttcctatt

SEQ ID NO: 85437 - DNA, 15 bp, Homo sapiens
ccggagctttcctat

SEQ ID NO: 85438 - DNA, 15 bp, Homo sapiens
tccggagctttccta

SEQ ID NO: 85439 - DNA, 15 bp, Homo sapiens
ttccggagctttcct

SEQ ID NO: 85440 - DNA, 15 bp, Homo sapiens
gttccggagctttcc

SEQ ID NO: 85441 - DNA, 15 bp, Homo sapiens
agttccggagctttc

SEQ ID NO: 85442 - DNA, 15 bp, Homo sapiens
gagttccggagcttt

SEQ ID NO: 85443 - DNA, 15 bp, Homo sapiens
ggagttccggagctt

SEQ ID NO: 85444 - DNA, 15 bp, Homo sapiens
tggagttccggagct

SEQ ID NO: 85445 - DNA, 15 bp, Homo sapiens
atggagttccggagc

SEQ ID NO: 85446 - DNA, 15 bp, Homo sapiens
gatggagttccggag

SEQ ID NO: 85447 - DNA, 15 bp, Homo sapiens
ggatggagttccgga

SEQ ID NO: 85448 - DNA, 15 bp, Homo sapiens
aggatggagttccgg

SEQ ID NO: 85449 - DNA, 15 bp, Homo sapiens
caggatggagttccg

SEQ ID NO: 85450 - DNA, 15 bp, Homo sapiens
ccaggatggagttcc

SEQ ID NO: 85451 - DNA, 15 bp, Homo sapiens
gccaggatggagttc

SEQ ID NO: 85452 - DNA, 15 bp, Homo sapiens
agccaggatggagtt

SEQ ID NO: 85453 - DNA, 15 bp, Homo sapiens
gagccaggatggagt

SEQ ID NO: 85454 - DNA, 15 bp, Homo sapiens
ggagccaggatggag

SEQ ID NO: 85455 - DNA, 15 bp, Homo sapiens
gggagccaggatgga

SEQ ID NO: 85456 - DNA, 15 bp, Homo sapiens
tgggagccaggatgg

SEQ ID NO: 85457 - DNA, 15 bp, Homo sapiens
ctgggagccaggatg

SEQ ID NO: 85458 - DNA, 15 bp, Homo sapiens
cctgggagccaggat

SEQ ID NO: 85459 - DNA, 15 bp, Homo sapiens
gcctgggagccagga

SEQ ID NO: 85460 - DNA, 15 bp, Homo sapiens
agcctgggagccagg

SEQ ID NO: 85461 - DNA, 15 bp, Homo sapiens
tagcctgggagccag

SEQ ID NO: 85462 - DNA, 15 bp, Homo sapiens
gtagcctgggagcca

SEQ ID NO: 85463 - DNA, 15 bp, Homo sapiens
agtagcctgggagcc

SEQ ID NO: 85464 - DNA, 15 bp, Homo sapiens
tagtagcctgggagc

SEQ ID NO: 85465 - DNA, 15 bp, Homo sapiens
atagtagcctgggag

SEQ ID NO: 85466 - DNA, 15 bp, Homo sapiens
aatagtagcctggga

SEQ ID NO: 85467 - DNA, 15 bp, Homo sapiens
aaatagtagcctggg

SEQ ID NO: 85468 - DNA, 15 bp, Homo sapiens
gaaatagtagcctgg

SEQ ID NO: 85469 - DNA, 15 bp, Homo sapiens
tgaaatagtagcctg

SEQ ID NO: 85470 - DNA, 15 bp, Homo sapiens
ttgaaatagtagcct

SEQ ID NO: 85471 - DNA, 15 bp, Homo sapiens
gttgaaatagtagcc

SEQ ID NO: 85472 - DNA, 15 bp, Homo sapiens
ggttgaaatagtagc

SEQ ID NO: 85473 - DNA, 15 bp, Homo sapiens
gggttgaaatagtag

SEQ ID NO: 85474 - DNA, 15 bp, Homo sapiens
agggttgaaatagta

SEQ ID NO: 85475 - DNA, 15 bp, Homo sapiens
cagggttgaaatagt

SEQ ID NO: 85476 - DNA, 15 bp, Homo sapiens
gcagggttgaaatag

SEQ ID NO: 85477 - DNA, 15 bp, Homo sapiens
tgcagggttgaaata

SEQ ID NO: 85478 - DNA, 15 bp, Homo sapiens
ctgcagggttgaaat

SEQ ID NO: 85479 - DNA, 15 bp, Homo sapiens
actgcagggttgaaa

SEQ ID NO: 85480 - DNA, 15 bp, Homo sapiens
cactgcagggttgaa

SEQ ID NO: 85481 - DNA, 15 bp, Homo sapiens
ccactgcagggttga

SEQ ID NO: 85482 - DNA, 15 bp, Homo sapiens
cccactgcagggttg

SEQ ID NO: 85483 - DNA, 15 bp, Homo sapiens
acccactgcagggtt

SEQ ID NO: 85484 - DNA, 15 bp, Homo sapiens
cacccactgcagggt

SEQ ID NO: 85485 - DNA, 15 bp, Homo sapiens
tcacccactgcaggg

SEQ ID NO: 85486 - DNA, 15 bp, Homo sapiens
ttcacccactgcagg

SEQ ID NO: 85487 - DNA, 15 bp, Homo sapiens
tttcacccactgcag

SEQ ID NO: 85488 - DNA, 15 bp, Homo sapiens
atttcacccactgca

SEQ ID NO: 85489 - DNA, 15 bp, Homo sapiens
aatttcacccactgc

SEQ ID NO: 85490 - DNA, 15 bp, Homo sapiens
gaatttcacccactg

SEQ ID NO: 85491 - DNA, 15 bp, Homo sapiens
tgaatttcacccact

SEQ ID NO: 85492 - DNA, 15 bp, Homo sapiens
gtgaatttcacccac

SEQ ID NO: 85493 - DNA, 15 bp, Homo sapiens
agtgaatttcaccca

SEQ ID NO: 85494 - DNA, 15 bp, Homo sapiens
gagtgaatttcaccc

SEQ ID NO: 85495 - DNA, 15 bp, Homo sapiens
ggagtgaatttcacc

SEQ ID NO: 85496 - DNA, 15 bp, Homo sapiens
tggagtgaatttcac

SEQ ID NO: 85497 - DNA, 15 bp, Homo sapiens
gtggagtgaatttca

SEQ ID NO: 85498 - DNA, 15 bp, Homo sapiens
cgtggagtgaatttc

SEQ ID NO: 85499 - DNA, 15 bp, Homo sapiens
tcgtggagtgaattt

SEQ ID NO: 85500 - DNA, 15 bp, Homo sapiens
ctcgtggagtgaatt

SEQ ID NO: 85501 - DNA, 15 bp, Homo sapiens
cctcgtggagtgaat

SEQ ID NO: 85502 - DNA, 15 bp, Homo sapiens
tcctcgtggagtgaa

SEQ ID NO: 85503 - DNA, 15 bp, Homo sapiens
ttcctcgtggagtga

SEQ ID NO: 85504 - DNA, 15 bp, Homo sapiens
cttcctcgtggagtg

SEQ ID NO: 85505 - DNA, 15 bp, Homo sapiens
gcttcctcgtggagt

SEQ ID NO: 85506 - DNA, 15 bp, Homo sapiens
tgcttcctcgtggag

SEQ ID NO: 85507 - DNA, 15 bp, Homo sapiens
gtgcttcctcgtgga

SEQ ID NO: 85508 - DNA, 15 bp, Homo sapiens
agtgcttcctcgtgg

SEQ ID NO: 85509 - DNA, 15 bp, Homo sapiens
cagtgcttcctcgtg

SEQ ID NO: 85510 - DNA, 15 bp, Homo sapiens
gcagtgcttcctcgt

SEQ ID NO: 85511 - DNA, 15 bp, Homo sapiens
tgcagtgcttcctcg

SEQ ID NO: 85512 - DNA, 15 bp, Homo sapiens
ctgcagtgcttcctc

SEQ ID NO: 85513 - DNA, 15 bp, Homo sapiens
actgcagtgcttcct

SEQ ID NO: 85514 - DNA, 15 bp, Homo sapiens
gactgcagtgcttcc

SEQ ID NO: 85515 - DNA, 15 bp, Homo sapiens
tgactgcagtgcttc

SEQ ID NO: 85516 - DNA, 15 bp, Homo sapiens
gtgactgcagtgctt

SEQ ID NO: 85517 - DNA, 15 bp, Homo sapiens
agtgactgcagtgct

SEQ ID NO: 85518 - DNA, 15 bp, Homo sapiens
gagtgactgcagtgc

SEQ ID NO: 85519 - DNA, 15 bp, Homo sapiens
ggagtgactgcagtg

SEQ ID NO: 85520 - DNA, 15 bp, Homo sapiens
gggagtgactgcagt

SEQ ID NO: 85521 - DNA, 15 bp, Homo sapiens
ggggagtgactgcag

SEQ ID NO: 85522 - DNA, 15 bp, Homo sapiens
tggggagtgactgca

SEQ ID NO: 85523 - DNA, 15 bp, Homo sapiens
gtggggagtgactgc

SEQ ID NO: 85524 - DNA, 15 bp, Homo sapiens
cgtggggagtgactg

SEQ ID NO: 85525 - DNA, 15 bp, Homo sapiens
ccgtggggagtgact

SEQ ID NO: 85526 - DNA, 15 bp, Homo sapiens
tccgtggggagtgac

SEQ ID NO: 85527 - DNA, 15 bp, Homo sapiens
ttccgtggggagtga

SEQ ID NO: 85528 - DNA, 15 bp, Homo sapiens
cttccgtggggagtg

SEQ ID NO: 85529 - DNA, 15 bp, Homo sapiens
gcttccgtggggagt

SEQ ID NO: 85530 - DNA, 15 bp, Homo sapiens
agcttccgtggggag

SEQ ID NO: 85531 - DNA, 15 bp, Homo sapiens
aagcttccgtgggga

SEQ ID NO: 85532 - DNA, 15 bp, Homo sapiens
aaagcttccgtgggg

SEQ ID NO: 85533 - DNA, 15 bp, Homo sapiens
aaaagcttccgtggg

SEQ ID NO: 85534 - DNA, 15 bp, Homo sapiens
gaaaagcttccgtgg

SEQ ID NO: 85535 - DNA, 15 bp, Homo sapiens
agaaaagcttccgtg

SEQ ID NO: 85536 - DNA, 15 bp, Homo sapiens
aagaaaagcttccgt

SEQ ID NO: 85537 - DNA, 15 bp, Homo sapiens
gaagaaaagcttccg

SEQ ID NO: 85538 - DNA, 15 bp, Homo sapiens
ggaagaaaagcttcc

SEQ ID NO: 85539 - DNA, 15 bp, Homo sapiens
tggaagaaaagcttc

SEQ ID NO: 85540 - DNA, 15 bp, Homo sapiens
ttggaagaaaagctt

SEQ ID NO: 85541 - DNA, 15 bp, Homo sapiens
tttggaagaaaagct

SEQ ID NO: 85542 - DNA, 15 bp, Homo sapiens
gtttggaagaaaagc

SEQ ID NO: 85543 - DNA, 15 bp, Homo sapiens
agtttggaagaaaag

SEQ ID NO: 85544 - DNA, 15 bp, Homo sapiens
aagtttggaagaaaa

SEQ ID NO: 85545 - DNA, 15 bp, Homo sapiens
aaagtttggaagaaa

SEQ ID NO: 85546 - DNA, 15 bp, Homo sapiens
gaaagtttggaagaa

SEQ ID NO: 85547 - DNA, 15 bp, Homo sapiens
tgaaagtttggaaga

SEQ ID NO: 85548 - DNA, 15 bp, Homo sapiens
ctgaaagtttggaag

SEQ ID NO: 85549 - DNA, 15 bp, Homo sapiens
gctgaaagtttggaa

SEQ ID NO: 85550 - DNA, 15 bp, Homo sapiens
agctgaaagtttgga

SEQ ID NO: 85551 - DNA, 15 bp, Homo sapiens
gagctgaaagtttgg

SEQ ID NO: 85552 - DNA, 15 bp, Homo sapiens
agagctgaaagtttg

SEQ ID NO: 85553 - DNA, 15 bp, Homo sapiens
aagagctgaaagttt

SEQ ID NO: 85554 - DNA, 15 bp, Homo sapiens
caagagctgaaagtt

SEQ ID NO: 85555 - DNA, 15 bp, Homo sapiens
ccaagagctgaaagt

SEQ ID NO: 85556 - DNA, 15 bp, Homo sapiens
accaagagctgaaag

SEQ ID NO: 85557 - DNA, 15 bp, Homo sapiens
caccaagagctgaaa

SEQ ID NO: 85558 - DNA, 15 bp, Homo sapiens
ccaccaagagctgaa

SEQ ID NO: 85559 - DNA, 15 bp, Homo sapiens
accaccaagagctga

SEQ ID NO: 85560 - DNA, 15 bp, Homo sapiens
gaccaccaagagctg

SEQ ID NO: 85561 - DNA, 15 bp, Homo sapiens
tgaccaccaagagct

SEQ ID NO: 85562 - DNA, 15 bp, Homo sapiens
ctgaccaccaagagc

SEQ ID NO: 85563 - DNA, 15 bp, Homo sapiens
cctgaccaccaagag

SEQ ID NO: 85564 - DNA, 15 bp, Homo sapiens
ccctgaccaccaaga

SEQ ID NO: 85565 - DNA, 15 bp, Homo sapiens
tccctgaccaccaag

SEQ ID NO: 85566 - DNA, 15 bp, Homo sapiens
ttccctgaccaccaa

SEQ ID NO: 85567 - DNA, 15 bp, Homo sapiens
cttccctgaccacca

SEQ ID NO: 85568 - DNA, 15 bp, Homo sapiens
acttccctgaccacc

SEQ ID NO: 85569 - DNA, 15 bp, Homo sapiens
gacttccctgaccac

SEQ ID NO: 85570 - DNA, 15 bp, Homo sapiens
agacttccctgacca

SEQ ID NO: 85571 - DNA, 15 bp, Homo sapiens
cagacttccctgacc

SEQ ID NO: 85572 - DNA, 15 bp, Homo sapiens
tcagacttccctgac

SEQ ID NO: 85573 - DNA, 15 bp, Homo sapiens
gtcagacttccctga

SEQ ID NO: 85574 - DNA, 15 bp, Homo sapiens
ggtcagacttccctg

SEQ ID NO: 85575 - DNA, 15 bp, Homo sapiens
tggtcagacttccct

SEQ ID NO: 85576 - DNA, 15 bp, Homo sapiens
atggtcagacttccc

SEQ ID NO: 85577 - DNA, 15 bp, Homo sapiens
aatggtcagacttcc

SEQ ID NO: 85578 - DNA, 15 bp, Homo sapiens
aaatggtcagacttc

SEQ ID NO: 85579 - DNA, 15 bp, Homo sapiens
taaatggtcagactt

SEQ ID NO: 85580 - DNA, 15 bp, Homo sapiens
ataaatggtcagact

SEQ ID NO: 85581 - DNA, 15 bp, Homo sapiens
gataaatggtcagac

SEQ ID NO: 85582 - DNA, 15 bp, Homo sapiens
tgataaatggtcaga

SEQ ID NO: 85583 - DNA, 15 bp, Homo sapiens
atgataaatggtcag

SEQ ID NO: 85584 - DNA, 15 bp, Homo sapiens
gatgataaatggtca

SEQ ID NO: 85585 - DNA, 15 bp, Homo sapiens
tgatgataaatggtc

SEQ ID NO: 85586 - DNA, 15 bp, Homo sapiens
atgatgataaatggt

SEQ ID NO: 85587 - DNA, 15 bp, Homo sapiens
gatgatgataaatgg

SEQ ID NO: 85588 - DNA, 15 bp, Homo sapiens
cgatgatgataaatg

SEQ ID NO: 85589 - DNA, 15 bp, Homo sapiens
ccgatgatgataaat

SEQ ID NO: 85590 - DNA, 15 bp, Homo sapiens
tccgatgatgataaa

SEQ ID NO: 85591 - DNA, 15 bp, Homo sapiens
ttccgatgatgataa

SEQ ID NO: 85592 - DNA, 15 bp, Homo sapiens
tttccgatgatgata

SEQ ID NO: 85593 - DNA, 15 bp, Homo sapiens
ctttccgatgatgat

SEQ ID NO: 85594 - DNA, 15 bp, Homo sapiens
gctttccgatgatga

SEQ ID NO: 85595 - DNA, 15 bp, Homo sapiens
tgctttccgatgatg

SEQ ID NO: 85596 - DNA, 15 bp, Homo sapiens
atgctttccgatgat

SEQ ID NO: 85597 - DNA, 15 bp, Homo sapiens
catgctttccgatga

SEQ ID NO: 85598 - DNA, 15 bp, Homo sapiens
tcatgctttccgatg

SEQ ID NO: 85599 - DNA, 15 bp, Homo sapiens
ttcatgctttccgat

SEQ ID NO: 85600 - DNA, 15 bp, Homo sapiens
tttcatgctttccga

SEQ ID NO: 85601 - DNA, 15 bp, Homo sapiens
gtttcatgctttccg

SEQ ID NO: 85602 - DNA, 15 bp, Homo sapiens
agtttcatgctttcc

SEQ ID NO: 85603 - DNA, 15 bp, Homo sapiens
aagtttcatgctttc

SEQ ID NO: 85604 - DNA, 15 bp, Homo sapiens
aaagtttcatgcttt

SEQ ID NO: 85605 - DNA, 15 bp, Homo sapiens
gaaagtttcatgctt

SEQ ID NO: 85606 - DNA, 15 bp, Homo sapiens
tgaaagtttcatgct

SEQ ID NO: 85607 - DNA, 15 bp, Homo sapiens
ctgaaagtttcatgc

SEQ ID NO: 85608 - DNA, 15 bp, Homo sapiens
actgaaagtttcatg

SEQ ID NO: 85609 - DNA, 15 bp, Homo sapiens
tactgaaagtttcat

SEQ ID NO: 85610 - DNA, 15 bp, Homo sapiens
ttactgaaagtttca

SEQ ID NO: 85611 - DNA, 15 bp, Homo sapiens
tttactgaaagtttc

SEQ ID NO: 85612 - DNA, 15 bp, Homo sapiens
ctttactgaaagttt

SEQ ID NO: 85613 - DNA, 15 bp, Homo sapiens
cctttactgaaagtt

SEQ ID NO: 85614 - DNA, 15 bp, Homo sapiens
tcctttactgaaagt

SEQ ID NO: 85615 - DNA, 15 bp, Homo sapiens
atcctttactgaaag

SEQ ID NO: 85616 - DNA, 15 bp, Homo sapiens
catcctttactgaaa

SEQ ID NO: 85617 - DNA, 15 bp, Homo sapiens
ccatcctttactgaa

SEQ ID NO: 85618 - DNA, 15 bp, Homo sapiens
accatcctttactga

SEQ ID NO: 85619 - DNA, 15 bp, Homo sapiens
aaccatcctttactg

SEQ ID NO: 85620 - DNA, 15 bp, Homo sapiens
taaccatcctttact

SEQ ID NO: 85621 - DNA, 15 bp, Homo sapiens
ttaaccatcctttac

SEQ ID NO: 85622 - DNA, 15 bp, Homo sapiens
tttaaccatccttta

SEQ ID NO: 85623 - DNA, 15 bp, Homo sapiens
ttttaaccatccttt

SEQ ID NO: 85624 - DNA, 15 bp, Homo sapiens
tttttaaccatcctt

SEQ ID NO: 85625 - DNA, 15 bp, Homo sapiens
atttttaaccatcct

SEQ ID NO: 85626 - DNA, 15 bp, Homo sapiens
catttttaaccatcc

SEQ ID NO: 85627 - DNA, 15 bp, Homo sapiens
acatttttaaccatc

SEQ ID NO: 85628 - DNA, 15 bp, Homo sapiens
gacatttttaaccat

SEQ ID NO: 85629 - DNA, 15 bp, Homo sapiens
ggacatttttaacca

SEQ ID NO: 85630 - DNA, 15 bp, Homo sapiens
tggacatttttaacc

SEQ ID NO: 85631 - DNA, 15 bp, Homo sapiens
ctggacatttttaac

SEQ ID NO: 85632 - DNA, 15 bp, Homo sapiens
cctggacatttttaa

SEQ ID NO: 85633 - DNA, 15 bp, Homo sapiens
tcctggacattttta

SEQ ID NO: 85634 - DNA, 15 bp, Homo sapiens
ctcctggacattttt

SEQ ID NO: 85635 - DNA, 15 bp, Homo sapiens
gctcctggacatttt

SEQ ID NO: 85636 - DNA, 15 bp, Homo sapiens
agctcctggacattt

SEQ ID NO: 85637 - DNA, 15 bp, Homo sapiens
cagctcctggacatt

SEQ ID NO: 85638 - DNA, 15 bp, Homo sapiens
ccagctcctggacat

SEQ ID NO: 85639 - DNA, 15 bp, Homo sapiens
cccagctcctggaca

SEQ ID NO: 85640 - DNA, 15 bp, Homo sapiens
tcccagctcctggac

SEQ ID NO: 85641 - DNA, 15 bp, Homo sapiens
ctcccagctcctgga

SEQ ID NO: 85642 - DNA, 15 bp, Homo sapiens
tctcccagctcctgg

SEQ ID NO: 85643 - DNA, 15 bp, Homo sapiens
atctcccagctcctg

SEQ ID NO: 85644 - DNA, 15 bp, Homo sapiens
aatctcccagctcct

SEQ ID NO: 85645 - DNA, 15 bp, Homo sapiens
taatctcccagctcc

SEQ ID NO: 85646 - DNA, 15 bp, Homo sapiens
ttaatctcccagctc

SEQ ID NO: 85647 - DNA, 15 bp, Homo sapiens
cttaatctcccagct

SEQ ID NO: 85648 - DNA, 15 bp, Homo sapiens
acttaatctcccagc

SEQ ID NO: 85649 - DNA, 15 bp, Homo sapiens
tacttaatctcccag

SEQ ID NO: 85650 - DNA, 15 bp, Homo sapiens
ttacttaatctccca

SEQ ID NO: 85651 - DNA, 15 bp, Homo sapiens
gttacttaatctccc

SEQ ID NO: 85652 - DNA, 15 bp, Homo sapiens
agttacttaatctcc

SEQ ID NO: 85653 - DNA, 15 bp, Homo sapiens
aagttacttaatctc

SEQ ID NO: 85654 - DNA, 15 bp, Homo sapiens
caagttacttaatct

SEQ ID NO: 85655 - DNA, 15 bp, Homo sapiens
gcaagttacttaatc

SEQ ID NO: 85656 - DNA, 15 bp, Homo sapiens
ggcaagttacttaat

SEQ ID NO: 85657 - DNA, 15 bp, Homo sapiens
gggcaagttacttaa

SEQ ID NO: 85658 - DNA, 15 bp, Homo sapiens
tgggcaagttactta

SEQ ID NO: 85659 - DNA, 15 bp, Homo sapiens
ttgggcaagttactt

SEQ ID NO: 85660 - DNA, 15 bp, Homo sapiens
tttgggcaagttact

SEQ ID NO: 85661 - DNA, 15 bp, Homo sapiens
ctttgggcaagttac

SEQ ID NO: 85662 - DNA, 15 bp, Homo sapiens
actttgggcaagtta

SEQ ID NO: 85663 - DNA, 15 bp, Homo sapiens
aactttgggcaagtt

SEQ ID NO: 85664 - DNA, 15 bp, Homo sapiens
caactttgggcaagt

SEQ ID NO: 85665 - DNA, 15 bp, Homo sapiens
gcaactttgggcaag

SEQ ID NO: 85666 - DNA, 15 bp, Homo sapiens
tgcaactttgggcaa

SEQ ID NO: 85667 - DNA, 15 bp, Homo sapiens
gtgcaactttgggca

SEQ ID NO: 85668 - DNA, 15 bp, Homo sapiens
tgtgcaactttgggc

SEQ ID NO: 85669 - DNA, 15 bp, Homo sapiens
ctgtgcaactttggg

SEQ ID NO: 85670 - DNA, 15 bp, Homo sapiens
gctgtgcaactttgg

SEQ ID NO: 85671 - DNA, 15 bp, Homo sapiens
ggctgtgcaactttg

SEQ ID NO: 85672 - DNA, 15 bp, Homo sapiens
tggctgtgcaacttt

SEQ ID NO: 85673 - DNA, 15 bp, Homo sapiens
ttggctgtgcaactt

SEQ ID NO: 85674 - DNA, 15 bp, Homo sapiens
attggctgtgcaact

SEQ ID NO: 85675 - DNA, 15 bp, Homo sapiens
tattggctgtgcaac

SEQ ID NO: 85676 - DNA, 15 bp, Homo sapiens
ttattggctgtgcaa

SEQ ID NO: 85677 - DNA, 15 bp, Homo sapiens
tttattggctgtgca

SEQ ID NO: 85678 - DNA, 15 bp, Homo sapiens
ctttattggctgtgc

SEQ ID NO: 85679 - DNA, 15 bp, Homo sapiens
gctttattggctgtg

SEQ ID NO: 85680 - DNA, 15 bp, Homo sapiens
agctttattggctgt

SEQ ID NO: 85681 - DNA, 15 bp, Homo sapiens
gagctttattggctg

SEQ ID NO: 85682 - DNA, 15 bp, Homo sapiens
ggagctttattggct

SEQ ID NO: 85683 - DNA, 15 bp, Homo sapiens
tggagctttattggc

SEQ ID NO: 85684 - DNA, 15 bp, Homo sapiens
gtggagctttattgg

SEQ ID NO: 85685 - DNA, 15 bp, Homo sapiens
tgtggagctttattg

SEQ ID NO: 85686 - DNA, 15 bp, Homo sapiens
atgtggagctttatt

SEQ ID NO: 85687 - DNA, 15 bp, Homo sapiens
aatgtggagctttat

SEQ ID NO: 85688 - DNA, 15 bp, Homo sapiens
caatgtggagcttta

SEQ ID NO: 85689 - DNA, 15 bp, Homo sapiens
tcaatgtggagcttt

SEQ ID NO: 85690 - DNA, 15 bp, Homo sapiens
gtcaatgtggagctt

SEQ ID NO: 85691 - DNA, 15 bp, Homo sapiens
ggtcaatgtggagct

SEQ ID NO: 85692 - DNA, 15 bp, Homo sapiens
gggtcaatgtggagc

SEQ ID NO: 85693 - DNA, 15 bp, Homo sapiens
tgggtcaatgtggag

SEQ ID NO: 85694 - DNA, 15 bp, Homo sapiens
ctgggtcaatgtgga

SEQ ID NO: 85695 - DNA, 15 bp, Homo sapiens
gctgggtcaatgtgg

SEQ ID NO: 85696 - DNA, 15 bp, Homo sapiens
agctgggtcaatgtg

SEQ ID NO: 85697 - DNA, 15 bp, Homo sapiens
cagctgggtcaatgt

SEQ ID NO: 85698 - DNA, 15 bp, Homo sapiens
ccagctgggtcaatg

SEQ ID NO: 85699 - DNA, 15 bp, Homo sapiens
accagctgggtcaat

SEQ ID NO: 85700 - DNA, 15 bp, Homo sapiens
caccagctgggtcaa

SEQ ID NO: 85701 - DNA, 15 bp, Homo sapiens
ccaccagctgggtca

SEQ ID NO: 85702 - DNA, 15 bp, Homo sapiens
gccaccagctgggtc

SEQ ID NO: 85703 - DNA, 15 bp, Homo sapiens
ggccaccagctgggt

SEQ ID NO: 85704 - DNA, 15 bp, Homo sapiens
tggccaccagctggg

SEQ ID NO: 85705 - DNA, 15 bp, Homo sapiens
ctggccaccagctgg

SEQ ID NO: 85706 - DNA, 15 bp, Homo sapiens
actggccaccagctg

SEQ ID NO: 85707 - DNA, 15 bp, Homo sapiens
cactggccaccagct

SEQ ID NO: 85708 - DNA, 15 bp, Homo sapiens
gcactggccaccagc

SEQ ID NO: 85709 - DNA, 15 bp, Homo sapiens
ggcactggccaccag

SEQ ID NO: 85710 - DNA, 15 bp, Homo sapiens
aggcactggccacca

SEQ ID NO: 85711 - DNA, 15 bp, Homo sapiens
aaggcactggccacc

SEQ ID NO: 85712 - DNA, 15 bp, Homo sapiens
aaaggcactggccac

SEQ ID NO: 85713 - DNA, 15 bp, Homo sapiens
aaaaggcactggcca

SEQ ID NO: 85714 - DNA, 15 bp, Homo sapiens
caaaaggcactggcc

SEQ ID NO: 85715 - DNA, 15 bp, Homo sapiens
acaaaaggcactggc

SEQ ID NO: 85716 - DNA, 15 bp, Homo sapiens
aacaaaaggcactgg

SEQ ID NO: 85717 - DNA, 15 bp, Homo sapiens
taacaaaaggcactg

SEQ ID NO: 85718 - DNA, 15 bp, Homo sapiens
ctaacaaaaggcact

SEQ ID NO: 85719 - DNA, 15 bp, Homo sapiens
tctaacaaaaggcac

SEQ ID NO: 85720 - DNA, 15 bp, Homo sapiens
ttctaacaaaaggca

SEQ ID NO: 85721 - DNA, 15 bp, Homo sapiens
gttctaacaaaaggc

SEQ ID NO: 85722 - DNA, 15 bp, Homo sapiens
tgttctaacaaaagg

SEQ ID NO: 85723 - DNA, 15 bp, Homo sapiens
ctgttctaacaaaag

SEQ ID NO: 85724 - DNA, 15 bp, Homo sapiens
tctgttctaacaaaa

SEQ ID NO: 85725 - DNA, 15 bp, Homo sapiens
atctgttctaacaaa

SEQ ID NO: 85726 - DNA, 15 bp, Homo sapiens
aatctgttctaacaa

SEQ ID NO: 85727 - DNA, 15 bp, Homo sapiens
aaatctgttctaaca

SEQ ID NO: 85728 - DNA, 15 bp, Homo sapiens
taaatctgttctaac

SEQ ID NO: 85729 - DNA, 15 bp, Homo sapiens
ttaaatctgttctaa

SEQ ID NO: 85730 - DNA, 15 bp, Homo sapiens
tttaaatctgttcta

SEQ ID NO: 85731 - DNA, 15 bp, Homo sapiens
ctttaaatctgttct

SEQ ID NO: 85732 - DNA, 15 bp, Homo sapiens
gctttaaatctgttc

SEQ ID NO: 85733 - DNA, 15 bp, Homo sapiens
tgctttaaatctgtt

SEQ ID NO: 85734 - DNA, 15 bp, Homo sapiens
ctgctttaaatctgt

SEQ ID NO: 85735 - DNA, 15 bp, Homo sapiens
gctgctttaaatctg

SEQ ID NO: 85736 - DNA, 15 bp, Homo sapiens
agctgctttaaatct

SEQ ID NO: 85737 - DNA, 15 bp, Homo sapiens
cagctgctttaaatc

SEQ ID NO: 85738 - DNA, 15 bp, Homo sapiens
acagctgctttaaat

SEQ ID NO: 85739 - DNA, 15 bp, Homo sapiens
gacagctgctttaaa

SEQ ID NO: 85740 - DNA, 15 bp, Homo sapiens
ggacagctgctttaa

SEQ ID NO: 85741 - DNA, 15 bp, Homo sapiens
tggacagctgcttta

SEQ ID NO: 85742 - DNA, 15 bp, Homo sapiens
atggacagctgcttt

SEQ ID NO: 85743 - DNA, 15 bp, Homo sapiens
catggacagctgctt

SEQ ID NO: 85744 - DNA, 15 bp, Homo sapiens
tcatggacagctgct

SEQ ID NO: 85745 - DNA, 15 bp, Homo sapiens
ttcatggacagctgc

SEQ ID NO: 85746 - DNA, 15 bp, Homo sapiens
cttcatggacagctg

SEQ ID NO: 85747 - DNA, 15 bp, Homo sapiens
ccttcatggacagct

SEQ ID NO: 85748 - DNA, 15 bp, Homo sapiens
cccttcatggacagc

SEQ ID NO: 85749 - DNA, 15 bp, Homo sapiens
tcccttcatggacag

SEQ ID NO: 85750 - DNA, 15 bp, Homo sapiens
ttcccttcatggaca

SEQ ID NO: 85751 - DNA, 15 bp, Homo sapiens
cttcccttcatggac

SEQ ID NO: 85752 - DNA, 15 bp, Homo sapiens
gcttcccttcatgga

SEQ ID NO: 85753 - DNA, 15 bp, Homo sapiens
tgcttcccttcatgg

SEQ ID NO: 85754 - DNA, 15 bp, Homo sapiens
ttgcttcccttcatg

SEQ ID NO: 85755 - DNA, 15 bp, Homo sapiens
cttgcttcccttcat

SEQ ID NO: 85756 - DNA, 15 bp, Homo sapiens
gcttgcttcccttca

SEQ ID NO: 85757 - DNA, 15 bp, Homo sapiens
tgcttgcttcccttc

SEQ ID NO: 85758 - DNA, 15 bp, Homo sapiens
ctgcttgcttccctt

SEQ ID NO: 85759 - DNA, 15 bp, Homo sapiens
actgcttgcttccct

SEQ ID NO: 85760 - DNA, 15 bp, Homo sapiens
cactgcttgcttccc

SEQ ID NO: 85761 - DNA, 15 bp, Homo sapiens
acactgcttgcttcc

SEQ ID NO: 85762 - DNA, 15 bp, Homo sapiens
cacactgcttgcttc

SEQ ID NO: 85763 - DNA, 15 bp, Homo sapiens
ccacactgcttgctt

SEQ ID NO: 85764 - DNA, 15 bp, Homo sapiens
accacactgcttgct

SEQ ID NO: 85765 - DNA, 15 bp, Homo sapiens
caccacactgcttgc

SEQ ID NO: 85766 - DNA, 15 bp, Homo sapiens
tcaccacactgcttg

SEQ ID NO: 85767 - DNA, 15 bp, Homo sapiens
atcaccacactgctt

SEQ ID NO: 85768 - DNA, 15 bp, Homo sapiens
aatcaccacactgct

SEQ ID NO: 85769 - DNA, 15 bp, Homo sapiens
caatcaccacactgc

SEQ ID NO: 85770 - DNA, 15 bp, Homo sapiens
ccaatcaccacactg

SEQ ID NO: 85771 - DNA, 15 bp, Homo sapiens
gccaatcaccacact

SEQ ID NO: 85772 - DNA, 15 bp, Homo sapiens
agccaatcaccacac

SEQ ID NO: 85773 - DNA, 15 bp, Homo sapiens
cagccaatcaccaca

SEQ ID NO: 85774 - DNA, 15 bp, Homo sapiens
gcagccaatcaccac

SEQ ID NO: 85775 - DNA, 15 bp, Homo sapiens
ggcagccaatcacca

SEQ ID NO: 85776 - DNA, 15 bp, Homo sapiens
aggcagccaatcacc

SEQ ID NO: 85777 - DNA, 15 bp, Homo sapiens
aaggcagccaatcac

SEQ ID NO: 85778 - DNA, 15 bp, Homo sapiens
aaaggcagccaatca

SEQ ID NO: 85779 - DNA, 15 bp, Homo sapiens
aaaaggcagccaatc

SEQ ID NO: 85780 - DNA, 15 bp, Homo sapiens
caaaaggcagccaat

SEQ ID NO: 85781 - DNA, 15 bp, Homo sapiens
tcaaaaggcagccaa

SEQ ID NO: 85782 - DNA, 15 bp, Homo sapiens
gtcaaaaggcagcca

SEQ ID NO: 85783 - DNA, 15 bp, Homo sapiens
ggtcaaaaggcagcc

SEQ ID NO: 85784 - DNA, 15 bp, Homo sapiens
gggtcaaaaggcagc

SEQ ID NO: 85785 - DNA, 15 bp, Homo sapiens
ggggtcaaaaggcag

SEQ ID NO: 85786 - DNA, 15 bp, Homo sapiens
tggggtcaaaaggca

SEQ ID NO: 85787 - DNA, 15 bp, Homo sapiens
atggggtcaaaaggc

SEQ ID NO: 85788 - DNA, 15 bp, Homo sapiens
gatggggtcaaaagg

SEQ ID NO: 85789 - DNA, 15 bp, Homo sapiens
agatggggtcaaaag

SEQ ID NO: 85790 - DNA, 15 bp, Homo sapiens
cagatggggtcaaaa

SEQ ID NO: 85791 - DNA, 15 bp, Homo sapiens
gcagatggggtcaaa

SEQ ID NO: 85792 - DNA, 15 bp, Homo sapiens
tgcagatggggtcaa

SEQ ID NO: 85793 - DNA, 15 bp, Homo sapiens
ctgcagatggggtca

SEQ ID NO: 85794 - DNA, 15 bp, Homo sapiens
gctgcagatggggtc

SEQ ID NO: 85795 - DNA, 15 bp, Homo sapiens
ggctgcagatggggt

SEQ ID NO: 85796 - DNA, 15 bp, Homo sapiens
tggctgcagatgggg

SEQ ID NO: 85797 - DNA, 15 bp, Homo sapiens
ctggctgcagatggg

SEQ ID NO: 85798 - DNA, 15 bp, Homo sapiens
cctggctgcagatgg

SEQ ID NO: 85799 - DNA, 15 bp, Homo sapiens
tcctggctgcagatg

SEQ ID NO: 85800 - DNA, 15 bp, Homo sapiens
atcctggctgcagat

SEQ ID NO: 85801 - DNA, 15 bp, Homo sapiens
catcctggctgcaga

SEQ ID NO: 85802 - DNA, 15 bp, Homo sapiens
ccatcctggctgcag

SEQ ID NO: 85803 - DNA, 15 bp, Homo sapiens
gccatcctggctgca

SEQ ID NO: 85804 - DNA, 15 bp, Homo sapiens
ggccatcctggctgc

SEQ ID NO: 85805 - DNA, 15 bp, Homo sapiens
tggccatcctggctg

SEQ ID NO: 85806 - DNA, 15 bp, Homo sapiens
ctggccatcctggct

SEQ ID NO: 85807 - DNA, 15 bp, Homo sapiens
cctggccatcctggc

SEQ ID NO: 85808 - DNA, 15 bp, Homo sapiens
ccctggccatcctgg

SEQ ID NO: 85809 - DNA, 15 bp, Homo sapiens
gccctggccatcctg

SEQ ID NO: 85810 - DNA, 15 bp, Homo sapiens
agccctggccatcct

SEQ ID NO: 85811 - DNA, 15 bp, Homo sapiens
gagccctggccatcc

SEQ ID NO: 85812 - DNA, 15 bp, Homo sapiens
ggagccctggccatc

SEQ ID NO: 85813 - DNA, 15 bp, Homo sapiens
aggagccctggccat

SEQ ID NO: 85814 - DNA, 15 bp, Homo sapiens
gaggagccctggcca

SEQ ID NO: 85815 - DNA, 15 bp, Homo sapiens
agaggagccctggcc

SEQ ID NO: 85816 - DNA, 15 bp, Homo sapiens
cagaggagccctggc

SEQ ID NO: 85817 - DNA, 15 bp, Homo sapiens
gcagaggagccctgg

SEQ ID NO: 85818 - DNA, 15 bp, Homo sapiens
tgcagaggagccctg

SEQ ID NO: 85819 - DNA, 15 bp, Homo sapiens
ctgcagaggagccct

SEQ ID NO: 85820 - DNA, 15 bp, Homo sapiens
cctgcagaggagccc

SEQ ID NO: 85821 - DNA, 15 bp, Homo sapiens
tcctgcagaggagcc

SEQ ID NO: 85822 - DNA, 15 bp, Homo sapiens
ttcctgcagaggagc

SEQ ID NO: 85823 - DNA, 15 bp, Homo sapiens
cttcctgcagaggag

SEQ ID NO: 85824 - DNA, 15 bp, Homo sapiens
tcttcctgcagagga

SEQ ID NO: 85825 - DNA, 15 bp, Homo sapiens
ctcttcctgcagagg

SEQ ID NO: 85826 - DNA, 15 bp, Homo sapiens
cctcttcctgcagag

SEQ ID NO: 85827 - DNA, 15 bp, Homo sapiens
gcctcttcctgcaga

SEQ ID NO: 85828 - DNA, 15 bp, Homo sapiens
agcctcttcctgcag

SEQ ID NO: 85829 - DNA, 15 bp, Homo sapiens
cagcctcttcctgca

SEQ ID NO: 85830 - DNA, 15 bp, Homo sapiens
gcagcctcttcctgc

SEQ ID NO: 85831 - DNA, 15 bp, Homo sapiens
agcagcctcttcctg

SEQ ID NO: 85832 - DNA, 15 bp, Homo sapiens
gagcagcctcttcct

SEQ ID NO: 85833 - DNA, 15 bp, Homo sapiens
ggagcagcctcttcc

SEQ ID NO: 85834 - DNA, 15 bp, Homo sapiens
gggagcagcctcttc

SEQ ID NO: 85835 - DNA, 15 bp, Homo sapiens
tgggagcagcctctt

SEQ ID NO: 85836 - DNA, 15 bp, Homo sapiens
ctgggagcagcctct

SEQ ID NO: 85837 - DNA, 15 bp, Homo sapiens
actgggagcagcctc

SEQ ID NO: 85838 - DNA, 15 bp, Homo sapiens
cactgggagcagcct

SEQ ID NO: 85839 - DNA, 15 bp, Homo sapiens
acactgggagcagcc

SEQ ID NO: 85840 - DNA, 15 bp, Homo sapiens
cacactgggagcagc

SEQ ID NO: 85841 - DNA, 15 bp, Homo sapiens
ccacactgggagcag

SEQ ID NO: 85842 - DNA, 15 bp, Homo sapiens
accacactgggagca

SEQ ID NO: 85843 - DNA, 15 bp, Homo sapiens
gaccacactgggagc

SEQ ID NO: 85844 - DNA, 15 bp, Homo sapiens
ggaccacactgggag

SEQ ID NO: 85845 - DNA, 15 bp, Homo sapiens
tggaccacactggga

SEQ ID NO: 85846 - DNA, 15 bp, Homo sapiens
ctggaccacactggg

SEQ ID NO: 85847 - DNA, 15 bp, Homo sapiens
tctggaccacactgg

SEQ ID NO: 85848 - DNA, 15 bp, Homo sapiens
atctggaccacactg

SEQ ID NO: 85849 - DNA, 15 bp, Homo sapiens
gatctggaccacact

SEQ ID NO: 85850 - DNA, 15 bp, Homo sapiens
agatctggaccacac

SEQ ID NO: 85851 - DNA, 15 bp, Homo sapiens
aagatctggaccaca

SEQ ID NO: 85852 - DNA, 15 bp, Homo sapiens
gaagatctggaccac

SEQ ID NO: 85853 - DNA, 15 bp, Homo sapiens
tgaagatctggacca

SEQ ID NO: 85854 - DNA, 15 bp, Homo sapiens
gtgaagatctggacc

SEQ ID NO: 85855 - DNA, 15 bp, Homo sapiens
ggtgaagatctggac

SEQ ID NO: 85856 - DNA, 15 bp, Homo sapiens
gggtgaagatctgga

SEQ ID NO: 85857 - DNA, 15 bp, Homo sapiens
tgggtgaagatctgg

SEQ ID NO: 85858 - DNA, 15 bp, Homo sapiens
atgggtgaagatctg

SEQ ID NO: 85859 - DNA, 15 bp, Homo sapiens
gatgggtgaagatct

SEQ ID NO: 85860 - DNA, 15 bp, Homo sapiens
ggatgggtgaagatc

SEQ ID NO: 85861 - DNA, 15 bp, Homo sapiens
aggatgggtgaagat

SEQ ID NO: 85862 - DNA, 15 bp, Homo sapiens
gaggatgggtgaaga

SEQ ID NO: 85863 - DNA, 15 bp, Homo sapiens
tgaggatgggtgaag

SEQ ID NO: 85864 - DNA, 15 bp, Homo sapiens
ctgaggatgggtgaa

SEQ ID NO: 85865 - DNA, 15 bp, Homo sapiens
cctgaggatgggtga

SEQ ID NO: 85866 - DNA, 15 bp, Homo sapiens
gcctgaggatgggtg

SEQ ID NO: 85867 - DNA, 15 bp, Homo sapiens
cgcctgaggatgggt

SEQ ID NO: 85868 - DNA, 15 bp, Homo sapiens
ccgcctgaggatggg

SEQ ID NO: 85869 - DNA, 15 bp, Homo sapiens
gccgcctgaggatgg

SEQ ID NO: 85870 - DNA, 15 bp, Homo sapiens
tgccgcctgaggatg

SEQ ID NO: 85871 - DNA, 15 bp, Homo sapiens
gtgccgcctgaggat

SEQ ID NO: 85872 - DNA, 15 bp, Homo sapiens
ggtgccgcctgagga

SEQ ID NO: 85873 - DNA, 15 bp, Homo sapiens
tggtgccgcctgagg

SEQ ID NO: 85874 - DNA, 15 bp, Homo sapiens
atggtgccgcctgag

SEQ ID NO: 85875 - DNA, 15 bp, Homo sapiens
gatggtgccgcctga

SEQ ID NO: 85876 - DNA, 15 bp, Homo sapiens
tgatggtgccgcctg

SEQ ID NO: 85877 - DNA, 15 bp, Homo sapiens
gtgatggtgccgcct

SEQ ID NO: 85878 - DNA, 15 bp, Homo sapiens
agtgatggtgccgcc

SEQ ID NO: 85879 - DNA, 15 bp, Homo sapiens
cagtgatggtgccgc

SEQ ID NO: 85880 - DNA, 15 bp, Homo sapiens
ccagtgatggtgccg

SEQ ID NO: 85881 - DNA, 15 bp, Homo sapiens
cccagtgatggtgcc

SEQ ID NO: 85882 - DNA, 15 bp, Homo sapiens
tcccagtgatggtgc

SEQ ID NO: 85883 - DNA, 15 bp, Homo sapiens
atcccagtgatggtg

SEQ ID NO: 85884 - DNA, 15 bp, Homo sapiens
gatcccagtgatggt

SEQ ID NO: 85885 - DNA, 15 bp, Homo sapiens
tgatcccagtgatgg

SEQ ID NO: 85886 - DNA, 15 bp, Homo sapiens
ctgatcccagtgatg

SEQ ID NO: 85887 - DNA, 15 bp, Homo sapiens
cctgatcccagtgat

SEQ ID NO: 85888 - DNA, 15 bp, Homo sapiens
tcctgatcccagtga

SEQ ID NO: 85889 - DNA, 15 bp, Homo sapiens
ttcctgatcccagtg

SEQ ID NO: 85890 - DNA, 15 bp, Homo sapiens
tttcctgatcccagt

SEQ ID NO: 85891 - DNA, 15 bp, Homo sapiens
gtttcctgatcccag

SEQ ID NO: 85892 - DNA, 15 bp, Homo sapiens
ggtttcctgatccca

SEQ ID NO: 85893 - DNA, 15 bp, Homo sapiens
tggtttcctgatccc

SEQ ID NO: 85894 - DNA, 15 bp, Homo sapiens
atggtttcctgatcc

SEQ ID NO: 85895 - DNA, 15 bp, Homo sapiens
aatggtttcctgatc

SEQ ID NO: 85896 - DNA, 15 bp, Homo sapiens
gaatggtttcctgat

SEQ ID NO: 85897 - DNA, 15 bp, Homo sapiens
ggaatggtttcctga

SEQ ID NO: 85898 - DNA, 15 bp, Homo sapiens
gggaatggtttcctg

SEQ ID NO: 85899 - DNA, 15 bp, Homo sapiens
ggggaatggtttcct

SEQ ID NO: 85900 - DNA, 15 bp, Homo sapiens
tggggaatggtttcc

SEQ ID NO: 85901 - DNA, 15 bp, Homo sapiens
ctggggaatggtttc

SEQ ID NO: 85902 - DNA, 15 bp, Homo sapiens
cctggggaatggttt

SEQ ID NO: 85903 - DNA, 15 bp, Homo sapiens
acctggggaatggtt

SEQ ID NO: 85904 - DNA, 15 bp, Homo sapiens
gacctggggaatggt

SEQ ID NO: 85905 - DNA, 15 bp, Homo sapiens
tgacctggggaatgg

SEQ ID NO: 85906 - DNA, 15 bp, Homo sapiens
ctgacctggggaatg

SEQ ID NO: 85907 - DNA, 15 bp, Homo sapiens
cctgacctggggaat

SEQ ID NO: 85908 - DNA, 15 bp, Homo sapiens
ccctgacctggggaa

SEQ ID NO: 85909 - DNA, 15 bp, Homo sapiens
tccctgacctgggga

SEQ ID NO: 85910 - DNA, 15 bp, Homo sapiens
gtccctgacctgggg

SEQ ID NO: 85911 - DNA, 15 bp, Homo sapiens
tgtccctgacctggg

SEQ ID NO: 85912 - DNA, 15 bp, Homo sapiens
ttgtccctgacctgg

SEQ ID NO: 85913 - DNA, 15 bp, Homo sapiens
gttgtccctgacctg

SEQ ID NO: 85914 - DNA, 15 bp, Homo sapiens
tgttgtccctgacct

SEQ ID NO: 85915 - DNA, 15 bp, Homo sapiens
atgttgtccctgacc

SEQ ID NO: 85916 - DNA, 15 bp, Homo sapiens
aatgttgtccctgac

SEQ ID NO: 85917 - DNA, 15 bp, Homo sapiens
gaatgttgtccctga

SEQ ID NO: 85918 - DNA, 15 bp, Homo sapiens
tgaatgttgtccctg

SEQ ID NO: 85919 - DNA, 15 bp, Homo sapiens
gtgaatgttgtccct

SEQ ID NO: 85920 - DNA, 15 bp, Homo sapiens
tgtgaatgttgtccc

SEQ ID NO: 85921 - DNA, 15 bp, Homo sapiens
atgtgaatgttgtcc

SEQ ID NO: 85922 - DNA, 15 bp, Homo sapiens
gatgtgaatgttgtc

SEQ ID NO: 85923 - DNA, 15 bp, Homo sapiens
tgatgtgaatgttgt

SEQ ID NO: 85924 - DNA, 15 bp, Homo sapiens
atgatgtgaatgttg

SEQ ID NO: 85925 - DNA, 15 bp, Homo sapiens
catgatgtgaatgtt

SEQ ID NO: 85926 - DNA, 15 bp, Homo sapiens
tcatgatgtgaatgt

SEQ ID NO: 85927 - DNA, 15 bp, Homo sapiens
gtcatgatgtgaatg

SEQ ID NO: 85928 - DNA, 15 bp, Homo sapiens
tgtcatgatgtgaat

SEQ ID NO: 85929 - DNA, 15 bp, Homo sapiens
ttgtcatgatgtgaa

SEQ ID NO: 85930 - DNA, 15 bp, Homo sapiens
attgtcatgatgtga

SEQ ID NO: 85931 - DNA, 15 bp, Homo sapiens
gattgtcatgatgtg

SEQ ID NO: 85932 - DNA, 15 bp, Homo sapiens
agattgtcatgatgt

SEQ ID NO: 85933 - DNA, 15 bp, Homo sapiens
cagattgtcatgatg

SEQ ID NO: 85934 - DNA, 15 bp, Homo sapiens
acagattgtcatgat

SEQ ID NO: 85935 - DNA, 15 bp, Homo sapiens
tacagattgtcatga

SEQ ID NO: 85936 - DNA, 15 bp, Homo sapiens
ttacagattgtcatg

SEQ ID NO: 85937 - DNA, 15 bp, Homo sapiens
cttacagattgtcat

SEQ ID NO: 85938 - DNA, 15 bp, Homo sapiens
ccttacagattgtca

SEQ ID NO: 85939 - DNA, 15 bp, Homo sapiens
gccttacagattgtc

SEQ ID NO: 85940 - DNA, 15 bp, Homo sapiens
cgccttacagattgt

SEQ ID NO: 85941 - DNA, 15 bp, Homo sapiens
gcgccttacagattg

SEQ ID NO: 85942 - DNA, 15 bp, Homo sapiens
cgcgccttacagatt

SEQ ID NO: 85943 - DNA, 15 bp, Homo sapiens
ccgcgccttacagat

SEQ ID NO: 85944 - DNA, 15 bp, Homo sapiens
cccgcgccttacaga

SEQ ID NO: 85945 - DNA, 15 bp, Homo sapiens
gcccgcgccttacag

SEQ ID NO: 85946 - DNA, 15 bp, Homo sapiens
agcccgcgccttaca

SEQ ID NO: 85947 - DNA, 15 bp, Homo sapiens
cagcccgcgccttac

SEQ ID NO: 85948 - DNA, 15 bp, Homo sapiens
gcagcccgcgcctta

SEQ ID NO: 85949 - DNA, 15 bp, Homo sapiens
tgcagcccgcgcctt

SEQ ID NO: 85950 - DNA, 15 bp, Homo sapiens
ttgcagcccgcgcct

SEQ ID NO: 85951 - DNA, 15 bp, Homo sapiens
cttgcagcccgcgcc

SEQ ID NO: 85952 - DNA, 15 bp, Homo sapiens
tcttgcagcccgcgc

SEQ ID NO: 85953 - DNA, 15 bp, Homo sapiens
gtcttgcagcccgcg

SEQ ID NO: 85954 - DNA, 15 bp, Homo sapiens
tgtcttgcagcccgc

SEQ ID NO: 85955 - DNA, 15 bp, Homo sapiens
ctgtcttgcagcccg

SEQ ID NO: 85956 - DNA, 15 bp, Homo sapiens
gctgtcttgcagccc

SEQ ID NO: 85957 - DNA, 15 bp, Homo sapiens
tgctgtcttgcagcc

SEQ ID NO: 85958 - DNA, 15 bp, Homo sapiens
ctgctgtcttgcagc

SEQ ID NO: 85959 - DNA, 15 bp, Homo sapiens
gctgctgtcttgcag

SEQ ID NO: 85960 - DNA, 15 bp, Homo sapiens
ggctgctgtcttgca

SEQ ID NO: 85961 - DNA, 15 bp, Homo sapiens
gggctgctgtcttgc

SEQ ID NO: 85962 - DNA, 15 bp, Homo sapiens
tgggctgctgtcttg

SEQ ID NO: 85963 - DNA, 15 bp, Homo sapiens
atgggctgctgtctt

SEQ ID NO: 85964 - DNA, 15 bp, Homo sapiens
aatgggctgctgtct

SEQ ID NO: 85965 - DNA, 15 bp, Homo sapiens
caatgggctgctgtc

SEQ ID NO: 85966 - DNA, 15 bp, Homo sapiens
acaatgggctgctgt

SEQ ID NO: 85967 - DNA, 15 bp, Homo sapiens
gacaatgggctgctg

SEQ ID NO: 85968 - DNA, 15 bp, Homo sapiens
agacaatgggctgct

SEQ ID NO: 85969 - DNA, 15 bp, Homo sapiens
aagacaatgggctgc

SEQ ID NO: 85970 - DNA, 15 bp, Homo sapiens
caagacaatgggctg

SEQ ID NO: 85971 - DNA, 15 bp, Homo sapiens
tcaagacaatgggct

SEQ ID NO: 85972 - DNA, 15 bp, Homo sapiens
ttcaagacaatgggc

SEQ ID NO: 85973 - DNA, 15 bp, Homo sapiens
cttcaagacaatggg

SEQ ID NO: 85974 - DNA, 15 bp, Homo sapiens
gcttcaagacaatgg

SEQ ID NO: 85975 - DNA, 15 bp, Homo sapiens
tgcttcaagacaatg

SEQ ID NO: 85976 - DNA, 15 bp, Homo sapiens
ctgcttcaagacaat

SEQ ID NO: 85977 - DNA, 15 bp, Homo sapiens
cctgcttcaagacaa

SEQ ID NO: 85978 - DNA, 15 bp, Homo sapiens
ccctgcttcaagaca

SEQ ID NO: 85979 - DNA, 15 bp, Homo sapiens
accctgcttcaagac

SEQ ID NO: 85980 - DNA, 15 bp, Homo sapiens
aaccctgcttcaaga

SEQ ID NO: 85981 - DNA, 15 bp, Homo sapiens
gaaccctgcttcaag

SEQ ID NO: 85982 - DNA, 15 bp, Homo sapiens
agaaccctgcttcaa

SEQ ID NO: 85983 - DNA, 15 bp, Homo sapiens
cagaaccctgcttca

SEQ ID NO: 85984 - DNA, 15 bp, Homo sapiens
ccagaaccctgcttc

SEQ ID NO: 85985 - DNA, 15 bp, Homo sapiens
tccagaaccctgctt

SEQ ID NO: 85986 - DNA, 15 bp, Homo sapiens
ctccagaaccctgct

SEQ ID NO: 85987 - DNA, 15 bp, Homo sapiens
cctccagaaccctgc

SEQ ID NO: 85988 - DNA, 15 bp, Homo sapiens
tcctccagaaccctg

SEQ ID NO: 85989 - DNA, 15 bp, Homo sapiens
ctcctccagaaccct

SEQ ID NO: 85990 - DNA, 15 bp, Homo sapiens
tctcctccagaaccc

SEQ ID NO: 85991 - DNA, 15 bp, Homo sapiens
gtctcctccagaacc

SEQ ID NO: 85992 - DNA, 15 bp, Homo sapiens
tgtctcctccagaac

SEQ ID NO: 85993 - DNA, 15 bp, Homo sapiens
gtgtctcctccagaa

SEQ ID NO: 85994 - DNA, 15 bp, Homo sapiens
cgtgtctcctccaga

SEQ ID NO: 85995 - DNA, 15 bp, Homo sapiens
ccgtgtctcctccag

SEQ ID NO: 85996 - DNA, 15 bp, Homo sapiens
accgtgtctcctcca

SEQ ID NO: 85997 - DNA, 15 bp, Homo sapiens
caccgtgtctcctcc

SEQ ID NO: 85998 - DNA, 15 bp, Homo sapiens
gcaccgtgtctcctc

SEQ ID NO: 85999 - DNA, 15 bp, Homo sapiens
ggcaccgtgtctcct

SEQ ID NO: 86000 - DNA, 15 bp, Homo sapiens
gggcaccgtgtctcc

SEQ ID NO: 86001 - DNA, 15 bp, Homo sapiens
tgggcaccgtgtctc

SEQ ID NO: 86002 - DNA, 15 bp, Homo sapiens
atgggcaccgtgtct

SEQ ID NO: 86003 - DNA, 15 bp, Homo sapiens
gatgggcaccgtgtc

SEQ ID NO: 86004 - DNA, 15 bp, Homo sapiens
tgatgggcaccgtgt

SEQ ID NO: 86005 - DNA, 15 bp, Homo sapiens
gtgatgggcaccgtg

SEQ ID NO: 86006 - DNA, 15 bp, Homo sapiens
ggtgatgggcaccgt

SEQ ID NO: 86007 - DNA, 15 bp, Homo sapiens
aggtgatgggcaccg

SEQ ID NO: 86008 - DNA, 15 bp, Homo sapiens
caggtgatgggcacc

SEQ ID NO: 86009 - DNA, 15 bp, Homo sapiens
gcaggtgatgggcac

SEQ ID NO: 86010 - DNA, 15 bp, Homo sapiens
ggcaggtgatgggca

SEQ ID NO: 86011 - DNA, 15 bp, Homo sapiens
gggcaggtgatgggc

SEQ ID NO: 86012 - DNA, 15 bp, Homo sapiens
agggcaggtgatggg

SEQ ID NO: 86013 - DNA, 15 bp, Homo sapiens
aagggcaggtgatgg

SEQ ID NO: 86014 - DNA, 15 bp, Homo sapiens
aaagggcaggtgatg

SEQ ID NO: 86015 - DNA, 15 bp, Homo sapiens
gaaagggcaggtgat

SEQ ID NO: 86016 - DNA, 15 bp, Homo sapiens
agaaagggcaggtga

SEQ ID NO: 86017 - DNA, 15 bp, Homo sapiens
aagaaagggcaggtg

SEQ ID NO: 86018 - DNA, 15 bp, Homo sapiens
aaagaaagggcaggt

SEQ ID NO: 86019 - DNA, 15 bp, Homo sapiens
caaagaaagggcagg

SEQ ID NO: 86020 - DNA, 15 bp, Homo sapiens
acaaagaaagggcag

SEQ ID NO: 86021 - DNA, 15 bp, Homo sapiens
gacaaagaaagggca

SEQ ID NO: 86022 - DNA, 15 bp, Homo sapiens
ggacaaagaaagggc

SEQ ID NO: 86023 - DNA, 15 bp, Homo sapiens
gggacaaagaaaggg

SEQ ID NO: 86024 - DNA, 15 bp, Homo sapiens
tgggacaaagaaagg

SEQ ID NO: 86025 - DNA, 15 bp, Homo sapiens
ctgggacaaagaaag

SEQ ID NO: 86026 - DNA, 15 bp, Homo sapiens
tctgggacaaagaaa

SEQ ID NO: 86027 - DNA, 15 bp, Homo sapiens
ctctgggacaaagaa

SEQ ID NO: 86028 - DNA, 15 bp, Homo sapiens
gctctgggacaaaga

SEQ ID NO: 86029 - DNA, 15 bp, Homo sapiens
tgctctgggacaaag

SEQ ID NO: 86030 - DNA, 15 bp, Homo sapiens
ctgctctgggacaaa

SEQ ID NO: 86031 - DNA, 15 bp, Homo sapiens
tctgctctgggacaa

SEQ ID NO: 86032 - DNA, 15 bp, Homo sapiens
ctctgctctgggaca

SEQ ID NO: 86033 - DNA, 15 bp, Homo sapiens
cctctgctctgggac

SEQ ID NO: 86034 - DNA, 15 bp, Homo sapiens
tcctctgctctggga

SEQ ID NO: 86035 - DNA, 15 bp, Homo sapiens
ctcctctgctctggg

SEQ ID NO: 86036 - DNA, 15 bp, Homo sapiens
cctcctctgctctgg

SEQ ID NO: 86037 - DNA, 15 bp, Homo sapiens
ccctcctctgctctg

SEQ ID NO: 86038 - DNA, 15 bp, Homo sapiens
tccctcctctgctct

SEQ ID NO: 86039 - DNA, 15 bp, Homo sapiens
ttccctcctctgctc

SEQ ID NO: 86040 - DNA, 15 bp, Homo sapiens
tttccctcctctgct

SEQ ID NO: 86041 - DNA, 15 bp, Homo sapiens
atttccctcctctgc

SEQ ID NO: 86042 - DNA, 15 bp, Homo sapiens
catttccctcctctg

SEQ ID NO: 86043 - DNA, 15 bp, Homo sapiens
tcatttccctcctct

SEQ ID NO: 86044 - DNA, 15 bp, Homo sapiens
gtcatttccctcctc

SEQ ID NO: 86045 - DNA, 15 bp, Homo sapiens
cgtcatttccctcct

SEQ ID NO: 86046 - DNA, 15 bp, Homo sapiens
tcgtcatttccctcc

SEQ ID NO: 86047 - DNA, 15 bp, Homo sapiens
ttcgtcatttccctc

SEQ ID NO: 86048 - DNA, 15 bp, Homo sapiens
attcgtcatttccct

SEQ ID NO: 86049 - DNA, 15 bp, Homo sapiens
gattcgtcatttccc

SEQ ID NO: 86050 - DNA, 15 bp, Homo sapiens
agattcgtcatttcc

SEQ ID NO: 86051 - DNA, 15 bp, Homo sapiens
gagattcgtcatttc

SEQ ID NO: 86052 - DNA, 15 bp, Homo sapiens
tgagattcgtcattt

SEQ ID NO: 86053 - DNA, 15 bp, Homo sapiens
ctgagattcgtcatt

SEQ ID NO: 86054 - DNA, 15 bp, Homo sapiens
gctgagattcgtcat

SEQ ID NO: 86055 - DNA, 15 bp, Homo sapiens
cgctgagattcgtca

SEQ ID NO: 86056 - DNA, 15 bp, Homo sapiens
gcgctgagattcgtc

SEQ ID NO: 86057 - DNA, 15 bp, Homo sapiens
tgcgctgagattcgt

SEQ ID NO: 86058 - DNA, 15 bp, Homo sapiens
ctgcgctgagattcg

SEQ ID NO: 86059 - DNA, 15 bp, Homo sapiens
gctgcgctgagattc

SEQ ID NO: 86060 - DNA, 15 bp, Homo sapiens
tgctgcgctgagatt

SEQ ID NO: 86061 - DNA, 15 bp, Homo sapiens
ctgctgcgctgagat

SEQ ID NO: 86062 - DNA, 15 bp, Homo sapiens
gctgctgcgctgaga

SEQ ID NO: 86063 - DNA, 15 bp, Homo sapiens
tgctgctgcgctgag

SEQ ID NO: 86064 - DNA, 15 bp, Homo sapiens
gtgctgctgcgctga

SEQ ID NO: 86065 - DNA, 15 bp, Homo sapiens
agtgctgctgcgctg

SEQ ID NO: 86066 - DNA, 15 bp, Homo sapiens
aagtgctgctgcgct

SEQ ID NO: 86067 - DNA, 15 bp, Homo sapiens
aaagtgctgctgcgc

SEQ ID NO: 86068 - DNA, 15 bp, Homo sapiens
taaagtgctgctgcg

SEQ ID NO: 86069 - DNA, 15 bp, Homo sapiens
ataaagtgctgctgc

SEQ ID NO: 86070 - DNA, 15 bp, Homo sapiens
gataaagtgctgctg

SEQ ID NO: 86071 - DNA, 15 bp, Homo sapiens
ggataaagtgctgct

SEQ ID NO: 86072 - DNA, 15 bp, Homo sapiens
tggataaagtgctgc

SEQ ID NO: 86073 - DNA, 15 bp, Homo sapiens
gtggataaagtgctg

SEQ ID NO: 86074 - DNA, 15 bp, Homo sapiens
ggtggataaagtgct

SEQ ID NO: 86075 - DNA, 15 bp, Homo sapiens
aggtggataaagtgc

SEQ ID NO: 86076 - DNA, 15 bp, Homo sapiens
caggtggataaagtg

SEQ ID NO: 86077 - DNA, 15 bp, Homo sapiens
acaggtggataaagt

SEQ ID NO: 86078 - DNA, 15 bp, Homo sapiens
cacaggtggataaag

SEQ ID NO: 86079 - DNA, 15 bp, Homo sapiens
acacaggtggataaa

SEQ ID NO: 86080 - DNA, 15 bp, Homo sapiens
cacacaggtggataa

SEQ ID NO: 86081 - DNA, 15 bp, Homo sapiens
ccacacaggtggata

SEQ ID NO: 86082 - DNA, 15 bp, Homo sapiens
gccacacaggtggat

SEQ ID NO: 86083 - DNA, 15 bp, Homo sapiens
agccacacaggtgga

SEQ ID NO: 86084 - DNA, 15 bp, Homo sapiens
cagccacacaggtgg

SEQ ID NO: 86085 - DNA, 15 bp, Homo sapiens
acagccacacaggtg

SEQ ID NO: 86086 - DNA, 15 bp, Homo sapiens
cacagccacacaggt

SEQ ID NO: 86087 - DNA, 15 bp, Homo sapiens
gcacagccacacagg

SEQ ID NO: 86088 - DNA, 15 bp, Homo sapiens
agcacagccacacag

SEQ ID NO: 86089 - DNA, 15 bp, Homo sapiens
cagcacagccacaca

SEQ ID NO: 86090 - DNA, 15 bp, Homo sapiens
gcagcacagccacac

SEQ ID NO: 86091 - DNA, 15 bp, Homo sapiens
tgcagcacagccaca

SEQ ID NO: 86092 - DNA, 15 bp, Homo sapiens
ctgcagcacagccac

SEQ ID NO: 86093 - DNA, 15 bp, Homo sapiens
actgcagcacagcca

SEQ ID NO: 86094 - DNA, 15 bp, Homo sapiens
tactgcagcacagcc

SEQ ID NO: 86095 - DNA, 15 bp, Homo sapiens
atactgcagcacagc

SEQ ID NO: 86096 - DNA, 15 bp, Homo sapiens
aatactgcagcacag

SEQ ID NO: 86097 - DNA, 15 bp, Homo sapiens
aaatactgcagcaca

SEQ ID NO: 86098 - DNA, 15 bp, Homo sapiens
aaaatactgcagcac

SEQ ID NO: 86099 - DNA, 15 bp, Homo sapiens
aaaaatactgcagca

SEQ ID NO: 86100 - DNA, 15 bp, Homo sapiens
gaaaaatactgcagc

SEQ ID NO: 86101 - DNA, 15 bp, Homo sapiens
tgaaaaatactgcag

SEQ ID NO: 86102 - DNA, 15 bp, Homo sapiens
atgaaaaatactgca

SEQ ID NO: 86103 - DNA, 15 bp, Homo sapiens
catgaaaaatactgc

SEQ ID NO: 86104 - DNA, 15 bp, Homo sapiens
tcatgaaaaatactg

SEQ ID NO: 86105 - DNA, 15 bp, Homo sapiens
gtcatgaaaaatact

SEQ ID NO: 86106 - DNA, 15 bp, Homo sapiens
cgtcatgaaaaatac

SEQ ID NO: 86107 - DNA, 15 bp, Homo sapiens
ccgtcatgaaaaata

SEQ ID NO: 86108 - DNA, 15 bp, Homo sapiens
cccgtcatgaaaaat

SEQ ID NO: 86109 - DNA, 15 bp, Homo sapiens
acccgtcatgaaaaa

SEQ ID NO: 86110 - DNA, 15 bp, Homo sapiens
tacccgtcatgaaaa

SEQ ID NO: 86111 - DNA, 15 bp, Homo sapiens
gtacccgtcatgaaa

SEQ ID NO: 86112 - DNA, 15 bp, Homo sapiens
tgtacccgtcatgaa

SEQ ID NO: 86113 - DNA, 15 bp, Homo sapiens
ctgtacccgtcatga

SEQ ID NO: 86114 - DNA, 15 bp, Homo sapiens
gctgtacccgtcatg

SEQ ID NO: 86115 - DNA, 15 bp, Homo sapiens
ggctgtacccgtcat

SEQ ID NO: 86116 - DNA, 15 bp, Homo sapiens
tggctgtacccgtca

SEQ ID NO: 86117 - DNA, 15 bp, Homo sapiens
gtggctgtacccgtc

SEQ ID NO: 86118 - DNA, 15 bp, Homo sapiens
agtggctgtacccgt

SEQ ID NO: 86119 - DNA, 15 bp, Homo sapiens
gagtggctgtacccg

SEQ ID NO: 86120 - DNA, 15 bp, Homo sapiens
ggagtggctgtaccc

SEQ ID NO: 86121 - DNA, 15 bp, Homo sapiens
tggagtggctgtacc

SEQ ID NO: 86122 - DNA, 15 bp, Homo sapiens
ctggagtggctgtac

SEQ ID NO: 86123 - DNA, 15 bp, Homo sapiens
actggagtggctgta

SEQ ID NO: 86124 - DNA, 15 bp, Homo sapiens
cactggagtggctgt

SEQ ID NO: 86125 - DNA, 15 bp, Homo sapiens
tcactggagtggctg

SEQ ID NO: 86126 - DNA, 15 bp, Homo sapiens
gtcactggagtggct

SEQ ID NO: 86127 - DNA, 15 bp, Homo sapiens
tgtcactggagtggc

SEQ ID NO: 86128 - DNA, 15 bp, Homo sapiens
atgtcactggagtgg

SEQ ID NO: 86129 - DNA, 15 bp, Homo sapiens
gatgtcactggagtg

SEQ ID NO: 86130 - DNA, 15 bp, Homo sapiens
agatgtcactggagt

SEQ ID NO: 86131 - DNA, 15 bp, Homo sapiens
cagatgtcactggag

SEQ ID NO: 86132 - DNA, 15 bp, Homo sapiens
ccagatgtcactgga

SEQ ID NO: 86133 - DNA, 15 bp, Homo sapiens
gccagatgtcactgg

SEQ ID NO: 86134 - DNA, 15 bp, Homo sapiens
cgccagatgtcactg

SEQ ID NO: 86135 - DNA, 15 bp, Homo sapiens
ccgccagatgtcact

SEQ ID NO: 86136 - DNA, 15 bp, Homo sapiens
tccgccagatgtcac

SEQ ID NO: 86137 - DNA, 15 bp, Homo sapiens
ttccgccagatgtca

SEQ ID NO: 86138 - DNA, 15 bp, Homo sapiens
attccgccagatgtc

SEQ ID NO: 86139 - DNA, 15 bp, Homo sapiens
tattccgccagatgt

SEQ ID NO: 86140 - DNA, 15 bp, Homo sapiens
ctattccgccagatg

SEQ ID NO: 86141 - DNA, 15 bp, Homo sapiens
tctattccgccagat

SEQ ID NO: 86142 - DNA, 15 bp, Homo sapiens
ctctattccgccaga

SEQ ID NO: 86143 - DNA, 15 bp, Homo sapiens
actctattccgccag

SEQ ID NO: 86144 - DNA, 15 bp, Homo sapiens
gactctattccgcca

SEQ ID NO: 86145 - DNA, 15 bp, Homo sapiens
ggactctattccgcc

SEQ ID NO: 86146 - DNA, 15 bp, Homo sapiens
gggactctattccgc

SEQ ID NO: 86147 - DNA, 15 bp, Homo sapiens
tgggactctattccg

SEQ ID NO: 86148 - DNA, 15 bp, Homo sapiens
ctgggactctattcc

SEQ ID NO: 86149 - DNA, 15 bp, Homo sapiens
cctgggactctattc

SEQ ID NO: 86150 - DNA, 15 bp, Homo sapiens
ccctgggactctatt

SEQ ID NO: 86151 - DNA, 15 bp, Homo sapiens
tccctgggactctat

SEQ ID NO: 86152 - DNA, 15 bp, Homo sapiens
ttccctgggactcta

SEQ ID NO: 86153 - DNA, 15 bp, Homo sapiens
tttccctgggactct

SEQ ID NO: 86154 - DNA, 15 bp, Homo sapiens
ttttccctgggactc

SEQ ID NO: 86155 - DNA, 15 bp, Homo sapiens
cttttccctgggact

SEQ ID NO: 86156 - DNA, 15 bp, Homo sapiens
acttttccctgggac

SEQ ID NO: 86157 - DNA, 15 bp, Homo sapiens
tacttttccctggga

SEQ ID NO: 86158 - DNA, 15 bp, Homo sapiens
atacttttccctggg

SEQ ID NO: 86159 - DNA, 15 bp, Homo sapiens
catacttttccctgg

SEQ ID NO: 86160 - DNA, 15 bp, Homo sapiens
acatacttttccctg

SEQ ID NO: 86161 - DNA, 15 bp, Homo sapiens
cacatacttttccct

SEQ ID NO: 86162 - DNA, 15 bp, Homo sapiens
ccacatacttttccc

SEQ ID NO: 86163 - DNA, 15 bp, Homo sapiens
cccacatacttttcc

SEQ ID NO: 86164 - DNA, 15 bp, Homo sapiens
tcccacatacttttc

SEQ ID NO: 86165 - DNA, 15 bp, Homo sapiens
gtcccacatactttt

SEQ ID NO: 86166 - DNA, 15 bp, Homo sapiens
tgtcccacatacttt

SEQ ID NO: 86167 - DNA, 15 bp, Homo sapiens
ctgtcccacatactt

SEQ ID NO: 86168 - DNA, 15 bp, Homo sapiens
gctgtcccacatact

SEQ ID NO: 86169 - DNA, 15 bp, Homo sapiens
tgctgtcccacatac

SEQ ID NO: 86170 - DNA, 15 bp, Homo sapiens
gtgctgtcccacata

SEQ ID NO: 86171 - DNA, 15 bp, Homo sapiens
agtgctgtcccacat

SEQ ID NO: 86172 - DNA, 15 bp, Homo sapiens
aagtgctgtcccaca

SEQ ID NO: 86173 - DNA, 15 bp, Homo sapiens
caagtgctgtcccac

SEQ ID NO: 86174 - DNA, 15 bp, Homo sapiens
acaagtgctgtccca

SEQ ID NO: 86175 - DNA, 15 bp, Homo sapiens
cacaagtgctgtccc

SEQ ID NO: 86176 - DNA, 15 bp, Homo sapiens
gcacaagtgctgtcc

SEQ ID NO: 86177 - DNA, 15 bp, Homo sapiens
agcacaagtgctgtc

SEQ ID NO: 86178 - DNA, 15 bp, Homo sapiens
cagcacaagtgctgt

SEQ ID NO: 86179 - DNA, 15 bp, Homo sapiens
ccagcacaagtgctg

SEQ ID NO: 86180 - DNA, 15 bp, Homo sapiens
accagcacaagtgct

SEQ ID NO: 86181 - DNA, 15 bp, Homo sapiens
caccagcacaagtgc

SEQ ID NO: 86182 - DNA, 15 bp, Homo sapiens
gcaccagcacaagtg

SEQ ID NO: 86183 - DNA, 15 bp, Homo sapiens
tgcaccagcacaagt

SEQ ID NO: 86184 - DNA, 15 bp, Homo sapiens
atgcaccagcacaag

SEQ ID NO: 86185 - DNA, 15 bp, Homo sapiens
gatgcaccagcacaa

SEQ ID NO: 86186 - DNA, 15 bp, Homo sapiens
ggatgcaccagcaca

SEQ ID NO: 86187 - DNA, 15 bp, Homo sapiens
tggatgcaccagcac

SEQ ID NO: 86188 - DNA, 15 bp, Homo sapiens
ctggatgcaccagca

SEQ ID NO: 86189 - DNA, 15 bp, Homo sapiens
cctggatgcaccagc

SEQ ID NO: 86190 - DNA, 15 bp, Homo sapiens
acctggatgcaccag

SEQ ID NO: 86191 - DNA, 15 bp, Homo sapiens
cacctggatgcacca

SEQ ID NO: 86192 - DNA, 15 bp, Homo sapiens
ccacctggatgcacc

SEQ ID NO: 86193 - DNA, 15 bp, Homo sapiens
gccacctggatgcac

SEQ ID NO: 86194 - DNA, 15 bp, Homo sapiens
ggccacctggatgca

SEQ ID NO: 86195 - DNA, 15 bp, Homo sapiens
aggccacctggatgc

SEQ ID NO: 86196 - DNA, 15 bp, Homo sapiens
aaggccacctggatg

SEQ ID NO: 86197 - DNA, 15 bp, Homo sapiens
gaaggccacctggat

SEQ ID NO: 86198 - DNA, 15 bp, Homo sapiens
ggaaggccacctgga

SEQ ID NO: 86199 - DNA, 15 bp, Homo sapiens
gggaaggccacctgg

SEQ ID NO: 86200 - DNA, 15 bp, Homo sapiens
tgggaaggccacctg

SEQ ID NO: 86201 - DNA, 15 bp, Homo sapiens
ctgggaaggccacct

SEQ ID NO: 86202 - DNA, 15 bp, Homo sapiens
tctgggaaggccacc

SEQ ID NO: 86203 - DNA, 15 bp, Homo sapiens
ttctgggaaggccac

SEQ ID NO: 86204 - DNA, 15 bp, Homo sapiens
cttctgggaaggcca

SEQ ID NO: 86205 - DNA, 15 bp, Homo sapiens
gcttctgggaaggcc

SEQ ID NO: 86206 - DNA, 15 bp, Homo sapiens
tgcttctgggaaggc

SEQ ID NO: 86207 - DNA, 15 bp, Homo sapiens
ctgcttctgggaagg

SEQ ID NO: 86208 - DNA, 15 bp, Homo sapiens
gctgcttctgggaag

SEQ ID NO: 86209 - DNA, 15 bp, Homo sapiens
ggctgcttctgggaa

SEQ ID NO: 86210 - DNA, 15 bp, Homo sapiens
gggctgcttctggga

SEQ ID NO: 86211 - DNA, 15 bp, Homo sapiens
agggctgcttctggg

SEQ ID NO: 86212 - DNA, 15 bp, Homo sapiens
gagggctgcttctgg

SEQ ID NO: 86213 - DNA, 15 bp, Homo sapiens
ggagggctgcttctg

SEQ ID NO: 86214 - DNA, 15 bp, Homo sapiens
gggagggctgcttct

SEQ ID NO: 86215 - DNA, 15 bp, Homo sapiens
agggagggctgcttc

SEQ ID NO: 86216 - DNA, 15 bp, Homo sapiens
cagggagggctgctt

SEQ ID NO: 86217 - DNA, 15 bp, Homo sapiens
gcagggagggctgct

SEQ ID NO: 86218 - DNA, 15 bp, Homo sapiens
tgcagggagggctgc

SEQ ID NO: 86219 - DNA, 15 bp, Homo sapiens
ctgcagggagggctg

SEQ ID NO: 86220 - DNA, 15 bp, Homo sapiens
cctgcagggagggct

SEQ ID NO: 86221 - DNA, 15 bp, Homo sapiens
acctgcagggagggc

SEQ ID NO: 86222 - DNA, 15 bp, Homo sapiens
aacctgcagggaggg

SEQ ID NO: 86223 - DNA, 15 bp, Homo sapiens
gaacctgcagggagg

SEQ ID NO: 86224 - DNA, 15 bp, Homo sapiens
agaacctgcagggag

SEQ ID NO: 86225 - DNA, 15 bp, Homo sapiens
gagaacctgcaggga

SEQ ID NO: 86226 - DNA, 15 bp, Homo sapiens
ggagaacctgcaggg

SEQ ID NO: 86227 - DNA, 15 bp, Homo sapiens
gggagaacctgcagg

SEQ ID NO: 86228 - DNA, 15 bp, Homo sapiens
tgggagaacctgcag

SEQ ID NO: 86229 - DNA, 15 bp, Homo sapiens
atgggagaacctgca

SEQ ID NO: 86230 - DNA, 15 bp, Homo sapiens
catgggagaacctgc

SEQ ID NO: 86231 - DNA, 15 bp, Homo sapiens
gcatgggagaacctg

SEQ ID NO: 86232 - DNA, 15 bp, Homo sapiens
ggcatgggagaacct

SEQ ID NO: 86233 - DNA, 15 bp, Homo sapiens
tggcatgggagaacc

SEQ ID NO: 86234 - DNA, 15 bp, Homo sapiens
atggcatgggagaac

SEQ ID NO: 86235 - DNA, 15 bp, Homo sapiens
catggcatgggagaa

SEQ ID NO: 86236 - DNA, 15 bp, Homo sapiens
acatggcatgggaga

SEQ ID NO: 86237 - DNA, 15 bp, Homo sapiens
cacatggcatgggag

SEQ ID NO: 86238 - DNA, 15 bp, Homo sapiens
ccacatggcatggga

SEQ ID NO: 86239 - DNA, 15 bp, Homo sapiens
cccacatggcatggg

SEQ ID NO: 86240 - DNA, 15 bp, Homo sapiens
acccacatggcatgg

SEQ ID NO: 86241 - DNA, 15 bp, Homo sapiens
aacccacatggcatg

SEQ ID NO: 86242 - DNA, 15 bp, Homo sapiens
aaacccacatggcat

SEQ ID NO: 86243 - DNA, 15 bp, Homo sapiens
aaaacccacatggca

SEQ ID NO: 86244 - DNA, 15 bp, Homo sapiens
caaaacccacatggc

SEQ ID NO: 86245 - DNA, 15 bp, Homo sapiens
acaaaacccacatgg

SEQ ID NO: 86246 - DNA, 15 bp, Homo sapiens
gacaaaacccacatg

SEQ ID NO: 86247 - DNA, 15 bp, Homo sapiens
cgacaaaacccacat

SEQ ID NO: 86248 - DNA, 15 bp, Homo sapiens
acgacaaaacccaca

SEQ ID NO: 86249 - DNA, 15 bp, Homo sapiens
cacgacaaaacccac

SEQ ID NO: 86250 - DNA, 15 bp, Homo sapiens
ccacgacaaaaccca

SEQ ID NO: 86251 - DNA, 15 bp, Homo sapiens
accacgacaaaaccc

SEQ ID NO: 86252 - DNA, 15 bp, Homo sapiens
caccacgacaaaacc

SEQ ID NO: 86253 - DNA, 15 bp, Homo sapiens
ccaccacgacaaaac

SEQ ID NO: 86254 - DNA, 15 bp, Homo sapiens
accaccacgacaaaa

SEQ ID NO: 86255 - DNA, 15 bp, Homo sapiens
aaccaccacgacaaa

SEQ ID NO: 86256 - DNA, 15 bp, Homo sapiens
caaccaccacgacaa

SEQ ID NO: 86257 - DNA, 15 bp, Homo sapiens
gcaaccaccacgaca

SEQ ID NO: 86258 - DNA, 15 bp, Homo sapiens
agcaaccaccacgac

SEQ ID NO: 86259 - DNA, 15 bp, Homo sapiens
cagcaaccaccacga

SEQ ID NO: 86260 - DNA, 15 bp, Homo sapiens
gcagcaaccaccacg

SEQ ID NO: 86261 - DNA, 15 bp, Homo sapiens
agcagcaaccaccac

SEQ ID NO: 86262 - DNA, 15 bp, Homo sapiens
aagcagcaaccacca

SEQ ID NO: 86263 - DNA, 15 bp, Homo sapiens
gaagcagcaaccacc

SEQ ID NO: 86264 - DNA, 15 bp, Homo sapiens
ggaagcagcaaccac

SEQ ID NO: 86265 - DNA, 15 bp, Homo sapiens
tggaagcagcaacca

SEQ ID NO: 86266 - DNA, 15 bp, Homo sapiens
atggaagcagcaacc

SEQ ID NO: 86267 - DNA, 15 bp, Homo sapiens
aatggaagcagcaac

SEQ ID NO: 86268 - DNA, 15 bp, Homo sapiens
aaatggaagcagcaa

SEQ ID NO: 86269 - DNA, 15 bp, Homo sapiens
aaaatggaagcagca

SEQ ID NO: 86270 - DNA, 15 bp, Homo sapiens
aaaaatggaagcagc

SEQ ID NO: 86271 - DNA, 15 bp, Homo sapiens
taaaaatggaagcag

SEQ ID NO: 86272 - DNA, 15 bp, Homo sapiens
ataaaaatggaagca

SEQ ID NO: 86273 - DNA, 15 bp, Homo sapiens
gataaaaatggaagc

SEQ ID NO: 86274 - DNA, 15 bp, Homo sapiens
tgataaaaatggaag

SEQ ID NO: 86275 - DNA, 15 bp, Homo sapiens
atgataaaaatggaa

SEQ ID NO: 86276 - DNA, 15 bp, Homo sapiens
gatgataaaaatgga

SEQ ID NO: 86277 - DNA, 15 bp, Homo sapiens
ggatgataaaaatgg

SEQ ID NO: 86278 - DNA, 15 bp, Homo sapiens
gggatgataaaaatg

SEQ ID NO: 86279 - DNA, 15 bp, Homo sapiens
tgggatgataaaaat

SEQ ID NO: 86280 - DNA, 15 bp, Homo sapiens
gtgggatgataaaaa

SEQ ID NO: 86281 - DNA, 15 bp, Homo sapiens
ggtgggatgataaaa

SEQ ID NO: 86282 - DNA, 15 bp, Homo sapiens
aggtgggatgataaa

SEQ ID NO: 86283 - DNA, 15 bp, Homo sapiens
aaggtgggatgataa

SEQ ID NO: 86284 - DNA, 15 bp, Homo sapiens
aaaggtgggatgata

SEQ ID NO: 86285 - DNA, 15 bp, Homo sapiens
caaaggtgggatgat

SEQ ID NO: 86286 - DNA, 15 bp, Homo sapiens
gcaaaggtgggatga

SEQ ID NO: 86287 - DNA, 15 bp, Homo sapiens
agcaaaggtgggatg

SEQ ID NO: 86288 - DNA, 15 bp, Homo sapiens
gagcaaaggtgggat

SEQ ID NO: 86289 - DNA, 15 bp, Homo sapiens
ggagcaaaggtggga

SEQ ID NO: 86290 - DNA, 15 bp, Homo sapiens
tggagcaaaggtggg

SEQ ID NO: 86291 - DNA, 15 bp, Homo sapiens
ctggagcaaaggtgg

SEQ ID NO: 86292 - DNA, 15 bp, Homo sapiens
actggagcaaaggtg

SEQ ID NO: 86293 - DNA, 15 bp, Homo sapiens
cactggagcaaaggt

SEQ ID NO: 86294 - DNA, 15 bp, Homo sapiens
tcactggagcaaagg

SEQ ID NO: 86295 - DNA, 15 bp, Homo sapiens
ctcactggagcaaag

SEQ ID NO: 86296 - DNA, 15 bp, Homo sapiens
cctcactggagcaaa

SEQ ID NO: 86297 - DNA, 15 bp, Homo sapiens
gcctcactggagcaa

SEQ ID NO: 86298 - DNA, 15 bp, Homo sapiens
ggcctcactggagca

SEQ ID NO: 86299 - DNA, 15 bp, Homo sapiens
aggcctcactggagc

SEQ ID NO: 86300 - DNA, 15 bp, Homo sapiens
caggcctcactggag

SEQ ID NO: 86301 - DNA, 15 bp, Homo sapiens
acaggcctcactgga

SEQ ID NO: 86302 - DNA, 15 bp, Homo sapiens
tacaggcctcactgg

SEQ ID NO: 86303 - DNA, 15 bp, Homo sapiens
atacaggcctcactg

SEQ ID NO: 86304 - DNA, 15 bp, Homo sapiens
aatacaggcctcact

SEQ ID NO: 86305 - DNA, 15 bp, Homo sapiens
aaatacaggcctcac

SEQ ID NO: 86306 - DNA, 15 bp, Homo sapiens
taaatacaggcctca

SEQ ID NO: 86307 - DNA, 15 bp, Homo sapiens
ttaaatacaggcctc

SEQ ID NO: 86308 - DNA, 15 bp, Homo sapiens
attaaatacaggcct

SEQ ID NO: 86309 - DNA, 15 bp, Homo sapiens
tattaaatacaggcc

SEQ ID NO: 86310 - DNA, 15 bp, Homo sapiens
gtattaaatacaggc

SEQ ID NO: 86311 - DNA, 15 bp, Homo sapiens
agtattaaatacagg

SEQ ID NO: 86312 - DNA, 15 bp, Homo sapiens
aagtattaaatacag

SEQ ID NO: 86313 - DNA, 15 bp, Homo sapiens
gaagtattaaataca

SEQ ID NO: 86314 - DNA, 15 bp, Homo sapiens
ggaagtattaaatac

SEQ ID NO: 86315 - DNA, 15 bp, Homo sapiens
aggaagtattaaata

SEQ ID NO: 86316 - DNA, 15 bp, Homo sapiens
taggaagtattaaat

SEQ ID NO: 86317 - DNA, 15 bp, Homo sapiens
gtaggaagtattaaa

SEQ ID NO: 86318 - DNA, 15 bp, Homo sapiens
ggtaggaagtattaa

SEQ ID NO: 86319 - DNA, 15 bp, Homo sapiens
gggtaggaagtatta

SEQ ID NO: 86320 - DNA, 15 bp, Homo sapiens
tgggtaggaagtatt

SEQ ID NO: 86321 - DNA, 15 bp, Homo sapiens
atgggtaggaagtat

SEQ ID NO: 86322 - DNA, 15 bp, Homo sapiens
gatgggtaggaagta

SEQ ID NO: 86323 - DNA, 15 bp, Homo sapiens
ggatgggtaggaagt

SEQ ID NO: 86324 - DNA, 15 bp, Homo sapiens
cggatgggtaggaag

SEQ ID NO: 86325 - DNA, 15 bp, Homo sapiens
ccggatgggtaggaa

SEQ ID NO: 86326 - DNA, 15 bp, Homo sapiens
gccggatgggtagga

SEQ ID NO: 86327 - DNA, 15 bp, Homo sapiens
agccggatgggtagg

SEQ ID NO: 86328 - DNA, 15 bp, Homo sapiens
tagccggatgggtag

SEQ ID NO: 86329 - DNA, 15 bp, Homo sapiens
ctagccggatgggta

SEQ ID NO: 86330 - DNA, 15 bp, Homo sapiens
cctagccggatgggt

SEQ ID NO: 86331 - DNA, 15 bp, Homo sapiens
acctagccggatggg

SEQ ID NO: 86332 - DNA, 15 bp, Homo sapiens
cacctagccggatgg

SEQ ID NO: 86333 - DNA, 15 bp, Homo sapiens
ccacctagccggatg

SEQ ID NO: 86334 - DNA, 15 bp, Homo sapiens
cccacctagccggat

SEQ ID NO: 86335 - DNA, 15 bp, Homo sapiens
tcccacctagccgga

SEQ ID NO: 86336 - DNA, 15 bp, Homo sapiens
ctcccacctagccgg

SEQ ID NO: 86337 - DNA, 15 bp, Homo sapiens
tctcccacctagccg

SEQ ID NO: 86338 - DNA, 15 bp, Homo sapiens
ttctcccacctagcc

SEQ ID NO: 86339 - DNA, 15 bp, Homo sapiens
attctcccacctagc

SEQ ID NO: 86340 - DNA, 15 bp, Homo sapiens
tattctcccacctag

SEQ ID NO: 86341 - DNA, 15 bp, Homo sapiens
gtattctcccaccta

SEQ ID NO: 86342 - DNA, 15 bp, Homo sapiens
agtattctcccacct

SEQ ID NO: 86343 - DNA, 15 bp, Homo sapiens
cagtattctcccacc

SEQ ID NO: 86344 - DNA, 15 bp, Homo sapiens
ccagtattctcccac

SEQ ID NO: 86345 - DNA, 15 bp, Homo sapiens
gccagtattctccca

SEQ ID NO: 86346 - DNA, 15 bp, Homo sapiens
agccagtattctccc

SEQ ID NO: 86347 - DNA, 15 bp, Homo sapiens
gagccagtattctcc

SEQ ID NO: 86348 - DNA, 15 bp, Homo sapiens
ggagccagtattctc

SEQ ID NO: 86349 - DNA, 15 bp, Homo sapiens
cggagccagtattct

SEQ ID NO: 86350 - DNA, 15 bp, Homo sapiens
acggagccagtattc

SEQ ID NO: 86351 - DNA, 15 bp, Homo sapiens
gacggagccagtatt

SEQ ID NO: 86352 - DNA, 15 bp, Homo sapiens
agacggagccagtat

SEQ ID NO: 86353 - DNA, 15 bp, Homo sapiens
aagacggagccagta

SEQ ID NO: 86354 - DNA, 15 bp, Homo sapiens
taagacggagccagt

SEQ ID NO: 86355 - DNA, 15 bp, Homo sapiens
gtaagacggagccag

SEQ ID NO: 86356 - DNA, 15 bp, Homo sapiens
tgtaagacggagcca

SEQ ID NO: 86357 - DNA, 15 bp, Homo sapiens
ctgtaagacggagcc

SEQ ID NO: 86358 - DNA, 15 bp, Homo sapiens
tctgtaagacggagc

SEQ ID NO: 86359 - DNA, 15 bp, Homo sapiens
ttctgtaagacggag

SEQ ID NO: 86360 - DNA, 15 bp, Homo sapiens
cttctgtaagacgga

SEQ ID NO: 86361 - DNA, 15 bp, Homo sapiens
tcttctgtaagacgg

SEQ ID NO: 86362 - DNA, 15 bp, Homo sapiens
ctcttctgtaagacg

SEQ ID NO: 86363 - DNA, 15 bp, Homo sapiens
tctcttctgtaagac

SEQ ID NO: 86364 - DNA, 15 bp, Homo sapiens
ttctcttctgtaaga

SEQ ID NO: 86365 - DNA, 15 bp, Homo sapiens
gttctcttctgtaag

SEQ ID NO: 86366 - DNA, 15 bp, Homo sapiens
tgttctcttctgtaa

SEQ ID NO: 86367 - DNA, 15 bp, Homo sapiens
atgttctcttctgta

SEQ ID NO: 86368 - DNA, 15 bp, Homo sapiens
gatgttctcttctgt

SEQ ID NO: 86369 - DNA, 15 bp, Homo sapiens
agatgttctcttctg

SEQ ID NO: 86370 - DNA, 15 bp, Homo sapiens
tagatgttctcttct

SEQ ID NO: 86371 - DNA, 15 bp, Homo sapiens
ttagatgttctcttc

SEQ ID NO: 86372 - DNA, 15 bp, Homo sapiens
cttagatgttctctt

SEQ ID NO: 86373 - DNA, 15 bp, Homo sapiens
gcttagatgttctct

SEQ ID NO: 86374 - DNA, 15 bp, Homo sapiens
agcttagatgttctc

SEQ ID NO: 86375 - DNA, 15 bp, Homo sapiens
cagcttagatgttct

SEQ ID NO: 86376 - DNA, 15 bp, Homo sapiens
gcagcttagatgttc

SEQ ID NO: 86377 - DNA, 15 bp, Homo sapiens
agcagcttagatgtt

SEQ ID NO: 86378 - DNA, 15 bp, Homo sapiens
aagcagcttagatgt

SEQ ID NO: 86379 - DNA, 15 bp, Homo sapiens
taagcagcttagatg

SEQ ID NO: 86380 - DNA, 15 bp, Homo sapiens
ttaagcagcttagat

SEQ ID NO: 86381 - DNA, 15 bp, Homo sapiens
attaagcagcttaga

SEQ ID NO: 86382 - DNA, 15 bp, Homo sapiens
cattaagcagcttag

SEQ ID NO: 86383 - DNA, 15 bp, Homo sapiens
ccattaagcagctta

SEQ ID NO: 86384 - DNA, 15 bp, Homo sapiens
accattaagcagctt

SEQ ID NO: 86385 - DNA, 15 bp, Homo sapiens
taccattaagcagct

SEQ ID NO: 86386 - DNA, 15 bp, Homo sapiens
ctaccattaagcagc

SEQ ID NO: 86387 - DNA, 15 bp, Homo sapiens
actaccattaagcag

SEQ ID NO: 86388 - DNA, 15 bp, Homo sapiens
tactaccattaagca

SEQ ID NO: 86389 - DNA, 15 bp, Homo sapiens
ttactaccattaagc

SEQ ID NO: 86390 - DNA, 15 bp, Homo sapiens
cttactaccattaag

SEQ ID NO: 86391 - DNA, 15 bp, Homo sapiens
acttactaccattaa

SEQ ID NO: 86392 - DNA, 15 bp, Homo sapiens
gacttactaccatta

SEQ ID NO: 86393 - DNA, 15 bp, Homo sapiens
agacttactaccatt

SEQ ID NO: 86394 - DNA, 15 bp, Homo sapiens
gagacttactaccat

SEQ ID NO: 86395 - DNA, 15 bp, Homo sapiens
tgagacttactacca

SEQ ID NO: 86396 - DNA, 15 bp, Homo sapiens
ttgagacttactacc

SEQ ID NO: 86397 - DNA, 15 bp, Homo sapiens
gttgagacttactac

SEQ ID NO: 86398 - DNA, 15 bp, Homo sapiens
tgttgagacttacta

SEQ ID NO: 86399 - DNA, 15 bp, Homo sapiens
atgttgagacttact

SEQ ID NO: 86400 - DNA, 15 bp, Homo sapiens
gatgttgagacttac

SEQ ID NO: 86401 - DNA, 15 bp, Homo sapiens
agatgttgagactta

SEQ ID NO: 86402 - DNA, 15 bp, Homo sapiens
gagatgttgagactt

SEQ ID NO: 86403 - DNA, 15 bp, Homo sapiens
tgagatgttgagact

SEQ ID NO: 86404 - DNA, 15 bp, Homo sapiens
ctgagatgttgagac

SEQ ID NO: 86405 - DNA, 15 bp, Homo sapiens
actgagatgttgaga

SEQ ID NO: 86406 - DNA, 15 bp, Homo sapiens
gactgagatgttgag

SEQ ID NO: 86407 - DNA, 15 bp, Homo sapiens
agactgagatgttga

SEQ ID NO: 86408 - DNA, 15 bp, Homo sapiens
cagactgagatgttg

SEQ ID NO: 86409 - DNA, 15 bp, Homo sapiens
ccagactgagatgtt

SEQ ID NO: 86410 - DNA, 15 bp, Homo sapiens
gccagactgagatgt

SEQ ID NO: 86411 - DNA, 15 bp, Homo sapiens
agccagactgagatg

SEQ ID NO: 86412 - DNA, 15 bp, Homo sapiens
aagccagactgagat

SEQ ID NO: 86413 - DNA, 15 bp, Homo sapiens
aaagccagactgaga

SEQ ID NO: 86414 - DNA, 15 bp, Homo sapiens
caaagccagactgag

SEQ ID NO: 86415 - DNA, 15 bp, Homo sapiens
gcaaagccagactga

SEQ ID NO: 86416 - DNA, 15 bp, Homo sapiens
agcaaagccagactg

SEQ ID NO: 86417 - DNA, 15 bp, Homo sapiens
aagcaaagccagact

SEQ ID NO: 86418 - DNA, 15 bp, Homo sapiens
aaagcaaagccagac

SEQ ID NO: 86419 - DNA, 15 bp, Homo sapiens
caaagcaaagccaga

SEQ ID NO: 86420 - DNA, 15 bp, Homo sapiens
gcaaagcaaagccag

SEQ ID NO: 86421 - DNA, 15 bp, Homo sapiens
cgcaaagcaaagcca

SEQ ID NO: 86422 - DNA, 15 bp, Homo sapiens
gcgcaaagcaaagcc

SEQ ID NO: 86423 - DNA, 15 bp, Homo sapiens
agcgcaaagcaaagc

SEQ ID NO: 86424 - DNA, 15 bp, Homo sapiens
cagcgcaaagcaaag

SEQ ID NO: 86425 - DNA, 15 bp, Homo sapiens
acagcgcaaagcaaa

SEQ ID NO: 86426 - DNA, 15 bp, Homo sapiens
gacagcgcaaagcaa

SEQ ID NO: 86427 - DNA, 15 bp, Homo sapiens
ggacagcgcaaagca

SEQ ID NO: 86428 - DNA, 15 bp, Homo sapiens
gggacagcgcaaagc

SEQ ID NO: 86429 - DNA, 15 bp, Homo sapiens
agggacagcgcaaag

SEQ ID NO: 86430 - DNA, 15 bp, Homo sapiens
aagggacagcgcaaa

SEQ ID NO: 86431 - DNA, 15 bp, Homo sapiens
aaagggacagcgcaa

SEQ ID NO: 86432 - DNA, 15 bp, Homo sapiens
caaagggacagcgca

SEQ ID NO: 86433 - DNA, 15 bp, Homo sapiens
tcaaagggacagcgc

SEQ ID NO: 86434 - DNA, 15 bp, Homo sapiens
atcaaagggacagcg

SEQ ID NO: 86435 - DNA, 15 bp, Homo sapiens
tatcaaagggacagc

SEQ ID NO: 86436 - DNA, 15 bp, Homo sapiens
gtatcaaagggacag

SEQ ID NO: 86437 - DNA, 15 bp, Homo sapiens
agtatcaaagggaca

SEQ ID NO: 86438 - DNA, 15 bp, Homo sapiens
cagtatcaaagggac

SEQ ID NO: 86439 - DNA, 15 bp, Homo sapiens
acagtatcaaaggga

SEQ ID NO: 86440 - DNA, 15 bp, Homo sapiens
cacagtatcaaaggg

SEQ ID NO: 86441 - DNA, 15 bp, Homo sapiens
ccacagtatcaaagg

SEQ ID NO: 86442 - DNA, 15 bp, Homo sapiens
cccacagtatcaaag

SEQ ID NO: 86443 - DNA, 15 bp, Homo sapiens
tcccacagtatcaaa

SEQ ID NO: 86444 - DNA, 15 bp, Homo sapiens
gtcccacagtatcaa

SEQ ID NO: 86445 - DNA, 15 bp, Homo sapiens
ggtcccacagtatca

SEQ ID NO: 86446 - DNA, 15 bp, Homo sapiens
aggtcccacagtatc

SEQ ID NO: 86447 - DNA, 15 bp, Homo sapiens
taggtcccacagtat

SEQ ID NO: 86448 - DNA, 15 bp, Homo sapiens
gtaggtcccacagta

SEQ ID NO: 86449 - DNA, 15 bp, Homo sapiens
agtaggtcccacagt

SEQ ID NO: 86450 - DNA, 15 bp, Homo sapiens
aagtaggtcccacag
